United States Patent Application Publication US 2018/0305689 A1 - sequence listing, part 92

SEQ ID NO: 1292172 - RNA, 19 nt, Artificial Sequence
  Description of Artificial Sequence: Synthetic oligonucleotide
  Sense strand starting at position 3116 of SEQ ID NO: 1241691
auuaaugggugacuuuauu

SEQ ID NO: 1292173 - RNA, 19 nt, Artificial Sequence
  Description of Artificial Sequence: Synthetic oligonucleotide
  Antisense strand to SEQ ID NO: 1292172
aauaaagucacccauuaau

SEQ ID NO: 1292174 - RNA, 19 nt, Artificial Sequence
  Description of Artificial Sequence: Synthetic oligonucleotide
  Sense strand starting at position 3167 of SEQ ID NO: 1241691
caaagugauccuugacagu

SEQ ID NO: 1292175 - RNA, 19 nt, Artificial Sequence
  Description of Artificial Sequence: Synthetic oligonucleotide
  Antisense strand to SEQ ID NO: 1292174
acugucaaggaucacuuug

SEQ ID NO: 1292176 - RNA, 19 nt, Artificial Sequence
  Description of Artificial Sequence: Synthetic oligonucleotide
  Sense strand starting at position 3208 of SEQ ID NO: 1241691
uuaaguuucuaggcuggua

SEQ ID NO: 1292177 - RNA, 19 nt, Artificial Sequence
  Description of Artificial Sequence: Synthetic oligonucleotide
  Antisense strand to SEQ ID NO: 1292176
uaccagccuagaaacuuaa

SEQ ID NO: 1292178 - RNA, 19 nt, Artificial Sequence
  Description of Artificial Sequence: Synthetic oligonucleotide
  Sense strand starting at position 3331 of SEQ ID NO: 1241691
guagacauauucccagaac

SEQ ID NO: 1292179 - RNA, 19 nt, Artificial Sequence
  Description of Artificial Sequence: Synthetic oligonucleotide
  Antisense strand to SEQ ID NO: 1292178
guucugggaauaugucuac

SEQ ID NO: 1292180 - RNA, 19 nt, Artificial Sequence
  Description of Artificial Sequence: Synthetic oligonucleotide
  Sense strand starting at position 3404 of SEQ ID NO: 1241691
agaacuucugucugagagu

SEQ ID NO: 1292181 - RNA, 19 nt, Artificial Sequence
  Description of Artificial Sequence: Synthetic oligonucleotide
  Antisense strand to SEQ ID NO: 1292180
acucucagacagaaguucu

SEQ ID NO: 1292182 - RNA, 19 nt, Artificial Sequence
  Description of Artificial Sequence: Synthetic oligonucleotide
  Sense strand starting at position 3511 of SEQ ID NO: 1241691
aaggcugacuucucaggua

SEQ ID NO: 1292183 - RNA, 19 nt, Artificial Sequence
  Description of Artificial Sequence: Synthetic oligonucleotide
  Antisense strand to SEQ ID NO: 1292182
uaccugagaagucagccuu

SEQ ID NO: 1292184 - RNA, 19 nt, Artificial Sequence
  Description of Artificial Sequence: Synthetic oligonucleotide
  Sense strand starting at position 3540 of SEQ ID NO: 1241691
ucugccauuguagacauaa

SEQ ID NO: 1292185 - RNA, 19 nt, Artificial Sequence
  Description of Artificial Sequence: Synthetic oligonucleotide
  Antisense strand to SEQ ID NO: 1292184
uuaugucuacaauggcaga

SEQ ID NO: 1292186 - RNA, 19 nt, Artificial Sequence
  Description of Artificial Sequence: Synthetic oligonucleotide
  Sense strand starting at position 3596 of SEQ ID NO: 1241691
gcaagucuuaaguguugaa

SEQ ID NO: 1292187 - RNA, 19 nt, Artificial Sequence
  Description of Artificial Sequence: Synthetic oligonucleotide
  Antisense strand to SEQ ID NO: 1292186
uucaacacuuaagacuugc

SEQ ID NO: 1292188 - RNA, 19 nt, Artificial Sequence
  Description of Artificial Sequence: Synthetic oligonucleotide
  Sense strand starting at position 3600 of SEQ ID NO: 1241691
gucuuaaguguugaagagu

SEQ ID NO: 1292189 - RNA, 19 nt, Artificial Sequence
  Description of Artificial Sequence: Synthetic oligonucleotide
  Antisense strand to SEQ ID NO: 1292188
acucuucaacacuuaagac

SEQ ID NO: 1292190 - RNA, 19 nt, Artificial Sequence
  Description of Artificial Sequence: Synthetic oligonucleotide
  Sense strand starting at position 3709 of SEQ ID NO: 1241691
gacccaguguuguccuuga

SEQ ID NO: 1292191 - RNA, 19 nt, Artificial Sequence
  Description of Artificial Sequence: Synthetic oligonucleotide
  Antisense strand to SEQ ID NO: 1292190
ucaaggacaacacuggguc

SEQ ID NO: 1292192 - RNA, 19 nt, Artificial Sequence
  Description of Artificial Sequence: Synthetic oligonucleotide
  Sense strand starting at position 3713 of SEQ ID NO: 1241691
caguguuguccuugauuua

SEQ ID NO: 1292193 - RNA, 19 nt, Artificial Sequence
  Description of Artificial Sequence: Synthetic oligonucleotide
  Antisense strand to SEQ ID NO: 1292192
uaaaucaaggacaacacug

SEQ ID NO: 1292194 - RNA, 19 nt, Artificial Sequence
  Description of Artificial Sequence: Synthetic oligonucleotide
  Sense strand starting at position 3716 of SEQ ID NO: 1241691
uguuguccuugauuuacuu

SEQ ID NO: 1292195 - RNA, 19 nt, Artificial Sequence
  Description of Artificial Sequence: Synthetic oligonucleotide
  Antisense strand to SEQ ID NO: 1292194
aaguaaaucaaggacaaca

SEQ ID NO: 1292196 - RNA, 19 nt, Artificial Sequence
  Description of Artificial Sequence: Synthetic oligonucleotide
  Sense strand starting at position 3861 of SEQ ID NO: 1241691
acaugauagucaucugcaa

SEQ ID NO: 1292197 - RNA, 19 nt, Artificial Sequence
  Description of Artificial Sequence: Synthetic oligonucleotide
  Antisense strand to SEQ ID NO: 1292196
uugcagaugacuaucaugu

SEQ ID NO: 1292198 - RNA, 19 nt, Artificial Sequence
  Description of Artificial Sequence: Synthetic oligonucleotide
  Sense strand starting at position 3865 of SEQ ID NO: 1241691
gauagucaucugcaaucug

SEQ ID NO: 1292199 - RNA, 19 nt, Artificial Sequence
  Description of Artificial Sequence: Synthetic oligonucleotide
  Antisense strand to SEQ ID NO: 1292198
cagauugcagaugacuauc

SEQ ID NO: 1292200 - RNA, 19 nt, Artificial Sequence
  Description of Artificial Sequence: Synthetic oligonucleotide
  Sense strand starting at position 298 of SEQ ID NO: 1241692
gacucuggcuucucauuga

SEQ ID NO: 1292201 - RNA, 19 nt, Artificial Sequence
  Description of Artificial Sequence: Synthetic oligonucleotide
  Antisense strand to SEQ ID NO: 1292200
ucaaugagaagccagaguc

SEQ ID NO: 1292202 - RNA, 19 nt, Artificial Sequence
  Description of Artificial Sequence: Synthetic oligonucleotide
  Sense strand starting at position 421 of SEQ ID NO: 1241692
cucgaugagccacacuauu

SEQ ID NO: 1292203 - RNA, 19 nt, Artificial Sequence
  Description of Artificial Sequence: Synthetic oligonucleotide
  Antisense strand to SEQ ID NO: 1292202
aauaguguggcucaucgag

SEQ ID NO: 1292204 - RNA, 19 nt, Artificial Sequence
  Description of Artificial Sequence: Synthetic oligonucleotide
  Sense strand starting at position 432 of SEQ ID NO: 1241692
acacuauucuggucugaca

SEQ ID NO: 1292205 - RNA, 19 nt, Artificial Sequence
  Description of Artificial Sequence: Synthetic oligonucleotide
  Antisense strand to SEQ ID NO: 1292204
ugucagaccagaauagugu

SEQ ID NO: 1292206 - RNA, 19 nt, Artificial Sequence
  Description of Artificial Sequence: Synthetic oligonucleotide
  Sense strand starting at position 439 of SEQ ID NO: 1241692
ucuggucugacaggguaaa

SEQ ID NO: 1292207 - RNA, 19 nt, Artificial Sequence
  Description of Artificial Sequence: Synthetic oligonucleotide
  Antisense strand to SEQ ID NO: 1292206
uuuacccugucagaccaga

SEQ ID NO: 1292208 - RNA, 19 nt, Artificial Sequence
  Description of Artificial Sequence: Synthetic oligonucleotide
  Sense strand starting at position 449 of SEQ ID NO: 1241692
caggguaaagguugggaua

SEQ ID NO: 1292209 - RNA, 19 nt, Artificial Sequence
  Description of Artificial Sequence: Synthetic oligonucleotide
  Antisense strand to SEQ ID NO: 1292208
uaucccaaccuuuacccug

SEQ ID NO: 1292210 - RNA, 19 nt, Artificial Sequence
  Description of Artificial Sequence: Synthetic oligonucleotide
  Sense strand starting at position 487 of SEQ ID NO: 1241692
cuggauugguuguuauaag

SEQ ID NO: 1292211 - RNA, 19 nt, Artificial Sequence
  Description of Artificial Sequence: Synthetic oligonucleotide
  Antisense strand to SEQ ID NO: 1292210
cuuauaacaaccaauccag

SEQ ID NO: 1292212 - RNA, 19 nt, Artificial Sequence
  Description of Artificial Sequence: Synthetic oligonucleotide
  Sense strand starting at position 531 of SEQ ID NO: 1241692
uugggacucuccuuguagu

SEQ ID NO: 1292213 - RNA, 19 nt, Artificial Sequence
  Description of Artificial Sequence: Synthetic oligonucleotide
  Antisense strand to SEQ ID NO: 1292212
acuacaaggagagucccaa

SEQ ID NO: 1292214 - RNA, 19 nt, Artificial Sequence
  Description of Artificial Sequence: Synthetic oligonucleotide
  Sense strand starting at position 557 of SEQ ID NO: 1241692
uggcccuagagguaaauau

SEQ ID NO: 1292215 - RNA, 19 nt, Artificial Sequence
  Description of Artificial Sequence: Synthetic oligonucleotide
  Antisense strand to SEQ ID NO: 1292214
auauuuaccucuagggcca

SEQ ID NO: 1292216 - RNA, 19 nt, Artificial Sequence
  Description of Artificial Sequence: Synthetic oligonucleotide
  Sense strand starting at position 612 of SEQ ID NO: 1241692
agccucaugggugaucaga

SEQ ID NO: 1292217 - RNA, 19 nt, Artificial Sequence
  Description of Artificial Sequence: Synthetic oligonucleotide
  Antisense strand to SEQ ID NO: 1292216
ucugaucacccaugaggcu

SEQ ID NO: 1292218 - RNA, 19 nt, Artificial Sequence
  Description of Artificial Sequence: Synthetic oligonucleotide
  Sense strand starting at position 614 of SEQ ID NO: 1241692
ccucaugggugaucagaag

SEQ ID NO: 1292219 - RNA, 19 nt, Artificial Sequence
  Description of Artificial Sequence: Synthetic oligonucleotide
  Antisense strand to SEQ ID NO: 1292218
cuucugaucacccaugagg

SEQ ID NO: 1292220 - RNA, 19 nt, Artificial Sequence
  Description of Artificial Sequence: Synthetic oligonucleotide
  Sense strand starting at position 1049 of SEQ ID NO: 1241692
ugggucugucaccaagaca

SEQ ID NO: 1292221 - RNA, 19 nt, Artificial Sequence
  Description of Artificial Sequence: Synthetic oligonucleotide
  Antisense strand to SEQ ID NO: 1292220
ugucuuggugacagaccca

SEQ ID NO: 1292222 - RNA, 19 nt, Artificial Sequence
  Description of Artificial Sequence: Synthetic oligonucleotide
  Sense strand starting at position 1144 of SEQ ID NO: 1241692
acaguuaugccucagaaac

SEQ ID NO: 1292223 - RNA, 19 nt, Artificial Sequence
  Description of Artificial Sequence: Synthetic oligonucleotide
  Antisense strand to SEQ ID NO: 1292222
guuucugaggcauaacugu

SEQ ID NO: 1292224 - RNA, 19 nt, Artificial Sequence
  Description of Artificial Sequence: Synthetic oligonucleotide
  Sense strand starting at position 1162 of SEQ ID NO: 1241692
ccaagaaaggugcauccau

SEQ ID NO: 1292225 - RNA, 19 nt, Artificial Sequence
  Description of Artificial Sequence: Synthetic oligonucleotide
  Antisense strand to SEQ ID NO: 1292224
auggaugcaccuuucuugg

SEQ ID NO: 1292226 - RNA, 19 nt, Artificial Sequence
  Description of Artificial Sequence: Synthetic oligonucleotide
  Sense strand starting at position 1265 of SEQ ID NO: 1241692
gucacauguucccuccaaa

SEQ ID NO: 1292227 - RNA, 19 nt, Artificial Sequence
  Description of Artificial Sequence: Synthetic oligonucleotide
  Antisense strand to SEQ ID NO: 1292226
uuuggagggaacaugugac

SEQ ID NO: 1292228 - RNA, 19 nt, Artificial Sequence
  Description of Artificial Sequence: Synthetic oligonucleotide
  Sense strand starting at position 1451 of SEQ ID NO: 1241692
uguccagacuugccaaagu

SEQ ID NO: 1292229 - RNA, 19 nt, Artificial Sequence
  Description of Artificial Sequence: Synthetic oligonucleotide
  Antisense strand to SEQ ID NO: 1292228
acuuuggcaagucuggaca

SEQ ID NO: 1292230 - RNA, 19 nt, Artificial Sequence
  Description of Artificial Sequence: Synthetic oligonucleotide
  Sense strand starting at position 1548 of SEQ ID NO: 1241692
gcagaugagugggagagaa

SEQ ID NO: 1292231 - RNA, 19 nt, Artificial Sequence
  Description of Artificial Sequence: Synthetic oligonucleotide
  Antisense strand to SEQ ID NO: 1292230
uucucucccacucaucugc

SEQ ID NO: 1292232 - RNA, 19 nt, Artificial Sequence
  Description of Artificial Sequence: Synthetic oligonucleotide
  Sense strand starting at position 1660 of SEQ ID NO: 1241692
ugacgccacuuuguagaaa

SEQ ID NO: 1292233 - RNA, 19 nt, Artificial Sequence
  Description of Artificial Sequence: Synthetic oligonucleotide
  Antisense strand to SEQ ID NO: 1292232
uuucuacaaaguggcguca

SEQ ID NO: 1292234 - RNA, 19 nt, Artificial Sequence
  Description of Artificial Sequence: Synthetic oligonucleotide
  Sense strand starting at position 2068 of SEQ ID NO: 1241692
acguguuucuaauugugga

SEQ ID NO: 1292235 - RNA, 19 nt, Artificial Sequence
  Description of Artificial Sequence: Synthetic oligonucleotide
  Antisense strand to SEQ ID NO: 1292234
uccacaauuagaaacacgu

SEQ ID NO: 1292236 - RNA, 19 nt, Artificial Sequence
  Description of Artificial Sequence: Synthetic oligonucleotide
  Sense strand starting at position 2069 of SEQ ID NO: 1241692
cguguuucuaauuguggaa

SEQ ID NO: 1292237 - RNA, 19 nt, Artificial Sequence
  Description of Artificial Sequence: Synthetic oligonucleotide
  Antisense strand to SEQ ID NO: 1292236
uuccacaauuagaaacacg

SEQ ID NO: 1292238 - RNA, 19 nt, Artificial Sequence
  Description of Artificial Sequence: Synthetic oligonucleotide
  Sense strand starting at position 2123 of SEQ ID NO: 1241692
uuuccagaucuaggaggua

SEQ ID NO: 1292239 - RNA, 19 nt, Artificial Sequence
  Description of Artificial Sequence: Synthetic oligonucleotide
  Antisense strand to SEQ ID NO: 1292238
uaccuccuagaucuggaaa

SEQ ID NO: 1292240 - RNA, 19 nt, Artificial Sequence
  Description of Artificial Sequence: Synthetic oligonucleotide
  Sense strand starting at position 2188 of SEQ ID NO: 1241692
aggccuguuugaccucuaa

SEQ ID NO: 1292241 - RNA, 19 nt, Artificial Sequence
  Description of Artificial Sequence: Synthetic oligonucleotide
  Antisense strand to SEQ ID NO: 1292240
uuagaggucaaacaggccu

SEQ ID NO: 1292242 - RNA, 19 nt, Artificial Sequence
  Description of Artificial Sequence: Synthetic oligonucleotide
  Sense strand starting at position 2192 of SEQ ID NO: 1241692
cuguuugaccucuaacgca

SEQ ID NO: 1292243 - RNA, 19 nt, Artificial Sequence
  Description of Artificial Sequence: Synthetic oligonucleotide
  Antisense strand to SEQ ID NO: 1292242
ugcguuagaggucaaacag

SEQ ID NO: 1292244 - RNA, 19 nt, Artificial Sequence
  Description of Artificial Sequence: Synthetic oligonucleotide
  Sense strand starting at position 2264 of SEQ ID NO: 1241692
acagucuuuccucgucaaa

SEQ ID NO: 1292245 - RNA, 19 nt, Artificial Sequence
  Description of Artificial Sequence: Synthetic oligonucleotide
  Antisense strand to SEQ ID NO: 1292244
uuugacgaggaaagacugu

SEQ ID NO: 1292246 - RNA, 19 nt, Artificial Sequence
  Description of Artificial Sequence: Synthetic oligonucleotide
  Sense strand starting at position 2266 of SEQ ID NO: 1241692
agucuuuccucgucaaaga

SEQ ID NO: 1292247 - RNA, 19 nt, Artificial Sequence
  Description of Artificial Sequence: Synthetic oligonucleotide
  Antisense strand to SEQ ID NO: 1292246
ucuuugacgaggaaagacu

SEQ ID NO: 1292248 - RNA, 19 nt, Artificial Sequence
  Description of Artificial Sequence: Synthetic oligonucleotide
  Sense strand starting at position 2267 of SEQ ID NO: 1241692
gucuuuccucgucaaagac

SEQ ID NO: 1292249 - RNA, 19 nt, Artificial Sequence
  Description of Artificial Sequence: Synthetic oligonucleotide
  Antisense strand to SEQ ID NO: 1292248
gucuuugacgaggaaagac

SEQ ID NO: 1292250 - RNA, 19 nt, Artificial Sequence
  Description of Artificial Sequence: Synthetic oligonucleotide
  Sense strand starting at position 2416 of SEQ ID NO: 1241692
auuauaaaguccuuccgca

SEQ ID NO: 1292251 - RNA, 19 nt, Artificial Sequence
  Description of Artificial Sequence: Synthetic oligonucleotide
  Antisense strand to SEQ ID NO: 1292250
ugcggaaggacuuuauaau

SEQ ID NO: 1292252 - RNA, 19 nt, Artificial Sequence
  Description of Artificial Sequence: Synthetic oligonucleotide
  Sense strand starting at position 2437 of SEQ ID NO: 1241692
uggauuauuguacauguaa

SEQ ID NO: 1292253 - RNA, 19 nt, Artificial Sequence
  Description of Artificial Sequence: Synthetic oligonucleotide
  Antisense strand to SEQ ID NO: 1292252
uuacauguacaauaaucca

SEQ ID NO: 1292254 - RNA, 19 nt, Artificial Sequence
  Description of Artificial Sequence: Synthetic oligonucleotide
  Sense strand starting at position 2480 of SEQ ID NO: 1241692
cauauaacuugacugguga

SEQ ID NO: 1292255 - RNA, 19 nt, Artificial Sequence
  Description of Artificial Sequence: Synthetic oligonucleotide
  Antisense strand to SEQ ID NO: 1292254
ucaccagucaaguuauaug

SEQ ID NO: 1292256 - RNA, 19 nt, Artificial Sequence
  Description of Artificial Sequence: Synthetic oligonucleotide
  Sense strand starting at position 2481 of SEQ ID NO: 1241692
auauaacuugacuggugaa

SEQ ID NO: 1292257 - RNA, 19 nt, Artificial Sequence
  Description of Artificial Sequence: Synthetic oligonucleotide
  Antisense strand to SEQ ID NO: 1292256
uucaccagucaaguuauau

SEQ ID NO: 1292258 - RNA, 19 nt, Artificial Sequence
  Description of Artificial Sequence: Synthetic oligonucleotide
  Sense strand starting at position 2647 of SEQ ID NO: 1241692
acagaucuugccuaucgca

SEQ ID NO: 1292259 - RNA, 19 nt, Artificial Sequence
  Description of Artificial Sequence: Synthetic oligonucleotide
  Antisense strand to SEQ ID NO: 1292258
ugcgauaggcaagaucugu

SEQ ID NO: 1292260 - RNA, 19 nt, Artificial Sequence
  Description of Artificial Sequence: Synthetic oligonucleotide
  Sense strand starting at position 2655 of SEQ ID NO: 1241692
ugccuaucgcacgauagua

SEQ ID NO: 1292261 - RNA, 19 nt, Artificial Sequence
  Description of Artificial Sequence: Synthetic oligonucleotide
  Antisense strand to SEQ ID NO: 1292260
uacuaucgugcgauaggca

SEQ ID NO: 1292262 - RNA, 19 nt, Artificial Sequence
  Description of Artificial Sequence: Synthetic oligonucleotide
  Sense strand starting at position 2839 of SEQ ID NO: 1241692
gugagugcuccuggaggca

SEQ ID NO: 1292263 - RNA, 19 nt, Artificial Sequence
  Description of Artificial Sequence: Synthetic oligonucleotide
  Antisense strand to SEQ ID NO: 1292262
ugccuccaggagcacucac

SEQ ID NO: 1292264 - RNA, 19 nt, Artificial Sequence
  Description of Artificial Sequence: Synthetic oligonucleotide
  Sense strand starting at position 3012 of SEQ ID NO: 1241692
guauuuagcucagccaaga

SEQ ID NO: 1292265 - RNA, 19 nt, Artificial Sequence
  Description of Artificial Sequence: Synthetic oligonucleotide
  Antisense strand to SEQ ID NO: 1292264
ucuuggcugagcuaaauac

SEQ ID NO: 1292266 - RNA, 19 nt, Artificial Sequence
  Description of Artificial Sequence: Synthetic oligonucleotide
  Sense strand starting at position 3244 of SEQ ID NO: 1241692
accaauucucagggcugau

SEQ ID NO: 1292267 - RNA, 19 nt, Artificial Sequence
  Description of Artificial Sequence: Synthetic oligonucleotide
  Antisense strand to SEQ ID NO: 1292266
aucagcccugagaauuggu

SEQ ID NO: 1292268 - RNA, 19 nt, Artificial Sequence
  Description of Artificial Sequence: Synthetic oligonucleotide
  Sense strand starting at position 3287 of SEQ ID NO: 1241692
ggaugagaauggguucugu

SEQ ID NO: 1292269 - RNA, 19 nt, Artificial Sequence
  Description of Artificial Sequence: Synthetic oligonucleotide
  Antisense strand to SEQ ID NO: 1292268
acagaacccauucucaucc

SEQ ID NO: 1292270 - RNA, 19 nt, Artificial Sequence
  Description of Artificial Sequence: Synthetic oligonucleotide
  Sense strand starting at position 3381 of SEQ ID NO: 1241692
cugugagguuuaguugguu

SEQ ID NO: 1292271 - RNA, 19 nt, Artificial Sequence
  Description of Artificial Sequence: Synthetic oligonucleotide
  Antisense strand to SEQ ID NO: 1292270
aaccaacuaaaccucacag

SEQ ID NO: 1292272 - RNA, 19 nt, Artificial Sequence
  Description of Artificial Sequence: Synthetic oligonucleotide
  Sense strand starting at position 3508 of SEQ ID NO: 1241692
gguagcuuguacuuaaacu

SEQ ID NO: 1292273 - RNA, 19 nt, Artificial Sequence
  Description of Artificial Sequence: Synthetic oligonucleotide
  Antisense strand to SEQ ID NO: 1292272
aguuuaaguacaagcuacc

SEQ ID NO: 1292274 - RNA, 19 nt, Artificial Sequence
  Description of Artificial Sequence: Synthetic oligonucleotide
  Sense strand starting at position 3867 of SEQ ID NO: 1241692
ggaacacuuugugaauuug

SEQ ID NO: 1292275 - RNA, 19 nt, Artificial Sequence
  Description of Artificial Sequence: Synthetic oligonucleotide
  Antisense strand to SEQ ID NO: 1292274
caaauucacaaaguguucc

SEQ ID NO: 1292276 - RNA, 19 nt, Artificial Sequence
  Description of Artificial Sequence: Synthetic oligonucleotide
  Sense strand starting at position 3937 of SEQ ID NO: 1241692
uuaguauaugugccgcuaa

SEQ ID NO: 1292277 - RNA, 19 nt, Artificial Sequence
  Description of Artificial Sequence: Synthetic oligonucleotide
  Antisense strand to SEQ ID NO: 1292276
uuagcggcacauauacuaa

SEQ ID NO: 1292278 - RNA, 19 nt, Artificial Sequence
  Description of Artificial Sequence: Synthetic oligonucleotide
  Sense strand starting at position 3940 of SEQ ID NO: 1241692
guauaugugccgcuaaagu

SEQ ID NO: 1292279 - RNA, 19 nt, Artificial Sequence
  Description of Artificial Sequence: Synthetic oligonucleotide
  Antisense strand to SEQ ID NO: 1292278
acuuuagcggcacauauac

SEQ ID NO: 1292280 - RNA, 19 nt, Artificial Sequence
  Description of Artificial Sequence: Synthetic oligonucleotide
  Sense strand starting at position 149 of SEQ ID NO: 1241693
caggaauagugagcuauug

SEQ ID NO: 1292281 - RNA, 19 nt, Artificial Sequence
  Description of Artificial Sequence: Synthetic oligonucleotide
  Antisense strand to SEQ ID NO: 1292280
caauagcucacuauuccug

SEQ ID NO: 1292282 - RNA, 19 nt, Artificial Sequence
  Description of Artificial Sequence: Synthetic oligonucleotide
  Sense strand starting at position 180 of SEQ ID NO: 1241693
cuccaaggcuucucuggaa

SEQ ID NO: 1292283 - RNA, 19 nt, Artificial Sequence
  Description of Artificial Sequence: Synthetic oligonucleotide
  Antisense strand to SEQ ID NO: 1292282
uuccagagaagccuuggag

SEQ ID NO: 1292284 - RNA, 19 nt, Artificial Sequence
  Description of Artificial Sequence: Synthetic oligonucleotide
  Sense strand starting at position 202 of SEQ ID NO: 1241693
ggaugugcugucuagagac

SEQ ID NO: 1292285 - RNA, 19 nt, Artificial Sequence
  Description of Artificial Sequence: Synthetic oligonucleotide
  Antisense strand to SEQ ID NO: 1292284
gucucuagacagcacaucc

SEQ ID NO: 1292286 - RNA, 19 nt, Artificial Sequence
  Description of Artificial Sequence: Synthetic oligonucleotide
  Sense strand starting at position 722 of SEQ ID NO: 1241693
ugggaauaauagcugcaua

SEQ ID NO: 1292287 - RNA, 19 nt, Artificial Sequence
  Description of Artificial Sequence: Synthetic oligonucleotide
  Antisense strand to SEQ ID NO: 1292286
uaugcagcuauuauuccca

SEQ ID NO: 1292288 - RNA, 19 nt, Artificial Sequence
  Description of Artificial Sequence: Synthetic oligonucleotide
  Sense strand starting at position 854 of SEQ ID NO: 1241693
cggguuucugaccacgauu

SEQ ID NO: 1292289 - RNA, 19 nt, Artificial Sequence
  Description of Artificial Sequence: Synthetic oligonucleotide
  Antisense strand to SEQ ID NO: 1292288
aaucguggucagaaacccg

SEQ ID NO: 1292290 - RNA, 19 nt, Artificial Sequence
  Description of Artificial Sequence: Synthetic oligonucleotide
  Sense strand starting at position 918 of SEQ ID NO: 1241693
ggaagagauguaugaugua

SEQ ID NO: 1292291 - RNA, 19 nt, Artificial Sequence
  Description of Artificial Sequence: Synthetic oligonucleotide
  Antisense strand to SEQ ID NO: 1292290
uacaucauacaucucuucc

SEQ ID NO: 1292292 - RNA, 19 nt, Artificial Sequence
  Description of Artificial Sequence: Synthetic oligonucleotide
  Sense strand starting at position 970 of SEQ ID NO: 1241693
ugaguuacagcucagguga

SEQ ID NO: 1292293 - RNA, 19 nt, Artificial Sequence
  Description of Artificial Sequence: Synthetic oligonucleotide
  Antisense strand to SEQ ID NO: 1292292
ucaccugagcuguaacuca

SEQ ID NO: 1292294 - RNA, 19 nt, Artificial Sequence
  Description of Artificial Sequence: Synthetic oligonucleotide
  Sense strand starting at position 978 of SEQ ID NO: 1241693
agcucaggugacugacaau

SEQ ID NO: 1292295 - RNA, 19 nt, Artificial Sequence
  Description of Artificial Sequence: Synthetic oligonucleotide
  Antisense strand to SEQ ID NO: 1292294
auugucagucaccugagcu

SEQ ID NO: 1292296 - RNA, 19 nt, Artificial Sequence
  Description of Artificial Sequence: Synthetic oligonucleotide
  Sense strand starting at position 1024 of SEQ ID NO: 1241693
aaugcuuucgaaggguuaa

SEQ ID NO: 1292297 - RNA, 19 nt, Artificial Sequence
  Description of Artificial Sequence: Synthetic oligonucleotide
  Antisense strand to SEQ ID NO: 1292296
uuaacccuucgaaagcauu

SEQ ID NO: 1292298 - RNA, 19 nt, Artificial Sequence
  Description of Artificial Sequence: Synthetic oligonucleotide
  Sense strand starting at position 1025 of SEQ ID NO: 1241693
augcuuucgaaggguuaag

SEQ ID NO: 1292299 - RNA, 19 nt, Artificial Sequence
  Description of Artificial Sequence: Synthetic oligonucleotide
  Antisense strand to SEQ ID NO: 1292298
cuuaacccuucgaaagcau

SEQ ID NO: 1292300 - RNA, 19 nt, Artificial Sequence
  Description of Artificial Sequence: Synthetic oligonucleotide
  Sense strand starting at position 1095 of SEQ ID NO: 1241693
ggaacucaccuacgaugau

SEQ ID NO: 1292301 - RNA, 19 nt, Artificial Sequence
  Description of Artificial Sequence: Synthetic oligonucleotide
  Antisense strand to SEQ ID NO: 1292300
aucaucguaggugaguucc

SEQ ID NO: 1292302 - RNA, 19 nt, Artificial Sequence
  Description of Artificial Sequence: Synthetic oligonucleotide
  Sense strand starting at position 1251 of SEQ ID NO: 1241693
ccauccuucucaguaggau

SEQ ID NO: 1292303 - RNA, 19 nt, Artificial Sequence
  Description of Artificial Sequence: Synthetic oligonucleotide
  Antisense strand to SEQ ID NO: 1292302
auccuacugagaaggaugg

SEQ ID NO: 1292304 - RNA, 19 nt, Artificial Sequence
  Description of Artificial Sequence: Synthetic oligonucleotide
  Sense strand starting at position 1300 of SEQ ID NO: 1241693
augcguauucguguaaaua

SEQ ID NO: 1292305 - RNA, 19 nt, Artificial Sequence
  Description of Artificial Sequence: Synthetic oligonucleotide
  Antisense strand to SEQ ID NO: 1292304
uauuuacacgaauacgcau

SEQ ID NO: 1292306 - RNA, 19 nt, Artificial Sequence
  Description of Artificial Sequence: Synthetic oligonucleotide
  Sense strand starting at position 1323 of SEQ ID NO: 1241693
gggagagagcuuugaauua

SEQ ID NO: 1292307 - RNA, 19 nt, Artificial Sequence
  Description of Artificial Sequence: Synthetic oligonucleotide
  Antisense strand to SEQ ID NO: 1292306
uaauucaaagcucucuccc

SEQ ID NO: 1292308 - RNA, 19 nt, Artificial Sequence
  Description of Artificial Sequence: Synthetic oligonucleotide
  Sense strand starting at position 1442 of SEQ ID NO: 1241693
uggucacucgcguuuacaa

SEQ ID NO: 1292309 - RNA, 19 nt, Artificial Sequence
  Description of Artificial Sequence: Synthetic oligonucleotide
  Antisense strand to SEQ ID NO: 1292308
uuguaaacgcgagugacca

SEQ ID NO: 1292310 - RNA, 19 nt, Artificial Sequence
  Description of Artificial Sequence: Synthetic oligonucleotide
  Sense strand starting at position 1450 of SEQ ID NO: 1241693
cgcguuuacaaacaagaaa

SEQ ID NO: 1292311 - RNA, 19 nt, Artificial Sequence
  Description of Artificial Sequence: Synthetic oligonucleotide
  Antisense strand to SEQ ID NO: 1292310
uuucuuguuuguaaacgcg

SEQ ID NO: 1292312 - RNA, 19 nt, Artificial Sequence
  Description of Artificial Sequence: Synthetic oligonucleotide
  Sense strand starting at position 1570 of SEQ ID NO: 1241693
agggaugugucuucagaaa

SEQ ID NO: 1292313 - RNA, 19 nt, Artificial Sequence
  Description of Artificial Sequence: Synthetic oligonucleotide
  Antisense strand to SEQ ID NO: 1292312
uuucugaagacacaucccu

SEQ ID NO: 1292314 - RNA, 19 nt, Artificial Sequence
  Description of Artificial Sequence: Synthetic oligonucleotide
  Sense strand starting at position 1983 of SEQ ID NO: 1241693
guggcuucuccacacacua

SEQ ID NO: 1292315 - RNA, 19 nt, Artificial Sequence
  Description of Artificial Sequence: Synthetic oligonucleotide
  Antisense strand to SEQ ID NO: 1292314
uaguguguggagaagccac

SEQ ID NO: 1292316 - RNA, 19 nt, Artificial Sequence
  Description of Artificial Sequence: Synthetic oligonucleotide
  Sense strand starting at position 2242 of SEQ ID NO: 1241693
gggagagcucauuagcuag

SEQ ID NO: 1292317 - RNA, 19 nt, Artificial Sequence
  Description of Artificial Sequence: Synthetic oligonucleotide
  Antisense strand to SEQ ID NO: 1292316
cuagcuaaugagcucuccc

SEQ ID NO: 1292318 - RNA, 19 nt, Artificial Sequence
  Description of Artificial Sequence: Synthetic oligonucleotide
  Sense strand starting at position 2284 of SEQ ID NO: 1241693
aucugugagcuuuauaaau

SEQ ID NO: 1292319 - RNA, 19 nt, Artificial Sequence
  Description of Artificial Sequence: Synthetic oligonucleotide
  Antisense strand to SEQ ID NO: 1292318
auuuauaaagcucacagau

SEQ ID NO: 1292320 - RNA, 19 nt, Artificial Sequence
  Description of Artificial Sequence: Synthetic oligonucleotide
  Sense strand starting at position 2379 of SEQ ID NO: 1241693
gauccuguauuugagaaua

SEQ ID NO: 1292321 - RNA, 19 nt, Artificial Sequence
  Description of Artificial Sequence: Synthetic oligonucleotide
  Antisense strand to SEQ ID NO: 1292320
uauucucaaauacaggauc

SEQ ID NO: 1292322 - RNA, 19 nt, Artificial Sequence
  Description of Artificial Sequence: Synthetic oligonucleotide
  Sense strand starting at position 2381 of SEQ ID NO: 1241693
uccuguauuugagaauaca

SEQ ID NO: 1292323 - RNA, 19 nt, Artificial Sequence
  Description of Artificial Sequence: Synthetic oligonucleotide
  Antisense strand to SEQ ID NO: 1292322
uguauucucaaauacagga

SEQ ID NO: 1292324 - RNA, 19 nt, Artificial Sequence
  Description of Artificial Sequence: Synthetic oligonucleotide
  Sense strand starting at position 2415 of SEQ ID NO: 1241693
aggacaucaucuucgaguu

SEQ ID NO: 1292325 - RNA, 19 nt, Artificial Sequence
  Description of Artificial Sequence: Synthetic oligonucleotide
  Antisense strand to SEQ ID NO: 1292324
aacucgaagaugauguccu

SEQ ID NO: 1292326 - RNA, 19 nt, Artificial Sequence
  Description of Artificial Sequence: Synthetic oligonucleotide
  Sense strand starting at position 2416 of SEQ ID NO: 1241693
ggacaucaucuucgaguuu

SEQ ID NO: 1292327 - RNA, 19 nt, Artificial Sequence
  Description of Artificial Sequence: Synthetic oligonucleotide
  Antisense strand to SEQ ID NO: 1292326
aaacucgaagaugaugucc

SEQ ID NO: 1292328 - RNA, 19 nt, Artificial Sequence
  Description of Artificial Sequence: Synthetic oligonucleotide
  Sense strand starting at position 2510 of SEQ ID NO: 1241693
guaauugugagcuacgaag

SEQ ID NO: 1292329 - RNA, 19 nt, Artificial Sequence
  Description of Artificial Sequence: Synthetic oligonucleotide
  Antisense strand to SEQ ID NO: 1292328
cuucguagcucacaauuac

SEQ ID NO: 1292330 - RNA, 19 nt, Artificial Sequence
  Description of Artificial Sequence: Synthetic oligonucleotide
  Sense strand starting at position 3023 of SEQ ID NO: 1241693
gaauuaucaguauaucgcu

SEQ ID NO: 1292331 - RNA, 19 nt, Artificial Sequence
  Description of Artificial Sequence: Synthetic oligonucleotide
  Antisense strand to SEQ ID NO: 1292330
agcgauauacugauaauuc

SEQ ID NO: 1292332 - RNA, 19 nt, Artificial Sequence
  Description of Artificial Sequence: Synthetic oligonucleotide
  Sense strand starting at position 3030 of SEQ ID NO: 1241693
caguauaucgcugaucaug

SEQ ID NO: 1292333 - RNA, 19 nt, Artificial Sequence
  Description of Artificial Sequence: Synthetic oligonucleotide
  Antisense strand to SEQ ID NO: 1292332
caugaucagcgauauacug

SEQ ID NO: 1292334 - RNA, 19 nt, Artificial Sequence
  Description of Artificial Sequence: Synthetic oligonucleotide
  Sense strand starting at position 3036 of SEQ ID NO: 1241693
aucgcugaucaugaaacau

SEQ ID NO: 1292335 - RNA, 19 nt, Artificial Sequence
  Description of Artificial Sequence: Synthetic oligonucleotide
  Antisense strand to SEQ ID NO: 1292334
auguuucaugaucagcgau

SEQ ID NO: 1292336 - RNA, 19 nt, Artificial Sequence
  Description of Artificial Sequence: Synthetic oligonucleotide
  Sense strand starting at position 3048 of SEQ ID NO: 1241693
gaaacauacuuguugaugu

SEQ ID NO: 1292337 - RNA, 19 nt, Artificial Sequence
  Description of Artificial Sequence: Synthetic oligonucleotide
  Antisense strand to SEQ ID NO: 1292336
acaucaacaaguauguuuc

SEQ ID NO: 1292338 - RNA, 19 nt, Artificial Sequence
  Description of Artificial Sequence: Synthetic oligonucleotide
  Sense strand starting at position 3077 of SEQ ID NO: 1241693
agcuuauuaccauaucgaa

SEQ ID NO: 1292339 - RNA, 19 nt, Artificial Sequence
  Description of Artificial Sequence: Synthetic oligonucleotide
  Antisense strand to SEQ ID NO: 1292338
uucgauaugguaauaagcu

SEQ ID NO: 1292340 - RNA, 19 nt, Artificial Sequence
  Description of Artificial Sequence: Synthetic oligonucleotide
  Sense strand starting at position 3091 of SEQ ID NO: 1241693
ucgaaaugaugccuccacu

SEQ ID NO: 1292341 - RNA, 19 nt, Artificial Sequence
  Description of Artificial Sequence: Synthetic oligonucleotide
  Antisense strand to SEQ ID NO: 1292340
aguggaggcaucauuucga

SEQ ID NO: 1292342 - RNA, 19 nt, Artificial Sequence
  Description of Artificial Sequence: Synthetic oligonucleotide
  Sense strand starting at position 3340 of SEQ ID NO: 1241693
uggccucacuuucuggaaa

SEQ ID NO: 1292343 - RNA, 19 nt, Artificial Sequence
  Description of Artificial Sequence: Synthetic oligonucleotide
  Antisense strand to SEQ ID NO: 1292342
uuuccagaaagugaggcca

SEQ ID NO: 1292344 - RNA, 19 nt, Artificial Sequence
  Description of Artificial Sequence: Synthetic oligonucleotide
  Sense strand starting at position 3409 of SEQ ID NO: 1241693
aaaugagguuuguugagcu

SEQ ID NO: 1292345 - RNA, 19 nt, Artificial Sequence
  Description of Artificial Sequence: Synthetic oligonucleotide
  Antisense strand to SEQ ID NO: 1292344
agcucaacaaaccucauuu

SEQ ID NO: 1292346 - RNA, 19 nt, Artificial Sequence
  Description of Artificial Sequence: Synthetic oligonucleotide
  Sense strand starting at position 3484 of SEQ ID NO: 1241693
cuugaucacucagcaagua

SEQ ID NO: 1292347 - RNA, 19 nt, Artificial Sequence
  Description of Artificial Sequence: Synthetic oligonucleotide
  Antisense strand to SEQ ID NO: 1292346
uacuugcugagugaucaag

SEQ ID NO: 1292348 - RNA, 19 nt, Artificial Sequence
  Description of Artificial Sequence: Synthetic oligonucleotide
  Sense strand starting at position 3485 of SEQ ID NO: 1241693
uugaucacucagcaaguau

SEQ ID NO: 1292349 - RNA, 19 nt, Artificial Sequence
  Description of Artificial Sequence: Synthetic oligonucleotide
  Antisense strand to SEQ ID NO: 1292348
auacuugcugagugaucaa

SEQ ID NO: 1292350 - RNA, 19 nt, Artificial Sequence
  Description of Artificial Sequence: Synthetic oligonucleotide
  Sense strand starting at position 3685 of SEQ ID NO: 1241693
cgaauuugccucuagccuu

SEQ ID NO: 1292351 - RNA, 19 nt, Artificial Sequence
  Description of Artificial Sequence: Synthetic oligonucleotide
  Antisense strand to SEQ ID NO: 1292350
aaggcuagaggcaaauucg

SEQ ID NO: 1292352 - RNA, 19 nt, Artificial Sequence
  Description of Artificial Sequence: Synthetic oligonucleotide
  Sense strand starting at position 3821 of SEQ ID NO: 1241693
cuucuuaaacgugaguucu

SEQ ID NO: 1292353 - RNA, 19 nt, Artificial Sequence
  Description of Artificial Sequence: Synthetic oligonucleotide
  Antisense strand to SEQ ID NO: 1292352
agaacucacguuuaagaag

SEQ ID NO: 1292354 - RNA, 19 nt, Artificial Sequence
  Description of Artificial Sequence: Synthetic oligonucleotide
  Sense strand starting at position 3874 of SEQ ID NO: 1241693
gcagacuuaaugugggaua

SEQ ID NO: 1292355 - RNA, 19 nt, Artificial Sequence
  Description of Artificial Sequence: Synthetic oligonucleotide
  Antisense strand to SEQ ID NO: 1292354
uaucccacauuaagucugc

SEQ ID NO: 1292356 - RNA, 19 nt, Artificial Sequence
  Description of Artificial Sequence: Synthetic oligonucleotide
  Sense strand starting at position 3895 of SEQ ID NO: 1241693
acaugaaugugaugaauuu

SEQ ID NO: 1292357 - RNA, 19 nt, Artificial Sequence
  Description of Artificial Sequence: Synthetic oligonucleotide
  Antisense strand to SEQ ID NO: 1292356
aaauucaucacauucaugu

SEQ ID NO: 1292358 - RNA, 19 nt, Artificial Sequence
  Description of Artificial Sequence: Synthetic oligonucleotide
  Sense strand starting at position 3941 of SEQ ID NO: 1241693
cugauaacgauaugguaag

SEQ ID NO: 1292359 - RNA, 19 nt, Artificial Sequence
  Description of Artificial Sequence: Synthetic oligonucleotide
  Antisense strand to SEQ ID NO: 1292358
cuuaccauaucguuaucag

SEQ ID NO: 1292360 - RNA, 19 nt, Artificial Sequence
  Description of Artificial Sequence: Synthetic oligonucleotide
  Sense strand starting at position 88 of SEQ ID NO: 1241694
uuaccacaucccugggaaa

SEQ ID NO: 1292361 - RNA, 19 nt, Artificial Sequence
  Description of Artificial Sequence: Synthetic oligonucleotide
  Antisense strand to SEQ ID NO: 1292360
uuucccagggaugugguaa

SEQ ID NO: 1292362 - RNA, 19 nt, Artificial Sequence
  Description of Artificial Sequence: Synthetic oligonucleotide
  Sense strand starting at position 118 of SEQ ID NO: 1241694
uagguagcagagcauuaaa

SEQ ID NO: 1292363 - RNA, 19 nt, Artificial Sequence
  Description of Artificial Sequence: Synthetic oligonucleotide
  Antisense strand to SEQ ID NO: 1292362
uuuaaugcucugcuaccua

SEQ ID NO: 1292364 - RNA, 19 nt, Artificial Sequence
  Description of Artificial Sequence: Synthetic oligonucleotide
  Sense strand starting at position 145 of SEQ ID NO: 1241694
acuguaucauuaucuuuga

SEQ ID NO: 1292365 - RNA, 19 nt, Artificial Sequence
  Description of Artificial Sequence: Synthetic oligonucleotide
  Antisense strand to SEQ ID NO: 1292364
ucaaagauaaugauacagu

SEQ ID NO: 1292366 - RNA, 19 nt, Artificial Sequence
  Description of Artificial Sequence: Synthetic oligonucleotide
  Sense strand starting at position 702 of SEQ ID NO: 1241694
gggcaucaccuuuacaauu

SEQ ID NO: 1292367 - RNA, 19 nt, Artificial Sequence
  Description of Artificial Sequence: Synthetic oligonucleotide
  Antisense strand to SEQ ID NO: 1292366
aauuguaaaggugaugccc

SEQ ID NO: 1292368 - RNA, 19 nt, Artificial Sequence
  Description of Artificial Sequence: Synthetic oligonucleotide
  Sense strand starting at position 768 of SEQ ID NO: 1241694
cacugaagucaucaggcaa

SEQ ID NO: 1292369 - RNA, 19 nt, Artificial Sequence
  Description of Artificial Sequence: Synthetic oligonucleotide
  Antisense strand to SEQ ID NO: 1292368
uugccugaugacuucagug

SEQ ID NO: 1292370 - RNA, 19 nt, Artificial Sequence
  Description of Artificial Sequence: Synthetic oligonucleotide
  Sense strand starting at position 805 of SEQ ID NO: 1241694
guacuuauaguacauguua

SEQ ID NO: 1292371 - RNA, 19 nt, Artificial Sequence
  Description of Artificial Sequence: Synthetic oligonucleotide
  Antisense strand to SEQ ID NO: 1292370
uaacauguacuauaaguac

SEQ ID NO: 1292372 - RNA, 19 nt, Artificial Sequence
  Description of Artificial Sequence: Synthetic oligonucleotide
  Sense strand starting at position 902 of SEQ ID NO: 1241694
aggagcugcauuuguucua

SEQ ID NO: 1292373 - RNA, 19 nt, Artificial Sequence
  Description of Artificial Sequence: Synthetic oligonucleotide
  Antisense strand to SEQ ID NO: 1292372
uagaacaaaugcagcuccu

SEQ ID NO: 1292374 - RNA, 19 nt, Artificial Sequence
  Description of Artificial Sequence: Synthetic oligonucleotide
  Sense strand starting at position 903 of SEQ ID NO: 1241694
ggagcugcauuuguucuaa

SEQ ID NO: 1292375 - RNA, 19 nt, Artificial Sequence
  Description of Artificial Sequence: Synthetic oligonucleotide
  Antisense strand to SEQ ID NO: 1292374
uuagaacaaaugcagcucc

SEQ ID NO: 1292376 - RNA, 19 nt, Artificial Sequence
  Description of Artificial Sequence: Synthetic oligonucleotide
  Sense strand starting at position 1483 of SEQ ID NO: 1241694
uuuccucaguccuugagaa

SEQ ID NO: 1292377 - RNA, 19 nt, Artificial Sequence
  Description of Artificial Sequence: Synthetic oligonucleotide
  Antisense strand to SEQ ID NO: 1292376
uucucaaggacugaggaaa

SEQ ID NO: 1292378 - RNA, 19 nt, Artificial Sequence
  Description of Artificial Sequence: Synthetic oligonucleotide
  Sense strand starting at position 1484 of SEQ ID NO: 1241694
uuccucaguccuugagaaa

SEQ ID NO: 1292379 - RNA, 19 nt, Artificial Sequence
  Description of Artificial Sequence: Synthetic oligonucleotide
  Antisense strand to SEQ ID NO: 1292378
uuucucaaggacugaggaa

SEQ ID NO: 1292380 - RNA, 19 nt, Artificial Sequence
  Description of Artificial Sequence: Synthetic oligonucleotide
  Sense strand starting at position 1485 of SEQ ID NO: 1241694
uccucaguccuugagaaac

SEQ ID NO: 1292381 - RNA, 19 nt, Artificial Sequence
  Description of Artificial Sequence: Synthetic oligonucleotide
  Antisense strand to SEQ ID NO: 1292380
guuucucaaggacugagga

SEQ ID NO: 1292382 - RNA, 19 nt, Artificial Sequence
  Description of Artificial Sequence: Synthetic oligonucleotide
  Sense strand starting at position 1525 of SEQ ID NO: 1241694
gccuuauauuuggcccagu

SEQ ID NO: 1292383 - RNA, 19 nt, Artificial Sequence
  Description of Artificial Sequence: Synthetic oligonucleotide
  Antisense strand to SEQ ID NO: 1292382
acugggccaaauauaaggc

SEQ ID NO: 1292384 - RNA, 19 nt, Artificial Sequence
  Description of Artificial Sequence: Synthetic oligonucleotide
  Sense strand starting at position 1976 of SEQ ID NO: 1241694
aagaguugauacucagacu

SEQ ID NO: 1292385 - RNA, 19 nt, Artificial Sequence
  Description of Artificial Sequence: Synthetic oligonucleotide
  Antisense strand to SEQ ID NO: 1292384
agucugaguaucaacucuu

SEQ ID NO: 1292386 - RNA, 19 nt, Artificial Sequence
  Description of Artificial Sequence: Synthetic oligonucleotide
  Sense strand starting at position 2141 of SEQ ID NO: 1241694
gguacucuccaaggagauu

SEQ ID NO: 1292387 - RNA, 19 nt, Artificial Sequence
  Description of Artificial Sequence: Synthetic oligonucleotide
  Antisense strand to SEQ ID NO: 1292386
aaucuccuuggagaguacc

SEQ ID NO: 1292388 - RNA, 19 nt, Artificial Sequence
  Description of Artificial Sequence: Synthetic oligonucleotide
  Sense strand starting at position 2164 of SEQ ID NO: 1241694
ugugcauuccaucaggaga

SEQ ID NO: 1292389 - RNA, 19 nt, Artificial Sequence
  Description of Artificial Sequence: Synthetic oligonucleotide
  Antisense strand to SEQ ID NO: 1292388
ucuccugauggaaugcaca

SEQ ID NO: 1292390 - RNA, 19 nt, Artificial Sequence
  Description of Artificial Sequence: Synthetic oligonucleotide
  Sense strand starting at position 2299 of SEQ ID NO: 1241694
ccaggaaccuuccuuaagu

SEQ ID NO: 1292391 - RNA, 19 nt, Artificial Sequence
  Description of Artificial Sequence: Synthetic oligonucleotide
  Antisense strand to SEQ ID NO: 1292390
acuuaaggaagguuccugg

SEQ ID NO: 1292392 - RNA, 19 nt, Artificial Sequence
  Description of Artificial Sequence: Synthetic oligonucleotide
  Sense strand starting at position 2380 of SEQ ID NO: 1241694
uauguuggaguuuggaaga

SEQ ID NO: 1292393 - RNA, 19 nt, Artificial Sequence
  Description of Artificial Sequence: Synthetic oligonucleotide
  Antisense strand to SEQ ID NO: 1292392
ucuuccaaacuccaacaua

SEQ ID NO: 1292394 - RNA, 19 nt, Artificial Sequence
  Description of Artificial Sequence: Synthetic oligonucleotide
  Sense strand starting at position 2452 of SEQ ID NO: 1241694
caggauugucauggauucu

SEQ ID NO: 1292395 - RNA, 19 nt, Artificial Sequence
  Description of Artificial Sequence: Synthetic oligonucleotide
  Antisense strand to SEQ ID NO: 1292394
agaauccaugacaauccug

SEQ ID NO: 1292396 - RNA, 19 nt, Artificial Sequence
  Description of Artificial Sequence: Synthetic oligonucleotide
  Sense strand starting at position 2537 of SEQ ID NO: 1241694
uccauacacucaguggauu

SEQ ID NO: 1292397 - RNA, 19 nt, Artificial Sequence
  Description of Artificial Sequence: Synthetic oligonucleotide
  Antisense strand to SEQ ID NO: 1292396
aauccacugaguguaugga

SEQ ID NO: 1292398 - RNA, 19 nt, Artificial Sequence
  Description of Artificial Sequence: Synthetic oligonucleotide
  Sense strand starting at position 2554 of SEQ ID NO: 1241694
uuugaaugccuacauggua

SEQ ID NO: 1292399 - RNA, 19 nt, Artificial Sequence
  Description of Artificial Sequence: Synthetic oligonucleotide
  Antisense strand to SEQ ID NO: 1292398
uaccauguaggcauucaaa

SEQ ID NO: 1292400 - RNA, 19 nt, Artificial Sequence
  Description of Artificial Sequence: Synthetic oligonucleotide
  Sense strand starting at position 2601 of SEQ ID NO: 1241694
uguagaaugauccaguguu

SEQ ID NO: 1292401 - RNA, 19 nt, Artificial Sequence
  Description of Artificial Sequence: Synthetic oligonucleotide
  Antisense strand to SEQ ID NO: 1292400
aacacuggaucauucuaca

SEQ ID NO: 1292402 - RNA, 19 nt, Artificial Sequence
  Description of Artificial Sequence: Synthetic oligonucleotide
  Sense strand starting at position 2607 of SEQ ID NO: 1241694
augauccaguguuccuaaa

SEQ ID NO: 1292403 - RNA, 19 nt, Artificial Sequence
  Description of Artificial Sequence: Synthetic oligonucleotide
  Antisense strand to SEQ ID NO: 1292402
uuuaggaacacuggaucau

SEQ ID NO: 1292404 - RNA, 19 nt, Artificial Sequence
  Description of Artificial Sequence: Synthetic oligonucleotide
  Sense strand starting at position 2663 of SEQ ID NO: 1241694
ccuggugaagugggauuau

SEQ ID NO: 1292405 - RNA, 19 nt, Artificial Sequence
  Description of Artificial Sequence: Synthetic oligonucleotide
  Antisense strand to SEQ ID NO: 1292404
auaaucccacuucaccagg

SEQ ID NO: 1292406 - RNA, 19 nt, Artificial Sequence
  Description of Artificial Sequence: Synthetic oligonucleotide
  Sense strand starting at position 2672 of SEQ ID NO: 1241694
gugggauuaucuuuacaug

SEQ ID NO: 1292407 - RNA, 19 nt, Artificial Sequence
  Description of Artificial Sequence: Synthetic oligonucleotide
  Antisense strand to SEQ ID NO: 1292406
cauguaaagauaaucccac

SEQ ID NO: 1292408 - RNA, 19 nt, Artificial Sequence
  Description of Artificial Sequence: Synthetic oligonucleotide
  Sense strand starting at position 2700 of SEQ ID NO: 1241694
cauagauagguuggcaacu

SEQ ID NO: 1292409 - RNA, 19 nt, Artificial Sequence
  Description of Artificial Sequence: Synthetic oligonucleotide
  Antisense strand to SEQ ID NO: 1292408
aguugccaaccuaucuaug

SEQ ID NO: 1292410 - RNA, 19 nt, Artificial Sequence
  Description of Artificial Sequence: Synthetic oligonucleotide
  Sense strand starting at position 2799 of SEQ ID NO: 1241694
ccaguauaccaaugguuac

SEQ ID NO: 1292411 - RNA, 19 nt, Artificial Sequence
  Description of Artificial Sequence: Synthetic oligonucleotide
  Antisense strand to SEQ ID NO: 1292410
guaaccauugguauacugg

SEQ ID NO: 1292412 - RNA, 19 nt, Artificial Sequence
  Description of Artificial Sequence: Synthetic oligonucleotide
  Sense strand starting at position 2857 of SEQ ID NO: 1241694
gaugaaagccuuuggugaa

SEQ ID NO: 1292413 - RNA, 19 nt, Artificial Sequence
  Description of Artificial Sequence: Synthetic oligonucleotide
  Antisense strand to SEQ ID NO: 1292412
uucaccaaaggcuuucauc

SEQ ID NO: 1292414 - RNA, 19 nt, Artificial Sequence
  Description of Artificial Sequence: Synthetic oligonucleotide
  Sense strand starting at position 2922 of SEQ ID NO: 1241694
uggagaaucucccuucgac

SEQ ID NO: 1292415 - RNA, 19 nt, Artificial Sequence
  Description of Artificial Sequence: Synthetic oligonucleotide
  Antisense strand to SEQ ID NO: 1292414
gucgaagggagauucucca

SEQ ID NO: 1292416 - RNA, 19 nt, Artificial Sequence
  Description of Artificial Sequence: Synthetic oligonucleotide
  Sense strand starting at position 2925 of SEQ ID NO: 1241694
agaaucucccuucgacaaa

SEQ ID NO: 1292417 - RNA, 19 nt, Artificial Sequence
  Description of Artificial Sequence: Synthetic oligonucleotide
  Antisense strand to SEQ ID NO: 1292416
uuugucgaagggagauucu

SEQ ID NO: 1292418 - RNA, 19 nt, Artificial Sequence
  Description of Artificial Sequence: Synthetic oligonucleotide
  Sense strand starting at position 3062 of SEQ ID NO: 1241694
gucccagucccagauucua

SEQ ID NO: 1292419 - RNA, 19 nt, Artificial Sequence
  Description of Artificial Sequence: Synthetic oligonucleotide
  Antisense strand to SEQ ID NO: 1292418
uagaaucugggacugggac

SEQ ID NO: 1292420 - RNA, 19 nt, Artificial Sequence
  Description of Artificial Sequence: Synthetic oligonucleotide
  Sense strand starting at position 3350 of SEQ ID NO: 1241694
ggcuaugugggucaucaag

SEQ ID NO: 1292421 - RNA, 19 nt, Artificial Sequence
  Description of Artificial Sequence: Synthetic oligonucleotide
  Antisense strand to SEQ ID NO: 1292420
cuugaugacccacauagcc

SEQ ID NO: 1292422 - RNA, 19 nt, Artificial Sequence
  Description of Artificial Sequence: Synthetic oligonucleotide
  Sense strand starting at position 3524 of SEQ ID NO: 1241694
gcaugcaagauugggacua

SEQ ID NO: 1292423 - RNA, 19 nt, Artificial Sequence
  Description of Artificial Sequence: Synthetic oligonucleotide
  Antisense strand to SEQ ID NO: 1292422
uagucccaaucuugcaugc

SEQ ID NO: 1292424 - RNA, 19 nt, Artificial Sequence
  Description of Artificial Sequence: Synthetic oligonucleotide
  Sense strand starting at position 3546 of SEQ ID NO: 1241694
auauguuuauuggccaaag

SEQ ID NO: 1292425 - RNA, 19 nt, Artificial Sequence
  Description of Artificial Sequence: Synthetic oligonucleotide
  Antisense strand to SEQ ID NO: 1292424
cuuuggccaauaaacauau

SEQ ID NO: 1292426 - RNA, 19 nt, Artificial Sequence
  Description of Artificial Sequence: Synthetic oligonucleotide
  Sense strand starting at position 3660 of SEQ ID NO: 1241694
ggugcuguugaagggagaa

SEQ ID NO: 1292427 - RNA, 19 nt, Artificial Sequence
  Description of Artificial Sequence: Synthetic oligonucleotide
  Antisense strand to SEQ ID NO: 1292426
uucucccuucaacagcacc

SEQ ID NO: 1292428 - RNA, 19 nt, Artificial Sequence
  Description of Artificial Sequence: Synthetic oligonucleotide
  Sense strand starting at position 3672 of SEQ ID NO: 1241694
gggagaagucaguguaaga

SEQ ID NO: 1292429 - RNA, 19 nt, Artificial Sequence
  Description of Artificial Sequence: Synthetic oligonucleotide
  Antisense strand to SEQ ID NO: 1292428
ucuuacacugacuucuccc

SEQ ID NO: 1292430 - RNA, 19 nt, Artificial Sequence
  Description of Artificial Sequence: Synthetic oligonucleotide
  Sense strand starting at position 3702 of SEQ ID NO: 1241694
ccuaaauucggaggaccuu

SEQ ID NO: 1292431 - RNA, 19 nt, Artificial Sequence
  Description of Artificial Sequence: Synthetic oligonucleotide
  Antisense strand to SEQ ID NO: 1292430
aagguccuccgaauuuagg

SEQ ID NO: 1292432 - RNA, 19 nt, Artificial Sequence
  Description of Artificial Sequence: Synthetic oligonucleotide
  Sense strand starting at position 3796 of SEQ ID NO: 1241694
auugaauccuucucagagc

SEQ ID NO: 1292433 - RNA, 19 nt, Artificial Sequence
  Description of Artificial Sequence: Synthetic oligonucleotide
  Antisense strand to SEQ ID NO: 1292432
gcucugagaaggauucaau

SEQ ID NO: 1292434 - RNA, 19 nt, Artificial Sequence
  Description of Artificial Sequence: Synthetic oligonucleotide
  Sense strand starting at position 3805 of SEQ ID NO: 1241694
uucucagagcacuauuaag

SEQ ID NO: 1292435 - RNA, 19 nt, Artificial Sequence
  Description of Artificial Sequence: Synthetic oligonucleotide
  Antisense strand to SEQ ID NO: 1292434
cuuaauagugcucugagaa

SEQ ID NO: 1292436 - RNA, 19 nt, Artificial Sequence
  Description of Artificial Sequence: Synthetic oligonucleotide
  Sense strand starting at position 3863 of SEQ ID NO: 1241694
gcuauuagaagucagguaa

SEQ ID NO: 1292437 - RNA, 19 nt, Artificial Sequence
  Description of Artificial Sequence: Synthetic oligonucleotide
  Antisense strand to SEQ ID NO: 1292436
uuaccugacuucuaauagc

SEQ ID NO: 1292438 - RNA, 19 nt, Artificial Sequence
  Description of Artificial Sequence: Synthetic oligonucleotide
  Sense strand starting at position 3978 of SEQ ID NO: 1241694
gacccuaaauagguguaaa

SEQ ID NO: 1292439 - RNA, 19 nt, Artificial Sequence
  Description of Artificial Sequence: Synthetic oligonucleotide
  Antisense strand to SEQ ID NO: 1292438
uuuacaccuauuuaggguc

SEQ ID NO: 1292440 - RNA, 19 nt, Artificial Sequence
  Description of Artificial Sequence: Synthetic oligonucleotide
  Sense strand starting at position 84 of SEQ ID NO: 1241695
ugcagucugcguuucugau

SEQ ID NO: 1292441 - RNA, 19 nt, Artificial Sequence
  Description of Artificial Sequence: Synthetic oligonucleotide
  Antisense strand to SEQ ID NO: 1292440
aucagaaacgcagacugca

SEQ ID NO: 1292442 - RNA, 19 nt, Artificial Sequence
  Description of Artificial Sequence: Synthetic oligonucleotide
  Sense strand starting at position 85 of SEQ ID NO: 1241695
gcagucugcguuucugaua

SEQ ID NO: 1292443 - RNA, 19 nt, Artificial Sequence
  Description of Artificial Sequence: Synthetic oligonucleotide
  Antisense strand to SEQ ID NO: 1292442
uaucagaaacgcagacugc

SEQ ID NO: 1292444 - RNA, 19 nt, Artificial Sequence
  Description of Artificial Sequence: Synthetic oligonucleotide
  Sense strand starting at position 120 of SEQ ID NO: 1241695
aauucuucugcccgggaga

SEQ ID NO: 1292445 - RNA, 19 nt, Artificial Sequence
  Description of Artificial Sequence: Synthetic oligonucleotide
  Antisense strand to SEQ ID NO: 1292444
ucucccgggcagaagaauu

SEQ ID NO: 1292446 - RNA, 19 nt, Artificial Sequence
  Description of Artificial Sequence: Synthetic oligonucleotide
  Sense strand starting at position 149 of SEQ ID NO: 1241695
gaaugcguucggagguaug

SEQ ID NO: 1292447 - RNA, 19 nt, Artificial Sequence
  Description of Artificial Sequence: Synthetic oligonucleotide
  Antisense strand to SEQ ID NO: 1292446
cauaccuccgaacgcauuc

SEQ ID NO: 1292448 - RNA, 19 nt, Artificial Sequence
  Description of Artificial Sequence: Synthetic oligonucleotide
  Sense strand starting at position 151 of SEQ ID NO: 1241695
augcguucggagguauguu

SEQ ID NO: 1292449 - RNA, 19 nt, Artificial Sequence
  Description of Artificial Sequence: Synthetic oligonucleotide
  Antisense strand to SEQ ID NO: 1292448
aacauaccuccgaacgcau

SEQ ID NO: 1292450 - RNA, 19 nt, Artificial Sequence
  Description of Artificial Sequence: Synthetic oligonucleotide
  Sense strand starting at position 300 of SEQ ID NO: 1241695
ggguaaauuuaugguacug

SEQ ID NO: 1292451 - RNA, 19 nt, Artificial Sequence
  Description of Artificial Sequence: Synthetic oligonucleotide
  Antisense strand to SEQ ID NO: 1292450
caguaccauaaauuuaccc

SEQ ID NO: 1292452 - RNA, 19 nt, Artificial Sequence
  Description of Artificial Sequence: Synthetic oligonucleotide
  Sense strand starting at position 514 of SEQ ID NO: 1241695
gaaucagggcuuugacugu

SEQ ID NO: 1292453 - RNA, 19 nt, Artificial Sequence
  Description of Artificial Sequence: Synthetic oligonucleotide
  Antisense strand to SEQ ID NO: 1292452
acagucaaagcccugauuc

SEQ ID NO: 1292454 - RNA, 19 nt, Artificial Sequence
  Description of Artificial Sequence: Synthetic oligonucleotide
  Sense strand starting at position 602 of SEQ ID NO: 1241695
gaggguuaguuauauauuu

SEQ ID NO: 1292455 - RNA, 19 nt, Artificial Sequence
  Description of Artificial Sequence: Synthetic oligonucleotide
  Antisense strand to SEQ ID NO: 1292454
aaauauauaacuaacccuc

SEQ ID NO: 1292456 - RNA, 19 nt, Artificial Sequence
  Description of Artificial Sequence: Synthetic oligonucleotide
  Sense strand starting at position 903 of SEQ ID NO: 1241695
cacauaugccgacaugcau

SEQ ID NO: 1292457 - RNA, 19 nt, Artificial Sequence
  Description of Artificial Sequence: Synthetic oligonucleotide
  Antisense strand to SEQ ID NO: 1292456
augcaugucggcauaugug

SEQ ID NO: 1292458 - RNA, 19 nt, Artificial Sequence
  Description of Artificial Sequence: Synthetic oligonucleotide
  Sense strand starting at position 1587 of SEQ ID NO: 1241695
gguccuuccgcacggauuu

SEQ ID NO: 1292459 - RNA, 19 nt, Artificial Sequence
  Description of Artificial Sequence: Synthetic oligonucleotide
  Antisense strand to SEQ ID NO: 1292458
aaauccgugcggaaggacc

SEQ ID NO: 1292460 - RNA, 19 nt, Artificial Sequence
  Description of Artificial Sequence: Synthetic oligonucleotide
  Sense strand starting at position 1899 of SEQ ID NO: 1241695
cggagagcuuugcccauua

SEQ ID NO: 1292461 - RNA, 19 nt, Artificial Sequence
  Description of Artificial Sequence: Synthetic oligonucleotide
  Antisense strand to SEQ ID NO: 1292460
uaaugggcaaagcucuccg

SEQ ID NO: 1292462 - RNA, 19 nt, Artificial Sequence
  Description of Artificial Sequence: Synthetic oligonucleotide
  Sense strand starting at position 1901 of SEQ ID NO: 1241695
gagagcuuugcccauuaag

SEQ ID NO: 1292463 - RNA, 19 nt, Artificial Sequence
  Description of Artificial Sequence: Synthetic oligonucleotide
  Antisense strand to SEQ ID NO: 1292462
cuuaaugggcaaagcucuc

SEQ ID NO: 1292464 - RNA, 19 nt, Artificial Sequence
  Description of Artificial Sequence: Synthetic oligonucleotide
  Sense strand starting at position 1913 of SEQ ID NO: 1241695
cauuaagcugccggaagaa

SEQ ID NO: 1292465 - RNA, 19 nt, Artificial Sequence
  Description of Artificial Sequence: Synthetic oligonucleotide
  Antisense strand to SEQ ID NO: 1292464
uucuuccggcagcuuaaug

SEQ ID NO: 1292466 - RNA, 19 nt, Artificial Sequence
  Description of Artificial Sequence: Synthetic oligonucleotide
  Sense strand starting at position 2008 of SEQ ID NO: 1241695
ugacaagccgcgcauauuu

SEQ ID NO: 1292467 - RNA, 19 nt, Artificial Sequence
  Description of Artificial Sequence: Synthetic oligonucleotide
  Antisense strand to SEQ ID NO: 1292466
aaauaugcgcggcuuguca

SEQ ID NO: 1292468 - RNA, 19 nt, Artificial Sequence
  Description of Artificial Sequence: Synthetic oligonucleotide
  Sense strand starting at position 2364 of SEQ ID NO: 1241695
uuaaauauagcagggaacu

SEQ ID NO: 1292469 - RNA, 19 nt, Artificial Sequence
  Description of Artificial Sequence: Synthetic oligonucleotide
  Antisense strand to SEQ ID NO: 1292468
aguucccugcuauauuuaa

SEQ ID NO: 1292470 - RNA, 19 nt, Artificial Sequence
  Description of Artificial Sequence: Synthetic oligonucleotide
  Sense strand starting at position 2532 of SEQ ID NO: 1241695
caaacaacaguuugugaga

SEQ ID NO: 1292471 - RNA, 19 nt, Artificial Sequence
  Description of Artificial Sequence: Synthetic oligonucleotide
  Antisense strand to SEQ ID NO: 1292470
ucucacaaacuguuguuug

SEQ ID NO: 1292472 - RNA, 19 nt, Artificial Sequence
  Description of Artificial Sequence: Synthetic oligonucleotide
  Sense strand starting at position 2657 of SEQ ID NO: 1241695
gagagcugguccuuugaug

SEQ ID NO: 1292473 - RNA, 19 nt, Artificial Sequence
  Description of Artificial Sequence: Synthetic oligonucleotide
  Antisense strand to SEQ ID NO: 1292472
caucaaaggaccagcucuc

SEQ ID NO: 1292474 - RNA, 19 nt, Artificial Sequence
  Description of Artificial Sequence: Synthetic oligonucleotide
  Sense strand starting at position 2709 of SEQ ID NO: 1241695
ggcgaaguguacacacgua

SEQ ID NO: 1292475 - RNA, 19 nt, Artificial Sequence
  Description of Artificial Sequence: Synthetic oligonucleotide
  Antisense strand to SEQ ID NO: 1292474
uacguguguacacuucgcc

SEQ ID NO: 1292476 - RNA, 19 nt, Artificial Sequence
  Description of Artificial Sequence: Synthetic oligonucleotide
  Sense strand starting at position 2753 of SEQ ID NO: 1241695
cugcuauauuugucaggcu

SEQ ID NO: 1292477 - RNA, 19 nt, Artificial Sequence
  Description of Artificial Sequence: Synthetic oligonucleotide
  Antisense strand to SEQ ID NO: 1292476
agccugacaaauauagcag

SEQ ID NO: 1292478 - RNA, 19 nt, Artificial Sequence
  Description of Artificial Sequence: Synthetic oligonucleotide
  Sense strand starting at position 2841 of SEQ ID NO: 1241695
uggcauuaggcagaucuaa

SEQ ID NO: 1292479 - RNA, 19 nt, Artificial Sequence
  Description of Artificial Sequence: Synthetic oligonucleotide
  Antisense strand to SEQ ID NO: 1292478
uuagaucugccuaaugcca

SEQ ID NO: 1292480 - RNA, 19 nt, Artificial Sequence
  Description of Artificial Sequence: Synthetic oligonucleotide
  Sense strand starting at position 2920 of SEQ ID NO: 1241695
gcaggaaguuguucucuuu

SEQ ID NO: 1292481 - RNA, 19 nt, Artificial Sequence
  Description of Artificial Sequence: Synthetic oligonucleotide
  Antisense strand to SEQ ID NO: 1292480
aaagagaacaacuuccugc

SEQ ID NO: 1292482 - RNA, 19 nt, Artificial Sequence
  Description of Artificial Sequence: Synthetic oligonucleotide
  Sense strand starting at position 3041 of SEQ ID NO: 1241695
auuugauuguauuaccuca

SEQ ID NO: 1292483 - RNA, 19 nt, Artificial Sequence
  Description of Artificial Sequence: Synthetic oligonucleotide
  Antisense strand to SEQ ID NO: 1292482
ugagguaauacaaucaaau

SEQ ID NO: 1292484 - RNA, 19 nt, Artificial Sequence
  Description of Artificial Sequence: Synthetic oligonucleotide
  Sense strand starting at position 3046 of SEQ ID NO: 1241695
auuguauuaccucaugcca

SEQ ID NO: 1292485 - RNA, 19 nt, Artificial Sequence
  Description of Artificial Sequence: Synthetic oligonucleotide
  Antisense strand to SEQ ID NO: 1292484
uggcaugagguaauacaau

SEQ ID NO: 1292486 - RNA, 19 nt, Artificial Sequence
  Description of Artificial Sequence: Synthetic oligonucleotide
  Sense strand starting at position 3076 of SEQ ID NO: 1241695
cucugugagcuagguacaa

SEQ ID NO: 1292487 - RNA, 19 nt, Artificial Sequence
  Description of Artificial Sequence: Synthetic oligonucleotide
  Antisense strand to SEQ ID NO: 1292486
uuguaccuagcucacagag

SEQ ID NO: 1292488 - RNA, 19 nt, Artificial Sequence
  Description of Artificial Sequence: Synthetic oligonucleotide
  Sense strand starting at position 3078 of SEQ ID NO: 1241695
cugugagcuagguacaauu

SEQ ID NO: 1292489 - RNA, 19 nt, Artificial Sequence
  Description of Artificial Sequence: Synthetic oligonucleotide
  Antisense strand to SEQ ID NO: 1292488
aauuguaccuagcucacag

SEQ ID NO: 1292490 - RNA, 19 nt, Artificial Sequence
  Description of Artificial Sequence: Synthetic oligonucleotide
  Sense strand starting at position 3120 of SEQ ID NO: 1241695
gaaauugagccuuagguua

SEQ ID NO: 1292491 - RNA, 19 nt, Artificial Sequence
  Description of Artificial Sequence: Synthetic oligonucleotide
  Antisense strand to SEQ ID NO: 1292490
uaaccuaaggcucaauuuc

SEQ ID NO: 1292492 - RNA, 19 nt, Artificial Sequence
  Description of Artificial Sequence: Synthetic oligonucleotide
  Sense strand starting at position 3125 of SEQ ID NO: 1241695
ugagccuuagguuaaauaa

SEQ ID NO: 1292493 - RNA, 19 nt, Artificial Sequence
  Description of Artificial Sequence: Synthetic oligonucleotide
  Antisense strand to SEQ ID NO: 1292492
uuauuuaaccuaaggcuca

SEQ ID NO: 1292494 - RNA, 19 nt, Artificial Sequence
  Description of Artificial Sequence: Synthetic oligonucleotide
  Sense strand starting at position 3199 of SEQ ID NO: 1241695
ggaguugugcugagacguc

SEQ ID NO: 1292495 - RNA, 19 nt, Artificial Sequence
  Description of Artificial Sequence: Synthetic oligonucleotide
  Antisense strand to SEQ ID NO: 1292494
gacgucucagcacaacucc

SEQ ID NO: 1292496 - RNA, 19 nt, Artificial Sequence
  Description of Artificial Sequence: Synthetic oligonucleotide
  Sense strand starting at position 3268 of SEQ ID NO: 1241695
ggagcaaggcuugguucaa

SEQ ID NO: 1292497 - RNA, 19 nt, Artificial Sequence
  Description of Artificial Sequence: Synthetic oligonucleotide
  Antisense strand to SEQ ID NO: 1292496
uugaaccaagccuugcucc

SEQ ID NO: 1292498 - RNA, 19 nt, Artificial Sequence
  Description of Artificial Sequence: Synthetic oligonucleotide
  Sense strand starting at position 3350 of SEQ ID NO: 1241695
gguccuuugacucaguguu

SEQ ID NO: 1292499 - RNA, 19 nt, Artificial Sequence
  Description of Artificial Sequence: Synthetic oligonucleotide
  Antisense strand to SEQ ID NO: 1292498
aacacugagucaaaggacc

SEQ ID NO: 1292500 - RNA, 19 nt, Artificial Sequence
  Description of Artificial Sequence: Synthetic oligonucleotide
  Sense strand starting at position 3360 of SEQ ID NO: 1241695
cucaguguuccguuagcaa

SEQ ID NO: 1292501 - RNA, 19 nt, Artificial Sequence
  Description of Artificial Sequence: Synthetic oligonucleotide
  Antisense strand to SEQ ID NO: 1292500
uugcuaacggaacacugag

SEQ ID NO: 1292502 - RNA, 19 nt, Artificial Sequence
  Description of Artificial Sequence: Synthetic oligonucleotide
  Sense strand starting at position 3463 of SEQ ID NO: 1241695
gaaccuuuaugggucuuga

SEQ ID NO: 1292503 - RNA, 19 nt, Artificial Sequence
  Description of Artificial Sequence: Synthetic oligonucleotide
  Antisense strand to SEQ ID NO: 1292502
ucaagacccauaaagguuc

SEQ ID NO: 1292504 - RNA, 19 nt, Artificial Sequence
  Description of Artificial Sequence: Synthetic oligonucleotide
  Sense strand starting at position 3541 of SEQ ID NO: 1241695
gugggaucucaggauaugu

SEQ ID NO: 1292505 - RNA, 19 nt, Artificial Sequence
  Description of Artificial Sequence: Synthetic oligonucleotide
  Antisense strand to SEQ ID NO: 1292504
acauauccugagaucccac

SEQ ID NO: 1292506 - RNA, 19 nt, Artificial Sequence
  Description of Artificial Sequence: Synthetic oligonucleotide
  Sense strand starting at position 3550 of SEQ ID NO: 1241695
caggauaugucaguuacug

SEQ ID NO: 1292507 - RNA, 19 nt, Artificial Sequence
  Description of Artificial Sequence: Synthetic oligonucleotide
  Antisense strand to SEQ ID NO: 1292506
caguaacugacauauccug

SEQ ID NO: 1292508 - RNA, 19 nt, Artificial Sequence
  Description of Artificial Sequence: Synthetic oligonucleotide
  Sense strand starting at position 3580 of SEQ ID NO: 1241695
gugucugcucccguggaga

SEQ ID NO: 1292509 - RNA, 19 nt, Artificial Sequence
  Description of Artificial Sequence: Synthetic oligonucleotide
  Antisense strand to SEQ ID NO: 1292508
ucuccacgggagcagacac

SEQ ID NO: 1292510 - RNA, 19 nt, Artificial Sequence
  Description of Artificial Sequence: Synthetic oligonucleotide
  Sense strand starting at position 3600 of SEQ ID NO: 1241695
ucacaaugcugagucuaca

SEQ ID NO: 1292511 - RNA, 19 nt, Artificial Sequence
  Description of Artificial Sequence: Synthetic oligonucleotide
  Antisense strand to SEQ ID NO: 1292510
uguagacucagcauuguga

SEQ ID NO: 1292512 - RNA, 19 nt, Artificial Sequence
  Description of Artificial Sequence: Synthetic oligonucleotide
  Sense strand starting at position 3610 of SEQ ID NO: 1241695
gagucuacacauugagagu

SEQ ID NO: 1292513 - RNA, 19 nt, Artificial Sequence
  Description of Artificial Sequence: Synthetic oligonucleotide
  Antisense strand to SEQ ID NO: 1292512
acucucaauguguagacuc

SEQ ID NO: 1292514 - RNA, 19 nt, Artificial Sequence
  Description of Artificial Sequence: Synthetic oligonucleotide
  Sense strand starting at position 3756 of SEQ ID NO: 1241695
agaaauuuauucuauggca

SEQ ID NO: 1292515 - RNA, 19 nt, Artificial Sequence
  Description of Artificial Sequence: Synthetic oligonucleotide
  Antisense strand to SEQ ID NO: 1292514
ugccauagaauaaauuucu

SEQ ID NO: 1292516 - RNA, 19 nt, Artificial Sequence
  Description of Artificial Sequence: Synthetic oligonucleotide
  Sense strand starting at position 3876 of SEQ ID NO: 1241695
uggugaaguaaacauguuu

SEQ ID NO: 1292517 - RNA, 19 nt, Artificial Sequence
  Description of Artificial Sequence: Synthetic oligonucleotide
  Antisense strand to SEQ ID NO: 1292516
aaacauguuuacuucacca

SEQ ID NO: 1292518 - RNA, 19 nt, Artificial Sequence
  Description of Artificial Sequence: Synthetic oligonucleotide
  Sense strand starting at position 3946 of SEQ ID NO: 1241695
uguguacugguguggaaag

SEQ ID NO: 1292519 - RNA, 19 nt, Artificial Sequence
  Description of Artificial Sequence: Synthetic oligonucleotide
  Antisense strand to SEQ ID NO: 1292518
cuuuccacaccaguacaca

SEQ ID NO: 1292520 - RNA, 19 nt, Artificial Sequence
  Description of Artificial Sequence: Synthetic oligonucleotide
  Sense strand starting at position 12 of SEQ ID NO: 1241696
ucuauuuaguucuccuagu

SEQ ID NO: 1292521 - RNA, 19 nt, Artificial Sequence
  Description of Artificial Sequence: Synthetic oligonucleotide
  Antisense strand to SEQ ID NO: 1292520
acuaggagaacuaaauaga

SEQ ID NO: 1292522 - RNA, 19 nt, Artificial Sequence
  Description of Artificial Sequence: Synthetic oligonucleotide
  Sense strand starting at position 13 of SEQ ID NO: 1241696
cuauuuaguucuccuaguu

SEQ ID NO: 1292523 - RNA, 19 nt, Artificial Sequence
  Description of Artificial Sequence: Synthetic oligonucleotide
  Antisense strand to SEQ ID NO: 1292522
aacuaggagaacuaaauag

SEQ ID NO: 1292524 - RNA, 19 nt, Artificial Sequence
  Description of Artificial Sequence: Synthetic oligonucleotide
  Sense strand starting at position 58 of SEQ ID NO: 1241696
ugccuauauuuguucuaag

SEQ ID NO: 1292525 - RNA, 19 nt, Artificial Sequence
  Description of Artificial Sequence: Synthetic oligonucleotide
  Antisense strand to SEQ ID NO: 1292524
cuuagaacaaauauaggca

SEQ ID NO: 1292526 - RNA, 19 nt, Artificial Sequence
  Description of Artificial Sequence: Synthetic oligonucleotide
  Sense strand starting at position 59 of SEQ ID NO: 1241696
gccuauauuuguucuaagu

SEQ ID NO: 1292527 - RNA, 19 nt, Artificial Sequence
  Description of Artificial Sequence: Synthetic oligonucleotide
  Antisense strand to SEQ ID NO: 1292526
acuuagaacaaauauaggc

SEQ ID NO: 1292528 - RNA, 19 nt, Artificial Sequence
  Description of Artificial Sequence: Synthetic oligonucleotide
  Sense strand starting at position 125 of SEQ ID NO: 1241696
cuauguuuacagugaccaa

SEQ ID NO: 1292529 - RNA, 19 nt, Artificial Sequence
  Description of Artificial Sequence: Synthetic oligonucleotide
  Antisense strand to SEQ ID NO: 1292528
uuggucacuguaaacauag

SEQ ID NO: 1292530 - RNA, 19 nt, Artificial Sequence
  Description of Artificial Sequence: Synthetic oligonucleotide
  Sense strand starting at position 128 of SEQ ID NO: 1241696
uguuuacagugaccaauaa

SEQ ID NO: 1292531 - RNA, 19 nt, Artificial Sequence
  Description of Artificial Sequence: Synthetic oligonucleotide
  Antisense strand to SEQ ID NO: 1292530
uuauuggucacuguaaaca

SEQ ID NO: 1292532 - RNA, 19 nt, Artificial Sequence
  Description of Artificial Sequence: Synthetic oligonucleotide
  Sense strand starting at position 147 of SEQ ID NO: 1241696
acagcagggccucaauauu

SEQ ID NO: 1292533 - RNA, 19 nt, Artificial Sequence
  Description of Artificial Sequence: Synthetic oligonucleotide
  Antisense strand to SEQ ID NO: 1292532
aauauugaggcccugcugu

SEQ ID NO: 1292534 - RNA, 19 nt, Artificial Sequence
  Description of Artificial Sequence: Synthetic oligonucleotide
  Sense strand starting at position 156 of SEQ ID NO: 1241696
ccucaauauuggcuaaaug

SEQ ID NO: 1292535 - RNA, 19 nt, Artificial Sequence
  Description of Artificial Sequence: Synthetic oligonucleotide
  Antisense strand to SEQ ID NO: 1292534
cauuuagccaauauugagg

SEQ ID NO: 1292536 - RNA, 19 nt, Artificial Sequence
  Description of Artificial Sequence: Synthetic oligonucleotide
  Sense strand starting at position 230 of SEQ ID NO: 1241696
ggcucuaaugguuaaguca

SEQ ID NO: 1292537 - RNA, 19 nt, Artificial Sequence
  Description of Artificial Sequence: Synthetic oligonucleotide
  Antisense strand to SEQ ID NO: 1292536
ugacuuaaccauuagagcc

SEQ ID NO: 1292538 - RNA, 19 nt, Artificial Sequence
  Description of Artificial Sequence: Synthetic oligonucleotide
  Sense strand starting at position 496 of SEQ ID NO: 1241696
aagagaaacuguuucgaag

SEQ ID NO: 1292539 - RNA, 19 nt, Artificial Sequence
  Description of Artificial Sequence: Synthetic oligonucleotide
  Antisense strand to SEQ ID NO: 1292538
cuucgaaacaguuucucuu

SEQ ID NO: 1292540 - RNA, 19 nt, Artificial Sequence
  Description of Artificial Sequence: Synthetic oligonucleotide
  Sense strand starting at position 555 of SEQ ID NO: 1241696
cccuuuauugucuggaaac

SEQ ID NO: 1292541 - RNA, 19 nt, Artificial Sequence
  Description of Artificial Sequence: Synthetic oligonucleotide
  Antisense strand to SEQ ID NO: 1292540
guuuccagacaauaaaggg

SEQ ID NO: 1292542 - RNA, 19 nt, Artificial Sequence
  Description of Artificial Sequence: Synthetic oligonucleotide
  Sense strand starting at position 557 of SEQ ID NO: 1241696
cuuuauugucuggaaacuu

SEQ ID NO: 1292543 - RNA, 19 nt, Artificial Sequence
  Description of Artificial Sequence: Synthetic oligonucleotide
  Antisense strand to SEQ ID NO: 1292542
aaguuuccagacaauaaag

SEQ ID NO: 1292544 - RNA, 19 nt, Artificial Sequence
  Description of Artificial Sequence: Synthetic oligonucleotide
  Sense strand starting at position 806 of SEQ ID NO: 1241696
aagagugaccacgaauguu

SEQ ID NO: 1292545 - RNA, 19 nt, Artificial Sequence
  Description of Artificial Sequence: Synthetic oligonucleotide
  Antisense strand to SEQ ID NO: 1292544
aacauucguggucacucuu

SEQ ID NO: 1292546 - RNA, 19 nt, Artificial Sequence
  Description of Artificial Sequence: Synthetic oligonucleotide
  Sense strand starting at position 826 of SEQ ID NO: 1241696
acauguugguaagcaaaua

SEQ ID NO: 1292547 - RNA, 19 nt, Artificial Sequence
  Description of Artificial Sequence: Synthetic oligonucleotide
  Antisense strand to SEQ ID NO: 1292546
uauuugcuuaccaacaugu

SEQ ID NO: 1292548 - RNA, 19 nt, Artificial Sequence
  Description of Artificial Sequence: Synthetic oligonucleotide
  Sense strand starting at position 991 of SEQ ID NO: 1241696
guacuuacacuguaucuaa

SEQ ID NO: 1292549 - RNA, 19 nt, Artificial Sequence
  Description of Artificial Sequence: Synthetic oligonucleotide
  Antisense strand to SEQ ID NO: 1292548
uuagauacaguguaaguac

SEQ ID NO: 1292550 - RNA, 19 nt, Artificial Sequence
  Description of Artificial Sequence: Synthetic oligonucleotide
  Sense strand starting at position 1047 of SEQ ID NO: 1241696
ucaacaauccuaugaguug

SEQ ID NO: 1292551 - RNA, 19 nt, Artificial Sequence
  Description of Artificial Sequence: Synthetic oligonucleotide
  Antisense strand to SEQ ID NO: 1292550
caacucauaggauuguuga

SEQ ID NO: 1292552 - RNA, 19 nt, Artificial Sequence
  Description of Artificial Sequence: Synthetic oligonucleotide
  Sense strand starting at position 1056 of SEQ ID NO: 1241696
cuaugaguuggguauuauu

SEQ ID NO: 1292553 - RNA, 19 nt, Artificial Sequence
  Description of Artificial Sequence: Synthetic oligonucleotide
  Antisense strand to SEQ ID NO: 1292552
aauaauacccaacucauag

SEQ ID NO: 1292554 - RNA, 19 nt, Artificial Sequence
  Description of Artificial Sequence: Synthetic oligonucleotide
  Sense strand starting at position 1065 of SEQ ID NO: 1241696
ggguauuauugacuccauu

SEQ ID NO: 1292555 - RNA, 19 nt, Artificial Sequence
  Description of Artificial Sequence: Synthetic oligonucleotide
  Antisense strand to SEQ ID NO: 1292554
aauggagucaauaauaccc

SEQ ID NO: 1292556 - RNA, 19 nt, Artificial Sequence
  Description of Artificial Sequence: Synthetic oligonucleotide
  Sense strand starting at position 1241 of SEQ ID NO: 1241696
guccaauugccugacggaa

SEQ ID NO: 1292557 - RNA, 19 nt, Artificial Sequence
  Description of Artificial Sequence: Synthetic oligonucleotide
  Antisense strand to SEQ ID NO: 1292556
uuccgucaggcaauuggac

SEQ ID NO: 1292558 - RNA, 19 nt, Artificial Sequence
  Description of Artificial Sequence: Synthetic oligonucleotide
  Sense strand starting at position 1262 of SEQ ID NO: 1241696
cucacaaguuucucaaagu

SEQ ID NO: 1292559 - RNA, 19 nt, Artificial Sequence
  Description of Artificial Sequence: Synthetic oligonucleotide
  Antisense strand to SEQ ID NO: 1292558
acuuugagaaacuugugag

SEQ ID NO: 1292560 - RNA, 19 nt, Artificial Sequence
  Description of Artificial Sequence: Synthetic oligonucleotide
  Sense strand starting at position 1602 of SEQ ID NO: 1241696
uuguaaaucuugguuacca

SEQ ID NO: 1292561 - RNA, 19 nt, Artificial Sequence
  Description of Artificial Sequence: Synthetic oligonucleotide
  Antisense strand to SEQ ID NO: 1292560
ugguaaccaagauuuacaa

SEQ ID NO: 1292562 - RNA, 19 nt, Artificial Sequence
  Description of Artificial Sequence: Synthetic oligonucleotide
  Sense strand starting at position 1603 of SEQ ID NO: 1241696
uguaaaucuugguuaccaa

SEQ ID NO: 1292563 - RNA, 19 nt, Artificial Sequence
  Description of Artificial Sequence: Synthetic oligonucleotide
  Antisense strand to SEQ ID NO: 1292562
uugguaaccaagauuuaca

SEQ ID NO: 1292564 - RNA, 19 nt, Artificial Sequence
  Description of Artificial Sequence: Synthetic oligonucleotide
  Sense strand starting at position 1604 of SEQ ID NO: 1241696
guaaaucuugguuaccaag

SEQ ID NO: 1292565 - RNA, 19 nt, Artificial Sequence
  Description of Artificial Sequence: Synthetic oligonucleotide
  Antisense strand to SEQ ID NO: 1292564
cuugguaaccaagauuuac

SEQ ID NO: 1292566 - RNA, 19 nt, Artificial Sequence
  Description of Artificial Sequence: Synthetic oligonucleotide
  Sense strand starting at position 2028 of SEQ ID NO: 1241696
gagagaaucugcuuccgga

SEQ ID NO: 1292567 - RNA, 19 nt, Artificial Sequence
  Description of Artificial Sequence: Synthetic oligonucleotide
  Antisense strand to SEQ ID NO: 1292566
uccggaagcagauucucuc

SEQ ID NO: 1292568 - RNA, 19 nt, Artificial Sequence
  Description of Artificial Sequence: Synthetic oligonucleotide
  Sense strand starting at position 2344 of SEQ ID NO: 1241696
ccgauuguuauugaacgau

SEQ ID NO: 1292569 - RNA, 19 nt, Artificial Sequence
  Description of Artificial Sequence: Synthetic oligonucleotide
  Antisense strand to SEQ ID NO: 1292568
aucguucaauaacaaucgg

SEQ ID NO: 1292570 - RNA, 19 nt, Artificial Sequence
  Description of Artificial Sequence: Synthetic oligonucleotide
  Sense strand starting at position 2486 of SEQ ID NO: 1241696
gggaauccguguuuauuuc

SEQ ID NO: 1292571 - RNA, 19 nt, Artificial Sequence
  Description of Artificial Sequence: Synthetic oligonucleotide
  Antisense strand to SEQ ID NO: 1292570
gaaauaaacacggauuccc

SEQ ID NO: 1292572 - RNA, 19 nt, Artificial Sequence
  Description of Artificial Sequence: Synthetic oligonucleotide
  Sense strand starting at position 3092 of SEQ ID NO: 1241696
ccacuuuaacguugaggau

SEQ ID NO: 1292573 - RNA, 19 nt, Artificial Sequence
  Description of Artificial Sequence: Synthetic oligonucleotide
  Antisense strand to SEQ ID NO: 1292572
auccucaacguuaaagugg

SEQ ID NO: 1292574 - RNA, 19 nt, Artificial Sequence
  Description of Artificial Sequence: Synthetic oligonucleotide
  Sense strand starting at position 3093 of SEQ ID NO: 1241696
cacuuuaacguugaggaua

SEQ ID NO: 1292575 - RNA, 19 nt, Artificial Sequence
  Description of Artificial Sequence: Synthetic oligonucleotide
  Antisense strand to SEQ ID NO: 1292574
uauccucaacguuaaagug

SEQ ID NO: 1292576 - RNA, 19 nt, Artificial Sequence
  Description of Artificial Sequence: Synthetic oligonucleotide
  Sense strand starting at position 3476 of SEQ ID NO: 1241696
guauguguugaguacauga

SEQ ID NO: 1292577 - RNA, 19 nt, Artificial Sequence
  Description of Artificial Sequence: Synthetic oligonucleotide
  Antisense strand to SEQ ID NO: 1292576
ucauguacucaacacauac

SEQ ID NO: 1292578 - RNA, 19 nt, Artificial Sequence
  Description of Artificial Sequence: Synthetic oligonucleotide
  Sense strand starting at position 3478 of SEQ ID NO: 1241696
auguguugaguacaugaaa

SEQ ID NO: 1292579 - RNA, 19 nt, Artificial Sequence
  Description of Artificial Sequence: Synthetic oligonucleotide
  Antisense strand to SEQ ID NO: 1292578
uuucauguacucaacacau

SEQ ID NO: 1292580 - RNA, 19 nt, Artificial Sequence
  Description of Artificial Sequence: Synthetic oligonucleotide
  Sense strand starting at position 3481 of SEQ ID NO: 1241696
uguugaguacaugaaagcu

SEQ ID NO: 1292581 - RNA, 19 nt, Artificial Sequence
  Description of Artificial Sequence: Synthetic oligonucleotide
  Antisense strand to SEQ ID NO: 1292580
agcuuucauguacucaaca

SEQ ID NO: 1292582 - RNA, 19 nt, Artificial Sequence
  Description of Artificial Sequence: Synthetic oligonucleotide
  Sense strand starting at position 3586 of SEQ ID NO: 1241696
gaaaguggugguuaacagu

SEQ ID NO: 1292583 - RNA, 19 nt, Artificial Sequence
  Description of Artificial Sequence: Synthetic oligonucleotide
  Antisense strand to SEQ ID NO: 1292582
acuguuaaccaccacuuuc

SEQ ID NO: 1292584 - RNA, 19 nt, Artificial Sequence
  Description of Artificial Sequence: Synthetic oligonucleotide
  Sense strand starting at position 3647 of SEQ ID NO: 1241696
ggugucguucaguuuagca

SEQ ID NO: 1292585 - RNA, 19 nt, Artificial Sequence
  Description of Artificial Sequence: Synthetic oligonucleotide
  Antisense strand to SEQ ID NO: 1292584
ugcuaaacugaacgacacc

SEQ ID NO: 1292586 - RNA, 19 nt, Artificial Sequence
  Description of Artificial Sequence: Synthetic oligonucleotide
  Sense strand starting at position 3708 of SEQ ID NO: 1241696
ugaauuauagugcaguauu

SEQ ID NO: 1292587 - RNA, 19 nt, Artificial Sequence
  Description of Artificial Sequence: Synthetic oligonucleotide
  Antisense strand to SEQ ID NO: 1292586
aauacugcacuauaauuca

SEQ ID NO: 1292588 - RNA, 19 nt, Artificial Sequence
  Description of Artificial Sequence: Synthetic oligonucleotide
  Sense strand starting at position 3711 of SEQ ID NO: 1241696
auuauagugcaguauuaag

SEQ ID NO: 1292589 - RNA, 19 nt, Artificial Sequence
  Description of Artificial Sequence: Synthetic oligonucleotide
  Antisense strand to SEQ ID NO: 1292588
cuuaauacugcacuauaau

SEQ ID NO: 1292590 - RNA, 19 nt, Artificial Sequence
  Description of Artificial Sequence: Synthetic oligonucleotide
  Sense strand starting at position 3725 of SEQ ID NO: 1241696
uuaaguauggccuauuaaa

SEQ ID NO: 1292591 - RNA, 19 nt, Artificial Sequence
  Description of Artificial Sequence: Synthetic oligonucleotide
  Antisense strand to SEQ ID NO: 1292590
uuuaauaggccauacuuaa

SEQ ID NO: 1292592 - RNA, 19 nt, Artificial Sequence
  Description of Artificial Sequence: Synthetic oligonucleotide
  Sense strand starting at position 3840 of SEQ ID NO: 1241696
uauuauagagacugguuau

SEQ ID NO: 1292593 - RNA, 19 nt, Artificial Sequence
  Description of Artificial Sequence: Synthetic oligonucleotide
  Antisense strand to SEQ ID NO: 1292592
auaaccagucucuauaaua

SEQ ID NO: 1292594 - RNA, 19 nt, Artificial Sequence
  Description of Artificial Sequence: Synthetic oligonucleotide
  Sense strand starting at position 3843 of SEQ ID NO: 1241696
uauagagacugguuauaca

SEQ ID NO: 1292595 - RNA, 19 nt, Artificial Sequence
  Description of Artificial Sequence: Synthetic oligonucleotide
  Antisense strand to SEQ ID NO: 1292594
uguauaaccagucucuaua

SEQ ID NO: 1292596 - RNA, 19 nt, Artificial Sequence
  Description of Artificial Sequence: Synthetic oligonucleotide
  Sense strand starting at position 3851 of SEQ ID NO: 1241696
cugguuauacaucagcaaa

SEQ ID NO: 1292597 - RNA, 19 nt, Artificial Sequence
  Description of Artificial Sequence: Synthetic oligonucleotide
  Antisense strand to SEQ ID NO: 1292596
uuugcugauguauaaccag

SEQ ID NO: 1292598 - RNA, 19 nt, Artificial Sequence
  Description of Artificial Sequence: Synthetic oligonucleotide
  Sense strand starting at position 3853 of SEQ ID NO: 1241696
gguuauacaucagcaaacu

SEQ ID NO: 1292599 - RNA, 19 nt, Artificial Sequence
  Description of Artificial Sequence: Synthetic oligonucleotide
  Antisense strand to SEQ ID NO: 1292598
aguuugcugauguauaacc

SEQ ID NO: 1292600 - RNA, 19 nt, Artificial Sequence
  Description of Artificial Sequence: Synthetic oligonucleotide
  Sense strand starting at position 51 of SEQ ID NO: 1241697
guaacaauuugagaauagu

SEQ ID NO: 1292601 - RNA, 19 nt, Artificial Sequence
  Description of Artificial Sequence: Synthetic oligonucleotide
  Antisense strand to SEQ ID NO: 1292600
acuauucucaaauuguuac

SEQ ID NO: 1292602 - RNA, 19 nt, Artificial Sequence
  Description of Artificial Sequence: Synthetic oligonucleotide
  Sense strand starting at position 362 of SEQ ID NO: 1241697
ugauuccaacuuugcaaga

SEQ ID NO: 1292603 - RNA, 19 nt, Artificial Sequence
  Description of Artificial Sequence: Synthetic oligonucleotide
  Antisense strand to SEQ ID NO: 1292602
ucuugcaaaguuggaauca

SEQ ID NO: 1292604 - RNA, 19 nt, Artificial Sequence
  Description of Artificial Sequence: Synthetic oligonucleotide
  Sense strand starting at position 367 of SEQ ID NO: 1241697
ccaacuuugcaagauguuu

SEQ ID NO: 1292605 - RNA, 19 nt, Artificial Sequence
  Description of Artificial Sequence: Synthetic oligonucleotide
  Antisense strand to SEQ ID NO: 1292604
aaacaucuugcaaaguugg

SEQ ID NO: 1292606 - RNA, 19 nt, Artificial Sequence
  Description of Artificial Sequence: Synthetic oligonucleotide
  Sense strand starting at position 373 of SEQ ID NO: 1241697
uugcaagauguuuauauag

SEQ ID NO: 1292607 - RNA, 19 nt, Artificial Sequence
  Description of Artificial Sequence: Synthetic oligonucleotide
  Antisense strand to SEQ ID NO: 1292606
cuauauaaacaucuugcaa

SEQ ID NO: 1292608 - RNA, 19 nt, Artificial Sequence
  Description of Artificial Sequence: Synthetic oligonucleotide
  Sense strand starting at position 472 of SEQ ID NO: 1241697
uuucucuuaguguagaguu

SEQ ID NO: 1292609 - RNA, 19 nt, Artificial Sequence
  Description of Artificial Sequence: Synthetic oligonucleotide
  Antisense strand to SEQ ID NO: 1292608
aacucuacacuaagagaaa

SEQ ID NO: 1292610 - RNA, 19 nt, Artificial Sequence
  Description of Artificial Sequence: Synthetic oligonucleotide
  Sense strand starting at position 514 of SEQ ID NO: 1241697
ucaacacgaucagaaacau

SEQ ID NO: 1292611 - RNA, 19 nt, Artificial Sequence
  Description of Artificial Sequence: Synthetic oligonucleotide
  Antisense strand to SEQ ID NO: 1292610
auguuucugaucguguuga

SEQ ID NO: 1292612 - RNA, 19 nt, Artificial Sequence
  Description of Artificial Sequence: Synthetic oligonucleotide
  Sense strand starting at position 591 of SEQ ID NO: 1241697
gugugaaagguccaagaac

SEQ ID NO: 1292613 - RNA, 19 nt, Artificial Sequence
  Description of Artificial Sequence: Synthetic oligonucleotide
  Antisense strand to SEQ ID NO: 1292612
guucuuggaccuuucacac

SEQ ID NO: 1292614 - RNA, 19 nt, Artificial Sequence
  Description of Artificial Sequence: Synthetic oligonucleotide
  Sense strand starting at position 632 of SEQ ID NO: 1241697
ucaugccugcuuuacagau

SEQ ID NO: 1292615 - RNA, 19 nt, Artificial Sequence
  Description of Artificial Sequence: Synthetic oligonucleotide
  Antisense strand to SEQ ID NO: 1292614
aucuguaaagcaggcauga

SEQ ID NO: 1292616 - RNA, 19 nt, Artificial Sequence
  Description of Artificial Sequence: Synthetic oligonucleotide
  Sense strand starting at position 638 of SEQ ID NO: 1241697
cugcuuuacagauggguga

SEQ ID NO: 1292617 - RNA, 19 nt, Artificial Sequence
  Description of Artificial Sequence: Synthetic oligonucleotide
  Antisense strand to SEQ ID NO: 1292616
ucacccaucuguaaagcag

SEQ ID NO: 1292618 - RNA, 19 nt, Artificial Sequence
  Description of Artificial Sequence: Synthetic oligonucleotide
  Sense strand starting at position 639 of SEQ ID NO: 1241697
ugcuuuacagaugggugaa

SEQ ID NO: 1292619 - RNA, 19 nt, Artificial Sequence
  Description of Artificial Sequence: Synthetic oligonucleotide
  Antisense strand to SEQ ID NO: 1292618
uucacccaucuguaaagca

SEQ ID NO: 1292620 - RNA, 19 nt, Artificial Sequence
  Description of Artificial Sequence: Synthetic oligonucleotide
  Sense strand starting at position 640 of SEQ ID NO: 1241697
gcuuuacagaugggugaac

SEQ ID NO: 1292621 - RNA, 19 nt, Artificial Sequence
  Description of Artificial Sequence: Synthetic oligonucleotide
  Antisense strand to SEQ ID NO: 1292620
guucacccaucuguaaagc

SEQ ID NO: 1292622 - RNA, 19 nt, Artificial Sequence
  Description of Artificial Sequence: Synthetic oligonucleotide
  Sense strand starting at position 642 of SEQ ID NO: 1241697
uuuacagaugggugaacua

SEQ ID NO: 1292623 - RNA, 19 nt, Artificial Sequence
  Description of Artificial Sequence: Synthetic oligonucleotide
  Antisense strand to SEQ ID NO: 1292622
uaguucacccaucuguaaa

SEQ ID NO: 1292624 - RNA, 19 nt, Artificial Sequence
  Description of Artificial Sequence: Synthetic oligonucleotide
  Sense strand starting at position 671 of SEQ ID NO: 1241697
ucggauuaaucagugucuu

SEQ ID NO: 1292625 - RNA, 19 nt, Artificial Sequence
  Description of Artificial Sequence: Synthetic oligonucleotide
  Antisense strand to SEQ ID NO: 1292624
aagacacugauuaauccga

SEQ ID NO: 1292626 - RNA, 19 nt, Artificial Sequence
  Description of Artificial Sequence: Synthetic oligonucleotide
  Sense strand starting at position 672 of SEQ ID NO: 1241697
cggauuaaucagugucuuu

SEQ ID NO: 1292627 - RNA, 19 nt, Artificial Sequence
  Description of Artificial Sequence: Synthetic oligonucleotide
  Antisense strand to SEQ ID NO: 1292626
aaagacacugauuaauccg

SEQ ID NO: 1292628 - RNA, 19 nt, Artificial Sequence
  Description of Artificial Sequence: Synthetic oligonucleotide
  Sense strand starting at position 1511 of SEQ ID NO: 1241697
ccaugaucuccgcgaagca

SEQ ID NO: 1292629 - RNA, 19 nt, Artificial Sequence
  Description of Artificial Sequence: Synthetic oligonucleotide
  Antisense strand to SEQ ID NO: 1292628
ugcuucgcggagaucaugg

SEQ ID NO: 1292630 - RNA, 19 nt, Artificial Sequence
  Description of Artificial Sequence: Synthetic oligonucleotide
  Sense strand starting at position 1662 of SEQ ID NO: 1241697
gcgccugauccugcugcaa

SEQ ID NO: 1292631 - RNA, 19 nt, Artificial Sequence
  Description of Artificial Sequence: Synthetic oligonucleotide
  Antisense strand to SEQ ID NO: 1292630
uugcagcaggaucaggcgc

SEQ ID NO: 1292632 - RNA, 19 nt, Artificial Sequence
  Description of Artificial Sequence: Synthetic oligonucleotide
  Sense strand starting at position 2469 of SEQ ID NO: 1241697
uugggacuguuugcgauuu

SEQ ID NO: 1292633 - RNA, 19 nt, Artificial Sequence
  Description of Artificial Sequence: Synthetic oligonucleotide
  Antisense strand to SEQ ID NO: 1292632
aaaucgcaaacagucccaa

SEQ ID NO: 1292634 - RNA, 19 nt, Artificial Sequence
  Description of Artificial Sequence: Synthetic oligonucleotide
  Sense strand starting at position 2481 of SEQ ID NO: 1241697
gcgauuucugggcguggga

SEQ ID NO: 1292635 - RNA, 19 nt, Artificial Sequence
  Description of Artificial Sequence: Synthetic oligonucleotide
  Antisense strand to SEQ ID NO: 1292634
ucccacgcccagaaaucgc

SEQ ID NO: 1292636 - RNA, 19 nt, Artificial Sequence
  Description of Artificial Sequence: Synthetic oligonucleotide
  Sense strand starting at position 2500 of SEQ ID NO: 1241697
ccgaguuccaagugacaau

SEQ ID NO: 1292637 - RNA, 19 nt, Artificial Sequence
  Description of Artificial Sequence: Synthetic oligonucleotide
  Antisense strand to SEQ ID NO: 1292636
auugucacuuggaacucgg

SEQ ID NO: 1292638 - RNA, 19 nt, Artificial Sequence
  Description of Artificial Sequence: Synthetic oligonucleotide
  Sense strand starting at position 2501 of SEQ ID NO: 1241697
cgaguuccaagugacaauu

SEQ ID NO: 1292639 - RNA, 19 nt, Artificial Sequence
  Description of Artificial Sequence: Synthetic oligonucleotide
  Antisense strand to SEQ ID NO: 1292638
aauugucacuuggaacucg

SEQ ID NO: 1292640 - RNA, 19 nt, Artificial Sequence
  Description of Artificial Sequence: Synthetic oligonucleotide
  Sense strand starting at position 2591 of SEQ ID NO: 1241697
cagccuuucuugucggaaa

SEQ ID NO: 1292641 - RNA, 19 nt, Artificial Sequence
  Description of Artificial Sequence: Synthetic oligonucleotide
  Antisense strand to SEQ ID NO: 1292640
uuuccgacaagaaaggcug

SEQ ID NO: 1292642 - RNA, 19 nt, Artificial Sequence
  Description of Artificial Sequence: Synthetic oligonucleotide
  Sense strand starting at position 2643 of SEQ ID NO: 1241697
cacuguguaaucgggagga

SEQ ID NO: 1292643 - RNA, 19 nt, Artificial Sequence
  Description of Artificial Sequence: Synthetic oligonucleotide
  Antisense strand to SEQ ID NO: 1292642
uccucccgauuacacagug

SEQ ID NO: 1292644 - RNA, 19 nt, Artificial Sequence
  Description of Artificial Sequence: Synthetic oligonucleotide
  Sense strand starting at position 2645 of SEQ ID NO: 1241697
cuguguaaucgggaggagu

SEQ ID NO: 1292645 - RNA, 19 nt, Artificial Sequence
  Description of Artificial Sequence: Synthetic oligonucleotide
  Antisense strand to SEQ ID NO: 1292644
acuccucccgauuacacag

SEQ ID NO: 1292646 - RNA, 19 nt, Artificial Sequence
  Description of Artificial Sequence: Synthetic oligonucleotide
  Sense strand starting at position 2647 of SEQ ID NO: 1241697
guguaaucgggaggaguaa

SEQ ID NO: 1292647 - RNA, 19 nt, Artificial Sequence
  Description of Artificial Sequence: Synthetic oligonucleotide
  Antisense strand to SEQ ID NO: 1292646
uuacuccucccgauuacac

SEQ ID NO: 1292648 - RNA, 19 nt, Artificial Sequence
  Description of Artificial Sequence: Synthetic oligonucleotide
  Sense strand starting at position 2648 of SEQ ID NO: 1241697
uguaaucgggaggaguaau

SEQ ID NO: 1292649 - RNA, 19 nt, Artificial Sequence
  Description of Artificial Sequence: Synthetic oligonucleotide
  Antisense strand to SEQ ID NO: 1292648
auuacuccucccgauuaca

SEQ ID NO: 1292650 - RNA, 19 nt, Artificial Sequence
  Description of Artificial Sequence: Synthetic oligonucleotide
  Sense strand starting at position 2660 of SEQ ID NO: 1241697
gaguaauucucagcauuag

SEQ ID NO: 1292651 - RNA, 19 nt, Artificial Sequence
  Description of Artificial Sequence: Synthetic oligonucleotide
  Antisense strand to SEQ ID NO: 1292650
cuaaugcugagaauuacuc

SEQ ID NO: 1292652 - RNA, 19 nt, Artificial Sequence
  Description of Artificial Sequence: Synthetic oligonucleotide
  Sense strand starting at position 2703 of SEQ ID NO: 1241697
cuugaugucaaguauuguu

SEQ ID NO: 1292653 - RNA, 19 nt, Artificial Sequence
  Description of Artificial Sequence: Synthetic oligonucleotide
  Antisense strand to SEQ ID NO: 1292652
aacaauacuugacaucaag

SEQ ID NO: 1292654 - RNA, 19 nt, Artificial Sequence
  Description of Artificial Sequence: Synthetic oligonucleotide
  Sense strand starting at position 2708 of SEQ ID NO: 1241697
ugucaaguauuguugaucu

SEQ ID NO: 1292655 - RNA, 19 nt, Artificial Sequence
  Description of Artificial Sequence: Synthetic oligonucleotide
  Antisense strand to SEQ ID NO: 1292654
agaucaacaauacuugaca

SEQ ID NO: 1292656 - RNA, 19 nt, Artificial Sequence
  Description of Artificial Sequence: Synthetic oligonucleotide
  Sense strand starting at position 2731 of SEQ ID NO: 1241697
aaaggaauaucauucucgu

SEQ ID NO: 1292657 - RNA, 19 nt, Artificial Sequence
  Description of Artificial Sequence: Synthetic oligonucleotide
  Antisense strand to SEQ ID NO: 1292656
acgagaaugauauuccuuu

SEQ ID NO: 1292658 - RNA, 19 nt, Artificial Sequence
  Description of Artificial Sequence: Synthetic oligonucleotide
  Sense strand starting at position 2737 of SEQ ID NO: 1241697
auaucauucucguuccuau

SEQ ID NO: 1292659 - RNA, 19 nt, Artificial Sequence
  Description of Artificial Sequence: Synthetic oligonucleotide
  Antisense strand to SEQ ID NO: 1292658
auaggaacgagaaugauau

SEQ ID NO: 1292660 - RNA, 19 nt, Artificial Sequence
  Description of Artificial Sequence: Synthetic oligonucleotide
  Sense strand starting at position 2815 of SEQ ID NO: 1241697
cgggcuuguccgcucggaa

SEQ ID NO: 1292661 - RNA, 19 nt, Artificial Sequence
  Description of Artificial Sequence: Synthetic oligonucleotide
  Antisense strand to SEQ ID NO: 1292660
uuccgagcggacaagcccg

SEQ ID NO: 1292662 - RNA, 19 nt, Artificial Sequence
  Description of Artificial Sequence: Synthetic oligonucleotide
  Sense strand starting at position 2816 of SEQ ID NO: 1241697
gggcuuguccgcucggaau

SEQ ID NO: 1292663 - RNA, 19 nt, Artificial Sequence
  Description of Artificial Sequence: Synthetic oligonucleotide
  Antisense strand to SEQ ID NO: 1292662
auuccgagcggacaagccc

SEQ ID NO: 1292664 - RNA, 19 nt, Artificial Sequence
  Description of Artificial Sequence: Synthetic oligonucleotide
  Sense strand starting at position 2963 of SEQ ID NO: 1241697
gagauauacguacaauguc

SEQ ID NO: 1292665 - RNA, 19 nt, Artificial Sequence
  Description of Artificial Sequence: Synthetic oligonucleotide
  Antisense strand to SEQ ID NO: 1292664
gacauuguacguauaucuc

SEQ ID NO: 1292666 - RNA, 19 nt, Artificial Sequence
  Description of Artificial Sequence: Synthetic oligonucleotide
  Sense strand starting at position 3042 of SEQ ID NO: 1241697
cagaaauaucuacguuuag

SEQ ID NO: 1292667 - RNA, 19 nt, Artificial Sequence
  Description of Artificial Sequence: Synthetic oligonucleotide
  Antisense strand to SEQ ID NO: 1292666
cuaaacguagauauuucug

SEQ ID NO: 1292668 - RNA, 19 nt, Artificial Sequence
  Description of Artificial Sequence: Synthetic oligonucleotide
  Sense strand starting at position 3043 of SEQ ID NO: 1241697
agaaauaucuacguuuaga

SEQ ID NO: 1292669 - RNA, 19 nt, Artificial Sequence
  Description of Artificial Sequence: Synthetic oligonucleotide
  Antisense strand to SEQ ID NO: 1292668
ucuaaacguagauauuucu

SEQ ID NO: 1292670 - RNA, 19 nt, Artificial Sequence
  Description of Artificial Sequence: Synthetic oligonucleotide
  Sense strand starting at position 3764 of SEQ ID NO: 1241697
ggaagguucgagugcuuga

SEQ ID NO: 1292671 - RNA, 19 nt, Artificial Sequence
  Description of Artificial Sequence: Synthetic oligonucleotide
  Antisense strand to SEQ ID NO: 1292670
ucaagcacucgaaccuucc

SEQ ID NO: 1292672 - RNA, 19 nt, Artificial Sequence
  Description of Artificial Sequence: Synthetic oligonucleotide
  Sense strand starting at position 3767 of SEQ ID NO: 1241697
agguucgagugcuugacau

SEQ ID NO: 1292673 - RNA, 19 nt, Artificial Sequence
  Description of Artificial Sequence: Synthetic oligonucleotide
  Antisense strand to SEQ ID NO: 1292672
augucaagcacucgaaccu

SEQ ID NO: 1292674 - RNA, 19 nt, Artificial Sequence
  Description of Artificial Sequence: Synthetic oligonucleotide
  Sense strand starting at position 3769 of SEQ ID NO: 1241697
guucgagugcuugacauug

SEQ ID NO: 1292675 - RNA, 19 nt, Artificial Sequence
  Description of Artificial Sequence: Synthetic oligonucleotide
  Antisense strand to SEQ ID NO: 1292674
caaugucaagcacucgaac

SEQ ID NO: 1292676 - RNA, 19 nt, Artificial Sequence
  Description of Artificial Sequence: Synthetic oligonucleotide
  Sense strand starting at position 3779 of SEQ ID NO: 1241697
uugacauugccaggaaucu

SEQ ID NO: 1292677 - RNA, 19 nt, Artificial Sequence
  Description of Artificial Sequence: Synthetic oligonucleotide
  Antisense strand to SEQ ID NO: 1292676
agauuccuggcaaugucaa

SEQ ID NO: 1292678 - RNA, 19 nt, Artificial Sequence
  Description of Artificial Sequence: Synthetic oligonucleotide
  Sense strand starting at position 3780 of SEQ ID NO: 1241697
ugacauugccaggaaucuu

SEQ ID NO: 1292679 - RNA, 19 nt, Artificial Sequence
  Description of Artificial Sequence: Synthetic oligonucleotide
  Antisense strand to SEQ ID NO: 1292678
aagauuccuggcaauguca

SEQ ID NO: 1292680 - RNA, 19 nt, Artificial Sequence
  Description of Artificial Sequence: Synthetic oligonucleotide
  Sense strand starting at position 272 of SEQ ID NO: 1241698
gccugcugucgaggauuua

SEQ ID NO: 1292681 - RNA, 19 nt, Artificial Sequence
  Description of Artificial Sequence: Synthetic oligonucleotide
  Antisense strand to SEQ ID NO: 1292680
uaaauccucgacagcaggc

SEQ ID NO: 1292682 - RNA, 19 nt, Artificial Sequence
  Description of Artificial Sequence: Synthetic oligonucleotide
  Sense strand starting at position 334 of SEQ ID NO: 1241698
uugcacaucuggucauaaa

SEQ ID NO: 1292683 - RNA, 19 nt, Artificial Sequence
  Description of Artificial Sequence: Synthetic oligonucleotide
  Antisense strand to SEQ ID NO: 1292682
uuuaugaccagaugugcaa

SEQ ID NO: 1292684 - RNA, 19 nt, Artificial Sequence
  Description of Artificial Sequence: Synthetic oligonucleotide
  Sense strand starting at position 420 of SEQ ID NO: 1241698
agugauaccugggcuugga

SEQ ID NO: 1292685 - RNA, 19 nt, Artificial Sequence
  Description of Artificial Sequence: Synthetic oligonucleotide
  Antisense strand to SEQ ID NO: 1292684
uccaagcccagguaucacu

SEQ ID NO: 1292686 - RNA, 19 nt, Artificial Sequence
  Description of Artificial Sequence: Synthetic oligonucleotide
  Sense strand starting at position 429 of SEQ ID NO: 1241698
ugggcuuggauguaaucaa

SEQ ID NO: 1292687 - RNA, 19 nt, Artificial Sequence
  Description of Artificial Sequence: Synthetic oligonucleotide
  Antisense strand to SEQ ID NO: 1292686
uugauuacauccaagccca

SEQ ID NO: 1292688 - RNA, 19 nt, Artificial Sequence
  Description of Artificial Sequence: Synthetic oligonucleotide
  Sense strand starting at position 456 of SEQ ID NO: 1241698
cugggcagucauuaagacu

SEQ ID NO: 1292689 - RNA, 19 nt, Artificial Sequence
  Description of Artificial Sequence: Synthetic oligonucleotide
  Antisense strand to SEQ ID NO: 1292688
agucuuaaugacugcccag

SEQ ID NO: 1292690 - RNA, 19 nt, Artificial Sequence
  Description of Artificial Sequence: Synthetic oligonucleotide
  Sense strand starting at position 685 of SEQ ID NO: 1241698
agagucaauugcccugaca

SEQ ID NO: 1292691 - RNA, 19 nt, Artificial Sequence
  Description of Artificial Sequence: Synthetic oligonucleotide
  Antisense strand to SEQ ID NO: 1292690
ugucagggcaauugacucu

SEQ ID NO: 1292692 - RNA, 19 nt, Artificial Sequence
  Description of Artificial Sequence: Synthetic oligonucleotide
  Sense strand starting at position 687 of SEQ ID NO: 1241698
agucaauugcccugacaua

SEQ ID NO: 1292693 - RNA, 19 nt, Artificial Sequence
  Description of Artificial Sequence: Synthetic oligonucleotide
  Antisense strand to SEQ ID NO: 1292692
uaugucagggcaauugacu

SEQ ID NO: 1292694 - RNA, 19 nt, Artificial Sequence
  Description of Artificial Sequence: Synthetic oligonucleotide
  Sense strand starting at position 688 of SEQ ID NO: 1241698
gucaauugcccugacauaa

SEQ ID NO: 1292695 - RNA, 19 nt, Artificial Sequence
  Description of Artificial Sequence: Synthetic oligonucleotide
  Antisense strand to SEQ ID NO: 1292694
uuaugucagggcaauugac

SEQ ID NO: 1292696 - RNA, 19 nt, Artificial Sequence
  Description of Artificial Sequence: Synthetic oligonucleotide
  Sense strand starting at position 707 of SEQ ID NO: 1241698
acugaugcuuggccagaga

SEQ ID NO: 1292697 - RNA, 19 nt, Artificial Sequence
  Description of Artificial Sequence: Synthetic oligonucleotide
  Antisense strand to SEQ ID NO: 1292696
ucucuggccaagcaucagu

SEQ ID NO: 1292698 - RNA, 19 nt, Artificial Sequence
  Description of Artificial Sequence: Synthetic oligonucleotide
  Sense strand starting at position 710 of SEQ ID NO: 1241698
gaugcuuggccagagauug

SEQ ID NO: 1292699 - RNA, 19 nt, Artificial Sequence
  Description of Artificial Sequence: Synthetic oligonucleotide
  Antisense strand to SEQ ID NO: 1292698
caaucucuggccaagcauc

SEQ ID NO: 1292700 - RNA, 19 nt, Artificial Sequence
  Description of Artificial Sequence: Synthetic oligonucleotide
  Sense strand starting at position 720 of SEQ ID NO: 1241698
cagagauugccuggauuaa

SEQ ID NO: 1292701 - RNA, 19 nt, Artificial Sequence
  Description of Artificial Sequence: Synthetic oligonucleotide
  Antisense strand to SEQ ID NO: 1292700
uuaauccaggcaaucucug

SEQ ID NO: 1292702 - RNA, 19 nt, Artificial Sequence
  Description of Artificial Sequence: Synthetic oligonucleotide
  Sense strand starting at position 724 of SEQ ID NO: 1241698
gauugccuggauuaaguuu

SEQ ID NO: 1292703 - RNA, 19 nt, Artificial Sequence
  Description of Artificial Sequence: Synthetic oligonucleotide
  Antisense strand to SEQ ID NO: 1292702
aaacuuaauccaggcaauc

SEQ ID NO: 1292704 - RNA, 19 nt, Artificial Sequence
  Description of Artificial Sequence: Synthetic oligonucleotide
  Sense strand starting at position 730 of SEQ ID NO: 1241698
cuggauuaaguuuggucaa

SEQ ID NO: 1292705 - RNA, 19 nt, Artificial Sequence
  Description of Artificial Sequence: Synthetic oligonucleotide
  Antisense strand to SEQ ID NO: 1292704
uugaccaaacuuaauccag

SEQ ID NO: 1292706 - RNA, 19 nt, Artificial Sequence
  Description of Artificial Sequence: Synthetic oligonucleotide
  Sense strand starting at position 878 of SEQ ID NO: 1241698
uuuacaaugcccuggacaa

SEQ ID NO: 1292707 - RNA, 19 nt, Artificial Sequence
  Description of Artificial Sequence: Synthetic oligonucleotide
  Antisense strand to SEQ ID NO: 1292706
uuguccagggcauuguaaa

SEQ ID NO: 1292708 - RNA, 19 nt, Artificial Sequence
  Description of Artificial Sequence: Synthetic oligonucleotide
  Sense strand starting at position 879 of SEQ ID NO: 1241698
uuacaaugcccuggacaau

SEQ ID NO: 1292709 - RNA, 19 nt, Artificial Sequence
  Description of Artificial Sequence: Synthetic oligonucleotide
  Antisense strand to SEQ ID NO: 1292708
auuguccagggcauuguaa

SEQ ID NO: 1292710 - RNA, 19 nt, Artificial Sequence
  Description of Artificial Sequence: Synthetic oligonucleotide
  Sense strand starting at position 896 of SEQ ID NO: 1241698
aucuguccugugcacagaa

SEQ ID NO: 1292711 - RNA, 19 nt, Artificial Sequence
  Description of Artificial Sequence: Synthetic oligonucleotide
  Antisense strand to SEQ ID NO: 1292710
uucugugcacaggacagau

SEQ ID NO: 1292712 - RNA, 19 nt, Artificial Sequence
  Description of Artificial Sequence: Synthetic oligonucleotide
  Sense strand starting at position 1357 of SEQ ID NO: 1241698
agaagagauugggaaagaa

SEQ ID NO: 1292713 - RNA, 19 nt, Artificial Sequence
  Description of Artificial Sequence: Synthetic oligonucleotide
  Antisense strand to SEQ ID NO: 1292712
uucuuucccaaucucuucu

SEQ ID NO: 1292714 - RNA, 19 nt, Artificial Sequence
  Description of Artificial Sequence: Synthetic oligonucleotide
  Sense strand starting at position 1511 of SEQ ID NO: 1241698
gacaacaggucucugacau

SEQ ID NO: 1292715 - RNA, 19 nt, Artificial Sequence
  Description of Artificial Sequence: Synthetic oligonucleotide
  Antisense strand to SEQ ID NO: 1292714
augucagagaccuguuguc

SEQ ID NO: 1292716 - RNA, 19 nt, Artificial Sequence
  Description of Artificial Sequence: Synthetic oligonucleotide
  Sense strand starting at position 1512 of SEQ ID NO: 1241698
acaacaggucucugacauc

SEQ ID NO: 1292717 - RNA, 19 nt, Artificial Sequence
  Description of Artificial Sequence: Synthetic oligonucleotide
  Antisense strand to SEQ ID NO: 1292716
gaugucagagaccuguugu

SEQ ID NO: 1292718 - RNA, 19 nt, Artificial Sequence
  Description of Artificial Sequence: Synthetic oligonucleotide
  Sense strand starting at position 1996 of SEQ ID NO: 1241698
gggaauucccguuauaaac

SEQ ID NO: 1292719 - RNA, 19 nt, Artificial Sequence
  Description of Artificial Sequence: Synthetic oligonucleotide
  Antisense strand to SEQ ID NO: 1292718
guuuauaacgggaauuccc

SEQ ID NO: 1292720 - RNA, 19 nt, Artificial Sequence
  Description of Artificial Sequence: Synthetic oligonucleotide
  Sense strand starting at position 2079 of SEQ ID NO: 1241698
gacccucuggcaggugaaa

SEQ ID NO: 1292721 - RNA, 19 nt, Artificial Sequence
  Description of Artificial Sequence: Synthetic oligonucleotide
  Antisense strand to SEQ ID NO: 1292720
uuucaccugccagaggguc

SEQ ID NO: 1292722 - RNA, 19 nt, Artificial Sequence
  Description of Artificial Sequence: Synthetic oligonucleotide
  Sense strand starting at position 2258 of SEQ ID NO: 1241698
aggcucaccuggcuaauaa

SEQ ID NO: 1292723 - RNA, 19 nt, Artificial Sequence
  Description of Artificial Sequence: Synthetic oligonucleotide
  Antisense strand to SEQ ID NO: 1292722
uuauuagccaggugagccu

SEQ ID NO: 1292724 - RNA, 19 nt, Artificial Sequence
  Description of Artificial Sequence: Synthetic oligonucleotide
  Sense strand starting at position 2259 of SEQ ID NO: 1241698
ggcucaccuggcuaauaau

SEQ ID NO: 1292725 - RNA, 19 nt, Artificial Sequence
  Description of Artificial Sequence: Synthetic oligonucleotide
  Antisense strand to SEQ ID NO: 1292724
auuauuagccaggugagcc

SEQ ID NO: 1292726 - RNA, 19 nt, Artificial Sequence
  Description of Artificial Sequence: Synthetic oligonucleotide
  Sense strand starting at position 2288 of SEQ ID NO: 1241698
gcauguauauuucuuagcu

SEQ ID NO: 1292727 - RNA, 19 nt, Artificial Sequence
  Description of Artificial Sequence: Synthetic oligonucleotide
  Antisense strand to SEQ ID NO: 1292726
agcuaagaaauauacaugc

SEQ ID NO: 1292728 - RNA, 19 nt, Artificial Sequence
  Description of Artificial Sequence: Synthetic oligonucleotide
  Sense strand starting at position 2714 of SEQ ID NO: 1241698
guccguaugauccaggauu

SEQ ID NO: 1292729 - RNA, 19 nt, Artificial Sequence
  Description of Artificial Sequence: Synthetic oligonucleotide
  Antisense strand to SEQ ID NO: 1292728
aauccuggaucauacggac

SEQ ID NO: 1292730 - RNA, 19 nt, Artificial Sequence
  Description of Artificial Sequence: Synthetic oligonucleotide
  Sense strand starting at position 3096 of SEQ ID NO: 1241698
cugacaucuccaggaaauc

SEQ ID NO: 1292731 - RNA, 19 nt, Artificial Sequence
  Description of Artificial Sequence: Synthetic oligonucleotide
  Antisense strand to SEQ ID NO: 1292730
gauuuccuggagaugucag

SEQ ID NO: 1292732 - RNA, 19 nt, Artificial Sequence
  Description of Artificial Sequence: Synthetic oligonucleotide
  Sense strand starting at position 3152 of SEQ ID NO: 1241698
gagcgaucuccuuaugugg

SEQ ID NO: 1292733 - RNA, 19 nt, Artificial Sequence
  Description of Artificial Sequence: Synthetic oligonucleotide
  Antisense strand to SEQ ID NO: 1292732
ccacauaaggagaucgcuc

SEQ ID NO: 1292734 - RNA, 19 nt, Artificial Sequence
  Description of Artificial Sequence: Synthetic oligonucleotide
  Sense strand starting at position 3186 of SEQ ID NO: 1241698
gcuuacuuccaucaguaug

SEQ ID NO: 1292735 - RNA, 19 nt, Artificial Sequence
  Description of Artificial Sequence: Synthetic oligonucleotide
  Antisense strand to SEQ ID NO: 1292734
cauacugauggaaguaagc

SEQ ID NO: 1292736 - RNA, 19 nt, Artificial Sequence
  Description of Artificial Sequence: Synthetic oligonucleotide
  Sense strand starting at position 3269 of SEQ ID NO: 1241698
cucccuaucuggucugaga

SEQ ID NO: 1292737 - RNA, 19 nt, Artificial Sequence
  Description of Artificial Sequence: Synthetic oligonucleotide
  Antisense strand to SEQ ID NO: 1292736
ucucagaccagauagggag

SEQ ID NO: 1292738 - RNA, 19 nt, Artificial Sequence
  Description of Artificial Sequence: Synthetic oligonucleotide
  Sense strand starting at position 3276 of SEQ ID NO: 1241698
ucuggucugagagguccua

SEQ ID NO: 1292739 - RNA, 19 nt, Artificial Sequence
  Description of Artificial Sequence: Synthetic oligonucleotide
  Antisense strand to SEQ ID NO: 1292738
uaggaccucucagaccaga

SEQ ID NO: 1292740 - RNA, 19 nt, Artificial Sequence
  Description of Artificial Sequence: Synthetic oligonucleotide
  Sense strand starting at position 3419 of SEQ ID NO: 1241698
ugugucuauucgcuauuua

SEQ ID NO: 1292741 - RNA, 19 nt, Artificial Sequence
  Description of Artificial Sequence: Synthetic oligonucleotide
  Antisense strand to SEQ ID NO: 1292740
uaaauagcgaauagacaca

SEQ ID NO: 1292742 - RNA, 19 nt, Artificial Sequence
  Description of Artificial Sequence: Synthetic oligonucleotide
  Sense strand starting at position 3420 of SEQ ID NO: 1241698
gugucuauucgcuauuuag

SEQ ID NO: 1292743 - RNA, 19 nt, Artificial Sequence
  Description of Artificial Sequence: Synthetic oligonucleotide
  Antisense strand to SEQ ID NO: 1292742
cuaaauagcgaauagacac

SEQ ID NO: 1292744 - RNA, 19 nt, Artificial Sequence
  Description of Artificial Sequence: Synthetic oligonucleotide
  Sense strand starting at position 3560 of SEQ ID NO: 1241698
acuugugguucuccaaaca

SEQ ID NO: 1292745 - RNA, 19 nt, Artificial Sequence
  Description of Artificial Sequence: Synthetic oligonucleotide
  Antisense strand to SEQ ID NO: 1292744
uguuuggagaaccacaagu

SEQ ID NO: 1292746 - RNA, 19 nt, Artificial Sequence
  Description of Artificial Sequence: Synthetic oligonucleotide
  Sense strand starting at position 3631 of SEQ ID NO: 1241698
gagugcuuuggucagacag

SEQ ID NO: 1292747 - RNA, 19 nt, Artificial Sequence
  Description of Artificial Sequence: Synthetic oligonucleotide
  Antisense strand to SEQ ID NO: 1292746
cugucugaccaaagcacuc

SEQ ID NO: 1292748 - RNA, 19 nt, Artificial Sequence
  Description of Artificial Sequence: Synthetic oligonucleotide
  Sense strand starting at position 3690 of SEQ ID NO: 1241698
caccuagugguauaagcuu

SEQ ID NO: 1292749 - RNA, 19 nt, Artificial Sequence
  Description of Artificial Sequence: Synthetic oligonucleotide
  Antisense strand to SEQ ID NO: 1292748
aagcuuauaccacuaggug

SEQ ID NO: 1292750 - RNA, 19 nt, Artificial Sequence
  Description of Artificial Sequence: Synthetic oligonucleotide
  Sense strand starting at position 3696 of SEQ ID NO: 1241698
gugguauaagcuugaagaa

SEQ ID NO: 1292751 - RNA, 19 nt, Artificial Sequence
  Description of Artificial Sequence: Synthetic oligonucleotide
  Antisense strand to SEQ ID NO: 1292750
uucuucaagcuuauaccac

SEQ ID NO: 1292752 - RNA, 19 nt, Artificial Sequence
  Description of Artificial Sequence: Synthetic oligonucleotide
  Sense strand starting at position 3705 of SEQ ID NO: 1241698
gcuugaagaagucacuuga

SEQ ID NO: 1292753 - RNA, 19 nt, Artificial Sequence
  Description of Artificial Sequence: Synthetic oligonucleotide
  Antisense strand to SEQ ID NO: 1292752
ucaagugacuucuucaagc

SEQ ID NO: 1292754 - RNA, 19 nt, Artificial Sequence
  Description of Artificial Sequence: Synthetic oligonucleotide
  Sense strand starting at position 3876 of SEQ ID NO: 1241698
ggacaaaugccucaucuca

SEQ ID NO: 1292755 - RNA, 19 nt, Artificial Sequence
  Description of Artificial Sequence: Synthetic oligonucleotide
  Antisense strand to SEQ ID NO: 1292754
ugagaugaggcauuugucc

SEQ ID NO: 1292756 - RNA, 19 nt, Artificial Sequence
  Description of Artificial Sequence: Synthetic oligonucleotide
  Sense strand starting at position 3955 of SEQ ID NO: 1241698
gugaauacuccaugagauu

SEQ ID NO: 1292757 - RNA, 19 nt, Artificial Sequence
  Description of Artificial Sequence: Synthetic oligonucleotide
  Antisense strand to SEQ ID NO: 1292756
aaucucauggaguauucac

SEQ ID NO: 1292758 - RNA, 19 nt, Artificial Sequence
  Description of Artificial Sequence: Synthetic oligonucleotide
  Sense strand starting at position 3961 of SEQ ID NO: 1241698
acuccaugagauugugacu

SEQ ID NO: 1292759 - RNA, 19 nt, Artificial Sequence
  Description of Artificial Sequence: Synthetic oligonucleotide
  Antisense strand to SEQ ID NO: 1292758
agucacaaucucauggagu

SEQ ID NO: 1292760 - RNA, 19 nt, Artificial Sequence
  Description of Artificial Sequence: Synthetic oligonucleotide
  Sense strand starting at position 338 of SEQ ID NO: 1241699
ggagguugcagugauagga

SEQ ID NO: 1292761 - RNA, 19 nt, Artificial Sequence
  Description of Artificial Sequence: Synthetic oligonucleotide
  Antisense strand to SEQ ID NO: 1292760
uccuaucacugcaaccucc

SEQ ID NO: 1292762 - RNA, 19 nt, Artificial Sequence
  Description of Artificial Sequence: Synthetic oligonucleotide
  Sense strand starting at position 342 of SEQ ID NO: 1241699
guugcagugauaggagauc

SEQ ID NO: 1292763 - RNA, 19 nt, Artificial Sequence
  Description of Artificial Sequence: Synthetic oligonucleotide
  Antisense strand to SEQ ID NO: 1292762
gaucuccuaucacugcaac

SEQ ID NO: 1292764 - RNA, 19 nt, Artificial Sequence
  Description of Artificial Sequence: Synthetic oligonucleotide
  Sense strand starting at position 353 of SEQ ID NO: 1241699
aggagaucgcaccauuaca

SEQ ID NO: 1292765 - RNA, 19 nt, Artificial Sequence
  Description of Artificial Sequence: Synthetic oligonucleotide
  Antisense strand to SEQ ID NO: 1292764
uguaauggugcgaucuccu

SEQ ID NO: 1292766 - RNA, 19 nt, Artificial Sequence
  Description of Artificial Sequence: Synthetic oligonucleotide
  Sense strand starting at position 482 of SEQ ID NO: 1241699
ucacaacuacuaugagguu

SEQ ID NO: 1292767 - RNA, 19 nt, Artificial Sequence
  Description of Artificial Sequence: Synthetic oligonucleotide
  Antisense strand to SEQ ID NO: 1292766
aaccucauaguaguuguga

SEQ ID NO: 1292768 - RNA, 19 nt, Artificial Sequence
  Description of Artificial Sequence: Synthetic oligonucleotide
  Sense strand starting at position 495 of SEQ ID NO: 1241699
gagguuuaucauugccucu

SEQ ID NO: 1292769 - RNA, 19 nt, Artificial Sequence
  Description of Artificial Sequence: Synthetic oligonucleotide
  Antisense strand to SEQ ID NO: 1292768
agaggcaaugauaaaccuc

SEQ ID NO: 1292770 - RNA, 19 nt, Artificial Sequence
  Description of Artificial Sequence: Synthetic oligonucleotide
  Sense strand starting at position 651 of SEQ ID NO: 1241699
uguggaaagcggugacaua

SEQ ID NO: 1292771 - RNA, 19 nt, Artificial Sequence
  Description of Artificial Sequence: Synthetic oligonucleotide
  Antisense strand to SEQ ID NO: 1292770
uaugucaccgcuuuccaca

SEQ ID NO: 1292772 - RNA, 19 nt, Artificial Sequence
  Description of Artificial Sequence: Synthetic oligonucleotide
  Sense strand starting at position 652 of SEQ ID NO: 1241699
guggaaagcggugacauaa

SEQ ID NO: 1292773 - RNA, 19 nt, Artificial Sequence
  Description of Artificial Sequence: Synthetic oligonucleotide
  Antisense strand to SEQ ID NO: 1292772
uuaugucaccgcuuuccac

SEQ ID NO: 1292774 - RNA, 19 nt, Artificial Sequence
  Description of Artificial Sequence: Synthetic oligonucleotide
  Sense strand starting at position 710 of SEQ ID NO: 1241699
gcguacucagucuagaaga

SEQ ID NO: 1292775 - RNA, 19 nt, Artificial Sequence
  Description of Artificial Sequence: Synthetic oligonucleotide
  Antisense strand to SEQ ID NO: 1292774
ucuucuagacugaguacgc

SEQ ID NO: 1292776 - RNA, 19 nt, Artificial Sequence
  Description of Artificial Sequence: Synthetic oligonucleotide
  Sense strand starting at position 759 of SEQ ID NO: 1241699
ugagcuuaacccugaguga

SEQ ID NO: 1292777 - RNA, 19 nt, Artificial Sequence
  Description of Artificial Sequence: Synthetic oligonucleotide
  Antisense strand to SEQ ID NO: 1292776
ucacucaggguuaagcuca

SEQ ID NO: 1292778 - RNA, 19 nt, Artificial Sequence
  Description of Artificial Sequence: Synthetic oligonucleotide
  Sense strand starting at position 760 of SEQ ID NO: 1241699
gagcuuaacccugagugaa

SEQ ID NO: 1292779 - RNA, 19 nt, Artificial Sequence
  Description of Artificial Sequence: Synthetic oligonucleotide
  Antisense strand to SEQ ID NO: 1292778
uucacucaggguuaagcuc

SEQ ID NO: 1292780 - RNA, 19 nt, Artificial Sequence
  Description of Artificial Sequence: Synthetic oligonucleotide
  Sense strand starting at position 762 of SEQ ID NO: 1241699
gcuuaacccugagugaaga

SEQ ID NO: 1292781 - RNA, 19 nt, Artificial Sequence
  Description of Artificial Sequence: Synthetic oligonucleotide
  Antisense strand to SEQ ID NO: 1292780
ucuucacucaggguuaagc

SEQ ID NO: 1292782 - RNA, 19 nt, Artificial Sequence
  Description of Artificial Sequence: Synthetic oligonucleotide
  Sense strand starting at position 763 of SEQ ID NO: 1241699
cuuaacccugagugaagaa

SEQ ID NO: 1292783 - RNA, 19 nt, Artificial Sequence
  Description of Artificial Sequence: Synthetic oligonucleotide
  Antisense strand to SEQ ID NO: 1292782
uucuucacucaggguuaag

SEQ ID NO: 1292784 - RNA, 19 nt, Artificial Sequence
  Description of Artificial Sequence: Synthetic oligonucleotide
  Sense strand starting at position 798 of SEQ ID NO: 1241699
agagaguugcgguggaaac

SEQ ID NO: 1292785 - RNA, 19 nt, Artificial Sequence
  Description of Artificial Sequence: Synthetic oligonucleotide
  Antisense strand to SEQ ID NO: 1292784
guuuccaccgcaacucucu

SEQ ID NO: 1292786 - RNA, 19 nt, Artificial Sequence
  Description of Artificial Sequence: Synthetic oligonucleotide
  Sense strand starting at position 799 of SEQ ID NO: 1241699
gagaguugcgguggaaacu

SEQ ID NO: 1292787 - RNA, 19 nt, Artificial Sequence
  Description of Artificial Sequence: Synthetic oligonucleotide
  Antisense strand to SEQ ID NO: 1292786
aguuuccaccgcaacucuc

SEQ ID NO: 1292788 - RNA, 19 nt, Artificial Sequence
  Description of Artificial Sequence: Synthetic oligonucleotide
  Sense strand starting at position 915 of SEQ ID NO: 1241699
aggcgaagcuggagagaua

SEQ ID NO: 1292789 - RNA, 19 nt, Artificial Sequence
  Description of Artificial Sequence: Synthetic oligonucleotide
  Antisense strand to SEQ ID NO: 1292788
uaucucuccagcuucgccu

SEQ ID NO: 1292790 - RNA, 19 nt, Artificial Sequence
  Description of Artificial Sequence: Synthetic oligonucleotide
  Sense strand starting at position 941 of SEQ ID NO: 1241699
gccagugaggaauggucuu

SEQ ID NO: 1292791 - RNA, 19 nt, Artificial Sequence
  Description of Artificial Sequence: Synthetic oligonucleotide
  Antisense strand to SEQ ID NO: 1292790
aagaccauuccucacuggc

SEQ ID NO: 1292792 - RNA, 19 nt, Artificial Sequence
  Description of Artificial Sequence: Synthetic oligonucleotide
  Sense strand starting at position 948 of SEQ ID NO: 1241699
aggaauggucuuggcaagu

SEQ ID NO: 1292793 - RNA, 19 nt, Artificial Sequence
  Description of Artificial Sequence: Synthetic oligonucleotide
  Antisense strand to SEQ ID NO: 1292792
acuugccaagaccauuccu

SEQ ID NO: 1292794 - RNA, 19 nt, Artificial Sequence
  Description of Artificial Sequence: Synthetic oligonucleotide
  Sense strand starting at position 1377 of SEQ ID NO: 1241699
gacaacuuugguuguugga

SEQ ID NO: 1292795 - RNA, 19 nt, Artificial Sequence
  Description of Artificial Sequence: Synthetic oligonucleotide
  Antisense strand to SEQ ID NO: 1292794
uccaacaaccaaaguuguc

SEQ ID NO: 1292796 - RNA, 19 nt, Artificial Sequence
  Description of Artificial Sequence: Synthetic oligonucleotide
  Sense strand starting at position 1691 of SEQ ID NO: 1241699
gcaauaucgccgggaagga

SEQ ID NO: 1292797 - RNA, 19 nt, Artificial Sequence
  Description of Artificial Sequence: Synthetic oligonucleotide
  Antisense strand to SEQ ID NO: 1292796
uccuucccggcgauauugc

SEQ ID NO: 1292798 - RNA, 19 nt, Artificial Sequence
  Description of Artificial Sequence: Synthetic oligonucleotide
  Sense strand starting at position 2035 of SEQ ID NO: 1241699
ccuuuagcuccgccuuuau

SEQ ID NO: 1292799 - RNA, 19 nt, Artificial Sequence
  Description of Artificial Sequence: Synthetic oligonucleotide
  Antisense strand to SEQ ID NO: 1292798
auaaaggcggagcuaaagg

SEQ ID NO: 1292800 - RNA, 19 nt, Artificial Sequence
  Description of Artificial Sequence: Synthetic oligonucleotide
  Sense strand starting at position 2089 of SEQ ID NO: 1241699
gugcgugaaagcguucuga

SEQ ID NO: 1292801 - RNA, 19 nt, Artificial Sequence
  Description of Artificial Sequence: Synthetic oligonucleotide
  Antisense strand to SEQ ID NO: 1292800
ucagaacgcuuucacgcac

SEQ ID NO: 1292802 - RNA, 19 nt, Artificial Sequence
  Description of Artificial Sequence: Synthetic oligonucleotide
  Sense strand starting at position 2091 of SEQ ID NO: 1241699
gcgugaaagcguucugaug

SEQ ID NO: 1292803 - RNA, 19 nt, Artificial Sequence
  Description of Artificial Sequence: Synthetic oligonucleotide
  Antisense strand to SEQ ID NO: 1292802
caucagaacgcuuucacgc

SEQ ID NO: 1292804 - RNA, 19 nt, Artificial Sequence
  Description of Artificial Sequence: Synthetic oligonucleotide
  Sense strand starting at position 2092 of SEQ ID NO: 1241699
cgugaaagcguucugaugu

SEQ ID NO: 1292805 - RNA, 19 nt, Artificial Sequence
  Description of Artificial Sequence: Synthetic oligonucleotide
  Antisense strand to SEQ ID NO: 1292804
acaucagaacgcuuucacg

SEQ ID NO: 1292806 - RNA, 19 nt, Artificial Sequence
  Description of Artificial Sequence: Synthetic oligonucleotide
  Sense strand starting at position 2166 of SEQ ID NO: 1241699
gagguuuacgucuaaagug

SEQ ID NO: 1292807 - RNA, 19 nt, Artificial Sequence
  Description of Artificial Sequence: Synthetic oligonucleotide
  Antisense strand to SEQ ID NO: 1292806
cacuuuagacguaaaccuc

SEQ ID NO: 1292808 - RNA, 19 nt, Artificial Sequence
  Description of Artificial Sequence: Synthetic oligonucleotide
  Sense strand starting at position 2272 of SEQ ID NO: 1241699
cugacccuagugugacaua

SEQ ID NO: 1292809 - RNA, 19 nt, Artificial Sequence
  Description of Artificial Sequence: Synthetic oligonucleotide
  Antisense strand to SEQ ID NO: 1292808
uaugucacacuagggucag

SEQ ID NO: 1292810 - RNA, 19 nt, Artificial Sequence
  Description of Artificial Sequence: Synthetic oligonucleotide
  Sense strand starting at position 2277 of SEQ ID NO: 1241699
ccuagugugacauaaguga

SEQ ID NO: 1292811 - RNA, 19 nt, Artificial Sequence
  Description of Artificial Sequence: Synthetic oligonucleotide
  Antisense strand to SEQ ID NO: 1292810
ucacuuaugucacacuagg

SEQ ID NO: 1292812 - RNA, 19 nt, Artificial Sequence
  Description of Artificial Sequence: Synthetic oligonucleotide
  Sense strand starting at position 2281 of SEQ ID NO: 1241699
gugugacauaagugaacuu

SEQ ID NO: 1292813 - RNA, 19 nt, Artificial Sequence
  Description of Artificial Sequence: Synthetic oligonucleotide
  Antisense strand to SEQ ID NO: 1292812
aaguucacuuaugucacac

SEQ ID NO: 1292814 - RNA, 19 nt, Artificial Sequence
  Description of Artificial Sequence: Synthetic oligonucleotide
  Sense strand starting at position 2358 of SEQ ID NO: 1241699
aaagaaggcuugcuaggaa

SEQ ID NO: 1292815 - RNA, 19 nt, Artificial Sequence
  Description of Artificial Sequence: Synthetic oligonucleotide
  Antisense strand to SEQ ID NO: 1292814
uuccuagcaagccuucuuu

SEQ ID NO: 1292816 - RNA, 19 nt, Artificial Sequence
  Description of Artificial Sequence: Synthetic oligonucleotide
  Sense strand starting at position 2361 of SEQ ID NO: 1241699
gaaggcuugcuaggaaaca

SEQ ID NO: 1292817 - RNA, 19 nt, Artificial Sequence
  Description of Artificial Sequence: Synthetic oligonucleotide
  Antisense strand to SEQ ID NO: 1292816
uguuuccuagcaagccuuc

SEQ ID NO: 1292818 - RNA, 19 nt, Artificial Sequence
  Description of Artificial Sequence: Synthetic oligonucleotide
  Sense strand starting at position 2394 of SEQ ID NO: 1241699
uccuucuggucaucgagaa

SEQ ID NO: 1292819 - RNA, 19 nt, Artificial Sequence
  Description of Artificial Sequence: Synthetic oligonucleotide
  Antisense strand to SEQ ID NO: 1292818
uucucgaugaccagaagga

SEQ ID NO: 1292820 - RNA, 19 nt, Artificial Sequence
  Description of Artificial Sequence: Synthetic oligonucleotide
  Sense strand starting at position 2395 of SEQ ID NO: 1241699
ccuucuggucaucgagaac

SEQ ID NO: 1292821 - RNA, 19 nt, Artificial Sequence
  Description of Artificial Sequence: Synthetic oligonucleotide
  Antisense strand to SEQ ID NO: 1292820
guucucgaugaccagaagg

SEQ ID NO: 1292822 - RNA, 19 nt, Artificial Sequence
  Description of Artificial Sequence: Synthetic oligonucleotide
  Sense strand starting at position 2673 of SEQ ID NO: 1241699
aggagcuagcuauggagua

SEQ ID NO: 1292823 - RNA, 19 nt, Artificial Sequence
  Description of Artificial Sequence: Synthetic oligonucleotide
  Antisense strand to SEQ ID NO: 1292822
uacuccauagcuagcuccu

SEQ ID NO: 1292824 - RNA, 19 nt, Artificial Sequence
  Description of Artificial Sequence: Synthetic oligonucleotide
  Sense strand starting at position 2678 of SEQ ID NO: 1241699
cuagcuauggaguaacauu

SEQ ID NO: 1292825 - RNA, 19 nt, Artificial Sequence
  Description of Artificial Sequence: Synthetic oligonucleotide
  Antisense strand to SEQ ID NO: 1292824
aauguuacuccauagcuag

SEQ ID NO: 1292826 - RNA, 19 nt, Artificial Sequence
  Description of Artificial Sequence: Synthetic oligonucleotide
  Sense strand starting at position 2731 of SEQ ID NO: 1241699
agcuaucauucuuuagaag

SEQ ID NO: 1292827 - RNA, 19 nt, Artificial Sequence
  Description of Artificial Sequence: Synthetic oligonucleotide
  Antisense strand to SEQ ID NO: 1292826
cuucuaaagaaugauagcu

SEQ ID NO: 1292828 - RNA, 19 nt, Artificial Sequence
  Description of Artificial Sequence: Synthetic oligonucleotide
  Sense strand starting at position 2732 of SEQ ID NO: 1241699
gcuaucauucuuuagaaga

SEQ ID NO: 1292829 - RNA, 19 nt, Artificial Sequence
  Description of Artificial Sequence: Synthetic oligonucleotide
  Antisense strand to SEQ ID NO: 1292828
ucuucuaaagaaugauagc

SEQ ID NO: 1292830 - RNA, 19 nt, Artificial Sequence
  Description of Artificial Sequence: Synthetic oligonucleotide
  Sense strand starting at position 2789 of SEQ ID NO: 1241699
guguaaauggagugucaac

SEQ ID NO: 1292831 - RNA, 19 nt, Artificial Sequence
  Description of Artificial Sequence: Synthetic oligonucleotide
  Antisense strand to SEQ ID NO: 1292830
guugacacuccauuuacac

SEQ ID NO: 1292832 - RNA, 19 nt, Artificial Sequence
  Description of Artificial Sequence: Synthetic oligonucleotide
  Sense strand starting at position 2799 of SEQ ID NO: 1241699
agugucaacucacuuuacu

SEQ ID NO: 1292833 - RNA, 19 nt, Artificial Sequence
  Description of Artificial Sequence: Synthetic oligonucleotide
  Antisense strand to SEQ ID NO: 1292832
aguaaagugaguugacacu

SEQ ID NO: 1292834 - RNA, 19 nt, Artificial Sequence
  Description of Artificial Sequence: Synthetic oligonucleotide
  Sense strand starting at position 3228 of SEQ ID NO: 1241699
aaauuuaugcgauguguga

SEQ ID NO: 1292835 - RNA, 19 nt, Artificial Sequence
  Description of Artificial Sequence: Synthetic oligonucleotide
  Antisense strand to SEQ ID NO: 1292834
ucacacaucgcauaaauuu

SEQ ID NO: 1292836 - RNA, 19 nt, Artificial Sequence
  Description of Artificial Sequence: Synthetic oligonucleotide
  Sense strand starting at position 3230 of SEQ ID NO: 1241699
auuuaugcgaugugugaga

SEQ ID NO: 1292837 - RNA, 19 nt, Artificial Sequence
  Description of Artificial Sequence: Synthetic oligonucleotide
  Antisense strand to SEQ ID NO: 1292836
ucucacacaucgcauaaau

SEQ ID NO: 1292838 - RNA, 19 nt, Artificial Sequence
  Description of Artificial Sequence: Synthetic oligonucleotide
  Sense strand starting at position 3356 of SEQ ID NO: 1241699
uugacuguacccuacuuua

SEQ ID NO: 1292839 - RNA, 19 nt, Artificial Sequence
  Description of Artificial Sequence: Synthetic oligonucleotide
  Antisense strand to SEQ ID NO: 1292838
uaaaguaggguacagucaa

SEQ ID NO: 1292840 - RNA, 19 nt, Artificial Sequence
  Description of Artificial Sequence: Synthetic oligonucleotide
  Sense strand starting at position 27 of SEQ ID NO: 1241700
cgcauucugccacugcaau

SEQ ID NO: 1292841 - RNA, 19 nt, Artificial Sequence
  Description of Artificial Sequence: Synthetic oligonucleotide
  Antisense strand to SEQ ID NO: 1292840
auugcaguggcagaaugcg

SEQ ID NO: 1292842 - RNA, 19 nt, Artificial Sequence
  Description of Artificial Sequence: Synthetic oligonucleotide
  Sense strand starting at position 458 of SEQ ID NO: 1241700
uuuacuagucuaugacaca

SEQ ID NO: 1292843 - RNA, 19 nt, Artificial Sequence
  Description of Artificial Sequence: Synthetic oligonucleotide
  Antisense strand to SEQ ID NO: 1292842
ugugucauagacuaguaaa

SEQ ID NO: 1292844 - RNA, 19 nt, Artificial Sequence
  Description of Artificial Sequence: Synthetic oligonucleotide
  Sense strand starting at position 505 of SEQ ID NO: 1241700
guuugcugccuguaacauu

SEQ ID NO: 1292845 - RNA, 19 nt, Artificial Sequence
  Description of Artificial Sequence: Synthetic oligonucleotide
  Antisense strand to SEQ ID NO: 1292844
aauguuacaggcagcaaac

SEQ ID NO: 1292846 - RNA, 19 nt, Artificial Sequence
  Description of Artificial Sequence: Synthetic oligonucleotide
  Sense strand starting at position 1141 of SEQ ID NO: 1241700
ucaagcugauguccugaaa

SEQ ID NO: 1292847 - RNA, 19 nt, Artificial Sequence
  Description of Artificial Sequence: Synthetic oligonucleotide
  Antisense strand to SEQ ID NO: 1292846
uuucaggacaucagcuuga

SEQ ID NO: 1292848 - RNA, 19 nt, Artificial Sequence
  Description of Artificial Sequence: Synthetic oligonucleotide
  Sense strand starting at position 1204 of SEQ ID NO: 1241700
uugaguucgcauggaaagu

SEQ ID NO: 1292849 - RNA, 19 nt, Artificial Sequence
  Description of Artificial Sequence: Synthetic oligonucleotide
  Antisense strand to SEQ ID NO: 1292848
acuuuccaugcgaacucaa

SEQ ID NO: 1292850 - RNA, 19 nt, Artificial Sequence
  Description of Artificial Sequence: Synthetic oligonucleotide
  Sense strand starting at position 1205 of SEQ ID NO: 1241700
ugaguucgcauggaaaguu

SEQ ID NO: 1292851 - RNA, 19 nt, Artificial Sequence
  Description of Artificial Sequence: Synthetic oligonucleotide
  Antisense strand to SEQ ID NO: 1292850
aacuuuccaugcgaacuca

SEQ ID NO: 1292852 - RNA, 19 nt, Artificial Sequence
  Description of Artificial Sequence: Synthetic oligonucleotide
  Sense strand starting at position 1369 of SEQ ID NO: 1241700
ggugguucuaucuacggaa

SEQ ID NO: 1292853 - RNA, 19 nt, Artificial Sequence
  Description of Artificial Sequence: Synthetic oligonucleotide
  Antisense strand to SEQ ID NO: 1292852
uuccguagauagaaccacc

SEQ ID NO: 1292854 - RNA, 19 nt, Artificial Sequence
  Description of Artificial Sequence: Synthetic oligonucleotide
  Sense strand starting at position 1371 of SEQ ID NO: 1241700
ugguucuaucuacggaaga

SEQ ID NO: 1292855 - RNA, 19 nt, Artificial Sequence
  Description of Artificial Sequence: Synthetic oligonucleotide
  Antisense strand to SEQ ID NO: 1292854
ucuuccguagauagaacca

SEQ ID NO: 1292856 - RNA, 19 nt, Artificial Sequence
  Description of Artificial Sequence: Synthetic oligonucleotide
  Sense strand starting at position 1961 of SEQ ID NO: 1241700
uggugagcgccaucuucuu

SEQ ID NO: 1292857 - RNA, 19 nt, Artificial Sequence
  Description of Artificial Sequence: Synthetic oligonucleotide
  Antisense strand to SEQ ID NO: 1292856
aagaagauggcgcucacca

SEQ ID NO: 1292858 - RNA, 19 nt, Artificial Sequence
  Description of Artificial Sequence: Synthetic oligonucleotide
  Sense strand starting at position 2015 of SEQ ID NO: 1241700
cgggucuuuccagaugaug

SEQ ID NO: 1292859 - RNA, 19 nt, Artificial Sequence
  Description of Artificial Sequence: Synthetic oligonucleotide
  Antisense strand to SEQ ID NO: 1292858
caucaucuggaaagacccg

SEQ ID NO: 1292860 - RNA, 19 nt, Artificial Sequence
  Description of Artificial Sequence: Synthetic oligonucleotide
  Sense strand starting at position 2017 of SEQ ID NO: 1241700
ggucuuuccagaugaugag

SEQ ID NO: 1292861 - RNA, 19 nt, Artificial Sequence
  Description of Artificial Sequence: Synthetic oligonucleotide
  Antisense strand to SEQ ID NO: 1292860
cucaucaucuggaaagacc

SEQ ID NO: 1292862 - RNA, 19 nt, Artificial Sequence
  Description of Artificial Sequence: Synthetic oligonucleotide
  Sense strand starting at position 2095 of SEQ ID NO: 1241700
uuuguaguucuuugaacag

SEQ ID NO: 1292863 - RNA, 19 nt, Artificial Sequence
  Description of Artificial Sequence: Synthetic oligonucleotide
  Antisense strand to SEQ ID NO: 1292862
cuguucaaagaacuacaaa

SEQ ID NO: 1292864 - RNA, 19 nt, Artificial Sequence
  Description of Artificial Sequence: Synthetic oligonucleotide
  Sense strand starting at position 2099 of SEQ ID NO: 1241700
uaguucuuugaacaggagu

SEQ ID NO: 1292865 - RNA, 19 nt, Artificial Sequence
  Description of Artificial Sequence: Synthetic oligonucleotide
  Antisense strand to SEQ ID NO: 1292864
acuccuguucaaagaacua

SEQ ID NO: 1292866 - RNA, 19 nt, Artificial Sequence
  Description of Artificial Sequence: Synthetic oligonucleotide
  Sense strand starting at position 2101 of SEQ ID NO: 1241700
guucuuugaacaggaguac

SEQ ID NO: 1292867 - RNA, 19 nt, Artificial Sequence
  Description of Artificial Sequence: Synthetic oligonucleotide
  Antisense strand to SEQ ID NO: 1292866
guacuccuguucaaagaac

SEQ ID NO: 1292868 - RNA, 19 nt, Artificial Sequence
  Description of Artificial Sequence: Synthetic oligonucleotide
  Sense strand starting at position 2112 of SEQ ID NO: 1241700
aggaguaccguuuguauuc

SEQ ID NO: 1292869 - RNA, 19 nt, Artificial Sequence
  Description of Artificial Sequence: Synthetic oligonucleotide
  Antisense strand to SEQ ID NO: 1292868
gaauacaaacgguacuccu

SEQ ID NO: 1292870 - RNA, 19 nt, Artificial Sequence
  Description of Artificial Sequence: Synthetic oligonucleotide
  Sense strand starting at position 2113 of SEQ ID NO: 1241700
ggaguaccguuuguauucu

SEQ ID NO: 1292871 - RNA, 19 nt, Artificial Sequence
  Description of Artificial Sequence: Synthetic oligonucleotide
  Antisense strand to SEQ ID NO: 1292870
agaauacaaacgguacucc

SEQ ID NO: 1292872 - RNA, 19 nt, Artificial Sequence
  Description of Artificial Sequence: Synthetic oligonucleotide
  Sense strand starting at position 2123 of SEQ ID NO: 1241700
uuguauucugaccagacca

SEQ ID NO: 1292873 - RNA, 19 nt, Artificial Sequence
  Description of Artificial Sequence: Synthetic oligonucleotide
  Antisense strand to SEQ ID NO: 1292872
uggucuggucagaauacaa

SEQ ID NO: 1292874 - RNA, 19 nt, Artificial Sequence
  Description of Artificial Sequence: Synthetic oligonucleotide
  Sense strand starting at position 2142 of SEQ ID NO: 1241700
agcgguuaucaaggaauaa

SEQ ID NO: 1292875 - RNA, 19 nt, Artificial Sequence
  Description of Artificial Sequence: Synthetic oligonucleotide
  Antisense strand to SEQ ID NO: 1292874
uuauuccuugauaaccgcu

SEQ ID NO: 1292876 - RNA, 19 nt, Artificial Sequence
  Description of Artificial Sequence: Synthetic oligonucleotide
  Sense strand starting at position 2143 of SEQ ID NO: 1241700
gcgguuaucaaggaauaau

SEQ ID NO: 1292877 - RNA, 19 nt, Artificial Sequence
  Description of Artificial Sequence: Synthetic oligonucleotide
  Antisense strand to SEQ ID NO: 1292876
auuauuccuugauaaccgc

SEQ ID NO: 1292878 - RNA, 19 nt, Artificial Sequence
  Description of Artificial Sequence: Synthetic oligonucleotide
  Sense strand starting at position 2184 of SEQ ID NO: 1241700
auaacucgaucgcuuauau

SEQ ID NO: 1292879 - RNA, 19 nt, Artificial Sequence
  Description of Artificial Sequence: Synthetic oligonucleotide
  Antisense strand to SEQ ID NO: 1292878
auauaagcgaucgaguuau

SEQ ID NO: 1292880 - RNA, 19 nt, Artificial Sequence
  Description of Artificial Sequence: Synthetic oligonucleotide
  Sense strand starting at position 2195 of SEQ ID NO: 1241700
gcuuauaugcgacaugaua

SEQ ID NO: 1292881 - RNA, 19 nt, Artificial Sequence
  Description of Artificial Sequence: Synthetic oligonucleotide
  Antisense strand to SEQ ID NO: 1292880
uaucaugucgcauauaagc

SEQ ID NO: 1292882 - RNA, 19 nt, Artificial Sequence
  Description of Artificial Sequence: Synthetic oligonucleotide
  Sense strand starting at position 2268 of SEQ ID NO: 1241700
uuauuacguuccuuacuca

SEQ ID NO: 1292883 - RNA, 19 nt, Artificial Sequence
  Description of Artificial Sequence: Synthetic oligonucleotide
  Antisense strand to SEQ ID NO: 1292882
ugaguaaggaacguaauaa

SEQ ID NO: 1292884 - RNA, 19 nt, Artificial Sequence
  Description of Artificial Sequence: Synthetic oligonucleotide
  Sense strand starting at position 2346 of SEQ ID NO: 1241700
guaagagugauagggcguu

SEQ ID NO: 1292885 - RNA, 19 nt, Artificial Sequence
  Description of Artificial Sequence: Synthetic oligonucleotide
  Antisense strand to SEQ ID NO: 1292884
aacgcccuaucacucuuac

SEQ ID NO: 1292886 - RNA, 19 nt, Artificial Sequence
  Description of Artificial Sequence: Synthetic oligonucleotide
  Sense strand starting at position 2394 of SEQ ID NO: 1241700
aauggagaguccuuggacu

SEQ ID NO: 1292887 - RNA, 19 nt, Artificial Sequence
  Description of Artificial Sequence: Synthetic oligonucleotide
  Antisense strand to SEQ ID NO: 1292886
aguccaaggacucuccauu

SEQ ID NO: 1292888 - RNA, 19 nt, Artificial Sequence
  Description of Artificial Sequence: Synthetic oligonucleotide
  Sense strand starting at position 2396 of SEQ ID NO: 1241700
uggagaguccuuggacucu

SEQ ID NO: 1292889 - RNA, 19 nt, Artificial Sequence
  Description of Artificial Sequence: Synthetic oligonucleotide
  Antisense strand to SEQ ID NO: 1292888
agaguccaaggacucucca

SEQ ID NO: 1292890 - RNA, 19 nt, Artificial Sequence
  Description of Artificial Sequence: Synthetic oligonucleotide
  Sense strand starting at position 2483 of SEQ ID NO: 1241700
ggagauauuucguaauccu

SEQ ID NO: 1292891 - RNA, 19 nt, Artificial Sequence
  Description of Artificial Sequence: Synthetic oligonucleotide
  Antisense strand to SEQ ID NO: 1292890
aggauuacgaaauaucucc

SEQ ID NO: 1292892 - RNA, 19 nt, Artificial Sequence
  Description of Artificial Sequence: Synthetic oligonucleotide
  Sense strand starting at position 2490 of SEQ ID NO: 1241700
uuucguaauccuugguaau

SEQ ID NO: 1292893 - RNA, 19 nt, Artificial Sequence
  Description of Artificial Sequence: Synthetic oligonucleotide
  Antisense strand to SEQ ID NO: 1292892
auuaccaaggauuacgaaa

SEQ ID NO: 1292894 - RNA, 19 nt, Artificial Sequence
  Description of Artificial Sequence: Synthetic oligonucleotide
  Sense strand starting at position 2491 of SEQ ID NO: 1241700
uucguaauccuugguaauu

SEQ ID NO: 1292895 - RNA, 19 nt, Artificial Sequence
  Description of Artificial Sequence: Synthetic oligonucleotide
  Antisense strand to SEQ ID NO: 1292894
aauuaccaaggauuacgaa

SEQ ID NO: 1292896 - RNA, 19 nt, Artificial Sequence
  Description of Artificial Sequence: Synthetic oligonucleotide
  Sense strand starting at position 2492 of SEQ ID NO: 1241700
ucguaauccuugguaauuu

SEQ ID NO: 1292897 - RNA, 19 nt, Artificial Sequence
  Description of Artificial Sequence: Synthetic oligonucleotide
  Antisense strand to SEQ ID NO: 1292896
aaauuaccaaggauuacga

SEQ ID NO: 1292898 - RNA, 19 nt, Artificial Sequence
  Description of Artificial Sequence: Synthetic oligonucleotide
  Sense strand starting at position 2493 of SEQ ID NO: 1241700
cguaauccuugguaauuua

SEQ ID NO: 1292899 - RNA, 19 nt, Artificial Sequence
  Description of Artificial Sequence: Synthetic oligonucleotide
  Antisense strand to SEQ ID NO: 1292898
uaaauuaccaaggauuacg

SEQ ID NO: 1292900 - RNA, 19 nt, Artificial Sequence
  Description of Artificial Sequence: Synthetic oligonucleotide
  Sense strand starting at position 2522 of SEQ ID NO: 1241700
ggguucucugcccagggua

SEQ ID NO: 1292901 - RNA, 19 nt, Artificial Sequence
  Description of Artificial Sequence: Synthetic oligonucleotide
  Antisense strand to SEQ ID NO: 1292900
uacccugggcagagaaccc

SEQ ID NO: 1292902 - RNA, 19 nt, Artificial Sequence
  Description of Artificial Sequence: Synthetic oligonucleotide
  Sense strand starting at position 2538 of SEQ ID NO: 1241700
guaugacaaggcugaaauc

SEQ ID NO: 1292903 - RNA, 19 nt, Artificial Sequence
  Description of Artificial Sequence: Synthetic oligonucleotide
  Antisense strand to SEQ ID NO: 1292902
gauuucagccuugucauac

SEQ ID NO: 1292904 - RNA, 19 nt, Artificial Sequence
  Description of Artificial Sequence: Synthetic oligonucleotide
  Sense strand starting at position 2622 of SEQ ID NO: 1241700
gcgguugugggaucgaguu

SEQ ID NO: 1292905 - RNA, 19 nt, Artificial Sequence
  Description of Artificial Sequence: Synthetic oligonucleotide
  Antisense strand to SEQ ID NO: 1292904
aacucgaucccacaaccgc

SEQ ID NO: 1292906 - RNA, 19 nt, Artificial Sequence
  Description of Artificial Sequence: Synthetic oligonucleotide
  Sense strand starting at position 2782 of SEQ ID NO: 1241700
ucugccacuguuggagaaa

SEQ ID NO: 1292907 - RNA, 19 nt, Artificial Sequence
  Description of Artificial Sequence: Synthetic oligonucleotide
  Antisense strand to SEQ ID NO: 1292906
uuucuccaacaguggcaga

SEQ ID NO: 1292908 - RNA, 19 nt, Artificial Sequence
  Description of Artificial Sequence: Synthetic oligonucleotide
  Sense strand starting at position 2835 of SEQ ID NO: 1241700
ucaggagcaccuggauaau

SEQ ID NO: 1292909 - RNA, 19 nt, Artificial Sequence
  Description of Artificial Sequence: Synthetic oligonucleotide
  Antisense strand to SEQ ID NO: 1292908
auuauccaggugcuccuga

SEQ ID NO: 1292910 - RNA, 19 nt, Artificial Sequence
  Description of Artificial Sequence: Synthetic oligonucleotide
  Sense strand starting at position 2945 of SEQ ID NO: 1241700
agcucaggaguucgacaaa

SEQ ID NO: 1292911 - RNA, 19 nt, Artificial Sequence
  Description of Artificial Sequence: Synthetic oligonucleotide
  Antisense strand to SEQ ID NO: 1292910
uuugucgaacuccugagcu

SEQ ID NO: 1292912 - RNA, 19 nt, Artificial Sequence
  Description of Artificial Sequence: Synthetic oligonucleotide
  Sense strand starting at position 3065 of SEQ ID NO: 1241700
aggagaaucgugugaauca

SEQ ID NO: 1292913 - RNA, 19 nt, Artificial Sequence
  Description of Artificial Sequence: Synthetic oligonucleotide
  Antisense strand to SEQ ID NO: 1292912
ugauucacacgauucuccu

SEQ ID NO: 1292914 - RNA, 19 nt, Artificial Sequence
  Description of Artificial Sequence: Synthetic oligonucleotide
  Sense strand starting at position 3070 of SEQ ID NO: 1241700
aaucgugugaaucaggaga

SEQ ID NO: 1292915 - RNA, 19 nt, Artificial Sequence
  Description of Artificial Sequence: Synthetic oligonucleotide
  Antisense strand to SEQ ID NO: 1292914
ucuccugauucacacgauu

SEQ ID NO: 1292916 - RNA, 19 nt, Artificial Sequence
  Description of Artificial Sequence: Synthetic oligonucleotide
  Sense strand starting at position 3553 of SEQ ID NO: 1241700
uguuaaucacauuguguaa

SEQ ID NO: 1292917 - RNA, 19 nt, Artificial Sequence
  Description of Artificial Sequence: Synthetic oligonucleotide
  Antisense strand to SEQ ID NO: 1292916
uuacacaaugugauuaaca

SEQ ID NO: 1292918 - RNA, 19 nt, Artificial Sequence
  Description of Artificial Sequence: Synthetic oligonucleotide
  Sense strand starting at position 3565 of SEQ ID NO: 1241700
uguguaauauaaccugcau

SEQ ID NO: 1292919 - RNA, 19 nt, Artificial Sequence
  Description of Artificial Sequence: Synthetic oligonucleotide
  Antisense strand to SEQ ID NO: 1292918
augcagguuauauuacaca

SEQ ID NO: 1292920 - RNA, 19 nt, Artificial Sequence
  Description of Artificial Sequence: Synthetic oligonucleotide
  Sense strand starting at position 505 of SEQ ID NO: 1241701
gggagauacugucucauaa

SEQ ID NO: 1292921 - RNA, 19 nt, Artificial Sequence
  Description of Artificial Sequence: Synthetic oligonucleotide
  Antisense strand to SEQ ID NO: 1292920
uuaugagacaguaucuccc

SEQ ID NO: 1292922 - RNA, 19 nt, Artificial Sequence
  Description of Artificial Sequence: Synthetic oligonucleotide
  Sense strand starting at position 693 of SEQ ID NO: 1241701
ugaagugcaggcugugaaa

SEQ ID NO: 1292923 - RNA, 19 nt, Artificial Sequence
  Description of Artificial Sequence: Synthetic oligonucleotide
  Antisense strand to SEQ ID NO: 1292922
uuucacagccugcacuuca

SEQ ID NO: 1292924 - RNA, 19 nt, Artificial Sequence
  Description of Artificial Sequence: Synthetic oligonucleotide
  Sense strand starting at position 702 of SEQ ID NO: 1241701
ggcugugaaaugugaagga

SEQ ID NO: 1292925 - RNA, 19 nt, Artificial Sequence
  Description of Artificial Sequence: Synthetic oligonucleotide
  Antisense strand to SEQ ID NO: 1292924
uccuucacauuucacagcc

SEQ ID NO: 1292926 - RNA, 19 nt, Artificial Sequence
  Description of Artificial Sequence: Synthetic oligonucleotide
  Sense strand starting at position 731 of SEQ ID NO: 1241701
cuugcugaaugguaauuau

SEQ ID NO: 1292927 - RNA, 19 nt, Artificial Sequence
  Description of Artificial Sequence: Synthetic oligonucleotide
  Antisense strand to SEQ ID NO: 1292926
auaauuaccauucagcaag

SEQ ID NO: 1292928 - RNA, 19 nt, Artificial Sequence
  Description of Artificial Sequence: Synthetic oligonucleotide
  Sense strand starting at position 734 of SEQ ID NO: 1241701
gcugaaugguaauuaucau

SEQ ID NO: 1292929 - RNA, 19 nt, Artificial Sequence
  Description of Artificial Sequence: Synthetic oligonucleotide
  Antisense strand to SEQ ID NO: 1292928
augauaauuaccauucagc

SEQ ID NO: 1292930 - RNA, 19 nt, Artificial Sequence
  Description of Artificial Sequence: Synthetic oligonucleotide
  Sense strand starting at position 774 of SEQ ID NO: 1241701
ucacuuguacaagggacua

SEQ ID NO: 1292931 - RNA, 19 nt, Artificial Sequence
  Description of Artificial Sequence: Synthetic oligonucleotide
  Antisense strand to SEQ ID NO: 1292930
uagucccuuguacaaguga

SEQ ID NO: 1292932 - RNA, 19 nt, Artificial Sequence
  Description of Artificial Sequence: Synthetic oligonucleotide
  Sense strand starting at position 861 of SEQ ID NO: 1241701
ccggaaggcucuuucugaa

SEQ ID NO: 1292933 - RNA, 19 nt, Artificial Sequence
  Description of Artificial Sequence: Synthetic oligonucleotide
  Antisense strand to SEQ ID NO: 1292932
uucagaaagagccuuccgg

SEQ ID NO: 1292934 - RNA, 19 nt, Artificial Sequence
  Description of Artificial Sequence: Synthetic oligonucleotide
  Sense strand starting at position 864 of SEQ ID NO: 1241701
gaaggcucuuucugaagua

SEQ ID NO: 1292935 - RNA, 19 nt, Artificial Sequence
  Description of Artificial Sequence: Synthetic oligonucleotide
  Antisense strand to SEQ ID NO: 1292934
uacuucagaaagagccuuc

SEQ ID NO: 1292936 - RNA, 19 nt, Artificial Sequence
  Description of Artificial Sequence: Synthetic oligonucleotide
  Sense strand starting at position 974 of SEQ ID NO: 1241701
cgauguuggucaaagggua

SEQ ID NO: 1292937 - RNA, 19 nt, Artificial Sequence
  Description of Artificial Sequence: Synthetic oligonucleotide
  Antisense strand to SEQ ID NO: 1292936
uacccuuugaccaacaucg

SEQ ID NO: 1292938 - RNA, 19 nt, Artificial Sequence
  Description of Artificial Sequence: Synthetic oligonucleotide
  Sense strand starting at position 1005 of SEQ ID NO: 1241701
uugcuuagaucucaaaugu

SEQ ID NO: 1292939 - RNA, 19 nt, Artificial Sequence
  Description of Artificial Sequence: Synthetic oligonucleotide
  Antisense strand to SEQ ID NO: 1292938
acauuugagaucuaagcaa

SEQ ID NO: 1292940 - RNA, 19 nt, Artificial Sequence
  Description of Artificial Sequence: Synthetic oligonucleotide
  Sense strand starting at position 1059 of SEQ ID NO: 1241701
auggauaugucagguugau

SEQ ID NO: 1292941 - RNA, 19 nt, Artificial Sequence
  Description of Artificial Sequence: Synthetic oligonucleotide
  Antisense strand to SEQ ID NO: 1292940
aucaaccugacauauccau

SEQ ID NO: 1292942 - RNA, 19 nt, Artificial Sequence
  Description of Artificial Sequence: Synthetic oligonucleotide
  Sense strand starting at position 1091 of SEQ ID NO: 1241701
ucacaauguauucguguau

SEQ ID NO: 1292943 - RNA, 19 nt, Artificial Sequence
  Description of Artificial Sequence: Synthetic oligonucleotide
  Antisense strand to SEQ ID NO: 1292942
auacacgaauacauuguga

SEQ ID NO: 1292944 - RNA, 19 nt, Artificial Sequence
  Description of Artificial Sequence: Synthetic oligonucleotide
  Sense strand starting at position 1092 of SEQ ID NO: 1241701
cacaauguauucguguauu

SEQ ID NO: 1292945 - RNA, 19 nt, Artificial Sequence
  Description of Artificial Sequence: Synthetic oligonucleotide
  Antisense strand to SEQ ID NO: 1292944
aauacacgaauacauugug

SEQ ID NO: 1292946 - RNA, 19 nt, Artificial Sequence
  Description of Artificial Sequence: Synthetic oligonucleotide
  Sense strand starting at position 1198 of SEQ ID NO: 1241701
aggaaauccugccaaagac

SEQ ID NO: 1292947 - RNA, 19 nt, Artificial Sequence
  Description of Artificial Sequence: Synthetic oligonucleotide
  Antisense strand to SEQ ID NO: 1292946
gucuuuggcaggauuuccu

SEQ ID NO: 1292948 - RNA, 19 nt, Artificial Sequence
  Description of Artificial Sequence: Synthetic oligonucleotide
  Sense strand starting at position 1216 of SEQ ID NO: 1241701
caggauuuguuggauauua

SEQ ID NO: 1292949 - RNA, 19 nt, Artificial Sequence
  Description of Artificial Sequence: Synthetic oligonucleotide
  Antisense strand to SEQ ID NO: 1292948
uaauauccaacaaauccug

SEQ ID NO: 1292950 - RNA, 19 nt, Artificial Sequence
  Description of Artificial Sequence: Synthetic oligonucleotide
  Sense strand starting at position 1269 of SEQ ID NO: 1241701
ugcauaaucuaguagggca

SEQ ID NO: 1292951 - RNA, 19 nt, Artificial Sequence
  Description of Artificial Sequence: Synthetic oligonucleotide
  Antisense strand to SEQ ID NO: 1292950
ugcccuacuagauuaugca

SEQ ID NO: 1292952 - RNA, 19 nt, Artificial Sequence
  Description of Artificial Sequence: Synthetic oligonucleotide
  Sense strand starting at position 1294 of SEQ ID NO: 1241701
aggaguugauucggcuacu

SEQ ID NO: 1292953 - RNA, 19 nt, Artificial Sequence
  Description of Artificial Sequence: Synthetic oligonucleotide
  Antisense strand to SEQ ID NO: 1292952
aguagccgaaucaacuccu

SEQ ID NO: 1292954 - RNA, 19 nt, Artificial Sequence
  Description of Artificial Sequence: Synthetic oligonucleotide
  Sense strand starting at position 1295 of SEQ ID NO: 1241701
ggaguugauucggcuacua

SEQ ID NO: 1292955 - RNA, 19 nt, Artificial Sequence
  Description of Artificial Sequence: Synthetic oligonucleotide
  Antisense strand to SEQ ID NO: 1292954
uaguagccgaaucaacucc

SEQ ID NO: 1292956 - RNA, 19 nt, Artificial Sequence
  Description of Artificial Sequence: Synthetic oligonucleotide
  Sense strand starting at position 1297 of SEQ ID NO: 1241701
aguugauucggcuacuaua

SEQ ID NO: 1292957 - RNA, 19 nt, Artificial Sequence
  Description of Artificial Sequence: Synthetic oligonucleotide
  Antisense strand to SEQ ID NO: 1292956
uauaguagccgaaucaacu

SEQ ID NO: 1292958 - RNA, 19 nt, Artificial Sequence
  Description of Artificial Sequence: Synthetic oligonucleotide
  Sense strand starting at position 1382 of SEQ ID NO: 1241701
ggagcaaguucgagauguc

SEQ ID NO: 1292959 - RNA, 19 nt, Artificial Sequence
  Description of Artificial Sequence: Synthetic oligonucleotide
  Antisense strand to SEQ ID NO: 1292958
gacaucucgaacuugcucc

SEQ ID NO: 1292960 - RNA, 19 nt, Artificial Sequence
  Description of Artificial Sequence: Synthetic oligonucleotide
  Sense strand starting at position 1385 of SEQ ID NO: 1241701
gcaaguucgagauguccac

SEQ ID NO: 1292961 - RNA, 19 nt, Artificial Sequence
  Description of Artificial Sequence: Synthetic oligonucleotide
  Antisense strand to SEQ ID NO: 1292960
guggacaucucgaacuugc

SEQ ID NO: 1292962 - RNA, 19 nt, Artificial Sequence
  Description of Artificial Sequence: Synthetic oligonucleotide
  Sense strand starting at position 1802 of SEQ ID NO: 1241701
cgguccucuucugagagga

SEQ ID NO: 1292963 - RNA, 19 nt, Artificial Sequence
  Description of Artificial Sequence: Synthetic oligonucleotide
  Antisense strand to SEQ ID NO: 1292962
uccucucagaagaggaccg

SEQ ID NO: 1292964 - RNA, 19 nt, Artificial Sequence
  Description of Artificial Sequence: Synthetic oligonucleotide
  Sense strand starting at position 2369 of SEQ ID NO: 1241701
aucaucuggucuuuguauu

SEQ ID NO: 1292965 - RNA, 19 nt, Artificial Sequence
  Description of Artificial Sequence: Synthetic oligonucleotide
  Antisense strand to SEQ ID NO: 1292964
aauacaaagaccagaugau

SEQ ID NO: 1292966 - RNA, 19 nt, Artificial Sequence
  Description of Artificial Sequence: Synthetic oligonucleotide
  Sense strand starting at position 2370 of SEQ ID NO: 1241701
ucaucuggucuuuguauua

SEQ ID NO: 1292967 - RNA, 19 nt, Artificial Sequence
  Description of Artificial Sequence: Synthetic oligonucleotide
  Antisense strand to SEQ ID NO: 1292966
uaauacaaagaccagauga

SEQ ID NO: 1292968 - RNA, 19 nt, Artificial Sequence
  Description of Artificial Sequence: Synthetic oligonucleotide
  Sense strand starting at position 2377 of SEQ ID NO: 1241701
gucuuuguauuaugccaca

SEQ ID NO: 1292969 - RNA, 19 nt, Artificial Sequence
  Description of Artificial Sequence: Synthetic oligonucleotide
  Antisense strand to SEQ ID NO: 1292968
uguggcauaauacaaagac

SEQ ID NO: 1292970 - RNA, 19 nt, Artificial Sequence
  Description of Artificial Sequence: Synthetic oligonucleotide
  Sense strand starting at position 2380 of SEQ ID NO: 1241701
uuuguauuaugccacacga

SEQ ID NO: 1292971 - RNA, 19 nt, Artificial Sequence
  Description of Artificial Sequence: Synthetic oligonucleotide
  Antisense strand to SEQ ID NO: 1292970
ucguguggcauaauacaaa

SEQ ID NO: 1292972 - RNA, 19 nt, Artificial Sequence
  Description of Artificial Sequence: Synthetic oligonucleotide
  Sense strand starting at position 2382 of SEQ ID NO: 1241701
uguauuaugccacacgaua

SEQ ID NO: 1292973 - RNA, 19 nt, Artificial Sequence
  Description of Artificial Sequence: Synthetic oligonucleotide
  Antisense strand to SEQ ID NO: 1292972
uaucguguggcauaauaca

SEQ ID NO: 1292974 - RNA, 19 nt, Artificial Sequence
  Description of Artificial Sequence: Synthetic oligonucleotide
  Sense strand starting at position 2462 of SEQ ID NO: 1241701
gucgguaaucagggacuau

SEQ ID NO: 1292975 - RNA, 19 nt, Artificial Sequence
  Description of Artificial Sequence: Synthetic oligonucleotide
  Antisense strand to SEQ ID NO: 1292974
auagucccugauuaccgac

SEQ ID NO: 1292976 - RNA, 19 nt, Artificial Sequence
  Description of Artificial Sequence: Synthetic oligonucleotide
  Sense strand starting at position 2492 of SEQ ID NO: 1241701
uaccgcuggcgagguaaua

SEQ ID NO: 1292977 - RNA, 19 nt, Artificial Sequence
  Description of Artificial Sequence: Synthetic oligonucleotide
  Antisense strand to SEQ ID NO: 1292976
uauuaccucgccagcggua

SEQ ID NO: 1292978 - RNA, 19 nt, Artificial Sequence
  Description of Artificial Sequence: Synthetic oligonucleotide
  Sense strand starting at position 2530 of SEQ ID NO: 1241701
cacuaaugguugcgaacua

SEQ ID NO: 1292979 - RNA, 19 nt, Artificial Sequence
  Description of Artificial Sequence: Synthetic oligonucleotide
  Antisense strand to SEQ ID NO: 1292978
uaguucgcaaccauuagug

SEQ ID NO: 1292980 - RNA, 19 nt, Artificial Sequence
  Description of Artificial Sequence: Synthetic oligonucleotide
  Sense strand starting at position 2531 of SEQ ID NO: 1241701
acuaaugguugcgaacuau

SEQ ID NO: 1292981 - RNA, 19 nt, Artificial Sequence
  Description of Artificial Sequence: Synthetic oligonucleotide
  Antisense strand to SEQ ID NO: 1292980
auaguucgcaaccauuagu

SEQ ID NO: 1292982 - RNA, 19 nt, Artificial Sequence
  Description of Artificial Sequence: Synthetic oligonucleotide
  Sense strand starting at position 2578 of SEQ ID NO: 1241701
auuccuuuccuuuguuaga

SEQ ID NO: 1292983 - RNA, 19 nt, Artificial Sequence
  Description of Artificial Sequence: Synthetic oligonucleotide
  Antisense strand to SEQ ID NO: 1292982
ucuaacaaaggaaaggaau

SEQ ID NO: 1292984 - RNA, 19 nt, Artificial Sequence
  Description of Artificial Sequence: Synthetic oligonucleotide
  Sense strand starting at position 2580 of SEQ ID NO: 1241701
uccuuuccuuuguuagaag

SEQ ID NO: 1292985 - RNA, 19 nt, Artificial Sequence
  Description of Artificial Sequence: Synthetic oligonucleotide
  Antisense strand to SEQ ID NO: 1292984
cuucuaacaaaggaaagga

SEQ ID NO: 1292986 - RNA, 19 nt, Artificial Sequence
  Description of Artificial Sequence: Synthetic oligonucleotide
  Sense strand starting at position 2581 of SEQ ID NO: 1241701
ccuuuccuuuguuagaaga

SEQ ID NO: 1292987 - RNA, 19 nt, Artificial Sequence
  Description of Artificial Sequence: Synthetic oligonucleotide
  Antisense strand to SEQ ID NO: 1292986
ucuucuaacaaaggaaagg

SEQ ID NO: 1292988 - RNA, 19 nt, Artificial Sequence
  Description of Artificial Sequence: Synthetic oligonucleotide
  Sense strand starting at position 2583 of SEQ ID NO: 1241701
uuuccuuuguuagaagaaa

SEQ ID NO: 1292989 - RNA, 19 nt, Artificial Sequence
  Description of Artificial Sequence: Synthetic oligonucleotide
  Antisense strand to SEQ ID NO: 1292988
uuucuucuaacaaaggaaa

SEQ ID NO: 1292990 - RNA, 19 nt, Artificial Sequence
  Description of Artificial Sequence: Synthetic oligonucleotide
  Sense strand starting at position 3517 of SEQ ID NO: 1241701
cgucuacaccuuugcaaua

SEQ ID NO: 1292991 - RNA, 19 nt, Artificial Sequence
  Description of Artificial Sequence: Synthetic oligonucleotide
  Antisense strand to SEQ ID NO: 1292990
uauugcaaagguguagacg

SEQ ID NO: 1292992 - RNA, 19 nt, Artificial Sequence
  Description of Artificial Sequence: Synthetic oligonucleotide
  Sense strand starting at position 3613 of SEQ ID NO: 1241701
auugaugauuaugcuacua

SEQ ID NO: 1292993 - RNA, 19 nt, Artificial Sequence
  Description of Artificial Sequence: Synthetic oligonucleotide
  Antisense strand to SEQ ID NO: 1292992
uaguagcauaaucaucaau

SEQ ID NO: 1292994 - RNA, 19 nt, Artificial Sequence
  Description of Artificial Sequence: Synthetic oligonucleotide
  Sense strand starting at position 454 of SEQ ID NO: 1241702
gggagauacugucucauaa

SEQ ID NO: 1292995 - RNA, 19 nt, Artificial Sequence
  Description of Artificial Sequence: Synthetic oligonucleotide
  Antisense strand to SEQ ID NO: 1292994
uuaugagacaguaucuccc

SEQ ID NO: 1292996 - RNA, 19 nt, Artificial Sequence
  Description of Artificial Sequence: Synthetic oligonucleotide
  Sense strand starting at position 642 of SEQ ID NO: 1241702
ugaagugcaggcugugaaa

SEQ ID NO: 1292997 - RNA, 19 nt, Artificial Sequence
  Description of Artificial Sequence: Synthetic oligonucleotide
  Antisense strand to SEQ ID NO: 1292996
uuucacagccugcacuuca

SEQ ID NO: 1292998 - RNA, 19 nt, Artificial Sequence
  Description of Artificial Sequence: Synthetic oligonucleotide
  Sense strand starting at position 651 of SEQ ID NO: 1241702
ggcugugaaaugugaagga

SEQ ID NO: 1292999 - RNA, 19 nt, Artificial Sequence
  Description of Artificial Sequence: Synthetic oligonucleotide
  Antisense strand to SEQ ID NO: 1292998
uccuucacauuucacagcc

SEQ ID NO: 1293000 - RNA, 19 nt, Artificial Sequence
  Description of Artificial Sequence: Synthetic oligonucleotide
  Sense strand starting at position 680 of SEQ ID NO: 1241702
cuugcugaaugguaauuau

SEQ ID NO: 1293001 - RNA, 19 nt, Artificial Sequence
  Description of Artificial Sequence: Synthetic oligonucleotide
  Antisense strand to SEQ ID NO: 1293000
auaauuaccauucagcaag

SEQ ID NO: 1293002 - RNA, 19 nt, Artificial Sequence
  Description of Artificial Sequence: Synthetic oligonucleotide
  Sense strand starting at position 683 of SEQ ID NO: 1241702
gcugaaugguaauuaucau

SEQ ID NO: 1293003 - RNA, 19 nt, Artificial Sequence
  Description of Artificial Sequence: Synthetic oligonucleotide
  Antisense strand to SEQ ID NO: 1293002
augauaauuaccauucagc

SEQ ID NO: 1293004 - RNA, 19 nt, Artificial Sequence
  Description of Artificial Sequence: Synthetic oligonucleotide
  Sense strand starting at position 723 of SEQ ID NO: 1241702
ucacuuguacaagggacua

SEQ ID NO: 1293005 - RNA, 19 nt, Artificial Sequence
  Description of Artificial Sequence: Synthetic oligonucleotide
  Antisense strand to SEQ ID NO: 1293004
uagucccuuguacaaguga

SEQ ID NO: 1293006 - RNA, 19 nt, Artificial Sequence
  Description of Artificial Sequence: Synthetic oligonucleotide
  Sense strand starting at position 810 of SEQ ID NO: 1241702
ccggaaggcucuuucugaa

SEQ ID NO: 1293007 - RNA, 19 nt, Artificial Sequence
  Description of Artificial Sequence: Synthetic oligonucleotide
  Antisense strand to SEQ ID NO: 1293006
uucagaaagagccuuccgg

SEQ ID NO: 1293008 - RNA, 19 nt, Artificial Sequence
  Description of Artificial Sequence: Synthetic oligonucleotide
  Sense strand starting at position 813 of SEQ ID NO: 1241702
gaaggcucuuucugaagua

SEQ ID NO: 1293009 - RNA, 19 nt, Artificial Sequence
  Description of Artificial Sequence: Synthetic oligonucleotide
  Antisense strand to SEQ ID NO: 1293008
uacuucagaaagagccuuc

SEQ ID NO: 1293010 - RNA, 19 nt, Artificial Sequence
  Description of Artificial Sequence: Synthetic oligonucleotide
  Sense strand starting at position 923 of SEQ ID NO: 1241702
cgauguuggucaaagggua

SEQ ID NO: 1293011 - RNA, 19 nt, Artificial Sequence
  Description of Artificial Sequence: Synthetic oligonucleotide
  Antisense strand to SEQ ID NO: 1293010
uacccuuugaccaacaucg

SEQ ID NO: 1293012 - RNA, 19 nt, Artificial Sequence
  Description of Artificial Sequence: Synthetic oligonucleotide
  Sense strand starting at position 954 of SEQ ID NO: 1241702
uugcuuagaucucaaaugu

SEQ ID NO: 1293013 - RNA, 19 nt, Artificial Sequence
  Description of Artificial Sequence: Synthetic oligonucleotide
  Antisense strand to SEQ ID NO: 1293012
acauuugagaucuaagcaa

SEQ ID NO: 1293014 - RNA, 19 nt, Artificial Sequence
  Description of Artificial Sequence: Synthetic oligonucleotide
  Sense strand starting at position 1008 of SEQ ID NO: 1241702
auggauaugucagguugau

SEQ ID NO: 1293015 - RNA, 19 nt, Artificial Sequence
  Description of Artificial Sequence: Synthetic oligonucleotide
  Antisense strand to SEQ ID NO: 1293014
aucaaccugacauauccau

SEQ ID NO: 1293016 - RNA, 19 nt, Artificial Sequence
  Description of Artificial Sequence: Synthetic oligonucleotide
  Sense strand starting at position 1040 of SEQ ID NO: 1241702
ucacaauguauucguguau

SEQ ID NO: 1293017 - RNA, 19 nt, Artificial Sequence
  Description of Artificial Sequence: Synthetic oligonucleotide
  Antisense strand to SEQ ID NO: 1293016
auacacgaauacauuguga

SEQ ID NO: 1293018 - RNA, 19 nt, Artificial Sequence
  Description of Artificial Sequence: Synthetic oligonucleotide
  Sense strand starting at position 1041 of SEQ ID NO: 1241702
cacaauguauucguguauu

SEQ ID NO: 1293019 - RNA, 19 nt, Artificial Sequence
  Description of Artificial Sequence: Synthetic oligonucleotide
  Antisense strand to SEQ ID NO: 1293018
aauacacgaauacauugug

SEQ ID NO: 1293020 - RNA, 19 nt, Artificial Sequence
  Description of Artificial Sequence: Synthetic oligonucleotide
  Sense strand starting at position 1147 of SEQ ID NO: 1241702
aggaaauccugccaaagac

SEQ ID NO: 1293021 - RNA, 19 nt, Artificial Sequence
  Description of Artificial Sequence: Synthetic oligonucleotide
  Antisense strand to SEQ ID NO: 1293020
gucuuuggcaggauuuccu

SEQ ID NO: 1293022 - RNA, 19 nt, Artificial Sequence
  Description of Artificial Sequence: Synthetic oligonucleotide
  Sense strand starting at position 1165 of SEQ ID NO: 1241702
caggauuuguuggauauua

SEQ ID NO: 1293023 - RNA, 19 nt, Artificial Sequence
  Description of Artificial Sequence: Synthetic oligonucleotide
  Antisense strand to SEQ ID NO: 1293022
uaauauccaacaaauccug

SEQ ID NO: 1293024 - RNA, 19 nt, Artificial Sequence
  Description of Artificial Sequence: Synthetic oligonucleotide
  Sense strand starting at position 1218 of SEQ ID NO: 1241702
ugcauaaucuaguagggca

SEQ ID NO: 1293025 - RNA, 19 nt, Artificial Sequence
  Description of Artificial Sequence: Synthetic oligonucleotide
  Antisense strand to SEQ ID NO: 1293024
ugcccuacuagauuaugca

SEQ ID NO: 1293026 - RNA, 19 nt, Artificial Sequence
  Description of Artificial Sequence: Synthetic oligonucleotide
  Sense strand starting at position 1243 of SEQ ID NO: 1241702
aggaguugauucggcuacu

SEQ ID NO: 1293027 - RNA, 19 nt, Artificial Sequence
  Description of Artificial Sequence: Synthetic oligonucleotide
  Antisense strand to SEQ ID NO: 1293026
aguagccgaaucaacuccu

SEQ ID NO: 1293028 - RNA, 19 nt, Artificial Sequence
  Description of Artificial Sequence: Synthetic oligonucleotide
  Sense strand starting at position 1244 of SEQ ID NO: 1241702
ggaguugauucggcuacua

SEQ ID NO: 1293029 - RNA, 19 nt, Artificial Sequence
  Description of Artificial Sequence: Synthetic oligonucleotide
  Antisense strand to SEQ ID NO: 1293028
uaguagccgaaucaacucc

SEQ ID NO: 1293030 - RNA, 19 nt, Artificial Sequence
  Description of Artificial Sequence: Synthetic oligonucleotide
  Sense strand starting at position 1246 of SEQ ID NO: 1241702
aguugauucggcuacuaua

SEQ ID NO: 1293031 - RNA, 19 nt, Artificial Sequence
  Description of Artificial Sequence: Synthetic oligonucleotide
  Antisense strand to SEQ ID NO: 1293030
uauaguagccgaaucaacu

SEQ ID NO: 1293032 - RNA, 19 nt, Artificial Sequence
  Description of Artificial Sequence: Synthetic oligonucleotide
  Sense strand starting at position 1331 of SEQ ID NO: 1241702
ggagcaaguucgagauguc

SEQ ID NO: 1293033 - RNA, 19 nt, Artificial Sequence
  Description of Artificial Sequence: Synthetic oligonucleotide
  Antisense strand to SEQ ID NO: 1293032
gacaucucgaacuugcucc

SEQ ID NO: 1293034 - RNA, 19 nt, Artificial Sequence
  Description of Artificial Sequence: Synthetic oligonucleotide
  Sense strand starting at position 1334 of SEQ ID NO: 1241702
gcaaguucgagauguccac

SEQ ID NO: 1293035 - RNA, 19 nt, Artificial Sequence
  Description of Artificial Sequence: Synthetic oligonucleotide
  Antisense strand to SEQ ID NO: 1293034
guggacaucucgaacuugc

SEQ ID NO: 1293036 - RNA, 19 nt, Artificial Sequence
  Description of Artificial Sequence: Synthetic oligonucleotide
  Sense strand starting at position 1751 of SEQ ID NO: 1241702
cgguccucuucugagagga

SEQ ID NO: 1293037 - RNA, 19 nt, Artificial Sequence
  Description of Artificial Sequence: Synthetic oligonucleotide
  Antisense strand to SEQ ID NO: 1293036
uccucucagaagaggaccg

SEQ ID NO: 1293038 - RNA, 19 nt, Artificial Sequence
  Description of Artificial Sequence: Synthetic oligonucleotide
  Sense strand starting at position 2318 of SEQ ID NO: 1241702
aucaucuggucuuuguauu

SEQ ID NO: 1293039 - RNA, 19 nt, Artificial Sequence
  Description of Artificial Sequence: Synthetic oligonucleotide
  Antisense strand to SEQ ID NO: 1293038
aauacaaagaccagaugau

SEQ ID NO: 1293040 - RNA, 19 nt, Artificial Sequence
  Description of Artificial Sequence: Synthetic oligonucleotide
  Sense strand starting at position 2319 of SEQ ID NO: 1241702
ucaucuggucuuuguauua

SEQ ID NO: 1293041 - RNA, 19 nt, Artificial Sequence
  Description of Artificial Sequence: Synthetic oligonucleotide
  Antisense strand to SEQ ID NO: 1293040
uaauacaaagaccagauga

SEQ ID NO: 1293042 - RNA, 19 nt, Artificial Sequence
  Description of Artificial Sequence: Synthetic oligonucleotide
  Sense strand starting at position 2326 of SEQ ID NO: 1241702
gucuuuguauuaugccaca

SEQ ID NO: 1293043 - RNA, 19 nt, Artificial Sequence
  Description of Artificial Sequence: Synthetic oligonucleotide
  Antisense strand to SEQ ID NO: 1293042
uguggcauaauacaaagac

SEQ ID NO: 1293044 - RNA, 19 nt, Artificial Sequence
  Description of Artificial Sequence: Synthetic oligonucleotide
  Sense strand starting at position 2329 of SEQ ID NO: 1241702
uuuguauuaugccacacga

SEQ ID NO: 1293045 - RNA, 19 nt, Artificial Sequence
  Description of Artificial Sequence: Synthetic oligonucleotide
  Antisense strand to SEQ ID NO: 1293044
ucguguggcauaauacaaa

SEQ ID NO: 1293046 - RNA, 19 nt, Artificial Sequence
  Description of Artificial Sequence: Synthetic oligonucleotide
  Sense strand starting at position 2331 of SEQ ID NO: 1241702
uguauuaugccacacgaua

SEQ ID NO: 1293047 - RNA, 19 nt, Artificial Sequence
  Description of Artificial Sequence: Synthetic oligonucleotide
  Antisense strand to SEQ ID NO: 1293046
uaucguguggcauaauaca

SEQ ID NO: 1293048 - RNA, 19 nt, Artificial Sequence
  Description of Artificial Sequence: Synthetic oligonucleotide
  Sense strand starting at position 2411 of SEQ ID NO: 1241702
gucgguaaucagggacuau

SEQ ID NO: 1293049 - RNA, 19 nt, Artificial Sequence
  Description of Artificial Sequence: Synthetic oligonucleotide
  Antisense strand to SEQ ID NO: 1293048
auagucccugauuaccgac

SEQ ID NO: 1293050 - RNA, 19 nt, Artificial Sequence
  Description of Artificial Sequence: Synthetic oligonucleotide
  Sense strand starting at position 2441 of SEQ ID NO: 1241702
uaccgcuggcgagguaaua

SEQ ID NO: 1293051 - RNA, 19 nt, Artificial Sequence
  Description of Artificial Sequence: Synthetic oligonucleotide
  Antisense strand to SEQ ID NO: 1293050
uauuaccucgccagcggua

SEQ ID NO: 1293052 - RNA, 19 nt, Artificial Sequence
  Description of Artificial Sequence: Synthetic oligonucleotide
  Sense strand starting at position 2479 of SEQ ID NO: 1241702
cacuaaugguugcgaacua

SEQ ID NO: 1293053 - RNA, 19 nt, Artificial Sequence
  Description of Artificial Sequence: Synthetic oligonucleotide
  Antisense strand to SEQ ID NO: 1293052
uaguucgcaaccauuagug

SEQ ID NO: 1293054 - RNA, 19 nt, Artificial Sequence
  Description of Artificial Sequence: Synthetic oligonucleotide
  Sense strand starting at position 2480 of SEQ ID NO: 1241702
acuaaugguugcgaacuau

SEQ ID NO: 1293055 - RNA, 19 nt, Artificial Sequence
  Description of Artificial Sequence: Synthetic oligonucleotide
  Antisense strand to SEQ ID NO: 1293054
auaguucgcaaccauuagu

SEQ ID NO: 1293056 - RNA, 19 nt, Artificial Sequence
  Description of Artificial Sequence: Synthetic oligonucleotide
  Sense strand starting at position 2527 of SEQ ID NO: 1241702
auuccuuuccuuuguuaga

SEQ ID NO: 1293057 - RNA, 19 nt, Artificial Sequence
  Description of Artificial Sequence: Synthetic oligonucleotide
  Antisense strand to SEQ ID NO: 1293056
ucuaacaaaggaaaggaau

SEQ ID NO: 1293058 - RNA, 19 nt, Artificial Sequence
  Description of Artificial Sequence: Synthetic oligonucleotide
  Sense strand starting at position 2529 of SEQ ID NO: 1241702
uccuuuccuuuguuagaag

SEQ ID NO: 1293059 - RNA, 19 nt, Artificial Sequence
  Description of Artificial Sequence: Synthetic oligonucleotide
  Antisense strand to SEQ ID NO: 1293058
cuucuaacaaaggaaagga

SEQ ID NO: 1293060 - RNA, 19 nt, Artificial Sequence
  Description of Artificial Sequence: Synthetic oligonucleotide
  Sense strand starting at position 2530 of SEQ ID NO: 1241702
ccuuuccuuuguuagaaga

SEQ ID NO: 1293061 - RNA, 19 nt, Artificial Sequence
  Description of Artificial Sequence: Synthetic oligonucleotide
  Antisense strand to SEQ ID NO: 1293060
ucuucuaacaaaggaaagg

SEQ ID NO: 1293062 - RNA, 19 nt, Artificial Sequence
  Description of Artificial Sequence: Synthetic oligonucleotide
  Sense strand starting at position 2532 of SEQ ID NO: 1241702
uuuccuuuguuagaagaaa

SEQ ID NO: 1293063 - RNA, 19 nt, Artificial Sequence
  Description of Artificial Sequence: Synthetic oligonucleotide
  Antisense strand to SEQ ID NO: 1293062
uuucuucuaacaaaggaaa

SEQ ID NO: 1293064 - RNA, 19 nt, Artificial Sequence
  Description of Artificial Sequence: Synthetic oligonucleotide
  Sense strand starting at position 3466 of SEQ ID NO: 1241702
cgucuacaccuuugcaaua

SEQ ID NO: 1293065 - RNA, 19 nt, Artificial Sequence
  Description of Artificial Sequence: Synthetic oligonucleotide
  Antisense strand to SEQ ID NO: 1293064
uauugcaaagguguagacg

SEQ ID NO: 1293066 - RNA, 19 nt, Artificial Sequence
  Description of Artificial Sequence: Synthetic oligonucleotide
  Sense strand starting at position 3562 of SEQ ID NO: 1241702
auugaugauuaugcuacua

SEQ ID NO: 1293067 - RNA, 19 nt, Artificial Sequence
  Description of Artificial Sequence: Synthetic oligonucleotide
  Antisense strand to SEQ ID NO: 1293066
uaguagcauaaucaucaau

SEQ ID NO: 1293068 - RNA, 19 nt, Artificial Sequence
  Description of Artificial Sequence: Synthetic oligonucleotide
  Sense strand starting at position 186 of SEQ ID NO: 1241703
uuuauacauccaugaguau

SEQ ID NO: 1293069 - RNA, 19 nt, Artificial Sequence
  Description of Artificial Sequence: Synthetic oligonucleotide
  Antisense strand to SEQ ID NO: 1293068
auacucauggauguauaaa

SEQ ID NO: 1293070 - RNA, 19 nt, Artificial Sequence
  Description of Artificial Sequence: Synthetic oligonucleotide
  Sense strand starting at position 402 of SEQ ID NO: 1241703
ugaaucaaauggcuugauu

SEQ ID NO: 1293071 - RNA, 19 nt, Artificial Sequence
  Description of Artificial Sequence: Synthetic oligonucleotide
  Antisense strand to SEQ ID NO: 1293070
aaucaagccauuugauuca

SEQ ID NO: 1293072 - RNA, 19 nt, Artificial Sequence
  Description of Artificial Sequence: Synthetic oligonucleotide
  Sense strand starting at position 432 of SEQ ID NO: 1241703
augacagauguguggacau

SEQ ID NO: 1293073 - RNA, 19 nt, Artificial Sequence
  Description of Artificial Sequence: Synthetic oligonucleotide
  Antisense strand to SEQ ID NO: 1293072
auguccacacaucugucau

SEQ ID NO: 1293074 - RNA, 19 nt, Artificial Sequence
  Description of Artificial Sequence: Synthetic oligonucleotide
  Sense strand starting at position 439 of SEQ ID NO: 1241703
auguguggacaucaaucau

SEQ ID NO: 1293075 - RNA, 19 nt, Artificial Sequence
  Description of Artificial Sequence: Synthetic oligonucleotide
  Antisense strand to SEQ ID NO: 1293074
augauugauguccacacau

SEQ ID NO: 1293076 - RNA, 19 nt, Artificial Sequence
  Description of Artificial Sequence: Synthetic oligonucleotide
  Sense strand starting at position 457 of SEQ ID NO: 1241703
uagucucauggguauuaca

SEQ ID NO: 1293077 - RNA, 19 nt, Artificial Sequence
  Description of Artificial Sequence: Synthetic oligonucleotide
  Antisense strand to SEQ ID NO: 1293076
uguaauacccaugagacua

SEQ ID NO: 1293078 - RNA, 19 nt, Artificial Sequence
  Description of Artificial Sequence: Synthetic oligonucleotide
  Sense strand starting at position 537 of SEQ ID NO: 1241703
cugagcucugaauaguacu

SEQ ID NO: 1293079 - RNA, 19 nt, Artificial Sequence
  Description of Artificial Sequence: Synthetic oligonucleotide
  Antisense strand to SEQ ID NO: 1293078
aguacuauucagagcucag

SEQ ID NO: 1293080 - RNA, 19 nt, Artificial Sequence
  Description of Artificial Sequence: Synthetic oligonucleotide
  Sense strand starting at position 637 of SEQ ID NO: 1241703
augauauuguuacuugaac

SEQ ID NO: 1293081 - RNA, 19 nt, Artificial Sequence
  Description of Artificial Sequence: Synthetic oligonucleotide
  Antisense strand to SEQ ID NO: 1293080
guucaaguaacaauaucau

SEQ ID NO: 1293082 - RNA, 19 nt, Artificial Sequence
  Description of Artificial Sequence: Synthetic oligonucleotide
  Sense strand starting at position 748 of SEQ ID NO: 1241703
gcucuuucgggagaucaac

SEQ ID NO: 1293083 - RNA, 19 nt, Artificial Sequence
  Description of Artificial Sequence: Synthetic oligonucleotide
  Antisense strand to SEQ ID NO: 1293082
guugaucucccgaaagagc

SEQ ID NO: 1293084 - RNA, 19 nt, Artificial Sequence
  Description of Artificial Sequence: Synthetic oligonucleotide
  Sense strand starting at position 757 of SEQ ID NO: 1241703
ggagaucaacaguggguua

SEQ ID NO: 1293085 - RNA, 19 nt, Artificial Sequence
  Description of Artificial Sequence: Synthetic oligonucleotide
  Antisense strand to SEQ ID NO: 1293084
uaacccacuguugaucucc

SEQ ID NO: 1293086 - RNA, 19 nt, Artificial Sequence
  Description of Artificial Sequence: Synthetic oligonucleotide
  Sense strand starting at position 758 of SEQ ID NO: 1241703
gagaucaacaguggguuau

SEQ ID NO: 1293087 - RNA, 19 nt, Artificial Sequence
  Description of Artificial Sequence: Synthetic oligonucleotide
  Antisense strand to SEQ ID NO: 1293086
auaacccacuguugaucuc

SEQ ID NO: 1293088 - RNA, 19 nt, Artificial Sequence
  Description of Artificial Sequence: Synthetic oligonucleotide
  Sense strand starting at position 759 of SEQ ID NO: 1241703
agaucaacaguggguuauu

SEQ ID NO: 1293089 - RNA, 19 nt, Artificial Sequence
  Description of Artificial Sequence: Synthetic oligonucleotide
  Antisense strand to SEQ ID NO: 1293088
aauaacccacuguugaucu

SEQ ID NO: 1293090 - RNA, 19 nt, Artificial Sequence
  Description of Artificial Sequence: Synthetic oligonucleotide
  Sense strand starting at position 1021 of SEQ ID NO: 1241703
gugauugauacuggaaggu

SEQ ID NO: 1293091 - RNA, 19 nt, Artificial Sequence
  Description of Artificial Sequence: Synthetic oligonucleotide
  Antisense strand to SEQ ID NO: 1293090
accuuccaguaucaaucac

SEQ ID NO: 1293092 - RNA, 19 nt, Artificial Sequence
  Description of Artificial Sequence: Synthetic oligonucleotide
  Sense strand starting at position 1117 of SEQ ID NO: 1241703
gcuguaccaauauggagaa

SEQ ID NO: 1293093 - RNA, 19 nt, Artificial Sequence
  Description of Artificial Sequence: Synthetic oligonucleotide
  Antisense strand to SEQ ID NO: 1293092
uucuccauauugguacagc

SEQ ID NO: 1293094 - RNA, 19 nt, Artificial Sequence
  Description of Artificial Sequence: Synthetic oligonucleotide
  Sense strand starting at position 1162 of SEQ ID NO: 1241703
aaacuuaguggccaagacu

SEQ ID NO: 1293095 - RNA, 19 nt, Artificial Sequence
  Description of Artificial Sequence: Synthetic oligonucleotide
  Antisense strand to SEQ ID NO: 1293094
agucuuggccacuaaguuu

SEQ ID NO: 1293096 - RNA, 19 nt, Artificial Sequence
  Description of Artificial Sequence: Synthetic oligonucleotide
  Sense strand starting at position 1165 of SEQ ID NO: 1241703
cuuaguggccaagacuuua

SEQ ID NO: 1293097 - RNA, 19 nt, Artificial Sequence
  Description of Artificial Sequence: Synthetic oligonucleotide
  Antisense strand to SEQ ID NO: 1293096
uaaagucuuggccacuaag

SEQ ID NO: 1293098 - RNA, 19 nt, Artificial Sequence
  Description of Artificial Sequence: Synthetic oligonucleotide
  Sense strand starting at position 1263 of SEQ ID NO: 1241703
aguaaacuuuaggugggau

SEQ ID NO: 1293099 - RNA, 19 nt, Artificial Sequence
  Description of Artificial Sequence: Synthetic oligonucleotide
  Antisense strand to SEQ ID NO: 1293098
aucccaccuaaaguuuacu

SEQ ID NO: 1293100 - RNA, 19 nt, Artificial Sequence
  Description of Artificial Sequence: Synthetic oligonucleotide
  Sense strand starting at position 1271 of SEQ ID NO: 1241703
uuaggugggaucugaauag

SEQ ID NO: 1293101 - RNA, 19 nt, Artificial Sequence
  Description of Artificial Sequence: Synthetic oligonucleotide
  Antisense strand to SEQ ID NO: 1293100
cuauucagaucccaccuaa

SEQ ID NO: 1293102 - RNA, 19 nt, Artificial Sequence
  Description of Artificial Sequence: Synthetic oligonucleotide
  Sense strand starting at position 1341 of SEQ ID NO: 1241703
gcauuaauugagcauuaau

SEQ ID NO: 1293103 - RNA, 19 nt, Artificial Sequence
  Description of Artificial Sequence: Synthetic oligonucleotide
  Antisense strand to SEQ ID NO: 1293102
auuaaugcucaauuaaugc

SEQ ID NO: 1293104 - RNA, 19 nt, Artificial Sequence
  Description of Artificial Sequence: Synthetic oligonucleotide
  Sense strand starting at position 1558 of SEQ ID NO: 1241703
uagggauccggauauuguu

SEQ ID NO: 1293105 - RNA, 19 nt, Artificial Sequence
  Description of Artificial Sequence: Synthetic oligonucleotide
  Antisense strand to SEQ ID NO: 1293104
aacaauauccggaucccua

SEQ ID NO: 1293106 - RNA, 19 nt, Artificial Sequence
  Description of Artificial Sequence: Synthetic oligonucleotide
  Sense strand starting at position 1567 of SEQ ID NO: 1241703
ggauauuguuuccugggag

SEQ ID NO: 1293107 - RNA, 19 nt, Artificial Sequence
  Description of Artificial Sequence: Synthetic oligonucleotide
  Antisense strand to SEQ ID NO: 1293106
cucccaggaaacaauaucc

SEQ ID NO: 1293108 - RNA, 19 nt, Artificial Sequence
  Description of Artificial Sequence: Synthetic oligonucleotide
  Sense strand starting at position 1570 of SEQ ID NO: 1241703
uauuguuuccugggaggag

SEQ ID NO: 1293109 - RNA, 19 nt, Artificial Sequence
  Description of Artificial Sequence: Synthetic oligonucleotide
  Antisense strand to SEQ ID NO: 1293108
cuccucccaggaaacaaua

SEQ ID NO: 1293110 - RNA, 19 nt, Artificial Sequence
  Description of Artificial Sequence: Synthetic oligonucleotide
  Sense strand starting at position 2350 of SEQ ID NO: 1241703
cacggaagccaaugagaua

SEQ ID NO: 1293111 - RNA, 19 nt, Artificial Sequence
  Description of Artificial Sequence: Synthetic oligonucleotide
  Antisense strand to SEQ ID NO: 1293110
uaucucauuggcuuccgug

SEQ ID NO: 1293112 - RNA, 19 nt, Artificial Sequence
  Description of Artificial Sequence: Synthetic oligonucleotide
  Sense strand starting at position 2414 of SEQ ID NO: 1241703
gagguaagguucuuugaga

SEQ ID NO: 1293113 - RNA, 19 nt, Artificial Sequence
  Description of Artificial Sequence: Synthetic oligonucleotide
  Antisense strand to SEQ ID NO: 1293112
ucucaaagaaccuuaccuc

SEQ ID NO: 1293114 - RNA, 19 nt, Artificial Sequence
  Description of Artificial Sequence: Synthetic oligonucleotide
  Sense strand starting at position 2415 of SEQ ID NO: 1241703
agguaagguucuuugagaa

SEQ ID NO: 1293115 - RNA, 19 nt, Artificial Sequence
  Description of Artificial Sequence: Synthetic oligonucleotide
  Antisense strand to SEQ ID NO: 1293114
uucucaaagaaccuuaccu

SEQ ID NO: 1293116 - RNA, 19 nt, Artificial Sequence
  Description of Artificial Sequence: Synthetic oligonucleotide
  Sense strand starting at position 2565 of SEQ ID NO: 1241703
guuugauucgggccgucau

SEQ ID NO: 1293117 - RNA, 19 nt, Artificial Sequence
  Description of Artificial Sequence: Synthetic oligonucleotide
  Antisense strand to SEQ ID NO: 1293116
augacggcccgaaucaaac

SEQ ID NO: 1293118 - RNA, 19 nt, Artificial Sequence
  Description of Artificial Sequence: Synthetic oligonucleotide
  Sense strand starting at position 2613 of SEQ ID NO: 1241703
aucguacuuccagaggagu

SEQ ID NO: 1293119 - RNA, 19 nt, Artificial Sequence
  Description of Artificial Sequence: Synthetic oligonucleotide
  Antisense strand to SEQ ID NO: 1293118
acuccucuggaaguacgau

SEQ ID NO: 1293120 - RNA, 19 nt, Artificial Sequence
  Description of Artificial Sequence: Synthetic oligonucleotide
  Sense strand starting at position 2693 of SEQ ID NO: 1241703
uugucagaucacuaguuac

SEQ ID NO: 1293121 - RNA, 19 nt, Artificial Sequence
  Description of Artificial Sequence: Synthetic oligonucleotide
  Antisense strand to SEQ ID NO: 1293120
guaacuagugaucugacaa

SEQ ID NO: 1293122 - RNA, 19 nt, Artificial Sequence
  Description of Artificial Sequence: Synthetic oligonucleotide
  Sense strand starting at position 3146 of SEQ ID NO: 1241703
aggagaagcucaucuaguu

SEQ ID NO: 1293123 - RNA, 19 nt, Artificial Sequence
  Description of Artificial Sequence: Synthetic oligonucleotide
  Antisense strand to SEQ ID NO: 1293122
aacuagaugagcuucuccu

SEQ ID NO: 1293124 - RNA, 19 nt, Artificial Sequence
  Description of Artificial Sequence: Synthetic oligonucleotide
  Sense strand starting at position 3189 of SEQ ID NO: 1241703
ggacaaguguuucuugaga

SEQ ID NO: 1293125 - RNA, 19 nt, Artificial Sequence
  Description of Artificial Sequence: Synthetic oligonucleotide
  Antisense strand to SEQ ID NO: 1293124
ucucaagaaacacuugucc

SEQ ID NO: 1293126 - RNA, 19 nt, Artificial Sequence
  Description of Artificial Sequence: Synthetic oligonucleotide
  Sense strand starting at position 3228 of SEQ ID NO: 1241703
ggcauuaagcaguauaaag

SEQ ID NO: 1293127 - RNA, 19 nt, Artificial Sequence
  Description of Artificial Sequence: Synthetic oligonucleotide
  Antisense strand to SEQ ID NO: 1293126
cuuuauacugcuuaaugcc

SEQ ID NO: 1293128 - RNA, 19 nt, Artificial Sequence
  Description of Artificial Sequence: Synthetic oligonucleotide
  Sense strand starting at position 3330 of SEQ ID NO: 1241703
ggaucaugguaugcucaaa

SEQ ID NO: 1293129 - RNA, 19 nt, Artificial Sequence
  Description of Artificial Sequence: Synthetic oligonucleotide
  Antisense strand to SEQ ID NO: 1293128
uuugagcauaccaugaucc

SEQ ID NO: 1293130 - RNA, 19 nt, Artificial Sequence
  Description of Artificial Sequence: Synthetic oligonucleotide
  Sense strand starting at position 3380 of SEQ ID NO: 1241703
uggagagugaugcagaguu

SEQ ID NO: 1293131 - RNA, 19 nt, Artificial Sequence
  Description of Artificial Sequence: Synthetic oligonucleotide
  Antisense strand to SEQ ID NO: 1293130
aacucugcaucacucucca

SEQ ID NO: 1293132 - RNA, 19 nt, Artificial Sequence
  Description of Artificial Sequence: Synthetic oligonucleotide
  Sense strand starting at position 3382 of SEQ ID NO: 1241703
gagagugaugcagaguuua

SEQ ID NO: 1293133 - RNA, 19 nt, Artificial Sequence
  Description of Artificial Sequence: Synthetic oligonucleotide
  Antisense strand to SEQ ID NO: 1293132
uaaacucugcaucacucuc

SEQ ID NO: 1293134 - RNA, 19 nt, Artificial Sequence
  Description of Artificial Sequence: Synthetic oligonucleotide
  Sense strand starting at position 3397 of SEQ ID NO: 1241703
uuuagugagagaugaaucu

SEQ ID NO: 1293135 - RNA, 19 nt, Artificial Sequence
  Description of Artificial Sequence: Synthetic oligonucleotide
  Antisense strand to SEQ ID NO: 1293134
agauucaucucucacuaaa

SEQ ID NO: 1293136 - RNA, 19 nt, Artificial Sequence
  Description of Artificial Sequence: Synthetic oligonucleotide
  Sense strand starting at position 3404 of SEQ ID NO: 1241703
agagaugaaucugugaagu

SEQ ID NO: 1293137 - RNA, 19 nt, Artificial Sequence
  Description of Artificial Sequence: Synthetic oligonucleotide
  Antisense strand to SEQ ID NO: 1293136
acuucacagauucaucucu

SEQ ID NO: 1293138 - RNA, 19 nt, Artificial Sequence
  Description of Artificial Sequence: Synthetic oligonucleotide
  Sense strand starting at position 3486 of SEQ ID NO: 1241703
aagcacugagaagguauua

SEQ ID NO: 1293139 - RNA, 19 nt, Artificial Sequence
  Description of Artificial Sequence: Synthetic oligonucleotide
  Antisense strand to SEQ ID NO: 1293138
uaauaccuucucagugcuu

SEQ ID NO: 1293140 - RNA, 19 nt, Artificial Sequence
  Description of Artificial Sequence: Synthetic oligonucleotide
  Sense strand starting at position 3508 of SEQ ID NO: 1241703
gcuugaagcagagagaugu

SEQ ID NO: 1293141 - RNA, 19 nt, Artificial Sequence
  Description of Artificial Sequence: Synthetic oligonucleotide
  Antisense strand to SEQ ID NO: 1293140
acaucucucugcuucaagc

SEQ ID NO: 1293142 - RNA, 19 nt, Artificial Sequence
  Description of Artificial Sequence: Synthetic oligonucleotide
  Sense strand starting at position 3512 of SEQ ID NO: 1241703
gaagcagagagaugugauc

SEQ ID NO: 1293143 - RNA, 19 nt, Artificial Sequence
  Description of Artificial Sequence: Synthetic oligonucleotide
  Antisense strand to SEQ ID NO: 1293142
gaucacaucucucugcuuc

SEQ ID NO: 1293144 - RNA, 19 nt, Artificial Sequence
  Description of Artificial Sequence: Synthetic oligonucleotide
  Sense strand starting at position 3599 of SEQ ID NO: 1241703
guuagaagauaccuguauu

SEQ ID NO: 1293145 - RNA, 19 nt, Artificial Sequence
  Description of Artificial Sequence: Synthetic oligonucleotide
  Antisense strand to SEQ ID NO: 1293144
aauacagguaucuucuaac

SEQ ID NO: 1293146 - RNA, 19 nt, Artificial Sequence
  Description of Artificial Sequence: Synthetic oligonucleotide
  Sense strand starting at position 3917 of SEQ ID NO: 1241703
ggauuaagcgcugugcuuu

SEQ ID NO: 1293147 - RNA, 19 nt, Artificial Sequence
  Description of Artificial Sequence: Synthetic oligonucleotide
  Antisense strand to SEQ ID NO: 1293146
aaagcacagcgcuuaaucc

SEQ ID NO: 1293148 - RNA, 19 nt, Artificial Sequence
  Description of Artificial Sequence: Synthetic oligonucleotide
  Sense strand starting at position 255 of SEQ ID NO: 1241704
cugucucuauuugaagaaa

SEQ ID NO: 1293149 - RNA, 19 nt, Artificial Sequence
  Description of Artificial Sequence: Synthetic oligonucleotide
  Antisense strand to SEQ ID NO: 1293148
uuucuucaaauagagacag

SEQ ID NO: 1293150 - RNA, 19 nt, Artificial Sequence
  Description of Artificial Sequence: Synthetic oligonucleotide
  Sense strand starting at position 280 of SEQ ID NO: 1241704
acauaaaucuguuucugga

SEQ ID NO: 1293151 - RNA, 19 nt, Artificial Sequence
  Description of Artificial Sequence: Synthetic oligonucleotide
  Antisense strand to SEQ ID NO: 1293150
uccagaaacagauuuaugu

SEQ ID NO: 1293152 - RNA, 19 nt, Artificial Sequence
  Description of Artificial Sequence: Synthetic oligonucleotide
  Sense strand starting at position 282 of SEQ ID NO: 1241704
auaaaucuguuucuggaca

SEQ ID NO: 1293153 - RNA, 19 nt, Artificial Sequence
  Description of Artificial Sequence: Synthetic oligonucleotide
  Antisense strand to SEQ ID NO: 1293152
uguccagaaacagauuuau

SEQ ID NO: 1293154 - RNA, 19 nt, Artificial Sequence
  Description of Artificial Sequence: Synthetic oligonucleotide
  Sense strand starting at position 360 of SEQ ID NO: 1241704
acuauuugcuaccagaaag

SEQ ID NO: 1293155 - RNA, 19 nt, Artificial Sequence
  Description of Artificial Sequence: Synthetic oligonucleotide
  Antisense strand to SEQ ID NO: 1293154
cuuucugguagcaaauagu

SEQ ID NO: 1293156 - RNA, 19 nt, Artificial Sequence
  Description of Artificial Sequence: Synthetic oligonucleotide
  Sense strand starting at position 560 of SEQ ID NO: 1241704
acagaauugggcugcacau

SEQ ID NO: 1293157 - RNA, 19 nt, Artificial Sequence
  Description of Artificial Sequence: Synthetic oligonucleotide
  Antisense strand to SEQ ID NO: 1293156
augugcagcccaauucugu

SEQ ID NO: 1293158 - RNA, 19 nt, Artificial Sequence
  Description of Artificial Sequence: Synthetic oligonucleotide
  Sense strand starting at position 647 of SEQ ID NO: 1241704
ucauuucugccagguucuu

SEQ ID NO: 1293159 - RNA, 19 nt, Artificial Sequence
  Description of Artificial Sequence: Synthetic oligonucleotide
  Antisense strand to SEQ ID NO: 1293158
aagaaccuggcagaaauga

SEQ ID NO: 1293160 - RNA, 19 nt, Artificial Sequence
  Description of Artificial Sequence: Synthetic oligonucleotide
  Sense strand starting at position 682 of SEQ ID NO: 1241704
aguguuugcccugaggaaa

SEQ ID NO: 1293161 - RNA, 19 nt, Artificial Sequence
  Description of Artificial Sequence: Synthetic oligonucleotide
  Antisense strand to SEQ ID NO: 1293160
uuuccucagggcaaacacu

SEQ ID NO: 1293162 - RNA, 19 nt, Artificial Sequence
  Description of Artificial Sequence: Synthetic oligonucleotide
  Sense strand starting at position 700 of SEQ ID NO: 1241704
agcaauacuuccuuguaag

SEQ ID NO: 1293163 - RNA, 19 nt, Artificial Sequence
  Description of Artificial Sequence: Synthetic oligonucleotide
  Antisense strand to SEQ ID NO: 1293162
cuuacaaggaaguauugcu

SEQ ID NO: 1293164 - RNA, 19 nt, Artificial Sequence
  Description of Artificial Sequence: Synthetic oligonucleotide
  Sense strand starting at position 701 of SEQ ID NO: 1241704
gcaauacuuccuuguaaga

SEQ ID NO: 1293165 - RNA, 19 nt, Artificial Sequence
  Description of Artificial Sequence: Synthetic oligonucleotide
  Antisense strand to SEQ ID NO: 1293164
ucuuacaaggaaguauugc

SEQ ID NO: 1293166 - RNA, 19 nt, Artificial Sequence
  Description of Artificial Sequence: Synthetic oligonucleotide
  Sense strand starting at position 746 of SEQ ID NO: 1241704
acucucaucgcaugaggaa

SEQ ID NO: 1293167 - RNA, 19 nt, Artificial Sequence
  Description of Artificial Sequence: Synthetic oligonucleotide
  Antisense strand to SEQ ID NO: 1293166
uuccucaugcgaugagagu

SEQ ID NO: 1293168 - RNA, 19 nt, Artificial Sequence
  Description of Artificial Sequence: Synthetic oligonucleotide
  Sense strand starting at position 747 of SEQ ID NO: 1241704
cucucaucgcaugaggaaa

SEQ ID NO: 1293169 - RNA, 19 nt, Artificial Sequence
  Description of Artificial Sequence: Synthetic oligonucleotide
  Antisense strand to SEQ ID NO: 1293168
uuuccucaugcgaugagag

SEQ ID NO: 1293170 - RNA, 19 nt, Artificial Sequence
  Description of Artificial Sequence: Synthetic oligonucleotide
  Sense strand starting at position 809 of SEQ ID NO: 1241704
aauuuaaugucugaggaua

SEQ ID NO: 1293171 - RNA, 19 nt, Artificial Sequence
  Description of Artificial Sequence: Synthetic oligonucleotide
  Antisense strand to SEQ ID NO: 1293170
uauccucagacauuaaauu

SEQ ID NO: 1293172 - RNA, 19 nt, Artificial Sequence
  Description of Artificial Sequence: Synthetic oligonucleotide
  Sense strand starting at position 875 of SEQ ID NO: 1241704
uuuagaauguauucuuggu

SEQ ID NO: 1293173 - RNA, 19 nt, Artificial Sequence
  Description of Artificial Sequence: Synthetic oligonucleotide
  Antisense strand to SEQ ID NO: 1293172
accaagaauacauucuaaa

SEQ ID NO: 1293174 - RNA, 19 nt, Artificial Sequence
  Description of Artificial Sequence: Synthetic oligonucleotide
  Sense strand starting at position 877 of SEQ ID NO: 1241704
uagaauguauucuugguua

SEQ ID NO: 1293175 - RNA, 19 nt, Artificial Sequence
  Description of Artificial Sequence: Synthetic oligonucleotide
  Antisense strand to SEQ ID NO: 1293174
uaaccaagaauacauucua

SEQ ID NO: 1293176 - RNA, 19 nt, Artificial Sequence
  Description of Artificial Sequence: Synthetic oligonucleotide
  Sense strand starting at position 879 of SEQ ID NO: 1241704
gaauguauucuugguuauu

SEQ ID NO: 1293177 - RNA, 19 nt, Artificial Sequence
  Description of Artificial Sequence: Synthetic oligonucleotide
  Antisense strand to SEQ ID NO: 1293176
aauaaccaagaauacauuc

SEQ ID NO: 1293178 - RNA, 19 nt, Artificial Sequence
  Description of Artificial Sequence: Synthetic oligonucleotide
  Sense strand starting at position 914 of SEQ ID NO: 1241704
agagacuaagucugcauua

SEQ ID NO: 1293179 - RNA, 19 nt, Artificial Sequence
  Description of Artificial Sequence: Synthetic oligonucleotide
  Antisense strand to SEQ ID NO: 1293178
uaaugcagacuuagucucu

SEQ ID NO: 1293180 - RNA, 19 nt, Artificial Sequence
  Description of Artificial Sequence: Synthetic oligonucleotide
  Sense strand starting at position 915 of SEQ ID NO: 1241704
gagacuaagucugcauuaa

SEQ ID NO: 1293181 - RNA, 19 nt, Artificial Sequence
  Description of Artificial Sequence: Synthetic oligonucleotide
  Antisense strand to SEQ ID NO: 1293180
uuaaugcagacuuagucuc

SEQ ID NO: 1293182 - RNA, 19 nt, Artificial Sequence
  Description of Artificial Sequence: Synthetic oligonucleotide
  Sense strand starting at position 916 of SEQ ID NO: 1241704
agacuaagucugcauuaac

SEQ ID NO: 1293183 - RNA, 19 nt, Artificial Sequence
  Description of Artificial Sequence: Synthetic oligonucleotide
  Antisense strand to SEQ ID NO: 1293182
guuaaugcagacuuagucu

SEQ ID NO: 1293184 - RNA, 19 nt, Artificial Sequence
  Description of Artificial Sequence: Synthetic oligonucleotide
  Sense strand starting at position 925 of SEQ ID NO: 1241704
cugcauuaacggcaaagaa

SEQ ID NO: 1293185 - RNA, 19 nt, Artificial Sequence
  Description of Artificial Sequence: Synthetic oligonucleotide
  Antisense strand to SEQ ID NO: 1293184
uucuuugccguuaaugcag

SEQ ID NO: 1293186 - RNA, 19 nt, Artificial Sequence
  Description of Artificial Sequence: Synthetic oligonucleotide
  Sense strand starting at position 1182 of SEQ ID NO: 1241704
aucgcaauuuggucgugaa

SEQ ID NO: 1293187 - RNA, 19 nt, Artificial Sequence
  Description of Artificial Sequence: Synthetic oligonucleotide
  Antisense strand to SEQ ID NO: 1293186
uucacgaccaaauugcgau

SEQ ID NO: 1293188 - RNA, 19 nt, Artificial Sequence
  Description of Artificial Sequence: Synthetic oligonucleotide
  Sense strand starting at position 1183 of SEQ ID NO: 1241704
ucgcaauuuggucgugaag

SEQ ID NO: 1293189 - RNA, 19 nt, Artificial Sequence
  Description of Artificial Sequence: Synthetic oligonucleotide
  Antisense strand to SEQ ID NO: 1293188
cuucacgaccaaauugcga

SEQ ID NO: 1293190 - RNA, 19 nt, Artificial Sequence
  Description of Artificial Sequence: Synthetic oligonucleotide
  Sense strand starting at position 1386 of SEQ ID NO: 1241704
aguggauacccuugacaag

SEQ ID NO: 1293191 - RNA, 19 nt, Artificial Sequence
  Description of Artificial Sequence: Synthetic oligonucleotide
  Antisense strand to SEQ ID NO: 1293190
cuugucaaggguauccacu

SEQ ID NO: 1293192 - RNA, 19 nt, Artificial Sequence
  Description of Artificial Sequence: Synthetic oligonucleotide
  Sense strand starting at position 1564 of SEQ ID NO: 1241704
ugacgaaaugacugcaaca

SEQ ID NO: 1293193 - RNA, 19 nt, Artificial Sequence
  Description of Artificial Sequence: Synthetic oligonucleotide
  Antisense strand to SEQ ID NO: 1293192
uguugcagucauuucguca

SEQ ID NO: 1293194 - RNA, 19 nt, Artificial Sequence
  Description of Artificial Sequence: Synthetic oligonucleotide
  Sense strand starting at position 2754 of SEQ ID NO: 1241704
ucucgaccugcuuaagaca

SEQ ID NO: 1293195 - RNA, 19 nt, Artificial Sequence
  Description of Artificial Sequence: Synthetic oligonucleotide
  Antisense strand to SEQ ID NO: 1293194
ugucuuaagcaggucgaga

SEQ ID NO: 1293196 - RNA, 19 nt, Artificial Sequence
  Description of Artificial Sequence: Synthetic oligonucleotide
  Sense strand starting at position 2871 of SEQ ID NO: 1241704
caggauauuuaacguauuu

SEQ ID NO: 1293197 - RNA, 19 nt, Artificial Sequence
  Description of Artificial Sequence: Synthetic oligonucleotide
  Antisense strand to SEQ ID NO: 1293196
aaauacguuaaauauccug

SEQ ID NO: 1293198 - RNA, 19 nt, Artificial Sequence
  Description of Artificial Sequence: Synthetic oligonucleotide
  Sense strand starting at position 2948 of SEQ ID NO: 1241704
uauaauauaucguuaggag

SEQ ID NO: 1293199 - RNA, 19 nt, Artificial Sequence
  Description of Artificial Sequence: Synthetic oligonucleotide
  Antisense strand to SEQ ID NO: 1293198
cuccuaacgauauauuaua

SEQ ID NO: 1293200 - RNA, 19 nt, Artificial Sequence
  Description of Artificial Sequence: Synthetic oligonucleotide
  Sense strand starting at position 2956 of SEQ ID NO: 1241704
aucguuaggagauacagua

SEQ ID NO: 1293201 - RNA, 19 nt, Artificial Sequence
  Description of Artificial Sequence: Synthetic oligonucleotide
  Antisense strand to SEQ ID NO: 1293200
uacuguaucuccuaacgau

SEQ ID NO: 1293202 - RNA, 19 nt, Artificial Sequence
  Description of Artificial Sequence: Synthetic oligonucleotide
  Sense strand starting at position 3060 of SEQ ID NO: 1241704
gacagugacguugaucaag

SEQ ID NO: 1293203 - RNA, 19 nt, Artificial Sequence
  Description of Artificial Sequence: Synthetic oligonucleotide
  Antisense strand to SEQ ID NO: 1293202
cuugaucaacgucacuguc

SEQ ID NO: 1293204 - RNA, 19 nt, Artificial Sequence
  Description of Artificial Sequence: Synthetic oligonucleotide
  Sense strand starting at position 3069 of SEQ ID NO: 1241704
guugaucaagcuugaauug

SEQ ID NO: 1293205 - RNA, 19 nt, Artificial Sequence
  Description of Artificial Sequence: Synthetic oligonucleotide
  Antisense strand to SEQ ID NO: 1293204
caauucaagcuugaucaac

SEQ ID NO: 1293206 - RNA, 19 nt, Artificial Sequence
  Description of Artificial Sequence: Synthetic oligonucleotide
  Sense strand starting at position 3295 of SEQ ID NO: 1241704
aggcucugguaacucauua

SEQ ID NO: 1293207 - RNA, 19 nt, Artificial Sequence
  Description of Artificial Sequence: Synthetic oligonucleotide
  Antisense strand to SEQ ID NO: 1293206
uaaugaguuaccagagccu

SEQ ID NO: 1293208 - RNA, 19 nt, Artificial Sequence
  Description of Artificial Sequence: Synthetic oligonucleotide
  Sense strand starting at position 3469 of SEQ ID NO: 1241704
ucaguagcugagcaauuau

SEQ ID NO: 1293209 - RNA, 19 nt, Artificial Sequence
  Description of Artificial Sequence: Synthetic oligonucleotide
  Antisense strand to SEQ ID NO: 1293208
auaauugcucagcuacuga

SEQ ID NO: 1293210 - RNA, 19 nt, Artificial Sequence
  Description of Artificial Sequence: Synthetic oligonucleotide
  Sense strand starting at position 3621 of SEQ ID NO: 1241704
ucacauguacuugggauaa

SEQ ID NO: 1293211 - RNA, 19 nt, Artificial Sequence
  Description of Artificial Sequence: Synthetic oligonucleotide
  Antisense strand to SEQ ID NO: 1293210
uuaucccaaguacauguga

SEQ ID NO: 1293212 - RNA, 19 nt, Artificial Sequence
  Description of Artificial Sequence: Synthetic oligonucleotide
  Sense strand starting at position 3658 of SEQ ID NO: 1241704
gcuuguauuucucccauua

SEQ ID NO: 1293213 - RNA, 19 nt, Artificial Sequence
  Description of Artificial Sequence: Synthetic oligonucleotide
  Antisense strand to SEQ ID NO: 1293212
uaaugggagaaauacaagc

SEQ ID NO: 1293214 - RNA, 19 nt, Artificial Sequence
  Description of Artificial Sequence: Synthetic oligonucleotide
  Sense strand starting at position 3696 of SEQ ID NO: 1241704
cgaagacuuuggcuuauau

SEQ ID NO: 1293215 - RNA, 19 nt, Artificial Sequence
  Description of Artificial Sequence: Synthetic oligonucleotide
  Antisense strand to SEQ ID NO: 1293214
auauaagccaaagucuucg

SEQ ID NO: 1293216 - RNA, 19 nt, Artificial Sequence
  Description of Artificial Sequence: Synthetic oligonucleotide
  Sense strand starting at position 3712 of SEQ ID NO: 1241704
uauagaggguccuuacuuu

SEQ ID NO: 1293217 - RNA, 19 nt, Artificial Sequence
  Description of Artificial Sequence: Synthetic oligonucleotide
  Antisense strand to SEQ ID NO: 1293216
aaaguaaggacccucuaua

SEQ ID NO: 1293218 - RNA, 19 nt, Artificial Sequence
  Description of Artificial Sequence: Synthetic oligonucleotide
  Sense strand starting at position 3776 of SEQ ID NO: 1241704
acuacuagaccauguaugu

SEQ ID NO: 1293219 - RNA, 19 nt, Artificial Sequence
  Description of Artificial Sequence: Synthetic oligonucleotide
  Antisense strand to SEQ ID NO: 1293218
acauacauggucuaguagu

SEQ ID NO: 1293220 - RNA, 19 nt, Artificial Sequence
  Description of Artificial Sequence: Synthetic oligonucleotide
  Sense strand starting at position 3789 of SEQ ID NO: 1241704
guauguucucuuuacucau

SEQ ID NO: 1293221 - RNA, 19 nt, Artificial Sequence
  Description of Artificial Sequence: Synthetic oligonucleotide
  Antisense strand to SEQ ID NO: 1293220
augaguaaagagaacauac

SEQ ID NO: 1293222 - RNA, 19 nt, Artificial Sequence
  Description of Artificial Sequence: Synthetic oligonucleotide
  Sense strand starting at position 3829 of SEQ ID NO: 1241704
aucucauucuuggcuagga

SEQ ID NO: 1293223 - RNA, 19 nt, Artificial Sequence
  Description of Artificial Sequence: Synthetic oligonucleotide
  Antisense strand to SEQ ID NO: 1293222
uccuagccaagaaugagau

SEQ ID NO: 1293224 - RNA, 19 nt, Artificial Sequence
  Description of Artificial Sequence: Synthetic oligonucleotide
  Sense strand starting at position 3830 of SEQ ID NO: 1241704
ucucauucuuggcuaggaa

SEQ ID NO: 1293225 - RNA, 19 nt, Artificial Sequence
  Description of Artificial Sequence: Synthetic oligonucleotide
  Antisense strand to SEQ ID NO: 1293224
uuccuagccaagaaugaga

SEQ ID NO: 1293226 - RNA, 19 nt, Artificial Sequence
  Description of Artificial Sequence: Synthetic oligonucleotide
  Sense strand starting at position 3831 of SEQ ID NO: 1241704
cucauucuuggcuaggaau

SEQ ID NO: 1293227 - RNA, 19 nt, Artificial Sequence
  Description of Artificial Sequence: Synthetic oligonucleotide
  Antisense strand to SEQ ID NO: 1293226
auuccuagccaagaaugag

SEQ ID NO: 1293228 - RNA, 19 nt, Artificial Sequence
  Description of Artificial Sequence: Synthetic oligonucleotide
  Sense strand starting at position 31 of SEQ ID NO: 1241705
acgugauuacaguaagagc

SEQ ID NO: 1293229 - RNA, 19 nt, Artificial Sequence
  Description of Artificial Sequence: Synthetic oligonucleotide
  Antisense strand to SEQ ID NO: 1293228
gcucuuacuguaaucacgu

SEQ ID NO: 1293230 - RNA, 19 nt, Artificial Sequence
  Description of Artificial Sequence: Synthetic oligonucleotide
  Sense strand starting at position 39 of SEQ ID NO: 1241705
acaguaagagcaugacaaa

SEQ ID NO: 1293231 - RNA, 19 nt, Artificial Sequence
  Description of Artificial Sequence: Synthetic oligonucleotide
  Antisense strand to SEQ ID NO: 1293230
uuugucaugcucuuacugu

SEQ ID NO: 1293232 - RNA, 19 nt, Artificial Sequence
  Description of Artificial Sequence: Synthetic oligonucleotide
  Sense strand starting at position 510 of SEQ ID NO: 1241705
ccuguucugccgcugugau

SEQ ID NO: 1293233 - RNA, 19 nt, Artificial Sequence
  Description of Artificial Sequence: Synthetic oligonucleotide
  Antisense strand to SEQ ID NO: 1293232
aucacagcggcagaacagg

SEQ ID NO: 1293234 - RNA, 19 nt, Artificial Sequence
  Description of Artificial Sequence: Synthetic oligonucleotide
  Sense strand starting at position 518 of SEQ ID NO: 1241705
gccgcugugaucuuggcaa

SEQ ID NO: 1293235 - RNA, 19 nt, Artificial Sequence
  Description of Artificial Sequence: Synthetic oligonucleotide
  Antisense strand to SEQ ID NO: 1293234
uugccaagaucacagcggc

SEQ ID NO: 1293236 - RNA, 19 nt, Artificial Sequence
  Description of Artificial Sequence: Synthetic oligonucleotide
  Sense strand starting at position 529 of SEQ ID NO: 1241705
cuuggcaaguuauuuguga

SEQ ID NO: 1293237 - RNA, 19 nt, Artificial Sequence
  Description of Artificial Sequence: Synthetic oligonucleotide
  Antisense strand to SEQ ID NO: 1293236
ucacaaauaacuugccaag

SEQ ID NO: 1293238 - RNA, 19 nt, Artificial Sequence
  Description of Artificial Sequence: Synthetic oligonucleotide
  Sense strand starting at position 530 of SEQ ID NO: 1241705
uuggcaaguuauuugugau

SEQ ID NO: 1293239 - RNA, 19 nt, Artificial Sequence
  Description of Artificial Sequence: Synthetic oligonucleotide
  Antisense strand to SEQ ID NO: 1293238
aucacaaauaacuugccaa

SEQ ID NO: 1293240 - RNA, 19 nt, Artificial Sequence
  Description of Artificial Sequence: Synthetic oligonucleotide
  Sense strand starting at position 531 of SEQ ID NO: 1241705
uggcaaguuauuugugauc

SEQ ID NO: 1293241 - RNA, 19 nt, Artificial Sequence
  Description of Artificial Sequence: Synthetic oligonucleotide
  Antisense strand to SEQ ID NO: 1293240
gaucacaaauaacuugcca

SEQ ID NO: 1293242 - RNA, 19 nt, Artificial Sequence
  Description of Artificial Sequence: Synthetic oligonucleotide
  Sense strand starting at position 625 of SEQ ID NO: 1241705
uggaaauaguuccuaguac

SEQ ID NO: 1293243 - RNA, 19 nt, Artificial Sequence
  Description of Artificial Sequence: Synthetic oligonucleotide
  Antisense strand to SEQ ID NO: 1293242
guacuaggaacuauuucca

SEQ ID NO: 1293244 - RNA, 19 nt, Artificial Sequence
  Description of Artificial Sequence: Synthetic oligonucleotide
  Sense strand starting at position 640 of SEQ ID NO: 1241705
guacauagcaaggguuuaa

SEQ ID NO: 1293245 - RNA, 19 nt, Artificial Sequence
  Description of Artificial Sequence: Synthetic oligonucleotide
  Antisense strand to SEQ ID NO: 1293244
uuaaacccuugcuauguac

SEQ ID NO: 1293246 - RNA, 19 nt, Artificial Sequence
  Description of Artificial Sequence: Synthetic oligonucleotide
  Sense strand starting at position 644 of SEQ ID NO: 1241705
auagcaaggguuuaauguu

SEQ ID NO: 1293247 - RNA, 19 nt, Artificial Sequence
  Description of Artificial Sequence: Synthetic oligonucleotide
  Antisense strand to SEQ ID NO: 1293246
aacauuaaacccuugcuau

SEQ ID NO: 1293248 - RNA, 19 nt, Artificial Sequence
  Description of Artificial Sequence: Synthetic oligonucleotide
  Sense strand starting at position 737 of SEQ ID NO: 1241705
ucagaauaguuugcugauc

SEQ ID NO: 1293249 - RNA, 19 nt, Artificial Sequence
  Description of Artificial Sequence: Synthetic oligonucleotide
  Antisense strand to SEQ ID NO: 1293248
gaucagcaaacuauucuga

SEQ ID NO: 1293250 - RNA, 19 nt, Artificial Sequence
  Description of Artificial Sequence: Synthetic oligonucleotide
  Sense strand starting at position 738 of SEQ ID NO: 1241705
cagaauaguuugcugauca

SEQ ID NO: 1293251 - RNA, 19 nt, Artificial Sequence
  Description of Artificial Sequence: Synthetic oligonucleotide
  Antisense strand to SEQ ID NO: 1293250
ugaucagcaaacuauucug

SEQ ID NO: 1293252 - RNA, 19 nt, Artificial Sequence
  Description of Artificial Sequence: Synthetic oligonucleotide
  Sense strand starting at position 742 of SEQ ID NO: 1241705
auaguuugcugaucaauga

SEQ ID NO: 1293253 - RNA, 19 nt, Artificial Sequence
  Description of Artificial Sequence: Synthetic oligonucleotide
  Antisense strand to SEQ ID NO: 1293252
ucauugaucagcaaacuau

SEQ ID NO: 1293254 - RNA, 19 nt, Artificial Sequence
  Description of Artificial Sequence: Synthetic oligonucleotide
  Sense strand starting at position 743 of SEQ ID NO: 1241705
uaguuugcugaucaaugaa

SEQ ID NO: 1293255 - RNA, 19 nt, Artificial Sequence
  Description of Artificial Sequence: Synthetic oligonucleotide
  Antisense strand to SEQ ID NO: 1293254
uucauugaucagcaaacua

SEQ ID NO: 1293256 - RNA, 19 nt, Artificial Sequence
  Description of Artificial Sequence: Synthetic oligonucleotide
  Sense strand starting at position 746 of SEQ ID NO: 1241705
uuugcugaucaaugaauag

SEQ ID NO: 1293257 - RNA, 19 nt, Artificial Sequence
  Description of Artificial Sequence: Synthetic oligonucleotide
  Antisense strand to SEQ ID NO: 1293256
cuauucauugaucagcaaa

SEQ ID NO: 1293258 - RNA, 19 nt, Artificial Sequence
  Description of Artificial Sequence: Synthetic oligonucleotide
  Sense strand starting at position 919 of SEQ ID NO: 1241705
gucuauaaagauugccuca

SEQ ID NO: 1293259 - RNA, 19 nt, Artificial Sequence
  Description of Artificial Sequence: Synthetic oligonucleotide
  Antisense strand to SEQ ID NO: 1293258
ugaggcaaucuuuauagac

SEQ ID NO: 1293260 - RNA, 19 nt, Artificial Sequence
  Description of Artificial Sequence: Synthetic oligonucleotide
  Sense strand starting at position 953 of SEQ ID NO: 1241705
gaaugauacuggcucagaa

SEQ ID NO: 1293261 - RNA, 19 nt, Artificial Sequence
  Description of Artificial Sequence: Synthetic oligonucleotide
  Antisense strand to SEQ ID NO: 1293260
uucugagccaguaucauuc

SEQ ID NO: 1293262 - RNA, 19 nt, Artificial Sequence
  Description of Artificial Sequence: Synthetic oligonucleotide
  Sense strand starting at position 962 of SEQ ID NO: 1241705
uggcucagaaagugugaaa

SEQ ID NO: 1293263 - RNA, 19 nt, Artificial Sequence
  Description of Artificial Sequence: Synthetic oligonucleotide
  Antisense strand to SEQ ID NO: 1293262
uuucacacuuucugagcca

SEQ ID NO: 1293264 - RNA, 19 nt, Artificial Sequence
  Description of Artificial Sequence: Synthetic oligonucleotide
  Sense strand starting at position 1092 of SEQ ID NO: 1241705
guauauggugaguacggau

SEQ ID NO: 1293265 - RNA, 19 nt, Artificial Sequence
  Description of Artificial Sequence: Synthetic oligonucleotide
  Antisense strand to SEQ ID NO: 1293264
auccguacucaccauauac

SEQ ID NO: 1293266 - RNA, 19 nt, Artificial Sequence
  Description of Artificial Sequence: Synthetic oligonucleotide
  Sense strand starting at position 1260 of SEQ ID NO: 1241705
acagaaacccuggguuacu

SEQ ID NO: 1293267 - RNA, 19 nt, Artificial Sequence
  Description of Artificial Sequence: Synthetic oligonucleotide
  Antisense strand to SEQ ID NO: 1293266
aguaacccaggguuucugu

SEQ ID NO: 1293268 - RNA, 19 nt, Artificial Sequence
  Description of Artificial Sequence: Synthetic oligonucleotide
  Sense strand starting at position 1576 of SEQ ID NO: 1241705
uggugucagggcgacaaau

SEQ ID NO: 1293269 - RNA, 19 nt, Artificial Sequence
  Description of Artificial Sequence: Synthetic oligonucleotide
  Antisense strand to SEQ ID NO: 1293268
auuugucgcccugacacca

SEQ ID NO: 1293270 - RNA, 19 nt, Artificial Sequence
  Description of Artificial Sequence: Synthetic oligonucleotide
  Sense strand starting at position 2286 of SEQ ID NO: 1241705
aggucaggguaacauuuaa

SEQ ID NO: 1293271 - RNA, 19 nt, Artificial Sequence
  Description of Artificial Sequence: Synthetic oligonucleotide
  Antisense strand to SEQ ID NO: 1293270
uuaaauguuacccugaccu

SEQ ID NO: 1293272 - RNA, 19 nt, Artificial Sequence
  Description of Artificial Sequence: Synthetic oligonucleotide
  Sense strand starting at position 2542 of SEQ ID NO: 1241705
auugauggcuuucuauaau

SEQ ID NO: 1293273 - RNA, 19 nt, Artificial Sequence
  Description of Artificial Sequence: Synthetic oligonucleotide
  Antisense strand to SEQ ID NO: 1293272
auuauagaaagccaucaau

SEQ ID NO: 1293274 - RNA, 19 nt, Artificial Sequence
  Description of Artificial Sequence: Synthetic oligonucleotide
  Sense strand starting at position 2572 of SEQ ID NO: 1241705
ugaagcaguuaccuuugaa

SEQ ID NO: 1293275 - RNA, 19 nt, Artificial Sequence
  Description of Artificial Sequence: Synthetic oligonucleotide
  Antisense strand to SEQ ID NO: 1293274
uucaaagguaacugcuuca

SEQ ID NO: 1293276 - RNA, 19 nt, Artificial Sequence
  Description of Artificial Sequence: Synthetic oligonucleotide
  Sense strand starting at position 2584 of SEQ ID NO: 1241705
cuuugaauccuuggaaaua

SEQ ID NO: 1293277 - RNA, 19 nt, Artificial Sequence
  Description of Artificial Sequence: Synthetic oligonucleotide
  Antisense strand to SEQ ID NO: 1293276
uauuuccaaggauucaaag

SEQ ID NO: 1293278 - RNA, 19 nt, Artificial Sequence
  Description of Artificial Sequence: Synthetic oligonucleotide
  Sense strand starting at position 2699 of SEQ ID NO: 1241705
gggugcugucccuaugaac

SEQ ID NO: 1293279 - RNA, 19 nt, Artificial Sequence
  Description of Artificial Sequence: Synthetic oligonucleotide
  Antisense strand to SEQ ID NO: 1293278
guucauagggacagcaccc

SEQ ID NO: 1293280 - RNA, 19 nt, Artificial Sequence
  Description of Artificial Sequence: Synthetic oligonucleotide
  Sense strand starting at position 2738 of SEQ ID NO: 1241705
cuccguuuacuagaagcaa

SEQ ID NO: 1293281 - RNA, 19 nt, Artificial Sequence
  Description of Artificial Sequence: Synthetic oligonucleotide
  Antisense strand to SEQ ID NO: 1293280
uugcuucuaguaaacggag

SEQ ID NO: 1293282 - RNA, 19 nt, Artificial Sequence
  Description of Artificial Sequence: Synthetic oligonucleotide
  Sense strand starting at position 2804 of SEQ ID NO: 1241705
agucauaaaugucuccaga

SEQ ID NO: 1293283 - RNA, 19 nt, Artificial Sequence
  Description of Artificial Sequence: Synthetic oligonucleotide
  Antisense strand to SEQ ID NO: 1293282
ucuggagacauuuaugacu

SEQ ID NO: 1293284 - RNA, 19 nt, Artificial Sequence
  Description of Artificial Sequence: Synthetic oligonucleotide
  Sense strand starting at position 2942 of SEQ ID NO: 1241705
uuaccagcuugaucuugaa

SEQ ID NO: 1293285 - RNA, 19 nt, Artificial Sequence
  Description of Artificial Sequence: Synthetic oligonucleotide
  Antisense strand to SEQ ID NO: 1293284
uucaagaucaagcugguaa

SEQ ID NO: 1293286 - RNA, 19 nt, Artificial Sequence
  Description of Artificial Sequence: Synthetic oligonucleotide
  Sense strand starting at position 2999 of SEQ ID NO: 1241705
ucuaauguagauugugaaa

SEQ ID NO: 1293287 - RNA, 19 nt, Artificial Sequence
  Description of Artificial Sequence: Synthetic oligonucleotide
  Antisense strand to SEQ ID NO: 1293286
uuucacaaucuacauuaga

SEQ ID NO: 1293288 - RNA, 19 nt, Artificial Sequence
  Description of Artificial Sequence: Synthetic oligonucleotide
  Sense strand starting at position 3008 of SEQ ID NO: 1241705
gauugugaaaguugucaga

SEQ ID NO: 1293289 - RNA, 19 nt, Artificial Sequence
  Description of Artificial Sequence: Synthetic oligonucleotide
  Antisense strand to SEQ ID NO: 1293288
ucugacaacuuucacaauc

SEQ ID NO: 1293290 - RNA, 19 nt, Artificial Sequence
  Description of Artificial Sequence: Synthetic oligonucleotide
  Sense strand starting at position 3036 of SEQ ID NO: 1241705
agagucacauguguuagaa

SEQ ID NO: 1293291 - RNA, 19 nt, Artificial Sequence
  Description of Artificial Sequence: Synthetic oligonucleotide
  Antisense strand to SEQ ID NO: 1293290
uucuaacacaugugacucu

SEQ ID NO: 1293292 - RNA, 19 nt, Artificial Sequence
  Description of Artificial Sequence: Synthetic oligonucleotide
  Sense strand starting at position 3085 of SEQ ID NO: 1241705
gaaggagaguucucaucca

SEQ ID NO: 1293293 - RNA, 19 nt, Artificial Sequence
  Description of Artificial Sequence: Synthetic oligonucleotide
  Antisense strand to SEQ ID NO: 1293292
uggaugagaacucuccuuc

SEQ ID NO: 1293294 - RNA, 19 nt, Artificial Sequence
  Description of Artificial Sequence: Synthetic oligonucleotide
  Sense strand starting at position 3099 of SEQ ID NO: 1241705
auccaugaaugccugauaa

SEQ ID NO: 1293295 - RNA, 19 nt, Artificial Sequence
  Description of Artificial Sequence: Synthetic oligonucleotide
  Antisense strand to SEQ ID NO: 1293294
uuaucaggcauucauggau

SEQ ID NO: 1293296 - RNA, 19 nt, Artificial Sequence
  Description of Artificial Sequence: Synthetic oligonucleotide
  Sense strand starting at position 3198 of SEQ ID NO: 1241705
acaucuguccagcaauugu

SEQ ID NO: 1293297 - RNA, 19 nt, Artificial Sequence
  Description of Artificial Sequence: Synthetic oligonucleotide
  Antisense strand to SEQ ID NO: 1293296
acaauugcuggacagaugu

SEQ ID NO: 1293298 - RNA, 19 nt, Artificial Sequence
  Description of Artificial Sequence: Synthetic oligonucleotide
  Sense strand starting at position 3392 of SEQ ID NO: 1241705
cccauuccuggguaaaugu

SEQ ID NO: 1293299 - RNA, 19 nt, Artificial Sequence
  Description of Artificial Sequence: Synthetic oligonucleotide
  Antisense strand to SEQ ID NO: 1293298
acauuuacccaggaauggg

SEQ ID NO: 1293300 - RNA, 19 nt, Artificial Sequence
  Description of Artificial Sequence: Synthetic oligonucleotide
  Sense strand starting at position 3485 of SEQ ID NO: 1241705
ggagucaugcccuagaaac

SEQ ID NO: 1293301 - RNA, 19 nt, Artificial Sequence
  Description of Artificial Sequence: Synthetic oligonucleotide
  Antisense strand to SEQ ID NO: 1293300
guuucuagggcaugacucc

SEQ ID NO: 1293302 - RNA, 19 nt, Artificial Sequence
  Description of Artificial Sequence: Synthetic oligonucleotide
  Sense strand starting at position 3563 of SEQ ID NO: 1241705
cugauucuggcauaauauu

SEQ ID NO: 1293303 - RNA, 19 nt, Artificial Sequence
  Description of Artificial Sequence: Synthetic oligonucleotide
  Antisense strand to SEQ ID NO: 1293302
aauauuaugccagaaucag

SEQ ID NO: 1293304 - RNA, 19 nt, Artificial Sequence
  Description of Artificial Sequence: Synthetic oligonucleotide
  Sense strand starting at position 3948 of SEQ ID NO: 1241705
uuuacauacucauugaguu

SEQ ID NO: 1293305 - RNA, 19 nt, Artificial Sequence
  Description of Artificial Sequence: Synthetic oligonucleotide
  Antisense strand to SEQ ID NO: 1293304
aacucaaugaguauguaaa

SEQ ID NO: 1293306 - RNA, 19 nt, Artificial Sequence
  Description of Artificial Sequence: Synthetic oligonucleotide
  Sense strand starting at position 3949 of SEQ ID NO: 1241705
uuacauacucauugaguug

SEQ ID NO: 1293307 - RNA, 19 nt, Artificial Sequence
  Description of Artificial Sequence: Synthetic oligonucleotide
  Antisense strand to SEQ ID NO: 1293306
caacucaaugaguauguaa

SEQ ID NO: 1293308 - RNA, 19 nt, Artificial Sequence
  Description of Artificial Sequence: Synthetic oligonucleotide
  Sense strand starting at position 448 of SEQ ID NO: 1241706
caaguuugguuggcuuaaa

SEQ ID NO: 1293309 - RNA, 19 nt, Artificial Sequence
  Description of Artificial Sequence: Synthetic oligonucleotide
  Antisense strand to SEQ ID NO: 1293308
uuuaagccaaccaaacuug

SEQ ID NO: 1293310 - RNA, 19 nt, Artificial Sequence
  Description of Artificial Sequence: Synthetic oligonucleotide
  Sense strand starting at position 449 of SEQ ID NO: 1241706
aaguuugguuggcuuaaau

SEQ ID NO: 1293311 - RNA, 19 nt, Artificial Sequence
  Description of Artificial Sequence: Synthetic oligonucleotide
  Antisense strand to SEQ ID NO: 1293310
auuuaagccaaccaaacuu

SEQ ID NO: 1293312 - RNA, 19 nt, Artificial Sequence
  Description of Artificial Sequence: Synthetic oligonucleotide
  Sense strand starting at position 572 of SEQ ID NO: 1241706
gaaagagaguuuccuguaa

SEQ ID NO: 1293313 - RNA, 19 nt, Artificial Sequence
  Description of Artificial Sequence: Synthetic oligonucleotide
  Antisense strand to SEQ ID NO: 1293312
uuacaggaaacucucuuuc

SEQ ID NO: 1293314 - RNA, 19 nt, Artificial Sequence
  Description of Artificial Sequence: Synthetic oligonucleotide
  Sense strand starting at position 627 of SEQ ID NO: 1241706
guggauuccuugucaugac

SEQ ID NO: 1293315 - RNA, 19 nt, Artificial Sequence
  Description of Artificial Sequence: Synthetic oligonucleotide
  Antisense strand to SEQ ID NO: 1293314
gucaugacaaggaauccac

SEQ ID NO: 1293316 - RNA, 19 nt, Artificial Sequence
  Description of Artificial Sequence: Synthetic oligonucleotide
  Sense strand starting at position 669 of SEQ ID NO: 1241706
uuccuuucccggcaugaga

SEQ ID NO: 1293317 - RNA, 19 nt, Artificial Sequence
  Description of Artificial Sequence: Synthetic oligonucleotide
  Antisense strand to SEQ ID NO: 1293316
ucucaugccgggaaaggaa

SEQ ID NO: 1293318 - RNA, 19 nt, Artificial Sequence
  Description of Artificial Sequence: Synthetic oligonucleotide
  Sense strand starting at position 706 of SEQ ID NO: 1241706
augugaggucauuaugguc

SEQ ID NO: 1293319 - RNA, 19 nt, Artificial Sequence
  Description of Artificial Sequence: Synthetic oligonucleotide
  Antisense strand to SEQ ID NO: 1293318
gaccauaaugaccucacau

SEQ ID NO: 1293320 - RNA, 19 nt, Artificial Sequence
  Description of Artificial Sequence: Synthetic oligonucleotide
  Sense strand starting at position 711 of SEQ ID NO: 1241706
aggucauuauggucccaga

SEQ ID NO: 1293321 - RNA, 19 nt, Artificial Sequence
  Description of Artificial Sequence: Synthetic oligonucleotide
  Antisense strand to SEQ ID NO: 1293320
ucugggaccauaaugaccu

SEQ ID NO: 1293322 - RNA, 19 nt, Artificial Sequence
  Description of Artificial Sequence: Synthetic oligonucleotide
  Sense strand starting at position 857 of SEQ ID NO: 1241706
gcgggagaaucacuccaga

SEQ ID NO: 1293323 - RNA, 19 nt, Artificial Sequence
  Description of Artificial Sequence: Synthetic oligonucleotide
  Antisense strand to SEQ ID NO: 1293322
ucuggagugauucucccgc

SEQ ID NO: 1293324 - RNA, 19 nt, Artificial Sequence
  Description of Artificial Sequence: Synthetic oligonucleotide
  Sense strand starting at position 893 of SEQ ID NO: 1241706
guuguacucuucuuaggag

SEQ ID NO: 1293325 - RNA, 19 nt, Artificial Sequence
  Description of Artificial Sequence: Synthetic oligonucleotide
  Antisense strand to SEQ ID NO: 1293324
cuccuaagaagaguacaac

SEQ ID NO: 1293326 - RNA, 19 nt, Artificial Sequence
  Description of Artificial Sequence: Synthetic oligonucleotide
  Sense strand starting at position 901 of SEQ ID NO: 1241706
cuucuuaggagguggaaga

SEQ ID NO: 1293327 - RNA, 19 nt, Artificial Sequence
  Description of Artificial Sequence: Synthetic oligonucleotide
  Antisense strand to SEQ ID NO: 1293326
ucuuccaccuccuaagaag

SEQ ID NO: 1293328 - RNA, 19 nt, Artificial Sequence
  Description of Artificial Sequence: Synthetic oligonucleotide
  Sense strand starting at position 1029 of SEQ ID NO: 1241706
cuuucuuauuggccgaaga

SEQ ID NO: 1293329 - RNA, 19 nt, Artificial Sequence
  Description of Artificial Sequence: Synthetic oligonucleotide
  Antisense strand to SEQ ID NO: 1293328
ucuucggccaauaagaaag

SEQ ID NO: 1293330 - RNA, 19 nt, Artificial Sequence
  Description of Artificial Sequence: Synthetic oligonucleotide
  Sense strand starting at position 1031 of SEQ ID NO: 1241706
uucuuauuggccgaagacu

SEQ ID NO: 1293331 - RNA, 19 nt, Artificial Sequence
  Description of Artificial Sequence: Synthetic oligonucleotide
  Antisense strand to SEQ ID NO: 1293330
agucuucggccaauaagaa

SEQ ID NO: 1293332 - RNA, 19 nt, Artificial Sequence
  Description of Artificial Sequence: Synthetic oligonucleotide
  Sense strand starting at position 1044 of SEQ ID NO: 1241706
aagacuuaaggucggaaua

SEQ ID NO: 1293333 - RNA, 19 nt, Artificial Sequence
  Description of Artificial Sequence: Synthetic oligonucleotide
  Antisense strand to SEQ ID NO: 1293332
uauuccgaccuuaagucuu

SEQ ID NO: 1293334 - RNA, 19 nt, Artificial Sequence
  Description of Artificial Sequence: Synthetic oligonucleotide
  Sense strand starting at position 1045 of SEQ ID NO: 1241706
agacuuaaggucggaauau

SEQ ID NO: 1293335 - RNA, 19 nt, Artificial Sequence
  Description of Artificial Sequence: Synthetic oligonucleotide
  Antisense strand to SEQ ID NO: 1293334
auauuccgaccuuaagucu

SEQ ID NO: 1293336 - RNA, 19 nt, Artificial Sequence
  Description of Artificial Sequence: Synthetic oligonucleotide
  Sense strand starting at position 1090 of SEQ ID NO: 1241706
gcaauagucacaggaguug

SEQ ID NO: 1293337 - RNA, 19 nt, Artificial Sequence
  Description of Artificial Sequence: Synthetic oligonucleotide
  Antisense strand to SEQ ID NO: 1293336
caacuccugugacuauugc

SEQ ID NO: 1293338 - RNA, 19 nt, Artificial Sequence
  Description of Artificial Sequence: Synthetic oligonucleotide
  Sense strand starting at position 1158 of SEQ ID NO: 1241706
agaagucauuucuacuaga

SEQ ID NO: 1293339 - RNA, 19 nt, Artificial Sequence
  Description of Artificial Sequence: Synthetic oligonucleotide
  Antisense strand to SEQ ID NO: 1293338
ucuaguagaaaugacuucu

SEQ ID NO: 1293340 - RNA, 19 nt, Artificial Sequence
  Description of Artificial Sequence: Synthetic oligonucleotide
  Sense strand starting at position 1161 of SEQ ID NO: 1241706
agucauuucuacuagagau

SEQ ID NO: 1293341 - RNA, 19 nt, Artificial Sequence
  Description of Artificial Sequence: Synthetic oligonucleotide
  Antisense strand to SEQ ID NO: 1293340
aucucuaguagaaaugacu

SEQ ID NO: 1293342 - RNA, 19 nt, Artificial Sequence
  Description of Artificial Sequence: Synthetic oligonucleotide
  Sense strand starting at position 1345 of SEQ ID NO: 1241706
ggaggauguuaucuguucu

SEQ ID NO: 1293343 - RNA, 19 nt, Artificial Sequence
  Description of Artificial Sequence: Synthetic oligonucleotide
  Antisense strand to SEQ ID NO: 1293342
agaacagauaacauccucc

SEQ ID NO: 1293344 - RNA, 19 nt, Artificial Sequence
  Description of Artificial Sequence: Synthetic oligonucleotide
  Sense strand starting at position 1351 of SEQ ID NO: 1241706
uguuaucuguucucgauuu

SEQ ID NO: 1293345 - RNA, 19 nt, Artificial Sequence
  Description of Artificial Sequence: Synthetic oligonucleotide
  Antisense strand to SEQ ID NO: 1293344
aaaucgagaacagauaaca

SEQ ID NO: 1293346 - RNA, 19 nt, Artificial Sequence
  Description of Artificial Sequence: Synthetic oligonucleotide
  Sense strand starting at position 1747 of SEQ ID NO: 1241706
gaaccuugugacugugaga

SEQ ID NO: 1293347 - RNA, 19 nt, Artificial Sequence
  Description of Artificial Sequence: Synthetic oligonucleotide
  Antisense strand to SEQ ID NO: 1293346
ucucacagucacaagguuc

SEQ ID NO: 1293348 - RNA, 19 nt, Artificial Sequence
  Description of Artificial Sequence: Synthetic oligonucleotide
  Sense strand starting at position 1758 of SEQ ID NO: 1241706
cugugagaaugcccuccaa

SEQ ID NO: 1293349 - RNA, 19 nt, Artificial Sequence
  Description of Artificial Sequence: Synthetic oligonucleotide
  Antisense strand to SEQ ID NO: 1293348
uuggagggcauucucacag

SEQ ID NO: 1293350 - RNA, 19 nt, Artificial Sequence
  Description of Artificial Sequence: Synthetic oligonucleotide
  Sense strand starting at position 2014 of SEQ ID NO: 1241706
cagucagaggguuaucucu

SEQ ID NO: 1293351 - RNA, 19 nt, Artificial Sequence
  Description of Artificial Sequence: Synthetic oligonucleotide
  Antisense strand to SEQ ID NO: 1293350
agagauaacccucugacug

SEQ ID NO: 1293352 - RNA, 19 nt, Artificial Sequence
  Description of Artificial Sequence: Synthetic oligonucleotide
  Sense strand starting at position 2057 of SEQ ID NO: 1241706
gggaaacuuauucggagca

SEQ ID NO: 1293353 - RNA, 19 nt, Artificial Sequence
  Description of Artificial Sequence: Synthetic oligonucleotide
  Antisense strand to SEQ ID NO: 1293352
ugcuccgaauaaguuuccc

SEQ ID NO: 1293354 - RNA, 19 nt, Artificial Sequence
  Description of Artificial Sequence: Synthetic oligonucleotide
  Sense strand starting at position 2062 of SEQ ID NO: 1241706
acuuauucggagcauccaa

SEQ ID NO: 1293355 - RNA, 19 nt, Artificial Sequence
  Description of Artificial Sequence: Synthetic oligonucleotide
  Antisense strand to SEQ ID NO: 1293354
uuggaugcuccgaauaagu

SEQ ID NO: 1293356 - RNA, 19 nt, Artificial Sequence
  Description of Artificial Sequence: Synthetic oligonucleotide
  Sense strand starting at position 2459 of SEQ ID NO: 1241706
ggcugagucugacccauau

SEQ ID NO: 1293357 - RNA, 19 nt, Artificial Sequence
  Description of Artificial Sequence: Synthetic oligonucleotide
  Antisense strand to SEQ ID NO: 1293356
auaugggucagacucagcc

SEQ ID NO: 1293358 - RNA, 19 nt, Artificial Sequence
  Description of Artificial Sequence: Synthetic oligonucleotide
  Sense strand starting at position 2618 of SEQ ID NO: 1241706
gaaagcugaccucgcauuu

SEQ ID NO: 1293359 - RNA, 19 nt, Artificial Sequence
  Description of Artificial Sequence: Synthetic oligonucleotide
  Antisense strand to SEQ ID NO: 1293358
aaaugcgaggucagcuuuc

SEQ ID NO: 1293360 - RNA, 19 nt, Artificial Sequence
  Description of Artificial Sequence: Synthetic oligonucleotide
  Sense strand starting at position 2681 of SEQ ID NO: 1241706
uguugaauuccaggacaga

SEQ ID NO: 1293361 - RNA, 19 nt, Artificial Sequence
  Description of Artificial Sequence: Synthetic oligonucleotide
  Antisense strand to SEQ ID NO: 1293360
ucuguccuggaauucaaca

SEQ ID NO: 1293362 - RNA, 19 nt, Artificial Sequence
  Description of Artificial Sequence: Synthetic oligonucleotide
  Sense strand starting at position 2928 of SEQ ID NO: 1241706
gcaaguaagacaggaaagu

SEQ ID NO: 1293363 - RNA, 19 nt, Artificial Sequence
  Description of Artificial Sequence: Synthetic oligonucleotide
  Antisense strand to SEQ ID NO: 1293362
acuuuccugucuuacuugc

SEQ ID NO: 1293364 - RNA, 19 nt, Artificial Sequence
  Description of Artificial Sequence: Synthetic oligonucleotide
  Sense strand starting at position 2943 of SEQ ID NO: 1241706
aagucauguccucacagag

SEQ ID NO: 1293365 - RNA, 19 nt, Artificial Sequence
  Description of Artificial Sequence: Synthetic oligonucleotide
  Antisense strand to SEQ ID NO: 1293364
cucugugaggacaugacuu

SEQ ID NO: 1293366 - RNA, 19 nt, Artificial Sequence
  Description of Artificial Sequence: Synthetic oligonucleotide
  Sense strand starting at position 3075 of SEQ ID NO: 1241706
aguugaagcuuauuccuaa

SEQ ID NO: 1293367 - RNA, 19 nt, Artificial Sequence
  Description of Artificial Sequence: Synthetic oligonucleotide
  Antisense strand to SEQ ID NO: 1293366
uuaggaauaagcuucaacu

SEQ ID NO: 1293368 - RNA, 19 nt, Artificial Sequence
  Description of Artificial Sequence: Synthetic oligonucleotide
  Sense strand starting at position 3076 of SEQ ID NO: 1241706
guugaagcuuauuccuaaa

SEQ ID NO: 1293369 - RNA, 19 nt, Artificial Sequence
  Description of Artificial Sequence: Synthetic oligonucleotide
  Antisense strand to SEQ ID NO: 1293368
uuuaggaauaagcuucaac

SEQ ID NO: 1293370 - RNA, 19 nt, Artificial Sequence
  Description of Artificial Sequence: Synthetic oligonucleotide
  Sense strand starting at position 3154 of SEQ ID NO: 1241706
gaauaaagaguagguguaa

SEQ ID NO: 1293371 - RNA, 19 nt, Artificial Sequence
  Description of Artificial Sequence: Synthetic oligonucleotide
  Antisense strand to SEQ ID NO: 1293370
uuacaccuacucuuuauuc

SEQ ID NO: 1293372 - RNA, 19 nt, Artificial Sequence
  Description of Artificial Sequence: Synthetic oligonucleotide
  Sense strand starting at position 3155 of SEQ ID NO: 1241706
aauaaagaguagguguaaa

SEQ ID NO: 1293373 - RNA, 19 nt, Artificial Sequence
  Description of Artificial Sequence: Synthetic oligonucleotide
  Antisense strand to SEQ ID NO: 1293372
uuuacaccuacucuuuauu

SEQ ID NO: 1293374 - RNA, 19 nt, Artificial Sequence
  Description of Artificial Sequence: Synthetic oligonucleotide
  Sense strand starting at position 3167 of SEQ ID NO: 1241706
guguaaaguccugaaggua

SEQ ID NO: 1293375 - RNA, 19 nt, Artificial Sequence
  Description of Artificial Sequence: Synthetic oligonucleotide
  Antisense strand to SEQ ID NO: 1293374
uaccuucaggacuuuacac

SEQ ID NO: 1293376 - RNA, 19 nt, Artificial Sequence
  Description of Artificial Sequence: Synthetic oligonucleotide
  Sense strand starting at position 3170 of SEQ ID NO: 1241706
uaaaguccugaagguaaga

SEQ ID NO: 1293377 - RNA, 19 nt, Artificial Sequence
  Description of Artificial Sequence: Synthetic oligonucleotide
  Antisense strand to SEQ ID NO: 1293376
ucuuaccuucaggacuuua

SEQ ID NO: 1293378 - RNA, 19 nt, Artificial Sequence
  Description of Artificial Sequence: Synthetic oligonucleotide
  Sense strand starting at position 3377 of SEQ ID NO: 1241706
caagaucaagucuguaaga

SEQ ID NO: 1293379 - RNA, 19 nt, Artificial Sequence
  Description of Artificial Sequence: Synthetic oligonucleotide
  Antisense strand to SEQ ID NO: 1293378
ucuuacagacuugaucuug

SEQ ID NO: 1293380 - RNA, 19 nt, Artificial Sequence
  Description of Artificial Sequence: Synthetic oligonucleotide
  Sense strand starting at position 3768 of SEQ ID NO: 1241706
cccuaauugccuugggaga

SEQ ID NO: 1293381 - RNA, 19 nt, Artificial Sequence
  Description of Artificial Sequence: Synthetic oligonucleotide
  Antisense strand to SEQ ID NO: 1293380
ucucccaaggcaauuaggg

SEQ ID NO: 1293382 - RNA, 19 nt, Artificial Sequence
  Description of Artificial Sequence: Synthetic oligonucleotide
  Sense strand starting at position 3769 of SEQ ID NO: 1241706
ccuaauugccuugggagaa

SEQ ID NO: 1293383 - RNA, 19 nt, Artificial Sequence
  Description of Artificial Sequence: Synthetic oligonucleotide
  Antisense strand to SEQ ID NO: 1293382
uucucccaaggcaauuagg

SEQ ID NO: 1293384 - RNA, 19 nt, Artificial Sequence
  Description of Artificial Sequence: Synthetic oligonucleotide
  Sense strand starting at position 3821 of SEQ ID NO: 1241706
agggucauccgguggaaug

SEQ ID NO: 1293385 - RNA, 19 nt, Artificial Sequence
  Description of Artificial Sequence: Synthetic oligonucleotide
  Antisense strand to SEQ ID NO: 1293384
cauuccaccggaugacccu

SEQ ID NO: 1293386 - RNA, 19 nt, Artificial Sequence
  Description of Artificial Sequence: Synthetic oligonucleotide
  Sense strand starting at position 3822 of SEQ ID NO: 1241706
gggucauccgguggaauga

SEQ ID NO: 1293387 - RNA, 19 nt, Artificial Sequence
  Description of Artificial Sequence: Synthetic oligonucleotide
  Antisense strand to SEQ ID NO: 1293386
ucauuccaccggaugaccc

SEQ ID NO: 1293388 - RNA, 19 nt, Artificial Sequence
  Description of Artificial Sequence: Synthetic oligonucleotide
  Sense strand starting at position 328 of SEQ ID NO: 1241707
uuauaagucguuuacauug

SEQ ID NO: 1293389 - RNA, 19 nt, Artificial Sequence
  Description of Artificial Sequence: Synthetic oligonucleotide
  Antisense strand to SEQ ID NO: 1293388
caauguaaacgacuuauaa

SEQ ID NO: 1293390 - RNA, 19 nt, Artificial Sequence
  Description of Artificial Sequence: Synthetic oligonucleotide
  Sense strand starting at position 618 of SEQ ID NO: 1241707
gggaguaguuauguuaaag

SEQ ID NO: 1293391 - RNA, 19 nt, Artificial Sequence
  Description of Artificial Sequence: Synthetic oligonucleotide
  Antisense strand to SEQ ID NO: 1293390
cuuuaacauaacuacuccc

SEQ ID NO: 1293392 - RNA, 19 nt, Artificial Sequence
  Description of Artificial Sequence: Synthetic oligonucleotide
  Sense strand starting at position 839 of SEQ ID NO: 1241707
gaauaucugucaguccaga

SEQ ID NO: 1293393 - RNA, 19 nt, Artificial Sequence
  Description of Artificial Sequence: Synthetic oligonucleotide
  Antisense strand to SEQ ID NO: 1293392
ucuggacugacagauauuc

SEQ ID NO: 1293394 - RNA, 19 nt, Artificial Sequence
  Description of Artificial Sequence: Synthetic oligonucleotide
  Sense strand starting at position 867 of SEQ ID NO: 1241707
gguugauaauaagcauugu

SEQ ID NO: 1293395 - RNA, 19 nt, Artificial Sequence
  Description of Artificial Sequence: Synthetic oligonucleotide
  Antisense strand to SEQ ID NO: 1293394
acaaugcuuauuaucaacc

SEQ ID NO: 1293396 - RNA, 19 nt, Artificial Sequence
  Description of Artificial Sequence: Synthetic oligonucleotide
  Sense strand starting at position 871 of SEQ ID NO: 1241707
gauaauaagcauugucuug

SEQ ID NO: 1293397 - RNA, 19 nt, Artificial Sequence
  Description of Artificial Sequence: Synthetic oligonucleotide
  Antisense strand to SEQ ID NO: 1293396
caagacaaugcuuauuauc

SEQ ID NO: 1293398 - RNA, 19 nt, Artificial Sequence
  Description of Artificial Sequence: Synthetic oligonucleotide
  Sense strand starting at position 921 of SEQ ID NO: 1241707
gccugaacuugguugauga

SEQ ID NO: 1293399 - RNA, 19 nt, Artificial Sequence
  Description of Artificial Sequence: Synthetic oligonucleotide
  Antisense strand to SEQ ID NO: 1293398
ucaucaaccaaguucaggc

SEQ ID NO: 1293400 - RNA, 19 nt, Artificial Sequence
  Description of Artificial Sequence: Synthetic oligonucleotide
  Sense strand starting at position 922 of SEQ ID NO: 1241707
ccugaacuugguugaugau

SEQ ID NO: 1293401 - RNA, 19 nt, Artificial Sequence
  Description of Artificial Sequence: Synthetic oligonucleotide
  Antisense strand to SEQ ID NO: 1293400
aucaucaaccaaguucagg

SEQ ID NO: 1293402 - RNA, 19 nt, Artificial Sequence
  Description of Artificial Sequence: Synthetic oligonucleotide
  Sense strand starting at position 945 of SEQ ID NO: 1241707
caugguuaauuaguauaga

SEQ ID NO: 1293403 - RNA, 19 nt, Artificial Sequence
  Description of Artificial Sequence: Synthetic oligonucleotide
  Antisense strand to SEQ ID NO: 1293402
ucuauacuaauuaaccaug

SEQ ID NO: 1293404 - RNA, 19 nt, Artificial Sequence
  Description of Artificial Sequence: Synthetic oligonucleotide
  Sense strand starting at position 948 of SEQ ID NO: 1241707
gguuaauuaguauagaguc

SEQ ID NO: 1293405 - RNA, 19 nt, Artificial Sequence
  Description of Artificial Sequence: Synthetic oligonucleotide
  Antisense strand to SEQ ID NO: 1293404
gacucuauacuaauuaacc

SEQ ID NO: 1293406 - RNA, 19 nt, Artificial Sequence
  Description of Artificial Sequence: Synthetic oligonucleotide
  Sense strand starting at position 1008 of SEQ ID NO: 1241707
agcacucguguucaggaaa

SEQ ID NO: 1293407 - RNA, 19 nt, Artificial Sequence
  Description of Artificial Sequence: Synthetic oligonucleotide
  Antisense strand to SEQ ID NO: 1293406
uuuccugaacacgagugcu

SEQ ID NO: 1293408 - RNA, 19 nt, Artificial Sequence
  Description of Artificial Sequence: Synthetic oligonucleotide
  Sense strand starting at position 1085 of SEQ ID NO: 1241707
gaguuaagagaaugaugcu

SEQ ID NO: 1293409 - RNA, 19 nt, Artificial Sequence
  Description of Artificial Sequence: Synthetic oligonucleotide
  Antisense strand to SEQ ID NO: 1293408
agcaucauucucuuaacuc

SEQ ID NO: 1293410 - RNA, 19 nt, Artificial Sequence
  Description of Artificial Sequence: Synthetic oligonucleotide
  Sense strand starting at position 1097 of SEQ ID NO: 1241707
ugaugcuuucgagggacca

SEQ ID NO: 1293411 - RNA, 19 nt, Artificial Sequence
  Description of Artificial Sequence: Synthetic oligonucleotide
  Antisense strand to SEQ ID NO: 1293410
uggucccucgaaagcauca

SEQ ID NO: 1293412 - RNA, 19 nt, Artificial Sequence
  Description of Artificial Sequence: Synthetic oligonucleotide
  Sense strand starting at position 1176 of SEQ ID NO: 1241707
ccagaaugugguugggaga

SEQ ID NO: 1293413 - RNA, 19 nt, Artificial Sequence
  Description of Artificial Sequence: Synthetic oligonucleotide
  Antisense strand to SEQ ID NO: 1293412
ucucccaaccacauucugg

SEQ ID NO: 1293414 - RNA, 19 nt, Artificial Sequence
  Description of Artificial Sequence: Synthetic oligonucleotide
  Sense strand starting at position 2271 of SEQ ID NO: 1241707
ccaauuagagugugaggaa

SEQ ID NO: 1293415 - RNA, 19 nt, Artificial Sequence
  Description of Artificial Sequence: Synthetic oligonucleotide
  Antisense strand to SEQ ID NO: 1293414
uuccucacacucuaauugg

SEQ ID NO: 1293416 - RNA, 19 nt, Artificial Sequence
  Description of Artificial Sequence: Synthetic oligonucleotide
  Sense strand starting at position 2404 of SEQ ID NO: 1241707
acaggcagcucgcuuauuu

SEQ ID NO: 1293417 - RNA, 19 nt, Artificial Sequence
  Description of Artificial Sequence: Synthetic oligonucleotide
  Antisense strand to SEQ ID NO: 1293416
aaauaagcgagcugccugu

SEQ ID NO: 1293418 - RNA, 19 nt, Artificial Sequence
  Description of Artificial Sequence: Synthetic oligonucleotide
  Sense strand starting at position 2647 of SEQ ID NO: 1241707
ugccaauaacuggaagcua

SEQ ID NO: 1293419 - RNA, 19 nt, Artificial Sequence
  Description of Artificial Sequence: Synthetic oligonucleotide
  Antisense strand to SEQ ID NO: 1293418
uagcuuccaguuauuggca

SEQ ID NO: 1293420 - RNA, 19 nt, Artificial Sequence
  Description of Artificial Sequence: Synthetic oligonucleotide
  Sense strand starting at position 2791 of SEQ ID NO: 1241707
aggcuuauaguaggaguau

SEQ ID NO: 1293421 - RNA, 19 nt, Artificial Sequence
  Description of Artificial Sequence: Synthetic oligonucleotide
  Antisense strand to SEQ ID NO: 1293420
auacuccuacuauaagccu

SEQ ID NO: 1293422 - RNA, 19 nt, Artificial Sequence
  Description of Artificial Sequence: Synthetic oligonucleotide
  Sense strand starting at position 2855 of SEQ ID NO: 1241707
guuagaaagcaaggaaauu

SEQ ID NO: 1293423 - RNA, 19 nt, Artificial Sequence
  Description of Artificial Sequence: Synthetic oligonucleotide
  Antisense strand to SEQ ID NO: 1293422
aauuuccuugcuuucuaac

SEQ ID NO: 1293424 - RNA, 19 nt, Artificial Sequence
  Description of Artificial Sequence: Synthetic oligonucleotide
  Sense strand starting at position 2887 of SEQ ID NO: 1241707
auuagagacuuucuguuau

SEQ ID NO: 1293425 - RNA, 19 nt, Artificial Sequence
  Description of Artificial Sequence: Synthetic oligonucleotide
  Antisense strand to SEQ ID NO: 1293424
auaacagaaagucucuaau

SEQ ID NO: 1293426 - RNA, 19 nt, Artificial Sequence
  Description of Artificial Sequence: Synthetic oligonucleotide
  Sense strand starting at position 2917 of SEQ ID NO: 1241707
uuaguaucauaauugagag

SEQ ID NO: 1293427 - RNA, 19 nt, Artificial Sequence
  Description of Artificial Sequence: Synthetic oligonucleotide
  Antisense strand to SEQ ID NO: 1293426
cucucaauuaugauacuaa

SEQ ID NO: 1293428 - RNA, 19 nt, Artificial Sequence
  Description of Artificial Sequence: Synthetic oligonucleotide
  Sense strand starting at position 2989 of SEQ ID NO: 1241707
cugagugaccucuaugugu

SEQ ID NO: 1293429 - RNA, 19 nt, Artificial Sequence
  Description of Artificial Sequence: Synthetic oligonucleotide
  Antisense strand to SEQ ID NO: 1293428
acacauagaggucacucag

SEQ ID NO: 1293430 - RNA, 19 nt, Artificial Sequence
  Description of Artificial Sequence: Synthetic oligonucleotide
  Sense strand starting at position 3032 of SEQ ID NO: 1241707
aauaguugucgugaagauu

SEQ ID NO: 1293431 - RNA, 19 nt, Artificial Sequence
  Description of Artificial Sequence: Synthetic oligonucleotide
  Antisense strand to SEQ ID NO: 1293430
aaucuucacgacaacuauu

SEQ ID NO: 1293432 - RNA, 19 nt, Artificial Sequence
  Description of Artificial Sequence: Synthetic oligonucleotide
  Sense strand starting at position 3035 of SEQ ID NO: 1241707
aguugucgugaagauugaa

SEQ ID NO: 1293433 - RNA, 19 nt, Artificial Sequence
  Description of Artificial Sequence: Synthetic oligonucleotide
  Antisense strand to SEQ ID NO: 1293432
uucaaucuucacgacaacu

SEQ ID NO: 1293434 - RNA, 19 nt, Artificial Sequence
  Description of Artificial Sequence: Synthetic oligonucleotide
  Sense strand starting at position 3038 of SEQ ID NO: 1241707
ugucgugaagauugaauaa

SEQ ID NO: 1293435 - RNA, 19 nt, Artificial Sequence
  Description of Artificial Sequence: Synthetic oligonucleotide
  Antisense strand to SEQ ID NO: 1293434
uuauucaaucuucacgaca

SEQ ID NO: 1293436 - RNA, 19 nt, Artificial Sequence
  Description of Artificial Sequence: Synthetic oligonucleotide
  Sense strand starting at position 3230 of SEQ ID NO: 1241707
ugaauaaucuaacagaagg

SEQ ID NO: 1293437 - RNA, 19 nt, Artificial Sequence
  Description of Artificial Sequence: Synthetic oligonucleotide
  Antisense strand to SEQ ID NO: 1293436
ccuucuguuagauuauuca

SEQ ID NO: 1293438 - RNA, 19 nt, Artificial Sequence
  Description of Artificial Sequence: Synthetic oligonucleotide
  Sense strand starting at position 3470 of SEQ ID NO: 1241707
cugaauggcagugaugagu

SEQ ID NO: 1293439 - RNA, 19 nt, Artificial Sequence
  Description of Artificial Sequence: Synthetic oligonucleotide
  Antisense strand to SEQ ID NO: 1293438
acucaucacugccauucag

SEQ ID NO: 1293440 - RNA, 19 nt, Artificial Sequence
  Description of Artificial Sequence: Synthetic oligonucleotide
  Sense strand starting at position 3481 of SEQ ID NO: 1241707
ugaugagucuaaccaggua

SEQ ID NO: 1293441 - RNA, 19 nt, Artificial Sequence
  Description of Artificial Sequence: Synthetic oligonucleotide
  Antisense strand to SEQ ID NO: 1293440
uaccugguuagacucauca

SEQ ID NO: 1293442 - RNA, 19 nt, Artificial Sequence
  Description of Artificial Sequence: Synthetic oligonucleotide
  Sense strand starting at position 3484 of SEQ ID NO: 1241707
ugagucuaaccagguagaa

SEQ ID NO: 1293443 - RNA, 19 nt, Artificial Sequence
  Description of Artificial Sequence: Synthetic oligonucleotide
  Antisense strand to SEQ ID NO: 1293442
uucuaccugguuagacuca

SEQ ID NO: 1293444 - RNA, 19 nt, Artificial Sequence
  Description of Artificial Sequence: Synthetic oligonucleotide
  Sense strand starting at position 3562 of SEQ ID NO: 1241707
gagugagcugaaugacucu

SEQ ID NO: 1293445 - RNA, 19 nt, Artificial Sequence
  Description of Artificial Sequence: Synthetic oligonucleotide
  Antisense strand to SEQ ID NO: 1293444
agagucauucagcucacuc

SEQ ID NO: 1293446 - RNA, 19 nt, Artificial Sequence
  Description of Artificial Sequence: Synthetic oligonucleotide
  Sense strand starting at position 3568 of SEQ ID NO: 1241707
gcugaaugacucuggagaa

SEQ ID NO: 1293447 - RNA, 19 nt, Artificial Sequence
  Description of Artificial Sequence: Synthetic oligonucleotide
  Antisense strand to SEQ ID NO: 1293446
uucuccagagucauucagc

SEQ ID NO: 1293448 - RNA, 19 nt, Artificial Sequence
  Description of Artificial Sequence: Synthetic oligonucleotide
  Sense strand starting at position 3584 of SEQ ID NO: 1241707
gaaggcuugcgaggaagau

SEQ ID NO: 1293449 - RNA, 19 nt, Artificial Sequence
  Description of Artificial Sequence: Synthetic oligonucleotide
  Antisense strand to SEQ ID NO: 1293448
aucuuccucgcaagccuuc

SEQ ID NO: 1293450 - RNA, 19 nt, Artificial Sequence
  Description of Artificial Sequence: Synthetic oligonucleotide
  Sense strand starting at position 3597 of SEQ ID NO: 1241707
gaagaugugcaaugagaca

SEQ ID NO: 1293451 - RNA, 19 nt, Artificial Sequence
  Description of Artificial Sequence: Synthetic oligonucleotide
  Antisense strand to SEQ ID NO: 1293450
ugucucauugcacaucuuc

SEQ ID NO: 1293452 - RNA, 19 nt, Artificial Sequence
  Description of Artificial Sequence: Synthetic oligonucleotide
  Sense strand starting at position 3668 of SEQ ID NO: 1241707
ggguguucugaggaaaccu

SEQ ID NO: 1293453 - RNA, 19 nt, Artificial Sequence
  Description of Artificial Sequence: Synthetic oligonucleotide
  Antisense strand to SEQ ID NO: 1293452
agguuuccucagaacaccc

SEQ ID NO: 1293454 - RNA, 19 nt, Artificial Sequence
  Description of Artificial Sequence: Synthetic oligonucleotide
  Sense strand starting at position 3697 of SEQ ID NO: 1241707
gggugucgagucuagaaag

SEQ ID NO: 1293455 - RNA, 19 nt, Artificial Sequence
  Description of Artificial Sequence: Synthetic oligonucleotide
  Antisense strand to SEQ ID NO: 1293454
cuuucuagacucgacaccc

SEQ ID NO: 1293456 - RNA, 19 nt, Artificial Sequence
  Description of Artificial Sequence: Synthetic oligonucleotide
  Sense strand starting at position 3747 of SEQ ID NO: 1241707
aaaggagucuggcuagauu

SEQ ID NO: 1293457 - RNA, 19 nt, Artificial Sequence
  Description of Artificial Sequence: Synthetic oligonucleotide
  Antisense strand to SEQ ID NO: 1293456
aaucuagccagacuccuuu

SEQ ID NO: 1293458 - RNA, 19 nt, Artificial Sequence
  Description of Artificial Sequence: Synthetic oligonucleotide
  Sense strand starting at position 3810 of SEQ ID NO: 1241707
ugucuuguuccgccacuua

SEQ ID NO: 1293459 - RNA, 19 nt, Artificial Sequence
  Description of Artificial Sequence: Synthetic oligonucleotide
  Antisense strand to SEQ ID NO: 1293458
uaaguggcggaacaagaca

SEQ ID NO: 1293460 - RNA, 19 nt, Artificial Sequence
  Description of Artificial Sequence: Synthetic oligonucleotide
  Sense strand starting at position 3831 of SEQ ID NO: 1241707
cacuauguauagucuugga

SEQ ID NO: 1293461 - RNA, 19 nt, Artificial Sequence
  Description of Artificial Sequence: Synthetic oligonucleotide
  Antisense strand to SEQ ID NO: 1293460
uccaagacuauacauagug

SEQ ID NO: 1293462 - RNA, 19 nt, Artificial Sequence
  Description of Artificial Sequence: Synthetic oligonucleotide
  Sense strand starting at position 3925 of SEQ ID NO: 1241707
uucugugagcaucagugau

SEQ ID NO: 1293463 - RNA, 19 nt, Artificial Sequence
  Description of Artificial Sequence: Synthetic oligonucleotide
  Antisense strand to SEQ ID NO: 1293462
aucacugaugcucacagaa

SEQ ID NO: 1293464 - RNA, 19 nt, Artificial Sequence
  Description of Artificial Sequence: Synthetic oligonucleotide
  Sense strand starting at position 3929 of SEQ ID NO: 1241707
gugagcaucagugauauac

SEQ ID NO: 1293465 - RNA, 19 nt, Artificial Sequence
  Description of Artificial Sequence: Synthetic oligonucleotide
  Antisense strand to SEQ ID NO: 1293464
guauaucacugaugcucac

SEQ ID NO: 1293466 - RNA, 19 nt, Artificial Sequence
  Description of Artificial Sequence: Synthetic oligonucleotide
  Sense strand starting at position 3939 of SEQ ID NO: 1241707
gugauauacagaugaucug

SEQ ID NO: 1293467 - RNA, 19 nt, Artificial Sequence
  Description of Artificial Sequence: Synthetic oligonucleotide
  Antisense strand to SEQ ID NO: 1293466
cagaucaucuguauaucac

SEQ ID NO: 1293468 - RNA, 19 nt, Artificial Sequence
  Description of Artificial Sequence: Synthetic oligonucleotide
  Sense strand starting at position 49 of SEQ ID NO: 1241708
uauaauauuggaugucagu

SEQ ID NO: 1293469 - RNA, 19 nt, Artificial Sequence
  Description of Artificial Sequence: Synthetic oligonucleotide
  Antisense strand to SEQ ID NO: 1293468
acugacauccaauauuaua

SEQ ID NO: 1293470 - RNA, 19 nt, Artificial Sequence
  Description of Artificial Sequence: Synthetic oligonucleotide
  Sense strand starting at position 105 of SEQ ID NO: 1241708
acuacuugucgcuaaacca

SEQ ID NO: 1293471 - RNA, 19 nt, Artificial Sequence
  Description of Artificial Sequence: Synthetic oligonucleotide
  Antisense strand to SEQ ID NO: 1293470
ugguuuagcgacaaguagu

SEQ ID NO: 1293472 - RNA, 19 nt, Artificial Sequence
  Description of Artificial Sequence: Synthetic oligonucleotide
  Sense strand starting at position 214 of SEQ ID NO: 1241708
ccuaguuauuuauaggaca

SEQ ID NO: 1293473 - RNA, 19 nt, Artificial Sequence
  Description of Artificial Sequence: Synthetic oligonucleotide
  Antisense strand to SEQ ID NO: 1293472
uguccuauaaauaacuagg

SEQ ID NO: 1293474 - RNA, 19 nt, Artificial Sequence
  Description of Artificial Sequence: Synthetic oligonucleotide
  Sense strand starting at position 217 of SEQ ID NO: 1241708
aguuauuuauaggacacua

SEQ ID NO: 1293475 - RNA, 19 nt, Artificial Sequence
  Description of Artificial Sequence: Synthetic oligonucleotide
  Antisense strand to SEQ ID NO: 1293474
uaguguccuauaaauaacu

SEQ ID NO: 1293476 - RNA, 19 nt, Artificial Sequence
  Description of Artificial Sequence: Synthetic oligonucleotide
  Sense strand starting at position 228 of SEQ ID NO: 1241708
ggacacuaucacuauugca

SEQ ID NO: 1293477 - RNA, 19 nt, Artificial Sequence
  Description of Artificial Sequence: Synthetic oligonucleotide
  Antisense strand to SEQ ID NO: 1293476
ugcaauagugauagugucc

SEQ ID NO: 1293478 - RNA, 19 nt, Artificial Sequence
  Description of Artificial Sequence: Synthetic oligonucleotide
  Sense strand starting at position 319 of SEQ ID NO: 1241708
gugucaaaucuauacuaga

SEQ ID NO: 1293479 - RNA, 19 nt, Artificial Sequence
  Description of Artificial Sequence: Synthetic oligonucleotide
  Antisense strand to SEQ ID NO: 1293478
ucuaguauagauuugacac

SEQ ID NO: 1293480 - RNA, 19 nt, Artificial Sequence
  Description of Artificial Sequence: Synthetic oligonucleotide
  Sense strand starting at position 420 of SEQ ID NO: 1241708
uguuaugucagucaagaua

SEQ ID NO: 1293481 - RNA, 19 nt, Artificial Sequence
  Description of Artificial Sequence: Synthetic oligonucleotide
  Antisense strand to SEQ ID NO: 1293480
uaucuugacugacauaaca

SEQ ID NO: 1293482 - RNA, 19 nt, Artificial Sequence
  Description of Artificial Sequence: Synthetic oligonucleotide
  Sense strand starting at position 714 of SEQ ID NO: 1241708
ugaguacaaccuuaagcua

SEQ ID NO: 1293483 - RNA, 19 nt, Artificial Sequence
  Description of Artificial Sequence: Synthetic oligonucleotide
  Antisense strand to SEQ ID NO: 1293482
uagcuuaagguuguacuca

SEQ ID NO: 1293484 - RNA, 19 nt, Artificial Sequence
  Description of Artificial Sequence: Synthetic oligonucleotide
  Sense strand starting at position 779 of SEQ ID NO: 1241708
cucagucacucacuggaau

SEQ ID NO: 1293485 - RNA, 19 nt, Artificial Sequence
  Description of Artificial Sequence: Synthetic oligonucleotide
  Antisense strand to SEQ ID NO: 1293484
auuccagugagugacugag

SEQ ID NO: 1293486 - RNA, 19 nt, Artificial Sequence
  Description of Artificial Sequence: Synthetic oligonucleotide
  Sense strand starting at position 1043 of SEQ ID NO: 1241708
cugaguuauuaacugaagu

SEQ ID NO: 1293487 - RNA, 19 nt, Artificial Sequence
  Description of Artificial Sequence: Synthetic oligonucleotide
  Antisense strand to SEQ ID NO: 1293486
acuucaguuaauaacucag

SEQ ID NO: 1293488 - RNA, 19 nt, Artificial Sequence
  Description of Artificial Sequence: Synthetic oligonucleotide
  Sense strand starting at position 1122 of SEQ ID NO: 1241708
guaaccacucaauagucau

SEQ ID NO: 1293489 - RNA, 19 nt, Artificial Sequence
  Description of Artificial Sequence: Synthetic oligonucleotide
  Antisense strand to SEQ ID NO: 1293488
augacuauugagugguuac

SEQ ID NO: 1293490 - RNA, 19 nt, Artificial Sequence
  Description of Artificial Sequence: Synthetic oligonucleotide
  Sense strand starting at position 1328 of SEQ ID NO: 1241708
gagugucaugccuacaaau

SEQ ID NO: 1293491 - RNA, 19 nt, Artificial Sequence
  Description of Artificial Sequence: Synthetic oligonucleotide
  Antisense strand to SEQ ID NO: 1293490
auuuguaggcaugacacuc

SEQ ID NO: 1293492 - RNA, 19 nt, Artificial Sequence
  Description of Artificial Sequence: Synthetic oligonucleotide
  Sense strand starting at position 1330 of SEQ ID NO: 1241708
gugucaugccuacaaauuc

SEQ ID NO: 1293493 - RNA, 19 nt, Artificial Sequence
  Description of Artificial Sequence: Synthetic oligonucleotide
  Antisense strand to SEQ ID NO: 1293492
gaauuuguaggcaugacac

SEQ ID NO: 1293494 - RNA, 19 nt, Artificial Sequence
  Description of Artificial Sequence: Synthetic oligonucleotide
  Sense strand starting at position 1366 of SEQ ID NO: 1241708
cuaguuaacugacuagaau

SEQ ID NO: 1293495 - RNA, 19 nt, Artificial Sequence
  Description of Artificial Sequence: Synthetic oligonucleotide
  Antisense strand to SEQ ID NO: 1293494
auucuagucaguuaacuag

SEQ ID NO: 1293496 - RNA, 19 nt, Artificial Sequence
  Description of Artificial Sequence: Synthetic oligonucleotide
  Sense strand starting at position 1375 of SEQ ID NO: 1241708
ugacuagaauucuugguag

SEQ ID NO: 1293497 - RNA, 19 nt, Artificial Sequence
  Description of Artificial Sequence: Synthetic oligonucleotide
  Antisense strand to SEQ ID NO: 1293496
cuaccaagaauucuaguca

SEQ ID NO: 1293498 - RNA, 19 nt, Artificial Sequence
  Description of Artificial Sequence: Synthetic oligonucleotide
  Sense strand starting at position 1377 of SEQ ID NO: 1241708
acuagaauucuugguagac

SEQ ID NO: 1293499 - RNA, 19 nt, Artificial Sequence
  Description of Artificial Sequence: Synthetic oligonucleotide
  Antisense strand to SEQ ID NO: 1293498
gucuaccaagaauucuagu

SEQ ID NO: 1293500 - RNA, 19 nt, Artificial Sequence
  Description of Artificial Sequence: Synthetic oligonucleotide
  Sense strand starting at position 1378 of SEQ ID NO: 1241708
cuagaauucuugguagacc

SEQ ID NO: 1293501 - RNA, 19 nt, Artificial Sequence
  Description of Artificial Sequence: Synthetic oligonucleotide
  Antisense strand to SEQ ID NO: 1293500
ggucuaccaagaauucuag

SEQ ID NO: 1293502 - RNA, 19 nt, Artificial Sequence
  Description of Artificial Sequence: Synthetic oligonucleotide
  Sense strand starting at position 1447 of SEQ ID NO: 1241708
gagcgaugugcuccacugu

SEQ ID NO: 1293503 - RNA, 19 nt, Artificial Sequence
  Description of Artificial Sequence: Synthetic oligonucleotide
  Antisense strand to SEQ ID NO: 1293502
acaguggagcacaucgcuc

SEQ ID NO: 1293504 - RNA, 19 nt, Artificial Sequence
  Description of Artificial Sequence: Synthetic oligonucleotide
  Sense strand starting at position 1546 of SEQ ID NO: 1241708
acacaucaccuucggagau

SEQ ID NO: 1293505 - RNA, 19 nt, Artificial Sequence
  Description of Artificial Sequence: Synthetic oligonucleotide
  Antisense strand to SEQ ID NO: 1293504
aucuccgaaggugaugugu

SEQ ID NO: 1293506 - RNA, 19 nt, Artificial Sequence
  Description of Artificial Sequence: Synthetic oligonucleotide
  Sense strand starting at position 1548 of SEQ ID NO: 1241708
acaucaccuucggagauuu

SEQ ID NO: 1293507 - RNA, 19 nt, Artificial Sequence
  Description of Artificial Sequence: Synthetic oligonucleotide
  Antisense strand to SEQ ID NO: 1293506
aaaucuccgaaggugaugu

SEQ ID NO: 1293508 - RNA, 19 nt, Artificial Sequence
  Description of Artificial Sequence: Synthetic oligonucleotide
  Sense strand starting at position 1618 of SEQ ID NO: 1241708
cccggaucucaagaguucu

SEQ ID NO: 1293509 - RNA, 19 nt, Artificial Sequence
  Description of Artificial Sequence: Synthetic oligonucleotide
  Antisense strand to SEQ ID NO: 1293508
agaacucuugagauccggg

SEQ ID NO: 1293510 - RNA, 19 nt, Artificial Sequence
  Description of Artificial Sequence: Synthetic oligonucleotide
  Sense strand starting at position 2493 of SEQ ID NO: 1241708
ucaagucgugauccgugua

SEQ ID NO: 1293511 - RNA, 19 nt, Artificial Sequence
  Description of Artificial Sequence: Synthetic oligonucleotide
  Antisense strand to SEQ ID NO: 1293510
uacacggaucacgacuuga

SEQ ID NO: 1293512 - RNA, 19 nt, Artificial Sequence
  Description of Artificial Sequence: Synthetic oligonucleotide
  Sense strand starting at position 2503 of SEQ ID NO: 1241708
auccguguaagaggagaua

SEQ ID NO: 1293513 - RNA, 19 nt, Artificial Sequence
  Description of Artificial Sequence: Synthetic oligonucleotide
  Antisense strand to SEQ ID NO: 1293512
uaucuccucuuacacggau

SEQ ID NO: 1293514 - RNA, 19 nt, Artificial Sequence
  Description of Artificial Sequence: Synthetic oligonucleotide
  Sense strand starting at position 2806 of SEQ ID NO: 1241708
guggguucugcagaagaca

SEQ ID NO: 1293515 - RNA, 19 nt, Artificial Sequence
  Description of Artificial Sequence: Synthetic oligonucleotide
  Antisense strand to SEQ ID NO: 1293514
ugucuucugcagaacccac

SEQ ID NO: 1293516 - RNA, 19 nt, Artificial Sequence
  Description of Artificial Sequence: Synthetic oligonucleotide
  Sense strand starting at position 2827 of SEQ ID NO: 1241708
cagcuugagauugguguga

SEQ ID NO: 1293517 - RNA, 19 nt, Artificial Sequence
  Description of Artificial Sequence: Synthetic oligonucleotide
  Antisense strand to SEQ ID NO: 1293516
ucacaccaaucucaagcug

SEQ ID NO: 1293518 - RNA, 19 nt, Artificial Sequence
  Description of Artificial Sequence: Synthetic oligonucleotide
  Sense strand starting at position 2850 of SEQ ID NO: 1241708
uggugauacuucccuagag

SEQ ID NO: 1293519 - RNA, 19 nt, Artificial Sequence
  Description of Artificial Sequence: Synthetic oligonucleotide
  Antisense strand to SEQ ID NO: 1293518
cucuagggaaguaucacca

SEQ ID NO: 1293520 - RNA, 19 nt, Artificial Sequence
  Description of Artificial Sequence: Synthetic oligonucleotide
  Sense strand starting at position 2851 of SEQ ID NO: 1241708
ggugauacuucccuagaga

SEQ ID NO: 1293521 - RNA, 19 nt, Artificial Sequence
  Description of Artificial Sequence: Synthetic oligonucleotide
  Antisense strand to SEQ ID NO: 1293520
ucucuagggaaguaucacc

SEQ ID NO: 1293522 - RNA, 19 nt, Artificial Sequence
  Description of Artificial Sequence: Synthetic oligonucleotide
  Sense strand starting at position 2958 of SEQ ID NO: 1241708
ugugaacugccacaauuaa

SEQ ID NO: 1293523 - RNA, 19 nt, Artificial Sequence
  Description of Artificial Sequence: Synthetic oligonucleotide
  Antisense strand to SEQ ID NO: 1293522
uuaauuguggcaguucaca

SEQ ID NO: 1293524 - RNA, 19 nt, Artificial Sequence
  Description of Artificial Sequence: Synthetic oligonucleotide
  Sense strand starting at position 3001 of SEQ ID NO: 1241708
agucuuccagguuaaacau

SEQ ID NO: 1293525 - RNA, 19 nt, Artificial Sequence
  Description of Artificial Sequence: Synthetic oligonucleotide
  Antisense strand to SEQ ID NO: 1293524
auguuuaaccuggaagacu

SEQ ID NO: 1293526 - RNA, 19 nt, Artificial Sequence
  Description of Artificial Sequence: Synthetic oligonucleotide
  Sense strand starting at position 3546 of SEQ ID NO: 1241708
uacagugaggugugguaaa

SEQ ID NO: 1293527 - RNA, 19 nt, Artificial Sequence
  Description of Artificial Sequence: Synthetic oligonucleotide
  Antisense strand to SEQ ID NO: 1293526
uuuaccacaccucacugua

SEQ ID NO: 1293528 - RNA, 19 nt, Artificial Sequence
  Description of Artificial Sequence: Synthetic oligonucleotide
  Sense strand starting at position 3553 of SEQ ID NO: 1241708
aggugugguaaaugauauu

SEQ ID NO: 1293529 - RNA, 19 nt, Artificial Sequence
  Description of Artificial Sequence: Synthetic oligonucleotide
  Antisense strand to SEQ ID NO: 1293528
aauaucauuuaccacaccu

SEQ ID NO: 1293530 - RNA, 19 nt, Artificial Sequence
  Description of Artificial Sequence: Synthetic oligonucleotide
  Sense strand starting at position 3576 of SEQ ID NO: 1241708
uggaucguauccuuuagga

SEQ ID NO: 1293531 - RNA, 19 nt, Artificial Sequence
  Description of Artificial Sequence: Synthetic oligonucleotide
  Antisense strand to SEQ ID NO: 1293530
uccuaaaggauacgaucca

SEQ ID NO: 1293532 - RNA, 19 nt, Artificial Sequence
  Description of Artificial Sequence: Synthetic oligonucleotide
  Sense strand starting at position 3578 of SEQ ID NO: 1241708
gaucguauccuuuaggaua

SEQ ID NO: 1293533 - RNA, 19 nt, Artificial Sequence
  Description of Artificial Sequence: Synthetic oligonucleotide
  Antisense strand to SEQ ID NO: 1293532
uauccuaaaggauacgauc

SEQ ID NO: 1293534 - RNA, 19 nt, Artificial Sequence
  Description of Artificial Sequence: Synthetic oligonucleotide
  Sense strand starting at position 3617 of SEQ ID NO: 1241708
ucagauugggcuugugaaa

SEQ ID NO: 1293535 - RNA, 19 nt, Artificial Sequence
  Description of Artificial Sequence: Synthetic oligonucleotide
  Antisense strand to SEQ ID NO: 1293534
uuucacaagcccaaucuga

SEQ ID NO: 1293536 - RNA, 19 nt, Artificial Sequence
  Description of Artificial Sequence: Synthetic oligonucleotide
  Sense strand starting at position 3628 of SEQ ID NO: 1241708
uugugaaagucuucugaga

SEQ ID NO: 1293537 - RNA, 19 nt, Artificial Sequence
  Description of Artificial Sequence: Synthetic oligonucleotide
  Antisense strand to SEQ ID NO: 1293536
ucucagaagacuuucacaa

SEQ ID NO: 1293538 - RNA, 19 nt, Artificial Sequence
  Description of Artificial Sequence: Synthetic oligonucleotide
  Sense strand starting at position 3653 of SEQ ID NO: 1241708
gcuugaacugaguguugaa

SEQ ID NO: 1293539 - RNA, 19 nt, Artificial Sequence
  Description of Artificial Sequence: Synthetic oligonucleotide
  Antisense strand to SEQ ID NO: 1293538
uucaacacucaguucaagc

SEQ ID NO: 1293540 - RNA, 19 nt, Artificial Sequence
  Description of Artificial Sequence: Synthetic oligonucleotide
  Sense strand starting at position 3725 of SEQ ID NO: 1241708
acauucuaaggaugaaguu

SEQ ID NO: 1293541 - RNA, 19 nt, Artificial Sequence
  Description of Artificial Sequence: Synthetic oligonucleotide
  Antisense strand to SEQ ID NO: 1293540
aacuucauccuuagaaugu

SEQ ID NO: 1293542 - RNA, 19 nt, Artificial Sequence
  Description of Artificial Sequence: Synthetic oligonucleotide
  Sense strand starting at position 3731 of SEQ ID NO: 1241708
uaaggaugaaguugugaug

SEQ ID NO: 1293543 - RNA, 19 nt, Artificial Sequence
  Description of Artificial Sequence: Synthetic oligonucleotide
  Antisense strand to SEQ ID NO: 1293542
caucacaacuucauccuua

SEQ ID NO: 1293544 - RNA, 19 nt, Artificial Sequence
  Description of Artificial Sequence: Synthetic oligonucleotide
  Sense strand starting at position 3764 of SEQ ID NO: 1241708
gaagaacuuccauguggcu

SEQ ID NO: 1293545 - RNA, 19 nt, Artificial Sequence
  Description of Artificial Sequence: Synthetic oligonucleotide
  Antisense strand to SEQ ID NO: 1293544
agccacauggaaguucuuc

SEQ ID NO: 1293546 - RNA, 19 nt, Artificial Sequence
  Description of Artificial Sequence: Synthetic oligonucleotide
  Sense strand starting at position 3861 of SEQ ID NO: 1241708
uugagaagcuaagaaauuu

SEQ ID NO: 1293547 - RNA, 19 nt, Artificial Sequence
  Description of Artificial Sequence: Synthetic oligonucleotide
  Antisense strand to SEQ ID NO: 1293546
aaauuucuuagcuucucaa

SEQ ID NO: 1293548 - RNA, 19 nt, Artificial Sequence
  Description of Artificial Sequence: Synthetic oligonucleotide
  Sense strand starting at position 414 of SEQ ID NO: 1241709
uuuggacaugguuggcaua

SEQ ID NO: 1293549 - RNA, 19 nt, Artificial Sequence
  Description of Artificial Sequence: Synthetic oligonucleotide
  Antisense strand to SEQ ID NO: 1293548
uaugccaaccauguccaaa

SEQ ID NO: 1293550 - RNA, 19 nt, Artificial Sequence
  Description of Artificial Sequence: Synthetic oligonucleotide
  Sense strand starting at position 416 of SEQ ID NO: 1241709
uggacaugguuggcauaua

SEQ ID NO: 1293551 - RNA, 19 nt, Artificial Sequence
  Description of Artificial Sequence: Synthetic oligonucleotide
  Antisense strand to SEQ ID NO: 1293550
uauaugccaaccaugucca

SEQ ID NO: 1293552 - RNA, 19 nt, Artificial Sequence
  Description of Artificial Sequence: Synthetic oligonucleotide
  Sense strand starting at position 456 of SEQ ID NO: 1241709
gcgagaagccucgaggaga

SEQ ID NO: 1293553 - RNA, 19 nt, Artificial Sequence
  Description of Artificial Sequence: Synthetic oligonucleotide
  Antisense strand to SEQ ID NO: 1293552
ucuccucgaggcuucucgc

SEQ ID NO: 1293554 - RNA, 19 nt, Artificial Sequence
  Description of Artificial Sequence: Synthetic oligonucleotide
  Sense strand starting at position 482 of SEQ ID NO: 1241709
gaagaccauuuggguuaua

SEQ ID NO: 1293555 - RNA, 19 nt, Artificial Sequence
  Description of Artificial Sequence: Synthetic oligonucleotide
  Antisense strand to SEQ ID NO: 1293554
uauaacccaaauggucuuc

SEQ ID NO: 1293556 - RNA, 19 nt, Artificial Sequence
  Description of Artificial Sequence: Synthetic oligonucleotide
  Sense strand starting at position 493 of SEQ ID NO: 1241709
ggguuauagcaaugacuga

SEQ ID NO: 1293557 - RNA, 19 nt, Artificial Sequence
  Description of Artificial Sequence: Synthetic oligonucleotide
  Antisense strand to SEQ ID NO: 1293556
ucagucauugcuauaaccc

SEQ ID NO: 1293558 - RNA, 19 nt, Artificial Sequence
  Description of Artificial Sequence: Synthetic oligonucleotide
  Sense strand starting at position 529 of SEQ ID NO: 1241709
ggcguuaaccaagacugaa

SEQ ID NO: 1293559 - RNA, 19 nt, Artificial Sequence
  Description of Artificial Sequence: Synthetic oligonucleotide
  Antisense strand to SEQ ID NO: 1293558
uucagucuugguuaacgcc

SEQ ID NO: 1293560 - RNA, 19 nt, Artificial Sequence
  Description of Artificial Sequence: Synthetic oligonucleotide
  Sense strand starting at position 637 of SEQ ID NO: 1241709
augguuaucuuacuguaau

SEQ ID NO: 1293561 - RNA, 19 nt, Artificial Sequence
  Description of Artificial Sequence: Synthetic oligonucleotide
  Antisense strand to SEQ ID NO: 1293560
auuacaguaagauaaccau

SEQ ID NO: 1293562 - RNA, 19 nt, Artificial Sequence
  Description of Artificial Sequence: Synthetic oligonucleotide
  Sense strand starting at position 640 of SEQ ID NO: 1241709
guuaucuuacuguaauccu

SEQ ID NO: 1293563 - RNA, 19 nt, Artificial Sequence
  Description of Artificial Sequence: Synthetic oligonucleotide
  Antisense strand to SEQ ID NO: 1293562
aggauuacaguaagauaac

SEQ ID NO: 1293564 - RNA, 19 nt, Artificial Sequence
  Description of Artificial Sequence: Synthetic oligonucleotide
  Sense strand starting at position 730 of SEQ ID NO: 1241709
ugcauaguacucuauauua

SEQ ID NO: 1293565 - RNA, 19 nt, Artificial Sequence
  Description of Artificial Sequence: Synthetic oligonucleotide
  Antisense strand to SEQ ID NO: 1293564
uaauauagaguacuaugca

SEQ ID NO: 1293566 - RNA, 19 nt, Artificial Sequence
  Description of Artificial Sequence: Synthetic oligonucleotide
  Sense strand starting at position 760 of SEQ ID NO: 1241709
accaguuggccauaucaaa

SEQ ID NO: 1293567 - RNA, 19 nt, Artificial Sequence
  Description of Artificial Sequence: Synthetic oligonucleotide
  Antisense strand to SEQ ID NO: 1293566
uuugauauggccaacuggu

SEQ ID NO: 1293568 - RNA, 19 nt, Artificial Sequence
  Description of Artificial Sequence: Synthetic oligonucleotide
  Sense strand starting at position 1019 of SEQ ID NO: 1241709
aguguuucucauuacccau

SEQ ID NO: 1293569 - RNA, 19 nt, Artificial Sequence
  Description of Artificial Sequence: Synthetic oligonucleotide
  Antisense strand to SEQ ID NO: 1293568
auggguaaugagaaacacu

SEQ ID NO: 1293570 - RNA, 19 nt, Artificial Sequence
  Description of Artificial Sequence: Synthetic oligonucleotide
  Sense strand starting at position 1059 of SEQ ID NO: 1241709
gugcguuagcuucucaaug

SEQ ID NO: 1293571 - RNA, 19 nt, Artificial Sequence
  Description of Artificial Sequence: Synthetic oligonucleotide
  Antisense strand to SEQ ID NO: 1293570
cauugagaagcuaacgcac

SEQ ID NO: 1293572 - RNA, 19 nt, Artificial Sequence
  Description of Artificial Sequence: Synthetic oligonucleotide
  Sense strand starting at position 1094 of SEQ ID NO: 1241709
ucauuucuguauccuugua

SEQ ID NO: 1293573 - RNA, 19 nt, Artificial Sequence
  Description of Artificial Sequence: Synthetic oligonucleotide
  Antisense strand to SEQ ID NO: 1293572
uacaaggauacagaaauga

SEQ ID NO: 1293574 - RNA, 19 nt, Artificial Sequence
  Description of Artificial Sequence: Synthetic oligonucleotide
  Sense strand starting at position 1276 of SEQ ID NO: 1241709
acugauauuccauauucgu

SEQ ID NO: 1293575 - RNA, 19 nt, Artificial Sequence
  Description of Artificial Sequence: Synthetic oligonucleotide
  Antisense strand to SEQ ID NO: 1293574
acgaauauggaauaucagu

SEQ ID NO: 1293576 - RNA, 19 nt, Artificial Sequence
  Description of Artificial Sequence: Synthetic oligonucleotide
  Sense strand starting at position 1284 of SEQ ID NO: 1241709
uccauauucguuuauugaa

SEQ ID NO: 1293577 - RNA, 19 nt, Artificial Sequence
  Description of Artificial Sequence: Synthetic oligonucleotide
  Antisense strand to SEQ ID NO: 1293576
uucaauaaacgaauaugga

SEQ ID NO: 1293578 - RNA, 19 nt, Artificial Sequence
  Description of Artificial Sequence: Synthetic oligonucleotide
  Sense strand starting at position 1400 of SEQ ID NO: 1241709
ucuaaauucuugcucagga

SEQ ID NO: 1293579 - RNA, 19 nt, Artificial Sequence
  Description of Artificial Sequence: Synthetic oligonucleotide
  Antisense strand to SEQ ID NO: 1293578
uccugagcaagaauuuaga

SEQ ID NO: 1293580 - RNA, 19 nt, Artificial Sequence
  Description of Artificial Sequence: Synthetic oligonucleotide
  Sense strand starting at position 1401 of SEQ ID NO: 1241709
cuaaauucuugcucaggaa

SEQ ID NO: 1293581 - RNA, 19 nt, Artificial Sequence
  Description of Artificial Sequence: Synthetic oligonucleotide
  Antisense strand to SEQ ID NO: 1293580
uuccugagcaagaauuuag

SEQ ID NO: 1293582 - RNA, 19 nt, Artificial Sequence
  Description of Artificial Sequence: Synthetic oligonucleotide
  Sense strand starting at position 2001 of SEQ ID NO: 1241709
ccugaaacaguuuagaugu

SEQ ID NO: 1293583 - RNA, 19 nt, Artificial Sequence
  Description of Artificial Sequence: Synthetic oligonucleotide
  Antisense strand to SEQ ID NO: 1293582
acaucuaaacuguuucagg

SEQ ID NO: 1293584 - RNA, 19 nt, Artificial Sequence
  Description of Artificial Sequence: Synthetic oligonucleotide
  Sense strand starting at position 2059 of SEQ ID NO: 1241709
gcugaauaacugcaggagu

SEQ ID NO: 1293585 - RNA, 19 nt, Artificial Sequence
  Description of Artificial Sequence: Synthetic oligonucleotide
  Antisense strand to SEQ ID NO: 1293584
acuccugcaguuauucagc

SEQ ID NO: 1293586 - RNA, 19 nt, Artificial Sequence
  Description of Artificial Sequence: Synthetic oligonucleotide
  Sense strand starting at position 2061 of SEQ ID NO: 1241709
ugaauaacugcaggaguaa

SEQ ID NO: 1293587 - RNA, 19 nt, Artificial Sequence
  Description of Artificial Sequence: Synthetic oligonucleotide
  Antisense strand to SEQ ID NO: 1293586
uuacuccugcaguuauuca

SEQ ID NO: 1293588 - RNA, 19 nt, Artificial Sequence
  Description of Artificial Sequence: Synthetic oligonucleotide
  Sense strand starting at position 2073 of SEQ ID NO: 1241709
ggaguaaaguuagugguaa

SEQ ID NO: 1293589 - RNA, 19 nt, Artificial Sequence
  Description of Artificial Sequence: Synthetic oligonucleotide
  Antisense strand to SEQ ID NO: 1293588
uuaccacuaacuuuacucc

SEQ ID NO: 1293590 - RNA, 19 nt, Artificial Sequence
  Description of Artificial Sequence: Synthetic oligonucleotide
  Sense strand starting at position 2180 of SEQ ID NO: 1241709
cagcuaagagcggaaagau

SEQ ID NO: 1293591 - RNA, 19 nt, Artificial Sequence
  Description of Artificial Sequence: Synthetic oligonucleotide
  Antisense strand to SEQ ID NO: 1293590
aucuuuccgcucuuagcug

SEQ ID NO: 1293592 - RNA, 19 nt, Artificial Sequence
  Description of Artificial Sequence: Synthetic oligonucleotide
  Sense strand starting at position 2199 of SEQ ID NO: 1241709
gagagauagaggugugacu

SEQ ID NO: 1293593 - RNA, 19 nt, Artificial Sequence
  Description of Artificial Sequence: Synthetic oligonucleotide
  Antisense strand to SEQ ID NO: 1293592
agucacaccucuaucucuc

SEQ ID NO: 1293594 - RNA, 19 nt, Artificial Sequence
  Description of Artificial Sequence: Synthetic oligonucleotide
  Sense strand starting at position 2201 of SEQ ID NO: 1241709
gagauagaggugugacuga

SEQ ID NO: 1293595 - RNA, 19 nt, Artificial Sequence
  Description of Artificial Sequence: Synthetic oligonucleotide
  Antisense strand to SEQ ID NO: 1293594
ucagucacaccucuaucuc

SEQ ID NO: 1293596 - RNA, 19 nt, Artificial Sequence
  Description of Artificial Sequence: Synthetic oligonucleotide
  Sense strand starting at position 2470 of SEQ ID NO: 1241709
guaaguguaagugaccaga

SEQ ID NO: 1293597 - RNA, 19 nt, Artificial Sequence
  Description of Artificial Sequence: Synthetic oligonucleotide
  Antisense strand to SEQ ID NO: 1293596
ucuggucacuuacacuuac

SEQ ID NO: 1293598 - RNA, 19 nt, Artificial Sequence
  Description of Artificial Sequence: Synthetic oligonucleotide
  Sense strand starting at position 2607 of SEQ ID NO: 1241709
guagauugaccagggcuuu

SEQ ID NO: 1293599 - RNA, 19 nt, Artificial Sequence
  Description of Artificial Sequence: Synthetic oligonucleotide
  Antisense strand to SEQ ID NO: 1293598
aaagcccuggucaaucuac

SEQ ID NO: 1293600 - RNA, 19 nt, Artificial Sequence
  Description of Artificial Sequence: Synthetic oligonucleotide
  Sense strand starting at position 2622 of SEQ ID NO: 1241709
cuuugagugcucuaacgga

SEQ ID NO: 1293601 - RNA, 19 nt, Artificial Sequence
  Description of Artificial Sequence: Synthetic oligonucleotide
  Antisense strand to SEQ ID NO: 1293600
uccguuagagcacucaaag

SEQ ID NO: 1293602 - RNA, 19 nt, Artificial Sequence
  Description of Artificial Sequence: Synthetic oligonucleotide
  Sense strand starting at position 2682 of SEQ ID NO: 1241709
aagagcgagcccuaguaua

SEQ ID NO: 1293603 - RNA, 19 nt, Artificial Sequence
  Description of Artificial Sequence: Synthetic oligonucleotide
  Antisense strand to SEQ ID NO: 1293602
uauacuagggcucgcucuu

SEQ ID NO: 1293604 - RNA, 19 nt, Artificial Sequence
  Description of Artificial Sequence: Synthetic oligonucleotide
  Sense strand starting at position 2814 of SEQ ID NO: 1241709
uuaucuaccggguaguuga

SEQ ID NO: 1293605 - RNA, 19 nt, Artificial Sequence
  Description of Artificial Sequence: Synthetic oligonucleotide
  Antisense strand to SEQ ID NO: 1293604
ucaacuacccgguagauaa

SEQ ID NO: 1293606 - RNA, 19 nt, Artificial Sequence
  Description of Artificial Sequence: Synthetic oligonucleotide
  Sense strand starting at position 2927 of SEQ ID NO: 1241709
uugcgucuuggaucucgua

SEQ ID NO: 1293607 - RNA, 19 nt, Artificial Sequence
  Description of Artificial Sequence: Synthetic oligonucleotide
  Antisense strand to SEQ ID NO: 1293606
uacgagauccaagacgcaa

SEQ ID NO: 1293608 - RNA, 19 nt, Artificial Sequence
  Description of Artificial Sequence: Synthetic oligonucleotide
  Sense strand starting at position 2934 of SEQ ID NO: 1241709
uuggaucucguagaugaau

SEQ ID NO: 1293609 - RNA, 19 nt, Artificial Sequence
  Description of Artificial Sequence: Synthetic oligonucleotide
  Antisense strand to SEQ ID NO: 1293608
auucaucuacgagauccaa

SEQ ID NO: 1293610 - RNA, 19 nt, Artificial Sequence
  Description of Artificial Sequence: Synthetic oligonucleotide
  Sense strand starting at position 2961 of SEQ ID NO: 1241709
uagagaauggucuggugag

SEQ ID NO: 1293611 - RNA, 19 nt, Artificial Sequence
  Description of Artificial Sequence: Synthetic oligonucleotide
  Antisense strand to SEQ ID NO: 1293610
cucaccagaccauucucua

SEQ ID NO: 1293612 - RNA, 19 nt, Artificial Sequence
  Description of Artificial Sequence: Synthetic oligonucleotide
  Sense strand starting at position 3092 of SEQ ID NO: 1241709
acaguaccacuuggaauua

SEQ ID NO: 1293613 - RNA, 19 nt, Artificial Sequence
  Description of Artificial Sequence: Synthetic oligonucleotide
  Antisense strand to SEQ ID NO: 1293612
uaauuccaagugguacugu

SEQ ID NO: 1293614 - RNA, 19 nt, Artificial Sequence
  Description of Artificial Sequence: Synthetic oligonucleotide
  Sense strand starting at position 3105 of SEQ ID NO: 1241709
gaauuaauuggguguggga

SEQ ID NO: 1293615 - RNA, 19 nt, Artificial Sequence
  Description of Artificial Sequence: Synthetic oligonucleotide
  Antisense strand to SEQ ID NO: 1293614
ucccacacccaauuaauuc

SEQ ID NO: 1293616 - RNA, 19 nt, Artificial Sequence
  Description of Artificial Sequence: Synthetic oligonucleotide
  Sense strand starting at position 3107 of SEQ ID NO: 1241709
auuaauugggugugggaaa

SEQ ID NO: 1293617 - RNA, 19 nt, Artificial Sequence
  Description of Artificial Sequence: Synthetic oligonucleotide
  Antisense strand to SEQ ID NO: 1293616
uuucccacacccaauuaau

SEQ ID NO: 1293618 - RNA, 19 nt, Artificial Sequence
  Description of Artificial Sequence: Synthetic oligonucleotide
  Sense strand starting at position 3304 of SEQ ID NO: 1241709
ggcuguagcguuaguagga

SEQ ID NO: 1293619 - RNA, 19 nt, Artificial Sequence
  Description of Artificial Sequence: Synthetic oligonucleotide
  Antisense strand to SEQ ID NO: 1293618
uccuacuaacgcuacagcc

SEQ ID NO: 1293620 - RNA, 19 nt, Artificial Sequence
  Description of Artificial Sequence: Synthetic oligonucleotide
  Sense strand starting at position 3311 of SEQ ID NO: 1241709
gcguuaguaggaaguguua

SEQ ID NO: 1293621 - RNA, 19 nt, Artificial Sequence
  Description of Artificial Sequence: Synthetic oligonucleotide
  Antisense strand to SEQ ID NO: 1293620
uaacacuuccuacuaacgc

SEQ ID NO: 1293622 - RNA, 19 nt, Artificial Sequence
  Description of Artificial Sequence: Synthetic oligonucleotide
  Sense strand starting at position 3313 of SEQ ID NO: 1241709
guuaguaggaaguguuaaa

SEQ ID NO: 1293623 - RNA, 19 nt, Artificial Sequence
  Description of Artificial Sequence: Synthetic oligonucleotide
  Antisense strand to SEQ ID NO: 1293622
uuuaacacuuccuacuaac

SEQ ID NO: 1293624 - RNA, 19 nt, Artificial Sequence
  Description of Artificial Sequence: Synthetic oligonucleotide
  Sense strand starting at position 3423 of SEQ ID NO: 1241709
guugaagauuuauagacag

SEQ ID NO: 1293625 - RNA, 19 nt, Artificial Sequence
  Description of Artificial Sequence: Synthetic oligonucleotide
  Antisense strand to SEQ ID NO: 1293624
cugucuauaaaucuucaac

SEQ ID NO: 1293626 - RNA, 19 nt, Artificial Sequence
  Description of Artificial Sequence: Synthetic oligonucleotide
  Sense strand starting at position 3631 of SEQ ID NO: 1241709
guuuguuaacuauagcaaa

SEQ ID NO: 1293627 - RNA, 19 nt, Artificial Sequence
  Description of Artificial Sequence: Synthetic oligonucleotide
  Antisense strand to SEQ ID NO: 1293626
uuugcuauaguuaacaaac

SEQ ID NO: 1293628 - RNA, 19 nt, Artificial Sequence
  Description of Artificial Sequence: Synthetic oligonucleotide
  Sense strand starting at position 32 of SEQ ID NO: 1241710
aaugacuuccgucaauaga

SEQ ID NO: 1293629 - RNA, 19 nt, Artificial Sequence
  Description of Artificial Sequence: Synthetic oligonucleotide
  Antisense strand to SEQ ID NO: 1293628
ucuauugacggaagucauu

SEQ ID NO: 1293630 - RNA, 19 nt, Artificial Sequence
  Description of Artificial Sequence: Synthetic oligonucleotide
  Sense strand starting at position 41 of SEQ ID NO: 1241710
cgucaauagauuuguguuc

SEQ ID NO: 1293631 - RNA, 19 nt, Artificial Sequence
  Description of Artificial Sequence: Synthetic oligonucleotide
  Antisense strand to SEQ ID NO: 1293630
gaacacaaaucuauugacg

SEQ ID NO: 1293632 - RNA, 19 nt, Artificial Sequence
  Description of Artificial Sequence: Synthetic oligonucleotide
  Sense strand starting at position 410 of SEQ ID NO: 1241710
aggguuaucuaguuacaca

SEQ ID NO: 1293633 - RNA, 19 nt, Artificial Sequence
  Description of Artificial Sequence: Synthetic oligonucleotide
  Antisense strand to SEQ ID NO: 1293632
uguguaacuagauaacccu

SEQ ID NO: 1293634 - RNA, 19 nt, Artificial Sequence
  Description of Artificial Sequence: Synthetic oligonucleotide
  Sense strand starting at position 411 of SEQ ID NO: 1241710
ggguuaucuaguuacacag

SEQ ID NO: 1293635 - RNA, 19 nt, Artificial Sequence
  Description of Artificial Sequence: Synthetic oligonucleotide
  Antisense strand to SEQ ID NO: 1293634
cuguguaacuagauaaccc

SEQ ID NO: 1293636 - RNA, 19 nt, Artificial Sequence
  Description of Artificial Sequence: Synthetic oligonucleotide
  Sense strand starting at position 530 of SEQ ID NO: 1241710
ucuuaacauuggcuuuaga

SEQ ID NO: 1293637 - RNA, 19 nt, Artificial Sequence
  Description of Artificial Sequence: Synthetic oligonucleotide
  Antisense strand to SEQ ID NO: 1293636
ucuaaagccaauguuaaga

SEQ ID NO: 1293638 - RNA, 19 nt, Artificial Sequence
  Description of Artificial Sequence: Synthetic oligonucleotide
  Sense strand starting at position 538 of SEQ ID NO: 1241710
uuggcuuuagaagaguauu

SEQ ID NO: 1293639 - RNA, 19 nt, Artificial Sequence
  Description of Artificial Sequence: Synthetic oligonucleotide
  Antisense strand to SEQ ID NO: 1293638
aauacucuucuaaagccaa

SEQ ID NO: 1293640 - RNA, 19 nt, Artificial Sequence
  Description of Artificial Sequence: Synthetic oligonucleotide
  Sense strand starting at position 541 of SEQ ID NO: 1241710
gcuuuagaagaguauucua

SEQ ID NO: 1293641 - RNA, 19 nt, Artificial Sequence
  Description of Artificial Sequence: Synthetic oligonucleotide
  Antisense strand to SEQ ID NO: 1293640
uagaauacucuucuaaagc

SEQ ID NO: 1293642 - RNA, 19 nt, Artificial Sequence
  Description of Artificial Sequence: Synthetic oligonucleotide
  Sense strand starting at position 708 of SEQ ID NO: 1241710
cagacauaaggcuggguaa

SEQ ID NO: 1293643 - RNA, 19 nt, Artificial Sequence
  Description of Artificial Sequence: Synthetic oligonucleotide
  Antisense strand to SEQ ID NO: 1293642
uuacccagccuuaugucug

SEQ ID NO: 1293644 - RNA, 19 nt, Artificial Sequence
  Description of Artificial Sequence: Synthetic oligonucleotide
  Sense strand starting at position 710 of SEQ ID NO: 1241710
gacauaaggcuggguaaca

SEQ ID NO: 1293645 - RNA, 19 nt, Artificial Sequence
  Description of Artificial Sequence: Synthetic oligonucleotide
  Antisense strand to SEQ ID NO: 1293644
uguuacccagccuuauguc

SEQ ID NO: 1293646 - RNA, 19 nt, Artificial Sequence
  Description of Artificial Sequence: Synthetic oligonucleotide
  Sense strand starting at position 711 of SEQ ID NO: 1241710
acauaaggcuggguaacau

SEQ ID NO: 1293647 - RNA, 19 nt, Artificial Sequence
  Description of Artificial Sequence: Synthetic oligonucleotide
  Antisense strand to SEQ ID NO: 1293646
auguuacccagccuuaugu

SEQ ID NO: 1293648 - RNA, 19 nt, Artificial Sequence
  Description of Artificial Sequence: Synthetic oligonucleotide
  Sense strand starting at position 998 of SEQ ID NO: 1241710
agauaauagcaaugacugu

SEQ ID NO: 1293649 - RNA, 19 nt, Artificial Sequence
  Description of Artificial Sequence: Synthetic oligonucleotide
  Antisense strand to SEQ ID NO: 1293648
acagucauugcuauuaucu

SEQ ID NO: 1293650 - RNA, 19 nt, Artificial Sequence
  Description of Artificial Sequence: Synthetic oligonucleotide
  Sense strand starting at position 1019 of SEQ ID NO: 1241710
cagagaaacgccugauuaa

SEQ ID NO: 1293651 - RNA, 19 nt, Artificial Sequence
  Description of Artificial Sequence: Synthetic oligonucleotide
  Antisense strand to SEQ ID NO: 1293650
uuaaucaggcguuucucug

SEQ ID NO: 1293652 - RNA, 19 nt, Artificial Sequence
  Description of Artificial Sequence: Synthetic oligonucleotide
  Sense strand starting at position 1022 of SEQ ID NO: 1241710
agaaacgccugauuaaaca

SEQ ID NO: 1293653 - RNA, 19 nt, Artificial Sequence
  Description of Artificial Sequence: Synthetic oligonucleotide
  Antisense strand to SEQ ID NO: 1293652
uguuuaaucaggcguuucu

SEQ ID NO: 1293654 - RNA, 19 nt, Artificial Sequence
  Description of Artificial Sequence: Synthetic oligonucleotide
  Sense strand starting at position 1065 of SEQ ID NO: 1241710
uguuuacacagugauguua

SEQ ID NO: 1293655 - RNA, 19 nt, Artificial Sequence
  Description of Artificial Sequence: Synthetic oligonucleotide
  Antisense strand to SEQ ID NO: 1293654
uaacaucacuguguaaaca

SEQ ID NO: 1293656 - RNA, 19 nt, Artificial Sequence
  Description of Artificial Sequence: Synthetic oligonucleotide
  Sense strand starting at position 1076 of SEQ ID NO: 1241710
ugauguuaugaacgagauu

SEQ ID NO: 1293657 - RNA, 19 nt, Artificial Sequence
  Description of Artificial Sequence: Synthetic oligonucleotide
  Antisense strand to SEQ ID NO: 1293656
aaucucguucauaacauca

SEQ ID NO: 1293658 - RNA, 19 nt, Artificial Sequence
  Description of Artificial Sequence: Synthetic oligonucleotide
  Sense strand starting at position 1106 of SEQ ID NO: 1241710
cucuaaugaggccagguua

SEQ ID NO: 1293659 - RNA, 19 nt, Artificial Sequence
  Description of Artificial Sequence: Synthetic oligonucleotide
  Antisense strand to SEQ ID NO: 1293658
uaaccuggccucauuagag

SEQ ID NO: 1293660 - RNA, 19 nt, Artificial Sequence
  Description of Artificial Sequence: Synthetic oligonucleotide
  Sense strand starting at position 1117 of SEQ ID NO: 1241710
ccagguuaccugcagacaa

SEQ ID NO: 1293661 - RNA, 19 nt, Artificial Sequence
  Description of Artificial Sequence: Synthetic oligonucleotide
  Antisense strand to SEQ ID NO: 1293660
uugucugcagguaaccugg

SEQ ID NO: 1293662 - RNA, 19 nt, Artificial Sequence
  Description of Artificial Sequence: Synthetic oligonucleotide
  Sense strand starting at position 1589 of SEQ ID NO: 1241710
cuacguguccaggagauga

SEQ ID NO: 1293663 - RNA, 19 nt, Artificial Sequence
  Description of Artificial Sequence: Synthetic oligonucleotide
  Antisense strand to SEQ ID NO: 1293662
ucaucuccuggacacguag

SEQ ID NO: 1293664 - RNA, 19 nt, Artificial Sequence
  Description of Artificial Sequence: Synthetic oligonucleotide
  Sense strand starting at position 1633 of SEQ ID NO: 1241710
cgcacaaccgcuguguaaa

SEQ ID NO: 1293665 - RNA, 19 nt, Artificial Sequence
  Description of Artificial Sequence: Synthetic oligonucleotide
  Antisense strand to SEQ ID NO: 1293664
uuuacacagcgguugugcg

SEQ ID NO: 1293666 - RNA, 19 nt, Artificial Sequence
  Description of Artificial Sequence: Synthetic oligonucleotide
  Sense strand starting at position 2268 of SEQ ID NO: 1241710
ucaucucucccagaagagu

SEQ ID NO: 1293667 - RNA, 19 nt, Artificial Sequence
  Description of Artificial Sequence: Synthetic oligonucleotide
  Antisense strand to SEQ ID NO: 1293666
acucuucugggagagauga

SEQ ID NO: 1293668 - RNA, 19 nt, Artificial Sequence
  Description of Artificial Sequence: Synthetic oligonucleotide
  Sense strand starting at position 2363 of SEQ ID NO: 1241710
cuuagcuuugcagaaauac

SEQ ID NO: 1293669 - RNA, 19 nt, Artificial Sequence
  Description of Artificial Sequence: Synthetic oligonucleotide
  Antisense strand to SEQ ID NO: 1293668
guauuucugcaaagcuaag

SEQ ID NO: 1293670 - RNA, 19 nt, Artificial Sequence
  Description of Artificial Sequence: Synthetic oligonucleotide
  Sense strand starting at position 2576 of SEQ ID NO: 1241710
gaaggcugucuugaauuga

SEQ ID NO: 1293671 - RNA, 19 nt, Artificial Sequence
  Description of Artificial Sequence: Synthetic oligonucleotide
  Antisense strand to SEQ ID NO: 1293670
ucaauucaagacagccuuc

SEQ ID NO: 1293672 - RNA, 19 nt, Artificial Sequence
  Description of Artificial Sequence: Synthetic oligonucleotide
  Sense strand starting at position 2586 of SEQ ID NO: 1241710
uugaauugaggcuggaaua

SEQ ID NO: 1293673 - RNA, 19 nt, Artificial Sequence
  Description of Artificial Sequence: Synthetic oligonucleotide
  Antisense strand to SEQ ID NO: 1293672
uauuccagccucaauucaa

SEQ ID NO: 1293674 - RNA, 19 nt, Artificial Sequence
  Description of Artificial Sequence: Synthetic oligonucleotide
  Sense strand starting at position 3134 of SEQ ID NO: 1241710
gcauaaagagauugcuuaa

SEQ ID NO: 1293675 - RNA, 19 nt, Artificial Sequence
  Description of Artificial Sequence: Synthetic oligonucleotide
  Antisense strand to SEQ ID NO: 1293674
uuaagcaaucucuuuaugc

SEQ ID NO: 1293676 - RNA, 19 nt, Artificial Sequence
  Description of Artificial Sequence: Synthetic oligonucleotide
  Sense strand starting at position 3196 of SEQ ID NO: 1241710
uugagaagugccuggaaug

SEQ ID NO: 1293677 - RNA, 19 nt, Artificial Sequence
  Description of Artificial Sequence: Synthetic oligonucleotide
  Antisense strand to SEQ ID NO: 1293676
cauuccaggcacuucucaa

SEQ ID NO: 1293678 - RNA, 19 nt, Artificial Sequence
  Description of Artificial Sequence: Synthetic oligonucleotide
  Sense strand starting at position 3329 of SEQ ID NO: 1241710
auaguuuguaagggauaag

SEQ ID NO: 1293679 - RNA, 19 nt, Artificial Sequence
  Description of Artificial Sequence: Synthetic oligonucleotide
  Antisense strand to SEQ ID NO: 1293678
cuuaucccuuacaaacuau

SEQ ID NO: 1293680 - RNA, 19 nt, Artificial Sequence
  Description of Artificial Sequence: Synthetic oligonucleotide
  Sense strand starting at position 3332 of SEQ ID NO: 1241710
guuuguaagggauaagcuu

SEQ ID NO: 1293681 - RNA, 19 nt, Artificial Sequence
  Description of Artificial Sequence: Synthetic oligonucleotide
  Antisense strand to SEQ ID NO: 1293680
aagcuuaucccuuacaaac

SEQ ID NO: 1293682 - RNA, 19 nt, Artificial Sequence
  Description of Artificial Sequence: Synthetic oligonucleotide
  Sense strand starting at position 3338 of SEQ ID NO: 1241710
aagggauaagcuuguccau

SEQ ID NO: 1293683 - RNA, 19 nt, Artificial Sequence
  Description of Artificial Sequence: Synthetic oligonucleotide
  Antisense strand to SEQ ID NO: 1293682
auggacaagcuuaucccuu

SEQ ID NO: 1293684 - RNA, 19 nt, Artificial Sequence
  Description of Artificial Sequence: Synthetic oligonucleotide
  Sense strand starting at position 3389 of SEQ ID NO: 1241710
agugaaguuaguuaccuau

SEQ ID NO: 1293685 - RNA, 19 nt, Artificial Sequence
  Description of Artificial Sequence: Synthetic oligonucleotide
  Antisense strand to SEQ ID NO: 1293684
auagguaacuaacuucacu

SEQ ID NO: 1293686 - RNA, 19 nt, Artificial Sequence
  Description of Artificial Sequence: Synthetic oligonucleotide
  Sense strand starting at position 3391 of SEQ ID NO: 1241710
ugaaguuaguuaccuauaa

SEQ ID NO: 1293687 - RNA, 19 nt, Artificial Sequence
  Description of Artificial Sequence: Synthetic oligonucleotide
  Antisense strand to SEQ ID NO: 1293686
uuauagguaacuaacuuca

SEQ ID NO: 1293688 - RNA, 19 nt, Artificial Sequence
  Description of Artificial Sequence: Synthetic oligonucleotide
  Sense strand starting at position 3395 of SEQ ID NO: 1241710
guuaguuaccuauaaugug

SEQ ID NO: 1293689 - RNA, 19 nt, Artificial Sequence
  Description of Artificial Sequence: Synthetic oligonucleotide
  Antisense strand to SEQ ID NO: 1293688
cacauuauagguaacuaac

SEQ ID NO: 1293690 - RNA, 19 nt, Artificial Sequence
  Description of Artificial Sequence: Synthetic oligonucleotide
  Sense strand starting at position 3400 of SEQ ID NO: 1241710
uuaccuauaaugugggagu

SEQ ID NO: 1293691 - RNA, 19 nt, Artificial Sequence
  Description of Artificial Sequence: Synthetic oligonucleotide
  Antisense strand to SEQ ID NO: 1293690
acucccacauuauagguaa

SEQ ID NO: 1293692 - RNA, 19 nt, Artificial Sequence
  Description of Artificial Sequence: Synthetic oligonucleotide
  Sense strand starting at position 3402 of SEQ ID NO: 1241710
accuauaaugugggaguua

SEQ ID NO: 1293693 - RNA, 19 nt, Artificial Sequence
  Description of Artificial Sequence: Synthetic oligonucleotide
  Antisense strand to SEQ ID NO: 1293692
uaacucccacauuauaggu

SEQ ID NO: 1293694 - RNA, 19 nt, Artificial Sequence
  Description of Artificial Sequence: Synthetic oligonucleotide
  Sense strand starting at position 3413 of SEQ ID NO: 1241710
gggaguuaaggauggguuu

SEQ ID NO: 1293695 - RNA, 19 nt, Artificial Sequence
  Description of Artificial Sequence: Synthetic oligonucleotide
  Antisense strand to SEQ ID NO: 1293694
aaacccauccuuaacuccc

SEQ ID NO: 1293696 - RNA, 19 nt, Artificial Sequence
  Description of Artificial Sequence: Synthetic oligonucleotide
  Sense strand starting at position 3414 of SEQ ID NO: 1241710
ggaguuaaggauggguuua

SEQ ID NO: 1293697 - RNA, 19 nt, Artificial Sequence
  Description of Artificial Sequence: Synthetic oligonucleotide
  Antisense strand to SEQ ID NO: 1293696
uaaacccauccuuaacucc

SEQ ID NO: 1293698 - RNA, 19 nt, Artificial Sequence
  Description of Artificial Sequence: Synthetic oligonucleotide
  Sense strand starting at position 3415 of SEQ ID NO: 1241710
gaguuaaggauggguuuau

SEQ ID NO: 1293699 - RNA, 19 nt, Artificial Sequence
  Description of Artificial Sequence: Synthetic oligonucleotide
  Antisense strand to SEQ ID NO: 1293698
auaaacccauccuuaacuc

SEQ ID NO: 1293700 - RNA, 19 nt, Artificial Sequence
  Description of Artificial Sequence: Synthetic oligonucleotide
  Sense strand starting at position 3416 of SEQ ID NO: 1241710
aguuaaggauggguuuaua

SEQ ID NO: 1293701 - RNA, 19 nt, Artificial Sequence
  Description of Artificial Sequence: Synthetic oligonucleotide
  Antisense strand to SEQ ID NO: 1293700
uauaaacccauccuuaacu

SEQ ID NO: 1293702 - RNA, 19 nt, Artificial Sequence
  Description of Artificial Sequence: Synthetic oligonucleotide
  Sense strand starting at position 3496 of SEQ ID NO: 1241710
ccugaugaacauuggcauu

SEQ ID NO: 1293703 - RNA, 19 nt, Artificial Sequence
  Description of Artificial Sequence: Synthetic oligonucleotide
  Antisense strand to SEQ ID NO: 1293702
aaugccaauguucaucagg

SEQ ID NO: 1293704 - RNA, 19 nt, Artificial Sequence
  Description of Artificial Sequence: Synthetic oligonucleotide
  Sense strand starting at position 3564 of SEQ ID NO: 1241710
uugguuucugcauaauaaa

SEQ ID NO: 1293705 - RNA, 19 nt, Artificial Sequence
  Description of Artificial Sequence: Synthetic oligonucleotide
  Antisense strand to SEQ ID NO: 1293704
uuuauuaugcagaaaccaa

SEQ ID NO: 1293706 - RNA, 19 nt, Artificial Sequence
  Description of Artificial Sequence: Synthetic oligonucleotide
  Sense strand starting at position 3578 of SEQ ID NO: 1241710
auaaacaagucuuccgauu

SEQ ID NO: 1293707 - RNA, 19 nt, Artificial Sequence
  Description of Artificial Sequence: Synthetic oligonucleotide
  Antisense strand to SEQ ID NO: 1293706
aaucggaagacuuguuuau

SEQ ID NO: 1293708 - RNA, 19 nt, Artificial Sequence
  Description of Artificial Sequence: Synthetic oligonucleotide
  Sense strand starting at position 37 of SEQ ID NO: 1241711
aaugacuuccgucaauaga

SEQ ID NO: 1293709 - RNA, 19 nt, Artificial Sequence
  Description of Artificial Sequence: Synthetic oligonucleotide
  Antisense strand to SEQ ID NO: 1293708
ucuauugacggaagucauu

SEQ ID NO: 1293710 - RNA, 19 nt, Artificial Sequence
  Description of Artificial Sequence: Synthetic oligonucleotide
  Sense strand starting at position 46 of SEQ ID NO: 1241711
cgucaauagauuuguguuc

SEQ ID NO: 1293711 - RNA, 19 nt, Artificial Sequence
  Description of Artificial Sequence: Synthetic oligonucleotide
  Antisense strand to SEQ ID NO: 1293710
gaacacaaaucuauugacg

SEQ ID NO: 1293712 - RNA, 19 nt, Artificial Sequence
  Description of Artificial Sequence: Synthetic oligonucleotide
  Sense strand starting at position 415 of SEQ ID NO: 1241711
aggguuaucuaguuacaca

SEQ ID NO: 1293713 - RNA, 19 nt, Artificial Sequence
  Description of Artificial Sequence: Synthetic oligonucleotide
  Antisense strand to SEQ ID NO: 1293712
uguguaacuagauaacccu

SEQ ID NO: 1293714 - RNA, 19 nt, Artificial Sequence
  Description of Artificial Sequence: Synthetic oligonucleotide
  Sense strand starting at position 416 of SEQ ID NO: 1241711
ggguuaucuaguuacacag

SEQ ID NO: 1293715 - RNA, 19 nt, Artificial Sequence
  Description of Artificial Sequence: Synthetic oligonucleotide
  Antisense strand to SEQ ID NO: 1293714
cuguguaacuagauaaccc

SEQ ID NO: 1293716 - RNA, 19 nt, Artificial Sequence
  Description of Artificial Sequence: Synthetic oligonucleotide
  Sense strand starting at position 535 of SEQ ID NO: 1241711
ucuuaacauuggcuuuaga

SEQ ID NO: 1293717 - RNA, 19 nt, Artificial Sequence
  Description of Artificial Sequence: Synthetic oligonucleotide
  Antisense strand to SEQ ID NO: 1293716
ucuaaagccaauguuaaga

SEQ ID NO: 1293718 - RNA, 19 nt, Artificial Sequence
  Description of Artificial Sequence: Synthetic oligonucleotide
  Sense strand starting at position 543 of SEQ ID NO: 1241711
uuggcuuuagaagaguauu

SEQ ID NO: 1293719 - RNA, 19 nt, Artificial Sequence
  Description of Artificial Sequence: Synthetic oligonucleotide
  Antisense strand to SEQ ID NO: 1293718
aauacucuucuaaagccaa

SEQ ID NO: 1293720 - RNA, 19 nt, Artificial Sequence
  Description of Artificial Sequence: Synthetic oligonucleotide
  Sense strand starting at position 546 of SEQ ID NO: 1241711
gcuuuagaagaguauucua

SEQ ID NO: 1293721 - RNA, 19 nt, Artificial Sequence
  Description of Artificial Sequence: Synthetic oligonucleotide
  Antisense strand to SEQ ID NO: 1293720
uagaauacucuucuaaagc

SEQ ID NO: 1293722 - RNA, 19 nt, Artificial Sequence
  Description of Artificial Sequence: Synthetic oligonucleotide
  Sense strand starting at position 713 of SEQ ID NO: 1241711
cagacauaaggcuggguaa

SEQ ID NO: 1293723 - RNA, 19 nt, Artificial Sequence
  Description of Artificial Sequence: Synthetic oligonucleotide
  Antisense strand to SEQ ID NO: 1293722
uuacccagccuuaugucug

SEQ ID NO: 1293724 - RNA, 19 nt, Artificial Sequence
  Description of Artificial Sequence: Synthetic oligonucleotide
  Sense strand starting at position 715 of SEQ ID NO: 1241711
gacauaaggcuggguaaca

SEQ ID NO: 1293725 - RNA, 19 nt, Artificial Sequence
  Description of Artificial Sequence: Synthetic oligonucleotide
  Antisense strand to SEQ ID NO: 1293724
uguuacccagccuuauguc

SEQ ID NO: 1293726 - RNA, 19 nt, Artificial Sequence
  Description of Artificial Sequence: Synthetic oligonucleotide
  Sense strand starting at position 716 of SEQ ID NO: 1241711
acauaaggcuggguaacau

SEQ ID NO: 1293727 - RNA, 19 nt, Artificial Sequence
  Description of Artificial Sequence: Synthetic oligonucleotide
  Antisense strand to SEQ ID NO: 1293726
auguuacccagccuuaugu

SEQ ID NO: 1293728 - RNA, 19 nt, Artificial Sequence
  Description of Artificial Sequence: Synthetic oligonucleotide
  Sense strand starting at position 1003 of SEQ ID NO: 1241711
agauaauagcaaugacugu

SEQ ID NO: 1293729 - RNA, 19 nt, Artificial Sequence
  Description of Artificial Sequence: Synthetic oligonucleotide
  Antisense strand to SEQ ID NO: 1293728
acagucauugcuauuaucu

SEQ ID NO: 1293730 - RNA, 19 nt, Artificial Sequence
  Description of Artificial Sequence: Synthetic oligonucleotide
  Sense strand starting at position 1024 of SEQ ID NO: 1241711
cagagaaacgccugauuaa

SEQ ID NO: 1293731 - RNA, 19 nt, Artificial Sequence
  Description of Artificial Sequence: Synthetic oligonucleotide
  Antisense strand to SEQ ID NO: 1293730
uuaaucaggcguuucucug

SEQ ID NO: 1293732 - RNA, 19 nt, Artificial Sequence
  Description of Artificial Sequence: Synthetic oligonucleotide
  Sense strand starting at position 1027 of SEQ ID NO: 1241711
agaaacgccugauuaaaca

SEQ ID NO: 1293733 - RNA, 19 nt, Artificial Sequence
  Description of Artificial Sequence: Synthetic oligonucleotide
  Antisense strand to SEQ ID NO: 1293732
uguuuaaucaggcguuucu

SEQ ID NO: 1293734 - RNA, 19 nt, Artificial Sequence
  Description of Artificial Sequence: Synthetic oligonucleotide
  Sense strand starting at position 1070 of SEQ ID NO: 1241711
uguuuacacagugauguua

SEQ ID NO: 1293735 - RNA, 19 nt, Artificial Sequence
  Description of Artificial Sequence: Synthetic oligonucleotide
  Antisense strand to SEQ ID NO: 1293734
uaacaucacuguguaaaca

SEQ ID NO: 1293736 - RNA, 19 nt, Artificial Sequence
  Description of Artificial Sequence: Synthetic oligonucleotide
  Sense strand starting at position 1081 of SEQ ID NO: 1241711
ugauguuaugaacgagauu

SEQ ID NO: 1293737 - RNA, 19 nt, Artificial Sequence
  Description of Artificial Sequence: Synthetic oligonucleotide
  Antisense strand to SEQ ID NO: 1293736
aaucucguucauaacauca

SEQ ID NO: 1293738 - RNA, 19 nt, Artificial Sequence
  Description of Artificial Sequence: Synthetic oligonucleotide
  Sense strand starting at position 1111 of SEQ ID NO: 1241711
cucuaaugaggccagguua

SEQ ID NO: 1293739 - RNA, 19 nt, Artificial Sequence
  Description of Artificial Sequence: Synthetic oligonucleotide
  Antisense strand to SEQ ID NO: 1293738
uaaccuggccucauuagag

SEQ ID NO: 1293740 - RNA, 19 nt, Artificial Sequence
  Description of Artificial Sequence: Synthetic oligonucleotide
  Sense strand starting at position 1122 of SEQ ID NO: 1241711
ccagguuaccugcagacaa

SEQ ID NO: 1293741 - RNA, 19 nt, Artificial Sequence
  Description of Artificial Sequence: Synthetic oligonucleotide
  Antisense strand to SEQ ID NO: 1293740
uugucugcagguaaccugg

SEQ ID NO: 1293742 - RNA, 19 nt, Artificial Sequence
  Description of Artificial Sequence: Synthetic oligonucleotide
  Sense strand starting at position 1594 of SEQ ID NO: 1241711
cuacguguccaggagauga

SEQ ID NO: 1293743 - RNA, 19 nt, Artificial Sequence
  Description of Artificial Sequence: Synthetic oligonucleotide
  Antisense strand to SEQ ID NO: 1293742
ucaucuccuggacacguag

SEQ ID NO: 1293744 - RNA, 19 nt, Artificial Sequence
  Description of Artificial Sequence: Synthetic oligonucleotide
  Sense strand starting at position 1638 of SEQ ID NO: 1241711
cgcacaaccgcuguguaaa

SEQ ID NO: 1293745 - RNA, 19 nt, Artificial Sequence
  Description of Artificial Sequence: Synthetic oligonucleotide
  Antisense strand to SEQ ID NO: 1293744
uuuacacagcgguugugcg

SEQ ID NO: 1293746 - RNA, 19 nt, Artificial Sequence
  Description of Artificial Sequence: Synthetic oligonucleotide
  Sense strand starting at position 2273 of SEQ ID NO: 1241711
ucaucucucccagaagagu

SEQ ID NO: 1293747 - RNA, 19 nt, Artificial Sequence
  Description of Artificial Sequence: Synthetic oligonucleotide
  Antisense strand to SEQ ID NO: 1293746
acucuucugggagagauga

SEQ ID NO: 1293748 - RNA, 19 nt, Artificial Sequence
  Description of Artificial Sequence: Synthetic oligonucleotide
  Sense strand starting at position 2368 of SEQ ID NO: 1241711
cuuagcuuugcagaaauac

SEQ ID NO: 1293749 - RNA, 19 nt, Artificial Sequence
  Description of Artificial Sequence: Synthetic oligonucleotide
  Antisense strand to SEQ ID NO: 1293748
guauuucugcaaagcuaag

SEQ ID NO: 1293750 - RNA, 19 nt, Artificial Sequence
  Description of Artificial Sequence: Synthetic oligonucleotide
  Sense strand starting at position 2581 of SEQ ID NO: 1241711
gaaggcugucuugaauuga

SEQ ID NO: 1293751 - RNA, 19 nt, Artificial Sequence
  Description of Artificial Sequence: Synthetic oligonucleotide
  Antisense strand to SEQ ID NO: 1293750
ucaauucaagacagccuuc

SEQ ID NO: 1293752 - RNA, 19 nt, Artificial Sequence
  Description of Artificial Sequence: Synthetic oligonucleotide
  Sense strand starting at position 2591 of SEQ ID NO: 1241711
uugaauugaggcuggaaua

SEQ ID NO: 1293753 - RNA, 19 nt, Artificial Sequence
  Description of Artificial Sequence: Synthetic oligonucleotide
  Antisense strand to SEQ ID NO: 1293752
uauuccagccucaauucaa

SEQ ID NO: 1293754 - RNA, 19 nt, Artificial Sequence
  Description of Artificial Sequence: Synthetic oligonucleotide
  Sense strand starting at position 3139 of SEQ ID NO: 1241711
gcauaaagagauugcuuaa

SEQ ID NO: 1293755 - RNA, 19 nt, Artificial Sequence
  Description of Artificial Sequence: Synthetic oligonucleotide
  Antisense strand to SEQ ID NO: 1293754
uuaagcaaucucuuuaugc

SEQ ID NO: 1293756 - RNA, 19 nt, Artificial Sequence
  Description of Artificial Sequence: Synthetic oligonucleotide
  Sense strand starting at position 3201 of SEQ ID NO: 1241711
uugagaagugccuggaaug

SEQ ID NO: 1293757 - RNA, 19 nt, Artificial Sequence
  Description of Artificial Sequence: Synthetic oligonucleotide
  Antisense strand to SEQ ID NO: 1293756
cauuccaggcacuucucaa

SEQ ID NO: 1293758 - RNA, 19 nt, Artificial Sequence
  Description of Artificial Sequence: Synthetic oligonucleotide
  Sense strand starting at position 3334 of SEQ ID NO: 1241711
auaguuuguaagggauaag

SEQ ID NO: 1293759 - RNA, 19 nt, Artificial Sequence
  Description of Artificial Sequence: Synthetic oligonucleotide
  Antisense strand to SEQ ID NO: 1293758
cuuaucccuuacaaacuau

SEQ ID NO: 1293760 - RNA, 19 nt, Artificial Sequence
  Description of Artificial Sequence: Synthetic oligonucleotide
  Sense strand starting at position 3337 of SEQ ID NO: 1241711
guuuguaagggauaagcuu

SEQ ID NO: 1293761 - RNA, 19 nt, Artificial Sequence
  Description of Artificial Sequence: Synthetic oligonucleotide
  Antisense strand to SEQ ID NO: 1293760
aagcuuaucccuuacaaac

SEQ ID NO: 1293762 - RNA, 19 nt, Artificial Sequence
  Description of Artificial Sequence: Synthetic oligonucleotide
  Sense strand starting at position 3343 of SEQ ID NO: 1241711
aagggauaagcuuguccau

SEQ ID NO: 1293763 - RNA, 19 nt, Artificial Sequence
  Description of Artificial Sequence: Synthetic oligonucleotide
  Antisense strand to SEQ ID NO: 1293762
auggacaagcuuaucccuu

SEQ ID NO: 1293764 - RNA, 19 nt, Artificial Sequence
  Description of Artificial Sequence: Synthetic oligonucleotide
  Sense strand starting at position 3394 of SEQ ID NO: 1241711
agugaaguuaguuaccuau

SEQ ID NO: 1293765 - RNA, 19 nt, Artificial Sequence
  Description of Artificial Sequence: Synthetic oligonucleotide
  Antisense strand to SEQ ID NO: 1293764
auagguaacuaacuucacu

SEQ ID NO: 1293766 - RNA, 19 nt, Artificial Sequence
  Description of Artificial Sequence: Synthetic oligonucleotide
  Sense strand starting at position 3396 of SEQ ID NO: 1241711
ugaaguuaguuaccuauaa

SEQ ID NO: 1293767 - RNA, 19 nt, Artificial Sequence
  Description of Artificial Sequence: Synthetic oligonucleotide
  Antisense strand to SEQ ID NO: 1293766
uuauagguaacuaacuuca

SEQ ID NO: 1293768 - RNA, 19 nt, Artificial Sequence
  Description of Artificial Sequence: Synthetic oligonucleotide
  Sense strand starting at position 3400 of SEQ ID NO: 1241711
guuaguuaccuauaaugug

SEQ ID NO: 1293769 - RNA, 19 nt, Artificial Sequence
  Description of Artificial Sequence: Synthetic oligonucleotide
  Antisense strand to SEQ ID NO: 1293768
cacauuauagguaacuaac

SEQ ID NO: 1293770 - RNA, 19 nt, Artificial Sequence
  Description of Artificial Sequence: Synthetic oligonucleotide
  Sense strand starting at position 3405 of SEQ ID NO: 1241711
uuaccuauaaugugggagu

SEQ ID NO: 1293771 - RNA, 19 nt, Artificial Sequence
  Description of Artificial Sequence: Synthetic oligonucleotide
  Antisense strand to SEQ ID NO: 1293770
acucccacauuauagguaa

SEQ ID NO: 1293772 - RNA, 19 nt, Artificial Sequence
  Description of Artificial Sequence: Synthetic oligonucleotide
  Sense strand starting at position 3407 of SEQ ID NO: 1241711
accuauaaugugggaguua

SEQ ID NO: 1293773 - RNA, 19 nt, Artificial Sequence
  Description of Artificial Sequence: Synthetic oligonucleotide
  Antisense strand to SEQ ID NO: 1293772
uaacucccacauuauaggu

SEQ ID NO: 1293774 - RNA, 19 nt, Artificial Sequence
  Description of Artificial Sequence: Synthetic oligonucleotide
  Sense strand starting at position 3418 of SEQ ID NO: 1241711
gggaguuaaggauggguuu

SEQ ID NO: 1293775 - RNA, 19 nt, Artificial Sequence
  Description of Artificial Sequence: Synthetic oligonucleotide
  Antisense strand to SEQ ID NO: 1293774
aaacccauccuuaacuccc

SEQ ID NO: 1293776 - RNA, 19 nt, Artificial Sequence
  Description of Artificial Sequence: Synthetic oligonucleotide
  Sense strand starting at position 3419 of SEQ ID NO: 1241711
ggaguuaaggauggguuua

SEQ ID NO: 1293777 - RNA, 19 nt, Artificial Sequence
  Description of Artificial Sequence: Synthetic oligonucleotide
  Antisense strand to SEQ ID NO: 1293776
uaaacccauccuuaacucc

SEQ ID NO: 1293778 - RNA, 19 nt, Artificial Sequence
  Description of Artificial Sequence: Synthetic oligonucleotide
  Sense strand starting at position 3420 of SEQ ID NO: 1241711
gaguuaaggauggguuuau

SEQ ID NO: 1293779 - RNA, 19 nt, Artificial Sequence
  Description of Artificial Sequence: Synthetic oligonucleotide
  Antisense strand to SEQ ID NO: 1293778
auaaacccauccuuaacuc

SEQ ID NO: 1293780 - RNA, 19 nt, Artificial Sequence
  Description of Artificial Sequence: Synthetic oligonucleotide
  Sense strand starting at position 3421 of SEQ ID NO: 1241711
aguuaaggauggguuuaua

SEQ ID NO: 1293781 - RNA, 19 nt, Artificial Sequence
  Description of Artificial Sequence: Synthetic oligonucleotide
  Antisense strand to SEQ ID NO: 1293780
uauaaacccauccuuaacu

SEQ ID NO: 1293782 - RNA, 19 nt, Artificial Sequence
  Description of Artificial Sequence: Synthetic oligonucleotide
  Sense strand starting at position 3501 of SEQ ID NO: 1241711
ccugaugaacauuggcauu

SEQ ID NO: 1293783 - RNA, 19 nt, Artificial Sequence
  Description of Artificial Sequence: Synthetic oligonucleotide
  Antisense strand to SEQ ID NO: 1293782
aaugccaauguucaucagg

SEQ ID NO: 1293784 - RNA, 19 nt, Artificial Sequence
  Description of Artificial Sequence: Synthetic oligonucleotide
  Sense strand starting at position 3569 of SEQ ID NO: 1241711
uugguuucugcauaauaaa

SEQ ID NO: 1293785 - RNA, 19 nt, Artificial Sequence
  Description of Artificial Sequence: Synthetic oligonucleotide
  Antisense strand to SEQ ID NO: 1293784
uuuauuaugcagaaaccaa

SEQ ID NO: 1293786 - RNA, 19 nt, Artificial Sequence
  Description of Artificial Sequence: Synthetic oligonucleotide
  Sense strand starting at position 3583 of SEQ ID NO: 1241711
auaaacaagucuuccgauu

SEQ ID NO: 1293787 - RNA, 19 nt, Artificial Sequence
  Description of Artificial Sequence: Synthetic oligonucleotide
  Antisense strand to SEQ ID NO: 1293786
aaucggaagacuuguuuau

SEQ ID NO: 1293788 - RNA, 19 nt, Artificial Sequence
  Description of Artificial Sequence: Synthetic oligonucleotide
  Sense strand starting at position 1120 of SEQ ID NO: 1241712
aagagaguuccucggccuu

SEQ ID NO: 1293789 - RNA, 19 nt, Artificial Sequence
  Description of Artificial Sequence: Synthetic oligonucleotide
  Antisense strand to SEQ ID NO: 1293788
aaggccgaggaacucucuu

SEQ ID NO: 1293790 - RNA, 19 nt, Artificial Sequence
  Description of Artificial Sequence: Synthetic oligonucleotide
  Sense strand starting at position 1163 of SEQ ID NO: 1241712
gguauagauucugucucau

SEQ ID NO: 1293791 - RNA, 19 nt, Artificial Sequence
  Description of Artificial Sequence: Synthetic oligonucleotide
  Antisense strand to SEQ ID NO: 1293790
augagacagaaucuauacc

SEQ ID NO: 1293792 - RNA, 19 nt, Artificial Sequence
  Description of Artificial Sequence: Synthetic oligonucleotide
  Sense strand starting at position 1633 of SEQ ID NO: 1241712
ggcuauugggaguguucag

SEQ ID NO: 1293793 - RNA, 19 nt, Artificial Sequence
  Description of Artificial Sequence: Synthetic oligonucleotide
  Antisense strand to SEQ ID NO: 1293792
cugaacacucccaauagcc

SEQ ID NO: 1293794 - RNA, 19 nt, Artificial Sequence
  Description of Artificial Sequence: Synthetic oligonucleotide
  Sense strand starting at position 1709 of SEQ ID NO: 1241712
ccgugucucccacaggaau

SEQ ID NO: 1293795 - RNA, 19 nt, Artificial Sequence
  Description of Artificial Sequence: Synthetic oligonucleotide
  Antisense strand to SEQ ID NO: 1293794
auuccugugggagacacgg

SEQ ID NO: 1293796 - RNA, 19 nt, Artificial Sequence
  Description of Artificial Sequence: Synthetic oligonucleotide
  Sense strand starting at position 1722 of SEQ ID NO: 1241712
aggaauaucgacugcagaa

SEQ ID NO: 1293797 - RNA, 19 nt, Artificial Sequence
  Description of Artificial Sequence: Synthetic oligonucleotide
  Antisense strand to SEQ ID NO: 1293796
uucugcagucgauauuccu

SEQ ID NO: 1293798 - RNA, 19 nt, Artificial Sequence
  Description of Artificial Sequence: Synthetic oligonucleotide
  Sense strand starting at position 1772 of SEQ ID NO: 1241712
gcuugagacucccuccaga

SEQ ID NO: 1293799 - RNA, 19 nt, Artificial Sequence
  Description of Artificial Sequence: Synthetic oligonucleotide
  Antisense strand to SEQ ID NO: 1293798
ucuggagggagucucaagc

SEQ ID NO: 1293800 - RNA, 19 nt, Artificial Sequence
  Description of Artificial Sequence: Synthetic oligonucleotide
  Sense strand starting at position 1810 of SEQ ID NO: 1241712
ugggaauccaccuaggugu

SEQ ID NO: 1293801 - RNA, 19 nt, Artificial Sequence
  Description of Artificial Sequence: Synthetic oligonucleotide
  Antisense strand to SEQ ID NO: 1293800
acaccuagguggauuccca

SEQ ID NO: 1293802 - RNA, 19 nt, Artificial Sequence
  Description of Artificial Sequence: Synthetic oligonucleotide
  Sense strand starting at position 1823 of SEQ ID NO: 1241712
agguguucacucgggaaag

SEQ ID NO: 1293803 - RNA, 19 nt, Artificial Sequence
  Description of Artificial Sequence: Synthetic oligonucleotide
  Antisense strand to SEQ ID NO: 1293802
cuuucccgagugaacaccu

SEQ ID NO: 1293804 - RNA, 19 nt, Artificial Sequence
  Description of Artificial Sequence: Synthetic oligonucleotide
  Sense strand starting at position 1825 of SEQ ID NO: 1241712
guguucacucgggaaagau

SEQ ID NO: 1293805 - RNA, 19 nt, Artificial Sequence
  Description of Artificial Sequence: Synthetic oligonucleotide
  Antisense strand to SEQ ID NO: 1293804
aucuuucccgagugaacac

SEQ ID NO: 1293806 - RNA, 19 nt, Artificial Sequence
  Description of Artificial Sequence: Synthetic oligonucleotide
  Sense strand starting at position 1888 of SEQ ID NO: 1241712
cuuuguacccuggagaguu

SEQ ID NO: 1293807 - RNA, 19 nt, Artificial Sequence
  Description of Artificial Sequence: Synthetic oligonucleotide
  Antisense strand to SEQ ID NO: 1293806
aacucuccaggguacaaag

SEQ ID NO: 1293808 - RNA, 19 nt, Artificial Sequence
  Description of Artificial Sequence: Synthetic oligonucleotide
  Sense strand starting at position 2084 of SEQ ID NO: 1241712
ugauuugugagcuggcucu

SEQ ID NO: 1293809 - RNA, 19 nt, Artificial Sequence
  Description of Artificial Sequence: Synthetic oligonucleotide
  Antisense strand to SEQ ID NO: 1293808
agagccagcucacaaauca

SEQ ID NO: 1293810 - RNA, 19 nt, Artificial Sequence
  Description of Artificial Sequence: Synthetic oligonucleotide
  Sense strand starting at position 2145 of SEQ ID NO: 1241712
gccugaagcucacugacuu

SEQ ID NO: 1293811 - RNA, 19 nt, Artificial Sequence
  Description of Artificial Sequence: Synthetic oligonucleotide
  Antisense strand to SEQ ID NO: 1293810
aagucagugagcuucaggc

SEQ ID NO: 1293812 - RNA, 19 nt, Artificial Sequence
  Description of Artificial Sequence: Synthetic oligonucleotide
  Sense strand starting at position 2186 of SEQ ID NO: 1241712
ucccguaagaaagaaugua

SEQ ID NO: 1293813 - RNA, 19 nt, Artificial Sequence
  Description of Artificial Sequence: Synthetic oligonucleotide
  Antisense strand to SEQ ID NO: 1293812
uacauucuuucuuacggga

SEQ ID NO: 1293814 - RNA, 19 nt, Artificial Sequence
  Description of Artificial Sequence: Synthetic oligonucleotide
  Sense strand starting at position 2194 of SEQ ID NO: 1241712
gaaagaauguauguuccgu

SEQ ID NO: 1293815 - RNA, 19 nt, Artificial Sequence
  Description of Artificial Sequence: Synthetic oligonucleotide
  Antisense strand to SEQ ID NO: 1293814
acggaacauacauucuuuc

SEQ ID NO: 1293816 - RNA, 19 nt, Artificial Sequence
  Description of Artificial Sequence: Synthetic oligonucleotide
  Sense strand starting at position 2196 of SEQ ID NO: 1241712
aagaauguauguuccguua

SEQ ID NO: 1293817 - RNA, 19 nt, Artificial Sequence
  Description of Artificial Sequence: Synthetic oligonucleotide
  Antisense strand to SEQ ID NO: 1293816
uaacggaacauacauucuu

SEQ ID NO: 1293818 - RNA, 19 nt, Artificial Sequence
  Description of Artificial Sequence: Synthetic oligonucleotide
  Sense strand starting at position 2203 of SEQ ID NO: 1241712
uauguuccguuaucaggau

SEQ ID NO: 1293819 - RNA, 19 nt, Artificial Sequence
  Description of Artificial Sequence: Synthetic oligonucleotide
  Antisense strand to SEQ ID NO: 1293818
auccugauaacggaacaua

SEQ ID NO: 1293820 - RNA, 19 nt, Artificial Sequence
  Description of Artificial Sequence: Synthetic oligonucleotide
  Sense strand starting at position 2225 of SEQ ID NO: 1241712
aaacgaacccugggacuua

SEQ ID NO: 1293821 - RNA, 19 nt, Artificial Sequence
  Description of Artificial Sequence: Synthetic oligonucleotide
  Antisense strand to SEQ ID NO: 1293820
uaagucccaggguucguuu

SEQ ID NO: 1293822 - RNA, 19 nt, Artificial Sequence
  Description of Artificial Sequence: Synthetic oligonucleotide
  Sense strand starting at position 2280 of SEQ ID NO: 1241712
acuguuccuguggaaggaa

SEQ ID NO: 1293823 - RNA, 19 nt, Artificial Sequence
  Description of Artificial Sequence: Synthetic oligonucleotide
  Antisense strand to SEQ ID NO: 1293822
uuccuuccacaggaacagu

SEQ ID NO: 1293824 - RNA, 19 nt, Artificial Sequence
  Description of Artificial Sequence: Synthetic oligonucleotide
  Sense strand starting at position 2350 of SEQ ID NO: 1241712
ucgguaagaucccugcaag

SEQ ID NO: 1293825 - RNA, 19 nt, Artificial Sequence
  Description of Artificial Sequence: Synthetic oligonucleotide
  Antisense strand to SEQ ID NO: 1293824
cuugcagggaucuuaccga

SEQ ID NO: 1293826 - RNA, 19 nt, Artificial Sequence
  Description of Artificial Sequence: Synthetic oligonucleotide
  Sense strand starting at position 2353 of SEQ ID NO: 1241712
guaagaucccugcaagccu

SEQ ID NO: 1293827 - RNA, 19 nt, Artificial Sequence
  Description of Artificial Sequence: Synthetic oligonucleotide
  Antisense strand to SEQ ID NO: 1293826
aggcuugcagggaucuuac

SEQ ID NO: 1293828 - RNA, 19 nt, Artificial Sequence
  Description of Artificial Sequence: Synthetic oligonucleotide
  Sense strand starting at position 2385 of SEQ ID NO: 1241712
gccuguucacaggaagagu

SEQ ID NO: 1293829 - RNA, 19 nt, Artificial Sequence
  Description of Artificial Sequence: Synthetic oligonucleotide
  Antisense strand to SEQ ID NO: 1293828
acucuuccugugaacaggc

SEQ ID NO: 1293830 - RNA, 19 nt, Artificial Sequence
  Description of Artificial Sequence: Synthetic oligonucleotide
  Sense strand starting at position 2517 of SEQ ID NO: 1241712
uccuccucucaguagaguu

SEQ ID NO: 1293831 - RNA, 19 nt, Artificial Sequence
  Description of Artificial Sequence: Synthetic oligonucleotide
  Antisense strand to SEQ ID NO: 1293830
aacucuacugagaggagga

SEQ ID NO: 1293832 - RNA, 19 nt, Artificial Sequence
  Description of Artificial Sequence: Synthetic oligonucleotide
  Sense strand starting at position 2519 of SEQ ID NO: 1241712
cuccucucaguagaguuua

SEQ ID NO: 1293833 - RNA, 19 nt, Artificial Sequence
  Description of Artificial Sequence: Synthetic oligonucleotide
  Antisense strand to SEQ ID NO: 1293832
uaaacucuacugagaggag

SEQ ID NO: 1293834 - RNA, 19 nt, Artificial Sequence
  Description of Artificial Sequence: Synthetic oligonucleotide
  Sense strand starting at position 2548 of SEQ ID NO: 1241712
aggcuaaacuccucaugga

SEQ ID NO: 1293835 - RNA, 19 nt, Artificial Sequence
  Description of Artificial Sequence: Synthetic oligonucleotide
  Antisense strand to SEQ ID NO: 1293834
uccaugaggaguuuagccu

SEQ ID NO: 1293836 - RNA, 19 nt, Artificial Sequence
  Description of Artificial Sequence: Synthetic oligonucleotide
  Sense strand starting at position 2643 of SEQ ID NO: 1241712
uugcuuuauccagguaauc

SEQ ID NO: 1293837 - RNA, 19 nt, Artificial Sequence
  Description of Artificial Sequence: Synthetic oligonucleotide
  Antisense strand to SEQ ID NO: 1293836
gauuaccuggauaaagcaa

SEQ ID NO: 1293838 - RNA, 19 nt, Artificial Sequence
  Description of Artificial Sequence: Synthetic oligonucleotide
  Sense strand starting at position 2717 of SEQ ID NO: 1241712
agaauaacuucuguagugu

SEQ ID NO: 1293839 - RNA, 19 nt, Artificial Sequence
  Description of Artificial Sequence: Synthetic oligonucleotide
  Antisense strand to SEQ ID NO: 1293838
acacuacagaaguuauucu

SEQ ID NO: 1293840 - RNA, 19 nt, Artificial Sequence
  Description of Artificial Sequence: Synthetic oligonucleotide
  Sense strand starting at position 2718 of SEQ ID NO: 1241712
gaauaacuucuguagugug

SEQ ID NO: 1293841 - RNA, 19 nt, Artificial Sequence
  Description of Artificial Sequence: Synthetic oligonucleotide
  Antisense strand to SEQ ID NO: 1293840
cacacuacagaaguuauuc

SEQ ID NO: 1293842 - RNA, 19 nt, Artificial Sequence
  Description of Artificial Sequence: Synthetic oligonucleotide
  Sense strand starting at position 2730 of SEQ ID NO: 1241712
uaguguguugaugauagca

SEQ ID NO: 1293843 - RNA, 19 nt, Artificial Sequence
  Description of Artificial Sequence: Synthetic oligonucleotide
  Antisense strand to SEQ ID NO: 1293842
ugcuaucaucaacacacua

SEQ ID NO: 1293844 - RNA, 19 nt, Artificial Sequence
  Description of Artificial Sequence: Synthetic oligonucleotide
  Sense strand starting at position 2779 of SEQ ID NO: 1241712
auaggaaugugugcaauua

SEQ ID NO: 1293845 - RNA, 19 nt, Artificial Sequence
  Description of Artificial Sequence: Synthetic oligonucleotide
  Antisense strand to SEQ ID NO: 1293844
uaauugcacacauuccuau

SEQ ID NO: 1293846 - RNA, 19 nt, Artificial Sequence
  Description of Artificial Sequence: Synthetic oligonucleotide
  Sense strand starting at position 2780 of SEQ ID NO: 1241712
uaggaaugugugcaauuau

SEQ ID NO: 1293847 - RNA, 19 nt, Artificial Sequence
  Description of Artificial Sequence: Synthetic oligonucleotide
  Antisense strand to SEQ ID NO: 1293846
auaauugcacacauuccua

SEQ ID NO: 1293848 - RNA, 19 nt, Artificial Sequence
  Description of Artificial Sequence: Synthetic oligonucleotide
  Sense strand starting at position 2797 of SEQ ID NO: 1241712
auuaaugaggaaugugcua

SEQ ID NO: 1293849 - RNA, 19 nt, Artificial Sequence
  Description of Artificial Sequence: Synthetic oligonucleotide
  Antisense strand to SEQ ID NO: 1293848
uagcacauuccucauuaau

SEQ ID NO: 1293850 - RNA, 19 nt, Artificial Sequence
  Description of Artificial Sequence: Synthetic oligonucleotide
  Sense strand starting at position 2883 of SEQ ID NO: 1241712
uucuuuaaaguggaaugua

SEQ ID NO: 1293851 - RNA, 19 nt, Artificial Sequence
  Description of Artificial Sequence: Synthetic oligonucleotide
  Antisense strand to SEQ ID NO: 1293850
uacauuccacuuuaaagaa

SEQ ID NO: 1293852 - RNA, 19 nt, Artificial Sequence
  Description of Artificial Sequence: Synthetic oligonucleotide
  Sense strand starting at position 2900 of SEQ ID NO: 1241712
uacaauugguguuuaguua

SEQ ID NO: 1293853 - RNA, 19 nt, Artificial Sequence
  Description of Artificial Sequence: Synthetic oligonucleotide
  Antisense strand to SEQ ID NO: 1293852
uaacuaaacaccaauugua

SEQ ID NO: 1293854 - RNA, 19 nt, Artificial Sequence
  Description of Artificial Sequence: Synthetic oligonucleotide
  Sense strand starting at position 2901 of SEQ ID NO: 1241712
acaauugguguuuaguuau

SEQ ID NO: 1293855 - RNA, 19 nt, Artificial Sequence
  Description of Artificial Sequence: Synthetic oligonucleotide
  Antisense strand to SEQ ID NO: 1293854
auaacuaaacaccaauugu

SEQ ID NO: 1293856 - RNA, 19 nt, Artificial Sequence
  Description of Artificial Sequence: Synthetic oligonucleotide
  Sense strand starting at position 3063 of SEQ ID NO: 1241712
gccaaucacugacuaaaga

SEQ ID NO: 1293857 - RNA, 19 nt, Artificial Sequence
  Description of Artificial Sequence: Synthetic oligonucleotide
  Antisense strand to SEQ ID NO: 1293856
ucuuuagucagugauuggc

SEQ ID NO: 1293858 - RNA, 19 nt, Artificial Sequence
  Description of Artificial Sequence: Synthetic oligonucleotide
  Sense strand starting at position 3150 of SEQ ID NO: 1241712
caugguugcucuuugggaa

SEQ ID NO: 1293859 - RNA, 19 nt, Artificial Sequence
  Description of Artificial Sequence: Synthetic oligonucleotide
  Antisense strand to SEQ ID NO: 1293858
uucccaaagagcaaccaug

SEQ ID NO: 1293860 - RNA, 19 nt, Artificial Sequence
  Description of Artificial Sequence: Synthetic oligonucleotide
  Sense strand starting at position 3151 of SEQ ID NO: 1241712
augguugcucuuugggaag

SEQ ID NO: 1293861 - RNA, 19 nt, Artificial Sequence
  Description of Artificial Sequence: Synthetic oligonucleotide
  Antisense strand to SEQ ID NO: 1293860
cuucccaaagagcaaccau

SEQ ID NO: 1293862 - RNA, 19 nt, Artificial Sequence
  Description of Artificial Sequence: Synthetic oligonucleotide
  Sense strand starting at position 3169 of SEQ ID NO: 1241712
gugugugaugggagucagu

SEQ ID NO: 1293863 - RNA, 19 nt, Artificial Sequence
  Description of Artificial Sequence: Synthetic oligonucleotide
  Antisense strand to SEQ ID NO: 1293862
acugacucccaucacacac

SEQ ID NO: 1293864 - RNA, 19 nt, Artificial Sequence
  Description of Artificial Sequence: Synthetic oligonucleotide
  Sense strand starting at position 3172 of SEQ ID NO: 1241712
ugugaugggagucagugaa

SEQ ID NO: 1293865 - RNA, 19 nt, Artificial Sequence
  Description of Artificial Sequence: Synthetic oligonucleotide
  Antisense strand to SEQ ID NO: 1293864
uucacugacucccaucaca

SEQ ID NO: 1293866 - RNA, 19 nt, Artificial Sequence
  Description of Artificial Sequence: Synthetic oligonucleotide
  Sense strand starting at position 3385 of SEQ ID NO: 1241712
aaauaaacguuagugagaa

SEQ ID NO: 1293867 - RNA, 19 nt, Artificial Sequence
  Description of Artificial Sequence: Synthetic oligonucleotide
  Antisense strand to SEQ ID NO: 1293866
uucucacuaacguuuauuu

SEQ ID NO: 1293868 - RNA, 19 nt, Artificial Sequence
  Description of Artificial Sequence: Synthetic oligonucleotide
  Sense strand starting at position 181 of SEQ ID NO: 1241713
uagggaagauugguuagua

SEQ ID NO: 1293869 - RNA, 19 nt, Artificial Sequence
  Description of Artificial Sequence: Synthetic oligonucleotide
  Antisense strand to SEQ ID NO: 1293868
uacuaaccaaucuucccua

SEQ ID NO: 1293870 - RNA, 19 nt, Artificial Sequence
  Description of Artificial Sequence: Synthetic oligonucleotide
  Sense strand starting at position 182 of SEQ ID NO: 1241713
agggaagauugguuaguau

SEQ ID NO: 1293871 - RNA, 19 nt, Artificial Sequence
  Description of Artificial Sequence: Synthetic oligonucleotide
  Antisense strand to SEQ ID NO: 1293870
auacuaaccaaucuucccu

SEQ ID NO: 1293872 - RNA, 19 nt, Artificial Sequence
  Description of Artificial Sequence: Synthetic oligonucleotide
  Sense strand starting at position 185 of SEQ ID NO: 1241713
gaagauugguuaguaucuu

SEQ ID NO: 1293873 - RNA, 19 nt, Artificial Sequence
  Description of Artificial Sequence: Synthetic oligonucleotide
  Antisense strand to SEQ ID NO: 1293872
aagauacuaaccaaucuuc

SEQ ID NO: 1293874 - RNA, 19 nt, Artificial Sequence
  Description of Artificial Sequence: Synthetic oligonucleotide
  Sense strand starting at position 259 of SEQ ID NO: 1241713
agguuauuauacguaauac

SEQ ID NO: 1293875 - RNA, 19 nt, Artificial Sequence
  Description of Artificial Sequence: Synthetic oligonucleotide
  Antisense strand to SEQ ID NO: 1293874
guauuacguauaauaaccu

SEQ ID NO: 1293876 - RNA, 19 nt, Artificial Sequence
  Description of Artificial Sequence: Synthetic oligonucleotide
  Sense strand starting at position 332 of SEQ ID NO: 1241713
cucugaaugcuugagcauc

SEQ ID NO: 1293877 - RNA, 19 nt, Artificial Sequence
  Description of Artificial Sequence: Synthetic oligonucleotide
  Antisense strand to SEQ ID NO: 1293876
gaugcucaagcauucagag

SEQ ID NO: 1293878 - RNA, 19 nt, Artificial Sequence
  Description of Artificial Sequence: Synthetic oligonucleotide
  Sense strand starting at position 388 of SEQ ID NO: 1241713
aucugaucgcuggauguaa

SEQ ID NO: 1293879 - RNA, 19 nt, Artificial Sequence
  Description of Artificial Sequence: Synthetic oligonucleotide
  Antisense strand to SEQ ID NO: 1293878
uuacauccagcgaucagau

SEQ ID NO: 1293880 - RNA, 19 nt, Artificial Sequence
  Description of Artificial Sequence: Synthetic oligonucleotide
  Sense strand starting at position 511 of SEQ ID NO: 1241713
guagcaauauaaguggaau

SEQ ID NO: 1293881 - RNA, 19 nt, Artificial Sequence
  Description of Artificial Sequence: Synthetic oligonucleotide
  Antisense strand to SEQ ID NO: 1293880
auuccacuuauauugcuac

SEQ ID NO: 1293882 - RNA, 19 nt, Artificial Sequence
  Description of Artificial Sequence: Synthetic oligonucleotide
  Sense strand starting at position 611 of SEQ ID NO: 1241713
uuacaugaacggugagaau

SEQ ID NO: 1293883 - RNA, 19 nt, Artificial Sequence
  Description of Artificial Sequence: Synthetic oligonucleotide
  Antisense strand to SEQ ID NO: 1293882
auucucaccguucauguaa

SEQ ID NO: 1293884 - RNA, 19 nt, Artificial Sequence
  Description of Artificial Sequence: Synthetic oligonucleotide
  Sense strand starting at position 686 of SEQ ID NO: 1241713
cccucacaccuaugagaug

SEQ ID NO: 1293885 - RNA, 19 nt, Artificial Sequence
  Description of Artificial Sequence: Synthetic oligonucleotide
  Antisense strand to SEQ ID NO: 1293884
caucucauaggugugaggg

SEQ ID NO: 1293886 - RNA, 19 nt, Artificial Sequence
  Description of Artificial Sequence: Synthetic oligonucleotide
  Sense strand starting at position 691 of SEQ ID NO: 1241713
acaccuaugagaugggcau

SEQ ID NO: 1293887 - RNA, 19 nt, Artificial Sequence
  Description of Artificial Sequence: Synthetic oligonucleotide
  Antisense strand to SEQ ID NO: 1293886
augcccaucucauaggugu

SEQ ID NO: 1293888 - RNA, 19 nt, Artificial Sequence
  Description of Artificial Sequence: Synthetic oligonucleotide
  Sense strand starting at position 692 of SEQ ID NO: 1241713
caccuaugagaugggcauu

SEQ ID NO: 1293889 - RNA, 19 nt, Artificial Sequence
  Description of Artificial Sequence: Synthetic oligonucleotide
  Antisense strand to SEQ ID NO: 1293888
aaugcccaucucauaggug

SEQ ID NO: 1293890 - RNA, 19 nt, Artificial Sequence
  Description of Artificial Sequence: Synthetic oligonucleotide
  Sense strand starting at position 829 of SEQ ID NO: 1241713
ggcaccuaaccaugggauu

SEQ ID NO: 1293891 - RNA, 19 nt, Artificial Sequence
  Description of Artificial Sequence: Synthetic oligonucleotide
  Antisense strand to SEQ ID NO: 1293890
aaucccaugguuaggugcc

SEQ ID NO: 1293892 - RNA, 19 nt, Artificial Sequence
  Description of Artificial Sequence: Synthetic oligonucleotide
  Sense strand starting at position 830 of SEQ ID NO: 1241713
gcaccuaaccaugggauua

SEQ ID NO: 1293893 - RNA, 19 nt, Artificial Sequence
  Description of Artificial Sequence: Synthetic oligonucleotide
  Antisense strand to SEQ ID NO: 1293892
uaaucccaugguuaggugc

SEQ ID NO: 1293894 - RNA, 19 nt, Artificial Sequence
  Description of Artificial Sequence: Synthetic oligonucleotide
  Sense strand starting at position 1267 of SEQ ID NO: 1241713
gcccgaaacaucgagucau

SEQ ID NO: 1293895 - RNA, 19 nt, Artificial Sequence
  Description of Artificial Sequence: Synthetic oligonucleotide
  Antisense strand to SEQ ID NO: 1293894
augacucgauguuucgggc

SEQ ID NO: 1293896 - RNA, 19 nt, Artificial Sequence
  Description of Artificial Sequence: Synthetic oligonucleotide
  Sense strand starting at position 1386 of SEQ ID NO: 1241713
cuaguuucccuaggacauu

SEQ ID NO: 1293897 - RNA, 19 nt, Artificial Sequence
  Description of Artificial Sequence: Synthetic oligonucleotide
  Antisense strand to SEQ ID NO: 1293896
aauguccuagggaaacuag

SEQ ID NO: 1293898 - RNA, 19 nt, Artificial Sequence
  Description of Artificial Sequence: Synthetic oligonucleotide
  Sense strand starting at position 1408 of SEQ ID NO: 1241713
uaagauuucguuugagcau

SEQ ID NO: 1293899 - RNA, 19 nt, Artificial Sequence
  Description of Artificial Sequence: Synthetic oligonucleotide
  Antisense strand to SEQ ID NO: 1293898
augcucaaacgaaaucuua

SEQ ID NO: 1293900 - RNA, 19 nt, Artificial Sequence
  Description of Artificial Sequence: Synthetic oligonucleotide
  Sense strand starting at position 1411 of SEQ ID NO: 1241713
gauuucguuugagcauaac

SEQ ID NO: 1293901 - RNA, 19 nt, Artificial Sequence
  Description of Artificial Sequence: Synthetic oligonucleotide
  Antisense strand to SEQ ID NO: 1293900
guuaugcucaaacgaaauc

SEQ ID NO: 1293902 - RNA, 19 nt, Artificial Sequence
  Description of Artificial Sequence: Synthetic oligonucleotide
  Sense strand starting at position 1414 of SEQ ID NO: 1241713
uucguuugagcauaacuca

SEQ ID NO: 1293903 - RNA, 19 nt, Artificial Sequence
  Description of Artificial Sequence: Synthetic oligonucleotide
  Antisense strand to SEQ ID NO: 1293902
ugaguuaugcucaaacgaa

SEQ ID NO: 1293904 - RNA, 19 nt, Artificial Sequence
  Description of Artificial Sequence: Synthetic oligonucleotide
  Sense strand starting at position 1433 of SEQ ID NO: 1241713
ccgugaguaccuuaacuga

SEQ ID NO: 1293905 - RNA, 19 nt, Artificial Sequence
  Description of Artificial Sequence: Synthetic oligonucleotide
  Antisense strand to SEQ ID NO: 1293904
ucaguuaagguacucacgg

SEQ ID NO: 1293906 - RNA, 19 nt, Artificial Sequence
  Description of Artificial Sequence: Synthetic oligonucleotide
  Sense strand starting at position 1446 of SEQ ID NO: 1241713
aacugagguagucacguaa

SEQ ID NO: 1293907 - RNA, 19 nt, Artificial Sequence
  Description of Artificial Sequence: Synthetic oligonucleotide
  Antisense strand to SEQ ID NO: 1293906
uuacgugacuaccucaguu

SEQ ID NO: 1293908 - RNA, 19 nt, Artificial Sequence
  Description of Artificial Sequence: Synthetic oligonucleotide
  Sense strand starting at position 1483 of SEQ ID NO: 1241713
cuguguaaccuacaaauca

SEQ ID NO: 1293909 - RNA, 19 nt, Artificial Sequence
  Description of Artificial Sequence: Synthetic oligonucleotide
  Antisense strand to SEQ ID NO: 1293908
ugauuuguagguuacacag

SEQ ID NO: 1293910 - RNA, 19 nt, Artificial Sequence
  Description of Artificial Sequence: Synthetic oligonucleotide
  Sense strand starting at position 1638 of SEQ ID NO: 1241713
gaaguagguucccuuuaca

SEQ ID NO: 1293911 - RNA, 19 nt, Artificial Sequence
  Description of Artificial Sequence: Synthetic oligonucleotide
  Antisense strand to SEQ ID NO: 1293910
uguaaagggaaccuacuuc

SEQ ID NO: 1293912 - RNA, 19 nt, Artificial Sequence
  Description of Artificial Sequence: Synthetic oligonucleotide
  Sense strand starting at position 1641 of SEQ ID NO: 1241713
guagguucccuuuacagag

SEQ ID NO: 1293913 - RNA, 19 nt, Artificial Sequence
  Description of Artificial Sequence: Synthetic oligonucleotide
  Antisense strand to SEQ ID NO: 1293912
cucuguaaagggaaccuac

SEQ ID NO: 1293914 - RNA, 19 nt, Artificial Sequence
  Description of Artificial Sequence: Synthetic oligonucleotide
  Sense strand starting at position 2016 of SEQ ID NO: 1241713
ucugauaugcgacagcaaa

SEQ ID NO: 1293915 - RNA, 19 nt, Artificial Sequence
  Description of Artificial Sequence: Synthetic oligonucleotide
  Antisense strand to SEQ ID NO: 1293914
uuugcugucgcauaucaga

SEQ ID NO: 1293916 - RNA, 19 nt, Artificial Sequence
  Description of Artificial Sequence: Synthetic oligonucleotide
  Sense strand starting at position 2131 of SEQ ID NO: 1241713
gaguaugauggauggcaca

SEQ ID NO: 1293917 - RNA, 19 nt, Artificial Sequence
  Description of Artificial Sequence: Synthetic oligonucleotide
  Antisense strand to SEQ ID NO: 1293916
ugugccauccaucauacuc

SEQ ID NO: 1293918 - RNA, 19 nt, Artificial Sequence
  Description of Artificial Sequence: Synthetic oligonucleotide
  Sense strand starting at position 2207 of SEQ ID NO: 1241713
auggguggugacugagaaa

SEQ ID NO: 1293919 - RNA, 19 nt, Artificial Sequence
  Description of Artificial Sequence: Synthetic oligonucleotide
  Antisense strand to SEQ ID NO: 1293918
uuucucagucaccacccau

SEQ ID NO: 1293920 - RNA, 19 nt, Artificial Sequence
  Description of Artificial Sequence: Synthetic oligonucleotide
  Sense strand starting at position 2447 of SEQ ID NO: 1241713
cuguuaacucuuuagagca

SEQ ID NO: 1293921 - RNA, 19 nt, Artificial Sequence
  Description of Artificial Sequence: Synthetic oligonucleotide
  Antisense strand to SEQ ID NO: 1293920
ugcucuaaagaguuaacag

SEQ ID NO: 1293922 - RNA, 19 nt, Artificial Sequence
  Description of Artificial Sequence: Synthetic oligonucleotide
  Sense strand starting at position 2507 of SEQ ID NO: 1241713
agcuucuagaucuaagcga

SEQ ID NO: 1293923 - RNA, 19 nt, Artificial Sequence
  Description of Artificial Sequence: Synthetic oligonucleotide
  Antisense strand to SEQ ID NO: 1293922
ucgcuuagaucuagaagcu

SEQ ID NO: 1293924 - RNA, 19 nt, Artificial Sequence
  Description of Artificial Sequence: Synthetic oligonucleotide
  Sense strand starting at position 2522 of SEQ ID NO: 1241713
gcgauuaagagagguaggu

SEQ ID NO: 1293925 - RNA, 19 nt, Artificial Sequence
  Description of Artificial Sequence: Synthetic oligonucleotide
  Antisense strand to SEQ ID NO: 1293924
accuaccucucuuaaucgc

SEQ ID NO: 1293926 - RNA, 19 nt, Artificial Sequence
  Description of Artificial Sequence: Synthetic oligonucleotide
  Sense strand starting at position 2526 of SEQ ID NO: 1241713
uuaagagagguagguuuaa

SEQ ID NO: 1293927 - RNA, 19 nt, Artificial Sequence
  Description of Artificial Sequence: Synthetic oligonucleotide
  Antisense strand to SEQ ID NO: 1293926
uuaaaccuaccucucuuaa

SEQ ID NO: 1293928 - RNA, 19 nt, Artificial Sequence
  Description of Artificial Sequence: Synthetic oligonucleotide
  Sense strand starting at position 2726 of SEQ ID NO: 1241713
acgcaugauagcuauugau

SEQ ID NO: 1293929 - RNA, 19 nt, Artificial Sequence
  Description of Artificial Sequence: Synthetic oligonucleotide
  Antisense strand to SEQ ID NO: 1293928
aucaauagcuaucaugcgu

SEQ ID NO: 1293930 - RNA, 19 nt, Artificial Sequence
  Description of Artificial Sequence: Synthetic oligonucleotide
  Sense strand starting at position 2801 of SEQ ID NO: 1241713
gucugaaguagagggaaau

SEQ ID NO: 1293931 - RNA, 19 nt, Artificial Sequence
  Description of Artificial Sequence: Synthetic oligonucleotide
  Antisense strand to SEQ ID NO: 1293930
auuucccucuacuucagac

SEQ ID NO: 1293932 - RNA, 19 nt, Artificial Sequence
  Description of Artificial Sequence: Synthetic oligonucleotide
  Sense strand starting at position 2945 of SEQ ID NO: 1241713
acuggauacgucuaccaaa

SEQ ID NO: 1293933 - RNA, 19 nt, Artificial Sequence
  Description of Artificial Sequence: Synthetic oligonucleotide
  Antisense strand to SEQ ID NO: 1293932
uuugguagacguauccagu

SEQ ID NO: 1293934 - RNA, 19 nt, Artificial Sequence
  Description of Artificial Sequence: Synthetic oligonucleotide
  Sense strand starting at position 3536 of SEQ ID NO: 1241713
acucuacuucucggcauuu

SEQ ID NO: 1293935 - RNA, 19 nt, Artificial Sequence
  Description of Artificial Sequence: Synthetic oligonucleotide
  Antisense strand to SEQ ID NO: 1293934
aaaugccgagaaguagagu

SEQ ID NO: 1293936 - RNA, 19 nt, Artificial Sequence
  Description of Artificial Sequence: Synthetic oligonucleotide
  Sense strand starting at position 3554 of SEQ ID NO: 1241713
uggcaugaaauaugcuuga

SEQ ID NO: 1293937 - RNA, 19 nt, Artificial Sequence
  Description of Artificial Sequence: Synthetic oligonucleotide
  Antisense strand to SEQ ID NO: 1293936
ucaagcauauuucaugcca

SEQ ID NO: 1293938 - RNA, 19 nt, Artificial Sequence
  Description of Artificial Sequence: Synthetic oligonucleotide
  Sense strand starting at position 3558 of SEQ ID NO: 1241713
augaaauaugcuugagaau

SEQ ID NO: 1293939 - RNA, 19 nt, Artificial Sequence
  Description of Artificial Sequence: Synthetic oligonucleotide
  Antisense strand to SEQ ID NO: 1293938
auucucaagcauauuucau

SEQ ID NO: 1293940 - RNA, 19 nt, Artificial Sequence
  Description of Artificial Sequence: Synthetic oligonucleotide
  Sense strand starting at position 3871 of SEQ ID NO: 1241713
gaagcagggucaguuauua

SEQ ID NO: 1293941 - RNA, 19 nt, Artificial Sequence
  Description of Artificial Sequence: Synthetic oligonucleotide
  Antisense strand to SEQ ID NO: 1293940
uaauaacugacccugcuuc

SEQ ID NO: 1293942 - RNA, 19 nt, Artificial Sequence
  Description of Artificial Sequence: Synthetic oligonucleotide
  Sense strand starting at position 3875 of SEQ ID NO: 1241713
cagggucaguuauuauaga

SEQ ID NO: 1293943 - RNA, 19 nt, Artificial Sequence
  Description of Artificial Sequence: Synthetic oligonucleotide
  Antisense strand to SEQ ID NO: 1293942
ucuauaauaacugacccug

SEQ ID NO: 1293944 - RNA, 19 nt, Artificial Sequence
  Description of Artificial Sequence: Synthetic oligonucleotide
  Sense strand starting at position 3932 of SEQ ID NO: 1241713
uugaccuuuccagguuaga

SEQ ID NO: 1293945 - RNA, 19 nt, Artificial Sequence
  Description of Artificial Sequence: Synthetic oligonucleotide
  Antisense strand to SEQ ID NO: 1293944
ucuaaccuggaaaggucaa

SEQ ID NO: 1293946 - RNA, 19 nt, Artificial Sequence
  Description of Artificial Sequence: Synthetic oligonucleotide
  Sense strand starting at position 3978 of SEQ ID NO: 1241713
gcaaguuugacagaguuua

SEQ ID NO: 1293947 - RNA, 19 nt, Artificial Sequence
  Description of Artificial Sequence: Synthetic oligonucleotide
  Antisense strand to SEQ ID NO: 1293946
uaaacucugucaaacuugc

SEQ ID NO: 1293948 - RNA, 19 nt, Artificial Sequence
  Description of Artificial Sequence: Synthetic oligonucleotide
  Sense strand starting at position 373 of SEQ ID NO: 1241714
uagggaagauugguuagua

SEQ ID NO: 1293949 - RNA, 19 nt, Artificial Sequence
  Description of Artificial Sequence: Synthetic oligonucleotide
  Antisense strand to SEQ ID NO: 1293948
uacuaaccaaucuucccua

SEQ ID NO: 1293950 - RNA, 19 nt, Artificial Sequence
  Description of Artificial Sequence: Synthetic oligonucleotide
  Sense strand starting at position 374 of SEQ ID NO: 1241714
agggaagauugguuaguau

SEQ ID NO: 1293951 - RNA, 19 nt, Artificial Sequence
  Description of Artificial Sequence: Synthetic oligonucleotide
  Antisense strand to SEQ ID NO: 1293950
auacuaaccaaucuucccu

SEQ ID NO: 1293952 - RNA, 19 nt, Artificial Sequence
  Description of Artificial Sequence: Synthetic oligonucleotide
  Sense strand starting at position 377 of SEQ ID NO: 1241714
gaagauugguuaguaucuu

SEQ ID NO: 1293953 - RNA, 19 nt, Artificial Sequence
  Description of Artificial Sequence: Synthetic oligonucleotide
  Antisense strand to SEQ ID NO: 1293952
aagauacuaaccaaucuuc

SEQ ID NO: 1293954 - RNA, 19 nt, Artificial Sequence
  Description of Artificial Sequence: Synthetic oligonucleotide
  Sense strand starting at position 451 of SEQ ID NO: 1241714
agguuauuauacguaauac

SEQ ID NO: 1293955 - RNA, 19 nt, Artificial Sequence
  Description of Artificial Sequence: Synthetic oligonucleotide
  Antisense strand to SEQ ID NO: 1293954
guauuacguauaauaaccu

SEQ ID NO: 1293956 - RNA, 19 nt, Artificial Sequence
  Description of Artificial Sequence: Synthetic oligonucleotide
  Sense strand starting at position 524 of SEQ ID NO: 1241714
cucugaaugcuugagcauc

SEQ ID NO: 1293957 - RNA, 19 nt, Artificial Sequence
  Description of Artificial Sequence: Synthetic oligonucleotide
  Antisense strand to SEQ ID NO: 1293956
gaugcucaagcauucagag

SEQ ID NO: 1293958 - RNA, 19 nt, Artificial Sequence
  Description of Artificial Sequence: Synthetic oligonucleotide
  Sense strand starting at position 580 of SEQ ID NO: 1241714
aucugaucgcuggauguaa

SEQ ID NO: 1293959 - RNA, 19 nt, Artificial Sequence
  Description of Artificial Sequence: Synthetic oligonucleotide
  Antisense strand to SEQ ID NO: 1293958
uuacauccagcgaucagau

SEQ ID NO: 1293960 - RNA, 19 nt, Artificial Sequence
  Description of Artificial Sequence: Synthetic oligonucleotide
  Sense strand starting at position 584 of SEQ ID NO: 1241714
gaucgcuggauguaauguu

SEQ ID NO: 1293961 - RNA, 19 nt, Artificial Sequence
  Description of Artificial Sequence: Synthetic oligonucleotide
  Antisense strand to SEQ ID NO: 1293960
aacauuacauccagcgauc

SEQ ID NO: 1293962 - RNA, 19 nt, Artificial Sequence
  Description of Artificial Sequence: Synthetic oligonucleotide
  Sense strand starting at position 630 of SEQ ID NO: 1241714
ggcauauguguauaguuac

SEQ ID NO: 1293963 - RNA, 19 nt, Artificial Sequence
  Description of Artificial Sequence: Synthetic oligonucleotide
  Antisense strand to SEQ ID NO: 1293962
guaacuauacacauaugcc

SEQ ID NO: 1293964 - RNA, 19 nt, Artificial Sequence
  Description of Artificial Sequence: Synthetic oligonucleotide
  Sense strand starting at position 703 of SEQ ID NO: 1241714
guagcaauauaaguggaau

SEQ ID NO: 1293965 - RNA, 19 nt, Artificial Sequence
  Description of Artificial Sequence: Synthetic oligonucleotide
  Antisense strand to SEQ ID NO: 1293964
auuccacuuauauugcuac

SEQ ID NO: 1293966 - RNA, 19 nt, Artificial Sequence
  Description of Artificial Sequence: Synthetic oligonucleotide
  Sense strand starting at position 803 of SEQ ID NO: 1241714
uuacaugaacggugagaau

SEQ ID NO: 1293967 - RNA, 19 nt, Artificial Sequence
  Description of Artificial Sequence: Synthetic oligonucleotide
  Antisense strand to SEQ ID NO: 1293966
auucucaccguucauguaa

SEQ ID NO: 1293968 - RNA, 19 nt, Artificial Sequence
  Description of Artificial Sequence: Synthetic oligonucleotide
  Sense strand starting at position 878 of SEQ ID NO: 1241714
cccucacaccuaugagaug

SEQ ID NO: 1293969 - RNA, 19 nt, Artificial Sequence
  Description of Artificial Sequence: Synthetic oligonucleotide
  Antisense strand to SEQ ID NO: 1293968
caucucauaggugugaggg

SEQ ID NO: 1293970 - RNA, 19 nt, Artificial Sequence
  Description of Artificial Sequence: Synthetic oligonucleotide
  Sense strand starting at position 883 of SEQ ID NO: 1241714
acaccuaugagaugggcau

SEQ ID NO: 1293971 - RNA, 19 nt, Artificial Sequence
  Description of Artificial Sequence: Synthetic oligonucleotide
  Antisense strand to SEQ ID NO: 1293970
augcccaucucauaggugu

SEQ ID NO: 1293972 - RNA, 19 nt, Artificial Sequence
  Description of Artificial Sequence: Synthetic oligonucleotide
  Sense strand starting at position 884 of SEQ ID NO: 1241714
caccuaugagaugggcauu

SEQ ID NO: 1293973 - RNA, 19 nt, Artificial Sequence
  Description of Artificial Sequence: Synthetic oligonucleotide
  Antisense strand to SEQ ID NO: 1293972
aaugcccaucucauaggug

SEQ ID NO: 1293974 - RNA, 19 nt, Artificial Sequence
  Description of Artificial Sequence: Synthetic oligonucleotide
  Sense strand starting at position 1021 of SEQ ID NO: 1241714
ggcaccuaaccaugggauu

SEQ ID NO: 1293975 - RNA, 19 nt, Artificial Sequence
  Description of Artificial Sequence: Synthetic oligonucleotide
  Antisense strand to SEQ ID NO: 1293974
aaucccaugguuaggugcc

SEQ ID NO: 1293976 - RNA, 19 nt, Artificial Sequence
  Description of Artificial Sequence: Synthetic oligonucleotide
  Sense strand starting at position 1022 of SEQ ID NO: 1241714
gcaccuaaccaugggauua

SEQ ID NO: 1293977 - RNA, 19 nt, Artificial Sequence
  Description of Artificial Sequence: Synthetic oligonucleotide
  Antisense strand to SEQ ID NO: 1293976
uaaucccaugguuaggugc

SEQ ID NO: 1293978 - RNA, 19 nt, Artificial Sequence
  Description of Artificial Sequence: Synthetic oligonucleotide
  Sense strand starting at position 1459 of SEQ ID NO: 1241714
gcccgaaacaucgagucau

SEQ ID NO: 1293979 - RNA, 19 nt, Artificial Sequence
  Description of Artificial Sequence: Synthetic oligonucleotide
  Antisense strand to SEQ ID NO: 1293978
augacucgauguuucgggc

SEQ ID NO: 1293980 - RNA, 19 nt, Artificial Sequence
  Description of Artificial Sequence: Synthetic oligonucleotide
  Sense strand starting at position 1578 of SEQ ID NO: 1241714
cuaguuucccuaggacauu

SEQ ID NO: 1293981 - RNA, 19 nt, Artificial Sequence
  Description of Artificial Sequence: Synthetic oligonucleotide
  Antisense strand to SEQ ID NO: 1293980
aauguccuagggaaacuag

SEQ ID NO: 1293982 - RNA, 19 nt, Artificial Sequence
  Description of Artificial Sequence: Synthetic oligonucleotide
  Sense strand starting at position 1600 of SEQ ID NO: 1241714
uaagauuucguuugagcau

SEQ ID NO: 1293983 - RNA, 19 nt, Artificial Sequence
  Description of Artificial Sequence: Synthetic oligonucleotide
  Antisense strand to SEQ ID NO: 1293982
augcucaaacgaaaucuua

SEQ ID NO: 1293984 - RNA, 19 nt, Artificial Sequence
  Description of Artificial Sequence: Synthetic oligonucleotide
  Sense strand starting at position 1603 of SEQ ID NO: 1241714
gauuucguuugagcauaac

SEQ ID NO: 1293985 - RNA, 19 nt, Artificial Sequence
  Description of Artificial Sequence: Synthetic oligonucleotide
  Antisense strand to SEQ ID NO: 1293984
guuaugcucaaacgaaauc

SEQ ID NO: 1293986 - RNA, 19 nt, Artificial Sequence
  Description of Artificial Sequence: Synthetic oligonucleotide
  Sense strand starting at position 1606 of SEQ ID NO: 1241714
uucguuugagcauaacuca

SEQ ID NO: 1293987 - RNA, 19 nt, Artificial Sequence
  Description of Artificial Sequence: Synthetic oligonucleotide
  Antisense strand to SEQ ID NO: 1293986
ugaguuaugcucaaacgaa

SEQ ID NO: 1293988 - RNA, 19 nt, Artificial Sequence
  Description of Artificial Sequence: Synthetic oligonucleotide
  Sense strand starting at position 1625 of SEQ ID NO: 1241714
ccgugaguaccuuaacuga

SEQ ID NO: 1293989 - RNA, 19 nt, Artificial Sequence
  Description of Artificial Sequence: Synthetic oligonucleotide
  Antisense strand to SEQ ID NO: 1293988
ucaguuaagguacucacgg

SEQ ID NO: 1293990 - RNA, 19 nt, Artificial Sequence
  Description of Artificial Sequence: Synthetic oligonucleotide
  Sense strand starting at position 1638 of SEQ ID NO: 1241714
aacugagguagucacguaa

SEQ ID NO: 1293991 - RNA, 19 nt, Artificial Sequence
  Description of Artificial Sequence: Synthetic oligonucleotide
  Antisense strand to SEQ ID NO: 1293990
uuacgugacuaccucaguu

SEQ ID NO: 1293992 - RNA, 19 nt, Artificial Sequence
  Description of Artificial Sequence: Synthetic oligonucleotide
  Sense strand starting at position 1675 of SEQ ID NO: 1241714
cuguguaaccuacaaauca

SEQ ID NO: 1293993 - RNA, 19 nt, Artificial Sequence
  Description of Artificial Sequence: Synthetic oligonucleotide
  Antisense strand to SEQ ID NO: 1293992
ugauuuguagguuacacag

SEQ ID NO: 1293994 - RNA, 19 nt, Artificial Sequence
  Description of Artificial Sequence: Synthetic oligonucleotide
  Sense strand starting at position 1830 of SEQ ID NO: 1241714
gaaguagguucccuuuaca

SEQ ID NO: 1293995 - RNA, 19 nt, Artificial Sequence
  Description of Artificial Sequence: Synthetic oligonucleotide
  Antisense strand to SEQ ID NO: 1293994
uguaaagggaaccuacuuc

SEQ ID NO: 1293996 - RNA, 19 nt, Artificial Sequence
  Description of Artificial Sequence: Synthetic oligonucleotide
  Sense strand starting at position 1833 of SEQ ID NO: 1241714
guagguucccuuuacagag

SEQ ID NO: 1293997 - RNA, 19 nt, Artificial Sequence
  Description of Artificial Sequence: Synthetic oligonucleotide
  Antisense strand to SEQ ID NO: 1293996
cucuguaaagggaaccuac

SEQ ID NO: 1293998 - RNA, 19 nt, Artificial Sequence
  Description of Artificial Sequence: Synthetic oligonucleotide
  Sense strand starting at position 2208 of SEQ ID NO: 1241714
ucugauaugcgacagcaaa

SEQ ID NO: 1293999 - RNA, 19 nt, Artificial Sequence
  Description of Artificial Sequence: Synthetic oligonucleotide
  Antisense strand to SEQ ID NO: 1293998
uuugcugucgcauaucaga

SEQ ID NO: 1294000 - RNA, 19 nt, Artificial Sequence
  Description of Artificial Sequence: Synthetic oligonucleotide
  Sense strand starting at position 2313 of SEQ ID NO: 1241714
cagggugccugaguaugau

SEQ ID NO: 1294001 - RNA, 19 nt, Artificial Sequence
  Description of Artificial Sequence: Synthetic oligonucleotide
  Antisense strand to SEQ ID NO: 1294000
aucauacucaggcacccug

SEQ ID NO: 1294002 - RNA, 19 nt, Artificial Sequence
  Description of Artificial Sequence: Synthetic oligonucleotide
  Sense strand starting at position 2323 of SEQ ID NO: 1241714
gaguaugauggauggcaca

SEQ ID NO: 1294003 - RNA, 19 nt, Artificial Sequence
  Description of Artificial Sequence: Synthetic oligonucleotide
  Antisense strand to SEQ ID NO: 1294002
ugugccauccaucauacuc

SEQ ID NO: 1294004 - RNA, 19 nt, Artificial Sequence
  Description of Artificial Sequence: Synthetic oligonucleotide
  Sense strand starting at position 2399 of SEQ ID NO: 1241714
auggguggugacugagaaa

SEQ ID NO: 1294005 - RNA, 19 nt, Artificial Sequence
  Description of Artificial Sequence: Synthetic oligonucleotide
  Antisense strand to SEQ ID NO: 1294004
uuucucagucaccacccau

SEQ ID NO: 1294006 - RNA, 19 nt, Artificial Sequence
  Description of Artificial Sequence: Synthetic oligonucleotide
  Sense strand starting at position 2639 of SEQ ID NO: 1241714
cuguuaacucuuuagagca

SEQ ID NO: 1294007 - RNA, 19 nt, Artificial Sequence
  Description of Artificial Sequence: Synthetic oligonucleotide
  Antisense strand to SEQ ID NO: 1294006
ugcucuaaagaguuaacag

SEQ ID NO: 1294008 - RNA, 19 nt, Artificial Sequence
  Description of Artificial Sequence: Synthetic oligonucleotide
  Sense strand starting at position 2699 of SEQ ID NO: 1241714
agcuucuagaucuaagcga

SEQ ID NO: 1294009 - RNA, 19 nt, Artificial Sequence
  Description of Artificial Sequence: Synthetic oligonucleotide
  Antisense strand to SEQ ID NO: 1294008
ucgcuuagaucuagaagcu

SEQ ID NO: 1294010 - RNA, 19 nt, Artificial Sequence
  Description of Artificial Sequence: Synthetic oligonucleotide
  Sense strand starting at position 2714 of SEQ ID NO: 1241714
gcgauuaagagagguaggu

SEQ ID NO: 1294011 - RNA, 19 nt, Artificial Sequence
  Description of Artificial Sequence: Synthetic oligonucleotide
  Antisense strand to SEQ ID NO: 1294010
accuaccucucuuaaucgc

SEQ ID NO: 1294012 - RNA, 19 nt, Artificial Sequence
  Description of Artificial Sequence: Synthetic oligonucleotide
  Sense strand starting at position 2718 of SEQ ID NO: 1241714
uuaagagagguagguuuaa

SEQ ID NO: 1294013 - RNA, 19 nt, Artificial Sequence
  Description of Artificial Sequence: Synthetic oligonucleotide
  Antisense strand to SEQ ID NO: 1294012
uuaaaccuaccucucuuaa

SEQ ID NO: 1294014 - RNA, 19 nt, Artificial Sequence
  Description of Artificial Sequence: Synthetic oligonucleotide
  Sense strand starting at position 2917 of SEQ ID NO: 1241714
aacgcaugauagcuauuga

SEQ ID NO: 1294015 - RNA, 19 nt, Artificial Sequence
  Description of Artificial Sequence: Synthetic oligonucleotide
  Antisense strand to SEQ ID NO: 1294014
ucaauagcuaucaugcguu

SEQ ID NO: 1294016 - RNA, 19 nt, Artificial Sequence
  Description of Artificial Sequence: Synthetic oligonucleotide
  Sense strand starting at position 2918 of SEQ ID NO: 1241714
acgcaugauagcuauugau

SEQ ID NO: 1294017 - RNA, 19 nt, Artificial Sequence
  Description of Artificial Sequence: Synthetic oligonucleotide
  Antisense strand to SEQ ID NO: 1294016
aucaauagcuaucaugcgu

SEQ ID NO: 1294018 - RNA, 19 nt, Artificial Sequence
  Description of Artificial Sequence: Synthetic oligonucleotide
  Sense strand starting at position 2993 of SEQ ID NO: 1241714
gucugaaguagagggaaau

SEQ ID NO: 1294019 - RNA, 19 nt, Artificial Sequence
  Description of Artificial Sequence: Synthetic oligonucleotide
  Antisense strand to SEQ ID NO: 1294018
auuucccucuacuucagac

SEQ ID NO: 1294020 - RNA, 19 nt, Artificial Sequence
  Description of Artificial Sequence: Synthetic oligonucleotide
  Sense strand starting at position 3137 of SEQ ID NO: 1241714
acuggauacgucuaccaaa

SEQ ID NO: 1294021 - RNA, 19 nt, Artificial Sequence
  Description of Artificial Sequence: Synthetic oligonucleotide
  Antisense strand to SEQ ID NO: 1294020
uuugguagacguauccagu

SEQ ID NO: 1294022 - RNA, 19 nt, Artificial Sequence
  Description of Artificial Sequence: Synthetic oligonucleotide
  Sense strand starting at position 3728 of SEQ ID NO: 1241714
acucuacuucucggcauuu

SEQ ID NO: 1294023 - RNA, 19 nt, Artificial Sequence
  Description of Artificial Sequence: Synthetic oligonucleotide
  Antisense strand to SEQ ID NO: 1294022
aaaugccgagaaguagagu

SEQ ID NO: 1294024 - RNA, 19 nt, Artificial Sequence
  Description of Artificial Sequence: Synthetic oligonucleotide
  Sense strand starting at position 3746 of SEQ ID NO: 1241714
uggcaugaaauaugcuuga

SEQ ID NO: 1294025 - RNA, 19 nt, Artificial Sequence
  Description of Artificial Sequence: Synthetic oligonucleotide
  Antisense strand to SEQ ID NO: 1294024
ucaagcauauuucaugcca

SEQ ID NO: 1294026 - RNA, 19 nt, Artificial Sequence
  Description of Artificial Sequence: Synthetic oligonucleotide
  Sense strand starting at position 3750 of SEQ ID NO: 1241714
augaaauaugcuugagaau

SEQ ID NO: 1294027 - RNA, 19 nt, Artificial Sequence
  Description of Artificial Sequence: Synthetic oligonucleotide
  Antisense strand to SEQ ID NO: 1294026
auucucaagcauauuucau

SEQ ID NO: 1294028 - RNA, 19 nt, Artificial Sequence
  Description of Artificial Sequence: Synthetic oligonucleotide
  Sense strand starting at position 103 of SEQ ID NO: 1241715
auuguaaagcacugaaaug

SEQ ID NO: 1294029 - RNA, 19 nt, Artificial Sequence
  Description of Artificial Sequence: Synthetic oligonucleotide
  Antisense strand to SEQ ID NO: 1294028
cauuucagugcuuuacaau

SEQ ID NO: 1294030 - RNA, 19 nt, Artificial Sequence
  Description of Artificial Sequence: Synthetic oligonucleotide
  Sense strand starting at position 269 of SEQ ID NO: 1241715
aggacacccuuucuaguua

SEQ ID NO: 1294031 - RNA, 19 nt, Artificial Sequence
  Description of Artificial Sequence: Synthetic oligonucleotide
  Antisense strand to SEQ ID NO: 1294030
uaacuagaaaggguguccu

SEQ ID NO: 1294032 - RNA, 19 nt, Artificial Sequence
  Description of Artificial Sequence: Synthetic oligonucleotide
  Sense strand starting at position 270 of SEQ ID NO: 1241715
ggacacccuuucuaguuaa

SEQ ID NO: 1294033 - RNA, 19 nt, Artificial Sequence
  Description of Artificial Sequence: Synthetic oligonucleotide
  Antisense strand to SEQ ID NO: 1294032
uuaacuagaaagggugucc

SEQ ID NO: 1294034 - RNA, 19 nt, Artificial Sequence
  Description of Artificial Sequence: Synthetic oligonucleotide
  Sense strand starting at position 334 of SEQ ID NO: 1241715
auaggcauaugacauauau

SEQ ID NO: 1294035 - RNA, 19 nt, Artificial Sequence
  Description of Artificial Sequence: Synthetic oligonucleotide
  Antisense strand to SEQ ID NO: 1294034
auauaugucauaugccuau

SEQ ID NO: 1294036 - RNA, 19 nt, Artificial Sequence
  Description of Artificial Sequence: Synthetic oligonucleotide
  Sense strand starting at position 343 of SEQ ID NO: 1241715
ugacauauaugacagcaaa

SEQ ID NO: 1294037 - RNA, 19 nt, Artificial Sequence
  Description of Artificial Sequence: Synthetic oligonucleotide
  Antisense strand to SEQ ID NO: 1294036
uuugcugucauauauguca

SEQ ID NO: 1294038 - RNA, 19 nt, Artificial Sequence
  Description of Artificial Sequence: Synthetic oligonucleotide
  Sense strand starting at position 602 of SEQ ID NO: 1241715
ucgagucaagcucaacuau

SEQ ID NO: 1294039 - RNA, 19 nt, Artificial Sequence
  Description of Artificial Sequence: Synthetic oligonucleotide
  Antisense strand to SEQ ID NO: 1294038
auaguugagcuugacucga

SEQ ID NO: 1294040 - RNA, 19 nt, Artificial Sequence
  Description of Artificial Sequence: Synthetic oligonucleotide
  Sense strand starting at position 618 of SEQ ID NO: 1241715
uaugaaggguuccgagaac

SEQ ID NO: 1294041 - RNA, 19 nt, Artificial Sequence
  Description of Artificial Sequence: Synthetic oligonucleotide
  Antisense strand to SEQ ID NO: 1294040
guucucggaacccuucaua

SEQ ID NO: 1294042 - RNA, 19 nt, Artificial Sequence
  Description of Artificial Sequence: Synthetic oligonucleotide
  Sense strand starting at position 645 of SEQ ID NO: 1241715
uugcuucuccugcaagagu

SEQ ID NO: 1294043 - RNA, 19 nt, Artificial Sequence
  Description of Artificial Sequence: Synthetic oligonucleotide
  Antisense strand to SEQ ID NO: 1294042
acucuugcaggagaagcaa

SEQ ID NO: 1294044 - RNA, 19 nt, Artificial Sequence
  Description of Artificial Sequence: Synthetic oligonucleotide
  Sense strand starting at position 654 of SEQ ID NO: 1241715
cugcaagaguaaguaacau

SEQ ID NO: 1294045 - RNA, 19 nt, Artificial Sequence
  Description of Artificial Sequence: Synthetic oligonucleotide
  Antisense strand to SEQ ID NO: 1294044
auguuacuuacucuugcag

SEQ ID NO: 1294046 - RNA, 19 nt, Artificial Sequence
  Description of Artificial Sequence: Synthetic oligonucleotide
  Sense strand starting at position 658 of SEQ ID NO: 1241715
aagaguaaguaacaugaua

SEQ ID NO: 1294047 - RNA, 19 nt, Artificial Sequence
  Description of Artificial Sequence: Synthetic oligonucleotide
  Antisense strand to SEQ ID NO: 1294046
uaucauguuacuuacucuu

SEQ ID NO: 1294048 - RNA, 19 nt, Artificial Sequence
  Description of Artificial Sequence: Synthetic oligonucleotide
  Sense strand starting at position 898 of SEQ ID NO: 1241715
gugagaaaguacuuaaagu

SEQ ID NO: 1294049 - RNA, 19 nt, Artificial Sequence
  Description of Artificial Sequence: Synthetic oligonucleotide
  Antisense strand to SEQ ID NO: 1294048
acuuuaaguacuuucucac

SEQ ID NO: 1294050 - RNA, 19 nt, Artificial Sequence
  Description of Artificial Sequence: Synthetic oligonucleotide
  Sense strand starting at position 905 of SEQ ID NO: 1241715
aguacuuaaaguugacgau

SEQ ID NO: 1294051 - RNA, 19 nt, Artificial Sequence
  Description of Artificial Sequence: Synthetic oligonucleotide
  Antisense strand to SEQ ID NO: 1294050
aucgucaacuuuaaguacu

SEQ ID NO: 1294052 - RNA, 19 nt, Artificial Sequence
  Description of Artificial Sequence: Synthetic oligonucleotide
  Sense strand starting at position 914 of SEQ ID NO: 1241715
aguugacgaugggaaauaa

SEQ ID NO: 1294053 - RNA, 19 nt, Artificial Sequence
  Description of Artificial Sequence: Synthetic oligonucleotide
  Antisense strand to SEQ ID NO: 1294052
uuauuucccaucgucaacu

SEQ ID NO: 1294054 - RNA, 19 nt, Artificial Sequence
  Description of Artificial Sequence: Synthetic oligonucleotide
  Sense strand starting at position 2106 of SEQ ID NO: 1241715
acgcuuaaucgccaaauag

SEQ ID NO: 1294055 - RNA, 19 nt, Artificial Sequence
  Description of Artificial Sequence: Synthetic oligonucleotide
  Antisense strand to SEQ ID NO: 1294054
cuauuuggcgauuaagcgu

SEQ ID NO: 1294056 - RNA, 19 nt, Artificial Sequence
  Description of Artificial Sequence: Synthetic oligonucleotide
  Sense strand starting at position 2939 of SEQ ID NO: 1241715
gaugaauguucuccugggu

SEQ ID NO: 1294057 - RNA, 19 nt, Artificial Sequence
  Description of Artificial Sequence: Synthetic oligonucleotide
  Antisense strand to SEQ ID NO: 1294056
acccaggagaacauucauc

SEQ ID NO: 1294058 - RNA, 19 nt, Artificial Sequence
  Description of Artificial Sequence: Synthetic oligonucleotide
  Sense strand starting at position 2942 of SEQ ID NO: 1241715
gaauguucuccugggucau

SEQ ID NO: 1294059 - RNA, 19 nt, Artificial Sequence
  Description of Artificial Sequence: Synthetic oligonucleotide
  Antisense strand to SEQ ID NO: 1294058
augacccaggagaacauuc

SEQ ID NO: 1294060 - RNA, 19 nt, Artificial Sequence
  Description of Artificial Sequence: Synthetic oligonucleotide
  Sense strand starting at position 2943 of SEQ ID NO: 1241715
aauguucuccugggucauu

SEQ ID NO: 1294061 - RNA, 19 nt, Artificial Sequence
  Description of Artificial Sequence: Synthetic oligonucleotide
  Antisense strand to SEQ ID NO: 1294060
aaugacccaggagaacauu

SEQ ID NO: 1294062 - RNA, 19 nt, Artificial Sequence
  Description of Artificial Sequence: Synthetic oligonucleotide
  Sense strand starting at position 2944 of SEQ ID NO: 1241715
auguucuccugggucauua

SEQ ID NO: 1294063 - RNA, 19 nt, Artificial Sequence
  Description of Artificial Sequence: Synthetic oligonucleotide
  Antisense strand to SEQ ID NO: 1294062
uaaugacccaggagaacau

SEQ ID NO: 1294064 - RNA, 19 nt, Artificial Sequence
  Description of Artificial Sequence: Synthetic oligonucleotide
  Sense strand starting at position 2946 of SEQ ID NO: 1241715
guucuccugggucauuaaa

SEQ ID NO: 1294065 - RNA, 19 nt, Artificial Sequence
  Description of Artificial Sequence: Synthetic oligonucleotide
  Antisense strand to SEQ ID NO: 1294064
uuuaaugacccaggagaac

SEQ ID NO: 1294066 - RNA, 19 nt, Artificial Sequence
  Description of Artificial Sequence: Synthetic oligonucleotide
  Sense strand starting at position 2948 of SEQ ID NO: 1241715
ucuccugggucauuaaaug

SEQ ID NO: 1294067 - RNA, 19 nt, Artificial Sequence
  Description of Artificial Sequence: Synthetic oligonucleotide
  Antisense strand to SEQ ID NO: 1294066
cauuuaaugacccaggaga

SEQ ID NO: 1294068 - RNA, 19 nt, Artificial Sequence
  Description of Artificial Sequence: Synthetic oligonucleotide
  Sense strand starting at position 3276 of SEQ ID NO: 1241715
aaguuugaggaauguaaca

SEQ ID NO: 1294069 - RNA, 19 nt, Artificial Sequence
  Description of Artificial Sequence: Synthetic oligonucleotide
  Antisense strand to SEQ ID NO: 1294068
uguuacauuccucaaacuu

SEQ ID NO: 1294070 - RNA, 19 nt, Artificial Sequence
  Description of Artificial Sequence: Synthetic oligonucleotide
  Sense strand starting at position 3281 of SEQ ID NO: 1241715
ugaggaauguaacauauac

SEQ ID NO: 1294071 - RNA, 19 nt, Artificial Sequence
  Description of Artificial Sequence: Synthetic oligonucleotide
  Antisense strand to SEQ ID NO: 1294070
guauauguuacauuccuca

SEQ ID NO: 1294072 - RNA, 19 nt, Artificial Sequence
  Description of Artificial Sequence: Synthetic oligonucleotide
  Sense strand starting at position 3325 of SEQ ID NO: 1241715
guacaauaguggguacuuu

SEQ ID NO: 1294073 - RNA, 19 nt, Artificial Sequence
  Description of Artificial Sequence: Synthetic oligonucleotide
  Antisense strand to SEQ ID NO: 1294072
aaaguacccacuauuguac

SEQ ID NO: 1294074 - RNA, 19 nt, Artificial Sequence
  Description of Artificial Sequence: Synthetic oligonucleotide
  Sense strand starting at position 3347 of SEQ ID NO: 1241715
gugcuuaguuuccuagaaa

SEQ ID NO: 1294075 - RNA, 19 nt, Artificial Sequence
  Description of Artificial Sequence: Synthetic oligonucleotide
  Antisense strand to SEQ ID NO: 1294074
uuucuaggaaacuaagcac

SEQ ID NO: 1294076 - RNA, 19 nt, Artificial Sequence
  Description of Artificial Sequence: Synthetic oligonucleotide
  Sense strand starting at position 3374 of SEQ ID NO: 1241715
augcacuaguguguuucua

SEQ ID NO: 1294077 - RNA, 19 nt, Artificial Sequence
  Description of Artificial Sequence: Synthetic oligonucleotide
  Antisense strand to SEQ ID NO: 1294076
uagaaacacacuagugcau

SEQ ID NO: 1294078 - RNA, 19 nt, Artificial Sequence
  Description of Artificial Sequence: Synthetic oligonucleotide
  Sense strand starting at position 3376 of SEQ ID NO: 1241715
gcacuaguguguuucuaaa

SEQ ID NO: 1294079 - RNA, 19 nt, Artificial Sequence
  Description of Artificial Sequence: Synthetic oligonucleotide
  Antisense strand to SEQ ID NO: 1294078
uuuagaaacacacuagugc

SEQ ID NO: 1294080 - RNA, 19 nt, Artificial Sequence
  Description of Artificial Sequence: Synthetic oligonucleotide
  Sense strand starting at position 3476 of SEQ ID NO: 1241715
uauuaauagcgaugcagga

SEQ ID NO: 1294081 - RNA, 19 nt, Artificial Sequence
  Description of Artificial Sequence: Synthetic oligonucleotide
  Antisense strand to SEQ ID NO: 1294080
uccugcaucgcuauuaaua

SEQ ID NO: 1294082 - RNA, 19 nt, Artificial Sequence
  Description of Artificial Sequence: Synthetic oligonucleotide
  Sense strand starting at position 3478 of SEQ ID NO: 1241715
uuaauagcgaugcaggaaa

SEQ ID NO: 1294083 - RNA, 19 nt, Artificial Sequence
  Description of Artificial Sequence: Synthetic oligonucleotide
  Antisense strand to SEQ ID NO: 1294082
uuuccugcaucgcuauuaa

SEQ ID NO: 1294084 - RNA, 19 nt, Artificial Sequence
  Description of Artificial Sequence: Synthetic oligonucleotide
  Sense strand starting at position 3555 of SEQ ID NO: 1241715
aaacuuguacuauggagua

SEQ ID NO: 1294085 - RNA, 19 nt, Artificial Sequence
  Description of Artificial Sequence: Synthetic oligonucleotide
  Antisense strand to SEQ ID NO: 1294084
uacuccauaguacaaguuu

SEQ ID NO: 1294086 - RNA, 19 nt, Artificial Sequence
  Description of Artificial Sequence: Synthetic oligonucleotide
  Sense strand starting at position 3642 of SEQ ID NO: 1241715
gcuuuacuguuauuacagu

SEQ ID NO: 1294087 - RNA, 19 nt, Artificial Sequence
  Description of Artificial Sequence: Synthetic oligonucleotide
  Antisense strand to SEQ ID NO: 1294086
acuguaauaacaguaaagc

SEQ ID NO: 1294088 - RNA, 19 nt, Artificial Sequence
  Description of Artificial Sequence: Synthetic oligonucleotide
  Sense strand starting at position 3650 of SEQ ID NO: 1241715
guuauuacaguuuaaugga

SEQ ID NO: 1294089 - RNA, 19 nt, Artificial Sequence
  Description of Artificial Sequence: Synthetic oligonucleotide
  Antisense strand to SEQ ID NO: 1294088
uccauuaaacuguaauaac

SEQ ID NO: 1294090 - RNA, 19 nt, Artificial Sequence
  Description of Artificial Sequence: Synthetic oligonucleotide
  Sense strand starting at position 3671 of SEQ ID NO: 1241715
gcagauuggaccuguuacu

SEQ ID NO: 1294091 - RNA, 19 nt, Artificial Sequence
  Description of Artificial Sequence: Synthetic oligonucleotide
  Antisense strand to SEQ ID NO: 1294090
aguaacagguccaaucugc

SEQ ID NO: 1294092 - RNA, 19 nt, Artificial Sequence
  Description of Artificial Sequence: Synthetic oligonucleotide
  Sense strand starting at position 3726 of SEQ ID NO: 1241715
cuuagauugcaguacuaua

SEQ ID NO: 1294093 - RNA, 19 nt, Artificial Sequence
  Description of Artificial Sequence: Synthetic oligonucleotide
  Antisense strand to SEQ ID NO: 1294092
uauaguacugcaaucuaag

SEQ ID NO: 1294094 - RNA, 19 nt, Artificial Sequence
  Description of Artificial Sequence: Synthetic oligonucleotide
  Sense strand starting at position 3731 of SEQ ID NO: 1241715
auugcaguacuauaauguu

SEQ ID NO: 1294095 - RNA, 19 nt, Artificial Sequence
  Description of Artificial Sequence: Synthetic oligonucleotide
  Antisense strand to SEQ ID NO: 1294094
aacauuauaguacugcaau

SEQ ID NO: 1294096 - RNA, 19 nt, Artificial Sequence
  Description of Artificial Sequence: Synthetic oligonucleotide
  Sense strand starting at position 3737 of SEQ ID NO: 1241715
guacuauaauguuaaggac

SEQ ID NO: 1294097 - RNA, 19 nt, Artificial Sequence
  Description of Artificial Sequence: Synthetic oligonucleotide
  Antisense strand to SEQ ID NO: 1294096
guccuuaacauuauaguac

SEQ ID NO: 1294098 - RNA, 19 nt, Artificial Sequence
  Description of Artificial Sequence: Synthetic oligonucleotide
  Sense strand starting at position 3740 of SEQ ID NO: 1241715
cuauaauguuaaggaccau

SEQ ID NO: 1294099 - RNA, 19 nt, Artificial Sequence
  Description of Artificial Sequence: Synthetic oligonucleotide
  Antisense strand to SEQ ID NO: 1294098
augguccuuaacauuauag

SEQ ID NO: 1294100 - RNA, 19 nt, Artificial Sequence
  Description of Artificial Sequence: Synthetic oligonucleotide
  Sense strand starting at position 3832 of SEQ ID NO: 1241715
aguggugugagcucugcuu

SEQ ID NO: 1294101 - RNA, 19 nt, Artificial Sequence
  Description of Artificial Sequence: Synthetic oligonucleotide
  Antisense strand to SEQ ID NO: 1294100
aagcagagcucacaccacu

SEQ ID NO: 1294102 - RNA, 19 nt, Artificial Sequence
  Description of Artificial Sequence: Synthetic oligonucleotide
  Sense strand starting at position 3836 of SEQ ID NO: 1241715
gugugagcucugcuuguug

SEQ ID NO: 1294103 - RNA, 19 nt, Artificial Sequence
  Description of Artificial Sequence: Synthetic oligonucleotide
  Antisense strand to SEQ ID NO: 1294102
caacaagcagagcucacac

SEQ ID NO: 1294104 - RNA, 19 nt, Artificial Sequence
  Description of Artificial Sequence: Synthetic oligonucleotide
  Sense strand starting at position 3839 of SEQ ID NO: 1241715
ugagcucugcuuguugcaa

SEQ ID NO: 1294105 - RNA, 19 nt, Artificial Sequence
  Description of Artificial Sequence: Synthetic oligonucleotide
  Antisense strand to SEQ ID NO: 1294104
uugcaacaagcagagcuca

SEQ ID NO: 1294106 - RNA, 19 nt, Artificial Sequence
  Description of Artificial Sequence: Synthetic oligonucleotide
  Sense strand starting at position 3973 of SEQ ID NO: 1241715
ugucaugaugcccaggcua

SEQ ID NO: 1294107 - RNA, 19 nt, Artificial Sequence
  Description of Artificial Sequence: Synthetic oligonucleotide
  Antisense strand to SEQ ID NO: 1294106
uagccugggcaucaugaca

SEQ ID NO: 1294108 - RNA, 19 nt, Artificial Sequence
  Description of Artificial Sequence: Synthetic oligonucleotide
  Sense strand starting at position 53 of SEQ ID NO: 1241716
uaggacucugaauguugau

SEQ ID NO: 1294109 - RNA, 19 nt, Artificial Sequence
  Description of Artificial Sequence: Synthetic oligonucleotide
  Antisense strand to SEQ ID NO: 1294108
aucaacauucagaguccua

SEQ ID NO: 1294110 - RNA, 19 nt, Artificial Sequence
  Description of Artificial Sequence: Synthetic oligonucleotide
  Sense strand starting at position 192 of SEQ ID NO: 1241716
guaaacagaugcuuccaaa

SEQ ID NO: 1294111 - RNA, 19 nt, Artificial Sequence
  Description of Artificial Sequence: Synthetic oligonucleotide
  Antisense strand to SEQ ID NO: 1294110
uuuggaagcaucuguuuac

SEQ ID NO: 1294112 - RNA, 19 nt, Artificial Sequence
  Description of Artificial Sequence: Synthetic oligonucleotide
  Sense strand starting at position 259 of SEQ ID NO: 1241716
agaccuagaugucuuguua

SEQ ID NO: 1294113 - RNA, 19 nt, Artificial Sequence
  Description of Artificial Sequence: Synthetic oligonucleotide
  Antisense strand to SEQ ID NO: 1294112
uaacaagacaucuaggucu

SEQ ID NO: 1294114 - RNA, 19 nt, Artificial Sequence
  Description of Artificial Sequence: Synthetic oligonucleotide
  Sense strand starting at position 263 of SEQ ID NO: 1241716
cuagaugucuuguuauaau

SEQ ID NO: 1294115 - RNA, 19 nt, Artificial Sequence
  Description of Artificial Sequence: Synthetic oligonucleotide
  Antisense strand to SEQ ID NO: 1294114
auuauaacaagacaucuag

SEQ ID NO: 1294116 - RNA, 19 nt, Artificial Sequence
  Description of Artificial Sequence: Synthetic oligonucleotide
  Sense strand starting at position 420 of SEQ ID NO: 1241716
gagguaaggccacgauuau

SEQ ID NO: 1294117 - RNA, 19 nt, Artificial Sequence
  Description of Artificial Sequence: Synthetic oligonucleotide
  Antisense strand to SEQ ID NO: 1294116
auaaucguggccuuaccuc

SEQ ID NO: 1294118 - RNA, 19 nt, Artificial Sequence
  Description of Artificial Sequence: Synthetic oligonucleotide
  Sense strand starting at position 506 of SEQ ID NO: 1241716
agcuguaaagcugaaacuu

SEQ ID NO: 1294119 - RNA, 19 nt, Artificial Sequence
  Description of Artificial Sequence: Synthetic oligonucleotide
  Antisense strand to SEQ ID NO: 1294118
aaguuucagcuuuacagcu

SEQ ID NO: 1294120 - RNA, 19 nt, Artificial Sequence
  Description of Artificial Sequence: Synthetic oligonucleotide
  Sense strand starting at position 515 of SEQ ID NO: 1241716
gcugaaacuugaccucaag

SEQ ID NO: 1294121 - RNA, 19 nt, Artificial Sequence
  Description of Artificial Sequence: Synthetic oligonucleotide
  Antisense strand to SEQ ID NO: 1294120
cuugaggucaaguuucagc

SEQ ID NO: 1294122 - RNA, 19 nt, Artificial Sequence
  Description of Artificial Sequence: Synthetic oligonucleotide
  Sense strand starting at position 558 of SEQ ID NO: 1241716
guguauccacauuauguga

SEQ ID NO: 1294123 - RNA, 19 nt, Artificial Sequence
  Description of Artificial Sequence: Synthetic oligonucleotide
  Antisense strand to SEQ ID NO: 1294122
ucacauaauguggauacac

SEQ ID NO: 1294124 - RNA, 19 nt, Artificial Sequence
  Description of Artificial Sequence: Synthetic oligonucleotide
  Sense strand starting at position 571 of SEQ ID NO: 1241716
augugauucgcacaucuag

SEQ ID NO: 1294125 - RNA, 19 nt, Artificial Sequence
  Description of Artificial Sequence: Synthetic oligonucleotide
  Antisense strand to SEQ ID NO: 1294124
cuagaugugcgaaucacau

SEQ ID NO: 1294126 - RNA, 19 nt, Artificial Sequence
  Description of Artificial Sequence: Synthetic oligonucleotide
  Sense strand starting at position 693 of SEQ ID NO: 1241716
ucccuuuaagaacguaaca

SEQ ID NO: 1294127 - RNA, 19 nt, Artificial Sequence
  Description of Artificial Sequence: Synthetic oligonucleotide
  Antisense strand to SEQ ID NO: 1294126
uguuacguucuuaaaggga

SEQ ID NO: 1294128 - RNA, 19 nt, Artificial Sequence
  Description of Artificial Sequence: Synthetic oligonucleotide
  Sense strand starting at position 760 of SEQ ID NO: 1241716
gcauauuucuagccugcau

SEQ ID NO: 1294129 - RNA, 19 nt, Artificial Sequence
  Description of Artificial Sequence: Synthetic oligonucleotide
  Antisense strand to SEQ ID NO: 1294128
augcaggcuagaaauaugc

SEQ ID NO: 1294130 - RNA, 19 nt, Artificial Sequence
  Description of Artificial Sequence: Synthetic oligonucleotide
  Sense strand starting at position 1039 of SEQ ID NO: 1241716
guggaaugagauggaaguu

SEQ ID NO: 1294131 - RNA, 19 nt, Artificial Sequence
  Description of Artificial Sequence: Synthetic oligonucleotide
  Antisense strand to SEQ ID NO: 1294130
aacuuccaucucauuccac

SEQ ID NO: 1294132 - RNA, 19 nt, Artificial Sequence
  Description of Artificial Sequence: Synthetic oligonucleotide
  Sense strand starting at position 1118 of SEQ ID NO: 1241716
gggagaagguucguuauga

SEQ ID NO: 1294133 - RNA, 19 nt, Artificial Sequence
  Description of Artificial Sequence: Synthetic oligonucleotide
  Antisense strand to SEQ ID NO: 1294132
ucauaacgaaccuucuccc

SEQ ID NO: 1294134 - RNA, 19 nt, Artificial Sequence
  Description of Artificial Sequence: Synthetic oligonucleotide
  Sense strand starting at position 1119 of SEQ ID NO: 1241716
ggagaagguucguuaugaa

SEQ ID NO: 1294135 - RNA, 19 nt, Artificial Sequence
  Description of Artificial Sequence: Synthetic oligonucleotide
  Antisense strand to SEQ ID NO: 1294134
uucauaacgaaccuucucc

SEQ ID NO: 1294136 - RNA, 19 nt, Artificial Sequence
  Description of Artificial Sequence: Synthetic oligonucleotide
  Sense strand starting at position 1529 of SEQ ID NO: 1241716
cgcgaagaucggagugauu

SEQ ID NO: 1294137 - RNA, 19 nt, Artificial Sequence
  Description of Artificial Sequence: Synthetic oligonucleotide
  Antisense strand to SEQ ID NO: 1294136
aaucacuccgaucuucgcg

SEQ ID NO: 1294138 - RNA, 19 nt, Artificial Sequence
  Description of Artificial Sequence: Synthetic oligonucleotide
  Sense strand starting at position 1540 of SEQ ID NO: 1241716
gagugauucgcggauuucu

SEQ ID NO: 1294139 - RNA, 19 nt, Artificial Sequence
  Description of Artificial Sequence: Synthetic oligonucleotide
  Antisense strand to SEQ ID NO: 1294138
agaaauccgcgaaucacuc

SEQ ID NO: 1294140 - RNA, 19 nt, Artificial Sequence
  Description of Artificial Sequence: Synthetic oligonucleotide
  Sense strand starting at position 1552 of SEQ ID NO: 1241716
gauuucugcgcucaagcua

SEQ ID NO: 1294141 - RNA, 19 nt, Artificial Sequence
  Description of Artificial Sequence: Synthetic oligonucleotide
  Antisense strand to SEQ ID NO: 1294140
uagcuugagcgcagaaauc

SEQ ID NO: 1294142 - RNA, 19 nt, Artificial Sequence
  Description of Artificial Sequence: Synthetic oligonucleotide
  Sense strand starting at position 1671 of SEQ ID NO: 1241716
cucaacuuucucggaggaa

SEQ ID NO: 1294143 - RNA, 19 nt, Artificial Sequence
  Description of Artificial Sequence: Synthetic oligonucleotide
  Antisense strand to SEQ ID NO: 1294142
uuccuccgagaaaguugag

SEQ ID NO: 1294144 - RNA, 19 nt, Artificial Sequence
  Description of Artificial Sequence: Synthetic oligonucleotide
  Sense strand starting at position 1674 of SEQ ID NO: 1241716
aacuuucucggaggaaauc

SEQ ID NO: 1294145 - RNA, 19 nt, Artificial Sequence
  Description of Artificial Sequence: Synthetic oligonucleotide
  Antisense strand to SEQ ID NO: 1294144
gauuuccuccgagaaaguu

SEQ ID NO: 1294146 - RNA, 19 nt, Artificial Sequence
  Description of Artificial Sequence: Synthetic oligonucleotide
  Sense strand starting at position 1834 of SEQ ID NO: 1241716
gaagaaucucucugggagc

SEQ ID NO: 1294147 - RNA, 19 nt, Artificial Sequence
  Description of Artificial Sequence: Synthetic oligonucleotide
  Antisense strand to SEQ ID NO: 1294146
gcucccagagagauucuuc

SEQ ID NO: 1294148 - RNA, 19 nt, Artificial Sequence
  Description of Artificial Sequence: Synthetic oligonucleotide
  Sense strand starting at position 2481 of SEQ ID NO: 1241716
aaccgaucugggugcaaga

SEQ ID NO: 1294149 - RNA, 19 nt, Artificial Sequence
  Description of Artificial Sequence: Synthetic oligonucleotide
  Antisense strand to SEQ ID NO: 1294148
ucuugcacccagaucgguu

SEQ ID NO: 1294150 - RNA, 19 nt, Artificial Sequence
  Description of Artificial Sequence: Synthetic oligonucleotide
  Sense strand starting at position 2524 of SEQ ID NO: 1241716
gggaaguuugugggcuaga

SEQ ID NO: 1294151 - RNA, 19 nt, Artificial Sequence
  Description of Artificial Sequence: Synthetic oligonucleotide
  Antisense strand to SEQ ID NO: 1294150
ucuagcccacaaacuuccc

SEQ ID NO: 1294152 - RNA, 19 nt, Artificial Sequence
  Description of Artificial Sequence: Synthetic oligonucleotide
  Sense strand starting at position 2525 of SEQ ID NO: 1241716
ggaaguuugugggcuagaa

SEQ ID NO: 1294153 - RNA, 19 nt, Artificial Sequence
  Description of Artificial Sequence: Synthetic oligonucleotide
  Antisense strand to SEQ ID NO: 1294152
uucuagcccacaaacuucc

SEQ ID NO: 1294154 - RNA, 19 nt, Artificial Sequence
  Description of Artificial Sequence: Synthetic oligonucleotide
  Sense strand starting at position 2527 of SEQ ID NO: 1241716
aaguuugugggcuagaaag

SEQ ID NO: 1294155 - RNA, 19 nt, Artificial Sequence
  Description of Artificial Sequence: Synthetic oligonucleotide
  Antisense strand to SEQ ID NO: 1294154
cuuucuagcccacaaacuu

SEQ ID NO: 1294156 - RNA, 19 nt, Artificial Sequence
  Description of Artificial Sequence: Synthetic oligonucleotide
  Sense strand starting at position 2529 of SEQ ID NO: 1241716
guuugugggcuagaaaggu

SEQ ID NO: 1294157 - RNA, 19 nt, Artificial Sequence
  Description of Artificial Sequence: Synthetic oligonucleotide
  Antisense strand to SEQ ID NO: 1294156
accuuucuagcccacaaac

SEQ ID NO: 1294158 - RNA, 19 nt, Artificial Sequence
  Description of Artificial Sequence: Synthetic oligonucleotide
  Sense strand starting at position 2571 of SEQ ID NO: 1241716
gugagacuauauucgaaag

SEQ ID NO: 1294159 - RNA, 19 nt, Artificial Sequence
  Description of Artificial Sequence: Synthetic oligonucleotide
  Antisense strand to SEQ ID NO: 1294158
cuuucgaauauagucucac

SEQ ID NO: 1294160 - RNA, 19 nt, Artificial Sequence
  Description of Artificial Sequence: Synthetic oligonucleotide
  Sense strand starting at position 2674 of SEQ ID NO: 1241716
uuauucuuacgauagcaaa

SEQ ID NO: 1294161 - RNA, 19 nt, Artificial Sequence
  Description of Artificial Sequence: Synthetic oligonucleotide
  Antisense strand to SEQ ID NO: 1294160
uuugcuaucguaagaauaa

SEQ ID NO: 1294162 - RNA, 19 nt, Artificial Sequence
  Description of Artificial Sequence: Synthetic oligonucleotide
  Sense strand starting at position 2790 of SEQ ID NO: 1241716
cuugcuaucgggcaagaau

SEQ ID NO: 1294163 - RNA, 19 nt, Artificial Sequence
  Description of Artificial Sequence: Synthetic oligonucleotide
  Antisense strand to SEQ ID NO: 1294162
auucuugcccgauagcaag

SEQ ID NO: 1294164 - RNA, 19 nt, Artificial Sequence
  Description of Artificial Sequence: Synthetic oligonucleotide
  Sense strand starting at position 2840 of SEQ ID NO: 1241716
uccagaaaugacggaguau

SEQ ID NO: 1294165 - RNA, 19 nt, Artificial Sequence
  Description of Artificial Sequence: Synthetic oligonucleotide
  Antisense strand to SEQ ID NO: 1294164
auacuccgucauuucugga

SEQ ID NO: 1294166 - RNA, 19 nt, Artificial Sequence
  Description of Artificial Sequence: Synthetic oligonucleotide
  Sense strand starting at position 3024 of SEQ ID NO: 1241716
cucacugugguuugggaaa

SEQ ID NO: 1294167 - RNA, 19 nt, Artificial Sequence
  Description of Artificial Sequence: Synthetic oligonucleotide
  Antisense strand to SEQ ID NO: 1294166
uuucccaaaccacagugag

SEQ ID NO: 1294168 - RNA, 19 nt, Artificial Sequence
  Description of Artificial Sequence: Synthetic oligonucleotide
  Sense strand starting at position 3067 of SEQ ID NO: 1241716
ucagaauaucuucgaagua

SEQ ID NO: 1294169 - RNA, 19 nt, Artificial Sequence
  Description of Artificial Sequence: Synthetic oligonucleotide
  Antisense strand to SEQ ID NO: 1294168
uacuucgaagauauucuga

SEQ ID NO: 1294170 - RNA, 19 nt, Artificial Sequence
  Description of Artificial Sequence: Synthetic oligonucleotide
  Sense strand starting at position 3163 of SEQ ID NO: 1241716
acguuacuaauguagaaag

SEQ ID NO: 1294171 - RNA, 19 nt, Artificial Sequence
  Description of Artificial Sequence: Synthetic oligonucleotide
  Antisense strand to SEQ ID NO: 1294170
cuuucuacauuaguaacgu

SEQ ID NO: 1294172 - RNA, 19 nt, Artificial Sequence
  Description of Artificial Sequence: Synthetic oligonucleotide
  Sense strand starting at position 3408 of SEQ ID NO: 1241716
uacugaauucuuuggugaa

SEQ ID NO: 1294173 - RNA, 19 nt, Artificial Sequence
  Description of Artificial Sequence: Synthetic oligonucleotide
  Antisense strand to SEQ ID NO: 1294172
uucaccaaagaauucagua

SEQ ID NO: 1294174 - RNA, 19 nt, Artificial Sequence
  Description of Artificial Sequence: Synthetic oligonucleotide
  Sense strand starting at position 3412 of SEQ ID NO: 1241716
gaauucuuuggugaaccuu

SEQ ID NO: 1294175 - RNA, 19 nt, Artificial Sequence
  Description of Artificial Sequence: Synthetic oligonucleotide
  Antisense strand to SEQ ID NO: 1294174
aagguucaccaaagaauuc

SEQ ID NO: 1294176 - RNA, 19 nt, Artificial Sequence
  Description of Artificial Sequence: Synthetic oligonucleotide
  Sense strand starting at position 3519 of SEQ ID NO: 1241716
uaagcauuagcauagugaa

SEQ ID NO: 1294177 - RNA, 19 nt, Artificial Sequence
  Description of Artificial Sequence: Synthetic oligonucleotide
  Antisense strand to SEQ ID NO: 1294176
uucacuaugcuaaugcuua

SEQ ID NO: 1294178 - RNA, 19 nt, Artificial Sequence
  Description of Artificial Sequence: Synthetic oligonucleotide
  Sense strand starting at position 3574 of SEQ ID NO: 1241716
ggcagaaguccugacuguc

SEQ ID NO: 1294179 - RNA, 19 nt, Artificial Sequence
  Description of Artificial Sequence: Synthetic oligonucleotide
  Antisense strand to SEQ ID NO: 1294178
gacagucaggacuucugcc

SEQ ID NO: 1294180 - RNA, 19 nt, Artificial Sequence
  Description of Artificial Sequence: Synthetic oligonucleotide
  Sense strand starting at position 3617 of SEQ ID NO: 1241716
uguagacuacguggagaua

SEQ ID NO: 1294181 - RNA, 19 nt, Artificial Sequence
  Description of Artificial Sequence: Synthetic oligonucleotide
  Antisense strand to SEQ ID NO: 1294180
uaucuccacguagucuaca

SEQ ID NO: 1294182 - RNA, 19 nt, Artificial Sequence
  Description of Artificial Sequence: Synthetic oligonucleotide
  Sense strand starting at position 3846 of SEQ ID NO: 1241716
ugccuaucucuguagagac

SEQ ID NO: 1294183 - RNA, 19 nt, Artificial Sequence
  Description of Artificial Sequence: Synthetic oligonucleotide
  Antisense strand to SEQ ID NO: 1294182
gucucuacagagauaggca

SEQ ID NO: 1294184 - RNA, 19 nt, Artificial Sequence
  Description of Artificial Sequence: Synthetic oligonucleotide
  Sense strand starting at position 3848 of SEQ ID NO: 1241716
ccuaucucuguagagacau

SEQ ID NO: 1294185 - RNA, 19 nt, Artificial Sequence
  Description of Artificial Sequence: Synthetic oligonucleotide
  Antisense strand to SEQ ID NO: 1294184
augucucuacagagauagg

SEQ ID NO: 1294186 - RNA, 19 nt, Artificial Sequence
  Description of Artificial Sequence: Synthetic oligonucleotide
  Sense strand starting at position 3854 of SEQ ID NO: 1241716
ucuguagagacaugucaug

SEQ ID NO: 1294187 - RNA, 19 nt, Artificial Sequence
  Description of Artificial Sequence: Synthetic oligonucleotide
  Antisense strand to SEQ ID NO: 1294186
caugacaugucucuacaga

SEQ ID NO: 1294188 - RNA, 19 nt, Artificial Sequence
  Description of Artificial Sequence: Synthetic oligonucleotide
  Sense strand starting at position 149 of SEQ ID NO: 1241717
ggaucuugaggccaagagu

SEQ ID NO: 1294189 - RNA, 19 nt, Artificial Sequence
  Description of Artificial Sequence: Synthetic oligonucleotide
  Antisense strand to SEQ ID NO: 1294188
acucuuggccucaagaucc

SEQ ID NO: 1294190 - RNA, 19 nt, Artificial Sequence
  Description of Artificial Sequence: Synthetic oligonucleotide
  Sense strand starting at position 733 of SEQ ID NO: 1241717
gugaaccuccaaugaagau

SEQ ID NO: 1294191 - RNA, 19 nt, Artificial Sequence
  Description of Artificial Sequence: Synthetic oligonucleotide
  Antisense strand to SEQ ID NO: 1294190
aucuucauuggagguucac

SEQ ID NO: 1294192 - RNA, 19 nt, Artificial Sequence
  Description of Artificial Sequence: Synthetic oligonucleotide
  Sense strand starting at position 871 of SEQ ID NO: 1241717
acuaaaguauagcugagua

SEQ ID NO: 1294193 - RNA, 19 nt, Artificial Sequence
  Description of Artificial Sequence: Synthetic oligonucleotide
  Antisense strand to SEQ ID NO: 1294192
uacucagcuauacuuuagu

SEQ ID NO: 1294194 - RNA, 19 nt, Artificial Sequence
  Description of Artificial Sequence: Synthetic oligonucleotide
  Sense strand starting at position 875 of SEQ ID NO: 1241717
aaguauagcugaguaucuu

SEQ ID NO: 1294195 - RNA, 19 nt, Artificial Sequence
  Description of Artificial Sequence: Synthetic oligonucleotide
  Antisense strand to SEQ ID NO: 1294194
aagauacucagcuauacuu

SEQ ID NO: 1294196 - RNA, 19 nt, Artificial Sequence
  Description of Artificial Sequence: Synthetic oligonucleotide
  Sense strand starting at position 889 of SEQ ID NO: 1241717
aucuucgucuuguuaauuu

SEQ ID NO: 1294197 - RNA, 19 nt, Artificial Sequence
  Description of Artificial Sequence: Synthetic oligonucleotide
  Antisense strand to SEQ ID NO: 1294196
aaauuaacaagacgaagau

SEQ ID NO: 1294198 - RNA, 19 nt, Artificial Sequence
  Description of Artificial Sequence: Synthetic oligonucleotide
  Sense strand starting at position 1000 of SEQ ID NO: 1241717
agggaucuaagguggagua

SEQ ID NO: 1294199 - RNA, 19 nt, Artificial Sequence
  Description of Artificial Sequence: Synthetic oligonucleotide
  Antisense strand to SEQ ID NO: 1294198
uacuccaccuuagaucccu

SEQ ID NO: 1294200 - RNA, 19 nt, Artificial Sequence
  Description of Artificial Sequence: Synthetic oligonucleotide
  Sense strand starting at position 1001 of SEQ ID NO: 1241717
gggaucuaagguggaguaa

SEQ ID NO: 1294201 - RNA, 19 nt, Artificial Sequence
  Description of Artificial Sequence: Synthetic oligonucleotide
  Antisense strand to SEQ ID NO: 1294200
uuacuccaccuuagauccc

SEQ ID NO: 1294202 - RNA, 19 nt, Artificial Sequence
  Description of Artificial Sequence: Synthetic oligonucleotide
  Sense strand starting at position 1105 of SEQ ID NO: 1241717
gauuaagaguucucagauu

SEQ ID NO: 1294203 - RNA, 19 nt, Artificial Sequence
  Description of Artificial Sequence: Synthetic oligonucleotide
  Antisense strand to SEQ ID NO: 1294202
aaucugagaacucuuaauc

SEQ ID NO: 1294204 - RNA, 19 nt, Artificial Sequence
  Description of Artificial Sequence: Synthetic oligonucleotide
  Sense strand starting at position 1127 of SEQ ID NO: 1241717
augagcuagcuuugagaca

SEQ ID NO: 1294205 - RNA, 19 nt, Artificial Sequence
  Description of Artificial Sequence: Synthetic oligonucleotide
  Antisense strand to SEQ ID NO: 1294204
ugucucaaagcuagcucau

SEQ ID NO: 1294206 - RNA, 19 nt, Artificial Sequence
  Description of Artificial Sequence: Synthetic oligonucleotide
  Sense strand starting at position 1255 of SEQ ID NO: 1241717
ccaugugucccacaaguga

SEQ ID NO: 1294207 - RNA, 19 nt, Artificial Sequence
  Description of Artificial Sequence: Synthetic oligonucleotide
  Antisense strand to SEQ ID NO: 1294206
ucacuugugggacacaugg

SEQ ID NO: 1294208 - RNA, 19 nt, Artificial Sequence
  Description of Artificial Sequence: Synthetic oligonucleotide
  Sense strand starting at position 1266 of SEQ ID NO: 1241717
acaagugaaucguuuacac

SEQ ID NO: 1294209 - RNA, 19 nt, Artificial Sequence
  Description of Artificial Sequence: Synthetic oligonucleotide
  Antisense strand to SEQ ID NO: 1294208
guguaaacgauucacuugu

SEQ ID NO: 1294210 - RNA, 19 nt, Artificial Sequence
  Description of Artificial Sequence: Synthetic oligonucleotide
  Sense strand starting at position 1268 of SEQ ID NO: 1241717
aagugaaucguuuacacca

SEQ ID NO: 1294211 - RNA, 19 nt, Artificial Sequence
  Description of Artificial Sequence: Synthetic oligonucleotide
  Antisense strand to SEQ ID NO: 1294210
ugguguaaacgauucacuu

SEQ ID NO: 1294212 - RNA, 19 nt, Artificial Sequence
  Description of Artificial Sequence: Synthetic oligonucleotide
  Sense strand starting at position 1275 of SEQ ID NO: 1241717
ucguuuacaccacagauau

SEQ ID NO: 1294213 - RNA, 19 nt, Artificial Sequence
  Description of Artificial Sequence: Synthetic oligonucleotide
  Antisense strand to SEQ ID NO: 1294212
auaucugugguguaaacga

SEQ ID NO: 1294214 - RNA, 19 nt, Artificial Sequence
  Description of Artificial Sequence: Synthetic oligonucleotide
  Sense strand starting at position 1322 of SEQ ID NO: 1241717
cucucuuguuacuuugaca

SEQ ID NO: 1294215 - RNA, 19 nt, Artificial Sequence
  Description of Artificial Sequence: Synthetic oligonucleotide
  Antisense strand to SEQ ID NO: 1294214
ugucaaaguaacaagagag

SEQ ID NO: 1294216 - RNA, 19 nt, Artificial Sequence
  Description of Artificial Sequence: Synthetic oligonucleotide
  Sense strand starting at position 2391 of SEQ ID NO: 1241717
gcgcaaucuaugcugaguu

SEQ ID NO: 1294217 - RNA, 19 nt, Artificial Sequence
  Description of Artificial Sequence: Synthetic oligonucleotide
  Antisense strand to SEQ ID NO: 1294216
aacucagcauagauugcgc

SEQ ID NO: 1294218 - RNA, 19 nt, Artificial Sequence
  Description of Artificial Sequence: Synthetic oligonucleotide
  Sense strand starting at position 2393 of SEQ ID NO: 1241717
gcaaucuaugcugaguuua

SEQ ID NO: 1294219 - RNA, 19 nt, Artificial Sequence
  Description of Artificial Sequence: Synthetic oligonucleotide
  Antisense strand to SEQ ID NO: 1294218
uaaacucagcauagauugc

SEQ ID NO: 1294220 - RNA, 19 nt, Artificial Sequence
  Description of Artificial Sequence: Synthetic oligonucleotide
  Sense strand starting at position 2403 of SEQ ID NO: 1241717
cugaguuuauaaccaaaug

SEQ ID NO: 1294221 - RNA, 19 nt, Artificial Sequence
  Description of Artificial Sequence: Synthetic oligonucleotide
  Antisense strand to SEQ ID NO: 1294220
cauuugguuauaaacucag

SEQ ID NO: 1294222 - RNA, 19 nt, Artificial Sequence
  Description of Artificial Sequence: Synthetic oligonucleotide
  Sense strand starting at position 2615 of SEQ ID NO: 1241717
ggaacugauagcugacuca

SEQ ID NO: 1294223 - RNA, 19 nt, Artificial Sequence
  Description of Artificial Sequence: Synthetic oligonucleotide
  Antisense strand to SEQ ID NO: 1294222
ugagucagcuaucaguucc

SEQ ID NO: 1294224 - RNA, 19 nt, Artificial Sequence
  Description of Artificial Sequence: Synthetic oligonucleotide
  Sense strand starting at position 2618 of SEQ ID NO: 1241717
acugauagcugacucagua

SEQ ID NO: 1294225 - RNA, 19 nt, Artificial Sequence
  Description of Artificial Sequence: Synthetic oligonucleotide
  Antisense strand to SEQ ID NO: 1294224
uacugagucagcuaucagu

SEQ ID NO: 1294226 - RNA, 19 nt, Artificial Sequence
  Description of Artificial Sequence: Synthetic oligonucleotide
  Sense strand starting at position 2622 of SEQ ID NO: 1241717
auagcugacucaguaaauu

SEQ ID NO: 1294227 - RNA, 19 nt, Artificial Sequence
  Description of Artificial Sequence: Synthetic oligonucleotide
  Antisense strand to SEQ ID NO: 1294226
aauuuacugagucagcuau

SEQ ID NO: 1294228 - RNA, 19 nt, Artificial Sequence
  Description of Artificial Sequence: Synthetic oligonucleotide
  Sense strand starting at position 2795 of SEQ ID NO: 1241717
gguggcguuaugccuguaa

SEQ ID NO: 1294229 - RNA, 19 nt, Artificial Sequence
  Description of Artificial Sequence: Synthetic oligonucleotide
  Antisense strand to SEQ ID NO: 1294228
uuacaggcauaacgccacc

SEQ ID NO: 1294230 - RNA, 19 nt, Artificial Sequence
  Description of Artificial Sequence: Synthetic oligonucleotide
  Sense strand starting at position 2798 of SEQ ID NO: 1241717
ggcguuaugccuguaaacc

SEQ ID NO: 1294231 - RNA, 19 nt, Artificial Sequence
  Description of Artificial Sequence: Synthetic oligonucleotide
  Antisense strand to SEQ ID NO: 1294230
gguuuacaggcauaacgcc

SEQ ID NO: 1294232 - RNA, 19 nt, Artificial Sequence
  Description of Artificial Sequence: Synthetic oligonucleotide
  Sense strand starting at position 2807 of SEQ ID NO: 1241717
ccuguaaacccauggugaa

SEQ ID NO: 1294233 - RNA, 19 nt, Artificial Sequence
  Description of Artificial Sequence: Synthetic oligonucleotide
  Antisense strand to SEQ ID NO: 1294232
uucaccauggguuuacagg

SEQ ID NO: 1294234 - RNA, 19 nt, Artificial Sequence
  Description of Artificial Sequence: Synthetic oligonucleotide
  Sense strand starting at position 2808 of SEQ ID NO: 1241717
cuguaaacccauggugaaa

SEQ ID NO: 1294235 - RNA, 19 nt, Artificial Sequence
  Description of Artificial Sequence: Synthetic oligonucleotide
  Antisense strand to SEQ ID NO: 1294234
uuucaccauggguuuacag

SEQ ID NO: 1294236 - RNA, 19 nt, Artificial Sequence
  Description of Artificial Sequence: Synthetic oligonucleotide
  Sense strand starting at position 3204 of SEQ ID NO: 1241717
gcaagauagucacuccuua

SEQ ID NO: 1294237 - RNA, 19 nt, Artificial Sequence
  Description of Artificial Sequence: Synthetic oligonucleotide
  Antisense strand to SEQ ID NO: 1294236
uaaggagugacuaucuugc

SEQ ID NO: 1294238 - RNA, 19 nt, Artificial Sequence
  Description of Artificial Sequence: Synthetic oligonucleotide
  Sense strand starting at position 3334 of SEQ ID NO: 1241717
guacaauaauuugaguaug

SEQ ID NO: 1294239 - RNA, 19 nt, Artificial Sequence
  Description of Artificial Sequence: Synthetic oligonucleotide
  Antisense strand to SEQ ID NO: 1294238
cauacucaaauuauuguac

SEQ ID NO: 1294240 - RNA, 19 nt, Artificial Sequence
  Description of Artificial Sequence: Synthetic oligonucleotide
  Sense strand starting at position 3344 of SEQ ID NO: 1241717
uugaguaugagauggcuaa

SEQ ID NO: 1294241 - RNA, 19 nt, Artificial Sequence
  Description of Artificial Sequence: Synthetic oligonucleotide
  Antisense strand to SEQ ID NO: 1294240
uuagccaucucauacucaa

SEQ ID NO: 1294242 - RNA, 19 nt, Artificial Sequence
  Description of Artificial Sequence: Synthetic oligonucleotide
  Sense strand starting at position 3348 of SEQ ID NO: 1241717
guaugagauggcuaacuug

SEQ ID NO: 1294243 - RNA, 19 nt, Artificial Sequence
  Description of Artificial Sequence: Synthetic oligonucleotide
  Antisense strand to SEQ ID NO: 1294242
caaguuagccaucucauac

SEQ ID NO: 1294244 - RNA, 19 nt, Artificial Sequence
  Description of Artificial Sequence: Synthetic oligonucleotide
  Sense strand starting at position 3461 of SEQ ID NO: 1241717
uauaauuagcuaggucaug

SEQ ID NO: 1294245 - RNA, 19 nt, Artificial Sequence
  Description of Artificial Sequence: Synthetic oligonucleotide
  Antisense strand to SEQ ID NO: 1294244
caugaccuagcuaauuaua

SEQ ID NO: 1294246 - RNA, 19 nt, Artificial Sequence
  Description of Artificial Sequence: Synthetic oligonucleotide
  Sense strand starting at position 3462 of SEQ ID NO: 1241717
auaauuagcuaggucaugu

SEQ ID NO: 1294247 - RNA, 19 nt, Artificial Sequence
  Description of Artificial Sequence: Synthetic oligonucleotide
  Antisense strand to SEQ ID NO: 1294246
acaugaccuagcuaauuau

SEQ ID NO: 1294248 - RNA, 19 nt, Artificial Sequence
  Description of Artificial Sequence: Synthetic oligonucleotide
  Sense strand starting at position 3545 of SEQ ID NO: 1241717
auuauugaugcccaaugau

SEQ ID NO: 1294249 - RNA, 19 nt, Artificial Sequence
  Description of Artificial Sequence: Synthetic oligonucleotide
  Antisense strand to SEQ ID NO: 1294248
aucauugggcaucaauaau

SEQ ID NO: 1294250 - RNA, 19 nt, Artificial Sequence
  Description of Artificial Sequence: Synthetic oligonucleotide
  Sense strand starting at position 3548 of SEQ ID NO: 1241717
auugaugcccaaugaugau

SEQ ID NO: 1294251 - RNA, 19 nt, Artificial Sequence
  Description of Artificial Sequence: Synthetic oligonucleotide
  Antisense strand to SEQ ID NO: 1294250
aucaucauugggcaucaau

SEQ ID NO: 1294252 - RNA, 19 nt, Artificial Sequence
  Description of Artificial Sequence: Synthetic oligonucleotide
  Sense strand starting at position 3554 of SEQ ID NO: 1241717
gcccaaugaugauuccuuu

SEQ ID NO: 1294253 - RNA, 19 nt, Artificial Sequence
  Description of Artificial Sequence: Synthetic oligonucleotide
  Antisense strand to SEQ ID NO: 1294252
aaaggaaucaucauugggc

SEQ ID NO: 1294254 - RNA, 19 nt, Artificial Sequence
  Description of Artificial Sequence: Synthetic oligonucleotide
  Sense strand starting at position 3558 of SEQ ID NO: 1241717
aaugaugauuccuuugugu

SEQ ID NO: 1294255 - RNA, 19 nt, Artificial Sequence
  Description of Artificial Sequence: Synthetic oligonucleotide
  Antisense strand to SEQ ID NO: 1294254
acacaaaggaaucaucauu

SEQ ID NO: 1294256 - RNA, 19 nt, Artificial Sequence
  Description of Artificial Sequence: Synthetic oligonucleotide
  Sense strand starting at position 3705 of SEQ ID NO: 1241717
ccuaaagaguccuuggaug

SEQ ID NO: 1294257 - RNA, 19 nt, Artificial Sequence
  Description of Artificial Sequence: Synthetic oligonucleotide
  Antisense strand to SEQ ID NO: 1294256
cauccaaggacucuuuagg

SEQ ID NO: 1294258 - RNA, 19 nt, Artificial Sequence
  Description of Artificial Sequence: Synthetic oligonucleotide
  Sense strand starting at position 3716 of SEQ ID NO: 1241717
cuuggaugagcuugggaaa

SEQ ID NO: 1294259 - RNA, 19 nt, Artificial Sequence
  Description of Artificial Sequence: Synthetic oligonucleotide
  Antisense strand to SEQ ID NO: 1294258
uuucccaagcucauccaag

SEQ ID NO: 1294260 - RNA, 19 nt, Artificial Sequence
  Description of Artificial Sequence: Synthetic oligonucleotide
  Sense strand starting at position 3748 of SEQ ID NO: 1241717
gaaauuauaguauacgcaa

SEQ ID NO: 1294261 - RNA, 19 nt, Artificial Sequence
  Description of Artificial Sequence: Synthetic oligonucleotide
  Antisense strand to SEQ ID NO: 1294260
uugcguauacuauaauuuc

SEQ ID NO: 1294262 - RNA, 19 nt, Artificial Sequence
  Description of Artificial Sequence: Synthetic oligonucleotide
  Sense strand starting at position 3821 of SEQ ID NO: 1241717
agggaccuaucgucuuaca

SEQ ID NO: 1294263 - RNA, 19 nt, Artificial Sequence
  Description of Artificial Sequence: Synthetic oligonucleotide
  Antisense strand to SEQ ID NO: 1294262
uguaagacgauaggucccu

SEQ ID NO: 1294264 - RNA, 19 nt, Artificial Sequence
  Description of Artificial Sequence: Synthetic oligonucleotide
  Sense strand starting at position 3867 of SEQ ID NO: 1241717
agcaaauauuacguugaau

SEQ ID NO: 1294265 - RNA, 19 nt, Artificial Sequence
  Description of Artificial Sequence: Synthetic oligonucleotide
  Antisense strand to SEQ ID NO: 1294264
auucaacguaauauuugcu

SEQ ID NO: 1294266 - RNA, 19 nt, Artificial Sequence
  Description of Artificial Sequence: Synthetic oligonucleotide
  Sense strand starting at position 3942 of SEQ ID NO: 1241717
gcuuaaucacaguagauga

SEQ ID NO: 1294267 - RNA, 19 nt, Artificial Sequence
  Description of Artificial Sequence: Synthetic oligonucleotide
  Antisense strand to SEQ ID NO: 1294266
ucaucuacugugauuaagc

SEQ ID NO: 1294268 - RNA, 19 nt, Artificial Sequence
  Description of Artificial Sequence: Synthetic oligonucleotide
  Sense strand starting at position 28 of SEQ ID NO: 1241718
augucauuaagguaguaag

SEQ ID NO: 1294269 - RNA, 19 nt, Artificial Sequence
  Description of Artificial Sequence: Synthetic oligonucleotide
  Antisense strand to SEQ ID NO: 1294268
cuuacuaccuuaaugacau

SEQ ID NO: 1294270 - RNA, 19 nt, Artificial Sequence
  Description of Artificial Sequence: Synthetic oligonucleotide
  Sense strand starting at position 190 of SEQ ID NO: 1241718
gugagagcuauagauuagu

SEQ ID NO: 1294271 - RNA, 19 nt, Artificial Sequence
  Description of Artificial Sequence: Synthetic oligonucleotide
  Antisense strand to SEQ ID NO: 1294270
acuaaucuauagcucucac

SEQ ID NO: 1294272 - RNA, 19 nt, Artificial Sequence
  Description of Artificial Sequence: Synthetic oligonucleotide
  Sense strand starting at position 336 of SEQ ID NO: 1241718
aguacuuacugaucauuag

SEQ ID NO: 1294273 - RNA, 19 nt, Artificial Sequence
  Description of Artificial Sequence: Synthetic oligonucleotide
  Antisense strand to SEQ ID NO: 1294272
cuaaugaucaguaaguacu

SEQ ID NO: 1294274 - RNA, 19 nt, Artificial Sequence
  Description of Artificial Sequence: Synthetic oligonucleotide
  Sense strand starting at position 381 of SEQ ID NO: 1241718
ucuaacaucgauuauguuu

SEQ ID NO: 1294275 - RNA, 19 nt, Artificial Sequence
  Description of Artificial Sequence: Synthetic oligonucleotide
  Antisense strand to SEQ ID NO: 1294274
aaacauaaucgauguuaga

SEQ ID NO: 1294276 - RNA, 19 nt, Artificial Sequence
  Description of Artificial Sequence: Synthetic oligonucleotide
  Sense strand starting at position 386 of SEQ ID NO: 1241718
caucgauuauguuugaaua

SEQ ID NO: 1294277 - RNA, 19 nt, Artificial Sequence
  Description of Artificial Sequence: Synthetic oligonucleotide
  Antisense strand to SEQ ID NO: 1294276
uauucaaacauaaucgaug

SEQ ID NO: 1294278 - RNA, 19 nt, Artificial Sequence
  Description of Artificial Sequence: Synthetic oligonucleotide
  Sense strand starting at position 487 of SEQ ID NO: 1241718
ucuagcauuuaguucuuau

SEQ ID NO: 1294279 - RNA, 19 nt, Artificial Sequence
  Description of Artificial Sequence: Synthetic oligonucleotide
  Antisense strand to SEQ ID NO: 1294278
auaagaacuaaaugcuaga

SEQ ID NO: 1294280 - RNA, 19 nt, Artificial Sequence
  Description of Artificial Sequence: Synthetic oligonucleotide
  Sense strand starting at position 594 of SEQ ID NO: 1241718
cuuuaauaugaauggcaag

SEQ ID NO: 1294281 - RNA, 19 nt, Artificial Sequence
  Description of Artificial Sequence: Synthetic oligonucleotide
  Antisense strand to SEQ ID NO: 1294280
cuugccauucauauuaaag

SEQ ID NO: 1294282 - RNA, 19 nt, Artificial Sequence
  Description of Artificial Sequence: Synthetic oligonucleotide
  Sense strand starting at position 677 of SEQ ID NO: 1241718
ugaaaugagagcugaucau

SEQ ID NO: 1294283 - RNA, 19 nt, Artificial Sequence
  Description of Artificial Sequence: Synthetic oligonucleotide
  Antisense strand to SEQ ID NO: 1294282
augaucagcucucauuuca

SEQ ID NO: 1294284 - RNA, 19 nt, Artificial Sequence
  Description of Artificial Sequence: Synthetic oligonucleotide
  Sense strand starting at position 740 of SEQ ID NO: 1241718
uguaucuucccuugaugac

SEQ ID NO: 1294285 - RNA, 19 nt, Artificial Sequence
  Description of Artificial Sequence: Synthetic oligonucleotide
  Antisense strand to SEQ ID NO: 1294284
gucaucaagggaagauaca

SEQ ID NO: 1294286 - RNA, 19 nt, Artificial Sequence
  Description of Artificial Sequence: Synthetic oligonucleotide
  Sense strand starting at position 741 of SEQ ID NO: 1241718
guaucuucccuugaugaca

SEQ ID NO: 1294287 - RNA, 19 nt, Artificial Sequence
  Description of Artificial Sequence: Synthetic oligonucleotide
  Antisense strand to SEQ ID NO: 1294286
ugucaucaagggaagauac

SEQ ID NO: 1294288 - RNA, 19 nt, Artificial Sequence
  Description of Artificial Sequence: Synthetic oligonucleotide
  Sense strand starting at position 1180 of SEQ ID NO: 1241718
uacgaagacgguuauaauc

SEQ ID NO: 1294289 - RNA, 19 nt, Artificial Sequence
  Description of Artificial Sequence: Synthetic oligonucleotide
  Antisense strand to SEQ ID NO: 1294288
gauuauaaccgucuucgua

SEQ ID NO: 1294290 - RNA, 19 nt, Artificial Sequence
  Description of Artificial Sequence: Synthetic oligonucleotide
  Sense strand starting at position 1189 of SEQ ID NO: 1241718
gguuauaauccuggcggga

SEQ ID NO: 1294291 - RNA, 19 nt, Artificial Sequence
  Description of Artificial Sequence: Synthetic oligonucleotide
  Antisense strand to SEQ ID NO: 1294290
ucccgccaggauuauaacc

SEQ ID NO: 1294292 - RNA, 19 nt, Artificial Sequence
  Description of Artificial Sequence: Synthetic oligonucleotide
  Sense strand starting at position 1216 of SEQ ID NO: 1241718
ggaauauugugguucugga

SEQ ID NO: 1294293 - RNA, 19 nt, Artificial Sequence
  Description of Artificial Sequence: Synthetic oligonucleotide
  Antisense strand to SEQ ID NO: 1294292
uccagaaccacaauauucc

SEQ ID NO: 1294294 - RNA, 19 nt, Artificial Sequence
  Description of Artificial Sequence: Synthetic oligonucleotide
  Sense strand starting at position 1494 of SEQ ID NO: 1241718
ccgggaauuccugaccgaa

SEQ ID NO: 1294295 - RNA, 19 nt, Artificial Sequence
  Description of Artificial Sequence: Synthetic oligonucleotide
  Antisense strand to SEQ ID NO: 1294294
uucggucaggaauucccgg

SEQ ID NO: 1294296 - RNA, 19 nt, Artificial Sequence
  Description of Artificial Sequence: Synthetic oligonucleotide
  Sense strand starting at position 1540 of SEQ ID NO: 1241718
guuauuaugggauggcuaa

SEQ ID NO: 1294297 - RNA, 19 nt, Artificial Sequence
  Description of Artificial Sequence: Synthetic oligonucleotide
  Antisense strand to SEQ ID NO: 1294296
uuagccaucccauaauaac

SEQ ID NO: 1294298 - RNA, 19 nt, Artificial Sequence
  Description of Artificial Sequence: Synthetic oligonucleotide
  Sense strand starting at position 1596 of SEQ ID NO: 1241718
ccgccaauugcuguacagu

SEQ ID NO: 1294299 - RNA, 19 nt, Artificial Sequence
  Description of Artificial Sequence: Synthetic oligonucleotide
  Antisense strand to SEQ ID NO: 1294298
acuguacagcaauuggcgg

SEQ ID NO: 1294300 - RNA, 19 nt, Artificial Sequence
  Description of Artificial Sequence: Synthetic oligonucleotide
  Sense strand starting at position 1751 of SEQ ID NO: 1241718
cccaaugacccggaaguau

SEQ ID NO: 1294301 - RNA, 19 nt, Artificial Sequence
  Description of Artificial Sequence: Synthetic oligonucleotide
  Antisense strand to SEQ ID NO: 1294300
auacuuccgggucauuggg

SEQ ID NO: 1294302 - RNA, 19 nt, Artificial Sequence
  Description of Artificial Sequence: Synthetic oligonucleotide
  Sense strand starting at position 2061 of SEQ ID NO: 1241718
gcggcagucccuagacgaa

SEQ ID NO: 1294303 - RNA, 19 nt, Artificial Sequence
  Description of Artificial Sequence: Synthetic oligonucleotide
  Antisense strand to SEQ ID NO: 1294302
uucgucuagggacugccgc

SEQ ID NO: 1294304 - RNA, 19 nt, Artificial Sequence
  Description of Artificial Sequence: Synthetic oligonucleotide
  Sense strand starting at position 2174 of SEQ ID NO: 1241718
cgggaucuagcgugggaua

SEQ ID NO: 1294305 - RNA, 19 nt, Artificial Sequence
  Description of Artificial Sequence: Synthetic oligonucleotide
  Antisense strand to SEQ ID NO: 1294304
uaucccacgcuagaucccg

SEQ ID NO: 1294306 - RNA, 19 nt, Artificial Sequence
  Description of Artificial Sequence: Synthetic oligonucleotide
  Sense strand starting at position 2175 of SEQ ID NO: 1241718
gggaucuagcgugggauaa

SEQ ID NO: 1294307 - RNA, 19 nt, Artificial Sequence
  Description of Artificial Sequence: Synthetic oligonucleotide
  Antisense strand to SEQ ID NO: 1294306
uuaucccacgcuagauccc

SEQ ID NO: 1294308 - RNA, 19 nt, Artificial Sequence
  Description of Artificial Sequence: Synthetic oligonucleotide
  Sense strand starting at position 2176 of SEQ ID NO: 1241718
ggaucuagcgugggauaaa

SEQ ID NO: 1294309 - RNA, 19 nt, Artificial Sequence
  Description of Artificial Sequence: Synthetic oligonucleotide
  Antisense strand to SEQ ID NO: 1294308
uuuaucccacgcuagaucc

SEQ ID NO: 1294310 - RNA, 19 nt, Artificial Sequence
  Description of Artificial Sequence: Synthetic oligonucleotide
  Sense strand starting at position 2196 of SEQ ID NO: 1241718
gugggacuacuacagugua

SEQ ID NO: 1294311 - RNA, 19 nt, Artificial Sequence
  Description of Artificial Sequence: Synthetic oligonucleotide
  Antisense strand to SEQ ID NO: 1294310
uacacuguaguagucccac

SEQ ID NO: 1294312 - RNA, 19 nt, Artificial Sequence
  Description of Artificial Sequence: Synthetic oligonucleotide
  Sense strand starting at position 2199 of SEQ ID NO: 1241718
ggacuacuacaguguaacu

SEQ ID NO: 1294313 - RNA, 19 nt, Artificial Sequence
  Description of Artificial Sequence: Synthetic oligonucleotide
  Antisense strand to SEQ ID NO: 1294312
aguuacacuguaguagucc

SEQ ID NO: 1294314 - RNA, 19 nt, Artificial Sequence
  Description of Artificial Sequence: Synthetic oligonucleotide
  Sense strand starting at position 2446 of SEQ ID NO: 1241718
guguaagucagaggaaaca

SEQ ID NO: 1294315 - RNA, 19 nt, Artificial Sequence
  Description of Artificial Sequence: Synthetic oligonucleotide
  Antisense strand to SEQ ID NO: 1294314
uguuuccucugacuuacac

SEQ ID NO: 1294316 - RNA, 19 nt, Artificial Sequence
  Description of Artificial Sequence: Synthetic oligonucleotide
  Sense strand starting at position 2639 of SEQ ID NO: 1241718
cauaaaugguuccugauga

SEQ ID NO: 1294317 - RNA, 19 nt, Artificial Sequence
  Description of Artificial Sequence: Synthetic oligonucleotide
  Antisense strand to SEQ ID NO: 1294316
ucaucaggaaccauuuaug

SEQ ID NO: 1294318 - RNA, 19 nt, Artificial Sequence
  Description of Artificial Sequence: Synthetic oligonucleotide
  Sense strand starting at position 2700 of SEQ ID NO: 1241718
ccagaaguuugccuaccua

SEQ ID NO: 1294319 - RNA, 19 nt, Artificial Sequence
  Description of Artificial Sequence: Synthetic oligonucleotide
  Antisense strand to SEQ ID NO: 1294318
uagguaggcaaacuucugg

SEQ ID NO: 1294320 - RNA, 19 nt, Artificial Sequence
  Description of Artificial Sequence: Synthetic oligonucleotide
  Sense strand starting at position 2761 of SEQ ID NO: 1241718
agucuacauuuguauauac

SEQ ID NO: 1294321 - RNA, 19 nt, Artificial Sequence
  Description of Artificial Sequence: Synthetic oligonucleotide
  Antisense strand to SEQ ID NO: 1294320
guauauacaaauguagacu

SEQ ID NO: 1294322 - RNA, 19 nt, Artificial Sequence
  Description of Artificial Sequence: Synthetic oligonucleotide
  Sense strand starting at position 2796 of SEQ ID NO: 1241718
gaugacuugucugcuguaa

SEQ ID NO: 1294323 - RNA, 19 nt, Artificial Sequence
  Description of Artificial Sequence: Synthetic oligonucleotide
  Antisense strand to SEQ ID NO: 1294322
uuacagcagacaagucauc

SEQ ID NO: 1294324 - RNA, 19 nt, Artificial Sequence
  Description of Artificial Sequence: Synthetic oligonucleotide
  Sense strand starting at position 2847 of SEQ ID NO: 1241718
gaaaguggugcugaaauua

SEQ ID NO: 1294325 - RNA, 19 nt, Artificial Sequence
  Description of Artificial Sequence: Synthetic oligonucleotide
  Antisense strand to SEQ ID NO: 1294324
uaauuucagcaccacuuuc

SEQ ID NO: 1294326 - RNA, 19 nt, Artificial Sequence
  Description of Artificial Sequence: Synthetic oligonucleotide
  Sense strand starting at position 3047 of SEQ ID NO: 1241718
cuacauagucugugguuaa

SEQ ID NO: 1294327 - RNA, 19 nt, Artificial Sequence
  Description of Artificial Sequence: Synthetic oligonucleotide
  Antisense strand to SEQ ID NO: 1294326
uuaaccacagacuauguag

SEQ ID NO: 1294328 - RNA, 19 nt, Artificial Sequence
  Description of Artificial Sequence: Synthetic oligonucleotide
  Sense strand starting at position 3058 of SEQ ID NO: 1241718
gugguuaauggaggugacu

SEQ ID NO: 1294329 - RNA, 19 nt, Artificial Sequence
  Description of Artificial Sequence: Synthetic oligonucleotide
  Antisense strand to SEQ ID NO: 1294328
agucaccuccauuaaccac

SEQ ID NO: 1294330 - RNA, 19 nt, Artificial Sequence
  Description of Artificial Sequence: Synthetic oligonucleotide
  Sense strand starting at position 3060 of SEQ ID NO: 1241718
gguuaauggaggugacuag

SEQ ID NO: 1294331 - RNA, 19 nt, Artificial Sequence
  Description of Artificial Sequence: Synthetic oligonucleotide
  Antisense strand to SEQ ID NO: 1294330
cuagucaccuccauuaacc

SEQ ID NO: 1294332 - RNA, 19 nt, Artificial Sequence
  Description of Artificial Sequence: Synthetic oligonucleotide
  Sense strand starting at position 3128 of SEQ ID NO: 1241718
ugaggaaguggucauguau

SEQ ID NO: 1294333 - RNA, 19 nt, Artificial Sequence
  Description of Artificial Sequence: Synthetic oligonucleotide
  Antisense strand to SEQ ID NO: 1294332
auacaugaccacuuccuca

SEQ ID NO: 1294334 - RNA, 19 nt, Artificial Sequence
  Description of Artificial Sequence: Synthetic oligonucleotide
  Sense strand starting at position 3426 of SEQ ID NO: 1241718
cuaucauagcccugagaua

SEQ ID NO: 1294335 - RNA, 19 nt, Artificial Sequence
  Description of Artificial Sequence: Synthetic oligonucleotide
  Antisense strand to SEQ ID NO: 1294334
uaucucagggcuaugauag

SEQ ID NO: 1294336 - RNA, 19 nt, Artificial Sequence
  Description of Artificial Sequence: Synthetic oligonucleotide
  Sense strand starting at position 3736 of SEQ ID NO: 1241718
cacuacugcuguguuggaa

SEQ ID NO: 1294337 - RNA, 19 nt, Artificial Sequence
  Description of Artificial Sequence: Synthetic oligonucleotide
  Antisense strand to SEQ ID NO: 1294336
uuccaacacagcaguagug

SEQ ID NO: 1294338 - RNA, 19 nt, Artificial Sequence
  Description of Artificial Sequence: Synthetic oligonucleotide
  Sense strand starting at position 3752 of SEQ ID NO: 1241718
gaacguguuaugcagagau

SEQ ID NO: 1294339 - RNA, 19 nt, Artificial Sequence
  Description of Artificial Sequence: Synthetic oligonucleotide
  Antisense strand to SEQ ID NO: 1294338
aucucugcauaacacguuc

SEQ ID NO: 1294340 - RNA, 19 nt, Artificial Sequence
  Description of Artificial Sequence: Synthetic oligonucleotide
  Sense strand starting at position 3754 of SEQ ID NO: 1241718
acguguuaugcagagauag

SEQ ID NO: 1294341 - RNA, 19 nt, Artificial Sequence
  Description of Artificial Sequence: Synthetic oligonucleotide
  Antisense strand to SEQ ID NO: 1294340
cuaucucugcauaacacgu

SEQ ID NO: 1294342 - RNA, 19 nt, Artificial Sequence
  Description of Artificial Sequence: Synthetic oligonucleotide
  Sense strand starting at position 3756 of SEQ ID NO: 1241718
guguuaugcagagauagag

SEQ ID NO: 1294343 - RNA, 19 nt, Artificial Sequence
  Description of Artificial Sequence: Synthetic oligonucleotide
  Antisense strand to SEQ ID NO: 1294342
cucuaucucugcauaacac

SEQ ID NO: 1294344 - RNA, 19 nt, Artificial Sequence
  Description of Artificial Sequence: Synthetic oligonucleotide
  Sense strand starting at position 3847 of SEQ ID NO: 1241718
ugcugcucucuggugcaau

SEQ ID NO: 1294345 - RNA, 19 nt, Artificial Sequence
  Description of Artificial Sequence: Synthetic oligonucleotide
  Antisense strand to SEQ ID NO: 1294344
auugcaccagagagcagca

SEQ ID NO: 1294346 - RNA, 19 nt, Artificial Sequence
  Description of Artificial Sequence: Synthetic oligonucleotide
  Sense strand starting at position 3860 of SEQ ID NO: 1241718
ugcaauaggcccuggcaaa

SEQ ID NO: 1294347 - RNA, 19 nt, Artificial Sequence
  Description of Artificial Sequence: Synthetic oligonucleotide
  Antisense strand to SEQ ID NO: 1294346
uuugccagggccuauugca

SEQ ID NO: 1294348 - RNA, 19 nt, Artificial Sequence
  Description of Artificial Sequence: Synthetic oligonucleotide
  Sense strand starting at position 37 of SEQ ID NO: 1241719
gcauacauucgguaucaca

SEQ ID NO: 1294349 - RNA, 19 nt, Artificial Sequence
  Description of Artificial Sequence: Synthetic oligonucleotide
  Antisense strand to SEQ ID NO: 1294348
ugugauaccgaauguaugc

SEQ ID NO: 1294350 - RNA, 19 nt, Artificial Sequence
  Description of Artificial Sequence: Synthetic oligonucleotide
  Sense strand starting at position 53 of SEQ ID NO: 1241719
acauaacuacuugggagua

SEQ ID NO: 1294351 - RNA, 19 nt, Artificial Sequence
  Description of Artificial Sequence: Synthetic oligonucleotide
  Antisense strand to SEQ ID NO: 1294350
uacucccaaguaguuaugu

SEQ ID NO: 1294352 - RNA, 19 nt, Artificial Sequence
  Description of Artificial Sequence: Synthetic oligonucleotide
  Sense strand starting at position 118 of SEQ ID NO: 1241719
guguguacccaggagaaag

SEQ ID NO: 1294353 - RNA, 19 nt, Artificial Sequence
  Description of Artificial Sequence: Synthetic oligonucleotide
  Antisense strand to SEQ ID NO: 1294352
cuuucuccuggguacacac

SEQ ID NO: 1294354 - RNA, 19 nt, Artificial Sequence
  Description of Artificial Sequence: Synthetic oligonucleotide
  Sense strand starting at position 134 of SEQ ID NO: 1241719
aagaguuuagaaugcucau

SEQ ID NO: 1294355 - RNA, 19 nt, Artificial Sequence
  Description of Artificial Sequence: Synthetic oligonucleotide
  Antisense strand to SEQ ID NO: 1294354
augagcauucuaaacucuu

SEQ ID NO: 1294356 - RNA, 19 nt, Artificial Sequence
  Description of Artificial Sequence: Synthetic oligonucleotide
  Sense strand starting at position 137 of SEQ ID NO: 1241719
aguuuagaaugcucaugau

SEQ ID NO: 1294357 - RNA, 19 nt, Artificial Sequence
  Description of Artificial Sequence: Synthetic oligonucleotide
  Antisense strand to SEQ ID NO: 1294356
aucaugagcauucuaaacu

SEQ ID NO: 1294358 - RNA, 19 nt, Artificial Sequence
  Description of Artificial Sequence: Synthetic oligonucleotide
  Sense strand starting at position 143 of SEQ ID NO: 1241719
gaaugcucaugaucugaga

SEQ ID NO: 1294359 - RNA, 19 nt, Artificial Sequence
  Description of Artificial Sequence: Synthetic oligonucleotide
  Antisense strand to SEQ ID NO: 1294358
ucucagaucaugagcauuc

SEQ ID NO: 1294360 - RNA, 19 nt, Artificial Sequence
  Description of Artificial Sequence: Synthetic oligonucleotide
  Sense strand starting at position 246 of SEQ ID NO: 1241719
agcaguauaaucuaguagu

SEQ ID NO: 1294361 - RNA, 19 nt, Artificial Sequence
  Description of Artificial Sequence: Synthetic oligonucleotide
  Antisense strand to SEQ ID NO: 1294360
acuacuagauuauacugcu

SEQ ID NO: 1294362 - RNA, 19 nt, Artificial Sequence
  Description of Artificial Sequence: Synthetic oligonucleotide
  Sense strand starting at position 273 of SEQ ID NO: 1241719
ugggcuccaccaugagaua

SEQ ID NO: 1294363 - RNA, 19 nt, Artificial Sequence
  Description of Artificial Sequence: Synthetic oligonucleotide
  Antisense strand to SEQ ID NO: 1294362
uaucucaugguggagccca

SEQ ID NO: 1294364 - RNA, 19 nt, Artificial Sequence
  Description of Artificial Sequence: Synthetic oligonucleotide
  Sense strand starting at position 307 of SEQ ID NO: 1241719
cgaguuauuuaacuuguuu

SEQ ID NO: 1294365 - RNA, 19 nt, Artificial Sequence
  Description of Artificial Sequence: Synthetic oligonucleotide
  Antisense strand to SEQ ID NO: 1294364
aaacaaguuaaauaacucg

SEQ ID NO: 1294366 - RNA, 19 nt, Artificial Sequence
  Description of Artificial Sequence: Synthetic oligonucleotide
  Sense strand starting at position 417 of SEQ ID NO: 1241719
aaagguugguacucaguaa

SEQ ID NO: 1294367 - RNA, 19 nt, Artificial Sequence
  Description of Artificial Sequence: Synthetic oligonucleotide
  Antisense strand to SEQ ID NO: 1294366
uuacugaguaccaaccuuu

SEQ ID NO: 1294368 - RNA, 19 nt, Artificial Sequence
  Description of Artificial Sequence: Synthetic oligonucleotide
  Sense strand starting at position 429 of SEQ ID NO: 1241719
ucaguaaguccucaagaac

SEQ ID NO: 1294369 - RNA, 19 nt, Artificial Sequence
  Description of Artificial Sequence: Synthetic oligonucleotide
  Antisense strand to SEQ ID NO: 1294368
guucuugaggacuuacuga

SEQ ID NO: 1294370 - RNA, 19 nt, Artificial Sequence
  Description of Artificial Sequence: Synthetic oligonucleotide
  Sense strand starting at position 432 of SEQ ID NO: 1241719
guaaguccucaagaaccuu

SEQ ID NO: 1294371 - RNA, 19 nt, Artificial Sequence
  Description of Artificial Sequence: Synthetic oligonucleotide
  Antisense strand to SEQ ID NO: 1294370
aagguucuugaggacuuac

SEQ ID NO: 1294372 - RNA, 19 nt, Artificial Sequence
  Description of Artificial Sequence: Synthetic oligonucleotide
  Sense strand starting at position 473 of SEQ ID NO: 1241719
accuucuuuccugagaugu

SEQ ID NO: 1294373 - RNA, 19 nt, Artificial Sequence
  Description of Artificial Sequence: Synthetic oligonucleotide
  Antisense strand to SEQ ID NO: 1294372
acaucucaggaaagaaggu

SEQ ID NO: 1294374 - RNA, 19 nt, Artificial Sequence
  Description of Artificial Sequence: Synthetic oligonucleotide
  Sense strand starting at position 610 of SEQ ID NO: 1241719
ccacuagauggugacaguu

SEQ ID NO: 1294375 - RNA, 19 nt, Artificial Sequence
  Description of Artificial Sequence: Synthetic oligonucleotide
  Antisense strand to SEQ ID NO: 1294374
aacugucaccaucuagugg

SEQ ID NO: 1294376 - RNA, 19 nt, Artificial Sequence
  Description of Artificial Sequence: Synthetic oligonucleotide
  Sense strand starting at position 623 of SEQ ID NO: 1241719
acaguuuggguguggaauu

SEQ ID NO: 1294377 - RNA, 19 nt, Artificial Sequence
  Description of Artificial Sequence: Synthetic oligonucleotide
  Antisense strand to SEQ ID NO: 1294376
aauuccacacccaaacugu

SEQ ID NO: 1294378 - RNA, 19 nt, Artificial Sequence
  Description of Artificial Sequence: Synthetic oligonucleotide
  Sense strand starting at position 746 of SEQ ID NO: 1241719
uucccaucucuguagauca

SEQ ID NO: 1294379 - RNA, 19 nt, Artificial Sequence
  Description of Artificial Sequence: Synthetic oligonucleotide
  Antisense strand to SEQ ID NO: 1294378
ugaucuacagagaugggaa

SEQ ID NO: 1294380 - RNA, 19 nt, Artificial Sequence
  Description of Artificial Sequence: Synthetic oligonucleotide
  Sense strand starting at position 771 of SEQ ID NO: 1241719
ggaguaaaucccuaggccu

SEQ ID NO: 1294381 - RNA, 19 nt, Artificial Sequence
  Description of Artificial Sequence: Synthetic oligonucleotide
  Antisense strand to SEQ ID NO: 1294380
aggccuagggauuuacucc

SEQ ID NO: 1294382 - RNA, 19 nt, Artificial Sequence
  Description of Artificial Sequence: Synthetic oligonucleotide
  Sense strand starting at position 773 of SEQ ID NO: 1241719
aguaaaucccuaggccuaa

SEQ ID NO: 1294383 - RNA, 19 nt, Artificial Sequence
  Description of Artificial Sequence: Synthetic oligonucleotide
  Antisense strand to SEQ ID NO: 1294382
uuaggccuagggauuuacu

SEQ ID NO: 1294384 - RNA, 19 nt, Artificial Sequence
  Description of Artificial Sequence: Synthetic oligonucleotide
  Sense strand starting at position 774 of SEQ ID NO: 1241719
guaaaucccuaggccuaau

SEQ ID NO: 1294385 - RNA, 19 nt, Artificial Sequence
  Description of Artificial Sequence: Synthetic oligonucleotide
  Antisense strand to SEQ ID NO: 1294384
auuaggccuagggauuuac

SEQ ID NO: 1294386 - RNA, 19 nt, Artificial Sequence
  Description of Artificial Sequence: Synthetic oligonucleotide
  Sense strand starting at position 793 of SEQ ID NO: 1241719
ugaacugaguaaucuuacu

SEQ ID NO: 1294387 - RNA, 19 nt, Artificial Sequence
  Description of Artificial Sequence: Synthetic oligonucleotide
  Antisense strand to SEQ ID NO: 1294386
aguaagauuacucaguuca

SEQ ID NO: 1294388 - RNA, 19 nt, Artificial Sequence
  Description of Artificial Sequence: Synthetic oligonucleotide
  Sense strand starting at position 1020 of SEQ ID NO: 1241719
ccuaaauucguccagggua

SEQ ID NO: 1294389 - RNA, 19 nt, Artificial Sequence
  Description of Artificial Sequence: Synthetic oligonucleotide
  Antisense strand to SEQ ID NO: 1294388
uacccuggacgaauuuagg

SEQ ID NO: 1294390 - RNA, 19 nt, Artificial Sequence
  Description of Artificial Sequence: Synthetic oligonucleotide
  Sense strand starting at position 1131 of SEQ ID NO: 1241719
aaaggaaagucuguaugua

SEQ ID NO: 1294391 - RNA, 19 nt, Artificial Sequence
  Description of Artificial Sequence: Synthetic oligonucleotide
  Antisense strand to SEQ ID NO: 1294390
uacauacagacuuuccuuu

SEQ ID NO: 1294392 - RNA, 19 nt, Artificial Sequence
  Description of Artificial Sequence: Synthetic oligonucleotide
  Sense strand starting at position 1132 of SEQ ID NO: 1241719
aaggaaagucuguauguac

SEQ ID NO: 1294393 - RNA, 19 nt, Artificial Sequence
  Description of Artificial Sequence: Synthetic oligonucleotide
  Antisense strand to SEQ ID NO: 1294392
guacauacagacuuuccuu

SEQ ID NO: 1294394 - RNA, 19 nt, Artificial Sequence
  Description of Artificial Sequence: Synthetic oligonucleotide
  Sense strand starting at position 1359 of SEQ ID NO: 1241719
caguaaugacaguggcaca

SEQ ID NO: 1294395 - RNA, 19 nt, Artificial Sequence
  Description of Artificial Sequence: Synthetic oligonucleotide
  Antisense strand to SEQ ID NO: 1294394
ugugccacugucauuacug

SEQ ID NO: 1294396 - RNA, 19 nt, Artificial Sequence
  Description of Artificial Sequence: Synthetic oligonucleotide
  Sense strand starting at position 2283 of SEQ ID NO: 1241719
gcgcucuccaguucguuua

SEQ ID NO: 1294397 - RNA, 19 nt, Artificial Sequence
  Description of Artificial Sequence: Synthetic oligonucleotide
  Antisense strand to SEQ ID NO: 1294396
uaaacgaacuggagagcgc

SEQ ID NO: 1294398 - RNA, 19 nt, Artificial Sequence
  Description of Artificial Sequence: Synthetic oligonucleotide
  Sense strand starting at position 2381 of SEQ ID NO: 1241719
gcauguugccuuguuagcu

SEQ ID NO: 1294399 - RNA, 19 nt, Artificial Sequence
  Description of Artificial Sequence: Synthetic oligonucleotide
  Antisense strand to SEQ ID NO: 1294398
agcuaacaaggcaacaugc

SEQ ID NO: 1294400 - RNA, 19 nt, Artificial Sequence
  Description of Artificial Sequence: Synthetic oligonucleotide
  Sense strand starting at position 2602 of SEQ ID NO: 1241719
agcauucugaagugaguga

SEQ ID NO: 1294401 - RNA, 19 nt, Artificial Sequence
  Description of Artificial Sequence: Synthetic oligonucleotide
  Antisense strand to SEQ ID NO: 1294400
ucacucacuucagaaugcu

SEQ ID NO: 1294402 - RNA, 19 nt, Artificial Sequence
  Description of Artificial Sequence: Synthetic oligonucleotide
  Sense strand starting at position 2603 of SEQ ID NO: 1241719
gcauucugaagugagugau

SEQ ID NO: 1294403 - RNA, 19 nt, Artificial Sequence
  Description of Artificial Sequence: Synthetic oligonucleotide
  Antisense strand to SEQ ID NO: 1294402
aucacucacuucagaaugc

SEQ ID NO: 1294404 - RNA, 19 nt, Artificial Sequence
  Description of Artificial Sequence: Synthetic oligonucleotide
  Sense strand starting at position 2606 of SEQ ID NO: 1241719
uucugaagugagugauccu

SEQ ID NO: 1294405 - RNA, 19 nt, Artificial Sequence
  Description of Artificial Sequence: Synthetic oligonucleotide
  Antisense strand to SEQ ID NO: 1294404
aggaucacucacuucagaa

SEQ ID NO: 1294406 - RNA, 19 nt, Artificial Sequence
  Description of Artificial Sequence: Synthetic oligonucleotide
  Sense strand starting at position 2607 of SEQ ID NO: 1241719
ucugaagugagugauccuu

SEQ ID NO: 1294407 - RNA, 19 nt, Artificial Sequence
  Description of Artificial Sequence: Synthetic oligonucleotide
  Antisense strand to SEQ ID NO: 1294406
aaggaucacucacuucaga

SEQ ID NO: 1294408 - RNA, 19 nt, Artificial Sequence
  Description of Artificial Sequence: Synthetic oligonucleotide
  Sense strand starting at position 2834 of SEQ ID NO: 1241719
guguguccucgguuuaugu

SEQ ID NO: 1294409 - RNA, 19 nt, Artificial Sequence
  Description of Artificial Sequence: Synthetic oligonucleotide
  Antisense strand to SEQ ID NO: 1294408
acauaaaccgaggacacac

SEQ ID NO: 1294410 - RNA, 19 nt, Artificial Sequence
  Description of Artificial Sequence: Synthetic oligonucleotide
  Sense strand starting at position 2936 of SEQ ID NO: 1241719
agagguccuccauaagugu

SEQ ID NO: 1294411 - RNA, 19 nt, Artificial Sequence
  Description of Artificial Sequence: Synthetic oligonucleotide
  Antisense strand to SEQ ID NO: 1294410
acacuuauggaggaccucu

SEQ ID NO: 1294412 - RNA, 19 nt, Artificial Sequence
  Description of Artificial Sequence: Synthetic oligonucleotide
  Sense strand starting at position 2957 of SEQ ID NO: 1241719
aggaacuccuacuuguaaa

SEQ ID NO: 1294413 - RNA, 19 nt, Artificial Sequence
  Description of Artificial Sequence: Synthetic oligonucleotide
  Antisense strand to SEQ ID NO: 1294412
uuuacaaguaggaguuccu

SEQ ID NO: 1294414 - RNA, 19 nt, Artificial Sequence
  Description of Artificial Sequence: Synthetic oligonucleotide
  Sense strand starting at position 2968 of SEQ ID NO: 1241719
cuuguaaaucagugguaga

SEQ ID NO: 1294415 - RNA, 19 nt, Artificial Sequence
  Description of Artificial Sequence: Synthetic oligonucleotide
  Antisense strand to SEQ ID NO: 1294414
ucuaccacugauuuacaag

SEQ ID NO: 1294416 - RNA, 19 nt, Artificial Sequence
  Description of Artificial Sequence: Synthetic oligonucleotide
  Sense strand starting at position 2969 of SEQ ID NO: 1241719
uuguaaaucagugguagag

SEQ ID NO: 1294417 - RNA, 19 nt, Artificial Sequence
  Description of Artificial Sequence: Synthetic oligonucleotide
  Antisense strand to SEQ ID NO: 1294416
cucuaccacugauuuacaa

SEQ ID NO: 1294418 - RNA, 19 nt, Artificial Sequence
  Description of Artificial Sequence: Synthetic oligonucleotide
  Sense strand starting at position 3050 of SEQ ID NO: 1241719
ccagaugcucuuggacaaa

SEQ ID NO: 1294419 - RNA, 19 nt, Artificial Sequence
  Description of Artificial Sequence: Synthetic oligonucleotide
  Antisense strand to SEQ ID NO: 1294418
uuuguccaagagcaucugg

SEQ ID NO: 1294420 - RNA, 19 nt, Artificial Sequence
  Description of Artificial Sequence: Synthetic oligonucleotide
  Sense strand starting at position 3132 of SEQ ID NO: 1241719
gugaauuaacagggcaugu

SEQ ID NO: 1294421 - RNA, 19 nt, Artificial Sequence
  Description of Artificial Sequence: Synthetic oligonucleotide
  Antisense strand to SEQ ID NO: 1294420
acaugcccuguuaauucac

SEQ ID NO: 1294422 - RNA, 19 nt, Artificial Sequence
  Description of Artificial Sequence: Synthetic oligonucleotide
  Sense strand starting at position 3322 of SEQ ID NO: 1241719
gguccagacucauuagaga

SEQ ID NO: 1294423 - RNA, 19 nt, Artificial Sequence
  Description of Artificial Sequence: Synthetic oligonucleotide
  Antisense strand to SEQ ID NO: 1294422
ucucuaaugagucuggacc

SEQ ID NO: 1294424 - RNA, 19 nt, Artificial Sequence
  Description of Artificial Sequence: Synthetic oligonucleotide
  Sense strand starting at position 3673 of SEQ ID NO: 1241719
uuaagaggcucaguaacuu

SEQ ID NO: 1294425 - RNA, 19 nt, Artificial Sequence
  Description of Artificial Sequence: Synthetic oligonucleotide
  Antisense strand to SEQ ID NO: 1294424
aaguuacugagccucuuaa

SEQ ID NO: 1294426 - RNA, 19 nt, Artificial Sequence
  Description of Artificial Sequence: Synthetic oligonucleotide
  Sense strand starting at position 3735 of SEQ ID NO: 1241719
ugcagaucuguccaucacu

SEQ ID NO: 1294427 - RNA, 19 nt, Artificial Sequence
  Description of Artificial Sequence: Synthetic oligonucleotide
  Antisense strand to SEQ ID NO: 1294426
agugauggacagaucugca

SEQ ID NO: 1294428 - RNA, 19 nt, Artificial Sequence
  Description of Artificial Sequence: Synthetic oligonucleotide
  Sense strand starting at position 6 of SEQ ID NO: 1241720
guugucaaaccagguugau

SEQ ID NO: 1294429 - RNA, 19 nt, Artificial Sequence
  Description of Artificial Sequence: Synthetic oligonucleotide
  Antisense strand to SEQ ID NO: 1294428
aucaaccugguuugacaac

SEQ ID NO: 1294430 - RNA, 19 nt, Artificial Sequence
  Description of Artificial Sequence: Synthetic oligonucleotide
  Sense strand starting at position 9 of SEQ ID NO: 1241720
gucaaaccagguugauaaa

SEQ ID NO: 1294431 - RNA, 19 nt, Artificial Sequence
  Description of Artificial Sequence: Synthetic oligonucleotide
  Antisense strand to SEQ ID NO: 1294430
uuuaucaaccugguuugac

SEQ ID NO: 1294432 - RNA, 19 nt, Artificial Sequence
  Description of Artificial Sequence: Synthetic oligonucleotide
  Sense strand starting at position 93 of SEQ ID NO: 1241720
acagaauaucagggcuuga

SEQ ID NO: 1294433 - RNA, 19 nt, Artificial Sequence
  Description of Artificial Sequence: Synthetic oligonucleotide
  Antisense strand to SEQ ID NO: 1294432
ucaagcccugauauucugu

SEQ ID NO: 1294434 - RNA, 19 nt, Artificial Sequence
  Description of Artificial Sequence: Synthetic oligonucleotide
  Sense strand starting at position 198 of SEQ ID NO: 1241720
gcggaucugugaccagaac

SEQ ID NO: 1294435 - RNA, 19 nt, Artificial Sequence
  Description of Artificial Sequence: Synthetic oligonucleotide
  Antisense strand to SEQ ID NO: 1294434
guucuggucacagauccgc

SEQ ID NO: 1294436 - RNA, 19 nt, Artificial Sequence
  Description of Artificial Sequence: Synthetic oligonucleotide
  Sense strand starting at position 292 of SEQ ID NO: 1241720
auuaccgaguccuuacuau

SEQ ID NO: 1294437 - RNA, 19 nt, Artificial Sequence
  Description of Artificial Sequence: Synthetic oligonucleotide
  Antisense strand to SEQ ID NO: 1294436
auaguaaggacucgguaau

SEQ ID NO: 1294438 - RNA, 19 nt, Artificial Sequence
  Description of Artificial Sequence: Synthetic oligonucleotide
  Sense strand starting at position 383 of SEQ ID NO: 1241720
gggagcucuuucccuagau

SEQ ID NO: 1294439 - RNA, 19 nt, Artificial Sequence
  Description of Artificial Sequence: Synthetic oligonucleotide
  Antisense strand to SEQ ID NO: 1294438
aucuagggaaagagcuccc

SEQ ID NO: 1294440 - RNA, 19 nt, Artificial Sequence
  Description of Artificial Sequence: Synthetic oligonucleotide
  Sense strand starting at position 384 of SEQ ID NO: 1241720
ggagcucuuucccuagauc

SEQ ID NO: 1294441 - RNA, 19 nt, Artificial Sequence
  Description of Artificial Sequence: Synthetic oligonucleotide
  Antisense strand to SEQ ID NO: 1294440
gaucuagggaaagagcucc

SEQ ID NO: 1294442 - RNA, 19 nt, Artificial Sequence
  Description of Artificial Sequence: Synthetic oligonucleotide
  Sense strand starting at position 387 of SEQ ID NO: 1241720
gcucuuucccuagaucugu

SEQ ID NO: 1294443 - RNA, 19 nt, Artificial Sequence
  Description of Artificial Sequence: Synthetic oligonucleotide
  Antisense strand to SEQ ID NO: 1294442
acagaucuagggaaagagc

SEQ ID NO: 1294444 - RNA, 19 nt, Artificial Sequence
  Description of Artificial Sequence: Synthetic oligonucleotide
  Sense strand starting at position 438 of SEQ ID NO: 1241720
gucagacucuuaccuuaua

SEQ ID NO: 1294445 - RNA, 19 nt, Artificial Sequence
  Description of Artificial Sequence: Synthetic oligonucleotide
  Antisense strand to SEQ ID NO: 1294444
uauaagguaagagucugac

SEQ ID NO: 1294446 - RNA, 19 nt, Artificial Sequence
  Description of Artificial Sequence: Synthetic oligonucleotide
  Sense strand starting at position 511 of SEQ ID NO: 1241720
cuccuuaagguuuauaagu

SEQ ID NO: 1294447 - RNA, 19 nt, Artificial Sequence
  Description of Artificial Sequence: Synthetic oligonucleotide
  Antisense strand to SEQ ID NO: 1294446
acuuauaaaccuuaaggag

SEQ ID NO: 1294448 - RNA, 19 nt, Artificial Sequence
  Description of Artificial Sequence: Synthetic oligonucleotide
  Sense strand starting at position 1015 of SEQ ID NO: 1241720
agagaacucugcucugaag

SEQ ID NO: 1294449 - RNA, 19 nt, Artificial Sequence
  Description of Artificial Sequence: Synthetic oligonucleotide
  Antisense strand to SEQ ID NO: 1294448
cuucagagcagaguucucu

SEQ ID NO: 1294450 - RNA, 19 nt, Artificial Sequence
  Description of Artificial Sequence: Synthetic oligonucleotide
  Sense strand starting at position 1074 of SEQ ID NO: 1241720
gcacucuugccagaaagag

SEQ ID NO: 1294451 - RNA, 19 nt, Artificial Sequence
  Description of Artificial Sequence: Synthetic oligonucleotide
  Antisense strand to SEQ ID NO: 1294450
cucuuucuggcaagagugc

SEQ ID NO: 1294452 - RNA, 19 nt, Artificial Sequence
  Description of Artificial Sequence: Synthetic oligonucleotide
  Sense strand starting at position 1121 of SEQ ID NO: 1241720
gggucaccagcacauaaua

SEQ ID NO: 1294453 - RNA, 19 nt, Artificial Sequence
  Description of Artificial Sequence: Synthetic oligonucleotide
  Antisense strand to SEQ ID NO: 1294452
uauuaugugcuggugaccc

SEQ ID NO: 1294454 - RNA, 19 nt, Artificial Sequence
  Description of Artificial Sequence: Synthetic oligonucleotide
  Sense strand starting at position 1210 of SEQ ID NO: 1241720
uucugugagcgucaagagu

SEQ ID NO: 1294455 - RNA, 19 nt, Artificial Sequence
  Description of Artificial Sequence: Synthetic oligonucleotide
  Antisense strand to SEQ ID NO: 1294454
acucuugacgcucacagaa

SEQ ID NO: 1294456 - RNA, 19 nt, Artificial Sequence
  Description of Artificial Sequence: Synthetic oligonucleotide
  Sense strand starting at position 1216 of SEQ ID NO: 1241720
gagcgucaagagugucaua

SEQ ID NO: 1294457 - RNA, 19 nt, Artificial Sequence
  Description of Artificial Sequence: Synthetic oligonucleotide
  Antisense strand to SEQ ID NO: 1294456
uaugacacucuugacgcuc

SEQ ID NO: 1294458 - RNA, 19 nt, Artificial Sequence
  Description of Artificial Sequence: Synthetic oligonucleotide
  Sense strand starting at position 1435 of SEQ ID NO: 1241720
agugaagccugcucagauu

SEQ ID NO: 1294459 - RNA, 19 nt, Artificial Sequence
  Description of Artificial Sequence: Synthetic oligonucleotide
  Antisense strand to SEQ ID NO: 1294458
aaucugagcaggcuucacu

SEQ ID NO: 1294460 - RNA, 19 nt, Artificial Sequence
  Description of Artificial Sequence: Synthetic oligonucleotide
  Sense strand starting at position 2523 of SEQ ID NO: 1241720
ccgauaauguguuuaauca

SEQ ID NO: 1294461 - RNA, 19 nt, Artificial Sequence
  Description of Artificial Sequence: Synthetic oligonucleotide
  Antisense strand to SEQ ID NO: 1294460
ugauuaaacacauuaucgg

SEQ ID NO: 1294462 - RNA, 19 nt, Artificial Sequence
  Description of Artificial Sequence: Synthetic oligonucleotide
  Sense strand starting at position 2524 of SEQ ID NO: 1241720
cgauaauguguuuaaucaa

SEQ ID NO: 1294463 - RNA, 19 nt, Artificial Sequence
  Description of Artificial Sequence: Synthetic oligonucleotide
  Antisense strand to SEQ ID NO: 1294462
uugauuaaacacauuaucg

SEQ ID NO: 1294464 - RNA, 19 nt, Artificial Sequence
  Description of Artificial Sequence: Synthetic oligonucleotide
  Sense strand starting at position 2531 of SEQ ID NO: 1241720
guguuuaaucaacauaagc

SEQ ID NO: 1294465 - RNA, 19 nt, Artificial Sequence
  Description of Artificial Sequence: Synthetic oligonucleotide
  Antisense strand to SEQ ID NO: 1294464
gcuuauguugauuaaacac

SEQ ID NO: 1294466 - RNA, 19 nt, Artificial Sequence
  Description of Artificial Sequence: Synthetic oligonucleotide
  Sense strand starting at position 2779 of SEQ ID NO: 1241720
uauaaccucgagcaaguua

SEQ ID NO: 1294467 - RNA, 19 nt, Artificial Sequence
  Description of Artificial Sequence: Synthetic oligonucleotide
  Antisense strand to SEQ ID NO: 1294466
uaacuugcucgagguuaua

SEQ ID NO: 1294468 - RNA, 19 nt, Artificial Sequence
  Description of Artificial Sequence: Synthetic oligonucleotide
  Sense strand starting at position 2816 of SEQ ID NO: 1241720
cagguuccucauggacaaa

SEQ ID NO: 1294469 - RNA, 19 nt, Artificial Sequence
  Description of Artificial Sequence: Synthetic oligonucleotide
  Antisense strand to SEQ ID NO: 1294468
uuuguccaugaggaaccug

SEQ ID NO: 1294470 - RNA, 19 nt, Artificial Sequence
  Description of Artificial Sequence: Synthetic oligonucleotide
  Sense strand starting at position 2859 of SEQ ID NO: 1241720
ugagaugacauacgugaca

SEQ ID NO: 1294471 - RNA, 19 nt, Artificial Sequence
  Description of Artificial Sequence: Synthetic oligonucleotide
  Antisense strand to SEQ ID NO: 1294470
ugucacguaugucaucuca

SEQ ID NO: 1294472 - RNA, 19 nt, Artificial Sequence
  Description of Artificial Sequence: Synthetic oligonucleotide
  Sense strand starting at position 2861 of SEQ ID NO: 1241720
agaugacauacgugacaca

SEQ ID NO: 1294473 - RNA, 19 nt, Artificial Sequence
  Description of Artificial Sequence: Synthetic oligonucleotide
  Antisense strand to SEQ ID NO: 1294472
ugugucacguaugucaucu

SEQ ID NO: 1294474 - RNA, 19 nt, Artificial Sequence
  Description of Artificial Sequence: Synthetic oligonucleotide
  Sense strand starting at position 2928 of SEQ ID NO: 1241720
cagcaagagcccugagauc

SEQ ID NO: 1294475 - RNA, 19 nt, Artificial Sequence
  Description of Artificial Sequence: Synthetic oligonucleotide
  Antisense strand to SEQ ID NO: 1294474
gaucucagggcucuugcug

SEQ ID NO: 1294476 - RNA, 19 nt, Artificial Sequence
  Description of Artificial Sequence: Synthetic oligonucleotide
  Sense strand starting at position 3055 of SEQ ID NO: 1241720
gaguguuaccaguggauga

SEQ ID NO: 1294477 - RNA, 19 nt, Artificial Sequence
  Description of Artificial Sequence: Synthetic oligonucleotide
  Antisense strand to SEQ ID NO: 1294476
ucauccacugguaacacuc

SEQ ID NO: 1294478 - RNA, 19 nt, Artificial Sequence
  Description of Artificial Sequence: Synthetic oligonucleotide
  Sense strand starting at position 3056 of SEQ ID NO: 1241720
aguguuaccaguggaugaa

SEQ ID NO: 1294479 - RNA, 19 nt, Artificial Sequence
  Description of Artificial Sequence: Synthetic oligonucleotide
  Antisense strand to SEQ ID NO: 1294478
uucauccacugguaacacu

SEQ ID NO: 1294480 - RNA, 19 nt, Artificial Sequence
  Description of Artificial Sequence: Synthetic oligonucleotide
  Sense strand starting at position 3068 of SEQ ID NO: 1241720
ggaugaaccuauucuucga

SEQ ID NO: 1294481 - RNA, 19 nt, Artificial Sequence
  Description of Artificial Sequence: Synthetic oligonucleotide
  Antisense strand to SEQ ID NO: 1294480
ucgaagaauagguucaucc

SEQ ID NO: 1294482 - RNA, 19 nt, Artificial Sequence
  Description of Artificial Sequence: Synthetic oligonucleotide
  Sense strand starting at position 3101 of SEQ ID NO: 1241720
ucuugagucucaccaaagu

SEQ ID NO: 1294483 - RNA, 19 nt, Artificial Sequence
  Description of Artificial Sequence: Synthetic oligonucleotide
  Antisense strand to SEQ ID NO: 1294482
acuuuggugagacucaaga

SEQ ID NO: 1294484 - RNA, 19 nt, Artificial Sequence
  Description of Artificial Sequence: Synthetic oligonucleotide
  Sense strand starting at position 3134 of SEQ ID NO: 1241720
aggagagaguauucucauu

SEQ ID NO: 1294485 - RNA, 19 nt, Artificial Sequence
  Description of Artificial Sequence: Synthetic oligonucleotide
  Antisense strand to SEQ ID NO: 1294484
aaugagaauacucucuccu

SEQ ID NO: 1294486 - RNA, 19 nt, Artificial Sequence
  Description of Artificial Sequence: Synthetic oligonucleotide
  Sense strand starting at position 3163 of SEQ ID NO: 1241720
aaguguggguuugcaaagu

SEQ ID NO: 1294487 - RNA, 19 nt, Artificial Sequence
  Description of Artificial Sequence: Synthetic oligonucleotide
  Antisense strand to SEQ ID NO: 1294486
acuuugcaaacccacacuu

SEQ ID NO: 1294488 - RNA, 19 nt, Artificial Sequence
  Description of Artificial Sequence: Synthetic oligonucleotide
  Sense strand starting at position 3239 of SEQ ID NO: 1241720
gugggauuccacuagcauc

SEQ ID NO: 1294489 - RNA, 19 nt, Artificial Sequence
  Description of Artificial Sequence: Synthetic oligonucleotide
  Antisense strand to SEQ ID NO: 1294488
gaugcuaguggaaucccac

SEQ ID NO: 1294490 - RNA, 19 nt, Artificial Sequence
  Description of Artificial Sequence: Synthetic oligonucleotide
  Sense strand starting at position 3268 of SEQ ID NO: 1241720
cuagcauccagcugaggau

SEQ ID NO: 1294491 - RNA, 19 nt, Artificial Sequence
  Description of Artificial Sequence: Synthetic oligonucleotide
  Antisense strand to SEQ ID NO: 1294490
auccucagcuggaugcuag

SEQ ID NO: 1294492 - RNA, 19 nt, Artificial Sequence
  Description of Artificial Sequence: Synthetic oligonucleotide
  Sense strand starting at position 3476 of SEQ ID NO: 1241720
ugguauugguguuuaacuu

SEQ ID NO: 1294493 - RNA, 19 nt, Artificial Sequence
  Description of Artificial Sequence: Synthetic oligonucleotide
  Antisense strand to SEQ ID NO: 1294492
aaguuaaacaccaauacca

SEQ ID NO: 1294494 - RNA, 19 nt, Artificial Sequence
  Description of Artificial Sequence: Synthetic oligonucleotide
  Sense strand starting at position 3488 of SEQ ID NO: 1241720
uuaacuuguugggugcuaa

SEQ ID NO: 1294495 - RNA, 19 nt, Artificial Sequence
  Description of Artificial Sequence: Synthetic oligonucleotide
  Antisense strand to SEQ ID NO: 1294494
uuagcacccaacaaguuaa

SEQ ID NO: 1294496 - RNA, 19 nt, Artificial Sequence
  Description of Artificial Sequence: Synthetic oligonucleotide
  Sense strand starting at position 3489 of SEQ ID NO: 1241720
uaacuuguugggugcuaaa

SEQ ID NO: 1294497 - RNA, 19 nt, Artificial Sequence
  Description of Artificial Sequence: Synthetic oligonucleotide
  Antisense strand to SEQ ID NO: 1294496
uuuagcacccaacaaguua

SEQ ID NO: 1294498 - RNA, 19 nt, Artificial Sequence
  Description of Artificial Sequence: Synthetic oligonucleotide
  Sense strand starting at position 3534 of SEQ ID NO: 1241720
cccauuaguggauaaugca

SEQ ID NO: 1294499 - RNA, 19 nt, Artificial Sequence
  Description of Artificial Sequence: Synthetic oligonucleotide
  Antisense strand to SEQ ID NO: 1294498
ugcauuauccacuaauggg

SEQ ID NO: 1294500 - RNA, 19 nt, Artificial Sequence
  Description of Artificial Sequence: Synthetic oligonucleotide
  Sense strand starting at position 3542 of SEQ ID NO: 1241720
uggauaaugcagugagaag

SEQ ID NO: 1294501 - RNA, 19 nt, Artificial Sequence
  Description of Artificial Sequence: Synthetic oligonucleotide
  Antisense strand to SEQ ID NO: 1294500
cuucucacugcauuaucca

SEQ ID NO: 1294502 - RNA, 19 nt, Artificial Sequence
  Description of Artificial Sequence: Synthetic oligonucleotide
  Sense strand starting at position 3698 of SEQ ID NO: 1241720
acaagacauugucucugau

SEQ ID NO: 1294503 - RNA, 19 nt, Artificial Sequence
  Description of Artificial Sequence: Synthetic oligonucleotide
  Antisense strand to SEQ ID NO: 1294502
aucagagacaaugucuugu

SEQ ID NO: 1294504 - RNA, 19 nt, Artificial Sequence
  Description of Artificial Sequence: Synthetic oligonucleotide
  Sense strand starting at position 3700 of SEQ ID NO: 1241720
aagacauugucucugaugu

SEQ ID NO: 1294505 - RNA, 19 nt, Artificial Sequence
  Description of Artificial Sequence: Synthetic oligonucleotide
  Antisense strand to SEQ ID NO: 1294504
acaucagagacaaugucuu

SEQ ID NO: 1294506 - RNA, 19 nt, Artificial Sequence
  Description of Artificial Sequence: Synthetic oligonucleotide
  Sense strand starting at position 3701 of SEQ ID NO: 1241720
agacauugucucugauguc

SEQ ID NO: 1294507 - RNA, 19 nt, Artificial Sequence
  Description of Artificial Sequence: Synthetic oligonucleotide
  Antisense strand to SEQ ID NO: 1294506
gacaucagagacaaugucu

SEQ ID NO: 1294508 - RNA, 19 nt, Artificial Sequence
  Description of Artificial Sequence: Synthetic oligonucleotide
  Sense strand starting at position 132 of SEQ ID NO: 1241721
agaauaaccucauugugac

SEQ ID NO: 1294509 - RNA, 19 nt, Artificial Sequence
  Description of Artificial Sequence: Synthetic oligonucleotide
  Antisense strand to SEQ ID NO: 1294508
gucacaaugagguuauucu

SEQ ID NO: 1294510 - RNA, 19 nt, Artificial Sequence
  Description of Artificial Sequence: Synthetic oligonucleotide
  Sense strand starting at position 138 of SEQ ID NO: 1241721
accucauugugacucaguu

SEQ ID NO: 1294511 - RNA, 19 nt, Artificial Sequence
  Description of Artificial Sequence: Synthetic oligonucleotide
  Antisense strand to SEQ ID NO: 1294510
aacugagucacaaugaggu

SEQ ID NO: 1294512 - RNA, 19 nt, Artificial Sequence
  Description of Artificial Sequence: Synthetic oligonucleotide
  Sense strand starting at position 146 of SEQ ID NO: 1241721
gugacucaguucucuaaac

SEQ ID NO: 1294513 - RNA, 19 nt, Artificial Sequence
  Description of Artificial Sequence: Synthetic oligonucleotide
  Antisense strand to SEQ ID NO: 1294512
guuuagagaacugagucac

SEQ ID NO: 1294514 - RNA, 19 nt, Artificial Sequence
  Description of Artificial Sequence: Synthetic oligonucleotide
  Sense strand starting at position 309 of SEQ ID NO: 1241721
ucagauaagcuuuguuaau

SEQ ID NO: 1294515 - RNA, 19 nt, Artificial Sequence
  Description of Artificial Sequence: Synthetic oligonucleotide
  Antisense strand to SEQ ID NO: 1294514
auuaacaaagcuuaucuga

SEQ ID NO: 1294516 - RNA, 19 nt, Artificial Sequence
  Description of Artificial Sequence: Synthetic oligonucleotide
  Sense strand starting at position 311 of SEQ ID NO: 1241721
agauaagcuuuguuaauuc

SEQ ID NO: 1294517 - RNA, 19 nt, Artificial Sequence
  Description of Artificial Sequence: Synthetic oligonucleotide
  Antisense strand to SEQ ID NO: 1294516
gaauuaacaaagcuuaucu

SEQ ID NO: 1294518 - RNA, 19 nt, Artificial Sequence
  Description of Artificial Sequence: Synthetic oligonucleotide
  Sense strand starting at position 528 of SEQ ID NO: 1241721
ggagucaugcauuaaagca

SEQ ID NO: 1294519 - RNA, 19 nt, Artificial Sequence
  Description of Artificial Sequence: Synthetic oligonucleotide
  Antisense strand to SEQ ID NO: 1294518
ugcuuuaaugcaugacucc

SEQ ID NO: 1294520 - RNA, 19 nt, Artificial Sequence
  Description of Artificial Sequence: Synthetic oligonucleotide
  Sense strand starting at position 591 of SEQ ID NO: 1241721
cucugaacauguuuacgau

SEQ ID NO: 1294521 - RNA, 19 nt, Artificial Sequence
  Description of Artificial Sequence: Synthetic oligonucleotide
  Antisense strand to SEQ ID NO: 1294520
aucguaaacauguucagag

SEQ ID NO: 1294522 - RNA, 19 nt, Artificial Sequence
  Description of Artificial Sequence: Synthetic oligonucleotide
  Sense strand starting at position 597 of SEQ ID NO: 1241721
acauguuuacgaugucuca

SEQ ID NO: 1294523 - RNA, 19 nt, Artificial Sequence
  Description of Artificial Sequence: Synthetic oligonucleotide
  Antisense strand to SEQ ID NO: 1294522
ugagacaucguaaacaugu

SEQ ID NO: 1294524 - RNA, 19 nt, Artificial Sequence
  Description of Artificial Sequence: Synthetic oligonucleotide
  Sense strand starting at position 714 of SEQ ID NO: 1241721
caaauaguaucugcaacga

SEQ ID NO: 1294525 - RNA, 19 nt, Artificial Sequence
  Description of Artificial Sequence: Synthetic oligonucleotide
  Antisense strand to SEQ ID NO: 1294524
ucguugcagauacuauuug

SEQ ID NO: 1294526 - RNA, 19 nt, Artificial Sequence
  Description of Artificial Sequence: Synthetic oligonucleotide
  Sense strand starting at position 991 of SEQ ID NO: 1241721
caaauaaggcgcuaauguu

SEQ ID NO: 1294527 - RNA, 19 nt, Artificial Sequence
  Description of Artificial Sequence: Synthetic oligonucleotide
  Antisense strand to SEQ ID NO: 1294526
aacauuagcgccuuauuug

SEQ ID NO: 1294528 - RNA, 19 nt, Artificial Sequence
  Description of Artificial Sequence: Synthetic oligonucleotide
  Sense strand starting at position 2293 of SEQ ID NO: 1241721
cguagauuccugggucuug

SEQ ID NO: 1294529 - RNA, 19 nt, Artificial Sequence
  Description of Artificial Sequence: Synthetic oligonucleotide
  Antisense strand to SEQ ID NO: 1294528
caagacccaggaaucuacg

SEQ ID NO: 1294530 - RNA, 19 nt, Artificial Sequence
  Description of Artificial Sequence: Synthetic oligonucleotide
  Sense strand starting at position 2304 of SEQ ID NO: 1241721
gggucuuggaaguaggagu

SEQ ID NO: 1294531 - RNA, 19 nt, Artificial Sequence
  Description of Artificial Sequence: Synthetic oligonucleotide
  Antisense strand to SEQ ID NO: 1294530
acuccuacuuccaagaccc

SEQ ID NO: 1294532 - RNA, 19 nt, Artificial Sequence
  Description of Artificial Sequence: Synthetic oligonucleotide
  Sense strand starting at position 2325 of SEQ ID NO: 1241721
gagagcagaucugcgauua

SEQ ID NO: 1294533 - RNA, 19 nt, Artificial Sequence
  Description of Artificial Sequence: Synthetic oligonucleotide
  Antisense strand to SEQ ID NO: 1294532
uaaucgcagaucugcucuc

SEQ ID NO: 1294534 - RNA, 19 nt, Artificial Sequence
  Description of Artificial Sequence: Synthetic oligonucleotide
  Sense strand starting at position 2326 of SEQ ID NO: 1241721
agagcagaucugcgauuag

SEQ ID NO: 1294535 - RNA, 19 nt, Artificial Sequence
  Description of Artificial Sequence: Synthetic oligonucleotide
  Antisense strand to SEQ ID NO: 1294534
cuaaucgcagaucugcucu

SEQ ID NO: 1294536 - RNA, 19 nt, Artificial Sequence
  Description of Artificial Sequence: Synthetic oligonucleotide
  Sense strand starting at position 2485 of SEQ ID NO: 1241721
uuuguuaaugcagauaacu

SEQ ID NO: 1294537 - RNA, 19 nt, Artificial Sequence
  Description of Artificial Sequence: Synthetic oligonucleotide
  Antisense strand to SEQ ID NO: 1294536
aguuaucugcauuaacaaa

SEQ ID NO: 1294538 - RNA, 19 nt, Artificial Sequence
  Description of Artificial Sequence: Synthetic oligonucleotide
  Sense strand starting at position 2549 of SEQ ID NO: 1241721
agucguccgaccugacaua

SEQ ID NO: 1294539 - RNA, 19 nt, Artificial Sequence
  Description of Artificial Sequence: Synthetic oligonucleotide
  Antisense strand to SEQ ID NO: 1294538
uaugucaggucggacgacu

SEQ ID NO: 1294540 - RNA, 19 nt, Artificial Sequence
  Description of Artificial Sequence: Synthetic oligonucleotide
  Sense strand starting at position 2565 of SEQ ID NO: 1241721
auacaucauccaggucuga

SEQ ID NO: 1294541 - RNA, 19 nt, Artificial Sequence
  Description of Artificial Sequence: Synthetic oligonucleotide
  Antisense strand to SEQ ID NO: 1294540
ucagaccuggaugauguau

SEQ ID NO: 1294542 - RNA, 19 nt, Artificial Sequence
  Description of Artificial Sequence: Synthetic oligonucleotide
  Sense strand starting at position 2705 of SEQ ID NO: 1241721
cugugauuaccguauuacu

SEQ ID NO: 1294543 - RNA, 19 nt, Artificial Sequence
  Description of Artificial Sequence: Synthetic oligonucleotide
  Antisense strand to SEQ ID NO: 1294542
aguaauacgguaaucacag

SEQ ID NO: 1294544 - RNA, 19 nt, Artificial Sequence
  Description of Artificial Sequence: Synthetic oligonucleotide
  Sense strand starting at position 2749 of SEQ ID NO: 1241721
ggcgcaccucacuauuauu

SEQ ID NO: 1294545 - RNA, 19 nt, Artificial Sequence
  Description of Artificial Sequence: Synthetic oligonucleotide
  Antisense strand to SEQ ID NO: 1294544
aauaauagugaggugcgcc

SEQ ID NO: 1294546 - RNA, 19 nt, Artificial Sequence
  Description of Artificial Sequence: Synthetic oligonucleotide
  Sense strand starting at position 3193 of SEQ ID NO: 1241721
uauauaugucuguggcuac

SEQ ID NO: 1294547 - RNA, 19 nt, Artificial Sequence
  Description of Artificial Sequence: Synthetic oligonucleotide
  Antisense strand to SEQ ID NO: 1294546
guagccacagacauauaua

SEQ ID NO: 1294548 - RNA, 19 nt, Artificial Sequence
  Description of Artificial Sequence: Synthetic oligonucleotide
  Sense strand starting at position 3196 of SEQ ID NO: 1241721
auaugucuguggcuacaga

SEQ ID NO: 1294549 - RNA, 19 nt, Artificial Sequence
  Description of Artificial Sequence: Synthetic oligonucleotide
  Antisense strand to SEQ ID NO: 1294548
ucuguagccacagacauau

SEQ ID NO: 1294550 - RNA, 19 nt, Artificial Sequence
  Description of Artificial Sequence: Synthetic oligonucleotide
  Sense strand starting at position 3197 of SEQ ID NO: 1241721
uaugucuguggcuacagaa

SEQ ID NO: 1294551 - RNA, 19 nt, Artificial Sequence
  Description of Artificial Sequence: Synthetic oligonucleotide
  Antisense strand to SEQ ID NO: 1294550
uucuguagccacagacaua

SEQ ID NO: 1294552 - RNA, 19 nt, Artificial Sequence
  Description of Artificial Sequence: Synthetic oligonucleotide
  Sense strand starting at position 3210 of SEQ ID NO: 1241721
acagaaucuugccugaauu

SEQ ID NO: 1294553 - RNA, 19 nt, Artificial Sequence
  Description of Artificial Sequence: Synthetic oligonucleotide
  Antisense strand to SEQ ID NO: 1294552
aauucaggcaagauucugu

SEQ ID NO: 1294554 - RNA, 19 nt, Artificial Sequence
  Description of Artificial Sequence: Synthetic oligonucleotide
  Sense strand starting at position 3212 of SEQ ID NO: 1241721
agaaucuugccugaauuau

SEQ ID NO: 1294555 - RNA, 19 nt, Artificial Sequence
  Description of Artificial Sequence: Synthetic oligonucleotide
  Antisense strand to SEQ ID NO: 1294554
auaauucaggcaagauucu

SEQ ID NO: 1294556 - RNA, 19 nt, Artificial Sequence
  Description of Artificial Sequence: Synthetic oligonucleotide
  Sense strand starting at position 3263 of SEQ ID NO: 1241721
agauuagacguuugauaau

SEQ ID NO: 1294557 - RNA, 19 nt, Artificial Sequence
  Description of Artificial Sequence: Synthetic oligonucleotide
  Antisense strand to SEQ ID NO: 1294556
auuaucaaacgucuaaucu

SEQ ID NO: 1294558 - RNA, 19 nt, Artificial Sequence
  Description of Artificial Sequence: Synthetic oligonucleotide
  Sense strand starting at position 3356 of SEQ ID NO: 1241721
aacguuuaccucugugacu

SEQ ID NO: 1294559 - RNA, 19 nt, Artificial Sequence
  Description of Artificial Sequence: Synthetic oligonucleotide
  Antisense strand to SEQ ID NO: 1294558
agucacagagguaaacguu

SEQ ID NO: 1294560 - RNA, 19 nt, Artificial Sequence
  Description of Artificial Sequence: Synthetic oligonucleotide
  Sense strand starting at position 3357 of SEQ ID NO: 1241721
acguuuaccucugugacua

SEQ ID NO: 1294561 - RNA, 19 nt, Artificial Sequence
  Description of Artificial Sequence: Synthetic oligonucleotide
  Antisense strand to SEQ ID NO: 1294560
uagucacagagguaaacgu

SEQ ID NO: 1294562 - RNA, 19 nt, Artificial Sequence
  Description of Artificial Sequence: Synthetic oligonucleotide
  Sense strand starting at position 3358 of SEQ ID NO: 1241721
cguuuaccucugugacuac

SEQ ID NO: 1294563 - RNA, 19 nt, Artificial Sequence
  Description of Artificial Sequence: Synthetic oligonucleotide
  Antisense strand to SEQ ID NO: 1294562
guagucacagagguaaacg

SEQ ID NO: 1294564 - RNA, 19 nt, Artificial Sequence
  Description of Artificial Sequence: Synthetic oligonucleotide
  Sense strand starting at position 3367 of SEQ ID NO: 1241721
cugugacuaccaggaugau

SEQ ID NO: 1294565 - RNA, 19 nt, Artificial Sequence
  Description of Artificial Sequence: Synthetic oligonucleotide
  Antisense strand to SEQ ID NO: 1294564
aucauccugguagucacag

SEQ ID NO: 1294566 - RNA, 19 nt, Artificial Sequence
  Description of Artificial Sequence: Synthetic oligonucleotide
  Sense strand starting at position 3444 of SEQ ID NO: 1241721
aaugcagaguuccuuguau

SEQ ID NO: 1294567 - RNA, 19 nt, Artificial Sequence
  Description of Artificial Sequence: Synthetic oligonucleotide
  Antisense strand to SEQ ID NO: 1294566
auacaaggaacucugcauu

SEQ ID NO: 1294568 - RNA, 19 nt, Artificial Sequence
  Description of Artificial Sequence: Synthetic oligonucleotide
  Sense strand starting at position 3446 of SEQ ID NO: 1241721
ugcagaguuccuuguauuc

SEQ ID NO: 1294569 - RNA, 19 nt, Artificial Sequence
  Description of Artificial Sequence: Synthetic oligonucleotide
  Antisense strand to SEQ ID NO: 1294568
gaauacaaggaacucugca

SEQ ID NO: 1294570 - RNA, 19 nt, Artificial Sequence
  Description of Artificial Sequence: Synthetic oligonucleotide
  Sense strand starting at position 3451 of SEQ ID NO: 1241721
aguuccuuguauuccuaga

SEQ ID NO: 1294571 - RNA, 19 nt, Artificial Sequence
  Description of Artificial Sequence: Synthetic oligonucleotide
  Antisense strand to SEQ ID NO: 1294570
ucuaggaauacaaggaacu

SEQ ID NO: 1294572 - RNA, 19 nt, Artificial Sequence
  Description of Artificial Sequence: Synthetic oligonucleotide
  Sense strand starting at position 3456 of SEQ ID NO: 1241721
cuuguauuccuagauuauc

SEQ ID NO: 1294573 - RNA, 19 nt, Artificial Sequence
  Description of Artificial Sequence: Synthetic oligonucleotide
  Antisense strand to SEQ ID NO: 1294572
gauaaucuaggaauacaag

SEQ ID NO: 1294574 - RNA, 19 nt, Artificial Sequence
  Description of Artificial Sequence: Synthetic oligonucleotide
  Sense strand starting at position 3459 of SEQ ID NO: 1241721
guauuccuagauuauccuu

SEQ ID NO: 1294575 - RNA, 19 nt, Artificial Sequence
  Description of Artificial Sequence: Synthetic oligonucleotide
  Antisense strand to SEQ ID NO: 1294574
aaggauaaucuaggaauac

SEQ ID NO: 1294576 - RNA, 19 nt, Artificial Sequence
  Description of Artificial Sequence: Synthetic oligonucleotide
  Sense strand starting at position 3482 of SEQ ID NO: 1241721
ugguaucacuucucagacu

SEQ ID NO: 1294577 - RNA, 19 nt, Artificial Sequence
  Description of Artificial Sequence: Synthetic oligonucleotide
  Antisense strand to SEQ ID NO: 1294576
agucugagaagugauacca

SEQ ID NO: 1294578 - RNA, 19 nt, Artificial Sequence
  Description of Artificial Sequence: Synthetic oligonucleotide
  Sense strand starting at position 3499 of SEQ ID NO: 1241721
cuaccuagcuuugcaugau

SEQ ID NO: 1294579 - RNA, 19 nt, Artificial Sequence
  Description of Artificial Sequence: Synthetic oligonucleotide
  Antisense strand to SEQ ID NO: 1294578
aucaugcaaagcuagguag

SEQ ID NO: 1294580 - RNA, 19 nt, Artificial Sequence
  Description of Artificial Sequence: Synthetic oligonucleotide
  Sense strand starting at position 3502 of SEQ ID NO: 1241721
ccuagcuuugcaugauuua

SEQ ID NO: 1294581 - RNA, 19 nt, Artificial Sequence
  Description of Artificial Sequence: Synthetic oligonucleotide
  Antisense strand to SEQ ID NO: 1294580
uaaaucaugcaaagcuagg

SEQ ID NO: 1294582 - RNA, 19 nt, Artificial Sequence
  Description of Artificial Sequence: Synthetic oligonucleotide
  Sense strand starting at position 3521 of SEQ ID NO: 1241721
uuaacaauggcuugaguca

SEQ ID NO: 1294583 - RNA, 19 nt, Artificial Sequence
  Description of Artificial Sequence: Synthetic oligonucleotide
  Antisense strand to SEQ ID NO: 1294582
ugacucaagccauuguuaa

SEQ ID NO: 1294584 - RNA, 19 nt, Artificial Sequence
  Description of Artificial Sequence: Synthetic oligonucleotide
  Sense strand starting at position 3914 of SEQ ID NO: 1241721
gcuugauggguuggagagu

SEQ ID NO: 1294585 - RNA, 19 nt, Artificial Sequence
  Description of Artificial Sequence: Synthetic oligonucleotide
  Antisense strand to SEQ ID NO: 1294584
acucuccaacccaucaagc

SEQ ID NO: 1294586 - RNA, 19 nt, Artificial Sequence
  Description of Artificial Sequence: Synthetic oligonucleotide
  Sense strand starting at position 3960 of SEQ ID NO: 1241721
gaaguugggcucuaggauu

SEQ ID NO: 1294587 - RNA, 19 nt, Artificial Sequence
  Description of Artificial Sequence: Synthetic oligonucleotide
  Antisense strand to SEQ ID NO: 1294586
aauccuagagcccaacuuc

SEQ ID NO: 1294588 - RNA, 19 nt, Artificial Sequence
  Description of Artificial Sequence: Synthetic oligonucleotide
  Sense strand starting at position 34 of SEQ ID NO: 1241722
guuaccaaguguuuaucuu

SEQ ID NO: 1294589 - RNA, 19 nt, Artificial Sequence
  Description of Artificial Sequence: Synthetic oligonucleotide
  Antisense strand to SEQ ID NO: 1294588
aagauaaacacuugguaac

SEQ ID NO: 1294590 - RNA, 19 nt, Artificial Sequence
  Description of Artificial Sequence: Synthetic oligonucleotide
  Sense strand starting at position 35 of SEQ ID NO: 1241722
uuaccaaguguuuaucuuu

SEQ ID NO: 1294591 - RNA, 19 nt, Artificial Sequence
  Description of Artificial Sequence: Synthetic oligonucleotide
  Antisense strand to SEQ ID NO: 1294590
aaagauaaacacuugguaa

SEQ ID NO: 1294592 - RNA, 19 nt, Artificial Sequence
  Description of Artificial Sequence: Synthetic oligonucleotide
  Sense strand starting at position 169 of SEQ ID NO: 1241722
gucuguauggccuauuugu

SEQ ID NO: 1294593 - RNA, 19 nt, Artificial Sequence
  Description of Artificial Sequence: Synthetic oligonucleotide
  Antisense strand to SEQ ID NO: 1294592
acaaauaggccauacagac

SEQ ID NO: 1294594 - RNA, 19 nt, Artificial Sequence
  Description of Artificial Sequence: Synthetic oligonucleotide
  Sense strand starting at position 176 of SEQ ID NO: 1241722
uggccuauuugugcagaau

SEQ ID NO: 1294595 - RNA, 19 nt, Artificial Sequence
  Description of Artificial Sequence: Synthetic oligonucleotide
  Antisense strand to SEQ ID NO: 1294594
auucugcacaaauaggcca

SEQ ID NO: 1294596 - RNA, 19 nt, Artificial Sequence
  Description of Artificial Sequence: Synthetic oligonucleotide
  Sense strand starting at position 217 of SEQ ID NO: 1241722
ucagauuuguggugauaca

SEQ ID NO: 1294597 - RNA, 19 nt, Artificial Sequence
  Description of Artificial Sequence: Synthetic oligonucleotide
  Antisense strand to SEQ ID NO: 1294596
uguaucaccacaaaucuga

SEQ ID NO: 1294598 - RNA, 19 nt, Artificial Sequence
  Description of Artificial Sequence: Synthetic oligonucleotide
  Sense strand starting at position 226 of SEQ ID NO: 1241722
uggugauacaucuggcuuc

SEQ ID NO: 1294599 - RNA, 19 nt, Artificial Sequence
  Description of Artificial Sequence: Synthetic oligonucleotide
  Antisense strand to SEQ ID NO: 1294598
gaagccagauguaucacca

SEQ ID NO: 1294600 - RNA, 19 nt, Artificial Sequence
  Description of Artificial Sequence: Synthetic oligonucleotide
  Sense strand starting at position 296 of SEQ ID NO: 1241722
gcgucaucacaggaaggga

SEQ ID NO: 1294601 - RNA, 19 nt, Artificial Sequence
  Description of Artificial Sequence: Synthetic oligonucleotide
  Antisense strand to SEQ ID NO: 1294600
ucccuuccugugaugacgc

SEQ ID NO: 1294602 - RNA, 19 nt, Artificial Sequence
  Description of Artificial Sequence: Synthetic oligonucleotide
  Sense strand starting at position 418 of SEQ ID NO: 1241722
gaggaaguguuucugaauu

SEQ ID NO: 1294603 - RNA, 19 nt, Artificial Sequence
  Description of Artificial Sequence: Synthetic oligonucleotide
  Antisense strand to SEQ ID NO: 1294602
aauucagaaacacuuccuc

SEQ ID NO: 1294604 - RNA, 19 nt, Artificial Sequence
  Description of Artificial Sequence: Synthetic oligonucleotide
  Sense strand starting at position 484 of SEQ ID NO: 1241722
ggcagaaucuccuccaaug

SEQ ID NO: 1294605 - RNA, 19 nt, Artificial Sequence
  Description of Artificial Sequence: Synthetic oligonucleotide
  Antisense strand to SEQ ID NO: 1294604
cauuggaggagauucugcc

SEQ ID NO: 1294606 - RNA, 19 nt, Artificial Sequence
  Description of Artificial Sequence: Synthetic oligonucleotide
  Sense strand starting at position 619 of SEQ ID NO: 1241722
agaaacagccauugcuaua

SEQ ID NO: 1294607 - RNA, 19 nt, Artificial Sequence
  Description of Artificial Sequence: Synthetic oligonucleotide
  Antisense strand to SEQ ID NO: 1294606
uauagcaauggcuguuucu

SEQ ID NO: 1294608 - RNA, 19 nt, Artificial Sequence
  Description of Artificial Sequence: Synthetic oligonucleotide
  Sense strand starting at position 753 of SEQ ID NO: 1241722
gugaaauagcuuuagccuc

SEQ ID NO: 1294609 - RNA, 19 nt, Artificial Sequence
  Description of Artificial Sequence: Synthetic oligonucleotide
  Antisense strand to SEQ ID NO: 1294608
gaggcuaaagcuauuucac

SEQ ID NO: 1294610 - RNA, 19 nt, Artificial Sequence
  Description of Artificial Sequence: Synthetic oligonucleotide
  Sense strand starting at position 759 of SEQ ID NO: 1241722
uagcuuuagccucagguga

SEQ ID NO: 1294611 - RNA, 19 nt, Artificial Sequence
  Description of Artificial Sequence: Synthetic oligonucleotide
  Antisense strand to SEQ ID NO: 1294610
ucaccugaggcuaaagcua

SEQ ID NO: 1294612 - RNA, 19 nt, Artificial Sequence
  Description of Artificial Sequence: Synthetic oligonucleotide
  Sense strand starting at position 763 of SEQ ID NO: 1241722
uuuagccucaggugagaaa

SEQ ID NO: 1294613 - RNA, 19 nt, Artificial Sequence
  Description of Artificial Sequence: Synthetic oligonucleotide
  Antisense strand to SEQ ID NO: 1294612
uuucucaccugaggcuaaa

SEQ ID NO: 1294614 - RNA, 19 nt, Artificial Sequence
  Description of Artificial Sequence: Synthetic oligonucleotide
  Sense strand starting at position 841 of SEQ ID NO: 1241722
gaaucaaauccguguccac

SEQ ID NO: 1294615 - RNA, 19 nt, Artificial Sequence
  Description of Artificial Sequence: Synthetic oligonucleotide
  Antisense strand to SEQ ID NO: 1294614
guggacacggauuugauuc

SEQ ID NO: 1294616 - RNA, 19 nt, Artificial Sequence
  Description of Artificial Sequence: Synthetic oligonucleotide
  Sense strand starting at position 861 of SEQ ID NO: 1241722
gcagcacaccaucaaugau

SEQ ID NO: 1294617 - RNA, 19 nt, Artificial Sequence
  Description of Artificial Sequence: Synthetic oligonucleotide
  Antisense strand to SEQ ID NO: 1294616
aucauugauggugugcugc

SEQ ID NO: 1294618 - RNA, 19 nt, Artificial Sequence
  Description of Artificial Sequence: Synthetic oligonucleotide
  Sense strand starting at position 940 of SEQ ID NO: 1241722
aguggaccaugccuguaau

SEQ ID NO: 1294619 - RNA, 19 nt, Artificial Sequence
  Description of Artificial Sequence: Synthetic oligonucleotide
  Antisense strand to SEQ ID NO: 1294618
auuacaggcaugguccacu

SEQ ID NO: 1294620 - RNA, 19 nt, Artificial Sequence
  Description of Artificial Sequence: Synthetic oligonucleotide
  Sense strand starting at position 1301 of SEQ ID NO: 1241722
cugacucgacaguaauaau

SEQ ID NO: 1294621 - RNA, 19 nt, Artificial Sequence
  Description of Artificial Sequence: Synthetic oligonucleotide
  Antisense strand to SEQ ID NO: 1294620
auuauuacugucgagucag

SEQ ID NO: 1294622 - RNA, 19 nt, Artificial Sequence
  Description of Artificial Sequence: Synthetic oligonucleotide
  Sense strand starting at position 1311 of SEQ ID NO: 1241722
aguaauaaugacuguuaca

SEQ ID NO: 1294623 - RNA, 19 nt, Artificial Sequence
  Description of Artificial Sequence: Synthetic oligonucleotide
  Antisense strand to SEQ ID NO: 1294622
uguaacagucauuauuacu

SEQ ID NO: 1294624 - RNA, 19 nt, Artificial Sequence
  Description of Artificial Sequence: Synthetic oligonucleotide
  Sense strand starting at position 1360 of SEQ ID NO: 1241722
gccagaaccuaucucuaag

SEQ ID NO: 1294625 - RNA, 19 nt, Artificial Sequence
  Description of Artificial Sequence: Synthetic oligonucleotide
  Antisense strand to SEQ ID NO: 1294624
cuuagagauagguucuggc

SEQ ID NO: 1294626 - RNA, 19 nt, Artificial Sequence
  Description of Artificial Sequence: Synthetic oligonucleotide
  Sense strand starting at position 1372 of SEQ ID NO: 1241722
cucuaagucuaaucgguuu

SEQ ID NO: 1294627 - RNA, 19 nt, Artificial Sequence
  Description of Artificial Sequence: Synthetic oligonucleotide
  Antisense strand to SEQ ID NO: 1294626
aaaccgauuagacuuagag

SEQ ID NO: 1294628 - RNA, 19 nt, Artificial Sequence
  Description of Artificial Sequence: Synthetic oligonucleotide
  Sense strand starting at position 1426 of SEQ ID NO: 1241722
gagacacugucaccauaag

SEQ ID NO: 1294629 - RNA, 19 nt, Artificial Sequence
  Description of Artificial Sequence: Synthetic oligonucleotide
  Antisense strand to SEQ ID NO: 1294628
cuuauggugacagugucuc

SEQ ID NO: 1294630 - RNA, 19 nt, Artificial Sequence
  Description of Artificial Sequence: Synthetic oligonucleotide
  Sense strand starting at position 1540 of SEQ ID NO: 1241722
cuguacucccagugaaguu

SEQ ID NO: 1294631 - RNA, 19 nt, Artificial Sequence
  Description of Artificial Sequence: Synthetic oligonucleotide
  Antisense strand to SEQ ID NO: 1294630
aacuucacugggaguacag

SEQ ID NO: 1294632 - RNA, 19 nt, Artificial Sequence
  Description of Artificial Sequence: Synthetic oligonucleotide
  Sense strand starting at position 1541 of SEQ ID NO: 1241722
uguacucccagugaaguua

SEQ ID NO: 1294633 - RNA, 19 nt, Artificial Sequence
  Description of Artificial Sequence: Synthetic oligonucleotide
  Antisense strand to SEQ ID NO: 1294632
uaacuucacugggaguaca

SEQ ID NO: 1294634 - RNA, 19 nt, Artificial Sequence
  Description of Artificial Sequence: Synthetic oligonucleotide
  Sense strand starting at position 1563 of SEQ ID NO: 1241722
cuuacauagggugguuuau

SEQ ID NO: 1294635 - RNA, 19 nt, Artificial Sequence
  Description of Artificial Sequence: Synthetic oligonucleotide
  Antisense strand to SEQ ID NO: 1294634
auaaaccacccuauguaag

SEQ ID NO: 1294636 - RNA, 19 nt, Artificial Sequence
  Description of Artificial Sequence: Synthetic oligonucleotide
  Sense strand starting at position 2137 of SEQ ID NO: 1241722
ggauuagagcugcaaauca

SEQ ID NO: 1294637 - RNA, 19 nt, Artificial Sequence
  Description of Artificial Sequence: Synthetic oligonucleotide
  Antisense strand to SEQ ID NO: 1294636
ugauuugcagcucuaaucc

SEQ ID NO: 1294638 - RNA, 19 nt, Artificial Sequence
  Description of Artificial Sequence: Synthetic oligonucleotide
  Sense strand starting at position 2279 of SEQ ID NO: 1241722
ugaagaaagcuuggcccau

SEQ ID NO: 1294639 - RNA, 19 nt, Artificial Sequence
  Description of Artificial Sequence: Synthetic oligonucleotide
  Antisense strand to SEQ ID NO: 1294638
augggccaagcuuucuuca

SEQ ID NO: 1294640 - RNA, 19 nt, Artificial Sequence
  Description of Artificial Sequence: Synthetic oligonucleotide
  Sense strand starting at position 2448 of SEQ ID NO: 1241722
ugaguacggcaguguaaau

SEQ ID NO: 1294641 - RNA, 19 nt, Artificial Sequence
  Description of Artificial Sequence: Synthetic oligonucleotide
  Antisense strand to SEQ ID NO: 1294640
auuuacacugccguacuca

SEQ ID NO: 1294642 - RNA, 19 nt, Artificial Sequence
  Description of Artificial Sequence: Synthetic oligonucleotide
  Sense strand starting at position 2489 of SEQ ID NO: 1241722
gcgcaugguguccacagaa

SEQ ID NO: 1294643 - RNA, 19 nt, Artificial Sequence
  Description of Artificial Sequence: Synthetic oligonucleotide
  Antisense strand to SEQ ID NO: 1294642
uucuguggacaccaugcgc

SEQ ID NO: 1294644 - RNA, 19 nt, Artificial Sequence
  Description of Artificial Sequence: Synthetic oligonucleotide
  Sense strand starting at position 2739 of SEQ ID NO: 1241722
guagaaacauugucagcug

SEQ ID NO: 1294645 - RNA, 19 nt, Artificial Sequence
  Description of Artificial Sequence: Synthetic oligonucleotide
  Antisense strand to SEQ ID NO: 1294644
cagcugacaauguuucuac

SEQ ID NO: 1294646 - RNA, 19 nt, Artificial Sequence
  Description of Artificial Sequence: Synthetic oligonucleotide
  Sense strand starting at position 2742 of SEQ ID NO: 1241722
gaaacauugucagcuggaa

SEQ ID NO: 1294647 - RNA, 19 nt, Artificial Sequence
  Description of Artificial Sequence: Synthetic oligonucleotide
  Antisense strand to SEQ ID NO: 1294646
uuccagcugacaauguuuc

SEQ ID NO: 1294648 - RNA, 19 nt, Artificial Sequence
  Description of Artificial Sequence: Synthetic oligonucleotide
  Sense strand starting at position 3231 of SEQ ID NO: 1241722
cagagccaucacugaguaa

SEQ ID NO: 1294649 - RNA, 19 nt, Artificial Sequence
  Description of Artificial Sequence: Synthetic oligonucleotide
  Antisense strand to SEQ ID NO: 1294648
uuacucagugauggcucug

SEQ ID NO: 1294650 - RNA, 19 nt, Artificial Sequence
  Description of Artificial Sequence: Synthetic oligonucleotide
  Sense strand starting at position 3235 of SEQ ID NO: 1241722
gccaucacugaguaaccuu

SEQ ID NO: 1294651 - RNA, 19 nt, Artificial Sequence
  Description of Artificial Sequence: Synthetic oligonucleotide
  Antisense strand to SEQ ID NO: 1294650
aagguuacucagugauggc

SEQ ID NO: 1294652 - RNA, 19 nt, Artificial Sequence
  Description of Artificial Sequence: Synthetic oligonucleotide
  Sense strand starting at position 3248 of SEQ ID NO: 1241722
aaccuuagugucugaaugu

SEQ ID NO: 1294653 - RNA, 19 nt, Artificial Sequence
  Description of Artificial Sequence: Synthetic oligonucleotide
  Antisense strand to SEQ ID NO: 1294652
acauucagacacuaagguu

SEQ ID NO: 1294654 - RNA, 19 nt, Artificial Sequence
  Description of Artificial Sequence: Synthetic oligonucleotide
  Sense strand starting at position 3302 of SEQ ID NO: 1241722
ugaugagagugagccaauu

SEQ ID NO: 1294655 - RNA, 19 nt, Artificial Sequence
  Description of Artificial Sequence: Synthetic oligonucleotide
  Antisense strand to SEQ ID NO: 1294654
aauuggcucacucucauca

SEQ ID NO: 1294656 - RNA, 19 nt, Artificial Sequence
  Description of Artificial Sequence: Synthetic oligonucleotide
  Sense strand starting at position 3310 of SEQ ID NO: 1241722
gugagccaauucucaggua

SEQ ID NO: 1294657 - RNA, 19 nt, Artificial Sequence
  Description of Artificial Sequence: Synthetic oligonucleotide
  Antisense strand to SEQ ID NO: 1294656
uaccugagaauuggcucac

SEQ ID NO: 1294658 - RNA, 19 nt, Artificial Sequence
  Description of Artificial Sequence: Synthetic oligonucleotide
  Sense strand starting at position 3388 of SEQ ID NO: 1241722
auggacucuuggucauuga

SEQ ID NO: 1294659 - RNA, 19 nt, Artificial Sequence
  Description of Artificial Sequence: Synthetic oligonucleotide
  Antisense strand to SEQ ID NO: 1294658
ucaaugaccaagaguccau

SEQ ID NO: 1294660 - RNA, 19 nt, Artificial Sequence
  Description of Artificial Sequence: Synthetic oligonucleotide
  Sense strand starting at position 3391 of SEQ ID NO: 1241722
gacucuuggucauugagag

SEQ ID NO: 1294661 - RNA, 19 nt, Artificial Sequence
  Description of Artificial Sequence: Synthetic oligonucleotide
  Antisense strand to SEQ ID NO: 1294660
cucucaaugaccaagaguc

SEQ ID NO: 1294662 - RNA, 19 nt, Artificial Sequence
  Description of Artificial Sequence: Synthetic oligonucleotide
  Sense strand starting at position 3822 of SEQ ID NO: 1241722
gcaugagaagucugccuau

SEQ ID NO: 1294663 - RNA, 19 nt, Artificial Sequence
  Description of Artificial Sequence: Synthetic oligonucleotide
  Antisense strand to SEQ ID NO: 1294662
auaggcagacuucucaugc

SEQ ID NO: 1294664 - RNA, 19 nt, Artificial Sequence
  Description of Artificial Sequence: Synthetic oligonucleotide
  Sense strand starting at position 3825 of SEQ ID NO: 1241722
ugagaagucugccuaucua

SEQ ID NO: 1294665 - RNA, 19 nt, Artificial Sequence
  Description of Artificial Sequence: Synthetic oligonucleotide
  Antisense strand to SEQ ID NO: 1294664
uagauaggcagacuucuca

SEQ ID NO: 1294666 - RNA, 19 nt, Artificial Sequence
  Description of Artificial Sequence: Synthetic oligonucleotide
  Sense strand starting at position 3920 of SEQ ID NO: 1241722
guuauuccaguuuagacaa

SEQ ID NO: 1294667 - RNA, 19 nt, Artificial Sequence
  Description of Artificial Sequence: Synthetic oligonucleotide
  Antisense strand to SEQ ID NO: 1294666
uugucuaaacuggaauaac

SEQ ID NO: 1294668 - RNA, 19 nt, Artificial Sequence
  Description of Artificial Sequence: Synthetic oligonucleotide
  Sense strand starting at position 324 of SEQ ID NO: 1241723
ggauuagagcugcaaauca

SEQ ID NO: 1294669 - RNA, 19 nt, Artificial Sequence
  Description of Artificial Sequence: Synthetic oligonucleotide
  Antisense strand to SEQ ID NO: 1294668
ugauuugcagcucuaaucc

SEQ ID NO: 1294670 - RNA, 19 nt, Artificial Sequence
  Description of Artificial Sequence: Synthetic oligonucleotide
  Sense strand starting at position 466 of SEQ ID NO: 1241723
ugaagaaagcuuggcccau

SEQ ID NO: 1294671 - RNA, 19 nt, Artificial Sequence
  Description of Artificial Sequence: Synthetic oligonucleotide
  Antisense strand to SEQ ID NO: 1294670
augggccaagcuuucuuca

SEQ ID NO: 1294672 - RNA, 19 nt, Artificial Sequence
  Description of Artificial Sequence: Synthetic oligonucleotide
  Sense strand starting at position 926 of SEQ ID NO: 1241723
guagaaacauugucagcug

SEQ ID NO: 1294673 - RNA, 19 nt, Artificial Sequence
  Description of Artificial Sequence: Synthetic oligonucleotide
  Antisense strand to SEQ ID NO: 1294672
cagcugacaauguuucuac

SEQ ID NO: 1294674 - RNA, 19 nt, Artificial Sequence
  Description of Artificial Sequence: Synthetic oligonucleotide
  Sense strand starting at position 929 of SEQ ID NO: 1241723
gaaacauugucagcuggaa

SEQ ID NO: 1294675 - RNA, 19 nt, Artificial Sequence
  Description of Artificial Sequence: Synthetic oligonucleotide
  Antisense strand to SEQ ID NO: 1294674
uuccagcugacaauguuuc

SEQ ID NO: 1294676 - RNA, 19 nt, Artificial Sequence
  Description of Artificial Sequence: Synthetic oligonucleotide
  Sense strand starting at position 1418 of SEQ ID NO: 1241723
cagagccaucacugaguaa

SEQ ID NO: 1294677 - RNA, 19 nt, Artificial Sequence
  Description of Artificial Sequence: Synthetic oligonucleotide
  Antisense strand to SEQ ID NO: 1294676
uuacucagugauggcucug

SEQ ID NO: 1294678 - RNA, 19 nt, Artificial Sequence
  Description of Artificial Sequence: Synthetic oligonucleotide
  Sense strand starting at position 1422 of SEQ ID NO: 1241723
gccaucacugaguaaccuu

SEQ ID NO: 1294679 - RNA, 19 nt, Artificial Sequence
  Description of Artificial Sequence: Synthetic oligonucleotide
  Antisense strand to SEQ ID NO: 1294678
aagguuacucagugauggc

SEQ ID NO: 1294680 - RNA, 19 nt, Artificial Sequence
  Description of Artificial Sequence: Synthetic oligonucleotide
  Sense strand starting at position 1435 of SEQ ID NO: 1241723
aaccuuagugucugaaugu

SEQ ID NO: 1294681 - RNA, 19 nt, Artificial Sequence
  Description of Artificial Sequence: Synthetic oligonucleotide
  Antisense strand to SEQ ID NO: 1294680
acauucagacacuaagguu

SEQ ID NO: 1294682 - RNA, 19 nt, Artificial Sequence
  Description of Artificial Sequence: Synthetic oligonucleotide
  Sense strand starting at position 1489 of SEQ ID NO: 1241723
ugaugagagugagccaauu

SEQ ID NO: 1294683 - RNA, 19 nt, Artificial Sequence
  Description of Artificial Sequence: Synthetic oligonucleotide
  Antisense strand to SEQ ID NO: 1294682
aauuggcucacucucauca

SEQ ID NO: 1294684 - RNA, 19 nt, Artificial Sequence
  Description of Artificial Sequence: Synthetic oligonucleotide
  Sense strand starting at position 1497 of SEQ ID NO: 1241723
gugagccaauucucaggua

SEQ ID NO: 1294685 - RNA, 19 nt, Artificial Sequence
  Description of Artificial Sequence: Synthetic oligonucleotide
  Antisense strand to SEQ ID NO: 1294684
uaccugagaauuggcucac

SEQ ID NO: 1294686 - RNA, 19 nt, Artificial Sequence
  Description of Artificial Sequence: Synthetic oligonucleotide
  Sense strand starting at position 1575 of SEQ ID NO: 1241723
auggacucuuggucauuga

SEQ ID NO: 1294687 - RNA, 19 nt, Artificial Sequence
  Description of Artificial Sequence: Synthetic oligonucleotide
  Antisense strand to SEQ ID NO: 1294686
ucaaugaccaagaguccau

SEQ ID NO: 1294688 - RNA, 19 nt, Artificial Sequence
  Description of Artificial Sequence: Synthetic oligonucleotide
  Sense strand starting at position 1578 of SEQ ID NO: 1241723
gacucuuggucauugagag

SEQ ID NO: 1294689 - RNA, 19 nt, Artificial Sequence
  Description of Artificial Sequence: Synthetic oligonucleotide
  Antisense strand to SEQ ID NO: 1294688
cucucaaugaccaagaguc

SEQ ID NO: 1294690 - RNA, 19 nt, Artificial Sequence
  Description of Artificial Sequence: Synthetic oligonucleotide
  Sense strand starting at position 2012 of SEQ ID NO: 1241723
ugagaagucugccuaucua

SEQ ID NO: 1294691 - RNA, 19 nt, Artificial Sequence
  Description of Artificial Sequence: Synthetic oligonucleotide
  Antisense strand to SEQ ID NO: 1294690
uagauaggcagacuucuca

SEQ ID NO: 1294692 - RNA, 19 nt, Artificial Sequence
  Description of Artificial Sequence: Synthetic oligonucleotide
  Sense strand starting at position 2107 of SEQ ID NO: 1241723
guuauuccaguuuagacaa

SEQ ID NO: 1294693 - RNA, 19 nt, Artificial Sequence
  Description of Artificial Sequence: Synthetic oligonucleotide
  Antisense strand to SEQ ID NO: 1294692
uugucuaaacuggaauaac

SEQ ID NO: 1294694 - RNA, 19 nt, Artificial Sequence
  Description of Artificial Sequence: Synthetic oligonucleotide
  Sense strand starting at position 2195 of SEQ ID NO: 1241723
gaaguuugauaaucuaagu

SEQ ID NO: 1294695 - RNA, 19 nt, Artificial Sequence
  Description of Artificial Sequence: Synthetic oligonucleotide
  Antisense strand to SEQ ID NO: 1294694
acuuagauuaucaaacuuc

SEQ ID NO: 1294696 - RNA, 19 nt, Artificial Sequence
  Description of Artificial Sequence: Synthetic oligonucleotide
  Sense strand starting at position 2235 of SEQ ID NO: 1241723
uaaggaaaugguggccaaa

SEQ ID NO: 1294697 - RNA, 19 nt, Artificial Sequence
  Description of Artificial Sequence: Synthetic oligonucleotide
  Antisense strand to SEQ ID NO: 1294696
uuuggccaccauuuccuua

SEQ ID NO: 1294698 - RNA, 19 nt, Artificial Sequence
  Description of Artificial Sequence: Synthetic oligonucleotide
  Sense strand starting at position 2237 of SEQ ID NO: 1241723
aggaaaugguggccaaagu

SEQ ID NO: 1294699 - RNA, 19 nt, Artificial Sequence
  Description of Artificial Sequence: Synthetic oligonucleotide
  Antisense strand to SEQ ID NO: 1294698
acuuuggccaccauuuccu

SEQ ID NO: 1294700 - RNA, 19 nt, Artificial Sequence
  Description of Artificial Sequence: Synthetic oligonucleotide
  Sense strand starting at position 2238 of SEQ ID NO: 1241723
ggaaaugguggccaaaguu

SEQ ID NO: 1294701 - RNA, 19 nt, Artificial Sequence
  Description of Artificial Sequence: Synthetic oligonucleotide
  Antisense strand to SEQ ID NO: 1294700
aacuuuggccaccauuucc

SEQ ID NO: 1294702 - RNA, 19 nt, Artificial Sequence
  Description of Artificial Sequence: Synthetic oligonucleotide
  Sense strand starting at position 2270 of SEQ ID NO: 1241723
auggcagguuccuccaaga

SEQ ID NO: 1294703 - RNA, 19 nt, Artificial Sequence
  Description of Artificial Sequence: Synthetic oligonucleotide
  Antisense strand to SEQ ID NO: 1294702
ucuuggaggaaccugccau

SEQ ID NO: 1294704 - RNA, 19 nt, Artificial Sequence
  Description of Artificial Sequence: Synthetic oligonucleotide
  Sense strand starting at position 2314 of SEQ ID NO: 1241723
uugaauguucuggguaaga

SEQ ID NO: 1294705 - RNA, 19 nt, Artificial Sequence
  Description of Artificial Sequence: Synthetic oligonucleotide
  Antisense strand to SEQ ID NO: 1294704
ucuuacccagaacauucaa

SEQ ID NO: 1294706 - RNA, 19 nt, Artificial Sequence
  Description of Artificial Sequence: Synthetic oligonucleotide
  Sense strand starting at position 2316 of SEQ ID NO: 1241723
gaauguucuggguaagacu

SEQ ID NO: 1294707 - RNA, 19 nt, Artificial Sequence
  Description of Artificial Sequence: Synthetic oligonucleotide
  Antisense strand to SEQ ID NO: 1294706
agucuuacccagaacauuc

SEQ ID NO: 1294708 - RNA, 19 nt, Artificial Sequence
  Description of Artificial Sequence: Synthetic oligonucleotide
  Sense strand starting at position 2354 of SEQ ID NO: 1241723
ccagguucuuucuuucuua

SEQ ID NO: 1294709 - RNA, 19 nt, Artificial Sequence
  Description of Artificial Sequence: Synthetic oligonucleotide
  Antisense strand to SEQ ID NO: 1294708
uaagaaagaaagaaccugg

SEQ ID NO: 1294710 - RNA, 19 nt, Artificial Sequence
  Description of Artificial Sequence: Synthetic oligonucleotide
  Sense strand starting at position 2395 of SEQ ID NO: 1241723
gucuguauucugcuugugu

SEQ ID NO: 1294711 - RNA, 19 nt, Artificial Sequence
  Description of Artificial Sequence: Synthetic oligonucleotide
  Antisense strand to SEQ ID NO: 1294710
acacaagcagaauacagac

SEQ ID NO: 1294712 - RNA, 19 nt, Artificial Sequence
  Description of Artificial Sequence: Synthetic oligonucleotide
  Sense strand starting at position 2398 of SEQ ID NO: 1241723
uguauucugcuugugucau

SEQ ID NO: 1294713 - RNA, 19 nt, Artificial Sequence
  Description of Artificial Sequence: Synthetic oligonucleotide
  Antisense strand to SEQ ID NO: 1294712
augacacaagcagaauaca

SEQ ID NO: 1294714 - RNA, 19 nt, Artificial Sequence
  Description of Artificial Sequence: Synthetic oligonucleotide
  Sense strand starting at position 2490 of SEQ ID NO: 1241723
ugaggcugugucugaugaa

SEQ ID NO: 1294715 - RNA, 19 nt, Artificial Sequence
  Description of Artificial Sequence: Synthetic oligonucleotide
  Antisense strand to SEQ ID NO: 1294714
uucaucagacacagccuca

SEQ ID NO: 1294716 - RNA, 19 nt, Artificial Sequence
  Description of Artificial Sequence: Synthetic oligonucleotide
  Sense strand starting at position 2563 of SEQ ID NO: 1241723
gucguaucggucaaugguu

SEQ ID NO: 1294717 - RNA, 19 nt, Artificial Sequence
  Description of Artificial Sequence: Synthetic oligonucleotide
  Antisense strand to SEQ ID NO: 1294716
aaccauugaccgauacgac

SEQ ID NO: 1294718 - RNA, 19 nt, Artificial Sequence
  Description of Artificial Sequence: Synthetic oligonucleotide
  Sense strand starting at position 2705 of SEQ ID NO: 1241723
uuucucuuccaaggugaga

SEQ ID NO: 1294719 - RNA, 19 nt, Artificial Sequence
  Description of Artificial Sequence: Synthetic oligonucleotide
  Antisense strand to SEQ ID NO: 1294718
ucucaccuuggaagagaaa

SEQ ID NO: 1294720 - RNA, 19 nt, Artificial Sequence
  Description of Artificial Sequence: Synthetic oligonucleotide
  Sense strand starting at position 2755 of SEQ ID NO: 1241723
gcuuccagccucuaagaaa

SEQ ID NO: 1294721 - RNA, 19 nt, Artificial Sequence
  Description of Artificial Sequence: Synthetic oligonucleotide
  Antisense strand to SEQ ID NO: 1294720
uuucuuagaggcuggaagc

SEQ ID NO: 1294722 - RNA, 19 nt, Artificial Sequence
  Description of Artificial Sequence: Synthetic oligonucleotide
  Sense strand starting at position 3108 of SEQ ID NO: 1241723
gugccauuucuaggcagca

SEQ ID NO: 1294723 - RNA, 19 nt, Artificial Sequence
  Description of Artificial Sequence: Synthetic oligonucleotide
  Antisense strand to SEQ ID NO: 1294722
ugcugccuagaaauggcac

SEQ ID NO: 1294724 - RNA, 19 nt, Artificial Sequence
  Description of Artificial Sequence: Synthetic oligonucleotide
  Sense strand starting at position 3110 of SEQ ID NO: 1241723
gccauuucuaggcagcagu

SEQ ID NO: 1294725 - RNA, 19 nt, Artificial Sequence
  Description of Artificial Sequence: Synthetic oligonucleotide
  Antisense strand to SEQ ID NO: 1294724
acugcugccuagaaauggc

SEQ ID NO: 1294726 - RNA, 19 nt, Artificial Sequence
  Description of Artificial Sequence: Synthetic oligonucleotide
  Sense strand starting at position 3364 of SEQ ID NO: 1241723
gaaaguuacccugagcuuc

SEQ ID NO: 1294727 - RNA, 19 nt, Artificial Sequence
  Description of Artificial Sequence: Synthetic oligonucleotide
  Antisense strand to SEQ ID NO: 1294726
gaagcucaggguaacuuuc

SEQ ID NO: 1294728 - RNA, 19 nt, Artificial Sequence
  Description of Artificial Sequence: Synthetic oligonucleotide
  Sense strand starting at position 3419 of SEQ ID NO: 1241723
auccaaaugucauuauugu

SEQ ID NO: 1294729 - RNA, 19 nt, Artificial Sequence
  Description of Artificial Sequence: Synthetic oligonucleotide
  Antisense strand to SEQ ID NO: 1294728
acaauaaugacauuuggau

SEQ ID NO: 1294730 - RNA, 19 nt, Artificial Sequence
  Description of Artificial Sequence: Synthetic oligonucleotide
  Sense strand starting at position 3587 of SEQ ID NO: 1241723
acuguuauuaggugugaga

SEQ ID NO: 1294731 - RNA, 19 nt, Artificial Sequence
  Description of Artificial Sequence: Synthetic oligonucleotide
  Antisense strand to SEQ ID NO: 1294730
ucucacaccuaauaacagu

SEQ ID NO: 1294732 - RNA, 19 nt, Artificial Sequence
  Description of Artificial Sequence: Synthetic oligonucleotide
  Sense strand starting at position 3589 of SEQ ID NO: 1241723
uguuauuaggugugagaga

SEQ ID NO: 1294733 - RNA, 19 nt, Artificial Sequence
  Description of Artificial Sequence: Synthetic oligonucleotide
  Antisense strand to SEQ ID NO: 1294732
ucucucacaccuaauaaca

SEQ ID NO: 1294734 - RNA, 19 nt, Artificial Sequence
  Description of Artificial Sequence: Synthetic oligonucleotide
  Sense strand starting at position 3775 of SEQ ID NO: 1241723
cagugagauuagccuguca

SEQ ID NO: 1294735 - RNA, 19 nt, Artificial Sequence
  Description of Artificial Sequence: Synthetic oligonucleotide
  Antisense strand to SEQ ID NO: 1294734
ugacaggcuaaucucacug

SEQ ID NO: 1294736 - RNA, 19 nt, Artificial Sequence
  Description of Artificial Sequence: Synthetic oligonucleotide
  Sense strand starting at position 3777 of SEQ ID NO: 1241723
gugagauuagccugucaua

SEQ ID NO: 1294737 - RNA, 19 nt, Artificial Sequence
  Description of Artificial Sequence: Synthetic oligonucleotide
  Antisense strand to SEQ ID NO: 1294736
uaugacaggcuaaucucac

SEQ ID NO: 1294738 - RNA, 19 nt, Artificial Sequence
  Description of Artificial Sequence: Synthetic oligonucleotide
  Sense strand starting at position 3866 of SEQ ID NO: 1241723
cguaaagaacaguauccuu

SEQ ID NO: 1294739 - RNA, 19 nt, Artificial Sequence
  Description of Artificial Sequence: Synthetic oligonucleotide
  Antisense strand to SEQ ID NO: 1294738
aaggauacuguucuuuacg

SEQ ID NO: 1294740 - RNA, 19 nt, Artificial Sequence
  Description of Artificial Sequence: Synthetic oligonucleotide
  Sense strand starting at position 3879 of SEQ ID NO: 1241723
auccuugcacgugauaauc

SEQ ID NO: 1294741 - RNA, 19 nt, Artificial Sequence
  Description of Artificial Sequence: Synthetic oligonucleotide
  Antisense strand to SEQ ID NO: 1294740
gauuaucacgugcaaggau

SEQ ID NO: 1294742 - RNA, 19 nt, Artificial Sequence
  Description of Artificial Sequence: Synthetic oligonucleotide
  Sense strand starting at position 3943 of SEQ ID NO: 1241723
gaaauuugcucucagagua

SEQ ID NO: 1294743 - RNA, 19 nt, Artificial Sequence
  Description of Artificial Sequence: Synthetic oligonucleotide
  Antisense strand to SEQ ID NO: 1294742
uacucugagagcaaauuuc

SEQ ID NO: 1294744 - RNA, 19 nt, Artificial Sequence
  Description of Artificial Sequence: Synthetic oligonucleotide
  Sense strand starting at position 3955 of SEQ ID NO: 1241723
cagaguaucgugugaaauu

SEQ ID NO: 1294745 - RNA, 19 nt, Artificial Sequence
  Description of Artificial Sequence: Synthetic oligonucleotide
  Antisense strand to SEQ ID NO: 1294744
aauuucacacgauacucug

SEQ ID NO: 1294746 - RNA, 19 nt, Artificial Sequence
  Description of Artificial Sequence: Synthetic oligonucleotide
  Sense strand starting at position 3962 of SEQ ID NO: 1241723
ucgugugaaauuugcacuu

SEQ ID NO: 1294747 - RNA, 19 nt, Artificial Sequence
  Description of Artificial Sequence: Synthetic oligonucleotide
  Antisense strand to SEQ ID NO: 1294746
aagugcaaauuucacacga

SEQ ID NO: 1294748 - RNA, 19 nt, Artificial Sequence
  Description of Artificial Sequence: Synthetic oligonucleotide
  Sense strand starting at position 155 of SEQ ID NO: 1241724
gugagcuugggagguauga

SEQ ID NO: 1294749 - RNA, 19 nt, Artificial Sequence
  Description of Artificial Sequence: Synthetic oligonucleotide
  Antisense strand to SEQ ID NO: 1294748
ucauaccucccaagcucac

SEQ ID NO: 1294750 - RNA, 19 nt, Artificial Sequence
  Description of Artificial Sequence: Synthetic oligonucleotide
  Sense strand starting at position 266 of SEQ ID NO: 1241724
ggaacuaaggcugguauga

SEQ ID NO: 1294751 - RNA, 19 nt, Artificial Sequence
  Description of Artificial Sequence: Synthetic oligonucleotide
  Antisense strand to SEQ ID NO: 1294750
ucauaccagccuuaguucc

SEQ ID NO: 1294752 - RNA, 19 nt, Artificial Sequence
  Description of Artificial Sequence: Synthetic oligonucleotide
  Sense strand starting at position 323 of SEQ ID NO: 1241724
gugaucuugggagguguga

SEQ ID NO: 1294753 - RNA, 19 nt, Artificial Sequence
  Description of Artificial Sequence: Synthetic oligonucleotide
  Antisense strand to SEQ ID NO: 1294752
ucacaccucccaagaucac

SEQ ID NO: 1294754 - RNA, 19 nt, Artificial Sequence
  Description of Artificial Sequence: Synthetic oligonucleotide
  Sense strand starting at position 325 of SEQ ID NO: 1241724
gaucuugggaggugugaca

SEQ ID NO: 1294755 - RNA, 19 nt, Artificial Sequence
  Description of Artificial Sequence: Synthetic oligonucleotide
  Antisense strand to SEQ ID NO: 1294754
ugucacaccucccaagauc

SEQ ID NO: 1294756 - RNA, 19 nt, Artificial Sequence
  Description of Artificial Sequence: Synthetic oligonucleotide
  Sense strand starting at position 638 of SEQ ID NO: 1241724
acucuugggugaucuguga

SEQ ID NO: 1294757 - RNA, 19 nt, Artificial Sequence
  Description of Artificial Sequence: Synthetic oligonucleotide
  Antisense strand to SEQ ID NO: 1294756
ucacagaucacccaagagu

SEQ ID NO: 1294758 - RNA, 19 nt, Artificial Sequence
  Description of Artificial Sequence: Synthetic oligonucleotide
  Sense strand starting at position 642 of SEQ ID NO: 1241724
uugggugaucugugaggga

SEQ ID NO: 1294759 - RNA, 19 nt, Artificial Sequence
  Description of Artificial Sequence: Synthetic oligonucleotide
  Antisense strand to SEQ ID NO: 1294758
ucccucacagaucacccaa

SEQ ID NO: 1294760 - RNA, 19 nt, Artificial Sequence
  Description of Artificial Sequence: Synthetic oligonucleotide
  Sense strand starting at position 796 of SEQ ID NO: 1241724
ggcggugacacugaaauca

SEQ ID NO: 1294761 - RNA, 19 nt, Artificial Sequence
  Description of Artificial Sequence: Synthetic oligonucleotide
  Antisense strand to SEQ ID NO: 1294760
ugauuucagugucaccgcc

SEQ ID NO: 1294762 - RNA, 19 nt, Artificial Sequence
  Description of Artificial Sequence: Synthetic oligonucleotide
  Sense strand starting at position 831 of SEQ ID NO: 1241724
ggugaugaggauuguuaau

SEQ ID NO: 1294763 - RNA, 19 nt, Artificial Sequence
  Description of Artificial Sequence: Synthetic oligonucleotide
  Antisense strand to SEQ ID NO: 1294762
auuaacaauccucaucacc

SEQ ID NO: 1294764 - RNA, 19 nt, Artificial Sequence
  Description of Artificial Sequence: Synthetic oligonucleotide
  Sense strand starting at position 833 of SEQ ID NO: 1241724
ugaugaggauuguuaauuc

SEQ ID NO: 1294765 - RNA, 19 nt, Artificial Sequence
  Description of Artificial Sequence: Synthetic oligonucleotide
  Antisense strand to SEQ ID NO: 1294764
gaauuaacaauccucauca

SEQ ID NO: 1294766 - RNA, 19 nt, Artificial Sequence
  Description of Artificial Sequence: Synthetic oligonucleotide
  Sense strand starting at position 1037 of SEQ ID NO: 1241724
aaccauuguugggugauaa

SEQ ID NO: 1294767 - RNA, 19 nt, Artificial Sequence
  Description of Artificial Sequence: Synthetic oligonucleotide
  Antisense strand to SEQ ID NO: 1294766
uuaucacccaacaaugguu

SEQ ID NO: 1294768 - RNA, 19 nt, Artificial Sequence
  Description of Artificial Sequence: Synthetic oligonucleotide
  Sense strand starting at position 1038 of SEQ ID NO: 1241724
accauuguugggugauaaa

SEQ ID NO: 1294769 - RNA, 19 nt, Artificial Sequence
  Description of Artificial Sequence: Synthetic oligonucleotide
  Antisense strand to SEQ ID NO: 1294768
uuuaucacccaacaauggu

SEQ ID NO: 1294770 - RNA, 19 nt, Artificial Sequence
  Description of Artificial Sequence: Synthetic oligonucleotide
  Sense strand starting at position 1181 of SEQ ID NO: 1241724
uagcaucagcaaggagauu

SEQ ID NO: 1294771 - RNA, 19 nt, Artificial Sequence
  Description of Artificial Sequence: Synthetic oligonucleotide
  Antisense strand to SEQ ID NO: 1294770
aaucuccuugcugaugcua

SEQ ID NO: 1294772 - RNA, 19 nt, Artificial Sequence
  Description of Artificial Sequence: Synthetic oligonucleotide
  Sense strand starting at position 1658 of SEQ ID NO: 1241724
ccuccaugacccgaucaga

SEQ ID NO: 1294773 - RNA, 19 nt, Artificial Sequence
  Description of Artificial Sequence: Synthetic oligonucleotide
  Antisense strand to SEQ ID NO: 1294772
ucugaucgggucauggagg

SEQ ID NO: 1294774 - RNA, 19 nt, Artificial Sequence
  Description of Artificial Sequence: Synthetic oligonucleotide
  Sense strand starting at position 1702 of SEQ ID NO: 1241724
gagaucugugugcacauca

SEQ ID NO: 1294775 - RNA, 19 nt, Artificial Sequence
  Description of Artificial Sequence: Synthetic oligonucleotide
  Antisense strand to SEQ ID NO: 1294774
ugaugugcacacagaucuc

SEQ ID NO: 1294776 - RNA, 19 nt, Artificial Sequence
  Description of Artificial Sequence: Synthetic oligonucleotide
  Sense strand starting at position 1726 of SEQ ID NO: 1241724
ugagaaacauugguuuagu

SEQ ID NO: 1294777 - RNA, 19 nt, Artificial Sequence
  Description of Artificial Sequence: Synthetic oligonucleotide
  Antisense strand to SEQ ID NO: 1294776
acuaaaccaauguuucuca

SEQ ID NO: 1294778 - RNA, 19 nt, Artificial Sequence
  Description of Artificial Sequence: Synthetic oligonucleotide
  Sense strand starting at position 1727 of SEQ ID NO: 1241724
gagaaacauugguuuaguc

SEQ ID NO: 1294779 - RNA, 19 nt, Artificial Sequence
  Description of Artificial Sequence: Synthetic oligonucleotide
  Antisense strand to SEQ ID NO: 1294778
gacuaaaccaauguuucuc

SEQ ID NO: 1294780 - RNA, 19 nt, Artificial Sequence
  Description of Artificial Sequence: Synthetic oligonucleotide
  Sense strand starting at position 1729 of SEQ ID NO: 1241724
gaaacauugguuuagucca

SEQ ID NO: 1294781 - RNA, 19 nt, Artificial Sequence
  Description of Artificial Sequence: Synthetic oligonucleotide
  Antisense strand to SEQ ID NO: 1294780
uggacuaaaccaauguuuc

SEQ ID NO: 1294782 - RNA, 19 nt, Artificial Sequence
  Description of Artificial Sequence: Synthetic oligonucleotide
  Sense strand starting at position 2122 of SEQ ID NO: 1241724
gggcaauauggccagaggu

SEQ ID NO: 1294783 - RNA, 19 nt, Artificial Sequence
  Description of Artificial Sequence: Synthetic oligonucleotide
  Antisense strand to SEQ ID NO: 1294782
accucuggccauauugccc

SEQ ID NO: 1294784 - RNA, 19 nt, Artificial Sequence
  Description of Artificial Sequence: Synthetic oligonucleotide
  Sense strand starting at position 2124 of SEQ ID NO: 1241724
gcaauauggccagagguga

SEQ ID NO: 1294785 - RNA, 19 nt, Artificial Sequence
  Description of Artificial Sequence: Synthetic oligonucleotide
  Antisense strand to SEQ ID NO: 1294784
ucaccucuggccauauugc

SEQ ID NO: 1294786 - RNA, 19 nt, Artificial Sequence
  Description of Artificial Sequence: Synthetic oligonucleotide
  Sense strand starting at position 2144 of SEQ ID NO: 1241724
cacguuugucaggaaugga

SEQ ID NO: 1294787 - RNA, 19 nt, Artificial Sequence
  Description of Artificial Sequence: Synthetic oligonucleotide
  Antisense strand to SEQ ID NO: 1294786
uccauuccugacaaacgug

SEQ ID NO: 1294788 - RNA, 19 nt, Artificial Sequence
  Description of Artificial Sequence: Synthetic oligonucleotide
  Sense strand starting at position 2147 of SEQ ID NO: 1241724
guuugucaggaauggaauu

SEQ ID NO: 1294789 - RNA, 19 nt, Artificial Sequence
  Description of Artificial Sequence: Synthetic oligonucleotide
  Antisense strand to SEQ ID NO: 1294788
aauuccauuccugacaaac

SEQ ID NO: 1294790 - RNA, 19 nt, Artificial Sequence
  Description of Artificial Sequence: Synthetic oligonucleotide
  Sense strand starting at position 2148 of SEQ ID NO: 1241724
uuugucaggaauggaauua

SEQ ID NO: 1294791 - RNA, 19 nt, Artificial Sequence
  Description of Artificial Sequence: Synthetic oligonucleotide
  Antisense strand to SEQ ID NO: 1294790
uaauuccauuccugacaaa

SEQ ID NO: 1294792 - RNA, 19 nt, Artificial Sequence
  Description of Artificial Sequence: Synthetic oligonucleotide
  Sense strand starting at position 2183 of SEQ ID NO: 1241724
aggucuggccucugggaaa

SEQ ID NO: 1294793 - RNA, 19 nt, Artificial Sequence
  Description of Artificial Sequence: Synthetic oligonucleotide
  Antisense strand to SEQ ID NO: 1294792
uuucccagaggccagaccu

SEQ ID NO: 1294794 - RNA, 19 nt, Artificial Sequence
  Description of Artificial Sequence: Synthetic oligonucleotide
  Sense strand starting at position 2374 of SEQ ID NO: 1241724
ugaucuugauuugaaugga

SEQ ID NO: 1294795 - RNA, 19 nt, Artificial Sequence
  Description of Artificial Sequence: Synthetic oligonucleotide
  Antisense strand to SEQ ID NO: 1294794
uccauucaaaucaagauca

SEQ ID NO: 1294796 - RNA, 19 nt, Artificial Sequence
  Description of Artificial Sequence: Synthetic oligonucleotide
  Sense strand starting at position 2452 of SEQ ID NO: 1241724
cugagcucucccugagaug

SEQ ID NO: 1294797 - RNA, 19 nt, Artificial Sequence
  Description of Artificial Sequence: Synthetic oligonucleotide
  Antisense strand to SEQ ID NO: 1294796
caucucagggagagcucag

SEQ ID NO: 1294798 - RNA, 19 nt, Artificial Sequence
  Description of Artificial Sequence: Synthetic oligonucleotide
  Sense strand starting at position 2453 of SEQ ID NO: 1241724
ugagcucucccugagauga

SEQ ID NO: 1294799 - RNA, 19 nt, Artificial Sequence
  Description of Artificial Sequence: Synthetic oligonucleotide
  Antisense strand to SEQ ID NO: 1294798
ucaucucagggagagcuca

SEQ ID NO: 1294800 - RNA, 19 nt, Artificial Sequence
  Description of Artificial Sequence: Synthetic oligonucleotide
  Sense strand starting at position 2617 of SEQ ID NO: 1241724
cgaacauaaugcucgagau

SEQ ID NO: 1294801 - RNA, 19 nt, Artificial Sequence
  Description of Artificial Sequence: Synthetic oligonucleotide
  Antisense strand to SEQ ID NO: 1294800
aucucgagcauuauguucg

SEQ ID NO: 1294802 - RNA, 19 nt, Artificial Sequence
  Description of Artificial Sequence: Synthetic oligonucleotide
  Sense strand starting at position 2618 of SEQ ID NO: 1241724
gaacauaaugcucgagaug

SEQ ID NO: 1294803 - RNA, 19 nt, Artificial Sequence
  Description of Artificial Sequence: Synthetic oligonucleotide
  Antisense strand to SEQ ID NO: 1294802
caucucgagcauuauguuc

SEQ ID NO: 1294804 - RNA, 19 nt, Artificial Sequence
  Description of Artificial Sequence: Synthetic oligonucleotide
  Sense strand starting at position 2621 of SEQ ID NO: 1241724
cauaaugcucgagaugcaa

SEQ ID NO: 1294805 - RNA, 19 nt, Artificial Sequence
  Description of Artificial Sequence: Synthetic oligonucleotide
  Antisense strand to SEQ ID NO: 1294804
uugcaucucgagcauuaug

SEQ ID NO: 1294806 - RNA, 19 nt, Artificial Sequence
  Description of Artificial Sequence: Synthetic oligonucleotide
  Sense strand starting at position 2964 of SEQ ID NO: 1241724
agcccagaauggguauaaa

SEQ ID NO: 1294807 - RNA, 19 nt, Artificial Sequence
  Description of Artificial Sequence: Synthetic oligonucleotide
  Antisense strand to SEQ ID NO: 1294806
uuuauacccauucugggcu

SEQ ID NO: 1294808 - RNA, 19 nt, Artificial Sequence
  Description of Artificial Sequence: Synthetic oligonucleotide
  Sense strand starting at position 3071 of SEQ ID NO: 1241724
gcuuaaguaaguuauggua

SEQ ID NO: 1294809 - RNA, 19 nt, Artificial Sequence
  Description of Artificial Sequence: Synthetic oligonucleotide
  Antisense strand to SEQ ID NO: 1294808
uaccauaacuuacuuaagc

SEQ ID NO: 1294810 - RNA, 19 nt, Artificial Sequence
  Description of Artificial Sequence: Synthetic oligonucleotide
  Sense strand starting at position 3135 of SEQ ID NO: 1241724
aaaugaauuugugaauggu

SEQ ID NO: 1294811 - RNA, 19 nt, Artificial Sequence
  Description of Artificial Sequence: Synthetic oligonucleotide
  Antisense strand to SEQ ID NO: 1294810
accauucacaaauucauuu

SEQ ID NO: 1294812 - RNA, 19 nt, Artificial Sequence
  Description of Artificial Sequence: Synthetic oligonucleotide
  Sense strand starting at position 3370 of SEQ ID NO: 1241724
caggaugucuugccauuaa

SEQ ID NO: 1294813 - RNA, 19 nt, Artificial Sequence
  Description of Artificial Sequence: Synthetic oligonucleotide
  Antisense strand to SEQ ID NO: 1294812
uuaauggcaagacauccug

SEQ ID NO: 1294814 - RNA, 19 nt, Artificial Sequence
  Description of Artificial Sequence: Synthetic oligonucleotide
  Sense strand starting at position 3391 of SEQ ID NO: 1241724
ggucuaugugaucaaguca

SEQ ID NO: 1294815 - RNA, 19 nt, Artificial Sequence
  Description of Artificial Sequence: Synthetic oligonucleotide
  Antisense strand to SEQ ID NO: 1294814
ugacuugaucacauagacc

SEQ ID NO: 1294816 - RNA, 19 nt, Artificial Sequence
  Description of Artificial Sequence: Synthetic oligonucleotide
  Sense strand starting at position 3668 of SEQ ID NO: 1241724
acucaucaguuaguaagua

SEQ ID NO: 1294817 - RNA, 19 nt, Artificial Sequence
  Description of Artificial Sequence: Synthetic oligonucleotide
  Antisense strand to SEQ ID NO: 1294816
uacuuacuaacugaugagu

SEQ ID NO: 1294818 - RNA, 19 nt, Artificial Sequence
  Description of Artificial Sequence: Synthetic oligonucleotide
  Sense strand starting at position 3672 of SEQ ID NO: 1241724
aucaguuaguaaguaucua

SEQ ID NO: 1294819 - RNA, 19 nt, Artificial Sequence
  Description of Artificial Sequence: Synthetic oligonucleotide
  Antisense strand to SEQ ID NO: 1294818
uagauacuuacuaacugau

SEQ ID NO: 1294820 - RNA, 19 nt, Artificial Sequence
  Description of Artificial Sequence: Synthetic oligonucleotide
  Sense strand starting at position 3791 of SEQ ID NO: 1241724
gcgugcugggccaaaggau

SEQ ID NO: 1294821 - RNA, 19 nt, Artificial Sequence
  Description of Artificial Sequence: Synthetic oligonucleotide
  Antisense strand to SEQ ID NO: 1294820
auccuuuggcccagcacgc

SEQ ID NO: 1294822 - RNA, 19 nt, Artificial Sequence
  Description of Artificial Sequence: Synthetic oligonucleotide
  Sense strand starting at position 3841 of SEQ ID NO: 1241724
gcgggcugugcucuggaaa

SEQ ID NO: 1294823 - RNA, 19 nt, Artificial Sequence
  Description of Artificial Sequence: Synthetic oligonucleotide
  Antisense strand to SEQ ID NO: 1294822
uuuccagagcacagcccgc

SEQ ID NO: 1294824 - RNA, 19 nt, Artificial Sequence
  Description of Artificial Sequence: Synthetic oligonucleotide
  Sense strand starting at position 3956 of SEQ ID NO: 1241724
cuuugaaugcuuuacuuga

SEQ ID NO: 1294825 - RNA, 19 nt, Artificial Sequence
  Description of Artificial Sequence: Synthetic oligonucleotide
  Antisense strand to SEQ ID NO: 1294824
ucaaguaaagcauucaaag

SEQ ID NO: 1294826 - RNA, 19 nt, Artificial Sequence
  Description of Artificial Sequence: Synthetic oligonucleotide
  Sense strand starting at position 3958 of SEQ ID NO: 1241724
uugaaugcuuuacuugaaa

SEQ ID NO: 1294827 - RNA, 19 nt, Artificial Sequence
  Description of Artificial Sequence: Synthetic oligonucleotide
  Antisense strand to SEQ ID NO: 1294826
uuucaaguaaagcauucaa

SEQ ID NO: 1294828 - RNA, 19 nt, Artificial Sequence
  Description of Artificial Sequence: Synthetic oligonucleotide
  Sense strand starting at position 104 of SEQ ID NO: 1241725
aaugguauuagugaugagu

SEQ ID NO: 1294829 - RNA, 19 nt, Artificial Sequence
  Description of Artificial Sequence: Synthetic oligonucleotide
  Antisense strand to SEQ ID NO: 1294828
acucaucacuaauaccauu

SEQ ID NO: 1294830 - RNA, 19 nt, Artificial Sequence
  Description of Artificial Sequence: Synthetic oligonucleotide
  Sense strand starting at position 107 of SEQ ID NO: 1241725
gguauuagugaugaguuau

SEQ ID NO: 1294831 - RNA, 19 nt, Artificial Sequence
  Description of Artificial Sequence: Synthetic oligonucleotide
  Antisense strand to SEQ ID NO: 1294830
auaacucaucacuaauacc

SEQ ID NO: 1294832 - RNA, 19 nt, Artificial Sequence
  Description of Artificial Sequence: Synthetic oligonucleotide
  Sense strand starting at position 121 of SEQ ID NO: 1241725
guuauauuccgauaaguaa

SEQ ID NO: 1294833 - RNA, 19 nt, Artificial Sequence
  Description of Artificial Sequence: Synthetic oligonucleotide
  Antisense strand to SEQ ID NO: 1294832
uuacuuaucggaauauaac

SEQ ID NO: 1294834 - RNA, 19 nt, Artificial Sequence
  Description of Artificial Sequence: Synthetic oligonucleotide
  Sense strand starting at position 268 of SEQ ID NO: 1241725
gggcaacguagugaaacau

SEQ ID NO: 1294835 - RNA, 19 nt, Artificial Sequence
  Description of Artificial Sequence: Synthetic oligonucleotide
  Antisense strand to SEQ ID NO: 1294834
auguuucacuacguugccc

SEQ ID NO: 1294836 - RNA, 19 nt, Artificial Sequence
  Description of Artificial Sequence: Synthetic oligonucleotide
  Sense strand starting at position 667 of SEQ ID NO: 1241725
agcucagaguacuugauga

SEQ ID NO: 1294837 - RNA, 19 nt, Artificial Sequence
  Description of Artificial Sequence: Synthetic oligonucleotide
  Antisense strand to SEQ ID NO: 1294836
ucaucaaguacucugagcu

SEQ ID NO: 1294838 - RNA, 19 nt, Artificial Sequence
  Description of Artificial Sequence: Synthetic oligonucleotide
  Sense strand starting at position 681 of SEQ ID NO: 1241725
gaugauuuauuagagacuc

SEQ ID NO: 1294839 - RNA, 19 nt, Artificial Sequence
  Description of Artificial Sequence: Synthetic oligonucleotide
  Antisense strand to SEQ ID NO: 1294838
gagucucuaauaaaucauc

SEQ ID NO: 1294840 - RNA, 19 nt, Artificial Sequence
  Description of Artificial Sequence: Synthetic oligonucleotide
  Sense strand starting at position 699 of SEQ ID NO: 1241725
cuuggaauacaguauuagu

SEQ ID NO: 1294841 - RNA, 19 nt, Artificial Sequence
  Description of Artificial Sequence: Synthetic oligonucleotide
  Antisense strand to SEQ ID NO: 1294840
acuaauacuguauuccaag

SEQ ID NO: 1294842 - RNA, 19 nt, Artificial Sequence
  Description of Artificial Sequence: Synthetic oligonucleotide
  Sense strand starting at position 717 of SEQ ID NO: 1241725
uaggauuuacugugucagu

SEQ ID NO: 1294843 - RNA, 19 nt, Artificial Sequence
  Description of Artificial Sequence: Synthetic oligonucleotide
  Antisense strand to SEQ ID NO: 1294842
acugacacaguaaauccua

SEQ ID NO: 1294844 - RNA, 19 nt, Artificial Sequence
  Description of Artificial Sequence: Synthetic oligonucleotide
  Sense strand starting at position 727 of SEQ ID NO: 1241725
ugugucaguuuagcuauuu

SEQ ID NO: 1294845 - RNA, 19 nt, Artificial Sequence
  Description of Artificial Sequence: Synthetic oligonucleotide
  Antisense strand to SEQ ID NO: 1294844
aaauagcuaaacugacaca

SEQ ID NO: 1294846 - RNA, 19 nt, Artificial Sequence
  Description of Artificial Sequence: Synthetic oligonucleotide
  Sense strand starting at position 728 of SEQ ID NO: 1241725
gugucaguuuagcuauuua

SEQ ID NO: 1294847 - RNA, 19 nt, Artificial Sequence
  Description of Artificial Sequence: Synthetic oligonucleotide
  Antisense strand to SEQ ID NO: 1294846
uaaauagcuaaacugacac

SEQ ID NO: 1294848 - RNA, 19 nt, Artificial Sequence
  Description of Artificial Sequence: Synthetic oligonucleotide
  Sense strand starting at position 895 of SEQ ID NO: 1241725
aggcuuacaucaguuaagu

SEQ ID NO: 1294849 - RNA, 19 nt, Artificial Sequence
  Description of Artificial Sequence: Synthetic oligonucleotide
  Antisense strand to SEQ ID NO: 1294848
acuuaacugauguaagccu

SEQ ID NO: 1294850 - RNA, 19 nt, Artificial Sequence
  Description of Artificial Sequence: Synthetic oligonucleotide
  Sense strand starting at position 904 of SEQ ID NO: 1241725
ucaguuaaguuagccaaua

SEQ ID NO: 1294851 - RNA, 19 nt, Artificial Sequence
  Description of Artificial Sequence: Synthetic oligonucleotide
  Antisense strand to SEQ ID NO: 1294850
uauuggcuaacuuaacuga

SEQ ID NO: 1294852 - RNA, 19 nt, Artificial Sequence
  Description of Artificial Sequence: Synthetic oligonucleotide
  Sense strand starting at position 1044 of SEQ ID NO: 1241725
gcaggcagaauguaguaau

SEQ ID NO: 1294853 - RNA, 19 nt, Artificial Sequence
  Description of Artificial Sequence: Synthetic oligonucleotide
  Antisense strand to SEQ ID NO: 1294852
auuacuacauucugccugc

SEQ ID NO: 1294854 - RNA, 19 nt, Artificial Sequence
  Description of Artificial Sequence: Synthetic oligonucleotide
  Sense strand starting at position 1243 of SEQ ID NO: 1241725
uuuaaagcccuggguaauu

SEQ ID NO: 1294855 - RNA, 19 nt, Artificial Sequence
  Description of Artificial Sequence: Synthetic oligonucleotide
  Antisense strand to SEQ ID NO: 1294854
aauuacccagggcuuuaaa

SEQ ID NO: 1294856 - RNA, 19 nt, Artificial Sequence
  Description of Artificial Sequence: Synthetic oligonucleotide
  Sense strand starting at position 1279 of SEQ ID NO: 1241725
uugggaaccuguguaauaa

SEQ ID NO: 1294857 - RNA, 19 nt, Artificial Sequence
  Description of Artificial Sequence: Synthetic oligonucleotide
  Antisense strand to SEQ ID NO: 1294856
uuauuacacagguucccaa

SEQ ID NO: 1294858 - RNA, 19 nt, Artificial Sequence
  Description of Artificial Sequence: Synthetic oligonucleotide
  Sense strand starting at position 1330 of SEQ ID NO: 1241725
ucuaguugacauuguaaau

SEQ ID NO: 1294859 - RNA, 19 nt, Artificial Sequence
  Description of Artificial Sequence: Synthetic oligonucleotide
  Antisense strand to SEQ ID NO: 1294858
auuuacaaugucaacuaga

SEQ ID NO: 1294860 - RNA, 19 nt, Artificial Sequence
  Description of Artificial Sequence: Synthetic oligonucleotide
  Sense strand starting at position 1380 of SEQ ID NO: 1241725
ggauccuagcugcaggaaa

SEQ ID NO: 1294861 - RNA, 19 nt, Artificial Sequence
  Description of Artificial Sequence: Synthetic oligonucleotide
  Antisense strand to SEQ ID NO: 1294860
uuuccugcagcuaggaucc

SEQ ID NO: 1294862 - RNA, 19 nt, Artificial Sequence
  Description of Artificial Sequence: Synthetic oligonucleotide
  Sense strand starting at position 1484 of SEQ ID NO: 1241725
gaaagaaggaugugguauc

SEQ ID NO: 1294863 - RNA, 19 nt, Artificial Sequence
  Description of Artificial Sequence: Synthetic oligonucleotide
  Antisense strand to SEQ ID NO: 1294862
gauaccacauccuucuuuc

SEQ ID NO: 1294864 - RNA, 19 nt, Artificial Sequence
  Description of Artificial Sequence: Synthetic oligonucleotide
  Sense strand starting at position 1491 of SEQ ID NO: 1241725
ggaugugguauccacgaua

SEQ ID NO: 1294865 - RNA, 19 nt, Artificial Sequence
  Description of Artificial Sequence: Synthetic oligonucleotide
  Antisense strand to SEQ ID NO: 1294864
uaucguggauaccacaucc

SEQ ID NO: 1294866 - RNA, 19 nt, Artificial Sequence
  Description of Artificial Sequence: Synthetic oligonucleotide
  Sense strand starting at position 1502 of SEQ ID NO: 1241725
ccacgauaagcaggcuaaa

SEQ ID NO: 1294867 - RNA, 19 nt, Artificial Sequence
  Description of Artificial Sequence: Synthetic oligonucleotide
  Antisense strand to SEQ ID NO: 1294866
uuuagccugcuuaucgugg

SEQ ID NO: 1294868 - RNA, 19 nt, Artificial Sequence
  Description of Artificial Sequence: Synthetic oligonucleotide
  Sense strand starting at position 1629 of SEQ ID NO: 1241725
cccguaucuggcuaaugau

SEQ ID NO: 1294869 - RNA, 19 nt, Artificial Sequence
  Description of Artificial Sequence: Synthetic oligonucleotide
  Antisense strand to SEQ ID NO: 1294868
aucauuagccagauacggg

SEQ ID NO: 1294870 - RNA, 19 nt, Artificial Sequence
  Description of Artificial Sequence: Synthetic oligonucleotide
  Sense strand starting at position 1686 of SEQ ID NO: 1241725
gcacgaaaccucuagguug

SEQ ID NO: 1294871 - RNA, 19 nt, Artificial Sequence
  Description of Artificial Sequence: Synthetic oligonucleotide
  Antisense strand to SEQ ID NO: 1294870
caaccuagagguuucgugc

SEQ ID NO: 1294872 - RNA, 19 nt, Artificial Sequence
  Description of Artificial Sequence: Synthetic oligonucleotide
  Sense strand starting at position 1822 of SEQ ID NO: 1241725
ugguaagauugaucucuuc

SEQ ID NO: 1294873 - RNA, 19 nt, Artificial Sequence
  Description of Artificial Sequence: Synthetic oligonucleotide
  Antisense strand to SEQ ID NO: 1294872
gaagagaucaaucuuacca

SEQ ID NO: 1294874 - RNA, 19 nt, Artificial Sequence
  Description of Artificial Sequence: Synthetic oligonucleotide
  Sense strand starting at position 1830 of SEQ ID NO: 1241725
uugaucucuuccucaguga

SEQ ID NO: 1294875 - RNA, 19 nt, Artificial Sequence
  Description of Artificial Sequence: Synthetic oligonucleotide
  Antisense strand to SEQ ID NO: 1294874
ucacugaggaagagaucaa

SEQ ID NO: 1294876 - RNA, 19 nt, Artificial Sequence
  Description of Artificial Sequence: Synthetic oligonucleotide
  Sense strand starting at position 2264 of SEQ ID NO: 1241725
aaagguguauuauucugua

SEQ ID NO: 1294877 - RNA, 19 nt, Artificial Sequence
  Description of Artificial Sequence: Synthetic oligonucleotide
  Antisense strand to SEQ ID NO: 1294876
uacagaauaauacaccuuu

SEQ ID NO: 1294878 - RNA, 19 nt, Artificial Sequence
  Description of Artificial Sequence: Synthetic oligonucleotide
  Sense strand starting at position 2269 of SEQ ID NO: 1241725
uguauuauucuguaagcau

SEQ ID NO: 1294879 - RNA, 19 nt, Artificial Sequence
  Description of Artificial Sequence: Synthetic oligonucleotide
  Antisense strand to SEQ ID NO: 1294878
augcuuacagaauaauaca

SEQ ID NO: 1294880 - RNA, 19 nt, Artificial Sequence
  Description of Artificial Sequence: Synthetic oligonucleotide
  Sense strand starting at position 2304 of SEQ ID NO: 1241725
ggguguuacaggcaaucca

SEQ ID NO: 1294881 - RNA, 19 nt, Artificial Sequence
  Description of Artificial Sequence: Synthetic oligonucleotide
  Antisense strand to SEQ ID NO: 1294880
uggauugccuguaacaccc

SEQ ID NO: 1294882 - RNA, 19 nt, Artificial Sequence
  Description of Artificial Sequence: Synthetic oligonucleotide
  Sense strand starting at position 2385 of SEQ ID NO: 1241725
ucucauguaagacgaguua

SEQ ID NO: 1294883 - RNA, 19 nt, Artificial Sequence
  Description of Artificial Sequence: Synthetic oligonucleotide
  Antisense strand to SEQ ID NO: 1294882
uaacucgucuuacaugaga

SEQ ID NO: 1294884 - RNA, 19 nt, Artificial Sequence
  Description of Artificial Sequence: Synthetic oligonucleotide
  Sense strand starting at position 2398 of SEQ ID NO: 1241725
gaguuaacaugguuuggua

SEQ ID NO: 1294885 - RNA, 19 nt, Artificial Sequence
  Description of Artificial Sequence: Synthetic oligonucleotide
  Antisense strand to SEQ ID NO: 1294884
uaccaaaccauguuaacuc

SEQ ID NO: 1294886 - RNA, 19 nt, Artificial Sequence
  Description of Artificial Sequence: Synthetic oligonucleotide
  Sense strand starting at position 2489 of SEQ ID NO: 1241725
aaacguuaucucugugaca

SEQ ID NO: 1294887 - RNA, 19 nt, Artificial Sequence
  Description of Artificial Sequence: Synthetic oligonucleotide
  Antisense strand to SEQ ID NO: 1294886
ugucacagagauaacguuu

SEQ ID NO: 1294888 - RNA, 19 nt, Artificial Sequence
  Description of Artificial Sequence: Synthetic oligonucleotide
  Sense strand starting at position 2490 of SEQ ID NO: 1241725
aacguuaucucugugacaa

SEQ ID NO: 1294889 - RNA, 19 nt, Artificial Sequence
  Description of Artificial Sequence: Synthetic oligonucleotide
  Antisense strand to SEQ ID NO: 1294888
uugucacagagauaacguu

SEQ ID NO: 1294890 - RNA, 19 nt, Artificial Sequence
  Description of Artificial Sequence: Synthetic oligonucleotide
  Sense strand starting at position 2491 of SEQ ID NO: 1241725
acguuaucucugugacaaa

SEQ ID NO: 1294891 - RNA, 19 nt, Artificial Sequence
  Description of Artificial Sequence: Synthetic oligonucleotide
  Antisense strand to SEQ ID NO: 1294890
uuugucacagagauaacgu

SEQ ID NO: 1294892 - RNA, 19 nt, Artificial Sequence
  Description of Artificial Sequence: Synthetic oligonucleotide
  Sense strand starting at position 2570 of SEQ ID NO: 1241725
ggcacugucuaccuugaua

SEQ ID NO: 1294893 - RNA, 19 nt, Artificial Sequence
  Description of Artificial Sequence: Synthetic oligonucleotide
  Antisense strand to SEQ ID NO: 1294892
uaucaagguagacagugcc

SEQ ID NO: 1294894 - RNA, 19 nt, Artificial Sequence
  Description of Artificial Sequence: Synthetic oligonucleotide
  Sense strand starting at position 2573 of SEQ ID NO: 1241725
acugucuaccuugauacuu

SEQ ID NO: 1294895 - RNA, 19 nt, Artificial Sequence
  Description of Artificial Sequence: Synthetic oligonucleotide
  Antisense strand to SEQ ID NO: 1294894
aaguaucaagguagacagu

SEQ ID NO: 1294896 - RNA, 19 nt, Artificial Sequence
  Description of Artificial Sequence: Synthetic oligonucleotide
  Sense strand starting at position 2943 of SEQ ID NO: 1241725
aggugacaaccuugugaag

SEQ ID NO: 1294897 - RNA, 19 nt, Artificial Sequence
  Description of Artificial Sequence: Synthetic oligonucleotide
  Antisense strand to SEQ ID NO: 1294896
cuucacaagguugucaccu

SEQ ID NO: 1294898 - RNA, 19 nt, Artificial Sequence
  Description of Artificial Sequence: Synthetic oligonucleotide
  Sense strand starting at position 3136 of SEQ ID NO: 1241725
gagagaaguuaagauggaa

SEQ ID NO: 1294899 - RNA, 19 nt, Artificial Sequence
  Description of Artificial Sequence: Synthetic oligonucleotide
  Antisense strand to SEQ ID NO: 1294898
uuccaucuuaacuucucuc

SEQ ID NO: 1294900 - RNA, 19 nt, Artificial Sequence
  Description of Artificial Sequence: Synthetic oligonucleotide
  Sense strand starting at position 3490 of SEQ ID NO: 1241725
acaacuugggcucaaguuu

SEQ ID NO: 1294901 - RNA, 19 nt, Artificial Sequence
  Description of Artificial Sequence: Synthetic oligonucleotide
  Antisense strand to SEQ ID NO: 1294900
aaacuugagcccaaguugu

SEQ ID NO: 1294902 - RNA, 19 nt, Artificial Sequence
  Description of Artificial Sequence: Synthetic oligonucleotide
  Sense strand starting at position 3531 of SEQ ID NO: 1241725
ucugucuuugagcaaggaa

SEQ ID NO: 1294903 - RNA, 19 nt, Artificial Sequence
  Description of Artificial Sequence: Synthetic oligonucleotide
  Antisense strand to SEQ ID NO: 1294902
uuccuugcucaaagacaga

SEQ ID NO: 1294904 - RNA, 19 nt, Artificial Sequence
  Description of Artificial Sequence: Synthetic oligonucleotide
  Sense strand starting at position 3605 of SEQ ID NO: 1241725
ucauauguugguuggauga

SEQ ID NO: 1294905 - RNA, 19 nt, Artificial Sequence
  Description of Artificial Sequence: Synthetic oligonucleotide
  Antisense strand to SEQ ID NO: 1294904
ucauccaaccaacauauga

SEQ ID NO: 1294906 - RNA, 19 nt, Artificial Sequence
  Description of Artificial Sequence: Synthetic oligonucleotide
  Sense strand starting at position 3612 of SEQ ID NO: 1241725
uugguuggaugagugaaua

SEQ ID NO: 1294907 - RNA, 19 nt, Artificial Sequence
  Description of Artificial Sequence: Synthetic oligonucleotide
  Antisense strand to SEQ ID NO: 1294906
uauucacucauccaaccaa

SEQ ID NO: 1294908 - RNA, 19 nt, Artificial Sequence
  Description of Artificial Sequence: Synthetic oligonucleotide
  Sense strand starting at position 104 of SEQ ID NO: 1241726
aaugguauuagugaugagu

SEQ ID NO: 1294909 - RNA, 19 nt, Artificial Sequence
  Description of Artificial Sequence: Synthetic oligonucleotide
  Antisense strand to SEQ ID NO: 1294908
acucaucacuaauaccauu

SEQ ID NO: 1294910 - RNA, 19 nt, Artificial Sequence
  Description of Artificial Sequence: Synthetic oligonucleotide
  Sense strand starting at position 107 of SEQ ID NO: 1241726
gguauuagugaugaguuau

SEQ ID NO: 1294911 - RNA, 19 nt, Artificial Sequence
  Description of Artificial Sequence: Synthetic oligonucleotide
  Antisense strand to SEQ ID NO: 1294910
auaacucaucacuaauacc

SEQ ID NO: 1294912 - RNA, 19 nt, Artificial Sequence
  Description of Artificial Sequence: Synthetic oligonucleotide
  Sense strand starting at position 121 of SEQ ID NO: 1241726
guuauauuccgauaaguaa

SEQ ID NO: 1294913 - RNA, 19 nt, Artificial Sequence
  Description of Artificial Sequence: Synthetic oligonucleotide
  Antisense strand to SEQ ID NO: 1294912
uuacuuaucggaauauaac

SEQ ID NO: 1294914 - RNA, 19 nt, Artificial Sequence
  Description of Artificial Sequence: Synthetic oligonucleotide
  Sense strand starting at position 268 of SEQ ID NO: 1241726
gggcaacguagugaaacau

SEQ ID NO: 1294915 - RNA, 19 nt, Artificial Sequence
  Description of Artificial Sequence: Synthetic oligonucleotide
  Antisense strand to SEQ ID NO: 1294914
auguuucacuacguugccc

SEQ ID NO: 1294916 - RNA, 19 nt, Artificial Sequence
  Description of Artificial Sequence: Synthetic oligonucleotide
  Sense strand starting at position 667 of SEQ ID NO: 1241726
agcucagaguacuugauga

SEQ ID NO: 1294917 - RNA, 19 nt, Artificial Sequence
  Description of Artificial Sequence: Synthetic oligonucleotide
  Antisense strand to SEQ ID NO: 1294916
ucaucaaguacucugagcu

SEQ ID NO: 1294918 - RNA, 19 nt, Artificial Sequence
  Description of Artificial Sequence: Synthetic oligonucleotide
  Sense strand starting at position 681 of SEQ ID NO: 1241726
gaugauuuauuagagacuc

SEQ ID NO: 1294919 - RNA, 19 nt, Artificial Sequence
  Description of Artificial Sequence: Synthetic oligonucleotide
  Antisense strand to SEQ ID NO: 1294918
gagucucuaauaaaucauc

SEQ ID NO: 1294920 - RNA, 19 nt, Artificial Sequence
  Description of Artificial Sequence: Synthetic oligonucleotide
  Sense strand starting at position 699 of SEQ ID NO: 1241726
cuuggaauacaguauuagu

SEQ ID NO: 1294921 - RNA, 19 nt, Artificial Sequence
  Description of Artificial Sequence: Synthetic oligonucleotide
  Antisense strand to SEQ ID NO: 1294920
acuaauacuguauuccaag

SEQ ID NO: 1294922 - RNA, 19 nt, Artificial Sequence
  Description of Artificial Sequence: Synthetic oligonucleotide
  Sense strand starting at position 717 of SEQ ID NO: 1241726
uaggauuuacugugucagu

SEQ ID NO: 1294923 - RNA, 19 nt, Artificial Sequence
  Description of Artificial Sequence: Synthetic oligonucleotide
  Antisense strand to SEQ ID NO: 1294922
acugacacaguaaauccua

SEQ ID NO: 1294924 - RNA, 19 nt, Artificial Sequence
  Description of Artificial Sequence: Synthetic oligonucleotide
  Sense strand starting at position 727 of SEQ ID NO: 1241726
ugugucaguuuagcuauuu

SEQ ID NO: 1294925 - RNA, 19 nt, Artificial Sequence
  Description of Artificial Sequence: Synthetic oligonucleotide
  Antisense strand to SEQ ID NO: 1294924
aaauagcuaaacugacaca

SEQ ID NO: 1294926 - RNA, 19 nt, Artificial Sequence
  Description of Artificial Sequence: Synthetic oligonucleotide
  Sense strand starting at position 728 of SEQ ID NO: 1241726
gugucaguuuagcuauuua

SEQ ID NO: 1294927 - RNA, 19 nt, Artificial Sequence
  Description of Artificial Sequence: Synthetic oligonucleotide
  Antisense strand to SEQ ID NO: 1294926
uaaauagcuaaacugacac

SEQ ID NO: 1294928 - RNA, 19 nt, Artificial Sequence
  Description of Artificial Sequence: Synthetic oligonucleotide
  Sense strand starting at position 895 of SEQ ID NO: 1241726
aggcuuacaucaguuaagu

SEQ ID NO: 1294929 - RNA, 19 nt, Artificial Sequence
  Description of Artificial Sequence: Synthetic oligonucleotide
  Antisense strand to SEQ ID NO: 1294928
acuuaacugauguaagccu

SEQ ID NO: 1294930 - RNA, 19 nt, Artificial Sequence
  Description of Artificial Sequence: Synthetic oligonucleotide
  Sense strand starting at position 904 of SEQ ID NO: 1241726
ucaguuaaguuagccaaua

SEQ ID NO: 1294931 - RNA, 19 nt, Artificial Sequence
  Description of Artificial Sequence: Synthetic oligonucleotide
  Antisense strand to SEQ ID NO: 1294930
uauuggcuaacuuaacuga

SEQ ID NO: 1294932 - RNA, 19 nt, Artificial Sequence
  Description of Artificial Sequence: Synthetic oligonucleotide
  Sense strand starting at position 1044 of SEQ ID NO: 1241726
gcaggcagaauguaguaau

SEQ ID NO: 1294933 - RNA, 19 nt, Artificial Sequence
  Description of Artificial Sequence: Synthetic oligonucleotide
  Antisense strand to SEQ ID NO: 1294932
auuacuacauucugccugc

SEQ ID NO: 1294934 - RNA, 19 nt, Artificial Sequence
  Description of Artificial Sequence: Synthetic oligonucleotide
  Sense strand starting at position 1243 of SEQ ID NO: 1241726
uuuaaagcccuggguaauu

SEQ ID NO: 1294935 - RNA, 19 nt, Artificial Sequence
  Description of Artificial Sequence: Synthetic oligonucleotide
  Antisense strand to SEQ ID NO: 1294934
aauuacccagggcuuuaaa

SEQ ID NO: 1294936 - RNA, 19 nt, Artificial Sequence
  Description of Artificial Sequence: Synthetic oligonucleotide
  Sense strand starting at position 1279 of SEQ ID NO: 1241726
uugggaaccuguguaauaa

SEQ ID NO: 1294937 - RNA, 19 nt, Artificial Sequence
  Description of Artificial Sequence: Synthetic oligonucleotide
  Antisense strand to SEQ ID NO: 1294936
uuauuacacagguucccaa

SEQ ID NO: 1294938 - RNA, 19 nt, Artificial Sequence
  Description of Artificial Sequence: Synthetic oligonucleotide
  Sense strand starting at position 1330 of SEQ ID NO: 1241726
ucuaguugacauuguaaau

SEQ ID NO: 1294939 - RNA, 19 nt, Artificial Sequence
  Description of Artificial Sequence: Synthetic oligonucleotide
  Antisense strand to SEQ ID NO: 1294938
auuuacaaugucaacuaga

SEQ ID NO: 1294940 - RNA, 19 nt, Artificial Sequence
  Description of Artificial Sequence: Synthetic oligonucleotide
  Sense strand starting at position 1380 of SEQ ID NO: 1241726
ggauccuagcugcaggaaa

SEQ ID NO: 1294941 - RNA, 19 nt, Artificial Sequence
  Description of Artificial Sequence: Synthetic oligonucleotide
  Antisense strand to SEQ ID NO: 1294940
uuuccugcagcuaggaucc

SEQ ID NO: 1294942 - RNA, 19 nt, Artificial Sequence
  Description of Artificial Sequence: Synthetic oligonucleotide
  Sense strand starting at position 1484 of SEQ ID NO: 1241726
gaaagaaggaugugguauc

SEQ ID NO: 1294943 - RNA, 19 nt, Artificial Sequence
  Description of Artificial Sequence: Synthetic oligonucleotide
  Antisense strand to SEQ ID NO: 1294942
gauaccacauccuucuuuc

SEQ ID NO: 1294944 - RNA, 19 nt, Artificial Sequence
  Description of Artificial Sequence: Synthetic oligonucleotide
  Sense strand starting at position 1491 of SEQ ID NO: 1241726
ggaugugguauccacgaua

SEQ ID NO: 1294945 - RNA, 19 nt, Artificial Sequence
  Description of Artificial Sequence: Synthetic oligonucleotide
  Antisense strand to SEQ ID NO: 1294944
uaucguggauaccacaucc

SEQ ID NO: 1294946 - RNA, 19 nt, Artificial Sequence
  Description of Artificial Sequence: Synthetic oligonucleotide
  Sense strand starting at position 1502 of SEQ ID NO: 1241726
ccacgauaagcaggcuaaa

SEQ ID NO: 1294947 - RNA, 19 nt, Artificial Sequence
  Description of Artificial Sequence: Synthetic oligonucleotide
  Antisense strand to SEQ ID NO: 1294946
uuuagccugcuuaucgugg

SEQ ID NO: 1294948 - RNA, 19 nt, Artificial Sequence
  Description of Artificial Sequence: Synthetic oligonucleotide
  Sense strand starting at position 1629 of SEQ ID NO: 1241726
cccguaucuggcuaaugau

SEQ ID NO: 1294949 - RNA, 19 nt, Artificial Sequence
  Description of Artificial Sequence: Synthetic oligonucleotide
  Antisense strand to SEQ ID NO: 1294948
aucauuagccagauacggg

SEQ ID NO: 1294950 - RNA, 19 nt, Artificial Sequence
  Description of Artificial Sequence: Synthetic oligonucleotide
  Sense strand starting at position 1686 of SEQ ID NO: 1241726
gcacgaaaccucuagguug

SEQ ID NO: 1294951 - RNA, 19 nt, Artificial Sequence
  Description of Artificial Sequence: Synthetic oligonucleotide
  Antisense strand to SEQ ID NO: 1294950
caaccuagagguuucgugc

SEQ ID NO: 1294952 - RNA, 19 nt, Artificial Sequence
  Description of Artificial Sequence: Synthetic oligonucleotide
  Sense strand starting at position 1822 of SEQ ID NO: 1241726
ugguaagauugaucucuuc

SEQ ID NO: 1294953 - RNA, 19 nt, Artificial Sequence
  Description of Artificial Sequence: Synthetic oligonucleotide
  Antisense strand to SEQ ID NO: 1294952
gaagagaucaaucuuacca

SEQ ID NO: 1294954 - RNA, 19 nt, Artificial Sequence
  Description of Artificial Sequence: Synthetic oligonucleotide
  Sense strand starting at position 1830 of SEQ ID NO: 1241726
uugaucucuuccucaguga

SEQ ID NO: 1294955 - RNA, 19 nt, Artificial Sequence
  Description of Artificial Sequence: Synthetic oligonucleotide
  Antisense strand to SEQ ID NO: 1294954
ucacugaggaagagaucaa

SEQ ID NO: 1294956 - RNA, 19 nt, Artificial Sequence
  Description of Artificial Sequence: Synthetic oligonucleotide
  Sense strand starting at position 2264 of SEQ ID NO: 1241726
aaagguguauuauucugua

SEQ ID NO: 1294957 - RNA, 19 nt, Artificial Sequence
  Description of Artificial Sequence: Synthetic oligonucleotide
  Antisense strand to SEQ ID NO: 1294956
uacagaauaauacaccuuu

SEQ ID NO: 1294958 - RNA, 19 nt, Artificial Sequence
  Description of Artificial Sequence: Synthetic oligonucleotide
  Sense strand starting at position 2269 of SEQ ID NO: 1241726
uguauuauucuguaagcau

SEQ ID NO: 1294959 - RNA, 19 nt, Artificial Sequence
  Description of Artificial Sequence: Synthetic oligonucleotide
  Antisense strand to SEQ ID NO: 1294958
augcuuacagaauaauaca

SEQ ID NO: 1294960 - RNA, 19 nt, Artificial Sequence
  Description of Artificial Sequence: Synthetic oligonucleotide
  Sense strand starting at position 2304 of SEQ ID NO: 1241726
ggguguuacaggcaaucca

SEQ ID NO: 1294961 - RNA, 19 nt, Artificial Sequence
  Description of Artificial Sequence: Synthetic oligonucleotide
  Antisense strand to SEQ ID NO: 1294960
uggauugccuguaacaccc

SEQ ID NO: 1294962 - RNA, 19 nt, Artificial Sequence
  Description of Artificial Sequence: Synthetic oligonucleotide
  Sense strand starting at position 2385 of SEQ ID NO: 1241726
ucucauguaagacgaguua

SEQ ID NO: 1294963 - RNA, 19 nt, Artificial Sequence
  Description of Artificial Sequence: Synthetic oligonucleotide
  Antisense strand to SEQ ID NO: 1294962
uaacucgucuuacaugaga

SEQ ID NO: 1294964 - RNA, 19 nt, Artificial Sequence
  Description of Artificial Sequence: Synthetic oligonucleotide
  Sense strand starting at position 2398 of SEQ ID NO: 1241726
gaguuaacaugguuuggua

SEQ ID NO: 1294965 - RNA, 19 nt, Artificial Sequence
  Description of Artificial Sequence: Synthetic oligonucleotide
  Antisense strand to SEQ ID NO: 1294964
uaccaaaccauguuaacuc

SEQ ID NO: 1294966 - RNA, 19 nt, Artificial Sequence
  Description of Artificial Sequence: Synthetic oligonucleotide
  Sense strand starting at position 2489 of SEQ ID NO: 1241726
aaacguuaucucugugaca

SEQ ID NO: 1294967 - RNA, 19 nt, Artificial Sequence
  Description of Artificial Sequence: Synthetic oligonucleotide
  Antisense strand to SEQ ID NO: 1294966
ugucacagagauaacguuu

SEQ ID NO: 1294968 - RNA, 19 nt, Artificial Sequence
  Description of Artificial Sequence: Synthetic oligonucleotide
  Sense strand starting at position 2490 of SEQ ID NO: 1241726
aacguuaucucugugacaa

SEQ ID NO: 1294969 - RNA, 19 nt, Artificial Sequence
  Description of Artificial Sequence: Synthetic oligonucleotide
  Antisense strand to SEQ ID NO: 1294968
uugucacagagauaacguu

SEQ ID NO: 1294970 - RNA, 19 nt, Artificial Sequence
  Description of Artificial Sequence: Synthetic oligonucleotide
  Sense strand starting at position 2491 of SEQ ID NO: 1241726
acguuaucucugugacaaa

SEQ ID NO: 1294971 - RNA, 19 nt, Artificial Sequence
  Description of Artificial Sequence: Synthetic oligonucleotide
  Antisense strand to SEQ ID NO: 1294970
uuugucacagagauaacgu

SEQ ID NO: 1294972 - RNA, 19 nt, Artificial Sequence
  Description of Artificial Sequence: Synthetic oligonucleotide
  Sense strand starting at position 2570 of SEQ ID NO: 1241726
ggcacugucuaccuugaua

SEQ ID NO: 1294973 - RNA, 19 nt, Artificial Sequence
  Description of Artificial Sequence: Synthetic oligonucleotide
  Antisense strand to SEQ ID NO: 1294972
uaucaagguagacagugcc

SEQ ID NO: 1294974 - RNA, 19 nt, Artificial Sequence
  Description of Artificial Sequence: Synthetic oligonucleotide
  Sense strand starting at position 2573 of SEQ ID NO: 1241726
acugucuaccuugauacuu

SEQ ID NO: 1294975 - RNA, 19 nt, Artificial Sequence
  Description of Artificial Sequence: Synthetic oligonucleotide
  Antisense strand to SEQ ID NO: 1294974
aaguaucaagguagacagu

SEQ ID NO: 1294976 - RNA, 19 nt, Artificial Sequence
  Description of Artificial Sequence: Synthetic oligonucleotide
  Sense strand starting at position 2943 of SEQ ID NO: 1241726
aggugacaaccuugugaag

SEQ ID NO: 1294977 - RNA, 19 nt, Artificial Sequence
  Description of Artificial Sequence: Synthetic oligonucleotide
  Antisense strand to SEQ ID NO: 1294976
cuucacaagguugucaccu

SEQ ID NO: 1294978 - RNA, 19 nt, Artificial Sequence
  Description of Artificial Sequence: Synthetic oligonucleotide
  Sense strand starting at position 3136 of SEQ ID NO: 1241726
gagagaaguuaagauggaa

SEQ ID NO: 1294979 - RNA, 19 nt, Artificial Sequence
  Description of Artificial Sequence: Synthetic oligonucleotide
  Antisense strand to SEQ ID NO: 1294978
uuccaucuuaacuucucuc

SEQ ID NO: 1294980 - RNA, 19 nt, Artificial Sequence
  Description of Artificial Sequence: Synthetic oligonucleotide
  Sense strand starting at position 3490 of SEQ ID NO: 1241726
acaacuugggcucaaguuu

SEQ ID NO: 1294981 - RNA, 19 nt, Artificial Sequence
  Description of Artificial Sequence: Synthetic oligonucleotide
  Antisense strand to SEQ ID NO: 1294980
aaacuugagcccaaguugu

SEQ ID NO: 1294982 - RNA, 19 nt, Artificial Sequence
  Description of Artificial Sequence: Synthetic oligonucleotide
  Sense strand starting at position 3531 of SEQ ID NO: 1241726
ucugucuuugagcaaggaa

SEQ ID NO: 1294983 - RNA, 19 nt, Artificial Sequence
  Description of Artificial Sequence: Synthetic oligonucleotide
  Antisense strand to SEQ ID NO: 1294982
uuccuugcucaaagacaga

SEQ ID NO: 1294984 - RNA, 19 nt, Artificial Sequence
  Description of Artificial Sequence: Synthetic oligonucleotide
  Sense strand starting at position 3605 of SEQ ID NO: 1241726
ucauauguugguuggauga

SEQ ID NO: 1294985 - RNA, 19 nt, Artificial Sequence
  Description of Artificial Sequence: Synthetic oligonucleotide
  Antisense strand to SEQ ID NO: 1294984
ucauccaaccaacauauga

SEQ ID NO: 1294986 - RNA, 19 nt, Artificial Sequence
  Description of Artificial Sequence: Synthetic oligonucleotide
  Sense strand starting at position 3612 of SEQ ID NO: 1241726
uugguuggaugagugaaua

SEQ ID NO: 1294987 - RNA, 19 nt, Artificial Sequence
  Description of Artificial Sequence: Synthetic oligonucleotide
  Antisense strand to SEQ ID NO: 1294986
uauucacucauccaaccaa

SEQ ID NO: 1294988 - RNA, 19 nt, Artificial Sequence
  Description of Artificial Sequence: Synthetic oligonucleotide
  Sense strand starting at position 156 of SEQ ID NO: 1241727
ugcaauuagcuacagcuua

SEQ ID NO: 1294989 - RNA, 19 nt, Artificial Sequence
  Description of Artificial Sequence: Synthetic oligonucleotide
  Antisense strand to SEQ ID NO: 1294988
uaagcuguagcuaauugca

SEQ ID NO: 1294990 - RNA, 19 nt, Artificial Sequence
  Description of Artificial Sequence: Synthetic oligonucleotide
  Sense strand starting at position 293 of SEQ ID NO: 1241727
guuucuuuauaugccaaga

SEQ ID NO: 1294991 - RNA, 19 nt, Artificial Sequence
  Description of Artificial Sequence: Synthetic oligonucleotide
  Antisense strand to SEQ ID NO: 1294990
ucuuggcauauaaagaaac

SEQ ID NO: 1294992 - RNA, 19 nt, Artificial Sequence
  Description of Artificial Sequence: Synthetic oligonucleotide
  Sense strand starting at position 432 of SEQ ID NO: 1241727
ugaauaacuuugucuuuag

SEQ ID NO: 1294993 - RNA, 19 nt, Artificial Sequence
  Description of Artificial Sequence: Synthetic oligonucleotide
  Antisense strand to SEQ ID NO: 1294992
cuaaagacaaaguuauuca

SEQ ID NO: 1294994 - RNA, 19 nt, Artificial Sequence
  Description of Artificial Sequence: Synthetic oligonucleotide
  Sense strand starting at position 464 of SEQ ID NO: 1241727
cucaccaaucugugugacu

SEQ ID NO: 1294995 - RNA, 19 nt, Artificial Sequence
  Description of Artificial Sequence: Synthetic oligonucleotide
  Antisense strand to SEQ ID NO: 1294994
agucacacagauuggugag

SEQ ID NO: 1294996 - RNA, 19 nt, Artificial Sequence
  Description of Artificial Sequence: Synthetic oligonucleotide
  Sense strand starting at position 465 of SEQ ID NO: 1241727
ucaccaaucugugugacuu

SEQ ID NO: 1294997 - RNA, 19 nt, Artificial Sequence
  Description of Artificial Sequence: Synthetic oligonucleotide
  Antisense strand to SEQ ID NO: 1294996
aagucacacagauugguga

SEQ ID NO: 1294998 - RNA, 19 nt, Artificial Sequence
  Description of Artificial Sequence: Synthetic oligonucleotide
  Sense strand starting at position 471 of SEQ ID NO: 1241727
aucugugugacuuauaugu

SEQ ID NO: 1294999 - RNA, 19 nt, Artificial Sequence
  Description of Artificial Sequence: Synthetic oligonucleotide
  Antisense strand to SEQ ID NO: 1294998
acauauaagucacacagau

SEQ ID NO: 1295000 - RNA, 19 nt, Artificial Sequence
  Description of Artificial Sequence: Synthetic oligonucleotide
  Sense strand starting at position 524 of SEQ ID NO: 1241727
aucccuucuguguauauca

SEQ ID NO: 1295001 - RNA, 19 nt, Artificial Sequence
  Description of Artificial Sequence: Synthetic oligonucleotide
  Antisense strand to SEQ ID NO: 1295000
ugauauacacagaagggau

SEQ ID NO: 1295002 - RNA, 19 nt, Artificial Sequence
  Description of Artificial Sequence: Synthetic oligonucleotide
  Sense strand starting at position 526 of SEQ ID NO: 1241727
cccuucuguguauaucauu

SEQ ID NO: 1295003 - RNA, 19 nt, Artificial Sequence
  Description of Artificial Sequence: Synthetic oligonucleotide
  Antisense strand to SEQ ID NO: 1295002
aaugauauacacagaaggg

SEQ ID NO: 1295004 - RNA, 19 nt, Artificial Sequence
  Description of Artificial Sequence: Synthetic oligonucleotide
  Sense strand starting at position 564 of SEQ ID NO: 1241727
gguggaauguccuuacuuc

SEQ ID NO: 1295005 - RNA, 19 nt, Artificial Sequence
  Description of Artificial Sequence: Synthetic oligonucleotide
  Antisense strand to SEQ ID NO: 1295004
gaaguaaggacauuccacc

SEQ ID NO: 1295006 - RNA, 19 nt, Artificial Sequence
  Description of Artificial Sequence: Synthetic oligonucleotide
  Sense strand starting at position 592 of SEQ ID NO: 1241727
guauuagaggcaugagaaa

SEQ ID NO: 1295007 - RNA, 19 nt, Artificial Sequence
  Description of Artificial Sequence: Synthetic oligonucleotide
  Antisense strand to SEQ ID NO: 1295006
uuucucaugccucuaauac

SEQ ID NO: 1295008 - RNA, 19 nt, Artificial Sequence
  Description of Artificial Sequence: Synthetic oligonucleotide
  Sense strand starting at position 739 of SEQ ID NO: 1241727
uuaaauguguccuuaccau

SEQ ID NO: 1295009 - RNA, 19 nt, Artificial Sequence
  Description of Artificial Sequence: Synthetic oligonucleotide
  Antisense strand to SEQ ID NO: 1295008
augguaaggacacauuuaa

SEQ ID NO: 1295010 - RNA, 19 nt, Artificial Sequence
  Description of Artificial Sequence: Synthetic oligonucleotide
  Sense strand starting at position 820 of SEQ ID NO: 1241727
caucacgucucagugaaac

SEQ ID NO: 1295011 - RNA, 19 nt, Artificial Sequence
  Description of Artificial Sequence: Synthetic oligonucleotide
  Antisense strand to SEQ ID NO: 1295010
guuucacugagacgugaug

SEQ ID NO: 1295012 - RNA, 19 nt, Artificial Sequence
  Description of Artificial Sequence: Synthetic oligonucleotide
  Sense strand starting at position 843 of SEQ ID NO: 1241727
ugagaaguguucuuggagu

SEQ ID NO: 1295013 - RNA, 19 nt, Artificial Sequence
  Description of Artificial Sequence: Synthetic oligonucleotide
  Antisense strand to SEQ ID NO: 1295012
acuccaagaacacuucuca

SEQ ID NO: 1295014 - RNA, 19 nt, Artificial Sequence
  Description of Artificial Sequence: Synthetic oligonucleotide
  Sense strand starting at position 854 of SEQ ID NO: 1241727
cuuggaguguuaucaacua

SEQ ID NO: 1295015 - RNA, 19 nt, Artificial Sequence
  Description of Artificial Sequence: Synthetic oligonucleotide
  Antisense strand to SEQ ID NO: 1295014
uaguugauaacacuccaag

SEQ ID NO: 1295016 - RNA, 19 nt, Artificial Sequence
  Description of Artificial Sequence: Synthetic oligonucleotide
  Sense strand starting at position 1231 of SEQ ID NO: 1241727
uagaaaugcucuuuggagg

SEQ ID NO: 1295017 - RNA, 19 nt, Artificial Sequence
  Description of Artificial Sequence: Synthetic oligonucleotide
  Antisense strand to SEQ ID NO: 1295016
ccuccaaagagcauuucua

SEQ ID NO: 1295018 - RNA, 19 nt, Artificial Sequence
  Description of Artificial Sequence: Synthetic oligonucleotide
  Sense strand starting at position 1232 of SEQ ID NO: 1241727
agaaaugcucuuuggagga

SEQ ID NO: 1295019 - RNA, 19 nt, Artificial Sequence
  Description of Artificial Sequence: Synthetic oligonucleotide
  Antisense strand to SEQ ID NO: 1295018
uccuccaaagagcauuucu

SEQ ID NO: 1295020 - RNA, 19 nt, Artificial Sequence
  Description of Artificial Sequence: Synthetic oligonucleotide
  Sense strand starting at position 2092 of SEQ ID NO: 1241727
ugugaaagucuagauguag

SEQ ID NO: 1295021 - RNA, 19 nt, Artificial Sequence
  Description of Artificial Sequence: Synthetic oligonucleotide
  Antisense strand to SEQ ID NO: 1295020
cuacaucuagacuuucaca

SEQ ID NO: 1295022 - RNA, 19 nt, Artificial Sequence
  Description of Artificial Sequence: Synthetic oligonucleotide
  Sense strand starting at position 2098 of SEQ ID NO: 1241727
agucuagauguagauuauu

SEQ ID NO: 1295023 - RNA, 19 nt, Artificial Sequence
  Description of Artificial Sequence: Synthetic oligonucleotide
  Antisense strand to SEQ ID NO: 1295022
aauaaucuacaucuagacu

SEQ ID NO: 1295024 - RNA, 19 nt, Artificial Sequence
  Description of Artificial Sequence: Synthetic oligonucleotide
  Sense strand starting at position 2255 of SEQ ID NO: 1241727
uccaauugggcaugacauu

SEQ ID NO: 1295025 - RNA, 19 nt, Artificial Sequence
  Description of Artificial Sequence: Synthetic oligonucleotide
  Antisense strand to SEQ ID NO: 1295024
aaugucaugcccaauugga

SEQ ID NO: 1295026 - RNA, 19 nt, Artificial Sequence
  Description of Artificial Sequence: Synthetic oligonucleotide
  Sense strand starting at position 2340 of SEQ ID NO: 1241727
gcaucucugcuuuaugaca

SEQ ID NO: 1295027 - RNA, 19 nt, Artificial Sequence
  Description of Artificial Sequence: Synthetic oligonucleotide
  Antisense strand to SEQ ID NO: 1295026
ugucauaaagcagagaugc

SEQ ID NO: 1295028 - RNA, 19 nt, Artificial Sequence
  Description of Artificial Sequence: Synthetic oligonucleotide
  Sense strand starting at position 2348 of SEQ ID NO: 1241727
gcuuuaugacacuaaaguu

SEQ ID NO: 1295029 - RNA, 19 nt, Artificial Sequence
  Description of Artificial Sequence: Synthetic oligonucleotide
  Antisense strand to SEQ ID NO: 1295028
aacuuuagugucauaaagc

SEQ ID NO: 1295030 - RNA, 19 nt, Artificial Sequence
  Description of Artificial Sequence: Synthetic oligonucleotide
  Sense strand starting at position 2379 of SEQ ID NO: 1241727
ggaaguaugugucuggaau

SEQ ID NO: 1295031 - RNA, 19 nt, Artificial Sequence
  Description of Artificial Sequence: Synthetic oligonucleotide
  Antisense strand to SEQ ID NO: 1295030
auuccagacacauacuucc

SEQ ID NO: 1295032 - RNA, 19 nt, Artificial Sequence
  Description of Artificial Sequence: Synthetic oligonucleotide
  Sense strand starting at position 2380 of SEQ ID NO: 1241727
gaaguaugugucuggaauu

SEQ ID NO: 1295033 - RNA, 19 nt, Artificial Sequence
  Description of Artificial Sequence: Synthetic oligonucleotide
  Antisense strand to SEQ ID NO: 1295032
aauuccagacacauacuuc

SEQ ID NO: 1295034 - RNA, 19 nt, Artificial Sequence
  Description of Artificial Sequence: Synthetic oligonucleotide
  Sense strand starting at position 2493 of SEQ ID NO: 1241727
gaggguggcaaauggauua

SEQ ID NO: 1295035 - RNA, 19 nt, Artificial Sequence
  Description of Artificial Sequence: Synthetic oligonucleotide
  Antisense strand to SEQ ID NO: 1295034
uaauccauuugccacccuc

SEQ ID NO: 1295036 - RNA, 19 nt, Artificial Sequence
  Description of Artificial Sequence: Synthetic oligonucleotide
  Sense strand starting at position 2509 of SEQ ID NO: 1241727
uuaucuagcuuacugaaga

SEQ ID NO: 1295037 - RNA, 19 nt, Artificial Sequence
  Description of Artificial Sequence: Synthetic oligonucleotide
  Antisense strand to SEQ ID NO: 1295036
ucuucaguaagcuagauaa

SEQ ID NO: 1295038 - RNA, 19 nt, Artificial Sequence
  Description of Artificial Sequence: Synthetic oligonucleotide
  Sense strand starting at position 2523 of SEQ ID NO: 1241727
gaagacaugucccuggaau

SEQ ID NO: 1295039 - RNA, 19 nt, Artificial Sequence
  Description of Artificial Sequence: Synthetic oligonucleotide
  Antisense strand to SEQ ID NO: 1295038
auuccagggacaugucuuc

SEQ ID NO: 1295040 - RNA, 19 nt, Artificial Sequence
  Description of Artificial Sequence: Synthetic oligonucleotide
  Sense strand starting at position 2524 of SEQ ID NO: 1241727
aagacaugucccuggaauc

SEQ ID NO: 1295041 - RNA, 19 nt, Artificial Sequence
  Description of Artificial Sequence: Synthetic oligonucleotide
  Antisense strand to SEQ ID NO: 1295040
gauuccagggacaugucuu

SEQ ID NO: 1295042 - RNA, 19 nt, Artificial Sequence
  Description of Artificial Sequence: Synthetic oligonucleotide
  Sense strand starting at position 2534 of SEQ ID NO: 1241727
ccuggaaucucauugcuuu

SEQ ID NO: 1295043 - RNA, 19 nt, Artificial Sequence
  Description of Artificial Sequence: Synthetic oligonucleotide
  Antisense strand to SEQ ID NO: 1295042
aaagcaaugagauuccagg

SEQ ID NO: 1295044 - RNA, 19 nt, Artificial Sequence
  Description of Artificial Sequence: Synthetic oligonucleotide
  Sense strand starting at position 2807 of SEQ ID NO: 1241727
gcucaagaugaacguuaca

SEQ ID NO: 1295045 - RNA, 19 nt, Artificial Sequence
  Description of Artificial Sequence: Synthetic oligonucleotide
  Antisense strand to SEQ ID NO: 1295044
uguaacguucaucuugagc

SEQ ID NO: 1295046 - RNA, 19 nt, Artificial Sequence
  Description of Artificial Sequence: Synthetic oligonucleotide
  Sense strand starting at position 3030 of SEQ ID NO: 1241727
cuauuaaaugcuggcacaa

SEQ ID NO: 1295047 - RNA, 19 nt, Artificial Sequence
  Description of Artificial Sequence: Synthetic oligonucleotide
  Antisense strand to SEQ ID NO: 1295046
uugugccagcauuuaauag

SEQ ID NO: 1295048 - RNA, 19 nt, Artificial Sequence
  Description of Artificial Sequence: Synthetic oligonucleotide
  Sense strand starting at position 3042 of SEQ ID NO: 1241727
ggcacaaugccagggauaa

SEQ ID NO: 1295049 - RNA, 19 nt, Artificial Sequence
  Description of Artificial Sequence: Synthetic oligonucleotide
  Antisense strand to SEQ ID NO: 1295048
uuaucccuggcauugugcc

SEQ ID NO: 1295050 - RNA, 19 nt, Artificial Sequence
  Description of Artificial Sequence: Synthetic oligonucleotide
  Sense strand starting at position 3110 of SEQ ID NO: 1241727
ggaacugaguucuccacau

SEQ ID NO: 1295051 - RNA, 19 nt, Artificial Sequence
  Description of Artificial Sequence: Synthetic oligonucleotide
  Antisense strand to SEQ ID NO: 1295050
auguggagaacucaguucc

SEQ ID NO: 1295052 - RNA, 19 nt, Artificial Sequence
  Description of Artificial Sequence: Synthetic oligonucleotide
  Sense strand starting at position 3355 of SEQ ID NO: 1241727
ggcugucaaagccaaugau

SEQ ID NO: 1295053 - RNA, 19 nt, Artificial Sequence
  Description of Artificial Sequence: Synthetic oligonucleotide
  Antisense strand to SEQ ID NO: 1295052
aucauuggcuuugacagcc

SEQ ID NO: 1295054 - RNA, 19 nt, Artificial Sequence
  Description of Artificial Sequence: Synthetic oligonucleotide
  Sense strand starting at position 3358 of SEQ ID NO: 1241727
ugucaaagccaaugauucu

SEQ ID NO: 1295055 - RNA, 19 nt, Artificial Sequence
  Description of Artificial Sequence: Synthetic oligonucleotide
  Antisense strand to SEQ ID NO: 1295054
agaaucauuggcuuugaca

SEQ ID NO: 1295056 - RNA, 19 nt, Artificial Sequence
  Description of Artificial Sequence: Synthetic oligonucleotide
  Sense strand starting at position 3377 of SEQ ID NO: 1241727
caaacucuggugugucaga

SEQ ID NO: 1295057 - RNA, 19 nt, Artificial Sequence
  Description of Artificial Sequence: Synthetic oligonucleotide
  Antisense strand to SEQ ID NO: 1295056
ucugacacaccagaguuug

SEQ ID NO: 1295058 - RNA, 19 nt, Artificial Sequence
  Description of Artificial Sequence: Synthetic oligonucleotide
  Sense strand starting at position 3378 of SEQ ID NO: 1241727
aaacucuggugugucagaa

SEQ ID NO: 1295059 - RNA, 19 nt, Artificial Sequence
  Description of Artificial Sequence: Synthetic oligonucleotide
  Antisense strand to SEQ ID NO: 1295058
uucugacacaccagaguuu

SEQ ID NO: 1295060 - RNA, 19 nt, Artificial Sequence
  Description of Artificial Sequence: Synthetic oligonucleotide
  Sense strand starting at position 3454 of SEQ ID NO: 1241727
uagucugaaccuugggauu

SEQ ID NO: 1295061 - RNA, 19 nt, Artificial Sequence
  Description of Artificial Sequence: Synthetic oligonucleotide
  Antisense strand to SEQ ID NO: 1295060
aaucccaagguucagacua

SEQ ID NO: 1295062 - RNA, 19 nt, Artificial Sequence
  Description of Artificial Sequence: Synthetic oligonucleotide
  Sense strand starting at position 3525 of SEQ ID NO: 1241727
gauagacuuggaugucuca

SEQ ID NO: 1295063 - RNA, 19 nt, Artificial Sequence
  Description of Artificial Sequence: Synthetic oligonucleotide
  Antisense strand to SEQ ID NO: 1295062
ugagacauccaagucuauc

SEQ ID NO: 1295064 - RNA, 19 nt, Artificial Sequence
  Description of Artificial Sequence: Synthetic oligonucleotide
  Sense strand starting at position 3528 of SEQ ID NO: 1241727
agacuuggaugucucacua

SEQ ID NO: 1295065 - RNA, 19 nt, Artificial Sequence
  Description of Artificial Sequence: Synthetic oligonucleotide
  Antisense strand to SEQ ID NO: 1295064
uagugagacauccaagucu

SEQ ID NO: 1295066 - RNA, 19 nt, Artificial Sequence
  Description of Artificial Sequence: Synthetic oligonucleotide
  Sense strand starting at position 3893 of SEQ ID NO: 1241727
ucuguuuaguucucuauuu

SEQ ID NO: 1295067 - RNA, 19 nt, Artificial Sequence
  Description of Artificial Sequence: Synthetic oligonucleotide
  Antisense strand to SEQ ID NO: 1295066
aaauagagaacuaaacaga

SEQ ID NO: 1295068 - RNA, 19 nt, Artificial Sequence
  Description of Artificial Sequence: Synthetic oligonucleotide
  Sense strand starting at position 62 of SEQ ID NO: 1241728
acacguacacaagaaugua

SEQ ID NO: 1295069 - RNA, 19 nt, Artificial Sequence
  Description of Artificial Sequence: Synthetic oligonucleotide
  Antisense strand to SEQ ID NO: 1295068
uacauucuuguguacgugu

SEQ ID NO: 1295070 - RNA, 19 nt, Artificial Sequence
  Description of Artificial Sequence: Synthetic oligonucleotide
  Sense strand starting at position 154 of SEQ ID NO: 1241728
uguagugacucuccucaga

SEQ ID NO: 1295071 - RNA, 19 nt, Artificial Sequence
  Description of Artificial Sequence: Synthetic oligonucleotide
  Antisense strand to SEQ ID NO: 1295070
ucugaggagagucacuaca

SEQ ID NO: 1295072 - RNA, 19 nt, Artificial Sequence
  Description of Artificial Sequence: Synthetic oligonucleotide
  Sense strand starting at position 167 of SEQ ID NO: 1241728
cucagaacaugucugugua

SEQ ID NO: 1295073 - RNA, 19 nt, Artificial Sequence
  Description of Artificial Sequence: Synthetic oligonucleotide
  Antisense strand to SEQ ID NO: 1295072
uacacagacauguucugag

SEQ ID NO: 1295074 - RNA, 19 nt, Artificial Sequence
  Description of Artificial Sequence: Synthetic oligonucleotide
  Sense strand starting at position 170 of SEQ ID NO: 1241728
agaacaugucuguguagca

SEQ ID NO: 1295075 - RNA, 19 nt, Artificial Sequence
  Description of Artificial Sequence: Synthetic oligonucleotide
  Antisense strand to SEQ ID NO: 1295074
ugcuacacagacauguucu

SEQ ID NO: 1295076 - RNA, 19 nt, Artificial Sequence
  Description of Artificial Sequence: Synthetic oligonucleotide
  Sense strand starting at position 230 of SEQ ID NO: 1241728
guuaaacuguauccacuua

SEQ ID NO: 1295077 - RNA, 19 nt, Artificial Sequence
  Description of Artificial Sequence: Synthetic oligonucleotide
  Antisense strand to SEQ ID NO: 1295076
uaaguggauacaguuuaac

SEQ ID NO: 1295078 - RNA, 19 nt, Artificial Sequence
  Description of Artificial Sequence: Synthetic oligonucleotide
  Sense strand starting at position 289 of SEQ ID NO: 1241728
uguuaaaugcuagggaaag

SEQ ID NO: 1295079 - RNA, 19 nt, Artificial Sequence
  Description of Artificial Sequence: Synthetic oligonucleotide
  Antisense strand to SEQ ID NO: 1295078
cuuucccuagcauuuaaca

SEQ ID NO: 1295080 - RNA, 19 nt, Artificial Sequence
  Description of Artificial Sequence: Synthetic oligonucleotide
  Sense strand starting at position 314 of SEQ ID NO: 1241728
uuucuaccucagugcugau

SEQ ID NO: 1295081 - RNA, 19 nt, Artificial Sequence
  Description of Artificial Sequence: Synthetic oligonucleotide
  Antisense strand to SEQ ID NO: 1295080
aucagcacugagguagaaa

SEQ ID NO: 1295082 - RNA, 19 nt, Artificial Sequence
  Description of Artificial Sequence: Synthetic oligonucleotide
  Sense strand starting at position 327 of SEQ ID NO: 1241728
gcugaucauugucuuuaua

SEQ ID NO: 1295083 - RNA, 19 nt, Artificial Sequence
  Description of Artificial Sequence: Synthetic oligonucleotide
  Antisense strand to SEQ ID NO: 1295082
uauaaagacaaugaucagc

SEQ ID NO: 1295084 - RNA, 19 nt, Artificial Sequence
  Description of Artificial Sequence: Synthetic oligonucleotide
  Sense strand starting at position 755 of SEQ ID NO: 1241728
agguguuucuaguugacau

SEQ ID NO: 1295085 - RNA, 19 nt, Artificial Sequence
  Description of Artificial Sequence: Synthetic oligonucleotide
  Antisense strand to SEQ ID NO: 1295084
augucaacuagaaacaccu

SEQ ID NO: 1295086 - RNA, 19 nt, Artificial Sequence
  Description of Artificial Sequence: Synthetic oligonucleotide
  Sense strand starting at position 756 of SEQ ID NO: 1241728
gguguuucuaguugacauu

SEQ ID NO: 1295087 - RNA, 19 nt, Artificial Sequence
  Description of Artificial Sequence: Synthetic oligonucleotide
  Antisense strand to SEQ ID NO: 1295086
aaugucaacuagaaacacc

SEQ ID NO: 1295088 - RNA, 19 nt, Artificial Sequence
  Description of Artificial Sequence: Synthetic oligonucleotide
  Sense strand starting at position 934 of SEQ ID NO: 1241728
cugugcauguccuuuagaa

SEQ ID NO: 1295089 - RNA, 19 nt, Artificial Sequence
  Description of Artificial Sequence: Synthetic oligonucleotide
  Antisense strand to SEQ ID NO: 1295088
uucuaaaggacaugcacag

SEQ ID NO: 1295090 - RNA, 19 nt, Artificial Sequence
  Description of Artificial Sequence: Synthetic oligonucleotide
  Sense strand starting at position 1598 of SEQ ID NO: 1241728
ugggaagggccauguaauc

SEQ ID NO: 1295091 - RNA, 19 nt, Artificial Sequence
  Description of Artificial Sequence: Synthetic oligonucleotide
  Antisense strand to SEQ ID NO: 1295090
gauuacauggcccuuccca

SEQ ID NO: 1295092 - RNA, 19 nt, Artificial Sequence
  Description of Artificial Sequence: Synthetic oligonucleotide
  Sense strand starting at position 1605 of SEQ ID NO: 1241728
ggccauguaaucugguaac

SEQ ID NO: 1295093 - RNA, 19 nt, Artificial Sequence
  Description of Artificial Sequence: Synthetic oligonucleotide
  Antisense strand to SEQ ID NO: 1295092
guuaccagauuacauggcc

SEQ ID NO: 1295094 - RNA, 19 nt, Artificial Sequence
  Description of Artificial Sequence: Synthetic oligonucleotide
  Sense strand starting at position 1639 of SEQ ID NO: 1241728
ggauucgugcuagaugaag

SEQ ID NO: 1295095 - RNA, 19 nt, Artificial Sequence
  Description of Artificial Sequence: Synthetic oligonucleotide
  Antisense strand to SEQ ID NO: 1295094
cuucaucuagcacgaaucc

SEQ ID NO: 1295096 - RNA, 19 nt, Artificial Sequence
  Description of Artificial Sequence: Synthetic oligonucleotide
  Sense strand starting at position 1657 of SEQ ID NO: 1241728
guucgagcucuguuuggca

SEQ ID NO: 1295097 - RNA, 19 nt, Artificial Sequence
  Description of Artificial Sequence: Synthetic oligonucleotide
  Antisense strand to SEQ ID NO: 1295096
ugccaaacagagcucgaac

SEQ ID NO: 1295098 - RNA, 19 nt, Artificial Sequence
  Description of Artificial Sequence: Synthetic oligonucleotide
  Sense strand starting at position 1669 of SEQ ID NO: 1241728
uuuggcaaccuuggucaaa

SEQ ID NO: 1295099 - RNA, 19 nt, Artificial Sequence
  Description of Artificial Sequence: Synthetic oligonucleotide
  Antisense strand to SEQ ID NO: 1295098
uuugaccaagguugccaaa

SEQ ID NO: 1295100 - RNA, 19 nt, Artificial Sequence
  Description of Artificial Sequence: Synthetic oligonucleotide
  Sense strand starting at position 1670 of SEQ ID NO: 1241728
uuggcaaccuuggucaaau

SEQ ID NO: 1295101 - RNA, 19 nt, Artificial Sequence
  Description of Artificial Sequence: Synthetic oligonucleotide
  Antisense strand to SEQ ID NO: 1295100
auuugaccaagguugccaa

SEQ ID NO: 1295102 - RNA, 19 nt, Artificial Sequence
  Description of Artificial Sequence: Synthetic oligonucleotide
  Sense strand starting at position 1671 of SEQ ID NO: 1241728
uggcaaccuuggucaaauu

SEQ ID NO: 1295103 - RNA, 19 nt, Artificial Sequence
  Description of Artificial Sequence: Synthetic oligonucleotide
  Antisense strand to SEQ ID NO: 1295102
aauuugaccaagguugcca

SEQ ID NO: 1295104 - RNA, 19 nt, Artificial Sequence
  Description of Artificial Sequence: Synthetic oligonucleotide
  Sense strand starting at position 1672 of SEQ ID NO: 1241728
ggcaaccuuggucaaauua

SEQ ID NO: 1295105 - RNA, 19 nt, Artificial Sequence
  Description of Artificial Sequence: Synthetic oligonucleotide
  Antisense strand to SEQ ID NO: 1295104
uaauuugaccaagguugcc

SEQ ID NO: 1295106 - RNA, 19 nt, Artificial Sequence
  Description of Artificial Sequence: Synthetic oligonucleotide
  Sense strand starting at position 1748 of SEQ ID NO: 1241728
ucuuauggucgcuaugagu

SEQ ID NO: 1295107 - RNA, 19 nt, Artificial Sequence
  Description of Artificial Sequence: Synthetic oligonucleotide
  Antisense strand to SEQ ID NO: 1295106
acucauagcgaccauaaga

SEQ ID NO: 1295108 - RNA, 19 nt, Artificial Sequence
  Description of Artificial Sequence: Synthetic oligonucleotide
  Sense strand starting at position 2269 of SEQ ID NO: 1241728
agagaaauucucggugcaa

SEQ ID NO: 1295109 - RNA, 19 nt, Artificial Sequence
  Description of Artificial Sequence: Synthetic oligonucleotide
  Antisense strand to SEQ ID NO: 1295108
uugcaccgagaauuucucu

SEQ ID NO: 1295110 - RNA, 19 nt, Artificial Sequence
  Description of Artificial Sequence: Synthetic oligonucleotide
  Sense strand starting at position 2270 of SEQ ID NO: 1241728
gagaaauucucggugcaag

SEQ ID NO: 1295111 - RNA, 19 nt, Artificial Sequence
  Description of Artificial Sequence: Synthetic oligonucleotide
  Antisense strand to SEQ ID NO: 1295110
cuugcaccgagaauuucuc

SEQ ID NO: 1295112 - RNA, 19 nt, Artificial Sequence
  Description of Artificial Sequence: Synthetic oligonucleotide
  Sense strand starting at position 2271 of SEQ ID NO: 1241728
agaaauucucggugcaagu

SEQ ID NO: 1295113 - RNA, 19 nt, Artificial Sequence
  Description of Artificial Sequence: Synthetic oligonucleotide
  Antisense strand to SEQ ID NO: 1295112
acuugcaccgagaauuucu

SEQ ID NO: 1295114 - RNA, 19 nt, Artificial Sequence
  Description of Artificial Sequence: Synthetic oligonucleotide
  Sense strand starting at position 2288 of SEQ ID NO: 1241728
gugcauggaaagugagaaa

SEQ ID NO: 1295115 - RNA, 19 nt, Artificial Sequence
  Description of Artificial Sequence: Synthetic oligonucleotide
  Antisense strand to SEQ ID NO: 1295114
uuucucacuuuccaugcac

SEQ ID NO: 1295116 - RNA, 19 nt, Artificial Sequence
  Description of Artificial Sequence: Synthetic oligonucleotide
  Sense strand starting at position 2720 of SEQ ID NO: 1241728
ucccuagcaguuggaauua

SEQ ID NO: 1295117 - RNA, 19 nt, Artificial Sequence
  Description of Artificial Sequence: Synthetic oligonucleotide
  Antisense strand to SEQ ID NO: 1295116
uaauuccaacugcuaggga

SEQ ID NO: 1295118 - RNA, 19 nt, Artificial Sequence
  Description of Artificial Sequence: Synthetic oligonucleotide
  Sense strand starting at position 2828 of SEQ ID NO: 1241728
ccuggacucuuggucucaa

SEQ ID NO: 1295119 - RNA, 19 nt, Artificial Sequence
  Description of Artificial Sequence: Synthetic oligonucleotide
  Antisense strand to SEQ ID NO: 1295118
uugagaccaagaguccagg

SEQ ID NO: 1295120 - RNA, 19 nt, Artificial Sequence
  Description of Artificial Sequence: Synthetic oligonucleotide
  Sense strand starting at position 2898 of SEQ ID NO: 1241728
acugcauuccgccagggau

SEQ ID NO: 1295121 - RNA, 19 nt, Artificial Sequence
  Description of Artificial Sequence: Synthetic oligonucleotide
  Antisense strand to SEQ ID NO: 1295120
aucccuggcggaaugcagu

SEQ ID NO: 1295122 - RNA, 19 nt, Artificial Sequence
  Description of Artificial Sequence: Synthetic oligonucleotide
  Sense strand starting at position 2960 of SEQ ID NO: 1241728
ccuagucagguguaguauu

SEQ ID NO: 1295123 - RNA, 19 nt, Artificial Sequence
  Description of Artificial Sequence: Synthetic oligonucleotide
  Antisense strand to SEQ ID NO: 1295122
aauacuacaccugacuagg

SEQ ID NO: 1295124 - RNA, 19 nt, Artificial Sequence
  Description of Artificial Sequence: Synthetic oligonucleotide
  Sense strand starting at position 3002 of SEQ ID NO: 1241728
caucaaaucccacgugguu

SEQ ID NO: 1295125 - RNA, 19 nt, Artificial Sequence
  Description of Artificial Sequence: Synthetic oligonucleotide
  Antisense strand to SEQ ID NO: 1295124
aaccacgugggauuugaug

SEQ ID NO: 1295126 - RNA, 19 nt, Artificial Sequence
  Description of Artificial Sequence: Synthetic oligonucleotide
  Sense strand starting at position 3077 of SEQ ID NO: 1241728
cacaguuaggguugaggaa

SEQ ID NO: 1295127 - RNA, 19 nt, Artificial Sequence
  Description of Artificial Sequence: Synthetic oligonucleotide
  Antisense strand to SEQ ID NO: 1295126
uuccucaacccuaacugug

SEQ ID NO: 1295128 - RNA, 19 nt, Artificial Sequence
  Description of Artificial Sequence: Synthetic oligonucleotide
  Sense strand starting at position 3128 of SEQ ID NO: 1241728
ggguuucucuuuccugaaa

SEQ ID NO: 1295129 - RNA, 19 nt, Artificial Sequence
  Description of Artificial Sequence: Synthetic oligonucleotide
  Antisense strand to SEQ ID NO: 1295128
uuucaggaaagagaaaccc

SEQ ID NO: 1295130 - RNA, 19 nt, Artificial Sequence
  Description of Artificial Sequence: Synthetic oligonucleotide
  Sense strand starting at position 3129 of SEQ ID NO: 1241728
gguuucucuuuccugaaau

SEQ ID NO: 1295131 - RNA, 19 nt, Artificial Sequence
  Description of Artificial Sequence: Synthetic oligonucleotide
  Antisense strand to SEQ ID NO: 1295130
auuucaggaaagagaaacc

SEQ ID NO: 1295132 - RNA, 19 nt, Artificial Sequence
  Description of Artificial Sequence: Synthetic oligonucleotide
  Sense strand starting at position 3170 of SEQ ID NO: 1241728
ugcauaagagcuuaacugu

SEQ ID NO: 1295133 - RNA, 19 nt, Artificial Sequence
  Description of Artificial Sequence: Synthetic oligonucleotide
  Antisense strand to SEQ ID NO: 1295132
acaguuaagcucuuaugca

SEQ ID NO: 1295134 - RNA, 19 nt, Artificial Sequence
  Description of Artificial Sequence: Synthetic oligonucleotide
  Sense strand starting at position 3173 of SEQ ID NO: 1241728
auaagagcuuaacugugua

SEQ ID NO: 1295135 - RNA, 19 nt, Artificial Sequence
  Description of Artificial Sequence: Synthetic oligonucleotide
  Antisense strand to SEQ ID NO: 1295134
uacacaguuaagcucuuau

SEQ ID NO: 1295136 - RNA, 19 nt, Artificial Sequence
  Description of Artificial Sequence: Synthetic oligonucleotide
  Sense strand starting at position 3176 of SEQ ID NO: 1241728
agagcuuaacuguguagaa

SEQ ID NO: 1295137 - RNA, 19 nt, Artificial Sequence
  Description of Artificial Sequence: Synthetic oligonucleotide
  Antisense strand to SEQ ID NO: 1295136
uucuacacaguuaagcucu

SEQ ID NO: 1295138 - RNA, 19 nt, Artificial Sequence
  Description of Artificial Sequence: Synthetic oligonucleotide
  Sense strand starting at position 3177 of SEQ ID NO: 1241728
gagcuuaacuguguagaac

SEQ ID NO: 1295139 - RNA, 19 nt, Artificial Sequence
  Description of Artificial Sequence: Synthetic oligonucleotide
  Antisense strand to SEQ ID NO: 1295138
guucuacacaguuaagcuc

SEQ ID NO: 1295140 - RNA, 19 nt, Artificial Sequence
  Description of Artificial Sequence: Synthetic oligonucleotide
  Sense strand starting at position 3178 of SEQ ID NO: 1241728
agcuuaacuguguagaaca

SEQ ID NO: 1295141 - RNA, 19 nt, Artificial Sequence
  Description of Artificial Sequence: Synthetic oligonucleotide
  Antisense strand to SEQ ID NO: 1295140
uguucuacacaguuaagcu

SEQ ID NO: 1295142 - RNA, 19 nt, Artificial Sequence
  Description of Artificial Sequence: Synthetic oligonucleotide
  Sense strand starting at position 3508 of SEQ ID NO: 1241728
gugucuggccuauaauuga

SEQ ID NO: 1295143 - RNA, 19 nt, Artificial Sequence
  Description of Artificial Sequence: Synthetic oligonucleotide
  Antisense strand to SEQ ID NO: 1295142
ucaauuauaggccagacac

SEQ ID NO: 1295144 - RNA, 19 nt, Artificial Sequence
  Description of Artificial Sequence: Synthetic oligonucleotide
  Sense strand starting at position 3935 of SEQ ID NO: 1241728
uuuaaugucucuguaccaa

SEQ ID NO: 1295145 - RNA, 19 nt, Artificial Sequence
  Description of Artificial Sequence: Synthetic oligonucleotide
  Antisense strand to SEQ ID NO: 1295144
uugguacagagacauuaaa

SEQ ID NO: 1295146 - RNA, 19 nt, Artificial Sequence
  Description of Artificial Sequence: Synthetic oligonucleotide
  Sense strand starting at position 3953 of SEQ ID NO: 1241728
agcuuaucugcucaguaaa

SEQ ID NO: 1295147 - RNA, 19 nt, Artificial Sequence
  Description of Artificial Sequence: Synthetic oligonucleotide
  Antisense strand to SEQ ID NO: 1295146
uuuacugagcagauaagcu

SEQ ID NO: 1295148 - RNA, 19 nt, Artificial Sequence
  Description of Artificial Sequence: Synthetic oligonucleotide
  Sense strand starting at position 101 of SEQ ID NO: 1241729
cuuaaauuaugucugcuga

SEQ ID NO: 1295149 - RNA, 19 nt, Artificial Sequence
  Description of Artificial Sequence: Synthetic oligonucleotide
  Antisense strand to SEQ ID NO: 1295148
ucagcagacauaauuuaag

SEQ ID NO: 1295150 - RNA, 19 nt, Artificial Sequence
  Description of Artificial Sequence: Synthetic oligonucleotide
  Sense strand starting at position 182 of SEQ ID NO: 1241729
auagacuucucuccuuguu

SEQ ID NO: 1295151 - RNA, 19 nt, Artificial Sequence
  Description of Artificial Sequence: Synthetic oligonucleotide
  Antisense strand to SEQ ID NO: 1295150
aacaaggagagaagucuau

SEQ ID NO: 1295152 - RNA, 19 nt, Artificial Sequence
  Description of Artificial Sequence: Synthetic oligonucleotide
  Sense strand starting at position 416 of SEQ ID NO: 1241729
uuguaagucugaucuugac

SEQ ID NO: 1295153 - RNA, 19 nt, Artificial Sequence
  Description of Artificial Sequence: Synthetic oligonucleotide
  Antisense strand to SEQ ID NO: 1295152
gucaagaucagacuuacaa

SEQ ID NO: 1295154 - RNA, 19 nt, Artificial Sequence
  Description of Artificial Sequence: Synthetic oligonucleotide
  Sense strand starting at position 559 of SEQ ID NO: 1241729
uucguaaaugcacaauuau

SEQ ID NO: 1295155 - RNA, 19 nt, Artificial Sequence
  Description of Artificial Sequence: Synthetic oligonucleotide
  Antisense strand to SEQ ID NO: 1295154
auaauugugcauuuacgaa

SEQ ID NO: 1295156 - RNA, 19 nt, Artificial Sequence
  Description of Artificial Sequence: Synthetic oligonucleotide
  Sense strand starting at position 666 of SEQ ID NO: 1241729
cucaguuaugaagguaacu

SEQ ID NO: 1295157 - RNA, 19 nt, Artificial Sequence
  Description of Artificial Sequence: Synthetic oligonucleotide
  Antisense strand to SEQ ID NO: 1295156
aguuaccuucauaacugag

SEQ ID NO: 1295158 - RNA, 19 nt, Artificial Sequence
  Description of Artificial Sequence: Synthetic oligonucleotide
  Sense strand starting at position 671 of SEQ ID NO: 1241729
uuaugaagguaacucauau

SEQ ID NO: 1295159 - RNA, 19 nt, Artificial Sequence
  Description of Artificial Sequence: Synthetic oligonucleotide
  Antisense strand to SEQ ID NO: 1295158
auaugaguuaccuucauaa

SEQ ID NO: 1295160 - RNA, 19 nt, Artificial Sequence
  Description of Artificial Sequence: Synthetic oligonucleotide
  Sense strand starting at position 873 of SEQ ID NO: 1241729
ggcuauguucuacaauauu

SEQ ID NO: 1295161 - RNA, 19 nt, Artificial Sequence
  Description of Artificial Sequence: Synthetic oligonucleotide
  Antisense strand to SEQ ID NO: 1295160
aauauuguagaacauagcc

SEQ ID NO: 1295162 - RNA, 19 nt, Artificial Sequence
  Description of Artificial Sequence: Synthetic oligonucleotide
  Sense strand starting at position 1031 of SEQ ID NO: 1241729
ugucuauacccagaugucu

SEQ ID NO: 1295163 - RNA, 19 nt, Artificial Sequence
  Description of Artificial Sequence: Synthetic oligonucleotide
  Antisense strand to SEQ ID NO: 1295162
agacaucuggguauagaca

SEQ ID NO: 1295164 - RNA, 19 nt, Artificial Sequence
  Description of Artificial Sequence: Synthetic oligonucleotide
  Sense strand starting at position 1146 of SEQ ID NO: 1241729
aaaccuagcuggguagauu

SEQ ID NO: 1295165 - RNA, 19 nt, Artificial Sequence
  Description of Artificial Sequence: Synthetic oligonucleotide
  Antisense strand to SEQ ID NO: 1295164
aaucuacccagcuagguuu

SEQ ID NO: 1295166 - RNA, 19 nt, Artificial Sequence
  Description of Artificial Sequence: Synthetic oligonucleotide
  Sense strand starting at position 2308 of SEQ ID NO: 1241729
aagcuauuggccugaggaa

SEQ ID NO: 1295167 - RNA, 19 nt, Artificial Sequence
  Description of Artificial Sequence: Synthetic oligonucleotide
  Antisense strand to SEQ ID NO: 1295166
uuccucaggccaauagcuu

SEQ ID NO: 1295168 - RNA, 19 nt, Artificial Sequence
  Description of Artificial Sequence: Synthetic oligonucleotide
  Sense strand starting at position 2309 of SEQ ID NO: 1241729
agcuauuggccugaggaaa

SEQ ID NO: 1295169 - RNA, 19 nt, Artificial Sequence
  Description of Artificial Sequence: Synthetic oligonucleotide
  Antisense strand to SEQ ID NO: 1295168
uuuccucaggccaauagcu

SEQ ID NO: 1295170 - RNA, 19 nt, Artificial Sequence
  Description of Artificial Sequence: Synthetic oligonucleotide
  Sense strand starting at position 2320 of SEQ ID NO: 1241729
ugaggaaacuucucugacu

SEQ ID NO: 1295171 - RNA, 19 nt, Artificial Sequence
  Description of Artificial Sequence: Synthetic oligonucleotide
  Antisense strand to SEQ ID NO: 1295170
agucagagaaguuuccuca

SEQ ID NO: 1295172 - RNA, 19 nt, Artificial Sequence
  Description of Artificial Sequence: Synthetic oligonucleotide
  Sense strand starting at position 2322 of SEQ ID NO: 1241729
aggaaacuucucugacuug

SEQ ID NO: 1295173 - RNA, 19 nt, Artificial Sequence
  Description of Artificial Sequence: Synthetic oligonucleotide
  Antisense strand to SEQ ID NO: 1295172
caagucagagaaguuuccu

SEQ ID NO: 1295174 - RNA, 19 nt, Artificial Sequence
  Description of Artificial Sequence: Synthetic oligonucleotide
  Sense strand starting at position 2352 of SEQ ID NO: 1241729
gcagucuuucuggcgaugu

SEQ ID NO: 1295175 - RNA, 19 nt, Artificial Sequence
  Description of Artificial Sequence: Synthetic oligonucleotide
  Antisense strand to SEQ ID NO: 1295174
acaucgccagaaagacugc

SEQ ID NO: 1295176 - RNA, 19 nt, Artificial Sequence
  Description of Artificial Sequence: Synthetic oligonucleotide
  Sense strand starting at position 2439 of SEQ ID NO: 1241729
ucuauaaagucuuugagga

SEQ ID NO: 1295177 - RNA, 19 nt, Artificial Sequence
  Description of Artificial Sequence: Synthetic oligonucleotide
  Antisense strand to SEQ ID NO: 1295176
uccucaaagacuuuauaga

SEQ ID NO: 1295178 - RNA, 19 nt, Artificial Sequence
  Description of Artificial Sequence: Synthetic oligonucleotide
  Sense strand starting at position 2440 of SEQ ID NO: 1241729
cuauaaagucuuugaggau

SEQ ID NO: 1295179 - RNA, 19 nt, Artificial Sequence
  Description of Artificial Sequence: Synthetic oligonucleotide
  Antisense strand to SEQ ID NO: 1295178
auccucaaagacuuuauag

SEQ ID NO: 1295180 - RNA, 19 nt, Artificial Sequence
  Description of Artificial Sequence: Synthetic oligonucleotide
  Sense strand starting at position 2503 of SEQ ID NO: 1241729
aucaaugggugucuuggaa

SEQ ID NO: 1295181 - RNA, 19 nt, Artificial Sequence
  Description of Artificial Sequence: Synthetic oligonucleotide
  Antisense strand to SEQ ID NO: 1295180
uuccaagacacccauugau

SEQ ID NO: 1295182 - RNA, 19 nt, Artificial Sequence
  Description of Artificial Sequence: Synthetic oligonucleotide
  Sense strand starting at position 2618 of SEQ ID NO: 1241729
ugggcuuccuugguggaaa

SEQ ID NO: 1295183 - RNA, 19 nt, Artificial Sequence
  Description of Artificial Sequence: Synthetic oligonucleotide
  Antisense strand to SEQ ID NO: 1295182
uuuccaccaaggaagccca

SEQ ID NO: 1295184 - RNA, 19 nt, Artificial Sequence
  Description of Artificial Sequence: Synthetic oligonucleotide
  Sense strand starting at position 2621 of SEQ ID NO: 1241729
gcuuccuugguggaaaucu

SEQ ID NO: 1295185 - RNA, 19 nt, Artificial Sequence
  Description of Artificial Sequence: Synthetic oligonucleotide
  Antisense strand to SEQ ID NO: 1295184
agauuuccaccaaggaagc

SEQ ID NO: 1295186 - RNA, 19 nt, Artificial Sequence
  Description of Artificial Sequence: Synthetic oligonucleotide
  Sense strand starting at position 2637 of SEQ ID NO: 1241729
ucucaacacugcuuggaaa

SEQ ID NO: 1295187 - RNA, 19 nt, Artificial Sequence
  Description of Artificial Sequence: Synthetic oligonucleotide
  Antisense strand to SEQ ID NO: 1295186
uuuccaagcaguguugaga

SEQ ID NO: 1295188 - RNA, 19 nt, Artificial Sequence
  Description of Artificial Sequence: Synthetic oligonucleotide
  Sense strand starting at position 2638 of SEQ ID NO: 1241729
cucaacacugcuuggaaau

SEQ ID NO: 1295189 - RNA, 19 nt, Artificial Sequence
  Description of Artificial Sequence: Synthetic oligonucleotide
  Antisense strand to SEQ ID NO: 1295188
auuuccaagcaguguugag

SEQ ID NO: 1295190 - RNA, 19 nt, Artificial Sequence
  Description of Artificial Sequence: Synthetic oligonucleotide
  Sense strand starting at position 2639 of SEQ ID NO: 1241729
ucaacacugcuuggaaaug

SEQ ID NO: 1295191 - RNA, 19 nt, Artificial Sequence
  Description of Artificial Sequence: Synthetic oligonucleotide
  Antisense strand to SEQ ID NO: 1295190
cauuuccaagcaguguuga

SEQ ID NO: 1295192 - RNA, 19 nt, Artificial Sequence
  Description of Artificial Sequence: Synthetic oligonucleotide
  Sense strand starting at position 2644 of SEQ ID NO: 1241729
acugcuuggaaaugaguuu

SEQ ID NO: 1295193 - RNA, 19 nt, Artificial Sequence
  Description of Artificial Sequence: Synthetic oligonucleotide
  Antisense strand to SEQ ID NO: 1295192
aaacucauuuccaagcagu

SEQ ID NO: 1295194 - RNA, 19 nt, Artificial Sequence
  Description of Artificial Sequence: Synthetic oligonucleotide
  Sense strand starting at position 2651 of SEQ ID NO: 1241729
ggaaaugaguuuccuagac

SEQ ID NO: 1295195 - RNA, 19 nt, Artificial Sequence
  Description of Artificial Sequence: Synthetic oligonucleotide
  Antisense strand to SEQ ID NO: 1295194
gucuaggaaacucauuucc

SEQ ID NO: 1295196 - RNA, 19 nt, Artificial Sequence
  Description of Artificial Sequence: Synthetic oligonucleotide
  Sense strand starting at position 2655 of SEQ ID NO: 1241729
augaguuuccuagacuguc

SEQ ID NO: 1295197 - RNA, 19 nt, Artificial Sequence
  Description of Artificial Sequence: Synthetic oligonucleotide
  Antisense strand to SEQ ID NO: 1295196
gacagucuaggaaacucau

SEQ ID NO: 1295198 - RNA, 19 nt, Artificial Sequence
  Description of Artificial Sequence: Synthetic oligonucleotide
  Sense strand starting at position 2672 of SEQ ID NO: 1241729
ucugaugaagaauggcuua

SEQ ID NO: 1295199 - RNA, 19 nt, Artificial Sequence
  Description of Artificial Sequence: Synthetic oligonucleotide
  Antisense strand to SEQ ID NO: 1295198
uaagccauucuucaucaga

SEQ ID NO: 1295200 - RNA, 19 nt, Artificial Sequence
  Description of Artificial Sequence: Synthetic oligonucleotide
  Sense strand starting at position 2677 of SEQ ID NO: 1241729
ugaagaauggcuuagcauu

SEQ ID NO: 1295201 - RNA, 19 nt, Artificial Sequence
  Description of Artificial Sequence: Synthetic oligonucleotide
  Antisense strand to SEQ ID NO: 1295200
aaugcuaagccauucuuca

SEQ ID NO: 1295202 - RNA, 19 nt, Artificial Sequence
  Description of Artificial Sequence: Synthetic oligonucleotide
  Sense strand starting at position 2880 of SEQ ID NO: 1241729
gaugaagucuuauuauaug

SEQ ID NO: 1295203 - RNA, 19 nt, Artificial Sequence
  Description of Artificial Sequence: Synthetic oligonucleotide
  Antisense strand to SEQ ID NO: 1295202
cauauaauaagacuucauc

SEQ ID NO: 1295204 - RNA, 19 nt, Artificial Sequence
  Description of Artificial Sequence: Synthetic oligonucleotide
  Sense strand starting at position 2890 of SEQ ID NO: 1241729
uauuauauggcccaggcua

SEQ ID NO: 1295205 - RNA, 19 nt, Artificial Sequence
  Description of Artificial Sequence: Synthetic oligonucleotide
  Antisense strand to SEQ ID NO: 1295204
uagccugggccauauaaua

SEQ ID NO: 1295206 - RNA, 19 nt, Artificial Sequence
  Description of Artificial Sequence: Synthetic oligonucleotide
  Sense strand starting at position 3066 of SEQ ID NO: 1241729
cagucuuucccagagugag

SEQ ID NO: 1295207 - RNA, 19 nt, Artificial Sequence
  Description of Artificial Sequence: Synthetic oligonucleotide
  Antisense strand to SEQ ID NO: 1295206
cucacucugggaaagacug

SEQ ID NO: 1295208 - RNA, 19 nt, Artificial Sequence
  Description of Artificial Sequence: Synthetic oligonucleotide
  Sense strand starting at position 3080 of SEQ ID NO: 1241729
gugaguucuguccaucuca

SEQ ID NO: 1295209 - RNA, 19 nt, Artificial Sequence
  Description of Artificial Sequence: Synthetic oligonucleotide
  Antisense strand to SEQ ID NO: 1295208
ugagauggacagaacucac

SEQ ID NO: 1295210 - RNA, 19 nt, Artificial Sequence
  Description of Artificial Sequence: Synthetic oligonucleotide
  Sense strand starting at position 3258 of SEQ ID NO: 1241729
cccaaauguguuugaccau

SEQ ID NO: 1295211 - RNA, 19 nt, Artificial Sequence
  Description of Artificial Sequence: Synthetic oligonucleotide
  Antisense strand to SEQ ID NO: 1295210
auggucaaacacauuuggg

SEQ ID NO: 1295212 - RNA, 19 nt, Artificial Sequence
  Description of Artificial Sequence: Synthetic oligonucleotide
  Sense strand starting at position 3261 of SEQ ID NO: 1241729
aaauguguuugaccauaga

SEQ ID NO: 1295213 - RNA, 19 nt, Artificial Sequence
  Description of Artificial Sequence: Synthetic oligonucleotide
  Antisense strand to SEQ ID NO: 1295212
ucuauggucaaacacauuu

SEQ ID NO: 1295214 - RNA, 19 nt, Artificial Sequence
  Description of Artificial Sequence: Synthetic oligonucleotide
  Sense strand starting at position 3264 of SEQ ID NO: 1241729
uguguuugaccauagaacu

SEQ ID NO: 1295215 - RNA, 19 nt, Artificial Sequence
  Description of Artificial Sequence: Synthetic oligonucleotide
  Antisense strand to SEQ ID NO: 1295214
aguucuauggucaaacaca

SEQ ID NO: 1295216 - RNA, 19 nt, Artificial Sequence
  Description of Artificial Sequence: Synthetic oligonucleotide
  Sense strand starting at position 3388 of SEQ ID NO: 1241729
ucacaaauguuugcaaagu

SEQ ID NO: 1295217 - RNA, 19 nt, Artificial Sequence
  Description of Artificial Sequence: Synthetic oligonucleotide
  Antisense strand to SEQ ID NO: 1295216
acuuugcaaacauuuguga

SEQ ID NO: 1295218 - RNA, 19 nt, Artificial Sequence
  Description of Artificial Sequence: Synthetic oligonucleotide
  Sense strand starting at position 3936 of SEQ ID NO: 1241729
gagagcacauccuugguua

SEQ ID NO: 1295219 - RNA, 19 nt, Artificial Sequence
  Description of Artificial Sequence: Synthetic oligonucleotide
  Antisense strand to SEQ ID NO: 1295218
uaaccaaggaugugcucuc

SEQ ID NO: 1295220 - RNA, 19 nt, Artificial Sequence
  Description of Artificial Sequence: Synthetic oligonucleotide
  Sense strand starting at position 3938 of SEQ ID NO: 1241729
gagcacauccuugguuaga

SEQ ID NO: 1295221 - RNA, 19 nt, Artificial Sequence
  Description of Artificial Sequence: Synthetic oligonucleotide
  Antisense strand to SEQ ID NO: 1295220
ucuaaccaaggaugugcuc

SEQ ID NO: 1295222 - RNA, 19 nt, Artificial Sequence
  Description of Artificial Sequence: Synthetic oligonucleotide
  Sense strand starting at position 3939 of SEQ ID NO: 1241729
agcacauccuugguuagaa

SEQ ID NO: 1295223 - RNA, 19 nt, Artificial Sequence
  Description of Artificial Sequence: Synthetic oligonucleotide
  Antisense strand to SEQ ID NO: 1295222
uucuaaccaaggaugugcu

SEQ ID NO: 1295224 - RNA, 19 nt, Artificial Sequence
  Description of Artificial Sequence: Synthetic oligonucleotide
  Sense strand starting at position 3940 of SEQ ID NO: 1241729
gcacauccuugguuagaaa

SEQ ID NO: 1295225 - RNA, 19 nt, Artificial Sequence
  Description of Artificial Sequence: Synthetic oligonucleotide
  Antisense strand to SEQ ID NO: 1295224
uuucuaaccaaggaugugc

SEQ ID NO: 1295226 - RNA, 19 nt, Artificial Sequence
  Description of Artificial Sequence: Synthetic oligonucleotide
  Sense strand starting at position 3981 of SEQ ID NO: 1241729
gaaucuucucaagggcaag

SEQ ID NO: 1295227 - RNA, 19 nt, Artificial Sequence
  Description of Artificial Sequence: Synthetic oligonucleotide
  Antisense strand to SEQ ID NO: 1295226
cuugcccuugagaagauuc

SEQ ID NO: 1295228 - RNA, 19 nt, Artificial Sequence
  Description of Artificial Sequence: Synthetic oligonucleotide
  Sense strand starting at position 15 of SEQ ID NO: 1241730
gagauuugcuaagugcuca

SEQ ID NO: 1295229 - RNA, 19 nt, Artificial Sequence
  Description of Artificial Sequence: Synthetic oligonucleotide
  Antisense strand to SEQ ID NO: 1295228
ugagcacuuagcaaaucuc

SEQ ID NO: 1295230 - RNA, 19 nt, Artificial Sequence
  Description of Artificial Sequence: Synthetic oligonucleotide
  Sense strand starting at position 151 of SEQ ID NO: 1241730
agaggcaacuuauucuaaa

SEQ ID NO: 1295231 - RNA, 19 nt, Artificial Sequence
  Description of Artificial Sequence: Synthetic oligonucleotide
  Antisense strand to SEQ ID NO: 1295230
uuuagaauaaguugccucu

SEQ ID NO: 1295232 - RNA, 19 nt, Artificial Sequence
  Description of Artificial Sequence: Synthetic oligonucleotide
  Sense strand starting at position 442 of SEQ ID NO: 1241730
uaaaguuaucgguggacug

SEQ ID NO: 1295233 - RNA, 19 nt, Artificial Sequence
  Description of Artificial Sequence: Synthetic oligonucleotide
  Antisense strand to SEQ ID NO: 1295232
caguccaccgauaacuuua

SEQ ID NO: 1295234 - RNA, 19 nt, Artificial Sequence
  Description of Artificial Sequence: Synthetic oligonucleotide
  Sense strand starting at position 443 of SEQ ID NO: 1241730
aaaguuaucgguggacugu

SEQ ID NO: 1295235 - RNA, 19 nt, Artificial Sequence
  Description of Artificial Sequence: Synthetic oligonucleotide
  Antisense strand to SEQ ID NO: 1295234
acaguccaccgauaacuuu

SEQ ID NO: 1295236 - RNA, 19 nt, Artificial Sequence
  Description of Artificial Sequence: Synthetic oligonucleotide
  Sense strand starting at position 506 of SEQ ID NO: 1241730
guggauucuuaaccaaagu

SEQ ID NO: 1295237 - RNA, 19 nt, Artificial Sequence
  Description of Artificial Sequence: Synthetic oligonucleotide
  Antisense strand to SEQ ID NO: 1295236
acuuugguuaagaauccac

SEQ ID NO: 1295238 - RNA, 19 nt, Artificial Sequence
  Description of Artificial Sequence: Synthetic oligonucleotide
  Sense strand starting at position 590 of SEQ ID NO: 1241730
gagaguuccuuugucaagu

SEQ ID NO: 1295239 - RNA, 19 nt, Artificial Sequence
  Description of Artificial Sequence: Synthetic oligonucleotide
  Antisense strand to SEQ ID NO: 1295238
acuugacaaaggaacucuc

SEQ ID NO: 1295240 - RNA, 19 nt, Artificial Sequence
  Description of Artificial Sequence: Synthetic oligonucleotide
  Sense strand starting at position 630 of SEQ ID NO: 1241730
guuggcucagaaugaacaa

SEQ ID NO: 1295241 - RNA, 19 nt, Artificial Sequence
  Description of Artificial Sequence: Synthetic oligonucleotide
  Antisense strand to SEQ ID NO: 1295240
uuguucauucugagccaac

SEQ ID NO: 1295242 - RNA, 19 nt, Artificial Sequence
  Description of Artificial Sequence: Synthetic oligonucleotide
  Sense strand starting at position 733 of SEQ ID NO: 1241730
uuuaccaucugggcaaaua

SEQ ID NO: 1295243 - RNA, 19 nt, Artificial Sequence
  Description of Artificial Sequence: Synthetic oligonucleotide
  Antisense strand to SEQ ID NO: 1295242
uauuugcccagaugguaaa

SEQ ID NO: 1295244 - RNA, 19 nt, Artificial Sequence
  Description of Artificial Sequence: Synthetic oligonucleotide
  Sense strand starting at position 762 of SEQ ID NO: 1241730
ggccaagacuuaccuaaga

SEQ ID NO: 1295245 - RNA, 19 nt, Artificial Sequence
  Description of Artificial Sequence: Synthetic oligonucleotide
  Antisense strand to SEQ ID NO: 1295244
ucuuagguaagucuuggcc

SEQ ID NO: 1295246 - RNA, 19 nt, Artificial Sequence
  Description of Artificial Sequence: Synthetic oligonucleotide
  Sense strand starting at position 775 of SEQ ID NO: 1241730
cuaagaaagugucugaagu

SEQ ID NO: 1295247 - RNA, 19 nt, Artificial Sequence
  Description of Artificial Sequence: Synthetic oligonucleotide
  Antisense strand to SEQ ID NO: 1295246
acuucagacacuuucuuag

SEQ ID NO: 1295248 - RNA, 19 nt, Artificial Sequence
  Description of Artificial Sequence: Synthetic oligonucleotide
  Sense strand starting at position 776 of SEQ ID NO: 1241730
uaagaaagugucugaagua

SEQ ID NO: 1295249 - RNA, 19 nt, Artificial Sequence
  Description of Artificial Sequence: Synthetic oligonucleotide
  Antisense strand to SEQ ID NO: 1295248
uacuucagacacuuucuua

SEQ ID NO: 1295250 - RNA, 19 nt, Artificial Sequence
  Description of Artificial Sequence: Synthetic oligonucleotide
  Sense strand starting at position 846 of SEQ ID NO: 1241730
aaguguuaugauuggcaaa

SEQ ID NO: 1295251 - RNA, 19 nt, Artificial Sequence
  Description of Artificial Sequence: Synthetic oligonucleotide
  Antisense strand to SEQ ID NO: 1295250
uuugccaaucauaacacuu

SEQ ID NO: 1295252 - RNA, 19 nt, Artificial Sequence
  Description of Artificial Sequence: Synthetic oligonucleotide
  Sense strand starting at position 847 of SEQ ID NO: 1241730
aguguuaugauuggcaaac

SEQ ID NO: 1295253 - RNA, 19 nt, Artificial Sequence
  Description of Artificial Sequence: Synthetic oligonucleotide
  Antisense strand to SEQ ID NO: 1295252
guuugccaaucauaacacu

SEQ ID NO: 1295254 - RNA, 19 nt, Artificial Sequence
  Description of Artificial Sequence: Synthetic oligonucleotide
  Sense strand starting at position 878 of SEQ ID NO: 1241730
cugaaauugcagugaaaug

SEQ ID NO: 1295255 - RNA, 19 nt, Artificial Sequence
  Description of Artificial Sequence: Synthetic oligonucleotide
  Antisense strand to SEQ ID NO: 1295254
cauuucacugcaauuucag

SEQ ID NO: 1295256 - RNA, 19 nt, Artificial Sequence
  Description of Artificial Sequence: Synthetic oligonucleotide
  Sense strand starting at position 883 of SEQ ID NO: 1241730
auugcagugaaauggaaau

SEQ ID NO: 1295257 - RNA, 19 nt, Artificial Sequence
  Description of Artificial Sequence: Synthetic oligonucleotide
  Antisense strand to SEQ ID NO: 1295256
auuuccauuucacugcaau

SEQ ID NO: 1295258 - RNA, 19 nt, Artificial Sequence
  Description of Artificial Sequence: Synthetic oligonucleotide
  Sense strand starting at position 958 of SEQ ID NO: 1241730
gcaauuauuuaggaugaac

SEQ ID NO: 1295259 - RNA, 19 nt, Artificial Sequence
  Description of Artificial Sequence: Synthetic oligonucleotide
  Antisense strand to SEQ ID NO: 1295258
guucauccuaaauaauugc

SEQ ID NO: 1295260 - RNA, 19 nt, Artificial Sequence
  Description of Artificial Sequence: Synthetic oligonucleotide
  Sense strand starting at position 1008 of SEQ ID NO: 1241730
gugguaacacgagagcuuu

SEQ ID NO: 1295261 - RNA, 19 nt, Artificial Sequence
  Description of Artificial Sequence: Synthetic oligonucleotide
  Antisense strand to SEQ ID NO: 1295260
aaagcucucguguuaccac

SEQ ID NO: 1295262 - RNA, 19 nt, Artificial Sequence
  Description of Artificial Sequence: Synthetic oligonucleotide
  Sense strand starting at position 1088 of SEQ ID NO: 1241730
accugauggagugguacaa

SEQ ID NO: 1295263 - RNA, 19 nt, Artificial Sequence
  Description of Artificial Sequence: Synthetic oligonucleotide
  Antisense strand to SEQ ID NO: 1295262
uuguaccacuccaucaggu

SEQ ID NO: 1295264 - RNA, 19 nt, Artificial Sequence
  Description of Artificial Sequence: Synthetic oligonucleotide
  Sense strand starting at position 1654 of SEQ ID NO: 1241730
accaguggguccucaaauc

SEQ ID NO: 1295265 - RNA, 19 nt, Artificial Sequence
  Description of Artificial Sequence: Synthetic oligonucleotide
  Antisense strand to SEQ ID NO: 1295264
gauuugaggacccacuggu

SEQ ID NO: 1295266 - RNA, 19 nt, Artificial Sequence
  Description of Artificial Sequence: Synthetic oligonucleotide
  Sense strand starting at position 1679 of SEQ ID NO: 1241730
acagaaagcuucccaguuu

SEQ ID NO: 1295267 - RNA, 19 nt, Artificial Sequence
  Description of Artificial Sequence: Synthetic oligonucleotide
  Antisense strand to SEQ ID NO: 1295266
aaacugggaagcuuucugu

SEQ ID NO: 1295268 - RNA, 19 nt, Artificial Sequence
  Description of Artificial Sequence: Synthetic oligonucleotide
  Sense strand starting at position 1824 of SEQ ID NO: 1241730
cccugagucucccuacaca

SEQ ID NO: 1295269 - RNA, 19 nt, Artificial Sequence
  Description of Artificial Sequence: Synthetic oligonucleotide
  Antisense strand to SEQ ID NO: 1295268
uguguagggagacucaggg

SEQ ID NO: 1295270 - RNA, 19 nt, Artificial Sequence
  Description of Artificial Sequence: Synthetic oligonucleotide
  Sense strand starting at position 2023 of SEQ ID NO: 1241730
uuuagaugugcuuaguuag

SEQ ID NO: 1295271 - RNA, 19 nt, Artificial Sequence
  Description of Artificial Sequence: Synthetic oligonucleotide
  Antisense strand to SEQ ID NO: 1295270
cuaacuaagcacaucuaaa

SEQ ID NO: 1295272 - RNA, 19 nt, Artificial Sequence
  Description of Artificial Sequence: Synthetic oligonucleotide
  Sense strand starting at position 2026 of SEQ ID NO: 1241730
agaugugcuuaguuagaga

SEQ ID NO: 1295273 - RNA, 19 nt, Artificial Sequence
  Description of Artificial Sequence: Synthetic oligonucleotide
  Antisense strand to SEQ ID NO: 1295272
ucucuaacuaagcacaucu

SEQ ID NO: 1295274 - RNA, 19 nt, Artificial Sequence
  Description of Artificial Sequence: Synthetic oligonucleotide
  Sense strand starting at position 2087 of SEQ ID NO: 1241730
gggugugagaaaugcucuu

SEQ ID NO: 1295275 - RNA, 19 nt, Artificial Sequence
  Description of Artificial Sequence: Synthetic oligonucleotide
  Antisense strand to SEQ ID NO: 1295274
aagagcauuucucacaccc

SEQ ID NO: 1295276 - RNA, 19 nt, Artificial Sequence
  Description of Artificial Sequence: Synthetic oligonucleotide
  Sense strand starting at position 2390 of SEQ ID NO: 1241730
ccgaguaggcacugaaaca

SEQ ID NO: 1295277 - RNA, 19 nt, Artificial Sequence
  Description of Artificial Sequence: Synthetic oligonucleotide
  Antisense strand to SEQ ID NO: 1295276
uguuucagugccuacucgg

SEQ ID NO: 1295278 - RNA, 19 nt, Artificial Sequence
  Description of Artificial Sequence: Synthetic oligonucleotide
  Sense strand starting at position 2891 of SEQ ID NO: 1241730
aggaauggcuguccucauu

SEQ ID NO: 1295279 - RNA, 19 nt, Artificial Sequence
  Description of Artificial Sequence: Synthetic oligonucleotide
  Antisense strand to SEQ ID NO: 1295278
aaugaggacagccauuccu

SEQ ID NO: 1295280 - RNA, 19 nt, Artificial Sequence
  Description of Artificial Sequence: Synthetic oligonucleotide
  Sense strand starting at position 2998 of SEQ ID NO: 1241730
ucacaaggaucuguggaau

SEQ ID NO: 1295281 - RNA, 19 nt, Artificial Sequence
  Description of Artificial Sequence: Synthetic oligonucleotide
  Antisense strand to SEQ ID NO: 1295280
auuccacagauccuuguga

SEQ ID NO: 1295282 - RNA, 19 nt, Artificial Sequence
  Description of Artificial Sequence: Synthetic oligonucleotide
  Sense strand starting at position 3110 of SEQ ID NO: 1241730
cucagauggaucuguagac

SEQ ID NO: 1295283 - RNA, 19 nt, Artificial Sequence
  Description of Artificial Sequence: Synthetic oligonucleotide
  Antisense strand to SEQ ID NO: 1295282
gucuacagauccaucugag

SEQ ID NO: 1295284 - RNA, 19 nt, Artificial Sequence
  Description of Artificial Sequence: Synthetic oligonucleotide
  Sense strand starting at position 3111 of SEQ ID NO: 1241730
ucagauggaucuguagacu

SEQ ID NO: 1295285 - RNA, 19 nt, Artificial Sequence
  Description of Artificial Sequence: Synthetic oligonucleotide
  Antisense strand to SEQ ID NO: 1295284
agucuacagauccaucuga

SEQ ID NO: 1295286 - RNA, 19 nt, Artificial Sequence
  Description of Artificial Sequence: Synthetic oligonucleotide
  Sense strand starting at position 3170 of SEQ ID NO: 1241730
uuggguugauuccugggau

SEQ ID NO: 1295287 - RNA, 19 nt, Artificial Sequence
  Description of Artificial Sequence: Synthetic oligonucleotide
  Antisense strand to SEQ ID NO: 1295286
aucccaggaaucaacccaa

SEQ ID NO: 1295288 - RNA, 19 nt, Artificial Sequence
  Description of Artificial Sequence: Synthetic oligonucleotide
  Sense strand starting at position 3378 of SEQ ID NO: 1241730
ccucucuuucuaggguuua

SEQ ID NO: 1295289 - RNA, 19 nt, Artificial Sequence
  Description of Artificial Sequence: Synthetic oligonucleotide
  Antisense strand to SEQ ID NO: 1295288
uaaacccuagaaagagagg

SEQ ID NO: 1295290 - RNA, 19 nt, Artificial Sequence
  Description of Artificial Sequence: Synthetic oligonucleotide
  Sense strand starting at position 3383 of SEQ ID NO: 1241730
cuuucuaggguuuauaaca

SEQ ID NO: 1295291 - RNA, 19 nt, Artificial Sequence
  Description of Artificial Sequence: Synthetic oligonucleotide
  Antisense strand to SEQ ID NO: 1295290
uguuauaaacccuagaaag

SEQ ID NO: 1295292 - RNA, 19 nt, Artificial Sequence
  Description of Artificial Sequence: Synthetic oligonucleotide
  Sense strand starting at position 3561 of SEQ ID NO: 1241730
aggccacugguuuaaagua

SEQ ID NO: 1295293 - RNA, 19 nt, Artificial Sequence
  Description of Artificial Sequence: Synthetic oligonucleotide
  Antisense strand to SEQ ID NO: 1295292
uacuuuaaaccaguggccu

SEQ ID NO: 1295294 - RNA, 19 nt, Artificial Sequence
  Description of Artificial Sequence: Synthetic oligonucleotide
  Sense strand starting at position 3569 of SEQ ID NO: 1241730
gguuuaaaguaacuugaau

SEQ ID NO: 1295295 - RNA, 19 nt, Artificial Sequence
  Description of Artificial Sequence: Synthetic oligonucleotide
  Antisense strand to SEQ ID NO: 1295294
auucaaguuacuuuaaacc

SEQ ID NO: 1295296 - RNA, 19 nt, Artificial Sequence
  Description of Artificial Sequence: Synthetic oligonucleotide
  Sense strand starting at position 3610 of SEQ ID NO: 1241730
ccggaaauaaucuacguaa

SEQ ID NO: 1295297 - RNA, 19 nt, Artificial Sequence
  Description of Artificial Sequence: Synthetic oligonucleotide
  Antisense strand to SEQ ID NO: 1295296
uuacguagauuauuuccgg

SEQ ID NO: 1295298 - RNA, 19 nt, Artificial Sequence
  Description of Artificial Sequence: Synthetic oligonucleotide
  Sense strand starting at position 3612 of SEQ ID NO: 1241730
ggaaauaaucuacguaaga

SEQ ID NO: 1295299 - RNA, 19 nt, Artificial Sequence
  Description of Artificial Sequence: Synthetic oligonucleotide
  Antisense strand to SEQ ID NO: 1295298
ucuuacguagauuauuucc

SEQ ID NO: 1295300 - RNA, 19 nt, Artificial Sequence
  Description of Artificial Sequence: Synthetic oligonucleotide
  Sense strand starting at position 3623 of SEQ ID NO: 1241730
acguaagagaaggauuguu

SEQ ID NO: 1295301 - RNA, 19 nt, Artificial Sequence
  Description of Artificial Sequence: Synthetic oligonucleotide
  Antisense strand to SEQ ID NO: 1295300
aacaauccuucucuuacgu

SEQ ID NO: 1295302 - RNA, 19 nt, Artificial Sequence
  Description of Artificial Sequence: Synthetic oligonucleotide
  Sense strand starting at position 3631 of SEQ ID NO: 1241730
gaaggauuguugguuguuu

SEQ ID NO: 1295303 - RNA, 19 nt, Artificial Sequence
  Description of Artificial Sequence: Synthetic oligonucleotide
  Antisense strand to SEQ ID NO: 1295302
aaacaaccaacaauccuuc

SEQ ID NO: 1295304 - RNA, 19 nt, Artificial Sequence
  Description of Artificial Sequence: Synthetic oligonucleotide
  Sense strand starting at position 3832 of SEQ ID NO: 1241730
aaggcugacucgucuauga

SEQ ID NO: 1295305 - RNA, 19 nt, Artificial Sequence
  Description of Artificial Sequence: Synthetic oligonucleotide
  Antisense strand to SEQ ID NO: 1295304
ucauagacgagucagccuu

SEQ ID NO: 1295306 - RNA, 19 nt, Artificial Sequence
  Description of Artificial Sequence: Synthetic oligonucleotide
  Sense strand starting at position 3834 of SEQ ID NO: 1241730
ggcugacucgucuaugaug

SEQ ID NO: 1295307 - RNA, 19 nt, Artificial Sequence
  Description of Artificial Sequence: Synthetic oligonucleotide
  Antisense strand to SEQ ID NO: 1295306
caucauagacgagucagcc

SEQ ID NO: 1295308 - RNA, 19 nt, Artificial Sequence
  Description of Artificial Sequence: Synthetic oligonucleotide
  Sense strand starting at position 68 of SEQ ID NO: 1241731
gguaucguccaucagggua

SEQ ID NO: 1295309 - RNA, 19 nt, Artificial Sequence
  Description of Artificial Sequence: Synthetic oligonucleotide
  Antisense strand to SEQ ID NO: 1295308
uacccugauggacgauacc

SEQ ID NO: 1295310 - RNA, 19 nt, Artificial Sequence
  Description of Artificial Sequence: Synthetic oligonucleotide
  Sense strand starting at position 317 of SEQ ID NO: 1241731
gugugaaaugauggucauc

SEQ ID NO: 1295311 - RNA, 19 nt, Artificial Sequence
  Description of Artificial Sequence: Synthetic oligonucleotide
  Antisense strand to SEQ ID NO: 1295310
gaugaccaucauuucacac

SEQ ID NO: 1295312 - RNA, 19 nt, Artificial Sequence
  Description of Artificial Sequence: Synthetic oligonucleotide
  Sense strand starting at position 319 of SEQ ID NO: 1241731
gugaaaugauggucaucac

SEQ ID NO: 1295313 - RNA, 19 nt, Artificial Sequence
  Description of Artificial Sequence: Synthetic oligonucleotide
  Antisense strand to SEQ ID NO: 1295312
gugaugaccaucauuucac

SEQ ID NO: 1295314 - RNA, 19 nt, Artificial Sequence
  Description of Artificial Sequence: Synthetic oligonucleotide
  Sense strand starting at position 322 of SEQ ID NO: 1241731
aaaugauggucaucacugu

SEQ ID NO: 1295315 - RNA, 19 nt, Artificial Sequence
  Description of Artificial Sequence: Synthetic oligonucleotide
  Antisense strand to SEQ ID NO: 1295314
acagugaugaccaucauuu

SEQ ID NO: 1295316 - RNA, 19 nt, Artificial Sequence
  Description of Artificial Sequence: Synthetic oligonucleotide
  Sense strand starting at position 329 of SEQ ID NO: 1241731
ggucaucacuguucccuga

SEQ ID NO: 1295317 - RNA, 19 nt, Artificial Sequence
  Description of Artificial Sequence: Synthetic oligonucleotide
  Antisense strand to SEQ ID NO: 1295316
ucagggaacagugaugacc

SEQ ID NO: 1295318 - RNA, 19 nt, Artificial Sequence
  Description of Artificial Sequence: Synthetic oligonucleotide
  Sense strand starting at position 333 of SEQ ID NO: 1241731
aucacuguucccugaagcu

SEQ ID NO: 1295319 - RNA, 19 nt, Artificial Sequence
  Description of Artificial Sequence: Synthetic oligonucleotide
  Antisense strand to SEQ ID NO: 1295318
agcuucagggaacagugau

SEQ ID NO: 1295320 - RNA, 19 nt, Artificial Sequence
  Description of Artificial Sequence: Synthetic oligonucleotide
  Sense strand starting at position 738 of SEQ ID NO: 1241731
ggugucacguugaagaaga

SEQ ID NO: 1295321 - RNA, 19 nt, Artificial Sequence
  Description of Artificial Sequence: Synthetic oligonucleotide
  Antisense strand to SEQ ID NO: 1295320
ucuucuucaacgugacacc

SEQ ID NO: 1295322 - RNA, 19 nt, Artificial Sequence
  Description of Artificial Sequence: Synthetic oligonucleotide
  Sense strand starting at position 907 of SEQ ID NO: 1241731
ugguuaagagccuagaauu

SEQ ID NO: 1295323 - RNA, 19 nt, Artificial Sequence
  Description of Artificial Sequence: Synthetic oligonucleotide
  Antisense strand to SEQ ID NO: 1295322
aauucuaggcucuuaacca

SEQ ID NO: 1295324 - RNA, 19 nt, Artificial Sequence
  Description of Artificial Sequence: Synthetic oligonucleotide
  Sense strand starting at position 945 of SEQ ID NO: 1241731
gcaaucuuaccucggacaa

SEQ ID NO: 1295325 - RNA, 19 nt, Artificial Sequence
  Description of Artificial Sequence: Synthetic oligonucleotide
  Antisense strand to SEQ ID NO: 1295324
uuguccgagguaagauugc

SEQ ID NO: 1295326 - RNA, 19 nt, Artificial Sequence
  Description of Artificial Sequence: Synthetic oligonucleotide
  Sense strand starting at position 983 of SEQ ID NO: 1241731
aguuucccaucuguagaga

SEQ ID NO: 1295327 - RNA, 19 nt, Artificial Sequence
  Description of Artificial Sequence: Synthetic oligonucleotide
  Antisense strand to SEQ ID NO: 1295326
ucucuacagaugggaaacu

SEQ ID NO: 1295328 - RNA, 19 nt, Artificial Sequence
  Description of Artificial Sequence: Synthetic oligonucleotide
  Sense strand starting at position 1033 of SEQ ID NO: 1241731
acuggacauacguguucua

SEQ ID NO: 1295329 - RNA, 19 nt, Artificial Sequence
  Description of Artificial Sequence: Synthetic oligonucleotide
  Antisense strand to SEQ ID NO: 1295328
uagaacacguauguccagu

SEQ ID NO: 1295330 - RNA, 19 nt, Artificial Sequence
  Description of Artificial Sequence: Synthetic oligonucleotide
  Sense strand starting at position 1036 of SEQ ID NO: 1241731
ggacauacguguucuaaua

SEQ ID NO: 1295331 - RNA, 19 nt, Artificial Sequence
  Description of Artificial Sequence: Synthetic oligonucleotide
  Antisense strand to SEQ ID NO: 1295330
uauuagaacacguaugucc

SEQ ID NO: 1295332 - RNA, 19 nt, Artificial Sequence
  Description of Artificial Sequence: Synthetic oligonucleotide
  Sense strand starting at position 1078 of SEQ ID NO: 1241731
uucaguguauguuuggaga

SEQ ID NO: 1295333 - RNA, 19 nt, Artificial Sequence
  Description of Artificial Sequence: Synthetic oligonucleotide
  Antisense strand to SEQ ID NO: 1295332
ucuccaaacauacacugaa

SEQ ID NO: 1295334 - RNA, 19 nt, Artificial Sequence
  Description of Artificial Sequence: Synthetic oligonucleotide
  Sense strand starting at position 1257 of SEQ ID NO: 1241731
cgacaucacuuguuaaauu

SEQ ID NO: 1295335 - RNA, 19 nt, Artificial Sequence
  Description of Artificial Sequence: Synthetic oligonucleotide
  Antisense strand to SEQ ID NO: 1295334
aauuuaacaagugaugucg

SEQ ID NO: 1295336 - RNA, 19 nt, Artificial Sequence
  Description of Artificial Sequence: Synthetic oligonucleotide
  Sense strand starting at position 1413 of SEQ ID NO: 1241731
gauaaucggccauauggau

SEQ ID NO: 1295337 - RNA, 19 nt, Artificial Sequence
  Description of Artificial Sequence: Synthetic oligonucleotide
  Antisense strand to SEQ ID NO: 1295336
auccauauggccgauuauc

SEQ ID NO: 1295338 - RNA, 19 nt, Artificial Sequence
  Description of Artificial Sequence: Synthetic oligonucleotide
  Sense strand starting at position 1419 of SEQ ID NO: 1241731
cggccauauggaugaguca

SEQ ID NO: 1295339 - RNA, 19 nt, Artificial Sequence
  Description of Artificial Sequence: Synthetic oligonucleotide
  Antisense strand to SEQ ID NO: 1295338
ugacucauccauauggccg

SEQ ID NO: 1295340 - RNA, 19 nt, Artificial Sequence
  Description of Artificial Sequence: Synthetic oligonucleotide
  Sense strand starting at position 1489 of SEQ ID NO: 1241731
ugcuguagucaacauuaua

SEQ ID NO: 1295341 - RNA, 19 nt, Artificial Sequence
  Description of Artificial Sequence: Synthetic oligonucleotide
  Antisense strand to SEQ ID NO: 1295340
uauaauguugacuacagca

SEQ ID NO: 1295342 - RNA, 19 nt, Artificial Sequence
  Description of Artificial Sequence: Synthetic oligonucleotide
  Sense strand starting at position 2266 of SEQ ID NO: 1241731
gcccuuucuucuucuggaa

SEQ ID NO: 1295343 - RNA, 19 nt, Artificial Sequence
  Description of Artificial Sequence: Synthetic oligonucleotide
  Antisense strand to SEQ ID NO: 1295342
uuccagaagaagaaagggc

SEQ ID NO: 1295344 - RNA, 19 nt, Artificial Sequence
  Description of Artificial Sequence: Synthetic oligonucleotide
  Sense strand starting at position 2561 of SEQ ID NO: 1241731
augugcuguggacaucuaa

SEQ ID NO: 1295345 - RNA, 19 nt, Artificial Sequence
  Description of Artificial Sequence: Synthetic oligonucleotide
  Antisense strand to SEQ ID NO: 1295344
uuagauguccacagcacau

SEQ ID NO: 1295346 - RNA, 19 nt, Artificial Sequence
  Description of Artificial Sequence: Synthetic oligonucleotide
  Sense strand starting at position 2619 of SEQ ID NO: 1241731
gggcuuugaguuuacuagu

SEQ ID NO: 1295347 - RNA, 19 nt, Artificial Sequence
  Description of Artificial Sequence: Synthetic oligonucleotide
  Antisense strand to SEQ ID NO: 1295346
acuaguaaacucaaagccc

SEQ ID NO: 1295348 - RNA, 19 nt, Artificial Sequence
  Description of Artificial Sequence: Synthetic oligonucleotide
  Sense strand starting at position 2636 of SEQ ID NO: 1241731
gugaaagcauaguucgaaa

SEQ ID NO: 1295349 - RNA, 19 nt, Artificial Sequence
  Description of Artificial Sequence: Synthetic oligonucleotide
  Antisense strand to SEQ ID NO: 1295348
uuucgaacuaugcuuucac

SEQ ID NO: 1295350 - RNA, 19 nt, Artificial Sequence
  Description of Artificial Sequence: Synthetic oligonucleotide
  Sense strand starting at position 2638 of SEQ ID NO: 1241731
gaaagcauaguucgaaaug

SEQ ID NO: 1295351 - RNA, 19 nt, Artificial Sequence
  Description of Artificial Sequence: Synthetic oligonucleotide
  Antisense strand to SEQ ID NO: 1295350
cauuucgaacuaugcuuuc

SEQ ID NO: 1295352 - RNA, 19 nt, Artificial Sequence
  Description of Artificial Sequence: Synthetic oligonucleotide
  Sense strand starting at position 3025 of SEQ ID NO: 1241731
cucuuugccuauccagaga

SEQ ID NO: 1295353 - RNA, 19 nt, Artificial Sequence
  Description of Artificial Sequence: Synthetic oligonucleotide
  Antisense strand to SEQ ID NO: 1295352
ucucuggauaggcaaagag

SEQ ID NO: 1295354 - RNA, 19 nt, Artificial Sequence
  Description of Artificial Sequence: Synthetic oligonucleotide
  Sense strand starting at position 3041 of SEQ ID NO: 1241731
agagccuaauucccaagaa

SEQ ID NO: 1295355 - RNA, 19 nt, Artificial Sequence
  Description of Artificial Sequence: Synthetic oligonucleotide
  Antisense strand to SEQ ID NO: 1295354
uucuugggaauuaggcucu

SEQ ID NO: 1295356 - RNA, 19 nt, Artificial Sequence
  Description of Artificial Sequence: Synthetic oligonucleotide
  Sense strand starting at position 3156 of SEQ ID NO: 1241731
ggcccuugagcucagcaaa

SEQ ID NO: 1295357 - RNA, 19 nt, Artificial Sequence
  Description of Artificial Sequence: Synthetic oligonucleotide
  Antisense strand to SEQ ID NO: 1295356
uuugcugagcucaagggcc

SEQ ID NO: 1295358 - RNA, 19 nt, Artificial Sequence
  Description of Artificial Sequence: Synthetic oligonucleotide
  Sense strand starting at position 3290 of SEQ ID NO: 1241731
agaugacaagcucgcuaau

SEQ ID NO: 1295359 - RNA, 19 nt, Artificial Sequence
  Description of Artificial Sequence: Synthetic oligonucleotide
  Antisense strand to SEQ ID NO: 1295358
auuagcgagcuugucaucu

SEQ ID NO: 1295360 - RNA, 19 nt, Artificial Sequence
  Description of Artificial Sequence: Synthetic oligonucleotide
  Sense strand starting at position 3292 of SEQ ID NO: 1241731
augacaagcucgcuaauaa

SEQ ID NO: 1295361 - RNA, 19 nt, Artificial Sequence
  Description of Artificial Sequence: Synthetic oligonucleotide
  Antisense strand to SEQ ID NO: 1295360
uuauuagcgagcuugucau

SEQ ID NO: 1295362 - RNA, 19 nt, Artificial Sequence
  Description of Artificial Sequence: Synthetic oligonucleotide
  Sense strand starting at position 3293 of SEQ ID NO: 1241731
ugacaagcucgcuaauaag

SEQ ID NO: 1295363 - RNA, 19 nt, Artificial Sequence
  Description of Artificial Sequence: Synthetic oligonucleotide
  Antisense strand to SEQ ID NO: 1295362
cuuauuagcgagcuuguca

SEQ ID NO: 1295364 - RNA, 19 nt, Artificial Sequence
  Description of Artificial Sequence: Synthetic oligonucleotide
  Sense strand starting at position 3340 of SEQ ID NO: 1241731
agagcugugaagugagaaa

SEQ ID NO: 1295365 - RNA, 19 nt, Artificial Sequence
  Description of Artificial Sequence: Synthetic oligonucleotide
  Antisense strand to SEQ ID NO: 1295364
uuucucacuucacagcucu

SEQ ID NO: 1295366 - RNA, 19 nt, Artificial Sequence
  Description of Artificial Sequence: Synthetic oligonucleotide
  Sense strand starting at position 3491 of SEQ ID NO: 1241731
gaaucagaucugugugucu

SEQ ID NO: 1295367 - RNA, 19 nt, Artificial Sequence
  Description of Artificial Sequence: Synthetic oligonucleotide
  Antisense strand to SEQ ID NO: 1295366
agacacacagaucugauuc

SEQ ID NO: 1295368 - RNA, 19 nt, Artificial Sequence
  Description of Artificial Sequence: Synthetic oligonucleotide
  Sense strand starting at position 3513 of SEQ ID NO: 1241731
uaagcagaauguucugaga

SEQ ID NO: 1295369 - RNA, 19 nt, Artificial Sequence
  Description of Artificial Sequence: Synthetic oligonucleotide
  Antisense strand to SEQ ID NO: 1295368
ucucagaacauucugcuua

SEQ ID NO: 1295370 - RNA, 19 nt, Artificial Sequence
  Description of Artificial Sequence: Synthetic oligonucleotide
  Sense strand starting at position 3594 of SEQ ID NO: 1241731
ucuuaauauugagcaagaa

SEQ ID NO: 1295371 - RNA, 19 nt, Artificial Sequence
  Description of Artificial Sequence: Synthetic oligonucleotide
  Antisense strand to SEQ ID NO: 1295370
uucuugcucaauauuaaga

SEQ ID NO: 1295372 - RNA, 19 nt, Artificial Sequence
  Description of Artificial Sequence: Synthetic oligonucleotide
  Sense strand starting at position 3617 of SEQ ID NO: 1241731
caucauuauugcgugagau

SEQ ID NO: 1295373 - RNA, 19 nt, Artificial Sequence
  Description of Artificial Sequence: Synthetic oligonucleotide
  Antisense strand to SEQ ID NO: 1295372
aucucacgcaauaaugaug

SEQ ID NO: 1295374 - RNA, 19 nt, Artificial Sequence
  Description of Artificial Sequence: Synthetic oligonucleotide
  Sense strand starting at position 3650 of SEQ ID NO: 1241731
gagagaggguuccaauaaa

SEQ ID NO: 1295375 - RNA, 19 nt, Artificial Sequence
  Description of Artificial Sequence: Synthetic oligonucleotide
  Antisense strand to SEQ ID NO: 1295374
uuuauuggaacccucucuc

SEQ ID NO: 1295376 - RNA, 19 nt, Artificial Sequence
  Description of Artificial Sequence: Synthetic oligonucleotide
  Sense strand starting at position 3674 of SEQ ID NO: 1241731
augaauuaaggaugucugu

SEQ ID NO: 1295377 - RNA, 19 nt, Artificial Sequence
  Description of Artificial Sequence: Synthetic oligonucleotide
  Antisense strand to SEQ ID NO: 1295376
acagacauccuuaauucau

SEQ ID NO: 1295378 - RNA, 19 nt, Artificial Sequence
  Description of Artificial Sequence: Synthetic oligonucleotide
  Sense strand starting at position 3680 of SEQ ID NO: 1241731
uaaggaugucuguggaguu

SEQ ID NO: 1295379 - RNA, 19 nt, Artificial Sequence
  Description of Artificial Sequence: Synthetic oligonucleotide
  Antisense strand to SEQ ID NO: 1295378
aacuccacagacauccuua

SEQ ID NO: 1295380 - RNA, 19 nt, Artificial Sequence
  Description of Artificial Sequence: Synthetic oligonucleotide
  Sense strand starting at position 3690 of SEQ ID NO: 1241731
uguggaguucauugggcaa

SEQ ID NO: 1295381 - RNA, 19 nt, Artificial Sequence
  Description of Artificial Sequence: Synthetic oligonucleotide
  Antisense strand to SEQ ID NO: 1295380
uugcccaaugaacuccaca

SEQ ID NO: 1295382 - RNA, 19 nt, Artificial Sequence
  Description of Artificial Sequence: Synthetic oligonucleotide
  Sense strand starting at position 3693 of SEQ ID NO: 1241731
ggaguucauugggcaacuu

SEQ ID NO: 1295383 - RNA, 19 nt, Artificial Sequence
  Description of Artificial Sequence: Synthetic oligonucleotide
  Antisense strand to SEQ ID NO: 1295382
aaguugcccaaugaacucc

SEQ ID NO: 1295384 - RNA, 19 nt, Artificial Sequence
  Description of Artificial Sequence: Synthetic oligonucleotide
  Sense strand starting at position 3837 of SEQ ID NO: 1241731
ccauaagccuagcuuuaga

SEQ ID NO: 1295385 - RNA, 19 nt, Artificial Sequence
  Description of Artificial Sequence: Synthetic oligonucleotide
  Antisense strand to SEQ ID NO: 1295384
ucuaaagcuaggcuuaugg

SEQ ID NO: 1295386 - RNA, 19 nt, Artificial Sequence
  Description of Artificial Sequence: Synthetic oligonucleotide
  Sense strand starting at position 3888 of SEQ ID NO: 1241731
ugauuucccugaggauaag

SEQ ID NO: 1295387 - RNA, 19 nt, Artificial Sequence
  Description of Artificial Sequence: Synthetic oligonucleotide
  Antisense strand to SEQ ID NO: 1295386
cuuauccucagggaaauca

SEQ ID NO: 1295388 - RNA, 19 nt, Artificial Sequence
  Description of Artificial Sequence: Synthetic oligonucleotide
  Sense strand starting at position 105 of SEQ ID NO: 1241732
uuuaaagugucagugaacu

SEQ ID NO: 1295389 - RNA, 19 nt, Artificial Sequence
  Description of Artificial Sequence: Synthetic oligonucleotide
  Antisense strand to SEQ ID NO: 1295388
aguucacugacacuuuaaa

SEQ ID NO: 1295390 - RNA, 19 nt, Artificial Sequence
  Description of Artificial Sequence: Synthetic oligonucleotide
  Sense strand starting at position 213 of SEQ ID NO: 1241732
ggcccacaugauuaaacuu

SEQ ID NO: 1295391 - RNA, 19 nt, Artificial Sequence
  Description of Artificial Sequence: Synthetic oligonucleotide
  Antisense strand to SEQ ID NO: 1295390
aaguuuaaucaugugggcc

SEQ ID NO: 1295392 - RNA, 19 nt, Artificial Sequence
  Description of Artificial Sequence: Synthetic oligonucleotide
  Sense strand starting at position 418 of SEQ ID NO: 1241732
cagugaauuguuuacgaag

SEQ ID NO: 1295393 - RNA, 19 nt, Artificial Sequence
  Description of Artificial Sequence: Synthetic oligonucleotide
  Antisense strand to SEQ ID NO: 1295392
cuucguaaacaauucacug

SEQ ID NO: 1295394 - RNA, 19 nt, Artificial Sequence
  Description of Artificial Sequence: Synthetic oligonucleotide
  Sense strand starting at position 424 of SEQ ID NO: 1241732
auuguuuacgaagaccuaa

SEQ ID NO: 1295395 - RNA, 19 nt, Artificial Sequence
  Description of Artificial Sequence: Synthetic oligonucleotide
  Antisense strand to SEQ ID NO: 1295394
uuaggucuucguaaacaau

SEQ ID NO: 1295396 - RNA, 19 nt, Artificial Sequence
  Description of Artificial Sequence: Synthetic oligonucleotide
  Sense strand starting at position 674 of SEQ ID NO: 1241732
uccugaucucgugauaagc

SEQ ID NO: 1295397 - RNA, 19 nt, Artificial Sequence
  Description of Artificial Sequence: Synthetic oligonucleotide
  Antisense strand to SEQ ID NO: 1295396
gcuuaucacgagaucagga

SEQ ID NO: 1295398 - RNA, 19 nt, Artificial Sequence
  Description of Artificial Sequence: Synthetic oligonucleotide
  Sense strand starting at position 968 of SEQ ID NO: 1241732
agaggaugcgcugagguua

SEQ ID NO: 1295399 - RNA, 19 nt, Artificial Sequence
  Description of Artificial Sequence: Synthetic oligonucleotide
  Antisense strand to SEQ ID NO: 1295398
uaaccucagcgcauccucu

SEQ ID NO: 1295400 - RNA, 19 nt, Artificial Sequence
  Description of Artificial Sequence: Synthetic oligonucleotide
  Sense strand starting at position 982 of SEQ ID NO: 1241732
gguuauauguaauuacuac

SEQ ID NO: 1295401 - RNA, 19 nt, Artificial Sequence
  Description of Artificial Sequence: Synthetic oligonucleotide
  Antisense strand to SEQ ID NO: 1295400
guaguaauuacauauaacc

SEQ ID NO: 1295402 - RNA, 19 nt, Artificial Sequence
  Description of Artificial Sequence: Synthetic oligonucleotide
  Sense strand starting at position 1102 of SEQ ID NO: 1241732
cucaaagacuggcugugau

SEQ ID NO: 1295403 - RNA, 19 nt, Artificial Sequence
  Description of Artificial Sequence: Synthetic oligonucleotide
  Antisense strand to SEQ ID NO: 1295402
aucacagccagucuuugag

SEQ ID NO: 1295404 - RNA, 19 nt, Artificial Sequence
  Description of Artificial Sequence: Synthetic oligonucleotide
  Sense strand starting at position 1105 of SEQ ID NO: 1241732
aaagacuggcugugaucua

SEQ ID NO: 1295405 - RNA, 19 nt, Artificial Sequence
  Description of Artificial Sequence: Synthetic oligonucleotide
  Antisense strand to SEQ ID NO: 1295404
uagaucacagccagucuuu

SEQ ID NO: 1295406 - RNA, 19 nt, Artificial Sequence
  Description of Artificial Sequence: Synthetic oligonucleotide
  Sense strand starting at position 1143 of SEQ ID NO: 1241732
uuuccugagucauuaucau

SEQ ID NO: 1295407 - RNA, 19 nt, Artificial Sequence
  Description of Artificial Sequence: Synthetic oligonucleotide
  Antisense strand to SEQ ID NO: 1295406
augauaaugacucaggaaa

SEQ ID NO: 1295408 - RNA, 19 nt, Artificial Sequence
  Description of Artificial Sequence: Synthetic oligonucleotide
  Sense strand starting at position 1287 of SEQ ID NO: 1241732
ugagcaugucugugacuag

SEQ ID NO: 1295409 - RNA, 19 nt, Artificial Sequence
  Description of Artificial Sequence: Synthetic oligonucleotide
  Antisense strand to SEQ ID NO: 1295408
cuagucacagacaugcuca

SEQ ID NO: 1295410 - RNA, 19 nt, Artificial Sequence
  Description of Artificial Sequence: Synthetic oligonucleotide
  Sense strand starting at position 1309 of SEQ ID NO: 1241732
gccacagagguauauuauu

SEQ ID NO: 1295411 - RNA, 19 nt, Artificial Sequence
  Description of Artificial Sequence: Synthetic oligonucleotide
  Antisense strand to SEQ ID NO: 1295410
aauaauauaccucuguggc

SEQ ID NO: 1295412 - RNA, 19 nt, Artificial Sequence
  Description of Artificial Sequence: Synthetic oligonucleotide
  Sense strand starting at position 1314 of SEQ ID NO: 1241732
agagguauauuauucucau

SEQ ID NO: 1295413 - RNA, 19 nt, Artificial Sequence
  Description of Artificial Sequence: Synthetic oligonucleotide
  Antisense strand to SEQ ID NO: 1295412
augagaauaauauaccucu

SEQ ID NO: 1295414 - RNA, 19 nt, Artificial Sequence
  Description of Artificial Sequence: Synthetic oligonucleotide
  Sense strand starting at position 1336 of SEQ ID NO: 1241732
gcagaucaguaaucugaca

SEQ ID NO: 1295415 - RNA, 19 nt, Artificial Sequence
  Description of Artificial Sequence: Synthetic oligonucleotide
  Antisense strand to SEQ ID NO: 1295414
ugucagauuacugaucugc

SEQ ID NO: 1295416 - RNA, 19 nt, Artificial Sequence
  Description of Artificial Sequence: Synthetic oligonucleotide
  Sense strand starting at position 1574 of SEQ ID NO: 1241732
aucucauguggauaagcuu

SEQ ID NO: 1295417 - RNA, 19 nt, Artificial Sequence
  Description of Artificial Sequence: Synthetic oligonucleotide
  Antisense strand to SEQ ID NO: 1295416
aagcuuauccacaugagau

SEQ ID NO: 1295418 - RNA, 19 nt, Artificial Sequence
  Description of Artificial Sequence: Synthetic oligonucleotide
  Sense strand starting at position 2005 of SEQ ID NO: 1241732
gcgcaaucuccuuaaaugg

SEQ ID NO: 1295419 - RNA, 19 nt, Artificial Sequence
  Description of Artificial Sequence: Synthetic oligonucleotide
  Antisense strand to SEQ ID NO: 1295418
ccauuuaaggagauugcgc

SEQ ID NO: 1295420 - RNA, 19 nt, Artificial Sequence
  Description of Artificial Sequence: Synthetic oligonucleotide
  Sense strand starting at position 2519 of SEQ ID NO: 1241732
uguggccauuccuuuaaca

SEQ ID NO: 1295421 - RNA, 19 nt, Artificial Sequence
  Description of Artificial Sequence: Synthetic oligonucleotide
  Antisense strand to SEQ ID NO: 1295420
uguuaaaggaauggccaca

SEQ ID NO: 1295422 - RNA, 19 nt, Artificial Sequence
  Description of Artificial Sequence: Synthetic oligonucleotide
  Sense strand starting at position 2554 of SEQ ID NO: 1241732
acccuucucugagcuuaga

SEQ ID NO: 1295423 - RNA, 19 nt, Artificial Sequence
  Description of Artificial Sequence: Synthetic oligonucleotide
  Antisense strand to SEQ ID NO: 1295422
ucuaagcucagagaagggu

SEQ ID NO: 1295424 - RNA, 19 nt, Artificial Sequence
  Description of Artificial Sequence: Synthetic oligonucleotide
  Sense strand starting at position 2624 of SEQ ID NO: 1241732
ccuggagguaucuggugaa

SEQ ID NO: 1295425 - RNA, 19 nt, Artificial Sequence
  Description of Artificial Sequence: Synthetic oligonucleotide
  Antisense strand to SEQ ID NO: 1295424
uucaccagauaccuccagg

SEQ ID NO: 1295426 - RNA, 19 nt, Artificial Sequence
  Description of Artificial Sequence: Synthetic oligonucleotide
  Sense strand starting at position 2642 of SEQ ID NO: 1241732
aggcgcauccugcacaaau

SEQ ID NO: 1295427 - RNA, 19 nt, Artificial Sequence
  Description of Artificial Sequence: Synthetic oligonucleotide
  Antisense strand to SEQ ID NO: 1295426
auuugugcaggaugcgccu

SEQ ID NO: 1295428 - RNA, 19 nt, Artificial Sequence
  Description of Artificial Sequence: Synthetic oligonucleotide
  Sense strand starting at position 2968 of SEQ ID NO: 1241732
aagugaagauuaguauuga

SEQ ID NO: 1295429 - RNA, 19 nt, Artificial Sequence
  Description of Artificial Sequence: Synthetic oligonucleotide
  Antisense strand to SEQ ID NO: 1295428
ucaauacuaaucuucacuu

SEQ ID NO: 1295430 - RNA, 19 nt, Artificial Sequence
  Description of Artificial Sequence: Synthetic oligonucleotide
  Sense strand starting at position 3045 of SEQ ID NO: 1241732
guaaauggcagguaggaua

SEQ ID NO: 1295431 - RNA, 19 nt, Artificial Sequence
  Description of Artificial Sequence: Synthetic oligonucleotide
  Antisense strand to SEQ ID NO: 1295430
uauccuaccugccauuuac

SEQ ID NO: 1295432 - RNA, 19 nt, Artificial Sequence
  Description of Artificial Sequence: Synthetic oligonucleotide
  Sense strand starting at position 3232 of SEQ ID NO: 1241732
cauggaaucacguacgugu

SEQ ID NO: 1295433 - RNA, 19 nt, Artificial Sequence
  Description of Artificial Sequence: Synthetic oligonucleotide
  Antisense strand to SEQ ID NO: 1295432
acacguacgugauuccaug

SEQ ID NO: 1295434 - RNA, 19 nt, Artificial Sequence
  Description of Artificial Sequence: Synthetic oligonucleotide
  Sense strand starting at position 3245 of SEQ ID NO: 1241732
acgugugucaccuuugcca

SEQ ID NO: 1295435 - RNA, 19 nt, Artificial Sequence
  Description of Artificial Sequence: Synthetic oligonucleotide
  Antisense strand to SEQ ID NO: 1295434
uggcaaaggugacacacgu

SEQ ID NO: 1295436 - RNA, 19 nt, Artificial Sequence
  Description of Artificial Sequence: Synthetic oligonucleotide
  Sense strand starting at position 3260 of SEQ ID NO: 1241732
gccauauuccauuggucag

SEQ ID NO: 1295437 - RNA, 19 nt, Artificial Sequence
  Description of Artificial Sequence: Synthetic oligonucleotide
  Antisense strand to SEQ ID NO: 1295436
cugaccaauggaauauggc

SEQ ID NO: 1295438 - RNA, 19 nt, Artificial Sequence
  Description of Artificial Sequence: Synthetic oligonucleotide
  Sense strand starting at position 3408 of SEQ ID NO: 1241732
agaugaggcuguguguaua

SEQ ID NO: 1295439 - RNA, 19 nt, Artificial Sequence
  Description of Artificial Sequence: Synthetic oligonucleotide
  Antisense strand to SEQ ID NO: 1295438
uauacacacagccucaucu

SEQ ID NO: 1295440 - RNA, 19 nt, Artificial Sequence
  Description of Artificial Sequence: Synthetic oligonucleotide
  Sense strand starting at position 3426 of SEQ ID NO: 1241732
aguguuaaagccugacaca

SEQ ID NO: 1295441 - RNA, 19 nt, Artificial Sequence
  Description of Artificial Sequence: Synthetic oligonucleotide
  Antisense strand to SEQ ID NO: 1295440
ugugucaggcuuuaacacu

SEQ ID NO: 1295442 - RNA, 19 nt, Artificial Sequence
  Description of Artificial Sequence: Synthetic oligonucleotide
  Sense strand starting at position 3427 of SEQ ID NO: 1241732
guguuaaagccugacacau

SEQ ID NO: 1295443 - RNA, 19 nt, Artificial Sequence
  Description of Artificial Sequence: Synthetic oligonucleotide
  Antisense strand to SEQ ID NO: 1295442
augugucaggcuuuaacac

SEQ ID NO: 1295444 - RNA, 19 nt, Artificial Sequence
  Description of Artificial Sequence: Synthetic oligonucleotide
  Sense strand starting at position 3454 of SEQ ID NO: 1241732
cuugaaauacccuggucaa

SEQ ID NO: 1295445 - RNA, 19 nt, Artificial Sequence
  Description of Artificial Sequence: Synthetic oligonucleotide
  Antisense strand to SEQ ID NO: 1295444
uugaccaggguauuucaag

SEQ ID NO: 1295446 - RNA, 19 nt, Artificial Sequence
  Description of Artificial Sequence: Synthetic oligonucleotide
  Sense strand starting at position 3455 of SEQ ID NO: 1241732
uugaaauacccuggucaau

SEQ ID NO: 1295447 - RNA, 19 nt, Artificial Sequence
  Description of Artificial Sequence: Synthetic oligonucleotide
  Antisense strand to SEQ ID NO: 1295446
auugaccaggguauuucaa

SEQ ID NO: 1295448 - RNA, 19 nt, Artificial Sequence
  Description of Artificial Sequence: Synthetic oligonucleotide
  Sense strand starting at position 3457 of SEQ ID NO: 1241732
gaaauacccuggucaauag

SEQ ID NO: 1295449 - RNA, 19 nt, Artificial Sequence
  Description of Artificial Sequence: Synthetic oligonucleotide
  Antisense strand to SEQ ID NO: 1295448
cuauugaccaggguauuuc

SEQ ID NO: 1295450 - RNA, 19 nt, Artificial Sequence
  Description of Artificial Sequence: Synthetic oligonucleotide
  Sense strand starting at position 3468 of SEQ ID NO: 1241732
gucaauaguuauguucuca

SEQ ID NO: 1295451 - RNA, 19 nt, Artificial Sequence
  Description of Artificial Sequence: Synthetic oligonucleotide
  Antisense strand to SEQ ID NO: 1295450
ugagaacauaacuauugac

SEQ ID NO: 1295452 - RNA, 19 nt, Artificial Sequence
  Description of Artificial Sequence: Synthetic oligonucleotide
  Sense strand starting at position 3472 of SEQ ID NO: 1241732
auaguuauguucucagacu

SEQ ID NO: 1295453 - RNA, 19 nt, Artificial Sequence
  Description of Artificial Sequence: Synthetic oligonucleotide
  Antisense strand to SEQ ID NO: 1295452
agucugagaacauaacuau

SEQ ID NO: 1295454 - RNA, 19 nt, Artificial Sequence
  Description of Artificial Sequence: Synthetic oligonucleotide
  Sense strand starting at position 3641 of SEQ ID NO: 1241732
ggagguaaagguugccuaa

SEQ ID NO: 1295455 - RNA, 19 nt, Artificial Sequence
  Description of Artificial Sequence: Synthetic oligonucleotide
  Antisense strand to SEQ ID NO: 1295454
uuaggcaaccuuuaccucc

SEQ ID NO: 1295456 - RNA, 19 nt, Artificial Sequence
  Description of Artificial Sequence: Synthetic oligonucleotide
  Sense strand starting at position 3643 of SEQ ID NO: 1241732
agguaaagguugccuaaua

SEQ ID NO: 1295457 - RNA, 19 nt, Artificial Sequence
  Description of Artificial Sequence: Synthetic oligonucleotide
  Antisense strand to SEQ ID NO: 1295456
uauuaggcaaccuuuaccu

SEQ ID NO: 1295458 - RNA, 19 nt, Artificial Sequence
  Description of Artificial Sequence: Synthetic oligonucleotide
  Sense strand starting at position 3644 of SEQ ID NO: 1241732
gguaaagguugccuaauau

SEQ ID NO: 1295459 - RNA, 19 nt, Artificial Sequence
  Description of Artificial Sequence: Synthetic oligonucleotide
  Antisense strand to SEQ ID NO: 1295458
auauuaggcaaccuuuacc

SEQ ID NO: 1295460 - RNA, 19 nt, Artificial Sequence
  Description of Artificial Sequence: Synthetic oligonucleotide
  Sense strand starting at position 3764 of SEQ ID NO: 1241732
ugaaguaucagaggcuuga

SEQ ID NO: 1295461 - RNA, 19 nt, Artificial Sequence
  Description of Artificial Sequence: Synthetic oligonucleotide
  Antisense strand to SEQ ID NO: 1295460
ucaagccucugauacuuca

SEQ ID NO: 1295462 - RNA, 19 nt, Artificial Sequence
  Description of Artificial Sequence: Synthetic oligonucleotide
  Sense strand starting at position 3879 of SEQ ID NO: 1241732
ccaaguuuggcucauuaca

SEQ ID NO: 1295463 - RNA, 19 nt, Artificial Sequence
  Description of Artificial Sequence: Synthetic oligonucleotide
  Antisense strand to SEQ ID NO: 1295462
uguaaugagccaaacuugg

SEQ ID NO: 1295464 - RNA, 19 nt, Artificial Sequence
  Description of Artificial Sequence: Synthetic oligonucleotide
  Sense strand starting at position 3881 of SEQ ID NO: 1241732
aaguuuggcucauuacaug

SEQ ID NO: 1295465 - RNA, 19 nt, Artificial Sequence
  Description of Artificial Sequence: Synthetic oligonucleotide
  Antisense strand to SEQ ID NO: 1295464
cauguaaugagccaaacuu

SEQ ID NO: 1295466 - RNA, 19 nt, Artificial Sequence
  Description of Artificial Sequence: Synthetic oligonucleotide
  Sense strand starting at position 3886 of SEQ ID NO: 1241732
uggcucauuacauggaaga

SEQ ID NO: 1295467 - RNA, 19 nt, Artificial Sequence
  Description of Artificial Sequence: Synthetic oligonucleotide
  Antisense strand to SEQ ID NO: 1295466
ucuuccauguaaugagcca

SEQ ID NO: 1295468 - RNA, 19 nt, Artificial Sequence
  Description of Artificial Sequence: Synthetic oligonucleotide
  Sense strand starting at position 42 of SEQ ID NO: 1241733
caaagcggcccugaaauaa

SEQ ID NO: 1295469 - RNA, 19 nt, Artificial Sequence
  Description of Artificial Sequence: Synthetic oligonucleotide
  Antisense strand to SEQ ID NO: 1295468
uuauuucagggccgcuuug

SEQ ID NO: 1295470 - RNA, 19 nt, Artificial Sequence
  Description of Artificial Sequence: Synthetic oligonucleotide
  Sense strand starting at position 107 of SEQ ID NO: 1241733
aggugagugugagugaaau

SEQ ID NO: 1295471 - RNA, 19 nt, Artificial Sequence
  Description of Artificial Sequence: Synthetic oligonucleotide
  Antisense strand to SEQ ID NO: 1295470
auuucacucacacucaccu

SEQ ID NO: 1295472 - RNA, 19 nt, Artificial Sequence
  Description of Artificial Sequence: Synthetic oligonucleotide
  Sense strand starting at position 329 of SEQ ID NO: 1241733
ucucauugagcuuaaagac

SEQ ID NO: 1295473 - RNA, 19 nt, Artificial Sequence
  Description of Artificial Sequence: Synthetic oligonucleotide
  Antisense strand to SEQ ID NO: 1295472
gucuuuaagcucaaugaga

SEQ ID NO: 1295474 - RNA, 19 nt, Artificial Sequence
  Description of Artificial Sequence: Synthetic oligonucleotide
  Sense strand starting at position 365 of SEQ ID NO: 1241733
ggccaugcuccucaauuga

SEQ ID NO: 1295475 - RNA, 19 nt, Artificial Sequence
  Description of Artificial Sequence: Synthetic oligonucleotide
  Antisense strand to SEQ ID NO: 1295474
ucaauugaggagcauggcc

SEQ ID NO: 1295476 - RNA, 19 nt, Artificial Sequence
  Description of Artificial Sequence: Synthetic oligonucleotide
  Sense strand starting at position 587 of SEQ ID NO: 1241733
aggcguuaacaauauaguu

SEQ ID NO: 1295477 - RNA, 19 nt, Artificial Sequence
  Description of Artificial Sequence: Synthetic oligonucleotide
  Antisense strand to SEQ ID NO: 1295476
aacuauauuguuaacgccu

SEQ ID NO: 1295478 - RNA, 19 nt, Artificial Sequence
  Description of Artificial Sequence: Synthetic oligonucleotide
  Sense strand starting at position 661 of SEQ ID NO: 1241733
uuuaauagccaagaugagu

SEQ ID NO: 1295479 - RNA, 19 nt, Artificial Sequence
  Description of Artificial Sequence: Synthetic oligonucleotide
  Antisense strand to SEQ ID NO: 1295478
acucaucuuggcuauuaaa

SEQ ID NO: 1295480 - RNA, 19 nt, Artificial Sequence
  Description of Artificial Sequence: Synthetic oligonucleotide
  Sense strand starting at position 781 of SEQ ID NO: 1241733
ggaaccugcugucuaaaug

SEQ ID NO: 1295481 - RNA, 19 nt, Artificial Sequence
  Description of Artificial Sequence: Synthetic oligonucleotide
  Antisense strand to SEQ ID NO: 1295480
cauuuagacagcagguucc

SEQ ID NO: 1295482 - RNA, 19 nt, Artificial Sequence
  Description of Artificial Sequence: Synthetic oligonucleotide
  Sense strand starting at position 782 of SEQ ID NO: 1241733
gaaccugcugucuaaauga

SEQ ID NO: 1295483 - RNA, 19 nt, Artificial Sequence
  Description of Artificial Sequence: Synthetic oligonucleotide
  Antisense strand to SEQ ID NO: 1295482
ucauuuagacagcagguuc

SEQ ID NO: 1295484 - RNA, 19 nt, Artificial Sequence
  Description of Artificial Sequence: Synthetic oligonucleotide
  Sense strand starting at position 806 of SEQ ID NO: 1241733
ugaagagcauucccaagua

SEQ ID NO: 1295485 - RNA, 19 nt, Artificial Sequence
  Description of Artificial Sequence: Synthetic oligonucleotide
  Antisense strand to SEQ ID NO: 1295484
uacuugggaaugcucuuca

SEQ ID NO: 1295486 - RNA, 19 nt, Artificial Sequence
  Description of Artificial Sequence: Synthetic oligonucleotide
  Sense strand starting at position 980 of SEQ ID NO: 1241733
gaguccgauuuacauuuau

SEQ ID NO: 1295487 - RNA, 19 nt, Artificial Sequence
  Description of Artificial Sequence: Synthetic oligonucleotide
  Antisense strand to SEQ ID NO: 1295486
auaaauguaaaucggacuc

SEQ ID NO: 1295488 - RNA, 19 nt, Artificial Sequence
  Description of Artificial Sequence: Synthetic oligonucleotide
  Sense strand starting at position 1628 of SEQ ID NO: 1241733
uaagcuuaggucugggaau

SEQ ID NO: 1295489 - RNA, 19 nt, Artificial Sequence
  Description of Artificial Sequence: Synthetic oligonucleotide
  Antisense strand to SEQ ID NO: 1295488
auucccagaccuaagcuua

SEQ ID NO: 1295490 - RNA, 19 nt, Artificial Sequence
  Description of Artificial Sequence: Synthetic oligonucleotide
  Sense strand starting at position 1630 of SEQ ID NO: 1241733
agcuuaggucugggaauaa

SEQ ID NO: 1295491 - RNA, 19 nt, Artificial Sequence
  Description of Artificial Sequence: Synthetic oligonucleotide
  Antisense strand to SEQ ID NO: 1295490
uuauucccagaccuaagcu

SEQ ID NO: 1295492 - RNA, 19 nt, Artificial Sequence
  Description of Artificial Sequence: Synthetic oligonucleotide
  Sense strand starting at position 2135 of SEQ ID NO: 1241733
uuggcuuacuuccuggaga

SEQ ID NO: 1295493 - RNA, 19 nt, Artificial Sequence
  Description of Artificial Sequence: Synthetic oligonucleotide
  Antisense strand to SEQ ID NO: 1295492
ucuccaggaaguaagccaa

SEQ ID NO: 1295494 - RNA, 19 nt, Artificial Sequence
  Description of Artificial Sequence: Synthetic oligonucleotide
  Sense strand starting at position 2138 of SEQ ID NO: 1241733
gcuuacuuccuggagacuu

SEQ ID NO: 1295495 - RNA, 19 nt, Artificial Sequence
  Description of Artificial Sequence: Synthetic oligonucleotide
  Antisense strand to SEQ ID NO: 1295494
aagucuccaggaaguaagc

SEQ ID NO: 1295496 - RNA, 19 nt, Artificial Sequence
  Description of Artificial Sequence: Synthetic oligonucleotide
  Sense strand starting at position 2272 of SEQ ID NO: 1241733
gcggcguuugguuuaaagu

SEQ ID NO: 1295497 - RNA, 19 nt, Artificial Sequence
  Description of Artificial Sequence: Synthetic oligonucleotide
  Antisense strand to SEQ ID NO: 1295496
acuuuaaaccaaacgccgc

SEQ ID NO: 1295498 - RNA, 19 nt, Artificial Sequence
  Description of Artificial Sequence: Synthetic oligonucleotide
  Sense strand starting at position 2295 of SEQ ID NO: 1241733
agaggauacgcuuagguua

SEQ ID NO: 1295499 - RNA, 19 nt, Artificial Sequence
  Description of Artificial Sequence: Synthetic oligonucleotide
  Antisense strand to SEQ ID NO: 1295498
uaaccuaagcguauccucu

SEQ ID NO: 1295500 - RNA, 19 nt, Artificial Sequence
  Description of Artificial Sequence: Synthetic oligonucleotide
  Sense strand starting at position 2352 of SEQ ID NO: 1241733
gggugcagacuuugaaauc

SEQ ID NO: 1295501 - RNA, 19 nt, Artificial Sequence
  Description of Artificial Sequence: Synthetic oligonucleotide
  Antisense strand to SEQ ID NO: 1295500
gauuucaaagucugcaccc

SEQ ID NO: 1295502 - RNA, 19 nt, Artificial Sequence
  Description of Artificial Sequence: Synthetic oligonucleotide
  Sense strand starting at position 2392 of SEQ ID NO: 1241733
augaguucccauuggacuc

SEQ ID NO: 1295503 - RNA, 19 nt, Artificial Sequence
  Description of Artificial Sequence: Synthetic oligonucleotide
  Antisense strand to SEQ ID NO: 1295502
gaguccaaugggaacucau

SEQ ID NO: 1295504 - RNA, 19 nt, Artificial Sequence
  Description of Artificial Sequence: Synthetic oligonucleotide
  Sense strand starting at position 2406 of SEQ ID NO: 1241733
gacucagaaccucgaaugu

SEQ ID NO: 1295505 - RNA, 19 nt, Artificial Sequence
  Description of Artificial Sequence: Synthetic oligonucleotide
  Antisense strand to SEQ ID NO: 1295504
acauucgagguucugaguc

SEQ ID NO: 1295506 - RNA, 19 nt, Artificial Sequence
  Description of Artificial Sequence: Synthetic oligonucleotide
  Sense strand starting at position 2440 of SEQ ID NO: 1241733
aacaguugcguucucguaa

SEQ ID NO: 1295507 - RNA, 19 nt, Artificial Sequence
  Description of Artificial Sequence: Synthetic oligonucleotide
  Antisense strand to SEQ ID NO: 1295506
uuacgagaacgcaacuguu

SEQ ID NO: 1295508 - RNA, 19 nt, Artificial Sequence
  Description of Artificial Sequence: Synthetic oligonucleotide
  Sense strand starting at position 2488 of SEQ ID NO: 1241733
guuccuugccuuuaauaag

SEQ ID NO: 1295509 - RNA, 19 nt, Artificial Sequence
  Description of Artificial Sequence: Synthetic oligonucleotide
  Antisense strand to SEQ ID NO: 1295508
cuuauuaaaggcaaggaac

SEQ ID NO: 1295510 - RNA, 19 nt, Artificial Sequence
  Description of Artificial Sequence: Synthetic oligonucleotide
  Sense strand starting at position 2576 of SEQ ID NO: 1241733
gcaucucuuccagaggacu

SEQ ID NO: 1295511 - RNA, 19 nt, Artificial Sequence
  Description of Artificial Sequence: Synthetic oligonucleotide
  Antisense strand to SEQ ID NO: 1295510
aguccucuggaagagaugc

SEQ ID NO: 1295512 - RNA, 19 nt, Artificial Sequence
  Description of Artificial Sequence: Synthetic oligonucleotide
  Sense strand starting at position 2694 of SEQ ID NO: 1241733
ggacauaacagauguagua

SEQ ID NO: 1295513 - RNA, 19 nt, Artificial Sequence
  Description of Artificial Sequence: Synthetic oligonucleotide
  Antisense strand to SEQ ID NO: 1295512
uacuacaucuguuaugucc

SEQ ID NO: 1295514 - RNA, 19 nt, Artificial Sequence
  Description of Artificial Sequence: Synthetic oligonucleotide
  Sense strand starting at position 2736 of SEQ ID NO: 1241733
augacuugcugaucugaac

SEQ ID NO: 1295515 - RNA, 19 nt, Artificial Sequence
  Description of Artificial Sequence: Synthetic oligonucleotide
  Antisense strand to SEQ ID NO: 1295514
guucagaucagcaagucau

SEQ ID NO: 1295516 - RNA, 19 nt, Artificial Sequence
  Description of Artificial Sequence: Synthetic oligonucleotide
  Sense strand starting at position 2742 of SEQ ID NO: 1241733
ugcugaucugaacgagaau

SEQ ID NO: 1295517 - RNA, 19 nt, Artificial Sequence
  Description of Artificial Sequence: Synthetic oligonucleotide
  Antisense strand to SEQ ID NO: 1295516
auucucguucagaucagca

SEQ ID NO: 1295518 - RNA, 19 nt, Artificial Sequence
  Description of Artificial Sequence: Synthetic oligonucleotide
  Sense strand starting at position 2743 of SEQ ID NO: 1241733
gcugaucugaacgagaauc

SEQ ID NO: 1295519 - RNA, 19 nt, Artificial Sequence
  Description of Artificial Sequence: Synthetic oligonucleotide
  Antisense strand to SEQ ID NO: 1295518
gauucucguucagaucagc

SEQ ID NO: 1295520 - RNA, 19 nt, Artificial Sequence
  Description of Artificial Sequence: Synthetic oligonucleotide
  Sense strand starting at position 2923 of SEQ ID NO: 1241733
ccuagaagcgcuuggauuu

SEQ ID NO: 1295521 - RNA, 19 nt, Artificial Sequence
  Description of Artificial Sequence: Synthetic oligonucleotide
  Antisense strand to SEQ ID NO: 1295520
aaauccaagcgcuucuagg

SEQ ID NO: 1295522 - RNA, 19 nt, Artificial Sequence
  Description of Artificial Sequence: Synthetic oligonucleotide
  Sense strand starting at position 2949 of SEQ ID NO: 1241733
cgcucaacgaguuaaggga

SEQ ID NO: 1295523 - RNA, 19 nt, Artificial Sequence
  Description of Artificial Sequence: Synthetic oligonucleotide
  Antisense strand to SEQ ID NO: 1295522
ucccuuaacucguugagcg

SEQ ID NO: 1295524 - RNA, 19 nt, Artificial Sequence
  Description of Artificial Sequence: Synthetic oligonucleotide
  Sense strand starting at position 2953 of SEQ ID NO: 1241733
caacgaguuaagggacagu

SEQ ID NO: 1295525 - RNA, 19 nt, Artificial Sequence
  Description of Artificial Sequence: Synthetic oligonucleotide
  Antisense strand to SEQ ID NO: 1295524
acugucccuuaacucguug

SEQ ID NO: 1295526 - RNA, 19 nt, Artificial Sequence
  Description of Artificial Sequence: Synthetic oligonucleotide
  Sense strand starting at position 3073 of SEQ ID NO: 1241733
gggauuaacgcgaguggcu

SEQ ID NO: 1295527 - RNA, 19 nt, Artificial Sequence
  Description of Artificial Sequence: Synthetic oligonucleotide
  Antisense strand to SEQ ID NO: 1295526
agccacucgcguuaauccc

SEQ ID NO: 1295528 - RNA, 19 nt, Artificial Sequence
  Description of Artificial Sequence: Synthetic oligonucleotide
  Sense strand starting at position 3318 of SEQ ID NO: 1241733
guagguuuccggagggcga

SEQ ID NO: 1295529 - RNA, 19 nt, Artificial Sequence
  Description of Artificial Sequence: Synthetic oligonucleotide
  Antisense strand to SEQ ID NO: 1295528
ucgcccuccggaaaccuac

SEQ ID NO: 1295530 - RNA, 19 nt, Artificial Sequence
  Description of Artificial Sequence: Synthetic oligonucleotide
  Sense strand starting at position 3448 of SEQ ID NO: 1241733
guuaaugacugauccugga

SEQ ID NO: 1295531 - RNA, 19 nt, Artificial Sequence
  Description of Artificial Sequence: Synthetic oligonucleotide
  Antisense strand to SEQ ID NO: 1295530
uccaggaucagucauuaac

SEQ ID NO: 1295532 - RNA, 19 nt, Artificial Sequence
  Description of Artificial Sequence: Synthetic oligonucleotide
  Sense strand starting at position 3639 of SEQ ID NO: 1241733
aucucaguggccuaaauga

SEQ ID NO: 1295533 - RNA, 19 nt, Artificial Sequence
  Description of Artificial Sequence: Synthetic oligonucleotide
  Antisense strand to SEQ ID NO: 1295532
ucauuuaggccacugagau

SEQ ID NO: 1295534 - RNA, 19 nt, Artificial Sequence
  Description of Artificial Sequence: Synthetic oligonucleotide
  Sense strand starting at position 3656 of SEQ ID NO: 1241733
gaauuaauuugcgucaccu

SEQ ID NO: 1295535 - RNA, 19 nt, Artificial Sequence
  Description of Artificial Sequence: Synthetic oligonucleotide
  Antisense strand to SEQ ID NO: 1295534
aggugacgcaaauuaauuc

SEQ ID NO: 1295536 - RNA, 19 nt, Artificial Sequence
  Description of Artificial Sequence: Synthetic oligonucleotide
  Sense strand starting at position 3675 of SEQ ID NO: 1241733
agcgguuaacucguuugca

SEQ ID NO: 1295537 - RNA, 19 nt, Artificial Sequence
  Description of Artificial Sequence: Synthetic oligonucleotide
  Antisense strand to SEQ ID NO: 1295536
ugcaaacgaguuaaccgcu

SEQ ID NO: 1295538 - RNA, 19 nt, Artificial Sequence
  Description of Artificial Sequence: Synthetic oligonucleotide
  Sense strand starting at position 3677 of SEQ ID NO: 1241733
cgguuaacucguuugcacu

SEQ ID NO: 1295539 - RNA, 19 nt, Artificial Sequence
  Description of Artificial Sequence: Synthetic oligonucleotide
  Antisense strand to SEQ ID NO: 1295538
agugcaaacgaguuaaccg

SEQ ID NO: 1295540 - RNA, 19 nt, Artificial Sequence
  Description of Artificial Sequence: Synthetic oligonucleotide
  Sense strand starting at position 3689 of SEQ ID NO: 1241733
uugcacuuugagggaaauu

SEQ ID NO: 1295541 - RNA, 19 nt, Artificial Sequence
  Description of Artificial Sequence: Synthetic oligonucleotide
  Antisense strand to SEQ ID NO: 1295540
aauuucccucaaagugcaa

SEQ ID NO: 1295542 - RNA, 19 nt, Artificial Sequence
  Description of Artificial Sequence: Synthetic oligonucleotide
  Sense strand starting at position 3708 of SEQ ID NO: 1241733
ucagcccauguuuaagaaa

SEQ ID NO: 1295543 - RNA, 19 nt, Artificial Sequence
  Description of Artificial Sequence: Synthetic oligonucleotide
  Antisense strand to SEQ ID NO: 1295542
uuucuuaaacaugggcuga

SEQ ID NO: 1295544 - RNA, 19 nt, Artificial Sequence
  Description of Artificial Sequence: Synthetic oligonucleotide
  Sense strand starting at position 3820 of SEQ ID NO: 1241733
cgagguccaaacuguauaa

SEQ ID NO: 1295545 - RNA, 19 nt, Artificial Sequence
  Description of Artificial Sequence: Synthetic oligonucleotide
  Antisense strand to SEQ ID NO: 1295544
uuauacaguuuggaccucg

SEQ ID NO: 1295546 - RNA, 19 nt, Artificial Sequence
  Description of Artificial Sequence: Synthetic oligonucleotide
  Sense strand starting at position 3965 of SEQ ID NO: 1241733
guuguaaugcuguuugggu

SEQ ID NO: 1295547 - RNA, 19 nt, Artificial Sequence
  Description of Artificial Sequence: Synthetic oligonucleotide
  Antisense strand to SEQ ID NO: 1295546
acccaaacagcauuacaac

SEQ ID NO: 1295548 - RNA, 19 nt, Artificial Sequence
  Description of Artificial Sequence: Synthetic oligonucleotide
  Sense strand starting at position 425 of SEQ ID NO: 1241734
agguguuucuacucaccaa

SEQ ID NO: 1295549 - RNA, 19 nt, Artificial Sequence
  Description of Artificial Sequence: Synthetic oligonucleotide
  Antisense strand to SEQ ID NO: 1295548
uuggugaguagaaacaccu

SEQ ID NO: 1295550 - RNA, 19 nt, Artificial Sequence
  Description of Artificial Sequence: Synthetic oligonucleotide
  Sense strand starting at position 517 of SEQ ID NO: 1241734
aacugaugguagcuacuua

SEQ ID NO: 1295551 - RNA, 19 nt, Artificial Sequence
  Description of Artificial Sequence: Synthetic oligonucleotide
  Antisense strand to SEQ ID NO: 1295550
uaaguagcuaccaucaguu

SEQ ID NO: 1295552 - RNA, 19 nt, Artificial Sequence
  Description of Artificial Sequence: Synthetic oligonucleotide
  Sense strand starting at position 521 of SEQ ID NO: 1241734
gaugguagcuacuuaaaga

SEQ ID NO: 1295553 - RNA, 19 nt, Artificial Sequence
  Description of Artificial Sequence: Synthetic oligonucleotide
  Antisense strand to SEQ ID NO: 1295552
ucuuuaaguagcuaccauc

SEQ ID NO: 1295554 - RNA, 19 nt, Artificial Sequence
  Description of Artificial Sequence: Synthetic oligonucleotide
  Sense strand starting at position 532 of SEQ ID NO: 1241734
cuuaaagaauagugagaug

SEQ ID NO: 1295555 - RNA, 19 nt, Artificial Sequence
  Description of Artificial Sequence: Synthetic oligonucleotide
  Antisense strand to SEQ ID NO: 1295554
caucucacuauucuuuaag

SEQ ID NO: 1295556 - RNA, 19 nt, Artificial Sequence
  Description of Artificial Sequence: Synthetic oligonucleotide
  Sense strand starting at position 562 of SEQ ID NO: 1241734
ugugaaacuuaacaaagau

SEQ ID NO: 1295557 - RNA, 19 nt, Artificial Sequence
  Description of Artificial Sequence: Synthetic oligonucleotide
  Antisense strand to SEQ ID NO: 1295556
aucuuuguuaaguuucaca

SEQ ID NO: 1295558 - RNA, 19 nt, Artificial Sequence
  Description of Artificial Sequence: Synthetic oligonucleotide
  Sense strand starting at position 997 of SEQ ID NO: 1241734
ggagauaaacugugguaca

SEQ ID NO: 1295559 - RNA, 19 nt, Artificial Sequence
  Description of Artificial Sequence: Synthetic oligonucleotide
  Antisense strand to SEQ ID NO: 1295558
uguaccacaguuuaucucc

SEQ ID NO: 1295560 - RNA, 19 nt, Artificial Sequence
  Description of Artificial Sequence: Synthetic oligonucleotide
  Sense strand starting at position 1095 of SEQ ID NO: 1241734
gcauacuaauacuaaguga

SEQ ID NO: 1295561 - RNA, 19 nt, Artificial Sequence
  Description of Artificial Sequence: Synthetic oligonucleotide
  Antisense strand to SEQ ID NO: 1295560
ucacuuaguauuaguaugc

SEQ ID NO: 1295562 - RNA, 19 nt, Artificial Sequence
  Description of Artificial Sequence: Synthetic oligonucleotide
  Sense strand starting at position 1133 of SEQ ID NO: 1241734
cuacacauacugugugauu

SEQ ID NO: 1295563 - RNA, 19 nt, Artificial Sequence
  Description of Artificial Sequence: Synthetic oligonucleotide
  Antisense strand to SEQ ID NO: 1295562
aaucacacaguauguguag

SEQ ID NO: 1295564 - RNA, 19 nt, Artificial Sequence
  Description of Artificial Sequence: Synthetic oligonucleotide
  Sense strand starting at position 1251 of SEQ ID NO: 1241734
cgagaagaucuguagguca

SEQ ID NO: 1295565 - RNA, 19 nt, Artificial Sequence
  Description of Artificial Sequence: Synthetic oligonucleotide
  Antisense strand to SEQ ID NO: 1295564
ugaccuacagaucuucucg

SEQ ID NO: 1295566 - RNA, 19 nt, Artificial Sequence
  Description of Artificial Sequence: Synthetic oligonucleotide
  Sense strand starting at position 1253 of SEQ ID NO: 1241734
agaagaucuguaggucagu

SEQ ID NO: 1295567 - RNA, 19 nt, Artificial Sequence
  Description of Artificial Sequence: Synthetic oligonucleotide
  Antisense strand to SEQ ID NO: 1295566
acugaccuacagaucuucu

SEQ ID NO: 1295568 - RNA, 19 nt, Artificial Sequence
  Description of Artificial Sequence: Synthetic oligonucleotide
  Sense strand starting at position 1256 of SEQ ID NO: 1241734
agaucuguaggucagugaa

SEQ ID NO: 1295569 - RNA, 19 nt, Artificial Sequence
  Description of Artificial Sequence: Synthetic oligonucleotide
  Antisense strand to SEQ ID NO: 1295568
uucacugaccuacagaucu

SEQ ID NO: 1295570 - RNA, 19 nt, Artificial Sequence
  Description of Artificial Sequence: Synthetic oligonucleotide
  Sense strand starting at position 1258 of SEQ ID NO: 1241734
aucuguaggucagugaacu

SEQ ID NO: 1295571 - RNA, 19 nt, Artificial Sequence
  Description of Artificial Sequence: Synthetic oligonucleotide
  Antisense strand to SEQ ID NO: 1295570
aguucacugaccuacagau

SEQ ID NO: 1295572 - RNA, 19 nt, Artificial Sequence
  Description of Artificial Sequence: Synthetic oligonucleotide
  Sense strand starting at position 1266 of SEQ ID NO: 1241734
gucagugaacucuguaaug

SEQ ID NO: 1295573 - RNA, 19 nt, Artificial Sequence
  Description of Artificial Sequence: Synthetic oligonucleotide
  Antisense strand to SEQ ID NO: 1295572
cauuacagaguucacugac

SEQ ID NO: 1295574 - RNA, 19 nt, Artificial Sequence
  Description of Artificial Sequence: Synthetic oligonucleotide
  Sense strand starting at position 1276 of SEQ ID NO: 1241734
ucuguaaugcgugacguua

SEQ ID NO: 1295575 - RNA, 19 nt, Artificial Sequence
  Description of Artificial Sequence: Synthetic oligonucleotide
  Antisense strand to SEQ ID NO: 1295574
uaacgucacgcauuacaga

SEQ ID NO: 1295576 - RNA, 19 nt, Artificial Sequence
  Description of Artificial Sequence: Synthetic oligonucleotide
  Sense strand starting at position 1334 of SEQ ID NO: 1241734
ugaacccuccuguaacgau

SEQ ID NO: 1295577 - RNA, 19 nt, Artificial Sequence
  Description of Artificial Sequence: Synthetic oligonucleotide
  Antisense strand to SEQ ID NO: 1295576
aucguuacaggaggguuca

SEQ ID NO: 1295578 - RNA, 19 nt, Artificial Sequence
  Description of Artificial Sequence: Synthetic oligonucleotide
  Sense strand starting at position 1474 of SEQ ID NO: 1241734
ccgcuccguuauccugaaa

SEQ ID NO: 1295579 - RNA, 19 nt, Artificial Sequence
  Description of Artificial Sequence: Synthetic oligonucleotide
  Antisense strand to SEQ ID NO: 1295578
uuucaggauaacggagcgg

SEQ ID NO: 1295580 - RNA, 19 nt, Artificial Sequence
  Description of Artificial Sequence: Synthetic oligonucleotide
  Sense strand starting at position 1518 of SEQ ID NO: 1241734
guuaaacauuaagaacuga

SEQ ID NO: 1295581 - RNA, 19 nt, Artificial Sequence
  Description of Artificial Sequence: Synthetic oligonucleotide
  Antisense strand to SEQ ID NO: 1295580
ucaguucuuaauguuuaac

SEQ ID NO: 1295582 - RNA, 19 nt, Artificial Sequence
  Description of Artificial Sequence: Synthetic oligonucleotide
  Sense strand starting at position 1746 of SEQ ID NO: 1241734
ccgcguccuaccuuucgaa

SEQ ID NO: 1295583 - RNA, 19 nt, Artificial Sequence
  Description of Artificial Sequence: Synthetic oligonucleotide
  Antisense strand to SEQ ID NO: 1295582
uucgaaagguaggacgcgg

SEQ ID NO: 1295584 - RNA, 19 nt, Artificial Sequence
  Description of Artificial Sequence: Synthetic oligonucleotide
  Sense strand starting at position 2213 of SEQ ID NO: 1241734
gggugagccuuucuaggac

SEQ ID NO: 1295585 - RNA, 19 nt, Artificial Sequence
  Description of Artificial Sequence: Synthetic oligonucleotide
  Antisense strand to SEQ ID NO: 1295584
guccuagaaaggcucaccc

SEQ ID NO: 1295586 - RNA, 19 nt, Artificial Sequence
  Description of Artificial Sequence: Synthetic oligonucleotide
  Sense strand starting at position 2277 of SEQ ID NO: 1241734
acgggaguuccguggcaac

SEQ ID NO: 1295587 - RNA, 19 nt, Artificial Sequence
  Description of Artificial Sequence: Synthetic oligonucleotide
  Antisense strand to SEQ ID NO: 1295586
guugccacggaacucccgu

SEQ ID NO: 1295588 - RNA, 19 nt, Artificial Sequence
  Description of Artificial Sequence: Synthetic oligonucleotide
  Sense strand starting at position 2449 of SEQ ID NO: 1241734
gggauuugcguucgugggu

SEQ ID NO: 1295589 - RNA, 19 nt, Artificial Sequence
  Description of Artificial Sequence: Synthetic oligonucleotide
  Antisense strand to SEQ ID NO: 1295588
acccacgaacgcaaauccc

SEQ ID NO: 1295590 - RNA, 19 nt, Artificial Sequence
  Description of Artificial Sequence: Synthetic oligonucleotide
  Sense strand starting at position 2478 of SEQ ID NO: 1241734
aggacauccuugcaccuaa

SEQ ID NO: 1295591 - RNA, 19 nt, Artificial Sequence
  Description of Artificial Sequence: Synthetic oligonucleotide
  Antisense strand to SEQ ID NO: 1295590
uuaggugcaaggauguccu

SEQ ID NO: 1295592 - RNA, 19 nt, Artificial Sequence
  Description of Artificial Sequence: Synthetic oligonucleotide
  Sense strand starting at position 2525 of SEQ ID NO: 1241734
caggaaggucucggagaaa

SEQ ID NO: 1295593 - RNA, 19 nt, Artificial Sequence
  Description of Artificial Sequence: Synthetic oligonucleotide
  Antisense strand to SEQ ID NO: 1295592
uuucuccgagaccuuccug

SEQ ID NO: 1295594 - RNA, 19 nt, Artificial Sequence
  Description of Artificial Sequence: Synthetic oligonucleotide
  Sense strand starting at position 2640 of SEQ ID NO: 1241734
gugaggaucugggagaagu

SEQ ID NO: 1295595 - RNA, 19 nt, Artificial Sequence
  Description of Artificial Sequence: Synthetic oligonucleotide
  Antisense strand to SEQ ID NO: 1295594
acuucucccagauccucac

SEQ ID NO: 1295596 - RNA, 19 nt, Artificial Sequence
  Description of Artificial Sequence: Synthetic oligonucleotide
  Sense strand starting at position 2667 of SEQ ID NO: 1241734
gccggaucauaacugaauu

SEQ ID NO: 1295597 - RNA, 19 nt, Artificial Sequence
  Description of Artificial Sequence: Synthetic oligonucleotide
  Antisense strand to SEQ ID NO: 1295596
aauucaguuaugauccggc

SEQ ID NO: 1295598 - RNA, 19 nt, Artificial Sequence
  Description of Artificial Sequence: Synthetic oligonucleotide
  Sense strand starting at position 2694 of SEQ ID NO: 1241734
uuccuaaaccggugucuca

SEQ ID NO: 1295599 - RNA, 19 nt, Artificial Sequence
  Description of Artificial Sequence: Synthetic oligonucleotide
  Antisense strand to SEQ ID NO: 1295598
ugagacaccgguuuaggaa

SEQ ID NO: 1295600 - RNA, 19 nt, Artificial Sequence
  Description of Artificial Sequence: Synthetic oligonucleotide
  Sense strand starting at position 2807 of SEQ ID NO: 1241734
ggccgagcucuagaagagu

SEQ ID NO: 1295601 - RNA, 19 nt, Artificial Sequence
  Description of Artificial Sequence: Synthetic oligonucleotide
  Antisense strand to SEQ ID NO: 1295600
acucuucuagagcucggcc

SEQ ID NO: 1295602 - RNA, 19 nt, Artificial Sequence
  Description of Artificial Sequence: Synthetic oligonucleotide
  Sense strand starting at position 2989 of SEQ ID NO: 1241734
ggaucuaucuggcccaugu

SEQ ID NO: 1295603 - RNA, 19 nt, Artificial Sequence
  Description of Artificial Sequence: Synthetic oligonucleotide
  Antisense strand to SEQ ID NO: 1295602
acaugggccagauagaucc

SEQ ID NO: 1295604 - RNA, 19 nt, Artificial Sequence
  Description of Artificial Sequence: Synthetic oligonucleotide
  Sense strand starting at position 3016 of SEQ ID NO: 1241734
aggaaagagccaugugaac

SEQ ID NO: 1295605 - RNA, 19 nt, Artificial Sequence
  Description of Artificial Sequence: Synthetic oligonucleotide
  Antisense strand to SEQ ID NO: 1295604
guucacauggcucuuuccu

SEQ ID NO: 1295606 - RNA, 19 nt, Artificial Sequence
  Description of Artificial Sequence: Synthetic oligonucleotide
  Sense strand starting at position 3051 of SEQ ID NO: 1241734
ucgagagcauggcucuaau

SEQ ID NO: 1295607 - RNA, 19 nt, Artificial Sequence
  Description of Artificial Sequence: Synthetic oligonucleotide
  Antisense strand to SEQ ID NO: 1295606
auuagagccaugcucucga

SEQ ID NO: 1295608 - RNA, 19 nt, Artificial Sequence
  Description of Artificial Sequence: Synthetic oligonucleotide
  Sense strand starting at position 3054 of SEQ ID NO: 1241734
agagcauggcucuaaucag

SEQ ID NO: 1295609 - RNA, 19 nt, Artificial Sequence
  Description of Artificial Sequence: Synthetic oligonucleotide
  Antisense strand to SEQ ID NO: 1295608
cugauuagagccaugcucu

SEQ ID NO: 1295610 - RNA, 19 nt, Artificial Sequence
  Description of Artificial Sequence: Synthetic oligonucleotide
  Sense strand starting at position 3061 of SEQ ID NO: 1241734
ggcucuaaucagcagugua

SEQ ID NO: 1295611 - RNA, 19 nt, Artificial Sequence
  Description of Artificial Sequence: Synthetic oligonucleotide
  Antisense strand to SEQ ID NO: 1295610
uacacugcugauuagagcc

SEQ ID NO: 1295612 - RNA, 19 nt, Artificial Sequence
  Description of Artificial Sequence: Synthetic oligonucleotide
  Sense strand starting at position 3064 of SEQ ID NO: 1241734
ucuaaucagcaguguaaag

SEQ ID NO: 1295613 - RNA, 19 nt, Artificial Sequence
  Description of Artificial Sequence: Synthetic oligonucleotide
  Antisense strand to SEQ ID NO: 1295612
cuuuacacugcugauuaga

SEQ ID NO: 1295614 - RNA, 19 nt, Artificial Sequence
  Description of Artificial Sequence: Synthetic oligonucleotide
  Sense strand starting at position 3203 of SEQ ID NO: 1241734
gcuccaaauccuggcauaa

SEQ ID NO: 1295615 - RNA, 19 nt, Artificial Sequence
  Description of Artificial Sequence: Synthetic oligonucleotide
  Antisense strand to SEQ ID NO: 1295614
uuaugccaggauuuggagc

SEQ ID NO: 1295616 - RNA, 19 nt, Artificial Sequence
  Description of Artificial Sequence: Synthetic oligonucleotide
  Sense strand starting at position 3205 of SEQ ID NO: 1241734
uccaaauccuggcauaaug

SEQ ID NO: 1295617 - RNA, 19 nt, Artificial Sequence
  Description of Artificial Sequence: Synthetic oligonucleotide
  Antisense strand to SEQ ID NO: 1295616
cauuaugccaggauuugga

SEQ ID NO: 1295618 - RNA, 19 nt, Artificial Sequence
  Description of Artificial Sequence: Synthetic oligonucleotide
  Sense strand starting at position 3237 of SEQ ID NO: 1241734
auauuaggacucugccaaa

SEQ ID NO: 1295619 - RNA, 19 nt, Artificial Sequence
  Description of Artificial Sequence: Synthetic oligonucleotide
  Antisense strand to SEQ ID NO: 1295618
uuuggcagaguccuaauau

SEQ ID NO: 1295620 - RNA, 19 nt, Artificial Sequence
  Description of Artificial Sequence: Synthetic oligonucleotide
  Sense strand starting at position 3240 of SEQ ID NO: 1241734
uuaggacucugccaaauac

SEQ ID NO: 1295621 - RNA, 19 nt, Artificial Sequence
  Description of Artificial Sequence: Synthetic oligonucleotide
  Antisense strand to SEQ ID NO: 1295620
guauuuggcagaguccuaa

SEQ ID NO: 1295622 - RNA, 19 nt, Artificial Sequence
  Description of Artificial Sequence: Synthetic oligonucleotide
  Sense strand starting at position 3547 of SEQ ID NO: 1241734
caagcaaucuguuugggag

SEQ ID NO: 1295623 - RNA, 19 nt, Artificial Sequence
  Description of Artificial Sequence: Synthetic oligonucleotide
  Antisense strand to SEQ ID NO: 1295622
cucccaaacagauugcuug

SEQ ID NO: 1295624 - RNA, 19 nt, Artificial Sequence
  Description of Artificial Sequence: Synthetic oligonucleotide
  Sense strand starting at position 3658 of SEQ ID NO: 1241734
aauugagacucaugguaug

SEQ ID NO: 1295625 - RNA, 19 nt, Artificial Sequence
  Description of Artificial Sequence: Synthetic oligonucleotide
  Antisense strand to SEQ ID NO: 1295624
cauaccaugagucucaauu

SEQ ID NO: 1295626 - RNA, 19 nt, Artificial Sequence
  Description of Artificial Sequence: Synthetic oligonucleotide
  Sense strand starting at position 3663 of SEQ ID NO: 1241734
agacucaugguaugucauu

SEQ ID NO: 1295627 - RNA, 19 nt, Artificial Sequence
  Description of Artificial Sequence: Synthetic oligonucleotide
  Antisense strand to SEQ ID NO: 1295626
aaugacauaccaugagucu

SEQ ID NO: 1295628 - RNA, 19 nt, Artificial Sequence
  Description of Artificial Sequence: Synthetic oligonucleotide
  Sense strand starting at position 29 of SEQ ID NO: 1241735
cucucugugcauuacugaa

SEQ ID NO: 1295629 - RNA, 19 nt, Artificial Sequence
  Description of Artificial Sequence: Synthetic oligonucleotide
  Antisense strand to SEQ ID NO: 1295628
uucaguaaugcacagagag

SEQ ID NO: 1295630 - RNA, 19 nt, Artificial Sequence
  Description of Artificial Sequence: Synthetic oligonucleotide
  Sense strand starting at position 141 of SEQ ID NO: 1241735
gccugaugccuguuuccuu

SEQ ID NO: 1295631 - RNA, 19 nt, Artificial Sequence
  Description of Artificial Sequence: Synthetic oligonucleotide
  Antisense strand to SEQ ID NO: 1295630
aaggaaacaggcaucaggc

SEQ ID NO: 1295632 - RNA, 19 nt, Artificial Sequence
  Description of Artificial Sequence: Synthetic oligonucleotide
  Sense strand starting at position 243 of SEQ ID NO: 1241735
aguguaacuucuuuaagaa

SEQ ID NO: 1295633 - RNA, 19 nt, Artificial Sequence
  Description of Artificial Sequence: Synthetic oligonucleotide
  Antisense strand to SEQ ID NO: 1295632
uucuuaaagaaguuacacu

SEQ ID NO: 1295634 - RNA, 19 nt, Artificial Sequence
  Description of Artificial Sequence: Synthetic oligonucleotide
  Sense strand starting at position 244 of SEQ ID NO: 1241735
guguaacuucuuuaagaaa

SEQ ID NO: 1295635 - RNA, 19 nt, Artificial Sequence
  Description of Artificial Sequence: Synthetic oligonucleotide
  Antisense strand to SEQ ID NO: 1295634
uuucuuaaagaaguuacac

SEQ ID NO: 1295636 - RNA, 19 nt, Artificial Sequence
  Description of Artificial Sequence: Synthetic oligonucleotide
  Sense strand starting at position 306 of SEQ ID NO: 1241735
aaagacacguggguauaau

SEQ ID NO: 1295637 - RNA, 19 nt, Artificial Sequence
  Description of Artificial Sequence: Synthetic oligonucleotide
  Antisense strand to SEQ ID NO: 1295636
auuauacccacgugucuuu

SEQ ID NO: 1295638 - RNA, 19 nt, Artificial Sequence
  Description of Artificial Sequence: Synthetic oligonucleotide
  Sense strand starting at position 314 of SEQ ID NO: 1241735
guggguauaauauagcuga

SEQ ID NO: 1295639 - RNA, 19 nt, Artificial Sequence
  Description of Artificial Sequence: Synthetic oligonucleotide
  Antisense strand to SEQ ID NO: 1295638
ucagcuauauuauacccac

SEQ ID NO: 1295640 - RNA, 19 nt, Artificial Sequence
  Description of Artificial Sequence: Synthetic oligonucleotide
  Sense strand starting at position 325 of SEQ ID NO: 1241735
auagcugaugccuaacaaa

SEQ ID NO: 1295641 - RNA, 19 nt, Artificial Sequence
  Description of Artificial Sequence: Synthetic oligonucleotide
  Antisense strand to SEQ ID NO: 1295640
uuuguuaggcaucagcuau

SEQ ID NO: 1295642 - RNA, 19 nt, Artificial Sequence
  Description of Artificial Sequence: Synthetic oligonucleotide
  Sense strand starting at position 367 of SEQ ID NO: 1241735
agaagaggguuauccucau

SEQ ID NO: 1295643 - RNA, 19 nt, Artificial Sequence
  Description of Artificial Sequence: Synthetic oligonucleotide
  Antisense strand to SEQ ID NO: 1295642
augaggauaacccucuucu

SEQ ID NO: 1295644 - RNA, 19 nt, Artificial Sequence
  Description of Artificial Sequence: Synthetic oligonucleotide
  Sense strand starting at position 371 of SEQ ID NO: 1241735
gaggguuauccucauucca

SEQ ID NO: 1295645 - RNA, 19 nt, Artificial Sequence
  Description of Artificial Sequence: Synthetic oligonucleotide
  Antisense strand to SEQ ID NO: 1295644
uggaaugaggauaacccuc

SEQ ID NO: 1295646 - RNA, 19 nt, Artificial Sequence
  Description of Artificial Sequence: Synthetic oligonucleotide
  Sense strand starting at position 481 of SEQ ID NO: 1241735
gggccagaccaugaucuuu

SEQ ID NO: 1295647 - RNA, 19 nt, Artificial Sequence
  Description of Artificial Sequence: Synthetic oligonucleotide
  Antisense strand to SEQ ID NO: 1295646
aaagaucauggucuggccc

SEQ ID NO: 1295648 - RNA, 19 nt, Artificial Sequence
  Description of Artificial Sequence: Synthetic oligonucleotide
  Sense strand starting at position 594 of SEQ ID NO: 1241735
accaauaugggacguaagu

SEQ ID NO: 1295649 - RNA, 19 nt, Artificial Sequence
  Description of Artificial Sequence: Synthetic oligonucleotide
  Antisense strand to SEQ ID NO: 1295648
acuuacgucccauauuggu

SEQ ID NO: 1295650 - RNA, 19 nt, Artificial Sequence
  Description of Artificial Sequence: Synthetic oligonucleotide
  Sense strand starting at position 647 of SEQ ID NO: 1241735
gagguuuaucaagguacau

SEQ ID NO: 1295651 - RNA, 19 nt, Artificial Sequence
  Description of Artificial Sequence: Synthetic oligonucleotide
  Antisense strand to SEQ ID NO: 1295650
auguaccuugauaaaccuc

SEQ ID NO: 1295652 - RNA, 19 nt, Artificial Sequence
  Description of Artificial Sequence: Synthetic oligonucleotide
  Sense strand starting at position 666 of SEQ ID NO: 1241735
uauagcugggugugagaaa

SEQ ID NO: 1295653 - RNA, 19 nt, Artificial Sequence
  Description of Artificial Sequence: Synthetic oligonucleotide
  Antisense strand to SEQ ID NO: 1295652
uuucucacacccagcuaua

SEQ ID NO: 1295654 - RNA, 19 nt, Artificial Sequence
  Description of Artificial Sequence: Synthetic oligonucleotide
  Sense strand starting at position 721 of SEQ ID NO: 1241735
uggugaucacaaggagcua

SEQ ID NO: 1295655 - RNA, 19 nt, Artificial Sequence
  Description of Artificial Sequence: Synthetic oligonucleotide
  Antisense strand to SEQ ID NO: 1295654
uagcuccuugugaucacca

SEQ ID NO: 1295656 - RNA, 19 nt, Artificial Sequence
  Description of Artificial Sequence: Synthetic oligonucleotide
  Sense strand starting at position 795 of SEQ ID NO: 1241735
ccagaacucugucuacaag

SEQ ID NO: 1295657 - RNA, 19 nt, Artificial Sequence
  Description of Artificial Sequence: Synthetic oligonucleotide
  Antisense strand to SEQ ID NO: 1295656
cuuguagacagaguucugg

SEQ ID NO: 1295658 - RNA, 19 nt, Artificial Sequence
  Description of Artificial Sequence: Synthetic oligonucleotide
  Sense strand starting at position 1027 of SEQ ID NO: 1241735
agagacauaucagaaggga

SEQ ID NO: 1295659 - RNA, 19 nt, Artificial Sequence
  Description of Artificial Sequence: Synthetic oligonucleotide
  Antisense strand to SEQ ID NO: 1295658
ucccuucugauaugucucu

SEQ ID NO: 1295660 - RNA, 19 nt, Artificial Sequence
  Description of Artificial Sequence: Synthetic oligonucleotide
  Sense strand starting at position 1172 of SEQ ID NO: 1241735
gguagaaacuauucucauc

SEQ ID NO: 1295661 - RNA, 19 nt, Artificial Sequence
  Description of Artificial Sequence: Synthetic oligonucleotide
  Antisense strand to SEQ ID NO: 1295660
gaugagaauaguuucuacc

SEQ ID NO: 1295662 - RNA, 19 nt, Artificial Sequence
  Description of Artificial Sequence: Synthetic oligonucleotide
  Sense strand starting at position 1469 of SEQ ID NO: 1241735
gacagaacacgacgucaau

SEQ ID NO: 1295663 - RNA, 19 nt, Artificial Sequence
  Description of Artificial Sequence: Synthetic oligonucleotide
  Antisense strand to SEQ ID NO: 1295662
auugacgucguguucuguc

SEQ ID NO: 1295664 - RNA, 19 nt, Artificial Sequence
  Description of Artificial Sequence: Synthetic oligonucleotide
  Sense strand starting at position 2095 of SEQ ID NO: 1241735
cggauaucuguggaccuua

SEQ ID NO: 1295665 - RNA, 19 nt, Artificial Sequence
  Description of Artificial Sequence: Synthetic oligonucleotide
  Antisense strand to SEQ ID NO: 1295664
uaagguccacagauauccg

SEQ ID NO: 1295666 - RNA, 19 nt, Artificial Sequence
  Description of Artificial Sequence: Synthetic oligonucleotide
  Sense strand starting at position 2122 of SEQ ID NO: 1241735
gcgugagaucgguuccuuu

SEQ ID NO: 1295667 - RNA, 19 nt, Artificial Sequence
  Description of Artificial Sequence: Synthetic oligonucleotide
  Antisense strand to SEQ ID NO: 1295666
aaaggaaccgaucucacgc

SEQ ID NO: 1295668 - RNA, 19 nt, Artificial Sequence
  Description of Artificial Sequence: Synthetic oligonucleotide
  Sense strand starting at position 2207 of SEQ ID NO: 1241735
cccggauuacaugagguua

SEQ ID NO: 1295669 - RNA, 19 nt, Artificial Sequence
  Description of Artificial Sequence: Synthetic oligonucleotide
  Antisense strand to SEQ ID NO: 1295668
uaaccucauguaauccggg

SEQ ID NO: 1295670 - RNA, 19 nt, Artificial Sequence
  Description of Artificial Sequence: Synthetic oligonucleotide
  Sense strand starting at position 2346 of SEQ ID NO: 1241735
ggacgauauacgcaaauga

SEQ ID NO: 1295671 - RNA, 19 nt, Artificial Sequence
  Description of Artificial Sequence: Synthetic oligonucleotide
  Antisense strand to SEQ ID NO: 1295670
ucauuugcguauaucgucc

SEQ ID NO: 1295672 - RNA, 19 nt, Artificial Sequence
  Description of Artificial Sequence: Synthetic oligonucleotide
  Sense strand starting at position 2359 of SEQ ID NO: 1241735
aaaugagugucagcagauc

SEQ ID NO: 1295673 - RNA, 19 nt, Artificial Sequence
  Description of Artificial Sequence: Synthetic oligonucleotide
  Antisense strand to SEQ ID NO: 1295672
gaucugcugacacucauuu

SEQ ID NO: 1295674 - RNA, 19 nt, Artificial Sequence
  Description of Artificial Sequence: Synthetic oligonucleotide
  Sense strand starting at position 2492 of SEQ ID NO: 1241735
agaacauucugcuuguaau

SEQ ID NO: 1295675 - RNA, 19 nt, Artificial Sequence
  Description of Artificial Sequence: Synthetic oligonucleotide
  Antisense strand to SEQ ID NO: 1295674
auuacaagcagaauguucu

SEQ ID NO: 1295676 - RNA, 19 nt, Artificial Sequence
  Description of Artificial Sequence: Synthetic oligonucleotide
  Sense strand starting at position 2732 of SEQ ID NO: 1241735
guuucuugaagucaguuau

SEQ ID NO: 1295677 - RNA, 19 nt, Artificial Sequence
  Description of Artificial Sequence: Synthetic oligonucleotide
  Antisense strand to SEQ ID NO: 1295676
auaacugacuucaagaaac

SEQ ID NO: 1295678 - RNA, 19 nt, Artificial Sequence
  Description of Artificial Sequence: Synthetic oligonucleotide
  Sense strand starting at position 2736 of SEQ ID NO: 1241735
cuugaagucaguuauguuu

SEQ ID NO: 1295679 - RNA, 19 nt, Artificial Sequence
  Description of Artificial Sequence: Synthetic oligonucleotide
  Antisense strand to SEQ ID NO: 1295678
aaacauaacugacuucaag

SEQ ID NO: 1295680 - RNA, 19 nt, Artificial Sequence
  Description of Artificial Sequence: Synthetic oligonucleotide
  Sense strand starting at position 2784 of SEQ ID NO: 1241735
ucaggcugaccaugaauca

SEQ ID NO: 1295681 - RNA, 19 nt, Artificial Sequence
  Description of Artificial Sequence: Synthetic oligonucleotide
  Antisense strand to SEQ ID NO: 1295680
ugauucauggucagccuga

SEQ ID NO: 1295682 - RNA, 19 nt, Artificial Sequence
  Description of Artificial Sequence: Synthetic oligonucleotide
  Sense strand starting at position 2864 of SEQ ID NO: 1241735
ggugguaagagcuauuccu

SEQ ID NO: 1295683 - RNA, 19 nt, Artificial Sequence
  Description of Artificial Sequence: Synthetic oligonucleotide
  Antisense strand to SEQ ID NO: 1295682
aggaauagcucuuaccacc

SEQ ID NO: 1295684 - RNA, 19 nt, Artificial Sequence
  Description of Artificial Sequence: Synthetic oligonucleotide
  Sense strand starting at position 2908 of SEQ ID NO: 1241735
cuccuauguguggaagguu

SEQ ID NO: 1295685 - RNA, 19 nt, Artificial Sequence
  Description of Artificial Sequence: Synthetic oligonucleotide
  Antisense strand to SEQ ID NO: 1295684
aaccuuccacacauaggag

SEQ ID NO: 1295686 - RNA, 19 nt, Artificial Sequence
  Description of Artificial Sequence: Synthetic oligonucleotide
  Sense strand starting at position 2917 of SEQ ID NO: 1241735
guggaagguuugaaagaga

SEQ ID NO: 1295687 - RNA, 19 nt, Artificial Sequence
  Description of Artificial Sequence: Synthetic oligonucleotide
  Antisense strand to SEQ ID NO: 1295686
ucucuuucaaaccuuccac

SEQ ID NO: 1295688 - RNA, 19 nt, Artificial Sequence
  Description of Artificial Sequence: Synthetic oligonucleotide
  Sense strand starting at position 2966 of SEQ ID NO: 1241735
uccaguuuagcagggaaua

SEQ ID NO: 1295689 - RNA, 19 nt, Artificial Sequence
  Description of Artificial Sequence: Synthetic oligonucleotide
  Antisense strand to SEQ ID NO: 1295688
uauucccugcuaaacugga

SEQ ID NO: 1295690 - RNA, 19 nt, Artificial Sequence
  Description of Artificial Sequence: Synthetic oligonucleotide
  Sense strand starting at position 2967 of SEQ ID NO: 1241735
ccaguuuagcagggaauau

SEQ ID NO: 1295691 - RNA, 19 nt, Artificial Sequence
  Description of Artificial Sequence: Synthetic oligonucleotide
  Antisense strand to SEQ ID NO: 1295690
auauucccugcuaaacugg

SEQ ID NO: 1295692 - RNA, 19 nt, Artificial Sequence
  Description of Artificial Sequence: Synthetic oligonucleotide
  Sense strand starting at position 3030 of SEQ ID NO: 1241735
agcagaauuauagggugua

SEQ ID NO: 1295693 - RNA, 19 nt, Artificial Sequence
  Description of Artificial Sequence: Synthetic oligonucleotide
  Antisense strand to SEQ ID NO: 1295692
uacacccuauaauucugcu

SEQ ID NO: 1295694 - RNA, 19 nt, Artificial Sequence
  Description of Artificial Sequence: Synthetic oligonucleotide
  Sense strand starting at position 3033 of SEQ ID NO: 1241735
agaauuauaggguguacca

SEQ ID NO: 1295695 - RNA, 19 nt, Artificial Sequence
  Description of Artificial Sequence: Synthetic oligonucleotide
  Antisense strand to SEQ ID NO: 1295694
ugguacacccuauaauucu

SEQ ID NO: 1295696 - RNA, 19 nt, Artificial Sequence
  Description of Artificial Sequence: Synthetic oligonucleotide
  Sense strand starting at position 3042 of SEQ ID NO: 1241735
ggguguaccacauaucuag

SEQ ID NO: 1295697 - RNA, 19 nt, Artificial Sequence
  Description of Artificial Sequence: Synthetic oligonucleotide
  Antisense strand to SEQ ID NO: 1295696
cuagauaugugguacaccc

SEQ ID NO: 1295698 - RNA, 19 nt, Artificial Sequence
  Description of Artificial Sequence: Synthetic oligonucleotide
  Sense strand starting at position 3091 of SEQ ID NO: 1241735
aggaauacuucucugugga

SEQ ID NO: 1295699 - RNA, 19 nt, Artificial Sequence
  Description of Artificial Sequence: Synthetic oligonucleotide
  Antisense strand to SEQ ID NO: 1295698
uccacagagaaguauuccu

SEQ ID NO: 1295700 - RNA, 19 nt, Artificial Sequence
  Description of Artificial Sequence: Synthetic oligonucleotide
  Sense strand starting at position 3092 of SEQ ID NO: 1241735
ggaauacuucucuguggaa

SEQ ID NO: 1295701 - RNA, 19 nt, Artificial Sequence
  Description of Artificial Sequence: Synthetic oligonucleotide
  Antisense strand to SEQ ID NO: 1295700
uuccacagagaaguauucc

SEQ ID NO: 1295702 - RNA, 19 nt, Artificial Sequence
  Description of Artificial Sequence: Synthetic oligonucleotide
  Sense strand starting at position 3093 of SEQ ID NO: 1241735
gaauacuucucuguggaaa

SEQ ID NO: 1295703 - RNA, 19 nt, Artificial Sequence
  Description of Artificial Sequence: Synthetic oligonucleotide
  Antisense strand to SEQ ID NO: 1295702
uuuccacagagaaguauuc

SEQ ID NO: 1295704 - RNA, 19 nt, Artificial Sequence
  Description of Artificial Sequence: Synthetic oligonucleotide
  Sense strand starting at position 3908 of SEQ ID NO: 1241735
cguggucauuuguuuauua

SEQ ID NO: 1295705 - RNA, 19 nt, Artificial Sequence
  Description of Artificial Sequence: Synthetic oligonucleotide
  Antisense strand to SEQ ID NO: 1295704
uaauaaacaaaugaccacg

SEQ ID NO: 1295706 - RNA, 19 nt, Artificial Sequence
  Description of Artificial Sequence: Synthetic oligonucleotide
  Sense strand starting at position 3909 of SEQ ID NO: 1241735
guggucauuuguuuauuau

SEQ ID NO: 1295707 - RNA, 19 nt, Artificial Sequence
  Description of Artificial Sequence: Synthetic oligonucleotide
  Antisense strand to SEQ ID NO: 1295706
auaauaaacaaaugaccac

SEQ ID NO: 1295708 - RNA, 19 nt, Artificial Sequence
  Description of Artificial Sequence: Synthetic oligonucleotide
  Sense strand starting at position 60 of SEQ ID NO: 1241736
gucugauuuagguggccuu

SEQ ID NO: 1295709 - RNA, 19 nt, Artificial Sequence
  Description of Artificial Sequence: Synthetic oligonucleotide
  Antisense strand to SEQ ID NO: 1295708
aaggccaccuaaaucagac

SEQ ID NO: 1295710 - RNA, 19 nt, Artificial Sequence
  Description of Artificial Sequence: Synthetic oligonucleotide
  Sense strand starting at position 151 of SEQ ID NO: 1241736
accauuaaguuccugagga

SEQ ID NO: 1295711 - RNA, 19 nt, Artificial Sequence
  Description of Artificial Sequence: Synthetic oligonucleotide
  Antisense strand to SEQ ID NO: 1295710
uccucaggaacuuaauggu

SEQ ID NO: 1295712 - RNA, 19 nt, Artificial Sequence
  Description of Artificial Sequence: Synthetic oligonucleotide
  Sense strand starting at position 369 of SEQ ID NO: 1241736
cuaacagaaugcuugaauu

SEQ ID NO: 1295713 - RNA, 19 nt, Artificial Sequence
  Description of Artificial Sequence: Synthetic oligonucleotide
  Antisense strand to SEQ ID NO: 1295712
aauucaagcauucuguuag

SEQ ID NO: 1295714 - RNA, 19 nt, Artificial Sequence
  Description of Artificial Sequence: Synthetic oligonucleotide
  Sense strand starting at position 600 of SEQ ID NO: 1241736
ggaauaauauuguuaaguc

SEQ ID NO: 1295715 - RNA, 19 nt, Artificial Sequence
  Description of Artificial Sequence: Synthetic oligonucleotide
  Antisense strand to SEQ ID NO: 1295714
gacuuaacaauauuauucc

SEQ ID NO: 1295716 - RNA, 19 nt, Artificial Sequence
  Description of Artificial Sequence: Synthetic oligonucleotide
  Sense strand starting at position 715 of SEQ ID NO: 1241736
acaauaucucacuggacgu

SEQ ID NO: 1295717 - RNA, 19 nt, Artificial Sequence
  Description of Artificial Sequence: Synthetic oligonucleotide
  Antisense strand to SEQ ID NO: 1295716
acguccagugagauauugu

SEQ ID NO: 1295718 - RNA, 19 nt, Artificial Sequence
  Description of Artificial Sequence: Synthetic oligonucleotide
  Sense strand starting at position 761 of SEQ ID NO: 1241736
ggcuucugugcccaauaca

SEQ ID NO: 1295719 - RNA, 19 nt, Artificial Sequence
  Description of Artificial Sequence: Synthetic oligonucleotide
  Antisense strand to SEQ ID NO: 1295718
uguauugggcacagaagcc

SEQ ID NO: 1295720 - RNA, 19 nt, Artificial Sequence
  Description of Artificial Sequence: Synthetic oligonucleotide
  Sense strand starting at position 994 of SEQ ID NO: 1241736
aggagauucggcugaacca

SEQ ID NO: 1295721 - RNA, 19 nt, Artificial Sequence
  Description of Artificial Sequence: Synthetic oligonucleotide
  Antisense strand to SEQ ID NO: 1295720
ugguucagccgaaucuccu

SEQ ID NO: 1295722 - RNA, 19 nt, Artificial Sequence
  Description of Artificial Sequence: Synthetic oligonucleotide
  Sense strand starting at position 1054 of SEQ ID NO: 1241736
uucccuucucuggaaguaa

SEQ ID NO: 1295723 - RNA, 19 nt, Artificial Sequence
  Description of Artificial Sequence: Synthetic oligonucleotide
  Antisense strand to SEQ ID NO: 1295722
uuacuuccagagaagggaa

SEQ ID NO: 1295724 - RNA, 19 nt, Artificial Sequence
  Description of Artificial Sequence: Synthetic oligonucleotide
  Sense strand starting at position 1068 of SEQ ID NO: 1241736
aguaaacauugcucacagu

SEQ ID NO: 1295725 - RNA, 19 nt, Artificial Sequence
  Description of Artificial Sequence: Synthetic oligonucleotide
  Antisense strand to SEQ ID NO: 1295724
acugugagcaauguuuacu

SEQ ID NO: 1295726 - RNA, 19 nt, Artificial Sequence
  Description of Artificial Sequence: Synthetic oligonucleotide
  Sense strand starting at position 1069 of SEQ ID NO: 1241736
guaaacauugcucacaguu

SEQ ID NO: 1295727 - RNA, 19 nt, Artificial Sequence
  Description of Artificial Sequence: Synthetic oligonucleotide
  Antisense strand to SEQ ID NO: 1295726
aacugugagcaauguuuac

SEQ ID NO: 1295728 - RNA, 19 nt, Artificial Sequence
  Description of Artificial Sequence: Synthetic oligonucleotide
  Sense strand starting at position 1106 of SEQ ID NO: 1241736
aguuucuaugcauaugcaa

SEQ ID NO: 1295729 - RNA, 19 nt, Artificial Sequence
  Description of Artificial Sequence: Synthetic oligonucleotide
  Antisense strand to SEQ ID NO: 1295728
uugcauaugcauagaaacu

SEQ ID NO: 1295730 - RNA, 19 nt, Artificial Sequence
  Description of Artificial Sequence: Synthetic oligonucleotide
  Sense strand starting at position 1214 of SEQ ID NO: 1241736
cagagaccuugcccuguua

SEQ ID NO: 1295731 - RNA, 19 nt, Artificial Sequence
  Description of Artificial Sequence: Synthetic oligonucleotide
  Antisense strand to SEQ ID NO: 1295730
uaacagggcaaggucucug

SEQ ID NO: 1295732 - RNA, 19 nt, Artificial Sequence
  Description of Artificial Sequence: Synthetic oligonucleotide
  Sense strand starting at position 1216 of SEQ ID NO: 1241736
gagaccuugcccuguuaac

SEQ ID NO: 1295733 - RNA, 19 nt, Artificial Sequence
  Description of Artificial Sequence: Synthetic oligonucleotide
  Antisense strand to SEQ ID NO: 1295732
guuaacagggcaaggucuc

SEQ ID NO: 1295734 - RNA, 19 nt, Artificial Sequence
  Description of Artificial Sequence: Synthetic oligonucleotide
  Sense strand starting at position 1588 of SEQ ID NO: 1241736
cagucuggguuucuauuau

SEQ ID NO: 1295735 - RNA, 19 nt, Artificial Sequence
  Description of Artificial Sequence: Synthetic oligonucleotide
  Antisense strand to SEQ ID NO: 1295734
auaauagaaacccagacug

SEQ ID NO: 1295736 - RNA, 19 nt, Artificial Sequence
  Description of Artificial Sequence: Synthetic oligonucleotide
  Sense strand starting at position 1594 of SEQ ID NO: 1241736
ggguuucuauuaucacaaa

SEQ ID NO: 1295737 - RNA, 19 nt, Artificial Sequence
  Description of Artificial Sequence: Synthetic oligonucleotide
  Antisense strand to SEQ ID NO: 1295736
uuugugauaauagaaaccc

SEQ ID NO: 1295738 - RNA, 19 nt, Artificial Sequence
  Description of Artificial Sequence: Synthetic oligonucleotide
  Sense strand starting at position 2016 of SEQ ID NO: 1241736
gaaacuucgcucuggauuc

SEQ ID NO: 1295739 - RNA, 19 nt, Artificial Sequence
  Description of Artificial Sequence: Synthetic oligonucleotide
  Antisense strand to SEQ ID NO: 1295738
gaauccagagcgaaguuuc

SEQ ID NO: 1295740 - RNA, 19 nt, Artificial Sequence
  Description of Artificial Sequence: Synthetic oligonucleotide
  Sense strand starting at position 2312 of SEQ ID NO: 1241736
cgucuccucuggcuaauuu

SEQ ID NO: 1295741 - RNA, 19 nt, Artificial Sequence
  Description of Artificial Sequence: Synthetic oligonucleotide
  Antisense strand to SEQ ID NO: 1295740
aaauuagccagaggagacg

SEQ ID NO: 1295742 - RNA, 19 nt, Artificial Sequence
  Description of Artificial Sequence: Synthetic oligonucleotide
  Sense strand starting at position 2515 of SEQ ID NO: 1241736
aaguguagacaucagucaa

SEQ ID NO: 1295743 - RNA, 19 nt, Artificial Sequence
  Description of Artificial Sequence: Synthetic oligonucleotide
  Antisense strand to SEQ ID NO: 1295742
uugacugaugucuacacuu

SEQ ID NO: 1295744 - RNA, 19 nt, Artificial Sequence
  Description of Artificial Sequence: Synthetic oligonucleotide
  Sense strand starting at position 2580 of SEQ ID NO: 1241736
agaagagagauccguggau

SEQ ID NO: 1295745 - RNA, 19 nt, Artificial Sequence
  Description of Artificial Sequence: Synthetic oligonucleotide
  Antisense strand to SEQ ID NO: 1295744
auccacggaucucucuucu

SEQ ID NO: 1295746 - RNA, 19 nt, Artificial Sequence
  Description of Artificial Sequence: Synthetic oligonucleotide
  Sense strand starting at position 2582 of SEQ ID NO: 1241736
aagagagauccguggauca

SEQ ID NO: 1295747 - RNA, 19 nt, Artificial Sequence
  Description of Artificial Sequence: Synthetic oligonucleotide
  Antisense strand to SEQ ID NO: 1295746
ugauccacggaucucucuu

SEQ ID NO: 1295748 - RNA, 19 nt, Artificial Sequence
  Description of Artificial Sequence: Synthetic oligonucleotide
  Sense strand starting at position 2617 of SEQ ID NO: 1241736
agccauccugaaugauuaa

SEQ ID NO: 1295749 - RNA, 19 nt, Artificial Sequence
  Description of Artificial Sequence: Synthetic oligonucleotide
  Antisense strand to SEQ ID NO: 1295748
uuaaucauucaggauggcu

SEQ ID NO: 1295750 - RNA, 19 nt, Artificial Sequence
  Description of Artificial Sequence: Synthetic oligonucleotide
  Sense strand starting at position 2637 of SEQ ID NO: 1241736
gcugaacccuuuccaggaa

SEQ ID NO: 1295751 - RNA, 19 nt, Artificial Sequence
  Description of Artificial Sequence: Synthetic oligonucleotide
  Antisense strand to SEQ ID NO: 1295750
uuccuggaaaggguucagc

SEQ ID NO: 1295752 - RNA, 19 nt, Artificial Sequence
  Description of Artificial Sequence: Synthetic oligonucleotide
  Sense strand starting at position 2680 of SEQ ID NO: 1241736
acaagugacccuuagguua

SEQ ID NO: 1295753 - RNA, 19 nt, Artificial Sequence
  Description of Artificial Sequence: Synthetic oligonucleotide
  Antisense strand to SEQ ID NO: 1295752
uaaccuaagggucacuugu

SEQ ID NO: 1295754 - RNA, 19 nt, Artificial Sequence
  Description of Artificial Sequence: Synthetic oligonucleotide
  Sense strand starting at position 2683 of SEQ ID NO: 1241736
agugacccuuagguuaaua

SEQ ID NO: 1295755 - RNA, 19 nt, Artificial Sequence
  Description of Artificial Sequence: Synthetic oligonucleotide
  Antisense strand to SEQ ID NO: 1295754
uauuaaccuaagggucacu

SEQ ID NO: 1295756 - RNA, 19 nt, Artificial Sequence
  Description of Artificial Sequence: Synthetic oligonucleotide
  Sense strand starting at position 2797 of SEQ ID NO: 1241736
cauugcuuuccuuagagag

SEQ ID NO: 1295757 - RNA, 19 nt, Artificial Sequence
  Description of Artificial Sequence: Synthetic oligonucleotide
  Antisense strand to SEQ ID NO: 1295756
cucucuaaggaaagcaaug

SEQ ID NO: 1295758 - RNA, 19 nt, Artificial Sequence
  Description of Artificial Sequence: Synthetic oligonucleotide
  Sense strand starting at position 2841 of SEQ ID NO: 1241736
ugagcuuccgcucagaauu

SEQ ID NO: 1295759 - RNA, 19 nt, Artificial Sequence
  Description of Artificial Sequence: Synthetic oligonucleotide
  Antisense strand to SEQ ID NO: 1295758
aauucugagcggaagcuca

SEQ ID NO: 1295760 - RNA, 19 nt, Artificial Sequence
  Description of Artificial Sequence: Synthetic oligonucleotide
  Sense strand starting at position 2875 of SEQ ID NO: 1241736
ucuauuaacugagccagua

SEQ ID NO: 1295761 - RNA, 19 nt, Artificial Sequence
  Description of Artificial Sequence: Synthetic oligonucleotide
  Antisense strand to SEQ ID NO: 1295760
uacuggcucaguuaauaga

SEQ ID NO: 1295762 - RNA, 19 nt, Artificial Sequence
  Description of Artificial Sequence: Synthetic oligonucleotide
  Sense strand starting at position 3021 of SEQ ID NO: 1241736
ggaucucugggaggucauu

SEQ ID NO: 1295763 - RNA, 19 nt, Artificial Sequence
  Description of Artificial Sequence: Synthetic oligonucleotide
  Antisense strand to SEQ ID NO: 1295762
aaugaccucccagagaucc

SEQ ID NO: 1295764 - RNA, 19 nt, Artificial Sequence
  Description of Artificial Sequence: Synthetic oligonucleotide
  Sense strand starting at position 3027 of SEQ ID NO: 1241736
cugggaggucauuagguca

SEQ ID NO: 1295765 - RNA, 19 nt, Artificial Sequence
  Description of Artificial Sequence: Synthetic oligonucleotide
  Antisense strand to SEQ ID NO: 1295764
ugaccuaaugaccucccag

SEQ ID NO: 1295766 - RNA, 19 nt, Artificial Sequence
  Description of Artificial Sequence: Synthetic oligonucleotide
  Sense strand starting at position 3035 of SEQ ID NO: 1241736
ucauuaggucauggaguuu

SEQ ID NO: 1295767 - RNA, 19 nt, Artificial Sequence
  Description of Artificial Sequence: Synthetic oligonucleotide
  Antisense strand to SEQ ID NO: 1295766
aaacuccaugaccuaauga

SEQ ID NO: 1295768 - RNA, 19 nt, Artificial Sequence
  Description of Artificial Sequence: Synthetic oligonucleotide
  Sense strand starting at position 3068 of SEQ ID NO: 1241736
ugggauugguggccucaua

SEQ ID NO: 1295769 - RNA, 19 nt, Artificial Sequence
  Description of Artificial Sequence: Synthetic oligonucleotide
  Antisense strand to SEQ ID NO: 1295768
uaugaggccaccaauccca

SEQ ID NO: 1295770 - RNA, 19 nt, Artificial Sequence
  Description of Artificial Sequence: Synthetic oligonucleotide
  Sense strand starting at position 3209 of SEQ ID NO: 1241736
ggacuuccauucucuagaa

SEQ ID NO: 1295771 - RNA, 19 nt, Artificial Sequence
  Description of Artificial Sequence: Synthetic oligonucleotide
  Antisense strand to SEQ ID NO: 1295770
uucuagagaauggaagucc

SEQ ID NO: 1295772 - RNA, 19 nt, Artificial Sequence
  Description of Artificial Sequence: Synthetic oligonucleotide
  Sense strand starting at position 3342 of SEQ ID NO: 1241736
ucugaaacauaauucguaa

SEQ ID NO: 1295773 - RNA, 19 nt, Artificial Sequence
  Description of Artificial Sequence: Synthetic oligonucleotide
  Antisense strand to SEQ ID NO: 1295772
uuacgaauuauguuucaga

SEQ ID NO: 1295774 - RNA, 19 nt, Artificial Sequence
  Description of Artificial Sequence: Synthetic oligonucleotide
  Sense strand starting at position 3353 of SEQ ID NO: 1241736
auucguaaagaauguaacu

SEQ ID NO: 1295775 - RNA, 19 nt, Artificial Sequence
  Description of Artificial Sequence: Synthetic oligonucleotide
  Antisense strand to SEQ ID NO: 1295774
aguuacauucuuuacgaau

SEQ ID NO: 1295776 - RNA, 19 nt, Artificial Sequence
  Description of Artificial Sequence: Synthetic oligonucleotide
  Sense strand starting at position 3749 of SEQ ID NO: 1241736
gugguacucagauauaugc

SEQ ID NO: 1295777 - RNA, 19 nt, Artificial Sequence
  Description of Artificial Sequence: Synthetic oligonucleotide
  Antisense strand to SEQ ID NO: 1295776
gcauauaucugaguaccac

SEQ ID NO: 1295778 - RNA, 19 nt, Artificial Sequence
  Description of Artificial Sequence: Synthetic oligonucleotide
  Sense strand starting at position 3799 of SEQ ID NO: 1241736
gcuacaaaugcagaaugau

SEQ ID NO: 1295779 - RNA, 19 nt, Artificial Sequence
  Description of Artificial Sequence: Synthetic oligonucleotide
  Antisense strand to SEQ ID NO: 1295778
aucauucugcauuuguagc

SEQ ID NO: 1295780 - RNA, 19 nt, Artificial Sequence
  Description of Artificial Sequence: Synthetic oligonucleotide
  Sense strand starting at position 3807 of SEQ ID NO: 1241736
ugcagaaugauacaggcau

SEQ ID NO: 1295781 - RNA, 19 nt, Artificial Sequence
  Description of Artificial Sequence: Synthetic oligonucleotide
  Antisense strand to SEQ ID NO: 1295780
augccuguaucauucugca

SEQ ID NO: 1295782 - RNA, 19 nt, Artificial Sequence
  Description of Artificial Sequence: Synthetic oligonucleotide
  Sense strand starting at position 3919 of SEQ ID NO: 1241736
aagguaugaucaucccaug

SEQ ID NO: 1295783 - RNA, 19 nt, Artificial Sequence
  Description of Artificial Sequence: Synthetic oligonucleotide
  Antisense strand to SEQ ID NO: 1295782
caugggaugaucauaccuu

SEQ ID NO: 1295784 - RNA, 19 nt, Artificial Sequence
  Description of Artificial Sequence: Synthetic oligonucleotide
  Sense strand starting at position 3947 of SEQ ID NO: 1241736
guaguugcaucccuggaaa

SEQ ID NO: 1295785 - RNA, 19 nt, Artificial Sequence
  Description of Artificial Sequence: Synthetic oligonucleotide
  Antisense strand to SEQ ID NO: 1295784
uuuccagggaugcaacuac

SEQ ID NO: 1295786 - RNA, 19 nt, Artificial Sequence
  Description of Artificial Sequence: Synthetic oligonucleotide
  Sense strand starting at position 3950 of SEQ ID NO: 1241736
guugcaucccuggaaaguu

SEQ ID NO: 1295787 - RNA, 19 nt, Artificial Sequence
  Description of Artificial Sequence: Synthetic oligonucleotide
  Antisense strand to SEQ ID NO: 1295786
aacuuuccagggaugcaac

SEQ ID NO: 1295788 - RNA, 19 nt, Artificial Sequence
  Description of Artificial Sequence: Synthetic oligonucleotide
  Sense strand starting at position 127 of SEQ ID NO: 1241737
acaggugaccuauguguau

SEQ ID NO: 1295789 - RNA, 19 nt, Artificial Sequence
  Description of Artificial Sequence: Synthetic oligonucleotide
  Antisense strand to SEQ ID NO: 1295788
auacacauaggucaccugu

SEQ ID NO: 1295790 - RNA, 19 nt, Artificial Sequence
  Description of Artificial Sequence: Synthetic oligonucleotide
  Sense strand starting at position 129 of SEQ ID NO: 1241737
aggugaccuauguguauuu

SEQ ID NO: 1295791 - RNA, 19 nt, Artificial Sequence
  Description of Artificial Sequence: Synthetic oligonucleotide
  Antisense strand to SEQ ID NO: 1295790
aaauacacauaggucaccu

SEQ ID NO: 1295792 - RNA, 19 nt, Artificial Sequence
  Description of Artificial Sequence: Synthetic oligonucleotide
  Sense strand starting at position 134 of SEQ ID NO: 1241737
accuauguguauuuauagu

SEQ ID NO: 1295793 - RNA, 19 nt, Artificial Sequence
  Description of Artificial Sequence: Synthetic oligonucleotide
  Antisense strand to SEQ ID NO: 1295792
acuauaaauacacauaggu

SEQ ID NO: 1295794 - RNA, 19 nt, Artificial Sequence
  Description of Artificial Sequence: Synthetic oligonucleotide
  Sense strand starting at position 140 of SEQ ID NO: 1241737
guguauuuauaguccggau

SEQ ID NO: 1295795 - RNA, 19 nt, Artificial Sequence
  Description of Artificial Sequence: Synthetic oligonucleotide
  Antisense strand to SEQ ID NO: 1295794
auccggacuauaaauacac

SEQ ID NO: 1295796 - RNA, 19 nt, Artificial Sequence
  Description of Artificial Sequence: Synthetic oligonucleotide
  Sense strand starting at position 142 of SEQ ID NO: 1241737
guauuuauaguccggauug

SEQ ID NO: 1295797 - RNA, 19 nt, Artificial Sequence
  Description of Artificial Sequence: Synthetic oligonucleotide
  Antisense strand to SEQ ID NO: 1295796
caauccggacuauaaauac

SEQ ID NO: 1295798 - RNA, 19 nt, Artificial Sequence
  Description of Artificial Sequence: Synthetic oligonucleotide
  Sense strand starting at position 154 of SEQ ID NO: 1241737
cggauugccugucaugaga

SEQ ID NO: 1295799 - RNA, 19 nt, Artificial Sequence
  Description of Artificial Sequence: Synthetic oligonucleotide
  Antisense strand to SEQ ID NO: 1295798
ucucaugacaggcaauccg

SEQ ID NO: 1295800 - RNA, 19 nt, Artificial Sequence
  Description of Artificial Sequence: Synthetic oligonucleotide
  Sense strand starting at position 156 of SEQ ID NO: 1241737
gauugccugucaugagaug

SEQ ID NO: 1295801 - RNA, 19 nt, Artificial Sequence
  Description of Artificial Sequence: Synthetic oligonucleotide
  Antisense strand to SEQ ID NO: 1295800
caucucaugacaggcaauc

SEQ ID NO: 1295802 - RNA, 19 nt, Artificial Sequence
  Description of Artificial Sequence: Synthetic oligonucleotide
  Sense strand starting at position 167 of SEQ ID NO: 1241737
augagauguucgccuccca

SEQ ID NO: 1295803 - RNA, 19 nt, Artificial Sequence
  Description of Artificial Sequence: Synthetic oligonucleotide
  Antisense strand to SEQ ID NO: 1295802
ugggaggcgaacaucucau

SEQ ID NO: 1295804 - RNA, 19 nt, Artificial Sequence
  Description of Artificial Sequence: Synthetic oligonucleotide
  Sense strand starting at position 264 of SEQ ID NO: 1241737
gccugaaggacaugacuga

SEQ ID NO: 1295805 - RNA, 19 nt, Artificial Sequence
  Description of Artificial Sequence: Synthetic oligonucleotide
  Antisense strand to SEQ ID NO: 1295804
ucagucauguccuucaggc

SEQ ID NO: 1295806 - RNA, 19 nt, Artificial Sequence
  Description of Artificial Sequence: Synthetic oligonucleotide
  Sense strand starting at position 271 of SEQ ID NO: 1241737
ggacaugacugagagggua

SEQ ID NO: 1295807 - RNA, 19 nt, Artificial Sequence
  Description of Artificial Sequence: Synthetic oligonucleotide
  Antisense strand to SEQ ID NO: 1295806
uacccucucagucaugucc

SEQ ID NO: 1295808 - RNA, 19 nt, Artificial Sequence
  Description of Artificial Sequence: Synthetic oligonucleotide
  Sense strand starting at position 510 of SEQ ID NO: 1241737
uuccucugcccucagagaa

SEQ ID NO: 1295809 - RNA, 19 nt, Artificial Sequence
  Description of Artificial Sequence: Synthetic oligonucleotide
  Antisense strand to SEQ ID NO: 1295808
uucucugagggcagaggaa

SEQ ID NO: 1295810 - RNA, 19 nt, Artificial Sequence
  Description of Artificial Sequence: Synthetic oligonucleotide
  Sense strand starting at position 522 of SEQ ID NO: 1241737
cagagaacguccuaaggcu

SEQ ID NO: 1295811 - RNA, 19 nt, Artificial Sequence
  Description of Artificial Sequence: Synthetic oligonucleotide
  Antisense strand to SEQ ID NO: 1295810
agccuuaggacguucucug

SEQ ID NO: 1295812 - RNA, 19 nt, Artificial Sequence
  Description of Artificial Sequence: Synthetic oligonucleotide
  Sense strand starting at position 952 of SEQ ID NO: 1241737
ccagccaucuguuucucau

SEQ ID NO: 1295813 - RNA, 19 nt, Artificial Sequence
  Description of Artificial Sequence: Synthetic oligonucleotide
  Antisense strand to SEQ ID NO: 1295812
augagaaacagauggcugg

SEQ ID NO: 1295814 - RNA, 19 nt, Artificial Sequence
  Description of Artificial Sequence: Synthetic oligonucleotide
  Sense strand starting at position 956 of SEQ ID NO: 1241737
ccaucuguuucucaucagu

SEQ ID NO: 1295815 - RNA, 19 nt, Artificial Sequence
  Description of Artificial Sequence: Synthetic oligonucleotide
  Antisense strand to SEQ ID NO: 1295814
acugaugagaaacagaugg

SEQ ID NO: 1295816 - RNA, 19 nt, Artificial Sequence
  Description of Artificial Sequence: Synthetic oligonucleotide
  Sense strand starting at position 1371 of SEQ ID NO: 1241737
gcaguaucgcggucugcua

SEQ ID NO: 1295817 - RNA, 19 nt, Artificial Sequence
  Description of Artificial Sequence: Synthetic oligonucleotide
  Antisense strand to SEQ ID NO: 1295816
uagcagaccgcgauacugc

SEQ ID NO: 1295818 - RNA, 19 nt, Artificial Sequence
  Description of Artificial Sequence: Synthetic oligonucleotide
  Sense strand starting at position 2145 of SEQ ID NO: 1241737
ggcgcauauccgggucuau

SEQ ID NO: 1295819 - RNA, 19 nt, Artificial Sequence
  Description of Artificial Sequence: Synthetic oligonucleotide
  Antisense strand to SEQ ID NO: 1295818
auagacccggauaugcgcc

SEQ ID NO: 1295820 - RNA, 19 nt, Artificial Sequence
  Description of Artificial Sequence: Synthetic oligonucleotide
  Sense strand starting at position 26 of SEQ ID NO: 1241738
agguauucuucuucccaag

SEQ ID NO: 1295821 - RNA, 19 nt, Artificial Sequence
  Description of Artificial Sequence: Synthetic oligonucleotide
  Antisense strand to SEQ ID NO: 1295820
cuugggaagaagaauaccu

SEQ ID NO: 1295822 - RNA, 19 nt, Artificial Sequence
  Description of Artificial Sequence: Synthetic oligonucleotide
  Sense strand starting at position 69 of SEQ ID NO: 1241738
gugucacaaugaguuguga

SEQ ID NO: 1295823 - RNA, 19 nt, Artificial Sequence
  Description of Artificial Sequence: Synthetic oligonucleotide
  Antisense strand to SEQ ID NO: 1295822
ucacaacucauugugacac

SEQ ID NO: 1295824 - RNA, 19 nt, Artificial Sequence
  Description of Artificial Sequence: Synthetic oligonucleotide
  Sense strand starting at position 71 of SEQ ID NO: 1241738
gucacaaugaguugugaaa

SEQ ID NO: 1295825 - RNA, 19 nt, Artificial Sequence
  Description of Artificial Sequence: Synthetic oligonucleotide
  Antisense strand to SEQ ID NO: 1295824
uuucacaacucauugugac

SEQ ID NO: 1295826 - RNA, 19 nt, Artificial Sequence
  Description of Artificial Sequence: Synthetic oligonucleotide
  Sense strand starting at position 181 of SEQ ID NO: 1241738
uacugauacgaucgcaugu

SEQ ID NO: 1295827 - RNA, 19 nt, Artificial Sequence
  Description of Artificial Sequence: Synthetic oligonucleotide
  Antisense strand to SEQ ID NO: 1295826
acaugcgaucguaucagua

SEQ ID NO: 1295828 - RNA, 19 nt, Artificial Sequence
  Description of Artificial Sequence: Synthetic oligonucleotide
  Sense strand starting at position 192 of SEQ ID NO: 1241738
ucgcaugugcaagaauaca

SEQ ID NO: 1295829 - RNA, 19 nt, Artificial Sequence
  Description of Artificial Sequence: Synthetic oligonucleotide
  Antisense strand to SEQ ID NO: 1295828
uguauucuugcacaugcga

SEQ ID NO: 1295830 - RNA, 19 nt, Artificial Sequence
  Description of Artificial Sequence: Synthetic oligonucleotide
  Sense strand starting at position 208 of SEQ ID NO: 1241738
acauauguuucccuggaca

SEQ ID NO: 1295831 - RNA, 19 nt, Artificial Sequence
  Description of Artificial Sequence: Synthetic oligonucleotide
  Antisense strand to SEQ ID NO: 1295830
uguccagggaaacauaugu

SEQ ID NO: 1295832 - RNA, 19 nt, Artificial Sequence
  Description of Artificial Sequence: Synthetic oligonucleotide
  Sense strand starting at position 221 of SEQ ID NO: 1241738
uggacagcacaauguaauu

SEQ ID NO: 1295833 - RNA, 19 nt, Artificial Sequence
  Description of Artificial Sequence: Synthetic oligonucleotide
  Antisense strand to SEQ ID NO: 1295832
aauuacauugugcugucca

SEQ ID NO: 1295834 - RNA, 19 nt, Artificial Sequence
  Description of Artificial Sequence: Synthetic oligonucleotide
  Sense strand starting at position 500 of SEQ ID NO: 1241738
cagcgagaauuuggacuua

SEQ ID NO: 1295835 - RNA, 19 nt, Artificial Sequence
  Description of Artificial Sequence: Synthetic oligonucleotide
  Antisense strand to SEQ ID NO: 1295834
uaaguccaaauucucgcug

SEQ ID NO: 1295836 - RNA, 19 nt, Artificial Sequence
  Description of Artificial Sequence: Synthetic oligonucleotide
  Sense strand starting at position 554 of SEQ ID NO: 1241738
auggauuucuuuggcauag

SEQ ID NO: 1295837 - RNA, 19 nt, Artificial Sequence
  Description of Artificial Sequence: Synthetic oligonucleotide
  Antisense strand to SEQ ID NO: 1295836
cuaugccaaagaaauccau

SEQ ID NO: 1295838 - RNA, 19 nt, Artificial Sequence
  Description of Artificial Sequence: Synthetic oligonucleotide
  Sense strand starting at position 556 of SEQ ID NO: 1241738
ggauuucuuuggcauagua

SEQ ID NO: 1295839 - RNA, 19 nt, Artificial Sequence
  Description of Artificial Sequence: Synthetic oligonucleotide
  Antisense strand to SEQ ID NO: 1295838
uacuaugccaaagaaaucc

SEQ ID NO: 1295840 - RNA, 19 nt, Artificial Sequence
  Description of Artificial Sequence: Synthetic oligonucleotide
  Sense strand starting at position 715 of SEQ ID NO: 1241738
gccugagcuugcucaagau

SEQ ID NO: 1295841 - RNA, 19 nt, Artificial Sequence
  Description of Artificial Sequence: Synthetic oligonucleotide
  Antisense strand to SEQ ID NO: 1295840
aucuugagcaagcucaggc

SEQ ID NO: 1295842 - RNA, 19 nt, Artificial Sequence
  Description of Artificial Sequence: Synthetic oligonucleotide
  Sense strand starting at position 719 of SEQ ID NO: 1241738
gagcuugcucaagaucugu

SEQ ID NO: 1295843 - RNA, 19 nt, Artificial Sequence
  Description of Artificial Sequence: Synthetic oligonucleotide
  Antisense strand to SEQ ID NO: 1295842
acagaucuugagcaagcuc

SEQ ID NO: 1295844 - RNA, 19 nt, Artificial Sequence
  Description of Artificial Sequence: Synthetic oligonucleotide
  Sense strand starting at position 982 of SEQ ID NO: 1241738
gacugaggcuuggcaagaa

SEQ ID NO: 1295845 - RNA, 19 nt, Artificial Sequence
  Description of Artificial Sequence: Synthetic oligonucleotide
  Antisense strand to SEQ ID NO: 1295844
uucuugccaagccucaguc

SEQ ID NO: 1295846 - RNA, 19 nt, Artificial Sequence
  Description of Artificial Sequence: Synthetic oligonucleotide
  Sense strand starting at position 1095 of SEQ ID NO: 1241738
cugggauucuuguccaugu

SEQ ID NO: 1295847 - RNA, 19 nt, Artificial Sequence
  Description of Artificial Sequence: Synthetic oligonucleotide
  Antisense strand to SEQ ID NO: 1295846
acauggacaagaaucccag

SEQ ID NO: 1295848 - RNA, 19 nt, Artificial Sequence
  Description of Artificial Sequence: Synthetic oligonucleotide
  Sense strand starting at position 1097 of SEQ ID NO: 1241738
gggauucuuguccaugugu

SEQ ID NO: 1295849 - RNA, 19 nt, Artificial Sequence
  Description of Artificial Sequence: Synthetic oligonucleotide
  Antisense strand to SEQ ID NO: 1295848
acacauggacaagaauccc

SEQ ID NO: 1295850 - RNA, 19 nt, Artificial Sequence
  Description of Artificial Sequence: Synthetic oligonucleotide
  Sense strand starting at position 1099 of SEQ ID NO: 1241738
gauucuuguccaugugucu

SEQ ID NO: 1295851 - RNA, 19 nt, Artificial Sequence
  Description of Artificial Sequence: Synthetic oligonucleotide
  Antisense strand to SEQ ID NO: 1295850
agacacauggacaagaauc

SEQ ID NO: 1295852 - RNA, 19 nt, Artificial Sequence
  Description of Artificial Sequence: Synthetic oligonucleotide
  Sense strand starting at position 1102 of SEQ ID NO: 1241738
ucuuguccaugugucuaaa

SEQ ID NO: 1295853 - RNA, 19 nt, Artificial Sequence
  Description of Artificial Sequence: Synthetic oligonucleotide
  Antisense strand to SEQ ID NO: 1295852
uuuagacacauggacaaga

SEQ ID NO: 1295854 - RNA, 19 nt, Artificial Sequence
  Description of Artificial Sequence: Synthetic oligonucleotide
  Sense strand starting at position 1104 of SEQ ID NO: 1241738
uuguccaugugucuaaaca

SEQ ID NO: 1295855 - RNA, 19 nt, Artificial Sequence
  Description of Artificial Sequence: Synthetic oligonucleotide
  Antisense strand to SEQ ID NO: 1295854
uguuuagacacauggacaa

SEQ ID NO: 1295856 - RNA, 19 nt, Artificial Sequence
  Description of Artificial Sequence: Synthetic oligonucleotide
  Sense strand starting at position 1105 of SEQ ID NO: 1241738
uguccaugugucuaaacag

SEQ ID NO: 1295857 - RNA, 19 nt, Artificial Sequence
  Description of Artificial Sequence: Synthetic oligonucleotide
  Antisense strand to SEQ ID NO: 1295856
cuguuuagacacauggaca

SEQ ID NO: 1295858 - RNA, 19 nt, Artificial Sequence
  Description of Artificial Sequence: Synthetic oligonucleotide
  Sense strand starting at position 1242 of SEQ ID NO: 1241738
uagaguggauaucugauau

SEQ ID NO: 1295859 - RNA, 19 nt, Artificial Sequence
  Description of Artificial Sequence: Synthetic oligonucleotide
  Antisense strand to SEQ ID NO: 1295858
auaucagauauccacucua

SEQ ID NO: 1295860 - RNA, 19 nt, Artificial Sequence
  Description of Artificial Sequence: Synthetic oligonucleotide
  Sense strand starting at position 1347 of SEQ ID NO: 1241738
cuugccuugccuugaaaga

SEQ ID NO: 1295861 - RNA, 19 nt, Artificial Sequence
  Description of Artificial Sequence: Synthetic oligonucleotide
  Antisense strand to SEQ ID NO: 1295860
ucuuucaaggcaaggcaag

SEQ ID NO: 1295862 - RNA, 19 nt, Artificial Sequence
  Description of Artificial Sequence: Synthetic oligonucleotide
  Sense strand starting at position 1348 of SEQ ID NO: 1241738
uugccuugccuugaaagaa

SEQ ID NO: 1295863 - RNA, 19 nt, Artificial Sequence
  Description of Artificial Sequence: Synthetic oligonucleotide
  Antisense strand to SEQ ID NO: 1295862
uucuuucaaggcaaggcaa

SEQ ID NO: 1295864 - RNA, 19 nt, Artificial Sequence
  Description of Artificial Sequence: Synthetic oligonucleotide
  Sense strand starting at position 1415 of SEQ ID NO: 1241738
aaagaucaccagugaguag

SEQ ID NO: 1295865 - RNA, 19 nt, Artificial Sequence
  Description of Artificial Sequence: Synthetic oligonucleotide
  Antisense strand to SEQ ID NO: 1295864
cuacucacuggugaucuuu

SEQ ID NO: 1295866 - RNA, 19 nt, Artificial Sequence
  Description of Artificial Sequence: Synthetic oligonucleotide
  Sense strand starting at position 1857 of SEQ ID NO: 1241738
cgcucauucccuuggacuu

SEQ ID NO: 1295867 - RNA, 19 nt, Artificial Sequence
  Description of Artificial Sequence: Synthetic oligonucleotide
  Antisense strand to SEQ ID NO: 1295866
aaguccaagggaaugagcg

SEQ ID NO: 1295868 - RNA, 19 nt, Artificial Sequence
  Description of Artificial Sequence: Synthetic oligonucleotide
  Sense strand starting at position 2211 of SEQ ID NO: 1241738
ucuggaaaguuacuccgau

SEQ ID NO: 1295869 - RNA, 19 nt, Artificial Sequence
  Description of Artificial Sequence: Synthetic oligonucleotide
  Antisense strand to SEQ ID NO: 1295868
aucggaguaacuuuccaga

SEQ ID NO: 1295870 - RNA, 19 nt, Artificial Sequence
  Description of Artificial Sequence: Synthetic oligonucleotide
  Sense strand starting at position 2212 of SEQ ID NO: 1241738
cuggaaaguuacuccgaug

SEQ ID NO: 1295871 - RNA, 19 nt, Artificial Sequence
  Description of Artificial Sequence: Synthetic oligonucleotide
  Antisense strand to SEQ ID NO: 1295870
caucggaguaacuuuccag

SEQ ID NO: 1295872 - RNA, 19 nt, Artificial Sequence
  Description of Artificial Sequence: Synthetic oligonucleotide
  Sense strand starting at position 2807 of SEQ ID NO: 1241738
gcagaaaugucauccagau

SEQ ID NO: 1295873 - RNA, 19 nt, Artificial Sequence
  Description of Artificial Sequence: Synthetic oligonucleotide
  Antisense strand to SEQ ID NO: 1295872
aucuggaugacauuucugc

SEQ ID NO: 1295874 - RNA, 19 nt, Artificial Sequence
  Description of Artificial Sequence: Synthetic oligonucleotide
  Sense strand starting at position 3049 of SEQ ID NO: 1241738
gaacuuuccugagagugag

SEQ ID NO: 1295875 - RNA, 19 nt, Artificial Sequence
  Description of Artificial Sequence: Synthetic oligonucleotide
  Antisense strand to SEQ ID NO: 1295874
cucacucucaggaaaguuc

SEQ ID NO: 1295876 - RNA, 19 nt, Artificial Sequence
  Description of Artificial Sequence: Synthetic oligonucleotide
  Sense strand starting at position 3146 of SEQ ID NO: 1241738
ggcuguucucuguauccca

SEQ ID NO: 1295877 - RNA, 19 nt, Artificial Sequence
  Description of Artificial Sequence: Synthetic oligonucleotide
  Antisense strand to SEQ ID NO: 1295876
ugggauacagagaacagcc

SEQ ID NO: 1295878 - RNA, 19 nt, Artificial Sequence
  Description of Artificial Sequence: Synthetic oligonucleotide
  Sense strand starting at position 3232 of SEQ ID NO: 1241738
gaccacacugcuugugagu

SEQ ID NO: 1295879 - RNA, 19 nt, Artificial Sequence
  Description of Artificial Sequence: Synthetic oligonucleotide
  Antisense strand to SEQ ID NO: 1295878
acucacaagcagugugguc

SEQ ID NO: 1295880 - RNA, 19 nt, Artificial Sequence
  Description of Artificial Sequence: Synthetic oligonucleotide
  Sense strand starting at position 3238 of SEQ ID NO: 1241738
acugcuugugagugaugga

SEQ ID NO: 1295881 - RNA, 19 nt, Artificial Sequence
  Description of Artificial Sequence: Synthetic oligonucleotide
  Antisense strand to SEQ ID NO: 1295880
uccaucacucacaagcagu

SEQ ID NO: 1295882 - RNA, 19 nt, Artificial Sequence
  Description of Artificial Sequence: Synthetic oligonucleotide
  Sense strand starting at position 3245 of SEQ ID NO: 1241738
gugagugauggaggcgaua

SEQ ID NO: 1295883 - RNA, 19 nt, Artificial Sequence
  Description of Artificial Sequence: Synthetic oligonucleotide
  Antisense strand to SEQ ID NO: 1295882
uaucgccuccaucacucac

SEQ ID NO: 1295884 - RNA, 19 nt, Artificial Sequence
  Description of Artificial Sequence: Synthetic oligonucleotide
  Sense strand starting at position 3247 of SEQ ID NO: 1241738
gagugauggaggcgauauu

SEQ ID NO: 1295885 - RNA, 19 nt, Artificial Sequence
  Description of Artificial Sequence: Synthetic oligonucleotide
  Antisense strand to SEQ ID NO: 1295884
aauaucgccuccaucacuc

SEQ ID NO: 1295886 - RNA, 19 nt, Artificial Sequence
  Description of Artificial Sequence: Synthetic oligonucleotide
  Sense strand starting at position 3376 of SEQ ID NO: 1241738
gugucagcuguugggauuu

SEQ ID NO: 1295887 - RNA, 19 nt, Artificial Sequence
  Description of Artificial Sequence: Synthetic oligonucleotide
  Antisense strand to SEQ ID NO: 1295886
aaaucccaacagcugacac

SEQ ID NO: 1295888 - RNA, 19 nt, Artificial Sequence
  Description of Artificial Sequence: Synthetic oligonucleotide
  Sense strand starting at position 3432 of SEQ ID NO: 1241738
augcuauacugccucugaa

SEQ ID NO: 1295889 - RNA, 19 nt, Artificial Sequence
  Description of Artificial Sequence: Synthetic oligonucleotide
  Antisense strand to SEQ ID NO: 1295888
uucagaggcaguauagcau

SEQ ID NO: 1295890 - RNA, 19 nt, Artificial Sequence
  Description of Artificial Sequence: Synthetic oligonucleotide
  Sense strand starting at position 3490 of SEQ ID NO: 1241738
uauucuaggcucugugaag

SEQ ID NO: 1295891 - RNA, 19 nt, Artificial Sequence
  Description of Artificial Sequence: Synthetic oligonucleotide
  Antisense strand to SEQ ID NO: 1295890
cuucacagagccuagaaua

SEQ ID NO: 1295892 - RNA, 19 nt, Artificial Sequence
  Description of Artificial Sequence: Synthetic oligonucleotide
  Sense strand starting at position 3491 of SEQ ID NO: 1241738
auucuaggcucugugaaga

SEQ ID NO: 1295893 - RNA, 19 nt, Artificial Sequence
  Description of Artificial Sequence: Synthetic oligonucleotide
  Antisense strand to SEQ ID NO: 1295892
ucuucacagagccuagaau

SEQ ID NO: 1295894 - RNA, 19 nt, Artificial Sequence
  Description of Artificial Sequence: Synthetic oligonucleotide
  Sense strand starting at position 3499 of SEQ ID NO: 1241738
cucugugaagaauaucagu

SEQ ID NO: 1295895 - RNA, 19 nt, Artificial Sequence
  Description of Artificial Sequence: Synthetic oligonucleotide
  Antisense strand to SEQ ID NO: 1295894
acugauauucuucacagag

SEQ ID NO: 1295896 - RNA, 19 nt, Artificial Sequence
  Description of Artificial Sequence: Synthetic oligonucleotide
  Sense strand starting at position 3502 of SEQ ID NO: 1241738
ugugaagaauaucagugaa

SEQ ID NO: 1295897 - RNA, 19 nt, Artificial Sequence
  Description of Artificial Sequence: Synthetic oligonucleotide
  Antisense strand to SEQ ID NO: 1295896
uucacugauauucuucaca

SEQ ID NO: 1295898 - RNA, 19 nt, Artificial Sequence
  Description of Artificial Sequence: Synthetic oligonucleotide
  Sense strand starting at position 3608 of SEQ ID NO: 1241738
aaugauguaguacgguaaa

SEQ ID NO: 1295899 - RNA, 19 nt, Artificial Sequence
  Description of Artificial Sequence: Synthetic oligonucleotide
  Antisense strand to SEQ ID NO: 1295898
uuuaccguacuacaucauu

SEQ ID NO: 1295900 - RNA, 19 nt, Artificial Sequence
  Description of Artificial Sequence: Synthetic oligonucleotide
  Sense strand starting at position 246 of SEQ ID NO: 1241739
ggaguacucugagaccgau

SEQ ID NO: 1295901 - RNA, 19 nt, Artificial Sequence
  Description of Artificial Sequence: Synthetic oligonucleotide
  Antisense strand to SEQ ID NO: 1295900
aucggucucagaguacucc

SEQ ID NO: 1295902 - RNA, 19 nt, Artificial Sequence
  Description of Artificial Sequence: Synthetic oligonucleotide
  Sense strand starting at position 476 of SEQ ID NO: 1241739
cccacugaccgaugaguaa

SEQ ID NO: 1295903 - RNA, 19 nt, Artificial Sequence
  Description of Artificial Sequence: Synthetic oligonucleotide
  Antisense strand to SEQ ID NO: 1295902
uuacucaucggucaguggg

SEQ ID NO: 1295904 - RNA, 19 nt, Artificial Sequence
  Description of Artificial Sequence: Synthetic oligonucleotide
  Sense strand starting at position 485 of SEQ ID NO: 1241739
cgaugaguaacucaagggu

SEQ ID NO: 1295905 - RNA, 19 nt, Artificial Sequence
  Description of Artificial Sequence: Synthetic oligonucleotide
  Antisense strand to SEQ ID NO: 1295904
acccuugaguuacucaucg

SEQ ID NO: 1295906 - RNA, 19 nt, Artificial Sequence
  Description of Artificial Sequence: Synthetic oligonucleotide
  Sense strand starting at position 488 of SEQ ID NO: 1241739
ugaguaacucaagggugau

SEQ ID NO: 1295907 - RNA, 19 nt, Artificial Sequence
  Description of Artificial Sequence: Synthetic oligonucleotide
  Antisense strand to SEQ ID NO: 1295906
aucacccuugaguuacuca

SEQ ID NO: 1295908 - RNA, 19 nt, Artificial Sequence
  Description of Artificial Sequence: Synthetic oligonucleotide
  Sense strand starting at position 489 of SEQ ID NO: 1241739
gaguaacucaagggugaug

SEQ ID NO: 1295909 - RNA, 19 nt, Artificial Sequence
  Description of Artificial Sequence: Synthetic oligonucleotide
  Antisense strand to SEQ ID NO: 1295908
caucacccuugaguuacuc

SEQ ID NO: 1295910 - RNA, 19 nt, Artificial Sequence
  Description of Artificial Sequence: Synthetic oligonucleotide
  Sense strand starting at position 500 of SEQ ID NO: 1241739
gggugaugcgaucagagga

SEQ ID NO: 1295911 - RNA, 19 nt, Artificial Sequence
  Description of Artificial Sequence: Synthetic oligonucleotide
  Antisense strand to SEQ ID NO: 1295910
uccucugaucgcaucaccc

SEQ ID NO: 1295912 - RNA, 19 nt, Artificial Sequence
  Description of Artificial Sequence: Synthetic oligonucleotide
  Sense strand starting at position 586 of SEQ ID NO: 1241739
uacucauacucgucugugu

SEQ ID NO: 1295913 - RNA, 19 nt, Artificial Sequence
  Description of Artificial Sequence: Synthetic oligonucleotide
  Antisense strand to SEQ ID NO: 1295912
acacagacgaguaugagua

SEQ ID NO: 1295914 - RNA, 19 nt, Artificial Sequence
  Description of Artificial Sequence: Synthetic oligonucleotide
  Sense strand starting at position 681 of SEQ ID NO: 1241739
gacacagcuccgugucagu

SEQ ID NO: 1295915 - RNA, 19 nt, Artificial Sequence
  Description of Artificial Sequence: Synthetic oligonucleotide
  Antisense strand to SEQ ID NO: 1295914
acugacacggagcuguguc

SEQ ID NO: 1295916 - RNA, 19 nt, Artificial Sequence
  Description of Artificial Sequence: Synthetic oligonucleotide
  Sense strand starting at position 714 of SEQ ID NO: 1241739
agcccaggcccuuaucauu

SEQ ID NO: 1295917 - RNA, 19 nt, Artificial Sequence
  Description of Artificial Sequence: Synthetic oligonucleotide
  Antisense strand to SEQ ID NO: 1295916
aaugauaagggccugggcu

SEQ ID NO: 1295918 - RNA, 19 nt, Artificial Sequence
  Description of Artificial Sequence: Synthetic oligonucleotide
  Sense strand starting at position 762 of SEQ ID NO: 1241739
cugagucucuggucccauu

SEQ ID NO: 1295919 - RNA, 19 nt, Artificial Sequence
  Description of Artificial Sequence: Synthetic oligonucleotide
  Antisense strand to SEQ ID NO: 1295918
aaugggaccagagacucag

SEQ ID NO: 1295920 - RNA, 19 nt, Artificial Sequence
  Description of Artificial Sequence: Synthetic oligonucleotide
  Sense strand starting at position 902 of SEQ ID NO: 1241739
caggucuucgagugccaga

SEQ ID NO: 1295921 - RNA, 19 nt, Artificial Sequence
  Description of Artificial Sequence: Synthetic oligonucleotide
  Antisense strand to SEQ ID NO: 1295920
ucuggcacucgaagaccug

SEQ ID NO: 1295922 - RNA, 19 nt, Artificial Sequence
  Description of Artificial Sequence: Synthetic oligonucleotide
  Sense strand starting at position 962 of SEQ ID NO: 1241739
agucgucaucugccgcauu

SEQ ID NO: 1295923 - RNA, 19 nt, Artificial Sequence
  Description of Artificial Sequence: Synthetic oligonucleotide
  Antisense strand to SEQ ID NO: 1295922
aaugcggcagaugacgacu

SEQ ID NO: 1295924 - RNA, 19 nt, Artificial Sequence
  Description of Artificial Sequence: Synthetic oligonucleotide
  Sense strand starting at position 972 of SEQ ID NO: 1241739
ugccgcauuucggcaugaa

SEQ ID NO: 1295925 - RNA, 19 nt, Artificial Sequence
  Description of Artificial Sequence: Synthetic oligonucleotide
  Antisense strand to SEQ ID NO: 1295924
uucaugccgaaaugcggca

SEQ ID NO: 1295926 - RNA, 19 nt, Artificial Sequence
  Description of Artificial Sequence: Synthetic oligonucleotide
  Sense strand starting at position 973 of SEQ ID NO: 1241739
gccgcauuucggcaugaac

SEQ ID NO: 1295927 - RNA, 19 nt, Artificial Sequence
  Description of Artificial Sequence: Synthetic oligonucleotide
  Antisense strand to SEQ ID NO: 1295926
guucaugccgaaaugcggc

SEQ ID NO: 1295928 - RNA, 19 nt, Artificial Sequence
  Description of Artificial Sequence: Synthetic oligonucleotide
  Sense strand starting at position 975 of SEQ ID NO: 1241739
cgcauuucggcaugaacag

SEQ ID NO: 1295929 - RNA, 19 nt, Artificial Sequence
  Description of Artificial Sequence: Synthetic oligonucleotide
  Antisense strand to SEQ ID NO: 1295928
cuguucaugccgaaaugcg

SEQ ID NO: 1295930 - RNA, 19 nt, Artificial Sequence
  Description of Artificial Sequence: Synthetic oligonucleotide
  Sense strand starting at position 1287 of SEQ ID NO: 1241739
cagagaccuuccgcgaaga

SEQ ID NO: 1295931 - RNA, 19 nt, Artificial Sequence
  Description of Artificial Sequence: Synthetic oligonucleotide
  Antisense strand to SEQ ID NO: 1295930
ucuucgcggaaggucucug

SEQ ID NO: 1295932 - RNA, 19 nt, Artificial Sequence
  Description of Artificial Sequence: Synthetic oligonucleotide
  Sense strand starting at position 1412 of SEQ ID NO: 1241739
cgauccaucccaggaaauc

SEQ ID NO: 1295933 - RNA, 19 nt, Artificial Sequence
  Description of Artificial Sequence: Synthetic oligonucleotide
  Antisense strand to SEQ ID NO: 1295932
gauuuccugggauggaucg

SEQ ID NO: 1295934 - RNA, 19 nt, Artificial Sequence
  Description of Artificial Sequence: Synthetic oligonucleotide
  Sense strand starting at position 1556 of SEQ ID NO: 1241739
acugacagcuucuagaacu

SEQ ID NO: 1295935 - RNA, 19 nt, Artificial Sequence
  Description of Artificial Sequence: Synthetic oligonucleotide
  Antisense strand to SEQ ID NO: 1295934
aguucuagaagcugucagu

SEQ ID NO: 1295936 - RNA, 19 nt, Artificial Sequence
  Description of Artificial Sequence: Synthetic oligonucleotide
  Sense strand starting at position 1739 of SEQ ID NO: 1241739
agucuugguguugggaaca

SEQ ID NO: 1295937 - RNA, 19 nt, Artificial Sequence
  Description of Artificial Sequence: Synthetic oligonucleotide
  Antisense strand to SEQ ID NO: 1295936
uguucccaacaccaagacu

SEQ ID NO: 1295938 - RNA, 19 nt, Artificial Sequence
  Description of Artificial Sequence: Synthetic oligonucleotide
  Sense strand starting at position 1979 of SEQ ID NO: 1241739
agaccugguaagugacuua

SEQ ID NO: 1295939 - RNA, 19 nt, Artificial Sequence
  Description of Artificial Sequence: Synthetic oligonucleotide
  Antisense strand to SEQ ID NO: 1295938
uaagucacuuaccaggucu

SEQ ID NO: 1295940 - RNA, 19 nt, Artificial Sequence
  Description of Artificial Sequence: Synthetic oligonucleotide
  Sense strand starting at position 1982 of SEQ ID NO: 1241739
ccugguaagugacuuaugu

SEQ ID NO: 1295941 - RNA, 19 nt, Artificial Sequence
  Description of Artificial Sequence: Synthetic oligonucleotide
  Antisense strand to SEQ ID NO: 1295940
acauaagucacuuaccagg

SEQ ID NO: 1295942 - RNA, 19 nt, Artificial Sequence
  Description of Artificial Sequence: Synthetic oligonucleotide
  Sense strand starting at position 1990 of SEQ ID NO: 1241739
gugacuuaugugggaggga

SEQ ID NO: 1295943 - RNA, 19 nt, Artificial Sequence
  Description of Artificial Sequence: Synthetic oligonucleotide
  Antisense strand to SEQ ID NO: 1295942
ucccucccacauaagucac

SEQ ID NO: 1295944 - RNA, 19 nt, Artificial Sequence
  Description of Artificial Sequence: Synthetic oligonucleotide
  Sense strand starting at position 2156 of SEQ ID NO: 1241739
caggcugauuccuaccaga

SEQ ID NO: 1295945 - RNA, 19 nt, Artificial Sequence
  Description of Artificial Sequence: Synthetic oligonucleotide
  Antisense strand to SEQ ID NO: 1295944
ucugguaggaaucagccug

SEQ ID NO: 1295946 - RNA, 19 nt, Artificial Sequence
  Description of Artificial Sequence: Synthetic oligonucleotide
  Sense strand starting at position 2193 of SEQ ID NO: 1241739
ccuucucccggaugaagaa

SEQ ID NO: 1295947 - RNA, 19 nt, Artificial Sequence
  Description of Artificial Sequence: Synthetic oligonucleotide
  Antisense strand to SEQ ID NO: 1295946
uucuucauccgggagaagg

SEQ ID NO: 1295948 - RNA, 19 nt, Artificial Sequence
  Description of Artificial Sequence: Synthetic oligonucleotide
  Sense strand starting at position 2344 of SEQ ID NO: 1241739
ggcucagcccuaugaaauu

SEQ ID NO: 1295949 - RNA, 19 nt, Artificial Sequence
  Description of Artificial Sequence: Synthetic oligonucleotide
  Antisense strand to SEQ ID NO: 1295948
aauuucauagggcugagcc

SEQ ID NO: 1295950 - RNA, 19 nt, Artificial Sequence
  Description of Artificial Sequence: Synthetic oligonucleotide
  Sense strand starting at position 2484 of SEQ ID NO: 1241739
cuggcucuaccagauauuc

SEQ ID NO: 1295951 - RNA, 19 nt, Artificial Sequence
  Description of Artificial Sequence: Synthetic oligonucleotide
  Antisense strand to SEQ ID NO: 1295950
gaauaucugguagagccag

SEQ ID NO: 1295952 - RNA, 19 nt, Artificial Sequence
  Description of Artificial Sequence: Synthetic oligonucleotide
  Sense strand starting at position 2565 of SEQ ID NO: 1241739
gugagcugcccucaaguuu

SEQ ID NO: 1295953 - RNA, 19 nt, Artificial Sequence
  Description of Artificial Sequence: Synthetic oligonucleotide
  Antisense strand to SEQ ID NO: 1295952
aaacuugagggcagcucac

SEQ ID NO: 1295954 - RNA, 19 nt, Artificial Sequence
  Description of Artificial Sequence: Synthetic oligonucleotide
  Sense strand starting at position 2737 of SEQ ID NO: 1241739
agaggagucucugcucagu

SEQ ID NO: 1295955 - RNA, 19 nt, Artificial Sequence
  Description of Artificial Sequence: Synthetic oligonucleotide
  Antisense strand to SEQ ID NO: 1295954
acugagcagagacuccucu

SEQ ID NO: 1295956 - RNA, 19 nt, Artificial Sequence
  Description of Artificial Sequence: Synthetic oligonucleotide
  Sense strand starting at position 2784 of SEQ ID NO: 1241739
cuggaauucuuccugggaa

SEQ ID NO: 1295957 - RNA, 19 nt, Artificial Sequence
  Description of Artificial Sequence: Synthetic oligonucleotide
  Antisense strand to SEQ ID NO: 1295956
uucccaggaagaauuccag

SEQ ID NO: 1295958 - RNA, 19 nt, Artificial Sequence
  Description of Artificial Sequence: Synthetic oligonucleotide
  Sense strand starting at position 2785 of SEQ ID NO: 1241739
uggaauucuuccugggaau

SEQ ID NO: 1295959 - RNA, 19 nt, Artificial Sequence
  Description of Artificial Sequence: Synthetic oligonucleotide
  Antisense strand to SEQ ID NO: 1295958
auucccaggaagaauucca

SEQ ID NO: 1295960 - RNA, 19 nt, Artificial Sequence
  Description of Artificial Sequence: Synthetic oligonucleotide
  Sense strand starting at position 2786 of SEQ ID NO: 1241739
ggaauucuuccugggaauc

SEQ ID NO: 1295961 - RNA, 19 nt, Artificial Sequence
  Description of Artificial Sequence: Synthetic oligonucleotide
  Antisense strand to SEQ ID NO: 1295960
gauucccaggaagaauucc

SEQ ID NO: 1295962 - RNA, 19 nt, Artificial Sequence
  Description of Artificial Sequence: Synthetic oligonucleotide
  Sense strand starting at position 3315 of SEQ ID NO: 1241739
ugcggauuugugcaucacu

SEQ ID NO: 1295963 - RNA, 19 nt, Artificial Sequence
  Description of Artificial Sequence: Synthetic oligonucleotide
  Antisense strand to SEQ ID NO: 1295962
agugaugcacaaauccgca

SEQ ID NO: 1295964 - RNA, 19 nt, Artificial Sequence
  Description of Artificial Sequence: Synthetic oligonucleotide
  Sense strand starting at position 3414 of SEQ ID NO: 1241739
guaggaugccuuugucaca

SEQ ID NO: 1295965 - RNA, 19 nt, Artificial Sequence
  Description of Artificial Sequence: Synthetic oligonucleotide
  Antisense strand to SEQ ID NO: 1295964
ugugacaaaggcauccuac

SEQ ID NO: 1295966 - RNA, 19 nt, Artificial Sequence
  Description of Artificial Sequence: Synthetic oligonucleotide
  Sense strand starting at position 3662 of SEQ ID NO: 1241739
gcaagaacaugagucuaga

SEQ ID NO: 1295967 - RNA, 19 nt, Artificial Sequence
  Description of Artificial Sequence: Synthetic oligonucleotide
  Antisense strand to SEQ ID NO: 1295966
ucuagacucauguucuugc

SEQ ID NO: 1295968 - RNA, 19 nt, Artificial Sequence
  Description of Artificial Sequence: Synthetic oligonucleotide
  Sense strand starting at position 3673 of SEQ ID NO: 1241739
agucuagaauccuagacca

SEQ ID NO: 1295969 - RNA, 19 nt, Artificial Sequence
  Description of Artificial Sequence: Synthetic oligonucleotide
  Antisense strand to SEQ ID NO: 1295968
uggucuaggauucuagacu

SEQ ID NO: 1295970 - RNA, 19 nt, Artificial Sequence
  Description of Artificial Sequence: Synthetic oligonucleotide
  Sense strand starting at position 3759 of SEQ ID NO: 1241739
gcaguuuccucaucaguac

SEQ ID NO: 1295971 - RNA, 19 nt, Artificial Sequence
  Description of Artificial Sequence: Synthetic oligonucleotide
  Antisense strand to SEQ ID NO: 1295970
guacugaugaggaaacugc

SEQ ID NO: 1295972 - RNA, 19 nt, Artificial Sequence
  Description of Artificial Sequence: Synthetic oligonucleotide
  Sense strand starting at position 3802 of SEQ ID NO: 1241739
gagacucugugaggaucaa

SEQ ID NO: 1295973 - RNA, 19 nt, Artificial Sequence
  Description of Artificial Sequence: Synthetic oligonucleotide
  Antisense strand to SEQ ID NO: 1295972
uugauccucacagagucuc

SEQ ID NO: 1295974 - RNA, 19 nt, Artificial Sequence
  Description of Artificial Sequence: Synthetic oligonucleotide
  Sense strand starting at position 3816 of SEQ ID NO: 1241739
aucaaaugguaucaaguau

SEQ ID NO: 1295975 - RNA, 19 nt, Artificial Sequence
  Description of Artificial Sequence: Synthetic oligonucleotide
  Antisense strand to SEQ ID NO: 1295974
auacuugauaccauuugau

SEQ ID NO: 1295976 - RNA, 19 nt, Artificial Sequence
  Description of Artificial Sequence: Synthetic oligonucleotide
  Sense strand starting at position 3823 of SEQ ID NO: 1241739
gguaucaaguauucucaaa

SEQ ID NO: 1295977 - RNA, 19 nt, Artificial Sequence
  Description of Artificial Sequence: Synthetic oligonucleotide
  Antisense strand to SEQ ID NO: 1295976
uuugagaauacuugauacc

SEQ ID NO: 1295978 - RNA, 19 nt, Artificial Sequence
  Description of Artificial Sequence: Synthetic oligonucleotide
  Sense strand starting at position 3915 of SEQ ID NO: 1241739
ggcccauuccugggaacgu

SEQ ID NO: 1295979 - RNA, 19 nt, Artificial Sequence
  Description of Artificial Sequence: Synthetic oligonucleotide
  Antisense strand to SEQ ID NO: 1295978
acguucccaggaaugggcc

SEQ ID NO: 1295980 - RNA, 19 nt, Artificial Sequence
  Description of Artificial Sequence: Synthetic oligonucleotide
  Sense strand starting at position 8 of SEQ ID NO: 1241740
auguuauuguccuuuacaa

SEQ ID NO: 1295981 - RNA, 19 nt, Artificial Sequence
  Description of Artificial Sequence: Synthetic oligonucleotide
  Antisense strand to SEQ ID NO: 1295980
uuguaaaggacaauaacau

SEQ ID NO: 1295982 - RNA, 19 nt, Artificial Sequence
  Description of Artificial Sequence: Synthetic oligonucleotide
  Sense strand starting at position 50 of SEQ ID NO: 1241740
ggaucuagguaauuguaaa

SEQ ID NO: 1295983 - RNA, 19 nt, Artificial Sequence
  Description of Artificial Sequence: Synthetic oligonucleotide
  Antisense strand to SEQ ID NO: 1295982
uuuacaauuaccuagaucc

SEQ ID NO: 1295984 - RNA, 19 nt, Artificial Sequence
  Description of Artificial Sequence: Synthetic oligonucleotide
  Sense strand starting at position 279 of SEQ ID NO: 1241740
aggagaucuggcuauaggu

SEQ ID NO: 1295985 - RNA, 19 nt, Artificial Sequence
  Description of Artificial Sequence: Synthetic oligonucleotide
  Antisense strand to SEQ ID NO: 1295984
accuauagccagaucuccu

SEQ ID NO: 1295986 - RNA, 19 nt, Artificial Sequence
  Description of Artificial Sequence: Synthetic oligonucleotide
  Sense strand starting at position 281 of SEQ ID NO: 1241740
gagaucuggcuauagguau

SEQ ID NO: 1295987 - RNA, 19 nt, Artificial Sequence
  Description of Artificial Sequence: Synthetic oligonucleotide
  Antisense strand to SEQ ID NO: 1295986
auaccuauagccagaucuc

SEQ ID NO: 1295988 - RNA, 19 nt, Artificial Sequence
  Description of Artificial Sequence: Synthetic oligonucleotide
  Sense strand starting at position 285 of SEQ ID NO: 1241740
ucuggcuauagguaugaga

SEQ ID NO: 1295989 - RNA, 19 nt, Artificial Sequence
  Description of Artificial Sequence: Synthetic oligonucleotide
  Antisense strand to SEQ ID NO: 1295988
ucucauaccuauagccaga

SEQ ID NO: 1295990 - RNA, 19 nt, Artificial Sequence
  Description of Artificial Sequence: Synthetic oligonucleotide
  Sense strand starting at position 287 of SEQ ID NO: 1241740
uggcuauagguaugagaac

SEQ ID NO: 1295991 - RNA, 19 nt, Artificial Sequence
  Description of Artificial Sequence: Synthetic oligonucleotide
  Antisense strand to SEQ ID NO: 1295990
guucucauaccuauagcca

SEQ ID NO: 1295992 - RNA, 19 nt, Artificial Sequence
  Description of Artificial Sequence: Synthetic oligonucleotide
  Sense strand starting at position 324 of SEQ ID NO: 1241740
uggaauuagacacguggaa

SEQ ID NO: 1295993 - RNA, 19 nt, Artificial Sequence
  Description of Artificial Sequence: Synthetic oligonucleotide
  Antisense strand to SEQ ID NO: 1295992
uuccacgugucuaauucca

SEQ ID NO: 1295994 - RNA, 19 nt, Artificial Sequence
  Description of Artificial Sequence: Synthetic oligonucleotide
  Sense strand starting at position 2041 of SEQ ID NO: 1241740
ucgcuauggcgacaggaaa

SEQ ID NO: 1295995 - RNA, 19 nt, Artificial Sequence
  Description of Artificial Sequence: Synthetic oligonucleotide
  Antisense strand to SEQ ID NO: 1295994
uuuccugucgccauagcga

SEQ ID NO: 1295996 - RNA, 19 nt, Artificial Sequence
  Description of Artificial Sequence: Synthetic oligonucleotide
  Sense strand starting at position 2188 of SEQ ID NO: 1241740
ggcagaugggccuggaaua

SEQ ID NO: 1295997 - RNA, 19 nt, Artificial Sequence
  Description of Artificial Sequence: Synthetic oligonucleotide
  Antisense strand to SEQ ID NO: 1295996
uauuccaggcccaucugcc

SEQ ID NO: 1295998 - RNA, 19 nt, Artificial Sequence
  Description of Artificial Sequence: Synthetic oligonucleotide
  Sense strand starting at position 2320 of SEQ ID NO: 1241740
cgcguaauaaaguccaguu

SEQ ID NO: 1295999 - RNA, 19 nt, Artificial Sequence
  Description of Artificial Sequence: Synthetic oligonucleotide
  Antisense strand to SEQ ID NO: 1295998
aacuggacuuuauuacgcg

SEQ ID NO: 1296000 - RNA, 19 nt, Artificial Sequence
  Description of Artificial Sequence: Synthetic oligonucleotide
  Sense strand starting at position 2322 of SEQ ID NO: 1241740
cguaauaaaguccaguuua

SEQ ID NO: 1296001 - RNA, 19 nt, Artificial Sequence
  Description of Artificial Sequence: Synthetic oligonucleotide
  Antisense strand to SEQ ID NO: 1296000
uaaacuggacuuuauuacg

SEQ ID NO: 1296002 - RNA, 19 nt, Artificial Sequence
  Description of Artificial Sequence: Synthetic oligonucleotide
  Sense strand starting at position 2383 of SEQ ID NO: 1241740
gaacguugaggguaagagu

SEQ ID NO: 1296003 - RNA, 19 nt, Artificial Sequence
  Description of Artificial Sequence: Synthetic oligonucleotide
  Antisense strand to SEQ ID NO: 1296002
acucuuacccucaacguuc

SEQ ID NO: 1296004 - RNA, 19 nt, Artificial Sequence
  Description of Artificial Sequence: Synthetic oligonucleotide
  Sense strand starting at position 2392 of SEQ ID NO: 1241740
ggguaagagugggugagaa

SEQ ID NO: 1296005 - RNA, 19 nt, Artificial Sequence
  Description of Artificial Sequence: Synthetic oligonucleotide
  Antisense strand to SEQ ID NO: 1296004
uucucacccacucuuaccc

SEQ ID NO: 1296006 - RNA, 19 nt, Artificial Sequence
  Description of Artificial Sequence: Synthetic oligonucleotide
  Sense strand starting at position 2404 of SEQ ID NO: 1241740
gugagaaacuuucugucag

SEQ ID NO: 1296007 - RNA, 19 nt, Artificial Sequence
  Description of Artificial Sequence: Synthetic oligonucleotide
  Antisense strand to SEQ ID NO: 1296006
cugacagaaaguuucucac

SEQ ID NO: 1296008 - RNA, 19 nt, Artificial Sequence
  Description of Artificial Sequence: Synthetic oligonucleotide
  Sense strand starting at position 2406 of SEQ ID NO: 1241740
gagaaacuuucugucagag

SEQ ID NO: 1296009 - RNA, 19 nt, Artificial Sequence
  Description of Artificial Sequence: Synthetic oligonucleotide
  Antisense strand to SEQ ID NO: 1296008
cucugacagaaaguuucuc

SEQ ID NO: 1296010 - RNA, 19 nt, Artificial Sequence
  Description of Artificial Sequence: Synthetic oligonucleotide
  Sense strand starting at position 2448 of SEQ ID NO: 1241740
aacuaaagauaugauggua

SEQ ID NO: 1296011 - RNA, 19 nt, Artificial Sequence
  Description of Artificial Sequence: Synthetic oligonucleotide
  Antisense strand to SEQ ID NO: 1296010
uaccaucauaucuuuaguu

SEQ ID NO: 1296012 - RNA, 19 nt, Artificial Sequence
  Description of Artificial Sequence: Synthetic oligonucleotide
  Sense strand starting at position 2591 of SEQ ID NO: 1241740
gagugcuagacugaggagu

SEQ ID NO: 1296013 - RNA, 19 nt, Artificial Sequence
  Description of Artificial Sequence: Synthetic oligonucleotide
  Antisense strand to SEQ ID NO: 1296012
acuccucagucuagcacuc

SEQ ID NO: 1296014 - RNA, 19 nt, Artificial Sequence
  Description of Artificial Sequence: Synthetic oligonucleotide
  Sense strand starting at position 2599 of SEQ ID NO: 1241740
gacugaggaguuugucaga

SEQ ID NO: 1296015 - RNA, 19 nt, Artificial Sequence
  Description of Artificial Sequence: Synthetic oligonucleotide
  Antisense strand to SEQ ID NO: 1296014
ucugacaaacuccucaguc

SEQ ID NO: 1296016 - RNA, 19 nt, Artificial Sequence
  Description of Artificial Sequence: Synthetic oligonucleotide
  Sense strand starting at position 3017 of SEQ ID NO: 1241740
cccuuugaaugcuuuggga

SEQ ID NO: 1296017 - RNA, 19 nt, Artificial Sequence
  Description of Artificial Sequence: Synthetic oligonucleotide
  Antisense strand to SEQ ID NO: 1296016
ucccaaagcauucaaaggg

SEQ ID NO: 1296018 - RNA, 19 nt, Artificial Sequence
  Description of Artificial Sequence: Synthetic oligonucleotide
  Sense strand starting at position 3019 of SEQ ID NO: 1241740
cuuugaaugcuuugggaga

SEQ ID NO: 1296019 - RNA, 19 nt, Artificial Sequence
  Description of Artificial Sequence: Synthetic oligonucleotide
  Antisense strand to SEQ ID NO: 1296018
ucucccaaagcauucaaag

SEQ ID NO: 1296020 - RNA, 19 nt, Artificial Sequence
  Description of Artificial Sequence: Synthetic oligonucleotide
  Sense strand starting at position 3072 of SEQ ID NO: 1241740
cucugaggacuaugguuau

SEQ ID NO: 1296021 - RNA, 19 nt, Artificial Sequence
  Description of Artificial Sequence: Synthetic oligonucleotide
  Antisense strand to SEQ ID NO: 1296020
auaaccauaguccucagag

SEQ ID NO: 1296022 - RNA, 19 nt, Artificial Sequence
  Description of Artificial Sequence: Synthetic oligonucleotide
  Sense strand starting at position 3078 of SEQ ID NO: 1241740
ggacuaugguuaucuggag

SEQ ID NO: 1296023 - RNA, 19 nt, Artificial Sequence
  Description of Artificial Sequence: Synthetic oligonucleotide
  Antisense strand to SEQ ID NO: 1296022
cuccagauaaccauagucc

SEQ ID NO: 1296024 - RNA, 19 nt, Artificial Sequence
  Description of Artificial Sequence: Synthetic oligonucleotide
  Sense strand starting at position 3079 of SEQ ID NO: 1241740
gacuaugguuaucuggaga

SEQ ID NO: 1296025 - RNA, 19 nt, Artificial Sequence
  Description of Artificial Sequence: Synthetic oligonucleotide
  Antisense strand to SEQ ID NO: 1296024
ucuccagauaaccauaguc

SEQ ID NO: 1296026 - RNA, 19 nt, Artificial Sequence
  Description of Artificial Sequence: Synthetic oligonucleotide
  Sense strand starting at position 3113 of SEQ ID NO: 1241740
ugaccuuccaugugaggaa

SEQ ID NO: 1296027 - RNA, 19 nt, Artificial Sequence
  Description of Artificial Sequence: Synthetic oligonucleotide
  Antisense strand to SEQ ID NO: 1296026
uuccucacauggaagguca

SEQ ID NO: 1296028 - RNA, 19 nt, Artificial Sequence
  Description of Artificial Sequence: Synthetic oligonucleotide
  Sense strand starting at position 3126 of SEQ ID NO: 1241740
gaggaagcucccugaggaa

SEQ ID NO: 1296029 - RNA, 19 nt, Artificial Sequence
  Description of Artificial Sequence: Synthetic oligonucleotide
  Antisense strand to SEQ ID NO: 1296028
uuccucagggagcuuccuc

SEQ ID NO: 1296030 - RNA, 19 nt, Artificial Sequence
  Description of Artificial Sequence: Synthetic oligonucleotide
  Sense strand starting at position 3139 of SEQ ID NO: 1241740
gaggaaccguggcucuuaa

SEQ ID NO: 1296031 - RNA, 19 nt, Artificial Sequence
  Description of Artificial Sequence: Synthetic oligonucleotide
  Antisense strand to SEQ ID NO: 1296030
uuaagagccacgguuccuc

SEQ ID NO: 1296032 - RNA, 19 nt, Artificial Sequence
  Description of Artificial Sequence: Synthetic oligonucleotide
  Sense strand starting at position 3161 of SEQ ID NO: 1241740
cuggacuccuuccuaugau

SEQ ID NO: 1296033 - RNA, 19 nt, Artificial Sequence
  Description of Artificial Sequence: Synthetic oligonucleotide
  Antisense strand to SEQ ID NO: 1296032
aucauaggaaggaguccag

SEQ ID NO: 1296034 - RNA, 19 nt, Artificial Sequence
  Description of Artificial Sequence: Synthetic oligonucleotide
  Sense strand starting at position 3169 of SEQ ID NO: 1241740
cuuccuaugaugggugaga

SEQ ID NO: 1296035 - RNA, 19 nt, Artificial Sequence
  Description of Artificial Sequence: Synthetic oligonucleotide
  Antisense strand to SEQ ID NO: 1296034
ucucacccaucauaggaag

SEQ ID NO: 1296036 - RNA, 19 nt, Artificial Sequence
  Description of Artificial Sequence: Synthetic oligonucleotide
  Sense strand starting at position 3170 of SEQ ID NO: 1241740
uuccuaugaugggugagaa

SEQ ID NO: 1296037 - RNA, 19 nt, Artificial Sequence
  Description of Artificial Sequence: Synthetic oligonucleotide
  Antisense strand to SEQ ID NO: 1296036
uucucacccaucauaggaa

SEQ ID NO: 1296038 - RNA, 19 nt, Artificial Sequence
  Description of Artificial Sequence: Synthetic oligonucleotide
  Sense strand starting at position 3171 of SEQ ID NO: 1241740
uccuaugaugggugagaag

SEQ ID NO: 1296039 - RNA, 19 nt, Artificial Sequence
  Description of Artificial Sequence: Synthetic oligonucleotide
  Antisense strand to SEQ ID NO: 1296038
cuucucacccaucauagga

SEQ ID NO: 1296040 - RNA, 19 nt, Artificial Sequence
  Description of Artificial Sequence: Synthetic oligonucleotide
  Sense strand starting at position 3210 of SEQ ID NO: 1241740
cccucucaccaguauguuu

SEQ ID NO: 1296041 - RNA, 19 nt, Artificial Sequence
  Description of Artificial Sequence: Synthetic oligonucleotide
  Antisense strand to SEQ ID NO: 1296040
aaacauacuggugagaggg

SEQ ID NO: 1296042 - RNA, 19 nt, Artificial Sequence
  Description of Artificial Sequence: Synthetic oligonucleotide
  Sense strand starting at position 3217 of SEQ ID NO: 1241740
accaguauguuucuggaaa

SEQ ID NO: 1296043 - RNA, 19 nt, Artificial Sequence
  Description of Artificial Sequence: Synthetic oligonucleotide
  Antisense strand to SEQ ID NO: 1296042
uuuccagaaacauacuggu

SEQ ID NO: 1296044 - RNA, 19 nt, Artificial Sequence
  Description of Artificial Sequence: Synthetic oligonucleotide
  Sense strand starting at position 3240 of SEQ ID NO: 1241740
ugaccagugagagguauua

SEQ ID NO: 1296045 - RNA, 19 nt, Artificial Sequence
  Description of Artificial Sequence: Synthetic oligonucleotide
  Antisense strand to SEQ ID NO: 1296044
uaauaccucucacugguca

SEQ ID NO: 1296046 - RNA, 19 nt, Artificial Sequence
  Description of Artificial Sequence: Synthetic oligonucleotide
  Sense strand starting at position 3275 of SEQ ID NO: 1241740
gguuuaaagacauggcauu

SEQ ID NO: 1296047 - RNA, 19 nt, Artificial Sequence
  Description of Artificial Sequence: Synthetic oligonucleotide
  Antisense strand to SEQ ID NO: 1296046
aaugccaugucuuuaaacc

SEQ ID NO: 1296048 - RNA, 19 nt, Artificial Sequence
  Description of Artificial Sequence: Synthetic oligonucleotide
  Sense strand starting at position 3576 of SEQ ID NO: 1241740
gcaagacccugugcauaaa

SEQ ID NO: 1296049 - RNA, 19 nt, Artificial Sequence
  Description of Artificial Sequence: Synthetic oligonucleotide
  Antisense strand to SEQ ID NO: 1296048
uuuaugcacagggucuugc

SEQ ID NO: 1296050 - RNA, 19 nt, Artificial Sequence
  Description of Artificial Sequence: Synthetic oligonucleotide
  Sense strand starting at position 3579 of SEQ ID NO: 1241740
agacccugugcauaaauaa

SEQ ID NO: 1296051 - RNA, 19 nt, Artificial Sequence
  Description of Artificial Sequence: Synthetic oligonucleotide
  Antisense strand to SEQ ID NO: 1296050
uuauuuaugcacagggucu

SEQ ID NO: 1296052 - RNA, 19 nt, Artificial Sequence
  Description of Artificial Sequence: Synthetic oligonucleotide
  Sense strand starting at position 3609 of SEQ ID NO: 1241740
gcaucuugaacuuggagua

SEQ ID NO: 1296053 - RNA, 19 nt, Artificial Sequence
  Description of Artificial Sequence: Synthetic oligonucleotide
  Antisense strand to SEQ ID NO: 1296052
uacuccaaguucaagaugc

SEQ ID NO: 1296054 - RNA, 19 nt, Artificial Sequence
  Description of Artificial Sequence: Synthetic oligonucleotide
  Sense strand starting at position 3734 of SEQ ID NO: 1241740
uuuguuaaccugggaugaa

SEQ ID NO: 1296055 - RNA, 19 nt, Artificial Sequence
  Description of Artificial Sequence: Synthetic oligonucleotide
  Antisense strand to SEQ ID NO: 1296054
uucaucccagguuaacaaa

SEQ ID NO: 1296056 - RNA, 19 nt, Artificial Sequence
  Description of Artificial Sequence: Synthetic oligonucleotide
  Sense strand starting at position 3800 of SEQ ID NO: 1241740
gcagcagcuuauuugaaca

SEQ ID NO: 1296057 - RNA, 19 nt, Artificial Sequence
  Description of Artificial Sequence: Synthetic oligonucleotide
  Antisense strand to SEQ ID NO: 1296056
uguucaaauaagcugcugc

SEQ ID NO: 1296058 - RNA, 19 nt, Artificial Sequence
  Description of Artificial Sequence: Synthetic oligonucleotide
  Sense strand starting at position 3802 of SEQ ID NO: 1241740
agcagcuuauuugaacaga

SEQ ID NO: 1296059 - RNA, 19 nt, Artificial Sequence
  Description of Artificial Sequence: Synthetic oligonucleotide
  Antisense strand to SEQ ID NO: 1296058
ucuguucaaauaagcugcu

SEQ ID NO: 1296060 - RNA, 19 nt, Artificial Sequence
  Description of Artificial Sequence: Synthetic oligonucleotide
  Sense strand starting at position 68 of SEQ ID NO: 1241741
augacaaagagcuguaaga

SEQ ID NO: 1296061 - RNA, 19 nt, Artificial Sequence
  Description of Artificial Sequence: Synthetic oligonucleotide
  Antisense strand to SEQ ID NO: 1296060
ucuuacagcucuuugucau

SEQ ID NO: 1296062 - RNA, 19 nt, Artificial Sequence
  Description of Artificial Sequence: Synthetic oligonucleotide
  Sense strand starting at position 181 of SEQ ID NO: 1241741
guuaaacuaucuccaaggu

SEQ ID NO: 1296063 - RNA, 19 nt, Artificial Sequence
  Description of Artificial Sequence: Synthetic oligonucleotide
  Antisense strand to SEQ ID NO: 1296062
accuuggagauaguuuaac

SEQ ID NO: 1296064 - RNA, 19 nt, Artificial Sequence
  Description of Artificial Sequence: Synthetic oligonucleotide
  Sense strand starting at position 377 of SEQ ID NO: 1241741
ggugaaucaagucaggagu

SEQ ID NO: 1296065 - RNA, 19 nt, Artificial Sequence
  Description of Artificial Sequence: Synthetic oligonucleotide
  Antisense strand to SEQ ID NO: 1296064
acuccugacuugauucacc

SEQ ID NO: 1296066 - RNA, 19 nt, Artificial Sequence
  Description of Artificial Sequence: Synthetic oligonucleotide
  Sense strand starting at position 980 of SEQ ID NO: 1241741
cgcgcucagacuuuaaagu

SEQ ID NO: 1296067 - RNA, 19 nt, Artificial Sequence
  Description of Artificial Sequence: Synthetic oligonucleotide
  Antisense strand to SEQ ID NO: 1296066
acuuuaaagucugagcgcg

SEQ ID NO: 1296068 - RNA, 19 nt, Artificial Sequence
  Description of Artificial Sequence: Synthetic oligonucleotide
  Sense strand starting at position 1009 of SEQ ID NO: 1241741
ucuagacuucuaugaaggu

SEQ ID NO: 1296069 - RNA, 19 nt, Artificial Sequence
  Description of Artificial Sequence: Synthetic oligonucleotide
  Antisense strand to SEQ ID NO: 1296068
accuucauagaagucuaga

SEQ ID NO: 1296070 - RNA, 19 nt, Artificial Sequence
  Description of Artificial Sequence: Synthetic oligonucleotide
  Sense strand starting at position 1026 of SEQ ID NO: 1241741
guagacugccgagauguaa

SEQ ID NO: 1296071 - RNA, 19 nt, Artificial Sequence
  Description of Artificial Sequence: Synthetic oligonucleotide
  Antisense strand to SEQ ID NO: 1296070
uuacaucucggcagucuac

SEQ ID NO: 1296072 - RNA, 19 nt, Artificial Sequence
  Description of Artificial Sequence: Synthetic oligonucleotide
  Sense strand starting at position 1091 of SEQ ID NO: 1241741
ugcuuugauuauucuaaag

SEQ ID NO: 1296073 - RNA, 19 nt, Artificial Sequence
  Description of Artificial Sequence: Synthetic oligonucleotide
  Antisense strand to SEQ ID NO: 1296072
cuuuagaauaaucaaagca

SEQ ID NO: 1296074 - RNA, 19 nt, Artificial Sequence
  Description of Artificial Sequence: Synthetic oligonucleotide
  Sense strand starting at position 1177 of SEQ ID NO: 1241741
gguguuagaccugguauua

SEQ ID NO: 1296075 - RNA, 19 nt, Artificial Sequence
  Description of Artificial Sequence: Synthetic oligonucleotide
  Antisense strand to SEQ ID NO: 1296074
uaauaccaggucuaacacc

SEQ ID NO: 1296076 - RNA, 19 nt, Artificial Sequence
  Description of Artificial Sequence: Synthetic oligonucleotide
  Sense strand starting at position 1187 of SEQ ID NO: 1241741
cugguauuaugucuaaaga

SEQ ID NO: 1296077 - RNA, 19 nt, Artificial Sequence
  Description of Artificial Sequence: Synthetic oligonucleotide
  Antisense strand to SEQ ID NO: 1296076
ucuuuagacauaauaccag

SEQ ID NO: 1296078 - RNA, 19 nt, Artificial Sequence
  Description of Artificial Sequence: Synthetic oligonucleotide
  Sense strand starting at position 1188 of SEQ ID NO: 1241741
ugguauuaugucuaaagac

SEQ ID NO: 1296079 - RNA, 19 nt, Artificial Sequence
  Description of Artificial Sequence: Synthetic oligonucleotide
  Antisense strand to SEQ ID NO: 1296078
gucuuuagacauaauacca

SEQ ID NO: 1296080 - RNA, 19 nt, Artificial Sequence
  Description of Artificial Sequence: Synthetic oligonucleotide
  Sense strand starting at position 1254 of SEQ ID NO: 1241741
ucguaaauaccuuauaguc

SEQ ID NO: 1296081 - RNA, 19 nt, Artificial Sequence
  Description of Artificial Sequence: Synthetic oligonucleotide
  Antisense strand to SEQ ID NO: 1296080
gacuauaagguauuuacga

SEQ ID NO: 1296082 - RNA, 19 nt, Artificial Sequence
  Description of Artificial Sequence: Synthetic oligonucleotide
  Sense strand starting at position 1696 of SEQ ID NO: 1241741
cuuagacgccgauucguua

SEQ ID NO: 1296083 - RNA, 19 nt, Artificial Sequence
  Description of Artificial Sequence: Synthetic oligonucleotide
  Antisense strand to SEQ ID NO: 1296082
uaacgaaucggcgucuaag

SEQ ID NO: 1296084 - RNA, 19 nt, Artificial Sequence
  Description of Artificial Sequence: Synthetic oligonucleotide
  Sense strand starting at position 1709 of SEQ ID NO: 1241741
ucguuauaacgcgaggaaa

SEQ ID NO: 1296085 - RNA, 19 nt, Artificial Sequence
  Description of Artificial Sequence: Synthetic oligonucleotide
  Antisense strand to SEQ ID NO: 1296084
uuuccucgcguuauaacga

SEQ ID NO: 1296086 - RNA, 19 nt, Artificial Sequence
  Description of Artificial Sequence: Synthetic oligonucleotide
  Sense strand starting at position 1710 of SEQ ID NO: 1241741
cguuauaacgcgaggaaau

SEQ ID NO: 1296087 - RNA, 19 nt, Artificial Sequence
  Description of Artificial Sequence: Synthetic oligonucleotide
  Antisense strand to SEQ ID NO: 1296086
auuuccucgcguuauaacg

SEQ ID NO: 1296088 - RNA, 19 nt, Artificial Sequence
  Description of Artificial Sequence: Synthetic oligonucleotide
  Sense strand starting at position 1742 of SEQ ID NO: 1241741
cagguaccaucagcgaauu

SEQ ID NO: 1296089 - RNA, 19 nt, Artificial Sequence
  Description of Artificial Sequence: Synthetic oligonucleotide
  Antisense strand to SEQ ID NO: 1296088
aauucgcugaugguaccug

SEQ ID NO: 1296090 - RNA, 19 nt, Artificial Sequence
  Description of Artificial Sequence: Synthetic oligonucleotide
  Sense strand starting at position 1744 of SEQ ID NO: 1241741
gguaccaucagcgaauucu

SEQ ID NO: 1296091 - RNA, 19 nt, Artificial Sequence
  Description of Artificial Sequence: Synthetic oligonucleotide
  Antisense strand to SEQ ID NO: 1296090
agaauucgcugaugguacc

SEQ ID NO: 1296092 - RNA, 19 nt, Artificial Sequence
  Description of Artificial Sequence: Synthetic oligonucleotide
  Sense strand starting at position 1773 of SEQ ID NO: 1241741
aaggauuaacuucgguuau

SEQ ID NO: 1296093 - RNA, 19 nt, Artificial Sequence
  Description of Artificial Sequence: Synthetic oligonucleotide
  Antisense strand to SEQ ID NO: 1296092
auaaccgaaguuaauccuu

SEQ ID NO: 1296094 - RNA, 19 nt, Artificial Sequence
  Description of Artificial Sequence: Synthetic oligonucleotide
  Sense strand starting at position 1829 of SEQ ID NO: 1241741
cuccaauaaugacccgaau

SEQ ID NO: 1296095 - RNA, 19 nt, Artificial Sequence
  Description of Artificial Sequence: Synthetic oligonucleotide
  Antisense strand to SEQ ID NO: 1296094
auucgggucauuauuggag

SEQ ID NO: 1296096 - RNA, 19 nt, Artificial Sequence
  Description of Artificial Sequence: Synthetic oligonucleotide
  Sense strand starting at position 1841 of SEQ ID NO: 1241741
cccgaaucugucgaaacuu

SEQ ID NO: 1296097 - RNA, 19 nt, Artificial Sequence
  Description of Artificial Sequence: Synthetic oligonucleotide
  Antisense strand to SEQ ID NO: 1296096
aaguuucgacagauucggg

SEQ ID NO: 1296098 - RNA, 19 nt, Artificial Sequence
  Description of Artificial Sequence: Synthetic oligonucleotide
  Sense strand starting at position 1849 of SEQ ID NO: 1241741
ugucgaaacuucuuggaag

SEQ ID NO: 1296099 - RNA, 19 nt, Artificial Sequence
  Description of Artificial Sequence: Synthetic oligonucleotide
  Antisense strand to SEQ ID NO: 1296098
cuuccaagaaguuucgaca

SEQ ID NO: 1296100 - RNA, 19 nt, Artificial Sequence
  Description of Artificial Sequence: Synthetic oligonucleotide
  Sense strand starting at position 2142 of SEQ ID NO: 1241741
augcguguugugucucaag

SEQ ID NO: 1296101 - RNA, 19 nt, Artificial Sequence
  Description of Artificial Sequence: Synthetic oligonucleotide
  Antisense strand to SEQ ID NO: 1296100
cuugagacacaacacgcau

SEQ ID NO: 1296102 - RNA, 19 nt, Artificial Sequence
  Description of Artificial Sequence: Synthetic oligonucleotide
  Sense strand starting at position 2265 of SEQ ID NO: 1241741
gugaauuuauguuuccgac

SEQ ID NO: 1296103 - RNA, 19 nt, Artificial Sequence
  Description of Artificial Sequence: Synthetic oligonucleotide
  Antisense strand to SEQ ID NO: 1296102
gucggaaacauaaauucac

SEQ ID NO: 1296104 - RNA, 19 nt, Artificial Sequence
  Description of Artificial Sequence: Synthetic oligonucleotide
  Sense strand starting at position 2327 of SEQ ID NO: 1241741
gcuauuacgcuucuuaugu

SEQ ID NO: 1296105 - RNA, 19 nt, Artificial Sequence
  Description of Artificial Sequence: Synthetic oligonucleotide
  Antisense strand to SEQ ID NO: 1296104
acauaagaagcguaauagc

SEQ ID NO: 1296106 - RNA, 19 nt, Artificial Sequence
  Description of Artificial Sequence: Synthetic oligonucleotide
  Sense strand starting at position 2336 of SEQ ID NO: 1241741
cuucuuaugugggucauua

SEQ ID NO: 1296107 - RNA, 19 nt, Artificial Sequence
  Description of Artificial Sequence: Synthetic oligonucleotide
  Antisense strand to SEQ ID NO: 1296106
uaaugacccacauaagaag

SEQ ID NO: 1296108 - RNA, 19 nt, Artificial Sequence
  Description of Artificial Sequence: Synthetic oligonucleotide
  Sense strand starting at position 2338 of SEQ ID NO: 1241741
ucuuaugugggucauuauu

SEQ ID NO: 1296109 - RNA, 19 nt, Artificial Sequence
  Description of Artificial Sequence: Synthetic oligonucleotide
  Antisense strand to SEQ ID NO: 1296108
aauaaugacccacauaaga

SEQ ID NO: 1296110 - RNA, 19 nt, Artificial Sequence
  Description of Artificial Sequence: Synthetic oligonucleotide
  Sense strand starting at position 2987 of SEQ ID NO: 1241741
uuaguaaaucuuuaguccu

SEQ ID NO: 1296111 - RNA, 19 nt, Artificial Sequence
  Description of Artificial Sequence: Synthetic oligonucleotide
  Antisense strand to SEQ ID NO: 1296110
aggacuaaagauuuacuaa

SEQ ID NO: 1296112 - RNA, 19 nt, Artificial Sequence
  Description of Artificial Sequence: Synthetic oligonucleotide
  Sense strand starting at position 2989 of SEQ ID NO: 1241741
aguaaaucuuuaguccuua

SEQ ID NO: 1296113 - RNA, 19 nt, Artificial Sequence
  Description of Artificial Sequence: Synthetic oligonucleotide
  Antisense strand to SEQ ID NO: 1296112
uaaggacuaaagauuuacu

SEQ ID NO: 1296114 - RNA, 19 nt, Artificial Sequence
  Description of Artificial Sequence: Synthetic oligonucleotide
  Sense strand starting at position 2990 of SEQ ID NO: 1241741
guaaaucuuuaguccuuau

SEQ ID NO: 1296115 - RNA, 19 nt, Artificial Sequence
  Description of Artificial Sequence: Synthetic oligonucleotide
  Antisense strand to SEQ ID NO: 1296114
auaaggacuaaagauuuac

SEQ ID NO: 1296116 - RNA, 19 nt, Artificial Sequence
  Description of Artificial Sequence: Synthetic oligonucleotide
  Sense strand starting at position 3032 of SEQ ID NO: 1241741
auauaagucuaguuuguac

SEQ ID NO: 1296117 - RNA, 19 nt, Artificial Sequence
  Description of Artificial Sequence: Synthetic oligonucleotide
  Antisense strand to SEQ ID NO: 1296116
guacaaacuagacuuauau

SEQ ID NO: 1296118 - RNA, 19 nt, Artificial Sequence
  Description of Artificial Sequence: Synthetic oligonucleotide
  Sense strand starting at position 3035 of SEQ ID NO: 1241741
uaagucuaguuuguacaga

SEQ ID NO: 1296119 - RNA, 19 nt, Artificial Sequence
  Description of Artificial Sequence: Synthetic oligonucleotide
  Antisense strand to SEQ ID NO: 1296118
ucuguacaaacuagacuua

SEQ ID NO: 1296120 - RNA, 19 nt, Artificial Sequence
  Description of Artificial Sequence: Synthetic oligonucleotide
  Sense strand starting at position 3040 of SEQ ID NO: 1241741
cuaguuuguacagauguuu

SEQ ID NO: 1296121 - RNA, 19 nt, Artificial Sequence
  Description of Artificial Sequence: Synthetic oligonucleotide
  Antisense strand to SEQ ID NO: 1296120
aaacaucuguacaaacuag

SEQ ID NO: 1296122 - RNA, 19 nt, Artificial Sequence
  Description of Artificial Sequence: Synthetic oligonucleotide
  Sense strand starting at position 3209 of SEQ ID NO: 1241741
ggauacacuuaacuuguau

SEQ ID NO: 1296123 - RNA, 19 nt, Artificial Sequence
  Description of Artificial Sequence: Synthetic oligonucleotide
  Antisense strand to SEQ ID NO: 1296122
auacaaguuaaguguaucc

SEQ ID NO: 1296124 - RNA, 19 nt, Artificial Sequence
  Description of Artificial Sequence: Synthetic oligonucleotide
  Sense strand starting at position 3365 of SEQ ID NO: 1241741
acuuaaucugucuagagcu

SEQ ID NO: 1296125 - RNA, 19 nt, Artificial Sequence
  Description of Artificial Sequence: Synthetic oligonucleotide
  Antisense strand to SEQ ID NO: 1296124
agcucuagacagauuaagu

SEQ ID NO: 1296126 - RNA, 19 nt, Artificial Sequence
  Description of Artificial Sequence: Synthetic oligonucleotide
  Sense strand starting at position 3372 of SEQ ID NO: 1241741
cugucuagagcucagugaa

SEQ ID NO: 1296127 - RNA, 19 nt, Artificial Sequence
  Description of Artificial Sequence: Synthetic oligonucleotide
  Antisense strand to SEQ ID NO: 1296126
uucacugagcucuagacag

SEQ ID NO: 1296128 - RNA, 19 nt, Artificial Sequence
  Description of Artificial Sequence: Synthetic oligonucleotide
  Sense strand starting at position 3542 of SEQ ID NO: 1241741
cuuuacaucguauacauau

SEQ ID NO: 1296129 - RNA, 19 nt, Artificial Sequence
  Description of Artificial Sequence: Synthetic oligonucleotide
  Antisense strand to SEQ ID NO: 1296128
auauguauacgauguaaag

SEQ ID NO: 1296130 - RNA, 19 nt, Artificial Sequence
  Description of Artificial Sequence: Synthetic oligonucleotide
  Sense strand starting at position 3565 of SEQ ID NO: 1241741
acccauaguuuguccacau

SEQ ID NO: 1296131 - RNA, 19 nt, Artificial Sequence
  Description of Artificial Sequence: Synthetic oligonucleotide
  Antisense strand to SEQ ID NO: 1296130
auguggacaaacuaugggu

SEQ ID NO: 1296132 - RNA, 19 nt, Artificial Sequence
  Description of Artificial Sequence: Synthetic oligonucleotide
  Sense strand starting at position 3569 of SEQ ID NO: 1241741
auaguuuguccacauccaa

SEQ ID NO: 1296133 - RNA, 19 nt, Artificial Sequence
  Description of Artificial Sequence: Synthetic oligonucleotide
  Antisense strand to SEQ ID NO: 1296132
uuggauguggacaaacuau

SEQ ID NO: 1296134 - RNA, 19 nt, Artificial Sequence
  Description of Artificial Sequence: Synthetic oligonucleotide
  Sense strand starting at position 3576 of SEQ ID NO: 1241741
guccacauccaauagugua

SEQ ID NO: 1296135 - RNA, 19 nt, Artificial Sequence
  Description of Artificial Sequence: Synthetic oligonucleotide
  Antisense strand to SEQ ID NO: 1296134
uacacuauuggauguggac

SEQ ID NO: 1296136 - RNA, 19 nt, Artificial Sequence
  Description of Artificial Sequence: Synthetic oligonucleotide
  Sense strand starting at position 3630 of SEQ ID NO: 1241741
cuuuauugucaguaccgaa

SEQ ID NO: 1296137 - RNA, 19 nt, Artificial Sequence
  Description of Artificial Sequence: Synthetic oligonucleotide
  Antisense strand to SEQ ID NO: 1296136
uucgguacugacaauaaag

SEQ ID NO: 1296138 - RNA, 19 nt, Artificial Sequence
  Description of Artificial Sequence: Synthetic oligonucleotide
  Sense strand starting at position 3935 of SEQ ID NO: 1241741
cuuaauuaugcucacguua

SEQ ID NO: 1296139 - RNA, 19 nt, Artificial Sequence
  Description of Artificial Sequence: Synthetic oligonucleotide
  Antisense strand to SEQ ID NO: 1296138
uaacgugagcauaauuaag

SEQ ID NO: 1296140 - RNA, 19 nt, Artificial Sequence
  Description of Artificial Sequence: Synthetic oligonucleotide
  Sense strand starting at position 55 of SEQ ID NO: 1241742
cugggugcguccuugaaga

SEQ ID NO: 1296141 - RNA, 19 nt, Artificial Sequence
  Description of Artificial Sequence: Synthetic oligonucleotide
  Antisense strand to SEQ ID NO: 1296140
ucuucaaggacgcacccag

SEQ ID NO: 1296142 - RNA, 19 nt, Artificial Sequence
  Description of Artificial Sequence: Synthetic oligonucleotide
  Sense strand starting at position 57 of SEQ ID NO: 1241742
gggugcguccuugaagaug

SEQ ID NO: 1296143 - RNA, 19 nt, Artificial Sequence
  Description of Artificial Sequence: Synthetic oligonucleotide
  Antisense strand to SEQ ID NO: 1296142
caucuucaaggacgcaccc

SEQ ID NO: 1296144 - RNA, 19 nt, Artificial Sequence
  Description of Artificial Sequence: Synthetic oligonucleotide
  Sense strand starting at position 116 of SEQ ID NO: 1241742
gggauuguggagugcuagu

SEQ ID NO: 1296145 - RNA, 19 nt, Artificial Sequence
  Description of Artificial Sequence: Synthetic oligonucleotide
  Antisense strand to SEQ ID NO: 1296144
acuagcacuccacaauccc

SEQ ID NO: 1296146 - RNA, 19 nt, Artificial Sequence
  Description of Artificial Sequence: Synthetic oligonucleotide
  Sense strand starting at position 131 of SEQ ID NO: 1241742
uagucuuuguugcugagga

SEQ ID NO: 1296147 - RNA, 19 nt, Artificial Sequence
  Description of Artificial Sequence: Synthetic oligonucleotide
  Antisense strand to SEQ ID NO: 1296146
uccucagcaacaaagacua

SEQ ID NO: 1296148 - RNA, 19 nt, Artificial Sequence
  Description of Artificial Sequence: Synthetic oligonucleotide
  Sense strand starting at position 280 of SEQ ID NO: 1241742
gaacuauuccaguggacug

SEQ ID NO: 1296149 - RNA, 19 nt, Artificial Sequence
  Description of Artificial Sequence: Synthetic oligonucleotide
  Antisense strand to SEQ ID NO: 1296148
caguccacuggaauaguuc

SEQ ID NO: 1296150 - RNA, 19 nt, Artificial Sequence
  Description of Artificial Sequence: Synthetic oligonucleotide
  Sense strand starting at position 372 of SEQ ID NO: 1241742
ccauauugucuccaggcaa

SEQ ID NO: 1296151 - RNA, 19 nt, Artificial Sequence
  Description of Artificial Sequence: Synthetic oligonucleotide
  Antisense strand to SEQ ID NO: 1296150
uugccuggagacaauaugg

SEQ ID NO: 1296152 - RNA, 19 nt, Artificial Sequence
  Description of Artificial Sequence: Synthetic oligonucleotide
  Sense strand starting at position 376 of SEQ ID NO: 1241742
auugucuccaggcaagaga

SEQ ID NO: 1296153 - RNA, 19 nt, Artificial Sequence
  Description of Artificial Sequence: Synthetic oligonucleotide
  Antisense strand to SEQ ID NO: 1296152
ucucuugccuggagacaau

SEQ ID NO: 1296154 - RNA, 19 nt, Artificial Sequence
  Description of Artificial Sequence: Synthetic oligonucleotide
  Sense strand starting at position 551 of SEQ ID NO: 1241742
cagugcuuucuccagcuga

SEQ ID NO: 1296155 - RNA, 19 nt, Artificial Sequence
  Description of Artificial Sequence: Synthetic oligonucleotide
  Antisense strand to SEQ ID NO: 1296154
ucagcuggagaaagcacug

SEQ ID NO: 1296156 - RNA, 19 nt, Artificial Sequence
  Description of Artificial Sequence: Synthetic oligonucleotide
  Sense strand starting at position 696 of SEQ ID NO: 1241742
cuguaauccuggccauuug

SEQ ID NO: 1296157 - RNA, 19 nt, Artificial Sequence
  Description of Artificial Sequence: Synthetic oligonucleotide
  Antisense strand to SEQ ID NO: 1296156
caaauggccaggauuacag

SEQ ID NO: 1296158 - RNA, 19 nt, Artificial Sequence
  Description of Artificial Sequence: Synthetic oligonucleotide
  Sense strand starting at position 1230 of SEQ ID NO: 1241742
gcacuauagguccagauuc

SEQ ID NO: 1296159 - RNA, 19 nt, Artificial Sequence
  Description of Artificial Sequence: Synthetic oligonucleotide
  Antisense strand to SEQ ID NO: 1296158
gaaucuggaccuauagugc

SEQ ID NO: 1296160 - RNA, 19 nt, Artificial Sequence
  Description of Artificial Sequence: Synthetic oligonucleotide
  Sense strand starting at position 1447 of SEQ ID NO: 1241742
gguccuacuugcuccaaua

SEQ ID NO: 1296161 - RNA, 19 nt, Artificial Sequence
  Description of Artificial Sequence: Synthetic oligonucleotide
  Antisense strand to SEQ ID NO: 1296160
uauuggagcaaguaggacc

SEQ ID NO: 1296162 - RNA, 19 nt, Artificial Sequence
  Description of Artificial Sequence: Synthetic oligonucleotide
  Sense strand starting at position 1470 of SEQ ID NO: 1241742
ggccuuuaggcccauacaa

SEQ ID NO: 1296163 - RNA, 19 nt, Artificial Sequence
  Description of Artificial Sequence: Synthetic oligonucleotide
  Antisense strand to SEQ ID NO: 1296162
uuguaugggccuaaaggcc

SEQ ID NO: 1296164 - RNA, 19 nt, Artificial Sequence
  Description of Artificial Sequence: Synthetic oligonucleotide
  Sense strand starting at position 1709 of SEQ ID NO: 1241742
gggugaggcuuuccgauca

SEQ ID NO: 1296165 - RNA, 19 nt, Artificial Sequence
  Description of Artificial Sequence: Synthetic oligonucleotide
  Antisense strand to SEQ ID NO: 1296164
ugaucggaaagccucaccc

SEQ ID NO: 1296166 - RNA, 19 nt, Artificial Sequence
  Description of Artificial Sequence: Synthetic oligonucleotide
  Sense strand starting at position 2221 of SEQ ID NO: 1241742
ucgacuuccuagucuguaa

SEQ ID NO: 1296167 - RNA, 19 nt, Artificial Sequence
  Description of Artificial Sequence: Synthetic oligonucleotide
  Antisense strand to SEQ ID NO: 1296166
uuacagacuaggaagucga

SEQ ID NO: 1296168 - RNA, 19 nt, Artificial Sequence
  Description of Artificial Sequence: Synthetic oligonucleotide
  Sense strand starting at position 2346 of SEQ ID NO: 1241742
cgucgcuuccaguaggaau

SEQ ID NO: 1296169 - RNA, 19 nt, Artificial Sequence
  Description of Artificial Sequence: Synthetic oligonucleotide
  Antisense strand to SEQ ID NO: 1296168
auuccuacuggaagcgacg

SEQ ID NO: 1296170 - RNA, 19 nt, Artificial Sequence
  Description of Artificial Sequence: Synthetic oligonucleotide
  Sense strand starting at position 2358 of SEQ ID NO: 1241742
uaggaauucgacuguuccu

SEQ ID NO: 1296171 - RNA, 19 nt, Artificial Sequence
  Description of Artificial Sequence: Synthetic oligonucleotide
  Antisense strand to SEQ ID NO: 1296170
aggaacagucgaauuccua

SEQ ID NO: 1296172 - RNA, 19 nt, Artificial Sequence
  Description of Artificial Sequence: Synthetic oligonucleotide
  Sense strand starting at position 2441 of SEQ ID NO: 1241742
ugucuaaucccagcgcuuu

SEQ ID NO: 1296173 - RNA, 19 nt, Artificial Sequence
  Description of Artificial Sequence: Synthetic oligonucleotide
  Antisense strand to SEQ ID NO: 1296172
aaagcgcugggauuagaca

SEQ ID NO: 1296174 - RNA, 19 nt, Artificial Sequence
  Description of Artificial Sequence: Synthetic oligonucleotide
  Sense strand starting at position 2651 of SEQ ID NO: 1241742
cgcgaucuugccucugcau

SEQ ID NO: 1296175 - RNA, 19 nt, Artificial Sequence
  Description of Artificial Sequence: Synthetic oligonucleotide
  Antisense strand to SEQ ID NO: 1296174
augcagaggcaagaucgcg

SEQ ID NO: 1296176 - RNA, 19 nt, Artificial Sequence
  Description of Artificial Sequence: Synthetic oligonucleotide
  Sense strand starting at position 2652 of SEQ ID NO: 1241742
gcgaucuugccucugcauu

SEQ ID NO: 1296177 - RNA, 19 nt, Artificial Sequence
  Description of Artificial Sequence: Synthetic oligonucleotide
  Antisense strand to SEQ ID NO: 1296176
aaugcagaggcaagaucgc

SEQ ID NO: 1296178 - RNA, 19 nt, Artificial Sequence
  Description of Artificial Sequence: Synthetic oligonucleotide
  Sense strand starting at position 2807 of SEQ ID NO: 1241742
ggaggaucgauccgcuuga

SEQ ID NO: 1296179 - RNA, 19 nt, Artificial Sequence
  Description of Artificial Sequence: Synthetic oligonucleotide
  Antisense strand to SEQ ID NO: 1296178
ucaagcggaucgauccucc

SEQ ID NO: 1296180 - RNA, 19 nt, Artificial Sequence
  Description of Artificial Sequence: Synthetic oligonucleotide
  Sense strand starting at position 2846 of SEQ ID NO: 1241742
acuggaucacauggcgaua

SEQ ID NO: 1296181 - RNA, 19 nt, Artificial Sequence
  Description of Artificial Sequence: Synthetic oligonucleotide
  Antisense strand to SEQ ID NO: 1296180
uaucgccaugugauccagu

SEQ ID NO: 1296182 - RNA, 19 nt, Artificial Sequence
  Description of Artificial Sequence: Synthetic oligonucleotide
  Sense strand starting at position 2859 of SEQ ID NO: 1241742
gcgauaaccugucucuacu

SEQ ID NO: 1296183 - RNA, 19 nt, Artificial Sequence
  Description of Artificial Sequence: Synthetic oligonucleotide
  Antisense strand to SEQ ID NO: 1296182
aguagagacagguuaucgc

SEQ ID NO: 1296184 - RNA, 19 nt, Artificial Sequence
  Description of Artificial Sequence: Synthetic oligonucleotide
  Sense strand starting at position 3055 of SEQ ID NO: 1241742
ggauucuguugugcacuga

SEQ ID NO: 1296185 - RNA, 19 nt, Artificial Sequence
  Description of Artificial Sequence: Synthetic oligonucleotide
  Antisense strand to SEQ ID NO: 1296184
ucagugcacaacagaaucc

SEQ ID NO: 1296186 - RNA, 19 nt, Artificial Sequence
  Description of Artificial Sequence: Synthetic oligonucleotide
  Sense strand starting at position 3056 of SEQ ID NO: 1241742
gauucuguugugcacugaa

SEQ ID NO: 1296187 - RNA, 19 nt, Artificial Sequence
  Description of Artificial Sequence: Synthetic oligonucleotide
  Antisense strand to SEQ ID NO: 1296186
uucagugcacaacagaauc

SEQ ID NO: 1296188 - RNA, 19 nt, Artificial Sequence
  Description of Artificial Sequence: Synthetic oligonucleotide
  Sense strand starting at position 3092 of SEQ ID NO: 1241742
guaauugacugcucuccuu

SEQ ID NO: 1296189 - RNA, 19 nt, Artificial Sequence
  Description of Artificial Sequence: Synthetic oligonucleotide
  Antisense strand to SEQ ID NO: 1296188
aaggagagcagucaauuac

SEQ ID NO: 1296190 - RNA, 19 nt, Artificial Sequence
  Description of Artificial Sequence: Synthetic oligonucleotide
  Sense strand starting at position 3098 of SEQ ID NO: 1241742
gacugcucuccuugacugu

SEQ ID NO: 1296191 - RNA, 19 nt, Artificial Sequence
  Description of Artificial Sequence: Synthetic oligonucleotide
  Antisense strand to SEQ ID NO: 1296190
acagucaaggagagcaguc

SEQ ID NO: 1296192 - RNA, 19 nt, Artificial Sequence
  Description of Artificial Sequence: Synthetic oligonucleotide
  Sense strand starting at position 3187 of SEQ ID NO: 1241742
ccuuaauuguuggcuggau

SEQ ID NO: 1296193 - RNA, 19 nt, Artificial Sequence
  Description of Artificial Sequence: Synthetic oligonucleotide
  Antisense strand to SEQ ID NO: 1296192
auccagccaacaauuaagg

SEQ ID NO: 1296194 - RNA, 19 nt, Artificial Sequence
  Description of Artificial Sequence: Synthetic oligonucleotide
  Sense strand starting at position 3188 of SEQ ID NO: 1241742
cuuaauuguuggcuggauu

SEQ ID NO: 1296195 - RNA, 19 nt, Artificial Sequence
  Description of Artificial Sequence: Synthetic oligonucleotide
  Antisense strand to SEQ ID NO: 1296194
aauccagccaacaauuaag

SEQ ID NO: 1296196 - RNA, 19 nt, Artificial Sequence
  Description of Artificial Sequence: Synthetic oligonucleotide
  Sense strand starting at position 3189 of SEQ ID NO: 1241742
uuaauuguuggcuggauua

SEQ ID NO: 1296197 - RNA, 19 nt, Artificial Sequence
  Description of Artificial Sequence: Synthetic oligonucleotide
  Antisense strand to SEQ ID NO: 1296196
uaauccagccaacaauuaa

SEQ ID NO: 1296198 - RNA, 19 nt, Artificial Sequence
  Description of Artificial Sequence: Synthetic oligonucleotide
  Sense strand starting at position 3191 of SEQ ID NO: 1241742
aauuguuggcuggauuagu

SEQ ID NO: 1296199 - RNA, 19 nt, Artificial Sequence
  Description of Artificial Sequence: Synthetic oligonucleotide
  Antisense strand to SEQ ID NO: 1296198
acuaauccagccaacaauu

SEQ ID NO: 1296200 - RNA, 19 nt, Artificial Sequence
  Description of Artificial Sequence: Synthetic oligonucleotide
  Sense strand starting at position 3238 of SEQ ID NO: 1241742
uagugaaacugcuccgucu

SEQ ID NO: 1296201 - RNA, 19 nt, Artificial Sequence
  Description of Artificial Sequence: Synthetic oligonucleotide
  Antisense strand to SEQ ID NO: 1296200
agacggagcaguuucacua

SEQ ID NO: 1296202 - RNA, 19 nt, Artificial Sequence
  Description of Artificial Sequence: Synthetic oligonucleotide
  Sense strand starting at position 3241 of SEQ ID NO: 1241742
ugaaacugcuccgucuuua

SEQ ID NO: 1296203 - RNA, 19 nt, Artificial Sequence
  Description of Artificial Sequence: Synthetic oligonucleotide
  Antisense strand to SEQ ID NO: 1296202
uaaagacggagcaguuuca

SEQ ID NO: 1296204 - RNA, 19 nt, Artificial Sequence
  Description of Artificial Sequence: Synthetic oligonucleotide
  Sense strand starting at position 3265 of SEQ ID NO: 1241742
ugucuuccauucccagaga

SEQ ID NO: 1296205 - RNA, 19 nt, Artificial Sequence
  Description of Artificial Sequence: Synthetic oligonucleotide
  Antisense strand to SEQ ID NO: 1296204
ucucugggaauggaagaca

SEQ ID NO: 1296206 - RNA, 19 nt, Artificial Sequence
  Description of Artificial Sequence: Synthetic oligonucleotide
  Sense strand starting at position 3314 of SEQ ID NO: 1241742
ggaucagucucagcugauc

SEQ ID NO: 1296207 - RNA, 19 nt, Artificial Sequence
  Description of Artificial Sequence: Synthetic oligonucleotide
  Antisense strand to SEQ ID NO: 1296206
gaucagcugagacugaucc

SEQ ID NO: 1296208 - RNA, 19 nt, Artificial Sequence
  Description of Artificial Sequence: Synthetic oligonucleotide
  Sense strand starting at position 3375 of SEQ ID NO: 1241742
ccaaauuggauauguguga

SEQ ID NO: 1296209 - RNA, 19 nt, Artificial Sequence
  Description of Artificial Sequence: Synthetic oligonucleotide
  Antisense strand to SEQ ID NO: 1296208
ucacacauauccaauuugg

SEQ ID NO: 1296210 - RNA, 19 nt, Artificial Sequence
  Description of Artificial Sequence: Synthetic oligonucleotide
  Sense strand starting at position 3376 of SEQ ID NO: 1241742
caaauuggauaugugugaa

SEQ ID NO: 1296211 - RNA, 19 nt, Artificial Sequence
  Description of Artificial Sequence: Synthetic oligonucleotide
  Antisense strand to SEQ ID NO: 1296210
uucacacauauccaauuug

SEQ ID NO: 1296212 - RNA, 19 nt, Artificial Sequence
  Description of Artificial Sequence: Synthetic oligonucleotide
  Sense strand starting at position 3379 of SEQ ID NO: 1241742
auuggauaugugugaaauu

SEQ ID NO: 1296213 - RNA, 19 nt, Artificial Sequence
  Description of Artificial Sequence: Synthetic oligonucleotide
  Antisense strand to SEQ ID NO: 1296212
aauuucacacauauccaau

SEQ ID NO: 1296214 - RNA, 19 nt, Artificial Sequence
  Description of Artificial Sequence: Synthetic oligonucleotide
  Sense strand starting at position 3390 of SEQ ID NO: 1241742
gugaaauucuaguuaucuu

SEQ ID NO: 1296215 - RNA, 19 nt, Artificial Sequence
  Description of Artificial Sequence: Synthetic oligonucleotide
  Antisense strand to SEQ ID NO: 1296214
aagauaacuagaauuucac

SEQ ID NO: 1296216 - RNA, 19 nt, Artificial Sequence
  Description of Artificial Sequence: Synthetic oligonucleotide
  Sense strand starting at position 3440 of SEQ ID NO: 1241742
guucuuucuuucuuaugua

SEQ ID NO: 1296217 - RNA, 19 nt, Artificial Sequence
  Description of Artificial Sequence: Synthetic oligonucleotide
  Antisense strand to SEQ ID NO: 1296216
uacauaagaaagaaagaac

SEQ ID NO: 1296218 - RNA, 19 nt, Artificial Sequence
  Description of Artificial Sequence: Synthetic oligonucleotide
  Sense strand starting at position 3447 of SEQ ID NO: 1241742
cuuucuuauguagauauga

SEQ ID NO: 1296219 - RNA, 19 nt, Artificial Sequence
  Description of Artificial Sequence: Synthetic oligonucleotide
  Antisense strand to SEQ ID NO: 1296218
ucauaucuacauaagaaag

SEQ ID NO: 1296220 - RNA, 19 nt, Artificial Sequence
  Description of Artificial Sequence: Synthetic oligonucleotide
  Sense strand starting at position 240 of SEQ ID NO: 1241743
uuggauaauucuuugucau

SEQ ID NO: 1296221 - RNA, 19 nt, Artificial Sequence
  Description of Artificial Sequence: Synthetic oligonucleotide
  Antisense strand to SEQ ID NO: 1296220
augacaaagaauuauccaa

SEQ ID NO: 1296222 - RNA, 19 nt, Artificial Sequence
  Description of Artificial Sequence: Synthetic oligonucleotide
  Sense strand starting at position 263 of SEQ ID NO: 1241743
ggguuaucccgugcacugu

SEQ ID NO: 1296223 - RNA, 19 nt, Artificial Sequence
  Description of Artificial Sequence: Synthetic oligonucleotide
  Antisense strand to SEQ ID NO: 1296222
acagugcacgggauaaccc

SEQ ID NO: 1296224 - RNA, 19 nt, Artificial Sequence
  Description of Artificial Sequence: Synthetic oligonucleotide
  Sense strand starting at position 399 of SEQ ID NO: 1241743
guugacaaucacuggguua

SEQ ID NO: 1296225 - RNA, 19 nt, Artificial Sequence
  Description of Artificial Sequence: Synthetic oligonucleotide
  Antisense strand to SEQ ID NO: 1296224
uaacccagugauugucaac

SEQ ID NO: 1296226 - RNA, 19 nt, Artificial Sequence
  Description of Artificial Sequence: Synthetic oligonucleotide
  Sense strand starting at position 401 of SEQ ID NO: 1241743
ugacaaucacuggguuaga

SEQ ID NO: 1296227 - RNA, 19 nt, Artificial Sequence
  Description of Artificial Sequence: Synthetic oligonucleotide
  Antisense strand to SEQ ID NO: 1296226
ucuaacccagugauuguca

SEQ ID NO: 1296228 - RNA, 19 nt, Artificial Sequence
  Description of Artificial Sequence: Synthetic oligonucleotide
  Sense strand starting at position 411 of SEQ ID NO: 1241743
uggguuagacucuaguaug

SEQ ID NO: 1296229 - RNA, 19 nt, Artificial Sequence
  Description of Artificial Sequence: Synthetic oligonucleotide
  Antisense strand to SEQ ID NO: 1296228
cauacuagagucuaaccca

SEQ ID NO: 1296230 - RNA, 19 nt, Artificial Sequence
  Description of Artificial Sequence: Synthetic oligonucleotide
  Sense strand starting at position 417 of SEQ ID NO: 1241743
agacucuaguauguugaga

SEQ ID NO: 1296231 - RNA, 19 nt, Artificial Sequence
  Description of Artificial Sequence: Synthetic oligonucleotide
  Antisense strand to SEQ ID NO: 1296230
ucucaacauacuagagucu

SEQ ID NO: 1296232 - RNA, 19 nt, Artificial Sequence
  Description of Artificial Sequence: Synthetic oligonucleotide
  Sense strand starting at position 448 of SEQ ID NO: 1241743
gagcaaguauggcuugaca

SEQ ID NO: 1296233 - RNA, 19 nt, Artificial Sequence
  Description of Artificial Sequence: Synthetic oligonucleotide
  Antisense strand to SEQ ID NO: 1296232
ugucaagccauacuugcuc

SEQ ID NO: 1296234 - RNA, 19 nt, Artificial Sequence
  Description of Artificial Sequence: Synthetic oligonucleotide
  Sense strand starting at position 505 of SEQ ID NO: 1241743
ggaggucuggaguggacua

SEQ ID NO: 1296235 - RNA, 19 nt, Artificial Sequence
  Description of Artificial Sequence: Synthetic oligonucleotide
  Antisense strand to SEQ ID NO: 1296234
uaguccacuccagaccucc

SEQ ID NO: 1296236 - RNA, 19 nt, Artificial Sequence
  Description of Artificial Sequence: Synthetic oligonucleotide
  Sense strand starting at position 634 of SEQ ID NO: 1241743
cuaugugggacugauaguu

SEQ ID NO: 1296237 - RNA, 19 nt, Artificial Sequence
  Description of Artificial Sequence: Synthetic oligonucleotide
  Antisense strand to SEQ ID NO: 1296236
aacuaucagucccacauag

SEQ ID NO: 1296238 - RNA, 19 nt, Artificial Sequence
  Description of Artificial Sequence: Synthetic oligonucleotide
  Sense strand starting at position 667 of SEQ ID NO: 1241743
aacagagaagcuugcagua

SEQ ID NO: 1296239 - RNA, 19 nt, Artificial Sequence
  Description of Artificial Sequence: Synthetic oligonucleotide
  Antisense strand to SEQ ID NO: 1296238
uacugcaagcuucucuguu

SEQ ID NO: 1296240 - RNA, 19 nt, Artificial Sequence
  Description of Artificial Sequence: Synthetic oligonucleotide
  Sense strand starting at position 672 of SEQ ID NO: 1241743
agaagcuugcaguaagaaa

SEQ ID NO: 1296241 - RNA, 19 nt, Artificial Sequence
  Description of Artificial Sequence: Synthetic oligonucleotide
  Antisense strand to SEQ ID NO: 1296240
uuucuuacugcaagcuucu

SEQ ID NO: 1296242 - RNA, 19 nt, Artificial Sequence
  Description of Artificial Sequence: Synthetic oligonucleotide
  Sense strand starting at position 714 of SEQ ID NO: 1241743
gcaaaucacuguccaugua

SEQ ID NO: 1296243 - RNA, 19 nt, Artificial Sequence
  Description of Artificial Sequence: Synthetic oligonucleotide
  Antisense strand to SEQ ID NO: 1296242
uacauggacagugauuugc

SEQ ID NO: 1296244 - RNA, 19 nt, Artificial Sequence
  Description of Artificial Sequence: Synthetic oligonucleotide
  Sense strand starting at position 722 of SEQ ID NO: 1241743
cuguccauguaaucuugaa

SEQ ID NO: 1296245 - RNA, 19 nt, Artificial Sequence
  Description of Artificial Sequence: Synthetic oligonucleotide
  Antisense strand to SEQ ID NO: 1296244
uucaagauuacauggacag

SEQ ID NO: 1296246 - RNA, 19 nt, Artificial Sequence
  Description of Artificial Sequence: Synthetic oligonucleotide
  Sense strand starting at position 745 of SEQ ID NO: 1241743
guaacuucugagcaaguau

SEQ ID NO: 1296247 - RNA, 19 nt, Artificial Sequence
  Description of Artificial Sequence: Synthetic oligonucleotide
  Antisense strand to SEQ ID NO: 1296246
auacuugcucagaaguuac

SEQ ID NO: 1296248 - RNA, 19 nt, Artificial Sequence
  Description of Artificial Sequence: Synthetic oligonucleotide
  Sense strand starting at position 760 of SEQ ID NO: 1241743
guauguaucuuagucaacu

SEQ ID NO: 1296249 - RNA, 19 nt, Artificial Sequence
  Description of Artificial Sequence: Synthetic oligonucleotide
  Antisense strand to SEQ ID NO: 1296248
aguugacuaagauacauac

SEQ ID NO: 1296250 - RNA, 19 nt, Artificial Sequence
  Description of Artificial Sequence: Synthetic oligonucleotide
  Sense strand starting at position 819 of SEQ ID NO: 1241743
uuguauuguaguuagaauc

SEQ ID NO: 1296251 - RNA, 19 nt, Artificial Sequence
  Description of Artificial Sequence: Synthetic oligonucleotide
  Antisense strand to SEQ ID NO: 1296250
gauucuaacuacaauacaa

SEQ ID NO: 1296252 - RNA, 19 nt, Artificial Sequence
  Description of Artificial Sequence: Synthetic oligonucleotide
  Sense strand starting at position 884 of SEQ ID NO: 1241743
cacuguuagucucugggaa

SEQ ID NO: 1296253 - RNA, 19 nt, Artificial Sequence
  Description of Artificial Sequence: Synthetic oligonucleotide
  Antisense strand to SEQ ID NO: 1296252
uucccagagacuaacagug

SEQ ID NO: 1296254 - RNA, 19 nt, Artificial Sequence
  Description of Artificial Sequence: Synthetic oligonucleotide
  Sense strand starting at position 885 of SEQ ID NO: 1241743
acuguuagucucugggaag

SEQ ID NO: 1296255 - RNA, 19 nt, Artificial Sequence
  Description of Artificial Sequence: Synthetic oligonucleotide
  Antisense strand to SEQ ID NO: 1296254
cuucccagagacuaacagu

SEQ ID NO: 1296256 - RNA, 19 nt, Artificial Sequence
  Description of Artificial Sequence: Synthetic oligonucleotide
  Sense strand starting at position 930 of SEQ ID NO: 1241743
gaggcugaccugugcagaa

SEQ ID NO: 1296257 - RNA, 19 nt, Artificial Sequence
  Description of Artificial Sequence: Synthetic oligonucleotide
  Antisense strand to SEQ ID NO: 1296256
uucugcacaggucagccuc

SEQ ID NO: 1296258 - RNA, 19 nt, Artificial Sequence
  Description of Artificial Sequence: Synthetic oligonucleotide
  Sense strand starting at position 954 of SEQ ID NO: 1241743
cugcauguggcacagaauu

SEQ ID NO: 1296259 - RNA, 19 nt, Artificial Sequence
  Description of Artificial Sequence: Synthetic oligonucleotide
  Antisense strand to SEQ ID NO: 1296258
aauucugugccacaugcag

SEQ ID NO: 1296260 - RNA, 19 nt, Artificial Sequence
  Description of Artificial Sequence: Synthetic oligonucleotide
  Sense strand starting at position 956 of SEQ ID NO: 1241743
gcauguggcacagaauucu

SEQ ID NO: 1296261 - RNA, 19 nt, Artificial Sequence
  Description of Artificial Sequence: Synthetic oligonucleotide
  Antisense strand to SEQ ID NO: 1296260
agaauucugugccacaugc

SEQ ID NO: 1296262 - RNA, 19 nt, Artificial Sequence
  Description of Artificial Sequence: Synthetic oligonucleotide
  Sense strand starting at position 1112 of SEQ ID NO: 1241743
uuuccugaggguuauggua

SEQ ID NO: 1296263 - RNA, 19 nt, Artificial Sequence
  Description of Artificial Sequence: Synthetic oligonucleotide
  Antisense strand to SEQ ID NO: 1296262
uaccauaacccucaggaaa

SEQ ID NO: 1296264 - RNA, 19 nt, Artificial Sequence
  Description of Artificial Sequence: Synthetic oligonucleotide
  Sense strand starting at position 1262 of SEQ ID NO: 1241743
gaggguucccuacgacugu

SEQ ID NO: 1296265 - RNA, 19 nt, Artificial Sequence
  Description of Artificial Sequence: Synthetic oligonucleotide
  Antisense strand to SEQ ID NO: 1296264
acagucguagggaacccuc

SEQ ID NO: 1296266 - RNA, 19 nt, Artificial Sequence
  Description of Artificial Sequence: Synthetic oligonucleotide
  Sense strand starting at position 1271 of SEQ ID NO: 1241743
cuacgacugucauccuuaa

SEQ ID NO: 1296267 - RNA, 19 nt, Artificial Sequence
  Description of Artificial Sequence: Synthetic oligonucleotide
  Antisense strand to SEQ ID NO: 1296266
uuaaggaugacagucguag

SEQ ID NO: 1296268 - RNA, 19 nt, Artificial Sequence
  Description of Artificial Sequence: Synthetic oligonucleotide
  Sense strand starting at position 2138 of SEQ ID NO: 1241743
gcucgcuugcuccuggaaa

SEQ ID NO: 1296269 - RNA, 19 nt, Artificial Sequence
  Description of Artificial Sequence: Synthetic oligonucleotide
  Antisense strand to SEQ ID NO: 1296268
uuuccaggagcaagcgagc

SEQ ID NO: 1296270 - RNA, 19 nt, Artificial Sequence
  Description of Artificial Sequence: Synthetic oligonucleotide
  Sense strand starting at position 2461 of SEQ ID NO: 1241743
auaggaaugucuucccgag

SEQ ID NO: 1296271 - RNA, 19 nt, Artificial Sequence
  Description of Artificial Sequence: Synthetic oligonucleotide
  Antisense strand to SEQ ID NO: 1296270
cucgggaagacauuccuau

SEQ ID NO: 1296272 - RNA, 19 nt, Artificial Sequence
  Description of Artificial Sequence: Synthetic oligonucleotide
  Sense strand starting at position 2568 of SEQ ID NO: 1241743
aggagagaggucuguccuu

SEQ ID NO: 1296273 - RNA, 19 nt, Artificial Sequence
  Description of Artificial Sequence: Synthetic oligonucleotide
  Antisense strand to SEQ ID NO: 1296272
aaggacagaccucucuccu

SEQ ID NO: 1296274 - RNA, 19 nt, Artificial Sequence
  Description of Artificial Sequence: Synthetic oligonucleotide
  Sense strand starting at position 2573 of SEQ ID NO: 1241743
agaggucuguccuuugacu

SEQ ID NO: 1296275 - RNA, 19 nt, Artificial Sequence
  Description of Artificial Sequence: Synthetic oligonucleotide
  Antisense strand to SEQ ID NO: 1296274
agucaaaggacagaccucu

SEQ ID NO: 1296276 - RNA, 19 nt, Artificial Sequence
  Description of Artificial Sequence: Synthetic oligonucleotide
  Sense strand starting at position 2606 of SEQ ID NO: 1241743
gccuaacaugguuauuguu

SEQ ID NO: 1296277 - RNA, 19 nt, Artificial Sequence
  Description of Artificial Sequence: Synthetic oligonucleotide
  Antisense strand to SEQ ID NO: 1296276
aacaauaaccauguuaggc

SEQ ID NO: 1296278 - RNA, 19 nt, Artificial Sequence
  Description of Artificial Sequence: Synthetic oligonucleotide
  Sense strand starting at position 2608 of SEQ ID NO: 1241743
cuaacaugguuauuguuaa

SEQ ID NO: 1296279 - RNA, 19 nt, Artificial Sequence
  Description of Artificial Sequence: Synthetic oligonucleotide
  Antisense strand to SEQ ID NO: 1296278
uuaacaauaaccauguuag

SEQ ID NO: 1296280 - RNA, 19 nt, Artificial Sequence
  Description of Artificial Sequence: Synthetic oligonucleotide
  Sense strand starting at position 2620 of SEQ ID NO: 1241743
uuguuaauugacgguaaag

SEQ ID NO: 1296281 - RNA, 19 nt, Artificial Sequence
  Description of Artificial Sequence: Synthetic oligonucleotide
  Antisense strand to SEQ ID NO: 1296280
cuuuaccgucaauuaacaa

SEQ ID NO: 1296282 - RNA, 19 nt, Artificial Sequence
  Description of Artificial Sequence: Synthetic oligonucleotide
  Sense strand starting at position 2622 of SEQ ID NO: 1241743
guuaauugacgguaaagua

SEQ ID NO: 1296283 - RNA, 19 nt, Artificial Sequence
  Description of Artificial Sequence: Synthetic oligonucleotide
  Antisense strand to SEQ ID NO: 1296282
uacuuuaccgucaauuaac

SEQ ID NO: 1296284 - RNA, 19 nt, Artificial Sequence
  Description of Artificial Sequence: Synthetic oligonucleotide
  Sense strand starting at position 2671 of SEQ ID NO: 1241743
cuuauuuaucacuguguau

SEQ ID NO: 1296285 - RNA, 19 nt, Artificial Sequence
  Description of Artificial Sequence: Synthetic oligonucleotide
  Antisense strand to SEQ ID NO: 1296284
auacacagugauaaauaag

SEQ ID NO: 1296286 - RNA, 19 nt, Artificial Sequence
  Description of Artificial Sequence: Synthetic oligonucleotide
  Sense strand starting at position 2673 of SEQ ID NO: 1241743
uauuuaucacuguguaugu

SEQ ID NO: 1296287 - RNA, 19 nt, Artificial Sequence
  Description of Artificial Sequence: Synthetic oligonucleotide
  Antisense strand to SEQ ID NO: 1296286
acauacacagugauaaaua

SEQ ID NO: 1296288 - RNA, 19 nt, Artificial Sequence
  Description of Artificial Sequence: Synthetic oligonucleotide
  Sense strand starting at position 2709 of SEQ ID NO: 1241743
cuuuguauggcagauuauu

SEQ ID NO: 1296289 - RNA, 19 nt, Artificial Sequence
  Description of Artificial Sequence: Synthetic oligonucleotide
  Antisense strand to SEQ ID NO: 1296288
aauaaucugccauacaaag

SEQ ID NO: 1296290 - RNA, 19 nt, Artificial Sequence
  Description of Artificial Sequence: Synthetic oligonucleotide
  Sense strand starting at position 2911 of SEQ ID NO: 1241743
agugacuucuggccugaaa

SEQ ID NO: 1296291 - RNA, 19 nt, Artificial Sequence
  Description of Artificial Sequence: Synthetic oligonucleotide
  Antisense strand to SEQ ID NO: 1296290
uuucaggccagaagucacu

SEQ ID NO: 1296292 - RNA, 19 nt, Artificial Sequence
  Description of Artificial Sequence: Synthetic oligonucleotide
  Sense strand starting at position 2976 of SEQ ID NO: 1241743
guucuuucccugcagauau

SEQ ID NO: 1296293 - RNA, 19 nt, Artificial Sequence
  Description of Artificial Sequence: Synthetic oligonucleotide
  Antisense strand to SEQ ID NO: 1296292
auaucugcagggaaagaac

SEQ ID NO: 1296294 - RNA, 19 nt, Artificial Sequence
  Description of Artificial Sequence: Synthetic oligonucleotide
  Sense strand starting at position 2986 of SEQ ID NO: 1241743
ugcagauauaggugagguu

SEQ ID NO: 1296295 - RNA, 19 nt, Artificial Sequence
  Description of Artificial Sequence: Synthetic oligonucleotide
  Antisense strand to SEQ ID NO: 1296294
aaccucaccuauaucugca

SEQ ID NO: 1296296 - RNA, 19 nt, Artificial Sequence
  Description of Artificial Sequence: Synthetic oligonucleotide
  Sense strand starting at position 3029 of SEQ ID NO: 1241743
guuagacaaucagugaauu

SEQ ID NO: 1296297 - RNA, 19 nt, Artificial Sequence
  Description of Artificial Sequence: Synthetic oligonucleotide
  Antisense strand to SEQ ID NO: 1296296
aauucacugauugucuaac

SEQ ID NO: 1296298 - RNA, 19 nt, Artificial Sequence
  Description of Artificial Sequence: Synthetic oligonucleotide
  Sense strand starting at position 3394 of SEQ ID NO: 1241743
aacugagaguggcuuagaa

SEQ ID NO: 1296299 - RNA, 19 nt, Artificial Sequence
  Description of Artificial Sequence: Synthetic oligonucleotide
  Antisense strand to SEQ ID NO: 1296298
uucuaagccacucucaguu

SEQ ID NO: 1296300 - RNA, 19 nt, Artificial Sequence
  Description of Artificial Sequence: Synthetic oligonucleotide
  Sense strand starting at position 47 of SEQ ID NO: 1241744
ggguuccacuacuuuaaca

SEQ ID NO: 1296301 - RNA, 19 nt, Artificial Sequence
  Description of Artificial Sequence: Synthetic oligonucleotide
  Antisense strand to SEQ ID NO: 1296300
uguuaaaguaguggaaccc

SEQ ID NO: 1296302 - RNA, 19 nt, Artificial Sequence
  Description of Artificial Sequence: Synthetic oligonucleotide
  Sense strand starting at position 478 of SEQ ID NO: 1241744
acacuuugcuuauugugaa

SEQ ID NO: 1296303 - RNA, 19 nt, Artificial Sequence
  Description of Artificial Sequence: Synthetic oligonucleotide
  Antisense strand to SEQ ID NO: 1296302
uucacaauaagcaaagugu

SEQ ID NO: 1296304 - RNA, 19 nt, Artificial Sequence
  Description of Artificial Sequence: Synthetic oligonucleotide
  Sense strand starting at position 485 of SEQ ID NO: 1241744
gcuuauugugaaugaauaa

SEQ ID NO: 1296305 - RNA, 19 nt, Artificial Sequence
  Description of Artificial Sequence: Synthetic oligonucleotide
  Antisense strand to SEQ ID NO: 1296304
uuauucauucacaauaagc

SEQ ID NO: 1296306 - RNA, 19 nt, Artificial Sequence
  Description of Artificial Sequence: Synthetic oligonucleotide
  Sense strand starting at position 570 of SEQ ID NO: 1241744
aggcuacucuuagcuacaa

SEQ ID NO: 1296307 - RNA, 19 nt, Artificial Sequence
  Description of Artificial Sequence: Synthetic oligonucleotide
  Antisense strand to SEQ ID NO: 1296306
uuguagcuaagaguagccu

SEQ ID NO: 1296308 - RNA, 19 nt, Artificial Sequence
  Description of Artificial Sequence: Synthetic oligonucleotide
  Sense strand starting at position 571 of SEQ ID NO: 1241744
ggcuacucuuagcuacaaa

SEQ ID NO: 1296309 - RNA, 19 nt, Artificial Sequence
  Description of Artificial Sequence: Synthetic oligonucleotide
  Antisense strand to SEQ ID NO: 1296308
uuuguagcuaagaguagcc

SEQ ID NO: 1296310 - RNA, 19 nt, Artificial Sequence
  Description of Artificial Sequence: Synthetic oligonucleotide
  Sense strand starting at position 614 of SEQ ID NO: 1241744
aguaguugucaccauccaa

SEQ ID NO: 1296311 - RNA, 19 nt, Artificial Sequence
  Description of Artificial Sequence: Synthetic oligonucleotide
  Antisense strand to SEQ ID NO: 1296310
uuggauggugacaacuacu

SEQ ID NO: 1296312 - RNA, 19 nt, Artificial Sequence
  Description of Artificial Sequence: Synthetic oligonucleotide
  Sense strand starting at position 629 of SEQ ID NO: 1241744
ccaagagcauaguugguau

SEQ ID NO: 1296313 - RNA, 19 nt, Artificial Sequence
  Description of Artificial Sequence: Synthetic oligonucleotide
  Antisense strand to SEQ ID NO: 1296312
auaccaacuaugcucuugg

SEQ ID NO: 1296314 - RNA, 19 nt, Artificial Sequence
  Description of Artificial Sequence: Synthetic oligonucleotide
  Sense strand starting at position 1121 of SEQ ID NO: 1241744
cuauuccaucugugacacu

SEQ ID NO: 1296315 - RNA, 19 nt, Artificial Sequence
  Description of Artificial Sequence: Synthetic oligonucleotide
  Antisense strand to SEQ ID NO: 1296314
agugucacagauggaauag

SEQ ID NO: 1296316 - RNA, 19 nt, Artificial Sequence
  Description of Artificial Sequence: Synthetic oligonucleotide
  Sense strand starting at position 1320 of SEQ ID NO: 1241744
uuuacuuuccugcagguau

SEQ ID NO: 1296317 - RNA, 19 nt, Artificial Sequence
  Description of Artificial Sequence: Synthetic oligonucleotide
  Antisense strand to SEQ ID NO: 1296316
auaccugcaggaaaguaaa

SEQ ID NO: 1296318 - RNA, 19 nt, Artificial Sequence
  Description of Artificial Sequence: Synthetic oligonucleotide
  Sense strand starting at position 1331 of SEQ ID NO: 1241744
gcagguaucgcgguaucuu

SEQ ID NO: 1296319 - RNA, 19 nt, Artificial Sequence
  Description of Artificial Sequence: Synthetic oligonucleotide
  Antisense strand to SEQ ID NO: 1296318
aagauaccgcgauaccugc

SEQ ID NO: 1296320 - RNA, 19 nt, Artificial Sequence
  Description of Artificial Sequence: Synthetic oligonucleotide
  Sense strand starting at position 1351 of SEQ ID NO: 1241744
ugaugccaauccguauaaa

SEQ ID NO: 1296321 - RNA, 19 nt, Artificial Sequence
  Description of Artificial Sequence: Synthetic oligonucleotide
  Antisense strand to SEQ ID NO: 1296320
uuuauacggauuggcauca

SEQ ID NO: 1296322 - RNA, 19 nt, Artificial Sequence
  Description of Artificial Sequence: Synthetic oligonucleotide
  Sense strand starting at position 1352 of SEQ ID NO: 1241744
gaugccaauccguauaaau

SEQ ID NO: 1296323 - RNA, 19 nt, Artificial Sequence
  Description of Artificial Sequence: Synthetic oligonucleotide
  Antisense strand to SEQ ID NO: 1296322
auuuauacggauuggcauc

SEQ ID NO: 1296324 - RNA, 19 nt, Artificial Sequence
  Description of Artificial Sequence: Synthetic oligonucleotide
  Sense strand starting at position 1354 of SEQ ID NO: 1241744
ugccaauccguauaaauau

SEQ ID NO: 1296325 - RNA, 19 nt, Artificial Sequence
  Description of Artificial Sequence: Synthetic oligonucleotide
  Antisense strand to SEQ ID NO: 1296324
auauuuauacggauuggca

SEQ ID NO: 1296326 - RNA, 19 nt, Artificial Sequence
  Description of Artificial Sequence: Synthetic oligonucleotide
  Sense strand starting at position 1785 of SEQ ID NO: 1241744
uugugaaucuccucacgga

SEQ ID NO: 1296327 - RNA, 19 nt, Artificial Sequence
  Description of Artificial Sequence: Synthetic oligonucleotide
  Antisense strand to SEQ ID NO: 1296326
uccgugaggagauucacaa

SEQ ID NO: 1296328 - RNA, 19 nt, Artificial Sequence
  Description of Artificial Sequence: Synthetic oligonucleotide
  Sense strand starting at position 1803 of SEQ ID NO: 1241744
aggcacuugcgagaguuaa

SEQ ID NO: 1296329 - RNA, 19 nt, Artificial Sequence
  Description of Artificial Sequence: Synthetic oligonucleotide
  Antisense strand to SEQ ID NO: 1296328
uuaacucucgcaagugccu

SEQ ID NO: 1296330 - RNA, 19 nt, Artificial Sequence
  Description of Artificial Sequence: Synthetic oligonucleotide
  Sense strand starting at position 1813 of SEQ ID NO: 1241744
gagaguuaaugggcagaug

SEQ ID NO: 1296331 - RNA, 19 nt, Artificial Sequence
  Description of Artificial Sequence: Synthetic oligonucleotide
  Antisense strand to SEQ ID NO: 1296330
caucugcccauuaacucuc

SEQ ID NO: 1296332 - RNA, 19 nt, Artificial Sequence
  Description of Artificial Sequence: Synthetic oligonucleotide
  Sense strand starting at position 2170 of SEQ ID NO: 1241744
guugaaguuagugacuacu

SEQ ID NO: 1296333 - RNA, 19 nt, Artificial Sequence
  Description of Artificial Sequence: Synthetic oligonucleotide
  Antisense strand to SEQ ID NO: 1296332
aguagucacuaacuucaac

SEQ ID NO: 1296334 - RNA, 19 nt, Artificial Sequence
  Description of Artificial Sequence: Synthetic oligonucleotide
  Sense strand starting at position 2172 of SEQ ID NO: 1241744
ugaaguuagugacuacuga

SEQ ID NO: 1296335 - RNA, 19 nt, Artificial Sequence
  Description of Artificial Sequence: Synthetic oligonucleotide
  Antisense strand to SEQ ID NO: 1296334
ucaguagucacuaacuuca

SEQ ID NO: 1296336 - RNA, 19 nt, Artificial Sequence
  Description of Artificial Sequence: Synthetic oligonucleotide
  Sense strand starting at position 2219 of SEQ ID NO: 1241744
ggaaguaauucuccuuuaa

SEQ ID NO: 1296337 - RNA, 19 nt, Artificial Sequence
  Description of Artificial Sequence: Synthetic oligonucleotide
  Antisense strand to SEQ ID NO: 1296336
uuaaaggagaauuacuucc

SEQ ID NO: 1296338 - RNA, 19 nt, Artificial Sequence
  Description of Artificial Sequence: Synthetic oligonucleotide
  Sense strand starting at position 2231 of SEQ ID NO: 1241744
ccuuuaauuuccgaaagau

SEQ ID NO: 1296339 - RNA, 19 nt, Artificial Sequence
  Description of Artificial Sequence: Synthetic oligonucleotide
  Antisense strand to SEQ ID NO: 1296338
aucuuucggaaauuaaagg

SEQ ID NO: 1296340 - RNA, 19 nt, Artificial Sequence
  Description of Artificial Sequence: Synthetic oligonucleotide
  Sense strand starting at position 2243 of SEQ ID NO: 1241744
gaaagauguacccacgagu

SEQ ID NO: 1296341 - RNA, 19 nt, Artificial Sequence
  Description of Artificial Sequence: Synthetic oligonucleotide
  Antisense strand to SEQ ID NO: 1296340
acucguggguacaucuuuc

SEQ ID NO: 1296342 - RNA, 19 nt, Artificial Sequence
  Description of Artificial Sequence: Synthetic oligonucleotide
  Sense strand starting at position 2246 of SEQ ID NO: 1241744
agauguacccacgaguuua

SEQ ID NO: 1296343 - RNA, 19 nt, Artificial Sequence
  Description of Artificial Sequence: Synthetic oligonucleotide
  Antisense strand to SEQ ID NO: 1296342
uaaacucguggguacaucu

SEQ ID NO: 1296344 - RNA, 19 nt, Artificial Sequence
  Description of Artificial Sequence: Synthetic oligonucleotide
  Sense strand starting at position 2565 of SEQ ID NO: 1241744
gucccauagcaggguauuu

SEQ ID NO: 1296345 - RNA, 19 nt, Artificial Sequence
  Description of Artificial Sequence: Synthetic oligonucleotide
  Antisense strand to SEQ ID NO: 1296344
aaauacccugcuaugggac

SEQ ID NO: 1296346 - RNA, 19 nt, Artificial Sequence
  Description of Artificial Sequence: Synthetic oligonucleotide
  Sense strand starting at position 2601 of SEQ ID NO: 1241744
uggcuaacugaauguacau

SEQ ID NO: 1296347 - RNA, 19 nt, Artificial Sequence
  Description of Artificial Sequence: Synthetic oligonucleotide
  Antisense strand to SEQ ID NO: 1296346
auguacauucaguuagcca

SEQ ID NO: 1296348 - RNA, 19 nt, Artificial Sequence
  Description of Artificial Sequence: Synthetic oligonucleotide
  Sense strand starting at position 2608 of SEQ ID NO: 1241744
cugaauguacaugguauua

SEQ ID NO: 1296349 - RNA, 19 nt, Artificial Sequence
  Description of Artificial Sequence: Synthetic oligonucleotide
  Antisense strand to SEQ ID NO: 1296348
uaauaccauguacauucag

SEQ ID NO: 1296350 - RNA, 19 nt, Artificial Sequence
  Description of Artificial Sequence: Synthetic oligonucleotide
  Sense strand starting at position 2780 of SEQ ID NO: 1241744
agauaagcguugucaggga

SEQ ID NO: 1296351 - RNA, 19 nt, Artificial Sequence
  Description of Artificial Sequence: Synthetic oligonucleotide
  Antisense strand to SEQ ID NO: 1296350
ucccugacaacgcuuaucu

SEQ ID NO: 1296352 - RNA, 19 nt, Artificial Sequence
  Description of Artificial Sequence: Synthetic oligonucleotide
  Sense strand starting at position 2785 of SEQ ID NO: 1241744
agcguugucagggaaagug

SEQ ID NO: 1296353 - RNA, 19 nt, Artificial Sequence
  Description of Artificial Sequence: Synthetic oligonucleotide
  Antisense strand to SEQ ID NO: 1296352
cacuuucccugacaacgcu

SEQ ID NO: 1296354 - RNA, 19 nt, Artificial Sequence
  Description of Artificial Sequence: Synthetic oligonucleotide
  Sense strand starting at position 2874 of SEQ ID NO: 1241744
agcaaauugacacgguaau

SEQ ID NO: 1296355 - RNA, 19 nt, Artificial Sequence
  Description of Artificial Sequence: Synthetic oligonucleotide
  Antisense strand to SEQ ID NO: 1296354
auuaccgugucaauuugcu

SEQ ID NO: 1296356 - RNA, 19 nt, Artificial Sequence
  Description of Artificial Sequence: Synthetic oligonucleotide
  Sense strand starting at position 2875 of SEQ ID NO: 1241744
gcaaauugacacgguaaua

SEQ ID NO: 1296357 - RNA, 19 nt, Artificial Sequence
  Description of Artificial Sequence: Synthetic oligonucleotide
  Antisense strand to SEQ ID NO: 1296356
uauuaccgugucaauuugc

SEQ ID NO: 1296358 - RNA, 19 nt, Artificial Sequence
  Description of Artificial Sequence: Synthetic oligonucleotide
  Sense strand starting at position 2953 of SEQ ID NO: 1241744
ugucaacacguuuauugau

SEQ ID NO: 1296359 - RNA, 19 nt, Artificial Sequence
  Description of Artificial Sequence: Synthetic oligonucleotide
  Antisense strand to SEQ ID NO: 1296358
aucaauaaacguguugaca

SEQ ID NO: 1296360 - RNA, 19 nt, Artificial Sequence
  Description of Artificial Sequence: Synthetic oligonucleotide
  Sense strand starting at position 3413 of SEQ ID NO: 1241744
ugggaaucauuaccuacuu

SEQ ID NO: 1296361 - RNA, 19 nt, Artificial Sequence
  Description of Artificial Sequence: Synthetic oligonucleotide
  Antisense strand to SEQ ID NO: 1296360
aaguagguaaugauuccca

SEQ ID NO: 1296362 - RNA, 19 nt, Artificial Sequence
  Description of Artificial Sequence: Synthetic oligonucleotide
  Sense strand starting at position 3414 of SEQ ID NO: 1241744
gggaaucauuaccuacuuu

SEQ ID NO: 1296363 - RNA, 19 nt, Artificial Sequence
  Description of Artificial Sequence: Synthetic oligonucleotide
  Antisense strand to SEQ ID NO: 1296362
aaaguagguaaugauuccc

SEQ ID NO: 1296364 - RNA, 19 nt, Artificial Sequence
  Description of Artificial Sequence: Synthetic oligonucleotide
  Sense strand starting at position 3486 of SEQ ID NO: 1241744
cuuaguaauguacaugauu

SEQ ID NO: 1296365 - RNA, 19 nt, Artificial Sequence
  Description of Artificial Sequence: Synthetic oligonucleotide
  Antisense strand to SEQ ID NO: 1296364
aaucauguacauuacuaag

SEQ ID NO: 1296366 - RNA, 19 nt, Artificial Sequence
  Description of Artificial Sequence: Synthetic oligonucleotide
  Sense strand starting at position 3654 of SEQ ID NO: 1241744
gagcauuuaguuggauugu

SEQ ID NO: 1296367 - RNA, 19 nt, Artificial Sequence
  Description of Artificial Sequence: Synthetic oligonucleotide
  Antisense strand to SEQ ID NO: 1296366
acaauccaacuaaaugcuc

SEQ ID NO: 1296368 - RNA, 19 nt, Artificial Sequence
  Description of Artificial Sequence: Synthetic oligonucleotide
  Sense strand starting at position 3685 of SEQ ID NO: 1241744
cuaagauaagauugguagu

SEQ ID NO: 1296369 - RNA, 19 nt, Artificial Sequence
  Description of Artificial Sequence: Synthetic oligonucleotide
  Antisense strand to SEQ ID NO: 1296368
acuaccaaucuuaucuuag

SEQ ID NO: 1296370 - RNA, 19 nt, Artificial Sequence
  Description of Artificial Sequence: Synthetic oligonucleotide
  Sense strand starting at position 3695 of SEQ ID NO: 1241744
auugguaguccacacagua

SEQ ID NO: 1296371 - RNA, 19 nt, Artificial Sequence
  Description of Artificial Sequence: Synthetic oligonucleotide
  Antisense strand to SEQ ID NO: 1296370
uacuguguggacuaccaau

SEQ ID NO: 1296372 - RNA, 19 nt, Artificial Sequence
  Description of Artificial Sequence: Synthetic oligonucleotide
  Sense strand starting at position 3710 of SEQ ID NO: 1241744
aguacauccugauaauuug

SEQ ID NO: 1296373 - RNA, 19 nt, Artificial Sequence
  Description of Artificial Sequence: Synthetic oligonucleotide
  Antisense strand to SEQ ID NO: 1296372
caaauuaucaggauguacu

SEQ ID NO: 1296374 - RNA, 19 nt, Artificial Sequence
  Description of Artificial Sequence: Synthetic oligonucleotide
  Sense strand starting at position 3756 of SEQ ID NO: 1241744
gaaucaguauaagcaguua

SEQ ID NO: 1296375 - RNA, 19 nt, Artificial Sequence
  Description of Artificial Sequence: Synthetic oligonucleotide
  Antisense strand to SEQ ID NO: 1296374
uaacugcuuauacugauuc

SEQ ID NO: 1296376 - RNA, 19 nt, Artificial Sequence
  Description of Artificial Sequence: Synthetic oligonucleotide
  Sense strand starting at position 3801 of SEQ ID NO: 1241744
ugaggcucugcugaccaau

SEQ ID NO: 1296377 - RNA, 19 nt, Artificial Sequence
  Description of Artificial Sequence: Synthetic oligonucleotide
  Antisense strand to SEQ ID NO: 1296376
auuggucagcagagccuca

SEQ ID NO: 1296378 - RNA, 19 nt, Artificial Sequence
  Description of Artificial Sequence: Synthetic oligonucleotide
  Sense strand starting at position 3956 of SEQ ID NO: 1241744
ugugaaauagucuggacaa

SEQ ID NO: 1296379 - RNA, 19 nt, Artificial Sequence
  Description of Artificial Sequence: Synthetic oligonucleotide
  Antisense strand to SEQ ID NO: 1296378
uuguccagacuauuucaca

SEQ ID NO: 1296380 - RNA, 19 nt, Artificial Sequence
  Description of Artificial Sequence: Synthetic oligonucleotide
  Sense strand starting at position 47 of SEQ ID NO: 1241745
ccaccucuggcacagaaua

SEQ ID NO: 1296381 - RNA, 19 nt, Artificial Sequence
  Description of Artificial Sequence: Synthetic oligonucleotide
  Antisense strand to SEQ ID NO: 1296380
uauucugugccagaggugg

SEQ ID NO: 1296382 - RNA, 19 nt, Artificial Sequence
  Description of Artificial Sequence: Synthetic oligonucleotide
  Sense strand starting at position 71 of SEQ ID NO: 1241745
ucaauaucuguagguuauc

SEQ ID NO: 1296383 - RNA, 19 nt, Artificial Sequence
  Description of Artificial Sequence: Synthetic oligonucleotide
  Antisense strand to SEQ ID NO: 1296382
gauaaccuacagauauuga

SEQ ID NO: 1296384 - RNA, 19 nt, Artificial Sequence
  Description of Artificial Sequence: Synthetic oligonucleotide
  Sense strand starting at position 74 of SEQ ID NO: 1241745
auaucuguagguuaucauu

SEQ ID NO: 1296385 - RNA, 19 nt, Artificial Sequence
  Description of Artificial Sequence: Synthetic oligonucleotide
  Antisense strand to SEQ ID NO: 1296384
aaugauaaccuacagauau

SEQ ID NO: 1296386 - RNA, 19 nt, Artificial Sequence
  Description of Artificial Sequence: Synthetic oligonucleotide
  Sense strand starting at position 80 of SEQ ID NO: 1241745
guagguuaucauuacuauu

SEQ ID NO: 1296387 - RNA, 19 nt, Artificial Sequence
  Description of Artificial Sequence: Synthetic oligonucleotide
  Antisense strand to SEQ ID NO: 1296386
aauaguaaugauaaccuac

SEQ ID NO: 1296388 - RNA, 19 nt, Artificial Sequence
  Description of Artificial Sequence: Synthetic oligonucleotide
  Sense strand starting at position 131 of SEQ ID NO: 1241745
aagagcuugcucugggcua

SEQ ID NO: 1296389 - RNA, 19 nt, Artificial Sequence
  Description of Artificial Sequence: Synthetic oligonucleotide
  Antisense strand to SEQ ID NO: 1296388
uagcccagagcaagcucuu

SEQ ID NO: 1296390 - RNA, 19 nt, Artificial Sequence
  Description of Artificial Sequence: Synthetic oligonucleotide
  Sense strand starting at position 136 of SEQ ID NO: 1241745
cuugcucugggcuacuaua

SEQ ID NO: 1296391 - RNA, 19 nt, Artificial Sequence
  Description of Artificial Sequence: Synthetic oligonucleotide
  Antisense strand to SEQ ID NO: 1296390
uauaguagcccagagcaag

SEQ ID NO: 1296392 - RNA, 19 nt, Artificial Sequence
  Description of Artificial Sequence: Synthetic oligonucleotide
  Sense strand starting at position 194 of SEQ ID NO: 1241745
cugcauucugaggguaaga

SEQ ID NO: 1296393 - RNA, 19 nt, Artificial Sequence
  Description of Artificial Sequence: Synthetic oligonucleotide
  Antisense strand to SEQ ID NO: 1296392
ucuuacccucagaaugcag

SEQ ID NO: 1296394 - RNA, 19 nt, Artificial Sequence
  Description of Artificial Sequence: Synthetic oligonucleotide
  Sense strand starting at position 233 of SEQ ID NO: 1241745
uaccaauguccugggagga

SEQ ID NO: 1296395 - RNA, 19 nt, Artificial Sequence
  Description of Artificial Sequence: Synthetic oligonucleotide
  Antisense strand to SEQ ID NO: 1296394
uccucccaggacauuggua

SEQ ID NO: 1296396 - RNA, 19 nt, Artificial Sequence
  Description of Artificial Sequence: Synthetic oligonucleotide
  Sense strand starting at position 261 of SEQ ID NO: 1241745
aggaaugaauuagauguca

SEQ ID NO: 1296397 - RNA, 19 nt, Artificial Sequence
  Description of Artificial Sequence: Synthetic oligonucleotide
  Antisense strand to SEQ ID NO: 1296396
ugacaucuaauucauuccu

SEQ ID NO: 1296398 - RNA, 19 nt, Artificial Sequence
  Description of Artificial Sequence: Synthetic oligonucleotide
  Sense strand starting at position 317 of SEQ ID NO: 1241745
uggguacguuugccauaaa

SEQ ID NO: 1296399 - RNA, 19 nt, Artificial Sequence
  Description of Artificial Sequence: Synthetic oligonucleotide
  Antisense strand to SEQ ID NO: 1296398
uuuauggcaaacguaccca

SEQ ID NO: 1296400 - RNA, 19 nt, Artificial Sequence
  Description of Artificial Sequence: Synthetic oligonucleotide
  Sense strand starting at position 320 of SEQ ID NO: 1241745
guacguuugccauaaacac

SEQ ID NO: 1296401 - RNA, 19 nt, Artificial Sequence
  Description of Artificial Sequence: Synthetic oligonucleotide
  Antisense strand to SEQ ID NO: 1296400
guguuuauggcaaacguac

SEQ ID NO: 1296402 - RNA, 19 nt, Artificial Sequence
  Description of Artificial Sequence: Synthetic oligonucleotide
  Sense strand starting at position 396 of SEQ ID NO: 1241745
agggacaaguguuauaaga

SEQ ID NO: 1296403 - RNA, 19 nt, Artificial Sequence
  Description of Artificial Sequence: Synthetic oligonucleotide
  Antisense strand to SEQ ID NO: 1296402
ucuuauaacacuugucccu

SEQ ID NO: 1296404 - RNA, 19 nt, Artificial Sequence
  Description of Artificial Sequence: Synthetic oligonucleotide
  Sense strand starting at position 412 of SEQ ID NO: 1241745
agacuuaccuuucuguguu

SEQ ID NO: 1296405 - RNA, 19 nt, Artificial Sequence
  Description of Artificial Sequence: Synthetic oligonucleotide
  Antisense strand to SEQ ID NO: 1296404
aacacagaaagguaagucu

SEQ ID NO: 1296406 - RNA, 19 nt, Artificial Sequence
  Description of Artificial Sequence: Synthetic oligonucleotide
  Sense strand starting at position 414 of SEQ ID NO: 1241745
acuuaccuuucuguguuua

SEQ ID NO: 1296407 - RNA, 19 nt, Artificial Sequence
  Description of Artificial Sequence: Synthetic oligonucleotide
  Antisense strand to SEQ ID NO: 1296406
uaaacacagaaagguaagu

SEQ ID NO: 1296408 - RNA, 19 nt, Artificial Sequence
  Description of Artificial Sequence: Synthetic oligonucleotide
  Sense strand starting at position 416 of SEQ ID NO: 1241745
uuaccuuucuguguuuacu

SEQ ID NO: 1296409 - RNA, 19 nt, Artificial Sequence
  Description of Artificial Sequence: Synthetic oligonucleotide
  Antisense strand to SEQ ID NO: 1296408
aguaaacacagaaagguaa

SEQ ID NO: 1296410 - RNA, 19 nt, Artificial Sequence
  Description of Artificial Sequence: Synthetic oligonucleotide
  Sense strand starting at position 424 of SEQ ID NO: 1241745
cuguguuuacuugcuuagu

SEQ ID NO: 1296411 - RNA, 19 nt, Artificial Sequence
  Description of Artificial Sequence: Synthetic oligonucleotide
  Antisense strand to SEQ ID NO: 1296410
acuaagcaaguaaacacag

SEQ ID NO: 1296412 - RNA, 19 nt, Artificial Sequence
  Description of Artificial Sequence: Synthetic oligonucleotide
  Sense strand starting at position 445 of SEQ ID NO: 1241745
uuuagacauuaugcuuaga

SEQ ID NO: 1296413 - RNA, 19 nt, Artificial Sequence
  Description of Artificial Sequence: Synthetic oligonucleotide
  Antisense strand to SEQ ID NO: 1296412
ucuaagcauaaugucuaaa

SEQ ID NO: 1296414 - RNA, 19 nt, Artificial Sequence
  Description of Artificial Sequence: Synthetic oligonucleotide
  Sense strand starting at position 511 of SEQ ID NO: 1241745
caaagcagaguucguaaga

SEQ ID NO: 1296415 - RNA, 19 nt, Artificial Sequence
  Description of Artificial Sequence: Synthetic oligonucleotide
  Antisense strand to SEQ ID NO: 1296414
ucuuacgaacucugcuuug

SEQ ID NO: 1296416 - RNA, 19 nt, Artificial Sequence
  Description of Artificial Sequence: Synthetic oligonucleotide
  Sense strand starting at position 512 of SEQ ID NO: 1241745
aaagcagaguucguaagaa

SEQ ID NO: 1296417 - RNA, 19 nt, Artificial Sequence
  Description of Artificial Sequence: Synthetic oligonucleotide
  Antisense strand to SEQ ID NO: 1296416
uucuuacgaacucugcuuu

SEQ ID NO: 1296418 - RNA, 19 nt, Artificial Sequence
  Description of Artificial Sequence: Synthetic oligonucleotide
  Sense strand starting at position 609 of SEQ ID NO: 1241745
guuugaauaaggcagcauu

SEQ ID NO: 1296419 - RNA, 19 nt, Artificial Sequence
  Description of Artificial Sequence: Synthetic oligonucleotide
  Antisense strand to SEQ ID NO: 1296418
aaugcugccuuauucaaac

SEQ ID NO: 1296420 - RNA, 19 nt, Artificial Sequence
  Description of Artificial Sequence: Synthetic oligonucleotide
  Sense strand starting at position 636 of SEQ ID NO: 1241745
gaagauacuugggaucaga

SEQ ID NO: 1296421 - RNA, 19 nt, Artificial Sequence
  Description of Artificial Sequence: Synthetic oligonucleotide
  Antisense strand to SEQ ID NO: 1296420
ucugaucccaaguaucuuc

SEQ ID NO: 1296422 - RNA, 19 nt, Artificial Sequence
  Description of Artificial Sequence: Synthetic oligonucleotide
  Sense strand starting at position 755 of SEQ ID NO: 1241745
aaugguugagacgaguaua

SEQ ID NO: 1296423 - RNA, 19 nt, Artificial Sequence
  Description of Artificial Sequence: Synthetic oligonucleotide
  Antisense strand to SEQ ID NO: 1296422
uauacucgucucaaccauu

SEQ ID NO: 1296424 - RNA, 19 nt, Artificial Sequence
  Description of Artificial Sequence: Synthetic oligonucleotide
  Sense strand starting at position 758 of SEQ ID NO: 1241745
gguugagacgaguauagug

SEQ ID NO: 1296425 - RNA, 19 nt, Artificial Sequence
  Description of Artificial Sequence: Synthetic oligonucleotide
  Antisense strand to SEQ ID NO: 1296424
cacuauacucgucucaacc

SEQ ID NO: 1296426 - RNA, 19 nt, Artificial Sequence
  Description of Artificial Sequence: Synthetic oligonucleotide
  Sense strand starting at position 765 of SEQ ID NO: 1241745
acgaguauaguguguacca

SEQ ID NO: 1296427 - RNA, 19 nt, Artificial Sequence
  Description of Artificial Sequence: Synthetic oligonucleotide
  Antisense strand to SEQ ID NO: 1296426
ugguacacacuauacucgu

SEQ ID NO: 1296428 - RNA, 19 nt, Artificial Sequence
  Description of Artificial Sequence: Synthetic oligonucleotide
  Sense strand starting at position 772 of SEQ ID NO: 1241745
uaguguguaccauggacua

SEQ ID NO: 1296429 - RNA, 19 nt, Artificial Sequence
  Description of Artificial Sequence: Synthetic oligonucleotide
  Antisense strand to SEQ ID NO: 1296428
uaguccaugguacacacua

SEQ ID NO: 1296430 - RNA, 19 nt, Artificial Sequence
  Description of Artificial Sequence: Synthetic oligonucleotide
  Sense strand starting at position 774 of SEQ ID NO: 1241745
guguguaccauggacuaua

SEQ ID NO: 1296431 - RNA, 19 nt, Artificial Sequence
  Description of Artificial Sequence: Synthetic oligonucleotide
  Antisense strand to SEQ ID NO: 1296430
uauaguccaugguacacac

SEQ ID NO: 1296432 - RNA, 19 nt, Artificial Sequence
  Description of Artificial Sequence: Synthetic oligonucleotide
  Sense strand starting at position 923 of SEQ ID NO: 1241745
acaguagugccucaaccau

SEQ ID NO: 1296433 - RNA, 19 nt, Artificial Sequence
  Description of Artificial Sequence: Synthetic oligonucleotide
  Antisense strand to SEQ ID NO: 1296432
augguugaggcacuacugu

SEQ ID NO: 1296434 - RNA, 19 nt, Artificial Sequence
  Description of Artificial Sequence: Synthetic oligonucleotide
  Sense strand starting at position 1065 of SEQ ID NO: 1241745
ucgugugugguguucagga

SEQ ID NO: 1296435 - RNA, 19 nt, Artificial Sequence
  Description of Artificial Sequence: Synthetic oligonucleotide
  Antisense strand to SEQ ID NO: 1296434
uccugaacaccacacacga

SEQ ID NO: 1296436 - RNA, 19 nt, Artificial Sequence
  Description of Artificial Sequence: Synthetic oligonucleotide
  Sense strand starting at position 1099 of SEQ ID NO: 1241745
gugugauggauggacucuu

SEQ ID NO: 1296437 - RNA, 19 nt, Artificial Sequence
  Description of Artificial Sequence: Synthetic oligonucleotide
  Antisense strand to SEQ ID NO: 1296436
aagaguccauccaucacac

SEQ ID NO: 1296438 - RNA, 19 nt, Artificial Sequence
  Description of Artificial Sequence: Synthetic oligonucleotide
  Sense strand starting at position 1120 of SEQ ID NO: 1241745
gucuuuggacacugaaaua

SEQ ID NO: 1296439 - RNA, 19 nt, Artificial Sequence
  Description of Artificial Sequence: Synthetic oligonucleotide
  Antisense strand to SEQ ID NO: 1296438
uauuucaguguccaaagac

SEQ ID NO: 1296440 - RNA, 19 nt, Artificial Sequence
  Description of Artificial Sequence: Synthetic oligonucleotide
  Sense strand starting at position 1149 of SEQ ID NO: 1241745
aggaacucgcguuaguaga

SEQ ID NO: 1296441 - RNA, 19 nt, Artificial Sequence
  Description of Artificial Sequence: Synthetic oligonucleotide
  Antisense strand to SEQ ID NO: 1296440
ucuacuaacgcgaguuccu

SEQ ID NO: 1296442 - RNA, 19 nt, Artificial Sequence
  Description of Artificial Sequence: Synthetic oligonucleotide
  Sense strand starting at position 1150 of SEQ ID NO: 1241745
ggaacucgcguuaguagaa

SEQ ID NO: 1296443 - RNA, 19 nt, Artificial Sequence
  Description of Artificial Sequence: Synthetic oligonucleotide
  Antisense strand to SEQ ID NO: 1296442
uucuacuaacgcgaguucc

SEQ ID NO: 1296444 - RNA, 19 nt, Artificial Sequence
  Description of Artificial Sequence: Synthetic oligonucleotide
  Sense strand starting at position 1151 of SEQ ID NO: 1241745
gaacucgcguuaguagaaa

SEQ ID NO: 1296445 - RNA, 19 nt, Artificial Sequence
  Description of Artificial Sequence: Synthetic oligonucleotide
  Antisense strand to SEQ ID NO: 1296444
uuucuacuaacgcgaguuc

SEQ ID NO: 1296446 - RNA, 19 nt, Artificial Sequence
  Description of Artificial Sequence: Synthetic oligonucleotide
  Sense strand starting at position 1524 of SEQ ID NO: 1241745
gucggcagucuagauguga

SEQ ID NO: 1296447 - RNA, 19 nt, Artificial Sequence
  Description of Artificial Sequence: Synthetic oligonucleotide
  Antisense strand to SEQ ID NO: 1296446
ucacaucuagacugccgac

SEQ ID NO: 1296448 - RNA, 19 nt, Artificial Sequence
  Description of Artificial Sequence: Synthetic oligonucleotide
  Sense strand starting at position 1528 of SEQ ID NO: 1241745
gcagucuagaugugauuag

SEQ ID NO: 1296449 - RNA, 19 nt, Artificial Sequence
  Description of Artificial Sequence: Synthetic oligonucleotide
  Antisense strand to SEQ ID NO: 1296448
cuaaucacaucuagacugc

SEQ ID NO: 1296450 - RNA, 19 nt, Artificial Sequence
  Description of Artificial Sequence: Synthetic oligonucleotide
  Sense strand starting at position 1532 of SEQ ID NO: 1241745
ucuagaugugauuagcaga

SEQ ID NO: 1296451 - RNA, 19 nt, Artificial Sequence
  Description of Artificial Sequence: Synthetic oligonucleotide
  Antisense strand to SEQ ID NO: 1296450
ucugcuaaucacaucuaga

SEQ ID NO: 1296452 - RNA, 19 nt, Artificial Sequence
  Description of Artificial Sequence: Synthetic oligonucleotide
  Sense strand starting at position 2034 of SEQ ID NO: 1241745
ccgcgaguggcuccggaaa

SEQ ID NO: 1296453 - RNA, 19 nt, Artificial Sequence
  Description of Artificial Sequence: Synthetic oligonucleotide
  Antisense strand to SEQ ID NO: 1296452
uuuccggagccacucgcgg

SEQ ID NO: 1296454 - RNA, 19 nt, Artificial Sequence
  Description of Artificial Sequence: Synthetic oligonucleotide
  Sense strand starting at position 2209 of SEQ ID NO: 1241745
cgugcuugugacagacgau

SEQ ID NO: 1296455 - RNA, 19 nt, Artificial Sequence
  Description of Artificial Sequence: Synthetic oligonucleotide
  Antisense strand to SEQ ID NO: 1296454
aucgucugucacaagcacg

SEQ ID NO: 1296456 - RNA, 19 nt, Artificial Sequence
  Description of Artificial Sequence: Synthetic oligonucleotide
  Sense strand starting at position 2210 of SEQ ID NO: 1241745
gugcuugugacagacgauu

SEQ ID NO: 1296457 - RNA, 19 nt, Artificial Sequence
  Description of Artificial Sequence: Synthetic oligonucleotide
  Antisense strand to SEQ ID NO: 1296456
aaucgucugucacaagcac

SEQ ID NO: 1296458 - RNA, 19 nt, Artificial Sequence
  Description of Artificial Sequence: Synthetic oligonucleotide
  Sense strand starting at position 2232 of SEQ ID NO: 1241745
aaagucagggcuugaaaga

SEQ ID NO: 1296459 - RNA, 19 nt, Artificial Sequence
  Description of Artificial Sequence: Synthetic oligonucleotide
  Antisense strand to SEQ ID NO: 1296458
ucuuucaagcccugacuuu

SEQ ID NO: 1296460 - RNA, 19 nt, Artificial Sequence
  Description of Artificial Sequence: Synthetic oligonucleotide
  Sense strand starting at position 272 of SEQ ID NO: 1241746
ccgcggaguuccgggaaua

SEQ ID NO: 1296461 - RNA, 19 nt, Artificial Sequence
  Description of Artificial Sequence: Synthetic oligonucleotide
  Antisense strand to SEQ ID NO: 1296460
uauucccggaacuccgcgg

SEQ ID NO: 1296462 - RNA, 19 nt, Artificial Sequence
  Description of Artificial Sequence: Synthetic oligonucleotide
  Sense strand starting at position 273 of SEQ ID NO: 1241746
cgcggaguuccgggaauac

SEQ ID NO: 1296463 - RNA, 19 nt, Artificial Sequence
  Description of Artificial Sequence: Synthetic oligonucleotide
  Antisense strand to SEQ ID NO: 1296462
guauucccggaacuccgcg

SEQ ID NO: 1296464 - RNA, 19 nt, Artificial Sequence
  Description of Artificial Sequence: Synthetic oligonucleotide
  Sense strand starting at position 888 of SEQ ID NO: 1241746
guuuacugccgugucuaga

SEQ ID NO: 1296465 - RNA, 19 nt, Artificial Sequence
  Description of Artificial Sequence: Synthetic oligonucleotide
  Antisense strand to SEQ ID NO: 1296464
ucuagacacggcaguaaac

SEQ ID NO: 1296466 - RNA, 19 nt, Artificial Sequence
  Description of Artificial Sequence: Synthetic oligonucleotide
  Sense strand starting at position 1391 of SEQ ID NO: 1241746
gcucgauccucagucacuu

SEQ ID NO: 1296467 - RNA, 19 nt, Artificial Sequence
  Description of Artificial Sequence: Synthetic oligonucleotide
  Antisense strand to SEQ ID NO: 1296466
aagugacugaggaucgagc

SEQ ID NO: 1296468 - RNA, 19 nt, Artificial Sequence
  Description of Artificial Sequence: Synthetic oligonucleotide
  Sense strand starting at position 2495 of SEQ ID NO: 1241746
gguuucuucucagggcaga

SEQ ID NO: 1296469 - RNA, 19 nt, Artificial Sequence
  Description of Artificial Sequence: Synthetic oligonucleotide
  Antisense strand to SEQ ID NO: 1296468
ucugcccugagaagaaacc

SEQ ID NO: 1296470 - RNA, 19 nt, Artificial Sequence
  Description of Artificial Sequence: Synthetic oligonucleotide
  Sense strand starting at position 2643 of SEQ ID NO: 1241746
ccgugugagccagagaaga

SEQ ID NO: 1296471 - RNA, 19 nt, Artificial Sequence
  Description of Artificial Sequence: Synthetic oligonucleotide
  Antisense strand to SEQ ID NO: 1296470
ucuucucuggcucacacgg

SEQ ID NO: 1296472 - RNA, 19 nt, Artificial Sequence
  Description of Artificial Sequence: Synthetic oligonucleotide
  Sense strand starting at position 2697 of SEQ ID NO: 1241746
ccagaacugcugugacuuc

SEQ ID NO: 1296473 - RNA, 19 nt, Artificial Sequence
  Description of Artificial Sequence: Synthetic oligonucleotide
  Antisense strand to SEQ ID NO: 1296472
gaagucacagcaguucugg

SEQ ID NO: 1296474 - RNA, 19 nt, Artificial Sequence
  Description of Artificial Sequence: Synthetic oligonucleotide
  Sense strand starting at position 2704 of SEQ ID NO: 1241746
ugcugugacuucccucuga

SEQ ID NO: 1296475 - RNA, 19 nt, Artificial Sequence
  Description of Artificial Sequence: Synthetic oligonucleotide
  Antisense strand to SEQ ID NO: 1296474
ucagagggaagucacagca

SEQ ID NO: 1296476 - RNA, 19 nt, Artificial Sequence
  Description of Artificial Sequence: Synthetic oligonucleotide
  Sense strand starting at position 2708 of SEQ ID NO: 1241746
gugacuucccucugacaua

SEQ ID NO: 1296477 - RNA, 19 nt, Artificial Sequence
  Description of Artificial Sequence: Synthetic oligonucleotide
  Antisense strand to SEQ ID NO: 1296476
uaugucagagggaagucac

SEQ ID NO: 1296478 - RNA, 19 nt, Artificial Sequence
  Description of Artificial Sequence: Synthetic oligonucleotide
  Sense strand starting at position 2815 of SEQ ID NO: 1241746
uccagauucucuucccgua

SEQ ID NO: 1296479 - RNA, 19 nt, Artificial Sequence
  Description of Artificial Sequence: Synthetic oligonucleotide
  Antisense strand to SEQ ID NO: 1296478
uacgggaagagaaucugga

SEQ ID NO: 1296480 - RNA, 19 nt, Artificial Sequence
  Description of Artificial Sequence: Synthetic oligonucleotide
  Sense strand starting at position 2886 of SEQ ID NO: 1241746
ccagaaguucucuaguccu

SEQ ID NO: 1296481 - RNA, 19 nt, Artificial Sequence
  Description of Artificial Sequence: Synthetic oligonucleotide
  Antisense strand to SEQ ID NO: 1296480
aggacuagagaacuucugg

SEQ ID NO: 1296482 - RNA, 19 nt, Artificial Sequence
  Description of Artificial Sequence: Synthetic oligonucleotide
  Sense strand starting at position 2892 of SEQ ID NO: 1241746
guucucuaguccuggcaca

SEQ ID NO: 1296483 - RNA, 19 nt, Artificial Sequence
  Description of Artificial Sequence: Synthetic oligonucleotide
  Antisense strand to SEQ ID NO: 1296482
ugugccaggacuagagaac

SEQ ID NO: 1296484 - RNA, 19 nt, Artificial Sequence
  Description of Artificial Sequence: Synthetic oligonucleotide
  Sense strand starting at position 2893 of SEQ ID NO: 1241746
uucucuaguccuggcacaa

SEQ ID NO: 1296485 - RNA, 19 nt, Artificial Sequence
  Description of Artificial Sequence: Synthetic oligonucleotide
  Antisense strand to SEQ ID NO: 1296484
uugugccaggacuagagaa

SEQ ID NO: 1296486 - RNA, 19 nt, Artificial Sequence
  Description of Artificial Sequence: Synthetic oligonucleotide
  Sense strand starting at position 3148 of SEQ ID NO: 1241746
cccugucgcuggagagaug

SEQ ID NO: 1296487 - RNA, 19 nt, Artificial Sequence
  Description of Artificial Sequence: Synthetic oligonucleotide
  Antisense strand to SEQ ID NO: 1296486
caucucuccagcgacaggg

SEQ ID NO: 1296488 - RNA, 19 nt, Artificial Sequence
  Description of Artificial Sequence: Synthetic oligonucleotide
  Sense strand starting at position 3526 of SEQ ID NO: 1241746
agccauacaugauguacaa

SEQ ID NO: 1296489 - RNA, 19 nt, Artificial Sequence
  Description of Artificial Sequence: Synthetic oligonucleotide
  Antisense strand to SEQ ID NO: 1296488
uuguacaucauguauggcu

SEQ ID NO: 1296490 - RNA, 19 nt, Artificial Sequence
  Description of Artificial Sequence: Synthetic oligonucleotide
  Sense strand starting at position 3715 of SEQ ID NO: 1241746
uugaacuuguggccugaaa

SEQ ID NO: 1296491 - RNA, 19 nt, Artificial Sequence
  Description of Artificial Sequence: Synthetic oligonucleotide
  Antisense strand to SEQ ID NO: 1296490
uuucaggccacaaguucaa

SEQ ID NO: 1296492 - RNA, 19 nt, Artificial Sequence
  Description of Artificial Sequence: Synthetic oligonucleotide
  Sense strand starting at position 3717 of SEQ ID NO: 1241746
gaacuuguggccugaaacc

SEQ ID NO: 1296493 - RNA, 19 nt, Artificial Sequence
  Description of Artificial Sequence: Synthetic oligonucleotide
  Antisense strand to SEQ ID NO: 1296492
gguuucaggccacaaguuc

SEQ ID NO: 1296494 - RNA, 19 nt, Artificial Sequence
  Description of Artificial Sequence: Synthetic oligonucleotide
  Sense strand starting at position 3730 of SEQ ID NO: 1241746
gaaaccaacuagguugauu

SEQ ID NO: 1296495 - RNA, 19 nt, Artificial Sequence
  Description of Artificial Sequence: Synthetic oligonucleotide
  Antisense strand to SEQ ID NO: 1296494
aaucaaccuaguugguuuc

SEQ ID NO: 1296496 - RNA, 19 nt, Artificial Sequence
  Description of Artificial Sequence: Synthetic oligonucleotide
  Sense strand starting at position 3738 of SEQ ID NO: 1241746
cuagguugauugcaugaua

SEQ ID NO: 1296497 - RNA, 19 nt, Artificial Sequence
  Description of Artificial Sequence: Synthetic oligonucleotide
  Antisense strand to SEQ ID NO: 1296496
uaucaugcaaucaaccuag

SEQ ID NO: 1296498 - RNA, 19 nt, Artificial Sequence
  Description of Artificial Sequence: Synthetic oligonucleotide
  Sense strand starting at position 3782 of SEQ ID NO: 1241746
ggauuuaaauaagaccagu

SEQ ID NO: 1296499 - RNA, 19 nt, Artificial Sequence
  Description of Artificial Sequence: Synthetic oligonucleotide
  Antisense strand to SEQ ID NO: 1296498
acuggucuuauuuaaaucc

SEQ ID NO: 1296500 - RNA, 19 nt, Artificial Sequence
  Description of Artificial Sequence: Synthetic oligonucleotide
  Sense strand starting at position 3813 of SEQ ID NO: 1241746
ugucuaaaugugcaggaga

SEQ ID NO: 1296501 - RNA, 19 nt, Artificial Sequence
  Description of Artificial Sequence: Synthetic oligonucleotide
  Antisense strand to SEQ ID NO: 1296500
ucuccugcacauuuagaca

SEQ ID NO: 1296502 - RNA, 19 nt, Artificial Sequence
  Description of Artificial Sequence: Synthetic oligonucleotide
  Sense strand starting at position 3815 of SEQ ID NO: 1241746
ucuaaaugugcaggagaca

SEQ ID NO: 1296503 - RNA, 19 nt, Artificial Sequence
  Description of Artificial Sequence: Synthetic oligonucleotide
  Antisense strand to SEQ ID NO: 1296502
ugucuccugcacauuuaga

SEQ ID NO: 1296504 - RNA, 19 nt, Artificial Sequence
  Description of Artificial Sequence: Synthetic oligonucleotide
  Sense strand starting at position 3840 of SEQ ID NO: 1241746
aauuacucugcaugugaag

SEQ ID NO: 1296505 - RNA, 19 nt, Artificial Sequence
  Description of Artificial Sequence: Synthetic oligonucleotide
  Antisense strand to SEQ ID NO: 1296504
cuucacaugcagaguaauu

SEQ ID NO: 1296506 - RNA, 19 nt, Artificial Sequence
  Description of Artificial Sequence: Synthetic oligonucleotide
  Sense strand starting at position 3843 of SEQ ID NO: 1241746
uacucugcaugugaagaau

SEQ ID NO: 1296507 - RNA, 19 nt, Artificial Sequence
  Description of Artificial Sequence: Synthetic oligonucleotide
  Antisense strand to SEQ ID NO: 1296506
auucuucacaugcagagua

SEQ ID NO: 1296508 - RNA, 19 nt, Artificial Sequence
  Description of Artificial Sequence: Synthetic oligonucleotide
  Sense strand starting at position 3852 of SEQ ID NO: 1241746
ugugaagaaucaggaaauc

SEQ ID NO: 1296509 - RNA, 19 nt, Artificial Sequence
  Description of Artificial Sequence: Synthetic oligonucleotide
  Antisense strand to SEQ ID NO: 1296508
gauuuccugauucuucaca

SEQ ID NO: 1296510 - RNA, 19 nt, Artificial Sequence
  Description of Artificial Sequence: Synthetic oligonucleotide
  Sense strand starting at position 169 of SEQ ID NO: 1241747
guaauuaagcucuggaucu

SEQ ID NO: 1296511 - RNA, 19 nt, Artificial Sequence
  Description of Artificial Sequence: Synthetic oligonucleotide
  Antisense strand to SEQ ID NO: 1296510
agauccagagcuuaauuac

SEQ ID NO: 1296512 - RNA, 19 nt, Artificial Sequence
  Description of Artificial Sequence: Synthetic oligonucleotide
  Sense strand starting at position 188 of SEQ ID NO: 1241747
caggauaucucccugaguu

SEQ ID NO: 1296513 - RNA, 19 nt, Artificial Sequence
  Description of Artificial Sequence: Synthetic oligonucleotide
  Antisense strand to SEQ ID NO: 1296512
aacucagggagauauccug

SEQ ID NO: 1296514 - RNA, 19 nt, Artificial Sequence
  Description of Artificial Sequence: Synthetic oligonucleotide
  Sense strand starting at position 189 of SEQ ID NO: 1241747
aggauaucucccugaguuu

SEQ ID NO: 1296515 - RNA, 19 nt, Artificial Sequence
  Description of Artificial Sequence: Synthetic oligonucleotide
  Antisense strand to SEQ ID NO: 1296514
aaacucagggagauauccu

SEQ ID NO: 1296516 - RNA, 19 nt, Artificial Sequence
  Description of Artificial Sequence: Synthetic oligonucleotide
  Sense strand starting at position 190 of SEQ ID NO: 1241747
ggauaucucccugaguuua

SEQ ID NO: 1296517 - RNA, 19 nt, Artificial Sequence
  Description of Artificial Sequence: Synthetic oligonucleotide
  Antisense strand to SEQ ID NO: 1296516
uaaacucagggagauaucc

SEQ ID NO: 1296518 - RNA, 19 nt, Artificial Sequence
  Description of Artificial Sequence: Synthetic oligonucleotide
  Sense strand starting at position 192 of SEQ ID NO: 1241747
auaucucccugaguuuaga

SEQ ID NO: 1296519 - RNA, 19 nt, Artificial Sequence
  Description of Artificial Sequence: Synthetic oligonucleotide
  Antisense strand to SEQ ID NO: 1296518
ucuaaacucagggagauau

SEQ ID NO: 1296520 - RNA, 19 nt, Artificial Sequence
  Description of Artificial Sequence: Synthetic oligonucleotide
  Sense strand starting at position 385 of SEQ ID NO: 1241747
ucauuccuccuccagaguu

SEQ ID NO: 1296521 - RNA, 19 nt, Artificial Sequence
  Description of Artificial Sequence: Synthetic oligonucleotide
  Antisense strand to SEQ ID NO: 1296520
aacucuggaggaggaauga

SEQ ID NO: 1296522 - RNA, 19 nt, Artificial Sequence
  Description of Artificial Sequence: Synthetic oligonucleotide
  Sense strand starting at position 632 of SEQ ID NO: 1241747
ggaggagccuggguuucau

SEQ ID NO: 1296523 - RNA, 19 nt, Artificial Sequence
  Description of Artificial Sequence: Synthetic oligonucleotide
  Antisense strand to SEQ ID NO: 1296522
augaaacccaggcuccucc

SEQ ID NO: 1296524 - RNA, 19 nt, Artificial Sequence
  Description of Artificial Sequence: Synthetic oligonucleotide
  Sense strand starting at position 651 of SEQ ID NO: 1241747
gagugcucucccggaaccu

SEQ ID NO: 1296525 - RNA, 19 nt, Artificial Sequence
  Description of Artificial Sequence: Synthetic oligonucleotide
  Antisense strand to SEQ ID NO: 1296524
agguuccgggagagcacuc

SEQ ID NO: 1296526 - RNA, 19 nt, Artificial Sequence
  Description of Artificial Sequence: Synthetic oligonucleotide
  Sense strand starting at position 1378 of SEQ ID NO: 1241747
gggugaugacagugcaaca

SEQ ID NO: 1296527 - RNA, 19 nt, Artificial Sequence
  Description of Artificial Sequence: Synthetic oligonucleotide
  Antisense strand to SEQ ID NO: 1296526
uguugcacugucaucaccc

SEQ ID NO: 1296528 - RNA, 19 nt, Artificial Sequence
  Description of Artificial Sequence: Synthetic oligonucleotide
  Sense strand starting at position 1963 of SEQ ID NO: 1241747
ggaaauuguugagcgccau

SEQ ID NO: 1296529 - RNA, 19 nt, Artificial Sequence
  Description of Artificial Sequence: Synthetic oligonucleotide
  Antisense strand to SEQ ID NO: 1296528
auggcgcucaacaauuucc

SEQ ID NO: 1296530 - RNA, 19 nt, Artificial Sequence
  Description of Artificial Sequence: Synthetic oligonucleotide
  Sense strand starting at position 2206 of SEQ ID NO: 1241747
gcgggagaugcgggaauuu

SEQ ID NO: 1296531 - RNA, 19 nt, Artificial Sequence
  Description of Artificial Sequence: Synthetic oligonucleotide
  Antisense strand to SEQ ID NO: 1296530
aaauucccgcaucucccgc

SEQ ID NO: 1296532 - RNA, 19 nt, Artificial Sequence
  Description of Artificial Sequence: Synthetic oligonucleotide
  Sense strand starting at position 2392 of SEQ ID NO: 1241747
gugcucauagugaggugua

SEQ ID NO: 1296533 - RNA, 19 nt, Artificial Sequence
  Description of Artificial Sequence: Synthetic oligonucleotide
  Antisense strand to SEQ ID NO: 1296532
uacaccucacuaugagcac

SEQ ID NO: 1296534 - RNA, 19 nt, Artificial Sequence
  Description of Artificial Sequence: Synthetic oligonucleotide
  Sense strand starting at position 2395 of SEQ ID NO: 1241747
cucauagugagguguagga

SEQ ID NO: 1296535 - RNA, 19 nt, Artificial Sequence
  Description of Artificial Sequence: Synthetic oligonucleotide
  Antisense strand to SEQ ID NO: 1296534
uccuacaccucacuaugag

SEQ ID NO: 1296536 - RNA, 19 nt, Artificial Sequence
  Description of Artificial Sequence: Synthetic oligonucleotide
  Sense strand starting at position 2457 of SEQ ID NO: 1241747
cccgaaaugcaauguauga

SEQ ID NO: 1296537 - RNA, 19 nt, Artificial Sequence
  Description of Artificial Sequence: Synthetic oligonucleotide
  Antisense strand to SEQ ID NO: 1296536
ucauacauugcauuucggg

SEQ ID NO: 1296538 - RNA, 19 nt, Artificial Sequence
  Description of Artificial Sequence: Synthetic oligonucleotide
  Sense strand starting at position 2523 of SEQ ID NO: 1241747
agaggucauccucgaagag

SEQ ID NO: 1296539 - RNA, 19 nt, Artificial Sequence
  Description of Artificial Sequence: Synthetic oligonucleotide
  Antisense strand to SEQ ID NO: 1296538
cucuucgaggaugaccucu

SEQ ID NO: 1296540 - RNA, 19 nt, Artificial Sequence
  Description of Artificial Sequence: Synthetic oligonucleotide
  Sense strand starting at position 2620 of SEQ ID NO: 1241747
guguuacacugccugacau

SEQ ID NO: 1296541 - RNA, 19 nt, Artificial Sequence
  Description of Artificial Sequence: Synthetic oligonucleotide
  Antisense strand to SEQ ID NO: 1296540
augucaggcaguguaacac

SEQ ID NO: 1296542 - RNA, 19 nt, Artificial Sequence
  Description of Artificial Sequence: Synthetic oligonucleotide
  Sense strand starting at position 2655 of SEQ ID NO: 1241747
cugcauuuguaagauaaau

SEQ ID NO: 1296543 - RNA, 19 nt, Artificial Sequence
  Description of Artificial Sequence: Synthetic oligonucleotide
  Antisense strand to SEQ ID NO: 1296542
auuuaucuuacaaaugcag

SEQ ID NO: 1296544 - RNA, 19 nt, Artificial Sequence
  Description of Artificial Sequence: Synthetic oligonucleotide
  Sense strand starting at position 2714 of SEQ ID NO: 1241747
gauggaaaucgcugaggca

SEQ ID NO: 1296545 - RNA, 19 nt, Artificial Sequence
  Description of Artificial Sequence: Synthetic oligonucleotide
  Antisense strand to SEQ ID NO: 1296544
ugccucagcgauuuccauc

SEQ ID NO: 1296546 - RNA, 19 nt, Artificial Sequence
  Description of Artificial Sequence: Synthetic oligonucleotide
  Sense strand starting at position 2715 of SEQ ID NO: 1241747
auggaaaucgcugaggcau

SEQ ID NO: 1296547 - RNA, 19 nt, Artificial Sequence
  Description of Artificial Sequence: Synthetic oligonucleotide
  Antisense strand to SEQ ID NO: 1296546
augccucagcgauuuccau

SEQ ID NO: 1296548 - RNA, 19 nt, Artificial Sequence
  Description of Artificial Sequence: Synthetic oligonucleotide
  Sense strand starting at position 2757 of SEQ ID NO: 1241747
ucuaguugccuuuaagacu

SEQ ID NO: 1296549 - RNA, 19 nt, Artificial Sequence
  Description of Artificial Sequence: Synthetic oligonucleotide
  Antisense strand to SEQ ID NO: 1296548
agucuuaaaggcaacuaga

SEQ ID NO: 1296550 - RNA, 19 nt, Artificial Sequence
  Description of Artificial Sequence: Synthetic oligonucleotide
  Sense strand starting at position 2763 of SEQ ID NO: 1241747
ugccuuuaagacuaaguca

SEQ ID NO: 1296551 - RNA, 19 nt, Artificial Sequence
  Description of Artificial Sequence: Synthetic oligonucleotide
  Antisense strand to SEQ ID NO: 1296550
ugacuuagucuuaaaggca

SEQ ID NO: 1296552 - RNA, 19 nt, Artificial Sequence
  Description of Artificial Sequence: Synthetic oligonucleotide
  Sense strand starting at position 2777 of SEQ ID NO: 1241747
agucaccuuuaguccaauu

SEQ ID NO: 1296553 - RNA, 19 nt, Artificial Sequence
  Description of Artificial Sequence: Synthetic oligonucleotide
  Antisense strand to SEQ ID NO: 1296552
aauuggacuaaaggugacu

SEQ ID NO: 1296554 - RNA, 19 nt, Artificial Sequence
  Description of Artificial Sequence: Synthetic oligonucleotide
  Sense strand starting at position 2788 of SEQ ID NO: 1241747
guccaauucccagagugag

SEQ ID NO: 1296555 - RNA, 19 nt, Artificial Sequence
  Description of Artificial Sequence: Synthetic oligonucleotide
  Antisense strand to SEQ ID NO: 1296554
cucacucugggaauuggac

SEQ ID NO: 1296556 - RNA, 19 nt, Artificial Sequence
  Description of Artificial Sequence: Synthetic oligonucleotide
  Sense strand starting at position 2818 of SEQ ID NO: 1241747
auugcuccuccugguuuaa

SEQ ID NO: 1296557 - RNA, 19 nt, Artificial Sequence
  Description of Artificial Sequence: Synthetic oligonucleotide
  Antisense strand to SEQ ID NO: 1296556
uuaaaccaggaggagcaau

SEQ ID NO: 1296558 - RNA, 19 nt, Artificial Sequence
  Description of Artificial Sequence: Synthetic oligonucleotide
  Sense strand starting at position 2913 of SEQ ID NO: 1241747
uaagucaaguaauagagau

SEQ ID NO: 1296559 - RNA, 19 nt, Artificial Sequence
  Description of Artificial Sequence: Synthetic oligonucleotide
  Antisense strand to SEQ ID NO: 1296558
aucucuauuacuugacuua

SEQ ID NO: 1296560 - RNA, 19 nt, Artificial Sequence
  Description of Artificial Sequence: Synthetic oligonucleotide
  Sense strand starting at position 3134 of SEQ ID NO: 1241747
aggagauuauucccugccu

SEQ ID NO: 1296561 - RNA, 19 nt, Artificial Sequence
  Description of Artificial Sequence: Synthetic oligonucleotide
  Antisense strand to SEQ ID NO: 1296560
aggcagggaauaaucuccu

SEQ ID NO: 1296562 - RNA, 19 nt, Artificial Sequence
  Description of Artificial Sequence: Synthetic oligonucleotide
  Sense strand starting at position 3135 of SEQ ID NO: 1241747
ggagauuauucccugccua

SEQ ID NO: 1296563 - RNA, 19 nt, Artificial Sequence
  Description of Artificial Sequence: Synthetic oligonucleotide
  Antisense strand to SEQ ID NO: 1296562
uaggcagggaauaaucucc

SEQ ID NO: 1296564 - RNA, 19 nt, Artificial Sequence
  Description of Artificial Sequence: Synthetic oligonucleotide
  Sense strand starting at position 3281 of SEQ ID NO: 1241747
cugucaugugaacauucuu

SEQ ID NO: 1296565 - RNA, 19 nt, Artificial Sequence
  Description of Artificial Sequence: Synthetic oligonucleotide
  Antisense strand to SEQ ID NO: 1296564
aagaauguucacaugacag

SEQ ID NO: 1296566 - RNA, 19 nt, Artificial Sequence
  Description of Artificial Sequence: Synthetic oligonucleotide
  Sense strand starting at position 3306 of SEQ ID NO: 1241747
auauguuugcguucuugca

SEQ ID NO: 1296567 - RNA, 19 nt, Artificial Sequence
  Description of Artificial Sequence: Synthetic oligonucleotide
  Antisense strand to SEQ ID NO: 1296566
ugcaagaacgcaaacauau

SEQ ID NO: 1296568 - RNA, 19 nt, Artificial Sequence
  Description of Artificial Sequence: Synthetic oligonucleotide
  Sense strand starting at position 3340 of SEQ ID NO: 1241747
gagaaauucuuagaagagg

SEQ ID NO: 1296569 - RNA, 19 nt, Artificial Sequence
  Description of Artificial Sequence: Synthetic oligonucleotide
  Antisense strand to SEQ ID NO: 1296568
ccucuucuaagaauuucuc

SEQ ID NO: 1296570 - RNA, 19 nt, Artificial Sequence
  Description of Artificial Sequence: Synthetic oligonucleotide
  Sense strand starting at position 3610 of SEQ ID NO: 1241747
gagggcgagacaugagaau

SEQ ID NO: 1296571 - RNA, 19 nt, Artificial Sequence
  Description of Artificial Sequence: Synthetic oligonucleotide
  Antisense strand to SEQ ID NO: 1296570
auucucaugucucgcccuc

SEQ ID NO: 1296572 - RNA, 19 nt, Artificial Sequence
  Description of Artificial Sequence: Synthetic oligonucleotide
  Sense strand starting at position 3764 of SEQ ID NO: 1241747
cccucacaucuggguugua

SEQ ID NO: 1296573 - RNA, 19 nt, Artificial Sequence
  Description of Artificial Sequence: Synthetic oligonucleotide
  Antisense strand to SEQ ID NO: 1296572
uacaacccagaugugaggg

SEQ ID NO: 1296574 - RNA, 19 nt, Artificial Sequence
  Description of Artificial Sequence: Synthetic oligonucleotide
  Sense strand starting at position 3808 of SEQ ID NO: 1241747
acagcaguuguaggcaaau

SEQ ID NO: 1296575 - RNA, 19 nt, Artificial Sequence
  Description of Artificial Sequence: Synthetic oligonucleotide
  Antisense strand to SEQ ID NO: 1296574
auuugccuacaacugcugu

SEQ ID NO: 1296576 - RNA, 19 nt, Artificial Sequence
  Description of Artificial Sequence: Synthetic oligonucleotide
  Sense strand starting at position 3840 of SEQ ID NO: 1241747
acagaaugcgcucauugcu

SEQ ID NO: 1296577 - RNA, 19 nt, Artificial Sequence
  Description of Artificial Sequence: Synthetic oligonucleotide
  Antisense strand to SEQ ID NO: 1296576
agcaaugagcgcauucugu

SEQ ID NO: 1296578 - RNA, 19 nt, Artificial Sequence
  Description of Artificial Sequence: Synthetic oligonucleotide
  Sense strand starting at position 3847 of SEQ ID NO: 1241747
gcgcucauugcugugugaa

SEQ ID NO: 1296579 - RNA, 19 nt, Artificial Sequence
  Description of Artificial Sequence: Synthetic oligonucleotide
  Antisense strand to SEQ ID NO: 1296578
uucacacagcaaugagcgc

SEQ ID NO: 1296580 - RNA, 19 nt, Artificial Sequence
  Description of Artificial Sequence: Synthetic oligonucleotide
  Sense strand starting at position 3850 of SEQ ID NO: 1241747
cucauugcugugugaacuu

SEQ ID NO: 1296581 - RNA, 19 nt, Artificial Sequence
  Description of Artificial Sequence: Synthetic oligonucleotide
  Antisense strand to SEQ ID NO: 1296580
aaguucacacagcaaugag

SEQ ID NO: 1296582 - RNA, 19 nt, Artificial Sequence
  Description of Artificial Sequence: Synthetic oligonucleotide
  Sense strand starting at position 3869 of SEQ ID NO: 1241747
ggacuugcuuuggcaucau

SEQ ID NO: 1296583 - RNA, 19 nt, Artificial Sequence
  Description of Artificial Sequence: Synthetic oligonucleotide
  Antisense strand to SEQ ID NO: 1296582
augaugccaaagcaagucc

SEQ ID NO: 1296584 - RNA, 19 nt, Artificial Sequence
  Description of Artificial Sequence: Synthetic oligonucleotide
  Sense strand starting at position 3881 of SEQ ID NO: 1241747
gcaucaugaggcugagcau

SEQ ID NO: 1296585 - RNA, 19 nt, Artificial Sequence
  Description of Artificial Sequence: Synthetic oligonucleotide
  Antisense strand to SEQ ID NO: 1296584
augcucagccucaugaugc

SEQ ID NO: 1296586 - RNA, 19 nt, Artificial Sequence
  Description of Artificial Sequence: Synthetic oligonucleotide
  Sense strand starting at position 3882 of SEQ ID NO: 1241747
caucaugaggcugagcaua

SEQ ID NO: 1296587 - RNA, 19 nt, Artificial Sequence
  Description of Artificial Sequence: Synthetic oligonucleotide
  Antisense strand to SEQ ID NO: 1296586
uaugcucagccucaugaug

SEQ ID NO: 1296588 - RNA, 19 nt, Artificial Sequence
  Description of Artificial Sequence: Synthetic oligonucleotide
  Sense strand starting at position 3890 of SEQ ID NO: 1241747
ggcugagcauaucuucuua

SEQ ID NO: 1296589 - RNA, 19 nt, Artificial Sequence
  Description of Artificial Sequence: Synthetic oligonucleotide
  Antisense strand to SEQ ID NO: 1296588
uaagaagauaugcucagcc

SEQ ID NO: 1296590 - RNA, 19 nt, Artificial Sequence
  Description of Artificial Sequence: Synthetic oligonucleotide
  Sense strand starting at position 67 of SEQ ID NO: 1241748
ugacuuuagccacaaauug

SEQ ID NO: 1296591 - RNA, 19 nt, Artificial Sequence
  Description of Artificial Sequence: Synthetic oligonucleotide
  Antisense strand to SEQ ID NO: 1296590
caauuuguggcuaaaguca

SEQ ID NO: 1296592 - RNA, 19 nt, Artificial Sequence
  Description of Artificial Sequence: Synthetic oligonucleotide
  Sense strand starting at position 243 of SEQ ID NO: 1241748
gccuguaucugucuccaaa

SEQ ID NO: 1296593 - RNA, 19 nt, Artificial Sequence
  Description of Artificial Sequence: Synthetic oligonucleotide
  Antisense strand to SEQ ID NO: 1296592
uuuggagacagauacaggc

SEQ ID NO: 1296594 - RNA, 19 nt, Artificial Sequence
  Description of Artificial Sequence: Synthetic oligonucleotide
  Sense strand starting at position 245 of SEQ ID NO: 1241748
cuguaucugucuccaaaca

SEQ ID NO: 1296595 - RNA, 19 nt, Artificial Sequence
  Description of Artificial Sequence: Synthetic oligonucleotide
  Antisense strand to SEQ ID NO: 1296594
uguuuggagacagauacag

SEQ ID NO: 1296596 - RNA, 19 nt, Artificial Sequence
  Description of Artificial Sequence: Synthetic oligonucleotide
  Sense strand starting at position 280 of SEQ ID NO: 1241748
ggcuaagugucaucucagc

SEQ ID NO: 1296597 - RNA, 19 nt, Artificial Sequence
  Description of Artificial Sequence: Synthetic oligonucleotide
  Antisense strand to SEQ ID NO: 1296596
gcugagaugacacuuagcc

SEQ ID NO: 1296598 - RNA, 19 nt, Artificial Sequence
  Description of Artificial Sequence: Synthetic oligonucleotide
  Sense strand starting at position 306 of SEQ ID NO: 1241748
ugagcaaagugucucuaga

SEQ ID NO: 1296599 - RNA, 19 nt, Artificial Sequence
  Description of Artificial Sequence: Synthetic oligonucleotide
  Antisense strand to SEQ ID NO: 1296598
ucuagagacacuuugcuca

SEQ ID NO: 1296600 - RNA, 19 nt, Artificial Sequence
  Description of Artificial Sequence: Synthetic oligonucleotide
  Sense strand starting at position 322 of SEQ ID NO: 1241748
agagcaaaguguccugaca

SEQ ID NO: 1296601 - RNA, 19 nt, Artificial Sequence
  Description of Artificial Sequence: Synthetic oligonucleotide
  Antisense strand to SEQ ID NO: 1296600
ugucaggacacuuugcucu

SEQ ID NO: 1296602 - RNA, 19 nt, Artificial Sequence
  Description of Artificial Sequence: Synthetic oligonucleotide
  Sense strand starting at position 359 of SEQ ID NO: 1241748
cuacuuguauccuuguauc

SEQ ID NO: 1296603 - RNA, 19 nt, Artificial Sequence
  Description of Artificial Sequence: Synthetic oligonucleotide
  Antisense strand to SEQ ID NO: 1296602
gauacaaggauacaaguag

SEQ ID NO: 1296604 - RNA, 19 nt, Artificial Sequence
  Description of Artificial Sequence: Synthetic oligonucleotide
  Sense strand starting at position 402 of SEQ ID NO: 1241748
gggagaguccuccaccagu

SEQ ID NO: 1296605 - RNA, 19 nt, Artificial Sequence
  Description of Artificial Sequence: Synthetic oligonucleotide
  Antisense strand to SEQ ID NO: 1296604
acugguggaggacucuccc

SEQ ID NO: 1296606 - RNA, 19 nt, Artificial Sequence
  Description of Artificial Sequence: Synthetic oligonucleotide
  Sense strand starting at position 437 of SEQ ID NO: 1241748
ccuucugucucacagggaa

SEQ ID NO: 1296607 - RNA, 19 nt, Artificial Sequence
  Description of Artificial Sequence: Synthetic oligonucleotide
  Antisense strand to SEQ ID NO: 1296606
uucccugugagacagaagg

SEQ ID NO: 1296608 - RNA, 19 nt, Artificial Sequence
  Description of Artificial Sequence: Synthetic oligonucleotide
  Sense strand starting at position 458 of SEQ ID NO: 1241748
agauguaucugucuuccaa

SEQ ID NO: 1296609 - RNA, 19 nt, Artificial Sequence
  Description of Artificial Sequence: Synthetic oligonucleotide
  Antisense strand to SEQ ID NO: 1296608
uuggaagacagauacaucu

SEQ ID NO: 1296610 - RNA, 19 nt, Artificial Sequence
  Description of Artificial Sequence: Synthetic oligonucleotide
  Sense strand starting at position 460 of SEQ ID NO: 1241748
auguaucugucuuccaaac

SEQ ID NO: 1296611 - RNA, 19 nt, Artificial Sequence
  Description of Artificial Sequence: Synthetic oligonucleotide
  Antisense strand to SEQ ID NO: 1296610
guuuggaagacagauacau

SEQ ID NO: 1296612 - RNA, 19 nt, Artificial Sequence
  Description of Artificial Sequence: Synthetic oligonucleotide
  Sense strand starting at position 462 of SEQ ID NO: 1241748
guaucugucuuccaaacag

SEQ ID NO: 1296613 - RNA, 19 nt, Artificial Sequence
  Description of Artificial Sequence: Synthetic oligonucleotide
  Antisense strand to SEQ ID NO: 1296612
cuguuuggaagacagauac

SEQ ID NO: 1296614 - RNA, 19 nt, Artificial Sequence
  Description of Artificial Sequence: Synthetic oligonucleotide
  Sense strand starting at position 506 of SEQ ID NO: 1241748
gcuauccugccacaggaua

SEQ ID NO: 1296615 - RNA, 19 nt, Artificial Sequence
  Description of Artificial Sequence: Synthetic oligonucleotide
  Antisense strand to SEQ ID NO: 1296614
uauccuguggcaggauagc

SEQ ID NO: 1296616 - RNA, 19 nt, Artificial Sequence
  Description of Artificial Sequence: Synthetic oligonucleotide
  Sense strand starting at position 563 of SEQ ID NO: 1241748
ggcaccuuguuccuggaga

SEQ ID NO: 1296617 - RNA, 19 nt, Artificial Sequence
  Description of Artificial Sequence: Synthetic oligonucleotide
  Antisense strand to SEQ ID NO: 1296616
ucuccaggaacaaggugcc

SEQ ID NO: 1296618 - RNA, 19 nt, Artificial Sequence
  Description of Artificial Sequence: Synthetic oligonucleotide
  Sense strand starting at position 565 of SEQ ID NO: 1241748
caccuuguuccuggagaca

SEQ ID NO: 1296619 - RNA, 19 nt, Artificial Sequence
  Description of Artificial Sequence: Synthetic oligonucleotide
  Antisense strand to SEQ ID NO: 1296618
ugucuccaggaacaaggug

SEQ ID NO: 1296620 - RNA, 19 nt, Artificial Sequence
  Description of Artificial Sequence: Synthetic oligonucleotide
  Sense strand starting at position 732 of SEQ ID NO: 1241748
ggcugauagccacagcaau

SEQ ID NO: 1296621 - RNA, 19 nt, Artificial Sequence
  Description of Artificial Sequence: Synthetic oligonucleotide
  Antisense strand to SEQ ID NO: 1296620
auugcuguggcuaucagcc

SEQ ID NO: 1296622 - RNA, 19 nt, Artificial Sequence
  Description of Artificial Sequence: Synthetic oligonucleotide
  Sense strand starting at position 985 of SEQ ID NO: 1241748
guccguuucugacugagca

SEQ ID NO: 1296623 - RNA, 19 nt, Artificial Sequence
  Description of Artificial Sequence: Synthetic oligonucleotide
  Antisense strand to SEQ ID NO: 1296622
ugcucagucagaaacggac

SEQ ID NO: 1296624 - RNA, 19 nt, Artificial Sequence
  Description of Artificial Sequence: Synthetic oligonucleotide
  Sense strand starting at position 986 of SEQ ID NO: 1241748
uccguuucugacugagcau

SEQ ID NO: 1296625 - RNA, 19 nt, Artificial Sequence
  Description of Artificial Sequence: Synthetic oligonucleotide
  Antisense strand to SEQ ID NO: 1296624
augcucagucagaaacgga

SEQ ID NO: 1296626 - RNA, 19 nt, Artificial Sequence
  Description of Artificial Sequence: Synthetic oligonucleotide
  Sense strand starting at position 987 of SEQ ID NO: 1241748
ccguuucugacugagcaua

SEQ ID NO: 1296627 - RNA, 19 nt, Artificial Sequence
  Description of Artificial Sequence: Synthetic oligonucleotide
  Antisense strand to SEQ ID NO: 1296626
uaugcucagucagaaacgg

SEQ ID NO: 1296628 - RNA, 19 nt, Artificial Sequence
  Description of Artificial Sequence: Synthetic oligonucleotide
  Sense strand starting at position 989 of SEQ ID NO: 1241748
guuucugacugagcauaga

SEQ ID NO: 1296629 - RNA, 19 nt, Artificial Sequence
  Description of Artificial Sequence: Synthetic oligonucleotide
  Antisense strand to SEQ ID NO: 1296628
ucuaugcucagucagaaac

SEQ ID NO: 1296630 - RNA, 19 nt, Artificial Sequence
  Description of Artificial Sequence: Synthetic oligonucleotide
  Sense strand starting at position 1019 of SEQ ID NO: 1241748
gaagauaccugggaaagag

SEQ ID NO: 1296631 - RNA, 19 nt, Artificial Sequence
  Description of Artificial Sequence: Synthetic oligonucleotide
  Antisense strand to SEQ ID NO: 1296630
cucuuucccagguaucuuc

SEQ ID NO: 1296632 - RNA, 19 nt, Artificial Sequence
  Description of Artificial Sequence: Synthetic oligonucleotide
  Sense strand starting at position 1297 of SEQ ID NO: 1241748
gccucuaauucaggagggu

SEQ ID NO: 1296633 - RNA, 19 nt, Artificial Sequence
  Description of Artificial Sequence: Synthetic oligonucleotide
  Antisense strand to SEQ ID NO: 1296632
acccuccugaauuagaggc

SEQ ID NO: 1296634 - RNA, 19 nt, Artificial Sequence
  Description of Artificial Sequence: Synthetic oligonucleotide
  Sense strand starting at position 2130 of SEQ ID NO: 1241748
gcggcacucacccauagua

SEQ ID NO: 1296635 - RNA, 19 nt, Artificial Sequence
  Description of Artificial Sequence: Synthetic oligonucleotide
  Antisense strand to SEQ ID NO: 1296634
uacuaugggugagugccgc

SEQ ID NO: 1296636 - RNA, 19 nt, Artificial Sequence
  Description of Artificial Sequence: Synthetic oligonucleotide
  Sense strand starting at position 2536 of SEQ ID NO: 1241748
cggucaguucauggaaaca

SEQ ID NO: 1296637 - RNA, 19 nt, Artificial Sequence
  Description of Artificial Sequence: Synthetic oligonucleotide
  Antisense strand to SEQ ID NO: 1296636
uguuuccaugaacugaccg

SEQ ID NO: 1296638 - RNA, 19 nt, Artificial Sequence
  Description of Artificial Sequence: Synthetic oligonucleotide
  Sense strand starting at position 2557 of SEQ ID NO: 1241748
cauguaaggucauuuguuu

SEQ ID NO: 1296639 - RNA, 19 nt, Artificial Sequence
  Description of Artificial Sequence: Synthetic oligonucleotide
  Antisense strand to SEQ ID NO: 1296638
aaacaaaugaccuuacaug

SEQ ID NO: 1296640 - RNA, 19 nt, Artificial Sequence
  Description of Artificial Sequence: Synthetic oligonucleotide
  Sense strand starting at position 2608 of SEQ ID NO: 1241748
uauggaaguuaaggaauuu

SEQ ID NO: 1296641 - RNA, 19 nt, Artificial Sequence
  Description of Artificial Sequence: Synthetic oligonucleotide
  Antisense strand to SEQ ID NO: 1296640
aaauuccuuaacuuccaua

SEQ ID NO: 1296642 - RNA, 19 nt, Artificial Sequence
  Description of Artificial Sequence: Synthetic oligonucleotide
  Sense strand starting at position 2645 of SEQ ID NO: 1241748
acuucuaaggcucacgauu

SEQ ID NO: 1296643 - RNA, 19 nt, Artificial Sequence
  Description of Artificial Sequence: Synthetic oligonucleotide
  Antisense strand to SEQ ID NO: 1296642
aaucgugagccuuagaagu

SEQ ID NO: 1296644 - RNA, 19 nt, Artificial Sequence
  Description of Artificial Sequence: Synthetic oligonucleotide
  Sense strand starting at position 2654 of SEQ ID NO: 1241748
gcucacgauuugcuuuaua

SEQ ID NO: 1296645 - RNA, 19 nt, Artificial Sequence
  Description of Artificial Sequence: Synthetic oligonucleotide
  Antisense strand to SEQ ID NO: 1296644
uauaaagcaaaucgugagc

SEQ ID NO: 1296646 - RNA, 19 nt, Artificial Sequence
  Description of Artificial Sequence: Synthetic oligonucleotide
  Sense strand starting at position 2659 of SEQ ID NO: 1241748
cgauuugcuuuauaccaua

SEQ ID NO: 1296647 - RNA, 19 nt, Artificial Sequence
  Description of Artificial Sequence: Synthetic oligonucleotide
  Antisense strand to SEQ ID NO: 1296646
uaugguauaaagcaaaucg

SEQ ID NO: 1296648 - RNA, 19 nt, Artificial Sequence
  Description of Artificial Sequence: Synthetic oligonucleotide
  Sense strand starting at position 2664 of SEQ ID NO: 1241748
ugcuuuauaccauaaaggu

SEQ ID NO: 1296649 - RNA, 19 nt, Artificial Sequence
  Description of Artificial Sequence: Synthetic oligonucleotide
  Antisense strand to SEQ ID NO: 1296648
accuuuaugguauaaagca

SEQ ID NO: 1296650 - RNA, 19 nt, Artificial Sequence
  Description of Artificial Sequence: Synthetic oligonucleotide
  Sense strand starting at position 2673 of SEQ ID NO: 1241748
ccauaaagguuacagagaa

SEQ ID NO: 1296651 - RNA, 19 nt, Artificial Sequence
  Description of Artificial Sequence: Synthetic oligonucleotide
  Antisense strand to SEQ ID NO: 1296650
uucucuguaaccuuuaugg

SEQ ID NO: 1296652 - RNA, 19 nt, Artificial Sequence
  Description of Artificial Sequence: Synthetic oligonucleotide
  Sense strand starting at position 2744 of SEQ ID NO: 1241748
ugaauaucaucuggaaacu

SEQ ID NO: 1296653 - RNA, 19 nt, Artificial Sequence
  Description of Artificial Sequence: Synthetic oligonucleotide
  Antisense strand to SEQ ID NO: 1296652
aguuuccagaugauauuca

SEQ ID NO: 1296654 - RNA, 19 nt, Artificial Sequence
  Description of Artificial Sequence: Synthetic oligonucleotide
  Sense strand starting at position 2753 of SEQ ID NO: 1241748
ucuggaaacucuggaaauu

SEQ ID NO: 1296655 - RNA, 19 nt, Artificial Sequence
  Description of Artificial Sequence: Synthetic oligonucleotide
  Antisense strand to SEQ ID NO: 1296654
aauuuccagaguuuccaga

SEQ ID NO: 1296656 - RNA, 19 nt, Artificial Sequence
  Description of Artificial Sequence: Synthetic oligonucleotide
  Sense strand starting at position 3192 of SEQ ID NO: 1241748
agcacagaaucuucuaaga

SEQ ID NO: 1296657 - RNA, 19 nt, Artificial Sequence
  Description of Artificial Sequence: Synthetic oligonucleotide
  Antisense strand to SEQ ID NO: 1296656
ucuuagaagauucugugcu

SEQ ID NO: 1296658 - RNA, 19 nt, Artificial Sequence
  Description of Artificial Sequence: Synthetic oligonucleotide
  Sense strand starting at position 3339 of SEQ ID NO: 1241748
ggccguaggucuuccauca

SEQ ID NO: 1296659 - RNA, 19 nt, Artificial Sequence
  Description of Artificial Sequence: Synthetic oligonucleotide
  Antisense strand to SEQ ID NO: 1296658
ugauggaagaccuacggcc

SEQ ID NO: 1296660 - RNA, 19 nt, Artificial Sequence
  Description of Artificial Sequence: Synthetic oligonucleotide
  Sense strand starting at position 3364 of SEQ ID NO: 1241748
ugucccuggccagaauauu

SEQ ID NO: 1296661 - RNA, 19 nt, Artificial Sequence
  Description of Artificial Sequence: Synthetic oligonucleotide
  Antisense strand to SEQ ID NO: 1296660
aauauucuggccagggaca

SEQ ID NO: 1296662 - RNA, 19 nt, Artificial Sequence
  Description of Artificial Sequence: Synthetic oligonucleotide
  Sense strand starting at position 3703 of SEQ ID NO: 1241748
cacaguaggcuuuggauaa

SEQ ID NO: 1296663 - RNA, 19 nt, Artificial Sequence
  Description of Artificial Sequence: Synthetic oligonucleotide
  Antisense strand to SEQ ID NO: 1296662
uuauccaaagccuacugug

SEQ ID NO: 1296664 - RNA, 19 nt, Artificial Sequence
  Description of Artificial Sequence: Synthetic oligonucleotide
  Sense strand starting at position 3704 of SEQ ID NO: 1241748
acaguaggcuuuggauaac

SEQ ID NO: 1296665 - RNA, 19 nt, Artificial Sequence
  Description of Artificial Sequence: Synthetic oligonucleotide
  Antisense strand to SEQ ID NO: 1296664
guuauccaaagccuacugu

SEQ ID NO: 1296666 - RNA, 19 nt, Artificial Sequence
  Description of Artificial Sequence: Synthetic oligonucleotide
  Sense strand starting at position 3799 of SEQ ID NO: 1241748
guccuaguacacugucaga

SEQ ID NO: 1296667 - RNA, 19 nt, Artificial Sequence
  Description of Artificial Sequence: Synthetic oligonucleotide
  Antisense strand to SEQ ID NO: 1296666
ucugacaguguacuaggac

SEQ ID NO: 1296668 - RNA, 19 nt, Artificial Sequence
  Description of Artificial Sequence: Synthetic oligonucleotide
  Sense strand starting at position 3850 of SEQ ID NO: 1241748
gcaagaagcagcuagucua

SEQ ID NO: 1296669 - RNA, 19 nt, Artificial Sequence
  Description of Artificial Sequence: Synthetic oligonucleotide
  Antisense strand to SEQ ID NO: 1296668
uagacuagcugcuucuugc

SEQ ID NO: 1296670 - RNA, 19 nt, Artificial Sequence
  Description of Artificial Sequence: Synthetic oligonucleotide
  Sense strand starting at position 1130 of SEQ ID NO: 1241749
gcgagacucugucuaauua

SEQ ID NO: 1296671 - RNA, 19 nt, Artificial Sequence
  Description of Artificial Sequence: Synthetic oligonucleotide
  Antisense strand to SEQ ID NO: 1296670
uaauuagacagagucucgc

SEQ ID NO: 1296672 - RNA, 19 nt, Artificial Sequence
  Description of Artificial Sequence: Synthetic oligonucleotide
  Sense strand starting at position 1131 of SEQ ID NO: 1241749
cgagacucugucuaauuaa

SEQ ID NO: 1296673 - RNA, 19 nt, Artificial Sequence
  Description of Artificial Sequence: Synthetic oligonucleotide
  Antisense strand to SEQ ID NO: 1296672
uuaauuagacagagucucg

SEQ ID NO: 1296674 - RNA, 19 nt, Artificial Sequence
  Description of Artificial Sequence: Synthetic oligonucleotide
  Sense strand starting at position 1339 of SEQ ID NO: 1241749
gggaaucccucagaauaaa

SEQ ID NO: 1296675 - RNA, 19 nt, Artificial Sequence
  Description of Artificial Sequence: Synthetic oligonucleotide
  Antisense strand to SEQ ID NO: 1296674
uuuauucugagggauuccc

SEQ ID NO: 1296676 - RNA, 19 nt, Artificial Sequence
  Description of Artificial Sequence: Synthetic oligonucleotide
  Sense strand starting at position 1448 of SEQ ID NO: 1241749
gugaaacacuuucuggcau

SEQ ID NO: 1296677 - RNA, 19 nt, Artificial Sequence
  Description of Artificial Sequence: Synthetic oligonucleotide
  Antisense strand to SEQ ID NO: 1296676
augccagaaaguguuucac

SEQ ID NO: 1296678 - RNA, 19 nt, Artificial Sequence
  Description of Artificial Sequence: Synthetic oligonucleotide
  Sense strand starting at position 2300 of SEQ ID NO: 1241749
caucacuucucguugcaga

SEQ ID NO: 1296679 - RNA, 19 nt, Artificial Sequence
  Description of Artificial Sequence: Synthetic oligonucleotide
  Antisense strand to SEQ ID NO: 1296678
ucugcaacgagaagugaug

SEQ ID NO: 1296680 - RNA, 19 nt, Artificial Sequence
  Description of Artificial Sequence: Synthetic oligonucleotide
  Sense strand starting at position 2460 of SEQ ID NO: 1241749
gcacuagaucacggugagu

SEQ ID NO: 1296681 - RNA, 19 nt, Artificial Sequence
  Description of Artificial Sequence: Synthetic oligonucleotide
  Antisense strand to SEQ ID NO: 1296680
acucaccgugaucuagugc

SEQ ID NO: 1296682 - RNA, 19 nt, Artificial Sequence
  Description of Artificial Sequence: Synthetic oligonucleotide
  Sense strand starting at position 2711 of SEQ ID NO: 1241749
cgcggaggauuacuuugaa

SEQ ID NO: 1296683 - RNA, 19 nt, Artificial Sequence
  Description of Artificial Sequence: Synthetic oligonucleotide
  Antisense strand to SEQ ID NO: 1296682
uucaaaguaauccuccgcg

SEQ ID NO: 1296684 - RNA, 19 nt, Artificial Sequence
  Description of Artificial Sequence: Synthetic oligonucleotide
  Sense strand starting at position 2750 of SEQ ID NO: 1241749
cuggcauauuuagaacuua

SEQ ID NO: 1296685 - RNA, 19 nt, Artificial Sequence
  Description of Artificial Sequence: Synthetic oligonucleotide
  Antisense strand to SEQ ID NO: 1296684
uaaguucuaaauaugccag

SEQ ID NO: 1296686 - RNA, 19 nt, Artificial Sequence
  Description of Artificial Sequence: Synthetic oligonucleotide
  Sense strand starting at position 2838 of SEQ ID NO: 1241749
cucggaaagcgcuauugau

SEQ ID NO: 1296687 - RNA, 19 nt, Artificial Sequence
  Description of Artificial Sequence: Synthetic oligonucleotide
  Antisense strand to SEQ ID NO: 1296686
aucaauagcgcuuuccgag

SEQ ID NO: 1296688 - RNA, 19 nt, Artificial Sequence
  Description of Artificial Sequence: Synthetic oligonucleotide
  Sense strand starting at position 2884 of SEQ ID NO: 1241749
ggcagaaaucgaggaggcu

SEQ ID NO: 1296689 - RNA, 19 nt, Artificial Sequence
  Description of Artificial Sequence: Synthetic oligonucleotide
  Antisense strand to SEQ ID NO: 1296688
agccuccucgauuucugcc

SEQ ID NO: 1296690 - RNA, 19 nt, Artificial Sequence
  Description of Artificial Sequence: Synthetic oligonucleotide
  Sense strand starting at position 2934 of SEQ ID NO: 1241749
acagacugcuuggaaggau

SEQ ID NO: 1296691 - RNA, 19 nt, Artificial Sequence
  Description of Artificial Sequence: Synthetic oligonucleotide
  Antisense strand to SEQ ID NO: 1296690
auccuuccaagcagucugu

SEQ ID NO: 1296692 - RNA, 19 nt, Artificial Sequence
  Description of Artificial Sequence: Synthetic oligonucleotide
  Sense strand starting at position 2946 of SEQ ID NO: 1241749
gaaggauguucaggaggga

SEQ ID NO: 1296693 - RNA, 19 nt, Artificial Sequence
  Description of Artificial Sequence: Synthetic oligonucleotide
  Antisense strand to SEQ ID NO: 1296692
ucccuccugaacauccuuc

SEQ ID NO: 1296694 - RNA, 19 nt, Artificial Sequence
  Description of Artificial Sequence: Synthetic oligonucleotide
  Sense strand starting at position 2990 of SEQ ID NO: 1241749
gggcuuacugcggagacua

SEQ ID NO: 1296695 - RNA, 19 nt, Artificial Sequence
  Description of Artificial Sequence: Synthetic oligonucleotide
  Antisense strand to SEQ ID NO: 1296694
uagucuccgcaguaagccc

SEQ ID NO: 1296696 - RNA, 19 nt, Artificial Sequence
  Description of Artificial Sequence: Synthetic oligonucleotide
  Sense strand starting at position 3048 of SEQ ID NO: 1241749
guaucuggagagugaucuu

SEQ ID NO: 1296697 - RNA, 19 nt, Artificial Sequence
  Description of Artificial Sequence: Synthetic oligonucleotide
  Antisense strand to SEQ ID NO: 1296696
aagaucacucuccagauac

SEQ ID NO: 1296698 - RNA, 19 nt, Artificial Sequence
  Description of Artificial Sequence: Synthetic oligonucleotide
  Sense strand starting at position 3051 of SEQ ID NO: 1241749
ucuggagagugaucuuuaa

SEQ ID NO: 1296699 - RNA, 19 nt, Artificial Sequence
  Description of Artificial Sequence: Synthetic oligonucleotide
  Antisense strand to SEQ ID NO: 1296698
uuaaagaucacucuccaga

SEQ ID NO: 1296700 - RNA, 19 nt, Artificial Sequence
  Description of Artificial Sequence: Synthetic oligonucleotide
  Sense strand starting at position 3149 of SEQ ID NO: 1241749
agcagagcucuuggacaug

SEQ ID NO: 1296701 - RNA, 19 nt, Artificial Sequence
  Description of Artificial Sequence: Synthetic oligonucleotide
  Antisense strand to SEQ ID NO: 1296700
cauguccaagagcucugcu

SEQ ID NO: 1296702 - RNA, 19 nt, Artificial Sequence
  Description of Artificial Sequence: Synthetic oligonucleotide
  Sense strand starting at position 3193 of SEQ ID NO: 1241749
gggcaugaucccggaaaug

SEQ ID NO: 1296703 - RNA, 19 nt, Artificial Sequence
  Description of Artificial Sequence: Synthetic oligonucleotide
  Antisense strand to SEQ ID NO: 1296702
cauuuccgggaucaugccc

SEQ ID NO: 1296704 - RNA, 19 nt, Artificial Sequence
  Description of Artificial Sequence: Synthetic oligonucleotide
  Sense strand starting at position 3255 of SEQ ID NO: 1241749
cccugcaaugcuugaagua

SEQ ID NO: 1296705 - RNA, 19 nt, Artificial Sequence
  Description of Artificial Sequence: Synthetic oligonucleotide
  Antisense strand to SEQ ID NO: 1296704
uacuucaagcauugcaggg

SEQ ID NO: 1296706 - RNA, 19 nt, Artificial Sequence
  Description of Artificial Sequence: Synthetic oligonucleotide
  Sense strand starting at position 3256 of SEQ ID NO: 1241749
ccugcaaugcuugaaguau

SEQ ID NO: 1296707 - RNA, 19 nt, Artificial Sequence
  Description of Artificial Sequence: Synthetic oligonucleotide
  Antisense strand to SEQ ID NO: 1296706
auacuucaagcauugcagg

SEQ ID NO: 1296708 - RNA, 19 nt, Artificial Sequence
  Description of Artificial Sequence: Synthetic oligonucleotide
  Sense strand starting at position 3281 of SEQ ID NO: 1241749
cugagaguguucucgggca

SEQ ID NO: 1296709 - RNA, 19 nt, Artificial Sequence
  Description of Artificial Sequence: Synthetic oligonucleotide
  Antisense strand to SEQ ID NO: 1296708
ugcccgagaacacucucag

SEQ ID NO: 1296710 - RNA, 19 nt, Artificial Sequence
  Description of Artificial Sequence: Synthetic oligonucleotide
  Sense strand starting at position 3370 of SEQ ID NO: 1241749
guggcaggugccagaugua

SEQ ID NO: 1296711 - RNA, 19 nt, Artificial Sequence
  Description of Artificial Sequence: Synthetic oligonucleotide
  Antisense strand to SEQ ID NO: 1296710
uacaucuggcaccugccac

SEQ ID NO: 1296712 - RNA, 19 nt, Artificial Sequence
  Description of Artificial Sequence: Synthetic oligonucleotide
  Sense strand starting at position 3377 of SEQ ID NO: 1241749
gugccagauguagagaaga

SEQ ID NO: 1296713 - RNA, 19 nt, Artificial Sequence
  Description of Artificial Sequence: Synthetic oligonucleotide
  Antisense strand to SEQ ID NO: 1296712
ucuucucuacaucuggcac

SEQ ID NO: 1296714 - RNA, 19 nt, Artificial Sequence
  Description of Artificial Sequence: Synthetic oligonucleotide
  Sense strand starting at position 3393 of SEQ ID NO: 1241749
agagaaggcgauugcuaga

SEQ ID NO: 1296715 - RNA, 19 nt, Artificial Sequence
  Description of Artificial Sequence: Synthetic oligonucleotide
  Antisense strand to SEQ ID NO: 1296714
ucuagcaaucgccuucucu

SEQ ID NO: 1296716 - RNA, 19 nt, Artificial Sequence
  Description of Artificial Sequence: Synthetic oligonucleotide
  Sense strand starting at position 3400 of SEQ ID NO: 1241749
gcgauugcuagagagccuu

SEQ ID NO: 1296717 - RNA, 19 nt, Artificial Sequence
  Description of Artificial Sequence: Synthetic oligonucleotide
  Antisense strand to SEQ ID NO: 1296716
aaggcucucuagcaaucgc

SEQ ID NO: 1296718 - RNA, 19 nt, Artificial Sequence
  Description of Artificial Sequence: Synthetic oligonucleotide
  Sense strand starting at position 3438 of SEQ ID NO: 1241749
uuauucguguccucaagau

SEQ ID NO: 1296719 - RNA, 19 nt, Artificial Sequence
  Description of Artificial Sequence: Synthetic oligonucleotide
  Antisense strand to SEQ ID NO: 1296718
aucuugaggacacgaauaa

SEQ ID NO: 1296720 - RNA, 19 nt, Artificial Sequence
  Description of Artificial Sequence: Synthetic oligonucleotide
  Sense strand starting at position 3442 of SEQ ID NO: 1241749
ucguguccucaagauaaac

SEQ ID NO: 1296721 - RNA, 19 nt, Artificial Sequence
  Description of Artificial Sequence: Synthetic oligonucleotide
  Antisense strand to SEQ ID NO: 1296720
guuuaucuugaggacacga

SEQ ID NO: 1296722 - RNA, 19 nt, Artificial Sequence
  Description of Artificial Sequence: Synthetic oligonucleotide
  Sense strand starting at position 3467 of SEQ ID NO: 1241749
uuaauuacugucgaugaau

SEQ ID NO: 1296723 - RNA, 19 nt, Artificial Sequence
  Description of Artificial Sequence: Synthetic oligonucleotide
  Antisense strand to SEQ ID NO: 1296722
auucaucgacaguaauuaa

SEQ ID NO: 1296724 - RNA, 19 nt, Artificial Sequence
  Description of Artificial Sequence: Synthetic oligonucleotide
  Sense strand starting at position 3469 of SEQ ID NO: 1241749
aauuacugucgaugaaugu

SEQ ID NO: 1296725 - RNA, 19 nt, Artificial Sequence
  Description of Artificial Sequence: Synthetic oligonucleotide
  Antisense strand to SEQ ID NO: 1296724
acauucaucgacaguaauu

SEQ ID NO: 1296726 - RNA, 19 nt, Artificial Sequence
  Description of Artificial Sequence: Synthetic oligonucleotide
  Sense strand starting at position 3478 of SEQ ID NO: 1241749
cgaugaaugucugcaggcu

SEQ ID NO: 1296727 - RNA, 19 nt, Artificial Sequence
  Description of Artificial Sequence: Synthetic oligonucleotide
  Antisense strand to SEQ ID NO: 1296726
agccugcagacauucaucg

SEQ ID NO: 1296728 - RNA, 19 nt, Artificial Sequence
  Description of Artificial Sequence: Synthetic oligonucleotide
  Sense strand starting at position 3519 of SEQ ID NO: 1241749
cagauaauccuagggaguu

SEQ ID NO: 1296729 - RNA, 19 nt, Artificial Sequence
  Description of Artificial Sequence: Synthetic oligonucleotide
  Antisense strand to SEQ ID NO: 1296728
aacucccuaggauuaucug

SEQ ID NO: 1296730 - RNA, 19 nt, Artificial Sequence
  Description of Artificial Sequence: Synthetic oligonucleotide
  Sense strand starting at position 3529 of SEQ ID NO: 1241749
uagggaguugcaggucaaa

SEQ ID NO: 1296731 - RNA, 19 nt, Artificial Sequence
  Description of Artificial Sequence: Synthetic oligonucleotide
  Antisense strand to SEQ ID NO: 1296730
uuugaccugcaacucccua

SEQ ID NO: 1296732 - RNA, 19 nt, Artificial Sequence
  Description of Artificial Sequence: Synthetic oligonucleotide
  Sense strand starting at position 3532 of SEQ ID NO: 1241749
ggaguugcaggucaaauau

SEQ ID NO: 1296733 - RNA, 19 nt, Artificial Sequence
  Description of Artificial Sequence: Synthetic oligonucleotide
  Antisense strand to SEQ ID NO: 1296732
auauuugaccugcaacucc

SEQ ID NO: 1296734 - RNA, 19 nt, Artificial Sequence
  Description of Artificial Sequence: Synthetic oligonucleotide
  Sense strand starting at position 3702 of SEQ ID NO: 1241749
aaacaauucgcagagagcu

SEQ ID NO: 1296735 - RNA, 19 nt, Artificial Sequence
  Description of Artificial Sequence: Synthetic oligonucleotide
  Antisense strand to SEQ ID NO: 1296734
agcucucugcgaauuguuu

SEQ ID NO: 1296736 - RNA, 19 nt, Artificial Sequence
  Description of Artificial Sequence: Synthetic oligonucleotide
  Sense strand starting at position 3704 of SEQ ID NO: 1241749
acaauucgcagagagcuua

SEQ ID NO: 1296737 - RNA, 19 nt, Artificial Sequence
  Description of Artificial Sequence: Synthetic oligonucleotide
  Antisense strand to SEQ ID NO: 1296736
uaagcucucugcgaauugu

SEQ ID NO: 1296738 - RNA, 19 nt, Artificial Sequence
  Description of Artificial Sequence: Synthetic oligonucleotide
  Sense strand starting at position 3750 of SEQ ID NO: 1241749
guuucuugcaguuauuggu

SEQ ID NO: 1296739 - RNA, 19 nt, Artificial Sequence
  Description of Artificial Sequence: Synthetic oligonucleotide
  Antisense strand to SEQ ID NO: 1296738
accaauaacugcaagaaac

SEQ ID NO: 1296740 - RNA, 19 nt, Artificial Sequence
  Description of Artificial Sequence: Synthetic oligonucleotide
  Sense strand starting at position 3805 of SEQ ID NO: 1241749
ggcccuucuccaggcaaua

SEQ ID NO: 1296741 - RNA, 19 nt, Artificial Sequence
  Description of Artificial Sequence: Synthetic oligonucleotide
  Antisense strand to SEQ ID NO: 1296740
uauugccuggagaagggcc

SEQ ID NO: 1296742 - RNA, 19 nt, Artificial Sequence
  Description of Artificial Sequence: Synthetic oligonucleotide
  Sense strand starting at position 3818 of SEQ ID NO: 1241749
gcaauauuggaagguaauu

SEQ ID NO: 1296743 - RNA, 19 nt, Artificial Sequence
  Description of Artificial Sequence: Synthetic oligonucleotide
  Antisense strand to SEQ ID NO: 1296742
aauuaccuuccaauauugc

SEQ ID NO: 1296744 - RNA, 19 nt, Artificial Sequence
  Description of Artificial Sequence: Synthetic oligonucleotide
  Sense strand starting at position 3863 of SEQ ID NO: 1241749
gggauauggcaaugaguag

SEQ ID NO: 1296745 - RNA, 19 nt, Artificial Sequence
  Description of Artificial Sequence: Synthetic oligonucleotide
  Antisense strand to SEQ ID NO: 1296744
cuacucauugccauauccc

SEQ ID NO: 1296746 - RNA, 19 nt, Artificial Sequence
  Description of Artificial Sequence: Synthetic oligonucleotide
  Sense strand starting at position 3960 of SEQ ID NO: 1241749
ugcaauucucaguauaagc

SEQ ID NO: 1296747 - RNA, 19 nt, Artificial Sequence
  Description of Artificial Sequence: Synthetic oligonucleotide
  Antisense strand to SEQ ID NO: 1296746
gcuuauacugagaauugca

SEQ ID NO: 1296748 - RNA, 19 nt, Artificial Sequence
  Description of Artificial Sequence: Synthetic oligonucleotide
  Sense strand starting at position 3970 of SEQ ID NO: 1241749
aguauaagcccuuugucgu

SEQ ID NO: 1296749 - RNA, 19 nt, Artificial Sequence
  Description of Artificial Sequence: Synthetic oligonucleotide
  Antisense strand to SEQ ID NO: 1296748
acgacaaagggcuuauacu

SEQ ID NO: 1296750 - RNA, 19 nt, Artificial Sequence
  Description of Artificial Sequence: Synthetic oligonucleotide
  Sense strand starting at position 1051 of SEQ ID NO: 1241750
gcgagacucugucuaauua

SEQ ID NO: 1296751 - RNA, 19 nt, Artificial Sequence
  Description of Artificial Sequence: Synthetic oligonucleotide
  Antisense strand to SEQ ID NO: 1296750
uaauuagacagagucucgc

SEQ ID NO: 1296752 - RNA, 19 nt, Artificial Sequence
  Description of Artificial Sequence: Synthetic oligonucleotide
  Sense strand starting at position 1052 of SEQ ID NO: 1241750
cgagacucugucuaauuaa

SEQ ID NO: 1296753 - RNA, 19 nt, Artificial Sequence
  Description of Artificial Sequence: Synthetic oligonucleotide
  Antisense strand to SEQ ID NO: 1296752
uuaauuagacagagucucg

SEQ ID NO: 1296754 - RNA, 19 nt, Artificial Sequence
  Description of Artificial Sequence: Synthetic oligonucleotide
  Sense strand starting at position 1260 of SEQ ID NO: 1241750
gggaaucccucagaauaaa

SEQ ID NO: 1296755 - RNA, 19 nt, Artificial Sequence
  Description of Artificial Sequence: Synthetic oligonucleotide
  Antisense strand to SEQ ID NO: 1296754
uuuauucugagggauuccc

SEQ ID NO: 1296756 - RNA, 19 nt, Artificial Sequence
  Description of Artificial Sequence: Synthetic oligonucleotide
  Sense strand starting at position 1369 of SEQ ID NO: 1241750
gugaaacacuuucuggcau

SEQ ID NO: 1296757 - RNA, 19 nt, Artificial Sequence
  Description of Artificial Sequence: Synthetic oligonucleotide
  Antisense strand to SEQ ID NO: 1296756
augccagaaaguguuucac

SEQ ID NO: 1296758 - RNA, 19 nt, Artificial Sequence
  Description of Artificial Sequence: Synthetic oligonucleotide
  Sense strand starting at position 2221 of SEQ ID NO: 1241750
caucacuucucguugcaga

SEQ ID NO: 1296759 - RNA, 19 nt, Artificial Sequence
  Description of Artificial Sequence: Synthetic oligonucleotide
  Antisense strand to SEQ ID NO: 1296758
ucugcaacgagaagugaug

SEQ ID NO: 1296760 - RNA, 19 nt, Artificial Sequence
  Description of Artificial Sequence: Synthetic oligonucleotide
  Sense strand starting at position 2381 of SEQ ID NO: 1241750
gcacuagaucacggugagu

SEQ ID NO: 1296761 - RNA, 19 nt, Artificial Sequence
  Description of Artificial Sequence: Synthetic oligonucleotide
  Antisense strand to SEQ ID NO: 1296760
acucaccgugaucuagugc

SEQ ID NO: 1296762 - RNA, 19 nt, Artificial Sequence
  Description of Artificial Sequence: Synthetic oligonucleotide
  Sense strand starting at position 2632 of SEQ ID NO: 1241750
cgcggaggauuacuuugaa

SEQ ID NO: 1296763 - RNA, 19 nt, Artificial Sequence
  Description of Artificial Sequence: Synthetic oligonucleotide
  Antisense strand to SEQ ID NO: 1296762
uucaaaguaauccuccgcg

SEQ ID NO: 1296764 - RNA, 19 nt, Artificial Sequence
  Description of Artificial Sequence: Synthetic oligonucleotide
  Sense strand starting at position 2671 of SEQ ID NO: 1241750
cuggcauauuuagaacuua

SEQ ID NO: 1296765 - RNA, 19 nt, Artificial Sequence
  Description of Artificial Sequence: Synthetic oligonucleotide
  Antisense strand to SEQ ID NO: 1296764
uaaguucuaaauaugccag

SEQ ID NO: 1296766 - RNA, 19 nt, Artificial Sequence
  Description of Artificial Sequence: Synthetic oligonucleotide
  Sense strand starting at position 2759 of SEQ ID NO: 1241750
cucggaaagcgcuauugau

SEQ ID NO: 1296767 - RNA, 19 nt, Artificial Sequence
  Description of Artificial Sequence: Synthetic oligonucleotide
  Antisense strand to SEQ ID NO: 1296766
aucaauagcgcuuuccgag

SEQ ID NO: 1296768 - RNA, 19 nt, Artificial Sequence
  Description of Artificial Sequence: Synthetic oligonucleotide
  Sense strand starting at position 2805 of SEQ ID NO: 1241750
ggcagaaaucgaggaggcu

SEQ ID NO: 1296769 - RNA, 19 nt, Artificial Sequence
  Description of Artificial Sequence: Synthetic oligonucleotide
  Antisense strand to SEQ ID NO: 1296768
agccuccucgauuucugcc

SEQ ID NO: 1296770 - RNA, 19 nt, Artificial Sequence
  Description of Artificial Sequence: Synthetic oligonucleotide
  Sense strand starting at position 2911 of SEQ ID NO: 1241750
gggcuuacugcggagacua

SEQ ID NO: 1296771 - RNA, 19 nt, Artificial Sequence
  Description of Artificial Sequence: Synthetic oligonucleotide
  Antisense strand to SEQ ID NO: 1296770
uagucuccgcaguaagccc

SEQ ID NO: 1296772 - RNA, 19 nt, Artificial Sequence
  Description of Artificial Sequence: Synthetic oligonucleotide
  Sense strand starting at position 2969 of SEQ ID NO: 1241750
guaucuggagagugaucuu

SEQ ID NO: 1296773 - RNA, 19 nt, Artificial Sequence
  Description of Artificial Sequence: Synthetic oligonucleotide
  Antisense strand to SEQ ID NO: 1296772
aagaucacucuccagauac

SEQ ID NO: 1296774 - RNA, 19 nt, Artificial Sequence
  Description of Artificial Sequence: Synthetic oligonucleotide
  Sense strand starting at position 2972 of SEQ ID NO: 1241750
ucuggagagugaucuuuaa

SEQ ID NO: 1296775 - RNA, 19 nt, Artificial Sequence
  Description of Artificial Sequence: Synthetic oligonucleotide
  Antisense strand to SEQ ID NO: 1296774
uuaaagaucacucuccaga

SEQ ID NO: 1296776 - RNA, 19 nt, Artificial Sequence
  Description of Artificial Sequence: Synthetic oligonucleotide
  Sense strand starting at position 3070 of SEQ ID NO: 1241750
agcagagcucuuggacaug

SEQ ID NO: 1296777 - RNA, 19 nt, Artificial Sequence
  Description of Artificial Sequence: Synthetic oligonucleotide
  Antisense strand to SEQ ID NO: 1296776
cauguccaagagcucugcu

SEQ ID NO: 1296778 - RNA, 19 nt, Artificial Sequence
  Description of Artificial Sequence: Synthetic oligonucleotide
  Sense strand starting at position 3114 of SEQ ID NO: 1241750
gggcaugaucccggaaaug

SEQ ID NO: 1296779 - RNA, 19 nt, Artificial Sequence
  Description of Artificial Sequence: Synthetic oligonucleotide
  Antisense strand to SEQ ID NO: 1296778
cauuuccgggaucaugccc

SEQ ID NO: 1296780 - RNA, 19 nt, Artificial Sequence
  Description of Artificial Sequence: Synthetic oligonucleotide
  Sense strand starting at position 3176 of SEQ ID NO: 1241750
cccugcaaugcuugaagua

SEQ ID NO: 1296781 - RNA, 19 nt, Artificial Sequence
  Description of Artificial Sequence: Synthetic oligonucleotide
  Antisense strand to SEQ ID NO: 1296780
uacuucaagcauugcaggg

SEQ ID NO: 1296782 - RNA, 19 nt, Artificial Sequence
  Description of Artificial Sequence: Synthetic oligonucleotide
  Sense strand starting at position 3177 of SEQ ID NO: 1241750
ccugcaaugcuugaaguau

SEQ ID NO: 1296783 - RNA, 19 nt, Artificial Sequence
  Description of Artificial Sequence: Synthetic oligonucleotide
  Antisense strand to SEQ ID NO: 1296782
auacuucaagcauugcagg

SEQ ID NO: 1296784 - RNA, 19 nt, Artificial Sequence
  Description of Artificial Sequence: Synthetic oligonucleotide
  Sense strand starting at position 3291 of SEQ ID NO: 1241750
guggcaggugccagaugua

SEQ ID NO: 1296785 - RNA, 19 nt, Artificial Sequence
  Description of Artificial Sequence: Synthetic oligonucleotide
  Antisense strand to SEQ ID NO: 1296784
uacaucuggcaccugccac

SEQ ID NO: 1296786 - RNA, 19 nt, Artificial Sequence
  Description of Artificial Sequence: Synthetic oligonucleotide
  Sense strand starting at position 3298 of SEQ ID NO: 1241750
gugccagauguagagaaga

SEQ ID NO: 1296787 - RNA, 19 nt, Artificial Sequence
  Description of Artificial Sequence: Synthetic oligonucleotide
  Antisense strand to SEQ ID NO: 1296786
ucuucucuacaucuggcac

SEQ ID NO: 1296788 - RNA, 19 nt, Artificial Sequence
  Description of Artificial Sequence: Synthetic oligonucleotide
  Sense strand starting at position 3314 of SEQ ID NO: 1241750
agagaaggcgauugcuaga

SEQ ID NO: 1296789 - RNA, 19 nt, Artificial Sequence
  Description of Artificial Sequence: Synthetic oligonucleotide
  Antisense strand to SEQ ID NO: 1296788
ucuagcaaucgccuucucu

SEQ ID NO: 1296790 - RNA, 19 nt, Artificial Sequence
  Description of Artificial Sequence: Synthetic oligonucleotide
  Sense strand starting at position 3321 of SEQ ID NO: 1241750
gcgauugcuagagagccuu

SEQ ID NO: 1296791 - RNA, 19 nt, Artificial Sequence
  Description of Artificial Sequence: Synthetic oligonucleotide
  Antisense strand to SEQ ID NO: 1296790
aaggcucucuagcaaucgc

SEQ ID NO: 1296792 - RNA, 19 nt, Artificial Sequence
  Description of Artificial Sequence: Synthetic oligonucleotide
  Sense strand starting at position 3359 of SEQ ID NO: 1241750
uuauucguguccucaagau

SEQ ID NO: 1296793 - RNA, 19 nt, Artificial Sequence
  Description of Artificial Sequence: Synthetic oligonucleotide
  Antisense strand to SEQ ID NO: 1296792
aucuugaggacacgaauaa

SEQ ID NO: 1296794 - RNA, 19 nt, Artificial Sequence
  Description of Artificial Sequence: Synthetic oligonucleotide
  Sense strand starting at position 3363 of SEQ ID NO: 1241750
ucguguccucaagauaaac

SEQ ID NO: 1296795 - RNA, 19 nt, Artificial Sequence
  Description of Artificial Sequence: Synthetic oligonucleotide
  Antisense strand to SEQ ID NO: 1296794
guuuaucuugaggacacga

SEQ ID NO: 1296796 - RNA, 19 nt, Artificial Sequence
  Description of Artificial Sequence: Synthetic oligonucleotide
  Sense strand starting at position 3388 of SEQ ID NO: 1241750
uuaauuacugucgaugaau

SEQ ID NO: 1296797 - RNA, 19 nt, Artificial Sequence
  Description of Artificial Sequence: Synthetic oligonucleotide
  Antisense strand to SEQ ID NO: 1296796
auucaucgacaguaauuaa

SEQ ID NO: 1296798 - RNA, 19 nt, Artificial Sequence
  Description of Artificial Sequence: Synthetic oligonucleotide
  Sense strand starting at position 3390 of SEQ ID NO: 1241750
aauuacugucgaugaaugu

SEQ ID NO: 1296799 - RNA, 19 nt, Artificial Sequence
  Description of Artificial Sequence: Synthetic oligonucleotide
  Antisense strand to SEQ ID NO: 1296798
acauucaucgacaguaauu

SEQ ID NO: 1296800 - RNA, 19 nt, Artificial Sequence
  Description of Artificial Sequence: Synthetic oligonucleotide
  Sense strand starting at position 3440 of SEQ ID NO: 1241750
cagauaauccuagggaguu

SEQ ID NO: 1296801 - RNA, 19 nt, Artificial Sequence
  Description of Artificial Sequence: Synthetic oligonucleotide
  Antisense strand to SEQ ID NO: 1296800
aacucccuaggauuaucug

SEQ ID NO: 1296802 - RNA, 19 nt, Artificial Sequence
  Description of Artificial Sequence: Synthetic oligonucleotide
  Sense strand starting at position 3450 of SEQ ID NO: 1241750
uagggaguugcaggucaaa

SEQ ID NO: 1296803 - RNA, 19 nt, Artificial Sequence
  Description of Artificial Sequence: Synthetic oligonucleotide
  Antisense strand to SEQ ID NO: 1296802
uuugaccugcaacucccua

SEQ ID NO: 1296804 - RNA, 19 nt, Artificial Sequence
  Description of Artificial Sequence: Synthetic oligonucleotide
  Sense strand starting at position 3453 of SEQ ID NO: 1241750
ggaguugcaggucaaauau

SEQ ID NO: 1296805 - RNA, 19 nt, Artificial Sequence
  Description of Artificial Sequence: Synthetic oligonucleotide
  Antisense strand to SEQ ID NO: 1296804
auauuugaccugcaacucc

SEQ ID NO: 1296806 - RNA, 19 nt, Artificial Sequence
  Description of Artificial Sequence: Synthetic oligonucleotide
  Sense strand starting at position 3623 of SEQ ID NO: 1241750
aaacaauucgcagagagcu

SEQ ID NO: 1296807 - RNA, 19 nt, Artificial Sequence
  Description of Artificial Sequence: Synthetic oligonucleotide
  Antisense strand to SEQ ID NO: 1296806
agcucucugcgaauuguuu

SEQ ID NO: 1296808 - RNA, 19 nt, Artificial Sequence
  Description of Artificial Sequence: Synthetic oligonucleotide
  Sense strand starting at position 3625 of SEQ ID NO: 1241750
acaauucgcagagagcuua

SEQ ID NO: 1296809 - RNA, 19 nt, Artificial Sequence
  Description of Artificial Sequence: Synthetic oligonucleotide
  Antisense strand to SEQ ID NO: 1296808
uaagcucucugcgaauugu

SEQ ID NO: 1296810 - RNA, 19 nt, Artificial Sequence
  Description of Artificial Sequence: Synthetic oligonucleotide
  Sense strand starting at position 3726 of SEQ ID NO: 1241750
ggcccuucuccaggcaaua

SEQ ID NO: 1296811 - RNA, 19 nt, Artificial Sequence
  Description of Artificial Sequence: Synthetic oligonucleotide
  Antisense strand to SEQ ID NO: 1296810
uauugccuggagaagggcc

SEQ ID NO: 1296812 - RNA, 19 nt, Artificial Sequence
  Description of Artificial Sequence: Synthetic oligonucleotide
  Sense strand starting at position 3739 of SEQ ID NO: 1241750
gcaauauuggaagguaauu

SEQ ID NO: 1296813 - RNA, 19 nt, Artificial Sequence
  Description of Artificial Sequence: Synthetic oligonucleotide
  Antisense strand to SEQ ID NO: 1296812
aauuaccuuccaauauugc

SEQ ID NO: 1296814 - RNA, 19 nt, Artificial Sequence
  Description of Artificial Sequence: Synthetic oligonucleotide
  Sense strand starting at position 3784 of SEQ ID NO: 1241750
gggauauggcaaugaguag

SEQ ID NO: 1296815 - RNA, 19 nt, Artificial Sequence
  Description of Artificial Sequence: Synthetic oligonucleotide
  Antisense strand to SEQ ID NO: 1296814
cuacucauugccauauccc

SEQ ID NO: 1296816 - RNA, 19 nt, Artificial Sequence
  Description of Artificial Sequence: Synthetic oligonucleotide
  Sense strand starting at position 3881 of SEQ ID NO: 1241750
ugcaauucucaguauaagc

SEQ ID NO: 1296817 - RNA, 19 nt, Artificial Sequence
  Description of Artificial Sequence: Synthetic oligonucleotide
  Antisense strand to SEQ ID NO: 1296816
gcuuauacugagaauugca

SEQ ID NO: 1296818 - RNA, 19 nt, Artificial Sequence
  Description of Artificial Sequence: Synthetic oligonucleotide
  Sense strand starting at position 3891 of SEQ ID NO: 1241750
aguauaagcccuuugucgu

SEQ ID NO: 1296819 - RNA, 19 nt, Artificial Sequence
  Description of Artificial Sequence: Synthetic oligonucleotide
  Antisense strand to SEQ ID NO: 1296818
acgacaaagggcuuauacu

SEQ ID NO: 1296820 - RNA, 19 nt, Artificial Sequence
  Description of Artificial Sequence: Synthetic oligonucleotide
  Sense strand starting at position 3906 of SEQ ID NO: 1241750
ucguuucugugccuauuua

SEQ ID NO: 1296821 - RNA, 19 nt, Artificial Sequence
  Description of Artificial Sequence: Synthetic oligonucleotide
  Antisense strand to SEQ ID NO: 1296820
uaaauaggcacagaaacga

SEQ ID NO: 1296822 - RNA, 19 nt, Artificial Sequence
  Description of Artificial Sequence: Synthetic oligonucleotide
  Sense strand starting at position 3907 of SEQ ID NO: 1241750
cguuucugugccuauuuaa

SEQ ID NO: 1296823 - RNA, 19 nt, Artificial Sequence
  Description of Artificial Sequence: Synthetic oligonucleotide
  Antisense strand to SEQ ID NO: 1296822
uuaaauaggcacagaaacg

SEQ ID NO: 1296824 - RNA, 19 nt, Artificial Sequence
  Description of Artificial Sequence: Synthetic oligonucleotide
  Sense strand starting at position 3929 of SEQ ID NO: 1241750
cuccuaaagguguaauuga

SEQ ID NO: 1296825 - RNA, 19 nt, Artificial Sequence
  Description of Artificial Sequence: Synthetic oligonucleotide
  Antisense strand to SEQ ID NO: 1296824
ucaauuacaccuuuaggag

SEQ ID NO: 1296826 - RNA, 19 nt, Artificial Sequence
  Description of Artificial Sequence: Synthetic oligonucleotide
  Sense strand starting at position 3936 of SEQ ID NO: 1241750
agguguaauugacuaggaa

SEQ ID NO: 1296827 - RNA, 19 nt, Artificial Sequence
  Description of Artificial Sequence: Synthetic oligonucleotide
  Antisense strand to SEQ ID NO: 1296826
uuccuagucaauuacaccu

SEQ ID NO: 1296828 - RNA, 19 nt, Artificial Sequence
  Description of Artificial Sequence: Synthetic oligonucleotide
  Sense strand starting at position 3940 of SEQ ID NO: 1241750
guaauugacuaggaaggau

SEQ ID NO: 1296829 - RNA, 19 nt, Artificial Sequence
  Description of Artificial Sequence: Synthetic oligonucleotide
  Antisense strand to SEQ ID NO: 1296828
auccuuccuagucaauuac

SEQ ID NO: 1296830 - RNA, 19 nt, Artificial Sequence
  Description of Artificial Sequence: Synthetic oligonucleotide
  Sense strand starting at position 135 of SEQ ID NO: 1241751
ugugcccuucccuagagau

SEQ ID NO: 1296831 - RNA, 19 nt, Artificial Sequence
  Description of Artificial Sequence: Synthetic oligonucleotide
  Antisense strand to SEQ ID NO: 1296830
aucucuagggaagggcaca

SEQ ID NO: 1296832 - RNA, 19 nt, Artificial Sequence
  Description of Artificial Sequence: Synthetic oligonucleotide
  Sense strand starting at position 154 of SEQ ID NO: 1241751
ccuacuuucugucuggauu

SEQ ID NO: 1296833 - RNA, 19 nt, Artificial Sequence
  Description of Artificial Sequence: Synthetic oligonucleotide
  Antisense strand to SEQ ID NO: 1296832
aauccagacagaaaguagg

SEQ ID NO: 1296834 - RNA, 19 nt, Artificial Sequence
  Description of Artificial Sequence: Synthetic oligonucleotide
  Sense strand starting at position 369 of SEQ ID NO: 1241751
gcaacuggacauuaucuau

SEQ ID NO: 1296835 - RNA, 19 nt, Artificial Sequence
  Description of Artificial Sequence: Synthetic oligonucleotide
  Antisense strand to SEQ ID NO: 1296834
auagauaauguccaguugc

SEQ ID NO: 1296836 - RNA, 19 nt, Artificial Sequence
  Description of Artificial Sequence: Synthetic oligonucleotide
  Sense strand starting at position 524 of SEQ ID NO: 1241751
ccaucugugugaucuugga

SEQ ID NO: 1296837 - RNA, 19 nt, Artificial Sequence
  Description of Artificial Sequence: Synthetic oligonucleotide
  Antisense strand to SEQ ID NO: 1296836
uccaagaucacacagaugg

SEQ ID NO: 1296838 - RNA, 19 nt, Artificial Sequence
  Description of Artificial Sequence: Synthetic oligonucleotide
  Sense strand starting at position 639 of SEQ ID NO: 1241751
acaccuucugggcacaaau

SEQ ID NO: 1296839 - RNA, 19 nt, Artificial Sequence
  Description of Artificial Sequence: Synthetic oligonucleotide
  Antisense strand to SEQ ID NO: 1296838
auuugugcccagaaggugu

SEQ ID NO: 1296840 - RNA, 19 nt, Artificial Sequence
  Description of Artificial Sequence: Synthetic oligonucleotide
  Sense strand starting at position 739 of SEQ ID NO: 1241751
gagacagggucgucucaca

SEQ ID NO: 1296841 - RNA, 19 nt, Artificial Sequence
  Description of Artificial Sequence: Synthetic oligonucleotide
  Antisense strand to SEQ ID NO: 1296840
ugugagacgacccugucuc

SEQ ID NO: 1296842 - RNA, 19 nt, Artificial Sequence
  Description of Artificial Sequence: Synthetic oligonucleotide
  Sense strand starting at position 847 of SEQ ID NO: 1241751
ugugucuguccugauagau

SEQ ID NO: 1296843 - RNA, 19 nt, Artificial Sequence
  Description of Artificial Sequence: Synthetic oligonucleotide
  Antisense strand to SEQ ID NO: 1296842
aucuaucaggacagacaca

SEQ ID NO: 1296844 - RNA, 19 nt, Artificial Sequence
  Description of Artificial Sequence: Synthetic oligonucleotide
  Sense strand starting at position 928 of SEQ ID NO: 1241751
ugugaagaguuguugauuc

SEQ ID NO: 1296845 - RNA, 19 nt, Artificial Sequence
  Description of Artificial Sequence: Synthetic oligonucleotide
  Antisense strand to SEQ ID NO: 1296844
gaaucaacaacucuucaca

SEQ ID NO: 1296846 - RNA, 19 nt, Artificial Sequence
  Description of Artificial Sequence: Synthetic oligonucleotide
  Sense strand starting at position 930 of SEQ ID NO: 1241751
ugaagaguuguugauucag

SEQ ID NO: 1296847 - RNA, 19 nt, Artificial Sequence
  Description of Artificial Sequence: Synthetic oligonucleotide
  Antisense strand to SEQ ID NO: 1296846
cugaaucaacaacucuuca

SEQ ID NO: 1296848 - RNA, 19 nt, Artificial Sequence
  Description of Artificial Sequence: Synthetic oligonucleotide
  Sense strand starting at position 946 of SEQ ID NO: 1241751
caggguggguguuuaauaa

SEQ ID NO: 1296849 - RNA, 19 nt, Artificial Sequence
  Description of Artificial Sequence: Synthetic oligonucleotide
  Antisense strand to SEQ ID NO: 1296848
uuauuaaacacccacccug

SEQ ID NO: 1296850 - RNA, 19 nt, Artificial Sequence
  Description of Artificial Sequence: Synthetic oligonucleotide
  Sense strand starting at position 953 of SEQ ID NO: 1241751
gguguuuaauaacuauuag

SEQ ID NO: 1296851 - RNA, 19 nt, Artificial Sequence
  Description of Artificial Sequence: Synthetic oligonucleotide
  Antisense strand to SEQ ID NO: 1296850
cuaauaguuauuaaacacc

SEQ ID NO: 1296852 - RNA, 19 nt, Artificial Sequence
  Description of Artificial Sequence: Synthetic oligonucleotide
  Sense strand starting at position 981 of SEQ ID NO: 1241751
ugaggucacaccgauaagu

SEQ ID NO: 1296853 - RNA, 19 nt, Artificial Sequence
  Description of Artificial Sequence: Synthetic oligonucleotide
  Antisense strand to SEQ ID NO: 1296852
acuuaucggugugaccuca

SEQ ID NO: 1296854 - RNA, 19 nt, Artificial Sequence
  Description of Artificial Sequence: Synthetic oligonucleotide
  Sense strand starting at position 983 of SEQ ID NO: 1241751
aggucacaccgauaagucu

SEQ ID NO: 1296855 - RNA, 19 nt, Artificial Sequence
  Description of Artificial Sequence: Synthetic oligonucleotide
  Antisense strand to SEQ ID NO: 1296854
agacuuaucggugugaccu

SEQ ID NO: 1296856 - RNA, 19 nt, Artificial Sequence
  Description of Artificial Sequence: Synthetic oligonucleotide
  Sense strand starting at position 998 of SEQ ID NO: 1241751
gucugaugcccauacacua

SEQ ID NO: 1296857 - RNA, 19 nt, Artificial Sequence
  Description of Artificial Sequence: Synthetic oligonucleotide
  Antisense strand to SEQ ID NO: 1296856
uaguguaugggcaucagac

SEQ ID NO: 1296858 - RNA, 19 nt, Artificial Sequence
  Description of Artificial Sequence: Synthetic oligonucleotide
  Sense strand starting at position 1197 of SEQ ID NO: 1241751
gguugcuuucagcauggaa

SEQ ID NO: 1296859 - RNA, 19 nt, Artificial Sequence
  Description of Artificial Sequence: Synthetic oligonucleotide
  Antisense strand to SEQ ID NO: 1296858
uuccaugcugaaagcaacc

SEQ ID NO: 1296860 - RNA, 19 nt, Artificial Sequence
  Description of Artificial Sequence: Synthetic oligonucleotide
  Sense strand starting at position 1250 of SEQ ID NO: 1241751
caauguuaguggcuaugau

SEQ ID NO: 1296861 - RNA, 19 nt, Artificial Sequence
  Description of Artificial Sequence: Synthetic oligonucleotide
  Antisense strand to SEQ ID NO: 1296860
aucauagccacuaacauug

SEQ ID NO: 1296862 - RNA, 19 nt, Artificial Sequence
  Description of Artificial Sequence: Synthetic oligonucleotide
  Sense strand starting at position 1260 of SEQ ID NO: 1241751
ggcuaugaucaucaucacu

SEQ ID NO: 1296863 - RNA, 19 nt, Artificial Sequence
  Description of Artificial Sequence: Synthetic oligonucleotide
  Antisense strand to SEQ ID NO: 1296862
agugaugaugaucauagcc

SEQ ID NO: 1296864 - RNA, 19 nt, Artificial Sequence
  Description of Artificial Sequence: Synthetic oligonucleotide
  Sense strand starting at position 1286 of SEQ ID NO: 1241751
uuucuuguuguugacgaua

SEQ ID NO: 1296865 - RNA, 19 nt, Artificial Sequence
  Description of Artificial Sequence: Synthetic oligonucleotide
  Antisense strand to SEQ ID NO: 1296864
uaucgucaacaacaagaaa

SEQ ID NO: 1296866 - RNA, 19 nt, Artificial Sequence
  Description of Artificial Sequence: Synthetic oligonucleotide
  Sense strand starting at position 1289 of SEQ ID NO: 1241751
cuuguuguugacgauaaga

SEQ ID NO: 1296867 - RNA, 19 nt, Artificial Sequence
  Description of Artificial Sequence: Synthetic oligonucleotide
  Antisense strand to SEQ ID NO: 1296866
ucuuaucgucaacaacaag

SEQ ID NO: 1296868 - RNA, 19 nt, Artificial Sequence
  Description of Artificial Sequence: Synthetic oligonucleotide
  Sense strand starting at position 1360 of SEQ ID NO: 1241751
cugggaggcaagugaucuu

SEQ ID NO: 1296869 - RNA, 19 nt, Artificial Sequence
  Description of Artificial Sequence: Synthetic oligonucleotide
  Antisense strand to SEQ ID NO: 1296868
aagaucacuugccucccag

SEQ ID NO: 1296870 - RNA, 19 nt, Artificial Sequence
  Description of Artificial Sequence: Synthetic oligonucleotide
  Sense strand starting at position 1422 of SEQ ID NO: 1241751
gggucauuguaucuacucu

SEQ ID NO: 1296871 - RNA, 19 nt, Artificial Sequence
  Description of Artificial Sequence: Synthetic oligonucleotide
  Antisense strand to SEQ ID NO: 1296870
agaguagauacaaugaccc

SEQ ID NO: 1296872 - RNA, 19 nt, Artificial Sequence
  Description of Artificial Sequence: Synthetic oligonucleotide
  Sense strand starting at position 1533 of SEQ ID NO: 1241751
auuugguggcgaugugaga

SEQ ID NO: 1296873 - RNA, 19 nt, Artificial Sequence
  Description of Artificial Sequence: Synthetic oligonucleotide
  Antisense strand to SEQ ID NO: 1296872
ucucacaucgccaccaaau

SEQ ID NO: 1296874 - RNA, 19 nt, Artificial Sequence
  Description of Artificial Sequence: Synthetic oligonucleotide
  Sense strand starting at position 1724 of SEQ ID NO: 1241751
ugaguauacuacuuaccag

SEQ ID NO: 1296875 - RNA, 19 nt, Artificial Sequence
  Description of Artificial Sequence: Synthetic oligonucleotide
  Antisense strand to SEQ ID NO: 1296874
cugguaaguaguauacuca

SEQ ID NO: 1296876 - RNA, 19 nt, Artificial Sequence
  Description of Artificial Sequence: Synthetic oligonucleotide
  Sense strand starting at position 1727 of SEQ ID NO: 1241751
guauacuacuuaccaguuu

SEQ ID NO: 1296877 - RNA, 19 nt, Artificial Sequence
  Description of Artificial Sequence: Synthetic oligonucleotide
  Antisense strand to SEQ ID NO: 1296876
aaacugguaaguaguauac

SEQ ID NO: 1296878 - RNA, 19 nt, Artificial Sequence
  Description of Artificial Sequence: Synthetic oligonucleotide
  Sense strand starting at position 3323 of SEQ ID NO: 1241751
aaaccucuccggcaggaua

SEQ ID NO: 1296879 - RNA, 19 nt, Artificial Sequence
  Description of Artificial Sequence: Synthetic oligonucleotide
  Antisense strand to SEQ ID NO: 1296878
uauccugccggagagguuu

SEQ ID NO: 1296880 - RNA, 19 nt, Artificial Sequence
  Description of Artificial Sequence: Synthetic oligonucleotide
  Sense strand starting at position 3443 of SEQ ID NO: 1241751
gggugcuaagacugacuuu

SEQ ID NO: 1296881 - RNA, 19 nt, Artificial Sequence
  Description of Artificial Sequence: Synthetic oligonucleotide
  Antisense strand to SEQ ID NO: 1296880
aaagucagucuuagcaccc

SEQ ID NO: 1296882 - RNA, 19 nt, Artificial Sequence
  Description of Artificial Sequence: Synthetic oligonucleotide
  Sense strand starting at position 3464 of SEQ ID NO: 1241751
uagggucagcuccacuuaa

SEQ ID NO: 1296883 - RNA, 19 nt, Artificial Sequence
  Description of Artificial Sequence: Synthetic oligonucleotide
  Antisense strand to SEQ ID NO: 1296882
uuaaguggagcugacccua

SEQ ID NO: 1296884 - RNA, 19 nt, Artificial Sequence
  Description of Artificial Sequence: Synthetic oligonucleotide
  Sense strand starting at position 3522 of SEQ ID NO: 1241751
ccaggucuuccagaacuuu

SEQ ID NO: 1296885 - RNA, 19 nt, Artificial Sequence
  Description of Artificial Sequence: Synthetic oligonucleotide
  Antisense strand to SEQ ID NO: 1296884
aaaguucuggaagaccugg

SEQ ID NO: 1296886 - RNA, 19 nt, Artificial Sequence
  Description of Artificial Sequence: Synthetic oligonucleotide
  Sense strand starting at position 3565 of SEQ ID NO: 1241751
aggacaugccucugggaua

SEQ ID NO: 1296887 - RNA, 19 nt, Artificial Sequence
  Description of Artificial Sequence: Synthetic oligonucleotide
  Antisense strand to SEQ ID NO: 1296886
uaucccagaggcauguccu

SEQ ID NO: 1296888 - RNA, 19 nt, Artificial Sequence
  Description of Artificial Sequence: Synthetic oligonucleotide
  Sense strand starting at position 3648 of SEQ ID NO: 1241751
cuuugaaguccauggcuga

SEQ ID NO: 1296889 - RNA, 19 nt, Artificial Sequence
  Description of Artificial Sequence: Synthetic oligonucleotide
  Antisense strand to SEQ ID NO: 1296888
ucagccauggacuucaaag

SEQ ID NO: 1296890 - RNA, 19 nt, Artificial Sequence
  Description of Artificial Sequence: Synthetic oligonucleotide
  Sense strand starting at position 3668 of SEQ ID NO: 1241751
guuccaugucccuaacuca

SEQ ID NO: 1296891 - RNA, 19 nt, Artificial Sequence
  Description of Artificial Sequence: Synthetic oligonucleotide
  Antisense strand to SEQ ID NO: 1296890
ugaguuagggacauggaac

SEQ ID NO: 1296892 - RNA, 19 nt, Artificial Sequence
  Description of Artificial Sequence: Synthetic oligonucleotide
  Sense strand starting at position 3710 of SEQ ID NO: 1241751
aggcuuuaccaagaucuca

SEQ ID NO: 1296893 - RNA, 19 nt, Artificial Sequence
  Description of Artificial Sequence: Synthetic oligonucleotide
  Antisense strand to SEQ ID NO: 1296892
ugagaucuugguaaagccu

SEQ ID NO: 1296894 - RNA, 19 nt, Artificial Sequence
  Description of Artificial Sequence: Synthetic oligonucleotide
  Sense strand starting at position 3771 of SEQ ID NO: 1241751
ggagcuaucugagcaguga

SEQ ID NO: 1296895 - RNA, 19 nt, Artificial Sequence
  Description of Artificial Sequence: Synthetic oligonucleotide
  Antisense strand to SEQ ID NO: 1296894
ucacugcucagauagcucc

SEQ ID NO: 1296896 - RNA, 19 nt, Artificial Sequence
  Description of Artificial Sequence: Synthetic oligonucleotide
  Sense strand starting at position 3772 of SEQ ID NO: 1241751
gagcuaucugagcagugag

SEQ ID NO: 1296897 - RNA, 19 nt, Artificial Sequence
  Description of Artificial Sequence: Synthetic oligonucleotide
  Antisense strand to SEQ ID NO: 1296896
cucacugcucagauagcuc

SEQ ID NO: 1296898 - RNA, 19 nt, Artificial Sequence
  Description of Artificial Sequence: Synthetic oligonucleotide
  Sense strand starting at position 3775 of SEQ ID NO: 1241751
cuaucugagcagugagguu

SEQ ID NO: 1296899 - RNA, 19 nt, Artificial Sequence
  Description of Artificial Sequence: Synthetic oligonucleotide
  Antisense strand to SEQ ID NO: 1296898
aaccucacugcucagauag

SEQ ID NO: 1296900 - RNA, 19 nt, Artificial Sequence
  Description of Artificial Sequence: Synthetic oligonucleotide
  Sense strand starting at position 3821 of SEQ ID NO: 1241751
aagugaacuacuggugugu

SEQ ID NO: 1296901 - RNA, 19 nt, Artificial Sequence
  Description of Artificial Sequence: Synthetic oligonucleotide
  Antisense strand to SEQ ID NO: 1296900
acacaccaguaguucacuu

SEQ ID NO: 1296902 - RNA, 19 nt, Artificial Sequence
  Description of Artificial Sequence: Synthetic oligonucleotide
  Sense strand starting at position 3842 of SEQ ID NO: 1241751
gugugaucaagguagucuu

SEQ ID NO: 1296903 - RNA, 19 nt, Artificial Sequence
  Description of Artificial Sequence: Synthetic oligonucleotide
  Antisense strand to SEQ ID NO: 1296902
aagacuaccuugaucacac

SEQ ID NO: 1296904 - RNA, 19 nt, Artificial Sequence
  Description of Artificial Sequence: Synthetic oligonucleotide
  Sense strand starting at position 3921 of SEQ ID NO: 1241751
ucauaauuguuagcagauu

SEQ ID NO: 1296905 - RNA, 19 nt, Artificial Sequence
  Description of Artificial Sequence: Synthetic oligonucleotide
  Antisense strand to SEQ ID NO: 1296904
aaucugcuaacaauuauga

SEQ ID NO: 1296906 - RNA, 19 nt, Artificial Sequence
  Description of Artificial Sequence: Synthetic oligonucleotide
  Sense strand starting at position 3945 of SEQ ID NO: 1241751
ggucuaggauucucaagag

SEQ ID NO: 1296907 - RNA, 19 nt, Artificial Sequence
  Description of Artificial Sequence: Synthetic oligonucleotide
  Antisense strand to SEQ ID NO: 1296906
cucuugagaauccuagacc

SEQ ID NO: 1296908 - RNA, 19 nt, Artificial Sequence
  Description of Artificial Sequence: Synthetic oligonucleotide
  Sense strand starting at position 3974 of SEQ ID NO: 1241751
cguguuagaggugaccaga

SEQ ID NO: 1296909 - RNA, 19 nt, Artificial Sequence
  Description of Artificial Sequence: Synthetic oligonucleotide
  Antisense strand to SEQ ID NO: 1296908
ucuggucaccucuaacacg

SEQ ID NO: 1296910 - RNA, 19 nt, Artificial Sequence
  Description of Artificial Sequence: Synthetic oligonucleotide
  Sense strand starting at position 34 of SEQ ID NO: 1241752
ugacuuugggcauagcuua

SEQ ID NO: 1296911 - RNA, 19 nt, Artificial Sequence
  Description of Artificial Sequence: Synthetic oligonucleotide
  Antisense strand to SEQ ID NO: 1296910
uaagcuaugcccaaaguca

SEQ ID NO: 1296912 - RNA, 19 nt, Artificial Sequence
  Description of Artificial Sequence: Synthetic oligonucleotide
  Sense strand starting at position 165 of SEQ ID NO: 1241752
auaguaagugcccaacaaa

SEQ ID NO: 1296913 - RNA, 19 nt, Artificial Sequence
  Description of Artificial Sequence: Synthetic oligonucleotide
  Antisense strand to SEQ ID NO: 1296912
uuuguugggcacuuacuau

SEQ ID NO: 1296914 - RNA, 19 nt, Artificial Sequence
  Description of Artificial Sequence: Synthetic oligonucleotide
  Sense strand starting at position 544 of SEQ ID NO: 1241752
ugaauauggguuggguuua

SEQ ID NO: 1296915 - RNA, 19 nt, Artificial Sequence
  Description of Artificial Sequence: Synthetic oligonucleotide
  Antisense strand to SEQ ID NO: 1296914
uaaacccaacccauauuca

SEQ ID NO: 1296916 - RNA, 19 nt, Artificial Sequence
  Description of Artificial Sequence: Synthetic oligonucleotide
  Sense strand starting at position 565 of SEQ ID NO: 1241752
gacgaaguuccaggaauaa

SEQ ID NO: 1296917 - RNA, 19 nt, Artificial Sequence
  Description of Artificial Sequence: Synthetic oligonucleotide
  Antisense strand to SEQ ID NO: 1296916
uuauuccuggaacuucguc

SEQ ID NO: 1296918 - RNA, 19 nt, Artificial Sequence
  Description of Artificial Sequence: Synthetic oligonucleotide
  Sense strand starting at position 587 of SEQ ID NO: 1241752
gcagaagugguauaucacu

SEQ ID NO: 1296919 - RNA, 19 nt, Artificial Sequence
  Description of Artificial Sequence: Synthetic oligonucleotide
  Antisense strand to SEQ ID NO: 1296918
agugauauaccacuucugc

SEQ ID NO: 1296920 - RNA, 19 nt, Artificial Sequence
  Description of Artificial Sequence: Synthetic oligonucleotide
  Sense strand starting at position 592 of SEQ ID NO: 1241752
agugguauaucacuuacag

SEQ ID NO: 1296921 - RNA, 19 nt, Artificial Sequence
  Description of Artificial Sequence: Synthetic oligonucleotide
  Antisense strand to SEQ ID NO: 1296920
cuguaagugauauaccacu

SEQ ID NO: 1296922 - RNA, 19 nt, Artificial Sequence
  Description of Artificial Sequence: Synthetic oligonucleotide
  Sense strand starting at position 729 of SEQ ID NO: 1241752
caaauugagccuugagaag

SEQ ID NO: 1296923 - RNA, 19 nt, Artificial Sequence
  Description of Artificial Sequence: Synthetic oligonucleotide
  Antisense strand to SEQ ID NO: 1296922
cuucucaaggcucaauuug

SEQ ID NO: 1296924 - RNA, 19 nt, Artificial Sequence
  Description of Artificial Sequence: Synthetic oligonucleotide
  Sense strand starting at position 1112 of SEQ ID NO: 1241752
agaguucuccugcaaauau

SEQ ID NO: 1296925 - RNA, 19 nt, Artificial Sequence
  Description of Artificial Sequence: Synthetic oligonucleotide
  Antisense strand to SEQ ID NO: 1296924
auauuugcaggagaacucu

SEQ ID NO: 1296926 - RNA, 19 nt, Artificial Sequence
  Description of Artificial Sequence: Synthetic oligonucleotide
  Sense strand starting at position 1191 of SEQ ID NO: 1241752
gucuuuccugaauagucau

SEQ ID NO: 1296927 - RNA, 19 nt, Artificial Sequence
  Description of Artificial Sequence: Synthetic oligonucleotide
  Antisense strand to SEQ ID NO: 1296926
augacuauucaggaaagac

SEQ ID NO: 1296928 - RNA, 19 nt, Artificial Sequence
  Description of Artificial Sequence: Synthetic oligonucleotide
  Sense strand starting at position 1197 of SEQ ID NO: 1241752
ccugaauagucauucggaa

SEQ ID NO: 1296929 - RNA, 19 nt, Artificial Sequence
  Description of Artificial Sequence: Synthetic oligonucleotide
  Antisense strand to SEQ ID NO: 1296928
uuccgaaugacuauucagg

SEQ ID NO: 1296930 - RNA, 19 nt, Artificial Sequence
  Description of Artificial Sequence: Synthetic oligonucleotide
  Sense strand starting at position 1199 of SEQ ID NO: 1241752
ugaauagucauucggaagg

SEQ ID NO: 1296931 - RNA, 19 nt, Artificial Sequence
  Description of Artificial Sequence: Synthetic oligonucleotide
  Antisense strand to SEQ ID NO: 1296930
ccuuccgaaugacuauuca

SEQ ID NO: 1296932 - RNA, 19 nt, Artificial Sequence
  Description of Artificial Sequence: Synthetic oligonucleotide
  Sense strand starting at position 1378 of SEQ ID NO: 1241752
uaauaaggacaccgugaau

SEQ ID NO: 1296933 - RNA, 19 nt, Artificial Sequence
  Description of Artificial Sequence: Synthetic oligonucleotide
  Antisense strand to SEQ ID NO: 1296932
auucacgguguccuuauua

SEQ ID NO: 1296934 - RNA, 19 nt, Artificial Sequence
  Description of Artificial Sequence: Synthetic oligonucleotide
  Sense strand starting at position 1391 of SEQ ID NO: 1241752
gugaauaauaucuguggac

SEQ ID NO: 1296935 - RNA, 19 nt, Artificial Sequence
  Description of Artificial Sequence: Synthetic oligonucleotide
  Antisense strand to SEQ ID NO: 1296934
guccacagauauuauucac

SEQ ID NO: 1296936 - RNA, 19 nt, Artificial Sequence
  Description of Artificial Sequence: Synthetic oligonucleotide
  Sense strand starting at position 1392 of SEQ ID NO: 1241752
ugaauaauaucuguggacu

SEQ ID NO: 1296937 - RNA, 19 nt, Artificial Sequence
  Description of Artificial Sequence: Synthetic oligonucleotide
  Antisense strand to SEQ ID NO: 1296936
aguccacagauauuauuca

SEQ ID NO: 1296938 - RNA, 19 nt, Artificial Sequence
  Description of Artificial Sequence: Synthetic oligonucleotide
  Sense strand starting at position 1393 of SEQ ID NO: 1241752
gaauaauaucuguggacua

SEQ ID NO: 1296939 - RNA, 19 nt, Artificial Sequence
  Description of Artificial Sequence: Synthetic oligonucleotide
  Antisense strand to SEQ ID NO: 1296938
uaguccacagauauuauuc

SEQ ID NO: 1296940 - RNA, 19 nt, Artificial Sequence
  Description of Artificial Sequence: Synthetic oligonucleotide
  Sense strand starting at position 1557 of SEQ ID NO: 1241752
agaagugggcucuggaaca

SEQ ID NO: 1296941 - RNA, 19 nt, Artificial Sequence
  Description of Artificial Sequence: Synthetic oligonucleotide
  Antisense strand to SEQ ID NO: 1296940
uguuccagagcccacuucu

SEQ ID NO: 1296942 - RNA, 19 nt, Artificial Sequence
  Description of Artificial Sequence: Synthetic oligonucleotide
  Sense strand starting at position 2101 of SEQ ID NO: 1241752
acgcauuggcguucaccua

SEQ ID NO: 1296943 - RNA, 19 nt, Artificial Sequence
  Description of Artificial Sequence: Synthetic oligonucleotide
  Antisense strand to SEQ ID NO: 1296942
uaggugaacgccaaugcgu

SEQ ID NO: 1296944 - RNA, 19 nt, Artificial Sequence
  Description of Artificial Sequence: Synthetic oligonucleotide
  Sense strand starting at position 2151 of SEQ ID NO: 1241752
aggagagcauucccuuuaa

SEQ ID NO: 1296945 - RNA, 19 nt, Artificial Sequence
  Description of Artificial Sequence: Synthetic oligonucleotide
  Antisense strand to SEQ ID NO: 1296944
uuaaagggaaugcucuccu

SEQ ID NO: 1296946 - RNA, 19 nt, Artificial Sequence
  Description of Artificial Sequence: Synthetic oligonucleotide
  Sense strand starting at position 2438 of SEQ ID NO: 1241752
uacgauuuacuacguuacu

SEQ ID NO: 1296947 - RNA, 19 nt, Artificial Sequence
  Description of Artificial Sequence: Synthetic oligonucleotide
  Antisense strand to SEQ ID NO: 1296946
aguaacguaguaaaucgua

SEQ ID NO: 1296948 - RNA, 19 nt, Artificial Sequence
  Description of Artificial Sequence: Synthetic oligonucleotide
  Sense strand starting at position 2449 of SEQ ID NO: 1241752
acguuacuaugacuaauua

SEQ ID NO: 1296949 - RNA, 19 nt, Artificial Sequence
  Description of Artificial Sequence: Synthetic oligonucleotide
  Antisense strand to SEQ ID NO: 1296948
uaauuagucauaguaacgu

SEQ ID NO: 1296950 - RNA, 19 nt, Artificial Sequence
  Description of Artificial Sequence: Synthetic oligonucleotide
  Sense strand starting at position 2577 of SEQ ID NO: 1241752
uguagaugagucgggaaau

SEQ ID NO: 1296951 - RNA, 19 nt, Artificial Sequence
  Description of Artificial Sequence: Synthetic oligonucleotide
  Antisense strand to SEQ ID NO: 1296950
auuucccgacucaucuaca

SEQ ID NO: 1296952 - RNA, 19 nt, Artificial Sequence
  Description of Artificial Sequence: Synthetic oligonucleotide
  Sense strand starting at position 2649 of SEQ ID NO: 1241752
guuuaaugaagaggagugu

SEQ ID NO: 1296953 - RNA, 19 nt, Artificial Sequence
  Description of Artificial Sequence: Synthetic oligonucleotide
  Antisense strand to SEQ ID NO: 1296952
acacuccucuucauuaaac

SEQ ID NO: 1296954 - RNA, 19 nt, Artificial Sequence
  Description of Artificial Sequence: Synthetic oligonucleotide
  Sense strand starting at position 3038 of SEQ ID NO: 1241752
gguaauuucucagcuguac

SEQ ID NO: 1296955 - RNA, 19 nt, Artificial Sequence
  Description of Artificial Sequence: Synthetic oligonucleotide
  Antisense strand to SEQ ID NO: 1296954
guacagcugagaaauuacc

SEQ ID NO: 1296956 - RNA, 19 nt, Artificial Sequence
  Description of Artificial Sequence: Synthetic oligonucleotide
  Sense strand starting at position 3056 of SEQ ID NO: 1241752
cugugaguuccuggaggag

SEQ ID NO: 1296957 - RNA, 19 nt, Artificial Sequence
  Description of Artificial Sequence: Synthetic oligonucleotide
  Antisense strand to SEQ ID NO: 1296956
cuccuccaggaacucacag

SEQ ID NO: 1296958 - RNA, 19 nt, Artificial Sequence
  Description of Artificial Sequence: Synthetic oligonucleotide
  Sense strand starting at position 3164 of SEQ ID NO: 1241752
gugagcuuaaccuaaggau

SEQ ID NO: 1296959 - RNA, 19 nt, Artificial Sequence
  Description of Artificial Sequence: Synthetic oligonucleotide
  Antisense strand to SEQ ID NO: 1296958
auccuuagguuaagcucac

SEQ ID NO: 1296960 - RNA, 19 nt, Artificial Sequence
  Description of Artificial Sequence: Synthetic oligonucleotide
  Sense strand starting at position 3473 of SEQ ID NO: 1241752
ccacauaagccuugagaua

SEQ ID NO: 1296961 - RNA, 19 nt, Artificial Sequence
  Description of Artificial Sequence: Synthetic oligonucleotide
  Antisense strand to SEQ ID NO: 1296960
uaucucaaggcuuaugugg

SEQ ID NO: 1296962 - RNA, 19 nt, Artificial Sequence
  Description of Artificial Sequence: Synthetic oligonucleotide
  Sense strand starting at position 3579 of SEQ ID NO: 1241752
uauagaaaccgcgagauaa

SEQ ID NO: 1296963 - RNA, 19 nt, Artificial Sequence
  Description of Artificial Sequence: Synthetic oligonucleotide
  Antisense strand to SEQ ID NO: 1296962
uuaucucgcgguuucuaua

SEQ ID NO: 1296964 - RNA, 19 nt, Artificial Sequence
  Description of Artificial Sequence: Synthetic oligonucleotide
  Sense strand starting at position 3581 of SEQ ID NO: 1241752
uagaaaccgcgagauaaua

SEQ ID NO: 1296965 - RNA, 19 nt, Artificial Sequence
  Description of Artificial Sequence: Synthetic oligonucleotide
  Antisense strand to SEQ ID NO: 1296964
uauuaucucgcgguuucua

SEQ ID NO: 1296966 - RNA, 19 nt, Artificial Sequence
  Description of Artificial Sequence: Synthetic oligonucleotide
  Sense strand starting at position 3614 of SEQ ID NO: 1241752
uugauaaaugcaggcuaau

SEQ ID NO: 1296967 - RNA, 19 nt, Artificial Sequence
  Description of Artificial Sequence: Synthetic oligonucleotide
  Antisense strand to SEQ ID NO: 1296966
auuagccugcauuuaucaa

SEQ ID NO: 1296968 - RNA, 19 nt, Artificial Sequence
  Description of Artificial Sequence: Synthetic oligonucleotide
  Sense strand starting at position 3624 of SEQ ID NO: 1241752
caggcuaauuuguuaguua

SEQ ID NO: 1296969 - RNA, 19 nt, Artificial Sequence
  Description of Artificial Sequence: Synthetic oligonucleotide
  Antisense strand to SEQ ID NO: 1296968
uaacuaacaaauuagccug

SEQ ID NO: 1296970 - RNA, 19 nt, Artificial Sequence
  Description of Artificial Sequence: Synthetic oligonucleotide
  Sense strand starting at position 3627 of SEQ ID NO: 1241752
gcuaauuuguuaguuauca

SEQ ID NO: 1296971 - RNA, 19 nt, Artificial Sequence
  Description of Artificial Sequence: Synthetic oligonucleotide
  Antisense strand to SEQ ID NO: 1296970
ugauaacuaacaaauuagc

SEQ ID NO: 1296972 - RNA, 19 nt, Artificial Sequence
  Description of Artificial Sequence: Synthetic oligonucleotide
  Sense strand starting at position 3635 of SEQ ID NO: 1241752
guuaguuaucagcaauaga

SEQ ID NO: 1296973 - RNA, 19 nt, Artificial Sequence
  Description of Artificial Sequence: Synthetic oligonucleotide
  Antisense strand to SEQ ID NO: 1296972
ucuauugcugauaacuaac

SEQ ID NO: 1296974 - RNA, 19 nt, Artificial Sequence
  Description of Artificial Sequence: Synthetic oligonucleotide
  Sense strand starting at position 3645 of SEQ ID NO: 1241752
agcaauagauaguuaagau

SEQ ID NO: 1296975 - RNA, 19 nt, Artificial Sequence
  Description of Artificial Sequence: Synthetic oligonucleotide
  Antisense strand to SEQ ID NO: 1296974
aucuuaacuaucuauugcu

SEQ ID NO: 1296976 - RNA, 19 nt, Artificial Sequence
  Description of Artificial Sequence: Synthetic oligonucleotide
  Sense strand starting at position 3690 of SEQ ID NO: 1241752
agaacaugccaaugaguaa

SEQ ID NO: 1296977 - RNA, 19 nt, Artificial Sequence
  Description of Artificial Sequence: Synthetic oligonucleotide
  Antisense strand to SEQ ID NO: 1296976
uuacucauuggcauguucu

SEQ ID NO: 1296978 - RNA, 19 nt, Artificial Sequence
  Description of Artificial Sequence: Synthetic oligonucleotide
  Sense strand starting at position 3709 of SEQ ID NO: 1241752
ccuugacugggucaagcau

SEQ ID NO: 1296979 - RNA, 19 nt, Artificial Sequence
  Description of Artificial Sequence: Synthetic oligonucleotide
  Antisense strand to SEQ ID NO: 1296978
augcuugacccagucaagg

SEQ ID NO: 1296980 - RNA, 19 nt, Artificial Sequence
  Description of Artificial Sequence: Synthetic oligonucleotide
  Sense strand starting at position 3798 of SEQ ID NO: 1241752
gggaauaauucuuugucca

SEQ ID NO: 1296981 - RNA, 19 nt, Artificial Sequence
  Description of Artificial Sequence: Synthetic oligonucleotide
  Antisense strand to SEQ ID NO: 1296980
uggacaaagaauuauuccc

SEQ ID NO: 1296982 - RNA, 19 nt, Artificial Sequence
  Description of Artificial Sequence: Synthetic oligonucleotide
  Sense strand starting at position 3799 of SEQ ID NO: 1241752
ggaauaauucuuuguccau

SEQ ID NO: 1296983 - RNA, 19 nt, Artificial Sequence
  Description of Artificial Sequence: Synthetic oligonucleotide
  Antisense strand to SEQ ID NO: 1296982
auggacaaagaauuauucc

SEQ ID NO: 1296984 - RNA, 19 nt, Artificial Sequence
  Description of Artificial Sequence: Synthetic oligonucleotide
  Sense strand starting at position 3830 of SEQ ID NO: 1241752
gagaucagugcuggaagua

SEQ ID NO: 1296985 - RNA, 19 nt, Artificial Sequence
  Description of Artificial Sequence: Synthetic oligonucleotide
  Antisense strand to SEQ ID NO: 1296984
uacuuccagcacugaucuc

SEQ ID NO: 1296986 - RNA, 19 nt, Artificial Sequence
  Description of Artificial Sequence: Synthetic oligonucleotide
  Sense strand starting at position 3860 of SEQ ID NO: 1241752
guugcucguguaaggauga

SEQ ID NO: 1296987 - RNA, 19 nt, Artificial Sequence
  Description of Artificial Sequence: Synthetic oligonucleotide
  Antisense strand to SEQ ID NO: 1296986
ucauccuuacacgagcaac

SEQ ID NO: 1296988 - RNA, 19 nt, Artificial Sequence
  Description of Artificial Sequence: Synthetic oligonucleotide
  Sense strand starting at position 3865 of SEQ ID NO: 1241752
ucguguaaggaugauauaa

SEQ ID NO: 1296989 - RNA, 19 nt, Artificial Sequence
  Description of Artificial Sequence: Synthetic oligonucleotide
  Antisense strand to SEQ ID NO: 1296988
uuauaucauccuuacacga

SEQ ID NO: 1296990 - RNA, 19 nt, Artificial Sequence
  Description of Artificial Sequence: Synthetic oligonucleotide
  Sense strand starting at position 52 of SEQ ID NO: 1241753
aagaguuugcaaggauguu

SEQ ID NO: 1296991 - RNA, 19 nt, Artificial Sequence
  Description of Artificial Sequence: Synthetic oligonucleotide
  Antisense strand to SEQ ID NO: 1296990
aacauccuugcaaacucuu

SEQ ID NO: 1296992 - RNA, 19 nt, Artificial Sequence
  Description of Artificial Sequence: Synthetic oligonucleotide
  Sense strand starting at position 53 of SEQ ID NO: 1241753
agaguuugcaaggauguuu

SEQ ID NO: 1296993 - RNA, 19 nt, Artificial Sequence
  Description of Artificial Sequence: Synthetic oligonucleotide
  Antisense strand to SEQ ID NO: 1296992
aaacauccuugcaaacucu

SEQ ID NO: 1296994 - RNA, 19 nt, Artificial Sequence
  Description of Artificial Sequence: Synthetic oligonucleotide
  Sense strand starting at position 134 of SEQ ID NO: 1241753
ggguaauucccuuaucugg

SEQ ID NO: 1296995 - RNA, 19 nt, Artificial Sequence
  Description of Artificial Sequence: Synthetic oligonucleotide
  Antisense strand to SEQ ID NO: 1296994
ccagauaagggaauuaccc

SEQ ID NO: 1296996 - RNA, 19 nt, Artificial Sequence
  Description of Artificial Sequence: Synthetic oligonucleotide
  Sense strand starting at position 303 of SEQ ID NO: 1241753
gguccugguagcgaaugua

SEQ ID NO: 1296997 - RNA, 19 nt, Artificial Sequence
  Description of Artificial Sequence: Synthetic oligonucleotide
  Antisense strand to SEQ ID NO: 1296996
uacauucgcuaccaggacc

SEQ ID NO: 1296998 - RNA, 19 nt, Artificial Sequence
  Description of Artificial Sequence: Synthetic oligonucleotide
  Sense strand starting at position 582 of SEQ ID NO: 1241753
ccacgaaguccugauugau

SEQ ID NO: 1296999 - RNA, 19 nt, Artificial Sequence
  Description of Artificial Sequence: Synthetic oligonucleotide
  Antisense strand to SEQ ID NO: 1296998
aucaaucaggacuucgugg

SEQ ID NO: 1297000 - RNA, 19 nt, Artificial Sequence
  Description of Artificial Sequence: Synthetic oligonucleotide
  Sense strand starting at position 585 of SEQ ID NO: 1241753
cgaaguccugauugaugaa

SEQ ID NO: 1297001 - RNA, 19 nt, Artificial Sequence
  Description of Artificial Sequence: Synthetic oligonucleotide
  Antisense strand to SEQ ID NO: 1297000
uucaucaaucaggacuucg

SEQ ID NO: 1297002 - RNA, 19 nt, Artificial Sequence
  Description of Artificial Sequence: Synthetic oligonucleotide
  Sense strand starting at position 810 of SEQ ID NO: 1241753
gcgagaaggagucguugaa

SEQ ID NO: 1297003 - RNA, 19 nt, Artificial Sequence
  Description of Artificial Sequence: Synthetic oligonucleotide
  Antisense strand to SEQ ID NO: 1297002
uucaacgacuccuucucgc

SEQ ID NO: 1297004 - RNA, 19 nt, Artificial Sequence
  Description of Artificial Sequence: Synthetic oligonucleotide
  Sense strand starting at position 972 of SEQ ID NO: 1241753
gguuguucugguagaaguu

SEQ ID NO: 1297005 - RNA, 19 nt, Artificial Sequence
  Description of Artificial Sequence: Synthetic oligonucleotide
  Antisense strand to SEQ ID NO: 1297004
aacuucuaccagaacaacc

SEQ ID NO: 1297006 - RNA, 19 nt, Artificial Sequence
  Description of Artificial Sequence: Synthetic oligonucleotide
  Sense strand starting at position 1152 of SEQ ID NO: 1241753
ccuugaugccguuggagga

SEQ ID NO: 1297007 - RNA, 19 nt, Artificial Sequence
  Description of Artificial Sequence: Synthetic oligonucleotide
  Antisense strand to SEQ ID NO: 1297006
uccuccaacggcaucaagg

SEQ ID NO: 1297008 - RNA, 19 nt, Artificial Sequence
  Description of Artificial Sequence: Synthetic oligonucleotide
  Sense strand starting at position 1772 of SEQ ID NO: 1241753
cuuccaagugacuagaguu

SEQ ID NO: 1297009 - RNA, 19 nt, Artificial Sequence
  Description of Artificial Sequence: Synthetic oligonucleotide
  Antisense strand to SEQ ID NO: 1297008
aacucuagucacuuggaag

SEQ ID NO: 1297010 - RNA, 19 nt, Artificial Sequence
  Description of Artificial Sequence: Synthetic oligonucleotide
  Sense strand starting at position 1989 of SEQ ID NO: 1241753
uugggaguguccagggaau

SEQ ID NO: 1297011 - RNA, 19 nt, Artificial Sequence
  Description of Artificial Sequence: Synthetic oligonucleotide
  Antisense strand to SEQ ID NO: 1297010
auucccuggacacucccaa

SEQ ID NO: 1297012 - RNA, 19 nt, Artificial Sequence
  Description of Artificial Sequence: Synthetic oligonucleotide
  Sense strand starting at position 1991 of SEQ ID NO: 1241753
gggaguguccagggaauua

SEQ ID NO: 1297013 - RNA, 19 nt, Artificial Sequence
  Description of Artificial Sequence: Synthetic oligonucleotide
  Antisense strand to SEQ ID NO: 1297012
uaauucccuggacacuccc

SEQ ID NO: 1297014 - RNA, 19 nt, Artificial Sequence
  Description of Artificial Sequence: Synthetic oligonucleotide
  Sense strand starting at position 2013 of SEQ ID NO: 1241753
uaugauaaaucuguuucga

SEQ ID NO: 1297015 - RNA, 19 nt, Artificial Sequence
  Description of Artificial Sequence: Synthetic oligonucleotide
  Antisense strand to SEQ ID NO: 1297014
ucgaaacagauuuaucaua

SEQ ID NO: 1297016 - RNA, 19 nt, Artificial Sequence
  Description of Artificial Sequence: Synthetic oligonucleotide
  Sense strand starting at position 2015 of SEQ ID NO: 1241753
ugauaaaucuguuucgaau

SEQ ID NO: 1297017 - RNA, 19 nt, Artificial Sequence
  Description of Artificial Sequence: Synthetic oligonucleotide
  Antisense strand to SEQ ID NO: 1297016
auucgaaacagauuuauca

SEQ ID NO: 1297018 - RNA, 19 nt, Artificial Sequence
  Description of Artificial Sequence: Synthetic oligonucleotide
  Sense strand starting at position 2119 of SEQ ID NO: 1241753
ccagucuggcuguauaacu

SEQ ID NO: 1297019 - RNA, 19 nt, Artificial Sequence
  Description of Artificial Sequence: Synthetic oligonucleotide
  Antisense strand to SEQ ID NO: 1297018
aguuauacagccagacugg

SEQ ID NO: 1297020 - RNA, 19 nt, Artificial Sequence
  Description of Artificial Sequence: Synthetic oligonucleotide
  Sense strand starting at position 2127 of SEQ ID NO: 1241753
gcuguauaacuaggaaaug

SEQ ID NO: 1297021 - RNA, 19 nt, Artificial Sequence
  Description of Artificial Sequence: Synthetic oligonucleotide
  Antisense strand to SEQ ID NO: 1297020
cauuuccuaguuauacagc

SEQ ID NO: 1297022 - RNA, 19 nt, Artificial Sequence
  Description of Artificial Sequence: Synthetic oligonucleotide
  Sense strand starting at position 2263 of SEQ ID NO: 1241753
gacuacaugugauuucguu

SEQ ID NO: 1297023 - RNA, 19 nt, Artificial Sequence
  Description of Artificial Sequence: Synthetic oligonucleotide
  Antisense strand to SEQ ID NO: 1297022
aacgaaaucacauguaguc

SEQ ID NO: 1297024 - RNA, 19 nt, Artificial Sequence
  Description of Artificial Sequence: Synthetic oligonucleotide
  Sense strand starting at position 2365 of SEQ ID NO: 1241753
gagugucuggccuaaggaa

SEQ ID NO: 1297025 - RNA, 19 nt, Artificial Sequence
  Description of Artificial Sequence: Synthetic oligonucleotide
  Antisense strand to SEQ ID NO: 1297024
uuccuuaggccagacacuc

SEQ ID NO: 1297026 - RNA, 19 nt, Artificial Sequence
  Description of Artificial Sequence: Synthetic oligonucleotide
  Sense strand starting at position 2475 of SEQ ID NO: 1241753
uuaaaucuagguugguaaa

SEQ ID NO: 1297027 - RNA, 19 nt, Artificial Sequence
  Description of Artificial Sequence: Synthetic oligonucleotide
  Antisense strand to SEQ ID NO: 1297026
uuuaccaaccuagauuuaa

SEQ ID NO: 1297028 - RNA, 19 nt, Artificial Sequence
  Description of Artificial Sequence: Synthetic oligonucleotide
  Sense strand starting at position 2661 of SEQ ID NO: 1241753
cccauugaacuuggaaagu

SEQ ID NO: 1297029 - RNA, 19 nt, Artificial Sequence
  Description of Artificial Sequence: Synthetic oligonucleotide
  Antisense strand to SEQ ID NO: 1297028
acuuuccaaguucaauggg

SEQ ID NO: 1297030 - RNA, 19 nt, Artificial Sequence
  Description of Artificial Sequence: Synthetic oligonucleotide
  Sense strand starting at position 2702 of SEQ ID NO: 1241753
agaggaauguuguuagcau

SEQ ID NO: 1297031 - RNA, 19 nt, Artificial Sequence
  Description of Artificial Sequence: Synthetic oligonucleotide
  Antisense strand to SEQ ID NO: 1297030
augcuaacaacauuccucu

SEQ ID NO: 1297032 - RNA, 19 nt, Artificial Sequence
  Description of Artificial Sequence: Synthetic oligonucleotide
  Sense strand starting at position 2735 of SEQ ID NO: 1241753
guccuaugcuaauuagaca

SEQ ID NO: 1297033 - RNA, 19 nt, Artificial Sequence
  Description of Artificial Sequence: Synthetic oligonucleotide
  Antisense strand to SEQ ID NO: 1297032
ugucuaauuagcauaggac

SEQ ID NO: 1297034 - RNA, 19 nt, Artificial Sequence
  Description of Artificial Sequence: Synthetic oligonucleotide
  Sense strand starting at position 2794 of SEQ ID NO: 1241753
gggacauauuaggaguaag

SEQ ID NO: 1297035 - RNA, 19 nt, Artificial Sequence
  Description of Artificial Sequence: Synthetic oligonucleotide
  Antisense strand to SEQ ID NO: 1297034
cuuacuccuaauauguccc

SEQ ID NO: 1297036 - RNA, 19 nt, Artificial Sequence
  Description of Artificial Sequence: Synthetic oligonucleotide
  Sense strand starting at position 2826 of SEQ ID NO: 1241753
agccaauaauagcuaugaa

SEQ ID NO: 1297037 - RNA, 19 nt, Artificial Sequence
  Description of Artificial Sequence: Synthetic oligonucleotide
  Antisense strand to SEQ ID NO: 1297036
uucauagcuauuauuggcu

SEQ ID NO: 1297038 - RNA, 19 nt, Artificial Sequence
  Description of Artificial Sequence: Synthetic oligonucleotide
  Sense strand starting at position 2838 of SEQ ID NO: 1241753
cuaugaaucauagggugua

SEQ ID NO: 1297039 - RNA, 19 nt, Artificial Sequence
  Description of Artificial Sequence: Synthetic oligonucleotide
  Antisense strand to SEQ ID NO: 1297038
uacacccuaugauucauag

SEQ ID NO: 1297040 - RNA, 19 nt, Artificial Sequence
  Description of Artificial Sequence: Synthetic oligonucleotide
  Sense strand starting at position 2841 of SEQ ID NO: 1241753
ugaaucauaggguguaauc

SEQ ID NO: 1297041 - RNA, 19 nt, Artificial Sequence
  Description of Artificial Sequence: Synthetic oligonucleotide
  Antisense strand to SEQ ID NO: 1297040
gauuacacccuaugauuca

SEQ ID NO: 1297042 - RNA, 19 nt, Artificial Sequence
  Description of Artificial Sequence: Synthetic oligonucleotide
  Sense strand starting at position 2927 of SEQ ID NO: 1241753
uugauuccaguuuguuaaa

SEQ ID NO: 1297043 - RNA, 19 nt, Artificial Sequence
  Description of Artificial Sequence: Synthetic oligonucleotide
  Antisense strand to SEQ ID NO: 1297042
uuuaacaaacuggaaucaa

SEQ ID NO: 1297044 - RNA, 19 nt, Artificial Sequence
  Description of Artificial Sequence: Synthetic oligonucleotide
  Sense strand starting at position 2928 of SEQ ID NO: 1241753
ugauuccaguuuguuaaau

SEQ ID NO: 1297045 - RNA, 19 nt, Artificial Sequence
  Description of Artificial Sequence: Synthetic oligonucleotide
  Antisense strand to SEQ ID NO: 1297044
auuuaacaaacuggaauca

SEQ ID NO: 1297046 - RNA, 19 nt, Artificial Sequence
  Description of Artificial Sequence: Synthetic oligonucleotide
  Sense strand starting at position 2929 of SEQ ID NO: 1241753
gauuccaguuuguuaaaug

SEQ ID NO: 1297047 - RNA, 19 nt, Artificial Sequence
  Description of Artificial Sequence: Synthetic oligonucleotide
  Antisense strand to SEQ ID NO: 1297046
cauuuaacaaacuggaauc

SEQ ID NO: 1297048 - RNA, 19 nt, Artificial Sequence
  Description of Artificial Sequence: Synthetic oligonucleotide
  Sense strand starting at position 2938 of SEQ ID NO: 1241753
uuguuaaaugaaugcaagu

SEQ ID NO: 1297049 - RNA, 19 nt, Artificial Sequence
  Description of Artificial Sequence: Synthetic oligonucleotide
  Antisense strand to SEQ ID NO: 1297048
acuugcauucauuuaacaa

SEQ ID NO: 1297050 - RNA, 19 nt, Artificial Sequence
  Description of Artificial Sequence: Synthetic oligonucleotide
  Sense strand starting at position 2959 of SEQ ID NO: 1241753
gaaaccagguauuauagaa

SEQ ID NO: 1297051 - RNA, 19 nt, Artificial Sequence
  Description of Artificial Sequence: Synthetic oligonucleotide
  Antisense strand to SEQ ID NO: 1297050
uucuauaauaccugguuuc

SEQ ID NO: 1297052 - RNA, 19 nt, Artificial Sequence
  Description of Artificial Sequence: Synthetic oligonucleotide
  Sense strand starting at position 2972 of SEQ ID NO: 1241753
auagaagacugagggaaau

SEQ ID NO: 1297053 - RNA, 19 nt, Artificial Sequence
  Description of Artificial Sequence: Synthetic oligonucleotide
  Antisense strand to SEQ ID NO: 1297052
auuucccucagucuucuau

SEQ ID NO: 1297054 - RNA, 19 nt, Artificial Sequence
  Description of Artificial Sequence: Synthetic oligonucleotide
  Sense strand starting at position 3129 of SEQ ID NO: 1241753
uaucauuaugguugaguuc

SEQ ID NO: 1297055 - RNA, 19 nt, Artificial Sequence
  Description of Artificial Sequence: Synthetic oligonucleotide
  Antisense strand to SEQ ID NO: 1297054
gaacucaaccauaaugaua

SEQ ID NO: 1297056 - RNA, 19 nt, Artificial Sequence
  Description of Artificial Sequence: Synthetic oligonucleotide
  Sense strand starting at position 3498 of SEQ ID NO: 1241753
uaauuaaggugacagauuu

SEQ ID NO: 1297057 - RNA, 19 nt, Artificial Sequence
  Description of Artificial Sequence: Synthetic oligonucleotide
  Antisense strand to SEQ ID NO: 1297056
aaaucugucaccuuaauua

SEQ ID NO: 1297058 - RNA, 19 nt, Artificial Sequence
  Description of Artificial Sequence: Synthetic oligonucleotide
  Sense strand starting at position 3546 of SEQ ID NO: 1241753
aggaauggucagcagaguu

SEQ ID NO: 1297059 - RNA, 19 nt, Artificial Sequence
  Description of Artificial Sequence: Synthetic oligonucleotide
  Antisense strand to SEQ ID NO: 1297058
aacucugcugaccauuccu

SEQ ID NO: 1297060 - RNA, 19 nt, Artificial Sequence
  Description of Artificial Sequence: Synthetic oligonucleotide
  Sense strand starting at position 3641 of SEQ ID NO: 1241753
guuuguguggcaggaauga

SEQ ID NO: 1297061 - RNA, 19 nt, Artificial Sequence
  Description of Artificial Sequence: Synthetic oligonucleotide
  Antisense strand to SEQ ID NO: 1297060
ucauuccugccacacaaac

SEQ ID NO: 1297062 - RNA, 19 nt, Artificial Sequence
  Description of Artificial Sequence: Synthetic oligonucleotide
  Sense strand starting at position 3846 of SEQ ID NO: 1241753
gcaauauaacgagaucuug

SEQ ID NO: 1297063 - RNA, 19 nt, Artificial Sequence
  Description of Artificial Sequence: Synthetic oligonucleotide
  Antisense strand to SEQ ID NO: 1297062
caagaucucguuauauugc

SEQ ID NO: 1297064 - RNA, 19 nt, Artificial Sequence
  Description of Artificial Sequence: Synthetic oligonucleotide
  Sense strand starting at position 3854 of SEQ ID NO: 1241753
acgagaucuuguuucuaca

SEQ ID NO: 1297065 - RNA, 19 nt, Artificial Sequence
  Description of Artificial Sequence: Synthetic oligonucleotide
  Antisense strand to SEQ ID NO: 1297064
uguagaaacaagaucucgu

SEQ ID NO: 1297066 - RNA, 19 nt, Artificial Sequence
  Description of Artificial Sequence: Synthetic oligonucleotide
  Sense strand starting at position 3951 of SEQ ID NO: 1241753
agcuuuaaccagggaguua

SEQ ID NO: 1297067 - RNA, 19 nt, Artificial Sequence
  Description of Artificial Sequence: Synthetic oligonucleotide
  Antisense strand to SEQ ID NO: 1297066
uaacucccugguuaaagcu

SEQ ID NO: 1297068 - RNA, 19 nt, Artificial Sequence
  Description of Artificial Sequence: Synthetic oligonucleotide
  Sense strand starting at position 3952 of SEQ ID NO: 1241753
gcuuuaaccagggaguuau

SEQ ID NO: 1297069 - RNA, 19 nt, Artificial Sequence
  Description of Artificial Sequence: Synthetic oligonucleotide
  Antisense strand to SEQ ID NO: 1297068
auaacucccugguuaaagc

SEQ ID NO: 1297070 - RNA, 19 nt, Artificial Sequence
  Description of Artificial Sequence: Synthetic oligonucleotide
  Sense strand starting at position 27 of SEQ ID NO: 1241754
ucuugcaauguccacagau

SEQ ID NO: 1297071 - RNA, 19 nt, Artificial Sequence
  Description of Artificial Sequence: Synthetic oligonucleotide
  Antisense strand to SEQ ID NO: 1297070
aucuguggacauugcaaga

SEQ ID NO: 1297072 - RNA, 19 nt, Artificial Sequence
  Description of Artificial Sequence: Synthetic oligonucleotide
  Sense strand starting at position 29 of SEQ ID NO: 1241754
uugcaauguccacagauaa

SEQ ID NO: 1297073 - RNA, 19 nt, Artificial Sequence
  Description of Artificial Sequence: Synthetic oligonucleotide
  Antisense strand to SEQ ID NO: 1297072
uuaucuguggacauugcaa

SEQ ID NO: 1297074 - RNA, 19 nt, Artificial Sequence
  Description of Artificial Sequence: Synthetic oligonucleotide
  Sense strand starting at position 221 of SEQ ID NO: 1241754
ucuauuaagucacucgacu

SEQ ID NO: 1297075 - RNA, 19 nt, Artificial Sequence
  Description of Artificial Sequence: Synthetic oligonucleotide
  Antisense strand to SEQ ID NO: 1297074
agucgagugacuuaauaga

SEQ ID NO: 1297076 - RNA, 19 nt, Artificial Sequence
  Description of Artificial Sequence: Synthetic oligonucleotide
  Sense strand starting at position 234 of SEQ ID NO: 1241754
ucgacuucucuguacuuaa

SEQ ID NO: 1297077 - RNA, 19 nt, Artificial Sequence
  Description of Artificial Sequence: Synthetic oligonucleotide
  Antisense strand to SEQ ID NO: 1297076
uuaaguacagagaagucga

SEQ ID NO: 1297078 - RNA, 19 nt, Artificial Sequence
  Description of Artificial Sequence: Synthetic oligonucleotide
  Sense strand starting at position 609 of SEQ ID NO: 1241754
ggaugucacuuugcagaua

SEQ ID NO: 1297079 - RNA, 19 nt, Artificial Sequence
  Description of Artificial Sequence: Synthetic oligonucleotide
  Antisense strand to SEQ ID NO: 1297078
uaucugcaaagugacaucc

SEQ ID NO: 1297080 - RNA, 19 nt, Artificial Sequence
  Description of Artificial Sequence: Synthetic oligonucleotide
  Sense strand starting at position 673 of SEQ ID NO: 1241754
gcauucuugauuggcuaga

SEQ ID NO: 1297081 - RNA, 19 nt, Artificial Sequence
  Description of Artificial Sequence: Synthetic oligonucleotide
  Antisense strand to SEQ ID NO: 1297080
ucuagccaaucaagaaugc

SEQ ID NO: 1297082 - RNA, 19 nt, Artificial Sequence
  Description of Artificial Sequence: Synthetic oligonucleotide
  Sense strand starting at position 675 of SEQ ID NO: 1241754
auucuugauuggcuagaga

SEQ ID NO: 1297083 - RNA, 19 nt, Artificial Sequence
  Description of Artificial Sequence: Synthetic oligonucleotide
  Antisense strand to SEQ ID NO: 1297082
ucucuagccaaucaagaau

SEQ ID NO: 1297084 - RNA, 19 nt, Artificial Sequence
  Description of Artificial Sequence: Synthetic oligonucleotide
  Sense strand starting at position 694 of SEQ ID NO: 1241754
auaauagggucaucagcaa

SEQ ID NO: 1297085 - RNA, 19 nt, Artificial Sequence
  Description of Artificial Sequence: Synthetic oligonucleotide
  Antisense strand to SEQ ID NO: 1297084
uugcugaugacccuauuau

SEQ ID NO: 1297086 - RNA, 19 nt, Artificial Sequence
  Description of Artificial Sequence: Synthetic oligonucleotide
  Sense strand starting at position 816 of SEQ ID NO: 1241754
ucaugagauuugcaaauag

SEQ ID NO: 1297087 - RNA, 19 nt, Artificial Sequence
  Description of Artificial Sequence: Synthetic oligonucleotide
  Antisense strand to SEQ ID NO: 1297086
cuauuugcaaaucucauga

SEQ ID NO: 1297088 - RNA, 19 nt, Artificial Sequence
  Description of Artificial Sequence: Synthetic oligonucleotide
  Sense strand starting at position 834 of SEQ ID NO: 1241754
ggaacuaggcuagguguaa

SEQ ID NO: 1297089 - RNA, 19 nt, Artificial Sequence
  Description of Artificial Sequence: Synthetic oligonucleotide
  Antisense strand to SEQ ID NO: 1297088
uuacaccuagccuaguucc

SEQ ID NO: 1297090 - RNA, 19 nt, Artificial Sequence
  Description of Artificial Sequence: Synthetic oligonucleotide
  Sense strand starting at position 835 of SEQ ID NO: 1241754
gaacuaggcuagguguaaa

SEQ ID NO: 1297091 - RNA, 19 nt, Artificial Sequence
  Description of Artificial Sequence: Synthetic oligonucleotide
  Antisense strand to SEQ ID NO: 1297090
uuuacaccuagccuaguuc

SEQ ID NO: 1297092 - RNA, 19 nt, Artificial Sequence
  Description of Artificial Sequence: Synthetic oligonucleotide
  Sense strand starting at position 861 of SEQ ID NO: 1241754
gaaagugaacauuagcuuu

SEQ ID NO: 1297093 - RNA, 19 nt, Artificial Sequence
  Description of Artificial Sequence: Synthetic oligonucleotide
  Antisense strand to SEQ ID NO: 1297092
aaagcuaauguucacuuuc

SEQ ID NO: 1297094 - RNA, 19 nt, Artificial Sequence
  Description of Artificial Sequence: Synthetic oligonucleotide
  Sense strand starting at position 867 of SEQ ID NO: 1241754
gaacauuagcuuuggugag

SEQ ID NO: 1297095 - RNA, 19 nt, Artificial Sequence
  Description of Artificial Sequence: Synthetic oligonucleotide
  Antisense strand to SEQ ID NO: 1297094
cucaccaaagcuaauguuc

SEQ ID NO: 1297096 - RNA, 19 nt, Artificial Sequence
  Description of Artificial Sequence: Synthetic oligonucleotide
  Sense strand starting at position 895 of SEQ ID NO: 1241754
gggaaauggcugugugaga

SEQ ID NO: 1297097 - RNA, 19 nt, Artificial Sequence
  Description of Artificial Sequence: Synthetic oligonucleotide
  Antisense strand to SEQ ID NO: 1297096
ucucacacagccauuuccc

SEQ ID NO: 1297098 - RNA, 19 nt, Artificial Sequence
  Description of Artificial Sequence: Synthetic oligonucleotide
  Sense strand starting at position 906 of SEQ ID NO: 1241754
gugugagacaccuggaacu

SEQ ID NO: 1297099 - RNA, 19 nt, Artificial Sequence
  Description of Artificial Sequence: Synthetic oligonucleotide
  Antisense strand to SEQ ID NO: 1297098
aguuccaggugucucacac

SEQ ID NO: 1297100 - RNA, 19 nt, Artificial Sequence
  Description of Artificial Sequence: Synthetic oligonucleotide
  Sense strand starting at position 922 of SEQ ID NO: 1241754
acugaaaccuggguaucau

SEQ ID NO: 1297101 - RNA, 19 nt, Artificial Sequence
  Description of Artificial Sequence: Synthetic oligonucleotide
  Antisense strand to SEQ ID NO: 1297100
augauacccagguuucagu

SEQ ID NO: 1297102 - RNA, 19 nt, Artificial Sequence
  Description of Artificial Sequence: Synthetic oligonucleotide
  Sense strand starting at position 1155 of SEQ ID NO: 1241754
gggcuaguuaagggugaau

SEQ ID NO: 1297103 - RNA, 19 nt, Artificial Sequence
  Description of Artificial Sequence: Synthetic oligonucleotide
  Antisense strand to SEQ ID NO: 1297102
auucacccuuaacuagccc

SEQ ID NO: 1297104 - RNA, 19 nt, Artificial Sequence
  Description of Artificial Sequence: Synthetic oligonucleotide
  Sense strand starting at position 1157 of SEQ ID NO: 1241754
gcuaguuaagggugaauag

SEQ ID NO: 1297105 - RNA, 19 nt, Artificial Sequence
  Description of Artificial Sequence: Synthetic oligonucleotide
  Antisense strand to SEQ ID NO: 1297104
cuauucacccuuaacuagc

SEQ ID NO: 1297106 - RNA, 19 nt, Artificial Sequence
  Description of Artificial Sequence: Synthetic oligonucleotide
  Sense strand starting at position 1393 of SEQ ID NO: 1241754
uaggcuguggucgcgauua

SEQ ID NO: 1297107 - RNA, 19 nt, Artificial Sequence
  Description of Artificial Sequence: Synthetic oligonucleotide
  Antisense strand to SEQ ID NO: 1297106
uaaucgcgaccacagccua

SEQ ID NO: 1297108 - RNA, 19 nt, Artificial Sequence
  Description of Artificial Sequence: Synthetic oligonucleotide
  Sense strand starting at position 1397 of SEQ ID NO: 1241754
cuguggucgcgauuacgga

SEQ ID NO: 1297109 - RNA, 19 nt, Artificial Sequence
  Description of Artificial Sequence: Synthetic oligonucleotide
  Antisense strand to SEQ ID NO: 1297108
uccguaaucgcgaccacag

SEQ ID NO: 1297110 - RNA, 19 nt, Artificial Sequence
  Description of Artificial Sequence: Synthetic oligonucleotide
  Sense strand starting at position 1925 of SEQ ID NO: 1241754
gcuauuauucgcguagaua

SEQ ID NO: 1297111 - RNA, 19 nt, Artificial Sequence
  Description of Artificial Sequence: Synthetic oligonucleotide
  Antisense strand to SEQ ID NO: 1297110
uaucuacgcgaauaauagc

SEQ ID NO: 1297112 - RNA, 19 nt, Artificial Sequence
  Description of Artificial Sequence: Synthetic oligonucleotide
  Sense strand starting at position 1926 of SEQ ID NO: 1241754
cuauuauucgcguagauaa

SEQ ID NO: 1297113 - RNA, 19 nt, Artificial Sequence
  Description of Artificial Sequence: Synthetic oligonucleotide
  Antisense strand to SEQ ID NO: 1297112
uuaucuacgcgaauaauag

SEQ ID NO: 1297114 - RNA, 19 nt, Artificial Sequence
  Description of Artificial Sequence: Synthetic oligonucleotide
  Sense strand starting at position 1928 of SEQ ID NO: 1241754
auuauucgcguagauaaac

SEQ ID NO: 1297115 - RNA, 19 nt, Artificial Sequence
  Description of Artificial Sequence: Synthetic oligonucleotide
  Antisense strand to SEQ ID NO: 1297114
guuuaucuacgcgaauaau

SEQ ID NO: 1297116 - RNA, 19 nt, Artificial Sequence
  Description of Artificial Sequence: Synthetic oligonucleotide
  Sense strand starting at position 2299 of SEQ ID NO: 1241754
cugcauuggcccgaacuua

SEQ ID NO: 1297117 - RNA, 19 nt, Artificial Sequence
  Description of Artificial Sequence: Synthetic oligonucleotide
  Antisense strand to SEQ ID NO: 1297116
uaaguucgggccaaugcag

SEQ ID NO: 1297118 - RNA, 19 nt, Artificial Sequence
  Description of Artificial Sequence: Synthetic oligonucleotide
  Sense strand starting at position 2310 of SEQ ID NO: 1241754
cgaacuuagcgccagaaca

SEQ ID NO: 1297119 - RNA, 19 nt, Artificial Sequence
  Description of Artificial Sequence: Synthetic oligonucleotide
  Antisense strand to SEQ ID NO: 1297118
uguucuggcgcuaaguucg

SEQ ID NO: 1297120 - RNA, 19 nt, Artificial Sequence
  Description of Artificial Sequence: Synthetic oligonucleotide
  Sense strand starting at position 2584 of SEQ ID NO: 1241754
ccuggaagcuguccuuaca

SEQ ID NO: 1297121 - RNA, 19 nt, Artificial Sequence
  Description of Artificial Sequence: Synthetic oligonucleotide
  Antisense strand to SEQ ID NO: 1297120
uguaaggacagcuuccagg

SEQ ID NO: 1297122 - RNA, 19 nt, Artificial Sequence
  Description of Artificial Sequence: Synthetic oligonucleotide
  Sense strand starting at position 2587 of SEQ ID NO: 1241754
ggaagcuguccuuacagag

SEQ ID NO: 1297123 - RNA, 19 nt, Artificial Sequence
  Description of Artificial Sequence: Synthetic oligonucleotide
  Antisense strand to SEQ ID NO: 1297122
cucuguaaggacagcuucc

SEQ ID NO: 1297124 - RNA, 19 nt, Artificial Sequence
  Description of Artificial Sequence: Synthetic oligonucleotide
  Sense strand starting at position 2649 of SEQ ID NO: 1241754
ucauuagugucuccacuac

SEQ ID NO: 1297125 - RNA, 19 nt, Artificial Sequence
  Description of Artificial Sequence: Synthetic oligonucleotide
  Antisense strand to SEQ ID NO: 1297124
guaguggagacacuaauga

SEQ ID NO: 1297126 - RNA, 19 nt, Artificial Sequence
  Description of Artificial Sequence: Synthetic oligonucleotide
  Sense strand starting at position 2742 of SEQ ID NO: 1241754
ucaaacuccugaguuugau

SEQ ID NO: 1297127 - RNA, 19 nt, Artificial Sequence
  Description of Artificial Sequence: Synthetic oligonucleotide
  Antisense strand to SEQ ID NO: 1297126
aucaaacucaggaguuuga

SEQ ID NO: 1297128 - RNA, 19 nt, Artificial Sequence
  Description of Artificial Sequence: Synthetic oligonucleotide
  Sense strand starting at position 2854 of SEQ ID NO: 1241754
aaguuuguagauuggauua

SEQ ID NO: 1297129 - RNA, 19 nt, Artificial Sequence
  Description of Artificial Sequence: Synthetic oligonucleotide
  Antisense strand to SEQ ID NO: 1297128
uaauccaaucuacaaacuu

SEQ ID NO: 1297130 - RNA, 19 nt, Artificial Sequence
  Description of Artificial Sequence: Synthetic oligonucleotide
  Sense strand starting at position 2894 of SEQ ID NO: 1241754
gucaccuuauuugacagau

SEQ ID NO: 1297131 - RNA, 19 nt, Artificial Sequence
  Description of Artificial Sequence: Synthetic oligonucleotide
  Antisense strand to SEQ ID NO: 1297130
aucugucaaauaaggugac

SEQ ID NO: 1297132 - RNA, 19 nt, Artificial Sequence
  Description of Artificial Sequence: Synthetic oligonucleotide
  Sense strand starting at position 3045 of SEQ ID NO: 1241754
cugggacugcuuuaaauau

SEQ ID NO: 1297133 - RNA, 19 nt, Artificial Sequence
  Description of Artificial Sequence: Synthetic oligonucleotide
  Antisense strand to SEQ ID NO: 1297132
auauuuaaagcagucccag

SEQ ID NO: 1297134 - RNA, 19 nt, Artificial Sequence
  Description of Artificial Sequence: Synthetic oligonucleotide
  Sense strand starting at position 3103 of SEQ ID NO: 1241754
ggagguccauuaucaguuu

SEQ ID NO: 1297135 - RNA, 19 nt, Artificial Sequence
  Description of Artificial Sequence: Synthetic oligonucleotide
  Antisense strand to SEQ ID NO: 1297134
aaacugauaauggaccucc

SEQ ID NO: 1297136 - RNA, 19 nt, Artificial Sequence
  Description of Artificial Sequence: Synthetic oligonucleotide
  Sense strand starting at position 3427 of SEQ ID NO: 1241754
cuguuuguggcacacagau

SEQ ID NO: 1297137 - RNA, 19 nt, Artificial Sequence
  Description of Artificial Sequence: Synthetic oligonucleotide
  Antisense strand to SEQ ID NO: 1297136
aucugugugccacaaacag

SEQ ID NO: 1297138 - RNA, 19 nt, Artificial Sequence
  Description of Artificial Sequence: Synthetic oligonucleotide
  Sense strand starting at position 3599 of SEQ ID NO: 1241754
uaguguaaacauugacagu

SEQ ID NO: 1297139 - RNA, 19 nt, Artificial Sequence
  Description of Artificial Sequence: Synthetic oligonucleotide
  Antisense strand to SEQ ID NO: 1297138
acugucaauguuuacacua

SEQ ID NO: 1297140 - RNA, 19 nt, Artificial Sequence
  Description of Artificial Sequence: Synthetic oligonucleotide
  Sense strand starting at position 3600 of SEQ ID NO: 1241754
aguguaaacauugacagua

SEQ ID NO: 1297141 - RNA, 19 nt, Artificial Sequence
  Description of Artificial Sequence: Synthetic oligonucleotide
  Antisense strand to SEQ ID NO: 1297140
uacugucaauguuuacacu

SEQ ID NO: 1297142 - RNA, 19 nt, Artificial Sequence
  Description of Artificial Sequence: Synthetic oligonucleotide
  Sense strand starting at position 3951 of SEQ ID NO: 1241754
augaguauugugcauggau

SEQ ID NO: 1297143 - RNA, 19 nt, Artificial Sequence
  Description of Artificial Sequence: Synthetic oligonucleotide
  Antisense strand to SEQ ID NO: 1297142
auccaugcacaauacucau

SEQ ID NO: 1297144 - RNA, 19 nt, Artificial Sequence
  Description of Artificial Sequence: Synthetic oligonucleotide
  Sense strand starting at position 3953 of SEQ ID NO: 1241754
gaguauugugcauggauaa

SEQ ID NO: 1297145 - RNA, 19 nt, Artificial Sequence
  Description of Artificial Sequence: Synthetic oligonucleotide
  Antisense strand to SEQ ID NO: 1297144
uuauccaugcacaauacuc

SEQ ID NO: 1297146 - RNA, 19 nt, Artificial Sequence
  Description of Artificial Sequence: Synthetic oligonucleotide
  Sense strand starting at position 3954 of SEQ ID NO: 1241754
aguauugugcauggauaac

SEQ ID NO: 1297147 - RNA, 19 nt, Artificial Sequence
  Description of Artificial Sequence: Synthetic oligonucleotide
  Antisense strand to SEQ ID NO: 1297146
guuauccaugcacaauacu

SEQ ID NO: 1297148 - RNA, 19 nt, Artificial Sequence
  Description of Artificial Sequence: Synthetic oligonucleotide
  Sense strand starting at position 3981 of SEQ ID NO: 1241754
gagcucuguguuguugagu

SEQ ID NO: 1297149 - RNA, 19 nt, Artificial Sequence
  Description of Artificial Sequence: Synthetic oligonucleotide
  Antisense strand to SEQ ID NO: 1297148
acucaacaacacagagcuc

SEQ ID NO: 1297150 - RNA, 19 nt, Artificial Sequence
  Description of Artificial Sequence: Synthetic oligonucleotide
  Sense strand starting at position 46 of SEQ ID NO: 1241755
gguucugugcucagagggu

SEQ ID NO: 1297151 - RNA, 19 nt, Artificial Sequence
  Description of Artificial Sequence: Synthetic oligonucleotide
  Antisense strand to SEQ ID NO: 1297150
acccucugagcacagaacc

SEQ ID NO: 1297152 - RNA, 19 nt, Artificial Sequence
  Description of Artificial Sequence: Synthetic oligonucleotide
  Sense strand starting at position 152 of SEQ ID NO: 1241755
agaugcugucagggagaua

SEQ ID NO: 1297153 - RNA, 19 nt, Artificial Sequence
  Description of Artificial Sequence: Synthetic oligonucleotide
  Antisense strand to SEQ ID NO: 1297152
uaucucccugacagcaucu

SEQ ID NO: 1297154 - RNA, 19 nt, Artificial Sequence
  Description of Artificial Sequence: Synthetic oligonucleotide
  Sense strand starting at position 259 of SEQ ID NO: 1241755
ccgauaggcccacagaaau

SEQ ID NO: 1297155 - RNA, 19 nt, Artificial Sequence
  Description of Artificial Sequence: Synthetic oligonucleotide
  Antisense strand to SEQ ID NO: 1297154
auuucugugggccuaucgg

SEQ ID NO: 1297156 - RNA, 19 nt, Artificial Sequence
  Description of Artificial Sequence: Synthetic oligonucleotide
  Sense strand starting at position 270 of SEQ ID NO: 1241755
acagaaauuguguaucccu

SEQ ID NO: 1297157 - RNA, 19 nt, Artificial Sequence
  Description of Artificial Sequence: Synthetic oligonucleotide
  Antisense strand to SEQ ID NO: 1297156
agggauacacaauuucugu

SEQ ID NO: 1297158 - RNA, 19 nt, Artificial Sequence
  Description of Artificial Sequence: Synthetic oligonucleotide
  Sense strand starting at position 339 of SEQ ID NO: 1241755
gcugcuuccuucccaagaa

SEQ ID NO: 1297159 - RNA, 19 nt, Artificial Sequence
  Description of Artificial Sequence: Synthetic oligonucleotide
  Antisense strand to SEQ ID NO: 1297158
uucuugggaaggaagcagc

SEQ ID NO: 1297160 - RNA, 19 nt, Artificial Sequence
  Description of Artificial Sequence: Synthetic oligonucleotide
  Sense strand starting at position 539 of SEQ ID NO: 1241755
ccugcauguagguaagaua

SEQ ID NO: 1297161 - RNA, 19 nt, Artificial Sequence
  Description of Artificial Sequence: Synthetic oligonucleotide
  Antisense strand to SEQ ID NO: 1297160
uaucuuaccuacaugcagg

SEQ ID NO: 1297162 - RNA, 19 nt, Artificial Sequence
  Description of Artificial Sequence: Synthetic oligonucleotide
  Sense strand starting at position 636 of SEQ ID NO: 1241755
ucaguuucccuccagggaa

SEQ ID NO: 1297163 - RNA, 19 nt, Artificial Sequence
  Description of Artificial Sequence: Synthetic oligonucleotide
  Antisense strand to SEQ ID NO: 1297162
uucccuggagggaaacuga

SEQ ID NO: 1297164 - RNA, 19 nt, Artificial Sequence
  Description of Artificial Sequence: Synthetic oligonucleotide
  Sense strand starting at position 657 of SEQ ID NO: 1241755
ucaucugucccagggagaa

SEQ ID NO: 1297165 - RNA, 19 nt, Artificial Sequence
  Description of Artificial Sequence: Synthetic oligonucleotide
  Antisense strand to SEQ ID NO: 1297164
uucucccugggacagauga

SEQ ID NO: 1297166 - RNA, 19 nt, Artificial Sequence
  Description of Artificial Sequence: Synthetic oligonucleotide
  Sense strand starting at position 718 of SEQ ID NO: 1241755
gggcaauagacggaaugua

SEQ ID NO: 1297167 - RNA, 19 nt, Artificial Sequence
  Description of Artificial Sequence: Synthetic oligonucleotide
  Antisense strand to SEQ ID NO: 1297166
uacauuccgucuauugccc

SEQ ID NO: 1297168 - RNA, 19 nt, Artificial Sequence
  Description of Artificial Sequence: Synthetic oligonucleotide
  Sense strand starting at position 770 of SEQ ID NO: 1241755
gaacaaggauaaggugaua

SEQ ID NO: 1297169 - RNA, 19 nt, Artificial Sequence
  Description of Artificial Sequence: Synthetic oligonucleotide
  Antisense strand to SEQ ID NO: 1297168
uaucaccuuauccuuguuc

SEQ ID NO: 1297170 - RNA, 19 nt, Artificial Sequence
  Description of Artificial Sequence: Synthetic oligonucleotide
  Sense strand starting at position 775 of SEQ ID NO: 1241755
aggauaaggugauaacaga

SEQ ID NO: 1297171 - RNA, 19 nt, Artificial Sequence
  Description of Artificial Sequence: Synthetic oligonucleotide
  Antisense strand to SEQ ID NO: 1297170
ucuguuaucaccuuauccu

SEQ ID NO: 1297172 - RNA, 19 nt, Artificial Sequence
  Description of Artificial Sequence: Synthetic oligonucleotide
  Sense strand starting at position 855 of SEQ ID NO: 1241755
gcuguugaaggagaaaguu

SEQ ID NO: 1297173 - RNA, 19 nt, Artificial Sequence
  Description of Artificial Sequence: Synthetic oligonucleotide
  Antisense strand to SEQ ID NO: 1297172
aacuuucuccuucaacagc

SEQ ID NO: 1297174 - RNA, 19 nt, Artificial Sequence
  Description of Artificial Sequence: Synthetic oligonucleotide
  Sense strand starting at position 897 of SEQ ID NO: 1241755
gggccuuccucuccucaaa

SEQ ID NO: 1297175 - RNA, 19 nt, Artificial Sequence
  Description of Artificial Sequence: Synthetic oligonucleotide
  Antisense strand to SEQ ID NO: 1297174
uuugaggagaggaaggccc

SEQ ID NO: 1297176 - RNA, 19 nt, Artificial Sequence
  Description of Artificial Sequence: Synthetic oligonucleotide
  Sense strand starting at position 1078 of SEQ ID NO: 1241755
cugcauucucagggaugag

SEQ ID NO: 1297177 - RNA, 19 nt, Artificial Sequence
  Description of Artificial Sequence: Synthetic oligonucleotide
  Antisense strand to SEQ ID NO: 1297176
cucaucccugagaaugcag

SEQ ID NO: 1297178 - RNA, 19 nt, Artificial Sequence
  Description of Artificial Sequence: Synthetic oligonucleotide
  Sense strand starting at position 1316 of SEQ ID NO: 1241755
gcaagagccuuucuuugga

SEQ ID NO: 1297179 - RNA, 19 nt, Artificial Sequence
  Description of Artificial Sequence: Synthetic oligonucleotide
  Antisense strand to SEQ ID NO: 1297178
uccaaagaaaggcucuugc

SEQ ID NO: 1297180 - RNA, 19 nt, Artificial Sequence
  Description of Artificial Sequence: Synthetic oligonucleotide
  Sense strand starting at position 1401 of SEQ ID NO: 1241755
gcagcagugacguugucau

SEQ ID NO: 1297181 - RNA, 19 nt, Artificial Sequence
  Description of Artificial Sequence: Synthetic oligonucleotide
  Antisense strand to SEQ ID NO: 1297180
augacaacgucacugcugc

SEQ ID NO: 1297182 - RNA, 19 nt, Artificial Sequence
  Description of Artificial Sequence: Synthetic oligonucleotide
  Sense strand starting at position 1733 of SEQ ID NO: 1241755
aaugcaaggucucagaaag

SEQ ID NO: 1297183 - RNA, 19 nt, Artificial Sequence
  Description of Artificial Sequence: Synthetic oligonucleotide
  Antisense strand to SEQ ID NO: 1297182
cuuucugagaccuugcauu

SEQ ID NO: 1297184 - RNA, 19 nt, Artificial Sequence
  Description of Artificial Sequence: Synthetic oligonucleotide
  Sense strand starting at position 1851 of SEQ ID NO: 1241755
ucgcgugcucaccacauuu

SEQ ID NO: 1297185 - RNA, 19 nt, Artificial Sequence
  Description of Artificial Sequence: Synthetic oligonucleotide
  Antisense strand to SEQ ID NO: 1297184
aaauguggugagcacgcga

SEQ ID NO: 1297186 - RNA, 19 nt, Artificial Sequence
  Description of Artificial Sequence: Synthetic oligonucleotide
  Sense strand starting at position 2013 of SEQ ID NO: 1241755
aagggacugucagcaaauu

SEQ ID NO: 1297187 - RNA, 19 nt, Artificial Sequence
  Description of Artificial Sequence: Synthetic oligonucleotide
  Antisense strand to SEQ ID NO: 1297186
aauuugcugacagucccuu

SEQ ID NO: 1297188 - RNA, 19 nt, Artificial Sequence
  Description of Artificial Sequence: Synthetic oligonucleotide
  Sense strand starting at position 2036 of SEQ ID NO: 1241755
ucugcaucacugugagaga

SEQ ID NO: 1297189 - RNA, 19 nt, Artificial Sequence
  Description of Artificial Sequence: Synthetic oligonucleotide
  Antisense strand to SEQ ID NO: 1297188
ucucucacagugaugcaga

SEQ ID NO: 1297190 - RNA, 19 nt, Artificial Sequence
  Description of Artificial Sequence: Synthetic oligonucleotide
  Sense strand starting at position 2134 of SEQ ID NO: 1241755
ggcagauccuacgcgaaga

SEQ ID NO: 1297191 - RNA, 19 nt, Artificial Sequence
  Description of Artificial Sequence: Synthetic oligonucleotide
  Antisense strand to SEQ ID NO: 1297190
ucuucgcguaggaucugcc

SEQ ID NO: 1297192 - RNA, 19 nt, Artificial Sequence
  Description of Artificial Sequence: Synthetic oligonucleotide
  Sense strand starting at position 2464 of SEQ ID NO: 1241755
acagcaaaggagugaucua

SEQ ID NO: 1297193 - RNA, 19 nt, Artificial Sequence
  Description of Artificial Sequence: Synthetic oligonucleotide
  Antisense strand to SEQ ID NO: 1297192
uagaucacuccuuugcugu

SEQ ID NO: 1297194 - RNA, 19 nt, Artificial Sequence
  Description of Artificial Sequence: Synthetic oligonucleotide
  Sense strand starting at position 2515 of SEQ ID NO: 1241755
gggagugagcugggucauu

SEQ ID NO: 1297195 - RNA, 19 nt, Artificial Sequence
  Description of Artificial Sequence: Synthetic oligonucleotide
  Antisense strand to SEQ ID NO: 1297194
aaugacccagcucacuccc

SEQ ID NO: 1297196 - RNA, 19 nt, Artificial Sequence
  Description of Artificial Sequence: Synthetic oligonucleotide
  Sense strand starting at position 2549 of SEQ ID NO: 1241755
gccacaauccugcagguau

SEQ ID NO: 1297197 - RNA, 19 nt, Artificial Sequence
  Description of Artificial Sequence: Synthetic oligonucleotide
  Antisense strand to SEQ ID NO: 1297196
auaccugcaggauuguggc

SEQ ID NO: 1297198 - RNA, 19 nt, Artificial Sequence
  Description of Artificial Sequence: Synthetic oligonucleotide
  Sense strand starting at position 2714 of SEQ ID NO: 1241755
gcacauuuaugucaucgac

SEQ ID NO: 1297199 - RNA, 19 nt, Artificial Sequence
  Description of Artificial Sequence: Synthetic oligonucleotide
  Antisense strand to SEQ ID NO: 1297198
gucgaugacauaaaugugc

SEQ ID NO: 1297200 - RNA, 19 nt, Artificial Sequence
  Description of Artificial Sequence: Synthetic oligonucleotide
  Sense strand starting at position 2720 of SEQ ID NO: 1241755
uuaugucaucgacauuauc

SEQ ID NO: 1297201 - RNA, 19 nt, Artificial Sequence
  Description of Artificial Sequence: Synthetic oligonucleotide
  Antisense strand to SEQ ID NO: 1297200
gauaaugucgaugacauaa

SEQ ID NO: 1297202 - RNA, 19 nt, Artificial Sequence
  Description of Artificial Sequence: Synthetic oligonucleotide
  Sense strand starting at position 2739 of SEQ ID NO: 1241755
uggcacuugcaguacaaua

SEQ ID NO: 1297203 - RNA, 19 nt, Artificial Sequence
  Description of Artificial Sequence: Synthetic oligonucleotide
  Antisense strand to SEQ ID NO: 1297202
uauuguacugcaagugcca

SEQ ID NO: 1297204 - RNA, 19 nt, Artificial Sequence
  Description of Artificial Sequence: Synthetic oligonucleotide
  Sense strand starting at position 2779 of SEQ ID NO: 1241755
gcccaaugcucucugaaag

SEQ ID NO: 1297205 - RNA, 19 nt, Artificial Sequence
  Description of Artificial Sequence: Synthetic oligonucleotide
  Antisense strand to SEQ ID NO: 1297204
cuuucagagagcauugggc

SEQ ID NO: 1297206 - RNA, 19 nt, Artificial Sequence
  Description of Artificial Sequence: Synthetic oligonucleotide
  Sense strand starting at position 2780 of SEQ ID NO: 1241755
cccaaugcucucugaaagu

SEQ ID NO: 1297207 - RNA, 19 nt, Artificial Sequence
  Description of Artificial Sequence: Synthetic oligonucleotide
  Antisense strand to SEQ ID NO: 1297206
acuuucagagagcauuggg

SEQ ID NO: 1297208 - RNA, 19 nt, Artificial Sequence
  Description of Artificial Sequence: Synthetic oligonucleotide
  Sense strand starting at position 2819 of SEQ ID NO: 1241755
ggcuguuaacaauaugaua

SEQ ID NO: 1297209 - RNA, 19 nt, Artificial Sequence
  Description of Artificial Sequence: Synthetic oligonucleotide
  Antisense strand to SEQ ID NO: 1297208
uaucauauuguuaacagcc

SEQ ID NO: 1297210 - RNA, 19 nt, Artificial Sequence
  Description of Artificial Sequence: Synthetic oligonucleotide
  Sense strand starting at position 3012 of SEQ ID NO: 1241755
ccugguucucaugacccaa

SEQ ID NO: 1297211 - RNA, 19 nt, Artificial Sequence
  Description of Artificial Sequence: Synthetic oligonucleotide
  Antisense strand to SEQ ID NO: 1297210
uugggucaugagaaccagg

SEQ ID NO: 1297212 - RNA, 19 nt, Artificial Sequence
  Description of Artificial Sequence: Synthetic oligonucleotide
  Sense strand starting at position 3074 of SEQ ID NO: 1241755
gucgaagucuauccauuau

SEQ ID NO: 1297213 - RNA, 19 nt, Artificial Sequence
  Description of Artificial Sequence: Synthetic oligonucleotide
  Antisense strand to SEQ ID NO: 1297212
auaauggauagacuucgac

SEQ ID NO: 1297214 - RNA, 19 nt, Artificial Sequence
  Description of Artificial Sequence: Synthetic oligonucleotide
  Sense strand starting at position 3590 of SEQ ID NO: 1241755
auucucuucuaggauaaag

SEQ ID NO: 1297215 - RNA, 19 nt, Artificial Sequence
  Description of Artificial Sequence: Synthetic oligonucleotide
  Antisense strand to SEQ ID NO: 1297214
cuuuauccuagaagagaau

SEQ ID NO: 1297216 - RNA, 19 nt, Artificial Sequence
  Description of Artificial Sequence: Synthetic oligonucleotide
  Sense strand starting at position 3692 of SEQ ID NO: 1241755
caccuaaaugugggacuua

SEQ ID NO: 1297217 - RNA, 19 nt, Artificial Sequence
  Description of Artificial Sequence: Synthetic oligonucleotide
  Antisense strand to SEQ ID NO: 1297216
uaagucccacauuuaggug

SEQ ID NO: 1297218 - RNA, 19 nt, Artificial Sequence
  Description of Artificial Sequence: Synthetic oligonucleotide
  Sense strand starting at position 3693 of SEQ ID NO: 1241755
accuaaaugugggacuuaa

SEQ ID NO: 1297219 - RNA, 19 nt, Artificial Sequence
  Description of Artificial Sequence: Synthetic oligonucleotide
  Antisense strand to SEQ ID NO: 1297218
uuaagucccacauuuaggu

SEQ ID NO: 1297220 - RNA, 19 nt, Artificial Sequence
  Description of Artificial Sequence: Synthetic oligonucleotide
  Sense strand starting at position 3768 of SEQ ID NO: 1241755
auaagcuuaaagggugauu

SEQ ID NO: 1297221 - RNA, 19 nt, Artificial Sequence
  Description of Artificial Sequence: Synthetic oligonucleotide
  Antisense strand to SEQ ID NO: 1297220
aaucacccuuuaagcuuau

SEQ ID NO: 1297222 - RNA, 19 nt, Artificial Sequence
  Description of Artificial Sequence: Synthetic oligonucleotide
  Sense strand starting at position 3777 of SEQ ID NO: 1241755
aagggugauugugaggauu

SEQ ID NO: 1297223 - RNA, 19 nt, Artificial Sequence
  Description of Artificial Sequence: Synthetic oligonucleotide
  Antisense strand to SEQ ID NO: 1297222
aauccucacaaucacccuu

SEQ ID NO: 1297224 - RNA, 19 nt, Artificial Sequence
  Description of Artificial Sequence: Synthetic oligonucleotide
  Sense strand starting at position 3838 of SEQ ID NO: 1241755
auuguuguugcuguaguua

SEQ ID NO: 1297225 - RNA, 19 nt, Artificial Sequence
  Description of Artificial Sequence: Synthetic oligonucleotide
  Antisense strand to SEQ ID NO: 1297224
uaacuacagcaacaacaau

SEQ ID NO: 1297226 - RNA, 19 nt, Artificial Sequence
  Description of Artificial Sequence: Synthetic oligonucleotide
  Sense strand starting at position 3942 of SEQ ID NO: 1241755
guuguaagcccauauccaa

SEQ ID NO: 1297227 - RNA, 19 nt, Artificial Sequence
  Description of Artificial Sequence: Synthetic oligonucleotide
  Antisense strand to SEQ ID NO: 1297226
uuggauaugggcuuacaac

SEQ ID NO: 1297228 - RNA, 19 nt, Artificial Sequence
  Description of Artificial Sequence: Synthetic oligonucleotide
  Sense strand starting at position 3979 of SEQ ID NO: 1241755
ggagaaaccugauaagcau

SEQ ID NO: 1297229 - RNA, 19 nt, Artificial Sequence
  Description of Artificial Sequence: Synthetic oligonucleotide
  Antisense strand to SEQ ID NO: 1297228
augcuuaucagguuucucc

SEQ ID NO: 1297230 - RNA, 19 nt, Artificial Sequence
  Description of Artificial Sequence: Synthetic oligonucleotide
  Sense strand starting at position 427 of SEQ ID NO: 1241756
guauucgugacacaagaaa

SEQ ID NO: 1297231 - RNA, 19 nt, Artificial Sequence
  Description of Artificial Sequence: Synthetic oligonucleotide
  Antisense strand to SEQ ID NO: 1297230
uuucuugugucacgaauac

SEQ ID NO: 1297232 - RNA, 19 nt, Artificial Sequence
  Description of Artificial Sequence: Synthetic oligonucleotide
  Sense strand starting at position 598 of SEQ ID NO: 1241756
agaagaagguguucuaaca

SEQ ID NO: 1297233 - RNA, 19 nt, Artificial Sequence
  Description of Artificial Sequence: Synthetic oligonucleotide
  Antisense strand to SEQ ID NO: 1297232
uguuagaacaccuucuucu

SEQ ID NO: 1297234 - RNA, 19 nt, Artificial Sequence
  Description of Artificial Sequence: Synthetic oligonucleotide
  Sense strand starting at position 661 of SEQ ID NO: 1241756
cagcaauaucugcauaggu

SEQ ID NO: 1297235 - RNA, 19 nt, Artificial Sequence
  Description of Artificial Sequence: Synthetic oligonucleotide
  Antisense strand to SEQ ID NO: 1297234
accuaugcagauauugcug

SEQ ID NO: 1297236 - RNA, 19 nt, Artificial Sequence
  Description of Artificial Sequence: Synthetic oligonucleotide
  Sense strand starting at position 663 of SEQ ID NO: 1241756
gcaauaucugcauagguua

SEQ ID NO: 1297237 - RNA, 19 nt, Artificial Sequence
  Description of Artificial Sequence: Synthetic oligonucleotide
  Antisense strand to SEQ ID NO: 1297236
uaaccuaugcagauauugc

SEQ ID NO: 1297238 - RNA, 19 nt, Artificial Sequence
  Description of Artificial Sequence: Synthetic oligonucleotide
  Sense strand starting at position 671 of SEQ ID NO: 1241756
ugcauagguuaacuaaagu

SEQ ID NO: 1297239 - RNA, 19 nt, Artificial Sequence
  Description of Artificial Sequence: Synthetic oligonucleotide
  Antisense strand to SEQ ID NO: 1297238
acuuuaguuaaccuaugca

SEQ ID NO: 1297240 - RNA, 19 nt, Artificial Sequence
  Description of Artificial Sequence: Synthetic oligonucleotide
  Sense strand starting at position 688 of SEQ ID NO: 1241756
guauuuagguaucuuguua

SEQ ID NO: 1297241 - RNA, 19 nt, Artificial Sequence
  Description of Artificial Sequence: Synthetic oligonucleotide
  Antisense strand to SEQ ID NO: 1297240
uaacaagauaccuaaauac

SEQ ID NO: 1297242 - RNA, 19 nt, Artificial Sequence
  Description of Artificial Sequence: Synthetic oligonucleotide
  Sense strand starting at position 695 of SEQ ID NO: 1241756
gguaucuuguuacucauuu

SEQ ID NO: 1297243 - RNA, 19 nt, Artificial Sequence
  Description of Artificial Sequence: Synthetic oligonucleotide
  Antisense strand to SEQ ID NO: 1297242
aaaugaguaacaagauacc

SEQ ID NO: 1297244 - RNA, 19 nt, Artificial Sequence
  Description of Artificial Sequence: Synthetic oligonucleotide
  Sense strand starting at position 740 of SEQ ID NO: 1241756
gagaauuuguagggaauua

SEQ ID NO: 1297245 - RNA, 19 nt, Artificial Sequence
  Description of Artificial Sequence: Synthetic oligonucleotide
  Antisense strand to SEQ ID NO: 1297244
uaauucccuacaaauucuc

SEQ ID NO: 1297246 - RNA, 19 nt, Artificial Sequence
  Description of Artificial Sequence: Synthetic oligonucleotide
  Sense strand starting at position 769 of SEQ ID NO: 1241756
ucguguaaaggugcuuagu

SEQ ID NO: 1297247 - RNA, 19 nt, Artificial Sequence
  Description of Artificial Sequence: Synthetic oligonucleotide
  Antisense strand to SEQ ID NO: 1297246
acuaagcaccuuuacacga

SEQ ID NO: 1297248 - RNA, 19 nt, Artificial Sequence
  Description of Artificial Sequence: Synthetic oligonucleotide
  Sense strand starting at position 956 of SEQ ID NO: 1241756
caugauuucguucgagcaa

SEQ ID NO: 1297249 - RNA, 19 nt, Artificial Sequence
  Description of Artificial Sequence: Synthetic oligonucleotide
  Antisense strand to SEQ ID NO: 1297248
uugcucgaacgaaaucaug

SEQ ID NO: 1297250 - RNA, 19 nt, Artificial Sequence
  Description of Artificial Sequence: Synthetic oligonucleotide
  Sense strand starting at position 963 of SEQ ID NO: 1241756
ucguucgagcaauaaauga

SEQ ID NO: 1297251 - RNA, 19 nt, Artificial Sequence
  Description of Artificial Sequence: Synthetic oligonucleotide
  Antisense strand to SEQ ID NO: 1297250
ucauuuauugcucgaacga

SEQ ID NO: 1297252 - RNA, 19 nt, Artificial Sequence
  Description of Artificial Sequence: Synthetic oligonucleotide
  Sense strand starting at position 988 of SEQ ID NO: 1241756
ggcgcucuugagaguguau

SEQ ID NO: 1297253 - RNA, 19 nt, Artificial Sequence
  Description of Artificial Sequence: Synthetic oligonucleotide
  Antisense strand to SEQ ID NO: 1297252
auacacucucaagagcgcc

SEQ ID NO: 1297254 - RNA, 19 nt, Artificial Sequence
  Description of Artificial Sequence: Synthetic oligonucleotide
  Sense strand starting at position 1349 of SEQ ID NO: 1241756
uguagaagucugugaagaa

SEQ ID NO: 1297255 - RNA, 19 nt, Artificial Sequence
  Description of Artificial Sequence: Synthetic oligonucleotide
  Antisense strand to SEQ ID NO: 1297254
uucuucacagacuucuaca

SEQ ID NO: 1297256 - RNA, 19 nt, Artificial Sequence
  Description of Artificial Sequence: Synthetic oligonucleotide
  Sense strand starting at position 1359 of SEQ ID NO: 1241756
ugugaagaaucacuuuaac

SEQ ID NO: 1297257 - RNA, 19 nt, Artificial Sequence
  Description of Artificial Sequence: Synthetic oligonucleotide
  Antisense strand to SEQ ID NO: 1297256
guuaaagugauucuucaca

SEQ ID NO: 1297258 - RNA, 19 nt, Artificial Sequence
  Description of Artificial Sequence: Synthetic oligonucleotide
  Sense strand starting at position 1567 of SEQ ID NO: 1241756
ggcagaucccaagaguuug

SEQ ID NO: 1297259 - RNA, 19 nt, Artificial Sequence
  Description of Artificial Sequence: Synthetic oligonucleotide
  Antisense strand to SEQ ID NO: 1297258
caaacucuugggaucugcc

SEQ ID NO: 1297260 - RNA, 19 nt, Artificial Sequence
  Description of Artificial Sequence: Synthetic oligonucleotide
  Sense strand starting at position 2013 of SEQ ID NO: 1241756
gaucccagugaguggugaa

SEQ ID NO: 1297261 - RNA, 19 nt, Artificial Sequence
  Description of Artificial Sequence: Synthetic oligonucleotide
  Antisense strand to SEQ ID NO: 1297260
uucaccacucacugggauc

SEQ ID NO: 1297262 - RNA, 19 nt, Artificial Sequence
  Description of Artificial Sequence: Synthetic oligonucleotide
  Sense strand starting at position 2232 of SEQ ID NO: 1241756
gcaaauugguaaguuuaua

SEQ ID NO: 1297263 - RNA, 19 nt, Artificial Sequence
  Description of Artificial Sequence: Synthetic oligonucleotide
  Antisense strand to SEQ ID NO: 1297262
uauaaacuuaccaauuugc

SEQ ID NO: 1297264 - RNA, 19 nt, Artificial Sequence
  Description of Artificial Sequence: Synthetic oligonucleotide
  Sense strand starting at position 2243 of SEQ ID NO: 1241756
aguuuauaaugugcuaaag

SEQ ID NO: 1297265 - RNA, 19 nt, Artificial Sequence
  Description of Artificial Sequence: Synthetic oligonucleotide
  Antisense strand to SEQ ID NO: 1297264
cuuuagcacauuauaaacu

SEQ ID NO: 1297266 - RNA, 19 nt, Artificial Sequence
  Description of Artificial Sequence: Synthetic oligonucleotide
  Sense strand starting at position 2333 of SEQ ID NO: 1241756
uuuauaggagucggaauau

SEQ ID NO: 1297267 - RNA, 19 nt, Artificial Sequence
  Description of Artificial Sequence: Synthetic oligonucleotide
  Antisense strand to SEQ ID NO: 1297266
auauuccgacuccuauaaa

SEQ ID NO: 1297268 - RNA, 19 nt, Artificial Sequence
  Description of Artificial Sequence: Synthetic oligonucleotide
  Sense strand starting at position 2343 of SEQ ID NO: 1241756
ucggaauauugguuuacuu

SEQ ID NO: 1297269 - RNA, 19 nt, Artificial Sequence
  Description of Artificial Sequence: Synthetic oligonucleotide
  Antisense strand to SEQ ID NO: 1297268
aaguaaaccaauauuccga

SEQ ID NO: 1297270 - RNA, 19 nt, Artificial Sequence
  Description of Artificial Sequence: Synthetic oligonucleotide
  Sense strand starting at position 2345 of SEQ ID NO: 1241756
ggaauauugguuuacuucu

SEQ ID NO: 1297271 - RNA, 19 nt, Artificial Sequence
  Description of Artificial Sequence: Synthetic oligonucleotide
  Antisense strand to SEQ ID NO: 1297270
agaaguaaaccaauauucc

SEQ ID NO: 1297272 - RNA, 19 nt, Artificial Sequence
  Description of Artificial Sequence: Synthetic oligonucleotide
  Sense strand starting at position 2392 of SEQ ID NO: 1241756
ggaacauuaugguuauguu

SEQ ID NO: 1297273 - RNA, 19 nt, Artificial Sequence
  Description of Artificial Sequence: Synthetic oligonucleotide
  Antisense strand to SEQ ID NO: 1297272
aacauaaccauaauguucc

SEQ ID NO: 1297274 - RNA, 19 nt, Artificial Sequence
  Description of Artificial Sequence: Synthetic oligonucleotide
  Sense strand starting at position 2401 of SEQ ID NO: 1241756
ugguuauguuggauguguu

SEQ ID NO: 1297275 - RNA, 19 nt, Artificial Sequence
  Description of Artificial Sequence: Synthetic oligonucleotide
  Antisense strand to SEQ ID NO: 1297274
aacacauccaacauaacca

SEQ ID NO: 1297276 - RNA, 19 nt, Artificial Sequence
  Description of Artificial Sequence: Synthetic oligonucleotide
  Sense strand starting at position 2417 of SEQ ID NO: 1241756
guuggagguguucaacauc

SEQ ID NO: 1297277 - RNA, 19 nt, Artificial Sequence
  Description of Artificial Sequence: Synthetic oligonucleotide
  Antisense strand to SEQ ID NO: 1297276
gauguugaacaccuccaac

SEQ ID NO: 1297278 - RNA, 19 nt, Artificial Sequence
  Description of Artificial Sequence: Synthetic oligonucleotide
  Sense strand starting at position 2420 of SEQ ID NO: 1241756
ggagguguucaacaucuag

SEQ ID NO: 1297279 - RNA, 19 nt, Artificial Sequence
  Description of Artificial Sequence: Synthetic oligonucleotide
  Antisense strand to SEQ ID NO: 1297278
cuagauguugaacaccucc

SEQ ID NO: 1297280 - RNA, 19 nt, Artificial Sequence
  Description of Artificial Sequence: Synthetic oligonucleotide
  Sense strand starting at position 2569 of SEQ ID NO: 1241756
cagagauccuaggucagua

SEQ ID NO: 1297281 - RNA, 19 nt, Artificial Sequence
  Description of Artificial Sequence: Synthetic oligonucleotide
  Antisense strand to SEQ ID NO: 1297280
uacugaccuaggaucucug

SEQ ID NO: 1297282 - RNA, 19 nt, Artificial Sequence
  Description of Artificial Sequence: Synthetic oligonucleotide
  Sense strand starting at position 2604 of SEQ ID NO: 1241756
gacacauaggcuuguaaga

SEQ ID NO: 1297283 - RNA, 19 nt, Artificial Sequence
  Description of Artificial Sequence: Synthetic oligonucleotide
  Antisense strand to SEQ ID NO: 1297282
ucuuacaagccuauguguc

SEQ ID NO: 1297284 - RNA, 19 nt, Artificial Sequence
  Description of Artificial Sequence: Synthetic oligonucleotide
  Sense strand starting at position 3343 of SEQ ID NO: 1241756
gcucucaucuuucugggaa

SEQ ID NO: 1297285 - RNA, 19 nt, Artificial Sequence
  Description of Artificial Sequence: Synthetic oligonucleotide
  Antisense strand to SEQ ID NO: 1297284
uucccagaaagaugagagc

SEQ ID NO: 1297286 - RNA, 19 nt, Artificial Sequence
  Description of Artificial Sequence: Synthetic oligonucleotide
  Sense strand starting at position 3346 of SEQ ID NO: 1241756
cucaucuuucugggaacua

SEQ ID NO: 1297287 - RNA, 19 nt, Artificial Sequence
  Description of Artificial Sequence: Synthetic oligonucleotide
  Antisense strand to SEQ ID NO: 1297286
uaguucccagaaagaugag

SEQ ID NO: 1297288 - RNA, 19 nt, Artificial Sequence
  Description of Artificial Sequence: Synthetic oligonucleotide
  Sense strand starting at position 3359 of SEQ ID NO: 1241756
gaacuacaggcauauguau

SEQ ID NO: 1297289 - RNA, 19 nt, Artificial Sequence
  Description of Artificial Sequence: Synthetic oligonucleotide
  Antisense strand to SEQ ID NO: 1297288
auacauaugccuguaguuc

SEQ ID NO: 1297290 - RNA, 19 nt, Artificial Sequence
  Description of Artificial Sequence: Synthetic oligonucleotide
  Sense strand starting at position 3400 of SEQ ID NO: 1241756
cugaucuuucugggaacua

SEQ ID NO: 1297291 - RNA, 19 nt, Artificial Sequence
  Description of Artificial Sequence: Synthetic oligonucleotide
  Antisense strand to SEQ ID NO: 1297290
uaguucccagaaagaucag

SEQ ID NO: 1297292 - RNA, 19 nt, Artificial Sequence
  Description of Artificial Sequence: Synthetic oligonucleotide
  Sense strand starting at position 3454 of SEQ ID NO: 1241756
cugauccuucugggaacua

SEQ ID NO: 1297293 - RNA, 19 nt, Artificial Sequence
  Description of Artificial Sequence: Synthetic oligonucleotide
  Antisense strand to SEQ ID NO: 1297292
uaguucccagaaggaucag

SEQ ID NO: 1297294 - RNA, 19 nt, Artificial Sequence
  Description of Artificial Sequence: Synthetic oligonucleotide
  Sense strand starting at position 3498 of SEQ ID NO: 1241756
uaaacaucucuuggguaug

SEQ ID NO: 1297295 - RNA, 19 nt, Artificial Sequence
  Description of Artificial Sequence: Synthetic oligonucleotide
  Antisense strand to SEQ ID NO: 1297294
cauacccaagagauguuua

SEQ ID NO: 1297296 - RNA, 19 nt, Artificial Sequence
  Description of Artificial Sequence: Synthetic oligonucleotide
  Sense strand starting at position 3500 of SEQ ID NO: 1241756
aacaucucuuggguaugua

SEQ ID NO: 1297297 - RNA, 19 nt, Artificial Sequence
  Description of Artificial Sequence: Synthetic oligonucleotide
  Antisense strand to SEQ ID NO: 1297296
uacauacccaagagauguu

SEQ ID NO: 1297298 - RNA, 19 nt, Artificial Sequence
  Description of Artificial Sequence: Synthetic oligonucleotide
  Sense strand starting at position 3501 of SEQ ID NO: 1241756
acaucucuuggguauguaa

SEQ ID NO: 1297299 - RNA, 19 nt, Artificial Sequence
  Description of Artificial Sequence: Synthetic oligonucleotide
  Antisense strand to SEQ ID NO: 1297298
uuacauacccaagagaugu

SEQ ID NO: 1297300 - RNA, 19 nt, Artificial Sequence
  Description of Artificial Sequence: Synthetic oligonucleotide
  Sense strand starting at position 3503 of SEQ ID NO: 1241756
aucucuuggguauguaaua

SEQ ID NO: 1297301 - RNA, 19 nt, Artificial Sequence
  Description of Artificial Sequence: Synthetic oligonucleotide
  Antisense strand to SEQ ID NO: 1297300
uauuacauacccaagagau

SEQ ID NO: 1297302 - RNA, 19 nt, Artificial Sequence
  Description of Artificial Sequence: Synthetic oligonucleotide
  Sense strand starting at position 3513 of SEQ ID NO: 1241756
uauguaauagcuggugaaa

SEQ ID NO: 1297303 - RNA, 19 nt, Artificial Sequence
  Description of Artificial Sequence: Synthetic oligonucleotide
  Antisense strand to SEQ ID NO: 1297302
uuucaccagcuauuacaua

SEQ ID NO: 1297304 - RNA, 19 nt, Artificial Sequence
  Description of Artificial Sequence: Synthetic oligonucleotide
  Sense strand starting at position 3516 of SEQ ID NO: 1241756
guaauagcuggugaaagga

SEQ ID NO: 1297305 - RNA, 19 nt, Artificial Sequence
  Description of Artificial Sequence: Synthetic oligonucleotide
  Antisense strand to SEQ ID NO: 1297304
uccuuucaccagcuauuac

SEQ ID NO: 1297306 - RNA, 19 nt, Artificial Sequence
  Description of Artificial Sequence: Synthetic oligonucleotide
  Sense strand starting at position 3652 of SEQ ID NO: 1241756
ccuccuuuggaaggcuaau

SEQ ID NO: 1297307 - RNA, 19 nt, Artificial Sequence
  Description of Artificial Sequence: Synthetic oligonucleotide
  Antisense strand to SEQ ID NO: 1297306
auuagccuuccaaaggagg

SEQ ID NO: 1297308 - RNA, 19 nt, Artificial Sequence
  Description of Artificial Sequence: Synthetic oligonucleotide
  Sense strand starting at position 3909 of SEQ ID NO: 1241756
augggcgcgcauucuuaau

SEQ ID NO: 1297309 - RNA, 19 nt, Artificial Sequence
  Description of Artificial Sequence: Synthetic oligonucleotide
  Antisense strand to SEQ ID NO: 1297308
auuaagaaugcgcgcccau

SEQ ID NO: 1297310 - RNA, 19 nt, Artificial Sequence
  Description of Artificial Sequence: Synthetic oligonucleotide
  Sense strand starting at position 113 of SEQ ID NO: 1241757
uccagagugcccuggaaga

SEQ ID NO: 1297311 - RNA, 19 nt, Artificial Sequence
  Description of Artificial Sequence: Synthetic oligonucleotide
  Antisense strand to SEQ ID NO: 1297310
ucuuccagggcacucugga

SEQ ID NO: 1297312 - RNA, 19 nt, Artificial Sequence
  Description of Artificial Sequence: Synthetic oligonucleotide
  Sense strand starting at position 334 of SEQ ID NO: 1241757
ccagcucuggaugguuauu

SEQ ID NO: 1297313 - RNA, 19 nt, Artificial Sequence
  Description of Artificial Sequence: Synthetic oligonucleotide
  Antisense strand to SEQ ID NO: 1297312
aauaaccauccagagcugg

SEQ ID NO: 1297314 - RNA, 19 nt, Artificial Sequence
  Description of Artificial Sequence: Synthetic oligonucleotide
  Sense strand starting at position 336 of SEQ ID NO: 1241757
agcucuggaugguuauuga

SEQ ID NO: 1297315 - RNA, 19 nt, Artificial Sequence
  Description of Artificial Sequence: Synthetic oligonucleotide
  Antisense strand to SEQ ID NO: 1297314
ucaauaaccauccagagcu

SEQ ID NO: 1297316 - RNA, 19 nt, Artificial Sequence
  Description of Artificial Sequence: Synthetic oligonucleotide
  Sense strand starting at position 343 of SEQ ID NO: 1241757
gaugguuauugauugcuuu

SEQ ID NO: 1297317 - RNA, 19 nt, Artificial Sequence
  Description of Artificial Sequence: Synthetic oligonucleotide
  Antisense strand to SEQ ID NO: 1297316
aaagcaaucaauaaccauc

SEQ ID NO: 1297318 - RNA, 19 nt, Artificial Sequence
  Description of Artificial Sequence: Synthetic oligonucleotide
  Sense strand starting at position 378 of SEQ ID NO: 1241757
gggcgcucgugaaugaaau

SEQ ID NO: 1297319 - RNA, 19 nt, Artificial Sequence
  Description of Artificial Sequence: Synthetic oligonucleotide
  Antisense strand to SEQ ID NO: 1297318
auuucauucacgagcgccc

SEQ ID NO: 1297320 - RNA, 19 nt, Artificial Sequence
  Description of Artificial Sequence: Synthetic oligonucleotide
  Sense strand starting at position 379 of SEQ ID NO: 1241757
ggcgcucgugaaugaaauc

SEQ ID NO: 1297321 - RNA, 19 nt, Artificial Sequence
  Description of Artificial Sequence: Synthetic oligonucleotide
  Antisense strand to SEQ ID NO: 1297320
gauuucauucacgagcgcc

SEQ ID NO: 1297322 - RNA, 19 nt, Artificial Sequence
  Description of Artificial Sequence: Synthetic oligonucleotide
  Sense strand starting at position 440 of SEQ ID NO: 1241757
gacugaggcccaggaaauu

SEQ ID NO: 1297323 - RNA, 19 nt, Artificial Sequence
  Description of Artificial Sequence: Synthetic oligonucleotide
  Antisense strand to SEQ ID NO: 1297322
aauuuccugggccucaguc

SEQ ID NO: 1297324 - RNA, 19 nt, Artificial Sequence
  Description of Artificial Sequence: Synthetic oligonucleotide
  Sense strand starting at position 492 of SEQ ID NO: 1241757
gccuuaucccuguguccag

SEQ ID NO: 1297325 - RNA, 19 nt, Artificial Sequence
  Description of Artificial Sequence: Synthetic oligonucleotide
  Antisense strand to SEQ ID NO: 1297324
cuggacacagggauaaggc

SEQ ID NO: 1297326 - RNA, 19 nt, Artificial Sequence
  Description of Artificial Sequence: Synthetic oligonucleotide
  Sense strand starting at position 561 of SEQ ID NO: 1241757
ccugcauucucggacccaa

SEQ ID NO: 1297327 - RNA, 19 nt, Artificial Sequence
  Description of Artificial Sequence: Synthetic oligonucleotide
  Antisense strand to SEQ ID NO: 1297326
uuggguccgagaaugcagg

SEQ ID NO: 1297328 - RNA, 19 nt, Artificial Sequence
  Description of Artificial Sequence: Synthetic oligonucleotide
  Sense strand starting at position 1445 of SEQ ID NO: 1241757
gggugaugucggugucccu

SEQ ID NO: 1297329 - RNA, 19 nt, Artificial Sequence
  Description of Artificial Sequence: Synthetic oligonucleotide
  Antisense strand to SEQ ID NO: 1297328
agggacaccgacaucaccc

SEQ ID NO: 1297330 - RNA, 19 nt, Artificial Sequence
  Description of Artificial Sequence: Synthetic oligonucleotide
  Sense strand starting at position 2103 of SEQ ID NO: 1241757
ugaguacacucagucuguu

SEQ ID NO: 1297331 - RNA, 19 nt, Artificial Sequence
  Description of Artificial Sequence: Synthetic oligonucleotide
  Antisense strand to SEQ ID NO: 1297330
aacagacugaguguacuca

SEQ ID NO: 1297332 - RNA, 19 nt, Artificial Sequence
  Description of Artificial Sequence: Synthetic oligonucleotide
  Sense strand starting at position 2298 of SEQ ID NO: 1241757
ucacuuuacuugggcaaau

SEQ ID NO: 1297333 - RNA, 19 nt, Artificial Sequence
  Description of Artificial Sequence: Synthetic oligonucleotide
  Antisense strand to SEQ ID NO: 1297332
auuugcccaaguaaaguga

SEQ ID NO: 1297334 - RNA, 19 nt, Artificial Sequence
  Description of Artificial Sequence: Synthetic oligonucleotide
  Sense strand starting at position 2441 of SEQ ID NO: 1241757
ccagaaaggucugggacau

SEQ ID NO: 1297335 - RNA, 19 nt, Artificial Sequence
  Description of Artificial Sequence: Synthetic oligonucleotide
  Antisense strand to SEQ ID NO: 1297334
augucccagaccuuucugg

SEQ ID NO: 1297336 - RNA, 19 nt, Artificial Sequence
  Description of Artificial Sequence: Synthetic oligonucleotide
  Sense strand starting at position 2770 of SEQ ID NO: 1241757
aucguagcaucaucacaaa

SEQ ID NO: 1297337 - RNA, 19 nt, Artificial Sequence
  Description of Artificial Sequence: Synthetic oligonucleotide
  Antisense strand to SEQ ID NO: 1297336
uuugugaugaugcuacgau

SEQ ID NO: 1297338 - RNA, 19 nt, Artificial Sequence
  Description of Artificial Sequence: Synthetic oligonucleotide
  Sense strand starting at position 2852 of SEQ ID NO: 1241757
ggguguuauuucggcuuaa

SEQ ID NO: 1297339 - RNA, 19 nt, Artificial Sequence
  Description of Artificial Sequence: Synthetic oligonucleotide
  Antisense strand to SEQ ID NO: 1297338
uuaagccgaaauaacaccc

SEQ ID NO: 1297340 - RNA, 19 nt, Artificial Sequence
  Description of Artificial Sequence: Synthetic oligonucleotide
  Sense strand starting at position 2853 of SEQ ID NO: 1241757
gguguuauuucggcuuaaa

SEQ ID NO: 1297341 - RNA, 19 nt, Artificial Sequence
  Description of Artificial Sequence: Synthetic oligonucleotide
  Antisense strand to SEQ ID NO: 1297340
uuuaagccgaaauaacacc

SEQ ID NO: 1297342 - RNA, 19 nt, Artificial Sequence
  Description of Artificial Sequence: Synthetic oligonucleotide
  Sense strand starting at position 2864 of SEQ ID NO: 1241757
ggcuuaaacugucccuaua

SEQ ID NO: 1297343 - RNA, 19 nt, Artificial Sequence
  Description of Artificial Sequence: Synthetic oligonucleotide
  Antisense strand to SEQ ID NO: 1297342
uauagggacaguuuaagcc

SEQ ID NO: 1297344 - RNA, 19 nt, Artificial Sequence
  Description of Artificial Sequence: Synthetic oligonucleotide
  Sense strand starting at position 2866 of SEQ ID NO: 1241757
cuuaaacugucccuauagu

SEQ ID NO: 1297345 - RNA, 19 nt, Artificial Sequence
  Description of Artificial Sequence: Synthetic oligonucleotide
  Antisense strand to SEQ ID NO: 1297344
acuauagggacaguuuaag

SEQ ID NO: 1297346 - RNA, 19 nt, Artificial Sequence
  Description of Artificial Sequence: Synthetic oligonucleotide
  Sense strand starting at position 2952 of SEQ ID NO: 1241757
ccagcuauccugcaagcua

SEQ ID NO: 1297347 - RNA, 19 nt, Artificial Sequence
  Description of Artificial Sequence: Synthetic oligonucleotide
  Antisense strand to SEQ ID NO: 1297346
uagcuugcaggauagcugg

SEQ ID NO: 1297348 - RNA, 19 nt, Artificial Sequence
  Description of Artificial Sequence: Synthetic oligonucleotide
  Sense strand starting at position 3015 of SEQ ID NO: 1241757
gcaccugaccauugucaga

SEQ ID NO: 1297349 - RNA, 19 nt, Artificial Sequence
  Description of Artificial Sequence: Synthetic oligonucleotide
  Antisense strand to SEQ ID NO: 1297348
ucugacaauggucaggugc

SEQ ID NO: 1297350 - RNA, 19 nt, Artificial Sequence
  Description of Artificial Sequence: Synthetic oligonucleotide
  Sense strand starting at position 3020 of SEQ ID NO: 1241757
ugaccauugucagagcaag

SEQ ID NO: 1297351 - RNA, 19 nt, Artificial Sequence
  Description of Artificial Sequence: Synthetic oligonucleotide
  Antisense strand to SEQ ID NO: 1297350
cuugcucugacaaugguca

SEQ ID NO: 1297352 - RNA, 19 nt, Artificial Sequence
  Description of Artificial Sequence: Synthetic oligonucleotide
  Sense strand starting at position 3057 of SEQ ID NO: 1241757
gagcauggcugaucugaaa

SEQ ID NO: 1297353 - RNA, 19 nt, Artificial Sequence
  Description of Artificial Sequence: Synthetic oligonucleotide
  Antisense strand to SEQ ID NO: 1297352
uuucagaucagccaugcuc

SEQ ID NO: 1297354 - RNA, 19 nt, Artificial Sequence
  Description of Artificial Sequence: Synthetic oligonucleotide
  Sense strand starting at position 3119 of SEQ ID NO: 1241757
accuguaaccuugaugcca

SEQ ID NO: 1297355 - RNA, 19 nt, Artificial Sequence
  Description of Artificial Sequence: Synthetic oligonucleotide
  Antisense strand to SEQ ID NO: 1297354
uggcaucaagguuacaggu

SEQ ID NO: 1297356 - RNA, 19 nt, Artificial Sequence
  Description of Artificial Sequence: Synthetic oligonucleotide
  Sense strand starting at position 3168 of SEQ ID NO: 1241757
ugcagccuugucucaugua

SEQ ID NO: 1297357 - RNA, 19 nt, Artificial Sequence
  Description of Artificial Sequence: Synthetic oligonucleotide
  Antisense strand to SEQ ID NO: 1297356
uacaugagacaaggcugca

SEQ ID NO: 1297358 - RNA, 19 nt, Artificial Sequence
  Description of Artificial Sequence: Synthetic oligonucleotide
  Sense strand starting at position 3169 of SEQ ID NO: 1241757
gcagccuugucucauguau

SEQ ID NO: 1297359 - RNA, 19 nt, Artificial Sequence
  Description of Artificial Sequence: Synthetic oligonucleotide
  Antisense strand to SEQ ID NO: 1297358
auacaugagacaaggcugc

SEQ ID NO: 1297360 - RNA, 19 nt, Artificial Sequence
  Description of Artificial Sequence: Synthetic oligonucleotide
  Sense strand starting at position 3171 of SEQ ID NO: 1241757
agccuugucucauguauca

SEQ ID NO: 1297361 - RNA, 19 nt, Artificial Sequence
  Description of Artificial Sequence: Synthetic oligonucleotide
  Antisense strand to SEQ ID NO: 1297360
ugauacaugagacaaggcu

SEQ ID NO: 1297362 - RNA, 19 nt, Artificial Sequence
  Description of Artificial Sequence: Synthetic oligonucleotide
  Sense strand starting at position 3176 of SEQ ID NO: 1241757
ugucucauguaucauggua

SEQ ID NO: 1297363 - RNA, 19 nt, Artificial Sequence
  Description of Artificial Sequence: Synthetic oligonucleotide
  Antisense strand to SEQ ID NO: 1297362
uaccaugauacaugagaca

SEQ ID NO: 1297364 - RNA, 19 nt, Artificial Sequence
  Description of Artificial Sequence: Synthetic oligonucleotide
  Sense strand starting at position 3178 of SEQ ID NO: 1241757
ucucauguaucaugguaac

SEQ ID NO: 1297365 - RNA, 19 nt, Artificial Sequence
  Description of Artificial Sequence: Synthetic oligonucleotide
  Antisense strand to SEQ ID NO: 1297364
guuaccaugauacaugaga

SEQ ID NO: 1297366 - RNA, 19 nt, Artificial Sequence
  Description of Artificial Sequence: Synthetic oligonucleotide
  Sense strand starting at position 3265 of SEQ ID NO: 1241757
ggcugaguaggagguguuu

SEQ ID NO: 1297367 - RNA, 19 nt, Artificial Sequence
  Description of Artificial Sequence: Synthetic oligonucleotide
  Antisense strand to SEQ ID NO: 1297366
aaacaccuccuacucagcc

SEQ ID NO: 1297368 - RNA, 19 nt, Artificial Sequence
  Description of Artificial Sequence: Synthetic oligonucleotide
  Sense strand starting at position 3508 of SEQ ID NO: 1241757
ugccauuuggguugagcau

SEQ ID NO: 1297369 - RNA, 19 nt, Artificial Sequence
  Description of Artificial Sequence: Synthetic oligonucleotide
  Antisense strand to SEQ ID NO: 1297368
augcucaacccaaauggca

SEQ ID NO: 1297370 - RNA, 19 nt, Artificial Sequence
  Description of Artificial Sequence: Synthetic oligonucleotide
  Sense strand starting at position 59 of SEQ ID NO: 1241758
guacacuccugcuugauca

SEQ ID NO: 1297371 - RNA, 19 nt, Artificial Sequence
  Description of Artificial Sequence: Synthetic oligonucleotide
  Antisense strand to SEQ ID NO: 1297370
ugaucaagcaggaguguac

SEQ ID NO: 1297372 - RNA, 19 nt, Artificial Sequence
  Description of Artificial Sequence: Synthetic oligonucleotide
  Sense strand starting at position 236 of SEQ ID NO: 1241758
cccacuauuccucaguaug

SEQ ID NO: 1297373 - RNA, 19 nt, Artificial Sequence
  Description of Artificial Sequence: Synthetic oligonucleotide
  Antisense strand to SEQ ID NO: 1297372
cauacugaggaauaguggg

SEQ ID NO: 1297374 - RNA, 19 nt, Artificial Sequence
  Description of Artificial Sequence: Synthetic oligonucleotide
  Sense strand starting at position 239 of SEQ ID NO: 1241758
acuauuccucaguaugacu

SEQ ID NO: 1297375 - RNA, 19 nt, Artificial Sequence
  Description of Artificial Sequence: Synthetic oligonucleotide
  Antisense strand to SEQ ID NO: 1297374
agucauacugaggaauagu

SEQ ID NO: 1297376 - RNA, 19 nt, Artificial Sequence
  Description of Artificial Sequence: Synthetic oligonucleotide
  Sense strand starting at position 250 of SEQ ID NO: 1241758
guaugacuccuuugccaaa

SEQ ID NO: 1297377 - RNA, 19 nt, Artificial Sequence
  Description of Artificial Sequence: Synthetic oligonucleotide
  Antisense strand to SEQ ID NO: 1297376
uuuggcaaaggagucauac

SEQ ID NO: 1297378 - RNA, 19 nt, Artificial Sequence
  Description of Artificial Sequence: Synthetic oligonucleotide
  Sense strand starting at position 263 of SEQ ID NO: 1241758
gccaaacugguuuacugaa

SEQ ID NO: 1297379 - RNA, 19 nt, Artificial Sequence
  Description of Artificial Sequence: Synthetic oligonucleotide
  Antisense strand to SEQ ID NO: 1297378
uucaguaaaccaguuuggc

SEQ ID NO: 1297380 - RNA, 19 nt, Artificial Sequence
  Description of Artificial Sequence: Synthetic oligonucleotide
  Sense strand starting at position 408 of SEQ ID NO: 1241758
uacaaagucuucuccggaa

SEQ ID NO: 1297381 - RNA, 19 nt, Artificial Sequence
  Description of Artificial Sequence: Synthetic oligonucleotide
  Antisense strand to SEQ ID NO: 1297380
uuccggagaagacuuugua

SEQ ID NO: 1297382 - RNA, 19 nt, Artificial Sequence
  Description of Artificial Sequence: Synthetic oligonucleotide
  Sense strand starting at position 453 of SEQ ID NO: 1241758
cgcaauauucccggucaca

SEQ ID NO: 1297383 - RNA, 19 nt, Artificial Sequence
  Description of Artificial Sequence: Synthetic oligonucleotide
  Antisense strand to SEQ ID NO: 1297382
ugugaccgggaauauugcg

SEQ ID NO: 1297384 - RNA, 19 nt, Artificial Sequence
  Description of Artificial Sequence: Synthetic oligonucleotide
  Sense strand starting at position 497 of SEQ ID NO: 1241758
ccuguugagagguagaauc

SEQ ID NO: 1297385 - RNA, 19 nt, Artificial Sequence
  Description of Artificial Sequence: Synthetic oligonucleotide
  Antisense strand to SEQ ID NO: 1297384
gauucuaccucucaacagg

SEQ ID NO: 1297386 - RNA, 19 nt, Artificial Sequence
  Description of Artificial Sequence: Synthetic oligonucleotide
  Sense strand starting at position 528 of SEQ ID NO: 1241758
cuuuaaauugaguaggcuu

SEQ ID NO: 1297387 - RNA, 19 nt, Artificial Sequence
  Description of Artificial Sequence: Synthetic oligonucleotide
  Antisense strand to SEQ ID NO: 1297386
aagccuacucaauuuaaag

SEQ ID NO: 1297388 - RNA, 19 nt, Artificial Sequence
  Description of Artificial Sequence: Synthetic oligonucleotide
  Sense strand starting at position 676 of SEQ ID NO: 1241758
guuugcuugucccuuggga

SEQ ID NO: 1297389 - RNA, 19 nt, Artificial Sequence
  Description of Artificial Sequence: Synthetic oligonucleotide
  Antisense strand to SEQ ID NO: 1297388
ucccaagggacaagcaaac

SEQ ID NO: 1297390 - RNA, 19 nt, Artificial Sequence
  Description of Artificial Sequence: Synthetic oligonucleotide
  Sense strand starting at position 678 of SEQ ID NO: 1241758
uugcuugucccuugggaca

SEQ ID NO: 1297391 - RNA, 19 nt, Artificial Sequence
  Description of Artificial Sequence: Synthetic oligonucleotide
  Antisense strand to SEQ ID NO: 1297390
ugucccaagggacaagcaa

SEQ ID NO: 1297392 - RNA, 19 nt, Artificial Sequence
  Description of Artificial Sequence: Synthetic oligonucleotide
  Sense strand starting at position 741 of SEQ ID NO: 1241758
aggugcucuggcuaacaau

SEQ ID NO: 1297393 - RNA, 19 nt, Artificial Sequence
  Description of Artificial Sequence: Synthetic oligonucleotide
  Antisense strand to SEQ ID NO: 1297392
auuguuagccagagcaccu

SEQ ID NO: 1297394 - RNA, 19 nt, Artificial Sequence
  Description of Artificial Sequence: Synthetic oligonucleotide
  Sense strand starting at position 1186 of SEQ ID NO: 1241758
uucugcuucugagcuacaa

SEQ ID NO: 1297395 - RNA, 19 nt, Artificial Sequence
  Description of Artificial Sequence: Synthetic oligonucleotide
  Antisense strand to SEQ ID NO: 1297394
uuguagcucagaagcagaa

SEQ ID NO: 1297396 - RNA, 19 nt, Artificial Sequence
  Description of Artificial Sequence: Synthetic oligonucleotide
  Sense strand starting at position 1190 of SEQ ID NO: 1241758
gcuucugagcuacaagaaa

SEQ ID NO: 1297397 - RNA, 19 nt, Artificial Sequence
  Description of Artificial Sequence: Synthetic oligonucleotide
  Antisense strand to SEQ ID NO: 1297396
uuucuuguagcucagaagc

SEQ ID NO: 1297398 - RNA, 19 nt, Artificial Sequence
  Description of Artificial Sequence: Synthetic oligonucleotide
  Sense strand starting at position 1620 of SEQ ID NO: 1241758
gcucuucuuucugcgaaca

SEQ ID NO: 1297399 - RNA, 19 nt, Artificial Sequence
  Description of Artificial Sequence: Synthetic oligonucleotide
  Antisense strand to SEQ ID NO: 1297398
uguucgcagaaagaagagc

SEQ ID NO: 1297400 - RNA, 19 nt, Artificial Sequence
  Description of Artificial Sequence: Synthetic oligonucleotide
  Sense strand starting at position 2267 of SEQ ID NO: 1241758
cacaguaugcugcgaaucu

SEQ ID NO: 1297401 - RNA, 19 nt, Artificial Sequence
  Description of Artificial Sequence: Synthetic oligonucleotide
  Antisense strand to SEQ ID NO: 1297400
agauucgcagcauacugug

SEQ ID NO: 1297402 - RNA, 19 nt, Artificial Sequence
  Description of Artificial Sequence: Synthetic oligonucleotide
  Sense strand starting at position 2276 of SEQ ID NO: 1241758
cugcgaaucugcuuuacug

SEQ ID NO: 1297403 - RNA, 19 nt, Artificial Sequence
  Description of Artificial Sequence: Synthetic oligonucleotide
  Antisense strand to SEQ ID NO: 1297402
caguaaagcagauucgcag

SEQ ID NO: 1297404 - RNA, 19 nt, Artificial Sequence
  Description of Artificial Sequence: Synthetic oligonucleotide
  Sense strand starting at position 2294 of SEQ ID NO: 1241758
gggagccaguggucguuua

SEQ ID NO: 1297405 - RNA, 19 nt, Artificial Sequence
  Description of Artificial Sequence: Synthetic oligonucleotide
  Antisense strand to SEQ ID NO: 1297404
uaaacgaccacuggcuccc

SEQ ID NO: 1297406 - RNA, 19 nt, Artificial Sequence
  Description of Artificial Sequence: Synthetic oligonucleotide
  Sense strand starting at position 2498 of SEQ ID NO: 1241758
cguuaaauugcugggcuga

SEQ ID NO: 1297407 - RNA, 19 nt, Artificial Sequence
  Description of Artificial Sequence: Synthetic oligonucleotide
  Antisense strand to SEQ ID NO: 1297406
ucagcccagcaauuuaacg

SEQ ID NO: 1297408 - RNA, 19 nt, Artificial Sequence
  Description of Artificial Sequence: Synthetic oligonucleotide
  Sense strand starting at position 2500 of SEQ ID NO: 1241758
uuaaauugcugggcugaga

SEQ ID NO: 1297409 - RNA, 19 nt, Artificial Sequence
  Description of Artificial Sequence: Synthetic oligonucleotide
  Antisense strand to SEQ ID NO: 1297408
ucucagcccagcaauuuaa

SEQ ID NO: 1297410 - RNA, 19 nt, Artificial Sequence
  Description of Artificial Sequence: Synthetic oligonucleotide
  Sense strand starting at position 2548 of SEQ ID NO: 1241758
aacugagagucccaugaua

SEQ ID NO: 1297411 - RNA, 19 nt, Artificial Sequence
  Description of Artificial Sequence: Synthetic oligonucleotide
  Antisense strand to SEQ ID NO: 1297410
uaucaugggacucucaguu

SEQ ID NO: 1297412 - RNA, 19 nt, Artificial Sequence
  Description of Artificial Sequence: Synthetic oligonucleotide
  Sense strand starting at position 2550 of SEQ ID NO: 1241758
cugagagucccaugauacu

SEQ ID NO: 1297413 - RNA, 19 nt, Artificial Sequence
  Description of Artificial Sequence: Synthetic oligonucleotide
  Antisense strand to SEQ ID NO: 1297412
aguaucaugggacucucag

SEQ ID NO: 1297414 - RNA, 19 nt, Artificial Sequence
  Description of Artificial Sequence: Synthetic oligonucleotide
  Sense strand starting at position 2624 of SEQ ID NO: 1241758
aagguaagacuuuguccua

SEQ ID NO: 1297415 - RNA, 19 nt, Artificial Sequence
  Description of Artificial Sequence: Synthetic oligonucleotide
  Antisense strand to SEQ ID NO: 1297414
uaggacaaagucuuaccuu

SEQ ID NO: 1297416 - RNA, 19 nt, Artificial Sequence
  Description of Artificial Sequence: Synthetic oligonucleotide
  Sense strand starting at position 2625 of SEQ ID NO: 1241758
agguaagacuuuguccuaa

SEQ ID NO: 1297417 - RNA, 19 nt, Artificial Sequence
  Description of Artificial Sequence: Synthetic oligonucleotide
  Antisense strand to SEQ ID NO: 1297416
uuaggacaaagucuuaccu

SEQ ID NO: 1297418 - RNA, 19 nt, Artificial Sequence
  Description of Artificial Sequence: Synthetic oligonucleotide
  Sense strand starting at position 2627 of SEQ ID NO: 1241758
guaagacuuuguccuaaau

SEQ ID NO: 1297419 - RNA, 19 nt, Artificial Sequence
  Description of Artificial Sequence: Synthetic oligonucleotide
  Antisense strand to SEQ ID NO: 1297418
auuuaggacaaagucuuac

SEQ ID NO: 1297420 - RNA, 19 nt, Artificial Sequence
  Description of Artificial Sequence: Synthetic oligonucleotide
  Sense strand starting at position 2766 of SEQ ID NO: 1241758
uuauuacuagugugugcau

SEQ ID NO: 1297421 - RNA, 19 nt, Artificial Sequence
  Description of Artificial Sequence: Synthetic oligonucleotide
  Antisense strand to SEQ ID NO: 1297420
augcacacacuaguaauaa

SEQ ID NO: 1297422 - RNA, 19 nt, Artificial Sequence
  Description of Artificial Sequence: Synthetic oligonucleotide
  Sense strand starting at position 2767 of SEQ ID NO: 1241758
uauuacuagugugugcaua

SEQ ID NO: 1297423 - RNA, 19 nt, Artificial Sequence
  Description of Artificial Sequence: Synthetic oligonucleotide
  Antisense strand to SEQ ID NO: 1297422
uaugcacacacuaguaaua

SEQ ID NO: 1297424 - RNA, 19 nt, Artificial Sequence
  Description of Artificial Sequence: Synthetic oligonucleotide
  Sense strand starting at position 2793 of SEQ ID NO: 1241758
gcucaucacugcucugaau

SEQ ID NO: 1297425 - RNA, 19 nt, Artificial Sequence
  Description of Artificial Sequence: Synthetic oligonucleotide
  Antisense strand to SEQ ID NO: 1297424
auucagagcagugaugagc

SEQ ID NO: 1297426 - RNA, 19 nt, Artificial Sequence
  Description of Artificial Sequence: Synthetic oligonucleotide
  Sense strand starting at position 2806 of SEQ ID NO: 1241758
cugaauaccagugggucua

SEQ ID NO: 1297427 - RNA, 19 nt, Artificial Sequence
  Description of Artificial Sequence: Synthetic oligonucleotide
  Antisense strand to SEQ ID NO: 1297426
uagacccacugguauucag

SEQ ID NO: 1297428 - RNA, 19 nt, Artificial Sequence
  Description of Artificial Sequence: Synthetic oligonucleotide
  Sense strand starting at position 3850 of SEQ ID NO: 1241758
auaucaugcuuucuugagu

SEQ ID NO: 1297429 - RNA, 19 nt, Artificial Sequence
  Description of Artificial Sequence: Synthetic oligonucleotide
  Antisense strand to SEQ ID NO: 1297428
acucaagaaagcaugauau

SEQ ID NO: 1297430 - RNA, 19 nt, Artificial Sequence
  Description of Artificial Sequence: Synthetic oligonucleotide
  Sense strand starting at position 3853 of SEQ ID NO: 1241758
ucaugcuuucuugaguacu

SEQ ID NO: 1297431 - RNA, 19 nt, Artificial Sequence
  Description of Artificial Sequence: Synthetic oligonucleotide
  Antisense strand to SEQ ID NO: 1297430
aguacucaagaaagcauga

SEQ ID NO: 1297432 - RNA, 19 nt, Artificial Sequence
  Description of Artificial Sequence: Synthetic oligonucleotide
  Sense strand starting at position 3855 of SEQ ID NO: 1241758
augcuuucuugaguacugu

SEQ ID NO: 1297433 - RNA, 19 nt, Artificial Sequence
  Description of Artificial Sequence: Synthetic oligonucleotide
  Antisense strand to SEQ ID NO: 1297432
acaguacucaagaaagcau

SEQ ID NO: 1297434 - RNA, 19 nt, Artificial Sequence
  Description of Artificial Sequence: Synthetic oligonucleotide
  Sense strand starting at position 3861 of SEQ ID NO: 1241758
ucuugaguacuguauguuu

SEQ ID NO: 1297435 - RNA, 19 nt, Artificial Sequence
  Description of Artificial Sequence: Synthetic oligonucleotide
  Antisense strand to SEQ ID NO: 1297434
aaacauacaguacucaaga

SEQ ID NO: 1297436 - RNA, 19 nt, Artificial Sequence
  Description of Artificial Sequence: Synthetic oligonucleotide
  Sense strand starting at position 3887 of SEQ ID NO: 1241758
ugauaauugucuucuagaa

SEQ ID NO: 1297437 - RNA, 19 nt, Artificial Sequence
  Description of Artificial Sequence: Synthetic oligonucleotide
  Antisense strand to SEQ ID NO: 1297436
uucuagaagacaauuauca

SEQ ID NO: 1297438 - RNA, 19 nt, Artificial Sequence
  Description of Artificial Sequence: Synthetic oligonucleotide
  Sense strand starting at position 3889 of SEQ ID NO: 1241758
auaauugucuucuagaagg

SEQ ID NO: 1297439 - RNA, 19 nt, Artificial Sequence
  Description of Artificial Sequence: Synthetic oligonucleotide
  Antisense strand to SEQ ID NO: 1297438
ccuucuagaagacaauuau

SEQ ID NO: 1297440 - RNA, 19 nt, Artificial Sequence
  Description of Artificial Sequence: Synthetic oligonucleotide
  Sense strand starting at position 3895 of SEQ ID NO: 1241758
gucuucuagaagggaacuu

SEQ ID NO: 1297441 - RNA, 19 nt, Artificial Sequence
  Description of Artificial Sequence: Synthetic oligonucleotide
  Antisense strand to SEQ ID NO: 1297440
aaguucccuucuagaagac

SEQ ID NO: 1297442 - RNA, 19 nt, Artificial Sequence
  Description of Artificial Sequence: Synthetic oligonucleotide
  Sense strand starting at position 3904 of SEQ ID NO: 1241758
aagggaacuugguuauugu

SEQ ID NO: 1297443 - RNA, 19 nt, Artificial Sequence
  Description of Artificial Sequence: Synthetic oligonucleotide
  Antisense strand to SEQ ID NO: 1297442
acaauaaccaaguucccuu

SEQ ID NO: 1297444 - RNA, 19 nt, Artificial Sequence
  Description of Artificial Sequence: Synthetic oligonucleotide
  Sense strand starting at position 3907 of SEQ ID NO: 1241758
ggaacuugguuauugugaa

SEQ ID NO: 1297445 - RNA, 19 nt, Artificial Sequence
  Description of Artificial Sequence: Synthetic oligonucleotide
  Antisense strand to SEQ ID NO: 1297444
uucacaauaaccaaguucc

SEQ ID NO: 1297446 - RNA, 19 nt, Artificial Sequence
  Description of Artificial Sequence: Synthetic oligonucleotide
  Sense strand starting at position 3950 of SEQ ID NO: 1241758
aggauagugucagcaucuu

SEQ ID NO: 1297447 - RNA, 19 nt, Artificial Sequence
  Description of Artificial Sequence: Synthetic oligonucleotide
  Antisense strand to SEQ ID NO: 1297446
aagaugcugacacuauccu

SEQ ID NO: 1297448 - RNA, 19 nt, Artificial Sequence
  Description of Artificial Sequence: Synthetic oligonucleotide
  Sense strand starting at position 3969 of SEQ ID NO: 1241758
guaaguauuacuggugauc

SEQ ID NO: 1297449 - RNA, 19 nt, Artificial Sequence
  Description of Artificial Sequence: Synthetic oligonucleotide
  Antisense strand to SEQ ID NO: 1297448
gaucaccaguaauacuuac

SEQ ID NO: 1297450 - RNA, 19 nt, Artificial Sequence
  Description of Artificial Sequence: Synthetic oligonucleotide
  Sense strand starting at position 14 of SEQ ID NO: 1241759
acuuauccugcuuaugaga

SEQ ID NO: 1297451 - RNA, 19 nt, Artificial Sequence
  Description of Artificial Sequence: Synthetic oligonucleotide
  Antisense strand to SEQ ID NO: 1297450
ucucauaagcaggauaagu

SEQ ID NO: 1297452 - RNA, 19 nt, Artificial Sequence
  Description of Artificial Sequence: Synthetic oligonucleotide
  Sense strand starting at position 142 of SEQ ID NO: 1241759
aguuaaagagccuggguaa

SEQ ID NO: 1297453 - RNA, 19 nt, Artificial Sequence
  Description of Artificial Sequence: Synthetic oligonucleotide
  Antisense strand to SEQ ID NO: 1297452
uuacccaggcucuuuaacu

SEQ ID NO: 1297454 - RNA, 19 nt, Artificial Sequence
  Description of Artificial Sequence: Synthetic oligonucleotide
  Sense strand starting at position 750 of SEQ ID NO: 1241759
gggaaacugugacauacaa

SEQ ID NO: 1297455 - RNA, 19 nt, Artificial Sequence
  Description of Artificial Sequence: Synthetic oligonucleotide
  Antisense strand to SEQ ID NO: 1297454
uuguaugucacaguuuccc

SEQ ID NO: 1297456 - RNA, 19 nt, Artificial Sequence
  Description of Artificial Sequence: Synthetic oligonucleotide
  Sense strand starting at position 790 of SEQ ID NO: 1241759
gucugagucacuggcaaau

SEQ ID NO: 1297457 - RNA, 19 nt, Artificial Sequence
  Description of Artificial Sequence: Synthetic oligonucleotide
  Antisense strand to SEQ ID NO: 1297456
auuugccagugacucagac

SEQ ID NO: 1297458 - RNA, 19 nt, Artificial Sequence
  Description of Artificial Sequence: Synthetic oligonucleotide
  Sense strand starting at position 1305 of SEQ ID NO: 1241759
cuaagauuacuguagcuau

SEQ ID NO: 1297459 - RNA, 19 nt, Artificial Sequence
  Description of Artificial Sequence: Synthetic oligonucleotide
  Antisense strand to SEQ ID NO: 1297458
auagcuacaguaaucuuag

SEQ ID NO: 1297460 - RNA, 19 nt, Artificial Sequence
  Description of Artificial Sequence: Synthetic oligonucleotide
  Sense strand starting at position 1406 of SEQ ID NO: 1241759
auaccuugcuuucugauga

SEQ ID NO: 1297461 - RNA, 19 nt, Artificial Sequence
  Description of Artificial Sequence: Synthetic oligonucleotide
  Antisense strand to SEQ ID NO: 1297460
ucaucagaaagcaagguau

SEQ ID NO: 1297462 - RNA, 19 nt, Artificial Sequence
  Description of Artificial Sequence: Synthetic oligonucleotide
  Sense strand starting at position 2055 of SEQ ID NO: 1241759
ccuggaguuuggagggaua

SEQ ID NO: 1297463 - RNA, 19 nt, Artificial Sequence
  Description of Artificial Sequence: Synthetic oligonucleotide
  Antisense strand to SEQ ID NO: 1297462
uaucccuccaaacuccagg

SEQ ID NO: 1297464 - RNA, 19 nt, Artificial Sequence
  Description of Artificial Sequence: Synthetic oligonucleotide
  Sense strand starting at position 2068 of SEQ ID NO: 1241759
gggauaagggcauguagaa

SEQ ID NO: 1297465 - RNA, 19 nt, Artificial Sequence
  Description of Artificial Sequence: Synthetic oligonucleotide
  Antisense strand to SEQ ID NO: 1297464
uucuacaugcccuuauccc

SEQ ID NO: 1297466 - RNA, 19 nt, Artificial Sequence
  Description of Artificial Sequence: Synthetic oligonucleotide
  Sense strand starting at position 2114 of SEQ ID NO: 1241759
uaggguacucccgaccuaa

SEQ ID NO: 1297467 - RNA, 19 nt, Artificial Sequence
  Description of Artificial Sequence: Synthetic oligonucleotide
  Antisense strand to SEQ ID NO: 1297466
uuaggucgggaguacccua

SEQ ID NO: 1297468 - RNA, 19 nt, Artificial Sequence
  Description of Artificial Sequence: Synthetic oligonucleotide
  Sense strand starting at position 2148 of SEQ ID NO: 1241759
gugcaauagagacgugauc

SEQ ID NO: 1297469 - RNA, 19 nt, Artificial Sequence
  Description of Artificial Sequence: Synthetic oligonucleotide
  Antisense strand to SEQ ID NO: 1297468
gaucacgucucuauugcac

SEQ ID NO: 1297470 - RNA, 19 nt, Artificial Sequence
  Description of Artificial Sequence: Synthetic oligonucleotide
  Sense strand starting at position 2150 of SEQ ID NO: 1241759
gcaauagagacgugaucug

SEQ ID NO: 1297471 - RNA, 19 nt, Artificial Sequence
  Description of Artificial Sequence: Synthetic oligonucleotide
  Antisense strand to SEQ ID NO: 1297470
cagaucacgucucuauugc

SEQ ID NO: 1297472 - RNA, 19 nt, Artificial Sequence
  Description of Artificial Sequence: Synthetic oligonucleotide
  Sense strand starting at position 2157 of SEQ ID NO: 1241759
agacgugaucugggcuaga

SEQ ID NO: 1297473 - RNA, 19 nt, Artificial Sequence
  Description of Artificial Sequence: Synthetic oligonucleotide
  Antisense strand to SEQ ID NO: 1297472
ucuagcccagaucacgucu

SEQ ID NO: 1297474 - RNA, 19 nt, Artificial Sequence
  Description of Artificial Sequence: Synthetic oligonucleotide
  Sense strand starting at position 2160 of SEQ ID NO: 1241759
cgugaucugggcuagagga

SEQ ID NO: 1297475 - RNA, 19 nt, Artificial Sequence
  Description of Artificial Sequence: Synthetic oligonucleotide
  Antisense strand to SEQ ID NO: 1297474
uccucuagcccagaucacg

SEQ ID NO: 1297476 - RNA, 19 nt, Artificial Sequence
  Description of Artificial Sequence: Synthetic oligonucleotide
  Sense strand starting at position 2225 of SEQ ID NO: 1241759
gguagauugaguggcuaga

SEQ ID NO: 1297477 - RNA, 19 nt, Artificial Sequence
  Description of Artificial Sequence: Synthetic oligonucleotide
  Antisense strand to SEQ ID NO: 1297476
ucuagccacucaaucuacc

SEQ ID NO: 1297478 - RNA, 19 nt, Artificial Sequence
  Description of Artificial Sequence: Synthetic oligonucleotide
  Sense strand starting at position 2227 of SEQ ID NO: 1241759
uagauugaguggcuagaga

SEQ ID NO: 1297479 - RNA, 19 nt, Artificial Sequence
  Description of Artificial Sequence: Synthetic oligonucleotide
  Antisense strand to SEQ ID NO: 1297478
ucucuagccacucaaucua

SEQ ID NO: 1297480 - RNA, 19 nt, Artificial Sequence
  Description of Artificial Sequence: Synthetic oligonucleotide
  Sense strand starting at position 2250 of SEQ ID NO: 1241759
ggagguaaguggcuauaga

SEQ ID NO: 1297481 - RNA, 19 nt, Artificial Sequence
  Description of Artificial Sequence: Synthetic oligonucleotide
  Antisense strand to SEQ ID NO: 1297480
ucuauagccacuuaccucc

SEQ ID NO: 1297482 - RNA, 19 nt, Artificial Sequence
  Description of Artificial Sequence: Synthetic oligonucleotide
  Sense strand starting at position 2251 of SEQ ID NO: 1241759
gagguaaguggcuauagaa

SEQ ID NO: 1297483 - RNA, 19 nt, Artificial Sequence
  Description of Artificial Sequence: Synthetic oligonucleotide
  Antisense strand to SEQ ID NO: 1297482
uucuauagccacuuaccuc

SEQ ID NO: 1297484 - RNA, 19 nt, Artificial Sequence
  Description of Artificial Sequence: Synthetic oligonucleotide
  Sense strand starting at position 2295 of SEQ ID NO: 1241759
acgcgacaccaugacuuau

SEQ ID NO: 1297485 - RNA, 19 nt, Artificial Sequence
  Description of Artificial Sequence: Synthetic oligonucleotide
  Antisense strand to SEQ ID NO: 1297484
auaagucauggugucgcgu

SEQ ID NO: 1297486 - RNA, 19 nt, Artificial Sequence
  Description of Artificial Sequence: Synthetic oligonucleotide
  Sense strand starting at position 2325 of SEQ ID NO: 1241759
caaguauaucaucaucgga

SEQ ID NO: 1297487 - RNA, 19 nt, Artificial Sequence
  Description of Artificial Sequence: Synthetic oligonucleotide
  Antisense strand to SEQ ID NO: 1297486
uccgaugaugauauacuug

SEQ ID NO: 1297488 - RNA, 19 nt, Artificial Sequence
  Description of Artificial Sequence: Synthetic oligonucleotide
  Sense strand starting at position 2327 of SEQ ID NO: 1241759
aguauaucaucaucggaga

SEQ ID NO: 1297489 - RNA, 19 nt, Artificial Sequence
  Description of Artificial Sequence: Synthetic oligonucleotide
  Antisense strand to SEQ ID NO: 1297488
ucuccgaugaugauauacu

SEQ ID NO: 1297490 - RNA, 19 nt, Artificial Sequence
  Description of Artificial Sequence: Synthetic oligonucleotide
  Sense strand starting at position 2513 of SEQ ID NO: 1241759
ggaaguccauacucuggaa

SEQ ID NO: 1297491 - RNA, 19 nt, Artificial Sequence
  Description of Artificial Sequence: Synthetic oligonucleotide
  Antisense strand to SEQ ID NO: 1297490
uuccagaguauggacuucc

SEQ ID NO: 1297492 - RNA, 19 nt, Artificial Sequence
  Description of Artificial Sequence: Synthetic oligonucleotide
  Sense strand starting at position 2655 of SEQ ID NO: 1241759
ugcaucuacuuguuccaga

SEQ ID NO: 1297493 - RNA, 19 nt, Artificial Sequence
  Description of Artificial Sequence: Synthetic oligonucleotide
  Antisense strand to SEQ ID NO: 1297492
ucuggaacaaguagaugca

SEQ ID NO: 1297494 - RNA, 19 nt, Artificial Sequence
  Description of Artificial Sequence: Synthetic oligonucleotide
  Sense strand starting at position 2770 of SEQ ID NO: 1241759
guccaaacuuauguuaaug

SEQ ID NO: 1297495 - RNA, 19 nt, Artificial Sequence
  Description of Artificial Sequence: Synthetic oligonucleotide
  Antisense strand to SEQ ID NO: 1297494
cauuaacauaaguuuggac

SEQ ID NO: 1297496 - RNA, 19 nt, Artificial Sequence
  Description of Artificial Sequence: Synthetic oligonucleotide
  Sense strand starting at position 2792 of SEQ ID NO: 1241759
ugaccaaugaaacguugau

SEQ ID NO: 1297497 - RNA, 19 nt, Artificial Sequence
  Description of Artificial Sequence: Synthetic oligonucleotide
  Antisense strand to SEQ ID NO: 1297496
aucaacguuucauugguca

SEQ ID NO: 1297498 - RNA, 19 nt, Artificial Sequence
  Description of Artificial Sequence: Synthetic oligonucleotide
  Sense strand starting at position 2796 of SEQ ID NO: 1241759
caaugaaacguugauaugu

SEQ ID NO: 1297499 - RNA, 19 nt, Artificial Sequence
  Description of Artificial Sequence: Synthetic oligonucleotide
  Antisense strand to SEQ ID NO: 1297498
acauaucaacguuucauug

SEQ ID NO: 1297500 - RNA, 19 nt, Artificial Sequence
  Description of Artificial Sequence: Synthetic oligonucleotide
  Sense strand starting at position 2819 of SEQ ID NO: 1241759
aguaguguaagggagagua

SEQ ID NO: 1297501 - RNA, 19 nt, Artificial Sequence
  Description of Artificial Sequence: Synthetic oligonucleotide
  Antisense strand to SEQ ID NO: 1297500
uacucucccuuacacuacu

SEQ ID NO: 1297502 - RNA, 19 nt, Artificial Sequence
  Description of Artificial Sequence: Synthetic oligonucleotide
  Sense strand starting at position 2867 of SEQ ID NO: 1241759
gagguauagacucgucaua

SEQ ID NO: 1297503 - RNA, 19 nt, Artificial Sequence
  Description of Artificial Sequence: Synthetic oligonucleotide
  Antisense strand to SEQ ID NO: 1297502
uaugacgagucuauaccuc

SEQ ID NO: 1297504 - RNA, 19 nt, Artificial Sequence
  Description of Artificial Sequence: Synthetic oligonucleotide
  Sense strand starting at position 2869 of SEQ ID NO: 1241759
gguauagacucgucauaua

SEQ ID NO: 1297505 - RNA, 19 nt, Artificial Sequence
  Description of Artificial Sequence: Synthetic oligonucleotide
  Antisense strand to SEQ ID NO: 1297504
uauaugacgagucuauacc

SEQ ID NO: 1297506 - RNA, 19 nt, Artificial Sequence
  Description of Artificial Sequence: Synthetic oligonucleotide
  Sense strand starting at position 2953 of SEQ ID NO: 1241759
gaacucaucugugcuuuga

SEQ ID NO: 1297507 - RNA, 19 nt, Artificial Sequence
  Description of Artificial Sequence: Synthetic oligonucleotide
  Antisense strand to SEQ ID NO: 1297506
ucaaagcacagaugaguuc

SEQ ID NO: 1297508 - RNA, 19 nt, Artificial Sequence
  Description of Artificial Sequence: Synthetic oligonucleotide
  Sense strand starting at position 2962 of SEQ ID NO: 1241759
ugugcuuugagguaaauua

SEQ ID NO: 1297509 - RNA, 19 nt, Artificial Sequence
  Description of Artificial Sequence: Synthetic oligonucleotide
  Antisense strand to SEQ ID NO: 1297508
uaauuuaccucaaagcaca

SEQ ID NO: 1297510 - RNA, 19 nt, Artificial Sequence
  Description of Artificial Sequence: Synthetic oligonucleotide
  Sense strand starting at position 3052 of SEQ ID NO: 1241759
aggagucaucccugccuua

SEQ ID NO: 1297511 - RNA, 19 nt, Artificial Sequence
  Description of Artificial Sequence: Synthetic oligonucleotide
  Antisense strand to SEQ ID NO: 1297510
uaaggcagggaugacuccu

SEQ ID NO: 1297512 - RNA, 19 nt, Artificial Sequence
  Description of Artificial Sequence: Synthetic oligonucleotide
  Sense strand starting at position 3055 of SEQ ID NO: 1241759
agucaucccugccuuagaa

SEQ ID NO: 1297513 - RNA, 19 nt, Artificial Sequence
  Description of Artificial Sequence: Synthetic oligonucleotide
  Antisense strand to SEQ ID NO: 1297512
uucuaaggcagggaugacu

SEQ ID NO: 1297514 - RNA, 19 nt, Artificial Sequence
  Description of Artificial Sequence: Synthetic oligonucleotide
  Sense strand starting at position 3109 of SEQ ID NO: 1241759
aaugaaagaguguguuaac

SEQ ID NO: 1297515 - RNA, 19 nt, Artificial Sequence
  Description of Artificial Sequence: Synthetic oligonucleotide
  Antisense strand to SEQ ID NO: 1297514
guuaacacacucuuucauu

SEQ ID NO: 1297516 - RNA, 19 nt, Artificial Sequence
  Description of Artificial Sequence: Synthetic oligonucleotide
  Sense strand starting at position 3110 of SEQ ID NO: 1241759
augaaagaguguguuaaca

SEQ ID NO: 1297517 - RNA, 19 nt, Artificial Sequence
  Description of Artificial Sequence: Synthetic oligonucleotide
  Antisense strand to SEQ ID NO: 1297516
uguuaacacacucuuucau

SEQ ID NO: 1297518 - RNA, 19 nt, Artificial Sequence
  Description of Artificial Sequence: Synthetic oligonucleotide
  Sense strand starting at position 3169 of SEQ ID NO: 1241759
uucccacacguuugugaua

SEQ ID NO: 1297519 - RNA, 19 nt, Artificial Sequence
  Description of Artificial Sequence: Synthetic oligonucleotide
  Antisense strand to SEQ ID NO: 1297518
uaucacaaacgugugggaa

SEQ ID NO: 1297520 - RNA, 19 nt, Artificial Sequence
  Description of Artificial Sequence: Synthetic oligonucleotide
  Sense strand starting at position 3170 of SEQ ID NO: 1241759
ucccacacguuugugauaa

SEQ ID NO: 1297521 - RNA, 19 nt, Artificial Sequence
  Description of Artificial Sequence: Synthetic oligonucleotide
  Antisense strand to SEQ ID NO: 1297520
uuaucacaaacguguggga

SEQ ID NO: 1297522 - RNA, 19 nt, Artificial Sequence
  Description of Artificial Sequence: Synthetic oligonucleotide
  Sense strand starting at position 3459 of SEQ ID NO: 1241759
agggaauauugagcgaauu

SEQ ID NO: 1297523 - RNA, 19 nt, Artificial Sequence
  Description of Artificial Sequence: Synthetic oligonucleotide
  Antisense strand to SEQ ID NO: 1297522
aauucgcucaauauucccu

SEQ ID NO: 1297524 - RNA, 19 nt, Artificial Sequence
  Description of Artificial Sequence: Synthetic oligonucleotide
  Sense strand starting at position 3460 of SEQ ID NO: 1241759
gggaauauugagcgaauuc

SEQ ID NO: 1297525 - RNA, 19 nt, Artificial Sequence
  Description of Artificial Sequence: Synthetic oligonucleotide
  Antisense strand to SEQ ID NO: 1297524
gaauucgcucaauauuccc

SEQ ID NO: 1297526 - RNA, 19 nt, Artificial Sequence
  Description of Artificial Sequence: Synthetic oligonucleotide
  Sense strand starting at position 3461 of SEQ ID NO: 1241759
ggaauauugagcgaauucu

SEQ ID NO: 1297527 - RNA, 19 nt, Artificial Sequence
  Description of Artificial Sequence: Synthetic oligonucleotide
  Antisense strand to SEQ ID NO: 1297526
agaauucgcucaauauucc

SEQ ID NO: 1297528 - RNA, 19 nt, Artificial Sequence
  Description of Artificial Sequence: Synthetic oligonucleotide
  Sense strand starting at position 3467 of SEQ ID NO: 1241759
uugagcgaauucucacuuu

SEQ ID NO: 1297529 - RNA, 19 nt, Artificial Sequence
  Description of Artificial Sequence: Synthetic oligonucleotide
  Antisense strand to SEQ ID NO: 1297528
aaagugagaauucgcucaa

SEQ ID NO: 1297530 - RNA, 19 nt, Artificial Sequence
  Description of Artificial Sequence: Synthetic oligonucleotide
  Sense strand starting at position 364 of SEQ ID NO: 1241760
gcccgagauacuuagaaca

SEQ ID NO: 1297531 - RNA, 19 nt, Artificial Sequence
  Description of Artificial Sequence: Synthetic oligonucleotide
  Antisense strand to SEQ ID NO: 1297530
uguucuaaguaucucgggc

SEQ ID NO: 1297532 - RNA, 19 nt, Artificial Sequence
  Description of Artificial Sequence: Synthetic oligonucleotide
  Sense strand starting at position 491 of SEQ ID NO: 1241760
aggaguguggugugggaau

SEQ ID NO: 1297533 - RNA, 19 nt, Artificial Sequence
  Description of Artificial Sequence: Synthetic oligonucleotide
  Antisense strand to SEQ ID NO: 1297532
auucccacaccacacuccu

SEQ ID NO: 1297534 - RNA, 19 nt, Artificial Sequence
  Description of Artificial Sequence: Synthetic oligonucleotide
  Sense strand starting at position 493 of SEQ ID NO: 1241760
gaguguggugugggaauga

SEQ ID NO: 1297535 - RNA, 19 nt, Artificial Sequence
  Description of Artificial Sequence: Synthetic oligonucleotide
  Antisense strand to SEQ ID NO: 1297534
ucauucccacaccacacuc

SEQ ID NO: 1297536 - RNA, 19 nt, Artificial Sequence
  Description of Artificial Sequence: Synthetic oligonucleotide
  Sense strand starting at position 542 of SEQ ID NO: 1241760
uuuguuuccagaggaguua

SEQ ID NO: 1297537 - RNA, 19 nt, Artificial Sequence
  Description of Artificial Sequence: Synthetic oligonucleotide
  Antisense strand to SEQ ID NO: 1297536
uaacuccucuggaaacaaa

SEQ ID NO: 1297538 - RNA, 19 nt, Artificial Sequence
  Description of Artificial Sequence: Synthetic oligonucleotide
  Sense strand starting at position 543 of SEQ ID NO: 1241760
uuguuuccagaggaguuau

SEQ ID NO: 1297539 - RNA, 19 nt, Artificial Sequence
  Description of Artificial Sequence: Synthetic oligonucleotide
  Antisense strand to SEQ ID NO: 1297538
auaacuccucuggaaacaa

SEQ ID NO: 1297540 - RNA, 19 nt, Artificial Sequence
  Description of Artificial Sequence: Synthetic oligonucleotide
  Sense strand starting at position 555 of SEQ ID NO: 1241760
gaguuauucugacuaggcu

SEQ ID NO: 1297541 - RNA, 19 nt, Artificial Sequence
  Description of Artificial Sequence: Synthetic oligonucleotide
  Antisense strand to SEQ ID NO: 1297540
agccuagucagaauaacuc

SEQ ID NO: 1297542 - RNA, 19 nt, Artificial Sequence
  Description of Artificial Sequence: Synthetic oligonucleotide
  Sense strand starting at position 771 of SEQ ID NO: 1241760
cuaauugccuggcucagau

SEQ ID NO: 1297543 - RNA, 19 nt, Artificial Sequence
  Description of Artificial Sequence: Synthetic oligonucleotide
  Antisense strand to SEQ ID NO: 1297542
aucugagccaggcaauuag

SEQ ID NO: 1297544 - RNA, 19 nt, Artificial Sequence
  Description of Artificial Sequence: Synthetic oligonucleotide
  Sense strand starting at position 790 of SEQ ID NO: 1241760
acuagacacuuggaaauua

SEQ ID NO: 1297545 - RNA, 19 nt, Artificial Sequence
  Description of Artificial Sequence: Synthetic oligonucleotide
  Antisense strand to SEQ ID NO: 1297544
uaauuuccaagugucuagu

SEQ ID NO: 1297546 - RNA, 19 nt, Artificial Sequence
  Description of Artificial Sequence: Synthetic oligonucleotide
  Sense strand starting at position 798 of SEQ ID NO: 1241760
cuuggaaauuagucuaaau

SEQ ID NO: 1297547 - RNA, 19 nt, Artificial Sequence
  Description of Artificial Sequence: Synthetic oligonucleotide
  Antisense strand to SEQ ID NO: 1297546
auuuagacuaauuuccaag

SEQ ID NO: 1297548 - RNA, 19 nt, Artificial Sequence
  Description of Artificial Sequence: Synthetic oligonucleotide
  Sense strand starting at position 876 of SEQ ID NO: 1241760
uccugacuucuggaauguc

SEQ ID NO: 1297549 - RNA, 19 nt, Artificial Sequence
  Description of Artificial Sequence: Synthetic oligonucleotide
  Antisense strand to SEQ ID NO: 1297548
gacauuccagaagucagga

SEQ ID NO: 1297550 - RNA, 19 nt, Artificial Sequence
  Description of Artificial Sequence: Synthetic oligonucleotide
  Sense strand starting at position 890 of SEQ ID NO: 1241760
augucuagaugaucucuaa

SEQ ID NO: 1297551 - RNA, 19 nt, Artificial Sequence
  Description of Artificial Sequence: Synthetic oligonucleotide
  Antisense strand to SEQ ID NO: 1297550
uuagagaucaucuagacau

SEQ ID NO: 1297552 - RNA, 19 nt, Artificial Sequence
  Description of Artificial Sequence: Synthetic oligonucleotide
  Sense strand starting at position 893 of SEQ ID NO: 1241760
ucuagaugaucucuaaagu

SEQ ID NO: 1297553 - RNA, 19 nt, Artificial Sequence
  Description of Artificial Sequence: Synthetic oligonucleotide
  Antisense strand to SEQ ID NO: 1297552
acuuuagagaucaucuaga

SEQ ID NO: 1297554 - RNA, 19 nt, Artificial Sequence
  Description of Artificial Sequence: Synthetic oligonucleotide
  Sense strand starting at position 1271 of SEQ ID NO: 1241760
ccuaucaaucagugagugu

SEQ ID NO: 1297555 - RNA, 19 nt, Artificial Sequence
  Description of Artificial Sequence: Synthetic oligonucleotide
  Antisense strand to SEQ ID NO: 1297554
acacucacugauugauagg

SEQ ID NO: 1297556 - RNA, 19 nt, Artificial Sequence
  Description of Artificial Sequence: Synthetic oligonucleotide
  Sense strand starting at position 1669 of SEQ ID NO: 1241760
ggaggacuguggaguaaug

SEQ ID NO: 1297557 - RNA, 19 nt, Artificial Sequence
  Description of Artificial Sequence: Synthetic oligonucleotide
  Antisense strand to SEQ ID NO: 1297556
cauuacuccacaguccucc

SEQ ID NO: 1297558 - RNA, 19 nt, Artificial Sequence
  Description of Artificial Sequence: Synthetic oligonucleotide
  Sense strand starting at position 1680 of SEQ ID NO: 1241760
gaguaaugaggaugagugu

SEQ ID NO: 1297559 - RNA, 19 nt, Artificial Sequence
  Description of Artificial Sequence: Synthetic oligonucleotide
  Antisense strand to SEQ ID NO: 1297558
acacucauccucauuacuc

SEQ ID NO: 1297560 - RNA, 19 nt, Artificial Sequence
  Description of Artificial Sequence: Synthetic oligonucleotide
  Sense strand starting at position 1683 of SEQ ID NO: 1241760
uaaugaggaugaguguuau

SEQ ID NO: 1297561 - RNA, 19 nt, Artificial Sequence
  Description of Artificial Sequence: Synthetic oligonucleotide
  Antisense strand to SEQ ID NO: 1297560
auaacacucauccucauua

SEQ ID NO: 1297562 - RNA, 19 nt, Artificial Sequence
  Description of Artificial Sequence: Synthetic oligonucleotide
  Sense strand starting at position 1818 of SEQ ID NO: 1241760
uggagauaccaguguggau

SEQ ID NO: 1297563 - RNA, 19 nt, Artificial Sequence
  Description of Artificial Sequence: Synthetic oligonucleotide
  Antisense strand to SEQ ID NO: 1297562
auccacacugguaucucca

SEQ ID NO: 1297564 - RNA, 19 nt, Artificial Sequence
  Description of Artificial Sequence: Synthetic oligonucleotide
  Sense strand starting at position 1997 of SEQ ID NO: 1241760
auucuaugaccucagcagu

SEQ ID NO: 1297565 - RNA, 19 nt, Artificial Sequence
  Description of Artificial Sequence: Synthetic oligonucleotide
  Antisense strand to SEQ ID NO: 1297564
acugcugaggucauagaau

SEQ ID NO: 1297566 - RNA, 19 nt, Artificial Sequence
  Description of Artificial Sequence: Synthetic oligonucleotide
  Sense strand starting at position 2185 of SEQ ID NO: 1241760
gucaaauugccuuaugcuc

SEQ ID NO: 1297567 - RNA, 19 nt, Artificial Sequence
  Description of Artificial Sequence: Synthetic oligonucleotide
  Antisense strand to SEQ ID NO: 1297566
gagcauaaggcaauuugac

SEQ ID NO: 1297568 - RNA, 19 nt, Artificial Sequence
  Description of Artificial Sequence: Synthetic oligonucleotide
  Sense strand starting at position 2375 of SEQ ID NO: 1241760
ggcugcuuuccgguccaua

SEQ ID NO: 1297569 - RNA, 19 nt, Artificial Sequence
  Description of Artificial Sequence: Synthetic oligonucleotide
  Antisense strand to SEQ ID NO: 1297568
uauggaccggaaagcagcc

SEQ ID NO: 1297570 - RNA, 19 nt, Artificial Sequence
  Description of Artificial Sequence: Synthetic oligonucleotide
  Sense strand starting at position 2378 of SEQ ID NO: 1241760
ugcuuuccgguccauagau

SEQ ID NO: 1297571 - RNA, 19 nt, Artificial Sequence
  Description of Artificial Sequence: Synthetic oligonucleotide
  Antisense strand to SEQ ID NO: 1297570
aucuauggaccggaaagca

SEQ ID NO: 1297572 - RNA, 19 nt, Artificial Sequence
  Description of Artificial Sequence: Synthetic oligonucleotide
  Sense strand starting at position 2535 of SEQ ID NO: 1241760
auaccaugacuuugggagu

SEQ ID NO: 1297573 - RNA, 19 nt, Artificial Sequence
  Description of Artificial Sequence: Synthetic oligonucleotide
  Antisense strand to SEQ ID NO: 1297572
acucccaaagucaugguau

SEQ ID NO: 1297574 - RNA, 19 nt, Artificial Sequence
  Description of Artificial Sequence: Synthetic oligonucleotide
  Sense strand starting at position 2885 of SEQ ID NO: 1241760
auauaugaaucuguggaca

SEQ ID NO: 1297575 - RNA, 19 nt, Artificial Sequence
  Description of Artificial Sequence: Synthetic oligonucleotide
  Antisense strand to SEQ ID NO: 1297574
uguccacagauucauauau

SEQ ID NO: 1297576 - RNA, 19 nt, Artificial Sequence
  Description of Artificial Sequence: Synthetic oligonucleotide
  Sense strand starting at position 2981 of SEQ ID NO: 1241760
ucaaguguagcauggagaa

SEQ ID NO: 1297577 - RNA, 19 nt, Artificial Sequence
  Description of Artificial Sequence: Synthetic oligonucleotide
  Antisense strand to SEQ ID NO: 1297576
uucuccaugcuacacuuga

SEQ ID NO: 1297578 - RNA, 19 nt, Artificial Sequence
  Description of Artificial Sequence: Synthetic oligonucleotide
  Sense strand starting at position 2994 of SEQ ID NO: 1241760
ggagaaucccacuggcuuu

SEQ ID NO: 1297579 - RNA, 19 nt, Artificial Sequence
  Description of Artificial Sequence: Synthetic oligonucleotide
  Antisense strand to SEQ ID NO: 1297578
aaagccagugggauucucc

SEQ ID NO: 1297580 - RNA, 19 nt, Artificial Sequence
  Description of Artificial Sequence: Synthetic oligonucleotide
  Sense strand starting at position 3059 of SEQ ID NO: 1241760
cccagcaagccuuggagua

SEQ ID NO: 1297581 - RNA, 19 nt, Artificial Sequence
  Description of Artificial Sequence: Synthetic oligonucleotide
  Antisense strand to SEQ ID NO: 1297580
uacuccaaggcuugcuggg

SEQ ID NO: 1297582 - RNA, 19 nt, Artificial Sequence
  Description of Artificial Sequence: Synthetic oligonucleotide
  Sense strand starting at position 3060 of SEQ ID NO: 1241760
ccagcaagccuuggaguau

SEQ ID NO: 1297583 - RNA, 19 nt, Artificial Sequence
  Description of Artificial Sequence: Synthetic oligonucleotide
  Antisense strand to SEQ ID NO: 1297582
auacuccaaggcuugcugg

SEQ ID NO: 1297584 - RNA, 19 nt, Artificial Sequence
  Description of Artificial Sequence: Synthetic oligonucleotide
  Sense strand starting at position 3064 of SEQ ID NO: 1241760
caagccuuggaguauaaca

SEQ ID NO: 1297585 - RNA, 19 nt, Artificial Sequence
  Description of Artificial Sequence: Synthetic oligonucleotide
  Antisense strand to SEQ ID NO: 1297584
uguuauacuccaaggcuug

SEQ ID NO: 1297586 - RNA, 19 nt, Artificial Sequence
  Description of Artificial Sequence: Synthetic oligonucleotide
  Sense strand starting at position 3073 of SEQ ID NO: 1241760
gaguauaacagauguggac

SEQ ID NO: 1297587 - RNA, 19 nt, Artificial Sequence
  Description of Artificial Sequence: Synthetic oligonucleotide
  Antisense strand to SEQ ID NO: 1297586
guccacaucuguuauacuc

SEQ ID NO: 1297588 - RNA, 19 nt, Artificial Sequence
  Description of Artificial Sequence: Synthetic oligonucleotide
  Sense strand starting at position 3146 of SEQ ID NO: 1241760
ucagauaaguuucuaugca

SEQ ID NO: 1297589 - RNA, 19 nt, Artificial Sequence
  Description of Artificial Sequence: Synthetic oligonucleotide
  Antisense strand to SEQ ID NO: 1297588
ugcauagaaacuuaucuga

SEQ ID NO: 1297590 - RNA, 19 nt, Artificial Sequence
  Description of Artificial Sequence: Synthetic oligonucleotide
  Sense strand starting at position 3153 of SEQ ID NO: 1241760
aguuucuaugcaggucaaa

SEQ ID NO: 1297591 - RNA, 19 nt, Artificial Sequence
  Description of Artificial Sequence: Synthetic oligonucleotide
  Antisense strand to SEQ ID NO: 1297590
uuugaccugcauagaaacu

SEQ ID NO: 1297592 - RNA, 19 nt, Artificial Sequence
  Description of Artificial Sequence: Synthetic oligonucleotide
  Sense strand starting at position 3156 of SEQ ID NO: 1241760
uucuaugcaggucaaagau

SEQ ID NO: 1297593 - RNA, 19 nt, Artificial Sequence
  Description of Artificial Sequence: Synthetic oligonucleotide
  Antisense strand to SEQ ID NO: 1297592
aucuuugaccugcauagaa

SEQ ID NO: 1297594 - RNA, 19 nt, Artificial Sequence
  Description of Artificial Sequence: Synthetic oligonucleotide
  Sense strand starting at position 3168 of SEQ ID NO: 1241760
caaagauguuccucagggu

SEQ ID NO: 1297595 - RNA, 19 nt, Artificial Sequence
  Description of Artificial Sequence: Synthetic oligonucleotide
  Antisense strand to SEQ ID NO: 1297594
acccugaggaacaucuuug

SEQ ID NO: 1297596 - RNA, 19 nt, Artificial Sequence
  Description of Artificial Sequence: Synthetic oligonucleotide
  Sense strand starting at position 3169 of SEQ ID NO: 1241760
aaagauguuccucaggguu

SEQ ID NO: 1297597 - RNA, 19 nt, Artificial Sequence
  Description of Artificial Sequence: Synthetic oligonucleotide
  Antisense strand to SEQ ID NO: 1297596
aacccugaggaacaucuuu

SEQ ID NO: 1297598 - RNA, 19 nt, Artificial Sequence
  Description of Artificial Sequence: Synthetic oligonucleotide
  Sense strand starting at position 3399 of SEQ ID NO: 1241760
ggaugacuacucugguuuc

SEQ ID NO: 1297599 - RNA, 19 nt, Artificial Sequence
  Description of Artificial Sequence: Synthetic oligonucleotide
  Antisense strand to SEQ ID NO: 1297598
gaaaccagaguagucaucc

SEQ ID NO: 1297600 - RNA, 19 nt, Artificial Sequence
  Description of Artificial Sequence: Synthetic oligonucleotide
  Sense strand starting at position 3402 of SEQ ID NO: 1241760
ugacuacucugguuucuaa

SEQ ID NO: 1297601 - RNA, 19 nt, Artificial Sequence
  Description of Artificial Sequence: Synthetic oligonucleotide
  Antisense strand to SEQ ID NO: 1297600
uuagaaaccagaguaguca

SEQ ID NO: 1297602 - RNA, 19 nt, Artificial Sequence
  Description of Artificial Sequence: Synthetic oligonucleotide
  Sense strand starting at position 3535 of SEQ ID NO: 1241760
aagaauauucuguggcuca

SEQ ID NO: 1297603 - RNA, 19 nt, Artificial Sequence
  Description of Artificial Sequence: Synthetic oligonucleotide
  Antisense strand to SEQ ID NO: 1297602
ugagccacagaauauucuu

SEQ ID NO: 1297604 - RNA, 19 nt, Artificial Sequence
  Description of Artificial Sequence: Synthetic oligonucleotide
  Sense strand starting at position 3538 of SEQ ID NO: 1241760
aauauucuguggcucaaga

SEQ ID NO: 1297605 - RNA, 19 nt, Artificial Sequence
  Description of Artificial Sequence: Synthetic oligonucleotide
  Antisense strand to SEQ ID NO: 1297604
ucuugagccacagaauauu

SEQ ID NO: 1297606 - RNA, 19 nt, Artificial Sequence
  Description of Artificial Sequence: Synthetic oligonucleotide
  Sense strand starting at position 3540 of SEQ ID NO: 1241760
uauucuguggcucaagaua

SEQ ID NO: 1297607 - RNA, 19 nt, Artificial Sequence
  Description of Artificial Sequence: Synthetic oligonucleotide
  Antisense strand to SEQ ID NO: 1297606
uaucuugagccacagaaua

SEQ ID NO: 1297608 - RNA, 19 nt, Artificial Sequence
  Description of Artificial Sequence: Synthetic oligonucleotide
  Sense strand starting at position 3730 of SEQ ID NO: 1241760
gagaccuugucucuagaua

SEQ ID NO: 1297609 - RNA, 19 nt, Artificial Sequence
  Description of Artificial Sequence: Synthetic oligonucleotide
  Antisense strand to SEQ ID NO: 1297608
uaucuagagacaaggucuc

SEQ ID NO: 1297610 - RNA, 19 nt, Artificial Sequence
  Description of Artificial Sequence: Synthetic oligonucleotide
  Sense strand starting at position 48 of SEQ ID NO: 1241761
gccuguuuccagugaaaug

SEQ ID NO: 1297611 - RNA, 19 nt, Artificial Sequence
  Description of Artificial Sequence: Synthetic oligonucleotide
  Antisense strand to SEQ ID NO: 1297610
cauuucacuggaaacaggc

SEQ ID NO: 1297612 - RNA, 19 nt, Artificial Sequence
  Description of Artificial Sequence: Synthetic oligonucleotide
  Sense strand starting at position 49 of SEQ ID NO: 1241761
ccuguuuccagugaaaugu

SEQ ID NO: 1297613 - RNA, 19 nt, Artificial Sequence
  Description of Artificial Sequence: Synthetic oligonucleotide
  Antisense strand to SEQ ID NO: 1297612
acauuucacuggaaacagg

SEQ ID NO: 1297614 - RNA, 19 nt, Artificial Sequence
  Description of Artificial Sequence: Synthetic oligonucleotide
  Sense strand starting at position 58 of SEQ ID NO: 1241761
agugaaaugucuuuacagc

SEQ ID NO: 1297615 - RNA, 19 nt, Artificial Sequence
  Description of Artificial Sequence: Synthetic oligonucleotide
  Antisense strand to SEQ ID NO: 1297614
gcuguaaagacauuucacu

SEQ ID NO: 1297616 - RNA, 19 nt, Artificial Sequence
  Description of Artificial Sequence: Synthetic oligonucleotide
  Sense strand starting at position 212 of SEQ ID NO: 1241761
cuggaauucucccuggcca

SEQ ID NO: 1297617 - RNA, 19 nt, Artificial Sequence
  Description of Artificial Sequence: Synthetic oligonucleotide
  Antisense strand to SEQ ID NO: 1297616
uggccagggagaauuccag

SEQ ID NO: 1297618 - RNA, 19 nt, Artificial Sequence
  Description of Artificial Sequence: Synthetic oligonucleotide
  Sense strand starting at position 254 of SEQ ID NO: 1241761
ugcauugacagcuggaaca

SEQ ID NO: 1297619 - RNA, 19 nt, Artificial Sequence
  Description of Artificial Sequence: Synthetic oligonucleotide
  Antisense strand to SEQ ID NO: 1297618
uguuccagcugucaaugca

SEQ ID NO: 1297620 - RNA, 19 nt, Artificial Sequence
  Description of Artificial Sequence: Synthetic oligonucleotide
  Sense strand starting at position 343 of SEQ ID NO: 1241761
gcuggaauccaaggucugu

SEQ ID NO: 1297621 - RNA, 19 nt, Artificial Sequence
  Description of Artificial Sequence: Synthetic oligonucleotide
  Antisense strand to SEQ ID NO: 1297620
acagaccuuggauuccagc

SEQ ID NO: 1297622 - RNA, 19 nt, Artificial Sequence
  Description of Artificial Sequence: Synthetic oligonucleotide
  Sense strand starting at position 395 of SEQ ID NO: 1241761
uuuccagucccaugugaug

SEQ ID NO: 1297623 - RNA, 19 nt, Artificial Sequence
  Description of Artificial Sequence: Synthetic oligonucleotide
  Antisense strand to SEQ ID NO: 1297622
caucacaugggacuggaaa

SEQ ID NO: 1297624 - RNA, 19 nt, Artificial Sequence
  Description of Artificial Sequence: Synthetic oligonucleotide
  Sense strand starting at position 397 of SEQ ID NO: 1241761
uccagucccaugugauguu

SEQ ID NO: 1297625 - RNA, 19 nt, Artificial Sequence
  Description of Artificial Sequence: Synthetic oligonucleotide
  Antisense strand to SEQ ID NO: 1297624
aacaucacaugggacugga

SEQ ID NO: 1297626 - RNA, 19 nt, Artificial Sequence
  Description of Artificial Sequence: Synthetic oligonucleotide
  Sense strand starting at position 431 of SEQ ID NO: 1241761
cgauaaggcuuaucuuguu

SEQ ID NO: 1297627 - RNA, 19 nt, Artificial Sequence
  Description of Artificial Sequence: Synthetic oligonucleotide
  Antisense strand to SEQ ID NO: 1297626
aacaagauaagccuuaucg

SEQ ID NO: 1297628 - RNA, 19 nt, Artificial Sequence
  Description of Artificial Sequence: Synthetic oligonucleotide
  Sense strand starting at position 729 of SEQ ID NO: 1241761
caguguguagucgcagcaa

SEQ ID NO: 1297629 - RNA, 19 nt, Artificial Sequence
  Description of Artificial Sequence: Synthetic oligonucleotide
  Antisense strand to SEQ ID NO: 1297628
uugcugcgacuacacacug

SEQ ID NO: 1297630 - RNA, 19 nt, Artificial Sequence
  Description of Artificial Sequence: Synthetic oligonucleotide
  Sense strand starting at position 731 of SEQ ID NO: 1241761
guguguagucgcagcaaau

SEQ ID NO: 1297631 - RNA, 19 nt, Artificial Sequence
  Description of Artificial Sequence: Synthetic oligonucleotide
  Antisense strand to SEQ ID NO: 1297630
auuugcugcgacuacacac

SEQ ID NO: 1297632 - RNA, 19 nt, Artificial Sequence
  Description of Artificial Sequence: Synthetic oligonucleotide
  Sense strand starting at position 732 of SEQ ID NO: 1241761
uguguagucgcagcaaaug

SEQ ID NO: 1297633 - RNA, 19 nt, Artificial Sequence
  Description of Artificial Sequence: Synthetic oligonucleotide
  Antisense strand to SEQ ID NO: 1297632
cauuugcugcgacuacaca

SEQ ID NO: 1297634 - RNA, 19 nt, Artificial Sequence
  Description of Artificial Sequence: Synthetic oligonucleotide
  Sense strand starting at position 784 of SEQ ID NO: 1241761
guuguaugccgugaaugua

SEQ ID NO: 1297635 - RNA, 19 nt, Artificial Sequence
  Description of Artificial Sequence: Synthetic oligonucleotide
  Antisense strand to SEQ ID NO: 1297634
uacauucacggcauacaac

SEQ ID NO: 1297636 - RNA, 19 nt, Artificial Sequence
  Description of Artificial Sequence: Synthetic oligonucleotide
  Sense strand starting at position 787 of SEQ ID NO: 1241761
guaugccgugaauguaaau

SEQ ID NO: 1297637 - RNA, 19 nt, Artificial Sequence
  Description of Artificial Sequence: Synthetic oligonucleotide
  Antisense strand to SEQ ID NO: 1297636
auuuacauucacggcauac

SEQ ID NO: 1297638 - RNA, 19 nt, Artificial Sequence
  Description of Artificial Sequence: Synthetic oligonucleotide
  Sense strand starting at position 814 of SEQ ID NO: 1241761
cgcuacaacgcucgacaua

SEQ ID NO: 1297639 - RNA, 19 nt, Artificial Sequence
  Description of Artificial Sequence: Synthetic oligonucleotide
  Antisense strand to SEQ ID NO: 1297638
uaugucgagcguuguagcg

SEQ ID NO: 1297640 - RNA, 19 nt, Artificial Sequence
  Description of Artificial Sequence: Synthetic oligonucleotide
  Sense strand starting at position 815 of SEQ ID NO: 1241761
gcuacaacgcucgacauaa

SEQ ID NO: 1297641 - RNA, 19 nt, Artificial Sequence
  Description of Artificial Sequence: Synthetic oligonucleotide
  Antisense strand to SEQ ID NO: 1297640
uuaugucgagcguuguagc

SEQ ID NO: 1297642 - RNA, 19 nt, Artificial Sequence
  Description of Artificial Sequence: Synthetic oligonucleotide
  Sense strand starting at position 930 of SEQ ID NO: 1241761
uucugagcuuaauucgaaa

SEQ ID NO: 1297643 - RNA, 19 nt, Artificial Sequence
  Description of Artificial Sequence: Synthetic oligonucleotide
  Antisense strand to SEQ ID NO: 1297642
uuucgaauuaagcucagaa

SEQ ID NO: 1297644 - RNA, 19 nt, Artificial Sequence
  Description of Artificial Sequence: Synthetic oligonucleotide
  Sense strand starting at position 980 of SEQ ID NO: 1241761
ucguaaucugaagguuucu

SEQ ID NO: 1297645 - RNA, 19 nt, Artificial Sequence
  Description of Artificial Sequence: Synthetic oligonucleotide
  Antisense strand to SEQ ID NO: 1297644
agaaaccuucagauuacga

SEQ ID NO: 1297646 - RNA, 19 nt, Artificial Sequence
  Description of Artificial Sequence: Synthetic oligonucleotide
  Sense strand starting at position 985 of SEQ ID NO: 1241761
aucugaagguuucuugcau

SEQ ID NO: 1297647 - RNA, 19 nt, Artificial Sequence
  Description of Artificial Sequence: Synthetic oligonucleotide
  Antisense strand to SEQ ID NO: 1297646
augcaagaaaccuucagau

SEQ ID NO: 1297648 - RNA, 19 nt, Artificial Sequence
  Description of Artificial Sequence: Synthetic oligonucleotide
  Sense strand starting at position 986 of SEQ ID NO: 1241761
ucugaagguuucuugcauu

SEQ ID NO: 1297649 - RNA, 19 nt, Artificial Sequence
  Description of Artificial Sequence: Synthetic oligonucleotide
  Antisense strand to SEQ ID NO: 1297648
aaugcaagaaaccuucaga

SEQ ID NO: 1297650 - RNA, 19 nt, Artificial Sequence
  Description of Artificial Sequence: Synthetic oligonucleotide
  Sense strand starting at position 1039 of SEQ ID NO: 1241761
guuuguuacuguuuccaac

SEQ ID NO: 1297651 - RNA, 19 nt, Artificial Sequence
  Description of Artificial Sequence: Synthetic oligonucleotide
  Antisense strand to SEQ ID NO: 1297650
guuggaaacaguaacaaac

SEQ ID NO: 1297652 - RNA, 19 nt, Artificial Sequence
  Description of Artificial Sequence: Synthetic oligonucleotide
  Sense strand starting at position 1081 of SEQ ID NO: 1241761
agaauuaucuccucggguc

SEQ ID NO: 1297653 - RNA, 19 nt, Artificial Sequence
  Description of Artificial Sequence: Synthetic oligonucleotide
  Antisense strand to SEQ ID NO: 1297652
gacccgaggagauaauucu

SEQ ID NO: 1297654 - RNA, 19 nt, Artificial Sequence
  Description of Artificial Sequence: Synthetic oligonucleotide
  Sense strand starting at position 1327 of SEQ ID NO: 1241761
cggaaugacucaggaccaa

SEQ ID NO: 1297655 - RNA, 19 nt, Artificial Sequence
  Description of Artificial Sequence: Synthetic oligonucleotide
  Antisense strand to SEQ ID NO: 1297654
uugguccugagucauuccg

SEQ ID NO: 1297656 - RNA, 19 nt, Artificial Sequence
  Description of Artificial Sequence: Synthetic oligonucleotide
  Sense strand starting at position 1562 of SEQ ID NO: 1241761
ggacaaaguuugccgaagu

SEQ ID NO: 1297657 - RNA, 19 nt, Artificial Sequence
  Description of Artificial Sequence: Synthetic oligonucleotide
  Antisense strand to SEQ ID NO: 1297656
acuucggcaaacuuugucc

SEQ ID NO: 1297658 - RNA, 19 nt, Artificial Sequence
  Description of Artificial Sequence: Synthetic oligonucleotide
  Sense strand starting at position 2356 of SEQ ID NO: 1241761
cccgccuuuccgggucaaa

SEQ ID NO: 1297659 - RNA, 19 nt, Artificial Sequence
  Description of Artificial Sequence: Synthetic oligonucleotide
  Antisense strand to SEQ ID NO: 1297658
uuugacccggaaaggcggg

SEQ ID NO: 1297660 - RNA, 19 nt, Artificial Sequence
  Description of Artificial Sequence: Synthetic oligonucleotide
  Sense strand starting at position 2779 of SEQ ID NO: 1241761
cggaguggugucuugcuca

SEQ ID NO: 1297661 - RNA, 19 nt, Artificial Sequence
  Description of Artificial Sequence: Synthetic oligonucleotide
  Antisense strand to SEQ ID NO: 1297660
ugagcaagacaccacuccg

SEQ ID NO: 1297662 - RNA, 19 nt, Artificial Sequence
  Description of Artificial Sequence: Synthetic oligonucleotide
  Sense strand starting at position 2941 of SEQ ID NO: 1241761
aguggugugucagugauuc

SEQ ID NO: 1297663 - RNA, 19 nt, Artificial Sequence
  Description of Artificial Sequence: Synthetic oligonucleotide
  Antisense strand to SEQ ID NO: 1297662
gaaucacugacacaccacu

SEQ ID NO: 1297664 - RNA, 19 nt, Artificial Sequence
  Description of Artificial Sequence: Synthetic oligonucleotide
  Sense strand starting at position 2945 of SEQ ID NO: 1241761
gugugucagugauucaccu

SEQ ID NO: 1297665 - RNA, 19 nt, Artificial Sequence
  Description of Artificial Sequence: Synthetic oligonucleotide
  Antisense strand to SEQ ID NO: 1297664
aggugaaucacugacacac

SEQ ID NO: 1297666 - RNA, 19 nt, Artificial Sequence
  Description of Artificial Sequence: Synthetic oligonucleotide
  Sense strand starting at position 3056 of SEQ ID NO: 1241761
gaggccuucgcuggaguuu

SEQ ID NO: 1297667 - RNA, 19 nt, Artificial Sequence
  Description of Artificial Sequence: Synthetic oligonucleotide
  Antisense strand to SEQ ID NO: 1297666
aaacuccagcgaaggccuc

SEQ ID NO: 1297668 - RNA, 19 nt, Artificial Sequence
  Description of Artificial Sequence: Synthetic oligonucleotide
  Sense strand starting at position 3123 of SEQ ID NO: 1241761
caagaaggcuuauaaagag

SEQ ID NO: 1297669 - RNA, 19 nt, Artificial Sequence
  Description of Artificial Sequence: Synthetic oligonucleotide
  Antisense strand to SEQ ID NO: 1297668
cucuuuauaagccuucuug

SEQ ID NO: 1297670 - RNA, 19 nt, Artificial Sequence
  Description of Artificial Sequence: Synthetic oligonucleotide
  Sense strand starting at position 3153 of SEQ ID NO: 1241761
agcugagaccagugugagu

SEQ ID NO: 1297671 - RNA, 19 nt, Artificial Sequence
  Description of Artificial Sequence: Synthetic oligonucleotide
  Antisense strand to SEQ ID NO: 1297670
acucacacuggucucagcu

SEQ ID NO: 1297672 - RNA, 19 nt, Artificial Sequence
  Description of Artificial Sequence: Synthetic oligonucleotide
  Sense strand starting at position 3179 of SEQ ID NO: 1241761
gccagucugccuucuugua

SEQ ID NO: 1297673 - RNA, 19 nt, Artificial Sequence
  Description of Artificial Sequence: Synthetic oligonucleotide
  Antisense strand to SEQ ID NO: 1297672
uacaagaaggcagacuggc

SEQ ID NO: 1297674 - RNA, 19 nt, Artificial Sequence
  Description of Artificial Sequence: Synthetic oligonucleotide
  Sense strand starting at position 3192 of SEQ ID NO: 1241761
cuuguauugcuccagugac

SEQ ID NO: 1297675 - RNA, 19 nt, Artificial Sequence
  Description of Artificial Sequence: Synthetic oligonucleotide
  Antisense strand to SEQ ID NO: 1297674
gucacuggagcaauacaag

SEQ ID NO: 1297676 - RNA, 19 nt, Artificial Sequence
  Description of Artificial Sequence: Synthetic oligonucleotide
  Sense strand starting at position 3200 of SEQ ID NO: 1241761
gcuccagugacucauguga

SEQ ID NO: 1297677 - RNA, 19 nt, Artificial Sequence
  Description of Artificial Sequence: Synthetic oligonucleotide
  Antisense strand to SEQ ID NO: 1297676
ucacaugagucacuggagc

SEQ ID NO: 1297678 - RNA, 19 nt, Artificial Sequence
  Description of Artificial Sequence: Synthetic oligonucleotide
  Sense strand starting at position 3300 of SEQ ID NO: 1241761
cuggaagucuaucuggaca

SEQ ID NO: 1297679 - RNA, 19 nt, Artificial Sequence
  Description of Artificial Sequence: Synthetic oligonucleotide
  Antisense strand to SEQ ID NO: 1297678
uguccagauagacuuccag

SEQ ID NO: 1297680 - RNA, 19 nt, Artificial Sequence
  Description of Artificial Sequence: Synthetic oligonucleotide
  Sense strand starting at position 3344 of SEQ ID NO: 1241761
gcuccauuagcccaacaga

SEQ ID NO: 1297681 - RNA, 19 nt, Artificial Sequence
  Description of Artificial Sequence: Synthetic oligonucleotide
  Antisense strand to SEQ ID NO: 1297680
ucuguugggcuaauggagc

SEQ ID NO: 1297682 - RNA, 19 nt, Artificial Sequence
  Description of Artificial Sequence: Synthetic oligonucleotide
  Sense strand starting at position 3355 of SEQ ID NO: 1241761
ccaacagaugcuuguucua

SEQ ID NO: 1297683 - RNA, 19 nt, Artificial Sequence
  Description of Artificial Sequence: Synthetic oligonucleotide
  Antisense strand to SEQ ID NO: 1297682
uagaacaagcaucuguugg

SEQ ID NO: 1297684 - RNA, 19 nt, Artificial Sequence
  Description of Artificial Sequence: Synthetic oligonucleotide
  Sense strand starting at position 3702 of SEQ ID NO: 1241761
uuaccuauggccugguuua

SEQ ID NO: 1297685 - RNA, 19 nt, Artificial Sequence
  Description of Artificial Sequence: Synthetic oligonucleotide
  Antisense strand to SEQ ID NO: 1297684
uaaaccaggccauagguaa

SEQ ID NO: 1297686 - RNA, 19 nt, Artificial Sequence
  Description of Artificial Sequence: Synthetic oligonucleotide
  Sense strand starting at position 3703 of SEQ ID NO: 1241761
uaccuauggccugguuuaa

SEQ ID NO: 1297687 - RNA, 19 nt, Artificial Sequence
  Description of Artificial Sequence: Synthetic oligonucleotide
  Antisense strand to SEQ ID NO: 1297686
uuaaaccaggccauaggua

SEQ ID NO: 1297688 - RNA, 19 nt, Artificial Sequence
  Description of Artificial Sequence: Synthetic oligonucleotide
  Sense strand starting at position 3713 of SEQ ID NO: 1241761
cugguuuaacuuugccaaa

SEQ ID NO: 1297689 - RNA, 19 nt, Artificial Sequence
  Description of Artificial Sequence: Synthetic oligonucleotide
  Antisense strand to SEQ ID NO: 1297688
uuuggcaaaguuaaaccag

SEQ ID NO: 1297690 - RNA, 19 nt, Artificial Sequence
  Description of Artificial Sequence: Synthetic oligonucleotide
  Sense strand starting at position 6 of SEQ ID NO: 1241762
ucuauuauagaugggucau

SEQ ID NO: 1297691 - RNA, 19 nt, Artificial Sequence
  Description of Artificial Sequence: Synthetic oligonucleotide
  Antisense strand to SEQ ID NO: 1297690
augacccaucuauaauaga

SEQ ID NO: 1297692 - RNA, 19 nt, Artificial Sequence
  Description of Artificial Sequence: Synthetic oligonucleotide
  Sense strand starting at position 382 of SEQ ID NO: 1241762
cagugacucccguaauaaa

SEQ ID NO: 1297693 - RNA, 19 nt, Artificial Sequence
  Description of Artificial Sequence: Synthetic oligonucleotide
  Antisense strand to SEQ ID NO: 1297692
uuuauuacgggagucacug

SEQ ID NO: 1297694 - RNA, 19 nt, Artificial Sequence
  Description of Artificial Sequence: Synthetic oligonucleotide
  Sense strand starting at position 434 of SEQ ID NO: 1241762
gcccaaacacuggauuacu

SEQ ID NO: 1297695 - RNA, 19 nt, Artificial Sequence
  Description of Artificial Sequence: Synthetic oligonucleotide
  Antisense strand to SEQ ID NO: 1297694
aguaauccaguguuugggc

SEQ ID NO: 1297696 - RNA, 19 nt, Artificial Sequence
  Description of Artificial Sequence: Synthetic oligonucleotide
  Sense strand starting at position 463 of SEQ ID NO: 1241762
gcaaaugguccacaucauu

SEQ ID NO: 1297697 - RNA, 19 nt, Artificial Sequence
  Description of Artificial Sequence: Synthetic oligonucleotide
  Antisense strand to SEQ ID NO: 1297696
aaugauguggaccauuugc

SEQ ID NO: 1297698 - RNA, 19 nt, Artificial Sequence
  Description of Artificial Sequence: Synthetic oligonucleotide
  Sense strand starting at position 509 of SEQ ID NO: 1241762
agauccgaauucuuuaauu

SEQ ID NO: 1297699 - RNA, 19 nt, Artificial Sequence
  Description of Artificial Sequence: Synthetic oligonucleotide
  Antisense strand to SEQ ID NO: 1297698
aauuaaagaauucggaucu

SEQ ID NO: 1297700 - RNA, 19 nt, Artificial Sequence
  Description of Artificial Sequence: Synthetic oligonucleotide
  Sense strand starting at position 585 of SEQ ID NO: 1241762
caaagaaaugcuuaagugu

SEQ ID NO: 1297701 - RNA, 19 nt, Artificial Sequence
  Description of Artificial Sequence: Synthetic oligonucleotide
  Antisense strand to SEQ ID NO: 1297700
acacuuaagcauuucuuug

SEQ ID NO: 1297702 - RNA, 19 nt, Artificial Sequence
  Description of Artificial Sequence: Synthetic oligonucleotide
  Sense strand starting at position 588 of SEQ ID NO: 1241762
agaaaugcuuaaguguauu

SEQ ID NO: 1297703 - RNA, 19 nt, Artificial Sequence
  Description of Artificial Sequence: Synthetic oligonucleotide
  Antisense strand to SEQ ID NO: 1297702
aauacacuuaagcauuucu

SEQ ID NO: 1297704 - RNA, 19 nt, Artificial Sequence
  Description of Artificial Sequence: Synthetic oligonucleotide
  Sense strand starting at position 638 of SEQ ID NO: 1241762
uuuaucuuugccuaggaua

SEQ ID NO: 1297705 - RNA, 19 nt, Artificial Sequence
  Description of Artificial Sequence: Synthetic oligonucleotide
  Antisense strand to SEQ ID NO: 1297704
uauccuaggcaaagauaaa

SEQ ID NO: 1297706 - RNA, 19 nt, Artificial Sequence
  Description of Artificial Sequence: Synthetic oligonucleotide
  Sense strand starting at position 714 of SEQ ID NO: 1241762
cugacuugagcaugacuuu

SEQ ID NO: 1297707 - RNA, 19 nt, Artificial Sequence
  Description of Artificial Sequence: Synthetic oligonucleotide
  Antisense strand to SEQ ID NO: 1297706
aaagucaugcucaagucag

SEQ ID NO: 1297708 - RNA, 19 nt, Artificial Sequence
  Description of Artificial Sequence: Synthetic oligonucleotide
  Sense strand starting at position 720 of SEQ ID NO: 1241762
ugagcaugacuuuggagua

SEQ ID NO: 1297709 - RNA, 19 nt, Artificial Sequence
  Description of Artificial Sequence: Synthetic oligonucleotide
  Antisense strand to SEQ ID NO: 1297708
uacuccaaagucaugcuca

SEQ ID NO: 1297710 - RNA, 19 nt, Artificial Sequence
  Description of Artificial Sequence: Synthetic oligonucleotide
  Sense strand starting at position 749 of SEQ ID NO: 1241762
ccguuacaacuccaugauu

SEQ ID NO: 1297711 - RNA, 19 nt, Artificial Sequence
  Description of Artificial Sequence: Synthetic oligonucleotide
  Antisense strand to SEQ ID NO: 1297710
aaucauggaguuguaacgg

SEQ ID NO: 1297712 - RNA, 19 nt, Artificial Sequence
  Description of Artificial Sequence: Synthetic oligonucleotide
  Sense strand starting at position 812 of SEQ ID NO: 1241762
cccuaaauacugugaggca

SEQ ID NO: 1297713 - RNA, 19 nt, Artificial Sequence
  Description of Artificial Sequence: Synthetic oligonucleotide
  Antisense strand to SEQ ID NO: 1297712
ugccucacaguauuuaggg

SEQ ID NO: 1297714 - RNA, 19 nt, Artificial Sequence
  Description of Artificial Sequence: Synthetic oligonucleotide
  Sense strand starting at position 870 of SEQ ID NO: 1241762
gugacaggcccacaaugau

SEQ ID NO: 1297715 - RNA, 19 nt, Artificial Sequence
  Description of Artificial Sequence: Synthetic oligonucleotide
  Antisense strand to SEQ ID NO: 1297714
aucauugugggccugucac

SEQ ID NO: 1297716 - RNA, 19 nt, Artificial Sequence
  Description of Artificial Sequence: Synthetic oligonucleotide
  Sense strand starting at position 876 of SEQ ID NO: 1241762
ggcccacaaugauugaaua

SEQ ID NO: 1297717 - RNA, 19 nt, Artificial Sequence
  Description of Artificial Sequence: Synthetic oligonucleotide
  Antisense strand to SEQ ID NO: 1297716
uauucaaucauugugggcc

SEQ ID NO: 1297718 - RNA, 19 nt, Artificial Sequence
  Description of Artificial Sequence: Synthetic oligonucleotide
  Sense strand starting at position 877 of SEQ ID NO: 1241762
gcccacaaugauugaauaa

SEQ ID NO: 1297719 - RNA, 19 nt, Artificial Sequence
  Description of Artificial Sequence: Synthetic oligonucleotide
  Antisense strand to SEQ ID NO: 1297718
uuauucaaucauugugggc

SEQ ID NO: 1297720 - RNA, 19 nt, Artificial Sequence
  Description of Artificial Sequence: Synthetic oligonucleotide
  Sense strand starting at position 911 of SEQ ID NO: 1241762
agaaguaaccgcuacauac

SEQ ID NO: 1297721 - RNA, 19 nt, Artificial Sequence
  Description of Artificial Sequence: Synthetic oligonucleotide
  Antisense strand to SEQ ID NO: 1297720
guauguagcgguuacuucu

SEQ ID NO: 1297722 - RNA, 19 nt, Artificial Sequence
  Description of Artificial Sequence: Synthetic oligonucleotide
  Sense strand starting at position 1156 of SEQ ID NO: 1241762
uggaguuguacugagcauu

SEQ ID NO: 1297723 - RNA, 19 nt, Artificial Sequence
  Description of Artificial Sequence: Synthetic oligonucleotide
  Antisense strand to SEQ ID NO: 1297722
aaugcucaguacaacucca

SEQ ID NO: 1297724 - RNA, 19 nt, Artificial Sequence
  Description of Artificial Sequence: Synthetic oligonucleotide
  Sense strand starting at position 1162 of SEQ ID NO: 1241762
uguacugagcauuaggaau

SEQ ID NO: 1297725 - RNA, 19 nt, Artificial Sequence
  Description of Artificial Sequence: Synthetic oligonucleotide
  Antisense strand to SEQ ID NO: 1297724
auuccuaaugcucaguaca

SEQ ID NO: 1297726 - RNA, 19 nt, Artificial Sequence
  Description of Artificial Sequence: Synthetic oligonucleotide
  Sense strand starting at position 1190 of SEQ ID NO: 1241762
gggacaggcuucucagguu

SEQ ID NO: 1297727 - RNA, 19 nt, Artificial Sequence
  Description of Artificial Sequence: Synthetic oligonucleotide
  Antisense strand to SEQ ID NO: 1297726
aaccugagaagccuguccc

SEQ ID NO: 1297728 - RNA, 19 nt, Artificial Sequence
  Description of Artificial Sequence: Synthetic oligonucleotide
  Sense strand starting at position 1619 of SEQ ID NO: 1241762
gacaccaucucguuaugga

SEQ ID NO: 1297729 - RNA, 19 nt, Artificial Sequence
  Description of Artificial Sequence: Synthetic oligonucleotide
  Antisense strand to SEQ ID NO: 1297728
uccauaacgagaugguguc

SEQ ID NO: 1297730 - RNA, 19 nt, Artificial Sequence
  Description of Artificial Sequence: Synthetic oligonucleotide
  Sense strand starting at position 1626 of SEQ ID NO: 1241762
ucucguuauggagaagcaa

SEQ ID NO: 1297731 - RNA, 19 nt, Artificial Sequence
  Description of Artificial Sequence: Synthetic oligonucleotide
  Antisense strand to SEQ ID NO: 1297730
uugcuucuccauaacgaga

SEQ ID NO: 1297732 - RNA, 19 nt, Artificial Sequence
  Description of Artificial Sequence: Synthetic oligonucleotide
  Sense strand starting at position 1780 of SEQ ID NO: 1241762
uaucccuguggcuaagaga

SEQ ID NO: 1297733 - RNA, 19 nt, Artificial Sequence
  Description of Artificial Sequence: Synthetic oligonucleotide
  Antisense strand to SEQ ID NO: 1297732
ucucuuagccacagggaua

SEQ ID NO: 1297734 - RNA, 19 nt, Artificial Sequence
  Description of Artificial Sequence: Synthetic oligonucleotide
  Sense strand starting at position 1789 of SEQ ID NO: 1241762
ggcuaagagaccgagguau

SEQ ID NO: 1297735 - RNA, 19 nt, Artificial Sequence
  Description of Artificial Sequence: Synthetic oligonucleotide
  Antisense strand to SEQ ID NO: 1297734
auaccucggucucuuagcc

SEQ ID NO: 1297736 - RNA, 19 nt, Artificial Sequence
  Description of Artificial Sequence: Synthetic oligonucleotide
  Sense strand starting at position 1791 of SEQ ID NO: 1241762
cuaagagaccgagguauuc

SEQ ID NO: 1297737 - RNA, 19 nt, Artificial Sequence
  Description of Artificial Sequence: Synthetic oligonucleotide
  Antisense strand to SEQ ID NO: 1297736
gaauaccucggucucuuag

SEQ ID NO: 1297738 - RNA, 19 nt, Artificial Sequence
  Description of Artificial Sequence: Synthetic oligonucleotide
  Sense strand starting at position 1833 of SEQ ID NO: 1241762
cugaaaugagucugguacu

SEQ ID NO: 1297739 - RNA, 19 nt, Artificial Sequence
  Description of Artificial Sequence: Synthetic oligonucleotide
  Antisense strand to SEQ ID NO: 1297738
aguaccagacucauuucag

SEQ ID NO: 1297740 - RNA, 19 nt, Artificial Sequence
  Description of Artificial Sequence: Synthetic oligonucleotide
  Sense strand starting at position 1840 of SEQ ID NO: 1241762
gagucugguacuggagaga

SEQ ID NO: 1297741 - RNA, 19 nt, Artificial Sequence
  Description of Artificial Sequence: Synthetic oligonucleotide
  Antisense strand to SEQ ID NO: 1297740
ucucuccaguaccagacuc

SEQ ID NO: 1297742 - RNA, 19 nt, Artificial Sequence
  Description of Artificial Sequence: Synthetic oligonucleotide
  Sense strand starting at position 2007 of SEQ ID NO: 1241762
cucuaugaucacugaguuc

SEQ ID NO: 1297743 - RNA, 19 nt, Artificial Sequence
  Description of Artificial Sequence: Synthetic oligonucleotide
  Antisense strand to SEQ ID NO: 1297742
gaacucagugaucauagag

SEQ ID NO: 1297744 - RNA, 19 nt, Artificial Sequence
  Description of Artificial Sequence: Synthetic oligonucleotide
  Sense strand starting at position 2211 of SEQ ID NO: 1241762
uucgaaccagccugagaaa

SEQ ID NO: 1297745 - RNA, 19 nt, Artificial Sequence
  Description of Artificial Sequence: Synthetic oligonucleotide
  Antisense strand to SEQ ID NO: 1297744
uuucucaggcugguucgaa

SEQ ID NO: 1297746 - RNA, 19 nt, Artificial Sequence
  Description of Artificial Sequence: Synthetic oligonucleotide
  Sense strand starting at position 2607 of SEQ ID NO: 1241762
ugaauuaagcccggguaua

SEQ ID NO: 1297747 - RNA, 19 nt, Artificial Sequence
  Description of Artificial Sequence: Synthetic oligonucleotide
  Antisense strand to SEQ ID NO: 1297746
uauacccgggcuuaauuca

SEQ ID NO: 1297748 - RNA, 19 nt, Artificial Sequence
  Description of Artificial Sequence: Synthetic oligonucleotide
  Sense strand starting at position 2608 of SEQ ID NO: 1241762
gaauuaagcccggguauac

SEQ ID NO: 1297749 - RNA, 19 nt, Artificial Sequence
  Description of Artificial Sequence: Synthetic oligonucleotide
  Antisense strand to SEQ ID NO: 1297748
guauacccgggcuuaauuc

SEQ ID NO: 1297750 - RNA, 19 nt, Artificial Sequence
  Description of Artificial Sequence: Synthetic oligonucleotide
  Sense strand starting at position 2807 of SEQ ID NO: 1241762
gcuaauaaucuacagcagu

SEQ ID NO: 1297751 - RNA, 19 nt, Artificial Sequence
  Description of Artificial Sequence: Synthetic oligonucleotide
  Antisense strand to SEQ ID NO: 1297750
acugcuguagauuauuagc

SEQ ID NO: 1297752 - RNA, 19 nt, Artificial Sequence
  Description of Artificial Sequence: Synthetic oligonucleotide
  Sense strand starting at position 2824 of SEQ ID NO: 1241762
gugugagacaacuguagga

SEQ ID NO: 1297753 - RNA, 19 nt, Artificial Sequence
  Description of Artificial Sequence: Synthetic oligonucleotide
  Antisense strand to SEQ ID NO: 1297752
uccuacaguugucucacac

SEQ ID NO: 1297754 - RNA, 19 nt, Artificial Sequence
  Description of Artificial Sequence: Synthetic oligonucleotide
  Sense strand starting at position 2916 of SEQ ID NO: 1241762
accguaagcauguugcuua

SEQ ID NO: 1297755 - RNA, 19 nt, Artificial Sequence
  Description of Artificial Sequence: Synthetic oligonucleotide
  Antisense strand to SEQ ID NO: 1297754
uaagcaacaugcuuacggu

SEQ ID NO: 1297756 - RNA, 19 nt, Artificial Sequence
  Description of Artificial Sequence: Synthetic oligonucleotide
  Sense strand starting at position 3560 of SEQ ID NO: 1241762
gaaaucagguccuuuaugu

SEQ ID NO: 1297757 - RNA, 19 nt, Artificial Sequence
  Description of Artificial Sequence: Synthetic oligonucleotide
  Antisense strand to SEQ ID NO: 1297756
acauaaaggaccugauuuc

SEQ ID NO: 1297758 - RNA, 19 nt, Artificial Sequence
  Description of Artificial Sequence: Synthetic oligonucleotide
  Sense strand starting at position 3567 of SEQ ID NO: 1241762
gguccuuuaugucuagaug

SEQ ID NO: 1297759 - RNA, 19 nt, Artificial Sequence
  Description of Artificial Sequence: Synthetic oligonucleotide
  Antisense strand to SEQ ID NO: 1297758
caucuagacauaaaggacc

SEQ ID NO: 1297760 - RNA, 19 nt, Artificial Sequence
  Description of Artificial Sequence: Synthetic oligonucleotide
  Sense strand starting at position 3568 of SEQ ID NO: 1241762
guccuuuaugucuagauga

SEQ ID NO: 1297761 - RNA, 19 nt, Artificial Sequence
  Description of Artificial Sequence: Synthetic oligonucleotide
  Antisense strand to SEQ ID NO: 1297760
ucaucuagacauaaaggac

SEQ ID NO: 1297762 - RNA, 19 nt, Artificial Sequence
  Description of Artificial Sequence: Synthetic oligonucleotide
  Sense strand starting at position 3570 of SEQ ID NO: 1241762
ccuuuaugucuagaugaca

SEQ ID NO: 1297763 - RNA, 19 nt, Artificial Sequence
  Description of Artificial Sequence: Synthetic oligonucleotide
  Antisense strand to SEQ ID NO: 1297762
ugucaucuagacauaaagg

SEQ ID NO: 1297764 - RNA, 19 nt, Artificial Sequence
  Description of Artificial Sequence: Synthetic oligonucleotide
  Sense strand starting at position 3709 of SEQ ID NO: 1241762
uaaaguacguuucuggaua

SEQ ID NO: 1297765 - RNA, 19 nt, Artificial Sequence
  Description of Artificial Sequence: Synthetic oligonucleotide
  Antisense strand to SEQ ID NO: 1297764
uauccagaaacguacuuua

SEQ ID NO: 1297766 - RNA, 19 nt, Artificial Sequence
  Description of Artificial Sequence: Synthetic oligonucleotide
  Sense strand starting at position 3737 of SEQ ID NO: 1241762
cuuauuuaaugaggaccua

SEQ ID NO: 1297767 - RNA, 19 nt, Artificial Sequence
  Description of Artificial Sequence: Synthetic oligonucleotide
  Antisense strand to SEQ ID NO: 1297766
uagguccucauuaaauaag

SEQ ID NO: 1297768 - RNA, 19 nt, Artificial Sequence
  Description of Artificial Sequence: Synthetic oligonucleotide
  Sense strand starting at position 3818 of SEQ ID NO: 1241762
aggaauagauccuauggaa

SEQ ID NO: 1297769 - RNA, 19 nt, Artificial Sequence
  Description of Artificial Sequence: Synthetic oligonucleotide
  Antisense strand to SEQ ID NO: 1297768
uuccauaggaucuauuccu

SEQ ID NO: 1297770 - RNA, 19 nt, Artificial Sequence
  Description of Artificial Sequence: Synthetic oligonucleotide
  Sense strand starting at position 382 of SEQ ID NO: 1241763
gggaguuaggaguggguuu

SEQ ID NO: 1297771 - RNA, 19 nt, Artificial Sequence
  Description of Artificial Sequence: Synthetic oligonucleotide
  Antisense strand to SEQ ID NO: 1297770
aaacccacuccuaacuccc

SEQ ID NO: 1297772 - RNA, 19 nt, Artificial Sequence
  Description of Artificial Sequence: Synthetic oligonucleotide
  Sense strand starting at position 658 of SEQ ID NO: 1241763
cacggaucgcaguagaaga

SEQ ID NO: 1297773 - RNA, 19 nt, Artificial Sequence
  Description of Artificial Sequence: Synthetic oligonucleotide
  Antisense strand to SEQ ID NO: 1297772
ucuucuacugcgauccgug

SEQ ID NO: 1297774 - RNA, 19 nt, Artificial Sequence
  Description of Artificial Sequence: Synthetic oligonucleotide
  Sense strand starting at position 1574 of SEQ ID NO: 1241763
uucgguagagucugaggau

SEQ ID NO: 1297775 - RNA, 19 nt, Artificial Sequence
  Description of Artificial Sequence: Synthetic oligonucleotide
  Antisense strand to SEQ ID NO: 1297774
auccucagacucuaccgaa

SEQ ID NO: 1297776 - RNA, 19 nt, Artificial Sequence
  Description of Artificial Sequence: Synthetic oligonucleotide
  Sense strand starting at position 1665 of SEQ ID NO: 1241763
aggaguuaggcgggaugau

SEQ ID NO: 1297777 - RNA, 19 nt, Artificial Sequence
  Description of Artificial Sequence: Synthetic oligonucleotide
  Antisense strand to SEQ ID NO: 1297776
aucaucccgccuaacuccu

SEQ ID NO: 1297778 - RNA, 19 nt, Artificial Sequence
  Description of Artificial Sequence: Synthetic oligonucleotide
  Sense strand starting at position 1666 of SEQ ID NO: 1241763
ggaguuaggcgggaugauu

SEQ ID NO: 1297779 - RNA, 19 nt, Artificial Sequence
  Description of Artificial Sequence: Synthetic oligonucleotide
  Antisense strand to SEQ ID NO: 1297778
aaucaucccgccuaacucc

SEQ ID NO: 1297780 - RNA, 19 nt, Artificial Sequence
  Description of Artificial Sequence: Synthetic oligonucleotide
  Sense strand starting at position 2056 of SEQ ID NO: 1241763
gcgucccucguuuccuaaa

SEQ ID NO: 1297781 - RNA, 19 nt, Artificial Sequence
  Description of Artificial Sequence: Synthetic oligonucleotide
  Antisense strand to SEQ ID NO: 1297780
uuuaggaaacgagggacgc

SEQ ID NO: 1297782 - RNA, 19 nt, Artificial Sequence
  Description of Artificial Sequence: Synthetic oligonucleotide
  Sense strand starting at position 2068 of SEQ ID NO: 1241763
uccuaaagagcauguauaa

SEQ ID NO: 1297783 - RNA, 19 nt, Artificial Sequence
  Description of Artificial Sequence: Synthetic oligonucleotide
  Antisense strand to SEQ ID NO: 1297782
uuauacaugcucuuuagga

SEQ ID NO: 1297784 - RNA, 19 nt, Artificial Sequence
  Description of Artificial Sequence: Synthetic oligonucleotide
  Sense strand starting at position 2093 of SEQ ID NO: 1241763
uuuccuagugucgacauga

SEQ ID NO: 1297785 - RNA, 19 nt, Artificial Sequence
  Description of Artificial Sequence: Synthetic oligonucleotide
  Antisense strand to SEQ ID NO: 1297784
ucaugucgacacuaggaaa

SEQ ID NO: 1297786 - RNA, 19 nt, Artificial Sequence
  Description of Artificial Sequence: Synthetic oligonucleotide
  Sense strand starting at position 2119 of SEQ ID NO: 1241763
cuggguaaccgauggaaau

SEQ ID NO: 1297787 - RNA, 19 nt, Artificial Sequence
  Description of Artificial Sequence: Synthetic oligonucleotide
  Antisense strand to SEQ ID NO: 1297786
auuuccaucgguuacccag

SEQ ID NO: 1297788 - RNA, 19 nt, Artificial Sequence
  Description of Artificial Sequence: Synthetic oligonucleotide
  Sense strand starting at position 2120 of SEQ ID NO: 1241763
uggguaaccgauggaaaug

SEQ ID NO: 1297789 - RNA, 19 nt, Artificial Sequence
  Description of Artificial Sequence: Synthetic oligonucleotide
  Antisense strand to SEQ ID NO: 1297788
cauuuccaucgguuaccca

SEQ ID NO: 1297790 - RNA, 19 nt, Artificial Sequence
  Description of Artificial Sequence: Synthetic oligonucleotide
  Sense strand starting at position 2131 of SEQ ID NO: 1241763
uggaaauggucagcauuag

SEQ ID NO: 1297791 - RNA, 19 nt, Artificial Sequence
  Description of Artificial Sequence: Synthetic oligonucleotide
  Antisense strand to SEQ ID NO: 1297790
cuaaugcugaccauuucca

SEQ ID NO: 1297792 - RNA, 19 nt, Artificial Sequence
  Description of Artificial Sequence: Synthetic oligonucleotide
  Sense strand starting at position 2132 of SEQ ID NO: 1241763
ggaaauggucagcauuagu

SEQ ID NO: 1297793 - RNA, 19 nt, Artificial Sequence
  Description of Artificial Sequence: Synthetic oligonucleotide
  Antisense strand to SEQ ID NO: 1297792
acuaaugcugaccauuucc

SEQ ID NO: 1297794 - RNA, 19 nt, Artificial Sequence
  Description of Artificial Sequence: Synthetic oligonucleotide
  Sense strand starting at position 2137 of SEQ ID NO: 1241763
uggucagcauuagucagaa

SEQ ID NO: 1297795 - RNA, 19 nt, Artificial Sequence
  Description of Artificial Sequence: Synthetic oligonucleotide
  Antisense strand to SEQ ID NO: 1297794
uucugacuaaugcugacca

SEQ ID NO: 1297796 - RNA, 19 nt, Artificial Sequence
  Description of Artificial Sequence: Synthetic oligonucleotide
  Sense strand starting at position 2339 of SEQ ID NO: 1241763
uucugagugcccguaguuu

SEQ ID NO: 1297797 - RNA, 19 nt, Artificial Sequence
  Description of Artificial Sequence: Synthetic oligonucleotide
  Antisense strand to SEQ ID NO: 1297796
aaacuacgggcacucagaa

SEQ ID NO: 1297798 - RNA, 19 nt, Artificial Sequence
  Description of Artificial Sequence: Synthetic oligonucleotide
  Sense strand starting at position 2358 of SEQ ID NO: 1241763
aguaaagcucuguaaauga

SEQ ID NO: 1297799 - RNA, 19 nt, Artificial Sequence
  Description of Artificial Sequence: Synthetic oligonucleotide
  Antisense strand to SEQ ID NO: 1297798
ucauuuacagagcuuuacu

SEQ ID NO: 1297800 - RNA, 19 nt, Artificial Sequence
  Description of Artificial Sequence: Synthetic oligonucleotide
  Sense strand starting at position 2501 of SEQ ID NO: 1241763
uggugaggcggugauucua

SEQ ID NO: 1297801 - RNA, 19 nt, Artificial Sequence
  Description of Artificial Sequence: Synthetic oligonucleotide
  Antisense strand to SEQ ID NO: 1297800
uagaaucaccgccucacca

SEQ ID NO: 1297802 - RNA, 19 nt, Artificial Sequence
  Description of Artificial Sequence: Synthetic oligonucleotide
  Sense strand starting at position 2682 of SEQ ID NO: 1241763
guaguaacauuugaaauag

SEQ ID NO: 1297803 - RNA, 19 nt, Artificial Sequence
  Description of Artificial Sequence: Synthetic oligonucleotide
  Antisense strand to SEQ ID NO: 1297802
cuauuucaaauguuacuac

SEQ ID NO: 1297804 - RNA, 19 nt, Artificial Sequence
  Description of Artificial Sequence: Synthetic oligonucleotide
  Sense strand starting at position 2801 of SEQ ID NO: 1241763
acuugauuauaugcagcua

SEQ ID NO: 1297805 - RNA, 19 nt, Artificial Sequence
  Description of Artificial Sequence: Synthetic oligonucleotide
  Antisense strand to SEQ ID NO: 1297804
uagcugcauauaaucaagu

SEQ ID NO: 1297806 - RNA, 19 nt, Artificial Sequence
  Description of Artificial Sequence: Synthetic oligonucleotide
  Sense strand starting at position 2812 of SEQ ID NO: 1241763
ugcagcuauguugauaauu

SEQ ID NO: 1297807 - RNA, 19 nt, Artificial Sequence
  Description of Artificial Sequence: Synthetic oligonucleotide
  Antisense strand to SEQ ID NO: 1297806
aauuaucaacauagcugca

SEQ ID NO: 1297808 - RNA, 19 nt, Artificial Sequence
  Description of Artificial Sequence: Synthetic oligonucleotide
  Sense strand starting at position 2835 of SEQ ID NO: 1241763
aguacuuuauuguccagaa

SEQ ID NO: 1297809 - RNA, 19 nt, Artificial Sequence
  Description of Artificial Sequence: Synthetic oligonucleotide
  Antisense strand to SEQ ID NO: 1297808
uucuggacaauaaaguacu

SEQ ID NO: 1297810 - RNA, 19 nt, Artificial Sequence
  Description of Artificial Sequence: Synthetic oligonucleotide
  Sense strand starting at position 2836 of SEQ ID NO: 1241763
guacuuuauuguccagaaa

SEQ ID NO: 1297811 - RNA, 19 nt, Artificial Sequence
  Description of Artificial Sequence: Synthetic oligonucleotide
  Antisense strand to SEQ ID NO: 1297810
uuucuggacaauaaaguac

SEQ ID NO: 1297812 - RNA, 19 nt, Artificial Sequence
  Description of Artificial Sequence: Synthetic oligonucleotide
  Sense strand starting at position 2883 of SEQ ID NO: 1241763
uguagaaauuguccaauaa

SEQ ID NO: 1297813 - RNA, 19 nt, Artificial Sequence
  Description of Artificial Sequence: Synthetic oligonucleotide
  Antisense strand to SEQ ID NO: 1297812
uuauuggacaauuucuaca

SEQ ID NO: 1297814 - RNA, 19 nt, Artificial Sequence
  Description of Artificial Sequence: Synthetic oligonucleotide
  Sense strand starting at position 2924 of SEQ ID NO: 1241763
uuuaguugcagugagaaca

SEQ ID NO: 1297815 - RNA, 19 nt, Artificial Sequence
  Description of Artificial Sequence: Synthetic oligonucleotide
  Antisense strand to SEQ ID NO: 1297814
uguucucacugcaacuaaa

SEQ ID NO: 1297816 - RNA, 19 nt, Artificial Sequence
  Description of Artificial Sequence: Synthetic oligonucleotide
  Sense strand starting at position 2932 of SEQ ID NO: 1241763
cagugagaacaguaguuga

SEQ ID NO: 1297817 - RNA, 19 nt, Artificial Sequence
  Description of Artificial Sequence: Synthetic oligonucleotide
  Antisense strand to SEQ ID NO: 1297816
ucaacuacuguucucacug

SEQ ID NO: 1297818 - RNA, 19 nt, Artificial Sequence
  Description of Artificial Sequence: Synthetic oligonucleotide
  Sense strand starting at position 3103 of SEQ ID NO: 1241763
ucagguaugguugggacau

SEQ ID NO: 1297819 - RNA, 19 nt, Artificial Sequence
  Description of Artificial Sequence: Synthetic oligonucleotide
  Antisense strand to SEQ ID NO: 1297818
augucccaaccauaccuga

SEQ ID NO: 1297820 - RNA, 19 nt, Artificial Sequence
  Description of Artificial Sequence: Synthetic oligonucleotide
  Sense strand starting at position 3147 of SEQ ID NO: 1241763
auuuauaggucccaagaga

SEQ ID NO: 1297821 - RNA, 19 nt, Artificial Sequence
  Description of Artificial Sequence: Synthetic oligonucleotide
  Antisense strand to SEQ ID NO: 1297820
ucucuugggaccuauaaau

SEQ ID NO: 1297822 - RNA, 19 nt, Artificial Sequence
  Description of Artificial Sequence: Synthetic oligonucleotide
  Sense strand starting at position 3319 of SEQ ID NO: 1241763
cacuuuguaugaguuugaa

SEQ ID NO: 1297823 - RNA, 19 nt, Artificial Sequence
  Description of Artificial Sequence: Synthetic oligonucleotide
  Antisense strand to SEQ ID NO: 1297822
uucaaacucauacaaagug

SEQ ID NO: 1297824 - RNA, 19 nt, Artificial Sequence
  Description of Artificial Sequence: Synthetic oligonucleotide
  Sense strand starting at position 3322 of SEQ ID NO: 1241763
uuuguaugaguuugaacuc

SEQ ID NO: 1297825 - RNA, 19 nt, Artificial Sequence
  Description of Artificial Sequence: Synthetic oligonucleotide
  Antisense strand to SEQ ID NO: 1297824
gaguucaaacucauacaaa

SEQ ID NO: 1297826 - RNA, 19 nt, Artificial Sequence
  Description of Artificial Sequence: Synthetic oligonucleotide
  Sense strand starting at position 3368 of SEQ ID NO: 1241763
aucuuauuagcagaaaguu

SEQ ID NO: 1297827 - RNA, 19 nt, Artificial Sequence
  Description of Artificial Sequence: Synthetic oligonucleotide
  Antisense strand to SEQ ID NO: 1297826
aacuuucugcuaauaagau

SEQ ID NO: 1297828 - RNA, 19 nt, Artificial Sequence
  Description of Artificial Sequence: Synthetic oligonucleotide
  Sense strand starting at position 3432 of SEQ ID NO: 1241763
guguaaugcaguguugggu

SEQ ID NO: 1297829 - RNA, 19 nt, Artificial Sequence
  Description of Artificial Sequence: Synthetic oligonucleotide
  Antisense strand to SEQ ID NO: 1297828
acccaacacugcauuacac

SEQ ID NO: 1297830 - RNA, 19 nt, Artificial Sequence
  Description of Artificial Sequence: Synthetic oligonucleotide
  Sense strand starting at position 3438 of SEQ ID NO: 1241763
ugcaguguuggguucgcaa

SEQ ID NO: 1297831 - RNA, 19 nt, Artificial Sequence
  Description of Artificial Sequence: Synthetic oligonucleotide
  Antisense strand to SEQ ID NO: 1297830
uugcgaacccaacacugca

SEQ ID NO: 1297832 - RNA, 19 nt, Artificial Sequence
  Description of Artificial Sequence: Synthetic oligonucleotide
  Sense strand starting at position 3489 of SEQ ID NO: 1241763
auagaaagauuuggucuau

SEQ ID NO: 1297833 - RNA, 19 nt, Artificial Sequence
  Description of Artificial Sequence: Synthetic oligonucleotide
  Antisense strand to SEQ ID NO: 1297832
auagaccaaaucuuucuau

SEQ ID NO: 1297834 - RNA, 19 nt, Artificial Sequence
  Description of Artificial Sequence: Synthetic oligonucleotide
  Sense strand starting at position 3537 of SEQ ID NO: 1241763
uagaucuguuuguuuagga

SEQ ID NO: 1297835 - RNA, 19 nt, Artificial Sequence
  Description of Artificial Sequence: Synthetic oligonucleotide
  Antisense strand to SEQ ID NO: 1297834
uccuaaacaaacagaucua

SEQ ID NO: 1297836 - RNA, 19 nt, Artificial Sequence
  Description of Artificial Sequence: Synthetic oligonucleotide
  Sense strand starting at position 3538 of SEQ ID NO: 1241763
agaucuguuuguuuaggaa

SEQ ID NO: 1297837 - RNA, 19 nt, Artificial Sequence
  Description of Artificial Sequence: Synthetic oligonucleotide
  Antisense strand to SEQ ID NO: 1297836
uuccuaaacaaacagaucu

SEQ ID NO: 1297838 - RNA, 19 nt, Artificial Sequence
  Description of Artificial Sequence: Synthetic oligonucleotide
  Sense strand starting at position 3657 of SEQ ID NO: 1241763
uugguuaaaucccuguaau

SEQ ID NO: 1297839 - RNA, 19 nt, Artificial Sequence
  Description of Artificial Sequence: Synthetic oligonucleotide
  Antisense strand to SEQ ID NO: 1297838
auuacagggauuuaaccaa

SEQ ID NO: 1297840 - RNA, 19 nt, Artificial Sequence
  Description of Artificial Sequence: Synthetic oligonucleotide
  Sense strand starting at position 3658 of SEQ ID NO: 1241763
ugguuaaaucccuguaauu

SEQ ID NO: 1297841 - RNA, 19 nt, Artificial Sequence
  Description of Artificial Sequence: Synthetic oligonucleotide
  Antisense strand to SEQ ID NO: 1297840
aauuacagggauuuaacca

SEQ ID NO: 1297842 - RNA, 19 nt, Artificial Sequence
  Description of Artificial Sequence: Synthetic oligonucleotide
  Sense strand starting at position 3660 of SEQ ID NO: 1241763
guuaaaucccuguaauuac

SEQ ID NO: 1297843 - RNA, 19 nt, Artificial Sequence
  Description of Artificial Sequence: Synthetic oligonucleotide
  Antisense strand to SEQ ID NO: 1297842
guaauuacagggauuuaac

SEQ ID NO: 1297844 - RNA, 19 nt, Artificial Sequence
  Description of Artificial Sequence: Synthetic oligonucleotide
  Sense strand starting at position 3739 of SEQ ID NO: 1241763
acacuuaaguacucaaggu

SEQ ID NO: 1297845 - RNA, 19 nt, Artificial Sequence
  Description of Artificial Sequence: Synthetic oligonucleotide
  Antisense strand to SEQ ID NO: 1297844
accuugaguacuuaagugu

SEQ ID NO: 1297846 - RNA, 19 nt, Artificial Sequence
  Description of Artificial Sequence: Synthetic oligonucleotide
  Sense strand starting at position 3743 of SEQ ID NO: 1241763
uuaaguacucaaggucaaa

SEQ ID NO: 1297847 - RNA, 19 nt, Artificial Sequence
  Description of Artificial Sequence: Synthetic oligonucleotide
  Antisense strand to SEQ ID NO: 1297846
uuugaccuugaguacuuaa

SEQ ID NO: 1297848 - RNA, 19 nt, Artificial Sequence
  Description of Artificial Sequence: Synthetic oligonucleotide
  Sense strand starting at position 3863 of SEQ ID NO: 1241763
ucaagcucugaaugugaua

SEQ ID NO: 1297849 - RNA, 19 nt, Artificial Sequence
  Description of Artificial Sequence: Synthetic oligonucleotide
  Antisense strand to SEQ ID NO: 1297848
uaucacauucagagcuuga

SEQ ID NO: 1297850 - RNA, 19 nt, Artificial Sequence
  Description of Artificial Sequence: Synthetic oligonucleotide
  Sense strand starting at position 83 of SEQ ID NO: 1241764
cacgaagauuuacaguuua

SEQ ID NO: 1297851 - RNA, 19 nt, Artificial Sequence
  Description of Artificial Sequence: Synthetic oligonucleotide
  Antisense strand to SEQ ID NO: 1297850
uaaacuguaaaucuucgug

SEQ ID NO: 1297852 - RNA, 19 nt, Artificial Sequence
  Description of Artificial Sequence: Synthetic oligonucleotide
  Sense strand starting at position 191 of SEQ ID NO: 1241764
cagguugagggaugcauau

SEQ ID NO: 1297853 - RNA, 19 nt, Artificial Sequence
  Description of Artificial Sequence: Synthetic oligonucleotide
  Antisense strand to SEQ ID NO: 1297852
auaugcaucccucaaccug

SEQ ID NO: 1297854 - RNA, 19 nt, Artificial Sequence
  Description of Artificial Sequence: Synthetic oligonucleotide
  Sense strand starting at position 214 of SEQ ID NO: 1241764
uggcuuagggucuaaggaa

SEQ ID NO: 1297855 - RNA, 19 nt, Artificial Sequence
  Description of Artificial Sequence: Synthetic oligonucleotide
  Antisense strand to SEQ ID NO: 1297854
uuccuuagacccuaagcca

SEQ ID NO: 1297856 - RNA, 19 nt, Artificial Sequence
  Description of Artificial Sequence: Synthetic oligonucleotide
  Sense strand starting at position 544 of SEQ ID NO: 1241764
uaugaaggaucuguuaaau

SEQ ID NO: 1297857 - RNA, 19 nt, Artificial Sequence
  Description of Artificial Sequence: Synthetic oligonucleotide
  Antisense strand to SEQ ID NO: 1297856
auuuaacagauccuucaua

SEQ ID NO: 1297858 - RNA, 19 nt, Artificial Sequence
  Description of Artificial Sequence: Synthetic oligonucleotide
  Sense strand starting at position 679 of SEQ ID NO: 1241764
gcagacuuagauugaaacu

SEQ ID NO: 1297859 - RNA, 19 nt, Artificial Sequence
  Description of Artificial Sequence: Synthetic oligonucleotide
  Antisense strand to SEQ ID NO: 1297858
aguuucaaucuaagucugc

SEQ ID NO: 1297860 - RNA, 19 nt, Artificial Sequence
  Description of Artificial Sequence: Synthetic oligonucleotide
  Sense strand starting at position 777 of SEQ ID NO: 1241764
agccauugauuaccaugua

SEQ ID NO: 1297861 - RNA, 19 nt, Artificial Sequence
  Description of Artificial Sequence: Synthetic oligonucleotide
  Antisense strand to SEQ ID NO: 1297860
uacaugguaaucaauggcu

SEQ ID NO: 1297862 - RNA, 19 nt, Artificial Sequence
  Description of Artificial Sequence: Synthetic oligonucleotide
  Sense strand starting at position 791 of SEQ ID NO: 1241764
auguaacucugggucacua

SEQ ID NO: 1297863 - RNA, 19 nt, Artificial Sequence
  Description of Artificial Sequence: Synthetic oligonucleotide
  Antisense strand to SEQ ID NO: 1297862
uagugacccagaguuacau

SEQ ID NO: 1297864 - RNA, 19 nt, Artificial Sequence
  Description of Artificial Sequence: Synthetic oligonucleotide
  Sense strand starting at position 793 of SEQ ID NO: 1241764
guaacucugggucacuauu

SEQ ID NO: 1297865 - RNA, 19 nt, Artificial Sequence
  Description of Artificial Sequence: Synthetic oligonucleotide
  Antisense strand to SEQ ID NO: 1297864
aauagugacccagaguuac

SEQ ID NO: 1297866 - RNA, 19 nt, Artificial Sequence
  Description of Artificial Sequence: Synthetic oligonucleotide
  Sense strand starting at position 869 of SEQ ID NO: 1241764
uaagaauaggguugucuuc

SEQ ID NO: 1297867 - RNA, 19 nt, Artificial Sequence
  Description of Artificial Sequence: Synthetic oligonucleotide
  Antisense strand to SEQ ID NO: 1297866
gaagacaacccuauucuua

SEQ ID NO: 1297868 - RNA, 19 nt, Artificial Sequence
  Description of Artificial Sequence: Synthetic oligonucleotide
  Sense strand starting at position 878 of SEQ ID NO: 1241764
gguugucuucccuauucua

SEQ ID NO: 1297869 - RNA, 19 nt, Artificial Sequence
  Description of Artificial Sequence: Synthetic oligonucleotide
  Antisense strand to SEQ ID NO: 1297868
uagaauagggaagacaacc

SEQ ID NO: 1297870 - RNA, 19 nt, Artificial Sequence
  Description of Artificial Sequence: Synthetic oligonucleotide
  Sense strand starting at position 899 of SEQ ID NO: 1241764
gucgaaauaugggcgaaau

SEQ ID NO: 1297871 - RNA, 19 nt, Artificial Sequence
  Description of Artificial Sequence: Synthetic oligonucleotide
  Antisense strand to SEQ ID NO: 1297870
auuucgcccauauuucgac

SEQ ID NO: 1297872 - RNA, 19 nt, Artificial Sequence
  Description of Artificial Sequence: Synthetic oligonucleotide
  Sense strand starting at position 900 of SEQ ID NO: 1241764
ucgaaauaugggcgaaaug

SEQ ID NO: 1297873 - RNA, 19 nt, Artificial Sequence
  Description of Artificial Sequence: Synthetic oligonucleotide
  Antisense strand to SEQ ID NO: 1297872
cauuucgcccauauuucga

SEQ ID NO: 1297874 - RNA, 19 nt, Artificial Sequence
  Description of Artificial Sequence: Synthetic oligonucleotide
  Sense strand starting at position 910 of SEQ ID NO: 1241764
ggcgaaaugggcgauuaua

SEQ ID NO: 1297875 - RNA, 19 nt, Artificial Sequence
  Description of Artificial Sequence: Synthetic oligonucleotide
  Antisense strand to SEQ ID NO: 1297874
uauaaucgcccauuucgcc

SEQ ID NO: 1297876 - RNA, 19 nt, Artificial Sequence
  Description of Artificial Sequence: Synthetic oligonucleotide
  Sense strand starting at position 947 of SEQ ID NO: 1241764
gcuggaacgcuauaaugua

SEQ ID NO: 1297877 - RNA, 19 nt, Artificial Sequence
  Description of Artificial Sequence: Synthetic oligonucleotide
  Antisense strand to SEQ ID NO: 1297876
uacauuauagcguuccagc

SEQ ID NO: 1297878 - RNA, 19 nt, Artificial Sequence
  Description of Artificial Sequence: Synthetic oligonucleotide
  Sense strand starting at position 1052 of SEQ ID NO: 1241764
cucaccaaguguuuaaauu

SEQ ID NO: 1297879 - RNA, 19 nt, Artificial Sequence
  Description of Artificial Sequence: Synthetic oligonucleotide
  Antisense strand to SEQ ID NO: 1297878
aauuuaaacacuuggugag

SEQ ID NO: 1297880 - RNA, 19 nt, Artificial Sequence
  Description of Artificial Sequence: Synthetic oligonucleotide
  Sense strand starting at position 1053 of SEQ ID NO: 1241764
ucaccaaguguuuaaauua

SEQ ID NO: 1297881 - RNA, 19 nt, Artificial Sequence
  Description of Artificial Sequence: Synthetic oligonucleotide
  Antisense strand to SEQ ID NO: 1297880
uaauuuaaacacuugguga

SEQ ID NO: 1297882 - RNA, 19 nt, Artificial Sequence
  Description of Artificial Sequence: Synthetic oligonucleotide
  Sense strand starting at position 1115 of SEQ ID NO: 1241764
uucuuuaaacugggucaga

SEQ ID NO: 1297883 - RNA, 19 nt, Artificial Sequence
  Description of Artificial Sequence: Synthetic oligonucleotide
  Antisense strand to SEQ ID NO: 1297882
ucugacccaguuuaaagaa

SEQ ID NO: 1297884 - RNA, 19 nt, Artificial Sequence
  Description of Artificial Sequence: Synthetic oligonucleotide
  Sense strand starting at position 1116 of SEQ ID NO: 1241764
ucuuuaaacugggucagaa

SEQ ID NO: 1297885 - RNA, 19 nt, Artificial Sequence
  Description of Artificial Sequence: Synthetic oligonucleotide
  Antisense strand to SEQ ID NO: 1297884
uucugacccaguuuaaaga

SEQ ID NO: 1297886 - RNA, 19 nt, Artificial Sequence
  Description of Artificial Sequence: Synthetic oligonucleotide
  Sense strand starting at position 1240 of SEQ ID NO: 1241764
acucuacuguacuuugaga

SEQ ID NO: 1297887 - RNA, 19 nt, Artificial Sequence
  Description of Artificial Sequence: Synthetic oligonucleotide
  Antisense strand to SEQ ID NO: 1297886
ucucaaaguacaguagagu

SEQ ID NO: 1297888 - RNA, 19 nt, Artificial Sequence
  Description of Artificial Sequence: Synthetic oligonucleotide
  Sense strand starting at position 1242 of SEQ ID NO: 1241764
ucuacuguacuuugagaua

SEQ ID NO: 1297889 - RNA, 19 nt, Artificial Sequence
  Description of Artificial Sequence: Synthetic oligonucleotide
  Antisense strand to SEQ ID NO: 1297888
uaucucaaaguacaguaga

SEQ ID NO: 1297890 - RNA, 19 nt, Artificial Sequence
  Description of Artificial Sequence: Synthetic oligonucleotide
  Sense strand starting at position 1348 of SEQ ID NO: 1241764
agaggaggugugugaagaa

SEQ ID NO: 1297891 - RNA, 19 nt, Artificial Sequence
  Description of Artificial Sequence: Synthetic oligonucleotide
  Antisense strand to SEQ ID NO: 1297890
uucuucacacaccuccucu

SEQ ID NO: 1297892 - RNA, 19 nt, Artificial Sequence
  Description of Artificial Sequence: Synthetic oligonucleotide
  Sense strand starting at position 1403 of SEQ ID NO: 1241764
cgucuccugacugauggaa

SEQ ID NO: 1297893 - RNA, 19 nt, Artificial Sequence
  Description of Artificial Sequence: Synthetic oligonucleotide
  Antisense strand to SEQ ID NO: 1297892
uuccaucagucaggagacg

SEQ ID NO: 1297894 - RNA, 19 nt, Artificial Sequence
  Description of Artificial Sequence: Synthetic oligonucleotide
  Sense strand starting at position 1522 of SEQ ID NO: 1241764
cuuuguaaaguuugauauc

SEQ ID NO: 1297895 - RNA, 19 nt, Artificial Sequence
  Description of Artificial Sequence: Synthetic oligonucleotide
  Antisense strand to SEQ ID NO: 1297894
gauaucaaacuuuacaaag

SEQ ID NO: 1297896 - RNA, 19 nt, Artificial Sequence
  Description of Artificial Sequence: Synthetic oligonucleotide
  Sense strand starting at position 1532 of SEQ ID NO: 1241764
uuugauaucuggccaguga

SEQ ID NO: 1297897 - RNA, 19 nt, Artificial Sequence
  Description of Artificial Sequence: Synthetic oligonucleotide
  Antisense strand to SEQ ID NO: 1297896
ucacuggccagauaucaaa

SEQ ID NO: 1297898 - RNA, 19 nt, Artificial Sequence
  Description of Artificial Sequence: Synthetic oligonucleotide
  Sense strand starting at position 1533 of SEQ ID NO: 1241764
uugauaucuggccagugag

SEQ ID NO: 1297899 - RNA, 19 nt, Artificial Sequence
  Description of Artificial Sequence: Synthetic oligonucleotide
  Antisense strand to SEQ ID NO: 1297898
cucacuggccagauaucaa

SEQ ID NO: 1297900 - RNA, 19 nt, Artificial Sequence
  Description of Artificial Sequence: Synthetic oligonucleotide
  Sense strand starting at position 1687 of SEQ ID NO: 1241764
gggcgauccgaccaaauau

SEQ ID NO: 1297901 - RNA, 19 nt, Artificial Sequence
  Description of Artificial Sequence: Synthetic oligonucleotide
  Antisense strand to SEQ ID NO: 1297900
auauuuggucggaucgccc

SEQ ID NO: 1297902 - RNA, 19 nt, Artificial Sequence
  Description of Artificial Sequence: Synthetic oligonucleotide
  Sense strand starting at position 1774 of SEQ ID NO: 1241764
ccagguucugccuagaaac

SEQ ID NO: 1297903 - RNA, 19 nt, Artificial Sequence
  Description of Artificial Sequence: Synthetic oligonucleotide
  Antisense strand to SEQ ID NO: 1297902
guuucuaggcagaaccugg

SEQ ID NO: 1297904 - RNA, 19 nt, Artificial Sequence
  Description of Artificial Sequence: Synthetic oligonucleotide
  Sense strand starting at position 2274 of SEQ ID NO: 1241764
ccuuguguuguugaaaccu

SEQ ID NO: 1297905 - RNA, 19 nt, Artificial Sequence
  Description of Artificial Sequence: Synthetic oligonucleotide
  Antisense strand to SEQ ID NO: 1297904
agguuucaacaacacaagg

SEQ ID NO: 1297906 - RNA, 19 nt, Artificial Sequence
  Description of Artificial Sequence: Synthetic oligonucleotide
  Sense strand starting at position 2381 of SEQ ID NO: 1241764
cgcgucacugugucgauua

SEQ ID NO: 1297907 - RNA, 19 nt, Artificial Sequence
  Description of Artificial Sequence: Synthetic oligonucleotide
  Antisense strand to SEQ ID NO: 1297906
uaaucgacacagugacgcg

SEQ ID NO: 1297908 - RNA, 19 nt, Artificial Sequence
  Description of Artificial Sequence: Synthetic oligonucleotide
  Sense strand starting at position 2545 of SEQ ID NO: 1241764
ggagaaaucuccucuggug

SEQ ID NO: 1297909 - RNA, 19 nt, Artificial Sequence
  Description of Artificial Sequence: Synthetic oligonucleotide
  Antisense strand to SEQ ID NO: 1297908
caccagaggagauuucucc

SEQ ID NO: 1297910 - RNA, 19 nt, Artificial Sequence
  Description of Artificial Sequence: Synthetic oligonucleotide
  Sense strand starting at position 2563 of SEQ ID NO: 1241764
ggcuuuauagcucacaauu

SEQ ID NO: 1297911 - RNA, 19 nt, Artificial Sequence
  Description of Artificial Sequence: Synthetic oligonucleotide
  Antisense strand to SEQ ID NO: 1297910
aauugugagcuauaaagcc

SEQ ID NO: 1297912 - RNA, 19 nt, Artificial Sequence
  Description of Artificial Sequence: Synthetic oligonucleotide
  Sense strand starting at position 2827 of SEQ ID NO: 1241764
ugcuuccuucccuaaagga

SEQ ID NO: 1297913 - RNA, 19 nt, Artificial Sequence
  Description of Artificial Sequence: Synthetic oligonucleotide
  Antisense strand to SEQ ID NO: 1297912
uccuuuagggaaggaagca

SEQ ID NO: 1297914 - RNA, 19 nt, Artificial Sequence
  Description of Artificial Sequence: Synthetic oligonucleotide
  Sense strand starting at position 2844 of SEQ ID NO: 1241764
gaagaaagguugucaugug

SEQ ID NO: 1297915 - RNA, 19 nt, Artificial Sequence
  Description of Artificial Sequence: Synthetic oligonucleotide
  Antisense strand to SEQ ID NO: 1297914
cacaugacaaccuuucuuc

SEQ ID NO: 1297916 - RNA, 19 nt, Artificial Sequence
  Description of Artificial Sequence: Synthetic oligonucleotide
  Sense strand starting at position 2869 of SEQ ID NO: 1241764
aagcaauuggugcaggaua

SEQ ID NO: 1297917 - RNA, 19 nt, Artificial Sequence
  Description of Artificial Sequence: Synthetic oligonucleotide
  Antisense strand to SEQ ID NO: 1297916
uauccugcaccaauugcuu

SEQ ID NO: 1297918 - RNA, 19 nt, Artificial Sequence
  Description of Artificial Sequence: Synthetic oligonucleotide
  Sense strand starting at position 2909 of SEQ ID NO: 1241764
cagggagacuuccacauuu

SEQ ID NO: 1297919 - RNA, 19 nt, Artificial Sequence
  Description of Artificial Sequence: Synthetic oligonucleotide
  Antisense strand to SEQ ID NO: 1297918
aaauguggaagucucccug

SEQ ID NO: 1297920 - RNA, 19 nt, Artificial Sequence
  Description of Artificial Sequence: Synthetic oligonucleotide
  Sense strand starting at position 3067 of SEQ ID NO: 1241764
uccaguauuugggaucuga

SEQ ID NO: 1297921 - RNA, 19 nt, Artificial Sequence
  Description of Artificial Sequence: Synthetic oligonucleotide
  Antisense strand to SEQ ID NO: 1297920
ucagaucccaaauacugga

SEQ ID NO: 1297922 - RNA, 19 nt, Artificial Sequence
  Description of Artificial Sequence: Synthetic oligonucleotide
  Sense strand starting at position 3099 of SEQ ID NO: 1241764
uaguaauucuccgugaaag

SEQ ID NO: 1297923 - RNA, 19 nt, Artificial Sequence
  Description of Artificial Sequence: Synthetic oligonucleotide
  Antisense strand to SEQ ID NO: 1297922
cuuucacggagaauuacua

SEQ ID NO: 1297924 - RNA, 19 nt, Artificial Sequence
  Description of Artificial Sequence: Synthetic oligonucleotide
  Sense strand starting at position 3107 of SEQ ID NO: 1241764
cuccgugaaagcugaauuu

SEQ ID NO: 1297925 - RNA, 19 nt, Artificial Sequence
  Description of Artificial Sequence: Synthetic oligonucleotide
  Antisense strand to SEQ ID NO: 1297924
aaauucagcuuucacggag

SEQ ID NO: 1297926 - RNA, 19 nt, Artificial Sequence
  Description of Artificial Sequence: Synthetic oligonucleotide
  Sense strand starting at position 3402 of SEQ ID NO: 1241764
ggcugugauguucacauga

SEQ ID NO: 1297927 - RNA, 19 nt, Artificial Sequence
  Description of Artificial Sequence: Synthetic oligonucleotide
  Antisense strand to SEQ ID NO: 1297926
ucaugugaacaucacagcc

SEQ ID NO: 1297928 - RNA, 19 nt, Artificial Sequence
  Description of Artificial Sequence: Synthetic oligonucleotide
  Sense strand starting at position 3494 of SEQ ID NO: 1241764
gugugacuccgggauguaa

SEQ ID NO: 1297929 - RNA, 19 nt, Artificial Sequence
  Description of Artificial Sequence: Synthetic oligonucleotide
  Antisense strand to SEQ ID NO: 1297928
uuacaucccggagucacac

SEQ ID NO: 1297930 - RNA, 19 nt, Artificial Sequence
  Description of Artificial Sequence: Synthetic oligonucleotide
  Sense strand starting at position 2 of SEQ ID NO: 1241765
gaggguauguagcucaaga

SEQ ID NO: 1297931 - RNA, 19 nt, Artificial Sequence
  Description of Artificial Sequence: Synthetic oligonucleotide
  Antisense strand to SEQ ID NO: 1297930
ucuugagcuacauacccuc

SEQ ID NO: 1297932 - RNA, 19 nt, Artificial Sequence
  Description of Artificial Sequence: Synthetic oligonucleotide
  Sense strand starting at position 4 of SEQ ID NO: 1241765
ggguauguagcucaagauc

SEQ ID NO: 1297933 - RNA, 19 nt, Artificial Sequence
  Description of Artificial Sequence: Synthetic oligonucleotide
  Antisense strand to SEQ ID NO: 1297932
gaucuugagcuacauaccc

SEQ ID NO: 1297934 - RNA, 19 nt, Artificial Sequence
  Description of Artificial Sequence: Synthetic oligonucleotide
  Sense strand starting at position 173 of SEQ ID NO: 1241765
gcugaugaucucgaagguu

SEQ ID NO: 1297935 - RNA, 19 nt, Artificial Sequence
  Description of Artificial Sequence: Synthetic oligonucleotide
  Antisense strand to SEQ ID NO: 1297934
aaccuucgagaucaucagc

SEQ ID NO: 1297936 - RNA, 19 nt, Artificial Sequence
  Description of Artificial Sequence: Synthetic oligonucleotide
  Sense strand starting at position 176 of SEQ ID NO: 1241765
gaugaucucgaagguuuag

SEQ ID NO: 1297937 - RNA, 19 nt, Artificial Sequence
  Description of Artificial Sequence: Synthetic oligonucleotide
  Antisense strand to SEQ ID NO: 1297936
cuaaaccuucgagaucauc

SEQ ID NO: 1297938 - RNA, 19 nt, Artificial Sequence
  Description of Artificial Sequence: Synthetic oligonucleotide
  Sense strand starting at position 214 of SEQ ID NO: 1241765
cugcuaaacccugaaguua

SEQ ID NO: 1297939 - RNA, 19 nt, Artificial Sequence
  Description of Artificial Sequence: Synthetic oligonucleotide
  Antisense strand to SEQ ID NO: 1297938
uaacuucaggguuuagcag

SEQ ID NO: 1297940 - RNA, 19 nt, Artificial Sequence
  Description of Artificial Sequence: Synthetic oligonucleotide
  Sense strand starting at position 309 of SEQ ID NO: 1241765
uuuagagaucuguggacug

SEQ ID NO: 1297941 - RNA, 19 nt, Artificial Sequence
  Description of Artificial Sequence: Synthetic oligonucleotide
  Antisense strand to SEQ ID NO: 1297940
caguccacagaucucuaaa

SEQ ID NO: 1297942 - RNA, 19 nt, Artificial Sequence
  Description of Artificial Sequence: Synthetic oligonucleotide
  Sense strand starting at position 314 of SEQ ID NO: 1241765
agaucuguggacugacauu

SEQ ID NO: 1297943 - RNA, 19 nt, Artificial Sequence
  Description of Artificial Sequence: Synthetic oligonucleotide
  Antisense strand to SEQ ID NO: 1297942
aaugucaguccacagaucu

SEQ ID NO: 1297944 - RNA, 19 nt, Artificial Sequence
  Description of Artificial Sequence: Synthetic oligonucleotide
  Sense strand starting at position 401 of SEQ ID NO: 1241765
acaugauuagucuacuuuc

SEQ ID NO: 1297945 - RNA, 19 nt, Artificial Sequence
  Description of Artificial Sequence: Synthetic oligonucleotide
  Antisense strand to SEQ ID NO: 1297944
gaaaguagacuaaucaugu

SEQ ID NO: 1297946 - RNA, 19 nt, Artificial Sequence
  Description of Artificial Sequence: Synthetic oligonucleotide
  Sense strand starting at position 518 of SEQ ID NO: 1241765
cuuuaagcacuggaauguu

SEQ ID NO: 1297947 - RNA, 19 nt, Artificial Sequence
  Description of Artificial Sequence: Synthetic oligonucleotide
  Antisense strand to SEQ ID NO: 1297946
aacauuccagugcuuaaag

SEQ ID NO: 1297948 - RNA, 19 nt, Artificial Sequence
  Description of Artificial Sequence: Synthetic oligonucleotide
  Sense strand starting at position 884 of SEQ ID NO: 1241765
gggcuaaaugcugacaaau

SEQ ID NO: 1297949 - RNA, 19 nt, Artificial Sequence
  Description of Artificial Sequence: Synthetic oligonucleotide
  Antisense strand to SEQ ID NO: 1297948
auuugucagcauuuagccc

SEQ ID NO: 1297950 - RNA, 19 nt, Artificial Sequence
  Description of Artificial Sequence: Synthetic oligonucleotide
  Sense strand starting at position 916 of SEQ ID NO: 1241765
augugugggaaguauacua

SEQ ID NO: 1297951 - RNA, 19 nt, Artificial Sequence
  Description of Artificial Sequence: Synthetic oligonucleotide
  Antisense strand to SEQ ID NO: 1297950
uaguauacuucccacacau

SEQ ID NO: 1297952 - RNA, 19 nt, Artificial Sequence
  Description of Artificial Sequence: Synthetic oligonucleotide
  Sense strand starting at position 970 of SEQ ID NO: 1241765
guauuagugguagauaaua

SEQ ID NO: 1297953 - RNA, 19 nt, Artificial Sequence
  Description of Artificial Sequence: Synthetic oligonucleotide
  Antisense strand to SEQ ID NO: 1297952
uauuaucuaccacuaauac

SEQ ID NO: 1297954 - RNA, 19 nt, Artificial Sequence
  Description of Artificial Sequence: Synthetic oligonucleotide
  Sense strand starting at position 972 of SEQ ID NO: 1241765
auuagugguagauaauagu

SEQ ID NO: 1297955 - RNA, 19 nt, Artificial Sequence
  Description of Artificial Sequence: Synthetic oligonucleotide
  Antisense strand to SEQ ID NO: 1297954
acuauuaucuaccacuaau

SEQ ID NO: 1297956 - RNA, 19 nt, Artificial Sequence
  Description of Artificial Sequence: Synthetic oligonucleotide
  Sense strand starting at position 979 of SEQ ID NO: 1241765
guagauaauagugguauau

SEQ ID NO: 1297957 - RNA, 19 nt, Artificial Sequence
  Description of Artificial Sequence: Synthetic oligonucleotide
  Antisense strand to SEQ ID NO: 1297956
auauaccacuauuaucuac

SEQ ID NO: 1297958 - RNA, 19 nt, Artificial Sequence
  Description of Artificial Sequence: Synthetic oligonucleotide
  Sense strand starting at position 1037 of SEQ ID NO: 1241765
agggcuuagugauccauua

SEQ ID NO: 1297959 - RNA, 19 nt, Artificial Sequence
  Description of Artificial Sequence: Synthetic oligonucleotide
  Antisense strand to SEQ ID NO: 1297958
uaauggaucacuaagcccu

SEQ ID NO: 1297960 - RNA, 19 nt, Artificial Sequence
  Description of Artificial Sequence: Synthetic oligonucleotide
  Sense strand starting at position 1095 of SEQ ID NO: 1241765
uaauacauuugggauugga

SEQ ID NO: 1297961 - RNA, 19 nt, Artificial Sequence
  Description of Artificial Sequence: Synthetic oligonucleotide
  Antisense strand to SEQ ID NO: 1297960
uccaaucccaaauguauua

SEQ ID NO: 1297962 - RNA, 19 nt, Artificial Sequence
  Description of Artificial Sequence: Synthetic oligonucleotide
  Sense strand starting at position 1113 of SEQ ID NO: 1241765
aagacugaaguaugaguua

SEQ ID NO: 1297963 - RNA, 19 nt, Artificial Sequence
  Description of Artificial Sequence: Synthetic oligonucleotide
  Antisense strand to SEQ ID NO: 1297962
uaacucauacuucagucuu

SEQ ID NO: 1297964 - RNA, 19 nt, Artificial Sequence
  Description of Artificial Sequence: Synthetic oligonucleotide
  Sense strand starting at position 1116 of SEQ ID NO: 1241765
acugaaguaugaguuaaau

SEQ ID NO: 1297965 - RNA, 19 nt, Artificial Sequence
  Description of Artificial Sequence: Synthetic oligonucleotide
  Antisense strand to SEQ ID NO: 1297964
auuuaacucauacuucagu

SEQ ID NO: 1297966 - RNA, 19 nt, Artificial Sequence
  Description of Artificial Sequence: Synthetic oligonucleotide
  Sense strand starting at position 1125 of SEQ ID NO: 1241765
ugaguuaaauggucaucug

SEQ ID NO: 1297967 - RNA, 19 nt, Artificial Sequence
  Description of Artificial Sequence: Synthetic oligonucleotide
  Antisense strand to SEQ ID NO: 1297966
cagaugaccauuuaacuca

SEQ ID NO: 1297968 - RNA, 19 nt, Artificial Sequence
  Description of Artificial Sequence: Synthetic oligonucleotide
  Sense strand starting at position 1126 of SEQ ID NO: 1241765
gaguuaaauggucaucugu

SEQ ID NO: 1297969 - RNA, 19 nt, Artificial Sequence
  Description of Artificial Sequence: Synthetic oligonucleotide
  Antisense strand to SEQ ID NO: 1297968
acagaugaccauuuaacuc

SEQ ID NO: 1297970 - RNA, 19 nt, Artificial Sequence
  Description of Artificial Sequence: Synthetic oligonucleotide
  Sense strand starting at position 1180 of SEQ ID NO: 1241765
ggugauauuuauuaggaua

SEQ ID NO: 1297971 - RNA, 19 nt, Artificial Sequence
  Description of Artificial Sequence: Synthetic oligonucleotide
  Antisense strand to SEQ ID NO: 1297970
uauccuaauaaauaucacc

SEQ ID NO: 1297972 - RNA, 19 nt, Artificial Sequence
  Description of Artificial Sequence: Synthetic oligonucleotide
  Sense strand starting at position 1183 of SEQ ID NO: 1241765
gauauuuauuaggauaguc

SEQ ID NO: 1297973 - RNA, 19 nt, Artificial Sequence
  Description of Artificial Sequence: Synthetic oligonucleotide
  Antisense strand to SEQ ID NO: 1297972
gacuauccuaauaaauauc

SEQ ID NO: 1297974 - RNA, 19 nt, Artificial Sequence
  Description of Artificial Sequence: Synthetic oligonucleotide
  Sense strand starting at position 1229 of SEQ ID NO: 1241765
gcgcuaaaugcuuuaugua

SEQ ID NO: 1297975 - RNA, 19 nt, Artificial Sequence
  Description of Artificial Sequence: Synthetic oligonucleotide
  Antisense strand to SEQ ID NO: 1297974
uacauaaagcauuuagcgc

SEQ ID NO: 1297976 - RNA, 19 nt, Artificial Sequence
  Description of Artificial Sequence: Synthetic oligonucleotide
  Sense strand starting at position 1345 of SEQ ID NO: 1241765
cugauaaguggcuaaacau

SEQ ID NO: 1297977 - RNA, 19 nt, Artificial Sequence
  Description of Artificial Sequence: Synthetic oligonucleotide
  Antisense strand to SEQ ID NO: 1297976
auguuuagccacuuaucag

SEQ ID NO: 1297978 - RNA, 19 nt, Artificial Sequence
  Description of Artificial Sequence: Synthetic oligonucleotide
  Sense strand starting at position 1351 of SEQ ID NO: 1241765
aguggcuaaacauggauua

SEQ ID NO: 1297979 - RNA, 19 nt, Artificial Sequence
  Description of Artificial Sequence: Synthetic oligonucleotide
  Antisense strand to SEQ ID NO: 1297978
uaauccauguuuagccacu

SEQ ID NO: 1297980 - RNA, 19 nt, Artificial Sequence
  Description of Artificial Sequence: Synthetic oligonucleotide
  Sense strand starting at position 1352 of SEQ ID NO: 1241765
guggcuaaacauggauuaa

SEQ ID NO: 1297981 - RNA, 19 nt, Artificial Sequence
  Description of Artificial Sequence: Synthetic oligonucleotide
  Antisense strand to SEQ ID NO: 1297980
uuaauccauguuuagccac

SEQ ID NO: 1297982 - RNA, 19 nt, Artificial Sequence
  Description of Artificial Sequence: Synthetic oligonucleotide
  Sense strand starting at position 1581 of SEQ ID NO: 1241765
cccagaauccuguaaagca

SEQ ID NO: 1297983 - RNA, 19 nt, Artificial Sequence
  Description of Artificial Sequence: Synthetic oligonucleotide
  Antisense strand to SEQ ID NO: 1297982
ugcuuuacaggauucuggg

SEQ ID NO: 1297984 - RNA, 19 nt, Artificial Sequence
  Description of Artificial Sequence: Synthetic oligonucleotide
  Sense strand starting at position 1652 of SEQ ID NO: 1241765
cugggugacccuggauaaa

SEQ ID NO: 1297985 - RNA, 19 nt, Artificial Sequence
  Description of Artificial Sequence: Synthetic oligonucleotide
  Antisense strand to SEQ ID NO: 1297984
uuuauccagggucacccag

SEQ ID NO: 1297986 - RNA, 19 nt, Artificial Sequence
  Description of Artificial Sequence: Synthetic oligonucleotide
  Sense strand starting at position 1997 of SEQ ID NO: 1241765
cuaugacaucaucacuguu

SEQ ID NO: 1297987 - RNA, 19 nt, Artificial Sequence
  Description of Artificial Sequence: Synthetic oligonucleotide
  Antisense strand to SEQ ID NO: 1297986
aacagugaugaugucauag

SEQ ID NO: 1297988 - RNA, 19 nt, Artificial Sequence
  Description of Artificial Sequence: Synthetic oligonucleotide
  Sense strand starting at position 2735 of SEQ ID NO: 1241765
aauucuuagcgguagaaug

SEQ ID NO: 1297989 - RNA, 19 nt, Artificial Sequence
  Description of Artificial Sequence: Synthetic oligonucleotide
  Antisense strand to SEQ ID NO: 1297988
cauucuaccgcuaagaauu

SEQ ID NO: 1297990 - RNA, 19 nt, Artificial Sequence
  Description of Artificial Sequence: Synthetic oligonucleotide
  Sense strand starting at position 2931 of SEQ ID NO: 1241765
auaauauugucauugcaag

SEQ ID NO: 1297991 - RNA, 19 nt, Artificial Sequence
  Description of Artificial Sequence: Synthetic oligonucleotide
  Antisense strand to SEQ ID NO: 1297990
cuugcaaugacaauauuau

SEQ ID NO: 1297992 - RNA, 19 nt, Artificial Sequence
  Description of Artificial Sequence: Synthetic oligonucleotide
  Sense strand starting at position 2937 of SEQ ID NO: 1241765
uugucauugcaagauauuc

SEQ ID NO: 1297993 - RNA, 19 nt, Artificial Sequence
  Description of Artificial Sequence: Synthetic oligonucleotide
  Antisense strand to SEQ ID NO: 1297992
gaauaucuugcaaugacaa

SEQ ID NO: 1297994 - RNA, 19 nt, Artificial Sequence
  Description of Artificial Sequence: Synthetic oligonucleotide
  Sense strand starting at position 2967 of SEQ ID NO: 1241765
uccaguuugguagaacuaa

SEQ ID NO: 1297995 - RNA, 19 nt, Artificial Sequence
  Description of Artificial Sequence: Synthetic oligonucleotide
  Antisense strand to SEQ ID NO: 1297994
uuaguucuaccaaacugga

SEQ ID NO: 1297996 - RNA, 19 nt, Artificial Sequence
  Description of Artificial Sequence: Synthetic oligonucleotide
  Sense strand starting at position 3009 of SEQ ID NO: 1241765
uuaguugugcaguccuagu

SEQ ID NO: 1297997 - RNA, 19 nt, Artificial Sequence
  Description of Artificial Sequence: Synthetic oligonucleotide
  Antisense strand to SEQ ID NO: 1297996
acuaggacugcacaacuaa

SEQ ID NO: 1297998 - RNA, 19 nt, Artificial Sequence
  Description of Artificial Sequence: Synthetic oligonucleotide
  Sense strand starting at position 3081 of SEQ ID NO: 1241765
uaguaaucacaugagcuga

SEQ ID NO: 1297999 - RNA, 19 nt, Artificial Sequence
  Description of Artificial Sequence: Synthetic oligonucleotide
  Antisense strand to SEQ ID NO: 1297998
ucagcucaugugauuacua

SEQ ID NO: 1298000 - RNA, 19 nt, Artificial Sequence
  Description of Artificial Sequence: Synthetic oligonucleotide
  Sense strand starting at position 3199 of SEQ ID NO: 1241765
uguguacugguggaaauca

SEQ ID NO: 1298001 - RNA, 19 nt, Artificial Sequence
  Description of Artificial Sequence: Synthetic oligonucleotide
  Antisense strand to SEQ ID NO: 1298000
ugauuuccaccaguacaca

SEQ ID NO: 1298002 - RNA, 19 nt, Artificial Sequence
  Description of Artificial Sequence: Synthetic oligonucleotide
  Sense strand starting at position 3280 of SEQ ID NO: 1241765
gaaauuaguguugguuaag

SEQ ID NO: 1298003 - RNA, 19 nt, Artificial Sequence
  Description of Artificial Sequence: Synthetic oligonucleotide
  Antisense strand to SEQ ID NO: 1298002
cuuaaccaacacuaauuuc

SEQ ID NO: 1298004 - RNA, 19 nt, Artificial Sequence
  Description of Artificial Sequence: Synthetic oligonucleotide
  Sense strand starting at position 3408 of SEQ ID NO: 1241765
acuaaauuugugugcuuac

SEQ ID NO: 1298005 - RNA, 19 nt, Artificial Sequence
  Description of Artificial Sequence: Synthetic oligonucleotide
  Antisense strand to SEQ ID NO: 1298004
guaagcacacaaauuuagu

SEQ ID NO: 1298006 - RNA, 19 nt, Artificial Sequence
  Description of Artificial Sequence: Synthetic oligonucleotide
  Sense strand starting at position 3409 of SEQ ID NO: 1241765
cuaaauuugugugcuuaca

SEQ ID NO: 1298007 - RNA, 19 nt, Artificial Sequence
  Description of Artificial Sequence: Synthetic oligonucleotide
  Antisense strand to SEQ ID NO: 1298006
uguaagcacacaaauuuag

SEQ ID NO: 1298008 - RNA, 19 nt, Artificial Sequence
  Description of Artificial Sequence: Synthetic oligonucleotide
  Sense strand starting at position 3812 of SEQ ID NO: 1241765
gacacuuaagaguggcaua

SEQ ID NO: 1298009 - RNA, 19 nt, Artificial Sequence
  Description of Artificial Sequence: Synthetic oligonucleotide
  Antisense strand to SEQ ID NO: 1298008
uaugccacucuuaaguguc

SEQ ID NO: 1298010 - RNA, 19 nt, Artificial Sequence
  Description of Artificial Sequence: Synthetic oligonucleotide
  Sense strand starting at position 33 of SEQ ID NO: 1241766
gaaggugcugcuugauuga

SEQ ID NO: 1298011 - RNA, 19 nt, Artificial Sequence
  Description of Artificial Sequence: Synthetic oligonucleotide
  Antisense strand to SEQ ID NO: 1298010
ucaaucaagcagcaccuuc

SEQ ID NO: 1298012 - RNA, 19 nt, Artificial Sequence
  Description of Artificial Sequence: Synthetic oligonucleotide
  Sense strand starting at position 118 of SEQ ID NO: 1241766
agcugauggaguuggcuaa

SEQ ID NO: 1298013 - RNA, 19 nt, Artificial Sequence
  Description of Artificial Sequence: Synthetic oligonucleotide
  Antisense strand to SEQ ID NO: 1298012
uuagccaacuccaucagcu

SEQ ID NO: 1298014 - RNA, 19 nt, Artificial Sequence
  Description of Artificial Sequence: Synthetic oligonucleotide
  Sense strand starting at position 417 of SEQ ID NO: 1241766
aggugaggaucugaucaug

SEQ ID NO: 1298015 - RNA, 19 nt, Artificial Sequence
  Description of Artificial Sequence: Synthetic oligonucleotide
  Antisense strand to SEQ ID NO: 1298014
caugaucagauccucaccu

SEQ ID NO: 1298016 - RNA, 19 nt, Artificial Sequence
  Description of Artificial Sequence: Synthetic oligonucleotide
  Sense strand starting at position 422 of SEQ ID NO: 1241766
aggaucugaucauggauga

SEQ ID NO: 1298017 - RNA, 19 nt, Artificial Sequence
  Description of Artificial Sequence: Synthetic oligonucleotide
  Antisense strand to SEQ ID NO: 1298016
ucauccaugaucagauccu

SEQ ID NO: 1298018 - RNA, 19 nt, Artificial Sequence
  Description of Artificial Sequence: Synthetic oligonucleotide
  Sense strand starting at position 731 of SEQ ID NO: 1241766
gucagcaucccggaaagau

SEQ ID NO: 1298019 - RNA, 19 nt, Artificial Sequence
  Description of Artificial Sequence: Synthetic oligonucleotide
  Antisense strand to SEQ ID NO: 1298018
aucuuuccgggaugcugac

SEQ ID NO: 1298020 - RNA, 19 nt, Artificial Sequence
  Description of Artificial Sequence: Synthetic oligonucleotide
  Sense strand starting at position 770 of SEQ ID NO: 1241766
gccacaugugucuguagga

SEQ ID NO: 1298021 - RNA, 19 nt, Artificial Sequence
  Description of Artificial Sequence: Synthetic oligonucleotide
  Antisense strand to SEQ ID NO: 1298020
uccuacagacacauguggc

SEQ ID NO: 1298022 - RNA, 19 nt, Artificial Sequence
  Description of Artificial Sequence: Synthetic oligonucleotide
  Sense strand starting at position 771 of SEQ ID NO: 1241766
ccacaugugucuguaggaa

SEQ ID NO: 1298023 - RNA, 19 nt, Artificial Sequence
  Description of Artificial Sequence: Synthetic oligonucleotide
  Antisense strand to SEQ ID NO: 1298022
uuccuacagacacaugugg

SEQ ID NO: 1298024 - RNA, 19 nt, Artificial Sequence
  Description of Artificial Sequence: Synthetic oligonucleotide
  Sense strand starting at position 821 of SEQ ID NO: 1241766
gugucaauuucugcguuaa

SEQ ID NO: 1298025 - RNA, 19 nt, Artificial Sequence
  Description of Artificial Sequence: Synthetic oligonucleotide
  Antisense strand to SEQ ID NO: 1298024
uuaacgcagaaauugacac

SEQ ID NO: 1298026 - RNA, 19 nt, Artificial Sequence
  Description of Artificial Sequence: Synthetic oligonucleotide
  Sense strand starting at position 822 of SEQ ID NO: 1241766
ugucaauuucugcguuaaa

SEQ ID NO: 1298027 - RNA, 19 nt, Artificial Sequence
  Description of Artificial Sequence: Synthetic oligonucleotide
  Antisense strand to SEQ ID NO: 1298026
uuuaacgcagaaauugaca

SEQ ID NO: 1298028 - RNA, 19 nt, Artificial Sequence
  Description of Artificial Sequence: Synthetic oligonucleotide
  Sense strand starting at position 823 of SEQ ID NO: 1241766
gucaauuucugcguuaaac

SEQ ID NO: 1298029 - RNA, 19 nt, Artificial Sequence
  Description of Artificial Sequence: Synthetic oligonucleotide
  Antisense strand to SEQ ID NO: 1298028
guuuaacgcagaaauugac

SEQ ID NO: 1298030 - RNA, 19 nt, Artificial Sequence
  Description of Artificial Sequence: Synthetic oligonucleotide
  Sense strand starting at position 1409 of SEQ ID NO: 1241766
agccuuucuuggucuagga

SEQ ID NO: 1298031 - RNA, 19 nt, Artificial Sequence
  Description of Artificial Sequence: Synthetic oligonucleotide
  Antisense strand to SEQ ID NO: 1298030
uccuagaccaagaaaggcu

SEQ ID NO: 1298032 - RNA, 19 nt, Artificial Sequence
  Description of Artificial Sequence: Synthetic oligonucleotide
  Sense strand starting at position 1411 of SEQ ID NO: 1241766
ccuuucuuggucuaggaca

SEQ ID NO: 1298033 - RNA, 19 nt, Artificial Sequence
  Description of Artificial Sequence: Synthetic oligonucleotide
  Antisense strand to SEQ ID NO: 1298032
uguccuagaccaagaaagg

SEQ ID NO: 1298034 - RNA, 19 nt, Artificial Sequence
  Description of Artificial Sequence: Synthetic oligonucleotide
  Sense strand starting at position 1445 of SEQ ID NO: 1241766
gagccuaaaucagagauga

SEQ ID NO: 1298035 - RNA, 19 nt, Artificial Sequence
  Description of Artificial Sequence: Synthetic oligonucleotide
  Antisense strand to SEQ ID NO: 1298034
ucaucucugauuuaggcuc

SEQ ID NO: 1298036 - RNA, 19 nt, Artificial Sequence
  Description of Artificial Sequence: Synthetic oligonucleotide
  Sense strand starting at position 1556 of SEQ ID NO: 1241766
ucccauucccaagauguga

SEQ ID NO: 1298037 - RNA, 19 nt, Artificial Sequence
  Description of Artificial Sequence: Synthetic oligonucleotide
  Antisense strand to SEQ ID NO: 1298036
ucacaucuugggaauggga

SEQ ID NO: 1298038 - RNA, 19 nt, Artificial Sequence
  Description of Artificial Sequence: Synthetic oligonucleotide
  Sense strand starting at position 2090 of SEQ ID NO: 1241766
ggacguuuccugggcgacu

SEQ ID NO: 1298039 - RNA, 19 nt, Artificial Sequence
  Description of Artificial Sequence: Synthetic oligonucleotide
  Antisense strand to SEQ ID NO: 1298038
agucgcccaggaaacgucc

SEQ ID NO: 1298040 - RNA, 19 nt, Artificial Sequence
  Description of Artificial Sequence: Synthetic oligonucleotide
  Sense strand starting at position 2091 of SEQ ID NO: 1241766
gacguuuccugggcgacuu

SEQ ID NO: 1298041 - RNA, 19 nt, Artificial Sequence
  Description of Artificial Sequence: Synthetic oligonucleotide
  Antisense strand to SEQ ID NO: 1298040
aagucgcccaggaaacguc

SEQ ID NO: 1298042 - RNA, 19 nt, Artificial Sequence
  Description of Artificial Sequence: Synthetic oligonucleotide
  Sense strand starting at position 2103 of SEQ ID NO: 1241766
gcgacuucuucccucaugu

SEQ ID NO: 1298043 - RNA, 19 nt, Artificial Sequence
  Description of Artificial Sequence: Synthetic oligonucleotide
  Antisense strand to SEQ ID NO: 1298042
acaugagggaagaagucgc

SEQ ID NO: 1298044 - RNA, 19 nt, Artificial Sequence
  Description of Artificial Sequence: Synthetic oligonucleotide
  Sense strand starting at position 2120 of SEQ ID NO: 1241766
gugagcugcucuguuuaca

SEQ ID NO: 1298045 - RNA, 19 nt, Artificial Sequence
  Description of Artificial Sequence: Synthetic oligonucleotide
  Antisense strand to SEQ ID NO: 1298044
uguaaacagagcagcucac

SEQ ID NO: 1298046 - RNA, 19 nt, Artificial Sequence
  Description of Artificial Sequence: Synthetic oligonucleotide
  Sense strand starting at position 2139 of SEQ ID NO: 1241766
uuugcuggucgcuggaaga

SEQ ID NO: 1298047 - RNA, 19 nt, Artificial Sequence
  Description of Artificial Sequence: Synthetic oligonucleotide
  Antisense strand to SEQ ID NO: 1298046
ucuuccagcgaccagcaaa

SEQ ID NO: 1298048 - RNA, 19 nt, Artificial Sequence
  Description of Artificial Sequence: Synthetic oligonucleotide
  Sense strand starting at position 2209 of SEQ ID NO: 1241766
gccugugaucccgcgcuuu

SEQ ID NO: 1298049 - RNA, 19 nt, Artificial Sequence
  Description of Artificial Sequence: Synthetic oligonucleotide
  Antisense strand to SEQ ID NO: 1298048
aaagcgcgggaucacaggc

SEQ ID NO: 1298050 - RNA, 19 nt, Artificial Sequence
  Description of Artificial Sequence: Synthetic oligonucleotide
  Sense strand starting at position 2244 of SEQ ID NO: 1241766
agguucuucugagcugaag

SEQ ID NO: 1298051 - RNA, 19 nt, Artificial Sequence
  Description of Artificial Sequence: Synthetic oligonucleotide
  Antisense strand to SEQ ID NO: 1298050
cuucagcucagaagaaccu

SEQ ID NO: 1298052 - RNA, 19 nt, Artificial Sequence
  Description of Artificial Sequence: Synthetic oligonucleotide
  Sense strand starting at position 2246 of SEQ ID NO: 1241766
guucuucugagcugaagag

SEQ ID NO: 1298053 - RNA, 19 nt, Artificial Sequence
  Description of Artificial Sequence: Synthetic oligonucleotide
  Antisense strand to SEQ ID NO: 1298052
cucuucagcucagaagaac

SEQ ID NO: 1298054 - RNA, 19 nt, Artificial Sequence
  Description of Artificial Sequence: Synthetic oligonucleotide
  Sense strand starting at position 2247 of SEQ ID NO: 1241766
uucuucugagcugaagagu

SEQ ID NO: 1298055 - RNA, 19 nt, Artificial Sequence
  Description of Artificial Sequence: Synthetic oligonucleotide
  Antisense strand to SEQ ID NO: 1298054
acucuucagcucagaagaa

SEQ ID NO: 1298056 - RNA, 19 nt, Artificial Sequence
  Description of Artificial Sequence: Synthetic oligonucleotide
  Sense strand starting at position 2493 of SEQ ID NO: 1241766
gaggacacuucgccauaga

SEQ ID NO: 1298057 - RNA, 19 nt, Artificial Sequence
  Description of Artificial Sequence: Synthetic oligonucleotide
  Antisense strand to SEQ ID NO: 1298056
ucuauggcgaaguguccuc

SEQ ID NO: 1298058 - RNA, 19 nt, Artificial Sequence
  Description of Artificial Sequence: Synthetic oligonucleotide
  Sense strand starting at position 2496 of SEQ ID NO: 1241766
gacacuucgccauagacau

SEQ ID NO: 1298059 - RNA, 19 nt, Artificial Sequence
  Description of Artificial Sequence: Synthetic oligonucleotide
  Antisense strand to SEQ ID NO: 1298058
augucuauggcgaaguguc

SEQ ID NO: 1298060 - RNA, 19 nt, Artificial Sequence
  Description of Artificial Sequence: Synthetic oligonucleotide
  Sense strand starting at position 2523 of SEQ ID NO: 1241766
ugcagacugcucugggaac

SEQ ID NO: 1298061 - RNA, 19 nt, Artificial Sequence
  Description of Artificial Sequence: Synthetic oligonucleotide
  Antisense strand to SEQ ID NO: 1298060
guucccagagcagucugca

SEQ ID NO: 1298062 - RNA, 19 nt, Artificial Sequence
  Description of Artificial Sequence: Synthetic oligonucleotide
  Sense strand starting at position 2574 of SEQ ID NO: 1241766
aaaggaaucgcaggucaag

SEQ ID NO: 1298063 - RNA, 19 nt, Artificial Sequence
  Description of Artificial Sequence: Synthetic oligonucleotide
  Antisense strand to SEQ ID NO: 1298062
cuugaccugcgauuccuuu

SEQ ID NO: 1298064 - RNA, 19 nt, Artificial Sequence
  Description of Artificial Sequence: Synthetic oligonucleotide
  Sense strand starting at position 2887 of SEQ ID NO: 1241766
uggcguucugucucagcaa

SEQ ID NO: 1298065 - RNA, 19 nt, Artificial Sequence
  Description of Artificial Sequence: Synthetic oligonucleotide
  Antisense strand to SEQ ID NO: 1298064
uugcugagacagaacgcca

SEQ ID NO: 1298066 - RNA, 19 nt, Artificial Sequence
  Description of Artificial Sequence: Synthetic oligonucleotide
  Sense strand starting at position 3448 of SEQ ID NO: 1241766
uucugcucucaacguugaa

SEQ ID NO: 1298067 - RNA, 19 nt, Artificial Sequence
  Description of Artificial Sequence: Synthetic oligonucleotide
  Antisense strand to SEQ ID NO: 1298066
uucaacguugagagcagaa

SEQ ID NO: 1298068 - RNA, 19 nt, Artificial Sequence
  Description of Artificial Sequence: Synthetic oligonucleotide
  Sense strand starting at position 3451 of SEQ ID NO: 1241766
ugcucucaacguugaaaca

SEQ ID NO: 1298069 - RNA, 19 nt, Artificial Sequence
  Description of Artificial Sequence: Synthetic oligonucleotide
  Antisense strand to SEQ ID NO: 1298068
uguuucaacguugagagca

SEQ ID NO: 1298070 - RNA, 19 nt, Artificial Sequence
  Description of Artificial Sequence: Synthetic oligonucleotide
  Sense strand starting at position 3504 of SEQ ID NO: 1241766
ggaugcuucucucccuuga

SEQ ID NO: 1298071 - RNA, 19 nt, Artificial Sequence
  Description of Artificial Sequence: Synthetic oligonucleotide
  Antisense strand to SEQ ID NO: 1298070
ucaagggagagaagcaucc

SEQ ID NO: 1298072 - RNA, 19 nt, Artificial Sequence
  Description of Artificial Sequence: Synthetic oligonucleotide
  Sense strand starting at position 3508 of SEQ ID NO: 1241766
gcuucucucccuugaugau

SEQ ID NO: 1298073 - RNA, 19 nt, Artificial Sequence
  Description of Artificial Sequence: Synthetic oligonucleotide
  Antisense strand to SEQ ID NO: 1298072
aucaucaagggagagaagc

SEQ ID NO: 1298074 - RNA, 19 nt, Artificial Sequence
  Description of Artificial Sequence: Synthetic oligonucleotide
  Sense strand starting at position 3718 of SEQ ID NO: 1241766
gucuauuacuggcugguca

SEQ ID NO: 1298075 - RNA, 19 nt, Artificial Sequence
  Description of Artificial Sequence: Synthetic oligonucleotide
  Antisense strand to SEQ ID NO: 1298074
ugaccagccaguaauagac

SEQ ID NO: 1298076 - RNA, 19 nt, Artificial Sequence
  Description of Artificial Sequence: Synthetic oligonucleotide
  Sense strand starting at position 3719 of SEQ ID NO: 1241766
ucuauuacuggcuggucaa

SEQ ID NO: 1298077 - RNA, 19 nt, Artificial Sequence
  Description of Artificial Sequence: Synthetic oligonucleotide
  Antisense strand to SEQ ID NO: 1298076
uugaccagccaguaauaga

SEQ ID NO: 1298078 - RNA, 19 nt, Artificial Sequence
  Description of Artificial Sequence: Synthetic oligonucleotide
  Sense strand starting at position 3813 of SEQ ID NO: 1241766
cagccugaguccucaagca

SEQ ID NO: 1298079 - RNA, 19 nt, Artificial Sequence
  Description of Artificial Sequence: Synthetic oligonucleotide
  Antisense strand to SEQ ID NO: 1298078
ugcuugaggacucaggcug

SEQ ID NO: 1298080 - RNA, 19 nt, Artificial Sequence
  Description of Artificial Sequence: Synthetic oligonucleotide
  Sense strand starting at position 3853 of SEQ ID NO: 1241766
gcugaugauucccugugca

SEQ ID NO: 1298081 - RNA, 19 nt, Artificial Sequence
  Description of Artificial Sequence: Synthetic oligonucleotide
  Antisense strand to SEQ ID NO: 1298080
ugcacagggaaucaucagc

SEQ ID NO: 1298082 - RNA, 19 nt, Artificial Sequence
  Description of Artificial Sequence: Synthetic oligonucleotide
  Sense strand starting at position 3856 of SEQ ID NO: 1241766
gaugauucccugugcagag

SEQ ID NO: 1298083 - RNA, 19 nt, Artificial Sequence
  Description of Artificial Sequence: Synthetic oligonucleotide
  Antisense strand to SEQ ID NO: 1298082
cucugcacagggaaucauc

SEQ ID NO: 1298084 - RNA, 19 nt, Artificial Sequence
  Description of Artificial Sequence: Synthetic oligonucleotide
  Sense strand starting at position 3857 of SEQ ID NO: 1241766
augauucccugugcagagu

SEQ ID NO: 1298085 - RNA, 19 nt, Artificial Sequence
  Description of Artificial Sequence: Synthetic oligonucleotide
  Antisense strand to SEQ ID NO: 1298084
acucugcacagggaaucau

SEQ ID NO: 1298086 - RNA, 19 nt, Artificial Sequence
  Description of Artificial Sequence: Synthetic oligonucleotide
  Sense strand starting at position 3923 of SEQ ID NO: 1241766
ugugccaucucauugacuu

SEQ ID NO: 1298087 - RNA, 19 nt, Artificial Sequence
  Description of Artificial Sequence: Synthetic oligonucleotide
  Antisense strand to SEQ ID NO: 1298086
aagucaaugagauggcaca

SEQ ID NO: 1298088 - RNA, 19 nt, Artificial Sequence
  Description of Artificial Sequence: Synthetic oligonucleotide
  Sense strand starting at position 3924 of SEQ ID NO: 1241766
gugccaucucauugacuuc

SEQ ID NO: 1298089 - RNA, 19 nt, Artificial Sequence
  Description of Artificial Sequence: Synthetic oligonucleotide
  Antisense strand to SEQ ID NO: 1298088
gaagucaaugagauggcac

SEQ ID NO: 1298090 - RNA, 19 nt, Artificial Sequence
  Description of Artificial Sequence: Synthetic oligonucleotide
  Sense strand starting at position 135 of SEQ ID NO: 1241767
gcuuguguccugcuugagu

SEQ ID NO: 1298091 - RNA, 19 nt, Artificial Sequence
  Description of Artificial Sequence: Synthetic oligonucleotide
  Antisense strand to SEQ ID NO: 1298090
acucaagcaggacacaagc

SEQ ID NO: 1298092 - RNA, 19 nt, Artificial Sequence
  Description of Artificial Sequence: Synthetic oligonucleotide
  Sense strand starting at position 182 of SEQ ID NO: 1241767
gaaaguagacaaugucuaa

SEQ ID NO: 1298093 - RNA, 19 nt, Artificial Sequence
  Description of Artificial Sequence: Synthetic oligonucleotide
  Antisense strand to SEQ ID NO: 1298092
uuagacauugucuacuuuc

SEQ ID NO: 1298094 - RNA, 19 nt, Artificial Sequence
  Description of Artificial Sequence: Synthetic oligonucleotide
  Sense strand starting at position 471 of SEQ ID NO: 1241767
gagcaaugagguuggaaag

SEQ ID NO: 1298095 - RNA, 19 nt, Artificial Sequence
  Description of Artificial Sequence: Synthetic oligonucleotide
  Antisense strand to SEQ ID NO: 1298094
cuuuccaaccucauugcuc

SEQ ID NO: 1298096 - RNA, 19 nt, Artificial Sequence
  Description of Artificial Sequence: Synthetic oligonucleotide
  Sense strand starting at position 488 of SEQ ID NO: 1241767
agacuugacuaggucuuga

SEQ ID NO: 1298097 - RNA, 19 nt, Artificial Sequence
  Description of Artificial Sequence: Synthetic oligonucleotide
  Antisense strand to SEQ ID NO: 1298096
ucaagaccuagucaagucu

SEQ ID NO: 1298098 - RNA, 19 nt, Artificial Sequence
  Description of Artificial Sequence: Synthetic oligonucleotide
  Sense strand starting at position 535 of SEQ ID NO: 1241767
uuauucuagaggugacaag

SEQ ID NO: 1298099 - RNA, 19 nt, Artificial Sequence
  Description of Artificial Sequence: Synthetic oligonucleotide
  Antisense strand to SEQ ID NO: 1298098
cuugucaccucuagaauaa

SEQ ID NO: 1298100 - RNA, 19 nt, Artificial Sequence
  Description of Artificial Sequence: Synthetic oligonucleotide
  Sense strand starting at position 559 of SEQ ID NO: 1241767
uauguagagguguaaucaa

SEQ ID NO: 1298101 - RNA, 19 nt, Artificial Sequence
  Description of Artificial Sequence: Synthetic oligonucleotide
  Antisense strand to SEQ ID NO: 1298100
uugauuacaccucuacaua

SEQ ID NO: 1298102 - RNA, 19 nt, Artificial Sequence
  Description of Artificial Sequence: Synthetic oligonucleotide
  Sense strand starting at position 566 of SEQ ID NO: 1241767
agguguaaucaagaggcca

SEQ ID NO: 1298103 - RNA, 19 nt, Artificial Sequence
  Description of Artificial Sequence: Synthetic oligonucleotide
  Antisense strand to SEQ ID NO: 1298102
uggccucuugauuacaccu

SEQ ID NO: 1298104 - RNA, 19 nt, Artificial Sequence
  Description of Artificial Sequence: Synthetic oligonucleotide
  Sense strand starting at position 640 of SEQ ID NO: 1241767
cuguuuggagguuauugaa

SEQ ID NO: 1298105 - RNA, 19 nt, Artificial Sequence
  Description of Artificial Sequence: Synthetic oligonucleotide
  Antisense strand to SEQ ID NO: 1298104
uucaauaaccuccaaacag

SEQ ID NO: 1298106 - RNA, 19 nt, Artificial Sequence
  Description of Artificial Sequence: Synthetic oligonucleotide
  Sense strand starting at position 685 of SEQ ID NO: 1241767
cuaggauaucucugagcac

SEQ ID NO: 1298107 - RNA, 19 nt, Artificial Sequence
  Description of Artificial Sequence: Synthetic oligonucleotide
  Antisense strand to SEQ ID NO: 1298106
gugcucagagauauccuag

SEQ ID NO: 1298108 - RNA, 19 nt, Artificial Sequence
  Description of Artificial Sequence: Synthetic oligonucleotide
  Sense strand starting at position 688 of SEQ ID NO: 1241767
ggauaucucugagcacaga

SEQ ID NO: 1298109 - RNA, 19 nt, Artificial Sequence
  Description of Artificial Sequence: Synthetic oligonucleotide
  Antisense strand to SEQ ID NO: 1298108
ucugugcucagagauaucc

SEQ ID NO: 1298110 - RNA, 19 nt, Artificial Sequence
  Description of Artificial Sequence: Synthetic oligonucleotide
  Sense strand starting at position 754 of SEQ ID NO: 1241767
ugagcuaaauucuugagaa

SEQ ID NO: 1298111 - RNA, 19 nt, Artificial Sequence
  Description of Artificial Sequence: Synthetic oligonucleotide
  Antisense strand to SEQ ID NO: 1298110
uucucaagaauuuagcuca

SEQ ID NO: 1298112 - RNA, 19 nt, Artificial Sequence
  Description of Artificial Sequence: Synthetic oligonucleotide
  Sense strand starting at position 1103 of SEQ ID NO: 1241767
ggguucuggacguacuauu

SEQ ID NO: 1298113 - RNA, 19 nt, Artificial Sequence
  Description of Artificial Sequence: Synthetic oligonucleotide
  Antisense strand to SEQ ID NO: 1298112
aauaguacguccagaaccc

SEQ ID NO: 1298114 - RNA, 19 nt, Artificial Sequence
  Description of Artificial Sequence: Synthetic oligonucleotide
  Sense strand starting at position 1205 of SEQ ID NO: 1241767
ugucaacaauuugaugaau

SEQ ID NO: 1298115 - RNA, 19 nt, Artificial Sequence
  Description of Artificial Sequence: Synthetic oligonucleotide
  Antisense strand to SEQ ID NO: 1298114
auucaucaaauuguugaca

SEQ ID NO: 1298116 - RNA, 19 nt, Artificial Sequence
  Description of Artificial Sequence: Synthetic oligonucleotide
  Sense strand starting at position 1292 of SEQ ID NO: 1241767
uuuauuacccaagguaaga

SEQ ID NO: 1298117 - RNA, 19 nt, Artificial Sequence
  Description of Artificial Sequence: Synthetic oligonucleotide
  Antisense strand to SEQ ID NO: 1298116
ucuuaccuuggguaauaaa

SEQ ID NO: 1298118 - RNA, 19 nt, Artificial Sequence
  Description of Artificial Sequence: Synthetic oligonucleotide
  Sense strand starting at position 1315 of SEQ ID NO: 1241767
aaaggucaguuccugagau

SEQ ID NO: 1298119 - RNA, 19 nt, Artificial Sequence
  Description of Artificial Sequence: Synthetic oligonucleotide
  Antisense strand to SEQ ID NO: 1298118
aucucaggaacugaccuuu

SEQ ID NO: 1298120 - RNA, 19 nt, Artificial Sequence
  Description of Artificial Sequence: Synthetic oligonucleotide
  Sense strand starting at position 1327 of SEQ ID NO: 1241767
cugagaugccauuauccuu

SEQ ID NO: 1298121 - RNA, 19 nt, Artificial Sequence
  Description of Artificial Sequence: Synthetic oligonucleotide
  Antisense strand to SEQ ID NO: 1298120
aaggauaauggcaucucag

SEQ ID NO: 1298122 - RNA, 19 nt, Artificial Sequence
  Description of Artificial Sequence: Synthetic oligonucleotide
  Sense strand starting at position 1425 of SEQ ID NO: 1241767
gucauuguacaccaaaguu

SEQ ID NO: 1298123 - RNA, 19 nt, Artificial Sequence
  Description of Artificial Sequence: Synthetic oligonucleotide
  Antisense strand to SEQ ID NO: 1298122
aacuuugguguacaaugac

SEQ ID NO: 1298124 - RNA, 19 nt, Artificial Sequence
  Description of Artificial Sequence: Synthetic oligonucleotide
  Sense strand starting at position 1457 of SEQ ID NO: 1241767
cuguguugggaaugaggau

SEQ ID NO: 1298125 - RNA, 19 nt, Artificial Sequence
  Description of Artificial Sequence: Synthetic oligonucleotide
  Antisense strand to SEQ ID NO: 1298124
auccucauucccaacacag

SEQ ID NO: 1298126 - RNA, 19 nt, Artificial Sequence
  Description of Artificial Sequence: Synthetic oligonucleotide
  Sense strand starting at position 1494 of SEQ ID NO: 1241767
ccaagugugggcgauuaag

SEQ ID NO: 1298127 - RNA, 19 nt, Artificial Sequence
  Description of Artificial Sequence: Synthetic oligonucleotide
  Antisense strand to SEQ ID NO: 1298126
cuuaaucgcccacacuugg

SEQ ID NO: 1298128 - RNA, 19 nt, Artificial Sequence
  Description of Artificial Sequence: Synthetic oligonucleotide
  Sense strand starting at position 1585 of SEQ ID NO: 1241767
gcuguuauugagcugcuuu

SEQ ID NO: 1298129 - RNA, 19 nt, Artificial Sequence
  Description of Artificial Sequence: Synthetic oligonucleotide
  Antisense strand to SEQ ID NO: 1298128
aaagcagcucaauaacagc

SEQ ID NO: 1298130 - RNA, 19 nt, Artificial Sequence
  Description of Artificial Sequence: Synthetic oligonucleotide
  Sense strand starting at position 2203 of SEQ ID NO: 1241767
uccaaagccuaguuuagau

SEQ ID NO: 1298131 - RNA, 19 nt, Artificial Sequence
  Description of Artificial Sequence: Synthetic oligonucleotide
  Antisense strand to SEQ ID NO: 1298130
aucuaaacuaggcuuugga

SEQ ID NO: 1298132 - RNA, 19 nt, Artificial Sequence
  Description of Artificial Sequence: Synthetic oligonucleotide
  Sense strand starting at position 2266 of SEQ ID NO: 1241767
uagcguguagccuucuaga

SEQ ID NO: 1298133 - RNA, 19 nt, Artificial Sequence
  Description of Artificial Sequence: Synthetic oligonucleotide
  Antisense strand to SEQ ID NO: 1298132
ucuagaaggcuacacgcua

SEQ ID NO: 1298134 - RNA, 19 nt, Artificial Sequence
  Description of Artificial Sequence: Synthetic oligonucleotide
  Sense strand starting at position 2268 of SEQ ID NO: 1241767
gcguguagccuucuagaca

SEQ ID NO: 1298135 - RNA, 19 nt, Artificial Sequence
  Description of Artificial Sequence: Synthetic oligonucleotide
  Antisense strand to SEQ ID NO: 1298134
ugucuagaaggcuacacgc

SEQ ID NO: 1298136 - RNA, 19 nt, Artificial Sequence
  Description of Artificial Sequence: Synthetic oligonucleotide
  Sense strand starting at position 2364 of SEQ ID NO: 1241767
accaauguccugcagaacu

SEQ ID NO: 1298137 - RNA, 19 nt, Artificial Sequence
  Description of Artificial Sequence: Synthetic oligonucleotide
  Antisense strand to SEQ ID NO: 1298136
aguucugcaggacauuggu

SEQ ID NO: 1298138 - RNA, 19 nt, Artificial Sequence
  Description of Artificial Sequence: Synthetic oligonucleotide
  Sense strand starting at position 2600 of SEQ ID NO: 1241767
gggccaucugcugggaaga

SEQ ID NO: 1298139 - RNA, 19 nt, Artificial Sequence
  Description of Artificial Sequence: Synthetic oligonucleotide
  Antisense strand to SEQ ID NO: 1298138
ucuucccagcagauggccc

SEQ ID NO: 1298140 - RNA, 19 nt, Artificial Sequence
  Description of Artificial Sequence: Synthetic oligonucleotide
  Sense strand starting at position 2601 of SEQ ID NO: 1241767
ggccaucugcugggaagaa

SEQ ID NO: 1298141 - RNA, 19 nt, Artificial Sequence
  Description of Artificial Sequence: Synthetic oligonucleotide
  Antisense strand to SEQ ID NO: 1298140
uucuucccagcagauggcc

SEQ ID NO: 1298142 - RNA, 19 nt, Artificial Sequence
  Description of Artificial Sequence: Synthetic oligonucleotide
  Sense strand starting at position 2649 of SEQ ID NO: 1241767
ccuuaauaauggguccagu

SEQ ID NO: 1298143 - RNA, 19 nt, Artificial Sequence
  Description of Artificial Sequence: Synthetic oligonucleotide
  Antisense strand to SEQ ID NO: 1298142
acuggacccauuauuaagg

SEQ ID NO: 1298144 - RNA, 19 nt, Artificial Sequence
  Description of Artificial Sequence: Synthetic oligonucleotide
  Sense strand starting at position 2657 of SEQ ID NO: 1241767
auggguccaguauggaaau

SEQ ID NO: 1298145 - RNA, 19 nt, Artificial Sequence
  Description of Artificial Sequence: Synthetic oligonucleotide
  Antisense strand to SEQ ID NO: 1298144
auuuccauacuggacccau

SEQ ID NO: 1298146 - RNA, 19 nt, Artificial Sequence
  Description of Artificial Sequence: Synthetic oligonucleotide
  Sense strand starting at position 2670 of SEQ ID NO: 1241767
ggaaauucuggucgaccca

SEQ ID NO: 1298147 - RNA, 19 nt, Artificial Sequence
  Description of Artificial Sequence: Synthetic oligonucleotide
  Antisense strand to SEQ ID NO: 1298146
ugggucgaccagaauuucc

SEQ ID NO: 1298148 - RNA, 19 nt, Artificial Sequence
  Description of Artificial Sequence: Synthetic oligonucleotide
  Sense strand starting at position 2671 of SEQ ID NO: 1241767
gaaauucuggucgacccaa

SEQ ID NO: 1298149 - RNA, 19 nt, Artificial Sequence
  Description of Artificial Sequence: Synthetic oligonucleotide
  Antisense strand to SEQ ID NO: 1298148
uugggucgaccagaauuuc

SEQ ID NO: 1298150 - RNA, 19 nt, Artificial Sequence
  Description of Artificial Sequence: Synthetic oligonucleotide
  Sense strand starting at position 2798 of SEQ ID NO: 1241767
aucagauugugccuauuuc

SEQ ID NO: 1298151 - RNA, 19 nt, Artificial Sequence
  Description of Artificial Sequence: Synthetic oligonucleotide
  Antisense strand to SEQ ID NO: 1298150
gaaauaggcacaaucugau

SEQ ID NO: 1298152 - RNA, 19 nt, Artificial Sequence
  Description of Artificial Sequence: Synthetic oligonucleotide
  Sense strand starting at position 2838 of SEQ ID NO: 1241767
cuuauuccucuugggauaa

SEQ ID NO: 1298153 - RNA, 19 nt, Artificial Sequence
  Description of Artificial Sequence: Synthetic oligonucleotide
  Antisense strand to SEQ ID NO: 1298152
uuaucccaagaggaauaag

SEQ ID NO: 1298154 - RNA, 19 nt, Artificial Sequence
  Description of Artificial Sequence: Synthetic oligonucleotide
  Sense strand starting at position 3009 of SEQ ID NO: 1241767
guaauuaggcuggagguua

SEQ ID NO: 1298155 - RNA, 19 nt, Artificial Sequence
  Description of Artificial Sequence: Synthetic oligonucleotide
  Antisense strand to SEQ ID NO: 1298154
uaaccuccagccuaauuac

SEQ ID NO: 1298156 - RNA, 19 nt, Artificial Sequence
  Description of Artificial Sequence: Synthetic oligonucleotide
  Sense strand starting at position 3020 of SEQ ID NO: 1241767
ggagguuaaguggauguau

SEQ ID NO: 1298157 - RNA, 19 nt, Artificial Sequence
  Description of Artificial Sequence: Synthetic oligonucleotide
  Antisense strand to SEQ ID NO: 1298156
auacauccacuuaaccucc

SEQ ID NO: 1298158 - RNA, 19 nt, Artificial Sequence
  Description of Artificial Sequence: Synthetic oligonucleotide
  Sense strand starting at position 3022 of SEQ ID NO: 1241767
agguuaaguggauguauac

SEQ ID NO: 1298159 - RNA, 19 nt, Artificial Sequence
  Description of Artificial Sequence: Synthetic oligonucleotide
  Antisense strand to SEQ ID NO: 1298158
guauacauccacuuaaccu

SEQ ID NO: 1298160 - RNA, 19 nt, Artificial Sequence
  Description of Artificial Sequence: Synthetic oligonucleotide
  Sense strand starting at position 3176 of SEQ ID NO: 1241767
uuggaauacuauucugcaa

SEQ ID NO: 1298161 - RNA, 19 nt, Artificial Sequence
  Description of Artificial Sequence: Synthetic oligonucleotide
  Antisense strand to SEQ ID NO: 1298160
uugcagaauaguauuccaa

SEQ ID NO: 1298162 - RNA, 19 nt, Artificial Sequence
  Description of Artificial Sequence: Synthetic oligonucleotide
  Sense strand starting at position 3829 of SEQ ID NO: 1241767
uauuaauguggugaaucau

SEQ ID NO: 1298163 - RNA, 19 nt, Artificial Sequence
  Description of Artificial Sequence: Synthetic oligonucleotide
  Antisense strand to SEQ ID NO: 1298162
augauucaccacauuaaua

SEQ ID NO: 1298164 - RNA, 19 nt, Artificial Sequence
  Description of Artificial Sequence: Synthetic oligonucleotide
  Sense strand starting at position 3839 of SEQ ID NO: 1241767
gugaaucauagugaucgau

SEQ ID NO: 1298165 - RNA, 19 nt, Artificial Sequence
  Description of Artificial Sequence: Synthetic oligonucleotide
  Antisense strand to SEQ ID NO: 1298164
aucgaucacuaugauucac

SEQ ID NO: 1298166 - RNA, 19 nt, Artificial Sequence
  Description of Artificial Sequence: Synthetic oligonucleotide
  Sense strand starting at position 3876 of SEQ ID NO: 1241767
ccuugaauugcagggauaa

SEQ ID NO: 1298167 - RNA, 19 nt, Artificial Sequence
  Description of Artificial Sequence: Synthetic oligonucleotide
  Antisense strand to SEQ ID NO: 1298166
uuaucccugcaauucaagg

SEQ ID NO: 1298168 - RNA, 19 nt, Artificial Sequence
  Description of Artificial Sequence: Synthetic oligonucleotide
  Sense strand starting at position 3877 of SEQ ID NO: 1241767
cuugaauugcagggauaaa

SEQ ID NO: 1298169 - RNA, 19 nt, Artificial Sequence
  Description of Artificial Sequence: Synthetic oligonucleotide
  Antisense strand to SEQ ID NO: 1298168
uuuaucccugcaauucaag

SEQ ID NO: 1298170 - RNA, 19 nt, Artificial Sequence
  Description of Artificial Sequence: Synthetic oligonucleotide
  Sense strand starting at position 54 of SEQ ID NO: 1241768
uguuuauuauaggacagga

SEQ ID NO: 1298171 - RNA, 19 nt, Artificial Sequence
  Description of Artificial Sequence: Synthetic oligonucleotide
  Antisense strand to SEQ ID NO: 1298170
uccuguccuauaauaaaca

SEQ ID NO: 1298172 - RNA, 19 nt, Artificial Sequence
  Description of Artificial Sequence: Synthetic oligonucleotide
  Sense strand starting at position 70 of SEQ ID NO: 1241768
ggagcuagugugugagaug

SEQ ID NO: 1298173 - RNA, 19 nt, Artificial Sequence
  Description of Artificial Sequence: Synthetic oligonucleotide
  Antisense strand to SEQ ID NO: 1298172
caucucacacacuagcucc

SEQ ID NO: 1298174 - RNA, 19 nt, Artificial Sequence
  Description of Artificial Sequence: Synthetic oligonucleotide
  Sense strand starting at position 81 of SEQ ID NO: 1241768
gugagauggcucuggugug

SEQ ID NO: 1298175 - RNA, 19 nt, Artificial Sequence
  Description of Artificial Sequence: Synthetic oligonucleotide
  Antisense strand to SEQ ID NO: 1298174
cacaccagagccaucucac

SEQ ID NO: 1298176 - RNA, 19 nt, Artificial Sequence
  Description of Artificial Sequence: Synthetic oligonucleotide
  Sense strand starting at position 138 of SEQ ID NO: 1241768
gugaccuagguuggauauu

SEQ ID NO: 1298177 - RNA, 19 nt, Artificial Sequence
  Description of Artificial Sequence: Synthetic oligonucleotide
  Antisense strand to SEQ ID NO: 1298176
aauauccaaccuaggucac

SEQ ID NO: 1298178 - RNA, 19 nt, Artificial Sequence
  Description of Artificial Sequence: Synthetic oligonucleotide
  Sense strand starting at position 766 of SEQ ID NO: 1241768
gacagaggaugguaucuga

SEQ ID NO: 1298179 - RNA, 19 nt, Artificial Sequence
  Description of Artificial Sequence: Synthetic oligonucleotide
  Antisense strand to SEQ ID NO: 1298178
ucagauaccauccucuguc

SEQ ID NO: 1298180 - RNA, 19 nt, Artificial Sequence
  Description of Artificial Sequence: Synthetic oligonucleotide
  Sense strand starting at position 791 of SEQ ID NO: 1241768
ccgggagcucaccauugua

SEQ ID NO: 1298181 - RNA, 19 nt, Artificial Sequence
  Description of Artificial Sequence: Synthetic oligonucleotide
  Antisense strand to SEQ ID NO: 1298180
uacaauggugagcucccgg

SEQ ID NO: 1298182 - RNA, 19 nt, Artificial Sequence
  Description of Artificial Sequence: Synthetic oligonucleotide
  Sense strand starting at position 826 of SEQ ID NO: 1241768
gcauacagugaguacuuua

SEQ ID NO: 1298183 - RNA, 19 nt, Artificial Sequence
  Description of Artificial Sequence: Synthetic oligonucleotide
  Antisense strand to SEQ ID NO: 1298182
uaaaguacucacuguaugc

SEQ ID NO: 1298184 - RNA, 19 nt, Artificial Sequence
  Description of Artificial Sequence: Synthetic oligonucleotide
  Sense strand starting at position 831 of SEQ ID NO: 1241768
cagugaguacuuuaucagu

SEQ ID NO: 1298185 - RNA, 19 nt, Artificial Sequence
  Description of Artificial Sequence: Synthetic oligonucleotide
  Antisense strand to SEQ ID NO: 1298184
acugauaaaguacucacug

SEQ ID NO: 1298186 - RNA, 19 nt, Artificial Sequence
  Description of Artificial Sequence: Synthetic oligonucleotide
  Sense strand starting at position 833 of SEQ ID NO: 1241768
gugaguacuuuaucaguau

SEQ ID NO: 1298187 - RNA, 19 nt, Artificial Sequence
  Description of Artificial Sequence: Synthetic oligonucleotide
  Antisense strand to SEQ ID NO: 1298186
auacugauaaaguacucac

SEQ ID NO: 1298188 - RNA, 19 nt, Artificial Sequence
  Description of Artificial Sequence: Synthetic oligonucleotide
  Sense strand starting at position 837 of SEQ ID NO: 1241768
guacuuuaucaguauccuu

SEQ ID NO: 1298189 - RNA, 19 nt, Artificial Sequence
  Description of Artificial Sequence: Synthetic oligonucleotide
  Antisense strand to SEQ ID NO: 1298188
aaggauacugauaaaguac

SEQ ID NO: 1298190 - RNA, 19 nt, Artificial Sequence
  Description of Artificial Sequence: Synthetic oligonucleotide
  Sense strand starting at position 842 of SEQ ID NO: 1241768
uuaucaguauccuugacca

SEQ ID NO: 1298191 - RNA, 19 nt, Artificial Sequence
  Description of Artificial Sequence: Synthetic oligonucleotide
  Antisense strand to SEQ ID NO: 1298190
uggucaaggauacugauaa

SEQ ID NO: 1298192 - RNA, 19 nt, Artificial Sequence
  Description of Artificial Sequence: Synthetic oligonucleotide
  Sense strand starting at position 876 of SEQ ID NO: 1241768
gugcaugaauaggcuagau

SEQ ID NO: 1298193 - RNA, 19 nt, Artificial Sequence
  Description of Artificial Sequence: Synthetic oligonucleotide
  Antisense strand to SEQ ID NO: 1298192
aucuagccuauucaugcac

SEQ ID NO: 1298194 - RNA, 19 nt, Artificial Sequence
  Description of Artificial Sequence: Synthetic oligonucleotide
  Sense strand starting at position 878 of SEQ ID NO: 1241768
gcaugaauaggcuagauau

SEQ ID NO: 1298195 - RNA, 19 nt, Artificial Sequence
  Description of Artificial Sequence: Synthetic oligonucleotide
  Antisense strand to SEQ ID NO: 1298194
auaucuagccuauucaugc

SEQ ID NO: 1298196 - RNA, 19 nt, Artificial Sequence
  Description of Artificial Sequence: Synthetic oligonucleotide
  Sense strand starting at position 888 of SEQ ID NO: 1241768
gcuagauauugaggaggga

SEQ ID NO: 1298197 - RNA, 19 nt, Artificial Sequence
  Description of Artificial Sequence: Synthetic oligonucleotide
  Antisense strand to SEQ ID NO: 1298196
ucccuccucaauaucuagc

SEQ ID NO: 1298198 - RNA, 19 nt, Artificial Sequence
  Description of Artificial Sequence: Synthetic oligonucleotide
  Sense strand starting at position 930 of SEQ ID NO: 1241768
ggaaaugggagaugugcau

SEQ ID NO: 1298199 - RNA, 19 nt, Artificial Sequence
  Description of Artificial Sequence: Synthetic oligonucleotide
  Antisense strand to SEQ ID NO: 1298198
augcacaucucccauuucc

SEQ ID NO: 1298200 - RNA, 19 nt, Artificial Sequence
  Description of Artificial Sequence: Synthetic oligonucleotide
  Sense strand starting at position 1416 of SEQ ID NO: 1241768
agguuuaacuuacauaaag

SEQ ID NO: 1298201 - RNA, 19 nt, Artificial Sequence
  Description of Artificial Sequence: Synthetic oligonucleotide
  Antisense strand to SEQ ID NO: 1298200
cuuuauguaaguuaaaccu

SEQ ID NO: 1298202 - RNA, 19 nt, Artificial Sequence
  Description of Artificial Sequence: Synthetic oligonucleotide
  Sense strand starting at position 1442 of SEQ ID NO: 1241768
gcugcuuagugagacauuu

SEQ ID NO: 1298203 - RNA, 19 nt, Artificial Sequence
  Description of Artificial Sequence: Synthetic oligonucleotide
  Antisense strand to SEQ ID NO: 1298202
aaaugucucacuaagcagc

SEQ ID NO: 1298204 - RNA, 19 nt, Artificial Sequence
  Description of Artificial Sequence: Synthetic oligonucleotide
  Sense strand starting at position 2056 of SEQ ID NO: 1241768
ccauguuccgaauacauca

SEQ ID NO: 1298205 - RNA, 19 nt, Artificial Sequence
  Description of Artificial Sequence: Synthetic oligonucleotide
  Antisense strand to SEQ ID NO: 1298204
ugauguauucggaacaugg

SEQ ID NO: 1298206 - RNA, 19 nt, Artificial Sequence
  Description of Artificial Sequence: Synthetic oligonucleotide
  Sense strand starting at position 2088 of SEQ ID NO: 1241768
auccaucguuggccacaaa

SEQ ID NO: 1298207 - RNA, 19 nt, Artificial Sequence
  Description of Artificial Sequence: Synthetic oligonucleotide
  Antisense strand to SEQ ID NO: 1298206
uuuguggccaacgauggau

SEQ ID NO: 1298208 - RNA, 19 nt, Artificial Sequence
  Description of Artificial Sequence: Synthetic oligonucleotide
  Sense strand starting at position 2480 of SEQ ID NO: 1241768
uggugaaacuccuaaagau

SEQ ID NO: 1298209 - RNA, 19 nt, Artificial Sequence
  Description of Artificial Sequence: Synthetic oligonucleotide
  Antisense strand to SEQ ID NO: 1298208
aucuuuaggaguuucacca

SEQ ID NO: 1298210 - RNA, 19 nt, Artificial Sequence
  Description of Artificial Sequence: Synthetic oligonucleotide
  Sense strand starting at position 2509 of SEQ ID NO: 1241768
auugauauaugaguaccua

SEQ ID NO: 1298211 - RNA, 19 nt, Artificial Sequence
  Description of Artificial Sequence: Synthetic oligonucleotide
  Antisense strand to SEQ ID NO: 1298210
uagguacucauauaucaau

SEQ ID NO: 1298212 - RNA, 19 nt, Artificial Sequence
  Description of Artificial Sequence: Synthetic oligonucleotide
  Sense strand starting at position 2543 of SEQ ID NO: 1241768
ugugcugaauacuuggaua

SEQ ID NO: 1298213 - RNA, 19 nt, Artificial Sequence
  Description of Artificial Sequence: Synthetic oligonucleotide
  Antisense strand to SEQ ID NO: 1298212
uauccaaguauucagcaca

SEQ ID NO: 1298214 - RNA, 19 nt, Artificial Sequence
  Description of Artificial Sequence: Synthetic oligonucleotide
  Sense strand starting at position 2545 of SEQ ID NO: 1241768
ugcugaauacuuggauaaa

SEQ ID NO: 1298215 - RNA, 19 nt, Artificial Sequence
  Description of Artificial Sequence: Synthetic oligonucleotide
  Antisense strand to SEQ ID NO: 1298214
uuuauccaaguauucagca

SEQ ID NO: 1298216 - RNA, 19 nt, Artificial Sequence
  Description of Artificial Sequence: Synthetic oligonucleotide
  Sense strand starting at position 2743 of SEQ ID NO: 1241768
cuuauaaugcagcaugaga

SEQ ID NO: 1298217 - RNA, 19 nt, Artificial Sequence
  Description of Artificial Sequence: Synthetic oligonucleotide
  Antisense strand to SEQ ID NO: 1298216
ucucaugcugcauuauaag

SEQ ID NO: 1298218 - RNA, 19 nt, Artificial Sequence
  Description of Artificial Sequence: Synthetic oligonucleotide
  Sense strand starting at position 2754 of SEQ ID NO: 1241768
gcaugagaaauacgagugu

SEQ ID NO: 1298219 - RNA, 19 nt, Artificial Sequence
  Description of Artificial Sequence: Synthetic oligonucleotide
  Antisense strand to SEQ ID NO: 1298218
acacucguauuucucaugc

SEQ ID NO: 1298220 - RNA, 19 nt, Artificial Sequence
  Description of Artificial Sequence: Synthetic oligonucleotide
  Sense strand starting at position 2758 of SEQ ID NO: 1241768
gagaaauacgagugugaaa

SEQ ID NO: 1298221 - RNA, 19 nt, Artificial Sequence
  Description of Artificial Sequence: Synthetic oligonucleotide
  Antisense strand to SEQ ID NO: 1298220
uuucacacucguauuucuc

SEQ ID NO: 1298222 - RNA, 19 nt, Artificial Sequence
  Description of Artificial Sequence: Synthetic oligonucleotide
  Sense strand starting at position 2760 of SEQ ID NO: 1241768
gaaauacgagugugaaagu

SEQ ID NO: 1298223 - RNA, 19 nt, Artificial Sequence
  Description of Artificial Sequence: Synthetic oligonucleotide
  Antisense strand to SEQ ID NO: 1298222
acuuucacacucguauuuc

SEQ ID NO: 1298224 - RNA, 19 nt, Artificial Sequence
  Description of Artificial Sequence: Synthetic oligonucleotide
  Sense strand starting at position 2771 of SEQ ID NO: 1241768
gugaaaguauuaccauugu

SEQ ID NO: 1298225 - RNA, 19 nt, Artificial Sequence
  Description of Artificial Sequence: Synthetic oligonucleotide
  Antisense strand to SEQ ID NO: 1298224
acaaugguaauacuuucac

SEQ ID NO: 1298226 - RNA, 19 nt, Artificial Sequence
  Description of Artificial Sequence: Synthetic oligonucleotide
  Sense strand starting at position 2775 of SEQ ID NO: 1241768
aaguauuaccauuguaagg

SEQ ID NO: 1298227 - RNA, 19 nt, Artificial Sequence
  Description of Artificial Sequence: Synthetic oligonucleotide
  Antisense strand to SEQ ID NO: 1298226
ccuuacaaugguaauacuu

SEQ ID NO: 1298228 - RNA, 19 nt, Artificial Sequence
  Description of Artificial Sequence: Synthetic oligonucleotide
  Sense strand starting at position 2794 of SEQ ID NO: 1241768
uauugaacauguucuagga

SEQ ID NO: 1298229 - RNA, 19 nt, Artificial Sequence
  Description of Artificial Sequence: Synthetic oligonucleotide
  Antisense strand to SEQ ID NO: 1298228
uccuagaacauguucaaua

SEQ ID NO: 1298230 - RNA, 19 nt, Artificial Sequence
  Description of Artificial Sequence: Synthetic oligonucleotide
  Sense strand starting at position 2796 of SEQ ID NO: 1241768
uugaacauguucuaggaaa

SEQ ID NO: 1298231 - RNA, 19 nt, Artificial Sequence
  Description of Artificial Sequence: Synthetic oligonucleotide
  Antisense strand to SEQ ID NO: 1298230
uuuccuagaacauguucaa

SEQ ID NO: 1298232 - RNA, 19 nt, Artificial Sequence
  Description of Artificial Sequence: Synthetic oligonucleotide
  Sense strand starting at position 3010 of SEQ ID NO: 1241768
uggugucaauacuacauuu

SEQ ID NO: 1298233 - RNA, 19 nt, Artificial Sequence
  Description of Artificial Sequence: Synthetic oligonucleotide
  Antisense strand to SEQ ID NO: 1298232
aaauguaguauugacacca

SEQ ID NO: 1298234 - RNA, 19 nt, Artificial Sequence
  Description of Artificial Sequence: Synthetic oligonucleotide
  Sense strand starting at position 3058 of SEQ ID NO: 1241768
cccauauaucuggaguuua

SEQ ID NO: 1298235 - RNA, 19 nt, Artificial Sequence
  Description of Artificial Sequence: Synthetic oligonucleotide
  Antisense strand to SEQ ID NO: 1298234
uaaacuccagauauauggg

SEQ ID NO: 1298236 - RNA, 19 nt, Artificial Sequence
  Description of Artificial Sequence: Synthetic oligonucleotide
  Sense strand starting at position 3190 of SEQ ID NO: 1241768
cugugaguuguacacuaau

SEQ ID NO: 1298237 - RNA, 19 nt, Artificial Sequence
  Description of Artificial Sequence: Synthetic oligonucleotide
  Antisense strand to SEQ ID NO: 1298236
auuaguguacaacucacag

SEQ ID NO: 1298238 - RNA, 19 nt, Artificial Sequence
  Description of Artificial Sequence: Synthetic oligonucleotide
  Sense strand starting at position 3193 of SEQ ID NO: 1241768
ugaguuguacacuaaucac

SEQ ID NO: 1298239 - RNA, 19 nt, Artificial Sequence
  Description of Artificial Sequence: Synthetic oligonucleotide
  Antisense strand to SEQ ID NO: 1298238
gugauuaguguacaacuca

SEQ ID NO: 1298240 - RNA, 19 nt, Artificial Sequence
  Description of Artificial Sequence: Synthetic oligonucleotide
  Sense strand starting at position 3225 of SEQ ID NO: 1241768
acucauaugucaucccaga

SEQ ID NO: 1298241 - RNA, 19 nt, Artificial Sequence
  Description of Artificial Sequence: Synthetic oligonucleotide
  Antisense strand to SEQ ID NO: 1298240
ucugggaugacauaugagu

SEQ ID NO: 1298242 - RNA, 19 nt, Artificial Sequence
  Description of Artificial Sequence: Synthetic oligonucleotide
  Sense strand starting at position 3313 of SEQ ID NO: 1241768
uugauaauauucucauggu

SEQ ID NO: 1298243 - RNA, 19 nt, Artificial Sequence
  Description of Artificial Sequence: Synthetic oligonucleotide
  Antisense strand to SEQ ID NO: 1298242
accaugagaauauuaucaa

SEQ ID NO: 1298244 - RNA, 19 nt, Artificial Sequence
  Description of Artificial Sequence: Synthetic oligonucleotide
  Sense strand starting at position 3333 of SEQ ID NO: 1241768
uucugagcccacugcuaau

SEQ ID NO: 1298245 - RNA, 19 nt, Artificial Sequence
  Description of Artificial Sequence: Synthetic oligonucleotide
  Antisense strand to SEQ ID NO: 1298244
auuagcagugggcucagaa

SEQ ID NO: 1298246 - RNA, 19 nt, Artificial Sequence
  Description of Artificial Sequence: Synthetic oligonucleotide
  Sense strand starting at position 3595 of SEQ ID NO: 1241768
cuguauuuguggcaaacuc

SEQ ID NO: 1298247 - RNA, 19 nt, Artificial Sequence
  Description of Artificial Sequence: Synthetic oligonucleotide
  Antisense strand to SEQ ID NO: 1298246
gaguuugccacaaauacag

SEQ ID NO: 1298248 - RNA, 19 nt, Artificial Sequence
  Description of Artificial Sequence: Synthetic oligonucleotide
  Sense strand starting at position 3624 of SEQ ID NO: 1241768
uugagaacuuggcauagga

SEQ ID NO: 1298249 - RNA, 19 nt, Artificial Sequence
  Description of Artificial Sequence: Synthetic oligonucleotide
  Antisense strand to SEQ ID NO: 1298248
uccuaugccaaguucucaa

SEQ ID NO: 1298250 - RNA, 19 nt, Artificial Sequence
  Description of Artificial Sequence: Synthetic oligonucleotide
  Sense strand starting at position 75 of SEQ ID NO: 1241769
guggccuaucauuaauugu

SEQ ID NO: 1298251 - RNA, 19 nt, Artificial Sequence
  Description of Artificial Sequence: Synthetic oligonucleotide
  Antisense strand to SEQ ID NO: 1298250
acaauuaaugauaggccac

SEQ ID NO: 1298252 - RNA, 19 nt, Artificial Sequence
  Description of Artificial Sequence: Synthetic oligonucleotide
  Sense strand starting at position 83 of SEQ ID NO: 1241769
ucauuaauugucuauuguc

SEQ ID NO: 1298253 - RNA, 19 nt, Artificial Sequence
  Description of Artificial Sequence: Synthetic oligonucleotide
  Antisense strand to SEQ ID NO: 1298252
gacaauagacaauuaauga

SEQ ID NO: 1298254 - RNA, 19 nt, Artificial Sequence
  Description of Artificial Sequence: Synthetic oligonucleotide
  Sense strand starting at position 191 of SEQ ID NO: 1241769
gggacaugauaggcucuaa

SEQ ID NO: 1298255 - RNA, 19 nt, Artificial Sequence
  Description of Artificial Sequence: Synthetic oligonucleotide
  Antisense strand to SEQ ID NO: 1298254
uuagagccuaucauguccc

SEQ ID NO: 1298256 - RNA, 19 nt, Artificial Sequence
  Description of Artificial Sequence: Synthetic oligonucleotide
  Sense strand starting at position 725 of SEQ ID NO: 1241769
ucaacauggcugcaaauua

SEQ ID NO: 1298257 - RNA, 19 nt, Artificial Sequence
  Description of Artificial Sequence: Synthetic oligonucleotide
  Antisense strand to SEQ ID NO: 1298256
uaauuugcagccauguuga

SEQ ID NO: 1298258 - RNA, 19 nt, Artificial Sequence
  Description of Artificial Sequence: Synthetic oligonucleotide
  Sense strand starting at position 795 of SEQ ID NO: 1241769
ucaagaaguuguuugguuu

SEQ ID NO: 1298259 - RNA, 19 nt, Artificial Sequence
  Description of Artificial Sequence: Synthetic oligonucleotide
  Antisense strand to SEQ ID NO: 1298258
aaaccaaacaacuucuuga

SEQ ID NO: 1298260 - RNA, 19 nt, Artificial Sequence
  Description of Artificial Sequence: Synthetic oligonucleotide
  Sense strand starting at position 1068 of SEQ ID NO: 1241769
gccagucacaguuagggaa

SEQ ID NO: 1298261 - RNA, 19 nt, Artificial Sequence
  Description of Artificial Sequence: Synthetic oligonucleotide
  Antisense strand to SEQ ID NO: 1298260
uucccuaacugugacuggc

SEQ ID NO: 1298262 - RNA, 19 nt, Artificial Sequence
  Description of Artificial Sequence: Synthetic oligonucleotide
  Sense strand starting at position 1175 of SEQ ID NO: 1241769
uuaaauuugugcguuaaac

SEQ ID NO: 1298263 - RNA, 19 nt, Artificial Sequence
  Description of Artificial Sequence: Synthetic oligonucleotide
  Antisense strand to SEQ ID NO: 1298262
guuuaacgcacaaauuuaa

SEQ ID NO: 1298264 - RNA, 19 nt, Artificial Sequence
  Description of Artificial Sequence: Synthetic oligonucleotide
  Sense strand starting at position 1187 of SEQ ID NO: 1241769
guuaaacaccuuuaggcaa

SEQ ID NO: 1298265 - RNA, 19 nt, Artificial Sequence
  Description of Artificial Sequence: Synthetic oligonucleotide
  Antisense strand to SEQ ID NO: 1298264
uugccuaaagguguuuaac

SEQ ID NO: 1298266 - RNA, 19 nt, Artificial Sequence
  Description of Artificial Sequence: Synthetic oligonucleotide
  Sense strand starting at position 1237 of SEQ ID NO: 1241769
guuacaggcugccuuagaa

SEQ ID NO: 1298267 - RNA, 19 nt, Artificial Sequence
  Description of Artificial Sequence: Synthetic oligonucleotide
  Antisense strand to SEQ ID NO: 1298266
uucuaaggcagccuguaac

SEQ ID NO: 1298268 - RNA, 19 nt, Artificial Sequence
  Description of Artificial Sequence: Synthetic oligonucleotide
  Sense strand starting at position 1261 of SEQ ID NO: 1241769
aacugaguuccugaggugu

SEQ ID NO: 1298269 - RNA, 19 nt, Artificial Sequence
  Description of Artificial Sequence: Synthetic oligonucleotide
  Antisense strand to SEQ ID NO: 1298268
acaccucaggaacucaguu

SEQ ID NO: 1298270 - RNA, 19 nt, Artificial Sequence
  Description of Artificial Sequence: Synthetic oligonucleotide
  Sense strand starting at position 1588 of SEQ ID NO: 1241769
auaugcuauucgcuaugga

SEQ ID NO: 1298271 - RNA, 19 nt, Artificial Sequence
  Description of Artificial Sequence: Synthetic oligonucleotide
  Antisense strand to SEQ ID NO: 1298270
uccauagcgaauagcauau

SEQ ID NO: 1298272 - RNA, 19 nt, Artificial Sequence
  Description of Artificial Sequence: Synthetic oligonucleotide
  Sense strand starting at position 1589 of SEQ ID NO: 1241769
uaugcuauucgcuauggau

SEQ ID NO: 1298273 - RNA, 19 nt, Artificial Sequence
  Description of Artificial Sequence: Synthetic oligonucleotide
  Antisense strand to SEQ ID NO: 1298272
auccauagcgaauagcaua

SEQ ID NO: 1298274 - RNA, 19 nt, Artificial Sequence
  Description of Artificial Sequence: Synthetic oligonucleotide
  Sense strand starting at position 1593 of SEQ ID NO: 1241769
cuauucgcuauggaugaau

SEQ ID NO: 1298275 - RNA, 19 nt, Artificial Sequence
  Description of Artificial Sequence: Synthetic oligonucleotide
  Antisense strand to SEQ ID NO: 1298274
auucauccauagcgaauag

SEQ ID NO: 1298276 - RNA, 19 nt, Artificial Sequence
  Description of Artificial Sequence: Synthetic oligonucleotide
  Sense strand starting at position 1750 of SEQ ID NO: 1241769
acccucgaggguuguuaua

SEQ ID NO: 1298277 - RNA, 19 nt, Artificial Sequence
  Description of Artificial Sequence: Synthetic oligonucleotide
  Antisense strand to SEQ ID NO: 1298276
uauaacaacccucgagggu

SEQ ID NO: 1298278 - RNA, 19 nt, Artificial Sequence
  Description of Artificial Sequence: Synthetic oligonucleotide
  Sense strand starting at position 1761 of SEQ ID NO: 1241769
uuguuauaguaaccacaca

SEQ ID NO: 1298279 - RNA, 19 nt, Artificial Sequence
  Description of Artificial Sequence: Synthetic oligonucleotide
  Antisense strand to SEQ ID NO: 1298278
ugugugguuacuauaacaa

SEQ ID NO: 1298280 - RNA, 19 nt, Artificial Sequence
  Description of Artificial Sequence: Synthetic oligonucleotide
  Sense strand starting at position 1795 of SEQ ID NO: 1241769
gcgugugugccgaggaauu

SEQ ID NO: 1298281 - RNA, 19 nt, Artificial Sequence
  Description of Artificial Sequence: Synthetic oligonucleotide
  Antisense strand to SEQ ID NO: 1298280
aauuccucggcacacacgc

SEQ ID NO: 1298282 - RNA, 19 nt, Artificial Sequence
  Description of Artificial Sequence: Synthetic oligonucleotide
  Sense strand starting at position 1797 of SEQ ID NO: 1241769
gugugugccgaggaauuca

SEQ ID NO: 1298283 - RNA, 19 nt, Artificial Sequence
  Description of Artificial Sequence: Synthetic oligonucleotide
  Antisense strand to SEQ ID NO: 1298282
ugaauuccucggcacacac

SEQ ID NO: 1298284 - RNA, 19 nt, Artificial Sequence
  Description of Artificial Sequence: Synthetic oligonucleotide
  Sense strand starting at position 1805 of SEQ ID NO: 1241769
cgaggaauucacgggcagu

SEQ ID NO: 1298285 - RNA, 19 nt, Artificial Sequence
  Description of Artificial Sequence: Synthetic oligonucleotide
  Antisense strand to SEQ ID NO: 1298284
acugcccgugaauuccucg

SEQ ID NO: 1298286 - RNA, 19 nt, Artificial Sequence
  Description of Artificial Sequence: Synthetic oligonucleotide
  Sense strand starting at position 2094 of SEQ ID NO: 1241769
gcucuacaaucacuuguga

SEQ ID NO: 1298287 - RNA, 19 nt, Artificial Sequence
  Description of Artificial Sequence: Synthetic oligonucleotide
  Antisense strand to SEQ ID NO: 1298286
ucacaagugauuguagagc

SEQ ID NO: 1298288 - RNA, 19 nt, Artificial Sequence
  Description of Artificial Sequence: Synthetic oligonucleotide
  Sense strand starting at position 2249 of SEQ ID NO: 1241769
acaccuguguuguuugaaa

SEQ ID NO: 1298289 - RNA, 19 nt, Artificial Sequence
  Description of Artificial Sequence: Synthetic oligonucleotide
  Antisense strand to SEQ ID NO: 1298288
uuucaaacaacacaggugu

SEQ ID NO: 1298290 - RNA, 19 nt, Artificial Sequence
  Description of Artificial Sequence: Synthetic oligonucleotide
  Sense strand starting at position 2251 of SEQ ID NO: 1241769
accuguguuguuugaaauu

SEQ ID NO: 1298291 - RNA, 19 nt, Artificial Sequence
  Description of Artificial Sequence: Synthetic oligonucleotide
  Antisense strand to SEQ ID NO: 1298290
aauuucaaacaacacaggu

SEQ ID NO: 1298292 - RNA, 19 nt, Artificial Sequence
  Description of Artificial Sequence: Synthetic oligonucleotide
  Sense strand starting at position 2270 of SEQ ID NO: 1241769
ucgaaagccauguaguaca

SEQ ID NO: 1298293 - RNA, 19 nt, Artificial Sequence
  Description of Artificial Sequence: Synthetic oligonucleotide
  Antisense strand to SEQ ID NO: 1298292
uguacuacauggcuuucga

SEQ ID NO: 1298294 - RNA, 19 nt, Artificial Sequence
  Description of Artificial Sequence: Synthetic oligonucleotide
  Sense strand starting at position 2454 of SEQ ID NO: 1241769
aaggauauauaagaaagga

SEQ ID NO: 1298295 - RNA, 19 nt, Artificial Sequence
  Description of Artificial Sequence: Synthetic oligonucleotide
  Antisense strand to SEQ ID NO: 1298294
uccuuucuuauauauccuu

SEQ ID NO: 1298296 - RNA, 19 nt, Artificial Sequence
  Description of Artificial Sequence: Synthetic oligonucleotide
  Sense strand starting at position 2470 of SEQ ID NO: 1241769
ggaugacugucucugcaga

SEQ ID NO: 1298297 - RNA, 19 nt, Artificial Sequence
  Description of Artificial Sequence: Synthetic oligonucleotide
  Antisense strand to SEQ ID NO: 1298296
ucugcagagacagucaucc

SEQ ID NO: 1298298 - RNA, 19 nt, Artificial Sequence
  Description of Artificial Sequence: Synthetic oligonucleotide
  Sense strand starting at position 2557 of SEQ ID NO: 1241769
ucuugccaucuauauguau

SEQ ID NO: 1298299 - RNA, 19 nt, Artificial Sequence
  Description of Artificial Sequence: Synthetic oligonucleotide
  Antisense strand to SEQ ID NO: 1298298
auacauauagauggcaaga

SEQ ID NO: 1298300 - RNA, 19 nt, Artificial Sequence
  Description of Artificial Sequence: Synthetic oligonucleotide
  Sense strand starting at position 2620 of SEQ ID NO: 1241769
ucuacauagucucuggaaa

SEQ ID NO: 1298301 - RNA, 19 nt, Artificial Sequence
  Description of Artificial Sequence: Synthetic oligonucleotide
  Antisense strand to SEQ ID NO: 1298300
uuuccagagacuauguaga

SEQ ID NO: 1298302 - RNA, 19 nt, Artificial Sequence
  Description of Artificial Sequence: Synthetic oligonucleotide
  Sense strand starting at position 2621 of SEQ ID NO: 1241769
cuacauagucucuggaaag

SEQ ID NO: 1298303 - RNA, 19 nt, Artificial Sequence
  Description of Artificial Sequence: Synthetic oligonucleotide
  Antisense strand to SEQ ID NO: 1298302
cuuuccagagacuauguag

SEQ ID NO: 1298304 - RNA, 19 nt, Artificial Sequence
  Description of Artificial Sequence: Synthetic oligonucleotide
  Sense strand starting at position 2655 of SEQ ID NO: 1241769
gcaagacuaucgcuuacaa

SEQ ID NO: 1298305 - RNA, 19 nt, Artificial Sequence
  Description of Artificial Sequence: Synthetic oligonucleotide
  Antisense strand to SEQ ID NO: 1298304
uuguaagcgauagucuugc

SEQ ID NO: 1298306 - RNA, 19 nt, Artificial Sequence
  Description of Artificial Sequence: Synthetic oligonucleotide
  Sense strand starting at position 2757 of SEQ ID NO: 1241769
uaaaguuuguaccuuguga

SEQ ID NO: 1298307 - RNA, 19 nt, Artificial Sequence
  Description of Artificial Sequence: Synthetic oligonucleotide
  Antisense strand to SEQ ID NO: 1298306
ucacaagguacaaacuuua

SEQ ID NO: 1298308 - RNA, 19 nt, Artificial Sequence
  Description of Artificial Sequence: Synthetic oligonucleotide
  Sense strand starting at position 2759 of SEQ ID NO: 1241769
aaguuuguaccuugugaau

SEQ ID NO: 1298309 - RNA, 19 nt, Artificial Sequence
  Description of Artificial Sequence: Synthetic oligonucleotide
  Antisense strand to SEQ ID NO: 1298308
auucacaagguacaaacuu

SEQ ID NO: 1298310 - RNA, 19 nt, Artificial Sequence
  Description of Artificial Sequence: Synthetic oligonucleotide
  Sense strand starting at position 2765 of SEQ ID NO: 1241769
guaccuugugaauauauua

SEQ ID NO: 1298311 - RNA, 19 nt, Artificial Sequence
  Description of Artificial Sequence: Synthetic oligonucleotide
  Antisense strand to SEQ ID NO: 1298310
uaauauauucacaagguac

SEQ ID NO: 1298312 - RNA, 19 nt, Artificial Sequence
  Description of Artificial Sequence: Synthetic oligonucleotide
  Sense strand starting at position 2864 of SEQ ID NO: 1241769
caagcugauucugugaaac

SEQ ID NO: 1298313 - RNA, 19 nt, Artificial Sequence
  Description of Artificial Sequence: Synthetic oligonucleotide
  Antisense strand to SEQ ID NO: 1298312
guuucacagaaucagcuug

SEQ ID NO: 1298314 - RNA, 19 nt, Artificial Sequence
  Description of Artificial Sequence: Synthetic oligonucleotide
  Sense strand starting at position 2874 of SEQ ID NO: 1241769
cugugaaacuaacaaagaa

SEQ ID NO: 1298315 - RNA, 19 nt, Artificial Sequence
  Description of Artificial Sequence: Synthetic oligonucleotide
  Antisense strand to SEQ ID NO: 1298314
uucuuuguuaguuucacag

SEQ ID NO: 1298316 - RNA, 19 nt, Artificial Sequence
  Description of Artificial Sequence: Synthetic oligonucleotide
  Sense strand starting at position 2960 of SEQ ID NO: 1241769
aaggaaauaguuuguauug

SEQ ID NO: 1298317 - RNA, 19 nt, Artificial Sequence
  Description of Artificial Sequence: Synthetic oligonucleotide
  Antisense strand to SEQ ID NO: 1298316
caauacaaacuauuuccuu

SEQ ID NO: 1298318 - RNA, 19 nt, Artificial Sequence
  Description of Artificial Sequence: Synthetic oligonucleotide
  Sense strand starting at position 2961 of SEQ ID NO: 1241769
aggaaauaguuuguauugu

SEQ ID NO: 1298319 - RNA, 19 nt, Artificial Sequence
  Description of Artificial Sequence: Synthetic oligonucleotide
  Antisense strand to SEQ ID NO: 1298318
acaauacaaacuauuuccu

SEQ ID NO: 1298320 - RNA, 19 nt, Artificial Sequence
  Description of Artificial Sequence: Synthetic oligonucleotide
  Sense strand starting at position 3681 of SEQ ID NO: 1241769
uuuggugcacauuaagaau

SEQ ID NO: 1298321 - RNA, 19 nt, Artificial Sequence
  Description of Artificial Sequence: Synthetic oligonucleotide
  Antisense strand to SEQ ID NO: 1298320
auucuuaaugugcaccaaa

SEQ ID NO: 1298322 - RNA, 19 nt, Artificial Sequence
  Description of Artificial Sequence: Synthetic oligonucleotide
  Sense strand starting at position 3857 of SEQ ID NO: 1241769
uuugacauuuaggguaauu

SEQ ID NO: 1298323 - RNA, 19 nt, Artificial Sequence
  Description of Artificial Sequence: Synthetic oligonucleotide
  Antisense strand to SEQ ID NO: 1298322
aauuacccuaaaugucaaa

SEQ ID NO: 1298324 - RNA, 19 nt, Artificial Sequence
  Description of Artificial Sequence: Synthetic oligonucleotide
  Sense strand starting at position 3868 of SEQ ID NO: 1241769
ggguaauuccauuguuaac

SEQ ID NO: 1298325 - RNA, 19 nt, Artificial Sequence
  Description of Artificial Sequence: Synthetic oligonucleotide
  Antisense strand to SEQ ID NO: 1298324
guuaacaauggaauuaccc

SEQ ID NO: 1298326 - RNA, 19 nt, Artificial Sequence
  Description of Artificial Sequence: Synthetic oligonucleotide
  Sense strand starting at position 3870 of SEQ ID NO: 1241769
guaauuccauuguuaacac

SEQ ID NO: 1298327 - RNA, 19 nt, Artificial Sequence
  Description of Artificial Sequence: Synthetic oligonucleotide
  Antisense strand to SEQ ID NO: 1298326
guguuaacaauggaauuac

SEQ ID NO: 1298328 - RNA, 19 nt, Artificial Sequence
  Description of Artificial Sequence: Synthetic oligonucleotide
  Sense strand starting at position 3937 of SEQ ID NO: 1241769
cuguaaggauaacuuaauu

SEQ ID NO: 1298329 - RNA, 19 nt, Artificial Sequence
  Description of Artificial Sequence: Synthetic oligonucleotide
  Antisense strand to SEQ ID NO: 1298328
aauuaaguuauccuuacag

SEQ ID NO: 1298330 - RNA, 19 nt, Artificial Sequence
  Description of Artificial Sequence: Synthetic oligonucleotide
  Sense strand starting at position 50 of SEQ ID NO: 1241770
gggcuuggucagugcuguu

SEQ ID NO: 1298331 - RNA, 19 nt, Artificial Sequence
  Description of Artificial Sequence: Synthetic oligonucleotide
  Antisense strand to SEQ ID NO: 1298330
aacagcacugaccaagccc

SEQ ID NO: 1298332 - RNA, 19 nt, Artificial Sequence
  Description of Artificial Sequence: Synthetic oligonucleotide
  Sense strand starting at position 101 of SEQ ID NO: 1241770
cgcaaauauugggugaaug

SEQ ID NO: 1298333 - RNA, 19 nt, Artificial Sequence
  Description of Artificial Sequence: Synthetic oligonucleotide
  Antisense strand to SEQ ID NO: 1298332
cauucacccaauauuugcg

SEQ ID NO: 1298334 - RNA, 19 nt, Artificial Sequence
  Description of Artificial Sequence: Synthetic oligonucleotide
  Sense strand starting at position 166 of SEQ ID NO: 1241770
ccaggaggcucacaaauaa

SEQ ID NO: 1298335 - RNA, 19 nt, Artificial Sequence
  Description of Artificial Sequence: Synthetic oligonucleotide
  Antisense strand to SEQ ID NO: 1298334
uuauuugugagccuccugg

SEQ ID NO: 1298336 - RNA, 19 nt, Artificial Sequence
  Description of Artificial Sequence: Synthetic oligonucleotide
  Sense strand starting at position 208 of SEQ ID NO: 1241770
cugcacagaaggugucauu

SEQ ID NO: 1298337 - RNA, 19 nt, Artificial Sequence
  Description of Artificial Sequence: Synthetic oligonucleotide
  Antisense strand to SEQ ID NO: 1298336
aaugacaccuucugugcag

SEQ ID NO: 1298338 - RNA, 19 nt, Artificial Sequence
  Description of Artificial Sequence: Synthetic oligonucleotide
  Sense strand starting at position 211 of SEQ ID NO: 1241770
cacagaaggugucauuaug

SEQ ID NO: 1298339 - RNA, 19 nt, Artificial Sequence
  Description of Artificial Sequence: Synthetic oligonucleotide
  Antisense strand to SEQ ID NO: 1298338
cauaaugacaccuucugug

SEQ ID NO: 1298340 - RNA, 19 nt, Artificial Sequence
  Description of Artificial Sequence: Synthetic oligonucleotide
  Sense strand starting at position 217 of SEQ ID NO: 1241770
aggugucauuaugccuaca

SEQ ID NO: 1298341 - RNA, 19 nt, Artificial Sequence
  Description of Artificial Sequence: Synthetic oligonucleotide
  Antisense strand to SEQ ID NO: 1298340
uguaggcauaaugacaccu

SEQ ID NO: 1298342 - RNA, 19 nt, Artificial Sequence
  Description of Artificial Sequence: Synthetic oligonucleotide
  Sense strand starting at position 268 of SEQ ID NO: 1241770
gugcaacuccgagaggaaa

SEQ ID NO: 1298343 - RNA, 19 nt, Artificial Sequence
  Description of Artificial Sequence: Synthetic oligonucleotide
  Antisense strand to SEQ ID NO: 1298342
uuuccucucggaguugcac

SEQ ID NO: 1298344 - RNA, 19 nt, Artificial Sequence
  Description of Artificial Sequence: Synthetic oligonucleotide
  Sense strand starting at position 392 of SEQ ID NO: 1241770
ugacauaacugagaagggu

SEQ ID NO: 1298345 - RNA, 19 nt, Artificial Sequence
  Description of Artificial Sequence: Synthetic oligonucleotide
  Antisense strand to SEQ ID NO: 1298344
acccuucucaguuauguca

SEQ ID NO: 1298346 - RNA, 19 nt, Artificial Sequence
  Description of Artificial Sequence: Synthetic oligonucleotide
  Sense strand starting at position 482 of SEQ ID NO: 1241770
ugcguucacccagaaggua

SEQ ID NO: 1298347 - RNA, 19 nt, Artificial Sequence
  Description of Artificial Sequence: Synthetic oligonucleotide
  Antisense strand to SEQ ID NO: 1298346
uaccuucugggugaacgca

SEQ ID NO: 1298348 - RNA, 19 nt, Artificial Sequence
  Description of Artificial Sequence: Synthetic oligonucleotide
  Sense strand starting at position 514 of SEQ ID NO: 1241770
ugcauccaucauugagagu

SEQ ID NO: 1298349 - RNA, 19 nt, Artificial Sequence
  Description of Artificial Sequence: Synthetic oligonucleotide
  Antisense strand to SEQ ID NO: 1298348
acucucaaugauggaugca

SEQ ID NO: 1298350 - RNA, 19 nt, Artificial Sequence
  Description of Artificial Sequence: Synthetic oligonucleotide
  Sense strand starting at position 520 of SEQ ID NO: 1241770
caucauugagagugcgcaa

SEQ ID NO: 1298351 - RNA, 19 nt, Artificial Sequence
  Description of Artificial Sequence: Synthetic oligonucleotide
  Antisense strand to SEQ ID NO: 1298350
uugcgcacucucaaugaug

SEQ ID NO: 1298352 - RNA, 19 nt, Artificial Sequence
  Description of Artificial Sequence: Synthetic oligonucleotide
  Sense strand starting at position 626 of SEQ ID NO: 1241770
uggguagucugaagugaga

SEQ ID NO: 1298353 - RNA, 19 nt, Artificial Sequence
  Description of Artificial Sequence: Synthetic oligonucleotide
  Antisense strand to SEQ ID NO: 1298352
ucucacuucagacuaccca

SEQ ID NO: 1298354 - RNA, 19 nt, Artificial Sequence
  Description of Artificial Sequence: Synthetic oligonucleotide
  Sense strand starting at position 628 of SEQ ID NO: 1241770
gguagucugaagugagaag

SEQ ID NO: 1298355 - RNA, 19 nt, Artificial Sequence
  Description of Artificial Sequence: Synthetic oligonucleotide
  Antisense strand to SEQ ID NO: 1298354
cuucucacuucagacuacc

SEQ ID NO: 1298356 - RNA, 19 nt, Artificial Sequence
  Description of Artificial Sequence: Synthetic oligonucleotide
  Sense strand starting at position 662 of SEQ ID NO: 1241770
gauguccuuucuuagagca

SEQ ID NO: 1298357 - RNA, 19 nt, Artificial Sequence
  Description of Artificial Sequence: Synthetic oligonucleotide
  Antisense strand to SEQ ID NO: 1298356
ugcucuaagaaaggacauc

SEQ ID NO: 1298358 - RNA, 19 nt, Artificial Sequence
  Description of Artificial Sequence: Synthetic oligonucleotide
  Sense strand starting at position 807 of SEQ ID NO: 1241770
gcgcuuuaggcggguacua

SEQ ID NO: 1298359 - RNA, 19 nt, Artificial Sequence
  Description of Artificial Sequence: Synthetic oligonucleotide
  Antisense strand to SEQ ID NO: 1298358
uaguacccgccuaaagcgc

SEQ ID NO: 1298360 - RNA, 19 nt, Artificial Sequence
  Description of Artificial Sequence: Synthetic oligonucleotide
  Sense strand starting at position 809 of SEQ ID NO: 1241770
gcuuuaggcggguacuaaa

SEQ ID NO: 1298361 - RNA, 19 nt, Artificial Sequence
  Description of Artificial Sequence: Synthetic oligonucleotide
  Antisense strand to SEQ ID NO: 1298360
uuuaguacccgccuaaagc

SEQ ID NO: 1298362 - RNA, 19 nt, Artificial Sequence
  Description of Artificial Sequence: Synthetic oligonucleotide
  Sense strand starting at position 895 of SEQ ID NO: 1241770
ugggauucuggaugcaauu

SEQ ID NO: 1298363 - RNA, 19 nt, Artificial Sequence
  Description of Artificial Sequence: Synthetic oligonucleotide
  Antisense strand to SEQ ID NO: 1298362
aauugcauccagaauccca

SEQ ID NO: 1298364 - RNA, 19 nt, Artificial Sequence
  Description of Artificial Sequence: Synthetic oligonucleotide
  Sense strand starting at position 913 of SEQ ID NO: 1241770
uuuauuugauuggguacaa

SEQ ID NO: 1298365 - RNA, 19 nt, Artificial Sequence
  Description of Artificial Sequence: Synthetic oligonucleotide
  Antisense strand to SEQ ID NO: 1298364
uuguacccaaucaaauaaa

SEQ ID NO: 1298366 - RNA, 19 nt, Artificial Sequence
  Description of Artificial Sequence: Synthetic oligonucleotide
  Sense strand starting at position 1333 of SEQ ID NO: 1241770
uccugauucccugagcaca

SEQ ID NO: 1298367 - RNA, 19 nt, Artificial Sequence
  Description of Artificial Sequence: Synthetic oligonucleotide
  Antisense strand to SEQ ID NO: 1298366
ugugcucagggaaucagga

SEQ ID NO: 1298368 - RNA, 19 nt, Artificial Sequence
  Description of Artificial Sequence: Synthetic oligonucleotide
  Sense strand starting at position 2794 of SEQ ID NO: 1241770
uguguucucucagugaauc

SEQ ID NO: 1298369 - RNA, 19 nt, Artificial Sequence
  Description of Artificial Sequence: Synthetic oligonucleotide
  Antisense strand to SEQ ID NO: 1298368
gauucacugagagaacaca

SEQ ID NO: 1298370 - RNA, 19 nt, Artificial Sequence
  Description of Artificial Sequence: Synthetic oligonucleotide
  Sense strand starting at position 2795 of SEQ ID NO: 1241770
guguucucucagugaauca

SEQ ID NO: 1298371 - RNA, 19 nt, Artificial Sequence
  Description of Artificial Sequence: Synthetic oligonucleotide
  Antisense strand to SEQ ID NO: 1298370
ugauucacugagagaacac

SEQ ID NO: 1298372 - RNA, 19 nt, Artificial Sequence
  Description of Artificial Sequence: Synthetic oligonucleotide
  Sense strand starting at position 2807 of SEQ ID NO: 1241770
ugaaucaacugucuaguga

SEQ ID NO: 1298373 - RNA, 19 nt, Artificial Sequence
  Description of Artificial Sequence: Synthetic oligonucleotide
  Antisense strand to SEQ ID NO: 1298372
ucacuagacaguugauuca

SEQ ID NO: 1298374 - RNA, 19 nt, Artificial Sequence
  Description of Artificial Sequence: Synthetic oligonucleotide
  Sense strand starting at position 2808 of SEQ ID NO: 1241770
gaaucaacugucuagugau

SEQ ID NO: 1298375 - RNA, 19 nt, Artificial Sequence
  Description of Artificial Sequence: Synthetic oligonucleotide
  Antisense strand to SEQ ID NO: 1298374
aucacuagacaguugauuc

SEQ ID NO: 1298376 - RNA, 19 nt, Artificial Sequence
  Description of Artificial Sequence: Synthetic oligonucleotide
  Sense strand starting at position 2814 of SEQ ID NO: 1241770
acugucuagugaucaccua

SEQ ID NO: 1298377 - RNA, 19 nt, Artificial Sequence
  Description of Artificial Sequence: Synthetic oligonucleotide
  Antisense strand to SEQ ID NO: 1298376
uaggugaucacuagacagu

SEQ ID NO: 1298378 - RNA, 19 nt, Artificial Sequence
  Description of Artificial Sequence: Synthetic oligonucleotide
  Sense strand starting at position 2862 of SEQ ID NO: 1241770
gagauagaauugugagcua

SEQ ID NO: 1298379 - RNA, 19 nt, Artificial Sequence
  Description of Artificial Sequence: Synthetic oligonucleotide
  Antisense strand to SEQ ID NO: 1298378
uagcucacaauucuaucuc

SEQ ID NO: 1298380 - RNA, 19 nt, Artificial Sequence
  Description of Artificial Sequence: Synthetic oligonucleotide
  Sense strand starting at position 2889 of SEQ ID NO: 1241770
aaauuccuggcuugagaga

SEQ ID NO: 1298381 - RNA, 19 nt, Artificial Sequence
  Description of Artificial Sequence: Synthetic oligonucleotide
  Antisense strand to SEQ ID NO: 1298380
ucucucaagccaggaauuu

SEQ ID NO: 1298382 - RNA, 19 nt, Artificial Sequence
  Description of Artificial Sequence: Synthetic oligonucleotide
  Sense strand starting at position 2991 of SEQ ID NO: 1241770
aggguucagugaggaacau

SEQ ID NO: 1298383 - RNA, 19 nt, Artificial Sequence
  Description of Artificial Sequence: Synthetic oligonucleotide
  Antisense strand to SEQ ID NO: 1298382
auguuccucacugaacccu

SEQ ID NO: 1298384 - RNA, 19 nt, Artificial Sequence
  Description of Artificial Sequence: Synthetic oligonucleotide
  Sense strand starting at position 3132 of SEQ ID NO: 1241770
gagcaaguguugccauuua

SEQ ID NO: 1298385 - RNA, 19 nt, Artificial Sequence
  Description of Artificial Sequence: Synthetic oligonucleotide
  Antisense strand to SEQ ID NO: 1298384
uaaauggcaacacuugcuc

SEQ ID NO: 1298386 - RNA, 19 nt, Artificial Sequence
  Description of Artificial Sequence: Synthetic oligonucleotide
  Sense strand starting at position 3235 of SEQ ID NO: 1241770
aggaguaucccaggcagag

SEQ ID NO: 1298387 - RNA, 19 nt, Artificial Sequence
  Description of Artificial Sequence: Synthetic oligonucleotide
  Antisense strand to SEQ ID NO: 1298386
cucugccugggauacuccu

SEQ ID NO: 1298388 - RNA, 19 nt, Artificial Sequence
  Description of Artificial Sequence: Synthetic oligonucleotide
  Sense strand starting at position 3361 of SEQ ID NO: 1241770
gaugaacucugagagguug

SEQ ID NO: 1298389 - RNA, 19 nt, Artificial Sequence
  Description of Artificial Sequence: Synthetic oligonucleotide
  Antisense strand to SEQ ID NO: 1298388
caaccucucagaguucauc

SEQ ID NO: 1298390 - RNA, 19 nt, Artificial Sequence
  Description of Artificial Sequence: Synthetic oligonucleotide
  Sense strand starting at position 3410 of SEQ ID NO: 1241770
auuauaagaccuuggcuuu

SEQ ID NO: 1298391 - RNA, 19 nt, Artificial Sequence
  Description of Artificial Sequence: Synthetic oligonucleotide
  Antisense strand to SEQ ID NO: 1298390
aaagccaaggucuuauaau

SEQ ID NO: 1298392 - RNA, 19 nt, Artificial Sequence
  Description of Artificial Sequence: Synthetic oligonucleotide
  Sense strand starting at position 3779 of SEQ ID NO: 1241770
ggaagaguggcaugaucag

SEQ ID NO: 1298393 - RNA, 19 nt, Artificial Sequence
  Description of Artificial Sequence: Synthetic oligonucleotide
  Antisense strand to SEQ ID NO: 1298392
cugaucaugccacucuucc

SEQ ID NO: 1298394 - RNA, 19 nt, Artificial Sequence
  Description of Artificial Sequence: Synthetic oligonucleotide
  Sense strand starting at position 3807 of SEQ ID NO: 1241770
uuggacuaucacugugacu

SEQ ID NO: 1298395 - RNA, 19 nt, Artificial Sequence
  Description of Artificial Sequence: Synthetic oligonucleotide
  Antisense strand to SEQ ID NO: 1298394
agucacagugauaguccaa

SEQ ID NO: 1298396 - RNA, 19 nt, Artificial Sequence
  Description of Artificial Sequence: Synthetic oligonucleotide
  Sense strand starting at position 3822 of SEQ ID NO: 1241770
gacugcaguguugagaaua

SEQ ID NO: 1298397 - RNA, 19 nt, Artificial Sequence
  Description of Artificial Sequence: Synthetic oligonucleotide
  Antisense strand to SEQ ID NO: 1298396
uauucucaacacugcaguc

SEQ ID NO: 1298398 - RNA, 19 nt, Artificial Sequence
  Description of Artificial Sequence: Synthetic oligonucleotide
  Sense strand starting at position 3833 of SEQ ID NO: 1241770
ugagaauacugccagggaa

SEQ ID NO: 1298399 - RNA, 19 nt, Artificial Sequence
  Description of Artificial Sequence: Synthetic oligonucleotide
  Antisense strand to SEQ ID NO: 1298398
uucccuggcaguauucuca

SEQ ID NO: 1298400 - RNA, 19 nt, Artificial Sequence
  Description of Artificial Sequence: Synthetic oligonucleotide
  Sense strand starting at position 3847 of SEQ ID NO: 1241770
gggaaauagcugugguggu

SEQ ID NO: 1298401 - RNA, 19 nt, Artificial Sequence
  Description of Artificial Sequence: Synthetic oligonucleotide
  Antisense strand to SEQ ID NO: 1298400
accaccacagcuauuuccc

SEQ ID NO: 1298402 - RNA, 19 nt, Artificial Sequence
  Description of Artificial Sequence: Synthetic oligonucleotide
  Sense strand starting at position 3876 of SEQ ID NO: 1241770
gauucuggguccugcauuu

SEQ ID NO: 1298403 - RNA, 19 nt, Artificial Sequence
  Description of Artificial Sequence: Synthetic oligonucleotide
  Antisense strand to SEQ ID NO: 1298402
aaaugcaggacccagaauc

SEQ ID NO: 1298404 - RNA, 19 nt, Artificial Sequence
  Description of Artificial Sequence: Synthetic oligonucleotide
  Sense strand starting at position 3882 of SEQ ID NO: 1241770
ggguccugcauuugagagu

SEQ ID NO: 1298405 - RNA, 19 nt, Artificial Sequence
  Description of Artificial Sequence: Synthetic oligonucleotide
  Antisense strand to SEQ ID NO: 1298404
acucucaaaugcaggaccc

SEQ ID NO: 1298406 - RNA, 19 nt, Artificial Sequence
  Description of Artificial Sequence: Synthetic oligonucleotide
  Sense strand starting at position 3885 of SEQ ID NO: 1241770
uccugcauuugagagugaa

SEQ ID NO: 1298407 - RNA, 19 nt, Artificial Sequence
  Description of Artificial Sequence: Synthetic oligonucleotide
  Antisense strand to SEQ ID NO: 1298406
uucacucucaaaugcagga

SEQ ID NO: 1298408 - RNA, 19 nt, Artificial Sequence
  Description of Artificial Sequence: Synthetic oligonucleotide
  Sense strand starting at position 3904 of SEQ ID NO: 1241770
gcggucagucuggaagguu

SEQ ID NO: 1298409 - RNA, 19 nt, Artificial Sequence
  Description of Artificial Sequence: Synthetic oligonucleotide
  Antisense strand to SEQ ID NO: 1298408
aaccuuccagacugaccgc

SEQ ID NO: 1298410 - RNA, 19 nt, Artificial Sequence
  Description of Artificial Sequence: Synthetic oligonucleotide
  Sense strand starting at position 262 of SEQ ID NO: 1241771
uuguauuaccacuaacgua

SEQ ID NO: 1298411 - RNA, 19 nt, Artificial Sequence
  Description of Artificial Sequence: Synthetic oligonucleotide
  Antisense strand to SEQ ID NO: 1298410
uacguuagugguaauacaa

SEQ ID NO: 1298412 - RNA, 19 nt, Artificial Sequence
  Description of Artificial Sequence: Synthetic oligonucleotide
  Sense strand starting at position 282 of SEQ ID NO: 1241771
gcuguucuaagagagaugu

SEQ ID NO: 1298413 - RNA, 19 nt, Artificial Sequence
  Description of Artificial Sequence: Synthetic oligonucleotide
  Antisense strand to SEQ ID NO: 1298412
acaucucucuuagaacagc

SEQ ID NO: 1298414 - RNA, 19 nt, Artificial Sequence
  Description of Artificial Sequence: Synthetic oligonucleotide
  Sense strand starting at position 479 of SEQ ID NO: 1241771
acuagaacuacguagguau

SEQ ID NO: 1298415 - RNA, 19 nt, Artificial Sequence
  Description of Artificial Sequence: Synthetic oligonucleotide
  Antisense strand to SEQ ID NO: 1298414
auaccuacguaguucuagu

SEQ ID NO: 1298416 - RNA, 19 nt, Artificial Sequence
  Description of Artificial Sequence: Synthetic oligonucleotide
  Sense strand starting at position 481 of SEQ ID NO: 1241771
uagaacuacguagguauau

SEQ ID NO: 1298417 - RNA, 19 nt, Artificial Sequence
  Description of Artificial Sequence: Synthetic oligonucleotide
  Antisense strand to SEQ ID NO: 1298416
auauaccuacguaguucua

SEQ ID NO: 1298418 - RNA, 19 nt, Artificial Sequence
  Description of Artificial Sequence: Synthetic oligonucleotide
  Sense strand starting at position 482 of SEQ ID NO: 1241771
agaacuacguagguauauu

SEQ ID NO: 1298419 - RNA, 19 nt, Artificial Sequence
  Description of Artificial Sequence: Synthetic oligonucleotide
  Antisense strand to SEQ ID NO: 1298418
aauauaccuacguaguucu

SEQ ID NO: 1298420 - RNA, 19 nt, Artificial Sequence
  Description of Artificial Sequence: Synthetic oligonucleotide
  Sense strand starting at position 742 of SEQ ID NO: 1241771
ucccuugccuagguaauuu

SEQ ID NO: 1298421 - RNA, 19 nt, Artificial Sequence
  Description of Artificial Sequence: Synthetic oligonucleotide
  Antisense strand to SEQ ID NO: 1298420
aaauuaccuaggcaaggga

SEQ ID NO: 1298422 - RNA, 19 nt, Artificial Sequence
  Description of Artificial Sequence: Synthetic oligonucleotide
  Sense strand starting at position 813 of SEQ ID NO: 1241771
gcauauuugccucaagcua

SEQ ID NO: 1298423 - RNA, 19 nt, Artificial Sequence
  Description of Artificial Sequence: Synthetic oligonucleotide
  Antisense strand to SEQ ID NO: 1298422
uagcuugaggcaaauaugc

SEQ ID NO: 1298424 - RNA, 19 nt, Artificial Sequence
  Description of Artificial Sequence: Synthetic oligonucleotide
  Sense strand starting at position 882 of SEQ ID NO: 1241771
ggaucacauguucgaucca

SEQ ID NO: 1298425 - RNA, 19 nt, Artificial Sequence
  Description of Artificial Sequence: Synthetic oligonucleotide
  Antisense strand to SEQ ID NO: 1298424
uggaucgaacaugugaucc

SEQ ID NO: 1298426 - RNA, 19 nt, Artificial Sequence
  Description of Artificial Sequence: Synthetic oligonucleotide
  Sense strand starting at position 1033 of SEQ ID NO: 1241771
aaaguuccucgucaaguaa

SEQ ID NO: 1298427 - RNA, 19 nt, Artificial Sequence
  Description of Artificial Sequence: Synthetic oligonucleotide
  Antisense strand to SEQ ID NO: 1298426
uuacuugacgaggaacuuu

SEQ ID NO: 1298428 - RNA, 19 nt, Artificial Sequence
  Description of Artificial Sequence: Synthetic oligonucleotide
  Sense strand starting at position 1063 of SEQ ID NO: 1241771
cucauucugggacacguau

SEQ ID NO: 1298429 - RNA, 19 nt, Artificial Sequence
  Description of Artificial Sequence: Synthetic oligonucleotide
  Antisense strand to SEQ ID NO: 1298428
auacgugucccagaaugag

SEQ ID NO: 1298430 - RNA, 19 nt, Artificial Sequence
  Description of Artificial Sequence: Synthetic oligonucleotide
  Sense strand starting at position 1633 of SEQ ID NO: 1241771
ugccuaaacuugguuggaa

SEQ ID NO: 1298431 - RNA, 19 nt, Artificial Sequence
  Description of Artificial Sequence: Synthetic oligonucleotide
  Antisense strand to SEQ ID NO: 1298430
uuccaaccaaguuuaggca

SEQ ID NO: 1298432 - RNA, 19 nt, Artificial Sequence
  Description of Artificial Sequence: Synthetic oligonucleotide
  Sense strand starting at position 1634 of SEQ ID NO: 1241771
gccuaaacuugguuggaaa

SEQ ID NO: 1298433 - RNA, 19 nt, Artificial Sequence
  Description of Artificial Sequence: Synthetic oligonucleotide
  Antisense strand to SEQ ID NO: 1298432
uuuccaaccaaguuuaggc

SEQ ID NO: 1298434 - RNA, 19 nt, Artificial Sequence
  Description of Artificial Sequence: Synthetic oligonucleotide
  Sense strand starting at position 1815 of SEQ ID NO: 1241771
ggaagagucccuggaguug

SEQ ID NO: 1298435 - RNA, 19 nt, Artificial Sequence
  Description of Artificial Sequence: Synthetic oligonucleotide
  Antisense strand to SEQ ID NO: 1298434
caacuccagggacucuucc

SEQ ID NO: 1298436 - RNA, 19 nt, Artificial Sequence
  Description of Artificial Sequence: Synthetic oligonucleotide
  Sense strand starting at position 2068 of SEQ ID NO: 1241771
gagauagacucagagaaga

SEQ ID NO: 1298437 - RNA, 19 nt, Artificial Sequence
  Description of Artificial Sequence: Synthetic oligonucleotide
  Antisense strand to SEQ ID NO: 1298436
ucuucucugagucuaucuc

SEQ ID NO: 1298438 - RNA, 19 nt, Artificial Sequence
  Description of Artificial Sequence: Synthetic oligonucleotide
  Sense strand starting at position 2164 of SEQ ID NO: 1241771
auucgacucacauggugau

SEQ ID NO: 1298439 - RNA, 19 nt, Artificial Sequence
  Description of Artificial Sequence: Synthetic oligonucleotide
  Antisense strand to SEQ ID NO: 1298438
aucaccaugugagucgaau

SEQ ID NO: 1298440 - RNA, 19 nt, Artificial Sequence
  Description of Artificial Sequence: Synthetic oligonucleotide
  Sense strand starting at position 2189 of SEQ ID NO: 1241771
uuguaaauuggugacaguu

SEQ ID NO: 1298441 - RNA, 19 nt, Artificial Sequence
  Description of Artificial Sequence: Synthetic oligonucleotide
  Antisense strand to SEQ ID NO: 1298440
aacugucaccaauuuacaa

SEQ ID NO: 1298442 - RNA, 19 nt, Artificial Sequence
  Description of Artificial Sequence: Synthetic oligonucleotide
  Sense strand starting at position 2215 of SEQ ID NO: 1241771
acuagauaaugugugcaaa

SEQ ID NO: 1298443 - RNA, 19 nt, Artificial Sequence
  Description of Artificial Sequence: Synthetic oligonucleotide
  Antisense strand to SEQ ID NO: 1298442
uuugcacacauuaucuagu

SEQ ID NO: 1298444 - RNA, 19 nt, Artificial Sequence
  Description of Artificial Sequence: Synthetic oligonucleotide
  Sense strand starting at position 2360 of SEQ ID NO: 1241771
ucuagaaauuugcacagau

SEQ ID NO: 1298445 - RNA, 19 nt, Artificial Sequence
  Description of Artificial Sequence: Synthetic oligonucleotide
  Antisense strand to SEQ ID NO: 1298444
aucugugcaaauuucuaga

SEQ ID NO: 1298446 - RNA, 19 nt, Artificial Sequence
  Description of Artificial Sequence: Synthetic oligonucleotide
  Sense strand starting at position 2605 of SEQ ID NO: 1241771
uuuggaagucaguaauuau

SEQ ID NO: 1298447 - RNA, 19 nt, Artificial Sequence
  Description of Artificial Sequence: Synthetic oligonucleotide
  Antisense strand to SEQ ID NO: 1298446
auaauuacugacuuccaaa

SEQ ID NO: 1298448 - RNA, 19 nt, Artificial Sequence
  Description of Artificial Sequence: Synthetic oligonucleotide
  Sense strand starting at position 2615 of SEQ ID NO: 1241771
aguaauuaucaggauuguc

SEQ ID NO: 1298449 - RNA, 19 nt, Artificial Sequence
  Description of Artificial Sequence: Synthetic oligonucleotide
  Antisense strand to SEQ ID NO: 1298448
gacaauccugauaauuacu

SEQ ID NO: 1298450 - RNA, 19 nt, Artificial Sequence
  Description of Artificial Sequence: Synthetic oligonucleotide
  Sense strand starting at position 2624 of SEQ ID NO: 1241771
caggauugucauuguuaca

SEQ ID NO: 1298451 - RNA, 19 nt, Artificial Sequence
  Description of Artificial Sequence: Synthetic oligonucleotide
  Antisense strand to SEQ ID NO: 1298450
uguaacaaugacaauccug

SEQ ID NO: 1298452 - RNA, 19 nt, Artificial Sequence
  Description of Artificial Sequence: Synthetic oligonucleotide
  Sense strand starting at position 2656 of SEQ ID NO: 1241771
ucauuagucuauuuguguu

SEQ ID NO: 1298453 - RNA, 19 nt, Artificial Sequence
  Description of Artificial Sequence: Synthetic oligonucleotide
  Antisense strand to SEQ ID NO: 1298452
aacacaaauagacuaauga

SEQ ID NO: 1298454 - RNA, 19 nt, Artificial Sequence
  Description of Artificial Sequence: Synthetic oligonucleotide
  Sense strand starting at position 2664 of SEQ ID NO: 1241771
cuauuuguguucuccugga

SEQ ID NO: 1298455 - RNA, 19 nt, Artificial Sequence
  Description of Artificial Sequence: Synthetic oligonucleotide
  Antisense strand to SEQ ID NO: 1298454
uccaggagaacacaaauag

SEQ ID NO: 1298456 - RNA, 19 nt, Artificial Sequence
  Description of Artificial Sequence: Synthetic oligonucleotide
  Sense strand starting at position 2679 of SEQ ID NO: 1241771
uggaacugccgguagaaau

SEQ ID NO: 1298457 - RNA, 19 nt, Artificial Sequence
  Description of Artificial Sequence: Synthetic oligonucleotide
  Antisense strand to SEQ ID NO: 1298456
auuucuaccggcaguucca

SEQ ID NO: 1298458 - RNA, 19 nt, Artificial Sequence
  Description of Artificial Sequence: Synthetic oligonucleotide
  Sense strand starting at position 2690 of SEQ ID NO: 1241771
guagaaauguaaucucccu

SEQ ID NO: 1298459 - RNA, 19 nt, Artificial Sequence
  Description of Artificial Sequence: Synthetic oligonucleotide
  Antisense strand to SEQ ID NO: 1298458
agggagauuacauuucuac

SEQ ID NO: 1298460 - RNA, 19 nt, Artificial Sequence
  Description of Artificial Sequence: Synthetic oligonucleotide
  Sense strand starting at position 2696 of SEQ ID NO: 1241771
auguaaucucccuaaaggu

SEQ ID NO: 1298461 - RNA, 19 nt, Artificial Sequence
  Description of Artificial Sequence: Synthetic oligonucleotide
  Antisense strand to SEQ ID NO: 1298460
accuuuagggagauuacau

SEQ ID NO: 1298462 - RNA, 19 nt, Artificial Sequence
  Description of Artificial Sequence: Synthetic oligonucleotide
  Sense strand starting at position 2774 of SEQ ID NO: 1241771
auugacaauugggcucaau

SEQ ID NO: 1298463 - RNA, 19 nt, Artificial Sequence
  Description of Artificial Sequence: Synthetic oligonucleotide
  Antisense strand to SEQ ID NO: 1298462
auugagcccaauugucaau

SEQ ID NO: 1298464 - RNA, 19 nt, Artificial Sequence
  Description of Artificial Sequence: Synthetic oligonucleotide
  Sense strand starting at position 2961 of SEQ ID NO: 1241771
auagucagauguucuaaau

SEQ ID NO: 1298465 - RNA, 19 nt, Artificial Sequence
  Description of Artificial Sequence: Synthetic oligonucleotide
  Antisense strand to SEQ ID NO: 1298464
auuuagaacaucugacuau

SEQ ID NO: 1298466 - RNA, 19 nt, Artificial Sequence
  Description of Artificial Sequence: Synthetic oligonucleotide
  Sense strand starting at position 3224 of SEQ ID NO: 1241771
acauaacauucgguuauca

SEQ ID NO: 1298467 - RNA, 19 nt, Artificial Sequence
  Description of Artificial Sequence: Synthetic oligonucleotide
  Antisense strand to SEQ ID NO: 1298466
ugauaaccgaauguuaugu

SEQ ID NO: 1298468 - RNA, 19 nt, Artificial Sequence
  Description of Artificial Sequence: Synthetic oligonucleotide
  Sense strand starting at position 3226 of SEQ ID NO: 1241771
auaacauucgguuaucaug

SEQ ID NO: 1298469 - RNA, 19 nt, Artificial Sequence
  Description of Artificial Sequence: Synthetic oligonucleotide
  Antisense strand to SEQ ID NO: 1298468
caugauaaccgaauguuau

SEQ ID NO: 1298470 - RNA, 19 nt, Artificial Sequence
  Description of Artificial Sequence: Synthetic oligonucleotide
  Sense strand starting at position 3281 of SEQ ID NO: 1241771
agacauuccuuguuuauga

SEQ ID NO: 1298471 - RNA, 19 nt, Artificial Sequence
  Description of Artificial Sequence: Synthetic oligonucleotide
  Antisense strand to SEQ ID NO: 1298470
ucauaaacaaggaaugucu

SEQ ID NO: 1298472 - RNA, 19 nt, Artificial Sequence
  Description of Artificial Sequence: Synthetic oligonucleotide
  Sense strand starting at position 3336 of SEQ ID NO: 1241771
uuuguagaauaucugagaa

SEQ ID NO: 1298473 - RNA, 19 nt, Artificial Sequence
  Description of Artificial Sequence: Synthetic oligonucleotide
  Antisense strand to SEQ ID NO: 1298472
uucucagauauucuacaaa

SEQ ID NO: 1298474 - RNA, 19 nt, Artificial Sequence
  Description of Artificial Sequence: Synthetic oligonucleotide
  Sense strand starting at position 3399 of SEQ ID NO: 1241771
gacuuaaauuguuugaggu

SEQ ID NO: 1298475 - RNA, 19 nt, Artificial Sequence
  Description of Artificial Sequence: Synthetic oligonucleotide
  Antisense strand to SEQ ID NO: 1298474
accucaaacaauuuaaguc

SEQ ID NO: 1298476 - RNA, 19 nt, Artificial Sequence
  Description of Artificial Sequence: Synthetic oligonucleotide
  Sense strand starting at position 3400 of SEQ ID NO: 1241771
acuuaaauuguuugaggua

SEQ ID NO: 1298477 - RNA, 19 nt, Artificial Sequence
  Description of Artificial Sequence: Synthetic oligonucleotide
  Antisense strand to SEQ ID NO: 1298476
uaccucaaacaauuuaagu

SEQ ID NO: 1298478 - RNA, 19 nt, Artificial Sequence
  Description of Artificial Sequence: Synthetic oligonucleotide
  Sense strand starting at position 3405 of SEQ ID NO: 1241771
aauuguuugagguaggacu

SEQ ID NO: 1298479 - RNA, 19 nt, Artificial Sequence
  Description of Artificial Sequence: Synthetic oligonucleotide
  Antisense strand to SEQ ID NO: 1298478
aguccuaccucaaacaauu

SEQ ID NO: 1298480 - RNA, 19 nt, Artificial Sequence
  Description of Artificial Sequence: Synthetic oligonucleotide
  Sense strand starting at position 3518 of SEQ ID NO: 1241771
uugagauuauugccaacuu

SEQ ID NO: 1298481 - RNA, 19 nt, Artificial Sequence
  Description of Artificial Sequence: Synthetic oligonucleotide
  Antisense strand to SEQ ID NO: 1298480
aaguuggcaauaaucucaa

SEQ ID NO: 1298482 - RNA, 19 nt, Artificial Sequence
  Description of Artificial Sequence: Synthetic oligonucleotide
  Sense strand starting at position 3734 of SEQ ID NO: 1241771
uguuaaacauguccaaaug

SEQ ID NO: 1298483 - RNA, 19 nt, Artificial Sequence
  Description of Artificial Sequence: Synthetic oligonucleotide
  Antisense strand to SEQ ID NO: 1298482
cauuuggacauguuuaaca

SEQ ID NO: 1298484 - RNA, 19 nt, Artificial Sequence
  Description of Artificial Sequence: Synthetic oligonucleotide
  Sense strand starting at position 3735 of SEQ ID NO: 1241771
guuaaacauguccaaaugu

SEQ ID NO: 1298485 - RNA, 19 nt, Artificial Sequence
  Description of Artificial Sequence: Synthetic oligonucleotide
  Antisense strand to SEQ ID NO: 1298484
acauuuggacauguuuaac

SEQ ID NO: 1298486 - RNA, 19 nt, Artificial Sequence
  Description of Artificial Sequence: Synthetic oligonucleotide
  Sense strand starting at position 3907 of SEQ ID NO: 1241771
augcuaguaauaggaagaa

SEQ ID NO: 1298487 - RNA, 19 nt, Artificial Sequence
  Description of Artificial Sequence: Synthetic oligonucleotide
  Antisense strand to SEQ ID NO: 1298486
uucuuccuauuacuagcau

SEQ ID NO: 1298488 - RNA, 19 nt, Artificial Sequence
  Description of Artificial Sequence: Synthetic oligonucleotide
  Sense strand starting at position 3934 of SEQ ID NO: 1241771
guaacaauuccuggugaag

SEQ ID NO: 1298489 - RNA, 19 nt, Artificial Sequence
  Description of Artificial Sequence: Synthetic oligonucleotide
  Antisense strand to SEQ ID NO: 1298488
cuucaccaggaauuguuac

SEQ ID NO: 1298490 - RNA, 19 nt, Artificial Sequence
  Description of Artificial Sequence: Synthetic oligonucleotide
  Sense strand starting at position 40 of SEQ ID NO: 1241772
cuagaaaccucagagggaa

SEQ ID NO: 1298491 - RNA, 19 nt, Artificial Sequence
  Description of Artificial Sequence: Synthetic oligonucleotide
  Antisense strand to SEQ ID NO: 1298490
uucccucugagguuucuag

SEQ ID NO: 1298492 - RNA, 19 nt, Artificial Sequence
  Description of Artificial Sequence: Synthetic oligonucleotide
  Sense strand starting at position 82 of SEQ ID NO: 1241772
cgagcagaauugccaguau

SEQ ID NO: 1298493 - RNA, 19 nt, Artificial Sequence
  Description of Artificial Sequence: Synthetic oligonucleotide
  Antisense strand to SEQ ID NO: 1298492
auacuggcaauucugcucg

SEQ ID NO: 1298494 - RNA, 19 nt, Artificial Sequence
  Description of Artificial Sequence: Synthetic oligonucleotide
  Sense strand starting at position 185 of SEQ ID NO: 1241772
ugcucuaacuguccauaga

SEQ ID NO: 1298495 - RNA, 19 nt, Artificial Sequence
  Description of Artificial Sequence: Synthetic oligonucleotide
  Antisense strand to SEQ ID NO: 1298494
ucuauggacaguuagagca

SEQ ID NO: 1298496 - RNA, 19 nt, Artificial Sequence
  Description of Artificial Sequence: Synthetic oligonucleotide
  Sense strand starting at position 186 of SEQ ID NO: 1241772
gcucuaacuguccauagac

SEQ ID NO: 1298497 - RNA, 19 nt, Artificial Sequence
  Description of Artificial Sequence: Synthetic oligonucleotide
  Antisense strand to SEQ ID NO: 1298496
gucuauggacaguuagagc

SEQ ID NO: 1298498 - RNA, 19 nt, Artificial Sequence
  Description of Artificial Sequence: Synthetic oligonucleotide
  Sense strand starting at position 245 of SEQ ID NO: 1241772
cccuuuguuuggucggaga

SEQ ID NO: 1298499 - RNA, 19 nt, Artificial Sequence
  Description of Artificial Sequence: Synthetic oligonucleotide
  Antisense strand to SEQ ID NO: 1298498
ucuccgaccaaacaaaggg

SEQ ID NO: 1298500 - RNA, 19 nt, Artificial Sequence
  Description of Artificial Sequence: Synthetic oligonucleotide
  Sense strand starting at position 247 of SEQ ID NO: 1241772
cuuuguuuggucggagaag

SEQ ID NO: 1298501 - RNA, 19 nt, Artificial Sequence
  Description of Artificial Sequence: Synthetic oligonucleotide
  Antisense strand to SEQ ID NO: 1298500
cuucuccgaccaaacaaag

SEQ ID NO: 1298502 - RNA, 19 nt, Artificial Sequence
  Description of Artificial Sequence: Synthetic oligonucleotide
  Sense strand starting at position 250 of SEQ ID NO: 1241772
uguuuggucggagaagguu

SEQ ID NO: 1298503 - RNA, 19 nt, Artificial Sequence
  Description of Artificial Sequence: Synthetic oligonucleotide
  Antisense strand to SEQ ID NO: 1298502
aaccuucuccgaccaaaca

SEQ ID NO: 1298504 - RNA, 19 nt, Artificial Sequence
  Description of Artificial Sequence: Synthetic oligonucleotide
  Sense strand starting at position 262 of SEQ ID NO: 1241772
gaagguugaccaugccaga

SEQ ID NO: 1298505 - RNA, 19 nt, Artificial Sequence
  Description of Artificial Sequence: Synthetic oligonucleotide
  Antisense strand to SEQ ID NO: 1298504
ucuggcauggucaaccuuc

SEQ ID NO: 1298506 - RNA, 19 nt, Artificial Sequence
  Description of Artificial Sequence: Synthetic oligonucleotide
  Sense strand starting at position 275 of SEQ ID NO: 1241772
gccagaaucucaccaaaug

SEQ ID NO: 1298507 - RNA, 19 nt, Artificial Sequence
  Description of Artificial Sequence: Synthetic oligonucleotide
  Antisense strand to SEQ ID NO: 1298506
cauuuggugagauucuggc

SEQ ID NO: 1298508 - RNA, 19 nt, Artificial Sequence
  Description of Artificial Sequence: Synthetic oligonucleotide
  Sense strand starting at position 484 of SEQ ID NO: 1241772
accuucuuugcccaagagu

SEQ ID NO: 1298509 - RNA, 19 nt, Artificial Sequence
  Description of Artificial Sequence: Synthetic oligonucleotide
  Antisense strand to SEQ ID NO: 1298508
acucuugggcaaagaaggu

SEQ ID NO: 1298510 - RNA, 19 nt, Artificial Sequence
  Description of Artificial Sequence: Synthetic oligonucleotide
  Sense strand starting at position 586 of SEQ ID NO: 1241772
gggagaaugcagcauaguu

SEQ ID NO: 1298511 - RNA, 19 nt, Artificial Sequence
  Description of Artificial Sequence: Synthetic oligonucleotide
  Antisense strand to SEQ ID NO: 1298510
aacuaugcugcauucuccc

SEQ ID NO: 1298512 - RNA, 19 nt, Artificial Sequence
  Description of Artificial Sequence: Synthetic oligonucleotide
  Sense strand starting at position 1013 of SEQ ID NO: 1241772
uccagucauuucuagguga

SEQ ID NO: 1298513 - RNA, 19 nt, Artificial Sequence
  Description of Artificial Sequence: Synthetic oligonucleotide
  Antisense strand to SEQ ID NO: 1298512
ucaccuagaaaugacugga

SEQ ID NO: 1298514 - RNA, 19 nt, Artificial Sequence
  Description of Artificial Sequence: Synthetic oligonucleotide
  Sense strand starting at position 1067 of SEQ ID NO: 1241772
gauuauggccuuugaaagg

SEQ ID NO: 1298515 - RNA, 19 nt, Artificial Sequence
  Description of Artificial Sequence: Synthetic oligonucleotide
  Antisense strand to SEQ ID NO: 1298514
ccuuucaaaggccauaauc

SEQ ID NO: 1298516 - RNA, 19 nt, Artificial Sequence
  Description of Artificial Sequence: Synthetic oligonucleotide
  Sense strand starting at position 1076 of SEQ ID NO: 1241772
cuuugaaaggcauaauccu

SEQ ID NO: 1298517 - RNA, 19 nt, Artificial Sequence
  Description of Artificial Sequence: Synthetic oligonucleotide
  Antisense strand to SEQ ID NO: 1298516
aggauuaugccuuucaaag

SEQ ID NO: 1298518 - RNA, 19 nt, Artificial Sequence
  Description of Artificial Sequence: Synthetic oligonucleotide
  Sense strand starting at position 2058 of SEQ ID NO: 1241772
gaggauuaaugacaaagac

SEQ ID NO: 1298519 - RNA, 19 nt, Artificial Sequence
  Description of Artificial Sequence: Synthetic oligonucleotide
  Antisense strand to SEQ ID NO: 1298518
gucuuugucauuaauccuc

SEQ ID NO: 1298520 - RNA, 19 nt, Artificial Sequence
  Description of Artificial Sequence: Synthetic oligonucleotide
  Sense strand starting at position 2230 of SEQ ID NO: 1241772
acgaaaugcgugcagaaau

SEQ ID NO: 1298521 - RNA, 19 nt, Artificial Sequence
  Description of Artificial Sequence: Synthetic oligonucleotide
  Antisense strand to SEQ ID NO: 1298520
auuucugcacgcauuucgu

SEQ ID NO: 1298522 - RNA, 19 nt, Artificial Sequence
  Description of Artificial Sequence: Synthetic oligonucleotide
  Sense strand starting at position 2572 of SEQ ID NO: 1241772
ccggucuaguuuccauuua

SEQ ID NO: 1298523 - RNA, 19 nt, Artificial Sequence
  Description of Artificial Sequence: Synthetic oligonucleotide
  Antisense strand to SEQ ID NO: 1298522
uaaauggaaacuagaccgg

SEQ ID NO: 1298524 - RNA, 19 nt, Artificial Sequence
  Description of Artificial Sequence: Synthetic oligonucleotide
  Sense strand starting at position 2732 of SEQ ID NO: 1241772
cagucuacaggcgaagaua

SEQ ID NO: 1298525 - RNA, 19 nt, Artificial Sequence
  Description of Artificial Sequence: Synthetic oligonucleotide
  Antisense strand to SEQ ID NO: 1298524
uaucuucgccuguagacug

SEQ ID NO: 1298526 - RNA, 19 nt, Artificial Sequence
  Description of Artificial Sequence: Synthetic oligonucleotide
  Sense strand starting at position 2782 of SEQ ID NO: 1241772
uacagauggugccugucau

SEQ ID NO: 1298527 - RNA, 19 nt, Artificial Sequence
  Description of Artificial Sequence: Synthetic oligonucleotide
  Antisense strand to SEQ ID NO: 1298526
augacaggcaccaucugua

SEQ ID NO: 1298528 - RNA, 19 nt, Artificial Sequence
  Description of Artificial Sequence: Synthetic oligonucleotide
  Sense strand starting at position 2783 of SEQ ID NO: 1241772
acagauggugccugucauu

SEQ ID NO: 1298529 - RNA, 19 nt, Artificial Sequence
  Description of Artificial Sequence: Synthetic oligonucleotide
  Antisense strand to SEQ ID NO: 1298528
aaugacaggcaccaucugu

SEQ ID NO: 1298530 - RNA, 19 nt, Artificial Sequence
  Description of Artificial Sequence: Synthetic oligonucleotide
  Sense strand starting at position 2866 of SEQ ID NO: 1241772
gguagaucaggaggcuuua

SEQ ID NO: 1298531 - RNA, 19 nt, Artificial Sequence
  Description of Artificial Sequence: Synthetic oligonucleotide
  Antisense strand to SEQ ID NO: 1298530
uaaagccuccugaucuacc

SEQ ID NO: 1298532 - RNA, 19 nt, Artificial Sequence
  Description of Artificial Sequence: Synthetic oligonucleotide
  Sense strand starting at position 2966 of SEQ ID NO: 1241772
gaggaaauccagcggaagu

SEQ ID NO: 1298533 - RNA, 19 nt, Artificial Sequence
  Description of Artificial Sequence: Synthetic oligonucleotide
  Antisense strand to SEQ ID NO: 1298532
acuuccgcuggauuuccuc

SEQ ID NO: 1298534 - RNA, 19 nt, Artificial Sequence
  Description of Artificial Sequence: Synthetic oligonucleotide
  Sense strand starting at position 2976 of SEQ ID NO: 1241772
agcggaaguccugauguuu

SEQ ID NO: 1298535 - RNA, 19 nt, Artificial Sequence
  Description of Artificial Sequence: Synthetic oligonucleotide
  Antisense strand to SEQ ID NO: 1298534
aaacaucaggacuuccgcu

SEQ ID NO: 1298536 - RNA, 19 nt, Artificial Sequence
  Description of Artificial Sequence: Synthetic oligonucleotide
  Sense strand starting at position 2981 of SEQ ID NO: 1241772
aaguccugauguuugaaau

SEQ ID NO: 1298537 - RNA, 19 nt, Artificial Sequence
  Description of Artificial Sequence: Synthetic oligonucleotide
  Antisense strand to SEQ ID NO: 1298536
auuucaaacaucaggacuu

SEQ ID NO: 1298538 - RNA, 19 nt, Artificial Sequence
  Description of Artificial Sequence: Synthetic oligonucleotide
  Sense strand starting at position 2982 of SEQ ID NO: 1241772
aguccugauguuugaaauc

SEQ ID NO: 1298539 - RNA, 19 nt, Artificial Sequence
  Description of Artificial Sequence: Synthetic oligonucleotide
  Antisense strand to SEQ ID NO: 1298538
gauuucaaacaucaggacu

SEQ ID NO: 1298540 - RNA, 19 nt, Artificial Sequence
  Description of Artificial Sequence: Synthetic oligonucleotide
  Sense strand starting at position 2994 of SEQ ID NO: 1241772
ugaaaucucagguguguuu

SEQ ID NO: 1298541 - RNA, 19 nt, Artificial Sequence
  Description of Artificial Sequence: Synthetic oligonucleotide
  Antisense strand to SEQ ID NO: 1298540
aaacacaccugagauuuca

SEQ ID NO: 1298542 - RNA, 19 nt, Artificial Sequence
  Description of Artificial Sequence: Synthetic oligonucleotide
  Sense strand starting at position 3013 of SEQ ID NO: 1241772
agggcauagugguuugauu

SEQ ID NO: 1298543 - RNA, 19 nt, Artificial Sequence
  Description of Artificial Sequence: Synthetic oligonucleotide
  Antisense strand to SEQ ID NO: 1298542
aaucaaaccacuaugcccu

SEQ ID NO: 1298544 - RNA, 19 nt, Artificial Sequence
  Description of Artificial Sequence: Synthetic oligonucleotide
  Sense strand starting at position 3088 of SEQ ID NO: 1241772
gaugaagaguuuggauuug

SEQ ID NO: 1298545 - RNA, 19 nt, Artificial Sequence
  Description of Artificial Sequence: Synthetic oligonucleotide
  Antisense strand to SEQ ID NO: 1298544
caaauccaaacucuucauc

SEQ ID NO: 1298546 - RNA, 19 nt, Artificial Sequence
  Description of Artificial Sequence: Synthetic oligonucleotide
  Sense strand starting at position 3121 of SEQ ID NO: 1241772
ggagaagccugacauauuu

SEQ ID NO: 1298547 - RNA, 19 nt, Artificial Sequence
  Description of Artificial Sequence: Synthetic oligonucleotide
  Antisense strand to SEQ ID NO: 1298546
aaauaugucaggcuucucc

SEQ ID NO: 1298548 - RNA, 19 nt, Artificial Sequence
  Description of Artificial Sequence: Synthetic oligonucleotide
  Sense strand starting at position 3224 of SEQ ID NO: 1241772
gucagcaucaccugggaaa

SEQ ID NO: 1298549 - RNA, 19 nt, Artificial Sequence
  Description of Artificial Sequence: Synthetic oligonucleotide
  Antisense strand to SEQ ID NO: 1298548
uuucccaggugaugcugac

SEQ ID NO: 1298550 - RNA, 19 nt, Artificial Sequence
  Description of Artificial Sequence: Synthetic oligonucleotide
  Sense strand starting at position 3306 of SEQ ID NO: 1241772
ggucucaguuaaccaguau

SEQ ID NO: 1298551 - RNA, 19 nt, Artificial Sequence
  Description of Artificial Sequence: Synthetic oligonucleotide
  Antisense strand to SEQ ID NO: 1298550
auacugguuaacugagacc

SEQ ID NO: 1298552 - RNA, 19 nt, Artificial Sequence
  Description of Artificial Sequence: Synthetic oligonucleotide
  Sense strand starting at position 3310 of SEQ ID NO: 1241772
ucaguuaaccaguauauug

SEQ ID NO: 1298553 - RNA, 19 nt, Artificial Sequence
  Description of Artificial Sequence: Synthetic oligonucleotide
  Antisense strand to SEQ ID NO: 1298552
caauauacugguuaacuga

SEQ ID NO: 1298554 - RNA, 19 nt, Artificial Sequence
  Description of Artificial Sequence: Synthetic oligonucleotide
  Sense strand starting at position 3376 of SEQ ID NO: 1241772
gggccaauaucaucagcau

SEQ ID NO: 1298555 - RNA, 19 nt, Artificial Sequence
  Description of Artificial Sequence: Synthetic oligonucleotide
  Antisense strand to SEQ ID NO: 1298554
augcugaugauauuggccc

SEQ ID NO: 1298556 - RNA, 19 nt, Artificial Sequence
  Description of Artificial Sequence: Synthetic oligonucleotide
  Sense strand starting at position 3398 of SEQ ID NO: 1241772
aggagaaccuaucagaaau

SEQ ID NO: 1298557 - RNA, 19 nt, Artificial Sequence
  Description of Artificial Sequence: Synthetic oligonucleotide
  Antisense strand to SEQ ID NO: 1298556
auuucugauagguucuccu

SEQ ID NO: 1298558 - RNA, 19 nt, Artificial Sequence
  Description of Artificial Sequence: Synthetic oligonucleotide
  Sense strand starting at position 3464 of SEQ ID NO: 1241772
acgagcauacugggugauu

SEQ ID NO: 1298559 - RNA, 19 nt, Artificial Sequence
  Description of Artificial Sequence: Synthetic oligonucleotide
  Antisense strand to SEQ ID NO: 1298558
aaucacccaguaugcucgu

SEQ ID NO: 1298560 - RNA, 19 nt, Artificial Sequence
  Description of Artificial Sequence: Synthetic oligonucleotide
  Sense strand starting at position 3489 of SEQ ID NO: 1241772
ccuauuaaagugugagaaa

SEQ ID NO: 1298561 - RNA, 19 nt, Artificial Sequence
  Description of Artificial Sequence: Synthetic oligonucleotide
  Antisense strand to SEQ ID NO: 1298560
uuucucacacuuuaauagg

SEQ ID NO: 1298562 - RNA, 19 nt, Artificial Sequence
  Description of Artificial Sequence: Synthetic oligonucleotide
  Sense strand starting at position 3604 of SEQ ID NO: 1241772
accaguuguuuccuaggca

SEQ ID NO: 1298563 - RNA, 19 nt, Artificial Sequence
  Description of Artificial Sequence: Synthetic oligonucleotide
  Antisense strand to SEQ ID NO: 1298562
ugccuaggaaacaacuggu

SEQ ID NO: 1298564 - RNA, 19 nt, Artificial Sequence
  Description of Artificial Sequence: Synthetic oligonucleotide
  Sense strand starting at position 3654 of SEQ ID NO: 1241772
acauaagugguauggaaca

SEQ ID NO: 1298565 - RNA, 19 nt, Artificial Sequence
  Description of Artificial Sequence: Synthetic oligonucleotide
  Antisense strand to SEQ ID NO: 1298564
uguuccauaccacuuaugu

SEQ ID NO: 1298566 - RNA, 19 nt, Artificial Sequence
  Description of Artificial Sequence: Synthetic oligonucleotide
  Sense strand starting at position 3818 of SEQ ID NO: 1241772
gggauccucucaccucuua

SEQ ID NO: 1298567 - RNA, 19 nt, Artificial Sequence
  Description of Artificial Sequence: Synthetic oligonucleotide
  Antisense strand to SEQ ID NO: 1298566
uaagaggugagaggauccc

SEQ ID NO: 1298568 - RNA, 19 nt, Artificial Sequence
  Description of Artificial Sequence: Synthetic oligonucleotide
  Sense strand starting at position 3850 of SEQ ID NO: 1241772
agaaguugcaacuauaggu

SEQ ID NO: 1298569 - RNA, 19 nt, Artificial Sequence
  Description of Artificial Sequence: Synthetic oligonucleotide
  Antisense strand to SEQ ID NO: 1298568
accuauaguugcaacuucu

SEQ ID NO: 1298570 - RNA, 19 nt, Artificial Sequence
  Description of Artificial Sequence: Synthetic oligonucleotide
  Sense strand starting at position 203 of SEQ ID NO: 1241773
guugucuauuuauugguua

SEQ ID NO: 1298571 - RNA, 19 nt, Artificial Sequence
  Description of Artificial Sequence: Synthetic oligonucleotide
  Antisense strand to SEQ ID NO: 1298570
uaaccaauaaauagacaac

SEQ ID NO: 1298572 - RNA, 19 nt, Artificial Sequence
  Description of Artificial Sequence: Synthetic oligonucleotide
  Sense strand starting at position 215 of SEQ ID NO: 1241773
uugguuauugcugauaauc

SEQ ID NO: 1298573 - RNA, 19 nt, Artificial Sequence
  Description of Artificial Sequence: Synthetic oligonucleotide
  Antisense strand to SEQ ID NO: 1298572
gauuaucagcaauaaccaa

SEQ ID NO: 1298574 - RNA, 19 nt, Artificial Sequence
  Description of Artificial Sequence: Synthetic oligonucleotide
  Sense strand starting at position 265 of SEQ ID NO: 1241773
gugcucaaccucuagaagu

SEQ ID NO: 1298575 - RNA, 19 nt, Artificial Sequence
  Description of Artificial Sequence: Synthetic oligonucleotide
  Antisense strand to SEQ ID NO: 1298574
acuucuagagguugagcac

SEQ ID NO: 1298576 - RNA, 19 nt, Artificial Sequence
  Description of Artificial Sequence: Synthetic oligonucleotide
  Sense strand starting at position 267 of SEQ ID NO: 1241773
gcucaaccucuagaaguuu

SEQ ID NO: 1298577 - RNA, 19 nt, Artificial Sequence
  Description of Artificial Sequence: Synthetic oligonucleotide
  Antisense strand to SEQ ID NO: 1298576
aaacuucuagagguugagc

SEQ ID NO: 1298578 - RNA, 19 nt, Artificial Sequence
  Description of Artificial Sequence: Synthetic oligonucleotide
  Sense strand starting at position 299 of SEQ ID NO: 1241773
uauggaaugugccucaaua

SEQ ID NO: 1298579 - RNA, 19 nt, Artificial Sequence
  Description of Artificial Sequence: Synthetic oligonucleotide
  Antisense strand to SEQ ID NO: 1298578
uauugaggcacauuccaua

SEQ ID NO: 1298580 - RNA, 19 nt, Artificial Sequence
  Description of Artificial Sequence: Synthetic oligonucleotide
  Sense strand starting at position 301 of SEQ ID NO: 1241773
uggaaugugccucaauaug

SEQ ID NO: 1298581 - RNA, 19 nt, Artificial Sequence
  Description of Artificial Sequence: Synthetic oligonucleotide
  Antisense strand to SEQ ID NO: 1298580
cauauugaggcacauucca

SEQ ID NO: 1298582 - RNA, 19 nt, Artificial Sequence
  Description of Artificial Sequence: Synthetic oligonucleotide
  Sense strand starting at position 364 of SEQ ID NO: 1241773
gucugugcucuauauauuu

SEQ ID NO: 1298583 - RNA, 19 nt, Artificial Sequence
  Description of Artificial Sequence: Synthetic oligonucleotide
  Antisense strand to SEQ ID NO: 1298582
aaauauauagagcacagac

SEQ ID NO: 1298584 - RNA, 19 nt, Artificial Sequence
  Description of Artificial Sequence: Synthetic oligonucleotide
  Sense strand starting at position 441 of SEQ ID NO: 1241773
aggauagacuccucacuuu

SEQ ID NO: 1298585 - RNA, 19 nt, Artificial Sequence
  Description of Artificial Sequence: Synthetic oligonucleotide
  Antisense strand to SEQ ID NO: 1298584
aaagugaggagucuauccu

SEQ ID NO: 1298586 - RNA, 19 nt, Artificial Sequence
  Description of Artificial Sequence: Synthetic oligonucleotide
  Sense strand starting at position 514 of SEQ ID NO: 1241773
aaaccuggccuggguuaaa

SEQ ID NO: 1298587 - RNA, 19 nt, Artificial Sequence
  Description of Artificial Sequence: Synthetic oligonucleotide
  Antisense strand to SEQ ID NO: 1298586
uuuaacccaggccagguuu

SEQ ID NO: 1298588 - RNA, 19 nt, Artificial Sequence
  Description of Artificial Sequence: Synthetic oligonucleotide
  Sense strand starting at position 931 of SEQ ID NO: 1241773
acaagaugccaucauguuu

SEQ ID NO: 1298589 - RNA, 19 nt, Artificial Sequence
  Description of Artificial Sequence: Synthetic oligonucleotide
  Antisense strand to SEQ ID NO: 1298588
aaacaugauggcaucuugu

SEQ ID NO: 1298590 - RNA, 19 nt, Artificial Sequence
  Description of Artificial Sequence: Synthetic oligonucleotide
  Sense strand starting at position 1104 of SEQ ID NO: 1241773
cgaugaaauuaggaaauuu

SEQ ID NO: 1298591 - RNA, 19 nt, Artificial Sequence
  Description of Artificial Sequence: Synthetic oligonucleotide
  Antisense strand to SEQ ID NO: 1298590
aaauuuccuaauuucaucg

SEQ ID NO: 1298592 - RNA, 19 nt, Artificial Sequence
  Description of Artificial Sequence: Synthetic oligonucleotide
  Sense strand starting at position 1245 of SEQ ID NO: 1241773
ccaaauuacucagcgauaa

SEQ ID NO: 1298593 - RNA, 19 nt, Artificial Sequence
  Description of Artificial Sequence: Synthetic oligonucleotide
  Antisense strand to SEQ ID NO: 1298592
uuaucgcugaguaauuugg

SEQ ID NO: 1298594 - RNA, 19 nt, Artificial Sequence
  Description of Artificial Sequence: Synthetic oligonucleotide
  Sense strand starting at position 1249 of SEQ ID NO: 1241773
auuacucagcgauaauuac

SEQ ID NO: 1298595 - RNA, 19 nt, Artificial Sequence
  Description of Artificial Sequence: Synthetic oligonucleotide
  Antisense strand to SEQ ID NO: 1298594
guaauuaucgcugaguaau

SEQ ID NO: 1298596 - RNA, 19 nt, Artificial Sequence
  Description of Artificial Sequence: Synthetic oligonucleotide
  Sense strand starting at position 1451 of SEQ ID NO: 1241773
ugggaagcccuuuaaguuu

SEQ ID NO: 1298597 - RNA, 19 nt, Artificial Sequence
  Description of Artificial Sequence: Synthetic oligonucleotide
  Antisense strand to SEQ ID NO: 1298596
aaacuuaaagggcuuccca

SEQ ID NO: 1298598 - RNA, 19 nt, Artificial Sequence
  Description of Artificial Sequence: Synthetic oligonucleotide
  Sense strand starting at position 1541 of SEQ ID NO: 1241773
ggucuaucggaagaagagu

SEQ ID NO: 1298599 - RNA, 19 nt, Artificial Sequence
  Description of Artificial Sequence: Synthetic oligonucleotide
  Antisense strand to SEQ ID NO: 1298598
acucuucuuccgauagacc

SEQ ID NO: 1298600 - RNA, 19 nt, Artificial Sequence
  Description of Artificial Sequence: Synthetic oligonucleotide
  Sense strand starting at position 1576 of SEQ ID NO: 1241773
ggagacuccucucccgaaa

SEQ ID NO: 1298601 - RNA, 19 nt, Artificial Sequence
  Description of Artificial Sequence: Synthetic oligonucleotide
  Antisense strand to SEQ ID NO: 1298600
uuucgggagaggagucucc

SEQ ID NO: 1298602 - RNA, 19 nt, Artificial Sequence
  Description of Artificial Sequence: Synthetic oligonucleotide
  Sense strand starting at position 1813 of SEQ ID NO: 1241773
ggcguuuaccugucucauc

SEQ ID NO: 1298603 - RNA, 19 nt, Artificial Sequence
  Description of Artificial Sequence: Synthetic oligonucleotide
  Antisense strand to SEQ ID NO: 1298602
gaugagacagguaaacgcc

SEQ ID NO: 1298604 - RNA, 19 nt, Artificial Sequence
  Description of Artificial Sequence: Synthetic oligonucleotide
  Sense strand starting at position 2113 of SEQ ID NO: 1241773
cuaagagguugacuccaaa

SEQ ID NO: 1298605 - RNA, 19 nt, Artificial Sequence
  Description of Artificial Sequence: Synthetic oligonucleotide
  Antisense strand to SEQ ID NO: 1298604
uuuggagucaaccucuuag

SEQ ID NO: 1298606 - RNA, 19 nt, Artificial Sequence
  Description of Artificial Sequence: Synthetic oligonucleotide
  Sense strand starting at position 2470 of SEQ ID NO: 1241773
gucuguguugcuucugauu

SEQ ID NO: 1298607 - RNA, 19 nt, Artificial Sequence
  Description of Artificial Sequence: Synthetic oligonucleotide
  Antisense strand to SEQ ID NO: 1298606
aaucagaagcaacacagac

SEQ ID NO: 1298608 - RNA, 19 nt, Artificial Sequence
  Description of Artificial Sequence: Synthetic oligonucleotide
  Sense strand starting at position 2477 of SEQ ID NO: 1241773
uugcuucugauugagagga

SEQ ID NO: 1298609 - RNA, 19 nt, Artificial Sequence
  Description of Artificial Sequence: Synthetic oligonucleotide
  Antisense strand to SEQ ID NO: 1298608
uccucucaaucagaagcaa

SEQ ID NO: 1298610 - RNA, 19 nt, Artificial Sequence
  Description of Artificial Sequence: Synthetic oligonucleotide
  Sense strand starting at position 2604 of SEQ ID NO: 1241773
uggagaaggcuuggugaau

SEQ ID NO: 1298611 - RNA, 19 nt, Artificial Sequence
  Description of Artificial Sequence: Synthetic oligonucleotide
  Antisense strand to SEQ ID NO: 1298610
auucaccaagccuucucca

SEQ ID NO: 1298612 - RNA, 19 nt, Artificial Sequence
  Description of Artificial Sequence: Synthetic oligonucleotide
  Sense strand starting at position 2605 of SEQ ID NO: 1241773
ggagaaggcuuggugaauu

SEQ ID NO: 1298613 - RNA, 19 nt, Artificial Sequence
  Description of Artificial Sequence: Synthetic oligonucleotide
  Antisense strand to SEQ ID NO: 1298612
aauucaccaagccuucucc

SEQ ID NO: 1298614 - RNA, 19 nt, Artificial Sequence
  Description of Artificial Sequence: Synthetic oligonucleotide
  Sense strand starting at position 2615 of SEQ ID NO: 1241773
uggugaauucaaggaacga

SEQ ID NO: 1298615 - RNA, 19 nt, Artificial Sequence
  Description of Artificial Sequence: Synthetic oligonucleotide
  Antisense strand to SEQ ID NO: 1298614
ucguuccuugaauucacca

SEQ ID NO: 1298616 - RNA, 19 nt, Artificial Sequence
  Description of Artificial Sequence: Synthetic oligonucleotide
  Sense strand starting at position 2719 of SEQ ID NO: 1241773
gcccuucggguugauauuu

SEQ ID NO: 1298617 - RNA, 19 nt, Artificial Sequence
  Description of Artificial Sequence: Synthetic oligonucleotide
  Antisense strand to SEQ ID NO: 1298616
aaauaucaacccgaagggc

SEQ ID NO: 1298618 - RNA, 19 nt, Artificial Sequence
  Description of Artificial Sequence: Synthetic oligonucleotide
  Sense strand starting at position 2825 of SEQ ID NO: 1241773
ggauaagaaucccuuucuc

SEQ ID NO: 1298619 - RNA, 19 nt, Artificial Sequence
  Description of Artificial Sequence: Synthetic oligonucleotide
  Antisense strand to SEQ ID NO: 1298618
gagaaagggauucuuaucc

SEQ ID NO: 1298620 - RNA, 19 nt, Artificial Sequence
  Description of Artificial Sequence: Synthetic oligonucleotide
  Sense strand starting at position 2914 of SEQ ID NO: 1241773
uuuggaaauagauguugua

SEQ ID NO: 1298621 - RNA, 19 nt, Artificial Sequence
  Description of Artificial Sequence: Synthetic oligonucleotide
  Antisense strand to SEQ ID NO: 1298620
uacaacaucuauuuccaaa

SEQ ID NO: 1298622 - RNA, 19 nt, Artificial Sequence
  Description of Artificial Sequence: Synthetic oligonucleotide
  Sense strand starting at position 2939 of SEQ ID NO: 1241773
cuaagaggcccuuaagcuu

SEQ ID NO: 1298623 - RNA, 19 nt, Artificial Sequence
  Description of Artificial Sequence: Synthetic oligonucleotide
  Antisense strand to SEQ ID NO: 1298622
aagcuuaagggccucuuag

SEQ ID NO: 1298624 - RNA, 19 nt, Artificial Sequence
  Description of Artificial Sequence: Synthetic oligonucleotide
  Sense strand starting at position 2946 of SEQ ID NO: 1241773
gcccuuaagcuuuagggaa

SEQ ID NO: 1298625 - RNA, 19 nt, Artificial Sequence
  Description of Artificial Sequence: Synthetic oligonucleotide
  Antisense strand to SEQ ID NO: 1298624
uucccuaaagcuuaagggc

SEQ ID NO: 1298626 - RNA, 19 nt, Artificial Sequence
  Description of Artificial Sequence: Synthetic oligonucleotide
  Sense strand starting at position 3030 of SEQ ID NO: 1241773
ugggauuucuaacagauaa

SEQ ID NO: 1298627 - RNA, 19 nt, Artificial Sequence
  Description of Artificial Sequence: Synthetic oligonucleotide
  Antisense strand to SEQ ID NO: 1298626
uuaucuguuagaaauccca

SEQ ID NO: 1298628 - RNA, 19 nt, Artificial Sequence
  Description of Artificial Sequence: Synthetic oligonucleotide
  Sense strand starting at position 3045 of SEQ ID NO: 1241773
auaacacuucugugaaaug

SEQ ID NO: 1298629 - RNA, 19 nt, Artificial Sequence
  Description of Artificial Sequence: Synthetic oligonucleotide
  Antisense strand to SEQ ID NO: 1298628
cauuucacagaaguguuau

SEQ ID NO: 1298630 - RNA, 19 nt, Artificial Sequence
  Description of Artificial Sequence: Synthetic oligonucleotide
  Sense strand starting at position 3066 of SEQ ID NO: 1241773
aggcauacuugugcagaaa

SEQ ID NO: 1298631 - RNA, 19 nt, Artificial Sequence
  Description of Artificial Sequence: Synthetic oligonucleotide
  Antisense strand to SEQ ID NO: 1298630
uuucugcacaaguaugccu

SEQ ID NO: 1298632 - RNA, 19 nt, Artificial Sequence
  Description of Artificial Sequence: Synthetic oligonucleotide
  Sense strand starting at position 3122 of SEQ ID NO: 1241773
ggaggagucuccucuugag

SEQ ID NO: 1298633 - RNA, 19 nt, Artificial Sequence
  Description of Artificial Sequence: Synthetic oligonucleotide
  Antisense strand to SEQ ID NO: 1298632
cucaagaggagacuccucc

SEQ ID NO: 1298634 - RNA, 19 nt, Artificial Sequence
  Description of Artificial Sequence: Synthetic oligonucleotide
  Sense strand starting at position 3166 of SEQ ID NO: 1241773
gguggaucuuggcccaaau

SEQ ID NO: 1298635 - RNA, 19 nt, Artificial Sequence
  Description of Artificial Sequence: Synthetic oligonucleotide
  Antisense strand to SEQ ID NO: 1298634
auuugggccaagauccacc

SEQ ID NO: 1298636 - RNA, 19 nt, Artificial Sequence
  Description of Artificial Sequence: Synthetic oligonucleotide
  Sense strand starting at position 3181 of SEQ ID NO: 1241773
aaaugauaauggccuguga

SEQ ID NO: 1298637 - RNA, 19 nt, Artificial Sequence
  Description of Artificial Sequence: Synthetic oligonucleotide
  Antisense strand to SEQ ID NO: 1298636
ucacaggccauuaucauuu

SEQ ID NO: 1298638 - RNA, 19 nt, Artificial Sequence
  Description of Artificial Sequence: Synthetic oligonucleotide
  Sense strand starting at position 3183 of SEQ ID NO: 1241773
augauaauggccugugaug

SEQ ID NO: 1298639 - RNA, 19 nt, Artificial Sequence
  Description of Artificial Sequence: Synthetic oligonucleotide
  Antisense strand to SEQ ID NO: 1298638
caucacaggccauuaucau

SEQ ID NO: 1298640 - RNA, 19 nt, Artificial Sequence
  Description of Artificial Sequence: Synthetic oligonucleotide
  Sense strand starting at position 3219 of SEQ ID NO: 1241773
cucucugaucuucgacaga

SEQ ID NO: 1298641 - RNA, 19 nt, Artificial Sequence
  Description of Artificial Sequence: Synthetic oligonucleotide
  Antisense strand to SEQ ID NO: 1298640
ucugucgaagaucagagag

SEQ ID NO: 1298642 - RNA, 19 nt, Artificial Sequence
  Description of Artificial Sequence: Synthetic oligonucleotide
  Sense strand starting at position 3261 of SEQ ID NO: 1241773
cccugaagggcucaucaau

SEQ ID NO: 1298643 - RNA, 19 nt, Artificial Sequence
  Description of Artificial Sequence: Synthetic oligonucleotide
  Antisense strand to SEQ ID NO: 1298642
auugaugagcccuucaggg

SEQ ID NO: 1298644 - RNA, 19 nt, Artificial Sequence
  Description of Artificial Sequence: Synthetic oligonucleotide
  Sense strand starting at position 3493 of SEQ ID NO: 1241773
cagauaaaccguggaccaa

SEQ ID NO: 1298645 - RNA, 19 nt, Artificial Sequence
  Description of Artificial Sequence: Synthetic oligonucleotide
  Antisense strand to SEQ ID NO: 1298644
uugguccacgguuuaucug

SEQ ID NO: 1298646 - RNA, 19 nt, Artificial Sequence
  Description of Artificial Sequence: Synthetic oligonucleotide
  Sense strand starting at position 3538 of SEQ ID NO: 1241773
gucauuccauuauuagauu

SEQ ID NO: 1298647 - RNA, 19 nt, Artificial Sequence
  Description of Artificial Sequence: Synthetic oligonucleotide
  Antisense strand to SEQ ID NO: 1298646
aaucuaauaauggaaugac

SEQ ID NO: 1298648 - RNA, 19 nt, Artificial Sequence
  Description of Artificial Sequence: Synthetic oligonucleotide
  Sense strand starting at position 3967 of SEQ ID NO: 1241773
agucucaaacaaugaggua

SEQ ID NO: 1298649 - RNA, 19 nt, Artificial Sequence
  Description of Artificial Sequence: Synthetic oligonucleotide
  Antisense strand to SEQ ID NO: 1298648
uaccucauuguuugagacu

SEQ ID NO: 1298650 - RNA, 19 nt, Artificial Sequence
  Description of Artificial Sequence: Synthetic oligonucleotide
  Sense strand starting at position 27 of SEQ ID NO: 1241774
aaauuaguauggguacuau

SEQ ID NO: 1298651 - RNA, 19 nt, Artificial Sequence
  Description of Artificial Sequence: Synthetic oligonucleotide
  Antisense strand to SEQ ID NO: 1298650
auaguacccauacuaauuu

SEQ ID NO: 1298652 - RNA, 19 nt, Artificial Sequence
  Description of Artificial Sequence: Synthetic oligonucleotide
  Sense strand starting at position 35 of SEQ ID NO: 1241774
auggguacuauccagaugu

SEQ ID NO: 1298653 - RNA, 19 nt, Artificial Sequence
  Description of Artificial Sequence: Synthetic oligonucleotide
  Antisense strand to SEQ ID NO: 1298652
acaucuggauaguacccau

SEQ ID NO: 1298654 - RNA, 19 nt, Artificial Sequence
  Description of Artificial Sequence: Synthetic oligonucleotide
  Sense strand starting at position 37 of SEQ ID NO: 1241774
ggguacuauccagauguuu

SEQ ID NO: 1298655 - RNA, 19 nt, Artificial Sequence
  Description of Artificial Sequence: Synthetic oligonucleotide
  Antisense strand to SEQ ID NO: 1298654
aaacaucuggauaguaccc

SEQ ID NO: 1298656 - RNA, 19 nt, Artificial Sequence
  Description of Artificial Sequence: Synthetic oligonucleotide
  Sense strand starting at position 42 of SEQ ID NO: 1241774
cuauccagauguuuacuau

SEQ ID NO: 1298657 - RNA, 19 nt, Artificial Sequence
  Description of Artificial Sequence: Synthetic oligonucleotide
  Antisense strand to SEQ ID NO: 1298656
auaguaaacaucuggauag

SEQ ID NO: 1298658 - RNA, 19 nt, Artificial Sequence
  Description of Artificial Sequence: Synthetic oligonucleotide
  Sense strand starting at position 54 of SEQ ID NO: 1241774
uuacuaucacuuugagcag

SEQ ID NO: 1298659 - RNA, 19 nt, Artificial Sequence
  Description of Artificial Sequence: Synthetic oligonucleotide
  Antisense strand to SEQ ID NO: 1298658
cugcucaaagugauaguaa

SEQ ID NO: 1298660 - RNA, 19 nt, Artificial Sequence
  Description of Artificial Sequence: Synthetic oligonucleotide
  Sense strand starting at position 57 of SEQ ID NO: 1241774
cuaucacuuugagcagaga

SEQ ID NO: 1298661 - RNA, 19 nt, Artificial Sequence
  Description of Artificial Sequence: Synthetic oligonucleotide
  Antisense strand to SEQ ID NO: 1298660
ucucugcucaaagugauag

SEQ ID NO: 1298662 - RNA, 19 nt, Artificial Sequence
  Description of Artificial Sequence: Synthetic oligonucleotide
  Sense strand starting at position 105 of SEQ ID NO: 1241774
gucuauugaugacuugaaa

SEQ ID NO: 1298663 - RNA, 19 nt, Artificial Sequence
  Description of Artificial Sequence: Synthetic oligonucleotide
  Antisense strand to SEQ ID NO: 1298662
uuucaagucaucaauagac

SEQ ID NO: 1298664 - RNA, 19 nt, Artificial Sequence
  Description of Artificial Sequence: Synthetic oligonucleotide
  Sense strand starting at position 127 of SEQ ID NO: 1241774
gcaccucaaugauuaugga

SEQ ID NO: 1298665 - RNA, 19 nt, Artificial Sequence
  Description of Artificial Sequence: Synthetic oligonucleotide
  Antisense strand to SEQ ID NO: 1298664
uccauaaucauugaggugc

SEQ ID NO: 1298666 - RNA, 19 nt, Artificial Sequence
  Description of Artificial Sequence: Synthetic oligonucleotide
  Sense strand starting at position 150 of SEQ ID NO: 1241774
gcaaauaggccauggcaga

SEQ ID NO: 1298667 - RNA, 19 nt, Artificial Sequence
  Description of Artificial Sequence: Synthetic oligonucleotide
  Antisense strand to SEQ ID NO: 1298666
ucugccauggccuauuugc

SEQ ID NO: 1298668 - RNA, 19 nt, Artificial Sequence
  Description of Artificial Sequence: Synthetic oligonucleotide
  Sense strand starting at position 290 of SEQ ID NO: 1241774
ugucuccuauuugaagaga

SEQ ID NO: 1298669 - RNA, 19 nt, Artificial Sequence
  Description of Artificial Sequence: Synthetic oligonucleotide
  Antisense strand to SEQ ID NO: 1298668
ucucuucaaauaggagaca

SEQ ID NO: 1298670 - RNA, 19 nt, Artificial Sequence
  Description of Artificial Sequence: Synthetic oligonucleotide
  Sense strand starting at position 299 of SEQ ID NO: 1241774
uuugaagagaauuguguac

SEQ ID NO: 1298671 - RNA, 19 nt, Artificial Sequence
  Description of Artificial Sequence: Synthetic oligonucleotide
  Antisense strand to SEQ ID NO: 1298670
guacacaauucucuucaaa

SEQ ID NO: 1298672 - RNA, 19 nt, Artificial Sequence
  Description of Artificial Sequence: Synthetic oligonucleotide
  Sense strand starting at position 351 of SEQ ID NO: 1241774
ugaacuucuuagguuccaa

SEQ ID NO: 1298673 - RNA, 19 nt, Artificial Sequence
  Description of Artificial Sequence: Synthetic oligonucleotide
  Antisense strand to SEQ ID NO: 1298672
uuggaaccuaagaaguuca

SEQ ID NO: 1298674 - RNA, 19 nt, Artificial Sequence
  Description of Artificial Sequence: Synthetic oligonucleotide
  Sense strand starting at position 478 of SEQ ID NO: 1241774
guuucaucugagggauguc

SEQ ID NO: 1298675 - RNA, 19 nt, Artificial Sequence
  Description of Artificial Sequence: Synthetic oligonucleotide
  Antisense strand to SEQ ID NO: 1298674
gacaucccucagaugaaac

SEQ ID NO: 1298676 - RNA, 19 nt, Artificial Sequence
  Description of Artificial Sequence: Synthetic oligonucleotide
  Sense strand starting at position 487 of SEQ ID NO: 1241774
gagggaugucuagguaaca

SEQ ID NO: 1298677 - RNA, 19 nt, Artificial Sequence
  Description of Artificial Sequence: Synthetic oligonucleotide
  Antisense strand to SEQ ID NO: 1298676
uguuaccuagacaucccuc

SEQ ID NO: 1298678 - RNA, 19 nt, Artificial Sequence
  Description of Artificial Sequence: Synthetic oligonucleotide
  Sense strand starting at position 569 of SEQ ID NO: 1241774
gcaucugguaccuggacaa

SEQ ID NO: 1298679 - RNA, 19 nt, Artificial Sequence
  Description of Artificial Sequence: Synthetic oligonucleotide
  Antisense strand to SEQ ID NO: 1298678
uuguccagguaccagaugc

SEQ ID NO: 1298680 - RNA, 19 nt, Artificial Sequence
  Description of Artificial Sequence: Synthetic oligonucleotide
  Sense strand starting at position 616 of SEQ ID NO: 1241774
cuuuaaaguucccugugga

SEQ ID NO: 1298681 - RNA, 19 nt, Artificial Sequence
  Description of Artificial Sequence: Synthetic oligonucleotide
  Antisense strand to SEQ ID NO: 1298680
uccacagggaacuuuaaag

SEQ ID NO: 1298682 - RNA, 19 nt, Artificial Sequence
  Description of Artificial Sequence: Synthetic oligonucleotide
  Sense strand starting at position 617 of SEQ ID NO: 1241774
uuuaaaguucccuguggaa

SEQ ID NO: 1298683 - RNA, 19 nt, Artificial Sequence
  Description of Artificial Sequence: Synthetic oligonucleotide
  Antisense strand to SEQ ID NO: 1298682
uuccacagggaacuuuaaa

SEQ ID NO: 1298684 - RNA, 19 nt, Artificial Sequence
  Description of Artificial Sequence: Synthetic oligonucleotide
  Sense strand starting at position 619 of SEQ ID NO: 1241774
uaaaguucccuguggaaua

SEQ ID NO: 1298685 - RNA, 19 nt, Artificial Sequence
  Description of Artificial Sequence: Synthetic oligonucleotide
  Antisense strand to SEQ ID NO: 1298684
uauuccacagggaacuuua

SEQ ID NO: 1298686 - RNA, 19 nt, Artificial Sequence
  Description of Artificial Sequence: Synthetic oligonucleotide
  Sense strand starting at position 630 of SEQ ID NO: 1241774
guggaauacuuagcuagga

SEQ ID NO: 1298687 - RNA, 19 nt, Artificial Sequence
  Description of Artificial Sequence: Synthetic oligonucleotide
  Antisense strand to SEQ ID NO: 1298686
uccuagcuaaguauuccac

SEQ ID NO: 1298688 - RNA, 19 nt, Artificial Sequence
  Description of Artificial Sequence: Synthetic oligonucleotide
  Sense strand starting at position 631 of SEQ ID NO: 1241774
uggaauacuuagcuaggaa

SEQ ID NO: 1298689 - RNA, 19 nt, Artificial Sequence
  Description of Artificial Sequence: Synthetic oligonucleotide
  Antisense strand to SEQ ID NO: 1298688
uuccuagcuaaguauucca

SEQ ID NO: 1298690 - RNA, 19 nt, Artificial Sequence
  Description of Artificial Sequence: Synthetic oligonucleotide
  Sense strand starting at position 829 of SEQ ID NO: 1241774
gagguuuguagugaacugu

SEQ ID NO: 1298691 - RNA, 19 nt, Artificial Sequence
  Description of Artificial Sequence: Synthetic oligonucleotide
  Antisense strand to SEQ ID NO: 1298690
acaguucacuacaaaccuc

SEQ ID NO: 1298692 - RNA, 19 nt, Artificial Sequence
  Description of Artificial Sequence: Synthetic oligonucleotide
  Sense strand starting at position 985 of SEQ ID NO: 1241774
ggauacugaauucguaaug

SEQ ID NO: 1298693 - RNA, 19 nt, Artificial Sequence
  Description of Artificial Sequence: Synthetic oligonucleotide
  Antisense strand to SEQ ID NO: 1298692
cauuacgaauucaguaucc

SEQ ID NO: 1298694 - RNA, 19 nt, Artificial Sequence
  Description of Artificial Sequence: Synthetic oligonucleotide
  Sense strand starting at position 986 of SEQ ID NO: 1241774
gauacugaauucguaaugu

SEQ ID NO: 1298695 - RNA, 19 nt, Artificial Sequence
  Description of Artificial Sequence: Synthetic oligonucleotide
  Antisense strand to SEQ ID NO: 1298694
acauuacgaauucaguauc

SEQ ID NO: 1298696 - RNA, 19 nt, Artificial Sequence
  Description of Artificial Sequence: Synthetic oligonucleotide
  Sense strand starting at position 994 of SEQ ID NO: 1241774
auucguaaugugcugugua

SEQ ID NO: 1298697 - RNA, 19 nt, Artificial Sequence
  Description of Artificial Sequence: Synthetic oligonucleotide
  Antisense strand to SEQ ID NO: 1298696
uacacagcacauuacgaau

SEQ ID NO: 1298698 - RNA, 19 nt, Artificial Sequence
  Description of Artificial Sequence: Synthetic oligonucleotide
  Sense strand starting at position 996 of SEQ ID NO: 1241774
ucguaaugugcuguguauu

SEQ ID NO: 1298699 - RNA, 19 nt, Artificial Sequence
  Description of Artificial Sequence: Synthetic oligonucleotide
  Antisense strand to SEQ ID NO: 1298698
aauacacagcacauuacga

SEQ ID NO: 1298700 - RNA, 19 nt, Artificial Sequence
  Description of Artificial Sequence: Synthetic oligonucleotide
  Sense strand starting at position 1107 of SEQ ID NO: 1241774
cccaauauacguuagucga

SEQ ID NO: 1298701 - RNA, 19 nt, Artificial Sequence
  Description of Artificial Sequence: Synthetic oligonucleotide
  Antisense strand to SEQ ID NO: 1298700
ucgacuaacguauauuggg

SEQ ID NO: 1298702 - RNA, 19 nt, Artificial Sequence
  Description of Artificial Sequence: Synthetic oligonucleotide
  Sense strand starting at position 1224 of SEQ ID NO: 1241774
cuucgauacauguggaauu

SEQ ID NO: 1298703 - RNA, 19 nt, Artificial Sequence
  Description of Artificial Sequence: Synthetic oligonucleotide
  Antisense strand to SEQ ID NO: 1298702
aauuccacauguaucgaag

SEQ ID NO: 1298704 - RNA, 19 nt, Artificial Sequence
  Description of Artificial Sequence: Synthetic oligonucleotide
  Sense strand starting at position 1339 of SEQ ID NO: 1241774
cccaaauucuacguuugaa

SEQ ID NO: 1298705 - RNA, 19 nt, Artificial Sequence
  Description of Artificial Sequence: Synthetic oligonucleotide
  Antisense strand to SEQ ID NO: 1298704
uucaaacguagaauuuggg

SEQ ID NO: 1298706 - RNA, 19 nt, Artificial Sequence
  Description of Artificial Sequence: Synthetic oligonucleotide
  Sense strand starting at position 1342 of SEQ ID NO: 1241774
aaauucuacguuugaaaga

SEQ ID NO: 1298707 - RNA, 19 nt, Artificial Sequence
  Description of Artificial Sequence: Synthetic oligonucleotide
  Antisense strand to SEQ ID NO: 1298706
ucuuucaaacguagaauuu

SEQ ID NO: 1298708 - RNA, 19 nt, Artificial Sequence
  Description of Artificial Sequence: Synthetic oligonucleotide
  Sense strand starting at position 2027 of SEQ ID NO: 1241774
gcgagagugacagacgauu

SEQ ID NO: 1298709 - RNA, 19 nt, Artificial Sequence
  Description of Artificial Sequence: Synthetic oligonucleotide
  Antisense strand to SEQ ID NO: 1298708
aaucgucugucacucucgc

SEQ ID NO: 1298710 - RNA, 19 nt, Artificial Sequence
  Description of Artificial Sequence: Synthetic oligonucleotide
  Sense strand starting at position 3187 of SEQ ID NO: 1241774
gcugauuggcuugauuacu

SEQ ID NO: 1298711 - RNA, 19 nt, Artificial Sequence
  Description of Artificial Sequence: Synthetic oligonucleotide
  Antisense strand to SEQ ID NO: 1298710
aguaaucaagccaaucagc

SEQ ID NO: 1298712 - RNA, 19 nt, Artificial Sequence
  Description of Artificial Sequence: Synthetic oligonucleotide
  Sense strand starting at position 3375 of SEQ ID NO: 1241774
gacuguguugagggagguu

SEQ ID NO: 1298713 - RNA, 19 nt, Artificial Sequence
  Description of Artificial Sequence: Synthetic oligonucleotide
  Antisense strand to SEQ ID NO: 1298712
aaccucccucaacacaguc

SEQ ID NO: 1298714 - RNA, 19 nt, Artificial Sequence
  Description of Artificial Sequence: Synthetic oligonucleotide
  Sense strand starting at position 3535 of SEQ ID NO: 1241774
cucgauaagccucacauaa

SEQ ID NO: 1298715 - RNA, 19 nt, Artificial Sequence
  Description of Artificial Sequence: Synthetic oligonucleotide
  Antisense strand to SEQ ID NO: 1298714
uuaugugaggcuuaucgag

SEQ ID NO: 1298716 - RNA, 19 nt, Artificial Sequence
  Description of Artificial Sequence: Synthetic oligonucleotide
  Sense strand starting at position 3550 of SEQ ID NO: 1241774
auaaauuucguucgauagu

SEQ ID NO: 1298717 - RNA, 19 nt, Artificial Sequence
  Description of Artificial Sequence: Synthetic oligonucleotide
  Antisense strand to SEQ ID NO: 1298716
acuaucgaacgaaauuuau

SEQ ID NO: 1298718 - RNA, 19 nt, Artificial Sequence
  Description of Artificial Sequence: Synthetic oligonucleotide
  Sense strand starting at position 3738 of SEQ ID NO: 1241774
gugccuauugcagaaacaa

SEQ ID NO: 1298719 - RNA, 19 nt, Artificial Sequence
  Description of Artificial Sequence: Synthetic oligonucleotide
  Antisense strand to SEQ ID NO: 1298718
uuguuucugcaauaggcac

SEQ ID NO: 1298720 - RNA, 19 nt, Artificial Sequence
  Description of Artificial Sequence: Synthetic oligonucleotide
  Sense strand starting at position 3785 of SEQ ID NO: 1241774
gcuuaauaucuggaaccua

SEQ ID NO: 1298721 - RNA, 19 nt, Artificial Sequence
  Description of Artificial Sequence: Synthetic oligonucleotide
  Antisense strand to SEQ ID NO: 1298720
uagguuccagauauuaagc

SEQ ID NO: 1298722 - RNA, 19 nt, Artificial Sequence
  Description of Artificial Sequence: Synthetic oligonucleotide
  Sense strand starting at position 3848 of SEQ ID NO: 1241774
cauuguucugcagcgcuua

SEQ ID NO: 1298723 - RNA, 19 nt, Artificial Sequence
  Description of Artificial Sequence: Synthetic oligonucleotide
  Antisense strand to SEQ ID NO: 1298722
uaagcgcugcagaacaaug

SEQ ID NO: 1298724 - RNA, 19 nt, Artificial Sequence
  Description of Artificial Sequence: Synthetic oligonucleotide
  Sense strand starting at position 3889 of SEQ ID NO: 1241774
gguuugggaguguaagguu

SEQ ID NO: 1298725 - RNA, 19 nt, Artificial Sequence
  Description of Artificial Sequence: Synthetic oligonucleotide
  Antisense strand to SEQ ID NO: 1298724
aaccuuacacucccaaacc

SEQ ID NO: 1298726 - RNA, 19 nt, Artificial Sequence
  Description of Artificial Sequence: Synthetic oligonucleotide
  Sense strand starting at position 3917 of SEQ ID NO: 1241774
gugugucagcuugugguau

SEQ ID NO: 1298727 - RNA, 19 nt, Artificial Sequence
  Description of Artificial Sequence: Synthetic oligonucleotide
  Antisense strand to SEQ ID NO: 1298726
auaccacaagcugacacac

SEQ ID NO: 1298728 - RNA, 19 nt, Artificial Sequence
  Description of Artificial Sequence: Synthetic oligonucleotide
  Sense strand starting at position 3925 of SEQ ID NO: 1241774
gcuugugguauuuaagcca

SEQ ID NO: 1298729 - RNA, 19 nt, Artificial Sequence
  Description of Artificial Sequence: Synthetic oligonucleotide
  Antisense strand to SEQ ID NO: 1298728
uggcuuaaauaccacaagc

SEQ ID NO: 1298730 - RNA, 19 nt, Artificial Sequence
  Description of Artificial Sequence: Synthetic oligonucleotide
  Sense strand starting at position 262 of SEQ ID NO: 1241775
auauguauaagagguauag

SEQ ID NO: 1298731 - RNA, 19 nt, Artificial Sequence
  Description of Artificial Sequence: Synthetic oligonucleotide
  Antisense strand to SEQ ID NO: 1298730
cuauaccucuuauacauau

SEQ ID NO: 1298732 - RNA, 19 nt, Artificial Sequence
  Description of Artificial Sequence: Synthetic oligonucleotide
  Sense strand starting at position 264 of SEQ ID NO: 1241775
auguauaagagguauaguu

SEQ ID NO: 1298733 - RNA, 19 nt, Artificial Sequence
  Description of Artificial Sequence: Synthetic oligonucleotide
  Antisense strand to SEQ ID NO: 1298732
aacuauaccucuuauacau

SEQ ID NO: 1298734 - RNA, 19 nt, Artificial Sequence
  Description of Artificial Sequence: Synthetic oligonucleotide
  Sense strand starting at position 266 of SEQ ID NO: 1241775
guauaagagguauaguuac

SEQ ID NO: 1298735 - RNA, 19 nt, Artificial Sequence
  Description of Artificial Sequence: Synthetic oligonucleotide
  Antisense strand to SEQ ID NO: 1298734
guaacuauaccucuuauac

SEQ ID NO: 1298736 - RNA, 19 nt, Artificial Sequence
  Description of Artificial Sequence: Synthetic oligonucleotide
  Sense strand starting at position 322 of SEQ ID NO: 1241775
ccgggaugccaguaagguu

SEQ ID NO: 1298737 - RNA, 19 nt, Artificial Sequence
  Description of Artificial Sequence: Synthetic oligonucleotide
  Antisense strand to SEQ ID NO: 1298736
aaccuuacuggcaucccgg

SEQ ID NO: 1298738 - RNA, 19 nt, Artificial Sequence
  Description of Artificial Sequence: Synthetic oligonucleotide
  Sense strand starting at position 330 of SEQ ID NO: 1241775
ccaguaagguucuauuucu

SEQ ID NO: 1298739 - RNA, 19 nt, Artificial Sequence
  Description of Artificial Sequence: Synthetic oligonucleotide
  Antisense strand to SEQ ID NO: 1298738
agaaauagaaccuuacugg

SEQ ID NO: 1298740 - RNA, 19 nt, Artificial Sequence
  Description of Artificial Sequence: Synthetic oligonucleotide
  Sense strand starting at position 449 of SEQ ID NO: 1241775
ucaagcuguguacaugauu

SEQ ID NO: 1298741 - RNA, 19 nt, Artificial Sequence
  Description of Artificial Sequence: Synthetic oligonucleotide
  Antisense strand to SEQ ID NO: 1298740
aaucauguacacagcuuga

SEQ ID NO: 1298742 - RNA, 19 nt, Artificial Sequence
  Description of Artificial Sequence: Synthetic oligonucleotide
  Sense strand starting at position 456 of SEQ ID NO: 1241775
guguacaugauuugugcaa

SEQ ID NO: 1298743 - RNA, 19 nt, Artificial Sequence
  Description of Artificial Sequence: Synthetic oligonucleotide
  Antisense strand to SEQ ID NO: 1298742
uugcacaaaucauguacac

SEQ ID NO: 1298744 - RNA, 19 nt, Artificial Sequence
  Description of Artificial Sequence: Synthetic oligonucleotide
  Sense strand starting at position 647 of SEQ ID NO: 1241775
gggcuaugucuggauacca

SEQ ID NO: 1298745 - RNA, 19 nt, Artificial Sequence
  Description of Artificial Sequence: Synthetic oligonucleotide
  Antisense strand to SEQ ID NO: 1298744
ugguauccagacauagccc

SEQ ID NO: 1298746 - RNA, 19 nt, Artificial Sequence
  Description of Artificial Sequence: Synthetic oligonucleotide
  Sense strand starting at position 683 of SEQ ID NO: 1241775
agcacuuugcaguguaaac

SEQ ID NO: 1298747 - RNA, 19 nt, Artificial Sequence
  Description of Artificial Sequence: Synthetic oligonucleotide
  Antisense strand to SEQ ID NO: 1298746
guuuacacugcaaagugcu

SEQ ID NO: 1298748 - RNA, 19 nt, Artificial Sequence
  Description of Artificial Sequence: Synthetic oligonucleotide
  Sense strand starting at position 696 of SEQ ID NO: 1241775
guaaacuaaccuuggucaa

SEQ ID NO: 1298749 - RNA, 19 nt, Artificial Sequence
  Description of Artificial Sequence: Synthetic oligonucleotide
  Antisense strand to SEQ ID NO: 1298748
uugaccaagguuaguuuac

SEQ ID NO: 1298750 - RNA, 19 nt, Artificial Sequence
  Description of Artificial Sequence: Synthetic oligonucleotide
  Sense strand starting at position 724 of SEQ ID NO: 1241775
cugguauuaugaucucagu

SEQ ID NO: 1298751 - RNA, 19 nt, Artificial Sequence
  Description of Artificial Sequence: Synthetic oligonucleotide
  Antisense strand to SEQ ID NO: 1298750
acugagaucauaauaccag

SEQ ID NO: 1298752 - RNA, 19 nt, Artificial Sequence
  Description of Artificial Sequence: Synthetic oligonucleotide
  Sense strand starting at position 831 of SEQ ID NO: 1241775
auucucauccuuugucagu

SEQ ID NO: 1298753 - RNA, 19 nt, Artificial Sequence
  Description of Artificial Sequence: Synthetic oligonucleotide
  Antisense strand to SEQ ID NO: 1298752
acugacaaaggaugagaau

SEQ ID NO: 1298754 - RNA, 19 nt, Artificial Sequence
  Description of Artificial Sequence: Synthetic oligonucleotide
  Sense strand starting at position 892 of SEQ ID NO: 1241775
uagggugagucacuaaaca

SEQ ID NO: 1298755 - RNA, 19 nt, Artificial Sequence
  Description of Artificial Sequence: Synthetic oligonucleotide
  Antisense strand to SEQ ID NO: 1298754
uguuuagugacucacccua

SEQ ID NO: 1298756 - RNA, 19 nt, Artificial Sequence
  Description of Artificial Sequence: Synthetic oligonucleotide
  Sense strand starting at position 1045 of SEQ ID NO: 1241775
gcagacugcagauagacau

SEQ ID NO: 1298757 - RNA, 19 nt, Artificial Sequence
  Description of Artificial Sequence: Synthetic oligonucleotide
  Antisense strand to SEQ ID NO: 1298756
augucuaucugcagucugc

SEQ ID NO: 1298758 - RNA, 19 nt, Artificial Sequence
  Description of Artificial Sequence: Synthetic oligonucleotide
  Sense strand starting at position 1112 of SEQ ID NO: 1241775
gcuagcacuuguccaacua

SEQ ID NO: 1298759 - RNA, 19 nt, Artificial Sequence
  Description of Artificial Sequence: Synthetic oligonucleotide
  Antisense strand to SEQ ID NO: 1298758
uaguuggacaagugcuagc

SEQ ID NO: 1298760 - RNA, 19 nt, Artificial Sequence
  Description of Artificial Sequence: Synthetic oligonucleotide
  Sense strand starting at position 1137 of SEQ ID NO: 1241775
agaggaacuagcugucaag

SEQ ID NO: 1298761 - RNA, 19 nt, Artificial Sequence
  Description of Artificial Sequence: Synthetic oligonucleotide
  Antisense strand to SEQ ID NO: 1298760
cuugacagcuaguuccucu

SEQ ID NO: 1298762 - RNA, 19 nt, Artificial Sequence
  Description of Artificial Sequence: Synthetic oligonucleotide
  Sense strand starting at position 1152 of SEQ ID NO: 1241775
caaggagcucaccgcaaau

SEQ ID NO: 1298763 - RNA, 19 nt, Artificial Sequence
  Description of Artificial Sequence: Synthetic oligonucleotide
  Antisense strand to SEQ ID NO: 1298762
auuugcggugagcuccuug

SEQ ID NO: 1298764 - RNA, 19 nt, Artificial Sequence
  Description of Artificial Sequence: Synthetic oligonucleotide
  Sense strand starting at position 1162 of SEQ ID NO: 1241775
accgcaaaucccuauggau

SEQ ID NO: 1298765 - RNA, 19 nt, Artificial Sequence
  Description of Artificial Sequence: Synthetic oligonucleotide
  Antisense strand to SEQ ID NO: 1298764
auccauagggauuugcggu

SEQ ID NO: 1298766 - RNA, 19 nt, Artificial Sequence
  Description of Artificial Sequence: Synthetic oligonucleotide
  Sense strand starting at position 1206 of SEQ ID NO: 1241775
cccauucggucccuaauaa

SEQ ID NO: 1298767 - RNA, 19 nt, Artificial Sequence
  Description of Artificial Sequence: Synthetic oligonucleotide
  Antisense strand to SEQ ID NO: 1298766
uuauuagggaccgaauggg

SEQ ID NO: 1298768 - RNA, 19 nt, Artificial Sequence
  Description of Artificial Sequence: Synthetic oligonucleotide
  Sense strand starting at position 1207 of SEQ ID NO: 1241775
ccauucggucccuaauaaa

SEQ ID NO: 1298769 - RNA, 19 nt, Artificial Sequence
  Description of Artificial Sequence: Synthetic oligonucleotide
  Antisense strand to SEQ ID NO: 1298768
uuuauuagggaccgaaugg

SEQ ID NO: 1298770 - RNA, 19 nt, Artificial Sequence
  Description of Artificial Sequence: Synthetic oligonucleotide
  Sense strand starting at position 1235 of SEQ ID NO: 1241775
aaauaaucuuaggauggga

SEQ ID NO: 1298771 - RNA, 19 nt, Artificial Sequence
  Description of Artificial Sequence: Synthetic oligonucleotide
  Antisense strand to SEQ ID NO: 1298770
ucccauccuaagauuauuu

SEQ ID NO: 1298772 - RNA, 19 nt, Artificial Sequence
  Description of Artificial Sequence: Synthetic oligonucleotide
  Sense strand starting at position 1262 of SEQ ID NO: 1241775
gacaaagaugucuggaucu

SEQ ID NO: 1298773 - RNA, 19 nt, Artificial Sequence
  Description of Artificial Sequence: Synthetic oligonucleotide
  Antisense strand to SEQ ID NO: 1298772
agauccagacaucuuuguc

SEQ ID NO: 1298774 - RNA, 19 nt, Artificial Sequence
  Description of Artificial Sequence: Synthetic oligonucleotide
  Sense strand starting at position 2142 of SEQ ID NO: 1241775
ggacaugguaacggaauua

SEQ ID NO: 1298775 - RNA, 19 nt, Artificial Sequence
  Description of Artificial Sequence: Synthetic oligonucleotide
  Antisense strand to SEQ ID NO: 1298774
uaauuccguuaccaugucc

SEQ ID NO: 1298776 - RNA, 19 nt, Artificial Sequence
  Description of Artificial Sequence: Synthetic oligonucleotide
  Sense strand starting at position 2322 of SEQ ID NO: 1241775
caaagugagccucgaggaa

SEQ ID NO: 1298777 - RNA, 19 nt, Artificial Sequence
  Description of Artificial Sequence: Synthetic oligonucleotide
  Antisense strand to SEQ ID NO: 1298776
uuccucgaggcucacuuug

SEQ ID NO: 1298778 - RNA, 19 nt, Artificial Sequence
  Description of Artificial Sequence: Synthetic oligonucleotide
  Sense strand starting at position 2582 of SEQ ID NO: 1241775
caucgcuauuucguuuauu

SEQ ID NO: 1298779 - RNA, 19 nt, Artificial Sequence
  Description of Artificial Sequence: Synthetic oligonucleotide
  Antisense strand to SEQ ID NO: 1298778
aauaaacgaaauagcgaug

SEQ ID NO: 1298780 - RNA, 19 nt, Artificial Sequence
  Description of Artificial Sequence: Synthetic oligonucleotide
  Sense strand starting at position 2659 of SEQ ID NO: 1241775
gaggaagaaugaggugaau

SEQ ID NO: 1298781 - RNA, 19 nt, Artificial Sequence
  Description of Artificial Sequence: Synthetic oligonucleotide
  Antisense strand to SEQ ID NO: 1298780
auucaccucauucuuccuc

SEQ ID NO: 1298782 - RNA, 19 nt, Artificial Sequence
  Description of Artificial Sequence: Synthetic oligonucleotide
  Sense strand starting at position 3177 of SEQ ID NO: 1241775
cagacauacuuggaagagu

SEQ ID NO: 1298783 - RNA, 19 nt, Artificial Sequence
  Description of Artificial Sequence: Synthetic oligonucleotide
  Antisense strand to SEQ ID NO: 1298782
acucuuccaaguaugucug

SEQ ID NO: 1298784 - RNA, 19 nt, Artificial Sequence
  Description of Artificial Sequence: Synthetic oligonucleotide
  Sense strand starting at position 3293 of SEQ ID NO: 1241775
guaggugcaguuugaaagu

SEQ ID NO: 1298785 - RNA, 19 nt, Artificial Sequence
  Description of Artificial Sequence: Synthetic oligonucleotide
  Antisense strand to SEQ ID NO: 1298784
acuuucaaacugcaccuac

SEQ ID NO: 1298786 - RNA, 19 nt, Artificial Sequence
  Description of Artificial Sequence: Synthetic oligonucleotide
  Sense strand starting at position 3299 of SEQ ID NO: 1241775
gcaguuugaaaguagaaac

SEQ ID NO: 1298787 - RNA, 19 nt, Artificial Sequence
  Description of Artificial Sequence: Synthetic oligonucleotide
  Antisense strand to SEQ ID NO: 1298786
guuucuacuuucaaacugc

SEQ ID NO: 1298788 - RNA, 19 nt, Artificial Sequence
  Description of Artificial Sequence: Synthetic oligonucleotide
  Sense strand starting at position 3360 of SEQ ID NO: 1241775
cagaaauaggcagguacuu

SEQ ID NO: 1298789 - RNA, 19 nt, Artificial Sequence
  Description of Artificial Sequence: Synthetic oligonucleotide
  Antisense strand to SEQ ID NO: 1298788
aaguaccugccuauuucug

SEQ ID NO: 1298790 - RNA, 19 nt, Artificial Sequence
  Description of Artificial Sequence: Synthetic oligonucleotide
  Sense strand starting at position 3717 of SEQ ID NO: 1241775
auauuagagucaggauuua

SEQ ID NO: 1298791 - RNA, 19 nt, Artificial Sequence
  Description of Artificial Sequence: Synthetic oligonucleotide
  Antisense strand to SEQ ID NO: 1298790
uaaauccugacucuaauau

SEQ ID NO: 1298792 - RNA, 19 nt, Artificial Sequence
  Description of Artificial Sequence: Synthetic oligonucleotide
  Sense strand starting at position 3767 of SEQ ID NO: 1241775
uccuuccaucuugggaaau

SEQ ID NO: 1298793 - RNA, 19 nt, Artificial Sequence
  Description of Artificial Sequence: Synthetic oligonucleotide
  Antisense strand to SEQ ID NO: 1298792
auuucccaagauggaagga

SEQ ID NO: 1298794 - RNA, 19 nt, Artificial Sequence
  Description of Artificial Sequence: Synthetic oligonucleotide
  Sense strand starting at position 3786 of SEQ ID NO: 1241775
acaucuugauaauauggau

SEQ ID NO: 1298795 - RNA, 19 nt, Artificial Sequence
  Description of Artificial Sequence: Synthetic oligonucleotide
  Antisense strand to SEQ ID NO: 1298794
auccauauuaucaagaugu

SEQ ID NO: 1298796 - RNA, 19 nt, Artificial Sequence
  Description of Artificial Sequence: Synthetic oligonucleotide
  Sense strand starting at position 3798 of SEQ ID NO: 1241775
uauggauguuggcuauaau

SEQ ID NO: 1298797 - RNA, 19 nt, Artificial Sequence
  Description of Artificial Sequence: Synthetic oligonucleotide
  Antisense strand to SEQ ID NO: 1298796
auuauagccaacauccaua

SEQ ID NO: 1298798 - RNA, 19 nt, Artificial Sequence
  Description of Artificial Sequence: Synthetic oligonucleotide
  Sense strand starting at position 3799 of SEQ ID NO: 1241775
auggauguuggcuauaauc

SEQ ID NO: 1298799 - RNA, 19 nt, Artificial Sequence
  Description of Artificial Sequence: Synthetic oligonucleotide
  Antisense strand to SEQ ID NO: 1298798
gauuauagccaacauccau

SEQ ID NO: 1298800 - RNA, 19 nt, Artificial Sequence
  Description of Artificial Sequence: Synthetic oligonucleotide
  Sense strand starting at position 3801 of SEQ ID NO: 1241775
ggauguuggcuauaaucaa

SEQ ID NO: 1298801 - RNA, 19 nt, Artificial Sequence
  Description of Artificial Sequence: Synthetic oligonucleotide
  Antisense strand to SEQ ID NO: 1298800
uugauuauagccaacaucc

SEQ ID NO: 1298802 - RNA, 19 nt, Artificial Sequence
  Description of Artificial Sequence: Synthetic oligonucleotide
  Sense strand starting at position 3829 of SEQ ID NO: 1241775
uaacaaguguuggcuggaa

SEQ ID NO: 1298803 - RNA, 19 nt, Artificial Sequence
  Description of Artificial Sequence: Synthetic oligonucleotide
  Antisense strand to SEQ ID NO: 1298802
uuccagccaacacuuguua

SEQ ID NO: 1298804 - RNA, 19 nt, Artificial Sequence
  Description of Artificial Sequence: Synthetic oligonucleotide
  Sense strand starting at position 3831 of SEQ ID NO: 1241775
acaaguguuggcuggaaug

SEQ ID NO: 1298805 - RNA, 19 nt, Artificial Sequence
  Description of Artificial Sequence: Synthetic oligonucleotide
  Antisense strand to SEQ ID NO: 1298804
cauuccagccaacacuugu

SEQ ID NO: 1298806 - RNA, 19 nt, Artificial Sequence
  Description of Artificial Sequence: Synthetic oligonucleotide
  Sense strand starting at position 3834 of SEQ ID NO: 1241775
aguguuggcuggaauguga

SEQ ID NO: 1298807 - RNA, 19 nt, Artificial Sequence
  Description of Artificial Sequence: Synthetic oligonucleotide
  Antisense strand to SEQ ID NO: 1298806
ucacauuccagccaacacu

SEQ ID NO: 1298808 - RNA, 19 nt, Artificial Sequence
  Description of Artificial Sequence: Synthetic oligonucleotide
  Sense strand starting at position 3894 of SEQ ID NO: 1241775
caguguaaccacugggaaa

SEQ ID NO: 1298809 - RNA, 19 nt, Artificial Sequence
  Description of Artificial Sequence: Synthetic oligonucleotide
  Antisense strand to SEQ ID NO: 1298808
uuucccagugguuacacug

SEQ ID NO: 1298810 - RNA, 19 nt, Artificial Sequence
  Description of Artificial Sequence: Synthetic oligonucleotide
  Sense strand starting at position 29 of SEQ ID NO: 1241776
acuagaagucuccagcugu

SEQ ID NO: 1298811 - RNA, 19 nt, Artificial Sequence
  Description of Artificial Sequence: Synthetic oligonucleotide
  Antisense strand to SEQ ID NO: 1298810
acagcuggagacuucuagu

SEQ ID NO: 1298812 - RNA, 19 nt, Artificial Sequence
  Description of Artificial Sequence: Synthetic oligonucleotide
  Sense strand starting at position 159 of SEQ ID NO: 1241776
agaauucuauuguuguuga

SEQ ID NO: 1298813 - RNA, 19 nt, Artificial Sequence
  Description of Artificial Sequence: Synthetic oligonucleotide
  Antisense strand to SEQ ID NO: 1298812
ucaacaacaauagaauucu

SEQ ID NO: 1298814 - RNA, 19 nt, Artificial Sequence
  Description of Artificial Sequence: Synthetic oligonucleotide
  Sense strand starting at position 197 of SEQ ID NO: 1241776
uuuaaauuguggcuaggaa

SEQ ID NO: 1298815 - RNA, 19 nt, Artificial Sequence
  Description of Artificial Sequence: Synthetic oligonucleotide
  Antisense strand to SEQ ID NO: 1298814
uuccuagccacaauuuaaa

SEQ ID NO: 1298816 - RNA, 19 nt, Artificial Sequence
  Description of Artificial Sequence: Synthetic oligonucleotide
  Sense strand starting at position 377 of SEQ ID NO: 1241776
auacuauauacgugggauu

SEQ ID NO: 1298817 - RNA, 19 nt, Artificial Sequence
  Description of Artificial Sequence: Synthetic oligonucleotide
  Antisense strand to SEQ ID NO: 1298816
aaucccacguauauaguau

SEQ ID NO: 1298818 - RNA, 19 nt, Artificial Sequence
  Description of Artificial Sequence: Synthetic oligonucleotide
  Sense strand starting at position 456 of SEQ ID NO: 1241776
uguggaaugugaguauaag

SEQ ID NO: 1298819 - RNA, 19 nt, Artificial Sequence
  Description of Artificial Sequence: Synthetic oligonucleotide
  Antisense strand to SEQ ID NO: 1298818
cuuauacucacauuccaca

SEQ ID NO: 1298820 - RNA, 19 nt, Artificial Sequence
  Description of Artificial Sequence: Synthetic oligonucleotide
  Sense strand starting at position 551 of SEQ ID NO: 1241776
cguguuguucaaguguuaa

SEQ ID NO: 1298821 - RNA, 19 nt, Artificial Sequence
  Description of Artificial Sequence: Synthetic oligonucleotide
  Antisense strand to SEQ ID NO: 1298820
uuaacacuugaacaacacg

SEQ ID NO: 1298822 - RNA, 19 nt, Artificial Sequence
  Description of Artificial Sequence: Synthetic oligonucleotide
  Sense strand starting at position 685 of SEQ ID NO: 1241776
uggacacucagagguaauc

SEQ ID NO: 1298823 - RNA, 19 nt, Artificial Sequence
  Description of Artificial Sequence: Synthetic oligonucleotide
  Antisense strand to SEQ ID NO: 1298822
gauuaccucugagugucca

SEQ ID NO: 1298824 - RNA, 19 nt, Artificial Sequence
  Description of Artificial Sequence: Synthetic oligonucleotide
  Sense strand starting at position 696 of SEQ ID NO: 1241776
agguaaucauuggcuccaa

SEQ ID NO: 1298825 - RNA, 19 nt, Artificial Sequence
  Description of Artificial Sequence: Synthetic oligonucleotide
  Antisense strand to SEQ ID NO: 1298824
uuggagccaaugauuaccu

SEQ ID NO: 1298826 - RNA, 19 nt, Artificial Sequence
  Description of Artificial Sequence: Synthetic oligonucleotide
  Sense strand starting at position 1022 of SEQ ID NO: 1241776
augauauugucuccaacug

SEQ ID NO: 1298827 - RNA, 19 nt, Artificial Sequence
  Description of Artificial Sequence: Synthetic oligonucleotide
  Antisense strand to SEQ ID NO: 1298826
caguuggagacaauaucau

SEQ ID NO: 1298828 - RNA, 19 nt, Artificial Sequence
  Description of Artificial Sequence: Synthetic oligonucleotide
  Sense strand starting at position 1023 of SEQ ID NO: 1241776
ugauauugucuccaacuga

SEQ ID NO: 1298829 - RNA, 19 nt, Artificial Sequence
  Description of Artificial Sequence: Synthetic oligonucleotide
  Antisense strand to SEQ ID NO: 1298828
ucaguuggagacaauauca

SEQ ID NO: 1298830 - RNA, 19 nt, Artificial Sequence
  Description of Artificial Sequence: Synthetic oligonucleotide
  Sense strand starting at position 1065 of SEQ ID NO: 1241776
agggucaagagaugguuaa

SEQ ID NO: 1298831 - RNA, 19 nt, Artificial Sequence
  Description of Artificial Sequence: Synthetic oligonucleotide
  Antisense strand to SEQ ID NO: 1298830
uuaaccaucucuugacccu

SEQ ID NO: 1298832 - RNA, 19 nt, Artificial Sequence
  Description of Artificial Sequence: Synthetic oligonucleotide
  Sense strand starting at position 1066 of SEQ ID NO: 1241776
gggucaagagaugguuaaa

SEQ ID NO: 1298833 - RNA, 19 nt, Artificial Sequence
  Description of Artificial Sequence: Synthetic oligonucleotide
  Antisense strand to SEQ ID NO: 1298832
uuuaaccaucucuugaccc

SEQ ID NO: 1298834 - RNA, 19 nt, Artificial Sequence
  Description of Artificial Sequence: Synthetic oligonucleotide
  Sense strand starting at position 1176 of SEQ ID NO: 1241776
uuguuaaacaauggguaga

SEQ ID NO: 1298835 - RNA, 19 nt, Artificial Sequence
  Description of Artificial Sequence: Synthetic oligonucleotide
  Antisense strand to SEQ ID NO: 1298834
ucuacccauuguuuaacaa

SEQ ID NO: 1298836 - RNA, 19 nt, Artificial Sequence
  Description of Artificial Sequence: Synthetic oligonucleotide
  Sense strand starting at position 1237 of SEQ ID NO: 1241776
guugcuaaugucuaucaga

SEQ ID NO: 1298837 - RNA, 19 nt, Artificial Sequence
  Description of Artificial Sequence: Synthetic oligonucleotide
  Antisense strand to SEQ ID NO: 1298836
ucugauagacauuagcaac

SEQ ID NO: 1298838 - RNA, 19 nt, Artificial Sequence
  Description of Artificial Sequence: Synthetic oligonucleotide
  Sense strand starting at position 1316 of SEQ ID NO: 1241776
gcuugccuacuuguuagua

SEQ ID NO: 1298839 - RNA, 19 nt, Artificial Sequence
  Description of Artificial Sequence: Synthetic oligonucleotide
  Antisense strand to SEQ ID NO: 1298838
uacuaacaaguaggcaagc

SEQ ID NO: 1298840 - RNA, 19 nt, Artificial Sequence
  Description of Artificial Sequence: Synthetic oligonucleotide
  Sense strand starting at position 1400 of SEQ ID NO: 1241776
guggcuuuggcguucaaau

SEQ ID NO: 1298841 - RNA, 19 nt, Artificial Sequence
  Description of Artificial Sequence: Synthetic oligonucleotide
  Antisense strand to SEQ ID NO: 1298840
auuugaacgccaaagccac

SEQ ID NO: 1298842 - RNA, 19 nt, Artificial Sequence
  Description of Artificial Sequence: Synthetic oligonucleotide
  Sense strand starting at position 1469 of SEQ ID NO: 1241776
uuuguuauugcaucgcuga

SEQ ID NO: 1298843 - RNA, 19 nt, Artificial Sequence
  Description of Artificial Sequence: Synthetic oligonucleotide
  Antisense strand to SEQ ID NO: 1298842
ucagcgaugcaauaacaaa

SEQ ID NO: 1298844 - RNA, 19 nt, Artificial Sequence
  Description of Artificial Sequence: Synthetic oligonucleotide
  Sense strand starting at position 1682 of SEQ ID NO: 1241776
cagacaagugcuuacgaua

SEQ ID NO: 1298845 - RNA, 19 nt, Artificial Sequence
  Description of Artificial Sequence: Synthetic oligonucleotide
  Antisense strand to SEQ ID NO: 1298844
uaucguaagcacuugucug

SEQ ID NO: 1298846 - RNA, 19 nt, Artificial Sequence
  Description of Artificial Sequence: Synthetic oligonucleotide
  Sense strand starting at position 1687 of SEQ ID NO: 1241776
aagugcuuacgauagacaa

SEQ ID NO: 1298847 - RNA, 19 nt, Artificial Sequence
  Description of Artificial Sequence: Synthetic oligonucleotide
  Antisense strand to SEQ ID NO: 1298846
uugucuaucguaagcacuu

SEQ ID NO: 1298848 - RNA, 19 nt, Artificial Sequence
  Description of Artificial Sequence: Synthetic oligonucleotide
  Sense strand starting at position 1689 of SEQ ID NO: 1241776
gugcuuacgauagacaagu

SEQ ID NO: 1298849 - RNA, 19 nt, Artificial Sequence
  Description of Artificial Sequence: Synthetic oligonucleotide
  Antisense strand to SEQ ID NO: 1298848
acuugucuaucguaagcac

SEQ ID NO: 1298850 - RNA, 19 nt, Artificial Sequence
  Description of Artificial Sequence: Synthetic oligonucleotide
  Sense strand starting at position 2922 of SEQ ID NO: 1241776
uuacuauugcgggauaaac

SEQ ID NO: 1298851 - RNA, 19 nt, Artificial Sequence
  Description of Artificial Sequence: Synthetic oligonucleotide
  Antisense strand to SEQ ID NO: 1298850
guuuaucccgcaauaguaa

SEQ ID NO: 1298852 - RNA, 19 nt, Artificial Sequence
  Description of Artificial Sequence: Synthetic oligonucleotide
  Sense strand starting at position 2930 of SEQ ID NO: 1241776
gcgggauaaaccuggaauu

SEQ ID NO: 1298853 - RNA, 19 nt, Artificial Sequence
  Description of Artificial Sequence: Synthetic oligonucleotide
  Antisense strand to SEQ ID NO: 1298852
aauuccagguuuaucccgc

SEQ ID NO: 1298854 - RNA, 19 nt, Artificial Sequence
  Description of Artificial Sequence: Synthetic oligonucleotide
  Sense strand starting at position 2969 of SEQ ID NO: 1241776
ggagacaauaccgaguguu

SEQ ID NO: 1298855 - RNA, 19 nt, Artificial Sequence
  Description of Artificial Sequence: Synthetic oligonucleotide
  Antisense strand to SEQ ID NO: 1298854
aacacucgguauugucucc

SEQ ID NO: 1298856 - RNA, 19 nt, Artificial Sequence
  Description of Artificial Sequence: Synthetic oligonucleotide
  Sense strand starting at position 2972 of SEQ ID NO: 1241776
gacaauaccgaguguuuga

SEQ ID NO: 1298857 - RNA, 19 nt, Artificial Sequence
  Description of Artificial Sequence: Synthetic oligonucleotide
  Antisense strand to SEQ ID NO: 1298856
ucaaacacucgguauuguc

SEQ ID NO: 1298858 - RNA, 19 nt, Artificial Sequence
  Description of Artificial Sequence: Synthetic oligonucleotide
  Sense strand starting at position 2975 of SEQ ID NO: 1241776
aauaccgaguguuugauaa

SEQ ID NO: 1298859 - RNA, 19 nt, Artificial Sequence
  Description of Artificial Sequence: Synthetic oligonucleotide
  Antisense strand to SEQ ID NO: 1298858
uuaucaaacacucgguauu

SEQ ID NO: 1298860 - RNA, 19 nt, Artificial Sequence
  Description of Artificial Sequence: Synthetic oligonucleotide
  Sense strand starting at position 3016 of SEQ ID NO: 1241776
ggacuacuugaauggcaaa

SEQ ID NO: 1298861 - RNA, 19 nt, Artificial Sequence
  Description of Artificial Sequence: Synthetic oligonucleotide
  Antisense strand to SEQ ID NO: 1298860
uuugccauucaaguagucc

SEQ ID NO: 1298862 - RNA, 19 nt, Artificial Sequence
  Description of Artificial Sequence: Synthetic oligonucleotide
  Sense strand starting at position 3065 of SEQ ID NO: 1241776
caguguuugcuagcuuuac

SEQ ID NO: 1298863 - RNA, 19 nt, Artificial Sequence
  Description of Artificial Sequence: Synthetic oligonucleotide
  Antisense strand to SEQ ID NO: 1298862
guaaagcuagcaaacacug

SEQ ID NO: 1298864 - RNA, 19 nt, Artificial Sequence
  Description of Artificial Sequence: Synthetic oligonucleotide
  Sense strand starting at position 3182 of SEQ ID NO: 1241776
uaauaaguacucuggagua

SEQ ID NO: 1298865 - RNA, 19 nt, Artificial Sequence
  Description of Artificial Sequence: Synthetic oligonucleotide
  Antisense strand to SEQ ID NO: 1298864
uacuccagaguacuuauua

SEQ ID NO: 1298866 - RNA, 19 nt, Artificial Sequence
  Description of Artificial Sequence: Synthetic oligonucleotide
  Sense strand starting at position 3222 of SEQ ID NO: 1241776
cuugguuaucuacaccaga

SEQ ID NO: 1298867 - RNA, 19 nt, Artificial Sequence
  Description of Artificial Sequence: Synthetic oligonucleotide
  Antisense strand to SEQ ID NO: 1298866
ucugguguagauaaccaag

SEQ ID NO: 1298868 - RNA, 19 nt, Artificial Sequence
  Description of Artificial Sequence: Synthetic oligonucleotide
  Sense strand starting at position 3654 of SEQ ID NO: 1241776
aucuguuuccuuuagauug

SEQ ID NO: 1298869 - RNA, 19 nt, Artificial Sequence
  Description of Artificial Sequence: Synthetic oligonucleotide
  Antisense strand to SEQ ID NO: 1298868
caaucuaaaggaaacagau

SEQ ID NO: 1298870 - RNA, 19 nt, Artificial Sequence
  Description of Artificial Sequence: Synthetic oligonucleotide
  Sense strand starting at position 3661 of SEQ ID NO: 1241776
uccuuuagauugcugaaau

SEQ ID NO: 1298871 - RNA, 19 nt, Artificial Sequence
  Description of Artificial Sequence: Synthetic oligonucleotide
  Antisense strand to SEQ ID NO: 1298870
auuucagcaaucuaaagga

SEQ ID NO: 1298872 - RNA, 19 nt, Artificial Sequence
  Description of Artificial Sequence: Synthetic oligonucleotide
  Sense strand starting at position 3674 of SEQ ID NO: 1241776
ugaaaugaauugcuuucuu

SEQ ID NO: 1298873 - RNA, 19 nt, Artificial Sequence
  Description of Artificial Sequence: Synthetic oligonucleotide
  Antisense strand to SEQ ID NO: 1298872
aagaaagcaauucauuuca

SEQ ID NO: 1298874 - RNA, 19 nt, Artificial Sequence
  Description of Artificial Sequence: Synthetic oligonucleotide
  Sense strand starting at position 3690 of SEQ ID NO: 1241776
cuuccugaaauguggaaga

SEQ ID NO: 1298875 - RNA, 19 nt, Artificial Sequence
  Description of Artificial Sequence: Synthetic oligonucleotide
  Antisense strand to SEQ ID NO: 1298874
ucuuccacauuucaggaag

SEQ ID NO: 1298876 - RNA, 19 nt, Artificial Sequence
  Description of Artificial Sequence: Synthetic oligonucleotide
  Sense strand starting at position 3715 of SEQ ID NO: 1241776
ugaaauugcuuugcaagaa

SEQ ID NO: 1298877 - RNA, 19 nt, Artificial Sequence
  Description of Artificial Sequence: Synthetic oligonucleotide
  Antisense strand to SEQ ID NO: 1298876
uucuugcaaagcaauuuca

SEQ ID NO: 1298878 - RNA, 19 nt, Artificial Sequence
  Description of Artificial Sequence: Synthetic oligonucleotide
  Sense strand starting at position 3719 of SEQ ID NO: 1241776
auugcuuugcaagaaucau

SEQ ID NO: 1298879 - RNA, 19 nt, Artificial Sequence
  Description of Artificial Sequence: Synthetic oligonucleotide
  Antisense strand to SEQ ID NO: 1298878
augauucuugcaaagcaau

SEQ ID NO: 1298880 - RNA, 19 nt, Artificial Sequence
  Description of Artificial Sequence: Synthetic oligonucleotide
  Sense strand starting at position 3728 of SEQ ID NO: 1241776
caagaaucauacguuguua

SEQ ID NO: 1298881 - RNA, 19 nt, Artificial Sequence
  Description of Artificial Sequence: Synthetic oligonucleotide
  Antisense strand to SEQ ID NO: 1298880
uaacaacguaugauucuug

SEQ ID NO: 1298882 - RNA, 19 nt, Artificial Sequence
  Description of Artificial Sequence: Synthetic oligonucleotide
  Sense strand starting at position 3757 of SEQ ID NO: 1241776
uuauuagacuugucaugga

SEQ ID NO: 1298883 - RNA, 19 nt, Artificial Sequence
  Description of Artificial Sequence: Synthetic oligonucleotide
  Antisense strand to SEQ ID NO: 1298882
uccaugacaagucuaauaa

SEQ ID NO: 1298884 - RNA, 19 nt, Artificial Sequence
  Description of Artificial Sequence: Synthetic oligonucleotide
  Sense strand starting at position 3798 of SEQ ID NO: 1241776
uagagaucuaaagguguga

SEQ ID NO: 1298885 - RNA, 19 nt, Artificial Sequence
  Description of Artificial Sequence: Synthetic oligonucleotide
  Antisense strand to SEQ ID NO: 1298884
ucacaccuuuagaucucua

SEQ ID NO: 1298886 - RNA, 19 nt, Artificial Sequence
  Description of Artificial Sequence: Synthetic oligonucleotide
  Sense strand starting at position 3802 of SEQ ID NO: 1241776
gaucuaaaggugugaauau

SEQ ID NO: 1298887 - RNA, 19 nt, Artificial Sequence
  Description of Artificial Sequence: Synthetic oligonucleotide
  Antisense strand to SEQ ID NO: 1298886
auauucacaccuuuagauc

SEQ ID NO: 1298888 - RNA, 19 nt, Artificial Sequence
  Description of Artificial Sequence: Synthetic oligonucleotide
  Sense strand starting at position 3858 of SEQ ID NO: 1241776
ugacuuguuguggauccua

SEQ ID NO: 1298889 - RNA, 19 nt, Artificial Sequence
  Description of Artificial Sequence: Synthetic oligonucleotide
  Antisense strand to SEQ ID NO: 1298888
uaggauccacaacaaguca

SEQ ID NO: 1298890 - RNA, 19 nt, Artificial Sequence
  Description of Artificial Sequence: Synthetic oligonucleotide
  Sense strand starting at position 42 of SEQ ID NO: 1241777
uggugacacaacugaagua

SEQ ID NO: 1298891 - RNA, 19 nt, Artificial Sequence
  Description of Artificial Sequence: Synthetic oligonucleotide
  Antisense strand to SEQ ID NO: 1298890
uacuucaguugugucacca

SEQ ID NO: 1298892 - RNA, 19 nt, Artificial Sequence
  Description of Artificial Sequence: Synthetic oligonucleotide
  Sense strand starting at position 52 of SEQ ID NO: 1241777
acugaaguauagcugucau

SEQ ID NO: 1298893 - RNA, 19 nt, Artificial Sequence
  Description of Artificial Sequence: Synthetic oligonucleotide
  Antisense strand to SEQ ID NO: 1298892
augacagcuauacuucagu

SEQ ID NO: 1298894 - RNA, 19 nt, Artificial Sequence
  Description of Artificial Sequence: Synthetic oligonucleotide
  Sense strand starting at position 134 of SEQ ID NO: 1241777
ucuaaugugcuugaaucua

SEQ ID NO: 1298895 - RNA, 19 nt, Artificial Sequence
  Description of Artificial Sequence: Synthetic oligonucleotide
  Antisense strand to SEQ ID NO: 1298894
uagauucaagcacauuaga

SEQ ID NO: 1298896 - RNA, 19 nt, Artificial Sequence
  Description of Artificial Sequence: Synthetic oligonucleotide
  Sense strand starting at position 255 of SEQ ID NO: 1241777
gugggaucuugaguuccua

SEQ ID NO: 1298897 - RNA, 19 nt, Artificial Sequence
  Description of Artificial Sequence: Synthetic oligonucleotide
  Antisense strand to SEQ ID NO: 1298896
uaggaacucaagaucccac

SEQ ID NO: 1298898 - RNA, 19 nt, Artificial Sequence
  Description of Artificial Sequence: Synthetic oligonucleotide
  Sense strand starting at position 263 of SEQ ID NO: 1241777
uugaguuccuacuugaguu

SEQ ID NO: 1298899 - RNA, 19 nt, Artificial Sequence
  Description of Artificial Sequence: Synthetic oligonucleotide
  Antisense strand to SEQ ID NO: 1298898
aacucaaguaggaacucaa

SEQ ID NO: 1298900 - RNA, 19 nt, Artificial Sequence
  Description of Artificial Sequence: Synthetic oligonucleotide
  Sense strand starting at position 391 of SEQ ID NO: 1241777
ccugcaucuccuuagucau

SEQ ID NO: 1298901 - RNA, 19 nt, Artificial Sequence
  Description of Artificial Sequence: Synthetic oligonucleotide
  Antisense strand to SEQ ID NO: 1298900
augacuaaggagaugcagg

SEQ ID NO: 1298902 - RNA, 19 nt, Artificial Sequence
  Description of Artificial Sequence: Synthetic oligonucleotide
  Sense strand starting at position 413 of SEQ ID NO: 1241777
uuacauuugucugcucaca

SEQ ID NO: 1298903 - RNA, 19 nt, Artificial Sequence
  Description of Artificial Sequence: Synthetic oligonucleotide
  Antisense strand to SEQ ID NO: 1298902
ugugagcagacaaauguaa

SEQ ID NO: 1298904 - RNA, 19 nt, Artificial Sequence
  Description of Artificial Sequence: Synthetic oligonucleotide
  Sense strand starting at position 415 of SEQ ID NO: 1241777
acauuugucugcucacagu

SEQ ID NO: 1298905 - RNA, 19 nt, Artificial Sequence
  Description of Artificial Sequence: Synthetic oligonucleotide
  Antisense strand to SEQ ID NO: 1298904
acugugagcagacaaaugu

SEQ ID NO: 1298906 - RNA, 19 nt, Artificial Sequence
  Description of Artificial Sequence: Synthetic oligonucleotide
  Sense strand starting at position 589 of SEQ ID NO: 1241777
cuagaauggcagugagaga

SEQ ID NO: 1298907 - RNA, 19 nt, Artificial Sequence
  Description of Artificial Sequence: Synthetic oligonucleotide
  Antisense strand to SEQ ID NO: 1298906
ucucucacugccauucuag

SEQ ID NO: 1298908 - RNA, 19 nt, Artificial Sequence
  Description of Artificial Sequence: Synthetic oligonucleotide
  Sense strand starting at position 603 of SEQ ID NO: 1241777
agagaaaguucuccuagac

SEQ ID NO: 1298909 - RNA, 19 nt, Artificial Sequence
  Description of Artificial Sequence: Synthetic oligonucleotide
  Antisense strand to SEQ ID NO: 1298908
gucuaggagaacuuucucu

SEQ ID NO: 1298910 - RNA, 19 nt, Artificial Sequence
  Description of Artificial Sequence: Synthetic oligonucleotide
  Sense strand starting at position 607 of SEQ ID NO: 1241777
aaaguucuccuagacaggu

SEQ ID NO: 1298911 - RNA, 19 nt, Artificial Sequence
  Description of Artificial Sequence: Synthetic oligonucleotide
  Antisense strand to SEQ ID NO: 1298910
accugucuaggagaacuuu

SEQ ID NO: 1298912 - RNA, 19 nt, Artificial Sequence
  Description of Artificial Sequence: Synthetic oligonucleotide
  Sense strand starting at position 615 of SEQ ID NO: 1241777
ccuagacagguaugauauc

SEQ ID NO: 1298913 - RNA, 19 nt, Artificial Sequence
  Description of Artificial Sequence: Synthetic oligonucleotide
  Antisense strand to SEQ ID NO: 1298912
gauaucauaccugucuagg

SEQ ID NO: 1298914 - RNA, 19 nt, Artificial Sequence
  Description of Artificial Sequence: Synthetic oligonucleotide
  Sense strand starting at position 2620 of SEQ ID NO: 1241777
cgcaaacuccauggagauu

SEQ ID NO: 1298915 - RNA, 19 nt, Artificial Sequence
  Description of Artificial Sequence: Synthetic oligonucleotide
  Antisense strand to SEQ ID NO: 1298914
aaucuccauggaguuugcg

SEQ ID NO: 1298916 - RNA, 19 nt, Artificial Sequence
  Description of Artificial Sequence: Synthetic oligonucleotide
  Sense strand starting at position 2829 of SEQ ID NO: 1241777
cgagguggucacagugagu

SEQ ID NO: 1298917 - RNA, 19 nt, Artificial Sequence
  Description of Artificial Sequence: Synthetic oligonucleotide
  Antisense strand to SEQ ID NO: 1298916
acucacugugaccaccucg

SEQ ID NO: 1298918 - RNA, 19 nt, Artificial Sequence
  Description of Artificial Sequence: Synthetic oligonucleotide
  Sense strand starting at position 2911 of SEQ ID NO: 1241777
gggucacuaucucuggaaa

SEQ ID NO: 1298919 - RNA, 19 nt, Artificial Sequence
  Description of Artificial Sequence: Synthetic oligonucleotide
  Antisense strand to SEQ ID NO: 1298918
uuuccagagauagugaccc

SEQ ID NO: 1298920 - RNA, 19 nt, Artificial Sequence
  Description of Artificial Sequence: Synthetic oligonucleotide
  Sense strand starting at position 2912 of SEQ ID NO: 1241777
ggucacuaucucuggaaac

SEQ ID NO: 1298921 - RNA, 19 nt, Artificial Sequence
  Description of Artificial Sequence: Synthetic oligonucleotide
  Antisense strand to SEQ ID NO: 1298920
guuuccagagauagugacc

SEQ ID NO: 1298922 - RNA, 19 nt, Artificial Sequence
  Description of Artificial Sequence: Synthetic oligonucleotide
  Sense strand starting at position 3173 of SEQ ID NO: 1241777
ucccucaugccauagaguu

SEQ ID NO: 1298923 - RNA, 19 nt, Artificial Sequence
  Description of Artificial Sequence: Synthetic oligonucleotide
  Antisense strand to SEQ ID NO: 1298922
aacucuauggcaugaggga

SEQ ID NO: 1298924 - RNA, 19 nt, Artificial Sequence
  Description of Artificial Sequence: Synthetic oligonucleotide
  Sense strand starting at position 3189 of SEQ ID NO: 1241777
guuguaaauggugggaaag

SEQ ID NO: 1298925 - RNA, 19 nt, Artificial Sequence
  Description of Artificial Sequence: Synthetic oligonucleotide
  Antisense strand to SEQ ID NO: 1298924
cuuucccaccauuuacaac

SEQ ID NO: 1298926 - RNA, 19 nt, Artificial Sequence
  Description of Artificial Sequence: Synthetic oligonucleotide
  Sense strand starting at position 3208 of SEQ ID NO: 1241777
gcacuaucucuaggcugaa

SEQ ID NO: 1298927 - RNA, 19 nt, Artificial Sequence
  Description of Artificial Sequence: Synthetic oligonucleotide
  Antisense strand to SEQ ID NO: 1298926
uucagccuagagauagugc

SEQ ID NO: 1298928 - RNA, 19 nt, Artificial Sequence
  Description of Artificial Sequence: Synthetic oligonucleotide
  Sense strand starting at position 3220 of SEQ ID NO: 1241777
ggcugaagccaagaacuuu

SEQ ID NO: 1298929 - RNA, 19 nt, Artificial Sequence
  Description of Artificial Sequence: Synthetic oligonucleotide
  Antisense strand to SEQ ID NO: 1298928
aaaguucuuggcuucagcc

SEQ ID NO: 1298930 - RNA, 19 nt, Artificial Sequence
  Description of Artificial Sequence: Synthetic oligonucleotide
  Sense strand starting at position 3229 of SEQ ID NO: 1241777
caagaacuuuaggaagaga

SEQ ID NO: 1298931 - RNA, 19 nt, Artificial Sequence
  Description of Artificial Sequence: Synthetic oligonucleotide
  Antisense strand to SEQ ID NO: 1298930
ucucuuccuaaaguucuug

SEQ ID NO: 1298932 - RNA, 19 nt, Artificial Sequence
  Description of Artificial Sequence: Synthetic oligonucleotide
  Sense strand starting at position 3253 of SEQ ID NO: 1241777
gagugugugcuuuaagaug

SEQ ID NO: 1298933 - RNA, 19 nt, Artificial Sequence
  Description of Artificial Sequence: Synthetic oligonucleotide
  Antisense strand to SEQ ID NO: 1298932
caucuuaaagcacacacuc

SEQ ID NO: 1298934 - RNA, 19 nt, Artificial Sequence
  Description of Artificial Sequence: Synthetic oligonucleotide
  Sense strand starting at position 3306 of SEQ ID NO: 1241777
cacagucuugugggagaau

SEQ ID NO: 1298935 - RNA, 19 nt, Artificial Sequence
  Description of Artificial Sequence: Synthetic oligonucleotide
  Antisense strand to SEQ ID NO: 1298934
auucucccacaagacugug

SEQ ID NO: 1298936 - RNA, 19 nt, Artificial Sequence
  Description of Artificial Sequence: Synthetic oligonucleotide
  Sense strand starting at position 3309 of SEQ ID NO: 1241777
agucuugugggagaaugca

SEQ ID NO: 1298937 - RNA, 19 nt, Artificial Sequence
  Description of Artificial Sequence: Synthetic oligonucleotide
  Antisense strand to SEQ ID NO: 1298936
ugcauucucccacaagacu

SEQ ID NO: 1298938 - RNA, 19 nt, Artificial Sequence
  Description of Artificial Sequence: Synthetic oligonucleotide
  Sense strand starting at position 3373 of SEQ ID NO: 1241777
gucguugcauuucuugaca

SEQ ID NO: 1298939 - RNA, 19 nt, Artificial Sequence
  Description of Artificial Sequence: Synthetic oligonucleotide
  Antisense strand to SEQ ID NO: 1298938
ugucaagaaaugcaacgac

SEQ ID NO: 1298940 - RNA, 19 nt, Artificial Sequence
  Description of Artificial Sequence: Synthetic oligonucleotide
  Sense strand starting at position 3504 of SEQ ID NO: 1241777
cccugugcucccguagcaa

SEQ ID NO: 1298941 - RNA, 19 nt, Artificial Sequence
  Description of Artificial Sequence: Synthetic oligonucleotide
  Antisense strand to SEQ ID NO: 1298940
uugcuacgggagcacaggg

SEQ ID NO: 1298942 - RNA, 19 nt, Artificial Sequence
  Description of Artificial Sequence: Synthetic oligonucleotide
  Sense strand starting at position 3541 of SEQ ID NO: 1241777
gucagaaaccaaggguuau

SEQ ID NO: 1298943 - RNA, 19 nt, Artificial Sequence
  Description of Artificial Sequence: Synthetic oligonucleotide
  Antisense strand to SEQ ID NO: 1298942
auaacccuugguuucugac

SEQ ID NO: 1298944 - RNA, 19 nt, Artificial Sequence
  Description of Artificial Sequence: Synthetic oligonucleotide
  Sense strand starting at position 3628 of SEQ ID NO: 1241777
gcaagaagacuccaagcgu

SEQ ID NO: 1298945 - RNA, 19 nt, Artificial Sequence
  Description of Artificial Sequence: Synthetic oligonucleotide
  Antisense strand to SEQ ID NO: 1298944
acgcuuggagucuucuugc

SEQ ID NO: 1298946 - RNA, 19 nt, Artificial Sequence
  Description of Artificial Sequence: Synthetic oligonucleotide
  Sense strand starting at position 3670 of SEQ ID NO: 1241777
acuaucacccuguauugua

SEQ ID NO: 1298947 - RNA, 19 nt, Artificial Sequence
  Description of Artificial Sequence: Synthetic oligonucleotide
  Antisense strand to SEQ ID NO: 1298946
uacaauacagggugauagu

SEQ ID NO: 1298948 - RNA, 19 nt, Artificial Sequence
  Description of Artificial Sequence: Synthetic oligonucleotide
  Sense strand starting at position 3677 of SEQ ID NO: 1241777
cccuguauuguauaaacca

SEQ ID NO: 1298949 - RNA, 19 nt, Artificial Sequence
  Description of Artificial Sequence: Synthetic oligonucleotide
  Antisense strand to SEQ ID NO: 1298948
ugguuuauacaauacaggg

SEQ ID NO: 1298950 - RNA, 19 nt, Artificial Sequence
  Description of Artificial Sequence: Synthetic oligonucleotide
  Sense strand starting at position 3693 of SEQ ID NO: 1241777
ccaagucucagaggguaau

SEQ ID NO: 1298951 - RNA, 19 nt, Artificial Sequence
  Description of Artificial Sequence: Synthetic oligonucleotide
  Antisense strand to SEQ ID NO: 1298950
auuacccucugagacuugg

SEQ ID NO: 1298952 - RNA, 19 nt, Artificial Sequence
  Description of Artificial Sequence: Synthetic oligonucleotide
  Sense strand starting at position 3694 of SEQ ID NO: 1241777
caagucucagaggguaauu

SEQ ID NO: 1298953 - RNA, 19 nt, Artificial Sequence
  Description of Artificial Sequence: Synthetic oligonucleotide
  Antisense strand to SEQ ID NO: 1298952
aauuacccucugagacuug

SEQ ID NO: 1298954 - RNA, 19 nt, Artificial Sequence
  Description of Artificial Sequence: Synthetic oligonucleotide
  Sense strand starting at position 3808 of SEQ ID NO: 1241777
uuguguuagccaaguggug

SEQ ID NO: 1298955 - RNA, 19 nt, Artificial Sequence
  Description of Artificial Sequence: Synthetic oligonucleotide
  Antisense strand to SEQ ID NO: 1298954
caccacuuggcuaacacaa

SEQ ID NO: 1298956 - RNA, 19 nt, Artificial Sequence
  Description of Artificial Sequence: Synthetic oligonucleotide
  Sense strand starting at position 3844 of SEQ ID NO: 1241777
uugcaagcucuugaccauu

SEQ ID NO: 1298957 - RNA, 19 nt, Artificial Sequence
  Description of Artificial Sequence: Synthetic oligonucleotide
  Antisense strand to SEQ ID NO: 1298956
aauggucaagagcuugcaa

SEQ ID NO: 1298958 - RNA, 19 nt, Artificial Sequence
  Description of Artificial Sequence: Synthetic oligonucleotide
  Sense strand starting at position 3896 of SEQ ID NO: 1241777
cugaaugugggauguacuu

SEQ ID NO: 1298959 - RNA, 19 nt, Artificial Sequence
  Description of Artificial Sequence: Synthetic oligonucleotide
  Antisense strand to SEQ ID NO: 1298958
aaguacaucccacauucag

SEQ ID NO: 1298960 - RNA, 19 nt, Artificial Sequence
  Description of Artificial Sequence: Synthetic oligonucleotide
  Sense strand starting at position 3903 of SEQ ID NO: 1241777
ugggauguacuuggugacu

SEQ ID NO: 1298961 - RNA, 19 nt, Artificial Sequence
  Description of Artificial Sequence: Synthetic oligonucleotide
  Antisense strand to SEQ ID NO: 1298960
agucaccaaguacauccca

SEQ ID NO: 1298962 - RNA, 19 nt, Artificial Sequence
  Description of Artificial Sequence: Synthetic oligonucleotide
  Sense strand starting at position 3915 of SEQ ID NO: 1241777
ggugacuggugucuaauga

SEQ ID NO: 1298963 - RNA, 19 nt, Artificial Sequence
  Description of Artificial Sequence: Synthetic oligonucleotide
  Antisense strand to SEQ ID NO: 1298962
ucauuagacaccagucacc

SEQ ID NO: 1298964 - RNA, 19 nt, Artificial Sequence
  Description of Artificial Sequence: Synthetic oligonucleotide
  Sense strand starting at position 3916 of SEQ ID NO: 1241777
gugacuggugucuaaugaa

SEQ ID NO: 1298965 - RNA, 19 nt, Artificial Sequence
  Description of Artificial Sequence: Synthetic oligonucleotide
  Antisense strand to SEQ ID NO: 1298964
uucauuagacaccagucac

SEQ ID NO: 1298966 - RNA, 19 nt, Artificial Sequence
  Description of Artificial Sequence: Synthetic oligonucleotide
  Sense strand starting at position 3939 of SEQ ID NO: 1241777
gugugaugaaagugaagcu

SEQ ID NO: 1298967 - RNA, 19 nt, Artificial Sequence
  Description of Artificial Sequence: Synthetic oligonucleotide
  Antisense strand to SEQ ID NO: 1298966
agcuucacuuucaucacac

SEQ ID NO: 1298968 - RNA, 19 nt, Artificial Sequence
  Description of Artificial Sequence: Synthetic oligonucleotide
  Sense strand starting at position 3952 of SEQ ID NO: 1241777
gaagcuguaugacucuuaa

SEQ ID NO: 1298969 - RNA, 19 nt, Artificial Sequence
  Description of Artificial Sequence: Synthetic oligonucleotide
  Antisense strand to SEQ ID NO: 1298968
uuaagagucauacagcuuc

SEQ ID NO: 1298970 - RNA, 19 nt, Artificial Sequence
  Description of Artificial Sequence: Synthetic oligonucleotide
  Sense strand starting at position 26 of SEQ ID NO: 1241778
guggaaagaucgcuugaaa

SEQ ID NO: 1298971 - RNA, 19 nt, Artificial Sequence
  Description of Artificial Sequence: Synthetic oligonucleotide
  Antisense strand to SEQ ID NO: 1298970
uuucaagcgaucuuuccac

SEQ ID NO: 1298972 - RNA, 19 nt, Artificial Sequence
  Description of Artificial Sequence: Synthetic oligonucleotide
  Sense strand starting at position 29 of SEQ ID NO: 1241778
gaaagaucgcuugaaagca

SEQ ID NO: 1298973 - RNA, 19 nt, Artificial Sequence
  Description of Artificial Sequence: Synthetic oligonucleotide
  Antisense strand to SEQ ID NO: 1298972
ugcuuucaagcgaucuuuc

SEQ ID NO: 1298974 - RNA, 19 nt, Artificial Sequence
  Description of Artificial Sequence: Synthetic oligonucleotide
  Sense strand starting at position 37 of SEQ ID NO: 1241778
gcuugaaagcaggaguuga

SEQ ID NO: 1298975 - RNA, 19 nt, Artificial Sequence
  Description of Artificial Sequence: Synthetic oligonucleotide
  Antisense strand to SEQ ID NO: 1298974
ucaacuccugcuuucaagc

SEQ ID NO: 1298976 - RNA, 19 nt, Artificial Sequence
  Description of Artificial Sequence: Synthetic oligonucleotide
  Sense strand starting at position 237 of SEQ ID NO: 1241778
cuacaacaugugugacaga

SEQ ID NO: 1298977 - RNA, 19 nt, Artificial Sequence
  Description of Artificial Sequence: Synthetic oligonucleotide
  Antisense strand to SEQ ID NO: 1298976
ucugucacacauguuguag

SEQ ID NO: 1298978 - RNA, 19 nt, Artificial Sequence
  Description of Artificial Sequence: Synthetic oligonucleotide
  Sense strand starting at position 303 of SEQ ID NO: 1241778
guaacuaaugauuggguaa

SEQ ID NO: 1298979 - RNA, 19 nt, Artificial Sequence
  Description of Artificial Sequence: Synthetic oligonucleotide
  Antisense strand to SEQ ID NO: 1298978
uuacccaaucauuaguuac

SEQ ID NO: 1298980 - RNA, 19 nt, Artificial Sequence
  Description of Artificial Sequence: Synthetic oligonucleotide
  Sense strand starting at position 387 of SEQ ID NO: 1241778
uggaguucucaugggaaac

SEQ ID NO: 1298981 - RNA, 19 nt, Artificial Sequence
  Description of Artificial Sequence: Synthetic oligonucleotide
  Antisense strand to SEQ ID NO: 1298980
guuucccaugagaacucca

SEQ ID NO: 1298982 - RNA, 19 nt, Artificial Sequence
  Description of Artificial Sequence: Synthetic oligonucleotide
  Sense strand starting at position 922 of SEQ ID NO: 1241778
caaugucaugguuaacaug

SEQ ID NO: 1298983 - RNA, 19 nt, Artificial Sequence
  Description of Artificial Sequence: Synthetic oligonucleotide
  Antisense strand to SEQ ID NO: 1298982
cauguuaaccaugacauug

SEQ ID NO: 1298984 - RNA, 19 nt, Artificial Sequence
  Description of Artificial Sequence: Synthetic oligonucleotide
  Sense strand starting at position 936 of SEQ ID NO: 1241778
acauguuccgugggaacaa

SEQ ID NO: 1298985 - RNA, 19 nt, Artificial Sequence
  Description of Artificial Sequence: Synthetic oligonucleotide
  Antisense strand to SEQ ID NO: 1298984
uuguucccacggaacaugu

SEQ ID NO: 1298986 - RNA, 19 nt, Artificial Sequence
  Description of Artificial Sequence: Synthetic oligonucleotide
  Sense strand starting at position 1067 of SEQ ID NO: 1241778
ucaccaggucgguaugaua

SEQ ID NO: 1298987 - RNA, 19 nt, Artificial Sequence
  Description of Artificial Sequence: Synthetic oligonucleotide
  Antisense strand to SEQ ID NO: 1298986
uaucauaccgaccugguga

SEQ ID NO: 1298988 - RNA, 19 nt, Artificial Sequence
  Description of Artificial Sequence: Synthetic oligonucleotide
  Sense strand starting at position 1081 of SEQ ID NO: 1241778
ugauaaugaugagcguaua

SEQ ID NO: 1298989 - RNA, 19 nt, Artificial Sequence
  Description of Artificial Sequence: Synthetic oligonucleotide
  Antisense strand to SEQ ID NO: 1298988
uauacgcucaucauuauca

SEQ ID NO: 1298990 - RNA, 19 nt, Artificial Sequence
  Description of Artificial Sequence: Synthetic oligonucleotide
  Sense strand starting at position 1082 of SEQ ID NO: 1241778
gauaaugaugagcguauau

SEQ ID NO: 1298991 - RNA, 19 nt, Artificial Sequence
  Description of Artificial Sequence: Synthetic oligonucleotide
  Antisense strand to SEQ ID NO: 1298990
auauacgcucaucauuauc

SEQ ID NO: 1298992 - RNA, 19 nt, Artificial Sequence
  Description of Artificial Sequence: Synthetic oligonucleotide
  Sense strand starting at position 1084 of SEQ ID NO: 1241778
uaaugaugagcguauauac

SEQ ID NO: 1298993 - RNA, 19 nt, Artificial Sequence
  Description of Artificial Sequence: Synthetic oligonucleotide
  Antisense strand to SEQ ID NO: 1298992
guauauacgcucaucauua

SEQ ID NO: 1298994 - RNA, 19 nt, Artificial Sequence
  Description of Artificial Sequence: Synthetic oligonucleotide
  Sense strand starting at position 1100 of SEQ ID NO: 1241778
uacauauggucccugguga

SEQ ID NO: 1298995 - RNA, 19 nt, Artificial Sequence
  Description of Artificial Sequence: Synthetic oligonucleotide
  Antisense strand to SEQ ID NO: 1298994
ucaccagggaccauaugua

SEQ ID NO: 1298996 - RNA, 19 nt, Artificial Sequence
  Description of Artificial Sequence: Synthetic oligonucleotide
  Sense strand starting at position 1231 of SEQ ID NO: 1241778
ugaagagacuucgcucacu

SEQ ID NO: 1298997 - RNA, 19 nt, Artificial Sequence
  Description of Artificial Sequence: Synthetic oligonucleotide
  Antisense strand to SEQ ID NO: 1298996
agugagcgaagucucuuca

SEQ ID NO: 1298998 - RNA, 19 nt, Artificial Sequence
  Description of Artificial Sequence: Synthetic oligonucleotide
  Sense strand starting at position 1236 of SEQ ID NO: 1241778
agacuucgcucacuggaua

SEQ ID NO: 1298999 - RNA, 19 nt, Artificial Sequence
  Description of Artificial Sequence: Synthetic oligonucleotide
  Antisense strand to SEQ ID NO: 1298998
uauccagugagcgaagucu

SEQ ID NO: 1299000 - RNA, 19 nt, Artificial Sequence
  Description of Artificial Sequence: Synthetic oligonucleotide
  Sense strand starting at position 1290 of SEQ ID NO: 1241778
uaugaagucggguggagaa

SEQ ID NO: 1299001 - RNA, 19 nt, Artificial Sequence
  Description of Artificial Sequence: Synthetic oligonucleotide
  Antisense strand to SEQ ID NO: 1299000
uucuccacccgacuucaua

SEQ ID NO: 1299002 - RNA, 19 nt, Artificial Sequence
  Description of Artificial Sequence: Synthetic oligonucleotide
  Sense strand starting at position 1566 of SEQ ID NO: 1241778
gcaauuccucaagaucggu

SEQ ID NO: 1299003 - RNA, 19 nt, Artificial Sequence
  Description of Artificial Sequence: Synthetic oligonucleotide
  Antisense strand to SEQ ID NO: 1299002
accgaucuugaggaauugc

SEQ ID NO: 1299004 - RNA, 19 nt, Artificial Sequence
  Description of Artificial Sequence: Synthetic oligonucleotide
  Sense strand starting at position 1571 of SEQ ID NO: 1241778
uccucaagaucggugacua

SEQ ID NO: 1299005 - RNA, 19 nt, Artificial Sequence
  Description of Artificial Sequence: Synthetic oligonucleotide
  Antisense strand to SEQ ID NO: 1299004
uagucaccgaucuugagga

SEQ ID NO: 1299006 - RNA, 19 nt, Artificial Sequence
  Description of Artificial Sequence: Synthetic oligonucleotide
  Sense strand starting at position 1698 of SEQ ID NO: 1241778
cagcucuuacccgagggua

SEQ ID NO: 1299007 - RNA, 19 nt, Artificial Sequence
  Description of Artificial Sequence: Synthetic oligonucleotide
  Antisense strand to SEQ ID NO: 1299006
uacccucggguaagagcug

SEQ ID NO: 1299008 - RNA, 19 nt, Artificial Sequence
  Description of Artificial Sequence: Synthetic oligonucleotide
  Sense strand starting at position 2287 of SEQ ID NO: 1241778
acacuugauuuacauagua

SEQ ID NO: 1299009 - RNA, 19 nt, Artificial Sequence
  Description of Artificial Sequence: Synthetic oligonucleotide
  Antisense strand to SEQ ID NO: 1299008
uacuauguaaaucaagugu

SEQ ID NO: 1299010 - RNA, 19 nt, Artificial Sequence
  Description of Artificial Sequence: Synthetic oligonucleotide
  Sense strand starting at position 2586 of SEQ ID NO: 1241778
uguuaagaacucugauaca

SEQ ID NO: 1299011 - RNA, 19 nt, Artificial Sequence
  Description of Artificial Sequence: Synthetic oligonucleotide
  Antisense strand to SEQ ID NO: 1299010
uguaucagaguucuuaaca

SEQ ID NO: 1299012 - RNA, 19 nt, Artificial Sequence
  Description of Artificial Sequence: Synthetic oligonucleotide
  Sense strand starting at position 2692 of SEQ ID NO: 1241778
acucuaucacuuugaacga

SEQ ID NO: 1299013 - RNA, 19 nt, Artificial Sequence
  Description of Artificial Sequence: Synthetic oligonucleotide
  Antisense strand to SEQ ID NO: 1299012
ucguucaaagugauagagu

SEQ ID NO: 1299014 - RNA, 19 nt, Artificial Sequence
  Description of Artificial Sequence: Synthetic oligonucleotide
  Sense strand starting at position 2774 of SEQ ID NO: 1241778
uaaguauuugcugguuuaa

SEQ ID NO: 1299015 - RNA, 19 nt, Artificial Sequence
  Description of Artificial Sequence: Synthetic oligonucleotide
  Antisense strand to SEQ ID NO: 1299014
uuaaaccagcaaauacuua

SEQ ID NO: 1299016 - RNA, 19 nt, Artificial Sequence
  Description of Artificial Sequence: Synthetic oligonucleotide
  Sense strand starting at position 2776 of SEQ ID NO: 1241778
aguauuugcugguuuaaau

SEQ ID NO: 1299017 - RNA, 19 nt, Artificial Sequence
  Description of Artificial Sequence: Synthetic oligonucleotide
  Antisense strand to SEQ ID NO: 1299016
auuuaaaccagcaaauacu

SEQ ID NO: 1299018 - RNA, 19 nt, Artificial Sequence
  Description of Artificial Sequence: Synthetic oligonucleotide
  Sense strand starting at position 2836 of SEQ ID NO: 1241778
acacgagauuuauagagaa

SEQ ID NO: 1299019 - RNA, 19 nt, Artificial Sequence
  Description of Artificial Sequence: Synthetic oligonucleotide
  Antisense strand to SEQ ID NO: 1299018
uucucuauaaaucucgugu

SEQ ID NO: 1299020 - RNA, 19 nt, Artificial Sequence
  Description of Artificial Sequence: Synthetic oligonucleotide
  Sense strand starting at position 2852 of SEQ ID NO: 1241778
gaaaguuacuaggucuuga

SEQ ID NO: 1299021 - RNA, 19 nt, Artificial Sequence
  Description of Artificial Sequence: Synthetic oligonucleotide
  Antisense strand to SEQ ID NO: 1299020
ucaagaccuaguaacuuuc

SEQ ID NO: 1299022 - RNA, 19 nt, Artificial Sequence
  Description of Artificial Sequence: Synthetic oligonucleotide
  Sense strand starting at position 2885 of SEQ ID NO: 1241778
guuccuaugccauagaauu

SEQ ID NO: 1299023 - RNA, 19 nt, Artificial Sequence
  Description of Artificial Sequence: Synthetic oligonucleotide
  Antisense strand to SEQ ID NO: 1299022
aauucuauggcauaggaac

SEQ ID NO: 1299024 - RNA, 19 nt, Artificial Sequence
  Description of Artificial Sequence: Synthetic oligonucleotide
  Sense strand starting at position 2923 of SEQ ID NO: 1241778
aguaaaguagcagauugua

SEQ ID NO: 1299025 - RNA, 19 nt, Artificial Sequence
  Description of Artificial Sequence: Synthetic oligonucleotide
  Antisense strand to SEQ ID NO: 1299024
uacaaucugcuacuuuacu

SEQ ID NO: 1299026 - RNA, 19 nt, Artificial Sequence
  Description of Artificial Sequence: Synthetic oligonucleotide
  Sense strand starting at position 2926 of SEQ ID NO: 1241778
aaaguagcagauuguauua

SEQ ID NO: 1299027 - RNA, 19 nt, Artificial Sequence
  Description of Artificial Sequence: Synthetic oligonucleotide
  Antisense strand to SEQ ID NO: 1299026
uaauacaaucugcuacuuu

SEQ ID NO: 1299028 - RNA, 19 nt, Artificial Sequence
  Description of Artificial Sequence: Synthetic oligonucleotide
  Sense strand starting at position 2936 of SEQ ID NO: 1241778
auuguauuauaggccucaa

SEQ ID NO: 1299029 - RNA, 19 nt, Artificial Sequence
  Description of Artificial Sequence: Synthetic oligonucleotide
  Antisense strand to SEQ ID NO: 1299028
uugaggccuauaauacaau

SEQ ID NO: 1299030 - RNA, 19 nt, Artificial Sequence
  Description of Artificial Sequence: Synthetic oligonucleotide
  Sense strand starting at position 2947 of SEQ ID NO: 1241778
ggccucaagucacuuaaau

SEQ ID NO: 1299031 - RNA, 19 nt, Artificial Sequence
  Description of Artificial Sequence: Synthetic oligonucleotide
  Antisense strand to SEQ ID NO: 1299030
auuuaagugacuugaggcc

SEQ ID NO: 1299032 - RNA, 19 nt, Artificial Sequence
  Description of Artificial Sequence: Synthetic oligonucleotide
  Sense strand starting at position 3096 of SEQ ID NO: 1241778
ggcacaucugaaugagaua

SEQ ID NO: 1299033 - RNA, 19 nt, Artificial Sequence
  Description of Artificial Sequence: Synthetic oligonucleotide
  Antisense strand to SEQ ID NO: 1299032
uaucucauucagaugugcc

SEQ ID NO: 1299034 - RNA, 19 nt, Artificial Sequence
  Description of Artificial Sequence: Synthetic oligonucleotide
  Sense strand starting at position 3131 of SEQ ID NO: 1241778
ccaucauuggguuauguag

SEQ ID NO: 1299035 - RNA, 19 nt, Artificial Sequence
  Description of Artificial Sequence: Synthetic oligonucleotide
  Antisense strand to SEQ ID NO: 1299034
cuacauaacccaaugaugg

SEQ ID NO: 1299036 - RNA, 19 nt, Artificial Sequence
  Description of Artificial Sequence: Synthetic oligonucleotide
  Sense strand starting at position 3271 of SEQ ID NO: 1241778
uuaagaacaguugguguua

SEQ ID NO: 1299037 - RNA, 19 nt, Artificial Sequence
  Description of Artificial Sequence: Synthetic oligonucleotide
  Antisense strand to SEQ ID NO: 1299036
uaacaccaacuguucuuaa

SEQ ID NO: 1299038 - RNA, 19 nt, Artificial Sequence
  Description of Artificial Sequence: Synthetic oligonucleotide
  Sense strand starting at position 3272 of SEQ ID NO: 1241778
uaagaacaguugguguuau

SEQ ID NO: 1299039 - RNA, 19 nt, Artificial Sequence
  Description of Artificial Sequence: Synthetic oligonucleotide
  Antisense strand to SEQ ID NO: 1299038
auaacaccaacuguucuua

SEQ ID NO: 1299040 - RNA, 19 nt, Artificial Sequence
  Description of Artificial Sequence: Synthetic oligonucleotide
  Sense strand starting at position 3495 of SEQ ID NO: 1241778
gaguuuacagugcaaauau

SEQ ID NO: 1299041 - RNA, 19 nt, Artificial Sequence
  Description of Artificial Sequence: Synthetic oligonucleotide
  Antisense strand to SEQ ID NO: 1299040
auauuugcacuguaaacuc

SEQ ID NO: 1299042 - RNA, 19 nt, Artificial Sequence
  Description of Artificial Sequence: Synthetic oligonucleotide
  Sense strand starting at position 3728 of SEQ ID NO: 1241778
auaccauuccagugucaau

SEQ ID NO: 1299043 - RNA, 19 nt, Artificial Sequence
  Description of Artificial Sequence: Synthetic oligonucleotide
  Antisense strand to SEQ ID NO: 1299042
auugacacuggaaugguau

SEQ ID NO: 1299044 - RNA, 19 nt, Artificial Sequence
  Description of Artificial Sequence: Synthetic oligonucleotide
  Sense strand starting at position 3738 of SEQ ID NO: 1241778
agugucaaugacuacauau

SEQ ID NO: 1299045 - RNA, 19 nt, Artificial Sequence
  Description of Artificial Sequence: Synthetic oligonucleotide
  Antisense strand to SEQ ID NO: 1299044
auauguagucauugacacu

SEQ ID NO: 1299046 - RNA, 19 nt, Artificial Sequence
  Description of Artificial Sequence: Synthetic oligonucleotide
  Sense strand starting at position 3818 of SEQ ID NO: 1241778
gcgaaagcucccguuugua

SEQ ID NO: 1299047 - RNA, 19 nt, Artificial Sequence
  Description of Artificial Sequence: Synthetic oligonucleotide
  Antisense strand to SEQ ID NO: 1299046
uacaaacgggagcuuucgc

SEQ ID NO: 1299048 - RNA, 19 nt, Artificial Sequence
  Description of Artificial Sequence: Synthetic oligonucleotide
  Sense strand starting at position 3871 of SEQ ID NO: 1241778
gaauucugccuugguggaa

SEQ ID NO: 1299049 - RNA, 19 nt, Artificial Sequence
  Description of Artificial Sequence: Synthetic oligonucleotide
  Antisense strand to SEQ ID NO: 1299048
uuccaccaaggcagaauuc

SEQ ID NO: 1299050 - RNA, 19 nt, Artificial Sequence
  Description of Artificial Sequence: Synthetic oligonucleotide
  Sense strand starting at position 74 of SEQ ID NO: 1241779
uuugauagcccuuaaagau

SEQ ID NO: 1299051 - RNA, 19 nt, Artificial Sequence
  Description of Artificial Sequence: Synthetic oligonucleotide
  Antisense strand to SEQ ID NO: 1299050
aucuuuaagggcuaucaaa

SEQ ID NO: 1299052 - RNA, 19 nt, Artificial Sequence
  Description of Artificial Sequence: Synthetic oligonucleotide
  Sense strand starting at position 136 of SEQ ID NO: 1241779
uagggauagcaaggguauu

SEQ ID NO: 1299053 - RNA, 19 nt, Artificial Sequence
  Description of Artificial Sequence: Synthetic oligonucleotide
  Antisense strand to SEQ ID NO: 1299052
aauacccuugcuaucccua

SEQ ID NO: 1299054 - RNA, 19 nt, Artificial Sequence
  Description of Artificial Sequence: Synthetic oligonucleotide
  Sense strand starting at position 305 of SEQ ID NO: 1241779
agacauuguagucaggcaa

SEQ ID NO: 1299055 - RNA, 19 nt, Artificial Sequence
  Description of Artificial Sequence: Synthetic oligonucleotide
  Antisense strand to SEQ ID NO: 1299054
uugccugacuacaaugucu

SEQ ID NO: 1299056 - RNA, 19 nt, Artificial Sequence
  Description of Artificial Sequence: Synthetic oligonucleotide
  Sense strand starting at position 348 of SEQ ID NO: 1241779
cuuaauucugagcaaagug

SEQ ID NO: 1299057 - RNA, 19 nt, Artificial Sequence
  Description of Artificial Sequence: Synthetic oligonucleotide
  Antisense strand to SEQ ID NO: 1299056
cacuuugcucagaauuaag

SEQ ID NO: 1299058 - RNA, 19 nt, Artificial Sequence
  Description of Artificial Sequence: Synthetic oligonucleotide
  Sense strand starting at position 364 of SEQ ID NO: 1241779
guggauaaaugacuuuacu

SEQ ID NO: 1299059 - RNA, 19 nt, Artificial Sequence
  Description of Artificial Sequence: Synthetic oligonucleotide
  Antisense strand to SEQ ID NO: 1299058
aguaaagucauuuauccac

SEQ ID NO: 1299060 - RNA, 19 nt, Artificial Sequence
  Description of Artificial Sequence: Synthetic oligonucleotide
  Sense strand starting at position 380 of SEQ ID NO: 1241779
acuucuaagccuuggagaa

SEQ ID NO: 1299061 - RNA, 19 nt, Artificial Sequence
  Description of Artificial Sequence: Synthetic oligonucleotide
  Antisense strand to SEQ ID NO: 1299060
uucuccaaggcuuagaagu

SEQ ID NO: 1299062 - RNA, 19 nt, Artificial Sequence
  Description of Artificial Sequence: Synthetic oligonucleotide
  Sense strand starting at position 381 of SEQ ID NO: 1241779
cuucuaagccuuggagaaa

SEQ ID NO: 1299063 - RNA, 19 nt, Artificial Sequence
  Description of Artificial Sequence: Synthetic oligonucleotide
  Antisense strand to SEQ ID NO: 1299062
uuucuccaaggcuuagaag

SEQ ID NO: 1299064 - RNA, 19 nt, Artificial Sequence
  Description of Artificial Sequence: Synthetic oligonucleotide
  Sense strand starting at position 440 of SEQ ID NO: 1241779
aagugucuagcagaaagua

SEQ ID NO: 1299065 - RNA, 19 nt, Artificial Sequence
  Description of Artificial Sequence: Synthetic oligonucleotide
  Antisense strand to SEQ ID NO: 1299064
uacuuucugcuagacacuu

SEQ ID NO: 1299066 - RNA, 19 nt, Artificial Sequence
  Description of Artificial Sequence: Synthetic oligonucleotide
  Sense strand starting at position 527 of SEQ ID NO: 1241779
cuguuaaaugggcauaaca

SEQ ID NO: 1299067 - RNA, 19 nt, Artificial Sequence
  Description of Artificial Sequence: Synthetic oligonucleotide
  Antisense strand to SEQ ID NO: 1299066
uguuaugcccauuuaacag

SEQ ID NO: 1299068 - RNA, 19 nt, Artificial Sequence
  Description of Artificial Sequence: Synthetic oligonucleotide
  Sense strand starting at position 536 of SEQ ID NO: 1241779
gggcauaacagaugaccua

SEQ ID NO: 1299069 - RNA, 19 nt, Artificial Sequence
  Description of Artificial Sequence: Synthetic oligonucleotide
  Antisense strand to SEQ ID NO: 1299068
uaggucaucuguuaugccc

SEQ ID NO: 1299070 - RNA, 19 nt, Artificial Sequence
  Description of Artificial Sequence: Synthetic oligonucleotide
  Sense strand starting at position 749 of SEQ ID NO: 1241779
gcugaagauguguauagaa

SEQ ID NO: 1299071 - RNA, 19 nt, Artificial Sequence
  Description of Artificial Sequence: Synthetic oligonucleotide
  Antisense strand to SEQ ID NO: 1299070
uucuauacacaucuucagc

SEQ ID NO: 1299072 - RNA, 19 nt, Artificial Sequence
  Description of Artificial Sequence: Synthetic oligonucleotide
  Sense strand starting at position 817 of SEQ ID NO: 1241779
ucguuugauccucagaaca

SEQ ID NO: 1299073 - RNA, 19 nt, Artificial Sequence
  Description of Artificial Sequence: Synthetic oligonucleotide
  Antisense strand to SEQ ID NO: 1299072
uguucugaggaucaaacga

SEQ ID NO: 1299074 - RNA, 19 nt, Artificial Sequence
  Description of Artificial Sequence: Synthetic oligonucleotide
  Sense strand starting at position 842 of SEQ ID NO: 1241779
uaagguaggccugggagau

SEQ ID NO: 1299075 - RNA, 19 nt, Artificial Sequence
  Description of Artificial Sequence: Synthetic oligonucleotide
  Antisense strand to SEQ ID NO: 1299074
aucucccaggccuaccuua

SEQ ID NO: 1299076 - RNA, 19 nt, Artificial Sequence
  Description of Artificial Sequence: Synthetic oligonucleotide
  Sense strand starting at position 843 of SEQ ID NO: 1241779
aagguaggccugggagauu

SEQ ID NO: 1299077 - RNA, 19 nt, Artificial Sequence
  Description of Artificial Sequence: Synthetic oligonucleotide
  Antisense strand to SEQ ID NO: 1299076
aaucucccaggccuaccuu

SEQ ID NO: 1299078 - RNA, 19 nt, Artificial Sequence
  Description of Artificial Sequence: Synthetic oligonucleotide
  Sense strand starting at position 1066 of SEQ ID NO: 1241779
gacauagaaugugucuaac

SEQ ID NO: 1299079 - RNA, 19 nt, Artificial Sequence
  Description of Artificial Sequence: Synthetic oligonucleotide
  Antisense strand to SEQ ID NO: 1299078
guuagacacauucuauguc

SEQ ID NO: 1299080 - RNA, 19 nt, Artificial Sequence
  Description of Artificial Sequence: Synthetic oligonucleotide
  Sense strand starting at position 1176 of SEQ ID NO: 1241779
augagaagcuagguuuacu

SEQ ID NO: 1299081 - RNA, 19 nt, Artificial Sequence
  Description of Artificial Sequence: Synthetic oligonucleotide
  Antisense strand to SEQ ID NO: 1299080
aguaaaccuagcuucucau

SEQ ID NO: 1299082 - RNA, 19 nt, Artificial Sequence
  Description of Artificial Sequence: Synthetic oligonucleotide
  Sense strand starting at position 1219 of SEQ ID NO: 1241779
uggcucuagaguuauaaag

SEQ ID NO: 1299083 - RNA, 19 nt, Artificial Sequence
  Description of Artificial Sequence: Synthetic oligonucleotide
  Antisense strand to SEQ ID NO: 1299082
cuuuauaacucuagagcca

SEQ ID NO: 1299084 - RNA, 19 nt, Artificial Sequence
  Description of Artificial Sequence: Synthetic oligonucleotide
  Sense strand starting at position 1229 of SEQ ID NO: 1241779
guuauaaaguaaucaggua

SEQ ID NO: 1299085 - RNA, 19 nt, Artificial Sequence
  Description of Artificial Sequence: Synthetic oligonucleotide
  Antisense strand to SEQ ID NO: 1299084
uaccugauuacuuuauaac

SEQ ID NO: 1299086 - RNA, 19 nt, Artificial Sequence
  Description of Artificial Sequence: Synthetic oligonucleotide
  Sense strand starting at position 1308 of SEQ ID NO: 1241779
gucuuuaucgucucuuguu

SEQ ID NO: 1299087 - RNA, 19 nt, Artificial Sequence
  Description of Artificial Sequence: Synthetic oligonucleotide
  Antisense strand to SEQ ID NO: 1299086
aacaagagacgauaaagac

SEQ ID NO: 1299088 - RNA, 19 nt, Artificial Sequence
  Description of Artificial Sequence: Synthetic oligonucleotide
  Sense strand starting at position 1568 of SEQ ID NO: 1241779
ccaggaagccauggaucua

SEQ ID NO: 1299089 - RNA, 19 nt, Artificial Sequence
  Description of Artificial Sequence: Synthetic oligonucleotide
  Antisense strand to SEQ ID NO: 1299088
uagauccauggcuuccugg

SEQ ID NO: 1299090 - RNA, 19 nt, Artificial Sequence
  Description of Artificial Sequence: Synthetic oligonucleotide
  Sense strand starting at position 1608 of SEQ ID NO: 1241779
ggaucccuggcagaguuaa

SEQ ID NO: 1299091 - RNA, 19 nt, Artificial Sequence
  Description of Artificial Sequence: Synthetic oligonucleotide
  Antisense strand to SEQ ID NO: 1299090
uuaacucugccagggaucc

SEQ ID NO: 1299092 - RNA, 19 nt, Artificial Sequence
  Description of Artificial Sequence: Synthetic oligonucleotide
  Sense strand starting at position 1737 of SEQ ID NO: 1241779
gaaucaggccuguagucau

SEQ ID NO: 1299093 - RNA, 19 nt, Artificial Sequence
  Description of Artificial Sequence: Synthetic oligonucleotide
  Antisense strand to SEQ ID NO: 1299092
augacuacaggccugauuc

SEQ ID NO: 1299094 - RNA, 19 nt, Artificial Sequence
  Description of Artificial Sequence: Synthetic oligonucleotide
  Sense strand starting at position 1744 of SEQ ID NO: 1241779
gccuguagucauagggugu

SEQ ID NO: 1299095 - RNA, 19 nt, Artificial Sequence
  Description of Artificial Sequence: Synthetic oligonucleotide
  Antisense strand to SEQ ID NO: 1299094
acacccuaugacuacaggc

SEQ ID NO: 1299096 - RNA, 19 nt, Artificial Sequence
  Description of Artificial Sequence: Synthetic oligonucleotide
  Sense strand starting at position 2060 of SEQ ID NO: 1241779
ccacaaggcuucuugacua

SEQ ID NO: 1299097 - RNA, 19 nt, Artificial Sequence
  Description of Artificial Sequence: Synthetic oligonucleotide
  Antisense strand to SEQ ID NO: 1299096
uagucaagaagccuugugg

SEQ ID NO: 1299098 - RNA, 19 nt, Artificial Sequence
  Description of Artificial Sequence: Synthetic oligonucleotide
  Sense strand starting at position 2349 of SEQ ID NO: 1241779
cgaguugggacggaaguaa

SEQ ID NO: 1299099 - RNA, 19 nt, Artificial Sequence
  Description of Artificial Sequence: Synthetic oligonucleotide
  Antisense strand to SEQ ID NO: 1299098
uuacuuccgucccaacucg

SEQ ID NO: 1299100 - RNA, 19 nt, Artificial Sequence
  Description of Artificial Sequence: Synthetic oligonucleotide
  Sense strand starting at position 2913 of SEQ ID NO: 1241779
cagggaggugcuuauuaca

SEQ ID NO: 1299101 - RNA, 19 nt, Artificial Sequence
  Description of Artificial Sequence: Synthetic oligonucleotide
  Antisense strand to SEQ ID NO: 1299100
uguaauaagcaccucccug

SEQ ID NO: 1299102 - RNA, 19 nt, Artificial Sequence
  Description of Artificial Sequence: Synthetic oligonucleotide
  Sense strand starting at position 2954 of SEQ ID NO: 1241779
acuggaaccuccuuugauu

SEQ ID NO: 1299103 - RNA, 19 nt, Artificial Sequence
  Description of Artificial Sequence: Synthetic oligonucleotide
  Antisense strand to SEQ ID NO: 1299102
aaucaaaggagguuccagu

SEQ ID NO: 1299104 - RNA, 19 nt, Artificial Sequence
  Description of Artificial Sequence: Synthetic oligonucleotide
  Sense strand starting at position 2976 of SEQ ID NO: 1241779
uugggagauagcugugaaa

SEQ ID NO: 1299105 - RNA, 19 nt, Artificial Sequence
  Description of Artificial Sequence: Synthetic oligonucleotide
  Antisense strand to SEQ ID NO: 1299104
uuucacagcuaucucccaa

SEQ ID NO: 1299106 - RNA, 19 nt, Artificial Sequence
  Description of Artificial Sequence: Synthetic oligonucleotide
  Sense strand starting at position 2978 of SEQ ID NO: 1241779
gggagauagcugugaaagg

SEQ ID NO: 1299107 - RNA, 19 nt, Artificial Sequence
  Description of Artificial Sequence: Synthetic oligonucleotide
  Antisense strand to SEQ ID NO: 1299106
ccuuucacagcuaucuccc

SEQ ID NO: 1299108 - RNA, 19 nt, Artificial Sequence
  Description of Artificial Sequence: Synthetic oligonucleotide
  Sense strand starting at position 3346 of SEQ ID NO: 1241779
ucucuaauaguugauaagu

SEQ ID NO: 1299109 - RNA, 19 nt, Artificial Sequence
  Description of Artificial Sequence: Synthetic oligonucleotide
  Antisense strand to SEQ ID NO: 1299108
acuuaucaacuauuagaga

SEQ ID NO: 1299110 - RNA, 19 nt, Artificial Sequence
  Description of Artificial Sequence: Synthetic oligonucleotide
  Sense strand starting at position 3368 of SEQ ID NO: 1241779
aaggcagauagugauguuu

SEQ ID NO: 1299111 - RNA, 19 nt, Artificial Sequence
  Description of Artificial Sequence: Synthetic oligonucleotide
  Antisense strand to SEQ ID NO: 1299110
aaacaucacuaucugccuu

SEQ ID NO: 1299112 - RNA, 19 nt, Artificial Sequence
  Description of Artificial Sequence: Synthetic oligonucleotide
  Sense strand starting at position 3425 of SEQ ID NO: 1241779
ugcagaguacuugaccuaa

SEQ ID NO: 1299113 - RNA, 19 nt, Artificial Sequence
  Description of Artificial Sequence: Synthetic oligonucleotide
  Antisense strand to SEQ ID NO: 1299112
uuaggucaaguacucugca

SEQ ID NO: 1299114 - RNA, 19 nt, Artificial Sequence
  Description of Artificial Sequence: Synthetic oligonucleotide
  Sense strand starting at position 3498 of SEQ ID NO: 1241779
gacagugaauguguaggaa

SEQ ID NO: 1299115 - RNA, 19 nt, Artificial Sequence
  Description of Artificial Sequence: Synthetic oligonucleotide
  Antisense strand to SEQ ID NO: 1299114
uuccuacacauucacuguc

SEQ ID NO: 1299116 - RNA, 19 nt, Artificial Sequence
  Description of Artificial Sequence: Synthetic oligonucleotide
  Sense strand starting at position 3533 of SEQ ID NO: 1241779
cgaaucugauaggucagaa

SEQ ID NO: 1299117 - RNA, 19 nt, Artificial Sequence
  Description of Artificial Sequence: Synthetic oligonucleotide
  Antisense strand to SEQ ID NO: 1299116
uucugaccuaucagauucg

SEQ ID NO: 1299118 - RNA, 19 nt, Artificial Sequence
  Description of Artificial Sequence: Synthetic oligonucleotide
  Sense strand starting at position 3560 of SEQ ID NO: 1241779
caaugaggucaggguuauu

SEQ ID NO: 1299119 - RNA, 19 nt, Artificial Sequence
  Description of Artificial Sequence: Synthetic oligonucleotide
  Antisense strand to SEQ ID NO: 1299118
aauaacccugaccucauug

SEQ ID NO: 1299120 - RNA, 19 nt, Artificial Sequence
  Description of Artificial Sequence: Synthetic oligonucleotide
  Sense strand starting at position 3571 of SEQ ID NO: 1241779
ggguuauugguuuaauccu

SEQ ID NO: 1299121 - RNA, 19 nt, Artificial Sequence
  Description of Artificial Sequence: Synthetic oligonucleotide
  Antisense strand to SEQ ID NO: 1299120
aggauuaaaccaauaaccc

SEQ ID NO: 1299122 - RNA, 19 nt, Artificial Sequence
  Description of Artificial Sequence: Synthetic oligonucleotide
  Sense strand starting at position 3638 of SEQ ID NO: 1241779
uccugaucucagcaauaug

SEQ ID NO: 1299123 - RNA, 19 nt, Artificial Sequence
  Description of Artificial Sequence: Synthetic oligonucleotide
  Antisense strand to SEQ ID NO: 1299122
cauauugcugagaucagga

SEQ ID NO: 1299124 - RNA, 19 nt, Artificial Sequence
  Description of Artificial Sequence: Synthetic oligonucleotide
  Sense strand starting at position 3746 of SEQ ID NO: 1241779
uuccauugaguuuauacca

SEQ ID NO: 1299125 - RNA, 19 nt, Artificial Sequence
  Description of Artificial Sequence: Synthetic oligonucleotide
  Antisense strand to SEQ ID NO: 1299124
ugguauaaacucaauggaa

SEQ ID NO: 1299126 - RNA, 19 nt, Artificial Sequence
  Description of Artificial Sequence: Synthetic oligonucleotide
  Sense strand starting at position 3821 of SEQ ID NO: 1241779
gaaugacauguuuguggac

SEQ ID NO: 1299127 - RNA, 19 nt, Artificial Sequence
  Description of Artificial Sequence: Synthetic oligonucleotide
  Antisense strand to SEQ ID NO: 1299126
guccacaaacaugucauuc

SEQ ID NO: 1299128 - RNA, 19 nt, Artificial Sequence
  Description of Artificial Sequence: Synthetic oligonucleotide
  Sense strand starting at position 3926 of SEQ ID NO: 1241779
gcguauccuccguuugacu

SEQ ID NO: 1299129 - RNA, 19 nt, Artificial Sequence
  Description of Artificial Sequence: Synthetic oligonucleotide
  Antisense strand to SEQ ID NO: 1299128
agucaaacggaggauacgc

SEQ ID NO: 1299130 - RNA, 19 nt, Artificial Sequence
  Description of Artificial Sequence: Synthetic oligonucleotide
  Sense strand starting at position 180 of SEQ ID NO: 1241780
aggcucuaugcuuaacaca

SEQ ID NO: 1299131 - RNA, 19 nt, Artificial Sequence
  Description of Artificial Sequence: Synthetic oligonucleotide
  Antisense strand to SEQ ID NO: 1299130
uguguuaagcauagagccu

SEQ ID NO: 1299132 - RNA, 19 nt, Artificial Sequence
  Description of Artificial Sequence: Synthetic oligonucleotide
  Sense strand starting at position 317 of SEQ ID NO: 1241780
gacaguaacgccuaacaca

SEQ ID NO: 1299133 - RNA, 19 nt, Artificial Sequence
  Description of Artificial Sequence: Synthetic oligonucleotide
  Antisense strand to SEQ ID NO: 1299132
uguguuaggcguuacuguc

SEQ ID NO: 1299134 - RNA, 19 nt, Artificial Sequence
  Description of Artificial Sequence: Synthetic oligonucleotide
  Sense strand starting at position 379 of SEQ ID NO: 1241780
agaaucugaucagcaaugu

SEQ ID NO: 1299135 - RNA, 19 nt, Artificial Sequence
  Description of Artificial Sequence: Synthetic oligonucleotide
  Antisense strand to SEQ ID NO: 1299134
acauugcugaucagauucu

SEQ ID NO: 1299136 - RNA, 19 nt, Artificial Sequence
  Description of Artificial Sequence: Synthetic oligonucleotide
  Sense strand starting at position 380 of SEQ ID NO: 1241780
gaaucugaucagcaauguu

SEQ ID NO: 1299137 - RNA, 19 nt, Artificial Sequence
  Description of Artificial Sequence: Synthetic oligonucleotide
  Antisense strand to SEQ ID NO: 1299136
aacauugcugaucagauuc

SEQ ID NO: 1299138 - RNA, 19 nt, Artificial Sequence
  Description of Artificial Sequence: Synthetic oligonucleotide
  Sense strand starting at position 440 of SEQ ID NO: 1241780
agcuauuauuaagugacua

SEQ ID NO: 1299139 - RNA, 19 nt, Artificial Sequence
  Description of Artificial Sequence: Synthetic oligonucleotide
  Antisense strand to SEQ ID NO: 1299138
uagucacuuaauaauagcu

SEQ ID NO: 1299140 - RNA, 19 nt, Artificial Sequence
  Description of Artificial Sequence: Synthetic oligonucleotide
  Sense strand starting at position 448 of SEQ ID NO: 1241780
uuaagugacuacuuaaguu

SEQ ID NO: 1299141 - RNA, 19 nt, Artificial Sequence
  Description of Artificial Sequence: Synthetic oligonucleotide
  Antisense strand to SEQ ID NO: 1299140
aacuuaaguagucacuuaa

SEQ ID NO: 1299142 - RNA, 19 nt, Artificial Sequence
  Description of Artificial Sequence: Synthetic oligonucleotide
  Sense strand starting at position 452 of SEQ ID NO: 1241780
gugacuacuuaaguuacau

SEQ ID NO: 1299143 - RNA, 19 nt, Artificial Sequence
  Description of Artificial Sequence: Synthetic oligonucleotide
  Antisense strand to SEQ ID NO: 1299142
auguaacuuaaguagucac

SEQ ID NO: 1299144 - RNA, 19 nt, Artificial Sequence
  Description of Artificial Sequence: Synthetic oligonucleotide
  Sense strand starting at position 654 of SEQ ID NO: 1241780
gcaugucauaaagaaaggu

SEQ ID NO: 1299145 - RNA, 19 nt, Artificial Sequence
  Description of Artificial Sequence: Synthetic oligonucleotide
  Antisense strand to SEQ ID NO: 1299144
accuuucuuuaugacaugc

SEQ ID NO: 1299146 - RNA, 19 nt, Artificial Sequence
  Description of Artificial Sequence: Synthetic oligonucleotide
  Sense strand starting at position 663 of SEQ ID NO: 1241780
aaagaaaggugccuuuauu

SEQ ID NO: 1299147 - RNA, 19 nt, Artificial Sequence
  Description of Artificial Sequence: Synthetic oligonucleotide
  Antisense strand to SEQ ID NO: 1299146
aauaaaggcaccuuucuuu

SEQ ID NO: 1299148 - RNA, 19 nt, Artificial Sequence
  Description of Artificial Sequence: Synthetic oligonucleotide
  Sense strand starting at position 858 of SEQ ID NO: 1241780
uuuccaaguuguuccaaga

SEQ ID NO: 1299149 - RNA, 19 nt, Artificial Sequence
  Description of Artificial Sequence: Synthetic oligonucleotide
  Antisense strand to SEQ ID NO: 1299148
ucuuggaacaacuuggaaa

SEQ ID NO: 1299150 - RNA, 19 nt, Artificial Sequence
  Description of Artificial Sequence: Synthetic oligonucleotide
  Sense strand starting at position 995 of SEQ ID NO: 1241780
ugcugcugucugucgaauu

SEQ ID NO: 1299151 - RNA, 19 nt, Artificial Sequence
  Description of Artificial Sequence: Synthetic oligonucleotide
  Antisense strand to SEQ ID NO: 1299150
aauucgacagacagcagca

SEQ ID NO: 1299152 - RNA, 19 nt, Artificial Sequence
  Description of Artificial Sequence: Synthetic oligonucleotide
  Sense strand starting at position 1147 of SEQ ID NO: 1241780
ggaacugucaaacgguuau

SEQ ID NO: 1299153 - RNA, 19 nt, Artificial Sequence
  Description of Artificial Sequence: Synthetic oligonucleotide
  Antisense strand to SEQ ID NO: 1299152
auaaccguuugacaguucc

SEQ ID NO: 1299154 - RNA, 19 nt, Artificial Sequence
  Description of Artificial Sequence: Synthetic oligonucleotide
  Sense strand starting at position 1151 of SEQ ID NO: 1241780
cugucaaacgguuaugaaa

SEQ ID NO: 1299155 - RNA, 19 nt, Artificial Sequence
  Description of Artificial Sequence: Synthetic oligonucleotide
  Antisense strand to SEQ ID NO: 1299154
uuucauaaccguuugacag

SEQ ID NO: 1299156 - RNA, 19 nt, Artificial Sequence
  Description of Artificial Sequence: Synthetic oligonucleotide
  Sense strand starting at position 1162 of SEQ ID NO: 1241780
uuaugaaagucccuugcaa

SEQ ID NO: 1299157 - RNA, 19 nt, Artificial Sequence
  Description of Artificial Sequence: Synthetic oligonucleotide
  Antisense strand to SEQ ID NO: 1299156
uugcaagggacuuucauaa

SEQ ID NO: 1299158 - RNA, 19 nt, Artificial Sequence
  Description of Artificial Sequence: Synthetic oligonucleotide
  Sense strand starting at position 1341 of SEQ ID NO: 1241780
aaggucacauccucugaga

SEQ ID NO: 1299159 - RNA, 19 nt, Artificial Sequence
  Description of Artificial Sequence: Synthetic oligonucleotide
  Antisense strand to SEQ ID NO: 1299158
ucucagaggaugugaccuu

SEQ ID NO: 1299160 - RNA, 19 nt, Artificial Sequence
  Description of Artificial Sequence: Synthetic oligonucleotide
  Sense strand starting at position 1416 of SEQ ID NO: 1241780
cugccugucccguuucuaa

SEQ ID NO: 1299161 - RNA, 19 nt, Artificial Sequence
  Description of Artificial Sequence: Synthetic oligonucleotide
  Antisense strand to SEQ ID NO: 1299160
uuagaaacgggacaggcag

SEQ ID NO: 1299162 - RNA, 19 nt, Artificial Sequence
  Description of Artificial Sequence: Synthetic oligonucleotide
  Sense strand starting at position 2190 of SEQ ID NO: 1241780
ccuggucuucuaggaaaug

SEQ ID NO: 1299163 - RNA, 19 nt, Artificial Sequence
  Description of Artificial Sequence: Synthetic oligonucleotide
  Antisense strand to SEQ ID NO: 1299162
cauuuccuagaagaccagg

SEQ ID NO: 1299164 - RNA, 19 nt, Artificial Sequence
  Description of Artificial Sequence: Synthetic oligonucleotide
  Sense strand starting at position 2200 of SEQ ID NO: 1241780
uaggaaaugugguuuacag

SEQ ID NO: 1299165 - RNA, 19 nt, Artificial Sequence
  Description of Artificial Sequence: Synthetic oligonucleotide
  Antisense strand to SEQ ID NO: 1299164
cuguaaaccacauuuccua

SEQ ID NO: 1299166 - RNA, 19 nt, Artificial Sequence
  Description of Artificial Sequence: Synthetic oligonucleotide
  Sense strand starting at position 2211 of SEQ ID NO: 1241780
guuuacagccuuguucgua

SEQ ID NO: 1299167 - RNA, 19 nt, Artificial Sequence
  Description of Artificial Sequence: Synthetic oligonucleotide
  Antisense strand to SEQ ID NO: 1299166
uacgaacaaggcuguaaac

SEQ ID NO: 1299168 - RNA, 19 nt, Artificial Sequence
  Description of Artificial Sequence: Synthetic oligonucleotide
  Sense strand starting at position 2224 of SEQ ID NO: 1241780
uucguaguagcuugauuua

SEQ ID NO: 1299169 - RNA, 19 nt, Artificial Sequence
  Description of Artificial Sequence: Synthetic oligonucleotide
  Antisense strand to SEQ ID NO: 1299168
uaaaucaagcuacuacgaa

SEQ ID NO: 1299170 - RNA, 19 nt, Artificial Sequence
  Description of Artificial Sequence: Synthetic oligonucleotide
  Sense strand starting at position 2227 of SEQ ID NO: 1241780
guaguagcuugauuuauua

SEQ ID NO: 1299171 - RNA, 19 nt, Artificial Sequence
  Description of Artificial Sequence: Synthetic oligonucleotide
  Antisense strand to SEQ ID NO: 1299170
uaauaaaucaagcuacuac

SEQ ID NO: 1299172 - RNA, 19 nt, Artificial Sequence
  Description of Artificial Sequence: Synthetic oligonucleotide
  Sense strand starting at position 2243 of SEQ ID NO: 1241780
uuaaguguauuggcagaga

SEQ ID NO: 1299173 - RNA, 19 nt, Artificial Sequence
  Description of Artificial Sequence: Synthetic oligonucleotide
  Antisense strand to SEQ ID NO: 1299172
ucucugccaauacacuuaa

SEQ ID NO: 1299174 - RNA, 19 nt, Artificial Sequence
  Description of Artificial Sequence: Synthetic oligonucleotide
  Sense strand starting at position 2246 of SEQ ID NO: 1241780
aguguauuggcagagaguu

SEQ ID NO: 1299175 - RNA, 19 nt, Artificial Sequence
  Description of Artificial Sequence: Synthetic oligonucleotide
  Antisense strand to SEQ ID NO: 1299174
aacucucugccaauacacu

SEQ ID NO: 1299176 - RNA, 19 nt, Artificial Sequence
  Description of Artificial Sequence: Synthetic oligonucleotide
  Sense strand starting at position 2354 of SEQ ID NO: 1241780
cagauaguguuaguauuau

SEQ ID NO: 1299177 - RNA, 19 nt, Artificial Sequence
  Description of Artificial Sequence: Synthetic oligonucleotide
  Antisense strand to SEQ ID NO: 1299176
auaauacuaacacuaucug

SEQ ID NO: 1299178 - RNA, 19 nt, Artificial Sequence
  Description of Artificial Sequence: Synthetic oligonucleotide
  Sense strand starting at position 2380 of SEQ ID NO: 1241780
acucauugauaugugucua

SEQ ID NO: 1299179 - RNA, 19 nt, Artificial Sequence
  Description of Artificial Sequence: Synthetic oligonucleotide
  Antisense strand to SEQ ID NO: 1299178
uagacacauaucaaugagu

SEQ ID NO: 1299180 - RNA, 19 nt, Artificial Sequence
  Description of Artificial Sequence: Synthetic oligonucleotide
  Sense strand starting at position 2384 of SEQ ID NO: 1241780
auugauaugugucuaaauc

SEQ ID NO: 1299181 - RNA, 19 nt, Artificial Sequence
  Description of Artificial Sequence: Synthetic oligonucleotide
  Antisense strand to SEQ ID NO: 1299180
gauuuagacacauaucaau

SEQ ID NO: 1299182 - RNA, 19 nt, Artificial Sequence
  Description of Artificial Sequence: Synthetic oligonucleotide
  Sense strand starting at position 2385 of SEQ ID NO: 1241780
uugauaugugucuaaaucc

SEQ ID NO: 1299183 - RNA, 19 nt, Artificial Sequence
  Description of Artificial Sequence: Synthetic oligonucleotide
  Antisense strand to SEQ ID NO: 1299182
ggauuuagacacauaucaa

SEQ ID NO: 1299184 - RNA, 19 nt, Artificial Sequence
  Description of Artificial Sequence: Synthetic oligonucleotide
  Sense strand starting at position 2448 of SEQ ID NO: 1241780
ccuaaucaucuauaguguu

SEQ ID NO: 1299185 - RNA, 19 nt, Artificial Sequence
  Description of Artificial Sequence: Synthetic oligonucleotide
  Antisense strand to SEQ ID NO: 1299184
aacacuauagaugauuagg

SEQ ID NO: 1299186 - RNA, 19 nt, Artificial Sequence
  Description of Artificial Sequence: Synthetic oligonucleotide
  Sense strand starting at position 2814 of SEQ ID NO: 1241780
ggccgcauuguguuuauua

SEQ ID NO: 1299187 - RNA, 19 nt, Artificial Sequence
  Description of Artificial Sequence: Synthetic oligonucleotide
  Antisense strand to SEQ ID NO: 1299186
uaauaaacacaaugcggcc

SEQ ID NO: 1299188 - RNA, 19 nt, Artificial Sequence
  Description of Artificial Sequence: Synthetic oligonucleotide
  Sense strand starting at position 2923 of SEQ ID NO: 1241780
gagggagauuaacaaugaa

SEQ ID NO: 1299189 - RNA, 19 nt, Artificial Sequence
  Description of Artificial Sequence: Synthetic oligonucleotide
  Antisense strand to SEQ ID NO: 1299188
uucauuguuaaucucccuc

SEQ ID NO: 1299190 - RNA, 19 nt, Artificial Sequence
  Description of Artificial Sequence: Synthetic oligonucleotide
  Sense strand starting at position 2980 of SEQ ID NO: 1241780
gucccucaaugaguuuaca

SEQ ID NO: 1299191 - RNA, 19 nt, Artificial Sequence
  Description of Artificial Sequence: Synthetic oligonucleotide
  Antisense strand to SEQ ID NO: 1299190
uguaaacucauugagggac

SEQ ID NO: 1299192 - RNA, 19 nt, Artificial Sequence
  Description of Artificial Sequence: Synthetic oligonucleotide
  Sense strand starting at position 3387 of SEQ ID NO: 1241780
cuggaaucacucuguccau

SEQ ID NO: 1299193 - RNA, 19 nt, Artificial Sequence
  Description of Artificial Sequence: Synthetic oligonucleotide
  Antisense strand to SEQ ID NO: 1299192
auggacagagugauuccag

SEQ ID NO: 1299194 - RNA, 19 nt, Artificial Sequence
  Description of Artificial Sequence: Synthetic oligonucleotide
  Sense strand starting at position 3388 of SEQ ID NO: 1241780
uggaaucacucuguccauu

SEQ ID NO: 1299195 - RNA, 19 nt, Artificial Sequence
  Description of Artificial Sequence: Synthetic oligonucleotide
  Antisense strand to SEQ ID NO: 1299194
aauggacagagugauucca

SEQ ID NO: 1299196 - RNA, 19 nt, Artificial Sequence
  Description of Artificial Sequence: Synthetic oligonucleotide
  Sense strand starting at position 3400 of SEQ ID NO: 1241780
guccauuagacagggcaau

SEQ ID NO: 1299197 - RNA, 19 nt, Artificial Sequence
  Description of Artificial Sequence: Synthetic oligonucleotide
  Antisense strand to SEQ ID NO: 1299196
auugcccugucuaauggac

SEQ ID NO: 1299198 - RNA, 19 nt, Artificial Sequence
  Description of Artificial Sequence: Synthetic oligonucleotide
  Sense strand starting at position 3401 of SEQ ID NO: 1241780
uccauuagacagggcaaua

SEQ ID NO: 1299199 - RNA, 19 nt, Artificial Sequence
  Description of Artificial Sequence: Synthetic oligonucleotide
  Antisense strand to SEQ ID NO: 1299198
uauugcccugucuaaugga

SEQ ID NO: 1299200 - RNA, 19 nt, Artificial Sequence
  Description of Artificial Sequence: Synthetic oligonucleotide
  Sense strand starting at position 3502 of SEQ ID NO: 1241780
ggcugaccucuacaaauua

SEQ ID NO: 1299201 - RNA, 19 nt, Artificial Sequence
  Description of Artificial Sequence: Synthetic oligonucleotide
  Antisense strand to SEQ ID NO: 1299200
uaauuuguagaggucagcc

SEQ ID NO: 1299202 - RNA, 19 nt, Artificial Sequence
  Description of Artificial Sequence: Synthetic oligonucleotide
  Sense strand starting at position 3572 of SEQ ID NO: 1241780
cacagaagauuggaggaaa

SEQ ID NO: 1299203 - RNA, 19 nt, Artificial Sequence
  Description of Artificial Sequence: Synthetic oligonucleotide
  Antisense strand to SEQ ID NO: 1299202
uuuccuccaaucuucugug

SEQ ID NO: 1299204 - RNA, 19 nt, Artificial Sequence
  Description of Artificial Sequence: Synthetic oligonucleotide
  Sense strand starting at position 3591 of SEQ ID NO: 1241780
aagaaagguugguuagagu

SEQ ID NO: 1299205 - RNA, 19 nt, Artificial Sequence
  Description of Artificial Sequence: Synthetic oligonucleotide
  Antisense strand to SEQ ID NO: 1299204
acucuaaccaaccuuucuu

SEQ ID NO: 1299206 - RNA, 19 nt, Artificial Sequence
  Description of Artificial Sequence: Synthetic oligonucleotide
  Sense strand starting at position 3726 of SEQ ID NO: 1241780
gccucaggucuggaaguga

SEQ ID NO: 1299207 - RNA, 19 nt, Artificial Sequence
  Description of Artificial Sequence: Synthetic oligonucleotide
  Antisense strand to SEQ ID NO: 1299206
ucacuuccagaccugaggc

SEQ ID NO: 1299208 - RNA, 19 nt, Artificial Sequence
  Description of Artificial Sequence: Synthetic oligonucleotide
  Sense strand starting at position 3956 of SEQ ID NO: 1241780
acaucucauggguguggaa

SEQ ID NO: 1299209 - RNA, 19 nt, Artificial Sequence
  Description of Artificial Sequence: Synthetic oligonucleotide
  Antisense strand to SEQ ID NO: 1299208
uuccacacccaugagaugu

SEQ ID NO: 1299210 - RNA, 19 nt, Artificial Sequence
  Description of Artificial Sequence: Synthetic oligonucleotide
  Sense strand starting at position 153 of SEQ ID NO: 1241781
gagguacaaguaugugaua

SEQ ID NO: 1299211 - RNA, 19 nt, Artificial Sequence
  Description of Artificial Sequence: Synthetic oligonucleotide
  Antisense strand to SEQ ID NO: 1299210
uaucacauacuuguaccuc

SEQ ID NO: 1299212 - RNA, 19 nt, Artificial Sequence
  Description of Artificial Sequence: Synthetic oligonucleotide
  Sense strand starting at position 235 of SEQ ID NO: 1241781
gauggauucgcccaccaga

SEQ ID NO: 1299213 - RNA, 19 nt, Artificial Sequence
  Description of Artificial Sequence: Synthetic oligonucleotide
  Antisense strand to SEQ ID NO: 1299212
ucuggugggcgaauccauc

SEQ ID NO: 1299214 - RNA, 19 nt, Artificial Sequence
  Description of Artificial Sequence: Synthetic oligonucleotide
  Sense strand starting at position 238 of SEQ ID NO: 1241781
ggauucgcccaccagagaa

SEQ ID NO: 1299215 - RNA, 19 nt, Artificial Sequence
  Description of Artificial Sequence: Synthetic oligonucleotide
  Antisense strand to SEQ ID NO: 1299214
uucucuggugggcgaaucc

SEQ ID NO: 1299216 - RNA, 19 nt, Artificial Sequence
  Description of Artificial Sequence: Synthetic oligonucleotide
  Sense strand starting at position 253 of SEQ ID NO: 1241781
agaauagggccguguggaa

SEQ ID NO: 1299217 - RNA, 19 nt, Artificial Sequence
  Description of Artificial Sequence: Synthetic oligonucleotide
  Antisense strand to SEQ ID NO: 1299216
uuccacacggcccuauucu

SEQ ID NO: 1299218 - RNA, 19 nt, Artificial Sequence
  Description of Artificial Sequence: Synthetic oligonucleotide
  Sense strand starting at position 290 of SEQ ID NO: 1241781
ggaagccuaucacucuuaa

SEQ ID NO: 1299219 - RNA, 19 nt, Artificial Sequence
  Description of Artificial Sequence: Synthetic oligonucleotide
  Antisense strand to SEQ ID NO: 1299218
uuaagagugauaggcuucc

SEQ ID NO: 1299220 - RNA, 19 nt, Artificial Sequence
  Description of Artificial Sequence: Synthetic oligonucleotide
  Sense strand starting at position 350 of SEQ ID NO: 1241781
ggcaauggcucucuuccua

SEQ ID NO: 1299221 - RNA, 19 nt, Artificial Sequence
  Description of Artificial Sequence: Synthetic oligonucleotide
  Antisense strand to SEQ ID NO: 1299220
uaggaagagagccauugcc

SEQ ID NO: 1299222 - RNA, 19 nt, Artificial Sequence
  Description of Artificial Sequence: Synthetic oligonucleotide
  Sense strand starting at position 434 of SEQ ID NO: 1241781
auagcuaaucuauggacuu

SEQ ID NO: 1299223 - RNA, 19 nt, Artificial Sequence
  Description of Artificial Sequence: Synthetic oligonucleotide
  Antisense strand to SEQ ID NO: 1299222
aaguccauagauuagcuau

SEQ ID NO: 1299224 - RNA, 19 nt, Artificial Sequence
  Description of Artificial Sequence: Synthetic oligonucleotide
  Sense strand starting at position 553 of SEQ ID NO: 1241781
cccuccucuugccugagau

SEQ ID NO: 1299225 - RNA, 19 nt, Artificial Sequence
  Description of Artificial Sequence: Synthetic oligonucleotide
  Antisense strand to SEQ ID NO: 1299224
aucucaggcaagaggaggg

SEQ ID NO: 1299226 - RNA, 19 nt, Artificial Sequence
  Description of Artificial Sequence: Synthetic oligonucleotide
  Sense strand starting at position 554 of SEQ ID NO: 1241781
ccuccucuugccugagauu

SEQ ID NO: 1299227 - RNA, 19 nt, Artificial Sequence
  Description of Artificial Sequence: Synthetic oligonucleotide
  Antisense strand to SEQ ID NO: 1299226
aaucucaggcaagaggagg

SEQ ID NO: 1299228 - RNA, 19 nt, Artificial Sequence
  Description of Artificial Sequence: Synthetic oligonucleotide
  Sense strand starting at position 555 of SEQ ID NO: 1241781
cuccucuugccugagauua

SEQ ID NO: 1299229 - RNA, 19 nt, Artificial Sequence
  Description of Artificial Sequence: Synthetic oligonucleotide
  Antisense strand to SEQ ID NO: 1299228
uaaucucaggcaagaggag

SEQ ID NO: 1299230 - RNA, 19 nt, Artificial Sequence
  Description of Artificial Sequence: Synthetic oligonucleotide
  Sense strand starting at position 591 of SEQ ID NO: 1241781
gcaggacauccagaggcau

SEQ ID NO: 1299231 - RNA, 19 nt, Artificial Sequence
  Description of Artificial Sequence: Synthetic oligonucleotide
  Antisense strand to SEQ ID NO: 1299230
augccucuggauguccugc

SEQ ID NO: 1299232 - RNA, 19 nt, Artificial Sequence
  Description of Artificial Sequence: Synthetic oligonucleotide
  Sense strand starting at position 617 of SEQ ID NO: 1241781
ggaucuuagcuccaguaaa

SEQ ID NO: 1299233 - RNA, 19 nt, Artificial Sequence
  Description of Artificial Sequence: Synthetic oligonucleotide
  Antisense strand to SEQ ID NO: 1299232
uuuacuggagcuaagaucc

SEQ ID NO: 1299234 - RNA, 19 nt, Artificial Sequence
  Description of Artificial Sequence: Synthetic oligonucleotide
  Sense strand starting at position 784 of SEQ ID NO: 1241781
aagagugagccaggaaucu

SEQ ID NO: 1299235 - RNA, 19 nt, Artificial Sequence
  Description of Artificial Sequence: Synthetic oligonucleotide
  Antisense strand to SEQ ID NO: 1299234
agauuccuggcucacucuu

SEQ ID NO: 1299236 - RNA, 19 nt, Artificial Sequence
  Description of Artificial Sequence: Synthetic oligonucleotide
  Sense strand starting at position 823 of SEQ ID NO: 1241781
gggcaagagaucugcuguu

SEQ ID NO: 1299237 - RNA, 19 nt, Artificial Sequence
  Description of Artificial Sequence: Synthetic oligonucleotide
  Antisense strand to SEQ ID NO: 1299236
aacagcagaucucuugccc

SEQ ID NO: 1299238 - RNA, 19 nt, Artificial Sequence
  Description of Artificial Sequence: Synthetic oligonucleotide
  Sense strand starting at position 849 of SEQ ID NO: 1241781
uggccuggucuuuagaaca

SEQ ID NO: 1299239 - RNA, 19 nt, Artificial Sequence
  Description of Artificial Sequence: Synthetic oligonucleotide
  Antisense strand to SEQ ID NO: 1299238
uguucuaaagaccaggcca

SEQ ID NO: 1299240 - RNA, 19 nt, Artificial Sequence
  Description of Artificial Sequence: Synthetic oligonucleotide
  Sense strand starting at position 959 of SEQ ID NO: 1241781
aggcgcuguguucucuaua

SEQ ID NO: 1299241 - RNA, 19 nt, Artificial Sequence
  Description of Artificial Sequence: Synthetic oligonucleotide
  Antisense strand to SEQ ID NO: 1299240
uauagagaacacagcgccu

SEQ ID NO: 1299242 - RNA, 19 nt, Artificial Sequence
  Description of Artificial Sequence: Synthetic oligonucleotide
  Sense strand starting at position 964 of SEQ ID NO: 1241781
cuguguucucuauagucaa

SEQ ID NO: 1299243 - RNA, 19 nt, Artificial Sequence
  Description of Artificial Sequence: Synthetic oligonucleotide
  Antisense strand to SEQ ID NO: 1299242
uugacuauagagaacacag

SEQ ID NO: 1299244 - RNA, 19 nt, Artificial Sequence
  Description of Artificial Sequence: Synthetic oligonucleotide
  Sense strand starting at position 1236 of SEQ ID NO: 1241781
ggcugugacuucccaagga

SEQ ID NO: 1299245 - RNA, 19 nt, Artificial Sequence
  Description of Artificial Sequence: Synthetic oligonucleotide
  Antisense strand to SEQ ID NO: 1299244
uccuugggaagucacagcc

SEQ ID NO: 1299246 - RNA, 19 nt, Artificial Sequence
  Description of Artificial Sequence: Synthetic oligonucleotide
  Sense strand starting at position 1240 of SEQ ID NO: 1241781
gugacuucccaaggaaauu

SEQ ID NO: 1299247 - RNA, 19 nt, Artificial Sequence
  Description of Artificial Sequence: Synthetic oligonucleotide
  Antisense strand to SEQ ID NO: 1299246
aauuuccuugggaagucac

SEQ ID NO: 1299248 - RNA, 19 nt, Artificial Sequence
  Description of Artificial Sequence: Synthetic oligonucleotide
  Sense strand starting at position 2085 of SEQ ID NO: 1241781
ggucacuuccaaugguaaa

SEQ ID NO: 1299249 - RNA, 19 nt, Artificial Sequence
  Description of Artificial Sequence: Synthetic oligonucleotide
  Antisense strand to SEQ ID NO: 1299248
uuuaccauuggaagugacc

SEQ ID NO: 1299250 - RNA, 19 nt, Artificial Sequence
  Description of Artificial Sequence: Synthetic oligonucleotide
  Sense strand starting at position 2282 of SEQ ID NO: 1241781
ggaagaaagucuguggcca

SEQ ID NO: 1299251 - RNA, 19 nt, Artificial Sequence
  Description of Artificial Sequence: Synthetic oligonucleotide
  Antisense strand to SEQ ID NO: 1299250
uggccacagacuuucuucc

SEQ ID NO: 1299252 - RNA, 19 nt, Artificial Sequence
  Description of Artificial Sequence: Synthetic oligonucleotide
  Sense strand starting at position 2351 of SEQ ID NO: 1241781
auggauaauugcuuaagag

SEQ ID NO: 1299253 - RNA, 19 nt, Artificial Sequence
  Description of Artificial Sequence: Synthetic oligonucleotide
  Antisense strand to SEQ ID NO: 1299252
cucuuaagcaauuauccau

SEQ ID NO: 1299254 - RNA, 19 nt, Artificial Sequence
  Description of Artificial Sequence: Synthetic oligonucleotide
  Sense strand starting at position 2366 of SEQ ID NO: 1241781
agagaaauaccuugaggcu

SEQ ID NO: 1299255 - RNA, 19 nt, Artificial Sequence
  Description of Artificial Sequence: Synthetic oligonucleotide
  Antisense strand to SEQ ID NO: 1299254
agccucaagguauuucucu

SEQ ID NO: 1299256 - RNA, 19 nt, Artificial Sequence
  Description of Artificial Sequence: Synthetic oligonucleotide
  Sense strand starting at position 2792 of SEQ ID NO: 1241781
aggugaaggccucaggauu

SEQ ID NO: 1299257 - RNA, 19 nt, Artificial Sequence
  Description of Artificial Sequence: Synthetic oligonucleotide
  Antisense strand to SEQ ID NO: 1299256
aauccugaggccuucaccu

SEQ ID NO: 1299258 - RNA, 19 nt, Artificial Sequence
  Description of Artificial Sequence: Synthetic oligonucleotide
  Sense strand starting at position 2854 of SEQ ID NO: 1241781
gcuuuaacccuuuggagug

SEQ ID NO: 1299259 - RNA, 19 nt, Artificial Sequence
  Description of Artificial Sequence: Synthetic oligonucleotide
  Antisense strand to SEQ ID NO: 1299258
cacuccaaaggguuaaagc

SEQ ID NO: 1299260 - RNA, 19 nt, Artificial Sequence
  Description of Artificial Sequence: Synthetic oligonucleotide
  Sense strand starting at position 2864 of SEQ ID NO: 1241781
uuuggagugcuguagcuaa

SEQ ID NO: 1299261 - RNA, 19 nt, Artificial Sequence
  Description of Artificial Sequence: Synthetic oligonucleotide
  Antisense strand to SEQ ID NO: 1299260
uuagcuacagcacuccaaa

SEQ ID NO: 1299262 - RNA, 19 nt, Artificial Sequence
  Description of Artificial Sequence: Synthetic oligonucleotide
  Sense strand starting at position 3004 of SEQ ID NO: 1241781
aucacagcuccacaguuau

SEQ ID NO: 1299263 - RNA, 19 nt, Artificial Sequence
  Description of Artificial Sequence: Synthetic oligonucleotide
  Antisense strand to SEQ ID NO: 1299262
auaacuguggagcugugau

SEQ ID NO: 1299264 - RNA, 19 nt, Artificial Sequence
  Description of Artificial Sequence: Synthetic oligonucleotide
  Sense strand starting at position 3217 of SEQ ID NO: 1241781
gaauguggccuugggcaaa

SEQ ID NO: 1299265 - RNA, 19 nt, Artificial Sequence
  Description of Artificial Sequence: Synthetic oligonucleotide
  Antisense strand to SEQ ID NO: 1299264
uuugcccaaggccacauuc

SEQ ID NO: 1299266 - RNA, 19 nt, Artificial Sequence
  Description of Artificial Sequence: Synthetic oligonucleotide
  Sense strand starting at position 3251 of SEQ ID NO: 1241781
cagccugacuuugugguua

SEQ ID NO: 1299267 - RNA, 19 nt, Artificial Sequence
  Description of Artificial Sequence: Synthetic oligonucleotide
  Antisense strand to SEQ ID NO: 1299266
uaaccacaaagucaggcug

SEQ ID NO: 1299268 - RNA, 19 nt, Artificial Sequence
  Description of Artificial Sequence: Synthetic oligonucleotide
  Sense strand starting at position 3288 of SEQ ID NO: 1241781
cccagagagucauuggaua

SEQ ID NO: 1299269 - RNA, 19 nt, Artificial Sequence
  Description of Artificial Sequence: Synthetic oligonucleotide
  Antisense strand to SEQ ID NO: 1299268
uauccaaugacucucuggg

SEQ ID NO: 1299270 - RNA, 19 nt, Artificial Sequence
  Description of Artificial Sequence: Synthetic oligonucleotide
  Sense strand starting at position 3337 of SEQ ID NO: 1241781
uuagaacucugcuugguac

SEQ ID NO: 1299271 - RNA, 19 nt, Artificial Sequence
  Description of Artificial Sequence: Synthetic oligonucleotide
  Antisense strand to SEQ ID NO: 1299270
guaccaagcagaguucuaa

SEQ ID NO: 1299272 - RNA, 19 nt, Artificial Sequence
  Description of Artificial Sequence: Synthetic oligonucleotide
  Sense strand starting at position 3338 of SEQ ID NO: 1241781
uagaacucugcuugguaca

SEQ ID NO: 1299273 - RNA, 19 nt, Artificial Sequence
  Description of Artificial Sequence: Synthetic oligonucleotide
  Antisense strand to SEQ ID NO: 1299272
uguaccaagcagaguucua

SEQ ID NO: 1299274 - RNA, 19 nt, Artificial Sequence
  Description of Artificial Sequence: Synthetic oligonucleotide
  Sense strand starting at position 3339 of SEQ ID NO: 1241781
agaacucugcuugguacaa

SEQ ID NO: 1299275 - RNA, 19 nt, Artificial Sequence
  Description of Artificial Sequence: Synthetic oligonucleotide
  Antisense strand to SEQ ID NO: 1299274
uuguaccaagcagaguucu

SEQ ID NO: 1299276 - RNA, 19 nt, Artificial Sequence
  Description of Artificial Sequence: Synthetic oligonucleotide
  Sense strand starting at position 3340 of SEQ ID NO: 1241781
gaacucugcuugguacaaa

SEQ ID NO: 1299277 - RNA, 19 nt, Artificial Sequence
  Description of Artificial Sequence: Synthetic oligonucleotide
  Antisense strand to SEQ ID NO: 1299276
uuuguaccaagcagaguuc

SEQ ID NO: 1299278 - RNA, 19 nt, Artificial Sequence
  Description of Artificial Sequence: Synthetic oligonucleotide
  Sense strand starting at position 3343 of SEQ ID NO: 1241781
cucugcuugguacaaagaa

SEQ ID NO: 1299279 - RNA, 19 nt, Artificial Sequence
  Description of Artificial Sequence: Synthetic oligonucleotide
  Antisense strand to SEQ ID NO: 1299278
uucuuuguaccaagcagag

SEQ ID NO: 1299280 - RNA, 19 nt, Artificial Sequence
  Description of Artificial Sequence: Synthetic oligonucleotide
  Sense strand starting at position 3357 of SEQ ID NO: 1241781
aagaaaguguauucuaguu

SEQ ID NO: 1299281 - RNA, 19 nt, Artificial Sequence
  Description of Artificial Sequence: Synthetic oligonucleotide
  Antisense strand to SEQ ID NO: 1299280
aacuagaauacacuuucuu

SEQ ID NO: 1299282 - RNA, 19 nt, Artificial Sequence
  Description of Artificial Sequence: Synthetic oligonucleotide
  Sense strand starting at position 3362 of SEQ ID NO: 1241781
aguguauucuaguucucag

SEQ ID NO: 1299283 - RNA, 19 nt, Artificial Sequence
  Description of Artificial Sequence: Synthetic oligonucleotide
  Antisense strand to SEQ ID NO: 1299282
cugagaacuagaauacacu

SEQ ID NO: 1299284 - RNA, 19 nt, Artificial Sequence
  Description of Artificial Sequence: Synthetic oligonucleotide
  Sense strand starting at position 3447 of SEQ ID NO: 1241781
ggagaauagugguuaucuc

SEQ ID NO: 1299285 - RNA, 19 nt, Artificial Sequence
  Description of Artificial Sequence: Synthetic oligonucleotide
  Antisense strand to SEQ ID NO: 1299284
gagauaaccacuauucucc

SEQ ID NO: 1299286 - RNA, 19 nt, Artificial Sequence
  Description of Artificial Sequence: Synthetic oligonucleotide
  Sense strand starting at position 3457 of SEQ ID NO: 1241781
gguuaucucauaggaggag

SEQ ID NO: 1299287 - RNA, 19 nt, Artificial Sequence
  Description of Artificial Sequence: Synthetic oligonucleotide
  Antisense strand to SEQ ID NO: 1299286
cuccuccuaugagauaacc

SEQ ID NO: 1299288 - RNA, 19 nt, Artificial Sequence
  Description of Artificial Sequence: Synthetic oligonucleotide
  Sense strand starting at position 3783 of SEQ ID NO: 1241781
guuaacaucucaguauauu

SEQ ID NO: 1299289 - RNA, 19 nt, Artificial Sequence
  Description of Artificial Sequence: Synthetic oligonucleotide
  Antisense strand to SEQ ID NO: 1299288
aauauacugagauguuaac

SEQ ID NO: 1299290 - RNA, 19 nt, Artificial Sequence
  Description of Artificial Sequence: Synthetic oligonucleotide
  Sense strand starting at position 49 of SEQ ID NO: 1241782
ggcagauuccgccaaacaa

SEQ ID NO: 1299291 - RNA, 19 nt, Artificial Sequence
  Description of Artificial Sequence: Synthetic oligonucleotide
  Antisense strand to SEQ ID NO: 1299290
uuguuuggcggaaucugcc

SEQ ID NO: 1299292 - RNA, 19 nt, Artificial Sequence
  Description of Artificial Sequence: Synthetic oligonucleotide
  Sense strand starting at position 501 of SEQ ID NO: 1241782
cagauuucguuguaagaga

SEQ ID NO: 1299293 - RNA, 19 nt, Artificial Sequence
  Description of Artificial Sequence: Synthetic oligonucleotide
  Antisense strand to SEQ ID NO: 1299292
ucucuuacaacgaaaucug

SEQ ID NO: 1299294 - RNA, 19 nt, Artificial Sequence
  Description of Artificial Sequence: Synthetic oligonucleotide
  Sense strand starting at position 654 of SEQ ID NO: 1241782
gaaaguuggccucgaggag

SEQ ID NO: 1299295 - RNA, 19 nt, Artificial Sequence
  Description of Artificial Sequence: Synthetic oligonucleotide
  Antisense strand to SEQ ID NO: 1299294
cuccucgaggccaacuuuc

SEQ ID NO: 1299296 - RNA, 19 nt, Artificial Sequence
  Description of Artificial Sequence: Synthetic oligonucleotide
  Sense strand starting at position 2262 of SEQ ID NO: 1241782
ggcuguuccgggaggcaga

SEQ ID NO: 1299297 - RNA, 19 nt, Artificial Sequence
  Description of Artificial Sequence: Synthetic oligonucleotide
  Antisense strand to SEQ ID NO: 1299296
ucugccucccggaacagcc

SEQ ID NO: 1299298 - RNA, 19 nt, Artificial Sequence
  Description of Artificial Sequence: Synthetic oligonucleotide
  Sense strand starting at position 2423 of SEQ ID NO: 1241782
uauggcaccucuguguaaa

SEQ ID NO: 1299299 - RNA, 19 nt, Artificial Sequence
  Description of Artificial Sequence: Synthetic oligonucleotide
  Antisense strand to SEQ ID NO: 1299298
uuuacacagaggugccaua

SEQ ID NO: 1299300 - RNA, 19 nt, Artificial Sequence
  Description of Artificial Sequence: Synthetic oligonucleotide
  Sense strand starting at position 2434 of SEQ ID NO: 1241782
uguguaaacgguugaacaa

SEQ ID NO: 1299301 - RNA, 19 nt, Artificial Sequence
  Description of Artificial Sequence: Synthetic oligonucleotide
  Antisense strand to SEQ ID NO: 1299300
uuguucaaccguuuacaca

SEQ ID NO: 1299302 - RNA, 19 nt, Artificial Sequence
  Description of Artificial Sequence: Synthetic oligonucleotide
  Sense strand starting at position 2565 of SEQ ID NO: 1241782
uauaaugccuaguucggaa

SEQ ID NO: 1299303 - RNA, 19 nt, Artificial Sequence
  Description of Artificial Sequence: Synthetic oligonucleotide
  Antisense strand to SEQ ID NO: 1299302
uuccgaacuaggcauuaua

SEQ ID NO: 1299304 - RNA, 19 nt, Artificial Sequence
  Description of Artificial Sequence: Synthetic oligonucleotide
  Sense strand starting at position 2704 of SEQ ID NO: 1241782
cucuuccuagaguaagcau

SEQ ID NO: 1299305 - RNA, 19 nt, Artificial Sequence
  Description of Artificial Sequence: Synthetic oligonucleotide
  Antisense strand to SEQ ID NO: 1299304
augcuuacucuaggaagag

SEQ ID NO: 1299306 - RNA, 19 nt, Artificial Sequence
  Description of Artificial Sequence: Synthetic oligonucleotide
  Sense strand starting at position 2711 of SEQ ID NO: 1241782
uagaguaagcaugaagcau

SEQ ID NO: 1299307 - RNA, 19 nt, Artificial Sequence
  Description of Artificial Sequence: Synthetic oligonucleotide
  Antisense strand to SEQ ID NO: 1299306
augcuucaugcuuacucua

SEQ ID NO: 1299308 - RNA, 19 nt, Artificial Sequence
  Description of Artificial Sequence: Synthetic oligonucleotide
  Sense strand starting at position 2980 of SEQ ID NO: 1241782
ucagcuaacucuucuguga

SEQ ID NO: 1299309 - RNA, 19 nt, Artificial Sequence
  Description of Artificial Sequence: Synthetic oligonucleotide
  Antisense strand to SEQ ID NO: 1299308
ucacagaagaguuagcuga

SEQ ID NO: 1299310 - RNA, 19 nt, Artificial Sequence
  Description of Artificial Sequence: Synthetic oligonucleotide
  Sense strand starting at position 3013 of SEQ ID NO: 1241782
ggaacuaucuuaucgaccu

SEQ ID NO: 1299311 - RNA, 19 nt, Artificial Sequence
  Description of Artificial Sequence: Synthetic oligonucleotide
  Antisense strand to SEQ ID NO: 1299310
aggucgauaagauaguucc

SEQ ID NO: 1299312 - RNA, 19 nt, Artificial Sequence
  Description of Artificial Sequence: Synthetic oligonucleotide
  Sense strand starting at position 3072 of SEQ ID NO: 1241782
caugguagguuccuugaau

SEQ ID NO: 1299313 - RNA, 19 nt, Artificial Sequence
  Description of Artificial Sequence: Synthetic oligonucleotide
  Antisense strand to SEQ ID NO: 1299312
auucaaggaaccuaccaug

SEQ ID NO: 1299314 - RNA, 19 nt, Artificial Sequence
  Description of Artificial Sequence: Synthetic oligonucleotide
  Sense strand starting at position 3073 of SEQ ID NO: 1241782
augguagguuccuugaauu

SEQ ID NO: 1299315 - RNA, 19 nt, Artificial Sequence
  Description of Artificial Sequence: Synthetic oligonucleotide
  Antisense strand to SEQ ID NO: 1299314
aauucaaggaaccuaccau

SEQ ID NO: 1299316 - RNA, 19 nt, Artificial Sequence
  Description of Artificial Sequence: Synthetic oligonucleotide
  Sense strand starting at position 3121 of SEQ ID NO: 1241782
gguccauugcuuuaagcag

SEQ ID NO: 1299317 - RNA, 19 nt, Artificial Sequence
  Description of Artificial Sequence: Synthetic oligonucleotide
  Antisense strand to SEQ ID NO: 1299316
cugcuuaaagcaauggacc

SEQ ID NO: 1299318 - RNA, 19 nt, Artificial Sequence
  Description of Artificial Sequence: Synthetic oligonucleotide
  Sense strand starting at position 3127 of SEQ ID NO: 1241782
uugcuuuaagcagagauug

SEQ ID NO: 1299319 - RNA, 19 nt, Artificial Sequence
  Description of Artificial Sequence: Synthetic oligonucleotide
  Antisense strand to SEQ ID NO: 1299318
caaucucugcuuaaagcaa

SEQ ID NO: 1299320 - RNA, 19 nt, Artificial Sequence
  Description of Artificial Sequence: Synthetic oligonucleotide
  Sense strand starting at position 3129 of SEQ ID NO: 1241782
gcuuuaagcagagauugga

SEQ ID NO: 1299321 - RNA, 19 nt, Artificial Sequence
  Description of Artificial Sequence: Synthetic oligonucleotide
  Antisense strand to SEQ ID NO: 1299320
uccaaucucugcuuaaagc

SEQ ID NO: 1299322 - RNA, 19 nt, Artificial Sequence
  Description of Artificial Sequence: Synthetic oligonucleotide
  Sense strand starting at position 3364 of SEQ ID NO: 1241782
auugguuugguccacauaa

SEQ ID NO: 1299323 - RNA, 19 nt, Artificial Sequence
  Description of Artificial Sequence: Synthetic oligonucleotide
  Antisense strand to SEQ ID NO: 1299322
uuauguggaccaaaccaau

SEQ ID NO: 1299324 - RNA, 19 nt, Artificial Sequence
  Description of Artificial Sequence: Synthetic oligonucleotide
  Sense strand starting at position 3366 of SEQ ID NO: 1241782
ugguuugguccacauaaca

SEQ ID NO: 1299325 - RNA, 19 nt, Artificial Sequence
  Description of Artificial Sequence: Synthetic oligonucleotide
  Antisense strand to SEQ ID NO: 1299324
uguuauguggaccaaacca

SEQ ID NO: 1299326 - RNA, 19 nt, Artificial Sequence
  Description of Artificial Sequence: Synthetic oligonucleotide
  Sense strand starting at position 3405 of SEQ ID NO: 1241782
ucucauggugcaggagaua

SEQ ID NO: 1299327 - RNA, 19 nt, Artificial Sequence
  Description of Artificial Sequence: Synthetic oligonucleotide
  Antisense strand to SEQ ID NO: 1299326
uaucuccugcaccaugaga

SEQ ID NO: 1299328 - RNA, 19 nt, Artificial Sequence
  Description of Artificial Sequence: Synthetic oligonucleotide
  Sense strand starting at position 3417 of SEQ ID NO: 1241782
ggagauaucugggagagug

SEQ ID NO: 1299329 - RNA, 19 nt, Artificial Sequence
  Description of Artificial Sequence: Synthetic oligonucleotide
  Antisense strand to SEQ ID NO: 1299328
cacucucccagauaucucc

SEQ ID NO: 1299330 - RNA, 19 nt, Artificial Sequence
  Description of Artificial Sequence: Synthetic oligonucleotide
  Sense strand starting at position 3505 of SEQ ID NO: 1241782
gucaucucuggugacacaa

SEQ ID NO: 1299331 - RNA, 19 nt, Artificial Sequence
  Description of Artificial Sequence: Synthetic oligonucleotide
  Antisense strand to SEQ ID NO: 1299330
uugugucaccagagaugac

SEQ ID NO: 1299332 - RNA, 19 nt, Artificial Sequence
  Description of Artificial Sequence: Synthetic oligonucleotide
  Sense strand starting at position 3541 of SEQ ID NO: 1241782
ccuuauauucuauggaggu

SEQ ID NO: 1299333 - RNA, 19 nt, Artificial Sequence
  Description of Artificial Sequence: Synthetic oligonucleotide
  Antisense strand to SEQ ID NO: 1299332
accuccauagaauauaagg

SEQ ID NO: 1299334 - RNA, 19 nt, Artificial Sequence
  Description of Artificial Sequence: Synthetic oligonucleotide
  Sense strand starting at position 3582 of SEQ ID NO: 1241782
cguagacaacaaugugaau

SEQ ID NO: 1299335 - RNA, 19 nt, Artificial Sequence
  Description of Artificial Sequence: Synthetic oligonucleotide
  Antisense strand to SEQ ID NO: 1299334
auucacauuguugucuacg

SEQ ID NO: 1299336 - RNA, 19 nt, Artificial Sequence
  Description of Artificial Sequence: Synthetic oligonucleotide
  Sense strand starting at position 3678 of SEQ ID NO: 1241782
aacuuauguugccuaagag

SEQ ID NO: 1299337 - RNA, 19 nt, Artificial Sequence
  Description of Artificial Sequence: Synthetic oligonucleotide
  Antisense strand to SEQ ID NO: 1299336
cucuuaggcaacauaaguu

SEQ ID NO: 1299338 - RNA, 19 nt, Artificial Sequence
  Description of Artificial Sequence: Synthetic oligonucleotide
  Sense strand starting at position 3690 of SEQ ID NO: 1241782
cuaagagguuaccuagcua

SEQ ID NO: 1299339 - RNA, 19 nt, Artificial Sequence
  Description of Artificial Sequence: Synthetic oligonucleotide
  Antisense strand to SEQ ID NO: 1299338
uagcuagguaaccucuuag

SEQ ID NO: 1299340 - RNA, 19 nt, Artificial Sequence
  Description of Artificial Sequence: Synthetic oligonucleotide
  Sense strand starting at position 3694 of SEQ ID NO: 1241782
gagguuaccuagcuaguaa

SEQ ID NO: 1299341 - RNA, 19 nt, Artificial Sequence
  Description of Artificial Sequence: Synthetic oligonucleotide
  Antisense strand to SEQ ID NO: 1299340
uuacuagcuagguaaccuc

SEQ ID NO: 1299342 - RNA, 19 nt, Artificial Sequence
  Description of Artificial Sequence: Synthetic oligonucleotide
  Sense strand starting at position 3705 of SEQ ID NO: 1241782
gcuaguaagcaucagaggu

SEQ ID NO: 1299343 - RNA, 19 nt, Artificial Sequence
  Description of Artificial Sequence: Synthetic oligonucleotide
  Antisense strand to SEQ ID NO: 1299342
accucugaugcuuacuagc

SEQ ID NO: 1299344 - RNA, 19 nt, Artificial Sequence
  Description of Artificial Sequence: Synthetic oligonucleotide
  Sense strand starting at position 3709 of SEQ ID NO: 1241782
guaagcaucagaggucaga

SEQ ID NO: 1299345 - RNA, 19 nt, Artificial Sequence
  Description of Artificial Sequence: Synthetic oligonucleotide
  Antisense strand to SEQ ID NO: 1299344
ucugaccucugaugcuuac

SEQ ID NO: 1299346 - RNA, 19 nt, Artificial Sequence
  Description of Artificial Sequence: Synthetic oligonucleotide
  Sense strand starting at position 3825 of SEQ ID NO: 1241782
ugaggauguuauguuaaug

SEQ ID NO: 1299347 - RNA, 19 nt, Artificial Sequence
  Description of Artificial Sequence: Synthetic oligonucleotide
  Antisense strand to SEQ ID NO: 1299346
cauuaacauaacauccuca

SEQ ID NO: 1299348 - RNA, 19 nt, Artificial Sequence
  Description of Artificial Sequence: Synthetic oligonucleotide
  Sense strand starting at position 3837 of SEQ ID NO: 1241782
guuaauggcaucugucaug

SEQ ID NO: 1299349 - RNA, 19 nt, Artificial Sequence
  Description of Artificial Sequence: Synthetic oligonucleotide
  Antisense strand to SEQ ID NO: 1299348
caugacagaugccauuaac

SEQ ID NO: 1299350 - RNA, 19 nt, Artificial Sequence
  Description of Artificial Sequence: Synthetic oligonucleotide
  Sense strand starting at position 3847 of SEQ ID NO: 1241782
ucugucaugucccugacuu

SEQ ID NO: 1299351 - RNA, 19 nt, Artificial Sequence
  Description of Artificial Sequence: Synthetic oligonucleotide
  Antisense strand to SEQ ID NO: 1299350
aagucagggacaugacaga

SEQ ID NO: 1299352 - RNA, 19 nt, Artificial Sequence
  Description of Artificial Sequence: Synthetic oligonucleotide
  Sense strand starting at position 3848 of SEQ ID NO: 1241782
cugucaugucccugacuua

SEQ ID NO: 1299353 - RNA, 19 nt, Artificial Sequence
  Description of Artificial Sequence: Synthetic oligonucleotide
  Antisense strand to SEQ ID NO: 1299352
uaagucagggacaugacag

SEQ ID NO: 1299354 - RNA, 19 nt, Artificial Sequence
  Description of Artificial Sequence: Synthetic oligonucleotide
  Sense strand starting at position 3849 of SEQ ID NO: 1241782
ugucaugucccugacuuau

SEQ ID NO: 1299355 - RNA, 19 nt, Artificial Sequence
  Description of Artificial Sequence: Synthetic oligonucleotide
  Antisense strand to SEQ ID NO: 1299354
auaagucagggacaugaca

SEQ ID NO: 1299356 - RNA, 19 nt, Artificial Sequence
  Description of Artificial Sequence: Synthetic oligonucleotide
  Sense strand starting at position 3851 of SEQ ID NO: 1241782
ucaugucccugacuuauca

SEQ ID NO: 1299357 - RNA, 19 nt, Artificial Sequence
  Description of Artificial Sequence: Synthetic oligonucleotide
  Antisense strand to SEQ ID NO: 1299356
ugauaagucagggacauga

SEQ ID NO: 1299358 - RNA, 19 nt, Artificial Sequence
  Description of Artificial Sequence: Synthetic oligonucleotide
  Sense strand starting at position 3905 of SEQ ID NO: 1241782
ggcaaacgugagugaugga

SEQ ID NO: 1299359 - RNA, 19 nt, Artificial Sequence
  Description of Artificial Sequence: Synthetic oligonucleotide
  Antisense strand to SEQ ID NO: 1299358
uccaucacucacguuugcc

SEQ ID NO: 1299360 - RNA, 19 nt, Artificial Sequence
  Description of Artificial Sequence: Synthetic oligonucleotide
  Sense strand starting at position 3906 of SEQ ID NO: 1241782
gcaaacgugagugauggaa

SEQ ID NO: 1299361 - RNA, 19 nt, Artificial Sequence
  Description of Artificial Sequence: Synthetic oligonucleotide
  Antisense strand to SEQ ID NO: 1299360
uuccaucacucacguuugc

SEQ ID NO: 1299362 - RNA, 19 nt, Artificial Sequence
  Description of Artificial Sequence: Synthetic oligonucleotide
  Sense strand starting at position 3926 of SEQ ID NO: 1241782
acaagugugugagugauga

SEQ ID NO: 1299363 - RNA, 19 nt, Artificial Sequence
  Description of Artificial Sequence: Synthetic oligonucleotide
  Antisense strand to SEQ ID NO: 1299362
ucaucacucacacacuugu

SEQ ID NO: 1299364 - RNA, 19 nt, Artificial Sequence
  Description of Artificial Sequence: Synthetic oligonucleotide
  Sense strand starting at position 3928 of SEQ ID NO: 1241782
aagugugugagugaugaag

SEQ ID NO: 1299365 - RNA, 19 nt, Artificial Sequence
  Description of Artificial Sequence: Synthetic oligonucleotide
  Antisense strand to SEQ ID NO: 1299364
cuucaucacucacacacuu

SEQ ID NO: 1299366 - RNA, 19 nt, Artificial Sequence
  Description of Artificial Sequence: Synthetic oligonucleotide
  Sense strand starting at position 3936 of SEQ ID NO: 1241782
gagugaugaaguuggcucu

SEQ ID NO: 1299367 - RNA, 19 nt, Artificial Sequence
  Description of Artificial Sequence: Synthetic oligonucleotide
  Antisense strand to SEQ ID NO: 1299366
agagccaacuucaucacuc

SEQ ID NO: 1299368 - RNA, 19 nt, Artificial Sequence
  Description of Artificial Sequence: Synthetic oligonucleotide
  Sense strand starting at position 3950 of SEQ ID NO: 1241782
gcucuugccagaugaggau

SEQ ID NO: 1299369 - RNA, 19 nt, Artificial Sequence
  Description of Artificial Sequence: Synthetic oligonucleotide
  Antisense strand to SEQ ID NO: 1299368
auccucaucuggcaagagc

SEQ ID NO: 1299370 - RNA, 19 nt, Artificial Sequence
  Description of Artificial Sequence: Synthetic oligonucleotide
  Sense strand starting at position 80 of SEQ ID NO: 1241783
aggcauuugcagugcuauu

SEQ ID NO: 1299371 - RNA, 19 nt, Artificial Sequence
  Description of Artificial Sequence: Synthetic oligonucleotide
  Antisense strand to SEQ ID NO: 1299370
aauagcacugcaaaugccu

SEQ ID NO: 1299372 - RNA, 19 nt, Artificial Sequence
  Description of Artificial Sequence: Synthetic oligonucleotide
  Sense strand starting at position 738 of SEQ ID NO: 1241783
uuccuaugaccuugaguaa

SEQ ID NO: 1299373 - RNA, 19 nt, Artificial Sequence
  Description of Artificial Sequence: Synthetic oligonucleotide
  Antisense strand to SEQ ID NO: 1299372
uuacucaaggucauaggaa

SEQ ID NO: 1299374 - RNA, 19 nt, Artificial Sequence
  Description of Artificial Sequence: Synthetic oligonucleotide
  Sense strand starting at position 739 of SEQ ID NO: 1241783
uccuaugaccuugaguaau

SEQ ID NO: 1299375 - RNA, 19 nt, Artificial Sequence
  Description of Artificial Sequence: Synthetic oligonucleotide
  Antisense strand to SEQ ID NO: 1299374
auuacucaaggucauagga

SEQ ID NO: 1299376 - RNA, 19 nt, Artificial Sequence
  Description of Artificial Sequence: Synthetic oligonucleotide
  Sense strand starting at position 741 of SEQ ID NO: 1241783
cuaugaccuugaguaauuc

SEQ ID NO: 1299377 - RNA, 19 nt, Artificial Sequence
  Description of Artificial Sequence: Synthetic oligonucleotide
  Antisense strand to SEQ ID NO: 1299376
gaauuacucaaggucauag

SEQ ID NO: 1299378 - RNA, 19 nt, Artificial Sequence
  Description of Artificial Sequence: Synthetic oligonucleotide
  Sense strand starting at position 747 of SEQ ID NO: 1241783
ccuugaguaauucguugag

SEQ ID NO: 1299379 - RNA, 19 nt, Artificial Sequence
  Description of Artificial Sequence: Synthetic oligonucleotide
  Antisense strand to SEQ ID NO: 1299378
cucaacgaauuacucaagg

SEQ ID NO: 1299380 - RNA, 19 nt, Artificial Sequence
  Description of Artificial Sequence: Synthetic oligonucleotide
  Sense strand starting at position 751 of SEQ ID NO: 1241783
gaguaauucguugagcaaa

SEQ ID NO: 1299381 - RNA, 19 nt, Artificial Sequence
  Description of Artificial Sequence: Synthetic oligonucleotide
  Antisense strand to SEQ ID NO: 1299380
uuugcucaacgaauuacuc

SEQ ID NO: 1299382 - RNA, 19 nt, Artificial Sequence
  Description of Artificial Sequence: Synthetic oligonucleotide
  Sense strand starting at position 753 of SEQ ID NO: 1241783
guaauucguugagcaaaca

SEQ ID NO: 1299383 - RNA, 19 nt, Artificial Sequence
  Description of Artificial Sequence: Synthetic oligonucleotide
  Antisense strand to SEQ ID NO: 1299382
uguuugcucaacgaauuac

SEQ ID NO: 1299384 - RNA, 19 nt, Artificial Sequence
  Description of Artificial Sequence: Synthetic oligonucleotide
  Sense strand starting at position 831 of SEQ ID NO: 1241783
ucuauauauccggaggcca

SEQ ID NO: 1299385 - RNA, 19 nt, Artificial Sequence
  Description of Artificial Sequence: Synthetic oligonucleotide
  Antisense strand to SEQ ID NO: 1299384
uggccuccggauauauaga

SEQ ID NO: 1299386 - RNA, 19 nt, Artificial Sequence
  Description of Artificial Sequence: Synthetic oligonucleotide
  Sense strand starting at position 1060 of SEQ ID NO: 1241783
aauuaugacuccuuugggu

SEQ ID NO: 1299387 - RNA, 19 nt, Artificial Sequence
  Description of Artificial Sequence: Synthetic oligonucleotide
  Antisense strand to SEQ ID NO: 1299386
acccaaaggagucauaauu

SEQ ID NO: 1299388 - RNA, 19 nt, Artificial Sequence
  Description of Artificial Sequence: Synthetic oligonucleotide
  Sense strand starting at position 1062 of SEQ ID NO: 1241783
uuaugacuccuuuggguuu

SEQ ID NO: 1299389 - RNA, 19 nt, Artificial Sequence
  Description of Artificial Sequence: Synthetic oligonucleotide
  Antisense strand to SEQ ID NO: 1299388
aaacccaaaggagucauaa

SEQ ID NO: 1299390 - RNA, 19 nt, Artificial Sequence
  Description of Artificial Sequence: Synthetic oligonucleotide
  Sense strand starting at position 1278 of SEQ ID NO: 1241783
auagaaggaucccagggaa

SEQ ID NO: 1299391 - RNA, 19 nt, Artificial Sequence
  Description of Artificial Sequence: Synthetic oligonucleotide
  Antisense strand to SEQ ID NO: 1299390
uucccugggauccuucuau

SEQ ID NO: 1299392 - RNA, 19 nt, Artificial Sequence
  Description of Artificial Sequence: Synthetic oligonucleotide
  Sense strand starting at position 1296 of SEQ ID NO: 1241783
acugaaucccgagguccaa

SEQ ID NO: 1299393 - RNA, 19 nt, Artificial Sequence
  Description of Artificial Sequence: Synthetic oligonucleotide
  Antisense strand to SEQ ID NO: 1299392
uuggaccucgggauucagu

SEQ ID NO: 1299394 - RNA, 19 nt, Artificial Sequence
  Description of Artificial Sequence: Synthetic oligonucleotide
  Sense strand starting at position 1424 of SEQ ID NO: 1241783
gggagaaucuuccuuccaa

SEQ ID NO: 1299395 - RNA, 19 nt, Artificial Sequence
  Description of Artificial Sequence: Synthetic oligonucleotide
  Antisense strand to SEQ ID NO: 1299394
uuggaaggaagauucuccc

SEQ ID NO: 1299396 - RNA, 19 nt, Artificial Sequence
  Description of Artificial Sequence: Synthetic oligonucleotide
  Sense strand starting at position 2122 of SEQ ID NO: 1241783
gggcuucggcccgauuuga

SEQ ID NO: 1299397 - RNA, 19 nt, Artificial Sequence
  Description of Artificial Sequence: Synthetic oligonucleotide
  Antisense strand to SEQ ID NO: 1299396
ucaaaucgggccgaagccc

SEQ ID NO: 1299398 - RNA, 19 nt, Artificial Sequence
  Description of Artificial Sequence: Synthetic oligonucleotide
  Sense strand starting at position 2142 of SEQ ID NO: 1241783
guauguuugcgucuagacg

SEQ ID NO: 1299399 - RNA, 19 nt, Artificial Sequence
  Description of Artificial Sequence: Synthetic oligonucleotide
  Antisense strand to SEQ ID NO: 1299398
cgucuagacgcaaacauac

SEQ ID NO: 1299400 - RNA, 19 nt, Artificial Sequence
  Description of Artificial Sequence: Synthetic oligonucleotide
  Sense strand starting at position 2217 of SEQ ID NO: 1241783
gcgucuugacuguuagcuu

SEQ ID NO: 1299401 - RNA, 19 nt, Artificial Sequence
  Description of Artificial Sequence: Synthetic oligonucleotide
  Antisense strand to SEQ ID NO: 1299400
aagcuaacagucaagacgc

SEQ ID NO: 1299402 - RNA, 19 nt, Artificial Sequence
  Description of Artificial Sequence: Synthetic oligonucleotide
  Sense strand starting at position 2440 of SEQ ID NO: 1241783
uagcgagagcucuaccaga

SEQ ID NO: 1299403 - RNA, 19 nt, Artificial Sequence
  Description of Artificial Sequence: Synthetic oligonucleotide
  Antisense strand to SEQ ID NO: 1299402
ucugguagagcucucgcua

SEQ ID NO: 1299404 - RNA, 19 nt, Artificial Sequence
  Description of Artificial Sequence: Synthetic oligonucleotide
  Sense strand starting at position 2634 of SEQ ID NO: 1241783
uuaggaugaccucgaaaua

SEQ ID NO: 1299405 - RNA, 19 nt, Artificial Sequence
  Description of Artificial Sequence: Synthetic oligonucleotide
  Antisense strand to SEQ ID NO: 1299404
uauuucgaggucauccuaa

SEQ ID NO: 1299406 - RNA, 19 nt, Artificial Sequence
  Description of Artificial Sequence: Synthetic oligonucleotide
  Sense strand starting at position 2670 of SEQ ID NO: 1241783
gaguaauucuccucgugga

SEQ ID NO: 1299407 - RNA, 19 nt, Artificial Sequence
  Description of Artificial Sequence: Synthetic oligonucleotide
  Antisense strand to SEQ ID NO: 1299406
uccacgaggagaauuacuc

SEQ ID NO: 1299408 - RNA, 19 nt, Artificial Sequence
  Description of Artificial Sequence: Synthetic oligonucleotide
  Sense strand starting at position 2671 of SEQ ID NO: 1241783
aguaauucuccucguggag

SEQ ID NO: 1299409 - RNA, 19 nt, Artificial Sequence
  Description of Artificial Sequence: Synthetic oligonucleotide
  Antisense strand to SEQ ID NO: 1299408
cuccacgaggagaauuacu

SEQ ID NO: 1299410 - RNA, 19 nt, Artificial Sequence
  Description of Artificial Sequence: Synthetic oligonucleotide
  Sense strand starting at position 2726 of SEQ ID NO: 1241783
gacaacagguguuugucaa

SEQ ID NO: 1299411 - RNA, 19 nt, Artificial Sequence
  Description of Artificial Sequence: Synthetic oligonucleotide
  Antisense strand to SEQ ID NO: 1299410
uugacaaacaccuguuguc

SEQ ID NO: 1299412 - RNA, 19 nt, Artificial Sequence
  Description of Artificial Sequence: Synthetic oligonucleotide
  Sense strand starting at position 2765 of SEQ ID NO: 1241783
cugggcauguuggugaaua

SEQ ID NO: 1299413 - RNA, 19 nt, Artificial Sequence
  Description of Artificial Sequence: Synthetic oligonucleotide
  Antisense strand to SEQ ID NO: 1299412
uauucaccaacaugcccag

SEQ ID NO: 1299414 - RNA, 19 nt, Artificial Sequence
  Description of Artificial Sequence: Synthetic oligonucleotide
  Sense strand starting at position 2767 of SEQ ID NO: 1241783
gggcauguuggugaauaaa

SEQ ID NO: 1299415 - RNA, 19 nt, Artificial Sequence
  Description of Artificial Sequence: Synthetic oligonucleotide
  Antisense strand to SEQ ID NO: 1299414
uuuauucaccaacaugccc

SEQ ID NO: 1299416 - RNA, 19 nt, Artificial Sequence
  Description of Artificial Sequence: Synthetic oligonucleotide
  Sense strand starting at position 2898 of SEQ ID NO: 1241783
cuugcacuccauggguaua

SEQ ID NO: 1299417 - RNA, 19 nt, Artificial Sequence
  Description of Artificial Sequence: Synthetic oligonucleotide
  Antisense strand to SEQ ID NO: 1299416
uauacccauggagugcaag

SEQ ID NO: 1299418 - RNA, 19 nt, Artificial Sequence
  Description of Artificial Sequence: Synthetic oligonucleotide
  Sense strand starting at position 2900 of SEQ ID NO: 1241783
ugcacuccauggguauaaa

SEQ ID NO: 1299419 - RNA, 19 nt, Artificial Sequence
  Description of Artificial Sequence: Synthetic oligonucleotide
  Antisense strand to SEQ ID NO: 1299418
uuuauacccauggagugca

SEQ ID NO: 1299420 - RNA, 19 nt, Artificial Sequence
  Description of Artificial Sequence: Synthetic oligonucleotide
  Sense strand starting at position 2901 of SEQ ID NO: 1241783
gcacuccauggguauaaau

SEQ ID NO: 1299421 - RNA, 19 nt, Artificial Sequence
  Description of Artificial Sequence: Synthetic oligonucleotide
  Antisense strand to SEQ ID NO: 1299420
auuuauacccauggagugc

SEQ ID NO: 1299422 - RNA, 19 nt, Artificial Sequence
  Description of Artificial Sequence: Synthetic oligonucleotide
  Sense strand starting at position 2910 of SEQ ID NO: 1241783
ggguauaaauuccugucuu

SEQ ID NO: 1299423 - RNA, 19 nt, Artificial Sequence
  Description of Artificial Sequence: Synthetic oligonucleotide
  Antisense strand to SEQ ID NO: 1299422
aagacaggaauuuauaccc

SEQ ID NO: 1299424 - RNA, 19 nt, Artificial Sequence
  Description of Artificial Sequence: Synthetic oligonucleotide
  Sense strand starting at position 3257 of SEQ ID NO: 1241783
caaggugucuguucucaaa

SEQ ID NO: 1299425 - RNA, 19 nt, Artificial Sequence
  Description of Artificial Sequence: Synthetic oligonucleotide
  Antisense strand to SEQ ID NO: 1299424
uuugagaacagacaccuug

SEQ ID NO: 1299426 - RNA, 19 nt, Artificial Sequence
  Description of Artificial Sequence: Synthetic oligonucleotide
  Sense strand starting at position 3259 of SEQ ID NO: 1241783
aggugucuguucucaaaug

SEQ ID NO: 1299427 - RNA, 19 nt, Artificial Sequence
  Description of Artificial Sequence: Synthetic oligonucleotide
  Antisense strand to SEQ ID NO: 1299426
cauuugagaacagacaccu

SEQ ID NO: 1299428 - RNA, 19 nt, Artificial Sequence
  Description of Artificial Sequence: Synthetic oligonucleotide
  Sense strand starting at position 3273 of SEQ ID NO: 1241783
aaauguuugcuugggaguu

SEQ ID NO: 1299429 - RNA, 19 nt, Artificial Sequence
  Description of Artificial Sequence: Synthetic oligonucleotide
  Antisense strand to SEQ ID NO: 1299428
aacucccaagcaaacauuu

SEQ ID NO: 1299430 - RNA, 19 nt, Artificial Sequence
  Description of Artificial Sequence: Synthetic oligonucleotide
  Sense strand starting at position 3430 of SEQ ID NO: 1241783
cuuaauaugcacugagcau

SEQ ID NO: 1299431 - RNA, 19 nt, Artificial Sequence
  Description of Artificial Sequence: Synthetic oligonucleotide
  Antisense strand to SEQ ID NO: 1299430
augcucagugcauauuaag

SEQ ID NO: 1299432 - RNA, 19 nt, Artificial Sequence
  Description of Artificial Sequence: Synthetic oligonucleotide
  Sense strand starting at position 3461 of SEQ ID NO: 1241783
gucugaggauagucaguau

SEQ ID NO: 1299433 - RNA, 19 nt, Artificial Sequence
  Description of Artificial Sequence: Synthetic oligonucleotide
  Antisense strand to SEQ ID NO: 1299432
auacugacuauccucagac

SEQ ID NO: 1299434 - RNA, 19 nt, Artificial Sequence
  Description of Artificial Sequence: Synthetic oligonucleotide
  Sense strand starting at position 3464 of SEQ ID NO: 1241783
ugaggauagucaguauacu

SEQ ID NO: 1299435 - RNA, 19 nt, Artificial Sequence
  Description of Artificial Sequence: Synthetic oligonucleotide
  Antisense strand to SEQ ID NO: 1299434
aguauacugacuauccuca

SEQ ID NO: 1299436 - RNA, 19 nt, Artificial Sequence
  Description of Artificial Sequence: Synthetic oligonucleotide
  Sense strand starting at position 3511 of SEQ ID NO: 1241783
cuugucacaguacagaaau

SEQ ID NO: 1299437 - RNA, 19 nt, Artificial Sequence
  Description of Artificial Sequence: Synthetic oligonucleotide
  Antisense strand to SEQ ID NO: 1299436
auuucuguacugugacaag

SEQ ID NO: 1299438 - RNA, 19 nt, Artificial Sequence
  Description of Artificial Sequence: Synthetic oligonucleotide
  Sense strand starting at position 3667 of SEQ ID NO: 1241783
agacgcugucucuaauuaa

SEQ ID NO: 1299439 - RNA, 19 nt, Artificial Sequence
  Description of Artificial Sequence: Synthetic oligonucleotide
  Antisense strand to SEQ ID NO: 1299438
uuaauuagagacagcgucu

SEQ ID NO: 1299440 - RNA, 19 nt, Artificial Sequence
  Description of Artificial Sequence: Synthetic oligonucleotide
  Sense strand starting at position 3737 of SEQ ID NO: 1241783
gucugugaagagugucaaa

SEQ ID NO: 1299441 - RNA, 19 nt, Artificial Sequence
  Description of Artificial Sequence: Synthetic oligonucleotide
  Antisense strand to SEQ ID NO: 1299440
uuugacacucuucacagac

SEQ ID NO: 1299442 - RNA, 19 nt, Artificial Sequence
  Description of Artificial Sequence: Synthetic oligonucleotide
  Sense strand starting at position 3806 of SEQ ID NO: 1241783
aaauuaauagcauguggau

SEQ ID NO: 1299443 - RNA, 19 nt, Artificial Sequence
  Description of Artificial Sequence: Synthetic oligonucleotide
  Antisense strand to SEQ ID NO: 1299442
auccacaugcuauuaauuu

SEQ ID NO: 1299444 - RNA, 19 nt, Artificial Sequence
  Description of Artificial Sequence: Synthetic oligonucleotide
  Sense strand starting at position 3813 of SEQ ID NO: 1241783
uagcauguggauugagauu

SEQ ID NO: 1299445 - RNA, 19 nt, Artificial Sequence
  Description of Artificial Sequence: Synthetic oligonucleotide
  Antisense strand to SEQ ID NO: 1299444
aaucucaauccacaugcua

SEQ ID NO: 1299446 - RNA, 19 nt, Artificial Sequence
  Description of Artificial Sequence: Synthetic oligonucleotide
  Sense strand starting at position 3824 of SEQ ID NO: 1241783
uugagauuacacuguagcu

SEQ ID NO: 1299447 - RNA, 19 nt, Artificial Sequence
  Description of Artificial Sequence: Synthetic oligonucleotide
  Antisense strand to SEQ ID NO: 1299446
agcuacaguguaaucucaa

SEQ ID NO: 1299448 - RNA, 19 nt, Artificial Sequence
  Description of Artificial Sequence: Synthetic oligonucleotide
  Sense strand starting at position 3837 of SEQ ID NO: 1241783
guagcuagacucuggaaca

SEQ ID NO: 1299449 - RNA, 19 nt, Artificial Sequence
  Description of Artificial Sequence: Synthetic oligonucleotide
  Antisense strand to SEQ ID NO: 1299448
uguuccagagucuagcuac

SEQ ID NO: 1299450 - RNA, 19 nt, Artificial Sequence
  Description of Artificial Sequence: Synthetic oligonucleotide
  Sense strand starting at position 35 of SEQ ID NO: 1241784
aacuguuucuuugcuagag

SEQ ID NO: 1299451 - RNA, 19 nt, Artificial Sequence
  Description of Artificial Sequence: Synthetic oligonucleotide
  Antisense strand to SEQ ID NO: 1299450
cucuagcaaagaaacaguu

SEQ ID NO: 1299452 - RNA, 19 nt, Artificial Sequence
  Description of Artificial Sequence: Synthetic oligonucleotide
  Sense strand starting at position 39 of SEQ ID NO: 1241784
guuucuuugcuagaggauc

SEQ ID NO: 1299453 - RNA, 19 nt, Artificial Sequence
  Description of Artificial Sequence: Synthetic oligonucleotide
  Antisense strand to SEQ ID NO: 1299452
gauccucuagcaaagaaac

SEQ ID NO: 1299454 - RNA, 19 nt, Artificial Sequence
  Description of Artificial Sequence: Synthetic oligonucleotide
  Sense strand starting at position 47 of SEQ ID NO: 1241784
gcuagaggaucagcuagau

SEQ ID NO: 1299455 - RNA, 19 nt, Artificial Sequence
  Description of Artificial Sequence: Synthetic oligonucleotide
  Antisense strand to SEQ ID NO: 1299454
aucuagcugauccucuagc

SEQ ID NO: 1299456 - RNA, 19 nt, Artificial Sequence
  Description of Artificial Sequence: Synthetic oligonucleotide
  Sense strand starting at position 181 of SEQ ID NO: 1241784
ucaugaucacaaggcauau

SEQ ID NO: 1299457 - RNA, 19 nt, Artificial Sequence
  Description of Artificial Sequence: Synthetic oligonucleotide
  Antisense strand to SEQ ID NO: 1299456
auaugccuugugaucauga

SEQ ID NO: 1299458 - RNA, 19 nt, Artificial Sequence
  Description of Artificial Sequence: Synthetic oligonucleotide
  Sense strand starting at position 195 of SEQ ID NO: 1241784
cauauacuuugcgugggaa

SEQ ID NO: 1299459 - RNA, 19 nt, Artificial Sequence
  Description of Artificial Sequence: Synthetic oligonucleotide
  Antisense strand to SEQ ID NO: 1299458
uucccacgcaaaguauaug

SEQ ID NO: 1299460 - RNA, 19 nt, Artificial Sequence
  Description of Artificial Sequence: Synthetic oligonucleotide
  Sense strand starting at position 196 of SEQ ID NO: 1241784
auauacuuugcgugggaau

SEQ ID NO: 1299461 - RNA, 19 nt, Artificial Sequence
  Description of Artificial Sequence: Synthetic oligonucleotide
  Antisense strand to SEQ ID NO: 1299460
auucccacgcaaaguauau

SEQ ID NO: 1299462 - RNA, 19 nt, Artificial Sequence
  Description of Artificial Sequence: Synthetic oligonucleotide
  Sense strand starting at position 498 of SEQ ID NO: 1241784
aguacauugguauguacau

SEQ ID NO: 1299463 - RNA, 19 nt, Artificial Sequence
  Description of Artificial Sequence: Synthetic oligonucleotide
  Antisense strand to SEQ ID NO: 1299462
auguacauaccaauguacu

SEQ ID NO: 1299464 - RNA, 19 nt, Artificial Sequence
  Description of Artificial Sequence: Synthetic oligonucleotide
  Sense strand starting at position 623 of SEQ ID NO: 1241784
cauugagacuuuguuaaga

SEQ ID NO: 1299465 - RNA, 19 nt, Artificial Sequence
  Description of Artificial Sequence: Synthetic oligonucleotide
  Antisense strand to SEQ ID NO: 1299464
ucuuaacaaagucucaaug

SEQ ID NO: 1299466 - RNA, 19 nt, Artificial Sequence
  Description of Artificial Sequence: Synthetic oligonucleotide
  Sense strand starting at position 693 of SEQ ID NO: 1241784
aguuauaaccagugaagua

SEQ ID NO: 1299467 - RNA, 19 nt, Artificial Sequence
  Description of Artificial Sequence: Synthetic oligonucleotide
  Antisense strand to SEQ ID NO: 1299466
uacuucacugguuauaacu

SEQ ID NO: 1299468 - RNA, 19 nt, Artificial Sequence
  Description of Artificial Sequence: Synthetic oligonucleotide
  Sense strand starting at position 703 of SEQ ID NO: 1241784
agugaaguacucuauuauc

SEQ ID NO: 1299469 - RNA, 19 nt, Artificial Sequence
  Description of Artificial Sequence: Synthetic oligonucleotide
  Antisense strand to SEQ ID NO: 1299468
gauaauagaguacuucacu

SEQ ID NO: 1299470 - RNA, 19 nt, Artificial Sequence
  Description of Artificial Sequence: Synthetic oligonucleotide
  Sense strand starting at position 868 of SEQ ID NO: 1241784
uucugaaaguuuccacugu

SEQ ID NO: 1299471 - RNA, 19 nt, Artificial Sequence
  Description of Artificial Sequence: Synthetic oligonucleotide
  Antisense strand to SEQ ID NO: 1299470
acaguggaaacuuucagaa

SEQ ID NO: 1299472 - RNA, 19 nt, Artificial Sequence
  Description of Artificial Sequence: Synthetic oligonucleotide
  Sense strand starting at position 872 of SEQ ID NO: 1241784
gaaaguuuccacuguggug

SEQ ID NO: 1299473 - RNA, 19 nt, Artificial Sequence
  Description of Artificial Sequence: Synthetic oligonucleotide
  Antisense strand to SEQ ID NO: 1299472
caccacaguggaaacuuuc

SEQ ID NO: 1299474 - RNA, 19 nt, Artificial Sequence
  Description of Artificial Sequence: Synthetic oligonucleotide
  Sense strand starting at position 910 of SEQ ID NO: 1241784
uaaagaaacuggguauugu

SEQ ID NO: 1299475 - RNA, 19 nt, Artificial Sequence
  Description of Artificial Sequence: Synthetic oligonucleotide
  Antisense strand to SEQ ID NO: 1299474
acaauacccaguuucuuua

SEQ ID NO: 1299476 - RNA, 19 nt, Artificial Sequence
  Description of Artificial Sequence: Synthetic oligonucleotide
  Sense strand starting at position 920 of SEQ ID NO: 1241784
ggguauuguauugggauga

SEQ ID NO: 1299477 - RNA, 19 nt, Artificial Sequence
  Description of Artificial Sequence: Synthetic oligonucleotide
  Antisense strand to SEQ ID NO: 1299476
ucaucccaauacaauaccc

SEQ ID NO: 1299478 - RNA, 19 nt, Artificial Sequence
  Description of Artificial Sequence: Synthetic oligonucleotide
  Sense strand starting at position 1088 of SEQ ID NO: 1241784
gagaauguggcccaggagu

SEQ ID NO: 1299479 - RNA, 19 nt, Artificial Sequence
  Description of Artificial Sequence: Synthetic oligonucleotide
  Antisense strand to SEQ ID NO: 1299478
acuccugggccacauucuc

SEQ ID NO: 1299480 - RNA, 19 nt, Artificial Sequence
  Description of Artificial Sequence: Synthetic oligonucleotide
  Sense strand starting at position 1099 of SEQ ID NO: 1241784
ccaggaguguuucuggauc

SEQ ID NO: 1299481 - RNA, 19 nt, Artificial Sequence
  Description of Artificial Sequence: Synthetic oligonucleotide
  Antisense strand to SEQ ID NO: 1299480
gauccagaaacacuccugg

SEQ ID NO: 1299482 - RNA, 19 nt, Artificial Sequence
  Description of Artificial Sequence: Synthetic oligonucleotide
  Sense strand starting at position 1107 of SEQ ID NO: 1241784
guuucuggaucccuggaau

SEQ ID NO: 1299483 - RNA, 19 nt, Artificial Sequence
  Description of Artificial Sequence: Synthetic oligonucleotide
  Antisense strand to SEQ ID NO: 1299482
auuccagggauccagaaac

SEQ ID NO: 1299484 - RNA, 19 nt, Artificial Sequence
  Description of Artificial Sequence: Synthetic oligonucleotide
  Sense strand starting at position 1166 of SEQ ID NO: 1241784
cagaguguaggugacaaua

SEQ ID NO: 1299485 - RNA, 19 nt, Artificial Sequence
  Description of Artificial Sequence: Synthetic oligonucleotide
  Antisense strand to SEQ ID NO: 1299484
uauugucaccuacacucug

SEQ ID NO: 1299486 - RNA, 19 nt, Artificial Sequence
  Description of Artificial Sequence: Synthetic oligonucleotide
  Sense strand starting at position 1236 of SEQ ID NO: 1241784
aggauuucuugacaccuuu

SEQ ID NO: 1299487 - RNA, 19 nt, Artificial Sequence
  Description of Artificial Sequence: Synthetic oligonucleotide
  Antisense strand to SEQ ID NO: 1299486
aaaggugucaagaaauccu

SEQ ID NO: 1299488 - RNA, 19 nt, Artificial Sequence
  Description of Artificial Sequence: Synthetic oligonucleotide
  Sense strand starting at position 1412 of SEQ ID NO: 1241784
uucugauguugagcacaga

SEQ ID NO: 1299489 - RNA, 19 nt, Artificial Sequence
  Description of Artificial Sequence: Synthetic oligonucleotide
  Antisense strand to SEQ ID NO: 1299488
ucugugcucaacaucagaa

SEQ ID NO: 1299490 - RNA, 19 nt, Artificial Sequence
  Description of Artificial Sequence: Synthetic oligonucleotide
  Sense strand starting at position 1413 of SEQ ID NO: 1241784
ucugauguugagcacagaa

SEQ ID NO: 1299491 - RNA, 19 nt, Artificial Sequence
  Description of Artificial Sequence: Synthetic oligonucleotide
  Antisense strand to SEQ ID NO: 1299490
uucugugcucaacaucaga

SEQ ID NO: 1299492 - RNA, 19 nt, Artificial Sequence
  Description of Artificial Sequence: Synthetic oligonucleotide
  Sense strand starting at position 1520 of SEQ ID NO: 1241784
aucucuguucccuauggga

SEQ ID NO: 1299493 - RNA, 19 nt, Artificial Sequence
  Description of Artificial Sequence: Synthetic oligonucleotide
  Antisense strand to SEQ ID NO: 1299492
ucccauagggaacagagau

SEQ ID NO: 1299494 - RNA, 19 nt, Artificial Sequence
  Description of Artificial Sequence: Synthetic oligonucleotide
  Sense strand starting at position 1862 of SEQ ID NO: 1241784
agcuaaggguuucuuauaa

SEQ ID NO: 1299495 - RNA, 19 nt, Artificial Sequence
  Description of Artificial Sequence: Synthetic oligonucleotide
  Antisense strand to SEQ ID NO: 1299494
uuauaagaaacccuuagcu

SEQ ID NO: 1299496 - RNA, 19 nt, Artificial Sequence
  Description of Artificial Sequence: Synthetic oligonucleotide
  Sense strand starting at position 1913 of SEQ ID NO: 1241784
ugaccaaccuucuugauga

SEQ ID NO: 1299497 - RNA, 19 nt, Artificial Sequence
  Description of Artificial Sequence: Synthetic oligonucleotide
  Antisense strand to SEQ ID NO: 1299496
ucaucaagaagguugguca

SEQ ID NO: 1299498 - RNA, 19 nt, Artificial Sequence
  Description of Artificial Sequence: Synthetic oligonucleotide
  Sense strand starting at position 1923 of SEQ ID NO: 1241784
ucuugaugagacuguccaa

SEQ ID NO: 1299499 - RNA, 19 nt, Artificial Sequence
  Description of Artificial Sequence: Synthetic oligonucleotide
  Antisense strand to SEQ ID NO: 1299498
uuggacagucucaucaaga

SEQ ID NO: 1299500 - RNA, 19 nt, Artificial Sequence
  Description of Artificial Sequence: Synthetic oligonucleotide
  Sense strand starting at position 1926 of SEQ ID NO: 1241784
ugaugagacuguccaauca

SEQ ID NO: 1299501 - RNA, 19 nt, Artificial Sequence
  Description of Artificial Sequence: Synthetic oligonucleotide
  Antisense strand to SEQ ID NO: 1299500
ugauuggacagucucauca

SEQ ID NO: 1299502 - RNA, 19 nt, Artificial Sequence
  Description of Artificial Sequence: Synthetic oligonucleotide
  Sense strand starting at position 2089 of SEQ ID NO: 1241784
gcgucagugugacugauuu

SEQ ID NO: 1299503 - RNA, 19 nt, Artificial Sequence
  Description of Artificial Sequence: Synthetic oligonucleotide
  Antisense strand to SEQ ID NO: 1299502
aaaucagucacacugacgc

SEQ ID NO: 1299504 - RNA, 19 nt, Artificial Sequence
  Description of Artificial Sequence: Synthetic oligonucleotide
  Sense strand starting at position 2226 of SEQ ID NO: 1241784
ccagcuuggacuuauucga

SEQ ID NO: 1299505 - RNA, 19 nt, Artificial Sequence
  Description of Artificial Sequence: Synthetic oligonucleotide
  Antisense strand to SEQ ID NO: 1299504
ucgaauaaguccaagcugg

SEQ ID NO: 1299506 - RNA, 19 nt, Artificial Sequence
  Description of Artificial Sequence: Synthetic oligonucleotide
  Sense strand starting at position 2299 of SEQ ID NO: 1241784
guggaaugggcauggagaa

SEQ ID NO: 1299507 - RNA, 19 nt, Artificial Sequence
  Description of Artificial Sequence: Synthetic oligonucleotide
  Antisense strand to SEQ ID NO: 1299506
uucuccaugcccauuccac

SEQ ID NO: 1299508 - RNA, 19 nt, Artificial Sequence
  Description of Artificial Sequence: Synthetic oligonucleotide
  Sense strand starting at position 3199 of SEQ ID NO: 1241784
cagcauagggcuugacaaa

SEQ ID NO: 1299509 - RNA, 19 nt, Artificial Sequence
  Description of Artificial Sequence: Synthetic oligonucleotide
  Antisense strand to SEQ ID NO: 1299508
uuugucaagcccuaugcug

SEQ ID NO: 1299510 - RNA, 19 nt, Artificial Sequence
  Description of Artificial Sequence: Synthetic oligonucleotide
  Sense strand starting at position 3212 of SEQ ID NO: 1241784
gacaaagaguacguaauca

SEQ ID NO: 1299511 - RNA, 19 nt, Artificial Sequence
  Description of Artificial Sequence: Synthetic oligonucleotide
  Antisense strand to SEQ ID NO: 1299510
ugauuacguacucuuuguc

SEQ ID NO: 1299512 - RNA, 19 nt, Artificial Sequence
  Description of Artificial Sequence: Synthetic oligonucleotide
  Sense strand starting at position 3216 of SEQ ID NO: 1241784
aagaguacguaaucaggaa

SEQ ID NO: 1299513 - RNA, 19 nt, Artificial Sequence
  Description of Artificial Sequence: Synthetic oligonucleotide
  Antisense strand to SEQ ID NO: 1299512
uuccugauuacguacucuu

SEQ ID NO: 1299514 - RNA, 19 nt, Artificial Sequence
  Description of Artificial Sequence: Synthetic oligonucleotide
  Sense strand starting at position 3220 of SEQ ID NO: 1241784
guacguaaucaggaaaugu

SEQ ID NO: 1299515 - RNA, 19 nt, Artificial Sequence
  Description of Artificial Sequence: Synthetic oligonucleotide
  Antisense strand to SEQ ID NO: 1299514
acauuuccugauuacguac

SEQ ID NO: 1299516 - RNA, 19 nt, Artificial Sequence
  Description of Artificial Sequence: Synthetic oligonucleotide
  Sense strand starting at position 3224 of SEQ ID NO: 1241784
guaaucaggaaauguuugu

SEQ ID NO: 1299517 - RNA, 19 nt, Artificial Sequence
  Description of Artificial Sequence: Synthetic oligonucleotide
  Antisense strand to SEQ ID NO: 1299516
acaaacauuuccugauuac

SEQ ID NO: 1299518 - RNA, 19 nt, Artificial Sequence
  Description of Artificial Sequence: Synthetic oligonucleotide
  Sense strand starting at position 3235 of SEQ ID NO: 1241784
auguuuguugaaugggaau

SEQ ID NO: 1299519 - RNA, 19 nt, Artificial Sequence
  Description of Artificial Sequence: Synthetic oligonucleotide
  Antisense strand to SEQ ID NO: 1299518
auucccauucaacaaacau

SEQ ID NO: 1299520 - RNA, 19 nt, Artificial Sequence
  Description of Artificial Sequence: Synthetic oligonucleotide
  Sense strand starting at position 3237 of SEQ ID NO: 1241784
guuuguugaaugggaauau

SEQ ID NO: 1299521 - RNA, 19 nt, Artificial Sequence
  Description of Artificial Sequence: Synthetic oligonucleotide
  Antisense strand to SEQ ID NO: 1299520
auauucccauucaacaaac

SEQ ID NO: 1299522 - RNA, 19 nt, Artificial Sequence
  Description of Artificial Sequence: Synthetic oligonucleotide
  Sense strand starting at position 3246 of SEQ ID NO: 1241784
augggaauauccuauuucu

SEQ ID NO: 1299523 - RNA, 19 nt, Artificial Sequence
  Description of Artificial Sequence: Synthetic oligonucleotide
  Antisense strand to SEQ ID NO: 1299522
agaaauaggauauucccau

SEQ ID NO: 1299524 - RNA, 19 nt, Artificial Sequence
  Description of Artificial Sequence: Synthetic oligonucleotide
  Sense strand starting at position 3295 of SEQ ID NO: 1241784
guuugcauuccagaaauau

SEQ ID NO: 1299525 - RNA, 19 nt, Artificial Sequence
  Description of Artificial Sequence: Synthetic oligonucleotide
  Antisense strand to SEQ ID NO: 1299524
auauuucuggaaugcaaac

SEQ ID NO: 1299526 - RNA, 19 nt, Artificial Sequence
  Description of Artificial Sequence: Synthetic oligonucleotide
  Sense strand starting at position 3379 of SEQ ID NO: 1241784
gcugauagugacugucaga

SEQ ID NO: 1299527 - RNA, 19 nt, Artificial Sequence
  Description of Artificial Sequence: Synthetic oligonucleotide
  Antisense strand to SEQ ID NO: 1299526
ucugacagucacuaucagc

SEQ ID NO: 1299528 - RNA, 19 nt, Artificial Sequence
  Description of Artificial Sequence: Synthetic oligonucleotide
  Sense strand starting at position 3662 of SEQ ID NO: 1241784
auuaguuccauuggagaug

SEQ ID NO: 1299529 - RNA, 19 nt, Artificial Sequence
  Description of Artificial Sequence: Synthetic oligonucleotide
  Antisense strand to SEQ ID NO: 1299528
caucuccaauggaacuaau

SEQ ID NO: 1299530 - RNA, 19 nt, Artificial Sequence
  Description of Artificial Sequence: Synthetic oligonucleotide
  Sense strand starting at position 115 of SEQ ID NO: 1241785
uucugaaaguuuccacugu

SEQ ID NO: 1299531 - RNA, 19 nt, Artificial Sequence
  Description of Artificial Sequence: Synthetic oligonucleotide
  Antisense strand to SEQ ID NO: 1299530
acaguggaaacuuucagaa

SEQ ID NO: 1299532 - RNA, 19 nt, Artificial Sequence
  Description of Artificial Sequence: Synthetic oligonucleotide
  Sense strand starting at position 119 of SEQ ID NO: 1241785
gaaaguuuccacuguggug

SEQ ID NO: 1299533 - RNA, 19 nt, Artificial Sequence
  Description of Artificial Sequence: Synthetic oligonucleotide
  Antisense strand to SEQ ID NO: 1299532
caccacaguggaaacuuuc

SEQ ID NO: 1299534 - RNA, 19 nt, Artificial Sequence
  Description of Artificial Sequence: Synthetic oligonucleotide
  Sense strand starting at position 157 of SEQ ID NO: 1241785
uaaagaaacuggguauugu

SEQ ID NO: 1299535 - RNA, 19 nt, Artificial Sequence
  Description of Artificial Sequence: Synthetic oligonucleotide
  Antisense strand to SEQ ID NO: 1299534
acaauacccaguuucuuua

SEQ ID NO: 1299536 - RNA, 19 nt, Artificial Sequence
  Description of Artificial Sequence: Synthetic oligonucleotide
  Sense strand starting at position 167 of SEQ ID NO: 1241785
ggguauuguauugggauga

SEQ ID NO: 1299537 - RNA, 19 nt, Artificial Sequence
  Description of Artificial Sequence: Synthetic oligonucleotide
  Antisense strand to SEQ ID NO: 1299536
ucaucccaauacaauaccc

SEQ ID NO: 1299538 - RNA, 19 nt, Artificial Sequence
  Description of Artificial Sequence: Synthetic oligonucleotide
  Sense strand starting at position 335 of SEQ ID NO: 1241785
gagaauguggcccaggagu

SEQ ID NO: 1299539 - RNA, 19 nt, Artificial Sequence
  Description of Artificial Sequence: Synthetic oligonucleotide
  Antisense strand to SEQ ID NO: 1299538
acuccugggccacauucuc

SEQ ID NO: 1299540 - RNA, 19 nt, Artificial Sequence
  Description of Artificial Sequence: Synthetic oligonucleotide
  Sense strand starting at position 346 of SEQ ID NO: 1241785
ccaggaguguuucuggauc

SEQ ID NO: 1299541 - RNA, 19 nt, Artificial Sequence
  Description of Artificial Sequence: Synthetic oligonucleotide
  Antisense strand to SEQ ID NO: 1299540
gauccagaaacacuccugg

SEQ ID NO: 1299542 - RNA, 19 nt, Artificial Sequence
  Description of Artificial Sequence: Synthetic oligonucleotide
  Sense strand starting at position 354 of SEQ ID NO: 1241785
guuucuggaucccuggaau

SEQ ID NO: 1299543 - RNA, 19 nt, Artificial Sequence
  Description of Artificial Sequence: Synthetic oligonucleotide
  Antisense strand to SEQ ID NO: 1299542
auuccagggauccagaaac

SEQ ID NO: 1299544 - RNA, 19 nt, Artificial Sequence
  Description of Artificial Sequence: Synthetic oligonucleotide
  Sense strand starting at position 413 of SEQ ID NO: 1241785
cagaguguaggugacaaua

SEQ ID NO: 1299545 - RNA, 19 nt, Artificial Sequence
  Description of Artificial Sequence: Synthetic oligonucleotide
  Antisense strand to SEQ ID NO: 1299544
uauugucaccuacacucug

SEQ ID NO: 1299546 - RNA, 19 nt, Artificial Sequence
  Description of Artificial Sequence: Synthetic oligonucleotide
  Sense strand starting at position 483 of SEQ ID NO: 1241785
aggauuucuugacaccuuu

SEQ ID NO: 1299547 - RNA, 19 nt, Artificial Sequence
  Description of Artificial Sequence: Synthetic oligonucleotide
  Antisense strand to SEQ ID NO: 1299546
aaaggugucaagaaauccu

SEQ ID NO: 1299548 - RNA, 19 nt, Artificial Sequence
  Description of Artificial Sequence: Synthetic oligonucleotide
  Sense strand starting at position 659 of SEQ ID NO: 1241785
uucugauguugagcacaga

SEQ ID NO: 1299549 - RNA, 19 nt, Artificial Sequence
  Description of Artificial Sequence: Synthetic oligonucleotide
  Antisense strand to SEQ ID NO: 1299548
ucugugcucaacaucagaa

SEQ ID NO: 1299550 - RNA, 19 nt, Artificial Sequence
  Description of Artificial Sequence: Synthetic oligonucleotide
  Sense strand starting at position 660 of SEQ ID NO: 1241785
ucugauguugagcacagaa

SEQ ID NO: 1299551 - RNA, 19 nt, Artificial Sequence
  Description of Artificial Sequence: Synthetic oligonucleotide
  Antisense strand to SEQ ID NO: 1299550
uucugugcucaacaucaga

SEQ ID NO: 1299552 - RNA, 19 nt, Artificial Sequence
  Description of Artificial Sequence: Synthetic oligonucleotide
  Sense strand starting at position 767 of SEQ ID NO: 1241785
aucucuguucccuauggga

SEQ ID NO: 1299553 - RNA, 19 nt, Artificial Sequence
  Description of Artificial Sequence: Synthetic oligonucleotide
  Antisense strand to SEQ ID NO: 1299552
ucccauagggaacagagau

SEQ ID NO: 1299554 - RNA, 19 nt, Artificial Sequence
  Description of Artificial Sequence: Synthetic oligonucleotide
  Sense strand starting at position 1109 of SEQ ID NO: 1241785
agcuaaggguuucuuauaa

SEQ ID NO: 1299555 - RNA, 19 nt, Artificial Sequence
  Description of Artificial Sequence: Synthetic oligonucleotide
  Antisense strand to SEQ ID NO: 1299554
uuauaagaaacccuuagcu

SEQ ID NO: 1299556 - RNA, 19 nt, Artificial Sequence
  Description of Artificial Sequence: Synthetic oligonucleotide
  Sense strand starting at position 1160 of SEQ ID NO: 1241785
ugaccaaccuucuugauga

SEQ ID NO: 1299557 - RNA, 19 nt, Artificial Sequence
  Description of Artificial Sequence: Synthetic oligonucleotide
  Antisense strand to SEQ ID NO: 1299556
ucaucaagaagguugguca

SEQ ID NO: 1299558 - RNA, 19 nt, Artificial Sequence
  Description of Artificial Sequence: Synthetic oligonucleotide
  Sense strand starting at position 1170 of SEQ ID NO: 1241785
ucuugaugagacuguccaa

SEQ ID NO: 1299559 - RNA, 19 nt, Artificial Sequence
  Description of Artificial Sequence: Synthetic oligonucleotide
  Antisense strand to SEQ ID NO: 1299558
uuggacagucucaucaaga

SEQ ID NO: 1299560 - RNA, 19 nt, Artificial Sequence
  Description of Artificial Sequence: Synthetic oligonucleotide
  Sense strand starting at position 1173 of SEQ ID NO: 1241785
ugaugagacuguccaauca

SEQ ID NO: 1299561 - RNA, 19 nt, Artificial Sequence
  Description of Artificial Sequence: Synthetic oligonucleotide
  Antisense strand to SEQ ID NO: 1299560
ugauuggacagucucauca

SEQ ID NO: 1299562 - RNA, 19 nt, Artificial Sequence
  Description of Artificial Sequence: Synthetic oligonucleotide
  Sense strand starting at position 1336 of SEQ ID NO: 1241785
gcgucagugugacugauuu

SEQ ID NO: 1299563 - RNA, 19 nt, Artificial Sequence
  Description of Artificial Sequence: Synthetic oligonucleotide
  Antisense strand to SEQ ID NO: 1299562
aaaucagucacacugacgc

SEQ ID NO: 1299564 - RNA, 19 nt, Artificial Sequence
  Description of Artificial Sequence: Synthetic oligonucleotide
  Sense strand starting at position 1473 of SEQ ID NO: 1241785
ccagcuuggacuuauucga

SEQ ID NO: 1299565 - RNA, 19 nt, Artificial Sequence
  Description of Artificial Sequence: Synthetic oligonucleotide
  Antisense strand to SEQ ID NO: 1299564
ucgaauaaguccaagcugg

SEQ ID NO: 1299566 - RNA, 19 nt, Artificial Sequence
  Description of Artificial Sequence: Synthetic oligonucleotide
  Sense strand starting at position 1546 of SEQ ID NO: 1241785
guggaaugggcauggagaa

SEQ ID NO: 1299567 - RNA, 19 nt, Artificial Sequence
  Description of Artificial Sequence: Synthetic oligonucleotide
  Antisense strand to SEQ ID NO: 1299566
uucuccaugcccauuccac

SEQ ID NO: 1299568 - RNA, 19 nt, Artificial Sequence
  Description of Artificial Sequence: Synthetic oligonucleotide
  Sense strand starting at position 1647 of SEQ ID NO: 1241785
gggccucucuccucgggaa

SEQ ID NO: 1299569 - RNA, 19 nt, Artificial Sequence
  Description of Artificial Sequence: Synthetic oligonucleotide
  Antisense strand to SEQ ID NO: 1299568
uucccgaggagagaggccc

SEQ ID NO: 1299570 - RNA, 19 nt, Artificial Sequence
  Description of Artificial Sequence: Synthetic oligonucleotide
  Sense strand starting at position 1648 of SEQ ID NO: 1241785
ggccucucuccucgggaaa

SEQ ID NO: 1299571 - RNA, 19 nt, Artificial Sequence
  Description of Artificial Sequence: Synthetic oligonucleotide
  Antisense strand to SEQ ID NO: 1299570
uuucccgaggagagaggcc

SEQ ID NO: 1299572 - RNA, 19 nt, Artificial Sequence
  Description of Artificial Sequence: Synthetic oligonucleotide
  Sense strand starting at position 2446 of SEQ ID NO: 1241785
cagcauagggcuugacaaa

SEQ ID NO: 1299573 - RNA, 19 nt, Artificial Sequence
  Description of Artificial Sequence: Synthetic oligonucleotide
  Antisense strand to SEQ ID NO: 1299572
uuugucaagcccuaugcug

SEQ ID NO: 1299574 - RNA, 19 nt, Artificial Sequence
  Description of Artificial Sequence: Synthetic oligonucleotide
  Sense strand starting at position 2459 of SEQ ID NO: 1241785
gacaaagaguacguaauca

SEQ ID NO: 1299575 - RNA, 19 nt, Artificial Sequence
  Description of Artificial Sequence: Synthetic oligonucleotide
  Antisense strand to SEQ ID NO: 1299574
ugauuacguacucuuuguc

SEQ ID NO: 1299576 - RNA, 19 nt, Artificial Sequence
  Description of Artificial Sequence: Synthetic oligonucleotide
  Sense strand starting at position 2463 of SEQ ID NO: 1241785
aagaguacguaaucaggaa

SEQ ID NO: 1299577 - RNA, 19 nt, Artificial Sequence
  Description of Artificial Sequence: Synthetic oligonucleotide
  Antisense strand to SEQ ID NO: 1299576
uuccugauuacguacucuu

SEQ ID NO: 1299578 - RNA, 19 nt, Artificial Sequence
  Description of Artificial Sequence: Synthetic oligonucleotide
  Sense strand starting at position 2467 of SEQ ID NO: 1241785
guacguaaucaggaaaugu

SEQ ID NO: 1299579 - RNA, 19 nt, Artificial Sequence
  Description of Artificial Sequence: Synthetic oligonucleotide
  Antisense strand to SEQ ID NO: 1299578
acauuuccugauuacguac

SEQ ID NO: 1299580 - RNA, 19 nt, Artificial Sequence
  Description of Artificial Sequence: Synthetic oligonucleotide
  Sense strand starting at position 2471 of SEQ ID NO: 1241785
guaaucaggaaauguuugu

SEQ ID NO: 1299581 - RNA, 19 nt, Artificial Sequence
  Description of Artificial Sequence: Synthetic oligonucleotide
  Antisense strand to SEQ ID NO: 1299580
acaaacauuuccugauuac

SEQ ID NO: 1299582 - RNA, 19 nt, Artificial Sequence
  Description of Artificial Sequence: Synthetic oligonucleotide
  Sense strand starting at position 2482 of SEQ ID NO: 1241785
auguuuguugaaugggaau

SEQ ID NO: 1299583 - RNA, 19 nt, Artificial Sequence
  Description of Artificial Sequence: Synthetic oligonucleotide
  Antisense strand to SEQ ID NO: 1299582
auucccauucaacaaacau

SEQ ID NO: 1299584 - RNA, 19 nt, Artificial Sequence
  Description of Artificial Sequence: Synthetic oligonucleotide
  Sense strand starting at position 2484 of SEQ ID NO: 1241785
guuuguugaaugggaauau

SEQ ID NO: 1299585 - RNA, 19 nt, Artificial Sequence
  Description of Artificial Sequence: Synthetic oligonucleotide
  Antisense strand to SEQ ID NO: 1299584
auauucccauucaacaaac

SEQ ID NO: 1299586 - RNA, 19 nt, Artificial Sequence
  Description of Artificial Sequence: Synthetic oligonucleotide
  Sense strand starting at position 2493 of SEQ ID NO: 1241785
augggaauauccuauuucu

SEQ ID NO: 1299587 - RNA, 19 nt, Artificial Sequence
  Description of Artificial Sequence: Synthetic oligonucleotide
  Antisense strand to SEQ ID NO: 1299586
agaaauaggauauucccau

SEQ ID NO: 1299588 - RNA, 19 nt, Artificial Sequence
  Description of Artificial Sequence: Synthetic oligonucleotide
  Sense strand starting at position 2542 of SEQ ID NO: 1241785
guuugcauuccagaaauau

SEQ ID NO: 1299589 - RNA, 19 nt, Artificial Sequence
  Description of Artificial Sequence: Synthetic oligonucleotide
  Antisense strand to SEQ ID NO: 1299588
auauuucuggaaugcaaac

SEQ ID NO: 1299590 - RNA, 19 nt, Artificial Sequence
  Description of Artificial Sequence: Synthetic oligonucleotide
  Sense strand starting at position 2626 of SEQ ID NO: 1241785
gcugauagugacugucaga

SEQ ID NO: 1299591 - RNA, 19 nt, Artificial Sequence
  Description of Artificial Sequence: Synthetic oligonucleotide
  Antisense strand to SEQ ID NO: 1299590
ucugacagucacuaucagc

SEQ ID NO: 1299592 - RNA, 19 nt, Artificial Sequence
  Description of Artificial Sequence: Synthetic oligonucleotide
  Sense strand starting at position 2909 of SEQ ID NO: 1241785
auuaguuccauuggagaug

SEQ ID NO: 1299593 - RNA, 19 nt, Artificial Sequence
  Description of Artificial Sequence: Synthetic oligonucleotide
  Antisense strand to SEQ ID NO: 1299592
caucuccaauggaacuaau

SEQ ID NO: 1299594 - RNA, 19 nt, Artificial Sequence
  Description of Artificial Sequence: Synthetic oligonucleotide
  Sense strand starting at position 3287 of SEQ ID NO: 1241785
uugcguguggaaguuguua

SEQ ID NO: 1299595 - RNA, 19 nt, Artificial Sequence
  Description of Artificial Sequence: Synthetic oligonucleotide
  Antisense strand to SEQ ID NO: 1299594
uaacaacuuccacacgcaa

SEQ ID NO: 1299596 - RNA, 19 nt, Artificial Sequence
  Description of Artificial Sequence: Synthetic oligonucleotide
  Sense strand starting at position 3469 of SEQ ID NO: 1241785
auagaaacccauugucuag

SEQ ID NO: 1299597 - RNA, 19 nt, Artificial Sequence
  Description of Artificial Sequence: Synthetic oligonucleotide
  Antisense strand to SEQ ID NO: 1299596
cuagacaauggguuucuau

SEQ ID NO: 1299598 - RNA, 19 nt, Artificial Sequence
  Description of Artificial Sequence: Synthetic oligonucleotide
  Sense strand starting at position 3500 of SEQ ID NO: 1241785
guaauaggcugucuggaau

SEQ ID NO: 1299599 - RNA, 19 nt, Artificial Sequence
  Description of Artificial Sequence: Synthetic oligonucleotide
  Antisense strand to SEQ ID NO: 1299598
auuccagacagccuauuac

SEQ ID NO: 1299600 - RNA, 19 nt, Artificial Sequence
  Description of Artificial Sequence: Synthetic oligonucleotide
  Sense strand starting at position 3506 of SEQ ID NO: 1241785
ggcugucuggaaugacuua

SEQ ID NO: 1299601 - RNA, 19 nt, Artificial Sequence
  Description of Artificial Sequence: Synthetic oligonucleotide
  Antisense strand to SEQ ID NO: 1299600
uaagucauuccagacagcc

SEQ ID NO: 1299602 - RNA, 19 nt, Artificial Sequence
  Description of Artificial Sequence: Synthetic oligonucleotide
  Sense strand starting at position 3587 of SEQ ID NO: 1241785
ggagcuuggcguguuugau

SEQ ID NO: 1299603 - RNA, 19 nt, Artificial Sequence
  Description of Artificial Sequence: Synthetic oligonucleotide
  Antisense strand to SEQ ID NO: 1299602
aucaaacacgccaagcucc

SEQ ID NO: 1299604 - RNA, 19 nt, Artificial Sequence
  Description of Artificial Sequence: Synthetic oligonucleotide
  Sense strand starting at position 3588 of SEQ ID NO: 1241785
gagcuuggcguguuugauu

SEQ ID NO: 1299605 - RNA, 19 nt, Artificial Sequence
  Description of Artificial Sequence: Synthetic oligonucleotide
  Antisense strand to SEQ ID NO: 1299604
aaucaaacacgccaagcuc

SEQ ID NO: 1299606 - RNA, 19 nt, Artificial Sequence
  Description of Artificial Sequence: Synthetic oligonucleotide
  Sense strand starting at position 3792 of SEQ ID NO: 1241785
ccauguauuguguaugaug

SEQ ID NO: 1299607 - RNA, 19 nt, Artificial Sequence
  Description of Artificial Sequence: Synthetic oligonucleotide
  Antisense strand to SEQ ID NO: 1299606
caucauacacaauacaugg

SEQ ID NO: 1299608 - RNA, 19 nt, Artificial Sequence
  Description of Artificial Sequence: Synthetic oligonucleotide
  Sense strand starting at position 3800 of SEQ ID NO: 1241785
uguguaugaugguucagaa

SEQ ID NO: 1299609 - RNA, 19 nt, Artificial Sequence
  Description of Artificial Sequence: Synthetic oligonucleotide
  Antisense strand to SEQ ID NO: 1299608
uucugaaccaucauacaca

SEQ ID NO: 1299610 - RNA, 19 nt, Artificial Sequence
  Description of Artificial Sequence: Synthetic oligonucleotide
  Sense strand starting at position 866 of SEQ ID NO: 1241786
agaugagcuucuccucaua

SEQ ID NO: 1299611 - RNA, 19 nt, Artificial Sequence
  Description of Artificial Sequence: Synthetic oligonucleotide
  Antisense strand to SEQ ID NO: 1299610
uaugaggagaagcucaucu

SEQ ID NO: 1299612 - RNA, 19 nt, Artificial Sequence
  Description of Artificial Sequence: Synthetic oligonucleotide
  Sense strand starting at position 887 of SEQ ID NO: 1241786
uguuuaucacugcacauau

SEQ ID NO: 1299613 - RNA, 19 nt, Artificial Sequence
  Description of Artificial Sequence: Synthetic oligonucleotide
  Antisense strand to SEQ ID NO: 1299612
auaugugcagugauaaaca

SEQ ID NO: 1299614 - RNA, 19 nt, Artificial Sequence
  Description of Artificial Sequence: Synthetic oligonucleotide
  Sense strand starting at position 933 of SEQ ID NO: 1241786
uugugauuaauuuguguuc

SEQ ID NO: 1299615 - RNA, 19 nt, Artificial Sequence
  Description of Artificial Sequence: Synthetic oligonucleotide
  Antisense strand to SEQ ID NO: 1299614
gaacacaaauuaaucacaa

SEQ ID NO: 1299616 - RNA, 19 nt, Artificial Sequence
  Description of Artificial Sequence: Synthetic oligonucleotide
  Sense strand starting at position 1312 of SEQ ID NO: 1241786
gcaguaacuagugaucuga

SEQ ID NO: 1299617 - RNA, 19 nt, Artificial Sequence
  Description of Artificial Sequence: Synthetic oligonucleotide
  Antisense strand to SEQ ID NO: 1299616
ucagaucacuaguuacugc

SEQ ID NO: 1299618 - RNA, 19 nt, Artificial Sequence
  Description of Artificial Sequence: Synthetic oligonucleotide
  Sense strand starting at position 1314 of SEQ ID NO: 1241786
aguaacuagugaucugaca

SEQ ID NO: 1299619 - RNA, 19 nt, Artificial Sequence
  Description of Artificial Sequence: Synthetic oligonucleotide
  Antisense strand to SEQ ID NO: 1299618
ugucagaucacuaguuacu

SEQ ID NO: 1299620 - RNA, 19 nt, Artificial Sequence
  Description of Artificial Sequence: Synthetic oligonucleotide
  Sense strand starting at position 1390 of SEQ ID NO: 1241786
uuccaacuccucuggaagu

SEQ ID NO: 1299621 - RNA, 19 nt, Artificial Sequence
  Description of Artificial Sequence: Synthetic oligonucleotide
  Antisense strand to SEQ ID NO: 1299620
acuuccagaggaguuggaa

SEQ ID NO: 1299622 - RNA, 19 nt, Artificial Sequence
  Description of Artificial Sequence: Synthetic oligonucleotide
  Sense strand starting at position 1411 of SEQ ID NO: 1241786
gauuauaacuuugucgaua

SEQ ID NO: 1299623 - RNA, 19 nt, Artificial Sequence
  Description of Artificial Sequence: Synthetic oligonucleotide
  Antisense strand to SEQ ID NO: 1299622
uaucgacaaaguuauaauc

SEQ ID NO: 1299624 - RNA, 19 nt, Artificial Sequence
  Description of Artificial Sequence: Synthetic oligonucleotide
  Sense strand starting at position 1825 of SEQ ID NO: 1241786
gagugacaccagcgggaua

SEQ ID NO: 1299625 - RNA, 19 nt, Artificial Sequence
  Description of Artificial Sequence: Synthetic oligonucleotide
  Antisense strand to SEQ ID NO: 1299624
uaucccgcuggugucacuc

SEQ ID NO: 1299626 - RNA, 19 nt, Artificial Sequence
  Description of Artificial Sequence: Synthetic oligonucleotide
  Sense strand starting at position 2435 of SEQ ID NO: 1241786
gcucuccucccaggaaaca

SEQ ID NO: 1299627 - RNA, 19 nt, Artificial Sequence
  Description of Artificial Sequence: Synthetic oligonucleotide
  Antisense strand to SEQ ID NO: 1299626
uguuuccugggaggagagc

SEQ ID NO: 1299628 - RNA, 19 nt, Artificial Sequence
  Description of Artificial Sequence: Synthetic oligonucleotide
  Sense strand starting at position 2506 of SEQ ID NO: 1241786
acagaucuuugagcaucuu

SEQ ID NO: 1299629 - RNA, 19 nt, Artificial Sequence
  Description of Artificial Sequence: Synthetic oligonucleotide
  Antisense strand to SEQ ID NO: 1299628
aagaugcucaaagaucugu

SEQ ID NO: 1299630 - RNA, 19 nt, Artificial Sequence
  Description of Artificial Sequence: Synthetic oligonucleotide
  Sense strand starting at position 2514 of SEQ ID NO: 1241786
uugagcaucuucucuggaa

SEQ ID NO: 1299631 - RNA, 19 nt, Artificial Sequence
  Description of Artificial Sequence: Synthetic oligonucleotide
  Antisense strand to SEQ ID NO: 1299630
uuccagagaagaugcucaa

SEQ ID NO: 1299632 - RNA, 19 nt, Artificial Sequence
  Description of Artificial Sequence: Synthetic oligonucleotide
  Sense strand starting at position 2515 of SEQ ID NO: 1241786
ugagcaucuucucuggaaa

SEQ ID NO: 1299633 - RNA, 19 nt, Artificial Sequence
  Description of Artificial Sequence: Synthetic oligonucleotide
  Antisense strand to SEQ ID NO: 1299632
uuuccagagaagaugcuca

SEQ ID NO: 1299634 - RNA, 19 nt, Artificial Sequence
  Description of Artificial Sequence: Synthetic oligonucleotide
  Sense strand starting at position 2591 of SEQ ID NO: 1241786
cgcuucuguagagauaaag

SEQ ID NO: 1299635 - RNA, 19 nt, Artificial Sequence
  Description of Artificial Sequence: Synthetic oligonucleotide
  Antisense strand to SEQ ID NO: 1299634
cuuuaucucuacagaagcg

SEQ ID NO: 1299636 - RNA, 19 nt, Artificial Sequence
  Description of Artificial Sequence: Synthetic oligonucleotide
  Sense strand starting at position 2645 of SEQ ID NO: 1241786
uugguaccugaagguauaa

SEQ ID NO: 1299637 - RNA, 19 nt, Artificial Sequence
  Description of Artificial Sequence: Synthetic oligonucleotide
  Antisense strand to SEQ ID NO: 1299636
uuauaccuucagguaccaa

SEQ ID NO: 1299638 - RNA, 19 nt, Artificial Sequence
  Description of Artificial Sequence: Synthetic oligonucleotide
  Sense strand starting at position 2701 of SEQ ID NO: 1241786
cuauauauccguuaugaag

SEQ ID NO: 1299639 - RNA, 19 nt, Artificial Sequence
  Description of Artificial Sequence: Synthetic oligonucleotide
  Antisense strand to SEQ ID NO: 1299638
cuucauaacggauauauag

SEQ ID NO: 1299640 - RNA, 19 nt, Artificial Sequence
  Description of Artificial Sequence: Synthetic oligonucleotide
  Sense strand starting at position 2707 of SEQ ID NO: 1241786
auccguuaugaagaaagua

SEQ ID NO: 1299641 - RNA, 19 nt, Artificial Sequence
  Description of Artificial Sequence: Synthetic oligonucleotide
  Antisense strand to SEQ ID NO: 1299640
uacuuucuucauaacggau

SEQ ID NO: 1299642 - RNA, 19 nt, Artificial Sequence
  Description of Artificial Sequence: Synthetic oligonucleotide
  Sense strand starting at position 2948 of SEQ ID NO: 1241786
uuguacuuaucuuugagaa

SEQ ID NO: 1299643 - RNA, 19 nt, Artificial Sequence
  Description of Artificial Sequence: Synthetic oligonucleotide
  Antisense strand to SEQ ID NO: 1299642
uucucaaagauaaguacaa

SEQ ID NO: 1299644 - RNA, 19 nt, Artificial Sequence
  Description of Artificial Sequence: Synthetic oligonucleotide
  Sense strand starting at position 2949 of SEQ ID NO: 1241786
uguacuuaucuuugagaau

SEQ ID NO: 1299645 - RNA, 19 nt, Artificial Sequence
  Description of Artificial Sequence: Synthetic oligonucleotide
  Antisense strand to SEQ ID NO: 1299644
auucucaaagauaaguaca

SEQ ID NO: 1299646 - RNA, 19 nt, Artificial Sequence
  Description of Artificial Sequence: Synthetic oligonucleotide
  Sense strand starting at position 3037 of SEQ ID NO: 1241786
ugaagagguuucccuauug

SEQ ID NO: 1299647 - RNA, 19 nt, Artificial Sequence
  Description of Artificial Sequence: Synthetic oligonucleotide
  Antisense strand to SEQ ID NO: 1299646
caauagggaaaccucuuca

SEQ ID NO: 1299648 - RNA, 19 nt, Artificial Sequence
  Description of Artificial Sequence: Synthetic oligonucleotide
  Sense strand starting at position 3100 of SEQ ID NO: 1241786
gcaaaccgucguguucuua

SEQ ID NO: 1299649 - RNA, 19 nt, Artificial Sequence
  Description of Artificial Sequence: Synthetic oligonucleotide
  Antisense strand to SEQ ID NO: 1299648
uaagaacacgacgguuugc

SEQ ID NO: 1299650 - RNA, 19 nt, Artificial Sequence
  Description of Artificial Sequence: Synthetic oligonucleotide
  Sense strand starting at position 3152 of SEQ ID NO: 1241786
guacuagagcuccagauag

SEQ ID NO: 1299651 - RNA, 19 nt, Artificial Sequence
  Description of Artificial Sequence: Synthetic oligonucleotide
  Antisense strand to SEQ ID NO: 1299650
cuaucuggagcucuaguac

SEQ ID NO: 1299652 - RNA, 19 nt, Artificial Sequence
  Description of Artificial Sequence: Synthetic oligonucleotide
  Sense strand starting at position 3185 of SEQ ID NO: 1241786
gagguuuguauaugaauga

SEQ ID NO: 1299653 - RNA, 19 nt, Artificial Sequence
  Description of Artificial Sequence: Synthetic oligonucleotide
  Antisense strand to SEQ ID NO: 1299652
ucauucauauacaaaccuc

SEQ ID NO: 1299654 - RNA, 19 nt, Artificial Sequence
  Description of Artificial Sequence: Synthetic oligonucleotide
  Sense strand starting at position 3259 of SEQ ID NO: 1241786
uguugaucucccgaaagag

SEQ ID NO: 1299655 - RNA, 19 nt, Artificial Sequence
  Description of Artificial Sequence: Synthetic oligonucleotide
  Antisense strand to SEQ ID NO: 1299654
cucuuucgggagaucaaca

SEQ ID NO: 1299656 - RNA, 19 nt, Artificial Sequence
  Description of Artificial Sequence: Synthetic oligonucleotide
  Sense strand starting at position 3287 of SEQ ID NO: 1241786
cagagaugaugcuuucuga

SEQ ID NO: 1299657 - RNA, 19 nt, Artificial Sequence
  Description of Artificial Sequence: Synthetic oligonucleotide
  Antisense strand to SEQ ID NO: 1299656
ucagaaagcaucaucucug

SEQ ID NO: 1299658 - RNA, 19 nt, Artificial Sequence
  Description of Artificial Sequence: Synthetic oligonucleotide
  Sense strand starting at position 3290 of SEQ ID NO: 1241786
agaugaugcuuucugagug

SEQ ID NO: 1299659 - RNA, 19 nt, Artificial Sequence
  Description of Artificial Sequence: Synthetic oligonucleotide
  Antisense strand to SEQ ID NO: 1299658
cacucagaaagcaucaucu

SEQ ID NO: 1299660 - RNA, 19 nt, Artificial Sequence
  Description of Artificial Sequence: Synthetic oligonucleotide
  Sense strand starting at position 3298 of SEQ ID NO: 1241786
cuuucugagugaccuaauu

SEQ ID NO: 1299661 - RNA, 19 nt, Artificial Sequence
  Description of Artificial Sequence: Synthetic oligonucleotide
  Antisense strand to SEQ ID NO: 1299660
aauuaggucacucagaaag

SEQ ID NO: 1299662 - RNA, 19 nt, Artificial Sequence
  Description of Artificial Sequence: Synthetic oligonucleotide
  Sense strand starting at position 3342 of SEQ ID NO: 1241786
uuuggauagacuggcuuau

SEQ ID NO: 1299663 - RNA, 19 nt, Artificial Sequence
  Description of Artificial Sequence: Synthetic oligonucleotide
  Antisense strand to SEQ ID NO: 1299662
auaagccagucuauccaaa

SEQ ID NO: 1299664 - RNA, 19 nt, Artificial Sequence
  Description of Artificial Sequence: Synthetic oligonucleotide
  Sense strand starting at position 3344 of SEQ ID NO: 1241786
uggauagacuggcuuauaa

SEQ ID NO: 1299665 - RNA, 19 nt, Artificial Sequence
  Description of Artificial Sequence: Synthetic oligonucleotide
  Antisense strand to SEQ ID NO: 1299664
uuauaagccagucuaucca

SEQ ID NO: 1299666 - RNA, 19 nt, Artificial Sequence
  Description of Artificial Sequence: Synthetic oligonucleotide
  Sense strand starting at position 3377 of SEQ ID NO: 1241786
guaacaauaucauuggcua

SEQ ID NO: 1299667 - RNA, 19 nt, Artificial Sequence
  Description of Artificial Sequence: Synthetic oligonucleotide
  Antisense strand to SEQ ID NO: 1299666
uagccaaugauauuguuac

SEQ ID NO: 1299668 - RNA, 19 nt, Artificial Sequence
  Description of Artificial Sequence: Synthetic oligonucleotide
  Sense strand starting at position 3380 of SEQ ID NO: 1241786
acaauaucauuggcuagag

SEQ ID NO: 1299669 - RNA, 19 nt, Artificial Sequence
  Description of Artificial Sequence: Synthetic oligonucleotide
  Antisense strand to SEQ ID NO: 1299668
cucuagccaaugauauugu

SEQ ID NO: 1299670 - RNA, 19 nt, Artificial Sequence
  Description of Artificial Sequence: Synthetic oligonucleotide
  Sense strand starting at position 3381 of SEQ ID NO: 1241786
caauaucauuggcuagagu

SEQ ID NO: 1299671 - RNA, 19 nt, Artificial Sequence
  Description of Artificial Sequence: Synthetic oligonucleotide
  Antisense strand to SEQ ID NO: 1299670
acucuagccaaugauauug

SEQ ID NO: 1299672 - RNA, 19 nt, Artificial Sequence
  Description of Artificial Sequence: Synthetic oligonucleotide
  Sense strand starting at position 3382 of SEQ ID NO: 1241786
aauaucauuggcuagagua

SEQ ID NO: 1299673 - RNA, 19 nt, Artificial Sequence
  Description of Artificial Sequence: Synthetic oligonucleotide
  Antisense strand to SEQ ID NO: 1299672
uacucuagccaaugauauu

SEQ ID NO: 1299674 - RNA, 19 nt, Artificial Sequence
  Description of Artificial Sequence: Synthetic oligonucleotide
  Sense strand starting at position 3384 of SEQ ID NO: 1241786
uaucauuggcuagaguaca

SEQ ID NO: 1299675 - RNA, 19 nt, Artificial Sequence
  Description of Artificial Sequence: Synthetic oligonucleotide
  Antisense strand to SEQ ID NO: 1299674
uguacucuagccaaugaua

SEQ ID NO: 1299676 - RNA, 19 nt, Artificial Sequence
  Description of Artificial Sequence: Synthetic oligonucleotide
  Sense strand starting at position 3432 of SEQ ID NO: 1241786
cgucucuauguugaauaaa

SEQ ID NO: 1299677 - RNA, 19 nt, Artificial Sequence
  Description of Artificial Sequence: Synthetic oligonucleotide
  Antisense strand to SEQ ID NO: 1299676
uuuauucaacauagagacg

SEQ ID NO: 1299678 - RNA, 19 nt, Artificial Sequence
  Description of Artificial Sequence: Synthetic oligonucleotide
  Sense strand starting at position 3550 of SEQ ID NO: 1241786
cuguaauacccaugagacu

SEQ ID NO: 1299679 - RNA, 19 nt, Artificial Sequence
  Description of Artificial Sequence: Synthetic oligonucleotide
  Antisense strand to SEQ ID NO: 1299678
agucucauggguauuacag

SEQ ID NO: 1299680 - RNA, 19 nt, Artificial Sequence
  Description of Artificial Sequence: Synthetic oligonucleotide
  Sense strand starting at position 3561 of SEQ ID NO: 1241786
augagacuaugauugaugu

SEQ ID NO: 1299681 - RNA, 19 nt, Artificial Sequence
  Description of Artificial Sequence: Synthetic oligonucleotide
  Antisense strand to SEQ ID NO: 1299680
acaucaaucauagucucau

SEQ ID NO: 1299682 - RNA, 19 nt, Artificial Sequence
  Description of Artificial Sequence: Synthetic oligonucleotide
  Sense strand starting at position 3722 of SEQ ID NO: 1241786
uugugugaccuugaauaug

SEQ ID NO: 1299683 - RNA, 19 nt, Artificial Sequence
  Description of Artificial Sequence: Synthetic oligonucleotide
  Antisense strand to SEQ ID NO: 1299682
cauauucaaggucacacaa

SEQ ID NO: 1299684 - RNA, 19 nt, Artificial Sequence
  Description of Artificial Sequence: Synthetic oligonucleotide
  Sense strand starting at position 3733 of SEQ ID NO: 1241786
ugaauauguuccuuuacug

SEQ ID NO: 1299685 - RNA, 19 nt, Artificial Sequence
  Description of Artificial Sequence: Synthetic oligonucleotide
  Antisense strand to SEQ ID NO: 1299684
caguaaaggaacauauuca

SEQ ID NO: 1299686 - RNA, 19 nt, Artificial Sequence
  Description of Artificial Sequence: Synthetic oligonucleotide
  Sense strand starting at position 3821 of SEQ ID NO: 1241786
gauacucauggauguauaa

SEQ ID NO: 1299687 - RNA, 19 nt, Artificial Sequence
  Description of Artificial Sequence: Synthetic oligonucleotide
  Antisense strand to SEQ ID NO: 1299686
uuauacauccaugaguauc

SEQ ID NO: 1299688 - RNA, 19 nt, Artificial Sequence
  Description of Artificial Sequence: Synthetic oligonucleotide
  Sense strand starting at position 3877 of SEQ ID NO: 1241786
ugcuuuggguggguauuua

SEQ ID NO: 1299689 - RNA, 19 nt, Artificial Sequence
  Description of Artificial Sequence: Synthetic oligonucleotide
  Antisense strand to SEQ ID NO: 1299688
uaaauacccacccaaagca

SEQ ID NO: 1299690 - RNA, 19 nt, Artificial Sequence
  Description of Artificial Sequence: Synthetic oligonucleotide
  Sense strand starting at position 76 of SEQ ID NO: 1241787
ucugauuaucaaugucaag

SEQ ID NO: 1299691 - RNA, 19 nt, Artificial Sequence
  Description of Artificial Sequence: Synthetic oligonucleotide
  Antisense strand to SEQ ID NO: 1299690
cuugacauugauaaucaga

SEQ ID NO: 1299692 - RNA, 19 nt, Artificial Sequence
  Description of Artificial Sequence: Synthetic oligonucleotide
  Sense strand starting at position 95 of SEQ ID NO: 1241787
acagcagcuucuuauuuga

SEQ ID NO: 1299693 - RNA, 19 nt, Artificial Sequence
  Description of Artificial Sequence: Synthetic oligonucleotide
  Antisense strand to SEQ ID NO: 1299692
ucaaauaagaagcugcugu

SEQ ID NO: 1299694 - RNA, 19 nt, Artificial Sequence
  Description of Artificial Sequence: Synthetic oligonucleotide
  Sense strand starting at position 195 of SEQ ID NO: 1241787
caacgugcacuguaacauu

SEQ ID NO: 1299695 - RNA, 19 nt, Artificial Sequence
  Description of Artificial Sequence: Synthetic oligonucleotide
  Antisense strand to SEQ ID NO: 1299694
aauguuacagugcacguug

SEQ ID NO: 1299696 - RNA, 19 nt, Artificial Sequence
  Description of Artificial Sequence: Synthetic oligonucleotide
  Sense strand starting at position 264 of SEQ ID NO: 1241787
ccaaacaagucagugacaa

SEQ ID NO: 1299697 - RNA, 19 nt, Artificial Sequence
  Description of Artificial Sequence: Synthetic oligonucleotide
  Antisense strand to SEQ ID NO: 1299696
uugucacugacuuguuugg

SEQ ID NO: 1299698 - RNA, 19 nt, Artificial Sequence
  Description of Artificial Sequence: Synthetic oligonucleotide
  Sense strand starting at position 318 of SEQ ID NO: 1241787
ugaagacuacuucgagcuu

SEQ ID NO: 1299699 - RNA, 19 nt, Artificial Sequence
  Description of Artificial Sequence: Synthetic oligonucleotide
  Antisense strand to SEQ ID NO: 1299698
aagcucgaaguagucuuca

SEQ ID NO: 1299700 - RNA, 19 nt, Artificial Sequence
  Description of Artificial Sequence: Synthetic oligonucleotide
  Sense strand starting at position 403 of SEQ ID NO: 1241787
cccuaaauacagugguaca

SEQ ID NO: 1299701 - RNA, 19 nt, Artificial Sequence
  Description of Artificial Sequence: Synthetic oligonucleotide
  Antisense strand to SEQ ID NO: 1299700
uguaccacuguauuuaggg

SEQ ID NO: 1299702 - RNA, 19 nt, Artificial Sequence
  Description of Artificial Sequence: Synthetic oligonucleotide
  Sense strand starting at position 414 of SEQ ID NO: 1241787
gugguacacuuauuaucau

SEQ ID NO: 1299703 - RNA, 19 nt, Artificial Sequence
  Description of Artificial Sequence: Synthetic oligonucleotide
  Antisense strand to SEQ ID NO: 1299702
augauaauaaguguaccac

SEQ ID NO: 1299704 - RNA, 19 nt, Artificial Sequence
  Description of Artificial Sequence: Synthetic oligonucleotide
  Sense strand starting at position 485 of SEQ ID NO: 1241787
uuuagauaccacugucauu

SEQ ID NO: 1299705 - RNA, 19 nt, Artificial Sequence
  Description of Artificial Sequence: Synthetic oligonucleotide
  Antisense strand to SEQ ID NO: 1299704
aaugacagugguaucuaaa

SEQ ID NO: 1299706 - RNA, 19 nt, Artificial Sequence
  Description of Artificial Sequence: Synthetic oligonucleotide
  Sense strand starting at position 496 of SEQ ID NO: 1241787
cugucauuucccuagcucu

SEQ ID NO: 1299707 - RNA, 19 nt, Artificial Sequence
  Description of Artificial Sequence: Synthetic oligonucleotide
  Antisense strand to SEQ ID NO: 1299706
agagcuagggaaaugacag

SEQ ID NO: 1299708 - RNA, 19 nt, Artificial Sequence
  Description of Artificial Sequence: Synthetic oligonucleotide
  Sense strand starting at position 536 of SEQ ID NO: 1241787
acuggaucuggcuauauua

SEQ ID NO: 1299709 - RNA, 19 nt, Artificial Sequence
  Description of Artificial Sequence: Synthetic oligonucleotide
  Antisense strand to SEQ ID NO: 1299708
uaauauagccagauccagu

SEQ ID NO: 1299710 - RNA, 19 nt, Artificial Sequence
  Description of Artificial Sequence: Synthetic oligonucleotide
  Sense strand starting at position 605 of SEQ ID NO: 1241787
acaugcauuuacgacuuaa

SEQ ID NO: 1299711 - RNA, 19 nt, Artificial Sequence
  Description of Artificial Sequence: Synthetic oligonucleotide
  Antisense strand to SEQ ID NO: 1299710
uuaagucguaaaugcaugu

SEQ ID NO: 1299712 - RNA, 19 nt, Artificial Sequence
  Description of Artificial Sequence: Synthetic oligonucleotide
  Sense strand starting at position 652 of SEQ ID NO: 1241787
ugcugugggaugcauuaau

SEQ ID NO: 1299713 - RNA, 19 nt, Artificial Sequence
  Description of Artificial Sequence: Synthetic oligonucleotide
  Antisense strand to SEQ ID NO: 1299712
auuaaugcaucccacagca

SEQ ID NO: 1299714 - RNA, 19 nt, Artificial Sequence
  Description of Artificial Sequence: Synthetic oligonucleotide
  Sense strand starting at position 849 of SEQ ID NO: 1241787
gaaggauggucccuuuaaa

SEQ ID NO: 1299715 - RNA, 19 nt, Artificial Sequence
  Description of Artificial Sequence: Synthetic oligonucleotide
  Antisense strand to SEQ ID NO: 1299714
uuuaaagggaccauccuuc

SEQ ID NO: 1299716 - RNA, 19 nt, Artificial Sequence
  Description of Artificial Sequence: Synthetic oligonucleotide
  Sense strand starting at position 904 of SEQ ID NO: 1241787
cagucugacuuguuggaca

SEQ ID NO: 1299717 - RNA, 19 nt, Artificial Sequence
  Description of Artificial Sequence: Synthetic oligonucleotide
  Antisense strand to SEQ ID NO: 1299716
uguccaacaagucagacug

SEQ ID NO: 1299718 - RNA, 19 nt, Artificial Sequence
  Description of Artificial Sequence: Synthetic oligonucleotide
  Sense strand starting at position 906 of SEQ ID NO: 1241787
gucugacuuguuggacaag

SEQ ID NO: 1299719 - RNA, 19 nt, Artificial Sequence
  Description of Artificial Sequence: Synthetic oligonucleotide
  Antisense strand to SEQ ID NO: 1299718
cuuguccaacaagucagac

SEQ ID NO: 1299720 - RNA, 19 nt, Artificial Sequence
  Description of Artificial Sequence: Synthetic oligonucleotide
  Sense strand starting at position 923 of SEQ ID NO: 1241787
agauuaaucugggcacucu

SEQ ID NO: 1299721 - RNA, 19 nt, Artificial Sequence
  Description of Artificial Sequence: Synthetic oligonucleotide
  Antisense strand to SEQ ID NO: 1299720
agagugcccagauuaaucu

SEQ ID NO: 1299722 - RNA, 19 nt, Artificial Sequence
  Description of Artificial Sequence: Synthetic oligonucleotide
  Sense strand starting at position 1131 of SEQ ID NO: 1241787
gcuccuaggaagugucagu

SEQ ID NO: 1299723 - RNA, 19 nt, Artificial Sequence
  Description of Artificial Sequence: Synthetic oligonucleotide
  Antisense strand to SEQ ID NO: 1299722
acugacacuuccuaggagc

SEQ ID NO: 1299724 - RNA, 19 nt, Artificial Sequence
  Description of Artificial Sequence: Synthetic oligonucleotide
  Sense strand starting at position 2296 of SEQ ID NO: 1241787
ugucaugagccugagguga

SEQ ID NO: 1299725 - RNA, 19 nt, Artificial Sequence
  Description of Artificial Sequence: Synthetic oligonucleotide
  Antisense strand to SEQ ID NO: 1299724
ucaccucaggcucaugaca

SEQ ID NO: 1299726 - RNA, 19 nt, Artificial Sequence
  Description of Artificial Sequence: Synthetic oligonucleotide
  Sense strand starting at position 2666 of SEQ ID NO: 1241787
aagaaugugguacagcaua

SEQ ID NO: 1299727 - RNA, 19 nt, Artificial Sequence
  Description of Artificial Sequence: Synthetic oligonucleotide
  Antisense strand to SEQ ID NO: 1299726
uaugcuguaccacauucuu

SEQ ID NO: 1299728 - RNA, 19 nt, Artificial Sequence
  Description of Artificial Sequence: Synthetic oligonucleotide
  Sense strand starting at position 2678 of SEQ ID NO: 1241787
cagcauagguguucucaag

SEQ ID NO: 1299729 - RNA, 19 nt, Artificial Sequence
  Description of Artificial Sequence: Synthetic oligonucleotide
  Antisense strand to SEQ ID NO: 1299728
cuugagaacaccuaugcug

SEQ ID NO: 1299730 - RNA, 19 nt, Artificial Sequence
  Description of Artificial Sequence: Synthetic oligonucleotide
  Sense strand starting at position 2751 of SEQ ID NO: 1241787
ggagguuuguccucuccag

SEQ ID NO: 1299731 - RNA, 19 nt, Artificial Sequence
  Description of Artificial Sequence: Synthetic oligonucleotide
  Antisense strand to SEQ ID NO: 1299730
cuggagaggacaaaccucc

SEQ ID NO: 1299732 - RNA, 19 nt, Artificial Sequence
  Description of Artificial Sequence: Synthetic oligonucleotide
  Sense strand starting at position 2832 of SEQ ID NO: 1241787
cacugaucuugcucaguag

SEQ ID NO: 1299733 - RNA, 19 nt, Artificial Sequence
  Description of Artificial Sequence: Synthetic oligonucleotide
  Antisense strand to SEQ ID NO: 1299732
cuacugagcaagaucagug

SEQ ID NO: 1299734 - RNA, 19 nt, Artificial Sequence
  Description of Artificial Sequence: Synthetic oligonucleotide
  Sense strand starting at position 2835 of SEQ ID NO: 1241787
ugaucuugcucaguagguu

SEQ ID NO: 1299735 - RNA, 19 nt, Artificial Sequence
  Description of Artificial Sequence: Synthetic oligonucleotide
  Antisense strand to SEQ ID NO: 1299734
aaccuacugagcaagauca

SEQ ID NO: 1299736 - RNA, 19 nt, Artificial Sequence
  Description of Artificial Sequence: Synthetic oligonucleotide
  Sense strand starting at position 2836 of SEQ ID NO: 1241787
gaucuugcucaguagguua

SEQ ID NO: 1299737 - RNA, 19 nt, Artificial Sequence
  Description of Artificial Sequence: Synthetic oligonucleotide
  Antisense strand to SEQ ID NO: 1299736
uaaccuacugagcaagauc

SEQ ID NO: 1299738 - RNA, 19 nt, Artificial Sequence
  Description of Artificial Sequence: Synthetic oligonucleotide
  Sense strand starting at position 2905 of SEQ ID NO: 1241787
ucagguggagucugugaga

SEQ ID NO: 1299739 - RNA, 19 nt, Artificial Sequence
  Description of Artificial Sequence: Synthetic oligonucleotide
  Antisense strand to SEQ ID NO: 1299738
ucucacagacuccaccuga

SEQ ID NO: 1299740 - RNA, 19 nt, Artificial Sequence
  Description of Artificial Sequence: Synthetic oligonucleotide
  Sense strand starting at position 2920 of SEQ ID NO: 1241787
gagauuauuuacuaguaga

SEQ ID NO: 1299741 - RNA, 19 nt, Artificial Sequence
  Description of Artificial Sequence: Synthetic oligonucleotide
  Antisense strand to SEQ ID NO: 1299740
ucuacuaguaaauaaucuc

SEQ ID NO: 1299742 - RNA, 19 nt, Artificial Sequence
  Description of Artificial Sequence: Synthetic oligonucleotide
  Sense strand starting at position 2937 of SEQ ID NO: 1241787
gauccauagggauaguugu

SEQ ID NO: 1299743 - RNA, 19 nt, Artificial Sequence
  Description of Artificial Sequence: Synthetic oligonucleotide
  Antisense strand to SEQ ID NO: 1299742
acaacuaucccuauggauc

SEQ ID NO: 1299744 - RNA, 19 nt, Artificial Sequence
  Description of Artificial Sequence: Synthetic oligonucleotide
  Sense strand starting at position 2945 of SEQ ID NO: 1241787
gggauaguuguaugcaugu

SEQ ID NO: 1299745 - RNA, 19 nt, Artificial Sequence
  Description of Artificial Sequence: Synthetic oligonucleotide
  Antisense strand to SEQ ID NO: 1299744
acaugcauacaacuauccc

SEQ ID NO: 1299746 - RNA, 19 nt, Artificial Sequence
  Description of Artificial Sequence: Synthetic oligonucleotide
  Sense strand starting at position 2951 of SEQ ID NO: 1241787
guuguaugcauguaaugua

SEQ ID NO: 1299747 - RNA, 19 nt, Artificial Sequence
  Description of Artificial Sequence: Synthetic oligonucleotide
  Antisense strand to SEQ ID NO: 1299746
uacauuacaugcauacaac

SEQ ID NO: 1299748 - RNA, 19 nt, Artificial Sequence
  Description of Artificial Sequence: Synthetic oligonucleotide
  Sense strand starting at position 2960 of SEQ ID NO: 1241787
auguaauguacagggucua

SEQ ID NO: 1299749 - RNA, 19 nt, Artificial Sequence
  Description of Artificial Sequence: Synthetic oligonucleotide
  Antisense strand to SEQ ID NO: 1299748
uagacccuguacauuacau

SEQ ID NO: 1299750 - RNA, 19 nt, Artificial Sequence
  Description of Artificial Sequence: Synthetic oligonucleotide
  Sense strand starting at position 2973 of SEQ ID NO: 1241787
ggucuagauuuauaaggac

SEQ ID NO: 1299751 - RNA, 19 nt, Artificial Sequence
  Description of Artificial Sequence: Synthetic oligonucleotide
  Antisense strand to SEQ ID NO: 1299750
guccuuauaaaucuagacc

SEQ ID NO: 1299752 - RNA, 19 nt, Artificial Sequence
  Description of Artificial Sequence: Synthetic oligonucleotide
  Sense strand starting at position 3039 of SEQ ID NO: 1241787
gguuucuuggcauguuaca

SEQ ID NO: 1299753 - RNA, 19 nt, Artificial Sequence
  Description of Artificial Sequence: Synthetic oligonucleotide
  Antisense strand to SEQ ID NO: 1299752
uguaacaugccaagaaacc

SEQ ID NO: 1299754 - RNA, 19 nt, Artificial Sequence
  Description of Artificial Sequence: Synthetic oligonucleotide
  Sense strand starting at position 3143 of SEQ ID NO: 1241787
ugaucuauuccuggaaguu

SEQ ID NO: 1299755 - RNA, 19 nt, Artificial Sequence
  Description of Artificial Sequence: Synthetic oligonucleotide
  Antisense strand to SEQ ID NO: 1299754
aacuuccaggaauagauca

SEQ ID NO: 1299756 - RNA, 19 nt, Artificial Sequence
  Description of Artificial Sequence: Synthetic oligonucleotide
  Sense strand starting at position 3144 of SEQ ID NO: 1241787
gaucuauuccuggaaguuc

SEQ ID NO: 1299757 - RNA, 19 nt, Artificial Sequence
  Description of Artificial Sequence: Synthetic oligonucleotide
  Antisense strand to SEQ ID NO: 1299756
gaacuuccaggaauagauc

SEQ ID NO: 1299758 - RNA, 19 nt, Artificial Sequence
  Description of Artificial Sequence: Synthetic oligonucleotide
  Sense strand starting at position 3454 of SEQ ID NO: 1241787
ggguauguucugucguuac

SEQ ID NO: 1299759 - RNA, 19 nt, Artificial Sequence
  Description of Artificial Sequence: Synthetic oligonucleotide
  Antisense strand to SEQ ID NO: 1299758
guaacgacagaacauaccc

SEQ ID NO: 1299760 - RNA, 19 nt, Artificial Sequence
  Description of Artificial Sequence: Synthetic oligonucleotide
  Sense strand starting at position 3456 of SEQ ID NO: 1241787
guauguucugucguuacca

SEQ ID NO: 1299761 - RNA, 19 nt, Artificial Sequence
  Description of Artificial Sequence: Synthetic oligonucleotide
  Antisense strand to SEQ ID NO: 1299760
ugguaacgacagaacauac

SEQ ID NO: 1299762 - RNA, 19 nt, Artificial Sequence
  Description of Artificial Sequence: Synthetic oligonucleotide
  Sense strand starting at position 3489 of SEQ ID NO: 1241787
acuccauaacuguguuauu

SEQ ID NO: 1299763 - RNA, 19 nt, Artificial Sequence
  Description of Artificial Sequence: Synthetic oligonucleotide
  Antisense strand to SEQ ID NO: 1299762
aauaacacaguuauggagu

SEQ ID NO: 1299764 - RNA, 19 nt, Artificial Sequence
  Description of Artificial Sequence: Synthetic oligonucleotide
  Sense strand starting at position 3580 of SEQ ID NO: 1241787
uuaucuguguuuccuaauu

SEQ ID NO: 1299765 - RNA, 19 nt, Artificial Sequence
  Description of Artificial Sequence: Synthetic oligonucleotide
  Antisense strand to SEQ ID NO: 1299764
aauuaggaaacacagauaa

SEQ ID NO: 1299766 - RNA, 19 nt, Artificial Sequence
  Description of Artificial Sequence: Synthetic oligonucleotide
  Sense strand starting at position 3585 of SEQ ID NO: 1241787
uguguuuccuaauuaucaa

SEQ ID NO: 1299767 - RNA, 19 nt, Artificial Sequence
  Description of Artificial Sequence: Synthetic oligonucleotide
  Antisense strand to SEQ ID NO: 1299766
uugauaauuaggaaacaca

SEQ ID NO: 1299768 - RNA, 19 nt, Artificial Sequence
  Description of Artificial Sequence: Synthetic oligonucleotide
  Sense strand starting at position 3805 of SEQ ID NO: 1241787
augcauagccuuugguuua

SEQ ID NO: 1299769 - RNA, 19 nt, Artificial Sequence
  Description of Artificial Sequence: Synthetic oligonucleotide
  Antisense strand to SEQ ID NO: 1299768
uaaaccaaaggcuaugcau

SEQ ID NO: 1299770 - RNA, 19 nt, Artificial Sequence
  Description of Artificial Sequence: Synthetic oligonucleotide
  Sense strand starting at position 303 of SEQ ID NO: 1241788
aaagaagugcuuugguaau

SEQ ID NO: 1299771 - RNA, 19 nt, Artificial Sequence
  Description of Artificial Sequence: Synthetic oligonucleotide
  Antisense strand to SEQ ID NO: 1299770
auuaccaaagcacuucuuu

SEQ ID NO: 1299772 - RNA, 19 nt, Artificial Sequence
  Description of Artificial Sequence: Synthetic oligonucleotide
  Sense strand starting at position 510 of SEQ ID NO: 1241788
ggagucaggucagcaucaa

SEQ ID NO: 1299773 - RNA, 19 nt, Artificial Sequence
  Description of Artificial Sequence: Synthetic oligonucleotide
  Antisense strand to SEQ ID NO: 1299772
uugaugcugaccugacucc

SEQ ID NO: 1299774 - RNA, 19 nt, Artificial Sequence
  Description of Artificial Sequence: Synthetic oligonucleotide
  Sense strand starting at position 588 of SEQ ID NO: 1241788
ucuagacaauggguuucua

SEQ ID NO: 1299775 - RNA, 19 nt, Artificial Sequence
  Description of Artificial Sequence: Synthetic oligonucleotide
  Antisense strand to SEQ ID NO: 1299774
uagaaacccauugucuaga

SEQ ID NO: 1299776 - RNA, 19 nt, Artificial Sequence
  Description of Artificial Sequence: Synthetic oligonucleotide
  Sense strand starting at position 658 of SEQ ID NO: 1241788
caucauucgccugaggguu

SEQ ID NO: 1299777 - RNA, 19 nt, Artificial Sequence
  Description of Artificial Sequence: Synthetic oligonucleotide
  Antisense strand to SEQ ID NO: 1299776
aacccucaggcgaaugaug

SEQ ID NO: 1299778 - RNA, 19 nt, Artificial Sequence
  Description of Artificial Sequence: Synthetic oligonucleotide
  Sense strand starting at position 672 of SEQ ID NO: 1241788
ggguuccacuggucuacaa

SEQ ID NO: 1299779 - RNA, 19 nt, Artificial Sequence
  Description of Artificial Sequence: Synthetic oligonucleotide
  Antisense strand to SEQ ID NO: 1299778
uuguagaccaguggaaccc

SEQ ID NO: 1299780 - RNA, 19 nt, Artificial Sequence
  Description of Artificial Sequence: Synthetic oligonucleotide
  Sense strand starting at position 696 of SEQ ID NO: 1241788
gucaucauuccauaaaugu

SEQ ID NO: 1299781 - RNA, 19 nt, Artificial Sequence
  Description of Artificial Sequence: Synthetic oligonucleotide
  Antisense strand to SEQ ID NO: 1299780
acauuuauggaaugaugac

SEQ ID NO: 1299782 - RNA, 19 nt, Artificial Sequence
  Description of Artificial Sequence: Synthetic oligonucleotide
  Sense strand starting at position 704 of SEQ ID NO: 1241788
uccauaaaugucuguaguc

SEQ ID NO: 1299783 - RNA, 19 nt, Artificial Sequence
  Description of Artificial Sequence: Synthetic oligonucleotide
  Antisense strand to SEQ ID NO: 1299782
gacuacagacauuuaugga

SEQ ID NO: 1299784 - RNA, 19 nt, Artificial Sequence
  Description of Artificial Sequence: Synthetic oligonucleotide
  Sense strand starting at position 705 of SEQ ID NO: 1241788
ccauaaaugucuguaguca

SEQ ID NO: 1299785 - RNA, 19 nt, Artificial Sequence
  Description of Artificial Sequence: Synthetic oligonucleotide
  Antisense strand to SEQ ID NO: 1299784
ugacuacagacauuuaugg

SEQ ID NO: 1299786 - RNA, 19 nt, Artificial Sequence
  Description of Artificial Sequence: Synthetic oligonucleotide
  Sense strand starting at position 706 of SEQ ID NO: 1241788
cauaaaugucuguagucag

SEQ ID NO: 1299787 - RNA, 19 nt, Artificial Sequence
  Description of Artificial Sequence: Synthetic oligonucleotide
  Antisense strand to SEQ ID NO: 1299786
cugacuacagacauuuaug

SEQ ID NO: 1299788 - RNA, 19 nt, Artificial Sequence
  Description of Artificial Sequence: Synthetic oligonucleotide
  Sense strand starting at position 720 of SEQ ID NO: 1241788
gucagccuccucuaguaau

SEQ ID NO: 1299789 - RNA, 19 nt, Artificial Sequence
  Description of Artificial Sequence: Synthetic oligonucleotide
  Antisense strand to SEQ ID NO: 1299788
auuacuagaggaggcugac

SEQ ID NO: 1299790 - RNA, 19 nt, Artificial Sequence
  Description of Artificial Sequence: Synthetic oligonucleotide
  Sense strand starting at position 783 of SEQ ID NO: 1241788
cacgcaaagccagaguuua

SEQ ID NO: 1299791 - RNA, 19 nt, Artificial Sequence
  Description of Artificial Sequence: Synthetic oligonucleotide
  Antisense strand to SEQ ID NO: 1299790
uaaacucuggcuuugcgug

SEQ ID NO: 1299792 - RNA, 19 nt, Artificial Sequence
  Description of Artificial Sequence: Synthetic oligonucleotide
  Sense strand starting at position 1146 of SEQ ID NO: 1241788
gcucaucuccaauggaacu

SEQ ID NO: 1299793 - RNA, 19 nt, Artificial Sequence
  Description of Artificial Sequence: Synthetic oligonucleotide
  Antisense strand to SEQ ID NO: 1299792
aguuccauuggagaugagc

SEQ ID NO: 1299794 - RNA, 19 nt, Artificial Sequence
  Description of Artificial Sequence: Synthetic oligonucleotide
  Sense strand starting at position 1220 of SEQ ID NO: 1241788
uggcauuucuguucucuaa

SEQ ID NO: 1299795 - RNA, 19 nt, Artificial Sequence
  Description of Artificial Sequence: Synthetic oligonucleotide
  Antisense strand to SEQ ID NO: 1299794
uuagagaacagaaaugcca

SEQ ID NO: 1299796 - RNA, 19 nt, Artificial Sequence
  Description of Artificial Sequence: Synthetic oligonucleotide
  Sense strand starting at position 1632 of SEQ ID NO: 1241788
gucugguguggguggaaau

SEQ ID NO: 1299797 - RNA, 19 nt, Artificial Sequence
  Description of Artificial Sequence: Synthetic oligonucleotide
  Antisense strand to SEQ ID NO: 1299796
auuuccacccacaccagac

SEQ ID NO: 1299798 - RNA, 19 nt, Artificial Sequence
  Description of Artificial Sequence: Synthetic oligonucleotide
  Sense strand starting at position 1635 of SEQ ID NO: 1241788
ugguguggguggaaaucaa

SEQ ID NO: 1299799 - RNA, 19 nt, Artificial Sequence
  Description of Artificial Sequence: Synthetic oligonucleotide
  Antisense strand to SEQ ID NO: 1299798
uugauuuccacccacacca

SEQ ID NO: 1299800 - RNA, 19 nt, Artificial Sequence
  Description of Artificial Sequence: Synthetic oligonucleotide
  Sense strand starting at position 2454 of SEQ ID NO: 1241788
gugccagaggcuuugcgua

SEQ ID NO: 1299801 - RNA, 19 nt, Artificial Sequence
  Description of Artificial Sequence: Synthetic oligonucleotide
  Antisense strand to SEQ ID NO: 1299800
uacgcaaagccucuggcac

SEQ ID NO: 1299802 - RNA, 19 nt, Artificial Sequence
  Description of Artificial Sequence: Synthetic oligonucleotide
  Sense strand starting at position 2466 of SEQ ID NO: 1241788
uugcguaguguugcacuua

SEQ ID NO: 1299803 - RNA, 19 nt, Artificial Sequence
  Description of Artificial Sequence: Synthetic oligonucleotide
  Antisense strand to SEQ ID NO: 1299802
uaagugcaacacuacgcaa

SEQ ID NO: 1299804 - RNA, 19 nt, Artificial Sequence
  Description of Artificial Sequence: Synthetic oligonucleotide
  Sense strand starting at position 2828 of SEQ ID NO: 1241788
cucgauucucaagaggguu

SEQ ID NO: 1299805 - RNA, 19 nt, Artificial Sequence
  Description of Artificial Sequence: Synthetic oligonucleotide
  Antisense strand to SEQ ID NO: 1299804
aacccucuugagaaucgag

SEQ ID NO: 1299806 - RNA, 19 nt, Artificial Sequence
  Description of Artificial Sequence: Synthetic oligonucleotide
  Sense strand starting at position 2889 of SEQ ID NO: 1241788
uggacagucucaucaagaa

SEQ ID NO: 1299807 - RNA, 19 nt, Artificial Sequence
  Description of Artificial Sequence: Synthetic oligonucleotide
  Antisense strand to SEQ ID NO: 1299806
uucuugaugagacugucca

SEQ ID NO: 1299808 - RNA, 19 nt, Artificial Sequence
  Description of Artificial Sequence: Synthetic oligonucleotide
  Sense strand starting at position 2893 of SEQ ID NO: 1241788
cagucucaucaagaagguu

SEQ ID NO: 1299809 - RNA, 19 nt, Artificial Sequence
  Description of Artificial Sequence: Synthetic oligonucleotide
  Antisense strand to SEQ ID NO: 1299808
aaccuucuugaugagacug

SEQ ID NO: 1299810 - RNA, 19 nt, Artificial Sequence
  Description of Artificial Sequence: Synthetic oligonucleotide
  Sense strand starting at position 2899 of SEQ ID NO: 1241788
caucaagaagguuggucaa

SEQ ID NO: 1299811 - RNA, 19 nt, Artificial Sequence
  Description of Artificial Sequence: Synthetic oligonucleotide
  Antisense strand to SEQ ID NO: 1299810
uugaccaaccuucuugaug

SEQ ID NO: 1299812 - RNA, 19 nt, Artificial Sequence
  Description of Artificial Sequence: Synthetic oligonucleotide
  Sense strand starting at position 2901 of SEQ ID NO: 1241788
ucaagaagguuggucaaga

SEQ ID NO: 1299813 - RNA, 19 nt, Artificial Sequence
  Description of Artificial Sequence: Synthetic oligonucleotide
  Antisense strand to SEQ ID NO: 1299812
ucuugaccaaccuucuuga

SEQ ID NO: 1299814 - RNA, 19 nt, Artificial Sequence
  Description of Artificial Sequence: Synthetic oligonucleotide
  Sense strand starting at position 2920 of SEQ ID NO: 1241788
gcucaaguguuucugagaa

SEQ ID NO: 1299815 - RNA, 19 nt, Artificial Sequence
  Description of Artificial Sequence: Synthetic oligonucleotide
  Antisense strand to SEQ ID NO: 1299814
uucucagaaacacuugagc

SEQ ID NO: 1299816 - RNA, 19 nt, Artificial Sequence
  Description of Artificial Sequence: Synthetic oligonucleotide
  Sense strand starting at position 3126 of SEQ ID NO: 1241788
ccacaaccuggguauguau

SEQ ID NO: 1299817 - RNA, 19 nt, Artificial Sequence
  Description of Artificial Sequence: Synthetic oligonucleotide
  Antisense strand to SEQ ID NO: 1299816
auacauacccagguugugg

SEQ ID NO: 1299818 - RNA, 19 nt, Artificial Sequence
  Description of Artificial Sequence: Synthetic oligonucleotide
  Sense strand starting at position 3215 of SEQ ID NO: 1241788
caggacuugugucuuagga

SEQ ID NO: 1299819 - RNA, 19 nt, Artificial Sequence
  Description of Artificial Sequence: Synthetic oligonucleotide
  Antisense strand to SEQ ID NO: 1299818
uccuaagacacaaguccug

SEQ ID NO: 1299820 - RNA, 19 nt, Artificial Sequence
  Description of Artificial Sequence: Synthetic oligonucleotide
  Sense strand starting at position 3228 of SEQ ID NO: 1241788
uuaggauuaggguguuaug

SEQ ID NO: 1299821 - RNA, 19 nt, Artificial Sequence
  Description of Artificial Sequence: Synthetic oligonucleotide
  Antisense strand to SEQ ID NO: 1299820
cauaacacccuaauccuaa

SEQ ID NO: 1299822 - RNA, 19 nt, Artificial Sequence
  Description of Artificial Sequence: Synthetic oligonucleotide
  Sense strand starting at position 3303 of SEQ ID NO: 1241788
cagagauccuggcugagca

SEQ ID NO: 1299823 - RNA, 19 nt, Artificial Sequence
  Description of Artificial Sequence: Synthetic oligonucleotide
  Antisense strand to SEQ ID NO: 1299822
ugcucagccaggaucucug

SEQ ID NO: 1299824 - RNA, 19 nt, Artificial Sequence
  Description of Artificial Sequence: Synthetic oligonucleotide
  Sense strand starting at position 3398 of SEQ ID NO: 1241788
uucugugcucaacaucaga

SEQ ID NO: 1299825 - RNA, 19 nt, Artificial Sequence
  Description of Artificial Sequence: Synthetic oligonucleotide
  Antisense strand to SEQ ID NO: 1299824
ucugauguugagcacagaa

SEQ ID NO: 1299826 - RNA, 19 nt, Artificial Sequence
  Description of Artificial Sequence: Synthetic oligonucleotide
  Sense strand starting at position 3422 of SEQ ID NO: 1241788
uugucauucuuauugugac

SEQ ID NO: 1299827 - RNA, 19 nt, Artificial Sequence
  Description of Artificial Sequence: Synthetic oligonucleotide
  Antisense strand to SEQ ID NO: 1299826
gucacaauaagaaugacaa

SEQ ID NO: 1299828 - RNA, 19 nt, Artificial Sequence
  Description of Artificial Sequence: Synthetic oligonucleotide
  Sense strand starting at position 3455 of SEQ ID NO: 1241788
cgugccuggcuucauagaa

SEQ ID NO: 1299829 - RNA, 19 nt, Artificial Sequence
  Description of Artificial Sequence: Synthetic oligonucleotide
  Antisense strand to SEQ ID NO: 1299828
uucuaugaagccaggcacg

SEQ ID NO: 1299830 - RNA, 19 nt, Artificial Sequence
  Description of Artificial Sequence: Synthetic oligonucleotide
  Sense strand starting at position 3585 of SEQ ID NO: 1241788
agaaauccuugcucuaaag

SEQ ID NO: 1299831 - RNA, 19 nt, Artificial Sequence
  Description of Artificial Sequence: Synthetic oligonucleotide
  Antisense strand to SEQ ID NO: 1299830
cuuuagagcaaggauuucu

SEQ ID NO: 1299832 - RNA, 19 nt, Artificial Sequence
  Description of Artificial Sequence: Synthetic oligonucleotide
  Sense strand starting at position 3611 of SEQ ID NO: 1241788
uuucuuguccucugggaac

SEQ ID NO: 1299833 - RNA, 19 nt, Artificial Sequence
  Description of Artificial Sequence: Synthetic oligonucleotide
  Antisense strand to SEQ ID NO: 1299832
guucccagaggacaagaaa

SEQ ID NO: 1299834 - RNA, 19 nt, Artificial Sequence
  Description of Artificial Sequence: Synthetic oligonucleotide
  Sense strand starting at position 3613 of SEQ ID NO: 1241788
ucuuguccucugggaacuu

SEQ ID NO: 1299835 - RNA, 19 nt, Artificial Sequence
  Description of Artificial Sequence: Synthetic oligonucleotide
  Antisense strand to SEQ ID NO: 1299834
aaguucccagaggacaaga

SEQ ID NO: 1299836 - RNA, 19 nt, Artificial Sequence
  Description of Artificial Sequence: Synthetic oligonucleotide
  Sense strand starting at position 3699 of SEQ ID NO: 1241788
gugguauuccagggaucca

SEQ ID NO: 1299837 - RNA, 19 nt, Artificial Sequence
  Description of Artificial Sequence: Synthetic oligonucleotide
  Antisense strand to SEQ ID NO: 1299836
uggaucccuggaauaccac

SEQ ID NO: 1299838 - RNA, 19 nt, Artificial Sequence
  Description of Artificial Sequence: Synthetic oligonucleotide
  Sense strand starting at position 3753 of SEQ ID NO: 1241788
uccagaauuggcugucuug

SEQ ID NO: 1299839 - RNA, 19 nt, Artificial Sequence
  Description of Artificial Sequence: Synthetic oligonucleotide
  Antisense strand to SEQ ID NO: 1299838
caagacagccaauucugga

SEQ ID NO: 1299840 - RNA, 19 nt, Artificial Sequence
  Description of Artificial Sequence: Synthetic oligonucleotide
  Sense strand starting at position 3756 of SEQ ID NO: 1241788
agaauuggcugucuugaug

SEQ ID NO: 1299841 - RNA, 19 nt, Artificial Sequence
  Description of Artificial Sequence: Synthetic oligonucleotide
  Antisense strand to SEQ ID NO: 1299840
caucaagacagccaauucu

SEQ ID NO: 1299842 - RNA, 19 nt, Artificial Sequence
  Description of Artificial Sequence: Synthetic oligonucleotide
  Sense strand starting at position 3804 of SEQ ID NO: 1241788
ugcccugaucucugugaga

SEQ ID NO: 1299843 - RNA, 19 nt, Artificial Sequence
  Description of Artificial Sequence: Synthetic oligonucleotide
  Antisense strand to SEQ ID NO: 1299842
ucucacagagaucagggca

SEQ ID NO: 1299844 - RNA, 19 nt, Artificial Sequence
  Description of Artificial Sequence: Synthetic oligonucleotide
  Sense strand starting at position 3806 of SEQ ID NO: 1241788
cccugaucucugugagaug

SEQ ID NO: 1299845 - RNA, 19 nt, Artificial Sequence
  Description of Artificial Sequence: Synthetic oligonucleotide
  Antisense strand to SEQ ID NO: 1299844
caucucacagagaucaggg

SEQ ID NO: 1299846 - RNA, 19 nt, Artificial Sequence
  Description of Artificial Sequence: Synthetic oligonucleotide
  Sense strand starting at position 3849 of SEQ ID NO: 1241788
ucauguuguucuguuaaac

SEQ ID NO: 1299847 - RNA, 19 nt, Artificial Sequence
  Description of Artificial Sequence: Synthetic oligonucleotide
  Antisense strand to SEQ ID NO: 1299846
guuuaacagaacaacauga

SEQ ID NO: 1299848 - RNA, 19 nt, Artificial Sequence
  Description of Artificial Sequence: Synthetic oligonucleotide
  Sense strand starting at position 3914 of SEQ ID NO: 1241788
ucuuuaagugccuauuaug

SEQ ID NO: 1299849 - RNA, 19 nt, Artificial Sequence
  Description of Artificial Sequence: Synthetic oligonucleotide
  Antisense strand to SEQ ID NO: 1299848
cauaauaggcacuuaaaga

SEQ ID NO: 1299850 - RNA, 19 nt, Artificial Sequence
  Description of Artificial Sequence: Synthetic oligonucleotide
  Sense strand starting at position 381 of SEQ ID NO: 1241789
aaagaagugcuuugguaau

SEQ ID NO: 1299851 - RNA, 19 nt, Artificial Sequence
  Description of Artificial Sequence: Synthetic oligonucleotide
  Antisense strand to SEQ ID NO: 1299850
auuaccaaagcacuucuuu

SEQ ID NO: 1299852 - RNA, 19 nt, Artificial Sequence
  Description of Artificial Sequence: Synthetic oligonucleotide
  Sense strand starting at position 588 of SEQ ID NO: 1241789
ggagucaggucagcaucaa

SEQ ID NO: 1299853 - RNA, 19 nt, Artificial Sequence
  Description of Artificial Sequence: Synthetic oligonucleotide
  Antisense strand to SEQ ID NO: 1299852
uugaugcugaccugacucc

SEQ ID NO: 1299854 - RNA, 19 nt, Artificial Sequence
  Description of Artificial Sequence: Synthetic oligonucleotide
  Sense strand starting at position 666 of SEQ ID NO: 1241789
ucuagacaauggguuucua

SEQ ID NO: 1299855 - RNA, 19 nt, Artificial Sequence
  Description of Artificial Sequence: Synthetic oligonucleotide
  Antisense strand to SEQ ID NO: 1299854
uagaaacccauugucuaga

SEQ ID NO: 1299856 - RNA, 19 nt, Artificial Sequence
  Description of Artificial Sequence: Synthetic oligonucleotide
  Sense strand starting at position 736 of SEQ ID NO: 1241789
caucauucgccugaggguu

SEQ ID NO: 1299857 - RNA, 19 nt, Artificial Sequence
  Description of Artificial Sequence: Synthetic oligonucleotide
  Antisense strand to SEQ ID NO: 1299856
aacccucaggcgaaugaug

SEQ ID NO: 1299858 - RNA, 19 nt, Artificial Sequence
  Description of Artificial Sequence: Synthetic oligonucleotide
  Sense strand starting at position 750 of SEQ ID NO: 1241789
ggguuccacuggucuacaa

SEQ ID NO: 1299859 - RNA, 19 nt, Artificial Sequence
  Description of Artificial Sequence: Synthetic oligonucleotide
  Antisense strand to SEQ ID NO: 1299858
uuguagaccaguggaaccc

SEQ ID NO: 1299860 - RNA, 19 nt, Artificial Sequence
  Description of Artificial Sequence: Synthetic oligonucleotide
  Sense strand starting at position 774 of SEQ ID NO: 1241789
gucaucauuccauaaaugu

SEQ ID NO: 1299861 - RNA, 19 nt, Artificial Sequence
  Description of Artificial Sequence: Synthetic oligonucleotide
  Antisense strand to SEQ ID NO: 1299860
acauuuauggaaugaugac

SEQ ID NO: 1299862 - RNA, 19 nt, Artificial Sequence
  Description of Artificial Sequence: Synthetic oligonucleotide
  Sense strand starting at position 782 of SEQ ID NO: 1241789
uccauaaaugucuguaguc

SEQ ID NO: 1299863 - RNA, 19 nt, Artificial Sequence
  Description of Artificial Sequence: Synthetic oligonucleotide
  Antisense strand to SEQ ID NO: 1299862
gacuacagacauuuaugga

SEQ ID NO: 1299864 - RNA, 19 nt, Artificial Sequence
  Description of Artificial Sequence: Synthetic oligonucleotide
  Sense strand starting at position 783 of SEQ ID NO: 1241789
ccauaaaugucuguaguca

SEQ ID NO: 1299865 - RNA, 19 nt, Artificial Sequence
  Description of Artificial Sequence: Synthetic oligonucleotide
  Antisense strand to SEQ ID NO: 1299864
ugacuacagacauuuaugg

SEQ ID NO: 1299866 - RNA, 19 nt, Artificial Sequence
  Description of Artificial Sequence: Synthetic oligonucleotide
  Sense strand starting at position 784 of SEQ ID NO: 1241789
cauaaaugucuguagucag

SEQ ID NO: 1299867 - RNA, 19 nt, Artificial Sequence
  Description of Artificial Sequence: Synthetic oligonucleotide
  Antisense strand to SEQ ID NO: 1299866
cugacuacagacauuuaug

SEQ ID NO: 1299868 - RNA, 19 nt, Artificial Sequence
  Description of Artificial Sequence: Synthetic oligonucleotide
  Sense strand starting at position 798 of SEQ ID NO: 1241789
gucagccuccucuaguaau

SEQ ID NO: 1299869 - RNA, 19 nt, Artificial Sequence
  Description of Artificial Sequence: Synthetic oligonucleotide
  Antisense strand to SEQ ID NO: 1299868
auuacuagaggaggcugac

SEQ ID NO: 1299870 - RNA, 19 nt, Artificial Sequence
  Description of Artificial Sequence: Synthetic oligonucleotide
  Sense strand starting at position 861 of SEQ ID NO: 1241789
cacgcaaagccagaguuua

SEQ ID NO: 1299871 - RNA, 19 nt, Artificial Sequence
  Description of Artificial Sequence: Synthetic oligonucleotide
  Antisense strand to SEQ ID NO: 1299870
uaaacucuggcuuugcgug

SEQ ID NO: 1299872 - RNA, 19 nt, Artificial Sequence
  Description of Artificial Sequence: Synthetic oligonucleotide
  Sense strand starting at position 1224 of SEQ ID NO: 1241789
gcucaucuccaauggaacu

SEQ ID NO: 1299873 - RNA, 19 nt, Artificial Sequence
  Description of Artificial Sequence: Synthetic oligonucleotide
  Antisense strand to SEQ ID NO: 1299872
aguuccauuggagaugagc

SEQ ID NO: 1299874 - RNA, 19 nt, Artificial Sequence
  Description of Artificial Sequence: Synthetic oligonucleotide
  Sense strand starting at position 1298 of SEQ ID NO: 1241789
uggcauuucuguucucuaa

SEQ ID NO: 1299875 - RNA, 19 nt, Artificial Sequence
  Description of Artificial Sequence: Synthetic oligonucleotide
  Antisense strand to SEQ ID NO: 1299874
uuagagaacagaaaugcca

SEQ ID NO: 1299876 - RNA, 19 nt, Artificial Sequence
  Description of Artificial Sequence: Synthetic oligonucleotide
  Sense strand starting at position 1482 of SEQ ID NO: 1241789
agaagagucuaaggaagga

SEQ ID NO: 1299877 - RNA, 19 nt, Artificial Sequence
  Description of Artificial Sequence: Synthetic oligonucleotide
  Antisense strand to SEQ ID NO: 1299876
uccuuccuuagacucuucu

SEQ ID NO: 1299878 - RNA, 19 nt, Artificial Sequence
  Description of Artificial Sequence: Synthetic oligonucleotide
  Sense strand starting at position 1710 of SEQ ID NO: 1241789
gucugguguggguggaaau

SEQ ID NO: 1299879 - RNA, 19 nt, Artificial Sequence
  Description of Artificial Sequence: Synthetic oligonucleotide
  Antisense strand to SEQ ID NO: 1299878
auuuccacccacaccagac

SEQ ID NO: 1299880 - RNA, 19 nt, Artificial Sequence
  Description of Artificial Sequence: Synthetic oligonucleotide
  Sense strand starting at position 1713 of SEQ ID NO: 1241789
ugguguggguggaaaucaa

SEQ ID NO: 1299881 - RNA, 19 nt, Artificial Sequence
  Description of Artificial Sequence: Synthetic oligonucleotide
  Antisense strand to SEQ ID NO: 1299880
uugauuuccacccacacca

SEQ ID NO: 1299882 - RNA, 19 nt, Artificial Sequence
  Description of Artificial Sequence: Synthetic oligonucleotide
  Sense strand starting at position 2532 of SEQ ID NO: 1241789
gugccagaggcuuugcgua

SEQ ID NO: 1299883 - RNA, 19 nt, Artificial Sequence
  Description of Artificial Sequence: Synthetic oligonucleotide
  Antisense strand to SEQ ID NO: 1299882
uacgcaaagccucuggcac

SEQ ID NO: 1299884 - RNA, 19 nt, Artificial Sequence
  Description of Artificial Sequence: Synthetic oligonucleotide
  Sense strand starting at position 2544 of SEQ ID NO: 1241789
uugcguaguguugcacuua

SEQ ID NO: 1299885 - RNA, 19 nt, Artificial Sequence
  Description of Artificial Sequence: Synthetic oligonucleotide
  Antisense strand to SEQ ID NO: 1299884
uaagugcaacacuacgcaa

SEQ ID NO: 1299886 - RNA, 19 nt, Artificial Sequence
  Description of Artificial Sequence: Synthetic oligonucleotide
  Sense strand starting at position 2906 of SEQ ID NO: 1241789
cucgauucucaagaggguu

SEQ ID NO: 1299887 - RNA, 19 nt, Artificial Sequence
  Description of Artificial Sequence: Synthetic oligonucleotide
  Antisense strand to SEQ ID NO: 1299886
aacccucuugagaaucgag

SEQ ID NO: 1299888 - RNA, 19 nt, Artificial Sequence
  Description of Artificial Sequence: Synthetic oligonucleotide
  Sense strand starting at position 2967 of SEQ ID NO: 1241789
uggacagucucaucaagaa

SEQ ID NO: 1299889 - RNA, 19 nt, Artificial Sequence
  Description of Artificial Sequence: Synthetic oligonucleotide
  Antisense strand to SEQ ID NO: 1299888
uucuugaugagacugucca

SEQ ID NO: 1299890 - RNA, 19 nt, Artificial Sequence
  Description of Artificial Sequence: Synthetic oligonucleotide
  Sense strand starting at position 2971 of SEQ ID NO: 1241789
cagucucaucaagaagguu

SEQ ID NO: 1299891 - RNA, 19 nt, Artificial Sequence
  Description of Artificial Sequence: Synthetic oligonucleotide
  Antisense strand to SEQ ID NO: 1299890
aaccuucuugaugagacug

SEQ ID NO: 1299892 - RNA, 19 nt, Artificial Sequence
  Description of Artificial Sequence: Synthetic oligonucleotide
  Sense strand starting at position 2977 of SEQ ID NO: 1241789
caucaagaagguuggucaa

SEQ ID NO: 1299893 - RNA, 19 nt, Artificial Sequence
  Description of Artificial Sequence: Synthetic oligonucleotide
  Antisense strand to SEQ ID NO: 1299892
uugaccaaccuucuugaug

SEQ ID NO: 1299894 - RNA, 19 nt, Artificial Sequence
  Description of Artificial Sequence: Synthetic oligonucleotide
  Sense strand starting at position 2979 of SEQ ID NO: 1241789
ucaagaagguuggucaaga

SEQ ID NO: 1299895 - RNA, 19 nt, Artificial Sequence
  Description of Artificial Sequence: Synthetic oligonucleotide
  Antisense strand to SEQ ID NO: 1299894
ucuugaccaaccuucuuga

SEQ ID NO: 1299896 - RNA, 19 nt, Artificial Sequence
  Description of Artificial Sequence: Synthetic oligonucleotide
  Sense strand starting at position 2998 of SEQ ID NO: 1241789
gcucaaguguuucugagaa

SEQ ID NO: 1299897 - RNA, 19 nt, Artificial Sequence
  Description of Artificial Sequence: Synthetic oligonucleotide
  Antisense strand to SEQ ID NO: 1299896
uucucagaaacacuugagc

SEQ ID NO: 1299898 - RNA, 19 nt, Artificial Sequence
  Description of Artificial Sequence: Synthetic oligonucleotide
  Sense strand starting at position 3204 of SEQ ID NO: 1241789
ccacaaccuggguauguau

SEQ ID NO: 1299899 - RNA, 19 nt, Artificial Sequence
  Description of Artificial Sequence: Synthetic oligonucleotide
  Antisense strand to SEQ ID NO: 1299898
auacauacccagguugugg

SEQ ID NO: 1299900 - RNA, 19 nt, Artificial Sequence
  Description of Artificial Sequence: Synthetic oligonucleotide
  Sense strand starting at position 3293 of SEQ ID NO: 1241789
caggacuugugucuuagga

SEQ ID NO: 1299901 - RNA, 19 nt, Artificial Sequence
  Description of Artificial Sequence: Synthetic oligonucleotide
  Antisense strand to SEQ ID NO: 1299900
uccuaagacacaaguccug

SEQ ID NO: 1299902 - RNA, 19 nt, Artificial Sequence
  Description of Artificial Sequence: Synthetic oligonucleotide
  Sense strand starting at position 3306 of SEQ ID NO: 1241789
uuaggauuaggguguuaug

SEQ ID NO: 1299903 - RNA, 19 nt, Artificial Sequence
  Description of Artificial Sequence: Synthetic oligonucleotide
  Antisense strand to SEQ ID NO: 1299902
cauaacacccuaauccuaa

SEQ ID NO: 1299904 - RNA, 19 nt, Artificial Sequence
  Description of Artificial Sequence: Synthetic oligonucleotide
  Sense strand starting at position 3381 of SEQ ID NO: 1241789
cagagauccuggcugagca

SEQ ID NO: 1299905 - RNA, 19 nt, Artificial Sequence
  Description of Artificial Sequence: Synthetic oligonucleotide
  Antisense strand to SEQ ID NO: 1299904
ugcucagccaggaucucug

SEQ ID NO: 1299906 - RNA, 19 nt, Artificial Sequence
  Description of Artificial Sequence: Synthetic oligonucleotide
  Sense strand starting at position 3476 of SEQ ID NO: 1241789
uucugugcucaacaucaga

SEQ ID NO: 1299907 - RNA, 19 nt, Artificial Sequence
  Description of Artificial Sequence: Synthetic oligonucleotide
  Antisense strand to SEQ ID NO: 1299906
ucugauguugagcacagaa

SEQ ID NO: 1299908 - RNA, 19 nt, Artificial Sequence
  Description of Artificial Sequence: Synthetic oligonucleotide
  Sense strand starting at position 3500 of SEQ ID NO: 1241789
uugucauucuuauugugac

SEQ ID NO: 1299909 - RNA, 19 nt, Artificial Sequence
  Description of Artificial Sequence: Synthetic oligonucleotide
  Antisense strand to SEQ ID NO: 1299908
gucacaauaagaaugacaa

SEQ ID NO: 1299910 - RNA, 19 nt, Artificial Sequence
  Description of Artificial Sequence: Synthetic oligonucleotide
  Sense strand starting at position 3533 of SEQ ID NO: 1241789
cgugccuggcuucauagaa

SEQ ID NO: 1299911 - RNA, 19 nt, Artificial Sequence
  Description of Artificial Sequence: Synthetic oligonucleotide
  Antisense strand to SEQ ID NO: 1299910
uucuaugaagccaggcacg

SEQ ID NO: 1299912 - RNA, 19 nt, Artificial Sequence
  Description of Artificial Sequence: Synthetic oligonucleotide
  Sense strand starting at position 3663 of SEQ ID NO: 1241789
agaaauccuugcucuaaag

SEQ ID NO: 1299913 - RNA, 19 nt, Artificial Sequence
  Description of Artificial Sequence: Synthetic oligonucleotide
  Antisense strand to SEQ ID NO: 1299912
cuuuagagcaaggauuucu

SEQ ID NO: 1299914 - RNA, 19 nt, Artificial Sequence
  Description of Artificial Sequence: Synthetic oligonucleotide
  Sense strand starting at position 3689 of SEQ ID NO: 1241789
uuucuuguccucugggaac

SEQ ID NO: 1299915 - RNA, 19 nt, Artificial Sequence
  Description of Artificial Sequence: Synthetic oligonucleotide
  Antisense strand to SEQ ID NO: 1299914
guucccagaggacaagaaa

SEQ ID NO: 1299916 - RNA, 19 nt, Artificial Sequence
  Description of Artificial Sequence: Synthetic oligonucleotide
  Sense strand starting at position 3691 of SEQ ID NO: 1241789
ucuuguccucugggaacuu

SEQ ID NO: 1299917 - RNA, 19 nt, Artificial Sequence
  Description of Artificial Sequence: Synthetic oligonucleotide
  Antisense strand to SEQ ID NO: 1299916
aaguucccagaggacaaga

SEQ ID NO: 1299918 - RNA, 19 nt, Artificial Sequence
  Description of Artificial Sequence: Synthetic oligonucleotide
  Sense strand starting at position 3777 of SEQ ID NO: 1241789
gugguauuccagggaucca

SEQ ID NO: 1299919 - RNA, 19 nt, Artificial Sequence
  Description of Artificial Sequence: Synthetic oligonucleotide
  Antisense strand to SEQ ID NO: 1299918
uggaucccuggaauaccac

SEQ ID NO: 1299920 - RNA, 19 nt, Artificial Sequence
  Description of Artificial Sequence: Synthetic oligonucleotide
  Sense strand starting at position 3831 of SEQ ID NO: 1241789
uccagaauuggcugucuug

SEQ ID NO: 1299921 - RNA, 19 nt, Artificial Sequence
  Description of Artificial Sequence: Synthetic oligonucleotide
  Antisense strand to SEQ ID NO: 1299920
caagacagccaauucugga

SEQ ID NO: 1299922 - RNA, 19 nt, Artificial Sequence
  Description of Artificial Sequence: Synthetic oligonucleotide
  Sense strand starting at position 3834 of SEQ ID NO: 1241789
agaauuggcugucuugaug

SEQ ID NO: 1299923 - RNA, 19 nt, Artificial Sequence
  Description of Artificial Sequence: Synthetic oligonucleotide
  Antisense strand to SEQ ID NO: 1299922
caucaagacagccaauucu

SEQ ID NO: 1299924 - RNA, 19 nt, Artificial Sequence
  Description of Artificial Sequence: Synthetic oligonucleotide
  Sense strand starting at position 3882 of SEQ ID NO: 1241789
ugcccugaucucugugaga

SEQ ID NO: 1299925 - RNA, 19 nt, Artificial Sequence
  Description of Artificial Sequence: Synthetic oligonucleotide
  Antisense strand to SEQ ID NO: 1299924
ucucacagagaucagggca

SEQ ID NO: 1299926 - RNA, 19 nt, Artificial Sequence
  Description of Artificial Sequence: Synthetic oligonucleotide
  Sense strand starting at position 3884 of SEQ ID NO: 1241789
cccugaucucugugagaug

SEQ ID NO: 1299927 - RNA, 19 nt, Artificial Sequence
  Description of Artificial Sequence: Synthetic oligonucleotide
  Antisense strand to SEQ ID NO: 1299926
caucucacagagaucaggg

SEQ ID NO: 1299928 - RNA, 19 nt, Artificial Sequence
  Description of Artificial Sequence: Synthetic oligonucleotide
  Sense strand starting at position 3927 of SEQ ID NO: 1241789
ucauguuguucuguuaaac

SEQ ID NO: 1299929 - RNA, 19 nt, Artificial Sequence
  Description of Artificial Sequence: Synthetic oligonucleotide
  Antisense strand to SEQ ID NO: 1299928
guuuaacagaacaacauga

SEQ ID NO: 1299930 - RNA, 19 nt, Artificial Sequence
  Description of Artificial Sequence: Synthetic oligonucleotide
  Sense strand starting at position 84 of SEQ ID NO: 1241790
uuacaugggcuugaucuua

SEQ ID NO: 1299931 - RNA, 19 nt, Artificial Sequence
  Description of Artificial Sequence: Synthetic oligonucleotide
  Antisense strand to SEQ ID NO: 1299930
uaagaucaagcccauguaa

SEQ ID NO: 1299932 - RNA, 19 nt, Artificial Sequence
  Description of Artificial Sequence: Synthetic oligonucleotide
  Sense strand starting at position 248 of SEQ ID NO: 1241790
gguacuugacugcaaguua

SEQ ID NO: 1299933 - RNA, 19 nt, Artificial Sequence
  Description of Artificial Sequence: Synthetic oligonucleotide
  Antisense strand to SEQ ID NO: 1299932
uaacuugcagucaaguacc

SEQ ID NO: 1299934 - RNA, 19 nt, Artificial Sequence
  Description of Artificial Sequence: Synthetic oligonucleotide
  Sense strand starting at position 451 of SEQ ID NO: 1241790
ugcugacuuguccagucaa

SEQ ID NO: 1299935 - RNA, 19 nt, Artificial Sequence
  Description of Artificial Sequence: Synthetic oligonucleotide
  Antisense strand to SEQ ID NO: 1299934
uugacuggacaagucagca

SEQ ID NO: 1299936 - RNA, 19 nt, Artificial Sequence
  Description of Artificial Sequence: Synthetic oligonucleotide
  Sense strand starting at position 495 of SEQ ID NO: 1241790
augucuuuccucuagauca

SEQ ID NO: 1299937 - RNA, 19 nt, Artificial Sequence
  Description of Artificial Sequence: Synthetic oligonucleotide
  Antisense strand to SEQ ID NO: 1299936
ugaucuagaggaaagacau

SEQ ID NO: 1299938 - RNA, 19 nt, Artificial Sequence
  Description of Artificial Sequence: Synthetic oligonucleotide
  Sense strand starting at position 497 of SEQ ID NO: 1241790
gucuuuccucuagaucauu

SEQ ID NO: 1299939 - RNA, 19 nt, Artificial Sequence
  Description of Artificial Sequence: Synthetic oligonucleotide
  Antisense strand to SEQ ID NO: 1299938
aaugaucuagaggaaagac

SEQ ID NO: 1299940 - RNA, 19 nt, Artificial Sequence
  Description of Artificial Sequence: Synthetic oligonucleotide
  Sense strand starting at position 1321 of SEQ ID NO: 1241790
augaguaaugucuaacacu

SEQ ID NO: 1299941 - RNA, 19 nt, Artificial Sequence
  Description of Artificial Sequence: Synthetic oligonucleotide
  Antisense strand to SEQ ID NO: 1299940
aguguuagacauuacucau

SEQ ID NO: 1299942 - RNA, 19 nt, Artificial Sequence
  Description of Artificial Sequence: Synthetic oligonucleotide
  Sense strand starting at position 1368 of SEQ ID NO: 1241790
guaccuaccucuuuagaua

SEQ ID NO: 1299943 - RNA, 19 nt, Artificial Sequence
  Description of Artificial Sequence: Synthetic oligonucleotide
  Antisense strand to SEQ ID NO: 1299942
uaucuaaagagguagguac

SEQ ID NO: 1299944 - RNA, 19 nt, Artificial Sequence
  Description of Artificial Sequence: Synthetic oligonucleotide
  Sense strand starting at position 1384 of SEQ ID NO: 1241790
auagccaugugguuuaaau

SEQ ID NO: 1299945 - RNA, 19 nt, Artificial Sequence
  Description of Artificial Sequence: Synthetic oligonucleotide
  Antisense strand to SEQ ID NO: 1299944
auuuaaaccacauggcuau

SEQ ID NO: 1299946 - RNA, 19 nt, Artificial Sequence
  Description of Artificial Sequence: Synthetic oligonucleotide
  Sense strand starting at position 1386 of SEQ ID NO: 1241790
agccaugugguuuaaauga

SEQ ID NO: 1299947 - RNA, 19 nt, Artificial Sequence
  Description of Artificial Sequence: Synthetic oligonucleotide
  Antisense strand to SEQ ID NO: 1299946
ucauuuaaaccacauggcu

SEQ ID NO: 1299948 - RNA, 19 nt, Artificial Sequence
  Description of Artificial Sequence: Synthetic oligonucleotide
  Sense strand starting at position 1520 of SEQ ID NO: 1241790
gggagaguauccguggaga

SEQ ID NO: 1299949 - RNA, 19 nt, Artificial Sequence
  Description of Artificial Sequence: Synthetic oligonucleotide
  Antisense strand to SEQ ID NO: 1299948
ucuccacggauacucuccc

SEQ ID NO: 1299950 - RNA, 19 nt, Artificial Sequence
  Description of Artificial Sequence: Synthetic oligonucleotide
  Sense strand starting at position 1521 of SEQ ID NO: 1241790
ggagaguauccguggagag

SEQ ID NO: 1299951 - RNA, 19 nt, Artificial Sequence
  Description of Artificial Sequence: Synthetic oligonucleotide
  Antisense strand to SEQ ID NO: 1299950
cucuccacggauacucucc

SEQ ID NO: 1299952 - RNA, 19 nt, Artificial Sequence
  Description of Artificial Sequence: Synthetic oligonucleotide
  Sense strand starting at position 1769 of SEQ ID NO: 1241790
ccgcgauagcuguccagca

SEQ ID NO: 1299953 - RNA, 19 nt, Artificial Sequence
  Description of Artificial Sequence: Synthetic oligonucleotide
  Antisense strand to SEQ ID NO: 1299952
ugcuggacagcuaucgcgg

SEQ ID NO: 1299954 - RNA, 19 nt, Artificial Sequence
  Description of Artificial Sequence: Synthetic oligonucleotide
  Sense strand starting at position 1925 of SEQ ID NO: 1241790
cggcuuagagcggucaagu

SEQ ID NO: 1299955 - RNA, 19 nt, Artificial Sequence
  Description of Artificial Sequence: Synthetic oligonucleotide
  Antisense strand to SEQ ID NO: 1299954
acuugaccgcucuaagccg

SEQ ID NO: 1299956 - RNA, 19 nt, Artificial Sequence
  Description of Artificial Sequence: Synthetic oligonucleotide
  Sense strand starting at position 1956 of SEQ ID NO: 1241790
cgaccucucugauugggua

SEQ ID NO: 1299957 - RNA, 19 nt, Artificial Sequence
  Description of Artificial Sequence: Synthetic oligonucleotide
  Antisense strand to SEQ ID NO: 1299956
uacccaaucagagaggucg

SEQ ID NO: 1299958 - RNA, 19 nt, Artificial Sequence
  Description of Artificial Sequence: Synthetic oligonucleotide
  Sense strand starting at position 1957 of SEQ ID NO: 1241790
gaccucucugauuggguaa

SEQ ID NO: 1299959 - RNA, 19 nt, Artificial Sequence
  Description of Artificial Sequence: Synthetic oligonucleotide
  Antisense strand to SEQ ID NO: 1299958
uuacccaaucagagagguc

SEQ ID NO: 1299960 - RNA, 19 nt, Artificial Sequence
  Description of Artificial Sequence: Synthetic oligonucleotide
  Sense strand starting at position 1968 of SEQ ID NO: 1241790
uuggguaaugcgcacaaga

SEQ ID NO: 1299961 - RNA, 19 nt, Artificial Sequence
  Description of Artificial Sequence: Synthetic oligonucleotide
  Antisense strand to SEQ ID NO: 1299960
ucuugugcgcauuacccaa

SEQ ID NO: 1299962 - RNA, 19 nt, Artificial Sequence
  Description of Artificial Sequence: Synthetic oligonucleotide
  Sense strand starting at position 1970 of SEQ ID NO: 1241790
ggguaaugcgcacaagaaa

SEQ ID NO: 1299963 - RNA, 19 nt, Artificial Sequence
  Description of Artificial Sequence: Synthetic oligonucleotide
  Antisense strand to SEQ ID NO: 1299962
uuucuugugcgcauuaccc

SEQ ID NO: 1299964 - RNA, 19 nt, Artificial Sequence
  Description of Artificial Sequence: Synthetic oligonucleotide
  Sense strand starting at position 2156 of SEQ ID NO: 1241790
cugcguuagcggaaguuua

SEQ ID NO: 1299965 - RNA, 19 nt, Artificial Sequence
  Description of Artificial Sequence: Synthetic oligonucleotide
  Antisense strand to SEQ ID NO: 1299964
uaaacuuccgcuaacgcag

SEQ ID NO: 1299966 - RNA, 19 nt, Artificial Sequence
  Description of Artificial Sequence: Synthetic oligonucleotide
  Sense strand starting at position 2157 of SEQ ID NO: 1241790
ugcguuagcggaaguuuaa

SEQ ID NO: 1299967 - RNA, 19 nt, Artificial Sequence
  Description of Artificial Sequence: Synthetic oligonucleotide
  Antisense strand to SEQ ID NO: 1299966
uuaaacuuccgcuaacgca

SEQ ID NO: 1299968 - RNA, 19 nt, Artificial Sequence
  Description of Artificial Sequence: Synthetic oligonucleotide
  Sense strand starting at position 2158 of SEQ ID NO: 1241790
gcguuagcggaaguuuaau

SEQ ID NO: 1299969 - RNA, 19 nt, Artificial Sequence
  Description of Artificial Sequence: Synthetic oligonucleotide
  Antisense strand to SEQ ID NO: 1299968
auuaaacuuccgcuaacgc

SEQ ID NO: 1299970 - RNA, 19 nt, Artificial Sequence
  Description of Artificial Sequence: Synthetic oligonucleotide
  Sense strand starting at position 2323 of SEQ ID NO: 1241790
gguagagaguuauuaagau

SEQ ID NO: 1299971 - RNA, 19 nt, Artificial Sequence
  Description of Artificial Sequence: Synthetic oligonucleotide
  Antisense strand to SEQ ID NO: 1299970
aucuuaauaacucucuacc

SEQ ID NO: 1299972 - RNA, 19 nt, Artificial Sequence
  Description of Artificial Sequence: Synthetic oligonucleotide
  Sense strand starting at position 2336 of SEQ ID NO: 1241790
uaagaugacuaggagacua

SEQ ID NO: 1299973 - RNA, 19 nt, Artificial Sequence
  Description of Artificial Sequence: Synthetic oligonucleotide
  Antisense strand to SEQ ID NO: 1299972
uagucuccuagucaucuua

SEQ ID NO: 1299974 - RNA, 19 nt, Artificial Sequence
  Description of Artificial Sequence: Synthetic oligonucleotide
  Sense strand starting at position 2411 of SEQ ID NO: 1241790
ucagaaagucuacguaaua

SEQ ID NO: 1299975 - RNA, 19 nt, Artificial Sequence
  Description of Artificial Sequence: Synthetic oligonucleotide
  Antisense strand to SEQ ID NO: 1299974
uauuacguagacuuucuga

SEQ ID NO: 1299976 - RNA, 19 nt, Artificial Sequence
  Description of Artificial Sequence: Synthetic oligonucleotide
  Sense strand starting at position 2412 of SEQ ID NO: 1241790
cagaaagucuacguaauac

SEQ ID NO: 1299977 - RNA, 19 nt, Artificial Sequence
  Description of Artificial Sequence: Synthetic oligonucleotide
  Antisense strand to SEQ ID NO: 1299976
guauuacguagacuuucug

SEQ ID NO: 1299978 - RNA, 19 nt, Artificial Sequence
  Description of Artificial Sequence: Synthetic oligonucleotide
  Sense strand starting at position 2472 of SEQ ID NO: 1241790
cugaaugugguuuagggau

SEQ ID NO: 1299979 - RNA, 19 nt, Artificial Sequence
  Description of Artificial Sequence: Synthetic oligonucleotide
  Antisense strand to SEQ ID NO: 1299978
aucccuaaaccacauucag

SEQ ID NO: 1299980 - RNA, 19 nt, Artificial Sequence
  Description of Artificial Sequence: Synthetic oligonucleotide
  Sense strand starting at position 2550 of SEQ ID NO: 1241790
agggaacucugggauuugu

SEQ ID NO: 1299981 - RNA, 19 nt, Artificial Sequence
  Description of Artificial Sequence: Synthetic oligonucleotide
  Antisense strand to SEQ ID NO: 1299980
acaaaucccagaguucccu

SEQ ID NO: 1299982 - RNA, 19 nt, Artificial Sequence
  Description of Artificial Sequence: Synthetic oligonucleotide
  Sense strand starting at position 2685 of SEQ ID NO: 1241790
guuuaucagcagcauuaaa

SEQ ID NO: 1299983 - RNA, 19 nt, Artificial Sequence
  Description of Artificial Sequence: Synthetic oligonucleotide
  Antisense strand to SEQ ID NO: 1299982
uuuaaugcugcugauaaac

SEQ ID NO: 1299984 - RNA, 19 nt, Artificial Sequence
  Description of Artificial Sequence: Synthetic oligonucleotide
  Sense strand starting at position 2721 of SEQ ID NO: 1241790
guguaaacacugcauguau

SEQ ID NO: 1299985 - RNA, 19 nt, Artificial Sequence
  Description of Artificial Sequence: Synthetic oligonucleotide
  Antisense strand to SEQ ID NO: 1299984
auacaugcaguguuuacac

SEQ ID NO: 1299986 - RNA, 19 nt, Artificial Sequence
  Description of Artificial Sequence: Synthetic oligonucleotide
  Sense strand starting at position 2740 of SEQ ID NO: 1241790
guucguaaacaauaaaugu

SEQ ID NO: 1299987 - RNA, 19 nt, Artificial Sequence
  Description of Artificial Sequence: Synthetic oligonucleotide
  Antisense strand to SEQ ID NO: 1299986
acauuuauuguuuacgaac

SEQ ID NO: 1299988 - RNA, 19 nt, Artificial Sequence
  Description of Artificial Sequence: Synthetic oligonucleotide
  Sense strand starting at position 2958 of SEQ ID NO: 1241790
agcugcuuacaugaaucaa

SEQ ID NO: 1299989 - RNA, 19 nt, Artificial Sequence
  Description of Artificial Sequence: Synthetic oligonucleotide
  Antisense strand to SEQ ID NO: 1299988
uugauucauguaagcagcu

SEQ ID NO: 1299990 - RNA, 19 nt, Artificial Sequence
  Description of Artificial Sequence: Synthetic oligonucleotide
  Sense strand starting at position 2971 of SEQ ID NO: 1241790
aaucaaguguuguuaugac

SEQ ID NO: 1299991 - RNA, 19 nt, Artificial Sequence
  Description of Artificial Sequence: Synthetic oligonucleotide
  Antisense strand to SEQ ID NO: 1299990
gucauaacaacacuugauu

SEQ ID NO: 1299992 - RNA, 19 nt, Artificial Sequence
  Description of Artificial Sequence: Synthetic oligonucleotide
  Sense strand starting at position 2979 of SEQ ID NO: 1241790
guuguuaugacaugaagca

SEQ ID NO: 1299993 - RNA, 19 nt, Artificial Sequence
  Description of Artificial Sequence: Synthetic oligonucleotide
  Antisense strand to SEQ ID NO: 1299992
ugcuucaugucauaacaac

SEQ ID NO: 1299994 - RNA, 19 nt, Artificial Sequence
  Description of Artificial Sequence: Synthetic oligonucleotide
  Sense strand starting at position 3179 of SEQ ID NO: 1241790
ugagcuaauuuagcgguau

SEQ ID NO: 1299995 - RNA, 19 nt, Artificial Sequence
  Description of Artificial Sequence: Synthetic oligonucleotide
  Antisense strand to SEQ ID NO: 1299994
auaccgcuaaauuagcuca

SEQ ID NO: 1299996 - RNA, 19 nt, Artificial Sequence
  Description of Artificial Sequence: Synthetic oligonucleotide
  Sense strand starting at position 3243 of SEQ ID NO: 1241790
aaacuugcugaguagacuu

SEQ ID NO: 1299997 - RNA, 19 nt, Artificial Sequence
  Description of Artificial Sequence: Synthetic oligonucleotide
  Antisense strand to SEQ ID NO: 1299996
aagucuacucagcaaguuu

SEQ ID NO: 1299998 - RNA, 19 nt, Artificial Sequence
  Description of Artificial Sequence: Synthetic oligonucleotide
  Sense strand starting at position 3310 of SEQ ID NO: 1241790
caaacuuucgacuguagaa

SEQ ID NO: 1299999 - RNA, 19 nt, Artificial Sequence
  Description of Artificial Sequence: Synthetic oligonucleotide
  Antisense strand to SEQ ID NO: 1299998
uucuacagucgaaaguuug

SEQ ID NO: 1300000 - RNA, 19 nt, Artificial Sequence
  Description of Artificial Sequence: Synthetic oligonucleotide
  Sense strand starting at position 3337 of SEQ ID NO: 1241790
caugauuucggauguaugu

SEQ ID NO: 1300001 - RNA, 19 nt, Artificial Sequence
  Description of Artificial Sequence: Synthetic oligonucleotide
  Antisense strand to SEQ ID NO: 1300000
acauacauccgaaaucaug

SEQ ID NO: 1300002 - RNA, 19 nt, Artificial Sequence
  Description of Artificial Sequence: Synthetic oligonucleotide
  Sense strand starting at position 3343 of SEQ ID NO: 1241790
uucggauguauguaauacu

SEQ ID NO: 1300003 - RNA, 19 nt, Artificial Sequence
  Description of Artificial Sequence: Synthetic oligonucleotide
  Antisense strand to SEQ ID NO: 1300002
aguauuacauacauccgaa

SEQ ID NO: 1300004 - RNA, 19 nt, Artificial Sequence
  Description of Artificial Sequence: Synthetic oligonucleotide
  Sense strand starting at position 3426 of SEQ ID NO: 1241790
auuacugaugcuuguaauu

SEQ ID NO: 1300005 - RNA, 19 nt, Artificial Sequence
  Description of Artificial Sequence: Synthetic oligonucleotide
  Antisense strand to SEQ ID NO: 1300004
aauuacaagcaucaguaau

SEQ ID NO: 1300006 - RNA, 19 nt, Artificial Sequence
  Description of Artificial Sequence: Synthetic oligonucleotide
  Sense strand starting at position 3523 of SEQ ID NO: 1241790
guuguuuguaaaggaaaca

SEQ ID NO: 1300007 - RNA, 19 nt, Artificial Sequence
  Description of Artificial Sequence: Synthetic oligonucleotide
  Antisense strand to SEQ ID NO: 1300006
uguuuccuuuacaaacaac

SEQ ID NO: 1300008 - RNA, 19 nt, Artificial Sequence
  Description of Artificial Sequence: Synthetic oligonucleotide
  Sense strand starting at position 3534 of SEQ ID NO: 1241790
aggaaacauuaccgauuua

SEQ ID NO: 1300009 - RNA, 19 nt, Artificial Sequence
  Description of Artificial Sequence: Synthetic oligonucleotide
  Antisense strand to SEQ ID NO: 1300008
uaaaucgguaauguuuccu

SEQ ID NO: 1300010 - RNA, 19 nt, Artificial Sequence
  Description of Artificial Sequence: Synthetic oligonucleotide
  Sense strand starting at position 2 of SEQ ID NO: 1241791
accuguaugucuuccugca

SEQ ID NO: 1300011 - RNA, 19 nt, Artificial Sequence
  Description of Artificial Sequence: Synthetic oligonucleotide
  Antisense strand to SEQ ID NO: 1300010
ugcaggaagacauacaggu

SEQ ID NO: 1300012 - RNA, 19 nt, Artificial Sequence
  Description of Artificial Sequence: Synthetic oligonucleotide
  Sense strand starting at position 123 of SEQ ID NO: 1241791
cuggaaaugccgugguuac

SEQ ID NO: 1300013 - RNA, 19 nt, Artificial Sequence
  Description of Artificial Sequence: Synthetic oligonucleotide
  Antisense strand to SEQ ID NO: 1300012
guaaccacggcauuuccag

SEQ ID NO: 1300014 - RNA, 19 nt, Artificial Sequence
  Description of Artificial Sequence: Synthetic oligonucleotide
  Sense strand starting at position 124 of SEQ ID NO: 1241791
uggaaaugccgugguuacu

SEQ ID NO: 1300015 - RNA, 19 nt, Artificial Sequence
  Description of Artificial Sequence: Synthetic oligonucleotide
  Antisense strand to SEQ ID NO: 1300014
aguaaccacggcauuucca

SEQ ID NO: 1300016 - RNA, 19 nt, Artificial Sequence
  Description of Artificial Sequence: Synthetic oligonucleotide
  Sense strand starting at position 204 of SEQ ID NO: 1241791
ugcuguguagcuuugaagu

SEQ ID NO: 1300017 - RNA, 19 nt, Artificial Sequence
  Description of Artificial Sequence: Synthetic oligonucleotide
  Antisense strand to SEQ ID NO: 1300016
acuucaaagcuacacagca

SEQ ID NO: 1300018 - RNA, 19 nt, Artificial Sequence
  Description of Artificial Sequence: Synthetic oligonucleotide
  Sense strand starting at position 233 of SEQ ID NO: 1241791
acuuacauagucugauguu

SEQ ID NO: 1300019 - RNA, 19 nt, Artificial Sequence
  Description of Artificial Sequence: Synthetic oligonucleotide
  Antisense strand to SEQ ID NO: 1300018
aacaucagacuauguaagu

SEQ ID NO: 1300020 - RNA, 19 nt, Artificial Sequence
  Description of Artificial Sequence: Synthetic oligonucleotide
  Sense strand starting at position 306 of SEQ ID NO: 1241791
ugaggacuugagugaacuc

SEQ ID NO: 1300021 - RNA, 19 nt, Artificial Sequence
  Description of Artificial Sequence: Synthetic oligonucleotide
  Antisense strand to SEQ ID NO: 1300020
gaguucacucaaguccuca

SEQ ID NO: 1300022 - RNA, 19 nt, Artificial Sequence
  Description of Artificial Sequence: Synthetic oligonucleotide
  Sense strand starting at position 315 of SEQ ID NO: 1241791
gagugaacuccgcaaccuu

SEQ ID NO: 1300023 - RNA, 19 nt, Artificial Sequence
  Description of Artificial Sequence: Synthetic oligonucleotide
  Antisense strand to SEQ ID NO: 1300022
aagguugcggaguucacuc

SEQ ID NO: 1300024 - RNA, 19 nt, Artificial Sequence
  Description of Artificial Sequence: Synthetic oligonucleotide
  Sense strand starting at position 407 of SEQ ID NO: 1241791
agacaucagcuugaagguu

SEQ ID NO: 1300025 - RNA, 19 nt, Artificial Sequence
  Description of Artificial Sequence: Synthetic oligonucleotide
  Antisense strand to SEQ ID NO: 1300024
aaccuucaagcugaugucu

SEQ ID NO: 1300026 - RNA, 19 nt, Artificial Sequence
  Description of Artificial Sequence: Synthetic oligonucleotide
  Sense strand starting at position 478 of SEQ ID NO: 1241791
ggucccagcuucucagaga

SEQ ID NO: 1300027 - RNA, 19 nt, Artificial Sequence
  Description of Artificial Sequence: Synthetic oligonucleotide
  Antisense strand to SEQ ID NO: 1300026
ucucugagaagcugggacc

SEQ ID NO: 1300028 - RNA, 19 nt, Artificial Sequence
  Description of Artificial Sequence: Synthetic oligonucleotide
  Sense strand starting at position 733 of SEQ ID NO: 1241791
gacaauaaaccgugugauu

SEQ ID NO: 1300029 - RNA, 19 nt, Artificial Sequence
  Description of Artificial Sequence: Synthetic oligonucleotide
  Antisense strand to SEQ ID NO: 1300028
aaucacacgguuuauuguc

SEQ ID NO: 1300030 - RNA, 19 nt, Artificial Sequence
  Description of Artificial Sequence: Synthetic oligonucleotide
  Sense strand starting at position 740 of SEQ ID NO: 1241791
aaccgugugauucguggaa

SEQ ID NO: 1300031 - RNA, 19 nt, Artificial Sequence
  Description of Artificial Sequence: Synthetic oligonucleotide
  Antisense strand to SEQ ID NO: 1300030
uuccacgaaucacacgguu

SEQ ID NO: 1300032 - RNA, 19 nt, Artificial Sequence
  Description of Artificial Sequence: Synthetic oligonucleotide
  Sense strand starting at position 744 of SEQ ID NO: 1241791
gugugauucguggaaucau

SEQ ID NO: 1300033 - RNA, 19 nt, Artificial Sequence
  Description of Artificial Sequence: Synthetic oligonucleotide
  Antisense strand to SEQ ID NO: 1300032
augauuccacgaaucacac

SEQ ID NO: 1300034 - RNA, 19 nt, Artificial Sequence
  Description of Artificial Sequence: Synthetic oligonucleotide
  Sense strand starting at position 753 of SEQ ID NO: 1241791
guggaaucauacuuugauc

SEQ ID NO: 1300035 - RNA, 19 nt, Artificial Sequence
  Description of Artificial Sequence: Synthetic oligonucleotide
  Antisense strand to SEQ ID NO: 1300034
gaucaaaguaugauuccac

SEQ ID NO: 1300036 - RNA, 19 nt, Artificial Sequence
  Description of Artificial Sequence: Synthetic oligonucleotide
  Sense strand starting at position 755 of SEQ ID NO: 1241791
ggaaucauacuuugaucau

SEQ ID NO: 1300037 - RNA, 19 nt, Artificial Sequence
  Description of Artificial Sequence: Synthetic oligonucleotide
  Antisense strand to SEQ ID NO: 1300036
augaucaaaguaugauucc

SEQ ID NO: 1300038 - RNA, 19 nt, Artificial Sequence
  Description of Artificial Sequence: Synthetic oligonucleotide
  Sense strand starting at position 1981 of SEQ ID NO: 1241791
ucggccuucuccuccaaua

SEQ ID NO: 1300039 - RNA, 19 nt, Artificial Sequence
  Description of Artificial Sequence: Synthetic oligonucleotide
  Antisense strand to SEQ ID NO: 1300038
uauuggaggagaaggccga

SEQ ID NO: 1300040 - RNA, 19 nt, Artificial Sequence
  Description of Artificial Sequence: Synthetic oligonucleotide
  Sense strand starting at position 2045 of SEQ ID NO: 1241791
gcgcuaacgugacugacua

SEQ ID NO: 1300041 - RNA, 19 nt, Artificial Sequence
  Description of Artificial Sequence: Synthetic oligonucleotide
  Antisense strand to SEQ ID NO: 1300040
uagucagucacguuagcgc

SEQ ID NO: 1300042 - RNA, 19 nt, Artificial Sequence
  Description of Artificial Sequence: Synthetic oligonucleotide
  Sense strand starting at position 2046 of SEQ ID NO: 1241791
cgcuaacgugacugacuaa

SEQ ID NO: 1300043 - RNA, 19 nt, Artificial Sequence
  Description of Artificial Sequence: Synthetic oligonucleotide
  Antisense strand to SEQ ID NO: 1300042
uuagucagucacguuagcg

SEQ ID NO: 1300044 - RNA, 19 nt, Artificial Sequence
  Description of Artificial Sequence: Synthetic oligonucleotide
  Sense strand starting at position 2049 of SEQ ID NO: 1241791
uaacgugacugacuaacua

SEQ ID NO: 1300045 - RNA, 19 nt, Artificial Sequence
  Description of Artificial Sequence: Synthetic oligonucleotide
  Antisense strand to SEQ ID NO: 1300044
uaguuagucagucacguua

SEQ ID NO: 1300046 - RNA, 19 nt, Artificial Sequence
  Description of Artificial Sequence: Synthetic oligonucleotide
  Sense strand starting at position 2079 of SEQ ID NO: 1241791
gucucaaucucccugagag

SEQ ID NO: 1300047 - RNA, 19 nt, Artificial Sequence
  Description of Artificial Sequence: Synthetic oligonucleotide
  Antisense strand to SEQ ID NO: 1300046
cucucagggagauugagac

SEQ ID NO: 1300048 - RNA, 19 nt, Artificial Sequence
  Description of Artificial Sequence: Synthetic oligonucleotide
  Sense strand starting at position 3204 of SEQ ID NO: 1241791
aggccacuccugcagacau

SEQ ID NO: 1300049 - RNA, 19 nt, Artificial Sequence
  Description of Artificial Sequence: Synthetic oligonucleotide
  Antisense strand to SEQ ID NO: 1300048
augucugcaggaguggccu

SEQ ID NO: 1300050 - RNA, 19 nt, Artificial Sequence
  Description of Artificial Sequence: Synthetic oligonucleotide
  Sense strand starting at position 3387 of SEQ ID NO: 1241791
aguuucuguucuguggauu

SEQ ID NO: 1300051 - RNA, 19 nt, Artificial Sequence
  Description of Artificial Sequence: Synthetic oligonucleotide
  Antisense strand to SEQ ID NO: 1300050
aauccacagaacagaaacu

SEQ ID NO: 1300052 - RNA, 19 nt, Artificial Sequence
  Description of Artificial Sequence: Synthetic oligonucleotide
  Sense strand starting at position 3388 of SEQ ID NO: 1241791
guuucuguucuguggauuu

SEQ ID NO: 1300053 - RNA, 19 nt, Artificial Sequence
  Description of Artificial Sequence: Synthetic oligonucleotide
  Antisense strand to SEQ ID NO: 1300052
aaauccacagaacagaaac

SEQ ID NO: 1300054 - RNA, 19 nt, Artificial Sequence
  Description of Artificial Sequence: Synthetic oligonucleotide
  Sense strand starting at position 3469 of SEQ ID NO: 1241791
acacguguuacagauucgu

SEQ ID NO: 1300055 - RNA, 19 nt, Artificial Sequence
  Description of Artificial Sequence: Synthetic oligonucleotide
  Antisense strand to SEQ ID NO: 1300054
acgaaucuguaacacgugu

SEQ ID NO: 1300056 - RNA, 19 nt, Artificial Sequence
  Description of Artificial Sequence: Synthetic oligonucleotide
  Sense strand starting at position 3473 of SEQ ID NO: 1241791
guguuacagauucguuuaa

SEQ ID NO: 1300057 - RNA, 19 nt, Artificial Sequence
  Description of Artificial Sequence: Synthetic oligonucleotide
  Antisense strand to SEQ ID NO: 1300056
uuaaacgaaucuguaacac

SEQ ID NO: 1300058 - RNA, 19 nt, Artificial Sequence
  Description of Artificial Sequence: Synthetic oligonucleotide
  Sense strand starting at position 3474 of SEQ ID NO: 1241791
uguuacagauucguuuaau

SEQ ID NO: 1300059 - RNA, 19 nt, Artificial Sequence
  Description of Artificial Sequence: Synthetic oligonucleotide
  Antisense strand to SEQ ID NO: 1300058
auuaaacgaaucuguaaca

SEQ ID NO: 1300060 - RNA, 19 nt, Artificial Sequence
  Description of Artificial Sequence: Synthetic oligonucleotide
  Sense strand starting at position 3475 of SEQ ID NO: 1241791
guuacagauucguuuaauu

SEQ ID NO: 1300061 - RNA, 19 nt, Artificial Sequence
  Description of Artificial Sequence: Synthetic oligonucleotide
  Antisense strand to SEQ ID NO: 1300060
aauuaaacgaaucuguaac

SEQ ID NO: 1300062 - RNA, 19 nt, Artificial Sequence
  Description of Artificial Sequence: Synthetic oligonucleotide
  Sense strand starting at position 3486 of SEQ ID NO: 1241791
guuuaauucccucagugau

SEQ ID NO: 1300063 - RNA, 19 nt, Artificial Sequence
  Description of Artificial Sequence: Synthetic oligonucleotide
  Antisense strand to SEQ ID NO: 1300062
aucacugagggaauuaaac

SEQ ID NO: 1300064 - RNA, 19 nt, Artificial Sequence
  Description of Artificial Sequence: Synthetic oligonucleotide
  Sense strand starting at position 3488 of SEQ ID NO: 1241791
uuaauucccucagugauag

SEQ ID NO: 1300065 - RNA, 19 nt, Artificial Sequence
  Description of Artificial Sequence: Synthetic oligonucleotide
  Antisense strand to SEQ ID NO: 1300064
cuaucacugagggaauuaa

SEQ ID NO: 1300066 - RNA, 19 nt, Artificial Sequence
  Description of Artificial Sequence: Synthetic oligonucleotide
  Sense strand starting at position 3626 of SEQ ID NO: 1241791
acggaauucgagugacucu

SEQ ID NO: 1300067 - RNA, 19 nt, Artificial Sequence
  Description of Artificial Sequence: Synthetic oligonucleotide
  Antisense strand to SEQ ID NO: 1300066
agagucacucgaauuccgu

SEQ ID NO: 1300068 - RNA, 19 nt, Artificial Sequence
  Description of Artificial Sequence: Synthetic oligonucleotide
  Sense strand starting at position 3693 of SEQ ID NO: 1241791
ugagcguguccuggagagu

SEQ ID NO: 1300069 - RNA, 19 nt, Artificial Sequence
  Description of Artificial Sequence: Synthetic oligonucleotide
  Antisense strand to SEQ ID NO: 1300068
acucuccaggacacgcuca

SEQ ID NO: 1300070 - RNA, 19 nt, Artificial Sequence
  Description of Artificial Sequence: Synthetic oligonucleotide
  Sense strand starting at position 3694 of SEQ ID NO: 1241791
gagcguguccuggagaguu

SEQ ID NO: 1300071 - RNA, 19 nt, Artificial Sequence
  Description of Artificial Sequence: Synthetic oligonucleotide
  Antisense strand to SEQ ID NO: 1300070
aacucuccaggacacgcuc

SEQ ID NO: 1300072 - RNA, 19 nt, Artificial Sequence
  Description of Artificial Sequence: Synthetic oligonucleotide
  Sense strand starting at position 3696 of SEQ ID NO: 1241791
gcguguccuggagaguuga

SEQ ID NO: 1300073 - RNA, 19 nt, Artificial Sequence
  Description of Artificial Sequence: Synthetic oligonucleotide
  Antisense strand to SEQ ID NO: 1300072
ucaacucuccaggacacgc

SEQ ID NO: 1300074 - RNA, 19 nt, Artificial Sequence
  Description of Artificial Sequence: Synthetic oligonucleotide
  Sense strand starting at position 3865 of SEQ ID NO: 1241791
acagaaauacucuacgucu

SEQ ID NO: 1300075 - RNA, 19 nt, Artificial Sequence
  Description of Artificial Sequence: Synthetic oligonucleotide
  Antisense strand to SEQ ID NO: 1300074
agacguagaguauuucugu

SEQ ID NO: 1300076 - RNA, 19 nt, Artificial Sequence
  Description of Artificial Sequence: Synthetic oligonucleotide
  Sense strand starting at position 3867 of SEQ ID NO: 1241791
agaaauacucuacgucugu

SEQ ID NO: 1300077 - RNA, 19 nt, Artificial Sequence
  Description of Artificial Sequence: Synthetic oligonucleotide
  Antisense strand to SEQ ID NO: 1300076
acagacguagaguauuucu

SEQ ID NO: 1300078 - RNA, 19 nt, Artificial Sequence
  Description of Artificial Sequence: Synthetic oligonucleotide
  Sense strand starting at position 3868 of SEQ ID NO: 1241791
gaaauacucuacgucugua

SEQ ID NO: 1300079 - RNA, 19 nt, Artificial Sequence
  Description of Artificial Sequence: Synthetic oligonucleotide
  Antisense strand to SEQ ID NO: 1300078
uacagacguagaguauuuc

SEQ ID NO: 1300080 - RNA, 19 nt, Artificial Sequence
  Description of Artificial Sequence: Synthetic oligonucleotide
  Sense strand starting at position 3871 of SEQ ID NO: 1241791
auacucuacgucuguauga

SEQ ID NO: 1300081 - RNA, 19 nt, Artificial Sequence
  Description of Artificial Sequence: Synthetic oligonucleotide
  Antisense strand to SEQ ID NO: 1300080
ucauacagacguagaguau

SEQ ID NO: 1300082 - RNA, 19 nt, Artificial Sequence
  Description of Artificial Sequence: Synthetic oligonucleotide
  Sense strand starting at position 3872 of SEQ ID NO: 1241791
uacucuacgucuguaugaa

SEQ ID NO: 1300083 - RNA, 19 nt, Artificial Sequence
  Description of Artificial Sequence: Synthetic oligonucleotide
  Antisense strand to SEQ ID NO: 1300082
uucauacagacguagagua

SEQ ID NO: 1300084 - RNA, 19 nt, Artificial Sequence
  Description of Artificial Sequence: Synthetic oligonucleotide
  Sense strand starting at position 3873 of SEQ ID NO: 1241791
acucuacgucuguaugaac

SEQ ID NO: 1300085 - RNA, 19 nt, Artificial Sequence
  Description of Artificial Sequence: Synthetic oligonucleotide
  Antisense strand to SEQ ID NO: 1300084
guucauacagacguagagu

SEQ ID NO: 1300086 - RNA, 19 nt, Artificial Sequence
  Description of Artificial Sequence: Synthetic oligonucleotide
  Sense strand starting at position 3906 of SEQ ID NO: 1241791
gagaaaguguggccaagau

SEQ ID NO: 1300087 - RNA, 19 nt, Artificial Sequence
  Description of Artificial Sequence: Synthetic oligonucleotide
  Antisense strand to SEQ ID NO: 1300086
aucuuggccacacuuucuc

SEQ ID NO: 1300088 - RNA, 19 nt, Artificial Sequence
  Description of Artificial Sequence: Synthetic oligonucleotide
  Sense strand starting at position 3930 of SEQ ID NO: 1241791
agagguuuccaccaaagca

SEQ ID NO: 1300089 - RNA, 19 nt, Artificial Sequence
  Description of Artificial Sequence: Synthetic oligonucleotide
  Antisense strand to SEQ ID NO: 1300088
ugcuuugguggaaaccucu

SEQ ID NO: 1300090 - RNA, 19 nt, Artificial Sequence
  Description of Artificial Sequence: Synthetic oligonucleotide
  Sense strand starting at position 195 of SEQ ID NO: 1241792
ugucaauuugucuguucug

SEQ ID NO: 1300091 - RNA, 19 nt, Artificial Sequence
  Description of Artificial Sequence: Synthetic oligonucleotide
  Antisense strand to SEQ ID NO: 1300090
cagaacagacaaauugaca

SEQ ID NO: 1300092 - RNA, 19 nt, Artificial Sequence
  Description of Artificial Sequence: Synthetic oligonucleotide
  Sense strand starting at position 207 of SEQ ID NO: 1241792
uguucugcgggauaagaau

SEQ ID NO: 1300093 - RNA, 19 nt, Artificial Sequence
  Description of Artificial Sequence: Synthetic oligonucleotide
  Antisense strand to SEQ ID NO: 1300092
auucuuaucccgcagaaca

SEQ ID NO: 1300094 - RNA, 19 nt, Artificial Sequence
  Description of Artificial Sequence: Synthetic oligonucleotide
  Sense strand starting at position 369 of SEQ ID NO: 1241792
aaaggaugucugggucaau

SEQ ID NO: 1300095 - RNA, 19 nt, Artificial Sequence
  Description of Artificial Sequence: Synthetic oligonucleotide
  Antisense strand to SEQ ID NO: 1300094
auugacccagacauccuuu

SEQ ID NO: 1300096 - RNA, 19 nt, Artificial Sequence
  Description of Artificial Sequence: Synthetic oligonucleotide
  Sense strand starting at position 370 of SEQ ID NO: 1241792
aaggaugucugggucaauu

SEQ ID NO: 1300097 - RNA, 19 nt, Artificial Sequence
  Description of Artificial Sequence: Synthetic oligonucleotide
  Antisense strand to SEQ ID NO: 1300096
aauugacccagacauccuu

SEQ ID NO: 1300098 - RNA, 19 nt, Artificial Sequence
  Description of Artificial Sequence: Synthetic oligonucleotide
  Sense strand starting at position 418 of SEQ ID NO: 1241792
ggucucgggacucaucuau

SEQ ID NO: 1300099 - RNA, 19 nt, Artificial Sequence
  Description of Artificial Sequence: Synthetic oligonucleotide
  Antisense strand to SEQ ID NO: 1300098
auagaugagucccgagacc

SEQ ID NO: 1300100 - RNA, 19 nt, Artificial Sequence
  Description of Artificial Sequence: Synthetic oligonucleotide
  Sense strand starting at position 422 of SEQ ID NO: 1241792
ucgggacucaucuauguau

SEQ ID NO: 1300101 - RNA, 19 nt, Artificial Sequence
  Description of Artificial Sequence: Synthetic oligonucleotide
  Antisense strand to SEQ ID NO: 1300100
auacauagaugagucccga

SEQ ID NO: 1300102 - RNA, 19 nt, Artificial Sequence
  Description of Artificial Sequence: Synthetic oligonucleotide
  Sense strand starting at position 424 of SEQ ID NO: 1241792
gggacucaucuauguauug

SEQ ID NO: 1300103 - RNA, 19 nt, Artificial Sequence
  Description of Artificial Sequence: Synthetic oligonucleotide
  Antisense strand to SEQ ID NO: 1300102
caauacauagaugaguccc

SEQ ID NO: 1300104 - RNA, 19 nt, Artificial Sequence
  Description of Artificial Sequence: Synthetic oligonucleotide
  Sense strand starting at position 452 of SEQ ID NO: 1241792
cuauaagcauaauuaggau

SEQ ID NO: 1300105 - RNA, 19 nt, Artificial Sequence
  Description of Artificial Sequence: Synthetic oligonucleotide
  Antisense strand to SEQ ID NO: 1300104
auccuaauuaugcuuauag

SEQ ID NO: 1300106 - RNA, 19 nt, Artificial Sequence
  Description of Artificial Sequence: Synthetic oligonucleotide
  Sense strand starting at position 643 of SEQ ID NO: 1241792
auggaaacuuucguuuaaa

SEQ ID NO: 1300107 - RNA, 19 nt, Artificial Sequence
  Description of Artificial Sequence: Synthetic oligonucleotide
  Antisense strand to SEQ ID NO: 1300106
uuuaaacgaaaguuuccau

SEQ ID NO: 1300108 - RNA, 19 nt, Artificial Sequence
  Description of Artificial Sequence: Synthetic oligonucleotide
  Sense strand starting at position 747 of SEQ ID NO: 1241792
auguaucugagagguaacu

SEQ ID NO: 1300109 - RNA, 19 nt, Artificial Sequence
  Description of Artificial Sequence: Synthetic oligonucleotide
  Antisense strand to SEQ ID NO: 1300108
aguuaccucucagauacau

SEQ ID NO: 1300110 - RNA, 19 nt, Artificial Sequence
  Description of Artificial Sequence: Synthetic oligonucleotide
  Sense strand starting at position 749 of SEQ ID NO: 1241792
guaucugagagguaacuuu

SEQ ID NO: 1300111 - RNA, 19 nt, Artificial Sequence
  Description of Artificial Sequence: Synthetic oligonucleotide
  Antisense strand to SEQ ID NO: 1300110
aaaguuaccucucagauac

SEQ ID NO: 1300112 - RNA, 19 nt, Artificial Sequence
  Description of Artificial Sequence: Synthetic oligonucleotide
  Sense strand starting at position 785 of SEQ ID NO: 1241792
guauguaauccauacacau

SEQ ID NO: 1300113 - RNA, 19 nt, Artificial Sequence
  Description of Artificial Sequence: Synthetic oligonucleotide
  Antisense strand to SEQ ID NO: 1300112
auguguauggauuacauac

SEQ ID NO: 1300114 - RNA, 19 nt, Artificial Sequence
  Description of Artificial Sequence: Synthetic oligonucleotide
  Sense strand starting at position 907 of SEQ ID NO: 1241792
guguguuggaauuagacua

SEQ ID NO: 1300115 - RNA, 19 nt, Artificial Sequence
  Description of Artificial Sequence: Synthetic oligonucleotide
  Antisense strand to SEQ ID NO: 1300114
uagucuaauuccaacacac

SEQ ID NO: 1300116 - RNA, 19 nt, Artificial Sequence
  Description of Artificial Sequence: Synthetic oligonucleotide
  Sense strand starting at position 960 of SEQ ID NO: 1241792
gggcccucuaggugaaaga

SEQ ID NO: 1300117 - RNA, 19 nt, Artificial Sequence
  Description of Artificial Sequence: Synthetic oligonucleotide
  Antisense strand to SEQ ID NO: 1300116
ucuuucaccuagagggccc

SEQ ID NO: 1300118 - RNA, 19 nt, Artificial Sequence
  Description of Artificial Sequence: Synthetic oligonucleotide
  Sense strand starting at position 961 of SEQ ID NO: 1241792
ggcccucuaggugaaagau

SEQ ID NO: 1300119 - RNA, 19 nt, Artificial Sequence
  Description of Artificial Sequence: Synthetic oligonucleotide
  Antisense strand to SEQ ID NO: 1300118
aucuuucaccuagagggcc

SEQ ID NO: 1300120 - RNA, 19 nt, Artificial Sequence
  Description of Artificial Sequence: Synthetic oligonucleotide
  Sense strand starting at position 998 of SEQ ID NO: 1241792
uucuuaccuguggagucau

SEQ ID NO: 1300121 - RNA, 19 nt, Artificial Sequence
  Description of Artificial Sequence: Synthetic oligonucleotide
  Antisense strand to SEQ ID NO: 1300120
augacuccacagguaagaa

SEQ ID NO: 1300122 - RNA, 19 nt, Artificial Sequence
  Description of Artificial Sequence: Synthetic oligonucleotide
  Sense strand starting at position 2170 of SEQ ID NO: 1241792
uaauguaggcuccaguaga

SEQ ID NO: 1300123 - RNA, 19 nt, Artificial Sequence
  Description of Artificial Sequence: Synthetic oligonucleotide
  Antisense strand to SEQ ID NO: 1300122
ucuacuggagccuacauua

SEQ ID NO: 1300124 - RNA, 19 nt, Artificial Sequence
  Description of Artificial Sequence: Synthetic oligonucleotide
  Sense strand starting at position 2181 of SEQ ID NO: 1241792
ccaguagaauguucucaua

SEQ ID NO: 1300125 - RNA, 19 nt, Artificial Sequence
  Description of Artificial Sequence: Synthetic oligonucleotide
  Antisense strand to SEQ ID NO: 1300124
uaugagaacauucuacugg

SEQ ID NO: 1300126 - RNA, 19 nt, Artificial Sequence
  Description of Artificial Sequence: Synthetic oligonucleotide
  Sense strand starting at position 2183 of SEQ ID NO: 1241792
aguagaauguucucauaga

SEQ ID NO: 1300127 - RNA, 19 nt, Artificial Sequence
  Description of Artificial Sequence: Synthetic oligonucleotide
  Antisense strand to SEQ ID NO: 1300126
ucuaugagaacauucuacu

SEQ ID NO: 1300128 - RNA, 19 nt, Artificial Sequence
  Description of Artificial Sequence: Synthetic oligonucleotide
  Sense strand starting at position 2368 of SEQ ID NO: 1241792
guaggacuuauauguagaa

SEQ ID NO: 1300129 - RNA, 19 nt, Artificial Sequence
  Description of Artificial Sequence: Synthetic oligonucleotide
  Antisense strand to SEQ ID NO: 1300128
uucuacauauaaguccuac

SEQ ID NO: 1300130 - RNA, 19 nt, Artificial Sequence
  Description of Artificial Sequence: Synthetic oligonucleotide
  Sense strand starting at position 2372 of SEQ ID NO: 1241792
gacuuauauguagaaagcu

SEQ ID NO: 1300131 - RNA, 19 nt, Artificial Sequence
  Description of Artificial Sequence: Synthetic oligonucleotide
  Antisense strand to SEQ ID NO: 1300130
agcuuucuacauauaaguc

SEQ ID NO: 1300132 - RNA, 19 nt, Artificial Sequence
  Description of Artificial Sequence: Synthetic oligonucleotide
  Sense strand starting at position 2443 of SEQ ID NO: 1241792
uggagaggcuuaccaugau

SEQ ID NO: 1300133 - RNA, 19 nt, Artificial Sequence
  Description of Artificial Sequence: Synthetic oligonucleotide
  Antisense strand to SEQ ID NO: 1300132
aucaugguaagccucucca

SEQ ID NO: 1300134 - RNA, 19 nt, Artificial Sequence
  Description of Artificial Sequence: Synthetic oligonucleotide
  Sense strand starting at position 2453 of SEQ ID NO: 1241792
uaccaugauccugggugaa

SEQ ID NO: 1300135 - RNA, 19 nt, Artificial Sequence
  Description of Artificial Sequence: Synthetic oligonucleotide
  Antisense strand to SEQ ID NO: 1300134
uucacccaggaucauggua

SEQ ID NO: 1300136 - RNA, 19 nt, Artificial Sequence
  Description of Artificial Sequence: Synthetic oligonucleotide
  Sense strand starting at position 2566 of SEQ ID NO: 1241792
gaagaauggaaagguguuu

SEQ ID NO: 1300137 - RNA, 19 nt, Artificial Sequence
  Description of Artificial Sequence: Synthetic oligonucleotide
  Antisense strand to SEQ ID NO: 1300136
aaacaccuuuccauucuuc

SEQ ID NO: 1300138 - RNA, 19 nt, Artificial Sequence
  Description of Artificial Sequence: Synthetic oligonucleotide
  Sense strand starting at position 2586 of SEQ ID NO: 1241792
caaggcagaguguaagauu

SEQ ID NO: 1300139 - RNA, 19 nt, Artificial Sequence
  Description of Artificial Sequence: Synthetic oligonucleotide
  Antisense strand to SEQ ID NO: 1300138
aaucuuacacucugccuug

SEQ ID NO: 1300140 - RNA, 19 nt, Artificial Sequence
  Description of Artificial Sequence: Synthetic oligonucleotide
  Sense strand starting at position 2620 of SEQ ID NO: 1241792
gacauauagugaguaacau

SEQ ID NO: 1300141 - RNA, 19 nt, Artificial Sequence
  Description of Artificial Sequence: Synthetic oligonucleotide
  Antisense strand to SEQ ID NO: 1300140
auguuacucacuauauguc

SEQ ID NO: 1300142 - RNA, 19 nt, Artificial Sequence
  Description of Artificial Sequence: Synthetic oligonucleotide
  Sense strand starting at position 2629 of SEQ ID NO: 1241792
ugaguaacaucugcaggaa

SEQ ID NO: 1300143 - RNA, 19 nt, Artificial Sequence
  Description of Artificial Sequence: Synthetic oligonucleotide
  Antisense strand to SEQ ID NO: 1300142
uuccugcagauguuacuca

SEQ ID NO: 1300144 - RNA, 19 nt, Artificial Sequence
  Description of Artificial Sequence: Synthetic oligonucleotide
  Sense strand starting at position 2632 of SEQ ID NO: 1241792
guaacaucugcaggaauug

SEQ ID NO: 1300145 - RNA, 19 nt, Artificial Sequence
  Description of Artificial Sequence: Synthetic oligonucleotide
  Antisense strand to SEQ ID NO: 1300144
caauuccugcagauguuac

SEQ ID NO: 1300146 - RNA, 19 nt, Artificial Sequence
  Description of Artificial Sequence: Synthetic oligonucleotide
  Sense strand starting at position 2819 of SEQ ID NO: 1241792
uuacuuuagcuugagugaa

SEQ ID NO: 1300147 - RNA, 19 nt, Artificial Sequence
  Description of Artificial Sequence: Synthetic oligonucleotide
  Antisense strand to SEQ ID NO: 1300146
uucacucaagcuaaaguaa

SEQ ID NO: 1300148 - RNA, 19 nt, Artificial Sequence
  Description of Artificial Sequence: Synthetic oligonucleotide
  Sense strand starting at position 2924 of SEQ ID NO: 1241792
agugcaucacuugaguaac

SEQ ID NO: 1300149 - RNA, 19 nt, Artificial Sequence
  Description of Artificial Sequence: Synthetic oligonucleotide
  Antisense strand to SEQ ID NO: 1300148
guuacucaagugaugcacu

SEQ ID NO: 1300150 - RNA, 19 nt, Artificial Sequence
  Description of Artificial Sequence: Synthetic oligonucleotide
  Sense strand starting at position 2927 of SEQ ID NO: 1241792
gcaucacuugaguaacaug

SEQ ID NO: 1300151 - RNA, 19 nt, Artificial Sequence
  Description of Artificial Sequence: Synthetic oligonucleotide
  Antisense strand to SEQ ID NO: 1300150
cauguuacucaagugaugc

SEQ ID NO: 1300152 - RNA, 19 nt, Artificial Sequence
  Description of Artificial Sequence: Synthetic oligonucleotide
  Sense strand starting at position 2989 of SEQ ID NO: 1241792
ccucucucaggaggugaau

SEQ ID NO: 1300153 - RNA, 19 nt, Artificial Sequence
  Description of Artificial Sequence: Synthetic oligonucleotide
  Antisense strand to SEQ ID NO: 1300152
auucaccuccugagagagg

SEQ ID NO: 1300154 - RNA, 19 nt, Artificial Sequence
  Description of Artificial Sequence: Synthetic oligonucleotide
  Sense strand starting at position 3002 of SEQ ID NO: 1241792
gugaaugugaauggaaagu

SEQ ID NO: 1300155 - RNA, 19 nt, Artificial Sequence
  Description of Artificial Sequence: Synthetic oligonucleotide
  Antisense strand to SEQ ID NO: 1300154
acuuuccauucacauucac

SEQ ID NO: 1300156 - RNA, 19 nt, Artificial Sequence
  Description of Artificial Sequence: Synthetic oligonucleotide
  Sense strand starting at position 3224 of SEQ ID NO: 1241792
cagaaacaguguuccaaug

SEQ ID NO: 1300157 - RNA, 19 nt, Artificial Sequence
  Description of Artificial Sequence: Synthetic oligonucleotide
  Antisense strand to SEQ ID NO: 1300156
cauuggaacacuguuucug

SEQ ID NO: 1300158 - RNA, 19 nt, Artificial Sequence
  Description of Artificial Sequence: Synthetic oligonucleotide
  Sense strand starting at position 3243 of SEQ ID NO: 1241792
agcagaacaaucgggauaa

SEQ ID NO: 1300159 - RNA, 19 nt, Artificial Sequence
  Description of Artificial Sequence: Synthetic oligonucleotide
  Antisense strand to SEQ ID NO: 1300158
uuaucccgauuguucugcu

SEQ ID NO: 1300160 - RNA, 19 nt, Artificial Sequence
  Description of Artificial Sequence: Synthetic oligonucleotide
  Sense strand starting at position 3631 of SEQ ID NO: 1241792
uucuuauaagguuaaagca

SEQ ID NO: 1300161 - RNA, 19 nt, Artificial Sequence
  Description of Artificial Sequence: Synthetic oligonucleotide
  Antisense strand to SEQ ID NO: 1300160
ugcuuuaaccuuauaagaa

SEQ ID NO: 1300162 - RNA, 19 nt, Artificial Sequence
  Description of Artificial Sequence: Synthetic oligonucleotide
  Sense strand starting at position 3721 of SEQ ID NO: 1241792
gguuuauugaauggucaga

SEQ ID NO: 1300163 - RNA, 19 nt, Artificial Sequence
  Description of Artificial Sequence: Synthetic oligonucleotide
  Antisense strand to SEQ ID NO: 1300162
ucugaccauucaauaaacc

SEQ ID NO: 1300164 - RNA, 19 nt, Artificial Sequence
  Description of Artificial Sequence: Synthetic oligonucleotide
  Sense strand starting at position 3723 of SEQ ID NO: 1241792
uuuauugaauggucagaua

SEQ ID NO: 1300165 - RNA, 19 nt, Artificial Sequence
  Description of Artificial Sequence: Synthetic oligonucleotide
  Antisense strand to SEQ ID NO: 1300164
uaucugaccauucaauaaa

SEQ ID NO: 1300166 - RNA, 19 nt, Artificial Sequence
  Description of Artificial Sequence: Synthetic oligonucleotide
  Sense strand starting at position 3754 of SEQ ID NO: 1241792
uuggcauggcaacaucaau

SEQ ID NO: 1300167 - RNA, 19 nt, Artificial Sequence
  Description of Artificial Sequence: Synthetic oligonucleotide
  Antisense strand to SEQ ID NO: 1300166
auugauguugccaugccaa

SEQ ID NO: 1300168 - RNA, 19 nt, Artificial Sequence
  Description of Artificial Sequence: Synthetic oligonucleotide
  Sense strand starting at position 3842 of SEQ ID NO: 1241792
uuaaguagacagcauagua

SEQ ID NO: 1300169 - RNA, 19 nt, Artificial Sequence
  Description of Artificial Sequence: Synthetic oligonucleotide
  Antisense strand to SEQ ID NO: 1300168
uacuaugcugucuacuuaa

SEQ ID NO: 1300170 - RNA, 19 nt, Artificial Sequence
  Description of Artificial Sequence: Synthetic oligonucleotide
  Sense strand starting at position 54 of SEQ ID NO: 1241793
ccaggaauucgcuggcaac

SEQ ID NO: 1300171 - RNA, 19 nt, Artificial Sequence
  Description of Artificial Sequence: Synthetic oligonucleotide
  Antisense strand to SEQ ID NO: 1300170
guugccagcgaauuccugg

SEQ ID NO: 1300172 - RNA, 19 nt, Artificial Sequence
  Description of Artificial Sequence: Synthetic oligonucleotide
  Sense strand starting at position 735 of SEQ ID NO: 1241793
ccauacuugcccuggcgaa

SEQ ID NO: 1300173 - RNA, 19 nt, Artificial Sequence
  Description of Artificial Sequence: Synthetic oligonucleotide
  Antisense strand to SEQ ID NO: 1300172
uucgccagggcaaguaugg

SEQ ID NO: 1300174 - RNA, 19 nt, Artificial Sequence
  Description of Artificial Sequence: Synthetic oligonucleotide
  Sense strand starting at position 2444 of SEQ ID NO: 1241793
ccaauaaagucugcuuuga

SEQ ID NO: 1300175 - RNA, 19 nt, Artificial Sequence
  Description of Artificial Sequence: Synthetic oligonucleotide
  Antisense strand to SEQ ID NO: 1300174
ucaaagcagacuuuauugg

SEQ ID NO: 1300176 - RNA, 19 nt, Artificial Sequence
  Description of Artificial Sequence: Synthetic oligonucleotide
  Sense strand starting at position 2452 of SEQ ID NO: 1241793
gucugcuuugacgagaauc

SEQ ID NO: 1300177 - RNA, 19 nt, Artificial Sequence
  Description of Artificial Sequence: Synthetic oligonucleotide
  Antisense strand to SEQ ID NO: 1300176
gauucucgucaaagcagac

SEQ ID NO: 1300178 - RNA, 19 nt, Artificial Sequence
  Description of Artificial Sequence: Synthetic oligonucleotide
  Sense strand starting at position 2687 of SEQ ID NO: 1241793
uugggaggauguccguuau

SEQ ID NO: 1300179 - RNA, 19 nt, Artificial Sequence
  Description of Artificial Sequence: Synthetic oligonucleotide
  Antisense strand to SEQ ID NO: 1300178
auaacggacauccucccaa

SEQ ID NO: 1300180 - RNA, 19 nt, Artificial Sequence
  Description of Artificial Sequence: Synthetic oligonucleotide
  Sense strand starting at position 2691 of SEQ ID NO: 1241793
gaggauguccguuauucuu

SEQ ID NO: 1300181 - RNA, 19 nt, Artificial Sequence
  Description of Artificial Sequence: Synthetic oligonucleotide
  Antisense strand to SEQ ID NO: 1300180
aagaauaacggacauccuc

SEQ ID NO: 1300182 - RNA, 19 nt, Artificial Sequence
  Description of Artificial Sequence: Synthetic oligonucleotide
  Sense strand starting at position 2693 of SEQ ID NO: 1241793
ggauguccguuauucuuua

SEQ ID NO: 1300183 - RNA, 19 nt, Artificial Sequence
  Description of Artificial Sequence: Synthetic oligonucleotide
  Antisense strand to SEQ ID NO: 1300182
uaaagaauaacggacaucc

SEQ ID NO: 1300184 - RNA, 19 nt, Artificial Sequence
  Description of Artificial Sequence: Synthetic oligonucleotide
  Sense strand starting at position 2698 of SEQ ID NO: 1241793
uccguuauucuuuagugac

SEQ ID NO: 1300185 - RNA, 19 nt, Artificial Sequence
  Description of Artificial Sequence: Synthetic oligonucleotide
  Antisense strand to SEQ ID NO: 1300184
gucacuaaagaauaacgga

SEQ ID NO: 1300186 - RNA, 19 nt, Artificial Sequence
  Description of Artificial Sequence: Synthetic oligonucleotide
  Sense strand starting at position 2997 of SEQ ID NO: 1241793
acggauuagcggcaaguua

SEQ ID NO: 1300187 - RNA, 19 nt, Artificial Sequence
  Description of Artificial Sequence: Synthetic oligonucleotide
  Antisense strand to SEQ ID NO: 1300186
uaacuugccgcuaauccgu

SEQ ID NO: 1300188 - RNA, 19 nt, Artificial Sequence
  Description of Artificial Sequence: Synthetic oligonucleotide
  Sense strand starting at position 3011 of SEQ ID NO: 1241793
aguuaaaccuuccugaaug

SEQ ID NO: 1300189 - RNA, 19 nt, Artificial Sequence
  Description of Artificial Sequence: Synthetic oligonucleotide
  Antisense strand to SEQ ID NO: 1300188
cauucaggaagguuuaacu

SEQ ID NO: 1300190 - RNA, 19 nt, Artificial Sequence
  Description of Artificial Sequence: Synthetic oligonucleotide
  Sense strand starting at position 3019 of SEQ ID NO: 1241793
cuuccugaaugaguuacau

SEQ ID NO: 1300191 - RNA, 19 nt, Artificial Sequence
  Description of Artificial Sequence: Synthetic oligonucleotide
  Antisense strand to SEQ ID NO: 1300190
auguaacucauucaggaag

SEQ ID NO: 1300192 - RNA, 19 nt, Artificial Sequence
  Description of Artificial Sequence: Synthetic oligonucleotide
  Sense strand starting at position 3070 of SEQ ID NO: 1241793
uuuggucgaccugacaauu

SEQ ID NO: 1300193 - RNA, 19 nt, Artificial Sequence
  Description of Artificial Sequence: Synthetic oligonucleotide
  Antisense strand to SEQ ID NO: 1300192
aauugucaggucgaccaaa

SEQ ID NO: 1300194 - RNA, 19 nt, Artificial Sequence
  Description of Artificial Sequence: Synthetic oligonucleotide
  Sense strand starting at position 3147 of SEQ ID NO: 1241793
guuggaaaggugugucuuu

SEQ ID NO: 1300195 - RNA, 19 nt, Artificial Sequence
  Description of Artificial Sequence: Synthetic oligonucleotide
  Antisense strand to SEQ ID NO: 1300194
aaagacacaccuuuccaac

SEQ ID NO: 1300196 - RNA, 19 nt, Artificial Sequence
  Description of Artificial Sequence: Synthetic oligonucleotide
  Sense strand starting at position 3169 of SEQ ID NO: 1241793
guacucguuuggccgauuu

SEQ ID NO: 1300197 - RNA, 19 nt, Artificial Sequence
  Description of Artificial Sequence: Synthetic oligonucleotide
  Antisense strand to SEQ ID NO: 1300196
aaaucggccaaacgaguac

SEQ ID NO: 1300198 - RNA, 19 nt, Artificial Sequence
  Description of Artificial Sequence: Synthetic oligonucleotide
  Sense strand starting at position 3171 of SEQ ID NO: 1241793
acucguuuggccgauuuaa

SEQ ID NO: 1300199 - RNA, 19 nt, Artificial Sequence
  Description of Artificial Sequence: Synthetic oligonucleotide
  Antisense strand to SEQ ID NO: 1300198
uuaaaucggccaaacgagu

SEQ ID NO: 1300200 - RNA, 19 nt, Artificial Sequence
  Description of Artificial Sequence: Synthetic oligonucleotide
  Sense strand starting at position 3184 of SEQ ID NO: 1241793
auuuaacgccucugugaau

SEQ ID NO: 1300201 - RNA, 19 nt, Artificial Sequence
  Description of Artificial Sequence: Synthetic oligonucleotide
  Antisense strand to SEQ ID NO: 1300200
auucacagaggcguuaaau

SEQ ID NO: 1300202 - RNA, 19 nt, Artificial Sequence
  Description of Artificial Sequence: Synthetic oligonucleotide
  Sense strand starting at position 3185 of SEQ ID NO: 1241793
uuuaacgccucugugaauu

SEQ ID NO: 1300203 - RNA, 19 nt, Artificial Sequence
  Description of Artificial Sequence: Synthetic oligonucleotide
  Antisense strand to SEQ ID NO: 1300202
aauucacagaggcguuaaa

SEQ ID NO: 1300204 - RNA, 19 nt, Artificial Sequence
  Description of Artificial Sequence: Synthetic oligonucleotide
  Sense strand starting at position 3253 of SEQ ID NO: 1241793
gcaguugaggcccaugauu

SEQ ID NO: 1300205 - RNA, 19 nt, Artificial Sequence
  Description of Artificial Sequence: Synthetic oligonucleotide
  Antisense strand to SEQ ID NO: 1300204
aaucaugggccucaacugc

SEQ ID NO: 1300206 - RNA, 19 nt, Artificial Sequence
  Description of Artificial Sequence: Synthetic oligonucleotide
  Sense strand starting at position 3272 of SEQ ID NO: 1241793
uucugaacuguacgcaaua

SEQ ID NO: 1300207 - RNA, 19 nt, Artificial Sequence
  Description of Artificial Sequence: Synthetic oligonucleotide
  Antisense strand to SEQ ID NO: 1300206
uauugcguacaguucagaa

SEQ ID NO: 1300208 - RNA, 19 nt, Artificial Sequence
  Description of Artificial Sequence: Synthetic oligonucleotide
  Sense strand starting at position 3378 of SEQ ID NO: 1241793
gcuaaaucgcauuggacuu

SEQ ID NO: 1300209 - RNA, 19 nt, Artificial Sequence
  Description of Artificial Sequence: Synthetic oligonucleotide
  Antisense strand to SEQ ID NO: 1300208
aaguccaaugcgauuuagc

SEQ ID NO: 1300210 - RNA, 19 nt, Artificial Sequence
  Description of Artificial Sequence: Synthetic oligonucleotide
  Sense strand starting at position 3384 of SEQ ID NO: 1241793
ucgcauuggacuugacuuu

SEQ ID NO: 1300211 - RNA, 19 nt, Artificial Sequence
  Description of Artificial Sequence: Synthetic oligonucleotide
  Antisense strand to SEQ ID NO: 1300210
aaagucaaguccaaugcga

SEQ ID NO: 1300212 - RNA, 19 nt, Artificial Sequence
  Description of Artificial Sequence: Synthetic oligonucleotide
  Sense strand starting at position 3402 of SEQ ID NO: 1241793
uugagaauauuaguguaag

SEQ ID NO: 1300213 - RNA, 19 nt, Artificial Sequence
  Description of Artificial Sequence: Synthetic oligonucleotide
  Antisense strand to SEQ ID NO: 1300212
cuuacacuaauauucucaa

SEQ ID NO: 1300214 - RNA, 19 nt, Artificial Sequence
  Description of Artificial Sequence: Synthetic oligonucleotide
  Sense strand starting at position 3412 of SEQ ID NO: 1241793
uaguguaaggagugacaaa

SEQ ID NO: 1300215 - RNA, 19 nt, Artificial Sequence
  Description of Artificial Sequence: Synthetic oligonucleotide
  Antisense strand to SEQ ID NO: 1300214
uuugucacuccuuacacua

SEQ ID NO: 1300216 - RNA, 19 nt, Artificial Sequence
  Description of Artificial Sequence: Synthetic oligonucleotide
  Sense strand starting at position 3512 of SEQ ID NO: 1241793
gucaaaucuguugaauuaa

SEQ ID NO: 1300217 - RNA, 19 nt, Artificial Sequence
  Description of Artificial Sequence: Synthetic oligonucleotide
  Antisense strand to SEQ ID NO: 1300216
uuaauucaacagauuugac

SEQ ID NO: 1300218 - RNA, 19 nt, Artificial Sequence
  Description of Artificial Sequence: Synthetic oligonucleotide
  Sense strand starting at position 3530 of SEQ ID NO: 1241793
agucaucucuggcuuuaua

SEQ ID NO: 1300219 - RNA, 19 nt, Artificial Sequence
  Description of Artificial Sequence: Synthetic oligonucleotide
  Antisense strand to SEQ ID NO: 1300218
uauaaagccagagaugacu

SEQ ID NO: 1300220 - RNA, 19 nt, Artificial Sequence
  Description of Artificial Sequence: Synthetic oligonucleotide
  Sense strand starting at position 3538 of SEQ ID NO: 1241793
cuggcuuuauagcuuauaa

SEQ ID NO: 1300221 - RNA, 19 nt, Artificial Sequence
  Description of Artificial Sequence: Synthetic oligonucleotide
  Antisense strand to SEQ ID NO: 1300220
uuauaagcuauaaagccag

SEQ ID NO: 1300222 - RNA, 19 nt, Artificial Sequence
  Description of Artificial Sequence: Synthetic oligonucleotide
  Sense strand starting at position 3540 of SEQ ID NO: 1241793
ggcuuuauagcuuauaaac

SEQ ID NO: 1300223 - RNA, 19 nt, Artificial Sequence
  Description of Artificial Sequence: Synthetic oligonucleotide
  Antisense strand to SEQ ID NO: 1300222
guuuauaagcuauaaagcc

SEQ ID NO: 1300224 - RNA, 19 nt, Artificial Sequence
  Description of Artificial Sequence: Synthetic oligonucleotide
  Sense strand starting at position 3586 of SEQ ID NO: 1241793
ccaguugugggagaacuuu

SEQ ID NO: 1300225 - RNA, 19 nt, Artificial Sequence
  Description of Artificial Sequence: Synthetic oligonucleotide
  Antisense strand to SEQ ID NO: 1300224
aaaguucucccacaacugg

SEQ ID NO: 1300226 - RNA, 19 nt, Artificial Sequence
  Description of Artificial Sequence: Synthetic oligonucleotide
  Sense strand starting at position 3659 of SEQ ID NO: 1241793
gggaaauggcacugcaagu

SEQ ID NO: 1300227 - RNA, 19 nt, Artificial Sequence
  Description of Artificial Sequence: Synthetic oligonucleotide
  Antisense strand to SEQ ID NO: 1300226
acuugcagugccauuuccc

SEQ ID NO: 1300228 - RNA, 19 nt, Artificial Sequence
  Description of Artificial Sequence: Synthetic oligonucleotide
  Sense strand starting at position 3738 of SEQ ID NO: 1241793
uaagcauccugguuucuga

SEQ ID NO: 1300229 - RNA, 19 nt, Artificial Sequence
  Description of Artificial Sequence: Synthetic oligonucleotide
  Antisense strand to SEQ ID NO: 1300228
ucagaaaccaggaugcuua

SEQ ID NO: 1300230 - RNA, 19 nt, Artificial Sequence
  Description of Artificial Sequence: Synthetic oligonucleotide
  Sense strand starting at position 3747 of SEQ ID NO: 1241793
ugguuucugagcuguagau

SEQ ID NO: 1300231 - RNA, 19 nt, Artificial Sequence
  Description of Artificial Sequence: Synthetic oligonucleotide
  Antisense strand to SEQ ID NO: 1300230
aucuacagcucagaaacca

SEQ ID NO: 1300232 - RNA, 19 nt, Artificial Sequence
  Description of Artificial Sequence: Synthetic oligonucleotide
  Sense strand starting at position 3749 of SEQ ID NO: 1241793
guuucugagcuguagaucu

SEQ ID NO: 1300233 - RNA, 19 nt, Artificial Sequence
  Description of Artificial Sequence: Synthetic oligonucleotide
  Antisense strand to SEQ ID NO: 1300232
agaucuacagcucagaaac

SEQ ID NO: 1300234 - RNA, 19 nt, Artificial Sequence
  Description of Artificial Sequence: Synthetic oligonucleotide
  Sense strand starting at position 3757 of SEQ ID NO: 1241793
gcuguagaucuguaggugu

SEQ ID NO: 1300235 - RNA, 19 nt, Artificial Sequence
  Description of Artificial Sequence: Synthetic oligonucleotide
  Antisense strand to SEQ ID NO: 1300234
acaccuacagaucuacagc

SEQ ID NO: 1300236 - RNA, 19 nt, Artificial Sequence
  Description of Artificial Sequence: Synthetic oligonucleotide
  Sense strand starting at position 3760 of SEQ ID NO: 1241793
guagaucuguagguguuca

SEQ ID NO: 1300237 - RNA, 19 nt, Artificial Sequence
  Description of Artificial Sequence: Synthetic oligonucleotide
  Antisense strand to SEQ ID NO: 1300236
ugaacaccuacagaucuac

SEQ ID NO: 1300238 - RNA, 19 nt, Artificial Sequence
  Description of Artificial Sequence: Synthetic oligonucleotide
  Sense strand starting at position 3805 of SEQ ID NO: 1241793
auugaaagcuuugaggaaa

SEQ ID NO: 1300239 - RNA, 19 nt, Artificial Sequence
  Description of Artificial Sequence: Synthetic oligonucleotide
  Antisense strand to SEQ ID NO: 1300238
uuuccucaaagcuuucaau

SEQ ID NO: 1300240 - RNA, 19 nt, Artificial Sequence
  Description of Artificial Sequence: Synthetic oligonucleotide
  Sense strand starting at position 3865 of SEQ ID NO: 1241793
ccuaguaccugcuccagaa

SEQ ID NO: 1300241 - RNA, 19 nt, Artificial Sequence
  Description of Artificial Sequence: Synthetic oligonucleotide
  Antisense strand to SEQ ID NO: 1300240
uucuggagcagguacuagg

SEQ ID NO: 1300242 - RNA, 19 nt, Artificial Sequence
  Description of Artificial Sequence: Synthetic oligonucleotide
  Sense strand starting at position 3917 of SEQ ID NO: 1241793
ccuguuaggccuuaaguuu

SEQ ID NO: 1300243 - RNA, 19 nt, Artificial Sequence
  Description of Artificial Sequence: Synthetic oligonucleotide
  Antisense strand to SEQ ID NO: 1300242
aaacuuaaggccuaacagg

SEQ ID NO: 1300244 - RNA, 19 nt, Artificial Sequence
  Description of Artificial Sequence: Synthetic oligonucleotide
  Sense strand starting at position 3963 of SEQ ID NO: 1241793
acuguuuaacgguggagua

SEQ ID NO: 1300245 - RNA, 19 nt, Artificial Sequence
  Description of Artificial Sequence: Synthetic oligonucleotide
  Antisense strand to SEQ ID NO: 1300244
uacuccaccguuaaacagu

SEQ ID NO: 1300246 - RNA, 19 nt, Artificial Sequence
  Description of Artificial Sequence: Synthetic oligonucleotide
  Sense strand starting at position 3964 of SEQ ID NO: 1241793
cuguuuaacgguggaguau

SEQ ID NO: 1300247 - RNA, 19 nt, Artificial Sequence
  Description of Artificial Sequence: Synthetic oligonucleotide
  Antisense strand to SEQ ID NO: 1300246
auacuccaccguuaaacag

SEQ ID NO: 1300248 - RNA, 19 nt, Artificial Sequence
  Description of Artificial Sequence: Synthetic oligonucleotide
  Sense strand starting at position 3978 of SEQ ID NO: 1241793
aguaucuuaugacuagaca

SEQ ID NO: 1300249 - RNA, 19 nt, Artificial Sequence
  Description of Artificial Sequence: Synthetic oligonucleotide
  Antisense strand to SEQ ID NO: 1300248
ugucuagucauaagauacu

SEQ ID NO: 1300250 - RNA, 19 nt, Artificial Sequence
  Description of Artificial Sequence: Synthetic oligonucleotide
  Sense strand starting at position 324 of SEQ ID NO: 1241794
ccaguuuccuguuucuuua

SEQ ID NO: 1300251 - RNA, 19 nt, Artificial Sequence
  Description of Artificial Sequence: Synthetic oligonucleotide
  Antisense strand to SEQ ID NO: 1300250
uaaagaaacaggaaacugg

SEQ ID NO: 1300252 - RNA, 19 nt, Artificial Sequence
  Description of Artificial Sequence: Synthetic oligonucleotide
  Sense strand starting at position 327 of SEQ ID NO: 1241794
guuuccuguuucuuuaaga

SEQ ID NO: 1300253 - RNA, 19 nt, Artificial Sequence
  Description of Artificial Sequence: Synthetic oligonucleotide
  Antisense strand to SEQ ID NO: 1300252
ucuuaaagaaacaggaaac

SEQ ID NO: 1300254 - RNA, 19 nt, Artificial Sequence
  Description of Artificial Sequence: Synthetic oligonucleotide
  Sense strand starting at position 328 of SEQ ID NO: 1241794
uuuccuguuucuuuaagag

SEQ ID NO: 1300255 - RNA, 19 nt, Artificial Sequence
  Description of Artificial Sequence: Synthetic oligonucleotide
  Antisense strand to SEQ ID NO: 1300254
cucuuaaagaaacaggaaa

SEQ ID NO: 1300256 - RNA, 19 nt, Artificial Sequence
  Description of Artificial Sequence: Synthetic oligonucleotide
  Sense strand starting at position 365 of SEQ ID NO: 1241794
cucccaaagucauccaguu

SEQ ID NO: 1300257 - RNA, 19 nt, Artificial Sequence
  Description of Artificial Sequence: Synthetic oligonucleotide
  Antisense strand to SEQ ID NO: 1300256
aacuggaugacuuugggag

SEQ ID NO: 1300258 - RNA, 19 nt, Artificial Sequence
  Description of Artificial Sequence: Synthetic oligonucleotide
  Sense strand starting at position 373 of SEQ ID NO: 1241794
gucauccaguuauuauuga

SEQ ID NO: 1300259 - RNA, 19 nt, Artificial Sequence
  Description of Artificial Sequence: Synthetic oligonucleotide
  Antisense strand to SEQ ID NO: 1300258
ucaauaauaacuggaugac

SEQ ID NO: 1300260 - RNA, 19 nt, Artificial Sequence
  Description of Artificial Sequence: Synthetic oligonucleotide
  Sense strand starting at position 399 of SEQ ID NO: 1241794
uuagauauccagcaaguga

SEQ ID NO: 1300261 - RNA, 19 nt, Artificial Sequence
  Description of Artificial Sequence: Synthetic oligonucleotide
  Antisense strand to SEQ ID NO: 1300260
ucacuugcuggauaucuaa

SEQ ID NO: 1300262 - RNA, 19 nt, Artificial Sequence
  Description of Artificial Sequence: Synthetic oligonucleotide
  Sense strand starting at position 434 of SEQ ID NO: 1241794
ugagguucugagcaaaugu

SEQ ID NO: 1300263 - RNA, 19 nt, Artificial Sequence
  Description of Artificial Sequence: Synthetic oligonucleotide
  Antisense strand to SEQ ID NO: 1300262
acauuugcucagaaccuca

SEQ ID NO: 1300264 - RNA, 19 nt, Artificial Sequence
  Description of Artificial Sequence: Synthetic oligonucleotide
  Sense strand starting at position 445 of SEQ ID NO: 1241794
gcaaauguuggccagccau

SEQ ID NO: 1300265 - RNA, 19 nt, Artificial Sequence
  Description of Artificial Sequence: Synthetic oligonucleotide
  Antisense strand to SEQ ID NO: 1300264
auggcuggccaacauuugc

SEQ ID NO: 1300266 - RNA, 19 nt, Artificial Sequence
  Description of Artificial Sequence: Synthetic oligonucleotide
  Sense strand starting at position 497 of SEQ ID NO: 1241794
cccguuucuccacaucaua

SEQ ID NO: 1300267 - RNA, 19 nt, Artificial Sequence
  Description of Artificial Sequence: Synthetic oligonucleotide
  Antisense strand to SEQ ID NO: 1300266
uaugauguggagaaacggg

SEQ ID NO: 1300268 - RNA, 19 nt, Artificial Sequence
  Description of Artificial Sequence: Synthetic oligonucleotide
  Sense strand starting at position 588 of SEQ ID NO: 1241794
uuaugagaccugcauccuu

SEQ ID NO: 1300269 - RNA, 19 nt, Artificial Sequence
  Description of Artificial Sequence: Synthetic oligonucleotide
  Antisense strand to SEQ ID NO: 1300268
aaggaugcaggucucauaa

SEQ ID NO: 1300270 - RNA, 19 nt, Artificial Sequence
  Description of Artificial Sequence: Synthetic oligonucleotide
  Sense strand starting at position 631 of SEQ ID NO: 1241794
gauccuacguugccucaaa

SEQ ID NO: 1300271 - RNA, 19 nt, Artificial Sequence
  Description of Artificial Sequence: Synthetic oligonucleotide
  Antisense strand to SEQ ID NO: 1300270
uuugaggcaacguaggauc

SEQ ID NO: 1300272 - RNA, 19 nt, Artificial Sequence
  Description of Artificial Sequence: Synthetic oligonucleotide
  Sense strand starting at position 671 of SEQ ID NO: 1241794
guucgagugucaaagggaa

SEQ ID NO: 1300273 - RNA, 19 nt, Artificial Sequence
  Description of Artificial Sequence: Synthetic oligonucleotide
  Antisense strand to SEQ ID NO: 1300272
uucccuuugacacucgaac

SEQ ID NO: 1300274 - RNA, 19 nt, Artificial Sequence
  Description of Artificial Sequence: Synthetic oligonucleotide
  Sense strand starting at position 707 of SEQ ID NO: 1241794
auacauaccguauggaaau

SEQ ID NO: 1300275 - RNA, 19 nt, Artificial Sequence
  Description of Artificial Sequence: Synthetic oligonucleotide
  Antisense strand to SEQ ID NO: 1300274
auuuccauacgguauguau

SEQ ID NO: 1300276 - RNA, 19 nt, Artificial Sequence
  Description of Artificial Sequence: Synthetic oligonucleotide
  Sense strand starting at position 739 of SEQ ID NO: 1241794
ugaagaaucugcgugcacu

SEQ ID NO: 1300277 - RNA, 19 nt, Artificial Sequence
  Description of Artificial Sequence: Synthetic oligonucleotide
  Antisense strand to SEQ ID NO: 1300276
agugcacgcagauucuuca

SEQ ID NO: 1300278 - RNA, 19 nt, Artificial Sequence
  Description of Artificial Sequence: Synthetic oligonucleotide
  Sense strand starting at position 740 of SEQ ID NO: 1241794
gaagaaucugcgugcacug

SEQ ID NO: 1300279 - RNA, 19 nt, Artificial Sequence
  Description of Artificial Sequence: Synthetic oligonucleotide
  Antisense strand to SEQ ID NO: 1300278
cagugcacgcagauucuuc

SEQ ID NO: 1300280 - RNA, 19 nt, Artificial Sequence
  Description of Artificial Sequence: Synthetic oligonucleotide
  Sense strand starting at position 776 of SEQ ID NO: 1241794
uuaagaacguuaucacaca

SEQ ID NO: 1300281 - RNA, 19 nt, Artificial Sequence
  Description of Artificial Sequence: Synthetic oligonucleotide
  Antisense strand to SEQ ID NO: 1300280
ugugugauaacguucuuaa

SEQ ID NO: 1300282 - RNA, 19 nt, Artificial Sequence
  Description of Artificial Sequence: Synthetic oligonucleotide
  Sense strand starting at position 839 of SEQ ID NO: 1241794
cuuccugauucgcccaauu

SEQ ID NO: 1300283 - RNA, 19 nt, Artificial Sequence
  Description of Artificial Sequence: Synthetic oligonucleotide
  Antisense strand to SEQ ID NO: 1300282
aauugggcgaaucaggaag

SEQ ID NO: 1300284 - RNA, 19 nt, Artificial Sequence
  Description of Artificial Sequence: Synthetic oligonucleotide
  Sense strand starting at position 949 of SEQ ID NO: 1241794
cuacauacuuuaguaguaa

SEQ ID NO: 1300285 - RNA, 19 nt, Artificial Sequence
  Description of Artificial Sequence: Synthetic oligonucleotide
  Antisense strand to SEQ ID NO: 1300284
uuacuacuaaaguauguag

SEQ ID NO: 1300286 - RNA, 19 nt, Artificial Sequence
  Description of Artificial Sequence: Synthetic oligonucleotide
  Sense strand starting at position 1248 of SEQ ID NO: 1241794
gcagcuguaaguugagaga

SEQ ID NO: 1300287 - RNA, 19 nt, Artificial Sequence
  Description of Artificial Sequence: Synthetic oligonucleotide
  Antisense strand to SEQ ID NO: 1300286
ucucucaacuuacagcugc

SEQ ID NO: 1300288 - RNA, 19 nt, Artificial Sequence
  Description of Artificial Sequence: Synthetic oligonucleotide
  Sense strand starting at position 1270 of SEQ ID NO: 1241794
gggcucuaggcacgucaau

SEQ ID NO: 1300289 - RNA, 19 nt, Artificial Sequence
  Description of Artificial Sequence: Synthetic oligonucleotide
  Antisense strand to SEQ ID NO: 1300288
auugacgugccuagagccc

SEQ ID NO: 1300290 - RNA, 19 nt, Artificial Sequence
  Description of Artificial Sequence: Synthetic oligonucleotide
  Sense strand starting at position 1369 of SEQ ID NO: 1241794
guaacuaauuugggaacua

SEQ ID NO: 1300291 - RNA, 19 nt, Artificial Sequence
  Description of Artificial Sequence: Synthetic oligonucleotide
  Antisense strand to SEQ ID NO: 1300290
uaguucccaaauuaguuac

SEQ ID NO: 1300292 - RNA, 19 nt, Artificial Sequence
  Description of Artificial Sequence: Synthetic oligonucleotide
  Sense strand starting at position 1586 of SEQ ID NO: 1241794
ggccaaaguugcgcaaaua

SEQ ID NO: 1300293 - RNA, 19 nt, Artificial Sequence
  Description of Artificial Sequence: Synthetic oligonucleotide
  Antisense strand to SEQ ID NO: 1300292
uauuugcgcaacuuuggcc

SEQ ID NO: 1300294 - RNA, 19 nt, Artificial Sequence
  Description of Artificial Sequence: Synthetic oligonucleotide
  Sense strand starting at position 2577 of SEQ ID NO: 1241794
caggcuugucccuaugcuu

SEQ ID NO: 1300295 - RNA, 19 nt, Artificial Sequence
  Description of Artificial Sequence: Synthetic oligonucleotide
  Antisense strand to SEQ ID NO: 1300294
aagcauagggacaagccug

SEQ ID NO: 1300296 - RNA, 19 nt, Artificial Sequence
  Description of Artificial Sequence: Synthetic oligonucleotide
  Sense strand starting at position 3048 of SEQ ID NO: 1241794
guccgauugagaugucagg

SEQ ID NO: 1300297 - RNA, 19 nt, Artificial Sequence
  Description of Artificial Sequence: Synthetic oligonucleotide
  Antisense strand to SEQ ID NO: 1300296
ccugacaucucaaucggac

SEQ ID NO: 1300298 - RNA, 19 nt, Artificial Sequence
  Description of Artificial Sequence: Synthetic oligonucleotide
  Sense strand starting at position 3347 of SEQ ID NO: 1241794
uugugauuaccucguuucu

SEQ ID NO: 1300299 - RNA, 19 nt, Artificial Sequence
  Description of Artificial Sequence: Synthetic oligonucleotide
  Antisense strand to SEQ ID NO: 1300298
agaaacgagguaaucacaa

SEQ ID NO: 1300300 - RNA, 19 nt, Artificial Sequence
  Description of Artificial Sequence: Synthetic oligonucleotide
  Sense strand starting at position 3349 of SEQ ID NO: 1241794
gugauuaccucguuucuag

SEQ ID NO: 1300301 - RNA, 19 nt, Artificial Sequence
  Description of Artificial Sequence: Synthetic oligonucleotide
  Antisense strand to SEQ ID NO: 1300300
cuagaaacgagguaaucac

SEQ ID NO: 1300302 - RNA, 19 nt, Artificial Sequence
  Description of Artificial Sequence: Synthetic oligonucleotide
  Sense strand starting at position 3405 of SEQ ID NO: 1241794
auguuuaucuuguucuaag

SEQ ID NO: 1300303 - RNA, 19 nt, Artificial Sequence
  Description of Artificial Sequence: Synthetic oligonucleotide
  Antisense strand to SEQ ID NO: 1300302
cuuagaacaagauaaacau

SEQ ID NO: 1300304 - RNA, 19 nt, Artificial Sequence
  Description of Artificial Sequence: Synthetic oligonucleotide
  Sense strand starting at position 3406 of SEQ ID NO: 1241794
uguuuaucuuguucuaagc

SEQ ID NO: 1300305 - RNA, 19 nt, Artificial Sequence
  Description of Artificial Sequence: Synthetic oligonucleotide
  Antisense strand to SEQ ID NO: 1300304
gcuuagaacaagauaaaca

SEQ ID NO: 1300306 - RNA, 19 nt, Artificial Sequence
  Description of Artificial Sequence: Synthetic oligonucleotide
  Sense strand starting at position 3478 of SEQ ID NO: 1241794
cacucaguauuuggaguaa

SEQ ID NO: 1300307 - RNA, 19 nt, Artificial Sequence
  Description of Artificial Sequence: Synthetic oligonucleotide
  Antisense strand to SEQ ID NO: 1300306
uuacuccaaauacugagug

SEQ ID NO: 1300308 - RNA, 19 nt, Artificial Sequence
  Description of Artificial Sequence: Synthetic oligonucleotide
  Sense strand starting at position 3490 of SEQ ID NO: 1241794
ggaguaaucaguuguuacc

SEQ ID NO: 1300309 - RNA, 19 nt, Artificial Sequence
  Description of Artificial Sequence: Synthetic oligonucleotide
  Antisense strand to SEQ ID NO: 1300308
gguaacaacugauuacucc

SEQ ID NO: 1300310 - RNA, 19 nt, Artificial Sequence
  Description of Artificial Sequence: Synthetic oligonucleotide
  Sense strand starting at position 3610 of SEQ ID NO: 1241794
ggcauucuuucucuugaga

SEQ ID NO: 1300311 - RNA, 19 nt, Artificial Sequence
  Description of Artificial Sequence: Synthetic oligonucleotide
  Antisense strand to SEQ ID NO: 1300310
ucucaagagaaagaaugcc

SEQ ID NO: 1300312 - RNA, 19 nt, Artificial Sequence
  Description of Artificial Sequence: Synthetic oligonucleotide
  Sense strand starting at position 3644 of SEQ ID NO: 1241794
agcuguugauccucucaca

SEQ ID NO: 1300313 - RNA, 19 nt, Artificial Sequence
  Description of Artificial Sequence: Synthetic oligonucleotide
  Antisense strand to SEQ ID NO: 1300312
ugugagaggaucaacagcu

SEQ ID NO: 1300314 - RNA, 19 nt, Artificial Sequence
  Description of Artificial Sequence: Synthetic oligonucleotide
  Sense strand starting at position 3658 of SEQ ID NO: 1241794
ucacaagauucugucaugu

SEQ ID NO: 1300315 - RNA, 19 nt, Artificial Sequence
  Description of Artificial Sequence: Synthetic oligonucleotide
  Antisense strand to SEQ ID NO: 1300314
acaugacagaaucuuguga

SEQ ID NO: 1300316 - RNA, 19 nt, Artificial Sequence
  Description of Artificial Sequence: Synthetic oligonucleotide
  Sense strand starting at position 3667 of SEQ ID NO: 1241794
ucugucauguauguaaagu

SEQ ID NO: 1300317 - RNA, 19 nt, Artificial Sequence
  Description of Artificial Sequence: Synthetic oligonucleotide
  Antisense strand to SEQ ID NO: 1300316
acuuuacauacaugacaga

SEQ ID NO: 1300318 - RNA, 19 nt, Artificial Sequence
  Description of Artificial Sequence: Synthetic oligonucleotide
  Sense strand starting at position 3668 of SEQ ID NO: 1241794
cugucauguauguaaagua

SEQ ID NO: 1300319 - RNA, 19 nt, Artificial Sequence
  Description of Artificial Sequence: Synthetic oligonucleotide
  Antisense strand to SEQ ID NO: 1300318
uacuuuacauacaugacag

SEQ ID NO: 1300320 - RNA, 19 nt, Artificial Sequence
  Description of Artificial Sequence: Synthetic oligonucleotide
  Sense strand starting at position 3772 of SEQ ID NO: 1241794
gccugaagagcgugaugua

SEQ ID NO: 1300321 - RNA, 19 nt, Artificial Sequence
  Description of Artificial Sequence: Synthetic oligonucleotide
  Antisense strand to SEQ ID NO: 1300320
uacaucacgcucuucaggc

SEQ ID NO: 1300322 - RNA, 19 nt, Artificial Sequence
  Description of Artificial Sequence: Synthetic oligonucleotide
  Sense strand starting at position 3833 of SEQ ID NO: 1241794
uccagacaccuuggugauu

SEQ ID NO: 1300323 - RNA, 19 nt, Artificial Sequence
  Description of Artificial Sequence: Synthetic oligonucleotide
  Antisense strand to SEQ ID NO: 1300322
aaucaccaaggugucugga

SEQ ID NO: 1300324 - RNA, 19 nt, Artificial Sequence
  Description of Artificial Sequence: Synthetic oligonucleotide
  Sense strand starting at position 3906 of SEQ ID NO: 1241794
gaauguauccggcggaggu

SEQ ID NO: 1300325 - RNA, 19 nt, Artificial Sequence
  Description of Artificial Sequence: Synthetic oligonucleotide
  Antisense strand to SEQ ID NO: 1300324
accuccgccggauacauuc

SEQ ID NO: 1300326 - RNA, 19 nt, Artificial Sequence
  Description of Artificial Sequence: Synthetic oligonucleotide
  Sense strand starting at position 3916 of SEQ ID NO: 1241794
ggcggaggucauuauauau

SEQ ID NO: 1300327 - RNA, 19 nt, Artificial Sequence
  Description of Artificial Sequence: Synthetic oligonucleotide
  Antisense strand to SEQ ID NO: 1300326
auauauaaugaccuccgcc

SEQ ID NO: 1300328 - RNA, 19 nt, Artificial Sequence
  Description of Artificial Sequence: Synthetic oligonucleotide
  Sense strand starting at position 3929 of SEQ ID NO: 1241794
auauauacuuggcuugauu

SEQ ID NO: 1300329 - RNA, 19 nt, Artificial Sequence
  Description of Artificial Sequence: Synthetic oligonucleotide
  Antisense strand to SEQ ID NO: 1300328
aaucaagccaaguauauau

SEQ ID NO: 1300330 - RNA, 19 nt, Artificial Sequence
  Description of Artificial Sequence: Synthetic oligonucleotide
  Sense strand starting at position 154 of SEQ ID NO: 1241795
uugagagauaagcgaucua

SEQ ID NO: 1300331 - RNA, 19 nt, Artificial Sequence
  Description of Artificial Sequence: Synthetic oligonucleotide
  Antisense strand to SEQ ID NO: 1300330
uagaucgcuuaucucucaa

SEQ ID NO: 1300332 - RNA, 19 nt, Artificial Sequence
  Description of Artificial Sequence: Synthetic oligonucleotide
  Sense strand starting at position 159 of SEQ ID NO: 1241795
agauaagcgaucuaggcuu

SEQ ID NO: 1300333 - RNA, 19 nt, Artificial Sequence
  Description of Artificial Sequence: Synthetic oligonucleotide
  Antisense strand to SEQ ID NO: 1300332
aagccuagaucgcuuaucu

SEQ ID NO: 1300334 - RNA, 19 nt, Artificial Sequence
  Description of Artificial Sequence: Synthetic oligonucleotide
  Sense strand starting at position 161 of SEQ ID NO: 1241795
auaagcgaucuaggcuuaa

SEQ ID NO: 1300335 - RNA, 19 nt, Artificial Sequence
  Description of Artificial Sequence: Synthetic oligonucleotide
  Antisense strand to SEQ ID NO: 1300334
uuaagccuagaucgcuuau

SEQ ID NO: 1300336 - RNA, 19 nt, Artificial Sequence
  Description of Artificial Sequence: Synthetic oligonucleotide
  Sense strand starting at position 165 of SEQ ID NO: 1241795
gcgaucuaggcuuaaauuc

SEQ ID NO: 1300337 - RNA, 19 nt, Artificial Sequence
  Description of Artificial Sequence: Synthetic oligonucleotide
  Antisense strand to SEQ ID NO: 1300336
gaauuuaagccuagaucgc

SEQ ID NO: 1300338 - RNA, 19 nt, Artificial Sequence
  Description of Artificial Sequence: Synthetic oligonucleotide
  Sense strand starting at position 234 of SEQ ID NO: 1241795
aggcuuguaacaugaagac

SEQ ID NO: 1300339 - RNA, 19 nt, Artificial Sequence
  Description of Artificial Sequence: Synthetic oligonucleotide
  Antisense strand to SEQ ID NO: 1300338
gucuucauguuacaagccu

SEQ ID NO: 1300340 - RNA, 19 nt, Artificial Sequence
  Description of Artificial Sequence: Synthetic oligonucleotide
  Sense strand starting at position 305 of SEQ ID NO: 1241795
guaugauacuuggcccacu

SEQ ID NO: 1300341 - RNA, 19 nt, Artificial Sequence
  Description of Artificial Sequence: Synthetic oligonucleotide
  Antisense strand to SEQ ID NO: 1300340
agugggccaaguaucauac

SEQ ID NO: 1300342 - RNA, 19 nt, Artificial Sequence
  Description of Artificial Sequence: Synthetic oligonucleotide
  Sense strand starting at position 508 of SEQ ID NO: 1241795
gucauaucccaucaguguu

SEQ ID NO: 1300343 - RNA, 19 nt, Artificial Sequence
  Description of Artificial Sequence: Synthetic oligonucleotide
  Antisense strand to SEQ ID NO: 1300342
aacacugaugggauaugac

SEQ ID NO: 1300344 - RNA, 19 nt, Artificial Sequence
  Description of Artificial Sequence: Synthetic oligonucleotide
  Sense strand starting at position 523 of SEQ ID NO: 1241795
uguucuguucccuauuaag

SEQ ID NO: 1300345 - RNA, 19 nt, Artificial Sequence
  Description of Artificial Sequence: Synthetic oligonucleotide
  Antisense strand to SEQ ID NO: 1300344
cuuaauagggaacagaaca

SEQ ID NO: 1300346 - RNA, 19 nt, Artificial Sequence
  Description of Artificial Sequence: Synthetic oligonucleotide
  Sense strand starting at position 534 of SEQ ID NO: 1241795
cuauuaaggaguugauguc

SEQ ID NO: 1300347 - RNA, 19 nt, Artificial Sequence
  Description of Artificial Sequence: Synthetic oligonucleotide
  Antisense strand to SEQ ID NO: 1300346
gacaucaacuccuuaauag

SEQ ID NO: 1300348 - RNA, 19 nt, Artificial Sequence
  Description of Artificial Sequence: Synthetic oligonucleotide
  Sense strand starting at position 540 of SEQ ID NO: 1241795
aggaguugauguccgauaa

SEQ ID NO: 1300349 - RNA, 19 nt, Artificial Sequence
  Description of Artificial Sequence: Synthetic oligonucleotide
  Antisense strand to SEQ ID NO: 1300348
uuaucggacaucaacuccu

SEQ ID NO: 1300350 - RNA, 19 nt, Artificial Sequence
  Description of Artificial Sequence: Synthetic oligonucleotide
  Sense strand starting at position 541 of SEQ ID NO: 1241795
ggaguugauguccgauaac

SEQ ID NO: 1300351 - RNA, 19 nt, Artificial Sequence
  Description of Artificial Sequence: Synthetic oligonucleotide
  Antisense strand to SEQ ID NO: 1300350
guuaucggacaucaacucc

SEQ ID NO: 1300352 - RNA, 19 nt, Artificial Sequence
  Description of Artificial Sequence: Synthetic oligonucleotide
  Sense strand starting at position 544 of SEQ ID NO: 1241795
guugauguccgauaacgga

SEQ ID NO: 1300353 - RNA, 19 nt, Artificial Sequence
  Description of Artificial Sequence: Synthetic oligonucleotide
  Antisense strand to SEQ ID NO: 1300352
uccguuaucggacaucaac

SEQ ID NO: 1300354 - RNA, 19 nt, Artificial Sequence
  Description of Artificial Sequence: Synthetic oligonucleotide
  Sense strand starting at position 607 of SEQ ID NO: 1241795
agacuuugaugccuuaaca

SEQ ID NO: 1300355 - RNA, 19 nt, Artificial Sequence
  Description of Artificial Sequence: Synthetic oligonucleotide
  Antisense strand to SEQ ID NO: 1300354
uguuaaggcaucaaagucu

SEQ ID NO: 1300356 - RNA, 19 nt, Artificial Sequence
  Description of Artificial Sequence: Synthetic oligonucleotide
  Sense strand starting at position 813 of SEQ ID NO: 1241795
ugaccuccgccggauacau

SEQ ID NO: 1300357 - RNA, 19 nt, Artificial Sequence
  Description of Artificial Sequence: Synthetic oligonucleotide
  Antisense strand to SEQ ID NO: 1300356
auguauccggcggagguca

SEQ ID NO: 1300358 - RNA, 19 nt, Artificial Sequence
  Description of Artificial Sequence: Synthetic oligonucleotide
  Sense strand starting at position 909 of SEQ ID NO: 1241795
cuuggagucuuagcuauca

SEQ ID NO: 1300359 - RNA, 19 nt, Artificial Sequence
  Description of Artificial Sequence: Synthetic oligonucleotide
  Antisense strand to SEQ ID NO: 1300358
ugauagcuaagacuccaag

SEQ ID NO: 1300360 - RNA, 19 nt, Artificial Sequence
  Description of Artificial Sequence: Synthetic oligonucleotide
  Sense strand starting at position 911 of SEQ ID NO: 1241795
uggagucuuagcuaucaag

SEQ ID NO: 1300361 - RNA, 19 nt, Artificial Sequence
  Description of Artificial Sequence: Synthetic oligonucleotide
  Antisense strand to SEQ ID NO: 1300360
cuugauagcuaagacucca

SEQ ID NO: 1300362 - RNA, 19 nt, Artificial Sequence
  Description of Artificial Sequence: Synthetic oligonucleotide
  Sense strand starting at position 1044 of SEQ ID NO: 1241795
uccaaaguguacuuuacau

SEQ ID NO: 1300363 - RNA, 19 nt, Artificial Sequence
  Description of Artificial Sequence: Synthetic oligonucleotide
  Antisense strand to SEQ ID NO: 1300362
auguaaaguacacuuugga

SEQ ID NO: 1300364 - RNA, 19 nt, Artificial Sequence
  Description of Artificial Sequence: Synthetic oligonucleotide
  Sense strand starting at position 1248 of SEQ ID NO: 1241795
ccaaauacugagugccaga

SEQ ID NO: 1300365 - RNA, 19 nt, Artificial Sequence
  Description of Artificial Sequence: Synthetic oligonucleotide
  Antisense strand to SEQ ID NO: 1300364
ucuggcacucaguauuugg

SEQ ID NO: 1300366 - RNA, 19 nt, Artificial Sequence
  Description of Artificial Sequence: Synthetic oligonucleotide
  Sense strand starting at position 1261 of SEQ ID NO: 1241795
gccagagaagacggugaua

SEQ ID NO: 1300367 - RNA, 19 nt, Artificial Sequence
  Description of Artificial Sequence: Synthetic oligonucleotide
  Antisense strand to SEQ ID NO: 1300366
uaucaccgucuucucuggc

SEQ ID NO: 1300368 - RNA, 19 nt, Artificial Sequence
  Description of Artificial Sequence: Synthetic oligonucleotide
  Sense strand starting at position 1272 of SEQ ID NO: 1241795
cggugauaagaugggucaa

SEQ ID NO: 1300369 - RNA, 19 nt, Artificial Sequence
  Description of Artificial Sequence: Synthetic oligonucleotide
  Antisense strand to SEQ ID NO: 1300368
uugacccaucuuaucaccg

SEQ ID NO: 1300370 - RNA, 19 nt, Artificial Sequence
  Description of Artificial Sequence: Synthetic oligonucleotide
  Sense strand starting at position 1273 of SEQ ID NO: 1241795
ggugauaagaugggucaag

SEQ ID NO: 1300371 - RNA, 19 nt, Artificial Sequence
  Description of Artificial Sequence: Synthetic oligonucleotide
  Antisense strand to SEQ ID NO: 1300370
cuugacccaucuuaucacc

SEQ ID NO: 1300372 - RNA, 19 nt, Artificial Sequence
  Description of Artificial Sequence: Synthetic oligonucleotide
  Sense strand starting at position 1306 of SEQ ID NO: 1241795
accggauaugcuuagaaca

SEQ ID NO: 1300373 - RNA, 19 nt, Artificial Sequence
  Description of Artificial Sequence: Synthetic oligonucleotide
  Antisense strand to SEQ ID NO: 1300372
uguucuaagcauauccggu

SEQ ID NO: 1300374 - RNA, 19 nt, Artificial Sequence
  Description of Artificial Sequence: Synthetic oligonucleotide
  Sense strand starting at position 1361 of SEQ ID NO: 1241795
gucuucuugcccuagaaac

SEQ ID NO: 1300375 - RNA, 19 nt, Artificial Sequence
  Description of Artificial Sequence: Synthetic oligonucleotide
  Antisense strand to SEQ ID NO: 1300374
guuucuagggcaagaagac

SEQ ID NO: 1300376 - RNA, 19 nt, Artificial Sequence
  Description of Artificial Sequence: Synthetic oligonucleotide
  Sense strand starting at position 3108 of SEQ ID NO: 1241795
ccgguaaguauuugccagu

SEQ ID NO: 1300377 - RNA, 19 nt, Artificial Sequence
  Description of Artificial Sequence: Synthetic oligonucleotide
  Antisense strand to SEQ ID NO: 1300376
acuggcaaauacuuaccgg

SEQ ID NO: 1300378 - RNA, 19 nt, Artificial Sequence
  Description of Artificial Sequence: Synthetic oligonucleotide
  Sense strand starting at position 3109 of SEQ ID NO: 1241795
cgguaaguauuugccaguu

SEQ ID NO: 1300379 - RNA, 19 nt, Artificial Sequence
  Description of Artificial Sequence: Synthetic oligonucleotide
  Antisense strand to SEQ ID NO: 1300378
aacuggcaaauacuuaccg

SEQ ID NO: 1300380 - RNA, 19 nt, Artificial Sequence
  Description of Artificial Sequence: Synthetic oligonucleotide
  Sense strand starting at position 3131 of SEQ ID NO: 1241795
gggcuauuugcgcaacuuu

SEQ ID NO: 1300381 - RNA, 19 nt, Artificial Sequence
  Description of Artificial Sequence: Synthetic oligonucleotide
  Antisense strand to SEQ ID NO: 1300380
aaaguugcgcaaauagccc

SEQ ID NO: 1300382 - RNA, 19 nt, Artificial Sequence
  Description of Artificial Sequence: Synthetic oligonucleotide
  Sense strand starting at position 3346 of SEQ ID NO: 1241795
ggagacuaguucccaaauu

SEQ ID NO: 1300383 - RNA, 19 nt, Artificial Sequence
  Description of Artificial Sequence: Synthetic oligonucleotide
  Antisense strand to SEQ ID NO: 1300382
aauuugggaacuagucucc

SEQ ID NO: 1300384 - RNA, 19 nt, Artificial Sequence
  Description of Artificial Sequence: Synthetic oligonucleotide
  Sense strand starting at position 3437 of SEQ ID NO: 1241795
ggagaacccgguugauuga

SEQ ID NO: 1300385 - RNA, 19 nt, Artificial Sequence
  Description of Artificial Sequence: Synthetic oligonucleotide
  Antisense strand to SEQ ID NO: 1300384
ucaaucaaccggguucucc

SEQ ID NO: 1300386 - RNA, 19 nt, Artificial Sequence
  Description of Artificial Sequence: Synthetic oligonucleotide
  Sense strand starting at position 3568 of SEQ ID NO: 1241795
guaagauccgugcaaauuc

SEQ ID NO: 1300387 - RNA, 19 nt, Artificial Sequence
  Description of Artificial Sequence: Synthetic oligonucleotide
  Antisense strand to SEQ ID NO: 1300386
gaauuugcacggaucuuac

SEQ ID NO: 1300388 - RNA, 19 nt, Artificial Sequence
  Description of Artificial Sequence: Synthetic oligonucleotide
  Sense strand starting at position 3649 of SEQ ID NO: 1241795
aaggucugaguuugggaau

SEQ ID NO: 1300389 - RNA, 19 nt, Artificial Sequence
  Description of Artificial Sequence: Synthetic oligonucleotide
  Antisense strand to SEQ ID NO: 1300388
auucccaaacucagaccuu

SEQ ID NO: 1300390 - RNA, 19 nt, Artificial Sequence
  Description of Artificial Sequence: Synthetic oligonucleotide
  Sense strand starting at position 3678 of SEQ ID NO: 1241795
aaagaucuguuucuuggga

SEQ ID NO: 1300391 - RNA, 19 nt, Artificial Sequence
  Description of Artificial Sequence: Synthetic oligonucleotide
  Antisense strand to SEQ ID NO: 1300390
ucccaagaaacagaucuuu

SEQ ID NO: 1300392 - RNA, 19 nt, Artificial Sequence
  Description of Artificial Sequence: Synthetic oligonucleotide
  Sense strand starting at position 3679 of SEQ ID NO: 1241795
aagaucuguuucuugggaa

SEQ ID NO: 1300393 - RNA, 19 nt, Artificial Sequence
  Description of Artificial Sequence: Synthetic oligonucleotide
  Antisense strand to SEQ ID NO: 1300392
uucccaagaaacagaucuu

SEQ ID NO: 1300394 - RNA, 19 nt, Artificial Sequence
  Description of Artificial Sequence: Synthetic oligonucleotide
  Sense strand starting at position 3728 of SEQ ID NO: 1241795
uuacuagaaguucgguaaa

SEQ ID NO: 1300395 - RNA, 19 nt, Artificial Sequence
  Description of Artificial Sequence: Synthetic oligonucleotide
  Antisense strand to SEQ ID NO: 1300394
uuuaccgaacuucuaguaa

SEQ ID NO: 1300396 - RNA, 19 nt, Artificial Sequence
  Description of Artificial Sequence: Synthetic oligonucleotide
  Sense strand starting at position 3730 of SEQ ID NO: 1241795
acuagaaguucgguaaaug

SEQ ID NO: 1300397 - RNA, 19 nt, Artificial Sequence
  Description of Artificial Sequence: Synthetic oligonucleotide
  Antisense strand to SEQ ID NO: 1300396
cauuuaccgaacuucuagu

SEQ ID NO: 1300398 - RNA, 19 nt, Artificial Sequence
  Description of Artificial Sequence: Synthetic oligonucleotide
  Sense strand starting at position 3731 of SEQ ID NO: 1241795
cuagaaguucgguaaaugu

SEQ ID NO: 1300399 - RNA, 19 nt, Artificial Sequence
  Description of Artificial Sequence: Synthetic oligonucleotide
  Antisense strand to SEQ ID NO: 1300398
acauuuaccgaacuucuag

SEQ ID NO: 1300400 - RNA, 19 nt, Artificial Sequence
  Description of Artificial Sequence: Synthetic oligonucleotide
  Sense strand starting at position 3744 of SEQ ID NO: 1241795
aaauguguuggaugcagau

SEQ ID NO: 1300401 - RNA, 19 nt, Artificial Sequence
  Description of Artificial Sequence: Synthetic oligonucleotide
  Antisense strand to SEQ ID NO: 1300400
aucugcauccaacacauuu

SEQ ID NO: 1300402 - RNA, 19 nt, Artificial Sequence
  Description of Artificial Sequence: Synthetic oligonucleotide
  Sense strand starting at position 3877 of SEQ ID NO: 1241795
uucuaaauugggcgaauca

SEQ ID NO: 1300403 - RNA, 19 nt, Artificial Sequence
  Description of Artificial Sequence: Synthetic oligonucleotide
  Antisense strand to SEQ ID NO: 1300402
ugauucgcccaauuuagaa

SEQ ID NO: 1300404 - RNA, 19 nt, Artificial Sequence
  Description of Artificial Sequence: Synthetic oligonucleotide
  Sense strand starting at position 3954 of SEQ ID NO: 1241795
acguucuuaagucgaauuu

SEQ ID NO: 1300405 - RNA, 19 nt, Artificial Sequence
  Description of Artificial Sequence: Synthetic oligonucleotide
  Antisense strand to SEQ ID NO: 1300404
aaauucgacuuaagaacgu

SEQ ID NO: 1300406 - RNA, 19 nt, Artificial Sequence
  Description of Artificial Sequence: Synthetic oligonucleotide
  Sense strand starting at position 3964 of SEQ ID NO: 1241795
gucgaauuucaguguggca

SEQ ID NO: 1300407 - RNA, 19 nt, Artificial Sequence
  Description of Artificial Sequence: Synthetic oligonucleotide
  Antisense strand to SEQ ID NO: 1300406
ugccacacugaaauucgac

SEQ ID NO: 1300408 - RNA, 19 nt, Artificial Sequence
  Description of Artificial Sequence: Synthetic oligonucleotide
  Sense strand starting at position 3966 of SEQ ID NO: 1241795
cgaauuucaguguggcagu

SEQ ID NO: 1300409 - RNA, 19 nt, Artificial Sequence
  Description of Artificial Sequence: Synthetic oligonucleotide
  Antisense strand to SEQ ID NO: 1300408
acugccacacugaaauucg

SEQ ID NO: 1300410 - RNA, 19 nt, Artificial Sequence
  Description of Artificial Sequence: Synthetic oligonucleotide
  Sense strand starting at position 2394 of SEQ ID NO: 1241796
gcagucacccgaggguaaa

SEQ ID NO: 1300411 - RNA, 19 nt, Artificial Sequence
  Description of Artificial Sequence: Synthetic oligonucleotide
  Antisense strand to SEQ ID NO: 1300410
uuuacccucgggugacugc

SEQ ID NO: 1300412 - RNA, 19 nt, Artificial Sequence
  Description of Artificial Sequence: Synthetic oligonucleotide
  Sense strand starting at position 2553 of SEQ ID NO: 1241796
gggacccucuuccaaacau

SEQ ID NO: 1300413 - RNA, 19 nt, Artificial Sequence
  Description of Artificial Sequence: Synthetic oligonucleotide
  Antisense strand to SEQ ID NO: 1300412
auguuuggaagaggguccc

SEQ ID NO: 1300414 - RNA, 19 nt, Artificial Sequence
  Description of Artificial Sequence: Synthetic oligonucleotide
  Sense strand starting at position 2760 of SEQ ID NO: 1241796
gcaggaacguguucaaaga

SEQ ID NO: 1300415 - RNA, 19 nt, Artificial Sequence
  Description of Artificial Sequence: Synthetic oligonucleotide
  Antisense strand to SEQ ID NO: 1300414
ucuuugaacacguuccugc

SEQ ID NO: 1300416 - RNA, 19 nt, Artificial Sequence
  Description of Artificial Sequence: Synthetic oligonucleotide
  Sense strand starting at position 2831 of SEQ ID NO: 1241796
gggaaaguguucuagggca

SEQ ID NO: 1300417 - RNA, 19 nt, Artificial Sequence
  Description of Artificial Sequence: Synthetic oligonucleotide
  Antisense strand to SEQ ID NO: 1300416
ugcccuagaacacuuuccc

SEQ ID NO: 1300418 - RNA, 19 nt, Artificial Sequence
  Description of Artificial Sequence: Synthetic oligonucleotide
  Sense strand starting at position 2833 of SEQ ID NO: 1241796
gaaaguguucuagggcaaa

SEQ ID NO: 1300419 - RNA, 19 nt, Artificial Sequence
  Description of Artificial Sequence: Synthetic oligonucleotide
  Antisense strand to SEQ ID NO: 1300418
uuugcccuagaacacuuuc

SEQ ID NO: 1300420 - RNA, 19 nt, Artificial Sequence
  Description of Artificial Sequence: Synthetic oligonucleotide
  Sense strand starting at position 2836 of SEQ ID NO: 1241796
aguguucuagggcaaagaa

SEQ ID NO: 1300421 - RNA, 19 nt, Artificial Sequence
  Description of Artificial Sequence: Synthetic oligonucleotide
  Antisense strand to SEQ ID NO: 1300420
uucuuugcccuagaacacu

SEQ ID NO: 1300422 - RNA, 19 nt, Artificial Sequence
  Description of Artificial Sequence: Synthetic oligonucleotide
  Sense strand starting at position 2894 of SEQ ID NO: 1241796
agggaaucgccagagaagu

SEQ ID NO: 1300423 - RNA, 19 nt, Artificial Sequence
  Description of Artificial Sequence: Synthetic oligonucleotide
  Antisense strand to SEQ ID NO: 1300422
acuucucuggcgauucccu

SEQ ID NO: 1300424 - RNA, 19 nt, Artificial Sequence
  Description of Artificial Sequence: Synthetic oligonucleotide
  Sense strand starting at position 2907 of SEQ ID NO: 1241796
agaaguagagaguguguuu

SEQ ID NO: 1300425 - RNA, 19 nt, Artificial Sequence
  Description of Artificial Sequence: Synthetic oligonucleotide
  Antisense strand to SEQ ID NO: 1300424
aaacacacucucuacuucu

SEQ ID NO: 1300426 - RNA, 19 nt, Artificial Sequence
  Description of Artificial Sequence: Synthetic oligonucleotide
  Sense strand starting at position 3081 of SEQ ID NO: 1241796
gugagagaguuuagguaag

SEQ ID NO: 1300427 - RNA, 19 nt, Artificial Sequence
  Description of Artificial Sequence: Synthetic oligonucleotide
  Antisense strand to SEQ ID NO: 1300426
cuuaccuaaacucucucac

SEQ ID NO: 1300428 - RNA, 19 nt, Artificial Sequence
  Description of Artificial Sequence: Synthetic oligonucleotide
  Sense strand starting at position 3083 of SEQ ID NO: 1241796
gagagaguuuagguaaggu

SEQ ID NO: 1300429 - RNA, 19 nt, Artificial Sequence
  Description of Artificial Sequence: Synthetic oligonucleotide
  Antisense strand to SEQ ID NO: 1300428
accuuaccuaaacucucuc

SEQ ID NO: 1300430 - RNA, 19 nt, Artificial Sequence
  Description of Artificial Sequence: Synthetic oligonucleotide
  Sense strand starting at position 3108 of SEQ ID NO: 1241796
agccauguaucaggcagua

SEQ ID NO: 1300431 - RNA, 19 nt, Artificial Sequence
  Description of Artificial Sequence: Synthetic oligonucleotide
  Antisense strand to SEQ ID NO: 1300430
uacugccugauacauggcu

SEQ ID NO: 1300432 - RNA, 19 nt, Artificial Sequence
  Description of Artificial Sequence: Synthetic oligonucleotide
  Sense strand starting at position 3110 of SEQ ID NO: 1241796
ccauguaucaggcaguaag

SEQ ID NO: 1300433 - RNA, 19 nt, Artificial Sequence
  Description of Artificial Sequence: Synthetic oligonucleotide
  Antisense strand to SEQ ID NO: 1300432
cuuacugccugauacaugg

SEQ ID NO: 1300434 - RNA, 19 nt, Artificial Sequence
  Description of Artificial Sequence: Synthetic oligonucleotide
  Sense strand starting at position 3121 of SEQ ID NO: 1241796
gcaguaagucacugaacca

SEQ ID NO: 1300435 - RNA, 19 nt, Artificial Sequence
  Description of Artificial Sequence: Synthetic oligonucleotide
  Antisense strand to SEQ ID NO: 1300434
ugguucagugacuuacugc

SEQ ID NO: 1300436 - RNA, 19 nt, Artificial Sequence
  Description of Artificial Sequence: Synthetic oligonucleotide
  Sense strand starting at position 3194 of SEQ ID NO: 1241796
gaauguaguggaggaguca

SEQ ID NO: 1300437 - RNA, 19 nt, Artificial Sequence
  Description of Artificial Sequence: Synthetic oligonucleotide
  Antisense strand to SEQ ID NO: 1300436
ugacuccuccacuacauuc

SEQ ID NO: 1300438 - RNA, 19 nt, Artificial Sequence
  Description of Artificial Sequence: Synthetic oligonucleotide
  Sense strand starting at position 3327 of SEQ ID NO: 1241796
ucugaagucugggaaggaa

SEQ ID NO: 1300439 - RNA, 19 nt, Artificial Sequence
  Description of Artificial Sequence: Synthetic oligonucleotide
  Antisense strand to SEQ ID NO: 1300438
uuccuucccagacuucaga

SEQ ID NO: 1300440 - RNA, 19 nt, Artificial Sequence
  Description of Artificial Sequence: Synthetic oligonucleotide
  Sense strand starting at position 3339 of SEQ ID NO: 1241796
gaaggaaggccucguuguu

SEQ ID NO: 1300441 - RNA, 19 nt, Artificial Sequence
  Description of Artificial Sequence: Synthetic oligonucleotide
  Antisense strand to SEQ ID NO: 1300440
aacaacgaggccuuccuuc

SEQ ID NO: 1300442 - RNA, 19 nt, Artificial Sequence
  Description of Artificial Sequence: Synthetic oligonucleotide
  Sense strand starting at position 3345 of SEQ ID NO: 1241796
aggccucguuguuauacua

SEQ ID NO: 1300443 - RNA, 19 nt, Artificial Sequence
  Description of Artificial Sequence: Synthetic oligonucleotide
  Antisense strand to SEQ ID NO: 1300442
uaguauaacaacgaggccu

SEQ ID NO: 1300444 - RNA, 19 nt, Artificial Sequence
  Description of Artificial Sequence: Synthetic oligonucleotide
  Sense strand starting at position 3628 of SEQ ID NO: 1241796
ggugaacucagaugugacu

SEQ ID NO: 1300445 - RNA, 19 nt, Artificial Sequence
  Description of Artificial Sequence: Synthetic oligonucleotide
  Antisense strand to SEQ ID NO: 1300444
agucacaucugaguucacc

SEQ ID NO: 1300446 - RNA, 19 nt, Artificial Sequence
  Description of Artificial Sequence: Synthetic oligonucleotide
  Sense strand starting at position 3777 of SEQ ID NO: 1241796
ggucuucgugaacauuaac

SEQ ID NO: 1300447 - RNA, 19 nt, Artificial Sequence
  Description of Artificial Sequence: Synthetic oligonucleotide
  Antisense strand to SEQ ID NO: 1300446
guuaauguucacgaagacc

SEQ ID NO: 1300448 - RNA, 19 nt, Artificial Sequence
  Description of Artificial Sequence: Synthetic oligonucleotide
  Sense strand starting at position 3872 of SEQ ID NO: 1241796
aucccugucucugcugaaa

SEQ ID NO: 1300449 - RNA, 19 nt, Artificial Sequence
  Description of Artificial Sequence: Synthetic oligonucleotide
  Antisense strand to SEQ ID NO: 1300448
uuucagcagagacagggau

SEQ ID NO: 1300450 - RNA, 19 nt, Artificial Sequence
  Description of Artificial Sequence: Synthetic oligonucleotide
  Sense strand starting at position 3930 of SEQ ID NO: 1241796
cgcuaaguucccucgcagu

SEQ ID NO: 1300451 - RNA, 19 nt, Artificial Sequence
  Description of Artificial Sequence: Synthetic oligonucleotide
  Antisense strand to SEQ ID NO: 1300450
acugcgagggaacuuagcg

SEQ ID NO: 1300452 - RNA, 19 nt, Artificial Sequence
  Description of Artificial Sequence: Synthetic oligonucleotide
  Sense strand starting at position 3983 of SEQ ID NO: 1241796
ccggguguccugugauugu

SEQ ID NO: 1300453 - RNA, 19 nt, Artificial Sequence
  Description of Artificial Sequence: Synthetic oligonucleotide
  Antisense strand to SEQ ID NO: 1300452
acaaucacaggacacccgg

SEQ ID NO: 1300454 - RNA, 19 nt, Artificial Sequence
  Description of Artificial Sequence: Synthetic oligonucleotide
  Sense strand starting at position 1048 of SEQ ID NO: 1241797
acgggaagaguuugucuga

SEQ ID NO: 1300455 - RNA, 19 nt, Artificial Sequence
  Description of Artificial Sequence: Synthetic oligonucleotide
  Antisense strand to SEQ ID NO: 1300454
ucagacaaacucuucccgu

SEQ ID NO: 1300456 - RNA, 19 nt, Artificial Sequence
  Description of Artificial Sequence: Synthetic oligonucleotide
  Sense strand starting at position 1051 of SEQ ID NO: 1241797
ggaagaguuugucugaggu

SEQ ID NO: 1300457 - RNA, 19 nt, Artificial Sequence
  Description of Artificial Sequence: Synthetic oligonucleotide
  Antisense strand to SEQ ID NO: 1300456
accucagacaaacucuucc

SEQ ID NO: 1300458 - RNA, 19 nt, Artificial Sequence
  Description of Artificial Sequence: Synthetic oligonucleotide
  Sense strand starting at position 1053 of SEQ ID NO: 1241797
aagaguuugucugagguuc

SEQ ID NO: 1300459 - RNA, 19 nt, Artificial Sequence
  Description of Artificial Sequence: Synthetic oligonucleotide
  Antisense strand to SEQ ID NO: 1300458
gaaccucagacaaacucuu

SEQ ID NO: 1300460 - RNA, 19 nt, Artificial Sequence
  Description of Artificial Sequence: Synthetic oligonucleotide
  Sense strand starting at position 1181 of SEQ ID NO: 1241797
uuuggugagugauuaugca

SEQ ID NO: 1300461 - RNA, 19 nt, Artificial Sequence
  Description of Artificial Sequence: Synthetic oligonucleotide
  Antisense strand to SEQ ID NO: 1300460
ugcauaaucacucaccaaa

SEQ ID NO: 1300462 - RNA, 19 nt, Artificial Sequence
  Description of Artificial Sequence: Synthetic oligonucleotide
  Sense strand starting at position 1185 of SEQ ID NO: 1241797
gugagugauuaugcacaag

SEQ ID NO: 1300463 - RNA, 19 nt, Artificial Sequence
  Description of Artificial Sequence: Synthetic oligonucleotide
  Antisense strand to SEQ ID NO: 1300462
cuugugcauaaucacucac

SEQ ID NO: 1300464 - RNA, 19 nt, Artificial Sequence
  Description of Artificial Sequence: Synthetic oligonucleotide
  Sense strand starting at position 1196 of SEQ ID NO: 1241797
ugcacaagacacuguguua

SEQ ID NO: 1300465 - RNA, 19 nt, Artificial Sequence
  Description of Artificial Sequence: Synthetic oligonucleotide
  Antisense strand to SEQ ID NO: 1300464
uaacacagugucuugugca

SEQ ID NO: 1300466 - RNA, 19 nt, Artificial Sequence
  Description of Artificial Sequence: Synthetic oligonucleotide
  Sense strand starting at position 1209 of SEQ ID NO: 1241797
guguuaggcccugagggua

SEQ ID NO: 1300467 - RNA, 19 nt, Artificial Sequence
  Description of Artificial Sequence: Synthetic oligonucleotide
  Antisense strand to SEQ ID NO: 1300466
uacccucagggccuaacac

SEQ ID NO: 1300468 - RNA, 19 nt, Artificial Sequence
  Description of Artificial Sequence: Synthetic oligonucleotide
  Sense strand starting at position 1306 of SEQ ID NO: 1241797
acucuauaguagguggaaa

SEQ ID NO: 1300469 - RNA, 19 nt, Artificial Sequence
  Description of Artificial Sequence: Synthetic oligonucleotide
  Antisense strand to SEQ ID NO: 1300468
uuuccaccuacuauagagu

SEQ ID NO: 1300470 - RNA, 19 nt, Artificial Sequence
  Description of Artificial Sequence: Synthetic oligonucleotide
  Sense strand starting at position 1334 of SEQ ID NO: 1241797
acuagaaagucagguucua

SEQ ID NO: 1300471 - RNA, 19 nt, Artificial Sequence
  Description of Artificial Sequence: Synthetic oligonucleotide
  Antisense strand to SEQ ID NO: 1300470
uagaaccugacuuucuagu

SEQ ID NO: 1300472 - RNA, 19 nt, Artificial Sequence
  Description of Artificial Sequence: Synthetic oligonucleotide
  Sense strand starting at position 1345 of SEQ ID NO: 1241797
agguucuaggccuguaaca

SEQ ID NO: 1300473 - RNA, 19 nt, Artificial Sequence
  Description of Artificial Sequence: Synthetic oligonucleotide
  Antisense strand to SEQ ID NO: 1300472
uguuacaggccuagaaccu

SEQ ID NO: 1300474 - RNA, 19 nt, Artificial Sequence
  Description of Artificial Sequence: Synthetic oligonucleotide
  Sense strand starting at position 1470 of SEQ ID NO: 1241797
gagguagugacuggcacaa

SEQ ID NO: 1300475 - RNA, 19 nt, Artificial Sequence
  Description of Artificial Sequence: Synthetic oligonucleotide
  Antisense strand to SEQ ID NO: 1300474
uugugccagucacuaccuc

SEQ ID NO: 1300476 - RNA, 19 nt, Artificial Sequence
  Description of Artificial Sequence: Synthetic oligonucleotide
  Sense strand starting at position 1517 of SEQ ID NO: 1241797
aaccgugcuugauuccaaa

SEQ ID NO: 1300477 - RNA, 19 nt, Artificial Sequence
  Description of Artificial Sequence: Synthetic oligonucleotide
  Antisense strand to SEQ ID NO: 1300476
uuuggaaucaagcacgguu

SEQ ID NO: 1300478 - RNA, 19 nt, Artificial Sequence
  Description of Artificial Sequence: Synthetic oligonucleotide
  Sense strand starting at position 1520 of SEQ ID NO: 1241797
cgugcuugauuccaaagag

SEQ ID NO: 1300479 - RNA, 19 nt, Artificial Sequence
  Description of Artificial Sequence: Synthetic oligonucleotide
  Antisense strand to SEQ ID NO: 1300478
cucuuuggaaucaagcacg

SEQ ID NO: 1300480 - RNA, 19 nt, Artificial Sequence
  Description of Artificial Sequence: Synthetic oligonucleotide
  Sense strand starting at position 2442 of SEQ ID NO: 1241797
gcaguaucuuuccguggua

SEQ ID NO: 1300481 - RNA, 19 nt, Artificial Sequence
  Description of Artificial Sequence: Synthetic oligonucleotide
  Antisense strand to SEQ ID NO: 1300480
uaccacggaaagauacugc

SEQ ID NO: 1300482 - RNA, 19 nt, Artificial Sequence
  Description of Artificial Sequence: Synthetic oligonucleotide
  Sense strand starting at position 2444 of SEQ ID NO: 1241797
aguaucuuuccgugguagu

SEQ ID NO: 1300483 - RNA, 19 nt, Artificial Sequence
  Description of Artificial Sequence: Synthetic oligonucleotide
  Antisense strand to SEQ ID NO: 1300482
acuaccacggaaagauacu

SEQ ID NO: 1300484 - RNA, 19 nt, Artificial Sequence
  Description of Artificial Sequence: Synthetic oligonucleotide
  Sense strand starting at position 2445 of SEQ ID NO: 1241797
guaucuuuccgugguaguu

SEQ ID NO: 1300485 - RNA, 19 nt, Artificial Sequence
  Description of Artificial Sequence: Synthetic oligonucleotide
  Antisense strand to SEQ ID NO: 1300484
aacuaccacggaaagauac

SEQ ID NO: 1300486 - RNA, 19 nt, Artificial Sequence
  Description of Artificial Sequence: Synthetic oligonucleotide
  Sense strand starting at position 2509 of SEQ ID NO: 1241797
gugguaauucuagccgucu

SEQ ID NO: 1300487 - RNA, 19 nt, Artificial Sequence
  Description of Artificial Sequence: Synthetic oligonucleotide
  Antisense strand to SEQ ID NO: 1300486
agacggcuagaauuaccac

SEQ ID NO: 1300488 - RNA, 19 nt, Artificial Sequence
  Description of Artificial Sequence: Synthetic oligonucleotide
  Sense strand starting at position 2511 of SEQ ID NO: 1241797
gguaauucuagccgucucu

SEQ ID NO: 1300489 - RNA, 19 nt, Artificial Sequence
  Description of Artificial Sequence: Synthetic oligonucleotide
  Antisense strand to SEQ ID NO: 1300488
agagacggcuagaauuacc

SEQ ID NO: 1300490 - RNA, 19 nt, Artificial Sequence
  Description of Artificial Sequence: Synthetic oligonucleotide
  Sense strand starting at position 2552 of SEQ ID NO: 1241797
agccaaauguaaugaugau

SEQ ID NO: 1300491 - RNA, 19 nt, Artificial Sequence
  Description of Artificial Sequence: Synthetic oligonucleotide
  Antisense strand to SEQ ID NO: 1300490
aucaucauuacauuuggcu

SEQ ID NO: 1300492 - RNA, 19 nt, Artificial Sequence
  Description of Artificial Sequence: Synthetic oligonucleotide
  Sense strand starting at position 2628 of SEQ ID NO: 1241797
acucuaucuuguugacauc

SEQ ID NO: 1300493 - RNA, 19 nt, Artificial Sequence
  Description of Artificial Sequence: Synthetic oligonucleotide
  Antisense strand to SEQ ID NO: 1300492
gaugucaacaagauagagu

SEQ ID NO: 1300494 - RNA, 19 nt, Artificial Sequence
  Description of Artificial Sequence: Synthetic oligonucleotide
  Sense strand starting at position 2686 of SEQ ID NO: 1241797
guguaagccguuuggaaca

SEQ ID NO: 1300495 - RNA, 19 nt, Artificial Sequence
  Description of Artificial Sequence: Synthetic oligonucleotide
  Antisense strand to SEQ ID NO: 1300494
uguuccaaacggcuuacac

SEQ ID NO: 1300496 - RNA, 19 nt, Artificial Sequence
  Description of Artificial Sequence: Synthetic oligonucleotide
  Sense strand starting at position 2763 of SEQ ID NO: 1241797
agcagucaucaguguuaau

SEQ ID NO: 1300497 - RNA, 19 nt, Artificial Sequence
  Description of Artificial Sequence: Synthetic oligonucleotide
  Antisense strand to SEQ ID NO: 1300496
auuaacacugaugacugcu

SEQ ID NO: 1300498 - RNA, 19 nt, Artificial Sequence
  Description of Artificial Sequence: Synthetic oligonucleotide
  Sense strand starting at position 2766 of SEQ ID NO: 1241797
agucaucaguguuaauacu

SEQ ID NO: 1300499 - RNA, 19 nt, Artificial Sequence
  Description of Artificial Sequence: Synthetic oligonucleotide
  Antisense strand to SEQ ID NO: 1300498
aguauuaacacugaugacu

SEQ ID NO: 1300500 - RNA, 19 nt, Artificial Sequence
  Description of Artificial Sequence: Synthetic oligonucleotide
  Sense strand starting at position 2819 of SEQ ID NO: 1241797
aggaaauuccuugguggac

SEQ ID NO: 1300501 - RNA, 19 nt, Artificial Sequence
  Description of Artificial Sequence: Synthetic oligonucleotide
  Antisense strand to SEQ ID NO: 1300500
guccaccaaggaauuuccu

SEQ ID NO: 1300502 - RNA, 19 nt, Artificial Sequence
  Description of Artificial Sequence: Synthetic oligonucleotide
  Sense strand starting at position 2936 of SEQ ID NO: 1241797
cacucagggucccgauuau

SEQ ID NO: 1300503 - RNA, 19 nt, Artificial Sequence
  Description of Artificial Sequence: Synthetic oligonucleotide
  Antisense strand to SEQ ID NO: 1300502
auaaucgggacccugagug

SEQ ID NO: 1300504 - RNA, 19 nt, Artificial Sequence
  Description of Artificial Sequence: Synthetic oligonucleotide
  Sense strand starting at position 2965 of SEQ ID NO: 1241797
agcuucccucagcagaauu

SEQ ID NO: 1300505 - RNA, 19 nt, Artificial Sequence
  Description of Artificial Sequence: Synthetic oligonucleotide
  Antisense strand to SEQ ID NO: 1300504
aauucugcugagggaagcu

SEQ ID NO: 1300506 - RNA, 19 nt, Artificial Sequence
  Description of Artificial Sequence: Synthetic oligonucleotide
  Sense strand starting at position 2975 of SEQ ID NO: 1241797
agcagaauuuaccggcuuu

SEQ ID NO: 1300507 - RNA, 19 nt, Artificial Sequence
  Description of Artificial Sequence: Synthetic oligonucleotide
  Antisense strand to SEQ ID NO: 1300506
aaagccgguaaauucugcu

SEQ ID NO: 1300508 - RNA, 19 nt, Artificial Sequence
  Description of Artificial Sequence: Synthetic oligonucleotide
  Sense strand starting at position 2976 of SEQ ID NO: 1241797
gcagaauuuaccggcuuuc

SEQ ID NO: 1300509 - RNA, 19 nt, Artificial Sequence
  Description of Artificial Sequence: Synthetic oligonucleotide
  Antisense strand to SEQ ID NO: 1300508
gaaagccgguaaauucugc

SEQ ID NO: 1300510 - RNA, 19 nt, Artificial Sequence
  Description of Artificial Sequence: Synthetic oligonucleotide
  Sense strand starting at position 3103 of SEQ ID NO: 1241797
ucuccucuaugagaaagaa

SEQ ID NO: 1300511 - RNA, 19 nt, Artificial Sequence
  Description of Artificial Sequence: Synthetic oligonucleotide
  Antisense strand to SEQ ID NO: 1300510
uucuuucucauagaggaga

SEQ ID NO: 1300512 - RNA, 19 nt, Artificial Sequence
  Description of Artificial Sequence: Synthetic oligonucleotide
  Sense strand starting at position 3124 of SEQ ID NO: 1241797
gcgacuuuccauugaguuc

SEQ ID NO: 1300513 - RNA, 19 nt, Artificial Sequence
  Description of Artificial Sequence: Synthetic oligonucleotide
  Antisense strand to SEQ ID NO: 1300512
gaacucaauggaaagucgc

SEQ ID NO: 1300514 - RNA, 19 nt, Artificial Sequence
  Description of Artificial Sequence: Synthetic oligonucleotide
  Sense strand starting at position 3141 of SEQ ID NO: 1241797
uccauugaguucucuugaa

SEQ ID NO: 1300515 - RNA, 19 nt, Artificial Sequence
  Description of Artificial Sequence: Synthetic oligonucleotide
  Antisense strand to SEQ ID NO: 1300514
uucaagagaacucaaugga

SEQ ID NO: 1300516 - RNA, 19 nt, Artificial Sequence
  Description of Artificial Sequence: Synthetic oligonucleotide
  Sense strand starting at position 3145 of SEQ ID NO: 1241797
uugaguucucuugaauuag

SEQ ID NO: 1300517 - RNA, 19 nt, Artificial Sequence
  Description of Artificial Sequence: Synthetic oligonucleotide
  Antisense strand to SEQ ID NO: 1300516
cuaauucaagagaacucaa

SEQ ID NO: 1300518 - RNA, 19 nt, Artificial Sequence
  Description of Artificial Sequence: Synthetic oligonucleotide
  Sense strand starting at position 3170 of SEQ ID NO: 1241797
ucaguacccuccgggaauu

SEQ ID NO: 1300519 - RNA, 19 nt, Artificial Sequence
  Description of Artificial Sequence: Synthetic oligonucleotide
  Antisense strand to SEQ ID NO: 1300518
aauucccggaggguacuga

SEQ ID NO: 1300520 - RNA, 19 nt, Artificial Sequence
  Description of Artificial Sequence: Synthetic oligonucleotide
  Sense strand starting at position 3816 of SEQ ID NO: 1241797
gccucagucucacaaagua

SEQ ID NO: 1300521 - RNA, 19 nt, Artificial Sequence
  Description of Artificial Sequence: Synthetic oligonucleotide
  Antisense strand to SEQ ID NO: 1300520
uacuuugugagacugaggc

SEQ ID NO: 1300522 - RNA, 19 nt, Artificial Sequence
  Description of Artificial Sequence: Synthetic oligonucleotide
  Sense strand starting at position 3864 of SEQ ID NO: 1241797
cugucugcaucuuguuaac

SEQ ID NO: 1300523 - RNA, 19 nt, Artificial Sequence
  Description of Artificial Sequence: Synthetic oligonucleotide
  Antisense strand to SEQ ID NO: 1300522
guuaacaagaugcagacag

SEQ ID NO: 1300524 - RNA, 19 nt, Artificial Sequence
  Description of Artificial Sequence: Synthetic oligonucleotide
  Sense strand starting at position 3866 of SEQ ID NO: 1241797
gucugcaucuuguuaacuu

SEQ ID NO: 1300525 - RNA, 19 nt, Artificial Sequence
  Description of Artificial Sequence: Synthetic oligonucleotide
  Antisense strand to SEQ ID NO: 1300524
aaguuaacaagaugcagac

SEQ ID NO: 1300526 - RNA, 19 nt, Artificial Sequence
  Description of Artificial Sequence: Synthetic oligonucleotide
  Sense strand starting at position 11 of SEQ ID NO: 1241798
gaaagagguggcuagcuua

SEQ ID NO: 1300527 - RNA, 19 nt, Artificial Sequence
  Description of Artificial Sequence: Synthetic oligonucleotide
  Antisense strand to SEQ ID NO: 1300526
uaagcuagccaccucuuuc

SEQ ID NO: 1300528 - RNA, 19 nt, Artificial Sequence
  Description of Artificial Sequence: Synthetic oligonucleotide
  Sense strand starting at position 114 of SEQ ID NO: 1241798
acugaauacuaagaagaua

SEQ ID NO: 1300529 - RNA, 19 nt, Artificial Sequence
  Description of Artificial Sequence: Synthetic oligonucleotide
  Antisense strand to SEQ ID NO: 1300528
uaucuucuuaguauucagu

SEQ ID NO: 1300530 - RNA, 19 nt, Artificial Sequence
  Description of Artificial Sequence: Synthetic oligonucleotide
  Sense strand starting at position 246 of SEQ ID NO: 1241798
ugguguuacuaugcugaca

SEQ ID NO: 1300531 - RNA, 19 nt, Artificial Sequence
  Description of Artificial Sequence: Synthetic oligonucleotide
  Antisense strand to SEQ ID NO: 1300530
ugucagcauaguaacacca

SEQ ID NO: 1300532 - RNA, 19 nt, Artificial Sequence
  Description of Artificial Sequence: Synthetic oligonucleotide
  Sense strand starting at position 249 of SEQ ID NO: 1241798
uguuacuaugcugacaagu

SEQ ID NO: 1300533 - RNA, 19 nt, Artificial Sequence
  Description of Artificial Sequence: Synthetic oligonucleotide
  Antisense strand to SEQ ID NO: 1300532
acuugucagcauaguaaca

SEQ ID NO: 1300534 - RNA, 19 nt, Artificial Sequence
  Description of Artificial Sequence: Synthetic oligonucleotide
  Sense strand starting at position 530 of SEQ ID NO: 1241798
aggauucucguagggauua

SEQ ID NO: 1300535 - RNA, 19 nt, Artificial Sequence
  Description of Artificial Sequence: Synthetic oligonucleotide
  Antisense strand to SEQ ID NO: 1300534
uaaucccuacgagaauccu

SEQ ID NO: 1300536 - RNA, 19 nt, Artificial Sequence
  Description of Artificial Sequence: Synthetic oligonucleotide
  Sense strand starting at position 543 of SEQ ID NO: 1241798
ggauuauccugaguuaaua

SEQ ID NO: 1300537 - RNA, 19 nt, Artificial Sequence
  Description of Artificial Sequence: Synthetic oligonucleotide
  Antisense strand to SEQ ID NO: 1300536
uauuaacucaggauaaucc

SEQ ID NO: 1300538 - RNA, 19 nt, Artificial Sequence
  Description of Artificial Sequence: Synthetic oligonucleotide
  Sense strand starting at position 770 of SEQ ID NO: 1241798
agaggaaaguaacaagaau

SEQ ID NO: 1300539 - RNA, 19 nt, Artificial Sequence
  Description of Artificial Sequence: Synthetic oligonucleotide
  Antisense strand to SEQ ID NO: 1300538
auucuuguuacuuuccucu

SEQ ID NO: 1300540 - RNA, 19 nt, Artificial Sequence
  Description of Artificial Sequence: Synthetic oligonucleotide
  Sense strand starting at position 857 of SEQ ID NO: 1241798
aggucagauaauugcuuga

SEQ ID NO: 1300541 - RNA, 19 nt, Artificial Sequence
  Description of Artificial Sequence: Synthetic oligonucleotide
  Antisense strand to SEQ ID NO: 1300540
ucaagcaauuaucugaccu

SEQ ID NO: 1300542 - RNA, 19 nt, Artificial Sequence
  Description of Artificial Sequence: Synthetic oligonucleotide
  Sense strand starting at position 909 of SEQ ID NO: 1241798
cgagacccgucccuagaau

SEQ ID NO: 1300543 - RNA, 19 nt, Artificial Sequence
  Description of Artificial Sequence: Synthetic oligonucleotide
  Antisense strand to SEQ ID NO: 1300542
auucuagggacgggucucg

SEQ ID NO: 1300544 - RNA, 19 nt, Artificial Sequence
  Description of Artificial Sequence: Synthetic oligonucleotide
  Sense strand starting at position 910 of SEQ ID NO: 1241798
gagacccgucccuagaauu

SEQ ID NO: 1300545 - RNA, 19 nt, Artificial Sequence
  Description of Artificial Sequence: Synthetic oligonucleotide
  Antisense strand to SEQ ID NO: 1300544
aauucuagggacgggucuc

SEQ ID NO: 1300546 - RNA, 19 nt, Artificial Sequence
  Description of Artificial Sequence: Synthetic oligonucleotide
  Sense strand starting at position 984 of SEQ ID NO: 1241798
agccuuaacggaggaaacu

SEQ ID NO: 1300547 - RNA, 19 nt, Artificial Sequence
  Description of Artificial Sequence: Synthetic oligonucleotide
  Antisense strand to SEQ ID NO: 1300546
aguuuccuccguuaaggcu

SEQ ID NO: 1300548 - RNA, 19 nt, Artificial Sequence
  Description of Artificial Sequence: Synthetic oligonucleotide
  Sense strand starting at position 1126 of SEQ ID NO: 1241798
uccaaaguacggugagaaa

SEQ ID NO: 1300549 - RNA, 19 nt, Artificial Sequence
  Description of Artificial Sequence: Synthetic oligonucleotide
  Antisense strand to SEQ ID NO: 1300548
uuucucaccguacuuugga

SEQ ID NO: 1300550 - RNA, 19 nt, Artificial Sequence
  Description of Artificial Sequence: Synthetic oligonucleotide
  Sense strand starting at position 1988 of SEQ ID NO: 1241798
gaaaccugugcucaggcaa

SEQ ID NO: 1300551 - RNA, 19 nt, Artificial Sequence
  Description of Artificial Sequence: Synthetic oligonucleotide
  Antisense strand to SEQ ID NO: 1300550
uugccugagcacagguuuc

SEQ ID NO: 1300552 - RNA, 19 nt, Artificial Sequence
  Description of Artificial Sequence: Synthetic oligonucleotide
  Sense strand starting at position 2113 of SEQ ID NO: 1241798
ucucucuuggaugguaaga

SEQ ID NO: 1300553 - RNA, 19 nt, Artificial Sequence
  Description of Artificial Sequence: Synthetic oligonucleotide
  Antisense strand to SEQ ID NO: 1300552
ucuuaccauccaagagaga

SEQ ID NO: 1300554 - RNA, 19 nt, Artificial Sequence
  Description of Artificial Sequence: Synthetic oligonucleotide
  Sense strand starting at position 2134 of SEQ ID NO: 1241798
gaauuaaauguguagcaga

SEQ ID NO: 1300555 - RNA, 19 nt, Artificial Sequence
  Description of Artificial Sequence: Synthetic oligonucleotide
  Antisense strand to SEQ ID NO: 1300554
ucugcuacacauuuaauuc

SEQ ID NO: 1300556 - RNA, 19 nt, Artificial Sequence
  Description of Artificial Sequence: Synthetic oligonucleotide
  Sense strand starting at position 2149 of SEQ ID NO: 1241798
cagaaagaucuugggcugu

SEQ ID NO: 1300557 - RNA, 19 nt, Artificial Sequence
  Description of Artificial Sequence: Synthetic oligonucleotide
  Antisense strand to SEQ ID NO: 1300556
acagcccaagaucuuucug

SEQ ID NO: 1300558 - RNA, 19 nt, Artificial Sequence
  Description of Artificial Sequence: Synthetic oligonucleotide
  Sense strand starting at position 2151 of SEQ ID NO: 1241798
gaaagaucuugggcuguga

SEQ ID NO: 1300559 - RNA, 19 nt, Artificial Sequence
  Description of Artificial Sequence: Synthetic oligonucleotide
  Antisense strand to SEQ ID NO: 1300558
ucacagcccaagaucuuuc

SEQ ID NO: 1300560 - RNA, 19 nt, Artificial Sequence
  Description of Artificial Sequence: Synthetic oligonucleotide
  Sense strand starting at position 2153 of SEQ ID NO: 1241798
aagaucuugggcugugaua

SEQ ID NO: 1300561 - RNA, 19 nt, Artificial Sequence
  Description of Artificial Sequence: Synthetic oligonucleotide
  Antisense strand to SEQ ID NO: 1300560
uaucacagcccaagaucuu

SEQ ID NO: 1300562 - RNA, 19 nt, Artificial Sequence
  Description of Artificial Sequence: Synthetic oligonucleotide
  Sense strand starting at position 2155 of SEQ ID NO: 1241798
gaucuugggcugugauaug

SEQ ID NO: 1300563 - RNA, 19 nt, Artificial Sequence
  Description of Artificial Sequence: Synthetic oligonucleotide
  Antisense strand to SEQ ID NO: 1300562
cauaucacagcccaagauc

SEQ ID NO: 1300564 - RNA, 19 nt, Artificial Sequence
  Description of Artificial Sequence: Synthetic oligonucleotide
  Sense strand starting at position 2199 of SEQ ID NO: 1241798
acuuacugucaguauggua

SEQ ID NO: 1300565 - RNA, 19 nt, Artificial Sequence
  Description of Artificial Sequence: Synthetic oligonucleotide
  Antisense strand to SEQ ID NO: 1300564
uaccauacugacaguaagu

SEQ ID NO: 1300566 - RNA, 19 nt, Artificial Sequence
  Description of Artificial Sequence: Synthetic oligonucleotide
  Sense strand starting at position 2212 of SEQ ID NO: 1241798
augguaucgguccagguau

SEQ ID NO: 1300567 - RNA, 19 nt, Artificial Sequence
  Description of Artificial Sequence: Synthetic oligonucleotide
  Antisense strand to SEQ ID NO: 1300566
auaccuggaccgauaccau

SEQ ID NO: 1300568 - RNA, 19 nt, Artificial Sequence
  Description of Artificial Sequence: Synthetic oligonucleotide
  Sense strand starting at position 2214 of SEQ ID NO: 1241798
gguaucgguccagguauuu

SEQ ID NO: 1300569 - RNA, 19 nt, Artificial Sequence
  Description of Artificial Sequence: Synthetic oligonucleotide
  Antisense strand to SEQ ID NO: 1300568
aaauaccuggaccgauacc

SEQ ID NO: 1300570 - RNA, 19 nt, Artificial Sequence
  Description of Artificial Sequence: Synthetic oligonucleotide
  Sense strand starting at position 2256 of SEQ ID NO: 1241798
gagucugcccauuagaggu

SEQ ID NO: 1300571 - RNA, 19 nt, Artificial Sequence
  Description of Artificial Sequence: Synthetic oligonucleotide
  Antisense strand to SEQ ID NO: 1300570
accucuaaugggcagacuc

SEQ ID NO: 1300572 - RNA, 19 nt, Artificial Sequence
  Description of Artificial Sequence: Synthetic oligonucleotide
  Sense strand starting at position 2322 of SEQ ID NO: 1241798
gagccaauccgucaacucu

SEQ ID NO: 1300573 - RNA, 19 nt, Artificial Sequence
  Description of Artificial Sequence: Synthetic oligonucleotide
  Antisense strand to SEQ ID NO: 1300572
agaguugacggauuggcuc

SEQ ID NO: 1300574 - RNA, 19 nt, Artificial Sequence
  Description of Artificial Sequence: Synthetic oligonucleotide
  Sense strand starting at position 2336 of SEQ ID NO: 1241798
acucuuugacucugcagua

SEQ ID NO: 1300575 - RNA, 19 nt, Artificial Sequence
  Description of Artificial Sequence: Synthetic oligonucleotide
  Antisense strand to SEQ ID NO: 1300574
uacugcagagucaaagagu

SEQ ID NO: 1300576 - RNA, 19 nt, Artificial Sequence
  Description of Artificial Sequence: Synthetic oligonucleotide
  Sense strand starting at position 2479 of SEQ ID NO: 1241798
ggacuuaaguugucaacuc

SEQ ID NO: 1300577 - RNA, 19 nt, Artificial Sequence
  Description of Artificial Sequence: Synthetic oligonucleotide
  Antisense strand to SEQ ID NO: 1300576
gaguugacaacuuaagucc

SEQ ID NO: 1300578 - RNA, 19 nt, Artificial Sequence
  Description of Artificial Sequence: Synthetic oligonucleotide
  Sense strand starting at position 2500 of SEQ ID NO: 1241798
ugcugauaaugaccgaauu

SEQ ID NO: 1300579 - RNA, 19 nt, Artificial Sequence
  Description of Artificial Sequence: Synthetic oligonucleotide
  Antisense strand to SEQ ID NO: 1300578
aauucggucauuaucagca

SEQ ID NO: 1300580 - RNA, 19 nt, Artificial Sequence
  Description of Artificial Sequence: Synthetic oligonucleotide
  Sense strand starting at position 2664 of SEQ ID NO: 1241798
uuguaucaauagccgaauu

SEQ ID NO: 1300581 - RNA, 19 nt, Artificial Sequence
  Description of Artificial Sequence: Synthetic oligonucleotide
  Antisense strand to SEQ ID NO: 1300580
aauucggcuauugauacaa

SEQ ID NO: 1300582 - RNA, 19 nt, Artificial Sequence
  Description of Artificial Sequence: Synthetic oligonucleotide
  Sense strand starting at position 2666 of SEQ ID NO: 1241798
guaucaauagccgaauucu

SEQ ID NO: 1300583 - RNA, 19 nt, Artificial Sequence
  Description of Artificial Sequence: Synthetic oligonucleotide
  Antisense strand to SEQ ID NO: 1300582
agaauucggcuauugauac

SEQ ID NO: 1300584 - RNA, 19 nt, Artificial Sequence
  Description of Artificial Sequence: Synthetic oligonucleotide
  Sense strand starting at position 2764 of SEQ ID NO: 1241798
gagaguggucucuguuauc

SEQ ID NO: 1300585 - RNA, 19 nt, Artificial Sequence
  Description of Artificial Sequence: Synthetic oligonucleotide
  Antisense strand to SEQ ID NO: 1300584
gauaacagagaccacucuc

SEQ ID NO: 1300586 - RNA, 19 nt, Artificial Sequence
  Description of Artificial Sequence: Synthetic oligonucleotide
  Sense strand starting at position 2781 of SEQ ID NO: 1241798
uccauugcugcauaacaga

SEQ ID NO: 1300587 - RNA, 19 nt, Artificial Sequence
  Description of Artificial Sequence: Synthetic oligonucleotide
  Antisense strand to SEQ ID NO: 1300586
ucuguuaugcagcaaugga

SEQ ID NO: 1300588 - RNA, 19 nt, Artificial Sequence
  Description of Artificial Sequence: Synthetic oligonucleotide
  Sense strand starting at position 3300 of SEQ ID NO: 1241798
guggcuuuaugaguaagga

SEQ ID NO: 1300589 - RNA, 19 nt, Artificial Sequence
  Description of Artificial Sequence: Synthetic oligonucleotide
  Antisense strand to SEQ ID NO: 1300588
uccuuacucauaaagccac

SEQ ID NO: 1300590 - RNA, 19 nt, Artificial Sequence
  Description of Artificial Sequence: Synthetic oligonucleotide
  Sense strand starting at position 3301 of SEQ ID NO: 1241798
uggcuuuaugaguaaggac

SEQ ID NO: 1300591 - RNA, 19 nt, Artificial Sequence
  Description of Artificial Sequence: Synthetic oligonucleotide
  Antisense strand to SEQ ID NO: 1300590
guccuuacucauaaagcca

SEQ ID NO: 1300592 - RNA, 19 nt, Artificial Sequence
  Description of Artificial Sequence: Synthetic oligonucleotide
  Sense strand starting at position 3334 of SEQ ID NO: 1241798
ggcuaucaucuggaagcca

SEQ ID NO: 1300593 - RNA, 19 nt, Artificial Sequence
  Description of Artificial Sequence: Synthetic oligonucleotide
  Antisense strand to SEQ ID NO: 1300592
uggcuuccagaugauagcc

SEQ ID NO: 1300594 - RNA, 19 nt, Artificial Sequence
  Description of Artificial Sequence: Synthetic oligonucleotide
  Sense strand starting at position 3612 of SEQ ID NO: 1241798
uugccauguuuauuaccua

SEQ ID NO: 1300595 - RNA, 19 nt, Artificial Sequence
  Description of Artificial Sequence: Synthetic oligonucleotide
  Antisense strand to SEQ ID NO: 1300594
uagguaauaaacauggcaa

SEQ ID NO: 1300596 - RNA, 19 nt, Artificial Sequence
  Description of Artificial Sequence: Synthetic oligonucleotide
  Sense strand starting at position 3743 of SEQ ID NO: 1241798
ugugaauuccuauggcauc

SEQ ID NO: 1300597 - RNA, 19 nt, Artificial Sequence
  Description of Artificial Sequence: Synthetic oligonucleotide
  Antisense strand to SEQ ID NO: 1300596
gaugccauaggaauucaca

SEQ ID NO: 1300598 - RNA, 19 nt, Artificial Sequence
  Description of Artificial Sequence: Synthetic oligonucleotide
  Sense strand starting at position 3756 of SEQ ID NO: 1241798
ggcaucuauauggaagcua

SEQ ID NO: 1300599 - RNA, 19 nt, Artificial Sequence
  Description of Artificial Sequence: Synthetic oligonucleotide
  Antisense strand to SEQ ID NO: 1300598
uagcuuccauauagaugcc

SEQ ID NO: 1300600 - RNA, 19 nt, Artificial Sequence
  Description of Artificial Sequence: Synthetic oligonucleotide
  Sense strand starting at position 3820 of SEQ ID NO: 1241798
gugugucuucccuaacaaa

SEQ ID NO: 1300601 - RNA, 19 nt, Artificial Sequence
  Description of Artificial Sequence: Synthetic oligonucleotide
  Antisense strand to SEQ ID NO: 1300600
uuuguuagggaagacacac

SEQ ID NO: 1300602 - RNA, 19 nt, Artificial Sequence
  Description of Artificial Sequence: Synthetic oligonucleotide
  Sense strand starting at position 3954 of SEQ ID NO: 1241798
agcauuccucaaggauaaa

SEQ ID NO: 1300603 - RNA, 19 nt, Artificial Sequence
  Description of Artificial Sequence: Synthetic oligonucleotide
  Antisense strand to SEQ ID NO: 1300602
uuuauccuugaggaaugcu

SEQ ID NO: 1300604 - RNA, 19 nt, Artificial Sequence
  Description of Artificial Sequence: Synthetic oligonucleotide
  Sense strand starting at position 3966 of SEQ ID NO: 1241798
ggauaaauccagugaucau

SEQ ID NO: 1300605 - RNA, 19 nt, Artificial Sequence
  Description of Artificial Sequence: Synthetic oligonucleotide
  Antisense strand to SEQ ID NO: 1300604
augaucacuggauuuaucc

SEQ ID NO: 1300606 - RNA, 19 nt, Artificial Sequence
  Description of Artificial Sequence: Synthetic oligonucleotide
  Sense strand starting at position 265 of SEQ ID NO: 1241799
ugugaaauucauggaggca

SEQ ID NO: 1300607 - RNA, 19 nt, Artificial Sequence
  Description of Artificial Sequence: Synthetic oligonucleotide
  Antisense strand to SEQ ID NO: 1300606
ugccuccaugaauuucaca

SEQ ID NO: 1300608 - RNA, 19 nt, Artificial Sequence
  Description of Artificial Sequence: Synthetic oligonucleotide
  Sense strand starting at position 321 of SEQ ID NO: 1241799
gcucacaugugauuggcaa

SEQ ID NO: 1300609 - RNA, 19 nt, Artificial Sequence
  Description of Artificial Sequence: Synthetic oligonucleotide
  Antisense strand to SEQ ID NO: 1300608
uugccaaucacaugugagc

SEQ ID NO: 1300610 - RNA, 19 nt, Artificial Sequence
  Description of Artificial Sequence: Synthetic oligonucleotide
  Sense strand starting at position 412 of SEQ ID NO: 1241799
guuugucaguacuuugaag

SEQ ID NO: 1300611 - RNA, 19 nt, Artificial Sequence
  Description of Artificial Sequence: Synthetic oligonucleotide
  Antisense strand to SEQ ID NO: 1300610
cuucaaaguacugacaaac

SEQ ID NO: 1300612 - RNA, 19 nt, Artificial Sequence
  Description of Artificial Sequence: Synthetic oligonucleotide
  Sense strand starting at position 414 of SEQ ID NO: 1241799
uugucaguacuuugaaguu

SEQ ID NO: 1300613 - RNA, 19 nt, Artificial Sequence
  Description of Artificial Sequence: Synthetic oligonucleotide
  Antisense strand to SEQ ID NO: 1300612
aacuucaaaguacugacaa

SEQ ID NO: 1300614 - RNA, 19 nt, Artificial Sequence
  Description of Artificial Sequence: Synthetic oligonucleotide
  Sense strand starting at position 435 of SEQ ID NO: 1241799
aaaugauguucccugaaag

SEQ ID NO: 1300615 - RNA, 19 nt, Artificial Sequence
  Description of Artificial Sequence: Synthetic oligonucleotide
  Antisense strand to SEQ ID NO: 1300614
cuuucagggaacaucauuu

SEQ ID NO: 1300616 - RNA, 19 nt, Artificial Sequence
  Description of Artificial Sequence: Synthetic oligonucleotide
  Sense strand starting at position 436 of SEQ ID NO: 1241799
aaugauguucccugaaaga

SEQ ID NO: 1300617 - RNA, 19 nt, Artificial Sequence
  Description of Artificial Sequence: Synthetic oligonucleotide
  Antisense strand to SEQ ID NO: 1300616
ucuuucagggaacaucauu

SEQ ID NO: 1300618 - RNA, 19 nt, Artificial Sequence
  Description of Artificial Sequence: Synthetic oligonucleotide
  Sense strand starting at position 449 of SEQ ID NO: 1241799
gaaagagguggcuagcuua

SEQ ID NO: 1300619 - RNA, 19 nt, Artificial Sequence
  Description of Artificial Sequence: Synthetic oligonucleotide
  Antisense strand to SEQ ID NO: 1300618
uaagcuagccaccucuuuc

SEQ ID NO: 1300620 - RNA, 19 nt, Artificial Sequence
  Description of Artificial Sequence: Synthetic oligonucleotide
  Sense strand starting at position 552 of SEQ ID NO: 1241799
acugaauacuaagaagaua

SEQ ID NO: 1300621 - RNA, 19 nt, Artificial Sequence
  Description of Artificial Sequence: Synthetic oligonucleotide
  Antisense strand to SEQ ID NO: 1300620
uaucuucuuaguauucagu

SEQ ID NO: 1300622 - RNA, 19 nt, Artificial Sequence
  Description of Artificial Sequence: Synthetic oligonucleotide
  Sense strand starting at position 684 of SEQ ID NO: 1241799
ugguguuacuaugcugaca

SEQ ID NO: 1300623 - RNA, 19 nt, Artificial Sequence
  Description of Artificial Sequence: Synthetic oligonucleotide
  Antisense strand to SEQ ID NO: 1300622
ugucagcauaguaacacca

SEQ ID NO: 1300624 - RNA, 19 nt, Artificial Sequence
  Description of Artificial Sequence: Synthetic oligonucleotide
  Sense strand starting at position 687 of SEQ ID NO: 1241799
uguuacuaugcugacaagu

SEQ ID NO: 1300625 - RNA, 19 nt, Artificial Sequence
  Description of Artificial Sequence: Synthetic oligonucleotide
  Antisense strand to SEQ ID NO: 1300624
acuugucagcauaguaaca

SEQ ID NO: 1300626 - RNA, 19 nt, Artificial Sequence
  Description of Artificial Sequence: Synthetic oligonucleotide
  Sense strand starting at position 968 of SEQ ID NO: 1241799
aggauucucguagggauua

SEQ ID NO: 1300627 - RNA, 19 nt, Artificial Sequence
  Description of Artificial Sequence: Synthetic oligonucleotide
  Antisense strand to SEQ ID NO: 1300626
uaaucccuacgagaauccu

SEQ ID NO: 1300628 - RNA, 19 nt, Artificial Sequence
  Description of Artificial Sequence: Synthetic oligonucleotide
  Sense strand starting at position 981 of SEQ ID NO: 1241799
ggauuauccugaguuaaua

SEQ ID NO: 1300629 - RNA, 19 nt, Artificial Sequence
  Description of Artificial Sequence: Synthetic oligonucleotide
  Antisense strand to SEQ ID NO: 1300628
uauuaacucaggauaaucc

SEQ ID NO: 1300630 - RNA, 19 nt, Artificial Sequence
  Description of Artificial Sequence: Synthetic oligonucleotide
  Sense strand starting at position 1208 of SEQ ID NO: 1241799
agaggaaaguaacaagaau

SEQ ID NO: 1300631 - RNA, 19 nt, Artificial Sequence
  Description of Artificial Sequence: Synthetic oligonucleotide
  Antisense strand to SEQ ID NO: 1300630
auucuuguuacuuuccucu

SEQ ID NO: 1300632 - RNA, 19 nt, Artificial Sequence
  Description of Artificial Sequence: Synthetic oligonucleotide
  Sense strand starting at position 1295 of SEQ ID NO: 1241799
aggucagauaauugcuuga

SEQ ID NO: 1300633 - RNA, 19 nt, Artificial Sequence
  Description of Artificial Sequence: Synthetic oligonucleotide
  Antisense strand to SEQ ID NO: 1300632
ucaagcaauuaucugaccu

SEQ ID NO: 1300634 - RNA, 19 nt, Artificial Sequence
  Description of Artificial Sequence: Synthetic oligonucleotide
  Sense strand starting at position 1347 of SEQ ID NO: 1241799
cgagacccgucccuagaau

SEQ ID NO: 1300635 - RNA, 19 nt, Artificial Sequence
  Description of Artificial Sequence: Synthetic oligonucleotide
  Antisense strand to SEQ ID NO: 1300634
auucuagggacgggucucg

SEQ ID NO: 1300636 - RNA, 19 nt, Artificial Sequence
  Description of Artificial Sequence: Synthetic oligonucleotide
  Sense strand starting at position 1348 of SEQ ID NO: 1241799
gagacccgucccuagaauu

SEQ ID NO: 1300637 - RNA, 19 nt, Artificial Sequence
  Description of Artificial Sequence: Synthetic oligonucleotide
  Antisense strand to SEQ ID NO: 1300636
aauucuagggacgggucuc

SEQ ID NO: 1300638 - RNA, 19 nt, Artificial Sequence
  Description of Artificial Sequence: Synthetic oligonucleotide
  Sense strand starting at position 1422 of SEQ ID NO: 1241799
agccuuaacggaggaaacu

SEQ ID NO: 1300639 - RNA, 19 nt, Artificial Sequence
  Description of Artificial Sequence: Synthetic oligonucleotide
  Antisense strand to SEQ ID NO: 1300638
aguuuccuccguuaaggcu

SEQ ID NO: 1300640 - RNA, 19 nt, Artificial Sequence
  Description of Artificial Sequence: Synthetic oligonucleotide
  Sense strand starting at position 1564 of SEQ ID NO: 1241799
uccaaaguacggugagaaa

SEQ ID NO: 1300641 - RNA, 19 nt, Artificial Sequence
  Description of Artificial Sequence: Synthetic oligonucleotide
  Antisense strand to SEQ ID NO: 1300640
uuucucaccguacuuugga

SEQ ID NO: 1300642 - RNA, 19 nt, Artificial Sequence
  Description of Artificial Sequence: Synthetic oligonucleotide
  Sense strand starting at position 2426 of SEQ ID NO: 1241799
gaaaccugugcucaggcaa

SEQ ID NO: 1300643 - RNA, 19 nt, Artificial Sequence
  Description of Artificial Sequence: Synthetic oligonucleotide
  Antisense strand to SEQ ID NO: 1300642
uugccugagcacagguuuc

SEQ ID NO: 1300644 - RNA, 19 nt, Artificial Sequence
  Description of Artificial Sequence: Synthetic oligonucleotide
  Sense strand starting at position 2551 of SEQ ID NO: 1241799
ucucucuuggaugguaaga

SEQ ID NO: 1300645 - RNA, 19 nt, Artificial Sequence
  Description of Artificial Sequence: Synthetic oligonucleotide
  Antisense strand to SEQ ID NO: 1300644
ucuuaccauccaagagaga

SEQ ID NO: 1300646 - RNA, 19 nt, Artificial Sequence
  Description of Artificial Sequence: Synthetic oligonucleotide
  Sense strand starting at position 2572 of SEQ ID NO: 1241799
gaauuaaauguguagcaga

SEQ ID NO: 1300647 - RNA, 19 nt, Artificial Sequence
  Description of Artificial Sequence: Synthetic oligonucleotide
  Antisense strand to SEQ ID NO: 1300646
ucugcuacacauuuaauuc

SEQ ID NO: 1300648 - RNA, 19 nt, Artificial Sequence
  Description of Artificial Sequence: Synthetic oligonucleotide
  Sense strand starting at position 2587 of SEQ ID NO: 1241799
cagaaagaucuugggcugu

SEQ ID NO: 1300649 - RNA, 19 nt, Artificial Sequence
  Description of Artificial Sequence: Synthetic oligonucleotide
  Antisense strand to SEQ ID NO: 1300648
acagcccaagaucuuucug

SEQ ID NO: 1300650 - RNA, 19 nt, Artificial Sequence
  Description of Artificial Sequence: Synthetic oligonucleotide
  Sense strand starting at position 2589 of SEQ ID NO: 1241799
gaaagaucuugggcuguga

SEQ ID NO: 1300651 - RNA, 19 nt, Artificial Sequence
  Description of Artificial Sequence: Synthetic oligonucleotide
  Antisense strand to SEQ ID NO: 1300650
ucacagcccaagaucuuuc

SEQ ID NO: 1300652 - RNA, 19 nt, Artificial Sequence
  Description of Artificial Sequence: Synthetic oligonucleotide
  Sense strand starting at position 2591 of SEQ ID NO: 1241799
aagaucuugggcugugaua

SEQ ID NO: 1300653 - RNA, 19 nt, Artificial Sequence
  Description of Artificial Sequence: Synthetic oligonucleotide
  Antisense strand to SEQ ID NO: 1300652
uaucacagcccaagaucuu

SEQ ID NO: 1300654 - RNA, 19 nt, Artificial Sequence
  Description of Artificial Sequence: Synthetic oligonucleotide
  Sense strand starting at position 2593 of SEQ ID NO: 1241799
gaucuugggcugugauaug

SEQ ID NO: 1300655 - RNA, 19 nt, Artificial Sequence
  Description of Artificial Sequence: Synthetic oligonucleotide
  Antisense strand to SEQ ID NO: 1300654
cauaucacagcccaagauc

SEQ ID NO: 1300656 - RNA, 19 nt, Artificial Sequence
  Description of Artificial Sequence: Synthetic oligonucleotide
  Sense strand starting at position 2637 of SEQ ID NO: 1241799
acuuacugucaguauggua

SEQ ID NO: 1300657 - RNA, 19 nt, Artificial Sequence
  Description of Artificial Sequence: Synthetic oligonucleotide
  Antisense strand to SEQ ID NO: 1300656
uaccauacugacaguaagu

SEQ ID NO: 1300658 - RNA, 19 nt, Artificial Sequence
  Description of Artificial Sequence: Synthetic oligonucleotide
  Sense strand starting at position 2650 of SEQ ID NO: 1241799
augguaucgguccagguau

SEQ ID NO: 1300659 - RNA, 19 nt, Artificial Sequence
  Description of Artificial Sequence: Synthetic oligonucleotide
  Antisense strand to SEQ ID NO: 1300658
auaccuggaccgauaccau

SEQ ID NO: 1300660 - RNA, 19 nt, Artificial Sequence
  Description of Artificial Sequence: Synthetic oligonucleotide
  Sense strand starting at position 2652 of SEQ ID NO: 1241799
gguaucgguccagguauuu

SEQ ID NO: 1300661 - RNA, 19 nt, Artificial Sequence
  Description of Artificial Sequence: Synthetic oligonucleotide
  Antisense strand to SEQ ID NO: 1300660
aaauaccuggaccgauacc

SEQ ID NO: 1300662 - RNA, 19 nt, Artificial Sequence
  Description of Artificial Sequence: Synthetic oligonucleotide
  Sense strand starting at position 2694 of SEQ ID NO: 1241799
gagucugcccauuagaggu

SEQ ID NO: 1300663 - RNA, 19 nt, Artificial Sequence
  Description of Artificial Sequence: Synthetic oligonucleotide
  Antisense strand to SEQ ID NO: 1300662
accucuaaugggcagacuc

SEQ ID NO: 1300664 - RNA, 19 nt, Artificial Sequence
  Description of Artificial Sequence: Synthetic oligonucleotide
  Sense strand starting at position 2760 of SEQ ID NO: 1241799
gagccaauccgucaacucu

SEQ ID NO: 1300665 - RNA, 19 nt, Artificial Sequence
  Description of Artificial Sequence: Synthetic oligonucleotide
  Antisense strand to SEQ ID NO: 1300664
agaguugacggauuggcuc

SEQ ID NO: 1300666 - RNA, 19 nt, Artificial Sequence
  Description of Artificial Sequence: Synthetic oligonucleotide
  Sense strand starting at position 2774 of SEQ ID NO: 1241799
acucuuugacucugcagua

SEQ ID NO: 1300667 - RNA, 19 nt, Artificial Sequence
  Description of Artificial Sequence: Synthetic oligonucleotide
  Antisense strand to SEQ ID NO: 1300666
uacugcagagucaaagagu

SEQ ID NO: 1300668 - RNA, 19 nt, Artificial Sequence
  Description of Artificial Sequence: Synthetic oligonucleotide
  Sense strand starting at position 2917 of SEQ ID NO: 1241799
ggacuuaaguugucaacuc

SEQ ID NO: 1300669 - RNA, 19 nt, Artificial Sequence
  Description of Artificial Sequence: Synthetic oligonucleotide
  Antisense strand to SEQ ID NO: 1300668
gaguugacaacuuaagucc

SEQ ID NO: 1300670 - RNA, 19 nt, Artificial Sequence
  Description of Artificial Sequence: Synthetic oligonucleotide
  Sense strand starting at position 2938 of SEQ ID NO: 1241799
ugcugauaaugaccgaauu

SEQ ID NO: 1300671 - RNA, 19 nt, Artificial Sequence
  Description of Artificial Sequence: Synthetic oligonucleotide
  Antisense strand to SEQ ID NO: 1300670
aauucggucauuaucagca

SEQ ID NO: 1300672 - RNA, 19 nt, Artificial Sequence
  Description of Artificial Sequence: Synthetic oligonucleotide
  Sense strand starting at position 3102 of SEQ ID NO: 1241799
uuguaucaauagccgaauu

SEQ ID NO: 1300673 - RNA, 19 nt, Artificial Sequence
  Description of Artificial Sequence: Synthetic oligonucleotide
  Antisense strand to SEQ ID NO: 1300672
aauucggcuauugauacaa

SEQ ID NO: 1300674 - RNA, 19 nt, Artificial Sequence
  Description of Artificial Sequence: Synthetic oligonucleotide
  Sense strand starting at position 3104 of SEQ ID NO: 1241799
guaucaauagccgaauucu

SEQ ID NO: 1300675 - RNA, 19 nt, Artificial Sequence
  Description of Artificial Sequence: Synthetic oligonucleotide
  Antisense strand to SEQ ID NO: 1300674
agaauucggcuauugauac

SEQ ID NO: 1300676 - RNA, 19 nt, Artificial Sequence
  Description of Artificial Sequence: Synthetic oligonucleotide
  Sense strand starting at position 3202 of SEQ ID NO: 1241799
gagaguggucucuguuauc

SEQ ID NO: 1300677 - RNA, 19 nt, Artificial Sequence
  Description of Artificial Sequence: Synthetic oligonucleotide
  Antisense strand to SEQ ID NO: 1300676
gauaacagagaccacucuc

SEQ ID NO: 1300678 - RNA, 19 nt, Artificial Sequence
  Description of Artificial Sequence: Synthetic oligonucleotide
  Sense strand starting at position 3219 of SEQ ID NO: 1241799
uccauugcugcauaacaga

SEQ ID NO: 1300679 - RNA, 19 nt, Artificial Sequence
  Description of Artificial Sequence: Synthetic oligonucleotide
  Antisense strand to SEQ ID NO: 1300678
ucuguuaugcagcaaugga

SEQ ID NO: 1300680 - RNA, 19 nt, Artificial Sequence
  Description of Artificial Sequence: Synthetic oligonucleotide
  Sense strand starting at position 3738 of SEQ ID NO: 1241799
guggcuuuaugaguaagga

SEQ ID NO: 1300681 - RNA, 19 nt, Artificial Sequence
  Description of Artificial Sequence: Synthetic oligonucleotide
  Antisense strand to SEQ ID NO: 1300680
uccuuacucauaaagccac

SEQ ID NO: 1300682 - RNA, 19 nt, Artificial Sequence
  Description of Artificial Sequence: Synthetic oligonucleotide
  Sense strand starting at position 3739 of SEQ ID NO: 1241799
uggcuuuaugaguaaggac

SEQ ID NO: 1300683 - RNA, 19 nt, Artificial Sequence
  Description of Artificial Sequence: Synthetic oligonucleotide
  Antisense strand to SEQ ID NO: 1300682
guccuuacucauaaagcca

SEQ ID NO: 1300684 - RNA, 19 nt, Artificial Sequence
  Description of Artificial Sequence: Synthetic oligonucleotide
  Sense strand starting at position 3772 of SEQ ID NO: 1241799
ggcuaucaucuggaagcca

SEQ ID NO: 1300685 - RNA, 19 nt, Artificial Sequence
  Description of Artificial Sequence: Synthetic oligonucleotide
  Antisense strand to SEQ ID NO: 1300684
uggcuuccagaugauagcc

SEQ ID NO: 1300686 - RNA, 19 nt, Artificial Sequence
  Description of Artificial Sequence: Synthetic oligonucleotide
  Sense strand starting at position 61 of SEQ ID NO: 1241800
acucaugaccuuugaagau

SEQ ID NO: 1300687 - RNA, 19 nt, Artificial Sequence
  Description of Artificial Sequence: Synthetic oligonucleotide
  Antisense strand to SEQ ID NO: 1300686
aucuucaaaggucaugagu

SEQ ID NO: 1300688 - RNA, 19 nt, Artificial Sequence
  Description of Artificial Sequence: Synthetic oligonucleotide
  Sense strand starting at position 202 of SEQ ID NO: 1241800
guuagcaaagcaugauaau

SEQ ID NO: 1300689 - RNA, 19 nt, Artificial Sequence
  Description of Artificial Sequence: Synthetic oligonucleotide
  Antisense strand to SEQ ID NO: 1300688
auuaucaugcuuugcuaac

SEQ ID NO: 1300690 - RNA, 19 nt, Artificial Sequence
  Description of Artificial Sequence: Synthetic oligonucleotide
  Sense strand starting at position 211 of SEQ ID NO: 1241800
gcaugauaauaauucuuug

SEQ ID NO: 1300691 - RNA, 19 nt, Artificial Sequence
  Description of Artificial Sequence: Synthetic oligonucleotide
  Antisense strand to SEQ ID NO: 1300690
caaagaauuauuaucaugc

SEQ ID NO: 1300692 - RNA, 19 nt, Artificial Sequence
  Description of Artificial Sequence: Synthetic oligonucleotide
  Sense strand starting at position 388 of SEQ ID NO: 1241800
auguuaagcuccuugagga

SEQ ID NO: 1300693 - RNA, 19 nt, Artificial Sequence
  Description of Artificial Sequence: Synthetic oligonucleotide
  Antisense strand to SEQ ID NO: 1300692
uccucaaggagcuuaacau

SEQ ID NO: 1300694 - RNA, 19 nt, Artificial Sequence
  Description of Artificial Sequence: Synthetic oligonucleotide
  Sense strand starting at position 458 of SEQ ID NO: 1241800
ggcacucacuugcucauua

SEQ ID NO: 1300695 - RNA, 19 nt, Artificial Sequence
  Description of Artificial Sequence: Synthetic oligonucleotide
  Antisense strand to SEQ ID NO: 1300694
uaaugagcaagugagugcc

SEQ ID NO: 1300696 - RNA, 19 nt, Artificial Sequence
  Description of Artificial Sequence: Synthetic oligonucleotide
  Sense strand starting at position 495 of SEQ ID NO: 1241800
uguacaaagggauguaacu

SEQ ID NO: 1300697 - RNA, 19 nt, Artificial Sequence
  Description of Artificial Sequence: Synthetic oligonucleotide
  Antisense strand to SEQ ID NO: 1300696
aguuacaucccuuuguaca

SEQ ID NO: 1300698 - RNA, 19 nt, Artificial Sequence
  Description of Artificial Sequence: Synthetic oligonucleotide
  Sense strand starting at position 510 of SEQ ID NO: 1241800
aacugauaggguugcaaau

SEQ ID NO: 1300699 - RNA, 19 nt, Artificial Sequence
  Description of Artificial Sequence: Synthetic oligonucleotide
  Antisense strand to SEQ ID NO: 1300698
auuugcaacccuaucaguu

SEQ ID NO: 1300700 - RNA, 19 nt, Artificial Sequence
  Description of Artificial Sequence: Synthetic oligonucleotide
  Sense strand starting at position 565 of SEQ ID NO: 1241800
ggguauauccauuacaggu

SEQ ID NO: 1300701 - RNA, 19 nt, Artificial Sequence
  Description of Artificial Sequence: Synthetic oligonucleotide
  Antisense strand to SEQ ID NO: 1300700
accuguaauggauauaccc

SEQ ID NO: 1300702 - RNA, 19 nt, Artificial Sequence
  Description of Artificial Sequence: Synthetic oligonucleotide
  Sense strand starting at position 605 of SEQ ID NO: 1241800
gcuuacucagugcaaagau

SEQ ID NO: 1300703 - RNA, 19 nt, Artificial Sequence
  Description of Artificial Sequence: Synthetic oligonucleotide
  Antisense strand to SEQ ID NO: 1300702
aucuuugcacugaguaagc

SEQ ID NO: 1300704 - RNA, 19 nt, Artificial Sequence
  Description of Artificial Sequence: Synthetic oligonucleotide
  Sense strand starting at position 701 of SEQ ID NO: 1241800
gaaauuguaucaguuaguu

SEQ ID NO: 1300705 - RNA, 19 nt, Artificial Sequence
  Description of Artificial Sequence: Synthetic oligonucleotide
  Antisense strand to SEQ ID NO: 1300704
aacuaacugauacaauuuc

SEQ ID NO: 1300706 - RNA, 19 nt, Artificial Sequence
  Description of Artificial Sequence: Synthetic oligonucleotide
  Sense strand starting at position 709 of SEQ ID NO: 1241800
aucaguuaguuuccuuuaa

SEQ ID NO: 1300707 - RNA, 19 nt, Artificial Sequence
  Description of Artificial Sequence: Synthetic oligonucleotide
  Antisense strand to SEQ ID NO: 1300706
uuaaaggaaacuaacugau

SEQ ID NO: 1300708 - RNA, 19 nt, Artificial Sequence
  Description of Artificial Sequence: Synthetic oligonucleotide
  Sense strand starting at position 710 of SEQ ID NO: 1241800
ucaguuaguuuccuuuaaa

SEQ ID NO: 1300709 - RNA, 19 nt, Artificial Sequence
  Description of Artificial Sequence: Synthetic oligonucleotide
  Antisense strand to SEQ ID NO: 1300708
uuuaaaggaaacuaacuga

SEQ ID NO: 1300710 - RNA, 19 nt, Artificial Sequence
  Description of Artificial Sequence: Synthetic oligonucleotide
  Sense strand starting at position 846 of SEQ ID NO: 1241800
guugcauuccugugggaag

SEQ ID NO: 1300711 - RNA, 19 nt, Artificial Sequence
  Description of Artificial Sequence: Synthetic oligonucleotide
  Antisense strand to SEQ ID NO: 1300710
cuucccacaggaaugcaac

SEQ ID NO: 1300712 - RNA, 19 nt, Artificial Sequence
  Description of Artificial Sequence: Synthetic oligonucleotide
  Sense strand starting at position 1097 of SEQ ID NO: 1241800
ugaucaauucuagauugcu

SEQ ID NO: 1300713 - RNA, 19 nt, Artificial Sequence
  Description of Artificial Sequence: Synthetic oligonucleotide
  Antisense strand to SEQ ID NO: 1300712
agcaaucuagaauugauca

SEQ ID NO: 1300714 - RNA, 19 nt, Artificial Sequence
  Description of Artificial Sequence: Synthetic oligonucleotide
  Sense strand starting at position 1100 of SEQ ID NO: 1241800
ucaauucuagauugcuaag

SEQ ID NO: 1300715 - RNA, 19 nt, Artificial Sequence
  Description of Artificial Sequence: Synthetic oligonucleotide
  Antisense strand to SEQ ID NO: 1300714
cuuagcaaucuagaauuga

SEQ ID NO: 1300716 - RNA, 19 nt, Artificial Sequence
  Description of Artificial Sequence: Synthetic oligonucleotide
  Sense strand starting at position 1106 of SEQ ID NO: 1241800
cuagauugcuaagcuaaau

SEQ ID NO: 1300717 - RNA, 19 nt, Artificial Sequence
  Description of Artificial Sequence: Synthetic oligonucleotide
  Antisense strand to SEQ ID NO: 1300716
auuuagcuuagcaaucuag

SEQ ID NO: 1300718 - RNA, 19 nt, Artificial Sequence
  Description of Artificial Sequence: Synthetic oligonucleotide
  Sense strand starting at position 2011 of SEQ ID NO: 1241800
cugguuucugauuggcuga

SEQ ID NO: 1300719 - RNA, 19 nt, Artificial Sequence
  Description of Artificial Sequence: Synthetic oligonucleotide
  Antisense strand to SEQ ID NO: 1300718
ucagccaaucagaaaccag

SEQ ID NO: 1300720 - RNA, 19 nt, Artificial Sequence
  Description of Artificial Sequence: Synthetic oligonucleotide
  Sense strand starting at position 2012 of SEQ ID NO: 1241800
ugguuucugauuggcugaa

SEQ ID NO: 1300721 - RNA, 19 nt, Artificial Sequence
  Description of Artificial Sequence: Synthetic oligonucleotide
  Antisense strand to SEQ ID NO: 1300720
uucagccaaucagaaacca

SEQ ID NO: 1300722 - RNA, 19 nt, Artificial Sequence
  Description of Artificial Sequence: Synthetic oligonucleotide
  Sense strand starting at position 2013 of SEQ ID NO: 1241800
gguuucugauuggcugaaa

SEQ ID NO: 1300723 - RNA, 19 nt, Artificial Sequence
  Description of Artificial Sequence: Synthetic oligonucleotide
  Antisense strand to SEQ ID NO: 1300722
uuucagccaaucagaaacc

SEQ ID NO: 1300724 - RNA, 19 nt, Artificial Sequence
  Description of Artificial Sequence: Synthetic oligonucleotide
  Sense strand starting at position 2372 of SEQ ID NO: 1241800
uauaguaucguguaaacuu

SEQ ID NO: 1300725 - RNA, 19 nt, Artificial Sequence
  Description of Artificial Sequence: Synthetic oligonucleotide
  Antisense strand to SEQ ID NO: 1300724
aaguuuacacgauacuaua

SEQ ID NO: 1300726 - RNA, 19 nt, Artificial Sequence
  Description of Artificial Sequence: Synthetic oligonucleotide
  Sense strand starting at position 2406 of SEQ ID NO: 1241800
agaacucagccuuggcuua

SEQ ID NO: 1300727 - RNA, 19 nt, Artificial Sequence
  Description of Artificial Sequence: Synthetic oligonucleotide
  Antisense strand to SEQ ID NO: 1300726
uaagccaaggcugaguucu

SEQ ID NO: 1300728 - RNA, 19 nt, Artificial Sequence
  Description of Artificial Sequence: Synthetic oligonucleotide
  Sense strand starting at position 2411 of SEQ ID NO: 1241800
ucagccuuggcuuaauacu

SEQ ID NO: 1300729 - RNA, 19 nt, Artificial Sequence
  Description of Artificial Sequence: Synthetic oligonucleotide
  Antisense strand to SEQ ID NO: 1300728
aguauuaagccaaggcuga

SEQ ID NO: 1300730 - RNA, 19 nt, Artificial Sequence
  Description of Artificial Sequence: Synthetic oligonucleotide
  Sense strand starting at position 2419 of SEQ ID NO: 1241800
ggcuuaauacuagaccauu

SEQ ID NO: 1300731 - RNA, 19 nt, Artificial Sequence
  Description of Artificial Sequence: Synthetic oligonucleotide
  Antisense strand to SEQ ID NO: 1300730
aauggucuaguauuaagcc

SEQ ID NO: 1300732 - RNA, 19 nt, Artificial Sequence
  Description of Artificial Sequence: Synthetic oligonucleotide
  Sense strand starting at position 2439 of SEQ ID NO: 1241800
uuagacagguguuucuuaa

SEQ ID NO: 1300733 - RNA, 19 nt, Artificial Sequence
  Description of Artificial Sequence: Synthetic oligonucleotide
  Antisense strand to SEQ ID NO: 1300732
uuaagaaacaccugucuaa

SEQ ID NO: 1300734 - RNA, 19 nt, Artificial Sequence
  Description of Artificial Sequence: Synthetic oligonucleotide
  Sense strand starting at position 2526 of SEQ ID NO: 1241800
uuugaugaaguccgaguua

SEQ ID NO: 1300735 - RNA, 19 nt, Artificial Sequence
  Description of Artificial Sequence: Synthetic oligonucleotide
  Antisense strand to SEQ ID NO: 1300734
uaacucggacuucaucaaa

SEQ ID NO: 1300736 - RNA, 19 nt, Artificial Sequence
  Description of Artificial Sequence: Synthetic oligonucleotide
  Sense strand starting at position 2531 of SEQ ID NO: 1241800
ugaaguccgaguuaucuuu

SEQ ID NO: 1300737 - RNA, 19 nt, Artificial Sequence
  Description of Artificial Sequence: Synthetic oligonucleotide
  Antisense strand to SEQ ID NO: 1300736
aaagauaacucggacuuca

SEQ ID NO: 1300738 - RNA, 19 nt, Artificial Sequence
  Description of Artificial Sequence: Synthetic oligonucleotide
  Sense strand starting at position 2816 of SEQ ID NO: 1241800
ugcauuuauuucuggauuc

SEQ ID NO: 1300739 - RNA, 19 nt, Artificial Sequence
  Description of Artificial Sequence: Synthetic oligonucleotide
  Antisense strand to SEQ ID NO: 1300738
gaauccagaaauaaaugca

SEQ ID NO: 1300740 - RNA, 19 nt, Artificial Sequence
  Description of Artificial Sequence: Synthetic oligonucleotide
  Sense strand starting at position 2853 of SEQ ID NO: 1241800
ucuguauggucauccuuau

SEQ ID NO: 1300741 - RNA, 19 nt, Artificial Sequence
  Description of Artificial Sequence: Synthetic oligonucleotide
  Antisense strand to SEQ ID NO: 1300740
auaaggaugaccauacaga

SEQ ID NO: 1300742 - RNA, 19 nt, Artificial Sequence
  Description of Artificial Sequence: Synthetic oligonucleotide
  Sense strand starting at position 2860 of SEQ ID NO: 1241800
ggucauccuuaugccagua

SEQ ID NO: 1300743 - RNA, 19 nt, Artificial Sequence
  Description of Artificial Sequence: Synthetic oligonucleotide
  Antisense strand to SEQ ID NO: 1300742
uacuggcauaaggaugacc

SEQ ID NO: 1300744 - RNA, 19 nt, Artificial Sequence
  Description of Artificial Sequence: Synthetic oligonucleotide
  Sense strand starting at position 2890 of SEQ ID NO: 1241800
ucauuacucuagcuuugua

SEQ ID NO: 1300745 - RNA, 19 nt, Artificial Sequence
  Description of Artificial Sequence: Synthetic oligonucleotide
  Antisense strand to SEQ ID NO: 1300744
uacaaagcuagaguaauga

SEQ ID NO: 1300746 - RNA, 19 nt, Artificial Sequence
  Description of Artificial Sequence: Synthetic oligonucleotide
  Sense strand starting at position 3012 of SEQ ID NO: 1241800
gccugccgauuucuacaaa

SEQ ID NO: 1300747 - RNA, 19 nt, Artificial Sequence
  Description of Artificial Sequence: Synthetic oligonucleotide
  Antisense strand to SEQ ID NO: 1300746
uuuguagaaaucggcaggc

SEQ ID NO: 1300748 - RNA, 19 nt, Artificial Sequence
  Description of Artificial Sequence: Synthetic oligonucleotide
  Sense strand starting at position 3460 of SEQ ID NO: 1241800
gguccuuaauuugacaaag

SEQ ID NO: 1300749 - RNA, 19 nt, Artificial Sequence
  Description of Artificial Sequence: Synthetic oligonucleotide
  Antisense strand to SEQ ID NO: 1300748
cuuugucaaauuaaggacc

SEQ ID NO: 1300750 - RNA, 19 nt, Artificial Sequence
  Description of Artificial Sequence: Synthetic oligonucleotide
  Sense strand starting at position 3462 of SEQ ID NO: 1241800
uccuuaauuugacaaagga

SEQ ID NO: 1300751 - RNA, 19 nt, Artificial Sequence
  Description of Artificial Sequence: Synthetic oligonucleotide
  Antisense strand to SEQ ID NO: 1300750
uccuuugucaaauuaagga

SEQ ID NO: 1300752 - RNA, 19 nt, Artificial Sequence
  Description of Artificial Sequence: Synthetic oligonucleotide
  Sense strand starting at position 3547 of SEQ ID NO: 1241800
guagaugcugcucacuaua

SEQ ID NO: 1300753 - RNA, 19 nt, Artificial Sequence
  Description of Artificial Sequence: Synthetic oligonucleotide
  Antisense strand to SEQ ID NO: 1300752
uauagugagcagcaucuac

SEQ ID NO: 1300754 - RNA, 19 nt, Artificial Sequence
  Description of Artificial Sequence: Synthetic oligonucleotide
  Sense strand starting at position 3549 of SEQ ID NO: 1241800
agaugcugcucacuauagu

SEQ ID NO: 1300755 - RNA, 19 nt, Artificial Sequence
  Description of Artificial Sequence: Synthetic oligonucleotide
  Antisense strand to SEQ ID NO: 1300754
acuauagugagcagcaucu

SEQ ID NO: 1300756 - RNA, 19 nt, Artificial Sequence
  Description of Artificial Sequence: Synthetic oligonucleotide
  Sense strand starting at position 3577 of SEQ ID NO: 1241800
gaagaauccuggccuggca

SEQ ID NO: 1300757 - RNA, 19 nt, Artificial Sequence
  Description of Artificial Sequence: Synthetic oligonucleotide
  Antisense strand to SEQ ID NO: 1300756
ugccaggccaggauucuuc

SEQ ID NO: 1300758 - RNA, 19 nt, Artificial Sequence
  Description of Artificial Sequence: Synthetic oligonucleotide
  Sense strand starting at position 3901 of SEQ ID NO: 1241800
ccuuauaaagaaugguagu

SEQ ID NO: 1300759 - RNA, 19 nt, Artificial Sequence
  Description of Artificial Sequence: Synthetic oligonucleotide
  Antisense strand to SEQ ID NO: 1300758
acuaccauucuuuauaagg

SEQ ID NO: 1300760 - RNA, 19 nt, Artificial Sequence
  Description of Artificial Sequence: Synthetic oligonucleotide
  Sense strand starting at position 3917 of SEQ ID NO: 1241800
agucuuugguuucccaaau

SEQ ID NO: 1300761 - RNA, 19 nt, Artificial Sequence
  Description of Artificial Sequence: Synthetic oligonucleotide
  Antisense strand to SEQ ID NO: 1300760
auuugggaaaccaaagacu

SEQ ID NO: 1300762 - RNA, 19 nt, Artificial Sequence
  Description of Artificial Sequence: Synthetic oligonucleotide
  Sense strand starting at position 3918 of SEQ ID NO: 1241800
gucuuugguuucccaaaua

SEQ ID NO: 1300763 - RNA, 19 nt, Artificial Sequence
  Description of Artificial Sequence: Synthetic oligonucleotide
  Antisense strand to SEQ ID NO: 1300762
uauuugggaaaccaaagac

SEQ ID NO: 1300764 - RNA, 19 nt, Artificial Sequence
  Description of Artificial Sequence: Synthetic oligonucleotide
  Sense strand starting at position 3963 of SEQ ID NO: 1241800
augcuaagugcuggaauuu

SEQ ID NO: 1300765 - RNA, 19 nt, Artificial Sequence
  Description of Artificial Sequence: Synthetic oligonucleotide
  Antisense strand to SEQ ID NO: 1300764
aaauuccagcacuuagcau

SEQ ID NO: 1300766 - RNA, 19 nt, Artificial Sequence
  Description of Artificial Sequence: Synthetic oligonucleotide
  Sense strand starting at position 396 of SEQ ID NO: 1241801
aggagaaucagcggcacuu

SEQ ID NO: 1300767 - RNA, 19 nt, Artificial Sequence
  Description of Artificial Sequence: Synthetic oligonucleotide
  Antisense strand to SEQ ID NO: 1300766
aagugccgcugauucuccu

SEQ ID NO: 1300768 - RNA, 19 nt, Artificial Sequence
  Description of Artificial Sequence: Synthetic oligonucleotide
  Sense strand starting at position 594 of SEQ ID NO: 1241801
aucugugugcgcuugagua

SEQ ID NO: 1300769 - RNA, 19 nt, Artificial Sequence
  Description of Artificial Sequence: Synthetic oligonucleotide
  Antisense strand to SEQ ID NO: 1300768
uacucaagcgcacacagau

SEQ ID NO: 1300770 - RNA, 19 nt, Artificial Sequence
  Description of Artificial Sequence: Synthetic oligonucleotide
  Sense strand starting at position 601 of SEQ ID NO: 1241801
ugcgcuugaguaucuguau

SEQ ID NO: 1300771 - RNA, 19 nt, Artificial Sequence
  Description of Artificial Sequence: Synthetic oligonucleotide
  Antisense strand to SEQ ID NO: 1300770
auacagauacucaagcgca

SEQ ID NO: 1300772 - RNA, 19 nt, Artificial Sequence
  Description of Artificial Sequence: Synthetic oligonucleotide
  Sense strand starting at position 604 of SEQ ID NO: 1241801
gcuugaguaucuguauuug

SEQ ID NO: 1300773 - RNA, 19 nt, Artificial Sequence
  Description of Artificial Sequence: Synthetic oligonucleotide
  Antisense strand to SEQ ID NO: 1300772
caaauacagauacucaagc

SEQ ID NO: 1300774 - RNA, 19 nt, Artificial Sequence
  Description of Artificial Sequence: Synthetic oligonucleotide
  Sense strand starting at position 608 of SEQ ID NO: 1241801
gaguaucuguauuugugua

SEQ ID NO: 1300775 - RNA, 19 nt, Artificial Sequence
  Description of Artificial Sequence: Synthetic oligonucleotide
  Antisense strand to SEQ ID NO: 1300774
uacacaaauacagauacuc

SEQ ID NO: 1300776 - RNA, 19 nt, Artificial Sequence
  Description of Artificial Sequence: Synthetic oligonucleotide
  Sense strand starting at position 609 of SEQ ID NO: 1241801
aguaucuguauuuguguau

SEQ ID NO: 1300777 - RNA, 19 nt, Artificial Sequence
  Description of Artificial Sequence: Synthetic oligonucleotide
  Antisense strand to SEQ ID NO: 1300776
auacacaaauacagauacu

SEQ ID NO: 1300778 - RNA, 19 nt, Artificial Sequence
  Description of Artificial Sequence: Synthetic oligonucleotide
  Sense strand starting at position 613 of SEQ ID NO: 1241801
ucuguauuuguguauguau

SEQ ID NO: 1300779 - RNA, 19 nt, Artificial Sequence
  Description of Artificial Sequence: Synthetic oligonucleotide
  Antisense strand to SEQ ID NO: 1300778
auacauacacaaauacaga

SEQ ID NO: 1300780 - RNA, 19 nt, Artificial Sequence
  Description of Artificial Sequence: Synthetic oligonucleotide
  Sense strand starting at position 798 of SEQ ID NO: 1241801
ccgggcuauuucuuugcga

SEQ ID NO: 1300781 - RNA, 19 nt, Artificial Sequence
  Description of Artificial Sequence: Synthetic oligonucleotide
  Antisense strand to SEQ ID NO: 1300780
ucgcaaagaaauagcccgg

SEQ ID NO: 1300782 - RNA, 19 nt, Artificial Sequence
  Description of Artificial Sequence: Synthetic oligonucleotide
  Sense strand starting at position 799 of SEQ ID NO: 1241801
cgggcuauuucuuugcgaa

SEQ ID NO: 1300783 - RNA, 19 nt, Artificial Sequence
  Description of Artificial Sequence: Synthetic oligonucleotide
  Antisense strand to SEQ ID NO: 1300782
uucgcaaagaaauagcccg

SEQ ID NO: 1300784 - RNA, 19 nt, Artificial Sequence
  Description of Artificial Sequence: Synthetic oligonucleotide
  Sense strand starting at position 800 of SEQ ID NO: 1241801
gggcuauuucuuugcgaag

SEQ ID NO: 1300785 - RNA, 19 nt, Artificial Sequence
  Description of Artificial Sequence: Synthetic oligonucleotide
  Antisense strand to SEQ ID NO: 1300784
cuucgcaaagaaauagccc

SEQ ID NO: 1300786 - RNA, 19 nt, Artificial Sequence
  Description of Artificial Sequence: Synthetic oligonucleotide
  Sense strand starting at position 801 of SEQ ID NO: 1241801
ggcuauuucuuugcgaaga

SEQ ID NO: 1300787 - RNA, 19 nt, Artificial Sequence
  Description of Artificial Sequence: Synthetic oligonucleotide
  Antisense strand to SEQ ID NO: 1300786
ucuucgcaaagaaauagcc

SEQ ID NO: 1300788 - RNA, 19 nt, Artificial Sequence
  Description of Artificial Sequence: Synthetic oligonucleotide
  Sense strand starting at position 965 of SEQ ID NO: 1241801
cagccuuuccugggaucga

SEQ ID NO: 1300789 - RNA, 19 nt, Artificial Sequence
  Description of Artificial Sequence: Synthetic oligonucleotide
  Antisense strand to SEQ ID NO: 1300788
ucgaucccaggaaaggcug

SEQ ID NO: 1300790 - RNA, 19 nt, Artificial Sequence
  Description of Artificial Sequence: Synthetic oligonucleotide
  Sense strand starting at position 1058 of SEQ ID NO: 1241801
ucggaagccaccgagaaau

SEQ ID NO: 1300791 - RNA, 19 nt, Artificial Sequence
  Description of Artificial Sequence: Synthetic oligonucleotide
  Antisense strand to SEQ ID NO: 1300790
auuucucgguggcuuccga

SEQ ID NO: 1300792 - RNA, 19 nt, Artificial Sequence
  Description of Artificial Sequence: Synthetic oligonucleotide
  Sense strand starting at position 2187 of SEQ ID NO: 1241801
gggauucagcccugaugug

SEQ ID NO: 1300793 - RNA, 19 nt, Artificial Sequence
  Description of Artificial Sequence: Synthetic oligonucleotide
  Antisense strand to SEQ ID NO: 1300792
cacaucagggcugaauccc

SEQ ID NO: 1300794 - RNA, 19 nt, Artificial Sequence
  Description of Artificial Sequence: Synthetic oligonucleotide
  Sense strand starting at position 2314 of SEQ ID NO: 1241801
gggcaacacccaugaagau

SEQ ID NO: 1300795 - RNA, 19 nt, Artificial Sequence
  Description of Artificial Sequence: Synthetic oligonucleotide
  Antisense strand to SEQ ID NO: 1300794
aucuucauggguguugccc

SEQ ID NO: 1300796 - RNA, 19 nt, Artificial Sequence
  Description of Artificial Sequence: Synthetic oligonucleotide
  Sense strand starting at position 2323 of SEQ ID NO: 1241801
ccaugaagaucagcgucau

SEQ ID NO: 1300797 - RNA, 19 nt, Artificial Sequence
  Description of Artificial Sequence: Synthetic oligonucleotide
  Antisense strand to SEQ ID NO: 1300796
augacgcugaucuucaugg

SEQ ID NO: 1300798 - RNA, 19 nt, Artificial Sequence
  Description of Artificial Sequence: Synthetic oligonucleotide
  Sense strand starting at position 2391 of SEQ ID NO: 1241801
cugucuaccuggguuugaa

SEQ ID NO: 1300799 - RNA, 19 nt, Artificial Sequence
  Description of Artificial Sequence: Synthetic oligonucleotide
  Antisense strand to SEQ ID NO: 1300798
uucaaacccagguagacag

SEQ ID NO: 1300800 - RNA, 19 nt, Artificial Sequence
  Description of Artificial Sequence: Synthetic oligonucleotide
  Sense strand starting at position 2394 of SEQ ID NO: 1241801
ucuaccuggguuugaauau

SEQ ID NO: 1300801 - RNA, 19 nt, Artificial Sequence
  Description of Artificial Sequence: Synthetic oligonucleotide
  Antisense strand to SEQ ID NO: 1300800
auauucaaacccagguaga

SEQ ID NO: 1300802 - RNA, 19 nt, Artificial Sequence
  Description of Artificial Sequence: Synthetic oligonucleotide
  Sense strand starting at position 2457 of SEQ ID NO: 1241801
uguaaauuccagugugauc

SEQ ID NO: 1300803 - RNA, 19 nt, Artificial Sequence
  Description of Artificial Sequence: Synthetic oligonucleotide
  Antisense strand to SEQ ID NO: 1300802
gaucacacuggaauuuaca

SEQ ID NO: 1300804 - RNA, 19 nt, Artificial Sequence
  Description of Artificial Sequence: Synthetic oligonucleotide
  Sense strand starting at position 2462 of SEQ ID NO: 1241801
auuccagugugaucuuaga

SEQ ID NO: 1300805 - RNA, 19 nt, Artificial Sequence
  Description of Artificial Sequence: Synthetic oligonucleotide
  Antisense strand to SEQ ID NO: 1300804
ucuaagaucacacuggaau

SEQ ID NO: 1300806 - RNA, 19 nt, Artificial Sequence
  Description of Artificial Sequence: Synthetic oligonucleotide
  Sense strand starting at position 2572 of SEQ ID NO: 1241801
gcuugauuagaucauaauu

SEQ ID NO: 1300807 - RNA, 19 nt, Artificial Sequence
  Description of Artificial Sequence: Synthetic oligonucleotide
  Antisense strand to SEQ ID NO: 1300806
aauuaugaucuaaucaagc

SEQ ID NO: 1300808 - RNA, 19 nt, Artificial Sequence
  Description of Artificial Sequence: Synthetic oligonucleotide
  Sense strand starting at position 2643 of SEQ ID NO: 1241801
agcauaagaugcuuccuua

SEQ ID NO: 1300809 - RNA, 19 nt, Artificial Sequence
  Description of Artificial Sequence: Synthetic oligonucleotide
  Antisense strand to SEQ ID NO: 1300808
uaaggaagcaucuuaugcu

SEQ ID NO: 1300810 - RNA, 19 nt, Artificial Sequence
  Description of Artificial Sequence: Synthetic oligonucleotide
  Sense strand starting at position 2725 of SEQ ID NO: 1241801
cagagaagcuaagucucau

SEQ ID NO: 1300811 - RNA, 19 nt, Artificial Sequence
  Description of Artificial Sequence: Synthetic oligonucleotide
  Antisense strand to SEQ ID NO: 1300810
augagacuuagcuucucug

SEQ ID NO: 1300812 - RNA, 19 nt, Artificial Sequence
  Description of Artificial Sequence: Synthetic oligonucleotide
  Sense strand starting at position 2752 of SEQ ID NO: 1241801
ucauacagccauuaaguga

SEQ ID NO: 1300813 - RNA, 19 nt, Artificial Sequence
  Description of Artificial Sequence: Synthetic oligonucleotide
  Antisense strand to SEQ ID NO: 1300812
ucacuuaauggcuguauga

SEQ ID NO: 1300814 - RNA, 19 nt, Artificial Sequence
  Description of Artificial Sequence: Synthetic oligonucleotide
  Sense strand starting at position 2779 of SEQ ID NO: 1241801
ggacuugaaccugguucua

SEQ ID NO: 1300815 - RNA, 19 nt, Artificial Sequence
  Description of Artificial Sequence: Synthetic oligonucleotide
  Antisense strand to SEQ ID NO: 1300814
uagaaccagguucaagucc

SEQ ID NO: 1300816 - RNA, 19 nt, Artificial Sequence
  Description of Artificial Sequence: Synthetic oligonucleotide
  Sense strand starting at position 2857 of SEQ ID NO: 1241801
cagcucugauuugagagaa

SEQ ID NO: 1300817 - RNA, 19 nt, Artificial Sequence
  Description of Artificial Sequence: Synthetic oligonucleotide
  Antisense strand to SEQ ID NO: 1300816
uucucucaaaucagagcug

SEQ ID NO: 1300818 - RNA, 19 nt, Artificial Sequence
  Description of Artificial Sequence: Synthetic oligonucleotide
  Sense strand starting at position 2885 of SEQ ID NO: 1241801
augggaguuuauccagaca

SEQ ID NO: 1300819 - RNA, 19 nt, Artificial Sequence
  Description of Artificial Sequence: Synthetic oligonucleotide
  Antisense strand to SEQ ID NO: 1300818
ugucuggauaaacucccau

SEQ ID NO: 1300820 - RNA, 19 nt, Artificial Sequence
  Description of Artificial Sequence: Synthetic oligonucleotide
  Sense strand starting at position 2915 of SEQ ID NO: 1241801
cuuggagcuucuucuuuga

SEQ ID NO: 1300821 - RNA, 19 nt, Artificial Sequence
  Description of Artificial Sequence: Synthetic oligonucleotide
  Antisense strand to SEQ ID NO: 1300820
ucaaagaagaagcuccaag

SEQ ID NO: 1300822 - RNA, 19 nt, Artificial Sequence
  Description of Artificial Sequence: Synthetic oligonucleotide
  Sense strand starting at position 3020 of SEQ ID NO: 1241801
uagugacaccaauguguau

SEQ ID NO: 1300823 - RNA, 19 nt, Artificial Sequence
  Description of Artificial Sequence: Synthetic oligonucleotide
  Antisense strand to SEQ ID NO: 1300822
auacacauuggugucacua

SEQ ID NO: 1300824 - RNA, 19 nt, Artificial Sequence
  Description of Artificial Sequence: Synthetic oligonucleotide
  Sense strand starting at position 3087 of SEQ ID NO: 1241801
gcaggaauauuggugccau

SEQ ID NO: 1300825 - RNA, 19 nt, Artificial Sequence
  Description of Artificial Sequence: Synthetic oligonucleotide
  Antisense strand to SEQ ID NO: 1300824
auggcaccaauauuccugc

SEQ ID NO: 1300826 - RNA, 19 nt, Artificial Sequence
  Description of Artificial Sequence: Synthetic oligonucleotide
  Sense strand starting at position 3200 of SEQ ID NO: 1241801
uuucucaacuggcugauua

SEQ ID NO: 1300827 - RNA, 19 nt, Artificial Sequence
  Description of Artificial Sequence: Synthetic oligonucleotide
  Antisense strand to SEQ ID NO: 1300826
uaaucagccaguugagaaa

SEQ ID NO: 1300828 - RNA, 19 nt, Artificial Sequence
  Description of Artificial Sequence: Synthetic oligonucleotide
  Sense strand starting at position 3201 of SEQ ID NO: 1241801
uucucaacuggcugauuaa

SEQ ID NO: 1300829 - RNA, 19 nt, Artificial Sequence
  Description of Artificial Sequence: Synthetic oligonucleotide
  Antisense strand to SEQ ID NO: 1300828
uuaaucagccaguugagaa

SEQ ID NO: 1300830 - RNA, 19 nt, Artificial Sequence
  Description of Artificial Sequence: Synthetic oligonucleotide
  Sense strand starting at position 3202 of SEQ ID NO: 1241801
ucucaacuggcugauuaaa

SEQ ID NO: 1300831 - RNA, 19 nt, Artificial Sequence
  Description of Artificial Sequence: Synthetic oligonucleotide
  Antisense strand to SEQ ID NO: 1300830
uuuaaucagccaguugaga

SEQ ID NO: 1300832 - RNA, 19 nt, Artificial Sequence
  Description of Artificial Sequence: Synthetic oligonucleotide
  Sense strand starting at position 3224 of SEQ ID NO: 1241801
agagcaaucccuugaaaug

SEQ ID NO: 1300833 - RNA, 19 nt, Artificial Sequence
  Description of Artificial Sequence: Synthetic oligonucleotide
  Antisense strand to SEQ ID NO: 1300832
cauuucaagggauugcucu

SEQ ID NO: 1300834 - RNA, 19 nt, Artificial Sequence
  Description of Artificial Sequence: Synthetic oligonucleotide
  Sense strand starting at position 3233 of SEQ ID NO: 1241801
ccuugaaaugagggccaua

SEQ ID NO: 1300835 - RNA, 19 nt, Artificial Sequence
  Description of Artificial Sequence: Synthetic oligonucleotide
  Antisense strand to SEQ ID NO: 1300834
uauggcccucauuucaagg

SEQ ID NO: 1300836 - RNA, 19 nt, Artificial Sequence
  Description of Artificial Sequence: Synthetic oligonucleotide
  Sense strand starting at position 3290 of SEQ ID NO: 1241801
acuguuuccucuguaauuu

SEQ ID NO: 1300837 - RNA, 19 nt, Artificial Sequence
  Description of Artificial Sequence: Synthetic oligonucleotide
  Antisense strand to SEQ ID NO: 1300836
aaauuacagaggaaacagu

SEQ ID NO: 1300838 - RNA, 19 nt, Artificial Sequence
  Description of Artificial Sequence: Synthetic oligonucleotide
  Sense strand starting at position 3367 of SEQ ID NO: 1241801
cugacauguaagugaaaga

SEQ ID NO: 1300839 - RNA, 19 nt, Artificial Sequence
  Description of Artificial Sequence: Synthetic oligonucleotide
  Antisense strand to SEQ ID NO: 1300838
ucuuucacuuacaugucag

SEQ ID NO: 1300840 - RNA, 19 nt, Artificial Sequence
  Description of Artificial Sequence: Synthetic oligonucleotide
  Sense strand starting at position 3416 of SEQ ID NO: 1241801
gcugguagccuugugaguu

SEQ ID NO: 1300841 - RNA, 19 nt, Artificial Sequence
  Description of Artificial Sequence: Synthetic oligonucleotide
  Antisense strand to SEQ ID NO: 1300840
aacucacaaggcuaccagc

SEQ ID NO: 1300842 - RNA, 19 nt, Artificial Sequence
  Description of Artificial Sequence: Synthetic oligonucleotide
  Sense strand starting at position 3790 of SEQ ID NO: 1241801
aggagaucuggucguggaa

SEQ ID NO: 1300843 - RNA, 19 nt, Artificial Sequence
  Description of Artificial Sequence: Synthetic oligonucleotide
  Antisense strand to SEQ ID NO: 1300842
uuccacgaccagaucuccu

SEQ ID NO: 1300844 - RNA, 19 nt, Artificial Sequence
  Description of Artificial Sequence: Synthetic oligonucleotide
  Sense strand starting at position 3793 of SEQ ID NO: 1241801
agaucuggucguggaaaca

SEQ ID NO: 1300845 - RNA, 19 nt, Artificial Sequence
  Description of Artificial Sequence: Synthetic oligonucleotide
  Antisense strand to SEQ ID NO: 1300844
uguuuccacgaccagaucu

SEQ ID NO: 1300846 - RNA, 19 nt, Artificial Sequence
  Description of Artificial Sequence: Synthetic oligonucleotide
  Sense strand starting at position 24 of SEQ ID NO: 1241802
agcuuagaguccuagggaa

SEQ ID NO: 1300847 - RNA, 19 nt, Artificial Sequence
  Description of Artificial Sequence: Synthetic oligonucleotide
  Antisense strand to SEQ ID NO: 1300846
uucccuaggacucuaagcu

SEQ ID NO: 1300848 - RNA, 19 nt, Artificial Sequence
  Description of Artificial Sequence: Synthetic oligonucleotide
  Sense strand starting at position 26 of SEQ ID NO: 1241802
cuuagaguccuagggaaug

SEQ ID NO: 1300849 - RNA, 19 nt, Artificial Sequence
  Description of Artificial Sequence: Synthetic oligonucleotide
  Antisense strand to SEQ ID NO: 1300848
cauucccuaggacucuaag

SEQ ID NO: 1300850 - RNA, 19 nt, Artificial Sequence
  Description of Artificial Sequence: Synthetic oligonucleotide
  Sense strand starting at position 67 of SEQ ID NO: 1241802
acaguuaacugacauaaug

SEQ ID NO: 1300851 - RNA, 19 nt, Artificial Sequence
  Description of Artificial Sequence: Synthetic oligonucleotide
  Antisense strand to SEQ ID NO: 1300850
cauuaugucaguuaacugu

SEQ ID NO: 1300852 - RNA, 19 nt, Artificial Sequence
  Description of Artificial Sequence: Synthetic oligonucleotide
  Sense strand starting at position 114 of SEQ ID NO: 1241802
ccuggaagcucauuaaauu

SEQ ID NO: 1300853 - RNA, 19 nt, Artificial Sequence
  Description of Artificial Sequence: Synthetic oligonucleotide
  Antisense strand to SEQ ID NO: 1300852
aauuuaaugagcuuccagg

SEQ ID NO: 1300854 - RNA, 19 nt, Artificial Sequence
  Description of Artificial Sequence: Synthetic oligonucleotide
  Sense strand starting at position 256 of SEQ ID NO: 1241802
acuagaaacuuagggugau

SEQ ID NO: 1300855 - RNA, 19 nt, Artificial Sequence
  Description of Artificial Sequence: Synthetic oligonucleotide
  Antisense strand to SEQ ID NO: 1300854
aucacccuaaguuucuagu

SEQ ID NO: 1300856 - RNA, 19 nt, Artificial Sequence
  Description of Artificial Sequence: Synthetic oligonucleotide
  Sense strand starting at position 257 of SEQ ID NO: 1241802
cuagaaacuuagggugauc

SEQ ID NO: 1300857 - RNA, 19 nt, Artificial Sequence
  Description of Artificial Sequence: Synthetic oligonucleotide
  Antisense strand to SEQ ID NO: 1300856
gaucacccuaaguuucuag

SEQ ID NO: 1300858 - RNA, 19 nt, Artificial Sequence
  Description of Artificial Sequence: Synthetic oligonucleotide
  Sense strand starting at position 297 of SEQ ID NO: 1241802
ggcagauuaugggaacaaa

SEQ ID NO: 1300859 - RNA, 19 nt, Artificial Sequence
  Description of Artificial Sequence: Synthetic oligonucleotide
  Antisense strand to SEQ ID NO: 1300858
uuuguucccauaaucugcc

SEQ ID NO: 1300860 - RNA, 19 nt, Artificial Sequence
  Description of Artificial Sequence: Synthetic oligonucleotide
  Sense strand starting at position 316 of SEQ ID NO: 1241802
gguggaaacucagagcuca

SEQ ID NO: 1300861 - RNA, 19 nt, Artificial Sequence
  Description of Artificial Sequence: Synthetic oligonucleotide
  Antisense strand to SEQ ID NO: 1300860
ugagcucugaguuuccacc

SEQ ID NO: 1300862 - RNA, 19 nt, Artificial Sequence
  Description of Artificial Sequence: Synthetic oligonucleotide
  Sense strand starting at position 463 of SEQ ID NO: 1241802
gcagaugacacgcaugaga

SEQ ID NO: 1300863 - RNA, 19 nt, Artificial Sequence
  Description of Artificial Sequence: Synthetic oligonucleotide
  Antisense strand to SEQ ID NO: 1300862
ucucaugcgugucaucugc

SEQ ID NO: 1300864 - RNA, 19 nt, Artificial Sequence
  Description of Artificial Sequence: Synthetic oligonucleotide
  Sense strand starting at position 489 of SEQ ID NO: 1241802
gugagguucugaugaggga

SEQ ID NO: 1300865 - RNA, 19 nt, Artificial Sequence
  Description of Artificial Sequence: Synthetic oligonucleotide
  Antisense strand to SEQ ID NO: 1300864
ucccucaucagaaccucac

SEQ ID NO: 1300866 - RNA, 19 nt, Artificial Sequence
  Description of Artificial Sequence: Synthetic oligonucleotide
  Sense strand starting at position 533 of SEQ ID NO: 1241802
ucaacaaugcuaggaaguu

SEQ ID NO: 1300867 - RNA, 19 nt, Artificial Sequence
  Description of Artificial Sequence: Synthetic oligonucleotide
  Antisense strand to SEQ ID NO: 1300866
aacuuccuagcauuguuga

SEQ ID NO: 1300868 - RNA, 19 nt, Artificial Sequence
  Description of Artificial Sequence: Synthetic oligonucleotide
  Sense strand starting at position 610 of SEQ ID NO: 1241802
agaggcuuuggcgaagaca

SEQ ID NO: 1300869 - RNA, 19 nt, Artificial Sequence
  Description of Artificial Sequence: Synthetic oligonucleotide
  Antisense strand to SEQ ID NO: 1300868
ugucuucgccaaagccucu

SEQ ID NO: 1300870 - RNA, 19 nt, Artificial Sequence
  Description of Artificial Sequence: Synthetic oligonucleotide
  Sense strand starting at position 613 of SEQ ID NO: 1241802
ggcuuuggcgaagacacau

SEQ ID NO: 1300871 - RNA, 19 nt, Artificial Sequence
  Description of Artificial Sequence: Synthetic oligonucleotide
  Antisense strand to SEQ ID NO: 1300870
augugucuucgccaaagcc

SEQ ID NO: 1300872 - RNA, 19 nt, Artificial Sequence
  Description of Artificial Sequence: Synthetic oligonucleotide
  Sense strand starting at position 785 of SEQ ID NO: 1241802
aggcgugacacauagugau

SEQ ID NO: 1300873 - RNA, 19 nt, Artificial Sequence
  Description of Artificial Sequence: Synthetic oligonucleotide
  Antisense strand to SEQ ID NO: 1300872
aucacuaugugucacgccu

SEQ ID NO: 1300874 - RNA, 19 nt, Artificial Sequence
  Description of Artificial Sequence: Synthetic oligonucleotide
  Sense strand starting at position 819 of SEQ ID NO: 1241802
gaggaucacucagauggga

SEQ ID NO: 1300875 - RNA, 19 nt, Artificial Sequence
  Description of Artificial Sequence: Synthetic oligonucleotide
  Antisense strand to SEQ ID NO: 1300874
ucccaucugagugauccuc

SEQ ID NO: 1300876 - RNA, 19 nt, Artificial Sequence
  Description of Artificial Sequence: Synthetic oligonucleotide
  Sense strand starting at position 1673 of SEQ ID NO: 1241802
aucggaaaucgaugcacuu

SEQ ID NO: 1300877 - RNA, 19 nt, Artificial Sequence
  Description of Artificial Sequence: Synthetic oligonucleotide
  Antisense strand to SEQ ID NO: 1300876
aagugcaucgauuuccgau

SEQ ID NO: 1300878 - RNA, 19 nt, Artificial Sequence
  Description of Artificial Sequence: Synthetic oligonucleotide
  Sense strand starting at position 1778 of SEQ ID NO: 1241802
ggacuucuccgauguguug

SEQ ID NO: 1300879 - RNA, 19 nt, Artificial Sequence
  Description of Artificial Sequence: Synthetic oligonucleotide
  Antisense strand to SEQ ID NO: 1300878
caacacaucggagaagucc

SEQ ID NO: 1300880 - RNA, 19 nt, Artificial Sequence
  Description of Artificial Sequence: Synthetic oligonucleotide
  Sense strand starting at position 1780 of SEQ ID NO: 1241802
acuucuccgauguguugau

SEQ ID NO: 1300881 - RNA, 19 nt, Artificial Sequence
  Description of Artificial Sequence: Synthetic oligonucleotide
  Antisense strand to SEQ ID NO: 1300880
aucaacacaucggagaagu

SEQ ID NO: 1300882 - RNA, 19 nt, Artificial Sequence
  Description of Artificial Sequence: Synthetic oligonucleotide
  Sense strand starting at position 2178 of SEQ ID NO: 1241802
gcgcaugccgggaguugua

SEQ ID NO: 1300883 - RNA, 19 nt, Artificial Sequence
  Description of Artificial Sequence: Synthetic oligonucleotide
  Antisense strand to SEQ ID NO: 1300882
uacaacucccggcaugcgc

SEQ ID NO: 1300884 - RNA, 19 nt, Artificial Sequence
  Description of Artificial Sequence: Synthetic oligonucleotide
  Sense strand starting at position 2339 of SEQ ID NO: 1241802
cauccuguggccugcagaa

SEQ ID NO: 1300885 - RNA, 19 nt, Artificial Sequence
  Description of Artificial Sequence: Synthetic oligonucleotide
  Antisense strand to SEQ ID NO: 1300884
uucugcaggccacaggaug

SEQ ID NO: 1300886 - RNA, 19 nt, Artificial Sequence
  Description of Artificial Sequence: Synthetic oligonucleotide
  Sense strand starting at position 2480 of SEQ ID NO: 1241802
cgcgaaauuggguacuaga

SEQ ID NO: 1300887 - RNA, 19 nt, Artificial Sequence
  Description of Artificial Sequence: Synthetic oligonucleotide
  Antisense strand to SEQ ID NO: 1300886
ucuaguacccaauuucgcg

SEQ ID NO: 1300888 - RNA, 19 nt, Artificial Sequence
  Description of Artificial Sequence: Synthetic oligonucleotide
  Sense strand starting at position 2520 of SEQ ID NO: 1241802
acucuuuagucucugagag

SEQ ID NO: 1300889 - RNA, 19 nt, Artificial Sequence
  Description of Artificial Sequence: Synthetic oligonucleotide
  Antisense strand to SEQ ID NO: 1300888
cucucagagacuaaagagu

SEQ ID NO: 1300890 - RNA, 19 nt, Artificial Sequence
  Description of Artificial Sequence: Synthetic oligonucleotide
  Sense strand starting at position 2611 of SEQ ID NO: 1241802
caguuuaucgcuuauuaag

SEQ ID NO: 1300891 - RNA, 19 nt, Artificial Sequence
  Description of Artificial Sequence: Synthetic oligonucleotide
  Antisense strand to SEQ ID NO: 1300890
cuuaauaagcgauaaacug

SEQ ID NO: 1300892 - RNA, 19 nt, Artificial Sequence
  Description of Artificial Sequence: Synthetic oligonucleotide
  Sense strand starting at position 2613 of SEQ ID NO: 1241802
guuuaucgcuuauuaagug

SEQ ID NO: 1300893 - RNA, 19 nt, Artificial Sequence
  Description of Artificial Sequence: Synthetic oligonucleotide
  Antisense strand to SEQ ID NO: 1300892
cacuuaauaagcgauaaac

SEQ ID NO: 1300894 - RNA, 19 nt, Artificial Sequence
  Description of Artificial Sequence: Synthetic oligonucleotide
  Sense strand starting at position 2621 of SEQ ID NO: 1241802
cuuauuaagugcuccugaa

SEQ ID NO: 1300895 - RNA, 19 nt, Artificial Sequence
  Description of Artificial Sequence: Synthetic oligonucleotide
  Antisense strand to SEQ ID NO: 1300894
uucaggagcacuuaauaag

SEQ ID NO: 1300896 - RNA, 19 nt, Artificial Sequence
  Description of Artificial Sequence: Synthetic oligonucleotide
  Sense strand starting at position 3250 of SEQ ID NO: 1241802
gccgcuccuguauucuaau

SEQ ID NO: 1300897 - RNA, 19 nt, Artificial Sequence
  Description of Artificial Sequence: Synthetic oligonucleotide
  Antisense strand to SEQ ID NO: 1300896
auuagaauacaggagcggc

SEQ ID NO: 1300898 - RNA, 19 nt, Artificial Sequence
  Description of Artificial Sequence: Synthetic oligonucleotide
  Sense strand starting at position 3251 of SEQ ID NO: 1241802
ccgcuccuguauucuaaua

SEQ ID NO: 1300899 - RNA, 19 nt, Artificial Sequence
  Description of Artificial Sequence: Synthetic oligonucleotide
  Antisense strand to SEQ ID NO: 1300898
uauuagaauacaggagcgg

SEQ ID NO: 1300900 - RNA, 19 nt, Artificial Sequence
  Description of Artificial Sequence: Synthetic oligonucleotide
  Sense strand starting at position 3342 of SEQ ID NO: 1241802
auaccucaagcaugaggua

SEQ ID NO: 1300901 - RNA, 19 nt, Artificial Sequence
  Description of Artificial Sequence: Synthetic oligonucleotide
  Antisense strand to SEQ ID NO: 1300900
uaccucaugcuugagguau

SEQ ID NO: 1300902 - RNA, 19 nt, Artificial Sequence
  Description of Artificial Sequence: Synthetic oligonucleotide
  Sense strand starting at position 3351 of SEQ ID NO: 1241802
gcaugagguagaugcuauu

SEQ ID NO: 1300903 - RNA, 19 nt, Artificial Sequence
  Description of Artificial Sequence: Synthetic oligonucleotide
  Antisense strand to SEQ ID NO: 1300902
aauagcaucuaccucaugc

SEQ ID NO: 1300904 - RNA, 19 nt, Artificial Sequence
  Description of Artificial Sequence: Synthetic oligonucleotide
  Sense strand starting at position 3354 of SEQ ID NO: 1241802
ugagguagaugcuauuaua

SEQ ID NO: 1300905 - RNA, 19 nt, Artificial Sequence
  Description of Artificial Sequence: Synthetic oligonucleotide
  Antisense strand to SEQ ID NO: 1300904
uauaauagcaucuaccuca

SEQ ID NO: 1300906 - RNA, 19 nt, Artificial Sequence
  Description of Artificial Sequence: Synthetic oligonucleotide
  Sense strand starting at position 3362 of SEQ ID NO: 1241802
augcuauuauagucucauu

SEQ ID NO: 1300907 - RNA, 19 nt, Artificial Sequence
  Description of Artificial Sequence: Synthetic oligonucleotide
  Antisense strand to SEQ ID NO: 1300906
aaugagacuauaauagcau

SEQ ID NO: 1300908 - RNA, 19 nt, Artificial Sequence
  Description of Artificial Sequence: Synthetic oligonucleotide
  Sense strand starting at position 3372 of SEQ ID NO: 1241802
agucucauuuauugaggaa

SEQ ID NO: 1300909 - RNA, 19 nt, Artificial Sequence
  Description of Artificial Sequence: Synthetic oligonucleotide
  Antisense strand to SEQ ID NO: 1300908
uuccucaauaaaugagacu

SEQ ID NO: 1300910 - RNA, 19 nt, Artificial Sequence
  Description of Artificial Sequence: Synthetic oligonucleotide
  Sense strand starting at position 3427 of SEQ ID NO: 1241802
uccaauggccaauaaguaa

SEQ ID NO: 1300911 - RNA, 19 nt, Artificial Sequence
  Description of Artificial Sequence: Synthetic oligonucleotide
  Antisense strand to SEQ ID NO: 1300910
uuacuuauuggccauugga

SEQ ID NO: 1300912 - RNA, 19 nt, Artificial Sequence
  Description of Artificial Sequence: Synthetic oligonucleotide
  Sense strand starting at position 3580 of SEQ ID NO: 1241802
uugaguuuauacuauguga

SEQ ID NO: 1300913 - RNA, 19 nt, Artificial Sequence
  Description of Artificial Sequence: Synthetic oligonucleotide
  Antisense strand to SEQ ID NO: 1300912
ucacauaguauaaacucaa

SEQ ID NO: 1300914 - RNA, 19 nt, Artificial Sequence
  Description of Artificial Sequence: Synthetic oligonucleotide
  Sense strand starting at position 3582 of SEQ ID NO: 1241802
gaguuuauacuaugugaca

SEQ ID NO: 1300915 - RNA, 19 nt, Artificial Sequence
  Description of Artificial Sequence: Synthetic oligonucleotide
  Antisense strand to SEQ ID NO: 1300914
ugucacauaguauaaacuc

SEQ ID NO: 1300916 - RNA, 19 nt, Artificial Sequence
  Description of Artificial Sequence: Synthetic oligonucleotide
  Sense strand starting at position 3584 of SEQ ID NO: 1241802
guuuauacuaugugacagu

SEQ ID NO: 1300917 - RNA, 19 nt, Artificial Sequence
  Description of Artificial Sequence: Synthetic oligonucleotide
  Antisense strand to SEQ ID NO: 1300916
acugucacauaguauaaac

SEQ ID NO: 1300918 - RNA, 19 nt, Artificial Sequence
  Description of Artificial Sequence: Synthetic oligonucleotide
  Sense strand starting at position 3585 of SEQ ID NO: 1241802
uuuauacuaugugacaguu

SEQ ID NO: 1300919 - RNA, 19 nt, Artificial Sequence
  Description of Artificial Sequence: Synthetic oligonucleotide
  Antisense strand to SEQ ID NO: 1300918
aacugucacauaguauaaa

SEQ ID NO: 1300920 - RNA, 19 nt, Artificial Sequence
  Description of Artificial Sequence: Synthetic oligonucleotide
  Sense strand starting at position 3595 of SEQ ID NO: 1241802
gugacaguuuaugacugaa

SEQ ID NO: 1300921 - RNA, 19 nt, Artificial Sequence
  Description of Artificial Sequence: Synthetic oligonucleotide
  Antisense strand to SEQ ID NO: 1300920
uucagucauaaacugucac

SEQ ID NO: 1300922 - RNA, 19 nt, Artificial Sequence
  Description of Artificial Sequence: Synthetic oligonucleotide
  Sense strand starting at position 3597 of SEQ ID NO: 1241802
gacaguuuaugacugaauc

SEQ ID NO: 1300923 - RNA, 19 nt, Artificial Sequence
  Description of Artificial Sequence: Synthetic oligonucleotide
  Antisense strand to SEQ ID NO: 1300922
gauucagucauaaacuguc

SEQ ID NO: 1300924 - RNA, 19 nt, Artificial Sequence
  Description of Artificial Sequence: Synthetic oligonucleotide
  Sense strand starting at position 3608 of SEQ ID NO: 1241802
acugaauccucacagguaa

SEQ ID NO: 1300925 - RNA, 19 nt, Artificial Sequence
  Description of Artificial Sequence: Synthetic oligonucleotide
  Antisense strand to SEQ ID NO: 1300924
uuaccugugaggauucagu

SEQ ID NO: 1300926 - RNA, 19 nt, Artificial Sequence
  Description of Artificial Sequence: Synthetic oligonucleotide
  Sense strand starting at position 135 of SEQ ID NO: 1241803
accgcaguccuggaacauu

SEQ ID NO: 1300927 - RNA, 19 nt, Artificial Sequence
  Description of Artificial Sequence: Synthetic oligonucleotide
  Antisense strand to SEQ ID NO: 1300926
aauguuccaggacugcggu

SEQ ID NO: 1300928 - RNA, 19 nt, Artificial Sequence
  Description of Artificial Sequence: Synthetic oligonucleotide
  Sense strand starting at position 356 of SEQ ID NO: 1241803
caaaguuugcugcacgauc

SEQ ID NO: 1300929 - RNA, 19 nt, Artificial Sequence
  Description of Artificial Sequence: Synthetic oligonucleotide
  Antisense strand to SEQ ID NO: 1300928
gaucgugcagcaaacuuug

SEQ ID NO: 1300930 - RNA, 19 nt, Artificial Sequence
  Description of Artificial Sequence: Synthetic oligonucleotide
  Sense strand starting at position 511 of SEQ ID NO: 1241803
aaacauugucccgagacuc

SEQ ID NO: 1300931 - RNA, 19 nt, Artificial Sequence
  Description of Artificial Sequence: Synthetic oligonucleotide
  Antisense strand to SEQ ID NO: 1300930
gagucucgggacaauguuu

SEQ ID NO: 1300932 - RNA, 19 nt, Artificial Sequence
  Description of Artificial Sequence: Synthetic oligonucleotide
  Sense strand starting at position 1053 of SEQ ID NO: 1241803
ggaucuggugugucgcgaa

SEQ ID NO: 1300933 - RNA, 19 nt, Artificial Sequence
  Description of Artificial Sequence: Synthetic oligonucleotide
  Antisense strand to SEQ ID NO: 1300932
uucgcgacacaccagaucc

SEQ ID NO: 1300934 - RNA, 19 nt, Artificial Sequence
  Description of Artificial Sequence: Synthetic oligonucleotide
  Sense strand starting at position 1256 of SEQ ID NO: 1241803
guugauugacacuggaguu

SEQ ID NO: 1300935 - RNA, 19 nt, Artificial Sequence
  Description of Artificial Sequence: Synthetic oligonucleotide
  Antisense strand to SEQ ID NO: 1300934
aacuccagugucaaucaac

SEQ ID NO: 1300936 - RNA, 19 nt, Artificial Sequence
  Description of Artificial Sequence: Synthetic oligonucleotide
  Sense strand starting at position 1675 of SEQ ID NO: 1241803
gcgguuuccaucuugagcu

SEQ ID NO: 1300937 - RNA, 19 nt, Artificial Sequence
  Description of Artificial Sequence: Synthetic oligonucleotide
  Antisense strand to SEQ ID NO: 1300936
agcucaagauggaaaccgc

SEQ ID NO: 1300938 - RNA, 19 nt, Artificial Sequence
  Description of Artificial Sequence: Synthetic oligonucleotide
  Sense strand starting at position 1694 of SEQ ID NO: 1241803
ggcggucuccuugaaacuu

SEQ ID NO: 1300939 - RNA, 19 nt, Artificial Sequence
  Description of Artificial Sequence: Synthetic oligonucleotide
  Antisense strand to SEQ ID NO: 1300938
aaguuucaaggagaccgcc

SEQ ID NO: 1300940 - RNA, 19 nt, Artificial Sequence
  Description of Artificial Sequence: Synthetic oligonucleotide
  Sense strand starting at position 1742 of SEQ ID NO: 1241803
ccgacuucucuucgacacu

SEQ ID NO: 1300941 - RNA, 19 nt, Artificial Sequence
  Description of Artificial Sequence: Synthetic oligonucleotide
  Antisense strand to SEQ ID NO: 1300940
agugucgaagagaagucgg

SEQ ID NO: 1300942 - RNA, 19 nt, Artificial Sequence
  Description of Artificial Sequence: Synthetic oligonucleotide
  Sense strand starting at position 1795 of SEQ ID NO: 1241803
auuagaaauuugggacgca

SEQ ID NO: 1300943 - RNA, 19 nt, Artificial Sequence
  Description of Artificial Sequence: Synthetic oligonucleotide
  Antisense strand to SEQ ID NO: 1300942
ugcgucccaaauuucuaau

SEQ ID NO: 1300944 - RNA, 19 nt, Artificial Sequence
  Description of Artificial Sequence: Synthetic oligonucleotide
  Sense strand starting at position 2170 of SEQ ID NO: 1241803
ccgagcaacucacuacuuu

SEQ ID NO: 1300945 - RNA, 19 nt, Artificial Sequence
  Description of Artificial Sequence: Synthetic oligonucleotide
  Antisense strand to SEQ ID NO: 1300944
aaaguagugaguugcucgg

SEQ ID NO: 1300946 - RNA, 19 nt, Artificial Sequence
  Description of Artificial Sequence: Synthetic oligonucleotide
  Sense strand starting at position 2280 of SEQ ID NO: 1241803
aagguuacuuugguaagaa

SEQ ID NO: 1300947 - RNA, 19 nt, Artificial Sequence
  Description of Artificial Sequence: Synthetic oligonucleotide
  Antisense strand to SEQ ID NO: 1300946
uucuuaccaaaguaaccuu

SEQ ID NO: 1300948 - RNA, 19 nt, Artificial Sequence
  Description of Artificial Sequence: Synthetic oligonucleotide
  Sense strand starting at position 2711 of SEQ ID NO: 1241803
ggcuaagauugaguuccau

SEQ ID NO: 1300949 - RNA, 19 nt, Artificial Sequence
  Description of Artificial Sequence: Synthetic oligonucleotide
  Antisense strand to SEQ ID NO: 1300948
auggaacucaaucuuagcc

SEQ ID NO: 1300950 - RNA, 19 nt, Artificial Sequence
  Description of Artificial Sequence: Synthetic oligonucleotide
  Sense strand starting at position 2725 of SEQ ID NO: 1241803
uccauugcgauguaauuag

SEQ ID NO: 1300951 - RNA, 19 nt, Artificial Sequence
  Description of Artificial Sequence: Synthetic oligonucleotide
  Antisense strand to SEQ ID NO: 1300950
cuaauuacaucgcaaugga

SEQ ID NO: 1300952 - RNA, 19 nt, Artificial Sequence
  Description of Artificial Sequence: Synthetic oligonucleotide
  Sense strand starting at position 2729 of SEQ ID NO: 1241803
uugcgauguaauuagguca

SEQ ID NO: 1300953 - RNA, 19 nt, Artificial Sequence
  Description of Artificial Sequence: Synthetic oligonucleotide
  Antisense strand to SEQ ID NO: 1300952
ugaccuaauuacaucgcaa

SEQ ID NO: 1300954 - RNA, 19 nt, Artificial Sequence
  Description of Artificial Sequence: Synthetic oligonucleotide
  Sense strand starting at position 2756 of SEQ ID NO: 1241803
ugagcacguuucuuuggaa

SEQ ID NO: 1300955 - RNA, 19 nt, Artificial Sequence
  Description of Artificial Sequence: Synthetic oligonucleotide
  Antisense strand to SEQ ID NO: 1300954
uuccaaagaaacgugcuca

SEQ ID NO: 1300956 - RNA, 19 nt, Artificial Sequence
  Description of Artificial Sequence: Synthetic oligonucleotide
  Sense strand starting at position 2757 of SEQ ID NO: 1241803
gagcacguuucuuuggaaa

SEQ ID NO: 1300957 - RNA, 19 nt, Artificial Sequence
  Description of Artificial Sequence: Synthetic oligonucleotide
  Antisense strand to SEQ ID NO: 1300956
uuuccaaagaaacgugcuc

SEQ ID NO: 1300958 - RNA, 19 nt, Artificial Sequence
  Description of Artificial Sequence: Synthetic oligonucleotide
  Sense strand starting at position 2853 of SEQ ID NO: 1241803
uucguaaacaucugggcaa

SEQ ID NO: 1300959 - RNA, 19 nt, Artificial Sequence
  Description of Artificial Sequence: Synthetic oligonucleotide
  Antisense strand to SEQ ID NO: 1300958
uugcccagauguuuacgaa

SEQ ID NO: 1300960 - RNA, 19 nt, Artificial Sequence
  Description of Artificial Sequence: Synthetic oligonucleotide
  Sense strand starting at position 3177 of SEQ ID NO: 1241803
guagguuucuuucuuagag

SEQ ID NO: 1300961 - RNA, 19 nt, Artificial Sequence
  Description of Artificial Sequence: Synthetic oligonucleotide
  Antisense strand to SEQ ID NO: 1300960
cucuaagaaagaaaccuac

SEQ ID NO: 1300962 - RNA, 19 nt, Artificial Sequence
  Description of Artificial Sequence: Synthetic oligonucleotide
  Sense strand starting at position 3183 of SEQ ID NO: 1241803
uucuuucuuagagggaugu

SEQ ID NO: 1300963 - RNA, 19 nt, Artificial Sequence
  Description of Artificial Sequence: Synthetic oligonucleotide
  Antisense strand to SEQ ID NO: 1300962
acaucccucuaagaaagaa

SEQ ID NO: 1300964 - RNA, 19 nt, Artificial Sequence
  Description of Artificial Sequence: Synthetic oligonucleotide
  Sense strand starting at position 3184 of SEQ ID NO: 1241803
ucuuucuuagagggauguu

SEQ ID NO: 1300965 - RNA, 19 nt, Artificial Sequence
  Description of Artificial Sequence: Synthetic oligonucleotide
  Antisense strand to SEQ ID NO: 1300964
aacaucccucuaagaaaga

SEQ ID NO: 1300966 - RNA, 19 nt, Artificial Sequence
  Description of Artificial Sequence: Synthetic oligonucleotide
  Sense strand starting at position 3185 of SEQ ID NO: 1241803
cuuucuuagagggauguuu

SEQ ID NO: 1300967 - RNA, 19 nt, Artificial Sequence
  Description of Artificial Sequence: Synthetic oligonucleotide
  Antisense strand to SEQ ID NO: 1300966
aaacaucccucuaagaaag

SEQ ID NO: 1300968 - RNA, 19 nt, Artificial Sequence
  Description of Artificial Sequence: Synthetic oligonucleotide
  Sense strand starting at position 3196 of SEQ ID NO: 1241803
ggauguuugcucguuccuu

SEQ ID NO: 1300969 - RNA, 19 nt, Artificial Sequence
  Description of Artificial Sequence: Synthetic oligonucleotide
  Antisense strand to SEQ ID NO: 1300968
aaggaacgagcaaacaucc

SEQ ID NO: 1300970 - RNA, 19 nt, Artificial Sequence
  Description of Artificial Sequence: Synthetic oligonucleotide
  Sense strand starting at position 3240 of SEQ ID NO: 1241803
gggagagauuucgugcagu

SEQ ID NO: 1300971 - RNA, 19 nt, Artificial Sequence
  Description of Artificial Sequence: Synthetic oligonucleotide
  Antisense strand to SEQ ID NO: 1300970
acugcacgaaaucucuccc

SEQ ID NO: 1300972 - RNA, 19 nt, Artificial Sequence
  Description of Artificial Sequence: Synthetic oligonucleotide
  Sense strand starting at position 3243 of SEQ ID NO: 1241803
agagauuucgugcaguuuc

SEQ ID NO: 1300973 - RNA, 19 nt, Artificial Sequence
  Description of Artificial Sequence: Synthetic oligonucleotide
  Antisense strand to SEQ ID NO: 1300972
gaaacugcacgaaaucucu

SEQ ID NO: 1300974 - RNA, 19 nt, Artificial Sequence
  Description of Artificial Sequence: Synthetic oligonucleotide
  Sense strand starting at position 3258 of SEQ ID NO: 1241803
uuucuuggugaugagguaa

SEQ ID NO: 1300975 - RNA, 19 nt, Artificial Sequence
  Description of Artificial Sequence: Synthetic oligonucleotide
  Antisense strand to SEQ ID NO: 1300974
uuaccucaucaccaagaaa

SEQ ID NO: 1300976 - RNA, 19 nt, Artificial Sequence
  Description of Artificial Sequence: Synthetic oligonucleotide
  Sense strand starting at position 3272 of SEQ ID NO: 1241803
gguaaugaguuccagauuu

SEQ ID NO: 1300977 - RNA, 19 nt, Artificial Sequence
  Description of Artificial Sequence: Synthetic oligonucleotide
  Antisense strand to SEQ ID NO: 1300976
aaaucuggaacucauuacc

SEQ ID NO: 1300978 - RNA, 19 nt, Artificial Sequence
  Description of Artificial Sequence: Synthetic oligonucleotide
  Sense strand starting at position 3299 of SEQ ID NO: 1241803
agcagagugcgcguugaaa

SEQ ID NO: 1300979 - RNA, 19 nt, Artificial Sequence
  Description of Artificial Sequence: Synthetic oligonucleotide
  Antisense strand to SEQ ID NO: 1300978
uuucaacgcgcacucugcu

SEQ ID NO: 1300980 - RNA, 19 nt, Artificial Sequence
  Description of Artificial Sequence: Synthetic oligonucleotide
  Sense strand starting at position 3300 of SEQ ID NO: 1241803
gcagagugcgcguugaaac

SEQ ID NO: 1300981 - RNA, 19 nt, Artificial Sequence
  Description of Artificial Sequence: Synthetic oligonucleotide
  Antisense strand to SEQ ID NO: 1300980
guuucaacgcgcacucugc

SEQ ID NO: 1300982 - RNA, 19 nt, Artificial Sequence
  Description of Artificial Sequence: Synthetic oligonucleotide
  Sense strand starting at position 3318 of SEQ ID NO: 1241803
ccacaagguuagucugagu

SEQ ID NO: 1300983 - RNA, 19 nt, Artificial Sequence
  Description of Artificial Sequence: Synthetic oligonucleotide
  Antisense strand to SEQ ID NO: 1300982
acucagacuaaccuugugg

SEQ ID NO: 1300984 - RNA, 19 nt, Artificial Sequence
  Description of Artificial Sequence: Synthetic oligonucleotide
  Sense strand starting at position 3323 of SEQ ID NO: 1241803
agguuagucugaguucuga

SEQ ID NO: 1300985 - RNA, 19 nt, Artificial Sequence
  Description of Artificial Sequence: Synthetic oligonucleotide
  Antisense strand to SEQ ID NO: 1300984
ucagaacucagacuaaccu

SEQ ID NO: 1300986 - RNA, 19 nt, Artificial Sequence
  Description of Artificial Sequence: Synthetic oligonucleotide
  Sense strand starting at position 3332 of SEQ ID NO: 1241803
ugaguucugaugugaagcu

SEQ ID NO: 1300987 - RNA, 19 nt, Artificial Sequence
  Description of Artificial Sequence: Synthetic oligonucleotide
  Antisense strand to SEQ ID NO: 1300986
agcuucacaucagaacuca

SEQ ID NO: 1300988 - RNA, 19 nt, Artificial Sequence
  Description of Artificial Sequence: Synthetic oligonucleotide
  Sense strand starting at position 3341 of SEQ ID NO: 1241803
augugaagcuauuucgguu

SEQ ID NO: 1300989 - RNA, 19 nt, Artificial Sequence
  Description of Artificial Sequence: Synthetic oligonucleotide
  Antisense strand to SEQ ID NO: 1300988
aaccgaaauagcuucacau

SEQ ID NO: 1300990 - RNA, 19 nt, Artificial Sequence
  Description of Artificial Sequence: Synthetic oligonucleotide
  Sense strand starting at position 3431 of SEQ ID NO: 1241803
ucuuuaacucccgaggguu

SEQ ID NO: 1300991 - RNA, 19 nt, Artificial Sequence
  Description of Artificial Sequence: Synthetic oligonucleotide
  Antisense strand to SEQ ID NO: 1300990
aacccucgggaguuaaaga

SEQ ID NO: 1300992 - RNA, 19 nt, Artificial Sequence
  Description of Artificial Sequence: Synthetic oligonucleotide
  Sense strand starting at position 3669 of SEQ ID NO: 1241803
gaaagcugauuccucgaau

SEQ ID NO: 1300993 - RNA, 19 nt, Artificial Sequence
  Description of Artificial Sequence: Synthetic oligonucleotide
  Antisense strand to SEQ ID NO: 1300992
auucgaggaaucagcuuuc

SEQ ID NO: 1300994 - RNA, 19 nt, Artificial Sequence
  Description of Artificial Sequence: Synthetic oligonucleotide
  Sense strand starting at position 3680 of SEQ ID NO: 1241803
ccucgaauuuccucggcuu

SEQ ID NO: 1300995 - RNA, 19 nt, Artificial Sequence
  Description of Artificial Sequence: Synthetic oligonucleotide
  Antisense strand to SEQ ID NO: 1300994
aagccgaggaaauucgagg

SEQ ID NO: 1300996 - RNA, 19 nt, Artificial Sequence
  Description of Artificial Sequence: Synthetic oligonucleotide
  Sense strand starting at position 3681 of SEQ ID NO: 1241803
cucgaauuuccucggcuuu

SEQ ID NO: 1300997 - RNA, 19 nt, Artificial Sequence
  Description of Artificial Sequence: Synthetic oligonucleotide
  Antisense strand to SEQ ID NO: 1300996
aaagccgaggaaauucgag

SEQ ID NO: 1300998 - RNA, 19 nt, Artificial Sequence
  Description of Artificial Sequence: Synthetic oligonucleotide
  Sense strand starting at position 3775 of SEQ ID NO: 1241803
gcucgcucccgaguuguuu

SEQ ID NO: 1300999 - RNA, 19 nt, Artificial Sequence
  Description of Artificial Sequence: Synthetic oligonucleotide
  Antisense strand to SEQ ID NO: 1300998
aaacaacucgggagcgagc

SEQ ID NO: 1301000 - RNA, 19 nt, Artificial Sequence
  Description of Artificial Sequence: Synthetic oligonucleotide
  Sense strand starting at position 3776 of SEQ ID NO: 1241803
cucgcucccgaguuguuua

SEQ ID NO: 1301001 - RNA, 19 nt, Artificial Sequence
  Description of Artificial Sequence: Synthetic oligonucleotide
  Antisense strand to SEQ ID NO: 1301000
uaaacaacucgggagcgag

SEQ ID NO: 1301002 - RNA, 19 nt, Artificial Sequence
  Description of Artificial Sequence: Synthetic oligonucleotide
  Sense strand starting at position 3827 of SEQ ID NO: 1241803
cccagagccugucucuaua

SEQ ID NO: 1301003 - RNA, 19 nt, Artificial Sequence
  Description of Artificial Sequence: Synthetic oligonucleotide
  Antisense strand to SEQ ID NO: 1301002
uauagagacaggcucuggg

SEQ ID NO: 1301004 - RNA, 19 nt, Artificial Sequence
  Description of Artificial Sequence: Synthetic oligonucleotide
  Sense strand starting at position 3922 of SEQ ID NO: 1241803
gagcgagucccuuaacccu

SEQ ID NO: 1301005 - RNA, 19 nt, Artificial Sequence
  Description of Artificial Sequence: Synthetic oligonucleotide
  Antisense strand to SEQ ID NO: 1301004
aggguuaagggacucgcuc

SEQ ID NO: 1301006 - RNA, 19 nt, Artificial Sequence
  Description of Artificial Sequence: Synthetic oligonucleotide
  Sense strand starting at position 382 of SEQ ID NO: 1241804
ggcuaagauugaguuccau

SEQ ID NO: 1301007 - RNA, 19 nt, Artificial Sequence
  Description of Artificial Sequence: Synthetic oligonucleotide
  Antisense strand to SEQ ID NO: 1301006
auggaacucaaucuuagcc

SEQ ID NO: 1301008 - RNA, 19 nt, Artificial Sequence
  Description of Artificial Sequence: Synthetic oligonucleotide
  Sense strand starting at position 396 of SEQ ID NO: 1241804
uccauugcgauguaauuag

SEQ ID NO: 1301009 - RNA, 19 nt, Artificial Sequence
  Description of Artificial Sequence: Synthetic oligonucleotide
  Antisense strand to SEQ ID NO: 1301008
cuaauuacaucgcaaugga

SEQ ID NO: 1301010 - RNA, 19 nt, Artificial Sequence
  Description of Artificial Sequence: Synthetic oligonucleotide
  Sense strand starting at position 400 of SEQ ID NO: 1241804
uugcgauguaauuagguca

SEQ ID NO: 1301011 - RNA, 19 nt, Artificial Sequence
  Description of Artificial Sequence: Synthetic oligonucleotide
  Antisense strand to SEQ ID NO: 1301010
ugaccuaauuacaucgcaa

SEQ ID NO: 1301012 - RNA, 19 nt, Artificial Sequence
  Description of Artificial Sequence: Synthetic oligonucleotide
  Sense strand starting at position 848 of SEQ ID NO: 1241804
guagguuucuuucuuagag

SEQ ID NO: 1301013 - RNA, 19 nt, Artificial Sequence
  Description of Artificial Sequence: Synthetic oligonucleotide
  Antisense strand to SEQ ID NO: 1301012
cucuaagaaagaaaccuac

SEQ ID NO: 1301014 - RNA, 19 nt, Artificial Sequence
  Description of Artificial Sequence: Synthetic oligonucleotide
  Sense strand starting at position 854 of SEQ ID NO: 1241804
uucuuucuuagagggaugu

SEQ ID NO: 1301015 - RNA, 19 nt, Artificial Sequence
  Description of Artificial Sequence: Synthetic oligonucleotide
  Antisense strand to SEQ ID NO: 1301014
acaucccucuaagaaagaa

SEQ ID NO: 1301016 - RNA, 19 nt, Artificial Sequence
  Description of Artificial Sequence: Synthetic oligonucleotide
  Sense strand starting at position 855 of SEQ ID NO: 1241804
ucuuucuuagagggauguu

SEQ ID NO: 1301017 - RNA, 19 nt, Artificial Sequence
  Description of Artificial Sequence: Synthetic oligonucleotide
  Antisense strand to SEQ ID NO: 1301016
aacaucccucuaagaaaga

SEQ ID NO: 1301018 - RNA, 19 nt, Artificial Sequence
  Description of Artificial Sequence: Synthetic oligonucleotide
  Sense strand starting at position 856 of SEQ ID NO: 1241804
cuuucuuagagggauguuu

SEQ ID NO: 1301019 - RNA, 19 nt, Artificial Sequence
  Description of Artificial Sequence: Synthetic oligonucleotide
  Antisense strand to SEQ ID NO: 1301018
aaacaucccucuaagaaag

SEQ ID NO: 1301020 - RNA, 19 nt, Artificial Sequence
  Description of Artificial Sequence: Synthetic oligonucleotide
  Sense strand starting at position 867 of SEQ ID NO: 1241804
ggauguuugcucguuccuu

SEQ ID NO: 1301021 - RNA, 19 nt, Artificial Sequence
  Description of Artificial Sequence: Synthetic oligonucleotide
  Antisense strand to SEQ ID NO: 1301020
aaggaacgagcaaacaucc

SEQ ID NO: 1301022 - RNA, 19 nt, Artificial Sequence
  Description of Artificial Sequence: Synthetic oligonucleotide
  Sense strand starting at position 911 of SEQ ID NO: 1241804
gggagagauuucgugcagu

SEQ ID NO: 1301023 - RNA, 19 nt, Artificial Sequence
  Description of Artificial Sequence: Synthetic oligonucleotide
  Antisense strand to SEQ ID NO: 1301022
acugcacgaaaucucuccc

SEQ ID NO: 1301024 - RNA, 19 nt, Artificial Sequence
  Description of Artificial Sequence: Synthetic oligonucleotide
  Sense strand starting at position 914 of SEQ ID NO: 1241804
agagauuucgugcaguuuc

SEQ ID NO: 1301025 - RNA, 19 nt, Artificial Sequence
  Description of Artificial Sequence: Synthetic oligonucleotide
  Antisense strand to SEQ ID NO: 1301024
gaaacugcacgaaaucucu

SEQ ID NO: 1301026 - RNA, 19 nt, Artificial Sequence
  Description of Artificial Sequence: Synthetic oligonucleotide
  Sense strand starting at position 929 of SEQ ID NO: 1241804
uuucuuggugaugagguaa

SEQ ID NO: 1301027 - RNA, 19 nt, Artificial Sequence
  Description of Artificial Sequence: Synthetic oligonucleotide
  Antisense strand to SEQ ID NO: 1301026
uuaccucaucaccaagaaa

SEQ ID NO: 1301028 - RNA, 19 nt, Artificial Sequence
  Description of Artificial Sequence: Synthetic oligonucleotide
  Sense strand starting at position 970 of SEQ ID NO: 1241804
agcagagugcgcguugaaa

SEQ ID NO: 1301029 - RNA, 19 nt, Artificial Sequence
  Description of Artificial Sequence: Synthetic oligonucleotide
  Antisense strand to SEQ ID NO: 1301028
uuucaacgcgcacucugcu

SEQ ID NO: 1301030 - RNA, 19 nt, Artificial Sequence
  Description of Artificial Sequence: Synthetic oligonucleotide
  Sense strand starting at position 971 of SEQ ID NO: 1241804
gcagagugcgcguugaaac

SEQ ID NO: 1301031 - RNA, 19 nt, Artificial Sequence
  Description of Artificial Sequence: Synthetic oligonucleotide
  Antisense strand to SEQ ID NO: 1301030
guuucaacgcgcacucugc

SEQ ID NO: 1301032 - RNA, 19 nt, Artificial Sequence
  Description of Artificial Sequence: Synthetic oligonucleotide
  Sense strand starting at position 989 of SEQ ID NO: 1241804
ccacaagguuagucugagu

SEQ ID NO: 1301033 - RNA, 19 nt, Artificial Sequence
  Description of Artificial Sequence: Synthetic oligonucleotide
  Antisense strand to SEQ ID NO: 1301032
acucagacuaaccuugugg

SEQ ID NO: 1301034 - RNA, 19 nt, Artificial Sequence
  Description of Artificial Sequence: Synthetic oligonucleotide
  Sense strand starting at position 1012 of SEQ ID NO: 1241804
augugaagcuauuucgguu

SEQ ID NO: 1301035 - RNA, 19 nt, Artificial Sequence
  Description of Artificial Sequence: Synthetic oligonucleotide
  Antisense strand to SEQ ID NO: 1301034
aaccgaaauagcuucacau

SEQ ID NO: 1301036 - RNA, 19 nt, Artificial Sequence
  Description of Artificial Sequence: Synthetic oligonucleotide
  Sense strand starting at position 1102 of SEQ ID NO: 1241804
ucuuuaacucccgaggguu

SEQ ID NO: 1301037 - RNA, 19 nt, Artificial Sequence
  Description of Artificial Sequence: Synthetic oligonucleotide
  Antisense strand to SEQ ID NO: 1301036
aacccucgggaguuaaaga

SEQ ID NO: 1301038 - RNA, 19 nt, Artificial Sequence
  Description of Artificial Sequence: Synthetic oligonucleotide
  Sense strand starting at position 1340 of SEQ ID NO: 1241804
gaaagcugauuccucgaau

SEQ ID NO: 1301039 - RNA, 19 nt, Artificial Sequence
  Description of Artificial Sequence: Synthetic oligonucleotide
  Antisense strand to SEQ ID NO: 1301038
auucgaggaaucagcuuuc

SEQ ID NO: 1301040 - RNA, 19 nt, Artificial Sequence
  Description of Artificial Sequence: Synthetic oligonucleotide
  Sense strand starting at position 1351 of SEQ ID NO: 1241804
ccucgaauuuccucggcuu

SEQ ID NO: 1301041 - RNA, 19 nt, Artificial Sequence
  Description of Artificial Sequence: Synthetic oligonucleotide
  Antisense strand to SEQ ID NO: 1301040
aagccgaggaaauucgagg

SEQ ID NO: 1301042 - RNA, 19 nt, Artificial Sequence
  Description of Artificial Sequence: Synthetic oligonucleotide
  Sense strand starting at position 1352 of SEQ ID NO: 1241804
cucgaauuuccucggcuuu

SEQ ID NO: 1301043 - RNA, 19 nt, Artificial Sequence
  Description of Artificial Sequence: Synthetic oligonucleotide
  Antisense strand to SEQ ID NO: 1301042
aaagccgaggaaauucgag

SEQ ID NO: 1301044 - RNA, 19 nt, Artificial Sequence
  Description of Artificial Sequence: Synthetic oligonucleotide
  Sense strand starting at position 1446 of SEQ ID NO: 1241804
gcucgcucccgaguuguuu

SEQ ID NO: 1301045 - RNA, 19 nt, Artificial Sequence
  Description of Artificial Sequence: Synthetic oligonucleotide
  Antisense strand to SEQ ID NO: 1301044
aaacaacucgggagcgagc

SEQ ID NO: 1301046 - RNA, 19 nt, Artificial Sequence
  Description of Artificial Sequence: Synthetic oligonucleotide
  Sense strand starting at position 1447 of SEQ ID NO: 1241804
cucgcucccgaguuguuua

SEQ ID NO: 1301047 - RNA, 19 nt, Artificial Sequence
  Description of Artificial Sequence: Synthetic oligonucleotide
  Antisense strand to SEQ ID NO: 1301046
uaaacaacucgggagcgag

SEQ ID NO: 1301048 - RNA, 19 nt, Artificial Sequence
  Description of Artificial Sequence: Synthetic oligonucleotide
  Sense strand starting at position 1593 of SEQ ID NO: 1241804
gagcgagucccuuaacccu

SEQ ID NO: 1301049 - RNA, 19 nt, Artificial Sequence
  Description of Artificial Sequence: Synthetic oligonucleotide
  Antisense strand to SEQ ID NO: 1301048
aggguuaagggacucgcuc

SEQ ID NO: 1301050 - RNA, 19 nt, Artificial Sequence
  Description of Artificial Sequence: Synthetic oligonucleotide
  Sense strand starting at position 2003 of SEQ ID NO: 1241804
aagugaaagucuucggagu

SEQ ID NO: 1301051 - RNA, 19 nt, Artificial Sequence
  Description of Artificial Sequence: Synthetic oligonucleotide
  Antisense strand to SEQ ID NO: 1301050
acuccgaagacuuucacuu

SEQ ID NO: 1301052 - RNA, 19 nt, Artificial Sequence
  Description of Artificial Sequence: Synthetic oligonucleotide
  Sense strand starting at position 2009 of SEQ ID NO: 1241804
aagucuucggagugaagga

SEQ ID NO: 1301053 - RNA, 19 nt, Artificial Sequence
  Description of Artificial Sequence: Synthetic oligonucleotide
  Antisense strand to SEQ ID NO: 1301052
uccuucacuccgaagacuu

SEQ ID NO: 1301054 - RNA, 19 nt, Artificial Sequence
  Description of Artificial Sequence: Synthetic oligonucleotide
  Sense strand starting at position 2269 of SEQ ID NO: 1241804
uaaaguuuggaaugcugau

SEQ ID NO: 1301055 - RNA, 19 nt, Artificial Sequence
  Description of Artificial Sequence: Synthetic oligonucleotide
  Antisense strand to SEQ ID NO: 1301054
aucagcauuccaaacuuua

SEQ ID NO: 1301056 - RNA, 19 nt, Artificial Sequence
  Description of Artificial Sequence: Synthetic oligonucleotide
  Sense strand starting at position 2362 of SEQ ID NO: 1241804
gagaaucagugagccagua

SEQ ID NO: 1301057 - RNA, 19 nt, Artificial Sequence
  Description of Artificial Sequence: Synthetic oligonucleotide
  Antisense strand to SEQ ID NO: 1301056
uacuggcucacugauucuc

SEQ ID NO: 1301058 - RNA, 19 nt, Artificial Sequence
  Description of Artificial Sequence: Synthetic oligonucleotide
  Sense strand starting at position 2378 of SEQ ID NO: 1241804
guauauugaaguuaggcaa

SEQ ID NO: 1301059 - RNA, 19 nt, Artificial Sequence
  Description of Artificial Sequence: Synthetic oligonucleotide
  Antisense strand to SEQ ID NO: 1301058
uugccuaacuucaauauac

SEQ ID NO: 1301060 - RNA, 19 nt, Artificial Sequence
  Description of Artificial Sequence: Synthetic oligonucleotide
  Sense strand starting at position 2524 of SEQ ID NO: 1241804
gagucaugucucgcugcaa

SEQ ID NO: 1301061 - RNA, 19 nt, Artificial Sequence
  Description of Artificial Sequence: Synthetic oligonucleotide
  Antisense strand to SEQ ID NO: 1301060
uugcagcgagacaugacuc

SEQ ID NO: 1301062 - RNA, 19 nt, Artificial Sequence
  Description of Artificial Sequence: Synthetic oligonucleotide
  Sense strand starting at position 2552 of SEQ ID NO: 1241804
ugucaugcuguuguaugua

SEQ ID NO: 1301063 - RNA, 19 nt, Artificial Sequence
  Description of Artificial Sequence: Synthetic oligonucleotide
  Antisense strand to SEQ ID NO: 1301062
uacauacaacagcaugaca

SEQ ID NO: 1301064 - RNA, 19 nt, Artificial Sequence
  Description of Artificial Sequence: Synthetic oligonucleotide
  Sense strand starting at position 2735 of SEQ ID NO: 1241804
ggcccugaggccuggaaau

SEQ ID NO: 1301065 - RNA, 19 nt, Artificial Sequence
  Description of Artificial Sequence: Synthetic oligonucleotide
  Antisense strand to SEQ ID NO: 1301064
auuuccaggccucagggcc

SEQ ID NO: 1301066 - RNA, 19 nt, Artificial Sequence
  Description of Artificial Sequence: Synthetic oligonucleotide
  Sense strand starting at position 2782 of SEQ ID NO: 1241804
gggagaguaaagugguuca

SEQ ID NO: 1301067 - RNA, 19 nt, Artificial Sequence
  Description of Artificial Sequence: Synthetic oligonucleotide
  Antisense strand to SEQ ID NO: 1301066
ugaaccacuuuacucuccc

SEQ ID NO: 1301068 - RNA, 19 nt, Artificial Sequence
  Description of Artificial Sequence: Synthetic oligonucleotide
  Sense strand starting at position 2787 of SEQ ID NO: 1241804
aguaaagugguucagggua

SEQ ID NO: 1301069 - RNA, 19 nt, Artificial Sequence
  Description of Artificial Sequence: Synthetic oligonucleotide
  Antisense strand to SEQ ID NO: 1301068
uacccugaaccacuuuacu

SEQ ID NO: 1301070 - RNA, 19 nt, Artificial Sequence
  Description of Artificial Sequence: Synthetic oligonucleotide
  Sense strand starting at position 2815 of SEQ ID NO: 1241804
ggaucuguugcccaucuga

SEQ ID NO: 1301071 - RNA, 19 nt, Artificial Sequence
  Description of Artificial Sequence: Synthetic oligonucleotide
  Antisense strand to SEQ ID NO: 1301070
ucagaugggcaacagaucc

SEQ ID NO: 1301072 - RNA, 19 nt, Artificial Sequence
  Description of Artificial Sequence: Synthetic oligonucleotide
  Sense strand starting at position 3152 of SEQ ID NO: 1241804
ucugcaagauguuccaacu

SEQ ID NO: 1301073 - RNA, 19 nt, Artificial Sequence
  Description of Artificial Sequence: Synthetic oligonucleotide
  Antisense strand to SEQ ID NO: 1301072
aguuggaacaucuugcaga

SEQ ID NO: 1301074 - RNA, 19 nt, Artificial Sequence
  Description of Artificial Sequence: Synthetic oligonucleotide
  Sense strand starting at position 3463 of SEQ ID NO: 1241804
gccucacuuccucagggaa

SEQ ID NO: 1301075 - RNA, 19 nt, Artificial Sequence
  Description of Artificial Sequence: Synthetic oligonucleotide
  Antisense strand to SEQ ID NO: 1301074
uucccugaggaagugaggc

SEQ ID NO: 1301076 - RNA, 19 nt, Artificial Sequence
  Description of Artificial Sequence: Synthetic oligonucleotide
  Sense strand starting at position 3564 of SEQ ID NO: 1241804
guaguuauuucaguuugug

SEQ ID NO: 1301077 - RNA, 19 nt, Artificial Sequence
  Description of Artificial Sequence: Synthetic oligonucleotide
  Antisense strand to SEQ ID NO: 1301076
cacaaacugaaauaacuac

SEQ ID NO: 1301078 - RNA, 19 nt, Artificial Sequence
  Description of Artificial Sequence: Synthetic oligonucleotide
  Sense strand starting at position 3567 of SEQ ID NO: 1241804
guuauuucaguuugugagu

SEQ ID NO: 1301079 - RNA, 19 nt, Artificial Sequence
  Description of Artificial Sequence: Synthetic oligonucleotide
  Antisense strand to SEQ ID NO: 1301078
acucacaaacugaaauaac

SEQ ID NO: 1301080 - RNA, 19 nt, Artificial Sequence
  Description of Artificial Sequence: Synthetic oligonucleotide
  Sense strand starting at position 3573 of SEQ ID NO: 1241804
ucaguuugugaguauacau

SEQ ID NO: 1301081 - RNA, 19 nt, Artificial Sequence
  Description of Artificial Sequence: Synthetic oligonucleotide
  Antisense strand to SEQ ID NO: 1301080
auguauacucacaaacuga

SEQ ID NO: 1301082 - RNA, 19 nt, Artificial Sequence
  Description of Artificial Sequence: Synthetic oligonucleotide
  Sense strand starting at position 3805 of SEQ ID NO: 1241804
ugaucuguucucuaucauu

SEQ ID NO: 1301083 - RNA, 19 nt, Artificial Sequence
  Description of Artificial Sequence: Synthetic oligonucleotide
  Antisense strand to SEQ ID NO: 1301082
aaugauagagaacagauca

SEQ ID NO: 1301084 - RNA, 19 nt, Artificial Sequence
  Description of Artificial Sequence: Synthetic oligonucleotide
  Sense strand starting at position 3968 of SEQ ID NO: 1241804
gugcuuauacaauaguuua

SEQ ID NO: 1301085 - RNA, 19 nt, Artificial Sequence
  Description of Artificial Sequence: Synthetic oligonucleotide
  Antisense strand to SEQ ID NO: 1301084
uaaacuauuguauaagcac

SEQ ID NO: 1301086 - RNA, 19 nt, Artificial Sequence
  Description of Artificial Sequence: Synthetic oligonucleotide
  Sense strand starting at position 184 of SEQ ID NO: 1241805
uacacuggcuuguuguaua

SEQ ID NO: 1301087 - RNA, 19 nt, Artificial Sequence
  Description of Artificial Sequence: Synthetic oligonucleotide
  Antisense strand to SEQ ID NO: 1301086
uauacaacaagccagugua

SEQ ID NO: 1301088 - RNA, 19 nt, Artificial Sequence
  Description of Artificial Sequence: Synthetic oligonucleotide
  Sense strand starting at position 573 of SEQ ID NO: 1241805
agacuuugcugcucuauuu

SEQ ID NO: 1301089 - RNA, 19 nt, Artificial Sequence
  Description of Artificial Sequence: Synthetic oligonucleotide
  Antisense strand to SEQ ID NO: 1301088
aaauagagcagcaaagucu

SEQ ID NO: 1301090 - RNA, 19 nt, Artificial Sequence
  Description of Artificial Sequence: Synthetic oligonucleotide
  Sense strand starting at position 636 of SEQ ID NO: 1241805
cuaaaucacuaagugagua

SEQ ID NO: 1301091 - RNA, 19 nt, Artificial Sequence
  Description of Artificial Sequence: Synthetic oligonucleotide
  Antisense strand to SEQ ID NO: 1301090
uacucacuuagugauuuag

SEQ ID NO: 1301092 - RNA, 19 nt, Artificial Sequence
  Description of Artificial Sequence: Synthetic oligonucleotide
  Sense strand starting at position 648 of SEQ ID NO: 1241805
gugaguaguccuuggaagg

SEQ ID NO: 1301093 - RNA, 19 nt, Artificial Sequence
  Description of Artificial Sequence: Synthetic oligonucleotide
  Antisense strand to SEQ ID NO: 1301092
ccuuccaaggacuacucac

SEQ ID NO: 1301094 - RNA, 19 nt, Artificial Sequence
  Description of Artificial Sequence: Synthetic oligonucleotide
  Sense strand starting at position 649 of SEQ ID NO: 1241805
ugaguaguccuuggaagga

SEQ ID NO: 1301095 - RNA, 19 nt, Artificial Sequence
  Description of Artificial Sequence: Synthetic oligonucleotide
  Antisense strand to SEQ ID NO: 1301094
uccuuccaaggacuacuca

SEQ ID NO: 1301096 - RNA, 19 nt, Artificial Sequence
  Description of Artificial Sequence: Synthetic oligonucleotide
  Sense strand starting at position 779 of SEQ ID NO: 1241805
ccugguuagccuuguaacu

SEQ ID NO: 1301097 - RNA, 19 nt, Artificial Sequence
  Description of Artificial Sequence: Synthetic oligonucleotide
  Antisense strand to SEQ ID NO: 1301096
aguuacaaggcuaaccagg

SEQ ID NO: 1301098 - RNA, 19 nt, Artificial Sequence
  Description of Artificial Sequence: Synthetic oligonucleotide
  Sense strand starting at position 816 of SEQ ID NO: 1241805
cuagauguauauuaaagac

SEQ ID NO: 1301099 - RNA, 19 nt, Artificial Sequence
  Description of Artificial Sequence: Synthetic oligonucleotide
  Antisense strand to SEQ ID NO: 1301098
gucuuuaauauacaucuag

SEQ ID NO: 1301100 - RNA, 19 nt, Artificial Sequence
  Description of Artificial Sequence: Synthetic oligonucleotide
  Sense strand starting at position 947 of SEQ ID NO: 1241805
ggagacaauuccucuacuu

SEQ ID NO: 1301101 - RNA, 19 nt, Artificial Sequence
  Description of Artificial Sequence: Synthetic oligonucleotide
  Antisense strand to SEQ ID NO: 1301100
aaguagaggaauugucucc

SEQ ID NO: 1301102 - RNA, 19 nt, Artificial Sequence
  Description of Artificial Sequence: Synthetic oligonucleotide
  Sense strand starting at position 1157 of SEQ ID NO: 1241805
gguguaaagcccugccuuu

SEQ ID NO: 1301103 - RNA, 19 nt, Artificial Sequence
  Description of Artificial Sequence: Synthetic oligonucleotide
  Antisense strand to SEQ ID NO: 1301102
aaaggcagggcuuuacacc

SEQ ID NO: 1301104 - RNA, 19 nt, Artificial Sequence
  Description of Artificial Sequence: Synthetic oligonucleotide
  Sense strand starting at position 1558 of SEQ ID NO: 1241805
agccgaauccauuguuuau

SEQ ID NO: 1301105 - RNA, 19 nt, Artificial Sequence
  Description of Artificial Sequence: Synthetic oligonucleotide
  Antisense strand to SEQ ID NO: 1301104
auaaacaauggauucggcu

SEQ ID NO: 1301106 - RNA, 19 nt, Artificial Sequence
  Description of Artificial Sequence: Synthetic oligonucleotide
  Sense strand starting at position 1863 of SEQ ID NO: 1241805
ccuguugucaguugggauc

SEQ ID NO: 1301107 - RNA, 19 nt, Artificial Sequence
  Description of Artificial Sequence: Synthetic oligonucleotide
  Antisense strand to SEQ ID NO: 1301106
gaucccaacugacaacagg

SEQ ID NO: 1301108 - RNA, 19 nt, Artificial Sequence
  Description of Artificial Sequence: Synthetic oligonucleotide
  Sense strand starting at position 1882 of SEQ ID NO: 1241805
agcugaucggagugaacuu

SEQ ID NO: 1301109 - RNA, 19 nt, Artificial Sequence
  Description of Artificial Sequence: Synthetic oligonucleotide
  Antisense strand to SEQ ID NO: 1301108
aaguucacuccgaucagcu

SEQ ID NO: 1301110 - RNA, 19 nt, Artificial Sequence
  Description of Artificial Sequence: Synthetic oligonucleotide
  Sense strand starting at position 1891 of SEQ ID NO: 1241805
gagugaacuucucccagcu

SEQ ID NO: 1301111 - RNA, 19 nt, Artificial Sequence
  Description of Artificial Sequence: Synthetic oligonucleotide
  Antisense strand to SEQ ID NO: 1301110
agcugggagaaguucacuc

SEQ ID NO: 1301112 - RNA, 19 nt, Artificial Sequence
  Description of Artificial Sequence: Synthetic oligonucleotide
  Sense strand starting at position 2053 of SEQ ID NO: 1241805
aaggaagacucugaaugac

SEQ ID NO: 1301113 - RNA, 19 nt, Artificial Sequence
  Description of Artificial Sequence: Synthetic oligonucleotide
  Antisense strand to SEQ ID NO: 1301112
gucauucagagucuuccuu

SEQ ID NO: 1301114 - RNA, 19 nt, Artificial Sequence
  Description of Artificial Sequence: Synthetic oligonucleotide
  Sense strand starting at position 2217 of SEQ ID NO: 1241805
ggugcuacauuagagaacu

SEQ ID NO: 1301115 - RNA, 19 nt, Artificial Sequence
  Description of Artificial Sequence: Synthetic oligonucleotide
  Antisense strand to SEQ ID NO: 1301114
aguucucuaauguagcacc

SEQ ID NO: 1301116 - RNA, 19 nt, Artificial Sequence
  Description of Artificial Sequence: Synthetic oligonucleotide
  Sense strand starting at position 2246 of SEQ ID NO: 1241805
ugucuaguauaagugggaa

SEQ ID NO: 1301117 - RNA, 19 nt, Artificial Sequence
  Description of Artificial Sequence: Synthetic oligonucleotide
  Antisense strand to SEQ ID NO: 1301116
uucccacuuauacuagaca

SEQ ID NO: 1301118 - RNA, 19 nt, Artificial Sequence
  Description of Artificial Sequence: Synthetic oligonucleotide
  Sense strand starting at position 2248 of SEQ ID NO: 1241805
ucuaguauaagugggaaau

SEQ ID NO: 1301119 - RNA, 19 nt, Artificial Sequence
  Description of Artificial Sequence: Synthetic oligonucleotide
  Antisense strand to SEQ ID NO: 1301118
auuucccacuuauacuaga

SEQ ID NO: 1301120 - RNA, 19 nt, Artificial Sequence
  Description of Artificial Sequence: Synthetic oligonucleotide
  Sense strand starting at position 2249 of SEQ ID NO: 1241805
cuaguauaagugggaaaug

SEQ ID NO: 1301121 - RNA, 19 nt, Artificial Sequence
  Description of Artificial Sequence: Synthetic oligonucleotide
  Antisense strand to SEQ ID NO: 1301120
cauuucccacuuauacuag

SEQ ID NO: 1301122 - RNA, 19 nt, Artificial Sequence
  Description of Artificial Sequence: Synthetic oligonucleotide
  Sense strand starting at position 2260 of SEQ ID NO: 1241805
gggaaauggugagucaauu

SEQ ID NO: 1301123 - RNA, 19 nt, Artificial Sequence
  Description of Artificial Sequence: Synthetic oligonucleotide
  Antisense strand to SEQ ID NO: 1301122
aauugacucaccauuuccc

SEQ ID NO: 1301124 - RNA, 19 nt, Artificial Sequence
  Description of Artificial Sequence: Synthetic oligonucleotide
  Sense strand starting at position 2404 of SEQ ID NO: 1241805
auagguacucuugggaagu

SEQ ID NO: 1301125 - RNA, 19 nt, Artificial Sequence
  Description of Artificial Sequence: Synthetic oligonucleotide
  Antisense strand to SEQ ID NO: 1301124
acuucccaagaguaccuau

SEQ ID NO: 1301126 - RNA, 19 nt, Artificial Sequence
  Description of Artificial Sequence: Synthetic oligonucleotide
  Sense strand starting at position 2406 of SEQ ID NO: 1241805
agguacucuugggaaguuu

SEQ ID NO: 1301127 - RNA, 19 nt, Artificial Sequence
  Description of Artificial Sequence: Synthetic oligonucleotide
  Antisense strand to SEQ ID NO: 1301126
aaacuucccaagaguaccu

SEQ ID NO: 1301128 - RNA, 19 nt, Artificial Sequence
  Description of Artificial Sequence: Synthetic oligonucleotide
  Sense strand starting at position 2535 of SEQ ID NO: 1241805
uggagugaauguucugaug

SEQ ID NO: 1301129 - RNA, 19 nt, Artificial Sequence
  Description of Artificial Sequence: Synthetic oligonucleotide
  Antisense strand to SEQ ID NO: 1301128
caucagaacauucacucca

SEQ ID NO: 1301130 - RNA, 19 nt, Artificial Sequence
  Description of Artificial Sequence: Synthetic oligonucleotide
  Sense strand starting at position 2565 of SEQ ID NO: 1241805
agagguuggcuuuguagac

SEQ ID NO: 1301131 - RNA, 19 nt, Artificial Sequence
  Description of Artificial Sequence: Synthetic oligonucleotide
  Antisense strand to SEQ ID NO: 1301130
gucuacaaagccaaccucu

SEQ ID NO: 1301132 - RNA, 19 nt, Artificial Sequence
  Description of Artificial Sequence: Synthetic oligonucleotide
  Sense strand starting at position 2619 of SEQ ID NO: 1241805
agagcauauugguuucuuu

SEQ ID NO: 1301133 - RNA, 19 nt, Artificial Sequence
  Description of Artificial Sequence: Synthetic oligonucleotide
  Antisense strand to SEQ ID NO: 1301132
aaagaaaccaauaugcucu

SEQ ID NO: 1301134 - RNA, 19 nt, Artificial Sequence
  Description of Artificial Sequence: Synthetic oligonucleotide
  Sense strand starting at position 2622 of SEQ ID NO: 1241805
gcauauugguuucuuucuu

SEQ ID NO: 1301135 - RNA, 19 nt, Artificial Sequence
  Description of Artificial Sequence: Synthetic oligonucleotide
  Antisense strand to SEQ ID NO: 1301134
aagaaagaaaccaauaugc

SEQ ID NO: 1301136 - RNA, 19 nt, Artificial Sequence
  Description of Artificial Sequence: Synthetic oligonucleotide
  Sense strand starting at position 2704 of SEQ ID NO: 1241805
uugacauauuggucacuuc

SEQ ID NO: 1301137 - RNA, 19 nt, Artificial Sequence
  Description of Artificial Sequence: Synthetic oligonucleotide
  Antisense strand to SEQ ID NO: 1301136
gaagugaccaauaugucaa

SEQ ID NO: 1301138 - RNA, 19 nt, Artificial Sequence
  Description of Artificial Sequence: Synthetic oligonucleotide
  Sense strand starting at position 2705 of SEQ ID NO: 1241805
ugacauauuggucacuucu

SEQ ID NO: 1301139 - RNA, 19 nt, Artificial Sequence
  Description of Artificial Sequence: Synthetic oligonucleotide
  Antisense strand to SEQ ID NO: 1301138
agaagugaccaauauguca

SEQ ID NO: 1301140 - RNA, 19 nt, Artificial Sequence
  Description of Artificial Sequence: Synthetic oligonucleotide
  Sense strand starting at position 2726 of SEQ ID NO: 1241805
gcuacuuuccuuggaaggu

SEQ ID NO: 1301141 - RNA, 19 nt, Artificial Sequence
  Description of Artificial Sequence: Synthetic oligonucleotide
  Antisense strand to SEQ ID NO: 1301140
accuuccaaggaaaguagc

SEQ ID NO: 1301142 - RNA, 19 nt, Artificial Sequence
  Description of Artificial Sequence: Synthetic oligonucleotide
  Sense strand starting at position 2773 of SEQ ID NO: 1241805
auaacugauuaguugacau

SEQ ID NO: 1301143 - RNA, 19 nt, Artificial Sequence
  Description of Artificial Sequence: Synthetic oligonucleotide
  Antisense strand to SEQ ID NO: 1301142
augucaacuaaucaguuau

SEQ ID NO: 1301144 - RNA, 19 nt, Artificial Sequence
  Description of Artificial Sequence: Synthetic oligonucleotide
  Sense strand starting at position 2816 of SEQ ID NO: 1241805
guguaaggauuacaacaga

SEQ ID NO: 1301145 - RNA, 19 nt, Artificial Sequence
  Description of Artificial Sequence: Synthetic oligonucleotide
  Antisense strand to SEQ ID NO: 1301144
ucuguuguaauccuuacac

SEQ ID NO: 1301146 - RNA, 19 nt, Artificial Sequence
  Description of Artificial Sequence: Synthetic oligonucleotide
  Sense strand starting at position 2861 of SEQ ID NO: 1241805
aaacaagccuguuugggaa

SEQ ID NO: 1301147 - RNA, 19 nt, Artificial Sequence
  Description of Artificial Sequence: Synthetic oligonucleotide
  Antisense strand to SEQ ID NO: 1301146
uucccaaacaggcuuguuu

SEQ ID NO: 1301148 - RNA, 19 nt, Artificial Sequence
  Description of Artificial Sequence: Synthetic oligonucleotide
  Sense strand starting at position 2938 of SEQ ID NO: 1241805
uggguuugguaacaacuua

SEQ ID NO: 1301149 - RNA, 19 nt, Artificial Sequence
  Description of Artificial Sequence: Synthetic oligonucleotide
  Antisense strand to SEQ ID NO: 1301148
uaaguuguuaccaaaccca

SEQ ID NO: 1301150 - RNA, 19 nt, Artificial Sequence
  Description of Artificial Sequence: Synthetic oligonucleotide
  Sense strand starting at position 2960 of SEQ ID NO: 1241805
uggauuuggugaggugaaa

SEQ ID NO: 1301151 - RNA, 19 nt, Artificial Sequence
  Description of Artificial Sequence: Synthetic oligonucleotide
  Antisense strand to SEQ ID NO: 1301150
uuucaccucaccaaaucca

SEQ ID NO: 1301152 - RNA, 19 nt, Artificial Sequence
  Description of Artificial Sequence: Synthetic oligonucleotide
  Sense strand starting at position 3086 of SEQ ID NO: 1241805
aaggguauucuccaagcca

SEQ ID NO: 1301153 - RNA, 19 nt, Artificial Sequence
  Description of Artificial Sequence: Synthetic oligonucleotide
  Antisense strand to SEQ ID NO: 1301152
uggcuuggagaauacccuu

SEQ ID NO: 1301154 - RNA, 19 nt, Artificial Sequence
  Description of Artificial Sequence: Synthetic oligonucleotide
  Sense strand starting at position 3833 of SEQ ID NO: 1241805
uugcguuagaugggcuaaa

SEQ ID NO: 1301155 - RNA, 19 nt, Artificial Sequence
  Description of Artificial Sequence: Synthetic oligonucleotide
  Antisense strand to SEQ ID NO: 1301154
uuuagcccaucuaacgcaa

SEQ ID NO: 1301156 - RNA, 19 nt, Artificial Sequence
  Description of Artificial Sequence: Synthetic oligonucleotide
  Sense strand starting at position 3834 of SEQ ID NO: 1241805
ugcguuagaugggcuaaau

SEQ ID NO: 1301157 - RNA, 19 nt, Artificial Sequence
  Description of Artificial Sequence: Synthetic oligonucleotide
  Antisense strand to SEQ ID NO: 1301156
auuuagcccaucuaacgca

SEQ ID NO: 1301158 - RNA, 19 nt, Artificial Sequence
  Description of Artificial Sequence: Synthetic oligonucleotide
  Sense strand starting at position 3879 of SEQ ID NO: 1241805
gcaggcuaaugguuaacau

SEQ ID NO: 1301159 - RNA, 19 nt, Artificial Sequence
  Description of Artificial Sequence: Synthetic oligonucleotide
  Antisense strand to SEQ ID NO: 1301158
auguuaaccauuagccugc

SEQ ID NO: 1301160 - RNA, 19 nt, Artificial Sequence
  Description of Artificial Sequence: Synthetic oligonucleotide
  Sense strand starting at position 3880 of SEQ ID NO: 1241805
caggcuaaugguuaacauu

SEQ ID NO: 1301161 - RNA, 19 nt, Artificial Sequence
  Description of Artificial Sequence: Synthetic oligonucleotide
  Antisense strand to SEQ ID NO: 1301160
aauguuaaccauuagccug

SEQ ID NO: 1301162 - RNA, 19 nt, Artificial Sequence
  Description of Artificial Sequence: Synthetic oligonucleotide
  Sense strand starting at position 3883 of SEQ ID NO: 1241805
gcuaaugguuaacauuuau

SEQ ID NO: 1301163 - RNA, 19 nt, Artificial Sequence
  Description of Artificial Sequence: Synthetic oligonucleotide
  Antisense strand to SEQ ID NO: 1301162
auaaauguuaaccauuagc

SEQ ID NO: 1301164 - RNA, 19 nt, Artificial Sequence
  Description of Artificial Sequence: Synthetic oligonucleotide
  Sense strand starting at position 3925 of SEQ ID NO: 1241805
ggccuuauauuuguuuagu

SEQ ID NO: 1301165 - RNA, 19 nt, Artificial Sequence
  Description of Artificial Sequence: Synthetic oligonucleotide
  Antisense strand to SEQ ID NO: 1301164
acuaaacaaauauaaggcc

SEQ ID NO: 1301166 - RNA, 19 nt, Artificial Sequence
  Description of Artificial Sequence: Synthetic oligonucleotide
  Sense strand starting at position 147 of SEQ ID NO: 1241806
ccaggcuguuucucaaaga

SEQ ID NO: 1301167 - RNA, 19 nt, Artificial Sequence
  Description of Artificial Sequence: Synthetic oligonucleotide
  Antisense strand to SEQ ID NO: 1301166
ucuuugagaaacagccugg

SEQ ID NO: 1301168 - RNA, 19 nt, Artificial Sequence
  Description of Artificial Sequence: Synthetic oligonucleotide
  Sense strand starting at position 183 of SEQ ID NO: 1241806
gaagacaccugaugggaaa

SEQ ID NO: 1301169 - RNA, 19 nt, Artificial Sequence
  Description of Artificial Sequence: Synthetic oligonucleotide
  Antisense strand to SEQ ID NO: 1301168
uuucccaucaggugucuuc

SEQ ID NO: 1301170 - RNA, 19 nt, Artificial Sequence
  Description of Artificial Sequence: Synthetic oligonucleotide
  Sense strand starting at position 680 of SEQ ID NO: 1241806
ugcugaaguaucuaaugag

SEQ ID NO: 1301171 - RNA, 19 nt, Artificial Sequence
  Description of Artificial Sequence: Synthetic oligonucleotide
  Antisense strand to SEQ ID NO: 1301170
cucauuagauacuucagca

SEQ ID NO: 1301172 - RNA, 19 nt, Artificial Sequence
  Description of Artificial Sequence: Synthetic oligonucleotide
  Sense strand starting at position 686 of SEQ ID NO: 1241806
aguaucuaaugagaugaua

SEQ ID NO: 1301173 - RNA, 19 nt, Artificial Sequence
  Description of Artificial Sequence: Synthetic oligonucleotide
  Antisense strand to SEQ ID NO: 1301172
uaucaucucauuagauacu

SEQ ID NO: 1301174 - RNA, 19 nt, Artificial Sequence
  Description of Artificial Sequence: Synthetic oligonucleotide
  Sense strand starting at position 1100 of SEQ ID NO: 1241806
cccaguaaaugggaaauua

SEQ ID NO: 1301175 - RNA, 19 nt, Artificial Sequence
  Description of Artificial Sequence: Synthetic oligonucleotide
  Antisense strand to SEQ ID NO: 1301174
uaauuucccauuuacuggg

SEQ ID NO: 1301176 - RNA, 19 nt, Artificial Sequence
  Description of Artificial Sequence: Synthetic oligonucleotide
  Sense strand starting at position 1108 of SEQ ID NO: 1241806
augggaaauuaggauccaa

SEQ ID NO: 1301177 - RNA, 19 nt, Artificial Sequence
  Description of Artificial Sequence: Synthetic oligonucleotide
  Antisense strand to SEQ ID NO: 1301176
uuggauccuaauuucccau

SEQ ID NO: 1301178 - RNA, 19 nt, Artificial Sequence
  Description of Artificial Sequence: Synthetic oligonucleotide
  Sense strand starting at position 1122 of SEQ ID NO: 1241806
uccaauacagcguaagguu

SEQ ID NO: 1301179 - RNA, 19 nt, Artificial Sequence
  Description of Artificial Sequence: Synthetic oligonucleotide
  Antisense strand to SEQ ID NO: 1301178
aaccuuacgcuguauugga

SEQ ID NO: 1301180 - RNA, 19 nt, Artificial Sequence
  Description of Artificial Sequence: Synthetic oligonucleotide
  Sense strand starting at position 1130 of SEQ ID NO: 1241806
agcguaagguucuuacugu

SEQ ID NO: 1301181 - RNA, 19 nt, Artificial Sequence
  Description of Artificial Sequence: Synthetic oligonucleotide
  Antisense strand to SEQ ID NO: 1301180
acaguaagaaccuuacgcu

SEQ ID NO: 1301182 - RNA, 19 nt, Artificial Sequence
  Description of Artificial Sequence: Synthetic oligonucleotide
  Sense strand starting at position 1215 of SEQ ID NO: 1241806
ucucaaggcuuggugugaa

SEQ ID NO: 1301183 - RNA, 19 nt, Artificial Sequence
  Description of Artificial Sequence: Synthetic oligonucleotide
  Antisense strand to SEQ ID NO: 1301182
uucacaccaagccuugaga

SEQ ID NO: 1301184 - RNA, 19 nt, Artificial Sequence
  Description of Artificial Sequence: Synthetic oligonucleotide
  Sense strand starting at position 1218 of SEQ ID NO: 1241806
caaggcuuggugugaaaca

SEQ ID NO: 1301185 - RNA, 19 nt, Artificial Sequence
  Description of Artificial Sequence: Synthetic oligonucleotide
  Antisense strand to SEQ ID NO: 1301184
uguuucacaccaagccuug

SEQ ID NO: 1301186 - RNA, 19 nt, Artificial Sequence
  Description of Artificial Sequence: Synthetic oligonucleotide
  Sense strand starting at position 1289 of SEQ ID NO: 1241806
aaaugaacuguuggcuuau

SEQ ID NO: 1301187 - RNA, 19 nt, Artificial Sequence
  Description of Artificial Sequence: Synthetic oligonucleotide
  Antisense strand to SEQ ID NO: 1301186
auaagccaacaguucauuu

SEQ ID NO: 1301188 - RNA, 19 nt, Artificial Sequence
  Description of Artificial Sequence: Synthetic oligonucleotide
  Sense strand starting at position 1301 of SEQ ID NO: 1241806
ggcuuauguuguccaaggu

SEQ ID NO: 1301189 - RNA, 19 nt, Artificial Sequence
  Description of Artificial Sequence: Synthetic oligonucleotide
  Antisense strand to SEQ ID NO: 1301188
accuuggacaacauaagcc

SEQ ID NO: 1301190 - RNA, 19 nt, Artificial Sequence
  Description of Artificial Sequence: Synthetic oligonucleotide
  Sense strand starting at position 1302 of SEQ ID NO: 1241806
gcuuauguuguccaaggua

SEQ ID NO: 1301191 - RNA, 19 nt, Artificial Sequence
  Description of Artificial Sequence: Synthetic oligonucleotide
  Antisense strand to SEQ ID NO: 1301190
uaccuuggacaacauaagc

SEQ ID NO: 1301192 - RNA, 19 nt, Artificial Sequence
  Description of Artificial Sequence: Synthetic oligonucleotide
  Sense strand starting at position 1305 of SEQ ID NO: 1241806
uauguuguccaagguaaca

SEQ ID NO: 1301193 - RNA, 19 nt, Artificial Sequence
  Description of Artificial Sequence: Synthetic oligonucleotide
  Antisense strand to SEQ ID NO: 1301192
uguuaccuuggacaacaua

SEQ ID NO: 1301194 - RNA, 19 nt, Artificial Sequence
  Description of Artificial Sequence: Synthetic oligonucleotide
  Sense strand starting at position 1452 of SEQ ID NO: 1241806
aucagaccuugacaaguuu

SEQ ID NO: 1301195 - RNA, 19 nt, Artificial Sequence
  Description of Artificial Sequence: Synthetic oligonucleotide
  Antisense strand to SEQ ID NO: 1301194
aaacuugucaaggucugau

SEQ ID NO: 1301196 - RNA, 19 nt, Artificial Sequence
  Description of Artificial Sequence: Synthetic oligonucleotide
  Sense strand starting at position 2035 of SEQ ID NO: 1241806
gaaagcauuugaggcaagu

SEQ ID NO: 1301197 - RNA, 19 nt, Artificial Sequence
  Description of Artificial Sequence: Synthetic oligonucleotide
  Antisense strand to SEQ ID NO: 1301196
acuugccucaaaugcuuuc

SEQ ID NO: 1301198 - RNA, 19 nt, Artificial Sequence
  Description of Artificial Sequence: Synthetic oligonucleotide
  Sense strand starting at position 2091 of SEQ ID NO: 1241806
uuuaguugccuugacaaca

SEQ ID NO: 1301199 - RNA, 19 nt, Artificial Sequence
  Description of Artificial Sequence: Synthetic oligonucleotide
  Antisense strand to SEQ ID NO: 1301198
uguugucaaggcaacuaaa

SEQ ID NO: 1301200 - RNA, 19 nt, Artificial Sequence
  Description of Artificial Sequence: Synthetic oligonucleotide
  Sense strand starting at position 2186 of SEQ ID NO: 1241806
ggacacacuucugucauca

SEQ ID NO: 1301201 - RNA, 19 nt, Artificial Sequence
  Description of Artificial Sequence: Synthetic oligonucleotide
  Antisense strand to SEQ ID NO: 1301200
ugaugacagaagugugucc

SEQ ID NO: 1301202 - RNA, 19 nt, Artificial Sequence
  Description of Artificial Sequence: Synthetic oligonucleotide
  Sense strand starting at position 2190 of SEQ ID NO: 1241806
acacuucugucaucaguga

SEQ ID NO: 1301203 - RNA, 19 nt, Artificial Sequence
  Description of Artificial Sequence: Synthetic oligonucleotide
  Antisense strand to SEQ ID NO: 1301202
ucacugaugacagaagugu

SEQ ID NO: 1301204 - RNA, 19 nt, Artificial Sequence
  Description of Artificial Sequence: Synthetic oligonucleotide
  Sense strand starting at position 2194 of SEQ ID NO: 1241806
uucugucaucagugacauc

SEQ ID NO: 1301205 - RNA, 19 nt, Artificial Sequence
  Description of Artificial Sequence: Synthetic oligonucleotide
  Antisense strand to SEQ ID NO: 1301204
gaugucacugaugacagaa

SEQ ID NO: 1301206 - RNA, 19 nt, Artificial Sequence
  Description of Artificial Sequence: Synthetic oligonucleotide
  Sense strand starting at position 2246 of SEQ ID NO: 1241806
cauaaaugcuucccgaugu

SEQ ID NO: 1301207 - RNA, 19 nt, Artificial Sequence
  Description of Artificial Sequence: Synthetic oligonucleotide
  Antisense strand to SEQ ID NO: 1301206
acaucgggaagcauuuaug

SEQ ID NO: 1301208 - RNA, 19 nt, Artificial Sequence
  Description of Artificial Sequence: Synthetic oligonucleotide
  Sense strand starting at position 2250 of SEQ ID NO: 1241806
aaugcuucccgaugugaca

SEQ ID NO: 1301209 - RNA, 19 nt, Artificial Sequence
  Description of Artificial Sequence: Synthetic oligonucleotide
  Antisense strand to SEQ ID NO: 1301208
ugucacaucgggaagcauu

SEQ ID NO: 1301210 - RNA, 19 nt, Artificial Sequence
  Description of Artificial Sequence: Synthetic oligonucleotide
  Sense strand starting at position 2278 of SEQ ID NO: 1241806
cgucaagaguuucuacauu

SEQ ID NO: 1301211 - RNA, 19 nt, Artificial Sequence
  Description of Artificial Sequence: Synthetic oligonucleotide
  Antisense strand to SEQ ID NO: 1301210
aauguagaaacucuugacg

SEQ ID NO: 1301212 - RNA, 19 nt, Artificial Sequence
  Description of Artificial Sequence: Synthetic oligonucleotide
  Sense strand starting at position 2340 of SEQ ID NO: 1241806
uggaucacuccugguaauc

SEQ ID NO: 1301213 - RNA, 19 nt, Artificial Sequence
  Description of Artificial Sequence: Synthetic oligonucleotide
  Antisense strand to SEQ ID NO: 1301212
gauuaccaggagugaucca

SEQ ID NO: 1301214 - RNA, 19 nt, Artificial Sequence
  Description of Artificial Sequence: Synthetic oligonucleotide
  Sense strand starting at position 2649 of SEQ ID NO: 1241806
augaaaugguucucccaac

SEQ ID NO: 1301215 - RNA, 19 nt, Artificial Sequence
  Description of Artificial Sequence: Synthetic oligonucleotide
  Antisense strand to SEQ ID NO: 1301214
guugggagaaccauuucau

SEQ ID NO: 1301216 - RNA, 19 nt, Artificial Sequence
  Description of Artificial Sequence: Synthetic oligonucleotide
  Sense strand starting at position 2650 of SEQ ID NO: 1241806
ugaaaugguucucccaacu

SEQ ID NO: 1301217 - RNA, 19 nt, Artificial Sequence
  Description of Artificial Sequence: Synthetic oligonucleotide
  Antisense strand to SEQ ID NO: 1301216
aguugggagaaccauuuca

SEQ ID NO: 1301218 - RNA, 19 nt, Artificial Sequence
  Description of Artificial Sequence: Synthetic oligonucleotide
  Sense strand starting at position 2735 of SEQ ID NO: 1241806
uccucuauucgauagagac

SEQ ID NO: 1301219 - RNA, 19 nt, Artificial Sequence
  Description of Artificial Sequence: Synthetic oligonucleotide
  Antisense strand to SEQ ID NO: 1301218
gucucuaucgaauagagga

SEQ ID NO: 1301220 - RNA, 19 nt, Artificial Sequence
  Description of Artificial Sequence: Synthetic oligonucleotide
  Sense strand starting at position 2743 of SEQ ID NO: 1241806
ucgauagagaccugagcau

SEQ ID NO: 1301221 - RNA, 19 nt, Artificial Sequence
  Description of Artificial Sequence: Synthetic oligonucleotide
  Antisense strand to SEQ ID NO: 1301220
augcucaggucucuaucga

SEQ ID NO: 1301222 - RNA, 19 nt, Artificial Sequence
  Description of Artificial Sequence: Synthetic oligonucleotide
  Sense strand starting at position 2758 of SEQ ID NO: 1241806
gcauuuauuuccugcaagc

SEQ ID NO: 1301223 - RNA, 19 nt, Artificial Sequence
  Description of Artificial Sequence: Synthetic oligonucleotide
  Antisense strand to SEQ ID NO: 1301222
gcuugcaggaaauaaaugc

SEQ ID NO: 1301224 - RNA, 19 nt, Artificial Sequence
  Description of Artificial Sequence: Synthetic oligonucleotide
  Sense strand starting at position 2775 of SEQ ID NO: 1241806
gcagguuuaucugcucagu

SEQ ID NO: 1301225 - RNA, 19 nt, Artificial Sequence
  Description of Artificial Sequence: Synthetic oligonucleotide
  Antisense strand to SEQ ID NO: 1301224
acugagcagauaaaccugc

SEQ ID NO: 1301226 - RNA, 19 nt, Artificial Sequence
  Description of Artificial Sequence: Synthetic oligonucleotide
  Sense strand starting at position 2778 of SEQ ID NO: 1241806
gguuuaucugcucagugca

SEQ ID NO: 1301227 - RNA, 19 nt, Artificial Sequence
  Description of Artificial Sequence: Synthetic oligonucleotide
  Antisense strand to SEQ ID NO: 1301226
ugcacugagcagauaaacc

SEQ ID NO: 1301228 - RNA, 19 nt, Artificial Sequence
  Description of Artificial Sequence: Synthetic oligonucleotide
  Sense strand starting at position 2795 of SEQ ID NO: 1241806
cagguaugcgcugcuugua

SEQ ID NO: 1301229 - RNA, 19 nt, Artificial Sequence
  Description of Artificial Sequence: Synthetic oligonucleotide
  Antisense strand to SEQ ID NO: 1301228
uacaagcagcgcauaccug

SEQ ID NO: 1301230 - RNA, 19 nt, Artificial Sequence
  Description of Artificial Sequence: Synthetic oligonucleotide
  Sense strand starting at position 2831 of SEQ ID NO: 1241806
uauuguggacccugagcaa

SEQ ID NO: 1301231 - RNA, 19 nt, Artificial Sequence
  Description of Artificial Sequence: Synthetic oligonucleotide
  Antisense strand to SEQ ID NO: 1301230
uugcucaggguccacaaua

SEQ ID NO: 1301232 - RNA, 19 nt, Artificial Sequence
  Description of Artificial Sequence: Synthetic oligonucleotide
  Sense strand starting at position 2937 of SEQ ID NO: 1241806
uccugucagcaggaggaau

SEQ ID NO: 1301233 - RNA, 19 nt, Artificial Sequence
  Description of Artificial Sequence: Synthetic oligonucleotide
  Antisense strand to SEQ ID NO: 1301232
auuccuccugcugacagga

SEQ ID NO: 1301234 - RNA, 19 nt, Artificial Sequence
  Description of Artificial Sequence: Synthetic oligonucleotide
  Sense strand starting at position 3105 of SEQ ID NO: 1241806
uccacauuucccggucaau

SEQ ID NO: 1301235 - RNA, 19 nt, Artificial Sequence
  Description of Artificial Sequence: Synthetic oligonucleotide
  Antisense strand to SEQ ID NO: 1301234
auugaccgggaaaugugga

SEQ ID NO: 1301236 - RNA, 19 nt, Artificial Sequence
  Description of Artificial Sequence: Synthetic oligonucleotide
  Sense strand starting at position 3111 of SEQ ID NO: 1241806
uuucccggucaauaauaaa

SEQ ID NO: 1301237 - RNA, 19 nt, Artificial Sequence
  Description of Artificial Sequence: Synthetic oligonucleotide
  Antisense strand to SEQ ID NO: 1301236
uuuauuauugaccgggaaa

SEQ ID NO: 1301238 - RNA, 19 nt, Artificial Sequence
  Description of Artificial Sequence: Synthetic oligonucleotide
  Sense strand starting at position 3167 of SEQ ID NO: 1241806
agaguacugcaucaaucag

SEQ ID NO: 1301239 - RNA, 19 nt, Artificial Sequence
  Description of Artificial Sequence: Synthetic oligonucleotide
  Antisense strand to SEQ ID NO: 1301238
cugauugaugcaguacucu

SEQ ID NO: 1301240 - RNA, 19 nt, Artificial Sequence
  Description of Artificial Sequence: Synthetic oligonucleotide
  Sense strand starting at position 3175 of SEQ ID NO: 1241806
gcaucaaucagguggaacu

SEQ ID NO: 1301241 - RNA, 19 nt, Artificial Sequence
  Description of Artificial Sequence: Synthetic oligonucleotide
  Antisense strand to SEQ ID NO: 1301240
aguuccaccugauugaugc

SEQ ID NO: 1301242 - RNA, 19 nt, Artificial Sequence
  Description of Artificial Sequence: Synthetic oligonucleotide
  Sense strand starting at position 3900 of SEQ ID NO: 1241806
augguaugaucucauuuau

SEQ ID NO: 1301243 - RNA, 19 nt, Artificial Sequence
  Description of Artificial Sequence: Synthetic oligonucleotide
  Antisense strand to SEQ ID NO: 1301242
auaaaugagaucauaccau

SEQ ID NO: 1301244 - RNA, 19 nt, Artificial Sequence
  Description of Artificial Sequence: Synthetic oligonucleotide
  Sense strand starting at position 3906 of SEQ ID NO: 1241806
ugaucucauuuaugaagga

SEQ ID NO: 1301245 - RNA, 19 nt, Artificial Sequence
  Description of Artificial Sequence: Synthetic oligonucleotide
  Antisense strand to SEQ ID NO: 1301244
uccuucauaaaugagauca

SEQ ID NO: 1301246 - RNA, 19 nt, Artificial Sequence
  Description of Artificial Sequence: Synthetic oligonucleotide
  Sense strand starting at position 62 of SEQ ID NO: 1241807
ugaaucuucucuuccacga

SEQ ID NO: 1301247 - RNA, 19 nt, Artificial Sequence
  Description of Artificial Sequence: Synthetic oligonucleotide
  Antisense strand to SEQ ID NO: 1301246
ucguggaagagaagauuca

SEQ ID NO: 1301248 - RNA, 19 nt, Artificial Sequence
  Description of Artificial Sequence: Synthetic oligonucleotide
  Sense strand starting at position 207 of SEQ ID NO: 1241807
ccagaagggcucuggaaga

SEQ ID NO: 1301249 - RNA, 19 nt, Artificial Sequence
  Description of Artificial Sequence: Synthetic oligonucleotide
  Antisense strand to SEQ ID NO: 1301248
ucuuccagagcccuucugg

SEQ ID NO: 1301250 - RNA, 19 nt, Artificial Sequence
  Description of Artificial Sequence: Synthetic oligonucleotide
  Sense strand starting at position 271 of SEQ ID NO: 1241807
guaagaucagugcaugugu

SEQ ID NO: 1301251 - RNA, 19 nt, Artificial Sequence
  Description of Artificial Sequence: Synthetic oligonucleotide
  Antisense strand to SEQ ID NO: 1301250
acacaugcacugaucuuac

SEQ ID NO: 1301252 - RNA, 19 nt, Artificial Sequence
  Description of Artificial Sequence: Synthetic oligonucleotide
  Sense strand starting at position 297 of SEQ ID NO: 1241807
ggagaaagaaauugugcuu

SEQ ID NO: 1301253 - RNA, 19 nt, Artificial Sequence
  Description of Artificial Sequence: Synthetic oligonucleotide
  Antisense strand to SEQ ID NO: 1301252
aagcacaauuucuuucucc

SEQ ID NO: 1301254 - RNA, 19 nt, Artificial Sequence
  Description of Artificial Sequence: Synthetic oligonucleotide
  Sense strand starting at position 302 of SEQ ID NO: 1241807
aagaaauugugcuuuggug

SEQ ID NO: 1301255 - RNA, 19 nt, Artificial Sequence
  Description of Artificial Sequence: Synthetic oligonucleotide
  Antisense strand to SEQ ID NO: 1301254
caccaaagcacaauuucuu

SEQ ID NO: 1301256 - RNA, 19 nt, Artificial Sequence
  Description of Artificial Sequence: Synthetic oligonucleotide
  Sense strand starting at position 304 of SEQ ID NO: 1241807
gaaauugugcuuuggugga

SEQ ID NO: 1301257 - RNA, 19 nt, Artificial Sequence
  Description of Artificial Sequence: Synthetic oligonucleotide
  Antisense strand to SEQ ID NO: 1301256
uccaccaaagcacaauuuc

SEQ ID NO: 1301258 - RNA, 19 nt, Artificial Sequence
  Description of Artificial Sequence: Synthetic oligonucleotide
  Sense strand starting at position 306 of SEQ ID NO: 1241807
aauugugcuuugguggaaa

SEQ ID NO: 1301259 - RNA, 19 nt, Artificial Sequence
  Description of Artificial Sequence: Synthetic oligonucleotide
  Antisense strand to SEQ ID NO: 1301258
uuuccaccaaagcacaauu

SEQ ID NO: 1301260 - RNA, 19 nt, Artificial Sequence
  Description of Artificial Sequence: Synthetic oligonucleotide
  Sense strand starting at position 317 of SEQ ID NO: 1241807
gguggaaaccucugccuca

SEQ ID NO: 1301261 - RNA, 19 nt, Artificial Sequence
  Description of Artificial Sequence: Synthetic oligonucleotide
  Antisense strand to SEQ ID NO: 1301260
ugaggcagagguuuccacc

SEQ ID NO: 1301262 - RNA, 19 nt, Artificial Sequence
  Description of Artificial Sequence: Synthetic oligonucleotide
  Sense strand starting at position 318 of SEQ ID NO: 1241807
guggaaaccucugccucau

SEQ ID NO: 1301263 - RNA, 19 nt, Artificial Sequence
  Description of Artificial Sequence: Synthetic oligonucleotide
  Antisense strand to SEQ ID NO: 1301262
augaggcagagguuuccac

SEQ ID NO: 1301264 - RNA, 19 nt, Artificial Sequence
  Description of Artificial Sequence: Synthetic oligonucleotide
  Sense strand starting at position 371 of SEQ ID NO: 1241807
cauacagacguagaguauu

SEQ ID NO: 1301265 - RNA, 19 nt, Artificial Sequence
  Description of Artificial Sequence: Synthetic oligonucleotide
  Antisense strand to SEQ ID NO: 1301264
aauacucuacgucuguaug

SEQ ID NO: 1301266 - RNA, 19 nt, Artificial Sequence
  Description of Artificial Sequence: Synthetic oligonucleotide
  Sense strand starting at position 381 of SEQ ID NO: 1241807
uagaguauuucugugcuau

SEQ ID NO: 1301267 - RNA, 19 nt, Artificial Sequence
  Description of Artificial Sequence: Synthetic oligonucleotide
  Antisense strand to SEQ ID NO: 1301266
auagcacagaaauacucua

SEQ ID NO: 1301268 - RNA, 19 nt, Artificial Sequence
  Description of Artificial Sequence: Synthetic oligonucleotide
  Sense strand starting at position 382 of SEQ ID NO: 1241807
agaguauuucugugcuauu

SEQ ID NO: 1301269 - RNA, 19 nt, Artificial Sequence
  Description of Artificial Sequence: Synthetic oligonucleotide
  Antisense strand to SEQ ID NO: 1301268
aauagcacagaaauacucu

SEQ ID NO: 1301270 - RNA, 19 nt, Artificial Sequence
  Description of Artificial Sequence: Synthetic oligonucleotide
  Sense strand starting at position 383 of SEQ ID NO: 1241807
gaguauuucugugcuauua

SEQ ID NO: 1301271 - RNA, 19 nt, Artificial Sequence
  Description of Artificial Sequence: Synthetic oligonucleotide
  Antisense strand to SEQ ID NO: 1301270
uaauagcacagaaauacuc

SEQ ID NO: 1301272 - RNA, 19 nt, Artificial Sequence
  Description of Artificial Sequence: Synthetic oligonucleotide
  Sense strand starting at position 397 of SEQ ID NO: 1241807
uauuaagaguucguuacac

SEQ ID NO: 1301273 - RNA, 19 nt, Artificial Sequence
  Description of Artificial Sequence: Synthetic oligonucleotide
  Antisense strand to SEQ ID NO: 1301272
guguaacgaacucuuaaua

SEQ ID NO: 1301274 - RNA, 19 nt, Artificial Sequence
  Description of Artificial Sequence: Synthetic oligonucleotide
  Sense strand starting at position 399 of SEQ ID NO: 1241807
uuaagaguucguuacacca

SEQ ID NO: 1301275 - RNA, 19 nt, Artificial Sequence
  Description of Artificial Sequence: Synthetic oligonucleotide
  Antisense strand to SEQ ID NO: 1301274
ugguguaacgaacucuuaa

SEQ ID NO: 1301276 - RNA, 19 nt, Artificial Sequence
  Description of Artificial Sequence: Synthetic oligonucleotide
  Sense strand starting at position 469 of SEQ ID NO: 1241807
ggaggaugauuggcggaaa

SEQ ID NO: 1301277 - RNA, 19 nt, Artificial Sequence
  Description of Artificial Sequence: Synthetic oligonucleotide
  Antisense strand to SEQ ID NO: 1301276
uuuccgccaaucauccucc

SEQ ID NO: 1301278 - RNA, 19 nt, Artificial Sequence
  Description of Artificial Sequence: Synthetic oligonucleotide
  Sense strand starting at position 472 of SEQ ID NO: 1241807
ggaugauuggcggaaagug

SEQ ID NO: 1301279 - RNA, 19 nt, Artificial Sequence
  Description of Artificial Sequence: Synthetic oligonucleotide
  Antisense strand to SEQ ID NO: 1301278
cacuuuccgccaaucaucc

SEQ ID NO: 1301280 - RNA, 19 nt, Artificial Sequence
  Description of Artificial Sequence: Synthetic oligonucleotide
  Sense strand starting at position 542 of SEQ ID NO: 1241807
gucucaacucuccaggaca

SEQ ID NO: 1301281 - RNA, 19 nt, Artificial Sequence
  Description of Artificial Sequence: Synthetic oligonucleotide
  Antisense strand to SEQ ID NO: 1301280
uguccuggagaguugagac

SEQ ID NO: 1301282 - RNA, 19 nt, Artificial Sequence
  Description of Artificial Sequence: Synthetic oligonucleotide
  Sense strand starting at position 748 of SEQ ID NO: 1241807
uaguucuaucacugaggga

SEQ ID NO: 1301283 - RNA, 19 nt, Artificial Sequence
  Description of Artificial Sequence: Synthetic oligonucleotide
  Antisense strand to SEQ ID NO: 1301282
ucccucagugauagaacua

SEQ ID NO: 1301284 - RNA, 19 nt, Artificial Sequence
  Description of Artificial Sequence: Synthetic oligonucleotide
  Sense strand starting at position 776 of SEQ ID NO: 1241807
aucuguaacacguguuaag

SEQ ID NO: 1301285 - RNA, 19 nt, Artificial Sequence
  Description of Artificial Sequence: Synthetic oligonucleotide
  Antisense strand to SEQ ID NO: 1301284
cuuaacacguguuacagau

SEQ ID NO: 1301286 - RNA, 19 nt, Artificial Sequence
  Description of Artificial Sequence: Synthetic oligonucleotide
  Sense strand starting at position 783 of SEQ ID NO: 1241807
acacguguuaaguaugaaa

SEQ ID NO: 1301287 - RNA, 19 nt, Artificial Sequence
  Description of Artificial Sequence: Synthetic oligonucleotide
  Antisense strand to SEQ ID NO: 1301286
uuucauacuuaacacgugu

SEQ ID NO: 1301288 - RNA, 19 nt, Artificial Sequence
  Description of Artificial Sequence: Synthetic oligonucleotide
  Sense strand starting at position 1095 of SEQ ID NO: 1241807
gcaaaucugcggucuccuu

SEQ ID NO: 1301289 - RNA, 19 nt, Artificial Sequence
  Description of Artificial Sequence: Synthetic oligonucleotide
  Antisense strand to SEQ ID NO: 1301288
aaggagaccgcagauuugc

SEQ ID NO: 1301290 - RNA, 19 nt, Artificial Sequence
  Description of Artificial Sequence: Synthetic oligonucleotide
  Sense strand starting at position 2177 of SEQ ID NO: 1241807
agacuuuggauugguuagu

SEQ ID NO: 1301291 - RNA, 19 nt, Artificial Sequence
  Description of Artificial Sequence: Synthetic oligonucleotide
  Antisense strand to SEQ ID NO: 1301290
acuaaccaauccaaagucu

SEQ ID NO: 1301292 - RNA, 19 nt, Artificial Sequence
  Description of Artificial Sequence: Synthetic oligonucleotide
  Sense strand starting at position 2178 of SEQ ID NO: 1241807
gacuuuggauugguuaguu

SEQ ID NO: 1301293 - RNA, 19 nt, Artificial Sequence
  Description of Artificial Sequence: Synthetic oligonucleotide
  Antisense strand to SEQ ID NO: 1301292
aacuaaccaauccaaaguc

SEQ ID NO: 1301294 - RNA, 19 nt, Artificial Sequence
  Description of Artificial Sequence: Synthetic oligonucleotide
  Sense strand starting at position 2183 of SEQ ID NO: 1241807
uggauugguuaguuaguca

SEQ ID NO: 1301295 - RNA, 19 nt, Artificial Sequence
  Description of Artificial Sequence: Synthetic oligonucleotide
  Antisense strand to SEQ ID NO: 1301294
ugacuaacuaaccaaucca

SEQ ID NO: 1301296 - RNA, 19 nt, Artificial Sequence
  Description of Artificial Sequence: Synthetic oligonucleotide
  Sense strand starting at position 2212 of SEQ ID NO: 1241807
cgccgcuucgucucugauu

SEQ ID NO: 1301297 - RNA, 19 nt, Artificial Sequence
  Description of Artificial Sequence: Synthetic oligonucleotide
  Antisense strand to SEQ ID NO: 1301296
aaucagagacgaagcggcg

SEQ ID NO: 1301298 - RNA, 19 nt, Artificial Sequence
  Description of Artificial Sequence: Synthetic oligonucleotide
  Sense strand starting at position 2689 of SEQ ID NO: 1241807
gcuggcuucgcaucgaagu

SEQ ID NO: 1301299 - RNA, 19 nt, Artificial Sequence
  Description of Artificial Sequence: Synthetic oligonucleotide
  Antisense strand to SEQ ID NO: 1301298
acuucgaugcgaagccagc

SEQ ID NO: 1301300 - RNA, 19 nt, Artificial Sequence
  Description of Artificial Sequence: Synthetic oligonucleotide
  Sense strand starting at position 2733 of SEQ ID NO: 1241807
auacuuugauuuggaaaga

SEQ ID NO: 1301301 - RNA, 19 nt, Artificial Sequence
  Description of Artificial Sequence: Synthetic oligonucleotide
  Antisense strand to SEQ ID NO: 1301300
ucuuuccaaaucaaaguau

SEQ ID NO: 1301302 - RNA, 19 nt, Artificial Sequence
  Description of Artificial Sequence: Synthetic oligonucleotide
  Sense strand starting at position 3098 of SEQ ID NO: 1241807
uccuuauuacaaggcguga

SEQ ID NO: 1301303 - RNA, 19 nt, Artificial Sequence
  Description of Artificial Sequence: Synthetic oligonucleotide
  Antisense strand to SEQ ID NO: 1301302
ucacgccuuguaauaagga

SEQ ID NO: 1301304 - RNA, 19 nt, Artificial Sequence
  Description of Artificial Sequence: Synthetic oligonucleotide
  Sense strand starting at position 3100 of SEQ ID NO: 1241807
cuuauuacaaggcgugaau

SEQ ID NO: 1301305 - RNA, 19 nt, Artificial Sequence
  Description of Artificial Sequence: Synthetic oligonucleotide
  Antisense strand to SEQ ID NO: 1301304
auucacgccuuguaauaag

SEQ ID NO: 1301306 - RNA, 19 nt, Artificial Sequence
  Description of Artificial Sequence: Synthetic oligonucleotide
  Sense strand starting at position 3495 of SEQ ID NO: 1241807
guaugauuccacgaaucac

SEQ ID NO: 1301307 - RNA, 19 nt, Artificial Sequence
  Description of Artificial Sequence: Synthetic oligonucleotide
  Antisense strand to SEQ ID NO: 1301306
gugauucguggaaucauac

SEQ ID NO: 1301308 - RNA, 19 nt, Artificial Sequence
  Description of Artificial Sequence: Synthetic oligonucleotide
  Sense strand starting at position 3503 of SEQ ID NO: 1241807
ccacgaaucacacgguuua

SEQ ID NO: 1301309 - RNA, 19 nt, Artificial Sequence
  Description of Artificial Sequence: Synthetic oligonucleotide
  Antisense strand to SEQ ID NO: 1301308
uaaaccgugugauucgugg

SEQ ID NO: 1301310 - RNA, 19 nt, Artificial Sequence
  Description of Artificial Sequence: Synthetic oligonucleotide
  Sense strand starting at position 3504 of SEQ ID NO: 1241807
cacgaaucacacgguuuau

SEQ ID NO: 1301311 - RNA, 19 nt, Artificial Sequence
  Description of Artificial Sequence: Synthetic oligonucleotide
  Antisense strand to SEQ ID NO: 1301310
auaaaccgugugauucgug

SEQ ID NO: 1301312 - RNA, 19 nt, Artificial Sequence
  Description of Artificial Sequence: Synthetic oligonucleotide
  Sense strand starting at position 3513 of SEQ ID NO: 1241807
cacgguuuauugucaaaga

SEQ ID NO: 1301313 - RNA, 19 nt, Artificial Sequence
  Description of Artificial Sequence: Synthetic oligonucleotide
  Antisense strand to SEQ ID NO: 1301312
ucuuugacaauaaaccgug

SEQ ID NO: 1301314 - RNA, 19 nt, Artificial Sequence
  Description of Artificial Sequence: Synthetic oligonucleotide
  Sense strand starting at position 3530 of SEQ ID NO: 1241807
gaagauuuguucucggguu

SEQ ID NO: 1301315 - RNA, 19 nt, Artificial Sequence
  Description of Artificial Sequence: Synthetic oligonucleotide
  Antisense strand to SEQ ID NO: 1301314
aacccgagaacaaaucuuc

SEQ ID NO: 1301316 - RNA, 19 nt, Artificial Sequence
  Description of Artificial Sequence: Synthetic oligonucleotide
  Sense strand starting at position 3532 of SEQ ID NO: 1241807
agauuuguucucggguuca

SEQ ID NO: 1301317 - RNA, 19 nt, Artificial Sequence
  Description of Artificial Sequence: Synthetic oligonucleotide
  Antisense strand to SEQ ID NO: 1301316
ugaacccgagaacaaaucu

SEQ ID NO: 1301318 - RNA, 19 nt, Artificial Sequence
  Description of Artificial Sequence: Synthetic oligonucleotide
  Sense strand starting at position 3701 of SEQ ID NO: 1241807
gugagaucuggugagaguu

SEQ ID NO: 1301319 - RNA, 19 nt, Artificial Sequence
  Description of Artificial Sequence: Synthetic oligonucleotide
  Antisense strand to SEQ ID NO: 1301318
aacucucaccagaucucac

SEQ ID NO: 1301320 - RNA, 19 nt, Artificial Sequence
  Description of Artificial Sequence: Synthetic oligonucleotide
  Sense strand starting at position 3755 of SEQ ID NO: 1241807
gcgggagcucucugagaag

SEQ ID NO: 1301321 - RNA, 19 nt, Artificial Sequence
  Description of Artificial Sequence: Synthetic oligonucleotide
  Antisense strand to SEQ ID NO: 1301320
cuucucagagagcucccgc

SEQ ID NO: 1301322 - RNA, 19 nt, Artificial Sequence
  Description of Artificial Sequence: Synthetic oligonucleotide
  Sense strand starting at position 3804 of SEQ ID NO: 1241807
agcguauagcuugccucaa

SEQ ID NO: 1301323 - RNA, 19 nt, Artificial Sequence
  Description of Artificial Sequence: Synthetic oligonucleotide
  Antisense strand to SEQ ID NO: 1301322
uugaggcaagcuauacgcu

SEQ ID NO: 1301324 - RNA, 19 nt, Artificial Sequence
  Description of Artificial Sequence: Synthetic oligonucleotide
  Sense strand starting at position 3896 of SEQ ID NO: 1241807
agugucugacaagguuuaa

SEQ ID NO: 1301325 - RNA, 19 nt, Artificial Sequence
  Description of Artificial Sequence: Synthetic oligonucleotide
  Antisense strand to SEQ ID NO: 1301324
uuaaaccuugucagacacu

SEQ ID NO: 1301326 - RNA, 19 nt, Artificial Sequence
  Description of Artificial Sequence: Synthetic oligonucleotide
  Sense strand starting at position 186 of SEQ ID NO: 1241808
auaagccuuucuuugaagu

SEQ ID NO: 1301327 - RNA, 19 nt, Artificial Sequence
  Description of Artificial Sequence: Synthetic oligonucleotide
  Antisense strand to SEQ ID NO: 1301326
acuucaaagaaaggcuuau

SEQ ID NO: 1301328 - RNA, 19 nt, Artificial Sequence
  Description of Artificial Sequence: Synthetic oligonucleotide
  Sense strand starting at position 196 of SEQ ID NO: 1241808
cuuugaaguuaggaauuua

SEQ ID NO: 1301329 - RNA, 19 nt, Artificial Sequence
  Description of Artificial Sequence: Synthetic oligonucleotide
  Antisense strand to SEQ ID NO: 1301328
uaaauuccuaacuucaaag

SEQ ID NO: 1301330 - RNA, 19 nt, Artificial Sequence
  Description of Artificial Sequence: Synthetic oligonucleotide
  Sense strand starting at position 291 of SEQ ID NO: 1241808
gugcuaauacaauauguaa

SEQ ID NO: 1301331 - RNA, 19 nt, Artificial Sequence
  Description of Artificial Sequence: Synthetic oligonucleotide
  Antisense strand to SEQ ID NO: 1301330
uuacauauuguauuagcac

SEQ ID NO: 1301332 - RNA, 19 nt, Artificial Sequence
  Description of Artificial Sequence: Synthetic oligonucleotide
  Sense strand starting at position 302 of SEQ ID NO: 1241808
auauguaaacaguauagca

SEQ ID NO: 1301333 - RNA, 19 nt, Artificial Sequence
  Description of Artificial Sequence: Synthetic oligonucleotide
  Antisense strand to SEQ ID NO: 1301332
ugcuauacuguuuacauau

SEQ ID NO: 1301334 - RNA, 19 nt, Artificial Sequence
  Description of Artificial Sequence: Synthetic oligonucleotide
  Sense strand starting at position 529 of SEQ ID NO: 1241808
aguucugauccuuauuaca

SEQ ID NO: 1301335 - RNA, 19 nt, Artificial Sequence
  Description of Artificial Sequence: Synthetic oligonucleotide
  Antisense strand to SEQ ID NO: 1301334
uguaauaaggaucagaacu

SEQ ID NO: 1301336 - RNA, 19 nt, Artificial Sequence
  Description of Artificial Sequence: Synthetic oligonucleotide
  Sense strand starting at position 531 of SEQ ID NO: 1241808
uucugauccuuauuacagu

SEQ ID NO: 1301337 - RNA, 19 nt, Artificial Sequence
  Description of Artificial Sequence: Synthetic oligonucleotide
  Antisense strand to SEQ ID NO: 1301336
acuguaauaaggaucagaa

SEQ ID NO: 1301338 - RNA, 19 nt, Artificial Sequence
  Description of Artificial Sequence: Synthetic oligonucleotide
  Sense strand starting at position 537 of SEQ ID NO: 1241808
uccuuauuacagugggauu

SEQ ID NO: 1301339 - RNA, 19 nt, Artificial Sequence
  Description of Artificial Sequence: Synthetic oligonucleotide
  Antisense strand to SEQ ID NO: 1301338
aaucccacuguaauaagga

SEQ ID NO: 1301340 - RNA, 19 nt, Artificial Sequence
  Description of Artificial Sequence: Synthetic oligonucleotide
  Sense strand starting at position 697 of SEQ ID NO: 1241808
guacuacagcuguaugaga

SEQ ID NO: 1301341 - RNA, 19 nt, Artificial Sequence
  Description of Artificial Sequence: Synthetic oligonucleotide
  Antisense strand to SEQ ID NO: 1301340
ucucauacagcuguaguac

SEQ ID NO: 1301342 - RNA, 19 nt, Artificial Sequence
  Description of Artificial Sequence: Synthetic oligonucleotide
  Sense strand starting at position 705 of SEQ ID NO: 1241808
gcuguaugagacgucgcaa

SEQ ID NO: 1301343 - RNA, 19 nt, Artificial Sequence
  Description of Artificial Sequence: Synthetic oligonucleotide
  Antisense strand to SEQ ID NO: 1301342
uugcgacgucucauacagc

SEQ ID NO: 1301344 - RNA, 19 nt, Artificial Sequence
  Description of Artificial Sequence: Synthetic oligonucleotide
  Sense strand starting at position 998 of SEQ ID NO: 1241808
agccaauauugacuaagua

SEQ ID NO: 1301345 - RNA, 19 nt, Artificial Sequence
  Description of Artificial Sequence: Synthetic oligonucleotide
  Antisense strand to SEQ ID NO: 1301344
uacuuagucaauauuggcu

SEQ ID NO: 1301346 - RNA, 19 nt, Artificial Sequence
  Description of Artificial Sequence: Synthetic oligonucleotide
  Sense strand starting at position 999 of SEQ ID NO: 1241808
gccaauauugacuaaguaa

SEQ ID NO: 1301347 - RNA, 19 nt, Artificial Sequence
  Description of Artificial Sequence: Synthetic oligonucleotide
  Antisense strand to SEQ ID NO: 1301346
uuacuuagucaauauuggc

SEQ ID NO: 1301348 - RNA, 19 nt, Artificial Sequence
  Description of Artificial Sequence: Synthetic oligonucleotide
  Sense strand starting at position 1007 of SEQ ID NO: 1241808
ugacuaaguaauggaugua

SEQ ID NO: 1301349 - RNA, 19 nt, Artificial Sequence
  Description of Artificial Sequence: Synthetic oligonucleotide
  Antisense strand to SEQ ID NO: 1301348
uacauccauuacuuaguca

SEQ ID NO: 1301350 - RNA, 19 nt, Artificial Sequence
  Description of Artificial Sequence: Synthetic oligonucleotide
  Sense strand starting at position 1010 of SEQ ID NO: 1241808
cuaaguaauggauguauac

SEQ ID NO: 1301351 - RNA, 19 nt, Artificial Sequence
  Description of Artificial Sequence: Synthetic oligonucleotide
  Antisense strand to SEQ ID NO: 1301350
guauacauccauuacuuag

SEQ ID NO: 1301352 - RNA, 19 nt, Artificial Sequence
  Description of Artificial Sequence: Synthetic oligonucleotide
  Sense strand starting at position 1199 of SEQ ID NO: 1241808
accaccaaugccugaagua

SEQ ID NO: 1301353 - RNA, 19 nt, Artificial Sequence
  Description of Artificial Sequence: Synthetic oligonucleotide
  Antisense strand to SEQ ID NO: 1301352
uacuucaggcauugguggu

SEQ ID NO: 1301354 - RNA, 19 nt, Artificial Sequence
  Description of Artificial Sequence: Synthetic oligonucleotide
  Sense strand starting at position 1200 of SEQ ID NO: 1241808
ccaccaaugccugaaguau

SEQ ID NO: 1301355 - RNA, 19 nt, Artificial Sequence
  Description of Artificial Sequence: Synthetic oligonucleotide
  Antisense strand to SEQ ID NO: 1301354
auacuucaggcauuggugg

SEQ ID NO: 1301356 - RNA, 19 nt, Artificial Sequence
  Description of Artificial Sequence: Synthetic oligonucleotide
  Sense strand starting at position 1221 of SEQ ID NO: 1241808
cuucuacccucuuugggau

SEQ ID NO: 1301357 - RNA, 19 nt, Artificial Sequence
  Description of Artificial Sequence: Synthetic oligonucleotide
  Antisense strand to SEQ ID NO: 1301356
aucccaaagaggguagaag

SEQ ID NO: 1301358 - RNA, 19 nt, Artificial Sequence
  Description of Artificial Sequence: Synthetic oligonucleotide
  Sense strand starting at position 1222 of SEQ ID NO: 1241808
uucuacccucuuugggaua

SEQ ID NO: 1301359 - RNA, 19 nt, Artificial Sequence
  Description of Artificial Sequence: Synthetic oligonucleotide
  Antisense strand to SEQ ID NO: 1301358
uaucccaaagaggguagaa

SEQ ID NO: 1301360 - RNA, 19 nt, Artificial Sequence
  Description of Artificial Sequence: Synthetic oligonucleotide
  Sense strand starting at position 1409 of SEQ ID NO: 1241808
augaguuaugccgaacaca

SEQ ID NO: 1301361 - RNA, 19 nt, Artificial Sequence
  Description of Artificial Sequence: Synthetic oligonucleotide
  Antisense strand to SEQ ID NO: 1301360
uguguucggcauaacucau

SEQ ID NO: 1301362 - RNA, 19 nt, Artificial Sequence
  Description of Artificial Sequence: Synthetic oligonucleotide
  Sense strand starting at position 1487 of SEQ ID NO: 1241808
aacagaaggcacuguauua

SEQ ID NO: 1301363 - RNA, 19 nt, Artificial Sequence
  Description of Artificial Sequence: Synthetic oligonucleotide
  Antisense strand to SEQ ID NO: 1301362
uaauacagugccuucuguu

SEQ ID NO: 1301364 - RNA, 19 nt, Artificial Sequence
  Description of Artificial Sequence: Synthetic oligonucleotide
  Sense strand starting at position 1700 of SEQ ID NO: 1241808
guccguauucccuacugaa

SEQ ID NO: 1301365 - RNA, 19 nt, Artificial Sequence
  Description of Artificial Sequence: Synthetic oligonucleotide
  Antisense strand to SEQ ID NO: 1301364
uucaguagggaauacggac

SEQ ID NO: 1301366 - RNA, 19 nt, Artificial Sequence
  Description of Artificial Sequence: Synthetic oligonucleotide
  Sense strand starting at position 1806 of SEQ ID NO: 1241808
ucuguuaaggcagaggauu

SEQ ID NO: 1301367 - RNA, 19 nt, Artificial Sequence
  Description of Artificial Sequence: Synthetic oligonucleotide
  Antisense strand to SEQ ID NO: 1301366
aauccucugccuuaacaga

SEQ ID NO: 1301368 - RNA, 19 nt, Artificial Sequence
  Description of Artificial Sequence: Synthetic oligonucleotide
  Sense strand starting at position 1833 of SEQ ID NO: 1241808
ggagacgaaucugugucau

SEQ ID NO: 1301369 - RNA, 19 nt, Artificial Sequence
  Description of Artificial Sequence: Synthetic oligonucleotide
  Antisense strand to SEQ ID NO: 1301368
augacacagauucgucucc

SEQ ID NO: 1301370 - RNA, 19 nt, Artificial Sequence
  Description of Artificial Sequence: Synthetic oligonucleotide
  Sense strand starting at position 1835 of SEQ ID NO: 1241808
agacgaaucugugucauaa

SEQ ID NO: 1301371 - RNA, 19 nt, Artificial Sequence
  Description of Artificial Sequence: Synthetic oligonucleotide
  Antisense strand to SEQ ID NO: 1301370
uuaugacacagauucgucu

SEQ ID NO: 1301372 - RNA, 19 nt, Artificial Sequence
  Description of Artificial Sequence: Synthetic oligonucleotide
  Sense strand starting at position 1843 of SEQ ID NO: 1241808
cugugucauaaguggaaag

SEQ ID NO: 1301373 - RNA, 19 nt, Artificial Sequence
  Description of Artificial Sequence: Synthetic oligonucleotide
  Antisense strand to SEQ ID NO: 1301372
cuuuccacuuaugacacag

SEQ ID NO: 1301374 - RNA, 19 nt, Artificial Sequence
  Description of Artificial Sequence: Synthetic oligonucleotide
  Sense strand starting at position 1845 of SEQ ID NO: 1241808
gugucauaaguggaaagca

SEQ ID NO: 1301375 - RNA, 19 nt, Artificial Sequence
  Description of Artificial Sequence: Synthetic oligonucleotide
  Antisense strand to SEQ ID NO: 1301374
ugcuuuccacuuaugacac

SEQ ID NO: 1301376 - RNA, 19 nt, Artificial Sequence
  Description of Artificial Sequence: Synthetic oligonucleotide
  Sense strand starting at position 2099 of SEQ ID NO: 1241808
gugccauauuuguuugagu

SEQ ID NO: 1301377 - RNA, 19 nt, Artificial Sequence
  Description of Artificial Sequence: Synthetic oligonucleotide
  Antisense strand to SEQ ID NO: 1301376
acucaaacaaauauggcac

SEQ ID NO: 1301378 - RNA, 19 nt, Artificial Sequence
  Description of Artificial Sequence: Synthetic oligonucleotide
  Sense strand starting at position 2101 of SEQ ID NO: 1241808
gccauauuuguuugaguca

SEQ ID NO: 1301379 - RNA, 19 nt, Artificial Sequence
  Description of Artificial Sequence: Synthetic oligonucleotide
  Antisense strand to SEQ ID NO: 1301378
ugacucaaacaaauauggc

SEQ ID NO: 1301380 - RNA, 19 nt, Artificial Sequence
  Description of Artificial Sequence: Synthetic oligonucleotide
  Sense strand starting at position 2150 of SEQ ID NO: 1241808
gcuagaaagcucggaaaga

SEQ ID NO: 1301381 - RNA, 19 nt, Artificial Sequence
  Description of Artificial Sequence: Synthetic oligonucleotide
  Antisense strand to SEQ ID NO: 1301380
ucuuuccgagcuuucuagc

SEQ ID NO: 1301382 - RNA, 19 nt, Artificial Sequence
  Description of Artificial Sequence: Synthetic oligonucleotide
  Sense strand starting at position 2189 of SEQ ID NO: 1241808
cggaccaucucccucaauu

SEQ ID NO: 1301383 - RNA, 19 nt, Artificial Sequence
  Description of Artificial Sequence: Synthetic oligonucleotide
  Antisense strand to SEQ ID NO: 1301382
aauugagggagaugguccg

SEQ ID NO: 1301384 - RNA, 19 nt, Artificial Sequence
  Description of Artificial Sequence: Synthetic oligonucleotide
  Sense strand starting at position 2397 of SEQ ID NO: 1241808
uggguucuccuccauuauu

SEQ ID NO: 1301385 - RNA, 19 nt, Artificial Sequence
  Description of Artificial Sequence: Synthetic oligonucleotide
  Antisense strand to SEQ ID NO: 1301384
aauaauggaggagaaccca

SEQ ID NO: 1301386 - RNA, 19 nt, Artificial Sequence
  Description of Artificial Sequence: Synthetic oligonucleotide
  Sense strand starting at position 2445 of SEQ ID NO: 1241808
aacucugcggucugaauuu

SEQ ID NO: 1301387 - RNA, 19 nt, Artificial Sequence
  Description of Artificial Sequence: Synthetic oligonucleotide
  Antisense strand to SEQ ID NO: 1301386
aaauucagaccgcagaguu

SEQ ID NO: 1301388 - RNA, 19 nt, Artificial Sequence
  Description of Artificial Sequence: Synthetic oligonucleotide
  Sense strand starting at position 2527 of SEQ ID NO: 1241808
cggugugcuaggcuuuauu

SEQ ID NO: 1301389 - RNA, 19 nt, Artificial Sequence
  Description of Artificial Sequence: Synthetic oligonucleotide
  Antisense strand to SEQ ID NO: 1301388
aauaaagccuagcacaccg

SEQ ID NO: 1301390 - RNA, 19 nt, Artificial Sequence
  Description of Artificial Sequence: Synthetic oligonucleotide
  Sense strand starting at position 2613 of SEQ ID NO: 1241808
cucgaacuuccuggaucaa

SEQ ID NO: 1301391 - RNA, 19 nt, Artificial Sequence
  Description of Artificial Sequence: Synthetic oligonucleotide
  Antisense strand to SEQ ID NO: 1301390
uugauccaggaaguucgag

SEQ ID NO: 1301392 - RNA, 19 nt, Artificial Sequence
  Description of Artificial Sequence: Synthetic oligonucleotide
  Sense strand starting at position 2624 of SEQ ID NO: 1241808
uggaucaaguaauccuuaa

SEQ ID NO: 1301393 - RNA, 19 nt, Artificial Sequence
  Description of Artificial Sequence: Synthetic oligonucleotide
  Antisense strand to SEQ ID NO: 1301392
uuaaggauuacuugaucca

SEQ ID NO: 1301394 - RNA, 19 nt, Artificial Sequence
  Description of Artificial Sequence: Synthetic oligonucleotide
  Sense strand starting at position 2700 of SEQ ID NO: 1241808
ggcccuauucucuaaguug

SEQ ID NO: 1301395 - RNA, 19 nt, Artificial Sequence
  Description of Artificial Sequence: Synthetic oligonucleotide
  Antisense strand to SEQ ID NO: 1301394
caacuuagagaauagggcc

SEQ ID NO: 1301396 - RNA, 19 nt, Artificial Sequence
  Description of Artificial Sequence: Synthetic oligonucleotide
  Sense strand starting at position 2706 of SEQ ID NO: 1241808
auucucuaaguugaguaaa

SEQ ID NO: 1301397 - RNA, 19 nt, Artificial Sequence
  Description of Artificial Sequence: Synthetic oligonucleotide
  Antisense strand to SEQ ID NO: 1301396
uuuacucaacuuagagaau

SEQ ID NO: 1301398 - RNA, 19 nt, Artificial Sequence
  Description of Artificial Sequence: Synthetic oligonucleotide
  Sense strand starting at position 2708 of SEQ ID NO: 1241808
ucucuaaguugaguaaaug

SEQ ID NO: 1301399 - RNA, 19 nt, Artificial Sequence
  Description of Artificial Sequence: Synthetic oligonucleotide
  Antisense strand to SEQ ID NO: 1301398
cauuuacucaacuuagaga

SEQ ID NO: 1301400 - RNA, 19 nt, Artificial Sequence
  Description of Artificial Sequence: Synthetic oligonucleotide
  Sense strand starting at position 2732 of SEQ ID NO: 1241808
ccuucuucucaagggagau

SEQ ID NO: 1301401 - RNA, 19 nt, Artificial Sequence
  Description of Artificial Sequence: Synthetic oligonucleotide
  Antisense strand to SEQ ID NO: 1301400
aucucccuugagaagaagg

SEQ ID NO: 1301402 - RNA, 19 nt, Artificial Sequence
  Description of Artificial Sequence: Synthetic oligonucleotide
  Sense strand starting at position 3444 of SEQ ID NO: 1241808
uggauuguccucgauuccu

SEQ ID NO: 1301403 - RNA, 19 nt, Artificial Sequence
  Description of Artificial Sequence: Synthetic oligonucleotide
  Antisense strand to SEQ ID NO: 1301402
aggaaucgaggacaaucca

SEQ ID NO: 1301404 - RNA, 19 nt, Artificial Sequence
  Description of Artificial Sequence: Synthetic oligonucleotide
  Sense strand starting at position 3449 of SEQ ID NO: 1241808
uguccucgauuccugagaa

SEQ ID NO: 1301405 - RNA, 19 nt, Artificial Sequence
  Description of Artificial Sequence: Synthetic oligonucleotide
  Antisense strand to SEQ ID NO: 1301404
uucucaggaaucgaggaca

SEQ ID NO: 1301406 - RNA, 19 nt, Artificial Sequence
  Description of Artificial Sequence: Synthetic oligonucleotide
  Sense strand starting at position 380 of SEQ ID NO: 1241809
uuugaaaguucuggaagac

SEQ ID NO: 1301407 - RNA, 19 nt, Artificial Sequence
  Description of Artificial Sequence: Synthetic oligonucleotide
  Antisense strand to SEQ ID NO: 1301406
gucuuccagaacuuucaaa

SEQ ID NO: 1301408 - RNA, 19 nt, Artificial Sequence
  Description of Artificial Sequence: Synthetic oligonucleotide
  Sense strand starting at position 549 of SEQ ID NO: 1241809
ccagaaauagauugcuaag

SEQ ID NO: 1301409 - RNA, 19 nt, Artificial Sequence
  Description of Artificial Sequence: Synthetic oligonucleotide
  Antisense strand to SEQ ID NO: 1301408
cuuagcaaucuauuucugg

SEQ ID NO: 1301410 - RNA, 19 nt, Artificial Sequence
  Description of Artificial Sequence: Synthetic oligonucleotide
  Sense strand starting at position 551 of SEQ ID NO: 1241809
agaaauagauugcuaagua

SEQ ID NO: 1301411 - RNA, 19 nt, Artificial Sequence
  Description of Artificial Sequence: Synthetic oligonucleotide
  Antisense strand to SEQ ID NO: 1301410
uacuuagcaaucuauuucu

SEQ ID NO: 1301412 - RNA, 19 nt, Artificial Sequence
  Description of Artificial Sequence: Synthetic oligonucleotide
  Sense strand starting at position 552 of SEQ ID NO: 1241809
gaaauagauugcuaaguag

SEQ ID NO: 1301413 - RNA, 19 nt, Artificial Sequence
  Description of Artificial Sequence: Synthetic oligonucleotide
  Antisense strand to SEQ ID NO: 1301412
cuacuuagcaaucuauuuc

SEQ ID NO: 1301414 - RNA, 19 nt, Artificial Sequence
  Description of Artificial Sequence: Synthetic oligonucleotide
  Sense strand starting at position 556 of SEQ ID NO: 1241809
uagauugcuaaguagggua

SEQ ID NO: 1301415 - RNA, 19 nt, Artificial Sequence
  Description of Artificial Sequence: Synthetic oligonucleotide
  Antisense strand to SEQ ID NO: 1301414
uacccuacuuagcaaucua

SEQ ID NO: 1301416 - RNA, 19 nt, Artificial Sequence
  Description of Artificial Sequence: Synthetic oligonucleotide
  Sense strand starting at position 747 of SEQ ID NO: 1241809
ggccgagcucuuugugaca

SEQ ID NO: 1301417 - RNA, 19 nt, Artificial Sequence
  Description of Artificial Sequence: Synthetic oligonucleotide
  Antisense strand to SEQ ID NO: 1301416
ugucacaaagagcucggcc

SEQ ID NO: 1301418 - RNA, 19 nt, Artificial Sequence
  Description of Artificial Sequence: Synthetic oligonucleotide
  Sense strand starting at position 832 of SEQ ID NO: 1241809
cagagaguuugggcuccuu

SEQ ID NO: 1301419 - RNA, 19 nt, Artificial Sequence
  Description of Artificial Sequence: Synthetic oligonucleotide
  Antisense strand to SEQ ID NO: 1301418
aaggagcccaaacucucug

SEQ ID NO: 1301420 - RNA, 19 nt, Artificial Sequence
  Description of Artificial Sequence: Synthetic oligonucleotide
  Sense strand starting at position 1118 of SEQ ID NO: 1241809
ggagcucugggcgaaguuu

SEQ ID NO: 1301421 - RNA, 19 nt, Artificial Sequence
  Description of Artificial Sequence: Synthetic oligonucleotide
  Antisense strand to SEQ ID NO: 1301420
aaacuucgcccagagcucc

SEQ ID NO: 1301422 - RNA, 19 nt, Artificial Sequence
  Description of Artificial Sequence: Synthetic oligonucleotide
  Sense strand starting at position 1922 of SEQ ID NO: 1241809
gggcgauuauagagauagu

SEQ ID NO: 1301423 - RNA, 19 nt, Artificial Sequence
  Description of Artificial Sequence: Synthetic oligonucleotide
  Antisense strand to SEQ ID NO: 1301422
acuaucucuauaaucgccc

SEQ ID NO: 1301424 - RNA, 19 nt, Artificial Sequence
  Description of Artificial Sequence: Synthetic oligonucleotide
  Sense strand starting at position 2189 of SEQ ID NO: 1241809
guaguauacucagauuuag

SEQ ID NO: 1301425 - RNA, 19 nt, Artificial Sequence
  Description of Artificial Sequence: Synthetic oligonucleotide
  Antisense strand to SEQ ID NO: 1301424
cuaaaucugaguauacuac

SEQ ID NO: 1301426 - RNA, 19 nt, Artificial Sequence
  Description of Artificial Sequence: Synthetic oligonucleotide
  Sense strand starting at position 2395 of SEQ ID NO: 1241809
aucaaugcacgugggaauu

SEQ ID NO: 1301427 - RNA, 19 nt, Artificial Sequence
  Description of Artificial Sequence: Synthetic oligonucleotide
  Antisense strand to SEQ ID NO: 1301426
aauucccacgugcauugau

SEQ ID NO: 1301428 - RNA, 19 nt, Artificial Sequence
  Description of Artificial Sequence: Synthetic oligonucleotide
  Sense strand starting at position 2605 of SEQ ID NO: 1241809
ggcgcagucuccucuuauc

SEQ ID NO: 1301429 - RNA, 19 nt, Artificial Sequence
  Description of Artificial Sequence: Synthetic oligonucleotide
  Antisense strand to SEQ ID NO: 1301428
gauaagaggagacugcgcc

SEQ ID NO: 1301430 - RNA, 19 nt, Artificial Sequence
  Description of Artificial Sequence: Synthetic oligonucleotide
  Sense strand starting at position 2651 of SEQ ID NO: 1241809
ugaugaucauagccacuaa

SEQ ID NO: 1301431 - RNA, 19 nt, Artificial Sequence
  Description of Artificial Sequence: Synthetic oligonucleotide
  Antisense strand to SEQ ID NO: 1301430
uuaguggcuaugaucauca

SEQ ID NO: 1301432 - RNA, 19 nt, Artificial Sequence
  Description of Artificial Sequence: Synthetic oligonucleotide
  Sense strand starting at position 2696 of SEQ ID NO: 1241809
gggcuaagcucucuuccau

SEQ ID NO: 1301433 - RNA, 19 nt, Artificial Sequence
  Description of Artificial Sequence: Synthetic oligonucleotide
  Antisense strand to SEQ ID NO: 1301432
auggaagagagcuuagccc

SEQ ID NO: 1301434 - RNA, 19 nt, Artificial Sequence
  Description of Artificial Sequence: Synthetic oligonucleotide
  Sense strand starting at position 2702 of SEQ ID NO: 1241809
agcucucuuccaugcugaa

SEQ ID NO: 1301435 - RNA, 19 nt, Artificial Sequence
  Description of Artificial Sequence: Synthetic oligonucleotide
  Antisense strand to SEQ ID NO: 1301434
uucagcauggaagagagcu

SEQ ID NO: 1301436 - RNA, 19 nt, Artificial Sequence
  Description of Artificial Sequence: Synthetic oligonucleotide
  Sense strand starting at position 2728 of SEQ ID NO: 1241809
ccuugagacugguauuauu

SEQ ID NO: 1301437 - RNA, 19 nt, Artificial Sequence
  Description of Artificial Sequence: Synthetic oligonucleotide
  Antisense strand to SEQ ID NO: 1301436
aauaauaccagucucaagg

SEQ ID NO: 1301438 - RNA, 19 nt, Artificial Sequence
  Description of Artificial Sequence: Synthetic oligonucleotide
  Sense strand starting at position 2731 of SEQ ID NO: 1241809
ugagacugguauuauuaac

SEQ ID NO: 1301439 - RNA, 19 nt, Artificial Sequence
  Description of Artificial Sequence: Synthetic oligonucleotide
  Antisense strand to SEQ ID NO: 1301438
guuaauaauaccagucuca

SEQ ID NO: 1301440 - RNA, 19 nt, Artificial Sequence
  Description of Artificial Sequence: Synthetic oligonucleotide
  Sense strand starting at position 2801 of SEQ ID NO: 1241809
cuagguagaucugggauuu

SEQ ID NO: 1301441 - RNA, 19 nt, Artificial Sequence
  Description of Artificial Sequence: Synthetic oligonucleotide
  Antisense strand to SEQ ID NO: 1301440
aaaucccagaucuaccuag

SEQ ID NO: 1301442 - RNA, 19 nt, Artificial Sequence
  Description of Artificial Sequence: Synthetic oligonucleotide
  Sense strand starting at position 2856 of SEQ ID NO: 1241809
ucugcuuccgacuguagaa

SEQ ID NO: 1301443 - RNA, 19 nt, Artificial Sequence
  Description of Artificial Sequence: Synthetic oligonucleotide
  Antisense strand to SEQ ID NO: 1301442
uucuacagucggaagcaga

SEQ ID NO: 1301444 - RNA, 19 nt, Artificial Sequence
  Description of Artificial Sequence: Synthetic oligonucleotide
  Sense strand starting at position 2858 of SEQ ID NO: 1241809
ugcuuccgacuguagaaau

SEQ ID NO: 1301445 - RNA, 19 nt, Artificial Sequence
  Description of Artificial Sequence: Synthetic oligonucleotide
  Antisense strand to SEQ ID NO: 1301444
auuucuacagucggaagca

SEQ ID NO: 1301446 - RNA, 19 nt, Artificial Sequence
  Description of Artificial Sequence: Synthetic oligonucleotide
  Sense strand starting at position 2910 of SEQ ID NO: 1241809
guguaugggcaucagacuu

SEQ ID NO: 1301447 - RNA, 19 nt, Artificial Sequence
  Description of Artificial Sequence: Synthetic oligonucleotide
  Antisense strand to SEQ ID NO: 1301446
aagucugaugcccauacac

SEQ ID NO: 1301448 - RNA, 19 nt, Artificial Sequence
  Description of Artificial Sequence: Synthetic oligonucleotide
  Sense strand starting at position 2916 of SEQ ID NO: 1241809
gggcaucagacuuaucggu

SEQ ID NO: 1301449 - RNA, 19 nt, Artificial Sequence
  Description of Artificial Sequence: Synthetic oligonucleotide
  Antisense strand to SEQ ID NO: 1301448
accgauaagucugaugccc

SEQ ID NO: 1301450 - RNA, 19 nt, Artificial Sequence
  Description of Artificial Sequence: Synthetic oligonucleotide
  Sense strand starting at position 2918 of SEQ ID NO: 1241809
gcaucagacuuaucggugu

SEQ ID NO: 1301451 - RNA, 19 nt, Artificial Sequence
  Description of Artificial Sequence: Synthetic oligonucleotide
  Antisense strand to SEQ ID NO: 1301450
acaccgauaagucugaugc

SEQ ID NO: 1301452 - RNA, 19 nt, Artificial Sequence
  Description of Artificial Sequence: Synthetic oligonucleotide
  Sense strand starting at position 2920 of SEQ ID NO: 1241809
aucagacuuaucgguguga

SEQ ID NO: 1301453 - RNA, 19 nt, Artificial Sequence
  Description of Artificial Sequence: Synthetic oligonucleotide
  Antisense strand to SEQ ID NO: 1301452
ucacaccgauaagucugau

SEQ ID NO: 1301454 - RNA, 19 nt, Artificial Sequence
  Description of Artificial Sequence: Synthetic oligonucleotide
  Sense strand starting at position 2922 of SEQ ID NO: 1241809
cagacuuaucggugugacc

SEQ ID NO: 1301455 - RNA, 19 nt, Artificial Sequence
  Description of Artificial Sequence: Synthetic oligonucleotide
  Antisense strand to SEQ ID NO: 1301454
ggucacaccgauaagucug

SEQ ID NO: 1301456 - RNA, 19 nt, Artificial Sequence
  Description of Artificial Sequence: Synthetic oligonucleotide
  Sense strand starting at position 2924 of SEQ ID NO: 1241809
gacuuaucggugugaccuc

SEQ ID NO: 1301457 - RNA, 19 nt, Artificial Sequence
  Description of Artificial Sequence: Synthetic oligonucleotide
  Antisense strand to SEQ ID NO: 1301456
gaggucacaccgauaaguc

SEQ ID NO: 1301458 - RNA, 19 nt, Artificial Sequence
  Description of Artificial Sequence: Synthetic oligonucleotide
  Sense strand starting at position 3055 of SEQ ID NO: 1241809
acauaucuaucaggacaga

SEQ ID NO: 1301459 - RNA, 19 nt, Artificial Sequence
  Description of Artificial Sequence: Synthetic oligonucleotide
  Antisense strand to SEQ ID NO: 1301458
ucuguccugauagauaugu

SEQ ID NO: 1301460 - RNA, 19 nt, Artificial Sequence
  Description of Artificial Sequence: Synthetic oligonucleotide
  Sense strand starting at position 3499 of SEQ ID NO: 1241809
cucacuauuugaggaccau

SEQ ID NO: 1301461 - RNA, 19 nt, Artificial Sequence
  Description of Artificial Sequence: Synthetic oligonucleotide
  Antisense strand to SEQ ID NO: 1301460
augguccucaaauagugag

SEQ ID NO: 1301462 - RNA, 19 nt, Artificial Sequence
  Description of Artificial Sequence: Synthetic oligonucleotide
  Sense strand starting at position 3508 of SEQ ID NO: 1241809
ugaggaccaugagauagau

SEQ ID NO: 1301463 - RNA, 19 nt, Artificial Sequence
  Description of Artificial Sequence: Synthetic oligonucleotide
  Antisense strand to SEQ ID NO: 1301462
aucuaucucaugguccuca

SEQ ID NO: 1301464 - RNA, 19 nt, Artificial Sequence
  Description of Artificial Sequence: Synthetic oligonucleotide
  Sense strand starting at position 3536 of SEQ ID NO: 1241809
gauagauaauguccaguug

SEQ ID NO: 1301465 - RNA, 19 nt, Artificial Sequence
  Description of Artificial Sequence: Synthetic oligonucleotide
  Antisense strand to SEQ ID NO: 1301464
caacuggacauuaucuauc

SEQ ID NO: 1301466 - RNA, 19 nt, Artificial Sequence
  Description of Artificial Sequence: Synthetic oligonucleotide
  Sense strand starting at position 3548 of SEQ ID NO: 1241809
ccaguugcagguuaucauu

SEQ ID NO: 1301467 - RNA, 19 nt, Artificial Sequence
  Description of Artificial Sequence: Synthetic oligonucleotide
  Antisense strand to SEQ ID NO: 1301466
aaugauaaccugcaacugg

SEQ ID NO: 1301468 - RNA, 19 nt, Artificial Sequence
  Description of Artificial Sequence: Synthetic oligonucleotide
  Sense strand starting at position 3550 of SEQ ID NO: 1241809
aguugcagguuaucauuga

SEQ ID NO: 1301469 - RNA, 19 nt, Artificial Sequence
  Description of Artificial Sequence: Synthetic oligonucleotide
  Antisense strand to SEQ ID NO: 1301468
ucaaugauaaccugcaacu

SEQ ID NO: 1301470 - RNA, 19 nt, Artificial Sequence
  Description of Artificial Sequence: Synthetic oligonucleotide
  Sense strand starting at position 3554 of SEQ ID NO: 1241809
gcagguuaucauugaauca

SEQ ID NO: 1301471 - RNA, 19 nt, Artificial Sequence
  Description of Artificial Sequence: Synthetic oligonucleotide
  Antisense strand to SEQ ID NO: 1301470
ugauucaaugauaaccugc

SEQ ID NO: 1301472 - RNA, 19 nt, Artificial Sequence
  Description of Artificial Sequence: Synthetic oligonucleotide
  Sense strand starting at position 3786 of SEQ ID NO: 1241809
cacauaauuugaggaggaa

SEQ ID NO: 1301473 - RNA, 19 nt, Artificial Sequence
  Description of Artificial Sequence: Synthetic oligonucleotide
  Antisense strand to SEQ ID NO: 1301472
uuccuccucaaauuaugug

SEQ ID NO: 1301474 - RNA, 19 nt, Artificial Sequence
  Description of Artificial Sequence: Synthetic oligonucleotide
  Sense strand starting at position 3815 of SEQ ID NO: 1241809
ggaguaagaucauauggaa

SEQ ID NO: 1301475 - RNA, 19 nt, Artificial Sequence
  Description of Artificial Sequence: Synthetic oligonucleotide
  Antisense strand to SEQ ID NO: 1301474
uuccauaugaucuuacucc

SEQ ID NO: 1301476 - RNA, 19 nt, Artificial Sequence
  Description of Artificial Sequence: Synthetic oligonucleotide
  Sense strand starting at position 3818 of SEQ ID NO: 1241809
guaagaucauauggaaaug

SEQ ID NO: 1301477 - RNA, 19 nt, Artificial Sequence
  Description of Artificial Sequence: Synthetic oligonucleotide
  Antisense strand to SEQ ID NO: 1301476
cauuuccauaugaucuuac

SEQ ID NO: 1301478 - RNA, 19 nt, Artificial Sequence
  Description of Artificial Sequence: Synthetic oligonucleotide
  Sense strand starting at position 3846 of SEQ ID NO: 1241809
ugagguccagagugauagu

SEQ ID NO: 1301479 - RNA, 19 nt, Artificial Sequence
  Description of Artificial Sequence: Synthetic oligonucleotide
  Antisense strand to SEQ ID NO: 1301478
acuaucacucuggaccuca

SEQ ID NO: 1301480 - RNA, 19 nt, Artificial Sequence
  Description of Artificial Sequence: Synthetic oligonucleotide
  Sense strand starting at position 3911 of SEQ ID NO: 1241809
ggcagaaaugaggguaaug

SEQ ID NO: 1301481 - RNA, 19 nt, Artificial Sequence
  Description of Artificial Sequence: Synthetic oligonucleotide
  Antisense strand to SEQ ID NO: 1301480
cauuacccucauuucugcc

SEQ ID NO: 1301482 - RNA, 19 nt, Artificial Sequence
  Description of Artificial Sequence: Synthetic oligonucleotide
  Sense strand starting at position 3916 of SEQ ID NO: 1241809
aaaugaggguaaugagaaa

SEQ ID NO: 1301483 - RNA, 19 nt, Artificial Sequence
  Description of Artificial Sequence: Synthetic oligonucleotide
  Antisense strand to SEQ ID NO: 1301482
uuucucauuacccucauuu

SEQ ID NO: 1301484 - RNA, 19 nt, Artificial Sequence
  Description of Artificial Sequence: Synthetic oligonucleotide
  Sense strand starting at position 3945 of SEQ ID NO: 1241809
gugaggucgggcuagacau

SEQ ID NO: 1301485 - RNA, 19 nt, Artificial Sequence
  Description of Artificial Sequence: Synthetic oligonucleotide
  Antisense strand to SEQ ID NO: 1301484
augucuagcccgaccucac

SEQ ID NO: 1301486 - RNA, 19 nt, Artificial Sequence
  Description of Artificial Sequence: Synthetic oligonucleotide
  Sense strand starting at position 195 of SEQ ID NO: 1241810
gaaugaaacugauuggcuu

SEQ ID NO: 1301487 - RNA, 19 nt, Artificial Sequence
  Description of Artificial Sequence: Synthetic oligonucleotide
  Antisense strand to SEQ ID NO: 1301486
aagccaaucaguuucauuc

SEQ ID NO: 1301488 - RNA, 19 nt, Artificial Sequence
  Description of Artificial Sequence: Synthetic oligonucleotide
  Sense strand starting at position 212 of SEQ ID NO: 1241810
uuucucuggcuuugaacau

SEQ ID NO: 1301489 - RNA, 19 nt, Artificial Sequence
  Description of Artificial Sequence: Synthetic oligonucleotide
  Antisense strand to SEQ ID NO: 1301488
auguucaaagccagagaaa

SEQ ID NO: 1301490 - RNA, 19 nt, Artificial Sequence
  Description of Artificial Sequence: Synthetic oligonucleotide
  Sense strand starting at position 264 of SEQ ID NO: 1241810
aauccaaaugauugagguu

SEQ ID NO: 1301491 - RNA, 19 nt, Artificial Sequence
  Description of Artificial Sequence: Synthetic oligonucleotide
  Antisense strand to SEQ ID NO: 1301490
aaccucaaucauuuggauu

SEQ ID NO: 1301492 - RNA, 19 nt, Artificial Sequence
  Description of Artificial Sequence: Synthetic oligonucleotide
  Sense strand starting at position 300 of SEQ ID NO: 1241810
uuaggaagcugccuaaaua

SEQ ID NO: 1301493 - RNA, 19 nt, Artificial Sequence
  Description of Artificial Sequence: Synthetic oligonucleotide
  Antisense strand to SEQ ID NO: 1301492
uauuuaggcagcuuccuaa

SEQ ID NO: 1301494 - RNA, 19 nt, Artificial Sequence
  Description of Artificial Sequence: Synthetic oligonucleotide
  Sense strand starting at position 357 of SEQ ID NO: 1241810
ggaggaagcaguuguuucu

SEQ ID NO: 1301495 - RNA, 19 nt, Artificial Sequence
  Description of Artificial Sequence: Synthetic oligonucleotide
  Antisense strand to SEQ ID NO: 1301494
agaaacaacugcuuccucc

SEQ ID NO: 1301496 - RNA, 19 nt, Artificial Sequence
  Description of Artificial Sequence: Synthetic oligonucleotide
  Sense strand starting at position 1165 of SEQ ID NO: 1241810
gcaauagagagcuggaucu

SEQ ID NO: 1301497 - RNA, 19 nt, Artificial Sequence
  Description of Artificial Sequence: Synthetic oligonucleotide
  Antisense strand to SEQ ID NO: 1301496
agauccagcucucuauugc

SEQ ID NO: 1301498 - RNA, 19 nt, Artificial Sequence
  Description of Artificial Sequence: Synthetic oligonucleotide
  Sense strand starting at position 1299 of SEQ ID NO: 1241810
guccgaaguccugagacuu

SEQ ID NO: 1301499 - RNA, 19 nt, Artificial Sequence
  Description of Artificial Sequence: Synthetic oligonucleotide
  Antisense strand to SEQ ID NO: 1301498
aagucucaggacuucggac

SEQ ID NO: 1301500 - RNA, 19 nt, Artificial Sequence
  Description of Artificial Sequence: Synthetic oligonucleotide
  Sense strand starting at position 1661 of SEQ ID NO: 1241810
uuugcaagugugcaaagau

SEQ ID NO: 1301501 - RNA, 19 nt, Artificial Sequence
  Description of Artificial Sequence: Synthetic oligonucleotide
  Antisense strand to SEQ ID NO: 1301500
aucuuugcacacuugcaaa

SEQ ID NO: 1301502 - RNA, 19 nt, Artificial Sequence
  Description of Artificial Sequence: Synthetic oligonucleotide
  Sense strand starting at position 1686 of SEQ ID NO: 1241810
cucgcuugggcuugggaaa

SEQ ID NO: 1301503 - RNA, 19 nt, Artificial Sequence
  Description of Artificial Sequence: Synthetic oligonucleotide
  Antisense strand to SEQ ID NO: 1301502
uuucccaagcccaagcgag

SEQ ID NO: 1301504 - RNA, 19 nt, Artificial Sequence
  Description of Artificial Sequence: Synthetic oligonucleotide
  Sense strand starting at position 1749 of SEQ ID NO: 1241810
gcuugcuggccgcuagaaa

SEQ ID NO: 1301505 - RNA, 19 nt, Artificial Sequence
  Description of Artificial Sequence: Synthetic oligonucleotide
  Antisense strand to SEQ ID NO: 1301504
uuucuagcggccagcaagc

SEQ ID NO: 1301506 - RNA, 19 nt, Artificial Sequence
  Description of Artificial Sequence: Synthetic oligonucleotide
  Sense strand starting at position 1871 of SEQ ID NO: 1241810
aggcuucuuucccuagaga

SEQ ID NO: 1301507 - RNA, 19 nt, Artificial Sequence
  Description of Artificial Sequence: Synthetic oligonucleotide
  Antisense strand to SEQ ID NO: 1301506
ucucuagggaaagaagccu

SEQ ID NO: 1301508 - RNA, 19 nt, Artificial Sequence
  Description of Artificial Sequence: Synthetic oligonucleotide
  Sense strand starting at position 1872 of SEQ ID NO: 1241810
ggcuucuuucccuagagaa

SEQ ID NO: 1301509 - RNA, 19 nt, Artificial Sequence
  Description of Artificial Sequence: Synthetic oligonucleotide
  Antisense strand to SEQ ID NO: 1301508
uucucuagggaaagaagcc

SEQ ID NO: 1301510 - RNA, 19 nt, Artificial Sequence
  Description of Artificial Sequence: Synthetic oligonucleotide
  Sense strand starting at position 2016 of SEQ ID NO: 1241810
ugguaauaaucuuccuaug

SEQ ID NO: 1301511 - RNA, 19 nt, Artificial Sequence
  Description of Artificial Sequence: Synthetic oligonucleotide
  Antisense strand to SEQ ID NO: 1301510
cauaggaagauuauuacca

SEQ ID NO: 1301512 - RNA, 19 nt, Artificial Sequence
  Description of Artificial Sequence: Synthetic oligonucleotide
  Sense strand starting at position 2039 of SEQ ID NO: 1241810
gguuaagugugaguacuag

SEQ ID NO: 1301513 - RNA, 19 nt, Artificial Sequence
  Description of Artificial Sequence: Synthetic oligonucleotide
  Antisense strand to SEQ ID NO: 1301512
cuaguacucacacuuaacc

SEQ ID NO: 1301514 - RNA, 19 nt, Artificial Sequence
  Description of Artificial Sequence: Synthetic oligonucleotide
  Sense strand starting at position 2132 of SEQ ID NO: 1241810
ccagucuaauugccagaau

SEQ ID NO: 1301515 - RNA, 19 nt, Artificial Sequence
  Description of Artificial Sequence: Synthetic oligonucleotide
  Antisense strand to SEQ ID NO: 1301514
auucuggcaauuagacugg

SEQ ID NO: 1301516 - RNA, 19 nt, Artificial Sequence
  Description of Artificial Sequence: Synthetic oligonucleotide
  Sense strand starting at position 2135 of SEQ ID NO: 1241810
gucuaauugccagaauaau

SEQ ID NO: 1301517 - RNA, 19 nt, Artificial Sequence
  Description of Artificial Sequence: Synthetic oligonucleotide
  Antisense strand to SEQ ID NO: 1301516
auuauucuggcaauuagac

SEQ ID NO: 1301518 - RNA, 19 nt, Artificial Sequence
  Description of Artificial Sequence: Synthetic oligonucleotide
  Sense strand starting at position 2292 of SEQ ID NO: 1241810
auugcauucuaguuccaga

SEQ ID NO: 1301519 - RNA, 19 nt, Artificial Sequence
  Description of Artificial Sequence: Synthetic oligonucleotide
  Antisense strand to SEQ ID NO: 1301518
ucuggaacuagaaugcaau

SEQ ID NO: 1301520 - RNA, 19 nt, Artificial Sequence
  Description of Artificial Sequence: Synthetic oligonucleotide
  Sense strand starting at position 2314 of SEQ ID NO: 1241810
gcuugaugaccauggaaau

SEQ ID NO: 1301521 - RNA, 19 nt, Artificial Sequence
  Description of Artificial Sequence: Synthetic oligonucleotide
  Antisense strand to SEQ ID NO: 1301520
auuuccauggucaucaagc

SEQ ID NO: 1301522 - RNA, 19 nt, Artificial Sequence
  Description of Artificial Sequence: Synthetic oligonucleotide
  Sense strand starting at position 2405 of SEQ ID NO: 1241810
agguuuauuucucauacua

SEQ ID NO: 1301523 - RNA, 19 nt, Artificial Sequence
  Description of Artificial Sequence: Synthetic oligonucleotide
  Antisense strand to SEQ ID NO: 1301522
uaguaugagaaauaaaccu

SEQ ID NO: 1301524 - RNA, 19 nt, Artificial Sequence
  Description of Artificial Sequence: Synthetic oligonucleotide
  Sense strand starting at position 2417 of SEQ ID NO: 1241810
cauacuacguguccaaagu

SEQ ID NO: 1301525 - RNA, 19 nt, Artificial Sequence
  Description of Artificial Sequence: Synthetic oligonucleotide
  Antisense strand to SEQ ID NO: 1301524
acuuuggacacguaguaug

SEQ ID NO: 1301526 - RNA, 19 nt, Artificial Sequence
  Description of Artificial Sequence: Synthetic oligonucleotide
  Sense strand starting at position 2418 of SEQ ID NO: 1241810
auacuacguguccaaagua

SEQ ID NO: 1301527 - RNA, 19 nt, Artificial Sequence
  Description of Artificial Sequence: Synthetic oligonucleotide
  Antisense strand to SEQ ID NO: 1301526
uacuuuggacacguaguau

SEQ ID NO: 1301528 - RNA, 19 nt, Artificial Sequence
  Description of Artificial Sequence: Synthetic oligonucleotide
  Sense strand starting at position 2461 of SEQ ID NO: 1241810
gcaaauguuuccucccaag

SEQ ID NO: 1301529 - RNA, 19 nt, Artificial Sequence
  Description of Artificial Sequence: Synthetic oligonucleotide
  Antisense strand to SEQ ID NO: 1301528
cuugggaggaaacauuugc

SEQ ID NO: 1301530 - RNA, 19 nt, Artificial Sequence
  Description of Artificial Sequence: Synthetic oligonucleotide
  Sense strand starting at position 2552 of SEQ ID NO: 1241810
cgccucagaaugugaagua

SEQ ID NO: 1301531 - RNA, 19 nt, Artificial Sequence
  Description of Artificial Sequence: Synthetic oligonucleotide
  Antisense strand to SEQ ID NO: 1301530
uacuucacauucugaggcg

SEQ ID NO: 1301532 - RNA, 19 nt, Artificial Sequence
  Description of Artificial Sequence: Synthetic oligonucleotide
  Sense strand starting at position 2598 of SEQ ID NO: 1241810
aaaugcugcccugaaguga

SEQ ID NO: 1301533 - RNA, 19 nt, Artificial Sequence
  Description of Artificial Sequence: Synthetic oligonucleotide
  Antisense strand to SEQ ID NO: 1301532
ucacuucagggcagcauuu

SEQ ID NO: 1301534 - RNA, 19 nt, Artificial Sequence
  Description of Artificial Sequence: Synthetic oligonucleotide
  Sense strand starting at position 3104 of SEQ ID NO: 1241810
agcaguuaugcccauaccu

SEQ ID NO: 1301535 - RNA, 19 nt, Artificial Sequence
  Description of Artificial Sequence: Synthetic oligonucleotide
  Antisense strand to SEQ ID NO: 1301534
agguaugggcauaacugcu

SEQ ID NO: 1301536 - RNA, 19 nt, Artificial Sequence
  Description of Artificial Sequence: Synthetic oligonucleotide
  Sense strand starting at position 3263 of SEQ ID NO: 1241810
gcacuuggagguuauggua

SEQ ID NO: 1301537 - RNA, 19 nt, Artificial Sequence
  Description of Artificial Sequence: Synthetic oligonucleotide
  Antisense strand to SEQ ID NO: 1301536
uaccauaaccuccaagugc

SEQ ID NO: 1301538 - RNA, 19 nt, Artificial Sequence
  Description of Artificial Sequence: Synthetic oligonucleotide
  Sense strand starting at position 3376 of SEQ ID NO: 1241810
aaauaaauugccuguagag

SEQ ID NO: 1301539 - RNA, 19 nt, Artificial Sequence
  Description of Artificial Sequence: Synthetic oligonucleotide
  Antisense strand to SEQ ID NO: 1301538
cucuacaggcaauuuauuu

SEQ ID NO: 1301540 - RNA, 19 nt, Artificial Sequence
  Description of Artificial Sequence: Synthetic oligonucleotide
  Sense strand starting at position 3378 of SEQ ID NO: 1241810
auaaauugccuguagaggu

SEQ ID NO: 1301541 - RNA, 19 nt, Artificial Sequence
  Description of Artificial Sequence: Synthetic oligonucleotide
  Antisense strand to SEQ ID NO: 1301540
accucuacaggcaauuuau

SEQ ID NO: 1301542 - RNA, 19 nt, Artificial Sequence
  Description of Artificial Sequence: Synthetic oligonucleotide
  Sense strand starting at position 3458 of SEQ ID NO: 1241810
aucaucagucugcauuaga

SEQ ID NO: 1301543 - RNA, 19 nt, Artificial Sequence
  Description of Artificial Sequence: Synthetic oligonucleotide
  Antisense strand to SEQ ID NO: 1301542
ucuaaugcagacugaugau

SEQ ID NO: 1301544 - RNA, 19 nt, Artificial Sequence
  Description of Artificial Sequence: Synthetic oligonucleotide
  Sense strand starting at position 3461 of SEQ ID NO: 1241810
aucagucugcauuagauaa

SEQ ID NO: 1301545 - RNA, 19 nt, Artificial Sequence
  Description of Artificial Sequence: Synthetic oligonucleotide
  Antisense strand to SEQ ID NO: 1301544
uuaucuaaugcagacugau

SEQ ID NO: 1301546 - RNA, 19 nt, Artificial Sequence
  Description of Artificial Sequence: Synthetic oligonucleotide
  Sense strand starting at position 3474 of SEQ ID NO: 1241810
agauaaacauaguaggaau

SEQ ID NO: 1301547 - RNA, 19 nt, Artificial Sequence
  Description of Artificial Sequence: Synthetic oligonucleotide
  Antisense strand to SEQ ID NO: 1301546
auuccuacuauguuuaucu

SEQ ID NO: 1301548 - RNA, 19 nt, Artificial Sequence
  Description of Artificial Sequence: Synthetic oligonucleotide
  Sense strand starting at position 3530 of SEQ ID NO: 1241810
ugcaaaguccaagagucuu

SEQ ID NO: 1301549 - RNA, 19 nt, Artificial Sequence
  Description of Artificial Sequence: Synthetic oligonucleotide
  Antisense strand to SEQ ID NO: 1301548
aagacucuuggacuuugca

SEQ ID NO: 1301550 - RNA, 19 nt, Artificial Sequence
  Description of Artificial Sequence: Synthetic oligonucleotide
  Sense strand starting at position 3536 of SEQ ID NO: 1241810
guccaagagucuucgauua

SEQ ID NO: 1301551 - RNA, 19 nt, Artificial Sequence
  Description of Artificial Sequence: Synthetic oligonucleotide
  Antisense strand to SEQ ID NO: 1301550
uaaucgaagacucuuggac

SEQ ID NO: 1301552 - RNA, 19 nt, Artificial Sequence
  Description of Artificial Sequence: Synthetic oligonucleotide
  Sense strand starting at position 3609 of SEQ ID NO: 1241810
gggcauugguucucagaga

SEQ ID NO: 1301553 - RNA, 19 nt, Artificial Sequence
  Description of Artificial Sequence: Synthetic oligonucleotide
  Antisense strand to SEQ ID NO: 1301552
ucucugagaaccaaugccc

SEQ ID NO: 1301554 - RNA, 19 nt, Artificial Sequence
  Description of Artificial Sequence: Synthetic oligonucleotide
  Sense strand starting at position 3614 of SEQ ID NO: 1241810
uugguucucagagaaaggu

SEQ ID NO: 1301555 - RNA, 19 nt, Artificial Sequence
  Description of Artificial Sequence: Synthetic oligonucleotide
  Antisense strand to SEQ ID NO: 1301554
accuuucucugagaaccaa

SEQ ID NO: 1301556 - RNA, 19 nt, Artificial Sequence
  Description of Artificial Sequence: Synthetic oligonucleotide
  Sense strand starting at position 3669 of SEQ ID NO: 1241810
agacauauuuguuagucac

SEQ ID NO: 1301557 - RNA, 19 nt, Artificial Sequence
  Description of Artificial Sequence: Synthetic oligonucleotide
  Antisense strand to SEQ ID NO: 1301556
gugacuaacaaauaugucu

SEQ ID NO: 1301558 - RNA, 19 nt, Artificial Sequence
  Description of Artificial Sequence: Synthetic oligonucleotide
  Sense strand starting at position 3675 of SEQ ID NO: 1241810
auuuguuagucacaacuga

SEQ ID NO: 1301559 - RNA, 19 nt, Artificial Sequence
  Description of Artificial Sequence: Synthetic oligonucleotide
  Antisense strand to SEQ ID NO: 1301558
ucaguugugacuaacaaau

SEQ ID NO: 1301560 - RNA, 19 nt, Artificial Sequence
  Description of Artificial Sequence: Synthetic oligonucleotide
  Sense strand starting at position 3708 of SEQ ID NO: 1241810
gggaauauguaacaaugga

SEQ ID NO: 1301561 - RNA, 19 nt, Artificial Sequence
  Description of Artificial Sequence: Synthetic oligonucleotide
  Antisense strand to SEQ ID NO: 1301560
uccauuguuacauauuccc

SEQ ID NO: 1301562 - RNA, 19 nt, Artificial Sequence
  Description of Artificial Sequence: Synthetic oligonucleotide
  Sense strand starting at position 3836 of SEQ ID NO: 1241810
uccuguguuccucauuauu

SEQ ID NO: 1301563 - RNA, 19 nt, Artificial Sequence
  Description of Artificial Sequence: Synthetic oligonucleotide
  Antisense strand to SEQ ID NO: 1301562
aauaaugaggaacacagga

SEQ ID NO: 1301564 - RNA, 19 nt, Artificial Sequence
  Description of Artificial Sequence: Synthetic oligonucleotide
  Sense strand starting at position 3894 of SEQ ID NO: 1241810
ccaugacagcguucugcuu

SEQ ID NO: 1301565 - RNA, 19 nt, Artificial Sequence
  Description of Artificial Sequence: Synthetic oligonucleotide
  Antisense strand to SEQ ID NO: 1301564
aagcagaacgcugucaugg

SEQ ID NO: 1301566 - RNA, 19 nt, Artificial Sequence
  Description of Artificial Sequence: Synthetic oligonucleotide
  Sense strand starting at position 20 of SEQ ID NO: 1241811
agggauagauaucagaaac

SEQ ID NO: 1301567 - RNA, 19 nt, Artificial Sequence
  Description of Artificial Sequence: Synthetic oligonucleotide
  Antisense strand to SEQ ID NO: 1301566
guuucugauaucuaucccu

SEQ ID NO: 1301568 - RNA, 19 nt, Artificial Sequence
  Description of Artificial Sequence: Synthetic oligonucleotide
  Sense strand starting at position 54 of SEQ ID NO: 1241811
ggccaauuauccuuacaug

SEQ ID NO: 1301569 - RNA, 19 nt, Artificial Sequence
  Description of Artificial Sequence: Synthetic oligonucleotide
  Antisense strand to SEQ ID NO: 1301568
cauguaaggauaauuggcc

SEQ ID NO: 1301570 - RNA, 19 nt, Artificial Sequence
  Description of Artificial Sequence: Synthetic oligonucleotide
  Sense strand starting at position 93 of SEQ ID NO: 1241811
guggguguggaccacuaaa

SEQ ID NO: 1301571 - RNA, 19 nt, Artificial Sequence
  Description of Artificial Sequence: Synthetic oligonucleotide
  Antisense strand to SEQ ID NO: 1301570
uuuagugguccacacccac

SEQ ID NO: 1301572 - RNA, 19 nt, Artificial Sequence
  Description of Artificial Sequence: Synthetic oligonucleotide
  Sense strand starting at position 130 of SEQ ID NO: 1241811
gauggaaugguuggugaaa

SEQ ID NO: 1301573 - RNA, 19 nt, Artificial Sequence
  Description of Artificial Sequence: Synthetic oligonucleotide
  Antisense strand to SEQ ID NO: 1301572
uuucaccaaccauuccauc

SEQ ID NO: 1301574 - RNA, 19 nt, Artificial Sequence
  Description of Artificial Sequence: Synthetic oligonucleotide
  Sense strand starting at position 745 of SEQ ID NO: 1241811
uuugaaaguucuggaagac

SEQ ID NO: 1301575 - RNA, 19 nt, Artificial Sequence
  Description of Artificial Sequence: Synthetic oligonucleotide
  Antisense strand to SEQ ID NO: 1301574
gucuuccagaacuuucaaa

SEQ ID NO: 1301576 - RNA, 19 nt, Artificial Sequence
  Description of Artificial Sequence: Synthetic oligonucleotide
  Sense strand starting at position 914 of SEQ ID NO: 1241811
ccagaaauagauugcuaag

SEQ ID NO: 1301577 - RNA, 19 nt, Artificial Sequence
  Description of Artificial Sequence: Synthetic oligonucleotide
  Antisense strand to SEQ ID NO: 1301576
cuuagcaaucuauuucugg

SEQ ID NO: 1301578 - RNA, 19 nt, Artificial Sequence
  Description of Artificial Sequence: Synthetic oligonucleotide
  Sense strand starting at position 916 of SEQ ID NO: 1241811
agaaauagauugcuaagua

SEQ ID NO: 1301579 - RNA, 19 nt, Artificial Sequence
  Description of Artificial Sequence: Synthetic oligonucleotide
  Antisense strand to SEQ ID NO: 1301578
uacuuagcaaucuauuucu

SEQ ID NO: 1301580 - RNA, 19 nt, Artificial Sequence
  Description of Artificial Sequence: Synthetic oligonucleotide
  Sense strand starting at position 917 of SEQ ID NO: 1241811
gaaauagauugcuaaguag

SEQ ID NO: 1301581 - RNA, 19 nt, Artificial Sequence
  Description of Artificial Sequence: Synthetic oligonucleotide
  Antisense strand to SEQ ID NO: 1301580
cuacuuagcaaucuauuuc

SEQ ID NO: 1301582 - RNA, 19 nt, Artificial Sequence
  Description of Artificial Sequence: Synthetic oligonucleotide
  Sense strand starting at position 921 of SEQ ID NO: 1241811
uagauugcuaaguagggua

SEQ ID NO: 1301583 - RNA, 19 nt, Artificial Sequence
  Description of Artificial Sequence: Synthetic oligonucleotide
  Antisense strand to SEQ ID NO: 1301582
uacccuacuuagcaaucua

SEQ ID NO: 1301584 - RNA, 19 nt, Artificial Sequence
  Description of Artificial Sequence: Synthetic oligonucleotide
  Sense strand starting at position 1112 of SEQ ID NO: 1241811
ggccgagcucuuugugaca

SEQ ID NO: 1301585 - RNA, 19 nt, Artificial Sequence
  Description of Artificial Sequence: Synthetic oligonucleotide
  Antisense strand to SEQ ID NO: 1301584
ugucacaaagagcucggcc

SEQ ID NO: 1301586 - RNA, 19 nt, Artificial Sequence
  Description of Artificial Sequence: Synthetic oligonucleotide
  Sense strand starting at position 1129 of SEQ ID NO: 1241811
cacuuuguuugggacgcaa

SEQ ID NO: 1301587 - RNA, 19 nt, Artificial Sequence
  Description of Artificial Sequence: Synthetic oligonucleotide
  Antisense strand to SEQ ID NO: 1301586
uugcgucccaaacaaagug

SEQ ID NO: 1301588 - RNA, 19 nt, Artificial Sequence
  Description of Artificial Sequence: Synthetic oligonucleotide
  Sense strand starting at position 1197 of SEQ ID NO: 1241811
cagagaguuugggcuccuu

SEQ ID NO: 1301589 - RNA, 19 nt, Artificial Sequence
  Description of Artificial Sequence: Synthetic oligonucleotide
  Antisense strand to SEQ ID NO: 1301588
aaggagcccaaacucucug

SEQ ID NO: 1301590 - RNA, 19 nt, Artificial Sequence
  Description of Artificial Sequence: Synthetic oligonucleotide
  Sense strand starting at position 1483 of SEQ ID NO: 1241811
ggagcucugggcgaaguuu

SEQ ID NO: 1301591 - RNA, 19 nt, Artificial Sequence
  Description of Artificial Sequence: Synthetic oligonucleotide
  Antisense strand to SEQ ID NO: 1301590
aaacuucgcccagagcucc

SEQ ID NO: 1301592 - RNA, 19 nt, Artificial Sequence
  Description of Artificial Sequence: Synthetic oligonucleotide
  Sense strand starting at position 2287 of SEQ ID NO: 1241811
gggcgauuauagagauagu

SEQ ID NO: 1301593 - RNA, 19 nt, Artificial Sequence
  Description of Artificial Sequence: Synthetic oligonucleotide
  Antisense strand to SEQ ID NO: 1301592
acuaucucuauaaucgccc

SEQ ID NO: 1301594 - RNA, 19 nt, Artificial Sequence
  Description of Artificial Sequence: Synthetic oligonucleotide
  Sense strand starting at position 2554 of SEQ ID NO: 1241811
guaguauacucagauuuag

SEQ ID NO: 1301595 - RNA, 19 nt, Artificial Sequence
  Description of Artificial Sequence: Synthetic oligonucleotide
  Antisense strand to SEQ ID NO: 1301594
cuaaaucugaguauacuac

SEQ ID NO: 1301596 - RNA, 19 nt, Artificial Sequence
  Description of Artificial Sequence: Synthetic oligonucleotide
  Sense strand starting at position 2760 of SEQ ID NO: 1241811
aucaaugcacgugggaauu

SEQ ID NO: 1301597 - RNA, 19 nt, Artificial Sequence
  Description of Artificial Sequence: Synthetic oligonucleotide
  Antisense strand to SEQ ID NO: 1301596
aauucccacgugcauugau

SEQ ID NO: 1301598 - RNA, 19 nt, Artificial Sequence
  Description of Artificial Sequence: Synthetic oligonucleotide
  Sense strand starting at position 2947 of SEQ ID NO: 1241811
cguacuaacuucuagaguc

SEQ ID NO: 1301599 - RNA, 19 nt, Artificial Sequence
  Description of Artificial Sequence: Synthetic oligonucleotide
  Antisense strand to SEQ ID NO: 1301598
gacucuagaaguuaguacg

SEQ ID NO: 1301600 - RNA, 19 nt, Artificial Sequence
  Description of Artificial Sequence: Synthetic oligonucleotide
  Sense strand starting at position 2970 of SEQ ID NO: 1241811
ggcgcagucuccucuuauc

SEQ ID NO: 1301601 - RNA, 19 nt, Artificial Sequence
  Description of Artificial Sequence: Synthetic oligonucleotide
  Antisense strand to SEQ ID NO: 1301600
gauaagaggagacugcgcc

SEQ ID NO: 1301602 - RNA, 19 nt, Artificial Sequence
  Description of Artificial Sequence: Synthetic oligonucleotide
  Sense strand starting at position 3016 of SEQ ID NO: 1241811
ugaugaucauagccacuaa

SEQ ID NO: 1301603 - RNA, 19 nt, Artificial Sequence
  Description of Artificial Sequence: Synthetic oligonucleotide
  Antisense strand to SEQ ID NO: 1301602
uuaguggcuaugaucauca

SEQ ID NO: 1301604 - RNA, 19 nt, Artificial Sequence
  Description of Artificial Sequence: Synthetic oligonucleotide
  Sense strand starting at position 3061 of SEQ ID NO: 1241811
gggcuaagcucucuuccau

SEQ ID NO: 1301605 - RNA, 19 nt, Artificial Sequence
  Description of Artificial Sequence: Synthetic oligonucleotide
  Antisense strand to SEQ ID NO: 1301604
auggaagagagcuuagccc

SEQ ID NO: 1301606 - RNA, 19 nt, Artificial Sequence
  Description of Artificial Sequence: Synthetic oligonucleotide
  Sense strand starting at position 3067 of SEQ ID NO: 1241811
agcucucuuccaugcugaa

SEQ ID NO: 1301607 - RNA, 19 nt, Artificial Sequence
  Description of Artificial Sequence: Synthetic oligonucleotide
  Antisense strand to SEQ ID NO: 1301606
uucagcauggaagagagcu

SEQ ID NO: 1301608 - RNA, 19 nt, Artificial Sequence
  Description of Artificial Sequence: Synthetic oligonucleotide
  Sense strand starting at position 3093 of SEQ ID NO: 1241811
ccuugagacugguauuauu

SEQ ID NO: 1301609 - RNA, 19 nt, Artificial Sequence
  Description of Artificial Sequence: Synthetic oligonucleotide
  Antisense strand to SEQ ID NO: 1301608
aauaauaccagucucaagg

SEQ ID NO: 1301610 - RNA, 19 nt, Artificial Sequence
  Description of Artificial Sequence: Synthetic oligonucleotide
  Sense strand starting at position 3096 of SEQ ID NO: 1241811
ugagacugguauuauuaac

SEQ ID NO: 1301611 - RNA, 19 nt, Artificial Sequence
  Description of Artificial Sequence: Synthetic oligonucleotide
  Antisense strand to SEQ ID NO: 1301610
guuaauaauaccagucuca

SEQ ID NO: 1301612 - RNA, 19 nt, Artificial Sequence
  Description of Artificial Sequence: Synthetic oligonucleotide
  Sense strand starting at position 3166 of SEQ ID NO: 1241811
cuagguagaucugggauuu

SEQ ID NO: 1301613 - RNA, 19 nt, Artificial Sequence
  Description of Artificial Sequence: Synthetic oligonucleotide
  Antisense strand to SEQ ID NO: 1301612
aaaucccagaucuaccuag

SEQ ID NO: 1301614 - RNA, 19 nt, Artificial Sequence
  Description of Artificial Sequence: Synthetic oligonucleotide
  Sense strand starting at position 3221 of SEQ ID NO: 1241811
ucugcuuccgacuguagaa

SEQ ID NO: 1301615 - RNA, 19 nt, Artificial Sequence
  Description of Artificial Sequence: Synthetic oligonucleotide
  Antisense strand to SEQ ID NO: 1301614
uucuacagucggaagcaga

SEQ ID NO: 1301616 - RNA, 19 nt, Artificial Sequence
  Description of Artificial Sequence: Synthetic oligonucleotide
  Sense strand starting at position 3223 of SEQ ID NO: 1241811
ugcuuccgacuguagaaau

SEQ ID NO: 1301617 - RNA, 19 nt, Artificial Sequence
  Description of Artificial Sequence: Synthetic oligonucleotide
  Antisense strand to SEQ ID NO: 1301616
auuucuacagucggaagca

SEQ ID NO: 1301618 - RNA, 19 nt, Artificial Sequence
  Description of Artificial Sequence: Synthetic oligonucleotide
  Sense strand starting at position 3275 of SEQ ID NO: 1241811
guguaugggcaucagacuu

SEQ ID NO: 1301619 - RNA, 19 nt, Artificial Sequence
  Description of Artificial Sequence: Synthetic oligonucleotide
  Antisense strand to SEQ ID NO: 1301618
aagucugaugcccauacac

SEQ ID NO: 1301620 - RNA, 19 nt, Artificial Sequence
  Description of Artificial Sequence: Synthetic oligonucleotide
  Sense strand starting at position 3281 of SEQ ID NO: 1241811
gggcaucagacuuaucggu

SEQ ID NO: 1301621 - RNA, 19 nt, Artificial Sequence
  Description of Artificial Sequence: Synthetic oligonucleotide
  Antisense strand to SEQ ID NO: 1301620
accgauaagucugaugccc

SEQ ID NO: 1301622 - RNA, 19 nt, Artificial Sequence
  Description of Artificial Sequence: Synthetic oligonucleotide
  Sense strand starting at position 3283 of SEQ ID NO: 1241811
gcaucagacuuaucggugu

SEQ ID NO: 1301623 - RNA, 19 nt, Artificial Sequence
  Description of Artificial Sequence: Synthetic oligonucleotide
  Antisense strand to SEQ ID NO: 1301622
acaccgauaagucugaugc

SEQ ID NO: 1301624 - RNA, 19 nt, Artificial Sequence
  Description of Artificial Sequence: Synthetic oligonucleotide
  Sense strand starting at position 3285 of SEQ ID NO: 1241811
aucagacuuaucgguguga

SEQ ID NO: 1301625 - RNA, 19 nt, Artificial Sequence
  Description of Artificial Sequence: Synthetic oligonucleotide
  Antisense strand to SEQ ID NO: 1301624
ucacaccgauaagucugau

SEQ ID NO: 1301626 - RNA, 19 nt, Artificial Sequence
  Description of Artificial Sequence: Synthetic oligonucleotide
  Sense strand starting at position 3287 of SEQ ID NO: 1241811
cagacuuaucggugugacc

SEQ ID NO: 1301627 - RNA, 19 nt, Artificial Sequence
  Description of Artificial Sequence: Synthetic oligonucleotide
  Antisense strand to SEQ ID NO: 1301626
ggucacaccgauaagucug

SEQ ID NO: 1301628 - RNA, 19 nt, Artificial Sequence
  Description of Artificial Sequence: Synthetic oligonucleotide
  Sense strand starting at position 3289 of SEQ ID NO: 1241811
gacuuaucggugugaccuc

SEQ ID NO: 1301629 - RNA, 19 nt, Artificial Sequence
  Description of Artificial Sequence: Synthetic oligonucleotide
  Antisense strand to SEQ ID NO: 1301628
gaggucacaccgauaaguc

SEQ ID NO: 1301630 - RNA, 19 nt, Artificial Sequence
  Description of Artificial Sequence: Synthetic oligonucleotide
  Sense strand starting at position 3420 of SEQ ID NO: 1241811
acauaucuaucaggacaga

SEQ ID NO: 1301631 - RNA, 19 nt, Artificial Sequence
  Description of Artificial Sequence: Synthetic oligonucleotide
  Antisense strand to SEQ ID NO: 1301630
ucuguccugauagauaugu

SEQ ID NO: 1301632 - RNA, 19 nt, Artificial Sequence
  Description of Artificial Sequence: Synthetic oligonucleotide
  Sense strand starting at position 3864 of SEQ ID NO: 1241811
cucacuauuugaggaccau

SEQ ID NO: 1301633 - RNA, 19 nt, Artificial Sequence
  Description of Artificial Sequence: Synthetic oligonucleotide
  Antisense strand to SEQ ID NO: 1301632
augguccucaaauagugag

SEQ ID NO: 1301634 - RNA, 19 nt, Artificial Sequence
  Description of Artificial Sequence: Synthetic oligonucleotide
  Sense strand starting at position 3873 of SEQ ID NO: 1241811
ugaggaccaugagauagau

SEQ ID NO: 1301635 - RNA, 19 nt, Artificial Sequence
  Description of Artificial Sequence: Synthetic oligonucleotide
  Antisense strand to SEQ ID NO: 1301634
aucuaucucaugguccuca

SEQ ID NO: 1301636 - RNA, 19 nt, Artificial Sequence
  Description of Artificial Sequence: Synthetic oligonucleotide
  Sense strand starting at position 3901 of SEQ ID NO: 1241811
gauagauaauguccaguug

SEQ ID NO: 1301637 - RNA, 19 nt, Artificial Sequence
  Description of Artificial Sequence: Synthetic oligonucleotide
  Antisense strand to SEQ ID NO: 1301636
caacuggacauuaucuauc

SEQ ID NO: 1301638 - RNA, 19 nt, Artificial Sequence
  Description of Artificial Sequence: Synthetic oligonucleotide
  Sense strand starting at position 3913 of SEQ ID NO: 1241811
ccaguugcagguuaucauu

SEQ ID NO: 1301639 - RNA, 19 nt, Artificial Sequence
  Description of Artificial Sequence: Synthetic oligonucleotide
  Antisense strand to SEQ ID NO: 1301638
aaugauaaccugcaacugg

SEQ ID NO: 1301640 - RNA, 19 nt, Artificial Sequence
  Description of Artificial Sequence: Synthetic oligonucleotide
  Sense strand starting at position 3915 of SEQ ID NO: 1241811
aguugcagguuaucauuga

SEQ ID NO: 1301641 - RNA, 19 nt, Artificial Sequence
  Description of Artificial Sequence: Synthetic oligonucleotide
  Antisense strand to SEQ ID NO: 1301640
ucaaugauaaccugcaacu

SEQ ID NO: 1301642 - RNA, 19 nt, Artificial Sequence
  Description of Artificial Sequence: Synthetic oligonucleotide
  Sense strand starting at position 3916 of SEQ ID NO: 1241811
guugcagguuaucauugaa

SEQ ID NO: 1301643 - RNA, 19 nt, Artificial Sequence
  Description of Artificial Sequence: Synthetic oligonucleotide
  Antisense strand to SEQ ID NO: 1301642
uucaaugauaaccugcaac

SEQ ID NO: 1301644 - RNA, 19 nt, Artificial Sequence
  Description of Artificial Sequence: Synthetic oligonucleotide
  Sense strand starting at position 3919 of SEQ ID NO: 1241811
gcagguuaucauugaauca

SEQ ID NO: 1301645 - RNA, 19 nt, Artificial Sequence
  Description of Artificial Sequence: Synthetic oligonucleotide
  Antisense strand to SEQ ID NO: 1301644
ugauucaaugauaaccugc

SEQ ID NO: 1301646 - RNA, 19 nt, Artificial Sequence
  Description of Artificial Sequence: Synthetic oligonucleotide
  Sense strand starting at position 138 of SEQ ID NO: 1241812
cuucuaauguguuuacuau

SEQ ID NO: 1301647 - RNA, 19 nt, Artificial Sequence
  Description of Artificial Sequence: Synthetic oligonucleotide
  Antisense strand to SEQ ID NO: 1301646
auaguaaacacauuagaag

SEQ ID NO: 1301648 - RNA, 19 nt, Artificial Sequence
  Description of Artificial Sequence: Synthetic oligonucleotide
  Sense strand starting at position 139 of SEQ ID NO: 1241812
uucuaauguguuuacuaug

SEQ ID NO: 1301649 - RNA, 19 nt, Artificial Sequence
  Description of Artificial Sequence: Synthetic oligonucleotide
  Antisense strand to SEQ ID NO: 1301648
cauaguaaacacauuagaa

SEQ ID NO: 1301650 - RNA, 19 nt, Artificial Sequence
  Description of Artificial Sequence: Synthetic oligonucleotide
  Sense strand starting at position 147 of SEQ ID NO: 1241812
uguuuacuaugagcuuaaa

SEQ ID NO: 1301651 - RNA, 19 nt, Artificial Sequence
  Description of Artificial Sequence: Synthetic oligonucleotide
  Antisense strand to SEQ ID NO: 1301650
uuuaagcucauaguaaaca

SEQ ID NO: 1301652 - RNA, 19 nt, Artificial Sequence
  Description of Artificial Sequence: Synthetic oligonucleotide
  Sense strand starting at position 192 of SEQ ID NO: 1241812
gcaacugguagguacuaaa

SEQ ID NO: 1301653 - RNA, 19 nt, Artificial Sequence
  Description of Artificial Sequence: Synthetic oligonucleotide
  Antisense strand to SEQ ID NO: 1301652
uuuaguaccuaccaguugc

SEQ ID NO: 1301654 - RNA, 19 nt, Artificial Sequence
  Description of Artificial Sequence: Synthetic oligonucleotide
  Sense strand starting at position 441 of SEQ ID NO: 1241812
cugcaaauucuaggucuuu

SEQ ID NO: 1301655 - RNA, 19 nt, Artificial Sequence
  Description of Artificial Sequence: Synthetic oligonucleotide
  Antisense strand to SEQ ID NO: 1301654
aaagaccuagaauuugcag

SEQ ID NO: 1301656 - RNA, 19 nt, Artificial Sequence
  Description of Artificial Sequence: Synthetic oligonucleotide
  Sense strand starting at position 442 of SEQ ID NO: 1241812
ugcaaauucuaggucuuua

SEQ ID NO: 1301657 - RNA, 19 nt, Artificial Sequence
  Description of Artificial Sequence: Synthetic oligonucleotide
  Antisense strand to SEQ ID NO: 1301656
uaaagaccuagaauuugca

SEQ ID NO: 1301658 - RNA, 19 nt, Artificial Sequence
  Description of Artificial Sequence: Synthetic oligonucleotide
  Sense strand starting at position 481 of SEQ ID NO: 1241812
uuuaaauaauucccgugau

SEQ ID NO: 1301659 - RNA, 19 nt, Artificial Sequence
  Description of Artificial Sequence: Synthetic oligonucleotide
  Antisense strand to SEQ ID NO: 1301658
aucacgggaauuauuuaaa

SEQ ID NO: 1301660 - RNA, 19 nt, Artificial Sequence
  Description of Artificial Sequence: Synthetic oligonucleotide
  Sense strand starting at position 495 of SEQ ID NO: 1241812
gugauucucuguucccaga

SEQ ID NO: 1301661 - RNA, 19 nt, Artificial Sequence
  Description of Artificial Sequence: Synthetic oligonucleotide
  Antisense strand to SEQ ID NO: 1301660
ucugggaacagagaaucac

SEQ ID NO: 1301662 - RNA, 19 nt, Artificial Sequence
  Description of Artificial Sequence: Synthetic oligonucleotide
  Sense strand starting at position 508 of SEQ ID NO: 1241812
cccagaauguucucuguuc

SEQ ID NO: 1301663 - RNA, 19 nt, Artificial Sequence
  Description of Artificial Sequence: Synthetic oligonucleotide
  Antisense strand to SEQ ID NO: 1301662
gaacagagaacauucuggg

SEQ ID NO: 1301664 - RNA, 19 nt, Artificial Sequence
  Description of Artificial Sequence: Synthetic oligonucleotide
  Sense strand starting at position 517 of SEQ ID NO: 1241812
uucucuguucccuacugua

SEQ ID NO: 1301665 - RNA, 19 nt, Artificial Sequence
  Description of Artificial Sequence: Synthetic oligonucleotide
  Antisense strand to SEQ ID NO: 1301664
uacaguagggaacagagaa

SEQ ID NO: 1301666 - RNA, 19 nt, Artificial Sequence
  Description of Artificial Sequence: Synthetic oligonucleotide
  Sense strand starting at position 541 of SEQ ID NO: 1241812
cuguuuaggucucucagua

SEQ ID NO: 1301667 - RNA, 19 nt, Artificial Sequence
  Description of Artificial Sequence: Synthetic oligonucleotide
  Antisense strand to SEQ ID NO: 1301666
uacugagagaccuaaacag

SEQ ID NO: 1301668 - RNA, 19 nt, Artificial Sequence
  Description of Artificial Sequence: Synthetic oligonucleotide
  Sense strand starting at position 545 of SEQ ID NO: 1241812
uuaggucucucaguaacuu

SEQ ID NO: 1301669 - RNA, 19 nt, Artificial Sequence
  Description of Artificial Sequence: Synthetic oligonucleotide
  Antisense strand to SEQ ID NO: 1301668
aaguuacugagagaccuaa

SEQ ID NO: 1301670 - RNA, 19 nt, Artificial Sequence
  Description of Artificial Sequence: Synthetic oligonucleotide
  Sense strand starting at position 669 of SEQ ID NO: 1241812
agaaaugcuuaugucacuu

SEQ ID NO: 1301671 - RNA, 19 nt, Artificial Sequence
  Description of Artificial Sequence: Synthetic oligonucleotide
  Antisense strand to SEQ ID NO: 1301670
aagugacauaagcauuucu

SEQ ID NO: 1301672 - RNA, 19 nt, Artificial Sequence
  Description of Artificial Sequence: Synthetic oligonucleotide
  Sense strand starting at position 680 of SEQ ID NO: 1241812
ugucacuucuacucaaagu

SEQ ID NO: 1301673 - RNA, 19 nt, Artificial Sequence
  Description of Artificial Sequence: Synthetic oligonucleotide
  Antisense strand to SEQ ID NO: 1301672
acuuugaguagaagugaca

SEQ ID NO: 1301674 - RNA, 19 nt, Artificial Sequence
  Description of Artificial Sequence: Synthetic oligonucleotide
  Sense strand starting at position 716 of SEQ ID NO: 1241812
uugucauagcccuaaaggu

SEQ ID NO: 1301675 - RNA, 19 nt, Artificial Sequence
  Description of Artificial Sequence: Synthetic oligonucleotide
  Antisense strand to SEQ ID NO: 1301674
accuuuagggcuaugacaa

SEQ ID NO: 1301676 - RNA, 19 nt, Artificial Sequence
  Description of Artificial Sequence: Synthetic oligonucleotide
  Sense strand starting at position 926 of SEQ ID NO: 1241812
cgacuuuauuuccaaaugu

SEQ ID NO: 1301677 - RNA, 19 nt, Artificial Sequence
  Description of Artificial Sequence: Synthetic oligonucleotide
  Antisense strand to SEQ ID NO: 1301676
acauuuggaaauaaagucg

SEQ ID NO: 1301678 - RNA, 19 nt, Artificial Sequence
  Description of Artificial Sequence: Synthetic oligonucleotide
  Sense strand starting at position 956 of SEQ ID NO: 1241812
ugcaaauaugcugcguuga

SEQ ID NO: 1301679 - RNA, 19 nt, Artificial Sequence
  Description of Artificial Sequence: Synthetic oligonucleotide
  Antisense strand to SEQ ID NO: 1301678
ucaacgcagcauauuugca

SEQ ID NO: 1301680 - RNA, 19 nt, Artificial Sequence
  Description of Artificial Sequence: Synthetic oligonucleotide
  Sense strand starting at position 1119 of SEQ ID NO: 1241812
uaaauucgacacgaaaugu

SEQ ID NO: 1301681 - RNA, 19 nt, Artificial Sequence
  Description of Artificial Sequence: Synthetic oligonucleotide
  Antisense strand to SEQ ID NO: 1301680
acauuucgugucgaauuua

SEQ ID NO: 1301682 - RNA, 19 nt, Artificial Sequence
  Description of Artificial Sequence: Synthetic oligonucleotide
  Sense strand starting at position 1136 of SEQ ID NO: 1241812
guaugaaggccguaaacaa

SEQ ID NO: 1301683 - RNA, 19 nt, Artificial Sequence
  Description of Artificial Sequence: Synthetic oligonucleotide
  Antisense strand to SEQ ID NO: 1301682
uuguuuacggccuucauac

SEQ ID NO: 1301684 - RNA, 19 nt, Artificial Sequence
  Description of Artificial Sequence: Synthetic oligonucleotide
  Sense strand starting at position 1242 of SEQ ID NO: 1241812
cccagaaaguaagugguau

SEQ ID NO: 1301685 - RNA, 19 nt, Artificial Sequence
  Description of Artificial Sequence: Synthetic oligonucleotide
  Antisense strand to SEQ ID NO: 1301684
auaccacuuacuuucuggg

SEQ ID NO: 1301686 - RNA, 19 nt, Artificial Sequence
  Description of Artificial Sequence: Synthetic oligonucleotide
  Sense strand starting at position 1269 of SEQ ID NO: 1241812
aggguagcucuggacugaa

SEQ ID NO: 1301687 - RNA, 19 nt, Artificial Sequence
  Description of Artificial Sequence: Synthetic oligonucleotide
  Antisense strand to SEQ ID NO: 1301686
uucaguccagagcuacccu

SEQ ID NO: 1301688 - RNA, 19 nt, Artificial Sequence
  Description of Artificial Sequence: Synthetic oligonucleotide
  Sense strand starting at position 1272 of SEQ ID NO: 1241812
guagcucuggacugaaaca

SEQ ID NO: 1301689 - RNA, 19 nt, Artificial Sequence
  Description of Artificial Sequence: Synthetic oligonucleotide
  Antisense strand to SEQ ID NO: 1301688
uguuucaguccagagcuac

SEQ ID NO: 1301690 - RNA, 19 nt, Artificial Sequence
  Description of Artificial Sequence: Synthetic oligonucleotide
  Sense strand starting at position 1430 of SEQ ID NO: 1241812
ucaggacagucuguuccua

SEQ ID NO: 1301691 - RNA, 19 nt, Artificial Sequence
  Description of Artificial Sequence: Synthetic oligonucleotide
  Antisense strand to SEQ ID NO: 1301690
uaggaacagacuguccuga

SEQ ID NO: 1301692 - RNA, 19 nt, Artificial Sequence
  Description of Artificial Sequence: Synthetic oligonucleotide
  Sense strand starting at position 1432 of SEQ ID NO: 1241812
aggacagucuguuccuaua

SEQ ID NO: 1301693 - RNA, 19 nt, Artificial Sequence
  Description of Artificial Sequence: Synthetic oligonucleotide
  Antisense strand to SEQ ID NO: 1301692
uauaggaacagacuguccu

SEQ ID NO: 1301694 - RNA, 19 nt, Artificial Sequence
  Description of Artificial Sequence: Synthetic oligonucleotide
  Sense strand starting at position 2143 of SEQ ID NO: 1241812
uaucaaaggucuccaugga

SEQ ID NO: 1301695 - RNA, 19 nt, Artificial Sequence
  Description of Artificial Sequence: Synthetic oligonucleotide
  Antisense strand to SEQ ID NO: 1301694
uccauggagaccuuugaua

SEQ ID NO: 1301696 - RNA, 19 nt, Artificial Sequence
  Description of Artificial Sequence: Synthetic oligonucleotide
  Sense strand starting at position 2247 of SEQ ID NO: 1241812
cuggguuccguguuguaau

SEQ ID NO: 1301697 - RNA, 19 nt, Artificial Sequence
  Description of Artificial Sequence: Synthetic oligonucleotide
  Antisense strand to SEQ ID NO: 1301696
auuacaacacggaacccag

SEQ ID NO: 1301698 - RNA, 19 nt, Artificial Sequence
  Description of Artificial Sequence: Synthetic oligonucleotide
  Sense strand starting at position 2254 of SEQ ID NO: 1241812
ccguguuguaauuaggaug

SEQ ID NO: 1301699 - RNA, 19 nt, Artificial Sequence
  Description of Artificial Sequence: Synthetic oligonucleotide
  Antisense strand to SEQ ID NO: 1301698
cauccuaauuacaacacgg

SEQ ID NO: 1301700 - RNA, 19 nt, Artificial Sequence
  Description of Artificial Sequence: Synthetic oligonucleotide
  Sense strand starting at position 2259 of SEQ ID NO: 1241812
uuguaauuaggauguaaag

SEQ ID NO: 1301701 - RNA, 19 nt, Artificial Sequence
  Description of Artificial Sequence: Synthetic oligonucleotide
  Antisense strand to SEQ ID NO: 1301700
cuuuacauccuaauuacaa

SEQ ID NO: 1301702 - RNA, 19 nt, Artificial Sequence
  Description of Artificial Sequence: Synthetic oligonucleotide
  Sense strand starting at position 2349 of SEQ ID NO: 1241812
gugaguuugacugacuucu

SEQ ID NO: 1301703 - RNA, 19 nt, Artificial Sequence
  Description of Artificial Sequence: Synthetic oligonucleotide
  Antisense strand to SEQ ID NO: 1301702
agaagucagucaaacucac

SEQ ID NO: 1301704 - RNA, 19 nt, Artificial Sequence
  Description of Artificial Sequence: Synthetic oligonucleotide
  Sense strand starting at position 2351 of SEQ ID NO: 1241812
gaguuugacugacuucuug

SEQ ID NO: 1301705 - RNA, 19 nt, Artificial Sequence
  Description of Artificial Sequence: Synthetic oligonucleotide
  Antisense strand to SEQ ID NO: 1301704
caagaagucagucaaacuc

SEQ ID NO: 1301706 - RNA, 19 nt, Artificial Sequence
  Description of Artificial Sequence: Synthetic oligonucleotide
  Sense strand starting at position 2355 of SEQ ID NO: 1241812
uugacugacuucuugaaau

SEQ ID NO: 1301707 - RNA, 19 nt, Artificial Sequence
  Description of Artificial Sequence: Synthetic oligonucleotide
  Antisense strand to SEQ ID NO: 1301706
auuucaagaagucagucaa

SEQ ID NO: 1301708 - RNA, 19 nt, Artificial Sequence
  Description of Artificial Sequence: Synthetic oligonucleotide
  Sense strand starting at position 2386 of SEQ ID NO: 1241812
aauauuugcgugcggaaga

SEQ ID NO: 1301709 - RNA, 19 nt, Artificial Sequence
  Description of Artificial Sequence: Synthetic oligonucleotide
  Antisense strand to SEQ ID NO: 1301708
ucuuccgcacgcaaauauu

SEQ ID NO: 1301710 - RNA, 19 nt, Artificial Sequence
  Description of Artificial Sequence: Synthetic oligonucleotide
  Sense strand starting at position 2409 of SEQ ID NO: 1241812
gagacucaaccgugggaau

SEQ ID NO: 1301711 - RNA, 19 nt, Artificial Sequence
  Description of Artificial Sequence: Synthetic oligonucleotide
  Antisense strand to SEQ ID NO: 1301710
auucccacgguugagucuc

SEQ ID NO: 1301712 - RNA, 19 nt, Artificial Sequence
  Description of Artificial Sequence: Synthetic oligonucleotide
  Sense strand starting at position 2410 of SEQ ID NO: 1241812
agacucaaccgugggaauu

SEQ ID NO: 1301713 - RNA, 19 nt, Artificial Sequence
  Description of Artificial Sequence: Synthetic oligonucleotide
  Antisense strand to SEQ ID NO: 1301712
aauucccacgguugagucu

SEQ ID NO: 1301714 - RNA, 19 nt, Artificial Sequence
  Description of Artificial Sequence: Synthetic oligonucleotide
  Sense strand starting at position 2411 of SEQ ID NO: 1241812
gacucaaccgugggaauua

SEQ ID NO: 1301715 - RNA, 19 nt, Artificial Sequence
  Description of Artificial Sequence: Synthetic oligonucleotide
  Antisense strand to SEQ ID NO: 1301714
uaauucccacgguugaguc

SEQ ID NO: 1301716 - RNA, 19 nt, Artificial Sequence
  Description of Artificial Sequence: Synthetic oligonucleotide
  Sense strand starting at position 2884 of SEQ ID NO: 1241812
gcaauccagaguugaggau

SEQ ID NO: 1301717 - RNA, 19 nt, Artificial Sequence
  Description of Artificial Sequence: Synthetic oligonucleotide
  Antisense strand to SEQ ID NO: 1301716
auccucaacucuggauugc

SEQ ID NO: 1301718 - RNA, 19 nt, Artificial Sequence
  Description of Artificial Sequence: Synthetic oligonucleotide
  Sense strand starting at position 2900 of SEQ ID NO: 1241812
gauauuuacuuggagguaa

SEQ ID NO: 1301719 - RNA, 19 nt, Artificial Sequence
  Description of Artificial Sequence: Synthetic oligonucleotide
  Antisense strand to SEQ ID NO: 1301718
uuaccuccaaguaaauauc

SEQ ID NO: 1301720 - RNA, 19 nt, Artificial Sequence
  Description of Artificial Sequence: Synthetic oligonucleotide
  Sense strand starting at position 2918 of SEQ ID NO: 1241812
aagguccagugcucaagaa

SEQ ID NO: 1301721 - RNA, 19 nt, Artificial Sequence
  Description of Artificial Sequence: Synthetic oligonucleotide
  Antisense strand to SEQ ID NO: 1301720
uucuugagcacuggaccuu

SEQ ID NO: 1301722 - RNA, 19 nt, Artificial Sequence
  Description of Artificial Sequence: Synthetic oligonucleotide
  Sense strand starting at position 2919 of SEQ ID NO: 1241812
agguccagugcucaagaaa

SEQ ID NO: 1301723 - RNA, 19 nt, Artificial Sequence
  Description of Artificial Sequence: Synthetic oligonucleotide
  Antisense strand to SEQ ID NO: 1301722
uuucuugagcacuggaccu

SEQ ID NO: 1301724 - RNA, 19 nt, Artificial Sequence
  Description of Artificial Sequence: Synthetic oligonucleotide
  Sense strand starting at position 3061 of SEQ ID NO: 1241812
gcugauuaccaacacaguu

SEQ ID NO: 1301725 - RNA, 19 nt, Artificial Sequence
  Description of Artificial Sequence: Synthetic oligonucleotide
  Antisense strand to SEQ ID NO: 1301724
aacuguguugguaaucagc

SEQ ID NO: 1301726 - RNA, 19 nt, Artificial Sequence
  Description of Artificial Sequence: Synthetic oligonucleotide
  Sense strand starting at position 66 of SEQ ID NO: 1241813
uaacgagaguguuucccaa

SEQ ID NO: 1301727 - RNA, 19 nt, Artificial Sequence
  Description of Artificial Sequence: Synthetic oligonucleotide
  Antisense strand to SEQ ID NO: 1301726
uugggaaacacucucguua

SEQ ID NO: 1301728 - RNA, 19 nt, Artificial Sequence
  Description of Artificial Sequence: Synthetic oligonucleotide
  Sense strand starting at position 68 of SEQ ID NO: 1241813
acgagaguguuucccaaau

SEQ ID NO: 1301729 - RNA, 19 nt, Artificial Sequence
  Description of Artificial Sequence: Synthetic oligonucleotide
  Antisense strand to SEQ ID NO: 1301728
auuugggaaacacucucgu

SEQ ID NO: 1301730 - RNA, 19 nt, Artificial Sequence
  Description of Artificial Sequence: Synthetic oligonucleotide
  Sense strand starting at position 207 of SEQ ID NO: 1241813
cgcucagggcaugaaugau

SEQ ID NO: 1301731 - RNA, 19 nt, Artificial Sequence
  Description of Artificial Sequence: Synthetic oligonucleotide
  Antisense strand to SEQ ID NO: 1301730
aucauucaugcccugagcg

SEQ ID NO: 1301732 - RNA, 19 nt, Artificial Sequence
  Description of Artificial Sequence: Synthetic oligonucleotide
  Sense strand starting at position 615 of SEQ ID NO: 1241813
agagaagguucuggaagau

SEQ ID NO: 1301733 - RNA, 19 nt, Artificial Sequence
  Description of Artificial Sequence: Synthetic oligonucleotide
  Antisense strand to SEQ ID NO: 1301732
aucuuccagaaccuucucu

SEQ ID NO: 1301734 - RNA, 19 nt, Artificial Sequence
  Description of Artificial Sequence: Synthetic oligonucleotide
  Sense strand starting at position 672 of SEQ ID NO: 1241813
ugaucccuuccguguuauu

SEQ ID NO: 1301735 - RNA, 19 nt, Artificial Sequence
  Description of Artificial Sequence: Synthetic oligonucleotide
  Antisense strand to SEQ ID NO: 1301734
aauaacacggaagggauca

SEQ ID NO: 1301736 - RNA, 19 nt, Artificial Sequence
  Description of Artificial Sequence: Synthetic oligonucleotide
  Sense strand starting at position 713 of SEQ ID NO: 1241813
auggguaucuuaccacaau

SEQ ID NO: 1301737 - RNA, 19 nt, Artificial Sequence
  Description of Artificial Sequence: Synthetic oligonucleotide
  Antisense strand to SEQ ID NO: 1301736
auugugguaagauacccau

SEQ ID NO: 1301738 - RNA, 19 nt, Artificial Sequence
  Description of Artificial Sequence: Synthetic oligonucleotide
  Sense strand starting at position 1144 of SEQ ID NO: 1241813
ugcugugucccugcaucua

SEQ ID NO: 1301739 - RNA, 19 nt, Artificial Sequence
  Description of Artificial Sequence: Synthetic oligonucleotide
  Antisense strand to SEQ ID NO: 1301738
uagaugcagggacacagca

SEQ ID NO: 1301740 - RNA, 19 nt, Artificial Sequence
  Description of Artificial Sequence: Synthetic oligonucleotide
  Sense strand starting at position 1198 of SEQ ID NO: 1241813
auccauccuguguacagau

SEQ ID NO: 1301741 - RNA, 19 nt, Artificial Sequence
  Description of Artificial Sequence: Synthetic oligonucleotide
  Antisense strand to SEQ ID NO: 1301740
aucuguacacaggauggau

SEQ ID NO: 1301742 - RNA, 19 nt, Artificial Sequence
  Description of Artificial Sequence: Synthetic oligonucleotide
  Sense strand starting at position 1286 of SEQ ID NO: 1241813
ggcauuuauugagaacuuu

SEQ ID NO: 1301743 - RNA, 19 nt, Artificial Sequence
  Description of Artificial Sequence: Synthetic oligonucleotide
  Antisense strand to SEQ ID NO: 1301742
aaaguucucaauaaaugcc

SEQ ID NO: 1301744 - RNA, 19 nt, Artificial Sequence
  Description of Artificial Sequence: Synthetic oligonucleotide
  Sense strand starting at position 1341 of SEQ ID NO: 1241813
uugagcugcuucuuauuua

SEQ ID NO: 1301745 - RNA, 19 nt, Artificial Sequence
  Description of Artificial Sequence: Synthetic oligonucleotide
  Antisense strand to SEQ ID NO: 1301744
uaaauaagaagcagcucaa

SEQ ID NO: 1301746 - RNA, 19 nt, Artificial Sequence
  Description of Artificial Sequence: Synthetic oligonucleotide
  Sense strand starting at position 1353 of SEQ ID NO: 1241813
uuauuuaggucagaacuag

SEQ ID NO: 1301747 - RNA, 19 nt, Artificial Sequence
  Description of Artificial Sequence: Synthetic oligonucleotide
  Antisense strand to SEQ ID NO: 1301746
cuaguucugaccuaaauaa

SEQ ID NO: 1301748 - RNA, 19 nt, Artificial Sequence
  Description of Artificial Sequence: Synthetic oligonucleotide
  Sense strand starting at position 1373 of SEQ ID NO: 1241813
agcuguuuccacuguagaa

SEQ ID NO: 1301749 - RNA, 19 nt, Artificial Sequence
  Description of Artificial Sequence: Synthetic oligonucleotide
  Antisense strand to SEQ ID NO: 1301748
uucuacaguggaaacagcu

SEQ ID NO: 1301750 - RNA, 19 nt, Artificial Sequence
  Description of Artificial Sequence: Synthetic oligonucleotide
  Sense strand starting at position 1375 of SEQ ID NO: 1241813
cuguuuccacuguagaauu

SEQ ID NO: 1301751 - RNA, 19 nt, Artificial Sequence
  Description of Artificial Sequence: Synthetic oligonucleotide
  Antisense strand to SEQ ID NO: 1301750
aauucuacaguggaaacag

SEQ ID NO: 1301752 - RNA, 19 nt, Artificial Sequence
  Description of Artificial Sequence: Synthetic oligonucleotide
  Sense strand starting at position 1492 of SEQ ID NO: 1241813
aaacgaaccgagugagaaa

SEQ ID NO: 1301753 - RNA, 19 nt, Artificial Sequence
  Description of Artificial Sequence: Synthetic oligonucleotide
  Antisense strand to SEQ ID NO: 1301752
uuucucacucgguucguuu

SEQ ID NO: 1301754 - RNA, 19 nt, Artificial Sequence
  Description of Artificial Sequence: Synthetic oligonucleotide
  Sense strand starting at position 1563 of SEQ ID NO: 1241813
agccuaagaugucuccgaa

SEQ ID NO: 1301755 - RNA, 19 nt, Artificial Sequence
  Description of Artificial Sequence: Synthetic oligonucleotide
  Antisense strand to SEQ ID NO: 1301754
uucggagacaucuuaggcu

SEQ ID NO: 1301756 - RNA, 19 nt, Artificial Sequence
  Description of Artificial Sequence: Synthetic oligonucleotide
  Sense strand starting at position 2088 of SEQ ID NO: 1241813
gcagguagccuuggauaac

SEQ ID NO: 1301757 - RNA, 19 nt, Artificial Sequence
  Description of Artificial Sequence: Synthetic oligonucleotide
  Antisense strand to SEQ ID NO: 1301756
guuauccaaggcuaccugc

SEQ ID NO: 1301758 - RNA, 19 nt, Artificial Sequence
  Description of Artificial Sequence: Synthetic oligonucleotide
  Sense strand starting at position 2156 of SEQ ID NO: 1241813
guuacaguaucagaaagga

SEQ ID NO: 1301759 - RNA, 19 nt, Artificial Sequence
  Description of Artificial Sequence: Synthetic oligonucleotide
  Antisense strand to SEQ ID NO: 1301758
uccuuucugauacuguaac

SEQ ID NO: 1301760 - RNA, 19 nt, Artificial Sequence
  Description of Artificial Sequence: Synthetic oligonucleotide
  Sense strand starting at position 2613 of SEQ ID NO: 1241813
cguggaaacuucguguaac

SEQ ID NO: 1301761 - RNA, 19 nt, Artificial Sequence
  Description of Artificial Sequence: Synthetic oligonucleotide
  Antisense strand to SEQ ID NO: 1301760
guuacacgaaguuuccacg

SEQ ID NO: 1301762 - RNA, 19 nt, Artificial Sequence
  Description of Artificial Sequence: Synthetic oligonucleotide
  Sense strand starting at position 2616 of SEQ ID NO: 1241813
ggaaacuucguguaacaga

SEQ ID NO: 1301763 - RNA, 19 nt, Artificial Sequence
  Description of Artificial Sequence: Synthetic oligonucleotide
  Antisense strand to SEQ ID NO: 1301762
ucuguuacacgaaguuucc

SEQ ID NO: 1301764 - RNA, 19 nt, Artificial Sequence
  Description of Artificial Sequence: Synthetic oligonucleotide
  Sense strand starting at position 2634 of SEQ ID NO: 1241813
aggccuuuagcaugguuaa

SEQ ID NO: 1301765 - RNA, 19 nt, Artificial Sequence
  Description of Artificial Sequence: Synthetic oligonucleotide
  Antisense strand to SEQ ID NO: 1301764
uuaaccaugcuaaaggccu

SEQ ID NO: 1301766 - RNA, 19 nt, Artificial Sequence
  Description of Artificial Sequence: Synthetic oligonucleotide
  Sense strand starting at position 2635 of SEQ ID NO: 1241813
ggccuuuagcaugguuaaa

SEQ ID NO: 1301767 - RNA, 19 nt, Artificial Sequence
  Description of Artificial Sequence: Synthetic oligonucleotide
  Antisense strand to SEQ ID NO: 1301766
uuuaaccaugcuaaaggcc

SEQ ID NO: 1301768 - RNA, 19 nt, Artificial Sequence
  Description of Artificial Sequence: Synthetic oligonucleotide
  Sense strand starting at position 2637 of SEQ ID NO: 1241813
ccuuuagcaugguuaaauc

SEQ ID NO: 1301769 - RNA, 19 nt, Artificial Sequence
  Description of Artificial Sequence: Synthetic oligonucleotide
  Antisense strand to SEQ ID NO: 1301768
gauuuaaccaugcuaaagg

SEQ ID NO: 1301770 - RNA, 19 nt, Artificial Sequence
  Description of Artificial Sequence: Synthetic oligonucleotide
  Sense strand starting at position 2767 of SEQ ID NO: 1241813
guacacguguauuuauaca

SEQ ID NO: 1301771 - RNA, 19 nt, Artificial Sequence
  Description of Artificial Sequence: Synthetic oligonucleotide
  Antisense strand to SEQ ID NO: 1301770
uguauaaauacacguguac

SEQ ID NO: 1301772 - RNA, 19 nt, Artificial Sequence
  Description of Artificial Sequence: Synthetic oligonucleotide
  Sense strand starting at position 3001 of SEQ ID NO: 1241813
guguuucauugaguggaca

SEQ ID NO: 1301773 - RNA, 19 nt, Artificial Sequence
  Description of Artificial Sequence: Synthetic oligonucleotide
  Antisense strand to SEQ ID NO: 1301772
uguccacucaaugaaacac

SEQ ID NO: 1301774 - RNA, 19 nt, Artificial Sequence
  Description of Artificial Sequence: Synthetic oligonucleotide
  Sense strand starting at position 3096 of SEQ ID NO: 1241813
cuuguuaacugagcacaua

SEQ ID NO: 1301775 - RNA, 19 nt, Artificial Sequence
  Description of Artificial Sequence: Synthetic oligonucleotide
  Antisense strand to SEQ ID NO: 1301774
uaugugcucaguuaacaag

SEQ ID NO: 1301776 - RNA, 19 nt, Artificial Sequence
  Description of Artificial Sequence: Synthetic oligonucleotide
  Sense strand starting at position 3097 of SEQ ID NO: 1241813
uuguuaacugagcacauaa

SEQ ID NO: 1301777 - RNA, 19 nt, Artificial Sequence
  Description of Artificial Sequence: Synthetic oligonucleotide
  Antisense strand to SEQ ID NO: 1301776
uuaugugcucaguuaacaa

SEQ ID NO: 1301778 - RNA, 19 nt, Artificial Sequence
  Description of Artificial Sequence: Synthetic oligonucleotide
  Sense strand starting at position 3099 of SEQ ID NO: 1241813
guuaacugagcacauaaau

SEQ ID NO: 1301779 - RNA, 19 nt, Artificial Sequence
  Description of Artificial Sequence: Synthetic oligonucleotide
  Antisense strand to SEQ ID NO: 1301778
auuuaugugcucaguuaac

SEQ ID NO: 1301780 - RNA, 19 nt, Artificial Sequence
  Description of Artificial Sequence: Synthetic oligonucleotide
  Sense strand starting at position 3282 of SEQ ID NO: 1241813
ggccuacuguucuccuaca

SEQ ID NO: 1301781 - RNA, 19 nt, Artificial Sequence
  Description of Artificial Sequence: Synthetic oligonucleotide
  Antisense strand to SEQ ID NO: 1301780
uguaggagaacaguaggcc

SEQ ID NO: 1301782 - RNA, 19 nt, Artificial Sequence
  Description of Artificial Sequence: Synthetic oligonucleotide
  Sense strand starting at position 3492 of SEQ ID NO: 1241813
gcgccuuguccgguuacuu

SEQ ID NO: 1301783 - RNA, 19 nt, Artificial Sequence
  Description of Artificial Sequence: Synthetic oligonucleotide
  Antisense strand to SEQ ID NO: 1301782
aaguaaccggacaaggcgc

SEQ ID NO: 1301784 - RNA, 19 nt, Artificial Sequence
  Description of Artificial Sequence: Synthetic oligonucleotide
  Sense strand starting at position 3493 of SEQ ID NO: 1241813
cgccuuguccgguuacuuu

SEQ ID NO: 1301785 - RNA, 19 nt, Artificial Sequence
  Description of Artificial Sequence: Synthetic oligonucleotide
  Antisense strand to SEQ ID NO: 1301784
aaaguaaccggacaaggcg

SEQ ID NO: 1301786 - RNA, 19 nt, Artificial Sequence
  Description of Artificial Sequence: Synthetic oligonucleotide
  Sense strand starting at position 3719 of SEQ ID NO: 1241813
ccacuaaacugcuuggacu

SEQ ID NO: 1301787 - RNA, 19 nt, Artificial Sequence
  Description of Artificial Sequence: Synthetic oligonucleotide
  Antisense strand to SEQ ID NO: 1301786
aguccaagcaguuuagugg

SEQ ID NO: 1301788 - RNA, 19 nt, Artificial Sequence
  Description of Artificial Sequence: Synthetic oligonucleotide
  Sense strand starting at position 3725 of SEQ ID NO: 1241813
aacugcuuggacugaggua

SEQ ID NO: 1301789 - RNA, 19 nt, Artificial Sequence
  Description of Artificial Sequence: Synthetic oligonucleotide
  Antisense strand to SEQ ID NO: 1301788
uaccucaguccaagcaguu

SEQ ID NO: 1301790 - RNA, 19 nt, Artificial Sequence
  Description of Artificial Sequence: Synthetic oligonucleotide
  Sense strand starting at position 3726 of SEQ ID NO: 1241813
acugcuuggacugagguau

SEQ ID NO: 1301791 - RNA, 19 nt, Artificial Sequence
  Description of Artificial Sequence: Synthetic oligonucleotide
  Antisense strand to SEQ ID NO: 1301790
auaccucaguccaagcagu

SEQ ID NO: 1301792 - RNA, 19 nt, Artificial Sequence
  Description of Artificial Sequence: Synthetic oligonucleotide
  Sense strand starting at position 3737 of SEQ ID NO: 1241813
ugagguaucgucaggguuc

SEQ ID NO: 1301793 - RNA, 19 nt, Artificial Sequence
  Description of Artificial Sequence: Synthetic oligonucleotide
  Antisense strand to SEQ ID NO: 1301792
gaacccugacgauaccuca

SEQ ID NO: 1301794 - RNA, 19 nt, Artificial Sequence
  Description of Artificial Sequence: Synthetic oligonucleotide
  Sense strand starting at position 3739 of SEQ ID NO: 1241813
agguaucgucaggguucua

SEQ ID NO: 1301795 - RNA, 19 nt, Artificial Sequence
  Description of Artificial Sequence: Synthetic oligonucleotide
  Antisense strand to SEQ ID NO: 1301794
uagaacccugacgauaccu

SEQ ID NO: 1301796 - RNA, 19 nt, Artificial Sequence
  Description of Artificial Sequence: Synthetic oligonucleotide
  Sense strand starting at position 3778 of SEQ ID NO: 1241813
gagucuagcugauucgaaa

SEQ ID NO: 1301797 - RNA, 19 nt, Artificial Sequence
  Description of Artificial Sequence: Synthetic oligonucleotide
  Antisense strand to SEQ ID NO: 1301796
uuucgaaucagcuagacuc

SEQ ID NO: 1301798 - RNA, 19 nt, Artificial Sequence
  Description of Artificial Sequence: Synthetic oligonucleotide
  Sense strand starting at position 3915 of SEQ ID NO: 1241813
cccaaucagcugugaguca

SEQ ID NO: 1301799 - RNA, 19 nt, Artificial Sequence
  Description of Artificial Sequence: Synthetic oligonucleotide
  Antisense strand to SEQ ID NO: 1301798
ugacucacagcugauuggg

SEQ ID NO: 1301800 - RNA, 19 nt, Artificial Sequence
  Description of Artificial Sequence: Synthetic oligonucleotide
  Sense strand starting at position 3920 of SEQ ID NO: 1241813
ucagcugugagucaaagaa

SEQ ID NO: 1301801 - RNA, 19 nt, Artificial Sequence
  Description of Artificial Sequence: Synthetic oligonucleotide
  Antisense strand to SEQ ID NO: 1301800
uucuuugacucacagcuga

SEQ ID NO: 1301802 - RNA, 19 nt, Artificial Sequence
  Description of Artificial Sequence: Synthetic oligonucleotide
  Sense strand starting at position 3955 of SEQ ID NO: 1241813
gauggagcucuccgcauaa

SEQ ID NO: 1301803 - RNA, 19 nt, Artificial Sequence
  Description of Artificial Sequence: Synthetic oligonucleotide
  Antisense strand to SEQ ID NO: 1301802
uuaugcggagagcuccauc

SEQ ID NO: 1301804 - RNA, 19 nt, Artificial Sequence
  Description of Artificial Sequence: Synthetic oligonucleotide
  Sense strand starting at position 3957 of SEQ ID NO: 1241813
uggagcucuccgcauaaca

SEQ ID NO: 1301805 - RNA, 19 nt, Artificial Sequence
  Description of Artificial Sequence: Synthetic oligonucleotide
  Antisense strand to SEQ ID NO: 1301804
uguuaugcggagagcucca

SEQ ID NO: 1301806 - RNA, 19 nt, Artificial Sequence
  Description of Artificial Sequence: Synthetic oligonucleotide
  Sense strand starting at position 66 of SEQ ID NO: 1241814
agcagaggcuuugcagaua

SEQ ID NO: 1301807 - RNA, 19 nt, Artificial Sequence
  Description of Artificial Sequence: Synthetic oligonucleotide
  Antisense strand to SEQ ID NO: 1301806
uaucugcaaagccucugcu

SEQ ID NO: 1301808 - RNA, 19 nt, Artificial Sequence
  Description of Artificial Sequence: Synthetic oligonucleotide
  Sense strand starting at position 178 of SEQ ID NO: 1241814
guggcaucuggacagaauc

SEQ ID NO: 1301809 - RNA, 19 nt, Artificial Sequence
  Description of Artificial Sequence: Synthetic oligonucleotide
  Antisense strand to SEQ ID NO: 1301808
gauucuguccagaugccac

SEQ ID NO: 1301810 - RNA, 19 nt, Artificial Sequence
  Description of Artificial Sequence: Synthetic oligonucleotide
  Sense strand starting at position 189 of SEQ ID NO: 1241814
acagaaucacacuggucuu

SEQ ID NO: 1301811 - RNA, 19 nt, Artificial Sequence
  Description of Artificial Sequence: Synthetic oligonucleotide
  Antisense strand to SEQ ID NO: 1301810
aagaccagugugauucugu

SEQ ID NO: 1301812 - RNA, 19 nt, Artificial Sequence
  Description of Artificial Sequence: Synthetic oligonucleotide
  Sense strand starting at position 228 of SEQ ID NO: 1241814
cucuccagucuugaugauu

SEQ ID NO: 1301813 - RNA, 19 nt, Artificial Sequence
  Description of Artificial Sequence: Synthetic oligonucleotide
  Antisense strand to SEQ ID NO: 1301812
aaucaucaagacuggagag

SEQ ID NO: 1301814 - RNA, 19 nt, Artificial Sequence
  Description of Artificial Sequence: Synthetic oligonucleotide
  Sense strand starting at position 231 of SEQ ID NO: 1241814
uccagucuugaugauuaac

SEQ ID NO: 1301815 - RNA, 19 nt, Artificial Sequence
  Description of Artificial Sequence: Synthetic oligonucleotide
  Antisense strand to SEQ ID NO: 1301814
guuaaucaucaagacugga

SEQ ID NO: 1301816 - RNA, 19 nt, Artificial Sequence
  Description of Artificial Sequence: Synthetic oligonucleotide
  Sense strand starting at position 294 of SEQ ID NO: 1241814
gagugaagguuccugauuc

SEQ ID NO: 1301817 - RNA, 19 nt, Artificial Sequence
  Description of Artificial Sequence: Synthetic oligonucleotide
  Antisense strand to SEQ ID NO: 1301816
gaaucaggaaccuucacuc

SEQ ID NO: 1301818 - RNA, 19 nt, Artificial Sequence
  Description of Artificial Sequence: Synthetic oligonucleotide
  Sense strand starting at position 298 of SEQ ID NO: 1241814
gaagguuccugauucuauu

SEQ ID NO: 1301819 - RNA, 19 nt, Artificial Sequence
  Description of Artificial Sequence: Synthetic oligonucleotide
  Antisense strand to SEQ ID NO: 1301818
aauagaaucaggaaccuuc

SEQ ID NO: 1301820 - RNA, 19 nt, Artificial Sequence
  Description of Artificial Sequence: Synthetic oligonucleotide
  Sense strand starting at position 476 of SEQ ID NO: 1241814
ggcgaccgucuucuaguua

SEQ ID NO: 1301821 - RNA, 19 nt, Artificial Sequence
  Description of Artificial Sequence: Synthetic oligonucleotide
  Antisense strand to SEQ ID NO: 1301820
uaacuagaagacggucgcc

SEQ ID NO: 1301822 - RNA, 19 nt, Artificial Sequence
  Description of Artificial Sequence: Synthetic oligonucleotide
  Sense strand starting at position 515 of SEQ ID NO: 1241814
agguguguggcccaggaaa

SEQ ID NO: 1301823 - RNA, 19 nt, Artificial Sequence
  Description of Artificial Sequence: Synthetic oligonucleotide
  Antisense strand to SEQ ID NO: 1301822
uuuccugggccacacaccu

SEQ ID NO: 1301824 - RNA, 19 nt, Artificial Sequence
  Description of Artificial Sequence: Synthetic oligonucleotide
  Sense strand starting at position 517 of SEQ ID NO: 1241814
guguguggcccaggaaaua

SEQ ID NO: 1301825 - RNA, 19 nt, Artificial Sequence
  Description of Artificial Sequence: Synthetic oligonucleotide
  Antisense strand to SEQ ID NO: 1301824
uauuuccugggccacacac

SEQ ID NO: 1301826 - RNA, 19 nt, Artificial Sequence
  Description of Artificial Sequence: Synthetic oligonucleotide
  Sense strand starting at position 614 of SEQ ID NO: 1241814
ggguacugcgguuacaaau

SEQ ID NO: 1301827 - RNA, 19 nt, Artificial Sequence
  Description of Artificial Sequence: Synthetic oligonucleotide
  Antisense strand to SEQ ID NO: 1301826
auuuguaaccgcaguaccc

SEQ ID NO: 1301828 - RNA, 19 nt, Artificial Sequence
  Description of Artificial Sequence: Synthetic oligonucleotide
  Sense strand starting at position 623 of SEQ ID NO: 1241814
gguuacaaaucagucacua

SEQ ID NO: 1301829 - RNA, 19 nt, Artificial Sequence
  Description of Artificial Sequence: Synthetic oligonucleotide
  Antisense strand to SEQ ID NO: 1301828
uagugacugauuuguaacc

SEQ ID NO: 1301830 - RNA, 19 nt, Artificial Sequence
  Description of Artificial Sequence: Synthetic oligonucleotide
  Sense strand starting at position 652 of SEQ ID NO: 1241814
uguuaaguccugcagcgaa

SEQ ID NO: 1301831 - RNA, 19 nt, Artificial Sequence
  Description of Artificial Sequence: Synthetic oligonucleotide
  Antisense strand to SEQ ID NO: 1301830
uucgcugcaggacuuaaca

SEQ ID NO: 1301832 - RNA, 19 nt, Artificial Sequence
  Description of Artificial Sequence: Synthetic oligonucleotide
  Sense strand starting at position 673 of SEQ ID NO: 1241814
aguguauugugcuugacuu

SEQ ID NO: 1301833 - RNA, 19 nt, Artificial Sequence
  Description of Artificial Sequence: Synthetic oligonucleotide
  Antisense strand to SEQ ID NO: 1301832
aagucaagcacaauacacu

SEQ ID NO: 1301834 - RNA, 19 nt, Artificial Sequence
  Description of Artificial Sequence: Synthetic oligonucleotide
  Sense strand starting at position 901 of SEQ ID NO: 1241814
gucucuaagugcuccacaa

SEQ ID NO: 1301835 - RNA, 19 nt, Artificial Sequence
  Description of Artificial Sequence: Synthetic oligonucleotide
  Antisense strand to SEQ ID NO: 1301834
uuguggagcacuuagagac

SEQ ID NO: 1301836 - RNA, 19 nt, Artificial Sequence
  Description of Artificial Sequence: Synthetic oligonucleotide
  Sense strand starting at position 903 of SEQ ID NO: 1241814
cucuaagugcuccacaaag

SEQ ID NO: 1301837 - RNA, 19 nt, Artificial Sequence
  Description of Artificial Sequence: Synthetic oligonucleotide
  Antisense strand to SEQ ID NO: 1301836
cuuuguggagcacuuagag

SEQ ID NO: 1301838 - RNA, 19 nt, Artificial Sequence
  Description of Artificial Sequence: Synthetic oligonucleotide
  Sense strand starting at position 921 of SEQ ID NO: 1241814
ggcugaaccagcggugaaa

SEQ ID NO: 1301839 - RNA, 19 nt, Artificial Sequence
  Description of Artificial Sequence: Synthetic oligonucleotide
  Antisense strand to SEQ ID NO: 1301838
uuucaccgcugguucagcc

SEQ ID NO: 1301840 - RNA, 19 nt, Artificial Sequence
  Description of Artificial Sequence: Synthetic oligonucleotide
  Sense strand starting at position 932 of SEQ ID NO: 1241814
cggugaaaggccuguaaga

SEQ ID NO: 1301841 - RNA, 19 nt, Artificial Sequence
  Description of Artificial Sequence: Synthetic oligonucleotide
  Antisense strand to SEQ ID NO: 1301840
ucuuacaggccuuucaccg

SEQ ID NO: 1301842 - RNA, 19 nt, Artificial Sequence
  Description of Artificial Sequence: Synthetic oligonucleotide
  Sense strand starting at position 1137 of SEQ ID NO: 1241814
gagucuuaacccgggcgga

SEQ ID NO: 1301843 - RNA, 19 nt, Artificial Sequence
  Description of Artificial Sequence: Synthetic oligonucleotide
  Antisense strand to SEQ ID NO: 1301842
uccgcccggguuaagacuc

SEQ ID NO: 1301844 - RNA, 19 nt, Artificial Sequence
  Description of Artificial Sequence: Synthetic oligonucleotide
  Sense strand starting at position 1138 of SEQ ID NO: 1241814
agucuuaacccgggcggau

SEQ ID NO: 1301845 - RNA, 19 nt, Artificial Sequence
  Description of Artificial Sequence: Synthetic oligonucleotide
  Antisense strand to SEQ ID NO: 1301844
auccgcccggguuaagacu

SEQ ID NO: 1301846 - RNA, 19 nt, Artificial Sequence
  Description of Artificial Sequence: Synthetic oligonucleotide
  Sense strand starting at position 1755 of SEQ ID NO: 1241814
cugucacggauguguuuaa

SEQ ID NO: 1301847 - RNA, 19 nt, Artificial Sequence
  Description of Artificial Sequence: Synthetic oligonucleotide
  Antisense strand to SEQ ID NO: 1301846
uuaaacacauccgugacag

SEQ ID NO: 1301848 - RNA, 19 nt, Artificial Sequence
  Description of Artificial Sequence: Synthetic oligonucleotide
  Sense strand starting at position 1759 of SEQ ID NO: 1241814
cacggauguguuuaagacu

SEQ ID NO: 1301849 - RNA, 19 nt, Artificial Sequence
  Description of Artificial Sequence: Synthetic oligonucleotide
  Antisense strand to SEQ ID NO: 1301848
agucuuaaacacauccgug

SEQ ID NO: 1301850 - RNA, 19 nt, Artificial Sequence
  Description of Artificial Sequence: Synthetic oligonucleotide
  Sense strand starting at position 1987 of SEQ ID NO: 1241814
uaacgagaguguuucccaa

SEQ ID NO: 1301851 - RNA, 19 nt, Artificial Sequence
  Description of Artificial Sequence: Synthetic oligonucleotide
  Antisense strand to SEQ ID NO: 1301850
uugggaaacacucucguua

SEQ ID NO: 1301852 - RNA, 19 nt, Artificial Sequence
  Description of Artificial Sequence: Synthetic oligonucleotide
  Sense strand starting at position 1989 of SEQ ID NO: 1241814
acgagaguguuucccaaau

SEQ ID NO: 1301853 - RNA, 19 nt, Artificial Sequence
  Description of Artificial Sequence: Synthetic oligonucleotide
  Antisense strand to SEQ ID NO: 1301852
auuugggaaacacucucgu

SEQ ID NO: 1301854 - RNA, 19 nt, Artificial Sequence
  Description of Artificial Sequence: Synthetic oligonucleotide
  Sense strand starting at position 2128 of SEQ ID NO: 1241814
cgcucagggcaugaaugau

SEQ ID NO: 1301855 - RNA, 19 nt, Artificial Sequence
  Description of Artificial Sequence: Synthetic oligonucleotide
  Antisense strand to SEQ ID NO: 1301854
aucauucaugcccugagcg

SEQ ID NO: 1301856 - RNA, 19 nt, Artificial Sequence
  Description of Artificial Sequence: Synthetic oligonucleotide
  Sense strand starting at position 2494 of SEQ ID NO: 1241814
cgccgaagccgguaaagua

SEQ ID NO: 1301857 - RNA, 19 nt, Artificial Sequence
  Description of Artificial Sequence: Synthetic oligonucleotide
  Antisense strand to SEQ ID NO: 1301856
uacuuuaccggcuucggcg

SEQ ID NO: 1301858 - RNA, 19 nt, Artificial Sequence
  Description of Artificial Sequence: Synthetic oligonucleotide
  Sense strand starting at position 2536 of SEQ ID NO: 1241814
agagaagguucuggaagau

SEQ ID NO: 1301859 - RNA, 19 nt, Artificial Sequence
  Description of Artificial Sequence: Synthetic oligonucleotide
  Antisense strand to SEQ ID NO: 1301858
aucuuccagaaccuucucu

SEQ ID NO: 1301860 - RNA, 19 nt, Artificial Sequence
  Description of Artificial Sequence: Synthetic oligonucleotide
  Sense strand starting at position 2593 of SEQ ID NO: 1241814
ugaucccuuccguguuauu

SEQ ID NO: 1301861 - RNA, 19 nt, Artificial Sequence
  Description of Artificial Sequence: Synthetic oligonucleotide
  Antisense strand to SEQ ID NO: 1301860
aauaacacggaagggauca

SEQ ID NO: 1301862 - RNA, 19 nt, Artificial Sequence
  Description of Artificial Sequence: Synthetic oligonucleotide
  Sense strand starting at position 2634 of SEQ ID NO: 1241814
auggguaucuuaccacaau

SEQ ID NO: 1301863 - RNA, 19 nt, Artificial Sequence
  Description of Artificial Sequence: Synthetic oligonucleotide
  Antisense strand to SEQ ID NO: 1301862
auugugguaagauacccau

SEQ ID NO: 1301864 - RNA, 19 nt, Artificial Sequence
  Description of Artificial Sequence: Synthetic oligonucleotide
  Sense strand starting at position 3065 of SEQ ID NO: 1241814
ugcugugucccugcaucua

SEQ ID NO: 1301865 - RNA, 19 nt, Artificial Sequence
  Description of Artificial Sequence: Synthetic oligonucleotide
  Antisense strand to SEQ ID NO: 1301864
uagaugcagggacacagca

SEQ ID NO: 1301866 - RNA, 19 nt, Artificial Sequence
  Description of Artificial Sequence: Synthetic oligonucleotide
  Sense strand starting at position 3119 of SEQ ID NO: 1241814
auccauccuguguacagau

SEQ ID NO: 1301867 - RNA, 19 nt, Artificial Sequence
  Description of Artificial Sequence: Synthetic oligonucleotide
  Antisense strand to SEQ ID NO: 1301866
aucuguacacaggauggau

SEQ ID NO: 1301868 - RNA, 19 nt, Artificial Sequence
  Description of Artificial Sequence: Synthetic oligonucleotide
  Sense strand starting at position 3204 of SEQ ID NO: 1241814
gcuggcauuuauugagaac

SEQ ID NO: 1301869 - RNA, 19 nt, Artificial Sequence
  Description of Artificial Sequence: Synthetic oligonucleotide
  Antisense strand to SEQ ID NO: 1301868
guucucaauaaaugccagc

SEQ ID NO: 1301870 - RNA, 19 nt, Artificial Sequence
  Description of Artificial Sequence: Synthetic oligonucleotide
  Sense strand starting at position 3207 of SEQ ID NO: 1241814
ggcauuuauugagaacuuu

SEQ ID NO: 1301871 - RNA, 19 nt, Artificial Sequence
  Description of Artificial Sequence: Synthetic oligonucleotide
  Antisense strand to SEQ ID NO: 1301870
aaaguucucaauaaaugcc

SEQ ID NO: 1301872 - RNA, 19 nt, Artificial Sequence
  Description of Artificial Sequence: Synthetic oligonucleotide
  Sense strand starting at position 3262 of SEQ ID NO: 1241814
uugagcugcuucuuauuua

SEQ ID NO: 1301873 - RNA, 19 nt, Artificial Sequence
  Description of Artificial Sequence: Synthetic oligonucleotide
  Antisense strand to SEQ ID NO: 1301872
uaaauaagaagcagcucaa

SEQ ID NO: 1301874 - RNA, 19 nt, Artificial Sequence
  Description of Artificial Sequence: Synthetic oligonucleotide
  Sense strand starting at position 3269 of SEQ ID NO: 1241814
gcuucuuauuuaggucaga

SEQ ID NO: 1301875 - RNA, 19 nt, Artificial Sequence
  Description of Artificial Sequence: Synthetic oligonucleotide
  Antisense strand to SEQ ID NO: 1301874
ucugaccuaaauaagaagc

SEQ ID NO: 1301876 - RNA, 19 nt, Artificial Sequence
  Description of Artificial Sequence: Synthetic oligonucleotide
  Sense strand starting at position 3274 of SEQ ID NO: 1241814
uuauuuaggucagaacuag

SEQ ID NO: 1301877 - RNA, 19 nt, Artificial Sequence
  Description of Artificial Sequence: Synthetic oligonucleotide
  Antisense strand to SEQ ID NO: 1301876
cuaguucugaccuaaauaa

SEQ ID NO: 1301878 - RNA, 19 nt, Artificial Sequence
  Description of Artificial Sequence: Synthetic oligonucleotide
  Sense strand starting at position 3294 of SEQ ID NO: 1241814
agcuguuuccacuguagaa

SEQ ID NO: 1301879 - RNA, 19 nt, Artificial Sequence
  Description of Artificial Sequence: Synthetic oligonucleotide
  Antisense strand to SEQ ID NO: 1301878
uucuacaguggaaacagcu

SEQ ID NO: 1301880 - RNA, 19 nt, Artificial Sequence
  Description of Artificial Sequence: Synthetic oligonucleotide
  Sense strand starting at position 3296 of SEQ ID NO: 1241814
cuguuuccacuguagaauu

SEQ ID NO: 1301881 - RNA, 19 nt, Artificial Sequence
  Description of Artificial Sequence: Synthetic oligonucleotide
  Antisense strand to SEQ ID NO: 1301880
aauucuacaguggaaacag

SEQ ID NO: 1301882 - RNA, 19 nt, Artificial Sequence
  Description of Artificial Sequence: Synthetic oligonucleotide
  Sense strand starting at position 3413 of SEQ ID NO: 1241814
aaacgaaccgagugagaaa

SEQ ID NO: 1301883 - RNA, 19 nt, Artificial Sequence
  Description of Artificial Sequence: Synthetic oligonucleotide
  Antisense strand to SEQ ID NO: 1301882
uuucucacucgguucguuu

SEQ ID NO: 1301884 - RNA, 19 nt, Artificial Sequence
  Description of Artificial Sequence: Synthetic oligonucleotide
  Sense strand starting at position 3484 of SEQ ID NO: 1241814
agccuaagaugucuccgaa

SEQ ID NO: 1301885 - RNA, 19 nt, Artificial Sequence
  Description of Artificial Sequence: Synthetic oligonucleotide
  Antisense strand to SEQ ID NO: 1301884
uucggagacaucuuaggcu

SEQ ID NO: 1301886 - RNA, 19 nt, Artificial Sequence
  Description of Artificial Sequence: Synthetic oligonucleotide
  Sense strand starting at position 60 of SEQ ID NO: 1241815
uggccuugacuagaaguua

SEQ ID NO: 1301887 - RNA, 19 nt, Artificial Sequence
  Description of Artificial Sequence: Synthetic oligonucleotide
  Antisense strand to SEQ ID NO: 1301886
uaacuucuagucaaggcca

SEQ ID NO: 1301888 - RNA, 19 nt, Artificial Sequence
  Description of Artificial Sequence: Synthetic oligonucleotide
  Sense strand starting at position 69 of SEQ ID NO: 1241815
cuagaaguuaucugggucu

SEQ ID NO: 1301889 - RNA, 19 nt, Artificial Sequence
  Description of Artificial Sequence: Synthetic oligonucleotide
  Antisense strand to SEQ ID NO: 1301888
agacccagauaacuucuag

SEQ ID NO: 1301890 - RNA, 19 nt, Artificial Sequence
  Description of Artificial Sequence: Synthetic oligonucleotide
  Sense strand starting at position 71 of SEQ ID NO: 1241815
agaaguuaucugggucuug

SEQ ID NO: 1301891 - RNA, 19 nt, Artificial Sequence
  Description of Artificial Sequence: Synthetic oligonucleotide
  Antisense strand to SEQ ID NO: 1301890
caagacccagauaacuucu

SEQ ID NO: 1301892 - RNA, 19 nt, Artificial Sequence
  Description of Artificial Sequence: Synthetic oligonucleotide
  Sense strand starting at position 72 of SEQ ID NO: 1241815
gaaguuaucugggucuugu

SEQ ID NO: 1301893 - RNA, 19 nt, Artificial Sequence
  Description of Artificial Sequence: Synthetic oligonucleotide
  Antisense strand to SEQ ID NO: 1301892
acaagacccagauaacuuc

SEQ ID NO: 1301894 - RNA, 19 nt, Artificial Sequence
  Description of Artificial Sequence: Synthetic oligonucleotide
  Sense strand starting at position 146 of SEQ ID NO: 1241815
cuuuguggccuccaugaca

SEQ ID NO: 1301895 - RNA, 19 nt, Artificial Sequence
  Description of Artificial Sequence: Synthetic oligonucleotide
  Antisense strand to SEQ ID NO: 1301894
ugucauggaggccacaaag

SEQ ID NO: 1301896 - RNA, 19 nt, Artificial Sequence
  Description of Artificial Sequence: Synthetic oligonucleotide
  Sense strand starting at position 197 of SEQ ID NO: 1241815
gcugcaaagguauauuauu

SEQ ID NO: 1301897 - RNA, 19 nt, Artificial Sequence
  Description of Artificial Sequence: Synthetic oligonucleotide
  Antisense strand to SEQ ID NO: 1301896
aauaauauaccuuugcagc

SEQ ID NO: 1301898 - RNA, 19 nt, Artificial Sequence
  Description of Artificial Sequence: Synthetic oligonucleotide
  Sense strand starting at position 207 of SEQ ID NO: 1241815
uauauuauugcagguagaa

SEQ ID NO: 1301899 - RNA, 19 nt, Artificial Sequence
  Description of Artificial Sequence: Synthetic oligonucleotide
  Antisense strand to SEQ ID NO: 1301898
uucuaccugcaauaauaua

SEQ ID NO: 1301900 - RNA, 19 nt, Artificial Sequence
  Description of Artificial Sequence: Synthetic oligonucleotide
  Sense strand starting at position 226 of SEQ ID NO: 1241815
uuuauaucgucuccauuag

SEQ ID NO: 1301901 - RNA, 19 nt, Artificial Sequence
  Description of Artificial Sequence: Synthetic oligonucleotide
  Antisense strand to SEQ ID NO: 1301900
cuaauggagacgauauaaa

SEQ ID NO: 1301902 - RNA, 19 nt, Artificial Sequence
  Description of Artificial Sequence: Synthetic oligonucleotide
  Sense strand starting at position 227 of SEQ ID NO: 1241815
uuauaucgucuccauuaga

SEQ ID NO: 1301903 - RNA, 19 nt, Artificial Sequence
  Description of Artificial Sequence: Synthetic oligonucleotide
  Antisense strand to SEQ ID NO: 1301902
ucuaauggagacgauauaa

SEQ ID NO: 1301904 - RNA, 19 nt, Artificial Sequence
  Description of Artificial Sequence: Synthetic oligonucleotide
  Sense strand starting at position 349 of SEQ ID NO: 1241815
ggccauauucagcagggua

SEQ ID NO: 1301905 - RNA, 19 nt, Artificial Sequence
  Description of Artificial Sequence: Synthetic oligonucleotide
  Antisense strand to SEQ ID NO: 1301904
uacccugcugaauauggcc

SEQ ID NO: 1301906 - RNA, 19 nt, Artificial Sequence
  Description of Artificial Sequence: Synthetic oligonucleotide
  Sense strand starting at position 363 of SEQ ID NO: 1241815
ggguauggugaggaguaca

SEQ ID NO: 1301907 - RNA, 19 nt, Artificial Sequence
  Description of Artificial Sequence: Synthetic oligonucleotide
  Antisense strand to SEQ ID NO: 1301906
uguacuccucaccauaccc

SEQ ID NO: 1301908 - RNA, 19 nt, Artificial Sequence
  Description of Artificial Sequence: Synthetic oligonucleotide
  Sense strand starting at position 519 of SEQ ID NO: 1241815
agcagaggcuuugcagaua

SEQ ID NO: 1301909 - RNA, 19 nt, Artificial Sequence
  Description of Artificial Sequence: Synthetic oligonucleotide
  Antisense strand to SEQ ID NO: 1301908
uaucugcaaagccucugcu

SEQ ID NO: 1301910 - RNA, 19 nt, Artificial Sequence
  Description of Artificial Sequence: Synthetic oligonucleotide
  Sense strand starting at position 631 of SEQ ID NO: 1241815
guggcaucuggacagaauc

SEQ ID NO: 1301911 - RNA, 19 nt, Artificial Sequence
  Description of Artificial Sequence: Synthetic oligonucleotide
  Antisense strand to SEQ ID NO: 1301910
gauucuguccagaugccac

SEQ ID NO: 1301912 - RNA, 19 nt, Artificial Sequence
  Description of Artificial Sequence: Synthetic oligonucleotide
  Sense strand starting at position 642 of SEQ ID NO: 1241815
acagaaucacacuggucuu

SEQ ID NO: 1301913 - RNA, 19 nt, Artificial Sequence
  Description of Artificial Sequence: Synthetic oligonucleotide
  Antisense strand to SEQ ID NO: 1301912
aagaccagugugauucugu

SEQ ID NO: 1301914 - RNA, 19 nt, Artificial Sequence
  Description of Artificial Sequence: Synthetic oligonucleotide
  Sense strand starting at position 681 of SEQ ID NO: 1241815
cucuccagucuugaugauu

SEQ ID NO: 1301915 - RNA, 19 nt, Artificial Sequence
  Description of Artificial Sequence: Synthetic oligonucleotide
  Antisense strand to SEQ ID NO: 1301914
aaucaucaagacuggagag

SEQ ID NO: 1301916 - RNA, 19 nt, Artificial Sequence
  Description of Artificial Sequence: Synthetic oligonucleotide
  Sense strand starting at position 684 of SEQ ID NO: 1241815
uccagucuugaugauuaac

SEQ ID NO: 1301917 - RNA, 19 nt, Artificial Sequence
  Description of Artificial Sequence: Synthetic oligonucleotide
  Antisense strand to SEQ ID NO: 1301916
guuaaucaucaagacugga

SEQ ID NO: 1301918 - RNA, 19 nt, Artificial Sequence
  Description of Artificial Sequence: Synthetic oligonucleotide
  Sense strand starting at position 747 of SEQ ID NO: 1241815
gagugaagguuccugauuc

SEQ ID NO: 1301919 - RNA, 19 nt, Artificial Sequence
  Description of Artificial Sequence: Synthetic oligonucleotide
  Antisense strand to SEQ ID NO: 1301918
gaaucaggaaccuucacuc

SEQ ID NO: 1301920 - RNA, 19 nt, Artificial Sequence
  Description of Artificial Sequence: Synthetic oligonucleotide
  Sense strand starting at position 751 of SEQ ID NO: 1241815
gaagguuccugauucuauu

SEQ ID NO: 1301921 - RNA, 19 nt, Artificial Sequence
  Description of Artificial Sequence: Synthetic oligonucleotide
  Antisense strand to SEQ ID NO: 1301920
aauagaaucaggaaccuuc

SEQ ID NO: 1301922 - RNA, 19 nt, Artificial Sequence
  Description of Artificial Sequence: Synthetic oligonucleotide
  Sense strand starting at position 929 of SEQ ID NO: 1241815
ggcgaccgucuucuaguua

SEQ ID NO: 1301923 - RNA, 19 nt, Artificial Sequence
  Description of Artificial Sequence: Synthetic oligonucleotide
  Antisense strand to SEQ ID NO: 1301922
uaacuagaagacggucgcc

SEQ ID NO: 1301924 - RNA, 19 nt, Artificial Sequence
  Description of Artificial Sequence: Synthetic oligonucleotide
  Sense strand starting at position 968 of SEQ ID NO: 1241815
agguguguggcccaggaaa

SEQ ID NO: 1301925 - RNA, 19 nt, Artificial Sequence
  Description of Artificial Sequence: Synthetic oligonucleotide
  Antisense strand to SEQ ID NO: 1301924
uuuccugggccacacaccu

SEQ ID NO: 1301926 - RNA, 19 nt, Artificial Sequence
  Description of Artificial Sequence: Synthetic oligonucleotide
  Sense strand starting at position 970 of SEQ ID NO: 1241815
guguguggcccaggaaaua

SEQ ID NO: 1301927 - RNA, 19 nt, Artificial Sequence
  Description of Artificial Sequence: Synthetic oligonucleotide
  Antisense strand to SEQ ID NO: 1301926
uauuuccugggccacacac

SEQ ID NO: 1301928 - RNA, 19 nt, Artificial Sequence
  Description of Artificial Sequence: Synthetic oligonucleotide
  Sense strand starting at position 1067 of SEQ ID NO: 1241815
ggguacugcgguuacaaau

SEQ ID NO: 1301929 - RNA, 19 nt, Artificial Sequence
  Description of Artificial Sequence: Synthetic oligonucleotide
  Antisense strand to SEQ ID NO: 1301928
auuuguaaccgcaguaccc

SEQ ID NO: 1301930 - RNA, 19 nt, Artificial Sequence
  Description of Artificial Sequence: Synthetic oligonucleotide
  Sense strand starting at position 1076 of SEQ ID NO: 1241815
gguuacaaaucagucacua

SEQ ID NO: 1301931 - RNA, 19 nt, Artificial Sequence
  Description of Artificial Sequence: Synthetic oligonucleotide
  Antisense strand to SEQ ID NO: 1301930
uagugacugauuuguaacc

SEQ ID NO: 1301932 - RNA, 19 nt, Artificial Sequence
  Description of Artificial Sequence: Synthetic oligonucleotide
  Sense strand starting at position 1356 of SEQ ID NO: 1241815
cucuaagugcuccacaaag

SEQ ID NO: 1301933 - RNA, 19 nt, Artificial Sequence
  Description of Artificial Sequence: Synthetic oligonucleotide
  Antisense strand to SEQ ID NO: 1301932
cuuuguggagcacuuagag

SEQ ID NO: 1301934 - RNA, 19 nt, Artificial Sequence
  Description of Artificial Sequence: Synthetic oligonucleotide
  Sense strand starting at position 1374 of SEQ ID NO: 1241815
ggcugaaccagcggugaaa

SEQ ID NO: 1301935 - RNA, 19 nt, Artificial Sequence
  Description of Artificial Sequence: Synthetic oligonucleotide
  Antisense strand to SEQ ID NO: 1301934
uuucaccgcugguucagcc

SEQ ID NO: 1301936 - RNA, 19 nt, Artificial Sequence
  Description of Artificial Sequence: Synthetic oligonucleotide
  Sense strand starting at position 1385 of SEQ ID NO: 1241815
cggugaaaggccuguaaga

SEQ ID NO: 1301937 - RNA, 19 nt, Artificial Sequence
  Description of Artificial Sequence: Synthetic oligonucleotide
  Antisense strand to SEQ ID NO: 1301936
ucuuacaggccuuucaccg

SEQ ID NO: 1301938 - RNA, 19 nt, Artificial Sequence
  Description of Artificial Sequence: Synthetic oligonucleotide
  Sense strand starting at position 2212 of SEQ ID NO: 1241815
cacggauguguuuaagacu

SEQ ID NO: 1301939 - RNA, 19 nt, Artificial Sequence
  Description of Artificial Sequence: Synthetic oligonucleotide
  Antisense strand to SEQ ID NO: 1301938
agucuuaaacacauccgug

SEQ ID NO: 1301940 - RNA, 19 nt, Artificial Sequence
  Description of Artificial Sequence: Synthetic oligonucleotide
  Sense strand starting at position 2440 of SEQ ID NO: 1241815
uaacgagaguguuucccaa

SEQ ID NO: 1301941 - RNA, 19 nt, Artificial Sequence
  Description of Artificial Sequence: Synthetic oligonucleotide
  Antisense strand to SEQ ID NO: 1301940
uugggaaacacucucguua

SEQ ID NO: 1301942 - RNA, 19 nt, Artificial Sequence
  Description of Artificial Sequence: Synthetic oligonucleotide
  Sense strand starting at position 2442 of SEQ ID NO: 1241815
acgagaguguuucccaaau

SEQ ID NO: 1301943 - RNA, 19 nt, Artificial Sequence
  Description of Artificial Sequence: Synthetic oligonucleotide
  Antisense strand to SEQ ID NO: 1301942
auuugggaaacacucucgu

SEQ ID NO: 1301944 - RNA, 19 nt, Artificial Sequence
  Description of Artificial Sequence: Synthetic oligonucleotide
  Sense strand starting at position 2581 of SEQ ID NO: 1241815
cgcucagggcaugaaugau

SEQ ID NO: 1301945 - RNA, 19 nt, Artificial Sequence
  Description of Artificial Sequence: Synthetic oligonucleotide
  Antisense strand to SEQ ID NO: 1301944
aucauucaugcccugagcg

SEQ ID NO: 1301946 - RNA, 19 nt, Artificial Sequence
  Description of Artificial Sequence: Synthetic oligonucleotide
  Sense strand starting at position 3087 of SEQ ID NO: 1241815
auggguaucuuaccacaau

SEQ ID NO: 1301947 - RNA, 19 nt, Artificial Sequence
  Description of Artificial Sequence: Synthetic oligonucleotide
  Antisense strand to SEQ ID NO: 1301946
auugugguaagauacccau

SEQ ID NO: 1301948 - RNA, 19 nt, Artificial Sequence
  Description of Artificial Sequence: Synthetic oligonucleotide
  Sense strand starting at position 3518 of SEQ ID NO: 1241815
ugcugugucccugcaucua

SEQ ID NO: 1301949 - RNA, 19 nt, Artificial Sequence
  Description of Artificial Sequence: Synthetic oligonucleotide
  Antisense strand to SEQ ID NO: 1301948
uagaugcagggacacagca

SEQ ID NO: 1301950 - RNA, 19 nt, Artificial Sequence
  Description of Artificial Sequence: Synthetic oligonucleotide
  Sense strand starting at position 3572 of SEQ ID NO: 1241815
auccauccuguguacagau

SEQ ID NO: 1301951 - RNA, 19 nt, Artificial Sequence
  Description of Artificial Sequence: Synthetic oligonucleotide
  Antisense strand to SEQ ID NO: 1301950
aucuguacacaggauggau

SEQ ID NO: 1301952 - RNA, 19 nt, Artificial Sequence
  Description of Artificial Sequence: Synthetic oligonucleotide
  Sense strand starting at position 3660 of SEQ ID NO: 1241815
ggcauuuauugagaacuuu

SEQ ID NO: 1301953 - RNA, 19 nt, Artificial Sequence
  Description of Artificial Sequence: Synthetic oligonucleotide
  Antisense strand to SEQ ID NO: 1301952
aaaguucucaauaaaugcc

SEQ ID NO: 1301954 - RNA, 19 nt, Artificial Sequence
  Description of Artificial Sequence: Synthetic oligonucleotide
  Sense strand starting at position 3715 of SEQ ID NO: 1241815
uugagcugcuucuuauuua

SEQ ID NO: 1301955 - RNA, 19 nt, Artificial Sequence
  Description of Artificial Sequence: Synthetic oligonucleotide
  Antisense strand to SEQ ID NO: 1301954
uaaauaagaagcagcucaa

SEQ ID NO: 1301956 - RNA, 19 nt, Artificial Sequence
  Description of Artificial Sequence: Synthetic oligonucleotide
  Sense strand starting at position 3727 of SEQ ID NO: 1241815
uuauuuaggucagaacuag

SEQ ID NO: 1301957 - RNA, 19 nt, Artificial Sequence
  Description of Artificial Sequence: Synthetic oligonucleotide
  Antisense strand to SEQ ID NO: 1301956
cuaguucugaccuaaauaa

SEQ ID NO: 1301958 - RNA, 19 nt, Artificial Sequence
  Description of Artificial Sequence: Synthetic oligonucleotide
  Sense strand starting at position 3747 of SEQ ID NO: 1241815
agcuguuuccacuguagaa

SEQ ID NO: 1301959 - RNA, 19 nt, Artificial Sequence
  Description of Artificial Sequence: Synthetic oligonucleotide
  Antisense strand to SEQ ID NO: 1301958
uucuacaguggaaacagcu

SEQ ID NO: 1301960 - RNA, 19 nt, Artificial Sequence
  Description of Artificial Sequence: Synthetic oligonucleotide
  Sense strand starting at position 3749 of SEQ ID NO: 1241815
cuguuuccacuguagaauu

SEQ ID NO: 1301961 - RNA, 19 nt, Artificial Sequence
  Description of Artificial Sequence: Synthetic oligonucleotide
  Antisense strand to SEQ ID NO: 1301960
aauucuacaguggaaacag

SEQ ID NO: 1301962 - RNA, 19 nt, Artificial Sequence
  Description of Artificial Sequence: Synthetic oligonucleotide
  Sense strand starting at position 3866 of SEQ ID NO: 1241815
aaacgaaccgagugagaaa

SEQ ID NO: 1301963 - RNA, 19 nt, Artificial Sequence
  Description of Artificial Sequence: Synthetic oligonucleotide
  Antisense strand to SEQ ID NO: 1301962
uuucucacucgguucguuu

SEQ ID NO: 1301964 - RNA, 19 nt, Artificial Sequence
  Description of Artificial Sequence: Synthetic oligonucleotide
  Sense strand starting at position 3937 of SEQ ID NO: 1241815
agccuaagaugucuccgaa

SEQ ID NO: 1301965 - RNA, 19 nt, Artificial Sequence
  Description of Artificial Sequence: Synthetic oligonucleotide
  Antisense strand to SEQ ID NO: 1301964
uucggagacaucuuaggcu

SEQ ID NO: 1301966 - RNA, 19 nt, Artificial Sequence
  Description of Artificial Sequence: Synthetic oligonucleotide
  Sense strand starting at position 581 of SEQ ID NO: 1241816
gaaggaauguagguagguu

SEQ ID NO: 1301967 - RNA, 19 nt, Artificial Sequence
  Description of Artificial Sequence: Synthetic oligonucleotide
  Antisense strand to SEQ ID NO: 1301966
aaccuaccuacauuccuuc

SEQ ID NO: 1301968 - RNA, 19 nt, Artificial Sequence
  Description of Artificial Sequence: Synthetic oligonucleotide
  Sense strand starting at position 603 of SEQ ID NO: 1241816
ugacuugcucgagaucaua

SEQ ID NO: 1301969 - RNA, 19 nt, Artificial Sequence
  Description of Artificial Sequence: Synthetic oligonucleotide
  Antisense strand to SEQ ID NO: 1301968
uaugaucucgagcaaguca

SEQ ID NO: 1301970 - RNA, 19 nt, Artificial Sequence
  Description of Artificial Sequence: Synthetic oligonucleotide
  Sense strand starting at position 667 of SEQ ID NO: 1241816
agucuugaguuaccuauaa

SEQ ID NO: 1301971 - RNA, 19 nt, Artificial Sequence
  Description of Artificial Sequence: Synthetic oligonucleotide
  Antisense strand to SEQ ID NO: 1301970
uuauagguaacucaagacu

SEQ ID NO: 1301972 - RNA, 19 nt, Artificial Sequence
  Description of Artificial Sequence: Synthetic oligonucleotide
  Sense strand starting at position 694 of SEQ ID NO: 1241816
cacagagcccuuuaguaga

SEQ ID NO: 1301973 - RNA, 19 nt, Artificial Sequence
  Description of Artificial Sequence: Synthetic oligonucleotide
  Antisense strand to SEQ ID NO: 1301972
ucuacuaaagggcucugug

SEQ ID NO: 1301974 - RNA, 19 nt, Artificial Sequence
  Description of Artificial Sequence: Synthetic oligonucleotide
  Sense strand starting at position 844 of SEQ ID NO: 1241816
ucagaugaaaggcgugaau

SEQ ID NO: 1301975 - RNA, 19 nt, Artificial Sequence
  Description of Artificial Sequence: Synthetic oligonucleotide
  Antisense strand to SEQ ID NO: 1301974
auucacgccuuucaucuga

SEQ ID NO: 1301976 - RNA, 19 nt, Artificial Sequence
  Description of Artificial Sequence: Synthetic oligonucleotide
  Sense strand starting at position 846 of SEQ ID NO: 1241816
agaugaaaggcgugaauaa

SEQ ID NO: 1301977 - RNA, 19 nt, Artificial Sequence
  Description of Artificial Sequence: Synthetic oligonucleotide
  Antisense strand to SEQ ID NO: 1301976
uuauucacgccuuucaucu

SEQ ID NO: 1301978 - RNA, 19 nt, Artificial Sequence
  Description of Artificial Sequence: Synthetic oligonucleotide
  Sense strand starting at position 856 of SEQ ID NO: 1241816
cgugaauaacuagagugga

SEQ ID NO: 1301979 - RNA, 19 nt, Artificial Sequence
  Description of Artificial Sequence: Synthetic oligonucleotide
  Antisense strand to SEQ ID NO: 1301978
uccacucuaguuauucacg

SEQ ID NO: 1301980 - RNA, 19 nt, Artificial Sequence
  Description of Artificial Sequence: Synthetic oligonucleotide
  Sense strand starting at position 929 of SEQ ID NO: 1241816
cagaguaaauacgcagaau

SEQ ID NO: 1301981 - RNA, 19 nt, Artificial Sequence
  Description of Artificial Sequence: Synthetic oligonucleotide
  Antisense strand to SEQ ID NO: 1301980
auucugcguauuuacucug

SEQ ID NO: 1301982 - RNA, 19 nt, Artificial Sequence
  Description of Artificial Sequence: Synthetic oligonucleotide
  Sense strand starting at position 1737 of SEQ ID NO: 1241816
caucuuaauccagguggga

SEQ ID NO: 1301983 - RNA, 19 nt, Artificial Sequence
  Description of Artificial Sequence: Synthetic oligonucleotide
  Antisense strand to SEQ ID NO: 1301982
ucccaccuggauuaagaug

SEQ ID NO: 1301984 - RNA, 19 nt, Artificial Sequence
  Description of Artificial Sequence: Synthetic oligonucleotide
  Sense strand starting at position 1739 of SEQ ID NO: 1241816
ucuuaauccaggugggaaa

SEQ ID NO: 1301985 - RNA, 19 nt, Artificial Sequence
  Description of Artificial Sequence: Synthetic oligonucleotide
  Antisense strand to SEQ ID NO: 1301984
uuucccaccuggauuaaga

SEQ ID NO: 1301986 - RNA, 19 nt, Artificial Sequence
  Description of Artificial Sequence: Synthetic oligonucleotide
  Sense strand starting at position 1931 of SEQ ID NO: 1241816
ugacuuacccuguagguua

SEQ ID NO: 1301987 - RNA, 19 nt, Artificial Sequence
  Description of Artificial Sequence: Synthetic oligonucleotide
  Antisense strand to SEQ ID NO: 1301986
uaaccuacaggguaaguca

SEQ ID NO: 1301988 - RNA, 19 nt, Artificial Sequence
  Description of Artificial Sequence: Synthetic oligonucleotide
  Sense strand starting at position 1965 of SEQ ID NO: 1241816
acuuucugccucugggaaa

SEQ ID NO: 1301989 - RNA, 19 nt, Artificial Sequence
  Description of Artificial Sequence: Synthetic oligonucleotide
  Antisense strand to SEQ ID NO: 1301988
uuucccagaggcagaaagu

SEQ ID NO: 1301990 - RNA, 19 nt, Artificial Sequence
  Description of Artificial Sequence: Synthetic oligonucleotide
  Sense strand starting at position 2193 of SEQ ID NO: 1241816
cuaaauguuccucauugga

SEQ ID NO: 1301991 - RNA, 19 nt, Artificial Sequence
  Description of Artificial Sequence: Synthetic oligonucleotide
  Antisense strand to SEQ ID NO: 1301990
uccaaugaggaacauuuag

SEQ ID NO: 1301992 - RNA, 19 nt, Artificial Sequence
  Description of Artificial Sequence: Synthetic oligonucleotide
  Sense strand starting at position 2195 of SEQ ID NO: 1241816
aaauguuccucauuggaga

SEQ ID NO: 1301993 - RNA, 19 nt, Artificial Sequence
  Description of Artificial Sequence: Synthetic oligonucleotide
  Antisense strand to SEQ ID NO: 1301992
ucuccaaugaggaacauuu

SEQ ID NO: 1301994 - RNA, 19 nt, Artificial Sequence
  Description of Artificial Sequence: Synthetic oligonucleotide
  Sense strand starting at position 2196 of SEQ ID NO: 1241816
aauguuccucauuggagaa

SEQ ID NO: 1301995 - RNA, 19 nt, Artificial Sequence
  Description of Artificial Sequence: Synthetic oligonucleotide
  Antisense strand to SEQ ID NO: 1301994
uucuccaaugaggaacauu

SEQ ID NO: 1301996 - RNA, 19 nt, Artificial Sequence
  Description of Artificial Sequence: Synthetic oligonucleotide
  Sense strand starting at position 2462 of SEQ ID NO: 1241816
ugacuaagucuugaaguca

SEQ ID NO: 1301997 - RNA, 19 nt, Artificial Sequence
  Description of Artificial Sequence: Synthetic oligonucleotide
  Antisense strand to SEQ ID NO: 1301996
ugacuucaagacuuaguca

SEQ ID NO: 1301998 - RNA, 19 nt, Artificial Sequence
  Description of Artificial Sequence: Synthetic oligonucleotide
  Sense strand starting at position 2722 of SEQ ID NO: 1241816
cagcaaugaguuuagccaa

SEQ ID NO: 1301999 - RNA, 19 nt, Artificial Sequence
  Description of Artificial Sequence: Synthetic oligonucleotide
  Antisense strand to SEQ ID NO: 1301998
uuggcuaaacucauugcug

SEQ ID NO: 1302000 - RNA, 19 nt, Artificial Sequence
  Description of Artificial Sequence: Synthetic oligonucleotide
  Sense strand starting at position 2895 of SEQ ID NO: 1241816
gaacuauucgcagagcuca

SEQ ID NO: 1302001 - RNA, 19 nt, Artificial Sequence
  Description of Artificial Sequence: Synthetic oligonucleotide
  Antisense strand to SEQ ID NO: 1302000
ugagcucugcgaauaguuc

SEQ ID NO: 1302002 - RNA, 19 nt, Artificial Sequence
  Description of Artificial Sequence: Synthetic oligonucleotide
  Sense strand starting at position 3082 of SEQ ID NO: 1241816
cagccaugauaugugacaa

SEQ ID NO: 1302003 - RNA, 19 nt, Artificial Sequence
  Description of Artificial Sequence: Synthetic oligonucleotide
  Antisense strand to SEQ ID NO: 1302002
uugucacauaucauggcug

SEQ ID NO: 1302004 - RNA, 19 nt, Artificial Sequence
  Description of Artificial Sequence: Synthetic oligonucleotide
  Sense strand starting at position 3187 of SEQ ID NO: 1241816
gugguugaccauuaaucuc

SEQ ID NO: 1302005 - RNA, 19 nt, Artificial Sequence
  Description of Artificial Sequence: Synthetic oligonucleotide
  Antisense strand to SEQ ID NO: 1302004
gagauuaauggucaaccac

SEQ ID NO: 1302006 - RNA, 19 nt, Artificial Sequence
  Description of Artificial Sequence: Synthetic oligonucleotide
  Sense strand starting at position 3243 of SEQ ID NO: 1241816
agaggucugagcugauaca

SEQ ID NO: 1302007 - RNA, 19 nt, Artificial Sequence
  Description of Artificial Sequence: Synthetic oligonucleotide
  Antisense strand to SEQ ID NO: 1302006
uguaucagcucagaccucu

SEQ ID NO: 1302008 - RNA, 19 nt, Artificial Sequence
  Description of Artificial Sequence: Synthetic oligonucleotide
  Sense strand starting at position 3255 of SEQ ID NO: 1241816
ugauacagcguggaucaaa

SEQ ID NO: 1302009 - RNA, 19 nt, Artificial Sequence
  Description of Artificial Sequence: Synthetic oligonucleotide
  Antisense strand to SEQ ID NO: 1302008
uuugauccacgcuguauca

SEQ ID NO: 1302010 - RNA, 19 nt, Artificial Sequence
  Description of Artificial Sequence: Synthetic oligonucleotide
  Sense strand starting at position 3520 of SEQ ID NO: 1241816
uguugacacugacuuguga

SEQ ID NO: 1302011 - RNA, 19 nt, Artificial Sequence
  Description of Artificial Sequence: Synthetic oligonucleotide
  Antisense strand to SEQ ID NO: 1302010
ucacaagucagugucaaca

SEQ ID NO: 1302012 - RNA, 19 nt, Artificial Sequence
  Description of Artificial Sequence: Synthetic oligonucleotide
  Sense strand starting at position 3522 of SEQ ID NO: 1241816
uugacacugacuugugaga

SEQ ID NO: 1302013 - RNA, 19 nt, Artificial Sequence
  Description of Artificial Sequence: Synthetic oligonucleotide
  Antisense strand to SEQ ID NO: 1302012
ucucacaagucagugucaa

SEQ ID NO: 1302014 - RNA, 19 nt, Artificial Sequence
  Description of Artificial Sequence: Synthetic oligonucleotide
  Sense strand starting at position 3529 of SEQ ID NO: 1241816
ugacuugugagauggguca

SEQ ID NO: 1302015 - RNA, 19 nt, Artificial Sequence
  Description of Artificial Sequence: Synthetic oligonucleotide
  Antisense strand to SEQ ID NO: 1302014
ugacccaucucacaaguca

SEQ ID NO: 1302016 - RNA, 19 nt, Artificial Sequence
  Description of Artificial Sequence: Synthetic oligonucleotide
  Sense strand starting at position 3531 of SEQ ID NO: 1241816
acuugugagaugggucaga

SEQ ID NO: 1302017 - RNA, 19 nt, Artificial Sequence
  Description of Artificial Sequence: Synthetic oligonucleotide
  Antisense strand to SEQ ID NO: 1302016
ucugacccaucucacaagu

SEQ ID NO: 1302018 - RNA, 19 nt, Artificial Sequence
  Description of Artificial Sequence: Synthetic oligonucleotide
  Sense strand starting at position 3596 of SEQ ID NO: 1241816
aaaggauuccuguggacau

SEQ ID NO: 1302019 - RNA, 19 nt, Artificial Sequence
  Description of Artificial Sequence: Synthetic oligonucleotide
  Antisense strand to SEQ ID NO: 1302018
auguccacaggaauccuuu

SEQ ID NO: 1302020 - RNA, 19 nt, Artificial Sequence
  Description of Artificial Sequence: Synthetic oligonucleotide
  Sense strand starting at position 3639 of SEQ ID NO: 1241816
aagagagccuaccuguuaa

SEQ ID NO: 1302021 - RNA, 19 nt, Artificial Sequence
  Description of Artificial Sequence: Synthetic oligonucleotide
  Antisense strand to SEQ ID NO: 1302020
uuaacagguaggcucucuu

SEQ ID NO: 1302022 - RNA, 19 nt, Artificial Sequence
  Description of Artificial Sequence: Synthetic oligonucleotide
  Sense strand starting at position 3670 of SEQ ID NO: 1241816
gacugauuccuguauagua

SEQ ID NO: 1302023 - RNA, 19 nt, Artificial Sequence
  Description of Artificial Sequence: Synthetic oligonucleotide
  Antisense strand to SEQ ID NO: 1302022
uacuauacaggaaucaguc

SEQ ID NO: 1302024 - RNA, 19 nt, Artificial Sequence
  Description of Artificial Sequence: Synthetic oligonucleotide
  Sense strand starting at position 3672 of SEQ ID NO: 1241816
cugauuccuguauaguaua

SEQ ID NO: 1302025 - RNA, 19 nt, Artificial Sequence
  Description of Artificial Sequence: Synthetic oligonucleotide
  Antisense strand to SEQ ID NO: 1302024
uauacuauacaggaaucag

SEQ ID NO: 1302026 - RNA, 19 nt, Artificial Sequence
  Description of Artificial Sequence: Synthetic oligonucleotide
  Sense strand starting at position 3703 of SEQ ID NO: 1241816
cuacauguagaauauguau

SEQ ID NO: 1302027 - RNA, 19 nt, Artificial Sequence
  Description of Artificial Sequence: Synthetic oligonucleotide
  Antisense strand to SEQ ID NO: 1302026
auacauauucuacauguag

SEQ ID NO: 1302028 - RNA, 19 nt, Artificial Sequence
  Description of Artificial Sequence: Synthetic oligonucleotide
  Sense strand starting at position 3706 of SEQ ID NO: 1241816
cauguagaauauguauagu

SEQ ID NO: 1302029 - RNA, 19 nt, Artificial Sequence
  Description of Artificial Sequence: Synthetic oligonucleotide
  Antisense strand to SEQ ID NO: 1302028
acuauacauauucuacaug

SEQ ID NO: 1302030 - RNA, 19 nt, Artificial Sequence
  Description of Artificial Sequence: Synthetic oligonucleotide
  Sense strand starting at position 3709 of SEQ ID NO: 1241816
guagaauauguauagugag

SEQ ID NO: 1302031 - RNA, 19 nt, Artificial Sequence
  Description of Artificial Sequence: Synthetic oligonucleotide
  Antisense strand to SEQ ID NO: 1302030
cucacuauacauauucuac

SEQ ID NO: 1302032 - RNA, 19 nt, Artificial Sequence
  Description of Artificial Sequence: Synthetic oligonucleotide
  Sense strand starting at position 3733 of SEQ ID NO: 1241816
uuggaagacuuucccuacu

SEQ ID NO: 1302033 - RNA, 19 nt, Artificial Sequence
  Description of Artificial Sequence: Synthetic oligonucleotide
  Antisense strand to SEQ ID NO: 1302032
aguagggaaagucuuccaa

SEQ ID NO: 1302034 - RNA, 19 nt, Artificial Sequence
  Description of Artificial Sequence: Synthetic oligonucleotide
  Sense strand starting at position 3735 of SEQ ID NO: 1241816
ggaagacuuucccuacuuu

SEQ ID NO: 1302035 - RNA, 19 nt, Artificial Sequence
  Description of Artificial Sequence: Synthetic oligonucleotide
  Antisense strand to SEQ ID NO: 1302034
aaaguagggaaagucuucc

SEQ ID NO: 1302036 - RNA, 19 nt, Artificial Sequence
  Description of Artificial Sequence: Synthetic oligonucleotide
  Sense strand starting at position 3760 of SEQ ID NO: 1241816
gaauccugagaauguguga

SEQ ID NO: 1302037 - RNA, 19 nt, Artificial Sequence
  Description of Artificial Sequence: Synthetic oligonucleotide
  Antisense strand to SEQ ID NO: 1302036
ucacacauucucaggauuc

SEQ ID NO: 1302038 - RNA, 19 nt, Artificial Sequence
  Description of Artificial Sequence: Synthetic oligonucleotide
  Sense strand starting at position 3763 of SEQ ID NO: 1241816
uccugagaaugugugagua

SEQ ID NO: 1302039 - RNA, 19 nt, Artificial Sequence
  Description of Artificial Sequence: Synthetic oligonucleotide
  Antisense strand to SEQ ID NO: 1302038
uacucacacauucucagga

SEQ ID NO: 1302040 - RNA, 19 nt, Artificial Sequence
  Description of Artificial Sequence: Synthetic oligonucleotide
  Sense strand starting at position 3767 of SEQ ID NO: 1241816
gagaaugugugaguaugua

SEQ ID NO: 1302041 - RNA, 19 nt, Artificial Sequence
  Description of Artificial Sequence: Synthetic oligonucleotide
  Antisense strand to SEQ ID NO: 1302040
uacauacucacacauucuc

SEQ ID NO: 1302042 - RNA, 19 nt, Artificial Sequence
  Description of Artificial Sequence: Synthetic oligonucleotide
  Sense strand starting at position 3909 of SEQ ID NO: 1241816
gagaucugaccaugacuuu

SEQ ID NO: 1302043 - RNA, 19 nt, Artificial Sequence
  Description of Artificial Sequence: Synthetic oligonucleotide
  Antisense strand to SEQ ID NO: 1302042
aaagucauggucagaucuc

SEQ ID NO: 1302044 - RNA, 19 nt, Artificial Sequence
  Description of Artificial Sequence: Synthetic oligonucleotide
  Sense strand starting at position 3915 of SEQ ID NO: 1241816
ugaccaugacuuugacagu

SEQ ID NO: 1302045 - RNA, 19 nt, Artificial Sequence
  Description of Artificial Sequence: Synthetic oligonucleotide
  Antisense strand to SEQ ID NO: 1302044
acugucaaagucaugguca

SEQ ID NO: 1302046 - RNA, 19 nt, Artificial Sequence
  Description of Artificial Sequence: Synthetic oligonucleotide
  Sense strand starting at position 12 of SEQ ID NO: 1241817
aguaaccacuuaguuaaau

SEQ ID NO: 1302047 - RNA, 19 nt, Artificial Sequence
  Description of Artificial Sequence: Synthetic oligonucleotide
  Antisense strand to SEQ ID NO: 1302046
auuuaacuaagugguuacu

SEQ ID NO: 1302048 - RNA, 19 nt, Artificial Sequence
  Description of Artificial Sequence: Synthetic oligonucleotide
  Sense strand starting at position 58 of SEQ ID NO: 1241817
ggaacuuucuaagugauca

SEQ ID NO: 1302049 - RNA, 19 nt, Artificial Sequence
  Description of Artificial Sequence: Synthetic oligonucleotide
  Antisense strand to SEQ ID NO: 1302048
ugaucacuuagaaaguucc

SEQ ID NO: 1302050 - RNA, 19 nt, Artificial Sequence
  Description of Artificial Sequence: Synthetic oligonucleotide
  Sense strand starting at position 113 of SEQ ID NO: 1241817
gggacaucuuaccuaauuc

SEQ ID NO: 1302051 - RNA, 19 nt, Artificial Sequence
  Description of Artificial Sequence: Synthetic oligonucleotide
  Antisense strand to SEQ ID NO: 1302050
gaauuagguaagauguccc

SEQ ID NO: 1302052 - RNA, 19 nt, Artificial Sequence
  Description of Artificial Sequence: Synthetic oligonucleotide
  Sense strand starting at position 286 of SEQ ID NO: 1241817
auaguaaugugccuuaaua

SEQ ID NO: 1302053 - RNA, 19 nt, Artificial Sequence
  Description of Artificial Sequence: Synthetic oligonucleotide
  Antisense strand to SEQ ID NO: 1302052
uauuaaggcacauuacuau

SEQ ID NO: 1302054 - RNA, 19 nt, Artificial Sequence
  Description of Artificial Sequence: Synthetic oligonucleotide
  Sense strand starting at position 288 of SEQ ID NO: 1241817
aguaaugugccuuaauaau

SEQ ID NO: 1302055 - RNA, 19 nt, Artificial Sequence
  Description of Artificial Sequence: Synthetic oligonucleotide
  Antisense strand to SEQ ID NO: 1302054
auuauuaaggcacauuacu

SEQ ID NO: 1302056 - RNA, 19 nt, Artificial Sequence
  Description of Artificial Sequence: Synthetic oligonucleotide
  Sense strand starting at position 1043 of SEQ ID NO: 1241817
gaaggaauguagguagguu

SEQ ID NO: 1302057 - RNA, 19 nt, Artificial Sequence
  Description of Artificial Sequence: Synthetic oligonucleotide
  Antisense strand to SEQ ID NO: 1302056
aaccuaccuacauuccuuc

SEQ ID NO: 1302058 - RNA, 19 nt, Artificial Sequence
  Description of Artificial Sequence: Synthetic oligonucleotide
  Sense strand starting at position 1065 of SEQ ID NO: 1241817
ugacuugcucgagaucaua

SEQ ID NO: 1302059 - RNA, 19 nt, Artificial Sequence
  Description of Artificial Sequence: Synthetic oligonucleotide
  Antisense strand to SEQ ID NO: 1302058
uaugaucucgagcaaguca

SEQ ID NO: 1302060 - RNA, 19 nt, Artificial Sequence
  Description of Artificial Sequence: Synthetic oligonucleotide
  Sense strand starting at position 1129 of SEQ ID NO: 1241817
agucuugaguuaccuauaa

SEQ ID NO: 1302061 - RNA, 19 nt, Artificial Sequence
  Description of Artificial Sequence: Synthetic oligonucleotide
  Antisense strand to SEQ ID NO: 1302060
uuauagguaacucaagacu

SEQ ID NO: 1302062 - RNA, 19 nt, Artificial Sequence
  Description of Artificial Sequence: Synthetic oligonucleotide
  Sense strand starting at position 1156 of SEQ ID NO: 1241817
cacagagcccuuuaguaga

SEQ ID NO: 1302063 - RNA, 19 nt, Artificial Sequence
  Description of Artificial Sequence: Synthetic oligonucleotide
  Antisense strand to SEQ ID NO: 1302062
ucuacuaaagggcucugug

SEQ ID NO: 1302064 - RNA, 19 nt, Artificial Sequence
  Description of Artificial Sequence: Synthetic oligonucleotide
  Sense strand starting at position 1172 of SEQ ID NO: 1241817
agaguuggcuuauuaucca

SEQ ID NO: 1302065 - RNA, 19 nt, Artificial Sequence
  Description of Artificial Sequence: Synthetic oligonucleotide
  Antisense strand to SEQ ID NO: 1302064
uggauaauaagccaacucu

SEQ ID NO: 1302066 - RNA, 19 nt, Artificial Sequence
  Description of Artificial Sequence: Synthetic oligonucleotide
  Sense strand starting at position 1306 of SEQ ID NO: 1241817
ucagaugaaaggcgugaau

SEQ ID NO: 1302067 - RNA, 19 nt, Artificial Sequence
  Description of Artificial Sequence: Synthetic oligonucleotide
  Antisense strand to SEQ ID NO: 1302066
auucacgccuuucaucuga

SEQ ID NO: 1302068 - RNA, 19 nt, Artificial Sequence
  Description of Artificial Sequence: Synthetic oligonucleotide
  Sense strand starting at position 1308 of SEQ ID NO: 1241817
agaugaaaggcgugaauaa

SEQ ID NO: 1302069 - RNA, 19 nt, Artificial Sequence
  Description of Artificial Sequence: Synthetic oligonucleotide
  Antisense strand to SEQ ID NO: 1302068
uuauucacgccuuucaucu

SEQ ID NO: 1302070 - RNA, 19 nt, Artificial Sequence
  Description of Artificial Sequence: Synthetic oligonucleotide
  Sense strand starting at position 1318 of SEQ ID NO: 1241817
cgugaauaacuagagugga

SEQ ID NO: 1302071 - RNA, 19 nt, Artificial Sequence
  Description of Artificial Sequence: Synthetic oligonucleotide
  Antisense strand to SEQ ID NO: 1302070
uccacucuaguuauucacg

SEQ ID NO: 1302072 - RNA, 19 nt, Artificial Sequence
  Description of Artificial Sequence: Synthetic oligonucleotide
  Sense strand starting at position 1391 of SEQ ID NO: 1241817
cagaguaaauacgcagaau

SEQ ID NO: 1302073 - RNA, 19 nt, Artificial Sequence
  Description of Artificial Sequence: Synthetic oligonucleotide
  Antisense strand to SEQ ID NO: 1302072
auucugcguauuuacucug

SEQ ID NO: 1302074 - RNA, 19 nt, Artificial Sequence
  Description of Artificial Sequence: Synthetic oligonucleotide
  Sense strand starting at position 2199 of SEQ ID NO: 1241817
caucuuaauccagguggga

SEQ ID NO: 1302075 - RNA, 19 nt, Artificial Sequence
  Description of Artificial Sequence: Synthetic oligonucleotide
  Antisense strand to SEQ ID NO: 1302074
ucccaccuggauuaagaug

SEQ ID NO: 1302076 - RNA, 19 nt, Artificial Sequence
  Description of Artificial Sequence: Synthetic oligonucleotide
  Sense strand starting at position 2201 of SEQ ID NO: 1241817
ucuuaauccaggugggaaa

SEQ ID NO: 1302077 - RNA, 19 nt, Artificial Sequence
  Description of Artificial Sequence: Synthetic oligonucleotide
  Antisense strand to SEQ ID NO: 1302076
uuucccaccuggauuaaga

SEQ ID NO: 1302078 - RNA, 19 nt, Artificial Sequence
  Description of Artificial Sequence: Synthetic oligonucleotide
  Sense strand starting at position 2393 of SEQ ID NO: 1241817
ugacuuacccuguagguua

SEQ ID NO: 1302079 - RNA, 19 nt, Artificial Sequence
  Description of Artificial Sequence: Synthetic oligonucleotide
  Antisense strand to SEQ ID NO: 1302078
uaaccuacaggguaaguca

SEQ ID NO: 1302080 - RNA, 19 nt, Artificial Sequence
  Description of Artificial Sequence: Synthetic oligonucleotide
  Sense strand starting at position 2427 of SEQ ID NO: 1241817
acuuucugccucugggaaa

SEQ ID NO: 1302081 - RNA, 19 nt, Artificial Sequence
  Description of Artificial Sequence: Synthetic oligonucleotide
  Antisense strand to SEQ ID NO: 1302080
uuucccagaggcagaaagu

SEQ ID NO: 1302082 - RNA, 19 nt, Artificial Sequence
  Description of Artificial Sequence: Synthetic oligonucleotide
  Sense strand starting at position 2655 of SEQ ID NO: 1241817
cuaaauguuccucauugga

SEQ ID NO: 1302083 - RNA, 19 nt, Artificial Sequence
  Description of Artificial Sequence: Synthetic oligonucleotide
  Antisense strand to SEQ ID NO: 1302082
uccaaugaggaacauuuag

SEQ ID NO: 1302084 - RNA, 19 nt, Artificial Sequence
  Description of Artificial Sequence: Synthetic oligonucleotide
  Sense strand starting at position 2657 of SEQ ID NO: 1241817
aaauguuccucauuggaga

SEQ ID NO: 1302085 - RNA, 19 nt, Artificial Sequence
  Description of Artificial Sequence: Synthetic oligonucleotide
  Antisense strand to SEQ ID NO: 1302084
ucuccaaugaggaacauuu

SEQ ID NO: 1302086 - RNA, 19 nt, Artificial Sequence
  Description of Artificial Sequence: Synthetic oligonucleotide
  Sense strand starting at position 2658 of SEQ ID NO: 1241817
aauguuccucauuggagaa

SEQ ID NO: 1302087 - RNA, 19 nt, Artificial Sequence
  Description of Artificial Sequence: Synthetic oligonucleotide
  Antisense strand to SEQ ID NO: 1302086
uucuccaaugaggaacauu

SEQ ID NO: 1302088 - RNA, 19 nt, Artificial Sequence
  Description of Artificial Sequence: Synthetic oligonucleotide
  Sense strand starting at position 2772 of SEQ ID NO: 1241817
agucuuguccaauacagcu

SEQ ID NO: 1302089 - RNA, 19 nt, Artificial Sequence
  Description of Artificial Sequence: Synthetic oligonucleotide
  Antisense strand to SEQ ID NO: 1302088
agcuguauuggacaagacu

SEQ ID NO: 1302090 - RNA, 19 nt, Artificial Sequence
  Description of Artificial Sequence: Synthetic oligonucleotide
  Sense strand starting at position 2806 of SEQ ID NO: 1241817
gcacucagauguuucugaa

SEQ ID NO: 1302091 - RNA, 19 nt, Artificial Sequence
  Description of Artificial Sequence: Synthetic oligonucleotide
  Antisense strand to SEQ ID NO: 1302090
uucagaaacaucugagugc

SEQ ID NO: 1302092 - RNA, 19 nt, Artificial Sequence
  Description of Artificial Sequence: Synthetic oligonucleotide
  Sense strand starting at position 2845 of SEQ ID NO: 1241817
ucacauuuaugugagguaa

SEQ ID NO: 1302093 - RNA, 19 nt, Artificial Sequence
  Description of Artificial Sequence: Synthetic oligonucleotide
  Antisense strand to SEQ ID NO: 1302092
uuaccucacauaaauguga

SEQ ID NO: 1302094 - RNA, 19 nt, Artificial Sequence
  Description of Artificial Sequence: Synthetic oligonucleotide
  Sense strand starting at position 2877 of SEQ ID NO: 1241817
ccacauauaucaucgguuu

SEQ ID NO: 1302095 - RNA, 19 nt, Artificial Sequence
  Description of Artificial Sequence: Synthetic oligonucleotide
  Antisense strand to SEQ ID NO: 1302094
aaaccgaugauauaugugg

SEQ ID NO: 1302096 - RNA, 19 nt, Artificial Sequence
  Description of Artificial Sequence: Synthetic oligonucleotide
  Sense strand starting at position 2924 of SEQ ID NO: 1241817
ugacuaagucuugaaguca

SEQ ID NO: 1302097 - RNA, 19 nt, Artificial Sequence
  Description of Artificial Sequence: Synthetic oligonucleotide
  Antisense strand to SEQ ID NO: 1302096
ugacuucaagacuuaguca

SEQ ID NO: 1302098 - RNA, 19 nt, Artificial Sequence
  Description of Artificial Sequence: Synthetic oligonucleotide
  Sense strand starting at position 2962 of SEQ ID NO: 1241817
ucaggacugucacucaguu

SEQ ID NO: 1302099 - RNA, 19 nt, Artificial Sequence
  Description of Artificial Sequence: Synthetic oligonucleotide
  Antisense strand to SEQ ID NO: 1302098
aacugagugacaguccuga

SEQ ID NO: 1302100 - RNA, 19 nt, Artificial Sequence
  Description of Artificial Sequence: Synthetic oligonucleotide
  Sense strand starting at position 2991 of SEQ ID NO: 1241817
gggucuuacucgucaaagg

SEQ ID NO: 1302101 - RNA, 19 nt, Artificial Sequence
  Description of Artificial Sequence: Synthetic oligonucleotide
  Antisense strand to SEQ ID NO: 1302100
ccuuugacgaguaagaccc

SEQ ID NO: 1302102 - RNA, 19 nt, Artificial Sequence
  Description of Artificial Sequence: Synthetic oligonucleotide
  Sense strand starting at position 3184 of SEQ ID NO: 1241817
cagcaaugaguuuagccaa

SEQ ID NO: 1302103 - RNA, 19 nt, Artificial Sequence
  Description of Artificial Sequence: Synthetic oligonucleotide
  Antisense strand to SEQ ID NO: 1302102
uuggcuaaacucauugcug

SEQ ID NO: 1302104 - RNA, 19 nt, Artificial Sequence
  Description of Artificial Sequence: Synthetic oligonucleotide
  Sense strand starting at position 3357 of SEQ ID NO: 1241817
gaacuauucgcagagcuca

SEQ ID NO: 1302105 - RNA, 19 nt, Artificial Sequence
  Description of Artificial Sequence: Synthetic oligonucleotide
  Antisense strand to SEQ ID NO: 1302104
ugagcucugcgaauaguuc

SEQ ID NO: 1302106 - RNA, 19 nt, Artificial Sequence
  Description of Artificial Sequence: Synthetic oligonucleotide
  Sense strand starting at position 3495 of SEQ ID NO: 1241817
aucuuaucccuguggaguc

SEQ ID NO: 1302107 - RNA, 19 nt, Artificial Sequence
  Description of Artificial Sequence: Synthetic oligonucleotide
  Antisense strand to SEQ ID NO: 1302106
gacuccacagggauaagau

SEQ ID NO: 1302108 - RNA, 19 nt, Artificial Sequence
  Description of Artificial Sequence: Synthetic oligonucleotide
  Sense strand starting at position 3505 of SEQ ID NO: 1241817
uguggagucauugacguca

SEQ ID NO: 1302109 - RNA, 19 nt, Artificial Sequence
  Description of Artificial Sequence: Synthetic oligonucleotide
  Antisense strand to SEQ ID NO: 1302108
ugacgucaaugacuccaca

SEQ ID NO: 1302110 - RNA, 19 nt, Artificial Sequence
  Description of Artificial Sequence: Synthetic oligonucleotide
  Sense strand starting at position 3544 of SEQ ID NO: 1241817
cagccaugauaugugacaa

SEQ ID NO: 1302111 - RNA, 19 nt, Artificial Sequence
  Description of Artificial Sequence: Synthetic oligonucleotide
  Antisense strand to SEQ ID NO: 1302110
uugucacauaucauggcug

SEQ ID NO: 1302112 - RNA, 19 nt, Artificial Sequence
  Description of Artificial Sequence: Synthetic oligonucleotide
  Sense strand starting at position 3599 of SEQ ID NO: 1241817
aggcuuugauguccagagu

SEQ ID NO: 1302113 - RNA, 19 nt, Artificial Sequence
  Description of Artificial Sequence: Synthetic oligonucleotide
  Antisense strand to SEQ ID NO: 1302112
acucuggacaucaaagccu

SEQ ID NO: 1302114 - RNA, 19 nt, Artificial Sequence
  Description of Artificial Sequence: Synthetic oligonucleotide
  Sense strand starting at position 3600 of SEQ ID NO: 1241817
ggcuuugauguccagaguu

SEQ ID NO: 1302115 - RNA, 19 nt, Artificial Sequence
  Description of Artificial Sequence: Synthetic oligonucleotide
  Antisense strand to SEQ ID NO: 1302114
aacucuggacaucaaagcc

SEQ ID NO: 1302116 - RNA, 19 nt, Artificial Sequence
  Description of Artificial Sequence: Synthetic oligonucleotide
  Sense strand starting at position 3645 of SEQ ID NO: 1241817
ccuugugguugaccauuaa

SEQ ID NO: 1302117 - RNA, 19 nt, Artificial Sequence
  Description of Artificial Sequence: Synthetic oligonucleotide
  Antisense strand to SEQ ID NO: 1302116
uuaauggucaaccacaagg

SEQ ID NO: 1302118 - RNA, 19 nt, Artificial Sequence
  Description of Artificial Sequence: Synthetic oligonucleotide
  Sense strand starting at position 3649 of SEQ ID NO: 1241817
gugguugaccauuaaucuc

SEQ ID NO: 1302119 - RNA, 19 nt, Artificial Sequence
  Description of Artificial Sequence: Synthetic oligonucleotide
  Antisense strand to SEQ ID NO: 1302118
gagauuaauggucaaccac

SEQ ID NO: 1302120 - RNA, 19 nt, Artificial Sequence
  Description of Artificial Sequence: Synthetic oligonucleotide
  Sense strand starting at position 3705 of SEQ ID NO: 1241817
agaggucugagcugauaca

SEQ ID NO: 1302121 - RNA, 19 nt, Artificial Sequence
  Description of Artificial Sequence: Synthetic oligonucleotide
  Antisense strand to SEQ ID NO: 1302120
uguaucagcucagaccucu

SEQ ID NO: 1302122 - RNA, 19 nt, Artificial Sequence
  Description of Artificial Sequence: Synthetic oligonucleotide
  Sense strand starting at position 3717 of SEQ ID NO: 1241817
ugauacagcguggaucaaa

SEQ ID NO: 1302123 - RNA, 19 nt, Artificial Sequence
  Description of Artificial Sequence: Synthetic oligonucleotide
  Antisense strand to SEQ ID NO: 1302122
uuugauccacgcuguauca

SEQ ID NO: 1302124 - RNA, 19 nt, Artificial Sequence
  Description of Artificial Sequence: Synthetic oligonucleotide
  Sense strand starting at position 3982 of SEQ ID NO: 1241817
uguugacacugacuuguga

SEQ ID NO: 1302125 - RNA, 19 nt, Artificial Sequence
  Description of Artificial Sequence: Synthetic oligonucleotide
  Antisense strand to SEQ ID NO: 1302124
ucacaagucagugucaaca

SEQ ID NO: 1302126 - RNA, 19 nt, Artificial Sequence
  Description of Artificial Sequence: Synthetic oligonucleotide
  Sense strand starting at position 129 of SEQ ID NO: 1241818
uaaguacuucccuguugga

SEQ ID NO: 1302127 - RNA, 19 nt, Artificial Sequence
  Description of Artificial Sequence: Synthetic oligonucleotide
  Antisense strand to SEQ ID NO: 1302126
uccaacagggaaguacuua

SEQ ID NO: 1302128 - RNA, 19 nt, Artificial Sequence
  Description of Artificial Sequence: Synthetic oligonucleotide
  Sense strand starting at position 172 of SEQ ID NO: 1241818
ggagucacuuaggaacaua

SEQ ID NO: 1302129 - RNA, 19 nt, Artificial Sequence
  Description of Artificial Sequence: Synthetic oligonucleotide
  Antisense strand to SEQ ID NO: 1302128
uauguuccuaagugacucc

SEQ ID NO: 1302130 - RNA, 19 nt, Artificial Sequence
  Description of Artificial Sequence: Synthetic oligonucleotide
  Sense strand starting at position 182 of SEQ ID NO: 1241818
aggaacauaugcgugagua

SEQ ID NO: 1302131 - RNA, 19 nt, Artificial Sequence
  Description of Artificial Sequence: Synthetic oligonucleotide
  Antisense strand to SEQ ID NO: 1302130
uacucacgcauauguuccu

SEQ ID NO: 1302132 - RNA, 19 nt, Artificial Sequence
  Description of Artificial Sequence: Synthetic oligonucleotide
  Sense strand starting at position 183 of SEQ ID NO: 1241818
ggaacauaugcgugaguac

SEQ ID NO: 1302133 - RNA, 19 nt, Artificial Sequence
  Description of Artificial Sequence: Synthetic oligonucleotide
  Antisense strand to SEQ ID NO: 1302132
guacucacgcauauguucc

SEQ ID NO: 1302134 - RNA, 19 nt, Artificial Sequence
  Description of Artificial Sequence: Synthetic oligonucleotide
  Sense strand starting at position 186 of SEQ ID NO: 1241818
acauaugcgugaguacgaa

SEQ ID NO: 1302135 - RNA, 19 nt, Artificial Sequence
  Description of Artificial Sequence: Synthetic oligonucleotide
  Antisense strand to SEQ ID NO: 1302134
uucguacucacgcauaugu

SEQ ID NO: 1302136 - RNA, 19 nt, Artificial Sequence
  Description of Artificial Sequence: Synthetic oligonucleotide
  Sense strand starting at position 216 of SEQ ID NO: 1241818
aaucauuaacguuggugau

SEQ ID NO: 1302137 - RNA, 19 nt, Artificial Sequence
  Description of Artificial Sequence: Synthetic oligonucleotide
  Antisense strand to SEQ ID NO: 1302136
aucaccaacguuaaugauu

SEQ ID NO: 1302138 - RNA, 19 nt, Artificial Sequence
  Description of Artificial Sequence: Synthetic oligonucleotide
  Sense strand starting at position 218 of SEQ ID NO: 1241818
ucauuaacguuggugaugu

SEQ ID NO: 1302139 - RNA, 19 nt, Artificial Sequence
  Description of Artificial Sequence: Synthetic oligonucleotide
  Antisense strand to SEQ ID NO: 1302138
acaucaccaacguuaauga

SEQ ID NO: 1302140 - RNA, 19 nt, Artificial Sequence
  Description of Artificial Sequence: Synthetic oligonucleotide
  Sense strand starting at position 228 of SEQ ID NO: 1241818
uggugaugugcauaagcaa

SEQ ID NO: 1302141 - RNA, 19 nt, Artificial Sequence
  Description of Artificial Sequence: Synthetic oligonucleotide
  Antisense strand to SEQ ID NO: 1302140
uugcuuaugcacaucacca

SEQ ID NO: 1302142 - RNA, 19 nt, Artificial Sequence
  Description of Artificial Sequence: Synthetic oligonucleotide
  Sense strand starting at position 274 of SEQ ID NO: 1241818
gguccauggcgacaauaau

SEQ ID NO: 1302143 - RNA, 19 nt, Artificial Sequence
  Description of Artificial Sequence: Synthetic oligonucleotide
  Antisense strand to SEQ ID NO: 1302142
auuauugucgccauggacc

SEQ ID NO: 1302144 - RNA, 19 nt, Artificial Sequence
  Description of Artificial Sequence: Synthetic oligonucleotide
  Sense strand starting at position 284 of SEQ ID NO: 1241818
gacaauaaugcccggugua

SEQ ID NO: 1302145 - RNA, 19 nt, Artificial Sequence
  Description of Artificial Sequence: Synthetic oligonucleotide
  Antisense strand to SEQ ID NO: 1302144
uacaccgggcauuauuguc

SEQ ID NO: 1302146 - RNA, 19 nt, Artificial Sequence
  Description of Artificial Sequence: Synthetic oligonucleotide
  Sense strand starting at position 287 of SEQ ID NO: 1241818
aauaaugcccgguguacuu

SEQ ID NO: 1302147 - RNA, 19 nt, Artificial Sequence
  Description of Artificial Sequence: Synthetic oligonucleotide
  Antisense strand to SEQ ID NO: 1302146
aaguacaccgggcauuauu

SEQ ID NO: 1302148 - RNA, 19 nt, Artificial Sequence
  Description of Artificial Sequence: Synthetic oligonucleotide
  Sense strand starting at position 347 of SEQ ID NO: 1241818
uagacauggccucagguua

SEQ ID NO: 1302149 - RNA, 19 nt, Artificial Sequence
  Description of Artificial Sequence: Synthetic oligonucleotide
  Antisense strand to SEQ ID NO: 1302148
uaaccugaggccaugucua

SEQ ID NO: 1302150 - RNA, 19 nt, Artificial Sequence
  Description of Artificial Sequence: Synthetic oligonucleotide
  Sense strand starting at position 490 of SEQ ID NO: 1241818
uugguuugcuuguuauaaa

SEQ ID NO: 1302151 - RNA, 19 nt, Artificial Sequence
  Description of Artificial Sequence: Synthetic oligonucleotide
  Antisense strand to SEQ ID NO: 1302150
uuuauaacaagcaaaccaa

SEQ ID NO: 1302152 - RNA, 19 nt, Artificial Sequence
  Description of Artificial Sequence: Synthetic oligonucleotide
  Sense strand starting at position 586 of SEQ ID NO: 1241818
uccuucugugaaugcuaau

SEQ ID NO: 1302153 - RNA, 19 nt, Artificial Sequence
  Description of Artificial Sequence: Synthetic oligonucleotide
  Antisense strand to SEQ ID NO: 1302152
auuagcauucacagaagga

SEQ ID NO: 1302154 - RNA, 19 nt, Artificial Sequence
  Description of Artificial Sequence: Synthetic oligonucleotide
  Sense strand starting at position 589 of SEQ ID NO: 1241818
uucugugaaugcuaauuua

SEQ ID NO: 1302155 - RNA, 19 nt, Artificial Sequence
  Description of Artificial Sequence: Synthetic oligonucleotide
  Antisense strand to SEQ ID NO: 1302154
uaaauuagcauucacagaa

SEQ ID NO: 1302156 - RNA, 19 nt, Artificial Sequence
  Description of Artificial Sequence: Synthetic oligonucleotide
  Sense strand starting at position 597 of SEQ ID NO: 1241818
augcuaauuuaaggucaga

SEQ ID NO: 1302157 - RNA, 19 nt, Artificial Sequence
  Description of Artificial Sequence: Synthetic oligonucleotide
  Antisense strand to SEQ ID NO: 1302156
ucugaccuuaaauuagcau

SEQ ID NO: 1302158 - RNA, 19 nt, Artificial Sequence
  Description of Artificial Sequence: Synthetic oligonucleotide
  Sense strand starting at position 949 of SEQ ID NO: 1241818
cuuucugcccgguacuuaa

SEQ ID NO: 1302159 - RNA, 19 nt, Artificial Sequence
  Description of Artificial Sequence: Synthetic oligonucleotide
  Antisense strand to SEQ ID NO: 1302158
uuaaguaccgggcagaaag

SEQ ID NO: 1302160 - RNA, 19 nt, Artificial Sequence
  Description of Artificial Sequence: Synthetic oligonucleotide
  Sense strand starting at position 2610 of SEQ ID NO: 1241818
guuggaaugugcccgaaau

SEQ ID NO: 1302161 - RNA, 19 nt, Artificial Sequence
  Description of Artificial Sequence: Synthetic oligonucleotide
  Antisense strand to SEQ ID NO: 1302160
auuucgggcacauuccaac

SEQ ID NO: 1302162 - RNA, 19 nt, Artificial Sequence
  Description of Artificial Sequence: Synthetic oligonucleotide
  Sense strand starting at position 2611 of SEQ ID NO: 1241818
uuggaaugugcccgaaaua

SEQ ID NO: 1302163 - RNA, 19 nt, Artificial Sequence
  Description of Artificial Sequence: Synthetic oligonucleotide
  Antisense strand to SEQ ID NO: 1302162
uauuucgggcacauuccaa

SEQ ID NO: 1302164 - RNA, 19 nt, Artificial Sequence
  Description of Artificial Sequence: Synthetic oligonucleotide
  Sense strand starting at position 2612 of SEQ ID NO: 1241818
uggaaugugcccgaaauau

SEQ ID NO: 1302165 - RNA, 19 nt, Artificial Sequence
  Description of Artificial Sequence: Synthetic oligonucleotide
  Antisense strand to SEQ ID NO: 1302164
auauuucgggcacauucca

SEQ ID NO: 1302166 - RNA, 19 nt, Artificial Sequence
  Description of Artificial Sequence: Synthetic oligonucleotide
  Sense strand starting at position 2620 of SEQ ID NO: 1241818
gcccgaaauauuuggcucu

SEQ ID NO: 1302167 - RNA, 19 nt, Artificial Sequence
  Description of Artificial Sequence: Synthetic oligonucleotide
  Antisense strand to SEQ ID NO: 1302166
agagccaaauauuucgggc

SEQ ID NO: 1302168 - RNA, 19 nt, Artificial Sequence
  Description of Artificial Sequence: Synthetic oligonucleotide
  Sense strand starting at position 2623 of SEQ ID NO: 1241818
cgaaauauuuggcucucgu

SEQ ID NO: 1302169 - RNA, 19 nt, Artificial Sequence
  Description of Artificial Sequence: Synthetic oligonucleotide
  Antisense strand to SEQ ID NO: 1302168
acgagagccaaauauuucg

SEQ ID NO: 1302170 - RNA, 19 nt, Artificial Sequence
  Description of Artificial Sequence: Synthetic oligonucleotide
  Sense strand starting at position 2640 of SEQ ID NO: 1241818
gugugugcugcuuucugaa

SEQ ID NO: 1302171 - RNA, 19 nt, Artificial Sequence
  Description of Artificial Sequence: Synthetic oligonucleotide
  Antisense strand to SEQ ID NO: 1302170
uucagaaagcagcacacac

SEQ ID NO: 1302172 - RNA, 19 nt, Artificial Sequence
  Description of Artificial Sequence: Synthetic oligonucleotide
  Sense strand starting at position 2720 of SEQ ID NO: 1241818
ucaucaguguguuucuuau

SEQ ID NO: 1302173 - RNA, 19 nt, Artificial Sequence
  Description of Artificial Sequence: Synthetic oligonucleotide
  Antisense strand to SEQ ID NO: 1302172
auaagaaacacacugauga

SEQ ID NO: 1302174 - RNA, 19 nt, Artificial Sequence
  Description of Artificial Sequence: Synthetic oligonucleotide
  Sense strand starting at position 2722 of SEQ ID NO: 1241818
aucaguguguuucuuauua

SEQ ID NO: 1302175 - RNA, 19 nt, Artificial Sequence
  Description of Artificial Sequence: Synthetic oligonucleotide
  Antisense strand to SEQ ID NO: 1302174
uaauaagaaacacacugau

SEQ ID NO: 1302176 - RNA, 19 nt, Artificial Sequence
  Description of Artificial Sequence: Synthetic oligonucleotide
  Sense strand starting at position 2726 of SEQ ID NO: 1241818
guguguuucuuauuaggag

SEQ ID NO: 1302177 - RNA, 19 nt, Artificial Sequence
  Description of Artificial Sequence: Synthetic oligonucleotide
  Antisense strand to SEQ ID NO: 1302176
cuccuaauaagaaacacac

SEQ ID NO: 1302178 - RNA, 19 nt, Artificial Sequence
  Description of Artificial Sequence: Synthetic oligonucleotide
  Sense strand starting at position 2740 of SEQ ID NO: 1241818
aggagaggcuguuucugua

SEQ ID NO: 1302179 - RNA, 19 nt, Artificial Sequence
  Description of Artificial Sequence: Synthetic oligonucleotide
  Antisense strand to SEQ ID NO: 1302178
uacagaaacagccucuccu

SEQ ID NO: 1302180 - RNA, 19 nt, Artificial Sequence
  Description of Artificial Sequence: Synthetic oligonucleotide
  Sense strand starting at position 2840 of SEQ ID NO: 1241818
acaggaggguacuguauuu

SEQ ID NO: 1302181 - RNA, 19 nt, Artificial Sequence
  Description of Artificial Sequence: Synthetic oligonucleotide
  Antisense strand to SEQ ID NO: 1302180
aaauacaguacccuccugu

SEQ ID NO: 1302182 - RNA, 19 nt, Artificial Sequence
  Description of Artificial Sequence: Synthetic oligonucleotide
  Sense strand starting at position 2868 of SEQ ID NO: 1241818
ccauguugagguugucauu

SEQ ID NO: 1302183 - RNA, 19 nt, Artificial Sequence
  Description of Artificial Sequence: Synthetic oligonucleotide
  Antisense strand to SEQ ID NO: 1302182
aaugacaaccucaacaugg

SEQ ID NO: 1302184 - RNA, 19 nt, Artificial Sequence
  Description of Artificial Sequence: Synthetic oligonucleotide
  Sense strand starting at position 2929 of SEQ ID NO: 1241818
cuagguaucguuuacagug

SEQ ID NO: 1302185 - RNA, 19 nt, Artificial Sequence
  Description of Artificial Sequence: Synthetic oligonucleotide
  Antisense strand to SEQ ID NO: 1302184
cacuguaaacgauaccuag

SEQ ID NO: 1302186 - RNA, 19 nt, Artificial Sequence
  Description of Artificial Sequence: Synthetic oligonucleotide
  Sense strand starting at position 2986 of SEQ ID NO: 1241818
aguggucuuagucaugaac

SEQ ID NO: 1302187 - RNA, 19 nt, Artificial Sequence
  Description of Artificial Sequence: Synthetic oligonucleotide
  Antisense strand to SEQ ID NO: 1302186
guucaugacuaagaccacu

SEQ ID NO: 1302188 - RNA, 19 nt, Artificial Sequence
  Description of Artificial Sequence: Synthetic oligonucleotide
  Sense strand starting at position 2989 of SEQ ID NO: 1241818
ggucuuagucaugaacgau

SEQ ID NO: 1302189 - RNA, 19 nt, Artificial Sequence
  Description of Artificial Sequence: Synthetic oligonucleotide
  Antisense strand to SEQ ID NO: 1302188
aucguucaugacuaagacc

SEQ ID NO: 1302190 - RNA, 19 nt, Artificial Sequence
  Description of Artificial Sequence: Synthetic oligonucleotide
  Sense strand starting at position 3028 of SEQ ID NO: 1241818
acuguaaucuuggcagcca

SEQ ID NO: 1302191 - RNA, 19 nt, Artificial Sequence
  Description of Artificial Sequence: Synthetic oligonucleotide
  Antisense strand to SEQ ID NO: 1302190
uggcugccaagauuacagu

SEQ ID NO: 1302192 - RNA, 19 nt, Artificial Sequence
  Description of Artificial Sequence: Synthetic oligonucleotide
  Sense strand starting at position 3070 of SEQ ID NO: 1241818
aacucucggugccuugaaa

SEQ ID NO: 1302193 - RNA, 19 nt, Artificial Sequence
  Description of Artificial Sequence: Synthetic oligonucleotide
  Antisense strand to SEQ ID NO: 1302192
uuucaaggcaccgagaguu

SEQ ID NO: 1302194 - RNA, 19 nt, Artificial Sequence
  Description of Artificial Sequence: Synthetic oligonucleotide
  Sense strand starting at position 3298 of SEQ ID NO: 1241818
ugacuuuccacaggacgaa

SEQ ID NO: 1302195 - RNA, 19 nt, Artificial Sequence
  Description of Artificial Sequence: Synthetic oligonucleotide
  Antisense strand to SEQ ID NO: 1302194
uucguccuguggaaaguca

SEQ ID NO: 1302196 - RNA, 19 nt, Artificial Sequence
  Description of Artificial Sequence: Synthetic oligonucleotide
  Sense strand starting at position 3322 of SEQ ID NO: 1241818
ugagcaccgucaucuaaau

SEQ ID NO: 1302197 - RNA, 19 nt, Artificial Sequence
  Description of Artificial Sequence: Synthetic oligonucleotide
  Antisense strand to SEQ ID NO: 1302196
auuuagaugacggugcuca

SEQ ID NO: 1302198 - RNA, 19 nt, Artificial Sequence
  Description of Artificial Sequence: Synthetic oligonucleotide
  Sense strand starting at position 3337 of SEQ ID NO: 1241818
aaaugaauugccgauacug

SEQ ID NO: 1302199 - RNA, 19 nt, Artificial Sequence
  Description of Artificial Sequence: Synthetic oligonucleotide
  Antisense strand to SEQ ID NO: 1302198
caguaucggcaauucauuu

SEQ ID NO: 1302200 - RNA, 19 nt, Artificial Sequence
  Description of Artificial Sequence: Synthetic oligonucleotide
  Sense strand starting at position 3339 of SEQ ID NO: 1241818
augaauugccgauacugau

SEQ ID NO: 1302201 - RNA, 19 nt, Artificial Sequence
  Description of Artificial Sequence: Synthetic oligonucleotide
  Antisense strand to SEQ ID NO: 1302200
aucaguaucggcaauucau

SEQ ID NO: 1302202 - RNA, 19 nt, Artificial Sequence
  Description of Artificial Sequence: Synthetic oligonucleotide
  Sense strand starting at position 3610 of SEQ ID NO: 1241818
gccuguccagauugcauau

SEQ ID NO: 1302203 - RNA, 19 nt, Artificial Sequence
  Description of Artificial Sequence: Synthetic oligonucleotide
  Antisense strand to SEQ ID NO: 1302202
auaugcaaucuggacaggc

SEQ ID NO: 1302204 - RNA, 19 nt, Artificial Sequence
  Description of Artificial Sequence: Synthetic oligonucleotide
  Sense strand starting at position 3973 of SEQ ID NO: 1241818
cgagaaucacuugaagcua

SEQ ID NO: 1302205 - RNA, 19 nt, Artificial Sequence
  Description of Artificial Sequence: Synthetic oligonucleotide
  Antisense strand to SEQ ID NO: 1302204
uagcuucaagugauucucg

SEQ ID NO: 1302206 - RNA, 19 nt, Artificial Sequence
  Description of Artificial Sequence: Synthetic oligonucleotide
  Sense strand starting at position 36 of SEQ ID NO: 1241819
caaacuaagcuuggaguga

SEQ ID NO: 1302207 - RNA, 19 nt, Artificial Sequence
  Description of Artificial Sequence: Synthetic oligonucleotide
  Antisense strand to SEQ ID NO: 1302206
ucacuccaagcuuaguuug

SEQ ID NO: 1302208 - RNA, 19 nt, Artificial Sequence
  Description of Artificial Sequence: Synthetic oligonucleotide
  Sense strand starting at position 40 of SEQ ID NO: 1241819
cuaagcuuggagugaaaua

SEQ ID NO: 1302209 - RNA, 19 nt, Artificial Sequence
  Description of Artificial Sequence: Synthetic oligonucleotide
  Antisense strand to SEQ ID NO: 1302208
uauuucacuccaagcuuag

SEQ ID NO: 1302210 - RNA, 19 nt, Artificial Sequence
  Description of Artificial Sequence: Synthetic oligonucleotide
  Sense strand starting at position 63 of SEQ ID NO: 1241819
augcacuggcuagaucuaa

SEQ ID NO: 1302211 - RNA, 19 nt, Artificial Sequence
  Description of Artificial Sequence: Synthetic oligonucleotide
  Antisense strand to SEQ ID NO: 1302210
uuagaucuagccagugcau

SEQ ID NO: 1302212 - RNA, 19 nt, Artificial Sequence
  Description of Artificial Sequence: Synthetic oligonucleotide
  Sense strand starting at position 282 of SEQ ID NO: 1241819
auggacugcuuucugacua

SEQ ID NO: 1302213 - RNA, 19 nt, Artificial Sequence
  Description of Artificial Sequence: Synthetic oligonucleotide
  Antisense strand to SEQ ID NO: 1302212
uagucagaaagcaguccau

SEQ ID NO: 1302214 - RNA, 19 nt, Artificial Sequence
  Description of Artificial Sequence: Synthetic oligonucleotide
  Sense strand starting at position 286 of SEQ ID NO: 1241819
acugcuuucugacuagaug

SEQ ID NO: 1302215 - RNA, 19 nt, Artificial Sequence
  Description of Artificial Sequence: Synthetic oligonucleotide
  Antisense strand to SEQ ID NO: 1302214
caucuagucagaaagcagu

SEQ ID NO: 1302216 - RNA, 19 nt, Artificial Sequence
  Description of Artificial Sequence: Synthetic oligonucleotide
  Sense strand starting at position 287 of SEQ ID NO: 1241819
cugcuuucugacuagaugu

SEQ ID NO: 1302217 - RNA, 19 nt, Artificial Sequence
  Description of Artificial Sequence: Synthetic oligonucleotide
  Antisense strand to SEQ ID NO: 1302216
acaucuagucagaaagcag

SEQ ID NO: 1302218 - RNA, 19 nt, Artificial Sequence
  Description of Artificial Sequence: Synthetic oligonucleotide
  Sense strand starting at position 332 of SEQ ID NO: 1241819
acagcaagguguguuaaga

SEQ ID NO: 1302219 - RNA, 19 nt, Artificial Sequence
  Description of Artificial Sequence: Synthetic oligonucleotide
  Antisense strand to SEQ ID NO: 1302218
ucuuaacacaccuugcugu

SEQ ID NO: 1302220 - RNA, 19 nt, Artificial Sequence
  Description of Artificial Sequence: Synthetic oligonucleotide
  Sense strand starting at position 375 of SEQ ID NO: 1241819
agauuauuauguucucucu

SEQ ID NO: 1302221 - RNA, 19 nt, Artificial Sequence
  Description of Artificial Sequence: Synthetic oligonucleotide
  Antisense strand to SEQ ID NO: 1302220
agagagaacauaauaaucu

SEQ ID NO: 1302222 - RNA, 19 nt, Artificial Sequence
  Description of Artificial Sequence: Synthetic oligonucleotide
  Sense strand starting at position 389 of SEQ ID NO: 1241819
ucucuauuccggcaaauga

SEQ ID NO: 1302223 - RNA, 19 nt, Artificial Sequence
  Description of Artificial Sequence: Synthetic oligonucleotide
  Antisense strand to SEQ ID NO: 1302222
ucauuugccggaauagaga

SEQ ID NO: 1302224 - RNA, 19 nt, Artificial Sequence
  Description of Artificial Sequence: Synthetic oligonucleotide
  Sense strand starting at position 537 of SEQ ID NO: 1241819
gagccuguucuuggaacau

SEQ ID NO: 1302225 - RNA, 19 nt, Artificial Sequence
  Description of Artificial Sequence: Synthetic oligonucleotide
  Antisense strand to SEQ ID NO: 1302224
auguuccaagaacaggcuc

SEQ ID NO: 1302226 - RNA, 19 nt, Artificial Sequence
  Description of Artificial Sequence: Synthetic oligonucleotide
  Sense strand starting at position 573 of SEQ ID NO: 1241819
cuggaaugcaggugaaacu

SEQ ID NO: 1302227 - RNA, 19 nt, Artificial Sequence
  Description of Artificial Sequence: Synthetic oligonucleotide
  Antisense strand to SEQ ID NO: 1302226
aguuucaccugcauuccag

SEQ ID NO: 1302228 - RNA, 19 nt, Artificial Sequence
  Description of Artificial Sequence: Synthetic oligonucleotide
  Sense strand starting at position 619 of SEQ ID NO: 1241819
aagagagauugggaagauu

SEQ ID NO: 1302229 - RNA, 19 nt, Artificial Sequence
  Description of Artificial Sequence: Synthetic oligonucleotide
  Antisense strand to SEQ ID NO: 1302228
aaucuucccaaucucucuu

SEQ ID NO: 1302230 - RNA, 19 nt, Artificial Sequence
  Description of Artificial Sequence: Synthetic oligonucleotide
  Sense strand starting at position 634 of SEQ ID NO: 1241819
gauuaagagagcgguccau

SEQ ID NO: 1302231 - RNA, 19 nt, Artificial Sequence
  Description of Artificial Sequence: Synthetic oligonucleotide
  Antisense strand to SEQ ID NO: 1302230
auggaccgcucucuuaauc

SEQ ID NO: 1302232 - RNA, 19 nt, Artificial Sequence
  Description of Artificial Sequence: Synthetic oligonucleotide
  Sense strand starting at position 846 of SEQ ID NO: 1241819
agugcauuuguggguagag

SEQ ID NO: 1302233 - RNA, 19 nt, Artificial Sequence
  Description of Artificial Sequence: Synthetic oligonucleotide
  Antisense strand to SEQ ID NO: 1302232
cucuacccacaaaugcacu

SEQ ID NO: 1302234 - RNA, 19 nt, Artificial Sequence
  Description of Artificial Sequence: Synthetic oligonucleotide
  Sense strand starting at position 847 of SEQ ID NO: 1241819
gugcauuuguggguagaga

SEQ ID NO: 1302235 - RNA, 19 nt, Artificial Sequence
  Description of Artificial Sequence: Synthetic oligonucleotide
  Antisense strand to SEQ ID NO: 1302234
ucucuacccacaaaugcac

SEQ ID NO: 1302236 - RNA, 19 nt, Artificial Sequence
  Description of Artificial Sequence: Synthetic oligonucleotide
  Sense strand starting at position 867 of SEQ ID NO: 1241819
ggcccuuacagauggguca

SEQ ID NO: 1302237 - RNA, 19 nt, Artificial Sequence
  Description of Artificial Sequence: Synthetic oligonucleotide
  Antisense strand to SEQ ID NO: 1302236
ugacccaucuguaagggcc

SEQ ID NO: 1302238 - RNA, 19 nt, Artificial Sequence
  Description of Artificial Sequence: Synthetic oligonucleotide
  Sense strand starting at position 1103 of SEQ ID NO: 1241819
gcugccuuucuagaacuua

SEQ ID NO: 1302239 - RNA, 19 nt, Artificial Sequence
  Description of Artificial Sequence: Synthetic oligonucleotide
  Antisense strand to SEQ ID NO: 1302238
uaaguucuagaaaggcagc

SEQ ID NO: 1302240 - RNA, 19 nt, Artificial Sequence
  Description of Artificial Sequence: Synthetic oligonucleotide
  Sense strand starting at position 2036 of SEQ ID NO: 1241819
gggugaagagacggguaau

SEQ ID NO: 1302241 - RNA, 19 nt, Artificial Sequence
  Description of Artificial Sequence: Synthetic oligonucleotide
  Antisense strand to SEQ ID NO: 1302240
auuacccgucucuucaccc

SEQ ID NO: 1302242 - RNA, 19 nt, Artificial Sequence
  Description of Artificial Sequence: Synthetic oligonucleotide
  Sense strand starting at position 2037 of SEQ ID NO: 1241819
ggugaagagacggguaauu

SEQ ID NO: 1302243 - RNA, 19 nt, Artificial Sequence
  Description of Artificial Sequence: Synthetic oligonucleotide
  Antisense strand to SEQ ID NO: 1302242
aauuacccgucucuucacc

SEQ ID NO: 1302244 - RNA, 19 nt, Artificial Sequence
  Description of Artificial Sequence: Synthetic oligonucleotide
  Sense strand starting at position 2039 of SEQ ID NO: 1241819
ugaagagacggguaauugu

SEQ ID NO: 1302245 - RNA, 19 nt, Artificial Sequence
  Description of Artificial Sequence: Synthetic oligonucleotide
  Antisense strand to SEQ ID NO: 1302244
acaauuacccgucucuuca

SEQ ID NO: 1302246 - RNA, 19 nt, Artificial Sequence
  Description of Artificial Sequence: Synthetic oligonucleotide
  Sense strand starting at position 2182 of SEQ ID NO: 1241819
cugacucacguguacucaa

SEQ ID NO: 1302247 - RNA, 19 nt, Artificial Sequence
  Description of Artificial Sequence: Synthetic oligonucleotide
  Antisense strand to SEQ ID NO: 1302246
uugaguacacgugagucag

SEQ ID NO: 1302248 - RNA, 19 nt, Artificial Sequence
  Description of Artificial Sequence: Synthetic oligonucleotide
  Sense strand starting at position 2222 of SEQ ID NO: 1241819
aggucauaucccgggagag

SEQ ID NO: 1302249 - RNA, 19 nt, Artificial Sequence
  Description of Artificial Sequence: Synthetic oligonucleotide
  Antisense strand to SEQ ID NO: 1302248
cucucccgggauaugaccu

SEQ ID NO: 1302250 - RNA, 19 nt, Artificial Sequence
  Description of Artificial Sequence: Synthetic oligonucleotide
  Sense strand starting at position 2223 of SEQ ID NO: 1241819
ggucauaucccgggagaga

SEQ ID NO: 1302251 - RNA, 19 nt, Artificial Sequence
  Description of Artificial Sequence: Synthetic oligonucleotide
  Antisense strand to SEQ ID NO: 1302250
ucucucccgggauaugacc

SEQ ID NO: 1302252 - RNA, 19 nt, Artificial Sequence
  Description of Artificial Sequence: Synthetic oligonucleotide
  Sense strand starting at position 2413 of SEQ ID NO: 1241819
ggaagaauguagccuugga

SEQ ID NO: 1302253 - RNA, 19 nt, Artificial Sequence
  Description of Artificial Sequence: Synthetic oligonucleotide
  Antisense strand to SEQ ID NO: 1302252
uccaaggcuacauucuucc

SEQ ID NO: 1302254 - RNA, 19 nt, Artificial Sequence
  Description of Artificial Sequence: Synthetic oligonucleotide
  Sense strand starting at position 2417 of SEQ ID NO: 1241819
gaauguagccuuggaacua

SEQ ID NO: 1302255 - RNA, 19 nt, Artificial Sequence
  Description of Artificial Sequence: Synthetic oligonucleotide
  Antisense strand to SEQ ID NO: 1302254
uaguuccaaggcuacauuc

SEQ ID NO: 1302256 - RNA, 19 nt, Artificial Sequence
  Description of Artificial Sequence: Synthetic oligonucleotide
  Sense strand starting at position 2525 of SEQ ID NO: 1241819
uaacaauaguaguugauga

SEQ ID NO: 1302257 - RNA, 19 nt, Artificial Sequence
  Description of Artificial Sequence: Synthetic oligonucleotide
  Antisense strand to SEQ ID NO: 1302256
ucaucaacuacuauuguua

SEQ ID NO: 1302258 - RNA, 19 nt, Artificial Sequence
  Description of Artificial Sequence: Synthetic oligonucleotide
  Sense strand starting at position 2633 of SEQ ID NO: 1241819
accucauccggcugggaaa

SEQ ID NO: 1302259 - RNA, 19 nt, Artificial Sequence
  Description of Artificial Sequence: Synthetic oligonucleotide
  Antisense strand to SEQ ID NO: 1302258
uuucccagccggaugaggu

SEQ ID NO: 1302260 - RNA, 19 nt, Artificial Sequence
  Description of Artificial Sequence: Synthetic oligonucleotide
  Sense strand starting at position 2669 of SEQ ID NO: 1241819
auucuaugagccugaaacu

SEQ ID NO: 1302261 - RNA, 19 nt, Artificial Sequence
  Description of Artificial Sequence: Synthetic oligonucleotide
  Antisense strand to SEQ ID NO: 1302260
aguuucaggcucauagaau

SEQ ID NO: 1302262 - RNA, 19 nt, Artificial Sequence
  Description of Artificial Sequence: Synthetic oligonucleotide
  Sense strand starting at position 2725 of SEQ ID NO: 1241819
acuugagcgacuugaaaug

SEQ ID NO: 1302263 - RNA, 19 nt, Artificial Sequence
  Description of Artificial Sequence: Synthetic oligonucleotide
  Antisense strand to SEQ ID NO: 1302262
cauuucaagucgcucaagu

SEQ ID NO: 1302264 - RNA, 19 nt, Artificial Sequence
  Description of Artificial Sequence: Synthetic oligonucleotide
  Sense strand starting at position 2849 of SEQ ID NO: 1241819
uggcauuuguuaccaugua

SEQ ID NO: 1302265 - RNA, 19 nt, Artificial Sequence
  Description of Artificial Sequence: Synthetic oligonucleotide
  Antisense strand to SEQ ID NO: 1302264
uacaugguaacaaaugcca

SEQ ID NO: 1302266 - RNA, 19 nt, Artificial Sequence
  Description of Artificial Sequence: Synthetic oligonucleotide
  Sense strand starting at position 2889 of SEQ ID NO: 1241819
gguugugacaaggaacagu

SEQ ID NO: 1302267 - RNA, 19 nt, Artificial Sequence
  Description of Artificial Sequence: Synthetic oligonucleotide
  Antisense strand to SEQ ID NO: 1302266
acuguuccuugucacaacc

SEQ ID NO: 1302268 - RNA, 19 nt, Artificial Sequence
  Description of Artificial Sequence: Synthetic oligonucleotide
  Sense strand starting at position 2971 of SEQ ID NO: 1241819
accagaaaucauugcauga

SEQ ID NO: 1302269 - RNA, 19 nt, Artificial Sequence
  Description of Artificial Sequence: Synthetic oligonucleotide
  Antisense strand to SEQ ID NO: 1302268
ucaugcaaugauuucuggu

SEQ ID NO: 1302270 - RNA, 19 nt, Artificial Sequence
  Description of Artificial Sequence: Synthetic oligonucleotide
  Sense strand starting at position 3067 of SEQ ID NO: 1241819
cuucucaggccugaaugua

SEQ ID NO: 1302271 - RNA, 19 nt, Artificial Sequence
  Description of Artificial Sequence: Synthetic oligonucleotide
  Antisense strand to SEQ ID NO: 1302270
uacauucaggccugagaag

SEQ ID NO: 1302272 - RNA, 19 nt, Artificial Sequence
  Description of Artificial Sequence: Synthetic oligonucleotide
  Sense strand starting at position 3189 of SEQ ID NO: 1241819
uugucauguuaccuugaaa

SEQ ID NO: 1302273 - RNA, 19 nt, Artificial Sequence
  Description of Artificial Sequence: Synthetic oligonucleotide
  Antisense strand to SEQ ID NO: 1302272
uuucaagguaacaugacaa

SEQ ID NO: 1302274 - RNA, 19 nt, Artificial Sequence
  Description of Artificial Sequence: Synthetic oligonucleotide
  Sense strand starting at position 3218 of SEQ ID NO: 1241819
ucaucucaguguuuauaua

SEQ ID NO: 1302275 - RNA, 19 nt, Artificial Sequence
  Description of Artificial Sequence: Synthetic oligonucleotide
  Antisense strand to SEQ ID NO: 1302274
uauauaaacacugagauga

SEQ ID NO: 1302276 - RNA, 19 nt, Artificial Sequence
  Description of Artificial Sequence: Synthetic oligonucleotide
  Sense strand starting at position 3288 of SEQ ID NO: 1241819
caaagucucuuagugauga

SEQ ID NO: 1302277 - RNA, 19 nt, Artificial Sequence
  Description of Artificial Sequence: Synthetic oligonucleotide
  Antisense strand to SEQ ID NO: 1302276
ucaucacuaagagacuuug

SEQ ID NO: 1302278 - RNA, 19 nt, Artificial Sequence
  Description of Artificial Sequence: Synthetic oligonucleotide
  Sense strand starting at position 3354 of SEQ ID NO: 1241819
agagcuuuagauuaucacu

SEQ ID NO: 1302279 - RNA, 19 nt, Artificial Sequence
  Description of Artificial Sequence: Synthetic oligonucleotide
  Antisense strand to SEQ ID NO: 1302278
agugauaaucuaaagcucu

SEQ ID NO: 1302280 - RNA, 19 nt, Artificial Sequence
  Description of Artificial Sequence: Synthetic oligonucleotide
  Sense strand starting at position 3414 of SEQ ID NO: 1241819
guagcuaucccacaaugua

SEQ ID NO: 1302281 - RNA, 19 nt, Artificial Sequence
  Description of Artificial Sequence: Synthetic oligonucleotide
  Antisense strand to SEQ ID NO: 1302280
uacauugugggauagcuac

SEQ ID NO: 1302282 - RNA, 19 nt, Artificial Sequence
  Description of Artificial Sequence: Synthetic oligonucleotide
  Sense strand starting at position 3704 of SEQ ID NO: 1241819
gugagaccuuguuugacaa

SEQ ID NO: 1302283 - RNA, 19 nt, Artificial Sequence
  Description of Artificial Sequence: Synthetic oligonucleotide
  Antisense strand to SEQ ID NO: 1302282
uugucaaacaaggucucac

SEQ ID NO: 1302284 - RNA, 19 nt, Artificial Sequence
  Description of Artificial Sequence: Synthetic oligonucleotide
  Sense strand starting at position 3705 of SEQ ID NO: 1241819
ugagaccuuguuugacaaa

SEQ ID NO: 1302285 - RNA, 19 nt, Artificial Sequence
  Description of Artificial Sequence: Synthetic oligonucleotide
  Antisense strand to SEQ ID NO: 1302284
uuugucaaacaaggucuca

SEQ ID NO: 1302286 - RNA, 19 nt, Artificial Sequence
  Description of Artificial Sequence: Synthetic oligonucleotide
  Sense strand starting at position 171 of SEQ ID NO: 1241820
uggagccugugauugacaa

SEQ ID NO: 1302287 - RNA, 19 nt, Artificial Sequence
  Description of Artificial Sequence: Synthetic oligonucleotide
  Antisense strand to SEQ ID NO: 1302286
uugucaaucacaggcucca

SEQ ID NO: 1302288 - RNA, 19 nt, Artificial Sequence
  Description of Artificial Sequence: Synthetic oligonucleotide
  Sense strand starting at position 256 of SEQ ID NO: 1241820
ccugauugcuccuugucca

SEQ ID NO: 1302289 - RNA, 19 nt, Artificial Sequence
  Description of Artificial Sequence: Synthetic oligonucleotide
  Antisense strand to SEQ ID NO: 1302288
uggacaaggagcaaucagg

SEQ ID NO: 1302290 - RNA, 19 nt, Artificial Sequence
  Description of Artificial Sequence: Synthetic oligonucleotide
  Sense strand starting at position 257 of SEQ ID NO: 1241820
cugauugcuccuuguccau

SEQ ID NO: 1302291 - RNA, 19 nt, Artificial Sequence
  Description of Artificial Sequence: Synthetic oligonucleotide
  Antisense strand to SEQ ID NO: 1302290
auggacaaggagcaaucag

SEQ ID NO: 1302292 - RNA, 19 nt, Artificial Sequence
  Description of Artificial Sequence: Synthetic oligonucleotide
  Sense strand starting at position 719 of SEQ ID NO: 1241820
guuggauccugucucacaa

SEQ ID NO: 1302293 - RNA, 19 nt, Artificial Sequence
  Description of Artificial Sequence: Synthetic oligonucleotide
  Antisense strand to SEQ ID NO: 1302292
uugugagacaggauccaac

SEQ ID NO: 1302294 - RNA, 19 nt, Artificial Sequence
  Description of Artificial Sequence: Synthetic oligonucleotide
  Sense strand starting at position 773 of SEQ ID NO: 1241820
cccagagugugguucaguu

SEQ ID NO: 1302295 - RNA, 19 nt, Artificial Sequence
  Description of Artificial Sequence: Synthetic oligonucleotide
  Antisense strand to SEQ ID NO: 1302294
aacugaaccacacucuggg

SEQ ID NO: 1302296 - RNA, 19 nt, Artificial Sequence
  Description of Artificial Sequence: Synthetic oligonucleotide
  Sense strand starting at position 775 of SEQ ID NO: 1241820
cagagugugguucaguuga

SEQ ID NO: 1302297 - RNA, 19 nt, Artificial Sequence
  Description of Artificial Sequence: Synthetic oligonucleotide
  Antisense strand to SEQ ID NO: 1302296
ucaacugaaccacacucug

SEQ ID NO: 1302298 - RNA, 19 nt, Artificial Sequence
  Description of Artificial Sequence: Synthetic oligonucleotide
  Sense strand starting at position 777 of SEQ ID NO: 1241820
gagugugguucaguugaca

SEQ ID NO: 1302299 - RNA, 19 nt, Artificial Sequence
  Description of Artificial Sequence: Synthetic oligonucleotide
  Antisense strand to SEQ ID NO: 1302298
ugucaacugaaccacacuc

SEQ ID NO: 1302300 - RNA, 19 nt, Artificial Sequence
  Description of Artificial Sequence: Synthetic oligonucleotide
  Sense strand starting at position 848 of SEQ ID NO: 1241820
agcauuggcuucguuugaa

SEQ ID NO: 1302301 - RNA, 19 nt, Artificial Sequence
  Description of Artificial Sequence: Synthetic oligonucleotide
  Antisense strand to SEQ ID NO: 1302300
uucaaacgaagccaaugcu

SEQ ID NO: 1302302 - RNA, 19 nt, Artificial Sequence
  Description of Artificial Sequence: Synthetic oligonucleotide
  Sense strand starting at position 851 of SEQ ID NO: 1241820
auuggcuucguuugaagag

SEQ ID NO: 1302303 - RNA, 19 nt, Artificial Sequence
  Description of Artificial Sequence: Synthetic oligonucleotide
  Antisense strand to SEQ ID NO: 1302302
cucuucaaacgaagccaau

SEQ ID NO: 1302304 - RNA, 19 nt, Artificial Sequence
  Description of Artificial Sequence: Synthetic oligonucleotide
  Sense strand starting at position 853 of SEQ ID NO: 1241820
uggcuucguuugaagagga

SEQ ID NO: 1302305 - RNA, 19 nt, Artificial Sequence
  Description of Artificial Sequence: Synthetic oligonucleotide
  Antisense strand to SEQ ID NO: 1302304
uccucuucaaacgaagcca

SEQ ID NO: 1302306 - RNA, 19 nt, Artificial Sequence
  Description of Artificial Sequence: Synthetic oligonucleotide
  Sense strand starting at position 1055 of SEQ ID NO: 1241820
cacucuggucccuggagua

SEQ ID NO: 1302307 - RNA, 19 nt, Artificial Sequence
  Description of Artificial Sequence: Synthetic oligonucleotide
  Antisense strand to SEQ ID NO: 1302306
uacuccagggaccagagug

SEQ ID NO: 1302308 - RNA, 19 nt, Artificial Sequence
  Description of Artificial Sequence: Synthetic oligonucleotide
  Sense strand starting at position 1118 of SEQ ID NO: 1241820
cgcugugucccugacauag

SEQ ID NO: 1302309 - RNA, 19 nt, Artificial Sequence
  Description of Artificial Sequence: Synthetic oligonucleotide
  Antisense strand to SEQ ID NO: 1302308
cuaugucagggacacagcg

SEQ ID NO: 1302310 - RNA, 19 nt, Artificial Sequence
  Description of Artificial Sequence: Synthetic oligonucleotide
  Sense strand starting at position 1128 of SEQ ID NO: 1241820
cugacauaguguccauaug

SEQ ID NO: 1302311 - RNA, 19 nt, Artificial Sequence
  Description of Artificial Sequence: Synthetic oligonucleotide
  Antisense strand to SEQ ID NO: 1302310
cauauggacacuaugucag

SEQ ID NO: 1302312 - RNA, 19 nt, Artificial Sequence
  Description of Artificial Sequence: Synthetic oligonucleotide
  Sense strand starting at position 1129 of SEQ ID NO: 1241820
ugacauaguguccauauga

SEQ ID NO: 1302313 - RNA, 19 nt, Artificial Sequence
  Description of Artificial Sequence: Synthetic oligonucleotide
  Antisense strand to SEQ ID NO: 1302312
ucauauggacacuauguca

SEQ ID NO: 1302314 - RNA, 19 nt, Artificial Sequence
  Description of Artificial Sequence: Synthetic oligonucleotide
  Sense strand starting at position 1305 of SEQ ID NO: 1241820
aaccaugggucuuuccaga

SEQ ID NO: 1302315 - RNA, 19 nt, Artificial Sequence
  Description of Artificial Sequence: Synthetic oligonucleotide
  Antisense strand to SEQ ID NO: 1302314
ucuggaaagacccaugguu

SEQ ID NO: 1302316 - RNA, 19 nt, Artificial Sequence
  Description of Artificial Sequence: Synthetic oligonucleotide
  Sense strand starting at position 1310 of SEQ ID NO: 1241820
ugggucuuuccagacccua

SEQ ID NO: 1302317 - RNA, 19 nt, Artificial Sequence
  Description of Artificial Sequence: Synthetic oligonucleotide
  Antisense strand to SEQ ID NO: 1302316
uagggucuggaaagaccca

SEQ ID NO: 1302318 - RNA, 19 nt, Artificial Sequence
  Description of Artificial Sequence: Synthetic oligonucleotide
  Sense strand starting at position 1318 of SEQ ID NO: 1241820
uccagacccuaggauuuaa

SEQ ID NO: 1302319 - RNA, 19 nt, Artificial Sequence
  Description of Artificial Sequence: Synthetic oligonucleotide
  Antisense strand to SEQ ID NO: 1302318
uuaaauccuagggucugga

SEQ ID NO: 1302320 - RNA, 19 nt, Artificial Sequence
  Description of Artificial Sequence: Synthetic oligonucleotide
  Sense strand starting at position 1339 of SEQ ID NO: 1241820
ucaccuagguguuuggaga

SEQ ID NO: 1302321 - RNA, 19 nt, Artificial Sequence
  Description of Artificial Sequence: Synthetic oligonucleotide
  Antisense strand to SEQ ID NO: 1302320
ucuccaaacaccuagguga

SEQ ID NO: 1302322 - RNA, 19 nt, Artificial Sequence
  Description of Artificial Sequence: Synthetic oligonucleotide
  Sense strand starting at position 1340 of SEQ ID NO: 1241820
caccuagguguuuggagaa

SEQ ID NO: 1302323 - RNA, 19 nt, Artificial Sequence
  Description of Artificial Sequence: Synthetic oligonucleotide
  Antisense strand to SEQ ID NO: 1302322
uucuccaaacaccuaggug

SEQ ID NO: 1302324 - RNA, 19 nt, Artificial Sequence
  Description of Artificial Sequence: Synthetic oligonucleotide
  Sense strand starting at position 2021 of SEQ ID NO: 1241820
cgcgcugugacacauacau

SEQ ID NO: 1302325 - RNA, 19 nt, Artificial Sequence
  Description of Artificial Sequence: Synthetic oligonucleotide
  Antisense strand to SEQ ID NO: 1302324
auguaugugucacagcgcg

SEQ ID NO: 1302326 - RNA, 19 nt, Artificial Sequence
  Description of Artificial Sequence: Synthetic oligonucleotide
  Sense strand starting at position 2491 of SEQ ID NO: 1241820
gcuacugucggccacgauu

SEQ ID NO: 1302327 - RNA, 19 nt, Artificial Sequence
  Description of Artificial Sequence: Synthetic oligonucleotide
  Antisense strand to SEQ ID NO: 1302326
aaucguggccgacaguagc

SEQ ID NO: 1302328 - RNA, 19 nt, Artificial Sequence
  Description of Artificial Sequence: Synthetic oligonucleotide
  Sense strand starting at position 2525 of SEQ ID NO: 1241820
cgaggagcuggcugaaagu

SEQ ID NO: 1302329 - RNA, 19 nt, Artificial Sequence
  Description of Artificial Sequence: Synthetic oligonucleotide
  Antisense strand to SEQ ID NO: 1302328
acuuucagccagcuccucg

SEQ ID NO: 1302330 - RNA, 19 nt, Artificial Sequence
  Description of Artificial Sequence: Synthetic oligonucleotide
  Sense strand starting at position 2687 of SEQ ID NO: 1241820
ggaauucuccagugucucu

SEQ ID NO: 1302331 - RNA, 19 nt, Artificial Sequence
  Description of Artificial Sequence: Synthetic oligonucleotide
  Antisense strand to SEQ ID NO: 1302330
agagacacuggagaauucc

SEQ ID NO: 1302332 - RNA, 19 nt, Artificial Sequence
  Description of Artificial Sequence: Synthetic oligonucleotide
  Sense strand starting at position 2774 of SEQ ID NO: 1241820
gagcccguuguguaacaua

SEQ ID NO: 1302333 - RNA, 19 nt, Artificial Sequence
  Description of Artificial Sequence: Synthetic oligonucleotide
  Antisense strand to SEQ ID NO: 1302332
uauguuacacaacgggcuc

SEQ ID NO: 1302334 - RNA, 19 nt, Artificial Sequence
  Description of Artificial Sequence: Synthetic oligonucleotide
  Sense strand starting at position 2779 of SEQ ID NO: 1241820
cguuguguaacauacauua

SEQ ID NO: 1302335 - RNA, 19 nt, Artificial Sequence
  Description of Artificial Sequence: Synthetic oligonucleotide
  Antisense strand to SEQ ID NO: 1302334
uaauguauguuacacaacg

SEQ ID NO: 1302336 - RNA, 19 nt, Artificial Sequence
  Description of Artificial Sequence: Synthetic oligonucleotide
  Sense strand starting at position 2937 of SEQ ID NO: 1241820
ggucuugugcucucugcua

SEQ ID NO: 1302337 - RNA, 19 nt, Artificial Sequence
  Description of Artificial Sequence: Synthetic oligonucleotide
  Antisense strand to SEQ ID NO: 1302336
uagcagagagcacaagacc

SEQ ID NO: 1302338 - RNA, 19 nt, Artificial Sequence
  Description of Artificial Sequence: Synthetic oligonucleotide
  Sense strand starting at position 3002 of SEQ ID NO: 1241820
gcuggugaccuucagaguu

SEQ ID NO: 1302339 - RNA, 19 nt, Artificial Sequence
  Description of Artificial Sequence: Synthetic oligonucleotide
  Antisense strand to SEQ ID NO: 1302338
aacucugaaggucaccagc

SEQ ID NO: 1302340 - RNA, 19 nt, Artificial Sequence
  Description of Artificial Sequence: Synthetic oligonucleotide
  Sense strand starting at position 3096 of SEQ ID NO: 1241820
cccucucauugggcaagaa

SEQ ID NO: 1302341 - RNA, 19 nt, Artificial Sequence
  Description of Artificial Sequence: Synthetic oligonucleotide
  Antisense strand to SEQ ID NO: 1302340
uucuugcccaaugagaggg

SEQ ID NO: 1302342 - RNA, 19 nt, Artificial Sequence
  Description of Artificial Sequence: Synthetic oligonucleotide
  Sense strand starting at position 3170 of SEQ ID NO: 1241820
uuaaucaguuccuugauga

SEQ ID NO: 1302343 - RNA, 19 nt, Artificial Sequence
  Description of Artificial Sequence: Synthetic oligonucleotide
  Antisense strand to SEQ ID NO: 1302342
ucaucaaggaacugauuaa

SEQ ID NO: 1302344 - RNA, 19 nt, Artificial Sequence
  Description of Artificial Sequence: Synthetic oligonucleotide
  Sense strand starting at position 3218 of SEQ ID NO: 1241820
gggcgacuccacuggaauu

SEQ ID NO: 1302345 - RNA, 19 nt, Artificial Sequence
  Description of Artificial Sequence: Synthetic oligonucleotide
  Antisense strand to SEQ ID NO: 1302344
aauuccaguggagucgccc

SEQ ID NO: 1302346 - RNA, 19 nt, Artificial Sequence
  Description of Artificial Sequence: Synthetic oligonucleotide
  Sense strand starting at position 3219 of SEQ ID NO: 1241820
ggcgacuccacuggaauua

SEQ ID NO: 1302347 - RNA, 19 nt, Artificial Sequence
  Description of Artificial Sequence: Synthetic oligonucleotide
  Antisense strand to SEQ ID NO: 1302346
uaauuccaguggagucgcc

SEQ ID NO: 1302348 - RNA, 19 nt, Artificial Sequence
  Description of Artificial Sequence: Synthetic oligonucleotide
  Sense strand starting at position 3220 of SEQ ID NO: 1241820
gcgacuccacuggaauuau

SEQ ID NO: 1302349 - RNA, 19 nt, Artificial Sequence
  Description of Artificial Sequence: Synthetic oligonucleotide
  Antisense strand to SEQ ID NO: 1302348
auaauuccaguggagucgc

SEQ ID NO: 1302350 - RNA, 19 nt, Artificial Sequence
  Description of Artificial Sequence: Synthetic oligonucleotide
  Sense strand starting at position 3228 of SEQ ID NO: 1241820
acuggaauuaugugguuau

SEQ ID NO: 1302351 - RNA, 19 nt, Artificial Sequence
  Description of Artificial Sequence: Synthetic oligonucleotide
  Antisense strand to SEQ ID NO: 1302350
auaaccacauaauuccagu

SEQ ID NO: 1302352 - RNA, 19 nt, Artificial Sequence
  Description of Artificial Sequence: Synthetic oligonucleotide
  Sense strand starting at position 3380 of SEQ ID NO: 1241820
cucucagagcaauggcuaa

SEQ ID NO: 1302353 - RNA, 19 nt, Artificial Sequence
  Description of Artificial Sequence: Synthetic oligonucleotide
  Antisense strand to SEQ ID NO: 1302352
uuagccauugcucugagag

SEQ ID NO: 1302354 - RNA, 19 nt, Artificial Sequence
  Description of Artificial Sequence: Synthetic oligonucleotide
  Sense strand starting at position 3452 of SEQ ID NO: 1241820
uugagucaggucuguaagu

SEQ ID NO: 1302355 - RNA, 19 nt, Artificial Sequence
  Description of Artificial Sequence: Synthetic oligonucleotide
  Antisense strand to SEQ ID NO: 1302354
acuuacagaccugacucaa

SEQ ID NO: 1302356 - RNA, 19 nt, Artificial Sequence
  Description of Artificial Sequence: Synthetic oligonucleotide
  Sense strand starting at position 3454 of SEQ ID NO: 1241820
gagucaggucuguaagucu

SEQ ID NO: 1302357 - RNA, 19 nt, Artificial Sequence
  Description of Artificial Sequence: Synthetic oligonucleotide
  Antisense strand to SEQ ID NO: 1302356
agacuuacagaccugacuc

SEQ ID NO: 1302358 - RNA, 19 nt, Artificial Sequence
  Description of Artificial Sequence: Synthetic oligonucleotide
  Sense strand starting at position 3462 of SEQ ID NO: 1241820
ucuguaagucuugaagcau

SEQ ID NO: 1302359 - RNA, 19 nt, Artificial Sequence
  Description of Artificial Sequence: Synthetic oligonucleotide
  Antisense strand to SEQ ID NO: 1302358
augcuucaagacuuacaga

SEQ ID NO: 1302360 - RNA, 19 nt, Artificial Sequence
  Description of Artificial Sequence: Synthetic oligonucleotide
  Sense strand starting at position 3526 of SEQ ID NO: 1241820
gauaguggcuucucucaca

SEQ ID NO: 1302361 - RNA, 19 nt, Artificial Sequence
  Description of Artificial Sequence: Synthetic oligonucleotide
  Antisense strand to SEQ ID NO: 1302360
ugugagagaagccacuauc

SEQ ID NO: 1302362 - RNA, 19 nt, Artificial Sequence
  Description of Artificial Sequence: Synthetic oligonucleotide
  Sense strand starting at position 3881 of SEQ ID NO: 1241820
ggccucaaugccuggaaca

SEQ ID NO: 1302363 - RNA, 19 nt, Artificial Sequence
  Description of Artificial Sequence: Synthetic oligonucleotide
  Antisense strand to SEQ ID NO: 1302362
uguuccaggcauugaggcc

SEQ ID NO: 1302364 - RNA, 19 nt, Artificial Sequence
  Description of Artificial Sequence: Synthetic oligonucleotide
  Sense strand starting at position 3954 of SEQ ID NO: 1241820
ggauucucaugccuguguu

SEQ ID NO: 1302365 - RNA, 19 nt, Artificial Sequence
  Description of Artificial Sequence: Synthetic oligonucleotide
  Antisense strand to SEQ ID NO: 1302364
aacacaggcaugagaaucc

SEQ ID NO: 1302366 - RNA, 19 nt, Artificial Sequence
  Description of Artificial Sequence: Synthetic oligonucleotide
  Sense strand starting at position 264 of SEQ ID NO: 1241821
augcauggccucuggacau

SEQ ID NO: 1302367 - RNA, 19 nt, Artificial Sequence
  Description of Artificial Sequence: Synthetic oligonucleotide
  Antisense strand to SEQ ID NO: 1302366
auguccagaggccaugcau

SEQ ID NO: 1302368 - RNA, 19 nt, Artificial Sequence
  Description of Artificial Sequence: Synthetic oligonucleotide
  Sense strand starting at position 278 of SEQ ID NO: 1241821
gacauauuucgaugugcuc

SEQ ID NO: 1302369 - RNA, 19 nt, Artificial Sequence
  Description of Artificial Sequence: Synthetic oligonucleotide
  Antisense strand to SEQ ID NO: 1302368
gagcacaucgaaauauguc

SEQ ID NO: 1302370 - RNA, 19 nt, Artificial Sequence
  Description of Artificial Sequence: Synthetic oligonucleotide
  Sense strand starting at position 495 of SEQ ID NO: 1241821
ggaggcuuugcagggaaga

SEQ ID NO: 1302371 - RNA, 19 nt, Artificial Sequence
  Description of Artificial Sequence: Synthetic oligonucleotide
  Antisense strand to SEQ ID NO: 1302370
ucuucccugcaaagccucc

SEQ ID NO: 1302372 - RNA, 19 nt, Artificial Sequence
  Description of Artificial Sequence: Synthetic oligonucleotide
  Sense strand starting at position 497 of SEQ ID NO: 1241821
aggcuuugcagggaagagu

SEQ ID NO: 1302373 - RNA, 19 nt, Artificial Sequence
  Description of Artificial Sequence: Synthetic oligonucleotide
  Antisense strand to SEQ ID NO: 1302372
acucuucccugcaaagccu

SEQ ID NO: 1302374 - RNA, 19 nt, Artificial Sequence
  Description of Artificial Sequence: Synthetic oligonucleotide
  Sense strand starting at position 534 of SEQ ID NO: 1241821
aggaguccacuuuggauua

SEQ ID NO: 1302375 - RNA, 19 nt, Artificial Sequence
  Description of Artificial Sequence: Synthetic oligonucleotide
  Antisense strand to SEQ ID NO: 1302374
uaauccaaaguggacuccu

SEQ ID NO: 1302376 - RNA, 19 nt, Artificial Sequence
  Description of Artificial Sequence: Synthetic oligonucleotide
  Sense strand starting at position 738 of SEQ ID NO: 1241821
ggacuuggacccugguauu

SEQ ID NO: 1302377 - RNA, 19 nt, Artificial Sequence
  Description of Artificial Sequence: Synthetic oligonucleotide
  Antisense strand to SEQ ID NO: 1302376
aauaccaggguccaagucc

SEQ ID NO: 1302378 - RNA, 19 nt, Artificial Sequence
  Description of Artificial Sequence: Synthetic oligonucleotide
  Sense strand starting at position 1052 of SEQ ID NO: 1241821
agucucaucuucucaggau

SEQ ID NO: 1302379 - RNA, 19 nt, Artificial Sequence
  Description of Artificial Sequence: Synthetic oligonucleotide
  Antisense strand to SEQ ID NO: 1302378
auccugagaagaugagacu

SEQ ID NO: 1302380 - RNA, 19 nt, Artificial Sequence
  Description of Artificial Sequence: Synthetic oligonucleotide
  Sense strand starting at position 1114 of SEQ ID NO: 1241821
uggugaaugccugauacgu

SEQ ID NO: 1302381 - RNA, 19 nt, Artificial Sequence
  Description of Artificial Sequence: Synthetic oligonucleotide
  Antisense strand to SEQ ID NO: 1302380
acguaucaggcauucacca

SEQ ID NO: 1302382 - RNA, 19 nt, Artificial Sequence
  Description of Artificial Sequence: Synthetic oligonucleotide
  Sense strand starting at position 1119 of SEQ ID NO: 1241821
aaugccugauacguugaau

SEQ ID NO: 1302383 - RNA, 19 nt, Artificial Sequence
  Description of Artificial Sequence: Synthetic oligonucleotide
  Antisense strand to SEQ ID NO: 1302382
auucaacguaucaggcauu

SEQ ID NO: 1302384 - RNA, 19 nt, Artificial Sequence
  Description of Artificial Sequence: Synthetic oligonucleotide
  Sense strand starting at position 1122 of SEQ ID NO: 1241821
gccugauacguugaaucca

SEQ ID NO: 1302385 - RNA, 19 nt, Artificial Sequence
  Description of Artificial Sequence: Synthetic oligonucleotide
  Antisense strand to SEQ ID NO: 1302384
uggauucaacguaucaggc

SEQ ID NO: 1302386 - RNA, 19 nt, Artificial Sequence
  Description of Artificial Sequence: Synthetic oligonucleotide
  Sense strand starting at position 1440 of SEQ ID NO: 1241821
ugggaugugccucauucuu

SEQ ID NO: 1302387 - RNA, 19 nt, Artificial Sequence
  Description of Artificial Sequence: Synthetic oligonucleotide
  Antisense strand to SEQ ID NO: 1302386
aagaaugaggcacauccca

SEQ ID NO: 1302388 - RNA, 19 nt, Artificial Sequence
  Description of Artificial Sequence: Synthetic oligonucleotide
  Sense strand starting at position 1446 of SEQ ID NO: 1241821
gugccucauucuuugauga

SEQ ID NO: 1302389 - RNA, 19 nt, Artificial Sequence
  Description of Artificial Sequence: Synthetic oligonucleotide
  Antisense strand to SEQ ID NO: 1302388
ucaucaaagaaugaggcac

SEQ ID NO: 1302390 - RNA, 19 nt, Artificial Sequence
  Description of Artificial Sequence: Synthetic oligonucleotide
  Sense strand starting at position 1467 of SEQ ID NO: 1241821
cuuucuuagccaugcuaag

SEQ ID NO: 1302391 - RNA, 19 nt, Artificial Sequence
  Description of Artificial Sequence: Synthetic oligonucleotide
  Antisense strand to SEQ ID NO: 1302390
cuuagcauggcuaagaaag

SEQ ID NO: 1302392 - RNA, 19 nt, Artificial Sequence
  Description of Artificial Sequence: Synthetic oligonucleotide
  Sense strand starting at position 1767 of SEQ ID NO: 1241821
cguauccagcuccagaauu

SEQ ID NO: 1302393 - RNA, 19 nt, Artificial Sequence
  Description of Artificial Sequence: Synthetic oligonucleotide
  Antisense strand to SEQ ID NO: 1302392
aauucuggagcuggauacg

SEQ ID NO: 1302394 - RNA, 19 nt, Artificial Sequence
  Description of Artificial Sequence: Synthetic oligonucleotide
  Sense strand starting at position 1801 of SEQ ID NO: 1241821
cgggcuuccacugaagaca

SEQ ID NO: 1302395 - RNA, 19 nt, Artificial Sequence
  Description of Artificial Sequence: Synthetic oligonucleotide
  Antisense strand to SEQ ID NO: 1302394
ugucuucaguggaagcccg

SEQ ID NO: 1302396 - RNA, 19 nt, Artificial Sequence
  Description of Artificial Sequence: Synthetic oligonucleotide
  Sense strand starting at position 1822 of SEQ ID NO: 1241821
ucagucacccacugagaga

SEQ ID NO: 1302397 - RNA, 19 nt, Artificial Sequence
  Description of Artificial Sequence: Synthetic oligonucleotide
  Antisense strand to SEQ ID NO: 1302396
ucucucagugggugacuga

SEQ ID NO: 1302398 - RNA, 19 nt, Artificial Sequence
  Description of Artificial Sequence: Synthetic oligonucleotide
  Sense strand starting at position 1838 of SEQ ID NO: 1241821
agaggcuagccuugaguga

SEQ ID NO: 1302399 - RNA, 19 nt, Artificial Sequence
  Description of Artificial Sequence: Synthetic oligonucleotide
  Antisense strand to SEQ ID NO: 1302398
ucacucaaggcuagccucu

SEQ ID NO: 1302400 - RNA, 19 nt, Artificial Sequence
  Description of Artificial Sequence: Synthetic oligonucleotide
  Sense strand starting at position 1946 of SEQ ID NO: 1241821
aauugcuccucagugaagu

SEQ ID NO: 1302401 - RNA, 19 nt, Artificial Sequence
  Description of Artificial Sequence: Synthetic oligonucleotide
  Antisense strand to SEQ ID NO: 1302400
acuucacugaggagcaauu

SEQ ID NO: 1302402 - RNA, 19 nt, Artificial Sequence
  Description of Artificial Sequence: Synthetic oligonucleotide
  Sense strand starting at position 1947 of SEQ ID NO: 1241821
auugcuccucagugaaguu

SEQ ID NO: 1302403 - RNA, 19 nt, Artificial Sequence
  Description of Artificial Sequence: Synthetic oligonucleotide
  Antisense strand to SEQ ID NO: 1302402
aacuucacugaggagcaau

SEQ ID NO: 1302404 - RNA, 19 nt, Artificial Sequence
  Description of Artificial Sequence: Synthetic oligonucleotide
  Sense strand starting at position 2006 of SEQ ID NO: 1241821
cucucaagaugaggagaau

SEQ ID NO: 1302405 - RNA, 19 nt, Artificial Sequence
  Description of Artificial Sequence: Synthetic oligonucleotide
  Antisense strand to SEQ ID NO: 1302404
auucuccucaucuugagag

SEQ ID NO: 1302406 - RNA, 19 nt, Artificial Sequence
  Description of Artificial Sequence: Synthetic oligonucleotide
  Sense strand starting at position 2027 of SEQ ID NO: 1241821
caaugaagccaguguucuu

SEQ ID NO: 1302407 - RNA, 19 nt, Artificial Sequence
  Description of Artificial Sequence: Synthetic oligonucleotide
  Antisense strand to SEQ ID NO: 1302406
aagaacacuggcuucauug

SEQ ID NO: 1302408 - RNA, 19 nt, Artificial Sequence
  Description of Artificial Sequence: Synthetic oligonucleotide
  Sense strand starting at position 2145 of SEQ ID NO: 1241821
agugguucucagcacaaau

SEQ ID NO: 1302409 - RNA, 19 nt, Artificial Sequence
  Description of Artificial Sequence: Synthetic oligonucleotide
  Antisense strand to SEQ ID NO: 1302408
auuugugcugagaaccacu

SEQ ID NO: 1302410 - RNA, 19 nt, Artificial Sequence
  Description of Artificial Sequence: Synthetic oligonucleotide
  Sense strand starting at position 2361 of SEQ ID NO: 1241821
cgccacauggucuauagaa

SEQ ID NO: 1302411 - RNA, 19 nt, Artificial Sequence
  Description of Artificial Sequence: Synthetic oligonucleotide
  Antisense strand to SEQ ID NO: 1302410
uucuauagaccauguggcg

SEQ ID NO: 1302412 - RNA, 19 nt, Artificial Sequence
  Description of Artificial Sequence: Synthetic oligonucleotide
  Sense strand starting at position 2379 of SEQ ID NO: 1241821
agcaguugcacugaagaca

SEQ ID NO: 1302413 - RNA, 19 nt, Artificial Sequence
  Description of Artificial Sequence: Synthetic oligonucleotide
  Antisense strand to SEQ ID NO: 1302412
ugucuucagugcaacugcu

SEQ ID NO: 1302414 - RNA, 19 nt, Artificial Sequence
  Description of Artificial Sequence: Synthetic oligonucleotide
  Sense strand starting at position 2411 of SEQ ID NO: 1241821
cgaggaaugugacuuucca

SEQ ID NO: 1302415 - RNA, 19 nt, Artificial Sequence
  Description of Artificial Sequence: Synthetic oligonucleotide
  Antisense strand to SEQ ID NO: 1302414
uggaaagucacauuccucg

SEQ ID NO: 1302416 - RNA, 19 nt, Artificial Sequence
  Description of Artificial Sequence: Synthetic oligonucleotide
  Sense strand starting at position 2415 of SEQ ID NO: 1241821
gaaugugacuuuccaggga

SEQ ID NO: 1302417 - RNA, 19 nt, Artificial Sequence
  Description of Artificial Sequence: Synthetic oligonucleotide
  Antisense strand to SEQ ID NO: 1302416
ucccuggaaagucacauuc

SEQ ID NO: 1302418 - RNA, 19 nt, Artificial Sequence
  Description of Artificial Sequence: Synthetic oligonucleotide
  Sense strand starting at position 2419 of SEQ ID NO: 1241821
gugacuuuccagggacaca

SEQ ID NO: 1302419 - RNA, 19 nt, Artificial Sequence
  Description of Artificial Sequence: Synthetic oligonucleotide
  Antisense strand to SEQ ID NO: 1302418
ugugucccuggaaagucac

SEQ ID NO: 1302420 - RNA, 19 nt, Artificial Sequence
  Description of Artificial Sequence: Synthetic oligonucleotide
  Sense strand starting at position 2440 of SEQ ID NO: 1241821
aauagaagccuggaucugu

SEQ ID NO: 1302421 - RNA, 19 nt, Artificial Sequence
  Description of Artificial Sequence: Synthetic oligonucleotide
  Antisense strand to SEQ ID NO: 1302420
acagauccaggcuucuauu

SEQ ID NO: 1302422 - RNA, 19 nt, Artificial Sequence
  Description of Artificial Sequence: Synthetic oligonucleotide
  Sense strand starting at position 2851 of SEQ ID NO: 1241821
gugucuaugccuuaguaca

SEQ ID NO: 1302423 - RNA, 19 nt, Artificial Sequence
  Description of Artificial Sequence: Synthetic oligonucleotide
  Antisense strand to SEQ ID NO: 1302422
uguacuaaggcauagacac

SEQ ID NO: 1302424 - RNA, 19 nt, Artificial Sequence
  Description of Artificial Sequence: Synthetic oligonucleotide
  Sense strand starting at position 2853 of SEQ ID NO: 1241821
gucuaugccuuaguacauu

SEQ ID NO: 1302425 - RNA, 19 nt, Artificial Sequence
  Description of Artificial Sequence: Synthetic oligonucleotide
  Antisense strand to SEQ ID NO: 1302424
aauguacuaaggcauagac

SEQ ID NO: 1302426 - RNA, 19 nt, Artificial Sequence
  Description of Artificial Sequence: Synthetic oligonucleotide
  Sense strand starting at position 3436 of SEQ ID NO: 1241821
cuuauaaaguuuccaguuu

SEQ ID NO: 1302427 - RNA, 19 nt, Artificial Sequence
  Description of Artificial Sequence: Synthetic oligonucleotide
  Antisense strand to SEQ ID NO: 1302426
aaacuggaaacuuuauaag

SEQ ID NO: 1302428 - RNA, 19 nt, Artificial Sequence
  Description of Artificial Sequence: Synthetic oligonucleotide
  Sense strand starting at position 3470 of SEQ ID NO: 1241821
cccugaugaccuugccuaa

SEQ ID NO: 1302429 - RNA, 19 nt, Artificial Sequence
  Description of Artificial Sequence: Synthetic oligonucleotide
  Antisense strand to SEQ ID NO: 1302428
uuaggcaaggucaucaggg

SEQ ID NO: 1302430 - RNA, 19 nt, Artificial Sequence
  Description of Artificial Sequence: Synthetic oligonucleotide
  Sense strand starting at position 3537 of SEQ ID NO: 1241821
gagguuaaguuuccaacau

SEQ ID NO: 1302431 - RNA, 19 nt, Artificial Sequence
  Description of Artificial Sequence: Synthetic oligonucleotide
  Antisense strand to SEQ ID NO: 1302430
auguuggaaacuuaaccuc

SEQ ID NO: 1302432 - RNA, 19 nt, Artificial Sequence
  Description of Artificial Sequence: Synthetic oligonucleotide
  Sense strand starting at position 3555 of SEQ ID NO: 1241821
uaugaaauuuguugggaau

SEQ ID NO: 1302433 - RNA, 19 nt, Artificial Sequence
  Description of Artificial Sequence: Synthetic oligonucleotide
  Antisense strand to SEQ ID NO: 1302432
auucccaacaaauuucaua

SEQ ID NO: 1302434 - RNA, 19 nt, Artificial Sequence
  Description of Artificial Sequence: Synthetic oligonucleotide
  Sense strand starting at position 3557 of SEQ ID NO: 1241821
ugaaauuuguugggaauuu

SEQ ID NO: 1302435 - RNA, 19 nt, Artificial Sequence
  Description of Artificial Sequence: Synthetic oligonucleotide
  Antisense strand to SEQ ID NO: 1302434
aaauucccaacaaauuuca

SEQ ID NO: 1302436 - RNA, 19 nt, Artificial Sequence
  Description of Artificial Sequence: Synthetic oligonucleotide
  Sense strand starting at position 3585 of SEQ ID NO: 1241821
agcagucuauguuccuauu

SEQ ID NO: 1302437 - RNA, 19 nt, Artificial Sequence
  Description of Artificial Sequence: Synthetic oligonucleotide
  Antisense strand to SEQ ID NO: 1302436
aauaggaacauagacugcu

SEQ ID NO: 1302438 - RNA, 19 nt, Artificial Sequence
  Description of Artificial Sequence: Synthetic oligonucleotide
  Sense strand starting at position 3668 of SEQ ID NO: 1241821
uuaacuauaucugcagaga

SEQ ID NO: 1302439 - RNA, 19 nt, Artificial Sequence
  Description of Artificial Sequence: Synthetic oligonucleotide
  Antisense strand to SEQ ID NO: 1302438
ucucugcagauauaguuaa

SEQ ID NO: 1302440 - RNA, 19 nt, Artificial Sequence
  Description of Artificial Sequence: Synthetic oligonucleotide
  Sense strand starting at position 3768 of SEQ ID NO: 1241821
uuguguacaggagguguua

SEQ ID NO: 1302441 - RNA, 19 nt, Artificial Sequence
  Description of Artificial Sequence: Synthetic oligonucleotide
  Antisense strand to SEQ ID NO: 1302440
uaacaccuccuguacacaa

SEQ ID NO: 1302442 - RNA, 19 nt, Artificial Sequence
  Description of Artificial Sequence: Synthetic oligonucleotide
  Sense strand starting at position 3839 of SEQ ID NO: 1241821
aggugaugcugucugguga

SEQ ID NO: 1302443 - RNA, 19 nt, Artificial Sequence
  Description of Artificial Sequence: Synthetic oligonucleotide
  Antisense strand to SEQ ID NO: 1302442
ucaccagacagcaucaccu

SEQ ID NO: 1302444 - RNA, 19 nt, Artificial Sequence
  Description of Artificial Sequence: Synthetic oligonucleotide
  Sense strand starting at position 3840 of SEQ ID NO: 1241821
ggugaugcugucuggugaa

SEQ ID NO: 1302445 - RNA, 19 nt, Artificial Sequence
  Description of Artificial Sequence: Synthetic oligonucleotide
  Antisense strand to SEQ ID NO: 1302444
uucaccagacagcaucacc

SEQ ID NO: 1302446 - RNA, 19 nt, Artificial Sequence
  Description of Artificial Sequence: Synthetic oligonucleotide
  Sense strand starting at position 258 of SEQ ID NO: 1241822
acauaaugaugggcugaua

SEQ ID NO: 1302447 - RNA, 19 nt, Artificial Sequence
  Description of Artificial Sequence: Synthetic oligonucleotide
  Antisense strand to SEQ ID NO: 1302446
uaucagcccaucauuaugu

SEQ ID NO: 1302448 - RNA, 19 nt, Artificial Sequence
  Description of Artificial Sequence: Synthetic oligonucleotide
  Sense strand starting at position 314 of SEQ ID NO: 1241822
agagcuguucuggagucau

SEQ ID NO: 1302449 - RNA, 19 nt, Artificial Sequence
  Description of Artificial Sequence: Synthetic oligonucleotide
  Antisense strand to SEQ ID NO: 1302448
augacuccagaacagcucu

SEQ ID NO: 1302450 - RNA, 19 nt, Artificial Sequence
  Description of Artificial Sequence: Synthetic oligonucleotide
  Sense strand starting at position 376 of SEQ ID NO: 1241822
uggccaggcaugugacaaa

SEQ ID NO: 1302451 - RNA, 19 nt, Artificial Sequence
  Description of Artificial Sequence: Synthetic oligonucleotide
  Antisense strand to SEQ ID NO: 1302450
uuugucacaugccuggcca

SEQ ID NO: 1302452 - RNA, 19 nt, Artificial Sequence
  Description of Artificial Sequence: Synthetic oligonucleotide
  Sense strand starting at position 428 of SEQ ID NO: 1241822
ggugguaugucacuaucac

SEQ ID NO: 1302453 - RNA, 19 nt, Artificial Sequence
  Description of Artificial Sequence: Synthetic oligonucleotide
  Antisense strand to SEQ ID NO: 1302452
gugauagugacauaccacc

SEQ ID NO: 1302454 - RNA, 19 nt, Artificial Sequence
  Description of Artificial Sequence: Synthetic oligonucleotide
  Sense strand starting at position 532 of SEQ ID NO: 1241822
ccuguaaacuggcugugaa

SEQ ID NO: 1302455 - RNA, 19 nt, Artificial Sequence
  Description of Artificial Sequence: Synthetic oligonucleotide
  Antisense strand to SEQ ID NO: 1302454
uucacagccaguuuacagg

SEQ ID NO: 1302456 - RNA, 19 nt, Artificial Sequence
  Description of Artificial Sequence: Synthetic oligonucleotide
  Sense strand starting at position 533 of SEQ ID NO: 1241822
cuguaaacuggcugugaac

SEQ ID NO: 1302457 - RNA, 19 nt, Artificial Sequence
  Description of Artificial Sequence: Synthetic oligonucleotide
  Antisense strand to SEQ ID NO: 1302456
guucacagccaguuuacag

SEQ ID NO: 1302458 - RNA, 19 nt, Artificial Sequence
  Description of Artificial Sequence: Synthetic oligonucleotide
  Sense strand starting at position 535 of SEQ ID NO: 1241822
guaaacuggcugugaacau

SEQ ID NO: 1302459 - RNA, 19 nt, Artificial Sequence
  Description of Artificial Sequence: Synthetic oligonucleotide
  Antisense strand to SEQ ID NO: 1302458
auguucacagccaguuuac

SEQ ID NO: 1302460 - RNA, 19 nt, Artificial Sequence
  Description of Artificial Sequence: Synthetic oligonucleotide
  Sense strand starting at position 581 of SEQ ID NO: 1241822
uugguugggagaggugaua

SEQ ID NO: 1302461 - RNA, 19 nt, Artificial Sequence
  Description of Artificial Sequence: Synthetic oligonucleotide
  Antisense strand to SEQ ID NO: 1302460
uaucaccucucccaaccaa

SEQ ID NO: 1302462 - RNA, 19 nt, Artificial Sequence
  Description of Artificial Sequence: Synthetic oligonucleotide
  Sense strand starting at position 694 of SEQ ID NO: 1241822
ggccauuaguggagagaag

SEQ ID NO: 1302463 - RNA, 19 nt, Artificial Sequence
  Description of Artificial Sequence: Synthetic oligonucleotide
  Antisense strand to SEQ ID NO: 1302462
cuucucuccacuaauggcc

SEQ ID NO: 1302464 - RNA, 19 nt, Artificial Sequence
  Description of Artificial Sequence: Synthetic oligonucleotide
  Sense strand starting at position 763 of SEQ ID NO: 1241822
agguguacauuccucagua

SEQ ID NO: 1302465 - RNA, 19 nt, Artificial Sequence
  Description of Artificial Sequence: Synthetic oligonucleotide
  Antisense strand to SEQ ID NO: 1302464
uacugaggaauguacaccu

SEQ ID NO: 1302466 - RNA, 19 nt, Artificial Sequence
  Description of Artificial Sequence: Synthetic oligonucleotide
  Sense strand starting at position 765 of SEQ ID NO: 1241822
guguacauuccucaguaug

SEQ ID NO: 1302467 - RNA, 19 nt, Artificial Sequence
  Description of Artificial Sequence: Synthetic oligonucleotide
  Antisense strand to SEQ ID NO: 1302466
cauacugaggaauguacac

SEQ ID NO: 1302468 - RNA, 19 nt, Artificial Sequence
  Description of Artificial Sequence: Synthetic oligonucleotide
  Sense strand starting at position 895 of SEQ ID NO: 1241822
ccuagaucgcuggacugaa

SEQ ID NO: 1302469 - RNA, 19 nt, Artificial Sequence
  Description of Artificial Sequence: Synthetic oligonucleotide
  Antisense strand to SEQ ID NO: 1302468
uucaguccagcgaucuagg

SEQ ID NO: 1302470 - RNA, 19 nt, Artificial Sequence
  Description of Artificial Sequence: Synthetic oligonucleotide
  Sense strand starting at position 2153 of SEQ ID NO: 1241822
ccuggauggucuguggauu

SEQ ID NO: 1302471 - RNA, 19 nt, Artificial Sequence
  Description of Artificial Sequence: Synthetic oligonucleotide
  Antisense strand to SEQ ID NO: 1302470
aauccacagaccauccagg

SEQ ID NO: 1302472 - RNA, 19 nt, Artificial Sequence
  Description of Artificial Sequence: Synthetic oligonucleotide
  Sense strand starting at position 2437 of SEQ ID NO: 1241822
ugggcucaucuaggucaga

SEQ ID NO: 1302473 - RNA, 19 nt, Artificial Sequence
  Description of Artificial Sequence: Synthetic oligonucleotide
  Antisense strand to SEQ ID NO: 1302472
ucugaccuagaugagccca

SEQ ID NO: 1302474 - RNA, 19 nt, Artificial Sequence
  Description of Artificial Sequence: Synthetic oligonucleotide
  Sense strand starting at position 2438 of SEQ ID NO: 1241822
gggcucaucuaggucagaa

SEQ ID NO: 1302475 - RNA, 19 nt, Artificial Sequence
  Description of Artificial Sequence: Synthetic oligonucleotide
  Antisense strand to SEQ ID NO: 1302474
uucugaccuagaugagccc

SEQ ID NO: 1302476 - RNA, 19 nt, Artificial Sequence
  Description of Artificial Sequence: Synthetic oligonucleotide
  Sense strand starting at position 2448 of SEQ ID NO: 1241822
aggucagaaagcugagauu

SEQ ID NO: 1302477 - RNA, 19 nt, Artificial Sequence
  Description of Artificial Sequence: Synthetic oligonucleotide
  Antisense strand to SEQ ID NO: 1302476
aaucucagcuuucugaccu

SEQ ID NO: 1302478 - RNA, 19 nt, Artificial Sequence
  Description of Artificial Sequence: Synthetic oligonucleotide
  Sense strand starting at position 2552 of SEQ ID NO: 1241822
ccaagucuugcuggagaag

SEQ ID NO: 1302479 - RNA, 19 nt, Artificial Sequence
  Description of Artificial Sequence: Synthetic oligonucleotide
  Antisense strand to SEQ ID NO: 1302478
cuucuccagcaagacuugg

SEQ ID NO: 1302480 - RNA, 19 nt, Artificial Sequence
  Description of Artificial Sequence: Synthetic oligonucleotide
  Sense strand starting at position 2597 of SEQ ID NO: 1241822
uuggguagcccucauccau

SEQ ID NO: 1302481 - RNA, 19 nt, Artificial Sequence
  Description of Artificial Sequence: Synthetic oligonucleotide
  Antisense strand to SEQ ID NO: 1302480
auggaugagggcuacccaa

SEQ ID NO: 1302482 - RNA, 19 nt, Artificial Sequence
  Description of Artificial Sequence: Synthetic oligonucleotide
  Sense strand starting at position 2732 of SEQ ID NO: 1241822
agaugagcaucuuuaaacu

SEQ ID NO: 1302483 - RNA, 19 nt, Artificial Sequence
  Description of Artificial Sequence: Synthetic oligonucleotide
  Antisense strand to SEQ ID NO: 1302482
aguuuaaagaugcucaucu

SEQ ID NO: 1302484 - RNA, 19 nt, Artificial Sequence
  Description of Artificial Sequence: Synthetic oligonucleotide
  Sense strand starting at position 2792 of SEQ ID NO: 1241822
aggcaaauacuuugaugga

SEQ ID NO: 1302485 - RNA, 19 nt, Artificial Sequence
  Description of Artificial Sequence: Synthetic oligonucleotide
  Antisense strand to SEQ ID NO: 1302484
uccaucaaaguauuugccu

SEQ ID NO: 1302486 - RNA, 19 nt, Artificial Sequence
  Description of Artificial Sequence: Synthetic oligonucleotide
  Sense strand starting at position 2886 of SEQ ID NO: 1241822
uugucauaaccuggaaaug

SEQ ID NO: 1302487 - RNA, 19 nt, Artificial Sequence
  Description of Artificial Sequence: Synthetic oligonucleotide
  Antisense strand to SEQ ID NO: 1302486
cauuuccagguuaugacaa

SEQ ID NO: 1302488 - RNA, 19 nt, Artificial Sequence
  Description of Artificial Sequence: Synthetic oligonucleotide
  Sense strand starting at position 2913 of SEQ ID NO: 1241822
augcaaucucaagagccau

SEQ ID NO: 1302489 - RNA, 19 nt, Artificial Sequence
  Description of Artificial Sequence: Synthetic oligonucleotide
  Antisense strand to SEQ ID NO: 1302488
auggcucuugagauugcau

SEQ ID NO: 1302490 - RNA, 19 nt, Artificial Sequence
  Description of Artificial Sequence: Synthetic oligonucleotide
  Sense strand starting at position 2948 of SEQ ID NO: 1241822
gcaagauccucauuugcuu

SEQ ID NO: 1302491 - RNA, 19 nt, Artificial Sequence
  Description of Artificial Sequence: Synthetic oligonucleotide
  Antisense strand to SEQ ID NO: 1302490
aagcaaaugaggaucuugc

SEQ ID NO: 1302492 - RNA, 19 nt, Artificial Sequence
  Description of Artificial Sequence: Synthetic oligonucleotide
  Sense strand starting at position 2956 of SEQ ID NO: 1241822
cucauuugcuugguaugua

SEQ ID NO: 1302493 - RNA, 19 nt, Artificial Sequence
  Description of Artificial Sequence: Synthetic oligonucleotide
  Antisense strand to SEQ ID NO: 1302492
uacauaccaagcaaaugag

SEQ ID NO: 1302494 - RNA, 19 nt, Artificial Sequence
  Description of Artificial Sequence: Synthetic oligonucleotide
  Sense strand starting at position 2984 of SEQ ID NO: 1241822
gugagaagcauuggcauaa

SEQ ID NO: 1302495 - RNA, 19 nt, Artificial Sequence
  Description of Artificial Sequence: Synthetic oligonucleotide
  Antisense strand to SEQ ID NO: 1302494
uuaugccaaugcuucucac

SEQ ID NO: 1302496 - RNA, 19 nt, Artificial Sequence
  Description of Artificial Sequence: Synthetic oligonucleotide
  Sense strand starting at position 3012 of SEQ ID NO: 1241822
aucaucuccucuguggaaa

SEQ ID NO: 1302497 - RNA, 19 nt, Artificial Sequence
  Description of Artificial Sequence: Synthetic oligonucleotide
  Antisense strand to SEQ ID NO: 1302496
uuuccacagaggagaugau

SEQ ID NO: 1302498 - RNA, 19 nt, Artificial Sequence
  Description of Artificial Sequence: Synthetic oligonucleotide
  Sense strand starting at position 3121 of SEQ ID NO: 1241822
ggacacagaucacuaguuu

SEQ ID NO: 1302499 - RNA, 19 nt, Artificial Sequence
  Description of Artificial Sequence: Synthetic oligonucleotide
  Antisense strand to SEQ ID NO: 1302498
aaacuagugaucugugucc

SEQ ID NO: 1302500 - RNA, 19 nt, Artificial Sequence
  Description of Artificial Sequence: Synthetic oligonucleotide
  Sense strand starting at position 3256 of SEQ ID NO: 1241822
uagaguggucuugggcuga

SEQ ID NO: 1302501 - RNA, 19 nt, Artificial Sequence
  Description of Artificial Sequence: Synthetic oligonucleotide
  Antisense strand to SEQ ID NO: 1302500
ucagcccaagaccacucua

SEQ ID NO: 1302502 - RNA, 19 nt, Artificial Sequence
  Description of Artificial Sequence: Synthetic oligonucleotide
  Sense strand starting at position 3284 of SEQ ID NO: 1241822
gaggccugcugauuagaua

SEQ ID NO: 1302503 - RNA, 19 nt, Artificial Sequence
  Description of Artificial Sequence: Synthetic oligonucleotide
  Antisense strand to SEQ ID NO: 1302502
uaucuaaucagcaggccuc

SEQ ID NO: 1302504 - RNA, 19 nt, Artificial Sequence
  Description of Artificial Sequence: Synthetic oligonucleotide
  Sense strand starting at position 3405 of SEQ ID NO: 1241822
ggguaagagaccuggcuga

SEQ ID NO: 1302505 - RNA, 19 nt, Artificial Sequence
  Description of Artificial Sequence: Synthetic oligonucleotide
  Antisense strand to SEQ ID NO: 1302504
ucagccaggucucuuaccc

SEQ ID NO: 1302506 - RNA, 19 nt, Artificial Sequence
  Description of Artificial Sequence: Synthetic oligonucleotide
  Sense strand starting at position 3409 of SEQ ID NO: 1241822
aagagaccuggcugagauu

SEQ ID NO: 1302507 - RNA, 19 nt, Artificial Sequence
  Description of Artificial Sequence: Synthetic oligonucleotide
  Antisense strand to SEQ ID NO: 1302506
aaucucagccaggucucuu

SEQ ID NO: 1302508 - RNA, 19 nt, Artificial Sequence
  Description of Artificial Sequence: Synthetic oligonucleotide
  Sense strand starting at position 3420 of SEQ ID NO: 1241822
cugagauuacucugugcag

SEQ ID NO: 1302509 - RNA, 19 nt, Artificial Sequence
  Description of Artificial Sequence: Synthetic oligonucleotide
  Antisense strand to SEQ ID NO: 1302508
cugcacagaguaaucucag

SEQ ID NO: 1302510 - RNA, 19 nt, Artificial Sequence
  Description of Artificial Sequence: Synthetic oligonucleotide
  Sense strand starting at position 3668 of SEQ ID NO: 1241822
ccauaacacuuguugcaga

SEQ ID NO: 1302511 - RNA, 19 nt, Artificial Sequence
  Description of Artificial Sequence: Synthetic oligonucleotide
  Antisense strand to SEQ ID NO: 1302510
ucugcaacaaguguuaugg

SEQ ID NO: 1302512 - RNA, 19 nt, Artificial Sequence
  Description of Artificial Sequence: Synthetic oligonucleotide
  Sense strand starting at position 3673 of SEQ ID NO: 1241822
acacuuguugcagaaguua

SEQ ID NO: 1302513 - RNA, 19 nt, Artificial Sequence
  Description of Artificial Sequence: Synthetic oligonucleotide
  Antisense strand to SEQ ID NO: 1302512
uaacuucugcaacaagugu

SEQ ID NO: 1302514 - RNA, 19 nt, Artificial Sequence
  Description of Artificial Sequence: Synthetic oligonucleotide
  Sense strand starting at position 3685 of SEQ ID NO: 1241822
gaaguuauuguguauugua

SEQ ID NO: 1302515 - RNA, 19 nt, Artificial Sequence
  Description of Artificial Sequence: Synthetic oligonucleotide
  Antisense strand to SEQ ID NO: 1302514
uacaauacacaauaacuuc

SEQ ID NO: 1302516 - RNA, 19 nt, Artificial Sequence
  Description of Artificial Sequence: Synthetic oligonucleotide
  Sense strand starting at position 3721 of SEQ ID NO: 1241822
cuguaaguaauauggaaga

SEQ ID NO: 1302517 - RNA, 19 nt, Artificial Sequence
  Description of Artificial Sequence: Synthetic oligonucleotide
  Antisense strand to SEQ ID NO: 1302516
ucuuccauauuacuuacag

SEQ ID NO: 1302518 - RNA, 19 nt, Artificial Sequence
  Description of Artificial Sequence: Synthetic oligonucleotide
  Sense strand starting at position 3744 of SEQ ID NO: 1241822
aagcaaauuguauguguaa

SEQ ID NO: 1302519 - RNA, 19 nt, Artificial Sequence
  Description of Artificial Sequence: Synthetic oligonucleotide
  Antisense strand to SEQ ID NO: 1302518
uuacacauacaauuugcuu

SEQ ID NO: 1302520 - RNA, 19 nt, Artificial Sequence
  Description of Artificial Sequence: Synthetic oligonucleotide
  Sense strand starting at position 3833 of SEQ ID NO: 1241822
ucagcaaaucuuugcagga

SEQ ID NO: 1302521 - RNA, 19 nt, Artificial Sequence
  Description of Artificial Sequence: Synthetic oligonucleotide
  Antisense strand to SEQ ID NO: 1302520
uccugcaaagauuugcuga

SEQ ID NO: 1302522 - RNA, 19 nt, Artificial Sequence
  Description of Artificial Sequence: Synthetic oligonucleotide
  Sense strand starting at position 3849 of SEQ ID NO: 1241822
ggacaagaacugugcuagu

SEQ ID NO: 1302523 - RNA, 19 nt, Artificial Sequence
  Description of Artificial Sequence: Synthetic oligonucleotide
  Antisense strand to SEQ ID NO: 1302522
acuagcacaguucuugucc

SEQ ID NO: 1302524 - RNA, 19 nt, Artificial Sequence
  Description of Artificial Sequence: Synthetic oligonucleotide
  Sense strand starting at position 3963 of SEQ ID NO: 1241822
gagguaucagcaggauagu

SEQ ID NO: 1302525 - RNA, 19 nt, Artificial Sequence
  Description of Artificial Sequence: Synthetic oligonucleotide
  Antisense strand to SEQ ID NO: 1302524
acuauccugcugauaccuc

SEQ ID NO: 1302526 - RNA, 19 nt, Artificial Sequence
  Description of Artificial Sequence: Synthetic oligonucleotide
  Sense strand starting at position 118 of SEQ ID NO: 1241823
aucagaucugaaugccuua

SEQ ID NO: 1302527 - RNA, 19 nt, Artificial Sequence
  Description of Artificial Sequence: Synthetic oligonucleotide
  Antisense strand to SEQ ID NO: 1302526
uaaggcauucagaucugau

SEQ ID NO: 1302528 - RNA, 19 nt, Artificial Sequence
  Description of Artificial Sequence: Synthetic oligonucleotide
  Sense strand starting at position 229 of SEQ ID NO: 1241823
cugagcuuaugauuaucca

SEQ ID NO: 1302529 - RNA, 19 nt, Artificial Sequence
  Description of Artificial Sequence: Synthetic oligonucleotide
  Antisense strand to SEQ ID NO: 1302528
uggauaaucauaagcucag

SEQ ID NO: 1302530 - RNA, 19 nt, Artificial Sequence
  Description of Artificial Sequence: Synthetic oligonucleotide
  Sense strand starting at position 230 of SEQ ID NO: 1241823
ugagcuuaugauuauccau

SEQ ID NO: 1302531 - RNA, 19 nt, Artificial Sequence
  Description of Artificial Sequence: Synthetic oligonucleotide
  Antisense strand to SEQ ID NO: 1302530
auggauaaucauaagcuca

SEQ ID NO: 1302532 - RNA, 19 nt, Artificial Sequence
  Description of Artificial Sequence: Synthetic oligonucleotide
  Sense strand starting at position 348 of SEQ ID NO: 1241823
uuacucuaccagugaguug

SEQ ID NO: 1302533 - RNA, 19 nt, Artificial Sequence
  Description of Artificial Sequence: Synthetic oligonucleotide
  Antisense strand to SEQ ID NO: 1302532
caacucacugguagaguaa

SEQ ID NO: 1302534 - RNA, 19 nt, Artificial Sequence
  Description of Artificial Sequence: Synthetic oligonucleotide
  Sense strand starting at position 530 of SEQ ID NO: 1241823
gaguuaagcuccucgaaag

SEQ ID NO: 1302535 - RNA, 19 nt, Artificial Sequence
  Description of Artificial Sequence: Synthetic oligonucleotide
  Antisense strand to SEQ ID NO: 1302534
cuuucgaggagcuuaacuc

SEQ ID NO: 1302536 - RNA, 19 nt, Artificial Sequence
  Description of Artificial Sequence: Synthetic oligonucleotide
  Sense strand starting at position 694 of SEQ ID NO: 1241823
accgaaucuuuauccugau

SEQ ID NO: 1302537 - RNA, 19 nt, Artificial Sequence
  Description of Artificial Sequence: Synthetic oligonucleotide
  Antisense strand to SEQ ID NO: 1302536
aucaggauaaagauucggu

SEQ ID NO: 1302538 - RNA, 19 nt, Artificial Sequence
  Description of Artificial Sequence: Synthetic oligonucleotide
  Sense strand starting at position 695 of SEQ ID NO: 1241823
ccgaaucuuuauccugauc

SEQ ID NO: 1302539 - RNA, 19 nt, Artificial Sequence
  Description of Artificial Sequence: Synthetic oligonucleotide
  Antisense strand to SEQ ID NO: 1302538
gaucaggauaaagauucgg

SEQ ID NO: 1302540 - RNA, 19 nt, Artificial Sequence
  Description of Artificial Sequence: Synthetic oligonucleotide
  Sense strand starting at position 842 of SEQ ID NO: 1241823
accuguaguuaaccauaaa

SEQ ID NO: 1302541 - RNA, 19 nt, Artificial Sequence
  Description of Artificial Sequence: Synthetic oligonucleotide
  Antisense strand to SEQ ID NO: 1302540
uuuaugguuaacuacaggu

SEQ ID NO: 1302542 - RNA, 19 nt, Artificial Sequence
  Description of Artificial Sequence: Synthetic oligonucleotide
  Sense strand starting at position 845 of SEQ ID NO: 1241823
uguaguuaaccauaaaguu

SEQ ID NO: 1302543 - RNA, 19 nt, Artificial Sequence
  Description of Artificial Sequence: Synthetic oligonucleotide
  Antisense strand to SEQ ID NO: 1302542
aacuuuaugguuaacuaca

SEQ ID NO: 1302544 - RNA, 19 nt, Artificial Sequence
  Description of Artificial Sequence: Synthetic oligonucleotide
  Sense strand starting at position 941 of SEQ ID NO: 1241823
ggaagugguuuccuaugga

SEQ ID NO: 1302545 - RNA, 19 nt, Artificial Sequence
  Description of Artificial Sequence: Synthetic oligonucleotide
  Antisense strand to SEQ ID NO: 1302544
uccauaggaaaccacuucc

SEQ ID NO: 1302546 - RNA, 19 nt, Artificial Sequence
  Description of Artificial Sequence: Synthetic oligonucleotide
  Sense strand starting at position 944 of SEQ ID NO: 1241823
agugguuuccuauggauga

SEQ ID NO: 1302547 - RNA, 19 nt, Artificial Sequence
  Description of Artificial Sequence: Synthetic oligonucleotide
  Antisense strand to SEQ ID NO: 1302546
ucauccauaggaaaccacu

SEQ ID NO: 1302548 - RNA, 19 nt, Artificial Sequence
  Description of Artificial Sequence: Synthetic oligonucleotide
  Sense strand starting at position 946 of SEQ ID NO: 1241823
ugguuuccuauggaugacu

SEQ ID NO: 1302549 - RNA, 19 nt, Artificial Sequence
  Description of Artificial Sequence: Synthetic oligonucleotide
  Antisense strand to SEQ ID NO: 1302548
agucauccauaggaaacca

SEQ ID NO: 1302550 - RNA, 19 nt, Artificial Sequence
  Description of Artificial Sequence: Synthetic oligonucleotide
  Sense strand starting at position 986 of SEQ ID NO: 1241823
cuuuaugauuauucugaag

SEQ ID NO: 1302551 - RNA, 19 nt, Artificial Sequence
  Description of Artificial Sequence: Synthetic oligonucleotide
  Antisense strand to SEQ ID NO: 1302550
cuucagaauaaucauaaag

SEQ ID NO: 1302552 - RNA, 19 nt, Artificial Sequence
  Description of Artificial Sequence: Synthetic oligonucleotide
  Sense strand starting at position 998 of SEQ ID NO: 1241823
ucugaagucuaaccuggau

SEQ ID NO: 1302553 - RNA, 19 nt, Artificial Sequence
  Description of Artificial Sequence: Synthetic oligonucleotide
  Antisense strand to SEQ ID NO: 1302552
auccagguuagacuucaga

SEQ ID NO: 1302554 - RNA, 19 nt, Artificial Sequence
  Description of Artificial Sequence: Synthetic oligonucleotide
  Sense strand starting at position 1153 of SEQ ID NO: 1241823
ggcugagugguuuauucac

SEQ ID NO: 1302555 - RNA, 19 nt, Artificial Sequence
  Description of Artificial Sequence: Synthetic oligonucleotide
  Antisense strand to SEQ ID NO: 1302554
gugaauaaaccacucagcc

SEQ ID NO: 1302556 - RNA, 19 nt, Artificial Sequence
  Description of Artificial Sequence: Synthetic oligonucleotide
  Sense strand starting at position 1179 of SEQ ID NO: 1241823
cuaacauagggcugggaau

SEQ ID NO: 1302557 - RNA, 19 nt, Artificial Sequence
  Description of Artificial Sequence: Synthetic oligonucleotide
  Antisense strand to SEQ ID NO: 1302556
auucccagcccuauguuag

SEQ ID NO: 1302558 - RNA, 19 nt, Artificial Sequence
  Description of Artificial Sequence: Synthetic oligonucleotide
  Sense strand starting at position 1239 of SEQ ID NO: 1241823
cuuguuaggugucuauaaa

SEQ ID NO: 1302559 - RNA, 19 nt, Artificial Sequence
  Description of Artificial Sequence: Synthetic oligonucleotide
  Antisense strand to SEQ ID NO: 1302558
uuuauagacaccuaacaag

SEQ ID NO: 1302560 - RNA, 19 nt, Artificial Sequence
  Description of Artificial Sequence: Synthetic oligonucleotide
  Sense strand starting at position 1240 of SEQ ID NO: 1241823
uuguuaggugucuauaaau

SEQ ID NO: 1302561 - RNA, 19 nt, Artificial Sequence
  Description of Artificial Sequence: Synthetic oligonucleotide
  Antisense strand to SEQ ID NO: 1302560
auuuauagacaccuaacaa

SEQ ID NO: 1302562 - RNA, 19 nt, Artificial Sequence
  Description of Artificial Sequence: Synthetic oligonucleotide
  Sense strand starting at position 2513 of SEQ ID NO: 1241823
guggucuaugagcagauga

SEQ ID NO: 1302563 - RNA, 19 nt, Artificial Sequence
  Description of Artificial Sequence: Synthetic oligonucleotide
  Antisense strand to SEQ ID NO: 1302562
ucaucugcucauagaccac

SEQ ID NO: 1302564 - RNA, 19 nt, Artificial Sequence
  Description of Artificial Sequence: Synthetic oligonucleotide
  Sense strand starting at position 2668 of SEQ ID NO: 1241823
ugccguggacaugaaugaa

SEQ ID NO: 1302565 - RNA, 19 nt, Artificial Sequence
  Description of Artificial Sequence: Synthetic oligonucleotide
  Antisense strand to SEQ ID NO: 1302564
uucauucauguccacggca

SEQ ID NO: 1302566 - RNA, 19 nt, Artificial Sequence
  Description of Artificial Sequence: Synthetic oligonucleotide
  Sense strand starting at position 2845 of SEQ ID NO: 1241823
agaggcauuuccucgcgua

SEQ ID NO: 1302567 - RNA, 19 nt, Artificial Sequence
  Description of Artificial Sequence: Synthetic oligonucleotide
  Antisense strand to SEQ ID NO: 1302566
uacgcgaggaaaugccucu

SEQ ID NO: 1302568 - RNA, 19 nt, Artificial Sequence
  Description of Artificial Sequence: Synthetic oligonucleotide
  Sense strand starting at position 2846 of SEQ ID NO: 1241823
gaggcauuuccucgcguaa

SEQ ID NO: 1302569 - RNA, 19 nt, Artificial Sequence
  Description of Artificial Sequence: Synthetic oligonucleotide
  Antisense strand to SEQ ID NO: 1302568
uuacgcgaggaaaugccuc

SEQ ID NO: 1302570 - RNA, 19 nt, Artificial Sequence
  Description of Artificial Sequence: Synthetic oligonucleotide
  Sense strand starting at position 2976 of SEQ ID NO: 1241823
uucucagugcaggaggauu

SEQ ID NO: 1302571 - RNA, 19 nt, Artificial Sequence
  Description of Artificial Sequence: Synthetic oligonucleotide
  Antisense strand to SEQ ID NO: 1302570
aauccuccugcacugagaa

SEQ ID NO: 1302572 - RNA, 19 nt, Artificial Sequence
  Description of Artificial Sequence: Synthetic oligonucleotide
  Sense strand starting at position 3041 of SEQ ID NO: 1241823
cucucaagagauugugacu

SEQ ID NO: 1302573 - RNA, 19 nt, Artificial Sequence
  Description of Artificial Sequence: Synthetic oligonucleotide
  Antisense strand to SEQ ID NO: 1302572
agucacaaucucuugagag

SEQ ID NO: 1302574 - RNA, 19 nt, Artificial Sequence
  Description of Artificial Sequence: Synthetic oligonucleotide
  Sense strand starting at position 3110 of SEQ ID NO: 1241823
gauggacgccuuuaucaca

SEQ ID NO: 1302575 - RNA, 19 nt, Artificial Sequence
  Description of Artificial Sequence: Synthetic oligonucleotide
  Antisense strand to SEQ ID NO: 1302574
ugugauaaaggcguccauc

SEQ ID NO: 1302576 - RNA, 19 nt, Artificial Sequence
  Description of Artificial Sequence: Synthetic oligonucleotide
  Sense strand starting at position 3277 of SEQ ID NO: 1241823
ccgaaaggaugauuccacu

SEQ ID NO: 1302577 - RNA, 19 nt, Artificial Sequence
  Description of Artificial Sequence: Synthetic oligonucleotide
  Antisense strand to SEQ ID NO: 1302576
aguggaaucauccuuucgg

SEQ ID NO: 1302578 - RNA, 19 nt, Artificial Sequence
  Description of Artificial Sequence: Synthetic oligonucleotide
  Sense strand starting at position 3343 of SEQ ID NO: 1241823
ggaauauuuguuuguguau

SEQ ID NO: 1302579 - RNA, 19 nt, Artificial Sequence
  Description of Artificial Sequence: Synthetic oligonucleotide
  Antisense strand to SEQ ID NO: 1302578
auacacaaacaaauauucc

SEQ ID NO: 1302580 - RNA, 19 nt, Artificial Sequence
  Description of Artificial Sequence: Synthetic oligonucleotide
  Sense strand starting at position 3416 of SEQ ID NO: 1241823
gggacaauggcuuggguca

SEQ ID NO: 1302581 - RNA, 19 nt, Artificial Sequence
  Description of Artificial Sequence: Synthetic oligonucleotide
  Antisense strand to SEQ ID NO: 1302580
ugacccaagccauuguccc

SEQ ID NO: 1302582 - RNA, 19 nt, Artificial Sequence
  Description of Artificial Sequence: Synthetic oligonucleotide
  Sense strand starting at position 3575 of SEQ ID NO: 1241823
uguggauuccucugggagu

SEQ ID NO: 1302583 - RNA, 19 nt, Artificial Sequence
  Description of Artificial Sequence: Synthetic oligonucleotide
  Antisense strand to SEQ ID NO: 1302582
acucccagaggaauccaca

SEQ ID NO: 1302584 - RNA, 19 nt, Artificial Sequence
  Description of Artificial Sequence: Synthetic oligonucleotide
  Sense strand starting at position 3577 of SEQ ID NO: 1241823
uggauuccucugggaguca

SEQ ID NO: 1302585 - RNA, 19 nt, Artificial Sequence
  Description of Artificial Sequence: Synthetic oligonucleotide
  Antisense strand to SEQ ID NO: 1302584
ugacucccagaggaaucca

SEQ ID NO: 1302586 - RNA, 19 nt, Artificial Sequence
  Description of Artificial Sequence: Synthetic oligonucleotide
  Sense strand starting at position 3637 of SEQ ID NO: 1241823
agcucaugugcucaaugga

SEQ ID NO: 1302587 - RNA, 19 nt, Artificial Sequence
  Description of Artificial Sequence: Synthetic oligonucleotide
  Antisense strand to SEQ ID NO: 1302586
uccauugagcacaugagcu

SEQ ID NO: 1302588 - RNA, 19 nt, Artificial Sequence
  Description of Artificial Sequence: Synthetic oligonucleotide
  Sense strand starting at position 3712 of SEQ ID NO: 1241823
ugugaucaauuugacuaca

SEQ ID NO: 1302589 - RNA, 19 nt, Artificial Sequence
  Description of Artificial Sequence: Synthetic oligonucleotide
  Antisense strand to SEQ ID NO: 1302588
uguagucaaauugaucaca

SEQ ID NO: 1302590 - RNA, 19 nt, Artificial Sequence
  Description of Artificial Sequence: Synthetic oligonucleotide
  Sense strand starting at position 3730 of SEQ ID NO: 1241823
aggauugagcucugaguau

SEQ ID NO: 1302591 - RNA, 19 nt, Artificial Sequence
  Description of Artificial Sequence: Synthetic oligonucleotide
  Antisense strand to SEQ ID NO: 1302590
auacucagagcucaauccu

SEQ ID NO: 1302592 - RNA, 19 nt, Artificial Sequence
  Description of Artificial Sequence: Synthetic oligonucleotide
  Sense strand starting at position 3734 of SEQ ID NO: 1241823
uugagcucugaguaucaga

SEQ ID NO: 1302593 - RNA, 19 nt, Artificial Sequence
  Description of Artificial Sequence: Synthetic oligonucleotide
  Antisense strand to SEQ ID NO: 1302592
ucugauacucagagcucaa

SEQ ID NO: 1302594 - RNA, 19 nt, Artificial Sequence
  Description of Artificial Sequence: Synthetic oligonucleotide
  Sense strand starting at position 3765 of SEQ ID NO: 1241823
augugccauggccauuaau

SEQ ID NO: 1302595 - RNA, 19 nt, Artificial Sequence
  Description of Artificial Sequence: Synthetic oligonucleotide
  Antisense strand to SEQ ID NO: 1302594
auuaauggccauggcacau

SEQ ID NO: 1302596 - RNA, 19 nt, Artificial Sequence
  Description of Artificial Sequence: Synthetic oligonucleotide
  Sense strand starting at position 3768 of SEQ ID NO: 1241823
ugccauggccauuaauguu

SEQ ID NO: 1302597 - RNA, 19 nt, Artificial Sequence
  Description of Artificial Sequence: Synthetic oligonucleotide
  Antisense strand to SEQ ID NO: 1302596
aacauuaauggccauggca

SEQ ID NO: 1302598 - RNA, 19 nt, Artificial Sequence
  Description of Artificial Sequence: Synthetic oligonucleotide
  Sense strand starting at position 3798 of SEQ ID NO: 1241823
cuaguauccuucuuccuga

SEQ ID NO: 1302599 - RNA, 19 nt, Artificial Sequence
  Description of Artificial Sequence: Synthetic oligonucleotide
  Antisense strand to SEQ ID NO: 1302598
ucaggaagaaggauacuag

SEQ ID NO: 1302600 - RNA, 19 nt, Artificial Sequence
  Description of Artificial Sequence: Synthetic oligonucleotide
  Sense strand starting at position 3801 of SEQ ID NO: 1241823
guauccuucuuccugaaga

SEQ ID NO: 1302601 - RNA, 19 nt, Artificial Sequence
  Description of Artificial Sequence: Synthetic oligonucleotide
  Antisense strand to SEQ ID NO: 1302600
ucuucaggaagaaggauac

SEQ ID NO: 1302602 - RNA, 19 nt, Artificial Sequence
  Description of Artificial Sequence: Synthetic oligonucleotide
  Sense strand starting at position 3921 of SEQ ID NO: 1241823
ggcaguaaggacuggacua

SEQ ID NO: 1302603 - RNA, 19 nt, Artificial Sequence
  Description of Artificial Sequence: Synthetic oligonucleotide
  Antisense strand to SEQ ID NO: 1302602
uaguccaguccuuacugcc

SEQ ID NO: 1302604 - RNA, 19 nt, Artificial Sequence
  Description of Artificial Sequence: Synthetic oligonucleotide
  Sense strand starting at position 3922 of SEQ ID NO: 1241823
gcaguaaggacuggacuaa

SEQ ID NO: 1302605 - RNA, 19 nt, Artificial Sequence
  Description of Artificial Sequence: Synthetic oligonucleotide
  Antisense strand to SEQ ID NO: 1302604
uuaguccaguccuuacugc

SEQ ID NO: 1302606 - RNA, 19 nt, Artificial Sequence
  Description of Artificial Sequence: Synthetic oligonucleotide
  Sense strand starting at position 68 of SEQ ID NO: 1241824
gagagucucccgcacauaa

SEQ ID NO: 1302607 - RNA, 19 nt, Artificial Sequence
  Description of Artificial Sequence: Synthetic oligonucleotide
  Antisense strand to SEQ ID NO: 1302606
uuaugugcgggagacucuc

SEQ ID NO: 1302608 - RNA, 19 nt, Artificial Sequence
  Description of Artificial Sequence: Synthetic oligonucleotide
  Sense strand starting at position 116 of SEQ ID NO: 1241824
gcucuuaaucuauaaugug

SEQ ID NO: 1302609 - RNA, 19 nt, Artificial Sequence
  Description of Artificial Sequence: Synthetic oligonucleotide
  Antisense strand to SEQ ID NO: 1302608
cacauuauagauuaagagc

SEQ ID NO: 1302610 - RNA, 19 nt, Artificial Sequence
  Description of Artificial Sequence: Synthetic oligonucleotide
  Sense strand starting at position 130 of SEQ ID NO: 1241824
augugugucuugcuugaug

SEQ ID NO: 1302611 - RNA, 19 nt, Artificial Sequence
  Description of Artificial Sequence: Synthetic oligonucleotide
  Antisense strand to SEQ ID NO: 1302610
caucaagcaagacacacau

SEQ ID NO: 1302612 - RNA, 19 nt, Artificial Sequence
  Description of Artificial Sequence: Synthetic oligonucleotide
  Sense strand starting at position 132 of SEQ ID NO: 1241824
gugugucuugcuugaugaa

SEQ ID NO: 1302613 - RNA, 19 nt, Artificial Sequence
  Description of Artificial Sequence: Synthetic oligonucleotide
  Antisense strand to SEQ ID NO: 1302612
uucaucaagcaagacacac

SEQ ID NO: 1302614 - RNA, 19 nt, Artificial Sequence
  Description of Artificial Sequence: Synthetic oligonucleotide
  Sense strand starting at position 133 of SEQ ID NO: 1241824
ugugucuugcuugaugaau

SEQ ID NO: 1302615 - RNA, 19 nt, Artificial Sequence
  Description of Artificial Sequence: Synthetic oligonucleotide
  Antisense strand to SEQ ID NO: 1302614
auucaucaagcaagacaca

SEQ ID NO: 1302616 - RNA, 19 nt, Artificial Sequence
  Description of Artificial Sequence: Synthetic oligonucleotide
  Sense strand starting at position 141 of SEQ ID NO: 1241824
gcuugaugaauuggauuga

SEQ ID NO: 1302617 - RNA, 19 nt, Artificial Sequence
  Description of Artificial Sequence: Synthetic oligonucleotide
  Antisense strand to SEQ ID NO: 1302616
ucaauccaauucaucaagc

SEQ ID NO: 1302618 - RNA, 19 nt, Artificial Sequence
  Description of Artificial Sequence: Synthetic oligonucleotide
  Sense strand starting at position 142 of SEQ ID NO: 1241824
cuugaugaauuggauugaa

SEQ ID NO: 1302619 - RNA, 19 nt, Artificial Sequence
  Description of Artificial Sequence: Synthetic oligonucleotide
  Antisense strand to SEQ ID NO: 1302618
uucaauccaauucaucaag

SEQ ID NO: 1302620 - RNA, 19 nt, Artificial Sequence
  Description of Artificial Sequence: Synthetic oligonucleotide
  Sense strand starting at position 271 of SEQ ID NO: 1241824
ugguccugcagucauaagu

SEQ ID NO: 1302621 - RNA, 19 nt, Artificial Sequence
  Description of Artificial Sequence: Synthetic oligonucleotide
  Antisense strand to SEQ ID NO: 1302620
acuuaugacugcaggacca

SEQ ID NO: 1302622 - RNA, 19 nt, Artificial Sequence
  Description of Artificial Sequence: Synthetic oligonucleotide
  Sense strand starting at position 691 of SEQ ID NO: 1241824
ccgaacuucuacucuaaga

SEQ ID NO: 1302623 - RNA, 19 nt, Artificial Sequence
  Description of Artificial Sequence: Synthetic oligonucleotide
  Antisense strand to SEQ ID NO: 1302622
ucuuagaguagaaguucgg

SEQ ID NO: 1302624 - RNA, 19 nt, Artificial Sequence
  Description of Artificial Sequence: Synthetic oligonucleotide
  Sense strand starting at position 1608 of SEQ ID NO: 1241824
caucgauccggagggagaa

SEQ ID NO: 1302625 - RNA, 19 nt, Artificial Sequence
  Description of Artificial Sequence: Synthetic oligonucleotide
  Antisense strand to SEQ ID NO: 1302624
uucucccuccggaucgaug

SEQ ID NO: 1302626 - RNA, 19 nt, Artificial Sequence
  Description of Artificial Sequence: Synthetic oligonucleotide
  Sense strand starting at position 2077 of SEQ ID NO: 1241824
gcuccuacgcggagauagu

SEQ ID NO: 1302627 - RNA, 19 nt, Artificial Sequence
  Description of Artificial Sequence: Synthetic oligonucleotide
  Antisense strand to SEQ ID NO: 1302626
acuaucuccgcguaggagc

SEQ ID NO: 1302628 - RNA, 19 nt, Artificial Sequence
  Description of Artificial Sequence: Synthetic oligonucleotide
  Sense strand starting at position 2086 of SEQ ID NO: 1241824
cggagauagugcuccgcua

SEQ ID NO: 1302629 - RNA, 19 nt, Artificial Sequence
  Description of Artificial Sequence: Synthetic oligonucleotide
  Antisense strand to SEQ ID NO: 1302628
uagcggagcacuaucuccg

SEQ ID NO: 1302630 - RNA, 19 nt, Artificial Sequence
  Description of Artificial Sequence: Synthetic oligonucleotide
  Sense strand starting at position 2170 of SEQ ID NO: 1241824
gcuuucgacuucuuaacgu

SEQ ID NO: 1302631 - RNA, 19 nt, Artificial Sequence
  Description of Artificial Sequence: Synthetic oligonucleotide
  Antisense strand to SEQ ID NO: 1302630
acguuaagaagucgaaagc

SEQ ID NO: 1302632 - RNA, 19 nt, Artificial Sequence
  Description of Artificial Sequence: Synthetic oligonucleotide
  Sense strand starting at position 2177 of SEQ ID NO: 1241824
acuucuuaacgucacaagu

SEQ ID NO: 1302633 - RNA, 19 nt, Artificial Sequence
  Description of Artificial Sequence: Synthetic oligonucleotide
  Antisense strand to SEQ ID NO: 1302632
acuugugacguuaagaagu

SEQ ID NO: 1302634 - RNA, 19 nt, Artificial Sequence
  Description of Artificial Sequence: Synthetic oligonucleotide
  Sense strand starting at position 2297 of SEQ ID NO: 1241824
cagugaugcgaacauaaau

SEQ ID NO: 1302635 - RNA, 19 nt, Artificial Sequence
  Description of Artificial Sequence: Synthetic oligonucleotide
  Antisense strand to SEQ ID NO: 1302634
auuuauguucgcaucacug

SEQ ID NO: 1302636 - RNA, 19 nt, Artificial Sequence
  Description of Artificial Sequence: Synthetic oligonucleotide
  Sense strand starting at position 2347 of SEQ ID NO: 1241824
caccauguccgagauguaa

SEQ ID NO: 1302637 - RNA, 19 nt, Artificial Sequence
  Description of Artificial Sequence: Synthetic oligonucleotide
  Antisense strand to SEQ ID NO: 1302636
uuacaucucggacauggug

SEQ ID NO: 1302638 - RNA, 19 nt, Artificial Sequence
  Description of Artificial Sequence: Synthetic oligonucleotide
  Sense strand starting at position 2349 of SEQ ID NO: 1241824
ccauguccgagauguaauu

SEQ ID NO: 1302639 - RNA, 19 nt, Artificial Sequence
  Description of Artificial Sequence: Synthetic oligonucleotide
  Antisense strand to SEQ ID NO: 1302638
aauuacaucucggacaugg

SEQ ID NO: 1302640 - RNA, 19 nt, Artificial Sequence
  Description of Artificial Sequence: Synthetic oligonucleotide
  Sense strand starting at position 2368 of SEQ ID NO: 1241824
uuccgagcucuuuacaaau

SEQ ID NO: 1302641 - RNA, 19 nt, Artificial Sequence
  Description of Artificial Sequence: Synthetic oligonucleotide
  Antisense strand to SEQ ID NO: 1302640
auuuguaaagagcucggaa

SEQ ID NO: 1302642 - RNA, 19 nt, Artificial Sequence
  Description of Artificial Sequence: Synthetic oligonucleotide
  Sense strand starting at position 2370 of SEQ ID NO: 1241824
ccgagcucuuuacaaauuu

SEQ ID NO: 1302643 - RNA, 19 nt, Artificial Sequence
  Description of Artificial Sequence: Synthetic oligonucleotide
  Antisense strand to SEQ ID NO: 1302642
aaauuuguaaagagcucgg

SEQ ID NO: 1302644 - RNA, 19 nt, Artificial Sequence
  Description of Artificial Sequence: Synthetic oligonucleotide
  Sense strand starting at position 2433 of SEQ ID NO: 1241824
gaaccagacugucuugaau

SEQ ID NO: 1302645 - RNA, 19 nt, Artificial Sequence
  Description of Artificial Sequence: Synthetic oligonucleotide
  Antisense strand to SEQ ID NO: 1302644
auucaagacagucugguuc

SEQ ID NO: 1302646 - RNA, 19 nt, Artificial Sequence
  Description of Artificial Sequence: Synthetic oligonucleotide
  Sense strand starting at position 2525 of SEQ ID NO: 1241824
cuucuuaaagcuuguguuu

SEQ ID NO: 1302647 - RNA, 19 nt, Artificial Sequence
  Description of Artificial Sequence: Synthetic oligonucleotide
  Antisense strand to SEQ ID NO: 1302646
aaacacaagcuuuaagaag

SEQ ID NO: 1302648 - RNA, 19 nt, Artificial Sequence
  Description of Artificial Sequence: Synthetic oligonucleotide
  Sense strand starting at position 2528 of SEQ ID NO: 1241824
cuuaaagcuuguguuuguu

SEQ ID NO: 1302649 - RNA, 19 nt, Artificial Sequence
  Description of Artificial Sequence: Synthetic oligonucleotide
  Antisense strand to SEQ ID NO: 1302648
aacaaacacaagcuuuaag

SEQ ID NO: 1302650 - RNA, 19 nt, Artificial Sequence
  Description of Artificial Sequence: Synthetic oligonucleotide
  Sense strand starting at position 2567 of SEQ ID NO: 1241824
ucuuuaaacuuggauguca

SEQ ID NO: 1302651 - RNA, 19 nt, Artificial Sequence
  Description of Artificial Sequence: Synthetic oligonucleotide
  Antisense strand to SEQ ID NO: 1302650
ugacauccaaguuuaaaga

SEQ ID NO: 1302652 - RNA, 19 nt, Artificial Sequence
  Description of Artificial Sequence: Synthetic oligonucleotide
  Sense strand starting at position 2569 of SEQ ID NO: 1241824
uuuaaacuuggaugucaug

SEQ ID NO: 1302653 - RNA, 19 nt, Artificial Sequence
  Description of Artificial Sequence: Synthetic oligonucleotide
  Antisense strand to SEQ ID NO: 1302652
caugacauccaaguuuaaa

SEQ ID NO: 1302654 - RNA, 19 nt, Artificial Sequence
  Description of Artificial Sequence: Synthetic oligonucleotide
  Sense strand starting at position 2632 of SEQ ID NO: 1241824
uuugguaucgugcuugagu

SEQ ID NO: 1302655 - RNA, 19 nt, Artificial Sequence
  Description of Artificial Sequence: Synthetic oligonucleotide
  Antisense strand to SEQ ID NO: 1302654
acucaagcacgauaccaaa

SEQ ID NO: 1302656 - RNA, 19 nt, Artificial Sequence
  Description of Artificial Sequence: Synthetic oligonucleotide
  Sense strand starting at position 2633 of SEQ ID NO: 1241824
uugguaucgugcuugagua

SEQ ID NO: 1302657 - RNA, 19 nt, Artificial Sequence
  Description of Artificial Sequence: Synthetic oligonucleotide
  Antisense strand to SEQ ID NO: 1302656
uacucaagcacgauaccaa

SEQ ID NO: 1302658 - RNA, 19 nt, Artificial Sequence
  Description of Artificial Sequence: Synthetic oligonucleotide
  Sense strand starting at position 2634 of SEQ ID NO: 1241824
ugguaucgugcuugaguag

SEQ ID NO: 1302659 - RNA, 19 nt, Artificial Sequence
  Description of Artificial Sequence: Synthetic oligonucleotide
  Antisense strand to SEQ ID NO: 1302658
cuacucaagcacgauacca

SEQ ID NO: 1302660 - RNA, 19 nt, Artificial Sequence
  Description of Artificial Sequence: Synthetic oligonucleotide
  Sense strand starting at position 2641 of SEQ ID NO: 1241824
gugcuugaguaggccgaau

SEQ ID NO: 1302661 - RNA, 19 nt, Artificial Sequence
  Description of Artificial Sequence: Synthetic oligonucleotide
  Antisense strand to SEQ ID NO: 1302660
auucggccuacucaagcac

SEQ ID NO: 1302662 - RNA, 19 nt, Artificial Sequence
  Description of Artificial Sequence: Synthetic oligonucleotide
  Sense strand starting at position 2643 of SEQ ID NO: 1241824
gcuugaguaggccgaauua

SEQ ID NO: 1302663 - RNA, 19 nt, Artificial Sequence
  Description of Artificial Sequence: Synthetic oligonucleotide
  Antisense strand to SEQ ID NO: 1302662
uaauucggccuacucaagc

SEQ ID NO: 1302664 - RNA, 19 nt, Artificial Sequence
  Description of Artificial Sequence: Synthetic oligonucleotide
  Sense strand starting at position 2999 of SEQ ID NO: 1241824
gccuuaauguuauugauac

SEQ ID NO: 1302665 - RNA, 19 nt, Artificial Sequence
  Description of Artificial Sequence: Synthetic oligonucleotide
  Antisense strand to SEQ ID NO: 1302664
guaucaauaacauuaaggc

SEQ ID NO: 1302666 - RNA, 19 nt, Artificial Sequence
  Description of Artificial Sequence: Synthetic oligonucleotide
  Sense strand starting at position 3027 of SEQ ID NO: 1241824
cuggaauuccuauacuguu

SEQ ID NO: 1302667 - RNA, 19 nt, Artificial Sequence
  Description of Artificial Sequence: Synthetic oligonucleotide
  Antisense strand to SEQ ID NO: 1302666
aacaguauaggaauuccag

SEQ ID NO: 1302668 - RNA, 19 nt, Artificial Sequence
  Description of Artificial Sequence: Synthetic oligonucleotide
  Sense strand starting at position 3035 of SEQ ID NO: 1241824
ccuauacuguuaccuguau

SEQ ID NO: 1302669 - RNA, 19 nt, Artificial Sequence
  Description of Artificial Sequence: Synthetic oligonucleotide
  Antisense strand to SEQ ID NO: 1302668
auacagguaacaguauagg

SEQ ID NO: 1302670 - RNA, 19 nt, Artificial Sequence
  Description of Artificial Sequence: Synthetic oligonucleotide
  Sense strand starting at position 3036 of SEQ ID NO: 1241824
cuauacuguuaccuguaua

SEQ ID NO: 1302671 - RNA, 19 nt, Artificial Sequence
  Description of Artificial Sequence: Synthetic oligonucleotide
  Antisense strand to SEQ ID NO: 1302670
uauacagguaacaguauag

SEQ ID NO: 1302672 - RNA, 19 nt, Artificial Sequence
  Description of Artificial Sequence: Synthetic oligonucleotide
  Sense strand starting at position 3378 of SEQ ID NO: 1241824
cgagccuggccauaagagu

SEQ ID NO: 1302673 - RNA, 19 nt, Artificial Sequence
  Description of Artificial Sequence: Synthetic oligonucleotide
  Antisense strand to SEQ ID NO: 1302672
acucuuauggccaggcucg

SEQ ID NO: 1302674 - RNA, 19 nt, Artificial Sequence
  Description of Artificial Sequence: Synthetic oligonucleotide
  Sense strand starting at position 3400 of SEQ ID NO: 1241824
cuuuaauucucaguuugag

SEQ ID NO: 1302675 - RNA, 19 nt, Artificial Sequence
  Description of Artificial Sequence: Synthetic oligonucleotide
  Antisense strand to SEQ ID NO: 1302674
cucaaacugagaauuaaag

SEQ ID NO: 1302676 - RNA, 19 nt, Artificial Sequence
  Description of Artificial Sequence: Synthetic oligonucleotide
  Sense strand starting at position 3406 of SEQ ID NO: 1241824
uucucaguuugagaaauga

SEQ ID NO: 1302677 - RNA, 19 nt, Artificial Sequence
  Description of Artificial Sequence: Synthetic oligonucleotide
  Antisense strand to SEQ ID NO: 1302676
ucauuucucaaacugagaa

SEQ ID NO: 1302678 - RNA, 19 nt, Artificial Sequence
  Description of Artificial Sequence: Synthetic oligonucleotide
  Sense strand starting at position 3527 of SEQ ID NO: 1241824
auggcagaaucucacgaau

SEQ ID NO: 1302679 - RNA, 19 nt, Artificial Sequence
  Description of Artificial Sequence: Synthetic oligonucleotide
  Antisense strand to SEQ ID NO: 1302678
auucgugagauucugccau

SEQ ID NO: 1302680 - RNA, 19 nt, Artificial Sequence
  Description of Artificial Sequence: Synthetic oligonucleotide
  Sense strand starting at position 3530 of SEQ ID NO: 1241824
gcagaaucucacgaauggu

SEQ ID NO: 1302681 - RNA, 19 nt, Artificial Sequence
  Description of Artificial Sequence: Synthetic oligonucleotide
  Antisense strand to SEQ ID NO: 1302680
accauucgugagauucugc

SEQ ID NO: 1302682 - RNA, 19 nt, Artificial Sequence
  Description of Artificial Sequence: Synthetic oligonucleotide
  Sense strand starting at position 3581 of SEQ ID NO: 1241824
ggaaauaguuaccugcaga

SEQ ID NO: 1302683 - RNA, 19 nt, Artificial Sequence
  Description of Artificial Sequence: Synthetic oligonucleotide
  Antisense strand to SEQ ID NO: 1302682
ucugcagguaacuauuucc

SEQ ID NO: 1302684 - RNA, 19 nt, Artificial Sequence
  Description of Artificial Sequence: Synthetic oligonucleotide
  Sense strand starting at position 3800 of SEQ ID NO: 1241824
uugcauuacuaagaugauu

SEQ ID NO: 1302685 - RNA, 19 nt, Artificial Sequence
  Description of Artificial Sequence: Synthetic oligonucleotide
  Antisense strand to SEQ ID NO: 1302684
aaucaucuuaguaaugcaa

SEQ ID NO: 1302686 - RNA, 19 nt, Artificial Sequence
  Description of Artificial Sequence: Synthetic oligonucleotide
  Sense strand starting at position 33 of SEQ ID NO: 1241825
aguuucuugugccugggaa

SEQ ID NO: 1302687 - RNA, 19 nt, Artificial Sequence
  Description of Artificial Sequence: Synthetic oligonucleotide
  Antisense strand to SEQ ID NO: 1302686
uucccaggcacaagaaacu

SEQ ID NO: 1302688 - RNA, 19 nt, Artificial Sequence
  Description of Artificial Sequence: Synthetic oligonucleotide
  Sense strand starting at position 34 of SEQ ID NO: 1241825
guuucuugugccugggaag

SEQ ID NO: 1302689 - RNA, 19 nt, Artificial Sequence
  Description of Artificial Sequence: Synthetic oligonucleotide
  Antisense strand to SEQ ID NO: 1302688
cuucccaggcacaagaaac

SEQ ID NO: 1302690 - RNA, 19 nt, Artificial Sequence
  Description of Artificial Sequence: Synthetic oligonucleotide
  Sense strand starting at position 88 of SEQ ID NO: 1241825
agaggccagucaugacaga

SEQ ID NO: 1302691 - RNA, 19 nt, Artificial Sequence
  Description of Artificial Sequence: Synthetic oligonucleotide
  Antisense strand to SEQ ID NO: 1302690
ucugucaugacuggccucu

SEQ ID NO: 1302692 - RNA, 19 nt, Artificial Sequence
  Description of Artificial Sequence: Synthetic oligonucleotide
  Sense strand starting at position 353 of SEQ ID NO: 1241825
ggaaguuacugccacagca

SEQ ID NO: 1302693 - RNA, 19 nt, Artificial Sequence
  Description of Artificial Sequence: Synthetic oligonucleotide
  Antisense strand to SEQ ID NO: 1302692
ugcuguggcaguaacuucc

SEQ ID NO: 1302694 - RNA, 19 nt, Artificial Sequence
  Description of Artificial Sequence: Synthetic oligonucleotide
  Sense strand starting at position 394 of SEQ ID NO: 1241825
uaggguuuaucaccaaugu

SEQ ID NO: 1302695 - RNA, 19 nt, Artificial Sequence
  Description of Artificial Sequence: Synthetic oligonucleotide
  Antisense strand to SEQ ID NO: 1302694
acauuggugauaaacccua

SEQ ID NO: 1302696 - RNA, 19 nt, Artificial Sequence
  Description of Artificial Sequence: Synthetic oligonucleotide
  Sense strand starting at position 395 of SEQ ID NO: 1241825
aggguuuaucaccaaugua

SEQ ID NO: 1302697 - RNA, 19 nt, Artificial Sequence
  Description of Artificial Sequence: Synthetic oligonucleotide
  Antisense strand to SEQ ID NO: 1302696
uacauuggugauaaacccu

SEQ ID NO: 1302698 - RNA, 19 nt, Artificial Sequence
  Description of Artificial Sequence: Synthetic oligonucleotide
  Sense strand starting at position 398 of SEQ ID NO: 1241825
guuuaucaccaauguaaac

SEQ ID NO: 1302699 - RNA, 19 nt, Artificial Sequence
  Description of Artificial Sequence: Synthetic oligonucleotide
  Antisense strand to SEQ ID NO: 1302698
guuuacauuggugauaaac

SEQ ID NO: 1302700 - RNA, 19 nt, Artificial Sequence
  Description of Artificial Sequence: Synthetic oligonucleotide
  Sense strand starting at position 548 of SEQ ID NO: 1241825
cuggguaccucuccaaacu

SEQ ID NO: 1302701 - RNA, 19 nt, Artificial Sequence
  Description of Artificial Sequence: Synthetic oligonucleotide
  Antisense strand to SEQ ID NO: 1302700
aguuuggagagguacccag

SEQ ID NO: 1302702 - RNA, 19 nt, Artificial Sequence
  Description of Artificial Sequence: Synthetic oligonucleotide
  Sense strand starting at position 549 of SEQ ID NO: 1241825
uggguaccucuccaaacuu

SEQ ID NO: 1302703 - RNA, 19 nt, Artificial Sequence
  Description of Artificial Sequence: Synthetic oligonucleotide
  Antisense strand to SEQ ID NO: 1302702
aaguuuggagagguaccca

SEQ ID NO: 1302704 - RNA, 19 nt, Artificial Sequence
  Description of Artificial Sequence: Synthetic oligonucleotide
  Sense strand starting at position 662 of SEQ ID NO: 1241825
cagguacucccgugacaua

SEQ ID NO: 1302705 - RNA, 19 nt, Artificial Sequence
  Description of Artificial Sequence: Synthetic oligonucleotide
  Antisense strand to SEQ ID NO: 1302704
uaugucacgggaguaccug

SEQ ID NO: 1302706 - RNA, 19 nt, Artificial Sequence
  Description of Artificial Sequence: Synthetic oligonucleotide
  Sense strand starting at position 701 of SEQ ID NO: 1241825
gaugcaguguucucuacau

SEQ ID NO: 1302707 - RNA, 19 nt, Artificial Sequence
  Description of Artificial Sequence: Synthetic oligonucleotide
  Antisense strand to SEQ ID NO: 1302706
auguagagaacacugcauc

SEQ ID NO: 1302708 - RNA, 19 nt, Artificial Sequence
  Description of Artificial Sequence: Synthetic oligonucleotide
  Sense strand starting at position 703 of SEQ ID NO: 1241825
ugcaguguucucuacauug

SEQ ID NO: 1302709 - RNA, 19 nt, Artificial Sequence
  Description of Artificial Sequence: Synthetic oligonucleotide
  Antisense strand to SEQ ID NO: 1302708
caauguagagaacacugca

SEQ ID NO: 1302710 - RNA, 19 nt, Artificial Sequence
  Description of Artificial Sequence: Synthetic oligonucleotide
  Sense strand starting at position 765 of SEQ ID NO: 1241825
gccagaucugcgcucccua

SEQ ID NO: 1302711 - RNA, 19 nt, Artificial Sequence
  Description of Artificial Sequence: Synthetic oligonucleotide
  Antisense strand to SEQ ID NO: 1302710
uagggagcgcagaucuggc

SEQ ID NO: 1302712 - RNA, 19 nt, Artificial Sequence
  Description of Artificial Sequence: Synthetic oligonucleotide
  Sense strand starting at position 2022 of SEQ ID NO: 1241825
guaauuagcgcugcggaca

SEQ ID NO: 1302713 - RNA, 19 nt, Artificial Sequence
  Description of Artificial Sequence: Synthetic oligonucleotide
  Antisense strand to SEQ ID NO: 1302712
uguccgcagcgcuaauuac

SEQ ID NO: 1302714 - RNA, 19 nt, Artificial Sequence
  Description of Artificial Sequence: Synthetic oligonucleotide
  Sense strand starting at position 2161 of SEQ ID NO: 1241825
gugcguaguuagguuguca

SEQ ID NO: 1302715 - RNA, 19 nt, Artificial Sequence
  Description of Artificial Sequence: Synthetic oligonucleotide
  Antisense strand to SEQ ID NO: 1302714
ugacaaccuaacuacgcac

SEQ ID NO: 1302716 - RNA, 19 nt, Artificial Sequence
  Description of Artificial Sequence: Synthetic oligonucleotide
  Sense strand starting at position 2172 of SEQ ID NO: 1241825
gguugucagcgcuuucuua

SEQ ID NO: 1302717 - RNA, 19 nt, Artificial Sequence
  Description of Artificial Sequence: Synthetic oligonucleotide
  Antisense strand to SEQ ID NO: 1302716
uaagaaagcgcugacaacc

SEQ ID NO: 1302718 - RNA, 19 nt, Artificial Sequence
  Description of Artificial Sequence: Synthetic oligonucleotide
  Sense strand starting at position 2174 of SEQ ID NO: 1241825
uugucagcgcuuucuuaca

SEQ ID NO: 1302719 - RNA, 19 nt, Artificial Sequence
  Description of Artificial Sequence: Synthetic oligonucleotide
  Antisense strand to SEQ ID NO: 1302718
uguaagaaagcgcugacaa

SEQ ID NO: 1302720 - RNA, 19 nt, Artificial Sequence
  Description of Artificial Sequence: Synthetic oligonucleotide
  Sense strand starting at position 2334 of SEQ ID NO: 1241825
cccaguuucccgggaaggu

SEQ ID NO: 1302721 - RNA, 19 nt, Artificial Sequence
  Description of Artificial Sequence: Synthetic oligonucleotide
  Antisense strand to SEQ ID NO: 1302720
accuucccgggaaacuggg

SEQ ID NO: 1302722 - RNA, 19 nt, Artificial Sequence
  Description of Artificial Sequence: Synthetic oligonucleotide
  Sense strand starting at position 2335 of SEQ ID NO: 1241825
ccaguuucccgggaaggua

SEQ ID NO: 1302723 - RNA, 19 nt, Artificial Sequence
  Description of Artificial Sequence: Synthetic oligonucleotide
  Antisense strand to SEQ ID NO: 1302722
uaccuucccgggaaacugg

SEQ ID NO: 1302724 - RNA, 19 nt, Artificial Sequence
  Description of Artificial Sequence: Synthetic oligonucleotide
  Sense strand starting at position 2426 of SEQ ID NO: 1241825
aguuguuuguggccgcaaa

SEQ ID NO: 1302725 - RNA, 19 nt, Artificial Sequence
  Description of Artificial Sequence: Synthetic oligonucleotide
  Antisense strand to SEQ ID NO: 1302724
uuugcggccacaaacaacu

SEQ ID NO: 1302726 - RNA, 19 nt, Artificial Sequence
  Description of Artificial Sequence: Synthetic oligonucleotide
  Sense strand starting at position 2489 of SEQ ID NO: 1241825
gcuauauccgcggcguuua

SEQ ID NO: 1302727 - RNA, 19 nt, Artificial Sequence
  Description of Artificial Sequence: Synthetic oligonucleotide
  Antisense strand to SEQ ID NO: 1302726
uaaacgccgcggauauagc

SEQ ID NO: 1302728 - RNA, 19 nt, Artificial Sequence
  Description of Artificial Sequence: Synthetic oligonucleotide
  Sense strand starting at position 2623 of SEQ ID NO: 1241825
cgcugaaguuacccagaga

SEQ ID NO: 1302729 - RNA, 19 nt, Artificial Sequence
  Description of Artificial Sequence: Synthetic oligonucleotide
  Antisense strand to SEQ ID NO: 1302728
ucucuggguaacuucagcg

SEQ ID NO: 1302730 - RNA, 19 nt, Artificial Sequence
  Description of Artificial Sequence: Synthetic oligonucleotide
  Sense strand starting at position 2660 of SEQ ID NO: 1241825
gcuagaauuugugauccug

SEQ ID NO: 1302731 - RNA, 19 nt, Artificial Sequence
  Description of Artificial Sequence: Synthetic oligonucleotide
  Antisense strand to SEQ ID NO: 1302730
caggaucacaaauucuagc

SEQ ID NO: 1302732 - RNA, 19 nt, Artificial Sequence
  Description of Artificial Sequence: Synthetic oligonucleotide
  Sense strand starting at position 2736 of SEQ ID NO: 1241825
gacucaguguuacagguua

SEQ ID NO: 1302733 - RNA, 19 nt, Artificial Sequence
  Description of Artificial Sequence: Synthetic oligonucleotide
  Antisense strand to SEQ ID NO: 1302732
uaaccuguaacacugaguc

SEQ ID NO: 1302734 - RNA, 19 nt, Artificial Sequence
  Description of Artificial Sequence: Synthetic oligonucleotide
  Sense strand starting at position 2741 of SEQ ID NO: 1241825
aguguuacagguuaggaaa

SEQ ID NO: 1302735 - RNA, 19 nt, Artificial Sequence
  Description of Artificial Sequence: Synthetic oligonucleotide
  Antisense strand to SEQ ID NO: 1302734
uuuccuaaccuguaacacu

SEQ ID NO: 1302736 - RNA, 19 nt, Artificial Sequence
  Description of Artificial Sequence: Synthetic oligonucleotide
  Sense strand starting at position 2790 of SEQ ID NO: 1241825
gaacgugagucucccagaa

SEQ ID NO: 1302737 - RNA, 19 nt, Artificial Sequence
  Description of Artificial Sequence: Synthetic oligonucleotide
  Antisense strand to SEQ ID NO: 1302736
uucugggagacucacguuc

SEQ ID NO: 1302738 - RNA, 19 nt, Artificial Sequence
  Description of Artificial Sequence: Synthetic oligonucleotide
  Sense strand starting at position 2792 of SEQ ID NO: 1241825
acgugagucucccagaaac

SEQ ID NO: 1302739 - RNA, 19 nt, Artificial Sequence
  Description of Artificial Sequence: Synthetic oligonucleotide
  Antisense strand to SEQ ID NO: 1302738
guuucugggagacucacgu

SEQ ID NO: 1302740 - RNA, 19 nt, Artificial Sequence
  Description of Artificial Sequence: Synthetic oligonucleotide
  Sense strand starting at position 2880 of SEQ ID NO: 1241825
ugaauagcaucuuguagag

SEQ ID NO: 1302741 - RNA, 19 nt, Artificial Sequence
  Description of Artificial Sequence: Synthetic oligonucleotide
  Antisense strand to SEQ ID NO: 1302740
cucuacaagaugcuauuca

SEQ ID NO: 1302742 - RNA, 19 nt, Artificial Sequence
  Description of Artificial Sequence: Synthetic oligonucleotide
  Sense strand starting at position 3305 of SEQ ID NO: 1241825
gcuugaagccucggaaucu

SEQ ID NO: 1302743 - RNA, 19 nt, Artificial Sequence
  Description of Artificial Sequence: Synthetic oligonucleotide
  Antisense strand to SEQ ID NO: 1302742
agauuccgaggcuucaagc

SEQ ID NO: 1302744 - RNA, 19 nt, Artificial Sequence
  Description of Artificial Sequence: Synthetic oligonucleotide
  Sense strand starting at position 3306 of SEQ ID NO: 1241825
cuugaagccucggaaucua

SEQ ID NO: 1302745 - RNA, 19 nt, Artificial Sequence
  Description of Artificial Sequence: Synthetic oligonucleotide
  Antisense strand to SEQ ID NO: 1302744
uagauuccgaggcuucaag

SEQ ID NO: 1302746 - RNA, 19 nt, Artificial Sequence
  Description of Artificial Sequence: Synthetic oligonucleotide
  Sense strand starting at position 3335 of SEQ ID NO: 1241825
aggauuacauaucaucuga

SEQ ID NO: 1302747 - RNA, 19 nt, Artificial Sequence
  Description of Artificial Sequence: Synthetic oligonucleotide
  Antisense strand to SEQ ID NO: 1302746
ucagaugauauguaauccu

SEQ ID NO: 1302748 - RNA, 19 nt, Artificial Sequence
  Description of Artificial Sequence: Synthetic oligonucleotide
  Sense strand starting at position 3562 of SEQ ID NO: 1241825
cugacagcucaguagcauu

SEQ ID NO: 1302749 - RNA, 19 nt, Artificial Sequence
  Description of Artificial Sequence: Synthetic oligonucleotide
  Antisense strand to SEQ ID NO: 1302748
aaugcuacugagcugucag

SEQ ID NO: 1302750 - RNA, 19 nt, Artificial Sequence
  Description of Artificial Sequence: Synthetic oligonucleotide
  Sense strand starting at position 3591 of SEQ ID NO: 1241825
acaagaaaccuuggugauu

SEQ ID NO: 1302751 - RNA, 19 nt, Artificial Sequence
  Description of Artificial Sequence: Synthetic oligonucleotide
  Antisense strand to SEQ ID NO: 1302750
aaucaccaagguuucuugu

SEQ ID NO: 1302752 - RNA, 19 nt, Artificial Sequence
  Description of Artificial Sequence: Synthetic oligonucleotide
  Sense strand starting at position 3592 of SEQ ID NO: 1241825
caagaaaccuuggugauug

SEQ ID NO: 1302753 - RNA, 19 nt, Artificial Sequence
  Description of Artificial Sequence: Synthetic oligonucleotide
  Antisense strand to SEQ ID NO: 1302752
caaucaccaagguuucuug

SEQ ID NO: 1302754 - RNA, 19 nt, Artificial Sequence
  Description of Artificial Sequence: Synthetic oligonucleotide
  Sense strand starting at position 3593 of SEQ ID NO: 1241825
aagaaaccuuggugauuga

SEQ ID NO: 1302755 - RNA, 19 nt, Artificial Sequence
  Description of Artificial Sequence: Synthetic oligonucleotide
  Antisense strand to SEQ ID NO: 1302754
ucaaucaccaagguuucuu

SEQ ID NO: 1302756 - RNA, 19 nt, Artificial Sequence
  Description of Artificial Sequence: Synthetic oligonucleotide
  Sense strand starting at position 3602 of SEQ ID NO: 1241825
uggugauugaggugaugga

SEQ ID NO: 1302757 - RNA, 19 nt, Artificial Sequence
  Description of Artificial Sequence: Synthetic oligonucleotide
  Antisense strand to SEQ ID NO: 1302756
uccaucaccucaaucacca

SEQ ID NO: 1302758 - RNA, 19 nt, Artificial Sequence
  Description of Artificial Sequence: Synthetic oligonucleotide
  Sense strand starting at position 3638 of SEQ ID NO: 1241825
ugggauuauuacucauugu

SEQ ID NO: 1302759 - RNA, 19 nt, Artificial Sequence
  Description of Artificial Sequence: Synthetic oligonucleotide
  Antisense strand to SEQ ID NO: 1302758
acaaugaguaauaauccca

SEQ ID NO: 1302760 - RNA, 19 nt, Artificial Sequence
  Description of Artificial Sequence: Synthetic oligonucleotide
  Sense strand starting at position 3749 of SEQ ID NO: 1241825
caguaaguuucuuagugaa

SEQ ID NO: 1302761 - RNA, 19 nt, Artificial Sequence
  Description of Artificial Sequence: Synthetic oligonucleotide
  Antisense strand to SEQ ID NO: 1302760
uucacuaagaaacuuacug

SEQ ID NO: 1302762 - RNA, 19 nt, Artificial Sequence
  Description of Artificial Sequence: Synthetic oligonucleotide
  Sense strand starting at position 3751 of SEQ ID NO: 1241825
guaaguuucuuagugaauc

SEQ ID NO: 1302763 - RNA, 19 nt, Artificial Sequence
  Description of Artificial Sequence: Synthetic oligonucleotide
  Antisense strand to SEQ ID NO: 1302762
gauucacuaagaaacuuac

SEQ ID NO: 1302764 - RNA, 19 nt, Artificial Sequence
  Description of Artificial Sequence: Synthetic oligonucleotide
  Sense strand starting at position 3842 of SEQ ID NO: 1241825
gcgcaagucagccugaagu

SEQ ID NO: 1302765 - RNA, 19 nt, Artificial Sequence
  Description of Artificial Sequence: Synthetic oligonucleotide
  Antisense strand to SEQ ID NO: 1302764
acuucaggcugacuugcgc

SEQ ID NO: 1302766 - RNA, 19 nt, Artificial Sequence
  Description of Artificial Sequence: Synthetic oligonucleotide
  Sense strand starting at position 2 of SEQ ID NO: 1241826
gaguguuugugcccagauu

SEQ ID NO: 1302767 - RNA, 19 nt, Artificial Sequence
  Description of Artificial Sequence: Synthetic oligonucleotide
  Antisense strand to SEQ ID NO: 1302766
aaucugggcacaaacacuc

SEQ ID NO: 1302768 - RNA, 19 nt, Artificial Sequence
  Description of Artificial Sequence: Synthetic oligonucleotide
  Sense strand starting at position 3 of SEQ ID NO: 1241826
aguguuugugcccagauua

SEQ ID NO: 1302769 - RNA, 19 nt, Artificial Sequence
  Description of Artificial Sequence: Synthetic oligonucleotide
  Antisense strand to SEQ ID NO: 1302768
uaaucugggcacaaacacu

SEQ ID NO: 1302770 - RNA, 19 nt, Artificial Sequence
  Description of Artificial Sequence: Synthetic oligonucleotide
  Sense strand starting at position 16 of SEQ ID NO: 1241826
agauuagguuggagagagu

SEQ ID NO: 1302771 - RNA, 19 nt, Artificial Sequence
  Description of Artificial Sequence: Synthetic oligonucleotide
  Antisense strand to SEQ ID NO: 1302770
acucucuccaaccuaaucu

SEQ ID NO: 1302772 - RNA, 19 nt, Artificial Sequence
  Description of Artificial Sequence: Synthetic oligonucleotide
  Sense strand starting at position 90 of SEQ ID NO: 1241826
gucggccuggcagauuaau

SEQ ID NO: 1302773 - RNA, 19 nt, Artificial Sequence
  Description of Artificial Sequence: Synthetic oligonucleotide
  Antisense strand to SEQ ID NO: 1302772
auuaaucugccaggccgac

SEQ ID NO: 1302774 - RNA, 19 nt, Artificial Sequence
  Description of Artificial Sequence: Synthetic oligonucleotide
  Sense strand starting at position 137 of SEQ ID NO: 1241826
cuguguccugccugagcaa

SEQ ID NO: 1302775 - RNA, 19 nt, Artificial Sequence
  Description of Artificial Sequence: Synthetic oligonucleotide
  Antisense strand to SEQ ID NO: 1302774
uugcucaggcaggacacag

SEQ ID NO: 1302776 - RNA, 19 nt, Artificial Sequence
  Description of Artificial Sequence: Synthetic oligonucleotide
  Sense strand starting at position 186 of SEQ ID NO: 1241826
auaagaaucccacgagguu

SEQ ID NO: 1302777 - RNA, 19 nt, Artificial Sequence
  Description of Artificial Sequence: Synthetic oligonucleotide
  Antisense strand to SEQ ID NO: 1302776
aaccucgugggauucuuau

SEQ ID NO: 1302778 - RNA, 19 nt, Artificial Sequence
  Description of Artificial Sequence: Synthetic oligonucleotide
  Sense strand starting at position 390 of SEQ ID NO: 1241826
gccuguuugcugguccaua

SEQ ID NO: 1302779 - RNA, 19 nt, Artificial Sequence
  Description of Artificial Sequence: Synthetic oligonucleotide
  Antisense strand to SEQ ID NO: 1302778
uauggaccagcaaacaggc

SEQ ID NO: 1302780 - RNA, 19 nt, Artificial Sequence
  Description of Artificial Sequence: Synthetic oligonucleotide
  Sense strand starting at position 391 of SEQ ID NO: 1241826
ccuguuugcugguccauaa

SEQ ID NO: 1302781 - RNA, 19 nt, Artificial Sequence
  Description of Artificial Sequence: Synthetic oligonucleotide
  Antisense strand to SEQ ID NO: 1302780
uuauggaccagcaaacagg

SEQ ID NO: 1302782 - RNA, 19 nt, Artificial Sequence
  Description of Artificial Sequence: Synthetic oligonucleotide
  Sense strand starting at position 435 of SEQ ID NO: 1241826
acgguuguuguggagauga

SEQ ID NO: 1302783 - RNA, 19 nt, Artificial Sequence
  Description of Artificial Sequence: Synthetic oligonucleotide
  Antisense strand to SEQ ID NO: 1302782
ucaucuccacaacaaccgu

SEQ ID NO: 1302784 - RNA, 19 nt, Artificial Sequence
  Description of Artificial Sequence: Synthetic oligonucleotide
  Sense strand starting at position 437 of SEQ ID NO: 1241826
gguuguuguggagaugaug

SEQ ID NO: 1302785 - RNA, 19 nt, Artificial Sequence
  Description of Artificial Sequence: Synthetic oligonucleotide
  Antisense strand to SEQ ID NO: 1302784
caucaucuccacaacaacc

SEQ ID NO: 1302786 - RNA, 19 nt, Artificial Sequence
  Description of Artificial Sequence: Synthetic oligonucleotide
  Sense strand starting at position 635 of SEQ ID NO: 1241826
agacuacuuucucgucaca

SEQ ID NO: 1302787 - RNA, 19 nt, Artificial Sequence
  Description of Artificial Sequence: Synthetic oligonucleotide
  Antisense strand to SEQ ID NO: 1302786
ugugacgagaaaguagucu

SEQ ID NO: 1302788 - RNA, 19 nt, Artificial Sequence
  Description of Artificial Sequence: Synthetic oligonucleotide
  Sense strand starting at position 1297 of SEQ ID NO: 1241826
cucgcuaaggagugugaga

SEQ ID NO: 1302789 - RNA, 19 nt, Artificial Sequence
  Description of Artificial Sequence: Synthetic oligonucleotide
  Antisense strand to SEQ ID NO: 1302788
ucucacacuccuuagcgag

SEQ ID NO: 1302790 - RNA, 19 nt, Artificial Sequence
  Description of Artificial Sequence: Synthetic oligonucleotide
  Sense strand starting at position 1299 of SEQ ID NO: 1241826
cgcuaaggagugugagaaa

SEQ ID NO: 1302791 - RNA, 19 nt, Artificial Sequence
  Description of Artificial Sequence: Synthetic oligonucleotide
  Antisense strand to SEQ ID NO: 1302790
uuucucacacuccuuagcg

SEQ ID NO: 1302792 - RNA, 19 nt, Artificial Sequence
  Description of Artificial Sequence: Synthetic oligonucleotide
  Sense strand starting at position 1317 of SEQ ID NO: 1241826
accaaauccucagugggua

SEQ ID NO: 1302793 - RNA, 19 nt, Artificial Sequence
  Description of Artificial Sequence: Synthetic oligonucleotide
  Antisense strand to SEQ ID NO: 1302792
uacccacugaggauuuggu

SEQ ID NO: 1302794 - RNA, 19 nt, Artificial Sequence
  Description of Artificial Sequence: Synthetic oligonucleotide
  Sense strand starting at position 1318 of SEQ ID NO: 1241826
ccaaauccucaguggguaa

SEQ ID NO: 1302795 - RNA, 19 nt, Artificial Sequence
  Description of Artificial Sequence: Synthetic oligonucleotide
  Antisense strand to SEQ ID NO: 1302794
uuacccacugaggauuugg

SEQ ID NO: 1302796 - RNA, 19 nt, Artificial Sequence
  Description of Artificial Sequence: Synthetic oligonucleotide
  Sense strand starting at position 1434 of SEQ ID NO: 1241826
gggcuuauuccaggcgaca

SEQ ID NO: 1302797 - RNA, 19 nt, Artificial Sequence
  Description of Artificial Sequence: Synthetic oligonucleotide
  Antisense strand to SEQ ID NO: 1302796
ugucgccuggaauaagccc

SEQ ID NO: 1302798 - RNA, 19 nt, Artificial Sequence
  Description of Artificial Sequence: Synthetic oligonucleotide
  Sense strand starting at position 2297 of SEQ ID NO: 1241826
cggaaagaaucuggaauuu

SEQ ID NO: 1302799 - RNA, 19 nt, Artificial Sequence
  Description of Artificial Sequence: Synthetic oligonucleotide
  Antisense strand to SEQ ID NO: 1302798
aaauuccagauucuuuccg

SEQ ID NO: 1302800 - RNA, 19 nt, Artificial Sequence
  Description of Artificial Sequence: Synthetic oligonucleotide
  Sense strand starting at position 2321 of SEQ ID NO: 1241826
auuaauguguugucccuaa

SEQ ID NO: 1302801 - RNA, 19 nt, Artificial Sequence
  Description of Artificial Sequence: Synthetic oligonucleotide
  Antisense strand to SEQ ID NO: 1302800
uuagggacaacacauuaau

SEQ ID NO: 1302802 - RNA, 19 nt, Artificial Sequence
  Description of Artificial Sequence: Synthetic oligonucleotide
  Sense strand starting at position 2325 of SEQ ID NO: 1241826
auguguugucccuaaauug

SEQ ID NO: 1302803 - RNA, 19 nt, Artificial Sequence
  Description of Artificial Sequence: Synthetic oligonucleotide
  Antisense strand to SEQ ID NO: 1302802
caauuuagggacaacacau

SEQ ID NO: 1302804 - RNA, 19 nt, Artificial Sequence
  Description of Artificial Sequence: Synthetic oligonucleotide
  Sense strand starting at position 2448 of SEQ ID NO: 1241826
aaagcuaucugcggagaca

SEQ ID NO: 1302805 - RNA, 19 nt, Artificial Sequence
  Description of Artificial Sequence: Synthetic oligonucleotide
  Antisense strand to SEQ ID NO: 1302804
ugucuccgcagauagcuuu

SEQ ID NO: 1302806 - RNA, 19 nt, Artificial Sequence
  Description of Artificial Sequence: Synthetic oligonucleotide
  Sense strand starting at position 2545 of SEQ ID NO: 1241826
ccuagugcguuugcuugaa

SEQ ID NO: 1302807 - RNA, 19 nt, Artificial Sequence
  Description of Artificial Sequence: Synthetic oligonucleotide
  Antisense strand to SEQ ID NO: 1302806
uucaagcaaacgcacuagg

SEQ ID NO: 1302808 - RNA, 19 nt, Artificial Sequence
  Description of Artificial Sequence: Synthetic oligonucleotide
  Sense strand starting at position 2790 of SEQ ID NO: 1241826
cccuucugccgucacuaaa

SEQ ID NO: 1302809 - RNA, 19 nt, Artificial Sequence
  Description of Artificial Sequence: Synthetic oligonucleotide
  Antisense strand to SEQ ID NO: 1302808
uuuagugacggcagaaggg

SEQ ID NO: 1302810 - RNA, 19 nt, Artificial Sequence
  Description of Artificial Sequence: Synthetic oligonucleotide
  Sense strand starting at position 2992 of SEQ ID NO: 1241826
cugucuguccucuagggaa

SEQ ID NO: 1302811 - RNA, 19 nt, Artificial Sequence
  Description of Artificial Sequence: Synthetic oligonucleotide
  Antisense strand to SEQ ID NO: 1302810
uucccuagaggacagacag

SEQ ID NO: 1302812 - RNA, 19 nt, Artificial Sequence
  Description of Artificial Sequence: Synthetic oligonucleotide
  Sense strand starting at position 2994 of SEQ ID NO: 1241826
gucuguccucuagggaauu

SEQ ID NO: 1302813 - RNA, 19 nt, Artificial Sequence
  Description of Artificial Sequence: Synthetic oligonucleotide
  Antisense strand to SEQ ID NO: 1302812
aauucccuagaggacagac

SEQ ID NO: 1302814 - RNA, 19 nt, Artificial Sequence
  Description of Artificial Sequence: Synthetic oligonucleotide
  Sense strand starting at position 2995 of SEQ ID NO: 1241826
ucuguccucuagggaauuu

SEQ ID NO: 1302815 - RNA, 19 nt, Artificial Sequence
  Description of Artificial Sequence: Synthetic oligonucleotide
  Antisense strand to SEQ ID NO: 1302814
aaauucccuagaggacaga

SEQ ID NO: 1302816 - RNA, 19 nt, Artificial Sequence
  Description of Artificial Sequence: Synthetic oligonucleotide
  Sense strand starting at position 3043 of SEQ ID NO: 1241826
ucucaucuccagugaccuu

SEQ ID NO: 1302817 - RNA, 19 nt, Artificial Sequence
  Description of Artificial Sequence: Synthetic oligonucleotide
  Antisense strand to SEQ ID NO: 1302816
aaggucacuggagaugaga

SEQ ID NO: 1302818 - RNA, 19 nt, Artificial Sequence
  Description of Artificial Sequence: Synthetic oligonucleotide
  Sense strand starting at position 3105 of SEQ ID NO: 1241826
ugugucaucccucagaacu

SEQ ID NO: 1302819 - RNA, 19 nt, Artificial Sequence
  Description of Artificial Sequence: Synthetic oligonucleotide
  Antisense strand to SEQ ID NO: 1302818
aguucugagggaugacaca

SEQ ID NO: 1302820 - RNA, 19 nt, Artificial Sequence
  Description of Artificial Sequence: Synthetic oligonucleotide
  Sense strand starting at position 3121 of SEQ ID NO: 1241826
acugcuccaucuuggaaau

SEQ ID NO: 1302821 - RNA, 19 nt, Artificial Sequence
  Description of Artificial Sequence: Synthetic oligonucleotide
  Antisense strand to SEQ ID NO: 1302820
auuuccaagauggagcagu

SEQ ID NO: 1302822 - RNA, 19 nt, Artificial Sequence
  Description of Artificial Sequence: Synthetic oligonucleotide
  Sense strand starting at position 3216 of SEQ ID NO: 1241826
uuccuccagucccuugaua

SEQ ID NO: 1302823 - RNA, 19 nt, Artificial Sequence
  Description of Artificial Sequence: Synthetic oligonucleotide
  Antisense strand to SEQ ID NO: 1302822
uaucaagggacuggaggaa

SEQ ID NO: 1302824 - RNA, 19 nt, Artificial Sequence
  Description of Artificial Sequence: Synthetic oligonucleotide
  Sense strand starting at position 3361 of SEQ ID NO: 1241826
uggucuugcugcucaguga

SEQ ID NO: 1302825 - RNA, 19 nt, Artificial Sequence
  Description of Artificial Sequence: Synthetic oligonucleotide
  Antisense strand to SEQ ID NO: 1302824
ucacugagcagcaagacca

SEQ ID NO: 1302826 - RNA, 19 nt, Artificial Sequence
  Description of Artificial Sequence: Synthetic oligonucleotide
  Sense strand starting at position 3364 of SEQ ID NO: 1241826
ucuugcugcucagugacau

SEQ ID NO: 1302827 - RNA, 19 nt, Artificial Sequence
  Description of Artificial Sequence: Synthetic oligonucleotide
  Antisense strand to SEQ ID NO: 1302826
augucacugagcagcaaga

SEQ ID NO: 1302828 - RNA, 19 nt, Artificial Sequence
  Description of Artificial Sequence: Synthetic oligonucleotide
  Sense strand starting at position 3370 of SEQ ID NO: 1241826
ugcucagugacauggacaa

SEQ ID NO: 1302829 - RNA, 19 nt, Artificial Sequence
  Description of Artificial Sequence: Synthetic oligonucleotide
  Antisense strand to SEQ ID NO: 1302828
uuguccaugucacugagca

SEQ ID NO: 1302830 - RNA, 19 nt, Artificial Sequence
  Description of Artificial Sequence: Synthetic oligonucleotide
  Sense strand starting at position 3598 of SEQ ID NO: 1241826
guuggugaccgucagucua

SEQ ID NO: 1302831 - RNA, 19 nt, Artificial Sequence
  Description of Artificial Sequence: Synthetic oligonucleotide
  Antisense strand to SEQ ID NO: 1302830
uagacugacggucaccaac

SEQ ID NO: 1302832 - RNA, 19 nt, Artificial Sequence
  Description of Artificial Sequence: Synthetic oligonucleotide
  Sense strand starting at position 3600 of SEQ ID NO: 1241826
uggugaccgucagucuaaa

SEQ ID NO: 1302833 - RNA, 19 nt, Artificial Sequence
  Description of Artificial Sequence: Synthetic oligonucleotide
  Antisense strand to SEQ ID NO: 1302832
uuuagacugacggucacca

SEQ ID NO: 1302834 - RNA, 19 nt, Artificial Sequence
  Description of Artificial Sequence: Synthetic oligonucleotide
  Sense strand starting at position 3648 of SEQ ID NO: 1241826
acugauaauagcuggguau

SEQ ID NO: 1302835 - RNA, 19 nt, Artificial Sequence
  Description of Artificial Sequence: Synthetic oligonucleotide
  Antisense strand to SEQ ID NO: 1302834
auacccagcuauuaucagu

SEQ ID NO: 1302836 - RNA, 19 nt, Artificial Sequence
  Description of Artificial Sequence: Synthetic oligonucleotide
  Sense strand starting at position 3649 of SEQ ID NO: 1241826
cugauaauagcuggguaua

SEQ ID NO: 1302837 - RNA, 19 nt, Artificial Sequence
  Description of Artificial Sequence: Synthetic oligonucleotide
  Antisense strand to SEQ ID NO: 1302836
uauacccagcuauuaucag

SEQ ID NO: 1302838 - RNA, 19 nt, Artificial Sequence
  Description of Artificial Sequence: Synthetic oligonucleotide
  Sense strand starting at position 3650 of SEQ ID NO: 1241826
ugauaauagcuggguauag

SEQ ID NO: 1302839 - RNA, 19 nt, Artificial Sequence
  Description of Artificial Sequence: Synthetic oligonucleotide
  Antisense strand to SEQ ID NO: 1302838
cuauacccagcuauuauca

SEQ ID NO: 1302840 - RNA, 19 nt, Artificial Sequence
  Description of Artificial Sequence: Synthetic oligonucleotide
  Sense strand starting at position 3651 of SEQ ID NO: 1241826
gauaauagcuggguauagu

SEQ ID NO: 1302841 - RNA, 19 nt, Artificial Sequence
  Description of Artificial Sequence: Synthetic oligonucleotide
  Antisense strand to SEQ ID NO: 1302840
acuauacccagcuauuauc

SEQ ID NO: 1302842 - RNA, 19 nt, Artificial Sequence
  Description of Artificial Sequence: Synthetic oligonucleotide
  Sense strand starting at position 3688 of SEQ ID NO: 1241826
cagugauacucaggaggcu

SEQ ID NO: 1302843 - RNA, 19 nt, Artificial Sequence
  Description of Artificial Sequence: Synthetic oligonucleotide
  Antisense strand to SEQ ID NO: 1302842
agccuccugaguaucacug

SEQ ID NO: 1302844 - RNA, 19 nt, Artificial Sequence
  Description of Artificial Sequence: Synthetic oligonucleotide
  Sense strand starting at position 3740 of SEQ ID NO: 1241826
aggccagucugggagacau

SEQ ID NO: 1302845 - RNA, 19 nt, Artificial Sequence
  Description of Artificial Sequence: Synthetic oligonucleotide
  Antisense strand to SEQ ID NO: 1302844
augucucccagacuggccu

SEQ ID NO: 1302846 - RNA, 19 nt, Artificial Sequence
  Description of Artificial Sequence: Synthetic oligonucleotide
  Sense strand starting at position 14 of SEQ ID NO: 1241827
gguguaugguauccacagu

SEQ ID NO: 1302847 - RNA, 19 nt, Artificial Sequence
  Description of Artificial Sequence: Synthetic oligonucleotide
  Antisense strand to SEQ ID NO: 1302846
acuguggauaccauacacc

SEQ ID NO: 1302848 - RNA, 19 nt, Artificial Sequence
  Description of Artificial Sequence: Synthetic oligonucleotide
  Sense strand starting at position 76 of SEQ ID NO: 1241827
cuggauaauccuuacagcu

SEQ ID NO: 1302849 - RNA, 19 nt, Artificial Sequence
  Description of Artificial Sequence: Synthetic oligonucleotide
  Antisense strand to SEQ ID NO: 1302848
agcuguaaggauuauccag

SEQ ID NO: 1302850 - RNA, 19 nt, Artificial Sequence
  Description of Artificial Sequence: Synthetic oligonucleotide
  Sense strand starting at position 140 of SEQ ID NO: 1241827
gguucucugguguaggauu

SEQ ID NO: 1302851 - RNA, 19 nt, Artificial Sequence
  Description of Artificial Sequence: Synthetic oligonucleotide
  Antisense strand to SEQ ID NO: 1302850
aauccuacaccagagaacc

SEQ ID NO: 1302852 - RNA, 19 nt, Artificial Sequence
  Description of Artificial Sequence: Synthetic oligonucleotide
  Sense strand starting at position 171 of SEQ ID NO: 1241827
gccacaucuuaggugguau

SEQ ID NO: 1302853 - RNA, 19 nt, Artificial Sequence
  Description of Artificial Sequence: Synthetic oligonucleotide
  Antisense strand to SEQ ID NO: 1302852
auaccaccuaagauguggc

SEQ ID NO: 1302854 - RNA, 19 nt, Artificial Sequence
  Description of Artificial Sequence: Synthetic oligonucleotide
  Sense strand starting at position 348 of SEQ ID NO: 1241827
ucaguuguagccuacaaac

SEQ ID NO: 1302855 - RNA, 19 nt, Artificial Sequence
  Description of Artificial Sequence: Synthetic oligonucleotide
  Antisense strand to SEQ ID NO: 1302854
guuuguaggcuacaacuga

SEQ ID NO: 1302856 - RNA, 19 nt, Artificial Sequence
  Description of Artificial Sequence: Synthetic oligonucleotide
  Sense strand starting at position 350 of SEQ ID NO: 1241827
aguuguagccuacaaacga

SEQ ID NO: 1302857 - RNA, 19 nt, Artificial Sequence
  Description of Artificial Sequence: Synthetic oligonucleotide
  Antisense strand to SEQ ID NO: 1302856
ucguuuguaggcuacaacu

SEQ ID NO: 1302858 - RNA, 19 nt, Artificial Sequence
  Description of Artificial Sequence: Synthetic oligonucleotide
  Sense strand starting at position 405 of SEQ ID NO: 1241827
ggcaguaaaccgugacuua

SEQ ID NO: 1302859 - RNA, 19 nt, Artificial Sequence
  Description of Artificial Sequence: Synthetic oligonucleotide
  Antisense strand to SEQ ID NO: 1302858
uaagucacgguuuacugcc

SEQ ID NO: 1302860 - RNA, 19 nt, Artificial Sequence
  Description of Artificial Sequence: Synthetic oligonucleotide
  Sense strand starting at position 406 of SEQ ID NO: 1241827
gcaguaaaccgugacuuaa

SEQ ID NO: 1302861 - RNA, 19 nt, Artificial Sequence
  Description of Artificial Sequence: Synthetic oligonucleotide
  Antisense strand to SEQ ID NO: 1302860
uuaagucacgguuuacugc

SEQ ID NO: 1302862 - RNA, 19 nt, Artificial Sequence
  Description of Artificial Sequence: Synthetic oligonucleotide
  Sense strand starting at position 475 of SEQ ID NO: 1241827
guuuguguuggcccagguu

SEQ ID NO: 1302863 - RNA, 19 nt, Artificial Sequence
  Description of Artificial Sequence: Synthetic oligonucleotide
  Antisense strand to SEQ ID NO: 1302862
aaccugggccaacacaaac

SEQ ID NO: 1302864 - RNA, 19 nt, Artificial Sequence
  Description of Artificial Sequence: Synthetic oligonucleotide
  Sense strand starting at position 612 of SEQ ID NO: 1241827
cugagauaucccugcccaa

SEQ ID NO: 1302865 - RNA, 19 nt, Artificial Sequence
  Description of Artificial Sequence: Synthetic oligonucleotide
  Antisense strand to SEQ ID NO: 1302864
uugggcagggauaucucag

SEQ ID NO: 1302866 - RNA, 19 nt, Artificial Sequence
  Description of Artificial Sequence: Synthetic oligonucleotide
  Sense strand starting at position 836 of SEQ ID NO: 1241827
ggcuuuccucgcuagauga

SEQ ID NO: 1302867 - RNA, 19 nt, Artificial Sequence
  Description of Artificial Sequence: Synthetic oligonucleotide
  Antisense strand to SEQ ID NO: 1302866
ucaucuagcgaggaaagcc

SEQ ID NO: 1302868 - RNA, 19 nt, Artificial Sequence
  Description of Artificial Sequence: Synthetic oligonucleotide
  Sense strand starting at position 838 of SEQ ID NO: 1241827
cuuuccucgcuagaugaca

SEQ ID NO: 1302869 - RNA, 19 nt, Artificial Sequence
  Description of Artificial Sequence: Synthetic oligonucleotide
  Antisense strand to SEQ ID NO: 1302868
ugucaucuagcgaggaaag

SEQ ID NO: 1302870 - RNA, 19 nt, Artificial Sequence
  Description of Artificial Sequence: Synthetic oligonucleotide
  Sense strand starting at position 904 of SEQ ID NO: 1241827
agcuaaguucagggagguu

SEQ ID NO: 1302871 - RNA, 19 nt, Artificial Sequence
  Description of Artificial Sequence: Synthetic oligonucleotide
  Antisense strand to SEQ ID NO: 1302870
aaccucccugaacuuagcu

SEQ ID NO: 1302872 - RNA, 19 nt, Artificial Sequence
  Description of Artificial Sequence: Synthetic oligonucleotide
  Sense strand starting at position 1054 of SEQ ID NO: 1241827
aaaucaguaugagucgaga

SEQ ID NO: 1302873 - RNA, 19 nt, Artificial Sequence
  Description of Artificial Sequence: Synthetic oligonucleotide
  Antisense strand to SEQ ID NO: 1302872
ucucgacucauacugauuu

SEQ ID NO: 1302874 - RNA, 19 nt, Artificial Sequence
  Description of Artificial Sequence: Synthetic oligonucleotide
  Sense strand starting at position 1056 of SEQ ID NO: 1241827
aucaguaugagucgagacu

SEQ ID NO: 1302875 - RNA, 19 nt, Artificial Sequence
  Description of Artificial Sequence: Synthetic oligonucleotide
  Antisense strand to SEQ ID NO: 1302874
agucucgacucauacugau

SEQ ID NO: 1302876 - RNA, 19 nt, Artificial Sequence
  Description of Artificial Sequence: Synthetic oligonucleotide
  Sense strand starting at position 1176 of SEQ ID NO: 1241827
gcauuaagggccuggucua

SEQ ID NO: 1302877 - RNA, 19 nt, Artificial Sequence
  Description of Artificial Sequence: Synthetic oligonucleotide
  Antisense strand to SEQ ID NO: 1302876
uagaccaggcccuuaaugc

SEQ ID NO: 1302878 - RNA, 19 nt, Artificial Sequence
  Description of Artificial Sequence: Synthetic oligonucleotide
  Sense strand starting at position 1177 of SEQ ID NO: 1241827
cauuaagggccuggucuaa

SEQ ID NO: 1302879 - RNA, 19 nt, Artificial Sequence
  Description of Artificial Sequence: Synthetic oligonucleotide
  Antisense strand to SEQ ID NO: 1302878
uuagaccaggcccuuaaug

SEQ ID NO: 1302880 - RNA, 19 nt, Artificial Sequence
  Description of Artificial Sequence: Synthetic oligonucleotide
  Sense strand starting at position 1193 of SEQ ID NO: 1241827
uaaugugauccgcaaaugu

SEQ ID NO: 1302881 - RNA, 19 nt, Artificial Sequence
  Description of Artificial Sequence: Synthetic oligonucleotide
  Antisense strand to SEQ ID NO: 1302880
acauuugcggaucacauua

SEQ ID NO: 1302882 - RNA, 19 nt, Artificial Sequence
  Description of Artificial Sequence: Synthetic oligonucleotide
  Sense strand starting at position 1203 of SEQ ID NO: 1241827
cgcaaaugugcugcuguuu

SEQ ID NO: 1302883 - RNA, 19 nt, Artificial Sequence
  Description of Artificial Sequence: Synthetic oligonucleotide
  Antisense strand to SEQ ID NO: 1302882
aaacagcagcacauuugcg

SEQ ID NO: 1302884 - RNA, 19 nt, Artificial Sequence
  Description of Artificial Sequence: Synthetic oligonucleotide
  Sense strand starting at position 1482 of SEQ ID NO: 1241827
gagguuucugcuuaguaac

SEQ ID NO: 1302885 - RNA, 19 nt, Artificial Sequence
  Description of Artificial Sequence: Synthetic oligonucleotide
  Antisense strand to SEQ ID NO: 1302884
guuacuaagcagaaaccuc

SEQ ID NO: 1302886 - RNA, 19 nt, Artificial Sequence
  Description of Artificial Sequence: Synthetic oligonucleotide
  Sense strand starting at position 1575 of SEQ ID NO: 1241827
ccgaaagacucucccugaa

SEQ ID NO: 1302887 - RNA, 19 nt, Artificial Sequence
  Description of Artificial Sequence: Synthetic oligonucleotide
  Antisense strand to SEQ ID NO: 1302886
uucagggagagucuuucgg

SEQ ID NO: 1302888 - RNA, 19 nt, Artificial Sequence
  Description of Artificial Sequence: Synthetic oligonucleotide
  Sense strand starting at position 2866 of SEQ ID NO: 1241827
aagagugucgcggacaaga

SEQ ID NO: 1302889 - RNA, 19 nt, Artificial Sequence
  Description of Artificial Sequence: Synthetic oligonucleotide
  Antisense strand to SEQ ID NO: 1302888
ucuuguccgcgacacucuu

SEQ ID NO: 1302890 - RNA, 19 nt, Artificial Sequence
  Description of Artificial Sequence: Synthetic oligonucleotide
  Sense strand starting at position 2902 of SEQ ID NO: 1241827
uguguacuucuggagguga

SEQ ID NO: 1302891 - RNA, 19 nt, Artificial Sequence
  Description of Artificial Sequence: Synthetic oligonucleotide
  Antisense strand to SEQ ID NO: 1302890
ucaccuccagaaguacaca

SEQ ID NO: 1302892 - RNA, 19 nt, Artificial Sequence
  Description of Artificial Sequence: Synthetic oligonucleotide
  Sense strand starting at position 2930 of SEQ ID NO: 1241827
aaaggaaauguuugucccu

SEQ ID NO: 1302893 - RNA, 19 nt, Artificial Sequence
  Description of Artificial Sequence: Synthetic oligonucleotide
  Antisense strand to SEQ ID NO: 1302892
agggacaaacauuuccuuu

SEQ ID NO: 1302894 - RNA, 19 nt, Artificial Sequence
  Description of Artificial Sequence: Synthetic oligonucleotide
  Sense strand starting at position 2932 of SEQ ID NO: 1241827
aggaaauguuugucccugu

SEQ ID NO: 1302895 - RNA, 19 nt, Artificial Sequence
  Description of Artificial Sequence: Synthetic oligonucleotide
  Antisense strand to SEQ ID NO: 1302894
acagggacaaacauuuccu

SEQ ID NO: 1302896 - RNA, 19 nt, Artificial Sequence
  Description of Artificial Sequence: Synthetic oligonucleotide
  Sense strand starting at position 2981 of SEQ ID NO: 1241827
gggccaggagauugaucuu

SEQ ID NO: 1302897 - RNA, 19 nt, Artificial Sequence
  Description of Artificial Sequence: Synthetic oligonucleotide
  Antisense strand to SEQ ID NO: 1302896
aagaucaaucuccuggccc

SEQ ID NO: 1302898 - RNA, 19 nt, Artificial Sequence
  Description of Artificial Sequence: Synthetic oligonucleotide
  Sense strand starting at position 3071 of SEQ ID NO: 1241827
gcucuuugugucuaucuga

SEQ ID NO: 1302899 - RNA, 19 nt, Artificial Sequence
  Description of Artificial Sequence: Synthetic oligonucleotide
  Antisense strand to SEQ ID NO: 1302898
ucagauagacacaaagagc

SEQ ID NO: 1302900 - RNA, 19 nt, Artificial Sequence
  Description of Artificial Sequence: Synthetic oligonucleotide
  Sense strand starting at position 3130 of SEQ ID NO: 1241827
cuaggauaaaucugaggcu

SEQ ID NO: 1302901 - RNA, 19 nt, Artificial Sequence
  Description of Artificial Sequence: Synthetic oligonucleotide
  Antisense strand to SEQ ID NO: 1302900
agccucagauuuauccuag

SEQ ID NO: 1302902 - RNA, 19 nt, Artificial Sequence
  Description of Artificial Sequence: Synthetic oligonucleotide
  Sense strand starting at position 3152 of SEQ ID NO: 1241827
aggauaacuugcccaccau

SEQ ID NO: 1302903 - RNA, 19 nt, Artificial Sequence
  Description of Artificial Sequence: Synthetic oligonucleotide
  Antisense strand to SEQ ID NO: 1302902
auggugggcaaguuauccu

SEQ ID NO: 1302904 - RNA, 19 nt, Artificial Sequence
  Description of Artificial Sequence: Synthetic oligonucleotide
  Sense strand starting at position 3285 of SEQ ID NO: 1241827
gagcuuugccaagagcaau

SEQ ID NO: 1302905 - RNA, 19 nt, Artificial Sequence
  Description of Artificial Sequence: Synthetic oligonucleotide
  Antisense strand to SEQ ID NO: 1302904
auugcucuuggcaaagcuc

SEQ ID NO: 1302906 - RNA, 19 nt, Artificial Sequence
  Description of Artificial Sequence: Synthetic oligonucleotide
  Sense strand starting at position 3348 of SEQ ID NO: 1241827
ggugacuuccucugaccaa

SEQ ID NO: 1302907 - RNA, 19 nt, Artificial Sequence
  Description of Artificial Sequence: Synthetic oligonucleotide
  Antisense strand to SEQ ID NO: 1302906
uuggucagaggaagucacc

SEQ ID NO: 1302908 - RNA, 19 nt, Artificial Sequence
  Description of Artificial Sequence: Synthetic oligonucleotide
  Sense strand starting at position 3386 of SEQ ID NO: 1241827
gucucuccacucuauguaa

SEQ ID NO: 1302909 - RNA, 19 nt, Artificial Sequence
  Description of Artificial Sequence: Synthetic oligonucleotide
  Antisense strand to SEQ ID NO: 1302908
uuacauagaguggagagac

SEQ ID NO: 1302910 - RNA, 19 nt, Artificial Sequence
  Description of Artificial Sequence: Synthetic oligonucleotide
  Sense strand starting at position 3545 of SEQ ID NO: 1241827
guaguuguggucuauaaag

SEQ ID NO: 1302911 - RNA, 19 nt, Artificial Sequence
  Description of Artificial Sequence: Synthetic oligonucleotide
  Antisense strand to SEQ ID NO: 1302910
cuuuauagaccacaacuac

SEQ ID NO: 1302912 - RNA, 19 nt, Artificial Sequence
  Description of Artificial Sequence: Synthetic oligonucleotide
  Sense strand starting at position 3547 of SEQ ID NO: 1241827
aguuguggucuauaaaguc

SEQ ID NO: 1302913 - RNA, 19 nt, Artificial Sequence
  Description of Artificial Sequence: Synthetic oligonucleotide
  Antisense strand to SEQ ID NO: 1302912
gacuuuauagaccacaacu

SEQ ID NO: 1302914 - RNA, 19 nt, Artificial Sequence
  Description of Artificial Sequence: Synthetic oligonucleotide
  Sense strand starting at position 3572 of SEQ ID NO: 1241827
caacgaauuugugaauaug

SEQ ID NO: 1302915 - RNA, 19 nt, Artificial Sequence
  Description of Artificial Sequence: Synthetic oligonucleotide
  Antisense strand to SEQ ID NO: 1302914
cauauucacaaauucguug

SEQ ID NO: 1302916 - RNA, 19 nt, Artificial Sequence
  Description of Artificial Sequence: Synthetic oligonucleotide
  Sense strand starting at position 3583 of SEQ ID NO: 1241827
ugaauauggagccauuguu

SEQ ID NO: 1302917 - RNA, 19 nt, Artificial Sequence
  Description of Artificial Sequence: Synthetic oligonucleotide
  Antisense strand to SEQ ID NO: 1302916
aacaauggcuccauauuca

SEQ ID NO: 1302918 - RNA, 19 nt, Artificial Sequence
  Description of Artificial Sequence: Synthetic oligonucleotide
  Sense strand starting at position 3609 of SEQ ID NO: 1241827
gaaauauagaguuggguuc

SEQ ID NO: 1302919 - RNA, 19 nt, Artificial Sequence
  Description of Artificial Sequence: Synthetic oligonucleotide
  Antisense strand to SEQ ID NO: 1302918
gaacccaacucuauauuuc

SEQ ID NO: 1302920 - RNA, 19 nt, Artificial Sequence
  Description of Artificial Sequence: Synthetic oligonucleotide
  Sense strand starting at position 3712 of SEQ ID NO: 1241827
aucuauuguugauuccuga

SEQ ID NO: 1302921 - RNA, 19 nt, Artificial Sequence
  Description of Artificial Sequence: Synthetic oligonucleotide
  Antisense strand to SEQ ID NO: 1302920
ucaggaaucaacaauagau

SEQ ID NO: 1302922 - RNA, 19 nt, Artificial Sequence
  Description of Artificial Sequence: Synthetic oligonucleotide
  Sense strand starting at position 3746 of SEQ ID NO: 1241827
ccuacagugcuguaacuca

SEQ ID NO: 1302923 - RNA, 19 nt, Artificial Sequence
  Description of Artificial Sequence: Synthetic oligonucleotide
  Antisense strand to SEQ ID NO: 1302922
ugaguuacagcacuguagg

SEQ ID NO: 1302924 - RNA, 19 nt, Artificial Sequence
  Description of Artificial Sequence: Synthetic oligonucleotide
  Sense strand starting at position 3868 of SEQ ID NO: 1241827
gggugcuuuaagcagcaaa

SEQ ID NO: 1302925 - RNA, 19 nt, Artificial Sequence
  Description of Artificial Sequence: Synthetic oligonucleotide
  Antisense strand to SEQ ID NO: 1302924
uuugcugcuuaaagcaccc

SEQ ID NO: 1302926 - RNA, 19 nt, Artificial Sequence
  Description of Artificial Sequence: Synthetic oligonucleotide
  Sense strand starting at position 26 of SEQ ID NO: 1241828
gugacuauauuuggacgua

SEQ ID NO: 1302927 - RNA, 19 nt, Artificial Sequence
  Description of Artificial Sequence: Synthetic oligonucleotide
  Antisense strand to SEQ ID NO: 1302926
uacguccaaauauagucac

SEQ ID NO: 1302928 - RNA, 19 nt, Artificial Sequence
  Description of Artificial Sequence: Synthetic oligonucleotide
  Sense strand starting at position 83 of SEQ ID NO: 1241828
acgggugagcccuauucca

SEQ ID NO: 1302929 - RNA, 19 nt, Artificial Sequence
  Description of Artificial Sequence: Synthetic oligonucleotide
  Antisense strand to SEQ ID NO: 1302928
uggaauagggcucacccgu

SEQ ID NO: 1302930 - RNA, 19 nt, Artificial Sequence
  Description of Artificial Sequence: Synthetic oligonucleotide
  Sense strand starting at position 104 of SEQ ID NO: 1241828
aggaccuaguguccacaua

SEQ ID NO: 1302931 - RNA, 19 nt, Artificial Sequence
  Description of Artificial Sequence: Synthetic oligonucleotide
  Antisense strand to SEQ ID NO: 1302930
uauguggacacuagguccu

SEQ ID NO: 1302932 - RNA, 19 nt, Artificial Sequence
  Description of Artificial Sequence: Synthetic oligonucleotide
  Sense strand starting at position 105 of SEQ ID NO: 1241828
ggaccuaguguccacauaa

SEQ ID NO: 1302933 - RNA, 19 nt, Artificial Sequence
  Description of Artificial Sequence: Synthetic oligonucleotide
  Antisense strand to SEQ ID NO: 1302932
uuauguggacacuaggucc

SEQ ID NO: 1302934 - RNA, 19 nt, Artificial Sequence
  Description of Artificial Sequence: Synthetic oligonucleotide
  Sense strand starting at position 112 of SEQ ID NO: 1241828
guguccacauaagaagaau

SEQ ID NO: 1302935 - RNA, 19 nt, Artificial Sequence
  Description of Artificial Sequence: Synthetic oligonucleotide
  Antisense strand to SEQ ID NO: 1302934
auucuucuuauguggacac

SEQ ID NO: 1302936 - RNA, 19 nt, Artificial Sequence
  Description of Artificial Sequence: Synthetic oligonucleotide
  Sense strand starting at position 247 of SEQ ID NO: 1241828
ccuccagauccacgagaaa

SEQ ID NO: 1302937 - RNA, 19 nt, Artificial Sequence
  Description of Artificial Sequence: Synthetic oligonucleotide
  Antisense strand to SEQ ID NO: 1302936
uuucucguggaucuggagg

SEQ ID NO: 1302938 - RNA, 19 nt, Artificial Sequence
  Description of Artificial Sequence: Synthetic oligonucleotide
  Sense strand starting at position 313 of SEQ ID NO: 1241828
agcccaaaugacugauaca

SEQ ID NO: 1302939 - RNA, 19 nt, Artificial Sequence
  Description of Artificial Sequence: Synthetic oligonucleotide
  Antisense strand to SEQ ID NO: 1302938
uguaucagucauuugggcu

SEQ ID NO: 1302940 - RNA, 19 nt, Artificial Sequence
  Description of Artificial Sequence: Synthetic oligonucleotide
  Sense strand starting at position 335 of SEQ ID NO: 1241828
auauguuuccaacaaguga

SEQ ID NO: 1302941 - RNA, 19 nt, Artificial Sequence
  Description of Artificial Sequence: Synthetic oligonucleotide
  Antisense strand to SEQ ID NO: 1302940
ucacuuguuggaaacauau

SEQ ID NO: 1302942 - RNA, 19 nt, Artificial Sequence
  Description of Artificial Sequence: Synthetic oligonucleotide
  Sense strand starting at position 406 of SEQ ID NO: 1241828
ugacacuaaccauguaguu

SEQ ID NO: 1302943 - RNA, 19 nt, Artificial Sequence
  Description of Artificial Sequence: Synthetic oligonucleotide
  Antisense strand to SEQ ID NO: 1302942
aacuacaugguuaguguca

SEQ ID NO: 1302944 - RNA, 19 nt, Artificial Sequence
  Description of Artificial Sequence: Synthetic oligonucleotide
  Sense strand starting at position 413 of SEQ ID NO: 1241828
aaccauguaguuggugaau

SEQ ID NO: 1302945 - RNA, 19 nt, Artificial Sequence
  Description of Artificial Sequence: Synthetic oligonucleotide
  Antisense strand to SEQ ID NO: 1302944
auucaccaacuacaugguu

SEQ ID NO: 1302946 - RNA, 19 nt, Artificial Sequence
  Description of Artificial Sequence: Synthetic oligonucleotide
  Sense strand starting at position 416 of SEQ ID NO: 1241828
cauguaguuggugaauauc

SEQ ID NO: 1302947 - RNA, 19 nt, Artificial Sequence
  Description of Artificial Sequence: Synthetic oligonucleotide
  Antisense strand to SEQ ID NO: 1302946
gauauucaccaacuacaug

SEQ ID NO: 1302948 - RNA, 19 nt, Artificial Sequence
  Description of Artificial Sequence: Synthetic oligonucleotide
  Sense strand starting at position 424 of SEQ ID NO: 1241828
uggugaauaucugcugaau

SEQ ID NO: 1302949 - RNA, 19 nt, Artificial Sequence
  Description of Artificial Sequence: Synthetic oligonucleotide
  Antisense strand to SEQ ID NO: 1302948
auucagcagauauucacca

SEQ ID NO: 1302950 - RNA, 19 nt, Artificial Sequence
  Description of Artificial Sequence: Synthetic oligonucleotide
  Sense strand starting at position 426 of SEQ ID NO: 1241828
gugaauaucugcugaauga

SEQ ID NO: 1302951 - RNA, 19 nt, Artificial Sequence
  Description of Artificial Sequence: Synthetic oligonucleotide
  Antisense strand to SEQ ID NO: 1302950
ucauucagcagauauucac

SEQ ID NO: 1302952 - RNA, 19 nt, Artificial Sequence
  Description of Artificial Sequence: Synthetic oligonucleotide
  Sense strand starting at position 436 of SEQ ID NO: 1241828
gcugaaugaacgcgcauaa

SEQ ID NO: 1302953 - RNA, 19 nt, Artificial Sequence
  Description of Artificial Sequence: Synthetic oligonucleotide
  Antisense strand to SEQ ID NO: 1302952
uuaugcgcguucauucagc

SEQ ID NO: 1302954 - RNA, 19 nt, Artificial Sequence
  Description of Artificial Sequence: Synthetic oligonucleotide
  Sense strand starting at position 803 of SEQ ID NO: 1241828
ggcacuaugcuagagagau

SEQ ID NO: 1302955 - RNA, 19 nt, Artificial Sequence
  Description of Artificial Sequence: Synthetic oligonucleotide
  Antisense strand to SEQ ID NO: 1302954
aucucucuagcauagugcc

SEQ ID NO: 1302956 - RNA, 19 nt, Artificial Sequence
  Description of Artificial Sequence: Synthetic oligonucleotide
  Sense strand starting at position 849 of SEQ ID NO: 1241828
ggccaaguuugcucuacuu

SEQ ID NO: 1302957 - RNA, 19 nt, Artificial Sequence
  Description of Artificial Sequence: Synthetic oligonucleotide
  Antisense strand to SEQ ID NO: 1302956
aaguagagcaaacuuggcc

SEQ ID NO: 1302958 - RNA, 19 nt, Artificial Sequence
  Description of Artificial Sequence: Synthetic oligonucleotide
  Sense strand starting at position 891 of SEQ ID NO: 1241828
cacagaaaguagugagcua

SEQ ID NO: 1302959 - RNA, 19 nt, Artificial Sequence
  Description of Artificial Sequence: Synthetic oligonucleotide
  Antisense strand to SEQ ID NO: 1302958
uagcucacuacuuucugug

SEQ ID NO: 1302960 - RNA, 19 nt, Artificial Sequence
  Description of Artificial Sequence: Synthetic oligonucleotide
  Sense strand starting at position 898 of SEQ ID NO: 1241828
aguagugagcuacauggua

SEQ ID NO: 1302961 - RNA, 19 nt, Artificial Sequence
  Description of Artificial Sequence: Synthetic oligonucleotide
  Antisense strand to SEQ ID NO: 1302960
uaccauguagcucacuacu

SEQ ID NO: 1302962 - RNA, 19 nt, Artificial Sequence
  Description of Artificial Sequence: Synthetic oligonucleotide
  Sense strand starting at position 900 of SEQ ID NO: 1241828
uagugagcuacaugguaga

SEQ ID NO: 1302963 - RNA, 19 nt, Artificial Sequence
  Description of Artificial Sequence: Synthetic oligonucleotide
  Antisense strand to SEQ ID NO: 1302962
ucuaccauguagcucacua

SEQ ID NO: 1302964 - RNA, 19 nt, Artificial Sequence
  Description of Artificial Sequence: Synthetic oligonucleotide
  Sense strand starting at position 929 of SEQ ID NO: 1241828
uuauguggugguuauacau

SEQ ID NO: 1302965 - RNA, 19 nt, Artificial Sequence
  Description of Artificial Sequence: Synthetic oligonucleotide
  Antisense strand to SEQ ID NO: 1302964
auguauaaccaccacauaa

SEQ ID NO: 1302966 - RNA, 19 nt, Artificial Sequence
  Description of Artificial Sequence: Synthetic oligonucleotide
  Sense strand starting at position 971 of SEQ ID NO: 1241828
gucaaaucgaacugagaca

SEQ ID NO: 1302967 - RNA, 19 nt, Artificial Sequence
  Description of Artificial Sequence: Synthetic oligonucleotide
  Antisense strand to SEQ ID NO: 1302966
ugucucaguucgauuugac

SEQ ID NO: 1302968 - RNA, 19 nt, Artificial Sequence
  Description of Artificial Sequence: Synthetic oligonucleotide
  Sense strand starting at position 991 of SEQ ID NO: 1241828
ggacuaaaguuaguguuua

SEQ ID NO: 1302969 - RNA, 19 nt, Artificial Sequence
  Description of Artificial Sequence: Synthetic oligonucleotide
  Antisense strand to SEQ ID NO: 1302968
uaaacacuaacuuuagucc

SEQ ID NO: 1302970 - RNA, 19 nt, Artificial Sequence
  Description of Artificial Sequence: Synthetic oligonucleotide
  Sense strand starting at position 995 of SEQ ID NO: 1241828
uaaaguuaguguuuacagu

SEQ ID NO: 1302971 - RNA, 19 nt, Artificial Sequence
  Description of Artificial Sequence: Synthetic oligonucleotide
  Antisense strand to SEQ ID NO: 1302970
acuguaaacacuaacuuua

SEQ ID NO: 1302972 - RNA, 19 nt, Artificial Sequence
  Description of Artificial Sequence: Synthetic oligonucleotide
  Sense strand starting at position 996 of SEQ ID NO: 1241828
aaaguuaguguuuacagua

SEQ ID NO: 1302973 - RNA, 19 nt, Artificial Sequence
  Description of Artificial Sequence: Synthetic oligonucleotide
  Antisense strand to SEQ ID NO: 1302972
uacuguaaacacuaacuuu

SEQ ID NO: 1302974 - RNA, 19 nt, Artificial Sequence
  Description of Artificial Sequence: Synthetic oligonucleotide
  Sense strand starting at position 1004 of SEQ ID NO: 1241828
uguuuacaguaucaauacu

SEQ ID NO: 1302975 - RNA, 19 nt, Artificial Sequence
  Description of Artificial Sequence: Synthetic oligonucleotide
  Antisense strand to SEQ ID NO: 1302974
aguauugauacuguaaaca

SEQ ID NO: 1302976 - RNA, 19 nt, Artificial Sequence
  Description of Artificial Sequence: Synthetic oligonucleotide
  Sense strand starting at position 3419 of SEQ ID NO: 1241828
ccaguuaaauauguuucca

SEQ ID NO: 1302977 - RNA, 19 nt, Artificial Sequence
  Description of Artificial Sequence: Synthetic oligonucleotide
  Antisense strand to SEQ ID NO: 1302976
uggaaacauauuuaacugg

SEQ ID NO: 1302978 - RNA, 19 nt, Artificial Sequence
  Description of Artificial Sequence: Synthetic oligonucleotide
  Sense strand starting at position 3421 of SEQ ID NO: 1241828
aguuaaauauguuuccaag

SEQ ID NO: 1302979 - RNA, 19 nt, Artificial Sequence
  Description of Artificial Sequence: Synthetic oligonucleotide
  Antisense strand to SEQ ID NO: 1302978
cuuggaaacauauuuaacu

SEQ ID NO: 1302980 - RNA, 19 nt, Artificial Sequence
  Description of Artificial Sequence: Synthetic oligonucleotide
  Sense strand starting at position 3423 of SEQ ID NO: 1241828
uuaaauauguuuccaaggu

SEQ ID NO: 1302981 - RNA, 19 nt, Artificial Sequence
  Description of Artificial Sequence: Synthetic oligonucleotide
  Antisense strand to SEQ ID NO: 1302980
accuuggaaacauauuuaa

SEQ ID NO: 1302982 - RNA, 19 nt, Artificial Sequence
  Description of Artificial Sequence: Synthetic oligonucleotide
  Sense strand starting at position 3424 of SEQ ID NO: 1241828
uaaauauguuuccaaggug

SEQ ID NO: 1302983 - RNA, 19 nt, Artificial Sequence
  Description of Artificial Sequence: Synthetic oligonucleotide
  Antisense strand to SEQ ID NO: 1302982
caccuuggaaacauauuua

SEQ ID NO: 1302984 - RNA, 19 nt, Artificial Sequence
  Description of Artificial Sequence: Synthetic oligonucleotide
  Sense strand starting at position 3427 of SEQ ID NO: 1241828
auauguuuccaaggugaag

SEQ ID NO: 1302985 - RNA, 19 nt, Artificial Sequence
  Description of Artificial Sequence: Synthetic oligonucleotide
  Antisense strand to SEQ ID NO: 1302984
cuucaccuuggaaacauau

SEQ ID NO: 1302986 - RNA, 19 nt, Artificial Sequence
  Description of Artificial Sequence: Synthetic oligonucleotide
  Sense strand starting at position 3429 of SEQ ID NO: 1241828
auguuuccaaggugaaguu

SEQ ID NO: 1302987 - RNA, 19 nt, Artificial Sequence
  Description of Artificial Sequence: Synthetic oligonucleotide
  Antisense strand to SEQ ID NO: 1302986
aacuucaccuuggaaacau

SEQ ID NO: 1302988 - RNA, 19 nt, Artificial Sequence
  Description of Artificial Sequence: Synthetic oligonucleotide
  Sense strand starting at position 3472 of SEQ ID NO: 1241828
gugggaaggugauagaaca

SEQ ID NO: 1302989 - RNA, 19 nt, Artificial Sequence
  Description of Artificial Sequence: Synthetic oligonucleotide
  Antisense strand to SEQ ID NO: 1302988
uguucuaucaccuucccac

SEQ ID NO: 1302990 - RNA, 19 nt, Artificial Sequence
  Description of Artificial Sequence: Synthetic oligonucleotide
  Sense strand starting at position 3506 of SEQ ID NO: 1241828
cuaggagagugcuccacau

SEQ ID NO: 1302991 - RNA, 19 nt, Artificial Sequence
  Description of Artificial Sequence: Synthetic oligonucleotide
  Antisense strand to SEQ ID NO: 1302990
auguggagcacucuccuag

SEQ ID NO: 1302992 - RNA, 19 nt, Artificial Sequence
  Description of Artificial Sequence: Synthetic oligonucleotide
  Sense strand starting at position 3508 of SEQ ID NO: 1241828
aggagagugcuccacauua

SEQ ID NO: 1302993 - RNA, 19 nt, Artificial Sequence
  Description of Artificial Sequence: Synthetic oligonucleotide
  Antisense strand to SEQ ID NO: 1302992
uaauguggagcacucuccu

SEQ ID NO: 1302994 - RNA, 19 nt, Artificial Sequence
  Description of Artificial Sequence: Synthetic oligonucleotide
  Sense strand starting at position 3510 of SEQ ID NO: 1241828
gagagugcuccacauuaaa

SEQ ID NO: 1302995 - RNA, 19 nt, Artificial Sequence
  Description of Artificial Sequence: Synthetic oligonucleotide
  Antisense strand to SEQ ID NO: 1302994
uuuaauguggagcacucuc

SEQ ID NO: 1302996 - RNA, 19 nt, Artificial Sequence
  Description of Artificial Sequence: Synthetic oligonucleotide
  Sense strand starting at position 3521 of SEQ ID NO: 1241828
acauuaaagugauguggac

SEQ ID NO: 1302997 - RNA, 19 nt, Artificial Sequence
  Description of Artificial Sequence: Synthetic oligonucleotide
  Antisense strand to SEQ ID NO: 1302996
guccacaucacuuuaaugu

SEQ ID NO: 1302998 - RNA, 19 nt, Artificial Sequence
  Description of Artificial Sequence: Synthetic oligonucleotide
  Sense strand starting at position 3639 of SEQ ID NO: 1241828
uugauuuagucacagagac

SEQ ID NO: 1302999 - RNA, 19 nt, Artificial Sequence
  Description of Artificial Sequence: Synthetic oligonucleotide
  Antisense strand to SEQ ID NO: 1302998
gucucugugacuaaaucaa

SEQ ID NO: 1303000 - RNA, 19 nt, Artificial Sequence
  Description of Artificial Sequence: Synthetic oligonucleotide
  Sense strand starting at position 3783 of SEQ ID NO: 1241828
gccucuugcugguuaguca

SEQ ID NO: 1303001 - RNA, 19 nt, Artificial Sequence
  Description of Artificial Sequence: Synthetic oligonucleotide
  Antisense strand to SEQ ID NO: 1303000
ugacuaaccagcaagaggc

SEQ ID NO: 1303002 - RNA, 19 nt, Artificial Sequence
  Description of Artificial Sequence: Synthetic oligonucleotide
  Sense strand starting at position 3814 of SEQ ID NO: 1241828
uugcauuguggguggugaa

SEQ ID NO: 1303003 - RNA, 19 nt, Artificial Sequence
  Description of Artificial Sequence: Synthetic oligonucleotide
  Antisense strand to SEQ ID NO: 1303002
uucaccacccacaaugcaa

SEQ ID NO: 1303004 - RNA, 19 nt, Artificial Sequence
  Description of Artificial Sequence: Synthetic oligonucleotide
  Sense strand starting at position 3954 of SEQ ID NO: 1241828
uguggcuucuggucacaua

SEQ ID NO: 1303005 - RNA, 19 nt, Artificial Sequence
  Description of Artificial Sequence: Synthetic oligonucleotide
  Antisense strand to SEQ ID NO: 1303004
uaugugaccagaagccaca

SEQ ID NO: 1303006 - RNA, 19 nt, Artificial Sequence
  Description of Artificial Sequence: Synthetic oligonucleotide
  Sense strand starting at position 70 of SEQ ID NO: 1241829
aggucuuaacuguaaccaa

SEQ ID NO: 1303007 - RNA, 19 nt, Artificial Sequence
  Description of Artificial Sequence: Synthetic oligonucleotide
  Antisense strand to SEQ ID NO: 1303006
uugguuacaguuaagaccu

SEQ ID NO: 1303008 - RNA, 19 nt, Artificial Sequence
  Description of Artificial Sequence: Synthetic oligonucleotide
  Sense strand starting at position 275 of SEQ ID NO: 1241829
gguggcuuuccugauccua

SEQ ID NO: 1303009 - RNA, 19 nt, Artificial Sequence
  Description of Artificial Sequence: Synthetic oligonucleotide
  Antisense strand to SEQ ID NO: 1303008
uaggaucaggaaagccacc

SEQ ID NO: 1303010 - RNA, 19 nt, Artificial Sequence
  Description of Artificial Sequence: Synthetic oligonucleotide
  Sense strand starting at position 277 of SEQ ID NO: 1241829
uggcuuuccugauccuacu

SEQ ID NO: 1303011 - RNA, 19 nt, Artificial Sequence
  Description of Artificial Sequence: Synthetic oligonucleotide
  Antisense strand to SEQ ID NO: 1303010
aguaggaucaggaaagcca

SEQ ID NO: 1303012 - RNA, 19 nt, Artificial Sequence
  Description of Artificial Sequence: Synthetic oligonucleotide
  Sense strand starting at position 313 of SEQ ID NO: 1241829
gccagaaauuaaguuaucu

SEQ ID NO: 1303013 - RNA, 19 nt, Artificial Sequence
  Description of Artificial Sequence: Synthetic oligonucleotide
  Antisense strand to SEQ ID NO: 1303012
agauaacuuaauuucuggc

SEQ ID NO: 1303014 - RNA, 19 nt, Artificial Sequence
  Description of Artificial Sequence: Synthetic oligonucleotide
  Sense strand starting at position 391 of SEQ ID NO: 1241829
ccugaccuugcuuaagaga

SEQ ID NO: 1303015 - RNA, 19 nt, Artificial Sequence
  Description of Artificial Sequence: Synthetic oligonucleotide
  Antisense strand to SEQ ID NO: 1303014
ucucuuaagcaaggucagg

SEQ ID NO: 1303016 - RNA, 19 nt, Artificial Sequence
  Description of Artificial Sequence: Synthetic oligonucleotide
  Sense strand starting at position 959 of SEQ ID NO: 1241829
ccaaauguagcucagugaa

SEQ ID NO: 1303017 - RNA, 19 nt, Artificial Sequence
  Description of Artificial Sequence: Synthetic oligonucleotide
  Antisense strand to SEQ ID NO: 1303016
uucacugagcuacauuugg

SEQ ID NO: 1303018 - RNA, 19 nt, Artificial Sequence
  Description of Artificial Sequence: Synthetic oligonucleotide
  Sense strand starting at position 982 of SEQ ID NO: 1241829
gagagaaguuccgcucaga

SEQ ID NO: 1303019 - RNA, 19 nt, Artificial Sequence
  Description of Artificial Sequence: Synthetic oligonucleotide
  Antisense strand to SEQ ID NO: 1303018
ucugagcggaacuucucuc

SEQ ID NO: 1303020 - RNA, 19 nt, Artificial Sequence
  Description of Artificial Sequence: Synthetic oligonucleotide
  Sense strand starting at position 985 of SEQ ID NO: 1241829
agaaguuccgcucagauaa

SEQ ID NO: 1303021 - RNA, 19 nt, Artificial Sequence
  Description of Artificial Sequence: Synthetic oligonucleotide
  Antisense strand to SEQ ID NO: 1303020
uuaucugagcggaacuucu

SEQ ID NO: 1303022 - RNA, 19 nt, Artificial Sequence
  Description of Artificial Sequence: Synthetic oligonucleotide
  Sense strand starting at position 1243 of SEQ ID NO: 1241829
gcacuaaguagcuagauga

SEQ ID NO: 1303023 - RNA, 19 nt, Artificial Sequence
  Description of Artificial Sequence: Synthetic oligonucleotide
  Antisense strand to SEQ ID NO: 1303022
ucaucuagcuacuuagugc

SEQ ID NO: 1303024 - RNA, 19 nt, Artificial Sequence
  Description of Artificial Sequence: Synthetic oligonucleotide
  Sense strand starting at position 1291 of SEQ ID NO: 1241829
aaccgagggcugugaauua

SEQ ID NO: 1303025 - RNA, 19 nt, Artificial Sequence
  Description of Artificial Sequence: Synthetic oligonucleotide
  Antisense strand to SEQ ID NO: 1303024
uaauucacagcccucgguu

SEQ ID NO: 1303026 - RNA, 19 nt, Artificial Sequence
  Description of Artificial Sequence: Synthetic oligonucleotide
  Sense strand starting at position 1320 of SEQ ID NO: 1241829
ucccaaauguaguuaauua

SEQ ID NO: 1303027 - RNA, 19 nt, Artificial Sequence
  Description of Artificial Sequence: Synthetic oligonucleotide
  Antisense strand to SEQ ID NO: 1303026
uaauuaacuacauuuggga

SEQ ID NO: 1303028 - RNA, 19 nt, Artificial Sequence
  Description of Artificial Sequence: Synthetic oligonucleotide
  Sense strand starting at position 1471 of SEQ ID NO: 1241829
uucugauaaucgcccaaac

SEQ ID NO: 1303029 - RNA, 19 nt, Artificial Sequence
  Description of Artificial Sequence: Synthetic oligonucleotide
  Antisense strand to SEQ ID NO: 1303028
guuugggcgauuaucagaa

SEQ ID NO: 1303030 - RNA, 19 nt, Artificial Sequence
  Description of Artificial Sequence: Synthetic oligonucleotide
  Sense strand starting at position 1473 of SEQ ID NO: 1241829
cugauaaucgcccaaaccu

SEQ ID NO: 1303031 - RNA, 19 nt, Artificial Sequence
  Description of Artificial Sequence: Synthetic oligonucleotide
  Antisense strand to SEQ ID NO: 1303030
agguuugggcgauuaucag

SEQ ID NO: 1303032 - RNA, 19 nt, Artificial Sequence
  Description of Artificial Sequence: Synthetic oligonucleotide
  Sense strand starting at position 1622 of SEQ ID NO: 1241829
gccugaucucaccgggaag

SEQ ID NO: 1303033 - RNA, 19 nt, Artificial Sequence
  Description of Artificial Sequence: Synthetic oligonucleotide
  Antisense strand to SEQ ID NO: 1303032
cuucccggugagaucaggc

SEQ ID NO: 1303034 - RNA, 19 nt, Artificial Sequence
  Description of Artificial Sequence: Synthetic oligonucleotide
  Sense strand starting at position 2139 of SEQ ID NO: 1241829
ggccauacuggcgggaaau

SEQ ID NO: 1303035 - RNA, 19 nt, Artificial Sequence
  Description of Artificial Sequence: Synthetic oligonucleotide
  Antisense strand to SEQ ID NO: 1303034
auuucccgccaguauggcc

SEQ ID NO: 1303036 - RNA, 19 nt, Artificial Sequence
  Description of Artificial Sequence: Synthetic oligonucleotide
  Sense strand starting at position 2140 of SEQ ID NO: 1241829
gccauacuggcgggaaauu

SEQ ID NO: 1303037 - RNA, 19 nt, Artificial Sequence
  Description of Artificial Sequence: Synthetic oligonucleotide
  Antisense strand to SEQ ID NO: 1303036
aauuucccgccaguauggc

SEQ ID NO: 1303038 - RNA, 19 nt, Artificial Sequence
  Description of Artificial Sequence: Synthetic oligonucleotide
  Sense strand starting at position 2287 of SEQ ID NO: 1241829
ccgaaugacuuacugagua

SEQ ID NO: 1303039 - RNA, 19 nt, Artificial Sequence
  Description of Artificial Sequence: Synthetic oligonucleotide
  Antisense strand to SEQ ID NO: 1303038
uacucaguaagucauucgg

SEQ ID NO: 1303040 - RNA, 19 nt, Artificial Sequence
  Description of Artificial Sequence: Synthetic oligonucleotide
  Sense strand starting at position 2525 of SEQ ID NO: 1241829
uccugaguuguuuaucuaa

SEQ ID NO: 1303041 - RNA, 19 nt, Artificial Sequence
  Description of Artificial Sequence: Synthetic oligonucleotide
  Antisense strand to SEQ ID NO: 1303040
uuagauaaacaacucagga

SEQ ID NO: 1303042 - RNA, 19 nt, Artificial Sequence
  Description of Artificial Sequence: Synthetic oligonucleotide
  Sense strand starting at position 2527 of SEQ ID NO: 1241829
cugaguuguuuaucuaaca

SEQ ID NO: 1303043 - RNA, 19 nt, Artificial Sequence
  Description of Artificial Sequence: Synthetic oligonucleotide
  Antisense strand to SEQ ID NO: 1303042
uguuagauaaacaacucag

SEQ ID NO: 1303044 - RNA, 19 nt, Artificial Sequence
  Description of Artificial Sequence: Synthetic oligonucleotide
  Sense strand starting at position 2903 of SEQ ID NO: 1241829
aguguaacaugaguaauaa

SEQ ID NO: 1303045 - RNA, 19 nt, Artificial Sequence
  Description of Artificial Sequence: Synthetic oligonucleotide
  Antisense strand to SEQ ID NO: 1303044
uuauuacucauguuacacu

SEQ ID NO: 1303046 - RNA, 19 nt, Artificial Sequence
  Description of Artificial Sequence: Synthetic oligonucleotide
  Sense strand starting at position 2904 of SEQ ID NO: 1241829
guguaacaugaguaauaac

SEQ ID NO: 1303047 - RNA, 19 nt, Artificial Sequence
  Description of Artificial Sequence: Synthetic oligonucleotide
  Antisense strand to SEQ ID NO: 1303046
guuauuacucauguuacac

SEQ ID NO: 1303048 - RNA, 19 nt, Artificial Sequence
  Description of Artificial Sequence: Synthetic oligonucleotide
  Sense strand starting at position 2948 of SEQ ID NO: 1241829
guauuaugugagcacgaau

SEQ ID NO: 1303049 - RNA, 19 nt, Artificial Sequence
  Description of Artificial Sequence: Synthetic oligonucleotide
  Antisense strand to SEQ ID NO: 1303048
auucgugcucacauaauac

SEQ ID NO: 1303050 - RNA, 19 nt, Artificial Sequence
  Description of Artificial Sequence: Synthetic oligonucleotide
  Sense strand starting at position 2951 of SEQ ID NO: 1241829
uuaugugagcacgaaugau

SEQ ID NO: 1303051 - RNA, 19 nt, Artificial Sequence
  Description of Artificial Sequence: Synthetic oligonucleotide
  Antisense strand to SEQ ID NO: 1303050
aucauucgugcucacauaa

SEQ ID NO: 1303052 - RNA, 19 nt, Artificial Sequence
  Description of Artificial Sequence: Synthetic oligonucleotide
  Sense strand starting at position 2986 of SEQ ID NO: 1241829
ucaguuaauuuguacaaug

SEQ ID NO: 1303053 - RNA, 19 nt, Artificial Sequence
  Description of Artificial Sequence: Synthetic oligonucleotide
  Antisense strand to SEQ ID NO: 1303052
cauuguacaaauuaacuga

SEQ ID NO: 1303054 - RNA, 19 nt, Artificial Sequence
  Description of Artificial Sequence: Synthetic oligonucleotide
  Sense strand starting at position 3126 of SEQ ID NO: 1241829
agaagugauuuggaaacgu

SEQ ID NO: 1303055 - RNA, 19 nt, Artificial Sequence
  Description of Artificial Sequence: Synthetic oligonucleotide
  Antisense strand to SEQ ID NO: 1303054
acguuuccaaaucacuucu

SEQ ID NO: 1303056 - RNA, 19 nt, Artificial Sequence
  Description of Artificial Sequence: Synthetic oligonucleotide
  Sense strand starting at position 3135 of SEQ ID NO: 1241829
uuggaaacguaccugugau

SEQ ID NO: 1303057 - RNA, 19 nt, Artificial Sequence
  Description of Artificial Sequence: Synthetic oligonucleotide
  Antisense strand to SEQ ID NO: 1303056
aucacagguacguuuccaa

SEQ ID NO: 1303058 - RNA, 19 nt, Artificial Sequence
  Description of Artificial Sequence: Synthetic oligonucleotide
  Sense strand starting at position 3136 of SEQ ID NO: 1241829
uggaaacguaccugugaug

SEQ ID NO: 1303059 - RNA, 19 nt, Artificial Sequence
  Description of Artificial Sequence: Synthetic oligonucleotide
  Antisense strand to SEQ ID NO: 1303058
caucacagguacguuucca

SEQ ID NO: 1303060 - RNA, 19 nt, Artificial Sequence
  Description of Artificial Sequence: Synthetic oligonucleotide
  Sense strand starting at position 3142 of SEQ ID NO: 1241829
cguaccugugaugagaaau

SEQ ID NO: 1303061 - RNA, 19 nt, Artificial Sequence
  Description of Artificial Sequence: Synthetic oligonucleotide
  Antisense strand to SEQ ID NO: 1303060
auuucucaucacagguacg

SEQ ID NO: 1303062 - RNA, 19 nt, Artificial Sequence
  Description of Artificial Sequence: Synthetic oligonucleotide
  Sense strand starting at position 3170 of SEQ ID NO: 1241829
gcucuuucugaugggagua

SEQ ID NO: 1303063 - RNA, 19 nt, Artificial Sequence
  Description of Artificial Sequence: Synthetic oligonucleotide
  Antisense strand to SEQ ID NO: 1303062
uacucccaucagaaagagc

SEQ ID NO: 1303064 - RNA, 19 nt, Artificial Sequence
  Description of Artificial Sequence: Synthetic oligonucleotide
  Sense strand starting at position 3284 of SEQ ID NO: 1241829
agccauagauaguuuacca

SEQ ID NO: 1303065 - RNA, 19 nt, Artificial Sequence
  Description of Artificial Sequence: Synthetic oligonucleotide
  Antisense strand to SEQ ID NO: 1303064
ugguaaacuaucuauggcu

SEQ ID NO: 1303066 - RNA, 19 nt, Artificial Sequence
  Description of Artificial Sequence: Synthetic oligonucleotide
  Sense strand starting at position 3288 of SEQ ID NO: 1241829
auagauaguuuaccaguga

SEQ ID NO: 1303067 - RNA, 19 nt, Artificial Sequence
  Description of Artificial Sequence: Synthetic oligonucleotide
  Antisense strand to SEQ ID NO: 1303066
ucacugguaaacuaucuau

SEQ ID NO: 1303068 - RNA, 19 nt, Artificial Sequence
  Description of Artificial Sequence: Synthetic oligonucleotide
  Sense strand starting at position 3292 of SEQ ID NO: 1241829
auaguuuaccagugaaucu

SEQ ID NO: 1303069 - RNA, 19 nt, Artificial Sequence
  Description of Artificial Sequence: Synthetic oligonucleotide
  Antisense strand to SEQ ID NO: 1303068
agauucacugguaaacuau

SEQ ID NO: 1303070 - RNA, 19 nt, Artificial Sequence
  Description of Artificial Sequence: Synthetic oligonucleotide
  Sense strand starting at position 3401 of SEQ ID NO: 1241829
agaucaugauguccagagu

SEQ ID NO: 1303071 - RNA, 19 nt, Artificial Sequence
  Description of Artificial Sequence: Synthetic oligonucleotide
  Antisense strand to SEQ ID NO: 1303070
acucuggacaucaugaucu

SEQ ID NO: 1303072 - RNA, 19 nt, Artificial Sequence
  Description of Artificial Sequence: Synthetic oligonucleotide
  Sense strand starting at position 3404 of SEQ ID NO: 1241829
ucaugauguccagaguggu

SEQ ID NO: 1303073 - RNA, 19 nt, Artificial Sequence
  Description of Artificial Sequence: Synthetic oligonucleotide
  Antisense strand to SEQ ID NO: 1303072
accacucuggacaucauga

SEQ ID NO: 1303074 - RNA, 19 nt, Artificial Sequence
  Description of Artificial Sequence: Synthetic oligonucleotide
  Sense strand starting at position 3414 of SEQ ID NO: 1241829
cagagugguguggaggaua

SEQ ID NO: 1303075 - RNA, 19 nt, Artificial Sequence
  Description of Artificial Sequence: Synthetic oligonucleotide
  Antisense strand to SEQ ID NO: 1303074
uauccuccacaccacucug

SEQ ID NO: 1303076 - RNA, 19 nt, Artificial Sequence
  Description of Artificial Sequence: Synthetic oligonucleotide
  Sense strand starting at position 3447 of SEQ ID NO: 1241829
uaaguagcauuugaaauga

SEQ ID NO: 1303077 - RNA, 19 nt, Artificial Sequence
  Description of Artificial Sequence: Synthetic oligonucleotide
  Antisense strand to SEQ ID NO: 1303076
ucauuucaaaugcuacuua

SEQ ID NO: 1303078 - RNA, 19 nt, Artificial Sequence
  Description of Artificial Sequence: Synthetic oligonucleotide
  Sense strand starting at position 3485 of SEQ ID NO: 1241829
ggaggcagcguugaucaga

SEQ ID NO: 1303079 - RNA, 19 nt, Artificial Sequence
  Description of Artificial Sequence: Synthetic oligonucleotide
  Antisense strand to SEQ ID NO: 1303078
ucugaucaacgcugccucc

SEQ ID NO: 1303080 - RNA, 19 nt, Artificial Sequence
  Description of Artificial Sequence: Synthetic oligonucleotide
  Sense strand starting at position 3547 of SEQ ID NO: 1241829
gggacugugggagguaaau

SEQ ID NO: 1303081 - RNA, 19 nt, Artificial Sequence
  Description of Artificial Sequence: Synthetic oligonucleotide
  Antisense strand to SEQ ID NO: 1303080
auuuaccucccacaguccc

SEQ ID NO: 1303082 - RNA, 19 nt, Artificial Sequence
  Description of Artificial Sequence: Synthetic oligonucleotide
  Sense strand starting at position 3904 of SEQ ID NO: 1241829
gagagucaauauccagauc

SEQ ID NO: 1303083 - RNA, 19 nt, Artificial Sequence
  Description of Artificial Sequence: Synthetic oligonucleotide
  Antisense strand to SEQ ID NO: 1303082
gaucuggauauugacucuc

SEQ ID NO: 1303084 - RNA, 19 nt, Artificial Sequence
  Description of Artificial Sequence: Synthetic oligonucleotide
  Sense strand starting at position 3935 of SEQ ID NO: 1241829
ggugcugggccucagaaua

SEQ ID NO: 1303085 - RNA, 19 nt, Artificial Sequence
  Description of Artificial Sequence: Synthetic oligonucleotide
  Antisense strand to SEQ ID NO: 1303084
uauucugaggcccagcacc

SEQ ID NO: 1303086 - RNA, 19 nt, Artificial Sequence
  Description of Artificial Sequence: Synthetic oligonucleotide
  Sense strand starting at position 35 of SEQ ID NO: 1241830
accaucaaguuguccagaa

SEQ ID NO: 1303087 - RNA, 19 nt, Artificial Sequence
  Description of Artificial Sequence: Synthetic oligonucleotide
  Antisense strand to SEQ ID NO: 1303086
uucuggacaacuugauggu

SEQ ID NO: 1303088 - RNA, 19 nt, Artificial Sequence
  Description of Artificial Sequence: Synthetic oligonucleotide
  Sense strand starting at position 36 of SEQ ID NO: 1241830
ccaucaaguuguccagaac

SEQ ID NO: 1303089 - RNA, 19 nt, Artificial Sequence
  Description of Artificial Sequence: Synthetic oligonucleotide
  Antisense strand to SEQ ID NO: 1303088
guucuggacaacuugaugg

SEQ ID NO: 1303090 - RNA, 19 nt, Artificial Sequence
  Description of Artificial Sequence: Synthetic oligonucleotide
  Sense strand starting at position 434 of SEQ ID NO: 1241830
uauguaguucuugaagcaa

SEQ ID NO: 1303091 - RNA, 19 nt, Artificial Sequence
  Description of Artificial Sequence: Synthetic oligonucleotide
  Antisense strand to SEQ ID NO: 1303090
uugcuucaagaacuacaua

SEQ ID NO: 1303092 - RNA, 19 nt, Artificial Sequence
  Description of Artificial Sequence: Synthetic oligonucleotide
  Sense strand starting at position 445 of SEQ ID NO: 1241830
ugaagcaaccuguguuaaa

SEQ ID NO: 1303093 - RNA, 19 nt, Artificial Sequence
  Description of Artificial Sequence: Synthetic oligonucleotide
  Antisense strand to SEQ ID NO: 1303092
uuuaacacagguugcuuca

SEQ ID NO: 1303094 - RNA, 19 nt, Artificial Sequence
  Description of Artificial Sequence: Synthetic oligonucleotide
  Sense strand starting at position 446 of SEQ ID NO: 1241830
gaagcaaccuguguuaaag

SEQ ID NO: 1303095 - RNA, 19 nt, Artificial Sequence
  Description of Artificial Sequence: Synthetic oligonucleotide
  Antisense strand to SEQ ID NO: 1303094
cuuuaacacagguugcuuc

SEQ ID NO: 1303096 - RNA, 19 nt, Artificial Sequence
  Description of Artificial Sequence: Synthetic oligonucleotide
  Sense strand starting at position 510 of SEQ ID NO: 1241830
uggaauauuuaagaaccua

SEQ ID NO: 1303097 - RNA, 19 nt, Artificial Sequence
  Description of Artificial Sequence: Synthetic oligonucleotide
  Antisense strand to SEQ ID NO: 1303096
uagguucuuaaauauucca

SEQ ID NO: 1303098 - RNA, 19 nt, Artificial Sequence
  Description of Artificial Sequence: Synthetic oligonucleotide
  Sense strand starting at position 540 of SEQ ID NO: 1241830
cugcaacagcuguaauaaa

SEQ ID NO: 1303099 - RNA, 19 nt, Artificial Sequence
  Description of Artificial Sequence: Synthetic oligonucleotide
  Antisense strand to SEQ ID NO: 1303098
uuuauuacagcuguugcag

SEQ ID NO: 1303100 - RNA, 19 nt, Artificial Sequence
  Description of Artificial Sequence: Synthetic oligonucleotide
  Sense strand starting at position 567 of SEQ ID NO: 1241830
aucugagauucuguugaau

SEQ ID NO: 1303101 - RNA, 19 nt, Artificial Sequence
  Description of Artificial Sequence: Synthetic oligonucleotide
  Antisense strand to SEQ ID NO: 1303100
auucaacagaaucucagau

SEQ ID NO: 1303102 - RNA, 19 nt, Artificial Sequence
  Description of Artificial Sequence: Synthetic oligonucleotide
  Sense strand starting at position 726 of SEQ ID NO: 1241830
uggccuaaucuggaaucau

SEQ ID NO: 1303103 - RNA, 19 nt, Artificial Sequence
  Description of Artificial Sequence: Synthetic oligonucleotide
  Antisense strand to SEQ ID NO: 1303102
augauuccagauuaggcca

SEQ ID NO: 1303104 - RNA, 19 nt, Artificial Sequence
  Description of Artificial Sequence: Synthetic oligonucleotide
  Sense strand starting at position 742 of SEQ ID NO: 1241830
cauuguauugauggcauaa

SEQ ID NO: 1303105 - RNA, 19 nt, Artificial Sequence
  Description of Artificial Sequence: Synthetic oligonucleotide
  Antisense strand to SEQ ID NO: 1303104
uuaugccaucaauacaaug

SEQ ID NO: 1303106 - RNA, 19 nt, Artificial Sequence
  Description of Artificial Sequence: Synthetic oligonucleotide
  Sense strand starting at position 846 of SEQ ID NO: 1241830
ucauccuaucuagggaauu

SEQ ID NO: 1303107 - RNA, 19 nt, Artificial Sequence
  Description of Artificial Sequence: Synthetic oligonucleotide
  Antisense strand to SEQ ID NO: 1303106
aauucccuagauaggauga

SEQ ID NO: 1303108 - RNA, 19 nt, Artificial Sequence
  Description of Artificial Sequence: Synthetic oligonucleotide
  Sense strand starting at position 873 of SEQ ID NO: 1241830
agucuagagcuaugacgaa

SEQ ID NO: 1303109 - RNA, 19 nt, Artificial Sequence
  Description of Artificial Sequence: Synthetic oligonucleotide
  Antisense strand to SEQ ID NO: 1303108
uucgucauagcucuagacu

SEQ ID NO: 1303110 - RNA, 19 nt, Artificial Sequence
  Description of Artificial Sequence: Synthetic oligonucleotide
  Sense strand starting at position 877 of SEQ ID NO: 1241830
uagagcuaugacgaacuau

SEQ ID NO: 1303111 - RNA, 19 nt, Artificial Sequence
  Description of Artificial Sequence: Synthetic oligonucleotide
  Antisense strand to SEQ ID NO: 1303110
auaguucgucauagcucua

SEQ ID NO: 1303112 - RNA, 19 nt, Artificial Sequence
  Description of Artificial Sequence: Synthetic oligonucleotide
  Sense strand starting at position 885 of SEQ ID NO: 1241830
ugacgaacuauuggucuuu

SEQ ID NO: 1303113 - RNA, 19 nt, Artificial Sequence
  Description of Artificial Sequence: Synthetic oligonucleotide
  Antisense strand to SEQ ID NO: 1303112
aaagaccaauaguucguca

SEQ ID NO: 1303114 - RNA, 19 nt, Artificial Sequence
  Description of Artificial Sequence: Synthetic oligonucleotide
  Sense strand starting at position 992 of SEQ ID NO: 1241830
guugauucucucuauguac

SEQ ID NO: 1303115 - RNA, 19 nt, Artificial Sequence
  Description of Artificial Sequence: Synthetic oligonucleotide
  Antisense strand to SEQ ID NO: 1303114
guacauagagagaaucaac

SEQ ID NO: 1303116 - RNA, 19 nt, Artificial Sequence
  Description of Artificial Sequence: Synthetic oligonucleotide
  Sense strand starting at position 1045 of SEQ ID NO: 1241830
ggugguacauuaucaaaga

SEQ ID NO: 1303117 - RNA, 19 nt, Artificial Sequence
  Description of Artificial Sequence: Synthetic oligonucleotide
  Antisense strand to SEQ ID NO: 1303116
ucuuugauaauguaccacc

SEQ ID NO: 1303118 - RNA, 19 nt, Artificial Sequence
  Description of Artificial Sequence: Synthetic oligonucleotide
  Sense strand starting at position 1343 of SEQ ID NO: 1241830
gaucuaugggucuggagug

SEQ ID NO: 1303119 - RNA, 19 nt, Artificial Sequence
  Description of Artificial Sequence: Synthetic oligonucleotide
  Antisense strand to SEQ ID NO: 1303118
cacuccagacccauagauc

SEQ ID NO: 1303120 - RNA, 19 nt, Artificial Sequence
  Description of Artificial Sequence: Synthetic oligonucleotide
  Sense strand starting at position 1434 of SEQ ID NO: 1241830
augcaaauugagugaaugu

SEQ ID NO: 1303121 - RNA, 19 nt, Artificial Sequence
  Description of Artificial Sequence: Synthetic oligonucleotide
  Antisense strand to SEQ ID NO: 1303120
acauucacucaauuugcau

SEQ ID NO: 1303122 - RNA, 19 nt, Artificial Sequence
  Description of Artificial Sequence: Synthetic oligonucleotide
  Sense strand starting at position 1435 of SEQ ID NO: 1241830
ugcaaauugagugaauguu

SEQ ID NO: 1303123 - RNA, 19 nt, Artificial Sequence
  Description of Artificial Sequence: Synthetic oligonucleotide
  Antisense strand to SEQ ID NO: 1303122
aacauucacucaauuugca

SEQ ID NO: 1303124 - RNA, 19 nt, Artificial Sequence
  Description of Artificial Sequence: Synthetic oligonucleotide
  Sense strand starting at position 1470 of SEQ ID NO: 1241830
ucaguaagaacuugagcga

SEQ ID NO: 1303125 - RNA, 19 nt, Artificial Sequence
  Description of Artificial Sequence: Synthetic oligonucleotide
  Antisense strand to SEQ ID NO: 1303124
ucgcucaaguucuuacuga

SEQ ID NO: 1303126 - RNA, 19 nt, Artificial Sequence
  Description of Artificial Sequence: Synthetic oligonucleotide
  Sense strand starting at position 1471 of SEQ ID NO: 1241830
caguaagaacuugagcgaa

SEQ ID NO: 1303127 - RNA, 19 nt, Artificial Sequence
  Description of Artificial Sequence: Synthetic oligonucleotide
  Antisense strand to SEQ ID NO: 1303126
uucgcucaaguucuuacug

SEQ ID NO: 1303128 - RNA, 19 nt, Artificial Sequence
  Description of Artificial Sequence: Synthetic oligonucleotide
  Sense strand starting at position 1473 of SEQ ID NO: 1241830
guaagaacuugagcgaaua

SEQ ID NO: 1303129 - RNA, 19 nt, Artificial Sequence
  Description of Artificial Sequence: Synthetic oligonucleotide
  Antisense strand to SEQ ID NO: 1303128
uauucgcucaaguucuuac

SEQ ID NO: 1303130 - RNA, 19 nt, Artificial Sequence
  Description of Artificial Sequence: Synthetic oligonucleotide
  Sense strand starting at position 1491 of SEQ ID NO: 1241830
agaagcaugcuccaguuaa

SEQ ID NO: 1303131 - RNA, 19 nt, Artificial Sequence
  Description of Artificial Sequence: Synthetic oligonucleotide
  Antisense strand to SEQ ID NO: 1303130
uuaacuggagcaugcuucu

SEQ ID NO: 1303132 - RNA, 19 nt, Artificial Sequence
  Description of Artificial Sequence: Synthetic oligonucleotide
  Sense strand starting at position 1696 of SEQ ID NO: 1241830
cacggaggguuacuacuaa

SEQ ID NO: 1303133 - RNA, 19 nt, Artificial Sequence
  Description of Artificial Sequence: Synthetic oligonucleotide
  Antisense strand to SEQ ID NO: 1303132
uuaguaguaacccuccgug

SEQ ID NO: 1303134 - RNA, 19 nt, Artificial Sequence
  Description of Artificial Sequence: Synthetic oligonucleotide
  Sense strand starting at position 1717 of SEQ ID NO: 1241830
cuaauuuccuccucagugu

SEQ ID NO: 1303135 - RNA, 19 nt, Artificial Sequence
  Description of Artificial Sequence: Synthetic oligonucleotide
  Antisense strand to SEQ ID NO: 1303134
acacugaggaggaaauuag

SEQ ID NO: 1303136 - RNA, 19 nt, Artificial Sequence
  Description of Artificial Sequence: Synthetic oligonucleotide
  Sense strand starting at position 1761 of SEQ ID NO: 1241830
guacaaacaguccagguua

SEQ ID NO: 1303137 - RNA, 19 nt, Artificial Sequence
  Description of Artificial Sequence: Synthetic oligonucleotide
  Antisense strand to SEQ ID NO: 1303136
uaaccuggacuguuuguac

SEQ ID NO: 1303138 - RNA, 19 nt, Artificial Sequence
  Description of Artificial Sequence: Synthetic oligonucleotide
  Sense strand starting at position 1783 of SEQ ID NO: 1241830
gggucuuauuaaccuuaga

SEQ ID NO: 1303139 - RNA, 19 nt, Artificial Sequence
  Description of Artificial Sequence: Synthetic oligonucleotide
  Antisense strand to SEQ ID NO: 1303138
ucuaagguuaauaagaccc

SEQ ID NO: 1303140 - RNA, 19 nt, Artificial Sequence
  Description of Artificial Sequence: Synthetic oligonucleotide
  Sense strand starting at position 1903 of SEQ ID NO: 1241830
ccacauccgccauaugaaa

SEQ ID NO: 1303141 - RNA, 19 nt, Artificial Sequence
  Description of Artificial Sequence: Synthetic oligonucleotide
  Antisense strand to SEQ ID NO: 1303140
uuucauauggcggaugugg

SEQ ID NO: 1303142 - RNA, 19 nt, Artificial Sequence
  Description of Artificial Sequence: Synthetic oligonucleotide
  Sense strand starting at position 2003 of SEQ ID NO: 1241830
ggagcucugcaaugagaac

SEQ ID NO: 1303143 - RNA, 19 nt, Artificial Sequence
  Description of Artificial Sequence: Synthetic oligonucleotide
  Antisense strand to SEQ ID NO: 1303142
guucucauugcagagcucc

SEQ ID NO: 1303144 - RNA, 19 nt, Artificial Sequence
  Description of Artificial Sequence: Synthetic oligonucleotide
  Sense strand starting at position 2058 of SEQ ID NO: 1241830
uuggaugaucagggaugua

SEQ ID NO: 1303145 - RNA, 19 nt, Artificial Sequence
  Description of Artificial Sequence: Synthetic oligonucleotide
  Antisense strand to SEQ ID NO: 1303144
uacaucccugaucauccaa

SEQ ID NO: 1303146 - RNA, 19 nt, Artificial Sequence
  Description of Artificial Sequence: Synthetic oligonucleotide
  Sense strand starting at position 2096 of SEQ ID NO: 1241830
acuuccugucauggagaaa

SEQ ID NO: 1303147 - RNA, 19 nt, Artificial Sequence
  Description of Artificial Sequence: Synthetic oligonucleotide
  Antisense strand to SEQ ID NO: 1303146
uuucuccaugacaggaagu

SEQ ID NO: 1303148 - RNA, 19 nt, Artificial Sequence
  Description of Artificial Sequence: Synthetic oligonucleotide
  Sense strand starting at position 2224 of SEQ ID NO: 1241830
guaguaacaucagcaagau

SEQ ID NO: 1303149 - RNA, 19 nt, Artificial Sequence
  Description of Artificial Sequence: Synthetic oligonucleotide
  Antisense strand to SEQ ID NO: 1303148
aucuugcugauguuacuac

SEQ ID NO: 1303150 - RNA, 19 nt, Artificial Sequence
  Description of Artificial Sequence: Synthetic oligonucleotide
  Sense strand starting at position 2312 of SEQ ID NO: 1241830
uagcacaggucuguuauuu

SEQ ID NO: 1303151 - RNA, 19 nt, Artificial Sequence
  Description of Artificial Sequence: Synthetic oligonucleotide
  Antisense strand to SEQ ID NO: 1303150
aaauaacagaccugugcua

SEQ ID NO: 1303152 - RNA, 19 nt, Artificial Sequence
  Description of Artificial Sequence: Synthetic oligonucleotide
  Sense strand starting at position 2783 of SEQ ID NO: 1241830
ucuaaaggaucucugcaau

SEQ ID NO: 1303153 - RNA, 19 nt, Artificial Sequence
  Description of Artificial Sequence: Synthetic oligonucleotide
  Antisense strand to SEQ ID NO: 1303152
auugcagagauccuuuaga

SEQ ID NO: 1303154 - RNA, 19 nt, Artificial Sequence
  Description of Artificial Sequence: Synthetic oligonucleotide
  Sense strand starting at position 2940 of SEQ ID NO: 1241830
cucuuugcacuguaagaua

SEQ ID NO: 1303155 - RNA, 19 nt, Artificial Sequence
  Description of Artificial Sequence: Synthetic oligonucleotide
  Antisense strand to SEQ ID NO: 1303154
uaucuuacagugcaaagag

SEQ ID NO: 1303156 - RNA, 19 nt, Artificial Sequence
  Description of Artificial Sequence: Synthetic oligonucleotide
  Sense strand starting at position 2951 of SEQ ID NO: 1241830
guaagauauuuggaggaga

SEQ ID NO: 1303157 - RNA, 19 nt, Artificial Sequence
  Description of Artificial Sequence: Synthetic oligonucleotide
  Antisense strand to SEQ ID NO: 1303156
ucuccuccaaauaucuuac

SEQ ID NO: 1303158 - RNA, 19 nt, Artificial Sequence
  Description of Artificial Sequence: Synthetic oligonucleotide
  Sense strand starting at position 3067 of SEQ ID NO: 1241830
agucauagcucauuaauag

SEQ ID NO: 1303159 - RNA, 19 nt, Artificial Sequence
  Description of Artificial Sequence: Synthetic oligonucleotide
  Antisense strand to SEQ ID NO: 1303158
cuauuaaugagcuaugacu

SEQ ID NO: 1303160 - RNA, 19 nt, Artificial Sequence
  Description of Artificial Sequence: Synthetic oligonucleotide
  Sense strand starting at position 3068 of SEQ ID NO: 1241830
gucauagcucauuaauaga

SEQ ID NO: 1303161 - RNA, 19 nt, Artificial Sequence
  Description of Artificial Sequence: Synthetic oligonucleotide
  Antisense strand to SEQ ID NO: 1303160
ucuauuaaugagcuaugac

SEQ ID NO: 1303162 - RNA, 19 nt, Artificial Sequence
  Description of Artificial Sequence: Synthetic oligonucleotide
  Sense strand starting at position 3420 of SEQ ID NO: 1241830
gguaucaugguauaaucuu

SEQ ID NO: 1303163 - RNA, 19 nt, Artificial Sequence
  Description of Artificial Sequence: Synthetic oligonucleotide
  Antisense strand to SEQ ID NO: 1303162
aagauuauaccaugauacc

SEQ ID NO: 1303164 - RNA, 19 nt, Artificial Sequence
  Description of Artificial Sequence: Synthetic oligonucleotide
  Sense strand starting at position 3625 of SEQ ID NO: 1241830
gcacaugaugccuacacuu

SEQ ID NO: 1303165 - RNA, 19 nt, Artificial Sequence
  Description of Artificial Sequence: Synthetic oligonucleotide
  Antisense strand to SEQ ID NO: 1303164
aaguguaggcaucaugugc

SEQ ID NO: 1303166 - RNA, 19 nt, Artificial Sequence
  Description of Artificial Sequence: Synthetic oligonucleotide
  Sense strand starting at position 39 of SEQ ID NO: 1241831
uuuauugggcaggauagua

SEQ ID NO: 1303167 - RNA, 19 nt, Artificial Sequence
  Description of Artificial Sequence: Synthetic oligonucleotide
  Antisense strand to SEQ ID NO: 1303166
uacuauccugcccaauaaa

SEQ ID NO: 1303168 - RNA, 19 nt, Artificial Sequence
  Description of Artificial Sequence: Synthetic oligonucleotide
  Sense strand starting at position 154 of SEQ ID NO: 1241831
ccuuaccaugcucgagaaa

SEQ ID NO: 1303169 - RNA, 19 nt, Artificial Sequence
  Description of Artificial Sequence: Synthetic oligonucleotide
  Antisense strand to SEQ ID NO: 1303168
uuucucgagcaugguaagg

SEQ ID NO: 1303170 - RNA, 19 nt, Artificial Sequence
  Description of Artificial Sequence: Synthetic oligonucleotide
  Sense strand starting at position 231 of SEQ ID NO: 1241831
uuaaguaacguauauggaa

SEQ ID NO: 1303171 - RNA, 19 nt, Artificial Sequence
  Description of Artificial Sequence: Synthetic oligonucleotide
  Antisense strand to SEQ ID NO: 1303170
uuccauauacguuacuuaa

SEQ ID NO: 1303172 - RNA, 19 nt, Artificial Sequence
  Description of Artificial Sequence: Synthetic oligonucleotide
  Sense strand starting at position 286 of SEQ ID NO: 1241831
ccaauaagccuguacugau

SEQ ID NO: 1303173 - RNA, 19 nt, Artificial Sequence
  Description of Artificial Sequence: Synthetic oligonucleotide
  Antisense strand to SEQ ID NO: 1303172
aucaguacaggcuuauugg

SEQ ID NO: 1303174 - RNA, 19 nt, Artificial Sequence
  Description of Artificial Sequence: Synthetic oligonucleotide
  Sense strand starting at position 636 of SEQ ID NO: 1241831
accaccugacagugauuau

SEQ ID NO: 1303175 - RNA, 19 nt, Artificial Sequence
  Description of Artificial Sequence: Synthetic oligonucleotide
  Antisense strand to SEQ ID NO: 1303174
auaaucacugucagguggu

SEQ ID NO: 1303176 - RNA, 19 nt, Artificial Sequence
  Description of Artificial Sequence: Synthetic oligonucleotide
  Sense strand starting at position 639 of SEQ ID NO: 1241831
accugacagugauuaugga

SEQ ID NO: 1303177 - RNA, 19 nt, Artificial Sequence
  Description of Artificial Sequence: Synthetic oligonucleotide
  Antisense strand to SEQ ID NO: 1303176
uccauaaucacugucaggu

SEQ ID NO: 1303178 - RNA, 19 nt, Artificial Sequence
  Description of Artificial Sequence: Synthetic oligonucleotide
  Sense strand starting at position 845 of SEQ ID NO: 1241831
uuccuugaccaaggcaaua

SEQ ID NO: 1303179 - RNA, 19 nt, Artificial Sequence
  Description of Artificial Sequence: Synthetic oligonucleotide
  Antisense strand to SEQ ID NO: 1303178
uauugccuuggucaaggaa

SEQ ID NO: 1303180 - RNA, 19 nt, Artificial Sequence
  Description of Artificial Sequence: Synthetic oligonucleotide
  Sense strand starting at position 933 of SEQ ID NO: 1241831
uucugucaucuaugaaaug

SEQ ID NO: 1303181 - RNA, 19 nt, Artificial Sequence
  Description of Artificial Sequence: Synthetic oligonucleotide
  Antisense strand to SEQ ID NO: 1303180
cauuucauagaugacagaa

SEQ ID NO: 1303182 - RNA, 19 nt, Artificial Sequence
  Description of Artificial Sequence: Synthetic oligonucleotide
  Sense strand starting at position 942 of SEQ ID NO: 1241831
cuaugaaaugcuugguuga

SEQ ID NO: 1303183 - RNA, 19 nt, Artificial Sequence
  Description of Artificial Sequence: Synthetic oligonucleotide
  Antisense strand to SEQ ID NO: 1303182
ucaaccaagcauuucauag

SEQ ID NO: 1303184 - RNA, 19 nt, Artificial Sequence
  Description of Artificial Sequence: Synthetic oligonucleotide
  Sense strand starting at position 943 of SEQ ID NO: 1241831
uaugaaaugcuugguugac

SEQ ID NO: 1303185 - RNA, 19 nt, Artificial Sequence
  Description of Artificial Sequence: Synthetic oligonucleotide
  Antisense strand to SEQ ID NO: 1303184
gucaaccaagcauuucaua

SEQ ID NO: 1303186 - RNA, 19 nt, Artificial Sequence
  Description of Artificial Sequence: Synthetic oligonucleotide
  Sense strand starting at position 944 of SEQ ID NO: 1241831
augaaaugcuugguugacu

SEQ ID NO: 1303187 - RNA, 19 nt, Artificial Sequence
  Description of Artificial Sequence: Synthetic oligonucleotide
  Antisense strand to SEQ ID NO: 1303186
agucaaccaagcauuucau

SEQ ID NO: 1303188 - RNA, 19 nt, Artificial Sequence
  Description of Artificial Sequence: Synthetic oligonucleotide
  Sense strand starting at position 945 of SEQ ID NO: 1241831
ugaaaugcuugguugacuu

SEQ ID NO: 1303189 - RNA, 19 nt, Artificial Sequence
  Description of Artificial Sequence: Synthetic oligonucleotide
  Antisense strand to SEQ ID NO: 1303188
aagucaaccaagcauuuca

SEQ ID NO: 1303190 - RNA, 19 nt, Artificial Sequence
  Description of Artificial Sequence: Synthetic oligonucleotide
  Sense strand starting at position 1192 of SEQ ID NO: 1241831
gucagaagcuaccucugaa

SEQ ID NO: 1303191 - RNA, 19 nt, Artificial Sequence
  Description of Artificial Sequence: Synthetic oligonucleotide
  Antisense strand to SEQ ID NO: 1303190
uucagagguagcuucugac

SEQ ID NO: 1303192 - RNA, 19 nt, Artificial Sequence
  Description of Artificial Sequence: Synthetic oligonucleotide
  Sense strand starting at position 1578 of SEQ ID NO: 1241831
guccaaugcugauuaccaa

SEQ ID NO: 1303193 - RNA, 19 nt, Artificial Sequence
  Description of Artificial Sequence: Synthetic oligonucleotide
  Antisense strand to SEQ ID NO: 1303192
uugguaaucagcauuggac

SEQ ID NO: 1303194 - RNA, 19 nt, Artificial Sequence
  Description of Artificial Sequence: Synthetic oligonucleotide
  Sense strand starting at position 1625 of SEQ ID NO: 1241831
cuuuaagaggcuuacauuc

SEQ ID NO: 1303195 - RNA, 19 nt, Artificial Sequence
  Description of Artificial Sequence: Synthetic oligonucleotide
  Antisense strand to SEQ ID NO: 1303194
gaauguaagccucuuaaag

SEQ ID NO: 1303196 - RNA, 19 nt, Artificial Sequence
  Description of Artificial Sequence: Synthetic oligonucleotide
  Sense strand starting at position 1664 of SEQ ID NO: 1241831
cacagauuucucggccuuu

SEQ ID NO: 1303197 - RNA, 19 nt, Artificial Sequence
  Description of Artificial Sequence: Synthetic oligonucleotide
  Antisense strand to SEQ ID NO: 1303196
aaaggccgagaaaucugug

SEQ ID NO: 1303198 - RNA, 19 nt, Artificial Sequence
  Description of Artificial Sequence: Synthetic oligonucleotide
  Sense strand starting at position 2155 of SEQ ID NO: 1241831
ugugcagaucuugacugaa

SEQ ID NO: 1303199 - RNA, 19 nt, Artificial Sequence
  Description of Artificial Sequence: Synthetic oligonucleotide
  Antisense strand to SEQ ID NO: 1303198
uucagucaagaucugcaca

SEQ ID NO: 1303200 - RNA, 19 nt, Artificial Sequence
  Description of Artificial Sequence: Synthetic oligonucleotide
  Sense strand starting at position 2200 of SEQ ID NO: 1241831
uggcaaugacuccaguaaa

SEQ ID NO: 1303201 - RNA, 19 nt, Artificial Sequence
  Description of Artificial Sequence: Synthetic oligonucleotide
  Antisense strand to SEQ ID NO: 1303200
uuuacuggagucauugcca

SEQ ID NO: 1303202 - RNA, 19 nt, Artificial Sequence
  Description of Artificial Sequence: Synthetic oligonucleotide
  Sense strand starting at position 2249 of SEQ ID NO: 1241831
ggccgauacacguagggaa

SEQ ID NO: 1303203 - RNA, 19 nt, Artificial Sequence
  Description of Artificial Sequence: Synthetic oligonucleotide
  Antisense strand to SEQ ID NO: 1303202
uucccuacguguaucggcc

SEQ ID NO: 1303204 - RNA, 19 nt, Artificial Sequence
  Description of Artificial Sequence: Synthetic oligonucleotide
  Sense strand starting at position 2295 of SEQ ID NO: 1241831
aguauauacuuugccagga

SEQ ID NO: 1303205 - RNA, 19 nt, Artificial Sequence
  Description of Artificial Sequence: Synthetic oligonucleotide
  Antisense strand to SEQ ID NO: 1303204
uccuggcaaaguauauacu

SEQ ID NO: 1303206 - RNA, 19 nt, Artificial Sequence
  Description of Artificial Sequence: Synthetic oligonucleotide
  Sense strand starting at position 2296 of SEQ ID NO: 1241831
guauauacuuugccaggaa

SEQ ID NO: 1303207 - RNA, 19 nt, Artificial Sequence
  Description of Artificial Sequence: Synthetic oligonucleotide
  Antisense strand to SEQ ID NO: 1303206
uuccuggcaaaguauauac

SEQ ID NO: 1303208 - RNA, 19 nt, Artificial Sequence
  Description of Artificial Sequence: Synthetic oligonucleotide
  Sense strand starting at position 2299 of SEQ ID NO: 1241831
uauacuuugccaggaagag

SEQ ID NO: 1303209 - RNA, 19 nt, Artificial Sequence
  Description of Artificial Sequence: Synthetic oligonucleotide
  Antisense strand to SEQ ID NO: 1303208
cucuuccuggcaaaguaua

SEQ ID NO: 1303210 - RNA, 19 nt, Artificial Sequence
  Description of Artificial Sequence: Synthetic oligonucleotide
  Sense strand starting at position 2461 of SEQ ID NO: 1241831
aaaguaaagucuuuggaau

SEQ ID NO: 1303211 - RNA, 19 nt, Artificial Sequence
  Description of Artificial Sequence: Synthetic oligonucleotide
  Antisense strand to SEQ ID NO: 1303210
auuccaaagacuuuacuuu

SEQ ID NO: 1303212 - RNA, 19 nt, Artificial Sequence
  Description of Artificial Sequence: Synthetic oligonucleotide
  Sense strand starting at position 2462 of SEQ ID NO: 1241831
aaguaaagucuuuggaauc

SEQ ID NO: 1303213 - RNA, 19 nt, Artificial Sequence
  Description of Artificial Sequence: Synthetic oligonucleotide
  Antisense strand to SEQ ID NO: 1303212
gauuccaaagacuuuacuu

SEQ ID NO: 1303214 - RNA, 19 nt, Artificial Sequence
  Description of Artificial Sequence: Synthetic oligonucleotide
  Sense strand starting at position 2917 of SEQ ID NO: 1241831
uggacuugucgugagguac

SEQ ID NO: 1303215 - RNA, 19 nt, Artificial Sequence
  Description of Artificial Sequence: Synthetic oligonucleotide
  Antisense strand to SEQ ID NO: 1303214
guaccucacgacaagucca

SEQ ID NO: 1303216 - RNA, 19 nt, Artificial Sequence
  Description of Artificial Sequence: Synthetic oligonucleotide
  Sense strand starting at position 2921 of SEQ ID NO: 1241831
cuugucgugagguacagaa

SEQ ID NO: 1303217 - RNA, 19 nt, Artificial Sequence
  Description of Artificial Sequence: Synthetic oligonucleotide
  Antisense strand to SEQ ID NO: 1303216
uucuguaccucacgacaag

SEQ ID NO: 1303218 - RNA, 19 nt, Artificial Sequence
  Description of Artificial Sequence: Synthetic oligonucleotide
  Sense strand starting at position 3027 of SEQ ID NO: 1241831
caguuaugucucuaggauc

SEQ ID NO: 1303219 - RNA, 19 nt, Artificial Sequence
  Description of Artificial Sequence: Synthetic oligonucleotide
  Antisense strand to SEQ ID NO: 1303218
gauccuagagacauaacug

SEQ ID NO: 1303220 - RNA, 19 nt, Artificial Sequence
  Description of Artificial Sequence: Synthetic oligonucleotide
  Sense strand starting at position 3044 of SEQ ID NO: 1241831
ucgagacguggcuauaaau

SEQ ID NO: 1303221 - RNA, 19 nt, Artificial Sequence
  Description of Artificial Sequence: Synthetic oligonucleotide
  Antisense strand to SEQ ID NO: 1303220
auuuauagccacgucucga

SEQ ID NO: 1303222 - RNA, 19 nt, Artificial Sequence
  Description of Artificial Sequence: Synthetic oligonucleotide
  Sense strand starting at position 3055 of SEQ ID NO: 1241831
cuauaaaugugucugauaa

SEQ ID NO: 1303223 - RNA, 19 nt, Artificial Sequence
  Description of Artificial Sequence: Synthetic oligonucleotide
  Antisense strand to SEQ ID NO: 1303222
uuaucagacacauuuauag

SEQ ID NO: 1303224 - RNA, 19 nt, Artificial Sequence
  Description of Artificial Sequence: Synthetic oligonucleotide
  Sense strand starting at position 3172 of SEQ ID NO: 1241831
aggaguucuguguauguua

SEQ ID NO: 1303225 - RNA, 19 nt, Artificial Sequence
  Description of Artificial Sequence: Synthetic oligonucleotide
  Antisense strand to SEQ ID NO: 1303224
uaacauacacagaacuccu

SEQ ID NO: 1303226 - RNA, 19 nt, Artificial Sequence
  Description of Artificial Sequence: Synthetic oligonucleotide
  Sense strand starting at position 3185 of SEQ ID NO: 1241831
auguuaauauuuguugcga

SEQ ID NO: 1303227 - RNA, 19 nt, Artificial Sequence
  Description of Artificial Sequence: Synthetic oligonucleotide
  Antisense strand to SEQ ID NO: 1303226
ucgcaacaaauauuaacau

SEQ ID NO: 1303228 - RNA, 19 nt, Artificial Sequence
  Description of Artificial Sequence: Synthetic oligonucleotide
  Sense strand starting at position 3366 of SEQ ID NO: 1241831
ugcauucucucaccugaga

SEQ ID NO: 1303229 - RNA, 19 nt, Artificial Sequence
  Description of Artificial Sequence: Synthetic oligonucleotide
  Antisense strand to SEQ ID NO: 1303228
ucucaggugagagaaugca

SEQ ID NO: 1303230 - RNA, 19 nt, Artificial Sequence
  Description of Artificial Sequence: Synthetic oligonucleotide
  Sense strand starting at position 3403 of SEQ ID NO: 1241831
augaaugauuugggaggga

SEQ ID NO: 1303231 - RNA, 19 nt, Artificial Sequence
  Description of Artificial Sequence: Synthetic oligonucleotide
  Antisense strand to SEQ ID NO: 1303230
ucccucccaaaucauucau

SEQ ID NO: 1303232 - RNA, 19 nt, Artificial Sequence
  Description of Artificial Sequence: Synthetic oligonucleotide
  Sense strand starting at position 3531 of SEQ ID NO: 1241831
ccuugaguuguccagagua

SEQ ID NO: 1303233 - RNA, 19 nt, Artificial Sequence
  Description of Artificial Sequence: Synthetic oligonucleotide
  Antisense strand to SEQ ID NO: 1303232
uacucuggacaacucaagg

SEQ ID NO: 1303234 - RNA, 19 nt, Artificial Sequence
  Description of Artificial Sequence: Synthetic oligonucleotide
  Sense strand starting at position 3533 of SEQ ID NO: 1241831
uugaguuguccagaguagu

SEQ ID NO: 1303235 - RNA, 19 nt, Artificial Sequence
  Description of Artificial Sequence: Synthetic oligonucleotide
  Antisense strand to SEQ ID NO: 1303234
acuacucuggacaacucaa

SEQ ID NO: 1303236 - RNA, 19 nt, Artificial Sequence
  Description of Artificial Sequence: Synthetic oligonucleotide
  Sense strand starting at position 3543 of SEQ ID NO: 1241831
cagaguaguccuuagcuag

SEQ ID NO: 1303237 - RNA, 19 nt, Artificial Sequence
  Description of Artificial Sequence: Synthetic oligonucleotide
  Antisense strand to SEQ ID NO: 1303236
cuagcuaaggacuacucug

SEQ ID NO: 1303238 - RNA, 19 nt, Artificial Sequence
  Description of Artificial Sequence: Synthetic oligonucleotide
  Sense strand starting at position 3711 of SEQ ID NO: 1241831
guguccucaggccagauau

SEQ ID NO: 1303239 - RNA, 19 nt, Artificial Sequence
  Description of Artificial Sequence: Synthetic oligonucleotide
  Antisense strand to SEQ ID NO: 1303238
auaucuggccugaggacac

SEQ ID NO: 1303240 - RNA, 19 nt, Artificial Sequence
  Description of Artificial Sequence: Synthetic oligonucleotide
  Sense strand starting at position 3775 of SEQ ID NO: 1241831
cuaagaagacuguaaacgu

SEQ ID NO: 1303241 - RNA, 19 nt, Artificial Sequence
  Description of Artificial Sequence: Synthetic oligonucleotide
  Antisense strand to SEQ ID NO: 1303240
acguuuacagucuucuuag

SEQ ID NO: 1303242 - RNA, 19 nt, Artificial Sequence
  Description of Artificial Sequence: Synthetic oligonucleotide
  Sense strand starting at position 3883 of SEQ ID NO: 1241831
ugguucauccgaggaauga

SEQ ID NO: 1303243 - RNA, 19 nt, Artificial Sequence
  Description of Artificial Sequence: Synthetic oligonucleotide
  Antisense strand to SEQ ID NO: 1303242
ucauuccucggaugaacca

SEQ ID NO: 1303244 - RNA, 19 nt, Artificial Sequence
  Description of Artificial Sequence: Synthetic oligonucleotide
  Sense strand starting at position 3960 of SEQ ID NO: 1241831
caacaugugcagugaaaca

SEQ ID NO: 1303245 - RNA, 19 nt, Artificial Sequence
  Description of Artificial Sequence: Synthetic oligonucleotide
  Antisense strand to SEQ ID NO: 1303244
uguuucacugcacauguug

SEQ ID NO: 1303246 - RNA, 19 nt, Artificial Sequence
  Description of Artificial Sequence: Synthetic oligonucleotide
  Sense strand starting at position 31 of SEQ ID NO: 1241832
gcacucgucacgucauguu

SEQ ID NO: 1303247 - RNA, 19 nt, Artificial Sequence
  Description of Artificial Sequence: Synthetic oligonucleotide
  Antisense strand to SEQ ID NO: 1303246
aacaugacgugacgagugc

SEQ ID NO: 1303248 - RNA, 19 nt, Artificial Sequence
  Description of Artificial Sequence: Synthetic oligonucleotide
  Sense strand starting at position 35 of SEQ ID NO: 1241832
ucgucacgucauguuguaa

SEQ ID NO: 1303249 - RNA, 19 nt, Artificial Sequence
  Description of Artificial Sequence: Synthetic oligonucleotide
  Antisense strand to SEQ ID NO: 1303248
uuacaacaugacgugacga

SEQ ID NO: 1303250 - RNA, 19 nt, Artificial Sequence
  Description of Artificial Sequence: Synthetic oligonucleotide
  Sense strand starting at position 43 of SEQ ID NO: 1241832
ucauguuguaaguaguacu

SEQ ID NO: 1303251 - RNA, 19 nt, Artificial Sequence
  Description of Artificial Sequence: Synthetic oligonucleotide
  Antisense strand to SEQ ID NO: 1303250
aguacuacuuacaacauga

SEQ ID NO: 1303252 - RNA, 19 nt, Artificial Sequence
  Description of Artificial Sequence: Synthetic oligonucleotide
  Sense strand starting at position 50 of SEQ ID NO: 1241832
guaaguaguacuugcuuac

SEQ ID NO: 1303253 - RNA, 19 nt, Artificial Sequence
  Description of Artificial Sequence: Synthetic oligonucleotide
  Antisense strand to SEQ ID NO: 1303252
guaagcaaguacuacuuac

SEQ ID NO: 1303254 - RNA, 19 nt, Artificial Sequence
  Description of Artificial Sequence: Synthetic oligonucleotide
  Sense strand starting at position 53 of SEQ ID NO: 1241832
aguaguacuugcuuacauu

SEQ ID NO: 1303255 - RNA, 19 nt, Artificial Sequence
  Description of Artificial Sequence: Synthetic oligonucleotide
  Antisense strand to SEQ ID NO: 1303254
aauguaagcaaguacuacu

SEQ ID NO: 1303256 - RNA, 19 nt, Artificial Sequence
  Description of Artificial Sequence: Synthetic oligonucleotide
  Sense strand starting at position 54 of SEQ ID NO: 1241832
guaguacuugcuuacauua

SEQ ID NO: 1303257 - RNA, 19 nt, Artificial Sequence
  Description of Artificial Sequence: Synthetic oligonucleotide
  Antisense strand to SEQ ID NO: 1303256
uaauguaagcaaguacuac

SEQ ID NO: 1303258 - RNA, 19 nt, Artificial Sequence
  Description of Artificial Sequence: Synthetic oligonucleotide
  Sense strand starting at position 207 of SEQ ID NO: 1241832
gugcaauggcuguaccuga

SEQ ID NO: 1303259 - RNA, 19 nt, Artificial Sequence
  Description of Artificial Sequence: Synthetic oligonucleotide
  Antisense strand to SEQ ID NO: 1303258
ucagguacagccauugcac

SEQ ID NO: 1303260 - RNA, 19 nt, Artificial Sequence
  Description of Artificial Sequence: Synthetic oligonucleotide
  Sense strand starting at position 335 of SEQ ID NO: 1241832
agaaaucacucugagcaaa

SEQ ID NO: 1303261 - RNA, 19 nt, Artificial Sequence
  Description of Artificial Sequence: Synthetic oligonucleotide
  Antisense strand to SEQ ID NO: 1303260
uuugcucagagugauuucu

SEQ ID NO: 1303262 - RNA, 19 nt, Artificial Sequence
  Description of Artificial Sequence: Synthetic oligonucleotide
  Sense strand starting at position 448 of SEQ ID NO: 1241832
uuugcuccacuaugaauga

SEQ ID NO: 1303263 - RNA, 19 nt, Artificial Sequence
  Description of Artificial Sequence: Synthetic oligonucleotide
  Antisense strand to SEQ ID NO: 1303262
ucauucauaguggagcaaa

SEQ ID NO: 1303264 - RNA, 19 nt, Artificial Sequence
  Description of Artificial Sequence: Synthetic oligonucleotide
  Sense strand starting at position 544 of SEQ ID NO: 1241832
guguaauaugugcacccaa

SEQ ID NO: 1303265 - RNA, 19 nt, Artificial Sequence
  Description of Artificial Sequence: Synthetic oligonucleotide
  Antisense strand to SEQ ID NO: 1303264
uugggugcacauauuacac

SEQ ID NO: 1303266 - RNA, 19 nt, Artificial Sequence
  Description of Artificial Sequence: Synthetic oligonucleotide
  Sense strand starting at position 859 of SEQ ID NO: 1241832
uaaggagugucauuagcaa

SEQ ID NO: 1303267 - RNA, 19 nt, Artificial Sequence
  Description of Artificial Sequence: Synthetic oligonucleotide
  Antisense strand to SEQ ID NO: 1303266
uugcuaaugacacuccuua

SEQ ID NO: 1303268 - RNA, 19 nt, Artificial Sequence
  Description of Artificial Sequence: Synthetic oligonucleotide
  Sense strand starting at position 863 of SEQ ID NO: 1241832
gagugucauuagcaaagaa

SEQ ID NO: 1303269 - RNA, 19 nt, Artificial Sequence
  Description of Artificial Sequence: Synthetic oligonucleotide
  Antisense strand to SEQ ID NO: 1303268
uucuuugcuaaugacacuc

SEQ ID NO: 1303270 - RNA, 19 nt, Artificial Sequence
  Description of Artificial Sequence: Synthetic oligonucleotide
  Sense strand starting at position 915 of SEQ ID NO: 1241832
uugugaauuccgggaucua

SEQ ID NO: 1303271 - RNA, 19 nt, Artificial Sequence
  Description of Artificial Sequence: Synthetic oligonucleotide
  Antisense strand to SEQ ID NO: 1303270
uagaucccggaauucacaa

SEQ ID NO: 1303272 - RNA, 19 nt, Artificial Sequence
  Description of Artificial Sequence: Synthetic oligonucleotide
  Sense strand starting at position 916 of SEQ ID NO: 1241832
ugugaauuccgggaucuag

SEQ ID NO: 1303273 - RNA, 19 nt, Artificial Sequence
  Description of Artificial Sequence: Synthetic oligonucleotide
  Antisense strand to SEQ ID NO: 1303272
cuagaucccggaauucaca

SEQ ID NO: 1303274 - RNA, 19 nt, Artificial Sequence
  Description of Artificial Sequence: Synthetic oligonucleotide
  Sense strand starting at position 951 of SEQ ID NO: 1241832
guaucacucugcuauaaga

SEQ ID NO: 1303275 - RNA, 19 nt, Artificial Sequence
  Description of Artificial Sequence: Synthetic oligonucleotide
  Antisense strand to SEQ ID NO: 1303274
ucuuauagcagagugauac

SEQ ID NO: 1303276 - RNA, 19 nt, Artificial Sequence
  Description of Artificial Sequence: Synthetic oligonucleotide
  Sense strand starting at position 2128 of SEQ ID NO: 1241832
cugggauugcacggcagaa

SEQ ID NO: 1303277 - RNA, 19 nt, Artificial Sequence
  Description of Artificial Sequence: Synthetic oligonucleotide
  Antisense strand to SEQ ID NO: 1303276
uucugccgugcaaucccag

SEQ ID NO: 1303278 - RNA, 19 nt, Artificial Sequence
  Description of Artificial Sequence: Synthetic oligonucleotide
  Sense strand starting at position 2150 of SEQ ID NO: 1241832
cccaucucgcugcaugaga

SEQ ID NO: 1303279 - RNA, 19 nt, Artificial Sequence
  Description of Artificial Sequence: Synthetic oligonucleotide
  Antisense strand to SEQ ID NO: 1303278
ucucaugcagcgagauggg

SEQ ID NO: 1303280 - RNA, 19 nt, Artificial Sequence
  Description of Artificial Sequence: Synthetic oligonucleotide
  Sense strand starting at position 2158 of SEQ ID NO: 1241832
gcugcaugagaccaauagu

SEQ ID NO: 1303281 - RNA, 19 nt, Artificial Sequence
  Description of Artificial Sequence: Synthetic oligonucleotide
  Antisense strand to SEQ ID NO: 1303280
acuauuggucucaugcagc

SEQ ID NO: 1303282 - RNA, 19 nt, Artificial Sequence
  Description of Artificial Sequence: Synthetic oligonucleotide
  Sense strand starting at position 2241 of SEQ ID NO: 1241832
gcggcaaagugaucaaagu

SEQ ID NO: 1303283 - RNA, 19 nt, Artificial Sequence
  Description of Artificial Sequence: Synthetic oligonucleotide
  Antisense strand to SEQ ID NO: 1303282
acuuugaucacuuugccgc

SEQ ID NO: 1303284 - RNA, 19 nt, Artificial Sequence
  Description of Artificial Sequence: Synthetic oligonucleotide
  Sense strand starting at position 2242 of SEQ ID NO: 1241832
cggcaaagugaucaaagua

SEQ ID NO: 1303285 - RNA, 19 nt, Artificial Sequence
  Description of Artificial Sequence: Synthetic oligonucleotide
  Antisense strand to SEQ ID NO: 1303284
uacuuugaucacuuugccg

SEQ ID NO: 1303286 - RNA, 19 nt, Artificial Sequence
  Description of Artificial Sequence: Synthetic oligonucleotide
  Sense strand starting at position 2273 of SEQ ID NO: 1241832
gaggcugcucugggaaaug

SEQ ID NO: 1303287 - RNA, 19 nt, Artificial Sequence
  Description of Artificial Sequence: Synthetic oligonucleotide
  Antisense strand to SEQ ID NO: 1303286
cauuucccagagcagccuc

SEQ ID NO: 1303288 - RNA, 19 nt, Artificial Sequence
  Description of Artificial Sequence: Synthetic oligonucleotide
  Sense strand starting at position 2548 of SEQ ID NO: 1241832
agugcauuccgugaacuuc

SEQ ID NO: 1303289 - RNA, 19 nt, Artificial Sequence
  Description of Artificial Sequence: Synthetic oligonucleotide
  Antisense strand to SEQ ID NO: 1303288
gaaguucacggaaugcacu

SEQ ID NO: 1303290 - RNA, 19 nt, Artificial Sequence
  Description of Artificial Sequence: Synthetic oligonucleotide
  Sense strand starting at position 2585 of SEQ ID NO: 1241832
aaagucauuccguguucga

SEQ ID NO: 1303291 - RNA, 19 nt, Artificial Sequence
  Description of Artificial Sequence: Synthetic oligonucleotide
  Antisense strand to SEQ ID NO: 1303290
ucgaacacggaaugacuuu

SEQ ID NO: 1303292 - RNA, 19 nt, Artificial Sequence
  Description of Artificial Sequence: Synthetic oligonucleotide
  Sense strand starting at position 2592 of SEQ ID NO: 1241832
uuccguguucgagcugcaa

SEQ ID NO: 1303293 - RNA, 19 nt, Artificial Sequence
  Description of Artificial Sequence: Synthetic oligonucleotide
  Antisense strand to SEQ ID NO: 1303292
uugcagcucgaacacggaa

SEQ ID NO: 1303294 - RNA, 19 nt, Artificial Sequence
  Description of Artificial Sequence: Synthetic oligonucleotide
  Sense strand starting at position 2594 of SEQ ID NO: 1241832
ccguguucgagcugcaaag

SEQ ID NO: 1303295 - RNA, 19 nt, Artificial Sequence
  Description of Artificial Sequence: Synthetic oligonucleotide
  Antisense strand to SEQ ID NO: 1303294
cuuugcagcucgaacacgg

SEQ ID NO: 1303296 - RNA, 19 nt, Artificial Sequence
  Description of Artificial Sequence: Synthetic oligonucleotide
  Sense strand starting at position 2726 of SEQ ID NO: 1241832
uauauuaguugguacacga

SEQ ID NO: 1303297 - RNA, 19 nt, Artificial Sequence
  Description of Artificial Sequence: Synthetic oligonucleotide
  Antisense strand to SEQ ID NO: 1303296
ucguguaccaacuaauaua

SEQ ID NO: 1303298 - RNA, 19 nt, Artificial Sequence
  Description of Artificial Sequence: Synthetic oligonucleotide
  Sense strand starting at position 2730 of SEQ ID NO: 1241832
uuaguugguacacgaagaa

SEQ ID NO: 1303299 - RNA, 19 nt, Artificial Sequence
  Description of Artificial Sequence: Synthetic oligonucleotide
  Antisense strand to SEQ ID NO: 1303298
uucuucguguaccaacuaa

SEQ ID NO: 1303300 - RNA, 19 nt, Artificial Sequence
  Description of Artificial Sequence: Synthetic oligonucleotide
  Sense strand starting at position 2781 of SEQ ID NO: 1241832
ugcgcauuaggagggaaau

SEQ ID NO: 1303301 - RNA, 19 nt, Artificial Sequence
  Description of Artificial Sequence: Synthetic oligonucleotide
  Antisense strand to SEQ ID NO: 1303300
auuucccuccuaaugcgca

SEQ ID NO: 1303302 - RNA, 19 nt, Artificial Sequence
  Description of Artificial Sequence: Synthetic oligonucleotide
  Sense strand starting at position 2830 of SEQ ID NO: 1241832
uguuauuucuuaggucaaa

SEQ ID NO: 1303303 - RNA, 19 nt, Artificial Sequence
  Description of Artificial Sequence: Synthetic oligonucleotide
  Antisense strand to SEQ ID NO: 1303302
uuugaccuaagaaauaaca

SEQ ID NO: 1303304 - RNA, 19 nt, Artificial Sequence
  Description of Artificial Sequence: Synthetic oligonucleotide
  Sense strand starting at position 2916 of SEQ ID NO: 1241832
gcaguugaagaacguguaa

SEQ ID NO: 1303305 - RNA, 19 nt, Artificial Sequence
  Description of Artificial Sequence: Synthetic oligonucleotide
  Antisense strand to SEQ ID NO: 1303304
uuacacguucuucaacugc

SEQ ID NO: 1303306 - RNA, 19 nt, Artificial Sequence
  Description of Artificial Sequence: Synthetic oligonucleotide
  Sense strand starting at position 2936 of SEQ ID NO: 1241832
acuaguugauagugauuga

SEQ ID NO: 1303307 - RNA, 19 nt, Artificial Sequence
  Description of Artificial Sequence: Synthetic oligonucleotide
  Antisense strand to SEQ ID NO: 1303306
ucaaucacuaucaacuagu

SEQ ID NO: 1303308 - RNA, 19 nt, Artificial Sequence
  Description of Artificial Sequence: Synthetic oligonucleotide
  Sense strand starting at position 2939 of SEQ ID NO: 1241832
aguugauagugauugaagu

SEQ ID NO: 1303309 - RNA, 19 nt, Artificial Sequence
  Description of Artificial Sequence: Synthetic oligonucleotide
  Antisense strand to SEQ ID NO: 1303308
acuucaaucacuaucaacu

SEQ ID NO: 1303310 - RNA, 19 nt, Artificial Sequence
  Description of Artificial Sequence: Synthetic oligonucleotide
  Sense strand starting at position 2940 of SEQ ID NO: 1241832
guugauagugauugaagua

SEQ ID NO: 1303311 - RNA, 19 nt, Artificial Sequence
  Description of Artificial Sequence: Synthetic oligonucleotide
  Antisense strand to SEQ ID NO: 1303310
uacuucaaucacuaucaac

SEQ ID NO: 1303312 - RNA, 19 nt, Artificial Sequence
  Description of Artificial Sequence: Synthetic oligonucleotide
  Sense strand starting at position 3041 of SEQ ID NO: 1241832
ugaccugggugauagauaa

SEQ ID NO: 1303313 - RNA, 19 nt, Artificial Sequence
  Description of Artificial Sequence: Synthetic oligonucleotide
  Antisense strand to SEQ ID NO: 1303312
uuaucuaucacccagguca

SEQ ID NO: 1303314 - RNA, 19 nt, Artificial Sequence
  Description of Artificial Sequence: Synthetic oligonucleotide
  Sense strand starting at position 3273 of SEQ ID NO: 1241832
uugugaauaccugaugugu

SEQ ID NO: 1303315 - RNA, 19 nt, Artificial Sequence
  Description of Artificial Sequence: Synthetic oligonucleotide
  Antisense strand to SEQ ID NO: 1303314
acacaucagguauucacaa

SEQ ID NO: 1303316 - RNA, 19 nt, Artificial Sequence
  Description of Artificial Sequence: Synthetic oligonucleotide
  Sense strand starting at position 3297 of SEQ ID NO: 1241832
aggaacuuccauuguugaa

SEQ ID NO: 1303317 - RNA, 19 nt, Artificial Sequence
  Description of Artificial Sequence: Synthetic oligonucleotide
  Antisense strand to SEQ ID NO: 1303316
uucaacaauggaaguuccu

SEQ ID NO: 1303318 - RNA, 19 nt, Artificial Sequence
  Description of Artificial Sequence: Synthetic oligonucleotide
  Sense strand starting at position 3307 of SEQ ID NO: 1241832
auuguugaauagcuccaaa

SEQ ID NO: 1303319 - RNA, 19 nt, Artificial Sequence
  Description of Artificial Sequence: Synthetic oligonucleotide
  Antisense strand to SEQ ID NO: 1303318
uuuggagcuauucaacaau

SEQ ID NO: 1303320 - RNA, 19 nt, Artificial Sequence
  Description of Artificial Sequence: Synthetic oligonucleotide
  Sense strand starting at position 3348 of SEQ ID NO: 1241832
gagcucuggugcucacaua

SEQ ID NO: 1303321 - RNA, 19 nt, Artificial Sequence
  Description of Artificial Sequence: Synthetic oligonucleotide
  Antisense strand to SEQ ID NO: 1303320
uaugugagcaccagagcuc

SEQ ID NO: 1303322 - RNA, 19 nt, Artificial Sequence
  Description of Artificial Sequence: Synthetic oligonucleotide
  Sense strand starting at position 3349 of SEQ ID NO: 1241832
agcucuggugcucacauau

SEQ ID NO: 1303323 - RNA, 19 nt, Artificial Sequence
  Description of Artificial Sequence: Synthetic oligonucleotide
  Antisense strand to SEQ ID NO: 1303322
auaugugagcaccagagcu

SEQ ID NO: 1303324 - RNA, 19 nt, Artificial Sequence
  Description of Artificial Sequence: Synthetic oligonucleotide
  Sense strand starting at position 3705 of SEQ ID NO: 1241832
uuaaguaacccucaccgaa

SEQ ID NO: 1303325 - RNA, 19 nt, Artificial Sequence
  Description of Artificial Sequence: Synthetic oligonucleotide
  Antisense strand to SEQ ID NO: 1303324
uucggugaggguuacuuaa

SEQ ID NO: 1303326 - RNA, 19 nt, Artificial Sequence
  Description of Artificial Sequence: Synthetic oligonucleotide
  Sense strand starting at position 176 of SEQ ID NO: 1241833
cuguguagaucuuccauuu

SEQ ID NO: 1303327 - RNA, 19 nt, Artificial Sequence
  Description of Artificial Sequence: Synthetic oligonucleotide
  Antisense strand to SEQ ID NO: 1303326
aaauggaagaucuacacag

SEQ ID NO: 1303328 - RNA, 19 nt, Artificial Sequence
  Description of Artificial Sequence: Synthetic oligonucleotide
  Sense strand starting at position 334 of SEQ ID NO: 1241833
gguuauaaccauuaacgac

SEQ ID NO: 1303329 - RNA, 19 nt, Artificial Sequence
  Description of Artificial Sequence: Synthetic oligonucleotide
  Antisense strand to SEQ ID NO: 1303328
gucguuaaugguuauaacc

SEQ ID NO: 1303330 - RNA, 19 nt, Artificial Sequence
  Description of Artificial Sequence: Synthetic oligonucleotide
  Sense strand starting at position 496 of SEQ ID NO: 1241833
ugauguuguuucuuguaua

SEQ ID NO: 1303331 - RNA, 19 nt, Artificial Sequence
  Description of Artificial Sequence: Synthetic oligonucleotide
  Antisense strand to SEQ ID NO: 1303330
uauacaagaaacaacauca

SEQ ID NO: 1303332 - RNA, 19 nt, Artificial Sequence
  Description of Artificial Sequence: Synthetic oligonucleotide
  Sense strand starting at position 501 of SEQ ID NO: 1241833
uuguuucuuguauaucuca

SEQ ID NO: 1303333 - RNA, 19 nt, Artificial Sequence
  Description of Artificial Sequence: Synthetic oligonucleotide
  Antisense strand to SEQ ID NO: 1303332
ugagauauacaagaaacaa

SEQ ID NO: 1303334 - RNA, 19 nt, Artificial Sequence
  Description of Artificial Sequence: Synthetic oligonucleotide
  Sense strand starting at position 633 of SEQ ID NO: 1241833
gcguuugcguuaauuggga

SEQ ID NO: 1303335 - RNA, 19 nt, Artificial Sequence
  Description of Artificial Sequence: Synthetic oligonucleotide
  Antisense strand to SEQ ID NO: 1303334
ucccaauuaacgcaaacgc

SEQ ID NO: 1303336 - RNA, 19 nt, Artificial Sequence
  Description of Artificial Sequence: Synthetic oligonucleotide
  Sense strand starting at position 635 of SEQ ID NO: 1241833
guuugcguuaauugggaga

SEQ ID NO: 1303337 - RNA, 19 nt, Artificial Sequence
  Description of Artificial Sequence: Synthetic oligonucleotide
  Antisense strand to SEQ ID NO: 1303336
ucucccaauuaacgcaaac

SEQ ID NO: 1303338 - RNA, 19 nt, Artificial Sequence
  Description of Artificial Sequence: Synthetic oligonucleotide
  Sense strand starting at position 640 of SEQ ID NO: 1241833
cguuaauugggagaaguug

SEQ ID NO: 1303339 - RNA, 19 nt, Artificial Sequence
  Description of Artificial Sequence: Synthetic oligonucleotide
  Antisense strand to SEQ ID NO: 1303338
caacuucucccaauuaacg

SEQ ID NO: 1303340 - RNA, 19 nt, Artificial Sequence
  Description of Artificial Sequence: Synthetic oligonucleotide
  Sense strand starting at position 648 of SEQ ID NO: 1241833
gggagaaguugaguguaga

SEQ ID NO: 1303341 - RNA, 19 nt, Artificial Sequence
  Description of Artificial Sequence: Synthetic oligonucleotide
  Antisense strand to SEQ ID NO: 1303340
ucuacacucaacuucuccc

SEQ ID NO: 1303342 - RNA, 19 nt, Artificial Sequence
  Description of Artificial Sequence: Synthetic oligonucleotide
  Sense strand starting at position 649 of SEQ ID NO: 1241833
ggagaaguugaguguagaa

SEQ ID NO: 1303343 - RNA, 19 nt, Artificial Sequence
  Description of Artificial Sequence: Synthetic oligonucleotide
  Antisense strand to SEQ ID NO: 1303342
uucuacacucaacuucucc

SEQ ID NO: 1303344 - RNA, 19 nt, Artificial Sequence
  Description of Artificial Sequence: Synthetic oligonucleotide
  Sense strand starting at position 659 of SEQ ID NO: 1241833
aguguagaaauguaccgaa

SEQ ID NO: 1303345 - RNA, 19 nt, Artificial Sequence
  Description of Artificial Sequence: Synthetic oligonucleotide
  Antisense strand to SEQ ID NO: 1303344
uucgguacauuucuacacu

SEQ ID NO: 1303346 - RNA, 19 nt, Artificial Sequence
  Description of Artificial Sequence: Synthetic oligonucleotide
  Sense strand starting at position 791 of SEQ ID NO: 1241833
acguuuguaaucgaucauu

SEQ ID NO: 1303347 - RNA, 19 nt, Artificial Sequence
  Description of Artificial Sequence: Synthetic oligonucleotide
  Antisense strand to SEQ ID NO: 1303346
aaugaucgauuacaaacgu

SEQ ID NO: 1303348 - RNA, 19 nt, Artificial Sequence
  Description of Artificial Sequence: Synthetic oligonucleotide
  Sense strand starting at position 856 of SEQ ID NO: 1241833
guagcagacgcauauucuu

SEQ ID NO: 1303349 - RNA, 19 nt, Artificial Sequence
  Description of Artificial Sequence: Synthetic oligonucleotide
  Antisense strand to SEQ ID NO: 1303348
aagaauaugcgucugcuac

SEQ ID NO: 1303350 - RNA, 19 nt, Artificial Sequence
  Description of Artificial Sequence: Synthetic oligonucleotide
  Sense strand starting at position 997 of SEQ ID NO: 1241833
uuaaguuucccagggaaac

SEQ ID NO: 1303351 - RNA, 19 nt, Artificial Sequence
  Description of Artificial Sequence: Synthetic oligonucleotide
  Antisense strand to SEQ ID NO: 1303350
guuucccugggaaacuuaa

SEQ ID NO: 1303352 - RNA, 19 nt, Artificial Sequence
  Description of Artificial Sequence: Synthetic oligonucleotide
  Sense strand starting at position 998 of SEQ ID NO: 1241833
uaaguuucccagggaaacu

SEQ ID NO: 1303353 - RNA, 19 nt, Artificial Sequence
  Description of Artificial Sequence: Synthetic oligonucleotide
  Antisense strand to SEQ ID NO: 1303352
aguuucccugggaaacuua

SEQ ID NO: 1303354 - RNA, 19 nt, Artificial Sequence
  Description of Artificial Sequence: Synthetic oligonucleotide
  Sense strand starting at position 1047 of SEQ ID NO: 1241833
ugacguuggaguuacugua

SEQ ID NO: 1303355 - RNA, 19 nt, Artificial Sequence
  Description of Artificial Sequence: Synthetic oligonucleotide
  Antisense strand to SEQ ID NO: 1303354
uacaguaacuccaacguca

SEQ ID NO: 1303356 - RNA, 19 nt, Artificial Sequence
  Description of Artificial Sequence: Synthetic oligonucleotide
  Sense strand starting at position 1055 of SEQ ID NO: 1241833
gaguuacuguacuuaucag

SEQ ID NO: 1303357 - RNA, 19 nt, Artificial Sequence
  Description of Artificial Sequence: Synthetic oligonucleotide
  Antisense strand to SEQ ID NO: 1303356
cugauaaguacaguaacuc

SEQ ID NO: 1303358 - RNA, 19 nt, Artificial Sequence
  Description of Artificial Sequence: Synthetic oligonucleotide
  Sense strand starting at position 1063 of SEQ ID NO: 1241833
guacuuaucagucagguuu

SEQ ID NO: 1303359 - RNA, 19 nt, Artificial Sequence
  Description of Artificial Sequence: Synthetic oligonucleotide
  Antisense strand to SEQ ID NO: 1303358
aaaccugacugauaaguac

SEQ ID NO: 1303360 - RNA, 19 nt, Artificial Sequence
  Description of Artificial Sequence: Synthetic oligonucleotide
  Sense strand starting at position 1567 of SEQ ID NO: 1241833
ucuagaaagucuccgugga

SEQ ID NO: 1303361 - RNA, 19 nt, Artificial Sequence
  Description of Artificial Sequence: Synthetic oligonucleotide
  Antisense strand to SEQ ID NO: 1303360
uccacggagacuuucuaga

SEQ ID NO: 1303362 - RNA, 19 nt, Artificial Sequence
  Description of Artificial Sequence: Synthetic oligonucleotide
  Sense strand starting at position 1606 of SEQ ID NO: 1241833
cuuaccuugguguacuuaa

SEQ ID NO: 1303363 - RNA, 19 nt, Artificial Sequence
  Description of Artificial Sequence: Synthetic oligonucleotide
  Antisense strand to SEQ ID NO: 1303362
uuaaguacaccaagguaag

SEQ ID NO: 1303364 - RNA, 19 nt, Artificial Sequence
  Description of Artificial Sequence: Synthetic oligonucleotide
  Sense strand starting at position 1617 of SEQ ID NO: 1241833
guacuuaauuucgagauug

SEQ ID NO: 1303365 - RNA, 19 nt, Artificial Sequence
  Description of Artificial Sequence: Synthetic oligonucleotide
  Antisense strand to SEQ ID NO: 1303364
caaucucgaaauuaaguac

SEQ ID NO: 1303366 - RNA, 19 nt, Artificial Sequence
  Description of Artificial Sequence: Synthetic oligonucleotide
  Sense strand starting at position 1708 of SEQ ID NO: 1241833
ucuaucuugcuggaaguca

SEQ ID NO: 1303367 - RNA, 19 nt, Artificial Sequence
  Description of Artificial Sequence: Synthetic oligonucleotide
  Antisense strand to SEQ ID NO: 1303366
ugacuuccagcaagauaga

SEQ ID NO: 1303368 - RNA, 19 nt, Artificial Sequence
  Description of Artificial Sequence: Synthetic oligonucleotide
  Sense strand starting at position 2198 of SEQ ID NO: 1241833
gcugcuucggaguagagaa

SEQ ID NO: 1303369 - RNA, 19 nt, Artificial Sequence
  Description of Artificial Sequence: Synthetic oligonucleotide
  Antisense strand to SEQ ID NO: 1303368
uucucuacuccgaagcagc

SEQ ID NO: 1303370 - RNA, 19 nt, Artificial Sequence
  Description of Artificial Sequence: Synthetic oligonucleotide
  Sense strand starting at position 2606 of SEQ ID NO: 1241833
ggauaugggcagugaucau

SEQ ID NO: 1303371 - RNA, 19 nt, Artificial Sequence
  Description of Artificial Sequence: Synthetic oligonucleotide
  Antisense strand to SEQ ID NO: 1303370
augaucacugcccauaucc

SEQ ID NO: 1303372 - RNA, 19 nt, Artificial Sequence
  Description of Artificial Sequence: Synthetic oligonucleotide
  Sense strand starting at position 2661 of SEQ ID NO: 1241833
uccuuuaguucuucucgga

SEQ ID NO: 1303373 - RNA, 19 nt, Artificial Sequence
  Description of Artificial Sequence: Synthetic oligonucleotide
  Antisense strand to SEQ ID NO: 1303372
uccgagaagaacuaaagga

SEQ ID NO: 1303374 - RNA, 19 nt, Artificial Sequence
  Description of Artificial Sequence: Synthetic oligonucleotide
  Sense strand starting at position 2802 of SEQ ID NO: 1241833
ucccuuugggauugaguuu

SEQ ID NO: 1303375 - RNA, 19 nt, Artificial Sequence
  Description of Artificial Sequence: Synthetic oligonucleotide
  Antisense strand to SEQ ID NO: 1303374
aaacucaaucccaaaggga

SEQ ID NO: 1303376 - RNA, 19 nt, Artificial Sequence
  Description of Artificial Sequence: Synthetic oligonucleotide
  Sense strand starting at position 2835 of SEQ ID NO: 1241833
aucuaaguguuuccaaagu

SEQ ID NO: 1303377 - RNA, 19 nt, Artificial Sequence
  Description of Artificial Sequence: Synthetic oligonucleotide
  Antisense strand to SEQ ID NO: 1303376
acuuuggaaacacuuagau

SEQ ID NO: 1303378 - RNA, 19 nt, Artificial Sequence
  Description of Artificial Sequence: Synthetic oligonucleotide
  Sense strand starting at position 2932 of SEQ ID NO: 1241833
uuuggacuccguggacuaa

SEQ ID NO: 1303379 - RNA, 19 nt, Artificial Sequence
  Description of Artificial Sequence: Synthetic oligonucleotide
  Antisense strand to SEQ ID NO: 1303378
uuaguccacggaguccaaa

SEQ ID NO: 1303380 - RNA, 19 nt, Artificial Sequence
  Description of Artificial Sequence: Synthetic oligonucleotide
  Sense strand starting at position 3148 of SEQ ID NO: 1241833
gugacagcucacugugauc

SEQ ID NO: 1303381 - RNA, 19 nt, Artificial Sequence
  Description of Artificial Sequence: Synthetic oligonucleotide
  Antisense strand to SEQ ID NO: 1303380
gaucacagugagcugucac

SEQ ID NO: 1303382 - RNA, 19 nt, Artificial Sequence
  Description of Artificial Sequence: Synthetic oligonucleotide
  Sense strand starting at position 3150 of SEQ ID NO: 1241833
gacagcucacugugaucuu

SEQ ID NO: 1303383 - RNA, 19 nt, Artificial Sequence
  Description of Artificial Sequence: Synthetic oligonucleotide
  Antisense strand to SEQ ID NO: 1303382
aagaucacagugagcuguc

SEQ ID NO: 1303384 - RNA, 19 nt, Artificial Sequence
  Description of Artificial Sequence: Synthetic oligonucleotide
  Sense strand starting at position 3286 of SEQ ID NO: 1241833
cccauuucuugggcguuaa

SEQ ID NO: 1303385 - RNA, 19 nt, Artificial Sequence
  Description of Artificial Sequence: Synthetic oligonucleotide
  Antisense strand to SEQ ID NO: 1303384
uuaacgcccaagaaauggg

SEQ ID NO: 1303386 - RNA, 19 nt, Artificial Sequence
  Description of Artificial Sequence: Synthetic oligonucleotide
  Sense strand starting at position 3290 of SEQ ID NO: 1241833
uuucuugggcguuaagaaa

SEQ ID NO: 1303387 - RNA, 19 nt, Artificial Sequence
  Description of Artificial Sequence: Synthetic oligonucleotide
  Antisense strand to SEQ ID NO: 1303386
uuucuuaacgcccaagaaa

SEQ ID NO: 1303388 - RNA, 19 nt, Artificial Sequence
  Description of Artificial Sequence: Synthetic oligonucleotide
  Sense strand starting at position 3384 of SEQ ID NO: 1241833
gaugcuaagcaauagugaa

SEQ ID NO: 1303389 - RNA, 19 nt, Artificial Sequence
  Description of Artificial Sequence: Synthetic oligonucleotide
  Antisense strand to SEQ ID NO: 1303388
uucacuauugcuuagcauc

SEQ ID NO: 1303390 - RNA, 19 nt, Artificial Sequence
  Description of Artificial Sequence: Synthetic oligonucleotide
  Sense strand starting at position 3467 of SEQ ID NO: 1241833
caaagugaccugggugaau

SEQ ID NO: 1303391 - RNA, 19 nt, Artificial Sequence
  Description of Artificial Sequence: Synthetic oligonucleotide
  Antisense strand to SEQ ID NO: 1303390
auucacccaggucacuuug

SEQ ID NO: 1303392 - RNA, 19 nt, Artificial Sequence
  Description of Artificial Sequence: Synthetic oligonucleotide
  Sense strand starting at position 3542 of SEQ ID NO: 1241833
gggaauuucuauggccaaa

SEQ ID NO: 1303393 - RNA, 19 nt, Artificial Sequence
  Description of Artificial Sequence: Synthetic oligonucleotide
  Antisense strand to SEQ ID NO: 1303392
uuuggccauagaaauuccc

SEQ ID NO: 1303394 - RNA, 19 nt, Artificial Sequence
  Description of Artificial Sequence: Synthetic oligonucleotide
  Sense strand starting at position 3573 of SEQ ID NO: 1241833
auaacaguguaugcucaua

SEQ ID NO: 1303395 - RNA, 19 nt, Artificial Sequence
  Description of Artificial Sequence: Synthetic oligonucleotide
  Antisense strand to SEQ ID NO: 1303394
uaugagcauacacuguuau

SEQ ID NO: 1303396 - RNA, 19 nt, Artificial Sequence
  Description of Artificial Sequence: Synthetic oligonucleotide
  Sense strand starting at position 3575 of SEQ ID NO: 1241833
aacaguguaugcucauaag

SEQ ID NO: 1303397 - RNA, 19 nt, Artificial Sequence
  Description of Artificial Sequence: Synthetic oligonucleotide
  Antisense strand to SEQ ID NO: 1303396
cuuaugagcauacacuguu

SEQ ID NO: 1303398 - RNA, 19 nt, Artificial Sequence
  Description of Artificial Sequence: Synthetic oligonucleotide
  Sense strand starting at position 3719 of SEQ ID NO: 1241833
acuuaucacuaguuaugag

SEQ ID NO: 1303399 - RNA, 19 nt, Artificial Sequence
  Description of Artificial Sequence: Synthetic oligonucleotide
  Antisense strand to SEQ ID NO: 1303398
cucauaacuagugauaagu

SEQ ID NO: 1303400 - RNA, 19 nt, Artificial Sequence
  Description of Artificial Sequence: Synthetic oligonucleotide
  Sense strand starting at position 3778 of SEQ ID NO: 1241833
agcugagugcuccaaggag

SEQ ID NO: 1303401 - RNA, 19 nt, Artificial Sequence
  Description of Artificial Sequence: Synthetic oligonucleotide
  Antisense strand to SEQ ID NO: 1303400
cuccuuggagcacucagcu

SEQ ID NO: 1303402 - RNA, 19 nt, Artificial Sequence
  Description of Artificial Sequence: Synthetic oligonucleotide
  Sense strand starting at position 3798 of SEQ ID NO: 1241833
acgccuacucccugggaaa

SEQ ID NO: 1303403 - RNA, 19 nt, Artificial Sequence
  Description of Artificial Sequence: Synthetic oligonucleotide
  Antisense strand to SEQ ID NO: 1303402
uuucccagggaguaggcgu

SEQ ID NO: 1303404 - RNA, 19 nt, Artificial Sequence
  Description of Artificial Sequence: Synthetic oligonucleotide
  Sense strand starting at position 3820 of SEQ ID NO: 1241833
gaccuuuggcugggucuua

SEQ ID NO: 1303405 - RNA, 19 nt, Artificial Sequence
  Description of Artificial Sequence: Synthetic oligonucleotide
  Antisense strand to SEQ ID NO: 1303404
uaagacccagccaaagguc

SEQ ID NO: 1303406 - RNA, 19 nt, Artificial Sequence
  Description of Artificial Sequence: Synthetic oligonucleotide
  Sense strand starting at position 22 of SEQ ID NO: 1241834
aucucauuuagguguggua

SEQ ID NO: 1303407 - RNA, 19 nt, Artificial Sequence
  Description of Artificial Sequence: Synthetic oligonucleotide
  Antisense strand to SEQ ID NO: 1303406
uaccacaccuaaaugagau

SEQ ID NO: 1303408 - RNA, 19 nt, Artificial Sequence
  Description of Artificial Sequence: Synthetic oligonucleotide
  Sense strand starting at position 227 of SEQ ID NO: 1241834
ugccauuuaugugcuaaga

SEQ ID NO: 1303409 - RNA, 19 nt, Artificial Sequence
  Description of Artificial Sequence: Synthetic oligonucleotide
  Antisense strand to SEQ ID NO: 1303408
ucuuagcacauaaauggca

SEQ ID NO: 1303410 - RNA, 19 nt, Artificial Sequence
  Description of Artificial Sequence: Synthetic oligonucleotide
  Sense strand starting at position 389 of SEQ ID NO: 1241834
cucaaauaagcuugagaag

SEQ ID NO: 1303411 - RNA, 19 nt, Artificial Sequence
  Description of Artificial Sequence: Synthetic oligonucleotide
  Antisense strand to SEQ ID NO: 1303410
cuucucaagcuuauuugag

SEQ ID NO: 1303412 - RNA, 19 nt, Artificial Sequence
  Description of Artificial Sequence: Synthetic oligonucleotide
  Sense strand starting at position 448 of SEQ ID NO: 1241834
ucuugugaaucugcaagga

SEQ ID NO: 1303413 - RNA, 19 nt, Artificial Sequence
  Description of Artificial Sequence: Synthetic oligonucleotide
  Antisense strand to SEQ ID NO: 1303412
uccuugcagauucacaaga

SEQ ID NO: 1303414 - RNA, 19 nt, Artificial Sequence
  Description of Artificial Sequence: Synthetic oligonucleotide
  Sense strand starting at position 452 of SEQ ID NO: 1241834
gugaaucugcaaggaggaa

SEQ ID NO: 1303415 - RNA, 19 nt, Artificial Sequence
  Description of Artificial Sequence: Synthetic oligonucleotide
  Antisense strand to SEQ ID NO: 1303414
uuccuccuugcagauucac

SEQ ID NO: 1303416 - RNA, 19 nt, Artificial Sequence
  Description of Artificial Sequence: Synthetic oligonucleotide
  Sense strand starting at position 532 of SEQ ID NO: 1241834
ccuagagugccagauuaga

SEQ ID NO: 1303417 - RNA, 19 nt, Artificial Sequence
  Description of Artificial Sequence: Synthetic oligonucleotide
  Antisense strand to SEQ ID NO: 1303416
ucuaaucuggcacucuagg

SEQ ID NO: 1303418 - RNA, 19 nt, Artificial Sequence
  Description of Artificial Sequence: Synthetic oligonucleotide
  Sense strand starting at position 762 of SEQ ID NO: 1241834
ggauauaguacucauggcu

SEQ ID NO: 1303419 - RNA, 19 nt, Artificial Sequence
  Description of Artificial Sequence: Synthetic oligonucleotide
  Antisense strand to SEQ ID NO: 1303418
agccaugaguacuauaucc

SEQ ID NO: 1303420 - RNA, 19 nt, Artificial Sequence
  Description of Artificial Sequence: Synthetic oligonucleotide
  Sense strand starting at position 779 of SEQ ID NO: 1241834
cuugaaugcccugacugaa

SEQ ID NO: 1303421 - RNA, 19 nt, Artificial Sequence
  Description of Artificial Sequence: Synthetic oligonucleotide
  Antisense strand to SEQ ID NO: 1303420
uucagucagggcauucaag

SEQ ID NO: 1303422 - RNA, 19 nt, Artificial Sequence
  Description of Artificial Sequence: Synthetic oligonucleotide
  Sense strand starting at position 952 of SEQ ID NO: 1241834
ggagaaguucguuauguga

SEQ ID NO: 1303423 - RNA, 19 nt, Artificial Sequence
  Description of Artificial Sequence: Synthetic oligonucleotide
  Antisense strand to SEQ ID NO: 1303422
ucacauaacgaacuucucc

SEQ ID NO: 1303424 - RNA, 19 nt, Artificial Sequence
  Description of Artificial Sequence: Synthetic oligonucleotide
  Sense strand starting at position 1022 of SEQ ID NO: 1241834
uuucuacuggcucacagaa

SEQ ID NO: 1303425 - RNA, 19 nt, Artificial Sequence
  Description of Artificial Sequence: Synthetic oligonucleotide
  Antisense strand to SEQ ID NO: 1303424
uucugugagccaguagaaa

SEQ ID NO: 1303426 - RNA, 19 nt, Artificial Sequence
  Description of Artificial Sequence: Synthetic oligonucleotide
  Sense strand starting at position 1067 of SEQ ID NO: 1241834
augagagguccguaccauc

SEQ ID NO: 1303427 - RNA, 19 nt, Artificial Sequence
  Description of Artificial Sequence: Synthetic oligonucleotide
  Antisense strand to SEQ ID NO: 1303426
gaugguacggaccucucau

SEQ ID NO: 1303428 - RNA, 19 nt, Artificial Sequence
  Description of Artificial Sequence: Synthetic oligonucleotide
  Sense strand starting at position 1715 of SEQ ID NO: 1241834
auggcaaauguggguuaaa

SEQ ID NO: 1303429 - RNA, 19 nt, Artificial Sequence
  Description of Artificial Sequence: Synthetic oligonucleotide
  Antisense strand to SEQ ID NO: 1303428
uuuaacccacauuugccau

SEQ ID NO: 1303430 - RNA, 19 nt, Artificial Sequence
  Description of Artificial Sequence: Synthetic oligonucleotide
  Sense strand starting at position 1716 of SEQ ID NO: 1241834
uggcaaauguggguuaaag

SEQ ID NO: 1303431 - RNA, 19 nt, Artificial Sequence
  Description of Artificial Sequence: Synthetic oligonucleotide
  Antisense strand to SEQ ID NO: 1303430
cuuuaacccacauuugcca

SEQ ID NO: 1303432 - RNA, 19 nt, Artificial Sequence
  Description of Artificial Sequence: Synthetic oligonucleotide
  Sense strand starting at position 1718 of SEQ ID NO: 1241834
gcaaauguggguuaaagac

SEQ ID NO: 1303433 - RNA, 19 nt, Artificial Sequence
  Description of Artificial Sequence: Synthetic oligonucleotide
  Antisense strand to SEQ ID NO: 1303432
gucuuuaacccacauuugc

SEQ ID NO: 1303434 - RNA, 19 nt, Artificial Sequence
  Description of Artificial Sequence: Synthetic oligonucleotide
  Sense strand starting at position 1751 of SEQ ID NO: 1241834
gguuacuuacugcaagaac

SEQ ID NO: 1303435 - RNA, 19 nt, Artificial Sequence
  Description of Artificial Sequence: Synthetic oligonucleotide
  Antisense strand to SEQ ID NO: 1303434
guucuugcaguaaguaacc

SEQ ID NO: 1303436 - RNA, 19 nt, Artificial Sequence
  Description of Artificial Sequence: Synthetic oligonucleotide
  Sense strand starting at position 1797 of SEQ ID NO: 1241834
aagcuuauccaacagacgu

SEQ ID NO: 1303437 - RNA, 19 nt, Artificial Sequence
  Description of Artificial Sequence: Synthetic oligonucleotide
  Antisense strand to SEQ ID NO: 1303436
acgucuguuggauaagcuu

SEQ ID NO: 1303438 - RNA, 19 nt, Artificial Sequence
  Description of Artificial Sequence: Synthetic oligonucleotide
  Sense strand starting at position 2210 of SEQ ID NO: 1241834
aucugugacacaggugaua

SEQ ID NO: 1303439 - RNA, 19 nt, Artificial Sequence
  Description of Artificial Sequence: Synthetic oligonucleotide
  Antisense strand to SEQ ID NO: 1303438
uaucaccugugucacagau

SEQ ID NO: 1303440 - RNA, 19 nt, Artificial Sequence
  Description of Artificial Sequence: Synthetic oligonucleotide
  Sense strand starting at position 2223 of SEQ ID NO: 1241834
gugauaagcagccagucaa

SEQ ID NO: 1303441 - RNA, 19 nt, Artificial Sequence
  Description of Artificial Sequence: Synthetic oligonucleotide
  Antisense strand to SEQ ID NO: 1303440
uugacuggcugcuuaucac

SEQ ID NO: 1303442 - RNA, 19 nt, Artificial Sequence
  Description of Artificial Sequence: Synthetic oligonucleotide
  Sense strand starting at position 2245 of SEQ ID NO: 1241834
ccaaguguuacggaacuac

SEQ ID NO: 1303443 - RNA, 19 nt, Artificial Sequence
  Description of Artificial Sequence: Synthetic oligonucleotide
  Antisense strand to SEQ ID NO: 1303442
guaguuccguaacacuugg

SEQ ID NO: 1303444 - RNA, 19 nt, Artificial Sequence
  Description of Artificial Sequence: Synthetic oligonucleotide
  Sense strand starting at position 2254 of SEQ ID NO: 1241834
acggaacuacuaugguaau

SEQ ID NO: 1303445 - RNA, 19 nt, Artificial Sequence
  Description of Artificial Sequence: Synthetic oligonucleotide
  Antisense strand to SEQ ID NO: 1303444
auuaccauaguaguuccgu

SEQ ID NO: 1303446 - RNA, 19 nt, Artificial Sequence
  Description of Artificial Sequence: Synthetic oligonucleotide
  Sense strand starting at position 2440 of SEQ ID NO: 1241834
aggauagagugucucacau

SEQ ID NO: 1303447 - RNA, 19 nt, Artificial Sequence
  Description of Artificial Sequence: Synthetic oligonucleotide
  Antisense strand to SEQ ID NO: 1303446
augugagacacucuauccu

SEQ ID NO: 1303448 - RNA, 19 nt, Artificial Sequence
  Description of Artificial Sequence: Synthetic oligonucleotide
  Sense strand starting at position 2477 of SEQ ID NO: 1241834
augcuaaggcaagaguuau

SEQ ID NO: 1303449 - RNA, 19 nt, Artificial Sequence
  Description of Artificial Sequence: Synthetic oligonucleotide
  Antisense strand to SEQ ID NO: 1303448
auaacucuugccuuagcau

SEQ ID NO: 1303450 - RNA, 19 nt, Artificial Sequence
  Description of Artificial Sequence: Synthetic oligonucleotide
  Sense strand starting at position 2483 of SEQ ID NO: 1241834
aggcaagaguuaucgauag

SEQ ID NO: 1303451 - RNA, 19 nt, Artificial Sequence
  Description of Artificial Sequence: Synthetic oligonucleotide
  Antisense strand to SEQ ID NO: 1303450
cuaucgauaacucuugccu

SEQ ID NO: 1303452 - RNA, 19 nt, Artificial Sequence
  Description of Artificial Sequence: Synthetic oligonucleotide
  Sense strand starting at position 2487 of SEQ ID NO: 1241834
aagaguuaucgauagccca

SEQ ID NO: 1303453 - RNA, 19 nt, Artificial Sequence
  Description of Artificial Sequence: Synthetic oligonucleotide
  Antisense strand to SEQ ID NO: 1303452
ugggcuaucgauaacucuu

SEQ ID NO: 1303454 - RNA, 19 nt, Artificial Sequence
  Description of Artificial Sequence: Synthetic oligonucleotide
  Sense strand starting at position 2513 of SEQ ID NO: 1241834
gcuaguauccaugaggguu

SEQ ID NO: 1303455 - RNA, 19 nt, Artificial Sequence
  Description of Artificial Sequence: Synthetic oligonucleotide
  Antisense strand to SEQ ID NO: 1303454
aacccucauggauacuagc

SEQ ID NO: 1303456 - RNA, 19 nt, Artificial Sequence
  Description of Artificial Sequence: Synthetic oligonucleotide
  Sense strand starting at position 2591 of SEQ ID NO: 1241834
cuaagugacuucucaagga

SEQ ID NO: 1303457 - RNA, 19 nt, Artificial Sequence
  Description of Artificial Sequence: Synthetic oligonucleotide
  Antisense strand to SEQ ID NO: 1303456
uccuugagaagucacuuag

SEQ ID NO: 1303458 - RNA, 19 nt, Artificial Sequence
  Description of Artificial Sequence: Synthetic oligonucleotide
  Sense strand starting at position 2595 of SEQ ID NO: 1241834
gugacuucucaaggaaacu

SEQ ID NO: 1303459 - RNA, 19 nt, Artificial Sequence
  Description of Artificial Sequence: Synthetic oligonucleotide
  Antisense strand to SEQ ID NO: 1303458
aguuuccuugagaagucac

SEQ ID NO: 1303460 - RNA, 19 nt, Artificial Sequence
  Description of Artificial Sequence: Synthetic oligonucleotide
  Sense strand starting at position 2879 of SEQ ID NO: 1241834
gacugaagauuugggaaau

SEQ ID NO: 1303461 - RNA, 19 nt, Artificial Sequence
  Description of Artificial Sequence: Synthetic oligonucleotide
  Antisense strand to SEQ ID NO: 1303460
auuucccaaaucuucaguc

SEQ ID NO: 1303462 - RNA, 19 nt, Artificial Sequence
  Description of Artificial Sequence: Synthetic oligonucleotide
  Sense strand starting at position 2880 of SEQ ID NO: 1241834
acugaagauuugggaaauu

SEQ ID NO: 1303463 - RNA, 19 nt, Artificial Sequence
  Description of Artificial Sequence: Synthetic oligonucleotide
  Antisense strand to SEQ ID NO: 1303462
aauuucccaaaucuucagu

SEQ ID NO: 1303464 - RNA, 19 nt, Artificial Sequence
  Description of Artificial Sequence: Synthetic oligonucleotide
  Sense strand starting at position 3064 of SEQ ID NO: 1241834
acagcaccacagugaaauu

SEQ ID NO: 1303465 - RNA, 19 nt, Artificial Sequence
  Description of Artificial Sequence: Synthetic oligonucleotide
  Antisense strand to SEQ ID NO: 1303464
aauuucacuguggugcugu

SEQ ID NO: 1303466 - RNA, 19 nt, Artificial Sequence
  Description of Artificial Sequence: Synthetic oligonucleotide
  Sense strand starting at position 3074 of SEQ ID NO: 1241834
agugaaauuucugaacuua

SEQ ID NO: 1303467 - RNA, 19 nt, Artificial Sequence
  Description of Artificial Sequence: Synthetic oligonucleotide
  Antisense strand to SEQ ID NO: 1303466
uaaguucagaaauuucacu

SEQ ID NO: 1303468 - RNA, 19 nt, Artificial Sequence
  Description of Artificial Sequence: Synthetic oligonucleotide
  Sense strand starting at position 3135 of SEQ ID NO: 1241834
uuauuuagugccugccauu

SEQ ID NO: 1303469 - RNA, 19 nt, Artificial Sequence
  Description of Artificial Sequence: Synthetic oligonucleotide
  Antisense strand to SEQ ID NO: 1303468
aauggcaggcacuaaauaa

SEQ ID NO: 1303470 - RNA, 19 nt, Artificial Sequence
  Description of Artificial Sequence: Synthetic oligonucleotide
  Sense strand starting at position 3367 of SEQ ID NO: 1241834
uuaacacagcuguauugau

SEQ ID NO: 1303471 - RNA, 19 nt, Artificial Sequence
  Description of Artificial Sequence: Synthetic oligonucleotide
  Antisense strand to SEQ ID NO: 1303470
aucaauacagcuguguuaa

SEQ ID NO: 1303472 - RNA, 19 nt, Artificial Sequence
  Description of Artificial Sequence: Synthetic oligonucleotide
  Sense strand starting at position 3541 of SEQ ID NO: 1241834
agucucuaguaguuuauuu

SEQ ID NO: 1303473 - RNA, 19 nt, Artificial Sequence
  Description of Artificial Sequence: Synthetic oligonucleotide
  Antisense strand to SEQ ID NO: 1303472
aaauaaacuacuagagacu

SEQ ID NO: 1303474 - RNA, 19 nt, Artificial Sequence
  Description of Artificial Sequence: Synthetic oligonucleotide
  Sense strand starting at position 3623 of SEQ ID NO: 1241834
cagggagcuugaguccaaa

SEQ ID NO: 1303475 - RNA, 19 nt, Artificial Sequence
  Description of Artificial Sequence: Synthetic oligonucleotide
  Antisense strand to SEQ ID NO: 1303474
uuuggacucaagcucccug

SEQ ID NO: 1303476 - RNA, 19 nt, Artificial Sequence
  Description of Artificial Sequence: Synthetic oligonucleotide
  Sense strand starting at position 3701 of SEQ ID NO: 1241834
caggauuagucagcccaaa

SEQ ID NO: 1303477 - RNA, 19 nt, Artificial Sequence
  Description of Artificial Sequence: Synthetic oligonucleotide
  Antisense strand to SEQ ID NO: 1303476
uuugggcugacuaauccug

SEQ ID NO: 1303478 - RNA, 19 nt, Artificial Sequence
  Description of Artificial Sequence: Synthetic oligonucleotide
  Sense strand starting at position 3857 of SEQ ID NO: 1241834
caguauaaaguccagguaa

SEQ ID NO: 1303479 - RNA, 19 nt, Artificial Sequence
  Description of Artificial Sequence: Synthetic oligonucleotide
  Antisense strand to SEQ ID NO: 1303478
uuaccuggacuuuauacug

SEQ ID NO: 1303480 - RNA, 19 nt, Artificial Sequence
  Description of Artificial Sequence: Synthetic oligonucleotide
  Sense strand starting at position 3859 of SEQ ID NO: 1241834
guauaaaguccagguaaca

SEQ ID NO: 1303481 - RNA, 19 nt, Artificial Sequence
  Description of Artificial Sequence: Synthetic oligonucleotide
  Antisense strand to SEQ ID NO: 1303480
uguuaccuggacuuuauac

SEQ ID NO: 1303482 - RNA, 19 nt, Artificial Sequence
  Description of Artificial Sequence: Synthetic oligonucleotide
  Sense strand starting at position 3911 of SEQ ID NO: 1241834
gauccacuucuuggguauu

SEQ ID NO: 1303483 - RNA, 19 nt, Artificial Sequence
  Description of Artificial Sequence: Synthetic oligonucleotide
  Antisense strand to SEQ ID NO: 1303482
aauacccaagaaguggauc

SEQ ID NO: 1303484 - RNA, 19 nt, Artificial Sequence
  Description of Artificial Sequence: Synthetic oligonucleotide
  Sense strand starting at position 3914 of SEQ ID NO: 1241834
ccacuucuuggguauuauc

SEQ ID NO: 1303485 - RNA, 19 nt, Artificial Sequence
  Description of Artificial Sequence: Synthetic oligonucleotide
  Antisense strand to SEQ ID NO: 1303484
gauaauacccaagaagugg

SEQ ID NO: 1303486 - RNA, 19 nt, Artificial Sequence
  Description of Artificial Sequence: Synthetic oligonucleotide
  Sense strand starting at position 49 of SEQ ID NO: 1241835
accauugcucugugaauug

SEQ ID NO: 1303487 - RNA, 19 nt, Artificial Sequence
  Description of Artificial Sequence: Synthetic oligonucleotide
  Antisense strand to SEQ ID NO: 1303486
caauucacagagcaauggu

SEQ ID NO: 1303488 - RNA, 19 nt, Artificial Sequence
  Description of Artificial Sequence: Synthetic oligonucleotide
  Sense strand starting at position 58 of SEQ ID NO: 1241835
cugugaauugucuaagguc

SEQ ID NO: 1303489 - RNA, 19 nt, Artificial Sequence
  Description of Artificial Sequence: Synthetic oligonucleotide
  Antisense strand to SEQ ID NO: 1303488
gaccuuagacaauucacag

SEQ ID NO: 1303490 - RNA, 19 nt, Artificial Sequence
  Description of Artificial Sequence: Synthetic oligonucleotide
  Sense strand starting at position 66 of SEQ ID NO: 1241835
ugucuaaggucuccauaag

SEQ ID NO: 1303491 - RNA, 19 nt, Artificial Sequence
  Description of Artificial Sequence: Synthetic oligonucleotide
  Antisense strand to SEQ ID NO: 1303490
cuuauggagaccuuagaca

SEQ ID NO: 1303492 - RNA, 19 nt, Artificial Sequence
  Description of Artificial Sequence: Synthetic oligonucleotide
  Sense strand starting at position 84 of SEQ ID NO: 1241835
gggcuacaucuacacuuua

SEQ ID NO: 1303493 - RNA, 19 nt, Artificial Sequence
  Description of Artificial Sequence: Synthetic oligonucleotide
  Antisense strand to SEQ ID NO: 1303492
uaaaguguagauguagccc

SEQ ID NO: 1303494 - RNA, 19 nt, Artificial Sequence
  Description of Artificial Sequence: Synthetic oligonucleotide
  Sense strand starting at position 140 of SEQ ID NO: 1241835
uuuguauguggucagauug

SEQ ID NO: 1303495 - RNA, 19 nt, Artificial Sequence
  Description of Artificial Sequence: Synthetic oligonucleotide
  Antisense strand to SEQ ID NO: 1303494
caaucugaccacauacaaa

SEQ ID NO: 1303496 - RNA, 19 nt, Artificial Sequence
  Description of Artificial Sequence: Synthetic oligonucleotide
  Sense strand starting at position 203 of SEQ ID NO: 1241835
uuuacugucugguuucuau

SEQ ID NO: 1303497 - RNA, 19 nt, Artificial Sequence
  Description of Artificial Sequence: Synthetic oligonucleotide
  Antisense strand to SEQ ID NO: 1303496
auagaaaccagacaguaaa

SEQ ID NO: 1303498 - RNA, 19 nt, Artificial Sequence
  Description of Artificial Sequence: Synthetic oligonucleotide
  Sense strand starting at position 206 of SEQ ID NO: 1241835
acugucugguuucuauaua

SEQ ID NO: 1303499 - RNA, 19 nt, Artificial Sequence
  Description of Artificial Sequence: Synthetic oligonucleotide
  Antisense strand to SEQ ID NO: 1303498
uauauagaaaccagacagu

SEQ ID NO: 1303500 - RNA, 19 nt, Artificial Sequence
  Description of Artificial Sequence: Synthetic oligonucleotide
  Sense strand starting at position 375 of SEQ ID NO: 1241835
ugaagcugauauuacaaau

SEQ ID NO: 1303501 - RNA, 19 nt, Artificial Sequence
  Description of Artificial Sequence: Synthetic oligonucleotide
  Antisense strand to SEQ ID NO: 1303500
auuuguaauaucagcuuca

SEQ ID NO: 1303502 - RNA, 19 nt, Artificial Sequence
  Description of Artificial Sequence: Synthetic oligonucleotide
  Sense strand starting at position 408 of SEQ ID NO: 1241835
aauaauuuccagcguuuag

SEQ ID NO: 1303503 - RNA, 19 nt, Artificial Sequence
  Description of Artificial Sequence: Synthetic oligonucleotide
  Antisense strand to SEQ ID NO: 1303502
cuaaacgcuggaaauuauu

SEQ ID NO: 1303504 - RNA, 19 nt, Artificial Sequence
  Description of Artificial Sequence: Synthetic oligonucleotide
  Sense strand starting at position 437 of SEQ ID NO: 1241835
cgugucuuuguugauuaca

SEQ ID NO: 1303505 - RNA, 19 nt, Artificial Sequence
  Description of Artificial Sequence: Synthetic oligonucleotide
  Antisense strand to SEQ ID NO: 1303504
uguaaucaacaaagacacg

SEQ ID NO: 1303506 - RNA, 19 nt, Artificial Sequence
  Description of Artificial Sequence: Synthetic oligonucleotide
  Sense strand starting at position 439 of SEQ ID NO: 1241835
ugucuuuguugauuacaga

SEQ ID NO: 1303507 - RNA, 19 nt, Artificial Sequence
  Description of Artificial Sequence: Synthetic oligonucleotide
  Antisense strand to SEQ ID NO: 1303506
ucuguaaucaacaaagaca

SEQ ID NO: 1303508 - RNA, 19 nt, Artificial Sequence
  Description of Artificial Sequence: Synthetic oligonucleotide
  Sense strand starting at position 440 of SEQ ID NO: 1241835
gucuuuguugauuacagag

SEQ ID NO: 1303509 - RNA, 19 nt, Artificial Sequence
  Description of Artificial Sequence: Synthetic oligonucleotide
  Antisense strand to SEQ ID NO: 1303508
cucuguaaucaacaaagac

SEQ ID NO: 1303510 - RNA, 19 nt, Artificial Sequence
  Description of Artificial Sequence: Synthetic oligonucleotide
  Sense strand starting at position 514 of SEQ ID NO: 1241835
ggaauuaagugccaagaga

SEQ ID NO: 1303511 - RNA, 19 nt, Artificial Sequence
  Description of Artificial Sequence: Synthetic oligonucleotide
  Antisense strand to SEQ ID NO: 1303510
ucucuuggcacuuaauucc

SEQ ID NO: 1303512 - RNA, 19 nt, Artificial Sequence
  Description of Artificial Sequence: Synthetic oligonucleotide
  Sense strand starting at position 566 of SEQ ID NO: 1241835
acuuucuccgcuugauuaa

SEQ ID NO: 1303513 - RNA, 19 nt, Artificial Sequence
  Description of Artificial Sequence: Synthetic oligonucleotide
  Antisense strand to SEQ ID NO: 1303512
uuaaucaagcggagaaagu

SEQ ID NO: 1303514 - RNA, 19 nt, Artificial Sequence
  Description of Artificial Sequence: Synthetic oligonucleotide
  Sense strand starting at position 567 of SEQ ID NO: 1241835
cuuucuccgcuugauuaaa

SEQ ID NO: 1303515 - RNA, 19 nt, Artificial Sequence
  Description of Artificial Sequence: Synthetic oligonucleotide
  Antisense strand to SEQ ID NO: 1303514
uuuaaucaagcggagaaag

SEQ ID NO: 1303516 - RNA, 19 nt, Artificial Sequence
  Description of Artificial Sequence: Synthetic oligonucleotide
  Sense strand starting at position 629 of SEQ ID NO: 1241835
ugaggaaauucucuaagug

SEQ ID NO: 1303517 - RNA, 19 nt, Artificial Sequence
  Description of Artificial Sequence: Synthetic oligonucleotide
  Antisense strand to SEQ ID NO: 1303516
cacuuagagaauuuccuca

SEQ ID NO: 1303518 - RNA, 19 nt, Artificial Sequence
  Description of Artificial Sequence: Synthetic oligonucleotide
  Sense strand starting at position 630 of SEQ ID NO: 1241835
gaggaaauucucuaagugc

SEQ ID NO: 1303519 - RNA, 19 nt, Artificial Sequence
  Description of Artificial Sequence: Synthetic oligonucleotide
  Antisense strand to SEQ ID NO: 1303518
gcacuuagagaauuuccuc

SEQ ID NO: 1303520 - RNA, 19 nt, Artificial Sequence
  Description of Artificial Sequence: Synthetic oligonucleotide
  Sense strand starting at position 1081 of SEQ ID NO: 1241835
gggagguuucgucaguaag

SEQ ID NO: 1303521 - RNA, 19 nt, Artificial Sequence
  Description of Artificial Sequence: Synthetic oligonucleotide
  Antisense strand to SEQ ID NO: 1303520
cuuacugacgaaaccuccc

SEQ ID NO: 1303522 - RNA, 19 nt, Artificial Sequence
  Description of Artificial Sequence: Synthetic oligonucleotide
  Sense strand starting at position 1082 of SEQ ID NO: 1241835
ggagguuucgucaguaagc

SEQ ID NO: 1303523 - RNA, 19 nt, Artificial Sequence
  Description of Artificial Sequence: Synthetic oligonucleotide
  Antisense strand to SEQ ID NO: 1303522
gcuuacugacgaaaccucc

SEQ ID NO: 1303524 - RNA, 19 nt, Artificial Sequence
  Description of Artificial Sequence: Synthetic oligonucleotide
  Sense strand starting at position 1084 of SEQ ID NO: 1241835
agguuucgucaguaagcga

SEQ ID NO: 1303525 - RNA, 19 nt, Artificial Sequence
  Description of Artificial Sequence: Synthetic oligonucleotide
  Antisense strand to SEQ ID NO: 1303524
ucgcuuacugacgaaaccu

SEQ ID NO: 1303526 - RNA, 19 nt, Artificial Sequence
  Description of Artificial Sequence: Synthetic oligonucleotide
  Sense strand starting at position 1279 of SEQ ID NO: 1241835
acucguccacccuggaaau

SEQ ID NO: 1303527 - RNA, 19 nt, Artificial Sequence
  Description of Artificial Sequence: Synthetic oligonucleotide
  Antisense strand to SEQ ID NO: 1303526
auuuccaggguggacgagu

SEQ ID NO: 1303528 - RNA, 19 nt, Artificial Sequence
  Description of Artificial Sequence: Synthetic oligonucleotide
  Sense strand starting at position 1363 of SEQ ID NO: 1241835
accuccacucgcgaucaaa

SEQ ID NO: 1303529 - RNA, 19 nt, Artificial Sequence
  Description of Artificial Sequence: Synthetic oligonucleotide
  Antisense strand to SEQ ID NO: 1303528
uuugaucgcgaguggaggu

SEQ ID NO: 1303530 - RNA, 19 nt, Artificial Sequence
  Description of Artificial Sequence: Synthetic oligonucleotide
  Sense strand starting at position 2729 of SEQ ID NO: 1241835
augagaccuuugcugcuaa

SEQ ID NO: 1303531 - RNA, 19 nt, Artificial Sequence
  Description of Artificial Sequence: Synthetic oligonucleotide
  Antisense strand to SEQ ID NO: 1303530
uuagcagcaaaggucucau

SEQ ID NO: 1303532 - RNA, 19 nt, Artificial Sequence
  Description of Artificial Sequence: Synthetic oligonucleotide
  Sense strand starting at position 2762 of SEQ ID NO: 1241835
uaaauucuugucgcgcauu

SEQ ID NO: 1303533 - RNA, 19 nt, Artificial Sequence
  Description of Artificial Sequence: Synthetic oligonucleotide
  Antisense strand to SEQ ID NO: 1303532
aaugcgcgacaagaauuua

SEQ ID NO: 1303534 - RNA, 19 nt, Artificial Sequence
  Description of Artificial Sequence: Synthetic oligonucleotide
  Sense strand starting at position 2957 of SEQ ID NO: 1241835
gugcuuuaauccucagaua

SEQ ID NO: 1303535 - RNA, 19 nt, Artificial Sequence
  Description of Artificial Sequence: Synthetic oligonucleotide
  Antisense strand to SEQ ID NO: 1303534
uaucugaggauuaaagcac

SEQ ID NO: 1303536 - RNA, 19 nt, Artificial Sequence
  Description of Artificial Sequence: Synthetic oligonucleotide
  Sense strand starting at position 2958 of SEQ ID NO: 1241835
ugcuuuaauccucagauag

SEQ ID NO: 1303537 - RNA, 19 nt, Artificial Sequence
  Description of Artificial Sequence: Synthetic oligonucleotide
  Antisense strand to SEQ ID NO: 1303536
cuaucugaggauuaaagca

SEQ ID NO: 1303538 - RNA, 19 nt, Artificial Sequence
  Description of Artificial Sequence: Synthetic oligonucleotide
  Sense strand starting at position 2993 of SEQ ID NO: 1241835
ucaucucuuucuguaggua

SEQ ID NO: 1303539 - RNA, 19 nt, Artificial Sequence
  Description of Artificial Sequence: Synthetic oligonucleotide
  Antisense strand to SEQ ID NO: 1303538
uaccuacagaaagagauga

SEQ ID NO: 1303540 - RNA, 19 nt, Artificial Sequence
  Description of Artificial Sequence: Synthetic oligonucleotide
  Sense strand starting at position 3259 of SEQ ID NO: 1241835
accgauaucggcuggcuaa

SEQ ID NO: 1303541 - RNA, 19 nt, Artificial Sequence
  Description of Artificial Sequence: Synthetic oligonucleotide
  Antisense strand to SEQ ID NO: 1303540
uuagccagccgauaucggu

SEQ ID NO: 1303542 - RNA, 19 nt, Artificial Sequence
  Description of Artificial Sequence: Synthetic oligonucleotide
  Sense strand starting at position 3600 of SEQ ID NO: 1241835
gguccuugaugguugaaau

SEQ ID NO: 1303543 - RNA, 19 nt, Artificial Sequence
  Description of Artificial Sequence: Synthetic oligonucleotide
  Antisense strand to SEQ ID NO: 1303542
auuucaaccaucaaggacc

SEQ ID NO: 1303544 - RNA, 19 nt, Artificial Sequence
  Description of Artificial Sequence: Synthetic oligonucleotide
  Sense strand starting at position 3601 of SEQ ID NO: 1241835
guccuugaugguugaaauu

SEQ ID NO: 1303545 - RNA, 19 nt, Artificial Sequence
  Description of Artificial Sequence: Synthetic oligonucleotide
  Antisense strand to SEQ ID NO: 1303544
aauuucaaccaucaaggac

SEQ ID NO: 1303546 - RNA, 19 nt, Artificial Sequence
  Description of Artificial Sequence: Synthetic oligonucleotide
  Sense strand starting at position 3610 of SEQ ID NO: 1241835
gguugaaauuaugucacug

SEQ ID NO: 1303547 - RNA, 19 nt, Artificial Sequence
  Description of Artificial Sequence: Synthetic oligonucleotide
  Antisense strand to SEQ ID NO: 1303546
cagugacauaauuucaacc

SEQ ID NO: 1303548 - RNA, 19 nt, Artificial Sequence
  Description of Artificial Sequence: Synthetic oligonucleotide
  Sense strand starting at position 3614 of SEQ ID NO: 1241835
gaaauuaugucacugccag

SEQ ID NO: 1303549 - RNA, 19 nt, Artificial Sequence
  Description of Artificial Sequence: Synthetic oligonucleotide
  Antisense strand to SEQ ID NO: 1303548
cuggcagugacauaauuuc

SEQ ID NO: 1303550 - RNA, 19 nt, Artificial Sequence
  Description of Artificial Sequence: Synthetic oligonucleotide
  Sense strand starting at position 3665 of SEQ ID NO: 1241835
agaggaaacuguguuaauu

SEQ ID NO: 1303551 - RNA, 19 nt, Artificial Sequence
  Description of Artificial Sequence: Synthetic oligonucleotide
  Antisense strand to SEQ ID NO: 1303550
aauuaacacaguuuccucu

SEQ ID NO: 1303552 - RNA, 19 nt, Artificial Sequence
  Description of Artificial Sequence: Synthetic oligonucleotide
  Sense strand starting at position 3757 of SEQ ID NO: 1241835
gagccuguuuggucaaaga

SEQ ID NO: 1303553 - RNA, 19 nt, Artificial Sequence
  Description of Artificial Sequence: Synthetic oligonucleotide
  Antisense strand to SEQ ID NO: 1303552
ucuuugaccaaacaggcuc

SEQ ID NO: 1303554 - RNA, 19 nt, Artificial Sequence
  Description of Artificial Sequence: Synthetic oligonucleotide
  Sense strand starting at position 3786 of SEQ ID NO: 1241835
ccacuuuguuggcuaugaa

SEQ ID NO: 1303555 - RNA, 19 nt, Artificial Sequence
  Description of Artificial Sequence: Synthetic oligonucleotide
  Antisense strand to SEQ ID NO: 1303554
uucauagccaacaaagugg

SEQ ID NO: 1303556 - RNA, 19 nt, Artificial Sequence
  Description of Artificial Sequence: Synthetic oligonucleotide
  Sense strand starting at position 3904 of SEQ ID NO: 1241835
gcagcuccuccguuugaua

SEQ ID NO: 1303557 - RNA, 19 nt, Artificial Sequence
  Description of Artificial Sequence: Synthetic oligonucleotide
  Antisense strand to SEQ ID NO: 1303556
uaucaaacggaggagcugc

SEQ ID NO: 1303558 - RNA, 19 nt, Artificial Sequence
  Description of Artificial Sequence: Synthetic oligonucleotide
  Sense strand starting at position 3913 of SEQ ID NO: 1241835
ccguuugauacccacguga

SEQ ID NO: 1303559 - RNA, 19 nt, Artificial Sequence
  Description of Artificial Sequence: Synthetic oligonucleotide
  Antisense strand to SEQ ID NO: 1303558
ucacguggguaucaaacgg

SEQ ID NO: 1303560 - RNA, 19 nt, Artificial Sequence
  Description of Artificial Sequence: Synthetic oligonucleotide
  Sense strand starting at position 3915 of SEQ ID NO: 1241835
guuugauacccacgugauc

SEQ ID NO: 1303561 - RNA, 19 nt, Artificial Sequence
  Description of Artificial Sequence: Synthetic oligonucleotide
  Antisense strand to SEQ ID NO: 1303560
gaucacguggguaucaaac

SEQ ID NO: 1303562 - RNA, 19 nt, Artificial Sequence
  Description of Artificial Sequence: Synthetic oligonucleotide
  Sense strand starting at position 3957 of SEQ ID NO: 1241835
agcacucagccauagacuu

SEQ ID NO: 1303563 - RNA, 19 nt, Artificial Sequence
  Description of Artificial Sequence: Synthetic oligonucleotide
  Antisense strand to SEQ ID NO: 1303562
aagucuauggcugagugcu

SEQ ID NO: 1303564 - RNA, 19 nt, Artificial Sequence
  Description of Artificial Sequence: Synthetic oligonucleotide
  Sense strand starting at position 3964 of SEQ ID NO: 1241835
agccauagacuuugucaca

SEQ ID NO: 1303565 - RNA, 19 nt, Artificial Sequence
  Description of Artificial Sequence: Synthetic oligonucleotide
  Antisense strand to SEQ ID NO: 1303564
ugugacaaagucuauggcu

SEQ ID NO: 1303566 - RNA, 19 nt, Artificial Sequence
  Description of Artificial Sequence: Synthetic oligonucleotide
  Sense strand starting at position 102 of SEQ ID NO: 1241836
gacagccucuuggaggaau

SEQ ID NO: 1303567 - RNA, 19 nt, Artificial Sequence
  Description of Artificial Sequence: Synthetic oligonucleotide
  Antisense strand to SEQ ID NO: 1303566
auuccuccaagaggcuguc

SEQ ID NO: 1303568 - RNA, 19 nt, Artificial Sequence
  Description of Artificial Sequence: Synthetic oligonucleotide
  Sense strand starting at position 148 of SEQ ID NO: 1241836
aaguucucaggcuaugaaa

SEQ ID NO: 1303569 - RNA, 19 nt, Artificial Sequence
  Description of Artificial Sequence: Synthetic oligonucleotide
  Antisense strand to SEQ ID NO: 1303568
uuucauagccugagaacuu

SEQ ID NO: 1303570 - RNA, 19 nt, Artificial Sequence
  Description of Artificial Sequence: Synthetic oligonucleotide
  Sense strand starting at position 150 of SEQ ID NO: 1241836
guucucaggcuaugaaaca

SEQ ID NO: 1303571 - RNA, 19 nt, Artificial Sequence
  Description of Artificial Sequence: Synthetic oligonucleotide
  Antisense strand to SEQ ID NO: 1303570
uguuucauagccugagaac

SEQ ID NO: 1303572 - RNA, 19 nt, Artificial Sequence
  Description of Artificial Sequence: Synthetic oligonucleotide
  Sense strand starting at position 245 of SEQ ID NO: 1241836
ggaagugucugucuccaug

SEQ ID NO: 1303573 - RNA, 19 nt, Artificial Sequence
  Description of Artificial Sequence: Synthetic oligonucleotide
  Antisense strand to SEQ ID NO: 1303572
cauggagacagacacuucc

SEQ ID NO: 1303574 - RNA, 19 nt, Artificial Sequence
  Description of Artificial Sequence: Synthetic oligonucleotide
  Sense strand starting at position 315 of SEQ ID NO: 1241836
gucuauugucuuugugucu

SEQ ID NO: 1303575 - RNA, 19 nt, Artificial Sequence
  Description of Artificial Sequence: Synthetic oligonucleotide
  Antisense strand to SEQ ID NO: 1303574
agacacaaagacaauagac

SEQ ID NO: 1303576 - RNA, 19 nt, Artificial Sequence
  Description of Artificial Sequence: Synthetic oligonucleotide
  Sense strand starting at position 318 of SEQ ID NO: 1241836
uauugucuuugugucuuua

SEQ ID NO: 1303577 - RNA, 19 nt, Artificial Sequence
  Description of Artificial Sequence: Synthetic oligonucleotide
  Antisense strand to SEQ ID NO: 1303576
uaaagacacaaagacaaua

SEQ ID NO: 1303578 - RNA, 19 nt, Artificial Sequence
  Description of Artificial Sequence: Synthetic oligonucleotide
  Sense strand starting at position 320 of SEQ ID NO: 1241836
uugucuuugugucuuuaua

SEQ ID NO: 1303579 - RNA, 19 nt, Artificial Sequence
  Description of Artificial Sequence: Synthetic oligonucleotide
  Antisense strand to SEQ ID NO: 1303578
uauaaagacacaaagacaa

SEQ ID NO: 1303580 - RNA, 19 nt, Artificial Sequence
  Description of Artificial Sequence: Synthetic oligonucleotide
  Sense strand starting at position 322 of SEQ ID NO: 1241836
gucuuugugucuuuauauc

SEQ ID NO: 1303581 - RNA, 19 nt, Artificial Sequence
  Description of Artificial Sequence: Synthetic oligonucleotide
  Antisense strand to SEQ ID NO: 1303580
gauauaaagacacaaagac

SEQ ID NO: 1303582 - RNA, 19 nt, Artificial Sequence
  Description of Artificial Sequence: Synthetic oligonucleotide
  Sense strand starting at position 329 of SEQ ID NO: 1241836
ugucuuuauaucugugggu

SEQ ID NO: 1303583 - RNA, 19 nt, Artificial Sequence
  Description of Artificial Sequence: Synthetic oligonucleotide
  Antisense strand to SEQ ID NO: 1303582
acccacagauauaaagaca

SEQ ID NO: 1303584 - RNA, 19 nt, Artificial Sequence
  Description of Artificial Sequence: Synthetic oligonucleotide
  Sense strand starting at position 379 of SEQ ID NO: 1241836
ucuugaacucuuggaagac

SEQ ID NO: 1303585 - RNA, 19 nt, Artificial Sequence
  Description of Artificial Sequence: Synthetic oligonucleotide
  Antisense strand to SEQ ID NO: 1303584
gucuuccaagaguucaaga

SEQ ID NO: 1303586 - RNA, 19 nt, Artificial Sequence
  Description of Artificial Sequence: Synthetic oligonucleotide
  Sense strand starting at position 398 of SEQ ID NO: 1241836
cagugaagggcucaucagu

SEQ ID NO: 1303587 - RNA, 19 nt, Artificial Sequence
  Description of Artificial Sequence: Synthetic oligonucleotide
  Antisense strand to SEQ ID NO: 1303586
acugaugagcccuucacug

SEQ ID NO: 1303588 - RNA, 19 nt, Artificial Sequence
  Description of Artificial Sequence: Synthetic oligonucleotide
  Sense strand starting at position 605 of SEQ ID NO: 1241836
uuuauuucuuccuggagaa

SEQ ID NO: 1303589 - RNA, 19 nt, Artificial Sequence
  Description of Artificial Sequence: Synthetic oligonucleotide
  Antisense strand to SEQ ID NO: 1303588
uucuccaggaagaaauaaa

SEQ ID NO: 1303590 - RNA, 19 nt, Artificial Sequence
  Description of Artificial Sequence: Synthetic oligonucleotide
  Sense strand starting at position 1990 of SEQ ID NO: 1241836
gaguccugauacccagaaa

SEQ ID NO: 1303591 - RNA, 19 nt, Artificial Sequence
  Description of Artificial Sequence: Synthetic oligonucleotide
  Antisense strand to SEQ ID NO: 1303590
uuucuggguaucaggacuc

SEQ ID NO: 1303592 - RNA, 19 nt, Artificial Sequence
  Description of Artificial Sequence: Synthetic oligonucleotide
  Sense strand starting at position 2055 of SEQ ID NO: 1241836
gccgaaaccuggucuaaau

SEQ ID NO: 1303593 - RNA, 19 nt, Artificial Sequence
  Description of Artificial Sequence: Synthetic oligonucleotide
  Antisense strand to SEQ ID NO: 1303592
auuuagaccagguuucggc

SEQ ID NO: 1303594 - RNA, 19 nt, Artificial Sequence
  Description of Artificial Sequence: Synthetic oligonucleotide
  Sense strand starting at position 2057 of SEQ ID NO: 1241836
cgaaaccuggucuaaauau

SEQ ID NO: 1303595 - RNA, 19 nt, Artificial Sequence
  Description of Artificial Sequence: Synthetic oligonucleotide
  Antisense strand to SEQ ID NO: 1303594
auauuuagaccagguuucg

SEQ ID NO: 1303596 - RNA, 19 nt, Artificial Sequence
  Description of Artificial Sequence: Synthetic oligonucleotide
  Sense strand starting at position 2065 of SEQ ID NO: 1241836
ggucuaaauauuggaaguc

SEQ ID NO: 1303597 - RNA, 19 nt, Artificial Sequence
  Description of Artificial Sequence: Synthetic oligonucleotide
  Antisense strand to SEQ ID NO: 1303596
gacuuccaauauuuagacc

SEQ ID NO: 1303598 - RNA, 19 nt, Artificial Sequence
  Description of Artificial Sequence: Synthetic oligonucleotide
  Sense strand starting at position 2463 of SEQ ID NO: 1241836
gaagcuaaauggcuguaau

SEQ ID NO: 1303599 - RNA, 19 nt, Artificial Sequence
  Description of Artificial Sequence: Synthetic oligonucleotide
  Antisense strand to SEQ ID NO: 1303598
auuacagccauuuagcuuc

SEQ ID NO: 1303600 - RNA, 19 nt, Artificial Sequence
  Description of Artificial Sequence: Synthetic oligonucleotide
  Sense strand starting at position 2466 of SEQ ID NO: 1241836
gcuaaauggcuguaauugu

SEQ ID NO: 1303601 - RNA, 19 nt, Artificial Sequence
  Description of Artificial Sequence: Synthetic oligonucleotide
  Antisense strand to SEQ ID NO: 1303600
acaauuacagccauuuagc

SEQ ID NO: 1303602 - RNA, 19 nt, Artificial Sequence
  Description of Artificial Sequence: Synthetic oligonucleotide
  Sense strand starting at position 2804 of SEQ ID NO: 1241836
uuuccugcccuguagagua

SEQ ID NO: 1303603 - RNA, 19 nt, Artificial Sequence
  Description of Artificial Sequence: Synthetic oligonucleotide
  Antisense strand to SEQ ID NO: 1303602
uacucuacagggcaggaaa

SEQ ID NO: 1303604 - RNA, 19 nt, Artificial Sequence
  Description of Artificial Sequence: Synthetic oligonucleotide
  Sense strand starting at position 2814 of SEQ ID NO: 1241836
uguagaguaagccaguuua

SEQ ID NO: 1303605 - RNA, 19 nt, Artificial Sequence
  Description of Artificial Sequence: Synthetic oligonucleotide
  Antisense strand to SEQ ID NO: 1303604
uaaacuggcuuacucuaca

SEQ ID NO: 1303606 - RNA, 19 nt, Artificial Sequence
  Description of Artificial Sequence: Synthetic oligonucleotide
  Sense strand starting at position 2824 of SEQ ID NO: 1241836
gccaguuuacagugaggaa

SEQ ID NO: 1303607 - RNA, 19 nt, Artificial Sequence
  Description of Artificial Sequence: Synthetic oligonucleotide
  Antisense strand to SEQ ID NO: 1303606
uuccucacuguaaacuggc

SEQ ID NO: 1303608 - RNA, 19 nt, Artificial Sequence
  Description of Artificial Sequence: Synthetic oligonucleotide
  Sense strand starting at position 2827 of SEQ ID NO: 1241836
aguuuacagugaggaauaa

SEQ ID NO: 1303609 - RNA, 19 nt, Artificial Sequence
  Description of Artificial Sequence: Synthetic oligonucleotide
  Antisense strand to SEQ ID NO: 1303608
uuauuccucacuguaaacu

SEQ ID NO: 1303610 - RNA, 19 nt, Artificial Sequence
  Description of Artificial Sequence: Synthetic oligonucleotide
  Sense strand starting at position 2976 of SEQ ID NO: 1241836
cuuggaaucuguguaccaa

SEQ ID NO: 1303611 - RNA, 19 nt, Artificial Sequence
  Description of Artificial Sequence: Synthetic oligonucleotide
  Antisense strand to SEQ ID NO: 1303610
uugguacacagauuccaag

SEQ ID NO: 1303612 - RNA, 19 nt, Artificial Sequence
  Description of Artificial Sequence: Synthetic oligonucleotide
  Sense strand starting at position 2977 of SEQ ID NO: 1241836
uuggaaucuguguaccaaa

SEQ ID NO: 1303613 - RNA, 19 nt, Artificial Sequence
  Description of Artificial Sequence: Synthetic oligonucleotide
  Antisense strand to SEQ ID NO: 1303612
uuugguacacagauuccaa

SEQ ID NO: 1303614 - RNA, 19 nt, Artificial Sequence
  Description of Artificial Sequence: Synthetic oligonucleotide
  Sense strand starting at position 3023 of SEQ ID NO: 1241836
uaggcuucuguugguagaa

SEQ ID NO: 1303615 - RNA, 19 nt, Artificial Sequence
  Description of Artificial Sequence: Synthetic oligonucleotide
  Antisense strand to SEQ ID NO: 1303614
uucuaccaacagaagccua

SEQ ID NO: 1303616 - RNA, 19 nt, Artificial Sequence
  Description of Artificial Sequence: Synthetic oligonucleotide
  Sense strand starting at position 3056 of SEQ ID NO: 1241836
acuaauguguucucuccua

SEQ ID NO: 1303617 - RNA, 19 nt, Artificial Sequence
  Description of Artificial Sequence: Synthetic oligonucleotide
  Antisense strand to SEQ ID NO: 1303616
uaggagagaacacauuagu

SEQ ID NO: 1303618 - RNA, 19 nt, Artificial Sequence
  Description of Artificial Sequence: Synthetic oligonucleotide
  Sense strand starting at position 3212 of SEQ ID NO: 1241836
uguuuaaaucguguaugcu

SEQ ID NO: 1303619 - RNA, 19 nt, Artificial Sequence
  Description of Artificial Sequence: Synthetic oligonucleotide
  Antisense strand to SEQ ID NO: 1303618
agcauacacgauuuaaaca

SEQ ID NO: 1303620 - RNA, 19 nt, Artificial Sequence
  Description of Artificial Sequence: Synthetic oligonucleotide
  Sense strand starting at position 3213 of SEQ ID NO: 1241836
guuuaaaucguguaugcug

SEQ ID NO: 1303621 - RNA, 19 nt, Artificial Sequence
  Description of Artificial Sequence: Synthetic oligonucleotide
  Antisense strand to SEQ ID NO: 1303620
cagcauacacgauuuaaac

SEQ ID NO: 1303622 - RNA, 19 nt, Artificial Sequence
  Description of Artificial Sequence: Synthetic oligonucleotide
  Sense strand starting at position 3278 of SEQ ID NO: 1241836
acacucaugggucagguua

SEQ ID NO: 1303623 - RNA, 19 nt, Artificial Sequence
  Description of Artificial Sequence: Synthetic oligonucleotide
  Antisense strand to SEQ ID NO: 1303622
uaaccugacccaugagugu

SEQ ID NO: 1303624 - RNA, 19 nt, Artificial Sequence
  Description of Artificial Sequence: Synthetic oligonucleotide
  Sense strand starting at position 3350 of SEQ ID NO: 1241836
cagucuaauaggugggaca

SEQ ID NO: 1303625 - RNA, 19 nt, Artificial Sequence
  Description of Artificial Sequence: Synthetic oligonucleotide
  Antisense strand to SEQ ID NO: 1303624
ugucccaccuauuagacug

SEQ ID NO: 1303626 - RNA, 19 nt, Artificial Sequence
  Description of Artificial Sequence: Synthetic oligonucleotide
  Sense strand starting at position 3444 of SEQ ID NO: 1241836
gugguuaguucugccugua

SEQ ID NO: 1303627 - RNA, 19 nt, Artificial Sequence
  Description of Artificial Sequence: Synthetic oligonucleotide
  Antisense strand to SEQ ID NO: 1303626
uacaggcagaacuaaccac

SEQ ID NO: 1303628 - RNA, 19 nt, Artificial Sequence
  Description of Artificial Sequence: Synthetic oligonucleotide
  Sense strand starting at position 3447 of SEQ ID NO: 1241836
guuaguucugccuguauua

SEQ ID NO: 1303629 - RNA, 19 nt, Artificial Sequence
  Description of Artificial Sequence: Synthetic oligonucleotide
  Antisense strand to SEQ ID NO: 1303628
uaauacaggcagaacuaac

SEQ ID NO: 1303630 - RNA, 19 nt, Artificial Sequence
  Description of Artificial Sequence: Synthetic oligonucleotide
  Sense strand starting at position 3580 of SEQ ID NO: 1241836
gagggaacaguacguauaa

SEQ ID NO: 1303631 - RNA, 19 nt, Artificial Sequence
  Description of Artificial Sequence: Synthetic oligonucleotide
  Antisense strand to SEQ ID NO: 1303630
uuauacguacuguucccuc

SEQ ID NO: 1303632 - RNA, 19 nt, Artificial Sequence
  Description of Artificial Sequence: Synthetic oligonucleotide
  Sense strand starting at position 3581 of SEQ ID NO: 1241836
agggaacaguacguauaaa

SEQ ID NO: 1303633 - RNA, 19 nt, Artificial Sequence
  Description of Artificial Sequence: Synthetic oligonucleotide
  Antisense strand to SEQ ID NO: 1303632
uuuauacguacuguucccu

SEQ ID NO: 1303634 - RNA, 19 nt, Artificial Sequence
  Description of Artificial Sequence: Synthetic oligonucleotide
  Sense strand starting at position 3626 of SEQ ID NO: 1241836
augcacgucacuugaguau

SEQ ID NO: 1303635 - RNA, 19 nt, Artificial Sequence
  Description of Artificial Sequence: Synthetic oligonucleotide
  Antisense strand to SEQ ID NO: 1303634
auacucaagugacgugcau

SEQ ID NO: 1303636 - RNA, 19 nt, Artificial Sequence
  Description of Artificial Sequence: Synthetic oligonucleotide
  Sense strand starting at position 3629 of SEQ ID NO: 1241836
cacgucacuugaguaugaa

SEQ ID NO: 1303637 - RNA, 19 nt, Artificial Sequence
  Description of Artificial Sequence: Synthetic oligonucleotide
  Antisense strand to SEQ ID NO: 1303636
uucauacucaagugacgug

SEQ ID NO: 1303638 - RNA, 19 nt, Artificial Sequence
  Description of Artificial Sequence: Synthetic oligonucleotide
  Sense strand starting at position 3630 of SEQ ID NO: 1241836
acgucacuugaguaugaag

SEQ ID NO: 1303639 - RNA, 19 nt, Artificial Sequence
  Description of Artificial Sequence: Synthetic oligonucleotide
  Antisense strand to SEQ ID NO: 1303638
cuucauacucaagugacgu

SEQ ID NO: 1303640 - RNA, 19 nt, Artificial Sequence
  Description of Artificial Sequence: Synthetic oligonucleotide
  Sense strand starting at position 3739 of SEQ ID NO: 1241836
ggccauuucucauacgaca

SEQ ID NO: 1303641 - RNA, 19 nt, Artificial Sequence
  Description of Artificial Sequence: Synthetic oligonucleotide
  Antisense strand to SEQ ID NO: 1303640
ugucguaugagaaauggcc

SEQ ID NO: 1303642 - RNA, 19 nt, Artificial Sequence
  Description of Artificial Sequence: Synthetic oligonucleotide
  Sense strand starting at position 3747 of SEQ ID NO: 1241836
cucauacgacaauggauau

SEQ ID NO: 1303643 - RNA, 19 nt, Artificial Sequence
  Description of Artificial Sequence: Synthetic oligonucleotide
  Antisense strand to SEQ ID NO: 1303642
auauccauugucguaugag

SEQ ID NO: 1303644 - RNA, 19 nt, Artificial Sequence
  Description of Artificial Sequence: Synthetic oligonucleotide
  Sense strand starting at position 3875 of SEQ ID NO: 1241836
gggucugggcuccagacau

SEQ ID NO: 1303645 - RNA, 19 nt, Artificial Sequence
  Description of Artificial Sequence: Synthetic oligonucleotide
  Antisense strand to SEQ ID NO: 1303644
augucuggagcccagaccc

SEQ ID NO: 1303646 - RNA, 19 nt, Artificial Sequence
  Description of Artificial Sequence: Synthetic oligonucleotide
  Sense strand starting at position 73 of SEQ ID NO: 1241837
gcauguuugguccaguaug

SEQ ID NO: 1303647 - RNA, 19 nt, Artificial Sequence
  Description of Artificial Sequence: Synthetic oligonucleotide
  Antisense strand to SEQ ID NO: 1303646
cauacuggaccaaacaugc

SEQ ID NO: 1303648 - RNA, 19 nt, Artificial Sequence
  Description of Artificial Sequence: Synthetic oligonucleotide
  Sense strand starting at position 133 of SEQ ID NO: 1241837
acgagugucuugguaggga

SEQ ID NO: 1303649 - RNA, 19 nt, Artificial Sequence
  Description of Artificial Sequence: Synthetic oligonucleotide
  Antisense strand to SEQ ID NO: 1303648
ucccuaccaagacacucgu

SEQ ID NO: 1303650 - RNA, 19 nt, Artificial Sequence
  Description of Artificial Sequence: Synthetic oligonucleotide
  Sense strand starting at position 266 of SEQ ID NO: 1241837
auggauacaaccuguggau

SEQ ID NO: 1303651 - RNA, 19 nt, Artificial Sequence
  Description of Artificial Sequence: Synthetic oligonucleotide
  Antisense strand to SEQ ID NO: 1303650
auccacagguuguauccau

SEQ ID NO: 1303652 - RNA, 19 nt, Artificial Sequence
  Description of Artificial Sequence: Synthetic oligonucleotide
  Sense strand starting at position 391 of SEQ ID NO: 1241837
cgagcuucccuacaagguu

SEQ ID NO: 1303653 - RNA, 19 nt, Artificial Sequence
  Description of Artificial Sequence: Synthetic oligonucleotide
  Antisense strand to SEQ ID NO: 1303652
aaccuuguagggaagcucg

SEQ ID NO: 1303654 - RNA, 19 nt, Artificial Sequence
  Description of Artificial Sequence: Synthetic oligonucleotide
  Sense strand starting at position 528 of SEQ ID NO: 1241837
aaauucugguagccaaaga

SEQ ID NO: 1303655 - RNA, 19 nt, Artificial Sequence
  Description of Artificial Sequence: Synthetic oligonucleotide
  Antisense strand to SEQ ID NO: 1303654
ucuuuggcuaccagaauuu

SEQ ID NO: 1303656 - RNA, 19 nt, Artificial Sequence
  Description of Artificial Sequence: Synthetic oligonucleotide
  Sense strand starting at position 645 of SEQ ID NO: 1241837
guaggucuguuucuuccau

SEQ ID NO: 1303657 - RNA, 19 nt, Artificial Sequence
  Description of Artificial Sequence: Synthetic oligonucleotide
  Antisense strand to SEQ ID NO: 1303656
auggaagaaacagaccuac

SEQ ID NO: 1303658 - RNA, 19 nt, Artificial Sequence
  Description of Artificial Sequence: Synthetic oligonucleotide
  Sense strand starting at position 725 of SEQ ID NO: 1241837
cuaucuuaugugcagcuua

SEQ ID NO: 1303659 - RNA, 19 nt, Artificial Sequence
  Description of Artificial Sequence: Synthetic oligonucleotide
  Antisense strand to SEQ ID NO: 1303658
uaagcugcacauaagauag

SEQ ID NO: 1303660 - RNA, 19 nt, Artificial Sequence
  Description of Artificial Sequence: Synthetic oligonucleotide
  Sense strand starting at position 756 of SEQ ID NO: 1241837
ugguuuguauuggcaaaca

SEQ ID NO: 1303661 - RNA, 19 nt, Artificial Sequence
  Description of Artificial Sequence: Synthetic oligonucleotide
  Antisense strand to SEQ ID NO: 1303660
uguuugccaauacaaacca

SEQ ID NO: 1303662 - RNA, 19 nt, Artificial Sequence
  Description of Artificial Sequence: Synthetic oligonucleotide
  Sense strand starting at position 820 of SEQ ID NO: 1241837
gccagagaagguuaaguua

SEQ ID NO: 1303663 - RNA, 19 nt, Artificial Sequence
  Description of Artificial Sequence: Synthetic oligonucleotide
  Antisense strand to SEQ ID NO: 1303662
uaacuuaaccuucucuggc

SEQ ID NO: 1303664 - RNA, 19 nt, Artificial Sequence
  Description of Artificial Sequence: Synthetic oligonucleotide
  Sense strand starting at position 827 of SEQ ID NO: 1241837
aagguuaaguuagaaugaa

SEQ ID NO: 1303665 - RNA, 19 nt, Artificial Sequence
  Description of Artificial Sequence: Synthetic oligonucleotide
  Antisense strand to SEQ ID NO: 1303664
uucauucuaacuuaaccuu

SEQ ID NO: 1303666 - RNA, 19 nt, Artificial Sequence
  Description of Artificial Sequence: Synthetic oligonucleotide
  Sense strand starting at position 943 of SEQ ID NO: 1241837
cugggucuuuguccagaau

SEQ ID NO: 1303667 - RNA, 19 nt, Artificial Sequence
  Description of Artificial Sequence: Synthetic oligonucleotide
  Antisense strand to SEQ ID NO: 1303666
auucuggacaaagacccag

SEQ ID NO: 1303668 - RNA, 19 nt, Artificial Sequence
  Description of Artificial Sequence: Synthetic oligonucleotide
  Sense strand starting at position 944 of SEQ ID NO: 1241837
ugggucuuuguccagaauu

SEQ ID NO: 1303669 - RNA, 19 nt, Artificial Sequence
  Description of Artificial Sequence: Synthetic oligonucleotide
  Antisense strand to SEQ ID NO: 1303668
aauucuggacaaagaccca

SEQ ID NO: 1303670 - RNA, 19 nt, Artificial Sequence
  Description of Artificial Sequence: Synthetic oligonucleotide
  Sense strand starting at position 946 of SEQ ID NO: 1241837
ggucuuuguccagaauucu

SEQ ID NO: 1303671 - RNA, 19 nt, Artificial Sequence
  Description of Artificial Sequence: Synthetic oligonucleotide
  Antisense strand to SEQ ID NO: 1303670
agaauucuggacaaagacc

SEQ ID NO: 1303672 - RNA, 19 nt, Artificial Sequence
  Description of Artificial Sequence: Synthetic oligonucleotide
  Sense strand starting at position 1047 of SEQ ID NO: 1241837
accuaaucuugauugagca

SEQ ID NO: 1303673 - RNA, 19 nt, Artificial Sequence
  Description of Artificial Sequence: Synthetic oligonucleotide
  Antisense strand to SEQ ID NO: 1303672
ugcucaaucaagauuaggu

SEQ ID NO: 1303674 - RNA, 19 nt, Artificial Sequence
  Description of Artificial Sequence: Synthetic oligonucleotide
  Sense strand starting at position 1048 of SEQ ID NO: 1241837
ccuaaucuugauugagcau

SEQ ID NO: 1303675 - RNA, 19 nt, Artificial Sequence
  Description of Artificial Sequence: Synthetic oligonucleotide
  Antisense strand to SEQ ID NO: 1303674
augcucaaucaagauuagg

SEQ ID NO: 1303676 - RNA, 19 nt, Artificial Sequence
  Description of Artificial Sequence: Synthetic oligonucleotide
  Sense strand starting at position 1135 of SEQ ID NO: 1241837
aaaggaauccagugagcug

SEQ ID NO: 1303677 - RNA, 19 nt, Artificial Sequence
  Description of Artificial Sequence: Synthetic oligonucleotide
  Antisense strand to SEQ ID NO: 1303676
cagcucacuggauuccuuu

SEQ ID NO: 1303678 - RNA, 19 nt, Artificial Sequence
  Description of Artificial Sequence: Synthetic oligonucleotide
  Sense strand starting at position 1346 of SEQ ID NO: 1241837
gggcgcacuccuugaggga

SEQ ID NO: 1303679 - RNA, 19 nt, Artificial Sequence
  Description of Artificial Sequence: Synthetic oligonucleotide
  Antisense strand to SEQ ID NO: 1303678
ucccucaaggagugcgccc

SEQ ID NO: 1303680 - RNA, 19 nt, Artificial Sequence
  Description of Artificial Sequence: Synthetic oligonucleotide
  Sense strand starting at position 1551 of SEQ ID NO: 1241837
guuucucaucugcgaaaug

SEQ ID NO: 1303681 - RNA, 19 nt, Artificial Sequence
  Description of Artificial Sequence: Synthetic oligonucleotide
  Antisense strand to SEQ ID NO: 1303680
cauuucgcagaugagaaac

SEQ ID NO: 1303682 - RNA, 19 nt, Artificial Sequence
  Description of Artificial Sequence: Synthetic oligonucleotide
  Sense strand starting at position 2444 of SEQ ID NO: 1241837
aagagauggucggauuuau

SEQ ID NO: 1303683 - RNA, 19 nt, Artificial Sequence
  Description of Artificial Sequence: Synthetic oligonucleotide
  Antisense strand to SEQ ID NO: 1303682
auaaauccgaccaucucuu

SEQ ID NO: 1303684 - RNA, 19 nt, Artificial Sequence
  Description of Artificial Sequence: Synthetic oligonucleotide
  Sense strand starting at position 2454 of SEQ ID NO: 1241837
cggauuuaucaguguucag

SEQ ID NO: 1303685 - RNA, 19 nt, Artificial Sequence
  Description of Artificial Sequence: Synthetic oligonucleotide
  Antisense strand to SEQ ID NO: 1303684
cugaacacugauaaauccg

SEQ ID NO: 1303686 - RNA, 19 nt, Artificial Sequence
  Description of Artificial Sequence: Synthetic oligonucleotide
  Sense strand starting at position 2617 of SEQ ID NO: 1241837
gcuguauucguggcaauau

SEQ ID NO: 1303687 - RNA, 19 nt, Artificial Sequence
  Description of Artificial Sequence: Synthetic oligonucleotide
  Antisense strand to SEQ ID NO: 1303686
auauugccacgaauacagc

SEQ ID NO: 1303688 - RNA, 19 nt, Artificial Sequence
  Description of Artificial Sequence: Synthetic oligonucleotide
  Sense strand starting at position 2645 of SEQ ID NO: 1241837
caccuagugcuaggcagaa

SEQ ID NO: 1303689 - RNA, 19 nt, Artificial Sequence
  Description of Artificial Sequence: Synthetic oligonucleotide
  Antisense strand to SEQ ID NO: 1303688
uucugccuagcacuaggug

SEQ ID NO: 1303690 - RNA, 19 nt, Artificial Sequence
  Description of Artificial Sequence: Synthetic oligonucleotide
  Sense strand starting at position 2789 of SEQ ID NO: 1241837
accagaauggguugcacuu

SEQ ID NO: 1303691 - RNA, 19 nt, Artificial Sequence
  Description of Artificial Sequence: Synthetic oligonucleotide
  Antisense strand to SEQ ID NO: 1303690
aagugcaacccauucuggu

SEQ ID NO: 1303692 - RNA, 19 nt, Artificial Sequence
  Description of Artificial Sequence: Synthetic oligonucleotide
  Sense strand starting at position 2861 of SEQ ID NO: 1241837
cuuugaauuuagggauaau

SEQ ID NO: 1303693 - RNA, 19 nt, Artificial Sequence
  Description of Artificial Sequence: Synthetic oligonucleotide
  Antisense strand to SEQ ID NO: 1303692
auuaucccuaaauucaaag

SEQ ID NO: 1303694 - RNA, 19 nt, Artificial Sequence
  Description of Artificial Sequence: Synthetic oligonucleotide
  Sense strand starting at position 2893 of SEQ ID NO: 1241837
ucucuaucccaaggcaaga

SEQ ID NO: 1303695 - RNA, 19 nt, Artificial Sequence
  Description of Artificial Sequence: Synthetic oligonucleotide
  Antisense strand to SEQ ID NO: 1303694
ucuugccuugggauagaga

SEQ ID NO: 1303696 - RNA, 19 nt, Artificial Sequence
  Description of Artificial Sequence: Synthetic oligonucleotide
  Sense strand starting at position 2921 of SEQ ID NO: 1241837
agccaugauagguguaguu

SEQ ID NO: 1303697 - RNA, 19 nt, Artificial Sequence
  Description of Artificial Sequence: Synthetic oligonucleotide
  Antisense strand to SEQ ID NO: 1303696
aacuacaccuaucauggcu

SEQ ID NO: 1303698 - RNA, 19 nt, Artificial Sequence
  Description of Artificial Sequence: Synthetic oligonucleotide
  Sense strand starting at position 2923 of SEQ ID NO: 1241837
ccaugauagguguaguuac

SEQ ID NO: 1303699 - RNA, 19 nt, Artificial Sequence
  Description of Artificial Sequence: Synthetic oligonucleotide
  Antisense strand to SEQ ID NO: 1303698
guaacuacaccuaucaugg

SEQ ID NO: 1303700 - RNA, 19 nt, Artificial Sequence
  Description of Artificial Sequence: Synthetic oligonucleotide
  Sense strand starting at position 2979 of SEQ ID NO: 1241837
agucauuaguccuuagaau

SEQ ID NO: 1303701 - RNA, 19 nt, Artificial Sequence
  Description of Artificial Sequence: Synthetic oligonucleotide
  Antisense strand to SEQ ID NO: 1303700
auucuaaggacuaaugacu

SEQ ID NO: 1303702 - RNA, 19 nt, Artificial Sequence
  Description of Artificial Sequence: Synthetic oligonucleotide
  Sense strand starting at position 2980 of SEQ ID NO: 1241837
gucauuaguccuuagaaua

SEQ ID NO: 1303703 - RNA, 19 nt, Artificial Sequence
  Description of Artificial Sequence: Synthetic oligonucleotide
  Antisense strand to SEQ ID NO: 1303702
uauucuaaggacuaaugac

SEQ ID NO: 1303704 - RNA, 19 nt, Artificial Sequence
  Description of Artificial Sequence: Synthetic oligonucleotide
  Sense strand starting at position 3004 of SEQ ID NO: 1241837
caagaaggcuuccugaaga

SEQ ID NO: 1303705 - RNA, 19 nt, Artificial Sequence
  Description of Artificial Sequence: Synthetic oligonucleotide
  Antisense strand to SEQ ID NO: 1303704
ucuucaggaagccuucuug

SEQ ID NO: 1303706 - RNA, 19 nt, Artificial Sequence
  Description of Artificial Sequence: Synthetic oligonucleotide
  Sense strand starting at position 3075 of SEQ ID NO: 1241837
auuaaugagcccugagcca

SEQ ID NO: 1303707 - RNA, 19 nt, Artificial Sequence
  Description of Artificial Sequence: Synthetic oligonucleotide
  Antisense strand to SEQ ID NO: 1303706
uggcucagggcucauuaau

SEQ ID NO: 1303708 - RNA, 19 nt, Artificial Sequence
  Description of Artificial Sequence: Synthetic oligonucleotide
  Sense strand starting at position 3839 of SEQ ID NO: 1241837
uuggaauaguucuuuaugu

SEQ ID NO: 1303709 - RNA, 19 nt, Artificial Sequence
  Description of Artificial Sequence: Synthetic oligonucleotide
  Antisense strand to SEQ ID NO: 1303708
acauaaagaacuauuccaa

SEQ ID NO: 1303710 - RNA, 19 nt, Artificial Sequence
  Description of Artificial Sequence: Synthetic oligonucleotide
  Sense strand starting at position 3840 of SEQ ID NO: 1241837
uggaauaguucuuuaugug

SEQ ID NO: 1303711 - RNA, 19 nt, Artificial Sequence
  Description of Artificial Sequence: Synthetic oligonucleotide
  Antisense strand to SEQ ID NO: 1303710
cacauaaagaacuauucca

SEQ ID NO: 1303712 - RNA, 19 nt, Artificial Sequence
  Description of Artificial Sequence: Synthetic oligonucleotide
  Sense strand starting at position 3841 of SEQ ID NO: 1241837
ggaauaguucuuuaugugg

SEQ ID NO: 1303713 - RNA, 19 nt, Artificial Sequence
  Description of Artificial Sequence: Synthetic oligonucleotide
  Antisense strand to SEQ ID NO: 1303712
ccacauaaagaacuauucc

SEQ ID NO: 1303714 - RNA, 19 nt, Artificial Sequence
  Description of Artificial Sequence: Synthetic oligonucleotide
  Sense strand starting at position 3844 of SEQ ID NO: 1241837
auaguucuuuaugugguua

SEQ ID NO: 1303715 - RNA, 19 nt, Artificial Sequence
  Description of Artificial Sequence: Synthetic oligonucleotide
  Antisense strand to SEQ ID NO: 1303714
uaaccacauaaagaacuau

SEQ ID NO: 1303716 - RNA, 19 nt, Artificial Sequence
  Description of Artificial Sequence: Synthetic oligonucleotide
  Sense strand starting at position 3849 of SEQ ID NO: 1241837
ucuuuaugugguuaugcca

SEQ ID NO: 1303717 - RNA, 19 nt, Artificial Sequence
  Description of Artificial Sequence: Synthetic oligonucleotide
  Antisense strand to SEQ ID NO: 1303716
uggcauaaccacauaaaga

SEQ ID NO: 1303718 - RNA, 19 nt, Artificial Sequence
  Description of Artificial Sequence: Synthetic oligonucleotide
  Sense strand starting at position 3871 of SEQ ID NO: 1241837
acucaacaugcaugguuua

SEQ ID NO: 1303719 - RNA, 19 nt, Artificial Sequence
  Description of Artificial Sequence: Synthetic oligonucleotide
  Antisense strand to SEQ ID NO: 1303718
uaaaccaugcauguugagu

SEQ ID NO: 1303720 - RNA, 19 nt, Artificial Sequence
  Description of Artificial Sequence: Synthetic oligonucleotide
  Sense strand starting at position 3972 of SEQ ID NO: 1241837
aaguuaagucucugaaggu

SEQ ID NO: 1303721 - RNA, 19 nt, Artificial Sequence
  Description of Artificial Sequence: Synthetic oligonucleotide
  Antisense strand to SEQ ID NO: 1303720
accuucagagacuuaacuu

SEQ ID NO: 1303722 - RNA, 19 nt, Artificial Sequence
  Description of Artificial Sequence: Synthetic oligonucleotide
  Sense strand starting at position 3979 of SEQ ID NO: 1241837
gucucugaagguugucaua

SEQ ID NO: 1303723 - RNA, 19 nt, Artificial Sequence
  Description of Artificial Sequence: Synthetic oligonucleotide
  Antisense strand to SEQ ID NO: 1303722
uaugacaaccuucagagac

SEQ ID NO: 1303724 - RNA, 19 nt, Artificial Sequence
  Description of Artificial Sequence: Synthetic oligonucleotide
  Sense strand starting at position 3981 of SEQ ID NO: 1241837
cucugaagguugucauagu

SEQ ID NO: 1303725 - RNA, 19 nt, Artificial Sequence
  Description of Artificial Sequence: Synthetic oligonucleotide
  Antisense strand to SEQ ID NO: 1303724
acuaugacaaccuucagag

SEQ ID NO: 1303726 - RNA, 19 nt, Artificial Sequence
  Description of Artificial Sequence: Synthetic oligonucleotide
  Sense strand starting at position 80 of SEQ ID NO: 1241838
gaucaaaugguaggcaaua

SEQ ID NO: 1303727 - RNA, 19 nt, Artificial Sequence
  Description of Artificial Sequence: Synthetic oligonucleotide
  Antisense strand to SEQ ID NO: 1303726
uauugccuaccauuugauc

SEQ ID NO: 1303728 - RNA, 19 nt, Artificial Sequence
  Description of Artificial Sequence: Synthetic oligonucleotide
  Sense strand starting at position 81 of SEQ ID NO: 1241838
aucaaaugguaggcaauau

SEQ ID NO: 1303729 - RNA, 19 nt, Artificial Sequence
  Description of Artificial Sequence: Synthetic oligonucleotide
  Antisense strand to SEQ ID NO: 1303728
auauugccuaccauuugau

SEQ ID NO: 1303730 - RNA, 19 nt, Artificial Sequence
  Description of Artificial Sequence: Synthetic oligonucleotide
  Sense strand starting at position 364 of SEQ ID NO: 1241838
aggaaagcauuaucaagua

SEQ ID NO: 1303731 - RNA, 19 nt, Artificial Sequence
  Description of Artificial Sequence: Synthetic oligonucleotide
  Antisense strand to SEQ ID NO: 1303730
uacuugauaaugcuuuccu

SEQ ID NO: 1303732 - RNA, 19 nt, Artificial Sequence
  Description of Artificial Sequence: Synthetic oligonucleotide
  Sense strand starting at position 451 of SEQ ID NO: 1241838
gugcuacagcuuugauuua

SEQ ID NO: 1303733 - RNA, 19 nt, Artificial Sequence
  Description of Artificial Sequence: Synthetic oligonucleotide
  Antisense strand to SEQ ID NO: 1303732
uaaaucaaagcuguagcac

SEQ ID NO: 1303734 - RNA, 19 nt, Artificial Sequence
  Description of Artificial Sequence: Synthetic oligonucleotide
  Sense strand starting at position 544 of SEQ ID NO: 1241838
ugcaaucuggcagcguuua

SEQ ID NO: 1303735 - RNA, 19 nt, Artificial Sequence
  Description of Artificial Sequence: Synthetic oligonucleotide
  Antisense strand to SEQ ID NO: 1303734
uaaacgcugccagauugca

SEQ ID NO: 1303736 - RNA, 19 nt, Artificial Sequence
  Description of Artificial Sequence: Synthetic oligonucleotide
  Sense strand starting at position 706 of SEQ ID NO: 1241838
augguaagcgcuuaauaaa

SEQ ID NO: 1303737 - RNA, 19 nt, Artificial Sequence
  Description of Artificial Sequence: Synthetic oligonucleotide
  Antisense strand to SEQ ID NO: 1303736
uuuauuaagcgcuuaccau

SEQ ID NO: 1303738 - RNA, 19 nt, Artificial Sequence
  Description of Artificial Sequence: Synthetic oligonucleotide
  Sense strand starting at position 869 of SEQ ID NO: 1241838
ucagaaaucgaacacguuu

SEQ ID NO: 1303739 - RNA, 19 nt, Artificial Sequence
  Description of Artificial Sequence: Synthetic oligonucleotide
  Antisense strand to SEQ ID NO: 1303738
aaacguguucgauuucuga

SEQ ID NO: 1303740 - RNA, 19 nt, Artificial Sequence
  Description of Artificial Sequence: Synthetic oligonucleotide
  Sense strand starting at position 1154 of SEQ ID NO: 1241838
gcgguaagugcuucuccca

SEQ ID NO: 1303741 - RNA, 19 nt, Artificial Sequence
  Description of Artificial Sequence: Synthetic oligonucleotide
  Antisense strand to SEQ ID NO: 1303740
ugggagaagcacuuaccgc

SEQ ID NO: 1303742 - RNA, 19 nt, Artificial Sequence
  Description of Artificial Sequence: Synthetic oligonucleotide
  Sense strand starting at position 1512 of SEQ ID NO: 1241838
cgacuucucgggagcucga

SEQ ID NO: 1303743 - RNA, 19 nt, Artificial Sequence
  Description of Artificial Sequence: Synthetic oligonucleotide
  Antisense strand to SEQ ID NO: 1303742
ucgagcucccgagaagucg

SEQ ID NO: 1303744 - RNA, 19 nt, Artificial Sequence
  Description of Artificial Sequence: Synthetic oligonucleotide
  Sense strand starting at position 2483 of SEQ ID NO: 1241838
ugggaauaauuugaugauc

SEQ ID NO: 1303745 - RNA, 19 nt, Artificial Sequence
  Description of Artificial Sequence: Synthetic oligonucleotide
  Antisense strand to SEQ ID NO: 1303744
gaucaucaaauuauuccca

SEQ ID NO: 1303746 - RNA, 19 nt, Artificial Sequence
  Description of Artificial Sequence: Synthetic oligonucleotide
  Sense strand starting at position 2485 of SEQ ID NO: 1241838
ggaauaauuugaugaucag

SEQ ID NO: 1303747 - RNA, 19 nt, Artificial Sequence
  Description of Artificial Sequence: Synthetic oligonucleotide
  Antisense strand to SEQ ID NO: 1303746
cugaucaucaaauuauucc

SEQ ID NO: 1303748 - RNA, 19 nt, Artificial Sequence
  Description of Artificial Sequence: Synthetic oligonucleotide
  Sense strand starting at position 2594 of SEQ ID NO: 1241838
ggacaaucuucguuuccuu

SEQ ID NO: 1303749 - RNA, 19 nt, Artificial Sequence
  Description of Artificial Sequence: Synthetic oligonucleotide
  Antisense strand to SEQ ID NO: 1303748
aaggaaacgaagauugucc

SEQ ID NO: 1303750 - RNA, 19 nt, Artificial Sequence
  Description of Artificial Sequence: Synthetic oligonucleotide
  Sense strand starting at position 2628 of SEQ ID NO: 1241838
auaguugcugcauaugauu

SEQ ID NO: 1303751 - RNA, 19 nt, Artificial Sequence
  Description of Artificial Sequence: Synthetic oligonucleotide
  Antisense strand to SEQ ID NO: 1303750
aaucauaugcagcaacuau

SEQ ID NO: 1303752 - RNA, 19 nt, Artificial Sequence
  Description of Artificial Sequence: Synthetic oligonucleotide
  Sense strand starting at position 2630 of SEQ ID NO: 1241838
aguugcugcauaugauuga

SEQ ID NO: 1303753 - RNA, 19 nt, Artificial Sequence
  Description of Artificial Sequence: Synthetic oligonucleotide
  Antisense strand to SEQ ID NO: 1303752
ucaaucauaugcagcaacu

SEQ ID NO: 1303754 - RNA, 19 nt, Artificial Sequence
  Description of Artificial Sequence: Synthetic oligonucleotide
  Sense strand starting at position 2650 of SEQ ID NO: 1241838
agcauaaggcauuguauuu

SEQ ID NO: 1303755 - RNA, 19 nt, Artificial Sequence
  Description of Artificial Sequence: Synthetic oligonucleotide
  Antisense strand to SEQ ID NO: 1303754
aaauacaaugccuuaugcu

SEQ ID NO: 1303756 - RNA, 19 nt, Artificial Sequence
  Description of Artificial Sequence: Synthetic oligonucleotide
  Sense strand starting at position 2672 of SEQ ID NO: 1241838
aaguaaguggcucaugcuu

SEQ ID NO: 1303757 - RNA, 19 nt, Artificial Sequence
  Description of Artificial Sequence: Synthetic oligonucleotide
  Antisense strand to SEQ ID NO: 1303756
aagcaugagccacuuacuu

SEQ ID NO: 1303758 - RNA, 19 nt, Artificial Sequence
  Description of Artificial Sequence: Synthetic oligonucleotide
  Sense strand starting at position 2967 of SEQ ID NO: 1241838
uucuauuugcccuauguuu

SEQ ID NO: 1303759 - RNA, 19 nt, Artificial Sequence
  Description of Artificial Sequence: Synthetic oligonucleotide
  Antisense strand to SEQ ID NO: 1303758
aaacauagggcaaauagaa

SEQ ID NO: 1303760 - RNA, 19 nt, Artificial Sequence
  Description of Artificial Sequence: Synthetic oligonucleotide
  Sense strand starting at position 3088 of SEQ ID NO: 1241838
agugucaccuuauauuuau

SEQ ID NO: 1303761 - RNA, 19 nt, Artificial Sequence
  Description of Artificial Sequence: Synthetic oligonucleotide
  Antisense strand to SEQ ID NO: 1303760
auaaauauaaggugacacu

SEQ ID NO: 1303762 - RNA, 19 nt, Artificial Sequence
  Description of Artificial Sequence: Synthetic oligonucleotide
  Sense strand starting at position 3192 of SEQ ID NO: 1241838
ucaagcuugcuggaggauu

SEQ ID NO: 1303763 - RNA, 19 nt, Artificial Sequence
  Description of Artificial Sequence: Synthetic oligonucleotide
  Antisense strand to SEQ ID NO: 1303762
aauccuccagcaagcuuga

SEQ ID NO: 1303764 - RNA, 19 nt, Artificial Sequence
  Description of Artificial Sequence: Synthetic oligonucleotide
  Sense strand starting at position 3194 of SEQ ID NO: 1241838
aagcuugcuggaggauuau

SEQ ID NO: 1303765 - RNA, 19 nt, Artificial Sequence
  Description of Artificial Sequence: Synthetic oligonucleotide
  Antisense strand to SEQ ID NO: 1303764
auaauccuccagcaagcuu

SEQ ID NO: 1303766 - RNA, 19 nt, Artificial Sequence
  Description of Artificial Sequence: Synthetic oligonucleotide
  Sense strand starting at position 3259 of SEQ ID NO: 1241838
uaucacuuagugugucuau

SEQ ID NO: 1303767 - RNA, 19 nt, Artificial Sequence
  Description of Artificial Sequence: Synthetic oligonucleotide
  Antisense strand to SEQ ID NO: 1303766
auagacacacuaagugaua

SEQ ID NO: 1303768 - RNA, 19 nt, Artificial Sequence
  Description of Artificial Sequence: Synthetic oligonucleotide
  Sense strand starting at position 3260 of SEQ ID NO: 1241838
aucacuuagugugucuaua

SEQ ID NO: 1303769 - RNA, 19 nt, Artificial Sequence
  Description of Artificial Sequence: Synthetic oligonucleotide
  Antisense strand to SEQ ID NO: 1303768
uauagacacacuaagugau

SEQ ID NO: 1303770 - RNA, 19 nt, Artificial Sequence
  Description of Artificial Sequence: Synthetic oligonucleotide
  Sense strand starting at position 3273 of SEQ ID NO: 1241838
ucuauaguaucacuuagag

SEQ ID NO: 1303771 - RNA, 19 nt, Artificial Sequence
  Description of Artificial Sequence: Synthetic oligonucleotide
  Antisense strand to SEQ ID NO: 1303770
cucuaagugauacuauaga

SEQ ID NO: 1303772 - RNA, 19 nt, Artificial Sequence
  Description of Artificial Sequence: Synthetic oligonucleotide
  Sense strand starting at position 3288 of SEQ ID NO: 1241838
agagaaauguacccuccua

SEQ ID NO: 1303773 - RNA, 19 nt, Artificial Sequence
  Description of Artificial Sequence: Synthetic oligonucleotide
  Antisense strand to SEQ ID NO: 1303772
uaggaggguacauuucucu

SEQ ID NO: 1303774 - RNA, 19 nt, Artificial Sequence
  Description of Artificial Sequence: Synthetic oligonucleotide
  Sense strand starting at position 3369 of SEQ ID NO: 1241838
agguuuauguagucaaaca

SEQ ID NO: 1303775 - RNA, 19 nt, Artificial Sequence
  Description of Artificial Sequence: Synthetic oligonucleotide
  Antisense strand to SEQ ID NO: 1303774
uguuugacuacauaaaccu

SEQ ID NO: 1303776 - RNA, 19 nt, Artificial Sequence
  Description of Artificial Sequence: Synthetic oligonucleotide
  Sense strand starting at position 3370 of SEQ ID NO: 1241838
gguuuauguagucaaacac

SEQ ID NO: 1303777 - RNA, 19 nt, Artificial Sequence
  Description of Artificial Sequence: Synthetic oligonucleotide
  Antisense strand to SEQ ID NO: 1303776
guguuugacuacauaaacc

SEQ ID NO: 1303778 - RNA, 19 nt, Artificial Sequence
  Description of Artificial Sequence: Synthetic oligonucleotide
  Sense strand starting at position 3385 of SEQ ID NO: 1241838
acacaugucuuaucuugca

SEQ ID NO: 1303779 - RNA, 19 nt, Artificial Sequence
  Description of Artificial Sequence: Synthetic oligonucleotide
  Antisense strand to SEQ ID NO: 1303778
ugcaagauaagacaugugu

SEQ ID NO: 1303780 - RNA, 19 nt, Artificial Sequence
  Description of Artificial Sequence: Synthetic oligonucleotide
  Sense strand starting at position 3398 of SEQ ID NO: 1241838
cuugcaugguuucuagauu

SEQ ID NO: 1303781 - RNA, 19 nt, Artificial Sequence
  Description of Artificial Sequence: Synthetic oligonucleotide
  Antisense strand to SEQ ID NO: 1303780
aaucuagaaaccaugcaag

SEQ ID NO: 1303782 - RNA, 19 nt, Artificial Sequence
  Description of Artificial Sequence: Synthetic oligonucleotide
  Sense strand starting at position 3463 of SEQ ID NO: 1241838
uucccuaaauguucuagua

SEQ ID NO: 1303783 - RNA, 19 nt, Artificial Sequence
  Description of Artificial Sequence: Synthetic oligonucleotide
  Antisense strand to SEQ ID NO: 1303782
uacuagaacauuuagggaa

SEQ ID NO: 1303784 - RNA, 19 nt, Artificial Sequence
  Description of Artificial Sequence: Synthetic oligonucleotide
  Sense strand starting at position 3473 of SEQ ID NO: 1241838
guucuaguaauguauagcu

SEQ ID NO: 1303785 - RNA, 19 nt, Artificial Sequence
  Description of Artificial Sequence: Synthetic oligonucleotide
  Antisense strand to SEQ ID NO: 1303784
agcuauacauuacuagaac

SEQ ID NO: 1303786 - RNA, 19 nt, Artificial Sequence
  Description of Artificial Sequence: Synthetic oligonucleotide
  Sense strand starting at position 3488 of SEQ ID NO: 1241838
agcucuguuguuuagauua

SEQ ID NO: 1303787 - RNA, 19 nt, Artificial Sequence
  Description of Artificial Sequence: Synthetic oligonucleotide
  Antisense strand to SEQ ID NO: 1303786
uaaucuaaacaacagagcu

SEQ ID NO: 1303788 - RNA, 19 nt, Artificial Sequence
  Description of Artificial Sequence: Synthetic oligonucleotide
  Sense strand starting at position 3493 of SEQ ID NO: 1241838
uguuguuuagauuaccauu

SEQ ID NO: 1303789 - RNA, 19 nt, Artificial Sequence
  Description of Artificial Sequence: Synthetic oligonucleotide
  Antisense strand to SEQ ID NO: 1303788
aaugguaaucuaaacaaca

SEQ ID NO: 1303790 - RNA, 19 nt, Artificial Sequence
  Description of Artificial Sequence: Synthetic oligonucleotide
  Sense strand starting at position 3599 of SEQ ID NO: 1241838
ccauucuucgcucacugau

SEQ ID NO: 1303791 - RNA, 19 nt, Artificial Sequence
  Description of Artificial Sequence: Synthetic oligonucleotide
  Antisense strand to SEQ ID NO: 1303790
aucagugagcgaagaaugg

SEQ ID NO: 1303792 - RNA, 19 nt, Artificial Sequence
  Description of Artificial Sequence: Synthetic oligonucleotide
  Sense strand starting at position 3659 of SEQ ID NO: 1241838
acucuacuugguuaaugua

SEQ ID NO: 1303793 - RNA, 19 nt, Artificial Sequence
  Description of Artificial Sequence: Synthetic oligonucleotide
  Antisense strand to SEQ ID NO: 1303792
uacauuaaccaaguagagu

SEQ ID NO: 1303794 - RNA, 19 nt, Artificial Sequence
  Description of Artificial Sequence: Synthetic oligonucleotide
  Sense strand starting at position 3732 of SEQ ID NO: 1241838
aagguuuauuccgucuaua

SEQ ID NO: 1303795 - RNA, 19 nt, Artificial Sequence
  Description of Artificial Sequence: Synthetic oligonucleotide
  Antisense strand to SEQ ID NO: 1303794
uauagacggaauaaaccuu

SEQ ID NO: 1303796 - RNA, 19 nt, Artificial Sequence
  Description of Artificial Sequence: Synthetic oligonucleotide
  Sense strand starting at position 3735 of SEQ ID NO: 1241838
guuuauuccgucuauauua

SEQ ID NO: 1303797 - RNA, 19 nt, Artificial Sequence
  Description of Artificial Sequence: Synthetic oligonucleotide
  Antisense strand to SEQ ID NO: 1303796
uaauauagacggaauaaac

SEQ ID NO: 1303798 - RNA, 19 nt, Artificial Sequence
  Description of Artificial Sequence: Synthetic oligonucleotide
  Sense strand starting at position 3788 of SEQ ID NO: 1241838
ggaugaggguucucauuca

SEQ ID NO: 1303799 - RNA, 19 nt, Artificial Sequence
  Description of Artificial Sequence: Synthetic oligonucleotide
  Antisense strand to SEQ ID NO: 1303798
ugaaugagaacccucaucc

SEQ ID NO: 1303800 - RNA, 19 nt, Artificial Sequence
  Description of Artificial Sequence: Synthetic oligonucleotide
  Sense strand starting at position 3818 of SEQ ID NO: 1241838
agguuaugguaaccuuaua

SEQ ID NO: 1303801 - RNA, 19 nt, Artificial Sequence
  Description of Artificial Sequence: Synthetic oligonucleotide
  Antisense strand to SEQ ID NO: 1303800
uauaagguuaccauaaccu

SEQ ID NO: 1303802 - RNA, 19 nt, Artificial Sequence
  Description of Artificial Sequence: Synthetic oligonucleotide
  Sense strand starting at position 3932 of SEQ ID NO: 1241838
ccaugaaacugucuggacu

SEQ ID NO: 1303803 - RNA, 19 nt, Artificial Sequence
  Description of Artificial Sequence: Synthetic oligonucleotide
  Antisense strand to SEQ ID NO: 1303802
aguccagacaguuucaugg

SEQ ID NO: 1303804 - RNA, 19 nt, Artificial Sequence
  Description of Artificial Sequence: Synthetic oligonucleotide
  Sense strand starting at position 3933 of SEQ ID NO: 1241838
caugaaacugucuggacuu

SEQ ID NO: 1303805 - RNA, 19 nt, Artificial Sequence
  Description of Artificial Sequence: Synthetic oligonucleotide
  Antisense strand to SEQ ID NO: 1303804
aaguccagacaguuucaug

SEQ ID NO: 1303806 - RNA, 19 nt, Artificial Sequence
  Description of Artificial Sequence: Synthetic oligonucleotide
  Sense strand starting at position 37 of SEQ ID NO: 1241839
gguguugaaccucgaugau

SEQ ID NO: 1303807 - RNA, 19 nt, Artificial Sequence
  Description of Artificial Sequence: Synthetic oligonucleotide
  Antisense strand to SEQ ID NO: 1303806
aucaucgagguucaacacc

SEQ ID NO: 1303808 - RNA, 19 nt, Artificial Sequence
  Description of Artificial Sequence: Synthetic oligonucleotide
  Sense strand starting at position 43 of SEQ ID NO: 1241839
gaaccucgaugauggaauu

SEQ ID NO: 1303809 - RNA, 19 nt, Artificial Sequence
  Description of Artificial Sequence: Synthetic oligonucleotide
  Antisense strand to SEQ ID NO: 1303808
aauuccaucaucgagguuc

SEQ ID NO: 1303810 - RNA, 19 nt, Artificial Sequence
  Description of Artificial Sequence: Synthetic oligonucleotide
  Sense strand starting at position 188 of SEQ ID NO: 1241839
ggaguuacccaggagcuga

SEQ ID NO: 1303811 - RNA, 19 nt, Artificial Sequence
  Description of Artificial Sequence: Synthetic oligonucleotide
  Antisense strand to SEQ ID NO: 1303810
ucagcuccuggguaacucc

SEQ ID NO: 1303812 - RNA, 19 nt, Artificial Sequence
  Description of Artificial Sequence: Synthetic oligonucleotide
  Sense strand starting at position 211 of SEQ ID NO: 1241839
agggacaacugguguucaa

SEQ ID NO: 1303813 - RNA, 19 nt, Artificial Sequence
  Description of Artificial Sequence: Synthetic oligonucleotide
  Antisense strand to SEQ ID NO: 1303812
uugaacaccaguugucccu

SEQ ID NO: 1303814 - RNA, 19 nt, Artificial Sequence
  Description of Artificial Sequence: Synthetic oligonucleotide
  Sense strand starting at position 267 of SEQ ID NO: 1241839
ugucuugagacaggaguuu

SEQ ID NO: 1303815 - RNA, 19 nt, Artificial Sequence
  Description of Artificial Sequence: Synthetic oligonucleotide
  Antisense strand to SEQ ID NO: 1303814
aaacuccugucucaagaca

SEQ ID NO: 1303816 - RNA, 19 nt, Artificial Sequence
  Description of Artificial Sequence: Synthetic oligonucleotide
  Sense strand starting at position 390 of SEQ ID NO: 1241839
aaaggagacuuugguaguu

SEQ ID NO: 1303817 - RNA, 19 nt, Artificial Sequence
  Description of Artificial Sequence: Synthetic oligonucleotide
  Antisense strand to SEQ ID NO: 1303816
aacuaccaaagucuccuuu

SEQ ID NO: 1303818 - RNA, 19 nt, Artificial Sequence
  Description of Artificial Sequence: Synthetic oligonucleotide
  Sense strand starting at position 399 of SEQ ID NO: 1241839
uuugguaguuugugggauu

SEQ ID NO: 1303819 - RNA, 19 nt, Artificial Sequence
  Description of Artificial Sequence: Synthetic oligonucleotide
  Antisense strand to SEQ ID NO: 1303818
aaucccacaaacuaccaaa

SEQ ID NO: 1303820 - RNA, 19 nt, Artificial Sequence
  Description of Artificial Sequence: Synthetic oligonucleotide
  Sense strand starting at position 400 of SEQ ID NO: 1241839
uugguaguuugugggauua

SEQ ID NO: 1303821 - RNA, 19 nt, Artificial Sequence
  Description of Artificial Sequence: Synthetic oligonucleotide
  Antisense strand to SEQ ID NO: 1303820
uaaucccacaaacuaccaa

SEQ ID NO: 1303822 - RNA, 19 nt, Artificial Sequence
  Description of Artificial Sequence: Synthetic oligonucleotide
  Sense strand starting at position 402 of SEQ ID NO: 1241839
gguaguuugugggauuauu

SEQ ID NO: 1303823 - RNA, 19 nt, Artificial Sequence
  Description of Artificial Sequence: Synthetic oligonucleotide
  Antisense strand to SEQ ID NO: 1303822
aauaaucccacaaacuacc

SEQ ID NO: 1303824 - RNA, 19 nt, Artificial Sequence
  Description of Artificial Sequence: Synthetic oligonucleotide
  Sense strand starting at position 410 of SEQ ID NO: 1241839
gugggauuauugucagcau

SEQ ID NO: 1303825 - RNA, 19 nt, Artificial Sequence
  Description of Artificial Sequence: Synthetic oligonucleotide
  Antisense strand to SEQ ID NO: 1303824
augcugacaauaaucccac

SEQ ID NO: 1303826 - RNA, 19 nt, Artificial Sequence
  Description of Artificial Sequence: Synthetic oligonucleotide
  Sense strand starting at position 411 of SEQ ID NO: 1241839
ugggauuauugucagcauc

SEQ ID NO: 1303827 - RNA, 19 nt, Artificial Sequence
  Description of Artificial Sequence: Synthetic oligonucleotide
  Antisense strand to SEQ ID NO: 1303826
gaugcugacaauaauccca

SEQ ID NO: 1303828 - RNA, 19 nt, Artificial Sequence
  Description of Artificial Sequence: Synthetic oligonucleotide
  Sense strand starting at position 413 of SEQ ID NO: 1241839
ggauuauugucagcaucag

SEQ ID NO: 1303829 - RNA, 19 nt, Artificial Sequence
  Description of Artificial Sequence: Synthetic oligonucleotide
  Antisense strand to SEQ ID NO: 1303828
cugaugcugacaauaaucc

SEQ ID NO: 1303830 - RNA, 19 nt, Artificial Sequence
  Description of Artificial Sequence: Synthetic oligonucleotide
  Sense strand starting at position 414 of SEQ ID NO: 1241839
gauuauugucagcaucagu

SEQ ID NO: 1303831 - RNA, 19 nt, Artificial Sequence
  Description of Artificial Sequence: Synthetic oligonucleotide
  Antisense strand to SEQ ID NO: 1303830
acugaugcugacaauaauc

SEQ ID NO: 1303832 - RNA, 19 nt, Artificial Sequence
  Description of Artificial Sequence: Synthetic oligonucleotide
  Sense strand starting at position 454 of SEQ ID NO: 1241839
gguccuuauucuccaaggu

SEQ ID NO: 1303833 - RNA, 19 nt, Artificial Sequence
  Description of Artificial Sequence: Synthetic oligonucleotide
  Antisense strand to SEQ ID NO: 1303832
accuuggagaauaaggacc

SEQ ID NO: 1303834 - RNA, 19 nt, Artificial Sequence
  Description of Artificial Sequence: Synthetic oligonucleotide
  Sense strand starting at position 470 of SEQ ID NO: 1241839
gguggacccuucuauuuac

SEQ ID NO: 1303835 - RNA, 19 nt, Artificial Sequence
  Description of Artificial Sequence: Synthetic oligonucleotide
  Antisense strand to SEQ ID NO: 1303834
guaaauagaaggguccacc

SEQ ID NO: 1303836 - RNA, 19 nt, Artificial Sequence
  Description of Artificial Sequence: Synthetic oligonucleotide
  Sense strand starting at position 493 of SEQ ID NO: 1241839
cugcccaguuguugggaaa

SEQ ID NO: 1303837 - RNA, 19 nt, Artificial Sequence
  Description of Artificial Sequence: Synthetic oligonucleotide
  Antisense strand to SEQ ID NO: 1303836
uuucccaacaacugggcag

SEQ ID NO: 1303838 - RNA, 19 nt, Artificial Sequence
  Description of Artificial Sequence: Synthetic oligonucleotide
  Sense strand starting at position 687 of SEQ ID NO: 1241839
gucccuuauuucuggugga

SEQ ID NO: 1303839 - RNA, 19 nt, Artificial Sequence
  Description of Artificial Sequence: Synthetic oligonucleotide
  Antisense strand to SEQ ID NO: 1303838
uccaccagaaauaagggac

SEQ ID NO: 1303840 - RNA, 19 nt, Artificial Sequence
  Description of Artificial Sequence: Synthetic oligonucleotide
  Sense strand starting at position 1280 of SEQ ID NO: 1241839
ccgaauucuugcccgcuga

SEQ ID NO: 1303841 - RNA, 19 nt, Artificial Sequence
  Description of Artificial Sequence: Synthetic oligonucleotide
  Antisense strand to SEQ ID NO: 1303840
ucagcgggcaagaauucgg

SEQ ID NO: 1303842 - RNA, 19 nt, Artificial Sequence
  Description of Artificial Sequence: Synthetic oligonucleotide
  Sense strand starting at position 2238 of SEQ ID NO: 1241839
agguguugauugcucgcua

SEQ ID NO: 1303843 - RNA, 19 nt, Artificial Sequence
  Description of Artificial Sequence: Synthetic oligonucleotide
  Antisense strand to SEQ ID NO: 1303842
uagcgagcaaucaacaccu

SEQ ID NO: 1303844 - RNA, 19 nt, Artificial Sequence
  Description of Artificial Sequence: Synthetic oligonucleotide
  Sense strand starting at position 2241 of SEQ ID NO: 1241839
uguugauugcucgcuacuc

SEQ ID NO: 1303845 - RNA, 19 nt, Artificial Sequence
  Description of Artificial Sequence: Synthetic oligonucleotide
  Antisense strand to SEQ ID NO: 1303844
gaguagcgagcaaucaaca

SEQ ID NO: 1303846 - RNA, 19 nt, Artificial Sequence
  Description of Artificial Sequence: Synthetic oligonucleotide
  Sense strand starting at position 2349 of SEQ ID NO: 1241839
cccucaguccucgugguuu

SEQ ID NO: 1303847 - RNA, 19 nt, Artificial Sequence
  Description of Artificial Sequence: Synthetic oligonucleotide
  Antisense strand to SEQ ID NO: 1303846
aaaccacgaggacugaggg

SEQ ID NO: 1303848 - RNA, 19 nt, Artificial Sequence
  Description of Artificial Sequence: Synthetic oligonucleotide
  Sense strand starting at position 2877 of SEQ ID NO: 1241839
gcccucggcuccuuagaaa

SEQ ID NO: 1303849 - RNA, 19 nt, Artificial Sequence
  Description of Artificial Sequence: Synthetic oligonucleotide
  Antisense strand to SEQ ID NO: 1303848
uuucuaaggagccgagggc

SEQ ID NO: 1303850 - RNA, 19 nt, Artificial Sequence
  Description of Artificial Sequence: Synthetic oligonucleotide
  Sense strand starting at position 3169 of SEQ ID NO: 1241839
guccgagugcgcucuccaa

SEQ ID NO: 1303851 - RNA, 19 nt, Artificial Sequence
  Description of Artificial Sequence: Synthetic oligonucleotide
  Antisense strand to SEQ ID NO: 1303850
uuggagagcgcacucggac

SEQ ID NO: 1303852 - RNA, 19 nt, Artificial Sequence
  Description of Artificial Sequence: Synthetic oligonucleotide
  Sense strand starting at position 3171 of SEQ ID NO: 1241839
ccgagugcgcucuccaauu

SEQ ID NO: 1303853 - RNA, 19 nt, Artificial Sequence
  Description of Artificial Sequence: Synthetic oligonucleotide
  Antisense strand to SEQ ID NO: 1303852
aauuggagagcgcacucgg

SEQ ID NO: 1303854 - RNA, 19 nt, Artificial Sequence
  Description of Artificial Sequence: Synthetic oligonucleotide
  Sense strand starting at position 3476 of SEQ ID NO: 1241839
uccguaagaugcuuggaga

SEQ ID NO: 1303855 - RNA, 19 nt, Artificial Sequence
  Description of Artificial Sequence: Synthetic oligonucleotide
  Antisense strand to SEQ ID NO: 1303854
ucuccaagcaucuuacgga

SEQ ID NO: 1303856 - RNA, 19 nt, Artificial Sequence
  Description of Artificial Sequence: Synthetic oligonucleotide
  Sense strand starting at position 3477 of SEQ ID NO: 1241839
ccguaagaugcuuggagaa

SEQ ID NO: 1303857 - RNA, 19 nt, Artificial Sequence
  Description of Artificial Sequence: Synthetic oligonucleotide
  Antisense strand to SEQ ID NO: 1303856
uucuccaagcaucuuacgg

SEQ ID NO: 1303858 - RNA, 19 nt, Artificial Sequence
  Description of Artificial Sequence: Synthetic oligonucleotide
  Sense strand starting at position 3479 of SEQ ID NO: 1241839
guaagaugcuuggagaaac

SEQ ID NO: 1303859 - RNA, 19 nt, Artificial Sequence
  Description of Artificial Sequence: Synthetic oligonucleotide
  Antisense strand to SEQ ID NO: 1303858
guuucuccaagcaucuuac

SEQ ID NO: 1303860 - RNA, 19 nt, Artificial Sequence
  Description of Artificial Sequence: Synthetic oligonucleotide
  Sense strand starting at position 3629 of SEQ ID NO: 1241839
uaggguuggaauggauauu

SEQ ID NO: 1303861 - RNA, 19 nt, Artificial Sequence
  Description of Artificial Sequence: Synthetic oligonucleotide
  Antisense strand to SEQ ID NO: 1303860
aauauccauuccaacccua

SEQ ID NO: 1303862 - RNA, 19 nt, Artificial Sequence
  Description of Artificial Sequence: Synthetic oligonucleotide
  Sense strand starting at position 3646 of SEQ ID NO: 1241839
uuuguaaaguaaggaguaa

SEQ ID NO: 1303863 - RNA, 19 nt, Artificial Sequence
  Description of Artificial Sequence: Synthetic oligonucleotide
  Antisense strand to SEQ ID NO: 1303862
uuacuccuuacuuuacaaa

SEQ ID NO: 1303864 - RNA, 19 nt, Artificial Sequence
  Description of Artificial Sequence: Synthetic oligonucleotide
  Sense strand starting at position 3666 of SEQ ID NO: 1241839
gcaguuaucagcugcagaa

SEQ ID NO: 1303865 - RNA, 19 nt, Artificial Sequence
  Description of Artificial Sequence: Synthetic oligonucleotide
  Antisense strand to SEQ ID NO: 1303864
uucugcagcugauaacugc

SEQ ID NO: 1303866 - RNA, 19 nt, Artificial Sequence
  Description of Artificial Sequence: Synthetic oligonucleotide
  Sense strand starting at position 3668 of SEQ ID NO: 1241839
aguuaucagcugcagaauu

SEQ ID NO: 1303867 - RNA, 19 nt, Artificial Sequence
  Description of Artificial Sequence: Synthetic oligonucleotide
  Antisense strand to SEQ ID NO: 1303866
aauucugcagcugauaacu

SEQ ID NO: 1303868 - RNA, 19 nt, Artificial Sequence
  Description of Artificial Sequence: Synthetic oligonucleotide
  Sense strand starting at position 3678 of SEQ ID NO: 1241839
ugcagaauuuacugagacu

SEQ ID NO: 1303869 - RNA, 19 nt, Artificial Sequence
  Description of Artificial Sequence: Synthetic oligonucleotide
  Antisense strand to SEQ ID NO: 1303868
agucucaguaaauucugca

SEQ ID NO: 1303870 - RNA, 19 nt, Artificial Sequence
  Description of Artificial Sequence: Synthetic oligonucleotide
  Sense strand starting at position 3749 of SEQ ID NO: 1241839
cucgguucugggugcgaga

SEQ ID NO: 1303871 - RNA, 19 nt, Artificial Sequence
  Description of Artificial Sequence: Synthetic oligonucleotide
  Antisense strand to SEQ ID NO: 1303870
ucucgcacccagaaccgag

SEQ ID NO: 1303872 - RNA, 19 nt, Artificial Sequence
  Description of Artificial Sequence: Synthetic oligonucleotide
  Sense strand starting at position 3827 of SEQ ID NO: 1241839
gcugaauucuucugcuaaa

SEQ ID NO: 1303873 - RNA, 19 nt, Artificial Sequence
  Description of Artificial Sequence: Synthetic oligonucleotide
  Antisense strand to SEQ ID NO: 1303872
uuuagcagaagaauucagc

SEQ ID NO: 1303874 - RNA, 19 nt, Artificial Sequence
  Description of Artificial Sequence: Synthetic oligonucleotide
  Sense strand starting at position 3853 of SEQ ID NO: 1241839
caacacaguccuuggauga

SEQ ID NO: 1303875 - RNA, 19 nt, Artificial Sequence
  Description of Artificial Sequence: Synthetic oligonucleotide
  Antisense strand to SEQ ID NO: 1303874
ucauccaaggacuguguug

SEQ ID NO: 1303876 - RNA, 19 nt, Artificial Sequence
  Description of Artificial Sequence: Synthetic oligonucleotide
  Sense strand starting at position 3854 of SEQ ID NO: 1241839
aacacaguccuuggaugaa

SEQ ID NO: 1303877 - RNA, 19 nt, Artificial Sequence
  Description of Artificial Sequence: Synthetic oligonucleotide
  Antisense strand to SEQ ID NO: 1303876
uucauccaaggacuguguu

SEQ ID NO: 1303878 - RNA, 19 nt, Artificial Sequence
  Description of Artificial Sequence: Synthetic oligonucleotide
  Sense strand starting at position 3877 of SEQ ID NO: 1241839
uggaguugugggcaggaga

SEQ ID NO: 1303879 - RNA, 19 nt, Artificial Sequence
  Description of Artificial Sequence: Synthetic oligonucleotide
  Antisense strand to SEQ ID NO: 1303878
ucuccugcccacaacucca

SEQ ID NO: 1303880 - RNA, 19 nt, Artificial Sequence
  Description of Artificial Sequence: Synthetic oligonucleotide
  Sense strand starting at position 885 of SEQ ID NO: 1241840
gggauuaucugugccuuag

SEQ ID NO: 1303881 - RNA, 19 nt, Artificial Sequence
  Description of Artificial Sequence: Synthetic oligonucleotide
  Antisense strand to SEQ ID NO: 1303880
cuaaggcacagauaauccc

SEQ ID NO: 1303882 - RNA, 19 nt, Artificial Sequence
  Description of Artificial Sequence: Synthetic oligonucleotide
  Sense strand starting at position 895 of SEQ ID NO: 1241840
gugccuuagcacguucgaa

SEQ ID NO: 1303883 - RNA, 19 nt, Artificial Sequence
  Description of Artificial Sequence: Synthetic oligonucleotide
  Antisense strand to SEQ ID NO: 1303882
uucgaacgugcuaaggcac

SEQ ID NO: 1303884 - RNA, 19 nt, Artificial Sequence
  Description of Artificial Sequence: Synthetic oligonucleotide
  Sense strand starting at position 896 of SEQ ID NO: 1241840
ugccuuagcacguucgaaa

SEQ ID NO: 1303885 - RNA, 19 nt, Artificial Sequence
  Description of Artificial Sequence: Synthetic oligonucleotide
  Antisense strand to SEQ ID NO: 1303884
uuucgaacgugcuaaggca

SEQ ID NO: 1303886 - RNA, 19 nt, Artificial Sequence
  Description of Artificial Sequence: Synthetic oligonucleotide
  Sense strand starting at position 1109 of SEQ ID NO: 1241840
gccucaucacugcaaagaa

SEQ ID NO: 1303887 - RNA, 19 nt, Artificial Sequence
  Description of Artificial Sequence: Synthetic oligonucleotide
  Antisense strand to SEQ ID NO: 1303886
uucuuugcagugaugaggc

SEQ ID NO: 1303888 - RNA, 19 nt, Artificial Sequence
  Description of Artificial Sequence: Synthetic oligonucleotide
  Sense strand starting at position 1355 of SEQ ID NO: 1241840
uuguuaaauccaggaggca

SEQ ID NO: 1303889 - RNA, 19 nt, Artificial Sequence
  Description of Artificial Sequence: Synthetic oligonucleotide
  Antisense strand to SEQ ID NO: 1303888
ugccuccuggauuuaacaa

SEQ ID NO: 1303890 - RNA, 19 nt, Artificial Sequence
  Description of Artificial Sequence: Synthetic oligonucleotide
  Sense strand starting at position 1439 of SEQ ID NO: 1241840
gagggugauuucgccucau

SEQ ID NO: 1303891 - RNA, 19 nt, Artificial Sequence
  Description of Artificial Sequence: Synthetic oligonucleotide
  Antisense strand to SEQ ID NO: 1303890
augaggcgaaaucacccuc

SEQ ID NO: 1303892 - RNA, 19 nt, Artificial Sequence
  Description of Artificial Sequence: Synthetic oligonucleotide
  Sense strand starting at position 1443 of SEQ ID NO: 1241840
gugauuucgccucauucuc

SEQ ID NO: 1303893 - RNA, 19 nt, Artificial Sequence
  Description of Artificial Sequence: Synthetic oligonucleotide
  Antisense strand to SEQ ID NO: 1303892
gagaaugaggcgaaaucac

SEQ ID NO: 1303894 - RNA, 19 nt, Artificial Sequence
  Description of Artificial Sequence: Synthetic oligonucleotide
  Sense strand starting at position 1629 of SEQ ID NO: 1241840
uugccaauucgcuugcagu

SEQ ID NO: 1303895 - RNA, 19 nt, Artificial Sequence
  Description of Artificial Sequence: Synthetic oligonucleotide
  Antisense strand to SEQ ID NO: 1303894
acugcaagcgaauuggcaa

SEQ ID NO: 1303896 - RNA, 19 nt, Artificial Sequence
  Description of Artificial Sequence: Synthetic oligonucleotide
  Sense strand starting at position 2665 of SEQ ID NO: 1241840
ucguauacauaagucagua

SEQ ID NO: 1303897 - RNA, 19 nt, Artificial Sequence
  Description of Artificial Sequence: Synthetic oligonucleotide
  Antisense strand to SEQ ID NO: 1303896
uacugacuuauguauacga

SEQ ID NO: 1303898 - RNA, 19 nt, Artificial Sequence
  Description of Artificial Sequence: Synthetic oligonucleotide
  Sense strand starting at position 2763 of SEQ ID NO: 1241840
cauauuaggucagcuugga

SEQ ID NO: 1303899 - RNA, 19 nt, Artificial Sequence
  Description of Artificial Sequence: Synthetic oligonucleotide
  Antisense strand to SEQ ID NO: 1303898
uccaagcugaccuaauaug

SEQ ID NO: 1303900 - RNA, 19 nt, Artificial Sequence
  Description of Artificial Sequence: Synthetic oligonucleotide
  Sense strand starting at position 2767 of SEQ ID NO: 1241840
uuaggucagcuuggaagaa

SEQ ID NO: 1303901 - RNA, 19 nt, Artificial Sequence
  Description of Artificial Sequence: Synthetic oligonucleotide
  Antisense strand to SEQ ID NO: 1303900
uucuuccaagcugaccuaa

SEQ ID NO: 1303902 - RNA, 19 nt, Artificial Sequence
  Description of Artificial Sequence: Synthetic oligonucleotide
  Sense strand starting at position 2804 of SEQ ID NO: 1241840
ccaagaucuuguuuaggca

SEQ ID NO: 1303903 - RNA, 19 nt, Artificial Sequence
  Description of Artificial Sequence: Synthetic oligonucleotide
  Antisense strand to SEQ ID NO: 1303902
ugccuaaacaagaucuugg

SEQ ID NO: 1303904 - RNA, 19 nt, Artificial Sequence
  Description of Artificial Sequence: Synthetic oligonucleotide
  Sense strand starting at position 2805 of SEQ ID NO: 1241840
caagaucuuguuuaggcaa

SEQ ID NO: 1303905 - RNA, 19 nt, Artificial Sequence
  Description of Artificial Sequence: Synthetic oligonucleotide
  Antisense strand to SEQ ID NO: 1303904
uugccuaaacaagaucuug

SEQ ID NO: 1303906 - RNA, 19 nt, Artificial Sequence
  Description of Artificial Sequence: Synthetic oligonucleotide
  Sense strand starting at position 2812 of SEQ ID NO: 1241840
uuguuuaggcaauaaauga

SEQ ID NO: 1303907 - RNA, 19 nt, Artificial Sequence
  Description of Artificial Sequence: Synthetic oligonucleotide
  Antisense strand to SEQ ID NO: 1303906
ucauuuauugccuaaacaa

SEQ ID NO: 1303908 - RNA, 19 nt, Artificial Sequence
  Description of Artificial Sequence: Synthetic oligonucleotide
  Sense strand starting at position 2846 of SEQ ID NO: 1241840
uaagaaccguugcuagaua

SEQ ID NO: 1303909 - RNA, 19 nt, Artificial Sequence
  Description of Artificial Sequence: Synthetic oligonucleotide
  Antisense strand to SEQ ID NO: 1303908
uaucuagcaacgguucuua

SEQ ID NO: 1303910 - RNA, 19 nt, Artificial Sequence
  Description of Artificial Sequence: Synthetic oligonucleotide
  Sense strand starting at position 2854 of SEQ ID NO: 1241840
guugcuagauauguagaau

SEQ ID NO: 1303911 - RNA, 19 nt, Artificial Sequence
  Description of Artificial Sequence: Synthetic oligonucleotide
  Antisense strand to SEQ ID NO: 1303910
auucuacauaucuagcaac

SEQ ID NO: 1303912 - RNA, 19 nt, Artificial Sequence
  Description of Artificial Sequence: Synthetic oligonucleotide
  Sense strand starting at position 2857 of SEQ ID NO: 1241840
gcuagauauguagaauauu

SEQ ID NO: 1303913 - RNA, 19 nt, Artificial Sequence
  Description of Artificial Sequence: Synthetic oligonucleotide
  Antisense strand to SEQ ID NO: 1303912
aauauucuacauaucuagc

SEQ ID NO: 1303914 - RNA, 19 nt, Artificial Sequence
  Description of Artificial Sequence: Synthetic oligonucleotide
  Sense strand starting at position 2975 of SEQ ID NO: 1241840
auucuaaucguccaccuga

SEQ ID NO: 1303915 - RNA, 19 nt, Artificial Sequence
  Description of Artificial Sequence: Synthetic oligonucleotide
  Antisense strand to SEQ ID NO: 1303914
ucagguggacgauuagaau

SEQ ID NO: 1303916 - RNA, 19 nt, Artificial Sequence
  Description of Artificial Sequence: Synthetic oligonucleotide
  Sense strand starting at position 2980 of SEQ ID NO: 1241840
aaucguccaccugagucau

SEQ ID NO: 1303917 - RNA, 19 nt, Artificial Sequence
  Description of Artificial Sequence: Synthetic oligonucleotide
  Antisense strand to SEQ ID NO: 1303916
augacucagguggacgauu

SEQ ID NO: 1303918 - RNA, 19 nt, Artificial Sequence
  Description of Artificial Sequence: Synthetic oligonucleotide
  Sense strand starting at position 2991 of SEQ ID NO: 1241840
ugagucauucgguucgguu

SEQ ID NO: 1303919 - RNA, 19 nt, Artificial Sequence
  Description of Artificial Sequence: Synthetic oligonucleotide
  Antisense strand to SEQ ID NO: 1303918
aaccgaaccgaaugacuca

SEQ ID NO: 1303920 - RNA, 19 nt, Artificial Sequence
  Description of Artificial Sequence: Synthetic oligonucleotide
  Sense strand starting at position 2992 of SEQ ID NO: 1241840
gagucauucgguucgguuu

SEQ ID NO: 1303921 - RNA, 19 nt, Artificial Sequence
  Description of Artificial Sequence: Synthetic oligonucleotide
  Antisense strand to SEQ ID NO: 1303920
aaaccgaaccgaaugacuc

SEQ ID NO: 1303922 - RNA, 19 nt, Artificial Sequence
  Description of Artificial Sequence: Synthetic oligonucleotide
  Sense strand starting at position 3182 of SEQ ID NO: 1241840
gauuguugucaacgaggac

SEQ ID NO: 1303923 - RNA, 19 nt, Artificial Sequence
  Description of Artificial Sequence: Synthetic oligonucleotide
  Antisense strand to SEQ ID NO: 1303922
guccucguugacaacaauc

SEQ ID NO: 1303924 - RNA, 19 nt, Artificial Sequence
  Description of Artificial Sequence: Synthetic oligonucleotide
  Sense strand starting at position 3183 of SEQ ID NO: 1241840
auuguugucaacgaggaca

SEQ ID NO: 1303925 - RNA, 19 nt, Artificial Sequence
  Description of Artificial Sequence: Synthetic oligonucleotide
  Antisense strand to SEQ ID NO: 1303924
uguccucguugacaacaau

SEQ ID NO: 1303926 - RNA, 19 nt, Artificial Sequence
  Description of Artificial Sequence: Synthetic oligonucleotide
  Sense strand starting at position 3185 of SEQ ID NO: 1241840
uguugucaacgaggacaga

SEQ ID NO: 1303927 - RNA, 19 nt, Artificial Sequence
  Description of Artificial Sequence: Synthetic oligonucleotide
  Antisense strand to SEQ ID NO: 1303926
ucuguccucguugacaaca

SEQ ID NO: 1303928 - RNA, 19 nt, Artificial Sequence
  Description of Artificial Sequence: Synthetic oligonucleotide
  Sense strand starting at position 3186 of SEQ ID NO: 1241840
guugucaacgaggacagau

SEQ ID NO: 1303929 - RNA, 19 nt, Artificial Sequence
  Description of Artificial Sequence: Synthetic oligonucleotide
  Antisense strand to SEQ ID NO: 1303928
aucuguccucguugacaac

SEQ ID NO: 1303930 - RNA, 19 nt, Artificial Sequence
  Description of Artificial Sequence: Synthetic oligonucleotide
  Sense strand starting at position 3290 of SEQ ID NO: 1241840
cuggauacauauguuuauu

SEQ ID NO: 1303931 - RNA, 19 nt, Artificial Sequence
  Description of Artificial Sequence: Synthetic oligonucleotide
  Antisense strand to SEQ ID NO: 1303930
aauaaacauauguauccag

SEQ ID NO: 1303932 - RNA, 19 nt, Artificial Sequence
  Description of Artificial Sequence: Synthetic oligonucleotide
  Sense strand starting at position 3333 of SEQ ID NO: 1241840
gagauaagccaguauguau

SEQ ID NO: 1303933 - RNA, 19 nt, Artificial Sequence
  Description of Artificial Sequence: Synthetic oligonucleotide
  Antisense strand to SEQ ID NO: 1303932
auacauacuggcuuaucuc

SEQ ID NO: 1303934 - RNA, 19 nt, Artificial Sequence
  Description of Artificial Sequence: Synthetic oligonucleotide
  Sense strand starting at position 3588 of SEQ ID NO: 1241840
gucugauguuuacucugau

SEQ ID NO: 1303935 - RNA, 19 nt, Artificial Sequence
  Description of Artificial Sequence: Synthetic oligonucleotide
  Antisense strand to SEQ ID NO: 1303934
aucagaguaaacaucagac

SEQ ID NO: 1303936 - RNA, 19 nt, Artificial Sequence
  Description of Artificial Sequence: Synthetic oligonucleotide
  Sense strand starting at position 3589 of SEQ ID NO: 1241840
ucugauguuuacucugauu

SEQ ID NO: 1303937 - RNA, 19 nt, Artificial Sequence
  Description of Artificial Sequence: Synthetic oligonucleotide
  Antisense strand to SEQ ID NO: 1303936
aaucagaguaaacaucaga

SEQ ID NO: 1303938 - RNA, 19 nt, Artificial Sequence
  Description of Artificial Sequence: Synthetic oligonucleotide
  Sense strand starting at position 3591 of SEQ ID NO: 1241840
ugauguuuacucugauuag

SEQ ID NO: 1303939 - RNA, 19 nt, Artificial Sequence
  Description of Artificial Sequence: Synthetic oligonucleotide
  Antisense strand to SEQ ID NO: 1303938
cuaaucagaguaaacauca

SEQ ID NO: 1303940 - RNA, 19 nt, Artificial Sequence
  Description of Artificial Sequence: Synthetic oligonucleotide
  Sense strand starting at position 3600 of SEQ ID NO: 1241840
cucugauuaggugggaaau

SEQ ID NO: 1303941 - RNA, 19 nt, Artificial Sequence
  Description of Artificial Sequence: Synthetic oligonucleotide
  Antisense strand to SEQ ID NO: 1303940
auuucccaccuaaucagag

SEQ ID NO: 1303942 - RNA, 19 nt, Artificial Sequence
  Description of Artificial Sequence: Synthetic oligonucleotide
  Sense strand starting at position 3601 of SEQ ID NO: 1241840
ucugauuaggugggaaaug

SEQ ID NO: 1303943 - RNA, 19 nt, Artificial Sequence
  Description of Artificial Sequence: Synthetic oligonucleotide
  Antisense strand to SEQ ID NO: 1303942
cauuucccaccuaaucaga

SEQ ID NO: 1303944 - RNA, 19 nt, Artificial Sequence
  Description of Artificial Sequence: Synthetic oligonucleotide
  Sense strand starting at position 3833 of SEQ ID NO: 1241840
uggauaugguguuuaggau

SEQ ID NO: 1303945 - RNA, 19 nt, Artificial Sequence
  Description of Artificial Sequence: Synthetic oligonucleotide
  Antisense strand to SEQ ID NO: 1303944
auccuaaacaccauaucca

SEQ ID NO: 1303946 - RNA, 19 nt, Artificial Sequence
  Description of Artificial Sequence: Synthetic oligonucleotide
  Sense strand starting at position 3834 of SEQ ID NO: 1241840
ggauaugguguuuaggauu

SEQ ID NO: 1303947 - RNA, 19 nt, Artificial Sequence
  Description of Artificial Sequence: Synthetic oligonucleotide
  Antisense strand to SEQ ID NO: 1303946
aauccuaaacaccauaucc

SEQ ID NO: 1303948 - RNA, 19 nt, Artificial Sequence
  Description of Artificial Sequence: Synthetic oligonucleotide
  Sense strand starting at position 3882 of SEQ ID NO: 1241840
gucaauaugguguguauga

SEQ ID NO: 1303949 - RNA, 19 nt, Artificial Sequence
  Description of Artificial Sequence: Synthetic oligonucleotide
  Antisense strand to SEQ ID NO: 1303948
ucauacacaccauauugac

SEQ ID NO: 1303950 - RNA, 19 nt, Artificial Sequence
  Description of Artificial Sequence: Synthetic oligonucleotide
  Sense strand starting at position 3883 of SEQ ID NO: 1241840
ucaauaugguguguaugau

SEQ ID NO: 1303951 - RNA, 19 nt, Artificial Sequence
  Description of Artificial Sequence: Synthetic oligonucleotide
  Antisense strand to SEQ ID NO: 1303950
aucauacacaccauauuga

SEQ ID NO: 1303952 - RNA, 19 nt, Artificial Sequence
  Description of Artificial Sequence: Synthetic oligonucleotide
  Sense strand starting at position 3884 of SEQ ID NO: 1241840
caauaugguguguaugauc

SEQ ID NO: 1303953 - RNA, 19 nt, Artificial Sequence
  Description of Artificial Sequence: Synthetic oligonucleotide
  Antisense strand to SEQ ID NO: 1303952
gaucauacacaccauauug

SEQ ID NO: 1303954 - RNA, 19 nt, Artificial Sequence
  Description of Artificial Sequence: Synthetic oligonucleotide
  Sense strand starting at position 3895 of SEQ ID NO: 1241840
guaugaucuguguaacaua

SEQ ID NO: 1303955 - RNA, 19 nt, Artificial Sequence
  Description of Artificial Sequence: Synthetic oligonucleotide
  Antisense strand to SEQ ID NO: 1303954
uauguuacacagaucauac

SEQ ID NO: 1303956 - RNA, 19 nt, Artificial Sequence
  Description of Artificial Sequence: Synthetic oligonucleotide
  Sense strand starting at position 3900 of SEQ ID NO: 1241840
aucuguguaacauaggagu

SEQ ID NO: 1303957 - RNA, 19 nt, Artificial Sequence
  Description of Artificial Sequence: Synthetic oligonucleotide
  Antisense strand to SEQ ID NO: 1303956
acuccuauguuacacagau

SEQ ID NO: 1303958 - RNA, 19 nt, Artificial Sequence
  Description of Artificial Sequence: Synthetic oligonucleotide
  Sense strand starting at position 3931 of SEQ ID NO: 1241840
guucucuuugaugguaaau

SEQ ID NO: 1303959 - RNA, 19 nt, Artificial Sequence
  Description of Artificial Sequence: Synthetic oligonucleotide
  Antisense strand to SEQ ID NO: 1303958
auuuaccaucaaagagaac

SEQ ID NO: 1303960 - RNA, 19 nt, Artificial Sequence
  Description of Artificial Sequence: Synthetic oligonucleotide
  Sense strand starting at position 116 of SEQ ID NO: 1241841
agaacuuguuagccaggga

SEQ ID NO: 1303961 - RNA, 19 nt, Artificial Sequence
  Description of Artificial Sequence: Synthetic oligonucleotide
  Antisense strand to SEQ ID NO: 1303960
ucccuggcuaacaaguucu

SEQ ID NO: 1303962 - RNA, 19 nt, Artificial Sequence
  Description of Artificial Sequence: Synthetic oligonucleotide
  Sense strand starting at position 262 of SEQ ID NO: 1241841
gcugccagccuaugugaau

SEQ ID NO: 1303963 - RNA, 19 nt, Artificial Sequence
  Description of Artificial Sequence: Synthetic oligonucleotide
  Antisense strand to SEQ ID NO: 1303962
auucacauaggcuggcagc

SEQ ID NO: 1303964 - RNA, 19 nt, Artificial Sequence
  Description of Artificial Sequence: Synthetic oligonucleotide
  Sense strand starting at position 263 of SEQ ID NO: 1241841
cugccagccuaugugaaua

SEQ ID NO: 1303965 - RNA, 19 nt, Artificial Sequence
  Description of Artificial Sequence: Synthetic oligonucleotide
  Antisense strand to SEQ ID NO: 1303964
uauucacauaggcuggcag

SEQ ID NO: 1303966 - RNA, 19 nt, Artificial Sequence
  Description of Artificial Sequence: Synthetic oligonucleotide
  Sense strand starting at position 467 of SEQ ID NO: 1241841
auacaauucuuacagcgau

SEQ ID NO: 1303967 - RNA, 19 nt, Artificial Sequence
  Description of Artificial Sequence: Synthetic oligonucleotide
  Antisense strand to SEQ ID NO: 1303966
aucgcuguaagaauuguau

SEQ ID NO: 1303968 - RNA, 19 nt, Artificial Sequence
  Description of Artificial Sequence: Synthetic oligonucleotide
  Sense strand starting at position 534 of SEQ ID NO: 1241841
gcguguaacgaaggucuca

SEQ ID NO: 1303969 - RNA, 19 nt, Artificial Sequence
  Description of Artificial Sequence: Synthetic oligonucleotide
  Antisense strand to SEQ ID NO: 1303968
ugagaccuucguuacacgc

SEQ ID NO: 1303970 - RNA, 19 nt, Artificial Sequence
  Description of Artificial Sequence: Synthetic oligonucleotide
  Sense strand starting at position 811 of SEQ ID NO: 1241841
ccagccuuccugugggaca

SEQ ID NO: 1303971 - RNA, 19 nt, Artificial Sequence
  Description of Artificial Sequence: Synthetic oligonucleotide
  Antisense strand to SEQ ID NO: 1303970
ugucccacaggaaggcugg

SEQ ID NO: 1303972 - RNA, 19 nt, Artificial Sequence
  Description of Artificial Sequence: Synthetic oligonucleotide
  Sense strand starting at position 968 of SEQ ID NO: 1241841
cguuuagagacucagggau

SEQ ID NO: 1303973 - RNA, 19 nt, Artificial Sequence
  Description of Artificial Sequence: Synthetic oligonucleotide
  Antisense strand to SEQ ID NO: 1303972
aucccugagucucuaaacg

SEQ ID NO: 1303974 - RNA, 19 nt, Artificial Sequence
  Description of Artificial Sequence: Synthetic oligonucleotide
  Sense strand starting at position 970 of SEQ ID NO: 1241841
uuuagagacucagggauga

SEQ ID NO: 1303975 - RNA, 19 nt, Artificial Sequence
  Description of Artificial Sequence: Synthetic oligonucleotide
  Antisense strand to SEQ ID NO: 1303974
ucaucccugagucucuaaa

SEQ ID NO: 1303976 - RNA, 19 nt, Artificial Sequence
  Description of Artificial Sequence: Synthetic oligonucleotide
  Sense strand starting at position 1227 of SEQ ID NO: 1241841
ccaagaguggauugcaaug

SEQ ID NO: 1303977 - RNA, 19 nt, Artificial Sequence
  Description of Artificial Sequence: Synthetic oligonucleotide
  Antisense strand to SEQ ID NO: 1303976
cauugcaauccacucuugg

SEQ ID NO: 1303978 - RNA, 19 nt, Artificial Sequence
  Description of Artificial Sequence: Synthetic oligonucleotide
  Sense strand starting at position 1333 of SEQ ID NO: 1241841
gcaucuuggccggguugua

SEQ ID NO: 1303979 - RNA, 19 nt, Artificial Sequence
  Description of Artificial Sequence: Synthetic oligonucleotide
  Antisense strand to SEQ ID NO: 1303978
uacaacccggccaagaugc

SEQ ID NO: 1303980 - RNA, 19 nt, Artificial Sequence
  Description of Artificial Sequence: Synthetic oligonucleotide
  Sense strand starting at position 1444 of SEQ ID NO: 1241841
aggagcgagaucuaagguu

SEQ ID NO: 1303981 - RNA, 19 nt, Artificial Sequence
  Description of Artificial Sequence: Synthetic oligonucleotide
  Antisense strand to SEQ ID NO: 1303980
aaccuuagaucucgcuccu

SEQ ID NO: 1303982 - RNA, 19 nt, Artificial Sequence
  Description of Artificial Sequence: Synthetic oligonucleotide
  Sense strand starting at position 1778 of SEQ ID NO: 1241841
aguuuacccaucugggaag

SEQ ID NO: 1303983 - RNA, 19 nt, Artificial Sequence
  Description of Artificial Sequence: Synthetic oligonucleotide
  Antisense strand to SEQ ID NO: 1303982
cuucccagauggguaaacu

SEQ ID NO: 1303984 - RNA, 19 nt, Artificial Sequence
  Description of Artificial Sequence: Synthetic oligonucleotide
  Sense strand starting at position 2434 of SEQ ID NO: 1241841
ugggacucguaguucagaa

SEQ ID NO: 1303985 - RNA, 19 nt, Artificial Sequence
  Description of Artificial Sequence: Synthetic oligonucleotide
  Antisense strand to SEQ ID NO: 1303984
uucugaacuacgaguccca

SEQ ID NO: 1303986 - RNA, 19 nt, Artificial Sequence
  Description of Artificial Sequence: Synthetic oligonucleotide
  Sense strand starting at position 2719 of SEQ ID NO: 1241841
auguaaggcucgucucgaa

SEQ ID NO: 1303987 - RNA, 19 nt, Artificial Sequence
  Description of Artificial Sequence: Synthetic oligonucleotide
  Antisense strand to SEQ ID NO: 1303986
uucgagacgagccuuacau

SEQ ID NO: 1303988 - RNA, 19 nt, Artificial Sequence
  Description of Artificial Sequence: Synthetic oligonucleotide
  Sense strand starting at position 2826 of SEQ ID NO: 1241841
ucuugauccugcuugcaga

SEQ ID NO: 1303989 - RNA, 19 nt, Artificial Sequence
  Description of Artificial Sequence: Synthetic oligonucleotide
  Antisense strand to SEQ ID NO: 1303988
ucugcaagcaggaucaaga

SEQ ID NO: 1303990 - RNA, 19 nt, Artificial Sequence
  Description of Artificial Sequence: Synthetic oligonucleotide
  Sense strand starting at position 2906 of SEQ ID NO: 1241841
ggcgguaccagauaauauu

SEQ ID NO: 1303991 - RNA, 19 nt, Artificial Sequence
  Description of Artificial Sequence: Synthetic oligonucleotide
  Antisense strand to SEQ ID NO: 1303990
aauauuaucugguaccgcc

SEQ ID NO: 1303992 - RNA, 19 nt, Artificial Sequence
  Description of Artificial Sequence: Synthetic oligonucleotide
  Sense strand starting at position 3223 of SEQ ID NO: 1241841
gugagcaucuuugugauua

SEQ ID NO: 1303993 - RNA, 19 nt, Artificial Sequence
  Description of Artificial Sequence: Synthetic oligonucleotide
  Antisense strand to SEQ ID NO: 1303992
uaaucacaaagaugcucac

SEQ ID NO: 1303994 - RNA, 19 nt, Artificial Sequence
  Description of Artificial Sequence: Synthetic oligonucleotide
  Sense strand starting at position 3224 of SEQ ID NO: 1241841
ugagcaucuuugugauuac

SEQ ID NO: 1303995 - RNA, 19 nt, Artificial Sequence
  Description of Artificial Sequence: Synthetic oligonucleotide
  Antisense strand to SEQ ID NO: 1303994
guaaucacaaagaugcuca

SEQ ID NO: 1303996 - RNA, 19 nt, Artificial Sequence
  Description of Artificial Sequence: Synthetic oligonucleotide
  Sense strand starting at position 3225 of SEQ ID NO: 1241841
gagcaucuuugugauuaca

SEQ ID NO: 1303997 - RNA, 19 nt, Artificial Sequence
  Description of Artificial Sequence: Synthetic oligonucleotide
  Antisense strand to SEQ ID NO: 1303996
uguaaucacaaagaugcuc

SEQ ID NO: 1303998 - RNA, 19 nt, Artificial Sequence
  Description of Artificial Sequence: Synthetic oligonucleotide
  Sense strand starting at position 3227 of SEQ ID NO: 1241841
gcaucuuugugauuacauc

SEQ ID NO: 1303999 - RNA, 19 nt, Artificial Sequence
  Description of Artificial Sequence: Synthetic oligonucleotide
  Antisense strand to SEQ ID NO: 1303998
gauguaaucacaaagaugc

SEQ ID NO: 1304000 - RNA, 19 nt, Artificial Sequence
  Description of Artificial Sequence: Synthetic oligonucleotide
  Sense strand starting at position 3234 of SEQ ID NO: 1241841
ugugauuacaucgggccua

SEQ ID NO: 1304001 - RNA, 19 nt, Artificial Sequence
  Description of Artificial Sequence: Synthetic oligonucleotide
  Antisense strand to SEQ ID NO: 1304000
uaggcccgauguaaucaca

SEQ ID NO: 1304002 - RNA, 19 nt, Artificial Sequence
  Description of Artificial Sequence: Synthetic oligonucleotide
  Sense strand starting at position 3355 of SEQ ID NO: 1241841
cacagauucugggcauuag

SEQ ID NO: 1304003 - RNA, 19 nt, Artificial Sequence
  Description of Artificial Sequence: Synthetic oligonucleotide
  Antisense strand to SEQ ID NO: 1304002
cuaaugcccagaaucugug

SEQ ID NO: 1304004 - RNA, 19 nt, Artificial Sequence
  Description of Artificial Sequence: Synthetic oligonucleotide
  Sense strand starting at position 3397 of SEQ ID NO: 1241841
aggauaugauuaugucuac

SEQ ID NO: 1304005 - RNA, 19 nt, Artificial Sequence
  Description of Artificial Sequence: Synthetic oligonucleotide
  Antisense strand to SEQ ID NO: 1304004
guagacauaaucauauccu

SEQ ID NO: 1304006 - RNA, 19 nt, Artificial Sequence
  Description of Artificial Sequence: Synthetic oligonucleotide
  Sense strand starting at position 3400 of SEQ ID NO: 1241841
auaugauuaugucuaccac

SEQ ID NO: 1304007 - RNA, 19 nt, Artificial Sequence
  Description of Artificial Sequence: Synthetic oligonucleotide
  Antisense strand to SEQ ID NO: 1304006
gugguagacauaaucauau

SEQ ID NO: 1304008 - RNA, 19 nt, Artificial Sequence
  Description of Artificial Sequence: Synthetic oligonucleotide
  Sense strand starting at position 3472 of SEQ ID NO: 1241841
ccuuauccaugauuggaau

SEQ ID NO: 1304009 - RNA, 19 nt, Artificial Sequence
  Description of Artificial Sequence: Synthetic oligonucleotide
  Antisense strand to SEQ ID NO: 1304008
auuccaaucauggauaagg

SEQ ID NO: 1304010 - RNA, 19 nt, Artificial Sequence
  Description of Artificial Sequence: Synthetic oligonucleotide
  Sense strand starting at position 3484 of SEQ ID NO: 1241841
uuggaauccuugggacagu

SEQ ID NO: 1304011 - RNA, 19 nt, Artificial Sequence
  Description of Artificial Sequence: Synthetic oligonucleotide
  Antisense strand to SEQ ID NO: 1304010
acugucccaaggauuccaa

SEQ ID NO: 1304012 - RNA, 19 nt, Artificial Sequence
  Description of Artificial Sequence: Synthetic oligonucleotide
  Sense strand starting at position 3485 of SEQ ID NO: 1241841
uggaauccuugggacaguu

SEQ ID NO: 1304013 - RNA, 19 nt, Artificial Sequence
  Description of Artificial Sequence: Synthetic oligonucleotide
  Antisense strand to SEQ ID NO: 1304012
aacugucccaaggauucca

SEQ ID NO: 1304014 - RNA, 19 nt, Artificial Sequence
  Description of Artificial Sequence: Synthetic oligonucleotide
  Sense strand starting at position 3511 of SEQ ID NO: 1241841
ugcacugcaugguccaaau

SEQ ID NO: 1304015 - RNA, 19 nt, Artificial Sequence
  Description of Artificial Sequence: Synthetic oligonucleotide
  Antisense strand to SEQ ID NO: 1304014
auuuggaccaugcagugca

SEQ ID NO: 1304016 - RNA, 19 nt, Artificial Sequence
  Description of Artificial Sequence: Synthetic oligonucleotide
  Sense strand starting at position 3527 of SEQ ID NO: 1241841
aauugauggcuuugugacu

SEQ ID NO: 1304017 - RNA, 19 nt, Artificial Sequence
  Description of Artificial Sequence: Synthetic oligonucleotide
  Antisense strand to SEQ ID NO: 1304016
agucacaaagccaucaauu

SEQ ID NO: 1304018 - RNA, 19 nt, Artificial Sequence
  Description of Artificial Sequence: Synthetic oligonucleotide
  Sense strand starting at position 3670 of SEQ ID NO: 1241841
ucacaaacauaucggaaua

SEQ ID NO: 1304019 - RNA, 19 nt, Artificial Sequence
  Description of Artificial Sequence: Synthetic oligonucleotide
  Antisense strand to SEQ ID NO: 1304018
uauuccgauauguuuguga

SEQ ID NO: 1304020 - RNA, 19 nt, Artificial Sequence
  Description of Artificial Sequence: Synthetic oligonucleotide
  Sense strand starting at position 3672 of SEQ ID NO: 1241841
acaaacauaucggaauaua

SEQ ID NO: 1304021 - RNA, 19 nt, Artificial Sequence
  Description of Artificial Sequence: Synthetic oligonucleotide
  Antisense strand to SEQ ID NO: 1304020
uauauuccgauauguuugu

SEQ ID NO: 1304022 - RNA, 19 nt, Artificial Sequence
  Description of Artificial Sequence: Synthetic oligonucleotide
  Sense strand starting at position 3683 of SEQ ID NO: 1241841
ggaauauagaauugugugu

SEQ ID NO: 1304023 - RNA, 19 nt, Artificial Sequence
  Description of Artificial Sequence: Synthetic oligonucleotide
  Antisense strand to SEQ ID NO: 1304022
acacacaauucuauauucc

SEQ ID NO: 1304024 - RNA, 19 nt, Artificial Sequence
  Description of Artificial Sequence: Synthetic oligonucleotide
  Sense strand starting at position 3689 of SEQ ID NO: 1241841
uagaauuguguguaaagua

SEQ ID NO: 1304025 - RNA, 19 nt, Artificial Sequence
  Description of Artificial Sequence: Synthetic oligonucleotide
  Antisense strand to SEQ ID NO: 1304024
uacuuuacacacaauucua

SEQ ID NO: 1304026 - RNA, 19 nt, Artificial Sequence
  Description of Artificial Sequence: Synthetic oligonucleotide
  Sense strand starting at position 3709 of SEQ ID NO: 1241841
gaguaaguaggcugugagu

SEQ ID NO: 1304027 - RNA, 19 nt, Artificial Sequence
  Description of Artificial Sequence: Synthetic oligonucleotide
  Antisense strand to SEQ ID NO: 1304026
acucacagccuacuuacuc

SEQ ID NO: 1304028 - RNA, 19 nt, Artificial Sequence
  Description of Artificial Sequence: Synthetic oligonucleotide
  Sense strand starting at position 3711 of SEQ ID NO: 1241841
guaaguaggcugugaguga

SEQ ID NO: 1304029 - RNA, 19 nt, Artificial Sequence
  Description of Artificial Sequence: Synthetic oligonucleotide
  Antisense strand to SEQ ID NO: 1304028
ucacucacagccuacuuac

SEQ ID NO: 1304030 - RNA, 19 nt, Artificial Sequence
  Description of Artificial Sequence: Synthetic oligonucleotide
  Sense strand starting at position 3764 of SEQ ID NO: 1241841
cagucucaugcaugucuga

SEQ ID NO: 1304031 - RNA, 19 nt, Artificial Sequence
  Description of Artificial Sequence: Synthetic oligonucleotide
  Antisense strand to SEQ ID NO: 1304030
ucagacaugcaugagacug

SEQ ID NO: 1304032 - RNA, 19 nt, Artificial Sequence
  Description of Artificial Sequence: Synthetic oligonucleotide
  Sense strand starting at position 3777 of SEQ ID NO: 1241841
gucugacucucuccacuau

SEQ ID NO: 1304033 - RNA, 19 nt, Artificial Sequence
  Description of Artificial Sequence: Synthetic oligonucleotide
  Antisense strand to SEQ ID NO: 1304032
auaguggagagagucagac

SEQ ID NO: 1304034 - RNA, 19 nt, Artificial Sequence
  Description of Artificial Sequence: Synthetic oligonucleotide
  Sense strand starting at position 3803 of SEQ ID NO: 1241841
ggcauaaucuccuccaugu

SEQ ID NO: 1304035 - RNA, 19 nt, Artificial Sequence
  Description of Artificial Sequence: Synthetic oligonucleotide
  Antisense strand to SEQ ID NO: 1304034
acauggaggagauuaugcc

SEQ ID NO: 1304036 - RNA, 19 nt, Artificial Sequence
  Description of Artificial Sequence: Synthetic oligonucleotide
  Sense strand starting at position 3917 of SEQ ID NO: 1241841
gaguaaagauccugcugug

SEQ ID NO: 1304037 - RNA, 19 nt, Artificial Sequence
  Description of Artificial Sequence: Synthetic oligonucleotide
  Antisense strand to SEQ ID NO: 1304036
cacagcaggaucuuuacuc

SEQ ID NO: 1304038 - RNA, 19 nt, Artificial Sequence
  Description of Artificial Sequence: Synthetic oligonucleotide
  Sense strand starting at position 3920 of SEQ ID NO: 1241841
uaaagauccugcuguggca

SEQ ID NO: 1304039 - RNA, 19 nt, Artificial Sequence
  Description of Artificial Sequence: Synthetic oligonucleotide
  Antisense strand to SEQ ID NO: 1304038
ugccacagcaggaucuuua

SEQ ID NO: 1304040 - RNA, 19 nt, Artificial Sequence
  Description of Artificial Sequence: Synthetic oligonucleotide
  Sense strand starting at position 82 of SEQ ID NO: 1241842
uauagaucuguuuagguga

SEQ ID NO: 1304041 - RNA, 19 nt, Artificial Sequence
  Description of Artificial Sequence: Synthetic oligonucleotide
  Antisense strand to SEQ ID NO: 1304040
ucaccuaaacagaucuaua

SEQ ID NO: 1304042 - RNA, 19 nt, Artificial Sequence
  Description of Artificial Sequence: Synthetic oligonucleotide
  Sense strand starting at position 369 of SEQ ID NO: 1241842
gaaggaaugcagcguaacu

SEQ ID NO: 1304043 - RNA, 19 nt, Artificial Sequence
  Description of Artificial Sequence: Synthetic oligonucleotide
  Antisense strand to SEQ ID NO: 1304042
aguuacgcugcauuccuuc

SEQ ID NO: 1304044 - RNA, 19 nt, Artificial Sequence
  Description of Artificial Sequence: Synthetic oligonucleotide
  Sense strand starting at position 405 of SEQ ID NO: 1241842
uguuguaaugcgucacgga

SEQ ID NO: 1304045 - RNA, 19 nt, Artificial Sequence
  Description of Artificial Sequence: Synthetic oligonucleotide
  Antisense strand to SEQ ID NO: 1304044
uccgugacgcauuacaaca

SEQ ID NO: 1304046 - RNA, 19 nt, Artificial Sequence
  Description of Artificial Sequence: Synthetic oligonucleotide
  Sense strand starting at position 406 of SEQ ID NO: 1241842
guuguaaugcgucacggaa

SEQ ID NO: 1304047 - RNA, 19 nt, Artificial Sequence
  Description of Artificial Sequence: Synthetic oligonucleotide
  Antisense strand to SEQ ID NO: 1304046
uuccgugacgcauuacaac

SEQ ID NO: 1304048 - RNA, 19 nt, Artificial Sequence
  Description of Artificial Sequence: Synthetic oligonucleotide
  Sense strand starting at position 430 of SEQ ID NO: 1241842
agaagagcgucucuaagga

SEQ ID NO: 1304049 - RNA, 19 nt, Artificial Sequence
  Description of Artificial Sequence: Synthetic oligonucleotide
  Antisense strand to SEQ ID NO: 1304048
uccuuagagacgcucuucu

SEQ ID NO: 1304050 - RNA, 19 nt, Artificial Sequence
  Description of Artificial Sequence: Synthetic oligonucleotide
  Sense strand starting at position 630 of SEQ ID NO: 1241842
ucaggcagugcauguuaaa

SEQ ID NO: 1304051 - RNA, 19 nt, Artificial Sequence
  Description of Artificial Sequence: Synthetic oligonucleotide
  Antisense strand to SEQ ID NO: 1304050
uuuaacaugcacugccuga

SEQ ID NO: 1304052 - RNA, 19 nt, Artificial Sequence
  Description of Artificial Sequence: Synthetic oligonucleotide
  Sense strand starting at position 694 of SEQ ID NO: 1241842
acuguuucagugggaaagu

SEQ ID NO: 1304053 - RNA, 19 nt, Artificial Sequence
  Description of Artificial Sequence: Synthetic oligonucleotide
  Antisense strand to SEQ ID NO: 1304052
acuuucccacugaaacagu

SEQ ID NO: 1304054 - RNA, 19 nt, Artificial Sequence
  Description of Artificial Sequence: Synthetic oligonucleotide
  Sense strand starting at position 817 of SEQ ID NO: 1241842
aacuuaagguucuugguaa

SEQ ID NO: 1304055 - RNA, 19 nt, Artificial Sequence
  Description of Artificial Sequence: Synthetic oligonucleotide
  Antisense strand to SEQ ID NO: 1304054
uuaccaagaaccuuaaguu

SEQ ID NO: 1304056 - RNA, 19 nt, Artificial Sequence
  Description of Artificial Sequence: Synthetic oligonucleotide
  Sense strand starting at position 904 of SEQ ID NO: 1241842
acggcaaucuuacuacaaa

SEQ ID NO: 1304057 - RNA, 19 nt, Artificial Sequence
  Description of Artificial Sequence: Synthetic oligonucleotide
  Antisense strand to SEQ ID NO: 1304056
uuuguaguaagauugccgu

SEQ ID NO: 1304058 - RNA, 19 nt, Artificial Sequence
  Description of Artificial Sequence: Synthetic oligonucleotide
  Sense strand starting at position 1059 of SEQ ID NO: 1241842
ugaggaaacuuaucugugu

SEQ ID NO: 1304059 - RNA, 19 nt, Artificial Sequence
  Description of Artificial Sequence: Synthetic oligonucleotide
  Antisense strand to SEQ ID NO: 1304058
acacagauaaguuuccuca

SEQ ID NO: 1304060 - RNA, 19 nt, Artificial Sequence
  Description of Artificial Sequence: Synthetic oligonucleotide
  Sense strand starting at position 1060 of SEQ ID NO: 1241842
gaggaaacuuaucuguguu

SEQ ID NO: 1304061 - RNA, 19 nt, Artificial Sequence
  Description of Artificial Sequence: Synthetic oligonucleotide
  Antisense strand to SEQ ID NO: 1304060
aacacagauaaguuuccuc

SEQ ID NO: 1304062 - RNA, 19 nt, Artificial Sequence
  Description of Artificial Sequence: Synthetic oligonucleotide
  Sense strand starting at position 1195 of SEQ ID NO: 1241842
cucucaguuccugacucau

SEQ ID NO: 1304063 - RNA, 19 nt, Artificial Sequence
  Description of Artificial Sequence: Synthetic oligonucleotide
  Antisense strand to SEQ ID NO: 1304062
augagucaggaacugagag

SEQ ID NO: 1304064 - RNA, 19 nt, Artificial Sequence
  Description of Artificial Sequence: Synthetic oligonucleotide
  Sense strand starting at position 1299 of SEQ ID NO: 1241842
gcgggaaacucuccgggua

SEQ ID NO: 1304065 - RNA, 19 nt, Artificial Sequence
  Description of Artificial Sequence: Synthetic oligonucleotide
  Antisense strand to SEQ ID NO: 1304064
uacccggagaguuucccgc

SEQ ID NO: 1304066 - RNA, 19 nt, Artificial Sequence
  Description of Artificial Sequence: Synthetic oligonucleotide
  Sense strand starting at position 1328 of SEQ ID NO: 1241842
cgaaguugcuaugcuacaa

SEQ ID NO: 1304067 - RNA, 19 nt, Artificial Sequence
  Description of Artificial Sequence: Synthetic oligonucleotide
  Antisense strand to SEQ ID NO: 1304066
uuguagcauagcaacuucg

SEQ ID NO: 1304068 - RNA, 19 nt, Artificial Sequence
  Description of Artificial Sequence: Synthetic oligonucleotide
  Sense strand starting at position 1332 of SEQ ID NO: 1241842
guugcuaugcuacaagaua

SEQ ID NO: 1304069 - RNA, 19 nt, Artificial Sequence
  Description of Artificial Sequence: Synthetic oligonucleotide
  Antisense strand to SEQ ID NO: 1304068
uaucuuguagcauagcaac

SEQ ID NO: 1304070 - RNA, 19 nt, Artificial Sequence
  Description of Artificial Sequence: Synthetic oligonucleotide
  Sense strand starting at position 1486 of SEQ ID NO: 1241842
guuuguuucgaguacagua

SEQ ID NO: 1304071 - RNA, 19 nt, Artificial Sequence
  Description of Artificial Sequence: Synthetic oligonucleotide
  Antisense strand to SEQ ID NO: 1304070
uacuguacucgaaacaaac

SEQ ID NO: 1304072 - RNA, 19 nt, Artificial Sequence
  Description of Artificial Sequence: Synthetic oligonucleotide
  Sense strand starting at position 1491 of SEQ ID NO: 1241842
uuucgaguacaguaacuua

SEQ ID NO: 1304073 - RNA, 19 nt, Artificial Sequence
  Description of Artificial Sequence: Synthetic oligonucleotide
  Antisense strand to SEQ ID NO: 1304072
uaaguuacuguacucgaaa

SEQ ID NO: 1304074 - RNA, 19 nt, Artificial Sequence
  Description of Artificial Sequence: Synthetic oligonucleotide
  Sense strand starting at position 2207 of SEQ ID NO: 1241842
ggcccugcccuccgagaaa

SEQ ID NO: 1304075 - RNA, 19 nt, Artificial Sequence
  Description of Artificial Sequence: Synthetic oligonucleotide
  Antisense strand to SEQ ID NO: 1304074
uuucucggagggcagggcc

SEQ ID NO: 1304076 - RNA, 19 nt, Artificial Sequence
  Description of Artificial Sequence: Synthetic oligonucleotide
  Sense strand starting at position 2317 of SEQ ID NO: 1241842
cucggcuuggguuaauaaa

SEQ ID NO: 1304077 - RNA, 19 nt, Artificial Sequence
  Description of Artificial Sequence: Synthetic oligonucleotide
  Antisense strand to SEQ ID NO: 1304076
uuuauuaacccaagccgag

SEQ ID NO: 1304078 - RNA, 19 nt, Artificial Sequence
  Description of Artificial Sequence: Synthetic oligonucleotide
  Sense strand starting at position 2336 of SEQ ID NO: 1241842
uuaacaagacuuuaguagu

SEQ ID NO: 1304079 - RNA, 19 nt, Artificial Sequence
  Description of Artificial Sequence: Synthetic oligonucleotide
  Antisense strand to SEQ ID NO: 1304078
acuacuaaagucuuguuaa

SEQ ID NO: 1304080 - RNA, 19 nt, Artificial Sequence
  Description of Artificial Sequence: Synthetic oligonucleotide
  Sense strand starting at position 2352 of SEQ ID NO: 1241842
aguagacucugggcuugau

SEQ ID NO: 1304081 - RNA, 19 nt, Artificial Sequence
  Description of Artificial Sequence: Synthetic oligonucleotide
  Antisense strand to SEQ ID NO: 1304080
aucaagcccagagucuacu

SEQ ID NO: 1304082 - RNA, 19 nt, Artificial Sequence
  Description of Artificial Sequence: Synthetic oligonucleotide
  Sense strand starting at position 2355 of SEQ ID NO: 1241842
agacucugggcuugauuaa

SEQ ID NO: 1304083 - RNA, 19 nt, Artificial Sequence
  Description of Artificial Sequence: Synthetic oligonucleotide
  Antisense strand to SEQ ID NO: 1304082
uuaaucaagcccagagucu

SEQ ID NO: 1304084 - RNA, 19 nt, Artificial Sequence
  Description of Artificial Sequence: Synthetic oligonucleotide
  Sense strand starting at position 2356 of SEQ ID NO: 1241842
gacucugggcuugauuaag

SEQ ID NO: 1304085 - RNA, 19 nt, Artificial Sequence
  Description of Artificial Sequence: Synthetic oligonucleotide
  Antisense strand to SEQ ID NO: 1304084
cuuaaucaagcccagaguc

SEQ ID NO: 1304086 - RNA, 19 nt, Artificial Sequence
  Description of Artificial Sequence: Synthetic oligonucleotide
  Sense strand starting at position 2403 of SEQ ID NO: 1241842
gcguuaaugcaauggagga

SEQ ID NO: 1304087 - RNA, 19 nt, Artificial Sequence
  Description of Artificial Sequence: Synthetic oligonucleotide
  Antisense strand to SEQ ID NO: 1304086
uccuccauugcauuaacgc

SEQ ID NO: 1304088 - RNA, 19 nt, Artificial Sequence
  Description of Artificial Sequence: Synthetic oligonucleotide
  Sense strand starting at position 2404 of SEQ ID NO: 1241842
cguuaaugcaauggaggaa

SEQ ID NO: 1304089 - RNA, 19 nt, Artificial Sequence
  Description of Artificial Sequence: Synthetic oligonucleotide
  Antisense strand to SEQ ID NO: 1304088
uuccuccauugcauuaacg

SEQ ID NO: 1304090 - RNA, 19 nt, Artificial Sequence
  Description of Artificial Sequence: Synthetic oligonucleotide
  Sense strand starting at position 2498 of SEQ ID NO: 1241842
gcaaacaugucagcuuaac

SEQ ID NO: 1304091 - RNA, 19 nt, Artificial Sequence
  Description of Artificial Sequence: Synthetic oligonucleotide
  Antisense strand to SEQ ID NO: 1304090
guuaagcugacauguuugc

SEQ ID NO: 1304092 - RNA, 19 nt, Artificial Sequence
  Description of Artificial Sequence: Synthetic oligonucleotide
  Sense strand starting at position 2778 of SEQ ID NO: 1241842
agcuuugaacccggaguuu

SEQ ID NO: 1304093 - RNA, 19 nt, Artificial Sequence
  Description of Artificial Sequence: Synthetic oligonucleotide
  Antisense strand to SEQ ID NO: 1304092
aaacuccggguucaaagcu

SEQ ID NO: 1304094 - RNA, 19 nt, Artificial Sequence
  Description of Artificial Sequence: Synthetic oligonucleotide
  Sense strand starting at position 3350 of SEQ ID NO: 1241842
cuauuuguuguaugugaga

SEQ ID NO: 1304095 - RNA, 19 nt, Artificial Sequence
  Description of Artificial Sequence: Synthetic oligonucleotide
  Antisense strand to SEQ ID NO: 1304094
ucucacauacaacaaauag

SEQ ID NO: 1304096 - RNA, 19 nt, Artificial Sequence
  Description of Artificial Sequence: Synthetic oligonucleotide
  Sense strand starting at position 3371 of SEQ ID NO: 1241842
acgcaaauacuguauucga

SEQ ID NO: 1304097 - RNA, 19 nt, Artificial Sequence
  Description of Artificial Sequence: Synthetic oligonucleotide
  Antisense strand to SEQ ID NO: 1304096
ucgaauacaguauuugcgu

SEQ ID NO: 1304098 - RNA, 19 nt, Artificial Sequence
  Description of Artificial Sequence: Synthetic oligonucleotide
  Sense strand starting at position 3382 of SEQ ID NO: 1241842
guauucgaaccucaaacua

SEQ ID NO: 1304099 - RNA, 19 nt, Artificial Sequence
  Description of Artificial Sequence: Synthetic oligonucleotide
  Antisense strand to SEQ ID NO: 1304098
uaguuugagguucgaauac

SEQ ID NO: 1304100 - RNA, 19 nt, Artificial Sequence
  Description of Artificial Sequence: Synthetic oligonucleotide
  Sense strand starting at position 3544 of SEQ ID NO: 1241842
uuuccauuugagcgucaau

SEQ ID NO: 1304101 - RNA, 19 nt, Artificial Sequence
  Description of Artificial Sequence: Synthetic oligonucleotide
  Antisense strand to SEQ ID NO: 1304100
auugacgcucaaauggaaa

SEQ ID NO: 1304102 - RNA, 19 nt, Artificial Sequence
  Description of Artificial Sequence: Synthetic oligonucleotide
  Sense strand starting at position 3704 of SEQ ID NO: 1241842
cgaggaauuauacgcgaug

SEQ ID NO: 1304103 - RNA, 19 nt, Artificial Sequence
  Description of Artificial Sequence: Synthetic oligonucleotide
  Antisense strand to SEQ ID NO: 1304102
caucgcguauaauuccucg

SEQ ID NO: 1304104 - RNA, 19 nt, Artificial Sequence
  Description of Artificial Sequence: Synthetic oligonucleotide
  Sense strand starting at position 3754 of SEQ ID NO: 1241842
gcaacacuuuggguacaau

SEQ ID NO: 1304105 - RNA, 19 nt, Artificial Sequence
  Description of Artificial Sequence: Synthetic oligonucleotide
  Antisense strand to SEQ ID NO: 1304104
auuguacccaaaguguugc

SEQ ID NO: 1304106 - RNA, 19 nt, Artificial Sequence
  Description of Artificial Sequence: Synthetic oligonucleotide
  Sense strand starting at position 3830 of SEQ ID NO: 1241842
auguuuaucugcuuacuuu

SEQ ID NO: 1304107 - RNA, 19 nt, Artificial Sequence
  Description of Artificial Sequence: Synthetic oligonucleotide
  Antisense strand to SEQ ID NO: 1304106
aaaguaagcagauaaacau

SEQ ID NO: 1304108 - RNA, 19 nt, Artificial Sequence
  Description of Artificial Sequence: Synthetic oligonucleotide
  Sense strand starting at position 3839 of SEQ ID NO: 1241842
ugcuuacuuugugugaaca

SEQ ID NO: 1304109 - RNA, 19 nt, Artificial Sequence
  Description of Artificial Sequence: Synthetic oligonucleotide
  Antisense strand to SEQ ID NO: 1304108
uguucacacaaaguaagca

SEQ ID NO: 1304110 - RNA, 19 nt, Artificial Sequence
  Description of Artificial Sequence: Synthetic oligonucleotide
  Sense strand starting at position 3840 of SEQ ID NO: 1241842
gcuuacuuugugugaacau

SEQ ID NO: 1304111 - RNA, 19 nt, Artificial Sequence
  Description of Artificial Sequence: Synthetic oligonucleotide
  Antisense strand to SEQ ID NO: 1304110
auguucacacaaaguaagc

SEQ ID NO: 1304112 - RNA, 19 nt, Artificial Sequence
  Description of Artificial Sequence: Synthetic oligonucleotide
  Sense strand starting at position 3887 of SEQ ID NO: 1241842
caguaauauugggcacgau

SEQ ID NO: 1304113 - RNA, 19 nt, Artificial Sequence
  Description of Artificial Sequence: Synthetic oligonucleotide
  Antisense strand to SEQ ID NO: 1304112
aucgugcccaauauuacug

SEQ ID NO: 1304114 - RNA, 19 nt, Artificial Sequence
  Description of Artificial Sequence: Synthetic oligonucleotide
  Sense strand starting at position 3888 of SEQ ID NO: 1241842
aguaauauugggcacgauu

SEQ ID NO: 1304115 - RNA, 19 nt, Artificial Sequence
  Description of Artificial Sequence: Synthetic oligonucleotide
  Antisense strand to SEQ ID NO: 1304114
aaucgugcccaauauuacu

SEQ ID NO: 1304116 - RNA, 19 nt, Artificial Sequence
  Description of Artificial Sequence: Synthetic oligonucleotide
  Sense strand starting at position 3914 of SEQ ID NO: 1241842
ccuucuguguaucucaaga

SEQ ID NO: 1304117 - RNA, 19 nt, Artificial Sequence
  Description of Artificial Sequence: Synthetic oligonucleotide
  Antisense strand to SEQ ID NO: 1304116
ucuugagauacacagaagg

SEQ ID NO: 1304118 - RNA, 19 nt, Artificial Sequence
  Description of Artificial Sequence: Synthetic oligonucleotide
  Sense strand starting at position 3919 of SEQ ID NO: 1241842
uguguaucucaagauaggu

SEQ ID NO: 1304119 - RNA, 19 nt, Artificial Sequence
  Description of Artificial Sequence: Synthetic oligonucleotide
  Antisense strand to SEQ ID NO: 1304118
accuaucuugagauacaca

SEQ ID NO: 1304120 - RNA, 19 nt, Artificial Sequence
  Description of Artificial Sequence: Synthetic oligonucleotide
  Sense strand starting at position 19 of SEQ ID NO: 1241843
gcaguaucucuccauacca

SEQ ID NO: 1304121 - RNA, 19 nt, Artificial Sequence
  Description of Artificial Sequence: Synthetic oligonucleotide
  Antisense strand to SEQ ID NO: 1304120
ugguauggagagauacugc

SEQ ID NO: 1304122 - RNA, 19 nt, Artificial Sequence
  Description of Artificial Sequence: Synthetic oligonucleotide
  Sense strand starting at position 603 of SEQ ID NO: 1241843
uggucuaggccacaaucau

SEQ ID NO: 1304123 - RNA, 19 nt, Artificial Sequence
  Description of Artificial Sequence: Synthetic oligonucleotide
  Antisense strand to SEQ ID NO: 1304122
augauuguggccuagacca

SEQ ID NO: 1304124 - RNA, 19 nt, Artificial Sequence
  Description of Artificial Sequence: Synthetic oligonucleotide
  Sense strand starting at position 620 of SEQ ID NO: 1241843
augccaggccugugaacuu

SEQ ID NO: 1304125 - RNA, 19 nt, Artificial Sequence
  Description of Artificial Sequence: Synthetic oligonucleotide
  Antisense strand to SEQ ID NO: 1304124
aaguucacaggccuggcau

SEQ ID NO: 1304126 - RNA, 19 nt, Artificial Sequence
  Description of Artificial Sequence: Synthetic oligonucleotide
  Sense strand starting at position 733 of SEQ ID NO: 1241843
ugauuaugucgccugcuua

SEQ ID NO: 1304127 - RNA, 19 nt, Artificial Sequence
  Description of Artificial Sequence: Synthetic oligonucleotide
  Antisense strand to SEQ ID NO: 1304126
uaagcaggcgacauaauca

SEQ ID NO: 1304128 - RNA, 19 nt, Artificial Sequence
  Description of Artificial Sequence: Synthetic oligonucleotide
  Sense strand starting at position 737 of SEQ ID NO: 1241843
uaugucgccugcuuagaau

SEQ ID NO: 1304129 - RNA, 19 nt, Artificial Sequence
  Description of Artificial Sequence: Synthetic oligonucleotide
  Antisense strand to SEQ ID NO: 1304128
auucuaagcaggcgacaua

SEQ ID NO: 1304130 - RNA, 19 nt, Artificial Sequence
  Description of Artificial Sequence: Synthetic oligonucleotide
  Sense strand starting at position 844 of SEQ ID NO: 1241843
uuccucugccuggaacaua

SEQ ID NO: 1304131 - RNA, 19 nt, Artificial Sequence
  Description of Artificial Sequence: Synthetic oligonucleotide
  Antisense strand to SEQ ID NO: 1304130
uauguuccaggcagaggaa

SEQ ID NO: 1304132 - RNA, 19 nt, Artificial Sequence
  Description of Artificial Sequence: Synthetic oligonucleotide
  Sense strand starting at position 1014 of SEQ ID NO: 1241843
aguuguauuccgugacuag

SEQ ID NO: 1304133 - RNA, 19 nt, Artificial Sequence
  Description of Artificial Sequence: Synthetic oligonucleotide
  Antisense strand to SEQ ID NO: 1304132
cuagucacggaauacaacu

SEQ ID NO: 1304134 - RNA, 19 nt, Artificial Sequence
  Description of Artificial Sequence: Synthetic oligonucleotide
  Sense strand starting at position 1015 of SEQ ID NO: 1241843
guuguauuccgugacuagu

SEQ ID NO: 1304135 - RNA, 19 nt, Artificial Sequence
  Description of Artificial Sequence: Synthetic oligonucleotide
  Antisense strand to SEQ ID NO: 1304134
acuagucacggaauacaac

SEQ ID NO: 1304136 - RNA, 19 nt, Artificial Sequence
  Description of Artificial Sequence: Synthetic oligonucleotide
  Sense strand starting at position 1018 of SEQ ID NO: 1241843
guauuccgugacuaguuca

SEQ ID NO: 1304137 - RNA, 19 nt, Artificial Sequence
  Description of Artificial Sequence: Synthetic oligonucleotide
  Antisense strand to SEQ ID NO: 1304136
ugaacuagucacggaauac

SEQ ID NO: 1304138 - RNA, 19 nt, Artificial Sequence
  Description of Artificial Sequence: Synthetic oligonucleotide
  Sense strand starting at position 1021 of SEQ ID NO: 1241843
uuccgugacuaguucagga

SEQ ID NO: 1304139 - RNA, 19 nt, Artificial Sequence
  Description of Artificial Sequence: Synthetic oligonucleotide
  Antisense strand to SEQ ID NO: 1304138
uccugaacuagucacggaa

SEQ ID NO: 1304140 - RNA, 19 nt, Artificial Sequence
  Description of Artificial Sequence: Synthetic oligonucleotide
  Sense strand starting at position 1059 of SEQ ID NO: 1241843
cauaaaugcuuguugcaga

SEQ ID NO: 1304141 - RNA, 19 nt, Artificial Sequence
  Description of Artificial Sequence: Synthetic oligonucleotide
  Antisense strand to SEQ ID NO: 1304140
ucugcaacaagcauuuaug

SEQ ID NO: 1304142 - RNA, 19 nt, Artificial Sequence
  Description of Artificial Sequence: Synthetic oligonucleotide
  Sense strand starting at position 1072 of SEQ ID NO: 1241843
ugcagaauuuacgaauaaa

SEQ ID NO: 1304143 - RNA, 19 nt, Artificial Sequence
  Description of Artificial Sequence: Synthetic oligonucleotide
  Antisense strand to SEQ ID NO: 1304142
uuuauucguaaauucugca

SEQ ID NO: 1304144 - RNA, 19 nt, Artificial Sequence
  Description of Artificial Sequence: Synthetic oligonucleotide
  Sense strand starting at position 1415 of SEQ ID NO: 1241843
gaggguuucuccucucgaa

SEQ ID NO: 1304145 - RNA, 19 nt, Artificial Sequence
  Description of Artificial Sequence: Synthetic oligonucleotide
  Antisense strand to SEQ ID NO: 1304144
uucgagaggagaaacccuc

SEQ ID NO: 1304146 - RNA, 19 nt, Artificial Sequence
  Description of Artificial Sequence: Synthetic oligonucleotide
  Sense strand starting at position 1688 of SEQ ID NO: 1241843
cuuguagucggaggagaag

SEQ ID NO: 1304147 - RNA, 19 nt, Artificial Sequence
  Description of Artificial Sequence: Synthetic oligonucleotide
  Antisense strand to SEQ ID NO: 1304146
cuucuccuccgacuacaag

SEQ ID NO: 1304148 - RNA, 19 nt, Artificial Sequence
  Description of Artificial Sequence: Synthetic oligonucleotide
  Sense strand starting at position 2096 of SEQ ID NO: 1241843
gggcgucuucugcccuuua

SEQ ID NO: 1304149 - RNA, 19 nt, Artificial Sequence
  Description of Artificial Sequence: Synthetic oligonucleotide
  Antisense strand to SEQ ID NO: 1304148
uaaagggcagaagacgccc

SEQ ID NO: 1304150 - RNA, 19 nt, Artificial Sequence
  Description of Artificial Sequence: Synthetic oligonucleotide
  Sense strand starting at position 2098 of SEQ ID NO: 1241843
gcgucuucugcccuuuaaa

SEQ ID NO: 1304151 - RNA, 19 nt, Artificial Sequence
  Description of Artificial Sequence: Synthetic oligonucleotide
  Antisense strand to SEQ ID NO: 1304150
uuuaaagggcagaagacgc

SEQ ID NO: 1304152 - RNA, 19 nt, Artificial Sequence
  Description of Artificial Sequence: Synthetic oligonucleotide
  Sense strand starting at position 2468 of SEQ ID NO: 1241843
ggcggaauuuaaggaauua

SEQ ID NO: 1304153 - RNA, 19 nt, Artificial Sequence
  Description of Artificial Sequence: Synthetic oligonucleotide
  Antisense strand to SEQ ID NO: 1304152
uaauuccuuaaauuccgcc

SEQ ID NO: 1304154 - RNA, 19 nt, Artificial Sequence
  Description of Artificial Sequence: Synthetic oligonucleotide
  Sense strand starting at position 2551 of SEQ ID NO: 1241843
gugaacaucuaauuaagcu

SEQ ID NO: 1304155 - RNA, 19 nt, Artificial Sequence
  Description of Artificial Sequence: Synthetic oligonucleotide
  Antisense strand to SEQ ID NO: 1304154
agcuuaauuagauguucac

SEQ ID NO: 1304156 - RNA, 19 nt, Artificial Sequence
  Description of Artificial Sequence: Synthetic oligonucleotide
  Sense strand starting at position 2559 of SEQ ID NO: 1241843
cuaauuaagcuuuggaaag

SEQ ID NO: 1304157 - RNA, 19 nt, Artificial Sequence
  Description of Artificial Sequence: Synthetic oligonucleotide
  Antisense strand to SEQ ID NO: 1304156
cuuuccaaagcuuaauuag

SEQ ID NO: 1304158 - RNA, 19 nt, Artificial Sequence
  Description of Artificial Sequence: Synthetic oligonucleotide
  Sense strand starting at position 2776 of SEQ ID NO: 1241843
cuuggauccgauggaaagu

SEQ ID NO: 1304159 - RNA, 19 nt, Artificial Sequence
  Description of Artificial Sequence: Synthetic oligonucleotide
  Antisense strand to SEQ ID NO: 1304158
acuuuccaucggauccaag

SEQ ID NO: 1304160 - RNA, 19 nt, Artificial Sequence
  Description of Artificial Sequence: Synthetic oligonucleotide
  Sense strand starting at position 2818 of SEQ ID NO: 1241843
guaggauccaguugggcau

SEQ ID NO: 1304161 - RNA, 19 nt, Artificial Sequence
  Description of Artificial Sequence: Synthetic oligonucleotide
  Antisense strand to SEQ ID NO: 1304160
augcccaacuggauccuac

SEQ ID NO: 1304162 - RNA, 19 nt, Artificial Sequence
  Description of Artificial Sequence: Synthetic oligonucleotide
  Sense strand starting at position 2893 of SEQ ID NO: 1241843
gccugagucuuggucugua

SEQ ID NO: 1304163 - RNA, 19 nt, Artificial Sequence
  Description of Artificial Sequence: Synthetic oligonucleotide
  Antisense strand to SEQ ID NO: 1304162
uacagaccaagacucaggc

SEQ ID NO: 1304164 - RNA, 19 nt, Artificial Sequence
  Description of Artificial Sequence: Synthetic oligonucleotide
  Sense strand starting at position 2896 of SEQ ID NO: 1241843
ugagucuuggucuguaacu

SEQ ID NO: 1304165 - RNA, 19 nt, Artificial Sequence
  Description of Artificial Sequence: Synthetic oligonucleotide
  Antisense strand to SEQ ID NO: 1304164
aguuacagaccaagacuca

SEQ ID NO: 1304166 - RNA, 19 nt, Artificial Sequence
  Description of Artificial Sequence: Synthetic oligonucleotide
  Sense strand starting at position 2897 of SEQ ID NO: 1241843
gagucuuggucuguaacua

SEQ ID NO: 1304167 - RNA, 19 nt, Artificial Sequence
  Description of Artificial Sequence: Synthetic oligonucleotide
  Antisense strand to SEQ ID NO: 1304166
uaguuacagaccaagacuc

SEQ ID NO: 1304168 - RNA, 19 nt, Artificial Sequence
  Description of Artificial Sequence: Synthetic oligonucleotide
  Sense strand starting at position 2898 of SEQ ID NO: 1241843
agucuuggucuguaacuag

SEQ ID NO: 1304169 - RNA, 19 nt, Artificial Sequence
  Description of Artificial Sequence: Synthetic oligonucleotide
  Antisense strand to SEQ ID NO: 1304168
cuaguuacagaccaagacu

SEQ ID NO: 1304170 - RNA, 19 nt, Artificial Sequence
  Description of Artificial Sequence: Synthetic oligonucleotide
  Sense strand starting at position 2922 of SEQ ID NO: 1241843
cgaagucuccaugggcaga

SEQ ID NO: 1304171 - RNA, 19 nt, Artificial Sequence
  Description of Artificial Sequence: Synthetic oligonucleotide
  Antisense strand to SEQ ID NO: 1304170
ucugcccauggagacuucg

SEQ ID NO: 1304172 - RNA, 19 nt, Artificial Sequence
  Description of Artificial Sequence: Synthetic oligonucleotide
  Sense strand starting at position 2935 of SEQ ID NO: 1241843
ggcagaauuggcgggccua

SEQ ID NO: 1304173 - RNA, 19 nt, Artificial Sequence
  Description of Artificial Sequence: Synthetic oligonucleotide
  Antisense strand to SEQ ID NO: 1304172
uaggcccgccaauucugcc

SEQ ID NO: 1304174 - RNA, 19 nt, Artificial Sequence
  Description of Artificial Sequence: Synthetic oligonucleotide
  Sense strand starting at position 2979 of SEQ ID NO: 1241843
gguggagcuuggcucagua

SEQ ID NO: 1304175 - RNA, 19 nt, Artificial Sequence
  Description of Artificial Sequence: Synthetic oligonucleotide
  Antisense strand to SEQ ID NO: 1304174
uacugagccaagcuccacc

SEQ ID NO: 1304176 - RNA, 19 nt, Artificial Sequence
  Description of Artificial Sequence: Synthetic oligonucleotide
  Sense strand starting at position 2981 of SEQ ID NO: 1241843
uggagcuuggcucaguaga

SEQ ID NO: 1304177 - RNA, 19 nt, Artificial Sequence
  Description of Artificial Sequence: Synthetic oligonucleotide
  Antisense strand to SEQ ID NO: 1304176
ucuacugagccaagcucca

SEQ ID NO: 1304178 - RNA, 19 nt, Artificial Sequence
  Description of Artificial Sequence: Synthetic oligonucleotide
  Sense strand starting at position 2983 of SEQ ID NO: 1241843
gagcuuggcucaguagaaa

SEQ ID NO: 1304179 - RNA, 19 nt, Artificial Sequence
  Description of Artificial Sequence: Synthetic oligonucleotide
  Antisense strand to SEQ ID NO: 1304178
uuucuacugagccaagcuc

SEQ ID NO: 1304180 - RNA, 19 nt, Artificial Sequence
  Description of Artificial Sequence: Synthetic oligonucleotide
  Sense strand starting at position 3049 of SEQ ID NO: 1241843
ugagaagguucuguuggga

SEQ ID NO: 1304181 - RNA, 19 nt, Artificial Sequence
  Description of Artificial Sequence: Synthetic oligonucleotide
  Antisense strand to SEQ ID NO: 1304180
ucccaacagaaccuucuca

SEQ ID NO: 1304182 - RNA, 19 nt, Artificial Sequence
  Description of Artificial Sequence: Synthetic oligonucleotide
  Sense strand starting at position 3052 of SEQ ID NO: 1241843
gaagguucuguugggauaa

SEQ ID NO: 1304183 - RNA, 19 nt, Artificial Sequence
  Description of Artificial Sequence: Synthetic oligonucleotide
  Antisense strand to SEQ ID NO: 1304182
uuaucccaacagaaccuuc

SEQ ID NO: 1304184 - RNA, 19 nt, Artificial Sequence
  Description of Artificial Sequence: Synthetic oligonucleotide
  Sense strand starting at position 3131 of SEQ ID NO: 1241843
gaucuugaauuuggagaaa

SEQ ID NO: 1304185 - RNA, 19 nt, Artificial Sequence
  Description of Artificial Sequence: Synthetic oligonucleotide
  Antisense strand to SEQ ID NO: 1304184
uuucuccaaauucaagauc

SEQ ID NO: 1304186 - RNA, 19 nt, Artificial Sequence
  Description of Artificial Sequence: Synthetic oligonucleotide
  Sense strand starting at position 3191 of SEQ ID NO: 1241843
ugcaguugcgcguuuauaa

SEQ ID NO: 1304187 - RNA, 19 nt, Artificial Sequence
  Description of Artificial Sequence: Synthetic oligonucleotide
  Antisense strand to SEQ ID NO: 1304186
uuauaaacgcgcaacugca

SEQ ID NO: 1304188 - RNA, 19 nt, Artificial Sequence
  Description of Artificial Sequence: Synthetic oligonucleotide
  Sense strand starting at position 3192 of SEQ ID NO: 1241843
gcaguugcgcguuuauaag

SEQ ID NO: 1304189 - RNA, 19 nt, Artificial Sequence
  Description of Artificial Sequence: Synthetic oligonucleotide
  Antisense strand to SEQ ID NO: 1304188
cuuauaaacgcgcaacugc

SEQ ID NO: 1304190 - RNA, 19 nt, Artificial Sequence
  Description of Artificial Sequence: Synthetic oligonucleotide
  Sense strand starting at position 3281 of SEQ ID NO: 1241843
gcuggagcucccgucuauu

SEQ ID NO: 1304191 - RNA, 19 nt, Artificial Sequence
  Description of Artificial Sequence: Synthetic oligonucleotide
  Antisense strand to SEQ ID NO: 1304190
aauagacgggagcuccagc

SEQ ID NO: 1304192 - RNA, 19 nt, Artificial Sequence
  Description of Artificial Sequence: Synthetic oligonucleotide
  Sense strand starting at position 3567 of SEQ ID NO: 1241843
gguccuaugcccugugauc

SEQ ID NO: 1304193 - RNA, 19 nt, Artificial Sequence
  Description of Artificial Sequence: Synthetic oligonucleotide
  Antisense strand to SEQ ID NO: 1304192
gaucacagggcauaggacc

SEQ ID NO: 1304194 - RNA, 19 nt, Artificial Sequence
  Description of Artificial Sequence: Synthetic oligonucleotide
  Sense strand starting at position 3732 of SEQ ID NO: 1241843
cagacuugggccuguguuu

SEQ ID NO: 1304195 - RNA, 19 nt, Artificial Sequence
  Description of Artificial Sequence: Synthetic oligonucleotide
  Antisense strand to SEQ ID NO: 1304194
aaacacaggcccaagucug

SEQ ID NO: 1304196 - RNA, 19 nt, Artificial Sequence
  Description of Artificial Sequence: Synthetic oligonucleotide
  Sense strand starting at position 3744 of SEQ ID NO: 1241843
uguguuucugcuggaggca

SEQ ID NO: 1304197 - RNA, 19 nt, Artificial Sequence
  Description of Artificial Sequence: Synthetic oligonucleotide
  Antisense strand to SEQ ID NO: 1304196
ugccuccagcagaaacaca

SEQ ID NO: 1304198 - RNA, 19 nt, Artificial Sequence
  Description of Artificial Sequence: Synthetic oligonucleotide
  Sense strand starting at position 3774 of SEQ ID NO: 1241843
aguggaugaucucuccaug

SEQ ID NO: 1304199 - RNA, 19 nt, Artificial Sequence
  Description of Artificial Sequence: Synthetic oligonucleotide
  Antisense strand to SEQ ID NO: 1304198
cauggagagaucauccacu

SEQ ID NO: 1304200 - RNA, 19 nt, Artificial Sequence
  Description of Artificial Sequence: Synthetic oligonucleotide
  Sense strand starting at position 114 of SEQ ID NO: 1241844
ccgucucuauaaguaaaua

SEQ ID NO: 1304201 - RNA, 19 nt, Artificial Sequence
  Description of Artificial Sequence: Synthetic oligonucleotide
  Antisense strand to SEQ ID NO: 1304200
uauuuacuuauagagacgg

SEQ ID NO: 1304202 - RNA, 19 nt, Artificial Sequence
  Description of Artificial Sequence: Synthetic oligonucleotide
  Sense strand starting at position 234 of SEQ ID NO: 1241844
acaaauaguuacgcugaau

SEQ ID NO: 1304203 - RNA, 19 nt, Artificial Sequence
  Description of Artificial Sequence: Synthetic oligonucleotide
  Antisense strand to SEQ ID NO: 1304202
auucagcguaacuauuugu

SEQ ID NO: 1304204 - RNA, 19 nt, Artificial Sequence
  Description of Artificial Sequence: Synthetic oligonucleotide
  Sense strand starting at position 237 of SEQ ID NO: 1241844
aauaguuacgcugaauacu

SEQ ID NO: 1304205 - RNA, 19 nt, Artificial Sequence
  Description of Artificial Sequence: Synthetic oligonucleotide
  Antisense strand to SEQ ID NO: 1304204
aguauucagcguaacuauu

SEQ ID NO: 1304206 - RNA, 19 nt, Artificial Sequence
  Description of Artificial Sequence: Synthetic oligonucleotide
  Sense strand starting at position 574 of SEQ ID NO: 1241844
cggccugaauacucauauu

SEQ ID NO: 1304207 - RNA, 19 nt, Artificial Sequence
  Description of Artificial Sequence: Synthetic oligonucleotide
  Antisense strand to SEQ ID NO: 1304206
aauaugaguauucaggccg

SEQ ID NO: 1304208 - RNA, 19 nt, Artificial Sequence
  Description of Artificial Sequence: Synthetic oligonucleotide
  Sense strand starting at position 704 of SEQ ID NO: 1241844
aggguuuauuaacuuguca

SEQ ID NO: 1304209 - RNA, 19 nt, Artificial Sequence
  Description of Artificial Sequence: Synthetic oligonucleotide
  Antisense strand to SEQ ID NO: 1304208
ugacaaguuaauaaacccu

SEQ ID NO: 1304210 - RNA, 19 nt, Artificial Sequence
  Description of Artificial Sequence: Synthetic oligonucleotide
  Sense strand starting at position 942 of SEQ ID NO: 1241844
ugcggcagcauuuauaauu

SEQ ID NO: 1304211 - RNA, 19 nt, Artificial Sequence
  Description of Artificial Sequence: Synthetic oligonucleotide
  Antisense strand to SEQ ID NO: 1304210
aauuauaaaugcugccgca

SEQ ID NO: 1304212 - RNA, 19 nt, Artificial Sequence
  Description of Artificial Sequence: Synthetic oligonucleotide
  Sense strand starting at position 1013 of SEQ ID NO: 1241844
gguaucuagucucuggaaa

SEQ ID NO: 1304213 - RNA, 19 nt, Artificial Sequence
  Description of Artificial Sequence: Synthetic oligonucleotide
  Antisense strand to SEQ ID NO: 1304212
uuuccagagacuagauacc

SEQ ID NO: 1304214 - RNA, 19 nt, Artificial Sequence
  Description of Artificial Sequence: Synthetic oligonucleotide
  Sense strand starting at position 1014 of SEQ ID NO: 1241844
guaucuagucucuggaaag

SEQ ID NO: 1304215 - RNA, 19 nt, Artificial Sequence
  Description of Artificial Sequence: Synthetic oligonucleotide
  Antisense strand to SEQ ID NO: 1304214
cuuuccagagacuagauac

SEQ ID NO: 1304216 - RNA, 19 nt, Artificial Sequence
  Description of Artificial Sequence: Synthetic oligonucleotide
  Sense strand starting at position 1080 of SEQ ID NO: 1241844
uccaguucuggcuauaaca

SEQ ID NO: 1304217 - RNA, 19 nt, Artificial Sequence
  Description of Artificial Sequence: Synthetic oligonucleotide
  Antisense strand to SEQ ID NO: 1304216
uguuauagccagaacugga

SEQ ID NO: 1304218 - RNA, 19 nt, Artificial Sequence
  Description of Artificial Sequence: Synthetic oligonucleotide
  Sense strand starting at position 1130 of SEQ ID NO: 1241844
augaaacuguggucaacaa

SEQ ID NO: 1304219 - RNA, 19 nt, Artificial Sequence
  Description of Artificial Sequence: Synthetic oligonucleotide
  Antisense strand to SEQ ID NO: 1304218
uuguugaccacaguuucau

SEQ ID NO: 1304220 - RNA, 19 nt, Artificial Sequence
  Description of Artificial Sequence: Synthetic oligonucleotide
  Sense strand starting at position 1217 of SEQ ID NO: 1241844
ucuaucucguucccagaga

SEQ ID NO: 1304221 - RNA, 19 nt, Artificial Sequence
  Description of Artificial Sequence: Synthetic oligonucleotide
  Antisense strand to SEQ ID NO: 1304220
ucucugggaacgagauaga

SEQ ID NO: 1304222 - RNA, 19 nt, Artificial Sequence
  Description of Artificial Sequence: Synthetic oligonucleotide
  Sense strand starting at position 1492 of SEQ ID NO: 1241844
ucacgaaacgcugguagaa

SEQ ID NO: 1304223 - RNA, 19 nt, Artificial Sequence
  Description of Artificial Sequence: Synthetic oligonucleotide
  Antisense strand to SEQ ID NO: 1304222
uucuaccagcguuucguga

SEQ ID NO: 1304224 - RNA, 19 nt, Artificial Sequence
  Description of Artificial Sequence: Synthetic oligonucleotide
  Sense strand starting at position 1545 of SEQ ID NO: 1241844
accagaaucgccugaauca

SEQ ID NO: 1304225 - RNA, 19 nt, Artificial Sequence
  Description of Artificial Sequence: Synthetic oligonucleotide
  Antisense strand to SEQ ID NO: 1304224
ugauucaggcgauucuggu

SEQ ID NO: 1304226 - RNA, 19 nt, Artificial Sequence
  Description of Artificial Sequence: Synthetic oligonucleotide
  Sense strand starting at position 1546 of SEQ ID NO: 1241844
ccagaaucgccugaaucau

SEQ ID NO: 1304227 - RNA, 19 nt, Artificial Sequence
  Description of Artificial Sequence: Synthetic oligonucleotide
  Antisense strand to SEQ ID NO: 1304226
augauucaggcgauucugg

SEQ ID NO: 1304228 - RNA, 19 nt, Artificial Sequence
  Description of Artificial Sequence: Synthetic oligonucleotide
  Sense strand starting at position 1592 of SEQ ID NO: 1241844
cggcuacucccagaaagcu

SEQ ID NO: 1304229 - RNA, 19 nt, Artificial Sequence
  Description of Artificial Sequence: Synthetic oligonucleotide
  Antisense strand to SEQ ID NO: 1304228
agcuuucugggaguagccg

SEQ ID NO: 1304230 - RNA, 19 nt, Artificial Sequence
  Description of Artificial Sequence: Synthetic oligonucleotide
  Sense strand starting at position 1986 of SEQ ID NO: 1241844
gccguucgucgguuaugga

SEQ ID NO: 1304231 - RNA, 19 nt, Artificial Sequence
  Description of Artificial Sequence: Synthetic oligonucleotide
  Antisense strand to SEQ ID NO: 1304230
uccauaaccgacgaacggc

SEQ ID NO: 1304232 - RNA, 19 nt, Artificial Sequence
  Description of Artificial Sequence: Synthetic oligonucleotide
  Sense strand starting at position 2032 of SEQ ID NO: 1241844
auuauaaugcugcagugaa

SEQ ID NO: 1304233 - RNA, 19 nt, Artificial Sequence
  Description of Artificial Sequence: Synthetic oligonucleotide
  Antisense strand to SEQ ID NO: 1304232
uucacugcagcauuauaau

SEQ ID NO: 1304234 - RNA, 19 nt, Artificial Sequence
  Description of Artificial Sequence: Synthetic oligonucleotide
  Sense strand starting at position 2098 of SEQ ID NO: 1241844
cggugaaugguggaauuaa

SEQ ID NO: 1304235 - RNA, 19 nt, Artificial Sequence
  Description of Artificial Sequence: Synthetic oligonucleotide
  Antisense strand to SEQ ID NO: 1304234
uuaauuccaccauucaccg

SEQ ID NO: 1304236 - RNA, 19 nt, Artificial Sequence
  Description of Artificial Sequence: Synthetic oligonucleotide
  Sense strand starting at position 2099 of SEQ ID NO: 1241844
ggugaaugguggaauuaag

SEQ ID NO: 1304237 - RNA, 19 nt, Artificial Sequence
  Description of Artificial Sequence: Synthetic oligonucleotide
  Antisense strand to SEQ ID NO: 1304236
cuuaauuccaccauucacc

SEQ ID NO: 1304238 - RNA, 19 nt, Artificial Sequence
  Description of Artificial Sequence: Synthetic oligonucleotide
  Sense strand starting at position 2206 of SEQ ID NO: 1241844
ggagcauguccguauacug

SEQ ID NO: 1304239 - RNA, 19 nt, Artificial Sequence
  Description of Artificial Sequence: Synthetic oligonucleotide
  Antisense strand to SEQ ID NO: 1304238
caguauacggacaugcucc

SEQ ID NO: 1304240 - RNA, 19 nt, Artificial Sequence
  Description of Artificial Sequence: Synthetic oligonucleotide
  Sense strand starting at position 2235 of SEQ ID NO: 1241844
agcggauacagaugcaaau

SEQ ID NO: 1304241 - RNA, 19 nt, Artificial Sequence
  Description of Artificial Sequence: Synthetic oligonucleotide
  Antisense strand to SEQ ID NO: 1304240
auuugcaucuguauccgcu

SEQ ID NO: 1304242 - RNA, 19 nt, Artificial Sequence
  Description of Artificial Sequence: Synthetic oligonucleotide
  Sense strand starting at position 2261 of SEQ ID NO: 1241844
gaggacuguuuggcgauau

SEQ ID NO: 1304243 - RNA, 19 nt, Artificial Sequence
  Description of Artificial Sequence: Synthetic oligonucleotide
  Antisense strand to SEQ ID NO: 1304242
auaucgccaaacaguccuc

SEQ ID NO: 1304244 - RNA, 19 nt, Artificial Sequence
  Description of Artificial Sequence: Synthetic oligonucleotide
  Sense strand starting at position 2265 of SEQ ID NO: 1241844
acuguuuggcgauauggau

SEQ ID NO: 1304245 - RNA, 19 nt, Artificial Sequence
  Description of Artificial Sequence: Synthetic oligonucleotide
  Antisense strand to SEQ ID NO: 1304244
auccauaucgccaaacagu

SEQ ID NO: 1304246 - RNA, 19 nt, Artificial Sequence
  Description of Artificial Sequence: Synthetic oligonucleotide
  Sense strand starting at position 2619 of SEQ ID NO: 1241844
cguuuccagcucuagaauu

SEQ ID NO: 1304247 - RNA, 19 nt, Artificial Sequence
  Description of Artificial Sequence: Synthetic oligonucleotide
  Antisense strand to SEQ ID NO: 1304246
aauucuagagcuggaaacg

SEQ ID NO: 1304248 - RNA, 19 nt, Artificial Sequence
  Description of Artificial Sequence: Synthetic oligonucleotide
  Sense strand starting at position 2646 of SEQ ID NO: 1241844
aaugauuguggauguguga

SEQ ID NO: 1304249 - RNA, 19 nt, Artificial Sequence
  Description of Artificial Sequence: Synthetic oligonucleotide
  Antisense strand to SEQ ID NO: 1304248
ucacacauccacaaucauu

SEQ ID NO: 1304250 - RNA, 19 nt, Artificial Sequence
  Description of Artificial Sequence: Synthetic oligonucleotide
  Sense strand starting at position 2668 of SEQ ID NO: 1241844
gauuuagccugaggaacau

SEQ ID NO: 1304251 - RNA, 19 nt, Artificial Sequence
  Description of Artificial Sequence: Synthetic oligonucleotide
  Antisense strand to SEQ ID NO: 1304250
auguuccucaggcuaaauc

SEQ ID NO: 1304252 - RNA, 19 nt, Artificial Sequence
  Description of Artificial Sequence: Synthetic oligonucleotide
  Sense strand starting at position 2791 of SEQ ID NO: 1241844
augagaaauugguuaagug

SEQ ID NO: 1304253 - RNA, 19 nt, Artificial Sequence
  Description of Artificial Sequence: Synthetic oligonucleotide
  Antisense strand to SEQ ID NO: 1304252
cacuuaaccaauuucucau

SEQ ID NO: 1304254 - RNA, 19 nt, Artificial Sequence
  Description of Artificial Sequence: Synthetic oligonucleotide
  Sense strand starting at position 2795 of SEQ ID NO: 1241844
gaaauugguuaagugcauu

SEQ ID NO: 1304255 - RNA, 19 nt, Artificial Sequence
  Description of Artificial Sequence: Synthetic oligonucleotide
  Antisense strand to SEQ ID NO: 1304254
aaugcacuuaaccaauuuc

SEQ ID NO: 1304256 - RNA, 19 nt, Artificial Sequence
  Description of Artificial Sequence: Synthetic oligonucleotide
  Sense strand starting at position 2808 of SEQ ID NO: 1241844
ugcauuguucuacauugaa

SEQ ID NO: 1304257 - RNA, 19 nt, Artificial Sequence
  Description of Artificial Sequence: Synthetic oligonucleotide
  Antisense strand to SEQ ID NO: 1304256
uucaauguagaacaaugca

SEQ ID NO: 1304258 - RNA, 19 nt, Artificial Sequence
  Description of Artificial Sequence: Synthetic oligonucleotide
  Sense strand starting at position 2863 of SEQ ID NO: 1241844
gggaaagauuuaugauacg

SEQ ID NO: 1304259 - RNA, 19 nt, Artificial Sequence
  Description of Artificial Sequence: Synthetic oligonucleotide
  Antisense strand to SEQ ID NO: 1304258
cguaucauaaaucuuuccc

SEQ ID NO: 1304260 - RNA, 19 nt, Artificial Sequence
  Description of Artificial Sequence: Synthetic oligonucleotide
  Sense strand starting at position 2866 of SEQ ID NO: 1241844
aaagauuuaugauacggaa

SEQ ID NO: 1304261 - RNA, 19 nt, Artificial Sequence
  Description of Artificial Sequence: Synthetic oligonucleotide
  Antisense strand to SEQ ID NO: 1304260
uuccguaucauaaaucuuu

SEQ ID NO: 1304262 - RNA, 19 nt, Artificial Sequence
  Description of Artificial Sequence: Synthetic oligonucleotide
  Sense strand starting at position 2869 of SEQ ID NO: 1241844
gauuuaugauacggaagug

SEQ ID NO: 1304263 - RNA, 19 nt, Artificial Sequence
  Description of Artificial Sequence: Synthetic oligonucleotide
  Antisense strand to SEQ ID NO: 1304262
cacuuccguaucauaaauc

SEQ ID NO: 1304264 - RNA, 19 nt, Artificial Sequence
  Description of Artificial Sequence: Synthetic oligonucleotide
  Sense strand starting at position 3004 of SEQ ID NO: 1241844
gagucaggguguuugaucu

SEQ ID NO: 1304265 - RNA, 19 nt, Artificial Sequence
  Description of Artificial Sequence: Synthetic oligonucleotide
  Antisense strand to SEQ ID NO: 1304264
agaucaaacacccugacuc

SEQ ID NO: 1304266 - RNA, 19 nt, Artificial Sequence
  Description of Artificial Sequence: Synthetic oligonucleotide
  Sense strand starting at position 3010 of SEQ ID NO: 1241844
ggguguuugaucuguacag

SEQ ID NO: 1304267 - RNA, 19 nt, Artificial Sequence
  Description of Artificial Sequence: Synthetic oligonucleotide
  Antisense strand to SEQ ID NO: 1304266
cuguacagaucaaacaccc

SEQ ID NO: 1304268 - RNA, 19 nt, Artificial Sequence
  Description of Artificial Sequence: Synthetic oligonucleotide
  Sense strand starting at position 3012 of SEQ ID NO: 1241844
guguuugaucuguacagga

SEQ ID NO: 1304269 - RNA, 19 nt, Artificial Sequence
  Description of Artificial Sequence: Synthetic oligonucleotide
  Antisense strand to SEQ ID NO: 1304268
uccuguacagaucaaacac

SEQ ID NO: 1304270 - RNA, 19 nt, Artificial Sequence
  Description of Artificial Sequence: Synthetic oligonucleotide
  Sense strand starting at position 3115 of SEQ ID NO: 1241844
gguguaauaucaguuuccu

SEQ ID NO: 1304271 - RNA, 19 nt, Artificial Sequence
  Description of Artificial Sequence: Synthetic oligonucleotide
  Antisense strand to SEQ ID NO: 1304270
aggaaacugauauuacacc

SEQ ID NO: 1304272 - RNA, 19 nt, Artificial Sequence
  Description of Artificial Sequence: Synthetic oligonucleotide
  Sense strand starting at position 3266 of SEQ ID NO: 1241844
acaucuuugggugguagga

SEQ ID NO: 1304273 - RNA, 19 nt, Artificial Sequence
  Description of Artificial Sequence: Synthetic oligonucleotide
  Antisense strand to SEQ ID NO: 1304272
uccuaccacccaaagaugu

SEQ ID NO: 1304274 - RNA, 19 nt, Artificial Sequence
  Description of Artificial Sequence: Synthetic oligonucleotide
  Sense strand starting at position 3276 of SEQ ID NO: 1241844
gugguaggauuaucaaguu

SEQ ID NO: 1304275 - RNA, 19 nt, Artificial Sequence
  Description of Artificial Sequence: Synthetic oligonucleotide
  Antisense strand to SEQ ID NO: 1304274
aacuugauaauccuaccac

SEQ ID NO: 1304276 - RNA, 19 nt, Artificial Sequence
  Description of Artificial Sequence: Synthetic oligonucleotide
  Sense strand starting at position 3375 of SEQ ID NO: 1241844
gggucuuacccagguugga

SEQ ID NO: 1304277 - RNA, 19 nt, Artificial Sequence
  Description of Artificial Sequence: Synthetic oligonucleotide
  Antisense strand to SEQ ID NO: 1304276
uccaaccuggguaagaccc

SEQ ID NO: 1304278 - RNA, 19 nt, Artificial Sequence
  Description of Artificial Sequence: Synthetic oligonucleotide
  Sense strand starting at position 3875 of SEQ ID NO: 1241844
gaggaagaauaucaaagaa

SEQ ID NO: 1304279 - RNA, 19 nt, Artificial Sequence
  Description of Artificial Sequence: Synthetic oligonucleotide
  Antisense strand to SEQ ID NO: 1304278
uucuuugauauucuuccuc

SEQ ID NO: 1304280 - RNA, 19 nt, Artificial Sequence
  Description of Artificial Sequence: Synthetic oligonucleotide
  Sense strand starting at position 54 of SEQ ID NO: 1241845
agguucucuccggauagca

SEQ ID NO: 1304281 - RNA, 19 nt, Artificial Sequence
  Description of Artificial Sequence: Synthetic oligonucleotide
  Antisense strand to SEQ ID NO: 1304280
ugcuauccggagagaaccu

SEQ ID NO: 1304282 - RNA, 19 nt, Artificial Sequence
  Description of Artificial Sequence: Synthetic oligonucleotide
  Sense strand starting at position 62 of SEQ ID NO: 1241845
uccggauagcaucaacuua

SEQ ID NO: 1304283 - RNA, 19 nt, Artificial Sequence
  Description of Artificial Sequence: Synthetic oligonucleotide
  Antisense strand to SEQ ID NO: 1304282
uaaguugaugcuauccgga

SEQ ID NO: 1304284 - RNA, 19 nt, Artificial Sequence
  Description of Artificial Sequence: Synthetic oligonucleotide
  Sense strand starting at position 167 of SEQ ID NO: 1241845
uguagucaugcuuauacuu

SEQ ID NO: 1304285 - RNA, 19 nt, Artificial Sequence
  Description of Artificial Sequence: Synthetic oligonucleotide
  Antisense strand to SEQ ID NO: 1304284
aaguauaagcaugacuaca

SEQ ID NO: 1304286 - RNA, 19 nt, Artificial Sequence
  Description of Artificial Sequence: Synthetic oligonucleotide
  Sense strand starting at position 175 of SEQ ID NO: 1241845
ugcuuauacuugucuuaag

SEQ ID NO: 1304287 - RNA, 19 nt, Artificial Sequence
  Description of Artificial Sequence: Synthetic oligonucleotide
  Antisense strand to SEQ ID NO: 1304286
cuuaagacaaguauaagca

SEQ ID NO: 1304288 - RNA, 19 nt, Artificial Sequence
  Description of Artificial Sequence: Synthetic oligonucleotide
  Sense strand starting at position 223 of SEQ ID NO: 1241845
aagggaauguguuuaauuc

SEQ ID NO: 1304289 - RNA, 19 nt, Artificial Sequence
  Description of Artificial Sequence: Synthetic oligonucleotide
  Antisense strand to SEQ ID NO: 1304288
gaauuaaacacauucccuu

SEQ ID NO: 1304290 - RNA, 19 nt, Artificial Sequence
  Description of Artificial Sequence: Synthetic oligonucleotide
  Sense strand starting at position 224 of SEQ ID NO: 1241845
agggaauguguuuaauucu

SEQ ID NO: 1304291 - RNA, 19 nt, Artificial Sequence
  Description of Artificial Sequence: Synthetic oligonucleotide
  Antisense strand to SEQ ID NO: 1304290
agaauuaaacacauucccu

SEQ ID NO: 1304292 - RNA, 19 nt, Artificial Sequence
  Description of Artificial Sequence: Synthetic oligonucleotide
  Sense strand starting at position 342 of SEQ ID NO: 1241845
ugugaaucgguauacuaca

SEQ ID NO: 1304293 - RNA, 19 nt, Artificial Sequence
  Description of Artificial Sequence: Synthetic oligonucleotide
  Antisense strand to SEQ ID NO: 1304292
uguaguauaccgauucaca

SEQ ID NO: 1304294 - RNA, 19 nt, Artificial Sequence
  Description of Artificial Sequence: Synthetic oligonucleotide
  Sense strand starting at position 358 of SEQ ID NO: 1241845
acacaauccgugcaaccau

SEQ ID NO: 1304295 - RNA, 19 nt, Artificial Sequence
  Description of Artificial Sequence: Synthetic oligonucleotide
  Antisense strand to SEQ ID NO: 1304294
augguugcacggauugugu

SEQ ID NO: 1304296 - RNA, 19 nt, Artificial Sequence
  Description of Artificial Sequence: Synthetic oligonucleotide
  Sense strand starting at position 1140 of SEQ ID NO: 1241845
ggcagagacuuagcaaauu

SEQ ID NO: 1304297 - RNA, 19 nt, Artificial Sequence
  Description of Artificial Sequence: Synthetic oligonucleotide
  Antisense strand to SEQ ID NO: 1304296
aauuugcuaagucucugcc

SEQ ID NO: 1304298 - RNA, 19 nt, Artificial Sequence
  Description of Artificial Sequence: Synthetic oligonucleotide
  Sense strand starting at position 1263 of SEQ ID NO: 1241845
ucagguaugcgacaucuga

SEQ ID NO: 1304299 - RNA, 19 nt, Artificial Sequence
  Description of Artificial Sequence: Synthetic oligonucleotide
  Antisense strand to SEQ ID NO: 1304298
ucagaugucgcauaccuga

SEQ ID NO: 1304300 - RNA, 19 nt, Artificial Sequence
  Description of Artificial Sequence: Synthetic oligonucleotide
  Sense strand starting at position 1337 of SEQ ID NO: 1241845
aacuuuguggaagguaaau

SEQ ID NO: 1304301 - RNA, 19 nt, Artificial Sequence
  Description of Artificial Sequence: Synthetic oligonucleotide
  Antisense strand to SEQ ID NO: 1304300
auuuaccuuccacaaaguu

SEQ ID NO: 1304302 - RNA, 19 nt, Artificial Sequence
  Description of Artificial Sequence: Synthetic oligonucleotide
  Sense strand starting at position 1349 of SEQ ID NO: 1241845
gguaaauaaugucugacac

SEQ ID NO: 1304303 - RNA, 19 nt, Artificial Sequence
  Description of Artificial Sequence: Synthetic oligonucleotide
  Antisense strand to SEQ ID NO: 1304302
gugucagacauuauuuacc

SEQ ID NO: 1304304 - RNA, 19 nt, Artificial Sequence
  Description of Artificial Sequence: Synthetic oligonucleotide
  Sense strand starting at position 1362 of SEQ ID NO: 1241845
ugacacuuccaucgcacua

SEQ ID NO: 1304305 - RNA, 19 nt, Artificial Sequence
  Description of Artificial Sequence: Synthetic oligonucleotide
  Antisense strand to SEQ ID NO: 1304304
uagugcgauggaaguguca

SEQ ID NO: 1304306 - RNA, 19 nt, Artificial Sequence
  Description of Artificial Sequence: Synthetic oligonucleotide
  Sense strand starting at position 1367 of SEQ ID NO: 1241845
cuuccaucgcacuagguau

SEQ ID NO: 1304307 - RNA, 19 nt, Artificial Sequence
  Description of Artificial Sequence: Synthetic oligonucleotide
  Antisense strand to SEQ ID NO: 1304306
auaccuagugcgauggaag

SEQ ID NO: 1304308 - RNA, 19 nt, Artificial Sequence
  Description of Artificial Sequence: Synthetic oligonucleotide
  Sense strand starting at position 1458 of SEQ ID NO: 1241845
ccaccacaacguugagaaa

SEQ ID NO: 1304309 - RNA, 19 nt, Artificial Sequence
  Description of Artificial Sequence: Synthetic oligonucleotide
  Antisense strand to SEQ ID NO: 1304308
uuucucaacguuguggugg

SEQ ID NO: 1304310 - RNA, 19 nt, Artificial Sequence
  Description of Artificial Sequence: Synthetic oligonucleotide
  Sense strand starting at position 1529 of SEQ ID NO: 1241845
gucagaacuaacuguggaa

SEQ ID NO: 1304311 - RNA, 19 nt, Artificial Sequence
  Description of Artificial Sequence: Synthetic oligonucleotide
  Antisense strand to SEQ ID NO: 1304310
uuccacaguuaguucugac

SEQ ID NO: 1304312 - RNA, 19 nt, Artificial Sequence
  Description of Artificial Sequence: Synthetic oligonucleotide
  Sense strand starting at position 2006 of SEQ ID NO: 1241845
aagaaaucuuuauuggcgu

SEQ ID NO: 1304313 - RNA, 19 nt, Artificial Sequence
  Description of Artificial Sequence: Synthetic oligonucleotide
  Antisense strand to SEQ ID NO: 1304312
acgccaauaaagauuucuu

SEQ ID NO: 1304314 - RNA, 19 nt, Artificial Sequence
  Description of Artificial Sequence: Synthetic oligonucleotide
  Sense strand starting at position 2108 of SEQ ID NO: 1241845
ucgagauugcgcgcguaag

SEQ ID NO: 1304315 - RNA, 19 nt, Artificial Sequence
  Description of Artificial Sequence: Synthetic oligonucleotide
  Antisense strand to SEQ ID NO: 1304314
cuuacgcgcgcaaucucga

SEQ ID NO: 1304316 - RNA, 19 nt, Artificial Sequence
  Description of Artificial Sequence: Synthetic oligonucleotide
  Sense strand starting at position 2110 of SEQ ID NO: 1241845
gagauugcgcgcguaagua

SEQ ID NO: 1304317 - RNA, 19 nt, Artificial Sequence
  Description of Artificial Sequence: Synthetic oligonucleotide
  Antisense strand to SEQ ID NO: 1304316
uacuuacgcgcgcaaucuc

SEQ ID NO: 1304318 - RNA, 19 nt, Artificial Sequence
  Description of Artificial Sequence: Synthetic oligonucleotide
  Sense strand starting at position 2177 of SEQ ID NO: 1241845
gugaguccuccugaggaag

SEQ ID NO: 1304319 - RNA, 19 nt, Artificial Sequence
  Description of Artificial Sequence: Synthetic oligonucleotide
  Antisense strand to SEQ ID NO: 1304318
cuuccucaggaggacucac

SEQ ID NO: 1304320 - RNA, 19 nt, Artificial Sequence
  Description of Artificial Sequence: Synthetic oligonucleotide
  Sense strand starting at position 2442 of SEQ ID NO: 1241845
acccgaguaguugcgugau

SEQ ID NO: 1304321 - RNA, 19 nt, Artificial Sequence
  Description of Artificial Sequence: Synthetic oligonucleotide
  Antisense strand to SEQ ID NO: 1304320
aucacgcaacuacucgggu

SEQ ID NO: 1304322 - RNA, 19 nt, Artificial Sequence
  Description of Artificial Sequence: Synthetic oligonucleotide
  Sense strand starting at position 2633 of SEQ ID NO: 1241845
guugaaaggucauccuucu

SEQ ID NO: 1304323 - RNA, 19 nt, Artificial Sequence
  Description of Artificial Sequence: Synthetic oligonucleotide
  Antisense strand to SEQ ID NO: 1304322
agaaggaugaccuuucaac

SEQ ID NO: 1304324 - RNA, 19 nt, Artificial Sequence
  Description of Artificial Sequence: Synthetic oligonucleotide
  Sense strand starting at position 2842 of SEQ ID NO: 1241845
cgaaauguggucuggugac

SEQ ID NO: 1304325 - RNA, 19 nt, Artificial Sequence
  Description of Artificial Sequence: Synthetic oligonucleotide
  Antisense strand to SEQ ID NO: 1304324
gucaccagaccacauuucg

SEQ ID NO: 1304326 - RNA, 19 nt, Artificial Sequence
  Description of Artificial Sequence: Synthetic oligonucleotide
  Sense strand starting at position 2947 of SEQ ID NO: 1241845
ccucauucuguuggaaaug

SEQ ID NO: 1304327 - RNA, 19 nt, Artificial Sequence
  Description of Artificial Sequence: Synthetic oligonucleotide
  Antisense strand to SEQ ID NO: 1304326
cauuuccaacagaaugagg

SEQ ID NO: 1304328 - RNA, 19 nt, Artificial Sequence
  Description of Artificial Sequence: Synthetic oligonucleotide
  Sense strand starting at position 2956 of SEQ ID NO: 1241845
guuggaaauguacagaguu

SEQ ID NO: 1304329 - RNA, 19 nt, Artificial Sequence
  Description of Artificial Sequence: Synthetic oligonucleotide
  Antisense strand to SEQ ID NO: 1304328
aacucuguacauuuccaac

SEQ ID NO: 1304330 - RNA, 19 nt, Artificial Sequence
  Description of Artificial Sequence: Synthetic oligonucleotide
  Sense strand starting at position 2991 of SEQ ID NO: 1241845
acgauugacuagcugguaa

SEQ ID NO: 1304331 - RNA, 19 nt, Artificial Sequence
  Description of Artificial Sequence: Synthetic oligonucleotide
  Antisense strand to SEQ ID NO: 1304330
uuaccagcuagucaaucgu

SEQ ID NO: 1304332 - RNA, 19 nt, Artificial Sequence
  Description of Artificial Sequence: Synthetic oligonucleotide
  Sense strand starting at position 3009 of SEQ ID NO: 1241845
aaauguauccuggaguauc

SEQ ID NO: 1304333 - RNA, 19 nt, Artificial Sequence
  Description of Artificial Sequence: Synthetic oligonucleotide
  Antisense strand to SEQ ID NO: 1304332
gauacuccaggauacauuu

SEQ ID NO: 1304334 - RNA, 19 nt, Artificial Sequence
  Description of Artificial Sequence: Synthetic oligonucleotide
  Sense strand starting at position 3056 of SEQ ID NO: 1241845
guagguuuagggcauaaau

SEQ ID NO: 1304335 - RNA, 19 nt, Artificial Sequence
  Description of Artificial Sequence: Synthetic oligonucleotide
  Antisense strand to SEQ ID NO: 1304334
auuuaugcccuaaaccuac

SEQ ID NO: 1304336 - RNA, 19 nt, Artificial Sequence
  Description of Artificial Sequence: Synthetic oligonucleotide
  Sense strand starting at position 3124 of SEQ ID NO: 1241845
guuucuaggagguagguua

SEQ ID NO: 1304337 - RNA, 19 nt, Artificial Sequence
  Description of Artificial Sequence: Synthetic oligonucleotide
  Antisense strand to SEQ ID NO: 1304336
uaaccuaccuccuagaaac

SEQ ID NO: 1304338 - RNA, 19 nt, Artificial Sequence
  Description of Artificial Sequence: Synthetic oligonucleotide
  Sense strand starting at position 3138 of SEQ ID NO: 1241845
gguuagguagguggugaua

SEQ ID NO: 1304339 - RNA, 19 nt, Artificial Sequence
  Description of Artificial Sequence: Synthetic oligonucleotide
  Antisense strand to SEQ ID NO: 1304338
uaucaccaccuaccuaacc

SEQ ID NO: 1304340 - RNA, 19 nt, Artificial Sequence
  Description of Artificial Sequence: Synthetic oligonucleotide
  Sense strand starting at position 3227 of SEQ ID NO: 1241845
cgaggcuccugguuagaaa

SEQ ID NO: 1304341 - RNA, 19 nt, Artificial Sequence
  Description of Artificial Sequence: Synthetic oligonucleotide
  Antisense strand to SEQ ID NO: 1304340
uuucuaaccaggagccucg

SEQ ID NO: 1304342 - RNA, 19 nt, Artificial Sequence
  Description of Artificial Sequence: Synthetic oligonucleotide
  Sense strand starting at position 3302 of SEQ ID NO: 1241845
gcagaaacccaugaucagu

SEQ ID NO: 1304343 - RNA, 19 nt, Artificial Sequence
  Description of Artificial Sequence: Synthetic oligonucleotide
  Antisense strand to SEQ ID NO: 1304342
acugaucauggguuucugc

SEQ ID NO: 1304344 - RNA, 19 nt, Artificial Sequence
  Description of Artificial Sequence: Synthetic oligonucleotide
  Sense strand starting at position 3320 of SEQ ID NO: 1241845
ugucguugggcugaauuau

SEQ ID NO: 1304345 - RNA, 19 nt, Artificial Sequence
  Description of Artificial Sequence: Synthetic oligonucleotide
  Antisense strand to SEQ ID NO: 1304344
auaauucagcccaacgaca

SEQ ID NO: 1304346 - RNA, 19 nt, Artificial Sequence
  Description of Artificial Sequence: Synthetic oligonucleotide
  Sense strand starting at position 3377 of SEQ ID NO: 1241845
accacuccugggugaagau

SEQ ID NO: 1304347 - RNA, 19 nt, Artificial Sequence
  Description of Artificial Sequence: Synthetic oligonucleotide
  Antisense strand to SEQ ID NO: 1304346
aucuucacccaggaguggu

SEQ ID NO: 1304348 - RNA, 19 nt, Artificial Sequence
  Description of Artificial Sequence: Synthetic oligonucleotide
  Sense strand starting at position 3467 of SEQ ID NO: 1241845
cagagaacgugcuuaauag

SEQ ID NO: 1304349 - RNA, 19 nt, Artificial Sequence
  Description of Artificial Sequence: Synthetic oligonucleotide
  Antisense strand to SEQ ID NO: 1304348
cuauuaagcacguucucug

SEQ ID NO: 1304350 - RNA, 19 nt, Artificial Sequence
  Description of Artificial Sequence: Synthetic oligonucleotide
  Sense strand starting at position 3720 of SEQ ID NO: 1241845
gcuaucuucgguuauaccu

SEQ ID NO: 1304351 - RNA, 19 nt, Artificial Sequence
  Description of Artificial Sequence: Synthetic oligonucleotide
  Antisense strand to SEQ ID NO: 1304350
agguauaaccgaagauagc

SEQ ID NO: 1304352 - RNA, 19 nt, Artificial Sequence
  Description of Artificial Sequence: Synthetic oligonucleotide
  Sense strand starting at position 3729 of SEQ ID NO: 1241845
gguuauaccugcucuaauc

SEQ ID NO: 1304353 - RNA, 19 nt, Artificial Sequence
  Description of Artificial Sequence: Synthetic oligonucleotide
  Antisense strand to SEQ ID NO: 1304352
gauuagagcagguauaacc

SEQ ID NO: 1304354 - RNA, 19 nt, Artificial Sequence
  Description of Artificial Sequence: Synthetic oligonucleotide
  Sense strand starting at position 3751 of SEQ ID NO: 1241845
guaaccuccuugucaccua

SEQ ID NO: 1304355 - RNA, 19 nt, Artificial Sequence
  Description of Artificial Sequence: Synthetic oligonucleotide
  Antisense strand to SEQ ID NO: 1304354
uaggugacaaggagguuac

SEQ ID NO: 1304356 - RNA, 19 nt, Artificial Sequence
  Description of Artificial Sequence: Synthetic oligonucleotide
  Sense strand starting at position 3806 of SEQ ID NO: 1241845
auaccuauaugggaacaua

SEQ ID NO: 1304357 - RNA, 19 nt, Artificial Sequence
  Description of Artificial Sequence: Synthetic oligonucleotide
  Antisense strand to SEQ ID NO: 1304356
uauguucccauauagguau

SEQ ID NO: 1304358 - RNA, 19 nt, Artificial Sequence
  Description of Artificial Sequence: Synthetic oligonucleotide
  Sense strand starting at position 3847 of SEQ ID NO: 1241845
cuugucucgcaagaauauu

SEQ ID NO: 1304359 - RNA, 19 nt, Artificial Sequence
  Description of Artificial Sequence: Synthetic oligonucleotide
  Antisense strand to SEQ ID NO: 1304358
aauauucuugcgagacaag

SEQ ID NO: 1304360 - RNA, 19 nt, Artificial Sequence
  Description of Artificial Sequence: Synthetic oligonucleotide
  Sense strand starting at position 156 of SEQ ID NO: 1241846
gcagccuauccugacugau

SEQ ID NO: 1304361 - RNA, 19 nt, Artificial Sequence
  Description of Artificial Sequence: Synthetic oligonucleotide
  Antisense strand to SEQ ID NO: 1304360
aucagucaggauaggcugc

SEQ ID NO: 1304362 - RNA, 19 nt, Artificial Sequence
  Description of Artificial Sequence: Synthetic oligonucleotide
  Sense strand starting at position 249 of SEQ ID NO: 1241846
cagcucucaggagggaaau

SEQ ID NO: 1304363 - RNA, 19 nt, Artificial Sequence
  Description of Artificial Sequence: Synthetic oligonucleotide
  Antisense strand to SEQ ID NO: 1304362
auuucccuccugagagcug

SEQ ID NO: 1304364 - RNA, 19 nt, Artificial Sequence
  Description of Artificial Sequence: Synthetic oligonucleotide
  Sense strand starting at position 259 of SEQ ID NO: 1241846
gagggaaaucuacgaguuc

SEQ ID NO: 1304365 - RNA, 19 nt, Artificial Sequence
  Description of Artificial Sequence: Synthetic oligonucleotide
  Antisense strand to SEQ ID NO: 1304364
gaacucguagauuucccuc

SEQ ID NO: 1304366 - RNA, 19 nt, Artificial Sequence
  Description of Artificial Sequence: Synthetic oligonucleotide
  Sense strand starting at position 361 of SEQ ID NO: 1241846
agcaauaagagcuggaagu

SEQ ID NO: 1304367 - RNA, 19 nt, Artificial Sequence
  Description of Artificial Sequence: Synthetic oligonucleotide
  Antisense strand to SEQ ID NO: 1304366
acuuccagcucuuauugcu

SEQ ID NO: 1304368 - RNA, 19 nt, Artificial Sequence
  Description of Artificial Sequence: Synthetic oligonucleotide
  Sense strand starting at position 495 of SEQ ID NO: 1241846
uauguaucaggcugacaau

SEQ ID NO: 1304369 - RNA, 19 nt, Artificial Sequence
  Description of Artificial Sequence: Synthetic oligonucleotide
  Antisense strand to SEQ ID NO: 1304368
auugucagccugauacaua

SEQ ID NO: 1304370 - RNA, 19 nt, Artificial Sequence
  Description of Artificial Sequence: Synthetic oligonucleotide
  Sense strand starting at position 496 of SEQ ID NO: 1241846
auguaucaggcugacaaua

SEQ ID NO: 1304371 - RNA, 19 nt, Artificial Sequence
  Description of Artificial Sequence: Synthetic oligonucleotide
  Antisense strand to SEQ ID NO: 1304370
uauugucagccugauacau

SEQ ID NO: 1304372 - RNA, 19 nt, Artificial Sequence
  Description of Artificial Sequence: Synthetic oligonucleotide
  Sense strand starting at position 565 of SEQ ID NO: 1241846
aaggauggguggucugagu

SEQ ID NO: 1304373 - RNA, 19 nt, Artificial Sequence
  Description of Artificial Sequence: Synthetic oligonucleotide
  Antisense strand to SEQ ID NO: 1304372
acucagaccacccauccuu

SEQ ID NO: 1304374 - RNA, 19 nt, Artificial Sequence
  Description of Artificial Sequence: Synthetic oligonucleotide
  Sense strand starting at position 567 of SEQ ID NO: 1241846
ggauggguggucugaguaa

SEQ ID NO: 1304375 - RNA, 19 nt, Artificial Sequence
  Description of Artificial Sequence: Synthetic oligonucleotide
  Antisense strand to SEQ ID NO: 1304374
uuacucagaccacccaucc

SEQ ID NO: 1304376 - RNA, 19 nt, Artificial Sequence
  Description of Artificial Sequence: Synthetic oligonucleotide
  Sense strand starting at position 939 of SEQ ID NO: 1241846
cagggucuggguuacagau

SEQ ID NO: 1304377 - RNA, 19 nt, Artificial Sequence
  Description of Artificial Sequence: Synthetic oligonucleotide
  Antisense strand to SEQ ID NO: 1304376
aucuguaacccagacccug

SEQ ID NO: 1304378 - RNA, 19 nt, Artificial Sequence
  Description of Artificial Sequence: Synthetic oligonucleotide
  Sense strand starting at position 996 of SEQ ID NO: 1241846
gggagagcagugugucaga

SEQ ID NO: 1304379 - RNA, 19 nt, Artificial Sequence
  Description of Artificial Sequence: Synthetic oligonucleotide
  Antisense strand to SEQ ID NO: 1304378
ucugacacacugcucuccc

SEQ ID NO: 1304380 - RNA, 19 nt, Artificial Sequence
  Description of Artificial Sequence: Synthetic oligonucleotide
  Sense strand starting at position 1056 of SEQ ID NO: 1241846
agagcauggcugugacaca

SEQ ID NO: 1304381 - RNA, 19 nt, Artificial Sequence
  Description of Artificial Sequence: Synthetic oligonucleotide
  Antisense strand to SEQ ID NO: 1304380
ugugucacagccaugcucu

SEQ ID NO: 1304382 - RNA, 19 nt, Artificial Sequence
  Description of Artificial Sequence: Synthetic oligonucleotide
  Sense strand starting at position 1089 of SEQ ID NO: 1241846
gugcacugcacugagauau

SEQ ID NO: 1304383 - RNA, 19 nt, Artificial Sequence
  Description of Artificial Sequence: Synthetic oligonucleotide
  Antisense strand to SEQ ID NO: 1304382
auaucucagugcagugcac

SEQ ID NO: 1304384 - RNA, 19 nt, Artificial Sequence
  Description of Artificial Sequence: Synthetic oligonucleotide
  Sense strand starting at position 1101 of SEQ ID NO: 1241846
gagauauuccacugggcac

SEQ ID NO: 1304385 - RNA, 19 nt, Artificial Sequence
  Description of Artificial Sequence: Synthetic oligonucleotide
  Antisense strand to SEQ ID NO: 1304384
gugcccaguggaauaucuc

SEQ ID NO: 1304386 - RNA, 19 nt, Artificial Sequence
  Description of Artificial Sequence: Synthetic oligonucleotide
  Sense strand starting at position 1367 of SEQ ID NO: 1241846
ugagcaauuuaggaauugu

SEQ ID NO: 1304387 - RNA, 19 nt, Artificial Sequence
  Description of Artificial Sequence: Synthetic oligonucleotide
  Antisense strand to SEQ ID NO: 1304386
acaauuccuaaauugcuca

SEQ ID NO: 1304388 - RNA, 19 nt, Artificial Sequence
  Description of Artificial Sequence: Synthetic oligonucleotide
  Sense strand starting at position 1590 of SEQ ID NO: 1241846
caggaucuccgaggugaga

SEQ ID NO: 1304389 - RNA, 19 nt, Artificial Sequence
  Description of Artificial Sequence: Synthetic oligonucleotide
  Antisense strand to SEQ ID NO: 1304388
ucucaccucggagauccug

SEQ ID NO: 1304390 - RNA, 19 nt, Artificial Sequence
  Description of Artificial Sequence: Synthetic oligonucleotide
  Sense strand starting at position 1701 of SEQ ID NO: 1241846
gcguaugugaaguuuguga

SEQ ID NO: 1304391 - RNA, 19 nt, Artificial Sequence
  Description of Artificial Sequence: Synthetic oligonucleotide
  Antisense strand to SEQ ID NO: 1304390
ucacaaacuucacauacgc

SEQ ID NO: 1304392 - RNA, 19 nt, Artificial Sequence
  Description of Artificial Sequence: Synthetic oligonucleotide
  Sense strand starting at position 1703 of SEQ ID NO: 1241846
guaugugaaguuugugaaa

SEQ ID NO: 1304393 - RNA, 19 nt, Artificial Sequence
  Description of Artificial Sequence: Synthetic oligonucleotide
  Antisense strand to SEQ ID NO: 1304392
uuucacaaacuucacauac

SEQ ID NO: 1304394 - RNA, 19 nt, Artificial Sequence
  Description of Artificial Sequence: Synthetic oligonucleotide
  Sense strand starting at position 1865 of SEQ ID NO: 1241846
gggaucauaacggguucua

SEQ ID NO: 1304395 - RNA, 19 nt, Artificial Sequence
  Description of Artificial Sequence: Synthetic oligonucleotide
  Antisense strand to SEQ ID NO: 1304394
uagaacccguuaugauccc

SEQ ID NO: 1304396 - RNA, 19 nt, Artificial Sequence
  Description of Artificial Sequence: Synthetic oligonucleotide
  Sense strand starting at position 1876 of SEQ ID NO: 1241846
ggguucuacucacucagaa

SEQ ID NO: 1304397 - RNA, 19 nt, Artificial Sequence
  Description of Artificial Sequence: Synthetic oligonucleotide
  Antisense strand to SEQ ID NO: 1304396
uucugagugaguagaaccc

SEQ ID NO: 1304398 - RNA, 19 nt, Artificial Sequence
  Description of Artificial Sequence: Synthetic oligonucleotide
  Sense strand starting at position 2202 of SEQ ID NO: 1241846
ucacaaguugaccgugauu

SEQ ID NO: 1304399 - RNA, 19 nt, Artificial Sequence
  Description of Artificial Sequence: Synthetic oligonucleotide
  Antisense strand to SEQ ID NO: 1304398
aaucacggucaacuuguga

SEQ ID NO: 1304400 - RNA, 19 nt, Artificial Sequence
  Description of Artificial Sequence: Synthetic oligonucleotide
  Sense strand starting at position 2204 of SEQ ID NO: 1241846
acaaguugaccgugauucu

SEQ ID NO: 1304401 - RNA, 19 nt, Artificial Sequence
  Description of Artificial Sequence: Synthetic oligonucleotide
  Antisense strand to SEQ ID NO: 1304400
agaaucacggucaacuugu

SEQ ID NO: 1304402 - RNA, 19 nt, Artificial Sequence
  Description of Artificial Sequence: Synthetic oligonucleotide
  Sense strand starting at position 2240 of SEQ ID NO: 1241846
gaaccuucguguuuauuuc

SEQ ID NO: 1304403 - RNA, 19 nt, Artificial Sequence
  Description of Artificial Sequence: Synthetic oligonucleotide
  Antisense strand to SEQ ID NO: 1304402
gaaauaaacacgaagguuc

SEQ ID NO: 1304404 - RNA, 19 nt, Artificial Sequence
  Description of Artificial Sequence: Synthetic oligonucleotide
  Sense strand starting at position 2244 of SEQ ID NO: 1241846
cuucguguuuauuuccaaa

SEQ ID NO: 1304405 - RNA, 19 nt, Artificial Sequence
  Description of Artificial Sequence: Synthetic oligonucleotide
  Antisense strand to SEQ ID NO: 1304404
uuuggaaauaaacacgaag

SEQ ID NO: 1304406 - RNA, 19 nt, Artificial Sequence
  Description of Artificial Sequence: Synthetic oligonucleotide
  Sense strand starting at position 2256 of SEQ ID NO: 1241846
uuccaaaggucagugagua

SEQ ID NO: 1304407 - RNA, 19 nt, Artificial Sequence
  Description of Artificial Sequence: Synthetic oligonucleotide
  Antisense strand to SEQ ID NO: 1304406
uacucacugaccuuuggaa

SEQ ID NO: 1304408 - RNA, 19 nt, Artificial Sequence
  Description of Artificial Sequence: Synthetic oligonucleotide
  Sense strand starting at position 2257 of SEQ ID NO: 1241846
uccaaaggucagugaguau

SEQ ID NO: 1304409 - RNA, 19 nt, Artificial Sequence
  Description of Artificial Sequence: Synthetic oligonucleotide
  Antisense strand to SEQ ID NO: 1304408
auacucacugaccuuugga

SEQ ID NO: 1304410 - RNA, 19 nt, Artificial Sequence
  Description of Artificial Sequence: Synthetic oligonucleotide
  Sense strand starting at position 2406 of SEQ ID NO: 1241846
uuugcucugacaggaaaug

SEQ ID NO: 1304411 - RNA, 19 nt, Artificial Sequence
  Description of Artificial Sequence: Synthetic oligonucleotide
  Antisense strand to SEQ ID NO: 1304410
cauuuccugucagagcaaa

SEQ ID NO: 1304412 - RNA, 19 nt, Artificial Sequence
  Description of Artificial Sequence: Synthetic oligonucleotide
  Sense strand starting at position 2438 of SEQ ID NO: 1241846
aggguucuguucccaacuu

SEQ ID NO: 1304413 - RNA, 19 nt, Artificial Sequence
  Description of Artificial Sequence: Synthetic oligonucleotide
  Antisense strand to SEQ ID NO: 1304412
aaguugggaacagaacccu

SEQ ID NO: 1304414 - RNA, 19 nt, Artificial Sequence
  Description of Artificial Sequence: Synthetic oligonucleotide
  Sense strand starting at position 2614 of SEQ ID NO: 1241846
cagauuagccagugacacu

SEQ ID NO: 1304415 - RNA, 19 nt, Artificial Sequence
  Description of Artificial Sequence: Synthetic oligonucleotide
  Antisense strand to SEQ ID NO: 1304414
agugucacuggcuaaucug

SEQ ID NO: 1304416 - RNA, 19 nt, Artificial Sequence
  Description of Artificial Sequence: Synthetic oligonucleotide
  Sense strand starting at position 2701 of SEQ ID NO: 1241846
cuggacuucgcacagaacu

SEQ ID NO: 1304417 - RNA, 19 nt, Artificial Sequence
  Description of Artificial Sequence: Synthetic oligonucleotide
  Antisense strand to SEQ ID NO: 1304416
aguucugugcgaaguccag

SEQ ID NO: 1304418 - RNA, 19 nt, Artificial Sequence
  Description of Artificial Sequence: Synthetic oligonucleotide
  Sense strand starting at position 2703 of SEQ ID NO: 1241846
ggacuucgcacagaacuga

SEQ ID NO: 1304419 - RNA, 19 nt, Artificial Sequence
  Description of Artificial Sequence: Synthetic oligonucleotide
  Antisense strand to SEQ ID NO: 1304418
ucaguucugugcgaagucc

SEQ ID NO: 1304420 - RNA, 19 nt, Artificial Sequence
  Description of Artificial Sequence: Synthetic oligonucleotide
  Sense strand starting at position 2724 of SEQ ID NO: 1241846
ugcagagauagacguccua

SEQ ID NO: 1304421 - RNA, 19 nt, Artificial Sequence
  Description of Artificial Sequence: Synthetic oligonucleotide
  Antisense strand to SEQ ID NO: 1304420
uaggacgucuaucucugca

SEQ ID NO: 1304422 - RNA, 19 nt, Artificial Sequence
  Description of Artificial Sequence: Synthetic oligonucleotide
  Sense strand starting at position 3141 of SEQ ID NO: 1241846
ccguggugugggcaugaaa

SEQ ID NO: 1304423 - RNA, 19 nt, Artificial Sequence
  Description of Artificial Sequence: Synthetic oligonucleotide
  Antisense strand to SEQ ID NO: 1304422
uuucaugcccacaccacgg

SEQ ID NO: 1304424 - RNA, 19 nt, Artificial Sequence
  Description of Artificial Sequence: Synthetic oligonucleotide
  Sense strand starting at position 3199 of SEQ ID NO: 1241846
ggcacaguucugcaugaca

SEQ ID NO: 1304425 - RNA, 19 nt, Artificial Sequence
  Description of Artificial Sequence: Synthetic oligonucleotide
  Antisense strand to SEQ ID NO: 1304424
ugucaugcagaacugugcc

SEQ ID NO: 1304426 - RNA, 19 nt, Artificial Sequence
  Description of Artificial Sequence: Synthetic oligonucleotide
  Sense strand starting at position 3201 of SEQ ID NO: 1241846
cacaguucugcaugacaag

SEQ ID NO: 1304427 - RNA, 19 nt, Artificial Sequence
  Description of Artificial Sequence: Synthetic oligonucleotide
  Antisense strand to SEQ ID NO: 1304426
cuugucaugcagaacugug

SEQ ID NO: 1304428 - RNA, 19 nt, Artificial Sequence
  Description of Artificial Sequence: Synthetic oligonucleotide
  Sense strand starting at position 3219 of SEQ ID NO: 1241846
ggccauugccuccaaguca

SEQ ID NO: 1304429 - RNA, 19 nt, Artificial Sequence
  Description of Artificial Sequence: Synthetic oligonucleotide
  Antisense strand to SEQ ID NO: 1304428
ugacuuggaggcaauggcc

SEQ ID NO: 1304430 - RNA, 19 nt, Artificial Sequence
  Description of Artificial Sequence: Synthetic oligonucleotide
  Sense strand starting at position 3367 of SEQ ID NO: 1241846
guuguuccucuagaaucuu

SEQ ID NO: 1304431 - RNA, 19 nt, Artificial Sequence
  Description of Artificial Sequence: Synthetic oligonucleotide
  Antisense strand to SEQ ID NO: 1304430
aagauucuagaggaacaac

SEQ ID NO: 1304432 - RNA, 19 nt, Artificial Sequence
  Description of Artificial Sequence: Synthetic oligonucleotide
  Sense strand starting at position 3491 of SEQ ID NO: 1241846
acaaucauucgugaccacu

SEQ ID NO: 1304433 - RNA, 19 nt, Artificial Sequence
  Description of Artificial Sequence: Synthetic oligonucleotide
  Antisense strand to SEQ ID NO: 1304432
aguggucacgaaugauugu

SEQ ID NO: 1304434 - RNA, 19 nt, Artificial Sequence
  Description of Artificial Sequence: Synthetic oligonucleotide
  Sense strand starting at position 3778 of SEQ ID NO: 1241846
auucuuaucccacggacaa

SEQ ID NO: 1304435 - RNA, 19 nt, Artificial Sequence
  Description of Artificial Sequence: Synthetic oligonucleotide
  Antisense strand to SEQ ID NO: 1304434
uuguccgugggauaagaau

SEQ ID NO: 1304436 - RNA, 19 nt, Artificial Sequence
  Description of Artificial Sequence: Synthetic oligonucleotide
  Sense strand starting at position 3779 of SEQ ID NO: 1241846
uucuuaucccacggacaaa

SEQ ID NO: 1304437 - RNA, 19 nt, Artificial Sequence
  Description of Artificial Sequence: Synthetic oligonucleotide
  Antisense strand to SEQ ID NO: 1304436
uuuguccgugggauaagaa

SEQ ID NO: 1304438 - RNA, 19 nt, Artificial Sequence
  Description of Artificial Sequence: Synthetic oligonucleotide
  Sense strand starting at position 3809 of SEQ ID NO: 1241846
gauguuucggacugaggag

SEQ ID NO: 1304439 - RNA, 19 nt, Artificial Sequence
  Description of Artificial Sequence: Synthetic oligonucleotide
  Antisense strand to SEQ ID NO: 1304438
cuccucaguccgaaacauc

SEQ ID NO: 1304440 - RNA, 19 nt, Artificial Sequence
  Description of Artificial Sequence: Synthetic oligonucleotide
  Sense strand starting at position 95 of SEQ ID NO: 1241847
ccaaucucuuggcuuagua

SEQ ID NO: 1304441 - RNA, 19 nt, Artificial Sequence
  Description of Artificial Sequence: Synthetic oligonucleotide
  Antisense strand to SEQ ID NO: 1304440
uacuaagccaagagauugg

SEQ ID NO: 1304442 - RNA, 19 nt, Artificial Sequence
  Description of Artificial Sequence: Synthetic oligonucleotide
  Sense strand starting at position 99 of SEQ ID NO: 1241847
ucucuuggcuuaguacuau

SEQ ID NO: 1304443 - RNA, 19 nt, Artificial Sequence
  Description of Artificial Sequence: Synthetic oligonucleotide
  Antisense strand to SEQ ID NO: 1304442
auaguacuaagccaagaga

SEQ ID NO: 1304444 - RNA, 19 nt, Artificial Sequence
  Description of Artificial Sequence: Synthetic oligonucleotide
  Sense strand starting at position 105 of SEQ ID NO: 1241847
ggcuuaguacuauguagga

SEQ ID NO: 1304445 - RNA, 19 nt, Artificial Sequence
  Description of Artificial Sequence: Synthetic oligonucleotide
  Antisense strand to SEQ ID NO: 1304444
uccuacauaguacuaagcc

SEQ ID NO: 1304446 - RNA, 19 nt, Artificial Sequence
  Description of Artificial Sequence: Synthetic oligonucleotide
  Sense strand starting at position 412 of SEQ ID NO: 1241847
guuacaagugaacaucagu

SEQ ID NO: 1304447 - RNA, 19 nt, Artificial Sequence
  Description of Artificial Sequence: Synthetic oligonucleotide
  Antisense strand to SEQ ID NO: 1304446
acugauguucacuuguaac

SEQ ID NO: 1304448 - RNA, 19 nt, Artificial Sequence
  Description of Artificial Sequence: Synthetic oligonucleotide
  Sense strand starting at position 468 of SEQ ID NO: 1241847
aaaccugcuugagaaggaa

SEQ ID NO: 1304449 - RNA, 19 nt, Artificial Sequence
  Description of Artificial Sequence: Synthetic oligonucleotide
  Antisense strand to SEQ ID NO: 1304448
uuccuucucaagcagguuu

SEQ ID NO: 1304450 - RNA, 19 nt, Artificial Sequence
  Description of Artificial Sequence: Synthetic oligonucleotide
  Sense strand starting at position 531 of SEQ ID NO: 1241847
gugauacucugaucaguug

SEQ ID NO: 1304451 - RNA, 19 nt, Artificial Sequence
  Description of Artificial Sequence: Synthetic oligonucleotide
  Antisense strand to SEQ ID NO: 1304450
caacugaucagaguaucac

SEQ ID NO: 1304452 - RNA, 19 nt, Artificial Sequence
  Description of Artificial Sequence: Synthetic oligonucleotide
  Sense strand starting at position 538 of SEQ ID NO: 1241847
ucugaucaguuguucuuaa

SEQ ID NO: 1304453 - RNA, 19 nt, Artificial Sequence
  Description of Artificial Sequence: Synthetic oligonucleotide
  Antisense strand to SEQ ID NO: 1304452
uuaagaacaacugaucaga

SEQ ID NO: 1304454 - RNA, 19 nt, Artificial Sequence
  Description of Artificial Sequence: Synthetic oligonucleotide
  Sense strand starting at position 573 of SEQ ID NO: 1241847
gugagacaaacguguccaa

SEQ ID NO: 1304455 - RNA, 19 nt, Artificial Sequence
  Description of Artificial Sequence: Synthetic oligonucleotide
  Antisense strand to SEQ ID NO: 1304454
uuggacacguuugucucac

SEQ ID NO: 1304456 - RNA, 19 nt, Artificial Sequence
  Description of Artificial Sequence: Synthetic oligonucleotide
  Sense strand starting at position 598 of SEQ ID NO: 1241847
ggcugagguuucccaacaa

SEQ ID NO: 1304457 - RNA, 19 nt, Artificial Sequence
  Description of Artificial Sequence: Synthetic oligonucleotide
  Antisense strand to SEQ ID NO: 1304456
uuguugggaaaccucagcc

SEQ ID NO: 1304458 - RNA, 19 nt, Artificial Sequence
  Description of Artificial Sequence: Synthetic oligonucleotide
  Sense strand starting at position 644 of SEQ ID NO: 1241847
gcaaguacaucugcagacu

SEQ ID NO: 1304459 - RNA, 19 nt, Artificial Sequence
  Description of Artificial Sequence: Synthetic oligonucleotide
  Antisense strand to SEQ ID NO: 1304458
agucugcagauguacuugc

SEQ ID NO: 1304460 - RNA, 19 nt, Artificial Sequence
  Description of Artificial Sequence: Synthetic oligonucleotide
  Sense strand starting at position 827 of SEQ ID NO: 1241847
cugcaaagaugaguaucuu

SEQ ID NO: 1304461 - RNA, 19 nt, Artificial Sequence
  Description of Artificial Sequence: Synthetic oligonucleotide
  Antisense strand to SEQ ID NO: 1304460
aagauacucaucuuugcag

SEQ ID NO: 1304462 - RNA, 19 nt, Artificial Sequence
  Description of Artificial Sequence: Synthetic oligonucleotide
  Sense strand starting at position 828 of SEQ ID NO: 1241847
ugcaaagaugaguaucuuu

SEQ ID NO: 1304463 - RNA, 19 nt, Artificial Sequence
  Description of Artificial Sequence: Synthetic oligonucleotide
  Antisense strand to SEQ ID NO: 1304462
aaagauacucaucuuugca

SEQ ID NO: 1304464 - RNA, 19 nt, Artificial Sequence
  Description of Artificial Sequence: Synthetic oligonucleotide
  Sense strand starting at position 871 of SEQ ID NO: 1241847
uuaauaaagugacugguau

SEQ ID NO: 1304465 - RNA, 19 nt, Artificial Sequence
  Description of Artificial Sequence: Synthetic oligonucleotide
  Antisense strand to SEQ ID NO: 1304464
auaccagucacuuuauuaa

SEQ ID NO: 1304466 - RNA, 19 nt, Artificial Sequence
  Description of Artificial Sequence: Synthetic oligonucleotide
  Sense strand starting at position 872 of SEQ ID NO: 1241847
uaauaaagugacugguaua

SEQ ID NO: 1304467 - RNA, 19 nt, Artificial Sequence
  Description of Artificial Sequence: Synthetic oligonucleotide
  Antisense strand to SEQ ID NO: 1304466
uauaccagucacuuuauua

SEQ ID NO: 1304468 - RNA, 19 nt, Artificial Sequence
  Description of Artificial Sequence: Synthetic oligonucleotide
  Sense strand starting at position 909 of SEQ ID NO: 1241847
uguguucugaucuggauca

SEQ ID NO: 1304469 - RNA, 19 nt, Artificial Sequence
  Description of Artificial Sequence: Synthetic oligonucleotide
  Antisense strand to SEQ ID NO: 1304468
ugauccagaucagaacaca

SEQ ID NO: 1304470 - RNA, 19 nt, Artificial Sequence
  Description of Artificial Sequence: Synthetic oligonucleotide
  Sense strand starting at position 911 of SEQ ID NO: 1241847
uguucugaucuggaucagu

SEQ ID NO: 1304471 - RNA, 19 nt, Artificial Sequence
  Description of Artificial Sequence: Synthetic oligonucleotide
  Antisense strand to SEQ ID NO: 1304470
acugauccagaucagaaca

SEQ ID NO: 1304472 - RNA, 19 nt, Artificial Sequence
  Description of Artificial Sequence: Synthetic oligonucleotide
  Sense strand starting at position 1041 of SEQ ID NO: 1241847
uuucaauacguuuguggga

SEQ ID NO: 1304473 - RNA, 19 nt, Artificial Sequence
  Description of Artificial Sequence: Synthetic oligonucleotide
  Antisense strand to SEQ ID NO: 1304472
ucccacaaacguauugaaa

SEQ ID NO: 1304474 - RNA, 19 nt, Artificial Sequence
  Description of Artificial Sequence: Synthetic oligonucleotide
  Sense strand starting at position 1050 of SEQ ID NO: 1241847
guuugugggaggugaagaa

SEQ ID NO: 1304475 - RNA, 19 nt, Artificial Sequence
  Description of Artificial Sequence: Synthetic oligonucleotide
  Antisense strand to SEQ ID NO: 1304474
uucuucaccucccacaaac

SEQ ID NO: 1304476 - RNA, 19 nt, Artificial Sequence
  Description of Artificial Sequence: Synthetic oligonucleotide
  Sense strand starting at position 1079 of SEQ ID NO: 1241847
gcgggaaucauuggccuag

SEQ ID NO: 1304477 - RNA, 19 nt, Artificial Sequence
  Description of Artificial Sequence: Synthetic oligonucleotide
  Antisense strand to SEQ ID NO: 1304476
cuaggccaaugauucccgc

SEQ ID NO: 1304478 - RNA, 19 nt, Artificial Sequence
  Description of Artificial Sequence: Synthetic oligonucleotide
  Sense strand starting at position 1080 of SEQ ID NO: 1241847
cgggaaucauuggccuagu

SEQ ID NO: 1304479 - RNA, 19 nt, Artificial Sequence
  Description of Artificial Sequence: Synthetic oligonucleotide
  Antisense strand to SEQ ID NO: 1304478
acuaggccaaugauucccg

SEQ ID NO: 1304480 - RNA, 19 nt, Artificial Sequence
  Description of Artificial Sequence: Synthetic oligonucleotide
  Sense strand starting at position 1083 of SEQ ID NO: 1241847
gaaucauuggccuagucug

SEQ ID NO: 1304481 - RNA, 19 nt, Artificial Sequence
  Description of Artificial Sequence: Synthetic oligonucleotide
  Antisense strand to SEQ ID NO: 1304480
cagacuaggccaaugauuc

SEQ ID NO: 1304482 - RNA, 19 nt, Artificial Sequence
  Description of Artificial Sequence: Synthetic oligonucleotide
  Sense strand starting at position 1391 of SEQ ID NO: 1241847
ggccacaggugauucuaau

SEQ ID NO: 1304483 - RNA, 19 nt, Artificial Sequence
  Description of Artificial Sequence: Synthetic oligonucleotide
  Antisense strand to SEQ ID NO: 1304482
auuagaaucaccuguggcc

SEQ ID NO: 1304484 - RNA, 19 nt, Artificial Sequence
  Description of Artificial Sequence: Synthetic oligonucleotide
  Sense strand starting at position 1399 of SEQ ID NO: 1241847
gugauucuaauaggcggaa

SEQ ID NO: 1304485 - RNA, 19 nt, Artificial Sequence
  Description of Artificial Sequence: Synthetic oligonucleotide
  Antisense strand to SEQ ID NO: 1304484
uuccgccuauuagaaucac

SEQ ID NO: 1304486 - RNA, 19 nt, Artificial Sequence
  Description of Artificial Sequence: Synthetic oligonucleotide
  Sense strand starting at position 1476 of SEQ ID NO: 1241847
cuuugagaaucugagggaa

SEQ ID NO: 1304487 - RNA, 19 nt, Artificial Sequence
  Description of Artificial Sequence: Synthetic oligonucleotide
  Antisense strand to SEQ ID NO: 1304486
uucccucagauucucaaag

SEQ ID NO: 1304488 - RNA, 19 nt, Artificial Sequence
  Description of Artificial Sequence: Synthetic oligonucleotide
  Sense strand starting at position 1478 of SEQ ID NO: 1241847
uugagaaucugagggaaau

SEQ ID NO: 1304489 - RNA, 19 nt, Artificial Sequence
  Description of Artificial Sequence: Synthetic oligonucleotide
  Antisense strand to SEQ ID NO: 1304488
auuucccucagauucucaa

SEQ ID NO: 1304490 - RNA, 19 nt, Artificial Sequence
  Description of Artificial Sequence: Synthetic oligonucleotide
  Sense strand starting at position 2396 of SEQ ID NO: 1241847
ccgcgaggugguuaagaga

SEQ ID NO: 1304491 - RNA, 19 nt, Artificial Sequence
  Description of Artificial Sequence: Synthetic oligonucleotide
  Antisense strand to SEQ ID NO: 1304490
ucucuuaaccaccucgcgg

SEQ ID NO: 1304492 - RNA, 19 nt, Artificial Sequence
  Description of Artificial Sequence: Synthetic oligonucleotide
  Sense strand starting at position 2569 of SEQ ID NO: 1241847
uggauaguugcgggaacuu

SEQ ID NO: 1304493 - RNA, 19 nt, Artificial Sequence
  Description of Artificial Sequence: Synthetic oligonucleotide
  Antisense strand to SEQ ID NO: 1304492
aaguucccgcaacuaucca

SEQ ID NO: 1304494 - RNA, 19 nt, Artificial Sequence
  Description of Artificial Sequence: Synthetic oligonucleotide
  Sense strand starting at position 2976 of SEQ ID NO: 1241847
uuaacaauuucugaaaggu

SEQ ID NO: 1304495 - RNA, 19 nt, Artificial Sequence
  Description of Artificial Sequence: Synthetic oligonucleotide
  Antisense strand to SEQ ID NO: 1304494
accuuucagaaauuguuaa

SEQ ID NO: 1304496 - RNA, 19 nt, Artificial Sequence
  Description of Artificial Sequence: Synthetic oligonucleotide
  Sense strand starting at position 3055 of SEQ ID NO: 1241847
ugaauaauacuucgucggu

SEQ ID NO: 1304497 - RNA, 19 nt, Artificial Sequence
  Description of Artificial Sequence: Synthetic oligonucleotide
  Antisense strand to SEQ ID NO: 1304496
accgacgaaguauuauuca

SEQ ID NO: 1304498 - RNA, 19 nt, Artificial Sequence
  Description of Artificial Sequence: Synthetic oligonucleotide
  Sense strand starting at position 3056 of SEQ ID NO: 1241847
gaauaauacuucgucgguu

SEQ ID NO: 1304499 - RNA, 19 nt, Artificial Sequence
  Description of Artificial Sequence: Synthetic oligonucleotide
  Antisense strand to SEQ ID NO: 1304498
aaccgacgaaguauuauuc

SEQ ID NO: 1304500 - RNA, 19 nt, Artificial Sequence
  Description of Artificial Sequence: Synthetic oligonucleotide
  Sense strand starting at position 3057 of SEQ ID NO: 1241847
aauaauacuucgucgguua

SEQ ID NO: 1304501 - RNA, 19 nt, Artificial Sequence
  Description of Artificial Sequence: Synthetic oligonucleotide
  Antisense strand to SEQ ID NO: 1304500
uaaccgacgaaguauuauu

SEQ ID NO: 1304502 - RNA, 19 nt, Artificial Sequence
  Description of Artificial Sequence: Synthetic oligonucleotide
  Sense strand starting at position 3060 of SEQ ID NO: 1241847
aauacuucgucgguuauuu

SEQ ID NO: 1304503 - RNA, 19 nt, Artificial Sequence
  Description of Artificial Sequence: Synthetic oligonucleotide
  Antisense strand to SEQ ID NO: 1304502
aaauaaccgacgaaguauu

SEQ ID NO: 1304504 - RNA, 19 nt, Artificial Sequence
  Description of Artificial Sequence: Synthetic oligonucleotide
  Sense strand starting at position 3103 of SEQ ID NO: 1241847
agugcuauguaaguauuaa

SEQ ID NO: 1304505 - RNA, 19 nt, Artificial Sequence
  Description of Artificial Sequence: Synthetic oligonucleotide
  Antisense strand to SEQ ID NO: 1304504
uuaauacuuacauagcacu

SEQ ID NO: 1304506 - RNA, 19 nt, Artificial Sequence
  Description of Artificial Sequence: Synthetic oligonucleotide
  Sense strand starting at position 3188 of SEQ ID NO: 1241847
gacaaauguugggaccuga

SEQ ID NO: 1304507 - RNA, 19 nt, Artificial Sequence
  Description of Artificial Sequence: Synthetic oligonucleotide
  Antisense strand to SEQ ID NO: 1304506
ucaggucccaacauuuguc

SEQ ID NO: 1304508 - RNA, 19 nt, Artificial Sequence
  Description of Artificial Sequence: Synthetic oligonucleotide
  Sense strand starting at position 3345 of SEQ ID NO: 1241847
agauuccagugauuguauu

SEQ ID NO: 1304509 - RNA, 19 nt, Artificial Sequence
  Description of Artificial Sequence: Synthetic oligonucleotide
  Antisense strand to SEQ ID NO: 1304508
aauacaaucacuggaaucu

SEQ ID NO: 1304510 - RNA, 19 nt, Artificial Sequence
  Description of Artificial Sequence: Synthetic oligonucleotide
  Sense strand starting at position 3371 of SEQ ID NO: 1241847
gucagaucccagcacaaua

SEQ ID NO: 1304511 - RNA, 19 nt, Artificial Sequence
  Description of Artificial Sequence: Synthetic oligonucleotide
  Antisense strand to SEQ ID NO: 1304510
uauugugcugggaucugac

SEQ ID NO: 1304512 - RNA, 19 nt, Artificial Sequence
  Description of Artificial Sequence: Synthetic oligonucleotide
  Sense strand starting at position 3423 of SEQ ID NO: 1241847
agugauagaucugcuuugu

SEQ ID NO: 1304513 - RNA, 19 nt, Artificial Sequence
  Description of Artificial Sequence: Synthetic oligonucleotide
  Antisense strand to SEQ ID NO: 1304512
acaaagcagaucuaucacu

SEQ ID NO: 1304514 - RNA, 19 nt, Artificial Sequence
  Description of Artificial Sequence: Synthetic oligonucleotide
  Sense strand starting at position 3688 of SEQ ID NO: 1241847
gagagaauauggcaaagua

SEQ ID NO: 1304515 - RNA, 19 nt, Artificial Sequence
  Description of Artificial Sequence: Synthetic oligonucleotide
  Antisense strand to SEQ ID NO: 1304514
uacuuugccauauucucuc

SEQ ID NO: 1304516 - RNA, 19 nt, Artificial Sequence
  Description of Artificial Sequence: Synthetic oligonucleotide
  Sense strand starting at position 3708 of SEQ ID NO: 1241847
acacgauaaugaguaccau

SEQ ID NO: 1304517 - RNA, 19 nt, Artificial Sequence
  Description of Artificial Sequence: Synthetic oligonucleotide
  Antisense strand to SEQ ID NO: 1304516
augguacucauuaucgugu

SEQ ID NO: 1304518 - RNA, 19 nt, Artificial Sequence
  Description of Artificial Sequence: Synthetic oligonucleotide
  Sense strand starting at position 3709 of SEQ ID NO: 1241847
cacgauaaugaguaccauu

SEQ ID NO: 1304519 - RNA, 19 nt, Artificial Sequence
  Description of Artificial Sequence: Synthetic oligonucleotide
  Antisense strand to SEQ ID NO: 1304518
aaugguacucauuaucgug

SEQ ID NO: 1304520 - RNA, 19 nt, Artificial Sequence
  Description of Artificial Sequence: Synthetic oligonucleotide
  Sense strand starting at position 41 of SEQ ID NO: 1241848
ucugcagagcacuaagaau

SEQ ID NO: 1304521 - RNA, 19 nt, Artificial Sequence
  Description of Artificial Sequence: Synthetic oligonucleotide
  Antisense strand to SEQ ID NO: 1304520
auucuuagugcucugcaga

SEQ ID NO: 1304522 - RNA, 19 nt, Artificial Sequence
  Description of Artificial Sequence: Synthetic oligonucleotide
  Sense strand starting at position 109 of SEQ ID NO: 1241848
guaaucacucuguauugac

SEQ ID NO: 1304523 - RNA, 19 nt, Artificial Sequence
  Description of Artificial Sequence: Synthetic oligonucleotide
  Antisense strand to SEQ ID NO: 1304522
gucaauacagagugauuac

SEQ ID NO: 1304524 - RNA, 19 nt, Artificial Sequence
  Description of Artificial Sequence: Synthetic oligonucleotide
  Sense strand starting at position 172 of SEQ ID NO: 1241848
gucucagucucacuaagaa

SEQ ID NO: 1304525 - RNA, 19 nt, Artificial Sequence
  Description of Artificial Sequence: Synthetic oligonucleotide
  Antisense strand to SEQ ID NO: 1304524
uucuuagugagacugagac

SEQ ID NO: 1304526 - RNA, 19 nt, Artificial Sequence
  Description of Artificial Sequence: Synthetic oligonucleotide
  Sense strand starting at position 204 of SEQ ID NO: 1241848
agcagugaccgggaaucau

SEQ ID NO: 1304527 - RNA, 19 nt, Artificial Sequence
  Description of Artificial Sequence: Synthetic oligonucleotide
  Antisense strand to SEQ ID NO: 1304526
augauucccggucacugcu

SEQ ID NO: 1304528 - RNA, 19 nt, Artificial Sequence
  Description of Artificial Sequence: Synthetic oligonucleotide
  Sense strand starting at position 412 of SEQ ID NO: 1241848
uaacgaaucuggucuaaug

SEQ ID NO: 1304529 - RNA, 19 nt, Artificial Sequence
  Description of Artificial Sequence: Synthetic oligonucleotide
  Antisense strand to SEQ ID NO: 1304528
cauuagaccagauucguua

SEQ ID NO: 1304530 - RNA, 19 nt, Artificial Sequence
  Description of Artificial Sequence: Synthetic oligonucleotide
  Sense strand starting at position 430 of SEQ ID NO: 1241848
guguuucucagagaccaga

SEQ ID NO: 1304531 - RNA, 19 nt, Artificial Sequence
  Description of Artificial Sequence: Synthetic oligonucleotide
  Antisense strand to SEQ ID NO: 1304530
ucuggucucugagaaacac

SEQ ID NO: 1304532 - RNA, 19 nt, Artificial Sequence
  Description of Artificial Sequence: Synthetic oligonucleotide
  Sense strand starting at position 601 of SEQ ID NO: 1241848
ugggcuauucucuauaacu

SEQ ID NO: 1304533 - RNA, 19 nt, Artificial Sequence
  Description of Artificial Sequence: Synthetic oligonucleotide
  Antisense strand to SEQ ID NO: 1304532
aguuauagagaauagccca

SEQ ID NO: 1304534 - RNA, 19 nt, Artificial Sequence
  Description of Artificial Sequence: Synthetic oligonucleotide
  Sense strand starting at position 653 of SEQ ID NO: 1241848
ggaaauccuuaagcaggau

SEQ ID NO: 1304535 - RNA, 19 nt, Artificial Sequence
  Description of Artificial Sequence: Synthetic oligonucleotide
  Antisense strand to SEQ ID NO: 1304534
auccugcuuaaggauuucc

SEQ ID NO: 1304536 - RNA, 19 nt, Artificial Sequence
  Description of Artificial Sequence: Synthetic oligonucleotide
  Sense strand starting at position 823 of SEQ ID NO: 1241848
uuguuaauagcugaguaaa

SEQ ID NO: 1304537 - RNA, 19 nt, Artificial Sequence
  Description of Artificial Sequence: Synthetic oligonucleotide
  Antisense strand to SEQ ID NO: 1304536
uuuacucagcuauuaacaa

SEQ ID NO: 1304538 - RNA, 19 nt, Artificial Sequence
  Description of Artificial Sequence: Synthetic oligonucleotide
  Sense strand starting at position 826 of SEQ ID NO: 1241848
uuaauagcugaguaaaucu

SEQ ID NO: 1304539 - RNA, 19 nt, Artificial Sequence
  Description of Artificial Sequence: Synthetic oligonucleotide
  Antisense strand to SEQ ID NO: 1304538
agauuuacucagcuauuaa

SEQ ID NO: 1304540 - RNA, 19 nt, Artificial Sequence
  Description of Artificial Sequence: Synthetic oligonucleotide
  Sense strand starting at position 834 of SEQ ID NO: 1241848
ugaguaaaucucugggcaa

SEQ ID NO: 1304541 - RNA, 19 nt, Artificial Sequence
  Description of Artificial Sequence: Synthetic oligonucleotide
  Antisense strand to SEQ ID NO: 1304540
uugcccagagauuuacuca

SEQ ID NO: 1304542 - RNA, 19 nt, Artificial Sequence
  Description of Artificial Sequence: Synthetic oligonucleotide
  Sense strand starting at position 867 of SEQ ID NO: 1241848
uuagaagucgucccucguu

SEQ ID NO: 1304543 - RNA, 19 nt, Artificial Sequence
  Description of Artificial Sequence: Synthetic oligonucleotide
  Antisense strand to SEQ ID NO: 1304542
aacgagggacgacuucuaa

SEQ ID NO: 1304544 - RNA, 19 nt, Artificial Sequence
  Description of Artificial Sequence: Synthetic oligonucleotide
  Sense strand starting at position 882 of SEQ ID NO: 1241848
cguuuauaucuagaagguu

SEQ ID NO: 1304545 - RNA, 19 nt, Artificial Sequence
  Description of Artificial Sequence: Synthetic oligonucleotide
  Antisense strand to SEQ ID NO: 1304544
aaccuucuagauauaaacg

SEQ ID NO: 1304546 - RNA, 19 nt, Artificial Sequence
  Description of Artificial Sequence: Synthetic oligonucleotide
  Sense strand starting at position 935 of SEQ ID NO: 1241848
agagauuacuuugcuuuaa

SEQ ID NO: 1304547 - RNA, 19 nt, Artificial Sequence
  Description of Artificial Sequence: Synthetic oligonucleotide
  Antisense strand to SEQ ID NO: 1304546
uuaaagcaaaguaaucucu

SEQ ID NO: 1304548 - RNA, 19 nt, Artificial Sequence
  Description of Artificial Sequence: Synthetic oligonucleotide
  Sense strand starting at position 1045 of SEQ ID NO: 1241848
gugaucugacagcacaaua

SEQ ID NO: 1304549 - RNA, 19 nt, Artificial Sequence
  Description of Artificial Sequence: Synthetic oligonucleotide
  Antisense strand to SEQ ID NO: 1304548
uauugugcugucagaucac

SEQ ID NO: 1304550 - RNA, 19 nt, Artificial Sequence
  Description of Artificial Sequence: Synthetic oligonucleotide
  Sense strand starting at position 1491 of SEQ ID NO: 1241848
aggcauuauugggucugaa

SEQ ID NO: 1304551 - RNA, 19 nt, Artificial Sequence
  Description of Artificial Sequence: Synthetic oligonucleotide
  Antisense strand to SEQ ID NO: 1304550
uucagacccaauaaugccu

SEQ ID NO: 1304552 - RNA, 19 nt, Artificial Sequence
  Description of Artificial Sequence: Synthetic oligonucleotide
  Sense strand starting at position 1988 of SEQ ID NO: 1241848
gugccaguuguguugccaa

SEQ ID NO: 1304553 - RNA, 19 nt, Artificial Sequence
  Description of Artificial Sequence: Synthetic oligonucleotide
  Antisense strand to SEQ ID NO: 1304552
uuggcaacacaacuggcac

SEQ ID NO: 1304554 - RNA, 19 nt, Artificial Sequence
  Description of Artificial Sequence: Synthetic oligonucleotide
  Sense strand starting at position 1990 of SEQ ID NO: 1241848
gccaguuguguugccaaau

SEQ ID NO: 1304555 - RNA, 19 nt, Artificial Sequence
  Description of Artificial Sequence: Synthetic oligonucleotide
  Antisense strand to SEQ ID NO: 1304554
auuuggcaacacaacuggc

SEQ ID NO: 1304556 - RNA, 19 nt, Artificial Sequence
  Description of Artificial Sequence: Synthetic oligonucleotide
  Sense strand starting at position 2266 of SEQ ID NO: 1241848
augauaccacucugagguu

SEQ ID NO: 1304557 - RNA, 19 nt, Artificial Sequence
  Description of Artificial Sequence: Synthetic oligonucleotide
  Antisense strand to SEQ ID NO: 1304556
aaccucagagugguaucau

SEQ ID NO: 1304558 - RNA, 19 nt, Artificial Sequence
  Description of Artificial Sequence: Synthetic oligonucleotide
  Sense strand starting at position 2381 of SEQ ID NO: 1241848
caccucuucgguuaugaaa

SEQ ID NO: 1304559 - RNA, 19 nt, Artificial Sequence
  Description of Artificial Sequence: Synthetic oligonucleotide
  Antisense strand to SEQ ID NO: 1304558
uuucauaaccgaagaggug

SEQ ID NO: 1304560 - RNA, 19 nt, Artificial Sequence
  Description of Artificial Sequence: Synthetic oligonucleotide
  Sense strand starting at position 2473 of SEQ ID NO: 1241848
ucugaaguuucuucugaag

SEQ ID NO: 1304561 - RNA, 19 nt, Artificial Sequence
  Description of Artificial Sequence: Synthetic oligonucleotide
  Antisense strand to SEQ ID NO: 1304560
cuucagaagaaacuucaga

SEQ ID NO: 1304562 - RNA, 19 nt, Artificial Sequence
  Description of Artificial Sequence: Synthetic oligonucleotide
  Sense strand starting at position 2508 of SEQ ID NO: 1241848
guuucuucugaagaagcau

SEQ ID NO: 1304563 - RNA, 19 nt, Artificial Sequence
  Description of Artificial Sequence: Synthetic oligonucleotide
  Antisense strand to SEQ ID NO: 1304562
augcuucuucagaagaaac

SEQ ID NO: 1304564 - RNA, 19 nt, Artificial Sequence
  Description of Artificial Sequence: Synthetic oligonucleotide
  Sense strand starting at position 2595 of SEQ ID NO: 1241848
acaauagcagcuugaaauu

SEQ ID NO: 1304565 - RNA, 19 nt, Artificial Sequence
  Description of Artificial Sequence: Synthetic oligonucleotide
  Antisense strand to SEQ ID NO: 1304564
aauuucaagcugcuauugu

SEQ ID NO: 1304566 - RNA, 19 nt, Artificial Sequence
  Description of Artificial Sequence: Synthetic oligonucleotide
  Sense strand starting at position 2628 of SEQ ID NO: 1241848
gaugacugagccggaaaga

SEQ ID NO: 1304567 - RNA, 19 nt, Artificial Sequence
  Description of Artificial Sequence: Synthetic oligonucleotide
  Antisense strand to SEQ ID NO: 1304566
ucuuuccggcucagucauc

SEQ ID NO: 1304568 - RNA, 19 nt, Artificial Sequence
  Description of Artificial Sequence: Synthetic oligonucleotide
  Sense strand starting at position 3045 of SEQ ID NO: 1241848
ggagacuucucaucuguag

SEQ ID NO: 1304569 - RNA, 19 nt, Artificial Sequence
  Description of Artificial Sequence: Synthetic oligonucleotide
  Antisense strand to SEQ ID NO: 1304568
cuacagaugagaagucucc

SEQ ID NO: 1304570 - RNA, 19 nt, Artificial Sequence
  Description of Artificial Sequence: Synthetic oligonucleotide
  Sense strand starting at position 3049 of SEQ ID NO: 1241848
acuucucaucuguagguga

SEQ ID NO: 1304571 - RNA, 19 nt, Artificial Sequence
  Description of Artificial Sequence: Synthetic oligonucleotide
  Antisense strand to SEQ ID NO: 1304570
ucaccuacagaugagaagu

SEQ ID NO: 1304572 - RNA, 19 nt, Artificial Sequence
  Description of Artificial Sequence: Synthetic oligonucleotide
  Sense strand starting at position 3150 of SEQ ID NO: 1241848
gcuuuaauuccugaugaag

SEQ ID NO: 1304573 - RNA, 19 nt, Artificial Sequence
  Description of Artificial Sequence: Synthetic oligonucleotide
  Antisense strand to SEQ ID NO: 1304572
cuucaucaggaauuaaagc

SEQ ID NO: 1304574 - RNA, 19 nt, Artificial Sequence
  Description of Artificial Sequence: Synthetic oligonucleotide
  Sense strand starting at position 3179 of SEQ ID NO: 1241848
uaccauugucuagaagagu

SEQ ID NO: 1304575 - RNA, 19 nt, Artificial Sequence
  Description of Artificial Sequence: Synthetic oligonucleotide
  Antisense strand to SEQ ID NO: 1304574
acucuucuagacaauggua

SEQ ID NO: 1304576 - RNA, 19 nt, Artificial Sequence
  Description of Artificial Sequence: Synthetic oligonucleotide
  Sense strand starting at position 3188 of SEQ ID NO: 1241848
cuagaagaguuaccuauga

SEQ ID NO: 1304577 - RNA, 19 nt, Artificial Sequence
  Description of Artificial Sequence: Synthetic oligonucleotide
  Antisense strand to SEQ ID NO: 1304576
ucauagguaacucuucuag

SEQ ID NO: 1304578 - RNA, 19 nt, Artificial Sequence
  Description of Artificial Sequence: Synthetic oligonucleotide
  Sense strand starting at position 3394 of SEQ ID NO: 1241848
gagccuagagucuagugaa

SEQ ID NO: 1304579 - RNA, 19 nt, Artificial Sequence
  Description of Artificial Sequence: Synthetic oligonucleotide
  Antisense strand to SEQ ID NO: 1304578
uucacuagacucuaggcuc

SEQ ID NO: 1304580 - RNA, 19 nt, Artificial Sequence
  Description of Artificial Sequence: Synthetic oligonucleotide
  Sense strand starting at position 3467 of SEQ ID NO: 1241848
agauguaugcugcaaagau

SEQ ID NO: 1304581 - RNA, 19 nt, Artificial Sequence
  Description of Artificial Sequence: Synthetic oligonucleotide
  Antisense strand to SEQ ID NO: 1304580
aucuuugcagcauacaucu

SEQ ID NO: 1304582 - RNA, 19 nt, Artificial Sequence
  Description of Artificial Sequence: Synthetic oligonucleotide
  Sense strand starting at position 3523 of SEQ ID NO: 1241848
uuugacuuuguuggagaga

SEQ ID NO: 1304583 - RNA, 19 nt, Artificial Sequence
  Description of Artificial Sequence: Synthetic oligonucleotide
  Antisense strand to SEQ ID NO: 1304582
ucucuccaacaaagucaaa

SEQ ID NO: 1304584 - RNA, 19 nt, Artificial Sequence
  Description of Artificial Sequence: Synthetic oligonucleotide
  Sense strand starting at position 3528 of SEQ ID NO: 1241848
cuuuguuggagagaucucu

SEQ ID NO: 1304585 - RNA, 19 nt, Artificial Sequence
  Description of Artificial Sequence: Synthetic oligonucleotide
  Antisense strand to SEQ ID NO: 1304584
agagaucucuccaacaaag

SEQ ID NO: 1304586 - RNA, 19 nt, Artificial Sequence
  Description of Artificial Sequence: Synthetic oligonucleotide
  Sense strand starting at position 3559 of SEQ ID NO: 1241848
aaggaagucauguguggac

SEQ ID NO: 1304587 - RNA, 19 nt, Artificial Sequence
  Description of Artificial Sequence: Synthetic oligonucleotide
  Antisense strand to SEQ ID NO: 1304586
guccacacaugacuuccuu

SEQ ID NO: 1304588 - RNA, 19 nt, Artificial Sequence
  Description of Artificial Sequence: Synthetic oligonucleotide
  Sense strand starting at position 3619 of SEQ ID NO: 1241848
gaagaaagugcauguacaa

SEQ ID NO: 1304589 - RNA, 19 nt, Artificial Sequence
  Description of Artificial Sequence: Synthetic oligonucleotide
  Antisense strand to SEQ ID NO: 1304588
uuguacaugcacuuucuuc

SEQ ID NO: 1304590 - RNA, 19 nt, Artificial Sequence
  Description of Artificial Sequence: Synthetic oligonucleotide
  Sense strand starting at position 3817 of SEQ ID NO: 1241848
aguguaagucauuaaggug

SEQ ID NO: 1304591 - RNA, 19 nt, Artificial Sequence
  Description of Artificial Sequence: Synthetic oligonucleotide
  Antisense strand to SEQ ID NO: 1304590
caccuuaaugacuuacacu

SEQ ID NO: 1304592 - RNA, 19 nt, Artificial Sequence
  Description of Artificial Sequence: Synthetic oligonucleotide
  Sense strand starting at position 3833 of SEQ ID NO: 1241848
gugguuuaagcagaaauac

SEQ ID NO: 1304593 - RNA, 19 nt, Artificial Sequence
  Description of Artificial Sequence: Synthetic oligonucleotide
  Antisense strand to SEQ ID NO: 1304592
guauuucugcuuaaaccac

SEQ ID NO: 1304594 - RNA, 19 nt, Artificial Sequence
  Description of Artificial Sequence: Synthetic oligonucleotide
  Sense strand starting at position 3926 of SEQ ID NO: 1241848
uggucauaggcagauacau

SEQ ID NO: 1304595 - RNA, 19 nt, Artificial Sequence
  Description of Artificial Sequence: Synthetic oligonucleotide
  Antisense strand to SEQ ID NO: 1304594
auguaucugccuaugacca

SEQ ID NO: 1304596 - RNA, 19 nt, Artificial Sequence
  Description of Artificial Sequence: Synthetic oligonucleotide
  Sense strand starting at position 3977 of SEQ ID NO: 1241848
guaguuugacaguggagaa

SEQ ID NO: 1304597 - RNA, 19 nt, Artificial Sequence
  Description of Artificial Sequence: Synthetic oligonucleotide
  Antisense strand to SEQ ID NO: 1304596
uucuccacugucaaacuac

SEQ ID NO: 1304598 - RNA, 19 nt, Artificial Sequence
  Description of Artificial Sequence: Synthetic oligonucleotide
  Sense strand starting at position 3978 of SEQ ID NO: 1241848
uaguuugacaguggagaaa

SEQ ID NO: 1304599 - RNA, 19 nt, Artificial Sequence
  Description of Artificial Sequence: Synthetic oligonucleotide
  Antisense strand to SEQ ID NO: 1304598
uuucuccacugucaaacua

SEQ ID NO: 1304600 - RNA, 19 nt, Artificial Sequence
  Description of Artificial Sequence: Synthetic oligonucleotide
  Sense strand starting at position 796 of SEQ ID NO: 1241849
ugaugagauuugcacuugu

SEQ ID NO: 1304601 - RNA, 19 nt, Artificial Sequence
  Description of Artificial Sequence: Synthetic oligonucleotide
  Antisense strand to SEQ ID NO: 1304600
acaagugcaaaucucauca

SEQ ID NO: 1304602 - RNA, 19 nt, Artificial Sequence
  Description of Artificial Sequence: Synthetic oligonucleotide
  Sense strand starting at position 804 of SEQ ID NO: 1241849
uuugcacuuguaugaaauc

SEQ ID NO: 1304603 - RNA, 19 nt, Artificial Sequence
  Description of Artificial Sequence: Synthetic oligonucleotide
  Antisense strand to SEQ ID NO: 1304602
gauuucauacaagugcaaa

SEQ ID NO: 1304604 - RNA, 19 nt, Artificial Sequence
  Description of Artificial Sequence: Synthetic oligonucleotide
  Sense strand starting at position 868 of SEQ ID NO: 1241849
aggacaauauaacagauua

SEQ ID NO: 1304605 - RNA, 19 nt, Artificial Sequence
  Description of Artificial Sequence: Synthetic oligonucleotide
  Antisense strand to SEQ ID NO: 1304604
uaaucuguuauauuguccu

SEQ ID NO: 1304606 - RNA, 19 nt, Artificial Sequence
  Description of Artificial Sequence: Synthetic oligonucleotide
  Sense strand starting at position 890 of SEQ ID NO: 1241849
uaccuugguccaggcagaa

SEQ ID NO: 1304607 - RNA, 19 nt, Artificial Sequence
  Description of Artificial Sequence: Synthetic oligonucleotide
  Antisense strand to SEQ ID NO: 1304606
uucugccuggaccaaggua

SEQ ID NO: 1304608 - RNA, 19 nt, Artificial Sequence
  Description of Artificial Sequence: Synthetic oligonucleotide
  Sense strand starting at position 920 of SEQ ID NO: 1241849
ccaagcuuagggugacaga

SEQ ID NO: 1304609 - RNA, 19 nt, Artificial Sequence
  Description of Artificial Sequence: Synthetic oligonucleotide
  Antisense strand to SEQ ID NO: 1304608
ucugucacccuaagcuugg

SEQ ID NO: 1304610 - RNA, 19 nt, Artificial Sequence
  Description of Artificial Sequence: Synthetic oligonucleotide
  Sense strand starting at position 977 of SEQ ID NO: 1241849
uguagaaauguagggacua

SEQ ID NO: 1304611 - RNA, 19 nt, Artificial Sequence
  Description of Artificial Sequence: Synthetic oligonucleotide
  Antisense strand to SEQ ID NO: 1304610
uagucccuacauuucuaca

SEQ ID NO: 1304612 - RNA, 19 nt, Artificial Sequence
  Description of Artificial Sequence: Synthetic oligonucleotide
  Sense strand starting at position 1026 of SEQ ID NO: 1241849
aggcuucugcccuggcaaa

SEQ ID NO: 1304613 - RNA, 19 nt, Artificial Sequence
  Description of Artificial Sequence: Synthetic oligonucleotide
  Antisense strand to SEQ ID NO: 1304612
uuugccagggcagaagccu

SEQ ID NO: 1304614 - RNA, 19 nt, Artificial Sequence
  Description of Artificial Sequence: Synthetic oligonucleotide
  Sense strand starting at position 1036 of SEQ ID NO: 1241849
ccuggcaaaucuguugaga

SEQ ID NO: 1304615 - RNA, 19 nt, Artificial Sequence
  Description of Artificial Sequence: Synthetic oligonucleotide
  Antisense strand to SEQ ID NO: 1304614
ucucaacagauuugccagg

SEQ ID NO: 1304616 - RNA, 19 nt, Artificial Sequence
  Description of Artificial Sequence: Synthetic oligonucleotide
  Sense strand starting at position 1076 of SEQ ID NO: 1241849
gcaggugggcaugauaacu

SEQ ID NO: 1304617 - RNA, 19 nt, Artificial Sequence
  Description of Artificial Sequence: Synthetic oligonucleotide
  Antisense strand to SEQ ID NO: 1304616
aguuaucaugcccaccugc

SEQ ID NO: 1304618 - RNA, 19 nt, Artificial Sequence
  Description of Artificial Sequence: Synthetic oligonucleotide
  Sense strand starting at position 1172 of SEQ ID NO: 1241849
gacugugguucccuaucca

SEQ ID NO: 1304619 - RNA, 19 nt, Artificial Sequence
  Description of Artificial Sequence: Synthetic oligonucleotide
  Antisense strand to SEQ ID NO: 1304618
uggauagggaaccacaguc

SEQ ID NO: 1304620 - RNA, 19 nt, Artificial Sequence
  Description of Artificial Sequence: Synthetic oligonucleotide
  Sense strand starting at position 1204 of SEQ ID NO: 1241849
cucacaaugcaagauagua

SEQ ID NO: 1304621 - RNA, 19 nt, Artificial Sequence
  Description of Artificial Sequence: Synthetic oligonucleotide
  Antisense strand to SEQ ID NO: 1304620
uacuaucuugcauugugag

SEQ ID NO: 1304622 - RNA, 19 nt, Artificial Sequence
  Description of Artificial Sequence: Synthetic oligonucleotide
  Sense strand starting at position 1220 of SEQ ID NO: 1241849
guaaacagauucuaaauga

SEQ ID NO: 1304623 - RNA, 19 nt, Artificial Sequence
  Description of Artificial Sequence: Synthetic oligonucleotide
  Antisense strand to SEQ ID NO: 1304622
ucauuuagaaucuguuuac

SEQ ID NO: 1304624 - RNA, 19 nt, Artificial Sequence
  Description of Artificial Sequence: Synthetic oligonucleotide
  Sense strand starting at position 1276 of SEQ ID NO: 1241849
ggucuauuuggaggugucu

SEQ ID NO: 1304625 - RNA, 19 nt, Artificial Sequence
  Description of Artificial Sequence: Synthetic oligonucleotide
  Antisense strand to SEQ ID NO: 1304624
agacaccuccaaauagacc

SEQ ID NO: 1304626 - RNA, 19 nt, Artificial Sequence
  Description of Artificial Sequence: Synthetic oligonucleotide
  Sense strand starting at position 1285 of SEQ ID NO: 1241849
ggaggugucuugucaguuu

SEQ ID NO: 1304627 - RNA, 19 nt, Artificial Sequence
  Description of Artificial Sequence: Synthetic oligonucleotide
  Antisense strand to SEQ ID NO: 1304626
aaacugacaagacaccucc

SEQ ID NO: 1304628 - RNA, 19 nt, Artificial Sequence
  Description of Artificial Sequence: Synthetic oligonucleotide
  Sense strand starting at position 1350 of SEQ ID NO: 1241849
gccuacuccuacuugaaga

SEQ ID NO: 1304629 - RNA, 19 nt, Artificial Sequence
  Description of Artificial Sequence: Synthetic oligonucleotide
  Antisense strand to SEQ ID NO: 1304628
ucuucaaguaggaguaggc

SEQ ID NO: 1304630 - RNA, 19 nt, Artificial Sequence
  Description of Artificial Sequence: Synthetic oligonucleotide
  Sense strand starting at position 1444 of SEQ ID NO: 1241849
uccauugcuccugagacaa

SEQ ID NO: 1304631 - RNA, 19 nt, Artificial Sequence
  Description of Artificial Sequence: Synthetic oligonucleotide
  Antisense strand to SEQ ID NO: 1304630
uugucucaggagcaaugga

SEQ ID NO: 1304632 - RNA, 19 nt, Artificial Sequence
  Description of Artificial Sequence: Synthetic oligonucleotide
  Sense strand starting at position 1592 of SEQ ID NO: 1241849
cggagcugauacucaguaa

SEQ ID NO: 1304633 - RNA, 19 nt, Artificial Sequence
  Description of Artificial Sequence: Synthetic oligonucleotide
  Antisense strand to SEQ ID NO: 1304632
uuacugaguaucagcuccg

SEQ ID NO: 1304634 - RNA, 19 nt, Artificial Sequence
  Description of Artificial Sequence: Synthetic oligonucleotide
  Sense strand starting at position 1615 of SEQ ID NO: 1241849
acgugugugaaucaauuaa

SEQ ID NO: 1304635 - RNA, 19 nt, Artificial Sequence
  Description of Artificial Sequence: Synthetic oligonucleotide
  Antisense strand to SEQ ID NO: 1304634
uuaauugauucacacacgu

SEQ ID NO: 1304636 - RNA, 19 nt, Artificial Sequence
  Description of Artificial Sequence: Synthetic oligonucleotide
  Sense strand starting at position 1750 of SEQ ID NO: 1241849
ucacgaacuccgcauugau

SEQ ID NO: 1304637 - RNA, 19 nt, Artificial Sequence
  Description of Artificial Sequence: Synthetic oligonucleotide
  Antisense strand to SEQ ID NO: 1304636
aucaaugcggaguucguga

SEQ ID NO: 1304638 - RNA, 19 nt, Artificial Sequence
  Description of Artificial Sequence: Synthetic oligonucleotide
  Sense strand starting at position 1883 of SEQ ID NO: 1241849
guccacuucccuuaaguua

SEQ ID NO: 1304639 - RNA, 19 nt, Artificial Sequence
  Description of Artificial Sequence: Synthetic oligonucleotide
  Antisense strand to SEQ ID NO: 1304638
uaacuuaagggaaguggac

SEQ ID NO: 1304640 - RNA, 19 nt, Artificial Sequence
  Description of Artificial Sequence: Synthetic oligonucleotide
  Sense strand starting at position 1942 of SEQ ID NO: 1241849
gccggauauccucagccuu

SEQ ID NO: 1304641 - RNA, 19 nt, Artificial Sequence
  Description of Artificial Sequence: Synthetic oligonucleotide
  Antisense strand to SEQ ID NO: 1304640
aaggcugaggauauccggc

SEQ ID NO: 1304642 - RNA, 19 nt, Artificial Sequence
  Description of Artificial Sequence: Synthetic oligonucleotide
  Sense strand starting at position 1959 of SEQ ID NO: 1241849
uucagagucccguagggaa

SEQ ID NO: 1304643 - RNA, 19 nt, Artificial Sequence
  Description of Artificial Sequence: Synthetic oligonucleotide
  Antisense strand to SEQ ID NO: 1304642
uucccuacgggacucugaa

SEQ ID NO: 1304644 - RNA, 19 nt, Artificial Sequence
  Description of Artificial Sequence: Synthetic oligonucleotide
  Sense strand starting at position 2176 of SEQ ID NO: 1241849
guuucucgugguuagugaa

SEQ ID NO: 1304645 - RNA, 19 nt, Artificial Sequence
  Description of Artificial Sequence: Synthetic oligonucleotide
  Antisense strand to SEQ ID NO: 1304644
uucacuaaccacgagaaac

SEQ ID NO: 1304646 - RNA, 19 nt, Artificial Sequence
  Description of Artificial Sequence: Synthetic oligonucleotide
  Sense strand starting at position 2275 of SEQ ID NO: 1241849
gggaauaugggcuggguuu

SEQ ID NO: 1304647 - RNA, 19 nt, Artificial Sequence
  Description of Artificial Sequence: Synthetic oligonucleotide
  Antisense strand to SEQ ID NO: 1304646
aaacccagcccauauuccc

SEQ ID NO: 1304648 - RNA, 19 nt, Artificial Sequence
  Description of Artificial Sequence: Synthetic oligonucleotide
  Sense strand starting at position 2440 of SEQ ID NO: 1241849
ucccguguuguugggauua

SEQ ID NO: 1304649 - RNA, 19 nt, Artificial Sequence
  Description of Artificial Sequence: Synthetic oligonucleotide
  Antisense strand to SEQ ID NO: 1304648
uaaucccaacaacacggga

SEQ ID NO: 1304650 - RNA, 19 nt, Artificial Sequence
  Description of Artificial Sequence: Synthetic oligonucleotide
  Sense strand starting at position 2590 of SEQ ID NO: 1241849
gauuacaggccuuaacagu

SEQ ID NO: 1304651 - RNA, 19 nt, Artificial Sequence
  Description of Artificial Sequence: Synthetic oligonucleotide
  Antisense strand to SEQ ID NO: 1304650
acuguuaaggccuguaauc

SEQ ID NO: 1304652 - RNA, 19 nt, Artificial Sequence
  Description of Artificial Sequence: Synthetic oligonucleotide
  Sense strand starting at position 3061 of SEQ ID NO: 1241849
aaguuuccucgugaacuuu

SEQ ID NO: 1304653 - RNA, 19 nt, Artificial Sequence
  Description of Artificial Sequence: Synthetic oligonucleotide
  Antisense strand to SEQ ID NO: 1304652
aaaguucacgaggaaacuu

SEQ ID NO: 1304654 - RNA, 19 nt, Artificial Sequence
  Description of Artificial Sequence: Synthetic oligonucleotide
  Sense strand starting at position 3272 of SEQ ID NO: 1241849
ugcuuaacauucguuccau

SEQ ID NO: 1304655 - RNA, 19 nt, Artificial Sequence
  Description of Artificial Sequence: Synthetic oligonucleotide
  Antisense strand to SEQ ID NO: 1304654
auggaacgaauguuaagca

SEQ ID NO: 1304656 - RNA, 19 nt, Artificial Sequence
  Description of Artificial Sequence: Synthetic oligonucleotide
  Sense strand starting at position 3273 of SEQ ID NO: 1241849
gcuuaacauucguuccauu

SEQ ID NO: 1304657 - RNA, 19 nt, Artificial Sequence
  Description of Artificial Sequence: Synthetic oligonucleotide
  Antisense strand to SEQ ID NO: 1304656
aauggaacgaauguuaagc

SEQ ID NO: 1304658 - RNA, 19 nt, Artificial Sequence
  Description of Artificial Sequence: Synthetic oligonucleotide
  Sense strand starting at position 3346 of SEQ ID NO: 1241849
uguuccaaguucucaguua

SEQ ID NO: 1304659 - RNA, 19 nt, Artificial Sequence
  Description of Artificial Sequence: Synthetic oligonucleotide
  Antisense strand to SEQ ID NO: 1304658
uaacugagaacuuggaaca

SEQ ID NO: 1304660 - RNA, 19 nt, Artificial Sequence
  Description of Artificial Sequence: Synthetic oligonucleotide
  Sense strand starting at position 3353 of SEQ ID NO: 1241849
aguucucaguuauuacaaa

SEQ ID NO: 1304661 - RNA, 19 nt, Artificial Sequence
  Description of Artificial Sequence: Synthetic oligonucleotide
  Antisense strand to SEQ ID NO: 1304660
uuuguaauaacugagaacu

SEQ ID NO: 1304662 - RNA, 19 nt, Artificial Sequence
  Description of Artificial Sequence: Synthetic oligonucleotide
  Sense strand starting at position 3392 of SEQ ID NO: 1241849
guguauaagucuucaugug

SEQ ID NO: 1304663 - RNA, 19 nt, Artificial Sequence
  Description of Artificial Sequence: Synthetic oligonucleotide
  Antisense strand to SEQ ID NO: 1304662
cacaugaagacuuauacac

SEQ ID NO: 1304664 - RNA, 19 nt, Artificial Sequence
  Description of Artificial Sequence: Synthetic oligonucleotide
  Sense strand starting at position 3444 of SEQ ID NO: 1241849
agugaaauauuuggguuau

SEQ ID NO: 1304665 - RNA, 19 nt, Artificial Sequence
  Description of Artificial Sequence: Synthetic oligonucleotide
  Antisense strand to SEQ ID NO: 1304664
auaacccaaauauuucacu

SEQ ID NO: 1304666 - RNA, 19 nt, Artificial Sequence
  Description of Artificial Sequence: Synthetic oligonucleotide
  Sense strand starting at position 3445 of SEQ ID NO: 1241849
gugaaauauuuggguuaua

SEQ ID NO: 1304667 - RNA, 19 nt, Artificial Sequence
  Description of Artificial Sequence: Synthetic oligonucleotide
  Antisense strand to SEQ ID NO: 1304666
uauaacccaaauauuucac

SEQ ID NO: 1304668 - RNA, 19 nt, Artificial Sequence
  Description of Artificial Sequence: Synthetic oligonucleotide
  Sense strand starting at position 3450 of SEQ ID NO: 1241849
auauuuggguuauacgaua

SEQ ID NO: 1304669 - RNA, 19 nt, Artificial Sequence
  Description of Artificial Sequence: Synthetic oligonucleotide
  Antisense strand to SEQ ID NO: 1304668
uaucguauaacccaaauau

SEQ ID NO: 1304670 - RNA, 19 nt, Artificial Sequence
  Description of Artificial Sequence: Synthetic oligonucleotide
  Sense strand starting at position 3455 of SEQ ID NO: 1241849
uggguuauacgauaggugu

SEQ ID NO: 1304671 - RNA, 19 nt, Artificial Sequence
  Description of Artificial Sequence: Synthetic oligonucleotide
  Antisense strand to SEQ ID NO: 1304670
acaccuaucguauaaccca

SEQ ID NO: 1304672 - RNA, 19 nt, Artificial Sequence
  Description of Artificial Sequence: Synthetic oligonucleotide
  Sense strand starting at position 3461 of SEQ ID NO: 1241849
auacgauagguguguuugu

SEQ ID NO: 1304673 - RNA, 19 nt, Artificial Sequence
  Description of Artificial Sequence: Synthetic oligonucleotide
  Antisense strand to SEQ ID NO: 1304672
acaaacacaccuaucguau

SEQ ID NO: 1304674 - RNA, 19 nt, Artificial Sequence
  Description of Artificial Sequence: Synthetic oligonucleotide
  Sense strand starting at position 3772 of SEQ ID NO: 1241849
ccggcaaguauauguuuaa

SEQ ID NO: 1304675 - RNA, 19 nt, Artificial Sequence
  Description of Artificial Sequence: Synthetic oligonucleotide
  Antisense strand to SEQ ID NO: 1304674
uuaaacauauacuugccgg

SEQ ID NO: 1304676 - RNA, 19 nt, Artificial Sequence
  Description of Artificial Sequence: Synthetic oligonucleotide
  Sense strand starting at position 3775 of SEQ ID NO: 1241849
gcaaguauauguuuaaguu

SEQ ID NO: 1304677 - RNA, 19 nt, Artificial Sequence
  Description of Artificial Sequence: Synthetic oligonucleotide
  Antisense strand to SEQ ID NO: 1304676
aacuuaaacauauacuugc

SEQ ID NO: 1304678 - RNA, 19 nt, Artificial Sequence
  Description of Artificial Sequence: Synthetic oligonucleotide
  Sense strand starting at position 3953 of SEQ ID NO: 1241849
uagguaaaggugugucaua

SEQ ID NO: 1304679 - RNA, 19 nt, Artificial Sequence
  Description of Artificial Sequence: Synthetic oligonucleotide
  Antisense strand to SEQ ID NO: 1304678
uaugacacaccuuuaccua

SEQ ID NO: 1304680 - RNA, 19 nt, Artificial Sequence
  Description of Artificial Sequence: Synthetic oligonucleotide
  Sense strand starting at position 57 of SEQ ID NO: 1241850
uggaauuccugauuaugug

SEQ ID NO: 1304681 - RNA, 19 nt, Artificial Sequence
  Description of Artificial Sequence: Synthetic oligonucleotide
  Antisense strand to SEQ ID NO: 1304680
cacauaaucaggaauucca

SEQ ID NO: 1304682 - RNA, 19 nt, Artificial Sequence
  Description of Artificial Sequence: Synthetic oligonucleotide
  Sense strand starting at position 732 of SEQ ID NO: 1241850
acgaucugguaguaaguga

SEQ ID NO: 1304683 - RNA, 19 nt, Artificial Sequence
  Description of Artificial Sequence: Synthetic oligonucleotide
  Antisense strand to SEQ ID NO: 1304682
ucacuuacuaccagaucgu

SEQ ID NO: 1304684 - RNA, 19 nt, Artificial Sequence
  Description of Artificial Sequence: Synthetic oligonucleotide
  Sense strand starting at position 736 of SEQ ID NO: 1241850
ucugguaguaagugaugau

SEQ ID NO: 1304685 - RNA, 19 nt, Artificial Sequence
  Description of Artificial Sequence: Synthetic oligonucleotide
  Antisense strand to SEQ ID NO: 1304684
aucaucacuuacuaccaga

SEQ ID NO: 1304686 - RNA, 19 nt, Artificial Sequence
  Description of Artificial Sequence: Synthetic oligonucleotide
  Sense strand starting at position 737 of SEQ ID NO: 1241850
cugguaguaagugaugaua

SEQ ID NO: 1304687 - RNA, 19 nt, Artificial Sequence
  Description of Artificial Sequence: Synthetic oligonucleotide
  Antisense strand to SEQ ID NO: 1304686
uaucaucacuuacuaccag

SEQ ID NO: 1304688 - RNA, 19 nt, Artificial Sequence
  Description of Artificial Sequence: Synthetic oligonucleotide
  Sense strand starting at position 739 of SEQ ID NO: 1241850
gguaguaagugaugauaaa

SEQ ID NO: 1304689 - RNA, 19 nt, Artificial Sequence
  Description of Artificial Sequence: Synthetic oligonucleotide
  Antisense strand to SEQ ID NO: 1304688
uuuaucaucacuuacuacc

SEQ ID NO: 1304690 - RNA, 19 nt, Artificial Sequence
  Description of Artificial Sequence: Synthetic oligonucleotide
  Sense strand starting at position 1748 of SEQ ID NO: 1241850
gcugccugucuagauaagu

SEQ ID NO: 1304691 - RNA, 19 nt, Artificial Sequence
  Description of Artificial Sequence: Synthetic oligonucleotide
  Antisense strand to SEQ ID NO: 1304690
acuuaucuagacaggcagc

SEQ ID NO: 1304692 - RNA, 19 nt, Artificial Sequence
  Description of Artificial Sequence: Synthetic oligonucleotide
  Sense strand starting at position 2114 of SEQ ID NO: 1241850
gacugauggucaugcugaa

SEQ ID NO: 1304693 - RNA, 19 nt, Artificial Sequence
  Description of Artificial Sequence: Synthetic oligonucleotide
  Antisense strand to SEQ ID NO: 1304692
uucagcaugaccaucaguc

SEQ ID NO: 1304694 - RNA, 19 nt, Artificial Sequence
  Description of Artificial Sequence: Synthetic oligonucleotide
  Sense strand starting at position 2118 of SEQ ID NO: 1241850
gauggucaugcugaaaucu

SEQ ID NO: 1304695 - RNA, 19 nt, Artificial Sequence
  Description of Artificial Sequence: Synthetic oligonucleotide
  Antisense strand to SEQ ID NO: 1304694
agauuucagcaugaccauc

SEQ ID NO: 1304696 - RNA, 19 nt, Artificial Sequence
  Description of Artificial Sequence: Synthetic oligonucleotide
  Sense strand starting at position 2575 of SEQ ID NO: 1241850
uuguccaaugaaugaguuu

SEQ ID NO: 1304697 - RNA, 19 nt, Artificial Sequence
  Description of Artificial Sequence: Synthetic oligonucleotide
  Antisense strand to SEQ ID NO: 1304696
aaacucauucauuggacaa

SEQ ID NO: 1304698 - RNA, 19 nt, Artificial Sequence
  Description of Artificial Sequence: Synthetic oligonucleotide
  Sense strand starting at position 2744 of SEQ ID NO: 1241850
gaacucgugcuauagacua

SEQ ID NO: 1304699 - RNA, 19 nt, Artificial Sequence
  Description of Artificial Sequence: Synthetic oligonucleotide
  Antisense strand to SEQ ID NO: 1304698
uagucuauagcacgaguuc

SEQ ID NO: 1304700 - RNA, 19 nt, Artificial Sequence
  Description of Artificial Sequence: Synthetic oligonucleotide
  Sense strand starting at position 2749 of SEQ ID NO: 1241850
cgugcuauagacuauagaa

SEQ ID NO: 1304701 - RNA, 19 nt, Artificial Sequence
  Description of Artificial Sequence: Synthetic oligonucleotide
  Antisense strand to SEQ ID NO: 1304700
uucuauagucuauagcacg

SEQ ID NO: 1304702 - RNA, 19 nt, Artificial Sequence
  Description of Artificial Sequence: Synthetic oligonucleotide
  Sense strand starting at position 2759 of SEQ ID NO: 1241850
acuauagaaugaugagcaa

SEQ ID NO: 1304703 - RNA, 19 nt, Artificial Sequence
  Description of Artificial Sequence: Synthetic oligonucleotide
  Antisense strand to SEQ ID NO: 1304702
uugcucaucauucuauagu

SEQ ID NO: 1304704 - RNA, 19 nt, Artificial Sequence
  Description of Artificial Sequence: Synthetic oligonucleotide
  Sense strand starting at position 3067 of SEQ ID NO: 1241850
aacgguguaucagagauga

SEQ ID NO: 1304705 - RNA, 19 nt, Artificial Sequence
  Description of Artificial Sequence: Synthetic oligonucleotide
  Antisense strand to SEQ ID NO: 1304704
ucaucucugauacaccguu

SEQ ID NO: 1304706 - RNA, 19 nt, Artificial Sequence
  Description of Artificial Sequence: Synthetic oligonucleotide
  Sense strand starting at position 3069 of SEQ ID NO: 1241850
cgguguaucagagaugaaa

SEQ ID NO: 1304707 - RNA, 19 nt, Artificial Sequence
  Description of Artificial Sequence: Synthetic oligonucleotide
  Antisense strand to SEQ ID NO: 1304706
uuucaucucugauacaccg

SEQ ID NO: 1304708 - RNA, 19 nt, Artificial Sequence
  Description of Artificial Sequence: Synthetic oligonucleotide
  Sense strand starting at position 212 of SEQ ID NO: 1241851
gcgauuaagaggcacacau

SEQ ID NO: 1304709 - RNA, 19 nt, Artificial Sequence
  Description of Artificial Sequence: Synthetic oligonucleotide
  Antisense strand to SEQ ID NO: 1304708
augugugccucuuaaucgc

SEQ ID NO: 1304710 - RNA, 19 nt, Artificial Sequence
  Description of Artificial Sequence: Synthetic oligonucleotide
  Sense strand starting at position 403 of SEQ ID NO: 1241851
uggaauuccugauuaugug

SEQ ID NO: 1304711 - RNA, 19 nt, Artificial Sequence
  Description of Artificial Sequence: Synthetic oligonucleotide
  Antisense strand to SEQ ID NO: 1304710
cacauaaucaggaauucca

SEQ ID NO: 1304712 - RNA, 19 nt, Artificial Sequence
  Description of Artificial Sequence: Synthetic oligonucleotide
  Sense strand starting at position 1078 of SEQ ID NO: 1241851
acgaucugguaguaaguga

SEQ ID NO: 1304713 - RNA, 19 nt, Artificial Sequence
  Description of Artificial Sequence: Synthetic oligonucleotide
  Antisense strand to SEQ ID NO: 1304712
ucacuuacuaccagaucgu

SEQ ID NO: 1304714 - RNA, 19 nt, Artificial Sequence
  Description of Artificial Sequence: Synthetic oligonucleotide
  Sense strand starting at position 1082 of SEQ ID NO: 1241851
ucugguaguaagugaugau

SEQ ID NO: 1304715 - RNA, 19 nt, Artificial Sequence
  Description of Artificial Sequence: Synthetic oligonucleotide
  Antisense strand to SEQ ID NO: 1304714
aucaucacuuacuaccaga

SEQ ID NO: 1304716 - RNA, 19 nt, Artificial Sequence
  Description of Artificial Sequence: Synthetic oligonucleotide
  Sense strand starting at position 1083 of SEQ ID NO: 1241851
cugguaguaagugaugaua

SEQ ID NO: 1304717 - RNA, 19 nt, Artificial Sequence
  Description of Artificial Sequence: Synthetic oligonucleotide
  Antisense strand to SEQ ID NO: 1304716
uaucaucacuuacuaccag

SEQ ID NO: 1304718 - RNA, 19 nt, Artificial Sequence
  Description of Artificial Sequence: Synthetic oligonucleotide
  Sense strand starting at position 1085 of SEQ ID NO: 1241851
gguaguaagugaugauaaa

SEQ ID NO: 1304719 - RNA, 19 nt, Artificial Sequence
  Description of Artificial Sequence: Synthetic oligonucleotide
  Antisense strand to SEQ ID NO: 1304718
uuuaucaucacuuacuacc

SEQ ID NO: 1304720 - RNA, 19 nt, Artificial Sequence
  Description of Artificial Sequence: Synthetic oligonucleotide
  Sense strand starting at position 2094 of SEQ ID NO: 1241851
gcugccugucuagauaagu

SEQ ID NO: 1304721 - RNA, 19 nt, Artificial Sequence
  Description of Artificial Sequence: Synthetic oligonucleotide
  Antisense strand to SEQ ID NO: 1304720
acuuaucuagacaggcagc

SEQ ID NO: 1304722 - RNA, 19 nt, Artificial Sequence
  Description of Artificial Sequence: Synthetic oligonucleotide
  Sense strand starting at position 2460 of SEQ ID NO: 1241851
gacugauggucaugcugaa

SEQ ID NO: 1304723 - RNA, 19 nt, Artificial Sequence
  Description of Artificial Sequence: Synthetic oligonucleotide
  Antisense strand to SEQ ID NO: 1304722
uucagcaugaccaucaguc

SEQ ID NO: 1304724 - RNA, 19 nt, Artificial Sequence
  Description of Artificial Sequence: Synthetic oligonucleotide
  Sense strand starting at position 2464 of SEQ ID NO: 1241851
gauggucaugcugaaaucu

SEQ ID NO: 1304725 - RNA, 19 nt, Artificial Sequence
  Description of Artificial Sequence: Synthetic oligonucleotide
  Antisense strand to SEQ ID NO: 1304724
agauuucagcaugaccauc

SEQ ID NO: 1304726 - RNA, 19 nt, Artificial Sequence
  Description of Artificial Sequence: Synthetic oligonucleotide
  Sense strand starting at position 2921 of SEQ ID NO: 1241851
uuguccaaugaaugaguuu

SEQ ID NO: 1304727 - RNA, 19 nt, Artificial Sequence
  Description of Artificial Sequence: Synthetic oligonucleotide
  Antisense strand to SEQ ID NO: 1304726
aaacucauucauuggacaa

SEQ ID NO: 1304728 - RNA, 19 nt, Artificial Sequence
  Description of Artificial Sequence: Synthetic oligonucleotide
  Sense strand starting at position 3090 of SEQ ID NO: 1241851
gaacucgugcuauagacua

SEQ ID NO: 1304729 - RNA, 19 nt, Artificial Sequence
  Description of Artificial Sequence: Synthetic oligonucleotide
  Antisense strand to SEQ ID NO: 1304728
uagucuauagcacgaguuc

SEQ ID NO: 1304730 - RNA, 19 nt, Artificial Sequence
  Description of Artificial Sequence: Synthetic oligonucleotide
  Sense strand starting at position 3095 of SEQ ID NO: 1241851
cgugcuauagacuauagaa

SEQ ID NO: 1304731 - RNA, 19 nt, Artificial Sequence
  Description of Artificial Sequence: Synthetic oligonucleotide
  Antisense strand to SEQ ID NO: 1304730
uucuauagucuauagcacg

SEQ ID NO: 1304732 - RNA, 19 nt, Artificial Sequence
  Description of Artificial Sequence: Synthetic oligonucleotide
  Sense strand starting at position 3105 of SEQ ID NO: 1241851
acuauagaaugaugagcaa

SEQ ID NO: 1304733 - RNA, 19 nt, Artificial Sequence
  Description of Artificial Sequence: Synthetic oligonucleotide
  Antisense strand to SEQ ID NO: 1304732
uugcucaucauucuauagu

SEQ ID NO: 1304734 - RNA, 19 nt, Artificial Sequence
  Description of Artificial Sequence: Synthetic oligonucleotide
  Sense strand starting at position 3413 of SEQ ID NO: 1241851
aacgguguaucagagauga

SEQ ID NO: 1304735 - RNA, 19 nt, Artificial Sequence
  Description of Artificial Sequence: Synthetic oligonucleotide
  Antisense strand to SEQ ID NO: 1304734
ucaucucugauacaccguu

SEQ ID NO: 1304736 - RNA, 19 nt, Artificial Sequence
  Description of Artificial Sequence: Synthetic oligonucleotide
  Sense strand starting at position 3415 of SEQ ID NO: 1241851
cgguguaucagagaugaaa

SEQ ID NO: 1304737 - RNA, 19 nt, Artificial Sequence
  Description of Artificial Sequence: Synthetic oligonucleotide
  Antisense strand to SEQ ID NO: 1304736
uuucaucucugauacaccg

SEQ ID NO: 1304738 - RNA, 19 nt, Artificial Sequence
  Description of Artificial Sequence: Synthetic oligonucleotide
  Sense strand starting at position 2 of SEQ ID NO: 1241852
auuuauauggcgugauuac

SEQ ID NO: 1304739 - RNA, 19 nt, Artificial Sequence
  Description of Artificial Sequence: Synthetic oligonucleotide
  Antisense strand to SEQ ID NO: 1304738
guaaucacgccauauaaau

SEQ ID NO: 1304740 - RNA, 19 nt, Artificial Sequence
  Description of Artificial Sequence: Synthetic oligonucleotide
  Sense strand starting at position 60 of SEQ ID NO: 1241852
gaugaaguggcaugugaca

SEQ ID NO: 1304741 - RNA, 19 nt, Artificial Sequence
  Description of Artificial Sequence: Synthetic oligonucleotide
  Antisense strand to SEQ ID NO: 1304740
ugucacaugccacuucauc

SEQ ID NO: 1304742 - RNA, 19 nt, Artificial Sequence
  Description of Artificial Sequence: Synthetic oligonucleotide
  Sense strand starting at position 146 of SEQ ID NO: 1241852
acguucccacuuuauagau

SEQ ID NO: 1304743 - RNA, 19 nt, Artificial Sequence
  Description of Artificial Sequence: Synthetic oligonucleotide
  Antisense strand to SEQ ID NO: 1304742
aucuauaaagugggaacgu

SEQ ID NO: 1304744 - RNA, 19 nt, Artificial Sequence
  Description of Artificial Sequence: Synthetic oligonucleotide
  Sense strand starting at position 148 of SEQ ID NO: 1241852
guucccacuuuauagauau

SEQ ID NO: 1304745 - RNA, 19 nt, Artificial Sequence
  Description of Artificial Sequence: Synthetic oligonucleotide
  Antisense strand to SEQ ID NO: 1304744
auaucuauaaagugggaac

SEQ ID NO: 1304746 - RNA, 19 nt, Artificial Sequence
  Description of Artificial Sequence: Synthetic oligonucleotide
  Sense strand starting at position 783 of SEQ ID NO: 1241852
uuuaucagcgauuaagaga

SEQ ID NO: 1304747 - RNA, 19 nt, Artificial Sequence
  Description of Artificial Sequence: Synthetic oligonucleotide
  Antisense strand to SEQ ID NO: 1304746
ucucuuaaucgcugauaaa

SEQ ID NO: 1304748 - RNA, 19 nt, Artificial Sequence
  Description of Artificial Sequence: Synthetic oligonucleotide
  Sense strand starting at position 981 of SEQ ID NO: 1241852
ugcaauuccugauuaugug

SEQ ID NO: 1304749 - RNA, 19 nt, Artificial Sequence
  Description of Artificial Sequence: Synthetic oligonucleotide
  Antisense strand to SEQ ID NO: 1304748
cacauaaucaggaauugca

SEQ ID NO: 1304750 - RNA, 19 nt, Artificial Sequence
  Description of Artificial Sequence: Synthetic oligonucleotide
  Sense strand starting at position 1125 of SEQ ID NO: 1241852
guaugauauggccaagcag

SEQ ID NO: 1304751 - RNA, 19 nt, Artificial Sequence
  Description of Artificial Sequence: Synthetic oligonucleotide
  Antisense strand to SEQ ID NO: 1304750
cugcuuggccauaucauac

SEQ ID NO: 1304752 - RNA, 19 nt, Artificial Sequence
  Description of Artificial Sequence: Synthetic oligonucleotide
  Sense strand starting at position 1583 of SEQ ID NO: 1241852
ucagcaaucgaucaucuga

SEQ ID NO: 1304753 - RNA, 19 nt, Artificial Sequence
  Description of Artificial Sequence: Synthetic oligonucleotide
  Antisense strand to SEQ ID NO: 1304752
ucagaugaucgauugcuga

SEQ ID NO: 1304754 - RNA, 19 nt, Artificial Sequence
  Description of Artificial Sequence: Synthetic oligonucleotide
  Sense strand starting at position 1650 of SEQ ID NO: 1241852
uuagcacgaucugcuaaua

SEQ ID NO: 1304755 - RNA, 19 nt, Artificial Sequence
  Description of Artificial Sequence: Synthetic oligonucleotide
  Antisense strand to SEQ ID NO: 1304754
uauuagcagaucgugcuaa

SEQ ID NO: 1304756 - RNA, 19 nt, Artificial Sequence
  Description of Artificial Sequence: Synthetic oligonucleotide
  Sense strand starting at position 1655 of SEQ ID NO: 1241852
acgaucugcuaauaaguga

SEQ ID NO: 1304757 - RNA, 19 nt, Artificial Sequence
  Description of Artificial Sequence: Synthetic oligonucleotide
  Antisense strand to SEQ ID NO: 1304756
ucacuuauuagcagaucgu

SEQ ID NO: 1304758 - RNA, 19 nt, Artificial Sequence
  Description of Artificial Sequence: Synthetic oligonucleotide
  Sense strand starting at position 2838 of SEQ ID NO: 1241852
gaggaaauguaagagacaa

SEQ ID NO: 1304759 - RNA, 19 nt, Artificial Sequence
  Description of Artificial Sequence: Synthetic oligonucleotide
  Antisense strand to SEQ ID NO: 1304758
uugucucuuacauuuccuc

SEQ ID NO: 1304760 - RNA, 19 nt, Artificial Sequence
  Description of Artificial Sequence: Synthetic oligonucleotide
  Sense strand starting at position 2902 of SEQ ID NO: 1241852
uuacgaagaaaccguucua

SEQ ID NO: 1304761 - RNA, 19 nt, Artificial Sequence
  Description of Artificial Sequence: Synthetic oligonucleotide
  Antisense strand to SEQ ID NO: 1304760
uagaacgguuucuucguaa

SEQ ID NO: 1304762 - RNA, 19 nt, Artificial Sequence
  Description of Artificial Sequence: Synthetic oligonucleotide
  Sense strand starting at position 2907 of SEQ ID NO: 1241852
aagaaaccguucuacggaa

SEQ ID NO: 1304763 - RNA, 19 nt, Artificial Sequence
  Description of Artificial Sequence: Synthetic oligonucleotide
  Antisense strand to SEQ ID NO: 1304762
uuccguagaacgguuucuu

SEQ ID NO: 1304764 - RNA, 19 nt, Artificial Sequence
  Description of Artificial Sequence: Synthetic oligonucleotide
  Sense strand starting at position 3032 of SEQ ID NO: 1241852
gacugauggugaugcugaa

SEQ ID NO: 1304765 - RNA, 19 nt, Artificial Sequence
  Description of Artificial Sequence: Synthetic oligonucleotide
  Antisense strand to SEQ ID NO: 1304764
uucagcaucaccaucaguc

SEQ ID NO: 1304766 - RNA, 19 nt, Artificial Sequence
  Description of Artificial Sequence: Synthetic oligonucleotide
  Sense strand starting at position 3036 of SEQ ID NO: 1241852
gauggugaugcugaaaucu

SEQ ID NO: 1304767 - RNA, 19 nt, Artificial Sequence
  Description of Artificial Sequence: Synthetic oligonucleotide
  Antisense strand to SEQ ID NO: 1304766
agauuucagcaucaccauc

SEQ ID NO: 1304768 - RNA, 19 nt, Artificial Sequence
  Description of Artificial Sequence: Synthetic oligonucleotide
  Sense strand starting at position 3153 of SEQ ID NO: 1241852
gguguuggauuuggaguua

SEQ ID NO: 1304769 - RNA, 19 nt, Artificial Sequence
  Description of Artificial Sequence: Synthetic oligonucleotide
  Antisense strand to SEQ ID NO: 1304768
uaacuccaaauccaacacc

SEQ ID NO: 1304770 - RNA, 19 nt, Artificial Sequence
  Description of Artificial Sequence: Synthetic oligonucleotide
  Sense strand starting at position 3660 of SEQ ID NO: 1241852
uugaacucgugcuauauac

SEQ ID NO: 1304771 - RNA, 19 nt, Artificial Sequence
  Description of Artificial Sequence: Synthetic oligonucleotide
  Antisense strand to SEQ ID NO: 1304770
guauauagcacgaguucaa

SEQ ID NO: 1304772 - RNA, 19 nt, Artificial Sequence
  Description of Artificial Sequence: Synthetic oligonucleotide
  Sense strand starting at position 3667 of SEQ ID NO: 1241852
cgugcuauauacuguagaa

SEQ ID NO: 1304773 - RNA, 19 nt, Artificial Sequence
  Description of Artificial Sequence: Synthetic oligonucleotide
  Antisense strand to SEQ ID NO: 1304772
uucuacaguauauagcacg

SEQ ID NO: 1304774 - RNA, 19 nt, Artificial Sequence
  Description of Artificial Sequence: Synthetic oligonucleotide
  Sense strand starting at position 3669 of SEQ ID NO: 1241852
ugcuauauacuguagaaug

SEQ ID NO: 1304775 - RNA, 19 nt, Artificial Sequence
  Description of Artificial Sequence: Synthetic oligonucleotide
  Antisense strand to SEQ ID NO: 1304774
cauucuacaguauauagca

SEQ ID NO: 1304776 - RNA, 19 nt, Artificial Sequence
  Description of Artificial Sequence: Synthetic oligonucleotide
  Sense strand starting at position 3677 of SEQ ID NO: 1241852
acuguagaaugaugagcaa

SEQ ID NO: 1304777 - RNA, 19 nt, Artificial Sequence
  Description of Artificial Sequence: Synthetic oligonucleotide
  Antisense strand to SEQ ID NO: 1304776
uugcucaucauucuacagu

SEQ ID NO: 1304778 - RNA, 19 nt, Artificial Sequence
  Description of Artificial Sequence: Synthetic oligonucleotide
  Sense strand starting at position 3983 of SEQ ID NO: 1241852
gaaacaguguaucagagau

SEQ ID NO: 1304779 - RNA, 19 nt, Artificial Sequence
  Description of Artificial Sequence: Synthetic oligonucleotide
  Antisense strand to SEQ ID NO: 1304778
aucucugauacacuguuuc

SEQ ID NO: 1304780 - RNA, 19 nt, Artificial Sequence
  Description of Artificial Sequence: Synthetic oligonucleotide
  Sense strand starting at position 3 of SEQ ID NO: 1241853
auggcaugauuaccaauua

SEQ ID NO: 1304781 - RNA, 19 nt, Artificial Sequence
  Description of Artificial Sequence: Synthetic oligonucleotide
  Antisense strand to SEQ ID NO: 1304780
uaauugguaaucaugccau

SEQ ID NO: 1304782 - RNA, 19 nt, Artificial Sequence
  Description of Artificial Sequence: Synthetic oligonucleotide
  Sense strand starting at position 144 of SEQ ID NO: 1241853
acguucccacuuuauauau

SEQ ID NO: 1304783 - RNA, 19 nt, Artificial Sequence
  Description of Artificial Sequence: Synthetic oligonucleotide
  Antisense strand to SEQ ID NO: 1304782
auauauaaagugggaacgu

SEQ ID NO: 1304784 - RNA, 19 nt, Artificial Sequence
  Description of Artificial Sequence: Synthetic oligonucleotide
  Sense strand starting at position 241 of SEQ ID NO: 1241853
aggucuaucugacucugaa

SEQ ID NO: 1304785 - RNA, 19 nt, Artificial Sequence
  Description of Artificial Sequence: Synthetic oligonucleotide
  Antisense strand to SEQ ID NO: 1304784
uucagagucagauagaccu

SEQ ID NO: 1304786 - RNA, 19 nt, Artificial Sequence
  Description of Artificial Sequence: Synthetic oligonucleotide
  Sense strand starting at position 274 of SEQ ID NO: 1241853
uuucuuguuaagcggugaa

SEQ ID NO: 1304787 - RNA, 19 nt, Artificial Sequence
  Description of Artificial Sequence: Synthetic oligonucleotide
  Antisense strand to SEQ ID NO: 1304786
uucaccgcuuaacaagaaa

SEQ ID NO: 1304788 - RNA, 19 nt, Artificial Sequence
  Description of Artificial Sequence: Synthetic oligonucleotide
  Sense strand starting at position 787 of SEQ ID NO: 1241853
gcgauuaagaggcacacau

SEQ ID NO: 1304789 - RNA, 19 nt, Artificial Sequence
  Description of Artificial Sequence: Synthetic oligonucleotide
  Antisense strand to SEQ ID NO: 1304788
augugugccucuuaaucgc

SEQ ID NO: 1304790 - RNA, 19 nt, Artificial Sequence
  Description of Artificial Sequence: Synthetic oligonucleotide
  Sense strand starting at position 978 of SEQ ID NO: 1241853
uggaauuccugauuaugug

SEQ ID NO: 1304791 - RNA, 19 nt, Artificial Sequence
  Description of Artificial Sequence: Synthetic oligonucleotide
  Antisense strand to SEQ ID NO: 1304790
cacauaaucaggaauucca

SEQ ID NO: 1304792 - RNA, 19 nt, Artificial Sequence
  Description of Artificial Sequence: Synthetic oligonucleotide
  Sense strand starting at position 1653 of SEQ ID NO: 1241853
acgaucugguaguaaguga

SEQ ID NO: 1304793 - RNA, 19 nt, Artificial Sequence
  Description of Artificial Sequence: Synthetic oligonucleotide
  Antisense strand to SEQ ID NO: 1304792
ucacuuacuaccagaucgu

SEQ ID NO: 1304794 - RNA, 19 nt, Artificial Sequence
  Description of Artificial Sequence: Synthetic oligonucleotide
  Sense strand starting at position 1657 of SEQ ID NO: 1241853
ucugguaguaagugaugau

SEQ ID NO: 1304795 - RNA, 19 nt, Artificial Sequence
  Description of Artificial Sequence: Synthetic oligonucleotide
  Antisense strand to SEQ ID NO: 1304794
aucaucacuuacuaccaga

SEQ ID NO: 1304796 - RNA, 19 nt, Artificial Sequence
  Description of Artificial Sequence: Synthetic oligonucleotide
  Sense strand starting at position 1658 of SEQ ID NO: 1241853
cugguaguaagugaugaua

SEQ ID NO: 1304797 - RNA, 19 nt, Artificial Sequence
  Description of Artificial Sequence: Synthetic oligonucleotide
  Antisense strand to SEQ ID NO: 1304796
uaucaucacuuacuaccag

SEQ ID NO: 1304798 - RNA, 19 nt, Artificial Sequence
  Description of Artificial Sequence: Synthetic oligonucleotide
  Sense strand starting at position 1660 of SEQ ID NO: 1241853
gguaguaagugaugauaaa

SEQ ID NO: 1304799 - RNA, 19 nt, Artificial Sequence
  Description of Artificial Sequence: Synthetic oligonucleotide
  Antisense strand to SEQ ID NO: 1304798
uuuaucaucacuuacuacc

SEQ ID NO: 1304800 - RNA, 19 nt, Artificial Sequence
  Description of Artificial Sequence: Synthetic oligonucleotide
  Sense strand starting at position 2669 of SEQ ID NO: 1241853
gcugccugucuagauaagu

SEQ ID NO: 1304801 - RNA, 19 nt, Artificial Sequence
  Description of Artificial Sequence: Synthetic oligonucleotide
  Antisense strand to SEQ ID NO: 1304800
acuuaucuagacaggcagc

SEQ ID NO: 1304802 - RNA, 19 nt, Artificial Sequence
  Description of Artificial Sequence: Synthetic oligonucleotide
  Sense strand starting at position 3035 of SEQ ID NO: 1241853
gacugauggucaugcugaa

SEQ ID NO: 1304803 - RNA, 19 nt, Artificial Sequence
  Description of Artificial Sequence: Synthetic oligonucleotide
  Antisense strand to SEQ ID NO: 1304802
uucagcaugaccaucaguc

SEQ ID NO: 1304804 - RNA, 19 nt, Artificial Sequence
  Description of Artificial Sequence: Synthetic oligonucleotide
  Sense strand starting at position 3039 of SEQ ID NO: 1241853
gauggucaugcugaaaucu

SEQ ID NO: 1304805 - RNA, 19 nt, Artificial Sequence
  Description of Artificial Sequence: Synthetic oligonucleotide
  Antisense strand to SEQ ID NO: 1304804
agauuucagcaugaccauc

SEQ ID NO: 1304806 - RNA, 19 nt, Artificial Sequence
  Description of Artificial Sequence: Synthetic oligonucleotide
  Sense strand starting at position 3496 of SEQ ID NO: 1241853
uuguccaaugaaugaguuu

SEQ ID NO: 1304807 - RNA, 19 nt, Artificial Sequence
  Description of Artificial Sequence: Synthetic oligonucleotide
  Antisense strand to SEQ ID NO: 1304806
aaacucauucauuggacaa

SEQ ID NO: 1304808 - RNA, 19 nt, Artificial Sequence
  Description of Artificial Sequence: Synthetic oligonucleotide
  Sense strand starting at position 3665 of SEQ ID NO: 1241853
gaacucgugcuauagacua

SEQ ID NO: 1304809 - RNA, 19 nt, Artificial Sequence
  Description of Artificial Sequence: Synthetic oligonucleotide
  Antisense strand to SEQ ID NO: 1304808
uagucuauagcacgaguuc

SEQ ID NO: 1304810 - RNA, 19 nt, Artificial Sequence
  Description of Artificial Sequence: Synthetic oligonucleotide
  Sense strand starting at position 3670 of SEQ ID NO: 1241853
cgugcuauagacuauagaa

SEQ ID NO: 1304811 - RNA, 19 nt, Artificial Sequence
  Description of Artificial Sequence: Synthetic oligonucleotide
  Antisense strand to SEQ ID NO: 1304810
uucuauagucuauagcacg

SEQ ID NO: 1304812 - RNA, 19 nt, Artificial Sequence
  Description of Artificial Sequence: Synthetic oligonucleotide
  Sense strand starting at position 3680 of SEQ ID NO: 1241853
acuauagaaugaugagcaa

SEQ ID NO: 1304813 - RNA, 19 nt, Artificial Sequence
  Description of Artificial Sequence: Synthetic oligonucleotide
  Antisense strand to SEQ ID NO: 1304812
uugcucaucauucuauagu

SEQ ID NO: 1304814 - RNA, 19 nt, Artificial Sequence
  Description of Artificial Sequence: Synthetic oligonucleotide
  Sense strand starting at position 124 of SEQ ID NO: 1241854
agauaucaacauugucuga

SEQ ID NO: 1304815 - RNA, 19 nt, Artificial Sequence
  Description of Artificial Sequence: Synthetic oligonucleotide
  Antisense strand to SEQ ID NO: 1304814
ucagacaauguugauaucu

SEQ ID NO: 1304816 - RNA, 19 nt, Artificial Sequence
  Description of Artificial Sequence: Synthetic oligonucleotide
  Sense strand starting at position 135 of SEQ ID NO: 1241854
uugucugaacaacaaguua

SEQ ID NO: 1304817 - RNA, 19 nt, Artificial Sequence
  Description of Artificial Sequence: Synthetic oligonucleotide
  Antisense strand to SEQ ID NO: 1304816
uaacuuguuguucagacaa

SEQ ID NO: 1304818 - RNA, 19 nt, Artificial Sequence
  Description of Artificial Sequence: Synthetic oligonucleotide
  Sense strand starting at position 475 of SEQ ID NO: 1241854
ugcaacauggcguacaauu

SEQ ID NO: 1304819 - RNA, 19 nt, Artificial Sequence
  Description of Artificial Sequence: Synthetic oligonucleotide
  Antisense strand to SEQ ID NO: 1304818
aauuguacgccauguugca

SEQ ID NO: 1304820 - RNA, 19 nt, Artificial Sequence
  Description of Artificial Sequence: Synthetic oligonucleotide
  Sense strand starting at position 530 of SEQ ID NO: 1241854
gggacuugauaucugcauu

SEQ ID NO: 1304821 - RNA, 19 nt, Artificial Sequence
  Description of Artificial Sequence: Synthetic oligonucleotide
  Antisense strand to SEQ ID NO: 1304820
aaugcagauaucaaguccc

SEQ ID NO: 1304822 - RNA, 19 nt, Artificial Sequence
  Description of Artificial Sequence: Synthetic oligonucleotide
  Sense strand starting at position 531 of SEQ ID NO: 1241854
ggacuugauaucugcauug

SEQ ID NO: 1304823 - RNA, 19 nt, Artificial Sequence
  Description of Artificial Sequence: Synthetic oligonucleotide
  Antisense strand to SEQ ID NO: 1304822
caaugcagauaucaagucc

SEQ ID NO: 1304824 - RNA, 19 nt, Artificial Sequence
  Description of Artificial Sequence: Synthetic oligonucleotide
  Sense strand starting at position 533 of SEQ ID NO: 1241854
acuugauaucugcauuguu

SEQ ID NO: 1304825 - RNA, 19 nt, Artificial Sequence
  Description of Artificial Sequence: Synthetic oligonucleotide
  Antisense strand to SEQ ID NO: 1304824
aacaaugcagauaucaagu

SEQ ID NO: 1304826 - RNA, 19 nt, Artificial Sequence
  Description of Artificial Sequence: Synthetic oligonucleotide
  Sense strand starting at position 536 of SEQ ID NO: 1241854
ugauaucugcauuguucca

SEQ ID NO: 1304827 - RNA, 19 nt, Artificial Sequence
  Description of Artificial Sequence: Synthetic oligonucleotide
  Antisense strand to SEQ ID NO: 1304826
uggaacaaugcagauauca

SEQ ID NO: 1304828 - RNA, 19 nt, Artificial Sequence
  Description of Artificial Sequence: Synthetic oligonucleotide
  Sense strand starting at position 560 of SEQ ID NO: 1241854
uuaggauugggucgaaaga

SEQ ID NO: 1304829 - RNA, 19 nt, Artificial Sequence
  Description of Artificial Sequence: Synthetic oligonucleotide
  Antisense strand to SEQ ID NO: 1304828
ucuuucgacccaauccuaa

SEQ ID NO: 1304830 - RNA, 19 nt, Artificial Sequence
  Description of Artificial Sequence: Synthetic oligonucleotide
  Sense strand starting at position 562 of SEQ ID NO: 1241854
aggauugggucgaaagaca

SEQ ID NO: 1304831 - RNA, 19 nt, Artificial Sequence
  Description of Artificial Sequence: Synthetic oligonucleotide
  Antisense strand to SEQ ID NO: 1304830
ugucuuucgacccaauccu

SEQ ID NO: 1304832 - RNA, 19 nt, Artificial Sequence
  Description of Artificial Sequence: Synthetic oligonucleotide
  Sense strand starting at position 847 of SEQ ID NO: 1241854
ugaguuacgcuugcagcaa

SEQ ID NO: 1304833 - RNA, 19 nt, Artificial Sequence
  Description of Artificial Sequence: Synthetic oligonucleotide
  Antisense strand to SEQ ID NO: 1304832
uugcugcaagcguaacuca

SEQ ID NO: 1304834 - RNA, 19 nt, Artificial Sequence
  Description of Artificial Sequence: Synthetic oligonucleotide
  Sense strand starting at position 1019 of SEQ ID NO: 1241854
uuuaaauguccucauaguc

SEQ ID NO: 1304835 - RNA, 19 nt, Artificial Sequence
  Description of Artificial Sequence: Synthetic oligonucleotide
  Antisense strand to SEQ ID NO: 1304834
gacuaugaggacauuuaaa

SEQ ID NO: 1304836 - RNA, 19 nt, Artificial Sequence
  Description of Artificial Sequence: Synthetic oligonucleotide
  Sense strand starting at position 1027 of SEQ ID NO: 1241854
uccucauagucauuacagu

SEQ ID NO: 1304837 - RNA, 19 nt, Artificial Sequence
  Description of Artificial Sequence: Synthetic oligonucleotide
  Antisense strand to SEQ ID NO: 1304836
acuguaaugacuaugagga

SEQ ID NO: 1304838 - RNA, 19 nt, Artificial Sequence
  Description of Artificial Sequence: Synthetic oligonucleotide
  Sense strand starting at position 1048 of SEQ ID NO: 1241854
aucaaucacgaucggaaua

SEQ ID NO: 1304839 - RNA, 19 nt, Artificial Sequence
  Description of Artificial Sequence: Synthetic oligonucleotide
  Antisense strand to SEQ ID NO: 1304838
uauuccgaucgugauugau

SEQ ID NO: 1304840 - RNA, 19 nt, Artificial Sequence
  Description of Artificial Sequence: Synthetic oligonucleotide
  Sense strand starting at position 1060 of SEQ ID NO: 1241854
cggaauaacuucucaacca

SEQ ID NO: 1304841 - RNA, 19 nt, Artificial Sequence
  Description of Artificial Sequence: Synthetic oligonucleotide
  Antisense strand to SEQ ID NO: 1304840
ugguugagaaguuauuccg

SEQ ID NO: 1304842 - RNA, 19 nt, Artificial Sequence
  Description of Artificial Sequence: Synthetic oligonucleotide
  Sense strand starting at position 1117 of SEQ ID NO: 1241854
ggcaccaucuucucugaau

SEQ ID NO: 1304843 - RNA, 19 nt, Artificial Sequence
  Description of Artificial Sequence: Synthetic oligonucleotide
  Antisense strand to SEQ ID NO: 1304842
auucagagaagauggugcc

SEQ ID NO: 1304844 - RNA, 19 nt, Artificial Sequence
  Description of Artificial Sequence: Synthetic oligonucleotide
  Sense strand starting at position 1118 of SEQ ID NO: 1241854
gcaccaucuucucugaaug

SEQ ID NO: 1304845 - RNA, 19 nt, Artificial Sequence
  Description of Artificial Sequence: Synthetic oligonucleotide
  Antisense strand to SEQ ID NO: 1304844
cauucagagaagauggugc

SEQ ID NO: 1304846 - RNA, 19 nt, Artificial Sequence
  Description of Artificial Sequence: Synthetic oligonucleotide
  Sense strand starting at position 1189 of SEQ ID NO: 1241854
ugagaugacucaguucuac

SEQ ID NO: 1304847 - RNA, 19 nt, Artificial Sequence
  Description of Artificial Sequence: Synthetic oligonucleotide
  Antisense strand to SEQ ID NO: 1304846
guagaacugagucaucuca

SEQ ID NO: 1304848 - RNA, 19 nt, Artificial Sequence
  Description of Artificial Sequence: Synthetic oligonucleotide
  Sense strand starting at position 1287 of SEQ ID NO: 1241854
ugccuacauuuggagaacu

SEQ ID NO: 1304849 - RNA, 19 nt, Artificial Sequence
  Description of Artificial Sequence: Synthetic oligonucleotide
  Antisense strand to SEQ ID NO: 1304848
aguucuccaaauguaggca

SEQ ID NO: 1304850 - RNA, 19 nt, Artificial Sequence
  Description of Artificial Sequence: Synthetic oligonucleotide
  Sense strand starting at position 1297 of SEQ ID NO: 1241854
uggagaacuuaugucucaa

SEQ ID NO: 1304851 - RNA, 19 nt, Artificial Sequence
  Description of Artificial Sequence: Synthetic oligonucleotide
  Antisense strand to SEQ ID NO: 1304850
uugagacauaaguucucca

SEQ ID NO: 1304852 - RNA, 19 nt, Artificial Sequence
  Description of Artificial Sequence: Synthetic oligonucleotide
  Sense strand starting at position 2157 of SEQ ID NO: 1241854
gacugaguugugggaggaa

SEQ ID NO: 1304853 - RNA, 19 nt, Artificial Sequence
  Description of Artificial Sequence: Synthetic oligonucleotide
  Antisense strand to SEQ ID NO: 1304852
uuccucccacaacucaguc

SEQ ID NO: 1304854 - RNA, 19 nt, Artificial Sequence
  Description of Artificial Sequence: Synthetic oligonucleotide
  Sense strand starting at position 2430 of SEQ ID NO: 1241854
gguucucguguuuagauca

SEQ ID NO: 1304855 - RNA, 19 nt, Artificial Sequence
  Description of Artificial Sequence: Synthetic oligonucleotide
  Antisense strand to SEQ ID NO: 1304854
ugaucuaaacacgagaacc

SEQ ID NO: 1304856 - RNA, 19 nt, Artificial Sequence
  Description of Artificial Sequence: Synthetic oligonucleotide
  Sense strand starting at position 2443 of SEQ ID NO: 1241854
agaucagcuugucucuaaa

SEQ ID NO: 1304857 - RNA, 19 nt, Artificial Sequence
  Description of Artificial Sequence: Synthetic oligonucleotide
  Antisense strand to SEQ ID NO: 1304856
uuuagagacaagcugaucu

SEQ ID NO: 1304858 - RNA, 19 nt, Artificial Sequence
  Description of Artificial Sequence: Synthetic oligonucleotide
  Sense strand starting at position 2468 of SEQ ID NO: 1241854
cgcuccuuccugggacaga

SEQ ID NO: 1304859 - RNA, 19 nt, Artificial Sequence
  Description of Artificial Sequence: Synthetic oligonucleotide
  Antisense strand to SEQ ID NO: 1304858
ucugucccaggaaggagcg

SEQ ID NO: 1304860 - RNA, 19 nt, Artificial Sequence
  Description of Artificial Sequence: Synthetic oligonucleotide
  Sense strand starting at position 2534 of SEQ ID NO: 1241854
gaauuaguauucucagguc

SEQ ID NO: 1304861 - RNA, 19 nt, Artificial Sequence
  Description of Artificial Sequence: Synthetic oligonucleotide
  Antisense strand to SEQ ID NO: 1304860
gaccugagaauacuaauuc

SEQ ID NO: 1304862 - RNA, 19 nt, Artificial Sequence
  Description of Artificial Sequence: Synthetic oligonucleotide
  Sense strand starting at position 2559 of SEQ ID NO: 1241854
ugcagaggucgggauuaug

SEQ ID NO: 1304863 - RNA, 19 nt, Artificial Sequence
  Description of Artificial Sequence: Synthetic oligonucleotide
  Antisense strand to SEQ ID NO: 1304862
cauaaucccgaccucugca

SEQ ID NO: 1304864 - RNA, 19 nt, Artificial Sequence
  Description of Artificial Sequence: Synthetic oligonucleotide
  Sense strand starting at position 2659 of SEQ ID NO: 1241854
uggagauaaucugccgauc

SEQ ID NO: 1304865 - RNA, 19 nt, Artificial Sequence
  Description of Artificial Sequence: Synthetic oligonucleotide
  Antisense strand to SEQ ID NO: 1304864
gaucggcagauuaucucca

SEQ ID NO: 1304866 - RNA, 19 nt, Artificial Sequence
  Description of Artificial Sequence: Synthetic oligonucleotide
  Sense strand starting at position 2662 of SEQ ID NO: 1241854
agauaaucugccgaucugu

SEQ ID NO: 1304867 - RNA, 19 nt, Artificial Sequence
  Description of Artificial Sequence: Synthetic oligonucleotide
  Antisense strand to SEQ ID NO: 1304866
acagaucggcagauuaucu

SEQ ID NO: 1304868 - RNA, 19 nt, Artificial Sequence
  Description of Artificial Sequence: Synthetic oligonucleotide
  Sense strand starting at position 2706 of SEQ ID NO: 1241854
gucugaccaucuuugauaa

SEQ ID NO: 1304869 - RNA, 19 nt, Artificial Sequence
  Description of Artificial Sequence: Synthetic oligonucleotide
  Antisense strand to SEQ ID NO: 1304868
uuaucaaagauggucagac

SEQ ID NO: 1304870 - RNA, 19 nt, Artificial Sequence
  Description of Artificial Sequence: Synthetic oligonucleotide
  Sense strand starting at position 2769 of SEQ ID NO: 1241854
uuuagcgacccuuauauca

SEQ ID NO: 1304871 - RNA, 19 nt, Artificial Sequence
  Description of Artificial Sequence: Synthetic oligonucleotide
  Antisense strand to SEQ ID NO: 1304870
ugauauaagggucgcuaaa

SEQ ID NO: 1304872 - RNA, 19 nt, Artificial Sequence
  Description of Artificial Sequence: Synthetic oligonucleotide
  Sense strand starting at position 2811 of SEQ ID NO: 1241854
uggaccuugucccuccaaa

SEQ ID NO: 1304873 - RNA, 19 nt, Artificial Sequence
  Description of Artificial Sequence: Synthetic oligonucleotide
  Antisense strand to SEQ ID NO: 1304872
uuuggagggacaaggucca

SEQ ID NO: 1304874 - RNA, 19 nt, Artificial Sequence
  Description of Artificial Sequence: Synthetic oligonucleotide
  Sense strand starting at position 2835 of SEQ ID NO: 1241854
ucgcgucacgacucaguaa

SEQ ID NO: 1304875 - RNA, 19 nt, Artificial Sequence
  Description of Artificial Sequence: Synthetic oligonucleotide
  Antisense strand to SEQ ID NO: 1304874
uuacugagucgugacgcga

SEQ ID NO: 1304876 - RNA, 19 nt, Artificial Sequence
  Description of Artificial Sequence: Synthetic oligonucleotide
  Sense strand starting at position 2838 of SEQ ID NO: 1241854
cgucacgacucaguaauuu

SEQ ID NO: 1304877 - RNA, 19 nt, Artificial Sequence
  Description of Artificial Sequence: Synthetic oligonucleotide
  Antisense strand to SEQ ID NO: 1304876
aaauuacugagucgugacg

SEQ ID NO: 1304878 - RNA, 19 nt, Artificial Sequence
  Description of Artificial Sequence: Synthetic oligonucleotide
  Sense strand starting at position 2907 of SEQ ID NO: 1241854
uuugaauuauaggccugau

SEQ ID NO: 1304879 - RNA, 19 nt, Artificial Sequence
  Description of Artificial Sequence: Synthetic oligonucleotide
  Antisense strand to SEQ ID NO: 1304878
aucaggccuauaauucaaa

SEQ ID NO: 1304880 - RNA, 19 nt, Artificial Sequence
  Description of Artificial Sequence: Synthetic oligonucleotide
  Sense strand starting at position 2910 of SEQ ID NO: 1241854
gaauuauaggccugaugca

SEQ ID NO: 1304881 - RNA, 19 nt, Artificial Sequence
  Description of Artificial Sequence: Synthetic oligonucleotide
  Antisense strand to SEQ ID NO: 1304880
ugcaucaggccuauaauuc

SEQ ID NO: 1304882 - RNA, 19 nt, Artificial Sequence
  Description of Artificial Sequence: Synthetic oligonucleotide
  Sense strand starting at position 3214 of SEQ ID NO: 1241854
agaauuacagcauaacugu

SEQ ID NO: 1304883 - RNA, 19 nt, Artificial Sequence
  Description of Artificial Sequence: Synthetic oligonucleotide
  Antisense strand to SEQ ID NO: 1304882
acaguuaugcuguaauucu

SEQ ID NO: 1304884 - RNA, 19 nt, Artificial Sequence
  Description of Artificial Sequence: Synthetic oligonucleotide
  Sense strand starting at position 3564 of SEQ ID NO: 1241854
agcaucuaaucgguugaaa

SEQ ID NO: 1304885 - RNA, 19 nt, Artificial Sequence
  Description of Artificial Sequence: Synthetic oligonucleotide
  Antisense strand to SEQ ID NO: 1304884
uuucaaccgauuagaugcu

SEQ ID NO: 1304886 - RNA, 19 nt, Artificial Sequence
  Description of Artificial Sequence: Synthetic oligonucleotide
  Sense strand starting at position 3566 of SEQ ID NO: 1241854
caucuaaucgguugaaagc

SEQ ID NO: 1304887 - RNA, 19 nt, Artificial Sequence
  Description of Artificial Sequence: Synthetic oligonucleotide
  Antisense strand to SEQ ID NO: 1304886
gcuuucaaccgauuagaug

SEQ ID NO: 1304888 - RNA, 19 nt, Artificial Sequence
  Description of Artificial Sequence: Synthetic oligonucleotide
  Sense strand starting at position 3576 of SEQ ID NO: 1241854
guugaaagccucuacuuua

SEQ ID NO: 1304889 - RNA, 19 nt, Artificial Sequence
  Description of Artificial Sequence: Synthetic oligonucleotide
  Antisense strand to SEQ ID NO: 1304888
uaaaguagaggcuuucaac

SEQ ID NO: 1304890 - RNA, 19 nt, Artificial Sequence
  Description of Artificial Sequence: Synthetic oligonucleotide
  Sense strand starting at position 3743 of SEQ ID NO: 1241854
guguuucuccuugcuugua

SEQ ID NO: 1304891 - RNA, 19 nt, Artificial Sequence
  Description of Artificial Sequence: Synthetic oligonucleotide
  Antisense strand to SEQ ID NO: 1304890
uacaagcaaggagaaacac

SEQ ID NO: 1304892 - RNA, 19 nt, Artificial Sequence
  Description of Artificial Sequence: Synthetic oligonucleotide
  Sense strand starting at position 3768 of SEQ ID NO: 1241854
cauagaaaguuguccuguu

SEQ ID NO: 1304893 - RNA, 19 nt, Artificial Sequence
  Description of Artificial Sequence: Synthetic oligonucleotide
  Antisense strand to SEQ ID NO: 1304892
aacaggacaacuuucuaug

SEQ ID NO: 1304894 - RNA, 19 nt, Artificial Sequence
  Description of Artificial Sequence: Synthetic oligonucleotide
  Sense strand starting at position 30 of SEQ ID NO: 1241855
uaguaauggcacuagauau

SEQ ID NO: 1304895 - RNA, 19 nt, Artificial Sequence
  Description of Artificial Sequence: Synthetic oligonucleotide
  Antisense strand to SEQ ID NO: 1304894
auaucuagugccauuacua

SEQ ID NO: 1304896 - RNA, 19 nt, Artificial Sequence
  Description of Artificial Sequence: Synthetic oligonucleotide
  Sense strand starting at position 80 of SEQ ID NO: 1241855
uugaaacagugccugaaua

SEQ ID NO: 1304897 - RNA, 19 nt, Artificial Sequence
  Description of Artificial Sequence: Synthetic oligonucleotide
  Antisense strand to SEQ ID NO: 1304896
uauucaggcacuguuucaa

SEQ ID NO: 1304898 - RNA, 19 nt, Artificial Sequence
  Description of Artificial Sequence: Synthetic oligonucleotide
  Sense strand starting at position 157 of SEQ ID NO: 1241855
aagucaacgaguugacagu

SEQ ID NO: 1304899 - RNA, 19 nt, Artificial Sequence
  Description of Artificial Sequence: Synthetic oligonucleotide
  Antisense strand to SEQ ID NO: 1304898
acugucaacucguugacuu

SEQ ID NO: 1304900 - RNA, 19 nt, Artificial Sequence
  Description of Artificial Sequence: Synthetic oligonucleotide
  Sense strand starting at position 163 of SEQ ID NO: 1241855
acgaguugacagugacaua

SEQ ID NO: 1304901 - RNA, 19 nt, Artificial Sequence
  Description of Artificial Sequence: Synthetic oligonucleotide
  Antisense strand to SEQ ID NO: 1304900
uaugucacugucaacucgu

SEQ ID NO: 1304902 - RNA, 19 nt, Artificial Sequence
  Description of Artificial Sequence: Synthetic oligonucleotide
  Sense strand starting at position 164 of SEQ ID NO: 1241855
cgaguugacagugacauac

SEQ ID NO: 1304903 - RNA, 19 nt, Artificial Sequence
  Description of Artificial Sequence: Synthetic oligonucleotide
  Antisense strand to SEQ ID NO: 1304902
guaugucacugucaacucg

SEQ ID NO: 1304904 - RNA, 19 nt, Artificial Sequence
  Description of Artificial Sequence: Synthetic oligonucleotide
  Sense strand starting at position 174 of SEQ ID NO: 1241855
gugacauacuucuaauuug

SEQ ID NO: 1304905 - RNA, 19 nt, Artificial Sequence
  Description of Artificial Sequence: Synthetic oligonucleotide
  Antisense strand to SEQ ID NO: 1304904
caaauuagaaguaugucac

SEQ ID NO: 1304906 - RNA, 19 nt, Artificial Sequence
  Description of Artificial Sequence: Synthetic oligonucleotide
  Sense strand starting at position 428 of SEQ ID NO: 1241855
gacgcacaugguuaaauga

SEQ ID NO: 1304907 - RNA, 19 nt, Artificial Sequence
  Description of Artificial Sequence: Synthetic oligonucleotide
  Antisense strand to SEQ ID NO: 1304906
ucauuuaaccaugugcguc

SEQ ID NO: 1304908 - RNA, 19 nt, Artificial Sequence
  Description of Artificial Sequence: Synthetic oligonucleotide
  Sense strand starting at position 437 of SEQ ID NO: 1241855
gguuaaaugagaugugguu

SEQ ID NO: 1304909 - RNA, 19 nt, Artificial Sequence
  Description of Artificial Sequence: Synthetic oligonucleotide
  Antisense strand to SEQ ID NO: 1304908
aaccacaucucauuuaacc

SEQ ID NO: 1304910 - RNA, 19 nt, Artificial Sequence
  Description of Artificial Sequence: Synthetic oligonucleotide
  Sense strand starting at position 439 of SEQ ID NO: 1241855
uuaaaugagaugugguuau

SEQ ID NO: 1304911 - RNA, 19 nt, Artificial Sequence
  Description of Artificial Sequence: Synthetic oligonucleotide
  Antisense strand to SEQ ID NO: 1304910
auaaccacaucucauuuaa

SEQ ID NO: 1304912 - RNA, 19 nt, Artificial Sequence
  Description of Artificial Sequence: Synthetic oligonucleotide
  Sense strand starting at position 550 of SEQ ID NO: 1241855
agucuuguccaauauuaga

SEQ ID NO: 1304913 - RNA, 19 nt, Artificial Sequence
  Description of Artificial Sequence: Synthetic oligonucleotide
  Antisense strand to SEQ ID NO: 1304912
ucuaauauuggacaagacu

SEQ ID NO: 1304914 - RNA, 19 nt, Artificial Sequence
  Description of Artificial Sequence: Synthetic oligonucleotide
  Sense strand starting at position 599 of SEQ ID NO: 1241855
caaggaaggguaugcaaua

SEQ ID NO: 1304915 - RNA, 19 nt, Artificial Sequence
  Description of Artificial Sequence: Synthetic oligonucleotide
  Antisense strand to SEQ ID NO: 1304914
uauugcauacccuuccuug

SEQ ID NO: 1304916 - RNA, 19 nt, Artificial Sequence
  Description of Artificial Sequence: Synthetic oligonucleotide
  Sense strand starting at position 611 of SEQ ID NO: 1241855
ugcaauaugcaguaacuau

SEQ ID NO: 1304917 - RNA, 19 nt, Artificial Sequence
  Description of Artificial Sequence: Synthetic oligonucleotide
  Antisense strand to SEQ ID NO: 1304916
auaguuacugcauauugca

SEQ ID NO: 1304918 - RNA, 19 nt, Artificial Sequence
  Description of Artificial Sequence: Synthetic oligonucleotide
  Sense strand starting at position 862 of SEQ ID NO: 1241855
ugcucuuaggccuacucua

SEQ ID NO: 1304919 - RNA, 19 nt, Artificial Sequence
  Description of Artificial Sequence: Synthetic oligonucleotide
  Antisense strand to SEQ ID NO: 1304918
uagaguaggccuaagagca

SEQ ID NO: 1304920 - RNA, 19 nt, Artificial Sequence
  Description of Artificial Sequence: Synthetic oligonucleotide
  Sense strand starting at position 1035 of SEQ ID NO: 1241855
agaaauugcccgcaagaga

SEQ ID NO: 1304921 - RNA, 19 nt, Artificial Sequence
  Description of Artificial Sequence: Synthetic oligonucleotide
  Antisense strand to SEQ ID NO: 1304920
ucucuugcgggcaauuucu

SEQ ID NO: 1304922 - RNA, 19 nt, Artificial Sequence
  Description of Artificial Sequence: Synthetic oligonucleotide
  Sense strand starting at position 2151 of SEQ ID NO: 1241855
gggaauugcuuuccugguu

SEQ ID NO: 1304923 - RNA, 19 nt, Artificial Sequence
  Description of Artificial Sequence: Synthetic oligonucleotide
  Antisense strand to SEQ ID NO: 1304922
aaccaggaaagcaauuccc

SEQ ID NO: 1304924 - RNA, 19 nt, Artificial Sequence
  Description of Artificial Sequence: Synthetic oligonucleotide
  Sense strand starting at position 2621 of SEQ ID NO: 1241855
caauguaaacagcgaugau

SEQ ID NO: 1304925 - RNA, 19 nt, Artificial Sequence
  Description of Artificial Sequence: Synthetic oligonucleotide
  Antisense strand to SEQ ID NO: 1304924
aucaucgcuguuuacauug

SEQ ID NO: 1304926 - RNA, 19 nt, Artificial Sequence
  Description of Artificial Sequence: Synthetic oligonucleotide
  Sense strand starting at position 2645 of SEQ ID NO: 1241855
ugaauugagcacuguguaa

SEQ ID NO: 1304927 - RNA, 19 nt, Artificial Sequence
  Description of Artificial Sequence: Synthetic oligonucleotide
  Antisense strand to SEQ ID NO: 1304926
uuacacagugcucaauuca

SEQ ID NO: 1304928 - RNA, 19 nt, Artificial Sequence
  Description of Artificial Sequence: Synthetic oligonucleotide
  Sense strand starting at position 2658 of SEQ ID NO: 1241855
guguaagggcuuuacauau

SEQ ID NO: 1304929 - RNA, 19 nt, Artificial Sequence
  Description of Artificial Sequence: Synthetic oligonucleotide
  Antisense strand to SEQ ID NO: 1304928
auauguaaagcccuuacac

SEQ ID NO: 1304930 - RNA, 19 nt, Artificial Sequence
  Description of Artificial Sequence: Synthetic oligonucleotide
  Sense strand starting at position 2914 of SEQ ID NO: 1241855
ggccaaauguagccagaga

SEQ ID NO: 1304931 - RNA, 19 nt, Artificial Sequence
  Description of Artificial Sequence: Synthetic oligonucleotide
  Antisense strand to SEQ ID NO: 1304930
ucucuggcuacauuuggcc

SEQ ID NO: 1304932 - RNA, 19 nt, Artificial Sequence
  Description of Artificial Sequence: Synthetic oligonucleotide
  Sense strand starting at position 2929 of SEQ ID NO: 1241855
gagagauaaugcuugaauc

SEQ ID NO: 1304933 - RNA, 19 nt, Artificial Sequence
  Description of Artificial Sequence: Synthetic oligonucleotide
  Antisense strand to SEQ ID NO: 1304932
gauucaagcauuaucucuc

SEQ ID NO: 1304934 - RNA, 19 nt, Artificial Sequence
  Description of Artificial Sequence: Synthetic oligonucleotide
  Sense strand starting at position 2930 of SEQ ID NO: 1241855
agagauaaugcuugaaucu

SEQ ID NO: 1304935 - RNA, 19 nt, Artificial Sequence
  Description of Artificial Sequence: Synthetic oligonucleotide
  Antisense strand to SEQ ID NO: 1304934
agauucaagcauuaucucu

SEQ ID NO: 1304936 - RNA, 19 nt, Artificial Sequence
  Description of Artificial Sequence: Synthetic oligonucleotide
  Sense strand starting at position 2939 of SEQ ID NO: 1241855
gcuugaaucucaucugaaa

SEQ ID NO: 1304937 - RNA, 19 nt, Artificial Sequence
  Description of Artificial Sequence: Synthetic oligonucleotide
  Antisense strand to SEQ ID NO: 1304936
uuucagaugagauucaagc

SEQ ID NO: 1304938 - RNA, 19 nt, Artificial Sequence
  Description of Artificial Sequence: Synthetic oligonucleotide
  Sense strand starting at position 2981 of SEQ ID NO: 1241855
gaugaauggcuaggaguuc

SEQ ID NO: 1304939 - RNA, 19 nt, Artificial Sequence
  Description of Artificial Sequence: Synthetic oligonucleotide
  Antisense strand to SEQ ID NO: 1304938
gaacuccuagccauucauc

SEQ ID NO: 1304940 - RNA, 19 nt, Artificial Sequence
  Description of Artificial Sequence: Synthetic oligonucleotide
  Sense strand starting at position 3019 of SEQ ID NO: 1241855
auggucuagccgcagagaa

SEQ ID NO: 1304941 - RNA, 19 nt, Artificial Sequence
  Description of Artificial Sequence: Synthetic oligonucleotide
  Antisense strand to SEQ ID NO: 1304940
uucucugcggcuagaccau

SEQ ID NO: 1304942 - RNA, 19 nt, Artificial Sequence
  Description of Artificial Sequence: Synthetic oligonucleotide
  Sense strand starting at position 3052 of SEQ ID NO: 1241855
gaaggugucaaguaaguaa

SEQ ID NO: 1304943 - RNA, 19 nt, Artificial Sequence
  Description of Artificial Sequence: Synthetic oligonucleotide
  Antisense strand to SEQ ID NO: 1304942
uuacuuacuugacaccuuc

SEQ ID NO: 1304944 - RNA, 19 nt, Artificial Sequence
  Description of Artificial Sequence: Synthetic oligonucleotide
  Sense strand starting at position 3056 of SEQ ID NO: 1241855
gugucaaguaaguaauagu

SEQ ID NO: 1304945 - RNA, 19 nt, Artificial Sequence
  Description of Artificial Sequence: Synthetic oligonucleotide
  Antisense strand to SEQ ID NO: 1304944
acuauuacuuacuugacac

SEQ ID NO: 1304946 - RNA, 19 nt, Artificial Sequence
  Description of Artificial Sequence: Synthetic oligonucleotide
  Sense strand starting at position 3133 of SEQ ID NO: 1241855
ggucaugucaguuaagagc

SEQ ID NO: 1304947 - RNA, 19 nt, Artificial Sequence
  Description of Artificial Sequence: Synthetic oligonucleotide
  Antisense strand to SEQ ID NO: 1304946
gcucuuaacugacaugacc

SEQ ID NO: 1304948 - RNA, 19 nt, Artificial Sequence
  Description of Artificial Sequence: Synthetic oligonucleotide
  Sense strand starting at position 3159 of SEQ ID NO: 1241855
gccuaagagugggcuuaaa

SEQ ID NO: 1304949 - RNA, 19 nt, Artificial Sequence
  Description of Artificial Sequence: Synthetic oligonucleotide
  Antisense strand to SEQ ID NO: 1304948
uuuaagcccacucuuaggc

SEQ ID NO: 1304950 - RNA, 19 nt, Artificial Sequence
  Description of Artificial Sequence: Synthetic oligonucleotide
  Sense strand starting at position 3169 of SEQ ID NO: 1241855
gggcuuaaaucuuugcaaa

SEQ ID NO: 1304951 - RNA, 19 nt, Artificial Sequence
  Description of Artificial Sequence: Synthetic oligonucleotide
  Antisense strand to SEQ ID NO: 1304950
uuugcaaagauuuaagccc

SEQ ID NO: 1304952 - RNA, 19 nt, Artificial Sequence
  Description of Artificial Sequence: Synthetic oligonucleotide
  Sense strand starting at position 3170 of SEQ ID NO: 1241855
ggcuuaaaucuuugcaaac

SEQ ID NO: 1304953 - RNA, 19 nt, Artificial Sequence
  Description of Artificial Sequence: Synthetic oligonucleotide
  Antisense strand to SEQ ID NO: 1304952
guuugcaaagauuuaagcc

SEQ ID NO: 1304954 - RNA, 19 nt, Artificial Sequence
  Description of Artificial Sequence: Synthetic oligonucleotide
  Sense strand starting at position 3198 of SEQ ID NO: 1241855
gagccagagaaguguuaug

SEQ ID NO: 1304955 - RNA, 19 nt, Artificial Sequence
  Description of Artificial Sequence: Synthetic oligonucleotide
  Antisense strand to SEQ ID NO: 1304954
cauaacacuucucuggcuc

SEQ ID NO: 1304956 - RNA, 19 nt, Artificial Sequence
  Description of Artificial Sequence: Synthetic oligonucleotide
  Sense strand starting at position 3237 of SEQ ID NO: 1241855
aggcucccucuugagauaa

SEQ ID NO: 1304957 - RNA, 19 nt, Artificial Sequence
  Description of Artificial Sequence: Synthetic oligonucleotide
  Antisense strand to SEQ ID NO: 1304956
uuaucucaagagggagccu

SEQ ID NO: 1304958 - RNA, 19 nt, Artificial Sequence
  Description of Artificial Sequence: Synthetic oligonucleotide
  Sense strand starting at position 3247 of SEQ ID NO: 1241855
uugagauaaucugaagaau

SEQ ID NO: 1304959 - RNA, 19 nt, Artificial Sequence
  Description of Artificial Sequence: Synthetic oligonucleotide
  Antisense strand to SEQ ID NO: 1304958
auucuucagauuaucucaa

SEQ ID NO: 1304960 - RNA, 19 nt, Artificial Sequence
  Description of Artificial Sequence: Synthetic oligonucleotide
  Sense strand starting at position 3256 of SEQ ID NO: 1241855
ucugaagaauuggccagau

SEQ ID NO: 1304961 - RNA, 19 nt, Artificial Sequence
  Description of Artificial Sequence: Synthetic oligonucleotide
  Antisense strand to SEQ ID NO: 1304960
aucuggccaauucuucaga

SEQ ID NO: 1304962 - RNA, 19 nt, Artificial Sequence
  Description of Artificial Sequence: Synthetic oligonucleotide
  Sense strand starting at position 3300 of SEQ ID NO: 1241855
cugauuuguugauaaaucu

SEQ ID NO: 1304963 - RNA, 19 nt, Artificial Sequence
  Description of Artificial Sequence: Synthetic oligonucleotide
  Antisense strand to SEQ ID NO: 1304962
agauuuaucaacaaaucag

SEQ ID NO: 1304964 - RNA, 19 nt, Artificial Sequence
  Description of Artificial Sequence: Synthetic oligonucleotide
  Sense strand starting at position 3332 of SEQ ID NO: 1241855
auagguucccuuuggaaau

SEQ ID NO: 1304965 - RNA, 19 nt, Artificial Sequence
  Description of Artificial Sequence: Synthetic oligonucleotide
  Antisense strand to SEQ ID NO: 1304964
auuuccaaagggaaccuau

SEQ ID NO: 1304966 - RNA, 19 nt, Artificial Sequence
  Description of Artificial Sequence: Synthetic oligonucleotide
  Sense strand starting at position 3814 of SEQ ID NO: 1241855
aggucuagguucuuugauu

SEQ ID NO: 1304967 - RNA, 19 nt, Artificial Sequence
  Description of Artificial Sequence: Synthetic oligonucleotide
  Antisense strand to SEQ ID NO: 1304966
aaucaaagaaccuagaccu

SEQ ID NO: 1304968 - RNA, 19 nt, Artificial Sequence
  Description of Artificial Sequence: Synthetic oligonucleotide
  Sense strand starting at position 3815 of SEQ ID NO: 1241855
ggucuagguucuuugauuc

SEQ ID NO: 1304969 - RNA, 19 nt, Artificial Sequence
  Description of Artificial Sequence: Synthetic oligonucleotide
  Antisense strand to SEQ ID NO: 1304968
gaaucaaagaaccuagacc

SEQ ID NO: 1304970 - RNA, 19 nt, Artificial Sequence
  Description of Artificial Sequence: Synthetic oligonucleotide
  Sense strand starting at position 3845 of SEQ ID NO: 1241855
uuagcaauucuagauugcu

SEQ ID NO: 1304971 - RNA, 19 nt, Artificial Sequence
  Description of Artificial Sequence: Synthetic oligonucleotide
  Antisense strand to SEQ ID NO: 1304970
agcaaucuagaauugcuaa

SEQ ID NO: 1304972 - RNA, 19 nt, Artificial Sequence
  Description of Artificial Sequence: Synthetic oligonucleotide
  Sense strand starting at position 3920 of SEQ ID NO: 1241855
uugugauauuaccuacaga

SEQ ID NO: 1304973 - RNA, 19 nt, Artificial Sequence
  Description of Artificial Sequence: Synthetic oligonucleotide
  Antisense strand to SEQ ID NO: 1304972
ucuguagguaauaucacaa

SEQ ID NO: 1304974 - RNA, 19 nt, Artificial Sequence
  Description of Artificial Sequence: Synthetic oligonucleotide
  Sense strand starting at position 37 of SEQ ID NO: 1241856
cucaguguucuggacagag

SEQ ID NO: 1304975 - RNA, 19 nt, Artificial Sequence
  Description of Artificial Sequence: Synthetic oligonucleotide
  Antisense strand to SEQ ID NO: 1304974
cucuguccagaacacugag

SEQ ID NO: 1304976 - RNA, 19 nt, Artificial Sequence
  Description of Artificial Sequence: Synthetic oligonucleotide
  Sense strand starting at position 98 of SEQ ID NO: 1241856
ggaacugccuuccuuggaa

SEQ ID NO: 1304977 - RNA, 19 nt, Artificial Sequence
  Description of Artificial Sequence: Synthetic oligonucleotide
  Antisense strand to SEQ ID NO: 1304976
uuccaaggaaggcaguucc

SEQ ID NO: 1304978 - RNA, 19 nt, Artificial Sequence
  Description of Artificial Sequence: Synthetic oligonucleotide
  Sense strand starting at position 344 of SEQ ID NO: 1241856
cuuagaauguuuccuagac

SEQ ID NO: 1304979 - RNA, 19 nt, Artificial Sequence
  Description of Artificial Sequence: Synthetic oligonucleotide
  Antisense strand to SEQ ID NO: 1304978
gucuaggaaacauucuaag

SEQ ID NO: 1304980 - RNA, 19 nt, Artificial Sequence
  Description of Artificial Sequence: Synthetic oligonucleotide
  Sense strand starting at position 345 of SEQ ID NO: 1241856
uuagaauguuuccuagaca

SEQ ID NO: 1304981 - RNA, 19 nt, Artificial Sequence
  Description of Artificial Sequence: Synthetic oligonucleotide
  Antisense strand to SEQ ID NO: 1304980
ugucuaggaaacauucuaa

SEQ ID NO: 1304982 - RNA, 19 nt, Artificial Sequence
  Description of Artificial Sequence: Synthetic oligonucleotide
  Sense strand starting at position 359 of SEQ ID NO: 1241856
agacauagcugacaaauca

SEQ ID NO: 1304983 - RNA, 19 nt, Artificial Sequence
  Description of Artificial Sequence: Synthetic oligonucleotide
  Antisense strand to SEQ ID NO: 1304982
ugauuugucagcuaugucu

SEQ ID NO: 1304984 - RNA, 19 nt, Artificial Sequence
  Description of Artificial Sequence: Synthetic oligonucleotide
  Sense strand starting at position 502 of SEQ ID NO: 1241856
agaggacucucccuuaaug

SEQ ID NO: 1304985 - RNA, 19 nt, Artificial Sequence
  Description of Artificial Sequence: Synthetic oligonucleotide
  Antisense strand to SEQ ID NO: 1304984
cauuaagggagaguccucu

SEQ ID NO: 1304986 - RNA, 19 nt, Artificial Sequence
  Description of Artificial Sequence: Synthetic oligonucleotide
  Sense strand starting at position 541 of SEQ ID NO: 1241856
uccucagucuguccuuuaa

SEQ ID NO: 1304987 - RNA, 19 nt, Artificial Sequence
  Description of Artificial Sequence: Synthetic oligonucleotide
  Antisense strand to SEQ ID NO: 1304986
uuaaaggacagacugagga

SEQ ID NO: 1304988 - RNA, 19 nt, Artificial Sequence
  Description of Artificial Sequence: Synthetic oligonucleotide
  Sense strand starting at position 543 of SEQ ID NO: 1241856
cucagucuguccuuuaaag

SEQ ID NO: 1304989 - RNA, 19 nt, Artificial Sequence
  Description of Artificial Sequence: Synthetic oligonucleotide
  Antisense strand to SEQ ID NO: 1304988
cuuuaaaggacagacugag

SEQ ID NO: 1304990 - RNA, 19 nt, Artificial Sequence
  Description of Artificial Sequence: Synthetic oligonucleotide
  Sense strand starting at position 553 of SEQ ID NO: 1241856
ccuuuaaagccuggucaca

SEQ ID NO: 1304991 - RNA, 19 nt, Artificial Sequence
  Description of Artificial Sequence: Synthetic oligonucleotide
  Antisense strand to SEQ ID NO: 1304990
ugugaccaggcuuuaaagg

SEQ ID NO: 1304992 - RNA, 19 nt, Artificial Sequence
  Description of Artificial Sequence: Synthetic oligonucleotide
  Sense strand starting at position 555 of SEQ ID NO: 1241856
uuuaaagccuggucacauc

SEQ ID NO: 1304993 - RNA, 19 nt, Artificial Sequence
  Description of Artificial Sequence: Synthetic oligonucleotide
  Antisense strand to SEQ ID NO: 1304992
gaugugaccaggcuuuaaa

SEQ ID NO: 1304994 - RNA, 19 nt, Artificial Sequence
  Description of Artificial Sequence: Synthetic oligonucleotide
  Sense strand starting at position 655 of SEQ ID NO: 1241856
gagcaaguccacuguuacu

SEQ ID NO: 1304995 - RNA, 19 nt, Artificial Sequence
  Description of Artificial Sequence: Synthetic oligonucleotide
  Antisense strand to SEQ ID NO: 1304994
aguaacaguggacuugcuc

SEQ ID NO: 1304996 - RNA, 19 nt, Artificial Sequence
  Description of Artificial Sequence: Synthetic oligonucleotide
  Sense strand starting at position 746 of SEQ ID NO: 1241856
guccaaucuccagaagccu

SEQ ID NO: 1304997 - RNA, 19 nt, Artificial Sequence
  Description of Artificial Sequence: Synthetic oligonucleotide
  Antisense strand to SEQ ID NO: 1304996
aggcuucuggagauuggac

SEQ ID NO: 1304998 - RNA, 19 nt, Artificial Sequence
  Description of Artificial Sequence: Synthetic oligonucleotide
  Sense strand starting at position 799 of SEQ ID NO: 1241856
uccuaauucuaugaugaga

SEQ ID NO: 1304999 - RNA, 19 nt, Artificial Sequence
  Description of Artificial Sequence: Synthetic oligonucleotide
  Antisense strand to SEQ ID NO: 1304998
ucucaucauagaauuagga

SEQ ID NO: 1305000 - RNA, 19 nt, Artificial Sequence
  Description of Artificial Sequence: Synthetic oligonucleotide
  Sense strand starting at position 993 of SEQ ID NO: 1241856
uuuguacuagcuuagaugu

SEQ ID NO: 1305001 - RNA, 19 nt, Artificial Sequence
  Description of Artificial Sequence: Synthetic oligonucleotide
  Antisense strand to SEQ ID NO: 1305000
acaucuaagcuaguacaaa

SEQ ID NO: 1305002 - RNA, 19 nt, Artificial Sequence
  Description of Artificial Sequence: Synthetic oligonucleotide
  Sense strand starting at position 1047 of SEQ ID NO: 1241856
uagggaacuuucccaguga

SEQ ID NO: 1305003 - RNA, 19 nt, Artificial Sequence
  Description of Artificial Sequence: Synthetic oligonucleotide
  Antisense strand to SEQ ID NO: 1305002
ucacugggaaaguucccua

SEQ ID NO: 1305004 - RNA, 19 nt, Artificial Sequence
  Description of Artificial Sequence: Synthetic oligonucleotide
  Sense strand starting at position 1048 of SEQ ID NO: 1241856
agggaacuuucccagugaa

SEQ ID NO: 1305005 - RNA, 19 nt, Artificial Sequence
  Description of Artificial Sequence: Synthetic oligonucleotide
  Antisense strand to SEQ ID NO: 1305004
uucacugggaaaguucccu

SEQ ID NO: 1305006 - RNA, 19 nt, Artificial Sequence
  Description of Artificial Sequence: Synthetic oligonucleotide
  Sense strand starting at position 1105 of SEQ ID NO: 1241856
guugccacuugaucaagaa

SEQ ID NO: 1305007 - RNA, 19 nt, Artificial Sequence
  Description of Artificial Sequence: Synthetic oligonucleotide
  Antisense strand to SEQ ID NO: 1305006
uucuugaucaaguggcaac

SEQ ID NO: 1305008 - RNA, 19 nt, Artificial Sequence
  Description of Artificial Sequence: Synthetic oligonucleotide
  Sense strand starting at position 1136 of SEQ ID NO: 1241856
ugaaauauuuccuaaugag

SEQ ID NO: 1305009 - RNA, 19 nt, Artificial Sequence
  Description of Artificial Sequence: Synthetic oligonucleotide
  Antisense strand to SEQ ID NO: 1305008
cucauuaggaaauauuuca

SEQ ID NO: 1305010 - RNA, 19 nt, Artificial Sequence
  Description of Artificial Sequence: Synthetic oligonucleotide
  Sense strand starting at position 1151 of SEQ ID NO: 1241856
ugagcucaguugucacaga

SEQ ID NO: 1305011 - RNA, 19 nt, Artificial Sequence
  Description of Artificial Sequence: Synthetic oligonucleotide
  Antisense strand to SEQ ID NO: 1305010
ucugugacaacugagcuca

SEQ ID NO: 1305012 - RNA, 19 nt, Artificial Sequence
  Description of Artificial Sequence: Synthetic oligonucleotide
  Sense strand starting at position 1357 of SEQ ID NO: 1241856
ggaguuguacccuguugaa

SEQ ID NO: 1305013 - RNA, 19 nt, Artificial Sequence
  Description of Artificial Sequence: Synthetic oligonucleotide
  Antisense strand to SEQ ID NO: 1305012
uucaacaggguacaacucc

SEQ ID NO: 1305014 - RNA, 19 nt, Artificial Sequence
  Description of Artificial Sequence: Synthetic oligonucleotide
  Sense strand starting at position 1616 of SEQ ID NO: 1241856
cagcgauugggaugcagau

SEQ ID NO: 1305015 - RNA, 19 nt, Artificial Sequence
  Description of Artificial Sequence: Synthetic oligonucleotide
  Antisense strand to SEQ ID NO: 1305014
aucugcaucccaaucgcug

SEQ ID NO: 1305016 - RNA, 19 nt, Artificial Sequence
  Description of Artificial Sequence: Synthetic oligonucleotide
  Sense strand starting at position 2624 of SEQ ID NO: 1241856
gugaaugucuuggcuuuga

SEQ ID NO: 1305017 - RNA, 19 nt, Artificial Sequence
  Description of Artificial Sequence: Synthetic oligonucleotide
  Antisense strand to SEQ ID NO: 1305016
ucaaagccaagacauucac

SEQ ID NO: 1305018 - RNA, 19 nt, Artificial Sequence
  Description of Artificial Sequence: Synthetic oligonucleotide
  Sense strand starting at position 2628 of SEQ ID NO: 1241856
augucuuggcuuugaguaa

SEQ ID NO: 1305019 - RNA, 19 nt, Artificial Sequence
  Description of Artificial Sequence: Synthetic oligonucleotide
  Antisense strand to SEQ ID NO: 1305018
uuacucaaagccaagacau

SEQ ID NO: 1305020 - RNA, 19 nt, Artificial Sequence
  Description of Artificial Sequence: Synthetic oligonucleotide
  Sense strand starting at position 2673 of SEQ ID NO: 1241856
aaugacugccguugauuau

SEQ ID NO: 1305021 - RNA, 19 nt, Artificial Sequence
  Description of Artificial Sequence: Synthetic oligonucleotide
  Antisense strand to SEQ ID NO: 1305020
auaaucaacggcagucauu

SEQ ID NO: 1305022 - RNA, 19 nt, Artificial Sequence
  Description of Artificial Sequence: Synthetic oligonucleotide
  Sense strand starting at position 2674 of SEQ ID NO: 1241856
augacugccguugauuauu

SEQ ID NO: 1305023 - RNA, 19 nt, Artificial Sequence
  Description of Artificial Sequence: Synthetic oligonucleotide
  Antisense strand to SEQ ID NO: 1305022
aauaaucaacggcagucau

SEQ ID NO: 1305024 - RNA, 19 nt, Artificial Sequence
  Description of Artificial Sequence: Synthetic oligonucleotide
  Sense strand starting at position 2724 of SEQ ID NO: 1241856
ccaccaaguugagaauuua

SEQ ID NO: 1305025 - RNA, 19 nt, Artificial Sequence
  Description of Artificial Sequence: Synthetic oligonucleotide
  Antisense strand to SEQ ID NO: 1305024
uaaauucucaacuuggugg

SEQ ID NO: 1305026 - RNA, 19 nt, Artificial Sequence
  Description of Artificial Sequence: Synthetic oligonucleotide
  Sense strand starting at position 2772 of SEQ ID NO: 1241856
cugcguauccuggcgaagu

SEQ ID NO: 1305027 - RNA, 19 nt, Artificial Sequence
  Description of Artificial Sequence: Synthetic oligonucleotide
  Antisense strand to SEQ ID NO: 1305026
acuucgccaggauacgcag

SEQ ID NO: 1305028 - RNA, 19 nt, Artificial Sequence
  Description of Artificial Sequence: Synthetic oligonucleotide
  Sense strand starting at position 2959 of SEQ ID NO: 1241856
cgcagauaauguuugcaga

SEQ ID NO: 1305029 - RNA, 19 nt, Artificial Sequence
  Description of Artificial Sequence: Synthetic oligonucleotide
  Antisense strand to SEQ ID NO: 1305028
ucugcaaacauuaucugcg

SEQ ID NO: 1305030 - RNA, 19 nt, Artificial Sequence
  Description of Artificial Sequence: Synthetic oligonucleotide
  Sense strand starting at position 2960 of SEQ ID NO: 1241856
gcagauaauguuugcagag

SEQ ID NO: 1305031 - RNA, 19 nt, Artificial Sequence
  Description of Artificial Sequence: Synthetic oligonucleotide
  Antisense strand to SEQ ID NO: 1305030
cucugcaaacauuaucugc

SEQ ID NO: 1305032 - RNA, 19 nt, Artificial Sequence
  Description of Artificial Sequence: Synthetic oligonucleotide
  Sense strand starting at position 2961 of SEQ ID NO: 1241856
cagauaauguuugcagaga

SEQ ID NO: 1305033 - RNA, 19 nt, Artificial Sequence
  Description of Artificial Sequence: Synthetic oligonucleotide
  Antisense strand to SEQ ID NO: 1305032
ucucugcaaacauuaucug

SEQ ID NO: 1305034 - RNA, 19 nt, Artificial Sequence
  Description of Artificial Sequence: Synthetic oligonucleotide
  Sense strand starting at position 3066 of SEQ ID NO: 1241856
gggaguauuugucacuacu

SEQ ID NO: 1305035 - RNA, 19 nt, Artificial Sequence
  Description of Artificial Sequence: Synthetic oligonucleotide
  Antisense strand to SEQ ID NO: 1305034
aguagugacaaauacuccc

SEQ ID NO: 1305036 - RNA, 19 nt, Artificial Sequence
  Description of Artificial Sequence: Synthetic oligonucleotide
  Sense strand starting at position 3096 of SEQ ID NO: 1241856
cuaucaguucuacaaaugu

SEQ ID NO: 1305037 - RNA, 19 nt, Artificial Sequence
  Description of Artificial Sequence: Synthetic oligonucleotide
  Antisense strand to SEQ ID NO: 1305036
acauuuguagaacugauag

SEQ ID NO: 1305038 - RNA, 19 nt, Artificial Sequence
  Description of Artificial Sequence: Synthetic oligonucleotide
  Sense strand starting at position 3272 of SEQ ID NO: 1241856
ggcagaagcccugaaauug

SEQ ID NO: 1305039 - RNA, 19 nt, Artificial Sequence
  Description of Artificial Sequence: Synthetic oligonucleotide
  Antisense strand to SEQ ID NO: 1305038
caauuucagggcuucugcc

SEQ ID NO: 1305040 - RNA, 19 nt, Artificial Sequence
  Description of Artificial Sequence: Synthetic oligonucleotide
  Sense strand starting at position 3300 of SEQ ID NO: 1241856
gccuguagucacuaaugaa

SEQ ID NO: 1305041 - RNA, 19 nt, Artificial Sequence
  Description of Artificial Sequence: Synthetic oligonucleotide
  Antisense strand to SEQ ID NO: 1305040
uucauuagugacuacaggc

SEQ ID NO: 1305042 - RNA, 19 nt, Artificial Sequence
  Description of Artificial Sequence: Synthetic oligonucleotide
  Sense strand starting at position 3512 of SEQ ID NO: 1241856
aaaguugacuguuccugau

SEQ ID NO: 1305043 - RNA, 19 nt, Artificial Sequence
  Description of Artificial Sequence: Synthetic oligonucleotide
  Antisense strand to SEQ ID NO: 1305042
aucaggaacagucaacuuu

SEQ ID NO: 1305044 - RNA, 19 nt, Artificial Sequence
  Description of Artificial Sequence: Synthetic oligonucleotide
  Sense strand starting at position 3516 of SEQ ID NO: 1241856
uugacuguuccugauucca

SEQ ID NO: 1305045 - RNA, 19 nt, Artificial Sequence
  Description of Artificial Sequence: Synthetic oligonucleotide
  Antisense strand to SEQ ID NO: 1305044
uggaaucaggaacagucaa

SEQ ID NO: 1305046 - RNA, 19 nt, Artificial Sequence
  Description of Artificial Sequence: Synthetic oligonucleotide
  Sense strand starting at position 3620 of SEQ ID NO: 1241856
cguauacuggacugaagau

SEQ ID NO: 1305047 - RNA, 19 nt, Artificial Sequence
  Description of Artificial Sequence: Synthetic oligonucleotide
  Antisense strand to SEQ ID NO: 1305046
aucuucaguccaguauacg

SEQ ID NO: 1305048 - RNA, 19 nt, Artificial Sequence
  Description of Artificial Sequence: Synthetic oligonucleotide
  Sense strand starting at position 3708 of SEQ ID NO: 1241856
agauauuucugcuacccag

SEQ ID NO: 1305049 - RNA, 19 nt, Artificial Sequence
  Description of Artificial Sequence: Synthetic oligonucleotide
  Antisense strand to SEQ ID NO: 1305048
cuggguagcagaaauaucu

SEQ ID NO: 1305050 - RNA, 19 nt, Artificial Sequence
  Description of Artificial Sequence: Synthetic oligonucleotide
  Sense strand starting at position 3876 of SEQ ID NO: 1241856
ucuccuugguguuuaugua

SEQ ID NO: 1305051 - RNA, 19 nt, Artificial Sequence
  Description of Artificial Sequence: Synthetic oligonucleotide
  Antisense strand to SEQ ID NO: 1305050
uacauaaacaccaaggaga

SEQ ID NO: 1305052 - RNA, 19 nt, Artificial Sequence
  Description of Artificial Sequence: Synthetic oligonucleotide
  Sense strand starting at position 3877 of SEQ ID NO: 1241856
cuccuugguguuuauguau

SEQ ID NO: 1305053 - RNA, 19 nt, Artificial Sequence
  Description of Artificial Sequence: Synthetic oligonucleotide
  Antisense strand to SEQ ID NO: 1305052
auacauaaacaccaaggag

SEQ ID NO: 1305054 - RNA, 19 nt, Artificial Sequence
  Description of Artificial Sequence: Synthetic oligonucleotide
  Sense strand starting at position 2 of SEQ ID NO: 1241857
ggaugaugaccgugaaguc

SEQ ID NO: 1305055 - RNA, 19 nt, Artificial Sequence
  Description of Artificial Sequence: Synthetic oligonucleotide
  Antisense strand to SEQ ID NO: 1305054
gacuucacggucaucaucc

SEQ ID NO: 1305056 - RNA, 19 nt, Artificial Sequence
  Description of Artificial Sequence: Synthetic oligonucleotide
  Sense strand starting at position 3 of SEQ ID NO: 1241857
gaugaugaccgugaaguca

SEQ ID NO: 1305057 - RNA, 19 nt, Artificial Sequence
  Description of Artificial Sequence: Synthetic oligonucleotide
  Antisense strand to SEQ ID NO: 1305056
ugacuucacggucaucauc

SEQ ID NO: 1305058 - RNA, 19 nt, Artificial Sequence
  Description of Artificial Sequence: Synthetic oligonucleotide
  Sense strand starting at position 87 of SEQ ID NO: 1241857
ccgagauacaucgaucagu

SEQ ID NO: 1305059 - RNA, 19 nt, Artificial Sequence
  Description of Artificial Sequence: Synthetic oligonucleotide
  Antisense strand to SEQ ID NO: 1305058
acugaucgauguaucucgg

SEQ ID NO: 1305060 - RNA, 19 nt, Artificial Sequence
  Description of Artificial Sequence: Synthetic oligonucleotide
  Sense strand starting at position 169 of SEQ ID NO: 1241857
gucaguccucagcaaaucu

SEQ ID NO: 1305061 - RNA, 19 nt, Artificial Sequence
  Description of Artificial Sequence: Synthetic oligonucleotide
  Antisense strand to SEQ ID NO: 1305060
agauuugcugaggacugac

SEQ ID NO: 1305062 - RNA, 19 nt, Artificial Sequence
  Description of Artificial Sequence: Synthetic oligonucleotide
  Sense strand starting at position 249 of SEQ ID NO: 1241857
gugcuuccgacauagggau

SEQ ID NO: 1305063 - RNA, 19 nt, Artificial Sequence
  Description of Artificial Sequence: Synthetic oligonucleotide
  Antisense strand to SEQ ID NO: 1305062
aucccuaugucggaagcac

SEQ ID NO: 1305064 - RNA, 19 nt, Artificial Sequence
  Description of Artificial Sequence: Synthetic oligonucleotide
  Sense strand starting at position 309 of SEQ ID NO: 1241857
ggaggaaccuugucaggcu

SEQ ID NO: 1305065 - RNA, 19 nt, Artificial Sequence
  Description of Artificial Sequence: Synthetic oligonucleotide
  Antisense strand to SEQ ID NO: 1305064
agccugacaagguuccucc

SEQ ID NO: 1305066 - RNA, 19 nt, Artificial Sequence
  Description of Artificial Sequence: Synthetic oligonucleotide
  Sense strand starting at position 379 of SEQ ID NO: 1241857
gaaccagagccucagucuu

SEQ ID NO: 1305067 - RNA, 19 nt, Artificial Sequence
  Description of Artificial Sequence: Synthetic oligonucleotide
  Antisense strand to SEQ ID NO: 1305066
aagacugaggcucugguuc

SEQ ID NO: 1305068 - RNA, 19 nt, Artificial Sequence
  Description of Artificial Sequence: Synthetic oligonucleotide
  Sense strand starting at position 479 of SEQ ID NO: 1241857
guaagcuauuaagugauua

SEQ ID NO: 1305069 - RNA, 19 nt, Artificial Sequence
  Description of Artificial Sequence: Synthetic oligonucleotide
  Antisense strand to SEQ ID NO: 1305068
uaaucacuuaauagcuuac

SEQ ID NO: 1305070 - RNA, 19 nt, Artificial Sequence
  Description of Artificial Sequence: Synthetic oligonucleotide
  Sense strand starting at position 483 of SEQ ID NO: 1241857
gcuauuaagugauuacuaa

SEQ ID NO: 1305071 - RNA, 19 nt, Artificial Sequence
  Description of Artificial Sequence: Synthetic oligonucleotide
  Antisense strand to SEQ ID NO: 1305070
uuaguaaucacuuaauagc

SEQ ID NO: 1305072 - RNA, 19 nt, Artificial Sequence
  Description of Artificial Sequence: Synthetic oligonucleotide
  Sense strand starting at position 534 of SEQ ID NO: 1241857
augugaggguagguaucua

SEQ ID NO: 1305073 - RNA, 19 nt, Artificial Sequence
  Description of Artificial Sequence: Synthetic oligonucleotide
  Antisense strand to SEQ ID NO: 1305072
uagauaccuacccucacau

SEQ ID NO: 1305074 - RNA, 19 nt, Artificial Sequence
  Description of Artificial Sequence: Synthetic oligonucleotide
  Sense strand starting at position 538 of SEQ ID NO: 1241857
gaggguagguaucuaagcu

SEQ ID NO: 1305075 - RNA, 19 nt, Artificial Sequence
  Description of Artificial Sequence: Synthetic oligonucleotide
  Antisense strand to SEQ ID NO: 1305074
agcuuagauaccuacccuc

SEQ ID NO: 1305076 - RNA, 19 nt, Artificial Sequence
  Description of Artificial Sequence: Synthetic oligonucleotide
  Sense strand starting at position 546 of SEQ ID NO: 1241857
guaucuaagcugcaauaaa

SEQ ID NO: 1305077 - RNA, 19 nt, Artificial Sequence
  Description of Artificial Sequence: Synthetic oligonucleotide
  Antisense strand to SEQ ID NO: 1305076
uuuauugcagcuuagauac

SEQ ID NO: 1305078 - RNA, 19 nt, Artificial Sequence
  Description of Artificial Sequence: Synthetic oligonucleotide
  Sense strand starting at position 618 of SEQ ID NO: 1241857
auauccagguggucauuaa

SEQ ID NO: 1305079 - RNA, 19 nt, Artificial Sequence
  Description of Artificial Sequence: Synthetic oligonucleotide
  Antisense strand to SEQ ID NO: 1305078
uuaaugaccaccuggauau

SEQ ID NO: 1305080 - RNA, 19 nt, Artificial Sequence
  Description of Artificial Sequence: Synthetic oligonucleotide
  Sense strand starting at position 627 of SEQ ID NO: 1241857
uggucauuaacccgaggaa

SEQ ID NO: 1305081 - RNA, 19 nt, Artificial Sequence
  Description of Artificial Sequence: Synthetic oligonucleotide
  Antisense strand to SEQ ID NO: 1305080
uuccucggguuaaugacca

SEQ ID NO: 1305082 - RNA, 19 nt, Artificial Sequence
  Description of Artificial Sequence: Synthetic oligonucleotide
  Sense strand starting at position 630 of SEQ ID NO: 1241857
ucauuaacccgaggaaaug

SEQ ID NO: 1305083 - RNA, 19 nt, Artificial Sequence
  Description of Artificial Sequence: Synthetic oligonucleotide
  Antisense strand to SEQ ID NO: 1305082
cauuuccucggguuaauga

SEQ ID NO: 1305084 - RNA, 19 nt, Artificial Sequence
  Description of Artificial Sequence: Synthetic oligonucleotide
  Sense strand starting at position 636 of SEQ ID NO: 1241857
acccgaggaaaugguuauu

SEQ ID NO: 1305085 - RNA, 19 nt, Artificial Sequence
  Description of Artificial Sequence: Synthetic oligonucleotide
  Antisense strand to SEQ ID NO: 1305084
aauaaccauuuccucgggu

SEQ ID NO: 1305086 - RNA, 19 nt, Artificial Sequence
  Description of Artificial Sequence: Synthetic oligonucleotide
  Sense strand starting at position 646 of SEQ ID NO: 1241857
augguuauuacugagaggu

SEQ ID NO: 1305087 - RNA, 19 nt, Artificial Sequence
  Description of Artificial Sequence: Synthetic oligonucleotide
  Antisense strand to SEQ ID NO: 1305086
accucucaguaauaaccau

SEQ ID NO: 1305088 - RNA, 19 nt, Artificial Sequence
  Description of Artificial Sequence: Synthetic oligonucleotide
  Sense strand starting at position 676 of SEQ ID NO: 1241857
aacucagaagucugagacu

SEQ ID NO: 1305089 - RNA, 19 nt, Artificial Sequence
  Description of Artificial Sequence: Synthetic oligonucleotide
  Antisense strand to SEQ ID NO: 1305088
agucucagacuucugaguu

SEQ ID NO: 1305090 - RNA, 19 nt, Artificial Sequence
  Description of Artificial Sequence: Synthetic oligonucleotide
  Sense strand starting at position 685 of SEQ ID NO: 1241857
gucugagacuaguccaaga

SEQ ID NO: 1305091 - RNA, 19 nt, Artificial Sequence
  Description of Artificial Sequence: Synthetic oligonucleotide
  Antisense strand to SEQ ID NO: 1305090
ucuuggacuagucucagac

SEQ ID NO: 1305092 - RNA, 19 nt, Artificial Sequence
  Description of Artificial Sequence: Synthetic oligonucleotide
  Sense strand starting at position 835 of SEQ ID NO: 1241857
guggaauagggaugggagu

SEQ ID NO: 1305093 - RNA, 19 nt, Artificial Sequence
  Description of Artificial Sequence: Synthetic oligonucleotide
  Antisense strand to SEQ ID NO: 1305092
acucccaucccuauuccac

SEQ ID NO: 1305094 - RNA, 19 nt, Artificial Sequence
  Description of Artificial Sequence: Synthetic oligonucleotide
  Sense strand starting at position 872 of SEQ ID NO: 1241857
cuagcuggucucuauccaa

SEQ ID NO: 1305095 - RNA, 19 nt, Artificial Sequence
  Description of Artificial Sequence: Synthetic oligonucleotide
  Antisense strand to SEQ ID NO: 1305094
uuggauagagaccagcuag

SEQ ID NO: 1305096 - RNA, 19 nt, Artificial Sequence
  Description of Artificial Sequence: Synthetic oligonucleotide
  Sense strand starting at position 956 of SEQ ID NO: 1241857
ggugcacaacgugaugauu

SEQ ID NO: 1305097 - RNA, 19 nt, Artificial Sequence
  Description of Artificial Sequence: Synthetic oligonucleotide
  Antisense strand to SEQ ID NO: 1305096
aaucaucacguugugcacc

SEQ ID NO: 1305098 - RNA, 19 nt, Artificial Sequence
  Description of Artificial Sequence: Synthetic oligonucleotide
  Sense strand starting at position 1073 of SEQ ID NO: 1241857
gaaaguuuguaccuuugau

SEQ ID NO: 1305099 - RNA, 19 nt, Artificial Sequence
  Description of Artificial Sequence: Synthetic oligonucleotide
  Antisense strand to SEQ ID NO: 1305098
aucaaagguacaaacuuuc

SEQ ID NO: 1305100 - RNA, 19 nt, Artificial Sequence
  Description of Artificial Sequence: Synthetic oligonucleotide
  Sense strand starting at position 1338 of SEQ ID NO: 1241857
ccauuaggcuggucucaaa

SEQ ID NO: 1305101 - RNA, 19 nt, Artificial Sequence
  Description of Artificial Sequence: Synthetic oligonucleotide
  Antisense strand to SEQ ID NO: 1305100
uuugagaccagccuaaugg

SEQ ID NO: 1305102 - RNA, 19 nt, Artificial Sequence
  Description of Artificial Sequence: Synthetic oligonucleotide
  Sense strand starting at position 1431 of SEQ ID NO: 1241857
gucuguucugccguuucua

SEQ ID NO: 1305103 - RNA, 19 nt, Artificial Sequence
  Description of Artificial Sequence: Synthetic oligonucleotide
  Antisense strand to SEQ ID NO: 1305102
uagaaacggcagaacagac

SEQ ID NO: 1305104 - RNA, 19 nt, Artificial Sequence
  Description of Artificial Sequence: Synthetic oligonucleotide
  Sense strand starting at position 1432 of SEQ ID NO: 1241857
ucuguucugccguuucuau

SEQ ID NO: 1305105 - RNA, 19 nt, Artificial Sequence
  Description of Artificial Sequence: Synthetic oligonucleotide
  Antisense strand to SEQ ID NO: 1305104
auagaaacggcagaacaga

SEQ ID NO: 1305106 - RNA, 19 nt, Artificial Sequence
  Description of Artificial Sequence: Synthetic oligonucleotide
  Sense strand starting at position 1846 of SEQ ID NO: 1241857
gcuuuaagccgaucugugu

SEQ ID NO: 1305107 - RNA, 19 nt, Artificial Sequence
  Description of Artificial Sequence: Synthetic oligonucleotide
  Antisense strand to SEQ ID NO: 1305106
acacagaucggcuuaaagc

SEQ ID NO: 1305108 - RNA, 19 nt, Artificial Sequence
  Description of Artificial Sequence: Synthetic oligonucleotide
  Sense strand starting at position 2287 of SEQ ID NO: 1241857
guuccucggcgggauuuaa

SEQ ID NO: 1305109 - RNA, 19 nt, Artificial Sequence
  Description of Artificial Sequence: Synthetic oligonucleotide
  Antisense strand to SEQ ID NO: 1305108
uuaaaucccgccgaggaac

SEQ ID NO: 1305110 - RNA, 19 nt, Artificial Sequence
  Description of Artificial Sequence: Synthetic oligonucleotide
  Sense strand starting at position 2503 of SEQ ID NO: 1241857
uauagaagauccuuuguag

SEQ ID NO: 1305111 - RNA, 19 nt, Artificial Sequence
  Description of Artificial Sequence: Synthetic oligonucleotide
  Antisense strand to SEQ ID NO: 1305110
cuacaaaggaucuucuaua

SEQ ID NO: 1305112 - RNA, 19 nt, Artificial Sequence
  Description of Artificial Sequence: Synthetic oligonucleotide
  Sense strand starting at position 2506 of SEQ ID NO: 1241857
agaagauccuuuguaggau

SEQ ID NO: 1305113 - RNA, 19 nt, Artificial Sequence
  Description of Artificial Sequence: Synthetic oligonucleotide
  Antisense strand to SEQ ID NO: 1305112
auccuacaaaggaucuucu

SEQ ID NO: 1305114 - RNA, 19 nt, Artificial Sequence
  Description of Artificial Sequence: Synthetic oligonucleotide
  Sense strand starting at position 2596 of SEQ ID NO: 1241857
uuagaagcuguccauuaug

SEQ ID NO: 1305115 - RNA, 19 nt, Artificial Sequence
  Description of Artificial Sequence: Synthetic oligonucleotide
  Antisense strand to SEQ ID NO: 1305114
cauaauggacagcuucuaa

SEQ ID NO: 1305116 - RNA, 19 nt, Artificial Sequence
  Description of Artificial Sequence: Synthetic oligonucleotide
  Sense strand starting at position 2636 of SEQ ID NO: 1241857
ggcugagucagguauccca

SEQ ID NO: 1305117 - RNA, 19 nt, Artificial Sequence
  Description of Artificial Sequence: Synthetic oligonucleotide
  Antisense strand to SEQ ID NO: 1305116
ugggauaccugacucagcc

SEQ ID NO: 1305118 - RNA, 19 nt, Artificial Sequence
  Description of Artificial Sequence: Synthetic oligonucleotide
  Sense strand starting at position 2643 of SEQ ID NO: 1241857
ucagguaucccagggaucu

SEQ ID NO: 1305119 - RNA, 19 nt, Artificial Sequence
  Description of Artificial Sequence: Synthetic oligonucleotide
  Antisense strand to SEQ ID NO: 1305118
agaucccugggauaccuga

SEQ ID NO: 1305120 - RNA, 19 nt, Artificial Sequence
  Description of Artificial Sequence: Synthetic oligonucleotide
  Sense strand starting at position 2692 of SEQ ID NO: 1241857
accaaagacgccuaaguuu

SEQ ID NO: 1305121 - RNA, 19 nt, Artificial Sequence
  Description of Artificial Sequence: Synthetic oligonucleotide
  Antisense strand to SEQ ID NO: 1305120
aaacuuaggcgucuuuggu

SEQ ID NO: 1305122 - RNA, 19 nt, Artificial Sequence
  Description of Artificial Sequence: Synthetic oligonucleotide
  Sense strand starting at position 2952 of SEQ ID NO: 1241857
uucuucugacccugggauu

SEQ ID NO: 1305123 - RNA, 19 nt, Artificial Sequence
  Description of Artificial Sequence: Synthetic oligonucleotide
  Antisense strand to SEQ ID NO: 1305122
aaucccagggucagaagaa

SEQ ID NO: 1305124 - RNA, 19 nt, Artificial Sequence
  Description of Artificial Sequence: Synthetic oligonucleotide
  Sense strand starting at position 2973 of SEQ ID NO: 1241857
ugaggaaucuuuguucuuu

SEQ ID NO: 1305125 - RNA, 19 nt, Artificial Sequence
  Description of Artificial Sequence: Synthetic oligonucleotide
  Antisense strand to SEQ ID NO: 1305124
aaagaacaaagauuccuca

SEQ ID NO: 1305126 - RNA, 19 nt, Artificial Sequence
  Description of Artificial Sequence: Synthetic oligonucleotide
  Sense strand starting at position 3119 of SEQ ID NO: 1241857
gcugucaauguuggaagaa

SEQ ID NO: 1305127 - RNA, 19 nt, Artificial Sequence
  Description of Artificial Sequence: Synthetic oligonucleotide
  Antisense strand to SEQ ID NO: 1305126
uucuuccaacauugacagc

SEQ ID NO: 1305128 - RNA, 19 nt, Artificial Sequence
  Description of Artificial Sequence: Synthetic oligonucleotide
  Sense strand starting at position 3882 of SEQ ID NO: 1241857
aaaguaugaugggccuaau

SEQ ID NO: 1305129 - RNA, 19 nt, Artificial Sequence
  Description of Artificial Sequence: Synthetic oligonucleotide
  Antisense strand to SEQ ID NO: 1305128
auuaggcccaucauacuuu

SEQ ID NO: 1305130 - RNA, 19 nt, Artificial Sequence
  Description of Artificial Sequence: Synthetic oligonucleotide
  Sense strand starting at position 3885 of SEQ ID NO: 1241857
guaugaugggccuaaugga

SEQ ID NO: 1305131 - RNA, 19 nt, Artificial Sequence
  Description of Artificial Sequence: Synthetic oligonucleotide
  Antisense strand to SEQ ID NO: 1305130
uccauuaggcccaucauac

SEQ ID NO: 1305132 - RNA, 19 nt, Artificial Sequence
  Description of Artificial Sequence: Synthetic oligonucleotide
  Sense strand starting at position 3892 of SEQ ID NO: 1241857
gggccuaauggaugaguca

SEQ ID NO: 1305133 - RNA, 19 nt, Artificial Sequence
  Description of Artificial Sequence: Synthetic oligonucleotide
  Antisense strand to SEQ ID NO: 1305132
ugacucauccauuaggccc

SEQ ID NO: 1305134 - RNA, 19 nt, Artificial Sequence
  Description of Artificial Sequence: Synthetic oligonucleotide
  Sense strand starting at position 6 of SEQ ID NO: 1241858
ggaggaaccuugucaggcu

SEQ ID NO: 1305135 - RNA, 19 nt, Artificial Sequence
  Description of Artificial Sequence: Synthetic oligonucleotide
  Antisense strand to SEQ ID NO: 1305134
agccugacaagguuccucc

SEQ ID NO: 1305136 - RNA, 19 nt, Artificial Sequence
  Description of Artificial Sequence: Synthetic oligonucleotide
  Sense strand starting at position 76 of SEQ ID NO: 1241858
gaaccagagccucagucuu

SEQ ID NO: 1305137 - RNA, 19 nt, Artificial Sequence
  Description of Artificial Sequence: Synthetic oligonucleotide
  Antisense strand to SEQ ID NO: 1305136
aagacugaggcucugguuc

SEQ ID NO: 1305138 - RNA, 19 nt, Artificial Sequence
  Description of Artificial Sequence: Synthetic oligonucleotide
  Sense strand starting at position 176 of SEQ ID NO: 1241858
guaagcuauuaagugauua

SEQ ID NO: 1305139 - RNA, 19 nt, Artificial Sequence
  Description of Artificial Sequence: Synthetic oligonucleotide
  Antisense strand to SEQ ID NO: 1305138
uaaucacuuaauagcuuac

SEQ ID NO: 1305140 - RNA, 19 nt, Artificial Sequence
  Description of Artificial Sequence: Synthetic oligonucleotide
  Sense strand starting at position 180 of SEQ ID NO: 1241858
gcuauuaagugauuacuaa

SEQ ID NO: 1305141 - RNA, 19 nt, Artificial Sequence
  Description of Artificial Sequence: Synthetic oligonucleotide
  Antisense strand to SEQ ID NO: 1305140
uuaguaaucacuuaauagc

SEQ ID NO: 1305142 - RNA, 19 nt, Artificial Sequence
  Description of Artificial Sequence: Synthetic oligonucleotide
  Sense strand starting at position 231 of SEQ ID NO: 1241858
augugaggguagguaucua

SEQ ID NO: 1305143 - RNA, 19 nt, Artificial Sequence
  Description of Artificial Sequence: Synthetic oligonucleotide
  Antisense strand to SEQ ID NO: 1305142
uagauaccuacccucacau

SEQ ID NO: 1305144 - RNA, 19 nt, Artificial Sequence
  Description of Artificial Sequence: Synthetic oligonucleotide
  Sense strand starting at position 235 of SEQ ID NO: 1241858
gaggguagguaucuaagcu

SEQ ID NO: 1305145 - RNA, 19 nt, Artificial Sequence
  Description of Artificial Sequence: Synthetic oligonucleotide
  Antisense strand to SEQ ID NO: 1305144
agcuuagauaccuacccuc

SEQ ID NO: 1305146 - RNA, 19 nt, Artificial Sequence
  Description of Artificial Sequence: Synthetic oligonucleotide
  Sense strand starting at position 243 of SEQ ID NO: 1241858
guaucuaagcugcaauaaa

SEQ ID NO: 1305147 - RNA, 19 nt, Artificial Sequence
  Description of Artificial Sequence: Synthetic oligonucleotide
  Antisense strand to SEQ ID NO: 1305146
uuuauugcagcuuagauac

SEQ ID NO: 1305148 - RNA, 19 nt, Artificial Sequence
  Description of Artificial Sequence: Synthetic oligonucleotide
  Sense strand starting at position 315 of SEQ ID NO: 1241858
auauccagguggucauuaa

SEQ ID NO: 1305149 - RNA, 19 nt, Artificial Sequence
  Description of Artificial Sequence: Synthetic oligonucleotide
  Antisense strand to SEQ ID NO: 1305148
uuaaugaccaccuggauau

SEQ ID NO: 1305150 - RNA, 19 nt, Artificial Sequence
  Description of Artificial Sequence: Synthetic oligonucleotide
  Sense strand starting at position 324 of SEQ ID NO: 1241858
uggucauuaacccgaggaa

SEQ ID NO: 1305151 - RNA, 19 nt, Artificial Sequence
  Description of Artificial Sequence: Synthetic oligonucleotide
  Antisense strand to SEQ ID NO: 1305150
uuccucggguuaaugacca

SEQ ID NO: 1305152 - RNA, 19 nt, Artificial Sequence
  Description of Artificial Sequence: Synthetic oligonucleotide
  Sense strand starting at position 327 of SEQ ID NO: 1241858
ucauuaacccgaggaaaug

SEQ ID NO: 1305153 - RNA, 19 nt, Artificial Sequence
  Description of Artificial Sequence: Synthetic oligonucleotide
  Antisense strand to SEQ ID NO: 1305152
cauuuccucggguuaauga

SEQ ID NO: 1305154 - RNA, 19 nt, Artificial Sequence
  Description of Artificial Sequence: Synthetic oligonucleotide
  Sense strand starting at position 333 of SEQ ID NO: 1241858
acccgaggaaaugguuauu

SEQ ID NO: 1305155 - RNA, 19 nt, Artificial Sequence
  Description of Artificial Sequence: Synthetic oligonucleotide
  Antisense strand to SEQ ID NO: 1305154
aauaaccauuuccucgggu

SEQ ID NO: 1305156 - RNA, 19 nt, Artificial Sequence
  Description of Artificial Sequence: Synthetic oligonucleotide
  Sense strand starting at position 343 of SEQ ID NO: 1241858
augguuauuacugagaggu

SEQ ID NO: 1305157 - RNA, 19 nt, Artificial Sequence
  Description of Artificial Sequence: Synthetic oligonucleotide
  Antisense strand to SEQ ID NO: 1305156
accucucaguaauaaccau

SEQ ID NO: 1305158 - RNA, 19 nt, Artificial Sequence
  Description of Artificial Sequence: Synthetic oligonucleotide
  Sense strand starting at position 373 of SEQ ID NO: 1241858
aacucagaagucugagacu

SEQ ID NO: 1305159 - RNA, 19 nt, Artificial Sequence
  Description of Artificial Sequence: Synthetic oligonucleotide
  Antisense strand to SEQ ID NO: 1305158
agucucagacuucugaguu

SEQ ID NO: 1305160 - RNA, 19 nt, Artificial Sequence
  Description of Artificial Sequence: Synthetic oligonucleotide
  Sense strand starting at position 382 of SEQ ID NO: 1241858
gucugagacuaguccaaga

SEQ ID NO: 1305161 - RNA, 19 nt, Artificial Sequence
  Description of Artificial Sequence: Synthetic oligonucleotide
  Antisense strand to SEQ ID NO: 1305160
ucuuggacuagucucagac

SEQ ID NO: 1305162 - RNA, 19 nt, Artificial Sequence
  Description of Artificial Sequence: Synthetic oligonucleotide
  Sense strand starting at position 532 of SEQ ID NO: 1241858
guggaauagggaugggagu

SEQ ID NO: 1305163 - RNA, 19 nt, Artificial Sequence
  Description of Artificial Sequence: Synthetic oligonucleotide
  Antisense strand to SEQ ID NO: 1305162
acucccaucccuauuccac

SEQ ID NO: 1305164 - RNA, 19 nt, Artificial Sequence
  Description of Artificial Sequence: Synthetic oligonucleotide
  Sense strand starting at position 569 of SEQ ID NO: 1241858
cuagcuggucucuauccaa

SEQ ID NO: 1305165 - RNA, 19 nt, Artificial Sequence
  Description of Artificial Sequence: Synthetic oligonucleotide
  Antisense strand to SEQ ID NO: 1305164
uuggauagagaccagcuag

SEQ ID NO: 1305166 - RNA, 19 nt, Artificial Sequence
  Description of Artificial Sequence: Synthetic oligonucleotide
  Sense strand starting at position 653 of SEQ ID NO: 1241858
ggugcacaacgugaugauu

SEQ ID NO: 1305167 - RNA, 19 nt, Artificial Sequence
  Description of Artificial Sequence: Synthetic oligonucleotide
  Antisense strand to SEQ ID NO: 1305166
aaucaucacguugugcacc

SEQ ID NO: 1305168 - RNA, 19 nt, Artificial Sequence
  Description of Artificial Sequence: Synthetic oligonucleotide
  Sense strand starting at position 770 of SEQ ID NO: 1241858
gaaaguuuguaccuuugau

SEQ ID NO: 1305169 - RNA, 19 nt, Artificial Sequence
  Description of Artificial Sequence: Synthetic oligonucleotide
  Antisense strand to SEQ ID NO: 1305168
aucaaagguacaaacuuuc

SEQ ID NO: 1305170 - RNA, 19 nt, Artificial Sequence
  Description of Artificial Sequence: Synthetic oligonucleotide
  Sense strand starting at position 1035 of SEQ ID NO: 1241858
ccauuaggcuggucucaaa

SEQ ID NO: 1305171 - RNA, 19 nt, Artificial Sequence
  Description of Artificial Sequence: Synthetic oligonucleotide
  Antisense strand to SEQ ID NO: 1305170
uuugagaccagccuaaugg

SEQ ID NO: 1305172 - RNA, 19 nt, Artificial Sequence
  Description of Artificial Sequence: Synthetic oligonucleotide
  Sense strand starting at position 1128 of SEQ ID NO: 1241858
gucuguucugccguuucua

SEQ ID NO: 1305173 - RNA, 19 nt, Artificial Sequence
  Description of Artificial Sequence: Synthetic oligonucleotide
  Antisense strand to SEQ ID NO: 1305172
uagaaacggcagaacagac

SEQ ID NO: 1305174 - RNA, 19 nt, Artificial Sequence
  Description of Artificial Sequence: Synthetic oligonucleotide
  Sense strand starting at position 1129 of SEQ ID NO: 1241858
ucuguucugccguuucuau

SEQ ID NO: 1305175 - RNA, 19 nt, Artificial Sequence
  Description of Artificial Sequence: Synthetic oligonucleotide
  Antisense strand to SEQ ID NO: 1305174
auagaaacggcagaacaga

SEQ ID NO: 1305176 - RNA, 19 nt, Artificial Sequence
  Description of Artificial Sequence: Synthetic oligonucleotide
  Sense strand starting at position 1543 of SEQ ID NO: 1241858
gcuuuaagccgaucugugu

SEQ ID NO: 1305177 - RNA, 19 nt, Artificial Sequence
  Description of Artificial Sequence: Synthetic oligonucleotide
  Antisense strand to SEQ ID NO: 1305176
acacagaucggcuuaaagc

SEQ ID NO: 1305178 - RNA, 19 nt, Artificial Sequence
  Description of Artificial Sequence: Synthetic oligonucleotide
  Sense strand starting at position 1984 of SEQ ID NO: 1241858
guuccucggcgggauuuaa

SEQ ID NO: 1305179 - RNA, 19 nt, Artificial Sequence
  Description of Artificial Sequence: Synthetic oligonucleotide
  Antisense strand to SEQ ID NO: 1305178
uuaaaucccgccgaggaac

SEQ ID NO: 1305180 - RNA, 19 nt, Artificial Sequence
  Description of Artificial Sequence: Synthetic oligonucleotide
  Sense strand starting at position 2200 of SEQ ID NO: 1241858
uauagaagauccuuuguag

SEQ ID NO: 1305181 - RNA, 19 nt, Artificial Sequence
  Description of Artificial Sequence: Synthetic oligonucleotide
  Antisense strand to SEQ ID NO: 1305180
cuacaaaggaucuucuaua

SEQ ID NO: 1305182 - RNA, 19 nt, Artificial Sequence
  Description of Artificial Sequence: Synthetic oligonucleotide
  Sense strand starting at position 2203 of SEQ ID NO: 1241858
agaagauccuuuguaggau

SEQ ID NO: 1305183 - RNA, 19 nt, Artificial Sequence
  Description of Artificial Sequence: Synthetic oligonucleotide
  Antisense strand to SEQ ID NO: 1305182
auccuacaaaggaucuucu

SEQ ID NO: 1305184 - RNA, 19 nt, Artificial Sequence
  Description of Artificial Sequence: Synthetic oligonucleotide
  Sense strand starting at position 2292 of SEQ ID NO: 1241858
cuuagaagcuguccauuau

SEQ ID NO: 1305185 - RNA, 19 nt, Artificial Sequence
  Description of Artificial Sequence: Synthetic oligonucleotide
  Antisense strand to SEQ ID NO: 1305184
auaauggacagcuucuaag

SEQ ID NO: 1305186 - RNA, 19 nt, Artificial Sequence
  Description of Artificial Sequence: Synthetic oligonucleotide
  Sense strand starting at position 2293 of SEQ ID NO: 1241858
uuagaagcuguccauuaug

SEQ ID NO: 1305187 - RNA, 19 nt, Artificial Sequence
  Description of Artificial Sequence: Synthetic oligonucleotide
  Antisense strand to SEQ ID NO: 1305186
cauaauggacagcuucuaa

SEQ ID NO: 1305188 - RNA, 19 nt, Artificial Sequence
  Description of Artificial Sequence: Synthetic oligonucleotide
  Sense strand starting at position 2333 of SEQ ID NO: 1241858
ggcugagucagguauccca

SEQ ID NO: 1305189 - RNA, 19 nt, Artificial Sequence
  Description of Artificial Sequence: Synthetic oligonucleotide
  Antisense strand to SEQ ID NO: 1305188
ugggauaccugacucagcc

SEQ ID NO: 1305190 - RNA, 19 nt, Artificial Sequence
  Description of Artificial Sequence: Synthetic oligonucleotide
  Sense strand starting at position 2340 of SEQ ID NO: 1241858
ucagguaucccagggaucu

SEQ ID NO: 1305191 - RNA, 19 nt, Artificial Sequence
  Description of Artificial Sequence: Synthetic oligonucleotide
  Antisense strand to SEQ ID NO: 1305190
agaucccugggauaccuga

SEQ ID NO: 1305192 - RNA, 19 nt, Artificial Sequence
  Description of Artificial Sequence: Synthetic oligonucleotide
  Sense strand starting at position 2389 of SEQ ID NO: 1241858
accaaagacgccuaaguuu

SEQ ID NO: 1305193 - RNA, 19 nt, Artificial Sequence
  Description of Artificial Sequence: Synthetic oligonucleotide
  Antisense strand to SEQ ID NO: 1305192
aaacuuaggcgucuuuggu

SEQ ID NO: 1305194 - RNA, 19 nt, Artificial Sequence
  Description of Artificial Sequence: Synthetic oligonucleotide
  Sense strand starting at position 2649 of SEQ ID NO: 1241858
uucuucugacccugggauu

SEQ ID NO: 1305195 - RNA, 19 nt, Artificial Sequence
  Description of Artificial Sequence: Synthetic oligonucleotide
  Antisense strand to SEQ ID NO: 1305194
aaucccagggucagaagaa

SEQ ID NO: 1305196 - RNA, 19 nt, Artificial Sequence
  Description of Artificial Sequence: Synthetic oligonucleotide
  Sense strand starting at position 2670 of SEQ ID NO: 1241858
ugaggaaucuuuguucuuu

SEQ ID NO: 1305197 - RNA, 19 nt, Artificial Sequence
  Description of Artificial Sequence: Synthetic oligonucleotide
  Antisense strand to SEQ ID NO: 1305196
aaagaacaaagauuccuca

SEQ ID NO: 1305198 - RNA, 19 nt, Artificial Sequence
  Description of Artificial Sequence: Synthetic oligonucleotide
  Sense strand starting at position 2816 of SEQ ID NO: 1241858
gcugucaauguuggaagaa

SEQ ID NO: 1305199 - RNA, 19 nt, Artificial Sequence
  Description of Artificial Sequence: Synthetic oligonucleotide
  Antisense strand to SEQ ID NO: 1305198
uucuuccaacauugacagc

SEQ ID NO: 1305200 - RNA, 19 nt, Artificial Sequence
  Description of Artificial Sequence: Synthetic oligonucleotide
  Sense strand starting at position 3579 of SEQ ID NO: 1241858
aaaguaugaugggccuaau

SEQ ID NO: 1305201 - RNA, 19 nt, Artificial Sequence
  Description of Artificial Sequence: Synthetic oligonucleotide
  Antisense strand to SEQ ID NO: 1305200
auuaggcccaucauacuuu

SEQ ID NO: 1305202 - RNA, 19 nt, Artificial Sequence
  Description of Artificial Sequence: Synthetic oligonucleotide
  Sense strand starting at position 3582 of SEQ ID NO: 1241858
guaugaugggccuaaugga

SEQ ID NO: 1305203 - RNA, 19 nt, Artificial Sequence
  Description of Artificial Sequence: Synthetic oligonucleotide
  Antisense strand to SEQ ID NO: 1305202
uccauuaggcccaucauac

SEQ ID NO: 1305204 - RNA, 19 nt, Artificial Sequence
  Description of Artificial Sequence: Synthetic oligonucleotide
  Sense strand starting at position 3589 of SEQ ID NO: 1241858
gggccuaauggaugaguca

SEQ ID NO: 1305205 - RNA, 19 nt, Artificial Sequence
  Description of Artificial Sequence: Synthetic oligonucleotide
  Antisense strand to SEQ ID NO: 1305204
ugacucauccauuaggccc

SEQ ID NO: 1305206 - RNA, 19 nt, Artificial Sequence
  Description of Artificial Sequence: Synthetic oligonucleotide
  Sense strand starting at position 3862 of SEQ ID NO: 1241858
uuucgauucuaacugauua

SEQ ID NO: 1305207 - RNA, 19 nt, Artificial Sequence
  Description of Artificial Sequence: Synthetic oligonucleotide
  Antisense strand to SEQ ID NO: 1305206
uaaucaguuagaaucgaaa

SEQ ID NO: 1305208 - RNA, 19 nt, Artificial Sequence
  Description of Artificial Sequence: Synthetic oligonucleotide
  Sense strand starting at position 3931 of SEQ ID NO: 1241858
uuaagugcucaauagcaac

SEQ ID NO: 1305209 - RNA, 19 nt, Artificial Sequence
  Description of Artificial Sequence: Synthetic oligonucleotide
  Antisense strand to SEQ ID NO: 1305208
guugcuauugagcacuuaa

SEQ ID NO: 1305210 - RNA, 19 nt, Artificial Sequence
  Description of Artificial Sequence: Synthetic oligonucleotide
  Sense strand starting at position 3952 of SEQ ID NO: 1241858
guguuuagcgacuacaaga

SEQ ID NO: 1305211 - RNA, 19 nt, Artificial Sequence
  Description of Artificial Sequence: Synthetic oligonucleotide
  Antisense strand to SEQ ID NO: 1305210
ucuuguagucgcuaaacac

SEQ ID NO: 1305212 - RNA, 19 nt, Artificial Sequence
  Description of Artificial Sequence: Synthetic oligonucleotide
  Sense strand starting at position 3981 of SEQ ID NO: 1241858
uucuuuguugcagaaaguu

SEQ ID NO: 1305213 - RNA, 19 nt, Artificial Sequence
  Description of Artificial Sequence: Synthetic oligonucleotide
  Antisense strand to SEQ ID NO: 1305212
aacuuucugcaacaaagaa

SEQ ID NO: 1305214 - RNA, 19 nt, Artificial Sequence
  Description of Artificial Sequence: Synthetic oligonucleotide
  Sense strand starting at position 25 of SEQ ID NO: 1241859
aggucaucgaacugaucuu

SEQ ID NO: 1305215 - RNA, 19 nt, Artificial Sequence
  Description of Artificial Sequence: Synthetic oligonucleotide
  Antisense strand to SEQ ID NO: 1305214
aagaucaguucgaugaccu

SEQ ID NO: 1305216 - RNA, 19 nt, Artificial Sequence
  Description of Artificial Sequence: Synthetic oligonucleotide
  Sense strand starting at position 31 of SEQ ID NO: 1241859
ucgaacugaucuuccaaau

SEQ ID NO: 1305217 - RNA, 19 nt, Artificial Sequence
  Description of Artificial Sequence: Synthetic oligonucleotide
  Antisense strand to SEQ ID NO: 1305216
auuuggaagaucaguucga

SEQ ID NO: 1305218 - RNA, 19 nt, Artificial Sequence
  Description of Artificial Sequence: Synthetic oligonucleotide
  Sense strand starting at position 83 of SEQ ID NO: 1241859
agaagugacugugcacauu

SEQ ID NO: 1305219 - RNA, 19 nt, Artificial Sequence
  Description of Artificial Sequence: Synthetic oligonucleotide
  Antisense strand to SEQ ID NO: 1305218
aaugugcacagucacuucu

SEQ ID NO: 1305220 - RNA, 19 nt, Artificial Sequence
  Description of Artificial Sequence: Synthetic oligonucleotide
  Sense strand starting at position 157 of SEQ ID NO: 1241859
uccucaauuuaagaaggaa

SEQ ID NO: 1305221 - RNA, 19 nt, Artificial Sequence
  Description of Artificial Sequence: Synthetic oligonucleotide
  Antisense strand to SEQ ID NO: 1305220
uuccuucuuaaauugagga

SEQ ID NO: 1305222 - RNA, 19 nt, Artificial Sequence
  Description of Artificial Sequence: Synthetic oligonucleotide
  Sense strand starting at position 239 of SEQ ID NO: 1241859
auguuuaauguagacaauc

SEQ ID NO: 1305223 - RNA, 19 nt, Artificial Sequence
  Description of Artificial Sequence: Synthetic oligonucleotide
  Antisense strand to SEQ ID NO: 1305222
gauugucuacauuaaacau

SEQ ID NO: 1305224 - RNA, 19 nt, Artificial Sequence
  Description of Artificial Sequence: Synthetic oligonucleotide
  Sense strand starting at position 405 of SEQ ID NO: 1241859
uacugugcaccagaaguua

SEQ ID NO: 1305225 - RNA, 19 nt, Artificial Sequence
  Description of Artificial Sequence: Synthetic oligonucleotide
  Antisense strand to SEQ ID NO: 1305224
uaacuucuggugcacagua

SEQ ID NO: 1305226 - RNA, 19 nt, Artificial Sequence
  Description of Artificial Sequence: Synthetic oligonucleotide
  Sense strand starting at position 419 of SEQ ID NO: 1241859
aguuaaugcuaaguuugau

SEQ ID NO: 1305227 - RNA, 19 nt, Artificial Sequence
  Description of Artificial Sequence: Synthetic oligonucleotide
  Antisense strand to SEQ ID NO: 1305226
aucaaacuuagcauuaacu

SEQ ID NO: 1305228 - RNA, 19 nt, Artificial Sequence
  Description of Artificial Sequence: Synthetic oligonucleotide
  Sense strand starting at position 435 of SEQ ID NO: 1241859
gauguaaguguuuaaggca

SEQ ID NO: 1305229 - RNA, 19 nt, Artificial Sequence
  Description of Artificial Sequence: Synthetic oligonucleotide
  Antisense strand to SEQ ID NO: 1305228
ugccuuaaacacuuacauc

SEQ ID NO: 1305230 - RNA, 19 nt, Artificial Sequence
  Description of Artificial Sequence: Synthetic oligonucleotide
  Sense strand starting at position 527 of SEQ ID NO: 1241859
uuacaauaagcaggugaua

SEQ ID NO: 1305231 - RNA, 19 nt, Artificial Sequence
  Description of Artificial Sequence: Synthetic oligonucleotide
  Antisense strand to SEQ ID NO: 1305230
uaucaccugcuuauuguaa

SEQ ID NO: 1305232 - RNA, 19 nt, Artificial Sequence
  Description of Artificial Sequence: Synthetic oligonucleotide
  Sense strand starting at position 609 of SEQ ID NO: 1241859
uuugguaaugcguaaauau

SEQ ID NO: 1305233 - RNA, 19 nt, Artificial Sequence
  Description of Artificial Sequence: Synthetic oligonucleotide
  Antisense strand to SEQ ID NO: 1305232
auauuuacgcauuaccaaa

SEQ ID NO: 1305234 - RNA, 19 nt, Artificial Sequence
  Description of Artificial Sequence: Synthetic oligonucleotide
  Sense strand starting at position 674 of SEQ ID NO: 1241859
uuaccuaugcuauauguuu

SEQ ID NO: 1305235 - RNA, 19 nt, Artificial Sequence
  Description of Artificial Sequence: Synthetic oligonucleotide
  Antisense strand to SEQ ID NO: 1305234
aaacauauagcauagguaa

SEQ ID NO: 1305236 - RNA, 19 nt, Artificial Sequence
  Description of Artificial Sequence: Synthetic oligonucleotide
  Sense strand starting at position 819 of SEQ ID NO: 1241859
gugcaacauuaagcagaaa

SEQ ID NO: 1305237 - RNA, 19 nt, Artificial Sequence
  Description of Artificial Sequence: Synthetic oligonucleotide
  Antisense strand to SEQ ID NO: 1305236
uuucugcuuaauguugcac

SEQ ID NO: 1305238 - RNA, 19 nt, Artificial Sequence
  Description of Artificial Sequence: Synthetic oligonucleotide
  Sense strand starting at position 867 of SEQ ID NO: 1241859
aucguauuuaacggcaaca

SEQ ID NO: 1305239 - RNA, 19 nt, Artificial Sequence
  Description of Artificial Sequence: Synthetic oligonucleotide
  Antisense strand to SEQ ID NO: 1305238
uguugccguuaaauacgau

SEQ ID NO: 1305240 - RNA, 19 nt, Artificial Sequence
  Description of Artificial Sequence: Synthetic oligonucleotide
  Sense strand starting at position 1318 of SEQ ID NO: 1241859
ggccuuuacaggugaagac

SEQ ID NO: 1305241 - RNA, 19 nt, Artificial Sequence
  Description of Artificial Sequence: Synthetic oligonucleotide
  Antisense strand to SEQ ID NO: 1305240
gucuucaccuguaaaggcc

SEQ ID NO: 1305242 - RNA, 19 nt, Artificial Sequence
  Description of Artificial Sequence: Synthetic oligonucleotide
  Sense strand starting at position 1319 of SEQ ID NO: 1241859
gccuuuacaggugaagaca

SEQ ID NO: 1305243 - RNA, 19 nt, Artificial Sequence
  Description of Artificial Sequence: Synthetic oligonucleotide
  Antisense strand to SEQ ID NO: 1305242
ugucuucaccuguaaaggc

SEQ ID NO: 1305244 - RNA, 19 nt, Artificial Sequence
  Description of Artificial Sequence: Synthetic oligonucleotide
  Sense strand starting at position 1344 of SEQ ID NO: 1241859
gccggacuuuacucacuga

SEQ ID NO: 1305245 - RNA, 19 nt, Artificial Sequence
  Description of Artificial Sequence: Synthetic oligonucleotide
  Antisense strand to SEQ ID NO: 1305244
ucagugaguaaaguccggc

SEQ ID NO: 1305246 - RNA, 19 nt, Artificial Sequence
  Description of Artificial Sequence: Synthetic oligonucleotide
  Sense strand starting at position 1373 of SEQ ID NO: 1241859
aaggguuggcccugaaaug

SEQ ID NO: 1305247 - RNA, 19 nt, Artificial Sequence
  Description of Artificial Sequence: Synthetic oligonucleotide
  Antisense strand to SEQ ID NO: 1305246
cauuucagggccaacccuu

SEQ ID NO: 1305248 - RNA, 19 nt, Artificial Sequence
  Description of Artificial Sequence: Synthetic oligonucleotide
  Sense strand starting at position 1467 of SEQ ID NO: 1241859
guuggagaguucuucaaag

SEQ ID NO: 1305249 - RNA, 19 nt, Artificial Sequence
  Description of Artificial Sequence: Synthetic oligonucleotide
  Antisense strand to SEQ ID NO: 1305248
cuuugaagaacucuccaac

SEQ ID NO: 1305250 - RNA, 19 nt, Artificial Sequence
  Description of Artificial Sequence: Synthetic oligonucleotide
  Sense strand starting at position 1557 of SEQ ID NO: 1241859
cugggcucucgcguaaaua

SEQ ID NO: 1305251 - RNA, 19 nt, Artificial Sequence
  Description of Artificial Sequence: Synthetic oligonucleotide
  Antisense strand to SEQ ID NO: 1305250
uauuuacgcgagagcccag

SEQ ID NO: 1305252 - RNA, 19 nt, Artificial Sequence
  Description of Artificial Sequence: Synthetic oligonucleotide
  Sense strand starting at position 1568 of SEQ ID NO: 1241859
cguaaauauaagugacuga

SEQ ID NO: 1305253 - RNA, 19 nt, Artificial Sequence
  Description of Artificial Sequence: Synthetic oligonucleotide
  Antisense strand to SEQ ID NO: 1305252
ucagucacuuauauuuacg

SEQ ID NO: 1305254 - RNA, 19 nt, Artificial Sequence
  Description of Artificial Sequence: Synthetic oligonucleotide
  Sense strand starting at position 1860 of SEQ ID NO: 1241859
gggacuuccgcagacauag

SEQ ID NO: 1305255 - RNA, 19 nt, Artificial Sequence
  Description of Artificial Sequence: Synthetic oligonucleotide
  Antisense strand to SEQ ID NO: 1305254
cuaugucugcggaaguccc

SEQ ID NO: 1305256 - RNA, 19 nt, Artificial Sequence
  Description of Artificial Sequence: Synthetic oligonucleotide
  Sense strand starting at position 2117 of SEQ ID NO: 1241859
gcucgcugucguccaaaca

SEQ ID NO: 1305257 - RNA, 19 nt, Artificial Sequence
  Description of Artificial Sequence: Synthetic oligonucleotide
  Antisense strand to SEQ ID NO: 1305256
uguuuggacgacagcgagc

SEQ ID NO: 1305258 - RNA, 19 nt, Artificial Sequence
  Description of Artificial Sequence: Synthetic oligonucleotide
  Sense strand starting at position 2214 of SEQ ID NO: 1241859
uguaguuucuaaguggaac

SEQ ID NO: 1305259 - RNA, 19 nt, Artificial Sequence
  Description of Artificial Sequence: Synthetic oligonucleotide
  Antisense strand to SEQ ID NO: 1305258
guuccacuuagaaacuaca

SEQ ID NO: 1305260 - RNA, 19 nt, Artificial Sequence
  Description of Artificial Sequence: Synthetic oligonucleotide
  Sense strand starting at position 2474 of SEQ ID NO: 1241859
ccucuuaaaggcugucaca

SEQ ID NO: 1305261 - RNA, 19 nt, Artificial Sequence
  Description of Artificial Sequence: Synthetic oligonucleotide
  Antisense strand to SEQ ID NO: 1305260
ugugacagccuuuaagagg

SEQ ID NO: 1305262 - RNA, 19 nt, Artificial Sequence
  Description of Artificial Sequence: Synthetic oligonucleotide
  Sense strand starting at position 2496 of SEQ ID NO: 1241859
cuguacaguuccucaacaa

SEQ ID NO: 1305263 - RNA, 19 nt, Artificial Sequence
  Description of Artificial Sequence: Synthetic oligonucleotide
  Antisense strand to SEQ ID NO: 1305262
uuguugaggaacuguacag

SEQ ID NO: 1305264 - RNA, 19 nt, Artificial Sequence
  Description of Artificial Sequence: Synthetic oligonucleotide
  Sense strand starting at position 2532 of SEQ ID NO: 1241859
cacaauugucgugacuuua

SEQ ID NO: 1305265 - RNA, 19 nt, Artificial Sequence
  Description of Artificial Sequence: Synthetic oligonucleotide
  Antisense strand to SEQ ID NO: 1305264
uaaagucacgacaauugug

SEQ ID NO: 1305266 - RNA, 19 nt, Artificial Sequence
  Description of Artificial Sequence: Synthetic oligonucleotide
  Sense strand starting at position 2589 of SEQ ID NO: 1241859
ggaucucgucuguaauuac

SEQ ID NO: 1305267 - RNA, 19 nt, Artificial Sequence
  Description of Artificial Sequence: Synthetic oligonucleotide
  Antisense strand to SEQ ID NO: 1305266
guaauuacagacgagaucc

SEQ ID NO: 1305268 - RNA, 19 nt, Artificial Sequence
  Description of Artificial Sequence: Synthetic oligonucleotide
  Sense strand starting at position 2634 of SEQ ID NO: 1241859
cuuccuagauaucuaacga

SEQ ID NO: 1305269 - RNA, 19 nt, Artificial Sequence
  Description of Artificial Sequence: Synthetic oligonucleotide
  Antisense strand to SEQ ID NO: 1305268
ucguuagauaucuaggaag

SEQ ID NO: 1305270 - RNA, 19 nt, Artificial Sequence
  Description of Artificial Sequence: Synthetic oligonucleotide
  Sense strand starting at position 2837 of SEQ ID NO: 1241859
cucagaaacuuggaaauaa

SEQ ID NO: 1305271 - RNA, 19 nt, Artificial Sequence
  Description of Artificial Sequence: Synthetic oligonucleotide
  Antisense strand to SEQ ID NO: 1305270
uuauuuccaaguuucugag

SEQ ID NO: 1305272 - RNA, 19 nt, Artificial Sequence
  Description of Artificial Sequence: Synthetic oligonucleotide
  Sense strand starting at position 2934 of SEQ ID NO: 1241859
acccuaaaugccuggauaa

SEQ ID NO: 1305273 - RNA, 19 nt, Artificial Sequence
  Description of Artificial Sequence: Synthetic oligonucleotide
  Antisense strand to SEQ ID NO: 1305272
uuauccaggcauuuagggu

SEQ ID NO: 1305274 - RNA, 19 nt, Artificial Sequence
  Description of Artificial Sequence: Synthetic oligonucleotide
  Sense strand starting at position 2935 of SEQ ID NO: 1241859
cccuaaaugccuggauaag

SEQ ID NO: 1305275 - RNA, 19 nt, Artificial Sequence
  Description of Artificial Sequence: Synthetic oligonucleotide
  Antisense strand to SEQ ID NO: 1305274
cuuauccaggcauuuaggg

SEQ ID NO: 1305276 - RNA, 19 nt, Artificial Sequence
  Description of Artificial Sequence: Synthetic oligonucleotide
  Sense strand starting at position 2957 of SEQ ID NO: 1241859
uuuggaaaccaucgaaacu

SEQ ID NO: 1305277 - RNA, 19 nt, Artificial Sequence
  Description of Artificial Sequence: Synthetic oligonucleotide
  Antisense strand to SEQ ID NO: 1305276
aguuucgaugguuuccaaa

SEQ ID NO: 1305278 - RNA, 19 nt, Artificial Sequence
  Description of Artificial Sequence: Synthetic oligonucleotide
  Sense strand starting at position 3002 of SEQ ID NO: 1241859
gaagaauugcacuggaauu

SEQ ID NO: 1305279 - RNA, 19 nt, Artificial Sequence
  Description of Artificial Sequence: Synthetic oligonucleotide
  Antisense strand to SEQ ID NO: 1305278
aauuccagugcaauucuuc

SEQ ID NO: 1305280 - RNA, 19 nt, Artificial Sequence
  Description of Artificial Sequence: Synthetic oligonucleotide
  Sense strand starting at position 3121 of SEQ ID NO: 1241859
aggccaacuguuugacaaa

SEQ ID NO: 1305281 - RNA, 19 nt, Artificial Sequence
  Description of Artificial Sequence: Synthetic oligonucleotide
  Antisense strand to SEQ ID NO: 1305280
uuugucaaacaguuggccu

SEQ ID NO: 1305282 - RNA, 19 nt, Artificial Sequence
  Description of Artificial Sequence: Synthetic oligonucleotide
  Sense strand starting at position 3181 of SEQ ID NO: 1241859
cuguaagauccacgacaua

SEQ ID NO: 1305283 - RNA, 19 nt, Artificial Sequence
  Description of Artificial Sequence: Synthetic oligonucleotide
  Antisense strand to SEQ ID NO: 1305282
uaugucguggaucuuacag

SEQ ID NO: 1305284 - RNA, 19 nt, Artificial Sequence
  Description of Artificial Sequence: Synthetic oligonucleotide
  Sense strand starting at position 3193 of SEQ ID NO: 1241859
cgacauauuuguucuccuu

SEQ ID NO: 1305285 - RNA, 19 nt, Artificial Sequence
  Description of Artificial Sequence: Synthetic oligonucleotide
  Antisense strand to SEQ ID NO: 1305284
aaggagaacaaauaugucg

SEQ ID NO: 1305286 - RNA, 19 nt, Artificial Sequence
  Description of Artificial Sequence: Synthetic oligonucleotide
  Sense strand starting at position 3325 of SEQ ID NO: 1241859
uaauaaauugacugacguu

SEQ ID NO: 1305287 - RNA, 19 nt, Artificial Sequence
  Description of Artificial Sequence: Synthetic oligonucleotide
  Antisense strand to SEQ ID NO: 1305286
aacgucagucaauuuauua

SEQ ID NO: 1305288 - RNA, 19 nt, Artificial Sequence
  Description of Artificial Sequence: Synthetic oligonucleotide
  Sense strand starting at position 3343 of SEQ ID NO: 1241859
ucuaguauauguccuauau

SEQ ID NO: 1305289 - RNA, 19 nt, Artificial Sequence
  Description of Artificial Sequence: Synthetic oligonucleotide
  Antisense strand to SEQ ID NO: 1305288
auauaggacauauacuaga

SEQ ID NO: 1305290 - RNA, 19 nt, Artificial Sequence
  Description of Artificial Sequence: Synthetic oligonucleotide
  Sense strand starting at position 3347 of SEQ ID NO: 1241859
guauauguccuauaucaau

SEQ ID NO: 1305291 - RNA, 19 nt, Artificial Sequence
  Description of Artificial Sequence: Synthetic oligonucleotide
  Antisense strand to SEQ ID NO: 1305290
auugauauaggacauauac

SEQ ID NO: 1305292 - RNA, 19 nt, Artificial Sequence
  Description of Artificial Sequence: Synthetic oligonucleotide
  Sense strand starting at position 3966 of SEQ ID NO: 1241859
ggcagacuuuggucaaaug

SEQ ID NO: 1305293 - RNA, 19 nt, Artificial Sequence
  Description of Artificial Sequence: Synthetic oligonucleotide
  Antisense strand to SEQ ID NO: 1305292
cauuugaccaaagucugcc

SEQ ID NO: 1305294 - RNA, 19 nt, Artificial Sequence
  Description of Artificial Sequence: Synthetic oligonucleotide
  Sense strand starting at position 53 of SEQ ID NO: 1241860
guuccacauguguauauau

SEQ ID NO: 1305295 - RNA, 19 nt, Artificial Sequence
  Description of Artificial Sequence: Synthetic oligonucleotide
  Antisense strand to SEQ ID NO: 1305294
auauauacacauguggaac

SEQ ID NO: 1305296 - RNA, 19 nt, Artificial Sequence
  Description of Artificial Sequence: Synthetic oligonucleotide
  Sense strand starting at position 76 of SEQ ID NO: 1241860
gugugugacgaauaaacau

SEQ ID NO: 1305297 - RNA, 19 nt, Artificial Sequence
  Description of Artificial Sequence: Synthetic oligonucleotide
  Antisense strand to SEQ ID NO: 1305296
auguuuauucgucacacac

SEQ ID NO: 1305298 - RNA, 19 nt, Artificial Sequence
  Description of Artificial Sequence: Synthetic oligonucleotide
  Sense strand starting at position 87 of SEQ ID NO: 1241860
auaaacaucugacuuguga

SEQ ID NO: 1305299 - RNA, 19 nt, Artificial Sequence
  Description of Artificial Sequence: Synthetic oligonucleotide
  Antisense strand to SEQ ID NO: 1305298
ucacaagucagauguuuau

SEQ ID NO: 1305300 - RNA, 19 nt, Artificial Sequence
  Description of Artificial Sequence: Synthetic oligonucleotide
  Sense strand starting at position 199 of SEQ ID NO: 1241860
caguuauaggcccagagau

SEQ ID NO: 1305301 - RNA, 19 nt, Artificial Sequence
  Description of Artificial Sequence: Synthetic oligonucleotide
  Antisense strand to SEQ ID NO: 1305300
aucucugggccuauaacug

SEQ ID NO: 1305302 - RNA, 19 nt, Artificial Sequence
  Description of Artificial Sequence: Synthetic oligonucleotide
  Sense strand starting at position 201 of SEQ ID NO: 1241860
guuauaggcccagagauac

SEQ ID NO: 1305303 - RNA, 19 nt, Artificial Sequence
  Description of Artificial Sequence: Synthetic oligonucleotide
  Antisense strand to SEQ ID NO: 1305302
guaucucugggccuauaac

SEQ ID NO: 1305304 - RNA, 19 nt, Artificial Sequence
  Description of Artificial Sequence: Synthetic oligonucleotide
  Sense strand starting at position 221 of SEQ ID NO: 1241860
guccaaaguccuggacaaa

SEQ ID NO: 1305305 - RNA, 19 nt, Artificial Sequence
  Description of Artificial Sequence: Synthetic oligonucleotide
  Antisense strand to SEQ ID NO: 1305304
uuuguccaggacuuuggac

SEQ ID NO: 1305306 - RNA, 19 nt, Artificial Sequence
  Description of Artificial Sequence: Synthetic oligonucleotide
  Sense strand starting at position 462 of SEQ ID NO: 1241860
aucacuuaccucgaggagu

SEQ ID NO: 1305307 - RNA, 19 nt, Artificial Sequence
  Description of Artificial Sequence: Synthetic oligonucleotide
  Antisense strand to SEQ ID NO: 1305306
acuccucgagguaagugau

SEQ ID NO: 1305308 - RNA, 19 nt, Artificial Sequence
  Description of Artificial Sequence: Synthetic oligonucleotide
  Sense strand starting at position 484 of SEQ ID NO: 1241860
cuguguccacaguaggaua

SEQ ID NO: 1305309 - RNA, 19 nt, Artificial Sequence
  Description of Artificial Sequence: Synthetic oligonucleotide
  Antisense strand to SEQ ID NO: 1305308
uauccuacuguggacacag

SEQ ID NO: 1305310 - RNA, 19 nt, Artificial Sequence
  Description of Artificial Sequence: Synthetic oligonucleotide
  Sense strand starting at position 559 of SEQ ID NO: 1241860
gcguuuacucuucaaggag

SEQ ID NO: 1305311 - RNA, 19 nt, Artificial Sequence
  Description of Artificial Sequence: Synthetic oligonucleotide
  Antisense strand to SEQ ID NO: 1305310
cuccuugaagaguaaacgc

SEQ ID NO: 1305312 - RNA, 19 nt, Artificial Sequence
  Description of Artificial Sequence: Synthetic oligonucleotide
  Sense strand starting at position 645 of SEQ ID NO: 1241860
aguuuccauccaugaaaug

SEQ ID NO: 1305313 - RNA, 19 nt, Artificial Sequence
  Description of Artificial Sequence: Synthetic oligonucleotide
  Antisense strand to SEQ ID NO: 1305312
cauuucauggauggaaacu

SEQ ID NO: 1305314 - RNA, 19 nt, Artificial Sequence
  Description of Artificial Sequence: Synthetic oligonucleotide
  Sense strand starting at position 726 of SEQ ID NO: 1241860
uaaugaaacgcucauguag

SEQ ID NO: 1305315 - RNA, 19 nt, Artificial Sequence
  Description of Artificial Sequence: Synthetic oligonucleotide
  Antisense strand to SEQ ID NO: 1305314
cuacaugagcguuucauua

SEQ ID NO: 1305316 - RNA, 19 nt, Artificial Sequence
  Description of Artificial Sequence: Synthetic oligonucleotide
  Sense strand starting at position 945 of SEQ ID NO: 1241860
agcaguaucagguagaggu

SEQ ID NO: 1305317 - RNA, 19 nt, Artificial Sequence
  Description of Artificial Sequence: Synthetic oligonucleotide
  Antisense strand to SEQ ID NO: 1305316
accucuaccugauacugcu

SEQ ID NO: 1305318 - RNA, 19 nt, Artificial Sequence
  Description of Artificial Sequence: Synthetic oligonucleotide
  Sense strand starting at position 962 of SEQ ID NO: 1241860
guacaacucuuacuaaguu

SEQ ID NO: 1305319 - RNA, 19 nt, Artificial Sequence
  Description of Artificial Sequence: Synthetic oligonucleotide
  Antisense strand to SEQ ID NO: 1305318
aacuuaguaagaguuguac

SEQ ID NO: 1305320 - RNA, 19 nt, Artificial Sequence
  Description of Artificial Sequence: Synthetic oligonucleotide
  Sense strand starting at position 1988 of SEQ ID NO: 1241860
ccgagaggccugucgcuuu

SEQ ID NO: 1305321 - RNA, 19 nt, Artificial Sequence
  Description of Artificial Sequence: Synthetic oligonucleotide
  Antisense strand to SEQ ID NO: 1305320
aaagcgacaggccucucgg

SEQ ID NO: 1305322 - RNA, 19 nt, Artificial Sequence
  Description of Artificial Sequence: Synthetic oligonucleotide
  Sense strand starting at position 2088 of SEQ ID NO: 1241860
cuugcugauuuguuguaga

SEQ ID NO: 1305323 - RNA, 19 nt, Artificial Sequence
  Description of Artificial Sequence: Synthetic oligonucleotide
  Antisense strand to SEQ ID NO: 1305322
ucuacaacaaaucagcaag

SEQ ID NO: 1305324 - RNA, 19 nt, Artificial Sequence
  Description of Artificial Sequence: Synthetic oligonucleotide
  Sense strand starting at position 2164 of SEQ ID NO: 1241860
gcgugaucagggaguguug

SEQ ID NO: 1305325 - RNA, 19 nt, Artificial Sequence
  Description of Artificial Sequence: Synthetic oligonucleotide
  Antisense strand to SEQ ID NO: 1305324
caacacucccugaucacgc

SEQ ID NO: 1305326 - RNA, 19 nt, Artificial Sequence
  Description of Artificial Sequence: Synthetic oligonucleotide
  Sense strand starting at position 2350 of SEQ ID NO: 1241860
cgugucagccguucccaua

SEQ ID NO: 1305327 - RNA, 19 nt, Artificial Sequence
  Description of Artificial Sequence: Synthetic oligonucleotide
  Antisense strand to SEQ ID NO: 1305326
uaugggaacggcugacacg

SEQ ID NO: 1305328 - RNA, 19 nt, Artificial Sequence
  Description of Artificial Sequence: Synthetic oligonucleotide
  Sense strand starting at position 2462 of SEQ ID NO: 1241860
uguguuuaugauuacaucu

SEQ ID NO: 1305329 - RNA, 19 nt, Artificial Sequence
  Description of Artificial Sequence: Synthetic oligonucleotide
  Antisense strand to SEQ ID NO: 1305328
agauguaaucauaaacaca

SEQ ID NO: 1305330 - RNA, 19 nt, Artificial Sequence
  Description of Artificial Sequence: Synthetic oligonucleotide
  Sense strand starting at position 2513 of SEQ ID NO: 1241860
aacggaacucggcaauauu

SEQ ID NO: 1305331 - RNA, 19 nt, Artificial Sequence
  Description of Artificial Sequence: Synthetic oligonucleotide
  Antisense strand to SEQ ID NO: 1305330
aauauugccgaguuccguu

SEQ ID NO: 1305332 - RNA, 19 nt, Artificial Sequence
  Description of Artificial Sequence: Synthetic oligonucleotide
  Sense strand starting at position 2726 of SEQ ID NO: 1241860
cgcagugucgcuguuagga

SEQ ID NO: 1305333 - RNA, 19 nt, Artificial Sequence
  Description of Artificial Sequence: Synthetic oligonucleotide
  Antisense strand to SEQ ID NO: 1305332
uccuaacagcgacacugcg

SEQ ID NO: 1305334 - RNA, 19 nt, Artificial Sequence
  Description of Artificial Sequence: Synthetic oligonucleotide
  Sense strand starting at position 2833 of SEQ ID NO: 1241860
acccgaaaguuuccugaca

SEQ ID NO: 1305335 - RNA, 19 nt, Artificial Sequence
  Description of Artificial Sequence: Synthetic oligonucleotide
  Antisense strand to SEQ ID NO: 1305334
ugucaggaaacuuucgggu

SEQ ID NO: 1305336 - RNA, 19 nt, Artificial Sequence
  Description of Artificial Sequence: Synthetic oligonucleotide
  Sense strand starting at position 2834 of SEQ ID NO: 1241860
cccgaaaguuuccugacau

SEQ ID NO: 1305337 - RNA, 19 nt, Artificial Sequence
  Description of Artificial Sequence: Synthetic oligonucleotide
  Antisense strand to SEQ ID NO: 1305336
augucaggaaacuuucggg

SEQ ID NO: 1305338 - RNA, 19 nt, Artificial Sequence
  Description of Artificial Sequence: Synthetic oligonucleotide
  Sense strand starting at position 2844 of SEQ ID NO: 1241860
uccugacaucauugucaua

SEQ ID NO: 1305339 - RNA, 19 nt, Artificial Sequence
  Description of Artificial Sequence: Synthetic oligonucleotide
  Antisense strand to SEQ ID NO: 1305338
uaugacaaugaugucagga

SEQ ID NO: 1305340 - RNA, 19 nt, Artificial Sequence
  Description of Artificial Sequence: Synthetic oligonucleotide
  Sense strand starting at position 2846 of SEQ ID NO: 1241860
cugacaucauugucauauc

SEQ ID NO: 1305341 - RNA, 19 nt, Artificial Sequence
  Description of Artificial Sequence: Synthetic oligonucleotide
  Antisense strand to SEQ ID NO: 1305340
gauaugacaaugaugucag

SEQ ID NO: 1305342 - RNA, 19 nt, Artificial Sequence
  Description of Artificial Sequence: Synthetic oligonucleotide
  Sense strand starting at position 2875 of SEQ ID NO: 1241860
uccaauugccuugaugacu

SEQ ID NO: 1305343 - RNA, 19 nt, Artificial Sequence
  Description of Artificial Sequence: Synthetic oligonucleotide
  Antisense strand to SEQ ID NO: 1305342
agucaucaaggcaauugga

SEQ ID NO: 1305344 - RNA, 19 nt, Artificial Sequence
  Description of Artificial Sequence: Synthetic oligonucleotide
  Sense strand starting at position 2917 of SEQ ID NO: 1241860
ccggcuuguccugcuacau

SEQ ID NO: 1305345 - RNA, 19 nt, Artificial Sequence
  Description of Artificial Sequence: Synthetic oligonucleotide
  Antisense strand to SEQ ID NO: 1305344
auguagcaggacaagccgg

SEQ ID NO: 1305346 - RNA, 19 nt, Artificial Sequence
  Description of Artificial Sequence: Synthetic oligonucleotide
  Sense strand starting at position 3048 of SEQ ID NO: 1241860
cacguuugugagcuguuau

SEQ ID NO: 1305347 - RNA, 19 nt, Artificial Sequence
  Description of Artificial Sequence: Synthetic oligonucleotide
  Antisense strand to SEQ ID NO: 1305346
auaacagcucacaaacgug

SEQ ID NO: 1305348 - RNA, 19 nt, Artificial Sequence
  Description of Artificial Sequence: Synthetic oligonucleotide
  Sense strand starting at position 3056 of SEQ ID NO: 1241860
ugagcuguuauguauugau

SEQ ID NO: 1305349 - RNA, 19 nt, Artificial Sequence
  Description of Artificial Sequence: Synthetic oligonucleotide
  Antisense strand to SEQ ID NO: 1305348
aucaauacauaacagcuca

SEQ ID NO: 1305350 - RNA, 19 nt, Artificial Sequence
  Description of Artificial Sequence: Synthetic oligonucleotide
  Sense strand starting at position 3142 of SEQ ID NO: 1241860
ccucguugaguuuagauua

SEQ ID NO: 1305351 - RNA, 19 nt, Artificial Sequence
  Description of Artificial Sequence: Synthetic oligonucleotide
  Antisense strand to SEQ ID NO: 1305350
uaaucuaaacucaacgagg

SEQ ID NO: 1305352 - RNA, 19 nt, Artificial Sequence
  Description of Artificial Sequence: Synthetic oligonucleotide
  Sense strand starting at position 3236 of SEQ ID NO: 1241860
aaauuaggcucuguguaaa

SEQ ID NO: 1305353 - RNA, 19 nt, Artificial Sequence
  Description of Artificial Sequence: Synthetic oligonucleotide
  Antisense strand to SEQ ID NO: 1305352
uuuacacagagccuaauuu

SEQ ID NO: 1305354 - RNA, 19 nt, Artificial Sequence
  Description of Artificial Sequence: Synthetic oligonucleotide
  Sense strand starting at position 3467 of SEQ ID NO: 1241860
aauaaauguugagugauug

SEQ ID NO: 1305355 - RNA, 19 nt, Artificial Sequence
  Description of Artificial Sequence: Synthetic oligonucleotide
  Antisense strand to SEQ ID NO: 1305354
caaucacucaacauuuauu

SEQ ID NO: 1305356 - RNA, 19 nt, Artificial Sequence
  Description of Artificial Sequence: Synthetic oligonucleotide
  Sense strand starting at position 3468 of SEQ ID NO: 1241860
auaaauguugagugauuga

SEQ ID NO: 1305357 - RNA, 19 nt, Artificial Sequence
  Description of Artificial Sequence: Synthetic oligonucleotide
  Antisense strand to SEQ ID NO: 1305356
ucaaucacucaacauuuau

SEQ ID NO: 1305358 - RNA, 19 nt, Artificial Sequence
  Description of Artificial Sequence: Synthetic oligonucleotide
  Sense strand starting at position 3471 of SEQ ID NO: 1241860
aauguugagugauugaaug

SEQ ID NO: 1305359 - RNA, 19 nt, Artificial Sequence
  Description of Artificial Sequence: Synthetic oligonucleotide
  Antisense strand to SEQ ID NO: 1305358
cauucaaucacucaacauu

SEQ ID NO: 1305360 - RNA, 19 nt, Artificial Sequence
  Description of Artificial Sequence: Synthetic oligonucleotide
  Sense strand starting at position 3473 of SEQ ID NO: 1241860
uguugagugauugaaugau

SEQ ID NO: 1305361 - RNA, 19 nt, Artificial Sequence
  Description of Artificial Sequence: Synthetic oligonucleotide
  Antisense strand to SEQ ID NO: 1305360
aucauucaaucacucaaca

SEQ ID NO: 1305362 - RNA, 19 nt, Artificial Sequence
  Description of Artificial Sequence: Synthetic oligonucleotide
  Sense strand starting at position 3519 of SEQ ID NO: 1241860
ucugcaauacaugaauagu

SEQ ID NO: 1305363 - RNA, 19 nt, Artificial Sequence
  Description of Artificial Sequence: Synthetic oligonucleotide
  Antisense strand to SEQ ID NO: 1305362
acuauucauguauugcaga

SEQ ID NO: 1305364 - RNA, 19 nt, Artificial Sequence
  Description of Artificial Sequence: Synthetic oligonucleotide
  Sense strand starting at position 3522 of SEQ ID NO: 1241860
gcaauacaugaauaguguu

SEQ ID NO: 1305365 - RNA, 19 nt, Artificial Sequence
  Description of Artificial Sequence: Synthetic oligonucleotide
  Antisense strand to SEQ ID NO: 1305364
aacacuauucauguauugc

SEQ ID NO: 1305366 - RNA, 19 nt, Artificial Sequence
  Description of Artificial Sequence: Synthetic oligonucleotide
  Sense strand starting at position 3592 of SEQ ID NO: 1241860
aaauuaaguggcugggaga

SEQ ID NO: 1305367 - RNA, 19 nt, Artificial Sequence
  Description of Artificial Sequence: Synthetic oligonucleotide
  Antisense strand to SEQ ID NO: 1305366
ucucccagccacuuaauuu

SEQ ID NO: 1305368 - RNA, 19 nt, Artificial Sequence
  Description of Artificial Sequence: Synthetic oligonucleotide
  Sense strand starting at position 3626 of SEQ ID NO: 1241860
ugguccuaacgguaaugaa

SEQ ID NO: 1305369 - RNA, 19 nt, Artificial Sequence
  Description of Artificial Sequence: Synthetic oligonucleotide
  Antisense strand to SEQ ID NO: 1305368
uucauuaccguuaggacca

SEQ ID NO: 1305370 - RNA, 19 nt, Artificial Sequence
  Description of Artificial Sequence: Synthetic oligonucleotide
  Sense strand starting at position 3665 of SEQ ID NO: 1241860
gcauucuguacugggaaag

SEQ ID NO: 1305371 - RNA, 19 nt, Artificial Sequence
  Description of Artificial Sequence: Synthetic oligonucleotide
  Antisense strand to SEQ ID NO: 1305370
cuuucccaguacagaaugc

SEQ ID NO: 1305372 - RNA, 19 nt, Artificial Sequence
  Description of Artificial Sequence: Synthetic oligonucleotide
  Sense strand starting at position 3666 of SEQ ID NO: 1241860
cauucuguacugggaaaga

SEQ ID NO: 1305373 - RNA, 19 nt, Artificial Sequence
  Description of Artificial Sequence: Synthetic oligonucleotide
  Antisense strand to SEQ ID NO: 1305372
ucuuucccaguacagaaug

SEQ ID NO: 1305374 - RNA, 19 nt, Artificial Sequence
  Description of Artificial Sequence: Synthetic oligonucleotide
  Sense strand starting at position 32 of SEQ ID NO: 1241861
cagaaaguccaguggaaca

SEQ ID NO: 1305375 - RNA, 19 nt, Artificial Sequence
  Description of Artificial Sequence: Synthetic oligonucleotide
  Antisense strand to SEQ ID NO: 1305374
uguuccacuggacuuucug

SEQ ID NO: 1305376 - RNA, 19 nt, Artificial Sequence
  Description of Artificial Sequence: Synthetic oligonucleotide
  Sense strand starting at position 109 of SEQ ID NO: 1241861
ccuaaacaauuugggauau

SEQ ID NO: 1305377 - RNA, 19 nt, Artificial Sequence
  Description of Artificial Sequence: Synthetic oligonucleotide
  Antisense strand to SEQ ID NO: 1305376
auaucccaaauuguuuagg

SEQ ID NO: 1305378 - RNA, 19 nt, Artificial Sequence
  Description of Artificial Sequence: Synthetic oligonucleotide
  Sense strand starting at position 110 of SEQ ID NO: 1241861
cuaaacaauuugggauauu

SEQ ID NO: 1305379 - RNA, 19 nt, Artificial Sequence
  Description of Artificial Sequence: Synthetic oligonucleotide
  Antisense strand to SEQ ID NO: 1305378
aauaucccaaauuguuuag

SEQ ID NO: 1305380 - RNA, 19 nt, Artificial Sequence
  Description of Artificial Sequence: Synthetic oligonucleotide
  Sense strand starting at position 162 of SEQ ID NO: 1241861
uuugcuacuggauguuaaa

SEQ ID NO: 1305381 - RNA, 19 nt, Artificial Sequence
  Description of Artificial Sequence: Synthetic oligonucleotide
  Antisense strand to SEQ ID NO: 1305380
uuuaacauccaguagcaaa

SEQ ID NO: 1305382 - RNA, 19 nt, Artificial Sequence
  Description of Artificial Sequence: Synthetic oligonucleotide
  Sense strand starting at position 184 of SEQ ID NO: 1241861
gucauccauuuggcuaauu

SEQ ID NO: 1305383 - RNA, 19 nt, Artificial Sequence
  Description of Artificial Sequence: Synthetic oligonucleotide
  Antisense strand to SEQ ID NO: 1305382
aauuagccaaauggaugac

SEQ ID NO: 1305384 - RNA, 19 nt, Artificial Sequence
  Description of Artificial Sequence: Synthetic oligonucleotide
  Sense strand starting at position 602 of SEQ ID NO: 1241861
agaguuaauuaugccuaag

SEQ ID NO: 1305385 - RNA, 19 nt, Artificial Sequence
  Description of Artificial Sequence: Synthetic oligonucleotide
  Antisense strand to SEQ ID NO: 1305384
cuuaggcauaauuaacucu

SEQ ID NO: 1305386 - RNA, 19 nt, Artificial Sequence
  Description of Artificial Sequence: Synthetic oligonucleotide
  Sense strand starting at position 604 of SEQ ID NO: 1241861
aguuaauuaugccuaagug

SEQ ID NO: 1305387 - RNA, 19 nt, Artificial Sequence
  Description of Artificial Sequence: Synthetic oligonucleotide
  Antisense strand to SEQ ID NO: 1305386
cacuuaggcauaauuaacu

SEQ ID NO: 1305388 - RNA, 19 nt, Artificial Sequence
  Description of Artificial Sequence: Synthetic oligonucleotide
  Sense strand starting at position 678 of SEQ ID NO: 1241861
ggcuuucuaguaggaaaua

SEQ ID NO: 1305389 - RNA, 19 nt, Artificial Sequence
  Description of Artificial Sequence: Synthetic oligonucleotide
  Antisense strand to SEQ ID NO: 1305388
uauuuccuacuagaaagcc

SEQ ID NO: 1305390 - RNA, 19 nt, Artificial Sequence
  Description of Artificial Sequence: Synthetic oligonucleotide
  Sense strand starting at position 758 of SEQ ID NO: 1241861
aucguugucaguuagauaa

SEQ ID NO: 1305391 - RNA, 19 nt, Artificial Sequence
  Description of Artificial Sequence: Synthetic oligonucleotide
  Antisense strand to SEQ ID NO: 1305390
uuaucuaacugacaacgau

SEQ ID NO: 1305392 - RNA, 19 nt, Artificial Sequence
  Description of Artificial Sequence: Synthetic oligonucleotide
  Sense strand starting at position 803 of SEQ ID NO: 1241861
gaagaaaggugauaggaaa

SEQ ID NO: 1305393 - RNA, 19 nt, Artificial Sequence
  Description of Artificial Sequence: Synthetic oligonucleotide
  Antisense strand to SEQ ID NO: 1305392
uuuccuaucaccuuucuuc

SEQ ID NO: 1305394 - RNA, 19 nt, Artificial Sequence
  Description of Artificial Sequence: Synthetic oligonucleotide
  Sense strand starting at position 966 of SEQ ID NO: 1241861
gaguaaauggcacagugua

SEQ ID NO: 1305395 - RNA, 19 nt, Artificial Sequence
  Description of Artificial Sequence: Synthetic oligonucleotide
  Antisense strand to SEQ ID NO: 1305394
uacacugugccauuuacuc

SEQ ID NO: 1305396 - RNA, 19 nt, Artificial Sequence
  Description of Artificial Sequence: Synthetic oligonucleotide
  Sense strand starting at position 1036 of SEQ ID NO: 1241861
aaauacuguccuggguaga

SEQ ID NO: 1305397 - RNA, 19 nt, Artificial Sequence
  Description of Artificial Sequence: Synthetic oligonucleotide
  Antisense strand to SEQ ID NO: 1305396
ucuacccaggacaguauuu

SEQ ID NO: 1305398 - RNA, 19 nt, Artificial Sequence
  Description of Artificial Sequence: Synthetic oligonucleotide
  Sense strand starting at position 1039 of SEQ ID NO: 1241861
uacuguccuggguagagaa

SEQ ID NO: 1305399 - RNA, 19 nt, Artificial Sequence
  Description of Artificial Sequence: Synthetic oligonucleotide
  Antisense strand to SEQ ID NO: 1305398
uucucuacccaggacagua

SEQ ID NO: 1305400 - RNA, 19 nt, Artificial Sequence
  Description of Artificial Sequence: Synthetic oligonucleotide
  Sense strand starting at position 1348 of SEQ ID NO: 1241861
gaaaccagugaguggugua

SEQ ID NO: 1305401 - RNA, 19 nt, Artificial Sequence
  Description of Artificial Sequence: Synthetic oligonucleotide
  Antisense strand to SEQ ID NO: 1305400
uacaccacucacugguuuc

SEQ ID NO: 1305402 - RNA, 19 nt, Artificial Sequence
  Description of Artificial Sequence: Synthetic oligonucleotide
  Sense strand starting at position 2132 of SEQ ID NO: 1241861
cguaaaguugccuuugcau

SEQ ID NO: 1305403 - RNA, 19 nt, Artificial Sequence
  Description of Artificial Sequence: Synthetic oligonucleotide
  Antisense strand to SEQ ID NO: 1305402
augcaaaggcaacuuuacg

SEQ ID NO: 1305404 - RNA, 19 nt, Artificial Sequence
  Description of Artificial Sequence: Synthetic oligonucleotide
  Sense strand starting at position 2372 of SEQ ID NO: 1241861
gggcauuuguguucccuca

SEQ ID NO: 1305405 - RNA, 19 nt, Artificial Sequence
  Description of Artificial Sequence: Synthetic oligonucleotide
  Antisense strand to SEQ ID NO: 1305404
ugagggaacacaaaugccc

SEQ ID NO: 1305406 - RNA, 19 nt, Artificial Sequence
  Description of Artificial Sequence: Synthetic oligonucleotide
  Sense strand starting at position 2374 of SEQ ID NO: 1241861
gcauuuguguucccucaaa

SEQ ID NO: 1305407 - RNA, 19 nt, Artificial Sequence
  Description of Artificial Sequence: Synthetic oligonucleotide
  Antisense strand to SEQ ID NO: 1305406
uuugagggaacacaaaugc

SEQ ID NO: 1305408 - RNA, 19 nt, Artificial Sequence
  Description of Artificial Sequence: Synthetic oligonucleotide
  Sense strand starting at position 2610 of SEQ ID NO: 1241861
cggcugucgguccuugaga

SEQ ID NO: 1305409 - RNA, 19 nt, Artificial Sequence
  Description of Artificial Sequence: Synthetic oligonucleotide
  Antisense strand to SEQ ID NO: 1305408
ucucaaggaccgacagccg

SEQ ID NO: 1305410 - RNA, 19 nt, Artificial Sequence
  Description of Artificial Sequence: Synthetic oligonucleotide
  Sense strand starting at position 2673 of SEQ ID NO: 1241861
aacggacucucuuugggau

SEQ ID NO: 1305411 - RNA, 19 nt, Artificial Sequence
  Description of Artificial Sequence: Synthetic oligonucleotide
  Antisense strand to SEQ ID NO: 1305410
aucccaaagagaguccguu

SEQ ID NO: 1305412 - RNA, 19 nt, Artificial Sequence
  Description of Artificial Sequence: Synthetic oligonucleotide
  Sense strand starting at position 2674 of SEQ ID NO: 1241861
acggacucucuuugggaua

SEQ ID NO: 1305413 - RNA, 19 nt, Artificial Sequence
  Description of Artificial Sequence: Synthetic oligonucleotide
  Antisense strand to SEQ ID NO: 1305412
uaucccaaagagaguccgu

SEQ ID NO: 1305414 - RNA, 19 nt, Artificial Sequence
  Description of Artificial Sequence: Synthetic oligonucleotide
  Sense strand starting at position 2679 of SEQ ID NO: 1241861
cucucuuugggauagcgau

SEQ ID NO: 1305415 - RNA, 19 nt, Artificial Sequence
  Description of Artificial Sequence: Synthetic oligonucleotide
  Antisense strand to SEQ ID NO: 1305414
aucgcuaucccaaagagag

SEQ ID NO: 1305416 - RNA, 19 nt, Artificial Sequence
  Description of Artificial Sequence: Synthetic oligonucleotide
  Sense strand starting at position 2685 of SEQ ID NO: 1241861
uugggauagcgaugacgau

SEQ ID NO: 1305417 - RNA, 19 nt, Artificial Sequence
  Description of Artificial Sequence: Synthetic oligonucleotide
  Antisense strand to SEQ ID NO: 1305416
aucgucaucgcuaucccaa

SEQ ID NO: 1305418 - RNA, 19 nt, Artificial Sequence
  Description of Artificial Sequence: Synthetic oligonucleotide
  Sense strand starting at position 2740 of SEQ ID NO: 1241861
guuccugugaaugaaugga

SEQ ID NO: 1305419 - RNA, 19 nt, Artificial Sequence
  Description of Artificial Sequence: Synthetic oligonucleotide
  Antisense strand to SEQ ID NO: 1305418
uccauucauucacaggaac

SEQ ID NO: 1305420 - RNA, 19 nt, Artificial Sequence
  Description of Artificial Sequence: Synthetic oligonucleotide
  Sense strand starting at position 2792 of SEQ ID NO: 1241861
ucaagacacguuuguuaag

SEQ ID NO: 1305421 - RNA, 19 nt, Artificial Sequence
  Description of Artificial Sequence: Synthetic oligonucleotide
  Antisense strand to SEQ ID NO: 1305420
cuuaacaaacgugucuuga

SEQ ID NO: 1305422 - RNA, 19 nt, Artificial Sequence
  Description of Artificial Sequence: Synthetic oligonucleotide
  Sense strand starting at position 2910 of SEQ ID NO: 1241861
ucagauagggauggguuau

SEQ ID NO: 1305423 - RNA, 19 nt, Artificial Sequence
  Description of Artificial Sequence: Synthetic oligonucleotide
  Antisense strand to SEQ ID NO: 1305422
auaacccaucccuaucuga

SEQ ID NO: 1305424 - RNA, 19 nt, Artificial Sequence
  Description of Artificial Sequence: Synthetic oligonucleotide
  Sense strand starting at position 2973 of SEQ ID NO: 1241861
cgugaugggcuguauuaga

SEQ ID NO: 1305425 - RNA, 19 nt, Artificial Sequence
  Description of Artificial Sequence: Synthetic oligonucleotide
  Antisense strand to SEQ ID NO: 1305424
ucuaauacagcccaucacg

SEQ ID NO: 1305426 - RNA, 19 nt, Artificial Sequence
  Description of Artificial Sequence: Synthetic oligonucleotide
  Sense strand starting at position 2980 of SEQ ID NO: 1241861
ggcuguauuagauagguag

SEQ ID NO: 1305427 - RNA, 19 nt, Artificial Sequence
  Description of Artificial Sequence: Synthetic oligonucleotide
  Antisense strand to SEQ ID NO: 1305426
cuaccuaucuaauacagcc

SEQ ID NO: 1305428 - RNA, 19 nt, Artificial Sequence
  Description of Artificial Sequence: Synthetic oligonucleotide
  Sense strand starting at position 2984 of SEQ ID NO: 1241861
guauuagauagguagugcu

SEQ ID NO: 1305429 - RNA, 19 nt, Artificial Sequence
  Description of Artificial Sequence: Synthetic oligonucleotide
  Antisense strand to SEQ ID NO: 1305428
agcacuaccuaucuaauac

SEQ ID NO: 1305430 - RNA, 19 nt, Artificial Sequence
  Description of Artificial Sequence: Synthetic oligonucleotide
  Sense strand starting at position 3069 of SEQ ID NO: 1241861
gagguagagucuuuaagag

SEQ ID NO: 1305431 - RNA, 19 nt, Artificial Sequence
  Description of Artificial Sequence: Synthetic oligonucleotide
  Antisense strand to SEQ ID NO: 1305430
cucuuaaagacucuaccuc

SEQ ID NO: 1305432 - RNA, 19 nt, Artificial Sequence
  Description of Artificial Sequence: Synthetic oligonucleotide
  Sense strand starting at position 3075 of SEQ ID NO: 1241861
gagucuuuaagaggugguu

SEQ ID NO: 1305433 - RNA, 19 nt, Artificial Sequence
  Description of Artificial Sequence: Synthetic oligonucleotide
  Antisense strand to SEQ ID NO: 1305432
aaccaccucuuaaagacuc

SEQ ID NO: 1305434 - RNA, 19 nt, Artificial Sequence
  Description of Artificial Sequence: Synthetic oligonucleotide
  Sense strand starting at position 3106 of SEQ ID NO: 1241861
uucugucuucacgagugga

SEQ ID NO: 1305435 - RNA, 19 nt, Artificial Sequence
  Description of Artificial Sequence: Synthetic oligonucleotide
  Antisense strand to SEQ ID NO: 1305434
uccacucgugaagacagaa

SEQ ID NO: 1305436 - RNA, 19 nt, Artificial Sequence
  Description of Artificial Sequence: Synthetic oligonucleotide
  Sense strand starting at position 3144 of SEQ ID NO: 1241861
auggguuaucacggaggua

SEQ ID NO: 1305437 - RNA, 19 nt, Artificial Sequence
  Description of Artificial Sequence: Synthetic oligonucleotide
  Antisense strand to SEQ ID NO: 1305436
uaccuccgugauaacccau

SEQ ID NO: 1305438 - RNA, 19 nt, Artificial Sequence
  Description of Artificial Sequence: Synthetic oligonucleotide
  Sense strand starting at position 3145 of SEQ ID NO: 1241861
uggguuaucacggagguag

SEQ ID NO: 1305439 - RNA, 19 nt, Artificial Sequence
  Description of Artificial Sequence: Synthetic oligonucleotide
  Antisense strand to SEQ ID NO: 1305438
cuaccuccgugauaaccca

SEQ ID NO: 1305440 - RNA, 19 nt, Artificial Sequence
  Description of Artificial Sequence: Synthetic oligonucleotide
  Sense strand starting at position 3147 of SEQ ID NO: 1241861
gguuaucacggagguagaa

SEQ ID NO: 1305441 - RNA, 19 nt, Artificial Sequence
  Description of Artificial Sequence: Synthetic oligonucleotide
  Antisense strand to SEQ ID NO: 1305440
uucuaccuccgugauaacc

SEQ ID NO: 1305442 - RNA, 19 nt, Artificial Sequence
  Description of Artificial Sequence: Synthetic oligonucleotide
  Sense strand starting at position 3636 of SEQ ID NO: 1241861
guaagccuuguuuaggagu

SEQ ID NO: 1305443 - RNA, 19 nt, Artificial Sequence
  Description of Artificial Sequence: Synthetic oligonucleotide
  Antisense strand to SEQ ID NO: 1305442
acuccuaaacaaggcuuac

SEQ ID NO: 1305444 - RNA, 19 nt, Artificial Sequence
  Description of Artificial Sequence: Synthetic oligonucleotide
  Sense strand starting at position 3651 of SEQ ID NO: 1241861
gaguuuggacuguauccua

SEQ ID NO: 1305445 - RNA, 19 nt, Artificial Sequence
  Description of Artificial Sequence: Synthetic oligonucleotide
  Antisense strand to SEQ ID NO: 1305444
uaggauacaguccaaacuc

SEQ ID NO: 1305446 - RNA, 19 nt, Artificial Sequence
  Description of Artificial Sequence: Synthetic oligonucleotide
  Sense strand starting at position 3746 of SEQ ID NO: 1241861
ugcaguuguccagaguaga

SEQ ID NO: 1305447 - RNA, 19 nt, Artificial Sequence
  Description of Artificial Sequence: Synthetic oligonucleotide
  Antisense strand to SEQ ID NO: 1305446
ucuacucuggacaacugca

SEQ ID NO: 1305448 - RNA, 19 nt, Artificial Sequence
  Description of Artificial Sequence: Synthetic oligonucleotide
  Sense strand starting at position 3749 of SEQ ID NO: 1241861
aguuguccagaguagaagu

SEQ ID NO: 1305449 - RNA, 19 nt, Artificial Sequence
  Description of Artificial Sequence: Synthetic oligonucleotide
  Antisense strand to SEQ ID NO: 1305448
acuucuacucuggacaacu

SEQ ID NO: 1305450 - RNA, 19 nt, Artificial Sequence
  Description of Artificial Sequence: Synthetic oligonucleotide
  Sense strand starting at position 3873 of SEQ ID NO: 1241861
ugaaauuaguagcugaauu

SEQ ID NO: 1305451 - RNA, 19 nt, Artificial Sequence
  Description of Artificial Sequence: Synthetic oligonucleotide
  Antisense strand to SEQ ID NO: 1305450
aauucagcuacuaauuuca

SEQ ID NO: 1305452 - RNA, 19 nt, Artificial Sequence
  Description of Artificial Sequence: Synthetic oligonucleotide
  Sense strand starting at position 3940 of SEQ ID NO: 1241861
guagcuuucggucuuucga

SEQ ID NO: 1305453 - RNA, 19 nt, Artificial Sequence
  Description of Artificial Sequence: Synthetic oligonucleotide
  Antisense strand to SEQ ID NO: 1305452
ucgaaagaccgaaagcuac

SEQ ID NO: 1305454 - RNA, 19 nt, Artificial Sequence
  Description of Artificial Sequence: Synthetic oligonucleotide
  Sense strand starting at position 5 of SEQ ID NO: 1241862
auacauuccugggcucaau

SEQ ID NO: 1305455 - RNA, 19 nt, Artificial Sequence
  Description of Artificial Sequence: Synthetic oligonucleotide
  Antisense strand to SEQ ID NO: 1305454
auugagcccaggaauguau

SEQ ID NO: 1305456 - RNA, 19 nt, Artificial Sequence
  Description of Artificial Sequence: Synthetic oligonucleotide
  Sense strand starting at position 138 of SEQ ID NO: 1241862
gcgggaagaccugggucaa

SEQ ID NO: 1305457 - RNA, 19 nt, Artificial Sequence
  Description of Artificial Sequence: Synthetic oligonucleotide
  Antisense strand to SEQ ID NO: 1305456
uugacccaggucuucccgc

SEQ ID NO: 1305458 - RNA, 19 nt, Artificial Sequence
  Description of Artificial Sequence: Synthetic oligonucleotide
  Sense strand starting at position 139 of SEQ ID NO: 1241862
cgggaagaccugggucaaa

SEQ ID NO: 1305459 - RNA, 19 nt, Artificial Sequence
  Description of Artificial Sequence: Synthetic oligonucleotide
  Antisense strand to SEQ ID NO: 1305458
uuugacccaggucuucccg

SEQ ID NO: 1305460 - RNA, 19 nt, Artificial Sequence
  Description of Artificial Sequence: Synthetic oligonucleotide
  Sense strand starting at position 274 of SEQ ID NO: 1241862
ggugaaagguacucaacua

SEQ ID NO: 1305461 - RNA, 19 nt, Artificial Sequence
  Description of Artificial Sequence: Synthetic oligonucleotide
  Antisense strand to SEQ ID NO: 1305460
uaguugaguaccuuucacc

SEQ ID NO: 1305462 - RNA, 19 nt, Artificial Sequence
  Description of Artificial Sequence: Synthetic oligonucleotide
  Sense strand starting at position 337 of SEQ ID NO: 1241862
gucuaaggcauucgugaau

SEQ ID NO: 1305463 - RNA, 19 nt, Artificial Sequence
  Description of Artificial Sequence: Synthetic oligonucleotide
  Antisense strand to SEQ ID NO: 1305462
auucacgaaugccuuagac

SEQ ID NO: 1305464 - RNA, 19 nt, Artificial Sequence
  Description of Artificial Sequence: Synthetic oligonucleotide
  Sense strand starting at position 349 of SEQ ID NO: 1241862
cgugaaugccuacguuuaa

SEQ ID NO: 1305465 - RNA, 19 nt, Artificial Sequence
  Description of Artificial Sequence: Synthetic oligonucleotide
  Antisense strand to SEQ ID NO: 1305464
uuaaacguaggcauucacg

SEQ ID NO: 1305466 - RNA, 19 nt, Artificial Sequence
  Description of Artificial Sequence: Synthetic oligonucleotide
  Sense strand starting at position 350 of SEQ ID NO: 1241862
gugaaugccuacguuuaag

SEQ ID NO: 1305467 - RNA, 19 nt, Artificial Sequence
  Description of Artificial Sequence: Synthetic oligonucleotide
  Antisense strand to SEQ ID NO: 1305466
cuuaaacguaggcauucac

SEQ ID NO: 1305468 - RNA, 19 nt, Artificial Sequence
  Description of Artificial Sequence: Synthetic oligonucleotide
  Sense strand starting at position 402 of SEQ ID NO: 1241862
ggaacaaucugccacuaag

SEQ ID NO: 1305469 - RNA, 19 nt, Artificial Sequence
  Description of Artificial Sequence: Synthetic oligonucleotide
  Antisense strand to SEQ ID NO: 1305468
cuuaguggcagauuguucc

SEQ ID NO: 1305470 - RNA, 19 nt, Artificial Sequence
  Description of Artificial Sequence: Synthetic oligonucleotide
  Sense strand starting at position 462 of SEQ ID NO: 1241862
gccagauaccgcuaauguu

SEQ ID NO: 1305471 - RNA, 19 nt, Artificial Sequence
  Description of Artificial Sequence: Synthetic oligonucleotide
  Antisense strand to SEQ ID NO: 1305470
aacauuagcgguaucuggc

SEQ ID NO: 1305472 - RNA, 19 nt, Artificial Sequence
  Description of Artificial Sequence: Synthetic oligonucleotide
  Sense strand starting at position 940 of SEQ ID NO: 1241862
ggccgugccagacauauca

SEQ ID NO: 1305473 - RNA, 19 nt, Artificial Sequence
  Description of Artificial Sequence: Synthetic oligonucleotide
  Antisense strand to SEQ ID NO: 1305472
ugauaugucuggcacggcc

SEQ ID NO: 1305474 - RNA, 19 nt, Artificial Sequence
  Description of Artificial Sequence: Synthetic oligonucleotide
  Sense strand starting at position 1164 of SEQ ID NO: 1241862
guuucuagccuugggauca

SEQ ID NO: 1305475 - RNA, 19 nt, Artificial Sequence
  Description of Artificial Sequence: Synthetic oligonucleotide
  Antisense strand to SEQ ID NO: 1305474
ugaucccaaggcuagaaac

SEQ ID NO: 1305476 - RNA, 19 nt, Artificial Sequence
  Description of Artificial Sequence: Synthetic oligonucleotide
  Sense strand starting at position 1528 of SEQ ID NO: 1241862
ccgugauggccaggaugaa

SEQ ID NO: 1305477 - RNA, 19 nt, Artificial Sequence
  Description of Artificial Sequence: Synthetic oligonucleotide
  Antisense strand to SEQ ID NO: 1305476
uucauccuggccaucacgg

SEQ ID NO: 1305478 - RNA, 19 nt, Artificial Sequence
  Description of Artificial Sequence: Synthetic oligonucleotide
  Sense strand starting at position 1609 of SEQ ID NO: 1241862
gcgcgaugaagacaaagua

SEQ ID NO: 1305479 - RNA, 19 nt, Artificial Sequence
  Description of Artificial Sequence: Synthetic oligonucleotide
  Antisense strand to SEQ ID NO: 1305478
uacuuugucuucaucgcgc

SEQ ID NO: 1305480 - RNA, 19 nt, Artificial Sequence
  Description of Artificial Sequence: Synthetic oligonucleotide
  Sense strand starting at position 2267 of SEQ ID NO: 1241862
cuggaaacuucagagaggu

SEQ ID NO: 1305481 - RNA, 19 nt, Artificial Sequence
  Description of Artificial Sequence: Synthetic oligonucleotide
  Antisense strand to SEQ ID NO: 1305480
accucucugaaguuuccag

SEQ ID NO: 1305482 - RNA, 19 nt, Artificial Sequence
  Description of Artificial Sequence: Synthetic oligonucleotide
  Sense strand starting at position 2283 of SEQ ID NO: 1241862
gguuuaguuucguuuccca

SEQ ID NO: 1305483 - RNA, 19 nt, Artificial Sequence
  Description of Artificial Sequence: Synthetic oligonucleotide
  Antisense strand to SEQ ID NO: 1305482
ugggaaacgaaacuaaacc

SEQ ID NO: 1305484 - RNA, 19 nt, Artificial Sequence
  Description of Artificial Sequence: Synthetic oligonucleotide
  Sense strand starting at position 2286 of SEQ ID NO: 1241862
uuaguuucguuucccagaa

SEQ ID NO: 1305485 - RNA, 19 nt, Artificial Sequence
  Description of Artificial Sequence: Synthetic oligonucleotide
  Antisense strand to SEQ ID NO: 1305484
uucugggaaacgaaacuaa

SEQ ID NO: 1305486 - RNA, 19 nt, Artificial Sequence
  Description of Artificial Sequence: Synthetic oligonucleotide
  Sense strand starting at position 2290 of SEQ ID NO: 1241862
uuucguuucccagaagcau

SEQ ID NO: 1305487 - RNA, 19 nt, Artificial Sequence
  Description of Artificial Sequence: Synthetic oligonucleotide
  Antisense strand to SEQ ID NO: 1305486
augcuucugggaaacgaaa

SEQ ID NO: 1305488 - RNA, 19 nt, Artificial Sequence
  Description of Artificial Sequence: Synthetic oligonucleotide
  Sense strand starting at position 2475 of SEQ ID NO: 1241862
gaccuuacuccagggauca

SEQ ID NO: 1305489 - RNA, 19 nt, Artificial Sequence
  Description of Artificial Sequence: Synthetic oligonucleotide
  Antisense strand to SEQ ID NO: 1305488
ugaucccuggaguaagguc

SEQ ID NO: 1305490 - RNA, 19 nt, Artificial Sequence
  Description of Artificial Sequence: Synthetic oligonucleotide
  Sense strand starting at position 2476 of SEQ ID NO: 1241862
accuuacuccagggaucaa

SEQ ID NO: 1305491 - RNA, 19 nt, Artificial Sequence
  Description of Artificial Sequence: Synthetic oligonucleotide
  Antisense strand to SEQ ID NO: 1305490
uugaucccuggaguaaggu

SEQ ID NO: 1305492 - RNA, 19 nt, Artificial Sequence
  Description of Artificial Sequence: Synthetic oligonucleotide
  Sense strand starting at position 2521 of SEQ ID NO: 1241862
ggcauccagugcuccaauu

SEQ ID NO: 1305493 - RNA, 19 nt, Artificial Sequence
  Description of Artificial Sequence: Synthetic oligonucleotide
  Antisense strand to SEQ ID NO: 1305492
aauuggagcacuggaugcc

SEQ ID NO: 1305494 - RNA, 19 nt, Artificial Sequence
  Description of Artificial Sequence: Synthetic oligonucleotide
  Sense strand starting at position 2594 of SEQ ID NO: 1241862
uuccgcguugccucuaaga

SEQ ID NO: 1305495 - RNA, 19 nt, Artificial Sequence
  Description of Artificial Sequence: Synthetic oligonucleotide
  Antisense strand to SEQ ID NO: 1305494
ucuuagaggcaacgcggaa

SEQ ID NO: 1305496 - RNA, 19 nt, Artificial Sequence
  Description of Artificial Sequence: Synthetic oligonucleotide
  Sense strand starting at position 2596 of SEQ ID NO: 1241862
ccgcguugccucuaagaac

SEQ ID NO: 1305497 - RNA, 19 nt, Artificial Sequence
  Description of Artificial Sequence: Synthetic oligonucleotide
  Antisense strand to SEQ ID NO: 1305496
guucuuagaggcaacgcgg

SEQ ID NO: 1305498 - RNA, 19 nt, Artificial Sequence
  Description of Artificial Sequence: Synthetic oligonucleotide
  Sense strand starting at position 2656 of SEQ ID NO: 1241862
uccguuguugggcgaacua

SEQ ID NO: 1305499 - RNA, 19 nt, Artificial Sequence
  Description of Artificial Sequence: Synthetic oligonucleotide
  Antisense strand to SEQ ID NO: 1305498
uaguucgcccaacaacgga

SEQ ID NO: 1305500 - RNA, 19 nt, Artificial Sequence
  Description of Artificial Sequence: Synthetic oligonucleotide
  Sense strand starting at position 2767 of SEQ ID NO: 1241862
agaaauauaucgcuauagc

SEQ ID NO: 1305501 - RNA, 19 nt, Artificial Sequence
  Description of Artificial Sequence: Synthetic oligonucleotide
  Antisense strand to SEQ ID NO: 1305500
gcuauagcgauauauuucu

SEQ ID NO: 1305502 - RNA, 19 nt, Artificial Sequence
  Description of Artificial Sequence: Synthetic oligonucleotide
  Sense strand starting at position 2793 of SEQ ID NO: 1241862
gaauuugguuugcagguau

SEQ ID NO: 1305503 - RNA, 19 nt, Artificial Sequence
  Description of Artificial Sequence: Synthetic oligonucleotide
  Antisense strand to SEQ ID NO: 1305502
auaccugcaaaccaaauuc

SEQ ID NO: 1305504 - RNA, 19 nt, Artificial Sequence
  Description of Artificial Sequence: Synthetic oligonucleotide
  Sense strand starting at position 2821 of SEQ ID NO: 1241862
uguuucccucccugggaaa

SEQ ID NO: 1305505 - RNA, 19 nt, Artificial Sequence
  Description of Artificial Sequence: Synthetic oligonucleotide
  Antisense strand to SEQ ID NO: 1305504
uuucccagggagggaaaca

SEQ ID NO: 1305506 - RNA, 19 nt, Artificial Sequence
  Description of Artificial Sequence: Synthetic oligonucleotide
  Sense strand starting at position 2822 of SEQ ID NO: 1241862
guuucccucccugggaaau

SEQ ID NO: 1305507 - RNA, 19 nt, Artificial Sequence
  Description of Artificial Sequence: Synthetic oligonucleotide
  Antisense strand to SEQ ID NO: 1305506
auuucccagggagggaaac

SEQ ID NO: 1305508 - RNA, 19 nt, Artificial Sequence
  Description of Artificial Sequence: Synthetic oligonucleotide
  Sense strand starting at position 2967 of SEQ ID NO: 1241862
gagggugucccagaagugu

SEQ ID NO: 1305509 - RNA, 19 nt, Artificial Sequence
  Description of Artificial Sequence: Synthetic oligonucleotide
  Antisense strand to SEQ ID NO: 1305508
acacuucugggacacccuc

SEQ ID NO: 1305510 - RNA, 19 nt, Artificial Sequence
  Description of Artificial Sequence: Synthetic oligonucleotide
  Sense strand starting at position 3100 of SEQ ID NO: 1241862
guuucauggcugugacugu

SEQ ID NO: 1305511 - RNA, 19 nt, Artificial Sequence
  Description of Artificial Sequence: Synthetic oligonucleotide
  Antisense strand to SEQ ID NO: 1305510
acagucacagccaugaaac

SEQ ID NO: 1305512 - RNA, 19 nt, Artificial Sequence
  Description of Artificial Sequence: Synthetic oligonucleotide
  Sense strand starting at position 3151 of SEQ ID NO: 1241862
agcaguuauuucuugccca

SEQ ID NO: 1305513 - RNA, 19 nt, Artificial Sequence
  Description of Artificial Sequence: Synthetic oligonucleotide
  Antisense strand to SEQ ID NO: 1305512
ugggcaagaaauaacugcu

SEQ ID NO: 1305514 - RNA, 19 nt, Artificial Sequence
  Description of Artificial Sequence: Synthetic oligonucleotide
  Sense strand starting at position 3314 of SEQ ID NO: 1241862
cccggcuccaguuaugaca

SEQ ID NO: 1305515 - RNA, 19 nt, Artificial Sequence
  Description of Artificial Sequence: Synthetic oligonucleotide
  Antisense strand to SEQ ID NO: 1305514
ugucauaacuggagccggg

SEQ ID NO: 1305516 - RNA, 19 nt, Artificial Sequence
  Description of Artificial Sequence: Synthetic oligonucleotide
  Sense strand starting at position 3402 of SEQ ID NO: 1241862
uggugacaggugugaagaa

SEQ ID NO: 1305517 - RNA, 19 nt, Artificial Sequence
  Description of Artificial Sequence: Synthetic oligonucleotide
  Antisense strand to SEQ ID NO: 1305516
uucuucacaccugucacca

SEQ ID NO: 1305518 - RNA, 19 nt, Artificial Sequence
  Description of Artificial Sequence: Synthetic oligonucleotide
  Sense strand starting at position 3403 of SEQ ID NO: 1241862
ggugacaggugugaagaaa

SEQ ID NO: 1305519 - RNA, 19 nt, Artificial Sequence
  Description of Artificial Sequence: Synthetic oligonucleotide
  Antisense strand to SEQ ID NO: 1305518
uuucuucacaccugucacc

SEQ ID NO: 1305520 - RNA, 19 nt, Artificial Sequence
  Description of Artificial Sequence: Synthetic oligonucleotide
  Sense strand starting at position 3476 of SEQ ID NO: 1241862
cagggaaagguuuggcuga

SEQ ID NO: 1305521 - RNA, 19 nt, Artificial Sequence
  Description of Artificial Sequence: Synthetic oligonucleotide
  Antisense strand to SEQ ID NO: 1305520
ucagccaaaccuuucccug

SEQ ID NO: 1305522 - RNA, 19 nt, Artificial Sequence
  Description of Artificial Sequence: Synthetic oligonucleotide
  Sense strand starting at position 3478 of SEQ ID NO: 1241862
gggaaagguuuggcugaag

SEQ ID NO: 1305523 - RNA, 19 nt, Artificial Sequence
  Description of Artificial Sequence: Synthetic oligonucleotide
  Antisense strand to SEQ ID NO: 1305522
cuucagccaaaccuuuccc

SEQ ID NO: 1305524 - RNA, 19 nt, Artificial Sequence
  Description of Artificial Sequence: Synthetic oligonucleotide
  Sense strand starting at position 3481 of SEQ ID NO: 1241862
aaagguuuggcugaagucu

SEQ ID NO: 1305525 - RNA, 19 nt, Artificial Sequence
  Description of Artificial Sequence: Synthetic oligonucleotide
  Antisense strand to SEQ ID NO: 1305524
agacuucagccaaaccuuu

SEQ ID NO: 1305526 - RNA, 19 nt, Artificial Sequence
  Description of Artificial Sequence: Synthetic oligonucleotide
  Sense strand starting at position 3489 of SEQ ID NO: 1241862
ggcugaagucugcauuguu

SEQ ID NO: 1305527 - RNA, 19 nt, Artificial Sequence
  Description of Artificial Sequence: Synthetic oligonucleotide
  Antisense strand to SEQ ID NO: 1305526
aacaaugcagacuucagcc

SEQ ID NO: 1305528 - RNA, 19 nt, Artificial Sequence
  Description of Artificial Sequence: Synthetic oligonucleotide
  Sense strand starting at position 3815 of SEQ ID NO: 1241862
uggagcuuccaggaguacu

SEQ ID NO: 1305529 - RNA, 19 nt, Artificial Sequence
  Description of Artificial Sequence: Synthetic oligonucleotide
  Antisense strand to SEQ ID NO: 1305528
aguacuccuggaagcucca

SEQ ID NO: 1305530 - RNA, 19 nt, Artificial Sequence
  Description of Artificial Sequence: Synthetic oligonucleotide
  Sense strand starting at position 3825 of SEQ ID NO: 1241862
aggaguacuccuggugcuu

SEQ ID NO: 1305531 - RNA, 19 nt, Artificial Sequence
  Description of Artificial Sequence: Synthetic oligonucleotide
  Antisense strand to SEQ ID NO: 1305530
aagcaccaggaguacuccu

SEQ ID NO: 1305532 - RNA, 19 nt, Artificial Sequence
  Description of Artificial Sequence: Synthetic oligonucleotide
  Sense strand starting at position 3849 of SEQ ID NO: 1241862
gccaaaugcugauuccuca

SEQ ID NO: 1305533 - RNA, 19 nt, Artificial Sequence
  Description of Artificial Sequence: Synthetic oligonucleotide
  Antisense strand to SEQ ID NO: 1305532
ugaggaaucagcauuuggc

SEQ ID NO: 1305534 - RNA, 19 nt, Artificial Sequence
  Description of Artificial Sequence: Synthetic oligonucleotide
  Sense strand starting at position 178 of SEQ ID NO: 1241863
uuuagaugguuaguuaacu

SEQ ID NO: 1305535 - RNA, 19 nt, Artificial Sequence
  Description of Artificial Sequence: Synthetic oligonucleotide
  Antisense strand to SEQ ID NO: 1305534
aguuaacuaaccaucuaaa

SEQ ID NO: 1305536 - RNA, 19 nt, Artificial Sequence
  Description of Artificial Sequence: Synthetic oligonucleotide
  Sense strand starting at position 533 of SEQ ID NO: 1241863
auuucuucuugaggaauaa

SEQ ID NO: 1305537 - RNA, 19 nt, Artificial Sequence
  Description of Artificial Sequence: Synthetic oligonucleotide
  Antisense strand to SEQ ID NO: 1305536
uuauuccucaagaagaaau

SEQ ID NO: 1305538 - RNA, 19 nt, Artificial Sequence
  Description of Artificial Sequence: Synthetic oligonucleotide
  Sense strand starting at position 699 of SEQ ID NO: 1241863
uccucugucauauguggga

SEQ ID NO: 1305539 - RNA, 19 nt, Artificial Sequence
  Description of Artificial Sequence: Synthetic oligonucleotide
  Antisense strand to SEQ ID NO: 1305538
ucccacauaugacagagga

SEQ ID NO: 1305540 - RNA, 19 nt, Artificial Sequence
  Description of Artificial Sequence: Synthetic oligonucleotide
  Sense strand starting at position 856 of SEQ ID NO: 1241863
aguauuugauaacacggua

SEQ ID NO: 1305541 - RNA, 19 nt, Artificial Sequence
  Description of Artificial Sequence: Synthetic oligonucleotide
  Antisense strand to SEQ ID NO: 1305540
uaccguguuaucaaauacu

SEQ ID NO: 1305542 - RNA, 19 nt, Artificial Sequence
  Description of Artificial Sequence: Synthetic oligonucleotide
  Sense strand starting at position 984 of SEQ ID NO: 1241863
cuagcagauuuggaauguu

SEQ ID NO: 1305543 - RNA, 19 nt, Artificial Sequence
  Description of Artificial Sequence: Synthetic oligonucleotide
  Antisense strand to SEQ ID NO: 1305542
aacauuccaaaucugcuag

SEQ ID NO: 1305544 - RNA, 19 nt, Artificial Sequence
  Description of Artificial Sequence: Synthetic oligonucleotide
  Sense strand starting at position 1153 of SEQ ID NO: 1241863
cugaaaucacucugaguuu

SEQ ID NO: 1305545 - RNA, 19 nt, Artificial Sequence
  Description of Artificial Sequence: Synthetic oligonucleotide
  Antisense strand to SEQ ID NO: 1305544
aaacucagagugauuucag

SEQ ID NO: 1305546 - RNA, 19 nt, Artificial Sequence
  Description of Artificial Sequence: Synthetic oligonucleotide
  Sense strand starting at position 1196 of SEQ ID NO: 1241863
ggagcaacagcugaguaaa

SEQ ID NO: 1305547 - RNA, 19 nt, Artificial Sequence
  Description of Artificial Sequence: Synthetic oligonucleotide
  Antisense strand to SEQ ID NO: 1305546
uuuacucagcuguugcucc

SEQ ID NO: 1305548 - RNA, 19 nt, Artificial Sequence
  Description of Artificial Sequence: Synthetic oligonucleotide
  Sense strand starting at position 1235 of SEQ ID NO: 1241863
agguguugguaaucccaca

SEQ ID NO: 1305549 - RNA, 19 nt, Artificial Sequence
  Description of Artificial Sequence: Synthetic oligonucleotide
  Antisense strand to SEQ ID NO: 1305548
ugugggauuaccaacaccu

SEQ ID NO: 1305550 - RNA, 19 nt, Artificial Sequence
  Description of Artificial Sequence: Synthetic oligonucleotide
  Sense strand starting at position 1259 of SEQ ID NO: 1241863
accuguguuuccucauuua

SEQ ID NO: 1305551 - RNA, 19 nt, Artificial Sequence
  Description of Artificial Sequence: Synthetic oligonucleotide
  Antisense strand to SEQ ID NO: 1305550
uaaaugaggaaacacaggu

SEQ ID NO: 1305552 - RNA, 19 nt, Artificial Sequence
  Description of Artificial Sequence: Synthetic oligonucleotide
  Sense strand starting at position 1262 of SEQ ID NO: 1241863
uguguuuccucauuuacuu

SEQ ID NO: 1305553 - RNA, 19 nt, Artificial Sequence
  Description of Artificial Sequence: Synthetic oligonucleotide
  Antisense strand to SEQ ID NO: 1305552
aaguaaaugaggaaacaca

SEQ ID NO: 1305554 - RNA, 19 nt, Artificial Sequence
  Description of Artificial Sequence: Synthetic oligonucleotide
  Sense strand starting at position 1340 of SEQ ID NO: 1241863
gcuaauuguuaaccaggga

SEQ ID NO: 1305555 - RNA, 19 nt, Artificial Sequence
  Description of Artificial Sequence: Synthetic oligonucleotide
  Antisense strand to SEQ ID NO: 1305554
ucccugguuaacaauuagc

SEQ ID NO: 1305556 - RNA, 19 nt, Artificial Sequence
  Description of Artificial Sequence: Synthetic oligonucleotide
  Sense strand starting at position 1457 of SEQ ID NO: 1241863
agggauagcucagugcaaa

SEQ ID NO: 1305557 - RNA, 19 nt, Artificial Sequence
  Description of Artificial Sequence: Synthetic oligonucleotide
  Antisense strand to SEQ ID NO: 1305556
uuugcacugagcuaucccu

SEQ ID NO: 1305558 - RNA, 19 nt, Artificial Sequence
  Description of Artificial Sequence: Synthetic oligonucleotide
  Sense strand starting at position 1458 of SEQ ID NO: 1241863
gggauagcucagugcaaac

SEQ ID NO: 1305559 - RNA, 19 nt, Artificial Sequence
  Description of Artificial Sequence: Synthetic oligonucleotide
  Antisense strand to SEQ ID NO: 1305558
guuugcacugagcuauccc

SEQ ID NO: 1305560 - RNA, 19 nt, Artificial Sequence
  Description of Artificial Sequence: Synthetic oligonucleotide
  Sense strand starting at position 1520 of SEQ ID NO: 1241863
auaggugcacuguauacaa

SEQ ID NO: 1305561 - RNA, 19 nt, Artificial Sequence
  Description of Artificial Sequence: Synthetic oligonucleotide
  Antisense strand to SEQ ID NO: 1305560
uuguauacagugcaccuau

SEQ ID NO: 1305562 - RNA, 19 nt, Artificial Sequence
  Description of Artificial Sequence: Synthetic oligonucleotide
  Sense strand starting at position 1600 of SEQ ID NO: 1241863
gaagaaauguaccuuuaug

SEQ ID NO: 1305563 - RNA, 19 nt, Artificial Sequence
  Description of Artificial Sequence: Synthetic oligonucleotide
  Antisense strand to SEQ ID NO: 1305562
cauaaagguacauuucuuc

SEQ ID NO: 1305564 - RNA, 19 nt, Artificial Sequence
  Description of Artificial Sequence: Synthetic oligonucleotide
  Sense strand starting at position 1616 of SEQ ID NO: 1241863
augcuacuaucauugguca

SEQ ID NO: 1305565 - RNA, 19 nt, Artificial Sequence
  Description of Artificial Sequence: Synthetic oligonucleotide
  Antisense strand to SEQ ID NO: 1305564
ugaccaaugauaguagcau

SEQ ID NO: 1305566 - RNA, 19 nt, Artificial Sequence
  Description of Artificial Sequence: Synthetic oligonucleotide
  Sense strand starting at position 1617 of SEQ ID NO: 1241863
ugcuacuaucauuggucau

SEQ ID NO: 1305567 - RNA, 19 nt, Artificial Sequence
  Description of Artificial Sequence: Synthetic oligonucleotide
  Antisense strand to SEQ ID NO: 1305566
augaccaaugauaguagca

SEQ ID NO: 1305568 - RNA, 19 nt, Artificial Sequence
  Description of Artificial Sequence: Synthetic oligonucleotide
  Sense strand starting at position 1764 of SEQ ID NO: 1241863
ugugaaaccuuagucacca

SEQ ID NO: 1305569 - RNA, 19 nt, Artificial Sequence
  Description of Artificial Sequence: Synthetic oligonucleotide
  Antisense strand to SEQ ID NO: 1305568
uggugacuaagguuucaca

SEQ ID NO: 1305570 - RNA, 19 nt, Artificial Sequence
  Description of Artificial Sequence: Synthetic oligonucleotide
  Sense strand starting at position 1765 of SEQ ID NO: 1241863
gugaaaccuuagucaccaa

SEQ ID NO: 1305571 - RNA, 19 nt, Artificial Sequence
  Description of Artificial Sequence: Synthetic oligonucleotide
  Antisense strand to SEQ ID NO: 1305570
uuggugacuaagguuucac

SEQ ID NO: 1305572 - RNA, 19 nt, Artificial Sequence
  Description of Artificial Sequence: Synthetic oligonucleotide
  Sense strand starting at position 2185 of SEQ ID NO: 1241863
gcuucacugucagugagga

SEQ ID NO: 1305573 - RNA, 19 nt, Artificial Sequence
  Description of Artificial Sequence: Synthetic oligonucleotide
  Antisense strand to SEQ ID NO: 1305572
uccucacugacagugaagc

SEQ ID NO: 1305574 - RNA, 19 nt, Artificial Sequence
  Description of Artificial Sequence: Synthetic oligonucleotide
  Sense strand starting at position 2347 of SEQ ID NO: 1241863
gauggcuuccucuguggga

SEQ ID NO: 1305575 - RNA, 19 nt, Artificial Sequence
  Description of Artificial Sequence: Synthetic oligonucleotide
  Antisense strand to SEQ ID NO: 1305574
ucccacagaggaagccauc

SEQ ID NO: 1305576 - RNA, 19 nt, Artificial Sequence
  Description of Artificial Sequence: Synthetic oligonucleotide
  Sense strand starting at position 2348 of SEQ ID NO: 1241863
auggcuuccucugugggaa

SEQ ID NO: 1305577 - RNA, 19 nt, Artificial Sequence
  Description of Artificial Sequence: Synthetic oligonucleotide
  Antisense strand to SEQ ID NO: 1305576
uucccacagaggaagccau

SEQ ID NO: 1305578 - RNA, 19 nt, Artificial Sequence
  Description of Artificial Sequence: Synthetic oligonucleotide
  Sense strand starting at position 2349 of SEQ ID NO: 1241863
uggcuuccucugugggaau

SEQ ID NO: 1305579 - RNA, 19 nt, Artificial Sequence
  Description of Artificial Sequence: Synthetic oligonucleotide
  Antisense strand to SEQ ID NO: 1305578
auucccacagaggaagcca

SEQ ID NO: 1305580 - RNA, 19 nt, Artificial Sequence
  Description of Artificial Sequence: Synthetic oligonucleotide
  Sense strand starting at position 2351 of SEQ ID NO: 1241863
gcuuccucugugggaauca

SEQ ID NO: 1305581 - RNA, 19 nt, Artificial Sequence
  Description of Artificial Sequence: Synthetic oligonucleotide
  Antisense strand to SEQ ID NO: 1305580
ugauucccacagaggaagc

SEQ ID NO: 1305582 - RNA, 19 nt, Artificial Sequence
  Description of Artificial Sequence: Synthetic oligonucleotide
  Sense strand starting at position 2574 of SEQ ID NO: 1241863
ucucuuauggaugaaagcu

SEQ ID NO: 1305583 - RNA, 19 nt, Artificial Sequence
  Description of Artificial Sequence: Synthetic oligonucleotide
  Antisense strand to SEQ ID NO: 1305582
agcuuucauccauaagaga

SEQ ID NO: 1305584 - RNA, 19 nt, Artificial Sequence
  Description of Artificial Sequence: Synthetic oligonucleotide
  Sense strand starting at position 2604 of SEQ ID NO: 1241863
agugacauuuaguaggcaa

SEQ ID NO: 1305585 - RNA, 19 nt, Artificial Sequence
  Description of Artificial Sequence: Synthetic oligonucleotide
  Antisense strand to SEQ ID NO: 1305584
uugccuacuaaaugucacu

SEQ ID NO: 1305586 - RNA, 19 nt, Artificial Sequence
  Description of Artificial Sequence: Synthetic oligonucleotide
  Sense strand starting at position 2761 of SEQ ID NO: 1241863
gguuguuaaagcgggauua

SEQ ID NO: 1305587 - RNA, 19 nt, Artificial Sequence
  Description of Artificial Sequence: Synthetic oligonucleotide
  Antisense strand to SEQ ID NO: 1305586
uaaucccgcuuuaacaacc

SEQ ID NO: 1305588 - RNA, 19 nt, Artificial Sequence
  Description of Artificial Sequence: Synthetic oligonucleotide
  Sense strand starting at position 2763 of SEQ ID NO: 1241863
uuguuaaagcgggauuaga

SEQ ID NO: 1305589 - RNA, 19 nt, Artificial Sequence
  Description of Artificial Sequence: Synthetic oligonucleotide
  Antisense strand to SEQ ID NO: 1305588
ucuaaucccgcuuuaacaa

SEQ ID NO: 1305590 - RNA, 19 nt, Artificial Sequence
  Description of Artificial Sequence: Synthetic oligonucleotide
  Sense strand starting at position 2878 of SEQ ID NO: 1241863
gcaucagauuugccaguua

SEQ ID NO: 1305591 - RNA, 19 nt, Artificial Sequence
  Description of Artificial Sequence: Synthetic oligonucleotide
  Antisense strand to SEQ ID NO: 1305590
uaacuggcaaaucugaugc

SEQ ID NO: 1305592 - RNA, 19 nt, Artificial Sequence
  Description of Artificial Sequence: Synthetic oligonucleotide
  Sense strand starting at position 3080 of SEQ ID NO: 1241863
agagauggcuuucuuucuu

SEQ ID NO: 1305593 - RNA, 19 nt, Artificial Sequence
  Description of Artificial Sequence: Synthetic oligonucleotide
  Antisense strand to SEQ ID NO: 1305592
aagaaagaaagccaucucu

SEQ ID NO: 1305594 - RNA, 19 nt, Artificial Sequence
  Description of Artificial Sequence: Synthetic oligonucleotide
  Sense strand starting at position 3250 of SEQ ID NO: 1241863
gguaauucccuuuguuaaa

SEQ ID NO: 1305595 - RNA, 19 nt, Artificial Sequence
  Description of Artificial Sequence: Synthetic oligonucleotide
  Antisense strand to SEQ ID NO: 1305594
uuuaacaaagggaauuacc

SEQ ID NO: 1305596 - RNA, 19 nt, Artificial Sequence
  Description of Artificial Sequence: Synthetic oligonucleotide
  Sense strand starting at position 3251 of SEQ ID NO: 1241863
guaauucccuuuguuaaag

SEQ ID NO: 1305597 - RNA, 19 nt, Artificial Sequence
  Description of Artificial Sequence: Synthetic oligonucleotide
  Antisense strand to SEQ ID NO: 1305596
cuuuaacaaagggaauuac

SEQ ID NO: 1305598 - RNA, 19 nt, Artificial Sequence
  Description of Artificial Sequence: Synthetic oligonucleotide
  Sense strand starting at position 3302 of SEQ ID NO: 1241863
ccuauacuguuagugggaa

SEQ ID NO: 1305599 - RNA, 19 nt, Artificial Sequence
  Description of Artificial Sequence: Synthetic oligonucleotide
  Antisense strand to SEQ ID NO: 1305598
uucccacuaacaguauagg

SEQ ID NO: 1305600 - RNA, 19 nt, Artificial Sequence
  Description of Artificial Sequence: Synthetic oligonucleotide
  Sense strand starting at position 3347 of SEQ ID NO: 1241863
ggaaacugaguauaguagu

SEQ ID NO: 1305601 - RNA, 19 nt, Artificial Sequence
  Description of Artificial Sequence: Synthetic oligonucleotide
  Antisense strand to SEQ ID NO: 1305600
acuacuauacucaguuucc

SEQ ID NO: 1305602 - RNA, 19 nt, Artificial Sequence
  Description of Artificial Sequence: Synthetic oligonucleotide
  Sense strand starting at position 3357 of SEQ ID NO: 1241863
uauaguagugccuaucaag

SEQ ID NO: 1305603 - RNA, 19 nt, Artificial Sequence
  Description of Artificial Sequence: Synthetic oligonucleotide
  Antisense strand to SEQ ID NO: 1305602
cuugauaggcacuacuaua

SEQ ID NO: 1305604 - RNA, 19 nt, Artificial Sequence
  Description of Artificial Sequence: Synthetic oligonucleotide
  Sense strand starting at position 3599 of SEQ ID NO: 1241863
ggaaucaggucaucugagu

SEQ ID NO: 1305605 - RNA, 19 nt, Artificial Sequence
  Description of Artificial Sequence: Synthetic oligonucleotide
  Antisense strand to SEQ ID NO: 1305604
acucagaugaccugauucc

SEQ ID NO: 1305606 - RNA, 19 nt, Artificial Sequence
  Description of Artificial Sequence: Synthetic oligonucleotide
  Sense strand starting at position 3604 of SEQ ID NO: 1241863
caggucaucugaguuuagu

SEQ ID NO: 1305607 - RNA, 19 nt, Artificial Sequence
  Description of Artificial Sequence: Synthetic oligonucleotide
  Antisense strand to SEQ ID NO: 1305606
acuaaacucagaugaccug

SEQ ID NO: 1305608 - RNA, 19 nt, Artificial Sequence
  Description of Artificial Sequence: Synthetic oligonucleotide
  Sense strand starting at position 3691 of SEQ ID NO: 1241863
agaugaucauuauagaacu

SEQ ID NO: 1305609 - RNA, 19 nt, Artificial Sequence
  Description of Artificial Sequence: Synthetic oligonucleotide
  Antisense strand to SEQ ID NO: 1305608
aguucuauaaugaucaucu

SEQ ID NO: 1305610 - RNA, 19 nt, Artificial Sequence
  Description of Artificial Sequence: Synthetic oligonucleotide
  Sense strand starting at position 3901 of SEQ ID NO: 1241863
uuaaaugugcucgcuguuu

SEQ ID NO: 1305611 - RNA, 19 nt, Artificial Sequence
  Description of Artificial Sequence: Synthetic oligonucleotide
  Antisense strand to SEQ ID NO: 1305610
aaacagcgagcacauuuaa

SEQ ID NO: 1305612 - RNA, 19 nt, Artificial Sequence
  Description of Artificial Sequence: Synthetic oligonucleotide
  Sense strand starting at position 3981 of SEQ ID NO: 1241863
acuccugguguccauaaua

SEQ ID NO: 1305613 - RNA, 19 nt, Artificial Sequence
  Description of Artificial Sequence: Synthetic oligonucleotide
  Antisense strand to SEQ ID NO: 1305612
uauuauggacaccaggagu

SEQ ID NO: 1305614 - RNA, 19 nt, Artificial Sequence
  Description of Artificial Sequence: Synthetic oligonucleotide
  Sense strand starting at position 104 of SEQ ID NO: 1241864
agacacuuauuaguaaagu

SEQ ID NO: 1305615 - RNA, 19 nt, Artificial Sequence
  Description of Artificial Sequence: Synthetic oligonucleotide
  Antisense strand to SEQ ID NO: 1305614
acuuuacuaauaagugucu

SEQ ID NO: 1305616 - RNA, 19 nt, Artificial Sequence
  Description of Artificial Sequence: Synthetic oligonucleotide
  Sense strand starting at position 200 of SEQ ID NO: 1241864
aggaauaucuacuuuguuc

SEQ ID NO: 1305617 - RNA, 19 nt, Artificial Sequence
  Description of Artificial Sequence: Synthetic oligonucleotide
  Antisense strand to SEQ ID NO: 1305616
gaacaaaguagauauuccu

SEQ ID NO: 1305618 - RNA, 19 nt, Artificial Sequence
  Description of Artificial Sequence: Synthetic oligonucleotide
  Sense strand starting at position 228 of SEQ ID NO: 1241864
ugguaacugguucacgaaa

SEQ ID NO: 1305619 - RNA, 19 nt, Artificial Sequence
  Description of Artificial Sequence: Synthetic oligonucleotide
  Antisense strand to SEQ ID NO: 1305618
uuucgugaaccaguuacca

SEQ ID NO: 1305620 - RNA, 19 nt, Artificial Sequence
  Description of Artificial Sequence: Synthetic oligonucleotide
  Sense strand starting at position 485 of SEQ ID NO: 1241864
ugauauauagugggcacua

SEQ ID NO: 1305621 - RNA, 19 nt, Artificial Sequence
  Description of Artificial Sequence: Synthetic oligonucleotide
  Antisense strand to SEQ ID NO: 1305620
uagugcccacuauauauca

SEQ ID NO: 1305622 - RNA, 19 nt, Artificial Sequence
  Description of Artificial Sequence: Synthetic oligonucleotide
  Sense strand starting at position 518 of SEQ ID NO: 1241864
ucugucauuuaccuuaguu

SEQ ID NO: 1305623 - RNA, 19 nt, Artificial Sequence
  Description of Artificial Sequence: Synthetic oligonucleotide
  Antisense strand to SEQ ID NO: 1305622
aacuaagguaaaugacaga

SEQ ID NO: 1305624 - RNA, 19 nt, Artificial Sequence
  Description of Artificial Sequence: Synthetic oligonucleotide
  Sense strand starting at position 540 of SEQ ID NO: 1241864
gucaguuuacacgagguaa

SEQ ID NO: 1305625 - RNA, 19 nt, Artificial Sequence
  Description of Artificial Sequence: Synthetic oligonucleotide
  Antisense strand to SEQ ID NO: 1305624
uuaccucguguaaacugac

SEQ ID NO: 1305626 - RNA, 19 nt, Artificial Sequence
  Description of Artificial Sequence: Synthetic oligonucleotide
  Sense strand starting at position 542 of SEQ ID NO: 1241864
caguuuacacgagguaaac

SEQ ID NO: 1305627 - RNA, 19 nt, Artificial Sequence
  Description of Artificial Sequence: Synthetic oligonucleotide
  Antisense strand to SEQ ID NO: 1305626
guuuaccucguguaaacug

SEQ ID NO: 1305628 - RNA, 19 nt, Artificial Sequence
  Description of Artificial Sequence: Synthetic oligonucleotide
  Sense strand starting at position 675 of SEQ ID NO: 1241864
ucuguauugcuguauacaa

SEQ ID NO: 1305629 - RNA, 19 nt, Artificial Sequence
  Description of Artificial Sequence: Synthetic oligonucleotide
  Antisense strand to SEQ ID NO: 1305628
uuguauacagcaauacaga

SEQ ID NO: 1305630 - RNA, 19 nt, Artificial Sequence
  Description of Artificial Sequence: Synthetic oligonucleotide
  Sense strand starting at position 705 of SEQ ID NO: 1241864
agggauaucuuaucugcua

SEQ ID NO: 1305631 - RNA, 19 nt, Artificial Sequence
  Description of Artificial Sequence: Synthetic oligonucleotide
  Antisense strand to SEQ ID NO: 1305630
uagcagauaagauaucccu

SEQ ID NO: 1305632 - RNA, 19 nt, Artificial Sequence
  Description of Artificial Sequence: Synthetic oligonucleotide
  Sense strand starting at position 706 of SEQ ID NO: 1241864
gggauaucuuaucugcuau

SEQ ID NO: 1305633 - RNA, 19 nt, Artificial Sequence
  Description of Artificial Sequence: Synthetic oligonucleotide
  Antisense strand to SEQ ID NO: 1305632
auagcagauaagauauccc

SEQ ID NO: 1305634 - RNA, 19 nt, Artificial Sequence
  Description of Artificial Sequence: Synthetic oligonucleotide
  Sense strand starting at position 718 of SEQ ID NO: 1241864
cugcuaugcccucaagaua

SEQ ID NO: 1305635 - RNA, 19 nt, Artificial Sequence
  Description of Artificial Sequence: Synthetic oligonucleotide
  Antisense strand to SEQ ID NO: 1305634
uaucuugagggcauagcag

SEQ ID NO: 1305636 - RNA, 19 nt, Artificial Sequence
  Description of Artificial Sequence: Synthetic oligonucleotide
  Sense strand starting at position 789 of SEQ ID NO: 1241864
uaaaucagugugcauaaga

SEQ ID NO: 1305637 - RNA, 19 nt, Artificial Sequence
  Description of Artificial Sequence: Synthetic oligonucleotide
  Antisense strand to SEQ ID NO: 1305636
ucuuaugcacacugauuua

SEQ ID NO: 1305638 - RNA, 19 nt, Artificial Sequence
  Description of Artificial Sequence: Synthetic oligonucleotide
  Sense strand starting at position 797 of SEQ ID NO: 1241864
ugugcauaagaaugcagaa

SEQ ID NO: 1305639 - RNA, 19 nt, Artificial Sequence
  Description of Artificial Sequence: Synthetic oligonucleotide
  Antisense strand to SEQ ID NO: 1305638
uucugcauucuuaugcaca

SEQ ID NO: 1305640 - RNA, 19 nt, Artificial Sequence
  Description of Artificial Sequence: Synthetic oligonucleotide
  Sense strand starting at position 825 of SEQ ID NO: 1241864
ggucuuguccuacagaugu

SEQ ID NO: 1305641 - RNA, 19 nt, Artificial Sequence
  Description of Artificial Sequence: Synthetic oligonucleotide
  Antisense strand to SEQ ID NO: 1305640
acaucuguaggacaagacc

SEQ ID NO: 1305642 - RNA, 19 nt, Artificial Sequence
  Description of Artificial Sequence: Synthetic oligonucleotide
  Sense strand starting at position 882 of SEQ ID NO: 1241864
acuccuuuagcugagauau

SEQ ID NO: 1305643 - RNA, 19 nt, Artificial Sequence
  Description of Artificial Sequence: Synthetic oligonucleotide
  Antisense strand to SEQ ID NO: 1305642
auaucucagcuaaaggagu

SEQ ID NO: 1305644 - RNA, 19 nt, Artificial Sequence
  Description of Artificial Sequence: Synthetic oligonucleotide
  Sense strand starting at position 892 of SEQ ID NO: 1241864
cugagauaugguuagcuuu

SEQ ID NO: 1305645 - RNA, 19 nt, Artificial Sequence
  Description of Artificial Sequence: Synthetic oligonucleotide
  Antisense strand to SEQ ID NO: 1305644
aaagcuaaccauaucucag

SEQ ID NO: 1305646 - RNA, 19 nt, Artificial Sequence
  Description of Artificial Sequence: Synthetic oligonucleotide
  Sense strand starting at position 955 of SEQ ID NO: 1241864
uucuaugaaugugucaaua

SEQ ID NO: 1305647 - RNA, 19 nt, Artificial Sequence
  Description of Artificial Sequence: Synthetic oligonucleotide
  Antisense strand to SEQ ID NO: 1305646
uauugacacauucauagaa

SEQ ID NO: 1305648 - RNA, 19 nt, Artificial Sequence
  Description of Artificial Sequence: Synthetic oligonucleotide
  Sense strand starting at position 966 of SEQ ID NO: 1241864
ugucaauaagacugaugau

SEQ ID NO: 1305649 - RNA, 19 nt, Artificial Sequence
  Description of Artificial Sequence: Synthetic oligonucleotide
  Antisense strand to SEQ ID NO: 1305648
aucaucagucuuauugaca

SEQ ID NO: 1305650 - RNA, 19 nt, Artificial Sequence
  Description of Artificial Sequence: Synthetic oligonucleotide
  Sense strand starting at position 999 of SEQ ID NO: 1241864
ucagaacuugacugcucau

SEQ ID NO: 1305651 - RNA, 19 nt, Artificial Sequence
  Description of Artificial Sequence: Synthetic oligonucleotide
  Antisense strand to SEQ ID NO: 1305650
augagcagucaaguucuga

SEQ ID NO: 1305652 - RNA, 19 nt, Artificial Sequence
  Description of Artificial Sequence: Synthetic oligonucleotide
  Sense strand starting at position 1045 of SEQ ID NO: 1241864
agcccagugcucgcugauu

SEQ ID NO: 1305653 - RNA, 19 nt, Artificial Sequence
  Description of Artificial Sequence: Synthetic oligonucleotide
  Antisense strand to SEQ ID NO: 1305652
aaucagcgagcacugggcu

SEQ ID NO: 1305654 - RNA, 19 nt, Artificial Sequence
  Description of Artificial Sequence: Synthetic oligonucleotide
  Sense strand starting at position 1053 of SEQ ID NO: 1241864
gcucgcugauuucuacaca

SEQ ID NO: 1305655 - RNA, 19 nt, Artificial Sequence
  Description of Artificial Sequence: Synthetic oligonucleotide
  Antisense strand to SEQ ID NO: 1305654
uguguagaaaucagcgagc

SEQ ID NO: 1305656 - RNA, 19 nt, Artificial Sequence
  Description of Artificial Sequence: Synthetic oligonucleotide
  Sense strand starting at position 1087 of SEQ ID NO: 1241864
agagaacuacgcuauuaca

SEQ ID NO: 1305657 - RNA, 19 nt, Artificial Sequence
  Description of Artificial Sequence: Synthetic oligonucleotide
  Antisense strand to SEQ ID NO: 1305656
uguaauagcguaguucucu

SEQ ID NO: 1305658 - RNA, 19 nt, Artificial Sequence
  Description of Artificial Sequence: Synthetic oligonucleotide
  Sense strand starting at position 2323 of SEQ ID NO: 1241864
aaacguauguauuugcaua

SEQ ID NO: 1305659 - RNA, 19 nt, Artificial Sequence
  Description of Artificial Sequence: Synthetic oligonucleotide
  Antisense strand to SEQ ID NO: 1305658
uaugcaaauacauacguuu

SEQ ID NO: 1305660 - RNA, 19 nt, Artificial Sequence
  Description of Artificial Sequence: Synthetic oligonucleotide
  Sense strand starting at position 2500 of SEQ ID NO: 1241864
aagacaagaguuugugucu

SEQ ID NO: 1305661 - RNA, 19 nt, Artificial Sequence
  Description of Artificial Sequence: Synthetic oligonucleotide
  Antisense strand to SEQ ID NO: 1305660
agacacaaacucuugucuu

SEQ ID NO: 1305662 - RNA, 19 nt, Artificial Sequence
  Description of Artificial Sequence: Synthetic oligonucleotide
  Sense strand starting at position 2547 of SEQ ID NO: 1241864
gagagaacagugcgaaacu

SEQ ID NO: 1305663 - RNA, 19 nt, Artificial Sequence
  Description of Artificial Sequence: Synthetic oligonucleotide
  Antisense strand to SEQ ID NO: 1305662
aguuucgcacuguucucuc

SEQ ID NO: 1305664 - RNA, 19 nt, Artificial Sequence
  Description of Artificial Sequence: Synthetic oligonucleotide
  Sense strand starting at position 2637 of SEQ ID NO: 1241864
uauugagcacaugaguauu

SEQ ID NO: 1305665 - RNA, 19 nt, Artificial Sequence
  Description of Artificial Sequence: Synthetic oligonucleotide
  Antisense strand to SEQ ID NO: 1305664
aauacucaugugcucaaua

SEQ ID NO: 1305666 - RNA, 19 nt, Artificial Sequence
  Description of Artificial Sequence: Synthetic oligonucleotide
  Sense strand starting at position 2664 of SEQ ID NO: 1241864
auaacagcucuaugaggua

SEQ ID NO: 1305667 - RNA, 19 nt, Artificial Sequence
  Description of Artificial Sequence: Synthetic oligonucleotide
  Antisense strand to SEQ ID NO: 1305666
uaccucauagagcuguuau

SEQ ID NO: 1305668 - RNA, 19 nt, Artificial Sequence
  Description of Artificial Sequence: Synthetic oligonucleotide
  Sense strand starting at position 2669 of SEQ ID NO: 1241864
agcucuaugagguagggau

SEQ ID NO: 1305669 - RNA, 19 nt, Artificial Sequence
  Description of Artificial Sequence: Synthetic oligonucleotide
  Antisense strand to SEQ ID NO: 1305668
aucccuaccucauagagcu

SEQ ID NO: 1305670 - RNA, 19 nt, Artificial Sequence
  Description of Artificial Sequence: Synthetic oligonucleotide
  Sense strand starting at position 2684 of SEQ ID NO: 1241864
ggaugacugucauccuuau

SEQ ID NO: 1305671 - RNA, 19 nt, Artificial Sequence
  Description of Artificial Sequence: Synthetic oligonucleotide
  Antisense strand to SEQ ID NO: 1305670
auaaggaugacagucaucc

SEQ ID NO: 1305672 - RNA, 19 nt, Artificial Sequence
  Description of Artificial Sequence: Synthetic oligonucleotide
  Sense strand starting at position 2699 of SEQ ID NO: 1241864
uuauucugcagugagguaa

SEQ ID NO: 1305673 - RNA, 19 nt, Artificial Sequence
  Description of Artificial Sequence: Synthetic oligonucleotide
  Antisense strand to SEQ ID NO: 1305672
uuaccucacugcagaauaa

SEQ ID NO: 1305674 - RNA, 19 nt, Artificial Sequence
  Description of Artificial Sequence: Synthetic oligonucleotide
  Sense strand starting at position 2836 of SEQ ID NO: 1241864
gggaacaguugguuacaca

SEQ ID NO: 1305675 - RNA, 19 nt, Artificial Sequence
  Description of Artificial Sequence: Synthetic oligonucleotide
  Antisense strand to SEQ ID NO: 1305674
uguguaaccaacuguuccc

SEQ ID NO: 1305676 - RNA, 19 nt, Artificial Sequence
  Description of Artificial Sequence: Synthetic oligonucleotide
  Sense strand starting at position 2843 of SEQ ID NO: 1241864
guugguuacacagaugcau

SEQ ID NO: 1305677 - RNA, 19 nt, Artificial Sequence
  Description of Artificial Sequence: Synthetic oligonucleotide
  Antisense strand to SEQ ID NO: 1305676
augcaucuguguaaccaac

SEQ ID NO: 1305678 - RNA, 19 nt, Artificial Sequence
  Description of Artificial Sequence: Synthetic oligonucleotide
  Sense strand starting at position 2845 of SEQ ID NO: 1241864
ugguuacacagaugcauga

SEQ ID NO: 1305679 - RNA, 19 nt, Artificial Sequence
  Description of Artificial Sequence: Synthetic oligonucleotide
  Antisense strand to SEQ ID NO: 1305678
ucaugcaucuguguaacca

SEQ ID NO: 1305680 - RNA, 19 nt, Artificial Sequence
  Description of Artificial Sequence: Synthetic oligonucleotide
  Sense strand starting at position 2968 of SEQ ID NO: 1241864
gguucuuuccuauauccau

SEQ ID NO: 1305681 - RNA, 19 nt, Artificial Sequence
  Description of Artificial Sequence: Synthetic oligonucleotide
  Antisense strand to SEQ ID NO: 1305680
auggauauaggaaagaacc

SEQ ID NO: 1305682 - RNA, 19 nt, Artificial Sequence
  Description of Artificial Sequence: Synthetic oligonucleotide
  Sense strand starting at position 3039 of SEQ ID NO: 1241864
gugcuauguccugaaauua

SEQ ID NO: 1305683 - RNA, 19 nt, Artificial Sequence
  Description of Artificial Sequence: Synthetic oligonucleotide
  Antisense strand to SEQ ID NO: 1305682
uaauuucaggacauagcac

SEQ ID NO: 1305684 - RNA, 19 nt, Artificial Sequence
  Description of Artificial Sequence: Synthetic oligonucleotide
  Sense strand starting at position 3133 of SEQ ID NO: 1241864
gugaauagaugauuacagu

SEQ ID NO: 1305685 - RNA, 19 nt, Artificial Sequence
  Description of Artificial Sequence: Synthetic oligonucleotide
  Antisense strand to SEQ ID NO: 1305684
acuguaaucaucuauucac

SEQ ID NO: 1305686 - RNA, 19 nt, Artificial Sequence
  Description of Artificial Sequence: Synthetic oligonucleotide
  Sense strand starting at position 3262 of SEQ ID NO: 1241864
aaagccuaaugguugagua

SEQ ID NO: 1305687 - RNA, 19 nt, Artificial Sequence
  Description of Artificial Sequence: Synthetic oligonucleotide
  Antisense strand to SEQ ID NO: 1305686
uacucaaccauuaggcuuu

SEQ ID NO: 1305688 - RNA, 19 nt, Artificial Sequence
  Description of Artificial Sequence: Synthetic oligonucleotide
  Sense strand starting at position 3269 of SEQ ID NO: 1241864
aaugguugaguaggaguuu

SEQ ID NO: 1305689 - RNA, 19 nt, Artificial Sequence
  Description of Artificial Sequence: Synthetic oligonucleotide
  Antisense strand to SEQ ID NO: 1305688
aaacuccuacucaaccauu

SEQ ID NO: 1305690 - RNA, 19 nt, Artificial Sequence
  Description of Artificial Sequence: Synthetic oligonucleotide
  Sense strand starting at position 3443 of SEQ ID NO: 1241864
gggacuaauagcuggccua

SEQ ID NO: 1305691 - RNA, 19 nt, Artificial Sequence
  Description of Artificial Sequence: Synthetic oligonucleotide
  Antisense strand to SEQ ID NO: 1305690
uaggccagcuauuaguccc

SEQ ID NO: 1305692 - RNA, 19 nt, Artificial Sequence
  Description of Artificial Sequence: Synthetic oligonucleotide
  Sense strand starting at position 3598 of SEQ ID NO: 1241864
gguggauugccugagacau

SEQ ID NO: 1305693 - RNA, 19 nt, Artificial Sequence
  Description of Artificial Sequence: Synthetic oligonucleotide
  Antisense strand to SEQ ID NO: 1305692
augucucaggcaauccacc

SEQ ID NO: 1305694 - RNA, 19 nt, Artificial Sequence
  Description of Artificial Sequence: Synthetic oligonucleotide
  Sense strand starting at position 46 of SEQ ID NO: 1241865
aggcaaucaucauuacaug

SEQ ID NO: 1305695 - RNA, 19 nt, Artificial Sequence
  Description of Artificial Sequence: Synthetic oligonucleotide
  Antisense strand to SEQ ID NO: 1305694
cauguaaugaugauugccu

SEQ ID NO: 1305696 - RNA, 19 nt, Artificial Sequence
  Description of Artificial Sequence: Synthetic oligonucleotide
  Sense strand starting at position 47 of SEQ ID NO: 1241865
ggcaaucaucauuacaugu

SEQ ID NO: 1305697 - RNA, 19 nt, Artificial Sequence
  Description of Artificial Sequence: Synthetic oligonucleotide
  Antisense strand to SEQ ID NO: 1305696
acauguaaugaugauugcc

SEQ ID NO: 1305698 - RNA, 19 nt, Artificial Sequence
  Description of Artificial Sequence: Synthetic oligonucleotide
  Sense strand starting at position 81 of SEQ ID NO: 1241865
ccagaaauggucuaugcau

SEQ ID NO: 1305699 - RNA, 19 nt, Artificial Sequence
  Description of Artificial Sequence: Synthetic oligonucleotide
  Antisense strand to SEQ ID NO: 1305698
augcauagaccauuucugg

SEQ ID NO: 1305700 - RNA, 19 nt, Artificial Sequence
  Description of Artificial Sequence: Synthetic oligonucleotide
  Sense strand starting at position 193 of SEQ ID NO: 1241865
accaguaaugguggugaua

SEQ ID NO: 1305701 - RNA, 19 nt, Artificial Sequence
  Description of Artificial Sequence: Synthetic oligonucleotide
  Antisense strand to SEQ ID NO: 1305700
uaucaccaccauuacuggu

SEQ ID NO: 1305702 - RNA, 19 nt, Artificial Sequence
  Description of Artificial Sequence: Synthetic oligonucleotide
  Sense strand starting at position 196 of SEQ ID NO: 1241865
aguaaugguggugauauau

SEQ ID NO: 1305703 - RNA, 19 nt, Artificial Sequence
  Description of Artificial Sequence: Synthetic oligonucleotide
  Antisense strand to SEQ ID NO: 1305702
auauaucaccaccauuacu

SEQ ID NO: 1305704 - RNA, 19 nt, Artificial Sequence
  Description of Artificial Sequence: Synthetic oligonucleotide
  Sense strand starting at position 332 of SEQ ID NO: 1241865
auugccagguacuuagaaa

SEQ ID NO: 1305705 - RNA, 19 nt, Artificial Sequence
  Description of Artificial Sequence: Synthetic oligonucleotide
  Antisense strand to SEQ ID NO: 1305704
uuucuaaguaccuggcaau

SEQ ID NO: 1305706 - RNA, 19 nt, Artificial Sequence
  Description of Artificial Sequence: Synthetic oligonucleotide
  Sense strand starting at position 343 of SEQ ID NO: 1241865
cuuagaaagugcucaagau

SEQ ID NO: 1305707 - RNA, 19 nt, Artificial Sequence
  Description of Artificial Sequence: Synthetic oligonucleotide
  Antisense strand to SEQ ID NO: 1305706
aucuugagcacuuucuaag

SEQ ID NO: 1305708 - RNA, 19 nt, Artificial Sequence
  Description of Artificial Sequence: Synthetic oligonucleotide
  Sense strand starting at position 344 of SEQ ID NO: 1241865
uuagaaagugcucaagauc

SEQ ID NO: 1305709 - RNA, 19 nt, Artificial Sequence
  Description of Artificial Sequence: Synthetic oligonucleotide
  Antisense strand to SEQ ID NO: 1305708
gaucuugagcacuuucuaa

SEQ ID NO: 1305710 - RNA, 19 nt, Artificial Sequence
  Description of Artificial Sequence: Synthetic oligonucleotide
  Sense strand starting at position 347 of SEQ ID NO: 1241865
gaaagugcucaagaucucu

SEQ ID NO: 1305711 - RNA, 19 nt, Artificial Sequence
  Description of Artificial Sequence: Synthetic oligonucleotide
  Antisense strand to SEQ ID NO: 1305710
agagaucuugagcacuuuc

SEQ ID NO: 1305712 - RNA, 19 nt, Artificial Sequence
  Description of Artificial Sequence: Synthetic oligonucleotide
  Sense strand starting at position 373 of SEQ ID NO: 1241865
ucaacagucuugguaacca

SEQ ID NO: 1305713 - RNA, 19 nt, Artificial Sequence
  Description of Artificial Sequence: Synthetic oligonucleotide
  Antisense strand to SEQ ID NO: 1305712
ugguuaccaagacuguuga

SEQ ID NO: 1305714 - RNA, 19 nt, Artificial Sequence
  Description of Artificial Sequence: Synthetic oligonucleotide
  Sense strand starting at position 384 of SEQ ID NO: 1241865
gguaaccaucuuggauuau

SEQ ID NO: 1305715 - RNA, 19 nt, Artificial Sequence
  Description of Artificial Sequence: Synthetic oligonucleotide
  Antisense strand to SEQ ID NO: 1305714
auaauccaagaugguuacc

SEQ ID NO: 1305716 - RNA, 19 nt, Artificial Sequence
  Description of Artificial Sequence: Synthetic oligonucleotide
  Sense strand starting at position 396 of SEQ ID NO: 1241865
ggauuaucuuuauuaaugg

SEQ ID NO: 1305717 - RNA, 19 nt, Artificial Sequence
  Description of Artificial Sequence: Synthetic oligonucleotide
  Antisense strand to SEQ ID NO: 1305716
ccauuaauaaagauaaucc

SEQ ID NO: 1305718 - RNA, 19 nt, Artificial Sequence
  Description of Artificial Sequence: Synthetic oligonucleotide
  Sense strand starting at position 843 of SEQ ID NO: 1241865
ggaagcccucuguacgaaa

SEQ ID NO: 1305719 - RNA, 19 nt, Artificial Sequence
  Description of Artificial Sequence: Synthetic oligonucleotide
  Antisense strand to SEQ ID NO: 1305718
uuucguacagagggcuucc

SEQ ID NO: 1305720 - RNA, 19 nt, Artificial Sequence
  Description of Artificial Sequence: Synthetic oligonucleotide
  Sense strand starting at position 884 of SEQ ID NO: 1241865
caguuugcucuggagaauc

SEQ ID NO: 1305721 - RNA, 19 nt, Artificial Sequence
  Description of Artificial Sequence: Synthetic oligonucleotide
  Antisense strand to SEQ ID NO: 1305720
gauucuccagagcaaacug

SEQ ID NO: 1305722 - RNA, 19 nt, Artificial Sequence
  Description of Artificial Sequence: Synthetic oligonucleotide
  Sense strand starting at position 1065 of SEQ ID NO: 1241865
ucaucugugagaggcagaa

SEQ ID NO: 1305723 - RNA, 19 nt, Artificial Sequence
  Description of Artificial Sequence: Synthetic oligonucleotide
  Antisense strand to SEQ ID NO: 1305722
uucugccucucacagauga

SEQ ID NO: 1305724 - RNA, 19 nt, Artificial Sequence
  Description of Artificial Sequence: Synthetic oligonucleotide
  Sense strand starting at position 1098 of SEQ ID NO: 1241865
uuaucuauggcggaagaua

SEQ ID NO: 1305725 - RNA, 19 nt, Artificial Sequence
  Description of Artificial Sequence: Synthetic oligonucleotide
  Antisense strand to SEQ ID NO: 1305724
uaucuuccgccauagauaa

SEQ ID NO: 1305726 - RNA, 19 nt, Artificial Sequence
  Description of Artificial Sequence: Synthetic oligonucleotide
  Sense strand starting at position 1146 of SEQ ID NO: 1241865
acauaaaguccuuggcaca

SEQ ID NO: 1305727 - RNA, 19 nt, Artificial Sequence
  Description of Artificial Sequence: Synthetic oligonucleotide
  Antisense strand to SEQ ID NO: 1305726
ugugccaaggacuuuaugu

SEQ ID NO: 1305728 - RNA, 19 nt, Artificial Sequence
  Description of Artificial Sequence: Synthetic oligonucleotide
  Sense strand starting at position 1208 of SEQ ID NO: 1241865
gugacaugugaugggaaca

SEQ ID NO: 1305729 - RNA, 19 nt, Artificial Sequence
  Description of Artificial Sequence: Synthetic oligonucleotide
  Antisense strand to SEQ ID NO: 1305728
uguucccaucacaugucac

SEQ ID NO: 1305730 - RNA, 19 nt, Artificial Sequence
  Description of Artificial Sequence: Synthetic oligonucleotide
  Sense strand starting at position 1263 of SEQ ID NO: 1241865
ccaagcauucuacaaacgu

SEQ ID NO: 1305731 - RNA, 19 nt, Artificial Sequence
  Description of Artificial Sequence: Synthetic oligonucleotide
  Antisense strand to SEQ ID NO: 1305730
acguuuguagaaugcuugg

SEQ ID NO: 1305732 - RNA, 19 nt, Artificial Sequence
  Description of Artificial Sequence: Synthetic oligonucleotide
  Sense strand starting at position 1584 of SEQ ID NO: 1241865
cgcuuaucgacgcccuaaa

SEQ ID NO: 1305733 - RNA, 19 nt, Artificial Sequence
  Description of Artificial Sequence: Synthetic oligonucleotide
  Antisense strand to SEQ ID NO: 1305732
uuuagggcgucgauaagcg

SEQ ID NO: 1305734 - RNA, 19 nt, Artificial Sequence
  Description of Artificial Sequence: Synthetic oligonucleotide
  Sense strand starting at position 2122 of SEQ ID NO: 1241865
ucucgugauguuuaagaag

SEQ ID NO: 1305735 - RNA, 19 nt, Artificial Sequence
  Description of Artificial Sequence: Synthetic oligonucleotide
  Antisense strand to SEQ ID NO: 1305734
cuucuuaaacaucacgaga

SEQ ID NO: 1305736 - RNA, 19 nt, Artificial Sequence
  Description of Artificial Sequence: Synthetic oligonucleotide
  Sense strand starting at position 2157 of SEQ ID NO: 1241865
gugaguuugcugucuguac

SEQ ID NO: 1305737 - RNA, 19 nt, Artificial Sequence
  Description of Artificial Sequence: Synthetic oligonucleotide
  Antisense strand to SEQ ID NO: 1305736
guacagacagcaaacucac

SEQ ID NO: 1305738 - RNA, 19 nt, Artificial Sequence
  Description of Artificial Sequence: Synthetic oligonucleotide
  Sense strand starting at position 2407 of SEQ ID NO: 1241865
aggagaacuucuguuuaua

SEQ ID NO: 1305739 - RNA, 19 nt, Artificial Sequence
  Description of Artificial Sequence: Synthetic oligonucleotide
  Antisense strand to SEQ ID NO: 1305738
uauaaacagaaguucuccu

SEQ ID NO: 1305740 - RNA, 19 nt, Artificial Sequence
  Description of Artificial Sequence: Synthetic oligonucleotide
  Sense strand starting at position 2423 of SEQ ID NO: 1241865
auaacuacagcuugggaau

SEQ ID NO: 1305741 - RNA, 19 nt, Artificial Sequence
  Description of Artificial Sequence: Synthetic oligonucleotide
  Antisense strand to SEQ ID NO: 1305740
auucccaagcuguaguuau

SEQ ID NO: 1305742 - RNA, 19 nt, Artificial Sequence
  Description of Artificial Sequence: Synthetic oligonucleotide
  Sense strand starting at position 2436 of SEQ ID NO: 1241865
gggaauucccugcaggguu

SEQ ID NO: 1305743 - RNA, 19 nt, Artificial Sequence
  Description of Artificial Sequence: Synthetic oligonucleotide
  Antisense strand to SEQ ID NO: 1305742
aacccugcagggaauuccc

SEQ ID NO: 1305744 - RNA, 19 nt, Artificial Sequence
  Description of Artificial Sequence: Synthetic oligonucleotide
  Sense strand starting at position 2456 of SEQ ID NO: 1241865
cuccauucucuggguaaga

SEQ ID NO: 1305745 - RNA, 19 nt, Artificial Sequence
  Description of Artificial Sequence: Synthetic oligonucleotide
  Antisense strand to SEQ ID NO: 1305744
ucuuacccagagaauggag

SEQ ID NO: 1305746 - RNA, 19 nt, Artificial Sequence
  Description of Artificial Sequence: Synthetic oligonucleotide
  Sense strand starting at position 2457 of SEQ ID NO: 1241865
uccauucucuggguaagaa

SEQ ID NO: 1305747 - RNA, 19 nt, Artificial Sequence
  Description of Artificial Sequence: Synthetic oligonucleotide
  Antisense strand to SEQ ID NO: 1305746
uucuuacccagagaaugga

SEQ ID NO: 1305748 - RNA, 19 nt, Artificial Sequence
  Description of Artificial Sequence: Synthetic oligonucleotide
  Sense strand starting at position 2521 of SEQ ID NO: 1241865
gugaaagaguaccuuucuu

SEQ ID NO: 1305749 - RNA, 19 nt, Artificial Sequence
  Description of Artificial Sequence: Synthetic oligonucleotide
  Antisense strand to SEQ ID NO: 1305748
aagaaagguacucuuucac

SEQ ID NO: 1305750 - RNA, 19 nt, Artificial Sequence
  Description of Artificial Sequence: Synthetic oligonucleotide
  Sense strand starting at position 2606 of SEQ ID NO: 1241865
cuugcuguuuagguaauuu

SEQ ID NO: 1305751 - RNA, 19 nt, Artificial Sequence
  Description of Artificial Sequence: Synthetic oligonucleotide
  Antisense strand to SEQ ID NO: 1305750
aaauuaccuaaacagcaag

SEQ ID NO: 1305752 - RNA, 19 nt, Artificial Sequence
  Description of Artificial Sequence: Synthetic oligonucleotide
  Sense strand starting at position 3014 of SEQ ID NO: 1241865
agccaaggacguuaaacau

SEQ ID NO: 1305753 - RNA, 19 nt, Artificial Sequence
  Description of Artificial Sequence: Synthetic oligonucleotide
  Antisense strand to SEQ ID NO: 1305752
auguuuaacguccuuggcu

SEQ ID NO: 1305754 - RNA, 19 nt, Artificial Sequence
  Description of Artificial Sequence: Synthetic oligonucleotide
  Sense strand starting at position 3099 of SEQ ID NO: 1241865
ggugguggaguccacagau

SEQ ID NO: 1305755 - RNA, 19 nt, Artificial Sequence
  Description of Artificial Sequence: Synthetic oligonucleotide
  Antisense strand to SEQ ID NO: 1305754
aucuguggacuccaccacc

SEQ ID NO: 1305756 - RNA, 19 nt, Artificial Sequence
  Description of Artificial Sequence: Synthetic oligonucleotide
  Sense strand starting at position 3170 of SEQ ID NO: 1241865
ggcagagaucuuggaaguc

SEQ ID NO: 1305757 - RNA, 19 nt, Artificial Sequence
  Description of Artificial Sequence: Synthetic oligonucleotide
  Antisense strand to SEQ ID NO: 1305756
gacuuccaagaucucugcc

SEQ ID NO: 1305758 - RNA, 19 nt, Artificial Sequence
  Description of Artificial Sequence: Synthetic oligonucleotide
  Sense strand starting at position 3179 of SEQ ID NO: 1241865
cuuggaagucaccaugguu

SEQ ID NO: 1305759 - RNA, 19 nt, Artificial Sequence
  Description of Artificial Sequence: Synthetic oligonucleotide
  Antisense strand to SEQ ID NO: 1305758
aaccauggugacuuccaag

SEQ ID NO: 1305760 - RNA, 19 nt, Artificial Sequence
  Description of Artificial Sequence: Synthetic oligonucleotide
  Sense strand starting at position 3279 of SEQ ID NO: 1241865
ugauaaucuuuauugugga

SEQ ID NO: 1305761 - RNA, 19 nt, Artificial Sequence
  Description of Artificial Sequence: Synthetic oligonucleotide
  Antisense strand to SEQ ID NO: 1305760
uccacaauaaagauuauca

SEQ ID NO: 1305762 - RNA, 19 nt, Artificial Sequence
  Description of Artificial Sequence: Synthetic oligonucleotide
  Sense strand starting at position 3319 of SEQ ID NO: 1241865
augcaauacucuccaugga

SEQ ID NO: 1305763 - RNA, 19 nt, Artificial Sequence
  Description of Artificial Sequence: Synthetic oligonucleotide
  Antisense strand to SEQ ID NO: 1305762
uccauggagaguauugcau

SEQ ID NO: 1305764 - RNA, 19 nt, Artificial Sequence
  Description of Artificial Sequence: Synthetic oligonucleotide
  Sense strand starting at position 3498 of SEQ ID NO: 1241865
cuaaauguaugaguuaaga

SEQ ID NO: 1305765 - RNA, 19 nt, Artificial Sequence
  Description of Artificial Sequence: Synthetic oligonucleotide
  Antisense strand to SEQ ID NO: 1305764
ucuuaacucauacauuuag

SEQ ID NO: 1305766 - RNA, 19 nt, Artificial Sequence
  Description of Artificial Sequence: Synthetic oligonucleotide
  Sense strand starting at position 3562 of SEQ ID NO: 1241865
gcacuaaaggccugaaaug

SEQ ID NO: 1305767 - RNA, 19 nt, Artificial Sequence
  Description of Artificial Sequence: Synthetic oligonucleotide
  Antisense strand to SEQ ID NO: 1305766
cauuucaggccuuuagugc

SEQ ID NO: 1305768 - RNA, 19 nt, Artificial Sequence
  Description of Artificial Sequence: Synthetic oligonucleotide
  Sense strand starting at position 3563 of SEQ ID NO: 1241865
cacuaaaggccugaaaugu

SEQ ID NO: 1305769 - RNA, 19 nt, Artificial Sequence
  Description of Artificial Sequence: Synthetic oligonucleotide
  Antisense strand to SEQ ID NO: 1305768
acauuucaggccuuuagug

SEQ ID NO: 1305770 - RNA, 19 nt, Artificial Sequence
  Description of Artificial Sequence: Synthetic oligonucleotide
  Sense strand starting at position 3607 of SEQ ID NO: 1241865
gccuuagaaguuuagcaag

SEQ ID NO: 1305771 - RNA, 19 nt, Artificial Sequence
  Description of Artificial Sequence: Synthetic oligonucleotide
  Antisense strand to SEQ ID NO: 1305770
cuugcuaaacuucuaaggc

SEQ ID NO: 1305772 - RNA, 19 nt, Artificial Sequence
  Description of Artificial Sequence: Synthetic oligonucleotide
  Sense strand starting at position 3697 of SEQ ID NO: 1241865
acagauagauucugauuua

SEQ ID NO: 1305773 - RNA, 19 nt, Artificial Sequence
  Description of Artificial Sequence: Synthetic oligonucleotide
  Antisense strand to SEQ ID NO: 1305772
uaaaucagaaucuaucugu

SEQ ID NO: 1305774 - RNA, 19 nt, Artificial Sequence
  Description of Artificial Sequence: Synthetic oligonucleotide
  Sense strand starting at position 1599 of SEQ ID NO: 1241866
gucugugaguccuugacac

SEQ ID NO: 1305775 - RNA, 19 nt, Artificial Sequence
  Description of Artificial Sequence: Synthetic oligonucleotide
  Antisense strand to SEQ ID NO: 1305774
gugucaaggacucacagac

SEQ ID NO: 1305776 - RNA, 19 nt, Artificial Sequence
  Description of Artificial Sequence: Synthetic oligonucleotide
  Sense strand starting at position 1986 of SEQ ID NO: 1241866
guagguucucgagaaaugc

SEQ ID NO: 1305777 - RNA, 19 nt, Artificial Sequence
  Description of Artificial Sequence: Synthetic oligonucleotide
  Antisense strand to SEQ ID NO: 1305776
gcauuucucgagaaccuac

SEQ ID NO: 1305778 - RNA, 19 nt, Artificial Sequence
  Description of Artificial Sequence: Synthetic oligonucleotide
  Sense strand starting at position 1994 of SEQ ID NO: 1241866
ucgagaaaugcugaguuca

SEQ ID NO: 1305779 - RNA, 19 nt, Artificial Sequence
  Description of Artificial Sequence: Synthetic oligonucleotide
  Antisense strand to SEQ ID NO: 1305778
ugaacucagcauuucucga

SEQ ID NO: 1305780 - RNA, 19 nt, Artificial Sequence
  Description of Artificial Sequence: Synthetic oligonucleotide
  Sense strand starting at position 2334 of SEQ ID NO: 1241866
agccaauauggcugggaaa

SEQ ID NO: 1305781 - RNA, 19 nt, Artificial Sequence
  Description of Artificial Sequence: Synthetic oligonucleotide
  Antisense strand to SEQ ID NO: 1305780
uuucccagccauauuggcu

SEQ ID NO: 1305782 - RNA, 19 nt, Artificial Sequence
  Description of Artificial Sequence: Synthetic oligonucleotide
  Sense strand starting at position 2335 of SEQ ID NO: 1241866
gccaauauggcugggaaac

SEQ ID NO: 1305783 - RNA, 19 nt, Artificial Sequence
  Description of Artificial Sequence: Synthetic oligonucleotide
  Antisense strand to SEQ ID NO: 1305782
guuucccagccauauuggc

SEQ ID NO: 1305784 - RNA, 19 nt, Artificial Sequence
  Description of Artificial Sequence: Synthetic oligonucleotide
  Sense strand starting at position 2336 of SEQ ID NO: 1241866
ccaauauggcugggaaaca

SEQ ID NO: 1305785 - RNA, 19 nt, Artificial Sequence
  Description of Artificial Sequence: Synthetic oligonucleotide
  Antisense strand to SEQ ID NO: 1305784
uguuucccagccauauugg

SEQ ID NO: 1305786 - RNA, 19 nt, Artificial Sequence
  Description of Artificial Sequence: Synthetic oligonucleotide
  Sense strand starting at position 2337 of SEQ ID NO: 1241866
caauauggcugggaaacaa

SEQ ID NO: 1305787 - RNA, 19 nt, Artificial Sequence
  Description of Artificial Sequence: Synthetic oligonucleotide
  Antisense strand to SEQ ID NO: 1305786
uuguuucccagccauauug

SEQ ID NO: 1305788 - RNA, 19 nt, Artificial Sequence
  Description of Artificial Sequence: Synthetic oligonucleotide
  Sense strand starting at position 2460 of SEQ ID NO: 1241866
gggaaagugugugaaugga

SEQ ID NO: 1305789 - RNA, 19 nt, Artificial Sequence
  Description of Artificial Sequence: Synthetic oligonucleotide
  Antisense strand to SEQ ID NO: 1305788
uccauucacacacuuuccc

SEQ ID NO: 1305790 - RNA, 19 nt, Artificial Sequence
  Description of Artificial Sequence: Synthetic oligonucleotide
  Sense strand starting at position 2501 of SEQ ID NO: 1241866
acggaaaugucucgaaggu

SEQ ID NO: 1305791 - RNA, 19 nt, Artificial Sequence
  Description of Artificial Sequence: Synthetic oligonucleotide
  Antisense strand to SEQ ID NO: 1305790
accuucgagacauuuccgu

SEQ ID NO: 1305792 - RNA, 19 nt, Artificial Sequence
  Description of Artificial Sequence: Synthetic oligonucleotide
  Sense strand starting at position 2502 of SEQ ID NO: 1241866
cggaaaugucucgaagguc

SEQ ID NO: 1305793 - RNA, 19 nt, Artificial Sequence
  Description of Artificial Sequence: Synthetic oligonucleotide
  Antisense strand to SEQ ID NO: 1305792
gaccuucgagacauuuccg

SEQ ID NO: 1305794 - RNA, 19 nt, Artificial Sequence
  Description of Artificial Sequence: Synthetic oligonucleotide
  Sense strand starting at position 2753 of SEQ ID NO: 1241866
gucagagauugguggugga

SEQ ID NO: 1305795 - RNA, 19 nt, Artificial Sequence
  Description of Artificial Sequence: Synthetic oligonucleotide
  Antisense strand to SEQ ID NO: 1305794
uccaccaccaaucucugac

SEQ ID NO: 1305796 - RNA, 19 nt, Artificial Sequence
  Description of Artificial Sequence: Synthetic oligonucleotide
  Sense strand starting at position 2970 of SEQ ID NO: 1241866
ccacguucagccgaggaaa

SEQ ID NO: 1305797 - RNA, 19 nt, Artificial Sequence
  Description of Artificial Sequence: Synthetic oligonucleotide
  Antisense strand to SEQ ID NO: 1305796
uuuccucggcugaacgugg

SEQ ID NO: 1305798 - RNA, 19 nt, Artificial Sequence
  Description of Artificial Sequence: Synthetic oligonucleotide
  Sense strand starting at position 3276 of SEQ ID NO: 1241866
aaguguuccuccugugcca

SEQ ID NO: 1305799 - RNA, 19 nt, Artificial Sequence
  Description of Artificial Sequence: Synthetic oligonucleotide
  Antisense strand to SEQ ID NO: 1305798
uggcacaggaggaacacuu

SEQ ID NO: 1305800 - RNA, 19 nt, Artificial Sequence
  Description of Artificial Sequence: Synthetic oligonucleotide
  Sense strand starting at position 3522 of SEQ ID NO: 1241866
ccuguaaccuuuccugagu

SEQ ID NO: 1305801 - RNA, 19 nt, Artificial Sequence
  Description of Artificial Sequence: Synthetic oligonucleotide
  Antisense strand to SEQ ID NO: 1305800
acucaggaaagguuacagg

SEQ ID NO: 1305802 - RNA, 19 nt, Artificial Sequence
  Description of Artificial Sequence: Synthetic oligonucleotide
  Sense strand starting at position 3524 of SEQ ID NO: 1241866
uguaaccuuuccugaguga

SEQ ID NO: 1305803 - RNA, 19 nt, Artificial Sequence
  Description of Artificial Sequence: Synthetic oligonucleotide
  Antisense strand to SEQ ID NO: 1305802
ucacucaggaaagguuaca

SEQ ID NO: 1305804 - RNA, 19 nt, Artificial Sequence
  Description of Artificial Sequence: Synthetic oligonucleotide
  Sense strand starting at position 3525 of SEQ ID NO: 1241866
guaaccuuuccugagugaa

SEQ ID NO: 1305805 - RNA, 19 nt, Artificial Sequence
  Description of Artificial Sequence: Synthetic oligonucleotide
  Antisense strand to SEQ ID NO: 1305804
uucacucaggaaagguuac

SEQ ID NO: 1305806 - RNA, 19 nt, Artificial Sequence
  Description of Artificial Sequence: Synthetic oligonucleotide
  Sense strand starting at position 3527 of SEQ ID NO: 1241866
aaccuuuccugagugaaug

SEQ ID NO: 1305807 - RNA, 19 nt, Artificial Sequence
  Description of Artificial Sequence: Synthetic oligonucleotide
  Antisense strand to SEQ ID NO: 1305806
cauucacucaggaaagguu

SEQ ID NO: 1305808 - RNA, 19 nt, Artificial Sequence
  Description of Artificial Sequence: Synthetic oligonucleotide
  Sense strand starting at position 3650 of SEQ ID NO: 1241866
ggguuuggcacuuggugua

SEQ ID NO: 1305809 - RNA, 19 nt, Artificial Sequence
  Description of Artificial Sequence: Synthetic oligonucleotide
  Antisense strand to SEQ ID NO: 1305808
uacaccaagugccaaaccc

SEQ ID NO: 1305810 - RNA, 19 nt, Artificial Sequence
  Description of Artificial Sequence: Synthetic oligonucleotide
  Sense strand starting at position 3653 of SEQ ID NO: 1241866
uuuggcacuugguguagaa

SEQ ID NO: 1305811 - RNA, 19 nt, Artificial Sequence
  Description of Artificial Sequence: Synthetic oligonucleotide
  Antisense strand to SEQ ID NO: 1305810
uucuacaccaagugccaaa

SEQ ID NO: 1305812 - RNA, 19 nt, Artificial Sequence
  Description of Artificial Sequence: Synthetic oligonucleotide
  Sense strand starting at position 3687 of SEQ ID NO: 1241866
ucgggucuccggagucuuu

SEQ ID NO: 1305813 - RNA, 19 nt, Artificial Sequence
  Description of Artificial Sequence: Synthetic oligonucleotide
  Antisense strand to SEQ ID NO: 1305812
aaagacuccggagacccga

SEQ ID NO: 1305814 - RNA, 19 nt, Artificial Sequence
  Description of Artificial Sequence: Synthetic oligonucleotide
  Sense strand starting at position 48 of SEQ ID NO: 1241867
ucugaaacagccugaguuu

SEQ ID NO: 1305815 - RNA, 19 nt, Artificial Sequence
  Description of Artificial Sequence: Synthetic oligonucleotide
  Antisense strand to SEQ ID NO: 1305814
aaacucaggcuguuucaga

SEQ ID NO: 1305816 - RNA, 19 nt, Artificial Sequence
  Description of Artificial Sequence: Synthetic oligonucleotide
  Sense strand starting at position 61 of SEQ ID NO: 1241867
gaguuucccuguccuuaug

SEQ ID NO: 1305817 - RNA, 19 nt, Artificial Sequence
  Description of Artificial Sequence: Synthetic oligonucleotide
  Antisense strand to SEQ ID NO: 1305816
cauaaggacagggaaacuc

SEQ ID NO: 1305818 - RNA, 19 nt, Artificial Sequence
  Description of Artificial Sequence: Synthetic oligonucleotide
  Sense strand starting at position 63 of SEQ ID NO: 1241867
guuucccuguccuuaugau

SEQ ID NO: 1305819 - RNA, 19 nt, Artificial Sequence
  Description of Artificial Sequence: Synthetic oligonucleotide
  Antisense strand to SEQ ID NO: 1305818
aucauaaggacagggaaac

SEQ ID NO: 1305820 - RNA, 19 nt, Artificial Sequence
  Description of Artificial Sequence: Synthetic oligonucleotide
  Sense strand starting at position 123 of SEQ ID NO: 1241867
gggagcucugaaugaguuu

SEQ ID NO: 1305821 - RNA, 19 nt, Artificial Sequence
  Description of Artificial Sequence: Synthetic oligonucleotide
  Antisense strand to SEQ ID NO: 1305820
aaacucauucagagcuccc

SEQ ID NO: 1305822 - RNA, 19 nt, Artificial Sequence
  Description of Artificial Sequence: Synthetic oligonucleotide
  Sense strand starting at position 211 of SEQ ID NO: 1241867
gccagugguuccuaagcau

SEQ ID NO: 1305823 - RNA, 19 nt, Artificial Sequence
  Description of Artificial Sequence: Synthetic oligonucleotide
  Antisense strand to SEQ ID NO: 1305822
augcuuaggaaccacuggc

SEQ ID NO: 1305824 - RNA, 19 nt, Artificial Sequence
  Description of Artificial Sequence: Synthetic oligonucleotide
  Sense strand starting at position 335 of SEQ ID NO: 1241867
gaaagucucagguggcaca

SEQ ID NO: 1305825 - RNA, 19 nt, Artificial Sequence
  Description of Artificial Sequence: Synthetic oligonucleotide
  Antisense strand to SEQ ID NO: 1305824
ugugccaccugagacuuuc

SEQ ID NO: 1305826 - RNA, 19 nt, Artificial Sequence
  Description of Artificial Sequence: Synthetic oligonucleotide
  Sense strand starting at position 388 of SEQ ID NO: 1241867
uuaaauuccugccuggauu

SEQ ID NO: 1305827 - RNA, 19 nt, Artificial Sequence
  Description of Artificial Sequence: Synthetic oligonucleotide
  Antisense strand to SEQ ID NO: 1305826
aauccaggcaggaauuuaa

SEQ ID NO: 1305828 - RNA, 19 nt, Artificial Sequence
  Description of Artificial Sequence: Synthetic oligonucleotide
  Sense strand starting at position 438 of SEQ ID NO: 1241867
guaccuuuguggcuaagga

SEQ ID NO: 1305829 - RNA, 19 nt, Artificial Sequence
  Description of Artificial Sequence: Synthetic oligonucleotide
  Antisense strand to SEQ ID NO: 1305828
uccuuagccacaaagguac

SEQ ID NO: 1305830 - RNA, 19 nt, Artificial Sequence
  Description of Artificial Sequence: Synthetic oligonucleotide
  Sense strand starting at position 439 of SEQ ID NO: 1241867
uaccuuuguggcuaaggaa

SEQ ID NO: 1305831 - RNA, 19 nt, Artificial Sequence
  Description of Artificial Sequence: Synthetic oligonucleotide
  Antisense strand to SEQ ID NO: 1305830
uuccuuagccacaaaggua

SEQ ID NO: 1305832 - RNA, 19 nt, Artificial Sequence
  Description of Artificial Sequence: Synthetic oligonucleotide
  Sense strand starting at position 504 of SEQ ID NO: 1241867
gggugucucuuguccuaau

SEQ ID NO: 1305833 - RNA, 19 nt, Artificial Sequence
  Description of Artificial Sequence: Synthetic oligonucleotide
  Antisense strand to SEQ ID NO: 1305832
auuaggacaagagacaccc

SEQ ID NO: 1305834 - RNA, 19 nt, Artificial Sequence
  Description of Artificial Sequence: Synthetic oligonucleotide
  Sense strand starting at position 541 of SEQ ID NO: 1241867
uucuaacacugucgacaau

SEQ ID NO: 1305835 - RNA, 19 nt, Artificial Sequence
  Description of Artificial Sequence: Synthetic oligonucleotide
  Antisense strand to SEQ ID NO: 1305834
auugucgacaguguuagaa

SEQ ID NO: 1305836 - RNA, 19 nt, Artificial Sequence
  Description of Artificial Sequence: Synthetic oligonucleotide
  Sense strand starting at position 585 of SEQ ID NO: 1241867
ggguuagacuucugccugu

SEQ ID NO: 1305837 - RNA, 19 nt, Artificial Sequence
  Description of Artificial Sequence: Synthetic oligonucleotide
  Antisense strand to SEQ ID NO: 1305836
acaggcagaagucuaaccc

SEQ ID NO: 1305838 - RNA, 19 nt, Artificial Sequence
  Description of Artificial Sequence: Synthetic oligonucleotide
  Sense strand starting at position 605 of SEQ ID NO: 1241867
ggcagacucugcuuguuga

SEQ ID NO: 1305839 - RNA, 19 nt, Artificial Sequence
  Description of Artificial Sequence: Synthetic oligonucleotide
  Antisense strand to SEQ ID NO: 1305838
ucaacaagcagagucugcc

SEQ ID NO: 1305840 - RNA, 19 nt, Artificial Sequence
  Description of Artificial Sequence: Synthetic oligonucleotide
  Sense strand starting at position 606 of SEQ ID NO: 1241867
gcagacucugcuuguugaa

SEQ ID NO: 1305841 - RNA, 19 nt, Artificial Sequence
  Description of Artificial Sequence: Synthetic oligonucleotide
  Antisense strand to SEQ ID NO: 1305840
uucaacaagcagagucugc

SEQ ID NO: 1305842 - RNA, 19 nt, Artificial Sequence
  Description of Artificial Sequence: Synthetic oligonucleotide
  Sense strand starting at position 3029 of SEQ ID NO: 1241867
gucugugaguccuugacac

SEQ ID NO: 1305843 - RNA, 19 nt, Artificial Sequence
  Description of Artificial Sequence: Synthetic oligonucleotide
  Antisense strand to SEQ ID NO: 1305842
gugucaaggacucacagac

SEQ ID NO: 1305844 - RNA, 19 nt, Artificial Sequence
  Description of Artificial Sequence: Synthetic oligonucleotide
  Sense strand starting at position 3416 of SEQ ID NO: 1241867
guagguucucgagaaaugc

SEQ ID NO: 1305845 - RNA, 19 nt, Artificial Sequence
  Description of Artificial Sequence: Synthetic oligonucleotide
  Antisense strand to SEQ ID NO: 1305844
gcauuucucgagaaccuac

SEQ ID NO: 1305846 - RNA, 19 nt, Artificial Sequence
  Description of Artificial Sequence: Synthetic oligonucleotide
  Sense strand starting at position 3424 of SEQ ID NO: 1241867
ucgagaaaugcugaguuca

SEQ ID NO: 1305847 - RNA, 19 nt, Artificial Sequence
  Description of Artificial Sequence: Synthetic oligonucleotide
  Antisense strand to SEQ ID NO: 1305846
ugaacucagcauuucucga

SEQ ID NO: 1305848 - RNA, 19 nt, Artificial Sequence
  Description of Artificial Sequence: Synthetic oligonucleotide
  Sense strand starting at position 3764 of SEQ ID NO: 1241867
agccaauauggcugggaaa

SEQ ID NO: 1305849 - RNA, 19 nt, Artificial Sequence
  Description of Artificial Sequence: Synthetic oligonucleotide
  Antisense strand to SEQ ID NO: 1305848
uuucccagccauauuggcu

SEQ ID NO: 1305850 - RNA, 19 nt, Artificial Sequence
  Description of Artificial Sequence: Synthetic oligonucleotide
  Sense strand starting at position 3765 of SEQ ID NO: 1241867
gccaauauggcugggaaac

SEQ ID NO: 1305851 - RNA, 19 nt, Artificial Sequence
  Description of Artificial Sequence: Synthetic oligonucleotide
  Antisense strand to SEQ ID NO: 1305850
guuucccagccauauuggc

SEQ ID NO: 1305852 - RNA, 19 nt, Artificial Sequence
  Description of Artificial Sequence: Synthetic oligonucleotide
  Sense strand starting at position 3766 of SEQ ID NO: 1241867
ccaauauggcugggaaaca

SEQ ID NO: 1305853 - RNA, 19 nt, Artificial Sequence
  Description of Artificial Sequence: Synthetic oligonucleotide
  Antisense strand to SEQ ID NO: 1305852
uguuucccagccauauugg

SEQ ID NO: 1305854 - RNA, 19 nt, Artificial Sequence
  Description of Artificial Sequence: Synthetic oligonucleotide
  Sense strand starting at position 3767 of SEQ ID NO: 1241867
caauauggcugggaaacaa

SEQ ID NO: 1305855 - RNA, 19 nt, Artificial Sequence
  Description of Artificial Sequence: Synthetic oligonucleotide
  Antisense strand to SEQ ID NO: 1305854
uuguuucccagccauauug

SEQ ID NO: 1305856 - RNA, 19 nt, Artificial Sequence
  Description of Artificial Sequence: Synthetic oligonucleotide
  Sense strand starting at position 3890 of SEQ ID NO: 1241867
gggaaagugugugaaugga

SEQ ID NO: 1305857 - RNA, 19 nt, Artificial Sequence
  Description of Artificial Sequence: Synthetic oligonucleotide
  Antisense strand to SEQ ID NO: 1305856
uccauucacacacuuuccc

SEQ ID NO: 1305858 - RNA, 19 nt, Artificial Sequence
  Description of Artificial Sequence: Synthetic oligonucleotide
  Sense strand starting at position 3931 of SEQ ID NO: 1241867
acggaaaugucucgaaggu

SEQ ID NO: 1305859 - RNA, 19 nt, Artificial Sequence
  Description of Artificial Sequence: Synthetic oligonucleotide
  Antisense strand to SEQ ID NO: 1305858
accuucgagacauuuccgu

SEQ ID NO: 1305860 - RNA, 19 nt, Artificial Sequence
  Description of Artificial Sequence: Synthetic oligonucleotide
  Sense strand starting at position 3932 of SEQ ID NO: 1241867
cggaaaugucucgaagguc

SEQ ID NO: 1305861 - RNA, 19 nt, Artificial Sequence
  Description of Artificial Sequence: Synthetic oligonucleotide
  Antisense strand to SEQ ID NO: 1305860
gaccuucgagacauuuccg

SEQ ID NO: 1305862 - RNA, 19 nt, Artificial Sequence
  Description of Artificial Sequence: Synthetic oligonucleotide
  Sense strand starting at position 18 of SEQ ID NO: 1241868
acuugugaugagcacuaga

SEQ ID NO: 1305863 - RNA, 19 nt, Artificial Sequence
  Description of Artificial Sequence: Synthetic oligonucleotide
  Antisense strand to SEQ ID NO: 1305862
ucuagugcucaucacaagu

SEQ ID NO: 1305864 - RNA, 19 nt, Artificial Sequence
  Description of Artificial Sequence: Synthetic oligonucleotide
  Sense strand starting at position 44 of SEQ ID NO: 1241868
cuauauuuguagcaauguu

SEQ ID NO: 1305865 - RNA, 19 nt, Artificial Sequence
  Description of Artificial Sequence: Synthetic oligonucleotide
  Antisense strand to SEQ ID NO: 1305864
aacauugcuacaaauauag

SEQ ID NO: 1305866 - RNA, 19 nt, Artificial Sequence
  Description of Artificial Sequence: Synthetic oligonucleotide
  Sense strand starting at position 58 of SEQ ID NO: 1241868
auguuauguuacccauuau

SEQ ID NO: 1305867 - RNA, 19 nt, Artificial Sequence
  Description of Artificial Sequence: Synthetic oligonucleotide
  Antisense strand to SEQ ID NO: 1305866
auaauggguaacauaacau

SEQ ID NO: 1305868 - RNA, 19 nt, Artificial Sequence
  Description of Artificial Sequence: Synthetic oligonucleotide
  Sense strand starting at position 1082 of SEQ ID NO: 1241868
agacuagaauaauaugacu

SEQ ID NO: 1305869 - RNA, 19 nt, Artificial Sequence
  Description of Artificial Sequence: Synthetic oligonucleotide
  Antisense strand to SEQ ID NO: 1305868
agucauauuauucuagucu

SEQ ID NO: 1305870 - RNA, 19 nt, Artificial Sequence
  Description of Artificial Sequence: Synthetic oligonucleotide
  Sense strand starting at position 1380 of SEQ ID NO: 1241868
gcgacuaggucauccugaa

SEQ ID NO: 1305871 - RNA, 19 nt, Artificial Sequence
  Description of Artificial Sequence: Synthetic oligonucleotide
  Antisense strand to SEQ ID NO: 1305870
uucaggaugaccuagucgc

SEQ ID NO: 1305872 - RNA, 19 nt, Artificial Sequence
  Description of Artificial Sequence: Synthetic oligonucleotide
  Sense strand starting at position 1420 of SEQ ID NO: 1241868
agcaguucuguggagugaa

SEQ ID NO: 1305873 - RNA, 19 nt, Artificial Sequence
  Description of Artificial Sequence: Synthetic oligonucleotide
  Antisense strand to SEQ ID NO: 1305872
uucacuccacagaacugcu

SEQ ID NO: 1305874 - RNA, 19 nt, Artificial Sequence
  Description of Artificial Sequence: Synthetic oligonucleotide
  Sense strand starting at position 1545 of SEQ ID NO: 1241868
agcuuccaggcauguuaaa

SEQ ID NO: 1305875 - RNA, 19 nt, Artificial Sequence
  Description of Artificial Sequence: Synthetic oligonucleotide
  Antisense strand to SEQ ID NO: 1305874
uuuaacaugccuggaagcu

SEQ ID NO: 1305876 - RNA, 19 nt, Artificial Sequence
  Description of Artificial Sequence: Synthetic oligonucleotide
  Sense strand starting at position 2057 of SEQ ID NO: 1241868
gaaguaaaucgccgaguga

SEQ ID NO: 1305877 - RNA, 19 nt, Artificial Sequence
  Description of Artificial Sequence: Synthetic oligonucleotide
  Antisense strand to SEQ ID NO: 1305876
ucacucggcgauuuacuuc

SEQ ID NO: 1305878 - RNA, 19 nt, Artificial Sequence
  Description of Artificial Sequence: Synthetic oligonucleotide
  Sense strand starting at position 2058 of SEQ ID NO: 1241868
aaguaaaucgccgagugac

SEQ ID NO: 1305879 - RNA, 19 nt, Artificial Sequence
  Description of Artificial Sequence: Synthetic oligonucleotide
  Antisense strand to SEQ ID NO: 1305878
gucacucggcgauuuacuu

SEQ ID NO: 1305880 - RNA, 19 nt, Artificial Sequence
  Description of Artificial Sequence: Synthetic oligonucleotide
  Sense strand starting at position 2066 of SEQ ID NO: 1241868
cgccgagugaccuaaggaa

SEQ ID NO: 1305881 - RNA, 19 nt, Artificial Sequence
  Description of Artificial Sequence: Synthetic oligonucleotide
  Antisense strand to SEQ ID NO: 1305880
uuccuuaggucacucggcg

SEQ ID NO: 1305882 - RNA, 19 nt, Artificial Sequence
  Description of Artificial Sequence: Synthetic oligonucleotide
  Sense strand starting at position 2098 of SEQ ID NO: 1241868
uagggucugcuccacagaa

SEQ ID NO: 1305883 - RNA, 19 nt, Artificial Sequence
  Description of Artificial Sequence: Synthetic oligonucleotide
  Antisense strand to SEQ ID NO: 1305882
uucuguggagcagacccua

SEQ ID NO: 1305884 - RNA, 19 nt, Artificial Sequence
  Description of Artificial Sequence: Synthetic oligonucleotide
  Sense strand starting at position 2116 of SEQ ID NO: 1241868
aggcuuaccucugaaagag

SEQ ID NO: 1305885 - RNA, 19 nt, Artificial Sequence
  Description of Artificial Sequence: Synthetic oligonucleotide
  Antisense strand to SEQ ID NO: 1305884
cucuuucagagguaagccu

SEQ ID NO: 1305886 - RNA, 19 nt, Artificial Sequence
  Description of Artificial Sequence: Synthetic oligonucleotide
  Sense strand starting at position 2315 of SEQ ID NO: 1241868
aguccuucuuccgggagau

SEQ ID NO: 1305887 - RNA, 19 nt, Artificial Sequence
  Description of Artificial Sequence: Synthetic oligonucleotide
  Antisense strand to SEQ ID NO: 1305886
aucucccggaagaaggacu

SEQ ID NO: 1305888 - RNA, 19 nt, Artificial Sequence
  Description of Artificial Sequence: Synthetic oligonucleotide
  Sense strand starting at position 2316 of SEQ ID NO: 1241868
guccuucuuccgggagauu

SEQ ID NO: 1305889 - RNA, 19 nt, Artificial Sequence
  Description of Artificial Sequence: Synthetic oligonucleotide
  Antisense strand to SEQ ID NO: 1305888
aaucucccggaagaaggac

SEQ ID NO: 1305890 - RNA, 19 nt, Artificial Sequence
  Description of Artificial Sequence: Synthetic oligonucleotide
  Sense strand starting at position 2376 of SEQ ID NO: 1241868
cguuucuuggcugucacua

SEQ ID NO: 1305891 - RNA, 19 nt, Artificial Sequence
  Description of Artificial Sequence: Synthetic oligonucleotide
  Antisense strand to SEQ ID NO: 1305890
uagugacagccaagaaacg

SEQ ID NO: 1305892 - RNA, 19 nt, Artificial Sequence
  Description of Artificial Sequence: Synthetic oligonucleotide
  Sense strand starting at position 2381 of SEQ ID NO: 1241868
cuuggcugucacuaucgaa

SEQ ID NO: 1305893 - RNA, 19 nt, Artificial Sequence
  Description of Artificial Sequence: Synthetic oligonucleotide
  Antisense strand to SEQ ID NO: 1305892
uucgauagugacagccaag

SEQ ID NO: 1305894 - RNA, 19 nt, Artificial Sequence
  Description of Artificial Sequence: Synthetic oligonucleotide
  Sense strand starting at position 2389 of SEQ ID NO: 1241868
ucacuaucgaacugaggua

SEQ ID NO: 1305895 - RNA, 19 nt, Artificial Sequence
  Description of Artificial Sequence: Synthetic oligonucleotide
  Antisense strand to SEQ ID NO: 1305894
uaccucaguucgauaguga

SEQ ID NO: 1305896 - RNA, 19 nt, Artificial Sequence
  Description of Artificial Sequence: Synthetic oligonucleotide
  Sense strand starting at position 2429 of SEQ ID NO: 1241868
ucuuguuuacuccagaguu

SEQ ID NO: 1305897 - RNA, 19 nt, Artificial Sequence
  Description of Artificial Sequence: Synthetic oligonucleotide
  Antisense strand to SEQ ID NO: 1305896
aacucuggaguaaacaaga

SEQ ID NO: 1305898 - RNA, 19 nt, Artificial Sequence
  Description of Artificial Sequence: Synthetic oligonucleotide
  Sense strand starting at position 2431 of SEQ ID NO: 1241868
uuguuuacuccagaguuug

SEQ ID NO: 1305899 - RNA, 19 nt, Artificial Sequence
  Description of Artificial Sequence: Synthetic oligonucleotide
  Antisense strand to SEQ ID NO: 1305898
caaacucuggaguaaacaa

SEQ ID NO: 1305900 - RNA, 19 nt, Artificial Sequence
  Description of Artificial Sequence: Synthetic oligonucleotide
  Sense strand starting at position 2526 of SEQ ID NO: 1241868
agaaaucggccaugggaua

SEQ ID NO: 1305901 - RNA, 19 nt, Artificial Sequence
  Description of Artificial Sequence: Synthetic oligonucleotide
  Antisense strand to SEQ ID NO: 1305900
uaucccauggccgauuucu

SEQ ID NO: 1305902 - RNA, 19 nt, Artificial Sequence
  Description of Artificial Sequence: Synthetic oligonucleotide
  Sense strand starting at position 2527 of SEQ ID NO: 1241868
gaaaucggccaugggauaa

SEQ ID NO: 1305903 - RNA, 19 nt, Artificial Sequence
  Description of Artificial Sequence: Synthetic oligonucleotide
  Antisense strand to SEQ ID NO: 1305902
uuaucccauggccgauuuc

SEQ ID NO: 1305904 - RNA, 19 nt, Artificial Sequence
  Description of Artificial Sequence: Synthetic oligonucleotide
  Sense strand starting at position 2566 of SEQ ID NO: 1241868
ucugcaaggcagugaaaua

SEQ ID NO: 1305905 - RNA, 19 nt, Artificial Sequence
  Description of Artificial Sequence: Synthetic oligonucleotide
  Antisense strand to SEQ ID NO: 1305904
uauuucacugccuugcaga

SEQ ID NO: 1305906 - RNA, 19 nt, Artificial Sequence
  Description of Artificial Sequence: Synthetic oligonucleotide
  Sense strand starting at position 2595 of SEQ ID NO: 1241868
gcggcugcgacuguagaua

SEQ ID NO: 1305907 - RNA, 19 nt, Artificial Sequence
  Description of Artificial Sequence: Synthetic oligonucleotide
  Antisense strand to SEQ ID NO: 1305906
uaucuacagucgcagccgc

SEQ ID NO: 1305908 - RNA, 19 nt, Artificial Sequence
  Description of Artificial Sequence: Synthetic oligonucleotide
  Sense strand starting at position 2669 of SEQ ID NO: 1241868
cggugaauuaaauguuuag

SEQ ID NO: 1305909 - RNA, 19 nt, Artificial Sequence
  Description of Artificial Sequence: Synthetic oligonucleotide
  Antisense strand to SEQ ID NO: 1305908
cuaaacauuuaauucaccg

SEQ ID NO: 1305910 - RNA, 19 nt, Artificial Sequence
  Description of Artificial Sequence: Synthetic oligonucleotide
  Sense strand starting at position 2681 of SEQ ID NO: 1241868
uguuuaguguuucuaaacu

SEQ ID NO: 1305911 - RNA, 19 nt, Artificial Sequence
  Description of Artificial Sequence: Synthetic oligonucleotide
  Antisense strand to SEQ ID NO: 1305910
aguuuagaaacacuaaaca

SEQ ID NO: 1305912 - RNA, 19 nt, Artificial Sequence
  Description of Artificial Sequence: Synthetic oligonucleotide
  Sense strand starting at position 2742 of SEQ ID NO: 1241868
uugacuacugcaugaccua

SEQ ID NO: 1305913 - RNA, 19 nt, Artificial Sequence
  Description of Artificial Sequence: Synthetic oligonucleotide
  Antisense strand to SEQ ID NO: 1305912
uaggucaugcaguagucaa

SEQ ID NO: 1305914 - RNA, 19 nt, Artificial Sequence
  Description of Artificial Sequence: Synthetic oligonucleotide
  Sense strand starting at position 2797 of SEQ ID NO: 1241868
ccgggagcugugugaugaa

SEQ ID NO: 1305915 - RNA, 19 nt, Artificial Sequence
  Description of Artificial Sequence: Synthetic oligonucleotide
  Antisense strand to SEQ ID NO: 1305914
uucaucacacagcucccgg

SEQ ID NO: 1305916 - RNA, 19 nt, Artificial Sequence
  Description of Artificial Sequence: Synthetic oligonucleotide
  Sense strand starting at position 2822 of SEQ ID NO: 1241868
ggaggaucccugcaccuga

SEQ ID NO: 1305917 - RNA, 19 nt, Artificial Sequence
  Description of Artificial Sequence: Synthetic oligonucleotide
  Antisense strand to SEQ ID NO: 1305916
ucaggugcagggauccucc

SEQ ID NO: 1305918 - RNA, 19 nt, Artificial Sequence
  Description of Artificial Sequence: Synthetic oligonucleotide
  Sense strand starting at position 2833 of SEQ ID NO: 1241868
gcaccugagcacugacauu

SEQ ID NO: 1305919 - RNA, 19 nt, Artificial Sequence
  Description of Artificial Sequence: Synthetic oligonucleotide
  Antisense strand to SEQ ID NO: 1305918
aaugucagugcucaggugc

SEQ ID NO: 1305920 - RNA, 19 nt, Artificial Sequence
  Description of Artificial Sequence: Synthetic oligonucleotide
  Sense strand starting at position 2871 of SEQ ID NO: 1241868
aagucucgcccuuguaauu

SEQ ID NO: 1305921 - RNA, 19 nt, Artificial Sequence
  Description of Artificial Sequence: Synthetic oligonucleotide
  Antisense strand to SEQ ID NO: 1305920
aauuacaagggcgagacuu

SEQ ID NO: 1305922 - RNA, 19 nt, Artificial Sequence
  Description of Artificial Sequence: Synthetic oligonucleotide
  Sense strand starting at position 2947 of SEQ ID NO: 1241868
ucuccaggccucuaagaga

SEQ ID NO: 1305923 - RNA, 19 nt, Artificial Sequence
  Description of Artificial Sequence: Synthetic oligonucleotide
  Antisense strand to SEQ ID NO: 1305922
ucucuuagaggccuggaga

SEQ ID NO: 1305924 - RNA, 19 nt, Artificial Sequence
  Description of Artificial Sequence: Synthetic oligonucleotide
  Sense strand starting at position 3002 of SEQ ID NO: 1241868
aaacaaguacgguaaucua

SEQ ID NO: 1305925 - RNA, 19 nt, Artificial Sequence
  Description of Artificial Sequence: Synthetic oligonucleotide
  Antisense strand to SEQ ID NO: 1305924
uagauuaccguacuuguuu

SEQ ID NO: 1305926 - RNA, 19 nt, Artificial Sequence
  Description of Artificial Sequence: Synthetic oligonucleotide
  Sense strand starting at position 3010 of SEQ ID NO: 1241868
acgguaaucuauccaaaua

SEQ ID NO: 1305927 - RNA, 19 nt, Artificial Sequence
  Description of Artificial Sequence: Synthetic oligonucleotide
  Antisense strand to SEQ ID NO: 1305926
uauuuggauagauuaccgu

SEQ ID NO: 1305928 - RNA, 19 nt, Artificial Sequence
  Description of Artificial Sequence: Synthetic oligonucleotide
  Sense strand starting at position 3745 of SEQ ID NO: 1241868
aaguaauccuccugaggca

SEQ ID NO: 1305929 - RNA, 19 nt, Artificial Sequence
  Description of Artificial Sequence: Synthetic oligonucleotide
  Antisense strand to SEQ ID NO: 1305928
ugccucaggaggauuacuu

SEQ ID NO: 1305930 - RNA, 19 nt, Artificial Sequence
  Description of Artificial Sequence: Synthetic oligonucleotide
  Sense strand starting at position 3820 of SEQ ID NO: 1241868
agguaauauucuguccaua

SEQ ID NO: 1305931 - RNA, 19 nt, Artificial Sequence
  Description of Artificial Sequence: Synthetic oligonucleotide
  Antisense strand to SEQ ID NO: 1305930
uauggacagaauauuaccu

SEQ ID NO: 1305932 - RNA, 19 nt, Artificial Sequence
  Description of Artificial Sequence: Synthetic oligonucleotide
  Sense strand starting at position 3822 of SEQ ID NO: 1241868
guaauauucuguccauagg

SEQ ID NO: 1305933 - RNA, 19 nt, Artificial Sequence
  Description of Artificial Sequence: Synthetic oligonucleotide
  Antisense strand to SEQ ID NO: 1305932
ccuauggacagaauauuac

SEQ ID NO: 1305934 - RNA, 19 nt, Artificial Sequence
  Description of Artificial Sequence: Synthetic oligonucleotide
  Sense strand starting at position 3839 of SEQ ID NO: 1241868
gggcauaggccauaaaugu

SEQ ID NO: 1305935 - RNA, 19 nt, Artificial Sequence
  Description of Artificial Sequence: Synthetic oligonucleotide
  Antisense strand to SEQ ID NO: 1305934
acauuuauggccuaugccc

SEQ ID NO: 1305936 - RNA, 19 nt, Artificial Sequence
  Description of Artificial Sequence: Synthetic oligonucleotide
  Sense strand starting at position 3846 of SEQ ID NO: 1241868
ggccauaaaugucuuugua

SEQ ID NO: 1305937 - RNA, 19 nt, Artificial Sequence
  Description of Artificial Sequence: Synthetic oligonucleotide
  Antisense strand to SEQ ID NO: 1305936
uacaaagacauuuauggcc

SEQ ID NO: 1305938 - RNA, 19 nt, Artificial Sequence
  Description of Artificial Sequence: Synthetic oligonucleotide
  Sense strand starting at position 3848 of SEQ ID NO: 1241868
ccauaaaugucuuuguaac

SEQ ID NO: 1305939 - RNA, 19 nt, Artificial Sequence
  Description of Artificial Sequence: Synthetic oligonucleotide
  Antisense strand to SEQ ID NO: 1305938
guuacaaagacauuuaugg

SEQ ID NO: 1305940 - RNA, 19 nt, Artificial Sequence
  Description of Artificial Sequence: Synthetic oligonucleotide
  Sense strand starting at position 3891 of SEQ ID NO: 1241868
uaaggcauacccgaaguaa

SEQ ID NO: 1305941 - RNA, 19 nt, Artificial Sequence
  Description of Artificial Sequence: Synthetic oligonucleotide
  Antisense strand to SEQ ID NO: 1305940
uuacuucggguaugccuua

SEQ ID NO: 1305942 - RNA, 19 nt, Artificial Sequence
  Description of Artificial Sequence: Synthetic oligonucleotide
  Sense strand starting at position 492 of SEQ ID NO: 1241869
uggauagauucaguaggca

SEQ ID NO: 1305943 - RNA, 19 nt, Artificial Sequence
  Description of Artificial Sequence: Synthetic oligonucleotide
  Antisense strand to SEQ ID NO: 1305942
ugccuacugaaucuaucca

SEQ ID NO: 1305944 - RNA, 19 nt, Artificial Sequence
  Description of Artificial Sequence: Synthetic oligonucleotide
  Sense strand starting at position 528 of SEQ ID NO: 1241869
aauugauaacagugguuac

SEQ ID NO: 1305945 - RNA, 19 nt, Artificial Sequence
  Description of Artificial Sequence: Synthetic oligonucleotide
  Antisense strand to SEQ ID NO: 1305944
guaaccacuguuaucaauu

SEQ ID NO: 1305946 - RNA, 19 nt, Artificial Sequence
  Description of Artificial Sequence: Synthetic oligonucleotide
  Sense strand starting at position 774 of SEQ ID NO: 1241869
cuggucauacaguauauua

SEQ ID NO: 1305947 - RNA, 19 nt, Artificial Sequence
  Description of Artificial Sequence: Synthetic oligonucleotide
  Antisense strand to SEQ ID NO: 1305946
uaauauacuguaugaccag

SEQ ID NO: 1305948 - RNA, 19 nt, Artificial Sequence
  Description of Artificial Sequence: Synthetic oligonucleotide
  Sense strand starting at position 808 of SEQ ID NO: 1241869
acuuuaacagcccggaauu

SEQ ID NO: 1305949 - RNA, 19 nt, Artificial Sequence
  Description of Artificial Sequence: Synthetic oligonucleotide
  Antisense strand to SEQ ID NO: 1305948
aauuccgggcuguuaaagu

SEQ ID NO: 1305950 - RNA, 19 nt, Artificial Sequence
  Description of Artificial Sequence: Synthetic oligonucleotide
  Sense strand starting at position 928 of SEQ ID NO: 1241869
uuuguaagcgaugaacuua

SEQ ID NO: 1305951 - RNA, 19 nt, Artificial Sequence
  Description of Artificial Sequence: Synthetic oligonucleotide
  Antisense strand to SEQ ID NO: 1305950
uaaguucaucgcuuacaaa

SEQ ID NO: 1305952 - RNA, 19 nt, Artificial Sequence
  Description of Artificial Sequence: Synthetic oligonucleotide
  Sense strand starting at position 1107 of SEQ ID NO: 1241869
ugugaagcugcaugagaga

SEQ ID NO: 1305953 - RNA, 19 nt, Artificial Sequence
  Description of Artificial Sequence: Synthetic oligonucleotide
  Antisense strand to SEQ ID NO: 1305952
ucucucaugcagcuucaca

SEQ ID NO: 1305954 - RNA, 19 nt, Artificial Sequence
  Description of Artificial Sequence: Synthetic oligonucleotide
  Sense strand starting at position 1294 of SEQ ID NO: 1241869
uaguauucuuagguaaagu

SEQ ID NO: 1305955 - RNA, 19 nt, Artificial Sequence
  Description of Artificial Sequence: Synthetic oligonucleotide
  Antisense strand to SEQ ID NO: 1305954
acuuuaccuaagaauacua

SEQ ID NO: 1305956 - RNA, 19 nt, Artificial Sequence
  Description of Artificial Sequence: Synthetic oligonucleotide
  Sense strand starting at position 1295 of SEQ ID NO: 1241869
aguauucuuagguaaagug

SEQ ID NO: 1305957 - RNA, 19 nt, Artificial Sequence
  Description of Artificial Sequence: Synthetic oligonucleotide
  Antisense strand to SEQ ID NO: 1305956
cacuuuaccuaagaauacu

SEQ ID NO: 1305958 - RNA, 19 nt, Artificial Sequence
  Description of Artificial Sequence: Synthetic oligonucleotide
  Sense strand starting at position 1326 of SEQ ID NO: 1241869
uuuaacuagcaaggaaauu

SEQ ID NO: 1305959 - RNA, 19 nt, Artificial Sequence
  Description of Artificial Sequence: Synthetic oligonucleotide
  Antisense strand to SEQ ID NO: 1305958
aauuuccuugcuaguuaaa

SEQ ID NO: 1305960 - RNA, 19 nt, Artificial Sequence
  Description of Artificial Sequence: Synthetic oligonucleotide
  Sense strand starting at position 1440 of SEQ ID NO: 1241869
uuaugaacuccgcaacaaa

SEQ ID NO: 1305961 - RNA, 19 nt, Artificial Sequence
  Description of Artificial Sequence: Synthetic oligonucleotide
  Antisense strand to SEQ ID NO: 1305960
uuuguugcggaguucauaa

SEQ ID NO: 1305962 - RNA, 19 nt, Artificial Sequence
  Description of Artificial Sequence: Synthetic oligonucleotide
  Sense strand starting at position 1505 of SEQ ID NO: 1241869
cguagaaguuucuugauga

SEQ ID NO: 1305963 - RNA, 19 nt, Artificial Sequence
  Description of Artificial Sequence: Synthetic oligonucleotide
  Antisense strand to SEQ ID NO: 1305962
ucaucaagaaacuucuacg

SEQ ID NO: 1305964 - RNA, 19 nt, Artificial Sequence
  Description of Artificial Sequence: Synthetic oligonucleotide
  Sense strand starting at position 1536 of SEQ ID NO: 1241869
augcaaauaugguuacaau

SEQ ID NO: 1305965 - RNA, 19 nt, Artificial Sequence
  Description of Artificial Sequence: Synthetic oligonucleotide
  Antisense strand to SEQ ID NO: 1305964
auuguaaccauauuugcau

SEQ ID NO: 1305966 - RNA, 19 nt, Artificial Sequence
  Description of Artificial Sequence: Synthetic oligonucleotide
  Sense strand starting at position 1537 of SEQ ID NO: 1241869
ugcaaauaugguuacaauu

SEQ ID NO: 1305967 - RNA, 19 nt, Artificial Sequence
  Description of Artificial Sequence: Synthetic oligonucleotide
  Antisense strand to SEQ ID NO: 1305966
aauuguaaccauauuugca

SEQ ID NO: 1305968 - RNA, 19 nt, Artificial Sequence
  Description of Artificial Sequence: Synthetic oligonucleotide
  Sense strand starting at position 1591 of SEQ ID NO: 1241869
uuccaucacuugguugaau

SEQ ID NO: 1305969 - RNA, 19 nt, Artificial Sequence
  Description of Artificial Sequence: Synthetic oligonucleotide
  Antisense strand to SEQ ID NO: 1305968
auucaaccaagugauggaa

SEQ ID NO: 1305970 - RNA, 19 nt, Artificial Sequence
  Description of Artificial Sequence: Synthetic oligonucleotide
  Sense strand starting at position 1592 of SEQ ID NO: 1241869
uccaucacuugguugaaua

SEQ ID NO: 1305971 - RNA, 19 nt, Artificial Sequence
  Description of Artificial Sequence: Synthetic oligonucleotide
  Antisense strand to SEQ ID NO: 1305970
uauucaaccaagugaugga

SEQ ID NO: 1305972 - RNA, 19 nt, Artificial Sequence
  Description of Artificial Sequence: Synthetic oligonucleotide
  Sense strand starting at position 1593 of SEQ ID NO: 1241869
ccaucacuugguugaauag

SEQ ID NO: 1305973 - RNA, 19 nt, Artificial Sequence
  Description of Artificial Sequence: Synthetic oligonucleotide
  Antisense strand to SEQ ID NO: 1305972
cuauucaaccaagugaugg

SEQ ID NO: 1305974 - RNA, 19 nt, Artificial Sequence
  Description of Artificial Sequence: Synthetic oligonucleotide
  Sense strand starting at position 1778 of SEQ ID NO: 1241869
ugagccagccuguaaauau

SEQ ID NO: 1305975 - RNA, 19 nt, Artificial Sequence
  Description of Artificial Sequence: Synthetic oligonucleotide
  Antisense strand to SEQ ID NO: 1305974
auauuuacaggcuggcuca

SEQ ID NO: 1305976 - RNA, 19 nt, Artificial Sequence
  Description of Artificial Sequence: Synthetic oligonucleotide
  Sense strand starting at position 1871 of SEQ ID NO: 1241869
aggcaaugugcugagaaug

SEQ ID NO: 1305977 - RNA, 19 nt, Artificial Sequence
  Description of Artificial Sequence: Synthetic oligonucleotide
  Antisense strand to SEQ ID NO: 1305976
cauucucagcacauugccu

SEQ ID NO: 1305978 - RNA, 19 nt, Artificial Sequence
  Description of Artificial Sequence: Synthetic oligonucleotide
  Sense strand starting at position 1879 of SEQ ID NO: 1241869
ugcugagaaugcucacuga

SEQ ID NO: 1305979 - RNA, 19 nt, Artificial Sequence
  Description of Artificial Sequence: Synthetic oligonucleotide
  Antisense strand to SEQ ID NO: 1305978
ucagugagcauucucagca

SEQ ID NO: 1305980 - RNA, 19 nt, Artificial Sequence
  Description of Artificial Sequence: Synthetic oligonucleotide
  Sense strand starting at position 1882 of SEQ ID NO: 1241869
ugagaaugcucacugagcu

SEQ ID NO: 1305981 - RNA, 19 nt, Artificial Sequence
  Description of Artificial Sequence: Synthetic oligonucleotide
  Antisense strand to SEQ ID NO: 1305980
agcucagugagcauucuca

SEQ ID NO: 1305982 - RNA, 19 nt, Artificial Sequence
  Description of Artificial Sequence: Synthetic oligonucleotide
  Sense strand starting at position 1883 of SEQ ID NO: 1241869
gagaaugcucacugagcuu

SEQ ID NO: 1305983 - RNA, 19 nt, Artificial Sequence
  Description of Artificial Sequence: Synthetic oligonucleotide
  Antisense strand to SEQ ID NO: 1305982
aagcucagugagcauucuc

SEQ ID NO: 1305984 - RNA, 19 nt, Artificial Sequence
  Description of Artificial Sequence: Synthetic oligonucleotide
  Sense strand starting at position 1894 of SEQ ID NO: 1241869
cugagcuugacugaguuau

SEQ ID NO: 1305985 - RNA, 19 nt, Artificial Sequence
  Description of Artificial Sequence: Synthetic oligonucleotide
  Antisense strand to SEQ ID NO: 1305984
auaacucagucaagcucag

SEQ ID NO: 1305986 - RNA, 19 nt, Artificial Sequence
  Description of Artificial Sequence: Synthetic oligonucleotide
  Sense strand starting at position 1896 of SEQ ID NO: 1241869
gagcuugacugaguuauga

SEQ ID NO: 1305987 - RNA, 19 nt, Artificial Sequence
  Description of Artificial Sequence: Synthetic oligonucleotide
  Antisense strand to SEQ ID NO: 1305986
ucauaacucagucaagcuc

SEQ ID NO: 1305988 - RNA, 19 nt, Artificial Sequence
  Description of Artificial Sequence: Synthetic oligonucleotide
  Sense strand starting at position 1898 of SEQ ID NO: 1241869
gcuugacugaguuaugaca

SEQ ID NO: 1305989 - RNA, 19 nt, Artificial Sequence
  Description of Artificial Sequence: Synthetic oligonucleotide
  Antisense strand to SEQ ID NO: 1305988
ugucauaacucagucaagc

SEQ ID NO: 1305990 - RNA, 19 nt, Artificial Sequence
  Description of Artificial Sequence: Synthetic oligonucleotide
  Sense strand starting at position 1937 of SEQ ID NO: 1241869
gguggaauuucuguuugca

SEQ ID NO: 1305991 - RNA, 19 nt, Artificial Sequence
  Description of Artificial Sequence: Synthetic oligonucleotide
  Antisense strand to SEQ ID NO: 1305990
ugcaaacagaaauuccacc

SEQ ID NO: 1305992 - RNA, 19 nt, Artificial Sequence
  Description of Artificial Sequence: Synthetic oligonucleotide
  Sense strand starting at position 1939 of SEQ ID NO: 1241869
uggaauuucuguuugcauc

SEQ ID NO: 1305993 - RNA, 19 nt, Artificial Sequence
  Description of Artificial Sequence: Synthetic oligonucleotide
  Antisense strand to SEQ ID NO: 1305992
gaugcaaacagaaauucca

SEQ ID NO: 1305994 - RNA, 19 nt, Artificial Sequence
  Description of Artificial Sequence: Synthetic oligonucleotide
  Sense strand starting at position 2272 of SEQ ID NO: 1241869
cuuacauacgaauguacau

SEQ ID NO: 1305995 - RNA, 19 nt, Artificial Sequence
  Description of Artificial Sequence: Synthetic oligonucleotide
  Antisense strand to SEQ ID NO: 1305994
auguacauucguauguaag

SEQ ID NO: 1305996 - RNA, 19 nt, Artificial Sequence
  Description of Artificial Sequence: Synthetic oligonucleotide
  Sense strand starting at position 2578 of SEQ ID NO: 1241869
gcuuaauggguagaagguu

SEQ ID NO: 1305997 - RNA, 19 nt, Artificial Sequence
  Description of Artificial Sequence: Synthetic oligonucleotide
  Antisense strand to SEQ ID NO: 1305996
aaccuucuacccauuaagc

SEQ ID NO: 1305998 - RNA, 19 nt, Artificial Sequence
  Description of Artificial Sequence: Synthetic oligonucleotide
  Sense strand starting at position 3147 of SEQ ID NO: 1241869
cgcccuugaucauuuguaa

SEQ ID NO: 1305999 - RNA, 19 nt, Artificial Sequence
  Description of Artificial Sequence: Synthetic oligonucleotide
  Antisense strand to SEQ ID NO: 1305998
uuacaaaugaucaagggcg

SEQ ID NO: 1306000 - RNA, 19 nt, Artificial Sequence
  Description of Artificial Sequence: Synthetic oligonucleotide
  Sense strand starting at position 3151 of SEQ ID NO: 1241869
cuugaucauuuguaauuga

SEQ ID NO: 1306001 - RNA, 19 nt, Artificial Sequence
  Description of Artificial Sequence: Synthetic oligonucleotide
  Antisense strand to SEQ ID NO: 1306000
ucaauuacaaaugaucaag

SEQ ID NO: 1306002 - RNA, 19 nt, Artificial Sequence
  Description of Artificial Sequence: Synthetic oligonucleotide
  Sense strand starting at position 3266 of SEQ ID NO: 1241869
agcggaucacgagaucaga

SEQ ID NO: 1306003 - RNA, 19 nt, Artificial Sequence
  Description of Artificial Sequence: Synthetic oligonucleotide
  Antisense strand to SEQ ID NO: 1306002
ucugaucucgugauccgcu

SEQ ID NO: 1306004 - RNA, 19 nt, Artificial Sequence
  Description of Artificial Sequence: Synthetic oligonucleotide
  Sense strand starting at position 3554 of SEQ ID NO: 1241869
ucuagaauuucugauagaa

SEQ ID NO: 1306005 - RNA, 19 nt, Artificial Sequence
  Description of Artificial Sequence: Synthetic oligonucleotide
  Antisense strand to SEQ ID NO: 1306004
uucuaucagaaauucuaga

SEQ ID NO: 1306006 - RNA, 19 nt, Artificial Sequence
  Description of Artificial Sequence: Synthetic oligonucleotide
  Sense strand starting at position 3583 of SEQ ID NO: 1241869
ugcuuuaagccugacuuaa

SEQ ID NO: 1306007 - RNA, 19 nt, Artificial Sequence
  Description of Artificial Sequence: Synthetic oligonucleotide
  Antisense strand to SEQ ID NO: 1306006
uuaagucaggcuuaaagca

SEQ ID NO: 1306008 - RNA, 19 nt, Artificial Sequence
  Description of Artificial Sequence: Synthetic oligonucleotide
  Sense strand starting at position 3617 of SEQ ID NO: 1241869
cagguaaacuauccgaugu

SEQ ID NO: 1306009 - RNA, 19 nt, Artificial Sequence
  Description of Artificial Sequence: Synthetic oligonucleotide
  Antisense strand to SEQ ID NO: 1306008
acaucggauaguuuaccug

SEQ ID NO: 1306010 - RNA, 19 nt, Artificial Sequence
  Description of Artificial Sequence: Synthetic oligonucleotide
  Sense strand starting at position 3623 of SEQ ID NO: 1241869
aacuauccgauguguggau

SEQ ID NO: 1306011 - RNA, 19 nt, Artificial Sequence
  Description of Artificial Sequence: Synthetic oligonucleotide
  Antisense strand to SEQ ID NO: 1306010
auccacacaucggauaguu

SEQ ID NO: 1306012 - RNA, 19 nt, Artificial Sequence
  Description of Artificial Sequence: Synthetic oligonucleotide
  Sense strand starting at position 3627 of SEQ ID NO: 1241869
auccgauguguggauuaga

SEQ ID NO: 1306013 - RNA, 19 nt, Artificial Sequence
  Description of Artificial Sequence: Synthetic oligonucleotide
  Antisense strand to SEQ ID NO: 1306012
ucuaauccacacaucggau

SEQ ID NO: 1306014 - RNA, 19 nt, Artificial Sequence
  Description of Artificial Sequence: Synthetic oligonucleotide
  Sense strand starting at position 3630 of SEQ ID NO: 1241869
cgauguguggauuagaaau

SEQ ID NO: 1306015 - RNA, 19 nt, Artificial Sequence
  Description of Artificial Sequence: Synthetic oligonucleotide
  Antisense strand to SEQ ID NO: 1306014
auuucuaauccacacaucg

SEQ ID NO: 1306016 - RNA, 19 nt, Artificial Sequence
  Description of Artificial Sequence: Synthetic oligonucleotide
  Sense strand starting at position 3737 of SEQ ID NO: 1241869
uugggucugugcuuaauuu

SEQ ID NO: 1306017 - RNA, 19 nt, Artificial Sequence
  Description of Artificial Sequence: Synthetic oligonucleotide
  Antisense strand to SEQ ID NO: 1306016
aaauuaagcacagacccaa

SEQ ID NO: 1306018 - RNA, 19 nt, Artificial Sequence
  Description of Artificial Sequence: Synthetic oligonucleotide
  Sense strand starting at position 3741 of SEQ ID NO: 1241869
gucugugcuuaauuuguaa

SEQ ID NO: 1306019 - RNA, 19 nt, Artificial Sequence
  Description of Artificial Sequence: Synthetic oligonucleotide
  Antisense strand to SEQ ID NO: 1306018
uuacaaauuaagcacagac

SEQ ID NO: 1306020 - RNA, 19 nt, Artificial Sequence
  Description of Artificial Sequence: Synthetic oligonucleotide
  Sense strand starting at position 3889 of SEQ ID NO: 1241869
guggacuaaugaggaauuu

SEQ ID NO: 1306021 - RNA, 19 nt, Artificial Sequence
  Description of Artificial Sequence: Synthetic oligonucleotide
  Antisense strand to SEQ ID NO: 1306020
aaauuccucauuaguccac

SEQ ID NO: 1306022 - RNA, 19 nt, Artificial Sequence
  Description of Artificial Sequence: Synthetic oligonucleotide
  Sense strand starting at position 354 of SEQ ID NO: 1241870
gaucgagaucuuggccaac

SEQ ID NO: 1306023 - RNA, 19 nt, Artificial Sequence
  Description of Artificial Sequence: Synthetic oligonucleotide
  Antisense strand to SEQ ID NO: 1306022
guuggccaagaucucgauc

SEQ ID NO: 1306024 - RNA, 19 nt, Artificial Sequence
  Description of Artificial Sequence: Synthetic oligonucleotide
  Sense strand starting at position 356 of SEQ ID NO: 1241870
ucgagaucuuggccaacau

SEQ ID NO: 1306025 - RNA, 19 nt, Artificial Sequence
  Description of Artificial Sequence: Synthetic oligonucleotide
  Antisense strand to SEQ ID NO: 1306024
auguuggccaagaucucga

SEQ ID NO: 1306026 - RNA, 19 nt, Artificial Sequence
  Description of Artificial Sequence: Synthetic oligonucleotide
  Sense strand starting at position 357 of SEQ ID NO: 1241870
cgagaucuuggccaacaug

SEQ ID NO: 1306027 - RNA, 19 nt, Artificial Sequence
  Description of Artificial Sequence: Synthetic oligonucleotide
  Antisense strand to SEQ ID NO: 1306026
cauguuggccaagaucucg

SEQ ID NO: 1306028 - RNA, 19 nt, Artificial Sequence
  Description of Artificial Sequence: Synthetic oligonucleotide
  Sense strand starting at position 669 of SEQ ID NO: 1241870
auaguuuggcuauagguau

SEQ ID NO: 1306029 - RNA, 19 nt, Artificial Sequence
  Description of Artificial Sequence: Synthetic oligonucleotide
  Antisense strand to SEQ ID NO: 1306028
auaccuauagccaaacuau

SEQ ID NO: 1306030 - RNA, 19 nt, Artificial Sequence
  Description of Artificial Sequence: Synthetic oligonucleotide
  Sense strand starting at position 676 of SEQ ID NO: 1241870
ggcuauagguauccgauaa

SEQ ID NO: 1306031 - RNA, 19 nt, Artificial Sequence
  Description of Artificial Sequence: Synthetic oligonucleotide
  Antisense strand to SEQ ID NO: 1306030
uuaucggauaccuauagcc

SEQ ID NO: 1306032 - RNA, 19 nt, Artificial Sequence
  Description of Artificial Sequence: Synthetic oligonucleotide
  Sense strand starting at position 797 of SEQ ID NO: 1241870
guggcuuuccuugaucauc

SEQ ID NO: 1306033 - RNA, 19 nt, Artificial Sequence
  Description of Artificial Sequence: Synthetic oligonucleotide
  Antisense strand to SEQ ID NO: 1306032
gaugaucaaggaaagccac

SEQ ID NO: 1306034 - RNA, 19 nt, Artificial Sequence
  Description of Artificial Sequence: Synthetic oligonucleotide
  Sense strand starting at position 1012 of SEQ ID NO: 1241870
uugugaucaaugggucuga

SEQ ID NO: 1306035 - RNA, 19 nt, Artificial Sequence
  Description of Artificial Sequence: Synthetic oligonucleotide
  Antisense strand to SEQ ID NO: 1306034
ucagacccauugaucacaa

SEQ ID NO: 1306036 - RNA, 19 nt, Artificial Sequence
  Description of Artificial Sequence: Synthetic oligonucleotide
  Sense strand starting at position 1023 of SEQ ID NO: 1241870
gggucugagucucuccaaa

SEQ ID NO: 1306037 - RNA, 19 nt, Artificial Sequence
  Description of Artificial Sequence: Synthetic oligonucleotide
  Antisense strand to SEQ ID NO: 1306036
uuuggagagacucagaccc

SEQ ID NO: 1306038 - RNA, 19 nt, Artificial Sequence
  Description of Artificial Sequence: Synthetic oligonucleotide
  Sense strand starting at position 1116 of SEQ ID NO: 1241870
ggauuucuauaggagcaaa

SEQ ID NO: 1306039 - RNA, 19 nt, Artificial Sequence
  Description of Artificial Sequence: Synthetic oligonucleotide
  Antisense strand to SEQ ID NO: 1306038
uuugcuccuauagaaaucc

SEQ ID NO: 1306040 - RNA, 19 nt, Artificial Sequence
  Description of Artificial Sequence: Synthetic oligonucleotide
  Sense strand starting at position 2190 of SEQ ID NO: 1241870
cggguuauuuagcuccagu

SEQ ID NO: 1306041 - RNA, 19 nt, Artificial Sequence
  Description of Artificial Sequence: Synthetic oligonucleotide
  Antisense strand to SEQ ID NO: 1306040
acuggagcuaaauaacccg

SEQ ID NO: 1306042 - RNA, 19 nt, Artificial Sequence
  Description of Artificial Sequence: Synthetic oligonucleotide
  Sense strand starting at position 2323 of SEQ ID NO: 1241870
uuggauuguuuaguggaaa

SEQ ID NO: 1306043 - RNA, 19 nt, Artificial Sequence
  Description of Artificial Sequence: Synthetic oligonucleotide
  Antisense strand to SEQ ID NO: 1306042
uuuccacuaaacaauccaa

SEQ ID NO: 1306044 - RNA, 19 nt, Artificial Sequence
  Description of Artificial Sequence: Synthetic oligonucleotide
  Sense strand starting at position 2566 of SEQ ID NO: 1241870
gggucuggagcauguugaa

SEQ ID NO: 1306045 - RNA, 19 nt, Artificial Sequence
  Description of Artificial Sequence: Synthetic oligonucleotide
  Antisense strand to SEQ ID NO: 1306044
uucaacaugcuccagaccc

SEQ ID NO: 1306046 - RNA, 19 nt, Artificial Sequence
  Description of Artificial Sequence: Synthetic oligonucleotide
  Sense strand starting at position 2771 of SEQ ID NO: 1241870
gcagguucugugucuugua

SEQ ID NO: 1306047 - RNA, 19 nt, Artificial Sequence
  Description of Artificial Sequence: Synthetic oligonucleotide
  Antisense strand to SEQ ID NO: 1306046
uacaagacacagaaccugc

SEQ ID NO: 1306048 - RNA, 19 nt, Artificial Sequence
  Description of Artificial Sequence: Synthetic oligonucleotide
  Sense strand starting at position 2885 of SEQ ID NO: 1241870
acaauaaucucauucguga

SEQ ID NO: 1306049 - RNA, 19 nt, Artificial Sequence
  Description of Artificial Sequence: Synthetic oligonucleotide
  Antisense strand to SEQ ID NO: 1306048
ucacgaaugagauuauugu

SEQ ID NO: 1306050 - RNA, 19 nt, Artificial Sequence
  Description of Artificial Sequence: Synthetic oligonucleotide
  Sense strand starting at position 3044 of SEQ ID NO: 1241870
uacuguguuugugcuauuu

SEQ ID NO: 1306051 - RNA, 19 nt, Artificial Sequence
  Description of Artificial Sequence: Synthetic oligonucleotide
  Antisense strand to SEQ ID NO: 1306050
aaauagcacaaacacagua

SEQ ID NO: 1306052 - RNA, 19 nt, Artificial Sequence
  Description of Artificial Sequence: Synthetic oligonucleotide
  Sense strand starting at position 3152 of SEQ ID NO: 1241870
ugggucuugugauccaaca

SEQ ID NO: 1306053 - RNA, 19 nt, Artificial Sequence
  Description of Artificial Sequence: Synthetic oligonucleotide
  Antisense strand to SEQ ID NO: 1306052
uguuggaucacaagaccca

SEQ ID NO: 1306054 - RNA, 19 nt, Artificial Sequence
  Description of Artificial Sequence: Synthetic oligonucleotide
  Sense strand starting at position 3154 of SEQ ID NO: 1241870
ggucuugugauccaacaga

SEQ ID NO: 1306055 - RNA, 19 nt, Artificial Sequence
  Description of Artificial Sequence: Synthetic oligonucleotide
  Antisense strand to SEQ ID NO: 1306054
ucuguuggaucacaagacc

SEQ ID NO: 1306056 - RNA, 19 nt, Artificial Sequence
  Description of Artificial Sequence: Synthetic oligonucleotide
  Sense strand starting at position 3265 of SEQ ID NO: 1241870
ucuagaaccucuucugaag

SEQ ID NO: 1306057 - RNA, 19 nt, Artificial Sequence
  Description of Artificial Sequence: Synthetic oligonucleotide
  Antisense strand to SEQ ID NO: 1306056
cuucagaagagguucuaga

SEQ ID NO: 1306058 - RNA, 19 nt, Artificial Sequence
  Description of Artificial Sequence: Synthetic oligonucleotide
  Sense strand starting at position 3320 of SEQ ID NO: 1241870
gcuacuaggccuugauaga

SEQ ID NO: 1306059 - RNA, 19 nt, Artificial Sequence
  Description of Artificial Sequence: Synthetic oligonucleotide
  Antisense strand to SEQ ID NO: 1306058
ucuaucaaggccuaguagc

SEQ ID NO: 1306060 - RNA, 19 nt, Artificial Sequence
  Description of Artificial Sequence: Synthetic oligonucleotide
  Sense strand starting at position 3327 of SEQ ID NO: 1241870
ggccuugauagaggcagaa

SEQ ID NO: 1306061 - RNA, 19 nt, Artificial Sequence
  Description of Artificial Sequence: Synthetic oligonucleotide
  Antisense strand to SEQ ID NO: 1306060
uucugccucuaucaaggcc

SEQ ID NO: 1306062 - RNA, 19 nt, Artificial Sequence
  Description of Artificial Sequence: Synthetic oligonucleotide
  Sense strand starting at position 3392 of SEQ ID NO: 1241870
ugaccuacguagccauaaa

SEQ ID NO: 1306063 - RNA, 19 nt, Artificial Sequence
  Description of Artificial Sequence: Synthetic oligonucleotide
  Antisense strand to SEQ ID NO: 1306062
uuuauggcuacguagguca

SEQ ID NO: 1306064 - RNA, 19 nt, Artificial Sequence
  Description of Artificial Sequence: Synthetic oligonucleotide
  Sense strand starting at position 3472 of SEQ ID NO: 1241870
gcagguucagaagguauaa

SEQ ID NO: 1306065 - RNA, 19 nt, Artificial Sequence
  Description of Artificial Sequence: Synthetic oligonucleotide
  Antisense strand to SEQ ID NO: 1306064
uuauaccuucugaaccugc

SEQ ID NO: 1306066 - RNA, 19 nt, Artificial Sequence
  Description of Artificial Sequence: Synthetic oligonucleotide
  Sense strand starting at position 3510 of SEQ ID NO: 1241870
ggcucagacucuuccaaca

SEQ ID NO: 1306067 - RNA, 19 nt, Artificial Sequence
  Description of Artificial Sequence: Synthetic oligonucleotide
  Antisense strand to SEQ ID NO: 1306066
uguuggaagagucugagcc

SEQ ID NO: 1306068 - RNA, 19 nt, Artificial Sequence
  Description of Artificial Sequence: Synthetic oligonucleotide
  Sense strand starting at position 3567 of SEQ ID NO: 1241870
aacuauggcuucuugggau

SEQ ID NO: 1306069 - RNA, 19 nt, Artificial Sequence
  Description of Artificial Sequence: Synthetic oligonucleotide
  Antisense strand to SEQ ID NO: 1306068
aucccaagaagccauaguu

SEQ ID NO: 1306070 - RNA, 19 nt, Artificial Sequence
  Description of Artificial Sequence: Synthetic oligonucleotide
  Sense strand starting at position 3618 of SEQ ID NO: 1241870
accuccagccuggauuaua

SEQ ID NO: 1306071 - RNA, 19 nt, Artificial Sequence
  Description of Artificial Sequence: Synthetic oligonucleotide
  Antisense strand to SEQ ID NO: 1306070
uauaauccaggcuggaggu

SEQ ID NO: 1306072 - RNA, 19 nt, Artificial Sequence
  Description of Artificial Sequence: Synthetic oligonucleotide
  Sense strand starting at position 3627 of SEQ ID NO: 1241870
cuggauuauagaugggucu

SEQ ID NO: 1306073 - RNA, 19 nt, Artificial Sequence
  Description of Artificial Sequence: Synthetic oligonucleotide
  Antisense strand to SEQ ID NO: 1306072
agacccaucuauaauccag

SEQ ID NO: 1306074 - RNA, 19 nt, Artificial Sequence
  Description of Artificial Sequence: Synthetic oligonucleotide
  Sense strand starting at position 3629 of SEQ ID NO: 1241870
ggauuauagaugggucugu

SEQ ID NO: 1306075 - RNA, 19 nt, Artificial Sequence
  Description of Artificial Sequence: Synthetic oligonucleotide
  Antisense strand to SEQ ID NO: 1306074
acagacccaucuauaaucc

SEQ ID NO: 1306076 - RNA, 19 nt, Artificial Sequence
  Description of Artificial Sequence: Synthetic oligonucleotide
  Sense strand starting at position 3630 of SEQ ID NO: 1241870
gauuauagaugggucugua

SEQ ID NO: 1306077 - RNA, 19 nt, Artificial Sequence
  Description of Artificial Sequence: Synthetic oligonucleotide
  Antisense strand to SEQ ID NO: 1306076
uacagacccaucuauaauc

SEQ ID NO: 1306078 - RNA, 19 nt, Artificial Sequence
  Description of Artificial Sequence: Synthetic oligonucleotide
  Sense strand starting at position 3633 of SEQ ID NO: 1241870
uauagaugggucuguauga

SEQ ID NO: 1306079 - RNA, 19 nt, Artificial Sequence
  Description of Artificial Sequence: Synthetic oligonucleotide
  Antisense strand to SEQ ID NO: 1306078
ucauacagacccaucuaua

SEQ ID NO: 1306080 - RNA, 19 nt, Artificial Sequence
  Description of Artificial Sequence: Synthetic oligonucleotide
  Sense strand starting at position 3634 of SEQ ID NO: 1241870
auagaugggucuguaugau

SEQ ID NO: 1306081 - RNA, 19 nt, Artificial Sequence
  Description of Artificial Sequence: Synthetic oligonucleotide
  Antisense strand to SEQ ID NO: 1306080
aucauacagacccaucuau

SEQ ID NO: 1306082 - RNA, 19 nt, Artificial Sequence
  Description of Artificial Sequence: Synthetic oligonucleotide
  Sense strand starting at position 3655 of SEQ ID NO: 1241870
gcugguaccacaugaaaga

SEQ ID NO: 1306083 - RNA, 19 nt, Artificial Sequence
  Description of Artificial Sequence: Synthetic oligonucleotide
  Antisense strand to SEQ ID NO: 1306082
ucuuucaugugguaccagc

SEQ ID NO: 1306084 - RNA, 19 nt, Artificial Sequence
  Description of Artificial Sequence: Synthetic oligonucleotide
  Sense strand starting at position 3671 of SEQ ID NO: 1241870
agagaacagcugcaguauu

SEQ ID NO: 1306085 - RNA, 19 nt, Artificial Sequence
  Description of Artificial Sequence: Synthetic oligonucleotide
  Antisense strand to SEQ ID NO: 1306084
aauacugcagcuguucucu

SEQ ID NO: 1306086 - RNA, 19 nt, Artificial Sequence
  Description of Artificial Sequence: Synthetic oligonucleotide
  Sense strand starting at position 3730 of SEQ ID NO: 1241870
gaaggagaauccuuccagu

SEQ ID NO: 1306087 - RNA, 19 nt, Artificial Sequence
  Description of Artificial Sequence: Synthetic oligonucleotide
  Antisense strand to SEQ ID NO: 1306086
acuggaaggauucuccuuc

SEQ ID NO: 1306088 - RNA, 19 nt, Artificial Sequence
  Description of Artificial Sequence: Synthetic oligonucleotide
  Sense strand starting at position 3736 of SEQ ID NO: 1241870
gaauccuuccagugagcag

SEQ ID NO: 1306089 - RNA, 19 nt, Artificial Sequence
  Description of Artificial Sequence: Synthetic oligonucleotide
  Antisense strand to SEQ ID NO: 1306088
cugcucacuggaaggauuc

SEQ ID NO: 1306090 - RNA, 19 nt, Artificial Sequence
  Description of Artificial Sequence: Synthetic oligonucleotide
  Sense strand starting at position 3769 of SEQ ID NO: 1241870
ccacuaugucuggagugag

SEQ ID NO: 1306091 - RNA, 19 nt, Artificial Sequence
  Description of Artificial Sequence: Synthetic oligonucleotide
  Antisense strand to SEQ ID NO: 1306090
cucacuccagacauagugg

SEQ ID NO: 1306092 - RNA, 19 nt, Artificial Sequence
  Description of Artificial Sequence: Synthetic oligonucleotide
  Sense strand starting at position 3772 of SEQ ID NO: 1241870
cuaugucuggagugagaga

SEQ ID NO: 1306093 - RNA, 19 nt, Artificial Sequence
  Description of Artificial Sequence: Synthetic oligonucleotide
  Antisense strand to SEQ ID NO: 1306092
ucucucacuccagacauag

SEQ ID NO: 1306094 - RNA, 19 nt, Artificial Sequence
  Description of Artificial Sequence: Synthetic oligonucleotide
  Sense strand starting at position 3901 of SEQ ID NO: 1241870
gaaagagauauguggcuga

SEQ ID NO: 1306095 - RNA, 19 nt, Artificial Sequence
  Description of Artificial Sequence: Synthetic oligonucleotide
  Antisense strand to SEQ ID NO: 1306094
ucagccacauaucucuuuc

SEQ ID NO: 1306096 - RNA, 19 nt, Artificial Sequence
  Description of Artificial Sequence: Synthetic oligonucleotide
  Sense strand starting at position 3904 of SEQ ID NO: 1241870
agagauauguggcugaauc

SEQ ID NO: 1306097 - RNA, 19 nt, Artificial Sequence
  Description of Artificial Sequence: Synthetic oligonucleotide
  Antisense strand to SEQ ID NO: 1306096
gauucagccacauaucucu

SEQ ID NO: 1306098 - RNA, 19 nt, Artificial Sequence
  Description of Artificial Sequence: Synthetic oligonucleotide
  Sense strand starting at position 3905 of SEQ ID NO: 1241870
gagauauguggcugaaucc

SEQ ID NO: 1306099 - RNA, 19 nt, Artificial Sequence
  Description of Artificial Sequence: Synthetic oligonucleotide
  Antisense strand to SEQ ID NO: 1306098
ggauucagccacauaucuc

SEQ ID NO: 1306100 - RNA, 19 nt, Artificial Sequence
  Description of Artificial Sequence: Synthetic oligonucleotide
  Sense strand starting at position 3940 of SEQ ID NO: 1241870
ugaagauaucugcaucuca

SEQ ID NO: 1306101 - RNA, 19 nt, Artificial Sequence
  Description of Artificial Sequence: Synthetic oligonucleotide
  Antisense strand to SEQ ID NO: 1306100
ugagaugcagauaucuuca

SEQ ID NO: 1306102 - RNA, 19 nt, Artificial Sequence
  Description of Artificial Sequence: Synthetic oligonucleotide
  Sense strand starting at position 579 of SEQ ID NO: 1241871
acuacuucuccagguuacu

SEQ ID NO: 1306103 - RNA, 19 nt, Artificial Sequence
  Description of Artificial Sequence: Synthetic oligonucleotide
  Antisense strand to SEQ ID NO: 1306102
aguaaccuggagaaguagu

SEQ ID NO: 1306104 - RNA, 19 nt, Artificial Sequence
  Description of Artificial Sequence: Synthetic oligonucleotide
  Sense strand starting at position 594 of SEQ ID NO: 1241871
uacugauaggacuguaaac

SEQ ID NO: 1306105 - RNA, 19 nt, Artificial Sequence
  Description of Artificial Sequence: Synthetic oligonucleotide
  Antisense strand to SEQ ID NO: 1306104
guuuacaguccuaucagua

SEQ ID NO: 1306106 - RNA, 19 nt, Artificial Sequence
  Description of Artificial Sequence: Synthetic oligonucleotide
  Sense strand starting at position 617 of SEQ ID NO: 1241871
cuuauaagguaccugucau

SEQ ID NO: 1306107 - RNA, 19 nt, Artificial Sequence
  Description of Artificial Sequence: Synthetic oligonucleotide
  Antisense strand to SEQ ID NO: 1306106
augacagguaccuuauaag

SEQ ID NO: 1306108 - RNA, 19 nt, Artificial Sequence
  Description of Artificial Sequence: Synthetic oligonucleotide
  Sense strand starting at position 642 of SEQ ID NO: 1241871
uggcauugaaagugacaca

SEQ ID NO: 1306109 - RNA, 19 nt, Artificial Sequence
  Description of Artificial Sequence: Synthetic oligonucleotide
  Antisense strand to SEQ ID NO: 1306108
ugugucacuuucaaugcca

SEQ ID NO: 1306110 - RNA, 19 nt, Artificial Sequence
  Description of Artificial Sequence: Synthetic oligonucleotide
  Sense strand starting at position 825 of SEQ ID NO: 1241871
ucgaauuccugucccuuaa

SEQ ID NO: 1306111 - RNA, 19 nt, Artificial Sequence
  Description of Artificial Sequence: Synthetic oligonucleotide
  Antisense strand to SEQ ID NO: 1306110
uuaagggacaggaauucga

SEQ ID NO: 1306112 - RNA, 19 nt, Artificial Sequence
  Description of Artificial Sequence: Synthetic oligonucleotide
  Sense strand starting at position 852 of SEQ ID NO: 1241871
gugacacaccaguguuauu

SEQ ID NO: 1306113 - RNA, 19 nt, Artificial Sequence
  Description of Artificial Sequence: Synthetic oligonucleotide
  Antisense strand to SEQ ID NO: 1306112
aauaacacuggugugucac

SEQ ID NO: 1306114 - RNA, 19 nt, Artificial Sequence
  Description of Artificial Sequence: Synthetic oligonucleotide
  Sense strand starting at position 862 of SEQ ID NO: 1241871
aguguuauuuaucugcaug

SEQ ID NO: 1306115 - RNA, 19 nt, Artificial Sequence
  Description of Artificial Sequence: Synthetic oligonucleotide
  Antisense strand to SEQ ID NO: 1306114
caugcagauaaauaacacu

SEQ ID NO: 1306116 - RNA, 19 nt, Artificial Sequence
  Description of Artificial Sequence: Synthetic oligonucleotide
  Sense strand starting at position 933 of SEQ ID NO: 1241871
uaaaguucugugugaccua

SEQ ID NO: 1306117 - RNA, 19 nt, Artificial Sequence
  Description of Artificial Sequence: Synthetic oligonucleotide
  Antisense strand to SEQ ID NO: 1306116
uaggucacacagaacuuua

SEQ ID NO: 1306118 - RNA, 19 nt, Artificial Sequence
  Description of Artificial Sequence: Synthetic oligonucleotide
  Sense strand starting at position 979 of SEQ ID NO: 1241871
ccuaauguugugggacaua

SEQ ID NO: 1306119 - RNA, 19 nt, Artificial Sequence
  Description of Artificial Sequence: Synthetic oligonucleotide
  Antisense strand to SEQ ID NO: 1306118
uaugucccacaacauuagg

SEQ ID NO: 1306120 - RNA, 19 nt, Artificial Sequence
  Description of Artificial Sequence: Synthetic oligonucleotide
  Sense strand starting at position 984 of SEQ ID NO: 1241871
uguugugggacauacuuua

SEQ ID NO: 1306121 - RNA, 19 nt, Artificial Sequence
  Description of Artificial Sequence: Synthetic oligonucleotide
  Antisense strand to SEQ ID NO: 1306120
uaaaguaugucccacaaca

SEQ ID NO: 1306122 - RNA, 19 nt, Artificial Sequence
  Description of Artificial Sequence: Synthetic oligonucleotide
  Sense strand starting at position 1056 of SEQ ID NO: 1241871
ucuuucuguacggagacaa

SEQ ID NO: 1306123 - RNA, 19 nt, Artificial Sequence
  Description of Artificial Sequence: Synthetic oligonucleotide
  Antisense strand to SEQ ID NO: 1306122
uugucuccguacagaaaga

SEQ ID NO: 1306124 - RNA, 19 nt, Artificial Sequence
  Description of Artificial Sequence: Synthetic oligonucleotide
  Sense strand starting at position 1124 of SEQ ID NO: 1241871
cgcuucucuggguaaugau

SEQ ID NO: 1306125 - RNA, 19 nt, Artificial Sequence
  Description of Artificial Sequence: Synthetic oligonucleotide
  Antisense strand to SEQ ID NO: 1306124
aucauuacccagagaagcg

SEQ ID NO: 1306126 - RNA, 19 nt, Artificial Sequence
  Description of Artificial Sequence: Synthetic oligonucleotide
  Sense strand starting at position 1357 of SEQ ID NO: 1241871
gaugcaguauucuuaagca

SEQ ID NO: 1306127 - RNA, 19 nt, Artificial Sequence
  Description of Artificial Sequence: Synthetic oligonucleotide
  Antisense strand to SEQ ID NO: 1306126
ugcuuaagaauacugcauc

SEQ ID NO: 1306128 - RNA, 19 nt, Artificial Sequence
  Description of Artificial Sequence: Synthetic oligonucleotide
  Sense strand starting at position 1468 of SEQ ID NO: 1241871
ccagcucgugauuauggaa

SEQ ID NO: 1306129 - RNA, 19 nt, Artificial Sequence
  Description of Artificial Sequence: Synthetic oligonucleotide
  Antisense strand to SEQ ID NO: 1306128
uuccauaaucacgagcugg

SEQ ID NO: 1306130 - RNA, 19 nt, Artificial Sequence
  Description of Artificial Sequence: Synthetic oligonucleotide
  Sense strand starting at position 1551 of SEQ ID NO: 1241871
agaggucugggcugggauu

SEQ ID NO: 1306131 - RNA, 19 nt, Artificial Sequence
  Description of Artificial Sequence: Synthetic oligonucleotide
  Antisense strand to SEQ ID NO: 1306130
aaucccagcccagaccucu

SEQ ID NO: 1306132 - RNA, 19 nt, Artificial Sequence
  Description of Artificial Sequence: Synthetic oligonucleotide
  Sense strand starting at position 1552 of SEQ ID NO: 1241871
gaggucugggcugggauua

SEQ ID NO: 1306133 - RNA, 19 nt, Artificial Sequence
  Description of Artificial Sequence: Synthetic oligonucleotide
  Antisense strand to SEQ ID NO: 1306132
uaaucccagcccagaccuc

SEQ ID NO: 1306134 - RNA, 19 nt, Artificial Sequence
  Description of Artificial Sequence: Synthetic oligonucleotide
  Sense strand starting at position 1562 of SEQ ID NO: 1241871
cugggauuacucugugcag

SEQ ID NO: 1306135 - RNA, 19 nt, Artificial Sequence
  Description of Artificial Sequence: Synthetic oligonucleotide
  Antisense strand to SEQ ID NO: 1306134
cugcacagaguaaucccag

SEQ ID NO: 1306136 - RNA, 19 nt, Artificial Sequence
  Description of Artificial Sequence: Synthetic oligonucleotide
  Sense strand starting at position 1598 of SEQ ID NO: 1241871
uggaguauaugggcaacaa

SEQ ID NO: 1306137 - RNA, 19 nt, Artificial Sequence
  Description of Artificial Sequence: Synthetic oligonucleotide
  Antisense strand to SEQ ID NO: 1306136
uuguugcccauauacucca

SEQ ID NO: 1306138 - RNA, 19 nt, Artificial Sequence
  Description of Artificial Sequence: Synthetic oligonucleotide
  Sense strand starting at position 1736 of SEQ ID NO: 1241871
ccaggauguuggccagacu

SEQ ID NO: 1306139 - RNA, 19 nt, Artificial Sequence
  Description of Artificial Sequence: Synthetic oligonucleotide
  Antisense strand to SEQ ID NO: 1306138
agucuggccaacauccugg

SEQ ID NO: 1306140 - RNA, 19 nt, Artificial Sequence
  Description of Artificial Sequence: Synthetic oligonucleotide
  Sense strand starting at position 1737 of SEQ ID NO: 1241871
caggauguuggccagacua

SEQ ID NO: 1306141 - RNA, 19 nt, Artificial Sequence
  Description of Artificial Sequence: Synthetic oligonucleotide
  Antisense strand to SEQ ID NO: 1306140
uagucuggccaacauccug

SEQ ID NO: 1306142 - RNA, 19 nt, Artificial Sequence
  Description of Artificial Sequence: Synthetic oligonucleotide
  Sense strand starting at position 1739 of SEQ ID NO: 1241871
ggauguuggccagacuaga

SEQ ID NO: 1306143 - RNA, 19 nt, Artificial Sequence
  Description of Artificial Sequence: Synthetic oligonucleotide
  Antisense strand to SEQ ID NO: 1306142
ucuagucuggccaacaucc

SEQ ID NO: 1306144 - RNA, 19 nt, Artificial Sequence
  Description of Artificial Sequence: Synthetic oligonucleotide
  Sense strand starting at position 2140 of SEQ ID NO: 1241871
gggucagaugacuacgguu

SEQ ID NO: 1306145 - RNA, 19 nt, Artificial Sequence
  Description of Artificial Sequence: Synthetic oligonucleotide
  Antisense strand to SEQ ID NO: 1306144
aaccguagucaucugaccc

SEQ ID NO: 1306146 - RNA, 19 nt, Artificial Sequence
  Description of Artificial Sequence: Synthetic oligonucleotide
  Sense strand starting at position 2211 of SEQ ID NO: 1241871
cggugaaggcuuuaaagga

SEQ ID NO: 1306147 - RNA, 19 nt, Artificial Sequence
  Description of Artificial Sequence: Synthetic oligonucleotide
  Antisense strand to SEQ ID NO: 1306146
uccuuuaaagccuucaccg

SEQ ID NO: 1306148 - RNA, 19 nt, Artificial Sequence
  Description of Artificial Sequence: Synthetic oligonucleotide
  Sense strand starting at position 2247 of SEQ ID NO: 1241871
cggcuguggcggguugaaa

SEQ ID NO: 1306149 - RNA, 19 nt, Artificial Sequence
  Description of Artificial Sequence: Synthetic oligonucleotide
  Antisense strand to SEQ ID NO: 1306148
uuucaacccgccacagccg

SEQ ID NO: 1306150 - RNA, 19 nt, Artificial Sequence
  Description of Artificial Sequence: Synthetic oligonucleotide
  Sense strand starting at position 2436 of SEQ ID NO: 1241871
aggugcaaauugucauuga

SEQ ID NO: 1306151 - RNA, 19 nt, Artificial Sequence
  Description of Artificial Sequence: Synthetic oligonucleotide
  Antisense strand to SEQ ID NO: 1306150
ucaaugacaauuugcaccu

SEQ ID NO: 1306152 - RNA, 19 nt, Artificial Sequence
  Description of Artificial Sequence: Synthetic oligonucleotide
  Sense strand starting at position 2439 of SEQ ID NO: 1241871
ugcaaauugucauugaacc

SEQ ID NO: 1306153 - RNA, 19 nt, Artificial Sequence
  Description of Artificial Sequence: Synthetic oligonucleotide
  Antisense strand to SEQ ID NO: 1306152
gguucaaugacaauuugca

SEQ ID NO: 1306154 - RNA, 19 nt, Artificial Sequence
  Description of Artificial Sequence: Synthetic oligonucleotide
  Sense strand starting at position 2445 of SEQ ID NO: 1241871
uugucauugaaccgggaaa

SEQ ID NO: 1306155 - RNA, 19 nt, Artificial Sequence
  Description of Artificial Sequence: Synthetic oligonucleotide
  Antisense strand to SEQ ID NO: 1306154
uuucccgguucaaugacaa

SEQ ID NO: 1306156 - RNA, 19 nt, Artificial Sequence
  Description of Artificial Sequence: Synthetic oligonucleotide
  Sense strand starting at position 2447 of SEQ ID NO: 1241871
gucauugaaccgggaaagu

SEQ ID NO: 1306157 - RNA, 19 nt, Artificial Sequence
  Description of Artificial Sequence: Synthetic oligonucleotide
  Antisense strand to SEQ ID NO: 1306156
acuuucccgguucaaugac

SEQ ID NO: 1306158 - RNA, 19 nt, Artificial Sequence
  Description of Artificial Sequence: Synthetic oligonucleotide
  Sense strand starting at position 2498 of SEQ ID NO: 1241871
gagaaaccaugcuucuguu

SEQ ID NO: 1306159 - RNA, 19 nt, Artificial Sequence
  Description of Artificial Sequence: Synthetic oligonucleotide
  Antisense strand to SEQ ID NO: 1306158
aacagaagcaugguuucuc

SEQ ID NO: 1306160 - RNA, 19 nt, Artificial Sequence
  Description of Artificial Sequence: Synthetic oligonucleotide
  Sense strand starting at position 2539 of SEQ ID NO: 1241871
gaaugugggcccugugaug

SEQ ID NO: 1306161 - RNA, 19 nt, Artificial Sequence
  Description of Artificial Sequence: Synthetic oligonucleotide
  Antisense strand to SEQ ID NO: 1306160
caucacagggcccacauuc

SEQ ID NO: 1306162 - RNA, 19 nt, Artificial Sequence
  Description of Artificial Sequence: Synthetic oligonucleotide
  Sense strand starting at position 2830 of SEQ ID NO: 1241871
ccuuauagccgauauugca

SEQ ID NO: 1306163 - RNA, 19 nt, Artificial Sequence
  Description of Artificial Sequence: Synthetic oligonucleotide
  Antisense strand to SEQ ID NO: 1306162
ugcaauaucggcuauaagg

SEQ ID NO: 1306164 - RNA, 19 nt, Artificial Sequence
  Description of Artificial Sequence: Synthetic oligonucleotide
  Sense strand starting at position 2863 of SEQ ID NO: 1241871
gugcgagguaccgcauaua

SEQ ID NO: 1306165 - RNA, 19 nt, Artificial Sequence
  Description of Artificial Sequence: Synthetic oligonucleotide
  Antisense strand to SEQ ID NO: 1306164
uauaugcgguaccucgcac

SEQ ID NO: 1306166 - RNA, 19 nt, Artificial Sequence
  Description of Artificial Sequence: Synthetic oligonucleotide
  Sense strand starting at position 2866 of SEQ ID NO: 1241871
cgagguaccgcauauaaau

SEQ ID NO: 1306167 - RNA, 19 nt, Artificial Sequence
  Description of Artificial Sequence: Synthetic oligonucleotide
  Antisense strand to SEQ ID NO: 1306166
auuuauaugcgguaccucg

SEQ ID NO: 1306168 - RNA, 19 nt, Artificial Sequence
  Description of Artificial Sequence: Synthetic oligonucleotide
  Sense strand starting at position 2982 of SEQ ID NO: 1241871
ccuucuugaggcuaaauaa

SEQ ID NO: 1306169 - RNA, 19 nt, Artificial Sequence
  Description of Artificial Sequence: Synthetic oligonucleotide
  Antisense strand to SEQ ID NO: 1306168
uuauuuagccucaagaagg

SEQ ID NO: 1306170 - RNA, 19 nt, Artificial Sequence
  Description of Artificial Sequence: Synthetic oligonucleotide
  Sense strand starting at position 3097 of SEQ ID NO: 1241871
ugcuaugaacuuugguaua

SEQ ID NO: 1306171 - RNA, 19 nt, Artificial Sequence
  Description of Artificial Sequence: Synthetic oligonucleotide
  Antisense strand to SEQ ID NO: 1306170
uauaccaaaguucauagca

SEQ ID NO: 1306172 - RNA, 19 nt, Artificial Sequence
  Description of Artificial Sequence: Synthetic oligonucleotide
  Sense strand starting at position 3099 of SEQ ID NO: 1241871
cuaugaacuuugguauaca

SEQ ID NO: 1306173 - RNA, 19 nt, Artificial Sequence
  Description of Artificial Sequence: Synthetic oligonucleotide
  Antisense strand to SEQ ID NO: 1306172
uguauaccaaaguucauag

SEQ ID NO: 1306174 - RNA, 19 nt, Artificial Sequence
  Description of Artificial Sequence: Synthetic oligonucleotide
  Sense strand starting at position 3241 of SEQ ID NO: 1241871
uccauagaauagcugaaau

SEQ ID NO: 1306175 - RNA, 19 nt, Artificial Sequence
  Description of Artificial Sequence: Synthetic oligonucleotide
  Antisense strand to SEQ ID NO: 1306174
auuucagcuauucuaugga

SEQ ID NO: 1306176 - RNA, 19 nt, Artificial Sequence
  Description of Artificial Sequence: Synthetic oligonucleotide
  Sense strand starting at position 3301 of SEQ ID NO: 1241871
gggacucucauacaguguu

SEQ ID NO: 1306177 - RNA, 19 nt, Artificial Sequence
  Description of Artificial Sequence: Synthetic oligonucleotide
  Antisense strand to SEQ ID NO: 1306176
aacacuguaugagaguccc

SEQ ID NO: 1306178 - RNA, 19 nt, Artificial Sequence
  Description of Artificial Sequence: Synthetic oligonucleotide
  Sense strand starting at position 3304 of SEQ ID NO: 1241871
acucucauacaguguugau

SEQ ID NO: 1306179 - RNA, 19 nt, Artificial Sequence
  Description of Artificial Sequence: Synthetic oligonucleotide
  Antisense strand to SEQ ID NO: 1306178
aucaacacuguaugagagu

SEQ ID NO: 1306180 - RNA, 19 nt, Artificial Sequence
  Description of Artificial Sequence: Synthetic oligonucleotide
  Sense strand starting at position 3760 of SEQ ID NO: 1241871
acagcuuaguaaucaauug

SEQ ID NO: 1306181 - RNA, 19 nt, Artificial Sequence
  Description of Artificial Sequence: Synthetic oligonucleotide
  Antisense strand to SEQ ID NO: 1306180
caauugauuacuaagcugu

SEQ ID NO: 1306182 - RNA, 19 nt, Artificial Sequence
  Description of Artificial Sequence: Synthetic oligonucleotide
  Sense strand starting at position 157 of SEQ ID NO: 1241872
ugcuuaucugcauauuugu

SEQ ID NO: 1306183 - RNA, 19 nt, Artificial Sequence
  Description of Artificial Sequence: Synthetic oligonucleotide
  Antisense strand to SEQ ID NO: 1306182
acaaauaugcagauaagca

SEQ ID NO: 1306184 - RNA, 19 nt, Artificial Sequence
  Description of Artificial Sequence: Synthetic oligonucleotide
  Sense strand starting at position 164 of SEQ ID NO: 1241872
cugcauauuugugucacuu

SEQ ID NO: 1306185 - RNA, 19 nt, Artificial Sequence
  Description of Artificial Sequence: Synthetic oligonucleotide
  Antisense strand to SEQ ID NO: 1306184
aagugacacaaauaugcag

SEQ ID NO: 1306186 - RNA, 19 nt, Artificial Sequence
  Description of Artificial Sequence: Synthetic oligonucleotide
  Sense strand starting at position 175 of SEQ ID NO: 1241872
ugucacuuucuguaggaua

SEQ ID NO: 1306187 - RNA, 19 nt, Artificial Sequence
  Description of Artificial Sequence: Synthetic oligonucleotide
  Antisense strand to SEQ ID NO: 1306186
uauccuacagaaagugaca

SEQ ID NO: 1306188 - RNA, 19 nt, Artificial Sequence
  Description of Artificial Sequence: Synthetic oligonucleotide
  Sense strand starting at position 177 of SEQ ID NO: 1241872
ucacuuucuguaggauaaa

SEQ ID NO: 1306189 - RNA, 19 nt, Artificial Sequence
  Description of Artificial Sequence: Synthetic oligonucleotide
  Antisense strand to SEQ ID NO: 1306188
uuuauccuacagaaaguga

SEQ ID NO: 1306190 - RNA, 19 nt, Artificial Sequence
  Description of Artificial Sequence: Synthetic oligonucleotide
  Sense strand starting at position 354 of SEQ ID NO: 1241872
gaugcaauauggguaaaga

SEQ ID NO: 1306191 - RNA, 19 nt, Artificial Sequence
  Description of Artificial Sequence: Synthetic oligonucleotide
  Antisense strand to SEQ ID NO: 1306190
ucuuuacccauauugcauc

SEQ ID NO: 1306192 - RNA, 19 nt, Artificial Sequence
  Description of Artificial Sequence: Synthetic oligonucleotide
  Sense strand starting at position 502 of SEQ ID NO: 1241872
uuuggaccuuuguuaauaa

SEQ ID NO: 1306193 - RNA, 19 nt, Artificial Sequence
  Description of Artificial Sequence: Synthetic oligonucleotide
  Antisense strand to SEQ ID NO: 1306192
uuauuaacaaagguccaaa

SEQ ID NO: 1306194 - RNA, 19 nt, Artificial Sequence
  Description of Artificial Sequence: Synthetic oligonucleotide
  Sense strand starting at position 509 of SEQ ID NO: 1241872
cuuuguuaauaaguaguga

SEQ ID NO: 1306195 - RNA, 19 nt, Artificial Sequence
  Description of Artificial Sequence: Synthetic oligonucleotide
  Antisense strand to SEQ ID NO: 1306194
ucacuacuuauuaacaaag

SEQ ID NO: 1306196 - RNA, 19 nt, Artificial Sequence
  Description of Artificial Sequence: Synthetic oligonucleotide
  Sense strand starting at position 517 of SEQ ID NO: 1241872
auaaguagugaggagcuau

SEQ ID NO: 1306197 - RNA, 19 nt, Artificial Sequence
  Description of Artificial Sequence: Synthetic oligonucleotide
  Antisense strand to SEQ ID NO: 1306196
auagcuccucacuacuuau

SEQ ID NO: 1306198 - RNA, 19 nt, Artificial Sequence
  Description of Artificial Sequence: Synthetic oligonucleotide
  Sense strand starting at position 540 of SEQ ID NO: 1241872
gguuucugaguucaggaau

SEQ ID NO: 1306199 - RNA, 19 nt, Artificial Sequence
  Description of Artificial Sequence: Synthetic oligonucleotide
  Antisense strand to SEQ ID NO: 1306198
auuccugaacucagaaacc

SEQ ID NO: 1306200 - RNA, 19 nt, Artificial Sequence
  Description of Artificial Sequence: Synthetic oligonucleotide
  Sense strand starting at position 569 of SEQ ID NO: 1241872
aagcuuuaucuugggacag

SEQ ID NO: 1306201 - RNA, 19 nt, Artificial Sequence
  Description of Artificial Sequence: Synthetic oligonucleotide
  Antisense strand to SEQ ID NO: 1306200
cugucccaagauaaagcuu

SEQ ID NO: 1306202 - RNA, 19 nt, Artificial Sequence
  Description of Artificial Sequence: Synthetic oligonucleotide
  Sense strand starting at position 605 of SEQ ID NO: 1241872
gacagaugcguugaaagag

SEQ ID NO: 1306203 - RNA, 19 nt, Artificial Sequence
  Description of Artificial Sequence: Synthetic oligonucleotide
  Antisense strand to SEQ ID NO: 1306202
cucuuucaacgcaucuguc

SEQ ID NO: 1306204 - RNA, 19 nt, Artificial Sequence
  Description of Artificial Sequence: Synthetic oligonucleotide
  Sense strand starting at position 812 of SEQ ID NO: 1241872
caugccuuacgugagauua

SEQ ID NO: 1306205 - RNA, 19 nt, Artificial Sequence
  Description of Artificial Sequence: Synthetic oligonucleotide
  Antisense strand to SEQ ID NO: 1306204
uaaucucacguaaggcaug

SEQ ID NO: 1306206 - RNA, 19 nt, Artificial Sequence
  Description of Artificial Sequence: Synthetic oligonucleotide
  Sense strand starting at position 942 of SEQ ID NO: 1241872
acuuaaugaaagugugaag

SEQ ID NO: 1306207 - RNA, 19 nt, Artificial Sequence
  Description of Artificial Sequence: Synthetic oligonucleotide
  Antisense strand to SEQ ID NO: 1306206
cuucacacuuucauuaagu

SEQ ID NO: 1306208 - RNA, 19 nt, Artificial Sequence
  Description of Artificial Sequence: Synthetic oligonucleotide
  Sense strand starting at position 1115 of SEQ ID NO: 1241872
aaaugcucugagugaccau

SEQ ID NO: 1306209 - RNA, 19 nt, Artificial Sequence
  Description of Artificial Sequence: Synthetic oligonucleotide
  Antisense strand to SEQ ID NO: 1306208
auggucacucagagcauuu

SEQ ID NO: 1306210 - RNA, 19 nt, Artificial Sequence
  Description of Artificial Sequence: Synthetic oligonucleotide
  Sense strand starting at position 1211 of SEQ ID NO: 1241872
gaugccuuagggcauuaga

SEQ ID NO: 1306211 - RNA, 19 nt, Artificial Sequence
  Description of Artificial Sequence: Synthetic oligonucleotide
  Antisense strand to SEQ ID NO: 1306210
ucuaaugcccuaaggcauc

SEQ ID NO: 1306212 - RNA, 19 nt, Artificial Sequence
  Description of Artificial Sequence: Synthetic oligonucleotide
  Sense strand starting at position 1246 of SEQ ID NO: 1241872
gaacucggucgagaagacu

SEQ ID NO: 1306213 - RNA, 19 nt, Artificial Sequence
  Description of Artificial Sequence: Synthetic oligonucleotide
  Antisense strand to SEQ ID NO: 1306212
agucuucucgaccgaguuc

SEQ ID NO: 1306214 - RNA, 19 nt, Artificial Sequence
  Description of Artificial Sequence: Synthetic oligonucleotide
  Sense strand starting at position 1282 of SEQ ID NO: 1241872
gaaguaauaucaccgagcu

SEQ ID NO: 1306215 - RNA, 19 nt, Artificial Sequence
  Description of Artificial Sequence: Synthetic oligonucleotide
  Antisense strand to SEQ ID NO: 1306214
agcucggugauauuacuuc

SEQ ID NO: 1306216 - RNA, 19 nt, Artificial Sequence
  Description of Artificial Sequence: Synthetic oligonucleotide
  Sense strand starting at position 1284 of SEQ ID NO: 1241872
aguaauaucaccgagcuga

SEQ ID NO: 1306217 - RNA, 19 nt, Artificial Sequence
  Description of Artificial Sequence: Synthetic oligonucleotide
  Antisense strand to SEQ ID NO: 1306216
ucagcucggugauauuacu

SEQ ID NO: 1306218 - RNA, 19 nt, Artificial Sequence
  Description of Artificial Sequence: Synthetic oligonucleotide
  Sense strand starting at position 1360 of SEQ ID NO: 1241872
cugaucaucuuucugguaa

SEQ ID NO: 1306219 - RNA, 19 nt, Artificial Sequence
  Description of Artificial Sequence: Synthetic oligonucleotide
  Antisense strand to SEQ ID NO: 1306218
uuaccagaaagaugaucag

SEQ ID NO: 1306220 - RNA, 19 nt, Artificial Sequence
  Description of Artificial Sequence: Synthetic oligonucleotide
  Sense strand starting at position 1404 of SEQ ID NO: 1241872
acaaauaaccaaugacgua

SEQ ID NO: 1306221 - RNA, 19 nt, Artificial Sequence
  Description of Artificial Sequence: Synthetic oligonucleotide
  Antisense strand to SEQ ID NO: 1306220
uacgucauugguuauuugu

SEQ ID NO: 1306222 - RNA, 19 nt, Artificial Sequence
  Description of Artificial Sequence: Synthetic oligonucleotide
  Sense strand starting at position 1624 of SEQ ID NO: 1241872
gaguucuacucacucaggu

SEQ ID NO: 1306223 - RNA, 19 nt, Artificial Sequence
  Description of Artificial Sequence: Synthetic oligonucleotide
  Antisense strand to SEQ ID NO: 1306222
accugagugaguagaacuc

SEQ ID NO: 1306224 - RNA, 19 nt, Artificial Sequence
  Description of Artificial Sequence: Synthetic oligonucleotide
  Sense strand starting at position 2247 of SEQ ID NO: 1241872
gggagugcucgcuuucccu

SEQ ID NO: 1306225 - RNA, 19 nt, Artificial Sequence
  Description of Artificial Sequence: Synthetic oligonucleotide
  Antisense strand to SEQ ID NO: 1306224
agggaaagcgagcacuccc

SEQ ID NO: 1306226 - RNA, 19 nt, Artificial Sequence
  Description of Artificial Sequence: Synthetic oligonucleotide
  Sense strand starting at position 2353 of SEQ ID NO: 1241872
ccuuguuaaguguagauga

SEQ ID NO: 1306227 - RNA, 19 nt, Artificial Sequence
  Description of Artificial Sequence: Synthetic oligonucleotide
  Antisense strand to SEQ ID NO: 1306226
ucaucuacacuuaacaagg

SEQ ID NO: 1306228 - RNA, 19 nt, Artificial Sequence
  Description of Artificial Sequence: Synthetic oligonucleotide
  Sense strand starting at position 2355 of SEQ ID NO: 1241872
uuguuaaguguagaugaaa

SEQ ID NO: 1306229 - RNA, 19 nt, Artificial Sequence
  Description of Artificial Sequence: Synthetic oligonucleotide
  Antisense strand to SEQ ID NO: 1306228
uuucaucuacacuuaacaa

SEQ ID NO: 1306230 - RNA, 19 nt, Artificial Sequence
  Description of Artificial Sequence: Synthetic oligonucleotide
  Sense strand starting at position 2402 of SEQ ID NO: 1241872
ugaacaaauucggccaagu

SEQ ID NO: 1306231 - RNA, 19 nt, Artificial Sequence
  Description of Artificial Sequence: Synthetic oligonucleotide
  Antisense strand to SEQ ID NO: 1306230
acuuggccgaauuuguuca

SEQ ID NO: 1306232 - RNA, 19 nt, Artificial Sequence
  Description of Artificial Sequence: Synthetic oligonucleotide
  Sense strand starting at position 2411 of SEQ ID NO: 1241872
ucggccaaguuaucagaaa

SEQ ID NO: 1306233 - RNA, 19 nt, Artificial Sequence
  Description of Artificial Sequence: Synthetic oligonucleotide
  Antisense strand to SEQ ID NO: 1306232
uuucugauaacuuggccga

SEQ ID NO: 1306234 - RNA, 19 nt, Artificial Sequence
  Description of Artificial Sequence: Synthetic oligonucleotide
  Sense strand starting at position 2519 of SEQ ID NO: 1241872
acgauuuagcucugccauc

SEQ ID NO: 1306235 - RNA, 19 nt, Artificial Sequence
  Description of Artificial Sequence: Synthetic oligonucleotide
  Antisense strand to SEQ ID NO: 1306234
gauggcagagcuaaaucgu

SEQ ID NO: 1306236 - RNA, 19 nt, Artificial Sequence
  Description of Artificial Sequence: Synthetic oligonucleotide
  Sense strand starting at position 2520 of SEQ ID NO: 1241872
cgauuuagcucugccaucu

SEQ ID NO: 1306237 - RNA, 19 nt, Artificial Sequence
  Description of Artificial Sequence: Synthetic oligonucleotide
  Antisense strand to SEQ ID NO: 1306236
agauggcagagcuaaaucg

SEQ ID NO: 1306238 - RNA, 19 nt, Artificial Sequence
  Description of Artificial Sequence: Synthetic oligonucleotide
  Sense strand starting at position 3014 of SEQ ID NO: 1241872
ggcugauuguaaucauagg

SEQ ID NO: 1306239 - RNA, 19 nt, Artificial Sequence
  Description of Artificial Sequence: Synthetic oligonucleotide
  Antisense strand to SEQ ID NO: 1306238
ccuaugauuacaaucagcc

SEQ ID NO: 1306240 - RNA, 19 nt, Artificial Sequence
  Description of Artificial Sequence: Synthetic oligonucleotide
  Sense strand starting at position 3077 of SEQ ID NO: 1241872
gaagaaugauuagagagau

SEQ ID NO: 1306241 - RNA, 19 nt, Artificial Sequence
  Description of Artificial Sequence: Synthetic oligonucleotide
  Antisense strand to SEQ ID NO: 1306240
aucucucuaaucauucuuc

SEQ ID NO: 1306242 - RNA, 19 nt, Artificial Sequence
  Description of Artificial Sequence: Synthetic oligonucleotide
  Sense strand starting at position 3193 of SEQ ID NO: 1241872
ucucuaaugcucugaugac

SEQ ID NO: 1306243 - RNA, 19 nt, Artificial Sequence
  Description of Artificial Sequence: Synthetic oligonucleotide
  Antisense strand to SEQ ID NO: 1306242
gucaucagagcauuagaga

SEQ ID NO: 1306244 - RNA, 19 nt, Artificial Sequence
  Description of Artificial Sequence: Synthetic oligonucleotide
  Sense strand starting at position 3223 of SEQ ID NO: 1241872
auccucaugugaucaaugu

SEQ ID NO: 1306245 - RNA, 19 nt, Artificial Sequence
  Description of Artificial Sequence: Synthetic oligonucleotide
  Antisense strand to SEQ ID NO: 1306244
acauugaucacaugaggau

SEQ ID NO: 1306246 - RNA, 19 nt, Artificial Sequence
  Description of Artificial Sequence: Synthetic oligonucleotide
  Sense strand starting at position 3224 of SEQ ID NO: 1241872
uccucaugugaucaauguu

SEQ ID NO: 1306247 - RNA, 19 nt, Artificial Sequence
  Description of Artificial Sequence: Synthetic oligonucleotide
  Antisense strand to SEQ ID NO: 1306246
aacauugaucacaugagga

SEQ ID NO: 1306248 - RNA, 19 nt, Artificial Sequence
  Description of Artificial Sequence: Synthetic oligonucleotide
  Sense strand starting at position 3227 of SEQ ID NO: 1241872
ucaugugaucaauguugga

SEQ ID NO: 1306249 - RNA, 19 nt, Artificial Sequence
  Description of Artificial Sequence: Synthetic oligonucleotide
  Antisense strand to SEQ ID NO: 1306248
uccaacauugaucacauga

SEQ ID NO: 1306250 - RNA, 19 nt, Artificial Sequence
  Description of Artificial Sequence: Synthetic oligonucleotide
  Sense strand starting at position 3288 of SEQ ID NO: 1241872
ugugauaacuuguuauaac

SEQ ID NO: 1306251 - RNA, 19 nt, Artificial Sequence
  Description of Artificial Sequence: Synthetic oligonucleotide
  Antisense strand to SEQ ID NO: 1306250
guuauaacaaguuaucaca

SEQ ID NO: 1306252 - RNA, 19 nt, Artificial Sequence
  Description of Artificial Sequence: Synthetic oligonucleotide
  Sense strand starting at position 3352 of SEQ ID NO: 1241872
augugagcauucuccuaaa

SEQ ID NO: 1306253 - RNA, 19 nt, Artificial Sequence
  Description of Artificial Sequence: Synthetic oligonucleotide
  Antisense strand to SEQ ID NO: 1306252
uuuaggagaaugcucacau

SEQ ID NO: 1306254 - RNA, 19 nt, Artificial Sequence
  Description of Artificial Sequence: Synthetic oligonucleotide
  Sense strand starting at position 3534 of SEQ ID NO: 1241872
guuauuccaucaucuagau

SEQ ID NO: 1306255 - RNA, 19 nt, Artificial Sequence
  Description of Artificial Sequence: Synthetic oligonucleotide
  Antisense strand to SEQ ID NO: 1306254
aucuagaugauggaauaac

SEQ ID NO: 1306256 - RNA, 19 nt, Artificial Sequence
  Description of Artificial Sequence: Synthetic oligonucleotide
  Sense strand starting at position 3589 of SEQ ID NO: 1241872
ucggacauggcucauuaua

SEQ ID NO: 1306257 - RNA, 19 nt, Artificial Sequence
  Description of Artificial Sequence: Synthetic oligonucleotide
  Antisense strand to SEQ ID NO: 1306256
uauaaugagccauguccga

SEQ ID NO: 1306258 - RNA, 19 nt, Artificial Sequence
  Description of Artificial Sequence: Synthetic oligonucleotide
  Sense strand starting at position 3659 of SEQ ID NO: 1241872
agaucuuaagacugccaga

SEQ ID NO: 1306259 - RNA, 19 nt, Artificial Sequence
  Description of Artificial Sequence: Synthetic oligonucleotide
  Antisense strand to SEQ ID NO: 1306258
ucuggcagucuuaagaucu

SEQ ID NO: 1306260 - RNA, 19 nt, Artificial Sequence
  Description of Artificial Sequence: Synthetic oligonucleotide
  Sense strand starting at position 3729 of SEQ ID NO: 1241872
cuaguauagcaucacgaca

SEQ ID NO: 1306261 - RNA, 19 nt, Artificial Sequence
  Description of Artificial Sequence: Synthetic oligonucleotide
  Antisense strand to SEQ ID NO: 1306260
ugucgugaugcuauacuag

SEQ ID NO: 1306262 - RNA, 19 nt, Artificial Sequence
  Description of Artificial Sequence: Synthetic oligonucleotide
  Sense strand starting at position 74 of SEQ ID NO: 1241873
accugagacugguacaacu

SEQ ID NO: 1306263 - RNA, 19 nt, Artificial Sequence
  Description of Artificial Sequence: Synthetic oligonucleotide
  Antisense strand to SEQ ID NO: 1306262
aguuguaccagucucaggu

SEQ ID NO: 1306264 - RNA, 19 nt, Artificial Sequence
  Description of Artificial Sequence: Synthetic oligonucleotide
  Sense strand starting at position 83 of SEQ ID NO: 1241873
ugguacaacuggucuuaca

SEQ ID NO: 1306265 - RNA, 19 nt, Artificial Sequence
  Description of Artificial Sequence: Synthetic oligonucleotide
  Antisense strand to SEQ ID NO: 1306264
uguaagaccaguuguacca

SEQ ID NO: 1306266 - RNA, 19 nt, Artificial Sequence
  Description of Artificial Sequence: Synthetic oligonucleotide
  Sense strand starting at position 145 of SEQ ID NO: 1241873
gccuauacugcugaaguua

SEQ ID NO: 1306267 - RNA, 19 nt, Artificial Sequence
  Description of Artificial Sequence: Synthetic oligonucleotide
  Antisense strand to SEQ ID NO: 1306266
uaacuucagcaguauaggc

SEQ ID NO: 1306268 - RNA, 19 nt, Artificial Sequence
  Description of Artificial Sequence: Synthetic oligonucleotide
  Sense strand starting at position 154 of SEQ ID NO: 1241873
gcugaaguuauugauauga

SEQ ID NO: 1306269 - RNA, 19 nt, Artificial Sequence
  Description of Artificial Sequence: Synthetic oligonucleotide
  Antisense strand to SEQ ID NO: 1306268
ucauaucaauaacuucagc

SEQ ID NO: 1306270 - RNA, 19 nt, Artificial Sequence
  Description of Artificial Sequence: Synthetic oligonucleotide
  Sense strand starting at position 169 of SEQ ID NO: 1241873
augaguuucuuggugauaa

SEQ ID NO: 1306271 - RNA, 19 nt, Artificial Sequence
  Description of Artificial Sequence: Synthetic oligonucleotide
  Antisense strand to SEQ ID NO: 1306270
uuaucaccaagaaacucau

SEQ ID NO: 1306272 - RNA, 19 nt, Artificial Sequence
  Description of Artificial Sequence: Synthetic oligonucleotide
  Sense strand starting at position 171 of SEQ ID NO: 1241873
gaguuucuuggugauaaag

SEQ ID NO: 1306273 - RNA, 19 nt, Artificial Sequence
  Description of Artificial Sequence: Synthetic oligonucleotide
  Antisense strand to SEQ ID NO: 1306272
cuuuaucaccaagaaacuc

SEQ ID NO: 1306274 - RNA, 19 nt, Artificial Sequence
  Description of Artificial Sequence: Synthetic oligonucleotide
  Sense strand starting at position 218 of SEQ ID NO: 1241873
uugaaagucugagcuugga

SEQ ID NO: 1306275 - RNA, 19 nt, Artificial Sequence
  Description of Artificial Sequence: Synthetic oligonucleotide
  Antisense strand to SEQ ID NO: 1306274
uccaagcucagacuuucaa

SEQ ID NO: 1306276 - RNA, 19 nt, Artificial Sequence
  Description of Artificial Sequence: Synthetic oligonucleotide
  Sense strand starting at position 234 of SEQ ID NO: 1241873
ggagcuacucagcaucuua

SEQ ID NO: 1306277 - RNA, 19 nt, Artificial Sequence
  Description of Artificial Sequence: Synthetic oligonucleotide
  Antisense strand to SEQ ID NO: 1306276
uaagaugcugaguagcucc

SEQ ID NO: 1306278 - RNA, 19 nt, Artificial Sequence
  Description of Artificial Sequence: Synthetic oligonucleotide
  Sense strand starting at position 402 of SEQ ID NO: 1241873
cuagucucuugccuuugaa

SEQ ID NO: 1306279 - RNA, 19 nt, Artificial Sequence
  Description of Artificial Sequence: Synthetic oligonucleotide
  Antisense strand to SEQ ID NO: 1306278
uucaaaggcaagagacuag

SEQ ID NO: 1306280 - RNA, 19 nt, Artificial Sequence
  Description of Artificial Sequence: Synthetic oligonucleotide
  Sense strand starting at position 405 of SEQ ID NO: 1241873
gucucuugccuuugaagaa

SEQ ID NO: 1306281 - RNA, 19 nt, Artificial Sequence
  Description of Artificial Sequence: Synthetic oligonucleotide
  Antisense strand to SEQ ID NO: 1306280
uucuucaaaggcaagagac

SEQ ID NO: 1306282 - RNA, 19 nt, Artificial Sequence
  Description of Artificial Sequence: Synthetic oligonucleotide
  Sense strand starting at position 426 of SEQ ID NO: 1241873
agccaaauggucuauggau

SEQ ID NO: 1306283 - RNA, 19 nt, Artificial Sequence
  Description of Artificial Sequence: Synthetic oligonucleotide
  Antisense strand to SEQ ID NO: 1306282
auccauagaccauuuggcu

SEQ ID NO: 1306284 - RNA, 19 nt, Artificial Sequence
  Description of Artificial Sequence: Synthetic oligonucleotide
  Sense strand starting at position 428 of SEQ ID NO: 1241873
ccaaauggucuauggauug

SEQ ID NO: 1306285 - RNA, 19 nt, Artificial Sequence
  Description of Artificial Sequence: Synthetic oligonucleotide
  Antisense strand to SEQ ID NO: 1306284
caauccauagaccauuugg

SEQ ID NO: 1306286 - RNA, 19 nt, Artificial Sequence
  Description of Artificial Sequence: Synthetic oligonucleotide
  Sense strand starting at position 433 of SEQ ID NO: 1241873
uggucuauggauuggugaa

SEQ ID NO: 1306287 - RNA, 19 nt, Artificial Sequence
  Description of Artificial Sequence: Synthetic oligonucleotide
  Antisense strand to SEQ ID NO: 1306286
uucaccaauccauagacca

SEQ ID NO: 1306288 - RNA, 19 nt, Artificial Sequence
  Description of Artificial Sequence: Synthetic oligonucleotide
  Sense strand starting at position 434 of SEQ ID NO: 1241873
ggucuauggauuggugaag

SEQ ID NO: 1306289 - RNA, 19 nt, Artificial Sequence
  Description of Artificial Sequence: Synthetic oligonucleotide
  Antisense strand to SEQ ID NO: 1306288
cuucaccaauccauagacc

SEQ ID NO: 1306290 - RNA, 19 nt, Artificial Sequence
  Description of Artificial Sequence: Synthetic oligonucleotide
  Sense strand starting at position 435 of SEQ ID NO: 1241873
gucuauggauuggugaagu

SEQ ID NO: 1306291 - RNA, 19 nt, Artificial Sequence
  Description of Artificial Sequence: Synthetic oligonucleotide
  Antisense strand to SEQ ID NO: 1306290
acuucaccaauccauagac

SEQ ID NO: 1306292 - RNA, 19 nt, Artificial Sequence
  Description of Artificial Sequence: Synthetic oligonucleotide
  Sense strand starting at position 579 of SEQ ID NO: 1241873
ugcccucuucccuggagaa

SEQ ID NO: 1306293 - RNA, 19 nt, Artificial Sequence
  Description of Artificial Sequence: Synthetic oligonucleotide
  Antisense strand to SEQ ID NO: 1306292
uucuccagggaagagggca

SEQ ID NO: 1306294 - RNA, 19 nt, Artificial Sequence
  Description of Artificial Sequence: Synthetic oligonucleotide
  Sense strand starting at position 580 of SEQ ID NO: 1241873
gcccucuucccuggagaau

SEQ ID NO: 1306295 - RNA, 19 nt, Artificial Sequence
  Description of Artificial Sequence: Synthetic oligonucleotide
  Antisense strand to SEQ ID NO: 1306294
auucuccagggaagagggc

SEQ ID NO: 1306296 - RNA, 19 nt, Artificial Sequence
  Description of Artificial Sequence: Synthetic oligonucleotide
  Sense strand starting at position 838 of SEQ ID NO: 1241873
gcuagcaaucuugaccuaa

SEQ ID NO: 1306297 - RNA, 19 nt, Artificial Sequence
  Description of Artificial Sequence: Synthetic oligonucleotide
  Antisense strand to SEQ ID NO: 1306296
uuaggucaagauugcuagc

SEQ ID NO: 1306298 - RNA, 19 nt, Artificial Sequence
  Description of Artificial Sequence: Synthetic oligonucleotide
  Sense strand starting at position 885 of SEQ ID NO: 1241873
acgagucauugucuugguu

SEQ ID NO: 1306299 - RNA, 19 nt, Artificial Sequence
  Description of Artificial Sequence: Synthetic oligonucleotide
  Antisense strand to SEQ ID NO: 1306298
aaccaagacaaugacucgu

SEQ ID NO: 1306300 - RNA, 19 nt, Artificial Sequence
  Description of Artificial Sequence: Synthetic oligonucleotide
  Sense strand starting at position 1144 of SEQ ID NO: 1241873
aggugauguccagagcggu

SEQ ID NO: 1306301 - RNA, 19 nt, Artificial Sequence
  Description of Artificial Sequence: Synthetic oligonucleotide
  Antisense strand to SEQ ID NO: 1306300
accgcucuggacaucaccu

SEQ ID NO: 1306302 - RNA, 19 nt, Artificial Sequence
  Description of Artificial Sequence: Synthetic oligonucleotide
  Sense strand starting at position 2223 of SEQ ID NO: 1241873
ggauucugucccuaacaca

SEQ ID NO: 1306303 - RNA, 19 nt, Artificial Sequence
  Description of Artificial Sequence: Synthetic oligonucleotide
  Antisense strand to SEQ ID NO: 1306302
uguguuagggacagaaucc

SEQ ID NO: 1306304 - RNA, 19 nt, Artificial Sequence
  Description of Artificial Sequence: Synthetic oligonucleotide
  Sense strand starting at position 2254 of SEQ ID NO: 1241873
gccagagagucccugaauc

SEQ ID NO: 1306305 - RNA, 19 nt, Artificial Sequence
  Description of Artificial Sequence: Synthetic oligonucleotide
  Antisense strand to SEQ ID NO: 1306304
gauucagggacucucuggc

SEQ ID NO: 1306306 - RNA, 19 nt, Artificial Sequence
  Description of Artificial Sequence: Synthetic oligonucleotide
  Sense strand starting at position 2262 of SEQ ID NO: 1241873
gucccugaauccucuguau

SEQ ID NO: 1306307 - RNA, 19 nt, Artificial Sequence
  Description of Artificial Sequence: Synthetic oligonucleotide
  Antisense strand to SEQ ID NO: 1306306
auacagaggauucagggac

SEQ ID NO: 1306308 - RNA, 19 nt, Artificial Sequence
  Description of Artificial Sequence: Synthetic oligonucleotide
  Sense strand starting at position 2265 of SEQ ID NO: 1241873
ccugaauccucuguauuag

SEQ ID NO: 1306309 - RNA, 19 nt, Artificial Sequence
  Description of Artificial Sequence: Synthetic oligonucleotide
  Antisense strand to SEQ ID NO: 1306308
cuaauacagaggauucagg

SEQ ID NO: 1306310 - RNA, 19 nt, Artificial Sequence
  Description of Artificial Sequence: Synthetic oligonucleotide
  Sense strand starting at position 2273 of SEQ ID NO: 1241873
cucuguauuagguguggga

SEQ ID NO: 1306311 - RNA, 19 nt, Artificial Sequence
  Description of Artificial Sequence: Synthetic oligonucleotide
  Antisense strand to SEQ ID NO: 1306310
ucccacaccuaauacagag

SEQ ID NO: 1306312 - RNA, 19 nt, Artificial Sequence
  Description of Artificial Sequence: Synthetic oligonucleotide
  Sense strand starting at position 2275 of SEQ ID NO: 1241873
cuguauuaggugugggaga

SEQ ID NO: 1306313 - RNA, 19 nt, Artificial Sequence
  Description of Artificial Sequence: Synthetic oligonucleotide
  Antisense strand to SEQ ID NO: 1306312
ucucccacaccuaauacag

SEQ ID NO: 1306314 - RNA, 19 nt, Artificial Sequence
  Description of Artificial Sequence: Synthetic oligonucleotide
  Sense strand starting at position 2328 of SEQ ID NO: 1241873
cggcaaugggcagaauaau

SEQ ID NO: 1306315 - RNA, 19 nt, Artificial Sequence
  Description of Artificial Sequence: Synthetic oligonucleotide
  Antisense strand to SEQ ID NO: 1306314
auuauucugcccauugccg

SEQ ID NO: 1306316 - RNA, 19 nt, Artificial Sequence
  Description of Artificial Sequence: Synthetic oligonucleotide
  Sense strand starting at position 2514 of SEQ ID NO: 1241873
agcugaagguguguuugaa

SEQ ID NO: 1306317 - RNA, 19 nt, Artificial Sequence
  Description of Artificial Sequence: Synthetic oligonucleotide
  Antisense strand to SEQ ID NO: 1306316
uucaaacacaccuucagcu

SEQ ID NO: 1306318 - RNA, 19 nt, Artificial Sequence
  Description of Artificial Sequence: Synthetic oligonucleotide
  Sense strand starting at position 2635 of SEQ ID NO: 1241873
gcugcuugagcgguugaca

SEQ ID NO: 1306319 - RNA, 19 nt, Artificial Sequence
  Description of Artificial Sequence: Synthetic oligonucleotide
  Antisense strand to SEQ ID NO: 1306318
ugucaaccgcucaagcagc

SEQ ID NO: 1306320 - RNA, 19 nt, Artificial Sequence
  Description of Artificial Sequence: Synthetic oligonucleotide
  Sense strand starting at position 2638 of SEQ ID NO: 1241873
gcuugagcgguugacacau

SEQ ID NO: 1306321 - RNA, 19 nt, Artificial Sequence
  Description of Artificial Sequence: Synthetic oligonucleotide
  Antisense strand to SEQ ID NO: 1306320
augugucaaccgcucaagc

SEQ ID NO: 1306322 - RNA, 19 nt, Artificial Sequence
  Description of Artificial Sequence: Synthetic oligonucleotide
  Sense strand starting at position 2778 of SEQ ID NO: 1241873
gccagauauugggcugagu

SEQ ID NO: 1306323 - RNA, 19 nt, Artificial Sequence
  Description of Artificial Sequence: Synthetic oligonucleotide
  Antisense strand to SEQ ID NO: 1306322
acucagcccaauaucuggc

SEQ ID NO: 1306324 - RNA, 19 nt, Artificial Sequence
  Description of Artificial Sequence: Synthetic oligonucleotide
  Sense strand starting at position 2789 of SEQ ID NO: 1241873
ggcugagugccagaaaccu

SEQ ID NO: 1306325 - RNA, 19 nt, Artificial Sequence
  Description of Artificial Sequence: Synthetic oligonucleotide
  Antisense strand to SEQ ID NO: 1306324
agguuucuggcacucagcc

SEQ ID NO: 1306326 - RNA, 19 nt, Artificial Sequence
  Description of Artificial Sequence: Synthetic oligonucleotide
  Sense strand starting at position 2895 of SEQ ID NO: 1241873
gauaaugacuauugaggaa

SEQ ID NO: 1306327 - RNA, 19 nt, Artificial Sequence
  Description of Artificial Sequence: Synthetic oligonucleotide
  Antisense strand to SEQ ID NO: 1306326
uuccucaauagucauuauc

SEQ ID NO: 1306328 - RNA, 19 nt, Artificial Sequence
  Description of Artificial Sequence: Synthetic oligonucleotide
  Sense strand starting at position 3066 of SEQ ID NO: 1241873
ugagcucagugguuggaga

SEQ ID NO: 1306329 - RNA, 19 nt, Artificial Sequence
  Description of Artificial Sequence: Synthetic oligonucleotide
  Antisense strand to SEQ ID NO: 1306328
ucuccaaccacugagcuca

SEQ ID NO: 1306330 - RNA, 19 nt, Artificial Sequence
  Description of Artificial Sequence: Synthetic oligonucleotide
  Sense strand starting at position 3401 of SEQ ID NO: 1241873
uugggugcacacugagauu

SEQ ID NO: 1306331 - RNA, 19 nt, Artificial Sequence
  Description of Artificial Sequence: Synthetic oligonucleotide
  Antisense strand to SEQ ID NO: 1306330
aaucucagugugcacccaa

SEQ ID NO: 1306332 - RNA, 19 nt, Artificial Sequence
  Description of Artificial Sequence: Synthetic oligonucleotide
  Sense strand starting at position 3442 of SEQ ID NO: 1241873
guggguucaggucagacua

SEQ ID NO: 1306333 - RNA, 19 nt, Artificial Sequence
  Description of Artificial Sequence: Synthetic oligonucleotide
  Antisense strand to SEQ ID NO: 1306332
uagucugaccugaacccac

SEQ ID NO: 1306334 - RNA, 19 nt, Artificial Sequence
  Description of Artificial Sequence: Synthetic oligonucleotide
  Sense strand starting at position 3670 of SEQ ID NO: 1241873
ugcucucuggguuguaaac

SEQ ID NO: 1306335 - RNA, 19 nt, Artificial Sequence
  Description of Artificial Sequence: Synthetic oligonucleotide
  Antisense strand to SEQ ID NO: 1306334
guuuacaacccagagagca

SEQ ID NO: 1306336 - RNA, 19 nt, Artificial Sequence
  Description of Artificial Sequence: Synthetic oligonucleotide
  Sense strand starting at position 3724 of SEQ ID NO: 1241873
ccaauagagccugaagucu

SEQ ID NO: 1306337 - RNA, 19 nt, Artificial Sequence
  Description of Artificial Sequence: Synthetic oligonucleotide
  Antisense strand to SEQ ID NO: 1306336
agacuucaggcucuauugg

SEQ ID NO: 1306338 - RNA, 19 nt, Artificial Sequence
  Description of Artificial Sequence: Synthetic oligonucleotide
  Sense strand starting at position 3818 of SEQ ID NO: 1241873
gagggcugugguugcuaga

SEQ ID NO: 1306339 - RNA, 19 nt, Artificial Sequence
  Description of Artificial Sequence: Synthetic oligonucleotide
  Antisense strand to SEQ ID NO: 1306338
ucuagcaaccacagcccuc

SEQ ID NO: 1306340 - RNA, 19 nt, Artificial Sequence
  Description of Artificial Sequence: Synthetic oligonucleotide
  Sense strand starting at position 3923 of SEQ ID NO: 1241873
uugauagauuuccagcaaa

SEQ ID NO: 1306341 - RNA, 19 nt, Artificial Sequence
  Description of Artificial Sequence: Synthetic oligonucleotide
  Antisense strand to SEQ ID NO: 1306340
uuugcuggaaaucuaucaa

SEQ ID NO: 1306342 - RNA, 19 nt, Artificial Sequence
  Description of Artificial Sequence: Synthetic oligonucleotide
  Sense strand starting at position 3 of SEQ ID NO: 1241874
gagacagaguugcugacaa

SEQ ID NO: 1306343 - RNA, 19 nt, Artificial Sequence
  Description of Artificial Sequence: Synthetic oligonucleotide
  Antisense strand to SEQ ID NO: 1306342
uugucagcaacucugucuc

SEQ ID NO: 1306344 - RNA, 19 nt, Artificial Sequence
  Description of Artificial Sequence: Synthetic oligonucleotide
  Sense strand starting at position 114 of SEQ ID NO: 1241874
ggaacuggucugcaaugca

SEQ ID NO: 1306345 - RNA, 19 nt, Artificial Sequence
  Description of Artificial Sequence: Synthetic oligonucleotide
  Antisense strand to SEQ ID NO: 1306344
ugcauugcagaccaguucc

SEQ ID NO: 1306346 - RNA, 19 nt, Artificial Sequence
  Description of Artificial Sequence: Synthetic oligonucleotide
  Sense strand starting at position 204 of SEQ ID NO: 1241874
gcaagacugcugggaaacu

SEQ ID NO: 1306347 - RNA, 19 nt, Artificial Sequence
  Description of Artificial Sequence: Synthetic oligonucleotide
  Antisense strand to SEQ ID NO: 1306346
aguuucccagcagucuugc

SEQ ID NO: 1306348 - RNA, 19 nt, Artificial Sequence
  Description of Artificial Sequence: Synthetic oligonucleotide
  Sense strand starting at position 317 of SEQ ID NO: 1241874
gccugaccuggccaagauu

SEQ ID NO: 1306349 - RNA, 19 nt, Artificial Sequence
  Description of Artificial Sequence: Synthetic oligonucleotide
  Antisense strand to SEQ ID NO: 1306348
aaucuuggccaggucaggc

SEQ ID NO: 1306350 - RNA, 19 nt, Artificial Sequence
  Description of Artificial Sequence: Synthetic oligonucleotide
  Sense strand starting at position 343 of SEQ ID NO: 1241874
gaggguaaauccucauaug

SEQ ID NO: 1306351 - RNA, 19 nt, Artificial Sequence
  Description of Artificial Sequence: Synthetic oligonucleotide
  Antisense strand to SEQ ID NO: 1306350
cauaugaggauuuacccuc

SEQ ID NO: 1306352 - RNA, 19 nt, Artificial Sequence
  Description of Artificial Sequence: Synthetic oligonucleotide
  Sense strand starting at position 489 of SEQ ID NO: 1241874
cugacagugccaugacaaa

SEQ ID NO: 1306353 - RNA, 19 nt, Artificial Sequence
  Description of Artificial Sequence: Synthetic oligonucleotide
  Antisense strand to SEQ ID NO: 1306352
uuugucauggcacugucag

SEQ ID NO: 1306354 - RNA, 19 nt, Artificial Sequence
  Description of Artificial Sequence: Synthetic oligonucleotide
  Sense strand starting at position 541 of SEQ ID NO: 1241874
agccuuccguccuuauuua

SEQ ID NO: 1306355 - RNA, 19 nt, Artificial Sequence
  Description of Artificial Sequence: Synthetic oligonucleotide
  Antisense strand to SEQ ID NO: 1306354
uaaauaaggacggaaggcu

SEQ ID NO: 1306356 - RNA, 19 nt, Artificial Sequence
  Description of Artificial Sequence: Synthetic oligonucleotide
  Sense strand starting at position 542 of SEQ ID NO: 1241874
gccuuccguccuuauuuau

SEQ ID NO: 1306357 - RNA, 19 nt, Artificial Sequence
  Description of Artificial Sequence: Synthetic oligonucleotide
  Antisense strand to SEQ ID NO: 1306356
auaaauaaggacggaaggc

SEQ ID NO: 1306358 - RNA, 19 nt, Artificial Sequence
  Description of Artificial Sequence: Synthetic oligonucleotide
  Sense strand starting at position 548 of SEQ ID NO: 1241874
cguccuuauuuaucaagcu

SEQ ID NO: 1306359 - RNA, 19 nt, Artificial Sequence
  Description of Artificial Sequence: Synthetic oligonucleotide
  Antisense strand to SEQ ID NO: 1306358
agcuugauaaauaaggacg

SEQ ID NO: 1306360 - RNA, 19 nt, Artificial Sequence
  Description of Artificial Sequence: Synthetic oligonucleotide
  Sense strand starting at position 605 of SEQ ID NO: 1241874
ugaagcucuucucuggaaa

SEQ ID NO: 1306361 - RNA, 19 nt, Artificial Sequence
  Description of Artificial Sequence: Synthetic oligonucleotide
  Antisense strand to SEQ ID NO: 1306360
uuuccagagaagagcuuca

SEQ ID NO: 1306362 - RNA, 19 nt, Artificial Sequence
  Description of Artificial Sequence: Synthetic oligonucleotide
  Sense strand starting at position 852 of SEQ ID NO: 1241874
cccagugcacgcguuagaa

SEQ ID NO: 1306363 - RNA, 19 nt, Artificial Sequence
  Description of Artificial Sequence: Synthetic oligonucleotide
  Antisense strand to SEQ ID NO: 1306362
uucuaacgcgugcacuggg

SEQ ID NO: 1306364 - RNA, 19 nt, Artificial Sequence
  Description of Artificial Sequence: Synthetic oligonucleotide
  Sense strand starting at position 958 of SEQ ID NO: 1241874
ccagaacugcuuugccaga

SEQ ID NO: 1306365 - RNA, 19 nt, Artificial Sequence
  Description of Artificial Sequence: Synthetic oligonucleotide
  Antisense strand to SEQ ID NO: 1306364
ucuggcaaagcaguucugg

SEQ ID NO: 1306366 - RNA, 19 nt, Artificial Sequence
  Description of Artificial Sequence: Synthetic oligonucleotide
  Sense strand starting at position 991 of SEQ ID NO: 1241874
caguucccucugggaguaa

SEQ ID NO: 1306367 - RNA, 19 nt, Artificial Sequence
  Description of Artificial Sequence: Synthetic oligonucleotide
  Antisense strand to SEQ ID NO: 1306366
uuacucccagagggaacug

SEQ ID NO: 1306368 - RNA, 19 nt, Artificial Sequence
  Description of Artificial Sequence: Synthetic oligonucleotide
  Sense strand starting at position 1380 of SEQ ID NO: 1241874
agacuucuccagggcaaca

SEQ ID NO: 1306369 - RNA, 19 nt, Artificial Sequence
  Description of Artificial Sequence: Synthetic oligonucleotide
  Antisense strand to SEQ ID NO: 1306368
uguugcccuggagaagucu

SEQ ID NO: 1306370 - RNA, 19 nt, Artificial Sequence
  Description of Artificial Sequence: Synthetic oligonucleotide
  Sense strand starting at position 1574 of SEQ ID NO: 1241874
gguggaagucaaggaauca

SEQ ID NO: 1306371 - RNA, 19 nt, Artificial Sequence
  Description of Artificial Sequence: Synthetic oligonucleotide
  Antisense strand to SEQ ID NO: 1306370
ugauuccuugacuuccacc

SEQ ID NO: 1306372 - RNA, 19 nt, Artificial Sequence
  Description of Artificial Sequence: Synthetic oligonucleotide
  Sense strand starting at position 1986 of SEQ ID NO: 1241874
cugagauggcuccaucucu

SEQ ID NO: 1306373 - RNA, 19 nt, Artificial Sequence
  Description of Artificial Sequence: Synthetic oligonucleotide
  Antisense strand to SEQ ID NO: 1306372
agagauggagccaucucag

SEQ ID NO: 1306374 - RNA, 19 nt, Artificial Sequence
  Description of Artificial Sequence: Synthetic oligonucleotide
  Sense strand starting at position 2145 of SEQ ID NO: 1241874
guaauaaagcacugcuaag

SEQ ID NO: 1306375 - RNA, 19 nt, Artificial Sequence
  Description of Artificial Sequence: Synthetic oligonucleotide
  Antisense strand to SEQ ID NO: 1306374
cuuagcagugcuuuauuac

SEQ ID NO: 1306376 - RNA, 19 nt, Artificial Sequence
  Description of Artificial Sequence: Synthetic oligonucleotide
  Sense strand starting at position 2154 of SEQ ID NO: 1241874
cacugcuaagggugacauu

SEQ ID NO: 1306377 - RNA, 19 nt, Artificial Sequence
  Description of Artificial Sequence: Synthetic oligonucleotide
  Antisense strand to SEQ ID NO: 1306376
aaugucacccuuagcagug

SEQ ID NO: 1306378 - RNA, 19 nt, Artificial Sequence
  Description of Artificial Sequence: Synthetic oligonucleotide
  Sense strand starting at position 2184 of SEQ ID NO: 1241874
uguggacugccugaauguu

SEQ ID NO: 1306379 - RNA, 19 nt, Artificial Sequence
  Description of Artificial Sequence: Synthetic oligonucleotide
  Antisense strand to SEQ ID NO: 1306378
aacauucaggcaguccaca

SEQ ID NO: 1306380 - RNA, 19 nt, Artificial Sequence
  Description of Artificial Sequence: Synthetic oligonucleotide
  Sense strand starting at position 2285 of SEQ ID NO: 1241874
aaaguuugacucugagggu

SEQ ID NO: 1306381 - RNA, 19 nt, Artificial Sequence
  Description of Artificial Sequence: Synthetic oligonucleotide
  Antisense strand to SEQ ID NO: 1306380
acccucagagucaaacuuu

SEQ ID NO: 1306382 - RNA, 19 nt, Artificial Sequence
  Description of Artificial Sequence: Synthetic oligonucleotide
  Sense strand starting at position 2307 of SEQ ID NO: 1241874
gagcaauagcaggaguaga

SEQ ID NO: 1306383 - RNA, 19 nt, Artificial Sequence
  Description of Artificial Sequence: Synthetic oligonucleotide
  Antisense strand to SEQ ID NO: 1306382
ucuacuccugcuauugcuc

SEQ ID NO: 1306384 - RNA, 19 nt, Artificial Sequence
  Description of Artificial Sequence: Synthetic oligonucleotide
  Sense strand starting at position 2318 of SEQ ID NO: 1241874
ggaguagaaucagcagcua

SEQ ID NO: 1306385 - RNA, 19 nt, Artificial Sequence
  Description of Artificial Sequence: Synthetic oligonucleotide
  Antisense strand to SEQ ID NO: 1306384
uagcugcugauucuacucc

SEQ ID NO: 1306386 - RNA, 19 nt, Artificial Sequence
  Description of Artificial Sequence: Synthetic oligonucleotide
  Sense strand starting at position 2657 of SEQ ID NO: 1241874
guaagaauguguccuggga

SEQ ID NO: 1306387 - RNA, 19 nt, Artificial Sequence
  Description of Artificial Sequence: Synthetic oligonucleotide
  Antisense strand to SEQ ID NO: 1306386
ucccaggacacauucuuac

SEQ ID NO: 1306388 - RNA, 19 nt, Artificial Sequence
  Description of Artificial Sequence: Synthetic oligonucleotide
  Sense strand starting at position 2721 of SEQ ID NO: 1241874
ucucuuugagcagaguuga

SEQ ID NO: 1306389 - RNA, 19 nt, Artificial Sequence
  Description of Artificial Sequence: Synthetic oligonucleotide
  Antisense strand to SEQ ID NO: 1306388
ucaacucugcucaaagaga

SEQ ID NO: 1306390 - RNA, 19 nt, Artificial Sequence
  Description of Artificial Sequence: Synthetic oligonucleotide
  Sense strand starting at position 2755 of SEQ ID NO: 1241874
aaguuuggccuagagggua

SEQ ID NO: 1306391 - RNA, 19 nt, Artificial Sequence
  Description of Artificial Sequence: Synthetic oligonucleotide
  Antisense strand to SEQ ID NO: 1306390
uacccucuaggccaaacuu

SEQ ID NO: 1306392 - RNA, 19 nt, Artificial Sequence
  Description of Artificial Sequence: Synthetic oligonucleotide
  Sense strand starting at position 2871 of SEQ ID NO: 1241874
ugguacaacuggucuuaca

SEQ ID NO: 1306393 - RNA, 19 nt, Artificial Sequence
  Description of Artificial Sequence: Synthetic oligonucleotide
  Antisense strand to SEQ ID NO: 1306392
uguaagaccaguuguacca

SEQ ID NO: 1306394 - RNA, 19 nt, Artificial Sequence
  Description of Artificial Sequence: Synthetic oligonucleotide
  Sense strand starting at position 2933 of SEQ ID NO: 1241874
gccuauacugcugaaguua

SEQ ID NO: 1306395 - RNA, 19 nt, Artificial Sequence
  Description of Artificial Sequence: Synthetic oligonucleotide
  Antisense strand to SEQ ID NO: 1306394
uaacuucagcaguauaggc

SEQ ID NO: 1306396 - RNA, 19 nt, Artificial Sequence
  Description of Artificial Sequence: Synthetic oligonucleotide
  Sense strand starting at position 2942 of SEQ ID NO: 1241874
gcugaaguuauugauauga

SEQ ID NO: 1306397 - RNA, 19 nt, Artificial Sequence
  Description of Artificial Sequence: Synthetic oligonucleotide
  Antisense strand to SEQ ID NO: 1306396
ucauaucaauaacuucagc

SEQ ID NO: 1306398 - RNA, 19 nt, Artificial Sequence
  Description of Artificial Sequence: Synthetic oligonucleotide
  Sense strand starting at position 2957 of SEQ ID NO: 1241874
augaguuucuuggugauaa

SEQ ID NO: 1306399 - RNA, 19 nt, Artificial Sequence
  Description of Artificial Sequence: Synthetic oligonucleotide
  Antisense strand to SEQ ID NO: 1306398
uuaucaccaagaaacucau

SEQ ID NO: 1306400 - RNA, 19 nt, Artificial Sequence
  Description of Artificial Sequence: Synthetic oligonucleotide
  Sense strand starting at position 2959 of SEQ ID NO: 1241874
gaguuucuuggugauaaag

SEQ ID NO: 1306401 - RNA, 19 nt, Artificial Sequence
  Description of Artificial Sequence: Synthetic oligonucleotide
  Antisense strand to SEQ ID NO: 1306400
cuuuaucaccaagaaacuc

SEQ ID NO: 1306402 - RNA, 19 nt, Artificial Sequence
  Description of Artificial Sequence: Synthetic oligonucleotide
  Sense strand starting at position 3006 of SEQ ID NO: 1241874
uugaaagucugagcuugga

SEQ ID NO: 1306403 - RNA, 19 nt, Artificial Sequence
  Description of Artificial Sequence: Synthetic oligonucleotide
  Antisense strand to SEQ ID NO: 1306402
uccaagcucagacuuucaa

SEQ ID NO: 1306404 - RNA, 19 nt, Artificial Sequence
  Description of Artificial Sequence: Synthetic oligonucleotide
  Sense strand starting at position 3022 of SEQ ID NO: 1241874
ggagcuacucagcaucuua

SEQ ID NO: 1306405 - RNA, 19 nt, Artificial Sequence
  Description of Artificial Sequence: Synthetic oligonucleotide
  Antisense strand to SEQ ID NO: 1306404
uaagaugcugaguagcucc

SEQ ID NO: 1306406 - RNA, 19 nt, Artificial Sequence
  Description of Artificial Sequence: Synthetic oligonucleotide
  Sense strand starting at position 3214 of SEQ ID NO: 1241874
agccaaauggucuauggau

SEQ ID NO: 1306407 - RNA, 19 nt, Artificial Sequence
  Description of Artificial Sequence: Synthetic oligonucleotide
  Antisense strand to SEQ ID NO: 1306406
auccauagaccauuuggcu

SEQ ID NO: 1306408 - RNA, 19 nt, Artificial Sequence
  Description of Artificial Sequence: Synthetic oligonucleotide
  Sense strand starting at position 3216 of SEQ ID NO: 1241874
ccaaauggucuauggauug

SEQ ID NO: 1306409 - RNA, 19 nt, Artificial Sequence
  Description of Artificial Sequence: Synthetic oligonucleotide
  Antisense strand to SEQ ID NO: 1306408
caauccauagaccauuugg

SEQ ID NO: 1306410 - RNA, 19 nt, Artificial Sequence
  Description of Artificial Sequence: Synthetic oligonucleotide
  Sense strand starting at position 3221 of SEQ ID NO: 1241874
uggucuauggauuggugaa

SEQ ID NO: 1306411 - RNA, 19 nt, Artificial Sequence
  Description of Artificial Sequence: Synthetic oligonucleotide
  Antisense strand to SEQ ID NO: 1306410
uucaccaauccauagacca

SEQ ID NO: 1306412 - RNA, 19 nt, Artificial Sequence
  Description of Artificial Sequence: Synthetic oligonucleotide
  Sense strand starting at position 3222 of SEQ ID NO: 1241874
ggucuauggauuggugaag

SEQ ID NO: 1306413 - RNA, 19 nt, Artificial Sequence
  Description of Artificial Sequence: Synthetic oligonucleotide
  Antisense strand to SEQ ID NO: 1306412
cuucaccaauccauagacc

SEQ ID NO: 1306414 - RNA, 19 nt, Artificial Sequence
  Description of Artificial Sequence: Synthetic oligonucleotide
  Sense strand starting at position 3223 of SEQ ID NO: 1241874
gucuauggauuggugaagu

SEQ ID NO: 1306415 - RNA, 19 nt, Artificial Sequence
  Description of Artificial Sequence: Synthetic oligonucleotide
  Antisense strand to SEQ ID NO: 1306414
acuucaccaauccauagac

SEQ ID NO: 1306416 - RNA, 19 nt, Artificial Sequence
  Description of Artificial Sequence: Synthetic oligonucleotide
  Sense strand starting at position 3367 of SEQ ID NO: 1241874
ugcccucuucccuggagaa

SEQ ID NO: 1306417 - RNA, 19 nt, Artificial Sequence
  Description of Artificial Sequence: Synthetic oligonucleotide
  Antisense strand to SEQ ID NO: 1306416
uucuccagggaagagggca

SEQ ID NO: 1306418 - RNA, 19 nt, Artificial Sequence
  Description of Artificial Sequence: Synthetic oligonucleotide
  Sense strand starting at position 3368 of SEQ ID NO: 1241874
gcccucuucccuggagaau

SEQ ID NO: 1306419 - RNA, 19 nt, Artificial Sequence
  Description of Artificial Sequence: Synthetic oligonucleotide
  Antisense strand to SEQ ID NO: 1306418
auucuccagggaagagggc

SEQ ID NO: 1306420 - RNA, 19 nt, Artificial Sequence
  Description of Artificial Sequence: Synthetic oligonucleotide
  Sense strand starting at position 3626 of SEQ ID NO: 1241874
gcuagcaaucuugaccuaa

SEQ ID NO: 1306421 - RNA, 19 nt, Artificial Sequence
  Description of Artificial Sequence: Synthetic oligonucleotide
  Antisense strand to SEQ ID NO: 1306420
uuaggucaagauugcuagc

SEQ ID NO: 1306422 - RNA, 19 nt, Artificial Sequence
  Description of Artificial Sequence: Synthetic oligonucleotide
  Sense strand starting at position 64 of SEQ ID NO: 1241875
accugagacugguacaacu

SEQ ID NO: 1306423 - RNA, 19 nt, Artificial Sequence
  Description of Artificial Sequence: Synthetic oligonucleotide
  Antisense strand to SEQ ID NO: 1306422
aguuguaccagucucaggu

SEQ ID NO: 1306424 - RNA, 19 nt, Artificial Sequence
  Description of Artificial Sequence: Synthetic oligonucleotide
  Sense strand starting at position 73 of SEQ ID NO: 1241875
ugguacaacuggucuuaca

SEQ ID NO: 1306425 - RNA, 19 nt, Artificial Sequence
  Description of Artificial Sequence: Synthetic oligonucleotide
  Antisense strand to SEQ ID NO: 1306424
uguaagaccaguuguacca

SEQ ID NO: 1306426 - RNA, 19 nt, Artificial Sequence
  Description of Artificial Sequence: Synthetic oligonucleotide
  Sense strand starting at position 135 of SEQ ID NO: 1241875
gccuauacugcugaaguua

SEQ ID NO: 1306427 - RNA, 19 nt, Artificial Sequence
  Description of Artificial Sequence: Synthetic oligonucleotide
  Antisense strand to SEQ ID NO: 1306426
uaacuucagcaguauaggc

SEQ ID NO: 1306428 - RNA, 19 nt, Artificial Sequence
  Description of Artificial Sequence: Synthetic oligonucleotide
  Sense strand starting at position 144 of SEQ ID NO: 1241875
gcugaaguuauugauauga

SEQ ID NO: 1306429 - RNA, 19 nt, Artificial Sequence
  Description of Artificial Sequence: Synthetic oligonucleotide
  Antisense strand to SEQ ID NO: 1306428
ucauaucaauaacuucagc

SEQ ID NO: 1306430 - RNA, 19 nt, Artificial Sequence
  Description of Artificial Sequence: Synthetic oligonucleotide
  Sense strand starting at position 159 of SEQ ID NO: 1241875
augaguuucuuggugauaa

SEQ ID NO: 1306431 - RNA, 19 nt, Artificial Sequence
  Description of Artificial Sequence: Synthetic oligonucleotide
  Antisense strand to SEQ ID NO: 1306430
uuaucaccaagaaacucau

SEQ ID NO: 1306432 - RNA, 19 nt, Artificial Sequence
  Description of Artificial Sequence: Synthetic oligonucleotide
  Sense strand starting at position 161 of SEQ ID NO: 1241875
gaguuucuuggugauaaag

SEQ ID NO: 1306433 - RNA, 19 nt, Artificial Sequence
  Description of Artificial Sequence: Synthetic oligonucleotide
  Antisense strand to SEQ ID NO: 1306432
cuuuaucaccaagaaacuc

SEQ ID NO: 1306434 - RNA, 19 nt, Artificial Sequence
  Description of Artificial Sequence: Synthetic oligonucleotide
  Sense strand starting at position 208 of SEQ ID NO: 1241875
uugaaagucugagcuugga

SEQ ID NO: 1306435 - RNA, 19 nt, Artificial Sequence
  Description of Artificial Sequence: Synthetic oligonucleotide
  Antisense strand to SEQ ID NO: 1306434
uccaagcucagacuuucaa

SEQ ID NO: 1306436 - RNA, 19 nt, Artificial Sequence
  Description of Artificial Sequence: Synthetic oligonucleotide
  Sense strand starting at position 224 of SEQ ID NO: 1241875
ggagcuacucagcaucuua

SEQ ID NO: 1306437 - RNA, 19 nt, Artificial Sequence
  Description of Artificial Sequence: Synthetic oligonucleotide
  Antisense strand to SEQ ID NO: 1306436
uaagaugcugaguagcucc

SEQ ID NO: 1306438 - RNA, 19 nt, Artificial Sequence
  Description of Artificial Sequence: Synthetic oligonucleotide
  Sense strand starting at position 392 of SEQ ID NO: 1241875
cuagucucuugccuuugaa

SEQ ID NO: 1306439 - RNA, 19 nt, Artificial Sequence
  Description of Artificial Sequence: Synthetic oligonucleotide
  Antisense strand to SEQ ID NO: 1306438
uucaaaggcaagagacuag

SEQ ID NO: 1306440 - RNA, 19 nt, Artificial Sequence
  Description of Artificial Sequence: Synthetic oligonucleotide
  Sense strand starting at position 395 of SEQ ID NO: 1241875
gucucuugccuuugaagaa

SEQ ID NO: 1306441 - RNA, 19 nt, Artificial Sequence
  Description of Artificial Sequence: Synthetic oligonucleotide
  Antisense strand to SEQ ID NO: 1306440
uucuucaaaggcaagagac

SEQ ID NO: 1306442 - RNA, 19 nt, Artificial Sequence
  Description of Artificial Sequence: Synthetic oligonucleotide
  Sense strand starting at position 416 of SEQ ID NO: 1241875
agccaaauggucuauggau

SEQ ID NO: 1306443 - RNA, 19 nt, Artificial Sequence
  Description of Artificial Sequence: Synthetic oligonucleotide
  Antisense strand to SEQ ID NO: 1306442
auccauagaccauuuggcu

SEQ ID NO: 1306444 - RNA, 19 nt, Artificial Sequence
  Description of Artificial Sequence: Synthetic oligonucleotide
  Sense strand starting at position 418 of SEQ ID NO: 1241875
ccaaauggucuauggauug

SEQ ID NO: 1306445 - RNA, 19 nt, Artificial Sequence
  Description of Artificial Sequence: Synthetic oligonucleotide
  Antisense strand to SEQ ID NO: 1306444
caauccauagaccauuugg

SEQ ID NO: 1306446 - RNA, 19 nt, Artificial Sequence
  Description of Artificial Sequence: Synthetic oligonucleotide
  Sense strand starting at position 423 of SEQ ID NO: 1241875
uggucuauggauuggugaa

SEQ ID NO: 1306447 - RNA, 19 nt, Artificial Sequence
  Description of Artificial Sequence: Synthetic oligonucleotide
  Antisense strand to SEQ ID NO: 1306446
uucaccaauccauagacca

SEQ ID NO: 1306448 - RNA, 19 nt, Artificial Sequence
  Description of Artificial Sequence: Synthetic oligonucleotide
  Sense strand starting at position 424 of SEQ ID NO: 1241875
ggucuauggauuggugaag

SEQ ID NO: 1306449 - RNA, 19 nt, Artificial Sequence
  Description of Artificial Sequence: Synthetic oligonucleotide
  Antisense strand to SEQ ID NO: 1306448
cuucaccaauccauagacc

SEQ ID NO: 1306450 - RNA, 19 nt, Artificial Sequence
  Description of Artificial Sequence: Synthetic oligonucleotide
  Sense strand starting at position 425 of SEQ ID NO: 1241875
gucuauggauuggugaagu

SEQ ID NO: 1306451 - RNA, 19 nt, Artificial Sequence
  Description of Artificial Sequence: Synthetic oligonucleotide
  Antisense strand to SEQ ID NO: 1306450
acuucaccaauccauagac

SEQ ID NO: 1306452 - RNA, 19 nt, Artificial Sequence
  Description of Artificial Sequence: Synthetic oligonucleotide
  Sense strand starting at position 569 of SEQ ID NO: 1241875
ugcccucuucccuggagaa

SEQ ID NO: 1306453 - RNA, 19 nt, Artificial Sequence
  Description of Artificial Sequence: Synthetic oligonucleotide
  Antisense strand to SEQ ID NO: 1306452
uucuccagggaagagggca

SEQ ID NO: 1306454 - RNA, 19 nt, Artificial Sequence
  Description of Artificial Sequence: Synthetic oligonucleotide
  Sense strand starting at position 570 of SEQ ID NO: 1241875
gcccucuucccuggagaau

SEQ ID NO: 1306455 - RNA, 19 nt, Artificial Sequence
  Description of Artificial Sequence: Synthetic oligonucleotide
  Antisense strand to SEQ ID NO: 1306454
auucuccagggaagagggc

SEQ ID NO: 1306456 - RNA, 19 nt, Artificial Sequence
  Description of Artificial Sequence: Synthetic oligonucleotide
  Sense strand starting at position 828 of SEQ ID NO: 1241875
gcuagcaaucuugaccuaa

SEQ ID NO: 1306457 - RNA, 19 nt, Artificial Sequence
  Description of Artificial Sequence: Synthetic oligonucleotide
  Antisense strand to SEQ ID NO: 1306456
uuaggucaagauugcuagc

SEQ ID NO: 1306458 - RNA, 19 nt, Artificial Sequence
  Description of Artificial Sequence: Synthetic oligonucleotide
  Sense strand starting at position 875 of SEQ ID NO: 1241875
acgagucauugucuugguu

SEQ ID NO: 1306459 - RNA, 19 nt, Artificial Sequence
  Description of Artificial Sequence: Synthetic oligonucleotide
  Antisense strand to SEQ ID NO: 1306458
aaccaagacaaugacucgu

SEQ ID NO: 1306460 - RNA, 19 nt, Artificial Sequence
  Description of Artificial Sequence: Synthetic oligonucleotide
  Sense strand starting at position 1134 of SEQ ID NO: 1241875
aggugauguccagagcggu

SEQ ID NO: 1306461 - RNA, 19 nt, Artificial Sequence
  Description of Artificial Sequence: Synthetic oligonucleotide
  Antisense strand to SEQ ID NO: 1306460
accgcucuggacaucaccu

SEQ ID NO: 1306462 - RNA, 19 nt, Artificial Sequence
  Description of Artificial Sequence: Synthetic oligonucleotide
  Sense strand starting at position 2213 of SEQ ID NO: 1241875
ggauucugucccuaacaca

SEQ ID NO: 1306463 - RNA, 19 nt, Artificial Sequence
  Description of Artificial Sequence: Synthetic oligonucleotide
  Antisense strand to SEQ ID NO: 1306462
uguguuagggacagaaucc

SEQ ID NO: 1306464 - RNA, 19 nt, Artificial Sequence
  Description of Artificial Sequence: Synthetic oligonucleotide
  Sense strand starting at position 2244 of SEQ ID NO: 1241875
gccagagagucccugaauc

SEQ ID NO: 1306465 - RNA, 19 nt, Artificial Sequence
  Description of Artificial Sequence: Synthetic oligonucleotide
  Antisense strand to SEQ ID NO: 1306464
gauucagggacucucuggc

SEQ ID NO: 1306466 - RNA, 19 nt, Artificial Sequence
  Description of Artificial Sequence: Synthetic oligonucleotide
  Sense strand starting at position 2252 of SEQ ID NO: 1241875
gucccugaauccucuguau

SEQ ID NO: 1306467 - RNA, 19 nt, Artificial Sequence
  Description of Artificial Sequence: Synthetic oligonucleotide
  Antisense strand to SEQ ID NO: 1306466
auacagaggauucagggac

SEQ ID NO: 1306468 - RNA, 19 nt, Artificial Sequence
  Description of Artificial Sequence: Synthetic oligonucleotide
  Sense strand starting at position 2255 of SEQ ID NO: 1241875
ccugaauccucuguauuag

SEQ ID NO: 1306469 - RNA, 19 nt, Artificial Sequence
  Description of Artificial Sequence: Synthetic oligonucleotide
  Antisense strand to SEQ ID NO: 1306468
cuaauacagaggauucagg

SEQ ID NO: 1306470 - RNA, 19 nt, Artificial Sequence
  Description of Artificial Sequence: Synthetic oligonucleotide
  Sense strand starting at position 2263 of SEQ ID NO: 1241875
cucuguauuagguguggga

SEQ ID NO: 1306471 - RNA, 19 nt, Artificial Sequence
  Description of Artificial Sequence: Synthetic oligonucleotide
  Antisense strand to SEQ ID NO: 1306470
ucccacaccuaauacagag

SEQ ID NO: 1306472 - RNA, 19 nt, Artificial Sequence
  Description of Artificial Sequence: Synthetic oligonucleotide
  Sense strand starting at position 2265 of SEQ ID NO: 1241875
cuguauuaggugugggaga

SEQ ID NO: 1306473 - RNA, 19 nt, Artificial Sequence
  Description of Artificial Sequence: Synthetic oligonucleotide
  Antisense strand to SEQ ID NO: 1306472
ucucccacaccuaauacag

SEQ ID NO: 1306474 - RNA, 19 nt, Artificial Sequence
  Description of Artificial Sequence: Synthetic oligonucleotide
  Sense strand starting at position 2318 of SEQ ID NO: 1241875
cggcaaugggcagaauaau

SEQ ID NO: 1306475 - RNA, 19 nt, Artificial Sequence
  Description of Artificial Sequence: Synthetic oligonucleotide
  Antisense strand to SEQ ID NO: 1306474
auuauucugcccauugccg

SEQ ID NO: 1306476 - RNA, 19 nt, Artificial Sequence
  Description of Artificial Sequence: Synthetic oligonucleotide
  Sense strand starting at position 2504 of SEQ ID NO: 1241875
agcugaagguguguuugaa

SEQ ID NO: 1306477 - RNA, 19 nt, Artificial Sequence
  Description of Artificial Sequence: Synthetic oligonucleotide
  Antisense strand to SEQ ID NO: 1306476
uucaaacacaccuucagcu

SEQ ID NO: 1306478 - RNA, 19 nt, Artificial Sequence
  Description of Artificial Sequence: Synthetic oligonucleotide
  Sense strand starting at position 2625 of SEQ ID NO: 1241875
gcugcuugagcgguugaca

SEQ ID NO: 1306479 - RNA, 19 nt, Artificial Sequence
  Description of Artificial Sequence: Synthetic oligonucleotide
  Antisense strand to SEQ ID NO: 1306478
ugucaaccgcucaagcagc

SEQ ID NO: 1306480 - RNA, 19 nt, Artificial Sequence
  Description of Artificial Sequence: Synthetic oligonucleotide
  Sense strand starting at position 2628 of SEQ ID NO: 1241875
gcuugagcgguugacacau

SEQ ID NO: 1306481 - RNA, 19 nt, Artificial Sequence
  Description of Artificial Sequence: Synthetic oligonucleotide
  Antisense strand to SEQ ID NO: 1306480
augugucaaccgcucaagc

SEQ ID NO: 1306482 - RNA, 19 nt, Artificial Sequence
  Description of Artificial Sequence: Synthetic oligonucleotide
  Sense strand starting at position 2768 of SEQ ID NO: 1241875
gccagauauugggcugagu

SEQ ID NO: 1306483 - RNA, 19 nt, Artificial Sequence
  Description of Artificial Sequence: Synthetic oligonucleotide
  Antisense strand to SEQ ID NO: 1306482
acucagcccaauaucuggc

SEQ ID NO: 1306484 - RNA, 19 nt, Artificial Sequence
  Description of Artificial Sequence: Synthetic oligonucleotide
  Sense strand starting at position 2779 of SEQ ID NO: 1241875
ggcugagugccagaaaccu

SEQ ID NO: 1306485 - RNA, 19 nt, Artificial Sequence
  Description of Artificial Sequence: Synthetic oligonucleotide
  Antisense strand to SEQ ID NO: 1306484
agguuucuggcacucagcc

SEQ ID NO: 1306486 - RNA, 19 nt, Artificial Sequence
  Description of Artificial Sequence: Synthetic oligonucleotide
  Sense strand starting at position 2885 of SEQ ID NO: 1241875
gauaaugacuauugaggaa

SEQ ID NO: 1306487 - RNA, 19 nt, Artificial Sequence
  Description of Artificial Sequence: Synthetic oligonucleotide
  Antisense strand to SEQ ID NO: 1306486
uuccucaauagucauuauc

SEQ ID NO: 1306488 - RNA, 19 nt, Artificial Sequence
  Description of Artificial Sequence: Synthetic oligonucleotide
  Sense strand starting at position 3056 of SEQ ID NO: 1241875
ugagcucagugguuggaga

SEQ ID NO: 1306489 - RNA, 19 nt, Artificial Sequence
  Description of Artificial Sequence: Synthetic oligonucleotide
  Antisense strand to SEQ ID NO: 1306488
ucuccaaccacugagcuca

SEQ ID NO: 1306490 - RNA, 19 nt, Artificial Sequence
  Description of Artificial Sequence: Synthetic oligonucleotide
  Sense strand starting at position 3391 of SEQ ID NO: 1241875
uugggugcacacugagauu

SEQ ID NO: 1306491 - RNA, 19 nt, Artificial Sequence
  Description of Artificial Sequence: Synthetic oligonucleotide
  Antisense strand to SEQ ID NO: 1306490
aaucucagugugcacccaa

SEQ ID NO: 1306492 - RNA, 19 nt, Artificial Sequence
  Description of Artificial Sequence: Synthetic oligonucleotide
  Sense strand starting at position 3432 of SEQ ID NO: 1241875
guggguucaggucagacua

SEQ ID NO: 1306493 - RNA, 19 nt, Artificial Sequence
  Description of Artificial Sequence: Synthetic oligonucleotide
  Antisense strand to SEQ ID NO: 1306492
uagucugaccugaacccac

SEQ ID NO: 1306494 - RNA, 19 nt, Artificial Sequence
  Description of Artificial Sequence: Synthetic oligonucleotide
  Sense strand starting at position 3660 of SEQ ID NO: 1241875
ugcucucuggguuguaaac

SEQ ID NO: 1306495 - RNA, 19 nt, Artificial Sequence
  Description of Artificial Sequence: Synthetic oligonucleotide
  Antisense strand to SEQ ID NO: 1306494
guuuacaacccagagagca

SEQ ID NO: 1306496 - RNA, 19 nt, Artificial Sequence
  Description of Artificial Sequence: Synthetic oligonucleotide
  Sense strand starting at position 3714 of SEQ ID NO: 1241875
ccaauagagccugaagucu

SEQ ID NO: 1306497 - RNA, 19 nt, Artificial Sequence
  Description of Artificial Sequence: Synthetic oligonucleotide
  Antisense strand to SEQ ID NO: 1306496
agacuucaggcucuauugg

SEQ ID NO: 1306498 - RNA, 19 nt, Artificial Sequence
  Description of Artificial Sequence: Synthetic oligonucleotide
  Sense strand starting at position 3808 of SEQ ID NO: 1241875
gagggcugugguugcuaga

SEQ ID NO: 1306499 - RNA, 19 nt, Artificial Sequence
  Description of Artificial Sequence: Synthetic oligonucleotide
  Antisense strand to SEQ ID NO: 1306498
ucuagcaaccacagcccuc

SEQ ID NO: 1306500 - RNA, 19 nt, Artificial Sequence
  Description of Artificial Sequence: Synthetic oligonucleotide
  Sense strand starting at position 3913 of SEQ ID NO: 1241875
uugauagauuuccagcaaa

SEQ ID NO: 1306501 - RNA, 19 nt, Artificial Sequence
  Description of Artificial Sequence: Synthetic oligonucleotide
  Antisense strand to SEQ ID NO: 1306500
uuugcuggaaaucuaucaa

SEQ ID NO: 1306502 - RNA, 19 nt, Artificial Sequence
  Description of Artificial Sequence: Synthetic oligonucleotide
  Sense strand starting at position 137 of SEQ ID NO: 1241876
cugacagugccaugacaaa

SEQ ID NO: 1306503 - RNA, 19 nt, Artificial Sequence
  Description of Artificial Sequence: Synthetic oligonucleotide
  Antisense strand to SEQ ID NO: 1306502
uuugucauggcacugucag

SEQ ID NO: 1306504 - RNA, 19 nt, Artificial Sequence
  Description of Artificial Sequence: Synthetic oligonucleotide
  Sense strand starting at position 189 of SEQ ID NO: 1241876
agccuuccguccuuauuua

SEQ ID NO: 1306505 - RNA, 19 nt, Artificial Sequence
  Description of Artificial Sequence: Synthetic oligonucleotide
  Antisense strand to SEQ ID NO: 1306504
uaaauaaggacggaaggcu

SEQ ID NO: 1306506 - RNA, 19 nt, Artificial Sequence
  Description of Artificial Sequence: Synthetic oligonucleotide
  Sense strand starting at position 190 of SEQ ID NO: 1241876
gccuuccguccuuauuuau

SEQ ID NO: 1306507 - RNA, 19 nt, Artificial Sequence
  Description of Artificial Sequence: Synthetic oligonucleotide
  Antisense strand to SEQ ID NO: 1306506
auaaauaaggacggaaggc

SEQ ID NO: 1306508 - RNA, 19 nt, Artificial Sequence
  Description of Artificial Sequence: Synthetic oligonucleotide
  Sense strand starting at position 196 of SEQ ID NO: 1241876
cguccuuauuuaucaagcu

SEQ ID NO: 1306509 - RNA, 19 nt, Artificial Sequence
  Description of Artificial Sequence: Synthetic oligonucleotide
  Antisense strand to SEQ ID NO: 1306508
agcuugauaaauaaggacg

SEQ ID NO: 1306510 - RNA, 19 nt, Artificial Sequence
  Description of Artificial Sequence: Synthetic oligonucleotide
  Sense strand starting at position 253 of SEQ ID NO: 1241876
ugaagcucuucucuggaaa

SEQ ID NO: 1306511 - RNA, 19 nt, Artificial Sequence
  Description of Artificial Sequence: Synthetic oligonucleotide
  Antisense strand to SEQ ID NO: 1306510
uuuccagagaagagcuuca

SEQ ID NO: 1306512 - RNA, 19 nt, Artificial Sequence
  Description of Artificial Sequence: Synthetic oligonucleotide
  Sense strand starting at position 500 of SEQ ID NO: 1241876
cccagugcacgcguuagaa

SEQ ID NO: 1306513 - RNA, 19 nt, Artificial Sequence
  Description of Artificial Sequence: Synthetic oligonucleotide
  Antisense strand to SEQ ID NO: 1306512
uucuaacgcgugcacuggg

SEQ ID NO: 1306514 - RNA, 19 nt, Artificial Sequence
  Description of Artificial Sequence: Synthetic oligonucleotide
  Sense strand starting at position 606 of SEQ ID NO: 1241876
ccagaacugcuuugccaga

SEQ ID NO: 1306515 - RNA, 19 nt, Artificial Sequence
  Description of Artificial Sequence: Synthetic oligonucleotide
  Antisense strand to SEQ ID NO: 1306514
ucuggcaaagcaguucugg

SEQ ID NO: 1306516 - RNA, 19 nt, Artificial Sequence
  Description of Artificial Sequence: Synthetic oligonucleotide
  Sense strand starting at position 639 of SEQ ID NO: 1241876
caguucccucugggaguaa

SEQ ID NO: 1306517 - RNA, 19 nt, Artificial Sequence
  Description of Artificial Sequence: Synthetic oligonucleotide
  Antisense strand to SEQ ID NO: 1306516
uuacucccagagggaacug

SEQ ID NO: 1306518 - RNA, 19 nt, Artificial Sequence
  Description of Artificial Sequence: Synthetic oligonucleotide
  Sense strand starting at position 671 of SEQ ID NO: 1241876
ucaaucagcucgucagaca

SEQ ID NO: 1306519 - RNA, 19 nt, Artificial Sequence
  Description of Artificial Sequence: Synthetic oligonucleotide
  Antisense strand to SEQ ID NO: 1306518
ugucugacgagcugauuga

SEQ ID NO: 1306520 - RNA, 19 nt, Artificial Sequence
  Description of Artificial Sequence: Synthetic oligonucleotide
  Sense strand starting at position 1028 of SEQ ID NO: 1241876
agacuucuccagggcaaca

SEQ ID NO: 1306521 - RNA, 19 nt, Artificial Sequence
  Description of Artificial Sequence: Synthetic oligonucleotide
  Antisense strand to SEQ ID NO: 1306520
uguugcccuggagaagucu

SEQ ID NO: 1306522 - RNA, 19 nt, Artificial Sequence
  Description of Artificial Sequence: Synthetic oligonucleotide
  Sense strand starting at position 1222 of SEQ ID NO: 1241876
gguggaagucaaggaauca

SEQ ID NO: 1306523 - RNA, 19 nt, Artificial Sequence
  Description of Artificial Sequence: Synthetic oligonucleotide
  Antisense strand to SEQ ID NO: 1306522
ugauuccuugacuuccacc

SEQ ID NO: 1306524 - RNA, 19 nt, Artificial Sequence
  Description of Artificial Sequence: Synthetic oligonucleotide
  Sense strand starting at position 1328 of SEQ ID NO: 1241876
ggaggagucuugaggcuga

SEQ ID NO: 1306525 - RNA, 19 nt, Artificial Sequence
  Description of Artificial Sequence: Synthetic oligonucleotide
  Antisense strand to SEQ ID NO: 1306524
ucagccucaagacuccucc

SEQ ID NO: 1306526 - RNA, 19 nt, Artificial Sequence
  Description of Artificial Sequence: Synthetic oligonucleotide
  Sense strand starting at position 1634 of SEQ ID NO: 1241876
cugagauggcuccaucucu

SEQ ID NO: 1306527 - RNA, 19 nt, Artificial Sequence
  Description of Artificial Sequence: Synthetic oligonucleotide
  Antisense strand to SEQ ID NO: 1306526
agagauggagccaucucag

SEQ ID NO: 1306528 - RNA, 19 nt, Artificial Sequence
  Description of Artificial Sequence: Synthetic oligonucleotide
  Sense strand starting at position 1793 of SEQ ID NO: 1241876
guaauaaagcacugcuaag

SEQ ID NO: 1306529 - RNA, 19 nt, Artificial Sequence
  Description of Artificial Sequence: Synthetic oligonucleotide
  Antisense strand to SEQ ID NO: 1306528
cuuagcagugcuuuauuac

SEQ ID NO: 1306530 - RNA, 19 nt, Artificial Sequence
  Description of Artificial Sequence: Synthetic oligonucleotide
  Sense strand starting at position 1802 of SEQ ID NO: 1241876
cacugcuaagggugacauu

SEQ ID NO: 1306531 - RNA, 19 nt, Artificial Sequence
  Description of Artificial Sequence: Synthetic oligonucleotide
  Antisense strand to SEQ ID NO: 1306530
aaugucacccuuagcagug

SEQ ID NO: 1306532 - RNA, 19 nt, Artificial Sequence
  Description of Artificial Sequence: Synthetic oligonucleotide
  Sense strand starting at position 1832 of SEQ ID NO: 1241876
uguggacugccugaauguu

SEQ ID NO: 1306533 - RNA, 19 nt, Artificial Sequence
  Description of Artificial Sequence: Synthetic oligonucleotide
  Antisense strand to SEQ ID NO: 1306532
aacauucaggcaguccaca

SEQ ID NO: 1306534 - RNA, 19 nt, Artificial Sequence
  Description of Artificial Sequence: Synthetic oligonucleotide
  Sense strand starting at position 1933 of SEQ ID NO: 1241876
aaaguuugacucugagggu

SEQ ID NO: 1306535 - RNA, 19 nt, Artificial Sequence
  Description of Artificial Sequence: Synthetic oligonucleotide
  Antisense strand to SEQ ID NO: 1306534
acccucagagucaaacuuu

SEQ ID NO: 1306536 - RNA, 19 nt, Artificial Sequence
  Description of Artificial Sequence: Synthetic oligonucleotide
  Sense strand starting at position 1955 of SEQ ID NO: 1241876
gagcaauagcaggaguaga

SEQ ID NO: 1306537 - RNA, 19 nt, Artificial Sequence
  Description of Artificial Sequence: Synthetic oligonucleotide
  Antisense strand to SEQ ID NO: 1306536
ucuacuccugcuauugcuc

SEQ ID NO: 1306538 - RNA, 19 nt, Artificial Sequence
  Description of Artificial Sequence: Synthetic oligonucleotide
  Sense strand starting at position 1966 of SEQ ID NO: 1241876
ggaguagaaucagcagcua

SEQ ID NO: 1306539 - RNA, 19 nt, Artificial Sequence
  Description of Artificial Sequence: Synthetic oligonucleotide
  Antisense strand to SEQ ID NO: 1306538
uagcugcugauucuacucc

SEQ ID NO: 1306540 - RNA, 19 nt, Artificial Sequence
  Description of Artificial Sequence: Synthetic oligonucleotide
  Sense strand starting at position 2017 of SEQ ID NO: 1241876
aagacuagccucuguaagu

SEQ ID NO: 1306541 - RNA, 19 nt, Artificial Sequence
  Description of Artificial Sequence: Synthetic oligonucleotide
  Antisense strand to SEQ ID NO: 1306540
acuuacagaggcuagucuu

SEQ ID NO: 1306542 - RNA, 19 nt, Artificial Sequence
  Description of Artificial Sequence: Synthetic oligonucleotide
  Sense strand starting at position 2305 of SEQ ID NO: 1241876
guaagaauguguccuggga

SEQ ID NO: 1306543 - RNA, 19 nt, Artificial Sequence
  Description of Artificial Sequence: Synthetic oligonucleotide
  Antisense strand to SEQ ID NO: 1306542
ucccaggacacauucuuac

SEQ ID NO: 1306544 - RNA, 19 nt, Artificial Sequence
  Description of Artificial Sequence: Synthetic oligonucleotide
  Sense strand starting at position 2367 of SEQ ID NO: 1241876
gcucucuuugagcagaguu

SEQ ID NO: 1306545 - RNA, 19 nt, Artificial Sequence
  Description of Artificial Sequence: Synthetic oligonucleotide
  Antisense strand to SEQ ID NO: 1306544
aacucugcucaaagagagc

SEQ ID NO: 1306546 - RNA, 19 nt, Artificial Sequence
  Description of Artificial Sequence: Synthetic oligonucleotide
  Sense strand starting at position 2369 of SEQ ID NO: 1241876
ucucuuugagcagaguuga

SEQ ID NO: 1306547 - RNA, 19 nt, Artificial Sequence
  Description of Artificial Sequence: Synthetic oligonucleotide
  Antisense strand to SEQ ID NO: 1306546
ucaacucugcucaaagaga

SEQ ID NO: 1306548 - RNA, 19 nt, Artificial Sequence
  Description of Artificial Sequence: Synthetic oligonucleotide
  Sense strand starting at position 2403 of SEQ ID NO: 1241876
aaguuuggccuagagggua

SEQ ID NO: 1306549 - RNA, 19 nt, Artificial Sequence
  Description of Artificial Sequence: Synthetic oligonucleotide
  Antisense strand to SEQ ID NO: 1306548
uacccucuaggccaaacuu

SEQ ID NO: 1306550 - RNA, 19 nt, Artificial Sequence
  Description of Artificial Sequence: Synthetic oligonucleotide
  Sense strand starting at position 2519 of SEQ ID NO: 1241876
ugguacaacuggucuuaca

SEQ ID NO: 1306551 - RNA, 19 nt, Artificial Sequence
  Description of Artificial Sequence: Synthetic oligonucleotide
  Antisense strand to SEQ ID NO: 1306550
uguaagaccaguuguacca

SEQ ID NO: 1306552 - RNA, 19 nt, Artificial Sequence
  Description of Artificial Sequence: Synthetic oligonucleotide
  Sense strand starting at position 2581 of SEQ ID NO: 1241876
gccuauacugcugaaguua

SEQ ID NO: 1306553 - RNA, 19 nt, Artificial Sequence
  Description of Artificial Sequence: Synthetic oligonucleotide
  Antisense strand to SEQ ID NO: 1306552
uaacuucagcaguauaggc

SEQ ID NO: 1306554 - RNA, 19 nt, Artificial Sequence
  Description of Artificial Sequence: Synthetic oligonucleotide
  Sense strand starting at position 2590 of SEQ ID NO: 1241876
gcugaaguuauugauauga

SEQ ID NO: 1306555 - RNA, 19 nt, Artificial Sequence
  Description of Artificial Sequence: Synthetic oligonucleotide
  Antisense strand to SEQ ID NO: 1306554
ucauaucaauaacuucagc

SEQ ID NO: 1306556 - RNA, 19 nt, Artificial Sequence
  Description of Artificial Sequence: Synthetic oligonucleotide
  Sense strand starting at position 2605 of SEQ ID NO: 1241876
augaguuucuuggugauaa

SEQ ID NO: 1306557 - RNA, 19 nt, Artificial Sequence
  Description of Artificial Sequence: Synthetic oligonucleotide
  Antisense strand to SEQ ID NO: 1306556
uuaucaccaagaaacucau

SEQ ID NO: 1306558 - RNA, 19 nt, Artificial Sequence
  Description of Artificial Sequence: Synthetic oligonucleotide
  Sense strand starting at position 2607 of SEQ ID NO: 1241876
gaguuucuuggugauaaag

SEQ ID NO: 1306559 - RNA, 19 nt, Artificial Sequence
  Description of Artificial Sequence: Synthetic oligonucleotide
  Antisense strand to SEQ ID NO: 1306558
cuuuaucaccaagaaacuc

SEQ ID NO: 1306560 - RNA, 19 nt, Artificial Sequence
  Description of Artificial Sequence: Synthetic oligonucleotide
  Sense strand starting at position 2654 of SEQ ID NO: 1241876
uugaaagucugagcuugga

SEQ ID NO: 1306561 - RNA, 19 nt, Artificial Sequence
  Description of Artificial Sequence: Synthetic oligonucleotide
  Antisense strand to SEQ ID NO: 1306560
uccaagcucagacuuucaa

SEQ ID NO: 1306562 - RNA, 19 nt, Artificial Sequence
  Description of Artificial Sequence: Synthetic oligonucleotide
  Sense strand starting at position 2670 of SEQ ID NO: 1241876
ggagcuacucagcaucuua

SEQ ID NO: 1306563 - RNA, 19 nt, Artificial Sequence
  Description of Artificial Sequence: Synthetic oligonucleotide
  Antisense strand to SEQ ID NO: 1306562
uaagaugcugaguagcucc

SEQ ID NO: 1306564 - RNA, 19 nt, Artificial Sequence
  Description of Artificial Sequence: Synthetic oligonucleotide
  Sense strand starting at position 2841 of SEQ ID NO: 1241876
gucucuugccuuugaagaa

SEQ ID NO: 1306565 - RNA, 19 nt, Artificial Sequence
  Description of Artificial Sequence: Synthetic oligonucleotide
  Antisense strand to SEQ ID NO: 1306564
uucuucaaaggcaagagac

SEQ ID NO: 1306566 - RNA, 19 nt, Artificial Sequence
  Description of Artificial Sequence: Synthetic oligonucleotide
  Sense strand starting at position 2862 of SEQ ID NO: 1241876
agccaaauggucuauggau

SEQ ID NO: 1306567 - RNA, 19 nt, Artificial Sequence
  Description of Artificial Sequence: Synthetic oligonucleotide
  Antisense strand to SEQ ID NO: 1306566
auccauagaccauuuggcu

SEQ ID NO: 1306568 - RNA, 19 nt, Artificial Sequence
  Description of Artificial Sequence: Synthetic oligonucleotide
  Sense strand starting at position 2864 of SEQ ID NO: 1241876
ccaaauggucuauggauug

SEQ ID NO: 1306569 - RNA, 19 nt, Artificial Sequence
  Description of Artificial Sequence: Synthetic oligonucleotide
  Antisense strand to SEQ ID NO: 1306568
caauccauagaccauuugg

SEQ ID NO: 1306570 - RNA, 19 nt, Artificial Sequence
  Description of Artificial Sequence: Synthetic oligonucleotide
  Sense strand starting at position 2869 of SEQ ID NO: 1241876
uggucuauggauuggugaa

SEQ ID NO: 1306571 - RNA, 19 nt, Artificial Sequence
  Description of Artificial Sequence: Synthetic oligonucleotide
  Antisense strand to SEQ ID NO: 1306570
uucaccaauccauagacca

SEQ ID NO: 1306572 - RNA, 19 nt, Artificial Sequence
  Description of Artificial Sequence: Synthetic oligonucleotide
  Sense strand starting at position 2870 of SEQ ID NO: 1241876
ggucuauggauuggugaag

SEQ ID NO: 1306573 - RNA, 19 nt, Artificial Sequence
  Description of Artificial Sequence: Synthetic oligonucleotide
  Antisense strand to SEQ ID NO: 1306572
cuucaccaauccauagacc

SEQ ID NO: 1306574 - RNA, 19 nt, Artificial Sequence
  Description of Artificial Sequence: Synthetic oligonucleotide
  Sense strand starting at position 2871 of SEQ ID NO: 1241876
gucuauggauuggugaagu

SEQ ID NO: 1306575 - RNA, 19 nt, Artificial Sequence
  Description of Artificial Sequence: Synthetic oligonucleotide
  Antisense strand to SEQ ID NO: 1306574
acuucaccaauccauagac

SEQ ID NO: 1306576 - RNA, 19 nt, Artificial Sequence
  Description of Artificial Sequence: Synthetic oligonucleotide
  Sense strand starting at position 3015 of SEQ ID NO: 1241876
ugcccucuucccuggagaa

SEQ ID NO: 1306577 - RNA, 19 nt, Artificial Sequence
  Description of Artificial Sequence: Synthetic oligonucleotide
  Antisense strand to SEQ ID NO: 1306576
uucuccagggaagagggca

SEQ ID NO: 1306578 - RNA, 19 nt, Artificial Sequence
  Description of Artificial Sequence: Synthetic oligonucleotide
  Sense strand starting at position 3016 of SEQ ID NO: 1241876
gcccucuucccuggagaau

SEQ ID NO: 1306579 - RNA, 19 nt, Artificial Sequence
  Description of Artificial Sequence: Synthetic oligonucleotide
  Antisense strand to SEQ ID NO: 1306578
auucuccagggaagagggc

SEQ ID NO: 1306580 - RNA, 19 nt, Artificial Sequence
  Description of Artificial Sequence: Synthetic oligonucleotide
  Sense strand starting at position 3274 of SEQ ID NO: 1241876
gcuagcaaucuugaccuaa

SEQ ID NO: 1306581 - RNA, 19 nt, Artificial Sequence
  Description of Artificial Sequence: Synthetic oligonucleotide
  Antisense strand to SEQ ID NO: 1306580
uuaggucaagauugcuagc

SEQ ID NO: 1306582 - RNA, 19 nt, Artificial Sequence
  Description of Artificial Sequence: Synthetic oligonucleotide
  Sense strand starting at position 112 of SEQ ID NO: 1241877
agcacacuccuguaaguaa

SEQ ID NO: 1306583 - RNA, 19 nt, Artificial Sequence
  Description of Artificial Sequence: Synthetic oligonucleotide
  Antisense strand to SEQ ID NO: 1306582
uuacuuacaggagugugcu

SEQ ID NO: 1306584 - RNA, 19 nt, Artificial Sequence
  Description of Artificial Sequence: Synthetic oligonucleotide
  Sense strand starting at position 311 of SEQ ID NO: 1241877
aaugacaaaugugugcuua

SEQ ID NO: 1306585 - RNA, 19 nt, Artificial Sequence
  Description of Artificial Sequence: Synthetic oligonucleotide
  Antisense strand to SEQ ID NO: 1306584
uaagcacacauuugucauu

SEQ ID NO: 1306586 - RNA, 19 nt, Artificial Sequence
  Description of Artificial Sequence: Synthetic oligonucleotide
  Sense strand starting at position 315 of SEQ ID NO: 1241877
acaaaugugugcuuaggga

SEQ ID NO: 1306587 - RNA, 19 nt, Artificial Sequence
  Description of Artificial Sequence: Synthetic oligonucleotide
  Antisense strand to SEQ ID NO: 1306586
ucccuaagcacacauuugu

SEQ ID NO: 1306588 - RNA, 19 nt, Artificial Sequence
  Description of Artificial Sequence: Synthetic oligonucleotide
  Sense strand starting at position 350 of SEQ ID NO: 1241877
cagggaaaccuguauggcu

SEQ ID NO: 1306589 - RNA, 19 nt, Artificial Sequence
  Description of Artificial Sequence: Synthetic oligonucleotide
  Antisense strand to SEQ ID NO: 1306588
agccauacagguuucccug

SEQ ID NO: 1306590 - RNA, 19 nt, Artificial Sequence
  Description of Artificial Sequence: Synthetic oligonucleotide
  Sense strand starting at position 352 of SEQ ID NO: 1241877
gggaaaccuguauggcuuu

SEQ ID NO: 1306591 - RNA, 19 nt, Artificial Sequence
  Description of Artificial Sequence: Synthetic oligonucleotide
  Antisense strand to SEQ ID NO: 1306590
aaagccauacagguuuccc

SEQ ID NO: 1306592 - RNA, 19 nt, Artificial Sequence
  Description of Artificial Sequence: Synthetic oligonucleotide
  Sense strand starting at position 510 of SEQ ID NO: 1241877
ucaugcuuccaaggcaauu

SEQ ID NO: 1306593 - RNA, 19 nt, Artificial Sequence
  Description of Artificial Sequence: Synthetic oligonucleotide
  Antisense strand to SEQ ID NO: 1306592
aauugccuuggaagcauga

SEQ ID NO: 1306594 - RNA, 19 nt, Artificial Sequence
  Description of Artificial Sequence: Synthetic oligonucleotide
  Sense strand starting at position 539 of SEQ ID NO: 1241877
agucaauauuucuaaugag

SEQ ID NO: 1306595 - RNA, 19 nt, Artificial Sequence
  Description of Artificial Sequence: Synthetic oligonucleotide
  Antisense strand to SEQ ID NO: 1306594
cucauuagaaauauugacu

SEQ ID NO: 1306596 - RNA, 19 nt, Artificial Sequence
  Description of Artificial Sequence: Synthetic oligonucleotide
  Sense strand starting at position 572 of SEQ ID NO: 1241877
caaacagaucacuguaggu

SEQ ID NO: 1306597 - RNA, 19 nt, Artificial Sequence
  Description of Artificial Sequence: Synthetic oligonucleotide
  Antisense strand to SEQ ID NO: 1306596
accuacagugaucuguuug

SEQ ID NO: 1306598 - RNA, 19 nt, Artificial Sequence
  Description of Artificial Sequence: Synthetic oligonucleotide
  Sense strand starting at position 577 of SEQ ID NO: 1241877
agaucacuguagguaucaa

SEQ ID NO: 1306599 - RNA, 19 nt, Artificial Sequence
  Description of Artificial Sequence: Synthetic oligonucleotide
  Antisense strand to SEQ ID NO: 1306598
uugauaccuacagugaucu

SEQ ID NO: 1306600 - RNA, 19 nt, Artificial Sequence
  Description of Artificial Sequence: Synthetic oligonucleotide
  Sense strand starting at position 585 of SEQ ID NO: 1241877
guagguaucaauggccaaa

SEQ ID NO: 1306601 - RNA, 19 nt, Artificial Sequence
  Description of Artificial Sequence: Synthetic oligonucleotide
  Antisense strand to SEQ ID NO: 1306600
uuuggccauugauaccuac

SEQ ID NO: 1306602 - RNA, 19 nt, Artificial Sequence
  Description of Artificial Sequence: Synthetic oligonucleotide
  Sense strand starting at position 587 of SEQ ID NO: 1241877
agguaucaauggccaaaga

SEQ ID NO: 1306603 - RNA, 19 nt, Artificial Sequence
  Description of Artificial Sequence: Synthetic oligonucleotide
  Antisense strand to SEQ ID NO: 1306602
ucuuuggccauugauaccu

SEQ ID NO: 1306604 - RNA, 19 nt, Artificial Sequence
  Description of Artificial Sequence: Synthetic oligonucleotide
  Sense strand starting at position 627 of SEQ ID NO: 1241877
aggagaaugucccuaaauc

SEQ ID NO: 1306605 - RNA, 19 nt, Artificial Sequence
  Description of Artificial Sequence: Synthetic oligonucleotide
  Antisense strand to SEQ ID NO: 1306604
gauuuagggacauucuccu

SEQ ID NO: 1306606 - RNA, 19 nt, Artificial Sequence
  Description of Artificial Sequence: Synthetic oligonucleotide
  Sense strand starting at position 715 of SEQ ID NO: 1241877
aauuacgaguucccaaagu

SEQ ID NO: 1306607 - RNA, 19 nt, Artificial Sequence
  Description of Artificial Sequence: Synthetic oligonucleotide
  Antisense strand to SEQ ID NO: 1306606
acuuugggaacucguaauu

SEQ ID NO: 1306608 - RNA, 19 nt, Artificial Sequence
  Description of Artificial Sequence: Synthetic oligonucleotide
  Sense strand starting at position 726 of SEQ ID NO: 1241877
cccaaagugugagcaucau

SEQ ID NO: 1306609 - RNA, 19 nt, Artificial Sequence
  Description of Artificial Sequence: Synthetic oligonucleotide
  Antisense strand to SEQ ID NO: 1306608
augaugcucacacuuuggg

SEQ ID NO: 1306610 - RNA, 19 nt, Artificial Sequence
  Description of Artificial Sequence: Synthetic oligonucleotide
  Sense strand starting at position 743 of SEQ ID NO: 1241877
augugugcuaggugaagau

SEQ ID NO: 1306611 - RNA, 19 nt, Artificial Sequence
  Description of Artificial Sequence: Synthetic oligonucleotide
  Antisense strand to SEQ ID NO: 1306610
aucuucaccuagcacacau

SEQ ID NO: 1306612 - RNA, 19 nt, Artificial Sequence
  Description of Artificial Sequence: Synthetic oligonucleotide
  Sense strand starting at position 827 of SEQ ID NO: 1241877
aguaauaguuucuugguga

SEQ ID NO: 1306613 - RNA, 19 nt, Artificial Sequence
  Description of Artificial Sequence: Synthetic oligonucleotide
  Antisense strand to SEQ ID NO: 1306612
ucaccaagaaacuauuacu

SEQ ID NO: 1306614 - RNA, 19 nt, Artificial Sequence
  Description of Artificial Sequence: Synthetic oligonucleotide
  Sense strand starting at position 830 of SEQ ID NO: 1241877
aauaguuucuuggugaaau

SEQ ID NO: 1306615 - RNA, 19 nt, Artificial Sequence
  Description of Artificial Sequence: Synthetic oligonucleotide
  Antisense strand to SEQ ID NO: 1306614
auuucaccaagaaacuauu

SEQ ID NO: 1306616 - RNA, 19 nt, Artificial Sequence
  Description of Artificial Sequence: Synthetic oligonucleotide
  Sense strand starting at position 832 of SEQ ID NO: 1241877
uaguuucuuggugaaauua

SEQ ID NO: 1306617 - RNA, 19 nt, Artificial Sequence
  Description of Artificial Sequence: Synthetic oligonucleotide
  Antisense strand to SEQ ID NO: 1306616
uaauuucaccaagaaacua

SEQ ID NO: 1306618 - RNA, 19 nt, Artificial Sequence
  Description of Artificial Sequence: Synthetic oligonucleotide
  Sense strand starting at position 840 of SEQ ID NO: 1241877
uggugaaauuaguuagcaa

SEQ ID NO: 1306619 - RNA, 19 nt, Artificial Sequence
  Description of Artificial Sequence: Synthetic oligonucleotide
  Antisense strand to SEQ ID NO: 1306618
uugcuaacuaauuucacca

SEQ ID NO: 1306620 - RNA, 19 nt, Artificial Sequence
  Description of Artificial Sequence: Synthetic oligonucleotide
  Sense strand starting at position 841 of SEQ ID NO: 1241877
ggugaaauuaguuagcaaa

SEQ ID NO: 1306621 - RNA, 19 nt, Artificial Sequence
  Description of Artificial Sequence: Synthetic oligonucleotide
  Antisense strand to SEQ ID NO: 1306620
uuugcuaacuaauuucacc

SEQ ID NO: 1306622 - RNA, 19 nt, Artificial Sequence
  Description of Artificial Sequence: Synthetic oligonucleotide
  Sense strand starting at position 843 of SEQ ID NO: 1241877
ugaaauuaguuagcaaacu

SEQ ID NO: 1306623 - RNA, 19 nt, Artificial Sequence
  Description of Artificial Sequence: Synthetic oligonucleotide
  Antisense strand to SEQ ID NO: 1306622
aguuugcuaacuaauuuca

SEQ ID NO: 1306624 - RNA, 19 nt, Artificial Sequence
  Description of Artificial Sequence: Synthetic oligonucleotide
  Sense strand starting at position 852 of SEQ ID NO: 1241877
uuagcaaacuuauuagaug

SEQ ID NO: 1306625 - RNA, 19 nt, Artificial Sequence
  Description of Artificial Sequence: Synthetic oligonucleotide
  Antisense strand to SEQ ID NO: 1306624
caucuaauaaguuugcuaa

SEQ ID NO: 1306626 - RNA, 19 nt, Artificial Sequence
  Description of Artificial Sequence: Synthetic oligonucleotide
  Sense strand starting at position 860 of SEQ ID NO: 1241877
cuuauuagaugagaaauca

SEQ ID NO: 1306627 - RNA, 19 nt, Artificial Sequence
  Description of Artificial Sequence: Synthetic oligonucleotide
  Antisense strand to SEQ ID NO: 1306626
ugauuucucaucuaauaag

SEQ ID NO: 1306628 - RNA, 19 nt, Artificial Sequence
  Description of Artificial Sequence: Synthetic oligonucleotide
  Sense strand starting at position 1140 of SEQ ID NO: 1241877
guguauccaucacugaaca

SEQ ID NO: 1306629 - RNA, 19 nt, Artificial Sequence
  Description of Artificial Sequence: Synthetic oligonucleotide
  Antisense strand to SEQ ID NO: 1306628
uguucagugauggauacac

SEQ ID NO: 1306630 - RNA, 19 nt, Artificial Sequence
  Description of Artificial Sequence: Synthetic oligonucleotide
  Sense strand starting at position 1206 of SEQ ID NO: 1241877
uuagaaucuuaucaagaga

SEQ ID NO: 1306631 - RNA, 19 nt, Artificial Sequence
  Description of Artificial Sequence: Synthetic oligonucleotide
  Antisense strand to SEQ ID NO: 1306630
ucucuugauaagauucuaa

SEQ ID NO: 1306632 - RNA, 19 nt, Artificial Sequence
  Description of Artificial Sequence: Synthetic oligonucleotide
  Sense strand starting at position 1377 of SEQ ID NO: 1241877
gguccuaugcaguaacaca

SEQ ID NO: 1306633 - RNA, 19 nt, Artificial Sequence
  Description of Artificial Sequence: Synthetic oligonucleotide
  Antisense strand to SEQ ID NO: 1306632
uguguuacugcauaggacc

SEQ ID NO: 1306634 - RNA, 19 nt, Artificial Sequence
  Description of Artificial Sequence: Synthetic oligonucleotide
  Sense strand starting at position 1513 of SEQ ID NO: 1241877
gcgucugggccgcuuuaaa

SEQ ID NO: 1306635 - RNA, 19 nt, Artificial Sequence
  Description of Artificial Sequence: Synthetic oligonucleotide
  Antisense strand to SEQ ID NO: 1306634
uuuaaagcggcccagacgc

SEQ ID NO: 1306636 - RNA, 19 nt, Artificial Sequence
  Description of Artificial Sequence: Synthetic oligonucleotide
  Sense strand starting at position 1645 of SEQ ID NO: 1241877
caauuaaggcugggagaug

SEQ ID NO: 1306637 - RNA, 19 nt, Artificial Sequence
  Description of Artificial Sequence: Synthetic oligonucleotide
  Antisense strand to SEQ ID NO: 1306636
caucucccagccuuaauug

SEQ ID NO: 1306638 - RNA, 19 nt, Artificial Sequence
  Description of Artificial Sequence: Synthetic oligonucleotide
  Sense strand starting at position 1772 of SEQ ID NO: 1241877
cggagcuacgcgcugauua

SEQ ID NO: 1306639 - RNA, 19 nt, Artificial Sequence
  Description of Artificial Sequence: Synthetic oligonucleotide
  Antisense strand to SEQ ID NO: 1306638
uaaucagcgcguagcuccg

SEQ ID NO: 1306640 - RNA, 19 nt, Artificial Sequence
  Description of Artificial Sequence: Synthetic oligonucleotide
  Sense strand starting at position 1826 of SEQ ID NO: 1241877
ugucacaucuggcugacaa

SEQ ID NO: 1306641 - RNA, 19 nt, Artificial Sequence
  Description of Artificial Sequence: Synthetic oligonucleotide
  Antisense strand to SEQ ID NO: 1306640
uugucagccagaugugaca

SEQ ID NO: 1306642 - RNA, 19 nt, Artificial Sequence
  Description of Artificial Sequence: Synthetic oligonucleotide
  Sense strand starting at position 1827 of SEQ ID NO: 1241877
gucacaucuggcugacaaa

SEQ ID NO: 1306643 - RNA, 19 nt, Artificial Sequence
  Description of Artificial Sequence: Synthetic oligonucleotide
  Antisense strand to SEQ ID NO: 1306642
uuugucagccagaugugac

SEQ ID NO: 1306644 - RNA, 19 nt, Artificial Sequence
  Description of Artificial Sequence: Synthetic oligonucleotide
  Sense strand starting at position 1828 of SEQ ID NO: 1241877
ucacaucuggcugacaaau

SEQ ID NO: 1306645 - RNA, 19 nt, Artificial Sequence
  Description of Artificial Sequence: Synthetic oligonucleotide
  Antisense strand to SEQ ID NO: 1306644
auuugucagccagauguga

SEQ ID NO: 1306646 - RNA, 19 nt, Artificial Sequence
  Description of Artificial Sequence: Synthetic oligonucleotide
  Sense strand starting at position 1840 of SEQ ID NO: 1241877
gacaaaucccgaggaacuc

SEQ ID NO: 1306647 - RNA, 19 nt, Artificial Sequence
  Description of Artificial Sequence: Synthetic oligonucleotide
  Antisense strand to SEQ ID NO: 1306646
gaguuccucgggauuuguc

SEQ ID NO: 1306648 - RNA, 19 nt, Artificial Sequence
  Description of Artificial Sequence: Synthetic oligonucleotide
  Sense strand starting at position 2320 of SEQ ID NO: 1241877
cagugaagcuggucaaauc

SEQ ID NO: 1306649 - RNA, 19 nt, Artificial Sequence
  Description of Artificial Sequence: Synthetic oligonucleotide
  Antisense strand to SEQ ID NO: 1306648
gauuugaccagcuucacug

SEQ ID NO: 1306650 - RNA, 19 nt, Artificial Sequence
  Description of Artificial Sequence: Synthetic oligonucleotide
  Sense strand starting at position 3402 of SEQ ID NO: 1241877
cggauaacgcccuaaauca

SEQ ID NO: 1306651 - RNA, 19 nt, Artificial Sequence
  Description of Artificial Sequence: Synthetic oligonucleotide
  Antisense strand to SEQ ID NO: 1306650
ugauuuagggcguuauccg

SEQ ID NO: 1306652 - RNA, 19 nt, Artificial Sequence
  Description of Artificial Sequence: Synthetic oligonucleotide
  Sense strand starting at position 3589 of SEQ ID NO: 1241877
cgcucuucucaggagauga

SEQ ID NO: 1306653 - RNA, 19 nt, Artificial Sequence
  Description of Artificial Sequence: Synthetic oligonucleotide
  Antisense strand to SEQ ID NO: 1306652
ucaucuccugagaagagcg

SEQ ID NO: 1306654 - RNA, 19 nt, Artificial Sequence
  Description of Artificial Sequence: Synthetic oligonucleotide
  Sense strand starting at position 3685 of SEQ ID NO: 1241877
gcagaaaccucauucccga

SEQ ID NO: 1306655 - RNA, 19 nt, Artificial Sequence
  Description of Artificial Sequence: Synthetic oligonucleotide
  Antisense strand to SEQ ID NO: 1306654
ucgggaaugagguuucugc

SEQ ID NO: 1306656 - RNA, 19 nt, Artificial Sequence
  Description of Artificial Sequence: Synthetic oligonucleotide
  Sense strand starting at position 3692 of SEQ ID NO: 1241877
ccucauucccgagaaagug

SEQ ID NO: 1306657 - RNA, 19 nt, Artificial Sequence
  Description of Artificial Sequence: Synthetic oligonucleotide
  Antisense strand to SEQ ID NO: 1306656
cacuuucucgggaaugagg

SEQ ID NO: 1306658 - RNA, 19 nt, Artificial Sequence
  Description of Artificial Sequence: Synthetic oligonucleotide
  Sense strand starting at position 3720 of SEQ ID NO: 1241877
cgucuugggauguggaaga

SEQ ID NO: 1306659 - RNA, 19 nt, Artificial Sequence
  Description of Artificial Sequence: Synthetic oligonucleotide
  Antisense strand to SEQ ID NO: 1306658
ucuuccacaucccaagacg

SEQ ID NO: 1306660 - RNA, 19 nt, Artificial Sequence
  Description of Artificial Sequence: Synthetic oligonucleotide
  Sense strand starting at position 3970 of SEQ ID NO: 1241877
aaugaagugcccuggagaa

SEQ ID NO: 1306661 - RNA, 19 nt, Artificial Sequence
  Description of Artificial Sequence: Synthetic oligonucleotide
  Antisense strand to SEQ ID NO: 1306660
uucuccagggcacuucauu

SEQ ID NO: 1306662 - RNA, 19 nt, Artificial Sequence
  Description of Artificial Sequence: Synthetic oligonucleotide
  Sense strand starting at position 118 of SEQ ID NO: 1241878
gguccuaugcaguaacaca

SEQ ID NO: 1306663 - RNA, 19 nt, Artificial Sequence
  Description of Artificial Sequence: Synthetic oligonucleotide
  Antisense strand to SEQ ID NO: 1306662
uguguuacugcauaggacc

SEQ ID NO: 1306664 - RNA, 19 nt, Artificial Sequence
  Description of Artificial Sequence: Synthetic oligonucleotide
  Sense strand starting at position 254 of SEQ ID NO: 1241878
gcgucugggccgcuuuaaa

SEQ ID NO: 1306665 - RNA, 19 nt, Artificial Sequence
  Description of Artificial Sequence: Synthetic oligonucleotide
  Antisense strand to SEQ ID NO: 1306664
uuuaaagcggcccagacgc

SEQ ID NO: 1306666 - RNA, 19 nt, Artificial Sequence
  Description of Artificial Sequence: Synthetic oligonucleotide
  Sense strand starting at position 386 of SEQ ID NO: 1241878
caauuaaggcugggagaug

SEQ ID NO: 1306667 - RNA, 19 nt, Artificial Sequence
  Description of Artificial Sequence: Synthetic oligonucleotide
  Antisense strand to SEQ ID NO: 1306666
caucucccagccuuaauug

SEQ ID NO: 1306668 - RNA, 19 nt, Artificial Sequence
  Description of Artificial Sequence: Synthetic oligonucleotide
  Sense strand starting at position 498 of SEQ ID NO: 1241878
ugugaaaguuuggcucgga

SEQ ID NO: 1306669 - RNA, 19 nt, Artificial Sequence
  Description of Artificial Sequence: Synthetic oligonucleotide
  Antisense strand to SEQ ID NO: 1306668
uccgagccaaacuuucaca

SEQ ID NO: 1306670 - RNA, 19 nt, Artificial Sequence
  Description of Artificial Sequence: Synthetic oligonucleotide
  Sense strand starting at position 501 of SEQ ID NO: 1241878
gaaaguuuggcucggagcu

SEQ ID NO: 1306671 - RNA, 19 nt, Artificial Sequence
  Description of Artificial Sequence: Synthetic oligonucleotide
  Antisense strand to SEQ ID NO: 1306670
agcuccgagccaaacuuuc

SEQ ID NO: 1306672 - RNA, 19 nt, Artificial Sequence
  Description of Artificial Sequence: Synthetic oligonucleotide
  Sense strand starting at position 502 of SEQ ID NO: 1241878
aaaguuuggcucggagcua

SEQ ID NO: 1306673 - RNA, 19 nt, Artificial Sequence
  Description of Artificial Sequence: Synthetic oligonucleotide
  Antisense strand to SEQ ID NO: 1306672
uagcuccgagccaaacuuu

SEQ ID NO: 1306674 - RNA, 19 nt, Artificial Sequence
  Description of Artificial Sequence: Synthetic oligonucleotide
  Sense strand starting at position 513 of SEQ ID NO: 1241878
cggagcuacgcgcugauua

SEQ ID NO: 1306675 - RNA, 19 nt, Artificial Sequence
  Description of Artificial Sequence: Synthetic oligonucleotide
  Antisense strand to SEQ ID NO: 1306674
uaaucagcgcguagcuccg

SEQ ID NO: 1306676 - RNA, 19 nt, Artificial Sequence
  Description of Artificial Sequence: Synthetic oligonucleotide
  Sense strand starting at position 567 of SEQ ID NO: 1241878
ugucacaucuggcugacaa

SEQ ID NO: 1306677 - RNA, 19 nt, Artificial Sequence
  Description of Artificial Sequence: Synthetic oligonucleotide
  Antisense strand to SEQ ID NO: 1306676
uugucagccagaugugaca

SEQ ID NO: 1306678 - RNA, 19 nt, Artificial Sequence
  Description of Artificial Sequence: Synthetic oligonucleotide
  Sense strand starting at position 568 of SEQ ID NO: 1241878
gucacaucuggcugacaaa

SEQ ID NO: 1306679 - RNA, 19 nt, Artificial Sequence
  Description of Artificial Sequence: Synthetic oligonucleotide
  Antisense strand to SEQ ID NO: 1306678
uuugucagccagaugugac

SEQ ID NO: 1306680 - RNA, 19 nt, Artificial Sequence
  Description of Artificial Sequence: Synthetic oligonucleotide
  Sense strand starting at position 569 of SEQ ID NO: 1241878
ucacaucuggcugacaaau

SEQ ID NO: 1306681 - RNA, 19 nt, Artificial Sequence
  Description of Artificial Sequence: Synthetic oligonucleotide
  Antisense strand to SEQ ID NO: 1306680
auuugucagccagauguga

SEQ ID NO: 1306682 - RNA, 19 nt, Artificial Sequence
  Description of Artificial Sequence: Synthetic oligonucleotide
  Sense strand starting at position 581 of SEQ ID NO: 1241878
gacaaaucccgaggaacuc

SEQ ID NO: 1306683 - RNA, 19 nt, Artificial Sequence
  Description of Artificial Sequence: Synthetic oligonucleotide
  Antisense strand to SEQ ID NO: 1306682
gaguuccucgggauuuguc

SEQ ID NO: 1306684 - RNA, 19 nt, Artificial Sequence
  Description of Artificial Sequence: Synthetic oligonucleotide
  Sense strand starting at position 1061 of SEQ ID NO: 1241878
cagugaagcuggucaaauc

SEQ ID NO: 1306685 - RNA, 19 nt, Artificial Sequence
  Description of Artificial Sequence: Synthetic oligonucleotide
  Antisense strand to SEQ ID NO: 1306684
gauuugaccagcuucacug

SEQ ID NO: 1306686 - RNA, 19 nt, Artificial Sequence
  Description of Artificial Sequence: Synthetic oligonucleotide
  Sense strand starting at position 2143 of SEQ ID NO: 1241878
cggauaacgcccuaaauca

SEQ ID NO: 1306687 - RNA, 19 nt, Artificial Sequence
  Description of Artificial Sequence: Synthetic oligonucleotide
  Antisense strand to SEQ ID NO: 1306686
ugauuuagggcguuauccg

SEQ ID NO: 1306688 - RNA, 19 nt, Artificial Sequence
  Description of Artificial Sequence: Synthetic oligonucleotide
  Sense strand starting at position 2330 of SEQ ID NO: 1241878
cgcucuucucaggagauga

SEQ ID NO: 1306689 - RNA, 19 nt, Artificial Sequence
  Description of Artificial Sequence: Synthetic oligonucleotide
  Antisense strand to SEQ ID NO: 1306688
ucaucuccugagaagagcg

SEQ ID NO: 1306690 - RNA, 19 nt, Artificial Sequence
  Description of Artificial Sequence: Synthetic oligonucleotide
  Sense strand starting at position 2426 of SEQ ID NO: 1241878
gcagaaaccucauucccga

SEQ ID NO: 1306691 - RNA, 19 nt, Artificial Sequence
  Description of Artificial Sequence: Synthetic oligonucleotide
  Antisense strand to SEQ ID NO: 1306690
ucgggaaugagguuucugc

SEQ ID NO: 1306692 - RNA, 19 nt, Artificial Sequence
  Description of Artificial Sequence: Synthetic oligonucleotide
  Sense strand starting at position 2433 of SEQ ID NO: 1241878
ccucauucccgagaaagug

SEQ ID NO: 1306693 - RNA, 19 nt, Artificial Sequence
  Description of Artificial Sequence: Synthetic oligonucleotide
  Antisense strand to SEQ ID NO: 1306692
cacuuucucgggaaugagg

SEQ ID NO: 1306694 - RNA, 19 nt, Artificial Sequence
  Description of Artificial Sequence: Synthetic oligonucleotide
  Sense strand starting at position 2459 of SEQ ID NO: 1241878
agcgucuugggauguggaa

SEQ ID NO: 1306695 - RNA, 19 nt, Artificial Sequence
  Description of Artificial Sequence: Synthetic oligonucleotide
  Antisense strand to SEQ ID NO: 1306694
uuccacaucccaagacgcu

SEQ ID NO: 1306696 - RNA, 19 nt, Artificial Sequence
  Description of Artificial Sequence: Synthetic oligonucleotide
  Sense strand starting at position 2461 of SEQ ID NO: 1241878
cgucuugggauguggaaga

SEQ ID NO: 1306697 - RNA, 19 nt, Artificial Sequence
  Description of Artificial Sequence: Synthetic oligonucleotide
  Antisense strand to SEQ ID NO: 1306696
ucuuccacaucccaagacg

SEQ ID NO: 1306698 - RNA, 19 nt, Artificial Sequence
  Description of Artificial Sequence: Synthetic oligonucleotide
  Sense strand starting at position 2711 of SEQ ID NO: 1241878
aaugaagugcccuggagaa

SEQ ID NO: 1306699 - RNA, 19 nt, Artificial Sequence
  Description of Artificial Sequence: Synthetic oligonucleotide
  Antisense strand to SEQ ID NO: 1306698
uucuccagggcacuucauu

SEQ ID NO: 1306700 - RNA, 19 nt, Artificial Sequence
  Description of Artificial Sequence: Synthetic oligonucleotide
  Sense strand starting at position 3012 of SEQ ID NO: 1241878
uucccucucugagaggaaa

SEQ ID NO: 1306701 - RNA, 19 nt, Artificial Sequence
  Description of Artificial Sequence: Synthetic oligonucleotide
  Antisense strand to SEQ ID NO: 1306700
uuuccucucagagagggaa

SEQ ID NO: 1306702 - RNA, 19 nt, Artificial Sequence
  Description of Artificial Sequence: Synthetic oligonucleotide
  Sense strand starting at position 3071 of SEQ ID NO: 1241878
ccugguuguggcuauggaa

SEQ ID NO: 1306703 - RNA, 19 nt, Artificial Sequence
  Description of Artificial Sequence: Synthetic oligonucleotide
  Antisense strand to SEQ ID NO: 1306702
uuccauagccacaaccagg

SEQ ID NO: 1306704 - RNA, 19 nt, Artificial Sequence
  Description of Artificial Sequence: Synthetic oligonucleotide
  Sense strand starting at position 3141 of SEQ ID NO: 1241878
caagguguacgaggaagaa

SEQ ID NO: 1306705 - RNA, 19 nt, Artificial Sequence
  Description of Artificial Sequence: Synthetic oligonucleotide
  Antisense strand to SEQ ID NO: 1306704
uucuuccucguacaccuug

SEQ ID NO: 1306706 - RNA, 19 nt, Artificial Sequence
  Description of Artificial Sequence: Synthetic oligonucleotide
  Sense strand starting at position 3154 of SEQ ID NO: 1241878
gaagaaugugugggugucu

SEQ ID NO: 1306707 - RNA, 19 nt, Artificial Sequence
  Description of Artificial Sequence: Synthetic oligonucleotide
  Antisense strand to SEQ ID NO: 1306706
agacacccacacauucuuc

SEQ ID NO: 1306708 - RNA, 19 nt, Artificial Sequence
  Description of Artificial Sequence: Synthetic oligonucleotide
  Sense strand starting at position 3343 of SEQ ID NO: 1241878
guggcuaacuucuugaugu

SEQ ID NO: 1306709 - RNA, 19 nt, Artificial Sequence
  Description of Artificial Sequence: Synthetic oligonucleotide
  Antisense strand to SEQ ID NO: 1306708
acaucaagaaguuagccac

SEQ ID NO: 1306710 - RNA, 19 nt, Artificial Sequence
  Description of Artificial Sequence: Synthetic oligonucleotide
  Sense strand starting at position 3345 of SEQ ID NO: 1241878
ggcuaacuucuugauguag

SEQ ID NO: 1306711 - RNA, 19 nt, Artificial Sequence
  Description of Artificial Sequence: Synthetic oligonucleotide
  Antisense strand to SEQ ID NO: 1306710
cuacaucaagaaguuagcc

SEQ ID NO: 1306712 - RNA, 19 nt, Artificial Sequence
  Description of Artificial Sequence: Synthetic oligonucleotide
  Sense strand starting at position 3356 of SEQ ID NO: 1241878
ugauguagcuuugcuagau

SEQ ID NO: 1306713 - RNA, 19 nt, Artificial Sequence
  Description of Artificial Sequence: Synthetic oligonucleotide
  Antisense strand to SEQ ID NO: 1306712
aucuagcaaagcuacauca

SEQ ID NO: 1306714 - RNA, 19 nt, Artificial Sequence
  Description of Artificial Sequence: Synthetic oligonucleotide
  Sense strand starting at position 3357 of SEQ ID NO: 1241878
gauguagcuuugcuagauu

SEQ ID NO: 1306715 - RNA, 19 nt, Artificial Sequence
  Description of Artificial Sequence: Synthetic oligonucleotide
  Antisense strand to SEQ ID NO: 1306714
aaucuagcaaagcuacauc

SEQ ID NO: 1306716 - RNA, 19 nt, Artificial Sequence
  Description of Artificial Sequence: Synthetic oligonucleotide
  Sense strand starting at position 3424 of SEQ ID NO: 1241878
ugaggccuuucuucuaaca

SEQ ID NO: 1306717 - RNA, 19 nt, Artificial Sequence
  Description of Artificial Sequence: Synthetic oligonucleotide
  Antisense strand to SEQ ID NO: 1306716
uguuagaagaaaggccuca

SEQ ID NO: 1306718 - RNA, 19 nt, Artificial Sequence
  Description of Artificial Sequence: Synthetic oligonucleotide
  Sense strand starting at position 3489 of SEQ ID NO: 1241878
cuggaaugucaccacaucu

SEQ ID NO: 1306719 - RNA, 19 nt, Artificial Sequence
  Description of Artificial Sequence: Synthetic oligonucleotide
  Antisense strand to SEQ ID NO: 1306718
agauguggugacauuccag

SEQ ID NO: 1306720 - RNA, 19 nt, Artificial Sequence
  Description of Artificial Sequence: Synthetic oligonucleotide
  Sense strand starting at position 3596 of SEQ ID NO: 1241878
gugccaguagcauugugua

SEQ ID NO: 1306721 - RNA, 19 nt, Artificial Sequence
  Description of Artificial Sequence: Synthetic oligonucleotide
  Antisense strand to SEQ ID NO: 1306720
uacacaaugcuacuggcac

SEQ ID NO: 1306722 - RNA, 19 nt, Artificial Sequence
  Description of Artificial Sequence: Synthetic oligonucleotide
  Sense strand starting at position 3621 of SEQ ID NO: 1241878
uugugaugugugcuugucu

SEQ ID NO: 1306723 - RNA, 19 nt, Artificial Sequence
  Description of Artificial Sequence: Synthetic oligonucleotide
  Antisense strand to SEQ ID NO: 1306722
agacaagcacacaucacaa

SEQ ID NO: 1306724 - RNA, 19 nt, Artificial Sequence
  Description of Artificial Sequence: Synthetic oligonucleotide
  Sense strand starting at position 3637 of SEQ ID NO: 1241878
ucuuaauuccuuugguggu

SEQ ID NO: 1306725 - RNA, 19 nt, Artificial Sequence
  Description of Artificial Sequence: Synthetic oligonucleotide
  Antisense strand to SEQ ID NO: 1306724
accaccaaaggaauuaaga

SEQ ID NO: 1306726 - RNA, 19 nt, Artificial Sequence
  Description of Artificial Sequence: Synthetic oligonucleotide
  Sense strand starting at position 3639 of SEQ ID NO: 1241878
uuaauuccuuuggugguua

SEQ ID NO: 1306727 - RNA, 19 nt, Artificial Sequence
  Description of Artificial Sequence: Synthetic oligonucleotide
  Antisense strand to SEQ ID NO: 1306726
uaaccaccaaaggaauuaa

SEQ ID NO: 1306728 - RNA, 19 nt, Artificial Sequence
  Description of Artificial Sequence: Synthetic oligonucleotide
  Sense strand starting at position 3650 of SEQ ID NO: 1241878
ggugguuacucaucuuagu

SEQ ID NO: 1306729 - RNA, 19 nt, Artificial Sequence
  Description of Artificial Sequence: Synthetic oligonucleotide
  Antisense strand to SEQ ID NO: 1306728
acuaagaugaguaaccacc

SEQ ID NO: 1306730 - RNA, 19 nt, Artificial Sequence
  Description of Artificial Sequence: Synthetic oligonucleotide
  Sense strand starting at position 3670 of SEQ ID NO: 1241878
gcuucugugcuaugagaua

SEQ ID NO: 1306731 - RNA, 19 nt, Artificial Sequence
  Description of Artificial Sequence: Synthetic oligonucleotide
  Antisense strand to SEQ ID NO: 1306730
uaucucauagcacagaagc

SEQ ID NO: 1306732 - RNA, 19 nt, Artificial Sequence
  Description of Artificial Sequence: Synthetic oligonucleotide
  Sense strand starting at position 3675 of SEQ ID NO: 1241878
ugugcuaugagauacggua

SEQ ID NO: 1306733 - RNA, 19 nt, Artificial Sequence
  Description of Artificial Sequence: Synthetic oligonucleotide
  Antisense strand to SEQ ID NO: 1306732
uaccguaucucauagcaca

SEQ ID NO: 1306734 - RNA, 19 nt, Artificial Sequence
  Description of Artificial Sequence: Synthetic oligonucleotide
  Sense strand starting at position 3717 of SEQ ID NO: 1241878
gucauagugacccagggau

SEQ ID NO: 1306735 - RNA, 19 nt, Artificial Sequence
  Description of Artificial Sequence: Synthetic oligonucleotide
  Antisense strand to SEQ ID NO: 1306734
aucccugggucacuaugac

SEQ ID NO: 1306736 - RNA, 19 nt, Artificial Sequence
  Description of Artificial Sequence: Synthetic oligonucleotide
  Sense strand starting at position 3730 of SEQ ID NO: 1241878
agggauagcucauuccuag

SEQ ID NO: 1306737 - RNA, 19 nt, Artificial Sequence
  Description of Artificial Sequence: Synthetic oligonucleotide
  Antisense strand to SEQ ID NO: 1306736
cuaggaaugagcuaucccu

SEQ ID NO: 1306738 - RNA, 19 nt, Artificial Sequence
  Description of Artificial Sequence: Synthetic oligonucleotide
  Sense strand starting at position 3831 of SEQ ID NO: 1241878
gccagauugguaggacuaa

SEQ ID NO: 1306739 - RNA, 19 nt, Artificial Sequence
  Description of Artificial Sequence: Synthetic oligonucleotide
  Antisense strand to SEQ ID NO: 1306738
uuaguccuaccaaucuggc

SEQ ID NO: 1306740 - RNA, 19 nt, Artificial Sequence
  Description of Artificial Sequence: Synthetic oligonucleotide
  Sense strand starting at position 3832 of SEQ ID NO: 1241878
ccagauugguaggacuaaa

SEQ ID NO: 1306741 - RNA, 19 nt, Artificial Sequence
  Description of Artificial Sequence: Synthetic oligonucleotide
  Antisense strand to SEQ ID NO: 1306740
uuuaguccuaccaaucugg

SEQ ID NO: 1306742 - RNA, 19 nt, Artificial Sequence
  Description of Artificial Sequence: Synthetic oligonucleotide
  Sense strand starting at position 220 of SEQ ID NO: 1241879
cccgguaacuuacuagauc

SEQ ID NO: 1306743 - RNA, 19 nt, Artificial Sequence
  Description of Artificial Sequence: Synthetic oligonucleotide
  Antisense strand to SEQ ID NO: 1306742
gaucuaguaaguuaccggg

SEQ ID NO: 1306744 - RNA, 19 nt, Artificial Sequence
  Description of Artificial Sequence: Synthetic oligonucleotide
  Sense strand starting at position 287 of SEQ ID NO: 1241879
ccagcauuacuccagauag

SEQ ID NO: 1306745 - RNA, 19 nt, Artificial Sequence
  Description of Artificial Sequence: Synthetic oligonucleotide
  Antisense strand to SEQ ID NO: 1306744
cuaucuggaguaaugcugg

SEQ ID NO: 1306746 - RNA, 19 nt, Artificial Sequence
  Description of Artificial Sequence: Synthetic oligonucleotide
  Sense strand starting at position 381 of SEQ ID NO: 1241879
gcaacuuugggaugcauga

SEQ ID NO: 1306747 - RNA, 19 nt, Artificial Sequence
  Description of Artificial Sequence: Synthetic oligonucleotide
  Antisense strand to SEQ ID NO: 1306746
ucaugcaucccaaaguugc

SEQ ID NO: 1306748 - RNA, 19 nt, Artificial Sequence
  Description of Artificial Sequence: Synthetic oligonucleotide
  Sense strand starting at position 460 of SEQ ID NO: 1241879
auaucuaguccggaacugu

SEQ ID NO: 1306749 - RNA, 19 nt, Artificial Sequence
  Description of Artificial Sequence: Synthetic oligonucleotide
  Antisense strand to SEQ ID NO: 1306748
acaguuccggacuagauau

SEQ ID NO: 1306750 - RNA, 19 nt, Artificial Sequence
  Description of Artificial Sequence: Synthetic oligonucleotide
  Sense strand starting at position 469 of SEQ ID NO: 1241879
ccggaacuguuucuaauac

SEQ ID NO: 1306751 - RNA, 19 nt, Artificial Sequence
  Description of Artificial Sequence: Synthetic oligonucleotide
  Antisense strand to SEQ ID NO: 1306750
guauuagaaacaguuccgg

SEQ ID NO: 1306752 - RNA, 19 nt, Artificial Sequence
  Description of Artificial Sequence: Synthetic oligonucleotide
  Sense strand starting at position 521 of SEQ ID NO: 1241879
acagaagaagccuguaaug

SEQ ID NO: 1306753 - RNA, 19 nt, Artificial Sequence
  Description of Artificial Sequence: Synthetic oligonucleotide
  Antisense strand to SEQ ID NO: 1306752
cauuacaggcuucuucugu

SEQ ID NO: 1306754 - RNA, 19 nt, Artificial Sequence
  Description of Artificial Sequence: Synthetic oligonucleotide
  Sense strand starting at position 530 of SEQ ID NO: 1241879
gccuguaaugccugauuug

SEQ ID NO: 1306755 - RNA, 19 nt, Artificial Sequence
  Description of Artificial Sequence: Synthetic oligonucleotide
  Antisense strand to SEQ ID NO: 1306754
caaaucaggcauuacaggc

SEQ ID NO: 1306756 - RNA, 19 nt, Artificial Sequence
  Description of Artificial Sequence: Synthetic oligonucleotide
  Sense strand starting at position 633 of SEQ ID NO: 1241879
agaaguggaucugucauac

SEQ ID NO: 1306757 - RNA, 19 nt, Artificial Sequence
  Description of Artificial Sequence: Synthetic oligonucleotide
  Antisense strand to SEQ ID NO: 1306756
guaugacagauccacuucu

SEQ ID NO: 1306758 - RNA, 19 nt, Artificial Sequence
  Description of Artificial Sequence: Synthetic oligonucleotide
  Sense strand starting at position 670 of SEQ ID NO: 1241879
aguauuaggcugcacuaga

SEQ ID NO: 1306759 - RNA, 19 nt, Artificial Sequence
  Description of Artificial Sequence: Synthetic oligonucleotide
  Antisense strand to SEQ ID NO: 1306758
ucuagugcagccuaauacu

SEQ ID NO: 1306760 - RNA, 19 nt, Artificial Sequence
  Description of Artificial Sequence: Synthetic oligonucleotide
  Sense strand starting at position 675 of SEQ ID NO: 1241879
uaggcugcacuagagaaua

SEQ ID NO: 1306761 - RNA, 19 nt, Artificial Sequence
  Description of Artificial Sequence: Synthetic oligonucleotide
  Antisense strand to SEQ ID NO: 1306760
uauucucuagugcagccua

SEQ ID NO: 1306762 - RNA, 19 nt, Artificial Sequence
  Description of Artificial Sequence: Synthetic oligonucleotide
  Sense strand starting at position 692 of SEQ ID NO: 1241879
uaugaagacuaggaauaga

SEQ ID NO: 1306763 - RNA, 19 nt, Artificial Sequence
  Description of Artificial Sequence: Synthetic oligonucleotide
  Antisense strand to SEQ ID NO: 1306762
ucuauuccuagucuucaua

SEQ ID NO: 1306764 - RNA, 19 nt, Artificial Sequence
  Description of Artificial Sequence: Synthetic oligonucleotide
  Sense strand starting at position 779 of SEQ ID NO: 1241879
ggguaacuuaauuggguaa

SEQ ID NO: 1306765 - RNA, 19 nt, Artificial Sequence
  Description of Artificial Sequence: Synthetic oligonucleotide
  Antisense strand to SEQ ID NO: 1306764
uuacccaauuaaguuaccc

SEQ ID NO: 1306766 - RNA, 19 nt, Artificial Sequence
  Description of Artificial Sequence: Synthetic oligonucleotide
  Sense strand starting at position 782 of SEQ ID NO: 1241879
uaacuuaauuggguaaggu

SEQ ID NO: 1306767 - RNA, 19 nt, Artificial Sequence
  Description of Artificial Sequence: Synthetic oligonucleotide
  Antisense strand to SEQ ID NO: 1306766
accuuacccaauuaaguua

SEQ ID NO: 1306768 - RNA, 19 nt, Artificial Sequence
  Description of Artificial Sequence: Synthetic oligonucleotide
  Sense strand starting at position 911 of SEQ ID NO: 1241879
ucagguauuaggugaaaua

SEQ ID NO: 1306769 - RNA, 19 nt, Artificial Sequence
  Description of Artificial Sequence: Synthetic oligonucleotide
  Antisense strand to SEQ ID NO: 1306768
uauuucaccuaauaccuga

SEQ ID NO: 1306770 - RNA, 19 nt, Artificial Sequence
  Description of Artificial Sequence: Synthetic oligonucleotide
  Sense strand starting at position 1018 of SEQ ID NO: 1241879
cguaacuaucuugaugcaa

SEQ ID NO: 1306771 - RNA, 19 nt, Artificial Sequence
  Description of Artificial Sequence: Synthetic oligonucleotide
  Antisense strand to SEQ ID NO: 1306770
uugcaucaagauaguuacg

SEQ ID NO: 1306772 - RNA, 19 nt, Artificial Sequence
  Description of Artificial Sequence: Synthetic oligonucleotide
  Sense strand starting at position 1054 of SEQ ID NO: 1241879
cgucaaagagcucacaaga

SEQ ID NO: 1306773 - RNA, 19 nt, Artificial Sequence
  Description of Artificial Sequence: Synthetic oligonucleotide
  Antisense strand to SEQ ID NO: 1306772
ucuugugagcucuuugacg

SEQ ID NO: 1306774 - RNA, 19 nt, Artificial Sequence
  Description of Artificial Sequence: Synthetic oligonucleotide
  Sense strand starting at position 1147 of SEQ ID NO: 1241879
aaggguugugucuagauuc

SEQ ID NO: 1306775 - RNA, 19 nt, Artificial Sequence
  Description of Artificial Sequence: Synthetic oligonucleotide
  Antisense strand to SEQ ID NO: 1306774
gaaucuagacacaacccuu

SEQ ID NO: 1306776 - RNA, 19 nt, Artificial Sequence
  Description of Artificial Sequence: Synthetic oligonucleotide
  Sense strand starting at position 1197 of SEQ ID NO: 1241879
cuguauuugguuuagcgua

SEQ ID NO: 1306777 - RNA, 19 nt, Artificial Sequence
  Description of Artificial Sequence: Synthetic oligonucleotide
  Antisense strand to SEQ ID NO: 1306776
uacgcuaaaccaaauacag

SEQ ID NO: 1306778 - RNA, 19 nt, Artificial Sequence
  Description of Artificial Sequence: Synthetic oligonucleotide
  Sense strand starting at position 1249 of SEQ ID NO: 1241879
ugcugcuuccgugucuauu

SEQ ID NO: 1306779 - RNA, 19 nt, Artificial Sequence
  Description of Artificial Sequence: Synthetic oligonucleotide
  Antisense strand to SEQ ID NO: 1306778
aauagacacggaagcagca

SEQ ID NO: 1306780 - RNA, 19 nt, Artificial Sequence
  Description of Artificial Sequence: Synthetic oligonucleotide
  Sense strand starting at position 1321 of SEQ ID NO: 1241879
acggacgcuggucauaaau

SEQ ID NO: 1306781 - RNA, 19 nt, Artificial Sequence
  Description of Artificial Sequence: Synthetic oligonucleotide
  Antisense strand to SEQ ID NO: 1306780
auuuaugaccagcguccgu

SEQ ID NO: 1306782 - RNA, 19 nt, Artificial Sequence
  Description of Artificial Sequence: Synthetic oligonucleotide
  Sense strand starting at position 2196 of SEQ ID NO: 1241879
cuuuauugaucauuacagu

SEQ ID NO: 1306783 - RNA, 19 nt, Artificial Sequence
  Description of Artificial Sequence: Synthetic oligonucleotide
  Antisense strand to SEQ ID NO: 1306782
acuguaaugaucaauaaag

SEQ ID NO: 1306784 - RNA, 19 nt, Artificial Sequence
  Description of Artificial Sequence: Synthetic oligonucleotide
  Sense strand starting at position 2204 of SEQ ID NO: 1241879
aucauuacaguaggugaaa

SEQ ID NO: 1306785 - RNA, 19 nt, Artificial Sequence
  Description of Artificial Sequence: Synthetic oligonucleotide
  Antisense strand to SEQ ID NO: 1306784
uuucaccuacuguaaugau

SEQ ID NO: 1306786 - RNA, 19 nt, Artificial Sequence
  Description of Artificial Sequence: Synthetic oligonucleotide
  Sense strand starting at position 2205 of SEQ ID NO: 1241879
ucauuacaguaggugaaau

SEQ ID NO: 1306787 - RNA, 19 nt, Artificial Sequence
  Description of Artificial Sequence: Synthetic oligonucleotide
  Antisense strand to SEQ ID NO: 1306786
auuucaccuacuguaauga

SEQ ID NO: 1306788 - RNA, 19 nt, Artificial Sequence
  Description of Artificial Sequence: Synthetic oligonucleotide
  Sense strand starting at position 2246 of SEQ ID NO: 1241879
guaauacaauaggugcaau

SEQ ID NO: 1306789 - RNA, 19 nt, Artificial Sequence
  Description of Artificial Sequence: Synthetic oligonucleotide
  Antisense strand to SEQ ID NO: 1306788
auugcaccuauuguauuac

SEQ ID NO: 1306790 - RNA, 19 nt, Artificial Sequence
  Description of Artificial Sequence: Synthetic oligonucleotide
  Sense strand starting at position 2249 of SEQ ID NO: 1241879
auacaauaggugcaauuau

SEQ ID NO: 1306791 - RNA, 19 nt, Artificial Sequence
  Description of Artificial Sequence: Synthetic oligonucleotide
  Antisense strand to SEQ ID NO: 1306790
auaauugcaccuauuguau

SEQ ID NO: 1306792 - RNA, 19 nt, Artificial Sequence
  Description of Artificial Sequence: Synthetic oligonucleotide
  Sense strand starting at position 2309 of SEQ ID NO: 1241879
uuacaauaggugcaauuau

SEQ ID NO: 1306793 - RNA, 19 nt, Artificial Sequence
  Description of Artificial Sequence: Synthetic oligonucleotide
  Antisense strand to SEQ ID NO: 1306792
auaauugcaccuauuguaa

SEQ ID NO: 1306794 - RNA, 19 nt, Artificial Sequence
  Description of Artificial Sequence: Synthetic oligonucleotide
  Sense strand starting at position 2323 of SEQ ID NO: 1241879
auuaucagcgaucaauaau

SEQ ID NO: 1306795 - RNA, 19 nt, Artificial Sequence
  Description of Artificial Sequence: Synthetic oligonucleotide
  Antisense strand to SEQ ID NO: 1306794
auuauugaucgcugauaau

SEQ ID NO: 1306796 - RNA, 19 nt, Artificial Sequence
  Description of Artificial Sequence: Synthetic oligonucleotide
  Sense strand starting at position 2755 of SEQ ID NO: 1241879
gaccuuagaguuugguaau

SEQ ID NO: 1306797 - RNA, 19 nt, Artificial Sequence
  Description of Artificial Sequence: Synthetic oligonucleotide
  Antisense strand to SEQ ID NO: 1306796
auuaccaaacucuaagguc

SEQ ID NO: 1306798 - RNA, 19 nt, Artificial Sequence
  Description of Artificial Sequence: Synthetic oligonucleotide
  Sense strand starting at position 2765 of SEQ ID NO: 1241879
uuugguaauauuugagugu

SEQ ID NO: 1306799 - RNA, 19 nt, Artificial Sequence
  Description of Artificial Sequence: Synthetic oligonucleotide
  Antisense strand to SEQ ID NO: 1306798
acacucaaauauuaccaaa

SEQ ID NO: 1306800 - RNA, 19 nt, Artificial Sequence
  Description of Artificial Sequence: Synthetic oligonucleotide
  Sense strand starting at position 2992 of SEQ ID NO: 1241879
ugcaaacaguucucagaag

SEQ ID NO: 1306801 - RNA, 19 nt, Artificial Sequence
  Description of Artificial Sequence: Synthetic oligonucleotide
  Antisense strand to SEQ ID NO: 1306800
cuucugagaacuguuugca

SEQ ID NO: 1306802 - RNA, 19 nt, Artificial Sequence
  Description of Artificial Sequence: Synthetic oligonucleotide
  Sense strand starting at position 3019 of SEQ ID NO: 1241879
ucuauagaccaugguuaga

SEQ ID NO: 1306803 - RNA, 19 nt, Artificial Sequence
  Description of Artificial Sequence: Synthetic oligonucleotide
  Antisense strand to SEQ ID NO: 1306802
ucuaaccauggucuauaga

SEQ ID NO: 1306804 - RNA, 19 nt, Artificial Sequence
  Description of Artificial Sequence: Synthetic oligonucleotide
  Sense strand starting at position 3030 of SEQ ID NO: 1241879
ugguuagaguacucaaggu

SEQ ID NO: 1306805 - RNA, 19 nt, Artificial Sequence
  Description of Artificial Sequence: Synthetic oligonucleotide
  Antisense strand to SEQ ID NO: 1306804
accuugaguacucuaacca

SEQ ID NO: 1306806 - RNA, 19 nt, Artificial Sequence
  Description of Artificial Sequence: Synthetic oligonucleotide
  Sense strand starting at position 3034 of SEQ ID NO: 1241879
uagaguacucaagguaaac

SEQ ID NO: 1306807 - RNA, 19 nt, Artificial Sequence
  Description of Artificial Sequence: Synthetic oligonucleotide
  Antisense strand to SEQ ID NO: 1306806
guuuaccuugaguacucua

SEQ ID NO: 1306808 - RNA, 19 nt, Artificial Sequence
  Description of Artificial Sequence: Synthetic oligonucleotide
  Sense strand starting at position 3067 of SEQ ID NO: 1241879
cauacucagcuguagaguu

SEQ ID NO: 1306809 - RNA, 19 nt, Artificial Sequence
  Description of Artificial Sequence: Synthetic oligonucleotide
  Antisense strand to SEQ ID NO: 1306808
aacucuacagcugaguaug

SEQ ID NO: 1306810 - RNA, 19 nt, Artificial Sequence
  Description of Artificial Sequence: Synthetic oligonucleotide
  Sense strand starting at position 3096 of SEQ ID NO: 1241879
gagauuuguuuggagaaca

SEQ ID NO: 1306811 - RNA, 19 nt, Artificial Sequence
  Description of Artificial Sequence: Synthetic oligonucleotide
  Antisense strand to SEQ ID NO: 1306810
uguucuccaaacaaaucuc

SEQ ID NO: 1306812 - RNA, 19 nt, Artificial Sequence
  Description of Artificial Sequence: Synthetic oligonucleotide
  Sense strand starting at position 3182 of SEQ ID NO: 1241879
gguagaucgccagaccuca

SEQ ID NO: 1306813 - RNA, 19 nt, Artificial Sequence
  Description of Artificial Sequence: Synthetic oligonucleotide
  Antisense strand to SEQ ID NO: 1306812
ugaggucuggcgaucuacc

SEQ ID NO: 1306814 - RNA, 19 nt, Artificial Sequence
  Description of Artificial Sequence: Synthetic oligonucleotide
  Sense strand starting at position 3610 of SEQ ID NO: 1241879
cagcauucugccuggauuu

SEQ ID NO: 1306815 - RNA, 19 nt, Artificial Sequence
  Description of Artificial Sequence: Synthetic oligonucleotide
  Antisense strand to SEQ ID NO: 1306814
aaauccaggcagaaugcug

SEQ ID NO: 1306816 - RNA, 19 nt, Artificial Sequence
  Description of Artificial Sequence: Synthetic oligonucleotide
  Sense strand starting at position 3750 of SEQ ID NO: 1241879
uaggaccuugguugucaua

SEQ ID NO: 1306817 - RNA, 19 nt, Artificial Sequence
  Description of Artificial Sequence: Synthetic oligonucleotide
  Antisense strand to SEQ ID NO: 1306816
uaugacaaccaagguccua

SEQ ID NO: 1306818 - RNA, 19 nt, Artificial Sequence
  Description of Artificial Sequence: Synthetic oligonucleotide
  Sense strand starting at position 3763 of SEQ ID NO: 1241879
gucauauuguaaucacauu

SEQ ID NO: 1306819 - RNA, 19 nt, Artificial Sequence
  Description of Artificial Sequence: Synthetic oligonucleotide
  Antisense strand to SEQ ID NO: 1306818
aaugugauuacaauaugac

SEQ ID NO: 1306820 - RNA, 19 nt, Artificial Sequence
  Description of Artificial Sequence: Synthetic oligonucleotide
  Sense strand starting at position 3853 of SEQ ID NO: 1241879
ucaacagagcuuuagcuaa

SEQ ID NO: 1306821 - RNA, 19 nt, Artificial Sequence
  Description of Artificial Sequence: Synthetic oligonucleotide
  Antisense strand to SEQ ID NO: 1306820
uuagcuaaagcucuguuga

SEQ ID NO: 1306822 - RNA, 19 nt, Artificial Sequence
  Description of Artificial Sequence: Synthetic oligonucleotide
  Sense strand starting at position 80 of SEQ ID NO: 1241880
uccauucgucaauggaauc

SEQ ID NO: 1306823 - RNA, 19 nt, Artificial Sequence
  Description of Artificial Sequence: Synthetic oligonucleotide
  Antisense strand to SEQ ID NO: 1306822
gauuccauugacgaaugga

SEQ ID NO: 1306824 - RNA, 19 nt, Artificial Sequence
  Description of Artificial Sequence: Synthetic oligonucleotide
  Sense strand starting at position 109 of SEQ ID NO: 1241880
uuucuaguugugugaacuu

SEQ ID NO: 1306825 - RNA, 19 nt, Artificial Sequence
  Description of Artificial Sequence: Synthetic oligonucleotide
  Antisense strand to SEQ ID NO: 1306824
aaguucacacaacuagaaa

SEQ ID NO: 1306826 - RNA, 19 nt, Artificial Sequence
  Description of Artificial Sequence: Synthetic oligonucleotide
  Sense strand starting at position 116 of SEQ ID NO: 1241880
uugugugaacuuuacauuc

SEQ ID NO: 1306827 - RNA, 19 nt, Artificial Sequence
  Description of Artificial Sequence: Synthetic oligonucleotide
  Antisense strand to SEQ ID NO: 1306826
gaauguaaaguucacacaa

SEQ ID NO: 1306828 - RNA, 19 nt, Artificial Sequence
  Description of Artificial Sequence: Synthetic oligonucleotide
  Sense strand starting at position 162 of SEQ ID NO: 1241880
cugugaaccuuuguaucua

SEQ ID NO: 1306829 - RNA, 19 nt, Artificial Sequence
  Description of Artificial Sequence: Synthetic oligonucleotide
  Antisense strand to SEQ ID NO: 1306828
uagauacaaagguucacag

SEQ ID NO: 1306830 - RNA, 19 nt, Artificial Sequence
  Description of Artificial Sequence: Synthetic oligonucleotide
  Sense strand starting at position 301 of SEQ ID NO: 1241880
uggucuucagugugaguua

SEQ ID NO: 1306831 - RNA, 19 nt, Artificial Sequence
  Description of Artificial Sequence: Synthetic oligonucleotide
  Antisense strand to SEQ ID NO: 1306830
uaacucacacugaagacca

SEQ ID NO: 1306832 - RNA, 19 nt, Artificial Sequence
  Description of Artificial Sequence: Synthetic oligonucleotide
  Sense strand starting at position 323 of SEQ ID NO: 1241880
guuuguuaccuugggcaag

SEQ ID NO: 1306833 - RNA, 19 nt, Artificial Sequence
  Description of Artificial Sequence: Synthetic oligonucleotide
  Antisense strand to SEQ ID NO: 1306832
cuugcccaagguaacaaac

SEQ ID NO: 1306834 - RNA, 19 nt, Artificial Sequence
  Description of Artificial Sequence: Synthetic oligonucleotide
  Sense strand starting at position 325 of SEQ ID NO: 1241880
uuguuaccuugggcaagau

SEQ ID NO: 1306835 - RNA, 19 nt, Artificial Sequence
  Description of Artificial Sequence: Synthetic oligonucleotide
  Antisense strand to SEQ ID NO: 1306834
aucuugcccaagguaacaa

SEQ ID NO: 1306836 - RNA, 19 nt, Artificial Sequence
  Description of Artificial Sequence: Synthetic oligonucleotide
  Sense strand starting at position 335 of SEQ ID NO: 1241880
gggcaagauacuugacucu

SEQ ID NO: 1306837 - RNA, 19 nt, Artificial Sequence
  Description of Artificial Sequence: Synthetic oligonucleotide
  Antisense strand to SEQ ID NO: 1306836
agagucaaguaucuugccc

SEQ ID NO: 1306838 - RNA, 19 nt, Artificial Sequence
  Description of Artificial Sequence: Synthetic oligonucleotide
  Sense strand starting at position 409 of SEQ ID NO: 1241880
acaggauggcugugauuaa

SEQ ID NO: 1306839 - RNA, 19 nt, Artificial Sequence
  Description of Artificial Sequence: Synthetic oligonucleotide
  Antisense strand to SEQ ID NO: 1306838
uuaaucacagccauccugu

SEQ ID NO: 1306840 - RNA, 19 nt, Artificial Sequence
  Description of Artificial Sequence: Synthetic oligonucleotide
  Sense strand starting at position 535 of SEQ ID NO: 1241880
augugaccuuguguguaga

SEQ ID NO: 1306841 - RNA, 19 nt, Artificial Sequence
  Description of Artificial Sequence: Synthetic oligonucleotide
  Antisense strand to SEQ ID NO: 1306840
ucuacacacaaggucacau

SEQ ID NO: 1306842 - RNA, 19 nt, Artificial Sequence
  Description of Artificial Sequence: Synthetic oligonucleotide
  Sense strand starting at position 536 of SEQ ID NO: 1241880
ugugaccuuguguguagaa

SEQ ID NO: 1306843 - RNA, 19 nt, Artificial Sequence
  Description of Artificial Sequence: Synthetic oligonucleotide
  Antisense strand to SEQ ID NO: 1306842
uucuacacacaaggucaca

SEQ ID NO: 1306844 - RNA, 19 nt, Artificial Sequence
  Description of Artificial Sequence: Synthetic oligonucleotide
  Sense strand starting at position 537 of SEQ ID NO: 1241880
gugaccuuguguguagaaa

SEQ ID NO: 1306845 - RNA, 19 nt, Artificial Sequence
  Description of Artificial Sequence: Synthetic oligonucleotide
  Antisense strand to SEQ ID NO: 1306844
uuucuacacacaaggucac

SEQ ID NO: 1306846 - RNA, 19 nt, Artificial Sequence
  Description of Artificial Sequence: Synthetic oligonucleotide
  Sense strand starting at position 538 of SEQ ID NO: 1241880
ugaccuuguguguagaaac

SEQ ID NO: 1306847 - RNA, 19 nt, Artificial Sequence
  Description of Artificial Sequence: Synthetic oligonucleotide
  Antisense strand to SEQ ID NO: 1306846
guuucuacacacaagguca

SEQ ID NO: 1306848 - RNA, 19 nt, Artificial Sequence
  Description of Artificial Sequence: Synthetic oligonucleotide
  Sense strand starting at position 984 of SEQ ID NO: 1241880
acaucaguccugcaagauu

SEQ ID NO: 1306849 - RNA, 19 nt, Artificial Sequence
  Description of Artificial Sequence: Synthetic oligonucleotide
  Antisense strand to SEQ ID NO: 1306848
aaucuugcaggacugaugu

SEQ ID NO: 1306850 - RNA, 19 nt, Artificial Sequence
  Description of Artificial Sequence: Synthetic oligonucleotide
  Sense strand starting at position 1101 of SEQ ID NO: 1241880
ucugaagucugagcgacaa

SEQ ID NO: 1306851 - RNA, 19 nt, Artificial Sequence
  Description of Artificial Sequence: Synthetic oligonucleotide
  Antisense strand to SEQ ID NO: 1306850
uugucgcucagacuucaga

SEQ ID NO: 1306852 - RNA, 19 nt, Artificial Sequence
  Description of Artificial Sequence: Synthetic oligonucleotide
  Sense strand starting at position 1103 of SEQ ID NO: 1241880
ugaagucugagcgacaauc

SEQ ID NO: 1306853 - RNA, 19 nt, Artificial Sequence
  Description of Artificial Sequence: Synthetic oligonucleotide
  Antisense strand to SEQ ID NO: 1306852
gauugucgcucagacuuca

SEQ ID NO: 1306854 - RNA, 19 nt, Artificial Sequence
  Description of Artificial Sequence: Synthetic oligonucleotide
  Sense strand starting at position 1121 of SEQ ID NO: 1241880
ccauaauuggaaugcgaaa

SEQ ID NO: 1306855 - RNA, 19 nt, Artificial Sequence
  Description of Artificial Sequence: Synthetic oligonucleotide
  Antisense strand to SEQ ID NO: 1306854
uuucgcauuccaauuaugg

SEQ ID NO: 1306856 - RNA, 19 nt, Artificial Sequence
  Description of Artificial Sequence: Synthetic oligonucleotide
  Sense strand starting at position 1646 of SEQ ID NO: 1241880
gucgccugccaguuguaga

SEQ ID NO: 1306857 - RNA, 19 nt, Artificial Sequence
  Description of Artificial Sequence: Synthetic oligonucleotide
  Antisense strand to SEQ ID NO: 1306856
ucuacaacuggcaggcgac

SEQ ID NO: 1306858 - RNA, 19 nt, Artificial Sequence
  Description of Artificial Sequence: Synthetic oligonucleotide
  Sense strand starting at position 2126 of SEQ ID NO: 1241880
uggguauucugacucagua

SEQ ID NO: 1306859 - RNA, 19 nt, Artificial Sequence
  Description of Artificial Sequence: Synthetic oligonucleotide
  Antisense strand to SEQ ID NO: 1306858
uacugagucagaauaccca

SEQ ID NO: 1306860 - RNA, 19 nt, Artificial Sequence
  Description of Artificial Sequence: Synthetic oligonucleotide
  Sense strand starting at position 2529 of SEQ ID NO: 1241880
guccucugggccuaagaga

SEQ ID NO: 1306861 - RNA, 19 nt, Artificial Sequence
  Description of Artificial Sequence: Synthetic oligonucleotide
  Antisense strand to SEQ ID NO: 1306860
ucucuuaggcccagaggac

SEQ ID NO: 1306862 - RNA, 19 nt, Artificial Sequence
  Description of Artificial Sequence: Synthetic oligonucleotide
  Sense strand starting at position 2639 of SEQ ID NO: 1241880
acugccuaagcuugaaauu

SEQ ID NO: 1306863 - RNA, 19 nt, Artificial Sequence
  Description of Artificial Sequence: Synthetic oligonucleotide
  Antisense strand to SEQ ID NO: 1306862
aauuucaagcuuaggcagu

SEQ ID NO: 1306864 - RNA, 19 nt, Artificial Sequence
  Description of Artificial Sequence: Synthetic oligonucleotide
  Sense strand starting at position 2697 of SEQ ID NO: 1241880
gcuguauuaucccuuccca

SEQ ID NO: 1306865 - RNA, 19 nt, Artificial Sequence
  Description of Artificial Sequence: Synthetic oligonucleotide
  Antisense strand to SEQ ID NO: 1306864
ugggaagggauaauacagc

SEQ ID NO: 1306866 - RNA, 19 nt, Artificial Sequence
  Description of Artificial Sequence: Synthetic oligonucleotide
  Sense strand starting at position 2779 of SEQ ID NO: 1241880
ugaggcaggcccugaguua

SEQ ID NO: 1306867 - RNA, 19 nt, Artificial Sequence
  Description of Artificial Sequence: Synthetic oligonucleotide
  Antisense strand to SEQ ID NO: 1306866
uaacucagggccugccuca

SEQ ID NO: 1306868 - RNA, 19 nt, Artificial Sequence
  Description of Artificial Sequence: Synthetic oligonucleotide
  Sense strand starting at position 2780 of SEQ ID NO: 1241880
gaggcaggcccugaguuaa

SEQ ID NO: 1306869 - RNA, 19 nt, Artificial Sequence
  Description of Artificial Sequence: Synthetic oligonucleotide
  Antisense strand to SEQ ID NO: 1306868
uuaacucagggccugccuc

SEQ ID NO: 1306870 - RNA, 19 nt, Artificial Sequence
  Description of Artificial Sequence: Synthetic oligonucleotide
  Sense strand starting at position 2791 of SEQ ID NO: 1241880
ugaguuaagucagcuguca

SEQ ID NO: 1306871 - RNA, 19 nt, Artificial Sequence
  Description of Artificial Sequence: Synthetic oligonucleotide
  Antisense strand to SEQ ID NO: 1306870
ugacagcugacuuaacuca

SEQ ID NO: 1306872 - RNA, 19 nt, Artificial Sequence
  Description of Artificial Sequence: Synthetic oligonucleotide
  Sense strand starting at position 2844 of SEQ ID NO: 1241880
ugaccaggcacguauaguu

SEQ ID NO: 1306873 - RNA, 19 nt, Artificial Sequence
  Description of Artificial Sequence: Synthetic oligonucleotide
  Antisense strand to SEQ ID NO: 1306872
aacuauacgugccugguca

SEQ ID NO: 1306874 - RNA, 19 nt, Artificial Sequence
  Description of Artificial Sequence: Synthetic oligonucleotide
  Sense strand starting at position 2849 of SEQ ID NO: 1241880
aggcacguauaguuggaaa

SEQ ID NO: 1306875 - RNA, 19 nt, Artificial Sequence
  Description of Artificial Sequence: Synthetic oligonucleotide
  Antisense strand to SEQ ID NO: 1306874
uuuccaacuauacgugccu

SEQ ID NO: 1306876 - RNA, 19 nt, Artificial Sequence
  Description of Artificial Sequence: Synthetic oligonucleotide
  Sense strand starting at position 2851 of SEQ ID NO: 1241880
gcacguauaguuggaaaca

SEQ ID NO: 1306877 - RNA, 19 nt, Artificial Sequence
  Description of Artificial Sequence: Synthetic oligonucleotide
  Antisense strand to SEQ ID NO: 1306876
uguuuccaacuauacgugc

SEQ ID NO: 1306878 - RNA, 19 nt, Artificial Sequence
  Description of Artificial Sequence: Synthetic oligonucleotide
  Sense strand starting at position 2867 of SEQ ID NO: 1241880
acaccuguucuuugcagga

SEQ ID NO: 1306879 - RNA, 19 nt, Artificial Sequence
  Description of Artificial Sequence: Synthetic oligonucleotide
  Antisense strand to SEQ ID NO: 1306878
uccugcaaagaacaggugu

SEQ ID NO: 1306880 - RNA, 19 nt, Artificial Sequence
  Description of Artificial Sequence: Synthetic oligonucleotide
  Sense strand starting at position 2883 of SEQ ID NO: 1241880
ggaagagccuuacagauua

SEQ ID NO: 1306881 - RNA, 19 nt, Artificial Sequence
  Description of Artificial Sequence: Synthetic oligonucleotide
  Antisense strand to SEQ ID NO: 1306880
uaaucuguaaggcucuucc

SEQ ID NO: 1306882 - RNA, 19 nt, Artificial Sequence
  Description of Artificial Sequence: Synthetic oligonucleotide
  Sense strand starting at position 2900 of SEQ ID NO: 1241880
uacaaaugccgucaaguaa

SEQ ID NO: 1306883 - RNA, 19 nt, Artificial Sequence
  Description of Artificial Sequence: Synthetic oligonucleotide
  Antisense strand to SEQ ID NO: 1306882
uuacuugacggcauuugua

SEQ ID NO: 1306884 - RNA, 19 nt, Artificial Sequence
  Description of Artificial Sequence: Synthetic oligonucleotide
  Sense strand starting at position 3002 of SEQ ID NO: 1241880
uuagaaugguaacuucuuu

SEQ ID NO: 1306885 - RNA, 19 nt, Artificial Sequence
  Description of Artificial Sequence: Synthetic oligonucleotide
  Antisense strand to SEQ ID NO: 1306884
aaagaaguuaccauucuaa

SEQ ID NO: 1306886 - RNA, 19 nt, Artificial Sequence
  Description of Artificial Sequence: Synthetic oligonucleotide
  Sense strand starting at position 3006 of SEQ ID NO: 1241880
aaugguaacuucuuuggga

SEQ ID NO: 1306887 - RNA, 19 nt, Artificial Sequence
  Description of Artificial Sequence: Synthetic oligonucleotide
  Antisense strand to SEQ ID NO: 1306886
ucccaaagaaguuaccauu

SEQ ID NO: 1306888 - RNA, 19 nt, Artificial Sequence
  Description of Artificial Sequence: Synthetic oligonucleotide
  Sense strand starting at position 3008 of SEQ ID NO: 1241880
ugguaacuucuuugggaga

SEQ ID NO: 1306889 - RNA, 19 nt, Artificial Sequence
  Description of Artificial Sequence: Synthetic oligonucleotide
  Antisense strand to SEQ ID NO: 1306888
ucucccaaagaaguuacca

SEQ ID NO: 1306890 - RNA, 19 nt, Artificial Sequence
  Description of Artificial Sequence: Synthetic oligonucleotide
  Sense strand starting at position 3011 of SEQ ID NO: 1241880
uaacuucuuugggagagga

SEQ ID NO: 1306891 - RNA, 19 nt, Artificial Sequence
  Description of Artificial Sequence: Synthetic oligonucleotide
  Antisense strand to SEQ ID NO: 1306890
uccucucccaaagaaguua

SEQ ID NO: 1306892 - RNA, 19 nt, Artificial Sequence
  Description of Artificial Sequence: Synthetic oligonucleotide
  Sense strand starting at position 3061 of SEQ ID NO: 1241880
ggcugaaauaguggaugca

SEQ ID NO: 1306893 - RNA, 19 nt, Artificial Sequence
  Description of Artificial Sequence: Synthetic oligonucleotide
  Antisense strand to SEQ ID NO: 1306892
ugcauccacuauuucagcc

SEQ ID NO: 1306894 - RNA, 19 nt, Artificial Sequence
  Description of Artificial Sequence: Synthetic oligonucleotide
  Sense strand starting at position 3064 of SEQ ID NO: 1241880
ugaaauaguggaugcacaa

SEQ ID NO: 1306895 - RNA, 19 nt, Artificial Sequence
  Description of Artificial Sequence: Synthetic oligonucleotide
  Antisense strand to SEQ ID NO: 1306894
uugugcauccacuauuuca

SEQ ID NO: 1306896 - RNA, 19 nt, Artificial Sequence
  Description of Artificial Sequence: Synthetic oligonucleotide
  Sense strand starting at position 3469 of SEQ ID NO: 1241880
ugguccuauguauaauauu

SEQ ID NO: 1306897 - RNA, 19 nt, Artificial Sequence
  Description of Artificial Sequence: Synthetic oligonucleotide
  Antisense strand to SEQ ID NO: 1306896
aauauuauacauaggacca

SEQ ID NO: 1306898 - RNA, 19 nt, Artificial Sequence
  Description of Artificial Sequence: Synthetic oligonucleotide
  Sense strand starting at position 3775 of SEQ ID NO: 1241880
guggaccuuccugaugagu

SEQ ID NO: 1306899 - RNA, 19 nt, Artificial Sequence
  Description of Artificial Sequence: Synthetic oligonucleotide
  Antisense strand to SEQ ID NO: 1306898
acucaucaggaagguccac

SEQ ID NO: 1306900 - RNA, 19 nt, Artificial Sequence
  Description of Artificial Sequence: Synthetic oligonucleotide
  Sense strand starting at position 3854 of SEQ ID NO: 1241880
cccuuaugucauggaaagg

SEQ ID NO: 1306901 - RNA, 19 nt, Artificial Sequence
  Description of Artificial Sequence: Synthetic oligonucleotide
  Antisense strand to SEQ ID NO: 1306900
ccuuuccaugacauaaggg

SEQ ID NO: 1306902 - RNA, 19 nt, Artificial Sequence
  Description of Artificial Sequence: Synthetic oligonucleotide
  Sense strand starting at position 80 of SEQ ID NO: 1241881
cucuauauugugugaacuc

SEQ ID NO: 1306903 - RNA, 19 nt, Artificial Sequence
  Description of Artificial Sequence: Synthetic oligonucleotide
  Antisense strand to SEQ ID NO: 1306902
gaguucacacaauauagag

SEQ ID NO: 1306904 - RNA, 19 nt, Artificial Sequence
  Description of Artificial Sequence: Synthetic oligonucleotide
  Sense strand starting at position 87 of SEQ ID NO: 1241881
uugugugaacucuguaaag

SEQ ID NO: 1306905 - RNA, 19 nt, Artificial Sequence
  Description of Artificial Sequence: Synthetic oligonucleotide
  Antisense strand to SEQ ID NO: 1306904
cuuuacagaguucacacaa

SEQ ID NO: 1306906 - RNA, 19 nt, Artificial Sequence
  Description of Artificial Sequence: Synthetic oligonucleotide
  Sense strand starting at position 89 of SEQ ID NO: 1241881
gugugaacucuguaaaggu

SEQ ID NO: 1306907 - RNA, 19 nt, Artificial Sequence
  Description of Artificial Sequence: Synthetic oligonucleotide
  Antisense strand to SEQ ID NO: 1306906
accuuuacagaguucacac

SEQ ID NO: 1306908 - RNA, 19 nt, Artificial Sequence
  Description of Artificial Sequence: Synthetic oligonucleotide
  Sense strand starting at position 128 of SEQ ID NO: 1241881
uuguaugcccaugaucuaa

SEQ ID NO: 1306909 - RNA, 19 nt, Artificial Sequence
  Description of Artificial Sequence: Synthetic oligonucleotide
  Antisense strand to SEQ ID NO: 1306908
uuagaucaugggcauacaa

SEQ ID NO: 1306910 - RNA, 19 nt, Artificial Sequence
  Description of Artificial Sequence: Synthetic oligonucleotide
  Sense strand starting at position 130 of SEQ ID NO: 1241881
guaugcccaugaucuaaua

SEQ ID NO: 1306911 - RNA, 19 nt, Artificial Sequence
  Description of Artificial Sequence: Synthetic oligonucleotide
  Antisense strand to SEQ ID NO: 1306910
uauuagaucaugggcauac

SEQ ID NO: 1306912 - RNA, 19 nt, Artificial Sequence
  Description of Artificial Sequence: Synthetic oligonucleotide
  Sense strand starting at position 243 of SEQ ID NO: 1241881
aucccaaauugagcuaaga

SEQ ID NO: 1306913 - RNA, 19 nt, Artificial Sequence
  Description of Artificial Sequence: Synthetic oligonucleotide
  Antisense strand to SEQ ID NO: 1306912
ucuuagcucaauuugggau

SEQ ID NO: 1306914 - RNA, 19 nt, Artificial Sequence
  Description of Artificial Sequence: Synthetic oligonucleotide
  Sense strand starting at position 738 of SEQ ID NO: 1241881
ugacaauggccuuggacau

SEQ ID NO: 1306915 - RNA, 19 nt, Artificial Sequence
  Description of Artificial Sequence: Synthetic oligonucleotide
  Antisense strand to SEQ ID NO: 1306914
auguccaaggccauuguca

SEQ ID NO: 1306916 - RNA, 19 nt, Artificial Sequence
  Description of Artificial Sequence: Synthetic oligonucleotide
  Sense strand starting at position 796 of SEQ ID NO: 1241881
uuuguacucuccucagaua

SEQ ID NO: 1306917 - RNA, 19 nt, Artificial Sequence
  Description of Artificial Sequence: Synthetic oligonucleotide
  Antisense strand to SEQ ID NO: 1306916
uaucugaggagaguacaaa

SEQ ID NO: 1306918 - RNA, 19 nt, Artificial Sequence
  Description of Artificial Sequence: Synthetic oligonucleotide
  Sense strand starting at position 797 of SEQ ID NO: 1241881
uuguacucuccucagauau

SEQ ID NO: 1306919 - RNA, 19 nt, Artificial Sequence
  Description of Artificial Sequence: Synthetic oligonucleotide
  Antisense strand to SEQ ID NO: 1306918
auaucugaggagaguacaa

SEQ ID NO: 1306920 - RNA, 19 nt, Artificial Sequence
  Description of Artificial Sequence: Synthetic oligonucleotide
  Sense strand starting at position 856 of SEQ ID NO: 1241881
agugacaucuccucaguga

SEQ ID NO: 1306921 - RNA, 19 nt, Artificial Sequence
  Description of Artificial Sequence: Synthetic oligonucleotide
  Antisense strand to SEQ ID NO: 1306920
ucacugaggagaugucacu

SEQ ID NO: 1306922 - RNA, 19 nt, Artificial Sequence
  Description of Artificial Sequence: Synthetic oligonucleotide
  Sense strand starting at position 857 of SEQ ID NO: 1241881
gugacaucuccucagugag

SEQ ID NO: 1306923 - RNA, 19 nt, Artificial Sequence
  Description of Artificial Sequence: Synthetic oligonucleotide
  Antisense strand to SEQ ID NO: 1306922
cucacugaggagaugucac

SEQ ID NO: 1306924 - RNA, 19 nt, Artificial Sequence
  Description of Artificial Sequence: Synthetic oligonucleotide
  Sense strand starting at position 859 of SEQ ID NO: 1241881
gacaucuccucagugagac

SEQ ID NO: 1306925 - RNA, 19 nt, Artificial Sequence
  Description of Artificial Sequence: Synthetic oligonucleotide
  Antisense strand to SEQ ID NO: 1306924
gucucacugaggagauguc

SEQ ID NO: 1306926 - RNA, 19 nt, Artificial Sequence
  Description of Artificial Sequence: Synthetic oligonucleotide
  Sense strand starting at position 860 of SEQ ID NO: 1241881
acaucuccucagugagacu

SEQ ID NO: 1306927 - RNA, 19 nt, Artificial Sequence
  Description of Artificial Sequence: Synthetic oligonucleotide
  Antisense strand to SEQ ID NO: 1306926
agucucacugaggagaugu

SEQ ID NO: 1306928 - RNA, 19 nt, Artificial Sequence
  Description of Artificial Sequence: Synthetic oligonucleotide
  Sense strand starting at position 971 of SEQ ID NO: 1241881
accuaacaguuugucuuua

SEQ ID NO: 1306929 - RNA, 19 nt, Artificial Sequence
  Description of Artificial Sequence: Synthetic oligonucleotide
  Antisense strand to SEQ ID NO: 1306928
uaaagacaaacuguuaggu

SEQ ID NO: 1306930 - RNA, 19 nt, Artificial Sequence
  Description of Artificial Sequence: Synthetic oligonucleotide
  Sense strand starting at position 1031 of SEQ ID NO: 1241881
cuucaugaggguugagauu

SEQ ID NO: 1306931 - RNA, 19 nt, Artificial Sequence
  Description of Artificial Sequence: Synthetic oligonucleotide
  Antisense strand to SEQ ID NO: 1306930
aaucucaacccucaugaag

SEQ ID NO: 1306932 - RNA, 19 nt, Artificial Sequence
  Description of Artificial Sequence: Synthetic oligonucleotide
  Sense strand starting at position 1070 of SEQ ID NO: 1241881
gcacucagagcuuagccaa

SEQ ID NO: 1306933 - RNA, 19 nt, Artificial Sequence
  Description of Artificial Sequence: Synthetic oligonucleotide
  Antisense strand to SEQ ID NO: 1306932
uuggcuaagcucugagugc

SEQ ID NO: 1306934 - RNA, 19 nt, Artificial Sequence
  Description of Artificial Sequence: Synthetic oligonucleotide
  Sense strand starting at position 1127 of SEQ ID NO: 1241881
agcacuuaucuagguauug

SEQ ID NO: 1306935 - RNA, 19 nt, Artificial Sequence
  Description of Artificial Sequence: Synthetic oligonucleotide
  Antisense strand to SEQ ID NO: 1306934
caauaccuagauaagugcu

SEQ ID NO: 1306936 - RNA, 19 nt, Artificial Sequence
  Description of Artificial Sequence: Synthetic oligonucleotide
  Sense strand starting at position 1182 of SEQ ID NO: 1241881
cuagaacugcaauauaguu

SEQ ID NO: 1306937 - RNA, 19 nt, Artificial Sequence
  Description of Artificial Sequence: Synthetic oligonucleotide
  Antisense strand to SEQ ID NO: 1306936
aacuauauugcaguucuag

SEQ ID NO: 1306938 - RNA, 19 nt, Artificial Sequence
  Description of Artificial Sequence: Synthetic oligonucleotide
  Sense strand starting at position 1261 of SEQ ID NO: 1241881
uggcauaauuuagaucucu

SEQ ID NO: 1306939 - RNA, 19 nt, Artificial Sequence
  Description of Artificial Sequence: Synthetic oligonucleotide
  Antisense strand to SEQ ID NO: 1306938
agagaucuaaauuaugcca

SEQ ID NO: 1306940 - RNA, 19 nt, Artificial Sequence
  Description of Artificial Sequence: Synthetic oligonucleotide
  Sense strand starting at position 1331 of SEQ ID NO: 1241881
ccauuuguugagcgcuuau

SEQ ID NO: 1306941 - RNA, 19 nt, Artificial Sequence
  Description of Artificial Sequence: Synthetic oligonucleotide
  Antisense strand to SEQ ID NO: 1306940
auaagcgcucaacaaaugg

SEQ ID NO: 1306942 - RNA, 19 nt, Artificial Sequence
  Description of Artificial Sequence: Synthetic oligonucleotide
  Sense strand starting at position 1352 of SEQ ID NO: 1241881
ggaagcaguuacuuaacaa

SEQ ID NO: 1306943 - RNA, 19 nt, Artificial Sequence
  Description of Artificial Sequence: Synthetic oligonucleotide
  Antisense strand to SEQ ID NO: 1306942
uuguuaaguaacugcuucc

SEQ ID NO: 1306944 - RNA, 19 nt, Artificial Sequence
  Description of Artificial Sequence: Synthetic oligonucleotide
  Sense strand starting at position 2071 of SEQ ID NO: 1241881
cgaacucgcggugcauaau

SEQ ID NO: 1306945 - RNA, 19 nt, Artificial Sequence
  Description of Artificial Sequence: Synthetic oligonucleotide
  Antisense strand to SEQ ID NO: 1306944
auuaugcaccgcgaguucg

SEQ ID NO: 1306946 - RNA, 19 nt, Artificial Sequence
  Description of Artificial Sequence: Synthetic oligonucleotide
  Sense strand starting at position 2107 of SEQ ID NO: 1241881
ggauucaauggccguggaa

SEQ ID NO: 1306947 - RNA, 19 nt, Artificial Sequence
  Description of Artificial Sequence: Synthetic oligonucleotide
  Antisense strand to SEQ ID NO: 1306946
uuccacggccauugaaucc

SEQ ID NO: 1306948 - RNA, 19 nt, Artificial Sequence
  Description of Artificial Sequence: Synthetic oligonucleotide
  Sense strand starting at position 2166 of SEQ ID NO: 1241881
ucuugagucgcggcucgaa

SEQ ID NO: 1306949 - RNA, 19 nt, Artificial Sequence
  Description of Artificial Sequence: Synthetic oligonucleotide
  Antisense strand to SEQ ID NO: 1306948
uucgagccgcgacucaaga

SEQ ID NO: 1306950 - RNA, 19 nt, Artificial Sequence
  Description of Artificial Sequence: Synthetic oligonucleotide
  Sense strand starting at position 2578 of SEQ ID NO: 1241881
acuagccuugacugacauu

SEQ ID NO: 1306951 - RNA, 19 nt, Artificial Sequence
  Description of Artificial Sequence: Synthetic oligonucleotide
  Antisense strand to SEQ ID NO: 1306950
aaugucagucaaggcuagu

SEQ ID NO: 1306952 - RNA, 19 nt, Artificial Sequence
  Description of Artificial Sequence: Synthetic oligonucleotide
  Sense strand starting at position 2895 of SEQ ID NO: 1241881
ggaguucuccuuuaugacu

SEQ ID NO: 1306953 - RNA, 19 nt, Artificial Sequence
  Description of Artificial Sequence: Synthetic oligonucleotide
  Antisense strand to SEQ ID NO: 1306952
agucauaaaggagaacucc

SEQ ID NO: 1306954 - RNA, 19 nt, Artificial Sequence
  Description of Artificial Sequence: Synthetic oligonucleotide
  Sense strand starting at position 3142 of SEQ ID NO: 1241881
agcuuaacccaggacucau

SEQ ID NO: 1306955 - RNA, 19 nt, Artificial Sequence
  Description of Artificial Sequence: Synthetic oligonucleotide
  Antisense strand to SEQ ID NO: 1306954
augaguccuggguuaagcu

SEQ ID NO: 1306956 - RNA, 19 nt, Artificial Sequence
  Description of Artificial Sequence: Synthetic oligonucleotide
  Sense strand starting at position 3213 of SEQ ID NO: 1241881
gucauucuccauuggguaa

SEQ ID NO: 1306957 - RNA, 19 nt, Artificial Sequence
  Description of Artificial Sequence: Synthetic oligonucleotide
  Antisense strand to SEQ ID NO: 1306956
uuacccaauggagaaugac

SEQ ID NO: 1306958 - RNA, 19 nt, Artificial Sequence
  Description of Artificial Sequence: Synthetic oligonucleotide
  Sense strand starting at position 3240 of SEQ ID NO: 1241881
cgacuuuauccuuacaggu

SEQ ID NO: 1306959 - RNA, 19 nt, Artificial Sequence
  Description of Artificial Sequence: Synthetic oligonucleotide
  Antisense strand to SEQ ID NO: 1306958
accuguaaggauaaagucg

SEQ ID NO: 1306960 - RNA, 19 nt, Artificial Sequence
  Description of Artificial Sequence: Synthetic oligonucleotide
  Sense strand starting at position 3330 of SEQ ID NO: 1241881
gggcuuugauuguucagaa

SEQ ID NO: 1306961 - RNA, 19 nt, Artificial Sequence
  Description of Artificial Sequence: Synthetic oligonucleotide
  Antisense strand to SEQ ID NO: 1306960
uucugaacaaucaaagccc

SEQ ID NO: 1306962 - RNA, 19 nt, Artificial Sequence
  Description of Artificial Sequence: Synthetic oligonucleotide
  Sense strand starting at position 3410 of SEQ ID NO: 1241881
uuugguuacucuuuacauc

SEQ ID NO: 1306963 - RNA, 19 nt, Artificial Sequence
  Description of Artificial Sequence: Synthetic oligonucleotide
  Antisense strand to SEQ ID NO: 1306962
gauguaaagaguaaccaaa

SEQ ID NO: 1306964 - RNA, 19 nt, Artificial Sequence
  Description of Artificial Sequence: Synthetic oligonucleotide
  Sense strand starting at position 3411 of SEQ ID NO: 1241881
uugguuacucuuuacauca

SEQ ID NO: 1306965 - RNA, 19 nt, Artificial Sequence
  Description of Artificial Sequence: Synthetic oligonucleotide
  Antisense strand to SEQ ID NO: 1306964
ugauguaaagaguaaccaa

SEQ ID NO: 1306966 - RNA, 19 nt, Artificial Sequence
  Description of Artificial Sequence: Synthetic oligonucleotide
  Sense strand starting at position 3446 of SEQ ID NO: 1241881
ggaagcuuuccuggaucau

SEQ ID NO: 1306967 - RNA, 19 nt, Artificial Sequence
  Description of Artificial Sequence: Synthetic oligonucleotide
  Antisense strand to SEQ ID NO: 1306966
augauccaggaaagcuucc

SEQ ID NO: 1306968 - RNA, 19 nt, Artificial Sequence
  Description of Artificial Sequence: Synthetic oligonucleotide
  Sense strand starting at position 3450 of SEQ ID NO: 1241881
gcuuuccuggaucauauga

SEQ ID NO: 1306969 - RNA, 19 nt, Artificial Sequence
  Description of Artificial Sequence: Synthetic oligonucleotide
  Antisense strand to SEQ ID NO: 1306968
ucauaugauccaggaaagc

SEQ ID NO: 1306970 - RNA, 19 nt, Artificial Sequence
  Description of Artificial Sequence: Synthetic oligonucleotide
  Sense strand starting at position 3482 of SEQ ID NO: 1241881
ggauucucucacuggcuca

SEQ ID NO: 1306971 - RNA, 19 nt, Artificial Sequence
  Description of Artificial Sequence: Synthetic oligonucleotide
  Antisense strand to SEQ ID NO: 1306970
ugagccagugagagaaucc

SEQ ID NO: 1306972 - RNA, 19 nt, Artificial Sequence
  Description of Artificial Sequence: Synthetic oligonucleotide
  Sense strand starting at position 3649 of SEQ ID NO: 1241881
ccuauaaccuagucggauu

SEQ ID NO: 1306973 - RNA, 19 nt, Artificial Sequence
  Description of Artificial Sequence: Synthetic oligonucleotide
  Antisense strand to SEQ ID NO: 1306972
aauccgacuagguuauagg

SEQ ID NO: 1306974 - RNA, 19 nt, Artificial Sequence
  Description of Artificial Sequence: Synthetic oligonucleotide
  Sense strand starting at position 3669 of SEQ ID NO: 1241881
cccauaaacucugcuacga

SEQ ID NO: 1306975 - RNA, 19 nt, Artificial Sequence
  Description of Artificial Sequence: Synthetic oligonucleotide
  Antisense strand to SEQ ID NO: 1306974
ucguagcagaguuuauggg

SEQ ID NO: 1306976 - RNA, 19 nt, Artificial Sequence
  Description of Artificial Sequence: Synthetic oligonucleotide
  Sense strand starting at position 3776 of SEQ ID NO: 1241881
gaagguacucugugguuua

SEQ ID NO: 1306977 - RNA, 19 nt, Artificial Sequence
  Description of Artificial Sequence: Synthetic oligonucleotide
  Antisense strand to SEQ ID NO: 1306976
uaaaccacagaguaccuuc

SEQ ID NO: 1306978 - RNA, 19 nt, Artificial Sequence
  Description of Artificial Sequence: Synthetic oligonucleotide
  Sense strand starting at position 3814 of SEQ ID NO: 1241881
agggaugucccaugaacug

SEQ ID NO: 1306979 - RNA, 19 nt, Artificial Sequence
  Description of Artificial Sequence: Synthetic oligonucleotide
  Antisense strand to SEQ ID NO: 1306978
caguucaugggacaucccu

SEQ ID NO: 1306980 - RNA, 19 nt, Artificial Sequence
  Description of Artificial Sequence: Synthetic oligonucleotide
  Sense strand starting at position 3855 of SEQ ID NO: 1241881
aagguuugccuuugaggaa

SEQ ID NO: 1306981 - RNA, 19 nt, Artificial Sequence
  Description of Artificial Sequence: Synthetic oligonucleotide
  Antisense strand to SEQ ID NO: 1306980
uuccucaaaggcaaaccuu

SEQ ID NO: 1306982 - RNA, 19 nt, Artificial Sequence
  Description of Artificial Sequence: Synthetic oligonucleotide
  Sense strand starting at position 127 of SEQ ID NO: 1241882
aaacaugauuuagggcaga

SEQ ID NO: 1306983 - RNA, 19 nt, Artificial Sequence
  Description of Artificial Sequence: Synthetic oligonucleotide
  Antisense strand to SEQ ID NO: 1306982
ucugcccuaaaucauguuu

SEQ ID NO: 1306984 - RNA, 19 nt, Artificial Sequence
  Description of Artificial Sequence: Synthetic oligonucleotide
  Sense strand starting at position 138 of SEQ ID NO: 1241882
agggcagacuguuuauguu

SEQ ID NO: 1306985 - RNA, 19 nt, Artificial Sequence
  Description of Artificial Sequence: Synthetic oligonucleotide
  Antisense strand to SEQ ID NO: 1306984
aacauaaacagucugcccu

SEQ ID NO: 1306986 - RNA, 19 nt, Artificial Sequence
  Description of Artificial Sequence: Synthetic oligonucleotide
  Sense strand starting at position 217 of SEQ ID NO: 1241882
aaugguaacucaguuauga

SEQ ID NO: 1306987 - RNA, 19 nt, Artificial Sequence
  Description of Artificial Sequence: Synthetic oligonucleotide
  Antisense strand to SEQ ID NO: 1306986
ucauaacugaguuaccauu

SEQ ID NO: 1306988 - RNA, 19 nt, Artificial Sequence
  Description of Artificial Sequence: Synthetic oligonucleotide
  Sense strand starting at position 1055 of SEQ ID NO: 1241882
aguagcccugaauaauaua

SEQ ID NO: 1306989 - RNA, 19 nt, Artificial Sequence
  Description of Artificial Sequence: Synthetic oligonucleotide
  Antisense strand to SEQ ID NO: 1306988
uauauuauucagggcuacu

SEQ ID NO: 1306990 - RNA, 19 nt, Artificial Sequence
  Description of Artificial Sequence: Synthetic oligonucleotide
  Sense strand starting at position 1149 of SEQ ID NO: 1241882
augugagcauaauuggaau

SEQ ID NO: 1306991 - RNA, 19 nt, Artificial Sequence
  Description of Artificial Sequence: Synthetic oligonucleotide
  Antisense strand to SEQ ID NO: 1306990
auuccaauuaugcucacau

SEQ ID NO: 1306992 - RNA, 19 nt, Artificial Sequence
  Description of Artificial Sequence: Synthetic oligonucleotide
  Sense strand starting at position 1337 of SEQ ID NO: 1241882
ccguaugaugacugacacu

SEQ ID NO: 1306993 - RNA, 19 nt, Artificial Sequence
  Description of Artificial Sequence: Synthetic oligonucleotide
  Antisense strand to SEQ ID NO: 1306992
agugucagucaucauacgg

SEQ ID NO: 1306994 - RNA, 19 nt, Artificial Sequence
  Description of Artificial Sequence: Synthetic oligonucleotide
  Sense strand starting at position 1374 of SEQ ID NO: 1241882
caaucugacccguauacga

SEQ ID NO: 1306995 - RNA, 19 nt, Artificial Sequence
  Description of Artificial Sequence: Synthetic oligonucleotide
  Antisense strand to SEQ ID NO: 1306994
ucguauacgggucagauug

SEQ ID NO: 1306996 - RNA, 19 nt, Artificial Sequence
  Description of Artificial Sequence: Synthetic oligonucleotide
  Sense strand starting at position 1376 of SEQ ID NO: 1241882
aucugacccguauacgaau

SEQ ID NO: 1306997 - RNA, 19 nt, Artificial Sequence
  Description of Artificial Sequence: Synthetic oligonucleotide
  Antisense strand to SEQ ID NO: 1306996
auucguauacgggucagau

SEQ ID NO: 1306998 - RNA, 19 nt, Artificial Sequence
  Description of Artificial Sequence: Synthetic oligonucleotide
  Sense strand starting at position 1441 of SEQ ID NO: 1241882
gagugaguacaacgucaau

SEQ ID NO: 1306999 - RNA, 19 nt, Artificial Sequence
  Description of Artificial Sequence: Synthetic oligonucleotide
  Antisense strand to SEQ ID NO: 1306998
auugacguuguacucacuc

SEQ ID NO: 1307000 - RNA, 19 nt, Artificial Sequence
  Description of Artificial Sequence: Synthetic oligonucleotide
  Sense strand starting at position 1444 of SEQ ID NO: 1241882
ugaguacaacgucaauaaa

SEQ ID NO: 1307001 - RNA, 19 nt, Artificial Sequence
  Description of Artificial Sequence: Synthetic oligonucleotide
  Antisense strand to SEQ ID NO: 1307000
uuuauugacguuguacuca

SEQ ID NO: 1307002 - RNA, 19 nt, Artificial Sequence
  Description of Artificial Sequence: Synthetic oligonucleotide
  Sense strand starting at position 1463 of SEQ ID NO: 1241882
aggaauacucagggucauu

SEQ ID NO: 1307003 - RNA, 19 nt, Artificial Sequence
  Description of Artificial Sequence: Synthetic oligonucleotide
  Antisense strand to SEQ ID NO: 1307002
aaugacccugaguauuccu

SEQ ID NO: 1307004 - RNA, 19 nt, Artificial Sequence
  Description of Artificial Sequence: Synthetic oligonucleotide
  Sense strand starting at position 1517 of SEQ ID NO: 1241882
ggauauuauuucuaccuag

SEQ ID NO: 1307005 - RNA, 19 nt, Artificial Sequence
  Description of Artificial Sequence: Synthetic oligonucleotide
  Antisense strand to SEQ ID NO: 1307004
cuagguagaaauaauaucc

SEQ ID NO: 1307006 - RNA, 19 nt, Artificial Sequence
  Description of Artificial Sequence: Synthetic oligonucleotide
  Sense strand starting at position 1713 of SEQ ID NO: 1241882
gucagugagaccuggguuu

SEQ ID NO: 1307007 - RNA, 19 nt, Artificial Sequence
  Description of Artificial Sequence: Synthetic oligonucleotide
  Antisense strand to SEQ ID NO: 1307006
aaacccaggucucacugac

SEQ ID NO: 1307008 - RNA, 19 nt, Artificial Sequence
  Description of Artificial Sequence: Synthetic oligonucleotide
  Sense strand starting at position 1742 of SEQ ID NO: 1241882
aggugagauuccuugggag

SEQ ID NO: 1307009 - RNA, 19 nt, Artificial Sequence
  Description of Artificial Sequence: Synthetic oligonucleotide
  Antisense strand to SEQ ID NO: 1307008
cucccaaggaaucucaccu

SEQ ID NO: 1307010 - RNA, 19 nt, Artificial Sequence
  Description of Artificial Sequence: Synthetic oligonucleotide
  Sense strand starting at position 1744 of SEQ ID NO: 1241882
gugagauuccuugggaguu

SEQ ID NO: 1307011 - RNA, 19 nt, Artificial Sequence
  Description of Artificial Sequence: Synthetic oligonucleotide
  Antisense strand to SEQ ID NO: 1307010
aacucccaaggaaucucac

SEQ ID NO: 1307012 - RNA, 19 nt, Artificial Sequence
  Description of Artificial Sequence: Synthetic oligonucleotide
  Sense strand starting at position 1754 of SEQ ID NO: 1241882
uugggaguuuagagaagug

SEQ ID NO: 1307013 - RNA, 19 nt, Artificial Sequence
  Description of Artificial Sequence: Synthetic oligonucleotide
  Antisense strand to SEQ ID NO: 1307012
cacuucucuaaacucccaa

SEQ ID NO: 1307014 - RNA, 19 nt, Artificial Sequence
  Description of Artificial Sequence: Synthetic oligonucleotide
  Sense strand starting at position 1783 of SEQ ID NO: 1241882
gagguauucgcuguaugcu

SEQ ID NO: 1307015 - RNA, 19 nt, Artificial Sequence
  Description of Artificial Sequence: Synthetic oligonucleotide
  Antisense strand to SEQ ID NO: 1307014
agcauacagcgaauaccuc

SEQ ID NO: 1307016 - RNA, 19 nt, Artificial Sequence
  Description of Artificial Sequence: Synthetic oligonucleotide
  Sense strand starting at position 2404 of SEQ ID NO: 1241882
gcagcaauuucgcccuaau

SEQ ID NO: 1307017 - RNA, 19 nt, Artificial Sequence
  Description of Artificial Sequence: Synthetic oligonucleotide
  Antisense strand to SEQ ID NO: 1307016
auuagggcgaaauugcugc

SEQ ID NO: 1307018 - RNA, 19 nt, Artificial Sequence
  Description of Artificial Sequence: Synthetic oligonucleotide
  Sense strand starting at position 2407 of SEQ ID NO: 1241882
gcaauuucgcccuaaucau

SEQ ID NO: 1307019 - RNA, 19 nt, Artificial Sequence
  Description of Artificial Sequence: Synthetic oligonucleotide
  Antisense strand to SEQ ID NO: 1307018
augauuagggcgaaauugc

SEQ ID NO: 1307020 - RNA, 19 nt, Artificial Sequence
  Description of Artificial Sequence: Synthetic oligonucleotide
  Sense strand starting at position 2516 of SEQ ID NO: 1241882
agaaauauaccauguuagu

SEQ ID NO: 1307021 - RNA, 19 nt, Artificial Sequence
  Description of Artificial Sequence: Synthetic oligonucleotide
  Antisense strand to SEQ ID NO: 1307020
acuaacaugguauauuucu

SEQ ID NO: 1307022 - RNA, 19 nt, Artificial Sequence
  Description of Artificial Sequence: Synthetic oligonucleotide
  Sense strand starting at position 2553 of SEQ ID NO: 1241882
uucugagguuguccauauu

SEQ ID NO: 1307023 - RNA, 19 nt, Artificial Sequence
  Description of Artificial Sequence: Synthetic oligonucleotide
  Antisense strand to SEQ ID NO: 1307022
aauauggacaaccucagaa

SEQ ID NO: 1307024 - RNA, 19 nt, Artificial Sequence
  Description of Artificial Sequence: Synthetic oligonucleotide
  Sense strand starting at position 2689 of SEQ ID NO: 1241882
uguagccagcauuaauaaa

SEQ ID NO: 1307025 - RNA, 19 nt, Artificial Sequence
  Description of Artificial Sequence: Synthetic oligonucleotide
  Antisense strand to SEQ ID NO: 1307024
uuuauuaaugcuggcuaca

SEQ ID NO: 1307026 - RNA, 19 nt, Artificial Sequence
  Description of Artificial Sequence: Synthetic oligonucleotide
  Sense strand starting at position 2763 of SEQ ID NO: 1241882
aggcuugaugcagauugaa

SEQ ID NO: 1307027 - RNA, 19 nt, Artificial Sequence
  Description of Artificial Sequence: Synthetic oligonucleotide
  Antisense strand to SEQ ID NO: 1307026
uucaaucugcaucaagccu

SEQ ID NO: 1307028 - RNA, 19 nt, Artificial Sequence
  Description of Artificial Sequence: Synthetic oligonucleotide
  Sense strand starting at position 2800 of SEQ ID NO: 1241882
ucuauuuagugucuaguaa

SEQ ID NO: 1307029 - RNA, 19 nt, Artificial Sequence
  Description of Artificial Sequence: Synthetic oligonucleotide
  Antisense strand to SEQ ID NO: 1307028
uuacuagacacuaaauaga

SEQ ID NO: 1307030 - RNA, 19 nt, Artificial Sequence
  Description of Artificial Sequence: Synthetic oligonucleotide
  Sense strand starting at position 3131 of SEQ ID NO: 1241882
gaugaagggccauggaguu

SEQ ID NO: 1307031 - RNA, 19 nt, Artificial Sequence
  Description of Artificial Sequence: Synthetic oligonucleotide
  Antisense strand to SEQ ID NO: 1307030
aacuccauggcccuucauc

SEQ ID NO: 1307032 - RNA, 19 nt, Artificial Sequence
  Description of Artificial Sequence: Synthetic oligonucleotide
  Sense strand starting at position 3147 of SEQ ID NO: 1241882
guugaaggauccuuucugu

SEQ ID NO: 1307033 - RNA, 19 nt, Artificial Sequence
  Description of Artificial Sequence: Synthetic oligonucleotide
  Antisense strand to SEQ ID NO: 1307032
acagaaaggauccuucaac

SEQ ID NO: 1307034 - RNA, 19 nt, Artificial Sequence
  Description of Artificial Sequence: Synthetic oligonucleotide
  Sense strand starting at position 3150 of SEQ ID NO: 1241882
gaaggauccuuucugucuu

SEQ ID NO: 1307035 - RNA, 19 nt, Artificial Sequence
  Description of Artificial Sequence: Synthetic oligonucleotide
  Antisense strand to SEQ ID NO: 1307034
aagacagaaaggauccuuc

SEQ ID NO: 1307036 - RNA, 19 nt, Artificial Sequence
  Description of Artificial Sequence: Synthetic oligonucleotide
  Sense strand starting at position 3190 of SEQ ID NO: 1241882
uuggauggccuuugaguga

SEQ ID NO: 1307037 - RNA, 19 nt, Artificial Sequence
  Description of Artificial Sequence: Synthetic oligonucleotide
  Antisense strand to SEQ ID NO: 1307036
ucacucaaaggccauccaa

SEQ ID NO: 1307038 - RNA, 19 nt, Artificial Sequence
  Description of Artificial Sequence: Synthetic oligonucleotide
  Sense strand starting at position 3195 of SEQ ID NO: 1241882
uggccuuugagugauggga

SEQ ID NO: 1307039 - RNA, 19 nt, Artificial Sequence
  Description of Artificial Sequence: Synthetic oligonucleotide
  Antisense strand to SEQ ID NO: 1307038
ucccaucacucaaaggcca

SEQ ID NO: 1307040 - RNA, 19 nt, Artificial Sequence
  Description of Artificial Sequence: Synthetic oligonucleotide
  Sense strand starting at position 3256 of SEQ ID NO: 1241882
caggcugaaguguagaaua

SEQ ID NO: 1307041 - RNA, 19 nt, Artificial Sequence
  Description of Artificial Sequence: Synthetic oligonucleotide
  Antisense strand to SEQ ID NO: 1307040
uauucuacacuucagccug

SEQ ID NO: 1307042 - RNA, 19 nt, Artificial Sequence
  Description of Artificial Sequence: Synthetic oligonucleotide
  Sense strand starting at position 3298 of SEQ ID NO: 1241882
ugaugaauccaccagcucu

SEQ ID NO: 1307043 - RNA, 19 nt, Artificial Sequence
  Description of Artificial Sequence: Synthetic oligonucleotide
  Antisense strand to SEQ ID NO: 1307042
agagcugguggauucauca

SEQ ID NO: 1307044 - RNA, 19 nt, Artificial Sequence
  Description of Artificial Sequence: Synthetic oligonucleotide
  Sense strand starting at position 3333 of SEQ ID NO: 1241882
auucgaggauacuucugaa

SEQ ID NO: 1307045 - RNA, 19 nt, Artificial Sequence
  Description of Artificial Sequence: Synthetic oligonucleotide
  Antisense strand to SEQ ID NO: 1307044
uucagaaguauccucgaau

SEQ ID NO: 1307046 - RNA, 19 nt, Artificial Sequence
  Description of Artificial Sequence: Synthetic oligonucleotide
  Sense strand starting at position 3600 of SEQ ID NO: 1241882
gguucuaaugauuggguca

SEQ ID NO: 1307047 - RNA, 19 nt, Artificial Sequence
  Description of Artificial Sequence: Synthetic oligonucleotide
  Antisense strand to SEQ ID NO: 1307046
ugacccaaucauuagaacc

SEQ ID NO: 1307048 - RNA, 19 nt, Artificial Sequence
  Description of Artificial Sequence: Synthetic oligonucleotide
  Sense strand starting at position 3601 of SEQ ID NO: 1241882
guucuaaugauugggucau

SEQ ID NO: 1307049 - RNA, 19 nt, Artificial Sequence
  Description of Artificial Sequence: Synthetic oligonucleotide
  Antisense strand to SEQ ID NO: 1307048
augacccaaucauuagaac

SEQ ID NO: 1307050 - RNA, 19 nt, Artificial Sequence
  Description of Artificial Sequence: Synthetic oligonucleotide
  Sense strand starting at position 3620 of SEQ ID NO: 1241882
ucaguaaguccuuacacug

SEQ ID NO: 1307051 - RNA, 19 nt, Artificial Sequence
  Description of Artificial Sequence: Synthetic oligonucleotide
  Antisense strand to SEQ ID NO: 1307050
caguguaaggacuuacuga

SEQ ID NO: 1307052 - RNA, 19 nt, Artificial Sequence
  Description of Artificial Sequence: Synthetic oligonucleotide
  Sense strand starting at position 3747 of SEQ ID NO: 1241882
ugcuuuaaaucacucagga

SEQ ID NO: 1307053 - RNA, 19 nt, Artificial Sequence
  Description of Artificial Sequence: Synthetic oligonucleotide
  Antisense strand to SEQ ID NO: 1307052
uccugagugauuuaaagca

SEQ ID NO: 1307054 - RNA, 19 nt, Artificial Sequence
  Description of Artificial Sequence: Synthetic oligonucleotide
  Sense strand starting at position 3931 of SEQ ID NO: 1241882
gauacaugauucuuuguug

SEQ ID NO: 1307055 - RNA, 19 nt, Artificial Sequence
  Description of Artificial Sequence: Synthetic oligonucleotide
  Antisense strand to SEQ ID NO: 1307054
caacaaagaaucauguauc

SEQ ID NO: 1307056 - RNA, 19 nt, Artificial Sequence
  Description of Artificial Sequence: Synthetic oligonucleotide
  Sense strand starting at position 3932 of SEQ ID NO: 1241882
auacaugauucuuuguuga

SEQ ID NO: 1307057 - RNA, 19 nt, Artificial Sequence
  Description of Artificial Sequence: Synthetic oligonucleotide
  Antisense strand to SEQ ID NO: 1307056
ucaacaaagaaucauguau

SEQ ID NO: 1307058 - RNA, 19 nt, Artificial Sequence
  Description of Artificial Sequence: Synthetic oligonucleotide
  Sense strand starting at position 3934 of SEQ ID NO: 1241882
acaugauucuuuguugaua

SEQ ID NO: 1307059 - RNA, 19 nt, Artificial Sequence
  Description of Artificial Sequence: Synthetic oligonucleotide
  Antisense strand to SEQ ID NO: 1307058
uaucaacaaagaaucaugu

SEQ ID NO: 1307060 - RNA, 19 nt, Artificial Sequence
  Description of Artificial Sequence: Synthetic oligonucleotide
  Sense strand starting at position 3935 of SEQ ID NO: 1241882
caugauucuuuguugauag

SEQ ID NO: 1307061 - RNA, 19 nt, Artificial Sequence
  Description of Artificial Sequence: Synthetic oligonucleotide
  Antisense strand to SEQ ID NO: 1307060
cuaucaacaaagaaucaug

SEQ ID NO: 1307062 - RNA, 19 nt, Artificial Sequence
  Description of Artificial Sequence: Synthetic oligonucleotide
  Sense strand starting at position 67 of SEQ ID NO: 1241883
gcaagugugauagacaaug

SEQ ID NO: 1307063 - RNA, 19 nt, Artificial Sequence
  Description of Artificial Sequence: Synthetic oligonucleotide
  Antisense strand to SEQ ID NO: 1307062
cauugucuaucacacuugc

SEQ ID NO: 1307064 - RNA, 19 nt, Artificial Sequence
  Description of Artificial Sequence: Synthetic oligonucleotide
  Sense strand starting at position 77 of SEQ ID NO: 1241883
uagacaauguugcucugau

SEQ ID NO: 1307065 - RNA, 19 nt, Artificial Sequence
  Description of Artificial Sequence: Synthetic oligonucleotide
  Antisense strand to SEQ ID NO: 1307064
aucagagcaacauugucua

SEQ ID NO: 1307066 - RNA, 19 nt, Artificial Sequence
  Description of Artificial Sequence: Synthetic oligonucleotide
  Sense strand starting at position 78 of SEQ ID NO: 1241883
agacaauguugcucugaug

SEQ ID NO: 1307067 - RNA, 19 nt, Artificial Sequence
  Description of Artificial Sequence: Synthetic oligonucleotide
  Antisense strand to SEQ ID NO: 1307066
caucagagcaacauugucu

SEQ ID NO: 1307068 - RNA, 19 nt, Artificial Sequence
  Description of Artificial Sequence: Synthetic oligonucleotide
  Sense strand starting at position 142 of SEQ ID NO: 1241883
uagggugggaugcgauaau

SEQ ID NO: 1307069 - RNA, 19 nt, Artificial Sequence
  Description of Artificial Sequence: Synthetic oligonucleotide
  Antisense strand to SEQ ID NO: 1307068
auuaucgcaucccacccua

SEQ ID NO: 1307070 - RNA, 19 nt, Artificial Sequence
  Description of Artificial Sequence: Synthetic oligonucleotide
  Sense strand starting at position 145 of SEQ ID NO: 1241883
ggugggaugcgauaaugga

SEQ ID NO: 1307071 - RNA, 19 nt, Artificial Sequence
  Description of Artificial Sequence: Synthetic oligonucleotide
  Antisense strand to SEQ ID NO: 1307070
uccauuaucgcaucccacc

SEQ ID NO: 1307072 - RNA, 19 nt, Artificial Sequence
  Description of Artificial Sequence: Synthetic oligonucleotide
  Sense strand starting at position 369 of SEQ ID NO: 1241883
aaaguuggugcagaaucua

SEQ ID NO: 1307073 - RNA, 19 nt, Artificial Sequence
  Description of Artificial Sequence: Synthetic oligonucleotide
  Antisense strand to SEQ ID NO: 1307072
uagauucugcaccaacuuu

SEQ ID NO: 1307074 - RNA, 19 nt, Artificial Sequence
  Description of Artificial Sequence: Synthetic oligonucleotide
  Sense strand starting at position 559 of SEQ ID NO: 1241883
gggcaaguuaguuaaccuu

SEQ ID NO: 1307075 - RNA, 19 nt, Artificial Sequence
  Description of Artificial Sequence: Synthetic oligonucleotide
  Antisense strand to SEQ ID NO: 1307074
aagguuaacuaacuugccc

SEQ ID NO: 1307076 - RNA, 19 nt, Artificial Sequence
  Description of Artificial Sequence: Synthetic oligonucleotide
  Sense strand starting at position 854 of SEQ ID NO: 1241883
ggaggagguaagcaguuau

SEQ ID NO: 1307077 - RNA, 19 nt, Artificial Sequence
  Description of Artificial Sequence: Synthetic oligonucleotide
  Antisense strand to SEQ ID NO: 1307076
auaacugcuuaccuccucc

SEQ ID NO: 1307078 - RNA, 19 nt, Artificial Sequence
  Description of Artificial Sequence: Synthetic oligonucleotide
  Sense strand starting at position 962 of SEQ ID NO: 1241883
uaugaugugauagguguau

SEQ ID NO: 1307079 - RNA, 19 nt, Artificial Sequence
  Description of Artificial Sequence: Synthetic oligonucleotide
  Antisense strand to SEQ ID NO: 1307078
auacaccuaucacaucaua

SEQ ID NO: 1307080 - RNA, 19 nt, Artificial Sequence
  Description of Artificial Sequence: Synthetic oligonucleotide
  Sense strand starting at position 966 of SEQ ID NO: 1241883
augugauagguguauggaa

SEQ ID NO: 1307081 - RNA, 19 nt, Artificial Sequence
  Description of Artificial Sequence: Synthetic oligonucleotide
  Antisense strand to SEQ ID NO: 1307080
uuccauacaccuaucacau

SEQ ID NO: 1307082 - RNA, 19 nt, Artificial Sequence
  Description of Artificial Sequence: Synthetic oligonucleotide
  Sense strand starting at position 968 of SEQ ID NO: 1241883
gugauagguguauggaaua

SEQ ID NO: 1307083 - RNA, 19 nt, Artificial Sequence
  Description of Artificial Sequence: Synthetic oligonucleotide
  Antisense strand to SEQ ID NO: 1307082
uauuccauacaccuaucac

SEQ ID NO: 1307084 - RNA, 19 nt, Artificial Sequence
  Description of Artificial Sequence: Synthetic oligonucleotide
  Sense strand starting at position 1029 of SEQ ID NO: 1241883
aaaucauagguaggucuua

SEQ ID NO: 1307085 - RNA, 19 nt, Artificial Sequence
  Description of Artificial Sequence: Synthetic oligonucleotide
  Antisense strand to SEQ ID NO: 1307084
uaagaccuaccuaugauuu

SEQ ID NO: 1307086 - RNA, 19 nt, Artificial Sequence
  Description of Artificial Sequence: Synthetic oligonucleotide
  Sense strand starting at position 1099 of SEQ ID NO: 1241883
ggccuauugcuagcucagu

SEQ ID NO: 1307087 - RNA, 19 nt, Artificial Sequence
  Description of Artificial Sequence: Synthetic oligonucleotide
  Antisense strand to SEQ ID NO: 1307086
acugagcuagcaauaggcc

SEQ ID NO: 1307088 - RNA, 19 nt, Artificial Sequence
  Description of Artificial Sequence: Synthetic oligonucleotide
  Sense strand starting at position 1114 of SEQ ID NO: 1241883
caguauuggugacugugaa

SEQ ID NO: 1307089 - RNA, 19 nt, Artificial Sequence
  Description of Artificial Sequence: Synthetic oligonucleotide
  Antisense strand to SEQ ID NO: 1307088
uucacagucaccaauacug

SEQ ID NO: 1307090 - RNA, 19 nt, Artificial Sequence
  Description of Artificial Sequence: Synthetic oligonucleotide
  Sense strand starting at position 1115 of SEQ ID NO: 1241883
aguauuggugacugugaaa

SEQ ID NO: 1307091 - RNA, 19 nt, Artificial Sequence
  Description of Artificial Sequence: Synthetic oligonucleotide
  Antisense strand to SEQ ID NO: 1307090
uuucacagucaccaauacu

SEQ ID NO: 1307092 - RNA, 19 nt, Artificial Sequence
  Description of Artificial Sequence: Synthetic oligonucleotide
  Sense strand starting at position 1224 of SEQ ID NO: 1241883
uaaugaguuugaguaugca

SEQ ID NO: 1307093 - RNA, 19 nt, Artificial Sequence
  Description of Artificial Sequence: Synthetic oligonucleotide
  Antisense strand to SEQ ID NO: 1307092
ugcauacucaaacucauua

SEQ ID NO: 1307094 - RNA, 19 nt, Artificial Sequence
  Description of Artificial Sequence: Synthetic oligonucleotide
  Sense strand starting at position 1558 of SEQ ID NO: 1241883
gccauacugcaaugggauu

SEQ ID NO: 1307095 - RNA, 19 nt, Artificial Sequence
  Description of Artificial Sequence: Synthetic oligonucleotide
  Antisense strand to SEQ ID NO: 1307094
aaucccauugcaguauggc

SEQ ID NO: 1307096 - RNA, 19 nt, Artificial Sequence
  Description of Artificial Sequence: Synthetic oligonucleotide
  Sense strand starting at position 1706 of SEQ ID NO: 1241883
auaagaagcaugugacaag

SEQ ID NO: 1307097 - RNA, 19 nt, Artificial Sequence
  Description of Artificial Sequence: Synthetic oligonucleotide
  Antisense strand to SEQ ID NO: 1307096
cuugucacaugcuucuuau

SEQ ID NO: 1307098 - RNA, 19 nt, Artificial Sequence
  Description of Artificial Sequence: Synthetic oligonucleotide
  Sense strand starting at position 2507 of SEQ ID NO: 1241883
gcgcuuugcaguuuccaga

SEQ ID NO: 1307099 - RNA, 19 nt, Artificial Sequence
  Description of Artificial Sequence: Synthetic oligonucleotide
  Antisense strand to SEQ ID NO: 1307098
ucuggaaacugcaaagcgc

SEQ ID NO: 1307100 - RNA, 19 nt, Artificial Sequence
  Description of Artificial Sequence: Synthetic oligonucleotide
  Sense strand starting at position 2634 of SEQ ID NO: 1241883
cuguguggccggagucaua

SEQ ID NO: 1307101 - RNA, 19 nt, Artificial Sequence
  Description of Artificial Sequence: Synthetic oligonucleotide
  Antisense strand to SEQ ID NO: 1307100
uaugacuccggccacacag

SEQ ID NO: 1307102 - RNA, 19 nt, Artificial Sequence
  Description of Artificial Sequence: Synthetic oligonucleotide
  Sense strand starting at position 2828 of SEQ ID NO: 1241883
gugaaaucccaguaccgca

SEQ ID NO: 1307103 - RNA, 19 nt, Artificial Sequence
  Description of Artificial Sequence: Synthetic oligonucleotide
  Antisense strand to SEQ ID NO: 1307102
ugcgguacugggauuucac

SEQ ID NO: 1307104 - RNA, 19 nt, Artificial Sequence
  Description of Artificial Sequence: Synthetic oligonucleotide
  Sense strand starting at position 2877 of SEQ ID NO: 1241883
uguguuauccgugcuugau

SEQ ID NO: 1307105 - RNA, 19 nt, Artificial Sequence
  Description of Artificial Sequence: Synthetic oligonucleotide
  Antisense strand to SEQ ID NO: 1307104
aucaagcacggauaacaca

SEQ ID NO: 1307106 - RNA, 19 nt, Artificial Sequence
  Description of Artificial Sequence: Synthetic oligonucleotide
  Sense strand starting at position 2878 of SEQ ID NO: 1241883
guguuauccgugcuugaug

SEQ ID NO: 1307107 - RNA, 19 nt, Artificial Sequence
  Description of Artificial Sequence: Synthetic oligonucleotide
  Antisense strand to SEQ ID NO: 1307106
caucaagcacggauaacac

SEQ ID NO: 1307108 - RNA, 19 nt, Artificial Sequence
  Description of Artificial Sequence: Synthetic oligonucleotide
  Sense strand starting at position 3019 of SEQ ID NO: 1241883
cacagauauucucuguggu

SEQ ID NO: 1307109 - RNA, 19 nt, Artificial Sequence
  Description of Artificial Sequence: Synthetic oligonucleotide
  Antisense strand to SEQ ID NO: 1307108
accacagagaauaucugug

SEQ ID NO: 1307110 - RNA, 19 nt, Artificial Sequence
  Description of Artificial Sequence: Synthetic oligonucleotide
  Sense strand starting at position 3020 of SEQ ID NO: 1241883
acagauauucucugugguu

SEQ ID NO: 1307111 - RNA, 19 nt, Artificial Sequence
  Description of Artificial Sequence: Synthetic oligonucleotide
  Antisense strand to SEQ ID NO: 1307110
aaccacagagaauaucugu

SEQ ID NO: 1307112 - RNA, 19 nt, Artificial Sequence
  Description of Artificial Sequence: Synthetic oligonucleotide
  Sense strand starting at position 3021 of SEQ ID NO: 1241883
cagauauucucugugguua

SEQ ID NO: 1307113 - RNA, 19 nt, Artificial Sequence
  Description of Artificial Sequence: Synthetic oligonucleotide
  Antisense strand to SEQ ID NO: 1307112
uaaccacagagaauaucug

SEQ ID NO: 1307114 - RNA, 19 nt, Artificial Sequence
  Description of Artificial Sequence: Synthetic oligonucleotide
  Sense strand starting at position 3022 of SEQ ID NO: 1241883
agauauucucugugguuaa

SEQ ID NO: 1307115 - RNA, 19 nt, Artificial Sequence
  Description of Artificial Sequence: Synthetic oligonucleotide
  Antisense strand to SEQ ID NO: 1307114
uuaaccacagagaauaucu

SEQ ID NO: 1307116 - RNA, 19 nt, Artificial Sequence
  Description of Artificial Sequence: Synthetic oligonucleotide
  Sense strand starting at position 3065 of SEQ ID NO: 1241883
guacuacucuaauuaaugu

SEQ ID NO: 1307117 - RNA, 19 nt, Artificial Sequence
  Description of Artificial Sequence: Synthetic oligonucleotide
  Antisense strand to SEQ ID NO: 1307116
acauuaauuagaguaguac

SEQ ID NO: 1307118 - RNA, 19 nt, Artificial Sequence
  Description of Artificial Sequence: Synthetic oligonucleotide
  Sense strand starting at position 3137 of SEQ ID NO: 1241883
gcuuauuaucguuugucuu

SEQ ID NO: 1307119 - RNA, 19 nt, Artificial Sequence
  Description of Artificial Sequence: Synthetic oligonucleotide
  Antisense strand to SEQ ID NO: 1307118
aagacaaacgauaauaagc

SEQ ID NO: 1307120 - RNA, 19 nt, Artificial Sequence
  Description of Artificial Sequence: Synthetic oligonucleotide
  Sense strand starting at position 3147 of SEQ ID NO: 1241883
guuugucuucuccaccaau

SEQ ID NO: 1307121 - RNA, 19 nt, Artificial Sequence
  Description of Artificial Sequence: Synthetic oligonucleotide
  Antisense strand to SEQ ID NO: 1307120
auugguggagaagacaaac

SEQ ID NO: 1307122 - RNA, 19 nt, Artificial Sequence
  Description of Artificial Sequence: Synthetic oligonucleotide
  Sense strand starting at position 3232 of SEQ ID NO: 1241883
augggaaacccuuguuucu

SEQ ID NO: 1307123 - RNA, 19 nt, Artificial Sequence
  Description of Artificial Sequence: Synthetic oligonucleotide
  Antisense strand to SEQ ID NO: 1307122
agaaacaaggguuucccau

SEQ ID NO: 1307124 - RNA, 19 nt, Artificial Sequence
  Description of Artificial Sequence: Synthetic oligonucleotide
  Sense strand starting at position 3234 of SEQ ID NO: 1241883
gggaaacccuuguuucuag

SEQ ID NO: 1307125 - RNA, 19 nt, Artificial Sequence
  Description of Artificial Sequence: Synthetic oligonucleotide
  Antisense strand to SEQ ID NO: 1307124
cuagaaacaaggguuuccc

SEQ ID NO: 1307126 - RNA, 19 nt, Artificial Sequence
  Description of Artificial Sequence: Synthetic oligonucleotide
  Sense strand starting at position 3258 of SEQ ID NO: 1241883
ggaguuucagaauggcuuu

SEQ ID NO: 1307127 - RNA, 19 nt, Artificial Sequence
  Description of Artificial Sequence: Synthetic oligonucleotide
  Antisense strand to SEQ ID NO: 1307126
aaagccauucugaaacucc

SEQ ID NO: 1307128 - RNA, 19 nt, Artificial Sequence
  Description of Artificial Sequence: Synthetic oligonucleotide
  Sense strand starting at position 3469 of SEQ ID NO: 1241883
ggacuaccuucccuggauu

SEQ ID NO: 1307129 - RNA, 19 nt, Artificial Sequence
  Description of Artificial Sequence: Synthetic oligonucleotide
  Antisense strand to SEQ ID NO: 1307128
aauccagggaagguagucc

SEQ ID NO: 1307130 - RNA, 19 nt, Artificial Sequence
  Description of Artificial Sequence: Synthetic oligonucleotide
  Sense strand starting at position 3481 of SEQ ID NO: 1241883
cuggauuauacgggaauau

SEQ ID NO: 1307131 - RNA, 19 nt, Artificial Sequence
  Description of Artificial Sequence: Synthetic oligonucleotide
  Antisense strand to SEQ ID NO: 1307130
auauucccguauaauccag

SEQ ID NO: 1307132 - RNA, 19 nt, Artificial Sequence
  Description of Artificial Sequence: Synthetic oligonucleotide
  Sense strand starting at position 3496 of SEQ ID NO: 1241883
auaucuauacagggaguau

SEQ ID NO: 1307133 - RNA, 19 nt, Artificial Sequence
  Description of Artificial Sequence: Synthetic oligonucleotide
  Antisense strand to SEQ ID NO: 1307132
auacucccuguauagauau

SEQ ID NO: 1307134 - RNA, 19 nt, Artificial Sequence
  Description of Artificial Sequence: Synthetic oligonucleotide
  Sense strand starting at position 3635 of SEQ ID NO: 1241883
augauacuuguggaagcua

SEQ ID NO: 1307135 - RNA, 19 nt, Artificial Sequence
  Description of Artificial Sequence: Synthetic oligonucleotide
  Antisense strand to SEQ ID NO: 1307134
uagcuuccacaaguaucau

SEQ ID NO: 1307136 - RNA, 19 nt, Artificial Sequence
  Description of Artificial Sequence: Synthetic oligonucleotide
  Sense strand starting at position 3840 of SEQ ID NO: 1241883
cccagauuguuauccacuc

SEQ ID NO: 1307137 - RNA, 19 nt, Artificial Sequence
  Description of Artificial Sequence: Synthetic oligonucleotide
  Antisense strand to SEQ ID NO: 1307136
gaguggauaacaaucuggg

SEQ ID NO: 1307138 - RNA, 19 nt, Artificial Sequence
  Description of Artificial Sequence: Synthetic oligonucleotide
  Sense strand starting at position 3873 of SEQ ID NO: 1241883
guagaacucuacuuaagau

SEQ ID NO: 1307139 - RNA, 19 nt, Artificial Sequence
  Description of Artificial Sequence: Synthetic oligonucleotide
  Antisense strand to SEQ ID NO: 1307138
aucuuaaguagaguucuac

SEQ ID NO: 1307140 - RNA, 19 nt, Artificial Sequence
  Description of Artificial Sequence: Synthetic oligonucleotide
  Sense strand starting at position 3938 of SEQ ID NO: 1241883
cucagaguacgacaaguau

SEQ ID NO: 1307141 - RNA, 19 nt, Artificial Sequence
  Description of Artificial Sequence: Synthetic oligonucleotide
  Antisense strand to SEQ ID NO: 1307140
auacuugucguacucugag

SEQ ID NO: 1307142 - RNA, 19 nt, Artificial Sequence
  Description of Artificial Sequence: Synthetic oligonucleotide
  Sense strand starting at position 169 of SEQ ID NO: 1241884
ugagcacuuugacuagacu

SEQ ID NO: 1307143 - RNA, 19 nt, Artificial Sequence
  Description of Artificial Sequence: Synthetic oligonucleotide
  Antisense strand to SEQ ID NO: 1307142
agucuagucaaagugcuca

SEQ ID NO: 1307144 - RNA, 19 nt, Artificial Sequence
  Description of Artificial Sequence: Synthetic oligonucleotide
  Sense strand starting at position 456 of SEQ ID NO: 1241884
ugaucuagcccauguaaag

SEQ ID NO: 1307145 - RNA, 19 nt, Artificial Sequence
  Description of Artificial Sequence: Synthetic oligonucleotide
  Antisense strand to SEQ ID NO: 1307144
cuuuacaugggcuagauca

SEQ ID NO: 1307146 - RNA, 19 nt, Artificial Sequence
  Description of Artificial Sequence: Synthetic oligonucleotide
  Sense strand starting at position 475 of SEQ ID NO: 1241884
cgucuaguuagugcucagu

SEQ ID NO: 1307147 - RNA, 19 nt, Artificial Sequence
  Description of Artificial Sequence: Synthetic oligonucleotide
  Antisense strand to SEQ ID NO: 1307146
acugagcacuaacuagacg

SEQ ID NO: 1307148 - RNA, 19 nt, Artificial Sequence
  Description of Artificial Sequence: Synthetic oligonucleotide
  Sense strand starting at position 478 of SEQ ID NO: 1241884
cuaguuagugcucagugaa

SEQ ID NO: 1307149 - RNA, 19 nt, Artificial Sequence
  Description of Artificial Sequence: Synthetic oligonucleotide
  Antisense strand to SEQ ID NO: 1307148
uucacugagcacuaacuag

SEQ ID NO: 1307150 - RNA, 19 nt, Artificial Sequence
  Description of Artificial Sequence: Synthetic oligonucleotide
  Sense strand starting at position 716 of SEQ ID NO: 1241884
gaggaugugucuguggaaa

SEQ ID NO: 1307151 - RNA, 19 nt, Artificial Sequence
  Description of Artificial Sequence: Synthetic oligonucleotide
  Antisense strand to SEQ ID NO: 1307150
uuuccacagacacauccuc

SEQ ID NO: 1307152 - RNA, 19 nt, Artificial Sequence
  Description of Artificial Sequence: Synthetic oligonucleotide
  Sense strand starting at position 845 of SEQ ID NO: 1241884
uaguuucuugccuggagaa

SEQ ID NO: 1307153 - RNA, 19 nt, Artificial Sequence
  Description of Artificial Sequence: Synthetic oligonucleotide
  Antisense strand to SEQ ID NO: 1307152
uucuccaggcaagaaacua

SEQ ID NO: 1307154 - RNA, 19 nt, Artificial Sequence
  Description of Artificial Sequence: Synthetic oligonucleotide
  Sense strand starting at position 846 of SEQ ID NO: 1241884
aguuucuugccuggagaac

SEQ ID NO: 1307155 - RNA, 19 nt, Artificial Sequence
  Description of Artificial Sequence: Synthetic oligonucleotide
  Antisense strand to SEQ ID NO: 1307154
guucuccaggcaagaaacu

SEQ ID NO: 1307156 - RNA, 19 nt, Artificial Sequence
  Description of Artificial Sequence: Synthetic oligonucleotide
  Sense strand starting at position 1015 of SEQ ID NO: 1241884
uugacauugcuauacaggu

SEQ ID NO: 1307157 - RNA, 19 nt, Artificial Sequence
  Description of Artificial Sequence: Synthetic oligonucleotide
  Antisense strand to SEQ ID NO: 1307156
accuguauagcaaugucaa

SEQ ID NO: 1307158 - RNA, 19 nt, Artificial Sequence
  Description of Artificial Sequence: Synthetic oligonucleotide
  Sense strand starting at position 1032 of SEQ ID NO: 1241884
gugugcucugggucuguau

SEQ ID NO: 1307159 - RNA, 19 nt, Artificial Sequence
  Description of Artificial Sequence: Synthetic oligonucleotide
  Antisense strand to SEQ ID NO: 1307158
auacagacccagagcacac

SEQ ID NO: 1307160 - RNA, 19 nt, Artificial Sequence
  Description of Artificial Sequence: Synthetic oligonucleotide
  Sense strand starting at position 1093 of SEQ ID NO: 1241884
ugaggagucugggcuauag

SEQ ID NO: 1307161 - RNA, 19 nt, Artificial Sequence
  Description of Artificial Sequence: Synthetic oligonucleotide
  Antisense strand to SEQ ID NO: 1307160
cuauagcccagacuccuca

SEQ ID NO: 1307162 - RNA, 19 nt, Artificial Sequence
  Description of Artificial Sequence: Synthetic oligonucleotide
  Sense strand starting at position 1146 of SEQ ID NO: 1241884
gcaggcucaccuuaugaca

SEQ ID NO: 1307163 - RNA, 19 nt, Artificial Sequence
  Description of Artificial Sequence: Synthetic oligonucleotide
  Antisense strand to SEQ ID NO: 1307162
ugucauaaggugagccugc

SEQ ID NO: 1307164 - RNA, 19 nt, Artificial Sequence
  Description of Artificial Sequence: Synthetic oligonucleotide
  Sense strand starting at position 2122 of SEQ ID NO: 1241884
ucaugaaauucucugagug

SEQ ID NO: 1307165 - RNA, 19 nt, Artificial Sequence
  Description of Artificial Sequence: Synthetic oligonucleotide
  Antisense strand to SEQ ID NO: 1307164
cacucagagaauuucauga

SEQ ID NO: 1307166 - RNA, 19 nt, Artificial Sequence
  Description of Artificial Sequence: Synthetic oligonucleotide
  Sense strand starting at position 2123 of SEQ ID NO: 1241884
caugaaauucucugagugg

SEQ ID NO: 1307167 - RNA, 19 nt, Artificial Sequence
  Description of Artificial Sequence: Synthetic oligonucleotide
  Antisense strand to SEQ ID NO: 1307166
ccacucagagaauuucaug

SEQ ID NO: 1307168 - RNA, 19 nt, Artificial Sequence
  Description of Artificial Sequence: Synthetic oligonucleotide
  Sense strand starting at position 2129 of SEQ ID NO: 1241884
auucucugagugggucaaa

SEQ ID NO: 1307169 - RNA, 19 nt, Artificial Sequence
  Description of Artificial Sequence: Synthetic oligonucleotide
  Antisense strand to SEQ ID NO: 1307168
uuugacccacucagagaau

SEQ ID NO: 1307170 - RNA, 19 nt, Artificial Sequence
  Description of Artificial Sequence: Synthetic oligonucleotide
  Sense strand starting at position 2130 of SEQ ID NO: 1241884
uucucugagugggucaaau

SEQ ID NO: 1307171 - RNA, 19 nt, Artificial Sequence
  Description of Artificial Sequence: Synthetic oligonucleotide
  Antisense strand to SEQ ID NO: 1307170
auuugacccacucagagaa

SEQ ID NO: 1307172 - RNA, 19 nt, Artificial Sequence
  Description of Artificial Sequence: Synthetic oligonucleotide
  Sense strand starting at position 2227 of SEQ ID NO: 1241884
aagugucauccuugggaaa

SEQ ID NO: 1307173 - RNA, 19 nt, Artificial Sequence
  Description of Artificial Sequence: Synthetic oligonucleotide
  Antisense strand to SEQ ID NO: 1307172
uuucccaaggaugacacuu

SEQ ID NO: 1307174 - RNA, 19 nt, Artificial Sequence
  Description of Artificial Sequence: Synthetic oligonucleotide
  Sense strand starting at position 2228 of SEQ ID NO: 1241884
agugucauccuugggaaau

SEQ ID NO: 1307175 - RNA, 19 nt, Artificial Sequence
  Description of Artificial Sequence: Synthetic oligonucleotide
  Antisense strand to SEQ ID NO: 1307174
auuucccaaggaugacacu

SEQ ID NO: 1307176 - RNA, 19 nt, Artificial Sequence
  Description of Artificial Sequence: Synthetic oligonucleotide
  Sense strand starting at position 2267 of SEQ ID NO: 1241884
cugagagcaccagggauau

SEQ ID NO: 1307177 - RNA, 19 nt, Artificial Sequence
  Description of Artificial Sequence: Synthetic oligonucleotide
  Antisense strand to SEQ ID NO: 1307176
auaucccuggugcucucag

SEQ ID NO: 1307178 - RNA, 19 nt, Artificial Sequence
  Description of Artificial Sequence: Synthetic oligonucleotide
  Sense strand starting at position 2316 of SEQ ID NO: 1241884
caggcagagucaucaacaa

SEQ ID NO: 1307179 - RNA, 19 nt, Artificial Sequence
  Description of Artificial Sequence: Synthetic oligonucleotide
  Antisense strand to SEQ ID NO: 1307178
uuguugaugacucugccug

SEQ ID NO: 1307180 - RNA, 19 nt, Artificial Sequence
  Description of Artificial Sequence: Synthetic oligonucleotide
  Sense strand starting at position 2430 of SEQ ID NO: 1241884
auaaacuagugagcagaua

SEQ ID NO: 1307181 - RNA, 19 nt, Artificial Sequence
  Description of Artificial Sequence: Synthetic oligonucleotide
  Antisense strand to SEQ ID NO: 1307180
uaucugcucacuaguuuau

SEQ ID NO: 1307182 - RNA, 19 nt, Artificial Sequence
  Description of Artificial Sequence: Synthetic oligonucleotide
  Sense strand starting at position 2469 of SEQ ID NO: 1241884
gaccgugagccaggaagau

SEQ ID NO: 1307183 - RNA, 19 nt, Artificial Sequence
  Description of Artificial Sequence: Synthetic oligonucleotide
  Antisense strand to SEQ ID NO: 1307182
aucuuccuggcucacgguc

SEQ ID NO: 1307184 - RNA, 19 nt, Artificial Sequence
  Description of Artificial Sequence: Synthetic oligonucleotide
  Sense strand starting at position 2478 of SEQ ID NO: 1241884
ccaggaagauguccgugau

SEQ ID NO: 1307185 - RNA, 19 nt, Artificial Sequence
  Description of Artificial Sequence: Synthetic oligonucleotide
  Antisense strand to SEQ ID NO: 1307184
aucacggacaucuuccugg

SEQ ID NO: 1307186 - RNA, 19 nt, Artificial Sequence
  Description of Artificial Sequence: Synthetic oligonucleotide
  Sense strand starting at position 2479 of SEQ ID NO: 1241884
caggaagauguccgugauc

SEQ ID NO: 1307187 - RNA, 19 nt, Artificial Sequence
  Description of Artificial Sequence: Synthetic oligonucleotide
  Antisense strand to SEQ ID NO: 1307186
gaucacggacaucuuccug

SEQ ID NO: 1307188 - RNA, 19 nt, Artificial Sequence
  Description of Artificial Sequence: Synthetic oligonucleotide
  Sense strand starting at position 2481 of SEQ ID NO: 1241884
ggaagauguccgugaucag

SEQ ID NO: 1307189 - RNA, 19 nt, Artificial Sequence
  Description of Artificial Sequence: Synthetic oligonucleotide
  Antisense strand to SEQ ID NO: 1307188
cugaucacggacaucuucc

SEQ ID NO: 1307190 - RNA, 19 nt, Artificial Sequence
  Description of Artificial Sequence: Synthetic oligonucleotide
  Sense strand starting at position 2482 of SEQ ID NO: 1241884
gaagauguccgugaucagc

SEQ ID NO: 1307191 - RNA, 19 nt, Artificial Sequence
  Description of Artificial Sequence: Synthetic oligonucleotide
  Antisense strand to SEQ ID NO: 1307190
gcugaucacggacaucuuc

SEQ ID NO: 1307192 - RNA, 19 nt, Artificial Sequence
  Description of Artificial Sequence: Synthetic oligonucleotide
  Sense strand starting at position 2625 of SEQ ID NO: 1241884
uaaugugucguguaauaga

SEQ ID NO: 1307193 - RNA, 19 nt, Artificial Sequence
  Description of Artificial Sequence: Synthetic oligonucleotide
  Antisense strand to SEQ ID NO: 1307192
ucuauuacacgacacauua

SEQ ID NO: 1307194 - RNA, 19 nt, Artificial Sequence
  Description of Artificial Sequence: Synthetic oligonucleotide
  Sense strand starting at position 2630 of SEQ ID NO: 1241884
ugucguguaauagaaagua

SEQ ID NO: 1307195 - RNA, 19 nt, Artificial Sequence
  Description of Artificial Sequence: Synthetic oligonucleotide
  Antisense strand to SEQ ID NO: 1307194
uacuuucuauuacacgaca

SEQ ID NO: 1307196 - RNA, 19 nt, Artificial Sequence
  Description of Artificial Sequence: Synthetic oligonucleotide
  Sense strand starting at position 2839 of SEQ ID NO: 1241884
augguaagaugcuuggaau

SEQ ID NO: 1307197 - RNA, 19 nt, Artificial Sequence
  Description of Artificial Sequence: Synthetic oligonucleotide
  Antisense strand to SEQ ID NO: 1307196
auuccaagcaucuuaccau

SEQ ID NO: 1307198 - RNA, 19 nt, Artificial Sequence
  Description of Artificial Sequence: Synthetic oligonucleotide
  Sense strand starting at position 2840 of SEQ ID NO: 1241884
ugguaagaugcuuggaauu

SEQ ID NO: 1307199 - RNA, 19 nt, Artificial Sequence
  Description of Artificial Sequence: Synthetic oligonucleotide
  Antisense strand to SEQ ID NO: 1307198
aauuccaagcaucuuacca

SEQ ID NO: 1307200 - RNA, 19 nt, Artificial Sequence
  Description of Artificial Sequence: Synthetic oligonucleotide
  Sense strand starting at position 3064 of SEQ ID NO: 1241884
guaggugucuucuccauuu

SEQ ID NO: 1307201 - RNA, 19 nt, Artificial Sequence
  Description of Artificial Sequence: Synthetic oligonucleotide
  Antisense strand to SEQ ID NO: 1307200
aaauggagaagacaccuac

SEQ ID NO: 1307202 - RNA, 19 nt, Artificial Sequence
  Description of Artificial Sequence: Synthetic oligonucleotide
  Sense strand starting at position 3237 of SEQ ID NO: 1241884
uguuauuacagugaguuau

SEQ ID NO: 1307203 - RNA, 19 nt, Artificial Sequence
  Description of Artificial Sequence: Synthetic oligonucleotide
  Antisense strand to SEQ ID NO: 1307202
auaacucacuguaauaaca

SEQ ID NO: 1307204 - RNA, 19 nt, Artificial Sequence
  Description of Artificial Sequence: Synthetic oligonucleotide
  Sense strand starting at position 3276 of SEQ ID NO: 1241884
cuggaaugagaaugcagua

SEQ ID NO: 1307205 - RNA, 19 nt, Artificial Sequence
  Description of Artificial Sequence: Synthetic oligonucleotide
  Antisense strand to SEQ ID NO: 1307204
uacugcauucucauuccag

SEQ ID NO: 1307206 - RNA, 19 nt, Artificial Sequence
  Description of Artificial Sequence: Synthetic oligonucleotide
  Sense strand starting at position 3311 of SEQ ID NO: 1241884
aguggucuucccuggaaca

SEQ ID NO: 1307207 - RNA, 19 nt, Artificial Sequence
  Description of Artificial Sequence: Synthetic oligonucleotide
  Antisense strand to SEQ ID NO: 1307206
uguuccagggaagaccacu

SEQ ID NO: 1307208 - RNA, 19 nt, Artificial Sequence
  Description of Artificial Sequence: Synthetic oligonucleotide
  Sense strand starting at position 3313 of SEQ ID NO: 1241884
uggucuucccuggaacaca

SEQ ID NO: 1307209 - RNA, 19 nt, Artificial Sequence
  Description of Artificial Sequence: Synthetic oligonucleotide
  Antisense strand to SEQ ID NO: 1307208
uguguuccagggaagacca

SEQ ID NO: 1307210 - RNA, 19 nt, Artificial Sequence
  Description of Artificial Sequence: Synthetic oligonucleotide
  Sense strand starting at position 3679 of SEQ ID NO: 1241884
uguugucaugacuggagaa

SEQ ID NO: 1307211 - RNA, 19 nt, Artificial Sequence
  Description of Artificial Sequence: Synthetic oligonucleotide
  Antisense strand to SEQ ID NO: 1307210
uucuccagucaugacaaca

SEQ ID NO: 1307212 - RNA, 19 nt, Artificial Sequence
  Description of Artificial Sequence: Synthetic oligonucleotide
  Sense strand starting at position 3680 of SEQ ID NO: 1241884
guugucaugacuggagaac

SEQ ID NO: 1307213 - RNA, 19 nt, Artificial Sequence
  Description of Artificial Sequence: Synthetic oligonucleotide
  Antisense strand to SEQ ID NO: 1307212
guucuccagucaugacaac

SEQ ID NO: 1307214 - RNA, 19 nt, Artificial Sequence
  Description of Artificial Sequence: Synthetic oligonucleotide
  Sense strand starting at position 3904 of SEQ ID NO: 1241884
gauggcucaguggacuaua

SEQ ID NO: 1307215 - RNA, 19 nt, Artificial Sequence
  Description of Artificial Sequence: Synthetic oligonucleotide
  Antisense strand to SEQ ID NO: 1307214
uauaguccacugagccauc

SEQ ID NO: 1307216 - RNA, 19 nt, Artificial Sequence
  Description of Artificial Sequence: Synthetic oligonucleotide
  Sense strand starting at position 3907 of SEQ ID NO: 1241884
ggcucaguggacuauauau

SEQ ID NO: 1307217 - RNA, 19 nt, Artificial Sequence
  Description of Artificial Sequence: Synthetic oligonucleotide
  Antisense strand to SEQ ID NO: 1307216
auauauaguccacugagcc

SEQ ID NO: 1307218 - RNA, 19 nt, Artificial Sequence
  Description of Artificial Sequence: Synthetic oligonucleotide
  Sense strand starting at position 3923 of SEQ ID NO: 1241884
uauggaaauugcccuguca

SEQ ID NO: 1307219 - RNA, 19 nt, Artificial Sequence
  Description of Artificial Sequence: Synthetic oligonucleotide
  Antisense strand to SEQ ID NO: 1307218
ugacagggcaauuuccaua

SEQ ID NO: 1307220 - RNA, 19 nt, Artificial Sequence
  Description of Artificial Sequence: Synthetic oligonucleotide
  Sense strand starting at position 3939 of SEQ ID NO: 1241884
ucaccuggauugcuaagaa

SEQ ID NO: 1307221 - RNA, 19 nt, Artificial Sequence
  Description of Artificial Sequence: Synthetic oligonucleotide
  Antisense strand to SEQ ID NO: 1307220
uucuuagcaauccagguga

SEQ ID NO: 1307222 - RNA, 19 nt, Artificial Sequence
  Description of Artificial Sequence: Synthetic oligonucleotide
  Sense strand starting at position 6 of SEQ ID NO: 1241885
ggaggaaccuugucaggcu

SEQ ID NO: 1307223 - RNA, 19 nt, Artificial Sequence
  Description of Artificial Sequence: Synthetic oligonucleotide
  Antisense strand to SEQ ID NO: 1307222
agccugacaagguuccucc

SEQ ID NO: 1307224 - RNA, 19 nt, Artificial Sequence
  Description of Artificial Sequence: Synthetic oligonucleotide
  Sense strand starting at position 76 of SEQ ID NO: 1241885
gaaccagagccucagucuu

SEQ ID NO: 1307225 - RNA, 19 nt, Artificial Sequence
  Description of Artificial Sequence: Synthetic oligonucleotide
  Antisense strand to SEQ ID NO: 1307224
aagacugaggcucugguuc

SEQ ID NO: 1307226 - RNA, 19 nt, Artificial Sequence
  Description of Artificial Sequence: Synthetic oligonucleotide
  Sense strand starting at position 176 of SEQ ID NO: 1241885
guaagcuauuaagugauua

SEQ ID NO: 1307227 - RNA, 19 nt, Artificial Sequence
  Description of Artificial Sequence: Synthetic oligonucleotide
  Antisense strand to SEQ ID NO: 1307226
uaaucacuuaauagcuuac

SEQ ID NO: 1307228 - RNA, 19 nt, Artificial Sequence
  Description of Artificial Sequence: Synthetic oligonucleotide
  Sense strand starting at position 180 of SEQ ID NO: 1241885
gcuauuaagugauuacuaa

SEQ ID NO: 1307229 - RNA, 19 nt, Artificial Sequence
  Description of Artificial Sequence: Synthetic oligonucleotide
  Antisense strand to SEQ ID NO: 1307228
uuaguaaucacuuaauagc

SEQ ID NO: 1307230 - RNA, 19 nt, Artificial Sequence
  Description of Artificial Sequence: Synthetic oligonucleotide
  Sense strand starting at position 231 of SEQ ID NO: 1241885
augugaggguagguaucua

SEQ ID NO: 1307231 - RNA, 19 nt, Artificial Sequence
  Description of Artificial Sequence: Synthetic oligonucleotide
  Antisense strand to SEQ ID NO: 1307230
uagauaccuacccucacau

SEQ ID NO: 1307232 - RNA, 19 nt, Artificial Sequence
  Description of Artificial Sequence: Synthetic oligonucleotide
  Sense strand starting at position 235 of SEQ ID NO: 1241885
gaggguagguaucuaagcu

SEQ ID NO: 1307233 - RNA, 19 nt, Artificial Sequence
  Description of Artificial Sequence: Synthetic oligonucleotide
  Antisense strand to SEQ ID NO: 1307232
agcuuagauaccuacccuc

SEQ ID NO: 1307234 - RNA, 19 nt, Artificial Sequence
  Description of Artificial Sequence: Synthetic oligonucleotide
  Sense strand starting at position 243 of SEQ ID NO: 1241885
guaucuaagcugcaauaaa

SEQ ID NO: 1307235 - RNA, 19 nt, Artificial Sequence
  Description of Artificial Sequence: Synthetic oligonucleotide
  Antisense strand to SEQ ID NO: 1307234
uuuauugcagcuuagauac

SEQ ID NO: 1307236 - RNA, 19 nt, Artificial Sequence
  Description of Artificial Sequence: Synthetic oligonucleotide
  Sense strand starting at position 315 of SEQ ID NO: 1241885
auauccagguggucauuaa

SEQ ID NO: 1307237 - RNA, 19 nt, Artificial Sequence
  Description of Artificial Sequence: Synthetic oligonucleotide
  Antisense strand to SEQ ID NO: 1307236
uuaaugaccaccuggauau

SEQ ID NO: 1307238 - RNA, 19 nt, Artificial Sequence
  Description of Artificial Sequence: Synthetic oligonucleotide
  Sense strand starting at position 324 of SEQ ID NO: 1241885
uggucauuaacccgaggaa

SEQ ID NO: 1307239 - RNA, 19 nt, Artificial Sequence
  Description of Artificial Sequence: Synthetic oligonucleotide
  Antisense strand to SEQ ID NO: 1307238
uuccucggguuaaugacca

SEQ ID NO: 1307240 - RNA, 19 nt, Artificial Sequence
  Description of Artificial Sequence: Synthetic oligonucleotide
  Sense strand starting at position 327 of SEQ ID NO: 1241885
ucauuaacccgaggaaaug

SEQ ID NO: 1307241 - RNA, 19 nt, Artificial Sequence
  Description of Artificial Sequence: Synthetic oligonucleotide
  Antisense strand to SEQ ID NO: 1307240
cauuuccucggguuaauga

SEQ ID NO: 1307242 - RNA, 19 nt, Artificial Sequence
  Description of Artificial Sequence: Synthetic oligonucleotide
  Sense strand starting at position 333 of SEQ ID NO: 1241885
acccgaggaaaugguuauu

SEQ ID NO: 1307243 - RNA, 19 nt, Artificial Sequence
  Description of Artificial Sequence: Synthetic oligonucleotide
  Antisense strand to SEQ ID NO: 1307242
aauaaccauuuccucgggu

SEQ ID NO: 1307244 - RNA, 19 nt, Artificial Sequence
  Description of Artificial Sequence: Synthetic oligonucleotide
  Sense strand starting at position 343 of SEQ ID NO: 1241885
augguuauuacugagaggu

SEQ ID NO: 1307245 - RNA, 19 nt, Artificial Sequence
  Description of Artificial Sequence: Synthetic oligonucleotide
  Antisense strand to SEQ ID NO: 1307244
accucucaguaauaaccau

SEQ ID NO: 1307246 - RNA, 19 nt, Artificial Sequence
  Description of Artificial Sequence: Synthetic oligonucleotide
  Sense strand starting at position 373 of SEQ ID NO: 1241885
aacucagaagucugagacu

SEQ ID NO: 1307247 - RNA, 19 nt, Artificial Sequence
  Description of Artificial Sequence: Synthetic oligonucleotide
  Antisense strand to SEQ ID NO: 1307246
agucucagacuucugaguu

SEQ ID NO: 1307248 - RNA, 19 nt, Artificial Sequence
  Description of Artificial Sequence: Synthetic oligonucleotide
  Sense strand starting at position 382 of SEQ ID NO: 1241885
gucugagacuaguccaaga

SEQ ID NO: 1307249 - RNA, 19 nt, Artificial Sequence
  Description of Artificial Sequence: Synthetic oligonucleotide
  Antisense strand to SEQ ID NO: 1307248
ucuuggacuagucucagac

SEQ ID NO: 1307250 - RNA, 19 nt, Artificial Sequence
  Description of Artificial Sequence: Synthetic oligonucleotide
  Sense strand starting at position 532 of SEQ ID NO: 1241885
guggaauagggaugggagu

SEQ ID NO: 1307251 - RNA, 19 nt, Artificial Sequence
  Description of Artificial Sequence: Synthetic oligonucleotide
  Antisense strand to SEQ ID NO: 1307250
acucccaucccuauuccac

SEQ ID NO: 1307252 - RNA, 19 nt, Artificial Sequence
  Description of Artificial Sequence: Synthetic oligonucleotide
  Sense strand starting at position 569 of SEQ ID NO: 1241885
cuagcuggucucuauccaa

SEQ ID NO: 1307253 - RNA, 19 nt, Artificial Sequence
  Description of Artificial Sequence: Synthetic oligonucleotide
  Antisense strand to SEQ ID NO: 1307252
uuggauagagaccagcuag

SEQ ID NO: 1307254 - RNA, 19 nt, Artificial Sequence
  Description of Artificial Sequence: Synthetic oligonucleotide
  Sense strand starting at position 653 of SEQ ID NO: 1241885
ggugcacaacgugaugauu

SEQ ID NO: 1307255 - RNA, 19 nt, Artificial Sequence
  Description of Artificial Sequence: Synthetic oligonucleotide
  Antisense strand to SEQ ID NO: 1307254
aaucaucacguugugcacc

SEQ ID NO: 1307256 - RNA, 19 nt, Artificial Sequence
  Description of Artificial Sequence: Synthetic oligonucleotide
  Sense strand starting at position 770 of SEQ ID NO: 1241885
gaaaguuuguaccuuugau

SEQ ID NO: 1307257 - RNA, 19 nt, Artificial Sequence
  Description of Artificial Sequence: Synthetic oligonucleotide
  Antisense strand to SEQ ID NO: 1307256
aucaaagguacaaacuuuc

SEQ ID NO: 1307258 - RNA, 19 nt, Artificial Sequence
  Description of Artificial Sequence: Synthetic oligonucleotide
  Sense strand starting at position 1035 of SEQ ID NO: 1241885
ccauuaggcuggucucaaa

SEQ ID NO: 1307259 - RNA, 19 nt, Artificial Sequence
  Description of Artificial Sequence: Synthetic oligonucleotide
  Antisense strand to SEQ ID NO: 1307258
uuugagaccagccuaaugg

SEQ ID NO: 1307260 - RNA, 19 nt, Artificial Sequence
  Description of Artificial Sequence: Synthetic oligonucleotide
  Sense strand starting at position 1128 of SEQ ID NO: 1241885
gucuguucugccguuucua

SEQ ID NO: 1307261 - RNA, 19 nt, Artificial Sequence
  Description of Artificial Sequence: Synthetic oligonucleotide
  Antisense strand to SEQ ID NO: 1307260
uagaaacggcagaacagac

SEQ ID NO: 1307262 - RNA, 19 nt, Artificial Sequence
  Description of Artificial Sequence: Synthetic oligonucleotide
  Sense strand starting at position 1129 of SEQ ID NO: 1241885
ucuguucugccguuucuau

SEQ ID NO: 1307263 - RNA, 19 nt, Artificial Sequence
  Description of Artificial Sequence: Synthetic oligonucleotide
  Antisense strand to SEQ ID NO: 1307262
auagaaacggcagaacaga

SEQ ID NO: 1307264 - RNA, 19 nt, Artificial Sequence
  Description of Artificial Sequence: Synthetic oligonucleotide
  Sense strand starting at position 1543 of SEQ ID NO: 1241885
gcuuuaagccgaucugugu

SEQ ID NO: 1307265 - RNA, 19 nt, Artificial Sequence
  Description of Artificial Sequence: Synthetic oligonucleotide
  Antisense strand to SEQ ID NO: 1307264
acacagaucggcuuaaagc

SEQ ID NO: 1307266 - RNA, 19 nt, Artificial Sequence
  Description of Artificial Sequence: Synthetic oligonucleotide
  Sense strand starting at position 1984 of SEQ ID NO: 1241885
guuccucggcgggauuuaa

SEQ ID NO: 1307267 - RNA, 19 nt, Artificial Sequence
  Description of Artificial Sequence: Synthetic oligonucleotide
  Antisense strand to SEQ ID NO: 1307266
uuaaaucccgccgaggaac

SEQ ID NO: 1307268 - RNA, 19 nt, Artificial Sequence
  Description of Artificial Sequence: Synthetic oligonucleotide
  Sense strand starting at position 2200 of SEQ ID NO: 1241885
uauagaagauccuuuguag

SEQ ID NO: 1307269 - RNA, 19 nt, Artificial Sequence
  Description of Artificial Sequence: Synthetic oligonucleotide
  Antisense strand to SEQ ID NO: 1307268
cuacaaaggaucuucuaua

SEQ ID NO: 1307270 - RNA, 19 nt, Artificial Sequence
  Description of Artificial Sequence: Synthetic oligonucleotide
  Sense strand starting at position 2203 of SEQ ID NO: 1241885
agaagauccuuuguaggau

SEQ ID NO: 1307271 - RNA, 19 nt, Artificial Sequence
  Description of Artificial Sequence: Synthetic oligonucleotide
  Antisense strand to SEQ ID NO: 1307270
auccuacaaaggaucuucu

SEQ ID NO: 1307272 - RNA, 19 nt, Artificial Sequence
  Description of Artificial Sequence: Synthetic oligonucleotide
  Sense strand starting at position 2292 of SEQ ID NO: 1241885
cuuagaagcuguccauuau

SEQ ID NO: 1307273 - RNA, 19 nt, Artificial Sequence
  Description of Artificial Sequence: Synthetic oligonucleotide
  Antisense strand to SEQ ID NO: 1307272
auaauggacagcuucuaag

SEQ ID NO: 1307274 - RNA, 19 nt, Artificial Sequence
  Description of Artificial Sequence: Synthetic oligonucleotide
  Sense strand starting at position 2293 of SEQ ID NO: 1241885
uuagaagcuguccauuaug

SEQ ID NO: 1307275 - RNA, 19 nt, Artificial Sequence
  Description of Artificial Sequence: Synthetic oligonucleotide
  Antisense strand to SEQ ID NO: 1307274
cauaauggacagcuucuaa

SEQ ID NO: 1307276 - RNA, 19 nt, Artificial Sequence
  Description of Artificial Sequence: Synthetic oligonucleotide
  Sense strand starting at position 2333 of SEQ ID NO: 1241885
ggcugagucagguauccca

SEQ ID NO: 1307277 - RNA, 19 nt, Artificial Sequence
  Description of Artificial Sequence: Synthetic oligonucleotide
  Antisense strand to SEQ ID NO: 1307276
ugggauaccugacucagcc

SEQ ID NO: 1307278 - RNA, 19 nt, Artificial Sequence
  Description of Artificial Sequence: Synthetic oligonucleotide
  Sense strand starting at position 2340 of SEQ ID NO: 1241885
ucagguaucccagggaucu

SEQ ID NO: 1307279 - RNA, 19 nt, Artificial Sequence
  Description of Artificial Sequence: Synthetic oligonucleotide
  Antisense strand to SEQ ID NO: 1307278
agaucccugggauaccuga

SEQ ID NO: 1307280 - RNA, 19 nt, Artificial Sequence
  Description of Artificial Sequence: Synthetic oligonucleotide
  Sense strand starting at position 2389 of SEQ ID NO: 1241885
accaaagacgccuaaguuu

SEQ ID NO: 1307281 - RNA, 19 nt, Artificial Sequence
  Description of Artificial Sequence: Synthetic oligonucleotide
  Antisense strand to SEQ ID NO: 1307280
aaacuuaggcgucuuuggu

SEQ ID NO: 1307282 - RNA, 19 nt, Artificial Sequence
  Description of Artificial Sequence: Synthetic oligonucleotide
  Sense strand starting at position 2649 of SEQ ID NO: 1241885
uucuucugacccugggauu

SEQ ID NO: 1307283 - RNA, 19 nt, Artificial Sequence
  Description of Artificial Sequence: Synthetic oligonucleotide
  Antisense strand to SEQ ID NO: 1307282
aaucccagggucagaagaa

SEQ ID NO: 1307284 - RNA, 19 nt, Artificial Sequence
  Description of Artificial Sequence: Synthetic oligonucleotide
  Sense strand starting at position 2670 of SEQ ID NO: 1241885
ugaggaaucuuuguucuuu

SEQ ID NO: 1307285 - RNA, 19 nt, Artificial Sequence
  Description of Artificial Sequence: Synthetic oligonucleotide
  Antisense strand to SEQ ID NO: 1307284
aaagaacaaagauuccuca

SEQ ID NO: 1307286 - RNA, 19 nt, Artificial Sequence
  Description of Artificial Sequence: Synthetic oligonucleotide
  Sense strand starting at position 2816 of SEQ ID NO: 1241885
gcugucaauguuggaagaa

SEQ ID NO: 1307287 - RNA, 19 nt, Artificial Sequence
  Description of Artificial Sequence: Synthetic oligonucleotide
  Antisense strand to SEQ ID NO: 1307286
uucuuccaacauugacagc

SEQ ID NO: 1307288 - RNA, 19 nt, Artificial Sequence
  Description of Artificial Sequence: Synthetic oligonucleotide
  Sense strand starting at position 3579 of SEQ ID NO: 1241885
aaaguaugaugggccuaau

SEQ ID NO: 1307289 - RNA, 19 nt, Artificial Sequence
  Description of Artificial Sequence: Synthetic oligonucleotide
  Antisense strand to SEQ ID NO: 1307288
auuaggcccaucauacuuu

SEQ ID NO: 1307290 - RNA, 19 nt, Artificial Sequence
  Description of Artificial Sequence: Synthetic oligonucleotide
  Sense strand starting at position 3582 of SEQ ID NO: 1241885
guaugaugggccuaaugga

SEQ ID NO: 1307291 - RNA, 19 nt, Artificial Sequence
  Description of Artificial Sequence: Synthetic oligonucleotide
  Antisense strand to SEQ ID NO: 1307290
uccauuaggcccaucauac

SEQ ID NO: 1307292 - RNA, 19 nt, Artificial Sequence
  Description of Artificial Sequence: Synthetic oligonucleotide
  Sense strand starting at position 3589 of SEQ ID NO: 1241885
gggccuaauggaugaguca

SEQ ID NO: 1307293 - RNA, 19 nt, Artificial Sequence
  Description of Artificial Sequence: Synthetic oligonucleotide
  Antisense strand to SEQ ID NO: 1307292
ugacucauccauuaggccc

SEQ ID NO: 1307294 - RNA, 19 nt, Artificial Sequence
  Description of Artificial Sequence: Synthetic oligonucleotide
  Sense strand starting at position 3862 of SEQ ID NO: 1241885
uuucgauucuaacugauua

SEQ ID NO: 1307295 - RNA, 19 nt, Artificial Sequence
  Description of Artificial Sequence: Synthetic oligonucleotide
  Antisense strand to SEQ ID NO: 1307294
uaaucaguuagaaucgaaa

SEQ ID NO: 1307296 - RNA, 19 nt, Artificial Sequence
  Description of Artificial Sequence: Synthetic oligonucleotide
  Sense strand starting at position 3931 of SEQ ID NO: 1241885
uuaagugcucaauagcaac

SEQ ID NO: 1307297 - RNA, 19 nt, Artificial Sequence
  Description of Artificial Sequence: Synthetic oligonucleotide
  Antisense strand to SEQ ID NO: 1307296
guugcuauugagcacuuaa

SEQ ID NO: 1307298 - RNA, 19 nt, Artificial Sequence
  Description of Artificial Sequence: Synthetic oligonucleotide
  Sense strand starting at position 3952 of SEQ ID NO: 1241885
guguuuagcgacuacaaga

SEQ ID NO: 1307299 - RNA, 19 nt, Artificial Sequence
  Description of Artificial Sequence: Synthetic oligonucleotide
  Antisense strand to SEQ ID NO: 1307298
ucuuguagucgcuaaacac

SEQ ID NO: 1307300 - RNA, 19 nt, Artificial Sequence
  Description of Artificial Sequence: Synthetic oligonucleotide
  Sense strand starting at position 3981 of SEQ ID NO: 1241885
uucuuuguugcagaaaguu

SEQ ID NO: 1307301 - RNA, 19 nt, Artificial Sequence
  Description of Artificial Sequence: Synthetic oligonucleotide
  Antisense strand to SEQ ID NO: 1307300
aacuuucugcaacaaagaa

SEQ ID NO: 1307302 - RNA, 19 nt, Artificial Sequence
  Description of Artificial Sequence: Synthetic oligonucleotide
  Sense strand starting at position 32 of SEQ ID NO: 1241886
acagcaaugcugugagaag

SEQ ID NO: 1307303 - RNA, 19 nt, Artificial Sequence
  Description of Artificial Sequence: Synthetic oligonucleotide
  Antisense strand to SEQ ID NO: 1307302
cuucucacagcauugcugu

SEQ ID NO: 1307304 - RNA, 19 nt, Artificial Sequence
  Description of Artificial Sequence: Synthetic oligonucleotide
  Sense strand starting at position 96 of SEQ ID NO: 1241886
gggacacucuggguuaagu

SEQ ID NO: 1307305 - RNA, 19 nt, Artificial Sequence
  Description of Artificial Sequence: Synthetic oligonucleotide
  Antisense strand to SEQ ID NO: 1307304
acuuaacccagaguguccc

SEQ ID NO: 1307306 - RNA, 19 nt, Artificial Sequence
  Description of Artificial Sequence: Synthetic oligonucleotide
  Sense strand starting at position 216 of SEQ ID NO: 1241886
cccuuugcucuggagacuu

SEQ ID NO: 1307307 - RNA, 19 nt, Artificial Sequence
  Description of Artificial Sequence: Synthetic oligonucleotide
  Antisense strand to SEQ ID NO: 1307306
aagucuccagagcaaaggg

SEQ ID NO: 1307308 - RNA, 19 nt, Artificial Sequence
  Description of Artificial Sequence: Synthetic oligonucleotide
  Sense strand starting at position 348 of SEQ ID NO: 1241886
gugggaaugaccugaucuc

SEQ ID NO: 1307309 - RNA, 19 nt, Artificial Sequence
  Description of Artificial Sequence: Synthetic oligonucleotide
  Antisense strand to SEQ ID NO: 1307308
gagaucaggucauucccac

SEQ ID NO: 1307310 - RNA, 19 nt, Artificial Sequence
  Description of Artificial Sequence: Synthetic oligonucleotide
  Sense strand starting at position 517 of SEQ ID NO: 1241886
cucagaucauccuugagag

SEQ ID NO: 1307311 - RNA, 19 nt, Artificial Sequence
  Description of Artificial Sequence: Synthetic oligonucleotide
  Antisense strand to SEQ ID NO: 1307310
cucucaaggaugaucugag

SEQ ID NO: 1307312 - RNA, 19 nt, Artificial Sequence
  Description of Artificial Sequence: Synthetic oligonucleotide
  Sense strand starting at position 543 of SEQ ID NO: 1241886
uguugauccucucugccaa

SEQ ID NO: 1307313 - RNA, 19 nt, Artificial Sequence
  Description of Artificial Sequence: Synthetic oligonucleotide
  Antisense strand to SEQ ID NO: 1307312
uuggcagagaggaucaaca

SEQ ID NO: 1307314 - RNA, 19 nt, Artificial Sequence
  Description of Artificial Sequence: Synthetic oligonucleotide
  Sense strand starting at position 632 of SEQ ID NO: 1241886
ugccuuacgcagugggaaa

SEQ ID NO: 1307315 - RNA, 19 nt, Artificial Sequence
  Description of Artificial Sequence: Synthetic oligonucleotide
  Antisense strand to SEQ ID NO: 1307314
uuucccacugcguaaggca

SEQ ID NO: 1307316 - RNA, 19 nt, Artificial Sequence
  Description of Artificial Sequence: Synthetic oligonucleotide
  Sense strand starting at position 725 of SEQ ID NO: 1241886
gcgcgauuccugcccaauu

SEQ ID NO: 1307317 - RNA, 19 nt, Artificial Sequence
  Description of Artificial Sequence: Synthetic oligonucleotide
  Antisense strand to SEQ ID NO: 1307316
aauugggcaggaaucgcgc

SEQ ID NO: 1307318 - RNA, 19 nt, Artificial Sequence
  Description of Artificial Sequence: Synthetic oligonucleotide
  Sense strand starting at position 727 of SEQ ID NO: 1241886
gcgauuccugcccaauugu

SEQ ID NO: 1307319 - RNA, 19 nt, Artificial Sequence
  Description of Artificial Sequence: Synthetic oligonucleotide
  Antisense strand to SEQ ID NO: 1307318
acaauugggcaggaaucgc

SEQ ID NO: 1307320 - RNA, 19 nt, Artificial Sequence
  Description of Artificial Sequence: Synthetic oligonucleotide
  Sense strand starting at position 1474 of SEQ ID NO: 1241886
cccagcaauccacgugaca

SEQ ID NO: 1307321 - RNA, 19 nt, Artificial Sequence
  Description of Artificial Sequence: Synthetic oligonucleotide
  Antisense strand to SEQ ID NO: 1307320
ugucacguggauugcuggg

SEQ ID NO: 1307322 - RNA, 19 nt, Artificial Sequence
  Description of Artificial Sequence: Synthetic oligonucleotide
  Sense strand starting at position 1526 of SEQ ID NO: 1241886
guuccuucucgccagauua

SEQ ID NO: 1307323 - RNA, 19 nt, Artificial Sequence
  Description of Artificial Sequence: Synthetic oligonucleotide
  Antisense strand to SEQ ID NO: 1307322
uaaucuggcgagaaggaac

SEQ ID NO: 1307324 - RNA, 19 nt, Artificial Sequence
  Description of Artificial Sequence: Synthetic oligonucleotide
  Sense strand starting at position 1548 of SEQ ID NO: 1241886
gccuguucuccgccggaga

SEQ ID NO: 1307325 - RNA, 19 nt, Artificial Sequence
  Description of Artificial Sequence: Synthetic oligonucleotide
  Antisense strand to SEQ ID NO: 1307324
ucuccggcggagaacaggc

SEQ ID NO: 1307326 - RNA, 19 nt, Artificial Sequence
  Description of Artificial Sequence: Synthetic oligonucleotide
  Sense strand starting at position 2321 of SEQ ID NO: 1241886
guggaauucugucuuccuc

SEQ ID NO: 1307327 - RNA, 19 nt, Artificial Sequence
  Description of Artificial Sequence: Synthetic oligonucleotide
  Antisense strand to SEQ ID NO: 1307326
gaggaagacagaauuccac

SEQ ID NO: 1307328 - RNA, 19 nt, Artificial Sequence
  Description of Artificial Sequence: Synthetic oligonucleotide
  Sense strand starting at position 2476 of SEQ ID NO: 1241886
guagucaaugagggcaauu

SEQ ID NO: 1307329 - RNA, 19 nt, Artificial Sequence
  Description of Artificial Sequence: Synthetic oligonucleotide
  Antisense strand to SEQ ID NO: 1307328
aauugcccucauugacuac

SEQ ID NO: 1307330 - RNA, 19 nt, Artificial Sequence
  Description of Artificial Sequence: Synthetic oligonucleotide
  Sense strand starting at position 2514 of SEQ ID NO: 1241886
acggcaacugucugaggaa

SEQ ID NO: 1307331 - RNA, 19 nt, Artificial Sequence
  Description of Artificial Sequence: Synthetic oligonucleotide
  Antisense strand to SEQ ID NO: 1307330
uuccucagacaguugccgu

SEQ ID NO: 1307332 - RNA, 19 nt, Artificial Sequence
  Description of Artificial Sequence: Synthetic oligonucleotide
  Sense strand starting at position 2667 of SEQ ID NO: 1241886
ccaggaaugguguguugca

SEQ ID NO: 1307333 - RNA, 19 nt, Artificial Sequence
  Description of Artificial Sequence: Synthetic oligonucleotide
  Antisense strand to SEQ ID NO: 1307332
ugcaacacaccauuccugg

SEQ ID NO: 1307334 - RNA, 19 nt, Artificial Sequence
  Description of Artificial Sequence: Synthetic oligonucleotide
  Sense strand starting at position 2668 of SEQ ID NO: 1241886
caggaaugguguguugcaa

SEQ ID NO: 1307335 - RNA, 19 nt, Artificial Sequence
  Description of Artificial Sequence: Synthetic oligonucleotide
  Antisense strand to SEQ ID NO: 1307334
uugcaacacaccauuccug

SEQ ID NO: 1307336 - RNA, 19 nt, Artificial Sequence
  Description of Artificial Sequence: Synthetic oligonucleotide
  Sense strand starting at position 2722 of SEQ ID NO: 1241886
ggaccaucugacuguggau

SEQ ID NO: 1307337 - RNA, 19 nt, Artificial Sequence
  Description of Artificial Sequence: Synthetic oligonucleotide
  Antisense strand to SEQ ID NO: 1307336
auccacagucagauggucc

SEQ ID NO: 1307338 - RNA, 19 nt, Artificial Sequence
  Description of Artificial Sequence: Synthetic oligonucleotide
  Sense strand starting at position 2761 of SEQ ID NO: 1241886
acuuuaucugaaggaaucu

SEQ ID NO: 1307339 - RNA, 19 nt, Artificial Sequence
  Description of Artificial Sequence: Synthetic oligonucleotide
  Antisense strand to SEQ ID NO: 1307338
agauuccuucagauaaagu

SEQ ID NO: 1307340 - RNA, 19 nt, Artificial Sequence
  Description of Artificial Sequence: Synthetic oligonucleotide
  Sense strand starting at position 2770 of SEQ ID NO: 1241886
gaaggaaucugguccguca

SEQ ID NO: 1307341 - RNA, 19 nt, Artificial Sequence
  Description of Artificial Sequence: Synthetic oligonucleotide
  Antisense strand to SEQ ID NO: 1307340
ugacggaccagauuccuuc

SEQ ID NO: 1307342 - RNA, 19 nt, Artificial Sequence
  Description of Artificial Sequence: Synthetic oligonucleotide
  Sense strand starting at position 2772 of SEQ ID NO: 1241886
aggaaucugguccgucaaa

SEQ ID NO: 1307343 - RNA, 19 nt, Artificial Sequence
  Description of Artificial Sequence: Synthetic oligonucleotide
  Antisense strand to SEQ ID NO: 1307342
uuugacggaccagauuccu

SEQ ID NO: 1307344 - RNA, 19 nt, Artificial Sequence
  Description of Artificial Sequence: Synthetic oligonucleotide
  Sense strand starting at position 2773 of SEQ ID NO: 1241886
ggaaucugguccgucaaag

SEQ ID NO: 1307345 - RNA, 19 nt, Artificial Sequence
  Description of Artificial Sequence: Synthetic oligonucleotide
  Antisense strand to SEQ ID NO: 1307344
cuuugacggaccagauucc

SEQ ID NO: 1307346 - RNA, 19 nt, Artificial Sequence
  Description of Artificial Sequence: Synthetic oligonucleotide
  Sense strand starting at position 2910 of SEQ ID NO: 1241886
guaaguucugccugaguca

SEQ ID NO: 1307347 - RNA, 19 nt, Artificial Sequence
  Description of Artificial Sequence: Synthetic oligonucleotide
  Antisense strand to SEQ ID NO: 1307346
ugacucaggcagaacuuac

SEQ ID NO: 1307348 - RNA, 19 nt, Artificial Sequence
  Description of Artificial Sequence: Synthetic oligonucleotide
  Sense strand starting at position 3065 of SEQ ID NO: 1241886
gggagagugucacuucauu

SEQ ID NO: 1307349 - RNA, 19 nt, Artificial Sequence
  Description of Artificial Sequence: Synthetic oligonucleotide
  Antisense strand to SEQ ID NO: 1307348
aaugaagugacacucuccc

SEQ ID NO: 1307350 - RNA, 19 nt, Artificial Sequence
  Description of Artificial Sequence: Synthetic oligonucleotide
  Sense strand starting at position 3230 of SEQ ID NO: 1241886
acaccuuagcgucaggaaa

SEQ ID NO: 1307351 - RNA, 19 nt, Artificial Sequence
  Description of Artificial Sequence: Synthetic oligonucleotide
  Antisense strand to SEQ ID NO: 1307350
uuuccugacgcuaaggugu

SEQ ID NO: 1307352 - RNA, 19 nt, Artificial Sequence
  Description of Artificial Sequence: Synthetic oligonucleotide
  Sense strand starting at position 3462 of SEQ ID NO: 1241886
cagguugugugcucagaug

SEQ ID NO: 1307353 - RNA, 19 nt, Artificial Sequence
  Description of Artificial Sequence: Synthetic oligonucleotide
  Antisense strand to SEQ ID NO: 1307352
caucugagcacacaaccug

SEQ ID NO: 1307354 - RNA, 19 nt, Artificial Sequence
  Description of Artificial Sequence: Synthetic oligonucleotide
  Sense strand starting at position 3464 of SEQ ID NO: 1241886
gguugugugcucagaugug

SEQ ID NO: 1307355 - RNA, 19 nt, Artificial Sequence
  Description of Artificial Sequence: Synthetic oligonucleotide
  Antisense strand to SEQ ID NO: 1307354
cacaucugagcacacaacc

SEQ ID NO: 1307356 - RNA, 19 nt, Artificial Sequence
  Description of Artificial Sequence: Synthetic oligonucleotide
  Sense strand starting at position 3537 of SEQ ID NO: 1241886
ugagcagccaucugagaca

SEQ ID NO: 1307357 - RNA, 19 nt, Artificial Sequence
  Description of Artificial Sequence: Synthetic oligonucleotide
  Antisense strand to SEQ ID NO: 1307356
ugucucagauggcugcuca

SEQ ID NO: 1307358 - RNA, 19 nt, Artificial Sequence
  Description of Artificial Sequence: Synthetic oligonucleotide
  Sense strand starting at position 3713 of SEQ ID NO: 1241886
gggagcuacuuuguaacuu

SEQ ID NO: 1307359 - RNA, 19 nt, Artificial Sequence
  Description of Artificial Sequence: Synthetic oligonucleotide
  Antisense strand to SEQ ID NO: 1307358
aaguuacaaaguagcuccc

SEQ ID NO: 1307360 - RNA, 19 nt, Artificial Sequence
  Description of Artificial Sequence: Synthetic oligonucleotide
  Sense strand starting at position 3725 of SEQ ID NO: 1241886
guaacuuucugagccucaa

SEQ ID NO: 1307361 - RNA, 19 nt, Artificial Sequence
  Description of Artificial Sequence: Synthetic oligonucleotide
  Antisense strand to SEQ ID NO: 1307360
uugaggcucagaaaguuac

SEQ ID NO: 1307362 - RNA, 19 nt, Artificial Sequence
  Description of Artificial Sequence: Synthetic oligonucleotide
  Sense strand starting at position 3802 of SEQ ID NO: 1241886
ccaacaucagugugggaaa

SEQ ID NO: 1307363 - RNA, 19 nt, Artificial Sequence
  Description of Artificial Sequence: Synthetic oligonucleotide
  Antisense strand to SEQ ID NO: 1307362
uuucccacacugauguugg

SEQ ID NO: 1307364 - RNA, 19 nt, Artificial Sequence
  Description of Artificial Sequence: Synthetic oligonucleotide
  Sense strand starting at position 3804 of SEQ ID NO: 1241886
aacaucagugugggaaauu

SEQ ID NO: 1307365 - RNA, 19 nt, Artificial Sequence
  Description of Artificial Sequence: Synthetic oligonucleotide
  Antisense strand to SEQ ID NO: 1307364
aauuucccacacugauguu

SEQ ID NO: 1307366 - RNA, 19 nt, Artificial Sequence
  Description of Artificial Sequence: Synthetic oligonucleotide
  Sense strand starting at position 3813 of SEQ ID NO: 1241886
gugggaaauugcuuguaaa

SEQ ID NO: 1307367 - RNA, 19 nt, Artificial Sequence
  Description of Artificial Sequence: Synthetic oligonucleotide
  Antisense strand to SEQ ID NO: 1307366
uuuacaagcaauuucccac

SEQ ID NO: 1307368 - RNA, 19 nt, Artificial Sequence
  Description of Artificial Sequence: Synthetic oligonucleotide
  Sense strand starting at position 3814 of SEQ ID NO: 1241886
ugggaaauugcuuguaaac

SEQ ID NO: 1307369 - RNA, 19 nt, Artificial Sequence
  Description of Artificial Sequence: Synthetic oligonucleotide
  Antisense strand to SEQ ID NO: 1307368
guuuacaagcaauuuccca

SEQ ID NO: 1307370 - RNA, 19 nt, Artificial Sequence
  Description of Artificial Sequence: Synthetic oligonucleotide
  Sense strand starting at position 3823 of SEQ ID NO: 1241886
gcuuguaaacucuaggaag

SEQ ID NO: 1307371 - RNA, 19 nt, Artificial Sequence
  Description of Artificial Sequence: Synthetic oligonucleotide
  Antisense strand to SEQ ID NO: 1307370
cuuccuagaguuuacaagc

SEQ ID NO: 1307372 - RNA, 19 nt, Artificial Sequence
  Description of Artificial Sequence: Synthetic oligonucleotide
  Sense strand starting at position 3825 of SEQ ID NO: 1241886
uuguaaacucuaggaagcu

SEQ ID NO: 1307373 - RNA, 19 nt, Artificial Sequence
  Description of Artificial Sequence: Synthetic oligonucleotide
  Antisense strand to SEQ ID NO: 1307372
agcuuccuagaguuuacaa

SEQ ID NO: 1307374 - RNA, 19 nt, Artificial Sequence
  Description of Artificial Sequence: Synthetic oligonucleotide
  Sense strand starting at position 3861 of SEQ ID NO: 1241886
cuaugagcuccugaaggcu

SEQ ID NO: 1307375 - RNA, 19 nt, Artificial Sequence
  Description of Artificial Sequence: Synthetic oligonucleotide
  Antisense strand to SEQ ID NO: 1307374
agccuucaggagcucauag

SEQ ID NO: 1307376 - RNA, 19 nt, Artificial Sequence
  Description of Artificial Sequence: Synthetic oligonucleotide
  Sense strand starting at position 3869 of SEQ ID NO: 1241886
uccugaaggcucugaccuu

SEQ ID NO: 1307377 - RNA, 19 nt, Artificial Sequence
  Description of Artificial Sequence: Synthetic oligonucleotide
  Antisense strand to SEQ ID NO: 1307376
aaggucagagccuucagga

SEQ ID NO: 1307378 - RNA, 19 nt, Artificial Sequence
  Description of Artificial Sequence: Synthetic oligonucleotide
  Sense strand starting at position 3951 of SEQ ID NO: 1241886
caagauaacugccuuggga

SEQ ID NO: 1307379 - RNA, 19 nt, Artificial Sequence
  Description of Artificial Sequence: Synthetic oligonucleotide
  Antisense strand to SEQ ID NO: 1307378
ucccaaggcaguuaucuug

SEQ ID NO: 1307380 - RNA, 19 nt, Artificial Sequence
  Description of Artificial Sequence: Synthetic oligonucleotide
  Sense strand starting at position 3964 of SEQ ID NO: 1241886
uugggagcuccacauguuu

SEQ ID NO: 1307381 - RNA, 19 nt, Artificial Sequence
  Description of Artificial Sequence: Synthetic oligonucleotide
  Antisense strand to SEQ ID NO: 1307380
aaacauguggagcucccaa

SEQ ID NO: 1307382 - RNA, 19 nt, Artificial Sequence
  Description of Artificial Sequence: Synthetic oligonucleotide
  Sense strand starting at position 39 of SEQ ID NO: 1241887
gcccaaagcugauuccuga

SEQ ID NO: 1307383 - RNA, 19 nt, Artificial Sequence
  Description of Artificial Sequence: Synthetic oligonucleotide
  Antisense strand to SEQ ID NO: 1307382
ucaggaaucagcuuugggc

SEQ ID NO: 1307384 - RNA, 19 nt, Artificial Sequence
  Description of Artificial Sequence: Synthetic oligonucleotide
  Sense strand starting at position 224 of SEQ ID NO: 1241887
uccuuaggccagugaucau

SEQ ID NO: 1307385 - RNA, 19 nt, Artificial Sequence
  Description of Artificial Sequence: Synthetic oligonucleotide
  Antisense strand to SEQ ID NO: 1307384
augaucacuggccuaagga

SEQ ID NO: 1307386 - RNA, 19 nt, Artificial Sequence
  Description of Artificial Sequence: Synthetic oligonucleotide
  Sense strand starting at position 227 of SEQ ID NO: 1241887
uuaggccagugaucauuaa

SEQ ID NO: 1307387 - RNA, 19 nt, Artificial Sequence
  Description of Artificial Sequence: Synthetic oligonucleotide
  Antisense strand to SEQ ID NO: 1307386
uuaaugaucacuggccuaa

SEQ ID NO: 1307388 - RNA, 19 nt, Artificial Sequence
  Description of Artificial Sequence: Synthetic oligonucleotide
  Sense strand starting at position 228 of SEQ ID NO: 1241887
uaggccagugaucauuaaa

SEQ ID NO: 1307389 - RNA, 19 nt, Artificial Sequence
  Description of Artificial Sequence: Synthetic oligonucleotide
  Antisense strand to SEQ ID NO: 1307388
uuuaaugaucacuggccua

SEQ ID NO: 1307390 - RNA, 19 nt, Artificial Sequence
  Description of Artificial Sequence: Synthetic oligonucleotide
  Sense strand starting at position 231 of SEQ ID NO: 1241887
gccagugaucauuaaacua

SEQ ID NO: 1307391 - RNA, 19 nt, Artificial Sequence
  Description of Artificial Sequence: Synthetic oligonucleotide
  Antisense strand to SEQ ID NO: 1307390
uaguuuaaugaucacuggc

SEQ ID NO: 1307392 - RNA, 19 nt, Artificial Sequence
  Description of Artificial Sequence: Synthetic oligonucleotide
  Sense strand starting at position 298 of SEQ ID NO: 1241887
aggacaaacuaagaauaau

SEQ ID NO: 1307393 - RNA, 19 nt, Artificial Sequence
  Description of Artificial Sequence: Synthetic oligonucleotide
  Antisense strand to SEQ ID NO: 1307392
auuauucuuaguuuguccu

SEQ ID NO: 1307394 - RNA, 19 nt, Artificial Sequence
  Description of Artificial Sequence: Synthetic oligonucleotide
  Sense strand starting at position 474 of SEQ ID NO: 1241887
ccucuaacugcagauguga

SEQ ID NO: 1307395 - RNA, 19 nt, Artificial Sequence
  Description of Artificial Sequence: Synthetic oligonucleotide
  Antisense strand to SEQ ID NO: 1307394
ucacaucugcaguuagagg

SEQ ID NO: 1307396 - RNA, 19 nt, Artificial Sequence
  Description of Artificial Sequence: Synthetic oligonucleotide
  Sense strand starting at position 841 of SEQ ID NO: 1241887
agggacuucuggccaccua

SEQ ID NO: 1307397 - RNA, 19 nt, Artificial Sequence
  Description of Artificial Sequence: Synthetic oligonucleotide
  Antisense strand to SEQ ID NO: 1307396
uagguggccagaagucccu

SEQ ID NO: 1307398 - RNA, 19 nt, Artificial Sequence
  Description of Artificial Sequence: Synthetic oligonucleotide
  Sense strand starting at position 1055 of SEQ ID NO: 1241887
ugcagucggagcuaauaaa

SEQ ID NO: 1307399 - RNA, 19 nt, Artificial Sequence
  Description of Artificial Sequence: Synthetic oligonucleotide
  Antisense strand to SEQ ID NO: 1307398
uuuauuagcuccgacugca

SEQ ID NO: 1307400 - RNA, 19 nt, Artificial Sequence
  Description of Artificial Sequence: Synthetic oligonucleotide
  Sense strand starting at position 1066 of SEQ ID NO: 1241887
cuaauaaauguuggugaaa

SEQ ID NO: 1307401 - RNA, 19 nt, Artificial Sequence
  Description of Artificial Sequence: Synthetic oligonucleotide
  Antisense strand to SEQ ID NO: 1307400
uuucaccaacauuuauuag

SEQ ID NO: 1307402 - RNA, 19 nt, Artificial Sequence
  Description of Artificial Sequence: Synthetic oligonucleotide
  Sense strand starting at position 1067 of SEQ ID NO: 1241887
uaauaaauguuggugaaag

SEQ ID NO: 1307403 - RNA, 19 nt, Artificial Sequence
  Description of Artificial Sequence: Synthetic oligonucleotide
  Antisense strand to SEQ ID NO: 1307402
cuuucaccaacauuuauua

SEQ ID NO: 1307404 - RNA, 19 nt, Artificial Sequence
  Description of Artificial Sequence: Synthetic oligonucleotide
  Sense strand starting at position 1191 of SEQ ID NO: 1241887
auauguaggcaauggauau

SEQ ID NO: 1307405 - RNA, 19 nt, Artificial Sequence
  Description of Artificial Sequence: Synthetic oligonucleotide
  Antisense strand to SEQ ID NO: 1307404
auauccauugccuacauau

SEQ ID NO: 1307406 - RNA, 19 nt, Artificial Sequence
  Description of Artificial Sequence: Synthetic oligonucleotide
  Sense strand starting at position 1195 of SEQ ID NO: 1241887
guaggcaauggauauguaa

SEQ ID NO: 1307407 - RNA, 19 nt, Artificial Sequence
  Description of Artificial Sequence: Synthetic oligonucleotide
  Antisense strand to SEQ ID NO: 1307406
uuacauauccauugccuac

SEQ ID NO: 1307408 - RNA, 19 nt, Artificial Sequence
  Description of Artificial Sequence: Synthetic oligonucleotide
  Sense strand starting at position 1197 of SEQ ID NO: 1241887
aggcaauggauauguaaag

SEQ ID NO: 1307409 - RNA, 19 nt, Artificial Sequence
  Description of Artificial Sequence: Synthetic oligonucleotide
  Antisense strand to SEQ ID NO: 1307408
cuuuacauauccauugccu

SEQ ID NO: 1307410 - RNA, 19 nt, Artificial Sequence
  Description of Artificial Sequence: Synthetic oligonucleotide
  Sense strand starting at position 1198 of SEQ ID NO: 1241887
ggcaauggauauguaaaga

SEQ ID NO: 1307411 - RNA, 19 nt, Artificial Sequence
  Description of Artificial Sequence: Synthetic oligonucleotide
  Antisense strand to SEQ ID NO: 1307410
ucuuuacauauccauugcc

SEQ ID NO: 1307412 - RNA, 19 nt, Artificial Sequence
  Description of Artificial Sequence: Synthetic oligonucleotide
  Sense strand starting at position 1390 of SEQ ID NO: 1241887
uugagcugagucugagaaa

SEQ ID NO: 1307413 - RNA, 19 nt, Artificial Sequence
  Description of Artificial Sequence: Synthetic oligonucleotide
  Antisense strand to SEQ ID NO: 1307412
uuucucagacucagcucaa

SEQ ID NO: 1307414 - RNA, 19 nt, Artificial Sequence
  Description of Artificial Sequence: Synthetic oligonucleotide
  Sense strand starting at position 1437 of SEQ ID NO: 1241887
uggaaaugggagugcugua

SEQ ID NO: 1307415 - RNA, 19 nt, Artificial Sequence
  Description of Artificial Sequence: Synthetic oligonucleotide
  Antisense strand to SEQ ID NO: 1307414
uacagcacucccauuucca

SEQ ID NO: 1307416 - RNA, 19 nt, Artificial Sequence
  Description of Artificial Sequence: Synthetic oligonucleotide
  Sense strand starting at position 1442 of SEQ ID NO: 1241887
augggagugcuguauucuu

SEQ ID NO: 1307417 - RNA, 19 nt, Artificial Sequence
  Description of Artificial Sequence: Synthetic oligonucleotide
  Antisense strand to SEQ ID NO: 1307416
aagaauacagcacucccau

SEQ ID NO: 1307418 - RNA, 19 nt, Artificial Sequence
  Description of Artificial Sequence: Synthetic oligonucleotide
  Sense strand starting at position 1449 of SEQ ID NO: 1241887
ugcuguauucuugacagaa

SEQ ID NO: 1307419 - RNA, 19 nt, Artificial Sequence
  Description of Artificial Sequence: Synthetic oligonucleotide
  Antisense strand to SEQ ID NO: 1307418
uucugucaagaauacagca

SEQ ID NO: 1307420 - RNA, 19 nt, Artificial Sequence
  Description of Artificial Sequence: Synthetic oligonucleotide
  Sense strand starting at position 2298 of SEQ ID NO: 1241887
gugucuucucgcucccaca

SEQ ID NO: 1307421 - RNA, 19 nt, Artificial Sequence
  Description of Artificial Sequence: Synthetic oligonucleotide
  Antisense strand to SEQ ID NO: 1307420
ugugggagcgagaagacac

SEQ ID NO: 1307422 - RNA, 19 nt, Artificial Sequence
  Description of Artificial Sequence: Synthetic oligonucleotide
  Sense strand starting at position 2353 of SEQ ID NO: 1241887
uggccaucaagucgauaua

SEQ ID NO: 1307423 - RNA, 19 nt, Artificial Sequence
  Description of Artificial Sequence: Synthetic oligonucleotide
  Antisense strand to SEQ ID NO: 1307422
uauaucgacuugauggcca

SEQ ID NO: 1307424 - RNA, 19 nt, Artificial Sequence
  Description of Artificial Sequence: Synthetic oligonucleotide
  Sense strand starting at position 2382 of SEQ ID NO: 1241887
gcggcuuggcccuugugaa

SEQ ID NO: 1307425 - RNA, 19 nt, Artificial Sequence
  Description of Artificial Sequence: Synthetic oligonucleotide
  Antisense strand to SEQ ID NO: 1307424
uucacaagggccaagccgc

SEQ ID NO: 1307426 - RNA, 19 nt, Artificial Sequence
  Description of Artificial Sequence: Synthetic oligonucleotide
  Sense strand starting at position 2780 of SEQ ID NO: 1241887
caaggaaaugcccagguuu

SEQ ID NO: 1307427 - RNA, 19 nt, Artificial Sequence
  Description of Artificial Sequence: Synthetic oligonucleotide
  Antisense strand to SEQ ID NO: 1307426
aaaccugggcauuuccuug

SEQ ID NO: 1307428 - RNA, 19 nt, Artificial Sequence
  Description of Artificial Sequence: Synthetic oligonucleotide
  Sense strand starting at position 2828 of SEQ ID NO: 1241887
aggugaggaguucagcuuu

SEQ ID NO: 1307429 - RNA, 19 nt, Artificial Sequence
  Description of Artificial Sequence: Synthetic oligonucleotide
  Antisense strand to SEQ ID NO: 1307428
aaagcugaacuccucaccu

SEQ ID NO: 1307430 - RNA, 19 nt, Artificial Sequence
  Description of Artificial Sequence: Synthetic oligonucleotide
  Sense strand starting at position 2834 of SEQ ID NO: 1241887
ggaguucagcuuuggacau

SEQ ID NO: 1307431 - RNA, 19 nt, Artificial Sequence
  Description of Artificial Sequence: Synthetic oligonucleotide
  Antisense strand to SEQ ID NO: 1307430
auguccaaagcugaacucc

SEQ ID NO: 1307432 - RNA, 19 nt, Artificial Sequence
  Description of Artificial Sequence: Synthetic oligonucleotide
  Sense strand starting at position 2907 of SEQ ID NO: 1241887
gaauauaugugacuggagu

SEQ ID NO: 1307433 - RNA, 19 nt, Artificial Sequence
  Description of Artificial Sequence: Synthetic oligonucleotide
  Antisense strand to SEQ ID NO: 1307432
acuccagucacauauauuc

SEQ ID NO: 1307434 - RNA, 19 nt, Artificial Sequence
  Description of Artificial Sequence: Synthetic oligonucleotide
  Sense strand starting at position 2908 of SEQ ID NO: 1241887
aauauaugugacuggaguu

SEQ ID NO: 1307435 - RNA, 19 nt, Artificial Sequence
  Description of Artificial Sequence: Synthetic oligonucleotide
  Antisense strand to SEQ ID NO: 1307434
aacuccagucacauauauu

SEQ ID NO: 1307436 - RNA, 19 nt, Artificial Sequence
  Description of Artificial Sequence: Synthetic oligonucleotide
  Sense strand starting at position 2909 of SEQ ID NO: 1241887
auauaugugacuggaguuu

SEQ ID NO: 1307437 - RNA, 19 nt, Artificial Sequence
  Description of Artificial Sequence: Synthetic oligonucleotide
  Antisense strand to SEQ ID NO: 1307436
aaacuccagucacauauau

SEQ ID NO: 1307438 - RNA, 19 nt, Artificial Sequence
  Description of Artificial Sequence: Synthetic oligonucleotide
  Sense strand starting at position 2930 of SEQ ID NO: 1241887
gaaaucaaggcuggugaua

SEQ ID NO: 1307439 - RNA, 19 nt, Artificial Sequence
  Description of Artificial Sequence: Synthetic oligonucleotide
  Antisense strand to SEQ ID NO: 1307438
uaucaccagccuugauuuc

SEQ ID NO: 1307440 - RNA, 19 nt, Artificial Sequence
  Description of Artificial Sequence: Synthetic oligonucleotide
  Sense strand starting at position 3000 of SEQ ID NO: 1241887
augagagaguguguaaaga

SEQ ID NO: 1307441 - RNA, 19 nt, Artificial Sequence
  Description of Artificial Sequence: Synthetic oligonucleotide
  Antisense strand to SEQ ID NO: 1307440
ucuuuacacacucucucau

SEQ ID NO: 1307442 - RNA, 19 nt, Artificial Sequence
  Description of Artificial Sequence: Synthetic oligonucleotide
  Sense strand starting at position 3091 of SEQ ID NO: 1241887
cgguguaacggcagcuaaa

SEQ ID NO: 1307443 - RNA, 19 nt, Artificial Sequence
  Description of Artificial Sequence: Synthetic oligonucleotide
  Antisense strand to SEQ ID NO: 1307442
uuuagcugccguuacaccg

SEQ ID NO: 1307444 - RNA, 19 nt, Artificial Sequence
  Description of Artificial Sequence: Synthetic oligonucleotide
  Sense strand starting at position 3167 of SEQ ID NO: 1241887
acauguaacgacugagaag

SEQ ID NO: 1307445 - RNA, 19 nt, Artificial Sequence
  Description of Artificial Sequence: Synthetic oligonucleotide
  Antisense strand to SEQ ID NO: 1307444
cuucucagucguuacaugu

SEQ ID NO: 1307446 - RNA, 19 nt, Artificial Sequence
  Description of Artificial Sequence: Synthetic oligonucleotide
  Sense strand starting at position 3273 of SEQ ID NO: 1241887
agaauaauccagugacuuc

SEQ ID NO: 1307447 - RNA, 19 nt, Artificial Sequence
  Description of Artificial Sequence: Synthetic oligonucleotide
  Antisense strand to SEQ ID NO: 1307446
gaagucacuggauuauucu

SEQ ID NO: 1307448 - RNA, 19 nt, Artificial Sequence
  Description of Artificial Sequence: Synthetic oligonucleotide
  Sense strand starting at position 3399 of SEQ ID NO: 1241887
agaggacgguuccugaaga

SEQ ID NO: 1307449 - RNA, 19 nt, Artificial Sequence
  Description of Artificial Sequence: Synthetic oligonucleotide
  Antisense strand to SEQ ID NO: 1307448
ucuucaggaaccguccucu

SEQ ID NO: 1307450 - RNA, 19 nt, Artificial Sequence
  Description of Artificial Sequence: Synthetic oligonucleotide
  Sense strand starting at position 3435 of SEQ ID NO: 1241887
aguagagauugaguucucu

SEQ ID NO: 1307451 - RNA, 19 nt, Artificial Sequence
  Description of Artificial Sequence: Synthetic oligonucleotide
  Antisense strand to SEQ ID NO: 1307450
agagaacucaaucucuacu

SEQ ID NO: 1307452 - RNA, 19 nt, Artificial Sequence
  Description of Artificial Sequence: Synthetic oligonucleotide
  Sense strand starting at position 3439 of SEQ ID NO: 1241887
gagauugaguucucuacag

SEQ ID NO: 1307453 - RNA, 19 nt, Artificial Sequence
  Description of Artificial Sequence: Synthetic oligonucleotide
  Antisense strand to SEQ ID NO: 1307452
cuguagagaacucaaucuc

SEQ ID NO: 1307454 - RNA, 19 nt, Artificial Sequence
  Description of Artificial Sequence: Synthetic oligonucleotide
  Sense strand starting at position 3517 of SEQ ID NO: 1241887
uguagguuuggugauggga

SEQ ID NO: 1307455 - RNA, 19 nt, Artificial Sequence
  Description of Artificial Sequence: Synthetic oligonucleotide
  Antisense strand to SEQ ID NO: 1307454
ucccaucaccaaaccuaca

SEQ ID NO: 1307456 - RNA, 19 nt, Artificial Sequence
  Description of Artificial Sequence: Synthetic oligonucleotide
  Sense strand starting at position 3566 of SEQ ID NO: 1241887
ggagguguugaagguauau

SEQ ID NO: 1307457 - RNA, 19 nt, Artificial Sequence
  Description of Artificial Sequence: Synthetic oligonucleotide
  Antisense strand to SEQ ID NO: 1307456
auauaccuucaacaccucc

SEQ ID NO: 1307458 - RNA, 19 nt, Artificial Sequence
  Description of Artificial Sequence: Synthetic oligonucleotide
  Sense strand starting at position 3588 of SEQ ID NO: 1241887
gacucuugagaauggcaaa

SEQ ID NO: 1307459 - RNA, 19 nt, Artificial Sequence
  Description of Artificial Sequence: Synthetic oligonucleotide
  Antisense strand to SEQ ID NO: 1307458
uuugccauucucaagaguc

SEQ ID NO: 1307460 - RNA, 19 nt, Artificial Sequence
  Description of Artificial Sequence: Synthetic oligonucleotide
  Sense strand starting at position 3600 of SEQ ID NO: 1241887
uggcaaagggcugacuauu

SEQ ID NO: 1307461 - RNA, 19 nt, Artificial Sequence
  Description of Artificial Sequence: Synthetic oligonucleotide
  Antisense strand to SEQ ID NO: 1307460
aauagucagcccuuugcca

SEQ ID NO: 1307462 - RNA, 19 nt, Artificial Sequence
  Description of Artificial Sequence: Synthetic oligonucleotide
  Sense strand starting at position 61 of SEQ ID NO: 1241888
aaauaaaguuuccugugga

SEQ ID NO: 1307463 - RNA, 19 nt, Artificial Sequence
  Description of Artificial Sequence: Synthetic oligonucleotide
  Antisense strand to SEQ ID NO: 1307462
uccacaggaaacuuuauuu

SEQ ID NO: 1307464 - RNA, 19 nt, Artificial Sequence
  Description of Artificial Sequence: Synthetic oligonucleotide
  Sense strand starting at position 64 of SEQ ID NO: 1241888
uaaaguuuccuguggaagg

SEQ ID NO: 1307465 - RNA, 19 nt, Artificial Sequence
  Description of Artificial Sequence: Synthetic oligonucleotide
  Antisense strand to SEQ ID NO: 1307464
ccuuccacaggaaacuuua

SEQ ID NO: 1307466 - RNA, 19 nt, Artificial Sequence
  Description of Artificial Sequence: Synthetic oligonucleotide
  Sense strand starting at position 88 of SEQ ID NO: 1241888
uguuauuuauucccuguau

SEQ ID NO: 1307467 - RNA, 19 nt, Artificial Sequence
  Description of Artificial Sequence: Synthetic oligonucleotide
  Antisense strand to SEQ ID NO: 1307466
auacagggaauaaauaaca

SEQ ID NO: 1307468 - RNA, 19 nt, Artificial Sequence
  Description of Artificial Sequence: Synthetic oligonucleotide
  Sense strand starting at position 89 of SEQ ID NO: 1241888
guuauuuauucccuguaug

SEQ ID NO: 1307469 - RNA, 19 nt, Artificial Sequence
  Description of Artificial Sequence: Synthetic oligonucleotide
  Antisense strand to SEQ ID NO: 1307468
cauacagggaauaaauaac

SEQ ID NO: 1307470 - RNA, 19 nt, Artificial Sequence
  Description of Artificial Sequence: Synthetic oligonucleotide
  Sense strand starting at position 104 of SEQ ID NO: 1241888
uauggcauuugggagaagu

SEQ ID NO: 1307471 - RNA, 19 nt, Artificial Sequence
  Description of Artificial Sequence: Synthetic oligonucleotide
  Antisense strand to SEQ ID NO: 1307470
acuucucccaaaugccaua

SEQ ID NO: 1307472 - RNA, 19 nt, Artificial Sequence
  Description of Artificial Sequence: Synthetic oligonucleotide
  Sense strand starting at position 198 of SEQ ID NO: 1241888
guaaguguugauuaaagua

SEQ ID NO: 1307473 - RNA, 19 nt, Artificial Sequence
  Description of Artificial Sequence: Synthetic oligonucleotide
  Antisense strand to SEQ ID NO: 1307472
uacuuuaaucaacacuuac

SEQ ID NO: 1307474 - RNA, 19 nt, Artificial Sequence
  Description of Artificial Sequence: Synthetic oligonucleotide
  Sense strand starting at position 244 of SEQ ID NO: 1241888
caagguauuugcuagagaa

SEQ ID NO: 1307475 - RNA, 19 nt, Artificial Sequence
  Description of Artificial Sequence: Synthetic oligonucleotide
  Antisense strand to SEQ ID NO: 1307474
uucucuagcaaauaccuug

SEQ ID NO: 1307476 - RNA, 19 nt, Artificial Sequence
  Description of Artificial Sequence: Synthetic oligonucleotide
  Sense strand starting at position 528 of SEQ ID NO: 1241888
ggauaaauauugcccuaaa

SEQ ID NO: 1307477 - RNA, 19 nt, Artificial Sequence
  Description of Artificial Sequence: Synthetic oligonucleotide
  Antisense strand to SEQ ID NO: 1307476
uuuagggcaauauuuaucc

SEQ ID NO: 1307478 - RNA, 19 nt, Artificial Sequence
  Description of Artificial Sequence: Synthetic oligonucleotide
  Sense strand starting at position 654 of SEQ ID NO: 1241888
guacuuugauaccuauuau

SEQ ID NO: 1307479 - RNA, 19 nt, Artificial Sequence
  Description of Artificial Sequence: Synthetic oligonucleotide
  Antisense strand to SEQ ID NO: 1307478
auaauagguaucaaaguac

SEQ ID NO: 1307480 - RNA, 19 nt, Artificial Sequence
  Description of Artificial Sequence: Synthetic oligonucleotide
  Sense strand starting at position 884 of SEQ ID NO: 1241888
ucaacugguuccucaugua

SEQ ID NO: 1307481 - RNA, 19 nt, Artificial Sequence
  Description of Artificial Sequence: Synthetic oligonucleotide
  Antisense strand to SEQ ID NO: 1307480
uacaugaggaaccaguuga

SEQ ID NO: 1307482 - RNA, 19 nt, Artificial Sequence
  Description of Artificial Sequence: Synthetic oligonucleotide
  Sense strand starting at position 889 of SEQ ID NO: 1241888
ugguuccucauguaauguu

SEQ ID NO: 1307483 - RNA, 19 nt, Artificial Sequence
  Description of Artificial Sequence: Synthetic oligonucleotide
  Antisense strand to SEQ ID NO: 1307482
aacauuacaugaggaacca

SEQ ID NO: 1307484 - RNA, 19 nt, Artificial Sequence
  Description of Artificial Sequence: Synthetic oligonucleotide
  Sense strand starting at position 1025 of SEQ ID NO: 1241888
ugaaauacacccggaaugu

SEQ ID NO: 1307485 - RNA, 19 nt, Artificial Sequence
  Description of Artificial Sequence: Synthetic oligonucleotide
  Antisense strand to SEQ ID NO: 1307484
acauuccggguguauuuca

SEQ ID NO: 1307486 - RNA, 19 nt, Artificial Sequence
  Description of Artificial Sequence: Synthetic oligonucleotide
  Sense strand starting at position 1091 of SEQ ID NO: 1241888
uggccaaugacccaagagu

SEQ ID NO: 1307487 - RNA, 19 nt, Artificial Sequence
  Description of Artificial Sequence: Synthetic oligonucleotide
  Antisense strand to SEQ ID NO: 1307486
acucuugggucauuggcca

SEQ ID NO: 1307488 - RNA, 19 nt, Artificial Sequence
  Description of Artificial Sequence: Synthetic oligonucleotide
  Sense strand starting at position 1263 of SEQ ID NO: 1241888
uccauuugcuccuuucgaa

SEQ ID NO: 1307489 - RNA, 19 nt, Artificial Sequence
  Description of Artificial Sequence: Synthetic oligonucleotide
  Antisense strand to SEQ ID NO: 1307488
uucgaaaggagcaaaugga

SEQ ID NO: 1307490 - RNA, 19 nt, Artificial Sequence
  Description of Artificial Sequence: Synthetic oligonucleotide
  Sense strand starting at position 1443 of SEQ ID NO: 1241888
ccaugaacucaccguuaag

SEQ ID NO: 1307491 - RNA, 19 nt, Artificial Sequence
  Description of Artificial Sequence: Synthetic oligonucleotide
  Antisense strand to SEQ ID NO: 1307490
cuuaacggugaguucaugg

SEQ ID NO: 1307492 - RNA, 19 nt, Artificial Sequence
  Description of Artificial Sequence: Synthetic oligonucleotide
  Sense strand starting at position 1446 of SEQ ID NO: 1241888
ugaacucaccguuaagagu

SEQ ID NO: 1307493 - RNA, 19 nt, Artificial Sequence
  Description of Artificial Sequence: Synthetic oligonucleotide
  Antisense strand to SEQ ID NO: 1307492
acucuuaacggugaguuca

SEQ ID NO: 1307494 - RNA, 19 nt, Artificial Sequence
  Description of Artificial Sequence: Synthetic oligonucleotide
  Sense strand starting at position 2279 of SEQ ID NO: 1241888
gcgcgauuugaauacacuu

SEQ ID NO: 1307495 - RNA, 19 nt, Artificial Sequence
  Description of Artificial Sequence: Synthetic oligonucleotide
  Antisense strand to SEQ ID NO: 1307494
aaguguauucaaaucgcgc

SEQ ID NO: 1307496 - RNA, 19 nt, Artificial Sequence
  Description of Artificial Sequence: Synthetic oligonucleotide
  Sense strand starting at position 2404 of SEQ ID NO: 1241888
ggucgcuguaaacauaauu

SEQ ID NO: 1307497 - RNA, 19 nt, Artificial Sequence
  Description of Artificial Sequence: Synthetic oligonucleotide
  Antisense strand to SEQ ID NO: 1307496
aauuauguuuacagcgacc

SEQ ID NO: 1307498 - RNA, 19 nt, Artificial Sequence
  Description of Artificial Sequence: Synthetic oligonucleotide
  Sense strand starting at position 2414 of SEQ ID NO: 1241888
aacauaauuuggcuugugu

SEQ ID NO: 1307499 - RNA, 19 nt, Artificial Sequence
  Description of Artificial Sequence: Synthetic oligonucleotide
  Antisense strand to SEQ ID NO: 1307498
acacaagccaaauuauguu

SEQ ID NO: 1307500 - RNA, 19 nt, Artificial Sequence
  Description of Artificial Sequence: Synthetic oligonucleotide
  Sense strand starting at position 2501 of SEQ ID NO: 1241888
aaacaaauccgacgucauc

SEQ ID NO: 1307501 - RNA, 19 nt, Artificial Sequence
  Description of Artificial Sequence: Synthetic oligonucleotide
  Antisense strand to SEQ ID NO: 1307500
gaugacgucggauuuguuu

SEQ ID NO: 1307502 - RNA, 19 nt, Artificial Sequence
  Description of Artificial Sequence: Synthetic oligonucleotide
  Sense strand starting at position 2504 of SEQ ID NO: 1241888
caaauccgacgucaucaaa

SEQ ID NO: 1307503 - RNA, 19 nt, Artificial Sequence
  Description of Artificial Sequence: Synthetic oligonucleotide
  Antisense strand to SEQ ID NO: 1307502
uuugaugacgucggauuug

SEQ ID NO: 1307504 - RNA, 19 nt, Artificial Sequence
  Description of Artificial Sequence: Synthetic oligonucleotide
  Sense strand starting at position 2528 of SEQ ID NO: 1241888
ggcaguaaagaaugucacu

SEQ ID NO: 1307505 - RNA, 19 nt, Artificial Sequence
  Description of Artificial Sequence: Synthetic oligonucleotide
  Antisense strand to SEQ ID NO: 1307504
agugacauucuuuacugcc

SEQ ID NO: 1307506 - RNA, 19 nt, Artificial Sequence
  Description of Artificial Sequence: Synthetic oligonucleotide
  Sense strand starting at position 2928 of SEQ ID NO: 1241888
cucaauaaauguuuggagu

SEQ ID NO: 1307507 - RNA, 19 nt, Artificial Sequence
  Description of Artificial Sequence: Synthetic oligonucleotide
  Antisense strand to SEQ ID NO: 1307506
acuccaaacauuuauugag

SEQ ID NO: 1307508 - RNA, 19 nt, Artificial Sequence
  Description of Artificial Sequence: Synthetic oligonucleotide
  Sense strand starting at position 2929 of SEQ ID NO: 1241888
ucaauaaauguuuggagua

SEQ ID NO: 1307509 - RNA, 19 nt, Artificial Sequence
  Description of Artificial Sequence: Synthetic oligonucleotide
  Antisense strand to SEQ ID NO: 1307508
uacuccaaacauuuauuga

SEQ ID NO: 1307510 - RNA, 19 nt, Artificial Sequence
  Description of Artificial Sequence: Synthetic oligonucleotide
  Sense strand starting at position 2975 of SEQ ID NO: 1241888
auguauugugaauggaucu

SEQ ID NO: 1307511 - RNA, 19 nt, Artificial Sequence
  Description of Artificial Sequence: Synthetic oligonucleotide
  Antisense strand to SEQ ID NO: 1307510
agauccauucacaauacau

SEQ ID NO: 1307512 - RNA, 19 nt, Artificial Sequence
  Description of Artificial Sequence: Synthetic oligonucleotide
  Sense strand starting at position 2988 of SEQ ID NO: 1241888
ggaucucaguucuccuaaa

SEQ ID NO: 1307513 - RNA, 19 nt, Artificial Sequence
  Description of Artificial Sequence: Synthetic oligonucleotide
  Antisense strand to SEQ ID NO: 1307512
uuuaggagaacugagaucc

SEQ ID NO: 1307514 - RNA, 19 nt, Artificial Sequence
  Description of Artificial Sequence: Synthetic oligonucleotide
  Sense strand starting at position 3053 of SEQ ID NO: 1241888
ucuguuugguucuuagaag

SEQ ID NO: 1307515 - RNA, 19 nt, Artificial Sequence
  Description of Artificial Sequence: Synthetic oligonucleotide
  Antisense strand to SEQ ID NO: 1307514
cuucuaagaaccaaacaga

SEQ ID NO: 1307516 - RNA, 19 nt, Artificial Sequence
  Description of Artificial Sequence: Synthetic oligonucleotide
  Sense strand starting at position 3119 of SEQ ID NO: 1241888
aagcaaaggugcuuagacu

SEQ ID NO: 1307517 - RNA, 19 nt, Artificial Sequence
  Description of Artificial Sequence: Synthetic oligonucleotide
  Antisense strand to SEQ ID NO: 1307516
agucuaagcaccuuugcuu

SEQ ID NO: 1307518 - RNA, 19 nt, Artificial Sequence
  Description of Artificial Sequence: Synthetic oligonucleotide
  Sense strand starting at position 3120 of SEQ ID NO: 1241888
agcaaaggugcuuagacuu

SEQ ID NO: 1307519 - RNA, 19 nt, Artificial Sequence
  Description of Artificial Sequence: Synthetic oligonucleotide
  Antisense strand to SEQ ID NO: 1307518
aagucuaagcaccuuugcu

SEQ ID NO: 1307520 - RNA, 19 nt, Artificial Sequence
  Description of Artificial Sequence: Synthetic oligonucleotide
  Sense strand starting at position 3127 of SEQ ID NO: 1241888
gugcuuagacuuuagagaa

SEQ ID NO: 1307521 - RNA, 19 nt, Artificial Sequence
  Description of Artificial Sequence: Synthetic oligonucleotide
  Antisense strand to SEQ ID NO: 1307520
uucucuaaagucuaagcac

SEQ ID NO: 1307522 - RNA, 19 nt, Artificial Sequence
  Description of Artificial Sequence: Synthetic oligonucleotide
  Sense strand starting at position 3142 of SEQ ID NO: 1241888
agaaccuguaagugguuua

SEQ ID NO: 1307523 - RNA, 19 nt, Artificial Sequence
  Description of Artificial Sequence: Synthetic oligonucleotide
  Antisense strand to SEQ ID NO: 1307522
uaaaccacuuacagguucu

SEQ ID NO: 1307524 - RNA, 19 nt, Artificial Sequence
  Description of Artificial Sequence: Synthetic oligonucleotide
  Sense strand starting at position 3172 of SEQ ID NO: 1241888
cuggaauaaugccuggguu

SEQ ID NO: 1307525 - RNA, 19 nt, Artificial Sequence
  Description of Artificial Sequence: Synthetic oligonucleotide
  Antisense strand to SEQ ID NO: 1307524
aacccaggcauuauuccag

SEQ ID NO: 1307526 - RNA, 19 nt, Artificial Sequence
  Description of Artificial Sequence: Synthetic oligonucleotide
  Sense strand starting at position 3175 of SEQ ID NO: 1241888
gaauaaugccuggguugga

SEQ ID NO: 1307527 - RNA, 19 nt, Artificial Sequence
  Description of Artificial Sequence: Synthetic oligonucleotide
  Antisense strand to SEQ ID NO: 1307526
uccaacccaggcauuauuc

SEQ ID NO: 1307528 - RNA, 19 nt, Artificial Sequence
  Description of Artificial Sequence: Synthetic oligonucleotide
  Sense strand starting at position 3176 of SEQ ID NO: 1241888
aauaaugccuggguuggaa

SEQ ID NO: 1307529 - RNA, 19 nt, Artificial Sequence
  Description of Artificial Sequence: Synthetic oligonucleotide
  Antisense strand to SEQ ID NO: 1307528
uuccaacccaggcauuauu

SEQ ID NO: 1307530 - RNA, 19 nt, Artificial Sequence
  Description of Artificial Sequence: Synthetic oligonucleotide
  Sense strand starting at position 3293 of SEQ ID NO: 1241888
guauguuugauguagagau

SEQ ID NO: 1307531 - RNA, 19 nt, Artificial Sequence
  Description of Artificial Sequence: Synthetic oligonucleotide
  Antisense strand to SEQ ID NO: 1307530
aucucuacaucaaacauac

SEQ ID NO: 1307532 - RNA, 19 nt, Artificial Sequence
  Description of Artificial Sequence: Synthetic oligonucleotide
  Sense strand starting at position 3644 of SEQ ID NO: 1241888
gugucuagaggauagucua

SEQ ID NO: 1307533 - RNA, 19 nt, Artificial Sequence
  Description of Artificial Sequence: Synthetic oligonucleotide
  Antisense strand to SEQ ID NO: 1307532
uagacuauccucuagacac

SEQ ID NO: 1307534 - RNA, 19 nt, Artificial Sequence
  Description of Artificial Sequence: Synthetic oligonucleotide
  Sense strand starting at position 3651 of SEQ ID NO: 1241888
gaggauagucuaugugaaa

SEQ ID NO: 1307535 - RNA, 19 nt, Artificial Sequence
  Description of Artificial Sequence: Synthetic oligonucleotide
  Antisense strand to SEQ ID NO: 1307534
uuucacauagacuauccuc

SEQ ID NO: 1307536 - RNA, 19 nt, Artificial Sequence
  Description of Artificial Sequence: Synthetic oligonucleotide
  Sense strand starting at position 3652 of SEQ ID NO: 1241888
aggauagucuaugugaaau

SEQ ID NO: 1307537 - RNA, 19 nt, Artificial Sequence
  Description of Artificial Sequence: Synthetic oligonucleotide
  Antisense strand to SEQ ID NO: 1307536
auuucacauagacuauccu

SEQ ID NO: 1307538 - RNA, 19 nt, Artificial Sequence
  Description of Artificial Sequence: Synthetic oligonucleotide
  Sense strand starting at position 3893 of SEQ ID NO: 1241888
ggaacuucuagaggucaug

SEQ ID NO: 1307539 - RNA, 19 nt, Artificial Sequence
  Description of Artificial Sequence: Synthetic oligonucleotide
  Antisense strand to SEQ ID NO: 1307538
caugaccucuagaaguucc

SEQ ID NO: 1307540 - RNA, 19 nt, Artificial Sequence
  Description of Artificial Sequence: Synthetic oligonucleotide
  Sense strand starting at position 3961 of SEQ ID NO: 1241888
gucagugcucuugccaacu

SEQ ID NO: 1307541 - RNA, 19 nt, Artificial Sequence
  Description of Artificial Sequence: Synthetic oligonucleotide
  Antisense strand to SEQ ID NO: 1307540
aguuggcaagagcacugac

SEQ ID NO: 1307542 - RNA, 19 nt, Artificial Sequence
  Description of Artificial Sequence: Synthetic oligonucleotide
  Sense strand starting at position 325 of SEQ ID NO: 1241889
ugaacuguucugcauacca

SEQ ID NO: 1307543 - RNA, 19 nt, Artificial Sequence
  Description of Artificial Sequence: Synthetic oligonucleotide
  Antisense strand to SEQ ID NO: 1307542
ugguaugcagaacaguuca

SEQ ID NO: 1307544 - RNA, 19 nt, Artificial Sequence
  Description of Artificial Sequence: Synthetic oligonucleotide
  Sense strand starting at position 609 of SEQ ID NO: 1241889
agggagagggcuugugaga

SEQ ID NO: 1307545 - RNA, 19 nt, Artificial Sequence
  Description of Artificial Sequence: Synthetic oligonucleotide
  Antisense strand to SEQ ID NO: 1307544
ucucacaagcccucucccu

SEQ ID NO: 1307546 - RNA, 19 nt, Artificial Sequence
  Description of Artificial Sequence: Synthetic oligonucleotide
  Sense strand starting at position 849 of SEQ ID NO: 1241889
cagugcucggaguauggaa

SEQ ID NO: 1307547 - RNA, 19 nt, Artificial Sequence
  Description of Artificial Sequence: Synthetic oligonucleotide
  Antisense strand to SEQ ID NO: 1307546
uuccauacuccgagcacug

SEQ ID NO: 1307548 - RNA, 19 nt, Artificial Sequence
  Description of Artificial Sequence: Synthetic oligonucleotide
  Sense strand starting at position 958 of SEQ ID NO: 1241889
aggccaguuacugaugaua

SEQ ID NO: 1307549 - RNA, 19 nt, Artificial Sequence
  Description of Artificial Sequence: Synthetic oligonucleotide
  Antisense strand to SEQ ID NO: 1307548
uaucaucaguaacuggccu

SEQ ID NO: 1307550 - RNA, 19 nt, Artificial Sequence
  Description of Artificial Sequence: Synthetic oligonucleotide
  Sense strand starting at position 1140 of SEQ ID NO: 1241889
uggccucgucaauucguua

SEQ ID NO: 1307551 - RNA, 19 nt, Artificial Sequence
  Description of Artificial Sequence: Synthetic oligonucleotide
  Antisense strand to SEQ ID NO: 1307550
uaacgaauugacgaggcca

SEQ ID NO: 1307552 - RNA, 19 nt, Artificial Sequence
  Description of Artificial Sequence: Synthetic oligonucleotide
  Sense strand starting at position 1141 of SEQ ID NO: 1241889
ggccucgucaauucguuau

SEQ ID NO: 1307553 - RNA, 19 nt, Artificial Sequence
  Description of Artificial Sequence: Synthetic oligonucleotide
  Antisense strand to SEQ ID NO: 1307552
auaacgaauugacgaggcc

SEQ ID NO: 1307554 - RNA, 19 nt, Artificial Sequence
  Description of Artificial Sequence: Synthetic oligonucleotide
  Sense strand starting at position 1216 of SEQ ID NO: 1241889
ugaucagucccagggaaua

SEQ ID NO: 1307555 - RNA, 19 nt, Artificial Sequence
  Description of Artificial Sequence: Synthetic oligonucleotide
  Antisense strand to SEQ ID NO: 1307554
uauucccugggacugauca

SEQ ID NO: 1307556 - RNA, 19 nt, Artificial Sequence
  Description of Artificial Sequence: Synthetic oligonucleotide
  Sense strand starting at position 1258 of SEQ ID NO: 1241889
aguagaaguucuuuccauu

SEQ ID NO: 1307557 - RNA, 19 nt, Artificial Sequence
  Description of Artificial Sequence: Synthetic oligonucleotide
  Antisense strand to SEQ ID NO: 1307556
aauggaaagaacuucuacu

SEQ ID NO: 1307558 - RNA, 19 nt, Artificial Sequence
  Description of Artificial Sequence: Synthetic oligonucleotide
  Sense strand starting at position 1264 of SEQ ID NO: 1241889
aguucuuuccauuagacuc

SEQ ID NO: 1307559 - RNA, 19 nt, Artificial Sequence
  Description of Artificial Sequence: Synthetic oligonucleotide
  Antisense strand to SEQ ID NO: 1307558
gagucuaauggaaagaacu

SEQ ID NO: 1307560 - RNA, 19 nt, Artificial Sequence
  Description of Artificial Sequence: Synthetic oligonucleotide
  Sense strand starting at position 1407 of SEQ ID NO: 1241889
augacaaaucaguggaggu

SEQ ID NO: 1307561 - RNA, 19 nt, Artificial Sequence
  Description of Artificial Sequence: Synthetic oligonucleotide
  Antisense strand to SEQ ID NO: 1307560
accuccacugauuugucau

SEQ ID NO: 1307562 - RNA, 19 nt, Artificial Sequence
  Description of Artificial Sequence: Synthetic oligonucleotide
  Sense strand starting at position 1408 of SEQ ID NO: 1241889
ugacaaaucaguggaggua

SEQ ID NO: 1307563 - RNA, 19 nt, Artificial Sequence
  Description of Artificial Sequence: Synthetic oligonucleotide
  Antisense strand to SEQ ID NO: 1307562
uaccuccacugauuuguca

SEQ ID NO: 1307564 - RNA, 19 nt, Artificial Sequence
  Description of Artificial Sequence: Synthetic oligonucleotide
  Sense strand starting at position 1609 of SEQ ID NO: 1241889
aggaacuuccaaggcaaua

SEQ ID NO: 1307565 - RNA, 19 nt, Artificial Sequence
  Description of Artificial Sequence: Synthetic oligonucleotide
  Antisense strand to SEQ ID NO: 1307564
uauugccuuggaaguuccu

SEQ ID NO: 1307566 - RNA, 19 nt, Artificial Sequence
  Description of Artificial Sequence: Synthetic oligonucleotide
  Sense strand starting at position 1862 of SEQ ID NO: 1241889
auagcuuaucuauggaaca

SEQ ID NO: 1307567 - RNA, 19 nt, Artificial Sequence
  Description of Artificial Sequence: Synthetic oligonucleotide
  Antisense strand to SEQ ID NO: 1307566
uguuccauagauaagcuau

SEQ ID NO: 1307568 - RNA, 19 nt, Artificial Sequence
  Description of Artificial Sequence: Synthetic oligonucleotide
  Sense strand starting at position 1988 of SEQ ID NO: 1241889
ggugguauuaaagagccaa

SEQ ID NO: 1307569 - RNA, 19 nt, Artificial Sequence
  Description of Artificial Sequence: Synthetic oligonucleotide
  Antisense strand to SEQ ID NO: 1307568
uuggcucuuuaauaccacc

SEQ ID NO: 1307570 - RNA, 19 nt, Artificial Sequence
  Description of Artificial Sequence: Synthetic oligonucleotide
  Sense strand starting at position 2329 of SEQ ID NO: 1241889
auuguaauacagugcagaa

SEQ ID NO: 1307571 - RNA, 19 nt, Artificial Sequence
  Description of Artificial Sequence: Synthetic oligonucleotide
  Antisense strand to SEQ ID NO: 1307570
uucugcacuguauuacaau

SEQ ID NO: 1307572 - RNA, 19 nt, Artificial Sequence
  Description of Artificial Sequence: Synthetic oligonucleotide
  Sense strand starting at position 2331 of SEQ ID NO: 1241889
uguaauacagugcagaaua

SEQ ID NO: 1307573 - RNA, 19 nt, Artificial Sequence
  Description of Artificial Sequence: Synthetic oligonucleotide
  Antisense strand to SEQ ID NO: 1307572
uauucugcacuguauuaca

SEQ ID NO: 1307574 - RNA, 19 nt, Artificial Sequence
  Description of Artificial Sequence: Synthetic oligonucleotide
  Sense strand starting at position 2470 of SEQ ID NO: 1241889
agaagaguuauauggcaaa

SEQ ID NO: 1307575 - RNA, 19 nt, Artificial Sequence
  Description of Artificial Sequence: Synthetic oligonucleotide
  Antisense strand to SEQ ID NO: 1307574
uuugccauauaacucuucu

SEQ ID NO: 1307576 - RNA, 19 nt, Artificial Sequence
  Description of Artificial Sequence: Synthetic oligonucleotide
  Sense strand starting at position 2483 of SEQ ID NO: 1241889
ggcaaauaauugucccuaa

SEQ ID NO: 1307577 - RNA, 19 nt, Artificial Sequence
  Description of Artificial Sequence: Synthetic oligonucleotide
  Antisense strand to SEQ ID NO: 1307576
uuagggacaauuauuugcc

SEQ ID NO: 1307578 - RNA, 19 nt, Artificial Sequence
  Description of Artificial Sequence: Synthetic oligonucleotide
  Sense strand starting at position 2532 of SEQ ID NO: 1241889
cuuccauagucuuugggaa

SEQ ID NO: 1307579 - RNA, 19 nt, Artificial Sequence
  Description of Artificial Sequence: Synthetic oligonucleotide
  Antisense strand to SEQ ID NO: 1307578
uucccaaagacuauggaag

SEQ ID NO: 1307580 - RNA, 19 nt, Artificial Sequence
  Description of Artificial Sequence: Synthetic oligonucleotide
  Sense strand starting at position 2533 of SEQ ID NO: 1241889
uuccauagucuuugggaau

SEQ ID NO: 1307581 - RNA, 19 nt, Artificial Sequence
  Description of Artificial Sequence: Synthetic oligonucleotide
  Antisense strand to SEQ ID NO: 1307580
auucccaaagacuauggaa

SEQ ID NO: 1307582 - RNA, 19 nt, Artificial Sequence
  Description of Artificial Sequence: Synthetic oligonucleotide
  Sense strand starting at position 2782 of SEQ ID NO: 1241889
acaauuaugugauuagcag

SEQ ID NO: 1307583 - RNA, 19 nt, Artificial Sequence
  Description of Artificial Sequence: Synthetic oligonucleotide
  Antisense strand to SEQ ID NO: 1307582
cugcuaaucacauaauugu

SEQ ID NO: 1307584 - RNA, 19 nt, Artificial Sequence
  Description of Artificial Sequence: Synthetic oligonucleotide
  Sense strand starting at position 2783 of SEQ ID NO: 1241889
caauuaugugauuagcaga

SEQ ID NO: 1307585 - RNA, 19 nt, Artificial Sequence
  Description of Artificial Sequence: Synthetic oligonucleotide
  Antisense strand to SEQ ID NO: 1307584
ucugcuaaucacauaauug

SEQ ID NO: 1307586 - RNA, 19 nt, Artificial Sequence
  Description of Artificial Sequence: Synthetic oligonucleotide
  Sense strand starting at position 2832 of SEQ ID NO: 1241889
cuuugaaggcaccauucua

SEQ ID NO: 1307587 - RNA, 19 nt, Artificial Sequence
  Description of Artificial Sequence: Synthetic oligonucleotide
  Antisense strand to SEQ ID NO: 1307586
uagaauggugccuucaaag

SEQ ID NO: 1307588 - RNA, 19 nt, Artificial Sequence
  Description of Artificial Sequence: Synthetic oligonucleotide
  Sense strand starting at position 2847 of SEQ ID NO: 1241889
ucuagaauacaucguaauu

SEQ ID NO: 1307589 - RNA, 19 nt, Artificial Sequence
  Description of Artificial Sequence: Synthetic oligonucleotide
  Antisense strand to SEQ ID NO: 1307588
aauuacgauguauucuaga

SEQ ID NO: 1307590 - RNA, 19 nt, Artificial Sequence
  Description of Artificial Sequence: Synthetic oligonucleotide
  Sense strand starting at position 2906 of SEQ ID NO: 1241889
uuaagaguuuaugcaacuu

SEQ ID NO: 1307591 - RNA, 19 nt, Artificial Sequence
  Description of Artificial Sequence: Synthetic oligonucleotide
  Antisense strand to SEQ ID NO: 1307590
aaguugcauaaacucuuaa

SEQ ID NO: 1307592 - RNA, 19 nt, Artificial Sequence
  Description of Artificial Sequence: Synthetic oligonucleotide
  Sense strand starting at position 2922 of SEQ ID NO: 1241889
cuucuuuguguuuaccaca

SEQ ID NO: 1307593 - RNA, 19 nt, Artificial Sequence
  Description of Artificial Sequence: Synthetic oligonucleotide
  Antisense strand to SEQ ID NO: 1307592
ugugguaaacacaaagaag

SEQ ID NO: 1307594 - RNA, 19 nt, Artificial Sequence
  Description of Artificial Sequence: Synthetic oligonucleotide
  Sense strand starting at position 2954 of SEQ ID NO: 1241889
aucaguauguuaguaugau

SEQ ID NO: 1307595 - RNA, 19 nt, Artificial Sequence
  Description of Artificial Sequence: Synthetic oligonucleotide
  Antisense strand to SEQ ID NO: 1307594
aucauacuaacauacugau

SEQ ID NO: 1307596 - RNA, 19 nt, Artificial Sequence
  Description of Artificial Sequence: Synthetic oligonucleotide
  Sense strand starting at position 3388 of SEQ ID NO: 1241889
gaucuaggguauccuauaa

SEQ ID NO: 1307597 - RNA, 19 nt, Artificial Sequence
  Description of Artificial Sequence: Synthetic oligonucleotide
  Antisense strand to SEQ ID NO: 1307596
uuauaggauacccuagauc

SEQ ID NO: 1307598 - RNA, 19 nt, Artificial Sequence
  Description of Artificial Sequence: Synthetic oligonucleotide
  Sense strand starting at position 3408 of SEQ ID NO: 1241889
aucuccuugcccuggaaga

SEQ ID NO: 1307599 - RNA, 19 nt, Artificial Sequence
  Description of Artificial Sequence: Synthetic oligonucleotide
  Antisense strand to SEQ ID NO: 1307598
ucuuccagggcaaggagau

SEQ ID NO: 1307600 - RNA, 19 nt, Artificial Sequence
  Description of Artificial Sequence: Synthetic oligonucleotide
  Sense strand starting at position 3534 of SEQ ID NO: 1241889
ccuucuuacuaaguugaga

SEQ ID NO: 1307601 - RNA, 19 nt, Artificial Sequence
  Description of Artificial Sequence: Synthetic oligonucleotide
  Antisense strand to SEQ ID NO: 1307600
ucucaacuuaguaagaagg

SEQ ID NO: 1307602 - RNA, 19 nt, Artificial Sequence
  Description of Artificial Sequence: Synthetic oligonucleotide
  Sense strand starting at position 3572 of SEQ ID NO: 1241889
ccagauaugagugguugca

SEQ ID NO: 1307603 - RNA, 19 nt, Artificial Sequence
  Description of Artificial Sequence: Synthetic oligonucleotide
  Antisense strand to SEQ ID NO: 1307602
ugcaaccacucauaucugg

SEQ ID NO: 1307604 - RNA, 19 nt, Artificial Sequence
  Description of Artificial Sequence: Synthetic oligonucleotide
  Sense strand starting at position 3574 of SEQ ID NO: 1241889
agauaugagugguugcauu

SEQ ID NO: 1307605 - RNA, 19 nt, Artificial Sequence
  Description of Artificial Sequence: Synthetic oligonucleotide
  Antisense strand to SEQ ID NO: 1307604
aaugcaaccacucauaucu

SEQ ID NO: 1307606 - RNA, 19 nt, Artificial Sequence
  Description of Artificial Sequence: Synthetic oligonucleotide
  Sense strand starting at position 3652 of SEQ ID NO: 1241889
uucuaauaugcugagucua

SEQ ID NO: 1307607 - RNA, 19 nt, Artificial Sequence
  Description of Artificial Sequence: Synthetic oligonucleotide
  Antisense strand to SEQ ID NO: 1307606
uagacucagcauauuagaa

SEQ ID NO: 1307608 - RNA, 19 nt, Artificial Sequence
  Description of Artificial Sequence: Synthetic oligonucleotide
  Sense strand starting at position 3654 of SEQ ID NO: 1241889
cuaauaugcugagucuaac

SEQ ID NO: 1307609 - RNA, 19 nt, Artificial Sequence
  Description of Artificial Sequence: Synthetic oligonucleotide
  Antisense strand to SEQ ID NO: 1307608
guuagacucagcauauuag

SEQ ID NO: 1307610 - RNA, 19 nt, Artificial Sequence
  Description of Artificial Sequence: Synthetic oligonucleotide
  Sense strand starting at position 3657 of SEQ ID NO: 1241889
auaugcugagucuaacuau

SEQ ID NO: 1307611 - RNA, 19 nt, Artificial Sequence
  Description of Artificial Sequence: Synthetic oligonucleotide
  Antisense strand to SEQ ID NO: 1307610
auaguuagacucagcauau

SEQ ID NO: 1307612 - RNA, 19 nt, Artificial Sequence
  Description of Artificial Sequence: Synthetic oligonucleotide
  Sense strand starting at position 3660 of SEQ ID NO: 1241889
ugcugagucuaacuaucau

SEQ ID NO: 1307613 - RNA, 19 nt, Artificial Sequence
  Description of Artificial Sequence: Synthetic oligonucleotide
  Antisense strand to SEQ ID NO: 1307612
augauaguuagacucagca

SEQ ID NO: 1307614 - RNA, 19 nt, Artificial Sequence
  Description of Artificial Sequence: Synthetic oligonucleotide
  Sense strand starting at position 3921 of SEQ ID NO: 1241889
aacaucugagcuugaguuu

SEQ ID NO: 1307615 - RNA, 19 nt, Artificial Sequence
  Description of Artificial Sequence: Synthetic oligonucleotide
  Antisense strand to SEQ ID NO: 1307614
aaacucaagcucagauguu

SEQ ID NO: 1307616 - RNA, 19 nt, Artificial Sequence
  Description of Artificial Sequence: Synthetic oligonucleotide
  Sense strand starting at position 3944 of SEQ ID NO: 1241889
agaaauaauuucugacaug

SEQ ID NO: 1307617 - RNA, 19 nt, Artificial Sequence
  Description of Artificial Sequence: Synthetic oligonucleotide
  Antisense strand to SEQ ID NO: 1307616
caugucagaaauuauuucu

SEQ ID NO: 1307618 - RNA, 19 nt, Artificial Sequence
  Description of Artificial Sequence: Synthetic oligonucleotide
  Sense strand starting at position 3961 of SEQ ID NO: 1241889
ugauaaacccucgggugua

SEQ ID NO: 1307619 - RNA, 19 nt, Artificial Sequence
  Description of Artificial Sequence: Synthetic oligonucleotide
  Antisense strand to SEQ ID NO: 1307618
uacacccgaggguuuauca

SEQ ID NO: 1307620 - RNA, 19 nt, Artificial Sequence
  Description of Artificial Sequence: Synthetic oligonucleotide
  Sense strand starting at position 3974 of SEQ ID NO: 1241889
gguguaccacuagagcauu

SEQ ID NO: 1307621 - RNA, 19 nt, Artificial Sequence
  Description of Artificial Sequence: Synthetic oligonucleotide
  Antisense strand to SEQ ID NO: 1307620
aaugcucuagugguacacc

SEQ ID NO: 1307622 - RNA, 19 nt, Artificial Sequence
  Description of Artificial Sequence: Synthetic oligonucleotide
  Sense strand starting at position 114 of SEQ ID NO: 1241890
aguugaauuuggcuguuua

SEQ ID NO: 1307623 - RNA, 19 nt, Artificial Sequence
  Description of Artificial Sequence: Synthetic oligonucleotide
  Antisense strand to SEQ ID NO: 1307622
uaaacagccaaauucaacu

SEQ ID NO: 1307624 - RNA, 19 nt, Artificial Sequence
  Description of Artificial Sequence: Synthetic oligonucleotide
  Sense strand starting at position 115 of SEQ ID NO: 1241890
guugaauuuggcuguuuaa

SEQ ID NO: 1307625 - RNA, 19 nt, Artificial Sequence
  Description of Artificial Sequence: Synthetic oligonucleotide
  Antisense strand to SEQ ID NO: 1307624
uuaaacagccaaauucaac

SEQ ID NO: 1307626 - RNA, 19 nt, Artificial Sequence
  Description of Artificial Sequence: Synthetic oligonucleotide
  Sense strand starting at position 124 of SEQ ID NO: 1241890
ggcuguuuaacagagauua

SEQ ID NO: 1307627 - RNA, 19 nt, Artificial Sequence
  Description of Artificial Sequence: Synthetic oligonucleotide
  Antisense strand to SEQ ID NO: 1307626
uaaucucuguuaaacagcc

SEQ ID NO: 1307628 - RNA, 19 nt, Artificial Sequence
  Description of Artificial Sequence: Synthetic oligonucleotide
  Sense strand starting at position 132 of SEQ ID NO: 1241890
aacagagauuagcuggauu

SEQ ID NO: 1307629 - RNA, 19 nt, Artificial Sequence
  Description of Artificial Sequence: Synthetic oligonucleotide
  Antisense strand to SEQ ID NO: 1307628
aauccagcuaaucucuguu

SEQ ID NO: 1307630 - RNA, 19 nt, Artificial Sequence
  Description of Artificial Sequence: Synthetic oligonucleotide
  Sense strand starting at position 143 of SEQ ID NO: 1241890
gcuggauuuggcugucuga

SEQ ID NO: 1307631 - RNA, 19 nt, Artificial Sequence
  Description of Artificial Sequence: Synthetic oligonucleotide
  Antisense strand to SEQ ID NO: 1307630
ucagacagccaaauccagc

SEQ ID NO: 1307632 - RNA, 19 nt, Artificial Sequence
  Description of Artificial Sequence: Synthetic oligonucleotide
  Sense strand starting at position 172 of SEQ ID NO: 1241890
cugaaugaucuuugcuaac

SEQ ID NO: 1307633 - RNA, 19 nt, Artificial Sequence
  Description of Artificial Sequence: Synthetic oligonucleotide
  Antisense strand to SEQ ID NO: 1307632
guuagcaaagaucauucag

SEQ ID NO: 1307634 - RNA, 19 nt, Artificial Sequence
  Description of Artificial Sequence: Synthetic oligonucleotide
  Sense strand starting at position 422 of SEQ ID NO: 1241890
agacgauuacauugaagca

SEQ ID NO: 1307635 - RNA, 19 nt, Artificial Sequence
  Description of Artificial Sequence: Synthetic oligonucleotide
  Antisense strand to SEQ ID NO: 1307634
ugcuucaauguaaucgucu

SEQ ID NO: 1307636 - RNA, 19 nt, Artificial Sequence
  Description of Artificial Sequence: Synthetic oligonucleotide
  Sense strand starting at position 536 of SEQ ID NO: 1241890
aggguugguuaaucaucau

SEQ ID NO: 1307637 - RNA, 19 nt, Artificial Sequence
  Description of Artificial Sequence: Synthetic oligonucleotide
  Antisense strand to SEQ ID NO: 1307636
augaugauuaaccaacccu

SEQ ID NO: 1307638 - RNA, 19 nt, Artificial Sequence
  Description of Artificial Sequence: Synthetic oligonucleotide
  Sense strand starting at position 539 of SEQ ID NO: 1241890
guugguuaaucaucauaug

SEQ ID NO: 1307639 - RNA, 19 nt, Artificial Sequence
  Description of Artificial Sequence: Synthetic oligonucleotide
  Antisense strand to SEQ ID NO: 1307638
cauaugaugauuaaccaac

SEQ ID NO: 1307640 - RNA, 19 nt, Artificial Sequence
  Description of Artificial Sequence: Synthetic oligonucleotide
  Sense strand starting at position 639 of SEQ ID NO: 1241890
uggucauugcuauaaagag

SEQ ID NO: 1307641 - RNA, 19 nt, Artificial Sequence
  Description of Artificial Sequence: Synthetic oligonucleotide
  Antisense strand to SEQ ID NO: 1307640
cucuuuauagcaaugacca

SEQ ID NO: 1307642 - RNA, 19 nt, Artificial Sequence
  Description of Artificial Sequence: Synthetic oligonucleotide
  Sense strand starting at position 645 of SEQ ID NO: 1241890
uugcuauaaagagggauca

SEQ ID NO: 1307643 - RNA, 19 nt, Artificial Sequence
  Description of Artificial Sequence: Synthetic oligonucleotide
  Antisense strand to SEQ ID NO: 1307642
ugaucccucuuuauagcaa

SEQ ID NO: 1307644 - RNA, 19 nt, Artificial Sequence
  Description of Artificial Sequence: Synthetic oligonucleotide
  Sense strand starting at position 684 of SEQ ID NO: 1241890
ugugcaugcagucagagaa

SEQ ID NO: 1307645 - RNA, 19 nt, Artificial Sequence
  Description of Artificial Sequence: Synthetic oligonucleotide
  Antisense strand to SEQ ID NO: 1307644
uucucugacugcaugcaca

SEQ ID NO: 1307646 - RNA, 19 nt, Artificial Sequence
  Description of Artificial Sequence: Synthetic oligonucleotide
  Sense strand starting at position 856 of SEQ ID NO: 1241890
acgaucuaaaucuguagga

SEQ ID NO: 1307647 - RNA, 19 nt, Artificial Sequence
  Description of Artificial Sequence: Synthetic oligonucleotide
  Antisense strand to SEQ ID NO: 1307646
uccuacagauuuagaucgu

SEQ ID NO: 1307648 - RNA, 19 nt, Artificial Sequence
  Description of Artificial Sequence: Synthetic oligonucleotide
  Sense strand starting at position 857 of SEQ ID NO: 1241890
cgaucuaaaucuguaggaa

SEQ ID NO: 1307649 - RNA, 19 nt, Artificial Sequence
  Description of Artificial Sequence: Synthetic oligonucleotide
  Antisense strand to SEQ ID NO: 1307648
uuccuacagauuuagaucg

SEQ ID NO: 1307650 - RNA, 19 nt, Artificial Sequence
  Description of Artificial Sequence: Synthetic oligonucleotide
  Sense strand starting at position 860 of SEQ ID NO: 1241890
ucuaaaucuguaggaaauc

SEQ ID NO: 1307651 - RNA, 19 nt, Artificial Sequence
  Description of Artificial Sequence: Synthetic oligonucleotide
  Antisense strand to SEQ ID NO: 1307650
gauuuccuacagauuuaga

SEQ ID NO: 1307652 - RNA, 19 nt, Artificial Sequence
  Description of Artificial Sequence: Synthetic oligonucleotide
  Sense strand starting at position 940 of SEQ ID NO: 1241890
cugguuuguaaacgaaauc

SEQ ID NO: 1307653 - RNA, 19 nt, Artificial Sequence
  Description of Artificial Sequence: Synthetic oligonucleotide
  Antisense strand to SEQ ID NO: 1307652
gauuucguuuacaaaccag

SEQ ID NO: 1307654 - RNA, 19 nt, Artificial Sequence
  Description of Artificial Sequence: Synthetic oligonucleotide
  Sense strand starting at position 941 of SEQ ID NO: 1241890
ugguuuguaaacgaaaucu

SEQ ID NO: 1307655 - RNA, 19 nt, Artificial Sequence
  Description of Artificial Sequence: Synthetic oligonucleotide
  Antisense strand to SEQ ID NO: 1307654
agauuucguuuacaaacca

SEQ ID NO: 1307656 - RNA, 19 nt, Artificial Sequence
  Description of Artificial Sequence: Synthetic oligonucleotide
  Sense strand starting at position 989 of SEQ ID NO: 1241890
acagauucgaggcacagua

SEQ ID NO: 1307657 - RNA, 19 nt, Artificial Sequence
  Description of Artificial Sequence: Synthetic oligonucleotide
  Antisense strand to SEQ ID NO: 1307656
uacugugccucgaaucugu

SEQ ID NO: 1307658 - RNA, 19 nt, Artificial Sequence
  Description of Artificial Sequence: Synthetic oligonucleotide
  Sense strand starting at position 1013 of SEQ ID NO: 1241890
uuaggaaguuacucugaua

SEQ ID NO: 1307659 - RNA, 19 nt, Artificial Sequence
  Description of Artificial Sequence: Synthetic oligonucleotide
  Antisense strand to SEQ ID NO: 1307658
uaucagaguaacuuccuaa

SEQ ID NO: 1307660 - RNA, 19 nt, Artificial Sequence
  Description of Artificial Sequence: Synthetic oligonucleotide
  Sense strand starting at position 1063 of SEQ ID NO: 1241890
aaguuagugucagugagga

SEQ ID NO: 1307661 - RNA, 19 nt, Artificial Sequence
  Description of Artificial Sequence: Synthetic oligonucleotide
  Antisense strand to SEQ ID NO: 1307660
uccucacugacacuaacuu

SEQ ID NO: 1307662 - RNA, 19 nt, Artificial Sequence
  Description of Artificial Sequence: Synthetic oligonucleotide
  Sense strand starting at position 1065 of SEQ ID NO: 1241890
guuagugucagugaggaug

SEQ ID NO: 1307663 - RNA, 19 nt, Artificial Sequence
  Description of Artificial Sequence: Synthetic oligonucleotide
  Antisense strand to SEQ ID NO: 1307662
cauccucacugacacuaac

SEQ ID NO: 1307664 - RNA, 19 nt, Artificial Sequence
  Description of Artificial Sequence: Synthetic oligonucleotide
  Sense strand starting at position 1320 of SEQ ID NO: 1241890
cagggagaagccugugaca

SEQ ID NO: 1307665 - RNA, 19 nt, Artificial Sequence
  Description of Artificial Sequence: Synthetic oligonucleotide
  Antisense strand to SEQ ID NO: 1307664
ugucacaggcuucucccug

SEQ ID NO: 1307666 - RNA, 19 nt, Artificial Sequence
  Description of Artificial Sequence: Synthetic oligonucleotide
  Sense strand starting at position 1322 of SEQ ID NO: 1241890
gggagaagccugugacacu

SEQ ID NO: 1307667 - RNA, 19 nt, Artificial Sequence
  Description of Artificial Sequence: Synthetic oligonucleotide
  Antisense strand to SEQ ID NO: 1307666
agugucacaggcuucuccc

SEQ ID NO: 1307668 - RNA, 19 nt, Artificial Sequence
  Description of Artificial Sequence: Synthetic oligonucleotide
  Sense strand starting at position 1350 of SEQ ID NO: 1241890
aggaaaggagguugucuau

SEQ ID NO: 1307669 - RNA, 19 nt, Artificial Sequence
  Description of Artificial Sequence: Synthetic oligonucleotide
  Antisense strand to SEQ ID NO: 1307668
auagacaaccuccuuuccu

SEQ ID NO: 1307670 - RNA, 19 nt, Artificial Sequence
  Description of Artificial Sequence: Synthetic oligonucleotide
  Sense strand starting at position 1375 of SEQ ID NO: 1241890
cccucaaaucuaggacuga

SEQ ID NO: 1307671 - RNA, 19 nt, Artificial Sequence
  Description of Artificial Sequence: Synthetic oligonucleotide
  Antisense strand to SEQ ID NO: 1307670
ucaguccuagauuugaggg

SEQ ID NO: 1307672 - RNA, 19 nt, Artificial Sequence
  Description of Artificial Sequence: Synthetic oligonucleotide
  Sense strand starting at position 2055 of SEQ ID NO: 1241890
caaagucaagcucgaugau

SEQ ID NO: 1307673 - RNA, 19 nt, Artificial Sequence
  Description of Artificial Sequence: Synthetic oligonucleotide
  Antisense strand to SEQ ID NO: 1307672
aucaucgagcuugacuuug

SEQ ID NO: 1307674 - RNA, 19 nt, Artificial Sequence
  Description of Artificial Sequence: Synthetic oligonucleotide
  Sense strand starting at position 2056 of SEQ ID NO: 1241890
aaagucaagcucgaugauu

SEQ ID NO: 1307675 - RNA, 19 nt, Artificial Sequence
  Description of Artificial Sequence: Synthetic oligonucleotide
  Antisense strand to SEQ ID NO: 1307674
aaucaucgagcuugacuuu

SEQ ID NO: 1307676 - RNA, 19 nt, Artificial Sequence
  Description of Artificial Sequence: Synthetic oligonucleotide
  Sense strand starting at position 2065 of SEQ ID NO: 1241890
cucgaugauugguucucaa

SEQ ID NO: 1307677 - RNA, 19 nt, Artificial Sequence
  Description of Artificial Sequence: Synthetic oligonucleotide
  Antisense strand to SEQ ID NO: 1307676
uugagaaccaaucaucgag

SEQ ID NO: 1307678 - RNA, 19 nt, Artificial Sequence
  Description of Artificial Sequence: Synthetic oligonucleotide
  Sense strand starting at position 2068 of SEQ ID NO: 1241890
gaugauugguucucaagag

SEQ ID NO: 1307679 - RNA, 19 nt, Artificial Sequence
  Description of Artificial Sequence: Synthetic oligonucleotide
  Antisense strand to SEQ ID NO: 1307678
cucuugagaaccaaucauc

SEQ ID NO: 1307680 - RNA, 19 nt, Artificial Sequence
  Description of Artificial Sequence: Synthetic oligonucleotide
  Sense strand starting at position 2147 of SEQ ID NO: 1241890
acugguucucgggaucacu

SEQ ID NO: 1307681 - RNA, 19 nt, Artificial Sequence
  Description of Artificial Sequence: Synthetic oligonucleotide
  Antisense strand to SEQ ID NO: 1307680
agugaucccgagaaccagu

SEQ ID NO: 1307682 - RNA, 19 nt, Artificial Sequence
  Description of Artificial Sequence: Synthetic oligonucleotide
  Sense strand starting at position 2555 of SEQ ID NO: 1241890
aguugugauaaguaguuau

SEQ ID NO: 1307683 - RNA, 19 nt, Artificial Sequence
  Description of Artificial Sequence: Synthetic oligonucleotide
  Antisense strand to SEQ ID NO: 1307682
auaacuacuuaucacaacu

SEQ ID NO: 1307684 - RNA, 19 nt, Artificial Sequence
  Description of Artificial Sequence: Synthetic oligonucleotide
  Sense strand starting at position 2585 of SEQ ID NO: 1241890
guugucuuccuuuaaacau

SEQ ID NO: 1307685 - RNA, 19 nt, Artificial Sequence
  Description of Artificial Sequence: Synthetic oligonucleotide
  Antisense strand to SEQ ID NO: 1307684
auguuuaaaggaagacaac

SEQ ID NO: 1307686 - RNA, 19 nt, Artificial Sequence
  Description of Artificial Sequence: Synthetic oligonucleotide
  Sense strand starting at position 2649 of SEQ ID NO: 1241890
uuaauaucugagggaucuc

SEQ ID NO: 1307687 - RNA, 19 nt, Artificial Sequence
  Description of Artificial Sequence: Synthetic oligonucleotide
  Antisense strand to SEQ ID NO: 1307686
gagaucccucagauauuaa

SEQ ID NO: 1307688 - RNA, 19 nt, Artificial Sequence
  Description of Artificial Sequence: Synthetic oligonucleotide
  Sense strand starting at position 2659 of SEQ ID NO: 1241890
agggaucucuagucauggu

SEQ ID NO: 1307689 - RNA, 19 nt, Artificial Sequence
  Description of Artificial Sequence: Synthetic oligonucleotide
  Antisense strand to SEQ ID NO: 1307688
accaugacuagagaucccu

SEQ ID NO: 1307690 - RNA, 19 nt, Artificial Sequence
  Description of Artificial Sequence: Synthetic oligonucleotide
  Sense strand starting at position 2660 of SEQ ID NO: 1241890
gggaucucuagucaugguu

SEQ ID NO: 1307691 - RNA, 19 nt, Artificial Sequence
  Description of Artificial Sequence: Synthetic oligonucleotide
  Antisense strand to SEQ ID NO: 1307690
aaccaugacuagagauccc

SEQ ID NO: 1307692 - RNA, 19 nt, Artificial Sequence
  Description of Artificial Sequence: Synthetic oligonucleotide
  Sense strand starting at position 2802 of SEQ ID NO: 1241890
ugauuagaacuucgucaau

SEQ ID NO: 1307693 - RNA, 19 nt, Artificial Sequence
  Description of Artificial Sequence: Synthetic oligonucleotide
  Antisense strand to SEQ ID NO: 1307692
auugacgaaguucuaauca

SEQ ID NO: 1307694 - RNA, 19 nt, Artificial Sequence
  Description of Artificial Sequence: Synthetic oligonucleotide
  Sense strand starting at position 3318 of SEQ ID NO: 1241890
cuaauaugugcauauaaag

SEQ ID NO: 1307695 - RNA, 19 nt, Artificial Sequence
  Description of Artificial Sequence: Synthetic oligonucleotide
  Antisense strand to SEQ ID NO: 1307694
cuuuauaugcacauauuag

SEQ ID NO: 1307696 - RNA, 19 nt, Artificial Sequence
  Description of Artificial Sequence: Synthetic oligonucleotide
  Sense strand starting at position 3433 of SEQ ID NO: 1241890
uugugacuuguggauuaug

SEQ ID NO: 1307697 - RNA, 19 nt, Artificial Sequence
  Description of Artificial Sequence: Synthetic oligonucleotide
  Antisense strand to SEQ ID NO: 1307696
cauaauccacaagucacaa

SEQ ID NO: 1307698 - RNA, 19 nt, Artificial Sequence
  Description of Artificial Sequence: Synthetic oligonucleotide
  Sense strand starting at position 3436 of SEQ ID NO: 1241890
ugacuuguggauuauguga

SEQ ID NO: 1307699 - RNA, 19 nt, Artificial Sequence
  Description of Artificial Sequence: Synthetic oligonucleotide
  Antisense strand to SEQ ID NO: 1307698
ucacauaauccacaaguca

SEQ ID NO: 1307700 - RNA, 19 nt, Artificial Sequence
  Description of Artificial Sequence: Synthetic oligonucleotide
  Sense strand starting at position 3774 of SEQ ID NO: 1241890
ggaagaguuuaucuuuaaa

SEQ ID NO: 1307701 - RNA, 19 nt, Artificial Sequence
  Description of Artificial Sequence: Synthetic oligonucleotide
  Antisense strand to SEQ ID NO: 1307700
uuuaaagauaaacucuucc

SEQ ID NO: 1307702 - RNA, 19 nt, Artificial Sequence
  Description of Artificial Sequence: Synthetic oligonucleotide
  Sense strand starting at position 161 of SEQ ID NO: 1241891
uuaaguuugccagguauua

SEQ ID NO: 1307703 - RNA, 19 nt, Artificial Sequence
  Description of Artificial Sequence: Synthetic oligonucleotide
  Antisense strand to SEQ ID NO: 1307702
uaauaccuggcaaacuuaa

SEQ ID NO: 1307704 - RNA, 19 nt, Artificial Sequence
  Description of Artificial Sequence: Synthetic oligonucleotide
  Sense strand starting at position 170 of SEQ ID NO: 1241891
ccagguauuaugugagcca

SEQ ID NO: 1307705 - RNA, 19 nt, Artificial Sequence
  Description of Artificial Sequence: Synthetic oligonucleotide
  Antisense strand to SEQ ID NO: 1307704
uggcucacauaauaccugg

SEQ ID NO: 1307706 - RNA, 19 nt, Artificial Sequence
  Description of Artificial Sequence: Synthetic oligonucleotide
  Sense strand starting at position 173 of SEQ ID NO: 1241891
gguauuaugugagccauag

SEQ ID NO: 1307707 - RNA, 19 nt, Artificial Sequence
  Description of Artificial Sequence: Synthetic oligonucleotide
  Antisense strand to SEQ ID NO: 1307706
cuauggcucacauaauacc

SEQ ID NO: 1307708 - RNA, 19 nt, Artificial Sequence
  Description of Artificial Sequence: Synthetic oligonucleotide
  Sense strand starting at position 201 of SEQ ID NO: 1241891
uguauaugcuucucaugag

SEQ ID NO: 1307709 - RNA, 19 nt, Artificial Sequence
  Description of Artificial Sequence: Synthetic oligonucleotide
  Antisense strand to SEQ ID NO: 1307708
cucaugagaagcauauaca

SEQ ID NO: 1307710 - RNA, 19 nt, Artificial Sequence
  Description of Artificial Sequence: Synthetic oligonucleotide
  Sense strand starting at position 205 of SEQ ID NO: 1241891
uaugcuucucaugagugga

SEQ ID NO: 1307711 - RNA, 19 nt, Artificial Sequence
  Description of Artificial Sequence: Synthetic oligonucleotide
  Antisense strand to SEQ ID NO: 1307710
uccacucaugagaagcaua

SEQ ID NO: 1307712 - RNA, 19 nt, Artificial Sequence
  Description of Artificial Sequence: Synthetic oligonucleotide
  Sense strand starting at position 238 of SEQ ID NO: 1241891
ggcauagaguaggcucuua

SEQ ID NO: 1307713 - RNA, 19 nt, Artificial Sequence
  Description of Artificial Sequence: Synthetic oligonucleotide
  Antisense strand to SEQ ID NO: 1307712
uaagagccuacucuaugcc

SEQ ID NO: 1307714 - RNA, 19 nt, Artificial Sequence
  Description of Artificial Sequence: Synthetic oligonucleotide
  Sense strand starting at position 271 of SEQ ID NO: 1241891
uaauuacucgaugaaggca

SEQ ID NO: 1307715 - RNA, 19 nt, Artificial Sequence
  Description of Artificial Sequence: Synthetic oligonucleotide
  Antisense strand to SEQ ID NO: 1307714
ugccuucaucgaguaauua

SEQ ID NO: 1307716 - RNA, 19 nt, Artificial Sequence
  Description of Artificial Sequence: Synthetic oligonucleotide
  Sense strand starting at position 285 of SEQ ID NO: 1241891
aggcacaauugaucuaagu

SEQ ID NO: 1307717 - RNA, 19 nt, Artificial Sequence
  Description of Artificial Sequence: Synthetic oligonucleotide
  Antisense strand to SEQ ID NO: 1307716
acuuagaucaauugugccu

SEQ ID NO: 1307718 - RNA, 19 nt, Artificial Sequence
  Description of Artificial Sequence: Synthetic oligonucleotide
  Sense strand starting at position 510 of SEQ ID NO: 1241891
cacugauacuggguuuaua

SEQ ID NO: 1307719 - RNA, 19 nt, Artificial Sequence
  Description of Artificial Sequence: Synthetic oligonucleotide
  Antisense strand to SEQ ID NO: 1307718
uauaaacccaguaucagug

SEQ ID NO: 1307720 - RNA, 19 nt, Artificial Sequence
  Description of Artificial Sequence: Synthetic oligonucleotide
  Sense strand starting at position 521 of SEQ ID NO: 1241891
gguuuauaaacauguuagg

SEQ ID NO: 1307721 - RNA, 19 nt, Artificial Sequence
  Description of Artificial Sequence: Synthetic oligonucleotide
  Antisense strand to SEQ ID NO: 1307720
ccuaacauguuuauaaacc

SEQ ID NO: 1307722 - RNA, 19 nt, Artificial Sequence
  Description of Artificial Sequence: Synthetic oligonucleotide
  Sense strand starting at position 527 of SEQ ID NO: 1241891
uaaacauguuagggacaaa

SEQ ID NO: 1307723 - RNA, 19 nt, Artificial Sequence
  Description of Artificial Sequence: Synthetic oligonucleotide
  Antisense strand to SEQ ID NO: 1307722
uuugucccuaacauguuua

SEQ ID NO: 1307724 - RNA, 19 nt, Artificial Sequence
  Description of Artificial Sequence: Synthetic oligonucleotide
  Sense strand starting at position 559 of SEQ ID NO: 1241891
uaaggcaugugucugcuaa

SEQ ID NO: 1307725 - RNA, 19 nt, Artificial Sequence
  Description of Artificial Sequence: Synthetic oligonucleotide
  Antisense strand to SEQ ID NO: 1307724
uuagcagacacaugccuua

SEQ ID NO: 1307726 - RNA, 19 nt, Artificial Sequence
  Description of Artificial Sequence: Synthetic oligonucleotide
  Sense strand starting at position 560 of SEQ ID NO: 1241891
aaggcaugugucugcuaau

SEQ ID NO: 1307727 - RNA, 19 nt, Artificial Sequence
  Description of Artificial Sequence: Synthetic oligonucleotide
  Antisense strand to SEQ ID NO: 1307726
auuagcagacacaugccuu

SEQ ID NO: 1307728 - RNA, 19 nt, Artificial Sequence
  Description of Artificial Sequence: Synthetic oligonucleotide
  Sense strand starting at position 561 of SEQ ID NO: 1241891
aggcaugugucugcuaaug

SEQ ID NO: 1307729 - RNA, 19 nt, Artificial Sequence
  Description of Artificial Sequence: Synthetic oligonucleotide
  Antisense strand to SEQ ID NO: 1307728
cauuagcagacacaugccu

SEQ ID NO: 1307730 - RNA, 19 nt, Artificial Sequence
  Description of Artificial Sequence: Synthetic oligonucleotide
  Sense strand starting at position 569 of SEQ ID NO: 1241891
gucugcuaaugaucaggaa

SEQ ID NO: 1307731 - RNA, 19 nt, Artificial Sequence
  Description of Artificial Sequence: Synthetic oligonucleotide
  Antisense strand to SEQ ID NO: 1307730
uuccugaucauuagcagac

SEQ ID NO: 1307732 - RNA, 19 nt, Artificial Sequence
  Description of Artificial Sequence: Synthetic oligonucleotide
  Sense strand starting at position 634 of SEQ ID NO: 1241891
caugguguggcucaaacau

SEQ ID NO: 1307733 - RNA, 19 nt, Artificial Sequence
  Description of Artificial Sequence: Synthetic oligonucleotide
  Antisense strand to SEQ ID NO: 1307732
auguuugagccacaccaug

SEQ ID NO: 1307734 - RNA, 19 nt, Artificial Sequence
  Description of Artificial Sequence: Synthetic oligonucleotide
  Sense strand starting at position 675 of SEQ ID NO: 1241891
guaggaggucuguauucuc

SEQ ID NO: 1307735 - RNA, 19 nt, Artificial Sequence
  Description of Artificial Sequence: Synthetic oligonucleotide
  Antisense strand to SEQ ID NO: 1307734
gagaauacagaccuccuac

SEQ ID NO: 1307736 - RNA, 19 nt, Artificial Sequence
  Description of Artificial Sequence: Synthetic oligonucleotide
  Sense strand starting at position 680 of SEQ ID NO: 1241891
aggucuguauucucuugau

SEQ ID NO: 1307737 - RNA, 19 nt, Artificial Sequence
  Description of Artificial Sequence: Synthetic oligonucleotide
  Antisense strand to SEQ ID NO: 1307736
aucaagagaauacagaccu

SEQ ID NO: 1307738 - RNA, 19 nt, Artificial Sequence
  Description of Artificial Sequence: Synthetic oligonucleotide
  Sense strand starting at position 821 of SEQ ID NO: 1241891
ggugaacuccagggcucua

SEQ ID NO: 1307739 - RNA, 19 nt, Artificial Sequence
  Description of Artificial Sequence: Synthetic oligonucleotide
  Antisense strand to SEQ ID NO: 1307738
uagagcccuggaguucacc

SEQ ID NO: 1307740 - RNA, 19 nt, Artificial Sequence
  Description of Artificial Sequence: Synthetic oligonucleotide
  Sense strand starting at position 968 of SEQ ID NO: 1241891
ugagauuagguucaucgua

SEQ ID NO: 1307741 - RNA, 19 nt, Artificial Sequence
  Description of Artificial Sequence: Synthetic oligonucleotide
  Antisense strand to SEQ ID NO: 1307740
uacgaugaaccuaaucuca

SEQ ID NO: 1307742 - RNA, 19 nt, Artificial Sequence
  Description of Artificial Sequence: Synthetic oligonucleotide
  Sense strand starting at position 970 of SEQ ID NO: 1241891
agauuagguucaucguaga

SEQ ID NO: 1307743 - RNA, 19 nt, Artificial Sequence
  Description of Artificial Sequence: Synthetic oligonucleotide
  Antisense strand to SEQ ID NO: 1307742
ucuacgaugaaccuaaucu

SEQ ID NO: 1307744 - RNA, 19 nt, Artificial Sequence
  Description of Artificial Sequence: Synthetic oligonucleotide
  Sense strand starting at position 1272 of SEQ ID NO: 1241891
gguagacaauaucauaaga

SEQ ID NO: 1307745 - RNA, 19 nt, Artificial Sequence
  Description of Artificial Sequence: Synthetic oligonucleotide
  Antisense strand to SEQ ID NO: 1307744
ucuuaugauauugucuacc

SEQ ID NO: 1307746 - RNA, 19 nt, Artificial Sequence
  Description of Artificial Sequence: Synthetic oligonucleotide
  Sense strand starting at position 1340 of SEQ ID NO: 1241891
ggcauucucauccauggga

SEQ ID NO: 1307747 - RNA, 19 nt, Artificial Sequence
  Description of Artificial Sequence: Synthetic oligonucleotide
  Antisense strand to SEQ ID NO: 1307746
ucccauggaugagaaugcc

SEQ ID NO: 1307748 - RNA, 19 nt, Artificial Sequence
  Description of Artificial Sequence: Synthetic oligonucleotide
  Sense strand starting at position 2658 of SEQ ID NO: 1241891
ggugcaggcggguaaauua

SEQ ID NO: 1307749 - RNA, 19 nt, Artificial Sequence
  Description of Artificial Sequence: Synthetic oligonucleotide
  Antisense strand to SEQ ID NO: 1307748
uaauuuacccgccugcacc

SEQ ID NO: 1307750 - RNA, 19 nt, Artificial Sequence
  Description of Artificial Sequence: Synthetic oligonucleotide
  Sense strand starting at position 2899 of SEQ ID NO: 1241891
aggagaaggucuuucugca

SEQ ID NO: 1307751 - RNA, 19 nt, Artificial Sequence
  Description of Artificial Sequence: Synthetic oligonucleotide
  Antisense strand to SEQ ID NO: 1307750
ugcagaaagaccuucuccu

SEQ ID NO: 1307752 - RNA, 19 nt, Artificial Sequence
  Description of Artificial Sequence: Synthetic oligonucleotide
  Sense strand starting at position 2904 of SEQ ID NO: 1241891
aaggucuuucugcaaacga

SEQ ID NO: 1307753 - RNA, 19 nt, Artificial Sequence
  Description of Artificial Sequence: Synthetic oligonucleotide
  Antisense strand to SEQ ID NO: 1307752
ucguuugcagaaagaccuu

SEQ ID NO: 1307754 - RNA, 19 nt, Artificial Sequence
  Description of Artificial Sequence: Synthetic oligonucleotide
  Sense strand starting at position 2932 of SEQ ID NO: 1241891
cugguuuagucuuuggguu

SEQ ID NO: 1307755 - RNA, 19 nt, Artificial Sequence
  Description of Artificial Sequence: Synthetic oligonucleotide
  Antisense strand to SEQ ID NO: 1307754
aacccaaagacuaaaccag

SEQ ID NO: 1307756 - RNA, 19 nt, Artificial Sequence
  Description of Artificial Sequence: Synthetic oligonucleotide
  Sense strand starting at position 3082 of SEQ ID NO: 1241891
ugcaaagucuuauuaagac

SEQ ID NO: 1307757 - RNA, 19 nt, Artificial Sequence
  Description of Artificial Sequence: Synthetic oligonucleotide
  Antisense strand to SEQ ID NO: 1307756
gucuuaauaagacuuugca

SEQ ID NO: 1307758 - RNA, 19 nt, Artificial Sequence
  Description of Artificial Sequence: Synthetic oligonucleotide
  Sense strand starting at position 3112 of SEQ ID NO: 1241891
cuggucacgucacugguaa

SEQ ID NO: 1307759 - RNA, 19 nt, Artificial Sequence
  Description of Artificial Sequence: Synthetic oligonucleotide
  Antisense strand to SEQ ID NO: 1307758
uuaccagugacgugaccag

SEQ ID NO: 1307760 - RNA, 19 nt, Artificial Sequence
  Description of Artificial Sequence: Synthetic oligonucleotide
  Sense strand starting at position 3199 of SEQ ID NO: 1241891
uguuaaauacugcaauaag

SEQ ID NO: 1307761 - RNA, 19 nt, Artificial Sequence
  Description of Artificial Sequence: Synthetic oligonucleotide
  Antisense strand to SEQ ID NO: 1307760
cuuauugcaguauuuaaca

SEQ ID NO: 1307762 - RNA, 19 nt, Artificial Sequence
  Description of Artificial Sequence: Synthetic oligonucleotide
  Sense strand starting at position 3285 of SEQ ID NO: 1241891
aucuuaacguucccugaaa

SEQ ID NO: 1307763 - RNA, 19 nt, Artificial Sequence
  Description of Artificial Sequence: Synthetic oligonucleotide
  Antisense strand to SEQ ID NO: 1307762
uuucagggaacguuaagau

SEQ ID NO: 1307764 - RNA, 19 nt, Artificial Sequence
  Description of Artificial Sequence: Synthetic oligonucleotide
  Sense strand starting at position 3286 of SEQ ID NO: 1241891
ucuuaacguucccugaaau

SEQ ID NO: 1307765 - RNA, 19 nt, Artificial Sequence
  Description of Artificial Sequence: Synthetic oligonucleotide
  Antisense strand to SEQ ID NO: 1307764
auuucagggaacguuaaga

SEQ ID NO: 1307766 - RNA, 19 nt, Artificial Sequence
  Description of Artificial Sequence: Synthetic oligonucleotide
  Sense strand starting at position 3287 of SEQ ID NO: 1241891
cuuaacguucccugaaauu

SEQ ID NO: 1307767 - RNA, 19 nt, Artificial Sequence
  Description of Artificial Sequence: Synthetic oligonucleotide
  Antisense strand to SEQ ID NO: 1307766
aauuucagggaacguuaag

SEQ ID NO: 1307768 - RNA, 19 nt, Artificial Sequence
  Description of Artificial Sequence: Synthetic oligonucleotide
  Sense strand starting at position 3360 of SEQ ID NO: 1241891
gucaaauggaccugaguuc

SEQ ID NO: 1307769 - RNA, 19 nt, Artificial Sequence
  Description of Artificial Sequence: Synthetic oligonucleotide
  Antisense strand to SEQ ID NO: 1307768
gaacucagguccauuugac

SEQ ID NO: 1307770 - RNA, 19 nt, Artificial Sequence
  Description of Artificial Sequence: Synthetic oligonucleotide
  Sense strand starting at position 3404 of SEQ ID NO: 1241891
auuaauagcugacuuuaag

SEQ ID NO: 1307771 - RNA, 19 nt, Artificial Sequence
  Description of Artificial Sequence: Synthetic oligonucleotide
  Antisense strand to SEQ ID NO: 1307770
cuuaaagucagcuauuaau

SEQ ID NO: 1307772 - RNA, 19 nt, Artificial Sequence
  Description of Artificial Sequence: Synthetic oligonucleotide
  Sense strand starting at position 3410 of SEQ ID NO: 1241891
agcugacuuuaaguaaacu

SEQ ID NO: 1307773 - RNA, 19 nt, Artificial Sequence
  Description of Artificial Sequence: Synthetic oligonucleotide
  Antisense strand to SEQ ID NO: 1307772
aguuuacuuaaagucagcu

SEQ ID NO: 1307774 - RNA, 19 nt, Artificial Sequence
  Description of Artificial Sequence: Synthetic oligonucleotide
  Sense strand starting at position 3523 of SEQ ID NO: 1241891
gcauucuguccugcuugua

SEQ ID NO: 1307775 - RNA, 19 nt, Artificial Sequence
  Description of Artificial Sequence: Synthetic oligonucleotide
  Antisense strand to SEQ ID NO: 1307774
uacaagcaggacagaaugc

SEQ ID NO: 1307776 - RNA, 19 nt, Artificial Sequence
  Description of Artificial Sequence: Synthetic oligonucleotide
  Sense strand starting at position 3898 of SEQ ID NO: 1241891
uuauguaaggcugaucaua

SEQ ID NO: 1307777 - RNA, 19 nt, Artificial Sequence
  Description of Artificial Sequence: Synthetic oligonucleotide
  Antisense strand to SEQ ID NO: 1307776
uaugaucagccuuacauaa

SEQ ID NO: 1307778 - RNA, 19 nt, Artificial Sequence
  Description of Artificial Sequence: Synthetic oligonucleotide
  Sense strand starting at position 3900 of SEQ ID NO: 1241891
auguaaggcugaucauaaa

SEQ ID NO: 1307779 - RNA, 19 nt, Artificial Sequence
  Description of Artificial Sequence: Synthetic oligonucleotide
  Antisense strand to SEQ ID NO: 1307778
uuuaugaucagccuuacau

SEQ ID NO: 1307780 - RNA, 19 nt, Artificial Sequence
  Description of Artificial Sequence: Synthetic oligonucleotide
  Sense strand starting at position 3912 of SEQ ID NO: 1241891
ucauaaauguaguuuccca

SEQ ID NO: 1307781 - RNA, 19 nt, Artificial Sequence
  Description of Artificial Sequence: Synthetic oligonucleotide
  Antisense strand to SEQ ID NO: 1307780
ugggaaacuacauuuauga

SEQ ID NO: 1307782 - RNA, 19 nt, Artificial Sequence
  Description of Artificial Sequence: Synthetic oligonucleotide
  Sense strand starting at position 150 of SEQ ID NO: 1241892
ucaucucugagcugggaaa

SEQ ID NO: 1307783 - RNA, 19 nt, Artificial Sequence
  Description of Artificial Sequence: Synthetic oligonucleotide
  Antisense strand to SEQ ID NO: 1307782
uuucccagcucagagauga

SEQ ID NO: 1307784 - RNA, 19 nt, Artificial Sequence
  Description of Artificial Sequence: Synthetic oligonucleotide
  Sense strand starting at position 270 of SEQ ID NO: 1241892
gggcuugagguuuaggagu

SEQ ID NO: 1307785 - RNA, 19 nt, Artificial Sequence
  Description of Artificial Sequence: Synthetic oligonucleotide
  Antisense strand to SEQ ID NO: 1307784
acuccuaaaccucaagccc

SEQ ID NO: 1307786 - RNA, 19 nt, Artificial Sequence
  Description of Artificial Sequence: Synthetic oligonucleotide
  Sense strand starting at position 281 of SEQ ID NO: 1241892
uuaggaguggccugugcuu

SEQ ID NO: 1307787 - RNA, 19 nt, Artificial Sequence
  Description of Artificial Sequence: Synthetic oligonucleotide
  Antisense strand to SEQ ID NO: 1307786
aagcacaggccacuccuaa

SEQ ID NO: 1307788 - RNA, 19 nt, Artificial Sequence
  Description of Artificial Sequence: Synthetic oligonucleotide
  Sense strand starting at position 440 of SEQ ID NO: 1241892
cagaauaguuaguaggaga

SEQ ID NO: 1307789 - RNA, 19 nt, Artificial Sequence
  Description of Artificial Sequence: Synthetic oligonucleotide
  Antisense strand to SEQ ID NO: 1307788
ucuccuacuaacuauucug

SEQ ID NO: 1307790 - RNA, 19 nt, Artificial Sequence
  Description of Artificial Sequence: Synthetic oligonucleotide
  Sense strand starting at position 976 of SEQ ID NO: 1241892
gggcaacuauccuccgauc

SEQ ID NO: 1307791 - RNA, 19 nt, Artificial Sequence
  Description of Artificial Sequence: Synthetic oligonucleotide
  Antisense strand to SEQ ID NO: 1307790
gaucggaggauaguugccc

SEQ ID NO: 1307792 - RNA, 19 nt, Artificial Sequence
  Description of Artificial Sequence: Synthetic oligonucleotide
  Sense strand starting at position 978 of SEQ ID NO: 1241892
gcaacuauccuccgaucca

SEQ ID NO: 1307793 - RNA, 19 nt, Artificial Sequence
  Description of Artificial Sequence: Synthetic oligonucleotide
  Antisense strand to SEQ ID NO: 1307792
uggaucggaggauaguugc

SEQ ID NO: 1307794 - RNA, 19 nt, Artificial Sequence
  Description of Artificial Sequence: Synthetic oligonucleotide
  Sense strand starting at position 1038 of SEQ ID NO: 1241892
cugggaguucccugcagag

SEQ ID NO: 1307795 - RNA, 19 nt, Artificial Sequence
  Description of Artificial Sequence: Synthetic oligonucleotide
  Antisense strand to SEQ ID NO: 1307794
cucugcagggaacucccag

SEQ ID NO: 1307796 - RNA, 19 nt, Artificial Sequence
  Description of Artificial Sequence: Synthetic oligonucleotide
  Sense strand starting at position 1174 of SEQ ID NO: 1241892
gggauugcuuagggagaug

SEQ ID NO: 1307797 - RNA, 19 nt, Artificial Sequence
  Description of Artificial Sequence: Synthetic oligonucleotide
  Antisense strand to SEQ ID NO: 1307796
caucucccuaagcaauccc

SEQ ID NO: 1307798 - RNA, 19 nt, Artificial Sequence
  Description of Artificial Sequence: Synthetic oligonucleotide
  Sense strand starting at position 1359 of SEQ ID NO: 1241892
gggaguuauaaauggcucu

SEQ ID NO: 1307799 - RNA, 19 nt, Artificial Sequence
  Description of Artificial Sequence: Synthetic oligonucleotide
  Antisense strand to SEQ ID NO: 1307798
agagccauuuauaacuccc

SEQ ID NO: 1307800 - RNA, 19 nt, Artificial Sequence
  Description of Artificial Sequence: Synthetic oligonucleotide
  Sense strand starting at position 1652 of SEQ ID NO: 1241892
agccaugucucugcaucaa

SEQ ID NO: 1307801 - RNA, 19 nt, Artificial Sequence
  Description of Artificial Sequence: Synthetic oligonucleotide
  Antisense strand to SEQ ID NO: 1307800
uugaugcagagacauggcu

SEQ ID NO: 1307802 - RNA, 19 nt, Artificial Sequence
  Description of Artificial Sequence: Synthetic oligonucleotide
  Sense strand starting at position 1656 of SEQ ID NO: 1241892
augucucugcaucaagauu

SEQ ID NO: 1307803 - RNA, 19 nt, Artificial Sequence
  Description of Artificial Sequence: Synthetic oligonucleotide
  Antisense strand to SEQ ID NO: 1307802
aaucuugaugcagagacau

SEQ ID NO: 1307804 - RNA, 19 nt, Artificial Sequence
  Description of Artificial Sequence: Synthetic oligonucleotide
  Sense strand starting at position 1975 of SEQ ID NO: 1241892
acgagaucauguugugauu

SEQ ID NO: 1307805 - RNA, 19 nt, Artificial Sequence
  Description of Artificial Sequence: Synthetic oligonucleotide
  Antisense strand to SEQ ID NO: 1307804
aaucacaacaugaucucgu

SEQ ID NO: 1307806 - RNA, 19 nt, Artificial Sequence
  Description of Artificial Sequence: Synthetic oligonucleotide
  Sense strand starting at position 1977 of SEQ ID NO: 1241892
gagaucauguugugauuac

SEQ ID NO: 1307807 - RNA, 19 nt, Artificial Sequence
  Description of Artificial Sequence: Synthetic oligonucleotide
  Antisense strand to SEQ ID NO: 1307806
guaaucacaacaugaucuc

SEQ ID NO: 1307808 - RNA, 19 nt, Artificial Sequence
  Description of Artificial Sequence: Synthetic oligonucleotide
  Sense strand starting at position 1978 of SEQ ID NO: 1241892
agaucauguugugauuaca

SEQ ID NO: 1307809 - RNA, 19 nt, Artificial Sequence
  Description of Artificial Sequence: Synthetic oligonucleotide
  Antisense strand to SEQ ID NO: 1307808
uguaaucacaacaugaucu

SEQ ID NO: 1307810 - RNA, 19 nt, Artificial Sequence
  Description of Artificial Sequence: Synthetic oligonucleotide
  Sense strand starting at position 2324 of SEQ ID NO: 1241892
ccucaucagccuugguuua

SEQ ID NO: 1307811 - RNA, 19 nt, Artificial Sequence
  Description of Artificial Sequence: Synthetic oligonucleotide
  Antisense strand to SEQ ID NO: 1307810
uaaaccaaggcugaugagg

SEQ ID NO: 1307812 - RNA, 19 nt, Artificial Sequence
  Description of Artificial Sequence: Synthetic oligonucleotide
  Sense strand starting at position 2325 of SEQ ID NO: 1241892
cucaucagccuugguuuaa

SEQ ID NO: 1307813 - RNA, 19 nt, Artificial Sequence
  Description of Artificial Sequence: Synthetic oligonucleotide
  Antisense strand to SEQ ID NO: 1307812
uuaaaccaaggcugaugag

SEQ ID NO: 1307814 - RNA, 19 nt, Artificial Sequence
  Description of Artificial Sequence: Synthetic oligonucleotide
  Sense strand starting at position 2329 of SEQ ID NO: 1241892
ucagccuugguuuaaguaa

SEQ ID NO: 1307815 - RNA, 19 nt, Artificial Sequence
  Description of Artificial Sequence: Synthetic oligonucleotide
  Antisense strand to SEQ ID NO: 1307814
uuacuuaaaccaaggcuga

SEQ ID NO: 1307816 - RNA, 19 nt, Artificial Sequence
  Description of Artificial Sequence: Synthetic oligonucleotide
  Sense strand starting at position 2446 of SEQ ID NO: 1241892
gucuucucugugcagucau

SEQ ID NO: 1307817 - RNA, 19 nt, Artificial Sequence
  Description of Artificial Sequence: Synthetic oligonucleotide
  Antisense strand to SEQ ID NO: 1307816
augacugcacagagaagac

SEQ ID NO: 1307818 - RNA, 19 nt, Artificial Sequence
  Description of Artificial Sequence: Synthetic oligonucleotide
  Sense strand starting at position 2536 of SEQ ID NO: 1241892
gcuacaaauuccuauggcu

SEQ ID NO: 1307819 - RNA, 19 nt, Artificial Sequence
  Description of Artificial Sequence: Synthetic oligonucleotide
  Antisense strand to SEQ ID NO: 1307818
agccauaggaauuuguagc

SEQ ID NO: 1307820 - RNA, 19 nt, Artificial Sequence
  Description of Artificial Sequence: Synthetic oligonucleotide
  Sense strand starting at position 2545 of SEQ ID NO: 1241892
uccuauggcuuagugacau

SEQ ID NO: 1307821 - RNA, 19 nt, Artificial Sequence
  Description of Artificial Sequence: Synthetic oligonucleotide
  Antisense strand to SEQ ID NO: 1307820
augucacuaagccauagga

SEQ ID NO: 1307822 - RNA, 19 nt, Artificial Sequence
  Description of Artificial Sequence: Synthetic oligonucleotide
  Sense strand starting at position 2549 of SEQ ID NO: 1241892
auggcuuagugacauugua

SEQ ID NO: 1307823 - RNA, 19 nt, Artificial Sequence
  Description of Artificial Sequence: Synthetic oligonucleotide
  Antisense strand to SEQ ID NO: 1307822
uacaaugucacuaagccau

SEQ ID NO: 1307824 - RNA, 19 nt, Artificial Sequence
  Description of Artificial Sequence: Synthetic oligonucleotide
  Sense strand starting at position 2569 of SEQ ID NO: 1241892
ccauuauaacaugguagca

SEQ ID NO: 1307825 - RNA, 19 nt, Artificial Sequence
  Description of Artificial Sequence: Synthetic oligonucleotide
  Antisense strand to SEQ ID NO: 1307824
ugcuaccauguuauaaugg

SEQ ID NO: 1307826 - RNA, 19 nt, Artificial Sequence
  Description of Artificial Sequence: Synthetic oligonucleotide
  Sense strand starting at position 2591 of SEQ ID NO: 1241892
ggcacuacuuaugugcuua

SEQ ID NO: 1307827 - RNA, 19 nt, Artificial Sequence
  Description of Artificial Sequence: Synthetic oligonucleotide
  Antisense strand to SEQ ID NO: 1307826
uaagcacauaaguagugcc

SEQ ID NO: 1307828 - RNA, 19 nt, Artificial Sequence
  Description of Artificial Sequence: Synthetic oligonucleotide
  Sense strand starting at position 2595 of SEQ ID NO: 1241892
cuacuuaugugcuuauggu

SEQ ID NO: 1307829 - RNA, 19 nt, Artificial Sequence
  Description of Artificial Sequence: Synthetic oligonucleotide
  Antisense strand to SEQ ID NO: 1307828
accauaagcacauaaguag

SEQ ID NO: 1307830 - RNA, 19 nt, Artificial Sequence
  Description of Artificial Sequence: Synthetic oligonucleotide
  Sense strand starting at position 2608 of SEQ ID NO: 1241892
uauggugacgcuuguguaa

SEQ ID NO: 1307831 - RNA, 19 nt, Artificial Sequence
  Description of Artificial Sequence: Synthetic oligonucleotide
  Antisense strand to SEQ ID NO: 1307830
uuacacaagcgucaccaua

SEQ ID NO: 1307832 - RNA, 19 nt, Artificial Sequence
  Description of Artificial Sequence: Synthetic oligonucleotide
  Sense strand starting at position 2611 of SEQ ID NO: 1241892
ggugacgcuuguguaaaca

SEQ ID NO: 1307833 - RNA, 19 nt, Artificial Sequence
  Description of Artificial Sequence: Synthetic oligonucleotide
  Antisense strand to SEQ ID NO: 1307832
uguuuacacaagcgucacc

SEQ ID NO: 1307834 - RNA, 19 nt, Artificial Sequence
  Description of Artificial Sequence: Synthetic oligonucleotide
  Sense strand starting at position 2766 of SEQ ID NO: 1241892
guguauuucuucuacuuac

SEQ ID NO: 1307835 - RNA, 19 nt, Artificial Sequence
  Description of Artificial Sequence: Synthetic oligonucleotide
  Antisense strand to SEQ ID NO: 1307834
guaaguagaagaaauacac

SEQ ID NO: 1307836 - RNA, 19 nt, Artificial Sequence
  Description of Artificial Sequence: Synthetic oligonucleotide
  Sense strand starting at position 2850 of SEQ ID NO: 1241892
aggcauuguuagcauagga

SEQ ID NO: 1307837 - RNA, 19 nt, Artificial Sequence
  Description of Artificial Sequence: Synthetic oligonucleotide
  Antisense strand to SEQ ID NO: 1307836
uccuaugcuaacaaugccu

SEQ ID NO: 1307838 - RNA, 19 nt, Artificial Sequence
  Description of Artificial Sequence: Synthetic oligonucleotide
  Sense strand starting at position 2911 of SEQ ID NO: 1241892
gugggucaauauguggaau

SEQ ID NO: 1307839 - RNA, 19 nt, Artificial Sequence
  Description of Artificial Sequence: Synthetic oligonucleotide
  Antisense strand to SEQ ID NO: 1307838
auuccacauauugacccac

SEQ ID NO: 1307840 - RNA, 19 nt, Artificial Sequence
  Description of Artificial Sequence: Synthetic oligonucleotide
  Sense strand starting at position 2927 of SEQ ID NO: 1241892
aauggaagacagugauguu

SEQ ID NO: 1307841 - RNA, 19 nt, Artificial Sequence
  Description of Artificial Sequence: Synthetic oligonucleotide
  Antisense strand to SEQ ID NO: 1307840
aacaucacugucuuccauu

SEQ ID NO: 1307842 - RNA, 19 nt, Artificial Sequence
  Description of Artificial Sequence: Synthetic oligonucleotide
  Sense strand starting at position 2942 of SEQ ID NO: 1241892
uguugaugauucugacucu

SEQ ID NO: 1307843 - RNA, 19 nt, Artificial Sequence
  Description of Artificial Sequence: Synthetic oligonucleotide
  Antisense strand to SEQ ID NO: 1307842
agagucagaaucaucaaca

SEQ ID NO: 1307844 - RNA, 19 nt, Artificial Sequence
  Description of Artificial Sequence: Synthetic oligonucleotide
  Sense strand starting at position 3121 of SEQ ID NO: 1241892
agcuaaggguuauuaccaa

SEQ ID NO: 1307845 - RNA, 19 nt, Artificial Sequence
  Description of Artificial Sequence: Synthetic oligonucleotide
  Antisense strand to SEQ ID NO: 1307844
uugguaauaacccuuagcu

SEQ ID NO: 1307846 - RNA, 19 nt, Artificial Sequence
  Description of Artificial Sequence: Synthetic oligonucleotide
  Sense strand starting at position 3125 of SEQ ID NO: 1241892
aaggguuauuaccaagaga

SEQ ID NO: 1307847 - RNA, 19 nt, Artificial Sequence
  Description of Artificial Sequence: Synthetic oligonucleotide
  Antisense strand to SEQ ID NO: 1307846
ucucuugguaauaacccuu

SEQ ID NO: 1307848 - RNA, 19 nt, Artificial Sequence
  Description of Artificial Sequence: Synthetic oligonucleotide
  Sense strand starting at position 3282 of SEQ ID NO: 1241892
gccagaggucagugacaug

SEQ ID NO: 1307849 - RNA, 19 nt, Artificial Sequence
  Description of Artificial Sequence: Synthetic oligonucleotide
  Antisense strand to SEQ ID NO: 1307848
caugucacugaccucuggc

SEQ ID NO: 1307850 - RNA, 19 nt, Artificial Sequence
  Description of Artificial Sequence: Synthetic oligonucleotide
  Sense strand starting at position 3287 of SEQ ID NO: 1241892
aggucagugacaugaucau

SEQ ID NO: 1307851 - RNA, 19 nt, Artificial Sequence
  Description of Artificial Sequence: Synthetic oligonucleotide
  Antisense strand to SEQ ID NO: 1307850
augaucaugucacugaccu

SEQ ID NO: 1307852 - RNA, 19 nt, Artificial Sequence
  Description of Artificial Sequence: Synthetic oligonucleotide
  Sense strand starting at position 3554 of SEQ ID NO: 1241892
aauuuagucuaacguaagu

SEQ ID NO: 1307853 - RNA, 19 nt, Artificial Sequence
  Description of Artificial Sequence: Synthetic oligonucleotide
  Antisense strand to SEQ ID NO: 1307852
acuuacguuagacuaaauu

SEQ ID NO: 1307854 - RNA, 19 nt, Artificial Sequence
  Description of Artificial Sequence: Synthetic oligonucleotide
  Sense strand starting at position 3556 of SEQ ID NO: 1241892
uuuagucuaacguaagugu

SEQ ID NO: 1307855 - RNA, 19 nt, Artificial Sequence
  Description of Artificial Sequence: Synthetic oligonucleotide
  Antisense strand to SEQ ID NO: 1307854
acacuuacguuagacuaaa

SEQ ID NO: 1307856 - RNA, 19 nt, Artificial Sequence
  Description of Artificial Sequence: Synthetic oligonucleotide
  Sense strand starting at position 3946 of SEQ ID NO: 1241892
acguauuucucagaacaua

SEQ ID NO: 1307857 - RNA, 19 nt, Artificial Sequence
  Description of Artificial Sequence: Synthetic oligonucleotide
  Antisense strand to SEQ ID NO: 1307856
uauguucugagaaauacgu

SEQ ID NO: 1307858 - RNA, 19 nt, Artificial Sequence
  Description of Artificial Sequence: Synthetic oligonucleotide
  Sense strand starting at position 3963 of SEQ ID NO: 1241892
uagcccugucauuagcaga

SEQ ID NO: 1307859 - RNA, 19 nt, Artificial Sequence
  Description of Artificial Sequence: Synthetic oligonucleotide
  Antisense strand to SEQ ID NO: 1307858
ucugcuaaugacagggcua

SEQ ID NO: 1307860 - RNA, 19 nt, Artificial Sequence
  Description of Artificial Sequence: Synthetic oligonucleotide
  Sense strand starting at position 3968 of SEQ ID NO: 1241892
cugucauuagcagacacau

SEQ ID NO: 1307861 - RNA, 19 nt, Artificial Sequence
  Description of Artificial Sequence: Synthetic oligonucleotide
  Antisense strand to SEQ ID NO: 1307860
augugucugcuaaugacag

SEQ ID NO: 1307862 - RNA, 19 nt, Artificial Sequence
  Description of Artificial Sequence: Synthetic oligonucleotide
  Sense strand starting at position 593 of SEQ ID NO: 1241893
gccacugacugacuaugaa

SEQ ID NO: 1307863 - RNA, 19 nt, Artificial Sequence
  Description of Artificial Sequence: Synthetic oligonucleotide
  Antisense strand to SEQ ID NO: 1307862
uucauagucagucaguggc

SEQ ID NO: 1307864 - RNA, 19 nt, Artificial Sequence
  Description of Artificial Sequence: Synthetic oligonucleotide
  Sense strand starting at position 933 of SEQ ID NO: 1241893
uuaguucuaugggccagaa

SEQ ID NO: 1307865 - RNA, 19 nt, Artificial Sequence
  Description of Artificial Sequence: Synthetic oligonucleotide
  Antisense strand to SEQ ID NO: 1307864
uucuggcccauagaacuaa

SEQ ID NO: 1307866 - RNA, 19 nt, Artificial Sequence
  Description of Artificial Sequence: Synthetic oligonucleotide
  Sense strand starting at position 957 of SEQ ID NO: 1241893
augggucucauaggacuaa

SEQ ID NO: 1307867 - RNA, 19 nt, Artificial Sequence
  Description of Artificial Sequence: Synthetic oligonucleotide
  Antisense strand to SEQ ID NO: 1307866
uuaguccuaugagacccau

SEQ ID NO: 1307868 - RNA, 19 nt, Artificial Sequence
  Description of Artificial Sequence: Synthetic oligonucleotide
  Sense strand starting at position 1041 of SEQ ID NO: 1241893
cauucuggucuugacaguu

SEQ ID NO: 1307869 - RNA, 19 nt, Artificial Sequence
  Description of Artificial Sequence: Synthetic oligonucleotide
  Antisense strand to SEQ ID NO: 1307868
aacugucaagaccagaaug

SEQ ID NO: 1307870 - RNA, 19 nt, Artificial Sequence
  Description of Artificial Sequence: Synthetic oligonucleotide
  Sense strand starting at position 1123 of SEQ ID NO: 1241893
agacauuugcucuguccuu

SEQ ID NO: 1307871 - RNA, 19 nt, Artificial Sequence
  Description of Artificial Sequence: Synthetic oligonucleotide
  Antisense strand to SEQ ID NO: 1307870
aaggacagagcaaaugucu

SEQ ID NO: 1307872 - RNA, 19 nt, Artificial Sequence
  Description of Artificial Sequence: Synthetic oligonucleotide
  Sense strand starting at position 1179 of SEQ ID NO: 1241893
auggaauccuucucucaug

SEQ ID NO: 1307873 - RNA, 19 nt, Artificial Sequence
  Description of Artificial Sequence: Synthetic oligonucleotide
  Antisense strand to SEQ ID NO: 1307872
caugagagaaggauuccau

SEQ ID NO: 1307874 - RNA, 19 nt, Artificial Sequence
  Description of Artificial Sequence: Synthetic oligonucleotide
  Sense strand starting at position 1274 of SEQ ID NO: 1241893
ggauuagauuaggcccauu

SEQ ID NO: 1307875 - RNA, 19 nt, Artificial Sequence
  Description of Artificial Sequence: Synthetic oligonucleotide
  Antisense strand to SEQ ID NO: 1307874
aaugggccuaaucuaaucc

SEQ ID NO: 1307876 - RNA, 19 nt, Artificial Sequence
  Description of Artificial Sequence: Synthetic oligonucleotide
  Sense strand starting at position 1285 of SEQ ID NO: 1241893
ggcccauucggauaaucca

SEQ ID NO: 1307877 - RNA, 19 nt, Artificial Sequence
  Description of Artificial Sequence: Synthetic oligonucleotide
  Antisense strand to SEQ ID NO: 1307876
uggauuauccgaaugggcc

SEQ ID NO: 1307878 - RNA, 19 nt, Artificial Sequence
  Description of Artificial Sequence: Synthetic oligonucleotide
  Sense strand starting at position 1503 of SEQ ID NO: 1241893
ugaauugauguugguauaa

SEQ ID NO: 1307879 - RNA, 19 nt, Artificial Sequence
  Description of Artificial Sequence: Synthetic oligonucleotide
  Antisense strand to SEQ ID NO: 1307878
uuauaccaacaucaauuca

SEQ ID NO: 1307880 - RNA, 19 nt, Artificial Sequence
  Description of Artificial Sequence: Synthetic oligonucleotide
  Sense strand starting at position 1714 of SEQ ID NO: 1241893
ugaauaaggucauuccagu

SEQ ID NO: 1307881 - RNA, 19 nt, Artificial Sequence
  Description of Artificial Sequence: Synthetic oligonucleotide
  Antisense strand to SEQ ID NO: 1307880
acuggaaugaccuuauuca

SEQ ID NO: 1307882 - RNA, 19 nt, Artificial Sequence
  Description of Artificial Sequence: Synthetic oligonucleotide
  Sense strand starting at position 2116 of SEQ ID NO: 1241893
gugagucagcacagugguu

SEQ ID NO: 1307883 - RNA, 19 nt, Artificial Sequence
  Description of Artificial Sequence: Synthetic oligonucleotide
  Antisense strand to SEQ ID NO: 1307882
aaccacugugcugacucac

SEQ ID NO: 1307884 - RNA, 19 nt, Artificial Sequence
  Description of Artificial Sequence: Synthetic oligonucleotide
  Sense strand starting at position 2131 of SEQ ID NO: 1241893
gguugacucucagcagaga

SEQ ID NO: 1307885 - RNA, 19 nt, Artificial Sequence
  Description of Artificial Sequence: Synthetic oligonucleotide
  Antisense strand to SEQ ID NO: 1307884
ucucugcugagagucaacc

SEQ ID NO: 1307886 - RNA, 19 nt, Artificial Sequence
  Description of Artificial Sequence: Synthetic oligonucleotide
  Sense strand starting at position 2345 of SEQ ID NO: 1241893
ggaggaagucuucagccca

SEQ ID NO: 1307887 - RNA, 19 nt, Artificial Sequence
  Description of Artificial Sequence: Synthetic oligonucleotide
  Antisense strand to SEQ ID NO: 1307886
ugggcugaagacuuccucc

SEQ ID NO: 1307888 - RNA, 19 nt, Artificial Sequence
  Description of Artificial Sequence: Synthetic oligonucleotide
  Sense strand starting at position 2761 of SEQ ID NO: 1241893
cccucuuagggcuaaguua

SEQ ID NO: 1307889 - RNA, 19 nt, Artificial Sequence
  Description of Artificial Sequence: Synthetic oligonucleotide
  Antisense strand to SEQ ID NO: 1307888
uaacuuagcccuaagaggg

SEQ ID NO: 1307890 - RNA, 19 nt, Artificial Sequence
  Description of Artificial Sequence: Synthetic oligonucleotide
  Sense strand starting at position 2770 of SEQ ID NO: 1241893
ggcuaaguuacugaugaua

SEQ ID NO: 1307891 - RNA, 19 nt, Artificial Sequence
  Description of Artificial Sequence: Synthetic oligonucleotide
  Antisense strand to SEQ ID NO: 1307890
uaucaucaguaacuuagcc

SEQ ID NO: 1307892 - RNA, 19 nt, Artificial Sequence
  Description of Artificial Sequence: Synthetic oligonucleotide
  Sense strand starting at position 2874 of SEQ ID NO: 1241893
aggcaagucuuacucuaaa

SEQ ID NO: 1307893 - RNA, 19 nt, Artificial Sequence
  Description of Artificial Sequence: Synthetic oligonucleotide
  Antisense strand to SEQ ID NO: 1307892
uuuagaguaagacuugccu

SEQ ID NO: 1307894 - RNA, 19 nt, Artificial Sequence
  Description of Artificial Sequence: Synthetic oligonucleotide
  Sense strand starting at position 2915 of SEQ ID NO: 1241893
ucuggauuacuuggucuga

SEQ ID NO: 1307895 - RNA, 19 nt, Artificial Sequence
  Description of Artificial Sequence: Synthetic oligonucleotide
  Antisense strand to SEQ ID NO: 1307894
ucagaccaaguaauccaga

SEQ ID NO: 1307896 - RNA, 19 nt, Artificial Sequence
  Description of Artificial Sequence: Synthetic oligonucleotide
  Sense strand starting at position 2916 of SEQ ID NO: 1241893
cuggauuacuuggucugau

SEQ ID NO: 1307897 - RNA, 19 nt, Artificial Sequence
  Description of Artificial Sequence: Synthetic oligonucleotide
  Antisense strand to SEQ ID NO: 1307896
aucagaccaaguaauccag

SEQ ID NO: 1307898 - RNA, 19 nt, Artificial Sequence
  Description of Artificial Sequence: Synthetic oligonucleotide
  Sense strand starting at position 2917 of SEQ ID NO: 1241893
uggauuacuuggucugaua

SEQ ID NO: 1307899 - RNA, 19 nt, Artificial Sequence
  Description of Artificial Sequence: Synthetic oligonucleotide
  Antisense strand to SEQ ID NO: 1307898
uaucagaccaaguaaucca

SEQ ID NO: 1307900 - RNA, 19 nt, Artificial Sequence
  Description of Artificial Sequence: Synthetic oligonucleotide
  Sense strand starting at position 2919 of SEQ ID NO: 1241893
gauuacuuggucugauagg

SEQ ID NO: 1307901 - RNA, 19 nt, Artificial Sequence
  Description of Artificial Sequence: Synthetic oligonucleotide
  Antisense strand to SEQ ID NO: 1307900
ccuaucagaccaaguaauc

SEQ ID NO: 1307902 - RNA, 19 nt, Artificial Sequence
  Description of Artificial Sequence: Synthetic oligonucleotide
  Sense strand starting at position 2972 of SEQ ID NO: 1241893
gacauuggccuccagauau

SEQ ID NO: 1307903 - RNA, 19 nt, Artificial Sequence
  Description of Artificial Sequence: Synthetic oligonucleotide
  Antisense strand to SEQ ID NO: 1307902
auaucuggaggccaauguc

SEQ ID NO: 1307904 - RNA, 19 nt, Artificial Sequence
  Description of Artificial Sequence: Synthetic oligonucleotide
  Sense strand starting at position 3023 of SEQ ID NO: 1241893
cgcaaagaucaccaugaca

SEQ ID NO: 1307905 - RNA, 19 nt, Artificial Sequence
  Description of Artificial Sequence: Synthetic oligonucleotide
  Antisense strand to SEQ ID NO: 1307904
ugucauggugaucuuugcg

SEQ ID NO: 1307906 - RNA, 19 nt, Artificial Sequence
  Description of Artificial Sequence: Synthetic oligonucleotide
  Sense strand starting at position 3087 of SEQ ID NO: 1241893
uuaguaauagagugugaca

SEQ ID NO: 1307907 - RNA, 19 nt, Artificial Sequence
  Description of Artificial Sequence: Synthetic oligonucleotide
  Antisense strand to SEQ ID NO: 1307906
ugucacacucuauuacuaa

SEQ ID NO: 1307908 - RNA, 19 nt, Artificial Sequence
  Description of Artificial Sequence: Synthetic oligonucleotide
  Sense strand starting at position 3089 of SEQ ID NO: 1241893
aguaauagagugugacaga

SEQ ID NO: 1307909 - RNA, 19 nt, Artificial Sequence
  Description of Artificial Sequence: Synthetic oligonucleotide
  Antisense strand to SEQ ID NO: 1307908
ucugucacacucuauuacu

SEQ ID NO: 1307910 - RNA, 19 nt, Artificial Sequence
  Description of Artificial Sequence: Synthetic oligonucleotide
  Sense strand starting at position 3148 of SEQ ID NO: 1241893
gauagugauggcgaugaua

SEQ ID NO: 1307911 - RNA, 19 nt, Artificial Sequence
  Description of Artificial Sequence: Synthetic oligonucleotide
  Antisense strand to SEQ ID NO: 1307910
uaucaucgccaucacuauc

SEQ ID NO: 1307912 - RNA, 19 nt, Artificial Sequence
  Description of Artificial Sequence: Synthetic oligonucleotide
  Sense strand starting at position 3150 of SEQ ID NO: 1241893
uagugauggcgaugauaag

SEQ ID NO: 1307913 - RNA, 19 nt, Artificial Sequence
  Description of Artificial Sequence: Synthetic oligonucleotide
  Antisense strand to SEQ ID NO: 1307912
cuuaucaucgccaucacua

SEQ ID NO: 1307914 - RNA, 19 nt, Artificial Sequence
  Description of Artificial Sequence: Synthetic oligonucleotide
  Sense strand starting at position 3208 of SEQ ID NO: 1241893
gcugauuacagguagaugu

SEQ ID NO: 1307915 - RNA, 19 nt, Artificial Sequence
  Description of Artificial Sequence: Synthetic oligonucleotide
  Antisense strand to SEQ ID NO: 1307914
acaucuaccuguaaucagc

SEQ ID NO: 1307916 - RNA, 19 nt, Artificial Sequence
  Description of Artificial Sequence: Synthetic oligonucleotide
  Sense strand starting at position 3302 of SEQ ID NO: 1241893
uuguaccuucuugaaguau

SEQ ID NO: 1307917 - RNA, 19 nt, Artificial Sequence
  Description of Artificial Sequence: Synthetic oligonucleotide
  Antisense strand to SEQ ID NO: 1307916
auacuucaagaagguacaa

SEQ ID NO: 1307918 - RNA, 19 nt, Artificial Sequence
  Description of Artificial Sequence: Synthetic oligonucleotide
  Sense strand starting at position 3437 of SEQ ID NO: 1241893
caucaaagggauugcagau

SEQ ID NO: 1307919 - RNA, 19 nt, Artificial Sequence
  Description of Artificial Sequence: Synthetic oligonucleotide
  Antisense strand to SEQ ID NO: 1307918
aucugcaaucccuuugaug

SEQ ID NO: 1307920 - RNA, 19 nt, Artificial Sequence
  Description of Artificial Sequence: Synthetic oligonucleotide
  Sense strand starting at position 3587 of SEQ ID NO: 1241893
gagacuagcccaggucaua

SEQ ID NO: 1307921 - RNA, 19 nt, Artificial Sequence
  Description of Artificial Sequence: Synthetic oligonucleotide
  Antisense strand to SEQ ID NO: 1307920
uaugaccugggcuagucuc

SEQ ID NO: 1307922 - RNA, 19 nt, Artificial Sequence
  Description of Artificial Sequence: Synthetic oligonucleotide
  Sense strand starting at position 3704 of SEQ ID NO: 1241893
gagagagcucauugguuga

SEQ ID NO: 1307923 - RNA, 19 nt, Artificial Sequence
  Description of Artificial Sequence: Synthetic oligonucleotide
  Antisense strand to SEQ ID NO: 1307922
ucaaccaaugagcucucuc

SEQ ID NO: 1307924 - RNA, 19 nt, Artificial Sequence
  Description of Artificial Sequence: Synthetic oligonucleotide
  Sense strand starting at position 3706 of SEQ ID NO: 1241893
gagagcucauugguugaga

SEQ ID NO: 1307925 - RNA, 19 nt, Artificial Sequence
  Description of Artificial Sequence: Synthetic oligonucleotide
  Antisense strand to SEQ ID NO: 1307924
ucucaaccaaugagcucuc

SEQ ID NO: 1307926 - RNA, 19 nt, Artificial Sequence
  Description of Artificial Sequence: Synthetic oligonucleotide
  Sense strand starting at position 3764 of SEQ ID NO: 1241893
cacguaguucuguuagcuc

SEQ ID NO: 1307927 - RNA, 19 nt, Artificial Sequence
  Description of Artificial Sequence: Synthetic oligonucleotide
  Antisense strand to SEQ ID NO: 1307926
gagcuaacagaacuacgug

SEQ ID NO: 1307928 - RNA, 19 nt, Artificial Sequence
  Description of Artificial Sequence: Synthetic oligonucleotide
  Sense strand starting at position 3778 of SEQ ID NO: 1241893
agcucuuauugauugagag

SEQ ID NO: 1307929 - RNA, 19 nt, Artificial Sequence
  Description of Artificial Sequence: Synthetic oligonucleotide
  Antisense strand to SEQ ID NO: 1307928
cucucaaucaauaagagcu

SEQ ID NO: 1307930 - RNA, 19 nt, Artificial Sequence
  Description of Artificial Sequence: Synthetic oligonucleotide
  Sense strand starting at position 3800 of SEQ ID NO: 1241893
aagacagcucuuggaaugu

SEQ ID NO: 1307931 - RNA, 19 nt, Artificial Sequence
  Description of Artificial Sequence: Synthetic oligonucleotide
  Antisense strand to SEQ ID NO: 1307930
acauuccaagagcugucuu

SEQ ID NO: 1307932 - RNA, 19 nt, Artificial Sequence
  Description of Artificial Sequence: Synthetic oligonucleotide
  Sense strand starting at position 3832 of SEQ ID NO: 1241893
uacggaugucauggaaaua

SEQ ID NO: 1307933 - RNA, 19 nt, Artificial Sequence
  Description of Artificial Sequence: Synthetic oligonucleotide
  Antisense strand to SEQ ID NO: 1307932
uauuuccaugacauccgua

SEQ ID NO: 1307934 - RNA, 19 nt, Artificial Sequence
  Description of Artificial Sequence: Synthetic oligonucleotide
  Sense strand starting at position 3887 of SEQ ID NO: 1241893
aucagaccagagugacauu

SEQ ID NO: 1307935 - RNA, 19 nt, Artificial Sequence
  Description of Artificial Sequence: Synthetic oligonucleotide
  Antisense strand to SEQ ID NO: 1307934
aaugucacucuggucugau

SEQ ID NO: 1307936 - RNA, 19 nt, Artificial Sequence
  Description of Artificial Sequence: Synthetic oligonucleotide
  Sense strand starting at position 3898 of SEQ ID NO: 1241893
gugacauuaaacuggaugu

SEQ ID NO: 1307937 - RNA, 19 nt, Artificial Sequence
  Description of Artificial Sequence: Synthetic oligonucleotide
  Antisense strand to SEQ ID NO: 1307936
acauccaguuuaaugucac

SEQ ID NO: 1307938 - RNA, 19 nt, Artificial Sequence
  Description of Artificial Sequence: Synthetic oligonucleotide
  Sense strand starting at position 3961 of SEQ ID NO: 1241893
caaugcugucacugggaga

SEQ ID NO: 1307939 - RNA, 19 nt, Artificial Sequence
  Description of Artificial Sequence: Synthetic oligonucleotide
  Antisense strand to SEQ ID NO: 1307938
ucucccagugacagcauug

SEQ ID NO: 1307940 - RNA, 19 nt, Artificial Sequence
  Description of Artificial Sequence: Synthetic oligonucleotide
  Sense strand starting at position 3983 of SEQ ID NO: 1241893
ucaugaguucugggaagac

SEQ ID NO: 1307941 - RNA, 19 nt, Artificial Sequence
  Description of Artificial Sequence: Synthetic oligonucleotide
  Antisense strand to SEQ ID NO: 1307940
gucuucccagaacucauga

SEQ ID NO: 1307942 - RNA, 19 nt, Artificial Sequence
  Description of Artificial Sequence: Synthetic oligonucleotide
  Sense strand starting at position 908 of SEQ ID NO: 1241894
ugugguacuaacuggagaa

SEQ ID NO: 1307943 - RNA, 19 nt, Artificial Sequence
  Description of Artificial Sequence: Synthetic oligonucleotide
  Antisense strand to SEQ ID NO: 1307942
uucuccaguuaguaccaca

SEQ ID NO: 1307944 - RNA, 19 nt, Artificial Sequence
  Description of Artificial Sequence: Synthetic oligonucleotide
  Sense strand starting at position 964 of SEQ ID NO: 1241894
gucaaagagcccuacacuu

SEQ ID NO: 1307945 - RNA, 19 nt, Artificial Sequence
  Description of Artificial Sequence: Synthetic oligonucleotide
  Antisense strand to SEQ ID NO: 1307944
aaguguagggcucuuugac

SEQ ID NO: 1307946 - RNA, 19 nt, Artificial Sequence
  Description of Artificial Sequence: Synthetic oligonucleotide
  Sense strand starting at position 1128 of SEQ ID NO: 1241894
caaacaguuggcuaugaau

SEQ ID NO: 1307947 - RNA, 19 nt, Artificial Sequence
  Description of Artificial Sequence: Synthetic oligonucleotide
  Antisense strand to SEQ ID NO: 1307946
auucauagccaacuguuug

SEQ ID NO: 1307948 - RNA, 19 nt, Artificial Sequence
  Description of Artificial Sequence: Synthetic oligonucleotide
  Sense strand starting at position 1130 of SEQ ID NO: 1241894
aacaguuggcuaugaauau

SEQ ID NO: 1307949 - RNA, 19 nt, Artificial Sequence
  Description of Artificial Sequence: Synthetic oligonucleotide
  Antisense strand to SEQ ID NO: 1307948
auauucauagccaacuguu

SEQ ID NO: 1307950 - RNA, 19 nt, Artificial Sequence
  Description of Artificial Sequence: Synthetic oligonucleotide
  Sense strand starting at position 1137 of SEQ ID NO: 1241894
ggcuaugaauaucuucuuu

SEQ ID NO: 1307951 - RNA, 19 nt, Artificial Sequence
  Description of Artificial Sequence: Synthetic oligonucleotide
  Antisense strand to SEQ ID NO: 1307950
aaagaagauauucauagcc

SEQ ID NO: 1307952 - RNA, 19 nt, Artificial Sequence
  Description of Artificial Sequence: Synthetic oligonucleotide
  Sense strand starting at position 1167 of SEQ ID NO: 1241894
acacucguggcauaauuau

SEQ ID NO: 1307953 - RNA, 19 nt, Artificial Sequence
  Description of Artificial Sequence: Synthetic oligonucleotide
  Antisense strand to SEQ ID NO: 1307952
auaauuaugccacgagugu

SEQ ID NO: 1307954 - RNA, 19 nt, Artificial Sequence
  Description of Artificial Sequence: Synthetic oligonucleotide
  Sense strand starting at position 1188 of SEQ ID NO: 1241894
uuguaagaguccucaggaa

SEQ ID NO: 1307955 - RNA, 19 nt, Artificial Sequence
  Description of Artificial Sequence: Synthetic oligonucleotide
  Antisense strand to SEQ ID NO: 1307954
uuccugaggacucuuacaa

SEQ ID NO: 1307956 - RNA, 19 nt, Artificial Sequence
  Description of Artificial Sequence: Synthetic oligonucleotide
  Sense strand starting at position 1216 of SEQ ID NO: 1241894
ugaaauacugcauagcuua

SEQ ID NO: 1307957 - RNA, 19 nt, Artificial Sequence
  Description of Artificial Sequence: Synthetic oligonucleotide
  Antisense strand to SEQ ID NO: 1307956
uaagcuaugcaguauuuca

SEQ ID NO: 1307958 - RNA, 19 nt, Artificial Sequence
  Description of Artificial Sequence: Synthetic oligonucleotide
  Sense strand starting at position 1229 of SEQ ID NO: 1241894
agcuuaagacuacaauagu

SEQ ID NO: 1307959 - RNA, 19 nt, Artificial Sequence
  Description of Artificial Sequence: Synthetic oligonucleotide
  Antisense strand to SEQ ID NO: 1307958
acuauuguagucuuaagcu

SEQ ID NO: 1307960 - RNA, 19 nt, Artificial Sequence
  Description of Artificial Sequence: Synthetic oligonucleotide
  Sense strand starting at position 1279 of SEQ ID NO: 1241894
guggcuugugaagaagaga

SEQ ID NO: 1307961 - RNA, 19 nt, Artificial Sequence
  Description of Artificial Sequence: Synthetic oligonucleotide
  Antisense strand to SEQ ID NO: 1307960
ucucuucuucacaagccac

SEQ ID NO: 1307962 - RNA, 19 nt, Artificial Sequence
  Description of Artificial Sequence: Synthetic oligonucleotide
  Sense strand starting at position 1442 of SEQ ID NO: 1241894
auaguuucuguacaugaaa

SEQ ID NO: 1307963 - RNA, 19 nt, Artificial Sequence
  Description of Artificial Sequence: Synthetic oligonucleotide
  Antisense strand to SEQ ID NO: 1307962
uuucauguacagaaacuau

SEQ ID NO: 1307964 - RNA, 19 nt, Artificial Sequence
  Description of Artificial Sequence: Synthetic oligonucleotide
  Sense strand starting at position 1480 of SEQ ID NO: 1241894
aagaguugccagcagaaag

SEQ ID NO: 1307965 - RNA, 19 nt, Artificial Sequence
  Description of Artificial Sequence: Synthetic oligonucleotide
  Antisense strand to SEQ ID NO: 1307964
cuuucugcuggcaacucuu

SEQ ID NO: 1307966 - RNA, 19 nt, Artificial Sequence
  Description of Artificial Sequence: Synthetic oligonucleotide
  Sense strand starting at position 1530 of SEQ ID NO: 1241894
ugauucuauuggguacauu

SEQ ID NO: 1307967 - RNA, 19 nt, Artificial Sequence
  Description of Artificial Sequence: Synthetic oligonucleotide
  Antisense strand to SEQ ID NO: 1307966
aauguacccaauagaauca

SEQ ID NO: 1307968 - RNA, 19 nt, Artificial Sequence
  Description of Artificial Sequence: Synthetic oligonucleotide
  Sense strand starting at position 1969 of SEQ ID NO: 1241894
guacauccugcugaaggaa

SEQ ID NO: 1307969 - RNA, 19 nt, Artificial Sequence
  Description of Artificial Sequence: Synthetic oligonucleotide
  Antisense strand to SEQ ID NO: 1307968
uuccuucagcaggauguac

SEQ ID NO: 1307970 - RNA, 19 nt, Artificial Sequence
  Description of Artificial Sequence: Synthetic oligonucleotide
  Sense strand starting at position 1981 of SEQ ID NO: 1241894
gaaggaauggagcgauugu

SEQ ID NO: 1307971 - RNA, 19 nt, Artificial Sequence
  Description of Artificial Sequence: Synthetic oligonucleotide
  Antisense strand to SEQ ID NO: 1307970
acaaucgcuccauuccuuc

SEQ ID NO: 1307972 - RNA, 19 nt, Artificial Sequence
  Description of Artificial Sequence: Synthetic oligonucleotide
  Sense strand starting at position 2234 of SEQ ID NO: 1241894
cagaccuauucuuugaggu

SEQ ID NO: 1307973 - RNA, 19 nt, Artificial Sequence
  Description of Artificial Sequence: Synthetic oligonucleotide
  Antisense strand to SEQ ID NO: 1307972
accucaaagaauaggucug

SEQ ID NO: 1307974 - RNA, 19 nt, Artificial Sequence
  Description of Artificial Sequence: Synthetic oligonucleotide
  Sense strand starting at position 2235 of SEQ ID NO: 1241894
agaccuauucuuugagguc

SEQ ID NO: 1307975 - RNA, 19 nt, Artificial Sequence
  Description of Artificial Sequence: Synthetic oligonucleotide
  Antisense strand to SEQ ID NO: 1307974
gaccucaaagaauaggucu

SEQ ID NO: 1307976 - RNA, 19 nt, Artificial Sequence
  Description of Artificial Sequence: Synthetic oligonucleotide
  Sense strand starting at position 2339 of SEQ ID NO: 1241894
gaugucucugccuaagaca

SEQ ID NO: 1307977 - RNA, 19 nt, Artificial Sequence
  Description of Artificial Sequence: Synthetic oligonucleotide
  Antisense strand to SEQ ID NO: 1307976
ugucuuaggcagagacauc

SEQ ID NO: 1307978 - RNA, 19 nt, Artificial Sequence
  Description of Artificial Sequence: Synthetic oligonucleotide
  Sense strand starting at position 2425 of SEQ ID NO: 1241894
gcauuacaaguguacaaug

SEQ ID NO: 1307979 - RNA, 19 nt, Artificial Sequence
  Description of Artificial Sequence: Synthetic oligonucleotide
  Antisense strand to SEQ ID NO: 1307978
cauuguacacuuguaaugc

SEQ ID NO: 1307980 - RNA, 19 nt, Artificial Sequence
  Description of Artificial Sequence: Synthetic oligonucleotide
  Sense strand starting at position 2516 of SEQ ID NO: 1241894
auccuuuaguaagccagau

SEQ ID NO: 1307981 - RNA, 19 nt, Artificial Sequence
  Description of Artificial Sequence: Synthetic oligonucleotide
  Antisense strand to SEQ ID NO: 1307980
aucuggcuuacuaaaggau

SEQ ID NO: 1307982 - RNA, 19 nt, Artificial Sequence
  Description of Artificial Sequence: Synthetic oligonucleotide
  Sense strand starting at position 2520 of SEQ ID NO: 1241894
uuuaguaagccagauauug

SEQ ID NO: 1307983 - RNA, 19 nt, Artificial Sequence
  Description of Artificial Sequence: Synthetic oligonucleotide
  Antisense strand to SEQ ID NO: 1307982
caauaucuggcuuacuaaa

SEQ ID NO: 1307984 - RNA, 19 nt, Artificial Sequence
  Description of Artificial Sequence: Synthetic oligonucleotide
  Sense strand starting at position 2642 of SEQ ID NO: 1241894
guauaaucaguuuacuaug

SEQ ID NO: 1307985 - RNA, 19 nt, Artificial Sequence
  Description of Artificial Sequence: Synthetic oligonucleotide
  Antisense strand to SEQ ID NO: 1307984
cauaguaaacugauuauac

SEQ ID NO: 1307986 - RNA, 19 nt, Artificial Sequence
  Description of Artificial Sequence: Synthetic oligonucleotide
  Sense strand starting at position 2840 of SEQ ID NO: 1241894
gggaguguuccacagugaa

SEQ ID NO: 1307987 - RNA, 19 nt, Artificial Sequence
  Description of Artificial Sequence: Synthetic oligonucleotide
  Antisense strand to SEQ ID NO: 1307986
uucacuguggaacacuccc

SEQ ID NO: 1307988 - RNA, 19 nt, Artificial Sequence
  Description of Artificial Sequence: Synthetic oligonucleotide
  Sense strand starting at position 2856 of SEQ ID NO: 1241894
gaauaaacagccuguguaa

SEQ ID NO: 1307989 - RNA, 19 nt, Artificial Sequence
  Description of Artificial Sequence: Synthetic oligonucleotide
  Antisense strand to SEQ ID NO: 1307988
uuacacaggcuguuuauuc

SEQ ID NO: 1307990 - RNA, 19 nt, Artificial Sequence
  Description of Artificial Sequence: Synthetic oligonucleotide
  Sense strand starting at position 2916 of SEQ ID NO: 1241894
aaagaaguccaaugugguu

SEQ ID NO: 1307991 - RNA, 19 nt, Artificial Sequence
  Description of Artificial Sequence: Synthetic oligonucleotide
  Antisense strand to SEQ ID NO: 1307990
aaccacauuggacuucuuu

SEQ ID NO: 1307992 - RNA, 19 nt, Artificial Sequence
  Description of Artificial Sequence: Synthetic oligonucleotide
  Sense strand starting at position 3014 of SEQ ID NO: 1241894
aaucuuaggucagugggaa

SEQ ID NO: 1307993 - RNA, 19 nt, Artificial Sequence
  Description of Artificial Sequence: Synthetic oligonucleotide
  Antisense strand to SEQ ID NO: 1307992
uucccacugaccuaagauu

SEQ ID NO: 1307994 - RNA, 19 nt, Artificial Sequence
  Description of Artificial Sequence: Synthetic oligonucleotide
  Sense strand starting at position 3160 of SEQ ID NO: 1241894
cuuaguaagcuaugaggga

SEQ ID NO: 1307995 - RNA, 19 nt, Artificial Sequence
  Description of Artificial Sequence: Synthetic oligonucleotide
  Antisense strand to SEQ ID NO: 1307994
ucccucauagcuuacuaag

SEQ ID NO: 1307996 - RNA, 19 nt, Artificial Sequence
  Description of Artificial Sequence: Synthetic oligonucleotide
  Sense strand starting at position 3181 of SEQ ID NO: 1241894
gacaguagggcuggauaga

SEQ ID NO: 1307997 - RNA, 19 nt, Artificial Sequence
  Description of Artificial Sequence: Synthetic oligonucleotide
  Antisense strand to SEQ ID NO: 1307996
ucuauccagcccuacuguc

SEQ ID NO: 1307998 - RNA, 19 nt, Artificial Sequence
  Description of Artificial Sequence: Synthetic oligonucleotide
  Sense strand starting at position 3245 of SEQ ID NO: 1241894
guuugauugucaguagaga

SEQ ID NO: 1307999 - RNA, 19 nt, Artificial Sequence
  Description of Artificial Sequence: Synthetic oligonucleotide
  Antisense strand to SEQ ID NO: 1307998
ucucuacugacaaucaaac

SEQ ID NO: 1308000 - RNA, 19 nt, Artificial Sequence
  Description of Artificial Sequence: Synthetic oligonucleotide
  Sense strand starting at position 3246 of SEQ ID NO: 1241894
uuugauugucaguagagag

SEQ ID NO: 1308001 - RNA, 19 nt, Artificial Sequence
  Description of Artificial Sequence: Synthetic oligonucleotide
  Antisense strand to SEQ ID NO: 1308000
cucucuacugacaaucaaa

SEQ ID NO: 1308002 - RNA, 19 nt, Artificial Sequence
  Description of Artificial Sequence: Synthetic oligonucleotide
  Sense strand starting at position 3256 of SEQ ID NO: 1241894
aguagagagugacuuguuu

SEQ ID NO: 1308003 - RNA, 19 nt, Artificial Sequence
  Description of Artificial Sequence: Synthetic oligonucleotide
  Antisense strand to SEQ ID NO: 1308002
aaacaagucacucucuacu

SEQ ID NO: 1308004 - RNA, 19 nt, Artificial Sequence
  Description of Artificial Sequence: Synthetic oligonucleotide
  Sense strand starting at position 3470 of SEQ ID NO: 1241894
auauaacuggauuaucgua

SEQ ID NO: 1308005 - RNA, 19 nt, Artificial Sequence
  Description of Artificial Sequence: Synthetic oligonucleotide
  Antisense strand to SEQ ID NO: 1308004
uacgauaauccaguuauau

SEQ ID NO: 1308006 - RNA, 19 nt, Artificial Sequence
  Description of Artificial Sequence: Synthetic oligonucleotide
  Sense strand starting at position 3472 of SEQ ID NO: 1241894
auaacuggauuaucguaau

SEQ ID NO: 1308007 - RNA, 19 nt, Artificial Sequence
  Description of Artificial Sequence: Synthetic oligonucleotide
  Antisense strand to SEQ ID NO: 1308006
auuacgauaauccaguuau

SEQ ID NO: 1308008 - RNA, 19 nt, Artificial Sequence
  Description of Artificial Sequence: Synthetic oligonucleotide
  Sense strand starting at position 3560 of SEQ ID NO: 1241894
ggcaguguucuucaggaaa

SEQ ID NO: 1308009 - RNA, 19 nt, Artificial Sequence
  Description of Artificial Sequence: Synthetic oligonucleotide
  Antisense strand to SEQ ID NO: 1308008
uuuccugaagaacacugcc

SEQ ID NO: 1308010 - RNA, 19 nt, Artificial Sequence
  Description of Artificial Sequence: Synthetic oligonucleotide
  Sense strand starting at position 3627 of SEQ ID NO: 1241894
cugugauuccucuacacac

SEQ ID NO: 1308011 - RNA, 19 nt, Artificial Sequence
  Description of Artificial Sequence: Synthetic oligonucleotide
  Antisense strand to SEQ ID NO: 1308010
guguguagaggaaucacag

SEQ ID NO: 1308012 - RNA, 19 nt, Artificial Sequence
  Description of Artificial Sequence: Synthetic oligonucleotide
  Sense strand starting at position 3717 of SEQ ID NO: 1241894
ccugaagacuacucuguca

SEQ ID NO: 1308013 - RNA, 19 nt, Artificial Sequence
  Description of Artificial Sequence: Synthetic oligonucleotide
  Antisense strand to SEQ ID NO: 1308012
ugacagaguagucuucagg

SEQ ID NO: 1308014 - RNA, 19 nt, Artificial Sequence
  Description of Artificial Sequence: Synthetic oligonucleotide
  Sense strand starting at position 3719 of SEQ ID NO: 1241894
ugaagacuacucugucauu

SEQ ID NO: 1308015 - RNA, 19 nt, Artificial Sequence
  Description of Artificial Sequence: Synthetic oligonucleotide
  Antisense strand to SEQ ID NO: 1308014
aaugacagaguagucuuca

SEQ ID NO: 1308016 - RNA, 19 nt, Artificial Sequence
  Description of Artificial Sequence: Synthetic oligonucleotide
  Sense strand starting at position 3803 of SEQ ID NO: 1241894
uccauagucugauuccuac

SEQ ID NO: 1308017 - RNA, 19 nt, Artificial Sequence
  Description of Artificial Sequence: Synthetic oligonucleotide
  Antisense strand to SEQ ID NO: 1308016
guaggaaucagacuaugga

SEQ ID NO: 1308018 - RNA, 19 nt, Artificial Sequence
  Description of Artificial Sequence: Synthetic oligonucleotide
  Sense strand starting at position 3806 of SEQ ID NO: 1241894
auagucugauuccuacuau

SEQ ID NO: 1308019 - RNA, 19 nt, Artificial Sequence
  Description of Artificial Sequence: Synthetic oligonucleotide
  Antisense strand to SEQ ID NO: 1308018
auaguaggaaucagacuau

SEQ ID NO: 1308020 - RNA, 19 nt, Artificial Sequence
  Description of Artificial Sequence: Synthetic oligonucleotide
  Sense strand starting at position 3858 of SEQ ID NO: 1241894
aggcuagccuucucuauuu

SEQ ID NO: 1308021 - RNA, 19 nt, Artificial Sequence
  Description of Artificial Sequence: Synthetic oligonucleotide
  Antisense strand to SEQ ID NO: 1308020
aaauagagaaggcuagccu

SEQ ID NO: 1308022 - RNA, 19 nt, Artificial Sequence
  Description of Artificial Sequence: Synthetic oligonucleotide
  Sense strand starting at position 33 of SEQ ID NO: 1241895
uacccauguccuuggguaa

SEQ ID NO: 1308023 - RNA, 19 nt, Artificial Sequence
  Description of Artificial Sequence: Synthetic oligonucleotide
  Antisense strand to SEQ ID NO: 1308022
uuacccaaggacaugggua

SEQ ID NO: 1308024 - RNA, 19 nt, Artificial Sequence
  Description of Artificial Sequence: Synthetic oligonucleotide
  Sense strand starting at position 147 of SEQ ID NO: 1241895
gaggucagaguuugucuaa

SEQ ID NO: 1308025 - RNA, 19 nt, Artificial Sequence
  Description of Artificial Sequence: Synthetic oligonucleotide
  Antisense strand to SEQ ID NO: 1308024
uuagacaaacucugaccuc

SEQ ID NO: 1308026 - RNA, 19 nt, Artificial Sequence
  Description of Artificial Sequence: Synthetic oligonucleotide
  Sense strand starting at position 148 of SEQ ID NO: 1241895
aggucagaguuugucuaag

SEQ ID NO: 1308027 - RNA, 19 nt, Artificial Sequence
  Description of Artificial Sequence: Synthetic oligonucleotide
  Antisense strand to SEQ ID NO: 1308026
cuuagacaaacucugaccu

SEQ ID NO: 1308028 - RNA, 19 nt, Artificial Sequence
  Description of Artificial Sequence: Synthetic oligonucleotide
  Sense strand starting at position 153 of SEQ ID NO: 1241895
agaguuugucuaagcgggu

SEQ ID NO: 1308029 - RNA, 19 nt, Artificial Sequence
  Description of Artificial Sequence: Synthetic oligonucleotide
  Antisense strand to SEQ ID NO: 1308028
acccgcuuagacaaacucu

SEQ ID NO: 1308030 - RNA, 19 nt, Artificial Sequence
  Description of Artificial Sequence: Synthetic oligonucleotide
  Sense strand starting at position 168 of SEQ ID NO: 1241895
gggucaggccuacaguauu

SEQ ID NO: 1308031 - RNA, 19 nt, Artificial Sequence
  Description of Artificial Sequence: Synthetic oligonucleotide
  Antisense strand to SEQ ID NO: 1308030
aauacuguaggccugaccc

SEQ ID NO: 1308032 - RNA, 19 nt, Artificial Sequence
  Description of Artificial Sequence: Synthetic oligonucleotide
  Sense strand starting at position 206 of SEQ ID NO: 1241895
aaagaauccgcgugggaaa

SEQ ID NO: 1308033 - RNA, 19 nt, Artificial Sequence
  Description of Artificial Sequence: Synthetic oligonucleotide
  Antisense strand to SEQ ID NO: 1308032
uuucccacgcggauucuuu

SEQ ID NO: 1308034 - RNA, 19 nt, Artificial Sequence
  Description of Artificial Sequence: Synthetic oligonucleotide
  Sense strand starting at position 388 of SEQ ID NO: 1241895
ccaugcuuucccuaggaaa

SEQ ID NO: 1308035 - RNA, 19 nt, Artificial Sequence
  Description of Artificial Sequence: Synthetic oligonucleotide
  Antisense strand to SEQ ID NO: 1308034
uuuccuagggaaagcaugg

SEQ ID NO: 1308036 - RNA, 19 nt, Artificial Sequence
  Description of Artificial Sequence: Synthetic oligonucleotide
  Sense strand starting at position 505 of SEQ ID NO: 1241895
cuuagaguaaauuguguga

SEQ ID NO: 1308037 - RNA, 19 nt, Artificial Sequence
  Description of Artificial Sequence: Synthetic oligonucleotide
  Antisense strand to SEQ ID NO: 1308036
ucacacaauuuacucuaag

SEQ ID NO: 1308038 - RNA, 19 nt, Artificial Sequence
  Description of Artificial Sequence: Synthetic oligonucleotide
  Sense strand starting at position 508 of SEQ ID NO: 1241895
agaguaaauugugugaaac

SEQ ID NO: 1308039 - RNA, 19 nt, Artificial Sequence
  Description of Artificial Sequence: Synthetic oligonucleotide
  Antisense strand to SEQ ID NO: 1308038
guuucacacaauuuacucu

SEQ ID NO: 1308040 - RNA, 19 nt, Artificial Sequence
  Description of Artificial Sequence: Synthetic oligonucleotide
  Sense strand starting at position 509 of SEQ ID NO: 1241895
gaguaaauugugugaaacc

SEQ ID NO: 1308041 - RNA, 19 nt, Artificial Sequence
  Description of Artificial Sequence: Synthetic oligonucleotide
  Antisense strand to SEQ ID NO: 1308040
gguuucacacaauuuacuc

SEQ ID NO: 1308042 - RNA, 19 nt, Artificial Sequence
  Description of Artificial Sequence: Synthetic oligonucleotide
  Sense strand starting at position 565 of SEQ ID NO: 1241895
gauugaugcgucuaaagaa

SEQ ID NO: 1308043 - RNA, 19 nt, Artificial Sequence
  Description of Artificial Sequence: Synthetic oligonucleotide
  Antisense strand to SEQ ID NO: 1308042
uucuuuagacgcaucaauc

SEQ ID NO: 1308044 - RNA, 19 nt, Artificial Sequence
  Description of Artificial Sequence: Synthetic oligonucleotide
  Sense strand starting at position 573 of SEQ ID NO: 1241895
cgucuaaagaaucagugaa

SEQ ID NO: 1308045 - RNA, 19 nt, Artificial Sequence
  Description of Artificial Sequence: Synthetic oligonucleotide
  Antisense strand to SEQ ID NO: 1308044
uucacugauucuuuagacg

SEQ ID NO: 1308046 - RNA, 19 nt, Artificial Sequence
  Description of Artificial Sequence: Synthetic oligonucleotide
  Sense strand starting at position 615 of SEQ ID NO: 1241895
cucaguuaaucauugaagu

SEQ ID NO: 1308047 - RNA, 19 nt, Artificial Sequence
  Description of Artificial Sequence: Synthetic oligonucleotide
  Antisense strand to SEQ ID NO: 1308046
acuucaaugauuaacugag

SEQ ID NO: 1308048 - RNA, 19 nt, Artificial Sequence
  Description of Artificial Sequence: Synthetic oligonucleotide
  Sense strand starting at position 616 of SEQ ID NO: 1241895
ucaguuaaucauugaaguc

SEQ ID NO: 1308049 - RNA, 19 nt, Artificial Sequence
  Description of Artificial Sequence: Synthetic oligonucleotide
  Antisense strand to SEQ ID NO: 1308048
gacuucaaugauuaacuga

SEQ ID NO: 1308050 - RNA, 19 nt, Artificial Sequence
  Description of Artificial Sequence: Synthetic oligonucleotide
  Sense strand starting at position 632 of SEQ ID NO: 1241895
gucugaggugcccaacaau

SEQ ID NO: 1308051 - RNA, 19 nt, Artificial Sequence
  Description of Artificial Sequence: Synthetic oligonucleotide
  Antisense strand to SEQ ID NO: 1308050
auuguugggcaccucagac

SEQ ID NO: 1308052 - RNA, 19 nt, Artificial Sequence
  Description of Artificial Sequence: Synthetic oligonucleotide
  Sense strand starting at position 635 of SEQ ID NO: 1241895
ugaggugcccaacaaugau

SEQ ID NO: 1308053 - RNA, 19 nt, Artificial Sequence
  Description of Artificial Sequence: Synthetic oligonucleotide
  Antisense strand to SEQ ID NO: 1308052
aucauuguugggcaccuca

SEQ ID NO: 1308054 - RNA, 19 nt, Artificial Sequence
  Description of Artificial Sequence: Synthetic oligonucleotide
  Sense strand starting at position 821 of SEQ ID NO: 1241895
gagcaaaggucuucucacu

SEQ ID NO: 1308055 - RNA, 19 nt, Artificial Sequence
  Description of Artificial Sequence: Synthetic oligonucleotide
  Antisense strand to SEQ ID NO: 1308054
agugagaagaccuuugcuc

SEQ ID NO: 1308056 - RNA, 19 nt, Artificial Sequence
  Description of Artificial Sequence: Synthetic oligonucleotide
  Sense strand starting at position 854 of SEQ ID NO: 1241895
agagaugagugauuccugu

SEQ ID NO: 1308057 - RNA, 19 nt, Artificial Sequence
  Description of Artificial Sequence: Synthetic oligonucleotide
  Antisense strand to SEQ ID NO: 1308056
acaggaaucacucaucucu

SEQ ID NO: 1308058 - RNA, 19 nt, Artificial Sequence
  Description of Artificial Sequence: Synthetic oligonucleotide
  Sense strand starting at position 1090 of SEQ ID NO: 1241895
gcuagaaaguccucaggac

SEQ ID NO: 1308059 - RNA, 19 nt, Artificial Sequence
  Description of Artificial Sequence: Synthetic oligonucleotide
  Antisense strand to SEQ ID NO: 1308058
guccugaggacuuucuagc

SEQ ID NO: 1308060 - RNA, 19 nt, Artificial Sequence
  Description of Artificial Sequence: Synthetic oligonucleotide
  Sense strand starting at position 1217 of SEQ ID NO: 1241895
cagaucauccaaggugaca

SEQ ID NO: 1308061 - RNA, 19 nt, Artificial Sequence
  Description of Artificial Sequence: Synthetic oligonucleotide
  Antisense strand to SEQ ID NO: 1308060
ugucaccuuggaugaucug

SEQ ID NO: 1308062 - RNA, 19 nt, Artificial Sequence
  Description of Artificial Sequence: Synthetic oligonucleotide
  Sense strand starting at position 2216 of SEQ ID NO: 1241895
cgggaacacuugcuacauu

SEQ ID NO: 1308063 - RNA, 19 nt, Artificial Sequence
  Description of Artificial Sequence: Synthetic oligonucleotide
  Antisense strand to SEQ ID NO: 1308062
aauguagcaaguguucccg

SEQ ID NO: 1308064 - RNA, 19 nt, Artificial Sequence
  Description of Artificial Sequence: Synthetic oligonucleotide
  Sense strand starting at position 2217 of SEQ ID NO: 1241895
gggaacacuugcuacauuu

SEQ ID NO: 1308065 - RNA, 19 nt, Artificial Sequence
  Description of Artificial Sequence: Synthetic oligonucleotide
  Antisense strand to SEQ ID NO: 1308064
aaauguagcaaguguuccc

SEQ ID NO: 1308066 - RNA, 19 nt, Artificial Sequence
  Description of Artificial Sequence: Synthetic oligonucleotide
  Sense strand starting at position 2242 of SEQ ID NO: 1241895
augcauuucugaucuguuu

SEQ ID NO: 1308067 - RNA, 19 nt, Artificial Sequence
  Description of Artificial Sequence: Synthetic oligonucleotide
  Antisense strand to SEQ ID NO: 1308066
aaacagaucagaaaugcau

SEQ ID NO: 1308068 - RNA, 19 nt, Artificial Sequence
  Description of Artificial Sequence: Synthetic oligonucleotide
  Sense strand starting at position 2785 of SEQ ID NO: 1241895
gagacucccgcaggaguua

SEQ ID NO: 1308069 - RNA, 19 nt, Artificial Sequence
  Description of Artificial Sequence: Synthetic oligonucleotide
  Antisense strand to SEQ ID NO: 1308068
uaacuccugcgggagucuc

SEQ ID NO: 1308070 - RNA, 19 nt, Artificial Sequence
  Description of Artificial Sequence: Synthetic oligonucleotide
  Sense strand starting at position 2794 of SEQ ID NO: 1241895
gcaggaguuacaggugaag

SEQ ID NO: 1308071 - RNA, 19 nt, Artificial Sequence
  Description of Artificial Sequence: Synthetic oligonucleotide
  Antisense strand to SEQ ID NO: 1308070
cuucaccuguaacuccugc

SEQ ID NO: 1308072 - RNA, 19 nt, Artificial Sequence
  Description of Artificial Sequence: Synthetic oligonucleotide
  Sense strand starting at position 2796 of SEQ ID NO: 1241895
aggaguuacaggugaagcu

SEQ ID NO: 1308073 - RNA, 19 nt, Artificial Sequence
  Description of Artificial Sequence: Synthetic oligonucleotide
  Antisense strand to SEQ ID NO: 1308072
agcuucaccuguaacuccu

SEQ ID NO: 1308074 - RNA, 19 nt, Artificial Sequence
  Description of Artificial Sequence: Synthetic oligonucleotide
  Sense strand starting at position 2874 of SEQ ID NO: 1241895
gcauccgaucuggagugua

SEQ ID NO: 1308075 - RNA, 19 nt, Artificial Sequence
  Description of Artificial Sequence: Synthetic oligonucleotide
  Antisense strand to SEQ ID NO: 1308074
uacacuccagaucggaugc

SEQ ID NO: 1308076 - RNA, 19 nt, Artificial Sequence
  Description of Artificial Sequence: Synthetic oligonucleotide
  Sense strand starting at position 3078 of SEQ ID NO: 1241895
ugccgcauuggauaagaaa

SEQ ID NO: 1308077 - RNA, 19 nt, Artificial Sequence
  Description of Artificial Sequence: Synthetic oligonucleotide
  Antisense strand to SEQ ID NO: 1308076
uuucuuauccaaugcggca

SEQ ID NO: 1308078 - RNA, 19 nt, Artificial Sequence
  Description of Artificial Sequence: Synthetic oligonucleotide
  Sense strand starting at position 3203 of SEQ ID NO: 1241895
guuugaaucuauccagacu

SEQ ID NO: 1308079 - RNA, 19 nt, Artificial Sequence
  Description of Artificial Sequence: Synthetic oligonucleotide
  Antisense strand to SEQ ID NO: 1308078
agucuggauagauucaaac

SEQ ID NO: 1308080 - RNA, 19 nt, Artificial Sequence
  Description of Artificial Sequence: Synthetic oligonucleotide
  Sense strand starting at position 3224 of SEQ ID NO: 1241895
gccuuugacuccuuagaca

SEQ ID NO: 1308081 - RNA, 19 nt, Artificial Sequence
  Description of Artificial Sequence: Synthetic oligonucleotide
  Antisense strand to SEQ ID NO: 1308080
ugucuaaggagucaaaggc

SEQ ID NO: 1308082 - RNA, 19 nt, Artificial Sequence
  Description of Artificial Sequence: Synthetic oligonucleotide
  Sense strand starting at position 3329 of SEQ ID NO: 1241895
gggaguaacugccucauca

SEQ ID NO: 1308083 - RNA, 19 nt, Artificial Sequence
  Description of Artificial Sequence: Synthetic oligonucleotide
  Antisense strand to SEQ ID NO: 1308082
ugaugaggcaguuacuccc

SEQ ID NO: 1308084 - RNA, 19 nt, Artificial Sequence
  Description of Artificial Sequence: Synthetic oligonucleotide
  Sense strand starting at position 3446 of SEQ ID NO: 1241895
aggguauuagagcaaagca

SEQ ID NO: 1308085 - RNA, 19 nt, Artificial Sequence
  Description of Artificial Sequence: Synthetic oligonucleotide
  Antisense strand to SEQ ID NO: 1308084
ugcuuugcucuaauacccu

SEQ ID NO: 1308086 - RNA, 19 nt, Artificial Sequence
  Description of Artificial Sequence: Synthetic oligonucleotide
  Sense strand starting at position 3500 of SEQ ID NO: 1241895
cgaguagugagagacccua

SEQ ID NO: 1308087 - RNA, 19 nt, Artificial Sequence
  Description of Artificial Sequence: Synthetic oligonucleotide
  Antisense strand to SEQ ID NO: 1308086
uagggucucucacuacucg

SEQ ID NO: 1308088 - RNA, 19 nt, Artificial Sequence
  Description of Artificial Sequence: Synthetic oligonucleotide
  Sense strand starting at position 3653 of SEQ ID NO: 1241895
ucaacuguugccugggaua

SEQ ID NO: 1308089 - RNA, 19 nt, Artificial Sequence
  Description of Artificial Sequence: Synthetic oligonucleotide
  Antisense strand to SEQ ID NO: 1308088
uaucccaggcaacaguuga

SEQ ID NO: 1308090 - RNA, 19 nt, Artificial Sequence
  Description of Artificial Sequence: Synthetic oligonucleotide
  Sense strand starting at position 3655 of SEQ ID NO: 1241895
aacuguugccugggauaga

SEQ ID NO: 1308091 - RNA, 19 nt, Artificial Sequence
  Description of Artificial Sequence: Synthetic oligonucleotide
  Antisense strand to SEQ ID NO: 1308090
ucuaucccaggcaacaguu

SEQ ID NO: 1308092 - RNA, 19 nt, Artificial Sequence
  Description of Artificial Sequence: Synthetic oligonucleotide
  Sense strand starting at position 3718 of SEQ ID NO: 1241895
agcugugugauccagagca

SEQ ID NO: 1308093 - RNA, 19 nt, Artificial Sequence
  Description of Artificial Sequence: Synthetic oligonucleotide
  Antisense strand to SEQ ID NO: 1308092
ugcucuggaucacacagcu

SEQ ID NO: 1308094 - RNA, 19 nt, Artificial Sequence
  Description of Artificial Sequence: Synthetic oligonucleotide
  Sense strand starting at position 3781 of SEQ ID NO: 1241895
gaguuuggagucggagaga

SEQ ID NO: 1308095 - RNA, 19 nt, Artificial Sequence
  Description of Artificial Sequence: Synthetic oligonucleotide
  Antisense strand to SEQ ID NO: 1308094
ucucuccgacuccaaacuc

SEQ ID NO: 1308096 - RNA, 19 nt, Artificial Sequence
  Description of Artificial Sequence: Synthetic oligonucleotide
  Sense strand starting at position 3790 of SEQ ID NO: 1241895
gucggagagaucugacuuu

SEQ ID NO: 1308097 - RNA, 19 nt, Artificial Sequence
  Description of Artificial Sequence: Synthetic oligonucleotide
  Antisense strand to SEQ ID NO: 1308096
aaagucagaucucuccgac

SEQ ID NO: 1308098 - RNA, 19 nt, Artificial Sequence
  Description of Artificial Sequence: Synthetic oligonucleotide
  Sense strand starting at position 3824 of SEQ ID NO: 1241895
acuuacugucuuggacaau

SEQ ID NO: 1308099 - RNA, 19 nt, Artificial Sequence
  Description of Artificial Sequence: Synthetic oligonucleotide
  Antisense strand to SEQ ID NO: 1308098
auuguccaagacaguaagu

SEQ ID NO: 1308100 - RNA, 19 nt, Artificial Sequence
  Description of Artificial Sequence: Synthetic oligonucleotide
  Sense strand starting at position 3897 of SEQ ID NO: 1241895
acaauuagccauuagaugu

SEQ ID NO: 1308101 - RNA, 19 nt, Artificial Sequence
  Description of Artificial Sequence: Synthetic oligonucleotide
  Antisense strand to SEQ ID NO: 1308100
acaucuaauggcuaauugu

SEQ ID NO: 1308102 - RNA, 19 nt, Artificial Sequence
  Description of Artificial Sequence: Synthetic oligonucleotide
  Sense strand starting at position 220 of SEQ ID NO: 1241896
caccuuagcccaggagaua

SEQ ID NO: 1308103 - RNA, 19 nt, Artificial Sequence
  Description of Artificial Sequence: Synthetic oligonucleotide
  Antisense strand to SEQ ID NO: 1308102
uaucuccugggcuaaggug

SEQ ID NO: 1308104 - RNA, 19 nt, Artificial Sequence
  Description of Artificial Sequence: Synthetic oligonucleotide
  Sense strand starting at position 384 of SEQ ID NO: 1241896
uauauaagguaccugagua

SEQ ID NO: 1308105 - RNA, 19 nt, Artificial Sequence
  Description of Artificial Sequence: Synthetic oligonucleotide
  Antisense strand to SEQ ID NO: 1308104
uacucagguaccuuauaua

SEQ ID NO: 1308106 - RNA, 19 nt, Artificial Sequence
  Description of Artificial Sequence: Synthetic oligonucleotide
  Sense strand starting at position 388 of SEQ ID NO: 1241896
uaagguaccugaguaguca

SEQ ID NO: 1308107 - RNA, 19 nt, Artificial Sequence
  Description of Artificial Sequence: Synthetic oligonucleotide
  Antisense strand to SEQ ID NO: 1308106
ugacuacucagguaccuua

SEQ ID NO: 1308108 - RNA, 19 nt, Artificial Sequence
  Description of Artificial Sequence: Synthetic oligonucleotide
  Sense strand starting at position 389 of SEQ ID NO: 1241896
aagguaccugaguagucaa

SEQ ID NO: 1308109 - RNA, 19 nt, Artificial Sequence
  Description of Artificial Sequence: Synthetic oligonucleotide
  Antisense strand to SEQ ID NO: 1308108
uugacuacucagguaccuu

SEQ ID NO: 1308110 - RNA, 19 nt, Artificial Sequence
  Description of Artificial Sequence: Synthetic oligonucleotide
  Sense strand starting at position 525 of SEQ ID NO: 1241896
guggaugguaguuaugguu

SEQ ID NO: 1308111 - RNA, 19 nt, Artificial Sequence
  Description of Artificial Sequence: Synthetic oligonucleotide
  Antisense strand to SEQ ID NO: 1308110
aaccauaacuaccauccac

SEQ ID NO: 1308112 - RNA, 19 nt, Artificial Sequence
  Description of Artificial Sequence: Synthetic oligonucleotide
  Sense strand starting at position 531 of SEQ ID NO: 1241896
gguaguuaugguugcacaa

SEQ ID NO: 1308113 - RNA, 19 nt, Artificial Sequence
  Description of Artificial Sequence: Synthetic oligonucleotide
  Antisense strand to SEQ ID NO: 1308112
uugugcaaccauaacuacc

SEQ ID NO: 1308114 - RNA, 19 nt, Artificial Sequence
  Description of Artificial Sequence: Synthetic oligonucleotide
  Sense strand starting at position 648 of SEQ ID NO: 1241896
cacaaaucuguagggcauu

SEQ ID NO: 1308115 - RNA, 19 nt, Artificial Sequence
  Description of Artificial Sequence: Synthetic oligonucleotide
  Antisense strand to SEQ ID NO: 1308114
aaugcccuacagauuugug

SEQ ID NO: 1308116 - RNA, 19 nt, Artificial Sequence
  Description of Artificial Sequence: Synthetic oligonucleotide
  Sense strand starting at position 718 of SEQ ID NO: 1241896
acaguucuaucuccaguca

SEQ ID NO: 1308117 - RNA, 19 nt, Artificial Sequence
  Description of Artificial Sequence: Synthetic oligonucleotide
  Antisense strand to SEQ ID NO: 1308116
ugacuggagauagaacugu

SEQ ID NO: 1308118 - RNA, 19 nt, Artificial Sequence
  Description of Artificial Sequence: Synthetic oligonucleotide
  Sense strand starting at position 1121 of SEQ ID NO: 1241896
ugaagauccugcuugguaa

SEQ ID NO: 1308119 - RNA, 19 nt, Artificial Sequence
  Description of Artificial Sequence: Synthetic oligonucleotide
  Antisense strand to SEQ ID NO: 1308118
uuaccaagcaggaucuuca

SEQ ID NO: 1308120 - RNA, 19 nt, Artificial Sequence
  Description of Artificial Sequence: Synthetic oligonucleotide
  Sense strand starting at position 1122 of SEQ ID NO: 1241896
gaagauccugcuugguaaa

SEQ ID NO: 1308121 - RNA, 19 nt, Artificial Sequence
  Description of Artificial Sequence: Synthetic oligonucleotide
  Antisense strand to SEQ ID NO: 1308120
uuuaccaagcaggaucuuc

SEQ ID NO: 1308122 - RNA, 19 nt, Artificial Sequence
  Description of Artificial Sequence: Synthetic oligonucleotide
  Sense strand starting at position 1143 of SEQ ID NO: 1241896
gugucugucagagaguacu

SEQ ID NO: 1308123 - RNA, 19 nt, Artificial Sequence
  Description of Artificial Sequence: Synthetic oligonucleotide
  Antisense strand to SEQ ID NO: 1308122
aguacucucugacagacac

SEQ ID NO: 1308124 - RNA, 19 nt, Artificial Sequence
  Description of Artificial Sequence: Synthetic oligonucleotide
  Sense strand starting at position 1303 of SEQ ID NO: 1241896
gggcacauuacugauaugu

SEQ ID NO: 1308125 - RNA, 19 nt, Artificial Sequence
  Description of Artificial Sequence: Synthetic oligonucleotide
  Antisense strand to SEQ ID NO: 1308124
acauaucaguaaugugccc

SEQ ID NO: 1308126 - RNA, 19 nt, Artificial Sequence
  Description of Artificial Sequence: Synthetic oligonucleotide
  Sense strand starting at position 1323 of SEQ ID NO: 1241896
gggaauccuugacaggaaa

SEQ ID NO: 1308127 - RNA, 19 nt, Artificial Sequence
  Description of Artificial Sequence: Synthetic oligonucleotide
  Antisense strand to SEQ ID NO: 1308126
uuuccugucaaggauuccc

SEQ ID NO: 1308128 - RNA, 19 nt, Artificial Sequence
  Description of Artificial Sequence: Synthetic oligonucleotide
  Sense strand starting at position 1384 of SEQ ID NO: 1241896
ccauccugcuuguuuggaa

SEQ ID NO: 1308129 - RNA, 19 nt, Artificial Sequence
  Description of Artificial Sequence: Synthetic oligonucleotide
  Antisense strand to SEQ ID NO: 1308128
uuccaaacaagcaggaugg

SEQ ID NO: 1308130 - RNA, 19 nt, Artificial Sequence
  Description of Artificial Sequence: Synthetic oligonucleotide
  Sense strand starting at position 1385 of SEQ ID NO: 1241896
cauccugcuuguuuggaaa

SEQ ID NO: 1308131 - RNA, 19 nt, Artificial Sequence
  Description of Artificial Sequence: Synthetic oligonucleotide
  Antisense strand to SEQ ID NO: 1308130
uuuccaaacaagcaggaug

SEQ ID NO: 1308132 - RNA, 19 nt, Artificial Sequence
  Description of Artificial Sequence: Synthetic oligonucleotide
  Sense strand starting at position 1469 of SEQ ID NO: 1241896
auaacuaucuaggcauaug

SEQ ID NO: 1308133 - RNA, 19 nt, Artificial Sequence
  Description of Artificial Sequence: Synthetic oligonucleotide
  Antisense strand to SEQ ID NO: 1308132
cauaugccuagauaguuau

SEQ ID NO: 1308134 - RNA, 19 nt, Artificial Sequence
  Description of Artificial Sequence: Synthetic oligonucleotide
  Sense strand starting at position 1511 of SEQ ID NO: 1241896
agaggagacuuagaaauca

SEQ ID NO: 1308135 - RNA, 19 nt, Artificial Sequence
  Description of Artificial Sequence: Synthetic oligonucleotide
  Antisense strand to SEQ ID NO: 1308134
ugauuucuaagucuccucu

SEQ ID NO: 1308136 - RNA, 19 nt, Artificial Sequence
  Description of Artificial Sequence: Synthetic oligonucleotide
  Sense strand starting at position 1541 of SEQ ID NO: 1241896
ugaggcaaggucugaauaa

SEQ ID NO: 1308137 - RNA, 19 nt, Artificial Sequence
  Description of Artificial Sequence: Synthetic oligonucleotide
  Antisense strand to SEQ ID NO: 1308136
uuauucagaccuugccuca

SEQ ID NO: 1308138 - RNA, 19 nt, Artificial Sequence
  Description of Artificial Sequence: Synthetic oligonucleotide
  Sense strand starting at position 1637 of SEQ ID NO: 1241896
ugaugucuagcgcuacagu

SEQ ID NO: 1308139 - RNA, 19 nt, Artificial Sequence
  Description of Artificial Sequence: Synthetic oligonucleotide
  Antisense strand to SEQ ID NO: 1308138
acuguagcgcuagacauca

SEQ ID NO: 1308140 - RNA, 19 nt, Artificial Sequence
  Description of Artificial Sequence: Synthetic oligonucleotide
  Sense strand starting at position 1812 of SEQ ID NO: 1241896
cugucuggacgggaugaau

SEQ ID NO: 1308141 - RNA, 19 nt, Artificial Sequence
  Description of Artificial Sequence: Synthetic oligonucleotide
  Antisense strand to SEQ ID NO: 1308140
auucaucccguccagacag

SEQ ID NO: 1308142 - RNA, 19 nt, Artificial Sequence
  Description of Artificial Sequence: Synthetic oligonucleotide
  Sense strand starting at position 1920 of SEQ ID NO: 1241896
guaacagcugcccaguaaa

SEQ ID NO: 1308143 - RNA, 19 nt, Artificial Sequence
  Description of Artificial Sequence: Synthetic oligonucleotide
  Antisense strand to SEQ ID NO: 1308142
uuuacugggcagcuguuac

SEQ ID NO: 1308144 - RNA, 19 nt, Artificial Sequence
  Description of Artificial Sequence: Synthetic oligonucleotide
  Sense strand starting at position 1958 of SEQ ID NO: 1241896
gccuguagcccggaggaaa

SEQ ID NO: 1308145 - RNA, 19 nt, Artificial Sequence
  Description of Artificial Sequence: Synthetic oligonucleotide
  Antisense strand to SEQ ID NO: 1308144
uuuccuccgggcuacaggc

SEQ ID NO: 1308146 - RNA, 19 nt, Artificial Sequence
  Description of Artificial Sequence: Synthetic oligonucleotide
  Sense strand starting at position 2009 of SEQ ID NO: 1241896
ccaggaguccuccaacuac

SEQ ID NO: 1308147 - RNA, 19 nt, Artificial Sequence
  Description of Artificial Sequence: Synthetic oligonucleotide
  Antisense strand to SEQ ID NO: 1308146
guaguuggaggacuccugg

SEQ ID NO: 1308148 - RNA, 19 nt, Artificial Sequence
  Description of Artificial Sequence: Synthetic oligonucleotide
  Sense strand starting at position 2052 of SEQ ID NO: 1241896
cgucgauuggucgagagga

SEQ ID NO: 1308149 - RNA, 19 nt, Artificial Sequence
  Description of Artificial Sequence: Synthetic oligonucleotide
  Antisense strand to SEQ ID NO: 1308148
uccucucgaccaaucgacg

SEQ ID NO: 1308150 - RNA, 19 nt, Artificial Sequence
  Description of Artificial Sequence: Synthetic oligonucleotide
  Sense strand starting at position 2186 of SEQ ID NO: 1241896
cagguugauuccuugcaga

SEQ ID NO: 1308151 - RNA, 19 nt, Artificial Sequence
  Description of Artificial Sequence: Synthetic oligonucleotide
  Antisense strand to SEQ ID NO: 1308150
ucugcaaggaaucaaccug

SEQ ID NO: 1308152 - RNA, 19 nt, Artificial Sequence
  Description of Artificial Sequence: Synthetic oligonucleotide
  Sense strand starting at position 2213 of SEQ ID NO: 1241896
uccagucccugcuuggaua

SEQ ID NO: 1308153 - RNA, 19 nt, Artificial Sequence
  Description of Artificial Sequence: Synthetic oligonucleotide
  Antisense strand to SEQ ID NO: 1308152
uauccaagcagggacugga

SEQ ID NO: 1308154 - RNA, 19 nt, Artificial Sequence
  Description of Artificial Sequence: Synthetic oligonucleotide
  Sense strand starting at position 2460 of SEQ ID NO: 1241896
guguucuaagcauuguguu

SEQ ID NO: 1308155 - RNA, 19 nt, Artificial Sequence
  Description of Artificial Sequence: Synthetic oligonucleotide
  Antisense strand to SEQ ID NO: 1308154
aacacaaugcuuagaacac

SEQ ID NO: 1308156 - RNA, 19 nt, Artificial Sequence
  Description of Artificial Sequence: Synthetic oligonucleotide
  Sense strand starting at position 2473 of SEQ ID NO: 1241896
uguguuaagcgugaaguua

SEQ ID NO: 1308157 - RNA, 19 nt, Artificial Sequence
  Description of Artificial Sequence: Synthetic oligonucleotide
  Antisense strand to SEQ ID NO: 1308156
uaacuucacgcuuaacaca

SEQ ID NO: 1308158 - RNA, 19 nt, Artificial Sequence
  Description of Artificial Sequence: Synthetic oligonucleotide
  Sense strand starting at position 2507 of SEQ ID NO: 1241896
gauauaaguccuggagauc

SEQ ID NO: 1308159 - RNA, 19 nt, Artificial Sequence
  Description of Artificial Sequence: Synthetic oligonucleotide
  Antisense strand to SEQ ID NO: 1308158
gaucuccaggacuuauauc

SEQ ID NO: 1308160 - RNA, 19 nt, Artificial Sequence
  Description of Artificial Sequence: Synthetic oligonucleotide
  Sense strand starting at position 2516 of SEQ ID NO: 1241896
ccuggagauccuuacagcu

SEQ ID NO: 1308161 - RNA, 19 nt, Artificial Sequence
  Description of Artificial Sequence: Synthetic oligonucleotide
  Antisense strand to SEQ ID NO: 1308160
agcuguaaggaucuccagg

SEQ ID NO: 1308162 - RNA, 19 nt, Artificial Sequence
  Description of Artificial Sequence: Synthetic oligonucleotide
  Sense strand starting at position 2693 of SEQ ID NO: 1241896
cugggugaaacauggugaa

SEQ ID NO: 1308163 - RNA, 19 nt, Artificial Sequence
  Description of Artificial Sequence: Synthetic oligonucleotide
  Antisense strand to SEQ ID NO: 1308162
uucaccauguuucacccag

SEQ ID NO: 1308164 - RNA, 19 nt, Artificial Sequence
  Description of Artificial Sequence: Synthetic oligonucleotide
  Sense strand starting at position 2905 of SEQ ID NO: 1241896
ggcguugaggauuauagag

SEQ ID NO: 1308165 - RNA, 19 nt, Artificial Sequence
  Description of Artificial Sequence: Synthetic oligonucleotide
  Antisense strand to SEQ ID NO: 1308164
cucuauaauccucaacgcc

SEQ ID NO: 1308166 - RNA, 19 nt, Artificial Sequence
  Description of Artificial Sequence: Synthetic oligonucleotide
  Sense strand starting at position 2917 of SEQ ID NO: 1241896
uauagaguauaugauggaa

SEQ ID NO: 1308167 - RNA, 19 nt, Artificial Sequence
  Description of Artificial Sequence: Synthetic oligonucleotide
  Antisense strand to SEQ ID NO: 1308166
uuccaucauauacucuaua

SEQ ID NO: 1308168 - RNA, 19 nt, Artificial Sequence
  Description of Artificial Sequence: Synthetic oligonucleotide
  Sense strand starting at position 2921 of SEQ ID NO: 1241896
gaguauaugauggaagugu

SEQ ID NO: 1308169 - RNA, 19 nt, Artificial Sequence
  Description of Artificial Sequence: Synthetic oligonucleotide
  Antisense strand to SEQ ID NO: 1308168
acacuuccaucauauacuc

SEQ ID NO: 1308170 - RNA, 19 nt, Artificial Sequence
  Description of Artificial Sequence: Synthetic oligonucleotide
  Sense strand starting at position 3001 of SEQ ID NO: 1241896
guaguuguuaaaggagaug

SEQ ID NO: 1308171 - RNA, 19 nt, Artificial Sequence
  Description of Artificial Sequence: Synthetic oligonucleotide
  Antisense strand to SEQ ID NO: 1308170
caucuccuuuaacaacuac

SEQ ID NO: 1308172 - RNA, 19 nt, Artificial Sequence
  Description of Artificial Sequence: Synthetic oligonucleotide
  Sense strand starting at position 3116 of SEQ ID NO: 1241896
ccaagaaacacgugaugaa

SEQ ID NO: 1308173 - RNA, 19 nt, Artificial Sequence
  Description of Artificial Sequence: Synthetic oligonucleotide
  Antisense strand to SEQ ID NO: 1308172
uucaucacguguuucuugg

SEQ ID NO: 1308174 - RNA, 19 nt, Artificial Sequence
  Description of Artificial Sequence: Synthetic oligonucleotide
  Sense strand starting at position 3160 of SEQ ID NO: 1241896
aaguaacuuggcugaggaa

SEQ ID NO: 1308175 - RNA, 19 nt, Artificial Sequence
  Description of Artificial Sequence: Synthetic oligonucleotide
  Antisense strand to SEQ ID NO: 1308174
uuccucagccaaguuacuu

SEQ ID NO: 1308176 - RNA, 19 nt, Artificial Sequence
  Description of Artificial Sequence: Synthetic oligonucleotide
  Sense strand starting at position 3899 of SEQ ID NO: 1241896
auggcuaauggugauccua

SEQ ID NO: 1308177 - RNA, 19 nt, Artificial Sequence
  Description of Artificial Sequence: Synthetic oligonucleotide
  Antisense strand to SEQ ID NO: 1308176
uaggaucaccauuagccau

SEQ ID NO: 1308178 - RNA, 19 nt, Artificial Sequence
  Description of Artificial Sequence: Synthetic oligonucleotide
  Sense strand starting at position 3901 of SEQ ID NO: 1241896
ggcuaauggugauccuauu

SEQ ID NO: 1308179 - RNA, 19 nt, Artificial Sequence
  Description of Artificial Sequence: Synthetic oligonucleotide
  Antisense strand to SEQ ID NO: 1308178
aauaggaucaccauuagcc

SEQ ID NO: 1308180 - RNA, 19 nt, Artificial Sequence
  Description of Artificial Sequence: Synthetic oligonucleotide
  Sense strand starting at position 3916 of SEQ ID NO: 1241896
uauuguauagcacaggauu

SEQ ID NO: 1308181 - RNA, 19 nt, Artificial Sequence
  Description of Artificial Sequence: Synthetic oligonucleotide
  Antisense strand to SEQ ID NO: 1308180
aauccugugcuauacaaua

SEQ ID NO: 1308182 - RNA, 19 nt, Artificial Sequence
  Description of Artificial Sequence: Synthetic oligonucleotide
  Sense strand starting at position 80 of SEQ ID NO: 1241897
uucccauggcccugaucua

SEQ ID NO: 1308183 - RNA, 19 nt, Artificial Sequence
  Description of Artificial Sequence: Synthetic oligonucleotide
  Antisense strand to SEQ ID NO: 1308182
uagaucagggccaugggaa

SEQ ID NO: 1308184 - RNA, 19 nt, Artificial Sequence
  Description of Artificial Sequence: Synthetic oligonucleotide
  Sense strand starting at position 81 of SEQ ID NO: 1241897
ucccauggcccugaucuaa

SEQ ID NO: 1308185 - RNA, 19 nt, Artificial Sequence
  Description of Artificial Sequence: Synthetic oligonucleotide
  Antisense strand to SEQ ID NO: 1308184
uuagaucagggccauggga

SEQ ID NO: 1308186 - RNA, 19 nt, Artificial Sequence
  Description of Artificial Sequence: Synthetic oligonucleotide
  Sense strand starting at position 129 of SEQ ID NO: 1241897
gugccuuggacccaagagu

SEQ ID NO: 1308187 - RNA, 19 nt, Artificial Sequence
  Description of Artificial Sequence: Synthetic oligonucleotide
  Antisense strand to SEQ ID NO: 1308186
acucuuggguccaaggcac

SEQ ID NO: 1308188 - RNA, 19 nt, Artificial Sequence
  Description of Artificial Sequence: Synthetic oligonucleotide
  Sense strand starting at position 180 of SEQ ID NO: 1241897
gcgcuugaucuccaaauug

SEQ ID NO: 1308189 - RNA, 19 nt, Artificial Sequence
  Description of Artificial Sequence: Synthetic oligonucleotide
  Antisense strand to SEQ ID NO: 1308188
caauuuggagaucaagcgc

SEQ ID NO: 1308190 - RNA, 19 nt, Artificial Sequence
  Description of Artificial Sequence: Synthetic oligonucleotide
  Sense strand starting at position 263 of SEQ ID NO: 1241897
cucagucugccugaagcaa

SEQ ID NO: 1308191 - RNA, 19 nt, Artificial Sequence
  Description of Artificial Sequence: Synthetic oligonucleotide
  Antisense strand to SEQ ID NO: 1308190
uugcuucaggcagacugag

SEQ ID NO: 1308192 - RNA, 19 nt, Artificial Sequence
  Description of Artificial Sequence: Synthetic oligonucleotide
  Sense strand starting at position 531 of SEQ ID NO: 1241897
gggagagcuugagcccaua

SEQ ID NO: 1308193 - RNA, 19 nt, Artificial Sequence
  Description of Artificial Sequence: Synthetic oligonucleotide
  Antisense strand to SEQ ID NO: 1308192
uaugggcucaagcucuccc

SEQ ID NO: 1308194 - RNA, 19 nt, Artificial Sequence
  Description of Artificial Sequence: Synthetic oligonucleotide
  Sense strand starting at position 534 of SEQ ID NO: 1241897
agagcuugagcccauaacu

SEQ ID NO: 1308195 - RNA, 19 nt, Artificial Sequence
  Description of Artificial Sequence: Synthetic oligonucleotide
  Antisense strand to SEQ ID NO: 1308194
aguuaugggcucaagcucu

SEQ ID NO: 1308196 - RNA, 19 nt, Artificial Sequence
  Description of Artificial Sequence: Synthetic oligonucleotide
  Sense strand starting at position 589 of SEQ ID NO: 1241897
cccugauuacaaggaguug

SEQ ID NO: 1308197 - RNA, 19 nt, Artificial Sequence
  Description of Artificial Sequence: Synthetic oligonucleotide
  Antisense strand to SEQ ID NO: 1308196
caacuccuuguaaucaggg

SEQ ID NO: 1308198 - RNA, 19 nt, Artificial Sequence
  Description of Artificial Sequence: Synthetic oligonucleotide
  Sense strand starting at position 604 of SEQ ID NO: 1241897
guugaaauuugccuaaagc

SEQ ID NO: 1308199 - RNA, 19 nt, Artificial Sequence
  Description of Artificial Sequence: Synthetic oligonucleotide
  Antisense strand to SEQ ID NO: 1308198
gcuuuaggcaaauuucaac

SEQ ID NO: 1308200 - RNA, 19 nt, Artificial Sequence
  Description of Artificial Sequence: Synthetic oligonucleotide
  Sense strand starting at position 722 of SEQ ID NO: 1241897
gcugaagacauguguaccu

SEQ ID NO: 1308201 - RNA, 19 nt, Artificial Sequence
  Description of Artificial Sequence: Synthetic oligonucleotide
  Antisense strand to SEQ ID NO: 1308200
agguacacaugucuucagc

SEQ ID NO: 1308202 - RNA, 19 nt, Artificial Sequence
  Description of Artificial Sequence: Synthetic oligonucleotide
  Sense strand starting at position 724 of SEQ ID NO: 1241897
ugaagacauguguaccuca

SEQ ID NO: 1308203 - RNA, 19 nt, Artificial Sequence
  Description of Artificial Sequence: Synthetic oligonucleotide
  Antisense strand to SEQ ID NO: 1308202
ugagguacacaugucuuca

SEQ ID NO: 1308204 - RNA, 19 nt, Artificial Sequence
  Description of Artificial Sequence: Synthetic oligonucleotide
  Sense strand starting at position 727 of SEQ ID NO: 1241897
agacauguguaccucauua

SEQ ID NO: 1308205 - RNA, 19 nt, Artificial Sequence
  Description of Artificial Sequence: Synthetic oligonucleotide
  Antisense strand to SEQ ID NO: 1308204
uaaugagguacacaugucu

SEQ ID NO: 1308206 - RNA, 19 nt, Artificial Sequence
  Description of Artificial Sequence: Synthetic oligonucleotide
  Sense strand starting at position 737 of SEQ ID NO: 1241897
accucauuacccuagcgau

SEQ ID NO: 1308207 - RNA, 19 nt, Artificial Sequence
  Description of Artificial Sequence: Synthetic oligonucleotide
  Antisense strand to SEQ ID NO: 1308206
aucgcuaggguaaugaggu

SEQ ID NO: 1308208 - RNA, 19 nt, Artificial Sequence
  Description of Artificial Sequence: Synthetic oligonucleotide
  Sense strand starting at position 752 of SEQ ID NO: 1241897
cgaugugagaagcaguaau

SEQ ID NO: 1308209 - RNA, 19 nt, Artificial Sequence
  Description of Artificial Sequence: Synthetic oligonucleotide
  Antisense strand to SEQ ID NO: 1308208
auuacugcuucucacaucg

SEQ ID NO: 1308210 - RNA, 19 nt, Artificial Sequence
  Description of Artificial Sequence: Synthetic oligonucleotide
  Sense strand starting at position 816 of SEQ ID NO: 1241897
cagcauuucucaguggcuu

SEQ ID NO: 1308211 - RNA, 19 nt, Artificial Sequence
  Description of Artificial Sequence: Synthetic oligonucleotide
  Antisense strand to SEQ ID NO: 1308210
aagccacugagaaaugcug

SEQ ID NO: 1308212 - RNA, 19 nt, Artificial Sequence
  Description of Artificial Sequence: Synthetic oligonucleotide
  Sense strand starting at position 817 of SEQ ID NO: 1241897
agcauuucucaguggcuuu

SEQ ID NO: 1308213 - RNA, 19 nt, Artificial Sequence
  Description of Artificial Sequence: Synthetic oligonucleotide
  Antisense strand to SEQ ID NO: 1308212
aaagccacugagaaaugcu

SEQ ID NO: 1308214 - RNA, 19 nt, Artificial Sequence
  Description of Artificial Sequence: Synthetic oligonucleotide
  Sense strand starting at position 921 of SEQ ID NO: 1241897
ggaacucuguuauccacua

SEQ ID NO: 1308215 - RNA, 19 nt, Artificial Sequence
  Description of Artificial Sequence: Synthetic oligonucleotide
  Antisense strand to SEQ ID NO: 1308214
uaguggauaacagaguucc

SEQ ID NO: 1308216 - RNA, 19 nt, Artificial Sequence
  Description of Artificial Sequence: Synthetic oligonucleotide
  Sense strand starting at position 926 of SEQ ID NO: 1241897
ucuguuauccacuacagca

SEQ ID NO: 1308217 - RNA, 19 nt, Artificial Sequence
  Description of Artificial Sequence: Synthetic oligonucleotide
  Antisense strand to SEQ ID NO: 1308216
ugcuguaguggauaacaga

SEQ ID NO: 1308218 - RNA, 19 nt, Artificial Sequence
  Description of Artificial Sequence: Synthetic oligonucleotide
  Sense strand starting at position 975 of SEQ ID NO: 1241897
gaggacauagcuggcuuaa

SEQ ID NO: 1308219 - RNA, 19 nt, Artificial Sequence
  Description of Artificial Sequence: Synthetic oligonucleotide
  Antisense strand to SEQ ID NO: 1308218
uuaagccagcuauguccuc

SEQ ID NO: 1308220 - RNA, 19 nt, Artificial Sequence
  Description of Artificial Sequence: Synthetic oligonucleotide
  Sense strand starting at position 977 of SEQ ID NO: 1241897
ggacauagcuggcuuaaau

SEQ ID NO: 1308221 - RNA, 19 nt, Artificial Sequence
  Description of Artificial Sequence: Synthetic oligonucleotide
  Antisense strand to SEQ ID NO: 1308220
auuuaagccagcuaugucc

SEQ ID NO: 1308222 - RNA, 19 nt, Artificial Sequence
  Description of Artificial Sequence: Synthetic oligonucleotide
  Sense strand starting at position 1004 of SEQ ID NO: 1241897
gaucaaggguucucaguau

SEQ ID NO: 1308223 - RNA, 19 nt, Artificial Sequence
  Description of Artificial Sequence: Synthetic oligonucleotide
  Antisense strand to SEQ ID NO: 1308222
auacugagaacccuugauc

SEQ ID NO: 1308224 - RNA, 19 nt, Artificial Sequence
  Description of Artificial Sequence: Synthetic oligonucleotide
  Sense strand starting at position 1008 of SEQ ID NO: 1241897
aaggguucucaguaucugu

SEQ ID NO: 1308225 - RNA, 19 nt, Artificial Sequence
  Description of Artificial Sequence: Synthetic oligonucleotide
  Antisense strand to SEQ ID NO: 1308224
acagauacugagaacccuu

SEQ ID NO: 1308226 - RNA, 19 nt, Artificial Sequence
  Description of Artificial Sequence: Synthetic oligonucleotide
  Sense strand starting at position 1015 of SEQ ID NO: 1241897
cucaguaucugugugauuu

SEQ ID NO: 1308227 - RNA, 19 nt, Artificial Sequence
  Description of Artificial Sequence: Synthetic oligonucleotide
  Antisense strand to SEQ ID NO: 1308226
aaaucacacagauacugag

SEQ ID NO: 1308228 - RNA, 19 nt, Artificial Sequence
  Description of Artificial Sequence: Synthetic oligonucleotide
  Sense strand starting at position 1016 of SEQ ID NO: 1241897
ucaguaucugugugauuuc

SEQ ID NO: 1308229 - RNA, 19 nt, Artificial Sequence
  Description of Artificial Sequence: Synthetic oligonucleotide
  Antisense strand to SEQ ID NO: 1308228
gaaaucacacagauacuga

SEQ ID NO: 1308230 - RNA, 19 nt, Artificial Sequence
  Description of Artificial Sequence: Synthetic oligonucleotide
  Sense strand starting at position 1019 of SEQ ID NO: 1241897
guaucugugugauuucuag

SEQ ID NO: 1308231 - RNA, 19 nt, Artificial Sequence
  Description of Artificial Sequence: Synthetic oligonucleotide
  Antisense strand to SEQ ID NO: 1308230
cuagaaaucacacagauac

SEQ ID NO: 1308232 - RNA, 19 nt, Artificial Sequence
  Description of Artificial Sequence: Synthetic oligonucleotide
  Sense strand starting at position 1106 of SEQ ID NO: 1241897
gucccuugugaccagauca

SEQ ID NO: 1308233 - RNA, 19 nt, Artificial Sequence
  Description of Artificial Sequence: Synthetic oligonucleotide
  Antisense strand to SEQ ID NO: 1308232
ugaucuggucacaagggac

SEQ ID NO: 1308234 - RNA, 19 nt, Artificial Sequence
  Description of Artificial Sequence: Synthetic oligonucleotide
  Sense strand starting at position 1135 of SEQ ID NO: 1241897
gacagaugguggguucaag

SEQ ID NO: 1308235 - RNA, 19 nt, Artificial Sequence
  Description of Artificial Sequence: Synthetic oligonucleotide
  Antisense strand to SEQ ID NO: 1308234
cuugaacccaccaucuguc

SEQ ID NO: 1308236 - RNA, 19 nt, Artificial Sequence
  Description of Artificial Sequence: Synthetic oligonucleotide
  Sense strand starting at position 1167 of SEQ ID NO: 1241897
cccagaagguugucuucca

SEQ ID NO: 1308237 - RNA, 19 nt, Artificial Sequence
  Description of Artificial Sequence: Synthetic oligonucleotide
  Antisense strand to SEQ ID NO: 1308236
uggaagacaaccuucuggg

SEQ ID NO: 1308238 - RNA, 19 nt, Artificial Sequence
  Description of Artificial Sequence: Synthetic oligonucleotide
  Sense strand starting at position 1175 of SEQ ID NO: 1241897
guugucuuccacuaagaag

SEQ ID NO: 1308239 - RNA, 19 nt, Artificial Sequence
  Description of Artificial Sequence: Synthetic oligonucleotide
  Antisense strand to SEQ ID NO: 1308238
cuucuuaguggaagacaac

SEQ ID NO: 1308240 - RNA, 19 nt, Artificial Sequence
  Description of Artificial Sequence: Synthetic oligonucleotide
  Sense strand starting at position 1264 of SEQ ID NO: 1241897
ugacaugcugcucaaguaa

SEQ ID NO: 1308241 - RNA, 19 nt, Artificial Sequence
  Description of Artificial Sequence: Synthetic oligonucleotide
  Antisense strand to SEQ ID NO: 1308240
uuacuugagcagcauguca

SEQ ID NO: 1308242 - RNA, 19 nt, Artificial Sequence
  Description of Artificial Sequence: Synthetic oligonucleotide
  Sense strand starting at position 1407 of SEQ ID NO: 1241897
ugcacacuccaacguauuu

SEQ ID NO: 1308243 - RNA, 19 nt, Artificial Sequence
  Description of Artificial Sequence: Synthetic oligonucleotide
  Antisense strand to SEQ ID NO: 1308242
aaauacguuggagugugca

SEQ ID NO: 1308244 - RNA, 19 nt, Artificial Sequence
  Description of Artificial Sequence: Synthetic oligonucleotide
  Sense strand starting at position 1418 of SEQ ID NO: 1241897
acguauuuaugaguacguu

SEQ ID NO: 1308245 - RNA, 19 nt, Artificial Sequence
  Description of Artificial Sequence: Synthetic oligonucleotide
  Antisense strand to SEQ ID NO: 1308244
aacguacucauaaauacgu

SEQ ID NO: 1308246 - RNA, 19 nt, Artificial Sequence
  Description of Artificial Sequence: Synthetic oligonucleotide
  Sense strand starting at position 1419 of SEQ ID NO: 1241897
cguauuuaugaguacguuu

SEQ ID NO: 1308247 - RNA, 19 nt, Artificial Sequence
  Description of Artificial Sequence: Synthetic oligonucleotide
  Antisense strand to SEQ ID NO: 1308246
aaacguacucauaaauacg

SEQ ID NO: 1308248 - RNA, 19 nt, Artificial Sequence
  Description of Artificial Sequence: Synthetic oligonucleotide
  Sense strand starting at position 1565 of SEQ ID NO: 1241897
ucuucaugcgcugucgaau

SEQ ID NO: 1308249 - RNA, 19 nt, Artificial Sequence
  Description of Artificial Sequence: Synthetic oligonucleotide
  Antisense strand to SEQ ID NO: 1308248
auucgacagcgcaugaaga

SEQ ID NO: 1308250 - RNA, 19 nt, Artificial Sequence
  Description of Artificial Sequence: Synthetic oligonucleotide
  Sense strand starting at position 2034 of SEQ ID NO: 1241897
aagagaugcccuugggaug

SEQ ID NO: 1308251 - RNA, 19 nt, Artificial Sequence
  Description of Artificial Sequence: Synthetic oligonucleotide
  Antisense strand to SEQ ID NO: 1308250
caucccaagggcaucucuu

SEQ ID NO: 1308252 - RNA, 19 nt, Artificial Sequence
  Description of Artificial Sequence: Synthetic oligonucleotide
  Sense strand starting at position 2103 of SEQ ID NO: 1241897
gaggucucuggaugcaacu

SEQ ID NO: 1308253 - RNA, 19 nt, Artificial Sequence
  Description of Artificial Sequence: Synthetic oligonucleotide
  Antisense strand to SEQ ID NO: 1308252
aguugcauccagagaccuc

SEQ ID NO: 1308254 - RNA, 19 nt, Artificial Sequence
  Description of Artificial Sequence: Synthetic oligonucleotide
  Sense strand starting at position 2141 of SEQ ID NO: 1241897
uggccagggucuuccagau

SEQ ID NO: 1308255 - RNA, 19 nt, Artificial Sequence
  Description of Artificial Sequence: Synthetic oligonucleotide
  Antisense strand to SEQ ID NO: 1308254
aucuggaagacccuggcca

SEQ ID NO: 1308256 - RNA, 19 nt, Artificial Sequence
  Description of Artificial Sequence: Synthetic oligonucleotide
  Sense strand starting at position 2147 of SEQ ID NO: 1241897
gggucuuccagauguggaa

SEQ ID NO: 1308257 - RNA, 19 nt, Artificial Sequence
  Description of Artificial Sequence: Synthetic oligonucleotide
  Antisense strand to SEQ ID NO: 1308256
uuccacaucuggaagaccc

SEQ ID NO: 1308258 - RNA, 19 nt, Artificial Sequence
  Description of Artificial Sequence: Synthetic oligonucleotide
  Sense strand starting at position 2411 of SEQ ID NO: 1241897
cugcuuuagaagcagaagu

SEQ ID NO: 1308259 - RNA, 19 nt, Artificial Sequence
  Description of Artificial Sequence: Synthetic oligonucleotide
  Antisense strand to SEQ ID NO: 1308258
acuucugcuucuaaagcag

SEQ ID NO: 1308260 - RNA, 19 nt, Artificial Sequence
  Description of Artificial Sequence: Synthetic oligonucleotide
  Sense strand starting at position 2885 of SEQ ID NO: 1241897
gcgaggguccggcagauuu

SEQ ID NO: 1308261 - RNA, 19 nt, Artificial Sequence
  Description of Artificial Sequence: Synthetic oligonucleotide
  Antisense strand to SEQ ID NO: 1308260
aaaucugccggacccucgc

SEQ ID NO: 1308262 - RNA, 19 nt, Artificial Sequence
  Description of Artificial Sequence: Synthetic oligonucleotide
  Sense strand starting at position 2 of SEQ ID NO: 1241898
uguauuaaagcaugcauga

SEQ ID NO: 1308263 - RNA, 19 nt, Artificial Sequence
  Description of Artificial Sequence: Synthetic oligonucleotide
  Antisense strand to SEQ ID NO: 1308262
ucaugcaugcuuuaauaca

SEQ ID NO: 1308264 - RNA, 19 nt, Artificial Sequence
  Description of Artificial Sequence: Synthetic oligonucleotide
  Sense strand starting at position 192 of SEQ ID NO: 1241898
uuucuauguguggaauguu

SEQ ID NO: 1308265 - RNA, 19 nt, Artificial Sequence
  Description of Artificial Sequence: Synthetic oligonucleotide
  Antisense strand to SEQ ID NO: 1308264
aacauuccacacauagaaa

SEQ ID NO: 1308266 - RNA, 19 nt, Artificial Sequence
  Description of Artificial Sequence: Synthetic oligonucleotide
  Sense strand starting at position 204 of SEQ ID NO: 1241898
gaauguucugaguauccac

SEQ ID NO: 1308267 - RNA, 19 nt, Artificial Sequence
  Description of Artificial Sequence: Synthetic oligonucleotide
  Antisense strand to SEQ ID NO: 1308266
guggauacucagaacauuc

SEQ ID NO: 1308268 - RNA, 19 nt, Artificial Sequence
  Description of Artificial Sequence: Synthetic oligonucleotide
  Sense strand starting at position 269 of SEQ ID NO: 1241898
ucauuaaggugcucuuaaa

SEQ ID NO: 1308269 - RNA, 19 nt, Artificial Sequence
  Description of Artificial Sequence: Synthetic oligonucleotide
  Antisense strand to SEQ ID NO: 1308268
uuuaagagcaccuuaauga

SEQ ID NO: 1308270 - RNA, 19 nt, Artificial Sequence
  Description of Artificial Sequence: Synthetic oligonucleotide
  Sense strand starting at position 337 of SEQ ID NO: 1241898
gcucaugguuuaccuauaa

SEQ ID NO: 1308271 - RNA, 19 nt, Artificial Sequence
  Description of Artificial Sequence: Synthetic oligonucleotide
  Antisense strand to SEQ ID NO: 1308270
uuauagguaaaccaugagc

SEQ ID NO: 1308272 - RNA, 19 nt, Artificial Sequence
  Description of Artificial Sequence: Synthetic oligonucleotide
  Sense strand starting at position 378 of SEQ ID NO: 1241898
accuauuauucuuuaggga

SEQ ID NO: 1308273 - RNA, 19 nt, Artificial Sequence
  Description of Artificial Sequence: Synthetic oligonucleotide
  Antisense strand to SEQ ID NO: 1308272
ucccuaaagaauaauaggu

SEQ ID NO: 1308274 - RNA, 19 nt, Artificial Sequence
  Description of Artificial Sequence: Synthetic oligonucleotide
  Sense strand starting at position 382 of SEQ ID NO: 1241898
auuauucuuuagggaagaa

SEQ ID NO: 1308275 - RNA, 19 nt, Artificial Sequence
  Description of Artificial Sequence: Synthetic oligonucleotide
  Antisense strand to SEQ ID NO: 1308274
uucuucccuaaagaauaau

SEQ ID NO: 1308276 - RNA, 19 nt, Artificial Sequence
  Description of Artificial Sequence: Synthetic oligonucleotide
  Sense strand starting at position 442 of SEQ ID NO: 1241898
ucucgaaucuaguuaacac

SEQ ID NO: 1308277 - RNA, 19 nt, Artificial Sequence
  Description of Artificial Sequence: Synthetic oligonucleotide
  Antisense strand to SEQ ID NO: 1308276
guguuaacuagauucgaga

SEQ ID NO: 1308278 - RNA, 19 nt, Artificial Sequence
  Description of Artificial Sequence: Synthetic oligonucleotide
  Sense strand starting at position 470 of SEQ ID NO: 1241898
uccaaauaauuucgaauug

SEQ ID NO: 1308279 - RNA, 19 nt, Artificial Sequence
  Description of Artificial Sequence: Synthetic oligonucleotide
  Antisense strand to SEQ ID NO: 1308278
caauucgaaauuauuugga

SEQ ID NO: 1308280 - RNA, 19 nt, Artificial Sequence
  Description of Artificial Sequence: Synthetic oligonucleotide
  Sense strand starting at position 471 of SEQ ID NO: 1241898
ccaaauaauuucgaauuga

SEQ ID NO: 1308281 - RNA, 19 nt, Artificial Sequence
  Description of Artificial Sequence: Synthetic oligonucleotide
  Antisense strand to SEQ ID NO: 1308280
ucaauucgaaauuauuugg

SEQ ID NO: 1308282 - RNA, 19 nt, Artificial Sequence
  Description of Artificial Sequence: Synthetic oligonucleotide
  Sense strand starting at position 588 of SEQ ID NO: 1241898
aggauaacacguugcuaaa

SEQ ID NO: 1308283 - RNA, 19 nt, Artificial Sequence
  Description of Artificial Sequence: Synthetic oligonucleotide
  Antisense strand to SEQ ID NO: 1308282
uuuagcaacguguuauccu

SEQ ID NO: 1308284 - RNA, 19 nt, Artificial Sequence
  Description of Artificial Sequence: Synthetic oligonucleotide
  Sense strand starting at position 590 of SEQ ID NO: 1241898
gauaacacguugcuaaaca

SEQ ID NO: 1308285 - RNA, 19 nt, Artificial Sequence
  Description of Artificial Sequence: Synthetic oligonucleotide
  Antisense strand to SEQ ID NO: 1308284
uguuuagcaacguguuauc

SEQ ID NO: 1308286 - RNA, 19 nt, Artificial Sequence
  Description of Artificial Sequence: Synthetic oligonucleotide
  Sense strand starting at position 591 of SEQ ID NO: 1241898
auaacacguugcuaaacaa

SEQ ID NO: 1308287 - RNA, 19 nt, Artificial Sequence
  Description of Artificial Sequence: Synthetic oligonucleotide
  Antisense strand to SEQ ID NO: 1308286
uuguuuagcaacguguuau

SEQ ID NO: 1308288 - RNA, 19 nt, Artificial Sequence
  Description of Artificial Sequence: Synthetic oligonucleotide
  Sense strand starting at position 622 of SEQ ID NO: 1241898
aggacaguccaguggagua

SEQ ID NO: 1308289 - RNA, 19 nt, Artificial Sequence
  Description of Artificial Sequence: Synthetic oligonucleotide
  Antisense strand to SEQ ID NO: 1308288
uacuccacuggacuguccu

SEQ ID NO: 1308290 - RNA, 19 nt, Artificial Sequence
  Description of Artificial Sequence: Synthetic oligonucleotide
  Sense strand starting at position 655 of SEQ ID NO: 1241898
ccacgacugacauaugugu

SEQ ID NO: 1308291 - RNA, 19 nt, Artificial Sequence
  Description of Artificial Sequence: Synthetic oligonucleotide
  Antisense strand to SEQ ID NO: 1308290
acacauaugucagucgugg

SEQ ID NO: 1308292 - RNA, 19 nt, Artificial Sequence
  Description of Artificial Sequence: Synthetic oligonucleotide
  Sense strand starting at position 657 of SEQ ID NO: 1241898
acgacugacauauguguua

SEQ ID NO: 1308293 - RNA, 19 nt, Artificial Sequence
  Description of Artificial Sequence: Synthetic oligonucleotide
  Antisense strand to SEQ ID NO: 1308292
uaacacauaugucagucgu

SEQ ID NO: 1308294 - RNA, 19 nt, Artificial Sequence
  Description of Artificial Sequence: Synthetic oligonucleotide
  Sense strand starting at position 660 of SEQ ID NO: 1241898
acugacauauguguuauua

SEQ ID NO: 1308295 - RNA, 19 nt, Artificial Sequence
  Description of Artificial Sequence: Synthetic oligonucleotide
  Antisense strand to SEQ ID NO: 1308294
uaauaacacauaugucagu

SEQ ID NO: 1308296 - RNA, 19 nt, Artificial Sequence
  Description of Artificial Sequence: Synthetic oligonucleotide
  Sense strand starting at position 670 of SEQ ID NO: 1241898
guguuauuauaagcacaaa

SEQ ID NO: 1308297 - RNA, 19 nt, Artificial Sequence
  Description of Artificial Sequence: Synthetic oligonucleotide
  Antisense strand to SEQ ID NO: 1308296
uuugugcuuauaauaacac

SEQ ID NO: 1308298 - RNA, 19 nt, Artificial Sequence
  Description of Artificial Sequence: Synthetic oligonucleotide
  Sense strand starting at position 716 of SEQ ID NO: 1241898
acgaucagauuauguaaua

SEQ ID NO: 1308299 - RNA, 19 nt, Artificial Sequence
  Description of Artificial Sequence: Synthetic oligonucleotide
  Antisense strand to SEQ ID NO: 1308298
uauuacauaaucugaucgu

SEQ ID NO: 1308300 - RNA, 19 nt, Artificial Sequence
  Description of Artificial Sequence: Synthetic oligonucleotide
  Sense strand starting at position 717 of SEQ ID NO: 1241898
cgaucagauuauguaauag

SEQ ID NO: 1308301 - RNA, 19 nt, Artificial Sequence
  Description of Artificial Sequence: Synthetic oligonucleotide
  Antisense strand to SEQ ID NO: 1308300
cuauuacauaaucugaucg

SEQ ID NO: 1308302 - RNA, 19 nt, Artificial Sequence
  Description of Artificial Sequence: Synthetic oligonucleotide
  Sense strand starting at position 1071 of SEQ ID NO: 1241898
agcuguuaugucuggugaa

SEQ ID NO: 1308303 - RNA, 19 nt, Artificial Sequence
  Description of Artificial Sequence: Synthetic oligonucleotide
  Antisense strand to SEQ ID NO: 1308302
uucaccagacauaacagcu

SEQ ID NO: 1308304 - RNA, 19 nt, Artificial Sequence
  Description of Artificial Sequence: Synthetic oligonucleotide
  Sense strand starting at position 1111 of SEQ ID NO: 1241898
aacgaacuugccgggaauu

SEQ ID NO: 1308305 - RNA, 19 nt, Artificial Sequence
  Description of Artificial Sequence: Synthetic oligonucleotide
  Antisense strand to SEQ ID NO: 1308304
aauucccggcaaguucguu

SEQ ID NO: 1308306 - RNA, 19 nt, Artificial Sequence
  Description of Artificial Sequence: Synthetic oligonucleotide
  Sense strand starting at position 1113 of SEQ ID NO: 1241898
cgaacuugccgggaauuca

SEQ ID NO: 1308307 - RNA, 19 nt, Artificial Sequence
  Description of Artificial Sequence: Synthetic oligonucleotide
  Antisense strand to SEQ ID NO: 1308306
ugaauucccggcaaguucg

SEQ ID NO: 1308308 - RNA, 19 nt, Artificial Sequence
  Description of Artificial Sequence: Synthetic oligonucleotide
  Sense strand starting at position 1160 of SEQ ID NO: 1241898
aguaguuccaguuauugca

SEQ ID NO: 1308309 - RNA, 19 nt, Artificial Sequence
  Description of Artificial Sequence: Synthetic oligonucleotide
  Antisense strand to SEQ ID NO: 1308308
ugcaauaacuggaacuacu

SEQ ID NO: 1308310 - RNA, 19 nt, Artificial Sequence
  Description of Artificial Sequence: Synthetic oligonucleotide
  Sense strand starting at position 1214 of SEQ ID NO: 1241898
ugaguccugccaugcagua

SEQ ID NO: 1308311 - RNA, 19 nt, Artificial Sequence
  Description of Artificial Sequence: Synthetic oligonucleotide
  Antisense strand to SEQ ID NO: 1308310
uacugcauggcaggacuca

SEQ ID NO: 1308312 - RNA, 19 nt, Artificial Sequence
  Description of Artificial Sequence: Synthetic oligonucleotide
  Sense strand starting at position 1307 of SEQ ID NO: 1241898
ggucuacucugguuaacau

SEQ ID NO: 1308313 - RNA, 19 nt, Artificial Sequence
  Description of Artificial Sequence: Synthetic oligonucleotide
  Antisense strand to SEQ ID NO: 1308312
auguuaaccagaguagacc

SEQ ID NO: 1308314 - RNA, 19 nt, Artificial Sequence
  Description of Artificial Sequence: Synthetic oligonucleotide
  Sense strand starting at position 2391 of SEQ ID NO: 1241898
gggucugcguuguuuggua

SEQ ID NO: 1308315 - RNA, 19 nt, Artificial Sequence
  Description of Artificial Sequence: Synthetic oligonucleotide
  Antisense strand to SEQ ID NO: 1308314
uaccaaacaacgcagaccc

SEQ ID NO: 1308316 - RNA, 19 nt, Artificial Sequence
  Description of Artificial Sequence: Synthetic oligonucleotide
  Sense strand starting at position 2577 of SEQ ID NO: 1241898
gccucuuaucgagcuuugu

SEQ ID NO: 1308317 - RNA, 19 nt, Artificial Sequence
  Description of Artificial Sequence: Synthetic oligonucleotide
  Antisense strand to SEQ ID NO: 1308316
acaaagcucgauaagaggc

SEQ ID NO: 1308318 - RNA, 19 nt, Artificial Sequence
  Description of Artificial Sequence: Synthetic oligonucleotide
  Sense strand starting at position 2596 of SEQ ID NO: 1241898
ggaccucagucacccauua

SEQ ID NO: 1308319 - RNA, 19 nt, Artificial Sequence
  Description of Artificial Sequence: Synthetic oligonucleotide
  Antisense strand to SEQ ID NO: 1308318
uaaugggugacugaggucc

SEQ ID NO: 1308320 - RNA, 19 nt, Artificial Sequence
  Description of Artificial Sequence: Synthetic oligonucleotide
  Sense strand starting at position 2727 of SEQ ID NO: 1241898
uuuguuuggagaggccaua

SEQ ID NO: 1308321 - RNA, 19 nt, Artificial Sequence
  Description of Artificial Sequence: Synthetic oligonucleotide
  Antisense strand to SEQ ID NO: 1308320
uauggccucuccaaacaaa

SEQ ID NO: 1308322 - RNA, 19 nt, Artificial Sequence
  Description of Artificial Sequence: Synthetic oligonucleotide
  Sense strand starting at position 2751 of SEQ ID NO: 1241898
acaagaugaugugucugaa

SEQ ID NO: 1308323 - RNA, 19 nt, Artificial Sequence
  Description of Artificial Sequence: Synthetic oligonucleotide
  Antisense strand to SEQ ID NO: 1308322
uucagacacaucaucuugu

SEQ ID NO: 1308324 - RNA, 19 nt, Artificial Sequence
  Description of Artificial Sequence: Synthetic oligonucleotide
  Sense strand starting at position 2754 of SEQ ID NO: 1241898
agaugaugugucugaaacc

SEQ ID NO: 1308325 - RNA, 19 nt, Artificial Sequence
  Description of Artificial Sequence: Synthetic oligonucleotide
  Antisense strand to SEQ ID NO: 1308324
gguuucagacacaucaucu

SEQ ID NO: 1308326 - RNA, 19 nt, Artificial Sequence
  Description of Artificial Sequence: Synthetic oligonucleotide
  Sense strand starting at position 2755 of SEQ ID NO: 1241898
gaugaugugucugaaacca

SEQ ID NO: 1308327 - RNA, 19 nt, Artificial Sequence
  Description of Artificial Sequence: Synthetic oligonucleotide
  Antisense strand to SEQ ID NO: 1308326
ugguuucagacacaucauc

SEQ ID NO: 1308328 - RNA, 19 nt, Artificial Sequence
  Description of Artificial Sequence: Synthetic oligonucleotide
  Sense strand starting at position 2790 of SEQ ID NO: 1241898
uacaguaauuacgcguuaa

SEQ ID NO: 1308329 - RNA, 19 nt, Artificial Sequence
  Description of Artificial Sequence: Synthetic oligonucleotide
  Antisense strand to SEQ ID NO: 1308328
uuaacgcguaauuacugua

SEQ ID NO: 1308330 - RNA, 19 nt, Artificial Sequence
  Description of Artificial Sequence: Synthetic oligonucleotide
  Sense strand starting at position 2791 of SEQ ID NO: 1241898
acaguaauuacgcguuaag

SEQ ID NO: 1308331 - RNA, 19 nt, Artificial Sequence
  Description of Artificial Sequence: Synthetic oligonucleotide
  Antisense strand to SEQ ID NO: 1308330
cuuaacgcguaauuacugu

SEQ ID NO: 1308332 - RNA, 19 nt, Artificial Sequence
  Description of Artificial Sequence: Synthetic oligonucleotide
  Sense strand starting at position 2794 of SEQ ID NO: 1241898
guaauuacgcguuaagcau

SEQ ID NO: 1308333 - RNA, 19 nt, Artificial Sequence
  Description of Artificial Sequence: Synthetic oligonucleotide
  Antisense strand to SEQ ID NO: 1308332
augcuuaacgcguaauuac

SEQ ID NO: 1308334 - RNA, 19 nt, Artificial Sequence
  Description of Artificial Sequence: Synthetic oligonucleotide
  Sense strand starting at position 2798 of SEQ ID NO: 1241898
uuacgcguuaagcaucaua

SEQ ID NO: 1308335 - RNA, 19 nt, Artificial Sequence
  Description of Artificial Sequence: Synthetic oligonucleotide
  Antisense strand to SEQ ID NO: 1308334
uaugaugcuuaacgcguaa

SEQ ID NO: 1308336 - RNA, 19 nt, Artificial Sequence
  Description of Artificial Sequence: Synthetic oligonucleotide
  Sense strand starting at position 2801 of SEQ ID NO: 1241898
cgcguuaagcaucauauaa

SEQ ID NO: 1308337 - RNA, 19 nt, Artificial Sequence
  Description of Artificial Sequence: Synthetic oligonucleotide
  Antisense strand to SEQ ID NO: 1308336
uuauaugaugcuuaacgcg

SEQ ID NO: 1308338 - RNA, 19 nt, Artificial Sequence
  Description of Artificial Sequence: Synthetic oligonucleotide
  Sense strand starting at position 2803 of SEQ ID NO: 1241898
cguuaagcaucauauaaca

SEQ ID NO: 1308339 - RNA, 19 nt, Artificial Sequence
  Description of Artificial Sequence: Synthetic oligonucleotide
  Antisense strand to SEQ ID NO: 1308338
uguuauaugaugcuuaacg

SEQ ID NO: 1308340 - RNA, 19 nt, Artificial Sequence
  Description of Artificial Sequence: Synthetic oligonucleotide
  Sense strand starting at position 3231 of SEQ ID NO: 1241898
ccaacauaugccgaaucuu

SEQ ID NO: 1308341 - RNA, 19 nt, Artificial Sequence
  Description of Artificial Sequence: Synthetic oligonucleotide
  Antisense strand to SEQ ID NO: 1308340
aagauucggcauauguugg

SEQ ID NO: 1308342 - RNA, 19 nt, Artificial Sequence
  Description of Artificial Sequence: Synthetic oligonucleotide
  Sense strand starting at position 2041 of SEQ ID NO: 1241899
gguuucgugcucuugggua

SEQ ID NO: 1308343 - RNA, 19 nt, Artificial Sequence
  Description of Artificial Sequence: Synthetic oligonucleotide
  Antisense strand to SEQ ID NO: 1308342
uacccaagagcacgaaacc

SEQ ID NO: 1308344 - RNA, 19 nt, Artificial Sequence
  Description of Artificial Sequence: Synthetic oligonucleotide
  Sense strand starting at position 2043 of SEQ ID NO: 1241899
uuucgugcucuuggguaau

SEQ ID NO: 1308345 - RNA, 19 nt, Artificial Sequence
  Description of Artificial Sequence: Synthetic oligonucleotide
  Antisense strand to SEQ ID NO: 1308344
auuacccaagagcacgaaa

SEQ ID NO: 1308346 - RNA, 19 nt, Artificial Sequence
  Description of Artificial Sequence: Synthetic oligonucleotide
  Sense strand starting at position 2176 of SEQ ID NO: 1241899
gcggcuuccuuucugauca

SEQ ID NO: 1308347 - RNA, 19 nt, Artificial Sequence
  Description of Artificial Sequence: Synthetic oligonucleotide
  Antisense strand to SEQ ID NO: 1308346
ugaucagaaaggaagccgc

SEQ ID NO: 1308348 - RNA, 19 nt, Artificial Sequence
  Description of Artificial Sequence: Synthetic oligonucleotide
  Sense strand starting at position 2178 of SEQ ID NO: 1241899
ggcuuccuuucugaucaca

SEQ ID NO: 1308349 - RNA, 19 nt, Artificial Sequence
  Description of Artificial Sequence: Synthetic oligonucleotide
  Antisense strand to SEQ ID NO: 1308348
ugugaucagaaaggaagcc

SEQ ID NO: 1308350 - RNA, 19 nt, Artificial Sequence
  Description of Artificial Sequence: Synthetic oligonucleotide
  Sense strand starting at position 2242 of SEQ ID NO: 1241899
cacagugucuggguaggaa

SEQ ID NO: 1308351 - RNA, 19 nt, Artificial Sequence
  Description of Artificial Sequence: Synthetic oligonucleotide
  Antisense strand to SEQ ID NO: 1308350
uuccuacccagacacugug

SEQ ID NO: 1308352 - RNA, 19 nt, Artificial Sequence
  Description of Artificial Sequence: Synthetic oligonucleotide
  Sense strand starting at position 2270 of SEQ ID NO: 1241899
gcgggugggaguuaauuga

SEQ ID NO: 1308353 - RNA, 19 nt, Artificial Sequence
  Description of Artificial Sequence: Synthetic oligonucleotide
  Antisense strand to SEQ ID NO: 1308352
ucaauuaacucccacccgc

SEQ ID NO: 1308354 - RNA, 19 nt, Artificial Sequence
  Description of Artificial Sequence: Synthetic oligonucleotide
  Sense strand starting at position 2391 of SEQ ID NO: 1241899
gggcagaggguguguuaau

SEQ ID NO: 1308355 - RNA, 19 nt, Artificial Sequence
  Description of Artificial Sequence: Synthetic oligonucleotide
  Antisense strand to SEQ ID NO: 1308354
auuaacacacccucugccc

SEQ ID NO: 1308356 - RNA, 19 nt, Artificial Sequence
  Description of Artificial Sequence: Synthetic oligonucleotide
  Sense strand starting at position 2392 of SEQ ID NO: 1241899
ggcagaggguguguuaaug

SEQ ID NO: 1308357 - RNA, 19 nt, Artificial Sequence
  Description of Artificial Sequence: Synthetic oligonucleotide
  Antisense strand to SEQ ID NO: 1308356
cauuaacacacccucugcc

SEQ ID NO: 1308358 - RNA, 19 nt, Artificial Sequence
  Description of Artificial Sequence: Synthetic oligonucleotide
  Sense strand starting at position 2723 of SEQ ID NO: 1241899
cagggaggcugccgugaau

SEQ ID NO: 1308359 - RNA, 19 nt, Artificial Sequence
  Description of Artificial Sequence: Synthetic oligonucleotide
  Antisense strand to SEQ ID NO: 1308358
auucacggcagccucccug

SEQ ID NO: 1308360 - RNA, 19 nt, Artificial Sequence
  Description of Artificial Sequence: Synthetic oligonucleotide
  Sense strand starting at position 2726 of SEQ ID NO: 1241899
ggaggcugccgugaauugu

SEQ ID NO: 1308361 - RNA, 19 nt, Artificial Sequence
  Description of Artificial Sequence: Synthetic oligonucleotide
  Antisense strand to SEQ ID NO: 1308360
acaauucacggcagccucc

SEQ ID NO: 1308362 - RNA, 19 nt, Artificial Sequence
  Description of Artificial Sequence: Synthetic oligonucleotide
  Sense strand starting at position 2734 of SEQ ID NO: 1241899
ccgugaauugucagccgug

SEQ ID NO: 1308363 - RNA, 19 nt, Artificial Sequence
  Description of Artificial Sequence: Synthetic oligonucleotide
  Antisense strand to SEQ ID NO: 1308362
cacggcugacaauucacgg

SEQ ID NO: 1308364 - RNA, 19 nt, Artificial Sequence
  Description of Artificial Sequence: Synthetic oligonucleotide
  Sense strand starting at position 2736 of SEQ ID NO: 1241899
gugaauugucagccgugcu

SEQ ID NO: 1308365 - RNA, 19 nt, Artificial Sequence
  Description of Artificial Sequence: Synthetic oligonucleotide
  Antisense strand to SEQ ID NO: 1308364
agcacggcugacaauucac

SEQ ID NO: 1308366 - RNA, 19 nt, Artificial Sequence
  Description of Artificial Sequence: Synthetic oligonucleotide
  Sense strand starting at position 2967 of SEQ ID NO: 1241899
ccugccuugcucugugaca

SEQ ID NO: 1308367 - RNA, 19 nt, Artificial Sequence
  Description of Artificial Sequence: Synthetic oligonucleotide
  Antisense strand to SEQ ID NO: 1308366
ugucacagagcaaggcagg

SEQ ID NO: 1308368 - RNA, 19 nt, Artificial Sequence
  Description of Artificial Sequence: Synthetic oligonucleotide
  Sense strand starting at position 3169 of SEQ ID NO: 1241899
agguuuaauucccaccgca

SEQ ID NO: 1308369 - RNA, 19 nt, Artificial Sequence
  Description of Artificial Sequence: Synthetic oligonucleotide
  Antisense strand to SEQ ID NO: 1308368
ugcggugggaauuaaaccu

SEQ ID NO: 1308370 - RNA, 19 nt, Artificial Sequence
  Description of Artificial Sequence: Synthetic oligonucleotide
  Sense strand starting at position 3263 of SEQ ID NO: 1241899
ucagaugguuguuuauuau

SEQ ID NO: 1308371 - RNA, 19 nt, Artificial Sequence
  Description of Artificial Sequence: Synthetic oligonucleotide
  Antisense strand to SEQ ID NO: 1308370
auaauaaacaaccaucuga

SEQ ID NO: 1308372 - RNA, 19 nt, Artificial Sequence
  Description of Artificial Sequence: Synthetic oligonucleotide
  Sense strand starting at position 3266 of SEQ ID NO: 1241899
gaugguuguuuauuauucu

SEQ ID NO: 1308373 - RNA, 19 nt, Artificial Sequence
  Description of Artificial Sequence: Synthetic oligonucleotide
  Antisense strand to SEQ ID NO: 1308372
agaauaauaaacaaccauc

SEQ ID NO: 1308374 - RNA, 19 nt, Artificial Sequence
  Description of Artificial Sequence: Synthetic oligonucleotide
  Sense strand starting at position 3619 of SEQ ID NO: 1241899
gcaggugauuccugagaaa

SEQ ID NO: 1308375 - RNA, 19 nt, Artificial Sequence
  Description of Artificial Sequence: Synthetic oligonucleotide
  Antisense strand to SEQ ID NO: 1308374
uuucucaggaaucaccugc

SEQ ID NO: 1308376 - RNA, 19 nt, Artificial Sequence
  Description of Artificial Sequence: Synthetic oligonucleotide
  Sense strand starting at position 3622 of SEQ ID NO: 1241899
ggugauuccugagaaacag

SEQ ID NO: 1308377 - RNA, 19 nt, Artificial Sequence
  Description of Artificial Sequence: Synthetic oligonucleotide
  Antisense strand to SEQ ID NO: 1308376
cuguuucucaggaaucacc

SEQ ID NO: 1308378 - RNA, 19 nt, Artificial Sequence
  Description of Artificial Sequence: Synthetic oligonucleotide
  Sense strand starting at position 3898 of SEQ ID NO: 1241899
agggcucagugcugucaga

SEQ ID NO: 1308379 - RNA, 19 nt, Artificial Sequence
  Description of Artificial Sequence: Synthetic oligonucleotide
  Antisense strand to SEQ ID NO: 1308378
ucugacagcacugagcccu

SEQ ID NO: 1308380 - RNA, 19 nt, Artificial Sequence
  Description of Artificial Sequence: Synthetic oligonucleotide
  Sense strand starting at position 3925 of SEQ ID NO: 1241899
acgagagccucgucaugau

SEQ ID NO: 1308381 - RNA, 19 nt, Artificial Sequence
  Description of Artificial Sequence: Synthetic oligonucleotide
  Antisense strand to SEQ ID NO: 1308380
aucaugacgaggcucucgu

SEQ ID NO: 1308382 - RNA, 19 nt, Artificial Sequence
  Description of Artificial Sequence: Synthetic oligonucleotide
  Sense strand starting at position 116 of SEQ ID NO: 1241900
cccagaguacugggccuua

SEQ ID NO: 1308383 - RNA, 19 nt, Artificial Sequence
  Description of Artificial Sequence: Synthetic oligonucleotide
  Antisense strand to SEQ ID NO: 1308382
uaaggcccaguacucuggg

SEQ ID NO: 1308384 - RNA, 19 nt, Artificial Sequence
  Description of Artificial Sequence: Synthetic oligonucleotide
  Sense strand starting at position 129 of SEQ ID NO: 1241900
gccuuaaaugcuggaauua

SEQ ID NO: 1308385 - RNA, 19 nt, Artificial Sequence
  Description of Artificial Sequence: Synthetic oligonucleotide
  Antisense strand to SEQ ID NO: 1308384
uaauuccagcauuuaaggc

SEQ ID NO: 1308386 - RNA, 19 nt, Artificial Sequence
  Description of Artificial Sequence: Synthetic oligonucleotide
  Sense strand starting at position 130 of SEQ ID NO: 1241900
ccuuaaaugcuggaauuau

SEQ ID NO: 1308387 - RNA, 19 nt, Artificial Sequence
  Description of Artificial Sequence: Synthetic oligonucleotide
  Antisense strand to SEQ ID NO: 1308386
auaauuccagcauuuaagg

SEQ ID NO: 1308388 - RNA, 19 nt, Artificial Sequence
  Description of Artificial Sequence: Synthetic oligonucleotide
  Sense strand starting at position 172 of SEQ ID NO: 1241900
ugagaacucuucuuguuau

SEQ ID NO: 1308389 - RNA, 19 nt, Artificial Sequence
  Description of Artificial Sequence: Synthetic oligonucleotide
  Antisense strand to SEQ ID NO: 1308388
auaacaagaagaguucuca

SEQ ID NO: 1308390 - RNA, 19 nt, Artificial Sequence
  Description of Artificial Sequence: Synthetic oligonucleotide
  Sense strand starting at position 202 of SEQ ID NO: 1241900
cuuuacuacugguucuaga

SEQ ID NO: 1308391 - RNA, 19 nt, Artificial Sequence
  Description of Artificial Sequence: Synthetic oligonucleotide
  Antisense strand to SEQ ID NO: 1308390
ucuagaaccaguaguaaag

SEQ ID NO: 1308392 - RNA, 19 nt, Artificial Sequence
  Description of Artificial Sequence: Synthetic oligonucleotide
  Sense strand starting at position 290 of SEQ ID NO: 1241900
cugauaaacuuuguuggca

SEQ ID NO: 1308393 - RNA, 19 nt, Artificial Sequence
  Description of Artificial Sequence: Synthetic oligonucleotide
  Antisense strand to SEQ ID NO: 1308392
ugccaacaaaguuuaucag

SEQ ID NO: 1308394 - RNA, 19 nt, Artificial Sequence
  Description of Artificial Sequence: Synthetic oligonucleotide
  Sense strand starting at position 291 of SEQ ID NO: 1241900
ugauaaacuuuguuggcau

SEQ ID NO: 1308395 - RNA, 19 nt, Artificial Sequence
  Description of Artificial Sequence: Synthetic oligonucleotide
  Antisense strand to SEQ ID NO: 1308394
augccaacaaaguuuauca

SEQ ID NO: 1308396 - RNA, 19 nt, Artificial Sequence
  Description of Artificial Sequence: Synthetic oligonucleotide
  Sense strand starting at position 293 of SEQ ID NO: 1241900
auaaacuuuguuggcauaa

SEQ ID NO: 1308397 - RNA, 19 nt, Artificial Sequence
  Description of Artificial Sequence: Synthetic oligonucleotide
  Antisense strand to SEQ ID NO: 1308396
uuaugccaacaaaguuuau

SEQ ID NO: 1308398 - RNA, 19 nt, Artificial Sequence
  Description of Artificial Sequence: Synthetic oligonucleotide
  Sense strand starting at position 407 of SEQ ID NO: 1241900
gguccauugcuuuauacuu

SEQ ID NO: 1308399 - RNA, 19 nt, Artificial Sequence
  Description of Artificial Sequence: Synthetic oligonucleotide
  Antisense strand to SEQ ID NO: 1308398
aaguauaaagcaauggacc

SEQ ID NO: 1308400 - RNA, 19 nt, Artificial Sequence
  Description of Artificial Sequence: Synthetic oligonucleotide
  Sense strand starting at position 666 of SEQ ID NO: 1241900
cugugaaaguggcuugaaa

SEQ ID NO: 1308401 - RNA, 19 nt, Artificial Sequence
  Description of Artificial Sequence: Synthetic oligonucleotide
  Antisense strand to SEQ ID NO: 1308400
uuucaagccacuuucacag

SEQ ID NO: 1308402 - RNA, 19 nt, Artificial Sequence
  Description of Artificial Sequence: Synthetic oligonucleotide
  Sense strand starting at position 673 of SEQ ID NO: 1241900
aguggcuugaaagguauaa

SEQ ID NO: 1308403 - RNA, 19 nt, Artificial Sequence
  Description of Artificial Sequence: Synthetic oligonucleotide
  Antisense strand to SEQ ID NO: 1308402
uuauaccuuucaagccacu

SEQ ID NO: 1308404 - RNA, 19 nt, Artificial Sequence
  Description of Artificial Sequence: Synthetic oligonucleotide
  Sense strand starting at position 769 of SEQ ID NO: 1241900
cgaaguccuuugguauaga

SEQ ID NO: 1308405 - RNA, 19 nt, Artificial Sequence
  Description of Artificial Sequence: Synthetic oligonucleotide
  Antisense strand to SEQ ID NO: 1308404
ucuauaccaaaggacuucg

SEQ ID NO: 1308406 - RNA, 19 nt, Artificial Sequence
  Description of Artificial Sequence: Synthetic oligonucleotide
  Sense strand starting at position 772 of SEQ ID NO: 1241900
aguccuuugguauagauac

SEQ ID NO: 1308407 - RNA, 19 nt, Artificial Sequence
  Description of Artificial Sequence: Synthetic oligonucleotide
  Antisense strand to SEQ ID NO: 1308406
guaucuauaccaaaggacu

SEQ ID NO: 1308408 - RNA, 19 nt, Artificial Sequence
  Description of Artificial Sequence: Synthetic oligonucleotide
  Sense strand starting at position 883 of SEQ ID NO: 1241900
acuguugauguugaauaua

SEQ ID NO: 1308409 - RNA, 19 nt, Artificial Sequence
  Description of Artificial Sequence: Synthetic oligonucleotide
  Antisense strand to SEQ ID NO: 1308408
uauauucaacaucaacagu

SEQ ID NO: 1308410 - RNA, 19 nt, Artificial Sequence
  Description of Artificial Sequence: Synthetic oligonucleotide
  Sense strand starting at position 886 of SEQ ID NO: 1241900
guugauguugaauauaguu

SEQ ID NO: 1308411 - RNA, 19 nt, Artificial Sequence
  Description of Artificial Sequence: Synthetic oligonucleotide
  Antisense strand to SEQ ID NO: 1308410
aacuauauucaacaucaac

SEQ ID NO: 1308412 - RNA, 19 nt, Artificial Sequence
  Description of Artificial Sequence: Synthetic oligonucleotide
  Sense strand starting at position 1072 of SEQ ID NO: 1241900
uuuauugcuucuguaaaga

SEQ ID NO: 1308413 - RNA, 19 nt, Artificial Sequence
  Description of Artificial Sequence: Synthetic oligonucleotide
  Antisense strand to SEQ ID NO: 1308412
ucuuuacagaagcaauaaa

SEQ ID NO: 1308414 - RNA, 19 nt, Artificial Sequence
  Description of Artificial Sequence: Synthetic oligonucleotide
  Sense strand starting at position 1077 of SEQ ID NO: 1241900
ugcuucuguaaagagugaa

SEQ ID NO: 1308415 - RNA, 19 nt, Artificial Sequence
  Description of Artificial Sequence: Synthetic oligonucleotide
  Antisense strand to SEQ ID NO: 1308414
uucacucuuuacagaagca

SEQ ID NO: 1308416 - RNA, 19 nt, Artificial Sequence
  Description of Artificial Sequence: Synthetic oligonucleotide
  Sense strand starting at position 1080 of SEQ ID NO: 1241900
uucuguaaagagugaauau

SEQ ID NO: 1308417 - RNA, 19 nt, Artificial Sequence
  Description of Artificial Sequence: Synthetic oligonucleotide
  Antisense strand to SEQ ID NO: 1308416
auauucacucuuuacagaa

SEQ ID NO: 1308418 - RNA, 19 nt, Artificial Sequence
  Description of Artificial Sequence: Synthetic oligonucleotide
  Sense strand starting at position 1512 of SEQ ID NO: 1241900
gcaacaguaggguaugaau

SEQ ID NO: 1308419 - RNA, 19 nt, Artificial Sequence
  Description of Artificial Sequence: Synthetic oligonucleotide
  Antisense strand to SEQ ID NO: 1308418
auucauacccuacuguugc

SEQ ID NO: 1308420 - RNA, 19 nt, Artificial Sequence
  Description of Artificial Sequence: Synthetic oligonucleotide
  Sense strand starting at position 1533 of SEQ ID NO: 1241900
auacaaucucgauggucuu

SEQ ID NO: 1308421 - RNA, 19 nt, Artificial Sequence
  Description of Artificial Sequence: Synthetic oligonucleotide
  Antisense strand to SEQ ID NO: 1308420
aagaccaucgagauuguau

SEQ ID NO: 1308422 - RNA, 19 nt, Artificial Sequence
  Description of Artificial Sequence: Synthetic oligonucleotide
  Sense strand starting at position 1565 of SEQ ID NO: 1241900
gcuauucggacuuaaggaa

SEQ ID NO: 1308423 - RNA, 19 nt, Artificial Sequence
  Description of Artificial Sequence: Synthetic oligonucleotide
  Antisense strand to SEQ ID NO: 1308422
uuccuuaaguccgaauagc

SEQ ID NO: 1308424 - RNA, 19 nt, Artificial Sequence
  Description of Artificial Sequence: Synthetic oligonucleotide
  Sense strand starting at position 2651 of SEQ ID NO: 1241900
gucggucuggacugaugaa

SEQ ID NO: 1308425 - RNA, 19 nt, Artificial Sequence
  Description of Artificial Sequence: Synthetic oligonucleotide
  Antisense strand to SEQ ID NO: 1308424
uucaucaguccagaccgac

SEQ ID NO: 1308426 - RNA, 19 nt, Artificial Sequence
  Description of Artificial Sequence: Synthetic oligonucleotide
  Sense strand starting at position 2652 of SEQ ID NO: 1241900
ucggucuggacugaugaaa

SEQ ID NO: 1308427 - RNA, 19 nt, Artificial Sequence
  Description of Artificial Sequence: Synthetic oligonucleotide
  Antisense strand to SEQ ID NO: 1308426
uuucaucaguccagaccga

SEQ ID NO: 1308428 - RNA, 19 nt, Artificial Sequence
  Description of Artificial Sequence: Synthetic oligonucleotide
  Sense strand starting at position 2685 of SEQ ID NO: 1241900
auguuaugugcgucacccu

SEQ ID NO: 1308429 - RNA, 19 nt, Artificial Sequence
  Description of Artificial Sequence: Synthetic oligonucleotide
  Antisense strand to SEQ ID NO: 1308428
agggugacgcacauaacau

SEQ ID NO: 1308430 - RNA, 19 nt, Artificial Sequence
  Description of Artificial Sequence: Synthetic oligonucleotide
  Sense strand starting at position 2747 of SEQ ID NO: 1241900
ccgugaugucaggaauaga

SEQ ID NO: 1308431 - RNA, 19 nt, Artificial Sequence
  Description of Artificial Sequence: Synthetic oligonucleotide
  Antisense strand to SEQ ID NO: 1308430
ucuauuccugacaucacgg

SEQ ID NO: 1308432 - RNA, 19 nt, Artificial Sequence
  Description of Artificial Sequence: Synthetic oligonucleotide
  Sense strand starting at position 2776 of SEQ ID NO: 1241900
auuaaauaaugcccggaga

SEQ ID NO: 1308433 - RNA, 19 nt, Artificial Sequence
  Description of Artificial Sequence: Synthetic oligonucleotide
  Antisense strand to SEQ ID NO: 1308432
ucuccgggcauuauuuaau

SEQ ID NO: 1308434 - RNA, 19 nt, Artificial Sequence
  Description of Artificial Sequence: Synthetic oligonucleotide
  Sense strand starting at position 2778 of SEQ ID NO: 1241900
uaaauaaugcccggagacu

SEQ ID NO: 1308435 - RNA, 19 nt, Artificial Sequence
  Description of Artificial Sequence: Synthetic oligonucleotide
  Antisense strand to SEQ ID NO: 1308434
agucuccgggcauuauuua

SEQ ID NO: 1308436 - RNA, 19 nt, Artificial Sequence
  Description of Artificial Sequence: Synthetic oligonucleotide
  Sense strand starting at position 2779 of SEQ ID NO: 1241900
aaauaaugcccggagacuu

SEQ ID NO: 1308437 - RNA, 19 nt, Artificial Sequence
  Description of Artificial Sequence: Synthetic oligonucleotide
  Antisense strand to SEQ ID NO: 1308436
aagucuccgggcauuauuu

SEQ ID NO: 1308438 - RNA, 19 nt, Artificial Sequence
  Description of Artificial Sequence: Synthetic oligonucleotide
  Sense strand starting at position 2812 of SEQ ID NO: 1241900
gccugaugaugaucaaaua

SEQ ID NO: 1308439 - RNA, 19 nt, Artificial Sequence
  Description of Artificial Sequence: Synthetic oligonucleotide
  Antisense strand to SEQ ID NO: 1308438
uauuugaucaucaucaggc

SEQ ID NO: 1308440 - RNA, 19 nt, Artificial Sequence
  Description of Artificial Sequence: Synthetic oligonucleotide
  Sense strand starting at position 2874 of SEQ ID NO: 1241900
uggucucccuaaucgauuu

SEQ ID NO: 1308441 - RNA, 19 nt, Artificial Sequence
  Description of Artificial Sequence: Synthetic oligonucleotide
  Antisense strand to SEQ ID NO: 1308440
aaaucgauuagggagacca

SEQ ID NO: 1308442 - RNA, 19 nt, Artificial Sequence
  Description of Artificial Sequence: Synthetic oligonucleotide
  Sense strand starting at position 3099 of SEQ ID NO: 1241900
acaggauagugcuugaaau

SEQ ID NO: 1308443 - RNA, 19 nt, Artificial Sequence
  Description of Artificial Sequence: Synthetic oligonucleotide
  Antisense strand to SEQ ID NO: 1308442
auuucaagcacuauccugu

SEQ ID NO: 1308444 - RNA, 19 nt, Artificial Sequence
  Description of Artificial Sequence: Synthetic oligonucleotide
  Sense strand starting at position 3100 of SEQ ID NO: 1241900
caggauagugcuugaaaua

SEQ ID NO: 1308445 - RNA, 19 nt, Artificial Sequence
  Description of Artificial Sequence: Synthetic oligonucleotide
  Antisense strand to SEQ ID NO: 1308444
uauuucaagcacuauccug

SEQ ID NO: 1308446 - RNA, 19 nt, Artificial Sequence
  Description of Artificial Sequence: Synthetic oligonucleotide
  Sense strand starting at position 3110 of SEQ ID NO: 1241900
cuugaaauaucgcuauuac

SEQ ID NO: 1308447 - RNA, 19 nt, Artificial Sequence
  Description of Artificial Sequence: Synthetic oligonucleotide
  Antisense strand to SEQ ID NO: 1308446
guaauagcgauauuucaag

SEQ ID NO: 1308448 - RNA, 19 nt, Artificial Sequence
  Description of Artificial Sequence: Synthetic oligonucleotide
  Sense strand starting at position 3111 of SEQ ID NO: 1241900
uugaaauaucgcuauuacu

SEQ ID NO: 1308449 - RNA, 19 nt, Artificial Sequence
  Description of Artificial Sequence: Synthetic oligonucleotide
  Antisense strand to SEQ ID NO: 1308448
aguaauagcgauauuucaa

SEQ ID NO: 1308450 - RNA, 19 nt, Artificial Sequence
  Description of Artificial Sequence: Synthetic oligonucleotide
  Sense strand starting at position 3191 of SEQ ID NO: 1241900
acacacauccagugugaau

SEQ ID NO: 1308451 - RNA, 19 nt, Artificial Sequence
  Description of Artificial Sequence: Synthetic oligonucleotide
  Antisense strand to SEQ ID NO: 1308450
auucacacuggaugugugu

SEQ ID NO: 1308452 - RNA, 19 nt, Artificial Sequence
  Description of Artificial Sequence: Synthetic oligonucleotide
  Sense strand starting at position 3200 of SEQ ID NO: 1241900
cagugugaaugguuuacuu

SEQ ID NO: 1308453 - RNA, 19 nt, Artificial Sequence
  Description of Artificial Sequence: Synthetic oligonucleotide
  Antisense strand to SEQ ID NO: 1308452
aaguaaaccauucacacug

SEQ ID NO: 1308454 - RNA, 19 nt, Artificial Sequence
  Description of Artificial Sequence: Synthetic oligonucleotide
  Sense strand starting at position 3253 of SEQ ID NO: 1241900
ggagauggugaggguauua

SEQ ID NO: 1308455 - RNA, 19 nt, Artificial Sequence
  Description of Artificial Sequence: Synthetic oligonucleotide
  Antisense strand to SEQ ID NO: 1308454
uaauacccucaccaucucc

SEQ ID NO: 1308456 - RNA, 19 nt, Artificial Sequence
  Description of Artificial Sequence: Synthetic oligonucleotide
  Sense strand starting at position 3672 of SEQ ID NO: 1241900
auuuaaaggugugggaaau

SEQ ID NO: 1308457 - RNA, 19 nt, Artificial Sequence
  Description of Artificial Sequence: Synthetic oligonucleotide
  Antisense strand to SEQ ID NO: 1308456
auuucccacaccuuuaaau

SEQ ID NO: 1308458 - RNA, 19 nt, Artificial Sequence
  Description of Artificial Sequence: Synthetic oligonucleotide
  Sense strand starting at position 3673 of SEQ ID NO: 1241900
uuuaaaggugugggaaaua

SEQ ID NO: 1308459 - RNA, 19 nt, Artificial Sequence
  Description of Artificial Sequence: Synthetic oligonucleotide
  Antisense strand to SEQ ID NO: 1308458
uauuucccacaccuuuaaa

SEQ ID NO: 1308460 - RNA, 19 nt, Artificial Sequence
  Description of Artificial Sequence: Synthetic oligonucleotide
  Sense strand starting at position 3684 of SEQ ID NO: 1241900
gggaaauacuccuucuuag

SEQ ID NO: 1308461 - RNA, 19 nt, Artificial Sequence
  Description of Artificial Sequence: Synthetic oligonucleotide
  Antisense strand to SEQ ID NO: 1308460
cuaagaaggaguauuuccc

SEQ ID NO: 1308462 - RNA, 19 nt, Artificial Sequence
  Description of Artificial Sequence: Synthetic oligonucleotide
  Sense strand starting at position 1492 of SEQ ID NO: 1241901
ccugccuuucccgaaacaa

SEQ ID NO: 1308463 - RNA, 19 nt, Artificial Sequence
  Description of Artificial Sequence: Synthetic oligonucleotide
  Antisense strand to SEQ ID NO: 1308462
uuguuucgggaaaggcagg

SEQ ID NO: 1308464 - RNA, 19 nt, Artificial Sequence
  Description of Artificial Sequence: Synthetic oligonucleotide
  Sense strand starting at position 1734 of SEQ ID NO: 1241901
gacucuuuggaccauagca

SEQ ID NO: 1308465 - RNA, 19 nt, Artificial Sequence
  Description of Artificial Sequence: Synthetic oligonucleotide
  Antisense strand to SEQ ID NO: 1308464
ugcuaugguccaaagaguc

SEQ ID NO: 1308466 - RNA, 19 nt, Artificial Sequence
  Description of Artificial Sequence: Synthetic oligonucleotide
  Sense strand starting at position 1757 of SEQ ID NO: 1241901
aguccucagcuagaauuaa

SEQ ID NO: 1308467 - RNA, 19 nt, Artificial Sequence
  Description of Artificial Sequence: Synthetic oligonucleotide
  Antisense strand to SEQ ID NO: 1308466
uuaauucuagcugaggacu

SEQ ID NO: 1308468 - RNA, 19 nt, Artificial Sequence
  Description of Artificial Sequence: Synthetic oligonucleotide
  Sense strand starting at position 1784 of SEQ ID NO: 1241901
uuauuccuuccgggaaacu

SEQ ID NO: 1308469 - RNA, 19 nt, Artificial Sequence
  Description of Artificial Sequence: Synthetic oligonucleotide
  Antisense strand to SEQ ID NO: 1308468
aguuucccggaaggaauaa

SEQ ID NO: 1308470 - RNA, 19 nt, Artificial Sequence
  Description of Artificial Sequence: Synthetic oligonucleotide
  Sense strand starting at position 2125 of SEQ ID NO: 1241901
uggauuugcugagcaaggu

SEQ ID NO: 1308471 - RNA, 19 nt, Artificial Sequence
  Description of Artificial Sequence: Synthetic oligonucleotide
  Antisense strand to SEQ ID NO: 1308470
accuugcucagcaaaucca

SEQ ID NO: 1308472 - RNA, 19 nt, Artificial Sequence
  Description of Artificial Sequence: Synthetic oligonucleotide
  Sense strand starting at position 2206 of SEQ ID NO: 1241901
acaaguuucuguuuccuca

SEQ ID NO: 1308473 - RNA, 19 nt, Artificial Sequence
  Description of Artificial Sequence: Synthetic oligonucleotide
  Antisense strand to SEQ ID NO: 1308472
ugaggaaacagaaacuugu

SEQ ID NO: 1308474 - RNA, 19 nt, Artificial Sequence
  Description of Artificial Sequence: Synthetic oligonucleotide
  Sense strand starting at position 2235 of SEQ ID NO: 1241901
gguauuaagucucuacuau

SEQ ID NO: 1308475 - RNA, 19 nt, Artificial Sequence
  Description of Artificial Sequence: Synthetic oligonucleotide
  Antisense strand to SEQ ID NO: 1308474
auaguagagacuuaauacc

SEQ ID NO: 1308476 - RNA, 19 nt, Artificial Sequence
  Description of Artificial Sequence: Synthetic oligonucleotide
  Sense strand starting at position 2236 of SEQ ID NO: 1241901
guauuaagucucuacuaua

SEQ ID NO: 1308477 - RNA, 19 nt, Artificial Sequence
  Description of Artificial Sequence: Synthetic oligonucleotide
  Antisense strand to SEQ ID NO: 1308476
uauaguagagacuuaauac

SEQ ID NO: 1308478 - RNA, 19 nt, Artificial Sequence
  Description of Artificial Sequence: Synthetic oligonucleotide
  Sense strand starting at position 2248 of SEQ ID NO: 1241901
uacuauaccgcagagucau

SEQ ID NO: 1308479 - RNA, 19 nt, Artificial Sequence
  Description of Artificial Sequence: Synthetic oligonucleotide
  Antisense strand to SEQ ID NO: 1308478
augacucugcgguauagua

SEQ ID NO: 1308480 - RNA, 19 nt, Artificial Sequence
  Description of Artificial Sequence: Synthetic oligonucleotide
  Sense strand starting at position 2273 of SEQ ID NO: 1241901
gaucgacgggcguaaugaa

SEQ ID NO: 1308481 - RNA, 19 nt, Artificial Sequence
  Description of Artificial Sequence: Synthetic oligonucleotide
  Antisense strand to SEQ ID NO: 1308480
uucauuacgcccgucgauc

SEQ ID NO: 1308482 - RNA, 19 nt, Artificial Sequence
  Description of Artificial Sequence: Synthetic oligonucleotide
  Sense strand starting at position 2285 of SEQ ID NO: 1241901
uaaugaaugugagcacgua

SEQ ID NO: 1308483 - RNA, 19 nt, Artificial Sequence
  Description of Artificial Sequence: Synthetic oligonucleotide
  Antisense strand to SEQ ID NO: 1308482
uacgugcucacauucauua

SEQ ID NO: 1308484 - RNA, 19 nt, Artificial Sequence
  Description of Artificial Sequence: Synthetic oligonucleotide
  Sense strand starting at position 2301 of SEQ ID NO: 1241901
guagaaguacucuacauuc

SEQ ID NO: 1308485 - RNA, 19 nt, Artificial Sequence
  Description of Artificial Sequence: Synthetic oligonucleotide
  Antisense strand to SEQ ID NO: 1308484
gaauguagaguacuucuac

SEQ ID NO: 1308486 - RNA, 19 nt, Artificial Sequence
  Description of Artificial Sequence: Synthetic oligonucleotide
  Sense strand starting at position 2497 of SEQ ID NO: 1241901
ucuugaucaggguggaguu

SEQ ID NO: 1308487 - RNA, 19 nt, Artificial Sequence
  Description of Artificial Sequence: Synthetic oligonucleotide
  Antisense strand to SEQ ID NO: 1308486
aacuccacccugaucaaga

SEQ ID NO: 1308488 - RNA, 19 nt, Artificial Sequence
  Description of Artificial Sequence: Synthetic oligonucleotide
  Sense strand starting at position 2498 of SEQ ID NO: 1241901
cuugaucaggguggaguua

SEQ ID NO: 1308489 - RNA, 19 nt, Artificial Sequence
  Description of Artificial Sequence: Synthetic oligonucleotide
  Antisense strand to SEQ ID NO: 1308488
uaacuccacccugaucaag

SEQ ID NO: 1308490 - RNA, 19 nt, Artificial Sequence
  Description of Artificial Sequence: Synthetic oligonucleotide
  Sense strand starting at position 2509 of SEQ ID NO: 1241901
uggaguuacagagguguau

SEQ ID NO: 1308491 - RNA, 19 nt, Artificial Sequence
  Description of Artificial Sequence: Synthetic oligonucleotide
  Antisense strand to SEQ ID NO: 1308490
auacaccucuguaacucca

SEQ ID NO: 1308492 - RNA, 19 nt, Artificial Sequence
  Description of Artificial Sequence: Synthetic oligonucleotide
  Sense strand starting at position 2513 of SEQ ID NO: 1241901
guuacagagguguauccau

SEQ ID NO: 1308493 - RNA, 19 nt, Artificial Sequence
  Description of Artificial Sequence: Synthetic oligonucleotide
  Antisense strand to SEQ ID NO: 1308492
auggauacaccucuguaac

SEQ ID NO: 1308494 - RNA, 19 nt, Artificial Sequence
  Description of Artificial Sequence: Synthetic oligonucleotide
  Sense strand starting at position 2562 of SEQ ID NO: 1241901
agauuagaguacuuuauug

SEQ ID NO: 1308495 - RNA, 19 nt, Artificial Sequence
  Description of Artificial Sequence: Synthetic oligonucleotide
  Antisense strand to SEQ ID NO: 1308494
caauaaaguacucuaaucu

SEQ ID NO: 1308496 - RNA, 19 nt, Artificial Sequence
  Description of Artificial Sequence: Synthetic oligonucleotide
  Sense strand starting at position 2566 of SEQ ID NO: 1241901
uagaguacuuuauuguaug

SEQ ID NO: 1308497 - RNA, 19 nt, Artificial Sequence
  Description of Artificial Sequence: Synthetic oligonucleotide
  Antisense strand to SEQ ID NO: 1308496
cauacaauaaaguacucua

SEQ ID NO: 1308498 - RNA, 19 nt, Artificial Sequence
  Description of Artificial Sequence: Synthetic oligonucleotide
  Sense strand starting at position 2678 of SEQ ID NO: 1241901
uuggaaucauccuuuggag

SEQ ID NO: 1308499 - RNA, 19 nt, Artificial Sequence
  Description of Artificial Sequence: Synthetic oligonucleotide
  Antisense strand to SEQ ID NO: 1308498
cuccaaaggaugauuccaa

SEQ ID NO: 1308500 - RNA, 19 nt, Artificial Sequence
  Description of Artificial Sequence: Synthetic oligonucleotide
  Sense strand starting at position 2802 of SEQ ID NO: 1241901
guuagcucaggcugaaaga

SEQ ID NO: 1308501 - RNA, 19 nt, Artificial Sequence
  Description of Artificial Sequence: Synthetic oligonucleotide
  Antisense strand to SEQ ID NO: 1308500
ucuuucagccugagcuaac

SEQ ID NO: 1308502 - RNA, 19 nt, Artificial Sequence
  Description of Artificial Sequence: Synthetic oligonucleotide
  Sense strand starting at position 2863 of SEQ ID NO: 1241901
cuaagauacugccuugcaa

SEQ ID NO: 1308503 - RNA, 19 nt, Artificial Sequence
  Description of Artificial Sequence: Synthetic oligonucleotide
  Antisense strand to SEQ ID NO: 1308502
uugcaaggcaguaucuuag

SEQ ID NO: 1308504 - RNA, 19 nt, Artificial Sequence
  Description of Artificial Sequence: Synthetic oligonucleotide
  Sense strand starting at position 2989 of SEQ ID NO: 1241901
cuagaugauuuacauauag

SEQ ID NO: 1308505 - RNA, 19 nt, Artificial Sequence
  Description of Artificial Sequence: Synthetic oligonucleotide
  Antisense strand to SEQ ID NO: 1308504
cuauauguaaaucaucuag

SEQ ID NO: 1308506 - RNA, 19 nt, Artificial Sequence
  Description of Artificial Sequence: Synthetic oligonucleotide
  Sense strand starting at position 2998 of SEQ ID NO: 1241901
uuacauauagucuguagaa

SEQ ID NO: 1308507 - RNA, 19 nt, Artificial Sequence
  Description of Artificial Sequence: Synthetic oligonucleotide
  Antisense strand to SEQ ID NO: 1308506
uucuacagacuauauguaa

SEQ ID NO: 1308508 - RNA, 19 nt, Artificial Sequence
  Description of Artificial Sequence: Synthetic oligonucleotide
  Sense strand starting at position 3000 of SEQ ID NO: 1241901
acauauagucuguagaacu

SEQ ID NO: 1308509 - RNA, 19 nt, Artificial Sequence
  Description of Artificial Sequence: Synthetic oligonucleotide
  Antisense strand to SEQ ID NO: 1308508
aguucuacagacuauaugu

SEQ ID NO: 1308510 - RNA, 19 nt, Artificial Sequence
  Description of Artificial Sequence: Synthetic oligonucleotide
  Sense strand starting at position 3033 of SEQ ID NO: 1241901
gcauauucggaucauccuu

SEQ ID NO: 1308511 - RNA, 19 nt, Artificial Sequence
  Description of Artificial Sequence: Synthetic oligonucleotide
  Antisense strand to SEQ ID NO: 1308510
aaggaugauccgaauaugc

SEQ ID NO: 1308512 - RNA, 19 nt, Artificial Sequence
  Description of Artificial Sequence: Synthetic oligonucleotide
  Sense strand starting at position 3142 of SEQ ID NO: 1241901
ggguauaaaugagcuguuu

SEQ ID NO: 1308513 - RNA, 19 nt, Artificial Sequence
  Description of Artificial Sequence: Synthetic oligonucleotide
  Antisense strand to SEQ ID NO: 1308512
aaacagcucauuuauaccc

SEQ ID NO: 1308514 - RNA, 19 nt, Artificial Sequence
  Description of Artificial Sequence: Synthetic oligonucleotide
  Sense strand starting at position 3194 of SEQ ID NO: 1241901
guaacaugguaagugcuaa

SEQ ID NO: 1308515 - RNA, 19 nt, Artificial Sequence
  Description of Artificial Sequence: Synthetic oligonucleotide
  Antisense strand to SEQ ID NO: 1308514
uuagcacuuaccauguuac

SEQ ID NO: 1308516 - RNA, 19 nt, Artificial Sequence
  Description of Artificial Sequence: Synthetic oligonucleotide
  Sense strand starting at position 3258 of SEQ ID NO: 1241901
aaaguauagugguuaagaa

SEQ ID NO: 1308517 - RNA, 19 nt, Artificial Sequence
  Description of Artificial Sequence: Synthetic oligonucleotide
  Antisense strand to SEQ ID NO: 1308516
uucuuaaccacuauacuuu

SEQ ID NO: 1308518 - RNA, 19 nt, Artificial Sequence
  Description of Artificial Sequence: Synthetic oligonucleotide
  Sense strand starting at position 3281 of SEQ ID NO: 1241901
gggucugaaauuggaucua

SEQ ID NO: 1308519 - RNA, 19 nt, Artificial Sequence
  Description of Artificial Sequence: Synthetic oligonucleotide
  Antisense strand to SEQ ID NO: 1308518
uagauccaauuucagaccc

SEQ ID NO: 1308520 - RNA, 19 nt, Artificial Sequence
  Description of Artificial Sequence: Synthetic oligonucleotide
  Sense strand starting at position 3300 of SEQ ID NO: 1241901
cuguuaaugccagaauggu

SEQ ID NO: 1308521 - RNA, 19 nt, Artificial Sequence
  Description of Artificial Sequence: Synthetic oligonucleotide
  Antisense strand to SEQ ID NO: 1308520
accauucuggcauuaacag

SEQ ID NO: 1308522 - RNA, 19 nt, Artificial Sequence
  Description of Artificial Sequence: Synthetic oligonucleotide
  Sense strand starting at position 3388 of SEQ ID NO: 1241901
aaccuauacgguuaucaug

SEQ ID NO: 1308523 - RNA, 19 nt, Artificial Sequence
  Description of Artificial Sequence: Synthetic oligonucleotide
  Antisense strand to SEQ ID NO: 1308522
caugauaaccguauagguu

SEQ ID NO: 1308524 - RNA, 19 nt, Artificial Sequence
  Description of Artificial Sequence: Synthetic oligonucleotide
  Sense strand starting at position 3394 of SEQ ID NO: 1241901
uacgguuaucaugaguaua

SEQ ID NO: 1308525 - RNA, 19 nt, Artificial Sequence
  Description of Artificial Sequence: Synthetic oligonucleotide
  Antisense strand to SEQ ID NO: 1308524
uauacucaugauaaccgua

SEQ ID NO: 1308526 - RNA, 19 nt, Artificial Sequence
  Description of Artificial Sequence: Synthetic oligonucleotide
  Sense strand starting at position 3396 of SEQ ID NO: 1241901
cgguuaucaugaguauaaa

SEQ ID NO: 1308527 - RNA, 19 nt, Artificial Sequence
  Description of Artificial Sequence: Synthetic oligonucleotide
  Antisense strand to SEQ ID NO: 1308526
uuuauacucaugauaaccg

SEQ ID NO: 1308528 - RNA, 19 nt, Artificial Sequence
  Description of Artificial Sequence: Synthetic oligonucleotide
  Sense strand starting at position 3439 of SEQ ID NO: 1241901
cagcauagggcaugacaua

SEQ ID NO: 1308529 - RNA, 19 nt, Artificial Sequence
  Description of Artificial Sequence: Synthetic oligonucleotide
  Antisense strand to SEQ ID NO: 1308528
uaugucaugcccuaugcug

SEQ ID NO: 1308530 - RNA, 19 nt, Artificial Sequence
  Description of Artificial Sequence: Synthetic oligonucleotide
  Sense strand starting at position 3455 of SEQ ID NO: 1241901
auacacaaugucggauaua

SEQ ID NO: 1308531 - RNA, 19 nt, Artificial Sequence
  Description of Artificial Sequence: Synthetic oligonucleotide
  Antisense strand to SEQ ID NO: 1308530
uauauccgacauuguguau

SEQ ID NO: 1308532 - RNA, 19 nt, Artificial Sequence
  Description of Artificial Sequence: Synthetic oligonucleotide
  Sense strand starting at position 3492 of SEQ ID NO: 1241901
agagcaaaugcucauuagu

SEQ ID NO: 1308533 - RNA, 19 nt, Artificial Sequence
  Description of Artificial Sequence: Synthetic oligonucleotide
  Antisense strand to SEQ ID NO: 1308532
acuaaugagcauuugcucu

SEQ ID NO: 1308534 - RNA, 19 nt, Artificial Sequence
  Description of Artificial Sequence: Synthetic oligonucleotide
  Sense strand starting at position 3548 of SEQ ID NO: 1241901
gguuccagccaucauguua

SEQ ID NO: 1308535 - RNA, 19 nt, Artificial Sequence
  Description of Artificial Sequence: Synthetic oligonucleotide
  Antisense strand to SEQ ID NO: 1308534
uaacaugauggcuggaacc

SEQ ID NO: 1308536 - RNA, 19 nt, Artificial Sequence
  Description of Artificial Sequence: Synthetic oligonucleotide
  Sense strand starting at position 3578 of SEQ ID NO: 1241901
acagguuggcuguacaaga

SEQ ID NO: 1308537 - RNA, 19 nt, Artificial Sequence
  Description of Artificial Sequence: Synthetic oligonucleotide
  Antisense strand to SEQ ID NO: 1308536
ucuuguacagccaaccugu

SEQ ID NO: 1308538 - RNA, 19 nt, Artificial Sequence
  Description of Artificial Sequence: Synthetic oligonucleotide
  Sense strand starting at position 3583 of SEQ ID NO: 1241901
uuggcuguacaagaucaua

SEQ ID NO: 1308539 - RNA, 19 nt, Artificial Sequence
  Description of Artificial Sequence: Synthetic oligonucleotide
  Antisense strand to SEQ ID NO: 1308538
uaugaucuuguacagccaa

SEQ ID NO: 1308540 - RNA, 19 nt, Artificial Sequence
  Description of Artificial Sequence: Synthetic oligonucleotide
  Sense strand starting at position 3653 of SEQ ID NO: 1241901
uugaauuccaucuggguga

SEQ ID NO: 1308541 - RNA, 19 nt, Artificial Sequence
  Description of Artificial Sequence: Synthetic oligonucleotide
  Antisense strand to SEQ ID NO: 1308540
ucacccagauggaauucaa

SEQ ID NO: 1308542 - RNA, 19 nt, Artificial Sequence
  Description of Artificial Sequence: Synthetic oligonucleotide
  Sense strand starting at position 143 of SEQ ID NO: 1241902
acaagugucucacucugau

SEQ ID NO: 1308543 - RNA, 19 nt, Artificial Sequence
  Description of Artificial Sequence: Synthetic oligonucleotide
  Antisense strand to SEQ ID NO: 1308542
aucagagugagacacuugu

SEQ ID NO: 1308544 - RNA, 19 nt, Artificial Sequence
  Description of Artificial Sequence: Synthetic oligonucleotide
  Sense strand starting at position 188 of SEQ ID NO: 1241902
ggauauuaccuaugccgca

SEQ ID NO: 1308545 - RNA, 19 nt, Artificial Sequence
  Description of Artificial Sequence: Synthetic oligonucleotide
  Antisense strand to SEQ ID NO: 1308544
ugcggcauagguaauaucc

SEQ ID NO: 1308546 - RNA, 19 nt, Artificial Sequence
  Description of Artificial Sequence: Synthetic oligonucleotide
  Sense strand starting at position 193 of SEQ ID NO: 1241902
uuaccuaugccgcaucaau

SEQ ID NO: 1308547 - RNA, 19 nt, Artificial Sequence
  Description of Artificial Sequence: Synthetic oligonucleotide
  Antisense strand to SEQ ID NO: 1308546
auugaugcggcauagguaa

SEQ ID NO: 1308548 - RNA, 19 nt, Artificial Sequence
  Description of Artificial Sequence: Synthetic oligonucleotide
  Sense strand starting at position 201 of SEQ ID NO: 1241902
gccgcaucaauauguaaag

SEQ ID NO: 1308549 - RNA, 19 nt, Artificial Sequence
  Description of Artificial Sequence: Synthetic oligonucleotide
  Antisense strand to SEQ ID NO: 1308548
cuuuacauauugaugcggc

SEQ ID NO: 1308550 - RNA, 19 nt, Artificial Sequence
  Description of Artificial Sequence: Synthetic oligonucleotide
  Sense strand starting at position 212 of SEQ ID NO: 1241902
auguaaagcuguguauaug

SEQ ID NO: 1308551 - RNA, 19 nt, Artificial Sequence
  Description of Artificial Sequence: Synthetic oligonucleotide
  Antisense strand to SEQ ID NO: 1308550
cauauacacagcuuuacau

SEQ ID NO: 1308552 - RNA, 19 nt, Artificial Sequence
  Description of Artificial Sequence: Synthetic oligonucleotide
  Sense strand starting at position 213 of SEQ ID NO: 1241902
uguaaagcuguguauauga

SEQ ID NO: 1308553 - RNA, 19 nt, Artificial Sequence
  Description of Artificial Sequence: Synthetic oligonucleotide
  Antisense strand to SEQ ID NO: 1308552
ucauauacacagcuuuaca

SEQ ID NO: 1308554 - RNA, 19 nt, Artificial Sequence
  Description of Artificial Sequence: Synthetic oligonucleotide
  Sense strand starting at position 242 of SEQ ID NO: 1241902
ugggcaugacucugaauga

SEQ ID NO: 1308555 - RNA, 19 nt, Artificial Sequence
  Description of Artificial Sequence: Synthetic oligonucleotide
  Antisense strand to SEQ ID NO: 1308554
ucauucagagucaugccca

SEQ ID NO: 1308556 - RNA, 19 nt, Artificial Sequence
  Description of Artificial Sequence: Synthetic oligonucleotide
  Sense strand starting at position 462 of SEQ ID NO: 1241902
gacgaugacaaauguggau

SEQ ID NO: 1308557 - RNA, 19 nt, Artificial Sequence
  Description of Artificial Sequence: Synthetic oligonucleotide
  Antisense strand to SEQ ID NO: 1308556
auccacauuugucaucguc

SEQ ID NO: 1308558 - RNA, 19 nt, Artificial Sequence
  Description of Artificial Sequence: Synthetic oligonucleotide
  Sense strand starting at position 2305 of SEQ ID NO: 1241902
guuucuggcuucuuggaga

SEQ ID NO: 1308559 - RNA, 19 nt, Artificial Sequence
  Description of Artificial Sequence: Synthetic oligonucleotide
  Antisense strand to SEQ ID NO: 1308558
ucuccaagaagccagaaac

SEQ ID NO: 1308560 - RNA, 19 nt, Artificial Sequence
  Description of Artificial Sequence: Synthetic oligonucleotide
  Sense strand starting at position 2353 of SEQ ID NO: 1241902
uaauuuggcuaggagauaa

SEQ ID NO: 1308561 - RNA, 19 nt, Artificial Sequence
  Description of Artificial Sequence: Synthetic oligonucleotide
  Antisense strand to SEQ ID NO: 1308560
uuaucuccuagccaaauua

SEQ ID NO: 1308562 - RNA, 19 nt, Artificial Sequence
  Description of Artificial Sequence: Synthetic oligonucleotide
  Sense strand starting at position 2365 of SEQ ID NO: 1241902
gagauaaaccgucacucac

SEQ ID NO: 1308563 - RNA, 19 nt, Artificial Sequence
  Description of Artificial Sequence: Synthetic oligonucleotide
  Antisense strand to SEQ ID NO: 1308562
gugagugacgguuuaucuc

SEQ ID NO: 1308564 - RNA, 19 nt, Artificial Sequence
  Description of Artificial Sequence: Synthetic oligonucleotide
  Sense strand starting at position 2387 of SEQ ID NO: 1241902
gcauguaaccuggacguga

SEQ ID NO: 1308565 - RNA, 19 nt, Artificial Sequence
  Description of Artificial Sequence: Synthetic oligonucleotide
  Antisense strand to SEQ ID NO: 1308564
ucacguccagguuacaugc

SEQ ID NO: 1308566 - RNA, 19 nt, Artificial Sequence
  Description of Artificial Sequence: Synthetic oligonucleotide
  Sense strand starting at position 2454 of SEQ ID NO: 1241902
cgugcagaccaauaugguu

SEQ ID NO: 1308567 - RNA, 19 nt, Artificial Sequence
  Description of Artificial Sequence: Synthetic oligonucleotide
  Antisense strand to SEQ ID NO: 1308566
aaccauauuggucugcacg

SEQ ID NO: 1308568 - RNA, 19 nt, Artificial Sequence
  Description of Artificial Sequence: Synthetic oligonucleotide
  Sense strand starting at position 2462 of SEQ ID NO: 1241902
ccaauaugguuuccaguua

SEQ ID NO: 1308569 - RNA, 19 nt, Artificial Sequence
  Description of Artificial Sequence: Synthetic oligonucleotide
  Antisense strand to SEQ ID NO: 1308568
uaacuggaaaccauauugg

SEQ ID NO: 1308570 - RNA, 19 nt, Artificial Sequence
  Description of Artificial Sequence: Synthetic oligonucleotide
  Sense strand starting at position 2559 of SEQ ID NO: 1241902
gcccuaaguacuggugaag

SEQ ID NO: 1308571 - RNA, 19 nt, Artificial Sequence
  Description of Artificial Sequence: Synthetic oligonucleotide
  Antisense strand to SEQ ID NO: 1308570
cuucaccaguacuuagggc

SEQ ID NO: 1308572 - RNA, 19 nt, Artificial Sequence
  Description of Artificial Sequence: Synthetic oligonucleotide
  Sense strand starting at position 2568 of SEQ ID NO: 1241902
acuggugaaguggguaaau

SEQ ID NO: 1308573 - RNA, 19 nt, Artificial Sequence
  Description of Artificial Sequence: Synthetic oligonucleotide
  Antisense strand to SEQ ID NO: 1308572
auuuacccacuucaccagu

SEQ ID NO: 1308574 - RNA, 19 nt, Artificial Sequence
  Description of Artificial Sequence: Synthetic oligonucleotide
  Sense strand starting at position 2570 of SEQ ID NO: 1241902
uggugaaguggguaaauua

SEQ ID NO: 1308575 - RNA, 19 nt, Artificial Sequence
  Description of Artificial Sequence: Synthetic oligonucleotide
  Antisense strand to SEQ ID NO: 1308574
uaauuuacccacuucacca

SEQ ID NO: 1308576 - RNA, 19 nt, Artificial Sequence
  Description of Artificial Sequence: Synthetic oligonucleotide
  Sense strand starting at position 2578 of SEQ ID NO: 1241902
uggguaaauuaaucguuga

SEQ ID NO: 1308577 - RNA, 19 nt, Artificial Sequence
  Description of Artificial Sequence: Synthetic oligonucleotide
  Antisense strand to SEQ ID NO: 1308576
ucaacgauuaauuuaccca

SEQ ID NO: 1308578 - RNA, 19 nt, Artificial Sequence
  Description of Artificial Sequence: Synthetic oligonucleotide
  Sense strand starting at position 2579 of SEQ ID NO: 1241902
ggguaaauuaaucguugag

SEQ ID NO: 1308579 - RNA, 19 nt, Artificial Sequence
  Description of Artificial Sequence: Synthetic oligonucleotide
  Antisense strand to SEQ ID NO: 1308578
cucaacgauuaauuuaccc

SEQ ID NO: 1308580 - RNA, 19 nt, Artificial Sequence
  Description of Artificial Sequence: Synthetic oligonucleotide
  Sense strand starting at position 2581 of SEQ ID NO: 1241902
guaaauuaaucguugagaa

SEQ ID NO: 1308581 - RNA, 19 nt, Artificial Sequence
  Description of Artificial Sequence: Synthetic oligonucleotide
  Antisense strand to SEQ ID NO: 1308580
uucucaacgauuaauuuac

SEQ ID NO: 1308582 - RNA, 19 nt, Artificial Sequence
  Description of Artificial Sequence: Synthetic oligonucleotide
  Sense strand starting at position 2640 of SEQ ID NO: 1241902
ggagaaagccucugaaugg

SEQ ID NO: 1308583 - RNA, 19 nt, Artificial Sequence
  Description of Artificial Sequence: Synthetic oligonucleotide
  Antisense strand to SEQ ID NO: 1308582
ccauucagaggcuuucucc

SEQ ID NO: 1308584 - RNA, 19 nt, Artificial Sequence
  Description of Artificial Sequence: Synthetic oligonucleotide
  Sense strand starting at position 2670 of SEQ ID NO: 1241902
gccugucaucuugauaguu

SEQ ID NO: 1308585 - RNA, 19 nt, Artificial Sequence
  Description of Artificial Sequence: Synthetic oligonucleotide
  Antisense strand to SEQ ID NO: 1308584
aacuaucaagaugacaggc

SEQ ID NO: 1308586 - RNA, 19 nt, Artificial Sequence
  Description of Artificial Sequence: Synthetic oligonucleotide
  Sense strand starting at position 2956 of SEQ ID NO: 1241902
ugaugcuuccugugaucug

SEQ ID NO: 1308587 - RNA, 19 nt, Artificial Sequence
  Description of Artificial Sequence: Synthetic oligonucleotide
  Antisense strand to SEQ ID NO: 1308586
cagaucacaggaagcauca

SEQ ID NO: 1308588 - RNA, 19 nt, Artificial Sequence
  Description of Artificial Sequence: Synthetic oligonucleotide
  Sense strand starting at position 2959 of SEQ ID NO: 1241902
ugcuuccugugaucugaaa

SEQ ID NO: 1308589 - RNA, 19 nt, Artificial Sequence
  Description of Artificial Sequence: Synthetic oligonucleotide
  Antisense strand to SEQ ID NO: 1308588
uuucagaucacaggaagca

SEQ ID NO: 1308590 - RNA, 19 nt, Artificial Sequence
  Description of Artificial Sequence: Synthetic oligonucleotide
  Sense strand starting at position 3154 of SEQ ID NO: 1241902
ucgcaugcugcuuuggaau

SEQ ID NO: 1308591 - RNA, 19 nt, Artificial Sequence
  Description of Artificial Sequence: Synthetic oligonucleotide
  Antisense strand to SEQ ID NO: 1308590
auuccaaagcagcaugcga

SEQ ID NO: 1308592 - RNA, 19 nt, Artificial Sequence
  Description of Artificial Sequence: Synthetic oligonucleotide
  Sense strand starting at position 3329 of SEQ ID NO: 1241902
uugccuuauccaggcuaca

SEQ ID NO: 1308593 - RNA, 19 nt, Artificial Sequence
  Description of Artificial Sequence: Synthetic oligonucleotide
  Antisense strand to SEQ ID NO: 1308592
uguagccuggauaaggcaa

SEQ ID NO: 1308594 - RNA, 19 nt, Artificial Sequence
  Description of Artificial Sequence: Synthetic oligonucleotide
  Sense strand starting at position 3357 of SEQ ID NO: 1241902
gucuuauucgucucuacgu

SEQ ID NO: 1308595 - RNA, 19 nt, Artificial Sequence
  Description of Artificial Sequence: Synthetic oligonucleotide
  Antisense strand to SEQ ID NO: 1308594
acguagagacgaauaagac

SEQ ID NO: 1308596 - RNA, 19 nt, Artificial Sequence
  Description of Artificial Sequence: Synthetic oligonucleotide
  Sense strand starting at position 3359 of SEQ ID NO: 1241902
cuuauucgucucuacguaa

SEQ ID NO: 1308597 - RNA, 19 nt, Artificial Sequence
  Description of Artificial Sequence: Synthetic oligonucleotide
  Antisense strand to SEQ ID NO: 1308596
uuacguagagacgaauaag

SEQ ID NO: 1308598 - RNA, 19 nt, Artificial Sequence
  Description of Artificial Sequence: Synthetic oligonucleotide
  Sense strand starting at position 3452 of SEQ ID NO: 1241902
uacugaucugcaggucuua

SEQ ID NO: 1308599 - RNA, 19 nt, Artificial Sequence
  Description of Artificial Sequence: Synthetic oligonucleotide
  Antisense strand to SEQ ID NO: 1308598
uaagaccugcagaucagua

SEQ ID NO: 1308600 - RNA, 19 nt, Artificial Sequence
  Description of Artificial Sequence: Synthetic oligonucleotide
  Sense strand starting at position 3491 of SEQ ID NO: 1241902
ccacauaucucucuacgua

SEQ ID NO: 1308601 - RNA, 19 nt, Artificial Sequence
  Description of Artificial Sequence: Synthetic oligonucleotide
  Antisense strand to SEQ ID NO: 1308600
uacguagagagauaugugg

SEQ ID NO: 1308602 - RNA, 19 nt, Artificial Sequence
  Description of Artificial Sequence: Synthetic oligonucleotide
  Sense strand starting at position 3553 of SEQ ID NO: 1241902
uucuguuucccagaugaga

SEQ ID NO: 1308603 - RNA, 19 nt, Artificial Sequence
  Description of Artificial Sequence: Synthetic oligonucleotide
  Antisense strand to SEQ ID NO: 1308602
ucucaucugggaaacagaa

SEQ ID NO: 1308604 - RNA, 19 nt, Artificial Sequence
  Description of Artificial Sequence: Synthetic oligonucleotide
  Sense strand starting at position 3578 of SEQ ID NO: 1241902
gggacuugucuagggucau

SEQ ID NO: 1308605 - RNA, 19 nt, Artificial Sequence
  Description of Artificial Sequence: Synthetic oligonucleotide
  Antisense strand to SEQ ID NO: 1308604
augacccuagacaaguccc

SEQ ID NO: 1308606 - RNA, 19 nt, Artificial Sequence
  Description of Artificial Sequence: Synthetic oligonucleotide
  Sense strand starting at position 3736 of SEQ ID NO: 1241902
cagagucuacugugugauu

SEQ ID NO: 1308607 - RNA, 19 nt, Artificial Sequence
  Description of Artificial Sequence: Synthetic oligonucleotide
  Antisense strand to SEQ ID NO: 1308606
aaucacacaguagacucug

SEQ ID NO: 1308608 - RNA, 19 nt, Artificial Sequence
  Description of Artificial Sequence: Synthetic oligonucleotide
  Sense strand starting at position 3738 of SEQ ID NO: 1241902
gagucuacugugugauuug

SEQ ID NO: 1308609 - RNA, 19 nt, Artificial Sequence
  Description of Artificial Sequence: Synthetic oligonucleotide
  Antisense strand to SEQ ID NO: 1308608
caaaucacacaguagacuc

SEQ ID NO: 1308610 - RNA, 19 nt, Artificial Sequence
  Description of Artificial Sequence: Synthetic oligonucleotide
  Sense strand starting at position 3741 of SEQ ID NO: 1241902
ucuacugugugauuuguau

SEQ ID NO: 1308611 - RNA, 19 nt, Artificial Sequence
  Description of Artificial Sequence: Synthetic oligonucleotide
  Antisense strand to SEQ ID NO: 1308610
auacaaaucacacaguaga

SEQ ID NO: 1308612 - RNA, 19 nt, Artificial Sequence
  Description of Artificial Sequence: Synthetic oligonucleotide
  Sense strand starting at position 3750 of SEQ ID NO: 1241902
ugauuuguaucgcccuuua

SEQ ID NO: 1308613 - RNA, 19 nt, Artificial Sequence
  Description of Artificial Sequence: Synthetic oligonucleotide
  Antisense strand to SEQ ID NO: 1308612
uaaagggcgauacaaauca

SEQ ID NO: 1308614 - RNA, 19 nt, Artificial Sequence
  Description of Artificial Sequence: Synthetic oligonucleotide
  Sense strand starting at position 3800 of SEQ ID NO: 1241902
gucuacuguuaaguaguau

SEQ ID NO: 1308615 - RNA, 19 nt, Artificial Sequence
  Description of Artificial Sequence: Synthetic oligonucleotide
  Antisense strand to SEQ ID NO: 1308614
auacuacuuaacaguagac

SEQ ID NO: 1308616 - RNA, 19 nt, Artificial Sequence
  Description of Artificial Sequence: Synthetic oligonucleotide
  Sense strand starting at position 3822 of SEQ ID NO: 1241902
ccacuauacuugcuuugga

SEQ ID NO: 1308617 - RNA, 19 nt, Artificial Sequence
  Description of Artificial Sequence: Synthetic oligonucleotide
  Antisense strand to SEQ ID NO: 1308616
uccaaagcaaguauagugg

SEQ ID NO: 1308618 - RNA, 19 nt, Artificial Sequence
  Description of Artificial Sequence: Synthetic oligonucleotide
  Sense strand starting at position 3825 of SEQ ID NO: 1241902
cuauacuugcuuuggaaua

SEQ ID NO: 1308619 - RNA, 19 nt, Artificial Sequence
  Description of Artificial Sequence: Synthetic oligonucleotide
  Antisense strand to SEQ ID NO: 1308618
uauuccaaagcaaguauag

SEQ ID NO: 1308620 - RNA, 19 nt, Artificial Sequence
  Description of Artificial Sequence: Synthetic oligonucleotide
  Sense strand starting at position 3886 of SEQ ID NO: 1241902
guuucucugggcuaauaau

SEQ ID NO: 1308621 - RNA, 19 nt, Artificial Sequence
  Description of Artificial Sequence: Synthetic oligonucleotide
  Antisense strand to SEQ ID NO: 1308620
auuauuagcccagagaaac

SEQ ID NO: 1308622 - RNA, 19 nt, Artificial Sequence
  Description of Artificial Sequence: Synthetic oligonucleotide
  Sense strand starting at position 360 of SEQ ID NO: 1241903
gggaaacuuuggucucagu

SEQ ID NO: 1308623 - RNA, 19 nt, Artificial Sequence
  Description of Artificial Sequence: Synthetic oligonucleotide
  Antisense strand to SEQ ID NO: 1308622
acugagaccaaaguuuccc

SEQ ID NO: 1308624 - RNA, 19 nt, Artificial Sequence
  Description of Artificial Sequence: Synthetic oligonucleotide
  Sense strand starting at position 373 of SEQ ID NO: 1241903
cucagugcagcuuucguaa

SEQ ID NO: 1308625 - RNA, 19 nt, Artificial Sequence
  Description of Artificial Sequence: Synthetic oligonucleotide
  Antisense strand to SEQ ID NO: 1308624
uuacgaaagcugcacugag

SEQ ID NO: 1308626 - RNA, 19 nt, Artificial Sequence
  Description of Artificial Sequence: Synthetic oligonucleotide
  Sense strand starting at position 462 of SEQ ID NO: 1241903
cuguuacaucgcuucuguu

SEQ ID NO: 1308627 - RNA, 19 nt, Artificial Sequence
  Description of Artificial Sequence: Synthetic oligonucleotide
  Antisense strand to SEQ ID NO: 1308626
aacagaagcgauguaacag

SEQ ID NO: 1308628 - RNA, 19 nt, Artificial Sequence
  Description of Artificial Sequence: Synthetic oligonucleotide
  Sense strand starting at position 463 of SEQ ID NO: 1241903
uguuacaucgcuucuguuu

SEQ ID NO: 1308629 - RNA, 19 nt, Artificial Sequence
  Description of Artificial Sequence: Synthetic oligonucleotide
  Antisense strand to SEQ ID NO: 1308628
aaacagaagcgauguaaca

SEQ ID NO: 1308630 - RNA, 19 nt, Artificial Sequence
  Description of Artificial Sequence: Synthetic oligonucleotide
  Sense strand starting at position 476 of SEQ ID NO: 1241903
cuguuucucccugaccaga

SEQ ID NO: 1308631 - RNA, 19 nt, Artificial Sequence
  Description of Artificial Sequence: Synthetic oligonucleotide
  Antisense strand to SEQ ID NO: 1308630
ucuggucagggagaaacag

SEQ ID NO: 1308632 - RNA, 19 nt, Artificial Sequence
  Description of Artificial Sequence: Synthetic oligonucleotide
  Sense strand starting at position 523 of SEQ ID NO: 1241903
ccagcuaguugacuggaau

SEQ ID NO: 1308633 - RNA, 19 nt, Artificial Sequence
  Description of Artificial Sequence: Synthetic oligonucleotide
  Antisense strand to SEQ ID NO: 1308632
auuccagucaacuagcugg

SEQ ID NO: 1308634 - RNA, 19 nt, Artificial Sequence
  Description of Artificial Sequence: Synthetic oligonucleotide
  Sense strand starting at position 524 of SEQ ID NO: 1241903
cagcuaguugacuggaauu

SEQ ID NO: 1308635 - RNA, 19 nt, Artificial Sequence
  Description of Artificial Sequence: Synthetic oligonucleotide
  Antisense strand to SEQ ID NO: 1308634
aauuccagucaacuagcug

SEQ ID NO: 1308636 - RNA, 19 nt, Artificial Sequence
  Description of Artificial Sequence: Synthetic oligonucleotide
  Sense strand starting at position 548 of SEQ ID NO: 1241903
aagaguuauccacagccug

SEQ ID NO: 1308637 - RNA, 19 nt, Artificial Sequence
  Description of Artificial Sequence: Synthetic oligonucleotide
  Antisense strand to SEQ ID NO: 1308636
caggcuguggauaacucuu

SEQ ID NO: 1308638 - RNA, 19 nt, Artificial Sequence
  Description of Artificial Sequence: Synthetic oligonucleotide
  Sense strand starting at position 659 of SEQ ID NO: 1241903
cugccucgccaggaagaau

SEQ ID NO: 1308639 - RNA, 19 nt, Artificial Sequence
  Description of Artificial Sequence: Synthetic oligonucleotide
  Antisense strand to SEQ ID NO: 1308638
auucuuccuggcgaggcag

SEQ ID NO: 1308640 - RNA, 19 nt, Artificial Sequence
  Description of Artificial Sequence: Synthetic oligonucleotide
  Sense strand starting at position 993 of SEQ ID NO: 1241903
uagagcccuccuggagaaa

SEQ ID NO: 1308641 - RNA, 19 nt, Artificial Sequence
  Description of Artificial Sequence: Synthetic oligonucleotide
  Antisense strand to SEQ ID NO: 1308640
uuucuccaggagggcucua

SEQ ID NO: 1308642 - RNA, 19 nt, Artificial Sequence
  Description of Artificial Sequence: Synthetic oligonucleotide
  Sense strand starting at position 1020 of SEQ ID NO: 1241903
uuaagaaugggaugcauca

SEQ ID NO: 1308643 - RNA, 19 nt, Artificial Sequence
  Description of Artificial Sequence: Synthetic oligonucleotide
  Antisense strand to SEQ ID NO: 1308642
ugaugcaucccauucuuaa

SEQ ID NO: 1308644 - RNA, 19 nt, Artificial Sequence
  Description of Artificial Sequence: Synthetic oligonucleotide
  Sense strand starting at position 1033 of SEQ ID NO: 1241903
gcaucaucccuuugacuug

SEQ ID NO: 1308645 - RNA, 19 nt, Artificial Sequence
  Description of Artificial Sequence: Synthetic oligonucleotide
  Antisense strand to SEQ ID NO: 1308644
caagucaaagggaugaugc

SEQ ID NO: 1308646 - RNA, 19 nt, Artificial Sequence
  Description of Artificial Sequence: Synthetic oligonucleotide
  Sense strand starting at position 1042 of SEQ ID NO: 1241903
cuuugacuuguagguaaga

SEQ ID NO: 1308647 - RNA, 19 nt, Artificial Sequence
  Description of Artificial Sequence: Synthetic oligonucleotide
  Antisense strand to SEQ ID NO: 1308646
ucuuaccuacaagucaaag

SEQ ID NO: 1308648 - RNA, 19 nt, Artificial Sequence
  Description of Artificial Sequence: Synthetic oligonucleotide
  Sense strand starting at position 1044 of SEQ ID NO: 1241903
uugacuuguagguaagacu

SEQ ID NO: 1308649 - RNA, 19 nt, Artificial Sequence
  Description of Artificial Sequence: Synthetic oligonucleotide
  Antisense strand to SEQ ID NO: 1308648
agucuuaccuacaagucaa

SEQ ID NO: 1308650 - RNA, 19 nt, Artificial Sequence
  Description of Artificial Sequence: Synthetic oligonucleotide
  Sense strand starting at position 1051 of SEQ ID NO: 1241903
guagguaagacuuaauggu

SEQ ID NO: 1308651 - RNA, 19 nt, Artificial Sequence
  Description of Artificial Sequence: Synthetic oligonucleotide
  Antisense strand to SEQ ID NO: 1308650
accauuaagucuuaccuac

SEQ ID NO: 1308652 - RNA, 19 nt, Artificial Sequence
  Description of Artificial Sequence: Synthetic oligonucleotide
  Sense strand starting at position 1055 of SEQ ID NO: 1241903
guaagacuuaaugguaaag

SEQ ID NO: 1308653 - RNA, 19 nt, Artificial Sequence
  Description of Artificial Sequence: Synthetic oligonucleotide
  Antisense strand to SEQ ID NO: 1308652
cuuuaccauuaagucuuac

SEQ ID NO: 1308654 - RNA, 19 nt, Artificial Sequence
  Description of Artificial Sequence: Synthetic oligonucleotide
  Sense strand starting at position 1158 of SEQ ID NO: 1241903
aucagaaugccacagucau

SEQ ID NO: 1308655 - RNA, 19 nt, Artificial Sequence
  Description of Artificial Sequence: Synthetic oligonucleotide
  Antisense strand to SEQ ID NO: 1308654
augacuguggcauucugau

SEQ ID NO: 1308656 - RNA, 19 nt, Artificial Sequence
  Description of Artificial Sequence: Synthetic oligonucleotide
  Sense strand starting at position 1169 of SEQ ID NO: 1241903
acagucaugucucuacuuu

SEQ ID NO: 1308657 - RNA, 19 nt, Artificial Sequence
  Description of Artificial Sequence: Synthetic oligonucleotide
  Antisense strand to SEQ ID NO: 1308656
aaaguagagacaugacugu

SEQ ID NO: 1308658 - RNA, 19 nt, Artificial Sequence
  Description of Artificial Sequence: Synthetic oligonucleotide
  Sense strand starting at position 1378 of SEQ ID NO: 1241903
ggagcauccuuucuugaga

SEQ ID NO: 1308659 - RNA, 19 nt, Artificial Sequence
  Description of Artificial Sequence: Synthetic oligonucleotide
  Antisense strand to SEQ ID NO: 1308658
ucucaagaaaggaugcucc

SEQ ID NO: 1308660 - RNA, 19 nt, Artificial Sequence
  Description of Artificial Sequence: Synthetic oligonucleotide
  Sense strand starting at position 1381 of SEQ ID NO: 1241903
gcauccuuucuugagaauc

SEQ ID NO: 1308661 - RNA, 19 nt, Artificial Sequence
  Description of Artificial Sequence: Synthetic oligonucleotide
  Antisense strand to SEQ ID NO: 1308660
gauucucaagaaaggaugc

SEQ ID NO: 1308662 - RNA, 19 nt, Artificial Sequence
  Description of Artificial Sequence: Synthetic oligonucleotide
  Sense strand starting at position 1398 of SEQ ID NO: 1241903
ucuacuauuugguacuaca

SEQ ID NO: 1308663 - RNA, 19 nt, Artificial Sequence
  Description of Artificial Sequence: Synthetic oligonucleotide
  Antisense strand to SEQ ID NO: 1308662
uguaguaccaaauaguaga

SEQ ID NO: 1308664 - RNA, 19 nt, Artificial Sequence
  Description of Artificial Sequence: Synthetic oligonucleotide
  Sense strand starting at position 1444 of SEQ ID NO: 1241903
uuacuuuaucauugaagag

SEQ ID NO: 1308665 - RNA, 19 nt, Artificial Sequence
  Description of Artificial Sequence: Synthetic oligonucleotide
  Antisense strand to SEQ ID NO: 1308664
cucuucaaugauaaaguaa

SEQ ID NO: 1308666 - RNA, 19 nt, Artificial Sequence
  Description of Artificial Sequence: Synthetic oligonucleotide
  Sense strand starting at position 1543 of SEQ ID NO: 1241903
cuggaaggcuguuccuuua

SEQ ID NO: 1308667 - RNA, 19 nt, Artificial Sequence
  Description of Artificial Sequence: Synthetic oligonucleotide
  Antisense strand to SEQ ID NO: 1308666
uaaaggaacagccuuccag

SEQ ID NO: 1308668 - RNA, 19 nt, Artificial Sequence
  Description of Artificial Sequence: Synthetic oligonucleotide
  Sense strand starting at position 1546 of SEQ ID NO: 1241903
gaaggcuguuccuuuaaga

SEQ ID NO: 1308669 - RNA, 19 nt, Artificial Sequence
  Description of Artificial Sequence: Synthetic oligonucleotide
  Antisense strand to SEQ ID NO: 1308668
ucuuaaaggaacagccuuc

SEQ ID NO: 1308670 - RNA, 19 nt, Artificial Sequence
  Description of Artificial Sequence: Synthetic oligonucleotide
  Sense strand starting at position 1853 of SEQ ID NO: 1241903
cccagauccuaggugaguu

SEQ ID NO: 1308671 - RNA, 19 nt, Artificial Sequence
  Description of Artificial Sequence: Synthetic oligonucleotide
  Antisense strand to SEQ ID NO: 1308670
aacucaccuaggaucuggg

SEQ ID NO: 1308672 - RNA, 19 nt, Artificial Sequence
  Description of Artificial Sequence: Synthetic oligonucleotide
  Sense strand starting at position 2011 of SEQ ID NO: 1241903
gggauuccuucaguggcau

SEQ ID NO: 1308673 - RNA, 19 nt, Artificial Sequence
  Description of Artificial Sequence: Synthetic oligonucleotide
  Antisense strand to SEQ ID NO: 1308672
augccacugaaggaauccc

SEQ ID NO: 1308674 - RNA, 19 nt, Artificial Sequence
  Description of Artificial Sequence: Synthetic oligonucleotide
  Sense strand starting at position 2113 of SEQ ID NO: 1241903
gggaguugcaauggagaaa

SEQ ID NO: 1308675 - RNA, 19 nt, Artificial Sequence
  Description of Artificial Sequence: Synthetic oligonucleotide
  Antisense strand to SEQ ID NO: 1308674
uuucuccauugcaacuccc

SEQ ID NO: 1308676 - RNA, 19 nt, Artificial Sequence
  Description of Artificial Sequence: Synthetic oligonucleotide
  Sense strand starting at position 2578 of SEQ ID NO: 1241903
ggauuccaguacucaaauc

SEQ ID NO: 1308677 - RNA, 19 nt, Artificial Sequence
  Description of Artificial Sequence: Synthetic oligonucleotide
  Antisense strand to SEQ ID NO: 1308676
gauuugaguacuggaaucc

SEQ ID NO: 1308678 - RNA, 19 nt, Artificial Sequence
  Description of Artificial Sequence: Synthetic oligonucleotide
  Sense strand starting at position 2605 of SEQ ID NO: 1241903
caagcauuccgggaguugu

SEQ ID NO: 1308679 - RNA, 19 nt, Artificial Sequence
  Description of Artificial Sequence: Synthetic oligonucleotide
  Antisense strand to SEQ ID NO: 1308678
acaacucccggaaugcuug

SEQ ID NO: 1308680 - RNA, 19 nt, Artificial Sequence
  Description of Artificial Sequence: Synthetic oligonucleotide
  Sense strand starting at position 2855 of SEQ ID NO: 1241903
ucgugauccaccuaaagug

SEQ ID NO: 1308681 - RNA, 19 nt, Artificial Sequence
  Description of Artificial Sequence: Synthetic oligonucleotide
  Antisense strand to SEQ ID NO: 1308680
cacuuuagguggaucacga

SEQ ID NO: 1308682 - RNA, 19 nt, Artificial Sequence
  Description of Artificial Sequence: Synthetic oligonucleotide
  Sense strand starting at position 3049 of SEQ ID NO: 1241903
cugguugagccagaucaca

SEQ ID NO: 1308683 - RNA, 19 nt, Artificial Sequence
  Description of Artificial Sequence: Synthetic oligonucleotide
  Antisense strand to SEQ ID NO: 1308682
ugugaucuggcucaaccag

SEQ ID NO: 1308684 - RNA, 19 nt, Artificial Sequence
  Description of Artificial Sequence: Synthetic oligonucleotide
  Sense strand starting at position 3230 of SEQ ID NO: 1241903
cuaauagauuaaucguaca

SEQ ID NO: 1308685 - RNA, 19 nt, Artificial Sequence
  Description of Artificial Sequence: Synthetic oligonucleotide
  Antisense strand to SEQ ID NO: 1308684
uguacgauuaaucuauuag

SEQ ID NO: 1308686 - RNA, 19 nt, Artificial Sequence
  Description of Artificial Sequence: Synthetic oligonucleotide
  Sense strand starting at position 3285 of SEQ ID NO: 1241903
ucgggaaagggcuauuauu

SEQ ID NO: 1308687 - RNA, 19 nt, Artificial Sequence
  Description of Artificial Sequence: Synthetic oligonucleotide
  Antisense strand to SEQ ID NO: 1308686
aauaauagcccuuucccga

SEQ ID NO: 1308688 - RNA, 19 nt, Artificial Sequence
  Description of Artificial Sequence: Synthetic oligonucleotide
  Sense strand starting at position 3331 of SEQ ID NO: 1241903
cugaauuccuuucuaaggu

SEQ ID NO: 1308689 - RNA, 19 nt, Artificial Sequence
  Description of Artificial Sequence: Synthetic oligonucleotide
  Antisense strand to SEQ ID NO: 1308688
accuuagaaaggaauucag

SEQ ID NO: 1308690 - RNA, 19 nt, Artificial Sequence
  Description of Artificial Sequence: Synthetic oligonucleotide
  Sense strand starting at position 3416 of SEQ ID NO: 1241903
aggucugaucuuugucacu

SEQ ID NO: 1308691 - RNA, 19 nt, Artificial Sequence
  Description of Artificial Sequence: Synthetic oligonucleotide
  Antisense strand to SEQ ID NO: 1308690
agugacaaagaucagaccu

SEQ ID NO: 1308692 - RNA, 19 nt, Artificial Sequence
  Description of Artificial Sequence: Synthetic oligonucleotide
  Sense strand starting at position 3563 of SEQ ID NO: 1241903
ggacuuagcacagguuaag

SEQ ID NO: 1308693 - RNA, 19 nt, Artificial Sequence
  Description of Artificial Sequence: Synthetic oligonucleotide
  Antisense strand to SEQ ID NO: 1308692
cuuaaccugugcuaagucc

SEQ ID NO: 1308694 - RNA, 19 nt, Artificial Sequence
  Description of Artificial Sequence: Synthetic oligonucleotide
  Sense strand starting at position 3586 of SEQ ID NO: 1241903
uggacaagauaguuacauu

SEQ ID NO: 1308695 - RNA, 19 nt, Artificial Sequence
  Description of Artificial Sequence: Synthetic oligonucleotide
  Antisense strand to SEQ ID NO: 1308694
aauguaacuaucuugucca

SEQ ID NO: 1308696 - RNA, 19 nt, Artificial Sequence
  Description of Artificial Sequence: Synthetic oligonucleotide
  Sense strand starting at position 3604 of SEQ ID NO: 1241903
ucacaugaguuucugccaa

SEQ ID NO: 1308697 - RNA, 19 nt, Artificial Sequence
  Description of Artificial Sequence: Synthetic oligonucleotide
  Antisense strand to SEQ ID NO: 1308696
uuggcagaaacucauguga

SEQ ID NO: 1308698 - RNA, 19 nt, Artificial Sequence
  Description of Artificial Sequence: Synthetic oligonucleotide
  Sense strand starting at position 3606 of SEQ ID NO: 1241903
acaugaguuucugccaauu

SEQ ID NO: 1308699 - RNA, 19 nt, Artificial Sequence
  Description of Artificial Sequence: Synthetic oligonucleotide
  Antisense strand to SEQ ID NO: 1308698
aauuggcagaaacucaugu

SEQ ID NO: 1308700 - RNA, 19 nt, Artificial Sequence
  Description of Artificial Sequence: Synthetic oligonucleotide
  Sense strand starting at position 3758 of SEQ ID NO: 1241903
gggacucaugcugguucaa

SEQ ID NO: 1308701 - RNA, 19 nt, Artificial Sequence
  Description of Artificial Sequence: Synthetic oligonucleotide
  Antisense strand to SEQ ID NO: 1308700
uugaaccagcaugaguccc

SEQ ID NO: 1308702 - RNA, 19 nt, Artificial Sequence
  Description of Artificial Sequence: Synthetic oligonucleotide
  Sense strand starting at position 155 of SEQ ID NO: 1241904
ggcccaaggugccuguaau

SEQ ID NO: 1308703 - RNA, 19 nt, Artificial Sequence
  Description of Artificial Sequence: Synthetic oligonucleotide
  Antisense strand to SEQ ID NO: 1308702
auuacaggcaccuugggcc

SEQ ID NO: 1308704 - RNA, 19 nt, Artificial Sequence
  Description of Artificial Sequence: Synthetic oligonucleotide
  Sense strand starting at position 156 of SEQ ID NO: 1241904
gcccaaggugccuguaauu

SEQ ID NO: 1308705 - RNA, 19 nt, Artificial Sequence
  Description of Artificial Sequence: Synthetic oligonucleotide
  Antisense strand to SEQ ID NO: 1308704
aauuacaggcaccuugggc

SEQ ID NO: 1308706 - RNA, 19 nt, Artificial Sequence
  Description of Artificial Sequence: Synthetic oligonucleotide
  Sense strand starting at position 180 of SEQ ID NO: 1241904
uccaguggucagcgaagga

SEQ ID NO: 1308707 - RNA, 19 nt, Artificial Sequence
  Description of Artificial Sequence: Synthetic oligonucleotide
  Antisense strand to SEQ ID NO: 1308706
uccuucgcugaccacugga

SEQ ID NO: 1308708 - RNA, 19 nt, Artificial Sequence
  Description of Artificial Sequence: Synthetic oligonucleotide
  Sense strand starting at position 201 of SEQ ID NO: 1241904
cacugagaaggcgauguuu

SEQ ID NO: 1308709 - RNA, 19 nt, Artificial Sequence
  Description of Artificial Sequence: Synthetic oligonucleotide
  Antisense strand to SEQ ID NO: 1308708
aaacaucgccuucucagug

SEQ ID NO: 1308710 - RNA, 19 nt, Artificial Sequence
  Description of Artificial Sequence: Synthetic oligonucleotide
  Sense strand starting at position 203 of SEQ ID NO: 1241904
cugagaaggcgauguuuca

SEQ ID NO: 1308711 - RNA, 19 nt, Artificial Sequence
  Description of Artificial Sequence: Synthetic oligonucleotide
  Antisense strand to SEQ ID NO: 1308710
ugaaacaucgccuucucag

SEQ ID NO: 1308712 - RNA, 19 nt, Artificial Sequence
  Description of Artificial Sequence: Synthetic oligonucleotide
  Sense strand starting at position 210 of SEQ ID NO: 1241904
ggcgauguuucagcaaaga

SEQ ID NO: 1308713 - RNA, 19 nt, Artificial Sequence
  Description of Artificial Sequence: Synthetic oligonucleotide
  Antisense strand to SEQ ID NO: 1308712
ucuuugcugaaacaucgcc

SEQ ID NO: 1308714 - RNA, 19 nt, Artificial Sequence
  Description of Artificial Sequence: Synthetic oligonucleotide
  Sense strand starting at position 446 of SEQ ID NO: 1241904
aacccugcacggugugaaa

SEQ ID NO: 1308715 - RNA, 19 nt, Artificial Sequence
  Description of Artificial Sequence: Synthetic oligonucleotide
  Antisense strand to SEQ ID NO: 1308714
uuucacaccgugcaggguu

SEQ ID NO: 1308716 - RNA, 19 nt, Artificial Sequence
  Description of Artificial Sequence: Synthetic oligonucleotide
  Sense strand starting at position 632 of SEQ ID NO: 1241904
ggccucuguucugucucaa

SEQ ID NO: 1308717 - RNA, 19 nt, Artificial Sequence
  Description of Artificial Sequence: Synthetic oligonucleotide
  Antisense strand to SEQ ID NO: 1308716
uugagacagaacagaggcc

SEQ ID NO: 1308718 - RNA, 19 nt, Artificial Sequence
  Description of Artificial Sequence: Synthetic oligonucleotide
  Sense strand starting at position 754 of SEQ ID NO: 1241904
agggaaaccuaguaaguuc

SEQ ID NO: 1308719 - RNA, 19 nt, Artificial Sequence
  Description of Artificial Sequence: Synthetic oligonucleotide
  Antisense strand to SEQ ID NO: 1308718
gaacuuacuagguuucccu

SEQ ID NO: 1308720 - RNA, 19 nt, Artificial Sequence
  Description of Artificial Sequence: Synthetic oligonucleotide
  Sense strand starting at position 762 of SEQ ID NO: 1241904
cuaguaaguucugucuuag

SEQ ID NO: 1308721 - RNA, 19 nt, Artificial Sequence
  Description of Artificial Sequence: Synthetic oligonucleotide
  Antisense strand to SEQ ID NO: 1308720
cuaagacagaacuuacuag

SEQ ID NO: 1308722 - RNA, 19 nt, Artificial Sequence
  Description of Artificial Sequence: Synthetic oligonucleotide
  Sense strand starting at position 808 of SEQ ID NO: 1241904
aguauaaagccacaugucu

SEQ ID NO: 1308723 - RNA, 19 nt, Artificial Sequence
  Description of Artificial Sequence: Synthetic oligonucleotide
  Antisense strand to SEQ ID NO: 1308722
agacauguggcuuuauacu

SEQ ID NO: 1308724 - RNA, 19 nt, Artificial Sequence
  Description of Artificial Sequence: Synthetic oligonucleotide
  Sense strand starting at position 945 of SEQ ID NO: 1241904
agagcaaauugccuaauga

SEQ ID NO: 1308725 - RNA, 19 nt, Artificial Sequence
  Description of Artificial Sequence: Synthetic oligonucleotide
  Antisense strand to SEQ ID NO: 1308724
ucauuaggcaauuugcucu

SEQ ID NO: 1308726 - RNA, 19 nt, Artificial Sequence
  Description of Artificial Sequence: Synthetic oligonucleotide
  Sense strand starting at position 946 of SEQ ID NO: 1241904
gagcaaauugccuaaugag

SEQ ID NO: 1308727 - RNA, 19 nt, Artificial Sequence
  Description of Artificial Sequence: Synthetic oligonucleotide
  Antisense strand to SEQ ID NO: 1308726
cucauuaggcaauuugcuc

SEQ ID NO: 1308728 - RNA, 19 nt, Artificial Sequence
  Description of Artificial Sequence: Synthetic oligonucleotide
  Sense strand starting at position 977 of SEQ ID NO: 1241904
cugaguugcuaaucaaaga

SEQ ID NO: 1308729 - RNA, 19 nt, Artificial Sequence
  Description of Artificial Sequence: Synthetic oligonucleotide
  Antisense strand to SEQ ID NO: 1308728
ucuuugauuagcaacucag

SEQ ID NO: 1308730 - RNA, 19 nt, Artificial Sequence
  Description of Artificial Sequence: Synthetic oligonucleotide
  Sense strand starting at position 1013 of SEQ ID NO: 1241904
uuaauuuggucuugggaaa

SEQ ID NO: 1308731 - RNA, 19 nt, Artificial Sequence
  Description of Artificial Sequence: Synthetic oligonucleotide
  Antisense strand to SEQ ID NO: 1308730
uuucccaagaccaaauuaa

SEQ ID NO: 1308732 - RNA, 19 nt, Artificial Sequence
  Description of Artificial Sequence: Synthetic oligonucleotide
  Sense strand starting at position 1174 of SEQ ID NO: 1241904
cccagaaccgcguucaguu

SEQ ID NO: 1308733 - RNA, 19 nt, Artificial Sequence
  Description of Artificial Sequence: Synthetic oligonucleotide
  Antisense strand to SEQ ID NO: 1308732
aacugaacgcgguucuggg

SEQ ID NO: 1308734 - RNA, 19 nt, Artificial Sequence
  Description of Artificial Sequence: Synthetic oligonucleotide
  Sense strand starting at position 1232 of SEQ ID NO: 1241904
gguggaggcccggguaaua

SEQ ID NO: 1308735 - RNA, 19 nt, Artificial Sequence
  Description of Artificial Sequence: Synthetic oligonucleotide
  Antisense strand to SEQ ID NO: 1308734
uauuacccgggccuccacc

SEQ ID NO: 1308736 - RNA, 19 nt, Artificial Sequence
  Description of Artificial Sequence: Synthetic oligonucleotide
  Sense strand starting at position 1420 of SEQ ID NO: 1241904
gacaaaugccaguguuucu

SEQ ID NO: 1308737 - RNA, 19 nt, Artificial Sequence
  Description of Artificial Sequence: Synthetic oligonucleotide
  Antisense strand to SEQ ID NO: 1308736
agaaacacuggcauuuguc

SEQ ID NO: 1308738 - RNA, 19 nt, Artificial Sequence
  Description of Artificial Sequence: Synthetic oligonucleotide
  Sense strand starting at position 1513 of SEQ ID NO: 1241904
cuacuagaguuggacacuu

SEQ ID NO: 1308739 - RNA, 19 nt, Artificial Sequence
  Description of Artificial Sequence: Synthetic oligonucleotide
  Antisense strand to SEQ ID NO: 1308738
aaguguccaacucuaguag

SEQ ID NO: 1308740 - RNA, 19 nt, Artificial Sequence
  Description of Artificial Sequence: Synthetic oligonucleotide
  Sense strand starting at position 1643 of SEQ ID NO: 1241904
ucgguauugcagggauaca

SEQ ID NO: 1308741 - RNA, 19 nt, Artificial Sequence
  Description of Artificial Sequence: Synthetic oligonucleotide
  Antisense strand to SEQ ID NO: 1308740
uguaucccugcaauaccga

SEQ ID NO: 1308742 - RNA, 19 nt, Artificial Sequence
  Description of Artificial Sequence: Synthetic oligonucleotide
  Sense strand starting at position 1644 of SEQ ID NO: 1241904
cgguauugcagggauacaa

SEQ ID NO: 1308743 - RNA, 19 nt, Artificial Sequence
  Description of Artificial Sequence: Synthetic oligonucleotide
  Antisense strand to SEQ ID NO: 1308742
uuguaucccugcaauaccg

SEQ ID NO: 1308744 - RNA, 19 nt, Artificial Sequence
  Description of Artificial Sequence: Synthetic oligonucleotide
  Sense strand starting at position 1669 of SEQ ID NO: 1241904
gugcucucaggcugggauu

SEQ ID NO: 1308745 - RNA, 19 nt, Artificial Sequence
  Description of Artificial Sequence: Synthetic oligonucleotide
  Antisense strand to SEQ ID NO: 1308744
aaucccagccugagagcac

SEQ ID NO: 1308746 - RNA, 19 nt, Artificial Sequence
  Description of Artificial Sequence: Synthetic oligonucleotide
  Sense strand starting at position 1710 of SEQ ID NO: 1241904
ugcugagugacuggcgaau

SEQ ID NO: 1308747 - RNA, 19 nt, Artificial Sequence
  Description of Artificial Sequence: Synthetic oligonucleotide
  Antisense strand to SEQ ID NO: 1308746
auucgccagucacucagca

SEQ ID NO: 1308748 - RNA, 19 nt, Artificial Sequence
  Description of Artificial Sequence: Synthetic oligonucleotide
  Sense strand starting at position 1850 of SEQ ID NO: 1241904
ggacuuuaaggguggugga

SEQ ID NO: 1308749 - RNA, 19 nt, Artificial Sequence
  Description of Artificial Sequence: Synthetic oligonucleotide
  Antisense strand to SEQ ID NO: 1308748
uccaccacccuuaaagucc

SEQ ID NO: 1308750 - RNA, 19 nt, Artificial Sequence
  Description of Artificial Sequence: Synthetic oligonucleotide
  Sense strand starting at position 2197 of SEQ ID NO: 1241904
acaggugugcccuacacaa

SEQ ID NO: 1308751 - RNA, 19 nt, Artificial Sequence
  Description of Artificial Sequence: Synthetic oligonucleotide
  Antisense strand to SEQ ID NO: 1308750
uuguguagggcacaccugu

SEQ ID NO: 1308752 - RNA, 19 nt, Artificial Sequence
  Description of Artificial Sequence: Synthetic oligonucleotide
  Sense strand starting at position 2402 of SEQ ID NO: 1241904
ccagaaucgcuuuacaccu

SEQ ID NO: 1308753 - RNA, 19 nt, Artificial Sequence
  Description of Artificial Sequence: Synthetic oligonucleotide
  Antisense strand to SEQ ID NO: 1308752
agguguaaagcgauucugg

SEQ ID NO: 1308754 - RNA, 19 nt, Artificial Sequence
  Description of Artificial Sequence: Synthetic oligonucleotide
  Sense strand starting at position 2411 of SEQ ID NO: 1241904
cuuuacaccuguuucuaga

SEQ ID NO: 1308755 - RNA, 19 nt, Artificial Sequence
  Description of Artificial Sequence: Synthetic oligonucleotide
  Antisense strand to SEQ ID NO: 1308754
ucuagaaacagguguaaag

SEQ ID NO: 1308756 - RNA, 19 nt, Artificial Sequence
  Description of Artificial Sequence: Synthetic oligonucleotide
  Sense strand starting at position 2454 of SEQ ID NO: 1241904
ccgacuccucccugucaga

SEQ ID NO: 1308757 - RNA, 19 nt, Artificial Sequence
  Description of Artificial Sequence: Synthetic oligonucleotide
  Antisense strand to SEQ ID NO: 1308756
ucugacagggaggagucgg

SEQ ID NO: 1308758 - RNA, 19 nt, Artificial Sequence
  Description of Artificial Sequence: Synthetic oligonucleotide
  Sense strand starting at position 2656 of SEQ ID NO: 1241904
aggugccuccuuggaguua

SEQ ID NO: 1308759 - RNA, 19 nt, Artificial Sequence
  Description of Artificial Sequence: Synthetic oligonucleotide
  Antisense strand to SEQ ID NO: 1308758
uaacuccaaggaggcaccu

SEQ ID NO: 1308760 - RNA, 19 nt, Artificial Sequence
  Description of Artificial Sequence: Synthetic oligonucleotide
  Sense strand starting at position 2667 of SEQ ID NO: 1241904
uggaguuaggccagugugu

SEQ ID NO: 1308761 - RNA, 19 nt, Artificial Sequence
  Description of Artificial Sequence: Synthetic oligonucleotide
  Antisense strand to SEQ ID NO: 1308760
acacacuggccuaacucca

SEQ ID NO: 1308762 - RNA, 19 nt, Artificial Sequence
  Description of Artificial Sequence: Synthetic oligonucleotide
  Sense strand starting at position 3038 of SEQ ID NO: 1241904
gguuccuccucccuugaaa

SEQ ID NO: 1308763 - RNA, 19 nt, Artificial Sequence
  Description of Artificial Sequence: Synthetic oligonucleotide
  Antisense strand to SEQ ID NO: 1308762
uuucaagggaggaggaacc

SEQ ID NO: 1308764 - RNA, 19 nt, Artificial Sequence
  Description of Artificial Sequence: Synthetic oligonucleotide
  Sense strand starting at position 3100 of SEQ ID NO: 1241904
uuguaaaggcuuugaugag

SEQ ID NO: 1308765 - RNA, 19 nt, Artificial Sequence
  Description of Artificial Sequence: Synthetic oligonucleotide
  Antisense strand to SEQ ID NO: 1308764
cucaucaaagccuuuacaa

SEQ ID NO: 1308766 - RNA, 19 nt, Artificial Sequence
  Description of Artificial Sequence: Synthetic oligonucleotide
  Sense strand starting at position 3217 of SEQ ID NO: 1241904
gccgcaguucuucuggagu

SEQ ID NO: 1308767 - RNA, 19 nt, Artificial Sequence
  Description of Artificial Sequence: Synthetic oligonucleotide
  Antisense strand to SEQ ID NO: 1308766
acuccagaagaacugcggc

SEQ ID NO: 1308768 - RNA, 19 nt, Artificial Sequence
  Description of Artificial Sequence: Synthetic oligonucleotide
  Sense strand starting at position 3523 of SEQ ID NO: 1241904
ggagaaaugcuuugcucaa

SEQ ID NO: 1308769 - RNA, 19 nt, Artificial Sequence
  Description of Artificial Sequence: Synthetic oligonucleotide
  Antisense strand to SEQ ID NO: 1308768
uugagcaaagcauuucucc

SEQ ID NO: 1308770 - RNA, 19 nt, Artificial Sequence
  Description of Artificial Sequence: Synthetic oligonucleotide
  Sense strand starting at position 3554 of SEQ ID NO: 1241904
gcugacguaaccuauguaa

SEQ ID NO: 1308771 - RNA, 19 nt, Artificial Sequence
  Description of Artificial Sequence: Synthetic oligonucleotide
  Antisense strand to SEQ ID NO: 1308770
uuacauagguuacgucagc

SEQ ID NO: 1308772 - RNA, 19 nt, Artificial Sequence
  Description of Artificial Sequence: Synthetic oligonucleotide
  Sense strand starting at position 3556 of SEQ ID NO: 1241904
ugacguaaccuauguaaug

SEQ ID NO: 1308773 - RNA, 19 nt, Artificial Sequence
  Description of Artificial Sequence: Synthetic oligonucleotide
  Antisense strand to SEQ ID NO: 1308772
cauuacauagguuacguca

SEQ ID NO: 1308774 - RNA, 19 nt, Artificial Sequence
  Description of Artificial Sequence: Synthetic oligonucleotide
  Sense strand starting at position 3557 of SEQ ID NO: 1241904
gacguaaccuauguaaugu

SEQ ID NO: 1308775 - RNA, 19 nt, Artificial Sequence
  Description of Artificial Sequence: Synthetic oligonucleotide
  Antisense strand to SEQ ID NO: 1308774
acauuacauagguuacguc

SEQ ID NO: 1308776 - RNA, 19 nt, Artificial Sequence
  Description of Artificial Sequence: Synthetic oligonucleotide
  Sense strand starting at position 3781 of SEQ ID NO: 1241904
auccgauccugagaugauc

SEQ ID NO: 1308777 - RNA, 19 nt, Artificial Sequence
  Description of Artificial Sequence: Synthetic oligonucleotide
  Antisense strand to SEQ ID NO: 1308776
gaucaucucaggaucggau

SEQ ID NO: 1308778 - RNA, 19 nt, Artificial Sequence
  Description of Artificial Sequence: Synthetic oligonucleotide
  Sense strand starting at position 3808 of SEQ ID NO: 1241904
acagaaacuugacggaaau

SEQ ID NO: 1308779 - RNA, 19 nt, Artificial Sequence
  Description of Artificial Sequence: Synthetic oligonucleotide
  Antisense strand to SEQ ID NO: 1308778
auuuccgucaaguuucugu

SEQ ID NO: 1308780 - RNA, 19 nt, Artificial Sequence
  Description of Artificial Sequence: Synthetic oligonucleotide
  Sense strand starting at position 3925 of SEQ ID NO: 1241904
cucggucucugguuacaca

SEQ ID NO: 1308781 - RNA, 19 nt, Artificial Sequence
  Description of Artificial Sequence: Synthetic oligonucleotide
  Antisense strand to SEQ ID NO: 1308780
uguguaaccagagaccgag

SEQ ID NO: 1308782 - RNA, 19 nt, Artificial Sequence
  Description of Artificial Sequence: Synthetic oligonucleotide
  Sense strand starting at position 339 of SEQ ID NO: 1241905
auggcuaaucaauaguauu

SEQ ID NO: 1308783 - RNA, 19 nt, Artificial Sequence
  Description of Artificial Sequence: Synthetic oligonucleotide
  Antisense strand to SEQ ID NO: 1308782
aauacuauugauuagccau

SEQ ID NO: 1308784 - RNA, 19 nt, Artificial Sequence
  Description of Artificial Sequence: Synthetic oligonucleotide
  Sense strand starting at position 387 of SEQ ID NO: 1241905
gaggguuugucucccugga

SEQ ID NO: 1308785 - RNA, 19 nt, Artificial Sequence
  Description of Artificial Sequence: Synthetic oligonucleotide
  Antisense strand to SEQ ID NO: 1308784
uccagggagacaaacccuc

SEQ ID NO: 1308786 - RNA, 19 nt, Artificial Sequence
  Description of Artificial Sequence: Synthetic oligonucleotide
  Sense strand starting at position 445 of SEQ ID NO: 1241905
agaacaucgucuccugaca

SEQ ID NO: 1308787 - RNA, 19 nt, Artificial Sequence
  Description of Artificial Sequence: Synthetic oligonucleotide
  Antisense strand to SEQ ID NO: 1308786
ugucaggagacgauguucu

SEQ ID NO: 1308788 - RNA, 19 nt, Artificial Sequence
  Description of Artificial Sequence: Synthetic oligonucleotide
  Sense strand starting at position 568 of SEQ ID NO: 1241905
cagugcuggcacuaguaga

SEQ ID NO: 1308789 - RNA, 19 nt, Artificial Sequence
  Description of Artificial Sequence: Synthetic oligonucleotide
  Antisense strand to SEQ ID NO: 1308788
ucuacuagugccagcacug

SEQ ID NO: 1308790 - RNA, 19 nt, Artificial Sequence
  Description of Artificial Sequence: Synthetic oligonucleotide
  Sense strand starting at position 575 of SEQ ID NO: 1241905
ggcacuaguagaugcucaa

SEQ ID NO: 1308791 - RNA, 19 nt, Artificial Sequence
  Description of Artificial Sequence: Synthetic oligonucleotide
  Antisense strand to SEQ ID NO: 1308790
uugagcaucuacuagugcc

SEQ ID NO: 1308792 - RNA, 19 nt, Artificial Sequence
  Description of Artificial Sequence: Synthetic oligonucleotide
  Sense strand starting at position 675 of SEQ ID NO: 1241905
uggcgaucacuguaaauga

SEQ ID NO: 1308793 - RNA, 19 nt, Artificial Sequence
  Description of Artificial Sequence: Synthetic oligonucleotide
  Antisense strand to SEQ ID NO: 1308792
ucauuuacagugaucgcca

SEQ ID NO: 1308794 - RNA, 19 nt, Artificial Sequence
  Description of Artificial Sequence: Synthetic oligonucleotide
  Sense strand starting at position 744 of SEQ ID NO: 1241905
cugucaugugcccacuaga

SEQ ID NO: 1308795 - RNA, 19 nt, Artificial Sequence
  Description of Artificial Sequence: Synthetic oligonucleotide
  Antisense strand to SEQ ID NO: 1308794
ucuagugggcacaugacag

SEQ ID NO: 1308796 - RNA, 19 nt, Artificial Sequence
  Description of Artificial Sequence: Synthetic oligonucleotide
  Sense strand starting at position 747 of SEQ ID NO: 1241905
ucaugugcccacuagauau

SEQ ID NO: 1308797 - RNA, 19 nt, Artificial Sequence
  Description of Artificial Sequence: Synthetic oligonucleotide
  Antisense strand to SEQ ID NO: 1308796
auaucuagugggcacauga

SEQ ID NO: 1308798 - RNA, 19 nt, Artificial Sequence
  Description of Artificial Sequence: Synthetic oligonucleotide
  Sense strand starting at position 792 of SEQ ID NO: 1241905
ucacuuaugaggugaggua

SEQ ID NO: 1308799 - RNA, 19 nt, Artificial Sequence
  Description of Artificial Sequence: Synthetic oligonucleotide
  Antisense strand to SEQ ID NO: 1308798
uaccucaccucauaaguga

SEQ ID NO: 1308800 - RNA, 19 nt, Artificial Sequence
  Description of Artificial Sequence: Synthetic oligonucleotide
  Sense strand starting at position 904 of SEQ ID NO: 1241905
ggguuucuguguuucagaa

SEQ ID NO: 1308801 - RNA, 19 nt, Artificial Sequence
  Description of Artificial Sequence: Synthetic oligonucleotide
  Antisense strand to SEQ ID NO: 1308800
uucugaaacacagaaaccc

SEQ ID NO: 1308802 - RNA, 19 nt, Artificial Sequence
  Description of Artificial Sequence: Synthetic oligonucleotide
  Sense strand starting at position 923 of SEQ ID NO: 1241905
agauauggccauugguaaa

SEQ ID NO: 1308803 - RNA, 19 nt, Artificial Sequence
  Description of Artificial Sequence: Synthetic oligonucleotide
  Antisense strand to SEQ ID NO: 1308802
uuuaccaauggccauaucu

SEQ ID NO: 1308804 - RNA, 19 nt, Artificial Sequence
  Description of Artificial Sequence: Synthetic oligonucleotide
  Sense strand starting at position 1038 of SEQ ID NO: 1241905
uggaauuuguucugagaaa

SEQ ID NO: 1308805 - RNA, 19 nt, Artificial Sequence
  Description of Artificial Sequence: Synthetic oligonucleotide
  Antisense strand to SEQ ID NO: 1308804
uuucucagaacaaauucca

SEQ ID NO: 1308806 - RNA, 19 nt, Artificial Sequence
  Description of Artificial Sequence: Synthetic oligonucleotide
  Sense strand starting at position 1039 of SEQ ID NO: 1241905
ggaauuuguucugagaaag

SEQ ID NO: 1308807 - RNA, 19 nt, Artificial Sequence
  Description of Artificial Sequence: Synthetic oligonucleotide
  Antisense strand to SEQ ID NO: 1308806
cuuucucagaacaaauucc

SEQ ID NO: 1308808 - RNA, 19 nt, Artificial Sequence
  Description of Artificial Sequence: Synthetic oligonucleotide
  Sense strand starting at position 2059 of SEQ ID NO: 1241905
gaagaaacacugugaguau

SEQ ID NO: 1308809 - RNA, 19 nt, Artificial Sequence
  Description of Artificial Sequence: Synthetic oligonucleotide
  Antisense strand to SEQ ID NO: 1308808
auacucacaguguuucuuc

SEQ ID NO: 1308810 - RNA, 19 nt, Artificial Sequence
  Description of Artificial Sequence: Synthetic oligonucleotide
  Sense strand starting at position 2167 of SEQ ID NO: 1241905
gggaguaucugaguaaggu

SEQ ID NO: 1308811 - RNA, 19 nt, Artificial Sequence
  Description of Artificial Sequence: Synthetic oligonucleotide
  Antisense strand to SEQ ID NO: 1308810
accuuacucagauacuccc

SEQ ID NO: 1308812 - RNA, 19 nt, Artificial Sequence
  Description of Artificial Sequence: Synthetic oligonucleotide
  Sense strand starting at position 2168 of SEQ ID NO: 1241905
ggaguaucugaguaaggug

SEQ ID NO: 1308813 - RNA, 19 nt, Artificial Sequence
  Description of Artificial Sequence: Synthetic oligonucleotide
  Antisense strand to SEQ ID NO: 1308812
caccuuacucagauacucc

SEQ ID NO: 1308814 - RNA, 19 nt, Artificial Sequence
  Description of Artificial Sequence: Synthetic oligonucleotide
  Sense strand starting at position 2202 of SEQ ID NO: 1241905
cugagaacugcugacaugu

SEQ ID NO: 1308815 - RNA, 19 nt, Artificial Sequence
  Description of Artificial Sequence: Synthetic oligonucleotide
  Antisense strand to SEQ ID NO: 1308814
acaugucagcaguucucag

SEQ ID NO: 1308816 - RNA, 19 nt, Artificial Sequence
  Description of Artificial Sequence: Synthetic oligonucleotide
  Sense strand starting at position 2211 of SEQ ID NO: 1241905
gcugacauguuauugagua

SEQ ID NO: 1308817 - RNA, 19 nt, Artificial Sequence
  Description of Artificial Sequence: Synthetic oligonucleotide
  Antisense strand to SEQ ID NO: 1308816
uacucaauaacaugucagc

SEQ ID NO: 1308818 - RNA, 19 nt, Artificial Sequence
  Description of Artificial Sequence: Synthetic oligonucleotide
  Sense strand starting at position 2215 of SEQ ID NO: 1241905
acauguuauugaguaggca

SEQ ID NO: 1308819 - RNA, 19 nt, Artificial Sequence
  Description of Artificial Sequence: Synthetic oligonucleotide
  Antisense strand to SEQ ID NO: 1308818
ugccuacucaauaacaugu

SEQ ID NO: 1308820 - RNA, 19 nt, Artificial Sequence
  Description of Artificial Sequence: Synthetic oligonucleotide
  Sense strand starting at position 2224 of SEQ ID NO: 1241905
ugaguaggcaguuauacag

SEQ ID NO: 1308821 - RNA, 19 nt, Artificial Sequence
  Description of Artificial Sequence: Synthetic oligonucleotide
  Antisense strand to SEQ ID NO: 1308820
cuguauaacugccuacuca

SEQ ID NO: 1308822 - RNA, 19 nt, Artificial Sequence
  Description of Artificial Sequence: Synthetic oligonucleotide
  Sense strand starting at position 2446 of SEQ ID NO: 1241905
uuggaaaugucugcaugga

SEQ ID NO: 1308823 - RNA, 19 nt, Artificial Sequence
  Description of Artificial Sequence: Synthetic oligonucleotide
  Antisense strand to SEQ ID NO: 1308822
uccaugcagacauuuccaa

SEQ ID NO: 1308824 - RNA, 19 nt, Artificial Sequence
  Description of Artificial Sequence: Synthetic oligonucleotide
  Sense strand starting at position 2465 of SEQ ID NO: 1241905
aaaugcuacucagcagagu

SEQ ID NO: 1308825 - RNA, 19 nt, Artificial Sequence
  Description of Artificial Sequence: Synthetic oligonucleotide
  Antisense strand to SEQ ID NO: 1308824
acucugcugaguagcauuu

SEQ ID NO: 1308826 - RNA, 19 nt, Artificial Sequence
  Description of Artificial Sequence: Synthetic oligonucleotide
  Sense strand starting at position 2962 of SEQ ID NO: 1241905
ugauguacuguauagugaa

SEQ ID NO: 1308827 - RNA, 19 nt, Artificial Sequence
  Description of Artificial Sequence: Synthetic oligonucleotide
  Antisense strand to SEQ ID NO: 1308826
uucacuauacaguacauca

SEQ ID NO: 1308828 - RNA, 19 nt, Artificial Sequence
  Description of Artificial Sequence: Synthetic oligonucleotide
  Sense strand starting at position 3004 of SEQ ID NO: 1241905
gaguuaagucccuacagca

SEQ ID NO: 1308829 - RNA, 19 nt, Artificial Sequence
  Description of Artificial Sequence: Synthetic oligonucleotide
  Antisense strand to SEQ ID NO: 1308828
ugcuguagggacuuaacuc

SEQ ID NO: 1308830 - RNA, 19 nt, Artificial Sequence
  Description of Artificial Sequence: Synthetic oligonucleotide
  Sense strand starting at position 3056 of SEQ ID NO: 1241905
agcaccuaucaaugauguu

SEQ ID NO: 1308831 - RNA, 19 nt, Artificial Sequence
  Description of Artificial Sequence: Synthetic oligonucleotide
  Antisense strand to SEQ ID NO: 1308830
aacaucauugauaggugcu

SEQ ID NO: 1308832 - RNA, 19 nt, Artificial Sequence
  Description of Artificial Sequence: Synthetic oligonucleotide
  Sense strand starting at position 3081 of SEQ ID NO: 1241905
ggacuuacuguacagguua

SEQ ID NO: 1308833 - RNA, 19 nt, Artificial Sequence
  Description of Artificial Sequence: Synthetic oligonucleotide
  Antisense strand to SEQ ID NO: 1308832
uaaccuguacaguaagucc

SEQ ID NO: 1308834 - RNA, 19 nt, Artificial Sequence
  Description of Artificial Sequence: Synthetic oligonucleotide
  Sense strand starting at position 3094 of SEQ ID NO: 1241905
agguuauauguugacucau

SEQ ID NO: 1308835 - RNA, 19 nt, Artificial Sequence
  Description of Artificial Sequence: Synthetic oligonucleotide
  Antisense strand to SEQ ID NO: 1308834
augagucaacauauaaccu

SEQ ID NO: 1308836 - RNA, 19 nt, Artificial Sequence
  Description of Artificial Sequence: Synthetic oligonucleotide
  Sense strand starting at position 3096 of SEQ ID NO: 1241905
guuauauguugacucauuc

SEQ ID NO: 1308837 - RNA, 19 nt, Artificial Sequence
  Description of Artificial Sequence: Synthetic oligonucleotide
  Antisense strand to SEQ ID NO: 1308836
gaaugagucaacauauaac

SEQ ID NO: 1308838 - RNA, 19 nt, Artificial Sequence
  Description of Artificial Sequence: Synthetic oligonucleotide
  Sense strand starting at position 3162 of SEQ ID NO: 1241905
gaaccagacugucugucaa

SEQ ID NO: 1308839 - RNA, 19 nt, Artificial Sequence
  Description of Artificial Sequence: Synthetic oligonucleotide
  Antisense strand to SEQ ID NO: 1308838
uugacagacagucugguuc

SEQ ID NO: 1308840 - RNA, 19 nt, Artificial Sequence
  Description of Artificial Sequence: Synthetic oligonucleotide
  Sense strand starting at position 3164 of SEQ ID NO: 1241905
accagacugucugucaacu

SEQ ID NO: 1308841 - RNA, 19 nt, Artificial Sequence
  Description of Artificial Sequence: Synthetic oligonucleotide
  Antisense strand to SEQ ID NO: 1308840
aguugacagacagucuggu

SEQ ID NO: 1308842 - RNA, 19 nt, Artificial Sequence
  Description of Artificial Sequence: Synthetic oligonucleotide
  Sense strand starting at position 3174 of SEQ ID NO: 1241905
cugucaacuccugggaugu

SEQ ID NO: 1308843 - RNA, 19 nt, Artificial Sequence
  Description of Artificial Sequence: Synthetic oligonucleotide
  Antisense strand to SEQ ID NO: 1308842
acaucccaggaguugacag

SEQ ID NO: 1308844 - RNA, 19 nt, Artificial Sequence
  Description of Artificial Sequence: Synthetic oligonucleotide
  Sense strand starting at position 3321 of SEQ ID NO: 1241905
ucaaguauggcagagugga

SEQ ID NO: 1308845 - RNA, 19 nt, Artificial Sequence
  Description of Artificial Sequence: Synthetic oligonucleotide
  Antisense strand to SEQ ID NO: 1308844
uccacucugccauacuuga

SEQ ID NO: 1308846 - RNA, 19 nt, Artificial Sequence
  Description of Artificial Sequence: Synthetic oligonucleotide
  Sense strand starting at position 3355 of SEQ ID NO: 1241905
gcagucaugccuguuccca

SEQ ID NO: 1308847 - RNA, 19 nt, Artificial Sequence
  Description of Artificial Sequence: Synthetic oligonucleotide
  Antisense strand to SEQ ID NO: 1308846
ugggaacaggcaugacugc

SEQ ID NO: 1308848 - RNA, 19 nt, Artificial Sequence
  Description of Artificial Sequence: Synthetic oligonucleotide
  Sense strand starting at position 3454 of SEQ ID NO: 1241905
ccuccugaucccugggauu

SEQ ID NO: 1308849 - RNA, 19 nt, Artificial Sequence
  Description of Artificial Sequence: Synthetic oligonucleotide
  Antisense strand to SEQ ID NO: 1308848
aaucccagggaucaggagg

SEQ ID NO: 1308850 - RNA, 19 nt, Artificial Sequence
  Description of Artificial Sequence: Synthetic oligonucleotide
  Sense strand starting at position 3653 of SEQ ID NO: 1241905
guaacuuuaggugaguuau

SEQ ID NO: 1308851 - RNA, 19 nt, Artificial Sequence
  Description of Artificial Sequence: Synthetic oligonucleotide
  Antisense strand to SEQ ID NO: 1308850
auaacucaccuaaaguuac

SEQ ID NO: 1308852 - RNA, 19 nt, Artificial Sequence
  Description of Artificial Sequence: Synthetic oligonucleotide
  Sense strand starting at position 3663 of SEQ ID NO: 1241905
gugaguuauuucuuccuuu

SEQ ID NO: 1308853 - RNA, 19 nt, Artificial Sequence
  Description of Artificial Sequence: Synthetic oligonucleotide
  Antisense strand to SEQ ID NO: 1308852
aaaggaagaaauaacucac

SEQ ID NO: 1308854 - RNA, 19 nt, Artificial Sequence
  Description of Artificial Sequence: Synthetic oligonucleotide
  Sense strand starting at position 3674 of SEQ ID NO: 1241905
cuuccuuucugucucagau

SEQ ID NO: 1308855 - RNA, 19 nt, Artificial Sequence
  Description of Artificial Sequence: Synthetic oligonucleotide
  Antisense strand to SEQ ID NO: 1308854
aucugagacagaaaggaag

SEQ ID NO: 1308856 - RNA, 19 nt, Artificial Sequence
  Description of Artificial Sequence: Synthetic oligonucleotide
  Sense strand starting at position 3872 of SEQ ID NO: 1241905
acauuuacucgcugacgca

SEQ ID NO: 1308857 - RNA, 19 nt, Artificial Sequence
  Description of Artificial Sequence: Synthetic oligonucleotide
  Antisense strand to SEQ ID NO: 1308856
ugcgucagcgaguaaaugu

SEQ ID NO: 1308858 - RNA, 19 nt, Artificial Sequence
  Description of Artificial Sequence: Synthetic oligonucleotide
  Sense strand starting at position 3873 of SEQ ID NO: 1241905
cauuuacucgcugacgcaa

SEQ ID NO: 1308859 - RNA, 19 nt, Artificial Sequence
  Description of Artificial Sequence: Synthetic oligonucleotide
  Antisense strand to SEQ ID NO: 1308858
uugcgucagcgaguaaaug

SEQ ID NO: 1308860 - RNA, 19 nt, Artificial Sequence
  Description of Artificial Sequence: Synthetic oligonucleotide
  Sense strand starting at position 3920 of SEQ ID NO: 1241905
gaauaucugcuauguggac

SEQ ID NO: 1308861 - RNA, 19 nt, Artificial Sequence
  Description of Artificial Sequence: Synthetic oligonucleotide
  Antisense strand to SEQ ID NO: 1308860
guccacauagcagauauuc

SEQ ID NO: 1308862 - RNA, 19 nt, Artificial Sequence
  Description of Artificial Sequence: Synthetic oligonucleotide
  Sense strand starting at position 26 of SEQ ID NO: 1241906
uaagguguaaagugugaaa

SEQ ID NO: 1308863 - RNA, 19 nt, Artificial Sequence
  Description of Artificial Sequence: Synthetic oligonucleotide
  Antisense strand to SEQ ID NO: 1308862
uuucacacuuuacaccuua

SEQ ID NO: 1308864 - RNA, 19 nt, Artificial Sequence
  Description of Artificial Sequence: Synthetic oligonucleotide
  Sense strand starting at position 213 of SEQ ID NO: 1241906
ggaggauccaagugucaac

SEQ ID NO: 1308865 - RNA, 19 nt, Artificial Sequence
  Description of Artificial Sequence: Synthetic oligonucleotide
  Antisense strand to SEQ ID NO: 1308864
guugacacuuggauccucc

SEQ ID NO: 1308866 - RNA, 19 nt, Artificial Sequence
  Description of Artificial Sequence: Synthetic oligonucleotide
  Sense strand starting at position 259 of SEQ ID NO: 1241906
uuucucuaugugugaaauc

SEQ ID NO: 1308867 - RNA, 19 nt, Artificial Sequence
  Description of Artificial Sequence: Synthetic oligonucleotide
  Antisense strand to SEQ ID NO: 1308866
gauuucacacauagagaaa

SEQ ID NO: 1308868 - RNA, 19 nt, Artificial Sequence
  Description of Artificial Sequence: Synthetic oligonucleotide
  Sense strand starting at position 269 of SEQ ID NO: 1241906
ugugaaauccaauguuauc

SEQ ID NO: 1308869 - RNA, 19 nt, Artificial Sequence
  Description of Artificial Sequence: Synthetic oligonucleotide
  Antisense strand to SEQ ID NO: 1308868
gauaacauuggauuucaca

SEQ ID NO: 1308870 - RNA, 19 nt, Artificial Sequence
  Description of Artificial Sequence: Synthetic oligonucleotide
  Sense strand starting at position 427 of SEQ ID NO: 1241906
gugcuuaaggccgauuacu

SEQ ID NO: 1308871 - RNA, 19 nt, Artificial Sequence
  Description of Artificial Sequence: Synthetic oligonucleotide
  Antisense strand to SEQ ID NO: 1308870
aguaaucggccuuaagcac

SEQ ID NO: 1308872 - RNA, 19 nt, Artificial Sequence
  Description of Artificial Sequence: Synthetic oligonucleotide
  Sense strand starting at position 642 of SEQ ID NO: 1241906
ucaacuucccugugaggaa

SEQ ID NO: 1308873 - RNA, 19 nt, Artificial Sequence
  Description of Artificial Sequence: Synthetic oligonucleotide
  Antisense strand to SEQ ID NO: 1308872
uuccucacagggaaguuga

SEQ ID NO: 1308874 - RNA, 19 nt, Artificial Sequence
  Description of Artificial Sequence: Synthetic oligonucleotide
  Sense strand starting at position 675 of SEQ ID NO: 1241906
gucucagugucaccagaag

SEQ ID NO: 1308875 - RNA, 19 nt, Artificial Sequence
  Description of Artificial Sequence: Synthetic oligonucleotide
  Antisense strand to SEQ ID NO: 1308874
cuucuggugacacugagac

SEQ ID NO: 1308876 - RNA, 19 nt, Artificial Sequence
  Description of Artificial Sequence: Synthetic oligonucleotide
  Sense strand starting at position 908 of SEQ ID NO: 1241906
ugcaucuuccaaggacaga

SEQ ID NO: 1308877 - RNA, 19 nt, Artificial Sequence
  Description of Artificial Sequence: Synthetic oligonucleotide
  Antisense strand to SEQ ID NO: 1308876
ucuguccuuggaagaugca

SEQ ID NO: 1308878 - RNA, 19 nt, Artificial Sequence
  Description of Artificial Sequence: Synthetic oligonucleotide
  Sense strand starting at position 941 of SEQ ID NO: 1241906
gggcuaugagcucaucugu

SEQ ID NO: 1308879 - RNA, 19 nt, Artificial Sequence
  Description of Artificial Sequence: Synthetic oligonucleotide
  Antisense strand to SEQ ID NO: 1308878
acagaugagcucauagccc

SEQ ID NO: 1308880 - RNA, 19 nt, Artificial Sequence
  Description of Artificial Sequence: Synthetic oligonucleotide
  Sense strand starting at position 1146 of SEQ ID NO: 1241906
gggauuucuuucuguuuac

SEQ ID NO: 1308881 - RNA, 19 nt, Artificial Sequence
  Description of Artificial Sequence: Synthetic oligonucleotide
  Antisense strand to SEQ ID NO: 1308880
guaaacagaaagaaauccc

SEQ ID NO: 1308882 - RNA, 19 nt, Artificial Sequence
  Description of Artificial Sequence: Synthetic oligonucleotide
  Sense strand starting at position 1176 of SEQ ID NO: 1241906
auccuuagugccuaggaca

SEQ ID NO: 1308883 - RNA, 19 nt, Artificial Sequence
  Description of Artificial Sequence: Synthetic oligonucleotide
  Antisense strand to SEQ ID NO: 1308882
uguccuaggcacuaaggau

SEQ ID NO: 1308884 - RNA, 19 nt, Artificial Sequence
  Description of Artificial Sequence: Synthetic oligonucleotide
  Sense strand starting at position 1353 of SEQ ID NO: 1241906
uuuagaaacacgugggaaa

SEQ ID NO: 1308885 - RNA, 19 nt, Artificial Sequence
  Description of Artificial Sequence: Synthetic oligonucleotide
  Antisense strand to SEQ ID NO: 1308884
uuucccacguguuucuaaa

SEQ ID NO: 1308886 - RNA, 19 nt, Artificial Sequence
  Description of Artificial Sequence: Synthetic oligonucleotide
  Sense strand starting at position 1791 of SEQ ID NO: 1241906
gugaauggcaaauguguca

SEQ ID NO: 1308887 - RNA, 19 nt, Artificial Sequence
  Description of Artificial Sequence: Synthetic oligonucleotide
  Antisense strand to SEQ ID NO: 1308886
ugacacauuugccauucac

SEQ ID NO: 1308888 - RNA, 19 nt, Artificial Sequence
  Description of Artificial Sequence: Synthetic oligonucleotide
  Sense strand starting at position 2068 of SEQ ID NO: 1241906
ggugguagucaugggucau

SEQ ID NO: 1308889 - RNA, 19 nt, Artificial Sequence
  Description of Artificial Sequence: Synthetic oligonucleotide
  Antisense strand to SEQ ID NO: 1308888
augacccaugacuaccacc

SEQ ID NO: 1308890 - RNA, 19 nt, Artificial Sequence
  Description of Artificial Sequence: Synthetic oligonucleotide
  Sense strand starting at position 2069 of SEQ ID NO: 1241906
gugguagucaugggucaug

SEQ ID NO: 1308891 - RNA, 19 nt, Artificial Sequence
  Description of Artificial Sequence: Synthetic oligonucleotide
  Antisense strand to SEQ ID NO: 1308890
caugacccaugacuaccac

SEQ ID NO: 1308892 - RNA, 19 nt, Artificial Sequence
  Description of Artificial Sequence: Synthetic oligonucleotide
  Sense strand starting at position 2072 of SEQ ID NO: 1241906
guagucaugggucaugcaa

SEQ ID NO: 1308893 - RNA, 19 nt, Artificial Sequence
  Description of Artificial Sequence: Synthetic oligonucleotide
  Antisense strand to SEQ ID NO: 1308892
uugcaugacccaugacuac

SEQ ID NO: 1308894 - RNA, 19 nt, Artificial Sequence
  Description of Artificial Sequence: Synthetic oligonucleotide
  Sense strand starting at position 2103 of SEQ ID NO: 1241906
ccugcucugcaguggaaau

SEQ ID NO: 1308895 - RNA, 19 nt, Artificial Sequence
  Description of Artificial Sequence: Synthetic oligonucleotide
  Antisense strand to SEQ ID NO: 1308894
auuuccacugcagagcagg

SEQ ID NO: 1308896 - RNA, 19 nt, Artificial Sequence
  Description of Artificial Sequence: Synthetic oligonucleotide
  Sense strand starting at position 2104 of SEQ ID NO: 1241906
cugcucugcaguggaaaua

SEQ ID NO: 1308897 - RNA, 19 nt, Artificial Sequence
  Description of Artificial Sequence: Synthetic oligonucleotide
  Antisense strand to SEQ ID NO: 1308896
uauuuccacugcagagcag

SEQ ID NO: 1308898 - RNA, 19 nt, Artificial Sequence
  Description of Artificial Sequence: Synthetic oligonucleotide
  Sense strand starting at position 2105 of SEQ ID NO: 1241906
ugcucugcaguggaaauaa

SEQ ID NO: 1308899 - RNA, 19 nt, Artificial Sequence
  Description of Artificial Sequence: Synthetic oligonucleotide
  Antisense strand to SEQ ID NO: 1308898
uuauuuccacugcagagca

SEQ ID NO: 1308900 - RNA, 19 nt, Artificial Sequence
  Description of Artificial Sequence: Synthetic oligonucleotide
  Sense strand starting at position 2169 of SEQ ID NO: 1241906
ccaggaagcuucucgacga

SEQ ID NO: 1308901 - RNA, 19 nt, Artificial Sequence
  Description of Artificial Sequence: Synthetic oligonucleotide
  Antisense strand to SEQ ID NO: 1308900
ucgucgagaagcuuccugg

SEQ ID NO: 1308902 - RNA, 19 nt, Artificial Sequence
  Description of Artificial Sequence: Synthetic oligonucleotide
  Sense strand starting at position 2173 of SEQ ID NO: 1241906
gaagcuucucgacgagcca

SEQ ID NO: 1308903 - RNA, 19 nt, Artificial Sequence
  Description of Artificial Sequence: Synthetic oligonucleotide
  Antisense strand to SEQ ID NO: 1308902
uggcucgucgagaagcuuc

SEQ ID NO: 1308904 - RNA, 19 nt, Artificial Sequence
  Description of Artificial Sequence: Synthetic oligonucleotide
  Sense strand starting at position 2248 of SEQ ID NO: 1241906
ugcuauaccucuuugggaa

SEQ ID NO: 1308905 - RNA, 19 nt, Artificial Sequence
  Description of Artificial Sequence: Synthetic oligonucleotide
  Antisense strand to SEQ ID NO: 1308904
uucccaaagagguauagca

SEQ ID NO: 1308906 - RNA, 19 nt, Artificial Sequence
  Description of Artificial Sequence: Synthetic oligonucleotide
  Sense strand starting at position 2249 of SEQ ID NO: 1241906
gcuauaccucuuugggaac

SEQ ID NO: 1308907 - RNA, 19 nt, Artificial Sequence
  Description of Artificial Sequence: Synthetic oligonucleotide
  Antisense strand to SEQ ID NO: 1308906
guucccaaagagguauagc

SEQ ID NO: 1308908 - RNA, 19 nt, Artificial Sequence
  Description of Artificial Sequence: Synthetic oligonucleotide
  Sense strand starting at position 2261 of SEQ ID NO: 1241906
ugggaaccuugagaagaaa

SEQ ID NO: 1308909 - RNA, 19 nt, Artificial Sequence
  Description of Artificial Sequence: Synthetic oligonucleotide
  Antisense strand to SEQ ID NO: 1308908
uuucuucucaagguuccca

SEQ ID NO: 1308910 - RNA, 19 nt, Artificial Sequence
  Description of Artificial Sequence: Synthetic oligonucleotide
  Sense strand starting at position 2446 of SEQ ID NO: 1241906
acaagugguccugauacca

SEQ ID NO: 1308911 - RNA, 19 nt, Artificial Sequence
  Description of Artificial Sequence: Synthetic oligonucleotide
  Antisense strand to SEQ ID NO: 1308910
ugguaucaggaccacuugu

SEQ ID NO: 1308912 - RNA, 19 nt, Artificial Sequence
  Description of Artificial Sequence: Synthetic oligonucleotide
  Sense strand starting at position 2524 of SEQ ID NO: 1241906
aagcguccucccugggaaa

SEQ ID NO: 1308913 - RNA, 19 nt, Artificial Sequence
  Description of Artificial Sequence: Synthetic oligonucleotide
  Antisense strand to SEQ ID NO: 1308912
uuucccagggaggacgcuu

SEQ ID NO: 1308914 - RNA, 19 nt, Artificial Sequence
  Description of Artificial Sequence: Synthetic oligonucleotide
  Sense strand starting at position 2526 of SEQ ID NO: 1241906
gcguccucccugggaaagu

SEQ ID NO: 1308915 - RNA, 19 nt, Artificial Sequence
  Description of Artificial Sequence: Synthetic oligonucleotide
  Antisense strand to SEQ ID NO: 1308914
acuuucccagggaggacgc

SEQ ID NO: 1308916 - RNA, 19 nt, Artificial Sequence
  Description of Artificial Sequence: Synthetic oligonucleotide
  Sense strand starting at position 2543 of SEQ ID NO: 1241906
guauguuuccugggcugga

SEQ ID NO: 1308917 - RNA, 19 nt, Artificial Sequence
  Description of Artificial Sequence: Synthetic oligonucleotide
  Antisense strand to SEQ ID NO: 1308916
uccagcccaggaaacauac

SEQ ID NO: 1308918 - RNA, 19 nt, Artificial Sequence
  Description of Artificial Sequence: Synthetic oligonucleotide
  Sense strand starting at position 2844 of SEQ ID NO: 1241906
caucuaggugcuuaggaaa

SEQ ID NO: 1308919 - RNA, 19 nt, Artificial Sequence
  Description of Artificial Sequence: Synthetic oligonucleotide
  Antisense strand to SEQ ID NO: 1308918
uuuccuaagcaccuagaug

SEQ ID NO: 1308920 - RNA, 19 nt, Artificial Sequence
  Description of Artificial Sequence: Synthetic oligonucleotide
  Sense strand starting at position 2935 of SEQ ID NO: 1241906
uggagcuguacugauugua

SEQ ID NO: 1308921 - RNA, 19 nt, Artificial Sequence
  Description of Artificial Sequence: Synthetic oligonucleotide
  Antisense strand to SEQ ID NO: 1308920
uacaaucaguacagcucca

SEQ ID NO: 1308922 - RNA, 19 nt, Artificial Sequence
  Description of Artificial Sequence: Synthetic oligonucleotide
  Sense strand starting at position 2938 of SEQ ID NO: 1241906
agcuguacugauuguaugu

SEQ ID NO: 1308923 - RNA, 19 nt, Artificial Sequence
  Description of Artificial Sequence: Synthetic oligonucleotide
  Antisense strand to SEQ ID NO: 1308922
acauacaaucaguacagcu

SEQ ID NO: 1308924 - RNA, 19 nt, Artificial Sequence
  Description of Artificial Sequence: Synthetic oligonucleotide
  Sense strand starting at position 2985 of SEQ ID NO: 1241906
auucucagucuuugcugau

SEQ ID NO: 1308925 - RNA, 19 nt, Artificial Sequence
  Description of Artificial Sequence: Synthetic oligonucleotide
  Antisense strand to SEQ ID NO: 1308924
aucagcaaagacugagaau

SEQ ID NO: 1308926 - RNA, 19 nt, Artificial Sequence
  Description of Artificial Sequence: Synthetic oligonucleotide
  Sense strand starting at position 3033 of SEQ ID NO: 1241906
cgcuguuggugacuagaau

SEQ ID NO: 1308927 - RNA, 19 nt, Artificial Sequence
  Description of Artificial Sequence: Synthetic oligonucleotide
  Antisense strand to SEQ ID NO: 1308926
auucuagucaccaacagcg

SEQ ID NO: 1308928 - RNA, 19 nt, Artificial Sequence
  Description of Artificial Sequence: Synthetic oligonucleotide
  Sense strand starting at position 3034 of SEQ ID NO: 1241906
gcuguuggugacuagaauc

SEQ ID NO: 1308929 - RNA, 19 nt, Artificial Sequence
  Description of Artificial Sequence: Synthetic oligonucleotide
  Antisense strand to SEQ ID NO: 1308928
gauucuagucaccaacagc

SEQ ID NO: 1308930 - RNA, 19 nt, Artificial Sequence
  Description of Artificial Sequence: Synthetic oligonucleotide
  Sense strand starting at position 3144 of SEQ ID NO: 1241906
caugaugccugagccauau

SEQ ID NO: 1308931 - RNA, 19 nt, Artificial Sequence
  Description of Artificial Sequence: Synthetic oligonucleotide
  Antisense strand to SEQ ID NO: 1308930
auauggcucaggcaucaug

SEQ ID NO: 1308932 - RNA, 19 nt, Artificial Sequence
  Description of Artificial Sequence: Synthetic oligonucleotide
  Sense strand starting at position 3757 of SEQ ID NO: 1241906
aguuuauuguagccucaac

SEQ ID NO: 1308933 - RNA, 19 nt, Artificial Sequence
  Description of Artificial Sequence: Synthetic oligonucleotide
  Antisense strand to SEQ ID NO: 1308932
guugaggcuacaauaaacu

SEQ ID NO: 1308934 - RNA, 19 nt, Artificial Sequence
  Description of Artificial Sequence: Synthetic oligonucleotide
  Sense strand starting at position 3938 of SEQ ID NO: 1241906
gaucuucuugugugucuua

SEQ ID NO: 1308935 - RNA, 19 nt, Artificial Sequence
  Description of Artificial Sequence: Synthetic oligonucleotide
  Antisense strand to SEQ ID NO: 1308934
uaagacacacaagaagauc

SEQ ID NO: 1308936 - RNA, 19 nt, Artificial Sequence
  Description of Artificial Sequence: Synthetic oligonucleotide
  Sense strand starting at position 3947 of SEQ ID NO: 1241906
gugugucuuauguugcaau

SEQ ID NO: 1308937 - RNA, 19 nt, Artificial Sequence
  Description of Artificial Sequence: Synthetic oligonucleotide
  Antisense strand to SEQ ID NO: 1308936
auugcaacauaagacacac

SEQ ID NO: 1308938 - RNA, 19 nt, Artificial Sequence
  Description of Artificial Sequence: Synthetic oligonucleotide
  Sense strand starting at position 3949 of SEQ ID NO: 1241906
gugucuuauguugcaaugu

SEQ ID NO: 1308939 - RNA, 19 nt, Artificial Sequence
  Description of Artificial Sequence: Synthetic oligonucleotide
  Antisense strand to SEQ ID NO: 1308938
acauugcaacauaagacac

SEQ ID NO: 1308940 - RNA, 19 nt, Artificial Sequence
  Description of Artificial Sequence: Synthetic oligonucleotide
  Sense strand starting at position 3983 of SEQ ID NO: 1241906
ugggaaucuugacaucauu

SEQ ID NO: 1308941 - RNA, 19 nt, Artificial Sequence
  Description of Artificial Sequence: Synthetic oligonucleotide
  Antisense strand to SEQ ID NO: 1308940
aaugaugucaagauuccca

SEQ ID NO: 1308942 - RNA, 19 nt, Artificial Sequence
  Description of Artificial Sequence: Synthetic oligonucleotide
  Sense strand starting at position 165 of SEQ ID NO: 1241907
aguucuguuccuugggcaa

SEQ ID NO: 1308943 - RNA, 19 nt, Artificial Sequence
  Description of Artificial Sequence: Synthetic oligonucleotide
  Antisense strand to SEQ ID NO: 1308942
uugcccaaggaacagaacu

SEQ ID NO: 1308944 - RNA, 19 nt, Artificial Sequence
  Description of Artificial Sequence: Synthetic oligonucleotide
  Sense strand starting at position 189 of SEQ ID NO: 1241907
cuucuuugagucuaucuca

SEQ ID NO: 1308945 - RNA, 19 nt, Artificial Sequence
  Description of Artificial Sequence: Synthetic oligonucleotide
  Antisense strand to SEQ ID NO: 1308944
ugagauagacucaaagaag

SEQ ID NO: 1308946 - RNA, 19 nt, Artificial Sequence
  Description of Artificial Sequence: Synthetic oligonucleotide
  Sense strand starting at position 196 of SEQ ID NO: 1241907
gagucuaucucaccuguga

SEQ ID NO: 1308947 - RNA, 19 nt, Artificial Sequence
  Description of Artificial Sequence: Synthetic oligonucleotide
  Antisense strand to SEQ ID NO: 1308946
ucacaggugagauagacuc

SEQ ID NO: 1308948 - RNA, 19 nt, Artificial Sequence
  Description of Artificial Sequence: Synthetic oligonucleotide
  Sense strand starting at position 230 of SEQ ID NO: 1241907
agcaccuacuuuguagaua

SEQ ID NO: 1308949 - RNA, 19 nt, Artificial Sequence
  Description of Artificial Sequence: Synthetic oligonucleotide
  Antisense strand to SEQ ID NO: 1308948
uaucuacaaaguaggugcu

SEQ ID NO: 1308950 - RNA, 19 nt, Artificial Sequence
  Description of Artificial Sequence: Synthetic oligonucleotide
  Sense strand starting at position 309 of SEQ ID NO: 1241907
gugguagugccugaggagu

SEQ ID NO: 1308951 - RNA, 19 nt, Artificial Sequence
  Description of Artificial Sequence: Synthetic oligonucleotide
  Antisense strand to SEQ ID NO: 1308950
acuccucaggcacuaccac

SEQ ID NO: 1308952 - RNA, 19 nt, Artificial Sequence
  Description of Artificial Sequence: Synthetic oligonucleotide
  Sense strand starting at position 413 of SEQ ID NO: 1241907
accaaaucugaugguguau

SEQ ID NO: 1308953 - RNA, 19 nt, Artificial Sequence
  Description of Artificial Sequence: Synthetic oligonucleotide
  Antisense strand to SEQ ID NO: 1308952
auacaccaucagauuuggu

SEQ ID NO: 1308954 - RNA, 19 nt, Artificial Sequence
  Description of Artificial Sequence: Synthetic oligonucleotide
  Sense strand starting at position 522 of SEQ ID NO: 1241907
gggcaaguuagucaagucu

SEQ ID NO: 1308955 - RNA, 19 nt, Artificial Sequence
  Description of Artificial Sequence: Synthetic oligonucleotide
  Antisense strand to SEQ ID NO: 1308954
agacuugacuaacuugccc

SEQ ID NO: 1308956 - RNA, 19 nt, Artificial Sequence
  Description of Artificial Sequence: Synthetic oligonucleotide
  Sense strand starting at position 595 of SEQ ID NO: 1241907
uguugugaggaaggaauua

SEQ ID NO: 1308957 - RNA, 19 nt, Artificial Sequence
  Description of Artificial Sequence: Synthetic oligonucleotide
  Antisense strand to SEQ ID NO: 1308956
uaauuccuuccucacaaca

SEQ ID NO: 1308958 - RNA, 19 nt, Artificial Sequence
  Description of Artificial Sequence: Synthetic oligonucleotide
  Sense strand starting at position 606 of SEQ ID NO: 1241907
aggaauuaaucauggaaag

SEQ ID NO: 1308959 - RNA, 19 nt, Artificial Sequence
  Description of Artificial Sequence: Synthetic oligonucleotide
  Antisense strand to SEQ ID NO: 1308958
cuuuccaugauuaauuccu

SEQ ID NO: 1308960 - RNA, 19 nt, Artificial Sequence
  Description of Artificial Sequence: Synthetic oligonucleotide
  Sense strand starting at position 667 of SEQ ID NO: 1241907
cguaguugucauuacugca

SEQ ID NO: 1308961 - RNA, 19 nt, Artificial Sequence
  Description of Artificial Sequence: Synthetic oligonucleotide
  Antisense strand to SEQ ID NO: 1308960
ugcaguaaugacaacuacg

SEQ ID NO: 1308962 - RNA, 19 nt, Artificial Sequence
  Description of Artificial Sequence: Synthetic oligonucleotide
  Sense strand starting at position 747 of SEQ ID NO: 1241907
ugcauaugagcucacacau

SEQ ID NO: 1308963 - RNA, 19 nt, Artificial Sequence
  Description of Artificial Sequence: Synthetic oligonucleotide
  Antisense strand to SEQ ID NO: 1308962
augugugagcucauaugca

SEQ ID NO: 1308964 - RNA, 19 nt, Artificial Sequence
  Description of Artificial Sequence: Synthetic oligonucleotide
  Sense strand starting at position 787 of SEQ ID NO: 1241907
auacauaugcaugaguaca

SEQ ID NO: 1308965 - RNA, 19 nt, Artificial Sequence
  Description of Artificial Sequence: Synthetic oligonucleotide
  Antisense strand to SEQ ID NO: 1308964
uguacucaugcauauguau

SEQ ID NO: 1308966 - RNA, 19 nt, Artificial Sequence
  Description of Artificial Sequence: Synthetic oligonucleotide
  Sense strand starting at position 932 of SEQ ID NO: 1241907
ccuguauccuggucuuuag

SEQ ID NO: 1308967 - RNA, 19 nt, Artificial Sequence
  Description of Artificial Sequence: Synthetic oligonucleotide
  Antisense strand to SEQ ID NO: 1308966
cuaaagaccaggauacagg

SEQ ID NO: 1308968 - RNA, 19 nt, Artificial Sequence
  Description of Artificial Sequence: Synthetic oligonucleotide
  Sense strand starting at position 961 of SEQ ID NO: 1241907
ggcuccaggguccagaaau

SEQ ID NO: 1308969 - RNA, 19 nt, Artificial Sequence
  Description of Artificial Sequence: Synthetic oligonucleotide
  Antisense strand to SEQ ID NO: 1308968
auuucuggacccuggagcc

SEQ ID NO: 1308970 - RNA, 19 nt, Artificial Sequence
  Description of Artificial Sequence: Synthetic oligonucleotide
  Sense strand starting at position 1057 of SEQ ID NO: 1241907
accagugacugcucugacu

SEQ ID NO: 1308971 - RNA, 19 nt, Artificial Sequence
  Description of Artificial Sequence: Synthetic oligonucleotide
  Antisense strand to SEQ ID NO: 1308970
agucagagcagucacuggu

SEQ ID NO: 1308972 - RNA, 19 nt, Artificial Sequence
  Description of Artificial Sequence: Synthetic oligonucleotide
  Sense strand starting at position 1059 of SEQ ID NO: 1241907
cagugacugcucugacuuu

SEQ ID NO: 1308973 - RNA, 19 nt, Artificial Sequence
  Description of Artificial Sequence: Synthetic oligonucleotide
  Antisense strand to SEQ ID NO: 1308972
aaagucagagcagucacug

SEQ ID NO: 1308974 - RNA, 19 nt, Artificial Sequence
  Description of Artificial Sequence: Synthetic oligonucleotide
  Sense strand starting at position 1116 of SEQ ID NO: 1241907
aagaucuucuggcuaaggu

SEQ ID NO: 1308975 - RNA, 19 nt, Artificial Sequence
  Description of Artificial Sequence: Synthetic oligonucleotide
  Antisense strand to SEQ ID NO: 1308974
accuuagccagaagaucuu

SEQ ID NO: 1308976 - RNA, 19 nt, Artificial Sequence
  Description of Artificial Sequence: Synthetic oligonucleotide
  Sense strand starting at position 1117 of SEQ ID NO: 1241907
agaucuucuggcuaagguu

SEQ ID NO: 1308977 - RNA, 19 nt, Artificial Sequence
  Description of Artificial Sequence: Synthetic oligonucleotide
  Antisense strand to SEQ ID NO: 1308976
aaccuuagccagaagaucu

SEQ ID NO: 1308978 - RNA, 19 nt, Artificial Sequence
  Description of Artificial Sequence: Synthetic oligonucleotide
  Sense strand starting at position 1685 of SEQ ID NO: 1241907
cucccugugucuuccagau

SEQ ID NO: 1308979 - RNA, 19 nt, Artificial Sequence
  Description of Artificial Sequence: Synthetic oligonucleotide
  Antisense strand to SEQ ID NO: 1308978
aucuggaagacacagggag

SEQ ID NO: 1308980 - RNA, 19 nt, Artificial Sequence
  Description of Artificial Sequence: Synthetic oligonucleotide
  Sense strand starting at position 1739 of SEQ ID NO: 1241907
acuggagcgaaaugucaau

SEQ ID NO: 1308981 - RNA, 19 nt, Artificial Sequence
  Description of Artificial Sequence: Synthetic oligonucleotide
  Antisense strand to SEQ ID NO: 1308980
auugacauuucgcuccagu

SEQ ID NO: 1308982 - RNA, 19 nt, Artificial Sequence
  Description of Artificial Sequence: Synthetic oligonucleotide
  Sense strand starting at position 1746 of SEQ ID NO: 1241907
cgaaaugucaauugagaac

SEQ ID NO: 1308983 - RNA, 19 nt, Artificial Sequence
  Description of Artificial Sequence: Synthetic oligonucleotide
  Antisense strand to SEQ ID NO: 1308982
guucucaauugacauuucg

SEQ ID NO: 1308984 - RNA, 19 nt, Artificial Sequence
  Description of Artificial Sequence: Synthetic oligonucleotide
  Sense strand starting at position 1765 of SEQ ID NO: 1241907
ugcagacaacugugucagu

SEQ ID NO: 1308985 - RNA, 19 nt, Artificial Sequence
  Description of Artificial Sequence: Synthetic oligonucleotide
  Antisense strand to SEQ ID NO: 1308984
acugacacaguugucugca

SEQ ID NO: 1308986 - RNA, 19 nt, Artificial Sequence
  Description of Artificial Sequence: Synthetic oligonucleotide
  Sense strand starting at position 1994 of SEQ ID NO: 1241907
ggauuaugaccaugacugu

SEQ ID NO: 1308987 - RNA, 19 nt, Artificial Sequence
  Description of Artificial Sequence: Synthetic oligonucleotide
  Antisense strand to SEQ ID NO: 1308986
acagucauggucauaaucc

SEQ ID NO: 1308988 - RNA, 19 nt, Artificial Sequence
  Description of Artificial Sequence: Synthetic oligonucleotide
  Sense strand starting at position 2037 of SEQ ID NO: 1241907
gggcauuuguccucccauu

SEQ ID NO: 1308989 - RNA, 19 nt, Artificial Sequence
  Description of Artificial Sequence: Synthetic oligonucleotide
  Antisense strand to SEQ ID NO: 1308988
aaugggaggacaaaugccc

SEQ ID NO: 1308990 - RNA, 19 nt, Artificial Sequence
  Description of Artificial Sequence: Synthetic oligonucleotide
  Sense strand starting at position 2247 of SEQ ID NO: 1241907
gucugaaugugaguuccaa

SEQ ID NO: 1308991 - RNA, 19 nt, Artificial Sequence
  Description of Artificial Sequence: Synthetic oligonucleotide
  Antisense strand to SEQ ID NO: 1308990
uuggaacucacauucagac

SEQ ID NO: 1308992 - RNA, 19 nt, Artificial Sequence
  Description of Artificial Sequence: Synthetic oligonucleotide
  Sense strand starting at position 2274 of SEQ ID NO: 1241907
cuuacugagcucugugaac

SEQ ID NO: 1308993 - RNA, 19 nt, Artificial Sequence
  Description of Artificial Sequence: Synthetic oligonucleotide
  Antisense strand to SEQ ID NO: 1308992
guucacagagcucaguaag

SEQ ID NO: 1308994 - RNA, 19 nt, Artificial Sequence
  Description of Artificial Sequence: Synthetic oligonucleotide
  Sense strand starting at position 2380 of SEQ ID NO: 1241907
caaguaucgcgaugacaca

SEQ ID NO: 1308995 - RNA, 19 nt, Artificial Sequence
  Description of Artificial Sequence: Synthetic oligonucleotide
  Antisense strand to SEQ ID NO: 1308994
ugugucaucgcgauacuug

SEQ ID NO: 1308996 - RNA, 19 nt, Artificial Sequence
  Description of Artificial Sequence: Synthetic oligonucleotide
  Sense strand starting at position 2381 of SEQ ID NO: 1241907
aaguaucgcgaugacacau

SEQ ID NO: 1308997 - RNA, 19 nt, Artificial Sequence
  Description of Artificial Sequence: Synthetic oligonucleotide
  Antisense strand to SEQ ID NO: 1308996
augugucaucgcgauacuu

SEQ ID NO: 1308998 - RNA, 19 nt, Artificial Sequence
  Description of Artificial Sequence: Synthetic oligonucleotide
  Sense strand starting at position 2387 of SEQ ID NO: 1241907
cgcgaugacacaugugaaa

SEQ ID NO: 1308999 - RNA, 19 nt, Artificial Sequence
  Description of Artificial Sequence: Synthetic oligonucleotide
  Antisense strand to SEQ ID NO: 1308998
uuucacaugugucaucgcg

SEQ ID NO: 1309000 - RNA, 19 nt, Artificial Sequence
  Description of Artificial Sequence: Synthetic oligonucleotide
  Sense strand starting at position 2415 of SEQ ID NO: 1241907
uaagguguaaagugugaaa

SEQ ID NO: 1309001 - RNA, 19 nt, Artificial Sequence
  Description of Artificial Sequence: Synthetic oligonucleotide
  Antisense strand to SEQ ID NO: 1309000
uuucacacuuuacaccuua

SEQ ID NO: 1309002 - RNA, 19 nt, Artificial Sequence
  Description of Artificial Sequence: Synthetic oligonucleotide
  Sense strand starting at position 2602 of SEQ ID NO: 1241907
ggaggauccaagugucaac

SEQ ID NO: 1309003 - RNA, 19 nt, Artificial Sequence
  Description of Artificial Sequence: Synthetic oligonucleotide
  Antisense strand to SEQ ID NO: 1309002
guugacacuuggauccucc

SEQ ID NO: 1309004 - RNA, 19 nt, Artificial Sequence
  Description of Artificial Sequence: Synthetic oligonucleotide
  Sense strand starting at position 2648 of SEQ ID NO: 1241907
uuucucuaugugugaaauc

SEQ ID NO: 1309005 - RNA, 19 nt, Artificial Sequence
  Description of Artificial Sequence: Synthetic oligonucleotide
  Antisense strand to SEQ ID NO: 1309004
gauuucacacauagagaaa

SEQ ID NO: 1309006 - RNA, 19 nt, Artificial Sequence
  Description of Artificial Sequence: Synthetic oligonucleotide
  Sense strand starting at position 2658 of SEQ ID NO: 1241907
ugugaaauccaauguuauc

SEQ ID NO: 1309007 - RNA, 19 nt, Artificial Sequence
  Description of Artificial Sequence: Synthetic oligonucleotide
  Antisense strand to SEQ ID NO: 1309006
gauaacauuggauuucaca

SEQ ID NO: 1309008 - RNA, 19 nt, Artificial Sequence
  Description of Artificial Sequence: Synthetic oligonucleotide
  Sense strand starting at position 2816 of SEQ ID NO: 1241907
gugcuuaaggccgauuacu

SEQ ID NO: 1309009 - RNA, 19 nt, Artificial Sequence
  Description of Artificial Sequence: Synthetic oligonucleotide
  Antisense strand to SEQ ID NO: 1309008
aguaaucggccuuaagcac

SEQ ID NO: 1309010 - RNA, 19 nt, Artificial Sequence
  Description of Artificial Sequence: Synthetic oligonucleotide
  Sense strand starting at position 3031 of SEQ ID NO: 1241907
ucaacuucccugugaggaa

SEQ ID NO: 1309011 - RNA, 19 nt, Artificial Sequence
  Description of Artificial Sequence: Synthetic oligonucleotide
  Antisense strand to SEQ ID NO: 1309010
uuccucacagggaaguuga

SEQ ID NO: 1309012 - RNA, 19 nt, Artificial Sequence
  Description of Artificial Sequence: Synthetic oligonucleotide
  Sense strand starting at position 3064 of SEQ ID NO: 1241907
gucucagugucaccagaag

SEQ ID NO: 1309013 - RNA, 19 nt, Artificial Sequence
  Description of Artificial Sequence: Synthetic oligonucleotide
  Antisense strand to SEQ ID NO: 1309012
cuucuggugacacugagac

SEQ ID NO: 1309014 - RNA, 19 nt, Artificial Sequence
  Description of Artificial Sequence: Synthetic oligonucleotide
  Sense strand starting at position 3297 of SEQ ID NO: 1241907
ugcaucuuccaaggacaga

SEQ ID NO: 1309015 - RNA, 19 nt, Artificial Sequence
  Description of Artificial Sequence: Synthetic oligonucleotide
  Antisense strand to SEQ ID NO: 1309014
ucuguccuuggaagaugca

SEQ ID NO: 1309016 - RNA, 19 nt, Artificial Sequence
  Description of Artificial Sequence: Synthetic oligonucleotide
  Sense strand starting at position 3330 of SEQ ID NO: 1241907
gggcuaugagcucaucugu

SEQ ID NO: 1309017 - RNA, 19 nt, Artificial Sequence
  Description of Artificial Sequence: Synthetic oligonucleotide
  Antisense strand to SEQ ID NO: 1309016
acagaugagcucauagccc

SEQ ID NO: 1309018 - RNA, 19 nt, Artificial Sequence
  Description of Artificial Sequence: Synthetic oligonucleotide
  Sense strand starting at position 3565 of SEQ ID NO: 1241907
auccuuagugccuaggaca

SEQ ID NO: 1309019 - RNA, 19 nt, Artificial Sequence
  Description of Artificial Sequence: Synthetic oligonucleotide
  Antisense strand to SEQ ID NO: 1309018
uguccuaggcacuaaggau

SEQ ID NO: 1309020 - RNA, 19 nt, Artificial Sequence
  Description of Artificial Sequence: Synthetic oligonucleotide
  Sense strand starting at position 3742 of SEQ ID NO: 1241907
uuuagaaacacgugggaaa

SEQ ID NO: 1309021 - RNA, 19 nt, Artificial Sequence
  Description of Artificial Sequence: Synthetic oligonucleotide
  Antisense strand to SEQ ID NO: 1309020
uuucccacguguuucuaaa

SEQ ID NO: 1309022 - RNA, 19 nt, Artificial Sequence
  Description of Artificial Sequence: Synthetic oligonucleotide
  Sense strand starting at position 81 of SEQ ID NO: 1241908
ccuacucugcccgagaguu

SEQ ID NO: 1309023 - RNA, 19 nt, Artificial Sequence
  Description of Artificial Sequence: Synthetic oligonucleotide
  Antisense strand to SEQ ID NO: 1309022
aacucucgggcagaguagg

SEQ ID NO: 1309024 - RNA, 19 nt, Artificial Sequence
  Description of Artificial Sequence: Synthetic oligonucleotide
  Sense strand starting at position 156 of SEQ ID NO: 1241908
ccuaucauagcaugucuau

SEQ ID NO: 1309025 - RNA, 19 nt, Artificial Sequence
  Description of Artificial Sequence: Synthetic oligonucleotide
  Antisense strand to SEQ ID NO: 1309024
auagacaugcuaugauagg

SEQ ID NO: 1309026 - RNA, 19 nt, Artificial Sequence
  Description of Artificial Sequence: Synthetic oligonucleotide
  Sense strand starting at position 162 of SEQ ID NO: 1241908
auagcaugucuauguuaug

SEQ ID NO: 1309027 - RNA, 19 nt, Artificial Sequence
  Description of Artificial Sequence: Synthetic oligonucleotide
  Antisense strand to SEQ ID NO: 1309026
cauaacauagacaugcuau

SEQ ID NO: 1309028 - RNA, 19 nt, Artificial Sequence
  Description of Artificial Sequence: Synthetic oligonucleotide
  Sense strand starting at position 212 of SEQ ID NO: 1241908
agcugagggccuuaaucuu

SEQ ID NO: 1309029 - RNA, 19 nt, Artificial Sequence
  Description of Artificial Sequence: Synthetic oligonucleotide
  Antisense strand to SEQ ID NO: 1309028
aagauuaaggcccucagcu

SEQ ID NO: 1309030 - RNA, 19 nt, Artificial Sequence
  Description of Artificial Sequence: Synthetic oligonucleotide
  Sense strand starting at position 255 of SEQ ID NO: 1241908
ggcugucaacaggaaaguu

SEQ ID NO: 1309031 - RNA, 19 nt, Artificial Sequence
  Description of Artificial Sequence: Synthetic oligonucleotide
  Antisense strand to SEQ ID NO: 1309030
aacuuuccuguugacagcc

SEQ ID NO: 1309032 - RNA, 19 nt, Artificial Sequence
  Description of Artificial Sequence: Synthetic oligonucleotide
  Sense strand starting at position 373 of SEQ ID NO: 1241908
ugugaagauuaccaaagaa

SEQ ID NO: 1309033 - RNA, 19 nt, Artificial Sequence
  Description of Artificial Sequence: Synthetic oligonucleotide
  Antisense strand to SEQ ID NO: 1309032
uucuuugguaaucuucaca

SEQ ID NO: 1309034 - RNA, 19 nt, Artificial Sequence
  Description of Artificial Sequence: Synthetic oligonucleotide
  Sense strand starting at position 451 of SEQ ID NO: 1241908
agaaguugcuaagucauaa

SEQ ID NO: 1309035 - RNA, 19 nt, Artificial Sequence
  Description of Artificial Sequence: Synthetic oligonucleotide
  Antisense strand to SEQ ID NO: 1309034
uuaugacuuagcaacuucu

SEQ ID NO: 1309036 - RNA, 19 nt, Artificial Sequence
  Description of Artificial Sequence: Synthetic oligonucleotide
  Sense strand starting at position 506 of SEQ ID NO: 1241908
aggauuauuuaguagcaag

SEQ ID NO: 1309037 - RNA, 19 nt, Artificial Sequence
  Description of Artificial Sequence: Synthetic oligonucleotide
  Antisense strand to SEQ ID NO: 1309036
cuugcuacuaaauaauccu

SEQ ID NO: 1309038 - RNA, 19 nt, Artificial Sequence
  Description of Artificial Sequence: Synthetic oligonucleotide
  Sense strand starting at position 518 of SEQ ID NO: 1241908
uagcaaguaugauuacagu

SEQ ID NO: 1309039 - RNA, 19 nt, Artificial Sequence
  Description of Artificial Sequence: Synthetic oligonucleotide
  Antisense strand to SEQ ID NO: 1309038
acuguaaucauacuugcua

SEQ ID NO: 1309040 - RNA, 19 nt, Artificial Sequence
  Description of Artificial Sequence: Synthetic oligonucleotide
  Sense strand starting at position 742 of SEQ ID NO: 1241908
auggaucaacuauguccaa

SEQ ID NO: 1309041 - RNA, 19 nt, Artificial Sequence
  Description of Artificial Sequence: Synthetic oligonucleotide
  Antisense strand to SEQ ID NO: 1309040
uuggacauaguugauccau

SEQ ID NO: 1309042 - RNA, 19 nt, Artificial Sequence
  Description of Artificial Sequence: Synthetic oligonucleotide
  Sense strand starting at position 762 of SEQ ID NO: 1241908
acacaagugugucucacau

SEQ ID NO: 1309043 - RNA, 19 nt, Artificial Sequence
  Description of Artificial Sequence: Synthetic oligonucleotide
  Antisense strand to SEQ ID NO: 1309042
augugagacacacuugugu

SEQ ID NO: 1309044 - RNA, 19 nt, Artificial Sequence
  Description of Artificial Sequence: Synthetic oligonucleotide
  Sense strand starting at position 768 of SEQ ID NO: 1241908
gugugucucacauauagcu

SEQ ID NO: 1309045 - RNA, 19 nt, Artificial Sequence
  Description of Artificial Sequence: Synthetic oligonucleotide
  Antisense strand to SEQ ID NO: 1309044
agcuauaugugagacacac

SEQ ID NO: 1309046 - RNA, 19 nt, Artificial Sequence
  Description of Artificial Sequence: Synthetic oligonucleotide
  Sense strand starting at position 824 of SEQ ID NO: 1241908
ggcagucauagcugauuau

SEQ ID NO: 1309047 - RNA, 19 nt, Artificial Sequence
  Description of Artificial Sequence: Synthetic oligonucleotide
  Antisense strand to SEQ ID NO: 1309046
auaaucagcuaugacugcc

SEQ ID NO: 1309048 - RNA, 19 nt, Artificial Sequence
  Description of Artificial Sequence: Synthetic oligonucleotide
  Sense strand starting at position 825 of SEQ ID NO: 1241908
gcagucauagcugauuauu

SEQ ID NO: 1309049 - RNA, 19 nt, Artificial Sequence
  Description of Artificial Sequence: Synthetic oligonucleotide
  Antisense strand to SEQ ID NO: 1309048
aauaaucagcuaugacugc

SEQ ID NO: 1309050 - RNA, 19 nt, Artificial Sequence
  Description of Artificial Sequence: Synthetic oligonucleotide
  Sense strand starting at position 834 of SEQ ID NO: 1241908
gcugauuauuuaguuauuc

SEQ ID NO: 1309051 - RNA, 19 nt, Artificial Sequence
  Description of Artificial Sequence: Synthetic oligonucleotide
  Antisense strand to SEQ ID NO: 1309050
gaauaacuaaauaaucagc

SEQ ID NO: 1309052 - RNA, 19 nt, Artificial Sequence
  Description of Artificial Sequence: Synthetic oligonucleotide
  Sense strand starting at position 932 of SEQ ID NO: 1241908
ggcggcuucguucuuuaaa

SEQ ID NO: 1309053 - RNA, 19 nt, Artificial Sequence
  Description of Artificial Sequence: Synthetic oligonucleotide
  Antisense strand to SEQ ID NO: 1309052
uuuaaagaacgaagccgcc

SEQ ID NO: 1309054 - RNA, 19 nt, Artificial Sequence
  Description of Artificial Sequence: Synthetic oligonucleotide
  Sense strand starting at position 935 of SEQ ID NO: 1241908
ggcuucguucuuuaaauaa

SEQ ID NO: 1309055 - RNA, 19 nt, Artificial Sequence
  Description of Artificial Sequence: Synthetic oligonucleotide
  Antisense strand to SEQ ID NO: 1309054
uuauuuaaagaacgaagcc

SEQ ID NO: 1309056 - RNA, 19 nt, Artificial Sequence
  Description of Artificial Sequence: Synthetic oligonucleotide
  Sense strand starting at position 960 of SEQ ID NO: 1241908
uaauauugaucagugugca

SEQ ID NO: 1309057 - RNA, 19 nt, Artificial Sequence
  Description of Artificial Sequence: Synthetic oligonucleotide
  Antisense strand to SEQ ID NO: 1309056
ugcacacugaucaauauua

SEQ ID NO: 1309058 - RNA, 19 nt, Artificial Sequence
  Description of Artificial Sequence: Synthetic oligonucleotide
  Sense strand starting at position 961 of SEQ ID NO: 1241908
aauauugaucagugugcac

SEQ ID NO: 1309059 - RNA, 19 nt, Artificial Sequence
  Description of Artificial Sequence: Synthetic oligonucleotide
  Antisense strand to SEQ ID NO: 1309058
gugcacacugaucaauauu

SEQ ID NO: 1309060 - RNA, 19 nt, Artificial Sequence
  Description of Artificial Sequence: Synthetic oligonucleotide
  Sense strand starting at position 968 of SEQ ID NO: 1241908
aucagugugcacggaauaa

SEQ ID NO: 1309061 - RNA, 19 nt, Artificial Sequence
  Description of Artificial Sequence: Synthetic oligonucleotide
  Antisense strand to SEQ ID NO: 1309060
uuauuccgugcacacugau

SEQ ID NO: 1309062 - RNA, 19 nt, Artificial Sequence
  Description of Artificial Sequence: Synthetic oligonucleotide
  Sense strand starting at position 1021 of SEQ ID NO: 1241908
gccagauuugugugucuuu

SEQ ID NO: 1309063 - RNA, 19 nt, Artificial Sequence
  Description of Artificial Sequence: Synthetic oligonucleotide
  Antisense strand to SEQ ID NO: 1309062
aaagacacacaaaucuggc

SEQ ID NO: 1309064 - RNA, 19 nt, Artificial Sequence
  Description of Artificial Sequence: Synthetic oligonucleotide
  Sense strand starting at position 2088 of SEQ ID NO: 1241908
ccucuugucgcgagaacgu

SEQ ID NO: 1309065 - RNA, 19 nt, Artificial Sequence
  Description of Artificial Sequence: Synthetic oligonucleotide
  Antisense strand to SEQ ID NO: 1309064
acguucucgcgacaagagg

SEQ ID NO: 1309066 - RNA, 19 nt, Artificial Sequence
  Description of Artificial Sequence: Synthetic oligonucleotide
  Sense strand starting at position 2339 of SEQ ID NO: 1241908
gcguaggguguuguguuaa

SEQ ID NO: 1309067 - RNA, 19 nt, Artificial Sequence
  Description of Artificial Sequence: Synthetic oligonucleotide
  Antisense strand to SEQ ID NO: 1309066
uuaacacaacacccuacgc

SEQ ID NO: 1309068 - RNA, 19 nt, Artificial Sequence
  Description of Artificial Sequence: Synthetic oligonucleotide
  Sense strand starting at position 2602 of SEQ ID NO: 1241908
gugcuaaugauguggaaag

SEQ ID NO: 1309069 - RNA, 19 nt, Artificial Sequence
  Description of Artificial Sequence: Synthetic oligonucleotide
  Antisense strand to SEQ ID NO: 1309068
cuuuccacaucauuagcac

SEQ ID NO: 1309070 - RNA, 19 nt, Artificial Sequence
  Description of Artificial Sequence: Synthetic oligonucleotide
  Sense strand starting at position 2829 of SEQ ID NO: 1241908
agaagcugcccucgaugaa

SEQ ID NO: 1309071 - RNA, 19 nt, Artificial Sequence
  Description of Artificial Sequence: Synthetic oligonucleotide
  Antisense strand to SEQ ID NO: 1309070
uucaucgagggcagcuucu

SEQ ID NO: 1309072 - RNA, 19 nt, Artificial Sequence
  Description of Artificial Sequence: Synthetic oligonucleotide
  Sense strand starting at position 2830 of SEQ ID NO: 1241908
gaagcugcccucgaugaau

SEQ ID NO: 1309073 - RNA, 19 nt, Artificial Sequence
  Description of Artificial Sequence: Synthetic oligonucleotide
  Antisense strand to SEQ ID NO: 1309072
auucaucgagggcagcuuc

SEQ ID NO: 1309074 - RNA, 19 nt, Artificial Sequence
  Description of Artificial Sequence: Synthetic oligonucleotide
  Sense strand starting at position 2876 of SEQ ID NO: 1241908
gaacacauuccggguuaga

SEQ ID NO: 1309075 - RNA, 19 nt, Artificial Sequence
  Description of Artificial Sequence: Synthetic oligonucleotide
  Antisense strand to SEQ ID NO: 1309074
ucuaacccggaauguguuc

SEQ ID NO: 1309076 - RNA, 19 nt, Artificial Sequence
  Description of Artificial Sequence: Synthetic oligonucleotide
  Sense strand starting at position 2879 of SEQ ID NO: 1241908
cacauuccggguuagaaau

SEQ ID NO: 1309077 - RNA, 19 nt, Artificial Sequence
  Description of Artificial Sequence: Synthetic oligonucleotide
  Antisense strand to SEQ ID NO: 1309076
auuucuaacccggaaugug

SEQ ID NO: 1309078 - RNA, 19 nt, Artificial Sequence
  Description of Artificial Sequence: Synthetic oligonucleotide
  Sense strand starting at position 2920 of SEQ ID NO: 1241908
gcgcgccuagucucauauu

SEQ ID NO: 1309079 - RNA, 19 nt, Artificial Sequence
  Description of Artificial Sequence: Synthetic oligonucleotide
  Antisense strand to SEQ ID NO: 1309078
aauaugagacuaggcgcgc

SEQ ID NO: 1309080 - RNA, 19 nt, Artificial Sequence
  Description of Artificial Sequence: Synthetic oligonucleotide
  Sense strand starting at position 2980 of SEQ ID NO: 1241908
cacauagauguuugggaac

SEQ ID NO: 1309081 - RNA, 19 nt, Artificial Sequence
  Description of Artificial Sequence: Synthetic oligonucleotide
  Antisense strand to SEQ ID NO: 1309080
guucccaaacaucuaugug

SEQ ID NO: 1309082 - RNA, 19 nt, Artificial Sequence
  Description of Artificial Sequence: Synthetic oligonucleotide
  Sense strand starting at position 2991 of SEQ ID NO: 1241908
uugggaacuuucucuuauc

SEQ ID NO: 1309083 - RNA, 19 nt, Artificial Sequence
  Description of Artificial Sequence: Synthetic oligonucleotide
  Antisense strand to SEQ ID NO: 1309082
gauaagagaaaguucccaa

SEQ ID NO: 1309084 - RNA, 19 nt, Artificial Sequence
  Description of Artificial Sequence: Synthetic oligonucleotide
  Sense strand starting at position 2992 of SEQ ID NO: 1241908
ugggaacuuucucuuaucu

SEQ ID NO: 1309085 - RNA, 19 nt, Artificial Sequence
  Description of Artificial Sequence: Synthetic oligonucleotide
  Antisense strand to SEQ ID NO: 1309084
agauaagagaaaguuccca

SEQ ID NO: 1309086 - RNA, 19 nt, Artificial Sequence
  Description of Artificial Sequence: Synthetic oligonucleotide
  Sense strand starting at position 3058 of SEQ ID NO: 1241908
gcugucugcauauagcaga

SEQ ID NO: 1309087 - RNA, 19 nt, Artificial Sequence
  Description of Artificial Sequence: Synthetic oligonucleotide
  Antisense strand to SEQ ID NO: 1309086
ucugcuauaugcagacagc

SEQ ID NO: 1309088 - RNA, 19 nt, Artificial Sequence
  Description of Artificial Sequence: Synthetic oligonucleotide
  Sense strand starting at position 3069 of SEQ ID NO: 1241908
auagcagauuguuuauaug

SEQ ID NO: 1309089 - RNA, 19 nt, Artificial Sequence
  Description of Artificial Sequence: Synthetic oligonucleotide
  Antisense strand to SEQ ID NO: 1309088
cauauaaacaaucugcuau

SEQ ID NO: 1309090 - RNA, 19 nt, Artificial Sequence
  Description of Artificial Sequence: Synthetic oligonucleotide
  Sense strand starting at position 3190 of SEQ ID NO: 1241908
gcucuaaccuguuuaagga

SEQ ID NO: 1309091 - RNA, 19 nt, Artificial Sequence
  Description of Artificial Sequence: Synthetic oligonucleotide
  Antisense strand to SEQ ID NO: 1309090
uccuuaaacagguuagagc

SEQ ID NO: 1309092 - RNA, 19 nt, Artificial Sequence
  Description of Artificial Sequence: Synthetic oligonucleotide
  Sense strand starting at position 3245 of SEQ ID NO: 1241908
gaagaacuuccaugaguau

SEQ ID NO: 1309093 - RNA, 19 nt, Artificial Sequence
  Description of Artificial Sequence: Synthetic oligonucleotide
  Antisense strand to SEQ ID NO: 1309092
auacucauggaaguucuuc

SEQ ID NO: 1309094 - RNA, 19 nt, Artificial Sequence
  Description of Artificial Sequence: Synthetic oligonucleotide
  Sense strand starting at position 3299 of SEQ ID NO: 1241908
uucgaaucagagugauaug

SEQ ID NO: 1309095 - RNA, 19 nt, Artificial Sequence
  Description of Artificial Sequence: Synthetic oligonucleotide
  Antisense strand to SEQ ID NO: 1309094
cauaucacucugauucgaa

SEQ ID NO: 1309096 - RNA, 19 nt, Artificial Sequence
  Description of Artificial Sequence: Synthetic oligonucleotide
  Sense strand starting at position 3327 of SEQ ID NO: 1241908
caggaagacuugucaucuu

SEQ ID NO: 1309097 - RNA, 19 nt, Artificial Sequence
  Description of Artificial Sequence: Synthetic oligonucleotide
  Antisense strand to SEQ ID NO: 1309096
aagaugacaagucuuccug

SEQ ID NO: 1309098 - RNA, 19 nt, Artificial Sequence
  Description of Artificial Sequence: Synthetic oligonucleotide
  Sense strand starting at position 3388 of SEQ ID NO: 1241908
ucccguaguagcguagaau

SEQ ID NO: 1309099 - RNA, 19 nt, Artificial Sequence
  Description of Artificial Sequence: Synthetic oligonucleotide
  Antisense strand to SEQ ID NO: 1309098
auucuacgcuacuacggga

SEQ ID NO: 1309100 - RNA, 19 nt, Artificial Sequence
  Description of Artificial Sequence: Synthetic oligonucleotide
  Sense strand starting at position 3979 of SEQ ID NO: 1241908
uggguaccauuauuccauu

SEQ ID NO: 1309101 - RNA, 19 nt, Artificial Sequence
  Description of Artificial Sequence: Synthetic oligonucleotide
  Antisense strand to SEQ ID NO: 1309100
aauggaauaaugguaccca

SEQ ID NO: 1309102 - RNA, 19 nt, Artificial Sequence
  Description of Artificial Sequence: Synthetic oligonucleotide
  Sense strand starting at position 42 of SEQ ID NO: 1241909
ggacauauauacuuaaugu

SEQ ID NO: 1309103 - RNA, 19 nt, Artificial Sequence
  Description of Artificial Sequence: Synthetic oligonucleotide
  Antisense strand to SEQ ID NO: 1309102
acauuaaguauauaugucc

SEQ ID NO: 1309104 - RNA, 19 nt, Artificial Sequence
  Description of Artificial Sequence: Synthetic oligonucleotide
  Sense strand starting at position 97 of SEQ ID NO: 1241909
agguauuucuuugaucuca

SEQ ID NO: 1309105 - RNA, 19 nt, Artificial Sequence
  Description of Artificial Sequence: Synthetic oligonucleotide
  Antisense strand to SEQ ID NO: 1309104
ugagaucaaagaaauaccu

SEQ ID NO: 1309106 - RNA, 19 nt, Artificial Sequence
  Description of Artificial Sequence: Synthetic oligonucleotide
  Sense strand starting at position 117 of SEQ ID NO: 1241909
ggugccaugcaucaagaaa

SEQ ID NO: 1309107 - RNA, 19 nt, Artificial Sequence
  Description of Artificial Sequence: Synthetic oligonucleotide
  Antisense strand to SEQ ID NO: 1309106
uuucuugaugcauggcacc

SEQ ID NO: 1309108 - RNA, 19 nt, Artificial Sequence
  Description of Artificial Sequence: Synthetic oligonucleotide
  Sense strand starting at position 160 of SEQ ID NO: 1241909
auccguagguccucaaaca

SEQ ID NO: 1309109 - RNA, 19 nt, Artificial Sequence
  Description of Artificial Sequence: Synthetic oligonucleotide
  Antisense strand to SEQ ID NO: 1309108
uguuugaggaccuacggau

SEQ ID NO: 1309110 - RNA, 19 nt, Artificial Sequence
  Description of Artificial Sequence: Synthetic oligonucleotide
  Sense strand starting at position 192 of SEQ ID NO: 1241909
auuagccuuugagcuaaga

SEQ ID NO: 1309111 - RNA, 19 nt, Artificial Sequence
  Description of Artificial Sequence: Synthetic oligonucleotide
  Antisense strand to SEQ ID NO: 1309110
ucuuagcucaaaggcuaau

SEQ ID NO: 1309112 - RNA, 19 nt, Artificial Sequence
  Description of Artificial Sequence: Synthetic oligonucleotide
  Sense strand starting at position 350 of SEQ ID NO: 1241909
acgaccgauaucuagaguu

SEQ ID NO: 1309113 - RNA, 19 nt, Artificial Sequence
  Description of Artificial Sequence: Synthetic oligonucleotide
  Antisense strand to SEQ ID NO: 1309112
aacucuagauaucggucgu

SEQ ID NO: 1309114 - RNA, 19 nt, Artificial Sequence
  Description of Artificial Sequence: Synthetic oligonucleotide
  Sense strand starting at position 482 of SEQ ID NO: 1241909
auaaucaguucuuugguca

SEQ ID NO: 1309115 - RNA, 19 nt, Artificial Sequence
  Description of Artificial Sequence: Synthetic oligonucleotide
  Antisense strand to SEQ ID NO: 1309114
ugaccaaagaacugauuau

SEQ ID NO: 1309116 - RNA, 19 nt, Artificial Sequence
  Description of Artificial Sequence: Synthetic oligonucleotide
  Sense strand starting at position 485 of SEQ ID NO: 1241909
aucaguucuuuggucacaa

SEQ ID NO: 1309117 - RNA, 19 nt, Artificial Sequence
  Description of Artificial Sequence: Synthetic oligonucleotide
  Antisense strand to SEQ ID NO: 1309116
uugugaccaaagaacugau

SEQ ID NO: 1309118 - RNA, 19 nt, Artificial Sequence
  Description of Artificial Sequence: Synthetic oligonucleotide
  Sense strand starting at position 486 of SEQ ID NO: 1241909
ucaguucuuuggucacaau

SEQ ID NO: 1309119 - RNA, 19 nt, Artificial Sequence
  Description of Artificial Sequence: Synthetic oligonucleotide
  Antisense strand to SEQ ID NO: 1309118
auugugaccaaagaacuga

SEQ ID NO: 1309120 - RNA, 19 nt, Artificial Sequence
  Description of Artificial Sequence: Synthetic oligonucleotide
  Sense strand starting at position 618 of SEQ ID NO: 1241909
uggcaauaucuagagucag

SEQ ID NO: 1309121 - RNA, 19 nt, Artificial Sequence
  Description of Artificial Sequence: Synthetic oligonucleotide
  Antisense strand to SEQ ID NO: 1309120
cugacucuagauauugcca

SEQ ID NO: 1309122 - RNA, 19 nt, Artificial Sequence
  Description of Artificial Sequence: Synthetic oligonucleotide
  Sense strand starting at position 746 of SEQ ID NO: 1241909
ucgcaaagucaagaauuau

SEQ ID NO: 1309123 - RNA, 19 nt, Artificial Sequence
  Description of Artificial Sequence: Synthetic oligonucleotide
  Antisense strand to SEQ ID NO: 1309122
auaauucuugacuuugcga

SEQ ID NO: 1309124 - RNA, 19 nt, Artificial Sequence
  Description of Artificial Sequence: Synthetic oligonucleotide
  Sense strand starting at position 856 of SEQ ID NO: 1241909
ugcggucuucuccacaaau

SEQ ID NO: 1309125 - RNA, 19 nt, Artificial Sequence
  Description of Artificial Sequence: Synthetic oligonucleotide
  Antisense strand to SEQ ID NO: 1309124
auuuguggagaagaccgca

SEQ ID NO: 1309126 - RNA, 19 nt, Artificial Sequence
  Description of Artificial Sequence: Synthetic oligonucleotide
  Sense strand starting at position 959 of SEQ ID NO: 1241909
cuuguauucuaguuauuug

SEQ ID NO: 1309127 - RNA, 19 nt, Artificial Sequence
  Description of Artificial Sequence: Synthetic oligonucleotide
  Antisense strand to SEQ ID NO: 1309126
caaauaacuagaauacaag

SEQ ID NO: 1309128 - RNA, 19 nt, Artificial Sequence
  Description of Artificial Sequence: Synthetic oligonucleotide
  Sense strand starting at position 987 of SEQ ID NO: 1241909
guuauuucccuuuguaaac

SEQ ID NO: 1309129 - RNA, 19 nt, Artificial Sequence
  Description of Artificial Sequence: Synthetic oligonucleotide
  Antisense strand to SEQ ID NO: 1309128
guuuacaaagggaaauaac

SEQ ID NO: 1309130 - RNA, 19 nt, Artificial Sequence
  Description of Artificial Sequence: Synthetic oligonucleotide
  Sense strand starting at position 1035 of SEQ ID NO: 1241909
ggcccuaucacaggauaag

SEQ ID NO: 1309131 - RNA, 19 nt, Artificial Sequence
  Description of Artificial Sequence: Synthetic oligonucleotide
  Antisense strand to SEQ ID NO: 1309130
cuuauccugugauagggcc

SEQ ID NO: 1309132 - RNA, 19 nt, Artificial Sequence
  Description of Artificial Sequence: Synthetic oligonucleotide
  Sense strand starting at position 1072 of SEQ ID NO: 1241909
caggauucgacggaaguga

SEQ ID NO: 1309133 - RNA, 19 nt, Artificial Sequence
  Description of Artificial Sequence: Synthetic oligonucleotide
  Antisense strand to SEQ ID NO: 1309132
ucacuuccgucgaauccug

SEQ ID NO: 1309134 - RNA, 19 nt, Artificial Sequence
  Description of Artificial Sequence: Synthetic oligonucleotide
  Sense strand starting at position 1293 of SEQ ID NO: 1241909
aacuaauuugcgcaguacu

SEQ ID NO: 1309135 - RNA, 19 nt, Artificial Sequence
  Description of Artificial Sequence: Synthetic oligonucleotide
  Antisense strand to SEQ ID NO: 1309134
aguacugcgcaaauuaguu

SEQ ID NO: 1309136 - RNA, 19 nt, Artificial Sequence
  Description of Artificial Sequence: Synthetic oligonucleotide
  Sense strand starting at position 1296 of SEQ ID NO: 1241909
uaauuugcgcaguacuaau

SEQ ID NO: 1309137 - RNA, 19 nt, Artificial Sequence
  Description of Artificial Sequence: Synthetic oligonucleotide
  Antisense strand to SEQ ID NO: 1309136
auuaguacugcgcaaauua

SEQ ID NO: 1309138 - RNA, 19 nt, Artificial Sequence
  Description of Artificial Sequence: Synthetic oligonucleotide
  Sense strand starting at position 1332 of SEQ ID NO: 1241909
agguuauuauacuugcaga

SEQ ID NO: 1309139 - RNA, 19 nt, Artificial Sequence
  Description of Artificial Sequence: Synthetic oligonucleotide
  Antisense strand to SEQ ID NO: 1309138
ucugcaaguauaauaaccu

SEQ ID NO: 1309140 - RNA, 19 nt, Artificial Sequence
  Description of Artificial Sequence: Synthetic oligonucleotide
  Sense strand starting at position 1836 of SEQ ID NO: 1241909
acgaaagagucauucucuu

SEQ ID NO: 1309141 - RNA, 19 nt, Artificial Sequence
  Description of Artificial Sequence: Synthetic oligonucleotide
  Antisense strand to SEQ ID NO: 1309140
aagagaaugacucuuucgu

SEQ ID NO: 1309142 - RNA, 19 nt, Artificial Sequence
  Description of Artificial Sequence: Synthetic oligonucleotide
  Sense strand starting at position 2233 of SEQ ID NO: 1241909
uauggaagugauuggacuu

SEQ ID NO: 1309143 - RNA, 19 nt, Artificial Sequence
  Description of Artificial Sequence: Synthetic oligonucleotide
  Antisense strand to SEQ ID NO: 1309142
aaguccaaucacuuccaua

SEQ ID NO: 1309144 - RNA, 19 nt, Artificial Sequence
  Description of Artificial Sequence: Synthetic oligonucleotide
  Sense strand starting at position 2234 of SEQ ID NO: 1241909
auggaagugauuggacuuu

SEQ ID NO: 1309145 - RNA, 19 nt, Artificial Sequence
  Description of Artificial Sequence: Synthetic oligonucleotide
  Antisense strand to SEQ ID NO: 1309144
aaaguccaaucacuuccau

SEQ ID NO: 1309146 - RNA, 19 nt, Artificial Sequence
  Description of Artificial Sequence: Synthetic oligonucleotide
  Sense strand starting at position 2608 of SEQ ID NO: 1241909
gccugaaauguugaaauac

SEQ ID NO: 1309147 - RNA, 19 nt, Artificial Sequence
  Description of Artificial Sequence: Synthetic oligonucleotide
  Antisense strand to SEQ ID NO: 1309146
guauuucaacauuucaggc

SEQ ID NO: 1309148 - RNA, 19 nt, Artificial Sequence
  Description of Artificial Sequence: Synthetic oligonucleotide
  Sense strand starting at position 2637 of SEQ ID NO: 1241909
acguucugacaucacagau

SEQ ID NO: 1309149 - RNA, 19 nt, Artificial Sequence
  Description of Artificial Sequence: Synthetic oligonucleotide
  Antisense strand to SEQ ID NO: 1309148
aucugugaugucagaacgu

SEQ ID NO: 1309150 - RNA, 19 nt, Artificial Sequence
  Description of Artificial Sequence: Synthetic oligonucleotide
  Sense strand starting at position 2823 of SEQ ID NO: 1241909
ucaauuauuguagacuguu

SEQ ID NO: 1309151 - RNA, 19 nt, Artificial Sequence
  Description of Artificial Sequence: Synthetic oligonucleotide
  Antisense strand to SEQ ID NO: 1309150
aacagucuacaauaauuga

SEQ ID NO: 1309152 - RNA, 19 nt, Artificial Sequence
  Description of Artificial Sequence: Synthetic oligonucleotide
  Sense strand starting at position 2826 of SEQ ID NO: 1241909
auuauuguagacuguuacu

SEQ ID NO: 1309153 - RNA, 19 nt, Artificial Sequence
  Description of Artificial Sequence: Synthetic oligonucleotide
  Antisense strand to SEQ ID NO: 1309152
aguaacagucuacaauaau

SEQ ID NO: 1309154 - RNA, 19 nt, Artificial Sequence
  Description of Artificial Sequence: Synthetic oligonucleotide
  Sense strand starting at position 2905 of SEQ ID NO: 1241909
ugagacacuuuauccggua

SEQ ID NO: 1309155 - RNA, 19 nt, Artificial Sequence
  Description of Artificial Sequence: Synthetic oligonucleotide
  Antisense strand to SEQ ID NO: 1309154
uaccggauaaagugucuca

SEQ ID NO: 1309156 - RNA, 19 nt, Artificial Sequence
  Description of Artificial Sequence: Synthetic oligonucleotide
  Sense strand starting at position 2906 of SEQ ID NO: 1241909
gagacacuuuauccgguau

SEQ ID NO: 1309157 - RNA, 19 nt, Artificial Sequence
  Description of Artificial Sequence: Synthetic oligonucleotide
  Antisense strand to SEQ ID NO: 1309156
auaccggauaaagugucuc

SEQ ID NO: 1309158 - RNA, 19 nt, Artificial Sequence
  Description of Artificial Sequence: Synthetic oligonucleotide
  Sense strand starting at position 3025 of SEQ ID NO: 1241909
gaaagauuagcuugcccga

SEQ ID NO: 1309159 - RNA, 19 nt, Artificial Sequence
  Description of Artificial Sequence: Synthetic oligonucleotide
  Antisense strand to SEQ ID NO: 1309158
ucgggcaagcuaaucuuuc

SEQ ID NO: 1309160 - RNA, 19 nt, Artificial Sequence
  Description of Artificial Sequence: Synthetic oligonucleotide
  Sense strand starting at position 3070 of SEQ ID NO: 1241909
aggagaguguaacccaaau

SEQ ID NO: 1309161 - RNA, 19 nt, Artificial Sequence
  Description of Artificial Sequence: Synthetic oligonucleotide
  Antisense strand to SEQ ID NO: 1309160
auuuggguuacacucuccu

SEQ ID NO: 1309162 - RNA, 19 nt, Artificial Sequence
  Description of Artificial Sequence: Synthetic oligonucleotide
  Sense strand starting at position 3117 of SEQ ID NO: 1241909
uaaucugugcuguagauua

SEQ ID NO: 1309163 - RNA, 19 nt, Artificial Sequence
  Description of Artificial Sequence: Synthetic oligonucleotide
  Antisense strand to SEQ ID NO: 1309162
uaaucuacagcacagauua

SEQ ID NO: 1309164 - RNA, 19 nt, Artificial Sequence
  Description of Artificial Sequence: Synthetic oligonucleotide
  Sense strand starting at position 3119 of SEQ ID NO: 1241909
aucugugcuguagauuaau

SEQ ID NO: 1309165 - RNA, 19 nt, Artificial Sequence
  Description of Artificial Sequence: Synthetic oligonucleotide
  Antisense strand to SEQ ID NO: 1309164
auuaaucuacagcacagau

SEQ ID NO: 1309166 - RNA, 19 nt, Artificial Sequence
  Description of Artificial Sequence: Synthetic oligonucleotide
  Sense strand starting at position 3122 of SEQ ID NO: 1241909
ugugcuguagauuaauaau

SEQ ID NO: 1309167 - RNA, 19 nt, Artificial Sequence
  Description of Artificial Sequence: Synthetic oligonucleotide
  Antisense strand to SEQ ID NO: 1309166
auuauuaaucuacagcaca

SEQ ID NO: 1309168 - RNA, 19 nt, Artificial Sequence
  Description of Artificial Sequence: Synthetic oligonucleotide
  Sense strand starting at position 3157 of SEQ ID NO: 1241909
uacacugugcuguagauua

SEQ ID NO: 1309169 - RNA, 19 nt, Artificial Sequence
  Description of Artificial Sequence: Synthetic oligonucleotide
  Antisense strand to SEQ ID NO: 1309168
uaaucuacagcacagugua

SEQ ID NO: 1309170 - RNA, 19 nt, Artificial Sequence
  Description of Artificial Sequence: Synthetic oligonucleotide
  Sense strand starting at position 3159 of SEQ ID NO: 1241909
cacugugcuguagauuaau

SEQ ID NO: 1309171 - RNA, 19 nt, Artificial Sequence
  Description of Artificial Sequence: Synthetic oligonucleotide
  Antisense strand to SEQ ID NO: 1309170
auuaaucuacagcacagug

SEQ ID NO: 1309172 - RNA, 19 nt, Artificial Sequence
  Description of Artificial Sequence: Synthetic oligonucleotide
  Sense strand starting at position 3288 of SEQ ID NO: 1241909
agguuugggcacugaguau

SEQ ID NO: 1309173 - RNA, 19 nt, Artificial Sequence
  Description of Artificial Sequence: Synthetic oligonucleotide
  Antisense strand to SEQ ID NO: 1309172
auacucagugcccaaaccu

SEQ ID NO: 1309174 - RNA, 19 nt, Artificial Sequence
  Description of Artificial Sequence: Synthetic oligonucleotide
  Sense strand starting at position 3360 of SEQ ID NO: 1241909
auccaaauccguugggaau

SEQ ID NO: 1309175 - RNA, 19 nt, Artificial Sequence
  Description of Artificial Sequence: Synthetic oligonucleotide
  Antisense strand to SEQ ID NO: 1309174
auucccaacggauuuggau

SEQ ID NO: 1309176 - RNA, 19 nt, Artificial Sequence
  Description of Artificial Sequence: Synthetic oligonucleotide
  Sense strand starting at position 3361 of SEQ ID NO: 1241909
uccaaauccguugggaaug

SEQ ID NO: 1309177 - RNA, 19 nt, Artificial Sequence
  Description of Artificial Sequence: Synthetic oligonucleotide
  Antisense strand to SEQ ID NO: 1309176
cauucccaacggauuugga

SEQ ID NO: 1309178 - RNA, 19 nt, Artificial Sequence
  Description of Artificial Sequence: Synthetic oligonucleotide
  Sense strand starting at position 3366 of SEQ ID NO: 1241909
auccguugggaauguugau

SEQ ID NO: 1309179 - RNA, 19 nt, Artificial Sequence
  Description of Artificial Sequence: Synthetic oligonucleotide
  Antisense strand to SEQ ID NO: 1309178
aucaacauucccaacggau

SEQ ID NO: 1309180 - RNA, 19 nt, Artificial Sequence
  Description of Artificial Sequence: Synthetic oligonucleotide
  Sense strand starting at position 3756 of SEQ ID NO: 1241909
uaaagaagugcaugcauua

SEQ ID NO: 1309181 - RNA, 19 nt, Artificial Sequence
  Description of Artificial Sequence: Synthetic oligonucleotide
  Antisense strand to SEQ ID NO: 1309180
uaaugcaugcacuucuuua

SEQ ID NO: 1309182 - RNA, 19 nt, Artificial Sequence
  Description of Artificial Sequence: Synthetic oligonucleotide
  Sense strand starting at position 214 of SEQ ID NO: 1241910
ccaucaauaugaucguauu

SEQ ID NO: 1309183 - RNA, 19 nt, Artificial Sequence
  Description of Artificial Sequence: Synthetic oligonucleotide
  Antisense strand to SEQ ID NO: 1309182
aauacgaucauauugaugg

SEQ ID NO: 1309184 - RNA, 19 nt, Artificial Sequence
  Description of Artificial Sequence: Synthetic oligonucleotide
  Sense strand starting at position 241 of SEQ ID NO: 1241910
ccaggaagaugaugaaguu

SEQ ID NO: 1309185 - RNA, 19 nt, Artificial Sequence
  Description of Artificial Sequence: Synthetic oligonucleotide
  Antisense strand to SEQ ID NO: 1309184
aacuucaucaucuuccugg

SEQ ID NO: 1309186 - RNA, 19 nt, Artificial Sequence
  Description of Artificial Sequence: Synthetic oligonucleotide
  Sense strand starting at position 276 of SEQ ID NO: 1241910
guugucucuuaaggaaaug

SEQ ID NO: 1309187 - RNA, 19 nt, Artificial Sequence
  Description of Artificial Sequence: Synthetic oligonucleotide
  Antisense strand to SEQ ID NO: 1309186
cauuuccuuaagagacaac

SEQ ID NO: 1309188 - RNA, 19 nt, Artificial Sequence
  Description of Artificial Sequence: Synthetic oligonucleotide
  Sense strand starting at position 542 of SEQ ID NO: 1241910
guucuauacgcugaggcuu

SEQ ID NO: 1309189 - RNA, 19 nt, Artificial Sequence
  Description of Artificial Sequence: Synthetic oligonucleotide
  Antisense strand to SEQ ID NO: 1309188
aagccucagcguauagaac

SEQ ID NO: 1309190 - RNA, 19 nt, Artificial Sequence
  Description of Artificial Sequence: Synthetic oligonucleotide
  Sense strand starting at position 580 of SEQ ID NO: 1241910
ugguguugaucucccaaua

SEQ ID NO: 1309191 - RNA, 19 nt, Artificial Sequence
  Description of Artificial Sequence: Synthetic oligonucleotide
  Antisense strand to SEQ ID NO: 1309190
uauugggagaucaacacca

SEQ ID NO: 1309192 - RNA, 19 nt, Artificial Sequence
  Description of Artificial Sequence: Synthetic oligonucleotide
  Sense strand starting at position 689 of SEQ ID NO: 1241910
cagggauacuggucaggua

SEQ ID NO: 1309193 - RNA, 19 nt, Artificial Sequence
  Description of Artificial Sequence: Synthetic oligonucleotide
  Antisense strand to SEQ ID NO: 1309192
uaccugaccaguaucccug

SEQ ID NO: 1309194 - RNA, 19 nt, Artificial Sequence
  Description of Artificial Sequence: Synthetic oligonucleotide
  Sense strand starting at position 692 of SEQ ID NO: 1241910
ggauacuggucagguaaug

SEQ ID NO: 1309195 - RNA, 19 nt, Artificial Sequence
  Description of Artificial Sequence: Synthetic oligonucleotide
  Antisense strand to SEQ ID NO: 1309194
cauuaccugaccaguaucc

SEQ ID NO: 1309196 - RNA, 19 nt, Artificial Sequence
  Description of Artificial Sequence: Synthetic oligonucleotide
  Sense strand starting at position 1071 of SEQ ID NO: 1241910
ccaaguaacucccugauag

SEQ ID NO: 1309197 - RNA, 19 nt, Artificial Sequence
  Description of Artificial Sequence: Synthetic oligonucleotide
  Antisense strand to SEQ ID NO: 1309196
cuaucagggaguuacuugg

SEQ ID NO: 1309198 - RNA, 19 nt, Artificial Sequence
  Description of Artificial Sequence: Synthetic oligonucleotide
  Sense strand starting at position 1073 of SEQ ID NO: 1241910
aaguaacucccugauagug

SEQ ID NO: 1309199 - RNA, 19 nt, Artificial Sequence
  Description of Artificial Sequence: Synthetic oligonucleotide
  Antisense strand to SEQ ID NO: 1309198
cacuaucagggaguuacuu

SEQ ID NO: 1309200 - RNA, 19 nt, Artificial Sequence
  Description of Artificial Sequence: Synthetic oligonucleotide
  Sense strand starting at position 1116 of SEQ ID NO: 1241910
ccuugcaaaugcucaauga

SEQ ID NO: 1309201 - RNA, 19 nt, Artificial Sequence
  Description of Artificial Sequence: Synthetic oligonucleotide
  Antisense strand to SEQ ID NO: 1309200
ucauugagcauuugcaagg

SEQ ID NO: 1309202 - RNA, 19 nt, Artificial Sequence
  Description of Artificial Sequence: Synthetic oligonucleotide
  Sense strand starting at position 1120 of SEQ ID NO: 1241910
gcaaaugcucaaugagaga

SEQ ID NO: 1309203 - RNA, 19 nt, Artificial Sequence
  Description of Artificial Sequence: Synthetic oligonucleotide
  Antisense strand to SEQ ID NO: 1309202
ucucucauugagcauuugc

SEQ ID NO: 1309204 - RNA, 19 nt, Artificial Sequence
  Description of Artificial Sequence: Synthetic oligonucleotide
  Sense strand starting at position 1456 of SEQ ID NO: 1241910
ucacuuugugauggcauuu

SEQ ID NO: 1309205 - RNA, 19 nt, Artificial Sequence
  Description of Artificial Sequence: Synthetic oligonucleotide
  Antisense strand to SEQ ID NO: 1309204
aaaugccaucacaaaguga

SEQ ID NO: 1309206 - RNA, 19 nt, Artificial Sequence
  Description of Artificial Sequence: Synthetic oligonucleotide
  Sense strand starting at position 1579 of SEQ ID NO: 1241910
ccaccugugccugagacaa

SEQ ID NO: 1309207 - RNA, 19 nt, Artificial Sequence
  Description of Artificial Sequence: Synthetic oligonucleotide
  Antisense strand to SEQ ID NO: 1309206
uugucucaggcacaggugg

SEQ ID NO: 1309208 - RNA, 19 nt, Artificial Sequence
  Description of Artificial Sequence: Synthetic oligonucleotide
  Sense strand starting at position 2745 of SEQ ID NO: 1241910
gcuauauuguuucugcaug

SEQ ID NO: 1309209 - RNA, 19 nt, Artificial Sequence
  Description of Artificial Sequence: Synthetic oligonucleotide
  Antisense strand to SEQ ID NO: 1309208
caugcagaaacaauauagc

SEQ ID NO: 1309210 - RNA, 19 nt, Artificial Sequence
  Description of Artificial Sequence: Synthetic oligonucleotide
  Sense strand starting at position 2746 of SEQ ID NO: 1241910
cuauauuguuucugcauga

SEQ ID NO: 1309211 - RNA, 19 nt, Artificial Sequence
  Description of Artificial Sequence: Synthetic oligonucleotide
  Antisense strand to SEQ ID NO: 1309210
ucaugcagaaacaauauag

SEQ ID NO: 1309212 - RNA, 19 nt, Artificial Sequence
  Description of Artificial Sequence: Synthetic oligonucleotide
  Sense strand starting at position 2753 of SEQ ID NO: 1241910
guuucugcaugagucagua

SEQ ID NO: 1309213 - RNA, 19 nt, Artificial Sequence
  Description of Artificial Sequence: Synthetic oligonucleotide
  Antisense strand to SEQ ID NO: 1309212
uacugacucaugcagaaac

SEQ ID NO: 1309214 - RNA, 19 nt, Artificial Sequence
  Description of Artificial Sequence: Synthetic oligonucleotide
  Sense strand starting at position 2757 of SEQ ID NO: 1241910
cugcaugagucaguauuaa

SEQ ID NO: 1309215 - RNA, 19 nt, Artificial Sequence
  Description of Artificial Sequence: Synthetic oligonucleotide
  Antisense strand to SEQ ID NO: 1309214
uuaauacugacucaugcag

SEQ ID NO: 1309216 - RNA, 19 nt, Artificial Sequence
  Description of Artificial Sequence: Synthetic oligonucleotide
  Sense strand starting at position 2761 of SEQ ID NO: 1241910
augagucaguauuaauguu

SEQ ID NO: 1309217 - RNA, 19 nt, Artificial Sequence
  Description of Artificial Sequence: Synthetic oligonucleotide
  Antisense strand to SEQ ID NO: 1309216
aacauuaauacugacucau

SEQ ID NO: 1309218 - RNA, 19 nt, Artificial Sequence
  Description of Artificial Sequence: Synthetic oligonucleotide
  Sense strand starting at position 2769 of SEQ ID NO: 1241910
guauuaauguuacuccagu

SEQ ID NO: 1309219 - RNA, 19 nt, Artificial Sequence
  Description of Artificial Sequence: Synthetic oligonucleotide
  Antisense strand to SEQ ID NO: 1309218
acuggaguaacauuaauac

SEQ ID NO: 1309220 - RNA, 19 nt, Artificial Sequence
  Description of Artificial Sequence: Synthetic oligonucleotide
  Sense strand starting at position 2929 of SEQ ID NO: 1241910
gcagaaugguccuaagugc

SEQ ID NO: 1309221 - RNA, 19 nt, Artificial Sequence
  Description of Artificial Sequence: Synthetic oligonucleotide
  Antisense strand to SEQ ID NO: 1309220
gcacuuaggaccauucugc

SEQ ID NO: 1309222 - RNA, 19 nt, Artificial Sequence
  Description of Artificial Sequence: Synthetic oligonucleotide
  Sense strand starting at position 2946 of SEQ ID NO: 1241910
gcuuucuugaggcaggcaa

SEQ ID NO: 1309223 - RNA, 19 nt, Artificial Sequence
  Description of Artificial Sequence: Synthetic oligonucleotide
  Antisense strand to SEQ ID NO: 1309222
uugccugccucaagaaagc

SEQ ID NO: 1309224 - RNA, 19 nt, Artificial Sequence
  Description of Artificial Sequence: Synthetic oligonucleotide
  Sense strand starting at position 2959 of SEQ ID NO: 1241910
aggcaauuuguccgucaca

SEQ ID NO: 1309225 - RNA, 19 nt, Artificial Sequence
  Description of Artificial Sequence: Synthetic oligonucleotide
  Antisense strand to SEQ ID NO: 1309224
ugugacggacaaauugccu

SEQ ID NO: 1309226 - RNA, 19 nt, Artificial Sequence
  Description of Artificial Sequence: Synthetic oligonucleotide
  Sense strand starting at position 2960 of SEQ ID NO: 1241910
ggcaauuuguccgucacau

SEQ ID NO: 1309227 - RNA, 19 nt, Artificial Sequence
  Description of Artificial Sequence: Synthetic oligonucleotide
  Antisense strand to SEQ ID NO: 1309226
augugacggacaaauugcc

SEQ ID NO: 1309228 - RNA, 19 nt, Artificial Sequence
  Description of Artificial Sequence: Synthetic oligonucleotide
  Sense strand starting at position 3120 of SEQ ID NO: 1241910
augucaauacuccgaauag

SEQ ID NO: 1309229 - RNA, 19 nt, Artificial Sequence
  Description of Artificial Sequence: Synthetic oligonucleotide
  Antisense strand to SEQ ID NO: 1309228
cuauucggaguauugacau

SEQ ID NO: 1309230 - RNA, 19 nt, Artificial Sequence
  Description of Artificial Sequence: Synthetic oligonucleotide
  Sense strand starting at position 3153 of SEQ ID NO: 1241910
gacagcucccagcaugagu

SEQ ID NO: 1309231 - RNA, 19 nt, Artificial Sequence
  Description of Artificial Sequence: Synthetic oligonucleotide
  Antisense strand to SEQ ID NO: 1309230
acucaugcugggagcuguc

SEQ ID NO: 1309232 - RNA, 19 nt, Artificial Sequence
  Description of Artificial Sequence: Synthetic oligonucleotide
  Sense strand starting at position 218 of SEQ ID NO: 1241911
ccaucaauaugaucguauu

SEQ ID NO: 1309233 - RNA, 19 nt, Artificial Sequence
  Description of Artificial Sequence: Synthetic oligonucleotide
  Antisense strand to SEQ ID NO: 1309232
aauacgaucauauugaugg

SEQ ID NO: 1309234 - RNA, 19 nt, Artificial Sequence
  Description of Artificial Sequence: Synthetic oligonucleotide
  Sense strand starting at position 245 of SEQ ID NO: 1241911
ccaggaagaugaugaaguu

SEQ ID NO: 1309235 - RNA, 19 nt, Artificial Sequence
  Description of Artificial Sequence: Synthetic oligonucleotide
  Antisense strand to SEQ ID NO: 1309234
aacuucaucaucuuccugg

SEQ ID NO: 1309236 - RNA, 19 nt, Artificial Sequence
  Description of Artificial Sequence: Synthetic oligonucleotide
  Sense strand starting at position 280 of SEQ ID NO: 1241911
guugucucuuaaggaaaug

SEQ ID NO: 1309237 - RNA, 19 nt, Artificial Sequence
  Description of Artificial Sequence: Synthetic oligonucleotide
  Antisense strand to SEQ ID NO: 1309236
cauuuccuuaagagacaac

SEQ ID NO: 1309238 - RNA, 19 nt, Artificial Sequence
  Description of Artificial Sequence: Synthetic oligonucleotide
  Sense strand starting at position 546 of SEQ ID NO: 1241911
guucuauacgcugaggcuu

SEQ ID NO: 1309239 - RNA, 19 nt, Artificial Sequence
  Description of Artificial Sequence: Synthetic oligonucleotide
  Antisense strand to SEQ ID NO: 1309238
aagccucagcguauagaac

SEQ ID NO: 1309240 - RNA, 19 nt, Artificial Sequence
  Description of Artificial Sequence: Synthetic oligonucleotide
  Sense strand starting at position 584 of SEQ ID NO: 1241911
ugguguugaucucccaaua

SEQ ID NO: 1309241 - RNA, 19 nt, Artificial Sequence
  Description of Artificial Sequence: Synthetic oligonucleotide
  Antisense strand to SEQ ID NO: 1309240
uauugggagaucaacacca

SEQ ID NO: 1309242 - RNA, 19 nt, Artificial Sequence
  Description of Artificial Sequence: Synthetic oligonucleotide
  Sense strand starting at position 693 of SEQ ID NO: 1241911
cagggauacuggucaggua

SEQ ID NO: 1309243 - RNA, 19 nt, Artificial Sequence
  Description of Artificial Sequence: Synthetic oligonucleotide
  Antisense strand to SEQ ID NO: 1309242
uaccugaccaguaucccug

SEQ ID NO: 1309244 - RNA, 19 nt, Artificial Sequence
  Description of Artificial Sequence: Synthetic oligonucleotide
  Sense strand starting at position 696 of SEQ ID NO: 1241911
ggauacuggucagguaaug

SEQ ID NO: 1309245 - RNA, 19 nt, Artificial Sequence
  Description of Artificial Sequence: Synthetic oligonucleotide
  Antisense strand to SEQ ID NO: 1309244
cauuaccugaccaguaucc

SEQ ID NO: 1309246 - RNA, 19 nt, Artificial Sequence
  Description of Artificial Sequence: Synthetic oligonucleotide
  Sense strand starting at position 1075 of SEQ ID NO: 1241911
ccaaguaacucccugauag

SEQ ID NO: 1309247 - RNA, 19 nt, Artificial Sequence
  Description of Artificial Sequence: Synthetic oligonucleotide
  Antisense strand to SEQ ID NO: 1309246
cuaucagggaguuacuugg

SEQ ID NO: 1309248 - RNA, 19 nt, Artificial Sequence
  Description of Artificial Sequence: Synthetic oligonucleotide
  Sense strand starting at position 1077 of SEQ ID NO: 1241911
aaguaacucccugauagug

SEQ ID NO: 1309249 - RNA, 19 nt, Artificial Sequence
  Description of Artificial Sequence: Synthetic oligonucleotide
  Antisense strand to SEQ ID NO: 1309248
cacuaucagggaguuacuu

SEQ ID NO: 1309250 - RNA, 19 nt, Artificial Sequence
  Description of Artificial Sequence: Synthetic oligonucleotide
  Sense strand starting at position 1120 of SEQ ID NO: 1241911
ccuugcaaaugcucaauga

SEQ ID NO: 1309251 - RNA, 19 nt, Artificial Sequence
  Description of Artificial Sequence: Synthetic oligonucleotide
  Antisense strand to SEQ ID NO: 1309250
ucauugagcauuugcaagg

SEQ ID NO: 1309252 - RNA, 19 nt, Artificial Sequence
  Description of Artificial Sequence: Synthetic oligonucleotide
  Sense strand starting at position 1124 of SEQ ID NO: 1241911
gcaaaugcucaaugagaga

SEQ ID NO: 1309253 - RNA, 19 nt, Artificial Sequence
  Description of Artificial Sequence: Synthetic oligonucleotide
  Antisense strand to SEQ ID NO: 1309252
ucucucauugagcauuugc

SEQ ID NO: 1309254 - RNA, 19 nt, Artificial Sequence
  Description of Artificial Sequence: Synthetic oligonucleotide
  Sense strand starting at position 1460 of SEQ ID NO: 1241911
ucacuuugugauggcauuu

SEQ ID NO: 1309255 - RNA, 19 nt, Artificial Sequence
  Description of Artificial Sequence: Synthetic oligonucleotide
  Antisense strand to SEQ ID NO: 1309254
aaaugccaucacaaaguga

SEQ ID NO: 1309256 - RNA, 19 nt, Artificial Sequence
  Description of Artificial Sequence: Synthetic oligonucleotide
  Sense strand starting at position 1583 of SEQ ID NO: 1241911
ccaccugugccugagacaa

SEQ ID NO: 1309257 - RNA, 19 nt, Artificial Sequence
  Description of Artificial Sequence: Synthetic oligonucleotide
  Antisense strand to SEQ ID NO: 1309256
uugucucaggcacaggugg

SEQ ID NO: 1309258 - RNA, 19 nt, Artificial Sequence
  Description of Artificial Sequence: Synthetic oligonucleotide
  Sense strand starting at position 2749 of SEQ ID NO: 1241911
gcuauauuguuucugcaug

SEQ ID NO: 1309259 - RNA, 19 nt, Artificial Sequence
  Description of Artificial Sequence: Synthetic oligonucleotide
  Antisense strand to SEQ ID NO: 1309258
caugcagaaacaauauagc

SEQ ID NO: 1309260 - RNA, 19 nt, Artificial Sequence
  Description of Artificial Sequence: Synthetic oligonucleotide
  Sense strand starting at position 2750 of SEQ ID NO: 1241911
cuauauuguuucugcauga

SEQ ID NO: 1309261 - RNA, 19 nt, Artificial Sequence
  Description of Artificial Sequence: Synthetic oligonucleotide
  Antisense strand to SEQ ID NO: 1309260
ucaugcagaaacaauauag

SEQ ID NO: 1309262 - RNA, 19 nt, Artificial Sequence
  Description of Artificial Sequence: Synthetic oligonucleotide
  Sense strand starting at position 2757 of SEQ ID NO: 1241911
guuucugcaugagucagua

SEQ ID NO: 1309263 - RNA, 19 nt, Artificial Sequence
  Description of Artificial Sequence: Synthetic oligonucleotide
  Antisense strand to SEQ ID NO: 1309262
uacugacucaugcagaaac

SEQ ID NO: 1309264 - RNA, 19 nt, Artificial Sequence
  Description of Artificial Sequence: Synthetic oligonucleotide
  Sense strand starting at position 2761 of SEQ ID NO: 1241911
cugcaugagucaguauuaa

SEQ ID NO: 1309265 - RNA, 19 nt, Artificial Sequence
  Description of Artificial Sequence: Synthetic oligonucleotide
  Antisense strand to SEQ ID NO: 1309264
uuaauacugacucaugcag

SEQ ID NO: 1309266 - RNA, 19 nt, Artificial Sequence
  Description of Artificial Sequence: Synthetic oligonucleotide
  Sense strand starting at position 2765 of SEQ ID NO: 1241911
augagucaguauuaauguu

SEQ ID NO: 1309267 - RNA, 19 nt, Artificial Sequence
  Description of Artificial Sequence: Synthetic oligonucleotide
  Antisense strand to SEQ ID NO: 1309266
aacauuaauacugacucau

SEQ ID NO: 1309268 - RNA, 19 nt, Artificial Sequence
  Description of Artificial Sequence: Synthetic oligonucleotide
  Sense strand starting at position 2773 of SEQ ID NO: 1241911
guauuaauguuacuccagu

SEQ ID NO: 1309269 - RNA, 19 nt, Artificial Sequence
  Description of Artificial Sequence: Synthetic oligonucleotide
  Antisense strand to SEQ ID NO: 1309268
acuggaguaacauuaauac

SEQ ID NO: 1309270 - RNA, 19 nt, Artificial Sequence
  Description of Artificial Sequence: Synthetic oligonucleotide
  Sense strand starting at position 2933 of SEQ ID NO: 1241911
gcagaaugguccuaagugc

SEQ ID NO: 1309271 - RNA, 19 nt, Artificial Sequence
  Description of Artificial Sequence: Synthetic oligonucleotide
  Antisense strand to SEQ ID NO: 1309270
gcacuuaggaccauucugc

SEQ ID NO: 1309272 - RNA, 19 nt, Artificial Sequence
  Description of Artificial Sequence: Synthetic oligonucleotide
  Sense strand starting at position 2950 of SEQ ID NO: 1241911
gcuuucuugaggcaggcaa

SEQ ID NO: 1309273 - RNA, 19 nt, Artificial Sequence
  Description of Artificial Sequence: Synthetic oligonucleotide
  Antisense strand to SEQ ID NO: 1309272
uugccugccucaagaaagc

SEQ ID NO: 1309274 - RNA, 19 nt, Artificial Sequence
  Description of Artificial Sequence: Synthetic oligonucleotide
  Sense strand starting at position 2963 of SEQ ID NO: 1241911
aggcaauuuguccgucaca

SEQ ID NO: 1309275 - RNA, 19 nt, Artificial Sequence
  Description of Artificial Sequence: Synthetic oligonucleotide
  Antisense strand to SEQ ID NO: 1309274
ugugacggacaaauugccu

SEQ ID NO: 1309276 - RNA, 19 nt, Artificial Sequence
  Description of Artificial Sequence: Synthetic oligonucleotide
  Sense strand starting at position 2964 of SEQ ID NO: 1241911
ggcaauuuguccgucacau

SEQ ID NO: 1309277 - RNA, 19 nt, Artificial Sequence
  Description of Artificial Sequence: Synthetic oligonucleotide
  Antisense strand to SEQ ID NO: 1309276
augugacggacaaauugcc

SEQ ID NO: 1309278 - RNA, 19 nt, Artificial Sequence
  Description of Artificial Sequence: Synthetic oligonucleotide
  Sense strand starting at position 3124 of SEQ ID NO: 1241911
augucaauacuccgaauag

SEQ ID NO: 1309279 - RNA, 19 nt, Artificial Sequence
  Description of Artificial Sequence: Synthetic oligonucleotide
  Antisense strand to SEQ ID NO: 1309278
cuauucggaguauugacau

SEQ ID NO: 1309280 - RNA, 19 nt, Artificial Sequence
  Description of Artificial Sequence: Synthetic oligonucleotide
  Sense strand starting at position 3157 of SEQ ID NO: 1241911
gacagcucccagcaugagu

SEQ ID NO: 1309281 - RNA, 19 nt, Artificial Sequence
  Description of Artificial Sequence: Synthetic oligonucleotide
  Antisense strand to SEQ ID NO: 1309280
acucaugcugggagcuguc

SEQ ID NO: 1309282 - RNA, 19 nt, Artificial Sequence
  Description of Artificial Sequence: Synthetic oligonucleotide
  Sense strand starting at position 57 of SEQ ID NO: 1241912
cagagaguucccgguggga

SEQ ID NO: 1309283 - RNA, 19 nt, Artificial Sequence
  Description of Artificial Sequence: Synthetic oligonucleotide
  Antisense strand to SEQ ID NO: 1309282
ucccaccgggaacucucug

SEQ ID NO: 1309284 - RNA, 19 nt, Artificial Sequence
  Description of Artificial Sequence: Synthetic oligonucleotide
  Sense strand starting at position 292 of SEQ ID NO: 1241912
aggucugucuggcuagaga

SEQ ID NO: 1309285 - RNA, 19 nt, Artificial Sequence
  Description of Artificial Sequence: Synthetic oligonucleotide
  Antisense strand to SEQ ID NO: 1309284
ucucuagccagacagaccu

SEQ ID NO: 1309286 - RNA, 19 nt, Artificial Sequence
  Description of Artificial Sequence: Synthetic oligonucleotide
  Sense strand starting at position 351 of SEQ ID NO: 1241912
agcucugcuucugaacaga

SEQ ID NO: 1309287 - RNA, 19 nt, Artificial Sequence
  Description of Artificial Sequence: Synthetic oligonucleotide
  Antisense strand to SEQ ID NO: 1309286
ucuguucagaagcagagcu

SEQ ID NO: 1309288 - RNA, 19 nt, Artificial Sequence
  Description of Artificial Sequence: Synthetic oligonucleotide
  Sense strand starting at position 640 of SEQ ID NO: 1241912
agaugaugccuagaaagcu

SEQ ID NO: 1309289 - RNA, 19 nt, Artificial Sequence
  Description of Artificial Sequence: Synthetic oligonucleotide
  Antisense strand to SEQ ID NO: 1309288
agcuuucuaggcaucaucu

SEQ ID NO: 1309290 - RNA, 19 nt, Artificial Sequence
  Description of Artificial Sequence: Synthetic oligonucleotide
  Sense strand starting at position 660 of SEQ ID NO: 1241912
uugugcuuggcuuggugaa

SEQ ID NO: 1309291 - RNA, 19 nt, Artificial Sequence
  Description of Artificial Sequence: Synthetic oligonucleotide
  Antisense strand to SEQ ID NO: 1309290
uucaccaagccaagcacaa

SEQ ID NO: 1309292 - RNA, 19 nt, Artificial Sequence
  Description of Artificial Sequence: Synthetic oligonucleotide
  Sense strand starting at position 741 of SEQ ID NO: 1241912
gcaggagccaggugcuaau

SEQ ID NO: 1309293 - RNA, 19 nt, Artificial Sequence
  Description of Artificial Sequence: Synthetic oligonucleotide
  Antisense strand to SEQ ID NO: 1309292
auuagcaccuggcuccugc

SEQ ID NO: 1309294 - RNA, 19 nt, Artificial Sequence
  Description of Artificial Sequence: Synthetic oligonucleotide
  Sense strand starting at position 943 of SEQ ID NO: 1241912
agucaugacuccuugggua

SEQ ID NO: 1309295 - RNA, 19 nt, Artificial Sequence
  Description of Artificial Sequence: Synthetic oligonucleotide
  Antisense strand to SEQ ID NO: 1309294
uacccaaggagucaugacu

SEQ ID NO: 1309296 - RNA, 19 nt, Artificial Sequence
  Description of Artificial Sequence: Synthetic oligonucleotide
  Sense strand starting at position 945 of SEQ ID NO: 1241912
ucaugacuccuuggguauu

SEQ ID NO: 1309297 - RNA, 19 nt, Artificial Sequence
  Description of Artificial Sequence: Synthetic oligonucleotide
  Antisense strand to SEQ ID NO: 1309296
aauacccaaggagucauga

SEQ ID NO: 1309298 - RNA, 19 nt, Artificial Sequence
  Description of Artificial Sequence: Synthetic oligonucleotide
  Sense strand starting at position 1134 of SEQ ID NO: 1241912
ccagaauccucccugguua

SEQ ID NO: 1309299 - RNA, 19 nt, Artificial Sequence
  Description of Artificial Sequence: Synthetic oligonucleotide
  Antisense strand to SEQ ID NO: 1309298
uaaccagggaggauucugg

SEQ ID NO: 1309300 - RNA, 19 nt, Artificial Sequence
  Description of Artificial Sequence: Synthetic oligonucleotide
  Sense strand starting at position 1136 of SEQ ID NO: 1241912
agaauccucccugguuaga

SEQ ID NO: 1309301 - RNA, 19 nt, Artificial Sequence
  Description of Artificial Sequence: Synthetic oligonucleotide
  Antisense strand to SEQ ID NO: 1309300
ucuaaccagggaggauucu

SEQ ID NO: 1309302 - RNA, 19 nt, Artificial Sequence
  Description of Artificial Sequence: Synthetic oligonucleotide
  Sense strand starting at position 1153 of SEQ ID NO: 1241912
gagcuuugcugccucagga

SEQ ID NO: 1309303 - RNA, 19 nt, Artificial Sequence
  Description of Artificial Sequence: Synthetic oligonucleotide
  Antisense strand to SEQ ID NO: 1309302
uccugaggcagcaaagcuc

SEQ ID NO: 1309304 - RNA, 19 nt, Artificial Sequence
  Description of Artificial Sequence: Synthetic oligonucleotide
  Sense strand starting at position 1327 of SEQ ID NO: 1241912
gguuguccucugggauucu

SEQ ID NO: 1309305 - RNA, 19 nt, Artificial Sequence
  Description of Artificial Sequence: Synthetic oligonucleotide
  Antisense strand to SEQ ID NO: 1309304
agaaucccagaggacaacc

SEQ ID NO: 1309306 - RNA, 19 nt, Artificial Sequence
  Description of Artificial Sequence: Synthetic oligonucleotide
  Sense strand starting at position 1328 of SEQ ID NO: 1241912
guuguccucugggauucuu

SEQ ID NO: 1309307 - RNA, 19 nt, Artificial Sequence
  Description of Artificial Sequence: Synthetic oligonucleotide
  Antisense strand to SEQ ID NO: 1309306
aagaaucccagaggacaac

SEQ ID NO: 1309308 - RNA, 19 nt, Artificial Sequence
  Description of Artificial Sequence: Synthetic oligonucleotide
  Sense strand starting at position 1359 of SEQ ID NO: 1241912
gaagaaaugcuuuggcaac

SEQ ID NO: 1309309 - RNA, 19 nt, Artificial Sequence
  Description of Artificial Sequence: Synthetic oligonucleotide
  Antisense strand to SEQ ID NO: 1309308
guugccaaagcauuucuuc

SEQ ID NO: 1309310 - RNA, 19 nt, Artificial Sequence
  Description of Artificial Sequence: Synthetic oligonucleotide
  Sense strand starting at position 1539 of SEQ ID NO: 1241912
gccacuuucuaggauccaa

SEQ ID NO: 1309311 - RNA, 19 nt, Artificial Sequence
  Description of Artificial Sequence: Synthetic oligonucleotide
  Antisense strand to SEQ ID NO: 1309310
uuggauccuagaaaguggc

SEQ ID NO: 1309312 - RNA, 19 nt, Artificial Sequence
  Description of Artificial Sequence: Synthetic oligonucleotide
  Sense strand starting at position 1992 of SEQ ID NO: 1241912
agggacuguugcuacaaca

SEQ ID NO: 1309313 - RNA, 19 nt, Artificial Sequence
  Description of Artificial Sequence: Synthetic oligonucleotide
  Antisense strand to SEQ ID NO: 1309312
uguuguagcaacagucccu

SEQ ID NO: 1309314 - RNA, 19 nt, Artificial Sequence
  Description of Artificial Sequence: Synthetic oligonucleotide
  Sense strand starting at position 2112 of SEQ ID NO: 1241912
gcugaaaucaugcaagguu

SEQ ID NO: 1309315 - RNA, 19 nt, Artificial Sequence
  Description of Artificial Sequence: Synthetic oligonucleotide
  Antisense strand to SEQ ID NO: 1309314
aaccuugcaugauuucagc

SEQ ID NO: 1309316 - RNA, 19 nt, Artificial Sequence
  Description of Artificial Sequence: Synthetic oligonucleotide
  Sense strand starting at position 2132 of SEQ ID NO: 1241912
acuccuuggccacagaauu

SEQ ID NO: 1309317 - RNA, 19 nt, Artificial Sequence
  Description of Artificial Sequence: Synthetic oligonucleotide
  Antisense strand to SEQ ID NO: 1309316
aauucuguggccaaggagu

SEQ ID NO: 1309318 - RNA, 19 nt, Artificial Sequence
  Description of Artificial Sequence: Synthetic oligonucleotide
  Sense strand starting at position 2143 of SEQ ID NO: 1241912
acagaauuguauggagaca

SEQ ID NO: 1309319 - RNA, 19 nt, Artificial Sequence
  Description of Artificial Sequence: Synthetic oligonucleotide
  Antisense strand to SEQ ID NO: 1309318
ugucuccauacaauucugu

SEQ ID NO: 1309320 - RNA, 19 nt, Artificial Sequence
  Description of Artificial Sequence: Synthetic oligonucleotide
  Sense strand starting at position 2549 of SEQ ID NO: 1241912
uccugaugcucuggacaaa

SEQ ID NO: 1309321 - RNA, 19 nt, Artificial Sequence
  Description of Artificial Sequence: Synthetic oligonucleotide
  Antisense strand to SEQ ID NO: 1309320
uuuguccagagcaucagga

SEQ ID NO: 1309322 - RNA, 19 nt, Artificial Sequence
  Description of Artificial Sequence: Synthetic oligonucleotide
  Sense strand starting at position 2550 of SEQ ID NO: 1241912
ccugaugcucuggacaaau

SEQ ID NO: 1309323 - RNA, 19 nt, Artificial Sequence
  Description of Artificial Sequence: Synthetic oligonucleotide
  Antisense strand to SEQ ID NO: 1309322
auuuguccagagcaucagg

SEQ ID NO: 1309324 - RNA, 19 nt, Artificial Sequence
  Description of Artificial Sequence: Synthetic oligonucleotide
  Sense strand starting at position 2575 of SEQ ID NO: 1241912
cucuuuaguucagcggaga

SEQ ID NO: 1309325 - RNA, 19 nt, Artificial Sequence
  Description of Artificial Sequence: Synthetic oligonucleotide
  Antisense strand to SEQ ID NO: 1309324
ucuccgcugaacuaaagag

SEQ ID NO: 1309326 - RNA, 19 nt, Artificial Sequence
  Description of Artificial Sequence: Synthetic oligonucleotide
  Sense strand starting at position 2578 of SEQ ID NO: 1241912
uuuaguucagcggagacau

SEQ ID NO: 1309327 - RNA, 19 nt, Artificial Sequence
  Description of Artificial Sequence: Synthetic oligonucleotide
  Antisense strand to SEQ ID NO: 1309326
augucuccgcugaacuaaa

SEQ ID NO: 1309328 - RNA, 19 nt, Artificial Sequence
  Description of Artificial Sequence: Synthetic oligonucleotide
  Sense strand starting at position 2589 of SEQ ID NO: 1241912
ggagacauggguggauguu

SEQ ID NO: 1309329 - RNA, 19 nt, Artificial Sequence
  Description of Artificial Sequence: Synthetic oligonucleotide
  Antisense strand to SEQ ID NO: 1309328
aacauccacccaugucucc

SEQ ID NO: 1309330 - RNA, 19 nt, Artificial Sequence
  Description of Artificial Sequence: Synthetic oligonucleotide
  Sense strand starting at position 2702 of SEQ ID NO: 1241912
aaggcagaaugucugauau

SEQ ID NO: 1309331 - RNA, 19 nt, Artificial Sequence
  Description of Artificial Sequence: Synthetic oligonucleotide
  Antisense strand to SEQ ID NO: 1309330
auaucagacauucugccuu

SEQ ID NO: 1309332 - RNA, 19 nt, Artificial Sequence
  Description of Artificial Sequence: Synthetic oligonucleotide
  Sense strand starting at position 2704 of SEQ ID NO: 1241912
ggcagaaugucugauauaa

SEQ ID NO: 1309333 - RNA, 19 nt, Artificial Sequence
  Description of Artificial Sequence: Synthetic oligonucleotide
  Antisense strand to SEQ ID NO: 1309332
uuauaucagacauucugcc

SEQ ID NO: 1309334 - RNA, 19 nt, Artificial Sequence
  Description of Artificial Sequence: Synthetic oligonucleotide
  Sense strand starting at position 2804 of SEQ ID NO: 1241912
gccugucugucccagacaa

SEQ ID NO: 1309335 - RNA, 19 nt, Artificial Sequence
  Description of Artificial Sequence: Synthetic oligonucleotide
  Antisense strand to SEQ ID NO: 1309334
uugucugggacagacaggc

SEQ ID NO: 1309336 - RNA, 19 nt, Artificial Sequence
  Description of Artificial Sequence: Synthetic oligonucleotide
  Sense strand starting at position 2817 of SEQ ID NO: 1241912
agacaagcuuggucccaaa

SEQ ID NO: 1309337 - RNA, 19 nt, Artificial Sequence
  Description of Artificial Sequence: Synthetic oligonucleotide
  Antisense strand to SEQ ID NO: 1309336
uuugggaccaagcuugucu

SEQ ID NO: 1309338 - RNA, 19 nt, Artificial Sequence
  Description of Artificial Sequence: Synthetic oligonucleotide
  Sense strand starting at position 2928 of SEQ ID NO: 1241912
auagaugacuuacaguguu

SEQ ID NO: 1309339 - RNA, 19 nt, Artificial Sequence
  Description of Artificial Sequence: Synthetic oligonucleotide
  Antisense strand to SEQ ID NO: 1309338
aacacuguaagucaucuau

SEQ ID NO: 1309340 - RNA, 19 nt, Artificial Sequence
  Description of Artificial Sequence: Synthetic oligonucleotide
  Sense strand starting at position 2931 of SEQ ID NO: 1241912
gaugacuuacaguguucuu

SEQ ID NO: 1309341 - RNA, 19 nt, Artificial Sequence
  Description of Artificial Sequence: Synthetic oligonucleotide
  Antisense strand to SEQ ID NO: 1309340
aagaacacuguaagucauc

SEQ ID NO: 1309342 - RNA, 19 nt, Artificial Sequence
  Description of Artificial Sequence: Synthetic oligonucleotide
  Sense strand starting at position 2955 of SEQ ID NO: 1241912
ccucaaugguggcacaaua

SEQ ID NO: 1309343 - RNA, 19 nt, Artificial Sequence
  Description of Artificial Sequence: Synthetic oligonucleotide
  Antisense strand to SEQ ID NO: 1309342
uauugugccaccauugagg

SEQ ID NO: 1309344 - RNA, 19 nt, Artificial Sequence
  Description of Artificial Sequence: Synthetic oligonucleotide
  Sense strand starting at position 3486 of SEQ ID NO: 1241912
ggacacuuccucugaacaa

SEQ ID NO: 1309345 - RNA, 19 nt, Artificial Sequence
  Description of Artificial Sequence: Synthetic oligonucleotide
  Antisense strand to SEQ ID NO: 1309344
uuguucagaggaagugucc

SEQ ID NO: 1309346 - RNA, 19 nt, Artificial Sequence
  Description of Artificial Sequence: Synthetic oligonucleotide
  Sense strand starting at position 3546 of SEQ ID NO: 1241912
ccuauuaguucuuauuuga

SEQ ID NO: 1309347 - RNA, 19 nt, Artificial Sequence
  Description of Artificial Sequence: Synthetic oligonucleotide
  Antisense strand to SEQ ID NO: 1309346
ucaaauaagaacuaauagg

SEQ ID NO: 1309348 - RNA, 19 nt, Artificial Sequence
  Description of Artificial Sequence: Synthetic oligonucleotide
  Sense strand starting at position 3582 of SEQ ID NO: 1241912
gaaagauagugggcucugu

SEQ ID NO: 1309349 - RNA, 19 nt, Artificial Sequence
  Description of Artificial Sequence: Synthetic oligonucleotide
  Antisense strand to SEQ ID NO: 1309348
acagagcccacuaucuuuc

SEQ ID NO: 1309350 - RNA, 19 nt, Artificial Sequence
  Description of Artificial Sequence: Synthetic oligonucleotide
  Sense strand starting at position 3586 of SEQ ID NO: 1241912
gauagugggcucuguuacu

SEQ ID NO: 1309351 - RNA, 19 nt, Artificial Sequence
  Description of Artificial Sequence: Synthetic oligonucleotide
  Antisense strand to SEQ ID NO: 1309350
aguaacagagcccacuauc

SEQ ID NO: 1309352 - RNA, 19 nt, Artificial Sequence
  Description of Artificial Sequence: Synthetic oligonucleotide
  Sense strand starting at position 3600 of SEQ ID NO: 1241912
uuacuaagcagcuguguga

SEQ ID NO: 1309353 - RNA, 19 nt, Artificial Sequence
  Description of Artificial Sequence: Synthetic oligonucleotide
  Antisense strand to SEQ ID NO: 1309352
ucacacagcugcuuaguaa

SEQ ID NO: 1309354 - RNA, 19 nt, Artificial Sequence
  Description of Artificial Sequence: Synthetic oligonucleotide
  Sense strand starting at position 3741 of SEQ ID NO: 1241912
cagcgucuggcauauaaga

SEQ ID NO: 1309355 - RNA, 19 nt, Artificial Sequence
  Description of Artificial Sequence: Synthetic oligonucleotide
  Antisense strand to SEQ ID NO: 1309354
ucuuauaugccagacgcug

SEQ ID NO: 1309356 - RNA, 19 nt, Artificial Sequence
  Description of Artificial Sequence: Synthetic oligonucleotide
  Sense strand starting at position 3743 of SEQ ID NO: 1241912
gcgucuggcauauaagagu

SEQ ID NO: 1309357 - RNA, 19 nt, Artificial Sequence
  Description of Artificial Sequence: Synthetic oligonucleotide
  Antisense strand to SEQ ID NO: 1309356
acucuuauaugccagacgc

SEQ ID NO: 1309358 - RNA, 19 nt, Artificial Sequence
  Description of Artificial Sequence: Synthetic oligonucleotide
  Sense strand starting at position 3900 of SEQ ID NO: 1241912
cacugagaugugggccuua

SEQ ID NO: 1309359 - RNA, 19 nt, Artificial Sequence
  Description of Artificial Sequence: Synthetic oligonucleotide
  Antisense strand to SEQ ID NO: 1309358
uaaggcccacaucucagug

SEQ ID NO: 1309360 - RNA, 19 nt, Artificial Sequence
  Description of Artificial Sequence: Synthetic oligonucleotide
  Sense strand starting at position 3905 of SEQ ID NO: 1241912
agaugugggccuuaaaucu

SEQ ID NO: 1309361 - RNA, 19 nt, Artificial Sequence
  Description of Artificial Sequence: Synthetic oligonucleotide
  Antisense strand to SEQ ID NO: 1309360
agauuuaaggcccacaucu

SEQ ID NO: 1309362 - RNA, 19 nt, Artificial Sequence
  Description of Artificial Sequence: Synthetic oligonucleotide
  Sense strand starting at position 435 of SEQ ID NO: 1241913
auccuuauaggcgauucua

SEQ ID NO: 1309363 - RNA, 19 nt, Artificial Sequence
  Description of Artificial Sequence: Synthetic oligonucleotide
  Antisense strand to SEQ ID NO: 1309362
uagaaucgccuauaaggau

SEQ ID NO: 1309364 - RNA, 19 nt, Artificial Sequence
  Description of Artificial Sequence: Synthetic oligonucleotide
  Sense strand starting at position 443 of SEQ ID NO: 1241913
aggcgauucuacccagcua

SEQ ID NO: 1309365 - RNA, 19 nt, Artificial Sequence
  Description of Artificial Sequence: Synthetic oligonucleotide
  Antisense strand to SEQ ID NO: 1309364
uagcuggguagaaucgccu

SEQ ID NO: 1309366 - RNA, 19 nt, Artificial Sequence
  Description of Artificial Sequence: Synthetic oligonucleotide
  Sense strand starting at position 444 of SEQ ID NO: 1241913
ggcgauucuacccagcuau

SEQ ID NO: 1309367 - RNA, 19 nt, Artificial Sequence
  Description of Artificial Sequence: Synthetic oligonucleotide
  Antisense strand to SEQ ID NO: 1309366
auagcuggguagaaucgcc

SEQ ID NO: 1309368 - RNA, 19 nt, Artificial Sequence
  Description of Artificial Sequence: Synthetic oligonucleotide
  Sense strand starting at position 760 of SEQ ID NO: 1241913
cccagcuauuuggcuuauu

SEQ ID NO: 1309369 - RNA, 19 nt, Artificial Sequence
  Description of Artificial Sequence: Synthetic oligonucleotide
  Antisense strand to SEQ ID NO: 1309368
aauaagccaaauagcuggg

SEQ ID NO: 1309370 - RNA, 19 nt, Artificial Sequence
  Description of Artificial Sequence: Synthetic oligonucleotide
  Sense strand starting at position 781 of SEQ ID NO: 1241913
accugaguguaacuacaaa

SEQ ID NO: 1309371 - RNA, 19 nt, Artificial Sequence
  Description of Artificial Sequence: Synthetic oligonucleotide
  Antisense strand to SEQ ID NO: 1309370
uuuguaguuacacucaggu

SEQ ID NO: 1309372 - RNA, 19 nt, Artificial Sequence
  Description of Artificial Sequence: Synthetic oligonucleotide
  Sense strand starting at position 818 of SEQ ID NO: 1241913
caaguaucugugugccuuu

SEQ ID NO: 1309373 - RNA, 19 nt, Artificial Sequence
  Description of Artificial Sequence: Synthetic oligonucleotide
  Antisense strand to SEQ ID NO: 1309372
aaaggcacacagauacuug

SEQ ID NO: 1309374 - RNA, 19 nt, Artificial Sequence
  Description of Artificial Sequence: Synthetic oligonucleotide
  Sense strand starting at position 851 of SEQ ID NO: 1241913
cugcuaucccuguggguua

SEQ ID NO: 1309375 - RNA, 19 nt, Artificial Sequence
  Description of Artificial Sequence: Synthetic oligonucleotide
  Antisense strand to SEQ ID NO: 1309374
uaacccacagggauagcag

SEQ ID NO: 1309376 - RNA, 19 nt, Artificial Sequence
  Description of Artificial Sequence: Synthetic oligonucleotide
  Sense strand starting at position 1048 of SEQ ID NO: 1241913
gggauacggugaucaacaa

SEQ ID NO: 1309377 - RNA, 19 nt, Artificial Sequence
  Description of Artificial Sequence: Synthetic oligonucleotide
  Antisense strand to SEQ ID NO: 1309376
uuguugaucaccguauccc

SEQ ID NO: 1309378 - RNA, 19 nt, Artificial Sequence
  Description of Artificial Sequence: Synthetic oligonucleotide
  Sense strand starting at position 1099 of SEQ ID NO: 1241913
aagcaucuguguuccagga

SEQ ID NO: 1309379 - RNA, 19 nt, Artificial Sequence
  Description of Artificial Sequence: Synthetic oligonucleotide
  Antisense strand to SEQ ID NO: 1309378
uccuggaacacagaugcuu

SEQ ID NO: 1309380 - RNA, 19 nt, Artificial Sequence
  Description of Artificial Sequence: Synthetic oligonucleotide
  Sense strand starting at position 1202 of SEQ ID NO: 1241913
cugggaaucuccugggaga

SEQ ID NO: 1309381 - RNA, 19 nt, Artificial Sequence
  Description of Artificial Sequence: Synthetic oligonucleotide
  Antisense strand to SEQ ID NO: 1309380
ucucccaggagauucccag

SEQ ID NO: 1309382 - RNA, 19 nt, Artificial Sequence
  Description of Artificial Sequence: Synthetic oligonucleotide
  Sense strand starting at position 1205 of SEQ ID NO: 1241913
ggaaucuccugggagaucu

SEQ ID NO: 1309383 - RNA, 19 nt, Artificial Sequence
  Description of Artificial Sequence: Synthetic oligonucleotide
  Antisense strand to SEQ ID NO: 1309382
agaucucccaggagauucc

SEQ ID NO: 1309384 - RNA, 19 nt, Artificial Sequence
  Description of Artificial Sequence: Synthetic oligonucleotide
  Sense strand starting at position 1273 of SEQ ID NO: 1241913
cagcaauaagagugcagaa

SEQ ID NO: 1309385 - RNA, 19 nt, Artificial Sequence
  Description of Artificial Sequence: Synthetic oligonucleotide
  Antisense strand to SEQ ID NO: 1309384
uucugcacucuuauugcug

SEQ ID NO: 1309386 - RNA, 19 nt, Artificial Sequence
  Description of Artificial Sequence: Synthetic oligonucleotide
  Sense strand starting at position 1305 of SEQ ID NO: 1241913
gguggucagcauugacaac

SEQ ID NO: 1309387 - RNA, 19 nt, Artificial Sequence
  Description of Artificial Sequence: Synthetic oligonucleotide
  Antisense strand to SEQ ID NO: 1309386
guugucaaugcugaccacc

SEQ ID NO: 1309388 - RNA, 19 nt, Artificial Sequence
  Description of Artificial Sequence: Synthetic oligonucleotide
  Sense strand starting at position 1510 of SEQ ID NO: 1241913
cggauucaugcaggugcau

SEQ ID NO: 1309389 - RNA, 19 nt, Artificial Sequence
  Description of Artificial Sequence: Synthetic oligonucleotide
  Antisense strand to SEQ ID NO: 1309388
augcaccugcaugaauccg

SEQ ID NO: 1309390 - RNA, 19 nt, Artificial Sequence
  Description of Artificial Sequence: Synthetic oligonucleotide
  Sense strand starting at position 2078 of SEQ ID NO: 1241913
ucccuauuccuggagcugu

SEQ ID NO: 1309391 - RNA, 19 nt, Artificial Sequence
  Description of Artificial Sequence: Synthetic oligonucleotide
  Antisense strand to SEQ ID NO: 1309390
acagcuccaggaauaggga

SEQ ID NO: 1309392 - RNA, 19 nt, Artificial Sequence
  Description of Artificial Sequence: Synthetic oligonucleotide
  Sense strand starting at position 2221 of SEQ ID NO: 1241913
cacugcucucaagaguguu

SEQ ID NO: 1309393 - RNA, 19 nt, Artificial Sequence
  Description of Artificial Sequence: Synthetic oligonucleotide
  Antisense strand to SEQ ID NO: 1309392
aacacucuugagagcagug

SEQ ID NO: 1309394 - RNA, 19 nt, Artificial Sequence
  Description of Artificial Sequence: Synthetic oligonucleotide
  Sense strand starting at position 2237 of SEQ ID NO: 1241913
guugcagcuugaucgguaa

SEQ ID NO: 1309395 - RNA, 19 nt, Artificial Sequence
  Description of Artificial Sequence: Synthetic oligonucleotide
  Antisense strand to SEQ ID NO: 1309394
uuaccgaucaagcugcaac

SEQ ID NO: 1309396 - RNA, 19 nt, Artificial Sequence
  Description of Artificial Sequence: Synthetic oligonucleotide
  Sense strand starting at position 2260 of SEQ ID NO: 1241913
gcuacuucuguugaagaau

SEQ ID NO: 1309397 - RNA, 19 nt, Artificial Sequence
  Description of Artificial Sequence: Synthetic oligonucleotide
  Antisense strand to SEQ ID NO: 1309396
auucuucaacagaaguagc

SEQ ID NO: 1309398 - RNA, 19 nt, Artificial Sequence
  Description of Artificial Sequence: Synthetic oligonucleotide
  Sense strand starting at position 2271 of SEQ ID NO: 1241913
ugaagaaucuaccagccau

SEQ ID NO: 1309399 - RNA, 19 nt, Artificial Sequence
  Description of Artificial Sequence: Synthetic oligonucleotide
  Antisense strand to SEQ ID NO: 1309398
auggcugguagauucuuca

SEQ ID NO: 1309400 - RNA, 19 nt, Artificial Sequence
  Description of Artificial Sequence: Synthetic oligonucleotide
  Sense strand starting at position 2432 of SEQ ID NO: 1241913
uuuagauuggguggucagu

SEQ ID NO: 1309401 - RNA, 19 nt, Artificial Sequence
  Description of Artificial Sequence: Synthetic oligonucleotide
  Antisense strand to SEQ ID NO: 1309400
acugaccacccaaucuaaa

SEQ ID NO: 1309402 - RNA, 19 nt, Artificial Sequence
  Description of Artificial Sequence: Synthetic oligonucleotide
  Sense strand starting at position 2434 of SEQ ID NO: 1241913
uagauuggguggucaguua

SEQ ID NO: 1309403 - RNA, 19 nt, Artificial Sequence
  Description of Artificial Sequence: Synthetic oligonucleotide
  Antisense strand to SEQ ID NO: 1309402
uaacugaccacccaaucua

SEQ ID NO: 1309404 - RNA, 19 nt, Artificial Sequence
  Description of Artificial Sequence: Synthetic oligonucleotide
  Sense strand starting at position 2443 of SEQ ID NO: 1241913
uggucaguuaauggaaauu

SEQ ID NO: 1309405 - RNA, 19 nt, Artificial Sequence
  Description of Artificial Sequence: Synthetic oligonucleotide
  Antisense strand to SEQ ID NO: 1309404
aauuuccauuaacugacca

SEQ ID NO: 1309406 - RNA, 19 nt, Artificial Sequence
  Description of Artificial Sequence: Synthetic oligonucleotide
  Sense strand starting at position 2518 of SEQ ID NO: 1241913
cagugauggcacuagagua

SEQ ID NO: 1309407 - RNA, 19 nt, Artificial Sequence
  Description of Artificial Sequence: Synthetic oligonucleotide
  Antisense strand to SEQ ID NO: 1309406
uacucuagugccaucacug

SEQ ID NO: 1309408 - RNA, 19 nt, Artificial Sequence
  Description of Artificial Sequence: Synthetic oligonucleotide
  Sense strand starting at position 2557 of SEQ ID NO: 1241913
aguucugagcacugcaaga

SEQ ID NO: 1309409 - RNA, 19 nt, Artificial Sequence
  Description of Artificial Sequence: Synthetic oligonucleotide
  Antisense strand to SEQ ID NO: 1309408
ucuugcagugcucagaacu

SEQ ID NO: 1309410 - RNA, 19 nt, Artificial Sequence
  Description of Artificial Sequence: Synthetic oligonucleotide
  Sense strand starting at position 2559 of SEQ ID NO: 1241913
uucugagcacugcaagaaa

SEQ ID NO: 1309411 - RNA, 19 nt, Artificial Sequence
  Description of Artificial Sequence: Synthetic oligonucleotide
  Antisense strand to SEQ ID NO: 1309410
uuucuugcagugcucagaa

SEQ ID NO: 1309412 - RNA, 19 nt, Artificial Sequence
  Description of Artificial Sequence: Synthetic oligonucleotide
  Sense strand starting at position 2562 of SEQ ID NO: 1241913
ugagcacugcaagaaauua

SEQ ID NO: 1309413 - RNA, 19 nt, Artificial Sequence
  Description of Artificial Sequence: Synthetic oligonucleotide
  Antisense strand to SEQ ID NO: 1309412
uaauuucuugcagugcuca

SEQ ID NO: 1309414 - RNA, 19 nt, Artificial Sequence
  Description of Artificial Sequence: Synthetic oligonucleotide
  Sense strand starting at position 2570 of SEQ ID NO: 1241913
gcaagaaauuauuacaaag

SEQ ID NO: 1309415 - RNA, 19 nt, Artificial Sequence
  Description of Artificial Sequence: Synthetic oligonucleotide
  Antisense strand to SEQ ID NO: 1309414
cuuuguaauaauuucuugc

SEQ ID NO: 1309416 - RNA, 19 nt, Artificial Sequence
  Description of Artificial Sequence: Synthetic oligonucleotide
  Sense strand starting at position 2687 of SEQ ID NO: 1241913
gguugcucuauagagaggu

SEQ ID NO: 1309417 - RNA, 19 nt, Artificial Sequence
  Description of Artificial Sequence: Synthetic oligonucleotide
  Antisense strand to SEQ ID NO: 1309416
accucucuauagagcaacc

SEQ ID NO: 1309418 - RNA, 19 nt, Artificial Sequence
  Description of Artificial Sequence: Synthetic oligonucleotide
  Sense strand starting at position 2712 of SEQ ID NO: 1241913
ugaacugggcuucgaagaa

SEQ ID NO: 1309419 - RNA, 19 nt, Artificial Sequence
  Description of Artificial Sequence: Synthetic oligonucleotide
  Antisense strand to SEQ ID NO: 1309418
uucuucgaagcccaguuca

SEQ ID NO: 1309420 - RNA, 19 nt, Artificial Sequence
  Description of Artificial Sequence: Synthetic oligonucleotide
  Sense strand starting at position 2716 of SEQ ID NO: 1241913
cugggcuucgaagaaugau

SEQ ID NO: 1309421 - RNA, 19 nt, Artificial Sequence
  Description of Artificial Sequence: Synthetic oligonucleotide
  Antisense strand to SEQ ID NO: 1309420
aucauucuucgaagcccag

SEQ ID NO: 1309422 - RNA, 19 nt, Artificial Sequence
  Description of Artificial Sequence: Synthetic oligonucleotide
  Sense strand starting at position 2733 of SEQ ID NO: 1241913
aucagaaauccugggcuag

SEQ ID NO: 1309423 - RNA, 19 nt, Artificial Sequence
  Description of Artificial Sequence: Synthetic oligonucleotide
  Antisense strand to SEQ ID NO: 1309422
cuagcccaggauuucugau

SEQ ID NO: 1309424 - RNA, 19 nt, Artificial Sequence
  Description of Artificial Sequence: Synthetic oligonucleotide
  Sense strand starting at position 2734 of SEQ ID NO: 1241913
ucagaaauccugggcuaga

SEQ ID NO: 1309425 - RNA, 19 nt, Artificial Sequence
  Description of Artificial Sequence: Synthetic oligonucleotide
  Antisense strand to SEQ ID NO: 1309424
ucuagcccaggauuucuga

SEQ ID NO: 1309426 - RNA, 19 nt, Artificial Sequence
  Description of Artificial Sequence: Synthetic oligonucleotide
  Sense strand starting at position 2735 of SEQ ID NO: 1241913
cagaaauccugggcuagaa

SEQ ID NO: 1309427 - RNA, 19 nt, Artificial Sequence
  Description of Artificial Sequence: Synthetic oligonucleotide
  Antisense strand to SEQ ID NO: 1309426
uucuagcccaggauuucug

SEQ ID NO: 1309428 - RNA, 19 nt, Artificial Sequence
  Description of Artificial Sequence: Synthetic oligonucleotide
  Sense strand starting at position 3217 of SEQ ID NO: 1241913
caguguguauguguggaaa

SEQ ID NO: 1309429 - RNA, 19 nt, Artificial Sequence
  Description of Artificial Sequence: Synthetic oligonucleotide
  Antisense strand to SEQ ID NO: 1309428
uuuccacacauacacacug

SEQ ID NO: 1309430 - RNA, 19 nt, Artificial Sequence
  Description of Artificial Sequence: Synthetic oligonucleotide
  Sense strand starting at position 3221 of SEQ ID NO: 1241913
guguauguguggaaagguc

SEQ ID NO: 1309431 - RNA, 19 nt, Artificial Sequence
  Description of Artificial Sequence: Synthetic oligonucleotide
  Antisense strand to SEQ ID NO: 1309430
gaccuuuccacacauacac

SEQ ID NO: 1309432 - RNA, 19 nt, Artificial Sequence
  Description of Artificial Sequence: Synthetic oligonucleotide
  Sense strand starting at position 3603 of SEQ ID NO: 1241913
ccaucuuccugccugggaa

SEQ ID NO: 1309433 - RNA, 19 nt, Artificial Sequence
  Description of Artificial Sequence: Synthetic oligonucleotide
  Antisense strand to SEQ ID NO: 1309432
uucccaggcaggaagaugg

SEQ ID NO: 1309434 - RNA, 19 nt, Artificial Sequence
  Description of Artificial Sequence: Synthetic oligonucleotide
  Sense strand starting at position 3606 of SEQ ID NO: 1241913
ucuuccugccugggaagau

SEQ ID NO: 1309435 - RNA, 19 nt, Artificial Sequence
  Description of Artificial Sequence: Synthetic oligonucleotide
  Antisense strand to SEQ ID NO: 1309434
aucuucccaggcaggaaga

SEQ ID NO: 1309436 - RNA, 19 nt, Artificial Sequence
  Description of Artificial Sequence: Synthetic oligonucleotide
  Sense strand starting at position 3805 of SEQ ID NO: 1241913
ccuccuugccugugagaag

SEQ ID NO: 1309437 - RNA, 19 nt, Artificial Sequence
  Description of Artificial Sequence: Synthetic oligonucleotide
  Antisense strand to SEQ ID NO: 1309436
cuucucacaggcaaggagg

SEQ ID NO: 1309438 - RNA, 19 nt, Artificial Sequence
  Description of Artificial Sequence: Synthetic oligonucleotide
  Sense strand starting at position 3908 of SEQ ID NO: 1241913
ugggcuugcuccucaaaug

SEQ ID NO: 1309439 - RNA, 19 nt, Artificial Sequence
  Description of Artificial Sequence: Synthetic oligonucleotide
  Antisense strand to SEQ ID NO: 1309438
cauuugaggagcaagccca

SEQ ID NO: 1309440 - RNA, 19 nt, Artificial Sequence
  Description of Artificial Sequence: Synthetic oligonucleotide
  Sense strand starting at position 3909 of SEQ ID NO: 1241913
gggcuugcuccucaaaugu

SEQ ID NO: 1309441 - RNA, 19 nt, Artificial Sequence
  Description of Artificial Sequence: Synthetic oligonucleotide
  Antisense strand to SEQ ID NO: 1309440
acauuugaggagcaagccc

SEQ ID NO: 1309442 - RNA, 19 nt, Artificial Sequence
  Description of Artificial Sequence: Synthetic oligonucleotide
  Sense strand starting at position 82 of SEQ ID NO: 1241914
guacccauaucacuuguua

SEQ ID NO: 1309443 - RNA, 19 nt, Artificial Sequence
  Description of Artificial Sequence: Synthetic oligonucleotide
  Antisense strand to SEQ ID NO: 1309442
uaacaagugauauggguac

SEQ ID NO: 1309444 - RNA, 19 nt, Artificial Sequence
  Description of Artificial Sequence: Synthetic oligonucleotide
  Sense strand starting at position 86 of SEQ ID NO: 1241914
ccauaucacuuguuagaga

SEQ ID NO: 1309445 - RNA, 19 nt, Artificial Sequence
  Description of Artificial Sequence: Synthetic oligonucleotide
  Antisense strand to SEQ ID NO: 1309444
ucucuaacaagugauaugg

SEQ ID NO: 1309446 - RNA, 19 nt, Artificial Sequence
  Description of Artificial Sequence: Synthetic oligonucleotide
  Sense strand starting at position 99 of SEQ ID NO: 1241914
uagagaucccugcaaguua

SEQ ID NO: 1309447 - RNA, 19 nt, Artificial Sequence
  Description of Artificial Sequence: Synthetic oligonucleotide
  Antisense strand to SEQ ID NO: 1309446
uaacuugcagggaucucua

SEQ ID NO: 1309448 - RNA, 19 nt, Artificial Sequence
  Description of Artificial Sequence: Synthetic oligonucleotide
  Sense strand starting at position 141 of SEQ ID NO: 1241914
cuuuacagagcuugguaaa

SEQ ID NO: 1309449 - RNA, 19 nt, Artificial Sequence
  Description of Artificial Sequence: Synthetic oligonucleotide
  Antisense strand to SEQ ID NO: 1309448
uuuaccaagcucuguaaag

SEQ ID NO: 1309450 - RNA, 19 nt, Artificial Sequence
  Description of Artificial Sequence: Synthetic oligonucleotide
  Sense strand starting at position 204 of SEQ ID NO: 1241914
uaauaauaggucugguugu

SEQ ID NO: 1309451 - RNA, 19 nt, Artificial Sequence
  Description of Artificial Sequence: Synthetic oligonucleotide
  Antisense strand to SEQ ID NO: 1309450
acaaccagaccuauuauua

SEQ ID NO: 1309452 - RNA, 19 nt, Artificial Sequence
  Description of Artificial Sequence: Synthetic oligonucleotide
  Sense strand starting at position 290 of SEQ ID NO: 1241914
uccuguaugcaugaucuuu

SEQ ID NO: 1309453 - RNA, 19 nt, Artificial Sequence
  Description of Artificial Sequence: Synthetic oligonucleotide
  Antisense strand to SEQ ID NO: 1309452
aaagaucaugcauacagga

SEQ ID NO: 1309454 - RNA, 19 nt, Artificial Sequence
  Description of Artificial Sequence: Synthetic oligonucleotide
  Sense strand starting at position 422 of SEQ ID NO: 1241914
agggaagguuggaauugua

SEQ ID NO: 1309455 - RNA, 19 nt, Artificial Sequence
  Description of Artificial Sequence: Synthetic oligonucleotide
  Antisense strand to SEQ ID NO: 1309454
uacaauuccaaccuucccu

SEQ ID NO: 1309456 - RNA, 19 nt, Artificial Sequence
  Description of Artificial Sequence: Synthetic oligonucleotide
  Sense strand starting at position 429 of SEQ ID NO: 1241914
guuggaauuguaugaaaua

SEQ ID NO: 1309457 - RNA, 19 nt, Artificial Sequence
  Description of Artificial Sequence: Synthetic oligonucleotide
  Antisense strand to SEQ ID NO: 1309456
uauuucauacaauuccaac

SEQ ID NO: 1309458 - RNA, 19 nt, Artificial Sequence
  Description of Artificial Sequence: Synthetic oligonucleotide
  Sense strand starting at position 478 of SEQ ID NO: 1241914
gacauaaugugcuuggaaa

SEQ ID NO: 1309459 - RNA, 19 nt, Artificial Sequence
  Description of Artificial Sequence: Synthetic oligonucleotide
  Antisense strand to SEQ ID NO: 1309458
uuuccaagcacauuauguc

SEQ ID NO: 1309460 - RNA, 19 nt, Artificial Sequence
  Description of Artificial Sequence: Synthetic oligonucleotide
  Sense strand starting at position 479 of SEQ ID NO: 1241914
acauaaugugcuuggaaau

SEQ ID NO: 1309461 - RNA, 19 nt, Artificial Sequence
  Description of Artificial Sequence: Synthetic oligonucleotide
  Antisense strand to SEQ ID NO: 1309460
auuuccaagcacauuaugu

SEQ ID NO: 1309462 - RNA, 19 nt, Artificial Sequence
  Description of Artificial Sequence: Synthetic oligonucleotide
  Sense strand starting at position 480 of SEQ ID NO: 1241914
cauaaugugcuuggaaaua

SEQ ID NO: 1309463 - RNA, 19 nt, Artificial Sequence
  Description of Artificial Sequence: Synthetic oligonucleotide
  Antisense strand to SEQ ID NO: 1309462
uauuuccaagcacauuaug

SEQ ID NO: 1309464 - RNA, 19 nt, Artificial Sequence
  Description of Artificial Sequence: Synthetic oligonucleotide
  Sense strand starting at position 590 of SEQ ID NO: 1241914
auguccuaucccugagagu

SEQ ID NO: 1309465 - RNA, 19 nt, Artificial Sequence
  Description of Artificial Sequence: Synthetic oligonucleotide
  Antisense strand to SEQ ID NO: 1309464
acucucagggauaggacau

SEQ ID NO: 1309466 - RNA, 19 nt, Artificial Sequence
  Description of Artificial Sequence: Synthetic oligonucleotide
  Sense strand starting at position 591 of SEQ ID NO: 1241914
uguccuaucccugagaguu

SEQ ID NO: 1309467 - RNA, 19 nt, Artificial Sequence
  Description of Artificial Sequence: Synthetic oligonucleotide
  Antisense strand to SEQ ID NO: 1309466
aacucucagggauaggaca

SEQ ID NO: 1309468 - RNA, 19 nt, Artificial Sequence
  Description of Artificial Sequence: Synthetic oligonucleotide
  Sense strand starting at position 612 of SEQ ID NO: 1241914
gggucccgacucuaauaaa

SEQ ID NO: 1309469 - RNA, 19 nt, Artificial Sequence
  Description of Artificial Sequence: Synthetic oligonucleotide
  Antisense strand to SEQ ID NO: 1309468
uuuauuagagucgggaccc

SEQ ID NO: 1309470 - RNA, 19 nt, Artificial Sequence
  Description of Artificial Sequence: Synthetic oligonucleotide
  Sense strand starting at position 887 of SEQ ID NO: 1241914
aaauguaaugcuuaugggu

SEQ ID NO: 1309471 - RNA, 19 nt, Artificial Sequence
  Description of Artificial Sequence: Synthetic oligonucleotide
  Antisense strand to SEQ ID NO: 1309470
acccauaagcauuacauuu

SEQ ID NO: 1309472 - RNA, 19 nt, Artificial Sequence
  Description of Artificial Sequence: Synthetic oligonucleotide
  Sense strand starting at position 901 of SEQ ID NO: 1241914
uggguagaagccugguaau

SEQ ID NO: 1309473 - RNA, 19 nt, Artificial Sequence
  Description of Artificial Sequence: Synthetic oligonucleotide
  Antisense strand to SEQ ID NO: 1309472
auuaccaggcuucuaccca

SEQ ID NO: 1309474 - RNA, 19 nt, Artificial Sequence
  Description of Artificial Sequence: Synthetic oligonucleotide
  Sense strand starting at position 912 of SEQ ID NO: 1241914
cugguaaugugacucaauu

SEQ ID NO: 1309475 - RNA, 19 nt, Artificial Sequence
  Description of Artificial Sequence: Synthetic oligonucleotide
  Antisense strand to SEQ ID NO: 1309474
aauugagucacauuaccag

SEQ ID NO: 1309476 - RNA, 19 nt, Artificial Sequence
  Description of Artificial Sequence: Synthetic oligonucleotide
  Sense strand starting at position 1012 of SEQ ID NO: 1241914
ucuagcuuucggcaaagga

SEQ ID NO: 1309477 - RNA, 19 nt, Artificial Sequence
  Description of Artificial Sequence: Synthetic oligonucleotide
  Antisense strand to SEQ ID NO: 1309476
uccuuugccgaaagcuaga

SEQ ID NO: 1309478 - RNA, 19 nt, Artificial Sequence
  Description of Artificial Sequence: Synthetic oligonucleotide
  Sense strand starting at position 1033 of SEQ ID NO: 1241914
aaaguaggucccgguacaa

SEQ ID NO: 1309479 - RNA, 19 nt, Artificial Sequence
  Description of Artificial Sequence: Synthetic oligonucleotide
  Antisense strand to SEQ ID NO: 1309478
uuguaccgggaccuacuuu

SEQ ID NO: 1309480 - RNA, 19 nt, Artificial Sequence
  Description of Artificial Sequence: Synthetic oligonucleotide
  Sense strand starting at position 1087 of SEQ ID NO: 1241914
acacuuugaucucugcaag

SEQ ID NO: 1309481 - RNA, 19 nt, Artificial Sequence
  Description of Artificial Sequence: Synthetic oligonucleotide
  Antisense strand to SEQ ID NO: 1309480
cuugcagagaucaaagugu

SEQ ID NO: 1309482 - RNA, 19 nt, Artificial Sequence
  Description of Artificial Sequence: Synthetic oligonucleotide
  Sense strand starting at position 1090 of SEQ ID NO: 1241914
cuuugaucucugcaaggau

SEQ ID NO: 1309483 - RNA, 19 nt, Artificial Sequence
  Description of Artificial Sequence: Synthetic oligonucleotide
  Antisense strand to SEQ ID NO: 1309482
auccuugcagagaucaaag

SEQ ID NO: 1309484 - RNA, 19 nt, Artificial Sequence
  Description of Artificial Sequence: Synthetic oligonucleotide
  Sense strand starting at position 1093 of SEQ ID NO: 1241914
ugaucucugcaaggaugaa

SEQ ID NO: 1309485 - RNA, 19 nt, Artificial Sequence
  Description of Artificial Sequence: Synthetic oligonucleotide
  Antisense strand to SEQ ID NO: 1309484
uucauccuugcagagauca

SEQ ID NO: 1309486 - RNA, 19 nt, Artificial Sequence
  Description of Artificial Sequence: Synthetic oligonucleotide
  Sense strand starting at position 1144 of SEQ ID NO: 1241914
gccacauugguccaaauua

SEQ ID NO: 1309487 - RNA, 19 nt, Artificial Sequence
  Description of Artificial Sequence: Synthetic oligonucleotide
  Antisense strand to SEQ ID NO: 1309486
uaauuuggaccaauguggc

SEQ ID NO: 1309488 - RNA, 19 nt, Artificial Sequence
  Description of Artificial Sequence: Synthetic oligonucleotide
  Sense strand starting at position 1256 of SEQ ID NO: 1241914
ugccgaaauaaaugggaaa

SEQ ID NO: 1309489 - RNA, 19 nt, Artificial Sequence
  Description of Artificial Sequence: Synthetic oligonucleotide
  Antisense strand to SEQ ID NO: 1309488
uuucccauuuauuucggca

SEQ ID NO: 1309490 - RNA, 19 nt, Artificial Sequence
  Description of Artificial Sequence: Synthetic oligonucleotide
  Sense strand starting at position 1429 of SEQ ID NO: 1241914
agggaaaucccaggaacgu

SEQ ID NO: 1309491 - RNA, 19 nt, Artificial Sequence
  Description of Artificial Sequence: Synthetic oligonucleotide
  Antisense strand to SEQ ID NO: 1309490
acguuccugggauuucccu

SEQ ID NO: 1309492 - RNA, 19 nt, Artificial Sequence
  Description of Artificial Sequence: Synthetic oligonucleotide
  Sense strand starting at position 1448 of SEQ ID NO: 1241914
ggaaguagauaacucucua

SEQ ID NO: 1309493 - RNA, 19 nt, Artificial Sequence
  Description of Artificial Sequence: Synthetic oligonucleotide
  Antisense strand to SEQ ID NO: 1309492
uagagaguuaucuacuucc

SEQ ID NO: 1309494 - RNA, 19 nt, Artificial Sequence
  Description of Artificial Sequence: Synthetic oligonucleotide
  Sense strand starting at position 1452 of SEQ ID NO: 1241914
guagauaacucucuagcaa

SEQ ID NO: 1309495 - RNA, 19 nt, Artificial Sequence
  Description of Artificial Sequence: Synthetic oligonucleotide
  Antisense strand to SEQ ID NO: 1309494
uugcuagagaguuaucuac

SEQ ID NO: 1309496 - RNA, 19 nt, Artificial Sequence
  Description of Artificial Sequence: Synthetic oligonucleotide
  Sense strand starting at position 1665 of SEQ ID NO: 1241914
cagugagcuccggagaaga

SEQ ID NO: 1309497 - RNA, 19 nt, Artificial Sequence
  Description of Artificial Sequence: Synthetic oligonucleotide
  Antisense strand to SEQ ID NO: 1309496
ucuucuccggagcucacug

SEQ ID NO: 1309498 - RNA, 19 nt, Artificial Sequence
  Description of Artificial Sequence: Synthetic oligonucleotide
  Sense strand starting at position 2169 of SEQ ID NO: 1241914
ggaacugucucauugggaa

SEQ ID NO: 1309499 - RNA, 19 nt, Artificial Sequence
  Description of Artificial Sequence: Synthetic oligonucleotide
  Antisense strand to SEQ ID NO: 1309498
uucccaaugagacaguucc

SEQ ID NO: 1309500 - RNA, 19 nt, Artificial Sequence
  Description of Artificial Sequence: Synthetic oligonucleotide
  Sense strand starting at position 2195 of SEQ ID NO: 1241914
guaggacgccucugaauuu

SEQ ID NO: 1309501 - RNA, 19 nt, Artificial Sequence
  Description of Artificial Sequence: Synthetic oligonucleotide
  Antisense strand to SEQ ID NO: 1309500
aaauucagaggcguccuac

SEQ ID NO: 1309502 - RNA, 19 nt, Artificial Sequence
  Description of Artificial Sequence: Synthetic oligonucleotide
  Sense strand starting at position 2231 of SEQ ID NO: 1241914
cgaauuucucucgacguuu

SEQ ID NO: 1309503 - RNA, 19 nt, Artificial Sequence
  Description of Artificial Sequence: Synthetic oligonucleotide
  Antisense strand to SEQ ID NO: 1309502
aaacgucgagagaaauucg

SEQ ID NO: 1309504 - RNA, 19 nt, Artificial Sequence
  Description of Artificial Sequence: Synthetic oligonucleotide
  Sense strand starting at position 2477 of SEQ ID NO: 1241914
auuugugugacuggugauu

SEQ ID NO: 1309505 - RNA, 19 nt, Artificial Sequence
  Description of Artificial Sequence: Synthetic oligonucleotide
  Antisense strand to SEQ ID NO: 1309504
aaucaccagucacacaaau

SEQ ID NO: 1309506 - RNA, 19 nt, Artificial Sequence
  Description of Artificial Sequence: Synthetic oligonucleotide
  Sense strand starting at position 2495 of SEQ ID NO: 1241914
ucauguaaguucuccauug

SEQ ID NO: 1309507 - RNA, 19 nt, Artificial Sequence
  Description of Artificial Sequence: Synthetic oligonucleotide
  Antisense strand to SEQ ID NO: 1309506
caauggagaacuuacauga

SEQ ID NO: 1309508 - RNA, 19 nt, Artificial Sequence
  Description of Artificial Sequence: Synthetic oligonucleotide
  Sense strand starting at position 2497 of SEQ ID NO: 1241914
auguaaguucuccauugua

SEQ ID NO: 1309509 - RNA, 19 nt, Artificial Sequence
  Description of Artificial Sequence: Synthetic oligonucleotide
  Antisense strand to SEQ ID NO: 1309508
uacaauggagaacuuacau

SEQ ID NO: 1309510 - RNA, 19 nt, Artificial Sequence
  Description of Artificial Sequence: Synthetic oligonucleotide
  Sense strand starting at position 2558 of SEQ ID NO: 1241914
ucaauaaauguucgucuaa

SEQ ID NO: 1309511 - RNA, 19 nt, Artificial Sequence
  Description of Artificial Sequence: Synthetic oligonucleotide
  Antisense strand to SEQ ID NO: 1309510
uuagacgaacauuuauuga

SEQ ID NO: 1309512 - RNA, 19 nt, Artificial Sequence
  Description of Artificial Sequence: Synthetic oligonucleotide
  Sense strand starting at position 2743 of SEQ ID NO: 1241914
aaggccuaguguccagaau

SEQ ID NO: 1309513 - RNA, 19 nt, Artificial Sequence
  Description of Artificial Sequence: Synthetic oligonucleotide
  Antisense strand to SEQ ID NO: 1309512
auucuggacacuaggccuu

SEQ ID NO: 1309514 - RNA, 19 nt, Artificial Sequence
  Description of Artificial Sequence: Synthetic oligonucleotide
  Sense strand starting at position 2894 of SEQ ID NO: 1241914
aucgaagaaaugcaaguua

SEQ ID NO: 1309515 - RNA, 19 nt, Artificial Sequence
  Description of Artificial Sequence: Synthetic oligonucleotide
  Antisense strand to SEQ ID NO: 1309514
uaacuugcauuucuucgau

SEQ ID NO: 1309516 - RNA, 19 nt, Artificial Sequence
  Description of Artificial Sequence: Synthetic oligonucleotide
  Sense strand starting at position 3399 of SEQ ID NO: 1241914
aaaguauggugauuccuua

SEQ ID NO: 1309517 - RNA, 19 nt, Artificial Sequence
  Description of Artificial Sequence: Synthetic oligonucleotide
  Antisense strand to SEQ ID NO: 1309516
uaaggaaucaccauacuuu

SEQ ID NO: 1309518 - RNA, 19 nt, Artificial Sequence
  Description of Artificial Sequence: Synthetic oligonucleotide
  Sense strand starting at position 3738 of SEQ ID NO: 1241914
ggagcuaagcugugaauau

SEQ ID NO: 1309519 - RNA, 19 nt, Artificial Sequence
  Description of Artificial Sequence: Synthetic oligonucleotide
  Antisense strand to SEQ ID NO: 1309518
auauucacagcuuagcucc

SEQ ID NO: 1309520 - RNA, 19 nt, Artificial Sequence
  Description of Artificial Sequence: Synthetic oligonucleotide
  Sense strand starting at position 3742 of SEQ ID NO: 1241914
cuaagcugugaauauacaa

SEQ ID NO: 1309521 - RNA, 19 nt, Artificial Sequence
  Description of Artificial Sequence: Synthetic oligonucleotide
  Antisense strand to SEQ ID NO: 1309520
uuguauauucacagcuuag

SEQ ID NO: 1309522 - RNA, 19 nt, Artificial Sequence
  Description of Artificial Sequence: Synthetic oligonucleotide
  Sense strand starting at position 19 of SEQ ID NO: 1241915
gagaguuuaucacuguagg

SEQ ID NO: 1309523 - RNA, 19 nt, Artificial Sequence
  Description of Artificial Sequence: Synthetic oligonucleotide
  Antisense strand to SEQ ID NO: 1309522
ccuacagugauaaacucuc

SEQ ID NO: 1309524 - RNA, 19 nt, Artificial Sequence
  Description of Artificial Sequence: Synthetic oligonucleotide
  Sense strand starting at position 22 of SEQ ID NO: 1241915
aguuuaucacuguagguac

SEQ ID NO: 1309525 - RNA, 19 nt, Artificial Sequence
  Description of Artificial Sequence: Synthetic oligonucleotide
  Antisense strand to SEQ ID NO: 1309524
guaccuacagugauaaacu

SEQ ID NO: 1309526 - RNA, 19 nt, Artificial Sequence
  Description of Artificial Sequence: Synthetic oligonucleotide
  Sense strand starting at position 211 of SEQ ID NO: 1241915
ggucauagccaacauguuu

SEQ ID NO: 1309527 - RNA, 19 nt, Artificial Sequence
  Description of Artificial Sequence: Synthetic oligonucleotide
  Antisense strand to SEQ ID NO: 1309526
aaacauguuggcuaugacc

SEQ ID NO: 1309528 - RNA, 19 nt, Artificial Sequence
  Description of Artificial Sequence: Synthetic oligonucleotide
  Sense strand starting at position 363 of SEQ ID NO: 1241915
caguaauucuaaguuggaa

SEQ ID NO: 1309529 - RNA, 19 nt, Artificial Sequence
  Description of Artificial Sequence: Synthetic oligonucleotide
  Antisense strand to SEQ ID NO: 1309528
uuccaacuuagaauuacug

SEQ ID NO: 1309530 - RNA, 19 nt, Artificial Sequence
  Description of Artificial Sequence: Synthetic oligonucleotide
  Sense strand starting at position 386 of SEQ ID NO: 1241915
cagaacaguguuuauguau

SEQ ID NO: 1309531 - RNA, 19 nt, Artificial Sequence
  Description of Artificial Sequence: Synthetic oligonucleotide
  Antisense strand to SEQ ID NO: 1309530
auacauaaacacuguucug

SEQ ID NO: 1309532 - RNA, 19 nt, Artificial Sequence
  Description of Artificial Sequence: Synthetic oligonucleotide
  Sense strand starting at position 395 of SEQ ID NO: 1241915
guuuauguaucauuugugu

SEQ ID NO: 1309533 - RNA, 19 nt, Artificial Sequence
  Description of Artificial Sequence: Synthetic oligonucleotide
  Antisense strand to SEQ ID NO: 1309532
acacaaaugauacauaaac

SEQ ID NO: 1309534 - RNA, 19 nt, Artificial Sequence
  Description of Artificial Sequence: Synthetic oligonucleotide
  Sense strand starting at position 448 of SEQ ID NO: 1241915
gaauguauauaugcacaga

SEQ ID NO: 1309535 - RNA, 19 nt, Artificial Sequence
  Description of Artificial Sequence: Synthetic oligonucleotide
  Antisense strand to SEQ ID NO: 1309534
ucugugcauauauacauuc

SEQ ID NO: 1309536 - RNA, 19 nt, Artificial Sequence
  Description of Artificial Sequence: Synthetic oligonucleotide
  Sense strand starting at position 451 of SEQ ID NO: 1241915
uguauauaugcacagaaua

SEQ ID NO: 1309537 - RNA, 19 nt, Artificial Sequence
  Description of Artificial Sequence: Synthetic oligonucleotide
  Antisense strand to SEQ ID NO: 1309536
uauucugugcauauauaca

SEQ ID NO: 1309538 - RNA, 19 nt, Artificial Sequence
  Description of Artificial Sequence: Synthetic oligonucleotide
  Sense strand starting at position 461 of SEQ ID NO: 1241915
cacagaauauacguggaau

SEQ ID NO: 1309539 - RNA, 19 nt, Artificial Sequence
  Description of Artificial Sequence: Synthetic oligonucleotide
  Antisense strand to SEQ ID NO: 1309538
auuccacguauauucugug

SEQ ID NO: 1309540 - RNA, 19 nt, Artificial Sequence
  Description of Artificial Sequence: Synthetic oligonucleotide
  Sense strand starting at position 462 of SEQ ID NO: 1241915
acagaauauacguggaaua

SEQ ID NO: 1309541 - RNA, 19 nt, Artificial Sequence
  Description of Artificial Sequence: Synthetic oligonucleotide
  Antisense strand to SEQ ID NO: 1309540
uauuccacguauauucugu

SEQ ID NO: 1309542 - RNA, 19 nt, Artificial Sequence
  Description of Artificial Sequence: Synthetic oligonucleotide
  Sense strand starting at position 463 of SEQ ID NO: 1241915
cagaauauacguggaauaa

SEQ ID NO: 1309543 - RNA, 19 nt, Artificial Sequence
  Description of Artificial Sequence: Synthetic oligonucleotide
  Antisense strand to SEQ ID NO: 1309542
uuauuccacguauauucug

SEQ ID NO: 1309544 - RNA, 19 nt, Artificial Sequence
  Description of Artificial Sequence: Synthetic oligonucleotide
  Sense strand starting at position 539 of SEQ ID NO: 1241915
acacuuugauaucuguuga

SEQ ID NO: 1309545 - RNA, 19 nt, Artificial Sequence
  Description of Artificial Sequence: Synthetic oligonucleotide
  Antisense strand to SEQ ID NO: 1309544
ucaacagauaucaaagugu

SEQ ID NO: 1309546 - RNA, 19 nt, Artificial Sequence
  Description of Artificial Sequence: Synthetic oligonucleotide
  Sense strand starting at position 561 of SEQ ID NO: 1241915
uuguacuaucuacauaugu

SEQ ID NO: 1309547 - RNA, 19 nt, Artificial Sequence
  Description of Artificial Sequence: Synthetic oligonucleotide
  Antisense strand to SEQ ID NO: 1309546
acauauguagauaguacaa

SEQ ID NO: 1309548 - RNA, 19 nt, Artificial Sequence
  Description of Artificial Sequence: Synthetic oligonucleotide
  Sense strand starting at position 570 of SEQ ID NO: 1241915
cuacauauguuacugauua

SEQ ID NO: 1309549 - RNA, 19 nt, Artificial Sequence
  Description of Artificial Sequence: Synthetic oligonucleotide
  Antisense strand to SEQ ID NO: 1309548
uaaucaguaacauauguag

SEQ ID NO: 1309550 - RNA, 19 nt, Artificial Sequence
  Description of Artificial Sequence: Synthetic oligonucleotide
  Sense strand starting at position 612 of SEQ ID NO: 1241915
gguauuaugcaguauaaca

SEQ ID NO: 1309551 - RNA, 19 nt, Artificial Sequence
  Description of Artificial Sequence: Synthetic oligonucleotide
  Antisense strand to SEQ ID NO: 1309550
uguuauacugcauaauacc

SEQ ID NO: 1309552 - RNA, 19 nt, Artificial Sequence
  Description of Artificial Sequence: Synthetic oligonucleotide
  Sense strand starting at position 732 of SEQ ID NO: 1241915
ucagauggccaucaaguau

SEQ ID NO: 1309553 - RNA, 19 nt, Artificial Sequence
  Description of Artificial Sequence: Synthetic oligonucleotide
  Antisense strand to SEQ ID NO: 1309552
auacuugauggccaucuga

SEQ ID NO: 1309554 - RNA, 19 nt, Artificial Sequence
  Description of Artificial Sequence: Synthetic oligonucleotide
  Sense strand starting at position 738 of SEQ ID NO: 1241915
ggccaucaaguaugugaaa

SEQ ID NO: 1309555 - RNA, 19 nt, Artificial Sequence
  Description of Artificial Sequence: Synthetic oligonucleotide
  Antisense strand to SEQ ID NO: 1309554
uuucacauacuugauggcc

SEQ ID NO: 1309556 - RNA, 19 nt, Artificial Sequence
  Description of Artificial Sequence: Synthetic oligonucleotide
  Sense strand starting at position 976 of SEQ ID NO: 1241915
auuagaggauuccuaaggu

SEQ ID NO: 1309557 - RNA, 19 nt, Artificial Sequence
  Description of Artificial Sequence: Synthetic oligonucleotide
  Antisense strand to SEQ ID NO: 1309556
accuuaggaauccucuaau

SEQ ID NO: 1309558 - RNA, 19 nt, Artificial Sequence
  Description of Artificial Sequence: Synthetic oligonucleotide
  Sense strand starting at position 982 of SEQ ID NO: 1241915
ggauuccuaagguguaacu

SEQ ID NO: 1309559 - RNA, 19 nt, Artificial Sequence
  Description of Artificial Sequence: Synthetic oligonucleotide
  Antisense strand to SEQ ID NO: 1309558
aguuacaccuuaggaaucc

SEQ ID NO: 1309560 - RNA, 19 nt, Artificial Sequence
  Description of Artificial Sequence: Synthetic oligonucleotide
  Sense strand starting at position 1215 of SEQ ID NO: 1241915
gaaugucgagguuagaauu

SEQ ID NO: 1309561 - RNA, 19 nt, Artificial Sequence
  Description of Artificial Sequence: Synthetic oligonucleotide
  Antisense strand to SEQ ID NO: 1309560
aauucuaaccucgacauuc

SEQ ID NO: 1309562 - RNA, 19 nt, Artificial Sequence
  Description of Artificial Sequence: Synthetic oligonucleotide
  Sense strand starting at position 3049 of SEQ ID NO: 1241915
ggaagaguuuggucuuaau

SEQ ID NO: 1309563 - RNA, 19 nt, Artificial Sequence
  Description of Artificial Sequence: Synthetic oligonucleotide
  Antisense strand to SEQ ID NO: 1309562
auuaagaccaaacucuucc

SEQ ID NO: 1309564 - RNA, 19 nt, Artificial Sequence
  Description of Artificial Sequence: Synthetic oligonucleotide
  Sense strand starting at position 3071 of SEQ ID NO: 1241915
gcauuauuaguggauccua

SEQ ID NO: 1309565 - RNA, 19 nt, Artificial Sequence
  Description of Artificial Sequence: Synthetic oligonucleotide
  Antisense strand to SEQ ID NO: 1309564
uaggauccacuaauaaugc

SEQ ID NO: 1309566 - RNA, 19 nt, Artificial Sequence
  Description of Artificial Sequence: Synthetic oligonucleotide
  Sense strand starting at position 3104 of SEQ ID NO: 1241915
ucugucuuggcguuagcua

SEQ ID NO: 1309567 - RNA, 19 nt, Artificial Sequence
  Description of Artificial Sequence: Synthetic oligonucleotide
  Antisense strand to SEQ ID NO: 1309566
uagcuaacgccaagacaga

SEQ ID NO: 1309568 - RNA, 19 nt, Artificial Sequence
  Description of Artificial Sequence: Synthetic oligonucleotide
  Sense strand starting at position 3109 of SEQ ID NO: 1241915
cuuggcguuagcuaauuua

SEQ ID NO: 1309569 - RNA, 19 nt, Artificial Sequence
  Description of Artificial Sequence: Synthetic oligonucleotide
  Antisense strand to SEQ ID NO: 1309568
uaaauuagcuaacgccaag

SEQ ID NO: 1309570 - RNA, 19 nt, Artificial Sequence
  Description of Artificial Sequence: Synthetic oligonucleotide
  Sense strand starting at position 3112 of SEQ ID NO: 1241915
ggcguuagcuaauuuacuu

SEQ ID NO: 1309571 - RNA, 19 nt, Artificial Sequence
  Description of Artificial Sequence: Synthetic oligonucleotide
  Antisense strand to SEQ ID NO: 1309570
aaguaaauuagcuaacgcc

SEQ ID NO: 1309572 - RNA, 19 nt, Artificial Sequence
  Description of Artificial Sequence: Synthetic oligonucleotide
  Sense strand starting at position 3133 of SEQ ID NO: 1241915
agcacaguugcuuauaaca

SEQ ID NO: 1309573 - RNA, 19 nt, Artificial Sequence
  Description of Artificial Sequence: Synthetic oligonucleotide
  Antisense strand to SEQ ID NO: 1309572
uguuauaagcaacugugcu

SEQ ID NO: 1309574 - RNA, 19 nt, Artificial Sequence
  Description of Artificial Sequence: Synthetic oligonucleotide
  Sense strand starting at position 3199 of SEQ ID NO: 1241915
ucaucuuagaggcagguau

SEQ ID NO: 1309575 - RNA, 19 nt, Artificial Sequence
  Description of Artificial Sequence: Synthetic oligonucleotide
  Antisense strand to SEQ ID NO: 1309574
auaccugccucuaagauga

SEQ ID NO: 1309576 - RNA, 19 nt, Artificial Sequence
  Description of Artificial Sequence: Synthetic oligonucleotide
  Sense strand starting at position 3203 of SEQ ID NO: 1241915
cuuagaggcagguaucauu

SEQ ID NO: 1309577 - RNA, 19 nt, Artificial Sequence
  Description of Artificial Sequence: Synthetic oligonucleotide
  Antisense strand to SEQ ID NO: 1309576
aaugauaccugccucuaag

SEQ ID NO: 1309578 - RNA, 19 nt, Artificial Sequence
  Description of Artificial Sequence: Synthetic oligonucleotide
  Sense strand starting at position 3206 of SEQ ID NO: 1241915
agaggcagguaucauuuaa

SEQ ID NO: 1309579 - RNA, 19 nt, Artificial Sequence
  Description of Artificial Sequence: Synthetic oligonucleotide
  Antisense strand to SEQ ID NO: 1309578
uuaaaugauaccugccucu

SEQ ID NO: 1309580 - RNA, 19 nt, Artificial Sequence
  Description of Artificial Sequence: Synthetic oligonucleotide
  Sense strand starting at position 3243 of SEQ ID NO: 1241915
cuuguaguacaguaucaua

SEQ ID NO: 1309581 - RNA, 19 nt, Artificial Sequence
  Description of Artificial Sequence: Synthetic oligonucleotide
  Antisense strand to SEQ ID NO: 1309580
uaugauacuguacuacaag

SEQ ID NO: 1309582 - RNA, 19 nt, Artificial Sequence
  Description of Artificial Sequence: Synthetic oligonucleotide
  Sense strand starting at position 3281 of SEQ ID NO: 1241915
gguguuaagcuggaauuga

SEQ ID NO: 1309583 - RNA, 19 nt, Artificial Sequence
  Description of Artificial Sequence: Synthetic oligonucleotide
  Antisense strand to SEQ ID NO: 1309582
ucaauuccagcuuaacacc

SEQ ID NO: 1309584 - RNA, 19 nt, Artificial Sequence
  Description of Artificial Sequence: Synthetic oligonucleotide
  Sense strand starting at position 3356 of SEQ ID NO: 1241915
ggaggacuuggcuaucagu

SEQ ID NO: 1309585 - RNA, 19 nt, Artificial Sequence
  Description of Artificial Sequence: Synthetic oligonucleotide
  Antisense strand to SEQ ID NO: 1309584
acugauagccaaguccucc

SEQ ID NO: 1309586 - RNA, 19 nt, Artificial Sequence
  Description of Artificial Sequence: Synthetic oligonucleotide
  Sense strand starting at position 3632 of SEQ ID NO: 1241915
auaauuacagaucgugauu

SEQ ID NO: 1309587 - RNA, 19 nt, Artificial Sequence
  Description of Artificial Sequence: Synthetic oligonucleotide
  Antisense strand to SEQ ID NO: 1309586
aaucacgaucuguaauuau

SEQ ID NO: 1309588 - RNA, 19 nt, Artificial Sequence
  Description of Artificial Sequence: Synthetic oligonucleotide
  Sense strand starting at position 3635 of SEQ ID NO: 1241915
auuacagaucgugauuagu

SEQ ID NO: 1309589 - RNA, 19 nt, Artificial Sequence
  Description of Artificial Sequence: Synthetic oligonucleotide
  Antisense strand to SEQ ID NO: 1309588
acuaaucacgaucuguaau

SEQ ID NO: 1309590 - RNA, 19 nt, Artificial Sequence
  Description of Artificial Sequence: Synthetic oligonucleotide
  Sense strand starting at position 3672 of SEQ ID NO: 1241915
gggucaugagaagguaacu

SEQ ID NO: 1309591 - RNA, 19 nt, Artificial Sequence
  Description of Artificial Sequence: Synthetic oligonucleotide
  Antisense strand to SEQ ID NO: 1309590
aguuaccuucucaugaccc

SEQ ID NO: 1309592 - RNA, 19 nt, Artificial Sequence
  Description of Artificial Sequence: Synthetic oligonucleotide
  Sense strand starting at position 3723 of SEQ ID NO: 1241915
gaaugaaucagcggaggga

SEQ ID NO: 1309593 - RNA, 19 nt, Artificial Sequence
  Description of Artificial Sequence: Synthetic oligonucleotide
  Antisense strand to SEQ ID NO: 1309592
ucccuccgcugauucauuc

SEQ ID NO: 1309594 - RNA, 19 nt, Artificial Sequence
  Description of Artificial Sequence: Synthetic oligonucleotide
  Sense strand starting at position 3822 of SEQ ID NO: 1241915
gcaugagccagguggaaau

SEQ ID NO: 1309595 - RNA, 19 nt, Artificial Sequence
  Description of Artificial Sequence: Synthetic oligonucleotide
  Antisense strand to SEQ ID NO: 1309594
auuuccaccuggcucaugc

SEQ ID NO: 1309596 - RNA, 19 nt, Artificial Sequence
  Description of Artificial Sequence: Synthetic oligonucleotide
  Sense strand starting at position 3901 of SEQ ID NO: 1241915
aagugagcugauuguaaag

SEQ ID NO: 1309597 - RNA, 19 nt, Artificial Sequence
  Description of Artificial Sequence: Synthetic oligonucleotide
  Antisense strand to SEQ ID NO: 1309596
cuuuacaaucagcucacuu

SEQ ID NO: 1309598 - RNA, 19 nt, Artificial Sequence
  Description of Artificial Sequence: Synthetic oligonucleotide
  Sense strand starting at position 3936 of SEQ ID NO: 1241915
cuggaugcucuguauuaag

SEQ ID NO: 1309599 - RNA, 19 nt, Artificial Sequence
  Description of Artificial Sequence: Synthetic oligonucleotide
  Antisense strand to SEQ ID NO: 1309598
cuuaauacagagcauccag

SEQ ID NO: 1309600 - RNA, 19 nt, Artificial Sequence
  Description of Artificial Sequence: Synthetic oligonucleotide
  Sense strand starting at position 3945 of SEQ ID NO: 1241915
cuguauuaagcugagagua

SEQ ID NO: 1309601 - RNA, 19 nt, Artificial Sequence
  Description of Artificial Sequence: Synthetic oligonucleotide
  Antisense strand to SEQ ID NO: 1309600
uacucucagcuuaauacag

SEQ ID NO: 1309602 - RNA, 19 nt, Artificial Sequence
  Description of Artificial Sequence: Synthetic oligonucleotide
  Sense strand starting at position 260 of SEQ ID NO: 1241916
uuuguuccaugguuuacaa

SEQ ID NO: 1309603 - RNA, 19 nt, Artificial Sequence
  Description of Artificial Sequence: Synthetic oligonucleotide
  Antisense strand to SEQ ID NO: 1309602
uuguaaaccauggaacaaa

SEQ ID NO: 1309604 - RNA, 19 nt, Artificial Sequence
  Description of Artificial Sequence: Synthetic oligonucleotide
  Sense strand starting at position 320 of SEQ ID NO: 1241916
aggaguauuucccacaccu

SEQ ID NO: 1309605 - RNA, 19 nt, Artificial Sequence
  Description of Artificial Sequence: Synthetic oligonucleotide
  Antisense strand to SEQ ID NO: 1309604
aggugugggaaauacuccu

SEQ ID NO: 1309606 - RNA, 19 nt, Artificial Sequence
  Description of Artificial Sequence: Synthetic oligonucleotide
  Sense strand starting at position 771 of SEQ ID NO: 1241916
gcuauaugaccugaacuca

SEQ ID NO: 1309607 - RNA, 19 nt, Artificial Sequence
  Description of Artificial Sequence: Synthetic oligonucleotide
  Antisense strand to SEQ ID NO: 1309606
ugaguucaggucauauagc

SEQ ID NO: 1309608 - RNA, 19 nt, Artificial Sequence
  Description of Artificial Sequence: Synthetic oligonucleotide
  Sense strand starting at position 905 of SEQ ID NO: 1241916
agcacuauccuguagauug

SEQ ID NO: 1309609 - RNA, 19 nt, Artificial Sequence
  Description of Artificial Sequence: Synthetic oligonucleotide
  Antisense strand to SEQ ID NO: 1309608
caaucuacaggauagugcu

SEQ ID NO: 1309610 - RNA, 19 nt, Artificial Sequence
  Description of Artificial Sequence: Synthetic oligonucleotide
  Sense strand starting at position 947 of SEQ ID NO: 1241916
aguacuauauaguuagcua

SEQ ID NO: 1309611 - RNA, 19 nt, Artificial Sequence
  Description of Artificial Sequence: Synthetic oligonucleotide
  Antisense strand to SEQ ID NO: 1309610
uagcuaacuauauaguacu

SEQ ID NO: 1309612 - RNA, 19 nt, Artificial Sequence
  Description of Artificial Sequence: Synthetic oligonucleotide
  Sense strand starting at position 1109 of SEQ ID NO: 1241916
gcugcuaaugaggacaaau

SEQ ID NO: 1309613 - RNA, 19 nt, Artificial Sequence
  Description of Artificial Sequence: Synthetic oligonucleotide
  Antisense strand to SEQ ID NO: 1309612
auuuguccucauuagcagc

SEQ ID NO: 1309614 - RNA, 19 nt, Artificial Sequence
  Description of Artificial Sequence: Synthetic oligonucleotide
  Sense strand starting at position 1218 of SEQ ID NO: 1241916
gaagucuccgggcauuauu

SEQ ID NO: 1309615 - RNA, 19 nt, Artificial Sequence
  Description of Artificial Sequence: Synthetic oligonucleotide
  Antisense strand to SEQ ID NO: 1309614
aauaaugcccggagacuuc

SEQ ID NO: 1309616 - RNA, 19 nt, Artificial Sequence
  Description of Artificial Sequence: Synthetic oligonucleotide
  Sense strand starting at position 1686 of SEQ ID NO: 1241916
ggucuaagcccgccuagua

SEQ ID NO: 1309617 - RNA, 19 nt, Artificial Sequence
  Description of Artificial Sequence: Synthetic oligonucleotide
  Antisense strand to SEQ ID NO: 1309616
uacuaggcgggcuuagacc

SEQ ID NO: 1309618 - RNA, 19 nt, Artificial Sequence
  Description of Artificial Sequence: Synthetic oligonucleotide
  Sense strand starting at position 1777 of SEQ ID NO: 1241916
gcgccaaugacgccucuua

SEQ ID NO: 1309619 - RNA, 19 nt, Artificial Sequence
  Description of Artificial Sequence: Synthetic oligonucleotide
  Antisense strand to SEQ ID NO: 1309618
uaagaggcgucauuggcgc

SEQ ID NO: 1309620 - RNA, 19 nt, Artificial Sequence
  Description of Artificial Sequence: Synthetic oligonucleotide
  Sense strand starting at position 2286 of SEQ ID NO: 1241916
ggcagagggcuagauguuu

SEQ ID NO: 1309621 - RNA, 19 nt, Artificial Sequence
  Description of Artificial Sequence: Synthetic oligonucleotide
  Antisense strand to SEQ ID NO: 1309620
aaacaucuagcccucugcc

SEQ ID NO: 1309622 - RNA, 19 nt, Artificial Sequence
  Description of Artificial Sequence: Synthetic oligonucleotide
  Sense strand starting at position 2291 of SEQ ID NO: 1241916
agggcuagauguuugggaa

SEQ ID NO: 1309623 - RNA, 19 nt, Artificial Sequence
  Description of Artificial Sequence: Synthetic oligonucleotide
  Antisense strand to SEQ ID NO: 1309622
uucccaaacaucuagcccu

SEQ ID NO: 1309624 - RNA, 19 nt, Artificial Sequence
  Description of Artificial Sequence: Synthetic oligonucleotide
  Sense strand starting at position 2292 of SEQ ID NO: 1241916
gggcuagauguuugggaau

SEQ ID NO: 1309625 - RNA, 19 nt, Artificial Sequence
  Description of Artificial Sequence: Synthetic oligonucleotide
  Antisense strand to SEQ ID NO: 1309624
auucccaaacaucuagccc

SEQ ID NO: 1309626 - RNA, 19 nt, Artificial Sequence
  Description of Artificial Sequence: Synthetic oligonucleotide
  Sense strand starting at position 2311 of SEQ ID NO: 1241916
guugguauucgcuaguaua

SEQ ID NO: 1309627 - RNA, 19 nt, Artificial Sequence
  Description of Artificial Sequence: Synthetic oligonucleotide
  Antisense strand to SEQ ID NO: 1309626
uauacuagcgaauaccaac

SEQ ID NO: 1309628 - RNA, 19 nt, Artificial Sequence
  Description of Artificial Sequence: Synthetic oligonucleotide
  Sense strand starting at position 2443 of SEQ ID NO: 1241916
ccgaauagccucugaaggu

SEQ ID NO: 1309629 - RNA, 19 nt, Artificial Sequence
  Description of Artificial Sequence: Synthetic oligonucleotide
  Antisense strand to SEQ ID NO: 1309628
accuucagaggcuauucgg

SEQ ID NO: 1309630 - RNA, 19 nt, Artificial Sequence
  Description of Artificial Sequence: Synthetic oligonucleotide
  Sense strand starting at position 2562 of SEQ ID NO: 1241916
uuuaaauugcacuguguca

SEQ ID NO: 1309631 - RNA, 19 nt, Artificial Sequence
  Description of Artificial Sequence: Synthetic oligonucleotide
  Antisense strand to SEQ ID NO: 1309630
ugacacagugcaauuuaaa

SEQ ID NO: 1309632 - RNA, 19 nt, Artificial Sequence
  Description of Artificial Sequence: Synthetic oligonucleotide
  Sense strand starting at position 3170 of SEQ ID NO: 1241916
ugcgaugggcauuauuaau

SEQ ID NO: 1309633 - RNA, 19 nt, Artificial Sequence
  Description of Artificial Sequence: Synthetic oligonucleotide
  Antisense strand to SEQ ID NO: 1309632
auuaauaaugcccaucgca

SEQ ID NO: 1309634 - RNA, 19 nt, Artificial Sequence
  Description of Artificial Sequence: Synthetic oligonucleotide
  Sense strand starting at position 3224 of SEQ ID NO: 1241916
auguaucuauaccaaagga

SEQ ID NO: 1309635 - RNA, 19 nt, Artificial Sequence
  Description of Artificial Sequence: Synthetic oligonucleotide
  Antisense strand to SEQ ID NO: 1309634
uccuuugguauagauacau

SEQ ID NO: 1309636 - RNA, 19 nt, Artificial Sequence
  Description of Artificial Sequence: Synthetic oligonucleotide
  Sense strand starting at position 3239 of SEQ ID NO: 1241916
aggacuucgaaaggucaaa

SEQ ID NO: 1309637 - RNA, 19 nt, Artificial Sequence
  Description of Artificial Sequence: Synthetic oligonucleotide
  Antisense strand to SEQ ID NO: 1309636
uuugaccuuucgaaguccu

SEQ ID NO: 1309638 - RNA, 19 nt, Artificial Sequence
  Description of Artificial Sequence: Synthetic oligonucleotide
  Sense strand starting at position 3252 of SEQ ID NO: 1241916
gucaaaguggucuggcuuu

SEQ ID NO: 1309639 - RNA, 19 nt, Artificial Sequence
  Description of Artificial Sequence: Synthetic oligonucleotide
  Antisense strand to SEQ ID NO: 1309638
aaagccagaccacuuugac

SEQ ID NO: 1309640 - RNA, 19 nt, Artificial Sequence
  Description of Artificial Sequence: Synthetic oligonucleotide
  Sense strand starting at position 3262 of SEQ ID NO: 1241916
ucuggcuuucucuaacuga

SEQ ID NO: 1309641 - RNA, 19 nt, Artificial Sequence
  Description of Artificial Sequence: Synthetic oligonucleotide
  Antisense strand to SEQ ID NO: 1309640
ucaguuagagaaagccaga

SEQ ID NO: 1309642 - RNA, 19 nt, Artificial Sequence
  Description of Artificial Sequence: Synthetic oligonucleotide
  Sense strand starting at position 3306 of SEQ ID NO: 1241916
accagcuacugguagauuu

SEQ ID NO: 1309643 - RNA, 19 nt, Artificial Sequence
  Description of Artificial Sequence: Synthetic oligonucleotide
  Antisense strand to SEQ ID NO: 1309642
aaaucuaccaguagcuggu

SEQ ID NO: 1309644 - RNA, 19 nt, Artificial Sequence
  Description of Artificial Sequence: Synthetic oligonucleotide
  Sense strand starting at position 3424 of SEQ ID NO: 1241916
guugaugacauguggcaga

SEQ ID NO: 1309645 - RNA, 19 nt, Artificial Sequence
  Description of Artificial Sequence: Synthetic oligonucleotide
  Antisense strand to SEQ ID NO: 1309644
ucugccacaugucaucaac

SEQ ID NO: 1309646 - RNA, 19 nt, Artificial Sequence
  Description of Artificial Sequence: Synthetic oligonucleotide
  Sense strand starting at position 3427 of SEQ ID NO: 1241916
gaugacauguggcagauaa

SEQ ID NO: 1309647 - RNA, 19 nt, Artificial Sequence
  Description of Artificial Sequence: Synthetic oligonucleotide
  Antisense strand to SEQ ID NO: 1309646
uuaucugccacaugucauc

SEQ ID NO: 1309648 - RNA, 19 nt, Artificial Sequence
  Description of Artificial Sequence: Synthetic oligonucleotide
  Sense strand starting at position 3429 of SEQ ID NO: 1241916
ugacauguggcagauaauu

SEQ ID NO: 1309649 - RNA, 19 nt, Artificial Sequence
  Description of Artificial Sequence: Synthetic oligonucleotide
  Antisense strand to SEQ ID NO: 1309648
aauuaucugccacauguca

SEQ ID NO: 1309650 - RNA, 19 nt, Artificial Sequence
  Description of Artificial Sequence: Synthetic oligonucleotide
  Sense strand starting at position 3437 of SEQ ID NO: 1241916
ggcagauaauuugaacuca

SEQ ID NO: 1309651 - RNA, 19 nt, Artificial Sequence
  Description of Artificial Sequence: Synthetic oligonucleotide
  Antisense strand to SEQ ID NO: 1309650
ugaguucaaauuaucugcc

SEQ ID NO: 1309652 - RNA, 19 nt, Artificial Sequence
  Description of Artificial Sequence: Synthetic oligonucleotide
  Sense strand starting at position 3479 of SEQ ID NO: 1241916
gcuauuuguuucguucuua

SEQ ID NO: 1309653 - RNA, 19 nt, Artificial Sequence
  Description of Artificial Sequence: Synthetic oligonucleotide
  Antisense strand to SEQ ID NO: 1309652
uaagaacgaaacaaauagc

SEQ ID NO: 1309654 - RNA, 19 nt, Artificial Sequence
  Description of Artificial Sequence: Synthetic oligonucleotide
  Sense strand starting at position 3480 of SEQ ID NO: 1241916
cuauuuguuucguucuuaa

SEQ ID NO: 1309655 - RNA, 19 nt, Artificial Sequence
  Description of Artificial Sequence: Synthetic oligonucleotide
  Antisense strand to SEQ ID NO: 1309654
uuaagaacgaaacaaauag

SEQ ID NO: 1309656 - RNA, 19 nt, Artificial Sequence
  Description of Artificial Sequence: Synthetic oligonucleotide
  Sense strand starting at position 3483 of SEQ ID NO: 1241916
uuuguuucguucuuaacua

SEQ ID NO: 1309657 - RNA, 19 nt, Artificial Sequence
  Description of Artificial Sequence: Synthetic oligonucleotide
  Antisense strand to SEQ ID NO: 1309656
uaguuaagaacgaaacaaa

SEQ ID NO: 1309658 - RNA, 19 nt, Artificial Sequence
  Description of Artificial Sequence: Synthetic oligonucleotide
  Sense strand starting at position 3487 of SEQ ID NO: 1241916
uuucguucuuaacuauagu

SEQ ID NO: 1309659 - RNA, 19 nt, Artificial Sequence
  Description of Artificial Sequence: Synthetic oligonucleotide
  Antisense strand to SEQ ID NO: 1309658
acuauaguuaagaacgaaa

SEQ ID NO: 1309660 - RNA, 19 nt, Artificial Sequence
  Description of Artificial Sequence: Synthetic oligonucleotide
  Sense strand starting at position 3493 of SEQ ID NO: 1241916
ucuuaacuauagucaguuu

SEQ ID NO: 1309661 - RNA, 19 nt, Artificial Sequence
  Description of Artificial Sequence: Synthetic oligonucleotide
  Antisense strand to SEQ ID NO: 1309660
aaacugacuauaguuaaga

SEQ ID NO: 1309662 - RNA, 19 nt, Artificial Sequence
  Description of Artificial Sequence: Synthetic oligonucleotide
  Sense strand starting at position 3572 of SEQ ID NO: 1241916
agugguugucuaugaugua

SEQ ID NO: 1309663 - RNA, 19 nt, Artificial Sequence
  Description of Artificial Sequence: Synthetic oligonucleotide
  Antisense strand to SEQ ID NO: 1309662
uacaucauagacaaccacu

SEQ ID NO: 1309664 - RNA, 19 nt, Artificial Sequence
  Description of Artificial Sequence: Synthetic oligonucleotide
  Sense strand starting at position 3577 of SEQ ID NO: 1241916
uugucuaugauguaaagua

SEQ ID NO: 1309665 - RNA, 19 nt, Artificial Sequence
  Description of Artificial Sequence: Synthetic oligonucleotide
  Antisense strand to SEQ ID NO: 1309664
uacuuuacaucauagacaa

SEQ ID NO: 1309666 - RNA, 19 nt, Artificial Sequence
  Description of Artificial Sequence: Synthetic oligonucleotide
  Sense strand starting at position 3584 of SEQ ID NO: 1241916
ugauguaaaguauaaagca

SEQ ID NO: 1309667 - RNA, 19 nt, Artificial Sequence
  Description of Artificial Sequence: Synthetic oligonucleotide
  Antisense strand to SEQ ID NO: 1309666
ugcuuuauacuuuacauca

SEQ ID NO: 1309668 - RNA, 19 nt, Artificial Sequence
  Description of Artificial Sequence: Synthetic oligonucleotide
  Sense strand starting at position 3636 of SEQ ID NO: 1241916
gugaauuauccuggaaauc

SEQ ID NO: 1309669 - RNA, 19 nt, Artificial Sequence
  Description of Artificial Sequence: Synthetic oligonucleotide
  Antisense strand to SEQ ID NO: 1309668
gauuuccaggauaauucac

SEQ ID NO: 1309670 - RNA, 19 nt, Artificial Sequence
  Description of Artificial Sequence: Synthetic oligonucleotide
  Sense strand starting at position 3697 of SEQ ID NO: 1241916
gguacuaauuaugccaaca

SEQ ID NO: 1309671 - RNA, 19 nt, Artificial Sequence
  Description of Artificial Sequence: Synthetic oligonucleotide
  Antisense strand to SEQ ID NO: 1309670
uguuggcauaauuaguacc

SEQ ID NO: 1309672 - RNA, 19 nt, Artificial Sequence
  Description of Artificial Sequence: Synthetic oligonucleotide
  Sense strand starting at position 3778 of SEQ ID NO: 1241916
gccaaagcugaacgaaauu

SEQ ID NO: 1309673 - RNA, 19 nt, Artificial Sequence
  Description of Artificial Sequence: Synthetic oligonucleotide
  Antisense strand to SEQ ID NO: 1309672
aauuucguucagcuuuggc

SEQ ID NO: 1309674 - RNA, 19 nt, Artificial Sequence
  Description of Artificial Sequence: Synthetic oligonucleotide
  Sense strand starting at position 3805 of SEQ ID NO: 1241916
aguaguaaagagggucauu

SEQ ID NO: 1309675 - RNA, 19 nt, Artificial Sequence
  Description of Artificial Sequence: Synthetic oligonucleotide
  Antisense strand to SEQ ID NO: 1309674
aaugacccucuuuacuacu

SEQ ID NO: 1309676 - RNA, 19 nt, Artificial Sequence
  Description of Artificial Sequence: Synthetic oligonucleotide
  Sense strand starting at position 3815 of SEQ ID NO: 1241916
agggucauuugauaacaag

SEQ ID NO: 1309677 - RNA, 19 nt, Artificial Sequence
  Description of Artificial Sequence: Synthetic oligonucleotide
  Antisense strand to SEQ ID NO: 1309676
cuuguuaucaaaugacccu

SEQ ID NO: 1309678 - RNA, 19 nt, Artificial Sequence
  Description of Artificial Sequence: Synthetic oligonucleotide
  Sense strand starting at position 3818 of SEQ ID NO: 1241916
gucauuugauaacaagaag

SEQ ID NO: 1309679 - RNA, 19 nt, Artificial Sequence
  Description of Artificial Sequence: Synthetic oligonucleotide
  Antisense strand to SEQ ID NO: 1309678
cuucuuguuaucaaaugac

SEQ ID NO: 1309680 - RNA, 19 nt, Artificial Sequence
  Description of Artificial Sequence: Synthetic oligonucleotide
  Sense strand starting at position 3912 of SEQ ID NO: 1241916
ggcgaaucgccugaguuca

SEQ ID NO: 1309681 - RNA, 19 nt, Artificial Sequence
  Description of Artificial Sequence: Synthetic oligonucleotide
  Antisense strand to SEQ ID NO: 1309680
ugaacucaggcgauucgcc

SEQ ID NO: 1309682 - RNA, 19 nt, Artificial Sequence
  Description of Artificial Sequence: Synthetic oligonucleotide
  Sense strand starting at position 394 of SEQ ID NO: 1241917
uuuguuccaugguuuacaa

SEQ ID NO: 1309683 - RNA, 19 nt, Artificial Sequence
  Description of Artificial Sequence: Synthetic oligonucleotide
  Antisense strand to SEQ ID NO: 1309682
uuguaaaccauggaacaaa

SEQ ID NO: 1309684 - RNA, 19 nt, Artificial Sequence
  Description of Artificial Sequence: Synthetic oligonucleotide
  Sense strand starting at position 454 of SEQ ID NO: 1241917
aggaguauuucccacaccu

SEQ ID NO: 1309685 - RNA, 19 nt, Artificial Sequence
  Description of Artificial Sequence: Synthetic oligonucleotide
  Antisense strand to SEQ ID NO: 1309684
aggugugggaaauacuccu

SEQ ID NO: 1309686 - RNA, 19 nt, Artificial Sequence
  Description of Artificial Sequence: Synthetic oligonucleotide
  Sense strand starting at position 905 of SEQ ID NO: 1241917
gcuauaugaccugaacuca

SEQ ID NO: 1309687 - RNA, 19 nt, Artificial Sequence
  Description of Artificial Sequence: Synthetic oligonucleotide
  Antisense strand to SEQ ID NO: 1309686
ugaguucaggucauauagc

SEQ ID NO: 1309688 - RNA, 19 nt, Artificial Sequence
  Description of Artificial Sequence: Synthetic oligonucleotide
  Sense strand starting at position 1039 of SEQ ID NO: 1241917
agcacuauccuguagauug

SEQ ID NO: 1309689 - RNA, 19 nt, Artificial Sequence
  Description of Artificial Sequence: Synthetic oligonucleotide
  Antisense strand to SEQ ID NO: 1309688
caaucuacaggauagugcu

SEQ ID NO: 1309690 - RNA, 19 nt, Artificial Sequence
  Description of Artificial Sequence: Synthetic oligonucleotide
  Sense strand starting at position 1081 of SEQ ID NO: 1241917
aguacuauauaguuagcua

SEQ ID NO: 1309691 - RNA, 19 nt, Artificial Sequence
  Description of Artificial Sequence: Synthetic oligonucleotide
  Antisense strand to SEQ ID NO: 1309690
uagcuaacuauauaguacu

SEQ ID NO: 1309692 - RNA, 19 nt, Artificial Sequence
  Description of Artificial Sequence: Synthetic oligonucleotide
  Sense strand starting at position 1243 of SEQ ID NO: 1241917
gcugcuaaugaggacaaau

SEQ ID NO: 1309693 - RNA, 19 nt, Artificial Sequence
  Description of Artificial Sequence: Synthetic oligonucleotide
  Antisense strand to SEQ ID NO: 1309692
auuuguccucauuagcagc

SEQ ID NO: 1309694 - RNA, 19 nt, Artificial Sequence
  Description of Artificial Sequence: Synthetic oligonucleotide
  Sense strand starting at position 1352 of SEQ ID NO: 1241917
gaagucuccgggcauuauu

SEQ ID NO: 1309695 - RNA, 19 nt, Artificial Sequence
  Description of Artificial Sequence: Synthetic oligonucleotide
  Antisense strand to SEQ ID NO: 1309694
aauaaugcccggagacuuc

SEQ ID NO: 1309696 - RNA, 19 nt, Artificial Sequence
  Description of Artificial Sequence: Synthetic oligonucleotide
  Sense strand starting at position 1422 of SEQ ID NO: 1241917
aagacaggcuggcauuaaa

SEQ ID NO: 1309697 - RNA, 19 nt, Artificial Sequence
  Description of Artificial Sequence: Synthetic oligonucleotide
  Antisense strand to SEQ ID NO: 1309696
uuuaaugccagccugucuu

SEQ ID NO: 1309698 - RNA, 19 nt, Artificial Sequence
  Description of Artificial Sequence: Synthetic oligonucleotide
  Sense strand starting at position 1820 of SEQ ID NO: 1241917
ggucuaagcccgccuagua

SEQ ID NO: 1309699 - RNA, 19 nt, Artificial Sequence
  Description of Artificial Sequence: Synthetic oligonucleotide
  Antisense strand to SEQ ID NO: 1309698
uacuaggcgggcuuagacc

SEQ ID NO: 1309700 - RNA, 19 nt, Artificial Sequence
  Description of Artificial Sequence: Synthetic oligonucleotide
  Sense strand starting at position 1911 of SEQ ID NO: 1241917
gcgccaaugacgccucuua

SEQ ID NO: 1309701 - RNA, 19 nt, Artificial Sequence
  Description of Artificial Sequence: Synthetic oligonucleotide
  Antisense strand to SEQ ID NO: 1309700
uaagaggcgucauuggcgc

SEQ ID NO: 1309702 - RNA, 19 nt, Artificial Sequence
  Description of Artificial Sequence: Synthetic oligonucleotide
  Sense strand starting at position 2420 of SEQ ID NO: 1241917
ggcagagggcuagauguuu

SEQ ID NO: 1309703 - RNA, 19 nt, Artificial Sequence
  Description of Artificial Sequence: Synthetic oligonucleotide
  Antisense strand to SEQ ID NO: 1309702
aaacaucuagcccucugcc

SEQ ID NO: 1309704 - RNA, 19 nt, Artificial Sequence
  Description of Artificial Sequence: Synthetic oligonucleotide
  Sense strand starting at position 2425 of SEQ ID NO: 1241917
agggcuagauguuugggaa

SEQ ID NO: 1309705 - RNA, 19 nt, Artificial Sequence
  Description of Artificial Sequence: Synthetic oligonucleotide
  Antisense strand to SEQ ID NO: 1309704
uucccaaacaucuagcccu

SEQ ID NO: 1309706 - RNA, 19 nt, Artificial Sequence
  Description of Artificial Sequence: Synthetic oligonucleotide
  Sense strand starting at position 2426 of SEQ ID NO: 1241917
gggcuagauguuugggaau

SEQ ID NO: 1309707 - RNA, 19 nt, Artificial Sequence
  Description of Artificial Sequence: Synthetic oligonucleotide
  Antisense strand to SEQ ID NO: 1309706
auucccaaacaucuagccc

SEQ ID NO: 1309708 - RNA, 19 nt, Artificial Sequence
  Description of Artificial Sequence: Synthetic oligonucleotide
  Sense strand starting at position 2445 of SEQ ID NO: 1241917
guugguauucgcuaguaua

SEQ ID NO: 1309709 - RNA, 19 nt, Artificial Sequence
  Description of Artificial Sequence: Synthetic oligonucleotide
  Antisense strand to SEQ ID NO: 1309708
uauacuagcgaauaccaac

SEQ ID NO: 1309710 - RNA, 19 nt, Artificial Sequence
  Description of Artificial Sequence: Synthetic oligonucleotide
  Sense strand starting at position 2577 of SEQ ID NO: 1241917
ccgaauagccucugaaggu

SEQ ID NO: 1309711 - RNA, 19 nt, Artificial Sequence
  Description of Artificial Sequence: Synthetic oligonucleotide
  Antisense strand to SEQ ID NO: 1309710
accuucagaggcuauucgg

SEQ ID NO: 1309712 - RNA, 19 nt, Artificial Sequence
  Description of Artificial Sequence: Synthetic oligonucleotide
  Sense strand starting at position 2696 of SEQ ID NO: 1241917
uuuaaauugcacuguguca

SEQ ID NO: 1309713 - RNA, 19 nt, Artificial Sequence
  Description of Artificial Sequence: Synthetic oligonucleotide
  Antisense strand to SEQ ID NO: 1309712
ugacacagugcaauuuaaa

SEQ ID NO: 1309714 - RNA, 19 nt, Artificial Sequence
  Description of Artificial Sequence: Synthetic oligonucleotide
  Sense strand starting at position 3304 of SEQ ID NO: 1241917
ugcgaugggcauuauuaau

SEQ ID NO: 1309715 - RNA, 19 nt, Artificial Sequence
  Description of Artificial Sequence: Synthetic oligonucleotide
  Antisense strand to SEQ ID NO: 1309714
auuaauaaugcccaucgca

SEQ ID NO: 1309716 - RNA, 19 nt, Artificial Sequence
  Description of Artificial Sequence: Synthetic oligonucleotide
  Sense strand starting at position 3358 of SEQ ID NO: 1241917
auguaucuauaccaaagga

SEQ ID NO: 1309717 - RNA, 19 nt, Artificial Sequence
  Description of Artificial Sequence: Synthetic oligonucleotide
  Antisense strand to SEQ ID NO: 1309716
uccuuugguauagauacau

SEQ ID NO: 1309718 - RNA, 19 nt, Artificial Sequence
  Description of Artificial Sequence: Synthetic oligonucleotide
  Sense strand starting at position 3373 of SEQ ID NO: 1241917
aggacuucgaaaggucaaa

SEQ ID NO: 1309719 - RNA, 19 nt, Artificial Sequence
  Description of Artificial Sequence: Synthetic oligonucleotide
  Antisense strand to SEQ ID NO: 1309718
uuugaccuuucgaaguccu

SEQ ID NO: 1309720 - RNA, 19 nt, Artificial Sequence
  Description of Artificial Sequence: Synthetic oligonucleotide
  Sense strand starting at position 3386 of SEQ ID NO: 1241917
gucaaaguggucuggcuuu

SEQ ID NO: 1309721 - RNA, 19 nt, Artificial Sequence
  Description of Artificial Sequence: Synthetic oligonucleotide
  Antisense strand to SEQ ID NO: 1309720
aaagccagaccacuuugac

SEQ ID NO: 1309722 - RNA, 19 nt, Artificial Sequence
  Description of Artificial Sequence: Synthetic oligonucleotide
  Sense strand starting at position 3396 of SEQ ID NO: 1241917
ucuggcuuucucuaacuga

SEQ ID NO: 1309723 - RNA, 19 nt, Artificial Sequence
  Description of Artificial Sequence: Synthetic oligonucleotide
  Antisense strand to SEQ ID NO: 1309722
ucaguuagagaaagccaga

SEQ ID NO: 1309724 - RNA, 19 nt, Artificial Sequence
  Description of Artificial Sequence: Synthetic oligonucleotide
  Sense strand starting at position 3440 of SEQ ID NO: 1241917
accagcuacugguagauuu

SEQ ID NO: 1309725 - RNA, 19 nt, Artificial Sequence
  Description of Artificial Sequence: Synthetic oligonucleotide
  Antisense strand to SEQ ID NO: 1309724
aaaucuaccaguagcuggu

SEQ ID NO: 1309726 - RNA, 19 nt, Artificial Sequence
  Description of Artificial Sequence: Synthetic oligonucleotide
  Sense strand starting at position 3558 of SEQ ID NO: 1241917
guugaugacauguggcaga

SEQ ID NO: 1309727 - RNA, 19 nt, Artificial Sequence
  Description of Artificial Sequence: Synthetic oligonucleotide
  Antisense strand to SEQ ID NO: 1309726
ucugccacaugucaucaac

SEQ ID NO: 1309728 - RNA, 19 nt, Artificial Sequence
  Description of Artificial Sequence: Synthetic oligonucleotide
  Sense strand starting at position 3561 of SEQ ID NO: 1241917
gaugacauguggcagauaa

SEQ ID NO: 1309729 - RNA, 19 nt, Artificial Sequence
  Description of Artificial Sequence: Synthetic oligonucleotide
  Antisense strand to SEQ ID NO: 1309728
uuaucugccacaugucauc

SEQ ID NO: 1309730 - RNA, 19 nt, Artificial Sequence
  Description of Artificial Sequence: Synthetic oligonucleotide
  Sense strand starting at position 3563 of SEQ ID NO: 1241917
ugacauguggcagauaauu

SEQ ID NO: 1309731 - RNA, 19 nt, Artificial Sequence
  Description of Artificial Sequence: Synthetic oligonucleotide
  Antisense strand to SEQ ID NO: 1309730
aauuaucugccacauguca

SEQ ID NO: 1309732 - RNA, 19 nt, Artificial Sequence
  Description of Artificial Sequence: Synthetic oligonucleotide
  Sense strand starting at position 3571 of SEQ ID NO: 1241917
ggcagauaauuugaacuca

SEQ ID NO: 1309733 - RNA, 19 nt, Artificial Sequence
  Description of Artificial Sequence: Synthetic oligonucleotide
  Antisense strand to SEQ ID NO: 1309732
ugaguucaaauuaucugcc

SEQ ID NO: 1309734 - RNA, 19 nt, Artificial Sequence
  Description of Artificial Sequence: Synthetic oligonucleotide
  Sense strand starting at position 3613 of SEQ ID NO: 1241917
gcuauuuguuucguucuua

SEQ ID NO: 1309735 - RNA, 19 nt, Artificial Sequence
  Description of Artificial Sequence: Synthetic oligonucleotide
  Antisense strand to SEQ ID NO: 1309734
uaagaacgaaacaaauagc

SEQ ID NO: 1309736 - RNA, 19 nt, Artificial Sequence
  Description of Artificial Sequence: Synthetic oligonucleotide
  Sense strand starting at position 3614 of SEQ ID NO: 1241917
cuauuuguuucguucuuaa

SEQ ID NO: 1309737 - RNA, 19 nt, Artificial Sequence
  Description of Artificial Sequence: Synthetic oligonucleotide
  Antisense strand to SEQ ID NO: 1309736
uuaagaacgaaacaaauag

SEQ ID NO: 1309738 - RNA, 19 nt, Artificial Sequence
  Description of Artificial Sequence: Synthetic oligonucleotide
  Sense strand starting at position 3617 of SEQ ID NO: 1241917
uuuguuucguucuuaacua

SEQ ID NO: 1309739 - RNA, 19 nt, Artificial Sequence
  Description of Artificial Sequence: Synthetic oligonucleotide
  Antisense strand to SEQ ID NO: 1309738
uaguuaagaacgaaacaaa

SEQ ID NO: 1309740 - RNA, 19 nt, Artificial Sequence
  Description of Artificial Sequence: Synthetic oligonucleotide
  Sense strand starting at position 3621 of SEQ ID NO: 1241917
uuucguucuuaacuauagu

SEQ ID NO: 1309741 - RNA, 19 nt, Artificial Sequence
  Description of Artificial Sequence: Synthetic oligonucleotide
  Antisense strand to SEQ ID NO: 1309740
acuauaguuaagaacgaaa

SEQ ID NO: 1309742 - RNA, 19 nt, Artificial Sequence
  Description of Artificial Sequence: Synthetic oligonucleotide
  Sense strand starting at position 3627 of SEQ ID NO: 1241917
ucuuaacuauagucaguuu

SEQ ID NO: 1309743 - RNA, 19 nt, Artificial Sequence
  Description of Artificial Sequence: Synthetic oligonucleotide
  Antisense strand to SEQ ID NO: 1309742
aaacugacuauaguuaaga

SEQ ID NO: 1309744 - RNA, 19 nt, Artificial Sequence
  Description of Artificial Sequence: Synthetic oligonucleotide
  Sense strand starting at position 3706 of SEQ ID NO: 1241917
agugguugucuaugaugua

SEQ ID NO: 1309745 - RNA, 19 nt, Artificial Sequence
  Description of Artificial Sequence: Synthetic oligonucleotide
  Antisense strand to SEQ ID NO: 1309744
uacaucauagacaaccacu

SEQ ID NO: 1309746 - RNA, 19 nt, Artificial Sequence
  Description of Artificial Sequence: Synthetic oligonucleotide
  Sense strand starting at position 3711 of SEQ ID NO: 1241917
uugucuaugauguaaagua

SEQ ID NO: 1309747 - RNA, 19 nt, Artificial Sequence
  Description of Artificial Sequence: Synthetic oligonucleotide
  Antisense strand to SEQ ID NO: 1309746
uacuuuacaucauagacaa

SEQ ID NO: 1309748 - RNA, 19 nt, Artificial Sequence
  Description of Artificial Sequence: Synthetic oligonucleotide
  Sense strand starting at position 3718 of SEQ ID NO: 1241917
ugauguaaaguauaaagca

SEQ ID NO: 1309749 - RNA, 19 nt, Artificial Sequence
  Description of Artificial Sequence: Synthetic oligonucleotide
  Antisense strand to SEQ ID NO: 1309748
ugcuuuauacuuuacauca

SEQ ID NO: 1309750 - RNA, 19 nt, Artificial Sequence
  Description of Artificial Sequence: Synthetic oligonucleotide
  Sense strand starting at position 3770 of SEQ ID NO: 1241917
gugaauuauccuggaaauc

SEQ ID NO: 1309751 - RNA, 19 nt, Artificial Sequence
  Description of Artificial Sequence: Synthetic oligonucleotide
  Antisense strand to SEQ ID NO: 1309750
gauuuccaggauaauucac

SEQ ID NO: 1309752 - RNA, 19 nt, Artificial Sequence
  Description of Artificial Sequence: Synthetic oligonucleotide
  Sense strand starting at position 3831 of SEQ ID NO: 1241917
gguacuaauuaugccaaca

SEQ ID NO: 1309753 - RNA, 19 nt, Artificial Sequence
  Description of Artificial Sequence: Synthetic oligonucleotide
  Antisense strand to SEQ ID NO: 1309752
uguuggcauaauuaguacc

SEQ ID NO: 1309754 - RNA, 19 nt, Artificial Sequence
  Description of Artificial Sequence: Synthetic oligonucleotide
  Sense strand starting at position 3912 of SEQ ID NO: 1241917
gccaaagcugaacgaaauu

SEQ ID NO: 1309755 - RNA, 19 nt, Artificial Sequence
  Description of Artificial Sequence: Synthetic oligonucleotide
  Antisense strand to SEQ ID NO: 1309754
aauuucguucagcuuuggc

SEQ ID NO: 1309756 - RNA, 19 nt, Artificial Sequence
  Description of Artificial Sequence: Synthetic oligonucleotide
  Sense strand starting at position 3939 of SEQ ID NO: 1241917
aguaguaaagagggucauu

SEQ ID NO: 1309757 - RNA, 19 nt, Artificial Sequence
  Description of Artificial Sequence: Synthetic oligonucleotide
  Antisense strand to SEQ ID NO: 1309756
aaugacccucuuuacuacu

SEQ ID NO: 1309758 - RNA, 19 nt, Artificial Sequence
  Description of Artificial Sequence: Synthetic oligonucleotide
  Sense strand starting at position 3949 of SEQ ID NO: 1241917
agggucauuugauaacaag

SEQ ID NO: 1309759 - RNA, 19 nt, Artificial Sequence
  Description of Artificial Sequence: Synthetic oligonucleotide
  Antisense strand to SEQ ID NO: 1309758
cuuguuaucaaaugacccu

SEQ ID NO: 1309760 - RNA, 19 nt, Artificial Sequence
  Description of Artificial Sequence: Synthetic oligonucleotide
  Sense strand starting at position 3952 of SEQ ID NO: 1241917
gucauuugauaacaagaag

SEQ ID NO: 1309761 - RNA, 19 nt, Artificial Sequence
  Description of Artificial Sequence: Synthetic oligonucleotide
  Antisense strand to SEQ ID NO: 1309760
cuucuuguuaucaaaugac

SEQ ID NO: 1309762 - RNA, 19 nt, Artificial Sequence
  Description of Artificial Sequence: Synthetic oligonucleotide
  Sense strand starting at position 53 of SEQ ID NO: 1241918
ccaguaaugccauaaggac

SEQ ID NO: 1309763 - RNA, 19 nt, Artificial Sequence
  Description of Artificial Sequence: Synthetic oligonucleotide
  Antisense strand to SEQ ID NO: 1309762
guccuuauggcauuacugg

SEQ ID NO: 1309764 - RNA, 19 nt, Artificial Sequence
  Description of Artificial Sequence: Synthetic oligonucleotide
  Sense strand starting at position 208 of SEQ ID NO: 1241918
gacccaaagucaugaagga

SEQ ID NO: 1309765 - RNA, 19 nt, Artificial Sequence
  Description of Artificial Sequence: Synthetic oligonucleotide
  Antisense strand to SEQ ID NO: 1309764
uccuucaugacuuuggguc

SEQ ID NO: 1309766 - RNA, 19 nt, Artificial Sequence
  Description of Artificial Sequence: Synthetic oligonucleotide
  Sense strand starting at position 243 of SEQ ID NO: 1241918
aggauacuccaguaagcug

SEQ ID NO: 1309767 - RNA, 19 nt, Artificial Sequence
  Description of Artificial Sequence: Synthetic oligonucleotide
  Antisense strand to SEQ ID NO: 1309766
cagcuuacuggaguauccu

SEQ ID NO: 1309768 - RNA, 19 nt, Artificial Sequence
  Description of Artificial Sequence: Synthetic oligonucleotide
  Sense strand starting at position 261 of SEQ ID NO: 1241918
gacggugacguauguaaau

SEQ ID NO: 1309769 - RNA, 19 nt, Artificial Sequence
  Description of Artificial Sequence: Synthetic oligonucleotide
  Antisense strand to SEQ ID NO: 1309768
auuuacauacgucaccguc

SEQ ID NO: 1309770 - RNA, 19 nt, Artificial Sequence
  Description of Artificial Sequence: Synthetic oligonucleotide
  Sense strand starting at position 263 of SEQ ID NO: 1241918
cggugacguauguaaauuu

SEQ ID NO: 1309771 - RNA, 19 nt, Artificial Sequence
  Description of Artificial Sequence: Synthetic oligonucleotide
  Antisense strand to SEQ ID NO: 1309770
aaauuuacauacgucaccg

SEQ ID NO: 1309772 - RNA, 19 nt, Artificial Sequence
  Description of Artificial Sequence: Synthetic oligonucleotide
  Sense strand starting at position 298 of SEQ ID NO: 1241918
cccuaaguguuagugcuua

SEQ ID NO: 1309773 - RNA, 19 nt, Artificial Sequence
  Description of Artificial Sequence: Synthetic oligonucleotide
  Antisense strand to SEQ ID NO: 1309772
uaagcacuaacacuuaggg

SEQ ID NO: 1309774 - RNA, 19 nt, Artificial Sequence
  Description of Artificial Sequence: Synthetic oligonucleotide
  Sense strand starting at position 302 of SEQ ID NO: 1241918
aaguguuagugcuuaaucu

SEQ ID NO: 1309775 - RNA, 19 nt, Artificial Sequence
  Description of Artificial Sequence: Synthetic oligonucleotide
  Antisense strand to SEQ ID NO: 1309774
agauuaagcacuaacacuu

SEQ ID NO: 1309776 - RNA, 19 nt, Artificial Sequence
  Description of Artificial Sequence: Synthetic oligonucleotide
  Sense strand starting at position 303 of SEQ ID NO: 1241918
aguguuagugcuuaaucuc

SEQ ID NO: 1309777 - RNA, 19 nt, Artificial Sequence
  Description of Artificial Sequence: Synthetic oligonucleotide
  Antisense strand to SEQ ID NO: 1309776
gagauuaagcacuaacacu

SEQ ID NO: 1309778 - RNA, 19 nt, Artificial Sequence
  Description of Artificial Sequence: Synthetic oligonucleotide
  Sense strand starting at position 306 of SEQ ID NO: 1241918
guuagugcuuaaucucaag

SEQ ID NO: 1309779 - RNA, 19 nt, Artificial Sequence
  Description of Artificial Sequence: Synthetic oligonucleotide
  Antisense strand to SEQ ID NO: 1309778
cuugagauuaagcacuaac

SEQ ID NO: 1309780 - RNA, 19 nt, Artificial Sequence
  Description of Artificial Sequence: Synthetic oligonucleotide
  Sense strand starting at position 309 of SEQ ID NO: 1241918
agugcuuaaucucaagaac

SEQ ID NO: 1309781 - RNA, 19 nt, Artificial Sequence
  Description of Artificial Sequence: Synthetic oligonucleotide
  Antisense strand to SEQ ID NO: 1309780
guucuugagauuaagcacu

SEQ ID NO: 1309782 - RNA, 19 nt, Artificial Sequence
  Description of Artificial Sequence: Synthetic oligonucleotide
  Sense strand starting at position 543 of SEQ ID NO: 1241918
cagauuuccuagggacuuc

SEQ ID NO: 1309783 - RNA, 19 nt, Artificial Sequence
  Description of Artificial Sequence: Synthetic oligonucleotide
  Antisense strand to SEQ ID NO: 1309782
gaagucccuaggaaaucug

SEQ ID NO: 1309784 - RNA, 19 nt, Artificial Sequence
  Description of Artificial Sequence: Synthetic oligonucleotide
  Sense strand starting at position 868 of SEQ ID NO: 1241918
agugauagaucccauaucu

SEQ ID NO: 1309785 - RNA, 19 nt, Artificial Sequence
  Description of Artificial Sequence: Synthetic oligonucleotide
  Antisense strand to SEQ ID NO: 1309784
agauaugggaucuaucacu

SEQ ID NO: 1309786 - RNA, 19 nt, Artificial Sequence
  Description of Artificial Sequence: Synthetic oligonucleotide
  Sense strand starting at position 881 of SEQ ID NO: 1241918
auaucugagucaucuauca

SEQ ID NO: 1309787 - RNA, 19 nt, Artificial Sequence
  Description of Artificial Sequence: Synthetic oligonucleotide
  Antisense strand to SEQ ID NO: 1309786
ugauagaugacucagauau

SEQ ID NO: 1309788 - RNA, 19 nt, Artificial Sequence
  Description of Artificial Sequence: Synthetic oligonucleotide
  Sense strand starting at position 905 of SEQ ID NO: 1241918
uucucauuagagcagguuu

SEQ ID NO: 1309789 - RNA, 19 nt, Artificial Sequence
  Description of Artificial Sequence: Synthetic oligonucleotide
  Antisense strand to SEQ ID NO: 1309788
aaaccugcucuaaugagaa

SEQ ID NO: 1309790 - RNA, 19 nt, Artificial Sequence
  Description of Artificial Sequence: Synthetic oligonucleotide
  Sense strand starting at position 916 of SEQ ID NO: 1241918
gcagguuuggcuuagaaau

SEQ ID NO: 1309791 - RNA, 19 nt, Artificial Sequence
  Description of Artificial Sequence: Synthetic oligonucleotide
  Antisense strand to SEQ ID NO: 1309790
auuucuaagccaaaccugc

SEQ ID NO: 1309792 - RNA, 19 nt, Artificial Sequence
  Description of Artificial Sequence: Synthetic oligonucleotide
  Sense strand starting at position 918 of SEQ ID NO: 1241918
agguuuggcuuagaaauaa

SEQ ID NO: 1309793 - RNA, 19 nt, Artificial Sequence
  Description of Artificial Sequence: Synthetic oligonucleotide
  Antisense strand to SEQ ID NO: 1309792
uuauuucuaagccaaaccu

SEQ ID NO: 1309794 - RNA, 19 nt, Artificial Sequence
  Description of Artificial Sequence: Synthetic oligonucleotide
  Sense strand starting at position 961 of SEQ ID NO: 1241918
cugccaauucgcuagcuaa

SEQ ID NO: 1309795 - RNA, 19 nt, Artificial Sequence
  Description of Artificial Sequence: Synthetic oligonucleotide
  Antisense strand to SEQ ID NO: 1309794
uuagcuagcgaauuggcag

SEQ ID NO: 1309796 - RNA, 19 nt, Artificial Sequence
  Description of Artificial Sequence: Synthetic oligonucleotide
  Sense strand starting at position 2210 of SEQ ID NO: 1241918
gugacugacuggucaucga

SEQ ID NO: 1309797 - RNA, 19 nt, Artificial Sequence
  Description of Artificial Sequence: Synthetic oligonucleotide
  Antisense strand to SEQ ID NO: 1309796
ucgaugaccagucagucac

SEQ ID NO: 1309798 - RNA, 19 nt, Artificial Sequence
  Description of Artificial Sequence: Synthetic oligonucleotide
  Sense strand starting at position 2322 of SEQ ID NO: 1241918
acucgacugcgaggaauua

SEQ ID NO: 1309799 - RNA, 19 nt, Artificial Sequence
  Description of Artificial Sequence: Synthetic oligonucleotide
  Antisense strand to SEQ ID NO: 1309798
uaauuccucgcagucgagu

SEQ ID NO: 1309800 - RNA, 19 nt, Artificial Sequence
  Description of Artificial Sequence: Synthetic oligonucleotide
  Sense strand starting at position 2323 of SEQ ID NO: 1241918
cucgacugcgaggaauuaa

SEQ ID NO: 1309801 - RNA, 19 nt, Artificial Sequence
  Description of Artificial Sequence: Synthetic oligonucleotide
  Antisense strand to SEQ ID NO: 1309800
uuaauuccucgcagucgag

SEQ ID NO: 1309802 - RNA, 19 nt, Artificial Sequence
  Description of Artificial Sequence: Synthetic oligonucleotide
  Sense strand starting at position 2863 of SEQ ID NO: 1241918
gggcuugggaaaugaguau

SEQ ID NO: 1309803 - RNA, 19 nt, Artificial Sequence
  Description of Artificial Sequence: Synthetic oligonucleotide
  Antisense strand to SEQ ID NO: 1309802
auacucauuucccaagccc

SEQ ID NO: 1309804 - RNA, 19 nt, Artificial Sequence
  Description of Artificial Sequence: Synthetic oligonucleotide
  Sense strand starting at position 2904 of SEQ ID NO: 1241918
auguguugccacuguugua

SEQ ID NO: 1309805 - RNA, 19 nt, Artificial Sequence
  Description of Artificial Sequence: Synthetic oligonucleotide
  Antisense strand to SEQ ID NO: 1309804
uacaacaguggcaacacau

SEQ ID NO: 1309806 - RNA, 19 nt, Artificial Sequence
  Description of Artificial Sequence: Synthetic oligonucleotide
  Sense strand starting at position 2905 of SEQ ID NO: 1241918
uguguugccacuguuguaa

SEQ ID NO: 1309807 - RNA, 19 nt, Artificial Sequence
  Description of Artificial Sequence: Synthetic oligonucleotide
  Antisense strand to SEQ ID NO: 1309806
uuacaacaguggcaacaca

SEQ ID NO: 1309808 - RNA, 19 nt, Artificial Sequence
  Description of Artificial Sequence: Synthetic oligonucleotide
  Sense strand starting at position 2917 of SEQ ID NO: 1241918
guuguaagcucuuuaccau

SEQ ID NO: 1309809 - RNA, 19 nt, Artificial Sequence
  Description of Artificial Sequence: Synthetic oligonucleotide
  Antisense strand to SEQ ID NO: 1309808
augguaaagagcuuacaac

SEQ ID NO: 1309810 - RNA, 19 nt, Artificial Sequence
  Description of Artificial Sequence: Synthetic oligonucleotide
  Sense strand starting at position 2958 of SEQ ID NO: 1241918
acaacucauugaggugaau

SEQ ID NO: 1309811 - RNA, 19 nt, Artificial Sequence
  Description of Artificial Sequence: Synthetic oligonucleotide
  Antisense strand to SEQ ID NO: 1309810
auucaccucaaugaguugu

SEQ ID NO: 1309812 - RNA, 19 nt, Artificial Sequence
  Description of Artificial Sequence: Synthetic oligonucleotide
  Sense strand starting at position 2967 of SEQ ID NO: 1241918
ugaggugaauaccauuauu

SEQ ID NO: 1309813 - RNA, 19 nt, Artificial Sequence
  Description of Artificial Sequence: Synthetic oligonucleotide
  Antisense strand to SEQ ID NO: 1309812
aauaaugguauucaccuca

SEQ ID NO: 1309814 - RNA, 19 nt, Artificial Sequence
  Description of Artificial Sequence: Synthetic oligonucleotide
  Sense strand starting at position 2970 of SEQ ID NO: 1241918
ggugaauaccauuauucuc

SEQ ID NO: 1309815 - RNA, 19 nt, Artificial Sequence
  Description of Artificial Sequence: Synthetic oligonucleotide
  Antisense strand to SEQ ID NO: 1309814
gagaauaaugguauucacc

SEQ ID NO: 1309816 - RNA, 19 nt, Artificial Sequence
  Description of Artificial Sequence: Synthetic oligonucleotide
  Sense strand starting at position 3123 of SEQ ID NO: 1241918
ggugcauggguguguauau

SEQ ID NO: 1309817 - RNA, 19 nt, Artificial Sequence
  Description of Artificial Sequence: Synthetic oligonucleotide
  Antisense strand to SEQ ID NO: 1309816
auauacacacccaugcacc

SEQ ID NO: 1309818 - RNA, 19 nt, Artificial Sequence
  Description of Artificial Sequence: Synthetic oligonucleotide
  Sense strand starting at position 3124 of SEQ ID NO: 1241918
gugcauggguguguauauu

SEQ ID NO: 1309819 - RNA, 19 nt, Artificial Sequence
  Description of Artificial Sequence: Synthetic oligonucleotide
  Antisense strand to SEQ ID NO: 1309818
aauauacacacccaugcac

SEQ ID NO: 1309820 - RNA, 19 nt, Artificial Sequence
  Description of Artificial Sequence: Synthetic oligonucleotide
  Sense strand starting at position 3399 of SEQ ID NO: 1241918
guguguauauuugugaaca

SEQ ID NO: 1309821 - RNA, 19 nt, Artificial Sequence
  Description of Artificial Sequence: Synthetic oligonucleotide
  Antisense strand to SEQ ID NO: 1309820
uguucacaaauauacacac

SEQ ID NO: 1309822 - RNA, 19 nt, Artificial Sequence
  Description of Artificial Sequence: Synthetic oligonucleotide
  Sense strand starting at position 3400 of SEQ ID NO: 1241918
uguguauauuugugaacac

SEQ ID NO: 1309823 - RNA, 19 nt, Artificial Sequence
  Description of Artificial Sequence: Synthetic oligonucleotide
  Antisense strand to SEQ ID NO: 1309822
guguucacaaauauacaca

SEQ ID NO: 1309824 - RNA, 19 nt, Artificial Sequence
  Description of Artificial Sequence: Synthetic oligonucleotide
  Sense strand starting at position 3401 of SEQ ID NO: 1241918
guguauauuugugaacaca

SEQ ID NO: 1309825 - RNA, 19 nt, Artificial Sequence
  Description of Artificial Sequence: Synthetic oligonucleotide
  Antisense strand to SEQ ID NO: 1309824
uguguucacaaauauacac

SEQ ID NO: 1309826 - RNA, 19 nt, Artificial Sequence
  Description of Artificial Sequence: Synthetic oligonucleotide
  Sense strand starting at position 3435 of SEQ ID NO: 1241918
auuugagucuacgugcaua

SEQ ID NO: 1309827 - RNA, 19 nt, Artificial Sequence
  Description of Artificial Sequence: Synthetic oligonucleotide
  Antisense strand to SEQ ID NO: 1309826
uaugcacguagacucaaau

SEQ ID NO: 1309828 - RNA, 19 nt, Artificial Sequence
  Description of Artificial Sequence: Synthetic oligonucleotide
  Sense strand starting at position 3446 of SEQ ID NO: 1241918
cgugcauaugugucuuuga

SEQ ID NO: 1309829 - RNA, 19 nt, Artificial Sequence
  Description of Artificial Sequence: Synthetic oligonucleotide
  Antisense strand to SEQ ID NO: 1309828
ucaaagacacauaugcacg

SEQ ID NO: 1309830 - RNA, 19 nt, Artificial Sequence
  Description of Artificial Sequence: Synthetic oligonucleotide
  Sense strand starting at position 3447 of SEQ ID NO: 1241918
gugcauaugugucuuugaa

SEQ ID NO: 1309831 - RNA, 19 nt, Artificial Sequence
  Description of Artificial Sequence: Synthetic oligonucleotide
  Antisense strand to SEQ ID NO: 1309830
uucaaagacacauaugcac

SEQ ID NO: 1309832 - RNA, 19 nt, Artificial Sequence
  Description of Artificial Sequence: Synthetic oligonucleotide
  Sense strand starting at position 3449 of SEQ ID NO: 1241918
gcauaugugucuuugaauc

SEQ ID NO: 1309833 - RNA, 19 nt, Artificial Sequence
  Description of Artificial Sequence: Synthetic oligonucleotide
  Antisense strand to SEQ ID NO: 1309832
gauucaaagacacauaugc

SEQ ID NO: 1309834 - RNA, 19 nt, Artificial Sequence
  Description of Artificial Sequence: Synthetic oligonucleotide
  Sense strand starting at position 3475 of SEQ ID NO: 1241918
agcugugucuguguaauug

SEQ ID NO: 1309835 - RNA, 19 nt, Artificial Sequence
  Description of Artificial Sequence: Synthetic oligonucleotide
  Antisense strand to SEQ ID NO: 1309834
caauuacacagacacagcu

SEQ ID NO: 1309836 - RNA, 19 nt, Artificial Sequence
  Description of Artificial Sequence: Synthetic oligonucleotide
  Sense strand starting at position 3479 of SEQ ID NO: 1241918
gugucuguguaauugcuga

SEQ ID NO: 1309837 - RNA, 19 nt, Artificial Sequence
  Description of Artificial Sequence: Synthetic oligonucleotide
  Antisense strand to SEQ ID NO: 1309836
ucagcaauuacacagacac

SEQ ID NO: 1309838 - RNA, 19 nt, Artificial Sequence
  Description of Artificial Sequence: Synthetic oligonucleotide
  Sense strand starting at position 3529 of SEQ ID NO: 1241918
gcugucuugucccugacca

SEQ ID NO: 1309839 - RNA, 19 nt, Artificial Sequence
  Description of Artificial Sequence: Synthetic oligonucleotide
  Antisense strand to SEQ ID NO: 1309838
uggucagggacaagacagc

SEQ ID NO: 1309840 - RNA, 19 nt, Artificial Sequence
  Description of Artificial Sequence: Synthetic oligonucleotide
  Sense strand starting at position 3904 of SEQ ID NO: 1241918
caguuuauagugugucuau

SEQ ID NO: 1309841 - RNA, 19 nt, Artificial Sequence
  Description of Artificial Sequence: Synthetic oligonucleotide
  Antisense strand to SEQ ID NO: 1309840
auagacacacuauaaacug

SEQ ID NO: 1309842 - RNA, 19 nt, Artificial Sequence
  Description of Artificial Sequence: Synthetic oligonucleotide
  Sense strand starting at position 26 of SEQ ID NO: 1241919
aggcuugcucacugaccua

SEQ ID NO: 1309843 - RNA, 19 nt, Artificial Sequence
  Description of Artificial Sequence: Synthetic oligonucleotide
  Antisense strand to SEQ ID NO: 1309842
uaggucagugagcaagccu

SEQ ID NO: 1309844 - RNA, 19 nt, Artificial Sequence
  Description of Artificial Sequence: Synthetic oligonucleotide
  Sense strand starting at position 143 of SEQ ID NO: 1241919
gguaccagguucucuagau

SEQ ID NO: 1309845 - RNA, 19 nt, Artificial Sequence
  Description of Artificial Sequence: Synthetic oligonucleotide
  Antisense strand to SEQ ID NO: 1309844
aucuagagaaccugguacc

SEQ ID NO: 1309846 - RNA, 19 nt, Artificial Sequence
  Description of Artificial Sequence: Synthetic oligonucleotide
  Sense strand starting at position 144 of SEQ ID NO: 1241919
guaccagguucucuagaua

SEQ ID NO: 1309847 - RNA, 19 nt, Artificial Sequence
  Description of Artificial Sequence: Synthetic oligonucleotide
  Antisense strand to SEQ ID NO: 1309846
uaucuagagaaccugguac

SEQ ID NO: 1309848 - RNA, 19 nt, Artificial Sequence
  Description of Artificial Sequence: Synthetic oligonucleotide
  Sense strand starting at position 170 of SEQ ID NO: 1241919
aaagaaagcccaugguaug

SEQ ID NO: 1309849 - RNA, 19 nt, Artificial Sequence
  Description of Artificial Sequence: Synthetic oligonucleotide
  Antisense strand to SEQ ID NO: 1309848
cauaccaugggcuuucuuu

SEQ ID NO: 1309850 - RNA, 19 nt, Artificial Sequence
  Description of Artificial Sequence: Synthetic oligonucleotide
  Sense strand starting at position 239 of SEQ ID NO: 1241919
acccauaaguucuacaagu

SEQ ID NO: 1309851 - RNA, 19 nt, Artificial Sequence
  Description of Artificial Sequence: Synthetic oligonucleotide
  Antisense strand to SEQ ID NO: 1309850
acuuguagaacuuaugggu

SEQ ID NO: 1309852 - RNA, 19 nt, Artificial Sequence
  Description of Artificial Sequence: Synthetic oligonucleotide
  Sense strand starting at position 241 of SEQ ID NO: 1241919
ccauaaguucuacaagugu

SEQ ID NO: 1309853 - RNA, 19 nt, Artificial Sequence
  Description of Artificial Sequence: Synthetic oligonucleotide
  Antisense strand to SEQ ID NO: 1309852
acacuuguagaacuuaugg

SEQ ID NO: 1309854 - RNA, 19 nt, Artificial Sequence
  Description of Artificial Sequence: Synthetic oligonucleotide
  Sense strand starting at position 450 of SEQ ID NO: 1241919
gcugcuuagagcuauggaa

SEQ ID NO: 1309855 - RNA, 19 nt, Artificial Sequence
  Description of Artificial Sequence: Synthetic oligonucleotide
  Antisense strand to SEQ ID NO: 1309854
uuccauagcucuaagcagc

SEQ ID NO: 1309856 - RNA, 19 nt, Artificial Sequence
  Description of Artificial Sequence: Synthetic oligonucleotide
  Sense strand starting at position 452 of SEQ ID NO: 1241919
ugcuuagagcuauggaaua

SEQ ID NO: 1309857 - RNA, 19 nt, Artificial Sequence
  Description of Artificial Sequence: Synthetic oligonucleotide
  Antisense strand to SEQ ID NO: 1309856
uauuccauagcucuaagca

SEQ ID NO: 1309858 - RNA, 19 nt, Artificial Sequence
  Description of Artificial Sequence: Synthetic oligonucleotide
  Sense strand starting at position 834 of SEQ ID NO: 1241919
gguugauccugcgagaagg

SEQ ID NO: 1309859 - RNA, 19 nt, Artificial Sequence
  Description of Artificial Sequence: Synthetic oligonucleotide
  Antisense strand to SEQ ID NO: 1309858
ccuucucgcaggaucaacc

SEQ ID NO: 1309860 - RNA, 19 nt, Artificial Sequence
  Description of Artificial Sequence: Synthetic oligonucleotide
  Sense strand starting at position 853 of SEQ ID NO: 1241919
cuucguccugcugagagua

SEQ ID NO: 1309861 - RNA, 19 nt, Artificial Sequence
  Description of Artificial Sequence: Synthetic oligonucleotide
  Antisense strand to SEQ ID NO: 1309860
uacucucagcaggacgaag

SEQ ID NO: 1309862 - RNA, 19 nt, Artificial Sequence
  Description of Artificial Sequence: Synthetic oligonucleotide
  Sense strand starting at position 1070 of SEQ ID NO: 1241919
agcugagucucacccugua

SEQ ID NO: 1309863 - RNA, 19 nt, Artificial Sequence
  Description of Artificial Sequence: Synthetic oligonucleotide
  Antisense strand to SEQ ID NO: 1309862
uacagggugagacucagcu

SEQ ID NO: 1309864 - RNA, 19 nt, Artificial Sequence
  Description of Artificial Sequence: Synthetic oligonucleotide
  Sense strand starting at position 1135 of SEQ ID NO: 1241919
ugagguuuggcggaucaga

SEQ ID NO: 1309865 - RNA, 19 nt, Artificial Sequence
  Description of Artificial Sequence: Synthetic oligonucleotide
  Antisense strand to SEQ ID NO: 1309864
ucugauccgccaaaccuca

SEQ ID NO: 1309866 - RNA, 19 nt, Artificial Sequence
  Description of Artificial Sequence: Synthetic oligonucleotide
  Sense strand starting at position 1553 of SEQ ID NO: 1241919
agcguuauccuagggcaga

SEQ ID NO: 1309867 - RNA, 19 nt, Artificial Sequence
  Description of Artificial Sequence: Synthetic oligonucleotide
  Antisense strand to SEQ ID NO: 1309866
ucugcccuaggauaacgcu

SEQ ID NO: 1309868 - RNA, 19 nt, Artificial Sequence
  Description of Artificial Sequence: Synthetic oligonucleotide
  Sense strand starting at position 1774 of SEQ ID NO: 1241919
gggcgugucaccgcuguua

SEQ ID NO: 1309869 - RNA, 19 nt, Artificial Sequence
  Description of Artificial Sequence: Synthetic oligonucleotide
  Antisense strand to SEQ ID NO: 1309868
uaacagcggugacacgccc

SEQ ID NO: 1309870 - RNA, 19 nt, Artificial Sequence
  Description of Artificial Sequence: Synthetic oligonucleotide
  Sense strand starting at position 2073 of SEQ ID NO: 1241919
gccgagaggccgguuguua

SEQ ID NO: 1309871 - RNA, 19 nt, Artificial Sequence
  Description of Artificial Sequence: Synthetic oligonucleotide
  Antisense strand to SEQ ID NO: 1309870
uaacaaccggccucucggc

SEQ ID NO: 1309872 - RNA, 19 nt, Artificial Sequence
  Description of Artificial Sequence: Synthetic oligonucleotide
  Sense strand starting at position 2083 of SEQ ID NO: 1241919
cgguuguuaggaggugaaa

SEQ ID NO: 1309873 - RNA, 19 nt, Artificial Sequence
  Description of Artificial Sequence: Synthetic oligonucleotide
  Antisense strand to SEQ ID NO: 1309872
uuucaccuccuaacaaccg

SEQ ID NO: 1309874 - RNA, 19 nt, Artificial Sequence
  Description of Artificial Sequence: Synthetic oligonucleotide
  Sense strand starting at position 2085 of SEQ ID NO: 1241919
guuguuaggaggugaaaug

SEQ ID NO: 1309875 - RNA, 19 nt, Artificial Sequence
  Description of Artificial Sequence: Synthetic oligonucleotide
  Antisense strand to SEQ ID NO: 1309874
cauuucaccuccuaacaac

SEQ ID NO: 1309876 - RNA, 19 nt, Artificial Sequence
  Description of Artificial Sequence: Synthetic oligonucleotide
  Sense strand starting at position 2092 of SEQ ID NO: 1241919
ggaggugaaauguggauca

SEQ ID NO: 1309877 - RNA, 19 nt, Artificial Sequence
  Description of Artificial Sequence: Synthetic oligonucleotide
  Antisense strand to SEQ ID NO: 1309876
ugauccacauuucaccucc

SEQ ID NO: 1309878 - RNA, 19 nt, Artificial Sequence
  Description of Artificial Sequence: Synthetic oligonucleotide
  Sense strand starting at position 2163 of SEQ ID NO: 1241919
agggauucgagcugggagu

SEQ ID NO: 1309879 - RNA, 19 nt, Artificial Sequence
  Description of Artificial Sequence: Synthetic oligonucleotide
  Antisense strand to SEQ ID NO: 1309878
acucccagcucgaaucccu

SEQ ID NO: 1309880 - RNA, 19 nt, Artificial Sequence
  Description of Artificial Sequence: Synthetic oligonucleotide
  Sense strand starting at position 2296 of SEQ ID NO: 1241919
gaguuuaaguuuccuagau

SEQ ID NO: 1309881 - RNA, 19 nt, Artificial Sequence
  Description of Artificial Sequence: Synthetic oligonucleotide
  Antisense strand to SEQ ID NO: 1309880
aucuaggaaacuuaaacuc

SEQ ID NO: 1309882 - RNA, 19 nt, Artificial Sequence
  Description of Artificial Sequence: Synthetic oligonucleotide
  Sense strand starting at position 2297 of SEQ ID NO: 1241919
aguuuaaguuuccuagauc

SEQ ID NO: 1309883 - RNA, 19 nt, Artificial Sequence
  Description of Artificial Sequence: Synthetic oligonucleotide
  Antisense strand to SEQ ID NO: 1309882
gaucuaggaaacuuaaacu

SEQ ID NO: 1309884 - RNA, 19 nt, Artificial Sequence
  Description of Artificial Sequence: Synthetic oligonucleotide
  Sense strand starting at position 2465 of SEQ ID NO: 1241919
cuaggagguucuuaauaau

SEQ ID NO: 1309885 - RNA, 19 nt, Artificial Sequence
  Description of Artificial Sequence: Synthetic oligonucleotide
  Antisense strand to SEQ ID NO: 1309884
auuauuaagaaccuccuag

SEQ ID NO: 1309886 - RNA, 19 nt, Artificial Sequence
  Description of Artificial Sequence: Synthetic oligonucleotide
  Sense strand starting at position 2534 of SEQ ID NO: 1241919
gcuuguauguagcuuuauu

SEQ ID NO: 1309887 - RNA, 19 nt, Artificial Sequence
  Description of Artificial Sequence: Synthetic oligonucleotide
  Antisense strand to SEQ ID NO: 1309886
aauaaagcuacauacaagc

SEQ ID NO: 1309888 - RNA, 19 nt, Artificial Sequence
  Description of Artificial Sequence: Synthetic oligonucleotide
  Sense strand starting at position 2552 of SEQ ID NO: 1241919
uuacuuaaguggguuuaca

SEQ ID NO: 1309889 - RNA, 19 nt, Artificial Sequence
  Description of Artificial Sequence: Synthetic oligonucleotide
  Antisense strand to SEQ ID NO: 1309888
uguaaacccacuuaaguaa

SEQ ID NO: 1309890 - RNA, 19 nt, Artificial Sequence
  Description of Artificial Sequence: Synthetic oligonucleotide
  Sense strand starting at position 2560 of SEQ ID NO: 1241919
guggguuuacaugagguua

SEQ ID NO: 1309891 - RNA, 19 nt, Artificial Sequence
  Description of Artificial Sequence: Synthetic oligonucleotide
  Antisense strand to SEQ ID NO: 1309890
uaaccucauguaaacccac

SEQ ID NO: 1309892 - RNA, 19 nt, Artificial Sequence
  Description of Artificial Sequence: Synthetic oligonucleotide
  Sense strand starting at position 2562 of SEQ ID NO: 1241919
ggguuuacaugagguuaau

SEQ ID NO: 1309893 - RNA, 19 nt, Artificial Sequence
  Description of Artificial Sequence: Synthetic oligonucleotide
  Antisense strand to SEQ ID NO: 1309892
auuaaccucauguaaaccc

SEQ ID NO: 1309894 - RNA, 19 nt, Artificial Sequence
  Description of Artificial Sequence: Synthetic oligonucleotide
  Sense strand starting at position 2596 of SEQ ID NO: 1241919
caguuuagaugucaguaag

SEQ ID NO: 1309895 - RNA, 19 nt, Artificial Sequence
  Description of Artificial Sequence: Synthetic oligonucleotide
  Antisense strand to SEQ ID NO: 1309894
cuuacugacaucuaaacug

SEQ ID NO: 1309896 - RNA, 19 nt, Artificial Sequence
  Description of Artificial Sequence: Synthetic oligonucleotide
  Sense strand starting at position 2599 of SEQ ID NO: 1241919
uuuagaugucaguaagcau

SEQ ID NO: 1309897 - RNA, 19 nt, Artificial Sequence
  Description of Artificial Sequence: Synthetic oligonucleotide
  Antisense strand to SEQ ID NO: 1309896
augcuuacugacaucuaaa

SEQ ID NO: 1309898 - RNA, 19 nt, Artificial Sequence
  Description of Artificial Sequence: Synthetic oligonucleotide
  Sense strand starting at position 2613 of SEQ ID NO: 1241919
agcauaucaugauuagcuu

SEQ ID NO: 1309899 - RNA, 19 nt, Artificial Sequence
  Description of Artificial Sequence: Synthetic oligonucleotide
  Antisense strand to SEQ ID NO: 1309898
aagcuaaucaugauaugcu

SEQ ID NO: 1309900 - RNA, 19 nt, Artificial Sequence
  Description of Artificial Sequence: Synthetic oligonucleotide
  Sense strand starting at position 2636 of SEQ ID NO: 1241919
gagcuugagguuuguauuu

SEQ ID NO: 1309901 - RNA, 19 nt, Artificial Sequence
  Description of Artificial Sequence: Synthetic oligonucleotide
  Antisense strand to SEQ ID NO: 1309900
aaauacaaaccucaagcuc

SEQ ID NO: 1309902 - RNA, 19 nt, Artificial Sequence
  Description of Artificial Sequence: Synthetic oligonucleotide
  Sense strand starting at position 2884 of SEQ ID NO: 1241919
cggccugaguaauuucuua

SEQ ID NO: 1309903 - RNA, 19 nt, Artificial Sequence
  Description of Artificial Sequence: Synthetic oligonucleotide
  Antisense strand to SEQ ID NO: 1309902
uaagaaauuacucaggccg

SEQ ID NO: 1309904 - RNA, 19 nt, Artificial Sequence
  Description of Artificial Sequence: Synthetic oligonucleotide
  Sense strand starting at position 3252 of SEQ ID NO: 1241919
gguugcugcucagugacaa

SEQ ID NO: 1309905 - RNA, 19 nt, Artificial Sequence
  Description of Artificial Sequence: Synthetic oligonucleotide
  Antisense strand to SEQ ID NO: 1309904
uugucacugagcagcaacc

SEQ ID NO: 1309906 - RNA, 19 nt, Artificial Sequence
  Description of Artificial Sequence: Synthetic oligonucleotide
  Sense strand starting at position 3253 of SEQ ID NO: 1241919
guugcugcucagugacaaa

SEQ ID NO: 1309907 - RNA, 19 nt, Artificial Sequence
  Description of Artificial Sequence: Synthetic oligonucleotide
  Antisense strand to SEQ ID NO: 1309906
uuugucacugagcagcaac

SEQ ID NO: 1309908 - RNA, 19 nt, Artificial Sequence
  Description of Artificial Sequence: Synthetic oligonucleotide
  Sense strand starting at position 3309 of SEQ ID NO: 1241919
acgaacauuccaugucaaa

SEQ ID NO: 1309909 - RNA, 19 nt, Artificial Sequence
  Description of Artificial Sequence: Synthetic oligonucleotide
  Antisense strand to SEQ ID NO: 1309908
uuugacauggaauguucgu

SEQ ID NO: 1309910 - RNA, 19 nt, Artificial Sequence
  Description of Artificial Sequence: Synthetic oligonucleotide
  Sense strand starting at position 3451 of SEQ ID NO: 1241919
gguauuuccuauggagaag

SEQ ID NO: 1309911 - RNA, 19 nt, Artificial Sequence
  Description of Artificial Sequence: Synthetic oligonucleotide
  Antisense strand to SEQ ID NO: 1309910
cuucuccauaggaaauacc

SEQ ID NO: 1309912 - RNA, 19 nt, Artificial Sequence
  Description of Artificial Sequence: Synthetic oligonucleotide
  Sense strand starting at position 3609 of SEQ ID NO: 1241919
ggaacuucuagauguggua

SEQ ID NO: 1309913 - RNA, 19 nt, Artificial Sequence
  Description of Artificial Sequence: Synthetic oligonucleotide
  Antisense strand to SEQ ID NO: 1309912
uaccacaucuagaaguucc

SEQ ID NO: 1309914 - RNA, 19 nt, Artificial Sequence
  Description of Artificial Sequence: Synthetic oligonucleotide
  Sense strand starting at position 3663 of SEQ ID NO: 1241919
ucuuguaacaucuggugua

SEQ ID NO: 1309915 - RNA, 19 nt, Artificial Sequence
  Description of Artificial Sequence: Synthetic oligonucleotide
  Antisense strand to SEQ ID NO: 1309914
uacaccagauguuacaaga

SEQ ID NO: 1309916 - RNA, 19 nt, Artificial Sequence
  Description of Artificial Sequence: Synthetic oligonucleotide
  Sense strand starting at position 3757 of SEQ ID NO: 1241919
uugcaugcggaaugaauau

SEQ ID NO: 1309917 - RNA, 19 nt, Artificial Sequence
  Description of Artificial Sequence: Synthetic oligonucleotide
  Antisense strand to SEQ ID NO: 1309916
auauucauuccgcaugcaa

SEQ ID NO: 1309918 - RNA, 19 nt, Artificial Sequence
  Description of Artificial Sequence: Synthetic oligonucleotide
  Sense strand starting at position 3835 of SEQ ID NO: 1241919
uguacaaagcuuuaauaug

SEQ ID NO: 1309919 - RNA, 19 nt, Artificial Sequence
  Description of Artificial Sequence: Synthetic oligonucleotide
  Antisense strand to SEQ ID NO: 1309918
cauauuaaagcuuuguaca

SEQ ID NO: 1309920 - RNA, 19 nt, Artificial Sequence
  Description of Artificial Sequence: Synthetic oligonucleotide
  Sense strand starting at position 3917 of SEQ ID NO: 1241919
cuccauguuucugccgaua

SEQ ID NO: 1309921 - RNA, 19 nt, Artificial Sequence
  Description of Artificial Sequence: Synthetic oligonucleotide
  Antisense strand to SEQ ID NO: 1309920
uaucggcagaaacauggag

SEQ ID NO: 1309922 - RNA, 19 nt, Artificial Sequence
  Description of Artificial Sequence: Synthetic oligonucleotide
  Sense strand starting at position 56 of SEQ ID NO: 1241920
uagugagaagagugagauu

SEQ ID NO: 1309923 - RNA, 19 nt, Artificial Sequence
  Description of Artificial Sequence: Synthetic oligonucleotide
  Antisense strand to SEQ ID NO: 1309922
aaucucacucuucucacua

SEQ ID NO: 1309924 - RNA, 19 nt, Artificial Sequence
  Description of Artificial Sequence: Synthetic oligonucleotide
  Sense strand starting at position 119 of SEQ ID NO: 1241920
aagauuagcuuuguaugua

SEQ ID NO: 1309925 - RNA, 19 nt, Artificial Sequence
  Description of Artificial Sequence: Synthetic oligonucleotide
  Antisense strand to SEQ ID NO: 1309924
uacauacaaagcuaaucuu

SEQ ID NO: 1309926 - RNA, 19 nt, Artificial Sequence
  Description of Artificial Sequence: Synthetic oligonucleotide
  Sense strand starting at position 212 of SEQ ID NO: 1241920
gugcauuagaaggacucua

SEQ ID NO: 1309927 - RNA, 19 nt, Artificial Sequence
  Description of Artificial Sequence: Synthetic oligonucleotide
  Antisense strand to SEQ ID NO: 1309926
uagaguccuucuaaugcac

SEQ ID NO: 1309928 - RNA, 19 nt, Artificial Sequence
  Description of Artificial Sequence: Synthetic oligonucleotide
  Sense strand starting at position 225 of SEQ ID NO: 1241920
acucuagauggugagguau

SEQ ID NO: 1309929 - RNA, 19 nt, Artificial Sequence
  Description of Artificial Sequence: Synthetic oligonucleotide
  Antisense strand to SEQ ID NO: 1309928
auaccucaccaucuagagu

SEQ ID NO: 1309930 - RNA, 19 nt, Artificial Sequence
  Description of Artificial Sequence: Synthetic oligonucleotide
  Sense strand starting at position 335 of SEQ ID NO: 1241920
ucucgaagugccuacauua

SEQ ID NO: 1309931 - RNA, 19 nt, Artificial Sequence
  Description of Artificial Sequence: Synthetic oligonucleotide
  Antisense strand to SEQ ID NO: 1309930
uaauguaggcacuucgaga

SEQ ID NO: 1309932 - RNA, 19 nt, Artificial Sequence
  Description of Artificial Sequence: Synthetic oligonucleotide
  Sense strand starting at position 409 of SEQ ID NO: 1241920
agcucucaguccuuaggaa

SEQ ID NO: 1309933 - RNA, 19 nt, Artificial Sequence
  Description of Artificial Sequence: Synthetic oligonucleotide
  Antisense strand to SEQ ID NO: 1309932
uuccuaaggacugagagcu

SEQ ID NO: 1309934 - RNA, 19 nt, Artificial Sequence
  Description of Artificial Sequence: Synthetic oligonucleotide
  Sense strand starting at position 410 of SEQ ID NO: 1241920
gcucucaguccuuaggaau

SEQ ID NO: 1309935 - RNA, 19 nt, Artificial Sequence
  Description of Artificial Sequence: Synthetic oligonucleotide
  Antisense strand to SEQ ID NO: 1309934
auuccuaaggacugagagc

SEQ ID NO: 1309936 - RNA, 19 nt, Artificial Sequence
  Description of Artificial Sequence: Synthetic oligonucleotide
  Sense strand starting at position 482 of SEQ ID NO: 1241920
aggauaguuggugacucuu

SEQ ID NO: 1309937 - RNA, 19 nt, Artificial Sequence
  Description of Artificial Sequence: Synthetic oligonucleotide
  Antisense strand to SEQ ID NO: 1309936
aagagucaccaacuauccu

SEQ ID NO: 1309938 - RNA, 19 nt, Artificial Sequence
  Description of Artificial Sequence: Synthetic oligonucleotide
  Sense strand starting at position 491 of SEQ ID NO: 1241920
ggugacucuuucccagcaa

SEQ ID NO: 1309939 - RNA, 19 nt, Artificial Sequence
  Description of Artificial Sequence: Synthetic oligonucleotide
  Antisense strand to SEQ ID NO: 1309938
uugcugggaaagagucacc

SEQ ID NO: 1309940 - RNA, 19 nt, Artificial Sequence
  Description of Artificial Sequence: Synthetic oligonucleotide
  Sense strand starting at position 546 of SEQ ID NO: 1241920
aggagauaagaguguuccu

SEQ ID NO: 1309941 - RNA, 19 nt, Artificial Sequence
  Description of Artificial Sequence: Synthetic oligonucleotide
  Antisense strand to SEQ ID NO: 1309940
aggaacacucuuaucuccu

SEQ ID NO: 1309942 - RNA, 19 nt, Artificial Sequence
  Description of Artificial Sequence: Synthetic oligonucleotide
  Sense strand starting at position 549 of SEQ ID NO: 1241920
agauaagaguguuccuucu

SEQ ID NO: 1309943 - RNA, 19 nt, Artificial Sequence
  Description of Artificial Sequence: Synthetic oligonucleotide
  Antisense strand to SEQ ID NO: 1309942
agaaggaacacucuuaucu

SEQ ID NO: 1309944 - RNA, 19 nt, Artificial Sequence
  Description of Artificial Sequence: Synthetic oligonucleotide
  Sense strand starting at position 551 of SEQ ID NO: 1241920
auaagaguguuccuucuca

SEQ ID NO: 1309945 - RNA, 19 nt, Artificial Sequence
  Description of Artificial Sequence: Synthetic oligonucleotide
  Antisense strand to SEQ ID NO: 1309944
ugagaaggaacacucuuau

SEQ ID NO: 1309946 - RNA, 19 nt, Artificial Sequence
  Description of Artificial Sequence: Synthetic oligonucleotide
  Sense strand starting at position 710 of SEQ ID NO: 1241920
cguguaucucucuagaaag

SEQ ID NO: 1309947 - RNA, 19 nt, Artificial Sequence
  Description of Artificial Sequence: Synthetic oligonucleotide
  Antisense strand to SEQ ID NO: 1309946
cuuucuagagagauacacg

SEQ ID NO: 1309948 - RNA, 19 nt, Artificial Sequence
  Description of Artificial Sequence: Synthetic oligonucleotide
  Sense strand starting at position 761 of SEQ ID NO: 1241920
ccugacucacccugagaau

SEQ ID NO: 1309949 - RNA, 19 nt, Artificial Sequence
  Description of Artificial Sequence: Synthetic oligonucleotide
  Antisense strand to SEQ ID NO: 1309948
auucucagggugagucagg

SEQ ID NO: 1309950 - RNA, 19 nt, Artificial Sequence
  Description of Artificial Sequence: Synthetic oligonucleotide
  Sense strand starting at position 895 of SEQ ID NO: 1241920
ggauuuagcugagagaaau

SEQ ID NO: 1309951 - RNA, 19 nt, Artificial Sequence
  Description of Artificial Sequence: Synthetic oligonucleotide
  Antisense strand to SEQ ID NO: 1309950
auuucucucagcuaaaucc

SEQ ID NO: 1309952 - RNA, 19 nt, Artificial Sequence
  Description of Artificial Sequence: Synthetic oligonucleotide
  Sense strand starting at position 960 of SEQ ID NO: 1241920
aggguucugaacugaaauc

SEQ ID NO: 1309953 - RNA, 19 nt, Artificial Sequence
  Description of Artificial Sequence: Synthetic oligonucleotide
  Antisense strand to SEQ ID NO: 1309952
gauuucaguucagaacccu

SEQ ID NO: 1309954 - RNA, 19 nt, Artificial Sequence
  Description of Artificial Sequence: Synthetic oligonucleotide
  Sense strand starting at position 985 of SEQ ID NO: 1241920
gguagagugcauugggauu

SEQ ID NO: 1309955 - RNA, 19 nt, Artificial Sequence
  Description of Artificial Sequence: Synthetic oligonucleotide
  Antisense strand to SEQ ID NO: 1309954
aaucccaaugcacucuacc

SEQ ID NO: 1309956 - RNA, 19 nt, Artificial Sequence
  Description of Artificial Sequence: Synthetic oligonucleotide
  Sense strand starting at position 1224 of SEQ ID NO: 1241920
ccaagauaugcaugugggu

SEQ ID NO: 1309957 - RNA, 19 nt, Artificial Sequence
  Description of Artificial Sequence: Synthetic oligonucleotide
  Antisense strand to SEQ ID NO: 1309956
acccacaugcauaucuugg

SEQ ID NO: 1309958 - RNA, 19 nt, Artificial Sequence
  Description of Artificial Sequence: Synthetic oligonucleotide
  Sense strand starting at position 1291 of SEQ ID NO: 1241920
gggcucaggguuugggaaa

SEQ ID NO: 1309959 - RNA, 19 nt, Artificial Sequence
  Description of Artificial Sequence: Synthetic oligonucleotide
  Antisense strand to SEQ ID NO: 1309958
uuucccaaacccugagccc

SEQ ID NO: 1309960 - RNA, 19 nt, Artificial Sequence
  Description of Artificial Sequence: Synthetic oligonucleotide
  Sense strand starting at position 1308 of SEQ ID NO: 1241920
aauugaggguauucgagau

SEQ ID NO: 1309961 - RNA, 19 nt, Artificial Sequence
  Description of Artificial Sequence: Synthetic oligonucleotide
  Antisense strand to SEQ ID NO: 1309960
aucucgaauacccucaauu

SEQ ID NO: 1309962 - RNA, 19 nt, Artificial Sequence
  Description of Artificial Sequence: Synthetic oligonucleotide
  Sense strand starting at position 1321 of SEQ ID NO: 1241920
cgagaucuagaagguggaa

SEQ ID NO: 1309963 - RNA, 19 nt, Artificial Sequence
  Description of Artificial Sequence: Synthetic oligonucleotide
  Antisense strand to SEQ ID NO: 1309962
uuccaccuucuagaucucg

SEQ ID NO: 1309964 - RNA, 19 nt, Artificial Sequence
  Description of Artificial Sequence: Synthetic oligonucleotide
  Sense strand starting at position 1550 of SEQ ID NO: 1241920
cugauauuggacugguguu

SEQ ID NO: 1309965 - RNA, 19 nt, Artificial Sequence
  Description of Artificial Sequence: Synthetic oligonucleotide
  Antisense strand to SEQ ID NO: 1309964
aacaccaguccaauaucag

SEQ ID NO: 1309966 - RNA, 19 nt, Artificial Sequence
  Description of Artificial Sequence: Synthetic oligonucleotide
  Sense strand starting at position 1615 of SEQ ID NO: 1241920
gccacacucuaaucggauu

SEQ ID NO: 1309967 - RNA, 19 nt, Artificial Sequence
  Description of Artificial Sequence: Synthetic oligonucleotide
  Antisense strand to SEQ ID NO: 1309966
aauccgauuagaguguggc

SEQ ID NO: 1309968 - RNA, 19 nt, Artificial Sequence
  Description of Artificial Sequence: Synthetic oligonucleotide
  Sense strand starting at position 2286 of SEQ ID NO: 1241920
ugauuugcauaaugaggaa

SEQ ID NO: 1309969 - RNA, 19 nt, Artificial Sequence
  Description of Artificial Sequence: Synthetic oligonucleotide
  Antisense strand to SEQ ID NO: 1309968
uuccucauuaugcaaauca

SEQ ID NO: 1309970 - RNA, 19 nt, Artificial Sequence
  Description of Artificial Sequence: Synthetic oligonucleotide
  Sense strand starting at position 2690 of SEQ ID NO: 1241920
ucugucuucggugucuuua

SEQ ID NO: 1309971 - RNA, 19 nt, Artificial Sequence
  Description of Artificial Sequence: Synthetic oligonucleotide
  Antisense strand to SEQ ID NO: 1309970
uaaagacaccgaagacaga

SEQ ID NO: 1309972 - RNA, 19 nt, Artificial Sequence
  Description of Artificial Sequence: Synthetic oligonucleotide
  Sense strand starting at position 2808 of SEQ ID NO: 1241920
acggauuccuccuuaggag

SEQ ID NO: 1309973 - RNA, 19 nt, Artificial Sequence
  Description of Artificial Sequence: Synthetic oligonucleotide
  Antisense strand to SEQ ID NO: 1309972
cuccuaaggaggaauccgu

SEQ ID NO: 1309974 - RNA, 19 nt, Artificial Sequence
  Description of Artificial Sequence: Synthetic oligonucleotide
  Sense strand starting at position 2830 of SEQ ID NO: 1241920
gagggaacuuagccguauu

SEQ ID NO: 1309975 - RNA, 19 nt, Artificial Sequence
  Description of Artificial Sequence: Synthetic oligonucleotide
  Antisense strand to SEQ ID NO: 1309974
aauacggcuaaguucccuc

SEQ ID NO: 1309976 - RNA, 19 nt, Artificial Sequence
  Description of Artificial Sequence: Synthetic oligonucleotide
  Sense strand starting at position 2893 of SEQ ID NO: 1241920
cugugaacucaggaguguu

SEQ ID NO: 1309977 - RNA, 19 nt, Artificial Sequence
  Description of Artificial Sequence: Synthetic oligonucleotide
  Antisense strand to SEQ ID NO: 1309976
aacacuccugaguucacag

SEQ ID NO: 1309978 - RNA, 19 nt, Artificial Sequence
  Description of Artificial Sequence: Synthetic oligonucleotide
  Sense strand starting at position 3015 of SEQ ID NO: 1241920
cgacauacugugcaucuaa

SEQ ID NO: 1309979 - RNA, 19 nt, Artificial Sequence
  Description of Artificial Sequence: Synthetic oligonucleotide
  Antisense strand to SEQ ID NO: 1309978
uuagaugcacaguaugucg

SEQ ID NO: 1309980 - RNA, 19 nt, Artificial Sequence
  Description of Artificial Sequence: Synthetic oligonucleotide
  Sense strand starting at position 3137 of SEQ ID NO: 1241920
cuacgcuuucuauaugacu

SEQ ID NO: 1309981 - RNA, 19 nt, Artificial Sequence
  Description of Artificial Sequence: Synthetic oligonucleotide
  Antisense strand to SEQ ID NO: 1309980
agucauauagaaagcguag

SEQ ID NO: 1309982 - RNA, 19 nt, Artificial Sequence
  Description of Artificial Sequence: Synthetic oligonucleotide
  Sense strand starting at position 3143 of SEQ ID NO: 1241920
uuucuauaugacugaaagu

SEQ ID NO: 1309983 - RNA, 19 nt, Artificial Sequence
  Description of Artificial Sequence: Synthetic oligonucleotide
  Antisense strand to SEQ ID NO: 1309982
acuuucagucauauagaaa

SEQ ID NO: 1309984 - RNA, 19 nt, Artificial Sequence
  Description of Artificial Sequence: Synthetic oligonucleotide
  Sense strand starting at position 3189 of SEQ ID NO: 1241920
uuauuacuccugcacaugu

SEQ ID NO: 1309985 - RNA, 19 nt, Artificial Sequence
  Description of Artificial Sequence: Synthetic oligonucleotide
  Antisense strand to SEQ ID NO: 1309984
acaugugcaggaguaauaa

SEQ ID NO: 1309986 - RNA, 19 nt, Artificial Sequence
  Description of Artificial Sequence: Synthetic oligonucleotide
  Sense strand starting at position 3197 of SEQ ID NO: 1241920
ccugcacaugucuagguau

SEQ ID NO: 1309987 - RNA, 19 nt, Artificial Sequence
  Description of Artificial Sequence: Synthetic oligonucleotide
  Antisense strand to SEQ ID NO: 1309986
auaccuagacaugugcagg

SEQ ID NO: 1309988 - RNA, 19 nt, Artificial Sequence
  Description of Artificial Sequence: Synthetic oligonucleotide
  Sense strand starting at position 3219 of SEQ ID NO: 1241920
cuugauggaucagugaugu

SEQ ID NO: 1309989 - RNA, 19 nt, Artificial Sequence
  Description of Artificial Sequence: Synthetic oligonucleotide
  Antisense strand to SEQ ID NO: 1309988
acaucacugauccaucaag

SEQ ID NO: 1309990 - RNA, 19 nt, Artificial Sequence
  Description of Artificial Sequence: Synthetic oligonucleotide
  Sense strand starting at position 3250 of SEQ ID NO: 1241920
guaauacaauguuuggaca

SEQ ID NO: 1309991 - RNA, 19 nt, Artificial Sequence
  Description of Artificial Sequence: Synthetic oligonucleotide
  Antisense strand to SEQ ID NO: 1309990
uguccaaacauuguauuac

SEQ ID NO: 1309992 - RNA, 19 nt, Artificial Sequence
  Description of Artificial Sequence: Synthetic oligonucleotide
  Sense strand starting at position 3372 of SEQ ID NO: 1241920
uuugauagguuaucauucu

SEQ ID NO: 1309993 - RNA, 19 nt, Artificial Sequence
  Description of Artificial Sequence: Synthetic oligonucleotide
  Antisense strand to SEQ ID NO: 1309992
agaaugauaaccuaucaaa

SEQ ID NO: 1309994 - RNA, 19 nt, Artificial Sequence
  Description of Artificial Sequence: Synthetic oligonucleotide
  Sense strand starting at position 3543 of SEQ ID NO: 1241920
uguagagauggugguuuca

SEQ ID NO: 1309995 - RNA, 19 nt, Artificial Sequence
  Description of Artificial Sequence: Synthetic oligonucleotide
  Antisense strand to SEQ ID NO: 1309994
ugaaaccaccaucucuaca

SEQ ID NO: 1309996 - RNA, 19 nt, Artificial Sequence
  Description of Artificial Sequence: Synthetic oligonucleotide
  Sense strand starting at position 3572 of SEQ ID NO: 1241920
caggcuugucuagaacacu

SEQ ID NO: 1309997 - RNA, 19 nt, Artificial Sequence
  Description of Artificial Sequence: Synthetic oligonucleotide
  Antisense strand to SEQ ID NO: 1309996
aguguucuagacaagccug

SEQ ID NO: 1309998 - RNA, 19 nt, Artificial Sequence
  Description of Artificial Sequence: Synthetic oligonucleotide
  Sense strand starting at position 3685 of SEQ ID NO: 1241920
acuuguguccauugacuau

SEQ ID NO: 1309999 - RNA, 19 nt, Artificial Sequence
  Description of Artificial Sequence: Synthetic oligonucleotide
  Antisense strand to SEQ ID NO: 1309998
auagucaauggacacaagu

SEQ ID NO: 1310000 - RNA, 19 nt, Artificial Sequence
  Description of Artificial Sequence: Synthetic oligonucleotide
  Sense strand starting at position 3689 of SEQ ID NO: 1241920
guguccauugacuauucua

SEQ ID NO: 1310001 - RNA, 19 nt, Artificial Sequence
  Description of Artificial Sequence: Synthetic oligonucleotide
  Antisense strand to SEQ ID NO: 1310000
uagaauagucaauggacac

SEQ ID NO: 1310002 - RNA, 19 nt, Artificial Sequence
  Description of Artificial Sequence: Synthetic oligonucleotide
  Sense strand starting at position 121 of SEQ ID NO: 1241921
cugaaaguuccauguggca

SEQ ID NO: 1310003 - RNA, 19 nt, Artificial Sequence
  Description of Artificial Sequence: Synthetic oligonucleotide
  Antisense strand to SEQ ID NO: 1310002
ugccacauggaacuuucag

SEQ ID NO: 1310004 - RNA, 19 nt, Artificial Sequence
  Description of Artificial Sequence: Synthetic oligonucleotide
  Sense strand starting at position 402 of SEQ ID NO: 1241921
gccugagguuggucagaca

SEQ ID NO: 1310005 - RNA, 19 nt, Artificial Sequence
  Description of Artificial Sequence: Synthetic oligonucleotide
  Antisense strand to SEQ ID NO: 1310004
ugucugaccaaccucaggc

SEQ ID NO: 1310006 - RNA, 19 nt, Artificial Sequence
  Description of Artificial Sequence: Synthetic oligonucleotide
  Sense strand starting at position 461 of SEQ ID NO: 1241921
cuuggaucggacgauucau

SEQ ID NO: 1310007 - RNA, 19 nt, Artificial Sequence
  Description of Artificial Sequence: Synthetic oligonucleotide
  Antisense strand to SEQ ID NO: 1310006
augaaucguccgauccaag

SEQ ID NO: 1310008 - RNA, 19 nt, Artificial Sequence
  Description of Artificial Sequence: Synthetic oligonucleotide
  Sense strand starting at position 800 of SEQ ID NO: 1241921
acuuaaaggcuuugcauga

SEQ ID NO: 1310009 - RNA, 19 nt, Artificial Sequence
  Description of Artificial Sequence: Synthetic oligonucleotide
  Antisense strand to SEQ ID NO: 1310008
ucaugcaaagccuuuaagu

SEQ ID NO: 1310010 - RNA, 19 nt, Artificial Sequence
  Description of Artificial Sequence: Synthetic oligonucleotide
  Sense strand starting at position 805 of SEQ ID NO: 1241921
aaggcuuugcaugagagga

SEQ ID NO: 1310011 - RNA, 19 nt, Artificial Sequence
  Description of Artificial Sequence: Synthetic oligonucleotide
  Antisense strand to SEQ ID NO: 1310010
uccucucaugcaaagccuu

SEQ ID NO: 1310012 - RNA, 19 nt, Artificial Sequence
  Description of Artificial Sequence: Synthetic oligonucleotide
  Sense strand starting at position 878 of SEQ ID NO: 1241921
agaauaucacgcuaugugu

SEQ ID NO: 1310013 - RNA, 19 nt, Artificial Sequence
  Description of Artificial Sequence: Synthetic oligonucleotide
  Antisense strand to SEQ ID NO: 1310012
acacauagcgugauauucu

SEQ ID NO: 1310014 - RNA, 19 nt, Artificial Sequence
  Description of Artificial Sequence: Synthetic oligonucleotide
  Sense strand starting at position 887 of SEQ ID NO: 1241921
cgcuaugugucauuuagau

SEQ ID NO: 1310015 - RNA, 19 nt, Artificial Sequence
  Description of Artificial Sequence: Synthetic oligonucleotide
  Antisense strand to SEQ ID NO: 1310014
aucuaaaugacacauagcg

SEQ ID NO: 1310016 - RNA, 19 nt, Artificial Sequence
  Description of Artificial Sequence: Synthetic oligonucleotide
  Sense strand starting at position 891 of SEQ ID NO: 1241921
augugucauuuagaugaga

SEQ ID NO: 1310017 - RNA, 19 nt, Artificial Sequence
  Description of Artificial Sequence: Synthetic oligonucleotide
  Antisense strand to SEQ ID NO: 1310016
ucucaucuaaaugacacau

SEQ ID NO: 1310018 - RNA, 19 nt, Artificial Sequence
  Description of Artificial Sequence: Synthetic oligonucleotide
  Sense strand starting at position 916 of SEQ ID NO: 1241921
gaaucagacucagugcuau

SEQ ID NO: 1310019 - RNA, 19 nt, Artificial Sequence
  Description of Artificial Sequence: Synthetic oligonucleotide
  Antisense strand to SEQ ID NO: 1310018
auagcacugagucugauuc

SEQ ID NO: 1310020 - RNA, 19 nt, Artificial Sequence
  Description of Artificial Sequence: Synthetic oligonucleotide
  Sense strand starting at position 953 of SEQ ID NO: 1241921
auuuaaugguuguaugacu

SEQ ID NO: 1310021 - RNA, 19 nt, Artificial Sequence
  Description of Artificial Sequence: Synthetic oligonucleotide
  Antisense strand to SEQ ID NO: 1310020
agucauacaaccauuaaau

SEQ ID NO: 1310022 - RNA, 19 nt, Artificial Sequence
  Description of Artificial Sequence: Synthetic oligonucleotide
  Sense strand starting at position 961 of SEQ ID NO: 1241921
guuguaugacuuuaaguaa

SEQ ID NO: 1310023 - RNA, 19 nt, Artificial Sequence
  Description of Artificial Sequence: Synthetic oligonucleotide
  Antisense strand to SEQ ID NO: 1310022
uuacuuaaagucauacaac

SEQ ID NO: 1310024 - RNA, 19 nt, Artificial Sequence
  Description of Artificial Sequence: Synthetic oligonucleotide
  Sense strand starting at position 1088 of SEQ ID NO: 1241921
cuccauguuggcuaaguua

SEQ ID NO: 1310025 - RNA, 19 nt, Artificial Sequence
  Description of Artificial Sequence: Synthetic oligonucleotide
  Antisense strand to SEQ ID NO: 1310024
uaacuuagccaacauggag

SEQ ID NO: 1310026 - RNA, 19 nt, Artificial Sequence
  Description of Artificial Sequence: Synthetic oligonucleotide
  Sense strand starting at position 1095 of SEQ ID NO: 1241921
uuggcuaaguuauucuuga

SEQ ID NO: 1310027 - RNA, 19 nt, Artificial Sequence
  Description of Artificial Sequence: Synthetic oligonucleotide
  Antisense strand to SEQ ID NO: 1310026
ucaagaauaacuuagccaa

SEQ ID NO: 1310028 - RNA, 19 nt, Artificial Sequence
  Description of Artificial Sequence: Synthetic oligonucleotide
  Sense strand starting at position 1096 of SEQ ID NO: 1241921
uggcuaaguuauucuugaa

SEQ ID NO: 1310029 - RNA, 19 nt, Artificial Sequence
  Description of Artificial Sequence: Synthetic oligonucleotide
  Antisense strand to SEQ ID NO: 1310028
uucaagaauaacuuagcca

SEQ ID NO: 1310030 - RNA, 19 nt, Artificial Sequence
  Description of Artificial Sequence: Synthetic oligonucleotide
  Sense strand starting at position 1357 of SEQ ID NO: 1241921
uggauagucucauccacac

SEQ ID NO: 1310031 - RNA, 19 nt, Artificial Sequence
  Description of Artificial Sequence: Synthetic oligonucleotide
  Antisense strand to SEQ ID NO: 1310030
guguggaugagacuaucca

SEQ ID NO: 1310032 - RNA, 19 nt, Artificial Sequence
  Description of Artificial Sequence: Synthetic oligonucleotide
  Sense strand starting at position 1582 of SEQ ID NO: 1241921
aagcuauaagccuggaaag

SEQ ID NO: 1310033 - RNA, 19 nt, Artificial Sequence
  Description of Artificial Sequence: Synthetic oligonucleotide
  Antisense strand to SEQ ID NO: 1310032
cuuuccaggcuuauagcuu

SEQ ID NO: 1310034 - RNA, 19 nt, Artificial Sequence
  Description of Artificial Sequence: Synthetic oligonucleotide
  Sense strand starting at position 1584 of SEQ ID NO: 1241921
gcuauaagccuggaaagca

SEQ ID NO: 1310035 - RNA, 19 nt, Artificial Sequence
  Description of Artificial Sequence: Synthetic oligonucleotide
  Antisense strand to SEQ ID NO: 1310034
ugcuuuccaggcuuauagc

SEQ ID NO: 1310036 - RNA, 19 nt, Artificial Sequence
  Description of Artificial Sequence: Synthetic oligonucleotide
  Sense strand starting at position 2001 of SEQ ID NO: 1241921
gcccaucuggccugagaag

SEQ ID NO: 1310037 - RNA, 19 nt, Artificial Sequence
  Description of Artificial Sequence: Synthetic oligonucleotide
  Antisense strand to SEQ ID NO: 1310036
cuucucaggccagaugggc

SEQ ID NO: 1310038 - RNA, 19 nt, Artificial Sequence
  Description of Artificial Sequence: Synthetic oligonucleotide
  Sense strand starting at position 2143 of SEQ ID NO: 1241921
agugcuacccaguaaccau

SEQ ID NO: 1310039 - RNA, 19 nt, Artificial Sequence
  Description of Artificial Sequence: Synthetic oligonucleotide
  Antisense strand to SEQ ID NO: 1310038
augguuacuggguagcacu

SEQ ID NO: 1310040 - RNA, 19 nt, Artificial Sequence
  Description of Artificial Sequence: Synthetic oligonucleotide
  Sense strand starting at position 2174 of SEQ ID NO: 1241921
gcagucacaguugagcaau

SEQ ID NO: 1310041 - RNA, 19 nt, Artificial Sequence
  Description of Artificial Sequence: Synthetic oligonucleotide
  Antisense strand to SEQ ID NO: 1310040
auugcucaacugugacugc

SEQ ID NO: 1310042 - RNA, 19 nt, Artificial Sequence
  Description of Artificial Sequence: Synthetic oligonucleotide
  Sense strand starting at position 2510 of SEQ ID NO: 1241921
cugugauuguggaggaaag

SEQ ID NO: 1310043 - RNA, 19 nt, Artificial Sequence
  Description of Artificial Sequence: Synthetic oligonucleotide
  Antisense strand to SEQ ID NO: 1310042
cuuuccuccacaaucacag

SEQ ID NO: 1310044 - RNA, 19 nt, Artificial Sequence
  Description of Artificial Sequence: Synthetic oligonucleotide
  Sense strand starting at position 2511 of SEQ ID NO: 1241921
ugugauuguggaggaaaga

SEQ ID NO: 1310045 - RNA, 19 nt, Artificial Sequence
  Description of Artificial Sequence: Synthetic oligonucleotide
  Antisense strand to SEQ ID NO: 1310044
ucuuuccuccacaaucaca

SEQ ID NO: 1310046 - RNA, 19 nt, Artificial Sequence
  Description of Artificial Sequence: Synthetic oligonucleotide
  Sense strand starting at position 2589 of SEQ ID NO: 1241921
cagaaaugaugugagagaa

SEQ ID NO: 1310047 - RNA, 19 nt, Artificial Sequence
  Description of Artificial Sequence: Synthetic oligonucleotide
  Antisense strand to SEQ ID NO: 1310046
uucucucacaucauuucug

SEQ ID NO: 1310048 - RNA, 19 nt, Artificial Sequence
  Description of Artificial Sequence: Synthetic oligonucleotide
  Sense strand starting at position 2605 of SEQ ID NO: 1241921
gaaagacaguucuagaaag

SEQ ID NO: 1310049 - RNA, 19 nt, Artificial Sequence
  Description of Artificial Sequence: Synthetic oligonucleotide
  Antisense strand to SEQ ID NO: 1310048
cuuucuagaacugucuuuc

SEQ ID NO: 1310050 - RNA, 19 nt, Artificial Sequence
  Description of Artificial Sequence: Synthetic oligonucleotide
  Sense strand starting at position 2884 of SEQ ID NO: 1241921
cuggguuuccugggagaug

SEQ ID NO: 1310051 - RNA, 19 nt, Artificial Sequence
  Description of Artificial Sequence: Synthetic oligonucleotide
  Antisense strand to SEQ ID NO: 1310050
caucucccaggaaacccag

SEQ ID NO: 1310052 - RNA, 19 nt, Artificial Sequence
  Description of Artificial Sequence: Synthetic oligonucleotide
  Sense strand starting at position 3069 of SEQ ID NO: 1241921
gccuuucgugggagacagu

SEQ ID NO: 1310053 - RNA, 19 nt, Artificial Sequence
  Description of Artificial Sequence: Synthetic oligonucleotide
  Antisense strand to SEQ ID NO: 1310052
acugucucccacgaaaggc

SEQ ID NO: 1310054 - RNA, 19 nt, Artificial Sequence
  Description of Artificial Sequence: Synthetic oligonucleotide
  Sense strand starting at position 3075 of SEQ ID NO: 1241921
cgugggagacagugaugau

SEQ ID NO: 1310055 - RNA, 19 nt, Artificial Sequence
  Description of Artificial Sequence: Synthetic oligonucleotide
  Antisense strand to SEQ ID NO: 1310054
aucaucacugucucccacg

SEQ ID NO: 1310056 - RNA, 19 nt, Artificial Sequence
  Description of Artificial Sequence: Synthetic oligonucleotide
  Sense strand starting at position 3282 of SEQ ID NO: 1241921
ugaaaucacuugucuaaga

SEQ ID NO: 1310057 - RNA, 19 nt, Artificial Sequence
  Description of Artificial Sequence: Synthetic oligonucleotide
  Antisense strand to SEQ ID NO: 1310056
ucuuagacaagugauuuca

SEQ ID NO: 1310058 - RNA, 19 nt, Artificial Sequence
  Description of Artificial Sequence: Synthetic oligonucleotide
  Sense strand starting at position 3337 of SEQ ID NO: 1241921
cccagaucugucugaggcu

SEQ ID NO: 1310059 - RNA, 19 nt, Artificial Sequence
  Description of Artificial Sequence: Synthetic oligonucleotide
  Antisense strand to SEQ ID NO: 1310058
agccucagacagaucuggg

SEQ ID NO: 1310060 - RNA, 19 nt, Artificial Sequence
  Description of Artificial Sequence: Synthetic oligonucleotide
  Sense strand starting at position 3350 of SEQ ID NO: 1241921
gaggcugaagcccaugauu

SEQ ID NO: 1310061 - RNA, 19 nt, Artificial Sequence
  Description of Artificial Sequence: Synthetic oligonucleotide
  Antisense strand to SEQ ID NO: 1310060
aaucaugggcuucagccuc

SEQ ID NO: 1310062 - RNA, 19 nt, Artificial Sequence
  Description of Artificial Sequence: Synthetic oligonucleotide
  Sense strand starting at position 3457 of SEQ ID NO: 1241921
ggucaagagcuguggaaga

SEQ ID NO: 1310063 - RNA, 19 nt, Artificial Sequence
  Description of Artificial Sequence: Synthetic oligonucleotide
  Antisense strand to SEQ ID NO: 1310062
ucuuccacagcucuugacc

SEQ ID NO: 1310064 - RNA, 19 nt, Artificial Sequence
  Description of Artificial Sequence: Synthetic oligonucleotide
  Sense strand starting at position 3555 of SEQ ID NO: 1241921
ggucauuggccauguagag

SEQ ID NO: 1310065 - RNA, 19 nt, Artificial Sequence
  Description of Artificial Sequence: Synthetic oligonucleotide
  Antisense strand to SEQ ID NO: 1310064
cucuacauggccaaugacc

SEQ ID NO: 1310066 - RNA, 19 nt, Artificial Sequence
  Description of Artificial Sequence: Synthetic oligonucleotide
  Sense strand starting at position 3676 of SEQ ID NO: 1241921
ggagcaaaguuucuaguga

SEQ ID NO: 1310067 - RNA, 19 nt, Artificial Sequence
  Description of Artificial Sequence: Synthetic oligonucleotide
  Antisense strand to SEQ ID NO: 1310066
ucacuagaaacuuugcucc

SEQ ID NO: 1310068 - RNA, 19 nt, Artificial Sequence
  Description of Artificial Sequence: Synthetic oligonucleotide
  Sense strand starting at position 3730 of SEQ ID NO: 1241921
ugcuuccuagcagauagau

SEQ ID NO: 1310069 - RNA, 19 nt, Artificial Sequence
  Description of Artificial Sequence: Synthetic oligonucleotide
  Antisense strand to SEQ ID NO: 1310068
aucuaucugcuaggaagca

SEQ ID NO: 1310070 - RNA, 19 nt, Artificial Sequence
  Description of Artificial Sequence: Synthetic oligonucleotide
  Sense strand starting at position 3736 of SEQ ID NO: 1241921
cuagcagauagauguggau

SEQ ID NO: 1310071 - RNA, 19 nt, Artificial Sequence
  Description of Artificial Sequence: Synthetic oligonucleotide
  Antisense strand to SEQ ID NO: 1310070
auccacaucuaucugcuag

SEQ ID NO: 1310072 - RNA, 19 nt, Artificial Sequence
  Description of Artificial Sequence: Synthetic oligonucleotide
  Sense strand starting at position 3788 of SEQ ID NO: 1241921
gucucugagccucaauauc

SEQ ID NO: 1310073 - RNA, 19 nt, Artificial Sequence
  Description of Artificial Sequence: Synthetic oligonucleotide
  Antisense strand to SEQ ID NO: 1310072
gauauugaggcucagagac

SEQ ID NO: 1310074 - RNA, 19 nt, Artificial Sequence
  Description of Artificial Sequence: Synthetic oligonucleotide
  Sense strand starting at position 3835 of SEQ ID NO: 1241921
uaacuugcagcguugugau

SEQ ID NO: 1310075 - RNA, 19 nt, Artificial Sequence
  Description of Artificial Sequence: Synthetic oligonucleotide
  Antisense strand to SEQ ID NO: 1310074
aucacaacgcugcaaguua

SEQ ID NO: 1310076 - RNA, 19 nt, Artificial Sequence
  Description of Artificial Sequence: Synthetic oligonucleotide
  Sense strand starting at position 3859 of SEQ ID NO: 1241921
ugacaacugcuagaucuua

SEQ ID NO: 1310077 - RNA, 19 nt, Artificial Sequence
  Description of Artificial Sequence: Synthetic oligonucleotide
  Antisense strand to SEQ ID NO: 1310076
uaagaucuagcaguuguca

SEQ ID NO: 1310078 - RNA, 19 nt, Artificial Sequence
  Description of Artificial Sequence: Synthetic oligonucleotide
  Sense strand starting at position 3874 of SEQ ID NO: 1241921
cuuaguagauaccucagau

SEQ ID NO: 1310079 - RNA, 19 nt, Artificial Sequence
  Description of Artificial Sequence: Synthetic oligonucleotide
  Antisense strand to SEQ ID NO: 1310078
aucugagguaucuacuaag

SEQ ID NO: 1310080 - RNA, 19 nt, Artificial Sequence
  Description of Artificial Sequence: Synthetic oligonucleotide
  Sense strand starting at position 3974 of SEQ ID NO: 1241921
cguaaucucgccucaccga

SEQ ID NO: 1310081 - RNA, 19 nt, Artificial Sequence
  Description of Artificial Sequence: Synthetic oligonucleotide
  Antisense strand to SEQ ID NO: 1310080
ucggugaggcgagauuacg

SEQ ID NO: 1310082 - RNA, 19 nt, Artificial Sequence
  Description of Artificial Sequence: Synthetic oligonucleotide
  Sense strand starting at position 97 of SEQ ID NO: 1241922
ucucgaagugccuacauua

SEQ ID NO: 1310083 - RNA, 19 nt, Artificial Sequence
  Description of Artificial Sequence: Synthetic oligonucleotide
  Antisense strand to SEQ ID NO: 1310082
uaauguaggcacuucgaga

SEQ ID NO: 1310084 - RNA, 19 nt, Artificial Sequence
  Description of Artificial Sequence: Synthetic oligonucleotide
  Sense strand starting at position 171 of SEQ ID NO: 1241922
agcucucaguccuuaggaa

SEQ ID NO: 1310085 - RNA, 19 nt, Artificial Sequence
  Description of Artificial Sequence: Synthetic oligonucleotide
  Antisense strand to SEQ ID NO: 1310084
uuccuaaggacugagagcu

SEQ ID NO: 1310086 - RNA, 19 nt, Artificial Sequence
  Description of Artificial Sequence: Synthetic oligonucleotide
  Sense strand starting at position 172 of SEQ ID NO: 1241922
gcucucaguccuuaggaau

SEQ ID NO: 1310087 - RNA, 19 nt, Artificial Sequence
  Description of Artificial Sequence: Synthetic oligonucleotide
  Antisense strand to SEQ ID NO: 1310086
auuccuaaggacugagagc

SEQ ID NO: 1310088 - RNA, 19 nt, Artificial Sequence
  Description of Artificial Sequence: Synthetic oligonucleotide
  Sense strand starting at position 244 of SEQ ID NO: 1241922
aggauaguuggugacucuu

SEQ ID NO: 1310089 - RNA, 19 nt, Artificial Sequence
  Description of Artificial Sequence: Synthetic oligonucleotide
  Antisense strand to SEQ ID NO: 1310088
aagagucaccaacuauccu

SEQ ID NO: 1310090 - RNA, 19 nt, Artificial Sequence
  Description of Artificial Sequence: Synthetic oligonucleotide
  Sense strand starting at position 253 of SEQ ID NO: 1241922
ggugacucuuucccagcaa

SEQ ID NO: 1310091 - RNA, 19 nt, Artificial Sequence
  Description of Artificial Sequence: Synthetic oligonucleotide
  Antisense strand to SEQ ID NO: 1310090
uugcugggaaagagucacc

SEQ ID NO: 1310092 - RNA, 19 nt, Artificial Sequence
  Description of Artificial Sequence: Synthetic oligonucleotide
  Sense strand starting at position 308 of SEQ ID NO: 1241922
aggagauaagaguguuccu

SEQ ID NO: 1310093 - RNA, 19 nt, Artificial Sequence
  Description of Artificial Sequence: Synthetic oligonucleotide
  Antisense strand to SEQ ID NO: 1310092
aggaacacucuuaucuccu

SEQ ID NO: 1310094 - RNA, 19 nt, Artificial Sequence
  Description of Artificial Sequence: Synthetic oligonucleotide
  Sense strand starting at position 311 of SEQ ID NO: 1241922
agauaagaguguuccuucu

SEQ ID NO: 1310095 - RNA, 19 nt, Artificial Sequence
  Description of Artificial Sequence: Synthetic oligonucleotide
  Antisense strand to SEQ ID NO: 1310094
agaaggaacacucuuaucu

SEQ ID NO: 1310096 - RNA, 19 nt, Artificial Sequence
  Description of Artificial Sequence: Synthetic oligonucleotide
  Sense strand starting at position 313 of SEQ ID NO: 1241922
auaagaguguuccuucuca

SEQ ID NO: 1310097 - RNA, 19 nt, Artificial Sequence
  Description of Artificial Sequence: Synthetic oligonucleotide
  Antisense strand to SEQ ID NO: 1310096
ugagaaggaacacucuuau

SEQ ID NO: 1310098 - RNA, 19 nt, Artificial Sequence
  Description of Artificial Sequence: Synthetic oligonucleotide
  Sense strand starting at position 471 of SEQ ID NO: 1241922
ccguguaucucucuagaaa

SEQ ID NO: 1310099 - RNA, 19 nt, Artificial Sequence
  Description of Artificial Sequence: Synthetic oligonucleotide
  Antisense strand to SEQ ID NO: 1310098
uuucuagagagauacacgg

SEQ ID NO: 1310100 - RNA, 19 nt, Artificial Sequence
  Description of Artificial Sequence: Synthetic oligonucleotide
  Sense strand starting at position 472 of SEQ ID NO: 1241922
cguguaucucucuagaaag

SEQ ID NO: 1310101 - RNA, 19 nt, Artificial Sequence
  Description of Artificial Sequence: Synthetic oligonucleotide
  Antisense strand to SEQ ID NO: 1310100
cuuucuagagagauacacg

SEQ ID NO: 1310102 - RNA, 19 nt, Artificial Sequence
  Description of Artificial Sequence: Synthetic oligonucleotide
  Sense strand starting at position 523 of SEQ ID NO: 1241922
ccugacucacccugagaau

SEQ ID NO: 1310103 - RNA, 19 nt, Artificial Sequence
  Description of Artificial Sequence: Synthetic oligonucleotide
  Antisense strand to SEQ ID NO: 1310102
auucucagggugagucagg

SEQ ID NO: 1310104 - RNA, 19 nt, Artificial Sequence
  Description of Artificial Sequence: Synthetic oligonucleotide
  Sense strand starting at position 657 of SEQ ID NO: 1241922
ggauuuagcugagagaaau

SEQ ID NO: 1310105 - RNA, 19 nt, Artificial Sequence
  Description of Artificial Sequence: Synthetic oligonucleotide
  Antisense strand to SEQ ID NO: 1310104
auuucucucagcuaaaucc

SEQ ID NO: 1310106 - RNA, 19 nt, Artificial Sequence
  Description of Artificial Sequence: Synthetic oligonucleotide
  Sense strand starting at position 722 of SEQ ID NO: 1241922
aggguucugaacugaaauc

SEQ ID NO: 1310107 - RNA, 19 nt, Artificial Sequence
  Description of Artificial Sequence: Synthetic oligonucleotide
  Antisense strand to SEQ ID NO: 1310106
gauuucaguucagaacccu

SEQ ID NO: 1310108 - RNA, 19 nt, Artificial Sequence
  Description of Artificial Sequence: Synthetic oligonucleotide
  Sense strand starting at position 747 of SEQ ID NO: 1241922
gguagagugcauugggauu

SEQ ID NO: 1310109 - RNA, 19 nt, Artificial Sequence
  Description of Artificial Sequence: Synthetic oligonucleotide
  Antisense strand to SEQ ID NO: 1310108
aaucccaaugcacucuacc

SEQ ID NO: 1310110 - RNA, 19 nt, Artificial Sequence
  Description of Artificial Sequence: Synthetic oligonucleotide
  Sense strand starting at position 986 of SEQ ID NO: 1241922
ccaagauaugcaugugggu

SEQ ID NO: 1310111 - RNA, 19 nt, Artificial Sequence
  Description of Artificial Sequence: Synthetic oligonucleotide
  Antisense strand to SEQ ID NO: 1310110
acccacaugcauaucuugg

SEQ ID NO: 1310112 - RNA, 19 nt, Artificial Sequence
  Description of Artificial Sequence: Synthetic oligonucleotide
  Sense strand starting at position 1053 of SEQ ID NO: 1241922
gggcucaggguuugggaaa

SEQ ID NO: 1310113 - RNA, 19 nt, Artificial Sequence
  Description of Artificial Sequence: Synthetic oligonucleotide
  Antisense strand to SEQ ID NO: 1310112
uuucccaaacccugagccc

SEQ ID NO: 1310114 - RNA, 19 nt, Artificial Sequence
  Description of Artificial Sequence: Synthetic oligonucleotide
  Sense strand starting at position 1070 of SEQ ID NO: 1241922
aauugaggguauucgagau

SEQ ID NO: 1310115 - RNA, 19 nt, Artificial Sequence
  Description of Artificial Sequence: Synthetic oligonucleotide
  Antisense strand to SEQ ID NO: 1310114
aucucgaauacccucaauu

SEQ ID NO: 1310116 - RNA, 19 nt, Artificial Sequence
  Description of Artificial Sequence: Synthetic oligonucleotide
  Sense strand starting at position 1083 of SEQ ID NO: 1241922
cgagaucuagaagguggaa

SEQ ID NO: 1310117 - RNA, 19 nt, Artificial Sequence
  Description of Artificial Sequence: Synthetic oligonucleotide
  Antisense strand to SEQ ID NO: 1310116
uuccaccuucuagaucucg

SEQ ID NO: 1310118 - RNA, 19 nt, Artificial Sequence
  Description of Artificial Sequence: Synthetic oligonucleotide
  Sense strand starting at position 1312 of SEQ ID NO: 1241922
cugauauuggacugguguu

SEQ ID NO: 1310119 - RNA, 19 nt, Artificial Sequence
  Description of Artificial Sequence: Synthetic oligonucleotide
  Antisense strand to SEQ ID NO: 1310118
aacaccaguccaauaucag

SEQ ID NO: 1310120 - RNA, 19 nt, Artificial Sequence
  Description of Artificial Sequence: Synthetic oligonucleotide
  Sense strand starting at position 1377 of SEQ ID NO: 1241922
gccacacucuaaucggauu

SEQ ID NO: 1310121 - RNA, 19 nt, Artificial Sequence
  Description of Artificial Sequence: Synthetic oligonucleotide
  Antisense strand to SEQ ID NO: 1310120
aauccgauuagaguguggc

SEQ ID NO: 1310122 - RNA, 19 nt, Artificial Sequence
  Description of Artificial Sequence: Synthetic oligonucleotide
  Sense strand starting at position 2043 of SEQ ID NO: 1241922
gcaaaugauuugcauaaug

SEQ ID NO: 1310123 - RNA, 19 nt, Artificial Sequence
  Description of Artificial Sequence: Synthetic oligonucleotide
  Antisense strand to SEQ ID NO: 1310122
cauuaugcaaaucauuugc

SEQ ID NO: 1310124 - RNA, 19 nt, Artificial Sequence
  Description of Artificial Sequence: Synthetic oligonucleotide
  Sense strand starting at position 2048 of SEQ ID NO: 1241922
ugauuugcauaaugaggaa

SEQ ID NO: 1310125 - RNA, 19 nt, Artificial Sequence
  Description of Artificial Sequence: Synthetic oligonucleotide
  Antisense strand to SEQ ID NO: 1310124
uuccucauuaugcaaauca

SEQ ID NO: 1310126 - RNA, 19 nt, Artificial Sequence
  Description of Artificial Sequence: Synthetic oligonucleotide
  Sense strand starting at position 2452 of SEQ ID NO: 1241922
ucugucuucggugucuuua

SEQ ID NO: 1310127 - RNA, 19 nt, Artificial Sequence
  Description of Artificial Sequence: Synthetic oligonucleotide
  Antisense strand to SEQ ID NO: 1310126
uaaagacaccgaagacaga

SEQ ID NO: 1310128 - RNA, 19 nt, Artificial Sequence
  Description of Artificial Sequence: Synthetic oligonucleotide
  Sense strand starting at position 2570 of SEQ ID NO: 1241922
acggauuccuccuuaggag

SEQ ID NO: 1310129 - RNA, 19 nt, Artificial Sequence
  Description of Artificial Sequence: Synthetic oligonucleotide
  Antisense strand to SEQ ID NO: 1310128
cuccuaaggaggaauccgu

SEQ ID NO: 1310130 - RNA, 19 nt, Artificial Sequence
  Description of Artificial Sequence: Synthetic oligonucleotide
  Sense strand starting at position 2592 of SEQ ID NO: 1241922
gagggaacuuagccguauu

SEQ ID NO: 1310131 - RNA, 19 nt, Artificial Sequence
  Description of Artificial Sequence: Synthetic oligonucleotide
  Antisense strand to SEQ ID NO: 1310130
aauacggcuaaguucccuc

SEQ ID NO: 1310132 - RNA, 19 nt, Artificial Sequence
  Description of Artificial Sequence: Synthetic oligonucleotide
  Sense strand starting at position 2646 of SEQ ID NO: 1241922
aucccaguucugugaacuc

SEQ ID NO: 1310133 - RNA, 19 nt, Artificial Sequence
  Description of Artificial Sequence: Synthetic oligonucleotide
  Antisense strand to SEQ ID NO: 1310132
gaguucacagaacugggau

SEQ ID NO: 1310134 - RNA, 19 nt, Artificial Sequence
  Description of Artificial Sequence: Synthetic oligonucleotide
  Sense strand starting at position 2655 of SEQ ID NO: 1241922
cugugaacucaggaguguu

SEQ ID NO: 1310135 - RNA, 19 nt, Artificial Sequence
  Description of Artificial Sequence: Synthetic oligonucleotide
  Antisense strand to SEQ ID NO: 1310134
aacacuccugaguucacag

SEQ ID NO: 1310136 - RNA, 19 nt, Artificial Sequence
  Description of Artificial Sequence: Synthetic oligonucleotide
  Sense strand starting at position 2777 of SEQ ID NO: 1241922
cgacauacugugcaucuaa

SEQ ID NO: 1310137 - RNA, 19 nt, Artificial Sequence
  Description of Artificial Sequence: Synthetic oligonucleotide
  Antisense strand to SEQ ID NO: 1310136
uuagaugcacaguaugucg

SEQ ID NO: 1310138 - RNA, 19 nt, Artificial Sequence
  Description of Artificial Sequence: Synthetic oligonucleotide
  Sense strand starting at position 2899 of SEQ ID NO: 1241922
cuacgcuuucuauaugacu

SEQ ID NO: 1310139 - RNA, 19 nt, Artificial Sequence
  Description of Artificial Sequence: Synthetic oligonucleotide
  Antisense strand to SEQ ID NO: 1310138
agucauauagaaagcguag

SEQ ID NO: 1310140 - RNA, 19 nt, Artificial Sequence
  Description of Artificial Sequence: Synthetic oligonucleotide
  Sense strand starting at position 2905 of SEQ ID NO: 1241922
uuucuauaugacugaaagu

SEQ ID NO: 1310141 - RNA, 19 nt, Artificial Sequence
  Description of Artificial Sequence: Synthetic oligonucleotide
  Antisense strand to SEQ ID NO: 1310140
acuuucagucauauagaaa

SEQ ID NO: 1310142 - RNA, 19 nt, Artificial Sequence
  Description of Artificial Sequence: Synthetic oligonucleotide
  Sense strand starting at position 2951 of SEQ ID NO: 1241922
uuauuacuccugcacaugu

SEQ ID NO: 1310143 - RNA, 19 nt, Artificial Sequence
  Description of Artificial Sequence: Synthetic oligonucleotide
  Antisense strand to SEQ ID NO: 1310142
acaugugcaggaguaauaa

SEQ ID NO: 1310144 - RNA, 19 nt, Artificial Sequence
  Description of Artificial Sequence: Synthetic oligonucleotide
  Sense strand starting at position 2959 of SEQ ID NO: 1241922
ccugcacaugucuagguau

SEQ ID NO: 1310145 - RNA, 19 nt, Artificial Sequence
  Description of Artificial Sequence: Synthetic oligonucleotide
  Antisense strand to SEQ ID NO: 1310144
auaccuagacaugugcagg

SEQ ID NO: 1310146 - RNA, 19 nt, Artificial Sequence
  Description of Artificial Sequence: Synthetic oligonucleotide
  Sense strand starting at position 2981 of SEQ ID NO: 1241922
cuugauggaucagugaugu

SEQ ID NO: 1310147 - RNA, 19 nt, Artificial Sequence
  Description of Artificial Sequence: Synthetic oligonucleotide
  Antisense strand to SEQ ID NO: 1310146
acaucacugauccaucaag

SEQ ID NO: 1310148 - RNA, 19 nt, Artificial Sequence
  Description of Artificial Sequence: Synthetic oligonucleotide
  Sense strand starting at position 2989 of SEQ ID NO: 1241922
aucagugauguuugcacaa

SEQ ID NO: 1310149 - RNA, 19 nt, Artificial Sequence
  Description of Artificial Sequence: Synthetic oligonucleotide
  Antisense strand to SEQ ID NO: 1310148
uugugcaaacaucacugau

SEQ ID NO: 1310150 - RNA, 19 nt, Artificial Sequence
  Description of Artificial Sequence: Synthetic oligonucleotide
  Sense strand starting at position 3012 of SEQ ID NO: 1241922
guaauacaauguuuggaca

SEQ ID NO: 1310151 - RNA, 19 nt, Artificial Sequence
  Description of Artificial Sequence: Synthetic oligonucleotide
  Antisense strand to SEQ ID NO: 1310150
uguccaaacauuguauuac

SEQ ID NO: 1310152 - RNA, 19 nt, Artificial Sequence
  Description of Artificial Sequence: Synthetic oligonucleotide
  Sense strand starting at position 3134 of SEQ ID NO: 1241922
uuugauagguuaucauucu

SEQ ID NO: 1310153 - RNA, 19 nt, Artificial Sequence
  Description of Artificial Sequence: Synthetic oligonucleotide
  Antisense strand to SEQ ID NO: 1310152
agaaugauaaccuaucaaa

SEQ ID NO: 1310154 - RNA, 19 nt, Artificial Sequence
  Description of Artificial Sequence: Synthetic oligonucleotide
  Sense strand starting at position 3305 of SEQ ID NO: 1241922
uguagagauggugguuuca

SEQ ID NO: 1310155 - RNA, 19 nt, Artificial Sequence
  Description of Artificial Sequence: Synthetic oligonucleotide
  Antisense strand to SEQ ID NO: 1310154
ugaaaccaccaucucuaca

SEQ ID NO: 1310156 - RNA, 19 nt, Artificial Sequence
  Description of Artificial Sequence: Synthetic oligonucleotide
  Sense strand starting at position 3334 of SEQ ID NO: 1241922
caggcuugucuagaacacu

SEQ ID NO: 1310157 - RNA, 19 nt, Artificial Sequence
  Description of Artificial Sequence: Synthetic oligonucleotide
  Antisense strand to SEQ ID NO: 1310156
aguguucuagacaagccug

SEQ ID NO: 1310158 - RNA, 19 nt, Artificial Sequence
  Description of Artificial Sequence: Synthetic oligonucleotide
  Sense strand starting at position 3447 of SEQ ID NO: 1241922
acuuguguccauugacuau

SEQ ID NO: 1310159 - RNA, 19 nt, Artificial Sequence
  Description of Artificial Sequence: Synthetic oligonucleotide
  Antisense strand to SEQ ID NO: 1310158
auagucaauggacacaagu

SEQ ID NO: 1310160 - RNA, 19 nt, Artificial Sequence
  Description of Artificial Sequence: Synthetic oligonucleotide
  Sense strand starting at position 3451 of SEQ ID NO: 1241922
guguccauugacuauucua

SEQ ID NO: 1310161 - RNA, 19 nt, Artificial Sequence
  Description of Artificial Sequence: Synthetic oligonucleotide
  Antisense strand to SEQ ID NO: 1310160
uagaauagucaauggacac

SEQ ID NO: 1310162 - RNA, 19 nt, Artificial Sequence
  Description of Artificial Sequence: Synthetic oligonucleotide
  Sense strand starting at position 161 of SEQ ID NO: 1241923
acuugugcccuacacagaa

SEQ ID NO: 1310163 - RNA, 19 nt, Artificial Sequence
  Description of Artificial Sequence: Synthetic oligonucleotide
  Antisense strand to SEQ ID NO: 1310162
uucuguguagggcacaagu

SEQ ID NO: 1310164 - RNA, 19 nt, Artificial Sequence
  Description of Artificial Sequence: Synthetic oligonucleotide
  Sense strand starting at position 187 of SEQ ID NO: 1241923
ugagcuggaucccuaauua

SEQ ID NO: 1310165 - RNA, 19 nt, Artificial Sequence
  Description of Artificial Sequence: Synthetic oligonucleotide
  Antisense strand to SEQ ID NO: 1310164
uaauuagggauccagcuca

SEQ ID NO: 1310166 - RNA, 19 nt, Artificial Sequence
  Description of Artificial Sequence: Synthetic oligonucleotide
  Sense strand starting at position 259 of SEQ ID NO: 1241923
gggccauacuuuccuaaca

SEQ ID NO: 1310167 - RNA, 19 nt, Artificial Sequence
  Description of Artificial Sequence: Synthetic oligonucleotide
  Antisense strand to SEQ ID NO: 1310166
uguuaggaaaguauggccc

SEQ ID NO: 1310168 - RNA, 19 nt, Artificial Sequence
  Description of Artificial Sequence: Synthetic oligonucleotide
  Sense strand starting at position 1086 of SEQ ID NO: 1241923
uuuggagucucagucuaaa

SEQ ID NO: 1310169 - RNA, 19 nt, Artificial Sequence
  Description of Artificial Sequence: Synthetic oligonucleotide
  Antisense strand to SEQ ID NO: 1310168
uuuagacugagacuccaaa

SEQ ID NO: 1310170 - RNA, 19 nt, Artificial Sequence
  Description of Artificial Sequence: Synthetic oligonucleotide
  Sense strand starting at position 1089 of SEQ ID NO: 1241923
ggagucucagucuaaacau

SEQ ID NO: 1310171 - RNA, 19 nt, Artificial Sequence
  Description of Artificial Sequence: Synthetic oligonucleotide
  Antisense strand to SEQ ID NO: 1310170
auguuuagacugagacucc

SEQ ID NO: 1310172 - RNA, 19 nt, Artificial Sequence
  Description of Artificial Sequence: Synthetic oligonucleotide
  Sense strand starting at position 1326 of SEQ ID NO: 1241923
agaccugacccuuguggua

SEQ ID NO: 1310173 - RNA, 19 nt, Artificial Sequence
  Description of Artificial Sequence: Synthetic oligonucleotide
  Antisense strand to SEQ ID NO: 1310172
uaccacaagggucaggucu

SEQ ID NO: 1310174 - RNA, 19 nt, Artificial Sequence
  Description of Artificial Sequence: Synthetic oligonucleotide
  Sense strand starting at position 1478 of SEQ ID NO: 1241923
cuuguaaagcaucacaaga

SEQ ID NO: 1310175 - RNA, 19 nt, Artificial Sequence
  Description of Artificial Sequence: Synthetic oligonucleotide
  Antisense strand to SEQ ID NO: 1310174
ucuugugaugcuuuacaag

SEQ ID NO: 1310176 - RNA, 19 nt, Artificial Sequence
  Description of Artificial Sequence: Synthetic oligonucleotide
  Sense strand starting at position 1488 of SEQ ID NO: 1241923
aucacaagaucucagagaa

SEQ ID NO: 1310177 - RNA, 19 nt, Artificial Sequence
  Description of Artificial Sequence: Synthetic oligonucleotide
  Antisense strand to SEQ ID NO: 1310176
uucucugagaucuugugau

SEQ ID NO: 1310178 - RNA, 19 nt, Artificial Sequence
  Description of Artificial Sequence: Synthetic oligonucleotide
  Sense strand starting at position 2503 of SEQ ID NO: 1241923
guuaauccgagaggaagau

SEQ ID NO: 1310179 - RNA, 19 nt, Artificial Sequence
  Description of Artificial Sequence: Synthetic oligonucleotide
  Antisense strand to SEQ ID NO: 1310178
aucuuccucucggauuaac

SEQ ID NO: 1310180 - RNA, 19 nt, Artificial Sequence
  Description of Artificial Sequence: Synthetic oligonucleotide
  Sense strand starting at position 2539 of SEQ ID NO: 1241923
aaggcaccuugguuugaaa

SEQ ID NO: 1310181 - RNA, 19 nt, Artificial Sequence
  Description of Artificial Sequence: Synthetic oligonucleotide
  Antisense strand to SEQ ID NO: 1310180
uuucaaaccaaggugccuu

SEQ ID NO: 1310182 - RNA, 19 nt, Artificial Sequence
  Description of Artificial Sequence: Synthetic oligonucleotide
  Sense strand starting at position 2541 of SEQ ID NO: 1241923
ggcaccuugguuugaaacu

SEQ ID NO: 1310183 - RNA, 19 nt, Artificial Sequence
  Description of Artificial Sequence: Synthetic oligonucleotide
  Antisense strand to SEQ ID NO: 1310182
aguuucaaaccaaggugcc

SEQ ID NO: 1310184 - RNA, 19 nt, Artificial Sequence
  Description of Artificial Sequence: Synthetic oligonucleotide
  Sense strand starting at position 2581 of SEQ ID NO: 1241923
aacuguguacaggaucuua

SEQ ID NO: 1310185 - RNA, 19 nt, Artificial Sequence
  Description of Artificial Sequence: Synthetic oligonucleotide
  Antisense strand to SEQ ID NO: 1310184
uaagauccuguacacaguu

SEQ ID NO: 1310186 - RNA, 19 nt, Artificial Sequence
  Description of Artificial Sequence: Synthetic oligonucleotide
  Sense strand starting at position 2645 of SEQ ID NO: 1241923
augcuuccucacuagaaug

SEQ ID NO: 1310187 - RNA, 19 nt, Artificial Sequence
  Description of Artificial Sequence: Synthetic oligonucleotide
  Antisense strand to SEQ ID NO: 1310186
cauucuagugaggaagcau

SEQ ID NO: 1310188 - RNA, 19 nt, Artificial Sequence
  Description of Artificial Sequence: Synthetic oligonucleotide
  Sense strand starting at position 2706 of SEQ ID NO: 1241923
auaauaggugcuugguaag

SEQ ID NO: 1310189 - RNA, 19 nt, Artificial Sequence
  Description of Artificial Sequence: Synthetic oligonucleotide
  Antisense strand to SEQ ID NO: 1310188
cuuaccaagcaccuauuau

SEQ ID NO: 1310190 - RNA, 19 nt, Artificial Sequence
  Description of Artificial Sequence: Synthetic oligonucleotide
  Sense strand starting at position 2712 of SEQ ID NO: 1241923
ggugcuugguaaguuagaa

SEQ ID NO: 1310191 - RNA, 19 nt, Artificial Sequence
  Description of Artificial Sequence: Synthetic oligonucleotide
  Antisense strand to SEQ ID NO: 1310190
uucuaacuuaccaagcacc

SEQ ID NO: 1310192 - RNA, 19 nt, Artificial Sequence
  Description of Artificial Sequence: Synthetic oligonucleotide
  Sense strand starting at position 2727 of SEQ ID NO: 1241923
agaaacauucccugugggu

SEQ ID NO: 1310193 - RNA, 19 nt, Artificial Sequence
  Description of Artificial Sequence: Synthetic oligonucleotide
  Antisense strand to SEQ ID NO: 1310192
acccacagggaauguuucu

SEQ ID NO: 1310194 - RNA, 19 nt, Artificial Sequence
  Description of Artificial Sequence: Synthetic oligonucleotide
  Sense strand starting at position 2779 of SEQ ID NO: 1241923
caaaguucugaagggucaa

SEQ ID NO: 1310195 - RNA, 19 nt, Artificial Sequence
  Description of Artificial Sequence: Synthetic oligonucleotide
  Antisense strand to SEQ ID NO: 1310194
uugacccuucagaacuuug

SEQ ID NO: 1310196 - RNA, 19 nt, Artificial Sequence
  Description of Artificial Sequence: Synthetic oligonucleotide
  Sense strand starting at position 2978 of SEQ ID NO: 1241923
ggaggugaggaguguuugu

SEQ ID NO: 1310197 - RNA, 19 nt, Artificial Sequence
  Description of Artificial Sequence: Synthetic oligonucleotide
  Antisense strand to SEQ ID NO: 1310196
acaaacacuccucaccucc

SEQ ID NO: 1310198 - RNA, 19 nt, Artificial Sequence
  Description of Artificial Sequence: Synthetic oligonucleotide
  Sense strand starting at position 3081 of SEQ ID NO: 1241923
cccuuuccugguuagcaga

SEQ ID NO: 1310199 - RNA, 19 nt, Artificial Sequence
  Description of Artificial Sequence: Synthetic oligonucleotide
  Antisense strand to SEQ ID NO: 1310198
ucugcuaaccaggaaaggg

SEQ ID NO: 1310200 - RNA, 19 nt, Artificial Sequence
  Description of Artificial Sequence: Synthetic oligonucleotide
  Sense strand starting at position 3100 of SEQ ID NO: 1241923
ggccuccuagaauauacau

SEQ ID NO: 1310201 - RNA, 19 nt, Artificial Sequence
  Description of Artificial Sequence: Synthetic oligonucleotide
  Antisense strand to SEQ ID NO: 1310200
auguauauucuaggaggcc

SEQ ID NO: 1310202 - RNA, 19 nt, Artificial Sequence
  Description of Artificial Sequence: Synthetic oligonucleotide
  Sense strand starting at position 3172 of SEQ ID NO: 1241923
cuccauucuguguaguaca

SEQ ID NO: 1310203 - RNA, 19 nt, Artificial Sequence
  Description of Artificial Sequence: Synthetic oligonucleotide
  Antisense strand to SEQ ID NO: 1310202
uguacuacacagaauggag

SEQ ID NO: 1310204 - RNA, 19 nt, Artificial Sequence
  Description of Artificial Sequence: Synthetic oligonucleotide
  Sense strand starting at position 3204 of SEQ ID NO: 1241923
acucuaggucuggacuuua

SEQ ID NO: 1310205 - RNA, 19 nt, Artificial Sequence
  Description of Artificial Sequence: Synthetic oligonucleotide
  Antisense strand to SEQ ID NO: 1310204
uaaaguccagaccuagagu

SEQ ID NO: 1310206 - RNA, 19 nt, Artificial Sequence
  Description of Artificial Sequence: Synthetic oligonucleotide
  Sense strand starting at position 3248 of SEQ ID NO: 1241923
uguggaagucugugaucac

SEQ ID NO: 1310207 - RNA, 19 nt, Artificial Sequence
  Description of Artificial Sequence: Synthetic oligonucleotide
  Antisense strand to SEQ ID NO: 1310206
gugaucacagacuuccaca

SEQ ID NO: 1310208 - RNA, 19 nt, Artificial Sequence
  Description of Artificial Sequence: Synthetic oligonucleotide
  Sense strand starting at position 3251 of SEQ ID NO: 1241923
ggaagucugugaucacauc

SEQ ID NO: 1310209 - RNA, 19 nt, Artificial Sequence
  Description of Artificial Sequence: Synthetic oligonucleotide
  Antisense strand to SEQ ID NO: 1310208
gaugugaucacagacuucc

SEQ ID NO: 1310210 - RNA, 19 nt, Artificial Sequence
  Description of Artificial Sequence: Synthetic oligonucleotide
  Sense strand starting at position 3252 of SEQ ID NO: 1241923
gaagucugugaucacaucu

SEQ ID NO: 1310211 - RNA, 19 nt, Artificial Sequence
  Description of Artificial Sequence: Synthetic oligonucleotide
  Antisense strand to SEQ ID NO: 1310210
agaugugaucacagacuuc

SEQ ID NO: 1310212 - RNA, 19 nt, Artificial Sequence
  Description of Artificial Sequence: Synthetic oligonucleotide
  Sense strand starting at position 3288 of SEQ ID NO: 1241923
uuugucaccugguuaaacu

SEQ ID NO: 1310213 - RNA, 19 nt, Artificial Sequence
  Description of Artificial Sequence: Synthetic oligonucleotide
  Antisense strand to SEQ ID NO: 1310212
aguuuaaccaggugacaaa

SEQ ID NO: 1310214 - RNA, 19 nt, Artificial Sequence
  Description of Artificial Sequence: Synthetic oligonucleotide
  Sense strand starting at position 3295 of SEQ ID NO: 1241923
ccugguuaaacugggaagu

SEQ ID NO: 1310215 - RNA, 19 nt, Artificial Sequence
  Description of Artificial Sequence: Synthetic oligonucleotide
  Antisense strand to SEQ ID NO: 1310214
acuucccaguuuaaccagg

SEQ ID NO: 1310216 - RNA, 19 nt, Artificial Sequence
  Description of Artificial Sequence: Synthetic oligonucleotide
  Sense strand starting at position 3306 of SEQ ID NO: 1241923
ugggaaguccugcaaucca

SEQ ID NO: 1310217 - RNA, 19 nt, Artificial Sequence
  Description of Artificial Sequence: Synthetic oligonucleotide
  Antisense strand to SEQ ID NO: 1310216
uggauugcaggacuuccca

SEQ ID NO: 1310218 - RNA, 19 nt, Artificial Sequence
  Description of Artificial Sequence: Synthetic oligonucleotide
  Sense strand starting at position 3388 of SEQ ID NO: 1241923
gcccuucuuugauuuauug

SEQ ID NO: 1310219 - RNA, 19 nt, Artificial Sequence
  Description of Artificial Sequence: Synthetic oligonucleotide
  Antisense strand to SEQ ID NO: 1310218
caauaaaucaaagaagggc

SEQ ID NO: 1310220 - RNA, 19 nt, Artificial Sequence
  Description of Artificial Sequence: Synthetic oligonucleotide
  Sense strand starting at position 3395 of SEQ ID NO: 1241923
uuugauuuauugggaagua

SEQ ID NO: 1310221 - RNA, 19 nt, Artificial Sequence
  Description of Artificial Sequence: Synthetic oligonucleotide
  Antisense strand to SEQ ID NO: 1310220
uacuucccaauaaaucaaa

SEQ ID NO: 1310222 - RNA, 19 nt, Artificial Sequence
  Description of Artificial Sequence: Synthetic oligonucleotide
  Sense strand starting at position 3396 of SEQ ID NO: 1241923
uugauuuauugggaaguaa

SEQ ID NO: 1310223 - RNA, 19 nt, Artificial Sequence
  Description of Artificial Sequence: Synthetic oligonucleotide
  Antisense strand to SEQ ID NO: 1310222
uuacuucccaauaaaucaa

SEQ ID NO: 1310224 - RNA, 19 nt, Artificial Sequence
  Description of Artificial Sequence: Synthetic oligonucleotide
  Sense strand starting at position 3453 of SEQ ID NO: 1241923
uucuuuccagccgaauaaa

SEQ ID NO: 1310225 - RNA, 19 nt, Artificial Sequence
  Description of Artificial Sequence: Synthetic oligonucleotide
  Antisense strand to SEQ ID NO: 1310224
uuuauucggcuggaaagaa

SEQ ID NO: 1310226 - RNA, 19 nt, Artificial Sequence
  Description of Artificial Sequence: Synthetic oligonucleotide
  Sense strand starting at position 3510 of SEQ ID NO: 1241923
ucaccaugauuccuguuua

SEQ ID NO: 1310227 - RNA, 19 nt, Artificial Sequence
  Description of Artificial Sequence: Synthetic oligonucleotide
  Antisense strand to SEQ ID NO: 1310226
uaaacaggaaucaugguga

SEQ ID NO: 1310228 - RNA, 19 nt, Artificial Sequence
  Description of Artificial Sequence: Synthetic oligonucleotide
  Sense strand starting at position 3515 of SEQ ID NO: 1241923
augauuccuguuuauguuu

SEQ ID NO: 1310229 - RNA, 19 nt, Artificial Sequence
  Description of Artificial Sequence: Synthetic oligonucleotide
  Antisense strand to SEQ ID NO: 1310228
aaacauaaacaggaaucau

SEQ ID NO: 1310230 - RNA, 19 nt, Artificial Sequence
  Description of Artificial Sequence: Synthetic oligonucleotide
  Sense strand starting at position 3622 of SEQ ID NO: 1241923
aaaggucgaccuugaauca

SEQ ID NO: 1310231 - RNA, 19 nt, Artificial Sequence
  Description of Artificial Sequence: Synthetic oligonucleotide
  Antisense strand to SEQ ID NO: 1310230
ugauucaaggucgaccuuu

SEQ ID NO: 1310232 - RNA, 19 nt, Artificial Sequence
  Description of Artificial Sequence: Synthetic oligonucleotide
  Sense strand starting at position 3767 of SEQ ID NO: 1241923
caggguccugucuagggau

SEQ ID NO: 1310233 - RNA, 19 nt, Artificial Sequence
  Description of Artificial Sequence: Synthetic oligonucleotide
  Antisense strand to SEQ ID NO: 1310232
aucccuagacaggacccug

SEQ ID NO: 1310234 - RNA, 19 nt, Artificial Sequence
  Description of Artificial Sequence: Synthetic oligonucleotide
  Sense strand starting at position 3792 of SEQ ID NO: 1241923
ugagaagugcuuggcuaug

SEQ ID NO: 1310235 - RNA, 19 nt, Artificial Sequence
  Description of Artificial Sequence: Synthetic oligonucleotide
  Antisense strand to SEQ ID NO: 1310234
cauagccaagcacuucuca

SEQ ID NO: 1310236 - RNA, 19 nt, Artificial Sequence
  Description of Artificial Sequence: Synthetic oligonucleotide
  Sense strand starting at position 3833 of SEQ ID NO: 1241923
ccagcacauuccucuggua

SEQ ID NO: 1310237 - RNA, 19 nt, Artificial Sequence
  Description of Artificial Sequence: Synthetic oligonucleotide
  Antisense strand to SEQ ID NO: 1310236
uaccagaggaaugugcugg

SEQ ID NO: 1310238 - RNA, 19 nt, Artificial Sequence
  Description of Artificial Sequence: Synthetic oligonucleotide
  Sense strand starting at position 3835 of SEQ ID NO: 1241923
agcacauuccucugguauc

SEQ ID NO: 1310239 - RNA, 19 nt, Artificial Sequence
  Description of Artificial Sequence: Synthetic oligonucleotide
  Antisense strand to SEQ ID NO: 1310238
gauaccagaggaaugugcu

SEQ ID NO: 1310240 - RNA, 19 nt, Artificial Sequence
  Description of Artificial Sequence: Synthetic oligonucleotide
  Sense strand starting at position 3889 of SEQ ID NO: 1241923
aagagcagugcugaugaau

SEQ ID NO: 1310241 - RNA, 19 nt, Artificial Sequence
  Description of Artificial Sequence: Synthetic oligonucleotide
  Antisense strand to SEQ ID NO: 1310240
auucaucagcacugcucuu

SEQ ID NO: 1310242 - RNA, 19 nt, Artificial Sequence
  Description of Artificial Sequence: Synthetic oligonucleotide
  Sense strand starting at position 269 of SEQ ID NO: 1241924
uaauaaauuccguaguaga

SEQ ID NO: 1310243 - RNA, 19 nt, Artificial Sequence
  Description of Artificial Sequence: Synthetic oligonucleotide
  Antisense strand to SEQ ID NO: 1310242
ucuacuacggaauuuauua

SEQ ID NO: 1310244 - RNA, 19 nt, Artificial Sequence
  Description of Artificial Sequence: Synthetic oligonucleotide
  Sense strand starting at position 277 of SEQ ID NO: 1241924
uccguaguagaugaaagua

SEQ ID NO: 1310245 - RNA, 19 nt, Artificial Sequence
  Description of Artificial Sequence: Synthetic oligonucleotide
  Antisense strand to SEQ ID NO: 1310244
uacuuucaucuacuacgga

SEQ ID NO: 1310246 - RNA, 19 nt, Artificial Sequence
  Description of Artificial Sequence: Synthetic oligonucleotide
  Sense strand starting at position 390 of SEQ ID NO: 1241924
acacaauauggcuauaagu

SEQ ID NO: 1310247 - RNA, 19 nt, Artificial Sequence
  Description of Artificial Sequence: Synthetic oligonucleotide
  Antisense strand to SEQ ID NO: 1310246
acuuauagccauauugugu

SEQ ID NO: 1310248 - RNA, 19 nt, Artificial Sequence
  Description of Artificial Sequence: Synthetic oligonucleotide
  Sense strand starting at position 465 of SEQ ID NO: 1241924
auuuaucagcagugcaauc

SEQ ID NO: 1310249 - RNA, 19 nt, Artificial Sequence
  Description of Artificial Sequence: Synthetic oligonucleotide
  Antisense strand to SEQ ID NO: 1310248
gauugcacugcugauaaau

SEQ ID NO: 1310250 - RNA, 19 nt, Artificial Sequence
  Description of Artificial Sequence: Synthetic oligonucleotide
  Sense strand starting at position 474 of SEQ ID NO: 1241924
cagugcaaucuugagcaaa

SEQ ID NO: 1310251 - RNA, 19 nt, Artificial Sequence
  Description of Artificial Sequence: Synthetic oligonucleotide
  Antisense strand to SEQ ID NO: 1310250
uuugcucaagauugcacug

SEQ ID NO: 1310252 - RNA, 19 nt, Artificial Sequence
  Description of Artificial Sequence: Synthetic oligonucleotide
  Sense strand starting at position 499 of SEQ ID NO: 1241924
cugcuucuacguuaaagaa

SEQ ID NO: 1310253 - RNA, 19 nt, Artificial Sequence
  Description of Artificial Sequence: Synthetic oligonucleotide
  Antisense strand to SEQ ID NO: 1310252
uucuuuaacguagaagcag

SEQ ID NO: 1310254 - RNA, 19 nt, Artificial Sequence
  Description of Artificial Sequence: Synthetic oligonucleotide
  Sense strand starting at position 691 of SEQ ID NO: 1241924
gaggauuccgcauaucuga

SEQ ID NO: 1310255 - RNA, 19 nt, Artificial Sequence
  Description of Artificial Sequence: Synthetic oligonucleotide
  Antisense strand to SEQ ID NO: 1310254
ucagauaugcggaauccuc

SEQ ID NO: 1310256 - RNA, 19 nt, Artificial Sequence
  Description of Artificial Sequence: Synthetic oligonucleotide
  Sense strand starting at position 718 of SEQ ID NO: 1241924
gaaugugcagccuaugaga

SEQ ID NO: 1310257 - RNA, 19 nt, Artificial Sequence
  Description of Artificial Sequence: Synthetic oligonucleotide
  Antisense strand to SEQ ID NO: 1310256
ucucauaggcugcacauuc

SEQ ID NO: 1310258 - RNA, 19 nt, Artificial Sequence
  Description of Artificial Sequence: Synthetic oligonucleotide
  Sense strand starting at position 732 of SEQ ID NO: 1241924
ugagaaaugucacuucuaa

SEQ ID NO: 1310259 - RNA, 19 nt, Artificial Sequence
  Description of Artificial Sequence: Synthetic oligonucleotide
  Antisense strand to SEQ ID NO: 1310258
uuagaagugacauuucuca

SEQ ID NO: 1310260 - RNA, 19 nt, Artificial Sequence
  Description of Artificial Sequence: Synthetic oligonucleotide
  Sense strand starting at position 939 of SEQ ID NO: 1241924
acgcacuaugaagguauaa

SEQ ID NO: 1310261 - RNA, 19 nt, Artificial Sequence
  Description of Artificial Sequence: Synthetic oligonucleotide
  Antisense strand to SEQ ID NO: 1310260
uuauaccuucauagugcgu

SEQ ID NO: 1310262 - RNA, 19 nt, Artificial Sequence
  Description of Artificial Sequence: Synthetic oligonucleotide
  Sense strand starting at position 957 of SEQ ID NO: 1241924
aggugauaauaggcuuaaa

SEQ ID NO: 1310263 - RNA, 19 nt, Artificial Sequence
  Description of Artificial Sequence: Synthetic oligonucleotide
  Antisense strand to SEQ ID NO: 1310262
uuuaagccuauuaucaccu

SEQ ID NO: 1310264 - RNA, 19 nt, Artificial Sequence
  Description of Artificial Sequence: Synthetic oligonucleotide
  Sense strand starting at position 996 of SEQ ID NO: 1241924
acgauauaggaaggguuau

SEQ ID NO: 1310265 - RNA, 19 nt, Artificial Sequence
  Description of Artificial Sequence: Synthetic oligonucleotide
  Antisense strand to SEQ ID NO: 1310264
auaacccuuccuauaucgu

SEQ ID NO: 1310266 - RNA, 19 nt, Artificial Sequence
  Description of Artificial Sequence: Synthetic oligonucleotide
  Sense strand starting at position 997 of SEQ ID NO: 1241924
cgauauaggaaggguuaua

SEQ ID NO: 1310267 - RNA, 19 nt, Artificial Sequence
  Description of Artificial Sequence: Synthetic oligonucleotide
  Antisense strand to SEQ ID NO: 1310266
uauaacccuuccuauaucg

SEQ ID NO: 1310268 - RNA, 19 nt, Artificial Sequence
  Description of Artificial Sequence: Synthetic oligonucleotide
  Sense strand starting at position 1044 of SEQ ID NO: 1241924
ugcacuuggaguugggaaa

SEQ ID NO: 1310269 - RNA, 19 nt, Artificial Sequence
  Description of Artificial Sequence: Synthetic oligonucleotide
  Antisense strand to SEQ ID NO: 1310268
uuucccaacuccaagugca

SEQ ID NO: 1310270 - RNA, 19 nt, Artificial Sequence
  Description of Artificial Sequence: Synthetic oligonucleotide
  Sense strand starting at position 1045 of SEQ ID NO: 1241924
gcacuuggaguugggaaau

SEQ ID NO: 1310271 - RNA, 19 nt, Artificial Sequence
  Description of Artificial Sequence: Synthetic oligonucleotide
  Antisense strand to SEQ ID NO: 1310270
auuucccaacuccaagugc

SEQ ID NO: 1310272 - RNA, 19 nt, Artificial Sequence
  Description of Artificial Sequence: Synthetic oligonucleotide
  Sense strand starting at position 1087 of SEQ ID NO: 1241924
cgccuucuagaauggaaau

SEQ ID NO: 1310273 - RNA, 19 nt, Artificial Sequence
  Description of Artificial Sequence: Synthetic oligonucleotide
  Antisense strand to SEQ ID NO: 1310272
auuuccauucuagaaggcg

SEQ ID NO: 1310274 - RNA, 19 nt, Artificial Sequence
  Description of Artificial Sequence: Synthetic oligonucleotide
  Sense strand starting at position 1362 of SEQ ID NO: 1241924
agcgaaugaccuugaggaa

SEQ ID NO: 1310275 - RNA, 19 nt, Artificial Sequence
  Description of Artificial Sequence: Synthetic oligonucleotide
  Antisense strand to SEQ ID NO: 1310274
uuccucaaggucauucgcu

SEQ ID NO: 1310276 - RNA, 19 nt, Artificial Sequence
  Description of Artificial Sequence: Synthetic oligonucleotide
  Sense strand starting at position 1379 of SEQ ID NO: 1241924
aacuguuuggcgucagcua

SEQ ID NO: 1310277 - RNA, 19 nt, Artificial Sequence
  Description of Artificial Sequence: Synthetic oligonucleotide
  Antisense strand to SEQ ID NO: 1310276
uagcugacgccaaacaguu

SEQ ID NO: 1310278 - RNA, 19 nt, Artificial Sequence
  Description of Artificial Sequence: Synthetic oligonucleotide
  Sense strand starting at position 1607 of SEQ ID NO: 1241924
ugucacuucuaaguaggau

SEQ ID NO: 1310279 - RNA, 19 nt, Artificial Sequence
  Description of Artificial Sequence: Synthetic oligonucleotide
  Antisense strand to SEQ ID NO: 1310278
auccuacuuagaagugaca

SEQ ID NO: 1310280 - RNA, 19 nt, Artificial Sequence
  Description of Artificial Sequence: Synthetic oligonucleotide
  Sense strand starting at position 1619 of SEQ ID NO: 1241924
guaggauauuggaggaaug

SEQ ID NO: 1310281 - RNA, 19 nt, Artificial Sequence
  Description of Artificial Sequence: Synthetic oligonucleotide
  Antisense strand to SEQ ID NO: 1310280
cauuccuccaauauccuac

SEQ ID NO: 1310282 - RNA, 19 nt, Artificial Sequence
  Description of Artificial Sequence: Synthetic oligonucleotide
  Sense strand starting at position 1829 of SEQ ID NO: 1241924
gcuguuaccgcgaggaaac

SEQ ID NO: 1310283 - RNA, 19 nt, Artificial Sequence
  Description of Artificial Sequence: Synthetic oligonucleotide
  Antisense strand to SEQ ID NO: 1310282
guuuccucgcgguaacagc

SEQ ID NO: 1310284 - RNA, 19 nt, Artificial Sequence
  Description of Artificial Sequence: Synthetic oligonucleotide
  Sense strand starting at position 2052 of SEQ ID NO: 1241924
ucaagcuugguugagaagu

SEQ ID NO: 1310285 - RNA, 19 nt, Artificial Sequence
  Description of Artificial Sequence: Synthetic oligonucleotide
  Antisense strand to SEQ ID NO: 1310284
acuucucaaccaagcuuga

SEQ ID NO: 1310286 - RNA, 19 nt, Artificial Sequence
  Description of Artificial Sequence: Synthetic oligonucleotide
  Sense strand starting at position 2160 of SEQ ID NO: 1241924
gccaauuacgaggaaguca

SEQ ID NO: 1310287 - RNA, 19 nt, Artificial Sequence
  Description of Artificial Sequence: Synthetic oligonucleotide
  Antisense strand to SEQ ID NO: 1310286
ugacuuccucguaauuggc

SEQ ID NO: 1310288 - RNA, 19 nt, Artificial Sequence
  Description of Artificial Sequence: Synthetic oligonucleotide
  Sense strand starting at position 2191 of SEQ ID NO: 1241924
cgggcugaucgguugccua

SEQ ID NO: 1310289 - RNA, 19 nt, Artificial Sequence
  Description of Artificial Sequence: Synthetic oligonucleotide
  Antisense strand to SEQ ID NO: 1310288
uaggcaaccgaucagcccg

SEQ ID NO: 1310290 - RNA, 19 nt, Artificial Sequence
  Description of Artificial Sequence: Synthetic oligonucleotide
  Sense strand starting at position 2353 of SEQ ID NO: 1241924
gaacucuugccuuagaggu

SEQ ID NO: 1310291 - RNA, 19 nt, Artificial Sequence
  Description of Artificial Sequence: Synthetic oligonucleotide
  Antisense strand to SEQ ID NO: 1310290
accucuaaggcaagaguuc

SEQ ID NO: 1310292 - RNA, 19 nt, Artificial Sequence
  Description of Artificial Sequence: Synthetic oligonucleotide
  Sense strand starting at position 2456 of SEQ ID NO: 1241924
cuaggugccgcuuuguuua

SEQ ID NO: 1310293 - RNA, 19 nt, Artificial Sequence
  Description of Artificial Sequence: Synthetic oligonucleotide
  Antisense strand to SEQ ID NO: 1310292
uaaacaaagcggcaccuag

SEQ ID NO: 1310294 - RNA, 19 nt, Artificial Sequence
  Description of Artificial Sequence: Synthetic oligonucleotide
  Sense strand starting at position 2534 of SEQ ID NO: 1241924
cucuaauuuccucgggugu

SEQ ID NO: 1310295 - RNA, 19 nt, Artificial Sequence
  Description of Artificial Sequence: Synthetic oligonucleotide
  Antisense strand to SEQ ID NO: 1310294
acacccgaggaaauuagag

SEQ ID NO: 1310296 - RNA, 19 nt, Artificial Sequence
  Description of Artificial Sequence: Synthetic oligonucleotide
  Sense strand starting at position 2563 of SEQ ID NO: 1241924
gucacuuagguguauauua

SEQ ID NO: 1310297 - RNA, 19 nt, Artificial Sequence
  Description of Artificial Sequence: Synthetic oligonucleotide
  Antisense strand to SEQ ID NO: 1310296
uaauauacaccuaagugac

SEQ ID NO: 1310298 - RNA, 19 nt, Artificial Sequence
  Description of Artificial Sequence: Synthetic oligonucleotide
  Sense strand starting at position 2570 of SEQ ID NO: 1241924
agguguauauuauuaaccu

SEQ ID NO: 1310299 - RNA, 19 nt, Artificial Sequence
  Description of Artificial Sequence: Synthetic oligonucleotide
  Antisense strand to SEQ ID NO: 1310298
agguuaauaauauacaccu

SEQ ID NO: 1310300 - RNA, 19 nt, Artificial Sequence
  Description of Artificial Sequence: Synthetic oligonucleotide
  Sense strand starting at position 2605 of SEQ ID NO: 1241924
ccacccaguccucaguaaa

SEQ ID NO: 1310301 - RNA, 19 nt, Artificial Sequence
  Description of Artificial Sequence: Synthetic oligonucleotide
  Antisense strand to SEQ ID NO: 1310300
uuuacugaggacugggugg

SEQ ID NO: 1310302 - RNA, 19 nt, Artificial Sequence
  Description of Artificial Sequence: Synthetic oligonucleotide
  Sense strand starting at position 2724 of SEQ ID NO: 1241924
uguacuggcacggaguaaa

SEQ ID NO: 1310303 - RNA, 19 nt, Artificial Sequence
  Description of Artificial Sequence: Synthetic oligonucleotide
  Antisense strand to SEQ ID NO: 1310302
uuuacuccgugccaguaca

SEQ ID NO: 1310304 - RNA, 19 nt, Artificial Sequence
  Description of Artificial Sequence: Synthetic oligonucleotide
  Sense strand starting at position 2878 of SEQ ID NO: 1241924
acuguaauagaaugaacga

SEQ ID NO: 1310305 - RNA, 19 nt, Artificial Sequence
  Description of Artificial Sequence: Synthetic oligonucleotide
  Antisense strand to SEQ ID NO: 1310304
ucguucauucuauuacagu

SEQ ID NO: 1310306 - RNA, 19 nt, Artificial Sequence
  Description of Artificial Sequence: Synthetic oligonucleotide
  Sense strand starting at position 3165 of SEQ ID NO: 1241924
cgugaauaucuugaaguac

SEQ ID NO: 1310307 - RNA, 19 nt, Artificial Sequence
  Description of Artificial Sequence: Synthetic oligonucleotide
  Antisense strand to SEQ ID NO: 1310306
guacuucaagauauucacg

SEQ ID NO: 1310308 - RNA, 19 nt, Artificial Sequence
  Description of Artificial Sequence: Synthetic oligonucleotide
  Sense strand starting at position 3350 of SEQ ID NO: 1241924
caaggcaucuuagugagaa

SEQ ID NO: 1310309 - RNA, 19 nt, Artificial Sequence
  Description of Artificial Sequence: Synthetic oligonucleotide
  Antisense strand to SEQ ID NO: 1310308
uucucacuaagaugccuug

SEQ ID NO: 1310310 - RNA, 19 nt, Artificial Sequence
  Description of Artificial Sequence: Synthetic oligonucleotide
  Sense strand starting at position 3352 of SEQ ID NO: 1241924
aggcaucuuagugagaauu

SEQ ID NO: 1310311 - RNA, 19 nt, Artificial Sequence
  Description of Artificial Sequence: Synthetic oligonucleotide
  Antisense strand to SEQ ID NO: 1310310
aauucucacuaagaugccu

SEQ ID NO: 1310312 - RNA, 19 nt, Artificial Sequence
  Description of Artificial Sequence: Synthetic oligonucleotide
  Sense strand starting at position 3545 of SEQ ID NO: 1241924
ggaggcaguguuuauaauc

SEQ ID NO: 1310313 - RNA, 19 nt, Artificial Sequence
  Description of Artificial Sequence: Synthetic oligonucleotide
  Antisense strand to SEQ ID NO: 1310312
gauuauaaacacugccucc

SEQ ID NO: 1310314 - RNA, 19 nt, Artificial Sequence
  Description of Artificial Sequence: Synthetic oligonucleotide
  Sense strand starting at position 3574 of SEQ ID NO: 1241924
ugcuuuacagauugguaaa

SEQ ID NO: 1310315 - RNA, 19 nt, Artificial Sequence
  Description of Artificial Sequence: Synthetic oligonucleotide
  Antisense strand to SEQ ID NO: 1310314
uuuaccaaucuguaaagca

SEQ ID NO: 1310316 - RNA, 19 nt, Artificial Sequence
  Description of Artificial Sequence: Synthetic oligonucleotide
  Sense strand starting at position 3576 of SEQ ID NO: 1241924
cuuuacagauugguaaauu

SEQ ID NO: 1310317 - RNA, 19 nt, Artificial Sequence
  Description of Artificial Sequence: Synthetic oligonucleotide
  Antisense strand to SEQ ID NO: 1310316
aauuuaccaaucuguaaag

SEQ ID NO: 1310318 - RNA, 19 nt, Artificial Sequence
  Description of Artificial Sequence: Synthetic oligonucleotide
  Sense strand starting at position 3603 of SEQ ID NO: 1241924
agcaucaucucauuugguu

SEQ ID NO: 1310319 - RNA, 19 nt, Artificial Sequence
  Description of Artificial Sequence: Synthetic oligonucleotide
  Antisense strand to SEQ ID NO: 1310318
aaccaaaugagaugaugcu

SEQ ID NO: 1310320 - RNA, 19 nt, Artificial Sequence
  Description of Artificial Sequence: Synthetic oligonucleotide
  Sense strand starting at position 3983 of SEQ ID NO: 1241924
guaccaacacucugaguua

SEQ ID NO: 1310321 - RNA, 19 nt, Artificial Sequence
  Description of Artificial Sequence: Synthetic oligonucleotide
  Antisense strand to SEQ ID NO: 1310320
uaacucagaguguugguac

SEQ ID NO: 1310322 - RNA, 19 nt, Artificial Sequence
  Description of Artificial Sequence: Synthetic oligonucleotide
  Sense strand starting at position 9 of SEQ ID NO: 1241925
auccuuauuuggucacgca

SEQ ID NO: 1310323 - RNA, 19 nt, Artificial Sequence
  Description of Artificial Sequence: Synthetic oligonucleotide
  Antisense strand to SEQ ID NO: 1310322
ugcgugaccaaauaaggau

SEQ ID NO: 1310324 - RNA, 19 nt, Artificial Sequence
  Description of Artificial Sequence: Synthetic oligonucleotide
  Sense strand starting at position 10 of SEQ ID NO: 1241925
uccuuauuuggucacgcau

SEQ ID NO: 1310325 - RNA, 19 nt, Artificial Sequence
  Description of Artificial Sequence: Synthetic oligonucleotide
  Antisense strand to SEQ ID NO: 1310324
augcgugaccaaauaagga

SEQ ID NO: 1310326 - RNA, 19 nt, Artificial Sequence
  Description of Artificial Sequence: Synthetic oligonucleotide
  Sense strand starting at position 113 of SEQ ID NO: 1241925
cagugaccguucucacaua

SEQ ID NO: 1310327 - RNA, 19 nt, Artificial Sequence
  Description of Artificial Sequence: Synthetic oligonucleotide
  Antisense strand to SEQ ID NO: 1310326
uaugugagaacggucacug

SEQ ID NO: 1310328 - RNA, 19 nt, Artificial Sequence
  Description of Artificial Sequence: Synthetic oligonucleotide
  Sense strand starting at position 173 of SEQ ID NO: 1241925
gaucuauucuuagugugau

SEQ ID NO: 1310329 - RNA, 19 nt, Artificial Sequence
  Description of Artificial Sequence: Synthetic oligonucleotide
  Antisense strand to SEQ ID NO: 1310328
aucacacuaagaauagauc

SEQ ID NO: 1310330 - RNA, 19 nt, Artificial Sequence
  Description of Artificial Sequence: Synthetic oligonucleotide
  Sense strand starting at position 216 of SEQ ID NO: 1241925
augcuaauacuauguaaag

SEQ ID NO: 1310331 - RNA, 19 nt, Artificial Sequence
  Description of Artificial Sequence: Synthetic oligonucleotide
  Antisense strand to SEQ ID NO: 1310330
cuuuacauaguauuagcau

SEQ ID NO: 1310332 - RNA, 19 nt, Artificial Sequence
  Description of Artificial Sequence: Synthetic oligonucleotide
  Sense strand starting at position 217 of SEQ ID NO: 1241925
ugcuaauacuauguaaagu

SEQ ID NO: 1310333 - RNA, 19 nt, Artificial Sequence
  Description of Artificial Sequence: Synthetic oligonucleotide
  Antisense strand to SEQ ID NO: 1310332
acuuuacauaguauuagca

SEQ ID NO: 1310334 - RNA, 19 nt, Artificial Sequence
  Description of Artificial Sequence: Synthetic oligonucleotide
  Sense strand starting at position 248 of SEQ ID NO: 1241925
uggagcuaauuagugcaua

SEQ ID NO: 1310335 - RNA, 19 nt, Artificial Sequence
  Description of Artificial Sequence: Synthetic oligonucleotide
  Antisense strand to SEQ ID NO: 1310334
uaugcacuaauuagcucca

SEQ ID NO: 1310336 - RNA, 19 nt, Artificial Sequence
  Description of Artificial Sequence: Synthetic oligonucleotide
  Sense strand starting at position 300 of SEQ ID NO: 1241925
uggaaauaauuaguaugca

SEQ ID NO: 1310337 - RNA, 19 nt, Artificial Sequence
  Description of Artificial Sequence: Synthetic oligonucleotide
  Antisense strand to SEQ ID NO: 1310336
ugcauacuaauuauuucca

SEQ ID NO: 1310338 - RNA, 19 nt, Artificial Sequence
  Description of Artificial Sequence: Synthetic oligonucleotide
  Sense strand starting at position 301 of SEQ ID NO: 1241925
ggaaauaauuaguaugcaa

SEQ ID NO: 1310339 - RNA, 19 nt, Artificial Sequence
  Description of Artificial Sequence: Synthetic oligonucleotide
  Antisense strand to SEQ ID NO: 1310338
uugcauacuaauuauuucc

SEQ ID NO: 1310340 - RNA, 19 nt, Artificial Sequence
  Description of Artificial Sequence: Synthetic oligonucleotide
  Sense strand starting at position 337 of SEQ ID NO: 1241925
gggcacuuucuguauaugu

SEQ ID NO: 1310341 - RNA, 19 nt, Artificial Sequence
  Description of Artificial Sequence: Synthetic oligonucleotide
  Antisense strand to SEQ ID NO: 1310340
acauauacagaaagugccc

SEQ ID NO: 1310342 - RNA, 19 nt, Artificial Sequence
  Description of Artificial Sequence: Synthetic oligonucleotide
  Sense strand starting at position 355 of SEQ ID NO: 1241925
uaacgaauuugucuugguu

SEQ ID NO: 1310343 - RNA, 19 nt, Artificial Sequence
  Description of Artificial Sequence: Synthetic oligonucleotide
  Antisense strand to SEQ ID NO: 1310342
aaccaagacaaauucguua

SEQ ID NO: 1310344 - RNA, 19 nt, Artificial Sequence
  Description of Artificial Sequence: Synthetic oligonucleotide
  Sense strand starting at position 540 of SEQ ID NO: 1241925
uaugcuaucuguuugugau

SEQ ID NO: 1310345 - RNA, 19 nt, Artificial Sequence
  Description of Artificial Sequence: Synthetic oligonucleotide
  Antisense strand to SEQ ID NO: 1310344
aucacaaacagauagcaua

SEQ ID NO: 1310346 - RNA, 19 nt, Artificial Sequence
  Description of Artificial Sequence: Synthetic oligonucleotide
  Sense strand starting at position 541 of SEQ ID NO: 1241925
augcuaucuguuugugaua

SEQ ID NO: 1310347 - RNA, 19 nt, Artificial Sequence
  Description of Artificial Sequence: Synthetic oligonucleotide
  Antisense strand to SEQ ID NO: 1310346
uaucacaaacagauagcau

SEQ ID NO: 1310348 - RNA, 19 nt, Artificial Sequence
  Description of Artificial Sequence: Synthetic oligonucleotide
  Sense strand starting at position 542 of SEQ ID NO: 1241925
ugcuaucuguuugugauaa

SEQ ID NO: 1310349 - RNA, 19 nt, Artificial Sequence
  Description of Artificial Sequence: Synthetic oligonucleotide
  Antisense strand to SEQ ID NO: 1310348
uuaucacaaacagauagca

SEQ ID NO: 1310350 - RNA, 19 nt, Artificial Sequence
  Description of Artificial Sequence: Synthetic oligonucleotide
  Sense strand starting at position 554 of SEQ ID NO: 1241925
gugauaaacucuguugccu

SEQ ID NO: 1310351 - RNA, 19 nt, Artificial Sequence
  Description of Artificial Sequence: Synthetic oligonucleotide
  Antisense strand to SEQ ID NO: 1310350
aggcaacagaguuuaucac

SEQ ID NO: 1310352 - RNA, 19 nt, Artificial Sequence
  Description of Artificial Sequence: Synthetic oligonucleotide
  Sense strand starting at position 894 of SEQ ID NO: 1241925
ucuaauugagacuguuuau

SEQ ID NO: 1310353 - RNA, 19 nt, Artificial Sequence
  Description of Artificial Sequence: Synthetic oligonucleotide
  Antisense strand to SEQ ID NO: 1310352
auaaacagucucaauuaga

SEQ ID NO: 1310354 - RNA, 19 nt, Artificial Sequence
  Description of Artificial Sequence: Synthetic oligonucleotide
  Sense strand starting at position 943 of SEQ ID NO: 1241925
ugguucucuguugguuaau

SEQ ID NO: 1310355 - RNA, 19 nt, Artificial Sequence
  Description of Artificial Sequence: Synthetic oligonucleotide
  Antisense strand to SEQ ID NO: 1310354
auuaaccaacagagaacca

SEQ ID NO: 1310356 - RNA, 19 nt, Artificial Sequence
  Description of Artificial Sequence: Synthetic oligonucleotide
  Sense strand starting at position 944 of SEQ ID NO: 1241925
gguucucuguugguuaaug

SEQ ID NO: 1310357 - RNA, 19 nt, Artificial Sequence
  Description of Artificial Sequence: Synthetic oligonucleotide
  Antisense strand to SEQ ID NO: 1310356
cauuaaccaacagagaacc

SEQ ID NO: 1310358 - RNA, 19 nt, Artificial Sequence
  Description of Artificial Sequence: Synthetic oligonucleotide
  Sense strand starting at position 953 of SEQ ID NO: 1241925
uugguuaaugcaugacgau

SEQ ID NO: 1310359 - RNA, 19 nt, Artificial Sequence
  Description of Artificial Sequence: Synthetic oligonucleotide
  Antisense strand to SEQ ID NO: 1310358
aucgucaugcauuaaccaa

SEQ ID NO: 1310360 - RNA, 19 nt, Artificial Sequence
  Description of Artificial Sequence: Synthetic oligonucleotide
  Sense strand starting at position 1512 of SEQ ID NO: 1241925
gugccuuucuuaccuuuga

SEQ ID NO: 1310361 - RNA, 19 nt, Artificial Sequence
  Description of Artificial Sequence: Synthetic oligonucleotide
  Antisense strand to SEQ ID NO: 1310360
ucaaagguaagaaaggcac

SEQ ID NO: 1310362 - RNA, 19 nt, Artificial Sequence
  Description of Artificial Sequence: Synthetic oligonucleotide
  Sense strand starting at position 1529 of SEQ ID NO: 1241925
gagguccuagcauguauaa

SEQ ID NO: 1310363 - RNA, 19 nt, Artificial Sequence
  Description of Artificial Sequence: Synthetic oligonucleotide
  Antisense strand to SEQ ID NO: 1310362
uuauacaugcuaggaccuc

SEQ ID NO: 1310364 - RNA, 19 nt, Artificial Sequence
  Description of Artificial Sequence: Synthetic oligonucleotide
  Sense strand starting at position 1593 of SEQ ID NO: 1241925
gguaucuuuaguguucguu

SEQ ID NO: 1310365 - RNA, 19 nt, Artificial Sequence
  Description of Artificial Sequence: Synthetic oligonucleotide
  Antisense strand to SEQ ID NO: 1310364
aacgaacacuaaagauacc

SEQ ID NO: 1310366 - RNA, 19 nt, Artificial Sequence
  Description of Artificial Sequence: Synthetic oligonucleotide
  Sense strand starting at position 1594 of SEQ ID NO: 1241925
guaucuuuaguguucguuu

SEQ ID NO: 1310367 - RNA, 19 nt, Artificial Sequence
  Description of Artificial Sequence: Synthetic oligonucleotide
  Antisense strand to SEQ ID NO: 1310366
aaacgaacacuaaagauac

SEQ ID NO: 1310368 - RNA, 19 nt, Artificial Sequence
  Description of Artificial Sequence: Synthetic oligonucleotide
  Sense strand starting at position 1599 of SEQ ID NO: 1241925
uuuaguguucguuuaguca

SEQ ID NO: 1310369 - RNA, 19 nt, Artificial Sequence
  Description of Artificial Sequence: Synthetic oligonucleotide
  Antisense strand to SEQ ID NO: 1310368
ugacuaaacgaacacuaaa

SEQ ID NO: 1310370 - RNA, 19 nt, Artificial Sequence
  Description of Artificial Sequence: Synthetic oligonucleotide
  Sense strand starting at position 1607 of SEQ ID NO: 1241925
ucguuuagucaugauacag

SEQ ID NO: 1310371 - RNA, 19 nt, Artificial Sequence
  Description of Artificial Sequence: Synthetic oligonucleotide
  Antisense strand to SEQ ID NO: 1310370
cuguaucaugacuaaacga

SEQ ID NO: 1310372 - RNA, 19 nt, Artificial Sequence
  Description of Artificial Sequence: Synthetic oligonucleotide
  Sense strand starting at position 1613 of SEQ ID NO: 1241925
agucaugauacagggcuaa

SEQ ID NO: 1310373 - RNA, 19 nt, Artificial Sequence
  Description of Artificial Sequence: Synthetic oligonucleotide
  Antisense strand to SEQ ID NO: 1310372
uuagcccuguaucaugacu

SEQ ID NO: 1310374 - RNA, 19 nt, Artificial Sequence
  Description of Artificial Sequence: Synthetic oligonucleotide
  Sense strand starting at position 1778 of SEQ ID NO: 1241925
ugggccagaucccuguuua

SEQ ID NO: 1310375 - RNA, 19 nt, Artificial Sequence
  Description of Artificial Sequence: Synthetic oligonucleotide
  Antisense strand to SEQ ID NO: 1310374
uaaacagggaucuggccca

SEQ ID NO: 1310376 - RNA, 19 nt, Artificial Sequence
  Description of Artificial Sequence: Synthetic oligonucleotide
  Sense strand starting at position 1779 of SEQ ID NO: 1241925
gggccagaucccuguuuac

SEQ ID NO: 1310377 - RNA, 19 nt, Artificial Sequence
  Description of Artificial Sequence: Synthetic oligonucleotide
  Antisense strand to SEQ ID NO: 1310376
guaaacagggaucuggccc

SEQ ID NO: 1310378 - RNA, 19 nt, Artificial Sequence
  Description of Artificial Sequence: Synthetic oligonucleotide
  Sense strand starting at position 1870 of SEQ ID NO: 1241925
ccacgaaaguaauuacaaa

SEQ ID NO: 1310379 - RNA, 19 nt, Artificial Sequence
  Description of Artificial Sequence: Synthetic oligonucleotide
  Antisense strand to SEQ ID NO: 1310378
uuuguaauuacuuucgugg

SEQ ID NO: 1310380 - RNA, 19 nt, Artificial Sequence
  Description of Artificial Sequence: Synthetic oligonucleotide
  Sense strand starting at position 2721 of SEQ ID NO: 1241925
ggaguaaguccauaagcac

SEQ ID NO: 1310381 - RNA, 19 nt, Artificial Sequence
  Description of Artificial Sequence: Synthetic oligonucleotide
  Antisense strand to SEQ ID NO: 1310380
gugcuuauggacuuacucc

SEQ ID NO: 1310382 - RNA, 19 nt, Artificial Sequence
  Description of Artificial Sequence: Synthetic oligonucleotide
  Sense strand starting at position 2743 of SEQ ID NO: 1241925
uggauuaucucagccagca

SEQ ID NO: 1310383 - RNA, 19 nt, Artificial Sequence
  Description of Artificial Sequence: Synthetic oligonucleotide
  Antisense strand to SEQ ID NO: 1310382
ugcuggcugagauaaucca

SEQ ID NO: 1310384 - RNA, 19 nt, Artificial Sequence
  Description of Artificial Sequence: Synthetic oligonucleotide
  Sense strand starting at position 2784 of SEQ ID NO: 1241925
ccauuaugaggcugaauua

SEQ ID NO: 1310385 - RNA, 19 nt, Artificial Sequence
  Description of Artificial Sequence: Synthetic oligonucleotide
  Antisense strand to SEQ ID NO: 1310384
uaauucagccucauaaugg

SEQ ID NO: 1310386 - RNA, 19 nt, Artificial Sequence
  Description of Artificial Sequence: Synthetic oligonucleotide
  Sense strand starting at position 2870 of SEQ ID NO: 1241925
ggagcauuguuucucugaa

SEQ ID NO: 1310387 - RNA, 19 nt, Artificial Sequence
  Description of Artificial Sequence: Synthetic oligonucleotide
  Antisense strand to SEQ ID NO: 1310386
uucagagaaacaaugcucc

SEQ ID NO: 1310388 - RNA, 19 nt, Artificial Sequence
  Description of Artificial Sequence: Synthetic oligonucleotide
  Sense strand starting at position 2871 of SEQ ID NO: 1241925
gagcauuguuucucugaau

SEQ ID NO: 1310389 - RNA, 19 nt, Artificial Sequence
  Description of Artificial Sequence: Synthetic oligonucleotide
  Antisense strand to SEQ ID NO: 1310388
auucagagaaacaaugcuc

SEQ ID NO: 1310390 - RNA, 19 nt, Artificial Sequence
  Description of Artificial Sequence: Synthetic oligonucleotide
  Sense strand starting at position 2872 of SEQ ID NO: 1241925
agcauuguuucucugaaua

SEQ ID NO: 1310391 - RNA, 19 nt, Artificial Sequence
  Description of Artificial Sequence: Synthetic oligonucleotide
  Antisense strand to SEQ ID NO: 1310390
uauucagagaaacaaugcu

SEQ ID NO: 1310392 - RNA, 19 nt, Artificial Sequence
  Description of Artificial Sequence: Synthetic oligonucleotide
  Sense strand starting at position 3044 of SEQ ID NO: 1241925
caggcaugauagccauaca

SEQ ID NO: 1310393 - RNA, 19 nt, Artificial Sequence
  Description of Artificial Sequence: Synthetic oligonucleotide
  Antisense strand to SEQ ID NO: 1310392
uguauggcuaucaugccug

SEQ ID NO: 1310394 - RNA, 19 nt, Artificial Sequence
  Description of Artificial Sequence: Synthetic oligonucleotide
  Sense strand starting at position 3068 of SEQ ID NO: 1241925
ggguuuaaacuccacucau

SEQ ID NO: 1310395 - RNA, 19 nt, Artificial Sequence
  Description of Artificial Sequence: Synthetic oligonucleotide
  Antisense strand to SEQ ID NO: 1310394
augaguggaguuuaaaccc

SEQ ID NO: 1310396 - RNA, 19 nt, Artificial Sequence
  Description of Artificial Sequence: Synthetic oligonucleotide
  Sense strand starting at position 3090 of SEQ ID NO: 1241925
cuaacuuugggauguguga

SEQ ID NO: 1310397 - RNA, 19 nt, Artificial Sequence
  Description of Artificial Sequence: Synthetic oligonucleotide
  Antisense strand to SEQ ID NO: 1310396
ucacacaucccaaaguuag

SEQ ID NO: 1310398 - RNA, 19 nt, Artificial Sequence
  Description of Artificial Sequence: Synthetic oligonucleotide
  Sense strand starting at position 3833 of SEQ ID NO: 1241925
agaagaucaaaucggguau

SEQ ID NO: 1310399 - RNA, 19 nt, Artificial Sequence
  Description of Artificial Sequence: Synthetic oligonucleotide
  Antisense strand to SEQ ID NO: 1310398
auacccgauuugaucuucu

SEQ ID NO: 1310400 - RNA, 19 nt, Artificial Sequence
  Description of Artificial Sequence: Synthetic oligonucleotide
  Sense strand starting at position 3839 of SEQ ID NO: 1241925
ucaaaucggguaugaagaa

SEQ ID NO: 1310401 - RNA, 19 nt, Artificial Sequence
  Description of Artificial Sequence: Synthetic oligonucleotide
  Antisense strand to SEQ ID NO: 1310400
uucuucauacccgauuuga

SEQ ID NO: 1310402 - RNA, 19 nt, Artificial Sequence
  Description of Artificial Sequence: Synthetic oligonucleotide
  Sense strand starting at position 146 of SEQ ID NO: 1241926
uaugcuaucuguuugugau

SEQ ID NO: 1310403 - RNA, 19 nt, Artificial Sequence
  Description of Artificial Sequence: Synthetic oligonucleotide
  Antisense strand to SEQ ID NO: 1310402
aucacaaacagauagcaua

SEQ ID NO: 1310404 - RNA, 19 nt, Artificial Sequence
  Description of Artificial Sequence: Synthetic oligonucleotide
  Sense strand starting at position 147 of SEQ ID NO: 1241926
augcuaucuguuugugaua

SEQ ID NO: 1310405 - RNA, 19 nt, Artificial Sequence
  Description of Artificial Sequence: Synthetic oligonucleotide
  Antisense strand to SEQ ID NO: 1310404
uaucacaaacagauagcau

SEQ ID NO: 1310406 - RNA, 19 nt, Artificial Sequence
  Description of Artificial Sequence: Synthetic oligonucleotide
  Sense strand starting at position 148 of SEQ ID NO: 1241926
ugcuaucuguuugugauaa

SEQ ID NO: 1310407 - RNA, 19 nt, Artificial Sequence
  Description of Artificial Sequence: Synthetic oligonucleotide
  Antisense strand to SEQ ID NO: 1310406
uuaucacaaacagauagca

SEQ ID NO: 1310408 - RNA, 19 nt, Artificial Sequence
  Description of Artificial Sequence: Synthetic oligonucleotide
  Sense strand starting at position 160 of SEQ ID NO: 1241926
gugauaaacucuguugccu

SEQ ID NO: 1310409 - RNA, 19 nt, Artificial Sequence
  Description of Artificial Sequence: Synthetic oligonucleotide
  Antisense strand to SEQ ID NO: 1310408
aggcaacagaguuuaucac

SEQ ID NO: 1310410 - RNA, 19 nt, Artificial Sequence
  Description of Artificial Sequence: Synthetic oligonucleotide
  Sense strand starting at position 500 of SEQ ID NO: 1241926
ucuaauugagacuguuuau

SEQ ID NO: 1310411 - RNA, 19 nt, Artificial Sequence
  Description of Artificial Sequence: Synthetic oligonucleotide
  Antisense strand to SEQ ID NO: 1310410
auaaacagucucaauuaga

SEQ ID NO: 1310412 - RNA, 19 nt, Artificial Sequence
  Description of Artificial Sequence: Synthetic oligonucleotide
  Sense strand starting at position 549 of SEQ ID NO: 1241926
ugguucucuguugguuaau

SEQ ID NO: 1310413 - RNA, 19 nt, Artificial Sequence
  Description of Artificial Sequence: Synthetic oligonucleotide
  Antisense strand to SEQ ID NO: 1310412
auuaaccaacagagaacca

SEQ ID NO: 1310414 - RNA, 19 nt, Artificial Sequence
  Description of Artificial Sequence: Synthetic oligonucleotide
  Sense strand starting at position 550 of SEQ ID NO: 1241926
gguucucuguugguuaaug

SEQ ID NO: 1310415 - RNA, 19 nt, Artificial Sequence
  Description of Artificial Sequence: Synthetic oligonucleotide
  Antisense strand to SEQ ID NO: 1310414
cauuaaccaacagagaacc

SEQ ID NO: 1310416 - RNA, 19 nt, Artificial Sequence
  Description of Artificial Sequence: Synthetic oligonucleotide
  Sense strand starting at position 559 of SEQ ID NO: 1241926
uugguuaaugcaugacgau

SEQ ID NO: 1310417 - RNA, 19 nt, Artificial Sequence
  Description of Artificial Sequence: Synthetic oligonucleotide
  Antisense strand to SEQ ID NO: 1310416
aucgucaugcauuaaccaa

SEQ ID NO: 1310418 - RNA, 19 nt, Artificial Sequence
  Description of Artificial Sequence: Synthetic oligonucleotide
  Sense strand starting at position 712 of SEQ ID NO: 1241926
gcucaaauaucagagugau

SEQ ID NO: 1310419 - RNA, 19 nt, Artificial Sequence
  Description of Artificial Sequence: Synthetic oligonucleotide
  Antisense strand to SEQ ID NO: 1310418
aucacucugauauuugagc

SEQ ID NO: 1310420 - RNA, 19 nt, Artificial Sequence
  Description of Artificial Sequence: Synthetic oligonucleotide
  Sense strand starting at position 1118 of SEQ ID NO: 1241926
gugccuuucuuaccuuuga

SEQ ID NO: 1310421 - RNA, 19 nt, Artificial Sequence
  Description of Artificial Sequence: Synthetic oligonucleotide
  Antisense strand to SEQ ID NO: 1310420
ucaaagguaagaaaggcac

SEQ ID NO: 1310422 - RNA, 19 nt, Artificial Sequence
  Description of Artificial Sequence: Synthetic oligonucleotide
  Sense strand starting at position 1135 of SEQ ID NO: 1241926
gagguccuagcauguauaa

SEQ ID NO: 1310423 - RNA, 19 nt, Artificial Sequence
  Description of Artificial Sequence: Synthetic oligonucleotide
  Antisense strand to SEQ ID NO: 1310422
uuauacaugcuaggaccuc

SEQ ID NO: 1310424 - RNA, 19 nt, Artificial Sequence
  Description of Artificial Sequence: Synthetic oligonucleotide
  Sense strand starting at position 1199 of SEQ ID NO: 1241926
gguaucuuuaguguucguu

SEQ ID NO: 1310425 - RNA, 19 nt, Artificial Sequence
  Description of Artificial Sequence: Synthetic oligonucleotide
  Antisense strand to SEQ ID NO: 1310424
aacgaacacuaaagauacc

SEQ ID NO: 1310426 - RNA, 19 nt, Artificial Sequence
  Description of Artificial Sequence: Synthetic oligonucleotide
  Sense strand starting at position 1200 of SEQ ID NO: 1241926
guaucuuuaguguucguuu

SEQ ID NO: 1310427 - RNA, 19 nt, Artificial Sequence
  Description of Artificial Sequence: Synthetic oligonucleotide
  Antisense strand to SEQ ID NO: 1310426
aaacgaacacuaaagauac

SEQ ID NO: 1310428 - RNA, 19 nt, Artificial Sequence
  Description of Artificial Sequence: Synthetic oligonucleotide
  Sense strand starting at position 1201 of SEQ ID NO: 1241926
uaucuuuaguguucguuua

SEQ ID NO: 1310429 - RNA, 19 nt, Artificial Sequence
  Description of Artificial Sequence: Synthetic oligonucleotide
  Antisense strand to SEQ ID NO: 1310428
uaaacgaacacuaaagaua

SEQ ID NO: 1310430 - RNA, 19 nt, Artificial Sequence
  Description of Artificial Sequence: Synthetic oligonucleotide
  Sense strand starting at position 1205 of SEQ ID NO: 1241926
uuuaguguucguuuaguca

SEQ ID NO: 1310431 - RNA, 19 nt, Artificial Sequence
  Description of Artificial Sequence: Synthetic oligonucleotide
  Antisense strand to SEQ ID NO: 1310430
ugacuaaacgaacacuaaa

SEQ ID NO: 1310432 - RNA, 19 nt, Artificial Sequence
  Description of Artificial Sequence: Synthetic oligonucleotide
  Sense strand starting at position 1208 of SEQ ID NO: 1241926
aguguucguuuagucauga

SEQ ID NO: 1310433 - RNA, 19 nt, Artificial Sequence
  Description of Artificial Sequence: Synthetic oligonucleotide
  Antisense strand to SEQ ID NO: 1310432
ucaugacuaaacgaacacu

SEQ ID NO: 1310434 - RNA, 19 nt, Artificial Sequence
  Description of Artificial Sequence: Synthetic oligonucleotide
  Sense strand starting at position 1209 of SEQ ID NO: 1241926
guguucguuuagucaugau

SEQ ID NO: 1310435 - RNA, 19 nt, Artificial Sequence
  Description of Artificial Sequence: Synthetic oligonucleotide
  Antisense strand to SEQ ID NO: 1310434
aucaugacuaaacgaacac

SEQ ID NO: 1310436 - RNA, 19 nt, Artificial Sequence
  Description of Artificial Sequence: Synthetic oligonucleotide
  Sense strand starting at position 1213 of SEQ ID NO: 1241926
ucguuuagucaugauacag

SEQ ID NO: 1310437 - RNA, 19 nt, Artificial Sequence
  Description of Artificial Sequence: Synthetic oligonucleotide
  Antisense strand to SEQ ID NO: 1310436
cuguaucaugacuaaacga

SEQ ID NO: 1310438 - RNA, 19 nt, Artificial Sequence
  Description of Artificial Sequence: Synthetic oligonucleotide
  Sense strand starting at position 1219 of SEQ ID NO: 1241926
agucaugauacagggcuaa

SEQ ID NO: 1310439 - RNA, 19 nt, Artificial Sequence
  Description of Artificial Sequence: Synthetic oligonucleotide
  Antisense strand to SEQ ID NO: 1310438
uuagcccuguaucaugacu

SEQ ID NO: 1310440 - RNA, 19 nt, Artificial Sequence
  Description of Artificial Sequence: Synthetic oligonucleotide
  Sense strand starting at position 1384 of SEQ ID NO: 1241926
ugggccagaucccuguuua

SEQ ID NO: 1310441 - RNA, 19 nt, Artificial Sequence
  Description of Artificial Sequence: Synthetic oligonucleotide
  Antisense strand to SEQ ID NO: 1310440
uaaacagggaucuggccca

SEQ ID NO: 1310442 - RNA, 19 nt, Artificial Sequence
  Description of Artificial Sequence: Synthetic oligonucleotide
  Sense strand starting at position 1385 of SEQ ID NO: 1241926
gggccagaucccuguuuac

SEQ ID NO: 1310443 - RNA, 19 nt, Artificial Sequence
  Description of Artificial Sequence: Synthetic oligonucleotide
  Antisense strand to SEQ ID NO: 1310442
guaaacagggaucuggccc

SEQ ID NO: 1310444 - RNA, 19 nt, Artificial Sequence
  Description of Artificial Sequence: Synthetic oligonucleotide
  Sense strand starting at position 1476 of SEQ ID NO: 1241926
ccacgaaaguaauuacaaa

SEQ ID NO: 1310445 - RNA, 19 nt, Artificial Sequence
  Description of Artificial Sequence: Synthetic oligonucleotide
  Antisense strand to SEQ ID NO: 1310444
uuuguaauuacuuucgugg

SEQ ID NO: 1310446 - RNA, 19 nt, Artificial Sequence
  Description of Artificial Sequence: Synthetic oligonucleotide
  Sense strand starting at position 2228 of SEQ ID NO: 1241926
ggccuuccgugauuccgaa

SEQ ID NO: 1310447 - RNA, 19 nt, Artificial Sequence
  Description of Artificial Sequence: Synthetic oligonucleotide
  Antisense strand to SEQ ID NO: 1310446
uucggaaucacggaaggcc

SEQ ID NO: 1310448 - RNA, 19 nt, Artificial Sequence
  Description of Artificial Sequence: Synthetic oligonucleotide
  Sense strand starting at position 2327 of SEQ ID NO: 1241926
ggaguaaguccauaagcac

SEQ ID NO: 1310449 - RNA, 19 nt, Artificial Sequence
  Description of Artificial Sequence: Synthetic oligonucleotide
  Antisense strand to SEQ ID NO: 1310448
gugcuuauggacuuacucc

SEQ ID NO: 1310450 - RNA, 19 nt, Artificial Sequence
  Description of Artificial Sequence: Synthetic oligonucleotide
  Sense strand starting at position 2349 of SEQ ID NO: 1241926
uggauuaucucagccagca

SEQ ID NO: 1310451 - RNA, 19 nt, Artificial Sequence
  Description of Artificial Sequence: Synthetic oligonucleotide
  Antisense strand to SEQ ID NO: 1310450
ugcuggcugagauaaucca

SEQ ID NO: 1310452 - RNA, 19 nt, Artificial Sequence
  Description of Artificial Sequence: Synthetic oligonucleotide
  Sense strand starting at position 2390 of SEQ ID NO: 1241926
ccauuaugaggcugaauua

SEQ ID NO: 1310453 - RNA, 19 nt, Artificial Sequence
  Description of Artificial Sequence: Synthetic oligonucleotide
  Antisense strand to SEQ ID NO: 1310452
uaauucagccucauaaugg

SEQ ID NO: 1310454 - RNA, 19 nt, Artificial Sequence
  Description of Artificial Sequence: Synthetic oligonucleotide
  Sense strand starting at position 2476 of SEQ ID NO: 1241926
ggagcauuguuucucugaa

SEQ ID NO: 1310455 - RNA, 19 nt, Artificial Sequence
  Description of Artificial Sequence: Synthetic oligonucleotide
  Antisense strand to SEQ ID NO: 1310454
uucagagaaacaaugcucc

SEQ ID NO: 1310456 - RNA, 19 nt, Artificial Sequence
  Description of Artificial Sequence: Synthetic oligonucleotide
  Sense strand starting at position 2477 of SEQ ID NO: 1241926
gagcauuguuucucugaau

SEQ ID NO: 1310457 - RNA, 19 nt, Artificial Sequence
  Description of Artificial Sequence: Synthetic oligonucleotide
  Antisense strand to SEQ ID NO: 1310456
auucagagaaacaaugcuc

SEQ ID NO: 1310458 - RNA, 19 nt, Artificial Sequence
  Description of Artificial Sequence: Synthetic oligonucleotide
  Sense strand starting at position 2478 of SEQ ID NO: 1241926
agcauuguuucucugaaua

SEQ ID NO: 1310459 - RNA, 19 nt, Artificial Sequence
  Description of Artificial Sequence: Synthetic oligonucleotide
  Antisense strand to SEQ ID NO: 1310458
uauucagagaaacaaugcu

SEQ ID NO: 1310460 - RNA, 19 nt, Artificial Sequence
  Description of Artificial Sequence: Synthetic oligonucleotide
  Sense strand starting at position 2650 of SEQ ID NO: 1241926
caggcaugauagccauaca

SEQ ID NO: 1310461 - RNA, 19 nt, Artificial Sequence
  Description of Artificial Sequence: Synthetic oligonucleotide
  Antisense strand to SEQ ID NO: 1310460
uguauggcuaucaugccug

SEQ ID NO: 1310462 - RNA, 19 nt, Artificial Sequence
  Description of Artificial Sequence: Synthetic oligonucleotide
  Sense strand starting at position 2674 of SEQ ID NO: 1241926
ggguuuaaacuccacucau

SEQ ID NO: 1310463 - RNA, 19 nt, Artificial Sequence
  Description of Artificial Sequence: Synthetic oligonucleotide
  Antisense strand to SEQ ID NO: 1310462
augaguggaguuuaaaccc

SEQ ID NO: 1310464 - RNA, 19 nt, Artificial Sequence
  Description of Artificial Sequence: Synthetic oligonucleotide
  Sense strand starting at position 2696 of SEQ ID NO: 1241926
cuaacuuugggauguguga

SEQ ID NO: 1310465 - RNA, 19 nt, Artificial Sequence
  Description of Artificial Sequence: Synthetic oligonucleotide
  Antisense strand to SEQ ID NO: 1310464
ucacacaucccaaaguuag

SEQ ID NO: 1310466 - RNA, 19 nt, Artificial Sequence
  Description of Artificial Sequence: Synthetic oligonucleotide
  Sense strand starting at position 3439 of SEQ ID NO: 1241926
agaagaucaaaucggguau

SEQ ID NO: 1310467 - RNA, 19 nt, Artificial Sequence
  Description of Artificial Sequence: Synthetic oligonucleotide
  Antisense strand to SEQ ID NO: 1310466
auacccgauuugaucuucu

SEQ ID NO: 1310468 - RNA, 19 nt, Artificial Sequence
  Description of Artificial Sequence: Synthetic oligonucleotide
  Sense strand starting at position 3445 of SEQ ID NO: 1241926
ucaaaucggguaugaagaa

SEQ ID NO: 1310469 - RNA, 19 nt, Artificial Sequence
  Description of Artificial Sequence: Synthetic oligonucleotide
  Antisense strand to SEQ ID NO: 1310468
uucuucauacccgauuuga

SEQ ID NO: 1310470 - RNA, 19 nt, Artificial Sequence
  Description of Artificial Sequence: Synthetic oligonucleotide
  Sense strand starting at position 3650 of SEQ ID NO: 1241926
ggcugagauuugggaggca

SEQ ID NO: 1310471 - RNA, 19 nt, Artificial Sequence
  Description of Artificial Sequence: Synthetic oligonucleotide
  Antisense strand to SEQ ID NO: 1310470
ugccucccaaaucucagcc

SEQ ID NO: 1310472 - RNA, 19 nt, Artificial Sequence
  Description of Artificial Sequence: Synthetic oligonucleotide
  Sense strand starting at position 3746 of SEQ ID NO: 1241926
aaaugugggauggguuuau

SEQ ID NO: 1310473 - RNA, 19 nt, Artificial Sequence
  Description of Artificial Sequence: Synthetic oligonucleotide
  Antisense strand to SEQ ID NO: 1310472
auaaacccaucccacauuu

SEQ ID NO: 1310474 - RNA, 19 nt, Artificial Sequence
  Description of Artificial Sequence: Synthetic oligonucleotide
  Sense strand starting at position 3845 of SEQ ID NO: 1241926
cuuucuucuuaggaaauug

SEQ ID NO: 1310475 - RNA, 19 nt, Artificial Sequence
  Description of Artificial Sequence: Synthetic oligonucleotide
  Antisense strand to SEQ ID NO: 1310474
caauuuccuaagaagaaag

SEQ ID NO: 1310476 - RNA, 19 nt, Artificial Sequence
  Description of Artificial Sequence: Synthetic oligonucleotide
  Sense strand starting at position 3853 of SEQ ID NO: 1241926
uuaggaaauuguugggaug

SEQ ID NO: 1310477 - RNA, 19 nt, Artificial Sequence
  Description of Artificial Sequence: Synthetic oligonucleotide
  Antisense strand to SEQ ID NO: 1310476
caucccaacaauuuccuaa

SEQ ID NO: 1310478 - RNA, 19 nt, Artificial Sequence
  Description of Artificial Sequence: Synthetic oligonucleotide
  Sense strand starting at position 3896 of SEQ ID NO: 1241926
uggaaacauuaccaaagaa

SEQ ID NO: 1310479 - RNA, 19 nt, Artificial Sequence
  Description of Artificial Sequence: Synthetic oligonucleotide
  Antisense strand to SEQ ID NO: 1310478
uucuuugguaauguuucca

SEQ ID NO: 1310480 - RNA, 19 nt, Artificial Sequence
  Description of Artificial Sequence: Synthetic oligonucleotide
  Sense strand starting at position 3979 of SEQ ID NO: 1241926
auauaauggugauaacaag

SEQ ID NO: 1310481 - RNA, 19 nt, Artificial Sequence
  Description of Artificial Sequence: Synthetic oligonucleotide
  Antisense strand to SEQ ID NO: 1310480
cuuguuaucaccauuauau

SEQ ID NO: 1310482 - RNA, 19 nt, Artificial Sequence
  Description of Artificial Sequence: Synthetic oligonucleotide
  Sense strand starting at position 199 of SEQ ID NO: 1241927
gcaacaucaggguggaaau

SEQ ID NO: 1310483 - RNA, 19 nt, Artificial Sequence
  Description of Artificial Sequence: Synthetic oligonucleotide
  Antisense strand to SEQ ID NO: 1310482
auuuccacccugauguugc

SEQ ID NO: 1310484 - RNA, 19 nt, Artificial Sequence
  Description of Artificial Sequence: Synthetic oligonucleotide
  Sense strand starting at position 267 of SEQ ID NO: 1241927
cccggagacuaucacauua

SEQ ID NO: 1310485 - RNA, 19 nt, Artificial Sequence
  Description of Artificial Sequence: Synthetic oligonucleotide
  Antisense strand to SEQ ID NO: 1310484
uaaugugauagucuccggg

SEQ ID NO: 1310486 - RNA, 19 nt, Artificial Sequence
  Description of Artificial Sequence: Synthetic oligonucleotide
  Sense strand starting at position 269 of SEQ ID NO: 1241927
cggagacuaucacauuacu

SEQ ID NO: 1310487 - RNA, 19 nt, Artificial Sequence
  Description of Artificial Sequence: Synthetic oligonucleotide
  Antisense strand to SEQ ID NO: 1310486
aguaaugugauagucuccg

SEQ ID NO: 1310488 - RNA, 19 nt, Artificial Sequence
  Description of Artificial Sequence: Synthetic oligonucleotide
  Sense strand starting at position 340 of SEQ ID NO: 1241927
ccaauauaagcaugguuac

SEQ ID NO: 1310489 - RNA, 19 nt, Artificial Sequence
  Description of Artificial Sequence: Synthetic oligonucleotide
  Antisense strand to SEQ ID NO: 1310488
guaaccaugcuuauauugg

SEQ ID NO: 1310490 - RNA, 19 nt, Artificial Sequence
  Description of Artificial Sequence: Synthetic oligonucleotide
  Sense strand starting at position 343 of SEQ ID NO: 1241927
auauaagcaugguuacauu

SEQ ID NO: 1310491 - RNA, 19 nt, Artificial Sequence
  Description of Artificial Sequence: Synthetic oligonucleotide
  Antisense strand to SEQ ID NO: 1310490
aauguaaccaugcuuauau

SEQ ID NO: 1310492 - RNA, 19 nt, Artificial Sequence
  Description of Artificial Sequence: Synthetic oligonucleotide
  Sense strand starting at position 395 of SEQ ID NO: 1241927
ccaugugacaggugucuca

SEQ ID NO: 1310493 - RNA, 19 nt, Artificial Sequence
  Description of Artificial Sequence: Synthetic oligonucleotide
  Antisense strand to SEQ ID NO: 1310492
ugagacaccugucacaugg

SEQ ID NO: 1310494 - RNA, 19 nt, Artificial Sequence
  Description of Artificial Sequence: Synthetic oligonucleotide
  Sense strand starting at position 404 of SEQ ID NO: 1241927
aggugucucaggugucauc

SEQ ID NO: 1310495 - RNA, 19 nt, Artificial Sequence
  Description of Artificial Sequence: Synthetic oligonucleotide
  Antisense strand to SEQ ID NO: 1310494
gaugacaccugagacaccu

SEQ ID NO: 1310496 - RNA, 19 nt, Artificial Sequence
  Description of Artificial Sequence: Synthetic oligonucleotide
  Sense strand starting at position 423 of SEQ ID NO: 1241927
ucagaugugccauguuaua

SEQ ID NO: 1310497 - RNA, 19 nt, Artificial Sequence
  Description of Artificial Sequence: Synthetic oligonucleotide
  Antisense strand to SEQ ID NO: 1310496
uauaacauggcacaucuga

SEQ ID NO: 1310498 - RNA, 19 nt, Artificial Sequence
  Description of Artificial Sequence: Synthetic oligonucleotide
  Sense strand starting at position 500 of SEQ ID NO: 1241927
auggacuuauguuaacaca

SEQ ID NO: 1310499 - RNA, 19 nt, Artificial Sequence
  Description of Artificial Sequence: Synthetic oligonucleotide
  Antisense strand to SEQ ID NO: 1310498
uguguuaacauaaguccau

SEQ ID NO: 1310500 - RNA, 19 nt, Artificial Sequence
  Description of Artificial Sequence: Synthetic oligonucleotide
  Sense strand starting at position 671 of SEQ ID NO: 1241927
cugaaaucauucccgaaua

SEQ ID NO: 1310501 - RNA, 19 nt, Artificial Sequence
  Description of Artificial Sequence: Synthetic oligonucleotide
  Antisense strand to SEQ ID NO: 1310500
uauucgggaaugauuucag

SEQ ID NO: 1310502 - RNA, 19 nt, Artificial Sequence
  Description of Artificial Sequence: Synthetic oligonucleotide
  Sense strand starting at position 696 of SEQ ID NO: 1241927
gucaaauuaucacuugguu

SEQ ID NO: 1310503 - RNA, 19 nt, Artificial Sequence
  Description of Artificial Sequence: Synthetic oligonucleotide
  Antisense strand to SEQ ID NO: 1310502
aaccaagugauaauuugac

SEQ ID NO: 1310504 - RNA, 19 nt, Artificial Sequence
  Description of Artificial Sequence: Synthetic oligonucleotide
  Sense strand starting at position 723 of SEQ ID NO: 1241927
auaggacaacccuguauua

SEQ ID NO: 1310505 - RNA, 19 nt, Artificial Sequence
  Description of Artificial Sequence: Synthetic oligonucleotide
  Antisense strand to SEQ ID NO: 1310504
uaauacaggguuguccuau

SEQ ID NO: 1310506 - RNA, 19 nt, Artificial Sequence
  Description of Artificial Sequence: Synthetic oligonucleotide
  Sense strand starting at position 757 of SEQ ID NO: 1241927
caaggacugcucgguucua

SEQ ID NO: 1310507 - RNA, 19 nt, Artificial Sequence
  Description of Artificial Sequence: Synthetic oligonucleotide
  Antisense strand to SEQ ID NO: 1310506
uagaaccgagcaguccuug

SEQ ID NO: 1310508 - RNA, 19 nt, Artificial Sequence
  Description of Artificial Sequence: Synthetic oligonucleotide
  Sense strand starting at position 758 of SEQ ID NO: 1241927
aaggacugcucgguucuaa

SEQ ID NO: 1310509 - RNA, 19 nt, Artificial Sequence
  Description of Artificial Sequence: Synthetic oligonucleotide
  Antisense strand to SEQ ID NO: 1310508
uuagaaccgagcaguccuu

SEQ ID NO: 1310510 - RNA, 19 nt, Artificial Sequence
  Description of Artificial Sequence: Synthetic oligonucleotide
  Sense strand starting at position 813 of SEQ ID NO: 1241927
ggcaguauugacuguaaac

SEQ ID NO: 1310511 - RNA, 19 nt, Artificial Sequence
  Description of Artificial Sequence: Synthetic oligonucleotide
  Antisense strand to SEQ ID NO: 1310510
guuuacagucaauacugcc

SEQ ID NO: 1310512 - RNA, 19 nt, Artificial Sequence
  Description of Artificial Sequence: Synthetic oligonucleotide
  Sense strand starting at position 867 of SEQ ID NO: 1241927
accaucuacugucuaaagu

SEQ ID NO: 1310513 - RNA, 19 nt, Artificial Sequence
  Description of Artificial Sequence: Synthetic oligonucleotide
  Antisense strand to SEQ ID NO: 1310512
acuuuagacaguagauggu

SEQ ID NO: 1310514 - RNA, 19 nt, Artificial Sequence
  Description of Artificial Sequence: Synthetic oligonucleotide
  Sense strand starting at position 868 of SEQ ID NO: 1241927
ccaucuacugucuaaaguu

SEQ ID NO: 1310515 - RNA, 19 nt, Artificial Sequence
  Description of Artificial Sequence: Synthetic oligonucleotide
  Antisense strand to SEQ ID NO: 1310514
aacuuuagacaguagaugg

SEQ ID NO: 1310516 - RNA, 19 nt, Artificial Sequence
  Description of Artificial Sequence: Synthetic oligonucleotide
  Sense strand starting at position 950 of SEQ ID NO: 1241927
ugagaugaguucuagauca

SEQ ID NO: 1310517 - RNA, 19 nt, Artificial Sequence
  Description of Artificial Sequence: Synthetic oligonucleotide
  Antisense strand to SEQ ID NO: 1310516
ugaucuagaacucaucuca

SEQ ID NO: 1310518 - RNA, 19 nt, Artificial Sequence
  Description of Artificial Sequence: Synthetic oligonucleotide
  Sense strand starting at position 961 of SEQ ID NO: 1241927
cuagaucaggacugaucuu

SEQ ID NO: 1310519 - RNA, 19 nt, Artificial Sequence
  Description of Artificial Sequence: Synthetic oligonucleotide
  Antisense strand to SEQ ID NO: 1310518
aagaucaguccugaucuag

SEQ ID NO: 1310520 - RNA, 19 nt, Artificial Sequence
  Description of Artificial Sequence: Synthetic oligonucleotide
  Sense strand starting at position 1052 of SEQ ID NO: 1241927
ucaccugcggcgucuuaaa

SEQ ID NO: 1310521 - RNA, 19 nt, Artificial Sequence
  Description of Artificial Sequence: Synthetic oligonucleotide
  Antisense strand to SEQ ID NO: 1310520
uuuaagacgccgcagguga

SEQ ID NO: 1310522 - RNA, 19 nt, Artificial Sequence
  Description of Artificial Sequence: Synthetic oligonucleotide
  Sense strand starting at position 1106 of SEQ ID NO: 1241927
aauccagaucucugggagu

SEQ ID NO: 1310523 - RNA, 19 nt, Artificial Sequence
  Description of Artificial Sequence: Synthetic oligonucleotide
  Antisense strand to SEQ ID NO: 1310522
acucccagagaucuggauu

SEQ ID NO: 1310524 - RNA, 19 nt, Artificial Sequence
  Description of Artificial Sequence: Synthetic oligonucleotide
  Sense strand starting at position 1195 of SEQ ID NO: 1241927
aagcauucccagcgagcuu

SEQ ID NO: 1310525 - RNA, 19 nt, Artificial Sequence
  Description of Artificial Sequence: Synthetic oligonucleotide
  Antisense strand to SEQ ID NO: 1310524
aagcucgcugggaaugcuu

SEQ ID NO: 1310526 - RNA, 19 nt, Artificial Sequence
  Description of Artificial Sequence: Synthetic oligonucleotide
  Sense strand starting at position 1391 of SEQ ID NO: 1241927
uagaaugugugcuccgagu

SEQ ID NO: 1310527 - RNA, 19 nt, Artificial Sequence
  Description of Artificial Sequence: Synthetic oligonucleotide
  Antisense strand to SEQ ID NO: 1310526
acucggagcacacauucua

SEQ ID NO: 1310528 - RNA, 19 nt, Artificial Sequence
  Description of Artificial Sequence: Synthetic oligonucleotide
  Sense strand starting at position 1393 of SEQ ID NO: 1241927
gaaugugugcuccgaguga

SEQ ID NO: 1310529 - RNA, 19 nt, Artificial Sequence
  Description of Artificial Sequence: Synthetic oligonucleotide
  Antisense strand to SEQ ID NO: 1310528
ucacucggagcacacauuc

SEQ ID NO: 1310530 - RNA, 19 nt, Artificial Sequence
  Description of Artificial Sequence: Synthetic oligonucleotide
  Sense strand starting at position 1524 of SEQ ID NO: 1241927
cgaggacuuguguacgaca

SEQ ID NO: 1310531 - RNA, 19 nt, Artificial Sequence
  Description of Artificial Sequence: Synthetic oligonucleotide
  Antisense strand to SEQ ID NO: 1310530
ugucguacacaaguccucg

SEQ ID NO: 1310532 - RNA, 19 nt, Artificial Sequence
  Description of Artificial Sequence: Synthetic oligonucleotide
  Sense strand starting at position 1529 of SEQ ID NO: 1241927
acuuguguacgacaggaua

SEQ ID NO: 1310533 - RNA, 19 nt, Artificial Sequence
  Description of Artificial Sequence: Synthetic oligonucleotide
  Antisense strand to SEQ ID NO: 1310532
uauccugucguacacaagu

SEQ ID NO: 1310534 - RNA, 19 nt, Artificial Sequence
  Description of Artificial Sequence: Synthetic oligonucleotide
  Sense strand starting at position 1551 of SEQ ID NO: 1241927
cagaaacugcuucguguga

SEQ ID NO: 1310535 - RNA, 19 nt, Artificial Sequence
  Description of Artificial Sequence: Synthetic oligonucleotide
  Antisense strand to SEQ ID NO: 1310534
ucacacgaagcaguuucug

SEQ ID NO: 1310536 - RNA, 19 nt, Artificial Sequence
  Description of Artificial Sequence: Synthetic oligonucleotide
  Sense strand starting at position 2443 of SEQ ID NO: 1241927
gcucuucugccaccgcaaa

SEQ ID NO: 1310537 - RNA, 19 nt, Artificial Sequence
  Description of Artificial Sequence: Synthetic oligonucleotide
  Antisense strand to SEQ ID NO: 1310536
uuugcgguggcagaagagc

SEQ ID NO: 1310538 - RNA, 19 nt, Artificial Sequence
  Description of Artificial Sequence: Synthetic oligonucleotide
  Sense strand starting at position 2516 of SEQ ID NO: 1241927
cccacuugcgcgguaacaa

SEQ ID NO: 1310539 - RNA, 19 nt, Artificial Sequence
  Description of Artificial Sequence: Synthetic oligonucleotide
  Antisense strand to SEQ ID NO: 1310538
uuguuaccgcgcaaguggg

SEQ ID NO: 1310540 - RNA, 19 nt, Artificial Sequence
  Description of Artificial Sequence: Synthetic oligonucleotide
  Sense strand starting at position 2527 of SEQ ID NO: 1241927
gguaacaagaaaugucugu

SEQ ID NO: 1310541 - RNA, 19 nt, Artificial Sequence
  Description of Artificial Sequence: Synthetic oligonucleotide
  Antisense strand to SEQ ID NO: 1310540
acagacauuucuuguuacc

SEQ ID NO: 1310542 - RNA, 19 nt, Artificial Sequence
  Description of Artificial Sequence: Synthetic oligonucleotide
  Sense strand starting at position 2531 of SEQ ID NO: 1241927
acaagaaaugucugucucu

SEQ ID NO: 1310543 - RNA, 19 nt, Artificial Sequence
  Description of Artificial Sequence: Synthetic oligonucleotide
  Antisense strand to SEQ ID NO: 1310542
agagacagacauuucuugu

SEQ ID NO: 1310544 - RNA, 19 nt, Artificial Sequence
  Description of Artificial Sequence: Synthetic oligonucleotide
  Sense strand starting at position 2532 of SEQ ID NO: 1241927
caagaaaugucugucucug

SEQ ID NO: 1310545 - RNA, 19 nt, Artificial Sequence
  Description of Artificial Sequence: Synthetic oligonucleotide
  Antisense strand to SEQ ID NO: 1310544
cagagacagacauuucuug

SEQ ID NO: 1310546 - RNA, 19 nt, Artificial Sequence
  Description of Artificial Sequence: Synthetic oligonucleotide
  Sense strand starting at position 2534 of SEQ ID NO: 1241927
agaaaugucugucucuguu

SEQ ID NO: 1310547 - RNA, 19 nt, Artificial Sequence
  Description of Artificial Sequence: Synthetic oligonucleotide
  Antisense strand to SEQ ID NO: 1310546
aacagagacagacauuucu

SEQ ID NO: 1310548 - RNA, 19 nt, Artificial Sequence
  Description of Artificial Sequence: Synthetic oligonucleotide
  Sense strand starting at position 2541 of SEQ ID NO: 1241927
ucugucucuguuggagaaa

SEQ ID NO: 1310549 - RNA, 19 nt, Artificial Sequence
  Description of Artificial Sequence: Synthetic oligonucleotide
  Antisense strand to SEQ ID NO: 1310548
uuucuccaacagagacaga

SEQ ID NO: 1310550 - RNA, 19 nt, Artificial Sequence
  Description of Artificial Sequence: Synthetic oligonucleotide
  Sense strand starting at position 2608 of SEQ ID NO: 1241927
cugggauucgaauacaguu

SEQ ID NO: 1310551 - RNA, 19 nt, Artificial Sequence
  Description of Artificial Sequence: Synthetic oligonucleotide
  Antisense strand to SEQ ID NO: 1310550
aacuguauucgaaucccag

SEQ ID NO: 1310552 - RNA, 19 nt, Artificial Sequence
  Description of Artificial Sequence: Synthetic oligonucleotide
  Sense strand starting at position 3340 of SEQ ID NO: 1241927
gcagcauggucaagggagu

SEQ ID NO: 1310553 - RNA, 19 nt, Artificial Sequence
  Description of Artificial Sequence: Synthetic oligonucleotide
  Antisense strand to SEQ ID NO: 1310552
acucccuugaccaugcugc

SEQ ID NO: 1310554 - RNA, 19 nt, Artificial Sequence
  Description of Artificial Sequence: Synthetic oligonucleotide
  Sense strand starting at position 3372 of SEQ ID NO: 1241927
gcgguauugcacuauucca

SEQ ID NO: 1310555 - RNA, 19 nt, Artificial Sequence
  Description of Artificial Sequence: Synthetic oligonucleotide
  Antisense strand to SEQ ID NO: 1310554
uggaauagugcaauaccgc

SEQ ID NO: 1310556 - RNA, 19 nt, Artificial Sequence
  Description of Artificial Sequence: Synthetic oligonucleotide
  Sense strand starting at position 3379 of SEQ ID NO: 1241927
ugcacuauuccagaguuag

SEQ ID NO: 1310557 - RNA, 19 nt, Artificial Sequence
  Description of Artificial Sequence: Synthetic oligonucleotide
  Antisense strand to SEQ ID NO: 1310556
cuaacucuggaauagugca

SEQ ID NO: 1310558 - RNA, 19 nt, Artificial Sequence
  Description of Artificial Sequence: Synthetic oligonucleotide
  Sense strand starting at position 3460 of SEQ ID NO: 1241927
accagcuuuccugagcaga

SEQ ID NO: 1310559 - RNA, 19 nt, Artificial Sequence
  Description of Artificial Sequence: Synthetic oligonucleotide
  Antisense strand to SEQ ID NO: 1310558
ucugcucaggaaagcuggu

SEQ ID NO: 1310560 - RNA, 19 nt, Artificial Sequence
  Description of Artificial Sequence: Synthetic oligonucleotide
  Sense strand starting at position 3521 of SEQ ID NO: 1241927
gcauacuagaaagguggau

SEQ ID NO: 1310561 - RNA, 19 nt, Artificial Sequence
  Description of Artificial Sequence: Synthetic oligonucleotide
  Antisense strand to SEQ ID NO: 1310560
auccaccuuucuaguaugc

SEQ ID NO: 1310562 - RNA, 19 nt, Artificial Sequence
  Description of Artificial Sequence: Synthetic oligonucleotide
  Sense strand starting at position 148 of SEQ ID NO: 1241928
ccaggacugugcucuauaa

SEQ ID NO: 1310563 - RNA, 19 nt, Artificial Sequence
  Description of Artificial Sequence: Synthetic oligonucleotide
  Antisense strand to SEQ ID NO: 1310562
uuauagagcacaguccugg

SEQ ID NO: 1310564 - RNA, 19 nt, Artificial Sequence
  Description of Artificial Sequence: Synthetic oligonucleotide
  Sense strand starting at position 152 of SEQ ID NO: 1241928
gacugugcucuauaaggga

SEQ ID NO: 1310565 - RNA, 19 nt, Artificial Sequence
  Description of Artificial Sequence: Synthetic oligonucleotide
  Antisense strand to SEQ ID NO: 1310564
ucccuuauagagcacaguc

SEQ ID NO: 1310566 - RNA, 19 nt, Artificial Sequence
  Description of Artificial Sequence: Synthetic oligonucleotide
  Sense strand starting at position 217 of SEQ ID NO: 1241928
uuguacucucuuuguuaag

SEQ ID NO: 1310567 - RNA, 19 nt, Artificial Sequence
  Description of Artificial Sequence: Synthetic oligonucleotide
  Antisense strand to SEQ ID NO: 1310566
cuuaacaaagagaguacaa

SEQ ID NO: 1310568 - RNA, 19 nt, Artificial Sequence
  Description of Artificial Sequence: Synthetic oligonucleotide
  Sense strand starting at position 218 of SEQ ID NO: 1241928
uguacucucuuuguuaaga

SEQ ID NO: 1310569 - RNA, 19 nt, Artificial Sequence
  Description of Artificial Sequence: Synthetic oligonucleotide
  Antisense strand to SEQ ID NO: 1310568
ucuuaacaaagagaguaca

SEQ ID NO: 1310570 - RNA, 19 nt, Artificial Sequence
  Description of Artificial Sequence: Synthetic oligonucleotide
  Sense strand starting at position 219 of SEQ ID NO: 1241928
guacucucuuuguuaagaa

SEQ ID NO: 1310571 - RNA, 19 nt, Artificial Sequence
  Description of Artificial Sequence: Synthetic oligonucleotide
  Antisense strand to SEQ ID NO: 1310570
uucuuaacaaagagaguac

SEQ ID NO: 1310572 - RNA, 19 nt, Artificial Sequence
  Description of Artificial Sequence: Synthetic oligonucleotide
  Sense strand starting at position 470 of SEQ ID NO: 1241928
gugacuucagccuggguga

SEQ ID NO: 1310573 - RNA, 19 nt, Artificial Sequence
  Description of Artificial Sequence: Synthetic oligonucleotide
  Antisense strand to SEQ ID NO: 1310572
ucacccaggcugaagucac

SEQ ID NO: 1310574 - RNA, 19 nt, Artificial Sequence
  Description of Artificial Sequence: Synthetic oligonucleotide
  Sense strand starting at position 491 of SEQ ID NO: 1241928
aggguaagacuccgucuua

SEQ ID NO: 1310575 - RNA, 19 nt, Artificial Sequence
  Description of Artificial Sequence: Synthetic oligonucleotide
  Antisense strand to SEQ ID NO: 1310574
uaagacggagucuuacccu

SEQ ID NO: 1310576 - RNA, 19 nt, Artificial Sequence
  Description of Artificial Sequence: Synthetic oligonucleotide
  Sense strand starting at position 492 of SEQ ID NO: 1241928
ggguaagacuccgucuuaa

SEQ ID NO: 1310577 - RNA, 19 nt, Artificial Sequence
  Description of Artificial Sequence: Synthetic oligonucleotide
  Antisense strand to SEQ ID NO: 1310576
uuaagacggagucuuaccc

SEQ ID NO: 1310578 - RNA, 19 nt, Artificial Sequence
  Description of Artificial Sequence: Synthetic oligonucleotide
  Sense strand starting at position 867 of SEQ ID NO: 1241928
uugacaaaguggucuagua

SEQ ID NO: 1310579 - RNA, 19 nt, Artificial Sequence
  Description of Artificial Sequence: Synthetic oligonucleotide
  Antisense strand to SEQ ID NO: 1310578
uacuagaccacuuugucaa

SEQ ID NO: 1310580 - RNA, 19 nt, Artificial Sequence
  Description of Artificial Sequence: Synthetic oligonucleotide
  Sense strand starting at position 877 of SEQ ID NO: 1241928
ggucuaguaccagggaaga

SEQ ID NO: 1310581 - RNA, 19 nt, Artificial Sequence
  Description of Artificial Sequence: Synthetic oligonucleotide
  Antisense strand to SEQ ID NO: 1310580
ucuucccugguacuagacc

SEQ ID NO: 1310582 - RNA, 19 nt, Artificial Sequence
  Description of Artificial Sequence: Synthetic oligonucleotide
  Sense strand starting at position 931 of SEQ ID NO: 1241928
uggcaucaccuguaagcua

SEQ ID NO: 1310583 - RNA, 19 nt, Artificial Sequence
  Description of Artificial Sequence: Synthetic oligonucleotide
  Antisense strand to SEQ ID NO: 1310582
uagcuuacaggugaugcca

SEQ ID NO: 1310584 - RNA, 19 nt, Artificial Sequence
  Description of Artificial Sequence: Synthetic oligonucleotide
  Sense strand starting at position 939 of SEQ ID NO: 1241928
ccuguaagcuaguuaggaa

SEQ ID NO: 1310585 - RNA, 19 nt, Artificial Sequence
  Description of Artificial Sequence: Synthetic oligonucleotide
  Antisense strand to SEQ ID NO: 1310584
uuccuaacuagcuuacagg

SEQ ID NO: 1310586 - RNA, 19 nt, Artificial Sequence
  Description of Artificial Sequence: Synthetic oligonucleotide
  Sense strand starting at position 940 of SEQ ID NO: 1241928
cuguaagcuaguuaggaau

SEQ ID NO: 1310587 - RNA, 19 nt, Artificial Sequence
  Description of Artificial Sequence: Synthetic oligonucleotide
  Antisense strand to SEQ ID NO: 1310586
auuccuaacuagcuuacag

SEQ ID NO: 1310588 - RNA, 19 nt, Artificial Sequence
  Description of Artificial Sequence: Synthetic oligonucleotide
  Sense strand starting at position 951 of SEQ ID NO: 1241928
uuaggaaugcugugucuca

SEQ ID NO: 1310589 - RNA, 19 nt, Artificial Sequence
  Description of Artificial Sequence: Synthetic oligonucleotide
  Antisense strand to SEQ ID NO: 1310588
ugagacacagcauuccuaa

SEQ ID NO: 1310590 - RNA, 19 nt, Artificial Sequence
  Description of Artificial Sequence: Synthetic oligonucleotide
  Sense strand starting at position 1157 of SEQ ID NO: 1241928
ucaugauucgggcacuuac

SEQ ID NO: 1310591 - RNA, 19 nt, Artificial Sequence
  Description of Artificial Sequence: Synthetic oligonucleotide
  Antisense strand to SEQ ID NO: 1310590
guaagugcccgaaucauga

SEQ ID NO: 1310592 - RNA, 19 nt, Artificial Sequence
  Description of Artificial Sequence: Synthetic oligonucleotide
  Sense strand starting at position 1401 of SEQ ID NO: 1241928
gucaguggucccaguuggu

SEQ ID NO: 1310593 - RNA, 19 nt, Artificial Sequence
  Description of Artificial Sequence: Synthetic oligonucleotide
  Antisense strand to SEQ ID NO: 1310592
accaacugggaccacugac

SEQ ID NO: 1310594 - RNA, 19 nt, Artificial Sequence
  Description of Artificial Sequence: Synthetic oligonucleotide
  Sense strand starting at position 1411 of SEQ ID NO: 1241928
ccaguuggugaucaacaca

SEQ ID NO: 1310595 - RNA, 19 nt, Artificial Sequence
  Description of Artificial Sequence: Synthetic oligonucleotide
  Antisense strand to SEQ ID NO: 1310594
uguguugaucaccaacugg

SEQ ID NO: 1310596 - RNA, 19 nt, Artificial Sequence
  Description of Artificial Sequence: Synthetic oligonucleotide
  Sense strand starting at position 1453 of SEQ ID NO: 1241928
cagccaucacagugaugca

SEQ ID NO: 1310597 - RNA, 19 nt, Artificial Sequence
  Description of Artificial Sequence: Synthetic oligonucleotide
  Antisense strand to SEQ ID NO: 1310596
ugcaucacugugauggcug

SEQ ID NO: 1310598 - RNA, 19 nt, Artificial Sequence
  Description of Artificial Sequence: Synthetic oligonucleotide
  Sense strand starting at position 1527 of SEQ ID NO: 1241928
uuucuauuggcccagagag

SEQ ID NO: 1310599 - RNA, 19 nt, Artificial Sequence
  Description of Artificial Sequence: Synthetic oligonucleotide
  Antisense strand to SEQ ID NO: 1310598
cucucugggccaauagaaa

SEQ ID NO: 1310600 - RNA, 19 nt, Artificial Sequence
  Description of Artificial Sequence: Synthetic oligonucleotide
  Sense strand starting at position 1612 of SEQ ID NO: 1241928
guuggaugcucaccaucuu

SEQ ID NO: 1310601 - RNA, 19 nt, Artificial Sequence
  Description of Artificial Sequence: Synthetic oligonucleotide
  Antisense strand to SEQ ID NO: 1310600
aagauggugagcauccaac

SEQ ID NO: 1310602 - RNA, 19 nt, Artificial Sequence
  Description of Artificial Sequence: Synthetic oligonucleotide
  Sense strand starting at position 2083 of SEQ ID NO: 1241928
ggauucugcuucucacuua

SEQ ID NO: 1310603 - RNA, 19 nt, Artificial Sequence
  Description of Artificial Sequence: Synthetic oligonucleotide
  Antisense strand to SEQ ID NO: 1310602
uaagugagaagcagaaucc

SEQ ID NO: 1310604 - RNA, 19 nt, Artificial Sequence
  Description of Artificial Sequence: Synthetic oligonucleotide
  Sense strand starting at position 2449 of SEQ ID NO: 1241928
gcgcucugggcgucguaaa

SEQ ID NO: 1310605 - RNA, 19 nt, Artificial Sequence
  Description of Artificial Sequence: Synthetic oligonucleotide
  Antisense strand to SEQ ID NO: 1310604
uuuacgacgcccagagcgc

SEQ ID NO: 1310606 - RNA, 19 nt, Artificial Sequence
  Description of Artificial Sequence: Synthetic oligonucleotide
  Sense strand starting at position 2558 of SEQ ID NO: 1241928
uggccauugugagcaaaug

SEQ ID NO: 1310607 - RNA, 19 nt, Artificial Sequence
  Description of Artificial Sequence: Synthetic oligonucleotide
  Antisense strand to SEQ ID NO: 1310606
cauuugcucacaauggcca

SEQ ID NO: 1310608 - RNA, 19 nt, Artificial Sequence
  Description of Artificial Sequence: Synthetic oligonucleotide
  Sense strand starting at position 2726 of SEQ ID NO: 1241928
gccuguuagagcgcuugga

SEQ ID NO: 1310609 - RNA, 19 nt, Artificial Sequence
  Description of Artificial Sequence: Synthetic oligonucleotide
  Antisense strand to SEQ ID NO: 1310608
uccaagcgcucuaacaggc

SEQ ID NO: 1310610 - RNA, 19 nt, Artificial Sequence
  Description of Artificial Sequence: Synthetic oligonucleotide
  Sense strand starting at position 2830 of SEQ ID NO: 1241928
aggcgauggguuuaauucu

SEQ ID NO: 1310611 - RNA, 19 nt, Artificial Sequence
  Description of Artificial Sequence: Synthetic oligonucleotide
  Antisense strand to SEQ ID NO: 1310610
agaauuaaacccaucgccu

SEQ ID NO: 1310612 - RNA, 19 nt, Artificial Sequence
  Description of Artificial Sequence: Synthetic oligonucleotide
  Sense strand starting at position 2842 of SEQ ID NO: 1241928
uaauucuuccuggacguga

SEQ ID NO: 1310613 - RNA, 19 nt, Artificial Sequence
  Description of Artificial Sequence: Synthetic oligonucleotide
  Antisense strand to SEQ ID NO: 1310612
ucacguccaggaagaauua

SEQ ID NO: 1310614 - RNA, 19 nt, Artificial Sequence
  Description of Artificial Sequence: Synthetic oligonucleotide
  Sense strand starting at position 2846 of SEQ ID NO: 1241928
ucuuccuggacgugagauu

SEQ ID NO: 1310615 - RNA, 19 nt, Artificial Sequence
  Description of Artificial Sequence: Synthetic oligonucleotide
  Antisense strand to SEQ ID NO: 1310614
aaucucacguccaggaaga

SEQ ID NO: 1310616 - RNA, 19 nt, Artificial Sequence
  Description of Artificial Sequence: Synthetic oligonucleotide
  Sense strand starting at position 2869 of SEQ ID NO: 1241928
agcaaugauuaauccauag

SEQ ID NO: 1310617 - RNA, 19 nt, Artificial Sequence
  Description of Artificial Sequence: Synthetic oligonucleotide
  Antisense strand to SEQ ID NO: 1310616
cuauggauuaaucauugcu

SEQ ID NO: 1310618 - RNA, 19 nt, Artificial Sequence
  Description of Artificial Sequence: Synthetic oligonucleotide
  Sense strand starting at position 3205 of SEQ ID NO: 1241928
gaaggugucgcagauauaa

SEQ ID NO: 1310619 - RNA, 19 nt, Artificial Sequence
  Description of Artificial Sequence: Synthetic oligonucleotide
  Antisense strand to SEQ ID NO: 1310618
uuauaucugcgacaccuuc

SEQ ID NO: 1310620 - RNA, 19 nt, Artificial Sequence
  Description of Artificial Sequence: Synthetic oligonucleotide
  Sense strand starting at position 3207 of SEQ ID NO: 1241928
aggugucgcagauauaagu

SEQ ID NO: 1310621 - RNA, 19 nt, Artificial Sequence
  Description of Artificial Sequence: Synthetic oligonucleotide
  Antisense strand to SEQ ID NO: 1310620
acuuauaucugcgacaccu

SEQ ID NO: 1310622 - RNA, 19 nt, Artificial Sequence
  Description of Artificial Sequence: Synthetic oligonucleotide
  Sense strand starting at position 3213 of SEQ ID NO: 1241928
cgcagauauaagugggaaa

SEQ ID NO: 1310623 - RNA, 19 nt, Artificial Sequence
  Description of Artificial Sequence: Synthetic oligonucleotide
  Antisense strand to SEQ ID NO: 1310622
uuucccacuuauaucugcg

SEQ ID NO: 1310624 - RNA, 19 nt, Artificial Sequence
  Description of Artificial Sequence: Synthetic oligonucleotide
  Sense strand starting at position 3214 of SEQ ID NO: 1241928
gcagauauaagugggaaac

SEQ ID NO: 1310625 - RNA, 19 nt, Artificial Sequence
  Description of Artificial Sequence: Synthetic oligonucleotide
  Antisense strand to SEQ ID NO: 1310624
guuucccacuuauaucugc

SEQ ID NO: 1310626 - RNA, 19 nt, Artificial Sequence
  Description of Artificial Sequence: Synthetic oligonucleotide
  Sense strand starting at position 3216 of SEQ ID NO: 1241928
agauauaagugggaaacuu

SEQ ID NO: 1310627 - RNA, 19 nt, Artificial Sequence
  Description of Artificial Sequence: Synthetic oligonucleotide
  Antisense strand to SEQ ID NO: 1310626
aaguuucccacuuauaucu

SEQ ID NO: 1310628 - RNA, 19 nt, Artificial Sequence
  Description of Artificial Sequence: Synthetic oligonucleotide
  Sense strand starting at position 3558 of SEQ ID NO: 1241928
guugguagcuucuuagaag

SEQ ID NO: 1310629 - RNA, 19 nt, Artificial Sequence
  Description of Artificial Sequence: Synthetic oligonucleotide
  Antisense strand to SEQ ID NO: 1310628
cuucuaagaagcuaccaac

SEQ ID NO: 1310630 - RNA, 19 nt, Artificial Sequence
  Description of Artificial Sequence: Synthetic oligonucleotide
  Sense strand starting at position 3570 of SEQ ID NO: 1241928
uuagaagaauguccucuuu

SEQ ID NO: 1310631 - RNA, 19 nt, Artificial Sequence
  Description of Artificial Sequence: Synthetic oligonucleotide
  Antisense strand to SEQ ID NO: 1310630
aaagaggacauucuucuaa

SEQ ID NO: 1310632 - RNA, 19 nt, Artificial Sequence
  Description of Artificial Sequence: Synthetic oligonucleotide
  Sense strand starting at position 3625 of SEQ ID NO: 1241928
ggaaacugguauccacaua

SEQ ID NO: 1310633 - RNA, 19 nt, Artificial Sequence
  Description of Artificial Sequence: Synthetic oligonucleotide
  Antisense strand to SEQ ID NO: 1310632
uauguggauaccaguuucc

SEQ ID NO: 1310634 - RNA, 19 nt, Artificial Sequence
  Description of Artificial Sequence: Synthetic oligonucleotide
  Sense strand starting at position 3637 of SEQ ID NO: 1241928
ccacauauugcugaaguau

SEQ ID NO: 1310635 - RNA, 19 nt, Artificial Sequence
  Description of Artificial Sequence: Synthetic oligonucleotide
  Antisense strand to SEQ ID NO: 1310634
auacuucagcaauaugugg

SEQ ID NO: 1310636 - RNA, 19 nt, Artificial Sequence
  Description of Artificial Sequence: Synthetic oligonucleotide
  Sense strand starting at position 3645 of SEQ ID NO: 1241928
ugcugaaguaucugaauug

SEQ ID NO: 1310637 - RNA, 19 nt, Artificial Sequence
  Description of Artificial Sequence: Synthetic oligonucleotide
  Antisense strand to SEQ ID NO: 1310636
caauucagauacuucagca

SEQ ID NO: 1310638 - RNA, 19 nt, Artificial Sequence
  Description of Artificial Sequence: Synthetic oligonucleotide
  Sense strand starting at position 3680 of SEQ ID NO: 1241928
gagaaagcagcuuggugau

SEQ ID NO: 1310639 - RNA, 19 nt, Artificial Sequence
  Description of Artificial Sequence: Synthetic oligonucleotide
  Antisense strand to SEQ ID NO: 1310638
aucaccaagcugcuuucuc

SEQ ID NO: 1310640 - RNA, 19 nt, Artificial Sequence
  Description of Artificial Sequence: Synthetic oligonucleotide
  Sense strand starting at position 3774 of SEQ ID NO: 1241928
agccauaugccugaagauu

SEQ ID NO: 1310641 - RNA, 19 nt, Artificial Sequence
  Description of Artificial Sequence: Synthetic oligonucleotide
  Antisense strand to SEQ ID NO: 1310640
aaucuucaggcauauggcu

SEQ ID NO: 1310642 - RNA, 19 nt, Artificial Sequence
  Description of Artificial Sequence: Synthetic oligonucleotide
  Sense strand starting at position 139 of SEQ ID NO: 1241929
ccagacgacucugucgaaa

SEQ ID NO: 1310643 - RNA, 19 nt, Artificial Sequence
  Description of Artificial Sequence: Synthetic oligonucleotide
  Antisense strand to SEQ ID NO: 1310642
uuucgacagagucgucugg

SEQ ID NO: 1310644 - RNA, 19 nt, Artificial Sequence
  Description of Artificial Sequence: Synthetic oligonucleotide
  Sense strand starting at position 325 of SEQ ID NO: 1241929
uauuaagaguauuccagga

SEQ ID NO: 1310645 - RNA, 19 nt, Artificial Sequence
  Description of Artificial Sequence: Synthetic oligonucleotide
  Antisense strand to SEQ ID NO: 1310644
uccuggaauacucuuaaua

SEQ ID NO: 1310646 - RNA, 19 nt, Artificial Sequence
  Description of Artificial Sequence: Synthetic oligonucleotide
  Sense strand starting at position 491 of SEQ ID NO: 1241929
gucaaaggguccuuuaagu

SEQ ID NO: 1310647 - RNA, 19 nt, Artificial Sequence
  Description of Artificial Sequence: Synthetic oligonucleotide
  Antisense strand to SEQ ID NO: 1310646
acuuaaaggacccuuugac

SEQ ID NO: 1310648 - RNA, 19 nt, Artificial Sequence
  Description of Artificial Sequence: Synthetic oligonucleotide
  Sense strand starting at position 547 of SEQ ID NO: 1241929
acuuucugauaugucuauu

SEQ ID NO: 1310649 - RNA, 19 nt, Artificial Sequence
  Description of Artificial Sequence: Synthetic oligonucleotide
  Antisense strand to SEQ ID NO: 1310648
aauagacauaucagaaagu

SEQ ID NO: 1310650 - RNA, 19 nt, Artificial Sequence
  Description of Artificial Sequence: Synthetic oligonucleotide
  Sense strand starting at position 611 of SEQ ID NO: 1241929
aaguuuagauauccuggau

SEQ ID NO: 1310651 - RNA, 19 nt, Artificial Sequence
  Description of Artificial Sequence: Synthetic oligonucleotide
  Antisense strand to SEQ ID NO: 1310650
auccaggauaucuaaacuu

SEQ ID NO: 1310652 - RNA, 19 nt, Artificial Sequence
  Description of Artificial Sequence: Synthetic oligonucleotide
  Sense strand starting at position 614 of SEQ ID NO: 1241929
uuuagauauccuggauucu

SEQ ID NO: 1310653 - RNA, 19 nt, Artificial Sequence
  Description of Artificial Sequence: Synthetic oligonucleotide
  Antisense strand to SEQ ID NO: 1310652
agaauccaggauaucuaaa

SEQ ID NO: 1310654 - RNA, 19 nt, Artificial Sequence
  Description of Artificial Sequence: Synthetic oligonucleotide
  Sense strand starting at position 725 of SEQ ID NO: 1241929
acugaaauuuacugacaga

SEQ ID NO: 1310655 - RNA, 19 nt, Artificial Sequence
  Description of Artificial Sequence: Synthetic oligonucleotide
  Antisense strand to SEQ ID NO: 1310654
ucugucaguaaauuucagu

SEQ ID NO: 1310656 - RNA, 19 nt, Artificial Sequence
  Description of Artificial Sequence: Synthetic oligonucleotide
  Sense strand starting at position 869 of SEQ ID NO: 1241929
uagcaaucucaaggucaug

SEQ ID NO: 1310657 - RNA, 19 nt, Artificial Sequence
  Description of Artificial Sequence: Synthetic oligonucleotide
  Antisense strand to SEQ ID NO: 1310656
caugaccuugagauugcua

SEQ ID NO: 1310658 - RNA, 19 nt, Artificial Sequence
  Description of Artificial Sequence: Synthetic oligonucleotide
  Sense strand starting at position 939 of SEQ ID NO: 1241929
caugucugucaagguaaac

SEQ ID NO: 1310659 - RNA, 19 nt, Artificial Sequence
  Description of Artificial Sequence: Synthetic oligonucleotide
  Antisense strand to SEQ ID NO: 1310658
guuuaccuugacagacaug

SEQ ID NO: 1310660 - RNA, 19 nt, Artificial Sequence
  Description of Artificial Sequence: Synthetic oligonucleotide
  Sense strand starting at position 956 of SEQ ID NO: 1241929
acaauuguaagcugagguu

SEQ ID NO: 1310661 - RNA, 19 nt, Artificial Sequence
  Description of Artificial Sequence: Synthetic oligonucleotide
  Antisense strand to SEQ ID NO: 1310660
aaccucagcuuacaauugu

SEQ ID NO: 1310662 - RNA, 19 nt, Artificial Sequence
  Description of Artificial Sequence: Synthetic oligonucleotide
  Sense strand starting at position 1014 of SEQ ID NO: 1241929
agcucauaccucgaugcau

SEQ ID NO: 1310663 - RNA, 19 nt, Artificial Sequence
  Description of Artificial Sequence: Synthetic oligonucleotide
  Antisense strand to SEQ ID NO: 1310662
augcaucgagguaugagcu

SEQ ID NO: 1310664 - RNA, 19 nt, Artificial Sequence
  Description of Artificial Sequence: Synthetic oligonucleotide
  Sense strand starting at position 1218 of SEQ ID NO: 1241929
caaaguccugacgauguua

SEQ ID NO: 1310665 - RNA, 19 nt, Artificial Sequence
  Description of Artificial Sequence: Synthetic oligonucleotide
  Antisense strand to SEQ ID NO: 1310664
uaacaucgucaggacuuug

SEQ ID NO: 1310666 - RNA, 19 nt, Artificial Sequence
  Description of Artificial Sequence: Synthetic oligonucleotide
  Sense strand starting at position 1227 of SEQ ID NO: 1241929
gacgauguuaacgauauug

SEQ ID NO: 1310667 - RNA, 19 nt, Artificial Sequence
  Description of Artificial Sequence: Synthetic oligonucleotide
  Antisense strand to SEQ ID NO: 1310666
caauaucguuaacaucguc

SEQ ID NO: 1310668 - RNA, 19 nt, Artificial Sequence
  Description of Artificial Sequence: Synthetic oligonucleotide
  Sense strand starting at position 1229 of SEQ ID NO: 1241929
cgauguuaacgauauuguu

SEQ ID NO: 1310669 - RNA, 19 nt, Artificial Sequence
  Description of Artificial Sequence: Synthetic oligonucleotide
  Antisense strand to SEQ ID NO: 1310668
aacaauaucguuaacaucg

SEQ ID NO: 1310670 - RNA, 19 nt, Artificial Sequence
  Description of Artificial Sequence: Synthetic oligonucleotide
  Sense strand starting at position 1330 of SEQ ID NO: 1241929
guggaagcaucacuaucaa

SEQ ID NO: 1310671 - RNA, 19 nt, Artificial Sequence
  Description of Artificial Sequence: Synthetic oligonucleotide
  Antisense strand to SEQ ID NO: 1310670
uugauagugaugcuuccac

SEQ ID NO: 1310672 - RNA, 19 nt, Artificial Sequence
  Description of Artificial Sequence: Synthetic oligonucleotide
  Sense strand starting at position 1399 of SEQ ID NO: 1241929
aucuuauugcgucauccaa

SEQ ID NO: 1310673 - RNA, 19 nt, Artificial Sequence
  Description of Artificial Sequence: Synthetic oligonucleotide
  Antisense strand to SEQ ID NO: 1310672
uuggaugacgcaauaagau

SEQ ID NO: 1310674 - RNA, 19 nt, Artificial Sequence
  Description of Artificial Sequence: Synthetic oligonucleotide
  Sense strand starting at position 1414 of SEQ ID NO: 1241929
ccaagaauuucucguauuu

SEQ ID NO: 1310675 - RNA, 19 nt, Artificial Sequence
  Description of Artificial Sequence: Synthetic oligonucleotide
  Antisense strand to SEQ ID NO: 1310674
aaauacgagaaauucuugg

SEQ ID NO: 1310676 - RNA, 19 nt, Artificial Sequence
  Description of Artificial Sequence: Synthetic oligonucleotide
  Sense strand starting at position 1478 of SEQ ID NO: 1241929
accaaugaucgugaacuua

SEQ ID NO: 1310677 - RNA, 19 nt, Artificial Sequence
  Description of Artificial Sequence: Synthetic oligonucleotide
  Antisense strand to SEQ ID NO: 1310676
uaaguucacgaucauuggu

SEQ ID NO: 1310678 - RNA, 19 nt, Artificial Sequence
  Description of Artificial Sequence: Synthetic oligonucleotide
  Sense strand starting at position 1488 of SEQ ID NO: 1241929
gugaacuuaccugauccau

SEQ ID NO: 1310679 - RNA, 19 nt, Artificial Sequence
  Description of Artificial Sequence: Synthetic oligonucleotide
  Antisense strand to SEQ ID NO: 1310678
auggaucagguaaguucac

SEQ ID NO: 1310680 - RNA, 19 nt, Artificial Sequence
  Description of Artificial Sequence: Synthetic oligonucleotide
  Sense strand starting at position 1494 of SEQ ID NO: 1241929
uuaccugauccauguagua

SEQ ID NO: 1310681 - RNA, 19 nt, Artificial Sequence
  Description of Artificial Sequence: Synthetic oligonucleotide
  Antisense strand to SEQ ID NO: 1310680
uacuacauggaucagguaa

SEQ ID NO: 1310682 - RNA, 19 nt, Artificial Sequence
  Description of Artificial Sequence: Synthetic oligonucleotide
  Sense strand starting at position 2239 of SEQ ID NO: 1241929
gccagagagaaauguaauu

SEQ ID NO: 1310683 - RNA, 19 nt, Artificial Sequence
  Description of Artificial Sequence: Synthetic oligonucleotide
  Antisense strand to SEQ ID NO: 1310682
aauuacauuucucucuggc

SEQ ID NO: 1310684 - RNA, 19 nt, Artificial Sequence
  Description of Artificial Sequence: Synthetic oligonucleotide
  Sense strand starting at position 2268 of SEQ ID NO: 1241929
gucuaaagaucugcuaaau

SEQ ID NO: 1310685 - RNA, 19 nt, Artificial Sequence
  Description of Artificial Sequence: Synthetic oligonucleotide
  Antisense strand to SEQ ID NO: 1310684
auuuagcagaucuuuagac

SEQ ID NO: 1310686 - RNA, 19 nt, Artificial Sequence
  Description of Artificial Sequence: Synthetic oligonucleotide
  Sense strand starting at position 2358 of SEQ ID NO: 1241929
agggauaauucuuagagaa

SEQ ID NO: 1310687 - RNA, 19 nt, Artificial Sequence
  Description of Artificial Sequence: Synthetic oligonucleotide
  Antisense strand to SEQ ID NO: 1310686
uucucuaagaauuaucccu

SEQ ID NO: 1310688 - RNA, 19 nt, Artificial Sequence
  Description of Artificial Sequence: Synthetic oligonucleotide
  Sense strand starting at position 2376 of SEQ ID NO: 1241929
aucuaaagcucagcuaagu

SEQ ID NO: 1310689 - RNA, 19 nt, Artificial Sequence
  Description of Artificial Sequence: Synthetic oligonucleotide
  Antisense strand to SEQ ID NO: 1310688
acuuagcugagcuuuagau

SEQ ID NO: 1310690 - RNA, 19 nt, Artificial Sequence
  Description of Artificial Sequence: Synthetic oligonucleotide
  Sense strand starting at position 2425 of SEQ ID NO: 1241929
gggugaaaugauugcuaaa

SEQ ID NO: 1310691 - RNA, 19 nt, Artificial Sequence
  Description of Artificial Sequence: Synthetic oligonucleotide
  Antisense strand to SEQ ID NO: 1310690
uuuagcaaucauuucaccc

SEQ ID NO: 1310692 - RNA, 19 nt, Artificial Sequence
  Description of Artificial Sequence: Synthetic oligonucleotide
  Sense strand starting at position 2427 of SEQ ID NO: 1241929
gugaaaugauugcuaaaua

SEQ ID NO: 1310693 - RNA, 19 nt, Artificial Sequence
  Description of Artificial Sequence: Synthetic oligonucleotide
  Antisense strand to SEQ ID NO: 1310692
uauuuagcaaucauuucac

SEQ ID NO: 1310694 - RNA, 19 nt, Artificial Sequence
  Description of Artificial Sequence: Synthetic oligonucleotide
  Sense strand starting at position 2538 of SEQ ID NO: 1241929
uuccaucuccacuggaaga

SEQ ID NO: 1310695 - RNA, 19 nt, Artificial Sequence
  Description of Artificial Sequence: Synthetic oligonucleotide
  Antisense strand to SEQ ID NO: 1310694
ucuuccaguggagauggaa

SEQ ID NO: 1310696 - RNA, 19 nt, Artificial Sequence
  Description of Artificial Sequence: Synthetic oligonucleotide
  Sense strand starting at position 2779 of SEQ ID NO: 1241929
ucaagaguaugguccaaac

SEQ ID NO: 1310697 - RNA, 19 nt, Artificial Sequence
  Description of Artificial Sequence: Synthetic oligonucleotide
  Antisense strand to SEQ ID NO: 1310696
guuuggaccauacucuuga

SEQ ID NO: 1310698 - RNA, 19 nt, Artificial Sequence
  Description of Artificial Sequence: Synthetic oligonucleotide
  Sense strand starting at position 2928 of SEQ ID NO: 1241929
ggacauacgugauugcaaa

SEQ ID NO: 1310699 - RNA, 19 nt, Artificial Sequence
  Description of Artificial Sequence: Synthetic oligonucleotide
  Antisense strand to SEQ ID NO: 1310698
uuugcaaucacguaugucc

SEQ ID NO: 1310700 - RNA, 19 nt, Artificial Sequence
  Description of Artificial Sequence: Synthetic oligonucleotide
  Sense strand starting at position 2929 of SEQ ID NO: 1241929
gacauacgugauugcaaau

SEQ ID NO: 1310701 - RNA, 19 nt, Artificial Sequence
  Description of Artificial Sequence: Synthetic oligonucleotide
  Antisense strand to SEQ ID NO: 1310700
auuugcaaucacguauguc

SEQ ID NO: 1310702 - RNA, 19 nt, Artificial Sequence
  Description of Artificial Sequence: Synthetic oligonucleotide
  Sense strand starting at position 3239 of SEQ ID NO: 1241929
agauaaauuucguagcaag

SEQ ID NO: 1310703 - RNA, 19 nt, Artificial Sequence
  Description of Artificial Sequence: Synthetic oligonucleotide
  Antisense strand to SEQ ID NO: 1310702
cuugcuacgaaauuuaucu

SEQ ID NO: 1310704 - RNA, 19 nt, Artificial Sequence
  Description of Artificial Sequence: Synthetic oligonucleotide
  Sense strand starting at position 3331 of SEQ ID NO: 1241929
ucguguauuaaccauggau

SEQ ID NO: 1310705 - RNA, 19 nt, Artificial Sequence
  Description of Artificial Sequence: Synthetic oligonucleotide
  Antisense strand to SEQ ID NO: 1310704
auccaugguuaauacacga

SEQ ID NO: 1310706 - RNA, 19 nt, Artificial Sequence
  Description of Artificial Sequence: Synthetic oligonucleotide
  Sense strand starting at position 3333 of SEQ ID NO: 1241929
guguauuaaccauggaugu

SEQ ID NO: 1310707 - RNA, 19 nt, Artificial Sequence
  Description of Artificial Sequence: Synthetic oligonucleotide
  Antisense strand to SEQ ID NO: 1310706
acauccaugguuaauacac

SEQ ID NO: 1310708 - RNA, 19 nt, Artificial Sequence
  Description of Artificial Sequence: Synthetic oligonucleotide
  Sense strand starting at position 3335 of SEQ ID NO: 1241929
guauuaaccauggaugugu

SEQ ID NO: 1310709 - RNA, 19 nt, Artificial Sequence
  Description of Artificial Sequence: Synthetic oligonucleotide
  Antisense strand to SEQ ID NO: 1310708
acacauccaugguuaauac

SEQ ID NO: 1310710 - RNA, 19 nt, Artificial Sequence
  Description of Artificial Sequence: Synthetic oligonucleotide
  Sense strand starting at position 3358 of SEQ ID NO: 1241929
ugcaguauuugacaugaau

SEQ ID NO: 1310711 - RNA, 19 nt, Artificial Sequence
  Description of Artificial Sequence: Synthetic oligonucleotide
  Antisense strand to SEQ ID NO: 1310710
auucaugucaaauacugca

SEQ ID NO: 1310712 - RNA, 19 nt, Artificial Sequence
  Description of Artificial Sequence: Synthetic oligonucleotide
  Sense strand starting at position 3510 of SEQ ID NO: 1241929
acugguaucaguugauuag

SEQ ID NO: 1310713 - RNA, 19 nt, Artificial Sequence
  Description of Artificial Sequence: Synthetic oligonucleotide
  Antisense strand to SEQ ID NO: 1310712
cuaaucaacugauaccagu

SEQ ID NO: 1310714 - RNA, 19 nt, Artificial Sequence
  Description of Artificial Sequence: Synthetic oligonucleotide
  Sense strand starting at position 3511 of SEQ ID NO: 1241929
cugguaucaguugauuagu

SEQ ID NO: 1310715 - RNA, 19 nt, Artificial Sequence
  Description of Artificial Sequence: Synthetic oligonucleotide
  Antisense strand to SEQ ID NO: 1310714
acuaaucaacugauaccag

SEQ ID NO: 1310716 - RNA, 19 nt, Artificial Sequence
  Description of Artificial Sequence: Synthetic oligonucleotide
  Sense strand starting at position 3513 of SEQ ID NO: 1241929
gguaucaguugauuaguaa

SEQ ID NO: 1310717 - RNA, 19 nt, Artificial Sequence
  Description of Artificial Sequence: Synthetic oligonucleotide
  Antisense strand to SEQ ID NO: 1310716
uuacuaaucaacugauacc

SEQ ID NO: 1310718 - RNA, 19 nt, Artificial Sequence
  Description of Artificial Sequence: Synthetic oligonucleotide
  Sense strand starting at position 3514 of SEQ ID NO: 1241929
guaucaguugauuaguaau

SEQ ID NO: 1310719 - RNA, 19 nt, Artificial Sequence
  Description of Artificial Sequence: Synthetic oligonucleotide
  Antisense strand to SEQ ID NO: 1310718
auuacuaaucaacugauac

SEQ ID NO: 1310720 - RNA, 19 nt, Artificial Sequence
  Description of Artificial Sequence: Synthetic oligonucleotide
  Sense strand starting at position 3561 of SEQ ID NO: 1241929
acguaaguaaucuauggca

SEQ ID NO: 1310721 - RNA, 19 nt, Artificial Sequence
  Description of Artificial Sequence: Synthetic oligonucleotide
  Antisense strand to SEQ ID NO: 1310720
ugccauagauuacuuacgu

SEQ ID NO: 1310722 - RNA, 19 nt, Artificial Sequence
  Description of Artificial Sequence: Synthetic oligonucleotide
  Sense strand starting at position 18 of SEQ ID NO: 1241930
ggugucacccuagaccuaa

SEQ ID NO: 1310723 - RNA, 19 nt, Artificial Sequence
  Description of Artificial Sequence: Synthetic oligonucleotide
  Antisense strand to SEQ ID NO: 1310722
uuaggucuagggugacacc

SEQ ID NO: 1310724 - RNA, 19 nt, Artificial Sequence
  Description of Artificial Sequence: Synthetic oligonucleotide
  Sense strand starting at position 49 of SEQ ID NO: 1241930
uacaaauguggccagaagu

SEQ ID NO: 1310725 - RNA, 19 nt, Artificial Sequence
  Description of Artificial Sequence: Synthetic oligonucleotide
  Antisense strand to SEQ ID NO: 1310724
acuucuggccacauuugua

SEQ ID NO: 1310726 - RNA, 19 nt, Artificial Sequence
  Description of Artificial Sequence: Synthetic oligonucleotide
  Sense strand starting at position 134 of SEQ ID NO: 1241930
agaguaagucaguggccaa

SEQ ID NO: 1310727 - RNA, 19 nt, Artificial Sequence
  Description of Artificial Sequence: Synthetic oligonucleotide
  Antisense strand to SEQ ID NO: 1310726
uuggccacugacuuacucu

SEQ ID NO: 1310728 - RNA, 19 nt, Artificial Sequence
  Description of Artificial Sequence: Synthetic oligonucleotide
  Sense strand starting at position 135 of SEQ ID NO: 1241930
gaguaagucaguggccaaa

SEQ ID NO: 1310729 - RNA, 19 nt, Artificial Sequence
  Description of Artificial Sequence: Synthetic oligonucleotide
  Antisense strand to SEQ ID NO: 1310728
uuuggccacugacuuacuc

SEQ ID NO: 1310730 - RNA, 19 nt, Artificial Sequence
  Description of Artificial Sequence: Synthetic oligonucleotide
  Sense strand starting at position 230 of SEQ ID NO: 1241930
agguuaccaucauuaaaug

SEQ ID NO: 1310731 - RNA, 19 nt, Artificial Sequence
  Description of Artificial Sequence: Synthetic oligonucleotide
  Antisense strand to SEQ ID NO: 1310730
cauuuaaugaugguaaccu

SEQ ID NO: 1310732 - RNA, 19 nt, Artificial Sequence
  Description of Artificial Sequence: Synthetic oligonucleotide
  Sense strand starting at position 231 of SEQ ID NO: 1241930
gguuaccaucauuaaaugu

SEQ ID NO: 1310733 - RNA, 19 nt, Artificial Sequence
  Description of Artificial Sequence: Synthetic oligonucleotide
  Antisense strand to SEQ ID NO: 1310732
acauuuaaugaugguaacc

SEQ ID NO: 1310734 - RNA, 19 nt, Artificial Sequence
  Description of Artificial Sequence: Synthetic oligonucleotide
  Sense strand starting at position 247 of SEQ ID NO: 1241930
ugucuuuacagagaggcuu

SEQ ID NO: 1310735 - RNA, 19 nt, Artificial Sequence
  Description of Artificial Sequence: Synthetic oligonucleotide
  Antisense strand to SEQ ID NO: 1310734
aagccucucuguaaagaca

SEQ ID NO: 1310736 - RNA, 19 nt, Artificial Sequence
  Description of Artificial Sequence: Synthetic oligonucleotide
  Sense strand starting at position 433 of SEQ ID NO: 1241930
ucaguacuaucugcauaug

SEQ ID NO: 1310737 - RNA, 19 nt, Artificial Sequence
  Description of Artificial Sequence: Synthetic oligonucleotide
  Antisense strand to SEQ ID NO: 1310736
cauaugcagauaguacuga

SEQ ID NO: 1310738 - RNA, 19 nt, Artificial Sequence
  Description of Artificial Sequence: Synthetic oligonucleotide
  Sense strand starting at position 457 of SEQ ID NO: 1241930
gagugaguuacuggucaug

SEQ ID NO: 1310739 - RNA, 19 nt, Artificial Sequence
  Description of Artificial Sequence: Synthetic oligonucleotide
  Antisense strand to SEQ ID NO: 1310738
caugaccaguaacucacuc

SEQ ID NO: 1310740 - RNA, 19 nt, Artificial Sequence
  Description of Artificial Sequence: Synthetic oligonucleotide
  Sense strand starting at position 460 of SEQ ID NO: 1241930
ugaguuacuggucauguca

SEQ ID NO: 1310741 - RNA, 19 nt, Artificial Sequence
  Description of Artificial Sequence: Synthetic oligonucleotide
  Antisense strand to SEQ ID NO: 1310740
ugacaugaccaguaacuca

SEQ ID NO: 1310742 - RNA, 19 nt, Artificial Sequence
  Description of Artificial Sequence: Synthetic oligonucleotide
  Sense strand starting at position 467 of SEQ ID NO: 1241930
cuggucaugucauuaucaa

SEQ ID NO: 1310743 - RNA, 19 nt, Artificial Sequence
  Description of Artificial Sequence: Synthetic oligonucleotide
  Antisense strand to SEQ ID NO: 1310742
uugauaaugacaugaccag

SEQ ID NO: 1310744 - RNA, 19 nt, Artificial Sequence
  Description of Artificial Sequence: Synthetic oligonucleotide
  Sense strand starting at position 468 of SEQ ID NO: 1241930
uggucaugucauuaucaaa

SEQ ID NO: 1310745 - RNA, 19 nt, Artificial Sequence
  Description of Artificial Sequence: Synthetic oligonucleotide
  Antisense strand to SEQ ID NO: 1310744
uuugauaaugacaugacca

SEQ ID NO: 1310746 - RNA, 19 nt, Artificial Sequence
  Description of Artificial Sequence: Synthetic oligonucleotide
  Sense strand starting at position 594 of SEQ ID NO: 1241930
uguaucauacauugcauua

SEQ ID NO: 1310747 - RNA, 19 nt, Artificial Sequence
  Description of Artificial Sequence: Synthetic oligonucleotide
  Antisense strand to SEQ ID NO: 1310746
uaaugcaauguaugauaca

SEQ ID NO: 1310748 - RNA, 19 nt, Artificial Sequence
  Description of Artificial Sequence: Synthetic oligonucleotide
  Sense strand starting at position 605 of SEQ ID NO: 1241930
uugcauuaucaaggacuau

SEQ ID NO: 1310749 - RNA, 19 nt, Artificial Sequence
  Description of Artificial Sequence: Synthetic oligonucleotide
  Antisense strand to SEQ ID NO: 1310748
auaguccuugauaaugcaa

SEQ ID NO: 1310750 - RNA, 19 nt, Artificial Sequence
  Description of Artificial Sequence: Synthetic oligonucleotide
  Sense strand starting at position 1144 of SEQ ID NO: 1241930
gcaaguaucgucguguaag

SEQ ID NO: 1310751 - RNA, 19 nt, Artificial Sequence
  Description of Artificial Sequence: Synthetic oligonucleotide
  Antisense strand to SEQ ID NO: 1310750
cuuacacgacgauacuugc

SEQ ID NO: 1310752 - RNA, 19 nt, Artificial Sequence
  Description of Artificial Sequence: Synthetic oligonucleotide
  Sense strand starting at position 1146 of SEQ ID NO: 1241930
aaguaucgucguguaagua

SEQ ID NO: 1310753 - RNA, 19 nt, Artificial Sequence
  Description of Artificial Sequence: Synthetic oligonucleotide
  Antisense strand to SEQ ID NO: 1310752
uacuuacacgacgauacuu

SEQ ID NO: 1310754 - RNA, 19 nt, Artificial Sequence
  Description of Artificial Sequence: Synthetic oligonucleotide
  Sense strand starting at position 1247 of SEQ ID NO: 1241930
uuuaaaggucuccaggcau

SEQ ID NO: 1310755 - RNA, 19 nt, Artificial Sequence
  Description of Artificial Sequence: Synthetic oligonucleotide
  Antisense strand to SEQ ID NO: 1310754
augccuggagaccuuuaaa

SEQ ID NO: 1310756 - RNA, 19 nt, Artificial Sequence
  Description of Artificial Sequence: Synthetic oligonucleotide
  Sense strand starting at position 1317 of SEQ ID NO: 1241930
uucccaauuugugacaaga

SEQ ID NO: 1310757 - RNA, 19 nt, Artificial Sequence
  Description of Artificial Sequence: Synthetic oligonucleotide
  Antisense strand to SEQ ID NO: 1310756
ucuugucacaaauugggaa

SEQ ID NO: 1310758 - RNA, 19 nt, Artificial Sequence
  Description of Artificial Sequence: Synthetic oligonucleotide
  Sense strand starting at position 1319 of SEQ ID NO: 1241930
cccaauuugugacaagaac

SEQ ID NO: 1310759 - RNA, 19 nt, Artificial Sequence
  Description of Artificial Sequence: Synthetic oligonucleotide
  Antisense strand to SEQ ID NO: 1310758
guucuugucacaaauuggg

SEQ ID NO: 1310760 - RNA, 19 nt, Artificial Sequence
  Description of Artificial Sequence: Synthetic oligonucleotide
  Sense strand starting at position 1330 of SEQ ID NO: 1241930
acaagaacuuguuuguaau

SEQ ID NO: 1310761 - RNA, 19 nt, Artificial Sequence
  Description of Artificial Sequence: Synthetic oligonucleotide
  Antisense strand to SEQ ID NO: 1310760
auuacaaacaaguucuugu

SEQ ID NO: 1310762 - RNA, 19 nt, Artificial Sequence
  Description of Artificial Sequence: Synthetic oligonucleotide
  Sense strand starting at position 1340 of SEQ ID NO: 1241930
guuuguaauuucccauagu

SEQ ID NO: 1310763 - RNA, 19 nt, Artificial Sequence
  Description of Artificial Sequence: Synthetic oligonucleotide
  Antisense strand to SEQ ID NO: 1310762
acuaugggaaauuacaaac

SEQ ID NO: 1310764 - RNA, 19 nt, Artificial Sequence
  Description of Artificial Sequence: Synthetic oligonucleotide
  Sense strand starting at position 1370 of SEQ ID NO: 1241930
uuagguccuuacccagaaa

SEQ ID NO: 1310765 - RNA, 19 nt, Artificial Sequence
  Description of Artificial Sequence: Synthetic oligonucleotide
  Antisense strand to SEQ ID NO: 1310764
uuucuggguaaggaccuaa

SEQ ID NO: 1310766 - RNA, 19 nt, Artificial Sequence
  Description of Artificial Sequence: Synthetic oligonucleotide
  Sense strand starting at position 1407 of SEQ ID NO: 1241930
caucucgaguuccugaauu

SEQ ID NO: 1310767 - RNA, 19 nt, Artificial Sequence
  Description of Artificial Sequence: Synthetic oligonucleotide
  Antisense strand to SEQ ID NO: 1310766
aauucaggaacucgagaug

SEQ ID NO: 1310768 - RNA, 19 nt, Artificial Sequence
  Description of Artificial Sequence: Synthetic oligonucleotide
  Sense strand starting at position 1548 of SEQ ID NO: 1241930
cgcucuacgagugaucaag

SEQ ID NO: 1310769 - RNA, 19 nt, Artificial Sequence
  Description of Artificial Sequence: Synthetic oligonucleotide
  Antisense strand to SEQ ID NO: 1310768
cuugaucacucguagagcg

SEQ ID NO: 1310770 - RNA, 19 nt, Artificial Sequence
  Description of Artificial Sequence: Synthetic oligonucleotide
  Sense strand starting at position 2066 of SEQ ID NO: 1241930
caacgucagcguucgaguu

SEQ ID NO: 1310771 - RNA, 19 nt, Artificial Sequence
  Description of Artificial Sequence: Synthetic oligonucleotide
  Antisense strand to SEQ ID NO: 1310770
aacucgaacgcugacguug

SEQ ID NO: 1310772 - RNA, 19 nt, Artificial Sequence
  Description of Artificial Sequence: Synthetic oligonucleotide
  Sense strand starting at position 2212 of SEQ ID NO: 1241930
gggcaacgucauugaccaa

SEQ ID NO: 1310773 - RNA, 19 nt, Artificial Sequence
  Description of Artificial Sequence: Synthetic oligonucleotide
  Antisense strand to SEQ ID NO: 1310772
uuggucaaugacguugccc

SEQ ID NO: 1310774 - RNA, 19 nt, Artificial Sequence
  Description of Artificial Sequence: Synthetic oligonucleotide
  Sense strand starting at position 2297 of SEQ ID NO: 1241930
uaggaauccuacucgauag

SEQ ID NO: 1310775 - RNA, 19 nt, Artificial Sequence
  Description of Artificial Sequence: Synthetic oligonucleotide
  Antisense strand to SEQ ID NO: 1310774
cuaucgaguaggauuccua

SEQ ID NO: 1310776 - RNA, 19 nt, Artificial Sequence
  Description of Artificial Sequence: Synthetic oligonucleotide
  Sense strand starting at position 2299 of SEQ ID NO: 1241930
ggaauccuacucgauaggu

SEQ ID NO: 1310777 - RNA, 19 nt, Artificial Sequence
  Description of Artificial Sequence: Synthetic oligonucleotide
  Antisense strand to SEQ ID NO: 1310776
accuaucgaguaggauucc

SEQ ID NO: 1310778 - RNA, 19 nt, Artificial Sequence
  Description of Artificial Sequence: Synthetic oligonucleotide
  Sense strand starting at position 2319 of SEQ ID NO: 1241930
gcacggauugcggagagaa

SEQ ID NO: 1310779 - RNA, 19 nt, Artificial Sequence
  Description of Artificial Sequence: Synthetic oligonucleotide
  Antisense strand to SEQ ID NO: 1310778
uucucuccgcaauccgugc

SEQ ID NO: 1310780 - RNA, 19 nt, Artificial Sequence
  Description of Artificial Sequence: Synthetic oligonucleotide
  Sense strand starting at position 2642 of SEQ ID NO: 1241930
uuaguucuagacugaaguu

SEQ ID NO: 1310781 - RNA, 19 nt, Artificial Sequence
  Description of Artificial Sequence: Synthetic oligonucleotide
  Antisense strand to SEQ ID NO: 1310780
aacuucagucuagaacuaa

SEQ ID NO: 1310782 - RNA, 19 nt, Artificial Sequence
  Description of Artificial Sequence: Synthetic oligonucleotide
  Sense strand starting at position 2669 of SEQ ID NO: 1241930
gcaccacuuggcugaaauu

SEQ ID NO: 1310783 - RNA, 19 nt, Artificial Sequence
  Description of Artificial Sequence: Synthetic oligonucleotide
  Antisense strand to SEQ ID NO: 1310782
aauuucagccaaguggugc

SEQ ID NO: 1310784 - RNA, 19 nt, Artificial Sequence
  Description of Artificial Sequence: Synthetic oligonucleotide
  Sense strand starting at position 2740 of SEQ ID NO: 1241930
gacagugaauuccuagcuu

SEQ ID NO: 1310785 - RNA, 19 nt, Artificial Sequence
  Description of Artificial Sequence: Synthetic oligonucleotide
  Antisense strand to SEQ ID NO: 1310784
aagcuaggaauucacuguc

SEQ ID NO: 1310786 - RNA, 19 nt, Artificial Sequence
  Description of Artificial Sequence: Synthetic oligonucleotide
  Sense strand starting at position 3233 of SEQ ID NO: 1241930
cacaccuguuugguuagaa

SEQ ID NO: 1310787 - RNA, 19 nt, Artificial Sequence
  Description of Artificial Sequence: Synthetic oligonucleotide
  Antisense strand to SEQ ID NO: 1310786
uucuaaccaaacaggugug

SEQ ID NO: 1310788 - RNA, 19 nt, Artificial Sequence
  Description of Artificial Sequence: Synthetic oligonucleotide
  Sense strand starting at position 3234 of SEQ ID NO: 1241930
acaccuguuugguuagaac

SEQ ID NO: 1310789 - RNA, 19 nt, Artificial Sequence
  Description of Artificial Sequence: Synthetic oligonucleotide
  Antisense strand to SEQ ID NO: 1310788
guucuaaccaaacaggugu

SEQ ID NO: 1310790 - RNA, 19 nt, Artificial Sequence
  Description of Artificial Sequence: Synthetic oligonucleotide
  Sense strand starting at position 3242 of SEQ ID NO: 1241930
uugguuagaacacguauaa

SEQ ID NO: 1310791 - RNA, 19 nt, Artificial Sequence
  Description of Artificial Sequence: Synthetic oligonucleotide
  Antisense strand to SEQ ID NO: 1310790
uuauacguguucuaaccaa

SEQ ID NO: 1310792 - RNA, 19 nt, Artificial Sequence
  Description of Artificial Sequence: Synthetic oligonucleotide
  Sense strand starting at position 3295 of SEQ ID NO: 1241930
acccaaguaccaggauauu

SEQ ID NO: 1310793 - RNA, 19 nt, Artificial Sequence
  Description of Artificial Sequence: Synthetic oligonucleotide
  Antisense strand to SEQ ID NO: 1310792
aauauccugguacuugggu

SEQ ID NO: 1310794 - RNA, 19 nt, Artificial Sequence
  Description of Artificial Sequence: Synthetic oligonucleotide
  Sense strand starting at position 3416 of SEQ ID NO: 1241930
gagguucuaguuugaagaa

SEQ ID NO: 1310795 - RNA, 19 nt, Artificial Sequence
  Description of Artificial Sequence: Synthetic oligonucleotide
  Antisense strand to SEQ ID NO: 1310794
uucuucaaacuagaaccuc

SEQ ID NO: 1310796 - RNA, 19 nt, Artificial Sequence
  Description of Artificial Sequence: Synthetic oligonucleotide
  Sense strand starting at position 3670 of SEQ ID NO: 1241930
ucucgaacuccguaucuca

SEQ ID NO: 1310797 - RNA, 19 nt, Artificial Sequence
  Description of Artificial Sequence: Synthetic oligonucleotide
  Antisense strand to SEQ ID NO: 1310796
ugagauacggaguucgaga

SEQ ID NO: 1310798 - RNA, 19 nt, Artificial Sequence
  Description of Artificial Sequence: Synthetic oligonucleotide
  Sense strand starting at position 3788 of SEQ ID NO: 1241930
gugcaauggccugaucacu

SEQ ID NO: 1310799 - RNA, 19 nt, Artificial Sequence
  Description of Artificial Sequence: Synthetic oligonucleotide
  Antisense strand to SEQ ID NO: 1310798
agugaucaggccauugcac

SEQ ID NO: 1310800 - RNA, 19 nt, Artificial Sequence
  Description of Artificial Sequence: Synthetic oligonucleotide
  Sense strand starting at position 3796 of SEQ ID NO: 1241930
gccugaucacugugcauuu

SEQ ID NO: 1310801 - RNA, 19 nt, Artificial Sequence
  Description of Artificial Sequence: Synthetic oligonucleotide
  Antisense strand to SEQ ID NO: 1310800
aaaugcacagugaucaggc

SEQ ID NO: 1310802 - RNA, 19 nt, Artificial Sequence
  Description of Artificial Sequence: Synthetic oligonucleotide
  Sense strand starting at position 467 of SEQ ID NO: 1241931
aagagauucuagggagaag

SEQ ID NO: 1310803 - RNA, 19 nt, Artificial Sequence
  Description of Artificial Sequence: Synthetic oligonucleotide
  Antisense strand to SEQ ID NO: 1310802
cuucucccuagaaucucuu

SEQ ID NO: 1310804 - RNA, 19 nt, Artificial Sequence
  Description of Artificial Sequence: Synthetic oligonucleotide
  Sense strand starting at position 2573 of SEQ ID NO: 1241931
cagcaacugugugcaaaua

SEQ ID NO: 1310805 - RNA, 19 nt, Artificial Sequence
  Description of Artificial Sequence: Synthetic oligonucleotide
  Antisense strand to SEQ ID NO: 1310804
uauuugcacacaguugcug

SEQ ID NO: 1310806 - RNA, 19 nt, Artificial Sequence
  Description of Artificial Sequence: Synthetic oligonucleotide
  Sense strand starting at position 31 of SEQ ID NO: 1241932
auuagaaggugaguuauag

SEQ ID NO: 1310807 - RNA, 19 nt, Artificial Sequence
  Description of Artificial Sequence: Synthetic oligonucleotide
  Antisense strand to SEQ ID NO: 1310806
cuauaacucaccuucuaau

SEQ ID NO: 1310808 - RNA, 19 nt, Artificial Sequence
  Description of Artificial Sequence: Synthetic oligonucleotide
  Sense strand starting at position 60 of SEQ ID NO: 1241932
cccaaauuagugggauaug

SEQ ID NO: 1310809 - RNA, 19 nt, Artificial Sequence
  Description of Artificial Sequence: Synthetic oligonucleotide
  Antisense strand to SEQ ID NO: 1310808
cauaucccacuaauuuggg

SEQ ID NO: 1310810 - RNA, 19 nt, Artificial Sequence
  Description of Artificial Sequence: Synthetic oligonucleotide
  Sense strand starting at position 123 of SEQ ID NO: 1241932
uaaggaauauuguuaucug

SEQ ID NO: 1310811 - RNA, 19 nt, Artificial Sequence
  Description of Artificial Sequence: Synthetic oligonucleotide
  Antisense strand to SEQ ID NO: 1310810
cagauaacaauauuccuua

SEQ ID NO: 1310812 - RNA, 19 nt, Artificial Sequence
  Description of Artificial Sequence: Synthetic oligonucleotide
  Sense strand starting at position 165 of SEQ ID NO: 1241932
aagcaaauugagcauagua

SEQ ID NO: 1310813 - RNA, 19 nt, Artificial Sequence
  Description of Artificial Sequence: Synthetic oligonucleotide
  Antisense strand to SEQ ID NO: 1310812
uacuaugcucaauuugcuu

SEQ ID NO: 1310814 - RNA, 19 nt, Artificial Sequence
  Description of Artificial Sequence: Synthetic oligonucleotide
  Sense strand starting at position 167 of SEQ ID NO: 1241932
gcaaauugagcauaguaga

SEQ ID NO: 1310815 - RNA, 19 nt, Artificial Sequence
  Description of Artificial Sequence: Synthetic oligonucleotide
  Antisense strand to SEQ ID NO: 1310814
ucuacuaugcucaauuugc

SEQ ID NO: 1310816 - RNA, 19 nt, Artificial Sequence
  Description of Artificial Sequence: Synthetic oligonucleotide
  Sense strand starting at position 404 of SEQ ID NO: 1241932
augucugguaugcauaaga

SEQ ID NO: 1310817 - RNA, 19 nt, Artificial Sequence
  Description of Artificial Sequence: Synthetic oligonucleotide
  Antisense strand to SEQ ID NO: 1310816
ucuuaugcauaccagacau

SEQ ID NO: 1310818 - RNA, 19 nt, Artificial Sequence
  Description of Artificial Sequence: Synthetic oligonucleotide
  Sense strand starting at position 586 of SEQ ID NO: 1241932
uuuauagacugucuugaaa

SEQ ID NO: 1310819 - RNA, 19 nt, Artificial Sequence
  Description of Artificial Sequence: Synthetic oligonucleotide
  Antisense strand to SEQ ID NO: 1310818
uuucaagacagucuauaaa

SEQ ID NO: 1310820 - RNA, 19 nt, Artificial Sequence
  Description of Artificial Sequence: Synthetic oligonucleotide
  Sense strand starting at position 748 of SEQ ID NO: 1241932
acaagaucuccguaguuag

SEQ ID NO: 1310821 - RNA, 19 nt, Artificial Sequence
  Description of Artificial Sequence: Synthetic oligonucleotide
  Antisense strand to SEQ ID NO: 1310820
cuaacuacggagaucuugu

SEQ ID NO: 1310822 - RNA, 19 nt, Artificial Sequence
  Description of Artificial Sequence: Synthetic oligonucleotide
  Sense strand starting at position 885 of SEQ ID NO: 1241932
aaaccaaugugguugggau

SEQ ID NO: 1310823 - RNA, 19 nt, Artificial Sequence
  Description of Artificial Sequence: Synthetic oligonucleotide
  Antisense strand to SEQ ID NO: 1310822
aucccaaccacauugguuu

SEQ ID NO: 1310824 - RNA, 19 nt, Artificial Sequence
  Description of Artificial Sequence: Synthetic oligonucleotide
  Sense strand starting at position 886 of SEQ ID NO: 1241932
aaccaaugugguugggauu

SEQ ID NO: 1310825 - RNA, 19 nt, Artificial Sequence
  Description of Artificial Sequence: Synthetic oligonucleotide
  Antisense strand to SEQ ID NO: 1310824
aaucccaaccacauugguu

SEQ ID NO: 1310826 - RNA, 19 nt, Artificial Sequence
  Description of Artificial Sequence: Synthetic oligonucleotide
  Sense strand starting at position 937 of SEQ ID NO: 1241932
auaagauugucacucuaga

SEQ ID NO: 1310827 - RNA, 19 nt, Artificial Sequence
  Description of Artificial Sequence: Synthetic oligonucleotide
  Antisense strand to SEQ ID NO: 1310826
ucuagagugacaaucuuau

SEQ ID NO: 1310828 - RNA, 19 nt, Artificial Sequence
  Description of Artificial Sequence: Synthetic oligonucleotide
  Sense strand starting at position 959 of SEQ ID NO: 1241932
cucauuaugcagugauuuc

SEQ ID NO: 1310829 - RNA, 19 nt, Artificial Sequence
  Description of Artificial Sequence: Synthetic oligonucleotide
  Antisense strand to SEQ ID NO: 1310828
gaaaucacugcauaaugag

SEQ ID NO: 1310830 - RNA, 19 nt, Artificial Sequence
  Description of Artificial Sequence: Synthetic oligonucleotide
  Sense strand starting at position 969 of SEQ ID NO: 1241932
agugauuucuagggaauuu

SEQ ID NO: 1310831 - RNA, 19 nt, Artificial Sequence
  Description of Artificial Sequence: Synthetic oligonucleotide
  Antisense strand to SEQ ID NO: 1310830
aaauucccuagaaaucacu

SEQ ID NO: 1310832 - RNA, 19 nt, Artificial Sequence
  Description of Artificial Sequence: Synthetic oligonucleotide
  Sense strand starting at position 1188 of SEQ ID NO: 1241932
agcccuauccuacaagagu

SEQ ID NO: 1310833 - RNA, 19 nt, Artificial Sequence
  Description of Artificial Sequence: Synthetic oligonucleotide
  Antisense strand to SEQ ID NO: 1310832
acucuuguaggauagggcu

SEQ ID NO: 1310834 - RNA, 19 nt, Artificial Sequence
  Description of Artificial Sequence: Synthetic oligonucleotide
  Sense strand starting at position 1194 of SEQ ID NO: 1241932
auccuacaagaguguuaua

SEQ ID NO: 1310835 - RNA, 19 nt, Artificial Sequence
  Description of Artificial Sequence: Synthetic oligonucleotide
  Antisense strand to SEQ ID NO: 1310834
uauaacacucuuguaggau

SEQ ID NO: 1310836 - RNA, 19 nt, Artificial Sequence
  Description of Artificial Sequence: Synthetic oligonucleotide
  Sense strand starting at position 1204 of SEQ ID NO: 1241932
aguguuauaccucgauuua

SEQ ID NO: 1310837 - RNA, 19 nt, Artificial Sequence
  Description of Artificial Sequence: Synthetic oligonucleotide
  Antisense strand to SEQ ID NO: 1310836
uaaaucgagguauaacacu

SEQ ID NO: 1310838 - RNA, 19 nt, Artificial Sequence
  Description of Artificial Sequence: Synthetic oligonucleotide
  Sense strand starting at position 1287 of SEQ ID NO: 1241932
agaaaucagucauugagcu

SEQ ID NO: 1310839 - RNA, 19 nt, Artificial Sequence
  Description of Artificial Sequence: Synthetic oligonucleotide
  Antisense strand to SEQ ID NO: 1310838
agcucaaugacugauuucu

SEQ ID NO: 1310840 - RNA, 19 nt, Artificial Sequence
  Description of Artificial Sequence: Synthetic oligonucleotide
  Sense strand starting at position 1362 of SEQ ID NO: 1241932
uaucaaguacucugggaaa

SEQ ID NO: 1310841 - RNA, 19 nt, Artificial Sequence
  Description of Artificial Sequence: Synthetic oligonucleotide
  Antisense strand to SEQ ID NO: 1310840
uuucccagaguacuugaua

SEQ ID NO: 1310842 - RNA, 19 nt, Artificial Sequence
  Description of Artificial Sequence: Synthetic oligonucleotide
  Sense strand starting at position 1364 of SEQ ID NO: 1241932
ucaaguacucugggaaacu

SEQ ID NO: 1310843 - RNA, 19 nt, Artificial Sequence
  Description of Artificial Sequence: Synthetic oligonucleotide
  Antisense strand to SEQ ID NO: 1310842
aguuucccagaguacuuga

SEQ ID NO: 1310844 - RNA, 19 nt, Artificial Sequence
  Description of Artificial Sequence: Synthetic oligonucleotide
  Sense strand starting at position 1392 of SEQ ID NO: 1241932
ugaauauuguugguaaaca

SEQ ID NO: 1310845 - RNA, 19 nt, Artificial Sequence
  Description of Artificial Sequence: Synthetic oligonucleotide
  Antisense strand to SEQ ID NO: 1310844
uguuuaccaacaauauuca

SEQ ID NO: 1310846 - RNA, 19 nt, Artificial Sequence
  Description of Artificial Sequence: Synthetic oligonucleotide
  Sense strand starting at position 1402 of SEQ ID NO: 1241932
ugguaaacauuaucuguga

SEQ ID NO: 1310847 - RNA, 19 nt, Artificial Sequence
  Description of Artificial Sequence: Synthetic oligonucleotide
  Antisense strand to SEQ ID NO: 1310846
ucacagauaauguuuacca

SEQ ID NO: 1310848 - RNA, 19 nt, Artificial Sequence
  Description of Artificial Sequence: Synthetic oligonucleotide
  Sense strand starting at position 1403 of SEQ ID NO: 1241932
gguaaacauuaucugugaa

SEQ ID NO: 1310849 - RNA, 19 nt, Artificial Sequence
  Description of Artificial Sequence: Synthetic oligonucleotide
  Antisense strand to SEQ ID NO: 1310848
uucacagauaauguuuacc

SEQ ID NO: 1310850 - RNA, 19 nt, Artificial Sequence
  Description of Artificial Sequence: Synthetic oligonucleotide
  Sense strand starting at position 1406 of SEQ ID NO: 1241932
aaacauuaucugugaaugg

SEQ ID NO: 1310851 - RNA, 19 nt, Artificial Sequence
  Description of Artificial Sequence: Synthetic oligonucleotide
  Antisense strand to SEQ ID NO: 1310850
ccauucacagauaauguuu

SEQ ID NO: 1310852 - RNA, 19 nt, Artificial Sequence
  Description of Artificial Sequence: Synthetic oligonucleotide
  Sense strand starting at position 2004 of SEQ ID NO: 1241932
caaacaaucugaguguuga

SEQ ID NO: 1310853 - RNA, 19 nt, Artificial Sequence
  Description of Artificial Sequence: Synthetic oligonucleotide
  Antisense strand to SEQ ID NO: 1310852
ucaacacucagauuguuug

SEQ ID NO: 1310854 - RNA, 19 nt, Artificial Sequence
  Description of Artificial Sequence: Synthetic oligonucleotide
  Sense strand starting at position 2005 of SEQ ID NO: 1241932
aaacaaucugaguguugag

SEQ ID NO: 1310855 - RNA, 19 nt, Artificial Sequence
  Description of Artificial Sequence: Synthetic oligonucleotide
  Antisense strand to SEQ ID NO: 1310854
cucaacacucagauuguuu

SEQ ID NO: 1310856 - RNA, 19 nt, Artificial Sequence
  Description of Artificial Sequence: Synthetic oligonucleotide
  Sense strand starting at position 2099 of SEQ ID NO: 1241932
aaaguucugcuuguucgua

SEQ ID NO: 1310857 - RNA, 19 nt, Artificial Sequence
  Description of Artificial Sequence: Synthetic oligonucleotide
  Antisense strand to SEQ ID NO: 1310856
uacgaacaagcagaacuuu

SEQ ID NO: 1310858 - RNA, 19 nt, Artificial Sequence
  Description of Artificial Sequence: Synthetic oligonucleotide
  Sense strand starting at position 2377 of SEQ ID NO: 1241932
cguacuuggcaugaaugaa

SEQ ID NO: 1310859 - RNA, 19 nt, Artificial Sequence
  Description of Artificial Sequence: Synthetic oligonucleotide
  Antisense strand to SEQ ID NO: 1310858
uucauucaugccaaguacg

SEQ ID NO: 1310860 - RNA, 19 nt, Artificial Sequence
  Description of Artificial Sequence: Synthetic oligonucleotide
  Sense strand starting at position 2485 of SEQ ID NO: 1241932
acagcaguauauccugaaa

SEQ ID NO: 1310861 - RNA, 19 nt, Artificial Sequence
  Description of Artificial Sequence: Synthetic oligonucleotide
  Antisense strand to SEQ ID NO: 1310860
uuucaggauauacugcugu

SEQ ID NO: 1310862 - RNA, 19 nt, Artificial Sequence
  Description of Artificial Sequence: Synthetic oligonucleotide
  Sense strand starting at position 2559 of SEQ ID NO: 1241932
aacagcuugucauugagaa

SEQ ID NO: 1310863 - RNA, 19 nt, Artificial Sequence
  Description of Artificial Sequence: Synthetic oligonucleotide
  Antisense strand to SEQ ID NO: 1310862
uucucaaugacaagcuguu

SEQ ID NO: 1310864 - RNA, 19 nt, Artificial Sequence
  Description of Artificial Sequence: Synthetic oligonucleotide
  Sense strand starting at position 2629 of SEQ ID NO: 1241932
agaguuauuugacagacag

SEQ ID NO: 1310865 - RNA, 19 nt, Artificial Sequence
  Description of Artificial Sequence: Synthetic oligonucleotide
  Antisense strand to SEQ ID NO: 1310864
cugucugucaaauaacucu

SEQ ID NO: 1310866 - RNA, 19 nt, Artificial Sequence
  Description of Artificial Sequence: Synthetic oligonucleotide
  Sense strand starting at position 2685 of SEQ ID NO: 1241932
cauggagguagcuggaaua

SEQ ID NO: 1310867 - RNA, 19 nt, Artificial Sequence
  Description of Artificial Sequence: Synthetic oligonucleotide
  Antisense strand to SEQ ID NO: 1310866
uauuccagcuaccuccaug

SEQ ID NO: 1310868 - RNA, 19 nt, Artificial Sequence
  Description of Artificial Sequence: Synthetic oligonucleotide
  Sense strand starting at position 2815 of SEQ ID NO: 1241932
acauguugcugaguuauuu

SEQ ID NO: 1310869 - RNA, 19 nt, Artificial Sequence
  Description of Artificial Sequence: Synthetic oligonucleotide
  Antisense strand to SEQ ID NO: 1310868
aaauaacucagcaacaugu

SEQ ID NO: 1310870 - RNA, 19 nt, Artificial Sequence
  Description of Artificial Sequence: Synthetic oligonucleotide
  Sense strand starting at position 3005 of SEQ ID NO: 1241932
ggaguaaagcauuauaagu

SEQ ID NO: 1310871 - RNA, 19 nt, Artificial Sequence
  Description of Artificial Sequence: Synthetic oligonucleotide
  Antisense strand to SEQ ID NO: 1310870
acuuauaaugcuuuacucc

SEQ ID NO: 1310872 - RNA, 19 nt, Artificial Sequence
  Description of Artificial Sequence: Synthetic oligonucleotide
  Sense strand starting at position 3236 of SEQ ID NO: 1241932
ucuuuaugaguguaucuag

SEQ ID NO: 1310873 - RNA, 19 nt, Artificial Sequence
  Description of Artificial Sequence: Synthetic oligonucleotide
  Antisense strand to SEQ ID NO: 1310872
cuagauacacucauaaaga

SEQ ID NO: 1310874 - RNA, 19 nt, Artificial Sequence
  Description of Artificial Sequence: Synthetic oligonucleotide
  Sense strand starting at position 3239 of SEQ ID NO: 1241932
uuaugaguguaucuagaca

SEQ ID NO: 1310875 - RNA, 19 nt, Artificial Sequence
  Description of Artificial Sequence: Synthetic oligonucleotide
  Antisense strand to SEQ ID NO: 1310874
ugucuagauacacucauaa

SEQ ID NO: 1310876 - RNA, 19 nt, Artificial Sequence
  Description of Artificial Sequence: Synthetic oligonucleotide
  Sense strand starting at position 3629 of SEQ ID NO: 1241932
auuguuagccaauagaauu

SEQ ID NO: 1310877 - RNA, 19 nt, Artificial Sequence
  Description of Artificial Sequence: Synthetic oligonucleotide
  Antisense strand to SEQ ID NO: 1310876
aauucuauuggcuaacaau

SEQ ID NO: 1310878 - RNA, 19 nt, Artificial Sequence
  Description of Artificial Sequence: Synthetic oligonucleotide
  Sense strand starting at position 3713 of SEQ ID NO: 1241932
acacauuuguaauaggaau

SEQ ID NO: 1310879 - RNA, 19 nt, Artificial Sequence
  Description of Artificial Sequence: Synthetic oligonucleotide
  Antisense strand to SEQ ID NO: 1310878
auuccuauuacaaaugugu

SEQ ID NO: 1310880 - RNA, 19 nt, Artificial Sequence
  Description of Artificial Sequence: Synthetic oligonucleotide
  Sense strand starting at position 3907 of SEQ ID NO: 1241932
uugaaugugacuuagaguu

SEQ ID NO: 1310881 - RNA, 19 nt, Artificial Sequence
  Description of Artificial Sequence: Synthetic oligonucleotide
  Antisense strand to SEQ ID NO: 1310880
aacucuaagucacauucaa

SEQ ID NO: 1310882 - RNA, 19 nt, Artificial Sequence
  Description of Artificial Sequence: Synthetic oligonucleotide
  Sense strand starting at position 3914 of SEQ ID NO: 1241932
ugacuuagaguucagugga

SEQ ID NO: 1310883 - RNA, 19 nt, Artificial Sequence
  Description of Artificial Sequence: Synthetic oligonucleotide
  Antisense strand to SEQ ID NO: 1310882
uccacugaacucuaaguca

SEQ ID NO: 1310884 - RNA, 19 nt, Artificial Sequence
  Description of Artificial Sequence: Synthetic oligonucleotide
  Sense strand starting at position 3917 of SEQ ID NO: 1241932
cuuagaguucaguggagau

SEQ ID NO: 1310885 - RNA, 19 nt, Artificial Sequence
  Description of Artificial Sequence: Synthetic oligonucleotide
  Antisense strand to SEQ ID NO: 1310884
aucuccacugaacucuaag

SEQ ID NO: 1310886 - RNA, 19 nt, Artificial Sequence
  Description of Artificial Sequence: Synthetic oligonucleotide
  Sense strand starting at position 128 of SEQ ID NO: 1241933
cacugcuuccacgauggaa

SEQ ID NO: 1310887 - RNA, 19 nt, Artificial Sequence
  Description of Artificial Sequence: Synthetic oligonucleotide
  Antisense strand to SEQ ID NO: 1310886
uuccaucguggaagcagug

SEQ ID NO: 1310888 - RNA, 19 nt, Artificial Sequence
  Description of Artificial Sequence: Synthetic oligonucleotide
  Sense strand starting at position 132 of SEQ ID NO: 1241933
gcuuccacgauggaaagau

SEQ ID NO: 1310889 - RNA, 19 nt, Artificial Sequence
  Description of Artificial Sequence: Synthetic oligonucleotide
  Antisense strand to SEQ ID NO: 1310888
aucuuuccaucguggaagc

SEQ ID NO: 1310890 - RNA, 19 nt, Artificial Sequence
  Description of Artificial Sequence: Synthetic oligonucleotide
  Sense strand starting at position 452 of SEQ ID NO: 1241933
gucuucugauucccacgua

SEQ ID NO: 1310891 - RNA, 19 nt, Artificial Sequence
  Description of Artificial Sequence: Synthetic oligonucleotide
  Antisense strand to SEQ ID NO: 1310890
uacgugggaaucagaagac

SEQ ID NO: 1310892 - RNA, 19 nt, Artificial Sequence
  Description of Artificial Sequence: Synthetic oligonucleotide
  Sense strand starting at position 502 of SEQ ID NO: 1241933
gagaauccucuaggaaguu

SEQ ID NO: 1310893 - RNA, 19 nt, Artificial Sequence
  Description of Artificial Sequence: Synthetic oligonucleotide
  Antisense strand to SEQ ID NO: 1310892
aacuuccuagaggauucuc

SEQ ID NO: 1310894 - RNA, 19 nt, Artificial Sequence
  Description of Artificial Sequence: Synthetic oligonucleotide
  Sense strand starting at position 618 of SEQ ID NO: 1241933
agcguauggcguucugagu

SEQ ID NO: 1310895 - RNA, 19 nt, Artificial Sequence
  Description of Artificial Sequence: Synthetic oligonucleotide
  Antisense strand to SEQ ID NO: 1310894
acucagaacgccauacgcu

SEQ ID NO: 1310896 - RNA, 19 nt, Artificial Sequence
  Description of Artificial Sequence: Synthetic oligonucleotide
  Sense strand starting at position 619 of SEQ ID NO: 1241933
gcguauggcguucugagua

SEQ ID NO: 1310897 - RNA, 19 nt, Artificial Sequence
  Description of Artificial Sequence: Synthetic oligonucleotide
  Antisense strand to SEQ ID NO: 1310896
uacucagaacgccauacgc

SEQ ID NO: 1310898 - RNA, 19 nt, Artificial Sequence
  Description of Artificial Sequence: Synthetic oligonucleotide
  Sense strand starting at position 991 of SEQ ID NO: 1241933
ucagccaucuccgucaaau

SEQ ID NO: 1310899 - RNA, 19 nt, Artificial Sequence
  Description of Artificial Sequence: Synthetic oligonucleotide
  Antisense strand to SEQ ID NO: 1310898
auuugacggagauggcuga

SEQ ID NO: 1310900 - RNA, 19 nt, Artificial Sequence
  Description of Artificial Sequence: Synthetic oligonucleotide
  Sense strand starting at position 993 of SEQ ID NO: 1241933
agccaucuccgucaaauga

SEQ ID NO: 1310901 - RNA, 19 nt, Artificial Sequence
  Description of Artificial Sequence: Synthetic oligonucleotide
  Antisense strand to SEQ ID NO: 1310900
ucauuugacggagauggcu

SEQ ID NO: 1310902 - RNA, 19 nt, Artificial Sequence
  Description of Artificial Sequence: Synthetic oligonucleotide
  Sense strand starting at position 2401 of SEQ ID NO: 1241933
gguggaaguuaguugaaac

SEQ ID NO: 1310903 - RNA, 19 nt, Artificial Sequence
  Description of Artificial Sequence: Synthetic oligonucleotide
  Antisense strand to SEQ ID NO: 1310902
guuucaacuaacuuccacc

SEQ ID NO: 1310904 - RNA, 19 nt, Artificial Sequence
  Description of Artificial Sequence: Synthetic oligonucleotide
  Sense strand starting at position 2402 of SEQ ID NO: 1241933
guggaaguuaguugaaaca

SEQ ID NO: 1310905 - RNA, 19 nt, Artificial Sequence
  Description of Artificial Sequence: Synthetic oligonucleotide
  Antisense strand to SEQ ID NO: 1310904
uguuucaacuaacuuccac

SEQ ID NO: 1310906 - RNA, 19 nt, Artificial Sequence
  Description of Artificial Sequence: Synthetic oligonucleotide
  Sense strand starting at position 2417 of SEQ ID NO: 1241933
aacaauauuggcuaugagu

SEQ ID NO: 1310907 - RNA, 19 nt, Artificial Sequence
  Description of Artificial Sequence: Synthetic oligonucleotide
  Antisense strand to SEQ ID NO: 1310906
acucauagccaauauuguu

SEQ ID NO: 1310908 - RNA, 19 nt, Artificial Sequence
  Description of Artificial Sequence: Synthetic oligonucleotide
  Sense strand starting at position 2419 of SEQ ID NO: 1241933
caauauuggcuaugaguug

SEQ ID NO: 1310909 - RNA, 19 nt, Artificial Sequence
  Description of Artificial Sequence: Synthetic oligonucleotide
  Antisense strand to SEQ ID NO: 1310908
caacucauagccaauauug

SEQ ID NO: 1310910 - RNA, 19 nt, Artificial Sequence
  Description of Artificial Sequence: Synthetic oligonucleotide
  Sense strand starting at position 2424 of SEQ ID NO: 1241933
uuggcuaugaguugauaau

SEQ ID NO: 1310911 - RNA, 19 nt, Artificial Sequence
  Description of Artificial Sequence: Synthetic oligonucleotide
  Antisense strand to SEQ ID NO: 1310910
auuaucaacucauagccaa

SEQ ID NO: 1310912 - RNA, 19 nt, Artificial Sequence
  Description of Artificial Sequence: Synthetic oligonucleotide
  Sense strand starting at position 2425 of SEQ ID NO: 1241933
uggcuaugaguugauaauu

SEQ ID NO: 1310913 - RNA, 19 nt, Artificial Sequence
  Description of Artificial Sequence: Synthetic oligonucleotide
  Antisense strand to SEQ ID NO: 1310912
aauuaucaacucauagcca

SEQ ID NO: 1310914 - RNA, 19 nt, Artificial Sequence
  Description of Artificial Sequence: Synthetic oligonucleotide
  Sense strand starting at position 2430 of SEQ ID NO: 1241933
augaguugauaauugucga

SEQ ID NO: 1310915 - RNA, 19 nt, Artificial Sequence
  Description of Artificial Sequence: Synthetic oligonucleotide
  Antisense strand to SEQ ID NO: 1310914
ucgacaauuaucaacucau

SEQ ID NO: 1310916 - RNA, 19 nt, Artificial Sequence
  Description of Artificial Sequence: Synthetic oligonucleotide
  Sense strand starting at position 2436 of SEQ ID NO: 1241933
ugauaauugucgaggcagg

SEQ ID NO: 1310917 - RNA, 19 nt, Artificial Sequence
  Description of Artificial Sequence: Synthetic oligonucleotide
  Antisense strand to SEQ ID NO: 1310916
ccugccucgacaauuauca

SEQ ID NO: 1310918 - RNA, 19 nt, Artificial Sequence
  Description of Artificial Sequence: Synthetic oligonucleotide
  Sense strand starting at position 2437 of SEQ ID NO: 1241933
gauaauugucgaggcagga

SEQ ID NO: 1310919 - RNA, 19 nt, Artificial Sequence
  Description of Artificial Sequence: Synthetic oligonucleotide
  Antisense strand to SEQ ID NO: 1310918
uccugccucgacaauuauc

SEQ ID NO: 1310920 - RNA, 19 nt, Artificial Sequence
  Description of Artificial Sequence: Synthetic oligonucleotide
  Sense strand starting at position 2464 of SEQ ID NO: 1241933
ccuggagguuuguuauacu

SEQ ID NO: 1310921 - RNA, 19 nt, Artificial Sequence
  Description of Artificial Sequence: Synthetic oligonucleotide
  Antisense strand to SEQ ID NO: 1310920
aguauaacaaaccuccagg

SEQ ID NO: 1310922 - RNA, 19 nt, Artificial Sequence
  Description of Artificial Sequence: Synthetic oligonucleotide
  Sense strand starting at position 2473 of SEQ ID NO: 1241933
uuguuauacuguucucuua

SEQ ID NO: 1310923 - RNA, 19 nt, Artificial Sequence
  Description of Artificial Sequence: Synthetic oligonucleotide
  Antisense strand to SEQ ID NO: 1310922
uaagagaacaguauaacaa

SEQ ID NO: 1310924 - RNA, 19 nt, Artificial Sequence
  Description of Artificial Sequence: Synthetic oligonucleotide
  Sense strand starting at position 2475 of SEQ ID NO: 1241933
guuauacuguucucuuaac

SEQ ID NO: 1310925 - RNA, 19 nt, Artificial Sequence
  Description of Artificial Sequence: Synthetic oligonucleotide
  Antisense strand to SEQ ID NO: 1310924
guuaagagaacaguauaac

SEQ ID NO: 1310926 - RNA, 19 nt, Artificial Sequence
  Description of Artificial Sequence: Synthetic oligonucleotide
  Sense strand starting at position 2495 of SEQ ID NO: 1241933
uuggaauacguuuggauug

SEQ ID NO: 1310927 - RNA, 19 nt, Artificial Sequence
  Description of Artificial Sequence: Synthetic oligonucleotide
  Antisense strand to SEQ ID NO: 1310926
caauccaaacguauuccaa

SEQ ID NO: 1310928 - RNA, 19 nt, Artificial Sequence
  Description of Artificial Sequence: Synthetic oligonucleotide
  Sense strand starting at position 2502 of SEQ ID NO: 1241933
acguuuggauuguuccuua

SEQ ID NO: 1310929 - RNA, 19 nt, Artificial Sequence
  Description of Artificial Sequence: Synthetic oligonucleotide
  Antisense strand to SEQ ID NO: 1310928
uaaggaacaauccaaacgu

SEQ ID NO: 1310930 - RNA, 19 nt, Artificial Sequence
  Description of Artificial Sequence: Synthetic oligonucleotide
  Sense strand starting at position 2505 of SEQ ID NO: 1241933
uuuggauuguuccuuaaug

SEQ ID NO: 1310931 - RNA, 19 nt, Artificial Sequence
  Description of Artificial Sequence: Synthetic oligonucleotide
  Antisense strand to SEQ ID NO: 1310930
cauuaaggaacaauccaaa

SEQ ID NO: 1310932 - RNA, 19 nt, Artificial Sequence
  Description of Artificial Sequence: Synthetic oligonucleotide
  Sense strand starting at position 2506 of SEQ ID NO: 1241933
uuggauuguuccuuaauga

SEQ ID NO: 1310933 - RNA, 19 nt, Artificial Sequence
  Description of Artificial Sequence: Synthetic oligonucleotide
  Antisense strand to SEQ ID NO: 1310932
ucauuaaggaacaauccaa

SEQ ID NO: 1310934 - RNA, 19 nt, Artificial Sequence
  Description of Artificial Sequence: Synthetic oligonucleotide
  Sense strand starting at position 2828 of SEQ ID NO: 1241933
ugcucuucugauggagcaa

SEQ ID NO: 1310935 - RNA, 19 nt, Artificial Sequence
  Description of Artificial Sequence: Synthetic oligonucleotide
  Antisense strand to SEQ ID NO: 1310934
uugcuccaucagaagagca

SEQ ID NO: 1310936 - RNA, 19 nt, Artificial Sequence
  Description of Artificial Sequence: Synthetic oligonucleotide
  Sense strand starting at position 2829 of SEQ ID NO: 1241933
gcucuucugauggagcaau

SEQ ID NO: 1310937 - RNA, 19 nt, Artificial Sequence
  Description of Artificial Sequence: Synthetic oligonucleotide
  Antisense strand to SEQ ID NO: 1310936
auugcuccaucagaagagc

SEQ ID NO: 1310938 - RNA, 19 nt, Artificial Sequence
  Description of Artificial Sequence: Synthetic oligonucleotide
  Sense strand starting at position 2842 of SEQ ID NO: 1241933
agcaaucugagagggcaau

SEQ ID NO: 1310939 - RNA, 19 nt, Artificial Sequence
  Description of Artificial Sequence: Synthetic oligonucleotide
  Antisense strand to SEQ ID NO: 1310938
auugcccucucagauugcu

SEQ ID NO: 1310940 - RNA, 19 nt, Artificial Sequence
  Description of Artificial Sequence: Synthetic oligonucleotide
  Sense strand starting at position 3005 of SEQ ID NO: 1241933
gauguuggcuucuuugaca

SEQ ID NO: 1310941 - RNA, 19 nt, Artificial Sequence
  Description of Artificial Sequence: Synthetic oligonucleotide
  Antisense strand to SEQ ID NO: 1310940
ugucaaagaagccaacauc

SEQ ID NO: 1310942 - RNA, 19 nt, Artificial Sequence
  Description of Artificial Sequence: Synthetic oligonucleotide
  Sense strand starting at position 3037 of SEQ ID NO: 1241933
ggaggaaguucugucauaa

SEQ ID NO: 1310943 - RNA, 19 nt, Artificial Sequence
  Description of Artificial Sequence: Synthetic oligonucleotide
  Antisense strand to SEQ ID NO: 1310942
uuaugacagaacuuccucc

SEQ ID NO: 1310944 - RNA, 19 nt, Artificial Sequence
  Description of Artificial Sequence: Synthetic oligonucleotide
  Sense strand starting at position 3078 of SEQ ID NO: 1241933
aauggagagucaccuuuau

SEQ ID NO: 1310945 - RNA, 19 nt, Artificial Sequence
  Description of Artificial Sequence: Synthetic oligonucleotide
  Antisense strand to SEQ ID NO: 1310944
auaaaggugacucuccauu

SEQ ID NO: 1310946 - RNA, 19 nt, Artificial Sequence
  Description of Artificial Sequence: Synthetic oligonucleotide
  Sense strand starting at position 3105 of SEQ ID NO: 1241933
gaaugugcuguuuacccau

SEQ ID NO: 1310947 - RNA, 19 nt, Artificial Sequence
  Description of Artificial Sequence: Synthetic oligonucleotide
  Antisense strand to SEQ ID NO: 1310946
auggguaaacagcacauuc

SEQ ID NO: 1310948 - RNA, 19 nt, Artificial Sequence
  Description of Artificial Sequence: Synthetic oligonucleotide
  Sense strand starting at position 3108 of SEQ ID NO: 1241933
ugugcuguuuacccauauu

SEQ ID NO: 1310949 - RNA, 19 nt, Artificial Sequence
  Description of Artificial Sequence: Synthetic oligonucleotide
  Antisense strand to SEQ ID NO: 1310948
aauauggguaaacagcaca

SEQ ID NO: 1310950 - RNA, 19 nt, Artificial Sequence
  Description of Artificial Sequence: Synthetic oligonucleotide
  Sense strand starting at position 3140 of SEQ ID NO: 1241933
aggagacaguuuguggaau

SEQ ID NO: 1310951 - RNA, 19 nt, Artificial Sequence
  Description of Artificial Sequence: Synthetic oligonucleotide
  Antisense strand to SEQ ID NO: 1310950
auuccacaaacugucuccu

SEQ ID NO: 1310952 - RNA, 19 nt, Artificial Sequence
  Description of Artificial Sequence: Synthetic oligonucleotide
  Sense strand starting at position 3208 of SEQ ID NO: 1241933
ucucaacucuuggcaaaug

SEQ ID NO: 1310953 - RNA, 19 nt, Artificial Sequence
  Description of Artificial Sequence: Synthetic oligonucleotide
  Antisense strand to SEQ ID NO: 1310952
cauuugccaagaguugaga

SEQ ID NO: 1310954 - RNA, 19 nt, Artificial Sequence
  Description of Artificial Sequence: Synthetic oligonucleotide
  Sense strand starting at position 3343 of SEQ ID NO: 1241933
gggugaugcagauguucua

SEQ ID NO: 1310955 - RNA, 19 nt, Artificial Sequence
  Description of Artificial Sequence: Synthetic oligonucleotide
  Antisense strand to SEQ ID NO: 1310954
uagaacaucugcaucaccc

SEQ ID NO: 1310956 - RNA, 19 nt, Artificial Sequence
  Description of Artificial Sequence: Synthetic oligonucleotide
  Sense strand starting at position 3386 of SEQ ID NO: 1241933
acgacaacucuuugaauug

SEQ ID NO: 1310957 - RNA, 19 nt, Artificial Sequence
  Description of Artificial Sequence: Synthetic oligonucleotide
  Antisense strand to SEQ ID NO: 1310956
caauucaaagaguugucgu

SEQ ID NO: 1310958 - RNA, 19 nt, Artificial Sequence
  Description of Artificial Sequence: Synthetic oligonucleotide
  Sense strand starting at position 3462 of SEQ ID NO: 1241933
uaaagaaagucucaauggu

SEQ ID NO: 1310959 - RNA, 19 nt, Artificial Sequence
  Description of Artificial Sequence: Synthetic oligonucleotide
  Antisense strand to SEQ ID NO: 1310958
accauugagacuuucuuua

SEQ ID NO: 1310960 - RNA, 19 nt, Artificial Sequence
  Description of Artificial Sequence: Synthetic oligonucleotide
  Sense strand starting at position 3468 of SEQ ID NO: 1241933
aagucucaaugguaagaaa

SEQ ID NO: 1310961 - RNA, 19 nt, Artificial Sequence
  Description of Artificial Sequence: Synthetic oligonucleotide
  Antisense strand to SEQ ID NO: 1310960
uuucuuaccauugagacuu

SEQ ID NO: 1310962 - RNA, 19 nt, Artificial Sequence
  Description of Artificial Sequence: Synthetic oligonucleotide
  Sense strand starting at position 3572 of SEQ ID NO: 1241933
cguggaagauguucaaauc

SEQ ID NO: 1310963 - RNA, 19 nt, Artificial Sequence
  Description of Artificial Sequence: Synthetic oligonucleotide
  Antisense strand to SEQ ID NO: 1310962
gauuugaacaucuuccacg

SEQ ID NO: 1310964 - RNA, 19 nt, Artificial Sequence
  Description of Artificial Sequence: Synthetic oligonucleotide
  Sense strand starting at position 3625 of SEQ ID NO: 1241933
guggaauccaguugcugaa

SEQ ID NO: 1310965 - RNA, 19 nt, Artificial Sequence
  Description of Artificial Sequence: Synthetic oligonucleotide
  Antisense strand to SEQ ID NO: 1310964
uucagcaacuggauuccac

SEQ ID NO: 1310966 - RNA, 19 nt, Artificial Sequence
  Description of Artificial Sequence: Synthetic oligonucleotide
  Sense strand starting at position 203 of SEQ ID NO: 1241934
aaagaacucugagagguaa

SEQ ID NO: 1310967 - RNA, 19 nt, Artificial Sequence
  Description of Artificial Sequence: Synthetic oligonucleotide
  Antisense strand to SEQ ID NO: 1310966
uuaccucucagaguucuuu

SEQ ID NO: 1310968 - RNA, 19 nt, Artificial Sequence
  Description of Artificial Sequence: Synthetic oligonucleotide
  Sense strand starting at position 548 of SEQ ID NO: 1241934
gcccgccauuucuuaaaga

SEQ ID NO: 1310969 - RNA, 19 nt, Artificial Sequence
  Description of Artificial Sequence: Synthetic oligonucleotide
  Antisense strand to SEQ ID NO: 1310968
ucuuuaagaaauggcgggc

SEQ ID NO: 1310970 - RNA, 19 nt, Artificial Sequence
  Description of Artificial Sequence: Synthetic oligonucleotide
  Sense strand starting at position 579 of SEQ ID NO: 1241934
gagagaaguucguccaguc

SEQ ID NO: 1310971 - RNA, 19 nt, Artificial Sequence
  Description of Artificial Sequence: Synthetic oligonucleotide
  Antisense strand to SEQ ID NO: 1310970
gacuggacgaacuucucuc

SEQ ID NO: 1310972 - RNA, 19 nt, Artificial Sequence
  Description of Artificial Sequence: Synthetic oligonucleotide
  Sense strand starting at position 717 of SEQ ID NO: 1241934
cuuauuucucuucggucua

SEQ ID NO: 1310973 - RNA, 19 nt, Artificial Sequence
  Description of Artificial Sequence: Synthetic oligonucleotide
  Antisense strand to SEQ ID NO: 1310972
uagaccgaagagaaauaag

SEQ ID NO: 1310974 - RNA, 19 nt, Artificial Sequence
  Description of Artificial Sequence: Synthetic oligonucleotide
  Sense strand starting at position 753 of SEQ ID NO: 1241934
ugcaaugaauuauucuagu

SEQ ID NO: 1310975 - RNA, 19 nt, Artificial Sequence
  Description of Artificial Sequence: Synthetic oligonucleotide
  Antisense strand to SEQ ID NO: 1310974
acuagaauaauucauugca

SEQ ID NO: 1310976 - RNA, 19 nt, Artificial Sequence
  Description of Artificial Sequence: Synthetic oligonucleotide
  Sense strand starting at position 895 of SEQ ID NO: 1241934
agugaacuucuguaaucau

SEQ ID NO: 1310977 - RNA, 19 nt, Artificial Sequence
  Description of Artificial Sequence: Synthetic oligonucleotide
  Antisense strand to SEQ ID NO: 1310976
augauuacagaaguucacu

SEQ ID NO: 1310978 - RNA, 19 nt, Artificial Sequence
  Description of Artificial Sequence: Synthetic oligonucleotide
  Sense strand starting at position 910 of SEQ ID NO: 1241934
ucauaucuugcuuaacgga

SEQ ID NO: 1310979 - RNA, 19 nt, Artificial Sequence
  Description of Artificial Sequence: Synthetic oligonucleotide
  Antisense strand to SEQ ID NO: 1310978
uccguuaagcaagauauga

SEQ ID NO: 1310980 - RNA, 19 nt, Artificial Sequence
  Description of Artificial Sequence: Synthetic oligonucleotide
  Sense strand starting at position 1024 of SEQ ID NO: 1241934
gcacuugaaacauguagga

SEQ ID NO: 1310981 - RNA, 19 nt, Artificial Sequence
  Description of Artificial Sequence: Synthetic oligonucleotide
  Antisense strand to SEQ ID NO: 1310980
uccuacauguuucaagugc

SEQ ID NO: 1310982 - RNA, 19 nt, Artificial Sequence
  Description of Artificial Sequence: Synthetic oligonucleotide
  Sense strand starting at position 1429 of SEQ ID NO: 1241934
ggaaguauacgcuaagcca

SEQ ID NO: 1310983 - RNA, 19 nt, Artificial Sequence
  Description of Artificial Sequence: Synthetic oligonucleotide
  Antisense strand to SEQ ID NO: 1310982
uggcuuagcguauacuucc

SEQ ID NO: 1310984 - RNA, 19 nt, Artificial Sequence
  Description of Artificial Sequence: Synthetic oligonucleotide
  Sense strand starting at position 2369 of SEQ ID NO: 1241934
cucugugcucagcaccaaa

SEQ ID NO: 1310985 - RNA, 19 nt, Artificial Sequence
  Description of Artificial Sequence: Synthetic oligonucleotide
  Antisense strand to SEQ ID NO: 1310984
uuuggugcugagcacagag

SEQ ID NO: 1310986 - RNA, 19 nt, Artificial Sequence
  Description of Artificial Sequence: Synthetic oligonucleotide
  Sense strand starting at position 2445 of SEQ ID NO: 1241934
ccgaguugugaucagaaag

SEQ ID NO: 1310987 - RNA, 19 nt, Artificial Sequence
  Description of Artificial Sequence: Synthetic oligonucleotide
  Antisense strand to SEQ ID NO: 1310986
cuuucugaucacaacucgg

SEQ ID NO: 1310988 - RNA, 19 nt, Artificial Sequence
  Description of Artificial Sequence: Synthetic oligonucleotide
  Sense strand starting at position 2553 of SEQ ID NO: 1241934
ucuuucucaccaggaagua

SEQ ID NO: 1310989 - RNA, 19 nt, Artificial Sequence
  Description of Artificial Sequence: Synthetic oligonucleotide
  Antisense strand to SEQ ID NO: 1310988
uacuuccuggugagaaaga

SEQ ID NO: 1310990 - RNA, 19 nt, Artificial Sequence
  Description of Artificial Sequence: Synthetic oligonucleotide
  Sense strand starting at position 2817 of SEQ ID NO: 1241934
ccguguugucaucaauuaa

SEQ ID NO: 1310991 - RNA, 19 nt, Artificial Sequence
  Description of Artificial Sequence: Synthetic oligonucleotide
  Antisense strand to SEQ ID NO: 1310990
uuaauugaugacaacacgg

SEQ ID NO: 1310992 - RNA, 19 nt, Artificial Sequence
  Description of Artificial Sequence: Synthetic oligonucleotide
  Sense strand starting at position 2988 of SEQ ID NO: 1241934
ucaggcgaauuaucuuuaa

SEQ ID NO: 1310993 - RNA, 19 nt, Artificial Sequence
  Description of Artificial Sequence: Synthetic oligonucleotide
  Antisense strand to SEQ ID NO: 1310992
uuaaagauaauucgccuga

SEQ ID NO: 1310994 - RNA, 19 nt, Artificial Sequence
  Description of Artificial Sequence: Synthetic oligonucleotide
  Sense strand starting at position 2991 of SEQ ID NO: 1241934
ggcgaauuaucuuuaaacu

SEQ ID NO: 1310995 - RNA, 19 nt, Artificial Sequence
  Description of Artificial Sequence: Synthetic oligonucleotide
  Antisense strand to SEQ ID NO: 1310994
aguuuaaagauaauucgcc

SEQ ID NO: 1310996 - RNA, 19 nt, Artificial Sequence
  Description of Artificial Sequence: Synthetic oligonucleotide
  Sense strand starting at position 2992 of SEQ ID NO: 1241934
gcgaauuaucuuuaaacuu

SEQ ID NO: 1310997 - RNA, 19 nt, Artificial Sequence
  Description of Artificial Sequence: Synthetic oligonucleotide
  Antisense strand to SEQ ID NO: 1310996
aaguuuaaagauaauucgc

SEQ ID NO: 1310998 - RNA, 19 nt, Artificial Sequence
  Description of Artificial Sequence: Synthetic oligonucleotide
  Sense strand starting at position 3042 of SEQ ID NO: 1241934
gaacgcuuuauggagguga

SEQ ID NO: 1310999 - RNA, 19 nt, Artificial Sequence
  Description of Artificial Sequence: Synthetic oligonucleotide
  Antisense strand to SEQ ID NO: 1310998
ucaccuccauaaagcguuc

SEQ ID NO: 1311000 - RNA, 19 nt, Artificial Sequence
  Description of Artificial Sequence: Synthetic oligonucleotide
  Sense strand starting at position 3044 of SEQ ID NO: 1241934
acgcuuuauggaggugaca

SEQ ID NO: 1311001 - RNA, 19 nt, Artificial Sequence
  Description of Artificial Sequence: Synthetic oligonucleotide
  Antisense strand to SEQ ID NO: 1311000
ugucaccuccauaaagcgu

SEQ ID NO: 1311002 - RNA, 19 nt, Artificial Sequence
  Description of Artificial Sequence: Synthetic oligonucleotide
  Sense strand starting at position 3064 of SEQ ID NO: 1241934
cucuaagacucauugugag

SEQ ID NO: 1311003 - RNA, 19 nt, Artificial Sequence
  Description of Artificial Sequence: Synthetic oligonucleotide
  Antisense strand to SEQ ID NO: 1311002
cucacaaugagucuuagag

SEQ ID NO: 1311004 - RNA, 19 nt, Artificial Sequence
  Description of Artificial Sequence: Synthetic oligonucleotide
  Sense strand starting at position 3163 of SEQ ID NO: 1241934
cagugaagaugcucuucuu

SEQ ID NO: 1311005 - RNA, 19 nt, Artificial Sequence
  Description of Artificial Sequence: Synthetic oligonucleotide
  Antisense strand to SEQ ID NO: 1311004
aagaagagcaucuucacug

SEQ ID NO: 1311006 - RNA, 19 nt, Artificial Sequence
  Description of Artificial Sequence: Synthetic oligonucleotide
  Sense strand starting at position 3172 of SEQ ID NO: 1241934
ugcucuucuuagguccaaa

SEQ ID NO: 1311007 - RNA, 19 nt, Artificial Sequence
  Description of Artificial Sequence: Synthetic oligonucleotide
  Antisense strand to SEQ ID NO: 1311006
uuuggaccuaagaagagca

SEQ ID NO: 1311008 - RNA, 19 nt, Artificial Sequence
  Description of Artificial Sequence: Synthetic oligonucleotide
  Sense strand starting at position 3221 of SEQ ID NO: 1241934
uggagccaaucuguuuaaa

SEQ ID NO: 1311009 - RNA, 19 nt, Artificial Sequence
  Description of Artificial Sequence: Synthetic oligonucleotide
  Antisense strand to SEQ ID NO: 1311008
uuuaaacagauuggcucca

SEQ ID NO: 1311010 - RNA, 19 nt, Artificial Sequence
  Description of Artificial Sequence: Synthetic oligonucleotide
  Sense strand starting at position 3282 of SEQ ID NO: 1241934
uguuaaccagauuaguaau

SEQ ID NO: 1311011 - RNA, 19 nt, Artificial Sequence
  Description of Artificial Sequence: Synthetic oligonucleotide
  Antisense strand to SEQ ID NO: 1311010
auuacuaaucugguuaaca

SEQ ID NO: 1311012 - RNA, 19 nt, Artificial Sequence
  Description of Artificial Sequence: Synthetic oligonucleotide
  Sense strand starting at position 3288 of SEQ ID NO: 1241934
ccagauuaguaauuaauug

SEQ ID NO: 1311013 - RNA, 19 nt, Artificial Sequence
  Description of Artificial Sequence: Synthetic oligonucleotide
  Antisense strand to SEQ ID NO: 1311012
caauuaauuacuaaucugg

SEQ ID NO: 1311014 - RNA, 19 nt, Artificial Sequence
  Description of Artificial Sequence: Synthetic oligonucleotide
  Sense strand starting at position 3303 of SEQ ID NO: 1241934
auugcacuucugcacagaa

SEQ ID NO: 1311015 - RNA, 19 nt, Artificial Sequence
  Description of Artificial Sequence: Synthetic oligonucleotide
  Antisense strand to SEQ ID NO: 1311014
uucugugcagaagugcaau

SEQ ID NO: 1311016 - RNA, 19 nt, Artificial Sequence
  Description of Artificial Sequence: Synthetic oligonucleotide
  Sense strand starting at position 3411 of SEQ ID NO: 1241934
ccuaacaguguuuggauga

SEQ ID NO: 1311017 - RNA, 19 nt, Artificial Sequence
  Description of Artificial Sequence: Synthetic oligonucleotide
  Antisense strand to SEQ ID NO: 1311016
ucauccaaacacuguuagg

SEQ ID NO: 1311018 - RNA, 19 nt, Artificial Sequence
  Description of Artificial Sequence: Synthetic oligonucleotide
  Sense strand starting at position 3416 of SEQ ID NO: 1241934
caguguuuggaugacuuua

SEQ ID NO: 1311019 - RNA, 19 nt, Artificial Sequence
  Description of Artificial Sequence: Synthetic oligonucleotide
  Antisense strand to SEQ ID NO: 1311018
uaaagucauccaaacacug

SEQ ID NO: 1311020 - RNA, 19 nt, Artificial Sequence
  Description of Artificial Sequence: Synthetic oligonucleotide
  Sense strand starting at position 3418 of SEQ ID NO: 1241934
guguuuggaugacuuuaaa

SEQ ID NO: 1311021 - RNA, 19 nt, Artificial Sequence
  Description of Artificial Sequence: Synthetic oligonucleotide
  Antisense strand to SEQ ID NO: 1311020
uuuaaagucauccaaacac

SEQ ID NO: 1311022 - RNA, 19 nt, Artificial Sequence
  Description of Artificial Sequence: Synthetic oligonucleotide
  Sense strand starting at position 3502 of SEQ ID NO: 1241934
aguaccugucaguggcaaa

SEQ ID NO: 1311023 - RNA, 19 nt, Artificial Sequence
  Description of Artificial Sequence: Synthetic oligonucleotide
  Antisense strand to SEQ ID NO: 1311022
uuugccacugacagguacu

SEQ ID NO: 1311024 - RNA, 19 nt, Artificial Sequence
  Description of Artificial Sequence: Synthetic oligonucleotide
  Sense strand starting at position 3521 of SEQ ID NO: 1241934
acuagaaugaaaugguugu

SEQ ID NO: 1311025 - RNA, 19 nt, Artificial Sequence
  Description of Artificial Sequence: Synthetic oligonucleotide
  Antisense strand to SEQ ID NO: 1311024
acaaccauuucauucuagu

SEQ ID NO: 1311026 - RNA, 19 nt, Artificial Sequence
  Description of Artificial Sequence: Synthetic oligonucleotide
  Sense strand starting at position 3525 of SEQ ID NO: 1241934
gaaugaaaugguugucagu

SEQ ID NO: 1311027 - RNA, 19 nt, Artificial Sequence
  Description of Artificial Sequence: Synthetic oligonucleotide
  Antisense strand to SEQ ID NO: 1311026
acugacaaccauuucauuc

SEQ ID NO: 1311028 - RNA, 19 nt, Artificial Sequence
  Description of Artificial Sequence: Synthetic oligonucleotide
  Sense strand starting at position 3654 of SEQ ID NO: 1241934
aaaggcaaagcgugacauu

SEQ ID NO: 1311029 - RNA, 19 nt, Artificial Sequence
  Description of Artificial Sequence: Synthetic oligonucleotide
  Antisense strand to SEQ ID NO: 1311028
aaugucacgcuuugccuuu

SEQ ID NO: 1311030 - RNA, 19 nt, Artificial Sequence
  Description of Artificial Sequence: Synthetic oligonucleotide
  Sense strand starting at position 3663 of SEQ ID NO: 1241934
gcgugacauuuguugggca

SEQ ID NO: 1311031 - RNA, 19 nt, Artificial Sequence
  Description of Artificial Sequence: Synthetic oligonucleotide
  Antisense strand to SEQ ID NO: 1311030
ugcccaacaaaugucacgc

SEQ ID NO: 1311032 - RNA, 19 nt, Artificial Sequence
  Description of Artificial Sequence: Synthetic oligonucleotide
  Sense strand starting at position 3665 of SEQ ID NO: 1241934
gugacauuuguugggcauu

SEQ ID NO: 1311033 - RNA, 19 nt, Artificial Sequence
  Description of Artificial Sequence: Synthetic oligonucleotide
  Antisense strand to SEQ ID NO: 1311032
aaugcccaacaaaugucac

SEQ ID NO: 1311034 - RNA, 19 nt, Artificial Sequence
  Description of Artificial Sequence: Synthetic oligonucleotide
  Sense strand starting at position 3666 of SEQ ID NO: 1241934
ugacauuuguugggcauuu

SEQ ID NO: 1311035 - RNA, 19 nt, Artificial Sequence
  Description of Artificial Sequence: Synthetic oligonucleotide
  Antisense strand to SEQ ID NO: 1311034
aaaugcccaacaaauguca

SEQ ID NO: 1311036 - RNA, 19 nt, Artificial Sequence
  Description of Artificial Sequence: Synthetic oligonucleotide
  Sense strand starting at position 3755 of SEQ ID NO: 1241934
uacucaugguugcuggaua

SEQ ID NO: 1311037 - RNA, 19 nt, Artificial Sequence
  Description of Artificial Sequence: Synthetic oligonucleotide
  Antisense strand to SEQ ID NO: 1311036
uauccagcaaccaugagua

SEQ ID NO: 1311038 - RNA, 19 nt, Artificial Sequence
  Description of Artificial Sequence: Synthetic oligonucleotide
  Sense strand starting at position 3818 of SEQ ID NO: 1241934
ggagacauuagcugaccaa

SEQ ID NO: 1311039 - RNA, 19 nt, Artificial Sequence
  Description of Artificial Sequence: Synthetic oligonucleotide
  Antisense strand to SEQ ID NO: 1311038
uuggucagcuaaugucucc

SEQ ID NO: 1311040 - RNA, 19 nt, Artificial Sequence
  Description of Artificial Sequence: Synthetic oligonucleotide
  Sense strand starting at position 3892 of SEQ ID NO: 1241934
aguggcaucuaucuaccaa

SEQ ID NO: 1311041 - RNA, 19 nt, Artificial Sequence
  Description of Artificial Sequence: Synthetic oligonucleotide
  Antisense strand to SEQ ID NO: 1311040
uugguagauagaugccacu

SEQ ID NO: 1311042 - RNA, 19 nt, Artificial Sequence
  Description of Artificial Sequence: Synthetic oligonucleotide
  Sense strand starting at position 3971 of SEQ ID NO: 1241934
uccucugaagauuguggaa

SEQ ID NO: 1311043 - RNA, 19 nt, Artificial Sequence
  Description of Artificial Sequence: Synthetic oligonucleotide
  Antisense strand to SEQ ID NO: 1311042
uuccacaaucuucagagga

SEQ ID NO: 1311044 - RNA, 19 nt, Artificial Sequence
  Description of Artificial Sequence: Synthetic oligonucleotide
  Sense strand starting at position 3974 of SEQ ID NO: 1241934
ucugaagauuguggaauuu

SEQ ID NO: 1311045 - RNA, 19 nt, Artificial Sequence
  Description of Artificial Sequence: Synthetic oligonucleotide
  Antisense strand to SEQ ID NO: 1311044
aaauuccacaaucuucaga

SEQ ID NO: 1311046 - RNA, 19 nt, Artificial Sequence
  Description of Artificial Sequence: Synthetic oligonucleotide
  Sense strand starting at position 7 of SEQ ID NO: 1241935
aguugaucacaaugacuga

SEQ ID NO: 1311047 - RNA, 19 nt, Artificial Sequence
  Description of Artificial Sequence: Synthetic oligonucleotide
  Antisense strand to SEQ ID NO: 1311046
ucagucauugugaucaacu

SEQ ID NO: 1311048 - RNA, 19 nt, Artificial Sequence
  Description of Artificial Sequence: Synthetic oligonucleotide
  Sense strand starting at position 56 of SEQ ID NO: 1241935
ggcucaagaugcuuaagaa

SEQ ID NO: 1311049 - RNA, 19 nt, Artificial Sequence
  Description of Artificial Sequence: Synthetic oligonucleotide
  Antisense strand to SEQ ID NO: 1311048
uucuuaagcaucuugagcc

SEQ ID NO: 1311050 - RNA, 19 nt, Artificial Sequence
  Description of Artificial Sequence: Synthetic oligonucleotide
  Sense strand starting at position 57 of SEQ ID NO: 1241935
gcucaagaugcuuaagaaa

SEQ ID NO: 1311051 - RNA, 19 nt, Artificial Sequence
  Description of Artificial Sequence: Synthetic oligonucleotide
  Antisense strand to SEQ ID NO: 1311050
uuucuuaagcaucuugagc

SEQ ID NO: 1311052 - RNA, 19 nt, Artificial Sequence
  Description of Artificial Sequence: Synthetic oligonucleotide
  Sense strand starting at position 133 of SEQ ID NO: 1241935
aguacaaauccugagcucu

SEQ ID NO: 1311053 - RNA, 19 nt, Artificial Sequence
  Description of Artificial Sequence: Synthetic oligonucleotide
  Antisense strand to SEQ ID NO: 1311052
agagcucaggauuuguacu

SEQ ID NO: 1311054 - RNA, 19 nt, Artificial Sequence
  Description of Artificial Sequence: Synthetic oligonucleotide
  Sense strand starting at position 141 of SEQ ID NO: 1241935
uccugagcucuuuaaagca

SEQ ID NO: 1311055 - RNA, 19 nt, Artificial Sequence
  Description of Artificial Sequence: Synthetic oligonucleotide
  Antisense strand to SEQ ID NO: 1311054
ugcuuuaaagagcucagga

SEQ ID NO: 1311056 - RNA, 19 nt, Artificial Sequence
  Description of Artificial Sequence: Synthetic oligonucleotide
  Sense strand starting at position 289 of SEQ ID NO: 1241935
caugauucugucuguagga

SEQ ID NO: 1311057 - RNA, 19 nt, Artificial Sequence
  Description of Artificial Sequence: Synthetic oligonucleotide
  Antisense strand to SEQ ID NO: 1311056
uccuacagacagaaucaug

SEQ ID NO: 1311058 - RNA, 19 nt, Artificial Sequence
  Description of Artificial Sequence: Synthetic oligonucleotide
  Sense strand starting at position 325 of SEQ ID NO: 1241935
gcgaguguagcguuggaaa

SEQ ID NO: 1311059 - RNA, 19 nt, Artificial Sequence
  Description of Artificial Sequence: Synthetic oligonucleotide
  Antisense strand to SEQ ID NO: 1311058
uuuccaacgcuacacucgc

SEQ ID NO: 1311060 - RNA, 19 nt, Artificial Sequence
  Description of Artificial Sequence: Synthetic oligonucleotide
  Sense strand starting at position 408 of SEQ ID NO: 1241935
gcggguaacuguuuauuug

SEQ ID NO: 1311061 - RNA, 19 nt, Artificial Sequence
  Description of Artificial Sequence: Synthetic oligonucleotide
  Antisense strand to SEQ ID NO: 1311060
caaauaaacaguuacccgc

SEQ ID NO: 1311062 - RNA, 19 nt, Artificial Sequence
  Description of Artificial Sequence: Synthetic oligonucleotide
  Sense strand starting at position 409 of SEQ ID NO: 1241935
cggguaacuguuuauuugu

SEQ ID NO: 1311063 - RNA, 19 nt, Artificial Sequence
  Description of Artificial Sequence: Synthetic oligonucleotide
  Antisense strand to SEQ ID NO: 1311062
acaaauaaacaguuacccg

SEQ ID NO: 1311064 - RNA, 19 nt, Artificial Sequence
  Description of Artificial Sequence: Synthetic oligonucleotide
  Sense strand starting at position 590 of SEQ ID NO: 1241935
cagggugcuccacaauaga

SEQ ID NO: 1311065 - RNA, 19 nt, Artificial Sequence
  Description of Artificial Sequence: Synthetic oligonucleotide
  Antisense strand to SEQ ID NO: 1311064
ucuauuguggagcacccug

SEQ ID NO: 1311066 - RNA, 19 nt, Artificial Sequence
  Description of Artificial Sequence: Synthetic oligonucleotide
  Sense strand starting at position 609 of SEQ ID NO: 1241935
auccgauacuccguauaga

SEQ ID NO: 1311067 - RNA, 19 nt, Artificial Sequence
  Description of Artificial Sequence: Synthetic oligonucleotide
  Antisense strand to SEQ ID NO: 1311066
ucuauacggaguaucggau

SEQ ID NO: 1311068 - RNA, 19 nt, Artificial Sequence
  Description of Artificial Sequence: Synthetic oligonucleotide
  Sense strand starting at position 610 of SEQ ID NO: 1241935
uccgauacuccguauagac

SEQ ID NO: 1311069 - RNA, 19 nt, Artificial Sequence
  Description of Artificial Sequence: Synthetic oligonucleotide
  Antisense strand to SEQ ID NO: 1311068
gucuauacggaguaucgga

SEQ ID NO: 1311070 - RNA, 19 nt, Artificial Sequence
  Description of Artificial Sequence: Synthetic oligonucleotide
  Sense strand starting at position 612 of SEQ ID NO: 1241935
cgauacuccguauagacaa

SEQ ID NO: 1311071 - RNA, 19 nt, Artificial Sequence
  Description of Artificial Sequence: Synthetic oligonucleotide
  Antisense strand to SEQ ID NO: 1311070
uugucuauacggaguaucg

SEQ ID NO: 1311072 - RNA, 19 nt, Artificial Sequence
  Description of Artificial Sequence: Synthetic oligonucleotide
  Sense strand starting at position 656 of SEQ ID NO: 1241935
uaaacacuugugugaagua

SEQ ID NO: 1311073 - RNA, 19 nt, Artificial Sequence
  Description of Artificial Sequence: Synthetic oligonucleotide
  Antisense strand to SEQ ID NO: 1311072
uacuucacacaaguguuua

SEQ ID NO: 1311074 - RNA, 19 nt, Artificial Sequence
  Description of Artificial Sequence: Synthetic oligonucleotide
  Sense strand starting at position 665 of SEQ ID NO: 1241935
gugugaaguauuuguauug

SEQ ID NO: 1311075 - RNA, 19 nt, Artificial Sequence
  Description of Artificial Sequence: Synthetic oligonucleotide
  Antisense strand to SEQ ID NO: 1311074
caauacaaauacuucacac

SEQ ID NO: 1311076 - RNA, 19 nt, Artificial Sequence
  Description of Artificial Sequence: Synthetic oligonucleotide
  Sense strand starting at position 666 of SEQ ID NO: 1241935
ugugaaguauuuguauugu

SEQ ID NO: 1311077 - RNA, 19 nt, Artificial Sequence
  Description of Artificial Sequence: Synthetic oligonucleotide
  Antisense strand to SEQ ID NO: 1311076
acaauacaaauacuucaca

SEQ ID NO: 1311078 - RNA, 19 nt, Artificial Sequence
  Description of Artificial Sequence: Synthetic oligonucleotide
  Sense strand starting at position 826 of SEQ ID NO: 1241935
gggacagacacauguauuc

SEQ ID NO: 1311079 - RNA, 19 nt, Artificial Sequence
  Description of Artificial Sequence: Synthetic oligonucleotide
  Antisense strand to SEQ ID NO: 1311078
gaauacaugugucuguccc

SEQ ID NO: 1311080 - RNA, 19 nt, Artificial Sequence
  Description of Artificial Sequence: Synthetic oligonucleotide
  Sense strand starting at position 962 of SEQ ID NO: 1241935
gcccucugccuggauagau

SEQ ID NO: 1311081 - RNA, 19 nt, Artificial Sequence
  Description of Artificial Sequence: Synthetic oligonucleotide
  Antisense strand to SEQ ID NO: 1311080
aucuauccaggcagagggc

SEQ ID NO: 1311082 - RNA, 19 nt, Artificial Sequence
  Description of Artificial Sequence: Synthetic oligonucleotide
  Sense strand starting at position 1048 of SEQ ID NO: 1241935
ucuagaaguggcuaaauug

SEQ ID NO: 1311083 - RNA, 19 nt, Artificial Sequence
  Description of Artificial Sequence: Synthetic oligonucleotide
  Antisense strand to SEQ ID NO: 1311082
caauuuagccacuucuaga

SEQ ID NO: 1311084 - RNA, 19 nt, Artificial Sequence
  Description of Artificial Sequence: Synthetic oligonucleotide
  Sense strand starting at position 1152 of SEQ ID NO: 1241935
caggaugcuugaguuucua

SEQ ID NO: 1311085 - RNA, 19 nt, Artificial Sequence
  Description of Artificial Sequence: Synthetic oligonucleotide
  Antisense strand to SEQ ID NO: 1311084
uagaaacucaagcauccug

SEQ ID NO: 1311086 - RNA, 19 nt, Artificial Sequence
  Description of Artificial Sequence: Synthetic oligonucleotide
  Sense strand starting at position 1160 of SEQ ID NO: 1241935
uugaguuucuaaccugaga

SEQ ID NO: 1311087 - RNA, 19 nt, Artificial Sequence
  Description of Artificial Sequence: Synthetic oligonucleotide
  Antisense strand to SEQ ID NO: 1311086
ucucagguuagaaacucaa

SEQ ID NO: 1311088 - RNA, 19 nt, Artificial Sequence
  Description of Artificial Sequence: Synthetic oligonucleotide
  Sense strand starting at position 2335 of SEQ ID NO: 1241935
gggagaaagccgggacaau

SEQ ID NO: 1311089 - RNA, 19 nt, Artificial Sequence
  Description of Artificial Sequence: Synthetic oligonucleotide
  Antisense strand to SEQ ID NO: 1311088
auugucccggcuuucuccc

SEQ ID NO: 1311090 - RNA, 19 nt, Artificial Sequence
  Description of Artificial Sequence: Synthetic oligonucleotide
  Sense strand starting at position 2579 of SEQ ID NO: 1241935
gagagaugccgccaaugug

SEQ ID NO: 1311091 - RNA, 19 nt, Artificial Sequence
  Description of Artificial Sequence: Synthetic oligonucleotide
  Antisense strand to SEQ ID NO: 1311090
cacauuggcggcaucucuc

SEQ ID NO: 1311092 - RNA, 19 nt, Artificial Sequence
  Description of Artificial Sequence: Synthetic oligonucleotide
  Sense strand starting at position 2603 of SEQ ID NO: 1241935
ugggauucccagugguuac

SEQ ID NO: 1311093 - RNA, 19 nt, Artificial Sequence
  Description of Artificial Sequence: Synthetic oligonucleotide
  Antisense strand to SEQ ID NO: 1311092
guaaccacugggaauccca

SEQ ID NO: 1311094 - RNA, 19 nt, Artificial Sequence
  Description of Artificial Sequence: Synthetic oligonucleotide
  Sense strand starting at position 2678 of SEQ ID NO: 1241935
uccuaacucuuugcuggaa

SEQ ID NO: 1311095 - RNA, 19 nt, Artificial Sequence
  Description of Artificial Sequence: Synthetic oligonucleotide
  Antisense strand to SEQ ID NO: 1311094
uuccagcaaagaguuagga

SEQ ID NO: 1311096 - RNA, 19 nt, Artificial Sequence
  Description of Artificial Sequence: Synthetic oligonucleotide
  Sense strand starting at position 2681 of SEQ ID NO: 1241935
uaacucuuugcuggaagga

SEQ ID NO: 1311097 - RNA, 19 nt, Artificial Sequence
  Description of Artificial Sequence: Synthetic oligonucleotide
  Antisense strand to SEQ ID NO: 1311096
uccuuccagcaaagaguua

SEQ ID NO: 1311098 - RNA, 19 nt, Artificial Sequence
  Description of Artificial Sequence: Synthetic oligonucleotide
  Sense strand starting at position 2705 of SEQ ID NO: 1241935
agaacuugguguucuuauc

SEQ ID NO: 1311099 - RNA, 19 nt, Artificial Sequence
  Description of Artificial Sequence: Synthetic oligonucleotide
  Antisense strand to SEQ ID NO: 1311098
gauaagaacaccaaguucu

SEQ ID NO: 1311100 - RNA, 19 nt, Artificial Sequence
  Description of Artificial Sequence: Synthetic oligonucleotide
  Sense strand starting at position 2741 of SEQ ID NO: 1241935
gcgcauuggaaagaguaaa

SEQ ID NO: 1311101 - RNA, 19 nt, Artificial Sequence
  Description of Artificial Sequence: Synthetic oligonucleotide
  Antisense strand to SEQ ID NO: 1311100
uuuacucuuuccaaugcgc

SEQ ID NO: 1311102 - RNA, 19 nt, Artificial Sequence
  Description of Artificial Sequence: Synthetic oligonucleotide
  Sense strand starting at position 2791 of SEQ ID NO: 1241935
cggagaguucuugauguug

SEQ ID NO: 1311103 - RNA, 19 nt, Artificial Sequence
  Description of Artificial Sequence: Synthetic oligonucleotide
  Antisense strand to SEQ ID NO: 1311102
caacaucaagaacucuccg

SEQ ID NO: 1311104 - RNA, 19 nt, Artificial Sequence
  Description of Artificial Sequence: Synthetic oligonucleotide
  Sense strand starting at position 3096 of SEQ ID NO: 1241935
gugacugagcuugacugua

SEQ ID NO: 1311105 - RNA, 19 nt, Artificial Sequence
  Description of Artificial Sequence: Synthetic oligonucleotide
  Antisense strand to SEQ ID NO: 1311104
uacagucaagcucagucac

SEQ ID NO: 1311106 - RNA, 19 nt, Artificial Sequence
  Description of Artificial Sequence: Synthetic oligonucleotide
  Sense strand starting at position 3161 of SEQ ID NO: 1241935
agaauaacgcaguauauug

SEQ ID NO: 1311107 - RNA, 19 nt, Artificial Sequence
  Description of Artificial Sequence: Synthetic oligonucleotide
  Antisense strand to SEQ ID NO: 1311106
caauauacugcguuauucu

SEQ ID NO: 1311108 - RNA, 19 nt, Artificial Sequence
  Description of Artificial Sequence: Synthetic oligonucleotide
  Sense strand starting at position 3261 of SEQ ID NO: 1241935
gcgguaagagccuagaaga

SEQ ID NO: 1311109 - RNA, 19 nt, Artificial Sequence
  Description of Artificial Sequence: Synthetic oligonucleotide
  Antisense strand to SEQ ID NO: 1311108
ucuucuaggcucuuaccgc

SEQ ID NO: 1311110 - RNA, 19 nt, Artificial Sequence
  Description of Artificial Sequence: Synthetic oligonucleotide
  Sense strand starting at position 3293 of SEQ ID NO: 1241935
uuuggagagugguuaauag

SEQ ID NO: 1311111 - RNA, 19 nt, Artificial Sequence
  Description of Artificial Sequence: Synthetic oligonucleotide
  Antisense strand to SEQ ID NO: 1311110
cuauuaaccacucuccaaa

SEQ ID NO: 1311112 - RNA, 19 nt, Artificial Sequence
  Description of Artificial Sequence: Synthetic oligonucleotide
  Sense strand starting at position 3353 of SEQ ID NO: 1241935
gucauucugccaggagaaa

SEQ ID NO: 1311113 - RNA, 19 nt, Artificial Sequence
  Description of Artificial Sequence: Synthetic oligonucleotide
  Antisense strand to SEQ ID NO: 1311112
uuucuccuggcagaaugac

SEQ ID NO: 1311114 - RNA, 19 nt, Artificial Sequence
  Description of Artificial Sequence: Synthetic oligonucleotide
  Sense strand starting at position 3466 of SEQ ID NO: 1241935
agagcaggcacuugaugaa

SEQ ID NO: 1311115 - RNA, 19 nt, Artificial Sequence
  Description of Artificial Sequence: Synthetic oligonucleotide
  Antisense strand to SEQ ID NO: 1311114
uucaucaagugccugcucu

SEQ ID NO: 1311116 - RNA, 19 nt, Artificial Sequence
  Description of Artificial Sequence: Synthetic oligonucleotide
  Sense strand starting at position 3500 of SEQ ID NO: 1241935
ggauuaguuguugguaaag

SEQ ID NO: 1311117 - RNA, 19 nt, Artificial Sequence
  Description of Artificial Sequence: Synthetic oligonucleotide
  Antisense strand to SEQ ID NO: 1311116
cuuuaccaacaacuaaucc

SEQ ID NO: 1311118 - RNA, 19 nt, Artificial Sequence
  Description of Artificial Sequence: Synthetic oligonucleotide
  Sense strand starting at position 3505 of SEQ ID NO: 1241935
aguuguugguaaagggaga

SEQ ID NO: 1311119 - RNA, 19 nt, Artificial Sequence
  Description of Artificial Sequence: Synthetic oligonucleotide
  Antisense strand to SEQ ID NO: 1311118
ucucccuuuaccaacaacu

SEQ ID NO: 1311120 - RNA, 19 nt, Artificial Sequence
  Description of Artificial Sequence: Synthetic oligonucleotide
  Sense strand starting at position 3585 of SEQ ID NO: 1241935
aaagauucucaguggcaca

SEQ ID NO: 1311121 - RNA, 19 nt, Artificial Sequence
  Description of Artificial Sequence: Synthetic oligonucleotide
  Antisense strand to SEQ ID NO: 1311120
ugugccacugagaaucuuu

SEQ ID NO: 1311122 - RNA, 19 nt, Artificial Sequence
  Description of Artificial Sequence: Synthetic oligonucleotide
  Sense strand starting at position 3614 of SEQ ID NO: 1241935
uggucaugggacuguaaca

SEQ ID NO: 1311123 - RNA, 19 nt, Artificial Sequence
  Description of Artificial Sequence: Synthetic oligonucleotide
  Antisense strand to SEQ ID NO: 1311122
uguuacagucccaugacca

SEQ ID NO: 1311124 - RNA, 19 nt, Artificial Sequence
  Description of Artificial Sequence: Synthetic oligonucleotide
  Sense strand starting at position 3983 of SEQ ID NO: 1241935
ugaguuuggcuguauugac

SEQ ID NO: 1311125 - RNA, 19 nt, Artificial Sequence
  Description of Artificial Sequence: Synthetic oligonucleotide
  Antisense strand to SEQ ID NO: 1311124
gucaauacagccaaacuca

SEQ ID NO: 1311126 - RNA, 19 nt, Artificial Sequence
  Description of Artificial Sequence: Synthetic oligonucleotide
  Sense strand starting at position 1 of SEQ ID NO: 1241936
guauguccuuaacugagga

SEQ ID NO: 1311127 - RNA, 19 nt, Artificial Sequence
  Description of Artificial Sequence: Synthetic oligonucleotide
  Antisense strand to SEQ ID NO: 1311126
uccucaguuaaggacauac

SEQ ID NO: 1311128 - RNA, 19 nt, Artificial Sequence
  Description of Artificial Sequence: Synthetic oligonucleotide
  Sense strand starting at position 428 of SEQ ID NO: 1241936
guguauuaaucaccuggau

SEQ ID NO: 1311129 - RNA, 19 nt, Artificial Sequence
  Description of Artificial Sequence: Synthetic oligonucleotide
  Antisense strand to SEQ ID NO: 1311128
auccaggugauuaauacac

SEQ ID NO: 1311130 - RNA, 19 nt, Artificial Sequence
  Description of Artificial Sequence: Synthetic oligonucleotide
  Sense strand starting at position 440 of SEQ ID NO: 1241936
ccuggauuccuaggcuuua

SEQ ID NO: 1311131 - RNA, 19 nt, Artificial Sequence
  Description of Artificial Sequence: Synthetic oligonucleotide
  Antisense strand to SEQ ID NO: 1311130
uaaagccuaggaauccagg

SEQ ID NO: 1311132 - RNA, 19 nt, Artificial Sequence
  Description of Artificial Sequence: Synthetic oligonucleotide
  Sense strand starting at position 441 of SEQ ID NO: 1241936
cuggauuccuaggcuuuau

SEQ ID NO: 1311133 - RNA, 19 nt, Artificial Sequence
  Description of Artificial Sequence: Synthetic oligonucleotide
  Antisense strand to SEQ ID NO: 1311132
auaaagccuaggaauccag

SEQ ID NO: 1311134 - RNA, 19 nt, Artificial Sequence
  Description of Artificial Sequence: Synthetic oligonucleotide
  Sense strand starting at position 450 of SEQ ID NO: 1241936
uaggcuuuauucccagaga

SEQ ID NO: 1311135 - RNA, 19 nt, Artificial Sequence
  Description of Artificial Sequence: Synthetic oligonucleotide
  Antisense strand to SEQ ID NO: 1311134
ucucugggaauaaagccua

SEQ ID NO: 1311136 - RNA, 19 nt, Artificial Sequence
  Description of Artificial Sequence: Synthetic oligonucleotide
  Sense strand starting at position 451 of SEQ ID NO: 1241936
aggcuuuauucccagagau

SEQ ID NO: 1311137 - RNA, 19 nt, Artificial Sequence
  Description of Artificial Sequence: Synthetic oligonucleotide
  Antisense strand to SEQ ID NO: 1311136
aucucugggaauaaagccu

SEQ ID NO: 1311138 - RNA, 19 nt, Artificial Sequence
  Description of Artificial Sequence: Synthetic oligonucleotide
  Sense strand starting at position 453 of SEQ ID NO: 1241936
gcuuuauucccagagauuc

SEQ ID NO: 1311139 - RNA, 19 nt, Artificial Sequence
  Description of Artificial Sequence: Synthetic oligonucleotide
  Antisense strand to SEQ ID NO: 1311138
gaaucucugggaauaaagc

SEQ ID NO: 1311140 - RNA, 19 nt, Artificial Sequence
  Description of Artificial Sequence: Synthetic oligonucleotide
  Sense strand starting at position 463 of SEQ ID NO: 1241936
cagagauucugauccugua

SEQ ID NO: 1311141 - RNA, 19 nt, Artificial Sequence
  Description of Artificial Sequence: Synthetic oligonucleotide
  Antisense strand to SEQ ID NO: 1311140
uacaggaucagaaucucug

SEQ ID NO: 1311142 - RNA, 19 nt, Artificial Sequence
  Description of Artificial Sequence: Synthetic oligonucleotide
  Sense strand starting at position 500 of SEQ ID NO: 1241936
gaaaucuguacagggugau

SEQ ID NO: 1311143 - RNA, 19 nt, Artificial Sequence
  Description of Artificial Sequence: Synthetic oligonucleotide
  Antisense strand to SEQ ID NO: 1311142
aucacccuguacagauuuc

SEQ ID NO: 1311144 - RNA, 19 nt, Artificial Sequence
  Description of Artificial Sequence: Synthetic oligonucleotide
  Sense strand starting at position 501 of SEQ ID NO: 1241936
aaaucuguacagggugaua

SEQ ID NO: 1311145 - RNA, 19 nt, Artificial Sequence
  Description of Artificial Sequence: Synthetic oligonucleotide
  Antisense strand to SEQ ID NO: 1311144
uaucacccuguacagauuu

SEQ ID NO: 1311146 - RNA, 19 nt, Artificial Sequence
  Description of Artificial Sequence: Synthetic oligonucleotide
  Sense strand starting at position 503 of SEQ ID NO: 1241936
aucuguacagggugauaca

SEQ ID NO: 1311147 - RNA, 19 nt, Artificial Sequence
  Description of Artificial Sequence: Synthetic oligonucleotide
  Antisense strand to SEQ ID NO: 1311146
uguaucacccuguacagau

SEQ ID NO: 1311148 - RNA, 19 nt, Artificial Sequence
  Description of Artificial Sequence: Synthetic oligonucleotide
  Sense strand starting at position 596 of SEQ ID NO: 1241936
agggcacauucucuccaua

SEQ ID NO: 1311149 - RNA, 19 nt, Artificial Sequence
  Description of Artificial Sequence: Synthetic oligonucleotide
  Antisense strand to SEQ ID NO: 1311148
uauggagagaaugugcccu

SEQ ID NO: 1311150 - RNA, 19 nt, Artificial Sequence
  Description of Artificial Sequence: Synthetic oligonucleotide
  Sense strand starting at position 598 of SEQ ID NO: 1241936
ggcacauucucuccauaga

SEQ ID NO: 1311151 - RNA, 19 nt, Artificial Sequence
  Description of Artificial Sequence: Synthetic oligonucleotide
  Antisense strand to SEQ ID NO: 1311150
ucuauggagagaaugugcc

SEQ ID NO: 1311152 - RNA, 19 nt, Artificial Sequence
  Description of Artificial Sequence: Synthetic oligonucleotide
  Sense strand starting at position 727 of SEQ ID NO: 1241936
gcuccaccucuuuauagga

SEQ ID NO: 1311153 - RNA, 19 nt, Artificial Sequence
  Description of Artificial Sequence: Synthetic oligonucleotide
  Antisense strand to SEQ ID NO: 1311152
uccuauaaagagguggagc

SEQ ID NO: 1311154 - RNA, 19 nt, Artificial Sequence
  Description of Artificial Sequence: Synthetic oligonucleotide
  Sense strand starting at position 735 of SEQ ID NO: 1241936
ucuuuauaggaguaguaca

SEQ ID NO: 1311155 - RNA, 19 nt, Artificial Sequence
  Description of Artificial Sequence: Synthetic oligonucleotide
  Antisense strand to SEQ ID NO: 1311154
uguacuacuccuauaaaga

SEQ ID NO: 1311156 - RNA, 19 nt, Artificial Sequence
  Description of Artificial Sequence: Synthetic oligonucleotide
  Sense strand starting at position 785 of SEQ ID NO: 1241936
auggguauaucuuuccauu

SEQ ID NO: 1311157 - RNA, 19 nt, Artificial Sequence
  Description of Artificial Sequence: Synthetic oligonucleotide
  Antisense strand to SEQ ID NO: 1311156
aauggaaagauauacccau

SEQ ID NO: 1311158 - RNA, 19 nt, Artificial Sequence
  Description of Artificial Sequence: Synthetic oligonucleotide
  Sense strand starting at position 826 of SEQ ID NO: 1241936
uggauaugcuuucccaaac

SEQ ID NO: 1311159 - RNA, 19 nt, Artificial Sequence
  Description of Artificial Sequence: Synthetic oligonucleotide
  Antisense strand to SEQ ID NO: 1311158
guuugggaaagcauaucca

SEQ ID NO: 1311160 - RNA, 19 nt, Artificial Sequence
  Description of Artificial Sequence: Synthetic oligonucleotide
  Sense strand starting at position 827 of SEQ ID NO: 1241936
ggauaugcuuucccaaacu

SEQ ID NO: 1311161 - RNA, 19 nt, Artificial Sequence
  Description of Artificial Sequence: Synthetic oligonucleotide
  Antisense strand to SEQ ID NO: 1311160
aguuugggaaagcauaucc

SEQ ID NO: 1311162 - RNA, 19 nt, Artificial Sequence
  Description of Artificial Sequence: Synthetic oligonucleotide
  Sense strand starting at position 1086 of SEQ ID NO: 1241936
uuugcauucuaccuggaga

SEQ ID NO: 1311163 - RNA, 19 nt, Artificial Sequence
  Description of Artificial Sequence: Synthetic oligonucleotide
  Antisense strand to SEQ ID NO: 1311162
ucuccagguagaaugcaaa

SEQ ID NO: 1311164 - RNA, 19 nt, Artificial Sequence
  Description of Artificial Sequence: Synthetic oligonucleotide
  Sense strand starting at position 1088 of SEQ ID NO: 1241936
ugcauucuaccuggagaag

SEQ ID NO: 1311165 - RNA, 19 nt, Artificial Sequence
  Description of Artificial Sequence: Synthetic oligonucleotide
  Antisense strand to SEQ ID NO: 1311164
cuucuccagguagaaugca

SEQ ID NO: 1311166 - RNA, 19 nt, Artificial Sequence
  Description of Artificial Sequence: Synthetic oligonucleotide
  Sense strand starting at position 1223 of SEQ ID NO: 1241936
auguguuugcugggagauc

SEQ ID NO: 1311167 - RNA, 19 nt, Artificial Sequence
  Description of Artificial Sequence: Synthetic oligonucleotide
  Antisense strand to SEQ ID NO: 1311166
gaucucccagcaaacacau

SEQ ID NO: 1311168 - RNA, 19 nt, Artificial Sequence
  Description of Artificial Sequence: Synthetic oligonucleotide
  Sense strand starting at position 1339 of SEQ ID NO: 1241936
gggacuucucucuaaggcu

SEQ ID NO: 1311169 - RNA, 19 nt, Artificial Sequence
  Description of Artificial Sequence: Synthetic oligonucleotide
  Antisense strand to SEQ ID NO: 1311168
agccuuagagagaaguccc

SEQ ID NO: 1311170 - RNA, 19 nt, Artificial Sequence
  Description of Artificial Sequence: Synthetic oligonucleotide
  Sense strand starting at position 1525 of SEQ ID NO: 1241936
cugcaaagccggugucauc

SEQ ID NO: 1311171 - RNA, 19 nt, Artificial Sequence
  Description of Artificial Sequence: Synthetic oligonucleotide
  Antisense strand to SEQ ID NO: 1311170
gaugacaccggcuuugcag

SEQ ID NO: 1311172 - RNA, 19 nt, Artificial Sequence
  Description of Artificial Sequence: Synthetic oligonucleotide
  Sense strand starting at position 2234 of SEQ ID NO: 1241936
gcaggaucccucuacuguu

SEQ ID NO: 1311173 - RNA, 19 nt, Artificial Sequence
  Description of Artificial Sequence: Synthetic oligonucleotide
  Antisense strand to SEQ ID NO: 1311172
aacaguagagggauccugc

SEQ ID NO: 1311174 - RNA, 19 nt, Artificial Sequence
  Description of Artificial Sequence: Synthetic oligonucleotide
  Sense strand starting at position 2324 of SEQ ID NO: 1241936
gcaaaugagucaucucagg

SEQ ID NO: 1311175 - RNA, 19 nt, Artificial Sequence
  Description of Artificial Sequence: Synthetic oligonucleotide
  Antisense strand to SEQ ID NO: 1311174
ccugagaugacucauuugc

SEQ ID NO: 1311176 - RNA, 19 nt, Artificial Sequence
  Description of Artificial Sequence: Synthetic oligonucleotide
  Sense strand starting at position 2704 of SEQ ID NO: 1241936
gccucaauucuggaucuag

SEQ ID NO: 1311177 - RNA, 19 nt, Artificial Sequence
  Description of Artificial Sequence: Synthetic oligonucleotide
  Antisense strand to SEQ ID NO: 1311176
cuagauccagaauugaggc

SEQ ID NO: 1311178 - RNA, 19 nt, Artificial Sequence
  Description of Artificial Sequence: Synthetic oligonucleotide
  Sense strand starting at position 3008 of SEQ ID NO: 1241936
ggaugcuuuggagaaguua

SEQ ID NO: 1311179 - RNA, 19 nt, Artificial Sequence
  Description of Artificial Sequence: Synthetic oligonucleotide
  Antisense strand to SEQ ID NO: 1311178
uaacuucuccaaagcaucc

SEQ ID NO: 1311180 - RNA, 19 nt, Artificial Sequence
  Description of Artificial Sequence: Synthetic oligonucleotide
  Sense strand starting at position 3057 of SEQ ID NO: 1241936
gcagcaguaauagguaaga

SEQ ID NO: 1311181 - RNA, 19 nt, Artificial Sequence
  Description of Artificial Sequence: Synthetic oligonucleotide
  Antisense strand to SEQ ID NO: 1311180
ucuuaccuauuacugcugc

SEQ ID NO: 1311182 - RNA, 19 nt, Artificial Sequence
  Description of Artificial Sequence: Synthetic oligonucleotide
  Sense strand starting at position 3062 of SEQ ID NO: 1241936
aguaauagguaagauaugu

SEQ ID NO: 1311183 - RNA, 19 nt, Artificial Sequence
  Description of Artificial Sequence: Synthetic oligonucleotide
  Antisense strand to SEQ ID NO: 1311182
acauaucuuaccuauuacu

SEQ ID NO: 1311184 - RNA, 19 nt, Artificial Sequence
  Description of Artificial Sequence: Synthetic oligonucleotide
  Sense strand starting at position 3067 of SEQ ID NO: 1241936
uagguaagauauguaaagu

SEQ ID NO: 1311185 - RNA, 19 nt, Artificial Sequence
  Description of Artificial Sequence: Synthetic oligonucleotide
  Antisense strand to SEQ ID NO: 1311184
acuuuacauaucuuaccua

SEQ ID NO: 1311186 - RNA, 19 nt, Artificial Sequence
  Description of Artificial Sequence: Synthetic oligonucleotide
  Sense strand starting at position 3272 of SEQ ID NO: 1241936
gguguaugccaguacuuga

SEQ ID NO: 1311187 - RNA, 19 nt, Artificial Sequence
  Description of Artificial Sequence: Synthetic oligonucleotide
  Antisense strand to SEQ ID NO: 1311186
ucaaguacuggcauacacc

SEQ ID NO: 1311188 - RNA, 19 nt, Artificial Sequence
  Description of Artificial Sequence: Synthetic oligonucleotide
  Sense strand starting at position 3317 of SEQ ID NO: 1241936
ugcugauccguggucugua

SEQ ID NO: 1311189 - RNA, 19 nt, Artificial Sequence
  Description of Artificial Sequence: Synthetic oligonucleotide
  Antisense strand to SEQ ID NO: 1311188
uacagaccacggaucagca

SEQ ID NO: 1311190 - RNA, 19 nt, Artificial Sequence
  Description of Artificial Sequence: Synthetic oligonucleotide
  Sense strand starting at position 3318 of SEQ ID NO: 1241936
gcugauccguggucuguau

SEQ ID NO: 1311191 - RNA, 19 nt, Artificial Sequence
  Description of Artificial Sequence: Synthetic oligonucleotide
  Antisense strand to SEQ ID NO: 1311190
auacagaccacggaucagc

SEQ ID NO: 1311192 - RNA, 19 nt, Artificial Sequence
  Description of Artificial Sequence: Synthetic oligonucleotide
  Sense strand starting at position 3329 of SEQ ID NO: 1241936
gucuguaucccuggcuuua

SEQ ID NO: 1311193 - RNA, 19 nt, Artificial Sequence
  Description of Artificial Sequence: Synthetic oligonucleotide
  Antisense strand to SEQ ID NO: 1311192
uaaagccagggauacagac

SEQ ID NO: 1311194 - RNA, 19 nt, Artificial Sequence
  Description of Artificial Sequence: Synthetic oligonucleotide
  Sense strand starting at position 3341 of SEQ ID NO: 1241936
ggcuuuaucggauguguac

SEQ ID NO: 1311195 - RNA, 19 nt, Artificial Sequence
  Description of Artificial Sequence: Synthetic oligonucleotide
  Antisense strand to SEQ ID NO: 1311194
guacacauccgauaaagcc

SEQ ID NO: 1311196 - RNA, 19 nt, Artificial Sequence
  Description of Artificial Sequence: Synthetic oligonucleotide
  Sense strand starting at position 3343 of SEQ ID NO: 1241936
cuuuaucggauguguacau

SEQ ID NO: 1311197 - RNA, 19 nt, Artificial Sequence
  Description of Artificial Sequence: Synthetic oligonucleotide
  Antisense strand to SEQ ID NO: 1311196
auguacacauccgauaaag

SEQ ID NO: 1311198 - RNA, 19 nt, Artificial Sequence
  Description of Artificial Sequence: Synthetic oligonucleotide
  Sense strand starting at position 3465 of SEQ ID NO: 1241936
uuuauagagcuuugacaug

SEQ ID NO: 1311199 - RNA, 19 nt, Artificial Sequence
  Description of Artificial Sequence: Synthetic oligonucleotide
  Antisense strand to SEQ ID NO: 1311198
caugucaaagcucuauaaa

SEQ ID NO: 1311200 - RNA, 19 nt, Artificial Sequence
  Description of Artificial Sequence: Synthetic oligonucleotide
  Sense strand starting at position 3505 of SEQ ID NO: 1241936
agagcuaauuaucuauuga

SEQ ID NO: 1311201 - RNA, 19 nt, Artificial Sequence
  Description of Artificial Sequence: Synthetic oligonucleotide
  Antisense strand to SEQ ID NO: 1311200
ucaauagauaauuagcucu

SEQ ID NO: 1311202 - RNA, 19 nt, Artificial Sequence
  Description of Artificial Sequence: Synthetic oligonucleotide
  Sense strand starting at position 3598 of SEQ ID NO: 1241936
gggucuuugucacagagag

SEQ ID NO: 1311203 - RNA, 19 nt, Artificial Sequence
  Description of Artificial Sequence: Synthetic oligonucleotide
  Antisense strand to SEQ ID NO: 1311202
cucucugugacaaagaccc

SEQ ID NO: 1311204 - RNA, 19 nt, Artificial Sequence
  Description of Artificial Sequence: Synthetic oligonucleotide
  Sense strand starting at position 3600 of SEQ ID NO: 1241936
gucuuugucacagagagac

SEQ ID NO: 1311205 - RNA, 19 nt, Artificial Sequence
  Description of Artificial Sequence: Synthetic oligonucleotide
  Antisense strand to SEQ ID NO: 1311204
gucucucugugacaaagac

SEQ ID NO: 1311206 - RNA, 19 nt, Artificial Sequence
  Description of Artificial Sequence: Synthetic oligonucleotide
  Sense strand starting at position 2200 of SEQ ID NO: 1241937
cagcguguguccucaggga

SEQ ID NO: 1311207 - RNA, 19 nt, Artificial Sequence
  Description of Artificial Sequence: Synthetic oligonucleotide
  Antisense strand to SEQ ID NO: 1311206
ucccugaggacacacgcug

SEQ ID NO: 1311208 - RNA, 19 nt, Artificial Sequence
  Description of Artificial Sequence: Synthetic oligonucleotide
  Sense strand starting at position 2202 of SEQ ID NO: 1241937
gcguguguccucagggaag

SEQ ID NO: 1311209 - RNA, 19 nt, Artificial Sequence
  Description of Artificial Sequence: Synthetic oligonucleotide
  Antisense strand to SEQ ID NO: 1311208
cuucccugaggacacacgc

SEQ ID NO: 1311210 - RNA, 19 nt, Artificial Sequence
  Description of Artificial Sequence: Synthetic oligonucleotide
  Sense strand starting at position 2459 of SEQ ID NO: 1241937
cauggugacccuuguguuu

SEQ ID NO: 1311211 - RNA, 19 nt, Artificial Sequence
  Description of Artificial Sequence: Synthetic oligonucleotide
  Antisense strand to SEQ ID NO: 1311210
aaacacaagggucaccaug

SEQ ID NO: 1311212 - RNA, 19 nt, Artificial Sequence
  Description of Artificial Sequence: Synthetic oligonucleotide
  Sense strand starting at position 2464 of SEQ ID NO: 1241937
ugacccuuguguuuagcaa

SEQ ID NO: 1311213 - RNA, 19 nt, Artificial Sequence
  Description of Artificial Sequence: Synthetic oligonucleotide
  Antisense strand to SEQ ID NO: 1311212
uugcuaaacacaaggguca

SEQ ID NO: 1311214 - RNA, 19 nt, Artificial Sequence
  Description of Artificial Sequence: Synthetic oligonucleotide
  Sense strand starting at position 2465 of SEQ ID NO: 1241937
gacccuuguguuuagcaau

SEQ ID NO: 1311215 - RNA, 19 nt, Artificial Sequence
  Description of Artificial Sequence: Synthetic oligonucleotide
  Antisense strand to SEQ ID NO: 1311214
auugcuaaacacaaggguc

SEQ ID NO: 1311216 - RNA, 19 nt, Artificial Sequence
  Description of Artificial Sequence: Synthetic oligonucleotide
  Sense strand starting at position 2502 of SEQ ID NO: 1241937
gugcuuguccacuggguaa

SEQ ID NO: 1311217 - RNA, 19 nt, Artificial Sequence
  Description of Artificial Sequence: Synthetic oligonucleotide
  Antisense strand to SEQ ID NO: 1311216
uuacccaguggacaagcac

SEQ ID NO: 1311218 - RNA, 19 nt, Artificial Sequence
  Description of Artificial Sequence: Synthetic oligonucleotide
  Sense strand starting at position 2513 of SEQ ID NO: 1241937
cuggguaaugcugaaaugu

SEQ ID NO: 1311219 - RNA, 19 nt, Artificial Sequence
  Description of Artificial Sequence: Synthetic oligonucleotide
  Antisense strand to SEQ ID NO: 1311218
acauuucagcauuacccag

SEQ ID NO: 1311220 - RNA, 19 nt, Artificial Sequence
  Description of Artificial Sequence: Synthetic oligonucleotide
  Sense strand starting at position 2521 of SEQ ID NO: 1241937
ugcugaaaugucuggaaau

SEQ ID NO: 1311221 - RNA, 19 nt, Artificial Sequence
  Description of Artificial Sequence: Synthetic oligonucleotide
  Antisense strand to SEQ ID NO: 1311220
auuuccagacauuucagca

SEQ ID NO: 1311222 - RNA, 19 nt, Artificial Sequence
  Description of Artificial Sequence: Synthetic oligonucleotide
  Sense strand starting at position 2522 of SEQ ID NO: 1241937
gcugaaaugucuggaaaug

SEQ ID NO: 1311223 - RNA, 19 nt, Artificial Sequence
  Description of Artificial Sequence: Synthetic oligonucleotide
  Antisense strand to SEQ ID NO: 1311222
cauuuccagacauuucagc

SEQ ID NO: 1311224 - RNA, 19 nt, Artificial Sequence
  Description of Artificial Sequence: Synthetic oligonucleotide
  Sense strand starting at position 2557 of SEQ ID NO: 1241937
gccuucuccucaugaggca

SEQ ID NO: 1311225 - RNA, 19 nt, Artificial Sequence
  Description of Artificial Sequence: Synthetic oligonucleotide
  Antisense strand to SEQ ID NO: 1311224
ugccucaugaggagaaggc

SEQ ID NO: 1311226 - RNA, 19 nt, Artificial Sequence
  Description of Artificial Sequence: Synthetic oligonucleotide
  Sense strand starting at position 2711 of SEQ ID NO: 1241937
gagcuagaugugugcucca

SEQ ID NO: 1311227 - RNA, 19 nt, Artificial Sequence
  Description of Artificial Sequence: Synthetic oligonucleotide
  Antisense strand to SEQ ID NO: 1311226
uggagcacacaucuagcuc

SEQ ID NO: 1311228 - RNA, 19 nt, Artificial Sequence
  Description of Artificial Sequence: Synthetic oligonucleotide
  Sense strand starting at position 2716 of SEQ ID NO: 1241937
agaugugugcuccauggca

SEQ ID NO: 1311229 - RNA, 19 nt, Artificial Sequence
  Description of Artificial Sequence: Synthetic oligonucleotide
  Antisense strand to SEQ ID NO: 1311228
ugccauggagcacacaucu

SEQ ID NO: 1311230 - RNA, 19 nt, Artificial Sequence
  Description of Artificial Sequence: Synthetic oligonucleotide
  Sense strand starting at position 2764 of SEQ ID NO: 1241937
cccgaagugcuuuggaugu

SEQ ID NO: 1311231 - RNA, 19 nt, Artificial Sequence
  Description of Artificial Sequence: Synthetic oligonucleotide
  Antisense strand to SEQ ID NO: 1311230
acauccaaagcacuucggg

SEQ ID NO: 1311232 - RNA, 19 nt, Artificial Sequence
  Description of Artificial Sequence: Synthetic oligonucleotide
  Sense strand starting at position 2766 of SEQ ID NO: 1241937
cgaagugcuuuggauguca

SEQ ID NO: 1311233 - RNA, 19 nt, Artificial Sequence
  Description of Artificial Sequence: Synthetic oligonucleotide
  Antisense strand to SEQ ID NO: 1311232
ugacauccaaagcacuucg

SEQ ID NO: 1311234 - RNA, 19 nt, Artificial Sequence
  Description of Artificial Sequence: Synthetic oligonucleotide
  Sense strand starting at position 2822 of SEQ ID NO: 1241937
ccagacuugguccagcuau

SEQ ID NO: 1311235 - RNA, 19 nt, Artificial Sequence
  Description of Artificial Sequence: Synthetic oligonucleotide
  Antisense strand to SEQ ID NO: 1311234
auagcuggaccaagucugg

SEQ ID NO: 1311236 - RNA, 19 nt, Artificial Sequence
  Description of Artificial Sequence: Synthetic oligonucleotide
  Sense strand starting at position 2945 of SEQ ID NO: 1241937
uuaucuccuuuaguuguua

SEQ ID NO: 1311237 - RNA, 19 nt, Artificial Sequence
  Description of Artificial Sequence: Synthetic oligonucleotide
  Antisense strand to SEQ ID NO: 1311236
uaacaacuaaaggagauaa

SEQ ID NO: 1311238 - RNA, 19 nt, Artificial Sequence
  Description of Artificial Sequence: Synthetic oligonucleotide
  Sense strand starting at position 2978 of SEQ ID NO: 1241937
gggagcuaguguggacauu

SEQ ID NO: 1311239 - RNA, 19 nt, Artificial Sequence
  Description of Artificial Sequence: Synthetic oligonucleotide
  Antisense strand to SEQ ID NO: 1311238
aauguccacacuagcuccc

SEQ ID NO: 1311240 - RNA, 19 nt, Artificial Sequence
  Description of Artificial Sequence: Synthetic oligonucleotide
  Sense strand starting at position 2987 of SEQ ID NO: 1241937
uguggacauucccuuugua

SEQ ID NO: 1311241 - RNA, 19 nt, Artificial Sequence
  Description of Artificial Sequence: Synthetic oligonucleotide
  Antisense strand to SEQ ID NO: 1311240
uacaaagggaauguccaca

SEQ ID NO: 1311242 - RNA, 19 nt, Artificial Sequence
  Description of Artificial Sequence: Synthetic oligonucleotide
  Sense strand starting at position 2990 of SEQ ID NO: 1241937
ggacauucccuuuguacag

SEQ ID NO: 1311243 - RNA, 19 nt, Artificial Sequence
  Description of Artificial Sequence: Synthetic oligonucleotide
  Antisense strand to SEQ ID NO: 1311242
cuguacaaagggaaugucc

SEQ ID NO: 1311244 - RNA, 19 nt, Artificial Sequence
  Description of Artificial Sequence: Synthetic oligonucleotide
  Sense strand starting at position 2999 of SEQ ID NO: 1241937
cuuuguacagcugaaguaa

SEQ ID NO: 1311245 - RNA, 19 nt, Artificial Sequence
  Description of Artificial Sequence: Synthetic oligonucleotide
  Antisense strand to SEQ ID NO: 1311244
uuacuucagcuguacaaag

SEQ ID NO: 1311246 - RNA, 19 nt, Artificial Sequence
  Description of Artificial Sequence: Synthetic oligonucleotide
  Sense strand starting at position 3046 of SEQ ID NO: 1241937
augggugguucugagucua

SEQ ID NO: 1311247 - RNA, 19 nt, Artificial Sequence
  Description of Artificial Sequence: Synthetic oligonucleotide
  Antisense strand to SEQ ID NO: 1311246
uagacucagaaccacccau

SEQ ID NO: 1311248 - RNA, 19 nt, Artificial Sequence
  Description of Artificial Sequence: Synthetic oligonucleotide
  Sense strand starting at position 3205 of SEQ ID NO: 1241937
gcuaccagugaucagauga

SEQ ID NO: 1311249 - RNA, 19 nt, Artificial Sequence
  Description of Artificial Sequence: Synthetic oligonucleotide
  Antisense strand to SEQ ID NO: 1311248
ucaucugaucacugguagc

SEQ ID NO: 1311250 - RNA, 19 nt, Artificial Sequence
  Description of Artificial Sequence: Synthetic oligonucleotide
  Sense strand starting at position 3427 of SEQ ID NO: 1241937
accagaaguuugcgugaag

SEQ ID NO: 1311251 - RNA, 19 nt, Artificial Sequence
  Description of Artificial Sequence: Synthetic oligonucleotide
  Antisense strand to SEQ ID NO: 1311250
cuucacgcaaacuucuggu

SEQ ID NO: 1311252 - RNA, 19 nt, Artificial Sequence
  Description of Artificial Sequence: Synthetic oligonucleotide
  Sense strand starting at position 3430 of SEQ ID NO: 1241937
agaaguuugcgugaagguu

SEQ ID NO: 1311253 - RNA, 19 nt, Artificial Sequence
  Description of Artificial Sequence: Synthetic oligonucleotide
  Antisense strand to SEQ ID NO: 1311252
aaccuucacgcaaacuucu

SEQ ID NO: 1311254 - RNA, 19 nt, Artificial Sequence
  Description of Artificial Sequence: Synthetic oligonucleotide
  Sense strand starting at position 3490 of SEQ ID NO: 1241937
gguauacauuucuggugau

SEQ ID NO: 1311255 - RNA, 19 nt, Artificial Sequence
  Description of Artificial Sequence: Synthetic oligonucleotide
  Antisense strand to SEQ ID NO: 1311254
aucaccagaaauguauacc

SEQ ID NO: 1311256 - RNA, 19 nt, Artificial Sequence
  Description of Artificial Sequence: Synthetic oligonucleotide
  Sense strand starting at position 3491 of SEQ ID NO: 1241937
guauacauuucuggugaua

SEQ ID NO: 1311257 - RNA, 19 nt, Artificial Sequence
  Description of Artificial Sequence: Synthetic oligonucleotide
  Antisense strand to SEQ ID NO: 1311256
uaucaccagaaauguauac

SEQ ID NO: 1311258 - RNA, 19 nt, Artificial Sequence
  Description of Artificial Sequence: Synthetic oligonucleotide
  Sense strand starting at position 3493 of SEQ ID NO: 1241937
auacauuucuggugauagg

SEQ ID NO: 1311259 - RNA, 19 nt, Artificial Sequence
  Description of Artificial Sequence: Synthetic oligonucleotide
  Antisense strand to SEQ ID NO: 1311258
ccuaucaccagaaauguau

SEQ ID NO: 1311260 - RNA, 19 nt, Artificial Sequence
  Description of Artificial Sequence: Synthetic oligonucleotide
  Sense strand starting at position 3496 of SEQ ID NO: 1241937
cauuucuggugauaggauu

SEQ ID NO: 1311261 - RNA, 19 nt, Artificial Sequence
  Description of Artificial Sequence: Synthetic oligonucleotide
  Antisense strand to SEQ ID NO: 1311260
aauccuaucaccagaaaug

SEQ ID NO: 1311262 - RNA, 19 nt, Artificial Sequence
  Description of Artificial Sequence: Synthetic oligonucleotide
  Sense strand starting at position 3538 of SEQ ID NO: 1241937
guaaguauguccuuuaaac

SEQ ID NO: 1311263 - RNA, 19 nt, Artificial Sequence
  Description of Artificial Sequence: Synthetic oligonucleotide
  Antisense strand to SEQ ID NO: 1311262
guuuaaaggacauacuuac

SEQ ID NO: 1311264 - RNA, 19 nt, Artificial Sequence
  Description of Artificial Sequence: Synthetic oligonucleotide
  Sense strand starting at position 3613 of SEQ ID NO: 1241937
ugugcucccuucuguguua

SEQ ID NO: 1311265 - RNA, 19 nt, Artificial Sequence
  Description of Artificial Sequence: Synthetic oligonucleotide
  Antisense strand to SEQ ID NO: 1311264
uaacacagaagggagcaca

SEQ ID NO: 1311266 - RNA, 19 nt, Artificial Sequence
  Description of Artificial Sequence: Synthetic oligonucleotide
  Sense strand starting at position 3687 of SEQ ID NO: 1241937
gguacuuaucuccauacca

SEQ ID NO: 1311267 - RNA, 19 nt, Artificial Sequence
  Description of Artificial Sequence: Synthetic oligonucleotide
  Antisense strand to SEQ ID NO: 1311266
ugguauggagauaaguacc

SEQ ID NO: 1311268 - RNA, 19 nt, Artificial Sequence
  Description of Artificial Sequence: Synthetic oligonucleotide
  Sense strand starting at position 3700 of SEQ ID NO: 1241937
auaccaauuucuugucugu

SEQ ID NO: 1311269 - RNA, 19 nt, Artificial Sequence
  Description of Artificial Sequence: Synthetic oligonucleotide
  Antisense strand to SEQ ID NO: 1311268
acagacaagaaauugguau

SEQ ID NO: 1311270 - RNA, 19 nt, Artificial Sequence
  Description of Artificial Sequence: Synthetic oligonucleotide
  Sense strand starting at position 3751 of SEQ ID NO: 1241937
gagucuuguggacaccaca

SEQ ID NO: 1311271 - RNA, 19 nt, Artificial Sequence
  Description of Artificial Sequence: Synthetic oligonucleotide
  Antisense strand to SEQ ID NO: 1311270
ugugguguccacaagacuc

SEQ ID NO: 1311272 - RNA, 19 nt, Artificial Sequence
  Description of Artificial Sequence: Synthetic oligonucleotide
  Sense strand starting at position 3798 of SEQ ID NO: 1241937
uggugucugugccaccaau

SEQ ID NO: 1311273 - RNA, 19 nt, Artificial Sequence
  Description of Artificial Sequence: Synthetic oligonucleotide
  Antisense strand to SEQ ID NO: 1311272
auugguggcacagacacca

SEQ ID NO: 1311274 - RNA, 19 nt, Artificial Sequence
  Description of Artificial Sequence: Synthetic oligonucleotide
  Sense strand starting at position 3845 of SEQ ID NO: 1241937
ugcaccaugccuuagcaaa

SEQ ID NO: 1311275 - RNA, 19 nt, Artificial Sequence
  Description of Artificial Sequence: Synthetic oligonucleotide
  Antisense strand to SEQ ID NO: 1311274
uuugcuaaggcauggugca

SEQ ID NO: 1311276 - RNA, 19 nt, Artificial Sequence
  Description of Artificial Sequence: Synthetic oligonucleotide
  Sense strand starting at position 3910 of SEQ ID NO: 1241937
ccucuauggccuuagagcu

SEQ ID NO: 1311277 - RNA, 19 nt, Artificial Sequence
  Description of Artificial Sequence: Synthetic oligonucleotide
  Antisense strand to SEQ ID NO: 1311276
agcucuaaggccauagagg

SEQ ID NO: 1311278 - RNA, 19 nt, Artificial Sequence
  Description of Artificial Sequence: Synthetic oligonucleotide
  Sense strand starting at position 161 of SEQ ID NO: 1241938
uguaaagguauugguuaua

SEQ ID NO: 1311279 - RNA, 19 nt, Artificial Sequence
  Description of Artificial Sequence: Synthetic oligonucleotide
  Antisense strand to SEQ ID NO: 1311278
uauaaccaauaccuuuaca

SEQ ID NO: 1311280 - RNA, 19 nt, Artificial Sequence
  Description of Artificial Sequence: Synthetic oligonucleotide
  Sense strand starting at position 468 of SEQ ID NO: 1241938
ggcuaaucccuuuguuaaa

SEQ ID NO: 1311281 - RNA, 19 nt, Artificial Sequence
  Description of Artificial Sequence: Synthetic oligonucleotide
  Antisense strand to SEQ ID NO: 1311280
uuuaacaaagggauuagcc

SEQ ID NO: 1311282 - RNA, 19 nt, Artificial Sequence
  Description of Artificial Sequence: Synthetic oligonucleotide
  Sense strand starting at position 664 of SEQ ID NO: 1241938
acuggugugguccaauaug

SEQ ID NO: 1311283 - RNA, 19 nt, Artificial Sequence
  Description of Artificial Sequence: Synthetic oligonucleotide
  Antisense strand to SEQ ID NO: 1311282
cauauuggaccacaccagu

SEQ ID NO: 1311284 - RNA, 19 nt, Artificial Sequence
  Description of Artificial Sequence: Synthetic oligonucleotide
  Sense strand starting at position 717 of SEQ ID NO: 1241938
ccaacugcgaaaugugaga

SEQ ID NO: 1311285 - RNA, 19 nt, Artificial Sequence
  Description of Artificial Sequence: Synthetic oligonucleotide
  Antisense strand to SEQ ID NO: 1311284
ucucacauuucgcaguugg

SEQ ID NO: 1311286 - RNA, 19 nt, Artificial Sequence
  Description of Artificial Sequence: Synthetic oligonucleotide
  Sense strand starting at position 781 of SEQ ID NO: 1241938
ccagcuuugcaaggacaaa

SEQ ID NO: 1311287 - RNA, 19 nt, Artificial Sequence
  Description of Artificial Sequence: Synthetic oligonucleotide
  Antisense strand to SEQ ID NO: 1311286
uuuguccuugcaaagcugg

SEQ ID NO: 1311288 - RNA, 19 nt, Artificial Sequence
  Description of Artificial Sequence: Synthetic oligonucleotide
  Sense strand starting at position 902 of SEQ ID NO: 1241938
cccuucuaacgagaagcuu

SEQ ID NO: 1311289 - RNA, 19 nt, Artificial Sequence
  Description of Artificial Sequence: Synthetic oligonucleotide
  Antisense strand to SEQ ID NO: 1311288
aagcuucucguuagaaggg

SEQ ID NO: 1311290 - RNA, 19 nt, Artificial Sequence
  Description of Artificial Sequence: Synthetic oligonucleotide
  Sense strand starting at position 940 of SEQ ID NO: 1241938
ugccuucaucagggugaga

SEQ ID NO: 1311291 - RNA, 19 nt, Artificial Sequence
  Description of Artificial Sequence: Synthetic oligonucleotide
  Antisense strand to SEQ ID NO: 1311290
ucucacccugaugaaggca

SEQ ID NO: 1311292 - RNA, 19 nt, Artificial Sequence
  Description of Artificial Sequence: Synthetic oligonucleotide
  Sense strand starting at position 1232 of SEQ ID NO: 1241938
agguauuucugggcgguca

SEQ ID NO: 1311293 - RNA, 19 nt, Artificial Sequence
  Description of Artificial Sequence: Synthetic oligonucleotide
  Antisense strand to SEQ ID NO: 1311292
ugaccgcccagaaauaccu

SEQ ID NO: 1311294 - RNA, 19 nt, Artificial Sequence
  Description of Artificial Sequence: Synthetic oligonucleotide
  Sense strand starting at position 1233 of SEQ ID NO: 1241938
gguauuucugggcggucau

SEQ ID NO: 1311295 - RNA, 19 nt, Artificial Sequence
  Description of Artificial Sequence: Synthetic oligonucleotide
  Antisense strand to SEQ ID NO: 1311294
augaccgcccagaaauacc

SEQ ID NO: 1311296 - RNA, 19 nt, Artificial Sequence
  Description of Artificial Sequence: Synthetic oligonucleotide
  Sense strand starting at position 1737 of SEQ ID NO: 1241938
gcggccugcgccuuuaaga

SEQ ID NO: 1311297 - RNA, 19 nt, Artificial Sequence
  Description of Artificial Sequence: Synthetic oligonucleotide
  Antisense strand to SEQ ID NO: 1311296
ucuuaaaggcgcaggccgc

SEQ ID NO: 1311298 - RNA, 19 nt, Artificial Sequence
  Description of Artificial Sequence: Synthetic oligonucleotide
  Sense strand starting at position 2716 of SEQ ID NO: 1241938
ugaaguuaaugcccuggau

SEQ ID NO: 1311299 - RNA, 19 nt, Artificial Sequence
  Description of Artificial Sequence: Synthetic oligonucleotide
  Antisense strand to SEQ ID NO: 1311298
auccagggcauuaacuuca

SEQ ID NO: 1311300 - RNA, 19 nt, Artificial Sequence
  Description of Artificial Sequence: Synthetic oligonucleotide
  Sense strand starting at position 2719 of SEQ ID NO: 1241938
aguuaaugcccuggauggu

SEQ ID NO: 1311301 - RNA, 19 nt, Artificial Sequence
  Description of Artificial Sequence: Synthetic oligonucleotide
  Antisense strand to SEQ ID NO: 1311300
accauccagggcauuaacu

SEQ ID NO: 1311302 - RNA, 19 nt, Artificial Sequence
  Description of Artificial Sequence: Synthetic oligonucleotide
  Sense strand starting at position 2720 of SEQ ID NO: 1241938
guuaaugcccuggauggua

SEQ ID NO: 1311303 - RNA, 19 nt, Artificial Sequence
  Description of Artificial Sequence: Synthetic oligonucleotide
  Antisense strand to SEQ ID NO: 1311302
uaccauccagggcauuaac

SEQ ID NO: 1311304 - RNA, 19 nt, Artificial Sequence
  Description of Artificial Sequence: Synthetic oligonucleotide
  Sense strand starting at position 2756 of SEQ ID NO: 1241938
cauacugugugggcagaua

SEQ ID NO: 1311305 - RNA, 19 nt, Artificial Sequence
  Description of Artificial Sequence: Synthetic oligonucleotide
  Antisense strand to SEQ ID NO: 1311304
uaucugcccacacaguaug

SEQ ID NO: 1311306 - RNA, 19 nt, Artificial Sequence
  Description of Artificial Sequence: Synthetic oligonucleotide
  Sense strand starting at position 2796 of SEQ ID NO: 1241938
gggacuuugucccuacuuu

SEQ ID NO: 1311307 - RNA, 19 nt, Artificial Sequence
  Description of Artificial Sequence: Synthetic oligonucleotide
  Antisense strand to SEQ ID NO: 1311306
aaaguagggacaaaguccc

SEQ ID NO: 1311308 - RNA, 19 nt, Artificial Sequence
  Description of Artificial Sequence: Synthetic oligonucleotide
  Sense strand starting at position 2797 of SEQ ID NO: 1241938
ggacuuugucccuacuuua

SEQ ID NO: 1311309 - RNA, 19 nt, Artificial Sequence
  Description of Artificial Sequence: Synthetic oligonucleotide
  Antisense strand to SEQ ID NO: 1311308
uaaaguagggacaaagucc

SEQ ID NO: 1311310 - RNA, 19 nt, Artificial Sequence
  Description of Artificial Sequence: Synthetic oligonucleotide
  Sense strand starting at position 2936 of SEQ ID NO: 1241938
agcggaggucuccauacaa

SEQ ID NO: 1311311 - RNA, 19 nt, Artificial Sequence
  Description of Artificial Sequence: Synthetic oligonucleotide
  Antisense strand to SEQ ID NO: 1311310
uuguauggagaccuccgcu

SEQ ID NO: 1311312 - RNA, 19 nt, Artificial Sequence
  Description of Artificial Sequence: Synthetic oligonucleotide
  Sense strand starting at position 2952 of SEQ ID NO: 1241938
caacgaaaguuuguguaga

SEQ ID NO: 1311313 - RNA, 19 nt, Artificial Sequence
  Description of Artificial Sequence: Synthetic oligonucleotide
  Antisense strand to SEQ ID NO: 1311312
ucuacacaaacuuucguug

SEQ ID NO: 1311314 - RNA, 19 nt, Artificial Sequence
  Description of Artificial Sequence: Synthetic oligonucleotide
  Sense strand starting at position 2982 of SEQ ID NO: 1241938
guuacuuagucaccaguau

SEQ ID NO: 1311315 - RNA, 19 nt, Artificial Sequence
  Description of Artificial Sequence: Synthetic oligonucleotide
  Antisense strand to SEQ ID NO: 1311314
auacuggugacuaaguaac

SEQ ID NO: 1311316 - RNA, 19 nt, Artificial Sequence
  Description of Artificial Sequence: Synthetic oligonucleotide
  Sense strand starting at position 2983 of SEQ ID NO: 1241938
uuacuuagucaccaguaua

SEQ ID NO: 1311317 - RNA, 19 nt, Artificial Sequence
  Description of Artificial Sequence: Synthetic oligonucleotide
  Antisense strand to SEQ ID NO: 1311316
uauacuggugacuaaguaa

SEQ ID NO: 1311318 - RNA, 19 nt, Artificial Sequence
  Description of Artificial Sequence: Synthetic oligonucleotide
  Sense strand starting at position 2986 of SEQ ID NO: 1241938
cuuagucaccaguauauug

SEQ ID NO: 1311319 - RNA, 19 nt, Artificial Sequence
  Description of Artificial Sequence: Synthetic oligonucleotide
  Antisense strand to SEQ ID NO: 1311318
caauauacuggugacuaag

SEQ ID NO: 1311320 - RNA, 19 nt, Artificial Sequence
  Description of Artificial Sequence: Synthetic oligonucleotide
  Sense strand starting at position 3050 of SEQ ID NO: 1241938
cugagaaguuaccugcauu

SEQ ID NO: 1311321 - RNA, 19 nt, Artificial Sequence
  Description of Artificial Sequence: Synthetic oligonucleotide
  Antisense strand to SEQ ID NO: 1311320
aaugcagguaacuucucag

SEQ ID NO: 1311322 - RNA, 19 nt, Artificial Sequence
  Description of Artificial Sequence: Synthetic oligonucleotide
  Sense strand starting at position 3051 of SEQ ID NO: 1241938
ugagaaguuaccugcauug

SEQ ID NO: 1311323 - RNA, 19 nt, Artificial Sequence
  Description of Artificial Sequence: Synthetic oligonucleotide
  Antisense strand to SEQ ID NO: 1311322
caaugcagguaacuucuca

SEQ ID NO: 1311324 - RNA, 19 nt, Artificial Sequence
  Description of Artificial Sequence: Synthetic oligonucleotide
  Sense strand starting at position 3053 of SEQ ID NO: 1241938
agaaguuaccugcauugaa

SEQ ID NO: 1311325 - RNA, 19 nt, Artificial Sequence
  Description of Artificial Sequence: Synthetic oligonucleotide
  Antisense strand to SEQ ID NO: 1311324
uucaaugcagguaacuucu

SEQ ID NO: 1311326 - RNA, 19 nt, Artificial Sequence
  Description of Artificial Sequence: Synthetic oligonucleotide
  Sense strand starting at position 3118 of SEQ ID NO: 1241938
uugaccaaaugguugaaau

SEQ ID NO: 1311327 - RNA, 19 nt, Artificial Sequence
  Description of Artificial Sequence: Synthetic oligonucleotide
  Antisense strand to SEQ ID NO: 1311326
auuucaaccauuuggucaa

SEQ ID NO: 1311328 - RNA, 19 nt, Artificial Sequence
  Description of Artificial Sequence: Synthetic oligonucleotide
  Sense strand starting at position 3188 of SEQ ID NO: 1241938
ccugaaugguggucacucu

SEQ ID NO: 1311329 - RNA, 19 nt, Artificial Sequence
  Description of Artificial Sequence: Synthetic oligonucleotide
  Antisense strand to SEQ ID NO: 1311328
agagugaccaccauucagg

SEQ ID NO: 1311330 - RNA, 19 nt, Artificial Sequence
  Description of Artificial Sequence: Synthetic oligonucleotide
  Sense strand starting at position 3204 of SEQ ID NO: 1241938
ucuuguuuauucuuuggau

SEQ ID NO: 1311331 - RNA, 19 nt, Artificial Sequence
  Description of Artificial Sequence: Synthetic oligonucleotide
  Antisense strand to SEQ ID NO: 1311330
auccaaagaauaaacaaga

SEQ ID NO: 1311332 - RNA, 19 nt, Artificial Sequence
  Description of Artificial Sequence: Synthetic oligonucleotide
  Sense strand starting at position 3205 of SEQ ID NO: 1241938
cuuguuuauucuuuggaua

SEQ ID NO: 1311333 - RNA, 19 nt, Artificial Sequence
  Description of Artificial Sequence: Synthetic oligonucleotide
  Antisense strand to SEQ ID NO: 1311332
uauccaaagaauaaacaag

SEQ ID NO: 1311334 - RNA, 19 nt, Artificial Sequence
  Description of Artificial Sequence: Synthetic oligonucleotide
  Sense strand starting at position 3235 of SEQ ID NO: 1241938
uuugacacuugugauuuau

SEQ ID NO: 1311335 - RNA, 19 nt, Artificial Sequence
  Description of Artificial Sequence: Synthetic oligonucleotide
  Antisense strand to SEQ ID NO: 1311334
auaaaucacaagugucaaa

SEQ ID NO: 1311336 - RNA, 19 nt, Artificial Sequence
  Description of Artificial Sequence: Synthetic oligonucleotide
  Sense strand starting at position 3328 of SEQ ID NO: 1241938
cucauuaugcagugaauac

SEQ ID NO: 1311337 - RNA, 19 nt, Artificial Sequence
  Description of Artificial Sequence: Synthetic oligonucleotide
  Antisense strand to SEQ ID NO: 1311336
guauucacugcauaaugag

SEQ ID NO: 1311338 - RNA, 19 nt, Artificial Sequence
  Description of Artificial Sequence: Synthetic oligonucleotide
  Sense strand starting at position 3389 of SEQ ID NO: 1241938
ccaugaauuacaggcucga

SEQ ID NO: 1311339 - RNA, 19 nt, Artificial Sequence
  Description of Artificial Sequence: Synthetic oligonucleotide
  Antisense strand to SEQ ID NO: 1311338
ucgagccuguaauucaugg

SEQ ID NO: 1311340 - RNA, 19 nt, Artificial Sequence
  Description of Artificial Sequence: Synthetic oligonucleotide
  Sense strand starting at position 3444 of SEQ ID NO: 1241938
cacaaaugccgaggaguca

SEQ ID NO: 1311341 - RNA, 19 nt, Artificial Sequence
  Description of Artificial Sequence: Synthetic oligonucleotide
  Antisense strand to SEQ ID NO: 1311340
ugacuccucggcauuugug

SEQ ID NO: 1311342 - RNA, 19 nt, Artificial Sequence
  Description of Artificial Sequence: Synthetic oligonucleotide
  Sense strand starting at position 3495 of SEQ ID NO: 1241938
cacagugauuuacaugaag

SEQ ID NO: 1311343 - RNA, 19 nt, Artificial Sequence
  Description of Artificial Sequence: Synthetic oligonucleotide
  Antisense strand to SEQ ID NO: 1311342
cuucauguaaaucacugug

SEQ ID NO: 1311344 - RNA, 19 nt, Artificial Sequence
  Description of Artificial Sequence: Synthetic oligonucleotide
  Sense strand starting at position 3513 of SEQ ID NO: 1241938
guacgaaucuggccagauu

SEQ ID NO: 1311345 - RNA, 19 nt, Artificial Sequence
  Description of Artificial Sequence: Synthetic oligonucleotide
  Antisense strand to SEQ ID NO: 1311344
aaucuggccagauucguac

SEQ ID NO: 1311346 - RNA, 19 nt, Artificial Sequence
  Description of Artificial Sequence: Synthetic oligonucleotide
  Sense strand starting at position 3582 of SEQ ID NO: 1241938
gcuuuagacuuaccuaguu

SEQ ID NO: 1311347 - RNA, 19 nt, Artificial Sequence
  Description of Artificial Sequence: Synthetic oligonucleotide
  Antisense strand to SEQ ID NO: 1311346
aacuagguaagucuaaagc

SEQ ID NO: 1311348 - RNA, 19 nt, Artificial Sequence
  Description of Artificial Sequence: Synthetic oligonucleotide
  Sense strand starting at position 3606 of SEQ ID NO: 1241938
cgaaacuaguguccaguga

SEQ ID NO: 1311349 - RNA, 19 nt, Artificial Sequence
  Description of Artificial Sequence: Synthetic oligonucleotide
  Antisense strand to SEQ ID NO: 1311348
ucacuggacacuaguuucg

SEQ ID NO: 1311350 - RNA, 19 nt, Artificial Sequence
  Description of Artificial Sequence: Synthetic oligonucleotide
  Sense strand starting at position 3607 of SEQ ID NO: 1241938
gaaacuaguguccagugaa

SEQ ID NO: 1311351 - RNA, 19 nt, Artificial Sequence
  Description of Artificial Sequence: Synthetic oligonucleotide
  Antisense strand to SEQ ID NO: 1311350
uucacuggacacuaguuuc

SEQ ID NO: 1311352 - RNA, 19 nt, Artificial Sequence
  Description of Artificial Sequence: Synthetic oligonucleotide
  Sense strand starting at position 3939 of SEQ ID NO: 1241938
auauaaauaucugauggga

SEQ ID NO: 1311353 - RNA, 19 nt, Artificial Sequence
  Description of Artificial Sequence: Synthetic oligonucleotide
  Antisense strand to SEQ ID NO: 1311352
ucccaucagauauuuauau

SEQ ID NO: 1311354 - RNA, 19 nt, Artificial Sequence
  Description of Artificial Sequence: Synthetic oligonucleotide
  Sense strand starting at position 3956 of SEQ ID NO: 1241938
gaauaauauucugaggaug

SEQ ID NO: 1311355 - RNA, 19 nt, Artificial Sequence
  Description of Artificial Sequence: Synthetic oligonucleotide
  Antisense strand to SEQ ID NO: 1311354
cauccucagaauauuauuc

SEQ ID NO: 1311356 - RNA, 19 nt, Artificial Sequence
  Description of Artificial Sequence: Synthetic oligonucleotide
  Sense strand starting at position 3961 of SEQ ID NO: 1241938
auauucugaggaugccaaa

SEQ ID NO: 1311357 - RNA, 19 nt, Artificial Sequence
  Description of Artificial Sequence: Synthetic oligonucleotide
  Antisense strand to SEQ ID NO: 1311356
uuuggcauccucagaauau

SEQ ID NO: 1311358 - RNA, 19 nt, Artificial Sequence
  Description of Artificial Sequence: Synthetic oligonucleotide
  Sense strand starting at position 186 of SEQ ID NO: 1241939
ggcugagaaucugcucgaa

SEQ ID NO: 1311359 - RNA, 19 nt, Artificial Sequence
  Description of Artificial Sequence: Synthetic oligonucleotide
  Antisense strand to SEQ ID NO: 1311358
uucgagcagauucucagcc

SEQ ID NO: 1311360 - RNA, 19 nt, Artificial Sequence
  Description of Artificial Sequence: Synthetic oligonucleotide
  Sense strand starting at position 188 of SEQ ID NO: 1241939
cugagaaucugcucgaagg

SEQ ID NO: 1311361 - RNA, 19 nt, Artificial Sequence
  Description of Artificial Sequence: Synthetic oligonucleotide
  Antisense strand to SEQ ID NO: 1311360
ccuucgagcagauucucag

SEQ ID NO: 1311362 - RNA, 19 nt, Artificial Sequence
  Description of Artificial Sequence: Synthetic oligonucleotide
  Sense strand starting at position 301 of SEQ ID NO: 1241939
gucgguguucucagcgauc

SEQ ID NO: 1311363 - RNA, 19 nt, Artificial Sequence
  Description of Artificial Sequence: Synthetic oligonucleotide
  Antisense strand to SEQ ID NO: 1311362
gaucgcugagaacaccgac

SEQ ID NO: 1311364 - RNA, 19 nt, Artificial Sequence
  Description of Artificial Sequence: Synthetic oligonucleotide
  Sense strand starting at position 453 of SEQ ID NO: 1241939
agccuaggagucuauucuu

SEQ ID NO: 1311365 - RNA, 19 nt, Artificial Sequence
  Description of Artificial Sequence: Synthetic oligonucleotide
  Antisense strand to SEQ ID NO: 1311364
aagaauagacuccuaggcu

SEQ ID NO: 1311366 - RNA, 19 nt, Artificial Sequence
  Description of Artificial Sequence: Synthetic oligonucleotide
  Sense strand starting at position 456 of SEQ ID NO: 1241939
cuaggagucuauucuugca

SEQ ID NO: 1311367 - RNA, 19 nt, Artificial Sequence
  Description of Artificial Sequence: Synthetic oligonucleotide
  Antisense strand to SEQ ID NO: 1311366
ugcaagaauagacuccuag

SEQ ID NO: 1311368 - RNA, 19 nt, Artificial Sequence
  Description of Artificial Sequence: Synthetic oligonucleotide
  Sense strand starting at position 458 of SEQ ID NO: 1241939
aggagucuauucuugcaau

SEQ ID NO: 1311369 - RNA, 19 nt, Artificial Sequence
  Description of Artificial Sequence: Synthetic oligonucleotide
  Antisense strand to SEQ ID NO: 1311368
auugcaagaauagacuccu

SEQ ID NO: 1311370 - RNA, 19 nt, Artificial Sequence
  Description of Artificial Sequence: Synthetic oligonucleotide
  Sense strand starting at position 464 of SEQ ID NO: 1241939
cuauucuugcaaugaguau

SEQ ID NO: 1311371 - RNA, 19 nt, Artificial Sequence
  Description of Artificial Sequence: Synthetic oligonucleotide
  Antisense strand to SEQ ID NO: 1311370
auacucauugcaagaauag

SEQ ID NO: 1311372 - RNA, 19 nt, Artificial Sequence
  Description of Artificial Sequence: Synthetic oligonucleotide
  Sense strand starting at position 488 of SEQ ID NO: 1241939
gagcauuuacuaugugcuu

SEQ ID NO: 1311373 - RNA, 19 nt, Artificial Sequence
  Description of Artificial Sequence: Synthetic oligonucleotide
  Antisense strand to SEQ ID NO: 1311372
aagcacauaguaaaugcuc

SEQ ID NO: 1311374 - RNA, 19 nt, Artificial Sequence
  Description of Artificial Sequence: Synthetic oligonucleotide
  Sense strand starting at position 501 of SEQ ID NO: 1241939
gugcuuggcacugauucua

SEQ ID NO: 1311375 - RNA, 19 nt, Artificial Sequence
  Description of Artificial Sequence: Synthetic oligonucleotide
  Antisense strand to SEQ ID NO: 1311374
uagaaucagugccaagcac

SEQ ID NO: 1311376 - RNA, 19 nt, Artificial Sequence
  Description of Artificial Sequence: Synthetic oligonucleotide
  Sense strand starting at position 554 of SEQ ID NO: 1241939
gccagaaguuggcccuaaa

SEQ ID NO: 1311377 - RNA, 19 nt, Artificial Sequence
  Description of Artificial Sequence: Synthetic oligonucleotide
  Antisense strand to SEQ ID NO: 1311376
uuuagggccaacuucuggc

SEQ ID NO: 1311378 - RNA, 19 nt, Artificial Sequence
  Description of Artificial Sequence: Synthetic oligonucleotide
  Sense strand starting at position 941 of SEQ ID NO: 1241939
agggaucucuuacccucaa

SEQ ID NO: 1311379 - RNA, 19 nt, Artificial Sequence
  Description of Artificial Sequence: Synthetic oligonucleotide
  Antisense strand to SEQ ID NO: 1311378
uugaggguaagagaucccu

SEQ ID NO: 1311380 - RNA, 19 nt, Artificial Sequence
  Description of Artificial Sequence: Synthetic oligonucleotide
  Sense strand starting at position 942 of SEQ ID NO: 1241939
gggaucucuuacccucaaa

SEQ ID NO: 1311381 - RNA, 19 nt, Artificial Sequence
  Description of Artificial Sequence: Synthetic oligonucleotide
  Antisense strand to SEQ ID NO: 1311380
uuugaggguaagagauccc

SEQ ID NO: 1311382 - RNA, 19 nt, Artificial Sequence
  Description of Artificial Sequence: Synthetic oligonucleotide
  Sense strand starting at position 1231 of SEQ ID NO: 1241939
agcgauaacgguuacugua

SEQ ID NO: 1311383 - RNA, 19 nt, Artificial Sequence
  Description of Artificial Sequence: Synthetic oligonucleotide
  Antisense strand to SEQ ID NO: 1311382
uacaguaaccguuaucgcu

SEQ ID NO: 1311384 - RNA, 19 nt, Artificial Sequence
  Description of Artificial Sequence: Synthetic oligonucleotide
  Sense strand starting at position 1566 of SEQ ID NO: 1241939
cgaagcugucucuagagga

SEQ ID NO: 1311385 - RNA, 19 nt, Artificial Sequence
  Description of Artificial Sequence: Synthetic oligonucleotide
  Antisense strand to SEQ ID NO: 1311384
uccucuagagacagcuucg

SEQ ID NO: 1311386 - RNA, 19 nt, Artificial Sequence
  Description of Artificial Sequence: Synthetic oligonucleotide
  Sense strand starting at position 1728 of SEQ ID NO: 1241939
gacccugcucccgagaaga

SEQ ID NO: 1311387 - RNA, 19 nt, Artificial Sequence
  Description of Artificial Sequence: Synthetic oligonucleotide
  Antisense strand to SEQ ID NO: 1311386
ucuucucgggagcaggguc

SEQ ID NO: 1311388 - RNA, 19 nt, Artificial Sequence
  Description of Artificial Sequence: Synthetic oligonucleotide
  Sense strand starting at position 2292 of SEQ ID NO: 1241939
cugagaagucacuggagcu

SEQ ID NO: 1311389 - RNA, 19 nt, Artificial Sequence
  Description of Artificial Sequence: Synthetic oligonucleotide
  Antisense strand to SEQ ID NO: 1311388
agcuccagugacuucucag

SEQ ID NO: 1311390 - RNA, 19 nt, Artificial Sequence
  Description of Artificial Sequence: Synthetic oligonucleotide
  Sense strand starting at position 2293 of SEQ ID NO: 1241939
ugagaagucacuggagcua

SEQ ID NO: 1311391 - RNA, 19 nt, Artificial Sequence
  Description of Artificial Sequence: Synthetic oligonucleotide
  Antisense strand to SEQ ID NO: 1311390
uagcuccagugacuucuca

SEQ ID NO: 1311392 - RNA, 19 nt, Artificial Sequence
  Description of Artificial Sequence: Synthetic oligonucleotide
  Sense strand starting at position 2388 of SEQ ID NO: 1241939
agauguuaucaucaggcaa

SEQ ID NO: 1311393 - RNA, 19 nt, Artificial Sequence
  Description of Artificial Sequence: Synthetic oligonucleotide
  Antisense strand to SEQ ID NO: 1311392
uugccugaugauaacaucu

SEQ ID NO: 1311394 - RNA, 19 nt, Artificial Sequence
  Description of Artificial Sequence: Synthetic oligonucleotide
  Sense strand starting at position 2573 of SEQ ID NO: 1241939
ggaaauacguaaguccaaa

SEQ ID NO: 1311395 - RNA, 19 nt, Artificial Sequence
  Description of Artificial Sequence: Synthetic oligonucleotide
  Antisense strand to SEQ ID NO: 1311394
uuuggacuuacguauuucc

SEQ ID NO: 1311396 - RNA, 19 nt, Artificial Sequence
  Description of Artificial Sequence: Synthetic oligonucleotide
  Sense strand starting at position 2670 of SEQ ID NO: 1241939
ugcuguucucaucauucca

SEQ ID NO: 1311397 - RNA, 19 nt, Artificial Sequence
  Description of Artificial Sequence: Synthetic oligonucleotide
  Antisense strand to SEQ ID NO: 1311396
uggaaugaugagaacagca

SEQ ID NO: 1311398 - RNA, 19 nt, Artificial Sequence
  Description of Artificial Sequence: Synthetic oligonucleotide
  Sense strand starting at position 2763 of SEQ ID NO: 1241939
uaggauaauguuuggcaca

SEQ ID NO: 1311399 - RNA, 19 nt, Artificial Sequence
  Description of Artificial Sequence: Synthetic oligonucleotide
  Antisense strand to SEQ ID NO: 1311398
ugugccaaacauuauccua

SEQ ID NO: 1311400 - RNA, 19 nt, Artificial Sequence
  Description of Artificial Sequence: Synthetic oligonucleotide
  Sense strand starting at position 2765 of SEQ ID NO: 1241939
ggauaauguuuggcacaua

SEQ ID NO: 1311401 - RNA, 19 nt, Artificial Sequence
  Description of Artificial Sequence: Synthetic oligonucleotide
  Antisense strand to SEQ ID NO: 1311400
uaugugccaaacauuaucc

SEQ ID NO: 1311402 - RNA, 19 nt, Artificial Sequence
  Description of Artificial Sequence: Synthetic oligonucleotide
  Sense strand starting at position 2793 of SEQ ID NO: 1241939
caguaaauauuaucgaaug

SEQ ID NO: 1311403 - RNA, 19 nt, Artificial Sequence
  Description of Artificial Sequence: Synthetic oligonucleotide
  Antisense strand to SEQ ID NO: 1311402
cauucgauaauauuuacug

SEQ ID NO: 1311404 - RNA, 19 nt, Artificial Sequence
  Description of Artificial Sequence: Synthetic oligonucleotide
  Sense strand starting at position 2932 of SEQ ID NO: 1241939
acuugcugaucuuuguaaa

SEQ ID NO: 1311405 - RNA, 19 nt, Artificial Sequence
  Description of Artificial Sequence: Synthetic oligonucleotide
  Antisense strand to SEQ ID NO: 1311404
uuuacaaagaucagcaagu

SEQ ID NO: 1311406 - RNA, 19 nt, Artificial Sequence
  Description of Artificial Sequence: Synthetic oligonucleotide
  Sense strand starting at position 2933 of SEQ ID NO: 1241939
cuugcugaucuuuguaaag

SEQ ID NO: 1311407 - RNA, 19 nt, Artificial Sequence
  Description of Artificial Sequence: Synthetic oligonucleotide
  Antisense strand to SEQ ID NO: 1311406
cuuuacaaagaucagcaag

SEQ ID NO: 1311408 - RNA, 19 nt, Artificial Sequence
  Description of Artificial Sequence: Synthetic oligonucleotide
  Sense strand starting at position 2942 of SEQ ID NO: 1241939
cuuuguaaagucuaaaucu

SEQ ID NO: 1311409 - RNA, 19 nt, Artificial Sequence
  Description of Artificial Sequence: Synthetic oligonucleotide
  Antisense strand to SEQ ID NO: 1311408
agauuuagacuuuacaaag

SEQ ID NO: 1311410 - RNA, 19 nt, Artificial Sequence
  Description of Artificial Sequence: Synthetic oligonucleotide
  Sense strand starting at position 2951 of SEQ ID NO: 1241939
gucuaaaucugaguauguu

SEQ ID NO: 1311411 - RNA, 19 nt, Artificial Sequence
  Description of Artificial Sequence: Synthetic oligonucleotide
  Antisense strand to SEQ ID NO: 1311410
aacauacucagauuuagac

SEQ ID NO: 1311412 - RNA, 19 nt, Artificial Sequence
  Description of Artificial Sequence: Synthetic oligonucleotide
  Sense strand starting at position 2952 of SEQ ID NO: 1241939
ucuaaaucugaguauguua

SEQ ID NO: 1311413 - RNA, 19 nt, Artificial Sequence
  Description of Artificial Sequence: Synthetic oligonucleotide
  Antisense strand to SEQ ID NO: 1311412
uaacauacucagauuuaga

SEQ ID NO: 1311414 - RNA, 19 nt, Artificial Sequence
  Description of Artificial Sequence: Synthetic oligonucleotide
  Sense strand starting at position 2954 of SEQ ID NO: 1241939
uaaaucugaguauguuagu

SEQ ID NO: 1311415 - RNA, 19 nt, Artificial Sequence
  Description of Artificial Sequence: Synthetic oligonucleotide
  Antisense strand to SEQ ID NO: 1311414
acuaacauacucagauuua

SEQ ID NO: 1311416 - RNA, 19 nt, Artificial Sequence
  Description of Artificial Sequence: Synthetic oligonucleotide
  Sense strand starting at position 3134 of SEQ ID NO: 1241939
ucuacuuuacacuggaaga

SEQ ID NO: 1311417 - RNA, 19 nt, Artificial Sequence
  Description of Artificial Sequence: Synthetic oligonucleotide
  Antisense strand to SEQ ID NO: 1311416
ucuuccaguguaaaguaga

SEQ ID NO: 1311418 - RNA, 19 nt, Artificial Sequence
  Description of Artificial Sequence: Synthetic oligonucleotide
  Sense strand starting at position 3207 of SEQ ID NO: 1241939
gguacauuccaucauugua

SEQ ID NO: 1311419 - RNA, 19 nt, Artificial Sequence
  Description of Artificial Sequence: Synthetic oligonucleotide
  Antisense strand to SEQ ID NO: 1311418
uacaaugauggaauguacc

SEQ ID NO: 1311420 - RNA, 19 nt, Artificial Sequence
  Description of Artificial Sequence: Synthetic oligonucleotide
  Sense strand starting at position 3370 of SEQ ID NO: 1241939
uuagccagacaugguuaaa

SEQ ID NO: 1311421 - RNA, 19 nt, Artificial Sequence
  Description of Artificial Sequence: Synthetic oligonucleotide
  Antisense strand to SEQ ID NO: 1311420
uuuaaccaugucuggcuaa

SEQ ID NO: 1311422 - RNA, 19 nt, Artificial Sequence
  Description of Artificial Sequence: Synthetic oligonucleotide
  Sense strand starting at position 3373 of SEQ ID NO: 1241939
gccagacaugguuaaaccu

SEQ ID NO: 1311423 - RNA, 19 nt, Artificial Sequence
  Description of Artificial Sequence: Synthetic oligonucleotide
  Antisense strand to SEQ ID NO: 1311422
agguuuaaccaugucuggc

SEQ ID NO: 1311424 - RNA, 19 nt, Artificial Sequence
  Description of Artificial Sequence: Synthetic oligonucleotide
  Sense strand starting at position 3847 of SEQ ID NO: 1241939
cuuucuguccgagaaagag

SEQ ID NO: 1311425 - RNA, 19 nt, Artificial Sequence
  Description of Artificial Sequence: Synthetic oligonucleotide
  Antisense strand to SEQ ID NO: 1311424
cucuuucucggacagaaag

SEQ ID NO: 1311426 - RNA, 19 nt, Artificial Sequence
  Description of Artificial Sequence: Synthetic oligonucleotide
  Sense strand starting at position 3855 of SEQ ID NO: 1241939
ccgagaaagaguuagucuu

SEQ ID NO: 1311427 - RNA, 19 nt, Artificial Sequence
  Description of Artificial Sequence: Synthetic oligonucleotide
  Antisense strand to SEQ ID NO: 1311426
aagacuaacucuuucucgg

SEQ ID NO: 1311428 - RNA, 19 nt, Artificial Sequence
  Description of Artificial Sequence: Synthetic oligonucleotide
  Sense strand starting at position 3857 of SEQ ID NO: 1241939
gagaaagaguuagucuucu

SEQ ID NO: 1311429 - RNA, 19 nt, Artificial Sequence
  Description of Artificial Sequence: Synthetic oligonucleotide
  Antisense strand to SEQ ID NO: 1311428
agaagacuaacucuuucuc

SEQ ID NO: 1311430 - RNA, 19 nt, Artificial Sequence
  Description of Artificial Sequence: Synthetic oligonucleotide
  Sense strand starting at position 3861 of SEQ ID NO: 1241939
aagaguuagucuucuguua

SEQ ID NO: 1311431 - RNA, 19 nt, Artificial Sequence
  Description of Artificial Sequence: Synthetic oligonucleotide
  Antisense strand to SEQ ID NO: 1311430
uaacagaagacuaacucuu

SEQ ID NO: 1311432 - RNA, 19 nt, Artificial Sequence
  Description of Artificial Sequence: Synthetic oligonucleotide
  Sense strand starting at position 3902 of SEQ ID NO: 1241939
agaagcugucauuaugucu

SEQ ID NO: 1311433 - RNA, 19 nt, Artificial Sequence
  Description of Artificial Sequence: Synthetic oligonucleotide
  Antisense strand to SEQ ID NO: 1311432
agacauaaugacagcuucu

SEQ ID NO: 1311434 - RNA, 19 nt, Artificial Sequence
  Description of Artificial Sequence: Synthetic oligonucleotide
  Sense strand starting at position 3968 of SEQ ID NO: 1241939
ccuggacugcaugguaaua

SEQ ID NO: 1311435 - RNA, 19 nt, Artificial Sequence
  Description of Artificial Sequence: Synthetic oligonucleotide
  Antisense strand to SEQ ID NO: 1311434
uauuaccaugcaguccagg

SEQ ID NO: 1311436 - RNA, 19 nt, Artificial Sequence
  Description of Artificial Sequence: Synthetic oligonucleotide
  Sense strand starting at position 3980 of SEQ ID NO: 1241939
gguaauaaguaucugucuu

SEQ ID NO: 1311437 - RNA, 19 nt, Artificial Sequence
  Description of Artificial Sequence: Synthetic oligonucleotide
  Antisense strand to SEQ ID NO: 1311436
aagacagauacuuauuacc

SEQ ID NO: 1311438 - RNA, 19 nt, Artificial Sequence
  Description of Artificial Sequence: Synthetic oligonucleotide
  Sense strand starting at position 167 of SEQ ID NO: 1241940
gacugagugccuugggaac

SEQ ID NO: 1311439 - RNA, 19 nt, Artificial Sequence
  Description of Artificial Sequence: Synthetic oligonucleotide
  Antisense strand to SEQ ID NO: 1311438
guucccaaggcacucaguc

SEQ ID NO: 1311440 - RNA, 19 nt, Artificial Sequence
  Description of Artificial Sequence: Synthetic oligonucleotide
  Sense strand starting at position 239 of SEQ ID NO: 1241940
ggagucaagauucgaaauc

SEQ ID NO: 1311441 - RNA, 19 nt, Artificial Sequence
  Description of Artificial Sequence: Synthetic oligonucleotide
  Antisense strand to SEQ ID NO: 1311440
gauuucgaaucuugacucc

SEQ ID NO: 1311442 - RNA, 19 nt, Artificial Sequence
  Description of Artificial Sequence: Synthetic oligonucleotide
  Sense strand starting at position 319 of SEQ ID NO: 1241940
uccaccucacugugaugau

SEQ ID NO: 1311443 - RNA, 19 nt, Artificial Sequence
  Description of Artificial Sequence: Synthetic oligonucleotide
  Antisense strand to SEQ ID NO: 1311442
aucaucacagugaggugga

SEQ ID NO: 1311444 - RNA, 19 nt, Artificial Sequence
  Description of Artificial Sequence: Synthetic oligonucleotide
  Sense strand starting at position 365 of SEQ ID NO: 1241940
aauuacugugccugguaca

SEQ ID NO: 1311445 - RNA, 19 nt, Artificial Sequence
  Description of Artificial Sequence: Synthetic oligonucleotide
  Antisense strand to SEQ ID NO: 1311444
uguaccaggcacaguaauu

SEQ ID NO: 1311446 - RNA, 19 nt, Artificial Sequence
  Description of Artificial Sequence: Synthetic oligonucleotide
  Sense strand starting at position 863 of SEQ ID NO: 1241940
gagauaagcugagcaauug

SEQ ID NO: 1311447 - RNA, 19 nt, Artificial Sequence
  Description of Artificial Sequence: Synthetic oligonucleotide
  Antisense strand to SEQ ID NO: 1311446
caauugcucagcuuaucuc

SEQ ID NO: 1311448 - RNA, 19 nt, Artificial Sequence
  Description of Artificial Sequence: Synthetic oligonucleotide
  Sense strand starting at position 1081 of SEQ ID NO: 1241940
ugcguucuugcuccaguua

SEQ ID NO: 1311449 - RNA, 19 nt, Artificial Sequence
  Description of Artificial Sequence: Synthetic oligonucleotide
  Antisense strand to SEQ ID NO: 1311448
uaacuggagcaagaacgca

SEQ ID NO: 1311450 - RNA, 19 nt, Artificial Sequence
  Description of Artificial Sequence: Synthetic oligonucleotide
  Sense strand starting at position 1406 of SEQ ID NO: 1241940
cugagagguucuuccaacu

SEQ ID NO: 1311451 - RNA, 19 nt, Artificial Sequence
  Description of Artificial Sequence: Synthetic oligonucleotide
  Antisense strand to SEQ ID NO: 1311450
aguuggaagaaccucucag

SEQ ID NO: 1311452 - RNA, 19 nt, Artificial Sequence
  Description of Artificial Sequence: Synthetic oligonucleotide
  Sense strand starting at position 1412 of SEQ ID NO: 1241940
gguucuuccaacuggaaag

SEQ ID NO: 1311453 - RNA, 19 nt, Artificial Sequence
  Description of Artificial Sequence: Synthetic oligonucleotide
  Antisense strand to SEQ ID NO: 1311452
cuuuccaguuggaagaacc

SEQ ID NO: 1311454 - RNA, 19 nt, Artificial Sequence
  Description of Artificial Sequence: Synthetic oligonucleotide
  Sense strand starting at position 1653 of SEQ ID NO: 1241940
cggugaagauggucugcuu

SEQ ID NO: 1311455 - RNA, 19 nt, Artificial Sequence
  Description of Artificial Sequence: Synthetic oligonucleotide
  Antisense strand to SEQ ID NO: 1311454
aagcagaccaucuucaccg

SEQ ID NO: 1311456 - RNA, 19 nt, Artificial Sequence
  Description of Artificial Sequence: Synthetic oligonucleotide
  Sense strand starting at position 1656 of SEQ ID NO: 1241940
ugaagauggucugcuuguu

SEQ ID NO: 1311457 - RNA, 19 nt, Artificial Sequence
  Description of Artificial Sequence: Synthetic oligonucleotide
  Antisense strand to SEQ ID NO: 1311456
aacaagcagaccaucuuca

SEQ ID NO: 1311458 - RNA, 19 nt, Artificial Sequence
  Description of Artificial Sequence: Synthetic oligonucleotide
  Sense strand starting at position 2426 of SEQ ID NO: 1241940
uucuguguuccuuagggag

SEQ ID NO: 1311459 - RNA, 19 nt, Artificial Sequence
  Description of Artificial Sequence: Synthetic oligonucleotide
  Antisense strand to SEQ ID NO: 1311458
cucccuaaggaacacagaa

SEQ ID NO: 1311460 - RNA, 19 nt, Artificial Sequence
  Description of Artificial Sequence: Synthetic oligonucleotide
  Sense strand starting at position 2455 of SEQ ID NO: 1241940
uuuacuuggcuugguuaca

SEQ ID NO: 1311461 - RNA, 19 nt, Artificial Sequence
  Description of Artificial Sequence: Synthetic oligonucleotide
  Antisense strand to SEQ ID NO: 1311460
uguaaccaagccaaguaaa

SEQ ID NO: 1311462 - RNA, 19 nt, Artificial Sequence
  Description of Artificial Sequence: Synthetic oligonucleotide
  Sense strand starting at position 2456 of SEQ ID NO: 1241940
uuacuuggcuugguuacaa

SEQ ID NO: 1311463 - RNA, 19 nt, Artificial Sequence
  Description of Artificial Sequence: Synthetic oligonucleotide
  Antisense strand to SEQ ID NO: 1311462
uuguaaccaagccaaguaa

SEQ ID NO: 1311464 - RNA, 19 nt, Artificial Sequence
  Description of Artificial Sequence: Synthetic oligonucleotide
  Sense strand starting at position 2464 of SEQ ID NO: 1241940
cuugguuacaaacgugaga

SEQ ID NO: 1311465 - RNA, 19 nt, Artificial Sequence
  Description of Artificial Sequence: Synthetic oligonucleotide
  Antisense strand to SEQ ID NO: 1311464
ucucacguuuguaaccaag

SEQ ID NO: 1311466 - RNA, 19 nt, Artificial Sequence
  Description of Artificial Sequence: Synthetic oligonucleotide
  Sense strand starting at position 2466 of SEQ ID NO: 1241940
ugguuacaaacgugagacu

SEQ ID NO: 1311467 - RNA, 19 nt, Artificial Sequence
  Description of Artificial Sequence: Synthetic oligonucleotide
  Antisense strand to SEQ ID NO: 1311466
agucucacguuuguaacca

SEQ ID NO: 1311468 - RNA, 19 nt, Artificial Sequence
  Description of Artificial Sequence: Synthetic oligonucleotide
  Sense strand starting at position 2467 of SEQ ID NO: 1241940
gguuacaaacgugagacuu

SEQ ID NO: 1311469 - RNA, 19 nt, Artificial Sequence
  Description of Artificial Sequence: Synthetic oligonucleotide
  Antisense strand to SEQ ID NO: 1311468
aagucucacguuuguaacc

SEQ ID NO: 1311470 - RNA, 19 nt, Artificial Sequence
  Description of Artificial Sequence: Synthetic oligonucleotide
  Sense strand starting at position 2475 of SEQ ID NO: 1241940
acgugagacuugagaggau

SEQ ID NO: 1311471 - RNA, 19 nt, Artificial Sequence
  Description of Artificial Sequence: Synthetic oligonucleotide
  Antisense strand to SEQ ID NO: 1311470
auccucucaagucucacgu

SEQ ID NO: 1311472 - RNA, 19 nt, Artificial Sequence
  Description of Artificial Sequence: Synthetic oligonucleotide
  Sense strand starting at position 2499 of SEQ ID NO: 1241940
ggacuugacuguguccaca

SEQ ID NO: 1311473 - RNA, 19 nt, Artificial Sequence
  Description of Artificial Sequence: Synthetic oligonucleotide
  Antisense strand to SEQ ID NO: 1311472
uguggacacagucaagucc

SEQ ID NO: 1311474 - RNA, 19 nt, Artificial Sequence
  Description of Artificial Sequence: Synthetic oligonucleotide
  Sense strand starting at position 2502 of SEQ ID NO: 1241940
cuugacuguguccacagaa

SEQ ID NO: 1311475 - RNA, 19 nt, Artificial Sequence
  Description of Artificial Sequence: Synthetic oligonucleotide
  Antisense strand to SEQ ID NO: 1311474
uucuguggacacagucaag

SEQ ID NO: 1311476 - RNA, 19 nt, Artificial Sequence
  Description of Artificial Sequence: Synthetic oligonucleotide
  Sense strand starting at position 2512 of SEQ ID NO: 1241940
uccacagaagugugacaaa

SEQ ID NO: 1311477 - RNA, 19 nt, Artificial Sequence
  Description of Artificial Sequence: Synthetic oligonucleotide
  Antisense strand to SEQ ID NO: 1311476
uuugucacacuucugugga

SEQ ID NO: 1311478 - RNA, 19 nt, Artificial Sequence
  Description of Artificial Sequence: Synthetic oligonucleotide
  Sense strand starting at position 3096 of SEQ ID NO: 1241940
uuugaauucccaggcucga

SEQ ID NO: 1311479 - RNA, 19 nt, Artificial Sequence
  Description of Artificial Sequence: Synthetic oligonucleotide
  Antisense strand to SEQ ID NO: 1311478
ucgagccugggaauucaaa

SEQ ID NO: 1311480 - RNA, 19 nt, Artificial Sequence
  Description of Artificial Sequence: Synthetic oligonucleotide
  Sense strand starting at position 3149 of SEQ ID NO: 1241940
cugggauuauaggauguga

SEQ ID NO: 1311481 - RNA, 19 nt, Artificial Sequence
  Description of Artificial Sequence: Synthetic oligonucleotide
  Antisense strand to SEQ ID NO: 1311480
ucacauccuauaaucccag

SEQ ID NO: 1311482 - RNA, 19 nt, Artificial Sequence
  Description of Artificial Sequence: Synthetic oligonucleotide
  Sense strand starting at position 3214 of SEQ ID NO: 1241940
gaucaagagugcccuucuu

SEQ ID NO: 1311483 - RNA, 19 nt, Artificial Sequence
  Description of Artificial Sequence: Synthetic oligonucleotide
  Antisense strand to SEQ ID NO: 1311482
aagaagggcacucuugauc

SEQ ID NO: 1311484 - RNA, 19 nt, Artificial Sequence
  Description of Artificial Sequence: Synthetic oligonucleotide
  Sense strand starting at position 3333 of SEQ ID NO: 1241940
uggagucaccgcuaucuuu

SEQ ID NO: 1311485 - RNA, 19 nt, Artificial Sequence
  Description of Artificial Sequence: Synthetic oligonucleotide
  Antisense strand to SEQ ID NO: 1311484
aaagauagcggugacucca

SEQ ID NO: 1311486 - RNA, 19 nt, Artificial Sequence
  Description of Artificial Sequence: Synthetic oligonucleotide
  Sense strand starting at position 3392 of SEQ ID NO: 1241940
acaacugaaucaguaggua

SEQ ID NO: 1311487 - RNA, 19 nt, Artificial Sequence
  Description of Artificial Sequence: Synthetic oligonucleotide
  Antisense strand to SEQ ID NO: 1311486
uaccuacugauucaguugu

SEQ ID NO: 1311488 - RNA, 19 nt, Artificial Sequence
  Description of Artificial Sequence: Synthetic oligonucleotide
  Sense strand starting at position 3395 of SEQ ID NO: 1241940
acugaaucaguagguauua

SEQ ID NO: 1311489 - RNA, 19 nt, Artificial Sequence
  Description of Artificial Sequence: Synthetic oligonucleotide
  Antisense strand to SEQ ID NO: 1311488
uaauaccuacugauucagu

SEQ ID NO: 1311490 - RNA, 19 nt, Artificial Sequence
  Description of Artificial Sequence: Synthetic oligonucleotide
  Sense strand starting at position 3396 of SEQ ID NO: 1241940
cugaaucaguagguauuau

SEQ ID NO: 1311491 - RNA, 19 nt, Artificial Sequence
  Description of Artificial Sequence: Synthetic oligonucleotide
  Antisense strand to SEQ ID NO: 1311490
auaauaccuacugauucag

SEQ ID NO: 1311492 - RNA, 19 nt, Artificial Sequence
  Description of Artificial Sequence: Synthetic oligonucleotide
  Sense strand starting at position 3416 of SEQ ID NO: 1241940
uccauauuauaggcaaaga

SEQ ID NO: 1311493 - RNA, 19 nt, Artificial Sequence
  Description of Artificial Sequence: Synthetic oligonucleotide
  Antisense strand to SEQ ID NO: 1311492
ucuuugccuauaauaugga

SEQ ID NO: 1311494 - RNA, 19 nt, Artificial Sequence
  Description of Artificial Sequence: Synthetic oligonucleotide
  Sense strand starting at position 3469 of SEQ ID NO: 1241940
gucccacagcugggaauua

SEQ ID NO: 1311495 - RNA, 19 nt, Artificial Sequence
  Description of Artificial Sequence: Synthetic oligonucleotide
  Antisense strand to SEQ ID NO: 1311494
uaauucccagcugugggac

SEQ ID NO: 1311496 - RNA, 19 nt, Artificial Sequence
  Description of Artificial Sequence: Synthetic oligonucleotide
  Sense strand starting at position 3714 of SEQ ID NO: 1241940
agaucaagacuuuaugcuu

SEQ ID NO: 1311497 - RNA, 19 nt, Artificial Sequence
  Description of Artificial Sequence: Synthetic oligonucleotide
  Antisense strand to SEQ ID NO: 1311496
aagcauaaagucuugaucu

SEQ ID NO: 1311498 - RNA, 19 nt, Artificial Sequence
  Description of Artificial Sequence: Synthetic oligonucleotide
  Sense strand starting at position 3741 of SEQ ID NO: 1241940
gugguuuguuacuuuagga

SEQ ID NO: 1311499 - RNA, 19 nt, Artificial Sequence
  Description of Artificial Sequence: Synthetic oligonucleotide
  Antisense strand to SEQ ID NO: 1311498
uccuaaaguaacaaaccac

SEQ ID NO: 1311500 - RNA, 19 nt, Artificial Sequence
  Description of Artificial Sequence: Synthetic oligonucleotide
  Sense strand starting at position 3754 of SEQ ID NO: 1241940
uuaggauagugguucugaa

SEQ ID NO: 1311501 - RNA, 19 nt, Artificial Sequence
  Description of Artificial Sequence: Synthetic oligonucleotide
  Antisense strand to SEQ ID NO: 1311500
uucagaaccacuauccuaa

SEQ ID NO: 1311502 - RNA, 19 nt, Artificial Sequence
  Description of Artificial Sequence: Synthetic oligonucleotide
  Sense strand starting at position 3846 of SEQ ID NO: 1241940
uggcuaagaauguggguau

SEQ ID NO: 1311503 - RNA, 19 nt, Artificial Sequence
  Description of Artificial Sequence: Synthetic oligonucleotide
  Antisense strand to SEQ ID NO: 1311502
auacccacauucuuagcca

SEQ ID NO: 1311504 - RNA, 19 nt, Artificial Sequence
  Description of Artificial Sequence: Synthetic oligonucleotide
  Sense strand starting at position 3849 of SEQ ID NO: 1241940
cuaagaauguggguaucga

SEQ ID NO: 1311505 - RNA, 19 nt, Artificial Sequence
  Description of Artificial Sequence: Synthetic oligonucleotide
  Antisense strand to SEQ ID NO: 1311504
ucgauacccacauucuuag

SEQ ID NO: 1311506 - RNA, 19 nt, Artificial Sequence
  Description of Artificial Sequence: Synthetic oligonucleotide
  Sense strand starting at position 3850 of SEQ ID NO: 1241940
uaagaauguggguaucgaa

SEQ ID NO: 1311507 - RNA, 19 nt, Artificial Sequence
  Description of Artificial Sequence: Synthetic oligonucleotide
  Antisense strand to SEQ ID NO: 1311506
uucgauacccacauucuua

SEQ ID NO: 1311508 - RNA, 19 nt, Artificial Sequence
  Description of Artificial Sequence: Synthetic oligonucleotide
  Sense strand starting at position 3903 of SEQ ID NO: 1241940
ggaaccauacuuugagagu

SEQ ID NO: 1311509 - RNA, 19 nt, Artificial Sequence
  Description of Artificial Sequence: Synthetic oligonucleotide
  Antisense strand to SEQ ID NO: 1311508
acucucaaaguaugguucc

SEQ ID NO: 1311510 - RNA, 19 nt, Artificial Sequence
  Description of Artificial Sequence: Synthetic oligonucleotide
  Sense strand starting at position 3912 of SEQ ID NO: 1241940
cuuugagagugcuuaggcu

SEQ ID NO: 1311511 - RNA, 19 nt, Artificial Sequence
  Description of Artificial Sequence: Synthetic oligonucleotide
  Antisense strand to SEQ ID NO: 1311510
agccuaagcacucucaaag

SEQ ID NO: 1311512 - RNA, 19 nt, Artificial Sequence
  Description of Artificial Sequence: Synthetic oligonucleotide
  Sense strand starting at position 3960 of SEQ ID NO: 1241940
gggcuucaaguuuggcaga

SEQ ID NO: 1311513 - RNA, 19 nt, Artificial Sequence
  Description of Artificial Sequence: Synthetic oligonucleotide
  Antisense strand to SEQ ID NO: 1311512
ucugccaaacuugaagccc

SEQ ID NO: 1311514 - RNA, 19 nt, Artificial Sequence
  Description of Artificial Sequence: Synthetic oligonucleotide
  Sense strand starting at position 3962 of SEQ ID NO: 1241940
gcuucaaguuuggcagaug

SEQ ID NO: 1311515 - RNA, 19 nt, Artificial Sequence
  Description of Artificial Sequence: Synthetic oligonucleotide
  Antisense strand to SEQ ID NO: 1311514
caucugccaaacuugaagc

SEQ ID NO: 1311516 - RNA, 19 nt, Artificial Sequence
  Description of Artificial Sequence: Synthetic oligonucleotide
  Sense strand starting at position 3965 of SEQ ID NO: 1241940
ucaaguuuggcagaugauc

SEQ ID NO: 1311517 - RNA, 19 nt, Artificial Sequence
  Description of Artificial Sequence: Synthetic oligonucleotide
  Antisense strand to SEQ ID NO: 1311516
gaucaucugccaaacuuga

SEQ ID NO: 1311518 - RNA, 19 nt, Artificial Sequence
  Description of Artificial Sequence: Synthetic oligonucleotide
  Sense strand starting at position 98 of SEQ ID NO: 1241941
ugucuuaaggcagaugcau

SEQ ID NO: 1311519 - RNA, 19 nt, Artificial Sequence
  Description of Artificial Sequence: Synthetic oligonucleotide
  Antisense strand to SEQ ID NO: 1311518
augcaucugccuuaagaca

SEQ ID NO: 1311520 - RNA, 19 nt, Artificial Sequence
  Description of Artificial Sequence: Synthetic oligonucleotide
  Sense strand starting at position 173 of SEQ ID NO: 1241941
agcagauacuuagccuaua

SEQ ID NO: 1311521 - RNA, 19 nt, Artificial Sequence
  Description of Artificial Sequence: Synthetic oligonucleotide
  Antisense strand to SEQ ID NO: 1311520
uauaggcuaaguaucugcu

SEQ ID NO: 1311522 - RNA, 19 nt, Artificial Sequence
  Description of Artificial Sequence: Synthetic oligonucleotide
  Sense strand starting at position 334 of SEQ ID NO: 1241941
cugggaaguuucucagauc

SEQ ID NO: 1311523 - RNA, 19 nt, Artificial Sequence
  Description of Artificial Sequence: Synthetic oligonucleotide
  Antisense strand to SEQ ID NO: 1311522
gaucugagaaacuucccag

SEQ ID NO: 1311524 - RNA, 19 nt, Artificial Sequence
  Description of Artificial Sequence: Synthetic oligonucleotide
  Sense strand starting at position 368 of SEQ ID NO: 1241941
aaacaaagcuugucagguu

SEQ ID NO: 1311525 - RNA, 19 nt, Artificial Sequence
  Description of Artificial Sequence: Synthetic oligonucleotide
  Antisense strand to SEQ ID NO: 1311524
aaccugacaagcuuuguuu

SEQ ID NO: 1311526 - RNA, 19 nt, Artificial Sequence
  Description of Artificial Sequence: Synthetic oligonucleotide
  Sense strand starting at position 409 of SEQ ID NO: 1241941
auggcucaagcagaaauau

SEQ ID NO: 1311527 - RNA, 19 nt, Artificial Sequence
  Description of Artificial Sequence: Synthetic oligonucleotide
  Antisense strand to SEQ ID NO: 1311526
auauuucugcuugagccau

SEQ ID NO: 1311528 - RNA, 19 nt, Artificial Sequence
  Description of Artificial Sequence: Synthetic oligonucleotide
  Sense strand starting at position 420 of SEQ ID NO: 1241941
agaaauauuucuugaccug

SEQ ID NO: 1311529 - RNA, 19 nt, Artificial Sequence
  Description of Artificial Sequence: Synthetic oligonucleotide
  Antisense strand to SEQ ID NO: 1311528
caggucaagaaauauuucu

SEQ ID NO: 1311530 - RNA, 19 nt, Artificial Sequence
  Description of Artificial Sequence: Synthetic oligonucleotide
  Sense strand starting at position 454 of SEQ ID NO: 1241941
uggacagaaugauaugaaa

SEQ ID NO: 1311531 - RNA, 19 nt, Artificial Sequence
  Description of Artificial Sequence: Synthetic oligonucleotide
  Antisense strand to SEQ ID NO: 1311530
uuucauaucauucugucca

SEQ ID NO: 1311532 - RNA, 19 nt, Artificial Sequence
  Description of Artificial Sequence: Synthetic oligonucleotide
  Sense strand starting at position 472 of SEQ ID NO: 1241941
agugauaucugccugaguu

SEQ ID NO: 1311533 - RNA, 19 nt, Artificial Sequence
  Description of Artificial Sequence: Synthetic oligonucleotide
  Antisense strand to SEQ ID NO: 1311532
aacucaggcagauaucacu

SEQ ID NO: 1311534 - RNA, 19 nt, Artificial Sequence
  Description of Artificial Sequence: Synthetic oligonucleotide
  Sense strand starting at position 474 of SEQ ID NO: 1241941
ugauaucugccugaguugu

SEQ ID NO: 1311535 - RNA, 19 nt, Artificial Sequence
  Description of Artificial Sequence: Synthetic oligonucleotide
  Antisense strand to SEQ ID NO: 1311534
acaacucaggcagauauca

SEQ ID NO: 1311536 - RNA, 19 nt, Artificial Sequence
  Description of Artificial Sequence: Synthetic oligonucleotide
  Sense strand starting at position 476 of SEQ ID NO: 1241941
auaucugccugaguuguga

SEQ ID NO: 1311537 - RNA, 19 nt, Artificial Sequence
  Description of Artificial Sequence: Synthetic oligonucleotide
  Antisense strand to SEQ ID NO: 1311536
ucacaacucaggcagauau

SEQ ID NO: 1311538 - RNA, 19 nt, Artificial Sequence
  Description of Artificial Sequence: Synthetic oligonucleotide
  Sense strand starting at position 618 of SEQ ID NO: 1241941
cgaggagguuccuugcaau

SEQ ID NO: 1311539 - RNA, 19 nt, Artificial Sequence
  Description of Artificial Sequence: Synthetic oligonucleotide
  Antisense strand to SEQ ID NO: 1311538
auugcaaggaaccuccucg

SEQ ID NO: 1311540 - RNA, 19 nt, Artificial Sequence
  Description of Artificial Sequence: Synthetic oligonucleotide
  Sense strand starting at position 625 of SEQ ID NO: 1241941
guuccuugcaaugaggaga

SEQ ID NO: 1311541 - RNA, 19 nt, Artificial Sequence
  Description of Artificial Sequence: Synthetic oligonucleotide
  Antisense strand to SEQ ID NO: 1311540
ucuccucauugcaaggaac

SEQ ID NO: 1311542 - RNA, 19 nt, Artificial Sequence
  Description of Artificial Sequence: Synthetic oligonucleotide
  Sense strand starting at position 672 of SEQ ID NO: 1241941
ggugacucgucacuucuaa

SEQ ID NO: 1311543 - RNA, 19 nt, Artificial Sequence
  Description of Artificial Sequence: Synthetic oligonucleotide
  Antisense strand to SEQ ID NO: 1311542
uuagaagugacgagucacc

SEQ ID NO: 1311544 - RNA, 19 nt, Artificial Sequence
  Description of Artificial Sequence: Synthetic oligonucleotide
  Sense strand starting at position 715 of SEQ ID NO: 1241941
uuugccauccuuugaugga

SEQ ID NO: 1311545 - RNA, 19 nt, Artificial Sequence
  Description of Artificial Sequence: Synthetic oligonucleotide
  Antisense strand to SEQ ID NO: 1311544
uccaucaaaggauggcaaa

SEQ ID NO: 1311546 - RNA, 19 nt, Artificial Sequence
  Description of Artificial Sequence: Synthetic oligonucleotide
  Sense strand starting at position 758 of SEQ ID NO: 1241941
acauauuaaggccgugaag

SEQ ID NO: 1311547 - RNA, 19 nt, Artificial Sequence
  Description of Artificial Sequence: Synthetic oligonucleotide
  Antisense strand to SEQ ID NO: 1311546
cuucacggccuuaauaugu

SEQ ID NO: 1311548 - RNA, 19 nt, Artificial Sequence
  Description of Artificial Sequence: Synthetic oligonucleotide
  Sense strand starting at position 760 of SEQ ID NO: 1241941
auauuaaggccgugaagac

SEQ ID NO: 1311549 - RNA, 19 nt, Artificial Sequence
  Description of Artificial Sequence: Synthetic oligonucleotide
  Antisense strand to SEQ ID NO: 1311548
gucuucacggccuuaauau

SEQ ID NO: 1311550 - RNA, 19 nt, Artificial Sequence
  Description of Artificial Sequence: Synthetic oligonucleotide
  Sense strand starting at position 761 of SEQ ID NO: 1241941
uauuaaggccgugaagacu

SEQ ID NO: 1311551 - RNA, 19 nt, Artificial Sequence
  Description of Artificial Sequence: Synthetic oligonucleotide
  Antisense strand to SEQ ID NO: 1311550
agucuucacggccuuaaua

SEQ ID NO: 1311552 - RNA, 19 nt, Artificial Sequence
  Description of Artificial Sequence: Synthetic oligonucleotide
  Sense strand starting at position 826 of SEQ ID NO: 1241941
ugcagaugccucggacaua

SEQ ID NO: 1311553 - RNA, 19 nt, Artificial Sequence
  Description of Artificial Sequence: Synthetic oligonucleotide
  Antisense strand to SEQ ID NO: 1311552
uauguccgaggcaucugca

SEQ ID NO: 1311554 - RNA, 19 nt, Artificial Sequence
  Description of Artificial Sequence: Synthetic oligonucleotide
  Sense strand starting at position 1138 of SEQ ID NO: 1241941
cccagaaucugacucguuu

SEQ ID NO: 1311555 - RNA, 19 nt, Artificial Sequence
  Description of Artificial Sequence: Synthetic oligonucleotide
  Antisense strand to SEQ ID NO: 1311554
aaacgagucagauucuggg

SEQ ID NO: 1311556 - RNA, 19 nt, Artificial Sequence
  Description of Artificial Sequence: Synthetic oligonucleotide
  Sense strand starting at position 1335 of SEQ ID NO: 1241941
cuguuucucggaugaggga

SEQ ID NO: 1311557 - RNA, 19 nt, Artificial Sequence
  Description of Artificial Sequence: Synthetic oligonucleotide
  Antisense strand to SEQ ID NO: 1311556
ucccucauccgagaaacag

SEQ ID NO: 1311558 - RNA, 19 nt, Artificial Sequence
  Description of Artificial Sequence: Synthetic oligonucleotide
  Sense strand starting at position 1539 of SEQ ID NO: 1241941
cacagagguuucucagcau

SEQ ID NO: 1311559 - RNA, 19 nt, Artificial Sequence
  Description of Artificial Sequence: Synthetic oligonucleotide
  Antisense strand to SEQ ID NO: 1311558
augcugagaaaccucugug

SEQ ID NO: 1311560 - RNA, 19 nt, Artificial Sequence
  Description of Artificial Sequence: Synthetic oligonucleotide
  Sense strand starting at position 1573 of SEQ ID NO: 1241941
agcauaugcccugaugguu

SEQ ID NO: 1311561 - RNA, 19 nt, Artificial Sequence
  Description of Artificial Sequence: Synthetic oligonucleotide
  Antisense strand to SEQ ID NO: 1311560
aaccaucagggcauaugcu

SEQ ID NO: 1311562 - RNA, 19 nt, Artificial Sequence
  Description of Artificial Sequence: Synthetic oligonucleotide
  Sense strand starting at position 1775 of SEQ ID NO: 1241941
gggagucuucucuguggga

SEQ ID NO: 1311563 - RNA, 19 nt, Artificial Sequence
  Description of Artificial Sequence: Synthetic oligonucleotide
  Antisense strand to SEQ ID NO: 1311562
ucccacagagaagacuccc

SEQ ID NO: 1311564 - RNA, 19 nt, Artificial Sequence
  Description of Artificial Sequence: Synthetic oligonucleotide
  Sense strand starting at position 1777 of SEQ ID NO: 1241941
gagucuucucugugggaga

SEQ ID NO: 1311565 - RNA, 19 nt, Artificial Sequence
  Description of Artificial Sequence: Synthetic oligonucleotide
  Antisense strand to SEQ ID NO: 1311564
ucucccacagagaagacuc

SEQ ID NO: 1311566 - RNA, 19 nt, Artificial Sequence
  Description of Artificial Sequence: Synthetic oligonucleotide
  Sense strand starting at position 2376 of SEQ ID NO: 1241941
aaagacuuugcuggucuua

SEQ ID NO: 1311567 - RNA, 19 nt, Artificial Sequence
  Description of Artificial Sequence: Synthetic oligonucleotide
  Antisense strand to SEQ ID NO: 1311566
uaagaccagcaaagucuuu

SEQ ID NO: 1311568 - RNA, 19 nt, Artificial Sequence
  Description of Artificial Sequence: Synthetic oligonucleotide
  Sense strand starting at position 2564 of SEQ ID NO: 1241941
ugagaacaguucuuccuuu

SEQ ID NO: 1311569 - RNA, 19 nt, Artificial Sequence
  Description of Artificial Sequence: Synthetic oligonucleotide
  Antisense strand to SEQ ID NO: 1311568
aaaggaagaacuguucuca

SEQ ID NO: 1311570 - RNA, 19 nt, Artificial Sequence
  Description of Artificial Sequence: Synthetic oligonucleotide
  Sense strand starting at position 2657 of SEQ ID NO: 1241941
agacccugaugcucauaua

SEQ ID NO: 1311571 - RNA, 19 nt, Artificial Sequence
  Description of Artificial Sequence: Synthetic oligonucleotide
  Antisense strand to SEQ ID NO: 1311570
uauaugagcaucagggucu

SEQ ID NO: 1311572 - RNA, 19 nt, Artificial Sequence
  Description of Artificial Sequence: Synthetic oligonucleotide
  Sense strand starting at position 2675 of SEQ ID NO: 1241941
augugcaugcgugugagua

SEQ ID NO: 1311573 - RNA, 19 nt, Artificial Sequence
  Description of Artificial Sequence: Synthetic oligonucleotide
  Antisense strand to SEQ ID NO: 1311572
uacucacacgcaugcacau

SEQ ID NO: 1311574 - RNA, 19 nt, Artificial Sequence
  Description of Artificial Sequence: Synthetic oligonucleotide
  Sense strand starting at position 2693 of SEQ ID NO: 1241941
acgugucugccuucaggua

SEQ ID NO: 1311575 - RNA, 19 nt, Artificial Sequence
  Description of Artificial Sequence: Synthetic oligonucleotide
  Antisense strand to SEQ ID NO: 1311574
uaccugaaggcagacacgu

SEQ ID NO: 1311576 - RNA, 19 nt, Artificial Sequence
  Description of Artificial Sequence: Synthetic oligonucleotide
  Sense strand starting at position 2820 of SEQ ID NO: 1241941
gagguuaucuguuugcaca

SEQ ID NO: 1311577 - RNA, 19 nt, Artificial Sequence
  Description of Artificial Sequence: Synthetic oligonucleotide
  Antisense strand to SEQ ID NO: 1311576
ugugcaaacagauaaccuc

SEQ ID NO: 1311578 - RNA, 19 nt, Artificial Sequence
  Description of Artificial Sequence: Synthetic oligonucleotide
  Sense strand starting at position 2821 of SEQ ID NO: 1241941
agguuaucuguuugcacag

SEQ ID NO: 1311579 - RNA, 19 nt, Artificial Sequence
  Description of Artificial Sequence: Synthetic oligonucleotide
  Antisense strand to SEQ ID NO: 1311578
cugugcaaacagauaaccu

SEQ ID NO: 1311580 - RNA, 19 nt, Artificial Sequence
  Description of Artificial Sequence: Synthetic oligonucleotide
  Sense strand starting at position 2822 of SEQ ID NO: 1241941
gguuaucuguuugcacaga

SEQ ID NO: 1311581 - RNA, 19 nt, Artificial Sequence
  Description of Artificial Sequence: Synthetic oligonucleotide
  Antisense strand to SEQ ID NO: 1311580
ucugugcaaacagauaacc

SEQ ID NO: 1311582 - RNA, 19 nt, Artificial Sequence
  Description of Artificial Sequence: Synthetic oligonucleotide
  Sense strand starting at position 2838 of SEQ ID NO: 1241941
agacacugguucucuaauu

SEQ ID NO: 1311583 - RNA, 19 nt, Artificial Sequence
  Description of Artificial Sequence: Synthetic oligonucleotide
  Antisense strand to SEQ ID NO: 1311582
aauuagagaaccagugucu

SEQ ID NO: 1311584 - RNA, 19 nt, Artificial Sequence
  Description of Artificial Sequence: Synthetic oligonucleotide
  Sense strand starting at position 2963 of SEQ ID NO: 1241941
cccagaugagauugaugcu

SEQ ID NO: 1311585 - RNA, 19 nt, Artificial Sequence
  Description of Artificial Sequence: Synthetic oligonucleotide
  Antisense strand to SEQ ID NO: 1311584
agcaucaaucucaucuggg

SEQ ID NO: 1311586 - RNA, 19 nt, Artificial Sequence
  Description of Artificial Sequence: Synthetic oligonucleotide
  Sense strand starting at position 3002 of SEQ ID NO: 1241941
uugagauugacuggucaca

SEQ ID NO: 1311587 - RNA, 19 nt, Artificial Sequence
  Description of Artificial Sequence: Synthetic oligonucleotide
  Antisense strand to SEQ ID NO: 1311586
ugugaccagucaaucucaa

SEQ ID NO: 1311588 - RNA, 19 nt, Artificial Sequence
  Description of Artificial Sequence: Synthetic oligonucleotide
  Sense strand starting at position 3004 of SEQ ID NO: 1241941
gagauugacuggucacagu

SEQ ID NO: 1311589 - RNA, 19 nt, Artificial Sequence
  Description of Artificial Sequence: Synthetic oligonucleotide
  Antisense strand to SEQ ID NO: 1311588
acugugaccagucaaucuc

SEQ ID NO: 1311590 - RNA, 19 nt, Artificial Sequence
  Description of Artificial Sequence: Synthetic oligonucleotide
  Sense strand starting at position 3272 of SEQ ID NO: 1241941
agagauguauccuugcacu

SEQ ID NO: 1311591 - RNA, 19 nt, Artificial Sequence
  Description of Artificial Sequence: Synthetic oligonucleotide
  Antisense strand to SEQ ID NO: 1311590
agugcaaggauacaucucu

SEQ ID NO: 1311592 - RNA, 19 nt, Artificial Sequence
  Description of Artificial Sequence: Synthetic oligonucleotide
  Sense strand starting at position 3417 of SEQ ID NO: 1241941
guaugugugcguaagagcu

SEQ ID NO: 1311593 - RNA, 19 nt, Artificial Sequence
  Description of Artificial Sequence: Synthetic oligonucleotide
  Antisense strand to SEQ ID NO: 1311592
agcucuuacgcacacauac

SEQ ID NO: 1311594 - RNA, 19 nt, Artificial Sequence
  Description of Artificial Sequence: Synthetic oligonucleotide
  Sense strand starting at position 3445 of SEQ ID NO: 1241941
gagcauugccuuugacaag

SEQ ID NO: 1311595 - RNA, 19 nt, Artificial Sequence
  Description of Artificial Sequence: Synthetic oligonucleotide
  Antisense strand to SEQ ID NO: 1311594
cuugucaaaggcaaugcuc

SEQ ID NO: 1311596 - RNA, 19 nt, Artificial Sequence
  Description of Artificial Sequence: Synthetic oligonucleotide
  Sense strand starting at position 3451 of SEQ ID NO: 1241941
ugccuuugacaagauauac

SEQ ID NO: 1311597 - RNA, 19 nt, Artificial Sequence
  Description of Artificial Sequence: Synthetic oligonucleotide
  Antisense strand to SEQ ID NO: 1311596
guauaucuugucaaaggca

SEQ ID NO: 1311598 - RNA, 19 nt, Artificial Sequence
  Description of Artificial Sequence: Synthetic oligonucleotide
  Sense strand starting at position 2130 of SEQ ID NO: 1241943
gcaugaggucgucagggaa

SEQ ID NO: 1311599 - RNA, 19 nt, Artificial Sequence
  Description of Artificial Sequence: Synthetic oligonucleotide
  Antisense strand to SEQ ID NO: 1311598
uucccugacgaccucaugc

SEQ ID NO: 1311600 - RNA, 19 nt, Artificial Sequence
  Description of Artificial Sequence: Synthetic oligonucleotide
  Sense strand starting at position 40 of SEQ ID NO: 1241944
agcuaaaggccacaauuau

SEQ ID NO: 1311601 - RNA, 19 nt, Artificial Sequence
  Description of Artificial Sequence: Synthetic oligonucleotide
  Antisense strand to SEQ ID NO: 1311600
auaauuguggccuuuagcu

SEQ ID NO: 1311602 - RNA, 19 nt, Artificial Sequence
  Description of Artificial Sequence: Synthetic oligonucleotide
  Sense strand starting at position 49 of SEQ ID NO: 1241944
ccacaauuaugcuuuggga

SEQ ID NO: 1311603 - RNA, 19 nt, Artificial Sequence
  Description of Artificial Sequence: Synthetic oligonucleotide
  Antisense strand to SEQ ID NO: 1311602
ucccaaagcauaauugugg

SEQ ID NO: 1311604 - RNA, 19 nt, Artificial Sequence
  Description of Artificial Sequence: Synthetic oligonucleotide
  Sense strand starting at position 51 of SEQ ID NO: 1241944
acaauuaugcuuugggaag

SEQ ID NO: 1311605 - RNA, 19 nt, Artificial Sequence
  Description of Artificial Sequence: Synthetic oligonucleotide
  Antisense strand to SEQ ID NO: 1311604
cuucccaaagcauaauugu

SEQ ID NO: 1311606 - RNA, 19 nt, Artificial Sequence
  Description of Artificial Sequence: Synthetic oligonucleotide
  Sense strand starting at position 52 of SEQ ID NO: 1241944
caauuaugcuuugggaagc

SEQ ID NO: 1311607 - RNA, 19 nt, Artificial Sequence
  Description of Artificial Sequence: Synthetic oligonucleotide
  Antisense strand to SEQ ID NO: 1311606
gcuucccaaagcauaauug

SEQ ID NO: 1311608 - RNA, 19 nt, Artificial Sequence
  Description of Artificial Sequence: Synthetic oligonucleotide
  Sense strand starting at position 140 of SEQ ID NO: 1241944
ggccuugucggcuucucau

SEQ ID NO: 1311609 - RNA, 19 nt, Artificial Sequence
  Description of Artificial Sequence: Synthetic oligonucleotide
  Antisense strand to SEQ ID NO: 1311608
augagaagccgacaaggcc

SEQ ID NO: 1311610 - RNA, 19 nt, Artificial Sequence
  Description of Artificial Sequence: Synthetic oligonucleotide
  Sense strand starting at position 160 of SEQ ID NO: 1241944
ugcuguuccuggccagaga

SEQ ID NO: 1311611 - RNA, 19 nt, Artificial Sequence
  Description of Artificial Sequence: Synthetic oligonucleotide
  Antisense strand to SEQ ID NO: 1311610
ucucuggccaggaacagca

SEQ ID NO: 1311612 - RNA, 19 nt, Artificial Sequence
  Description of Artificial Sequence: Synthetic oligonucleotide
  Sense strand starting at position 161 of SEQ ID NO: 1241944
gcuguuccuggccagagaa

SEQ ID NO: 1311613 - RNA, 19 nt, Artificial Sequence
  Description of Artificial Sequence: Synthetic oligonucleotide
  Antisense strand to SEQ ID NO: 1311612
uucucuggccaggaacagc

SEQ ID NO: 1311614 - RNA, 19 nt, Artificial Sequence
  Description of Artificial Sequence: Synthetic oligonucleotide
  Sense strand starting at position 394 of SEQ ID NO: 1241944
gggccugguucaggcaauu

SEQ ID NO: 1311615 - RNA, 19 nt, Artificial Sequence
  Description of Artificial Sequence: Synthetic oligonucleotide
  Antisense strand to SEQ ID NO: 1311614
aauugccugaaccaggccc

SEQ ID NO: 1311616 - RNA, 19 nt, Artificial Sequence
  Description of Artificial Sequence: Synthetic oligonucleotide
  Sense strand starting at position 724 of SEQ ID NO: 1241944
ggaggagucaucugcggac

SEQ ID NO: 1311617 - RNA, 19 nt, Artificial Sequence
  Description of Artificial Sequence: Synthetic oligonucleotide
  Antisense strand to SEQ ID NO: 1311616
guccgcagaugacuccucc

SEQ ID NO: 1311618 - RNA, 19 nt, Artificial Sequence
  Description of Artificial Sequence: Synthetic oligonucleotide
  Sense strand starting at position 726 of SEQ ID NO: 1241944
aggagucaucugcggacua

SEQ ID NO: 1311619 - RNA, 19 nt, Artificial Sequence
  Description of Artificial Sequence: Synthetic oligonucleotide
  Antisense strand to SEQ ID NO: 1311618
uaguccgcagaugacuccu

SEQ ID NO: 1311620 - RNA, 19 nt, Artificial Sequence
  Description of Artificial Sequence: Synthetic oligonucleotide
  Sense strand starting at position 727 of SEQ ID NO: 1241944
ggagucaucugcggacuaa

SEQ ID NO: 1311621 - RNA, 19 nt, Artificial Sequence
  Description of Artificial Sequence: Synthetic oligonucleotide
  Antisense strand to SEQ ID NO: 1311620
uuaguccgcagaugacucc

SEQ ID NO: 1311622 - RNA, 19 nt, Artificial Sequence
  Description of Artificial Sequence: Synthetic oligonucleotide
  Sense strand starting at position 728 of SEQ ID NO: 1241944
gagucaucugcggacuaag

SEQ ID NO: 1311623 - RNA, 19 nt, Artificial Sequence
  Description of Artificial Sequence: Synthetic oligonucleotide
  Antisense strand to SEQ ID NO: 1311622
cuuaguccgcagaugacuc

SEQ ID NO: 1311624 - RNA, 19 nt, Artificial Sequence
  Description of Artificial Sequence: Synthetic oligonucleotide
  Sense strand starting at position 954 of SEQ ID NO: 1241944
gagaggucgcggcccgaua

SEQ ID NO: 1311625 - RNA, 19 nt, Artificial Sequence
  Description of Artificial Sequence: Synthetic oligonucleotide
  Antisense strand to SEQ ID NO: 1311624
uaucgggccgcgaccucuc

SEQ ID NO: 1311626 - RNA, 19 nt, Artificial Sequence
  Description of Artificial Sequence: Synthetic oligonucleotide
  Sense strand starting at position 2387 of SEQ ID NO: 1241944
guuucaaggcgugauuugu

SEQ ID NO: 1311627 - RNA, 19 nt, Artificial Sequence
  Description of Artificial Sequence: Synthetic oligonucleotide
  Antisense strand to SEQ ID NO: 1311626
acaaaucacgccuugaaac

SEQ ID NO: 1311628 - RNA, 19 nt, Artificial Sequence
  Description of Artificial Sequence: Synthetic oligonucleotide
  Sense strand starting at position 2448 of SEQ ID NO: 1241944
ggcuauccgaaguaaacaa

SEQ ID NO: 1311629 - RNA, 19 nt, Artificial Sequence
  Description of Artificial Sequence: Synthetic oligonucleotide
  Antisense strand to SEQ ID NO: 1311628
uuguuuacuucggauagcc

SEQ ID NO: 1311630 - RNA, 19 nt, Artificial Sequence
  Description of Artificial Sequence: Synthetic oligonucleotide
  Sense strand starting at position 3075 of SEQ ID NO: 1241944
ggccaucugagaugccauu

SEQ ID NO: 1311631 - RNA, 19 nt, Artificial Sequence
  Description of Artificial Sequence: Synthetic oligonucleotide
  Antisense strand to SEQ ID NO: 1311630
aauggcaucucagauggcc

SEQ ID NO: 1311632 - RNA, 19 nt, Artificial Sequence
  Description of Artificial Sequence: Synthetic oligonucleotide
  Sense strand starting at position 3202 of SEQ ID NO: 1241944
cacuuaguguugccugagu

SEQ ID NO: 1311633 - RNA, 19 nt, Artificial Sequence
  Description of Artificial Sequence: Synthetic oligonucleotide
  Antisense strand to SEQ ID NO: 1311632
acucaggcaacacuaagug

SEQ ID NO: 1311634 - RNA, 19 nt, Artificial Sequence
  Description of Artificial Sequence: Synthetic oligonucleotide
  Sense strand starting at position 3204 of SEQ ID NO: 1241944
cuuaguguugccugaguuu

SEQ ID NO: 1311635 - RNA, 19 nt, Artificial Sequence
  Description of Artificial Sequence: Synthetic oligonucleotide
  Antisense strand to SEQ ID NO: 1311634
aaacucaggcaacacuaag

SEQ ID NO: 1311636 - RNA, 19 nt, Artificial Sequence
  Description of Artificial Sequence: Synthetic oligonucleotide
  Sense strand starting at position 3215 of SEQ ID NO: 1241944
cugaguuuccauggcucca

SEQ ID NO: 1311637 - RNA, 19 nt, Artificial Sequence
  Description of Artificial Sequence: Synthetic oligonucleotide
  Antisense strand to SEQ ID NO: 1311636
uggagccauggaaacucag

SEQ ID NO: 1311638 - RNA, 19 nt, Artificial Sequence
  Description of Artificial Sequence: Synthetic oligonucleotide
  Sense strand starting at position 3220 of SEQ ID NO: 1241944
uuuccauggcuccaggaua

SEQ ID NO: 1311639 - RNA, 19 nt, Artificial Sequence
  Description of Artificial Sequence: Synthetic oligonucleotide
  Antisense strand to SEQ ID NO: 1311638
uauccuggagccauggaaa

SEQ ID NO: 1311640 - RNA, 19 nt, Artificial Sequence
  Description of Artificial Sequence: Synthetic oligonucleotide
  Sense strand starting at position 3234 of SEQ ID NO: 1241944
ggauacuagcccugaggga

SEQ ID NO: 1311641 - RNA, 19 nt, Artificial Sequence
  Description of Artificial Sequence: Synthetic oligonucleotide
  Antisense strand to SEQ ID NO: 1311640
ucccucagggcuaguaucc

SEQ ID NO: 1311642 - RNA, 19 nt, Artificial Sequence
  Description of Artificial Sequence: Synthetic oligonucleotide
  Sense strand starting at position 3251 of SEQ ID NO: 1241944
gauggauguucucagagaa

SEQ ID NO: 1311643 - RNA, 19 nt, Artificial Sequence
  Description of Artificial Sequence: Synthetic oligonucleotide
  Antisense strand to SEQ ID NO: 1311642
uucucugagaacauccauc

SEQ ID NO: 1311644 - RNA, 19 nt, Artificial Sequence
  Description of Artificial Sequence: Synthetic oligonucleotide
  Sense strand starting at position 3281 of SEQ ID NO: 1241944
cgggauggauguucucaga

SEQ ID NO: 1311645 - RNA, 19 nt, Artificial Sequence
  Description of Artificial Sequence: Synthetic oligonucleotide
  Antisense strand to SEQ ID NO: 1311644
ucugagaacauccaucccg

SEQ ID NO: 1311646 - RNA, 19 nt, Artificial Sequence
  Description of Artificial Sequence: Synthetic oligonucleotide
  Sense strand starting at position 3489 of SEQ ID NO: 1241944
aggccauccugccugagau

SEQ ID NO: 1311647 - RNA, 19 nt, Artificial Sequence
  Description of Artificial Sequence: Synthetic oligonucleotide
  Antisense strand to SEQ ID NO: 1311646
aucucaggcaggauggccu

SEQ ID NO: 1311648 - RNA, 19 nt, Artificial Sequence
  Description of Artificial Sequence: Synthetic oligonucleotide
  Sense strand starting at position 3490 of SEQ ID NO: 1241944
ggccauccugccugagauu

SEQ ID NO: 1311649 - RNA, 19 nt, Artificial Sequence
  Description of Artificial Sequence: Synthetic oligonucleotide
  Antisense strand to SEQ ID NO: 1311648
aaucucaggcaggauggcc

SEQ ID NO: 1311650 - RNA, 19 nt, Artificial Sequence
  Description of Artificial Sequence: Synthetic oligonucleotide
  Sense strand starting at position 3501 of SEQ ID NO: 1241944
cugagauucuacccuuaga

SEQ ID NO: 1311651 - RNA, 19 nt, Artificial Sequence
  Description of Artificial Sequence: Synthetic oligonucleotide
  Antisense strand to SEQ ID NO: 1311650
ucuaaggguagaaucucag

SEQ ID NO: 1311652 - RNA, 19 nt, Artificial Sequence
  Description of Artificial Sequence: Synthetic oligonucleotide
  Sense strand starting at position 3504 of SEQ ID NO: 1241944
agauucuacccuuagagcu

SEQ ID NO: 1311653 - RNA, 19 nt, Artificial Sequence
  Description of Artificial Sequence: Synthetic oligonucleotide
  Antisense strand to SEQ ID NO: 1311652
agcucuaaggguagaaucu

SEQ ID NO: 1311654 - RNA, 19 nt, Artificial Sequence
  Description of Artificial Sequence: Synthetic oligonucleotide
  Sense strand starting at position 3575 of SEQ ID NO: 1241944
ccaggugagguuuggguaa

SEQ ID NO: 1311655 - RNA, 19 nt, Artificial Sequence
  Description of Artificial Sequence: Synthetic oligonucleotide
  Antisense strand to SEQ ID NO: 1311654
uuacccaaaccucaccugg

SEQ ID NO: 1311656 - RNA, 19 nt, Artificial Sequence
  Description of Artificial Sequence: Synthetic oligonucleotide
  Sense strand starting at position 3577 of SEQ ID NO: 1241944
aggugagguuuggguaacu

SEQ ID NO: 1311657 - RNA, 19 nt, Artificial Sequence
  Description of Artificial Sequence: Synthetic oligonucleotide
  Antisense strand to SEQ ID NO: 1311656
aguuacccaaaccucaccu

SEQ ID NO: 1311658 - RNA, 19 nt, Artificial Sequence
  Description of Artificial Sequence: Synthetic oligonucleotide
  Sense strand starting at position 3685 of SEQ ID NO: 1241944
ggaguugaggucuguagca

SEQ ID NO: 1311659 - RNA, 19 nt, Artificial Sequence
  Description of Artificial Sequence: Synthetic oligonucleotide
  Antisense strand to SEQ ID NO: 1311658
ugcuacagaccucaacucc

SEQ ID NO: 1311660 - RNA, 19 nt, Artificial Sequence
  Description of Artificial Sequence: Synthetic oligonucleotide
  Sense strand starting at position 3687 of SEQ ID NO: 1241944
aguugaggucuguagcaua

SEQ ID NO: 1311661 - RNA, 19 nt, Artificial Sequence
  Description of Artificial Sequence: Synthetic oligonucleotide
  Antisense strand to SEQ ID NO: 1311660
uaugcuacagaccucaacu

SEQ ID NO: 1311662 - RNA, 19 nt, Artificial Sequence
  Description of Artificial Sequence: Synthetic oligonucleotide
  Sense strand starting at position 3865 of SEQ ID NO: 1241944
guucuauuguccuuacugu

SEQ ID NO: 1311663 - RNA, 19 nt, Artificial Sequence
  Description of Artificial Sequence: Synthetic oligonucleotide
  Antisense strand to SEQ ID NO: 1311662
acaguaaggacaauagaac

SEQ ID NO: 1311664 - RNA, 19 nt, Artificial Sequence
  Description of Artificial Sequence: Synthetic oligonucleotide
  Sense strand starting at position 304 of SEQ ID NO: 1241945
auucucugguccucauuau

SEQ ID NO: 1311665 - RNA, 19 nt, Artificial Sequence
  Description of Artificial Sequence: Synthetic oligonucleotide
  Antisense strand to SEQ ID NO: 1311664
auaaugaggaccagagaau

SEQ ID NO: 1311666 - RNA, 19 nt, Artificial Sequence
  Description of Artificial Sequence: Synthetic oligonucleotide
  Sense strand starting at position 305 of SEQ ID NO: 1241945
uucucugguccucauuauu

SEQ ID NO: 1311667 - RNA, 19 nt, Artificial Sequence
  Description of Artificial Sequence: Synthetic oligonucleotide
  Antisense strand to SEQ ID NO: 1311666
aauaaugaggaccagagaa

SEQ ID NO: 1311668 - RNA, 19 nt, Artificial Sequence
  Description of Artificial Sequence: Synthetic oligonucleotide
  Sense strand starting at position 308 of SEQ ID NO: 1241945
ucugguccucauuauugaa

SEQ ID NO: 1311669 - RNA, 19 nt, Artificial Sequence
  Description of Artificial Sequence: Synthetic oligonucleotide
  Antisense strand to SEQ ID NO: 1311668
uucaauaaugaggaccaga

SEQ ID NO: 1311670 - RNA, 19 nt, Artificial Sequence
  Description of Artificial Sequence: Synthetic oligonucleotide
  Sense strand starting at position 385 of SEQ ID NO: 1241945
cuuccaacauuugggaaua

SEQ ID NO: 1311671 - RNA, 19 nt, Artificial Sequence
  Description of Artificial Sequence: Synthetic oligonucleotide
  Antisense strand to SEQ ID NO: 1311670
uauucccaaauguuggaag

SEQ ID NO: 1311672 - RNA, 19 nt, Artificial Sequence
  Description of Artificial Sequence: Synthetic oligonucleotide
  Sense strand starting at position 398 of SEQ ID NO: 1241945
ggaauacccugggaucauu

SEQ ID NO: 1311673 - RNA, 19 nt, Artificial Sequence
  Description of Artificial Sequence: Synthetic oligonucleotide
  Antisense strand to SEQ ID NO: 1311672
aaugaucccaggguauucc

SEQ ID NO: 1311674 - RNA, 19 nt, Artificial Sequence
  Description of Artificial Sequence: Synthetic oligonucleotide
  Sense strand starting at position 466 of SEQ ID NO: 1241945
aggagagcuuguucagagu

SEQ ID NO: 1311675 - RNA, 19 nt, Artificial Sequence
  Description of Artificial Sequence: Synthetic oligonucleotide
  Antisense strand to SEQ ID NO: 1311674
acucugaacaagcucuccu

SEQ ID NO: 1311676 - RNA, 19 nt, Artificial Sequence
  Description of Artificial Sequence: Synthetic oligonucleotide
  Sense strand starting at position 601 of SEQ ID NO: 1241945
aguguaucuacaggagaug

SEQ ID NO: 1311677 - RNA, 19 nt, Artificial Sequence
  Description of Artificial Sequence: Synthetic oligonucleotide
  Antisense strand to SEQ ID NO: 1311676
caucuccuguagauacacu

SEQ ID NO: 1311678 - RNA, 19 nt, Artificial Sequence
  Description of Artificial Sequence: Synthetic oligonucleotide
  Sense strand starting at position 756 of SEQ ID NO: 1241945
gcugauacucacugagguu

SEQ ID NO: 1311679 - RNA, 19 nt, Artificial Sequence
  Description of Artificial Sequence: Synthetic oligonucleotide
  Antisense strand to SEQ ID NO: 1311678
aaccucagugaguaucagc

SEQ ID NO: 1311680 - RNA, 19 nt, Artificial Sequence
  Description of Artificial Sequence: Synthetic oligonucleotide
  Sense strand starting at position 1698 of SEQ ID NO: 1241945
uccugucucgccuacauau

SEQ ID NO: 1311681 - RNA, 19 nt, Artificial Sequence
  Description of Artificial Sequence: Synthetic oligonucleotide
  Antisense strand to SEQ ID NO: 1311680
auauguaggcgagacagga

SEQ ID NO: 1311682 - RNA, 19 nt, Artificial Sequence
  Description of Artificial Sequence: Synthetic oligonucleotide
  Sense strand starting at position 1794 of SEQ ID NO: 1241945
gguccuugggaguagaagu

SEQ ID NO: 1311683 - RNA, 19 nt, Artificial Sequence
  Description of Artificial Sequence: Synthetic oligonucleotide
  Antisense strand to SEQ ID NO: 1311682
acuucuacucccaaggacc

SEQ ID NO: 1311684 - RNA, 19 nt, Artificial Sequence
  Description of Artificial Sequence: Synthetic oligonucleotide
  Sense strand starting at position 1804 of SEQ ID NO: 1241945
aguagaagugcccaguaca

SEQ ID NO: 1311685 - RNA, 19 nt, Artificial Sequence
  Description of Artificial Sequence: Synthetic oligonucleotide
  Antisense strand to SEQ ID NO: 1311684
uguacugggcacuucuacu
